(19) United States
(12) Patent Application Publication
(10) Pub. No.: US 2024/0131133 A1
(43) Pub. Date: Apr. 25, 2024

(54) COMPOSITIONS AND METHODS FOR OPTIMIZED KRAS PEPTIDE VACCINES

(71) Applicant: Think Therapeutics, Inc., Newton, MA (US)

(72) Inventors: David Kenneth GIFFORD, Newton, MA (US); Brandon CARTER, Cambridge, MA (US)

(21) Appl. No.: 18/045,309

(22) Filed: Oct. 10, 2022

(51) Int. Cl. A61K 39/00

(52) U.S. Cl. CPC A61K 39/001164; A61K 2039/53

(57) ABSTRACT

Described herein is a composition comprising nucleic acid sequences encoding at least two amino acid sequences selected from the group consisting of SEQ ID NOs: 1 to 247. Also described herein is a composition comprising nucleic acid sequences encoding at least two amino acid sequences selected from the group consisting of SEQ ID NOs: 6936 to 6994. Also described herein is a composition comprising nucleic acid sequences encoding at least two amino acid sequences selected from the group consisting of SEQ ID NOs: 12271 to 12396. Also described herein is a composition comprising nucleic acid sequences encoding at least two amino acid sequences selected from the group consisting of SEQ ID NOs: 49712 to 49814.

[0001] This patent disclosure contains material that is subject to copyright protection. The copyright owner has no objection to the facsimile reproduction of the patent document or the patent disclosure as it appears in the U.S. Patent and Trademark Office patent file or records, but otherwise reserves any and all copyright rights.

### INCORPORATION BY REFERENCE

[0002] All patents, patent applications and publications cited herein are hereby incorporated by reference in their entirety. The disclosures of these publications in their entireties are hereby incorporated by reference into this application. Documents incorporated by reference into this text, or any teachings therein, can be used in the practice of the present invention. Documents incorporated by reference into this text are not admitted to be prior art.

### SEQUENCE LISTING

[0003] The instant application contains a Sequence Listing which has been submitted electronically in XML format and is hereby incorporated by reference in its entirety. The XML copy, created on Oct. 6, 2022, is named 2215269 00131US1 Sequence Listing as Filed.xml and is 87,261,169 bytes in size.

### TECHNICAL FIELD

[0004] The present invention relates generally to compositions, systems, and methods of peptide vaccines. More particularly, the present invention relates to compositions, systems, and methods of designing peptide vaccines to treat or prevent disease optimized based on predicted population immunogenicity.

### BACKGROUND

[0005] The goal of a peptide vaccine is to train the immune system to recognize and expand its capacity to engage cells that display target peptides to improve the immune response to cancerous cells or pathogens. A peptide vaccine can also be administered to someone who is already diseased to increase their immune response to a causal cancer, other diseases, or pathogen. Alternatively, a peptide vaccine can be administered to induce the immune system to have therapeutic tolerance to one or more peptides. There exists a need for compositions, systems, and methods of peptide vaccines based on prediction of the target peptides that will be displayed to protect a host from cancer, other disease, or pathogen infection.

### SUMMARY OF THE INVENTION

[0006] In one aspect, the invention provides for nucleic acid sequences encoding one or more amino acid sequences selected from the group consisting of SEQ ID NOs: 1 to 247, SEQ ID NOs: 6936 to 6994, SEQ ID NOs: 12271 to 12396, SEQ ID NOs: 49712 to 49814, and SEQ ID NOs: 77044 to 77057.

[0007] In some embodiments, the nucleic acid sequences encode two or more amino acid sequences selected from the group consisting of SEQ ID NOs: 1 to 247, SEQ ID NOs: 6936 to 6994, SEQ ID NOs: 12271 to 12396, SEQ ID NOs: 49712 to 49814, and SEQ ID NOs: 77044 to 77057.

[0008] In another aspect, the invention provides for a composition comprising nucleic acid sequences encoding one or more amino acid sequences selected from the group consisting of SEQ ID NOs: 1 to 247, SEQ ID NOs: 6936 to 6994, SEQ ID NOs: 12271 to 12396, SEQ ID NOs: 49712 to 49814, and SEQ ID NOs: 77044 to 77057.

[0009] In some embodiments, the composition is administered to a subject. In some embodiments, the composition comprises nucleic acid sequences encoding two or more amino acid sequences selected from the group consisting of SEQ ID NOs: 1 to 247, SEQ ID NOs: 6936 to 6994, SEQ ID NOs: 12271 to 12396, SEQ ID NOs: 49712 to 49814, and SEQ ID NOs: 77044 to 77057. In some embodiments, the nucleic acid sequences are administered in a construct for expression in vivo. In some embodiments, the in vivo administration of the nucleic acid sequences are configured to produce one or more peptides that is displayed by an HLA molecule. In some embodiments, the one or more peptides is a modified or unmodified fragment of a mutated protein selected from the group consisting of KRAS. In some embodiments, the one or more peptides is a modified or unmodified fragment of a protein, wherein the protein comprises a mutation selected from the group consisting of KRAS G12C, KRAS G12D, KRAS G12R, KRAS G12V, and KRAS G13D. In some embodiments, the composition is administered in an effective amount to a subject to prevent cancer. In some embodiments, the composition is administered in an effective amount to a subject to treat cancer. In some embodiments, the cancer is selected from the group consisting of pancreas, colon, rectum, kidney, bronchus, lung, uterus, cervix, bladder, liver, stomach, brain, breast, ovary, thyroid, and skin. In some embodiments, the composition comprises nucleic acid sequences encoding at least three amino acid sequences selected from the group consisting of SEQ ID NOs: 1 to 247, SEQ ID NOs: 6936 to 6994, SEQ ID NOs: 12271 to 12396, SEQ ID NOs: 49712 to 49814, and SEQ ID NOs: 77044 to 77057.

[0010] In another aspect, the invention provides for a peptide composition comprising one or more peptides selected from the group consisting of SEQ ID NOs: 1 to 247, SEQ ID NOs: 6936 to 6994, SEQ ID NOs: 12271 to 12396, SEQ ID NOs: 49712 to 49814, and SEQ ID NOs: 77044 to 77057.

[0011] In some embodiments, the peptide composition comprises two or more peptides selected from the group consisting of SEQ ID NOs: 1 to 247, SEQ ID NOs: 6936 to 6994, SEQ ID NOs: 12271 to 12396, SEQ ID NOs: 49712 to 49814, and SEQ ID NOs: 77044 to 77057.

[0012] In another aspect, the invention provides for a composition comprising nucleic acid sequences encoding one or more amino acid sequences selected from the group consisting of SEQ ID NOs: 1 to 247, SEQ ID NOs: 6936 to 6994, SEQ ID NOs: 12271 to 12396, SEQ ID NOs: 49712 to 49814, and SEQ ID NOs: 77044 to 77057.

[0013] In some embodiments, the composition comprises nucleic acid sequences encoding one or more amino acid sequences derived from a KRAS protein mutation. In some embodiments, the composition comprises nucleic acid sequences encoding two or more amino acid sequences selected from the group consisting of SEQ ID NOs: 1 to 247, SEQ ID NOs: 6936 to 6994, SEQ ID NOs: 12271 to 12396, SEQ ID NOs: 49712 to 49814, and SEQ ID NOs: 77044 to 77057.

[0014] In another aspect, the invention provides for a peptide composition comprising one or more peptides selected from the group consisting of SEQ ID NOs: 1 to 247, SEQ ID NOs: 6936 to 6994, SEQ ID NOs: 12271 to 12396, SEQ ID NOs: 49712 to 49814, and SEQ ID NOs: 77044 to 77057.

[0015] In some embodiments, the peptide composition comprises two or more peptides selected from the group consisting of SEQ ID NOs: 1 to 247, SEQ ID NOs: 6936 to 6994, SEQ ID NOs: 12271 to 12396, SEQ ID NOs: 49712 to 49814, and SEQ ID NOs: 77044 to 77057. In some embodiments, the one or more peptides is a modified or unmodified fragment of a mutated KRAS protein.

[0016] In another aspect, the invention provides for a composition comprising nucleic acid sequences encoding one or more amino acid sequences selected from the group consisting of SEQ ID NOs: 1 to 247.

[0017] In some embodiments, the composition comprises nucleic acid sequences encoding one or more amino acid sequences derived from a KRAS G12C protein mutation. In some embodiments, the composition comprises nucleic acid sequences encoding two or more amino acid sequences selected from the group consisting of SEQ ID NOs: 1 to 247.

[0018] In another aspect, the invention provides for a peptide composition comprising one or more peptides selected from the group consisting of SEQ ID NOs: 1 to 247.

[0019] In some embodiments, the peptide composition comprises two or more peptides selected from the group consisting of SEQ ID NOs: 1 to 247. In some embodiments, the peptide composition comprises a peptide derived from a KRAS G12C protein mutation.

[0020] In another aspect, the invention provides for a composition comprising nucleic acid sequences encoding one or more amino acid sequences selected from the group consisting of SEQ ID NOs: 6936 to 6994.

[0021] In some embodiments, the composition comprises nucleic acid sequences encoding one or more amino acid sequences derived from a KRAS G12D protein mutation. In some embodiments, the composition comprises nucleic acid sequences encoding two or more amino acid sequences selected from the group consisting of SEQ ID NOs: 6936 to 6994.

[0022] In another aspect, the invention provides for a peptide composition comprising one or more peptides selected from the group consisting of SEQ ID NOs: 6936 to 6994.

[0023] In some embodiments, the peptide composition comprises two or more peptides selected from the group consisting of SEQ ID NOs: 6936 to 6994. In some embodiments, the peptide composition comprises a peptide derived from a KRAS G12D protein mutation.

[0024] In another aspect, the invention provides for a composition comprising nucleic acid sequences encoding one or more amino acid sequences selected from the group consisting of SEQ ID NOs: 12271 to 12396.

[0025] In some embodiments, the composition comprises nucleic acid sequences encoding one or more amino acid sequences derived from a KRAS G12R protein mutation. In some embodiments, the composition comprises nucleic acid sequences encoding two or more amino acid sequences selected from the group consisting of SEQ ID NOs: 12271 to 12396.

[0026] In another aspect, the invention provides for a peptide composition comprising one or more peptides selected from the group consisting of SEQ ID NOs: 12271 to 12396.

[0027] In some embodiments, the peptide composition comprises two or more peptides selected from the group consisting of SEQ ID NOs: 12271 to 12396. In some embodiments, the peptide composition comprises a peptide derived from a KRAS G12R protein mutation.

[0028] In another aspect, the invention provides for a composition comprising nucleic acid sequences encoding one or more amino acid sequences selected from the group consisting of SEQ ID NOs: 49712 to 49814.

[0029] In some embodiments, the composition comprises nucleic acid sequences encoding one or more amino acid sequences derived from a KRAS G12V protein mutation. In some embodiments, the composition comprises nucleic acid sequences encoding two or more amino acid sequences selected from the group consisting of SEQ ID NOs: 49712 to 49814.

[0030] In another aspect, the invention provides for a peptide composition comprising one or more peptides selected from the group consisting of SEQ ID NOs: 49712 to 49814.

[0031] In some embodiments, the peptide composition comprises two or more peptides selected from the group consisting of SEQ ID NOs: 49712 to 49814. In some embodiments, the peptide composition comprises a peptide derived from a KRAS G12V protein mutation.

[0032] In another aspect, the invention provides for a composition comprising nucleic acid sequences encoding one or more amino acid sequences selected from the group consisting of SEQ ID NOs: 77044 to 77057.

[0033] In some embodiments, the composition comprises nucleic acid sequences encoding one or more amino acid sequences derived from a KRAS G13D protein mutation. In some embodiments, the composition comprises nucleic acid sequences encoding two or more amino acid sequences selected from the group consisting of SEQ ID NOs: 77044 to 77057.

[0034] In another aspect, the invention provides for a peptide composition comprising one or more peptides selected from the group consisting of SEQ ID NOs: 77044 to 77057.

[0035] In some embodiments, the peptide composition comprises two or more peptides selected from the group consisting of SEQ ID NOs: 77044 to 77057. In some embodiments, the peptide composition comprises a peptide derived from a KRAS G13D protein mutation.

[0036] In another aspect, the invention provides for nucleic acid sequences encoding one or more amino acid sequences selected from the group consisting of SEQ ID NOs: 1 to 99249.

[0037] In some embodiments, the nucleic acid sequences encode two or more amino acid sequences selected from the group consisting of SEQ ID NOs: 1 to 99249.

[0038] In another aspect, the invention provides for a composition comprising nucleic acid sequences encoding one or more amino acid sequences selected from the group consisting of SEQ ID NOs: 1 to 99249.

[0039] In some embodiments, the composition is administered to a subject. In some embodiments, the composition comprises nucleic acid sequences encoding two or more amino acid sequences selected from the group consisting of SEQ ID NOs: 1 to 99249. In some embodiments, the nucleic acid sequences are administered in a construct for expression in vivo. In some embodiments, the in vivo administration of the nucleic acid sequences are configured to produce one or more peptides that is displayed by an HLA molecule. In some embodiments, the one or more peptides is a modified or unmodified fragment of a mutated protein selected from the group consisting of KRAS. In some embodiments, the one or more peptides is a modified or unmodified fragment of a protein, wherein the protein comprises a mutation selected from the group consisting of KRAS G12C, KRAS G12D, KRAS G12R, KRAS G12V, and KRAS G13D. In some embodiments, the composition is administered in an effective amount to a subject to prevent cancer. In some embodiments, the composition is administered in an effective amount to a subject to treat cancer. In some embodiments, the cancer is selected from the group consisting of pancreas, colon, rectum, kidney, bronchus, lung, uterus, cervix, bladder, liver, stomach, brain, breast, ovary, thyroid, and skin. In some embodiments, the composition comprises nucleic acid sequences encoding at least three amino acid sequences selected from the group consisting of SEQ ID NOs: 1 to 99249.

[0040] In another aspect, the invention provides for a peptide composition comprising one or more peptides selected from the group consisting of SEQ ID NOs: 1 to 99249.

[0041] In some embodiments, the peptide composition comprises two or more peptides selected from the group consisting of SEQ ID NOs: 1 to 99249.

[0042] In another aspect, the invention provides for a composition comprising nucleic acid sequences encoding one or more amino acid sequences selected from the group consisting of SEQ ID NOs: 1 to 99249.

[0043] In some embodiments, the composition comprises nucleic acid sequences encoding one or more amino acid sequences derived from a KRAS protein mutation. In some embodiments, the composition comprises nucleic acid sequences encoding two or more amino acid sequences selected from the group consisting of SEQ ID NOs: 1 to 99249.

[0044] In another aspect, the invention provides for a peptide composition comprising one or more peptides selected from the group consisting of SEQ ID NOs: 1 to 99249.

[0045] In some embodiments, the peptide composition comprises two or more peptides selected from the group consisting of SEQ ID NOs: 1 to 99249. In some embodiments, the one or more peptides is a modified or unmodified fragment of a mutated KRAS protein.

[0046] In another aspect, the invention provides for a composition comprising nucleic acid sequences encoding one or more amino acid sequences selected from the group consisting of SEQ ID NOs: 1 to 6935.

[0047] In some embodiments, the composition comprises nucleic acid sequences encoding one or more amino acid sequences derived from a KRAS G12C protein mutation. In some embodiments, the composition comprises nucleic acid sequences encoding two or more amino acid sequences selected from the group consisting of SEQ ID NOs: 1 to 6935.

[0048] In another aspect, the invention provides for a peptide composition comprising one or more peptides selected from the group consisting of SEQ ID NOs: 1 to 6935.

[0049] In some embodiments, the peptide composition comprises two or more peptides selected from the group consisting of SEQ ID NOs: 1 to 6935. In some embodiments, the peptide composition comprises a peptide derived from a KRAS G12C protein mutation.

[0050] In another aspect, the invention provides for a composition comprising nucleic acid sequences encoding one or more amino acid sequences selected from the group consisting of SEQ ID NOs: 6936 to 12270.

[0051] In some embodiments, the composition comprises nucleic acid sequences encoding one or more amino acid sequences derived from a KRAS G12D protein mutation. In some embodiments, the composition comprises nucleic acid sequences encoding two or more amino acid sequences selected from the group consisting of SEQ ID NOs: 6936 to 12270.

[0052] In another aspect, the invention provides for a peptide composition comprising one or more peptides selected from the group consisting of SEQ ID NOs: 6936 to 12270.

[0053] In some embodiments, the peptide composition comprises two or more peptides selected from the group consisting of SEQ ID NOs: 6936 to 12270. In some embodiments, the peptide composition comprises a peptide derived from a KRAS G12D protein mutation.

[0054] In another aspect, the invention provides for a composition comprising nucleic acid sequences encoding one or more amino acid sequences selected from the group consisting of SEQ ID NOs: 12271 to 49711.

[0055] In some embodiments, the composition comprises nucleic acid sequences encoding one or more amino acid sequences derived from a KRAS G12R protein mutation. In some embodiments, the composition comprises nucleic acid sequences encoding two or more amino acid sequences selected from the group consisting of SEQ ID NOs: 12271 to 49711.

[0056] In another aspect, the invention provides for a peptide composition comprising one or more peptides selected from the group consisting of SEQ ID NOs: 12271 to 49711.

[0057] In some embodiments, the peptide composition comprises two or more peptides selected from the group consisting of SEQ ID NOs: 12271 to 49711. In some embodiments, the peptide composition comprises a peptide derived from a KRAS G12R protein mutation.

[0058] In another aspect, the invention provides for a composition comprising nucleic acid sequences encoding one or more amino acid sequences selected from the group consisting of SEQ ID NOs: 49712 to 77043.

[0059] In some embodiments, the composition comprises nucleic acid sequences encoding one or more amino acid sequences derived from a KRAS G12V protein mutation. In some embodiments, the composition comprises nucleic acid sequences encoding two or more amino acid sequences selected from the group consisting of SEQ ID NOs: 49712 to 77043.

[0060] In another aspect, the invention provides for a peptide composition comprising one or more peptides selected from the group consisting of SEQ ID NOs: 49712 to 77043.

[0061] In some embodiments, the peptide composition comprises two or more peptides selected from the group consisting of SEQ ID NOs: 49712 to 77043. In some embodiments, the peptide composition comprises a peptide derived from a KRAS G12V protein mutation.

[0062] In another aspect, the invention provides for a composition comprising nucleic acid sequences encoding one or more amino acid sequences selected from the group consisting of SEQ ID NOs: 77044 to 99249.

[0063] In some embodiments, the composition comprises nucleic acid sequences encoding one or more amino acid sequences derived from a KRAS G13D protein mutation. In some embodiments, the composition comprises nucleic acid sequences encoding two or more amino acid sequences selected from the group consisting of SEQ ID NOs: 77044 to 99249.

[0064] In another aspect, the invention provides for a peptide composition comprising one or more peptides selected from the group consisting of SEQ ID NOs: 77044 to 99249.

[0065] In some embodiments, the peptide composition comprises two or more peptides selected from the group consisting of SEQ ID NOs: 77044 to 99249. In some embodiments, the peptide composition comprises a peptide derived from a KRAS G13D protein mutation.

[0066] In some embodiments, the compositions, including peptide compositions, of the invention are immunogenic compositions. To this end, the invention provides for a method of inducing an immunogenic response in a subject comprising administering to the subject a composition of the invention.

[0067] In some embodiments, compositions, including peptide compositions, of the invention are vaccines.

### BRIEF DESCRIPTION OF THE DRAWINGS

[0068] The following figures depict illustrative embodiments of the invention.

[0069] FIG. 1 is a flow chart of a vaccine optimization method.

[0070] FIG. 2 is a flow chart of a vaccine optimization method with seed set compression.

### DETAILED DESCRIPTION

[0071] The practice of the embodiments disclosed herein can employ, unless otherwise indicated, conventional techniques of genetics, molecular biology, protein chemistry, computational biology, and formulation science.

[0072] All references cited in this disclosure are hereby incorporated by reference in their entireties. In addition, any manufacturers' instructions or catalogues for any products cited or mentioned herein are incorporated by reference. Documents incorporated by reference into this text, or any teachings therein, can be used in the practice of the present invention. Documents incorporated by reference into this text are not admitted to be prior art.

### Definitions

[0073] The following are definitions of terms used in the present specification. The initial definition provided for a group or term herein applies to that group or term throughout the present specification individually or as part of another group, unless otherwise indicated. Unless otherwise defined, all technical and scientific terms used herein have the same meaning as commonly understood by one of ordinary skill in the art.

[0074] The term “a” or “an” means at least one, unless clearly indicated otherwise. Unless otherwise indicated, the terms “at least” or “about” preceding a series of elements is to be understood to refer to every element in the series. The term “about” preceding a numerical value includes ±10% of the recited value. For example, a concentration of about 1 mg/mL includes 0.9 mg/mL to 1.1 mg/mL. Likewise, a concentration range of about 1% to 10% (w/v) includes 0.9% (w/v) to 11% (w/v).

[0075] Furthermore, “and/or” is to be taken as specific disclosure of each of the two specified features or components with or without the other. Thus, the term “and/or” as used in a phrase such as “A and/or B” is intended to include A and B, A or B, A (alone), and B (alone). Likewise, the term “and/or” as used in a phrase such as “A, B, and/or C” is intended to include A, B, and C; A, B, or C; A or B; A or C; B or C; A and B; A and C; B and C; A (alone); B (alone); and C (alone).

[0076] Units, prefixes, and symbols are denoted in their Système International d′Unités (SI) accepted form. Numeric ranges are inclusive of the numbers defining the range, and any individual value provided herein can serve as an endpoint for a range that includes other individual values provided herein. For example, a set of values such as 1, 2, 3, 8, 9, and 10 is also a disclosure of a range of numbers from 1-10, from 1-8, from 3-9, and so forth. Likewise, a disclosed range is a disclosure of each individual value (i.e., intermediate) encompassed by the range, including integers and fractions. For example, a stated range of 5-10 is also a disclosure of 5, 6, 7, 8, 9, and 10 individually, and of 5.2, 7.5, 8.7, and so forth.

[0077] The term “nucleic acid” as used herein, in its broadest sense, refers to any compound and/or substance that is or can be incorporated into an oligonucleotide chain. In some embodiments, a nucleic acid is a compound and/or substance that is or can be incorporated into an oligonucleotide chain via a phosphodiester linkage. As will be clear from context, in some embodiments, “nucleic acid” refers to an individual nucleic acid residue (e.g., a nucleotide and/or nucleoside); in some embodiments, “nucleic acid” refers to an oligonucleotide chain comprising individual nucleic acid residues. In some embodiments, a “nucleic acid” is or comprises RNA; in some embodiments, a “nucleic acid” is or comprises DNA. In some embodiments, a nucleic acid is, comprises, or consists of one or more natural nucleic acid residues. In some embodiments, a nucleic acid is, comprises, or consists of one or more nucleic acid analogs. In some embodiments, a nucleic acid analog differs from a nucleic acid in that it does not utilize a phosphodiester backbone.

[0078] The term “peptide” means a polymer of amino acids of any length. The polymer can be linear or branched, can comprise modified amino acids, and can be interrupted by non-amino acids. Except where indicated otherwise, e.g., for the abbreviations for the uncommon or unnatural amino acids set forth herein, the three-letter and one-letter abbreviations, as used in the art, are used herein to represent amino acid residues. Groups or strings of amino acid abbreviations are used to represent peptides. Except where specifically indicated, peptides are indicated with the N-terminus of the left and the sequence is written from the N-terminus to the C-terminus.

[0079] The term “composition” is meant to encompass, and is not limited to, pharmaceutical compositions and nutraceutical compositions, such as a vaccine, containing drug substance (e.g., nucleic acids or peptides). The composition may also contain one or more “excipients” that are inactive ingredients or compounds devoid of pharmacological activity or other direct effect in the diagnosis, cure, mitigation, treatment, or prevention of disease or to affect the structure or any function of a human.

[0080] The terms “immunogenic composition,” and “immunogenic peptide composition,” means a composition that can induce an immune response in a subject, unless clearly indicated otherwise.

[0081] The term “vaccine,” “vaccine composition,” or “peptide vaccine,” in some embodiments, means a composition that can generate acquired immunity against a pathogen or disease in a subject. In some embodiments, the acquired immunity does not prevent the disease in the subject but reduces its severity. In some embodiments, vaccines promote immune system tolerance for one or more proteins.

[0082] The term “therapeutically effective amount” or “effective amount” refers to any amount that is necessary or sufficient for achieving or promoting a desired outcome. In some instances, an effective amount is a therapeutically effective amount. A therapeutically effective amount is any amount that is necessary or sufficient for promoting or achieving a desired biological response in a subject. The effective amount for any particular application can vary depending on such factors as the disease or condition being treated, the particular agent being administered, the size of the subject, or the severity of the disease or condition. One of ordinary skill in the art can empirically determine the effective amount of a particular agent without necessitating undue experimentation.

[0083] The terms “subject” and “patient” are used interchangeably herein. The terms “subject” and “subjects” refer to an animal, preferably a mammal including a nonprimate and a primate (e.g., a monkey such as a cynomolgus monkey, a chimpanzee, and a human), and more preferably a human. The term “animal” also includes, but is not limited to, companion animals such as cats and dogs; zoo animals; wild animals; farm or sport animals such as ruminants, non-ruminants, livestock and fowl (e.g., horses, cattle, sheep, pigs, turkeys, ducks, and chickens); and laboratory animals, such as rodents (e.g., mice, rats), rabbits; and guinea pigs, as well as animals that are cloned or modified, either genetically or otherwise (e.g., transgenic animals). In some embodiments, the term “subject” or “patient” refers to human.

[0084] The terms “identity” or “percent identity” as used herein refer to the overall relatedness between polymeric molecules, e.g., between nucleic acid molecules (e.g., DNA molecules and/or RNA molecules) and/or between polypeptide molecules.

[0085] The terms “treating,” “treatment,” and “therapy” as used herein refer to the attempted reduction or amelioration of the progression, severity and/or duration of a disorder, or the attempted amelioration of one or more symptoms thereof resulting from the administration of one or more modalities (e.g., one or more vaccines or therapeutic agents such as a composition described herein). In some embodiments, a subject is successfully “treated” for a disease or disorder if the patient shows total, partial, or transient alleviation or elimination of at least one symptom or measurable physical parameter associated with the disease or disorder.

[0086] As used herein, the terms “prevent,” “preventing”, “prevention”, “alleviate”, or “alleviating” refer to the prevention, inhibition, or lessening of the recurrence, onset, or development of a disorder or a symptom thereof in a subject resulting from the administration of a therapy (e.g., a vaccine), or the administration of a combination of therapies (e.g., a combination of vaccine(s) and/or therapeutic agents).

### Composition/Vaccine Design Considerations

[0087] In some embodiments, the disclosure provides for compositions (e.g., vaccines) that incorporate peptide sequences that will be displayed by Major Histocompatibility Complex (MEW) molecules on cells and train the immune system to recognize cancer or pathogen diseased cells. The terms MEW and HLA are used interchangeably herein to denote Major Histocompatibility Complex molecules without restriction to species. In some embodiments, the disclosure provides for compositions (e.g., vaccines) that incorporate peptide sequences that will be displayed by MHC molecules on cells to induce therapeutic tolerance in antigen-specific immunotherapy for autoimmune diseases (Alhadj Ali et al., 2017, Gibson, et al., 2015). In some embodiments, a composition (e.g., a vaccine) comprises one or more peptides. In some embodiments, a composition (e.g., a vaccine) includes an mRNA or DNA construct administered for expression in vivo that encodes for one or more peptides.

[0088] The vaccine compositions and methods described herein are applicable for designing and preparing a broad range of compositions including immunogenic compositions.

[0089] The term peptide-HLA binding is defined to be the binding of a peptide to an HLA allele, and can either be computationally predicted, experimentally observed, or computationally predicted using experimental observations. The metric or score of peptide-HLA binding can be expressed as affinity (for example, based on the equilibrium dissociation constant (K_{D}), measured in molar units (M)), percentile rank, binary at a predetermined threshold, probability, rate of disassociation, or other metrics as are known in the art. The term peptide display or peptide-HLA display describes the binding of a peptide to an HLA allele on the surface of a cell. Peptide binding to an HLA allele is required for peptide display by that HLA allele. The metric or score of peptide-HLA display can be expressed as affinity (for example, based on the equilibrium dissociation constant (K_{D}), measured in molar units (M)), percentile rank, binary at a predetermined threshold, probability, or other metrics as are known in the art. In some embodiments, metrics of peptide-HLA binding are used for metrics of peptide-HLA display since peptide-HLA display depends upon peptide-HLA binding.

[0090] The term peptide-HLA immunogenicity metric is defined as the activation of T cells based upon their recognition of a peptide when bound by an HLA allele. The term peptide-HLA immunogenicity score is another term for a peptide-HLA immunogenicity metric, and the terms are interchangeable. A peptide-HLA immunogenicity metric can vary from individual to individual, and the metric for peptide-HLA immunogenicity can be expressed as a probability, a binary indicator, or other metric that relates to the likelihood that a peptide-HLA combination will be immunogenic. In some embodiments, peptide-HLA immunogenicity is defined as the induction of immune tolerance based upon the recognition of a peptide when bound by an HLA allele. A peptide-HLA immunogenicity metric can be computationally predicted, experimentally observed, or computationally predicted using experimental observations. In some embodiments, a peptide-HLA immunogenicity metric is based only upon peptide-HLA binding, since peptide-HLA binding is necessary for peptide-HLA immunogenicity. In some embodiments, peptide-HLA immunogenicity data or computational predictions of peptide-HLA immunogenicity can be included and combined with scores for peptide binding or peptide display in the methods disclosed herein. One way of combining the scores is using immunogenicity data for peptides assayed for immunogenicity in diseased or vaccinated individuals and assigning peptides to the HLA allele that displayed them in the individual by choosing the HLA allele that computational methods predict has the highest likelihood of display. For peptides that are not experimentally assayed, computational predictions of binding can be used. In some embodiments, different computational methods of predicting peptide-HLA immunogenicity or peptide-HLA binding can be combined (Liu et al., 2020b). For a given set of peptides and a set of HLA alleles, the term peptide-HLA hits is the number of unique combinations of peptides and HLA alleles that exhibit peptide-HLA immunogenicity or binding at a predetermined threshold. For example, a peptide-HLA hit of 2 can mean that one peptide is predicted to be bound (or trigger T cell activation) by two different HLA alleles, two peptides are predicted to be bound (or trigger T cell activation) by two different HLA alleles, or two peptides are predicted to be bound (or trigger T cell activation) by the same HLA allele. For a given set of peptides and HLA frequencies, HLA haplotype frequencies, or HLA diplotype frequencies, the expected number of peptide-HLA hits is the average number of peptide-HLA hits in each set of HLAs that represent an individual, weighted by their frequency of occurrence.

[0091] Peptide display by an MEW molecule is necessary, but not sufficient, for a peptide to be immunogenic and cause the recognition of the resulting peptide-MHC complex by an individual's T cells to trigger T cell activation, expansion, and immune memory. In some embodiments, ELISPOT (Slota et al., 2011) or the Multiplex Identification of Antigen-Specific T Cell Receptors Using a Combination of Immune Assays and Immune Receptor Sequencing (MIRA) assay (Klinger et al., 2015) are used to score peptide display or affinity (e.g., a peptide immunogenicity that requires peptide binding) by an MHC molecule (e.g., HLA allele, measured as a peptide-HLA binding score). In some embodiments, experimental data from assays such as the ELISPOT (Slota et al., 2011) or the MIRA assay can be used to produce a peptide-HLA immunogenicity metric with respect to a peptide and an HLA allele in a given experimental context or individual. In some embodiments, experimental data from assays such as the ELISPOT (Slota et al., 2011) or the MIRA assay can be combined with machine learning based predictions for scoring peptide display by an MHC molecule or peptide binding (e.g., binding affinity) by an MHC molecule (e.g., HLA allele, measured as a peptide-HLA binding score) for determining a peptide-HLA immunogenicity metric. In some embodiments, the MHCflurry or NetMHCpan (Reynisson et al., 2020) computational methods are used to predict MHC class I display of a peptide by an HLA allele. In some embodiments, the NetMHCIIpan computational method (Reynisson et al., 2020) is used to predict MHC class II display of a peptide by an HLA allele (see Table 1).

[0092] In some embodiments, computational methods such as MHCflurry (O'Donnell et al., 2018, O'Donnell et al., 2020, incorporated by reference in their entireties herein), NetMHCpan (Reynisson et al., 2020, incorporated by reference in its entirety herein), and NetMHCIIpan (Reynisson et al., 2020) are used to predict either MHC class I (MHCflurry, NetMHCpan) or class II (NetMHCIIpan) display of peptides by an HLA allele. In other embodiments, other methods of determining peptide-HLA binding are used as disclosed in International Publication No. WO 2005/042698, incorporated by reference in its entirety herein. NetMHCpan-4.1 and NetMHCIIpan-4.0 utilize the NNAlign_MA algorithm (Alvarez et at., 2019, incorporated by reference in its entirety herein) for predicting peptide-HLA binding. NNAlign_MA is in turn based upon the NNAlign (Nielsen et al., 2009, Nielsen et al., 2017, incorporated by reference in their entireties herein) neural network. NetMHCpan-4.1 (Reynisson et al., 2020) uses NNAlign_MA networks with at least 180 one-hot encoded inputs that describe the peptide sequence (9 residues×20 possible amino acids per residue=180 inputs). Networks with both 56 and 66 hidden neurons and two outputs are utilized (Alvarez et at., 2019). One output produces a binding affinity data type, and the other output produces a mass spectrometry based eluted ligand data type (Alvarez et al., 2019). In some embodiments, the binding affinity data type is used as a peptide-HLA binding metric. In some embodiments, the binding affinity data type is used as a peptide-HLA display metric. In some embodiments, the eluted ligand data type output is used as a peptide-HLA binding metric. In some embodiments, the eluted ligand data type output is used as a peptide-HLA display metric. In some embodiments, the binding affinity data type is used as a peptide-HLA immunogenicity metric. In some embodiments, the eluted ligand data type is used as a peptide-HLA immunogenicity metric. Each network architecture (56 or 66 hidden neurons) is trained with 5 different random parameter initializations and 5-fold cross-validation resulting in a total of 50 individual trained networks (2 architectures×5 initializations×5 cross-validation). These 50 trained networks are used as an ensemble with 25 networks having at least 10,800 parameters (180 inputs×56 neurons) and 25 networks consist of at least 11,880 parameters (180 inputs×66 neurons). Thus, the ensemble of 50 networks in NetMHCpan-4.1 consists of at least 567,000 parameters that must be evaluated with at least 567,000 arithmetic operations for computing peptide-MHC binding. NetMHCIIpan-4.1 (Reynisson et al., 2020) uses NNAlign_MA networks with at least 180 inputs that describe the peptide sequence (9×20=180 inputs). Networks with 2, 10, 20, 40, and 60 hidden neurons and two outputs are utilized (Alvarez et al., 2019). Each network architecture (2, 10, 20, 40, or 60 hidden neurons) is trained with 10 different random parameter initializations and 5-fold cross-validation resulting in a total of 250 individual trained networks (5 architectures×10 initializations×5 cross-validation). These 250 trained networks are used as an ensemble with 50 networks having at least 360 parameters (180 inputs×2 neurons), 50 networks having at least 1800 parameters (180 inputs×10 neurons), 50 networks having at least 3600 parameters (180 inputs×20 neurons), 50 networks having at least 7200 parameters (180 inputs×40 neurons), and 50 networks having at least 10,800 parameters (180 inputs×60 neurons). Thus, the ensemble of 250 networks in NetMHCIIpan-4.0 consists of at least 1,188,000 parameters that must be evaluated with at least 1,188,000 arithmetic operations for computing peptide-MHC binding.

[0093] In some embodiments, computational methods used to predict either MHC class I (e.g. MHCflurry, NetMHCpan) or class II (e.g. NetMHCIIpan) peptide-HLA binding scores or peptide-HLA immunogenicity metrics are based upon data from experimental mass spectrometry observations of peptides bound by MHC molecules. In some embodiments, computational methods used to predict either MHC class I (e.g., MHCflurry, NetMHCpan) or class II (e.g., NetMHCIIpan) peptide-HLA binding scores or peptide-HLA immunogenicity metrics are based upon data from experimental observations of peptide-MHC binding affinity. In some embodiments, experimental observations of peptide-MHC binding affinity or immunogenicity, including mass spectrometry measurements of peptide-HLA binding and measurements of T cell activation, can be found in databases such as the Immune Epitope Database (IEDB) (Vita et al., 2018). The output of MHCflurry 2.0 (O′Donnell et al., 2020, incorporated by reference in its entirety herein) is based upon 493,473 mass spectrometry measurements of peptide-HLA binding, and 219,596 affinity measurements of peptide-HLA binding. The output of NetMHCpan-4.1 (Reynisson et al., 2020) is based upon 665,492 mass spectrometry measurements of peptide-HLA binding, and 52,402 affinity measurements of peptide-HLA binding. The output of NetMHCIIpan-4.0 (Reynisson et al., 2020) is based upon 381,066 mass spectrometry measurements of peptide-HLA binding, and 44,861 affinity measurements of peptide-HLA binding.

[0094] A peptide is displayed by an MHC molecule when it binds within the groove of the MEW molecule and is transported to the cell surface where it can be recognized by a T cell receptor. A target peptide refers to a foreign peptide or a self-peptide. In some embodiments, a peptide that is part of the normal proteome in a healthy individual is a self-peptide, and a peptide that is not part of the normal proteome is a foreign peptide. In some embodiments, target peptides can be part of the normal proteome that exhibit aberrant expression (e.g., cancer-testis antigens such as NY-ESO-1). Foreign peptides can be generated by mutations in normal self-proteins in tumor cells that create epitopes called neoantigens, or by pathogenic infections. In some embodiments, a neoantigen is any subsequence of a human protein, where the subsequence contains one or more altered amino acids or protein modifications that do not appear in a healthy individual. Therefore, in this disclosure, foreign peptide refers to an amino acid sequence encoding a fragment of a target protein/peptide (or a full-length protein/peptide), the target protein/peptide consisting of a neoantigen protein, a pathogen proteome, or any other undesired protein that is non-self and is expected to be bound and displayed by an HLA allele.

[0095] Protein genes identified by their UniProt ID that are frequently mutated in cancer include RASK_HUMAN (also called KRAS), AKT1_HUMAN, BRAF_HUMAN, CTNB1_HUMAN (also called CTNNB1), EGFR_HUMAN, GTF21_HUMAN, RASH_HUMAN (also called HRAS), IDHC_HUMAN (also called IDH1), RASN_HUMAN (also called NRAS), PIK3CA_HUMAN, PTEN_HUMAN, and P53_HUMAN (also called TP53). We describe a missense mutation in a protein by the one letter amino acid code for the wild type amino acid, the amino acid position of the mutation, and the one letter amino acid code that is present in the mutated protein. For example, KRAS G12D is a mutation in the KRAS protein of position 12 from glycine to aspartic acid (G12D). Proteins may contain multiple mutations at different positions. Herein we may refer to a gene without the “_HUMAN” suffix for conciseness.

[0096] KRAS gene mutations are the most frequently mutated oncogenes in cancer, but they have been very difficult to treat with small molecule therapeutics. The KRAS protein is part of a signaling pathway that controls cellular growth and point mutations in the protein can cause constitutive pathway activation and uncontrolled cell growth. Single amino acid KRAS mutations result in minor changes in protein structure, making it difficult to engineer small molecule drugs that recognize a mutant specific binding pocket and inactivate KRAS signaling. KRAS oncogenic mutations include the mutation of position 12 from glycine to aspartic acid (G12D), glycine to valine (G12V), glycine to arginine (G12R), or glycine to cystine (G12C); or the mutation of position 13 from glycine to aspartic acid (G13D). The corresponding foreign peptides contain these mutations. KRAS is a member of the RAS family of genes that also includes HRAS and NRAS. KRAS, HRAS, and NRAS have identical sequences from residue 1 to residue 86. Thus, all of the vaccines and associated peptide sequences described herein for a mutation in one RAS family member can be used for the identical mutation in any other RAS family member (e.g., a KRAS G12D vaccine is also a vaccine for HRAS G12D).

[0097] Certain self-proteins, such as cancer-testis antigens, are present in cancerous cells at aberrantly high levels and thus can be targets for vaccination to induce an intolerant T cell response against cells displaying peptides derived from these self-proteins on WIC molecules. Examples of these cancer related proteins by their UniProt IDs include CTG1B_HUMAN (also known as NY-ESO-1), MAGA1_HUMAN, MAGA3_HUMAN, MAGA4_HUMAN, MAGC1_HUMAN, MAGC3_HUMAN, SSX2_HUMAN, PRAME_HUMAN, KKLC1_HUMAN (also known as CT83), PMEL_HUMAN (as known as gp100), TYRP1_HUMAN (also known as gp75), TYRP2_HUMAN (also known as DCT), and MAR1_HUMAN.

[0098] Autoimmune disorders are caused by the loss of self-tolerance by the immune system to self-proteins and are involved in autoimmune disorders such as diabetes, multiple sclerosis, and autoimmune encephalomyelitis. Induction of tolerance for autoimmune related self-peptides can be accomplished by antigen-specific tolerization using the delivery of vaccine antigens with a tolerization protocol. An example of a protocol for the induction of tolerance with a lipid-nanoparticle (LNP) encapsulating mRNA (mRNA-LNP) vaccine is described by Krienke et al., 2021 and is incorporated by reference in its entirety herein. Examples of autoimmune disease related proteins include UniProt IDs INS_HUMAN (also known as insulin), and MOG_HUMAN (also known as Myelin-oligodendrocyte glycoprotein). Individuals with diabetes can suffer from a lack of tolerance to INS_HUMAN, and individuals with multiple sclerosis or autoimmune encephalomyelitis can suffer from a lack of tolerance to MOG_HUMAN.

[0099] A challenge for the design of peptide vaccines is the diversity of human MHC alleles (HLA alleles) that each have specific preferences for the peptide sequences they will display. The Human Leukocyte Antigen (HLA) loci, located within the MHC, encode the HLA class I and class II molecules. There are three classical class I loci (HLA-A, HLA-B, and HLA-C) and three loci that encode class II molecules (HLA-DR, HLA-DQ, and HLA-DP). An individual's HLA type describes the alleles they carry at each of these loci. Peptides of length of between about 8 and about 11 residues can bind to HLA class I (or MHC class I) molecules whereas those peptides of length of between about 13 and about 25 residues bind to HLA class II (or MHC class II) molecules (Rist et al., 2013; Chicz et al., 1992). Human populations that originate from different geographies have differing frequencies of HLA alleles, and these populations exhibit linkage disequilibrium between HLA loci that result in population specific haplotype frequencies. In some embodiments, methods are disclosed for creating effective vaccines that include consideration of the HLA allelic frequency in the target population, as well as linkage disequilibrium between HLA genes to achieve a set of peptides that is likely to be robustly displayed.

[0100] The present disclosure provides for compositions, systems, and methods of vaccine designs that produce immunity to single or multiple targets. In some embodiments, a target is a neoantigen protein sequence, a pathogen proteome, or any other undesired protein sequence that is non-self and is expected to be bound and displayed by an HLA molecule (also referred to herein as an HLA allele). When a target is present in an individual, it may result in multiple peptide sequences that are displayed by a variety of HLA alleles. In some embodiments, it may be desirable to create a vaccine that includes selected self-peptides, and thus these selected self-peptides are considered to be the target peptides for this purpose.

[0101] Because immunogenicity may vary from individual to individual, one method to increase the probability of vaccine efficacy is to use a diverse set of target peptides (e.g., at least two peptides) to increase the chances that some subset of them will be immunogenic in a given individual. Prior research using mouse models has shown that most MHC displayed peptides are immunogenic, but immunogenicity varies from individual to individual as described in Croft et al., (2019). In some embodiments, experimental peptide-HLA immunogenicity data are used to determine which target peptides and their modifications will be effective immunogens in a vaccine.

[0102] Considerations for the design of peptide vaccines are outlined in Liu et al., Cell Systems 11, Issue 2, p. 131-146 (Liu et al., 2020a) and Liu et al., Cell Systems 12, Issue 1, p. 102-107 (Liu et al., 2020b) and U.S. Pat. Nos. 11,058,751 and 11,161,892, which are incorporated by reference in their entireties herein.

[0103] Certain target peptides may not bind with high affinity to a wide range of HLA molecules. To increase the binding of target peptides to HLA molecules, their amino acid composition can be altered to change one or more anchor residues or other residues. In some embodiments, to increase the immunogenicity of a target peptide when displayed by HLA molecules, a target peptide's amino acid composition can be altered to change one or more residues. Anchor residues are amino acids that interact with an HLA molecule and have the largest influence on the affinity of a peptide for an HLA molecule. Peptides with one or more altered amino acid residues are called heteroclitic peptides. In some embodiments, heteroclitic peptides include target peptides with residue modifications at anchor positions. In some embodiments, heteroclitic peptides include target peptides with residue modifications at non-anchor positions. In some embodiments, heteroclitic peptides include target peptides with residue modifications that include unnatural amino acids and amino acid derivatives. Modifications to create heteroclitic peptides can improve the binding of peptides to both MHC class I and MHC class II molecules, and the modifications required can be both peptide and MHC class specific. Since peptide anchor residues face the MHC molecule groove, they are less visible than other peptide residues to T cell receptors. Thus, heteroclitic peptides with anchor residue modifications have been observed to induce a T cell response where the stimulated T cells also respond to unmodified peptides. It has been observed that the use of heteroclitic peptides in a vaccine can improve a vaccine's effectiveness (Zirlik et al., 2006). In some embodiments, the immunogenicity of heteroclitic peptides are experimentally determined and their ability to activate T cells that also recognize the corresponding base (also called seed) peptide of the heteroclitic peptide is determined, as is known in the art (Houghton et al., 2007). In some embodiments, these assays of the immunogenicity and cross-reactivity of heteroclitic peptides are performed when the heteroclitic peptides are displayed by specific HLA alleles.

### Peptide Vaccines to Induce Immunity to One or More Targets

[0104] In some embodiments, a method is provided for formulating peptide vaccines using a single vaccine design for one or more targets. In some embodiments, a single target is a foreign protein with a specific mutation (e.g., KRAS G12D). In some embodiments, a single target is a self-protein (e.g., a protein that is overexpressed in tumor cells such as cancer/testis antigens). In some embodiments, a single target is a pathogen protein (e.g., a protein contained in a viral proteome). In some embodiments, multiple targets can be used (e.g., both KRAS G12D and KRAS G13D).

[0105] In some embodiments, the method includes extracting peptides to construct a candidate set from all target proteome sequences (e.g., entire KRAS G12D protein) as described in Liu et al., (2020a).

[0106] FIGS. 1 and 2 depict flow charts for example vaccine design methods that can be used for MHC class I or MHC class II vaccine design. A Candidate Peptide Set (see FIGS. 1 and 2) is comprised of target peptides extracted by windowing an input protein sequence. In some embodiments, extracted target peptides are of amino acid length of between about 8 and about 10 (e.g., for MHC class I binding (Rist et al., 2013)). In some embodiments, the extracted target peptides presented by MHC class I molecules are longer than 10 amino acid residues, such as 11 residues (Trolle et al., 2016). In some embodiments, extracted target peptides are of length between about 13 and about 25 (e.g., for class II binding (Chicz et al., 1992)). In some embodiments, sliding windows of various size ranges described herein are used over the entire proteome. In some embodiments, other target peptide lengths for MHC class I and class II sliding windows can be utilized. In some embodiments, computational predictions of proteasomal cleavage are used to filter or select peptides in the candidate set. One computational method for predicting proteasomal cleavage is described by Nielsen et al., (2005). In some embodiments, peptide mutation rates, glycosylation, cleavage sites, or other criteria can be used to filter peptides as described in Liu et al., (2020a). In some embodiments, peptides can be filtered based upon evolutionary sequence variation above a predetermined threshold. Evolutionary sequence variation can be computed with respect to other species, other pathogens, other pathogen strains, or other related organisms. In some embodiments, a first peptide set is the candidate set.

[0107] As shown in FIGS. 1-2, in some embodiments, the next step of the method includes scoring the target peptides in the candidate set for peptide-HLA binding to all considered HLA alleles as described in Liu et al., (2020a) and Liu et al., (2020b). In some embodiments, a first peptide set is the candidate set after scoring the target peptides. Scoring can be accomplished for human HLA molecules, mouse H-2 molecules, swine SLA molecules, or MHC molecules of any species for which prediction algorithms are available or can be developed. Thus, vaccines targeted at non-human species can be designed with the method. Scoring metrics can include the affinity for a target peptide to an HLA allele in nanomolar, eluted ligand, presentation, and other scores that can be expressed as percentile rank or any other metric. The candidate set may be further filtered to exclude peptides whose predicted binding cores do not contain a particular pathogenic or neoantigen target residue of interest or whose predicted binding cores contain the target residue in an anchor position. The candidate set may also be filtered for target peptides of specific lengths, such as length 9 for MHC class I, for example. In some embodiments, scoring of target peptides is accomplished with experimental data or a combination of experimental data and computational prediction methods. When computational models are unavailable to make peptide-HLA binding predictions for particular (peptide, HLA) pairs, the binding value for such pairs can be defined by the mean, median, minimum, or maximum immunogenicity value taken over supported pairs, a fixed value (such as an indication of no binding), or inferred using other techniques, including a function of the prediction of the most similar (peptide, HLA) pair available in the scoring model.

[0108] In some embodiments, a base set (also referred to as seed set herein) is constructed by selecting peptides from the scored candidate set using individual peptide-HLA binding or immunogenicity criteria (e.g., first peptide set) (FIG. 1). In some embodiments, since a given peptide has multiple peptide-HLA scores, the selection can be based on the peptide-HLA binding score or peptide-HLA immunogenicity metric with the best affinity or highest immunogenicity (e.g., predicted to bind the strongest or activate T cells the most for a given HLA allele). The criteria used for scoring peptide-HLA binding during the scoring procedure can accommodate different goals during the base set selection and vaccine design phases. For example, a target peptide with peptide-HLA binding affinities of 500 nM may be displayed by an individual that is diseased, but at a lower frequency than a target peptide with a 50 nM peptide-HLA binding affinity. During the combinatorial design phase of a vaccine, a more constrained affinity criteria may be used (e.g., when selecting a third peptide set, the Vaccine for Target(s) in FIGS. 1 and 2), such a 50 nM, to increase the probability that a vaccine peptide will be found and displayed by HLA molecules. In some embodiments, a relatively less constrained threshold (e.g., less than about 1000 nM or less than about 500 nM) of peptide-HLA immunogenicity or peptide-HLA binding is used as a first threshold for filtering candidate peptide-HLA scores (the first Peptide Scoring and Score Filtering step in FIGS. 1 and 2) and a relatively more constrained second threshold (e.g., less than about 50 nM) is used for filtering expanded set peptide-HLA scores (the second Peptide Filtering and Scoring step in FIGS. 1 and 2) for their scores for specific HLA alleles. In some embodiments, specific peptide-HLA scores are not used for modified peptides for a given HLA for vaccine design when their unmodified counterpart peptide does not pass the first less constrained threshold. Filtering of peptide-HLA scores can occur for any relevant metric (binding affinity, probability of binding, probability of immunogenicity, etc.). This filtering of peptide-HLA scores is based on the observation that peptides that are not immunogenic enough for vaccine inclusion may be antigenic (meet the first filtering threshold) and thus recognized by T cell clonotypes expanded by a vaccine. A peptide is antigenic when it is recognized by a T cell receptor and results in a response such as CD8+ T cell cytotoxicity or CD4+ cell activation. Derivatives of an antigenic peptide may be strongly immunogenic, included in a vaccine, and thus activate and expand T cells that recognize the antigenic peptide. The expansion of T cells that recognize an unmodified antigenic peptide can provide an immune response that contributes to disease control. In some embodiments, at the first Peptide Scoring and Score Filtering step in FIGS. 1 and 2 the first less constrained threshold for admitting a peptide-HLA score for a peptide for an HLA allele is determined by the best peptide-HLA score of the peptide's heteroclitic derivatives for the same HLA. In some embodiments, the probability threshold for binding or immunogenicity for a first threshold for a peptide-HLA score may be lower for an HLA allele when the probability of immunogenicity or binding for the peptide's best derivative is higher for the same HLA. In some embodiments, the product (or other function) of a peptide's peptide-HLA binding or immunogenicity probability score and the peptide-HLA binding or immunogenicity probability score for its best derivative peptide for the same HLA allele are required to meet a specified threshold (e.g., 0.5, 0.6, 0.7, 0.8, or 0.9). In some embodiments, peptides are scored for third peptide set (Vaccine for Target(s) in FIGS. 1 and 2) potential inclusion that have peptide-HLA binding affinities less than about 500 nM. In some embodiments, peptides are selected for the base set that have peptide-HLA binding affinities less than about 1000 nM for at least one HLA allele. Alternatively, predictions of peptide-HLA immunogenicity can be used to qualify target peptides for base set inclusion. In some embodiments, experimental observations of the immunogenicity of peptides in the context of their display by HLA alleles or experimental observation of the binding of peptides to HLA alleles can be used to score peptides for binding to HLA alleles or peptide-HLA immunogenicity.

[0109] In some embodiments, experimental observations of the display of peptides by specific HLA alleles in tumor cells can be used to score peptides for peptide-HLA binding or peptide-HLA immunogenicity. In some embodiments, experimental observations of the display of peptides tumor cells by a specific HLA allele can be used to score peptides for peptide-HLA binding or peptide-HLA immunogenicity for that HLA allele. In some embodiments, experimental observations of the display of peptides tumor cells can be used to score peptides for peptide-HLA binding or peptide-HLA immunogenicity, with the HLA allele(s) for a specific observed peptide selected from the HLA alleles present in the tumor that meet a predicted peptide-HLA binding or immunogenicity threshold. In some embodiments, mass spectrometry is used to experimentally determine the display of peptides by tumor cells as described by Bear et al., (2021) or Wang et al., (2019) and these data are used to score for peptide-HLA binding or peptide-HLA immunogenicity. In some embodiments, mass spectrometry is used to experimentally determine the display of peptides by tumor cells, and these experimental data are used to qualify the inclusion of base set (seed set) peptides for one or more HLA alleles for a vaccine. In some embodiments, mass spectrometry is used to experimentally determine the display of a peptide by tumor cells, and these experimental data are used to exclude peptide-HLA binding scores or peptide-HLA immunogenicity scores for the peptide when the peptide is not observed to be displayed by an HLA allele by mass spectrometry. In some embodiments, mass spectrometry is used to experimentally determine the display of peptides by tumor cells in an individual, and these experimental data are used to qualify the inclusion of base set (seed set) peptides for that individual for one or more HLA alleles. In some embodiments, mass spectrometry is used to experimentally determine the display of a peptide by tumor cells in an individual, and these experimental data are used to exclude peptide-HLA binding scores or peptide-HLA immunogenicity scores for the peptide when the peptide is not observed to be displayed by an HLA allele by mass spectrometry. In some embodiments, computational predictions of the immunogenicity of a peptide in the context of display by HLA alleles can used for scoring such as the methods of Ogishi et al., (2019) or Bulik-Sullivan et al., (2019).

[0110] In some embodiments, a peptide-HLA score or a peptide-HLA immunogenicity score for a first peptide in the base set (seed set) for a given HLA allele is eliminated and not considered during vaccine design if the wild-type peptide corresponding to the first peptide (e.g., the unmutated naturally occurring form for the peptide or a peptide in the respective species within a defined sequence edit distance) has a peptide-HLA score or a peptide-HLA immunogenicity score for the same HLA allele within a defined threshold. The threshold can be based upon the difference of the scores of the first peptide and the wild-type peptide, the ratio of the scores of the first peptide and the wild-type peptide, the score of the wild-type peptide, or other metrics. The defined threshold can be either greater than or less than a specified value. In some embodiments, the threshold is defined so that the wild-type peptide is not predicted to be presented. In some embodiments, when a peptide-HLA score or peptide-HLA immunogenicity score is eliminated for a first peptide during vaccine design, then peptide-HLA scores or peptide-HLA immunogenicity scores for all of its derivatives (e.g., heteroclitic peptide derivatives) for the same HLA allele are also eliminated and not considered during vaccine design.

[0111] In some embodiments, the method further includes running the OptiVax-Robust algorithm as described in Liu et al., (2020a) using the HLA haplotype frequencies of a population on the scored candidate set to construct a base set (also referred to as seed set herein) of target peptides (FIG. 2). In some embodiments, HLA diplotype frequencies can be provided to OptiVax. OptiVax-Robust includes algorithms to eliminate peptide redundancy that arises from the sliding window approach with varying window sizes, but other redundancy elimination measures can be used to enforce minimum edit distance constraints between target peptides in the candidate set. The size of the seed set is determined by a point of diminishing returns of population coverage as a function of the number of target peptides in the seed set. Other criteria can also be used, including a minimum number of vaccine target peptides, maximum number of vaccine target peptides, and desired predicted population coverage. In some embodiments, a predetermined population coverage is less than about 0.4, between about 0.4 and 0.5, between about 0.5 and 0.6, between about 0.6 and 0.7, between about 0.7 and 0.8, between about 0.8 and 0.9, or greater than about 0.9. Another possible criterion is a minimum number of expected peptide-HLA binding hits in each individual. In alternate embodiments, the method further includes running the OptiVax-Unlinked algorithm as described in Liu et al., (2020a) instead of OptiVax-Robust.

[0112] The OptiVax-Robust method uses binary predictions of peptide-HLA immunogenicity, and these binary predictions can be generated as described in Liu et al., (2020b). The OptiVax-Unlinked method uses the probability of target peptide binding to HLA alleles and can be generated as described in Liu et al., (2020a). In some embodiments, OptiVax-Unlinked and EvalVax-Unlinked are used with the probabilities of peptide-HLA immunogenicity. Either method can be used for the purposes described herein, and thus the term “OptiVax” refers to either the Robust or Unlinked method. In some embodiments, the observed probability of peptide-HLA immunogenicity in experimental assays can be used as the probability of peptide-HLA binding in EvalVax-Unlinked and OptiVax-Unlinked. In some embodiments, the HLA haplotype or HLA allele frequencies of a population provided to OptiVax for vaccine design describe the world's population. In alternative embodiments, the HLA haplotype or HLA allele frequencies of a population provided to OptiVax for vaccine design are specific to a geographic region. In alternative embodiments, the HLA haplotype or HLA allele frequencies of a population provided to OptiVax for vaccine design are specific to an ancestry. In alternative embodiments, the HLA haplotype or HLA allele frequencies of a population provided to OptiVax for vaccine design are specific to a race. In alternative embodiments, the HLA haplotype or HLA allele frequencies of a population provided to OptiVax for vaccine design are specific to individuals with risk factors such as genetic indicators of risk, age, exposure to chemicals, alcohol use, chronic inflammation, diet, hormones, immunosuppression, infectious agents, obesity, radiation, sunlight, or tobacco use. In alternative embodiments, the HLA haplotype or HLA allele frequencies of a population provided to OptiVax for vaccine design are specific to individuals that carry certain HLA alleles. In alternative embodiments, the HLA diplotypes provided to OptiVax for vaccine design describe a single individual, and are used to design an individualized vaccine.

[0113] In some embodiments, the base (or seed) set of target peptides (e.g., first peptide set) that results from OptiVax application to the candidate set of target peptides describes a set of unmodified target peptides that represent a possible compact vaccine design (Seed Set in FIG. 2). A base peptide is a target peptide that is included in the base or seed peptide set (e.g., first peptide set). In some embodiments, the seed set (e.g., first peptide set) is based upon filtering candidate peptide scores by predicted or observed affinity or immunogenicity with respect to HLA molecules (Seed Set in FIG. 1). However, to improve the display of the target peptides in a wide range of HLA haplotypes as possible, some embodiments include modifications of the seed (or base) set. In some embodiments, experimental assays can be used to ensure that a modified seed (or base) peptide activates T cells that also recognize the base/seed peptide.

[0114] For a given target peptide, the optimal anchor residue selection may depend upon the HLA allele that is binding to and displaying the target peptide and the class of the HLA allele (MHC class I or class II). A seed peptide set (e.g., first peptide set) can become an expanded set by including anchor residue modified peptides of either MHC class I or II peptides (FIGS. 1-2). Thus, one aspect of vaccine design is considering how to select a limited set of heteroclitic peptides that derive from the same target peptide for vaccine inclusion given that different heteroclitic peptides will have different and potentially overlapping population coverages.

[0115] In some embodiments, all possible anchor modifications for each base set of target peptide are considered. There are typically two anchor residues in peptides bound by MHC class I molecules, typically at positions 2 and 9 for 9-mer peptides. In some embodiments, anchors for 8-mers, 10-mers, and 11-mers are found at positions 2 and n, where n is the last position (8, 10, and 11, respectively). For MHC class I molecules, the last position n is called the “C” position herein for carboxyl terminus. In some embodiments, at each anchor position, 20 possible amino acids are attempted in order to select the best heteroclitic peptides. Thus, for MHC class I binding, 400 (i.e., 20 amino acids by 2 positions=20²) minus 1 heteroclitic peptides are generated for each base target peptide. There are typically four anchor residues in peptides bound by MHC class II molecules, typically at positions 1, 4, 6, and 9 of the 9-mer binding core. Thus, for MHC class II binding there are 160,000 (i.e., 20 amino acids by 4 positions =20 4) minus 1 heteroclitic peptides generated for each base target peptide. In some embodiments, more than two (MHC class I) or four (MHC class II) positions are considered as anchors. Other methods, including Bayesian optimization, can be used to select optimal anchor residues to create heteroclitic peptides from each seed (or base) set peptide. Other methods of selecting optimal anchor residues are presented in “Machine learning optimization of peptides for presentation by class II MHCs” by Dai et al., (2020), incorporated in its entirety herein. In some embodiments, the anchor positions are determined by the HLA allele that presents a peptide, and thus the set of heteroclitic peptides includes for each set of HLA specific anchor positions, all possible anchor modifications.

[0116] In some embodiments, for all of the target peptides in the base/seed set, new peptide sequences with all possible anchor residue modifications (e.g., MHC class I or class II) are created resulting in a new heteroclitic base set (Expanded set in FIGS. 1-2) that includes all of the modifications. In some embodiments, anchor residue modifications of a peptide are not included in the heteroclitic base set if one or more of the peptide's anchor residue positions contains a substitution mutation that distinguishes the peptide from a self-peptide. In some embodiments, anchor residue modifications of a base/seed peptide are only included in the heteroclitic base set for peptide positions that do not contain a substitution mutation that distinguishes the base/seed peptide from a self-peptide. In some embodiments, anchor residue modifications of a peptide are not included in the heteroclitic base set when one or more of the peptide's mutations does not occur between a pair of its adjacent anchor residues. In some embodiments, for all of the target peptides in the base/seed set, new peptide sequences with anchor residue modifications (e.g., MHC class I or class II) at selected anchor locations are created resulting in a new heteroclitic base set (Expanded set in FIGS. 1-2) that includes the selected modifications. In some embodiments, the anchor residue positions used for modifying peptides are selected from anchor residue positions determined by the HLA alleles considered during vaccine evaluation. In some embodiments, the heteroclitic base set (Expanded set in FIGS. 1-2) also includes the original seed (or base) set (Seed Peptide Set in FIGS. 1-2). In some embodiments, the heteroclitic base set includes amino acid substitutions at non-anchor residues. In some embodiments, modifications of base peptide residues is accomplished to alter binding to T cell receptors to improve therapeutic efficacy (Candia, et al., 2016). In some embodiments, the heteroclitic base set includes amino acid substitutions of non-natural amino acid analogs. The heteroclitic base set is scored for HLA affinity, peptide-HLA immunogenicity, or other metrics as described herein (another round of Peptide Scoring and Score Filtering as shown in FIGS. 1-2).

[0117] In some embodiments, the scoring predictions may be further updated for pairs of heteroclitic peptide and HLA allele, eliminating pairs where a heteroclitic peptide has a seed (or base) peptide from which it was derived that is not predicted to be displayed by the HLA allele at a specified threshold of peptide-HLA binding score or a specified peptide-HLA immunogenicity metric. In some embodiments, at the second Peptide Scoring and Score Filtering step in FIGS. 1 and 2 a peptide-HLA score is not used for a heteroclitic peptide for a given HLA for vaccine design when the product (or other function) of the heteroclitic peptide's peptide-HLA immunogenicity or binding probability score and the peptide-HLA immunogenicity or binding probability score for its unmodified counterpart peptide do not meet a specified threshold (e.g., 0.5, 0.6, 0.7, 0.8, or 0.9). In some embodiments, the peptide-HLA scores may also be filtered to ensure that predicted binding cores of the heteroclitic peptide displayed by a particular HLA allele align exactly in position with the binding cores of the respective seed (or base) set target peptide for that HLA allele. In some embodiments, the scoring predictions are filtered for an HLA allele to ensure that the heteroclitic peptides considered for that HLA allele are only modified at anchor positions determined by that HLA allele. Scoring produces a metric of peptide-HLA immunogenicity for peptides and HLA alleles that can be either binary, a probability of immunogenicity, or other metric of immunogenicity such as peptide-HLA affinity or percent rank, and can be based on computational predictions, experimental observations, or a combination of both computational predictions and experimental observations.

[0118] In some embodiments, probabilities of peptide-HLA immunogenicity are utilized by OptiVax-Unlinked. In some embodiments, heteroclitic peptides are included in experimental assays such as MIRA (Klinger et at., 2015) or ELISPOT to determine their peptide-HLA immunogenicity metric with respect to specific HLA alleles. In some embodiments, the methods of Liu et al., (2020b), can be used to incorporate MIRA data for heteroclitic peptides into a model of peptide-HLA immunogenicity. In some embodiments, peptide-HLA immunogenicity metrics of heteroclitic peptides are experimentally determined and their ability to activate T cells that also recognize the corresponding seed (or base) peptide of the heteroclitic peptide is performed as is known in the art to qualify the heteroclitic peptide for vaccine inclusion (e.g., Houghton et al., 2007). In some embodiments, these assays of the immunogenicity and cross-reactivity of heteroclitic peptides are performed when the heteroclitic peptides are displayed by specific HLA alleles.

[0119] In some embodiments, experimental observations of the display of heteroclitic peptides by specific HLA alleles in cells can be used to score peptides for peptide-HLA binding or peptide-HLA immunogenicity. In some embodiments, mass spectrometry is used to experimentally determine the display of heteroclitic peptides by cells as described by Bear et al., (2021) or Wang et al., (2019) and these data are used to score for peptide-HLA binding or peptide-HLA immunogenicity. In some embodiments, mass spectrometry is used to experimentally determine the display of heteroclitic peptides by cells, and these experimental data are used to qualify the inclusion of heteroclitic peptides for inclusion in a vaccine. In some embodiments, mass spectrometry is used to experimentally determine the display of a peptide by tumor cells, and these experimental data are used to exclude peptide-HLA binding scores or peptide-HLA immunogenicity scores for the peptide when the peptide is not observed to be displayed by an HLA allele by mass spectrometry. In some embodiments, mass spectrometry is used to experimentally determine the display of a heteroclitic peptide by cells with an HLA allele found in an individual, and these experimental data are used to qualify the inclusion of the heteroclitic peptide for inclusion in a vaccine for the individual. In some embodiments, mass spectrometry is used to experimentally determine the display of a peptide by tumor cells in an individual, and these experimental data are used to exclude peptide-HLA binding scores or peptide-HLA immunogenicity scores for the peptide when the peptide is not observed to be displayed by an HLA allele by mass spectrometry. In some embodiments, computational predictions of the immunogenicity of a heteroclitic peptide in the context of display by HLA alleles can used for scoring such as the methods of Ogishi et al., (2019) or Bulik-Sullivan et al,. (2019).

[0120] In some embodiments, a peptide in the heteroclitic base set is removed if (1) one of its anchor positions for an HLA allele corresponds to the location of a mutation in the base/seed peptide from which it was derived that distinguishes the base/seed peptide from a self-peptide, and (2) if the peptide-HLA binding or peptide-HLA immunogenicity of the self-peptide is stronger than a specified threshold for self-peptide binding or immunogenicity. This eliminates peptides in the heteroclitic base set that may cross-react with self-peptides as a result of sharing TCR facing residues with self-peptides. In some embodiments, the threshold for self-peptide binding is between approximately 500 nM to 1000 nM.

[0121] In some embodiments, redundant peptides in the heteroclitic base set are removed. In some embodiments, a redundant peptide is a first heteroclitic peptide that has peptide-HLA immunogenicity scores or peptide-HLA binding scores that are less immunogenic for all scored HLAs than a second heteroclitic peptide in the heteroclitic base set, where both the first and second heteroclitic peptides are derived from the same base (or seed) peptide. In some embodiments, peptide redundancy is determined by only comparing peptide-HLA immunogenicity scores or peptide-HLA binding scores for HLA alleles where the peptide-HLA immunogenicity scores or peptide-HLA binding scores for both peptides for an HLA allele are more immunogenic than a given threshold (e.g., 50 nM for binding). In some embodiments, a redundant peptide is a first heteroclitic peptide that has an average peptide-HLA immunogenicity score or peptide-HLA binding score that is less immunogenic than the average peptide-HLA immunogenicity score or peptide-HLA binding score of a second heteroclitic peptide in the heteroclitic base set, where both the first and second heteroclitic peptides are derived from the same base (or seed) peptide, and the average scores are computed for HLA alleles where the peptide-HLA immunogenicity scores or peptide-HLA binding scores for both peptides for an HLA allele are more immunogenic than a given threshold (e.g., 50 nM for binding). In some embodiments, a redundant peptide is a first heteroclitic peptide that has a weighted peptide-HLA immunogenicity score or peptide-HLA binding score that is less immunogenic than the weighted peptide-HLA immunogenicity score or peptide-HLA binding score of a second heteroclitic peptide in the heteroclitic base set, where both the first and second heteroclitic peptides are derived from the same base (or seed) peptide, and where the weighting is determined by the frequency of the HLA allele in a human population, and the weighted scores are computed for HLA alleles where the peptide-HLA immunogenicity scores or peptide-HLA binding scores for both peptides for an HLA allele are more immunogenic that a given threshold (e.g., 50 nM for binding).

[0122] In some embodiments, the next step involves scoring the heteroclitic base set (the second peptide set) and filtering the resulting scores to create a second peptide set by comparing the peptide-HLA immunogenicity scores or peptide-HLA binding scores of the peptides for one or more HLA alleles to a threshold. In some embodiments, an affinity criterion of about 50 nM is used to increase the probability that a vaccine peptide will be found and displayed by HLA molecules. In some embodiments, the affinity criteria is more constrained than 50 nM (i.e., <50 nM). In some embodiments, the affinity criteria is more constrained than about 500 nM (i.e., <500 nM). In some embodiments, individual peptide-HLA binding scores or immunogenicity metrics are determined and thus a peptide may be retained as long as it meets the criteria for at least one HLA allele, and only peptide-HLA scores that meet the criteria are considered for vaccine design.

[0123] In some embodiments, the next step involves inputting the second peptide set to OptiVax to select a compact set of vaccine peptides that maximizes predicted vaccine performance (Vaccine Performance Optimization; FIGS. 1-2). In some embodiments, predicted vaccine performance is a function of expected peptide-HLA binding affinity (e.g., a function of the distribution of peptide-HLA binding affinities across all peptide-HLA combinations for a given peptide set, or weighted by the occurrence of the HLA alleles in a population or individual). In some embodiments, predicted vaccine performance is the expected population coverage of a vaccine. In some embodiments, predicted vaccine performance is the expected number peptide-HLA hits produced by a vaccine in a population or individual. In some embodiments, predicted vaccine performance requires a minimum expected number of peptide-HLA hits (e.g., 1, 2, 3, 4, 5, 6, 7, 8, or more) produced by a vaccine. In some embodiments, predicted vaccine performance is a function of population coverage and expected number of peptide-HLA hits desired produced by a vaccine. In some embodiments, predicted vaccine performance is a metric that describes the overall immunogenic properties of a vaccine where all of the peptides in the vaccine are scored for peptide-HLA immunogenicity for two or more HLA alleles (e.g., three or more HLA alleles). In some embodiments, predicted vaccine performance excludes immunogenicity contributions by selected HLA alleles above a maximum number of peptide-HLA hits (e.g., 1, 2, 3, 4, 5, 6, 7, 8, or more). In some embodiments, predicted vaccine performance excludes immunogenicity contributions of individual HLA diplotypes above a maximum number of peptide-HLA hits (e.g., 1, 2, 3, 4, 5, 6, 7, 8, or more). In some embodiments, predicted vaccine performance is the fraction of covered HLA alleles, which is the expected fraction of HLA alleles in each individual that have a minimum number of peptides (e.g., 1, 2, 3, 4, 5, 6, 7, 8, or more) with predicted peptide-HLA immunogenicity produced by a vaccine. In some embodiments, predicted vaccine performance is the expected fraction of HLA alleles in a single individual that have a minimum number of peptides (e.g., 1, 2, 3, 4, 5, 6, 7, 8, or more) with predicted peptide-HLA immunogenicity produced by a vaccine.

[0124] In some embodiments, a vaccine is designed by the iterative selection of peptides from the heteroclitic base set (also referred to as Expanded set as shown in FIGS. 1-2) at progressively less stringent criteria for predicted peptide immunogenicity or display. In some embodiments, a peptide is retained if at least one of its peptide-HLA scores is not eliminated by the thresholds employed. In some embodiments, OptiVax is first used to design a vaccine with a desired vaccine performance with specific peptide qualification criteria (e.g., seed HLA-peptide scores from the candidate set must bind to at least one MHC molecule at 500 nM or stronger, and peptide-HLA scores from the expanded set must bind to at least one MEW molecule at 50 nM or stronger). The vaccine that results from this application of OptiVax is then used as the foundation for vaccine augmentation with less stringent criteria (e.g., seed peptide-HLA scores from the candidate set must bind to at least one MHC molecule at 1000 nM or stronger, and peptide HLA-scores from the expanded set must bind to at least one MHC molecule at 100 nM or stronger) to further improve the desired vaccine performance. Methods for vaccine augmentation are described in Liu et al., (2020b), incorporated by reference in its entirety herein. In some embodiments, multiple rounds of vaccine augmentation may be utilized. In some embodiments, the final augmented vaccine is the one selected.

[0125] In some embodiments, selection of peptide sets to meet a desired predicted vaccine performance can be accomplished by computational algorithms other than OptiVax. In some embodiments, integer linear programming or mixed-integer linear programming is employed for selecting peptide sets instead of OptiVax. One example of an integer programming method for peptide set selection is described by Toussaint et al., 2008, incorporated by reference in its entirety herein. An example solver for mixed-integer linear programming is Python-MIP that can be used in conjunction with Toussaint et al., 2008. A second example of methods for vaccine peptide selection is described in “Maximum n-times Coverage for Vaccine Design” by Liu et al., (2021), incorporated by reference in its entirety herein.

[0126] Predicted vaccine performance refers to a metric. Predicted vaccine performance can be expressed as a single numerical value, a plurality of numerical values, any number of non-numerical values, and a combination thereof. The value or values can be expressed in any mathematical or symbolic term and on any scale (e.g., nominal scale, ordinal scale, interval scale, or ratio scale).

[0127] A seed (or base) peptide and all of the modified peptides that are derived from that seed (or base) peptide comprise a single peptide family. In some embodiments, in the component of vaccine performance that is based on peptide-HLA immunogenicity for a given HLA allele, a maximum number of peptides (e.g., 1, 2, 3, 4, 5, 6, 7, 8, or more) that are in the same peptide family are given computational immunogenicity credit for that HLA allele. This limit on peptide family immunogenicity limits the credit caused by many modified versions of the same base peptide. In some embodiments, the methods described herein are included for running OptiVax with an EvalVax objective function that corresponds to a desired metric of predicted vaccine performance. In some embodiments, population coverage means the proportion of a subject population that presents one or more immunogenic peptides that activate T cells responsive to a seed (or base) target peptide. The metric of population coverage is computed using the HLA haplotype frequency in a given population such as a representative human population. In some embodiments, the metric of population coverage is computed using marginal HLA frequencies in a population. Maximizing population coverage means selecting a peptide set (either a base peptide set, a modified peptide set, or a combination of base and modified peptides; e.g., a first peptide set, second peptide set, or third peptide set) that collectively results in the greatest fraction of the population that has at least a minimum number (e.g., 1, 2, 3, 4, 5, 6, 7, 8, or more) of immunogenic peptide-HLA bindings based on proportions of HLA haplotypes in a given population (e.g., representative human population). In some embodiments, this process includes the OptiVax selection of heteroclitic peptides (as described in this disclosure) that activate T cells that respond to their corresponding seed (or base) peptide and the heteroclitic base peptides to improve population coverage. In some embodiments, the seed (or base) target peptides are always included in the final vaccine design. In some embodiments, peptides are only considered as candidates for a vaccine design (e.g., included in a first, second, and/or third peptide set) if they have been observed to be immunogenic in clinical data, animal models, or tissue culture models. In some embodiments, vaccine peptides are selected to be displayed by a peptide specific set of HLA class I or class II alleles, wherein for at least two peptides in a vaccine all of the peptide specific sets of HLA class I or class II alleles are not identical.

[0128] Although heteroclitic peptides are used as exemplary embodiments in this disclosure, any modified peptide could be used in place of a heteroclitic peptide. A modified peptide is a peptide that has one or more amino acid substitutions of a target base/seed peptide. The amino acid substitution could be located at an anchor position or any other non-anchor position.

[0129] In some embodiments, a candidate vaccine peptide (e.g., a base peptide or a modified peptide) is eliminated from vaccine inclusion if it activates T cells that recognize self-peptides (e.g., this can be achieved at the first and/or second round of Peptide Filtering and Sorting as shown in FIGS. 1-2). In some embodiments, a candidate vaccine peptide (e.g., a base peptide or a modified peptide) is computationally eliminated from vaccine inclusion if its outward facing amino acids when bound by an HLA allele are similar to outward facing self-peptide residues that are presented by the same HLA allele, where similarity can be defined by identity or defined similarity metrics such as BLOSUM matrices (BLOSUM matrices are known in the art). In some embodiments, calculation of the percent identity of two nucleic acid or polypeptide sequences, for example, can be performed by aligning the two sequences for optimal comparison purposes (e.g., gaps can be introduced in one or both of a first and a second sequences for optimal alignment and non-identical sequences can be disregarded for comparison purposes). The comparison of sequences and determination of percent identity between two sequences can be accomplished using a mathematical algorithm. For example, the percent identity between two nucleotide sequences can be determined using the algorithm of Meyers and Miller (CABIOS, 1989, 4: 11-17), which has been incorporated into the ALIGN program (version 2.0). In some exemplary embodiments, nucleic acid sequence comparisons made with the ALIGN program use a PAM120 weight residue table, a gap length penalty of 12 and a gap penalty of 4. The percent identity between two nucleotide sequences can, alternatively, be determined using the GAP program in the GCG software package using an NWSgapdna.CMP matrix.

[0130] Testing a vaccine peptide for its ability to activate T cells that recognize self-peptides can be experimentally accomplished by the vaccination of animal models followed by ELISPOT or other immunogenicity assay or with human tissue protocols. In both cases, models with HLA alleles that present the vaccine peptide are used. In some embodiments, human primary blood mononuclear cells (PBMCs) are stimulated with a vaccine peptide, the T cells are allowed to grow, and then T cell activation with a self-peptide is assayed as described in Tapia-Calle et al., (2019) or other methods as known in the art. In some embodiments, the vaccine peptide is excluded from vaccine inclusion if the T cells are activated by the self-peptide. In some embodiments, computational predictions of the ability of a peptide to activate T cells that also recognize self-peptides can be utilized. These predictions can be based upon the modeling of the outward facing residues from the peptide-HLA complex and their interactions with other peptide residues. In some embodiments, a candidate vaccine peptide (e.g., a base peptide or a modified peptide) is eliminated from vaccine inclusion or experimentally tested for cross-reactivity if it is predicted to activate T cells that also recognize self-peptides based upon the structural similarity of the peptide-MHC complex of the candidate peptide (e.g., a base peptide or a modified peptide) and the peptide-MHC complex of a self-peptide. One method for the prediction of peptide-MHC structure is described by Park et al., (2013).

[0131] In some embodiments, the peptide-HLA binding score or peptide-HLA immunogenicity metric for a candidate heteroclitic vaccine peptide (e.g., a modified peptide) and HLA allele is eliminated from consideration during vaccine design if the candidate heteroclitic vaccine peptide does not activate T cells that recognize its corresponding base/seed target peptide (second round of Peptide Scoring and Score Filtering, FIGS. 1-2) for the given HLA allele. In some embodiments, a heteroclitic vaccine peptide (e.g., a modified peptide) is eliminated from a vaccine design if the candidate heteroclitic vaccine peptide does not activate T cells that recognize its corresponding base/seed target peptide (second round of Peptide Scoring and Score Filtering, FIGS. 1-2) for a given HLA allele. Testing a candidate heteroclitic peptide (e.g., a modified peptide) for its ability to activate T cells that recognize its corresponding seed (or base) target peptide with respect to the same HLA allele can be experimentally accomplished by the vaccination of animal models followed by ELISPOT or other immunogenicity assay or with human tissue protocols. In both cases, models with HLA alleles that present the heteroclitic peptide are used. In some embodiments, human PBMCs are stimulated with the heteroclitic peptide, the T cells are allowed to grow, and then T cell activation with the seed (or base) target peptide is assayed as described in Tapia-Calle et al., (2019) or using other methods known in the art. In some embodiments, computational predictions of the ability of a heteroclitic peptide to activate T cells that also recognize the corresponding seed (or base) target peptide can be utilized. These predictions can be based upon the modeling of the outward facing residues from the peptide-HLA complex and their interactions with other peptide residues. In some embodiments, the structural similarity of the peptide-HLA complex of a heteroclitic peptide and the peptide-HLA complex of the corresponding seed (or base) target is used to qualify heteroclitic peptides for vaccine inclusion or to require experimental immunogenicity testing before vaccine inclusion.

[0132] TCR Interface Divergence (TCRID) is the Least Root Mean Square Deviation of the difference between a first peptide's TCR facing residues' 3D positions and the corresponding residue positions of a second peptide with respect to a specific HLA allele. In some embodiments, other metrics are used for the TCRID instead of Least Root Mean Square Deviation. In some embodiments, other metrics are used for the TCRID that include position deviations in non-TCR facing residues and MEW residues from the specific HLA allele. In some embodiments, TCRID is used to predict if two peptides when displayed by a given HLA allele will activate the same T cell clonotypes. In some embodiments, FlexPepDock (London et al., 2011, incorporated by reference in its entirety herein) or DINC (Antunes et al., 2018, incorporated by reference in its entirety herein) in conjunction with the crystal structures of HLA molecules can be used to compute TCRID metrics for pairs of peptides given an HLA molecule. In some embodiments, TCRID is computed by (1) determining the 3D peptide-HLA structures for two different peptides bound by a specific HLA allele, (2) aligning the HLA alpha helices of the peptide-HLA structures, and (3) computing the Least Root Mean Square Deviation of the difference between the TCR facing residues of the two peptides with respect to the aligned alpha helix reference frame.

[0133] In some embodiments, the second Peptide Scoring and Score Filtering step in FIGS. 1 and 2 will eliminate the peptide-HLA binding or immunogenicity score for a heteroclitic peptide for a specific HLA allele when the HLA specific TCRID between the heteroclitic peptide and its corresponding base (or seed) peptide from which it was derived is over a first TCRID threshold. In some embodiments, the second Peptide Scoring and Score Filtering step in FIGS. 1 and 2 will eliminate all peptide-HLA binding or immunogenicity scores for a heteroclitic peptide when the HLA specific TCRID between the heteroclitic peptide and its corresponding unmutated self-peptide from which it was derived is under a second TCRID threshold. In some embodiments, the first Peptide Scoring and Score Filtering step in FIGS. 1 and 2 will eliminate all peptide-HLA binding or immunogenicity scores for a candidate peptide when the HLA specific TCRID between the peptide and its corresponding unmutated self-peptide is under a third TCRID threshold. In some embodiments, any of the TCRID thresholds are determined by experimentally observing or computationally predicting the cross-reactivity of TCR molecules to peptide-HLA complexes.

[0134] OptiVax can be used to design a vaccine to maximize the fraction/proportion of the population whose HLA molecules are predicted to bind to and display at least p peptides from the vaccine. In some embodiments, this prediction (e.g., scoring) includes experimental immunogenicity data to directly predict at least p peptides will be immunogenic. The number p is input to OptiVax, and OptiVax can be run multiple times with varying values for p to obtain a predicted optimal target peptide set for different peptide counts p. Larger values of p will increase the redundancy of a vaccine at the cost of more peptides to achieve a desired population coverage. In some embodiments, it may not be possible to achieve a given population coverage given a specific heteroclitic base set. In some embodiments, the number p is a function of the desired size of a vaccine.

[0135] The methods described herein can be used to design separate vaccine formulations for MHC class I and class II based immunity.

[0136] In some embodiments, this procedure is used to create a vaccine for an individual. In some embodiments, the target peptides present in the individual are determined by sequencing the individual's tumor RNA or DNA, and identifying mutations that produce foreign peptides. One embodiment of this method is described in U.S. Pat. No. 10,738,355, incorporated by reference in its entirety herein. In some embodiments, peptide sequencing methods are used to identify target peptides in the individual. One embodiment of this is described in U.S. Patent Publication No. 2011/0257890. In some embodiments, the target peptides used for the individual's vaccine are selected when a self-peptide, foreign peptide, pathogen peptide or RNA encoding a self-peptide, foreign peptide, or pathogen peptide observed in a specimen from the individual is present at a predetermined level. The target peptides in the individual are used to construct a vaccine as disclosed herein. For vaccine design, OptiVax is provided a diplotype comprising the HLA type of the individual. In an alternative embodiment, the HLA type of an individual is separated into multiple diplotypes with frequencies that sum to one, where each diplotype comprises one or more HLA alleles from the individual and a notation that the other allele positions should not be evaluated. The use of multiple diplotypes will cause OptiVax's objective function to increase the chance that immunogenic peptides will be displayed by all of the constructed diplotypes. This achieves the objective of maximizing the number of distinct HLA alleles in the individual that exhibit peptide-HLA immunogenicity and thus improves the allelic coverage of the vaccine in the individual.

### WIC Class I Vaccine Design Procedure

[0137] In some embodiments, WIC class I vaccine design procedures consist of the following computational steps.

[0138] In some embodiments, the inputs for the computation are:
[0139] P_{1 . . . n}: Peptide sequence (length n) containing the neoantigen(s) or pathogenic target(s) of interest (e.g., KRAS G12D, KRAS G12V, KRAS G12R, KRAS G12C, KRAS G13D). Pᵢ denotes the amino acid at position i.
[0140] t: Position of target mutation in P, t ε [1, . . . n] (e.g., t=12 for KRAS G12D).
[0141] s: Substitution mutation s ε [true, false] is true if the mutation is a substitution, and false if the mutation is a deletion or insertion or the peptide does not contain a mutation (such as in pathogen targets). When the mutation is a deletion or insertion then t indicates the position immediately before the deletion or insertion.
[0142] τ₁: Threshold for potential presentation of peptides by MHC for peptide-WIC scoring (e.g., 500 nM binding affinity)
[0143] τ₂: Threshold for predicted display of peptides by MEW for peptide-MHC scoring (e.g., 50 nM binding affinity)
[0144] [symbol] : Set of HLA alleles (for HLA-A, HLA-B, HLA-C loci)
[0145] F: [symbol] ³→ [symbol] : Population haplotype frequencies (for OptiVax optimization and coverage evaluation).
[0146] N: Parameter for EvalVax and OptiVax objective function. Specifies minimum number of predicted per-individual hits for population coverage objective to consider the individual covered. Default=1 (computes P(n≥1) population coverage).

[0147] In some embodiments, Peptide-HLA Scoring Functions used are:
[0148] ScorePotential: P× [symbol] → [symbol] : Scoring function mapping a (peptide, HLA allele) pair to a prediction of peptide-HLA display. If predicted affinity≤τ₁, then returns 1, else returns 0. Options include MHCflurry, NetMHCpan, PUFFIN, ensembles, or alternative metrics or software may be used, including models calibrated against immunogenicity data.
[0149] SCOREDISPLAY: P× [symbol] → [symbol] : Scoring function mapping a (peptide, HLA allele) pair to a prediction of peptide-HLA display. If predicted affinity ≤τ₂, then returns 1, else returns 0. Options include MHCflurry, NetMHCpan, PUFFIN, ensembles, or alternative metrics or software may be used, including models calibrated against immunogenicity data.

[0150] Next, from the seed protein sequence (P), a set [symbol] of windowed native peptides spanning the protein sequence(s) is constructed. P_{j . . . j+(k-1)} only produces set members when the subscripts are within the range of the defined seed protein P. In some embodiments, 8-mers, 9-mers, 10-mers, and 11-mers are produced, but this process can be performed with any desired window lengths and the resulting peptide sets combined. In some embodiments, only 9-mers are produced.

$$𝒫 = {⋃}_{k ∈ [ 8 , ... , 11 ]} {𝒫}_{k}$$

$${𝒫}_{k} = \{ {P}_{j ... j + ( k - 1 )} \vert j ∈ [ t - ( k - 1 ) , ... , t ] , if s then j \neq \{ t - ( k - 1 ) , t - 1 \} \}$$

[0151] The second condition j≠{t−(k−1), t−1} excludes peptides where the mutation at t is in positions P2 or Pk of the windowed k-mer peptide (i.e., the anchor positions) and the mutation is a substitution.

[0152] MHC Class I Vaccine Design Procedure with Defined Peptide Set

[symbol]

[0153] Next, each peptide sequence in [symbol] is scored against all HLA alleles in [symbol] for potential presentation using SCOREPOTENTIAL (with threshold τ₁=500 nM) and store results in a | [symbol] |×| [symbol] | matrix S:

S[p,h]=SCOREPOTENTIAL(p,h)∀pε [symbol] ,hε [symbol]
[0154] Note that S is a binary matrix where 1 indicates the HLA is predicted to potentially present the peptide, and 0 indicates no potential presentation.
   Define Base Set of Peptides B⊆ [symbol] :

B={pε [symbol] |∃hs.t.S[p,h]=1}
[0155] Thus, B contains the native peptides that are predicted to be potentially presented by at least 1 HLA.
   Create a Set of All Heteroclitic Peptides B′ Stemming from Peptides in B:

$${B}^{′} = {⋃}_{b ∈ B} ANCHOR - MODIFIED ( b )$$

[0156] where ANCHOR-MODIFIED(b) returns a set of all 399 anchor-modified peptides stemming from b (with all possible modifications to the amino acids at P2 and P9).

[0157] Next, all heteroclitic candidate peptides (e.g., modified peptides) in B′ are scored against all HLA alleles in [symbol] for predicted display using SCOREDISPLAY (with threshold τ₂=50 nM), and store results in binary |B′|×| [symbol] | matrix S₁′:

S₁′[b′,h]=SCOREDISPLAY(b′,h)∀b′εB′,hε

[symbol]

[0158] Next, an updated scoring matrix S₂′ is computed for heteroclitic peptides conditioned on the potential presentation of the corresponding base peptides by each HLA:

$${S}_{2}^{′} [ {b}^{′} , h ] = \{ \begin{matrix}{S}_{1}^{′} [ {b}^{′} , h ] , & if S [ b , h ] = 1 \\ 0 , & otherwise\end{matrix} ∀ {b}^{′} ∈ {B}^{′} , h ∈ ℋ$$

[0159] where each heteroclitic peptide b′ ε B′ is a mutation of base peptide b ε B. This condition enforces that if h was not predicted to potentially present b, then all heteroclitic peptides b′ derived from b will not be displayed by h (even if h would otherwise be predicted to display b′).

[0160] In some embodiments, OptiVax-Robust is used to design a final peptide set (e.g., third peptide set) from the union of base peptides and heteroclitic peptides B ∪ B′ (with corresponding scoring matrices S and S₂′ for B and B′, respectively). OptiVax will output m sets [symbol] ₛ for s ε[1, . . . , m] where m is the largest vaccine size requested from OptiVax. Let [symbol] ₖ denote the compact set of vaccine peptides output by OptiVax containing k peptides. Note that [symbol] ₖ₊₁ is not necessarily a superset of [symbol] ₖ. In alternate embodiments, OptiVax can be used to augment the base set B with peptides from B′ using scoring matrix S₂′ to have OptiVax return set [symbol] ₖ, and the final vaccine set [symbol] _{k+|B|} consists of peptides B ∪ [symbol] ₖ.

[0161] In some embodiments, this procedure is repeated independently for each target of interest, and the resulting independent vaccine sets can be merged into a combined vaccine as described below.

### MHC Class II Vaccine Design Procedure

[0162] In some embodiments, WIC class II vaccine design procedures consist of the following computational steps.

[0163] In some embodiments, the inputs for the computation are:
[0164] P_{1 . . . n}: Peptide sequence(s) (length n) containing the neoantigen(s) or pathogenic target(s) of interest (e.g., KRAS G12D, KRAS G12V, KRAS G12R, KRAS G12C, KRAS G13D). Pᵢ denotes the amino acid at position i.
[0165] t: Position of target mutation in P, t ε [1, . . . ,n)] (e.g., t=12 for KRAS G12D).
[0166] s: Substitution mutation s ε [true, false] is true if the mutation is a substitution, and false if the mutation is a deletion or insertion or the peptide does not contain a mutation (such as for pathogen targets). When the mutation is a deletion or insertion then t indicates the position immediately before the deletion or insertion.
[0167] τ₁: Threshold for potential presentation of peptides by MHC for peptide-MHC scoring (e.g., 500 nM binding affinity)
[0168] τ₂: Threshold for predicted display of peptides by MHC for peptide-MHC scoring (e.g., 50 nM binding affinity)
[0169] [symbol] : Set of HLA alleles (for HLA-DR, HLA-DQ, HLA-DP loci)
[0170] F: [symbol] ³→ [symbol] Population haplotype frequencies (for Opti Vax optimization and coverage evaluation).
[0171] N: Parameter for EvalVax and OptiVax objective function. Specifies minimum number of predicted per-individual hits for population coverage objective to consider the individual covered. Default=1 (computes P(n≥1) population coverage).

[0172] In some embodiments, Peptide-HLA Scoring Functions used are:
[0173] SCOREPOTENTIAL: P× [symbol] → [symbol] Scoring function mapping a (peptide, HLA allele) pair to a prediction of display. If predicted affinity ≥τ₁, then returns 1, else returns 0. Options include NetMHCIIpan, PUFFIN, ensembles, or alternative metrics or software may be used, including models calibrated against immunogenicity data.
[0174] SCOREDISPLAY: P× [symbol] → [symbol] Scoring function mapping a (peptide, HLA allele) pair to a prediction of peptide-HLA display. If predicted affinity ≤τ₂, then returns 1, else returns 0. Options include NetMHCIIpan, PUFFIN, ensembles, or alternative metrics or software may be used, including models calibrated against immunogenicity data.
[0175] FindCore: P× [symbol] →[1, . . . , n]: Function mapping a (peptide, HLA allele) pair to a prediction of the 9-mer binding core. The core may be specified as the offset position (index) into the peptide where the core begins.

[0176] Next, from the seed protein sequence (P), a set [symbol] of peptides spanning the protein sequence are constructed. P_{j . . . j+(k-1)} only produces set members when the subscripts are within the range of the defined seed protein P. Here, we extract all windowed peptides of length 13-25 spanning the target mutation, but this process can be performed using any desired window lengths (e.g., only 15-mers).

$$𝒫 = {⋃}_{k ∈ [ 13 , ... , 25 ]} {𝒫}_{k}$$

$${𝒫}_{k} = \{ {P}_{j ... j + ( k - 1 )} \vert j ∈ [ t - ( k - 1 ) , ... , t ] \}$$

[0177] where [symbol] ₖ contains all sliding windows of length k, which are combined to form [symbol] . Note that here (unlike MHC class I), no peptides are excluded based on binding core or anchor residue positions (for MHC class II, filtering is performed as described in this disclosure).
   MHC Class II Vaccine Design Procedure with Defined Peptide Set

[symbol]

[0178] Next, each peptide sequence in [symbol] is scored against all HLA alleles in [symbol] for potential presentation using SCOREPOTENTIAL (with threshold τ₁=500 nM) and store results in a | [symbol] |×| [symbol] | matrix S₁:

S₁[p,h]=SCOREPOTENTIAL(p,h)∀pε [symbol] ,hε [symbol]
[0179] Note that S₁ is a binary matrix where 1 indicates the HLA is predicted to potentially present the peptide, and 0 indicates no potential presentation.

[0180] For each (peptide, HLA allele) pair (p, h), identify/predict the 9-mer binding core using FINDCORE. The predicted binding core is recorded in a matrix C:

C[p,h]=FINDCORE(p,h)∀pε [symbol] ,hε

[symbol]

[0181] Next, if not(s) then S₂[p, h]=S₁[p, h] otherwise an updated scoring matrix S₂ is computed for native peptides in [symbol] :

$${S}_{2} [ p , h ] = \{ \begin{matrix}{S}_{1} [ p , h ] , & if C [ p , h ] specifies {P}_{t} at a non - \\ & anchor position inside core \\ 0 , & otherwise\end{matrix} ∀ p ∈ 𝒫 , h ∈ ℋ$$

[0182] where Pₜ is the target residue of interest (e.g., the mutation site of KRAS G12D). This condition enforces the target residue to fall within the binding core at a non-anchor position for all (peptide, HLA allele) pairs with non-zero scores in S₂ and allows the binding core to vary by allele per peptide (as the binding cores of a particular peptide may differ based on the HLA allele presenting the peptide). Thus, for each pair (p, h), if the predicted binding core C[p, h] specifies the target residue Pt at an anchor position (P1, P4, P6, or P9 of the 9-mer core), or if Pₜ is not contained within the binding core, then S₂[p, h]=0. In an alternate embodiment, Pₜ can be located outside of the core or inside the core in a non-anchor position. In some embodiments, Pₜ can only be located at specific positions inside and/or outside of the core. In some embodiments, the binding core predictions in C are accompanied by prediction confidences. In some embodiments, if the confidence for predicted core C[p, h] is below a desired threshold (e.g., 0.5, 0.6, 0.7, 0.8, or 0.9), then S₂[p, h]=0.

[0183] Next, OptiVax-Robust is run with peptides [symbol] and scoring matrix S₂ to identify a non-redundant base set of peptides B⊆ [symbol] . (In alternate embodiments, B can be chosen as the entire set [symbol] rather than identifying a non-redundant base set.)

[0184] Next, a set of all heteroclitic peptides B′ is created stemming from peptides in B:

$${B}^{′} = {⋃}_{b ∈ ⋃ B} \{ ANCHOR - MODIFIED ( b , c ) ∀ c \vert ∃ h s . t . {S}_{2} [ b , h ] = 1 \}$$

[0185] where ANCHOR-MODIFIED(b,c) returns a set of all 20⁴−1 anchor-modified peptides stemming from b with all possible modifications to the amino acids at P1, P4, P6, and P9 of the 9-mer binding core c. Thus, for each base peptide b, the heteroclitic set B′ contains all anchor-modified peptides b′ with modifications to all unique cores of b identified for any HLA alleles that potentially present b with a valid core position as indicated by scoring matrix S₂.

[0186] Next, all heteroclitic candidate peptides (e.g., modified peptides) in B′ are scored against all HLA alleles in [symbol] for predicted display using SCOREDISPLAY (with threshold τ₂=50 nM), and store results in binary |B′|× [symbol] matrix S₁′:

S_{1′[b′,h]}=ScoreDisplay(b′,h)∀b′εB′,hε

[symbol]

[0187] For each (heteroclitic peptide, HLA allele) pair (b′,h), identify/predict the 9-mer binding core using FINDCORE. The predicted binding core is recorded in a matrix C′:

C′[b′,h]=FINDCORE(b′,h)∀b′εB′,hε

[symbol]

[0188] An updated scoring matrix S₂′ is computed for heteroclitic peptides conditioned on the identified binding cores of a heteroclitic and base peptides occurring at the same offset by a particular HLA:

$${S}_{2}^{′} [ {b}^{′} , h ] = \{ \begin{matrix}{S}_{1}^{′} [ {b}^{′} , h ] , & if {C}^{′} [ {b}^{′} , h ] = C [ b , h ] \\ 0 , & otherwise\end{matrix} ∀ {b}^{′} ∈ {B}^{′} , h ∈ ℋ$$

[0189] where each heteroclitic peptide b′ ε B′ is a mutation of base peptide b ε B. This condition enforces the binding core of the heteroclitic peptide b′ to be at the same relative position as the base peptide b, and, implicitly, enforces that the target residue Pₜ still falls in a non-anchor position within the 9-mer binding core (Step 3).

[0190] An updated scoring matrix S₃′ is computed for heteroclitic peptides conditioned on the potential presentation of the corresponding base peptides by each HLA:

$${S}_{3}^{′} [ {b}^{′} , h ] = \{ \begin{matrix}{S}_{2}^{′} [ {b}^{′} , h ] , & if S [ b , h ] = 1 \\ 0 , & otherwise\end{matrix} ∀ {b}^{′} ∈ {B}^{′} , h ∈ ℋ$$

[0191] where each heteroclitic peptide b′ ε B′ is a mutation of base peptide b ε B. This condition enforces that if h was not predicted to display b, then all heteroclitic peptides b′ derived from b will not be displayed by h (even if h would otherwise be predicted to display b′).

[0192] OptiVax-Robust is used to design a final peptide set (e.g., third peptide set) from the union of base peptides and heteroclitic peptides B ∪ B′ (with corresponding scoring matrices S₂ and S₃′ for B and B′, respectively). OptiVax will output m sets [symbol] ₂ for s ε [1, . . . , m] where m is the largest vaccine size requested from OptiVax. Let [symbol] ₖ denote the compact set of vaccine peptides output by OptiVax containing k peptides. Note that [symbol] ₖ₊₁ is not necessarily a superset of [symbol] ₖ. (In alternate embodiments, OptiVax can be used to augment the base set B with peptides from B′ using scoring matrix S₂′ to have OptiVax return set [symbol] ₖ, and the final vaccine set [symbol] _{k+|B|} consists of peptides B ∪ [symbol] ₖ. )

### MHC Peptide Sequences

[0193] KRAS mutant peptide sequences that are displayed by MHC class II molecules contain a 9 amino acid core sequence that includes the anchor residues that participate in the binding of the peptide to the MHC class II molecule as well as the mutant amino acid. In some embodiments, the 9-mer amino acid core sequence is identified using the FindCore function defined in the “MHC Class II Vaccine Design Procedure” described herein. Useful vaccine cores that can be used with KRAS flanking sequences are described herein for MHC class II vaccine designs. The Sequence Listing includes for each core sequence the core's seed sequence and the KRAS mutation contained in the seed sequence. In some embodiments, useful flanking sequences for a core sequence can be determined from the UniProt entry RASK HUMAN (also called KRAS) where the core's seed is matched to RASK HUMAN with its KRAS mutation removed for matching. RASK HUMAN sequences beyond a core can be used for flanking. Examples of adding flanking residues are shown in Table 1.

[0194] In some embodiments, a peptide composition (single target or combined multiple target) comprises about 1 to 40 peptides with each peptide consisting of about 20 amino acids. In some embodiments, a peptide composition is designed based on one or more of the KRAS mutated protein targets. In some embodiments, a peptide composition is designed based on one or more of the KRAS G12C, KRAS G12D, KRAS G12R, KRAS G12V, or KRAS G13D protein mutation targets. In some embodiments, a peptide composition is intended to prevent cancer. In some embodiments, a peptide composition is intended to treat cancer.

[0195] In some embodiments, the amino acid sequence for a peptide composition for a mutation in the KRAS protein comprises one or more of the SEQ ID NOs: 1 to 247, SEQ ID NOs: 6936 to 6994, SEQ ID NOs: 12271 to 12396, SEQ ID NOs: 49712 to 49814, and SEQ ID NOs: 77044 to 77057. In some embodiments, any one of the peptides in the KRAS composition comprise an amino acid sequence 80, 81, 82, 83, 84, 85, 86, 87, 88, 89, 90, 91, 92, 93, 94, 95, 96, 97, 98 or 99% identical to SEQ ID NOs: 1 to 247, SEQ ID NOs: 6936 to 6994, SEQ ID NOs: 12271 to 12396, SEQ ID NOs: 49712 to 49814, or SEQ ID NOs: 77044 to 77057.

[0196] In some embodiments, the amino acid sequence for a peptide composition for a mutation in the KRAS protein comprises one or more of SEQ ID NOs: 1 to 99249. In some embodiments, any one of the peptides in the KRAS composition comprise an amino acid sequence 80, 81, 82, 83, 84, 85, 86, 87, 88, 89, 90, 91, 92, 93, 94, 95, 96, 97, 98 or 99% identical to SEQ ID NOs: 1 to 99249.

[0197] In some embodiments, the amino acid sequence for a peptide composition for a mutation in the KRAS protein comprises two or more of the SEQ ID NOs: 1 to 247, SEQ ID NOs: 6936 to 6994, SEQ ID NOs: 12271 to 12396, SEQ ID NOs: 49712 to 49814, and SEQ ID NOs: 77044 to 77057. In some embodiments, any one of the peptides in the KRAS composition comprise an amino acid sequence 80, 81, 82, 83, 84, 85, 86, 87, 88, 89, 90, 91, 92, 93, 94, 95, 96, 97, 98 or 99% identical to SEQ ID NOs: 1 to 247, SEQ ID NOs: 6936 to 6994, SEQ ID NOs: 12271 to 12396, SEQ ID NOs: 49712 to 49814, or SEQ ID NOs: 77044 to 77057.

[0198] In some embodiments, the amino acid sequence for a peptide composition for a mutation in the KRAS protein comprises two or more of SEQ ID NOs: 1 to 99249. In some embodiments, any one of the peptides in the KRAS composition comprise an amino acid sequence 80, 81, 82, 83, 84, 85, 86, 87, 88, 89, 90, 91, 92, 93, 94, 95, 96, 97, 98 or 99% identical to SEQ ID NOs: 1 to 99249.

[0199] In some embodiments, the amino acid sequence for a peptide composition for the KRAS G12C protein mutation comprises one or more of the SEQ ID NOs: 1 to 247. In some embodiments, any one of the peptides in the KRAS G12C composition comprise an amino acid sequence 80, 81, 82, 83, 84, 85, 86, 87, 88, 89, 90, 91, 92, 93, 94, 95, 96, 97, 98 or 99% identical to SEQ ID NOs: 1 to 247.

[0200] In some embodiments, the amino acid sequence for a peptide composition for the KRAS G12C protein mutation comprises one or more of SEQ ID NOs: 1 to 6935. In some embodiments, any one of the peptides in the KRAS G12C composition comprise an amino acid sequence 80, 81, 82, 83, 84, 85, 86, 87, 88, 89, 90, 91, 92, 93, 94, 95, 96, 97, 98 or 99% identical to SEQ ID NOs: 1 to 6935.

[0201] In some embodiments, the amino acid sequence for a peptide composition for the KRAS G12C protein mutation comprises two or more of the SEQ ID NOs: 1 to 247. In some embodiments, any one of the peptides in the KRAS G12C composition comprise an amino acid sequence 80, 81, 82, 83, 84, 85, 86, 87, 88, 89, 90, 91, 92, 93, 94, 95, 96, 97, 98 or 99% identical to SEQ ID NOs: 1 to 247.

[0202] In some embodiments, the amino acid sequence for a peptide composition for the KRAS G12C protein mutation comprises two or more of SEQ ID NOs: 1 to 6935. In some embodiments, any one of the peptides in the KRAS G12C composition comprise an amino acid sequence 80, 81, 82, 83, 84, 85, 86, 87, 88, 89, 90, 91, 92, 93, 94, 95, 96, 97, 98 or 99% identical to SEQ ID NOs: 1 to 6935.

[0203] In some embodiments, the amino acid sequence for a peptide composition for the KRAS G12D protein mutation comprises one or more of the SEQ ID NOs: 6936 to 6994. In some embodiments, any one of the peptides in the KRAS G12D composition comprise an amino acid sequence 80, 81, 82, 83, 84, 85, 86, 87, 88, 89, 90, 91, 92, 93, 94, 95, 96, 97, 98 or 99% identical to SEQ ID NOs: 6936 to 6994.

[0204] In some embodiments, the amino acid sequence for a peptide composition for the KRAS G12D protein mutation comprises one or more of SEQ ID NOs: 6936 to 12270. In some embodiments, any one of the peptides in the KRAS G12D composition comprise an amino acid sequence 80, 81, 82, 83, 84, 85, 86, 87, 88, 89, 90, 91, 92, 93, 94, 95, 96, 97, 98 or 99% identical to SEQ ID NOs: 6936 to 12270.

[0205] In some embodiments, the amino acid sequence for a peptide composition for the KRAS G12D protein mutation comprises two or more of the SEQ ID NOs: 6936 to 6994. In some embodiments, any one of the peptides in the KRAS G12D composition comprise an amino acid sequence 80, 81, 82, 83, 84, 85, 86, 87, 88, 89, 90, 91, 92, 93, 94, 95, 96, 97, 98 or 99% identical to SEQ ID NOs: 6936 to 6994.

[0206] In some embodiments, the amino acid sequence for a peptide composition for the KRAS G12D protein mutation comprises two or more of SEQ ID NOs: 6936 to 12270. In some embodiments, any one of the peptides in the KRAS G12D composition comprise an amino acid sequence 80, 81, 82, 83, 84, 85, 86, 87, 88, 89, 90, 91, 92, 93, 94, 95, 96, 97, 98 or 99% identical to SEQ ID NOs: 6936 to 12270.

[0207] In some embodiments, the amino acid sequence for a peptide composition for the KRAS G12R protein mutation comprises one or more of the SEQ ID NOs: 12271 to 12396. In some embodiments, any one of the peptides in the KRAS G12R composition comprise an amino acid sequence 80, 81, 82, 83, 84, 85, 86, 87, 88, 89, 90, 91, 92, 93, 94, 95, 96, 97, 98 or 99% identical to SEQ ID NOs: 12271 to 12396.

[0208] In some embodiments, the amino acid sequence for a peptide composition for the KRAS G12R protein mutation comprises one or more of SEQ ID NOs: 12271 to 49711. In some embodiments, any one of the peptides in the KRAS G12R composition comprise an amino acid sequence 80, 81, 82, 83, 84, 85, 86, 87, 88, 89, 90, 91, 92, 93, 94, 95, 96, 97, 98 or 99% identical to SEQ ID NOs: 12271 to 49711.

[0209] In some embodiments, the amino acid sequence for a peptide composition for the KRAS G12R protein mutation comprises two or more of the SEQ ID NOs: 12271 to 12396. In some embodiments, any one of the peptides in the KRAS G12R composition comprise an amino acid sequence 80, 81, 82, 83, 84, 85, 86, 87, 88, 89, 90, 91, 92, 93, 94, 95, 96, 97, 98 or 99% identical to SEQ ID NOs: 12271 to 12396.

[0210] In some embodiments, the amino acid sequence for a peptide composition for the KRAS G12R protein mutation comprises two or more of SEQ ID NOs: 12271 to 49711. In some embodiments, any one of the peptides in the KRAS G12R composition comprise an amino acid sequence 80, 81, 82, 83, 84, 85, 86, 87, 88, 89, 90, 91, 92, 93, 94, 95, 96, 97, 98 or 99% identical to SEQ ID NOs: 12271 to 49711.

[0211] In some embodiments, the amino acid sequence for a peptide composition for the KRAS G12V protein mutation comprises one or more of the SEQ ID NOs: 49712 to 49814. In some embodiments, any one of the peptides in the KRAS G12V composition comprise an amino acid sequence 80, 81, 82, 83, 84, 85, 86, 87, 88, 89, 90, 91, 92, 93, 94, 95, 96, 97, 98 or 99% identical to SEQ ID NOs: 49712 to 49814.

[0212] In some embodiments, the amino acid sequence for a peptide composition for the KRAS G12V protein mutation comprises one or more of SEQ ID NOs: 49712 to 77043. In some embodiments, any one of the peptides in the KRAS G12V composition comprise an amino acid sequence 80, 81, 82, 83, 84, 85, 86, 87, 88, 89, 90, 91, 92, 93, 94, 95, 96, 97, 98 or 99% identical to SEQ ID NOs: 49712 to 77043.

[0213] In some embodiments, the amino acid sequence for a peptide composition for the KRAS G12V protein mutation comprises two or more of the SEQ ID NOs: 49712 to 49814. In some embodiments, any one of the peptides in the KRAS G12V composition comprise an amino acid sequence 80, 81, 82, 83, 84, 85, 86, 87, 88, 89, 90, 91, 92, 93, 94, 95, 96, 97, 98 or 99% identical to SEQ ID NOs: 49712 to 49814.

[0214] In some embodiments, the amino acid sequence for a peptide composition for the KRAS G12V protein mutation comprises two or more of SEQ ID NOs: 49712 to 77043. In some embodiments, any one of the peptides in the KRAS G12V composition comprise an amino acid sequence 80, 81, 82, 83, 84, 85, 86, 87, 88, 89, 90, 91, 92, 93, 94, 95, 96, 97, 98 or 99% identical to SEQ ID NOs: 49712 to 77043.

[0215] In some embodiments, the amino acid sequence for a peptide composition for the KRAS G13D protein mutation comprises one or more of the SEQ ID NOs: 77044 to 77057. In some embodiments, any one of the peptides in the KRAS G13D composition comprise an amino acid sequence 80, 81, 82, 83, 84, 85, 86, 87, 88, 89, 90, 91, 92, 93, 94, 95, 96, 97, 98 or 99% identical to SEQ ID NOs: 77044 to 77057.

[0216] In some embodiments, the amino acid sequence for a peptide composition for the KRAS G13D protein mutation comprises one or more of SEQ ID NOs: 77044 to 99249. In some embodiments, any one of the peptides in the KRAS G13D composition comprise an amino acid sequence 80, 81, 82, 83, 84, 85, 86, 87, 88, 89, 90, 91, 92, 93, 94, 95, 96, 97, 98 or 99% identical to SEQ ID NOs: 77044 to 99249.

[0217] In some embodiments, the amino acid sequence for a peptide composition for the KRAS G13D protein mutation comprises two or more of the SEQ ID NOs: 77044 to 77057. In some embodiments, any one of the peptides in the KRAS G13D composition comprise an amino acid sequence 80, 81, 82, 83, 84, 85, 86, 87, 88, 89, 90, 91, 92, 93, 94, 95, 96, 97, 98 or 99% identical to SEQ ID NOs: 77044 to 77057.

[0218] In some embodiments, the amino acid sequence for a peptide composition for the KRAS G13D protein mutation comprises two or more of SEQ ID NOs: 77044 to 99249. In some embodiments, any one of the peptides in the KRAS G13D composition comprise an amino acid sequence 80, 81, 82, 83, 84, 85, 86, 87, 88, 89, 90, 91, 92, 93, 94, 95, 96, 97, 98 or 99% identical to SEQ ID NOs: 77044 to 99249.

[0219] Additional amino acid sequences of peptides are provided in the Sequence Listing (SEQ ID NOs: 248 to 6935, SEQ ID NOs: 6995 to 12270, SEQ ID NOs: 12397 to 49711, SEQ ID NOs: 49815 to 77043, and SEQ ID NOs: 77058 to 99249). In some embodiments, any combination of peptides disclosed herein (SEQ ID NOs: 1 to 99249) may be used to create a combined peptide composition having between about 2 and about 40 peptides. In some embodiments, any one of the peptides (SEQ ID NOs: 1 to 99249) in the combined composition comprises or contains an amino acid sequence 80, 81, 82, 83, 84, 85, 86, 87, 88, 89, 90, 91, 92, 93, 94, 95, 96, 97, 98 or 99% identical to any of SEQ ID NOs: 1 to 99249.

[0220] In some embodiments, the composition comprising the peptides disclosed herein is an immunogenic composition. In some embodiments, the composition is a vaccine.

[0221] In some embodiments, any combination of peptides disclosed herein (SEQ ID NOs: 1 to 99284) may be used to create a single target (individual) or combined peptide composition having between about 2 and about 40 peptides. In some embodiments, any one of the peptides (peptides 1 to 99284; SEQ ID NOs: 1 to 99284) in the combined composition comprises an amino acid sequence 80, 81, 82, 83, 84, 85, 86, 87, 88, 89, 90, 91, 92, 93, 94, 95, 96, 97, 98 or 99% identical to any of SEQ ID NOs: 1 to 99284.

[0222] In some embodiments, the composition comprising the peptides disclosed herein is an immunogenic composition. In some embodiments, the composition is a vaccine.

TABLE 1
Example Vaccine Peptides (MHC class II)

| | Sequence | | | | | | | Seed | Hetero- | Hetero- | Hetero- | Hetero- | |
|---|---|---|---|---|---|---|---|---|---|---|---|---|---|
| | corres- | | Core | | | Seed | | Core | clitic | clitic | clitic | clitic | |
| SEQ | ponding | | SEQ | | | SEQ | | SEQ | Modifi- | Modifi- | Modifi- | Modifi- | |
| ID | to SEQ | | ID | | | ID | Seed | ID | cation | cation | cation | cation | |
| NO | ID | Core | NO | Target | Seed | NO | Core | NO | P1 | P4 | P6 | P9 | Note |
| SEQ | EYKFV | FVVF | SEQ | KRAS | EYKLV | SEQ | LVV | SEQ | L1F | V4F | A6S | V9A | Individual |
| ID | VFGSD | GSD | ID | G12D | VVGAD | ID | VGA | ID | | | | | KRAS |
| NO: | GAGKS | GA | NO: | | GVGKS | NO: | DGV | NO: | | | | | G12D |
| 99250 | | | 7183 | | | 99275 | | 12269 | | | | | (NetMHCII |
| | | | | | | | | | | | | | pan) |
| SEQ | EYKFV | FVVI | SEQ | KRAS | EYKLV | SEQ | LVV | SEQ | L1F | V4I | A6N | V9A | Individual |
| ID | VIGND | GND | ID | G12D | VVGAD | ID | VGA | ID | | | | | KRAS |
| NO: | GAGKS | GA | NO: | | GVGKS | NO: | DGV | NO: | | | | | G12D |
| 99251 | ALTIQL | | 7292 | | ALTIQ | 99276 | | 12269 | | | | | (NetMHCII |
| | IQN | | | | LIQN | | | | | | | | pan) |
| SEQ | EYKFV | FVV | SEQ | KRAS | EYKLV | SEQ | LVV | SEQ | L1F | V4L | — | V9A | Individual |
| ID | VLGAD | LGA | ID | G12D | VVGAD | ID | VGA | ID | | | | | KRAS |
| NO: | GAGKS | DGA | NO: | | GVGKS | NO: | DGV | NO: | | | | | G12D |
| 99252 | | | 7367 | | | 99275 | | 12269 | | | | | (NetMHCII |
| | | | | | | | | | | | | | pan) |
| SEQ | MTEYK | FVVS | SEQ | KRAS | MTEYK | SEQ | LVV | SEQ | L1F | V4S | — | V9I | Individual |
| ID | FVVSG | GAD | ID | G12D | LVVVG | ID | VGA | ID | | | | | KRAS |
| NO: | ADGIG | GI | NO: | | ADGVG | NO: | DGV | NO: | | | | | G12D |
| 99253 | KSALT | | 7761 | | KSALT | 99277 | | 12269 | | | | | (NetMHCII |
| | | | | | | | | | | | | | pan) |
| SEQ | MTEYK | FVV | SEQ | KRAS | MTEYK | SEQ | LVV | SEQ | L1F | V4Y | A6S | V9I | Individual |
| ID | FVVYG | YGS | ID | G12D | LVVVG | ID | VGA | ID | | | | | KRAS |
| NO: | SDGIG | DGI | NO: | | ADGVG | NO: | DGV | NO: | | | | | G12D |
| 99254 | KSALT | | 8001 | | KSALT | 99277 | | 12269 | | | | | (NetMHCII |
| | | | | | | | | | | | | | pan) |
| SEQ | EYKFV | FVVI | SEQ | KRAS | EYKLV | SEQ | LVV | SEQ | L1F | V4I | A6R | V9H | Individual |
| ID | VIGRV | GRV | ID | G12V | VVGAV | ID | VGA | ID | | | | | KRAS |
| NO: | GHGKS | GH | NO: | | GVGKS | NO: | VGV | NO: | | | | | G12V |
| 99255 | | | 52268 | | | 99278 | | 77042 | | | | | (NetMHCII |
| | | | | | | | | | | | | | pan) |
| SEQ | EYKFV | FVV | SEQ | KRAS | EYKLV | SEQ | LVV | SEQ | L1F | V4L | A6T | V9H | Individual |
| ID | VLGTV | LGT | ID | G12V | VVGAV | ID | VGA | ID | | | | | KRAS |
| NO: | GHGKS | VGH | NO: | | GVGKS | NO: | VGV | NO: | | | | | G12V |
| 99256 | | | 52766 | | | 99278 | | 77042 | | | | | (NetMHCII |
| | | | | | | | | | | | | | pan) |
| SEQ | EYKFV | FVV | SEQ | KRAS | EYKLV | SEQ | LVV | SEQ | L1F | V4Y | A6N | V9M | Individual |
| ID | VYGNV | YGN | ID | G12V | VVGAV | ID | VGA | ID | | | | | KRAS |
| NO: | GMGKS | VGM | NO: | | GVGKS | NO: | VGV | NO: | | | | | G12V |
| 99257 | | | 54952 | | | 99278 | | 77042 | | | | | (NetMHCII |
| | | | | | | | | | | | | | pan) |
| SEQ | EYKIV | IVVA | SEQ | KRAS | EYKLV | SEQ | LVV | SEQ | L1I | V4A | A6N | V9I | Individual |
| ID | VAGNV | GNV | ID | G12V | VVGAV | ID | VGA | ID | | | | | KRAS |
| NO: | GIGKS | GI | NO: | | GVGKS | NO: | VGV | NO: | | | | | G12V |
| 99258 | | | 55271 | | | 99278 | | 77042 | | | | | (NetMHCII |
| | | | | | | | | | | | | | pan) |
| SEQ | TEYKI | IVV | SEQ | KRAS | TEYKL | SEQ | LVV | SEQ | L1I | V4M | A6N | V9Y | Individual |
| ID | VVMG | MGN | ID | G12V | VVVGA | ID | VGA | ID | | | | | KRAS |
| NO: | NVGYG | VGY | NO: | | VGVGK | NO: | VGV | NO: | | | | | G12V |
| 99259 | K | | 56518 | | | 99279 | | 77042 | | | | | (NetMHCII |
| | | | | | | | | | | | | | pan) |
| SEQ | MTEYK | FVVF | SEQ | KRAS | MTEYK | SEQ | LVV | SEQ | L1F | V4F | A6S | — | Individual |
| ID | FVVFG | GSR | ID | G12R | LVVVG | ID | VGA | ID | | | | | KRAS |
| NO: | SRGVG | GV | NO: | | ARGVG | NO: | RGV | NO: | | | | | G12R |
| 99260 | KSALT | | 17104 | | KSALT | 99280 | | 49710 | | | | | (NetMHCII |
| | | | | | | | | | | | | | pan) |
| SEQ | MTEYK | FVVI | SEQ | KRAS | MTEYK | SEQ | LVV | SEQ | L1F | V4I | A6N | — | Individual |
| ID | FVVIG | GNR | ID | G12R | LVVVG | ID | VGA | ID | | | | | KRAS |
| NO: | NRGVG | GV | NO: | | ARGVG | NO: | RGV | NO: | | | | | G12R |
| 99261 | KSALT | | 17585 | | KSALT | 99280 | | 49710 | | | | | (NetMHCII |
| | | | | | | | | | | | | | pan) |
| SEQ | MTEYK | FVVI | SEQ | KRAS | MTEYK | SEQ | LVV | SEQ | L1F | V4I | A6V | V9D | Individual |
| ID | FVVIG | GVR | ID | G12R | LVVVG | ID | VGA | ID | | | | | KRAS |
| NO: | VRGDG | GD | NO: | | ARGVG | NO: | RGV | NO: | | | | | G12R |
| 99262 | KSALT | | 17678 | | KSALT | 99280 | | 49710 | | | | | (NetMHCII |
| | | | | | | | | | | | | | pan) |
| SEQ | MTEYK | FVV | SEQ | KRAS | MTEYK | SEQ | LVV | SEQ | L1F | V4M | A6S | V9A | Individual |
| ID | FVVMG | MGS | ID | G12R | LVVVG | ID | VGA | ID | | | | | KRAS |
| NO: | SRGAG | RGA | NO: | | ARGVG | NO: | RGV | NO: | | | | | G12R |
| 99263 | KSALT | | 18394 | | KSALT | 99280 | | 49710 | | | | | (NetMHCII |
| | | | | | | | | | | | | | pan) |
| SEQ | VVVIA | IARG | SEQ | KRAS | VVVGA | SEQ | GAR | SEQ | G1I | — | G6P | A9L | Individual |
| ID | RGVPK | VPKS | ID | G12R | RGVGK | ID | GVG | ID | | | | | KRAS |
| NO: | SLLTI | L | NO: | | SALTI | NO: | KSA | NO: | | | | | G12R |
| 99264 | | | 14686 | | | 99281 | | 49708 | | | | | (NetMHCII |
| | | | | | | | | | | | | | pan) |
| SEQ | EYKFV | FVVF | SEQ | KRAS | EYKLV | SEQ | LVV | SEQ | L1F | V4F | A6N | V9A | Individual |
| ID | VFGNC | GNC | ID | G12C | VVGAC | ID | VGA | ID | | | | | KRAS |
| NO: | GAGKS | GA | NO: | | GVGKS | NO: | CGV | NO: | | | | | G12C |
| 99265 | | | 538 | | | 99282 | | 6934 | | | | | (NetMHCII |
| | | | | | | | | | | | | | pan) |
| SEQ | EYKFV | FVVS | SEQ | KRAS | EYKLV | SEQ | LVV | SEQ | L1F | V4S | — | — | Individual |
| ID | VSGAC | GAC | ID | G12C | VVGAC | ID | VGA | ID | | | | | KRAS |
| NO: | GVGKS | GV | NO: | | GVGKS | NO: | CGV | NO: | | | | | G12C |
| 99266 | | | 1369 | | | 99282 | | 6934 | | | | | (NetMHCII |
| | | | | | | | | | | | | | pan) |
| SEQ | EYKFV | FVVS | SEQ | KRAS | EYKLV | SEQ | LVV | SEQ | L1F | V4S | A6N | V9L | Individual |
| ID | VSGNC | GNC | ID | G12C | VVGAC | ID | VGA | ID | | | | | KRAS |
| NO: | GLGKS | GL | NO: | | GVGKS | NO: | CGV | NO: | | | | | G12C |
| 99267 | | | 1388 | | | 99282 | | 6934 | | | | | (NetMHCII |
| | | | | | | | | | | | | | pan) |
| SEQ | EYKLV | LVV | SEQ | KRAS | EYKLV | SEQ | LVV | SEQ | — | V4M | A6P | V9A | Individual |
| ID | VMGPC | MGP | ID | G12C | VVGAC | ID | VGA | ID | | | | | KRAS |
| NO: | GAGKS | CGA | NO: | | GVGKS | NO: | CGV | NO: | | | | | G12C |
| 99268 | | | 2834 | | | 99282 | | 6934 | | | | | (NetMHCII |
| | | | | | | | | | | | | | pan) |
| SEQ | KLVIV | IVGI | SEQ | KRAS | KLVVV | SEQ | VVG | SEQ | V1I | A4I | G6K | K9H | Individual |
| ID | GICKV | CKV | ID | G12C | GACGV | ID | ACG | ID | | | | | KRAS |
| NO: | GHSAL | GH | NO: | | GKSAL | NO: | VGK | NO: | | | | | G12C |
| 99269 | | | 5507 | | | 99283 | | 6935 | | | | | (NetMHCII |
| | | | | | | | | | | | | | pan) |
| SEQ | EYKFV | FVVF | SEQ | KRAS | EYKLV | SEQ | LVV | SEQ | L1F | V4F | A6N | V9L | Individual |
| ID | VFGNG | GNG | ID | G13D | VVGAG | ID | VGA | ID | | | | | KRAS |
| NO: | DLGKS | DL | NO: | | DVGKS | NO: | GDV | NO: | | | | | G13D |
| 99270 | | | 77451 | | | 99284 | | 99247 | | | | | (NetMHCII |
| | | | | | | | | | | | | | pan) |
| SEQ | EYKFV | FVV | SEQ | KRAS | EYKLV | SEQ | LVV | SEQ | L1F | V4M | A6N | V9S | Individual |
| ID | VMGN | MGN | ID | G13D | VVGAG | ID | VGA | ID | | | | | KRAS |
| NO: | GDSGK | GDS | NO: | | DVGKS | NO: | GDV | NO: | | | | | G13D |
| 99271 | S | | 78179 | | | 99284 | | 99247 | | | | | (NetMHCII |
| | | | | | | | | | | | | | pan) |
| SEQ | EYKFV | FVVS | SEQ | KRAS | EYKLV | SEQ | LVV | SEQ | L1F | V4S | A6S | — | Individual |
| ID | VSGSG | GSG | ID | G13D | VVGAG | ID | VGA | ID | | | | | KRAS |
| NO: | DVGKS | DV | NO: | | DVGKS | NO: | GDV | NO: | | | | | G13D |
| 99272 | | | 78554 | | | 99284 | | 99247 | | | | | (NetMHCII |
| | | | | | | | | | | | | | pan) |
| SEQ | EYKIV | IVV | SEQ | KRAS | EYKLV | SEQ | LVV | SEQ | L1I | V4M | A6R | V9M | Individual |
| ID | VMGR | MGR | ID | G13D | VVGAG | ID | VGA | ID | | | | | KRAS |
| NO: | GDMG | GDM | NO: | | DVGKS | NO: | GDV | NO: | | | | | G13D |
| 99273 | KS | | 79238 | | | 99284 | | 99247 | | | | | (NetMHCII |
| | | | | | | | | | | | | | pan) |
| SEQ | YKLVV | — | — | KRAS | — | — | — | — | — | — | — | — | Individual |
| ID | VGAGD | | | G13D | | | | | | | | | KRAS |
| NO: | VGKSA | | | | | | | | | | | | G13D |
| 99274 | | | | | | | | | | | | | (NetMHCII |
| | | | | | | | | | | | | | pan) |

mRNA and DNA Compositions

[0223] In some embodiments, peptides are encoded as mRNA or DNA molecules and are administered for expression in vivo as is known in the art. One example of the delivery of mRNA in a composition is found in Kranz et al., (2016), incorporated in its entirety by reference herein. In some embodiments, unique peptides are encoded in more than one mRNA or DNA molecule as is found in Sahin et. al. (2017), incorporated by reference in its entirety herein. In one embodiment, a construct comprises nucleic acids encoding 5 peptides, including a five-peptide MHC class II composition (target: KRAS G12D), as optimized by the procedure described herein. Peptides are prepended with a secretion signal sequence at the N-terminus and followed by an MHC class I trafficking signal (MITD) (Kreiter et al., 2008; Sahin et al., 2017). The MITD has been shown to route antigens to pathways for HLA class I and class II presentation (Kreiter et al., 2008). Here we combine all nucleic acids encoding the peptides of each MHC class into a single construct using non-immunogenic glycine/serine linkers from Sahin et al., (2017), though it is also plausible to construct individual constructs containing nucleic acids encoding single peptides with the same secretion and MITD signals as demonstrated by Kreiter et al., (2008).

[0224] In some embodiments, the amino acid sequence encoded by the mRNA composition comprises SEQ ID NO: 99285. Underlined amino acids correspond to the signal peptide (or leader) sequence. Bolded amino acids correspond to MHC class II (13-25 amino acids in length; 5 peptides) peptide sequences. Italicized amino acids correspond to the trafficking signal. In alternate embodiments, any number and variation of peptide sequences disclosed herein can be included in an mRNA vaccine comprising the signal peptide sequence and the trafficking signal as shown in SEQ ID NO: 99285 below.

(SEQ ID NO: 99285)
MRVTAPRTLILLLSGALALTETWAGSGGSGGGGSGGEYKFVVFGSDGAG
KSGGSGGGGSGGEYKFVVIGNDGAGKSALTIQLIQNGGSGGGGSGGEYK
FVVLGADGAGKSGGSGGGGSGGMTEYKFVVSGADGIGKSALTGGSGGGG
SGGMTEYKFVVYGSDGIGKSALTGGSLGGGGSGIVGIVAGLAVLAVVVI
GAVVATVMCRRKSSGGKGGSYSQAASSDSAQGSDVSLTA.

[0225] In some embodiments, the composition is an mRNA composition comprising a nucleic acids sequence encoding the amino acid sequence consisting of SEQ ID NO: 99285. In some embodiments, the nucleic acid sequence of the mRNA composition encodes for an amino acid sequence 80, 81, 82, 83, 84, 85, 86, 87, 88, 89, 90, 91, 92, 93, 94, 95, 96, 97, 98 or 99% identical to SEQ ID NO: 99285.

[0226] In some embodiments, the composition is a DNA composition comprising a nucleic acids sequence encoding the amino acid sequence consisting of SEQ ID NO: 99285. In some embodiments, the nucleic acid sequence of the DNA composition encodes for an amino acid sequence 80, 81, 82, 83, 84, 85, 86, 87, 88, 89, 90, 91, 92, 93, 94, 95, 96, 97, 98 or 99% identical to SEQ ID NO: 99285.

[0227] In some embodiments, one or more MHC class I and/or MHC class II peptides disclosed herein (SEQ ID NO: 1 to 99285) can be encoded in one or more mRNA or DNA molecules and administered for expression in vivo. In some embodiments, between about 2 and about 40 peptide sequences are encoded in one or more mRNA constructs. In some embodiments, between about 2 and about 40 peptide sequences are encoded in one or more DNA constructs (i.e., nucleic acids encoding the amino acids sequences comprising on or more of SEQ ID NOs: 1 to 99285). In some embodiments, the amino acid sequence of the mRNA composition or the nucleic acid sequence of the DNA composition encodes for an amino acid sequence 80, 81, 82, 83, 84, 85, 86, 87, 88, 89, 90, 91, 92, 93, 94, 95, 96, 97, 98 or 99% identical to any of SEQ ID NOs: 1 to 99285.

[0228] In some embodiments, mRNA encoded peptides disclosed herein are used as the payload of a self-amplifying RNA vaccine. In one embodiment, the mRNA sequence encoding the composition peptides replaces one or more structural proteins of an infectious alphavirus particle as described in Geall et al., (2012),incorporated by reference in its entirety herein. As is described by Geall et al., (2012), self-amplifying RNA compositions can increase the efficiency of antigen production in vivo. In some embodiments, mRNA encoded peptides disclosed herein are used as the payload in a non-amplifying RNA vaccine.

[0229] In some embodiments, the composition comprising the nucleic acid sequences described herein is an immunogenic composition. In some embodiments, the composition is a vaccine.

### Non-Limiting Embodiments of the Subject Matter

[0230] In one aspect, the invention provides for nucleic acid sequences encoding one or more amino acid sequences selected from the group consisting of SEQ ID NOs: 1 to 247, SEQ ID NOs: 6936 to 6994, SEQ ID NOs: 12271 to 12396, SEQ ID NOs: 49712 to 49814, and SEQ ID NOs: 77044 to 77057.

[0231] In some embodiments, the nucleic acid sequences encode two or more amino acid sequences selected from the group consisting of SEQ ID NOs: 1 to 247, SEQ ID NOs: 6936 to 6994, SEQ ID NOs: 12271 to 12396, SEQ ID NOs: 49712 to 49814, and SEQ ID NOs: 77044 to 77057.

[0232] In another aspect, the invention provides for a composition comprising nucleic acid sequences encoding one or more amino acid sequences selected from the group consisting of SEQ ID NOs: 1 to 247, SEQ ID NOs: 6936 to 6994, SEQ ID NOs: 12271 to 12396, SEQ ID NOs: 49712 to 49814, and SEQ ID NOs: 77044 to 77057.

[0233] In some embodiments, the composition is administered to a subject. In some embodiments, the composition comprises nucleic acid sequences encoding two or more amino acid sequences selected from the group consisting of SEQ ID NOs: 1 to 247, SEQ ID NOs: 6936 to 6994, SEQ ID NOs: 12271 to 12396, SEQ ID NOs: 49712 to 49814, and SEQ ID NOs: 77044 to 77057. In some embodiments, the nucleic acid sequences are administered in a construct for expression in vivo. In some embodiments, the in vivo administration of the nucleic acid sequences are configured to produce one or more peptides that is displayed by an HLA molecule. In some embodiments, the one or more peptides is a modified or unmodified fragment of a mutated protein selected from the group consisting of KRAS. In some embodiments, the one or more peptides is a modified or unmodified fragment of a protein, wherein the protein comprises a mutation selected from the group consisting of KRAS G12C, KRAS G12D, KRAS G12R, KRAS G12V, and KRAS G13D. In some embodiments, the composition is administered in an effective amount to a subject to prevent cancer. In some embodiments, the composition is administered in an effective amount to a subject to treat cancer. In some embodiments, the cancer is selected from the group consisting of pancreas, colon, rectum, kidney, bronchus, lung, uterus, cervix, bladder, liver, stomach, brain, breast, ovary, thyroid, and skin. In some embodiments, the composition comprises nucleic acid sequences encoding at least three amino acid sequences selected from the group consisting of SEQ ID NOs: 1 to 247, SEQ ID NOs: 6936 to 6994, SEQ ID NOs: 12271 to 12396, SEQ ID NOs: 49712 to 49814, and SEQ ID NOs: 77044 to 77057.

[0234] In another aspect, the invention provides for a peptide composition comprising one or more peptides selected from the group consisting of SEQ ID NOs: 1 to 247, SEQ ID NOs: 6936 to 6994, SEQ ID NOs: 12271 to 12396, SEQ ID NOs: 49712 to 49814, and SEQ ID NOs: 77044 to 77057.

[0235] In some embodiments, the peptide composition comprises two or more peptides selected from the group consisting of SEQ ID NOs: 1 to 247, SEQ ID NOs: 6936 to 6994, SEQ ID NOs: 12271 to 12396, SEQ ID NOs: 49712 to 49814, and SEQ ID NOs: 77044 to 77057.

[0236] In another aspect, the invention provides for a composition comprising nucleic acid sequences encoding one or more amino acid sequences selected from the group consisting of SEQ ID NOs: 1 to 247, SEQ ID NOs: 6936 to 6994, SEQ ID NOs: 12271 to 12396, SEQ ID NOs: 49712 to 49814, and SEQ ID NOs: 77044 to 77057.

[0237] In some embodiments, the composition comprises nucleic acid sequences encoding one or more amino acid sequences derived from a KRAS protein mutation. In some embodiments, the composition comprises nucleic acid sequences encoding two or more amino acid sequences selected from the group consisting of SEQ ID NOs: 1 to 247, SEQ ID NOs: 6936 to 6994, SEQ ID NOs: 12271 to 12396, SEQ ID NOs: 49712 to 49814, and SEQ ID NOs: 77044 to 77057.

[0238] In another aspect, the invention provides for a peptide composition comprising one or more peptides selected from the group consisting of SEQ ID NOs: 1 to 247, SEQ ID NOs: 6936 to 6994, SEQ ID NOs: 12271 to 12396, SEQ ID NOs: 49712 to 49814, and SEQ ID NOs: 77044 to 77057.

[0239] In some embodiments, the peptide composition comprises two or more peptides selected from the group consisting of SEQ ID NOs: 1 to 247, SEQ ID NOs: 6936 to 6994, SEQ ID NOs: 12271 to 12396, SEQ ID NOs: 49712 to 49814, and SEQ ID NOs: 77044 to 77057. In some embodiments, the one or more peptides is a modified or unmodified fragment of a mutated KRAS protein.

[0240] In another aspect, the invention provides for a composition comprising nucleic acid sequences encoding one or more amino acid sequences selected from the group consisting of SEQ ID NOs: 1 to 247.

[0241] In some embodiments, the composition comprises nucleic acid sequences encoding one or more amino acid sequences derived from a KRAS G12C protein mutation. In some embodiments, the composition comprises nucleic acid sequences encoding two or more amino acid sequences selected from the group consisting of SEQ ID NOs: 1 to 247.

[0242] In another aspect, the invention provides for a peptide composition comprising one or more peptides selected from the group consisting of SEQ ID NOs: 1 to 247.

[0243] In some embodiments, the peptide composition comprises two or more peptides selected from the group consisting of SEQ ID NOs: 1 to 247. In some embodiments, the peptide composition comprises a peptide derived from a KRAS G12C protein mutation.

[0244] In another aspect, the invention provides for a composition comprising nucleic acid sequences encoding one or more amino acid sequences selected from the group consisting of SEQ ID NOs: 6936 to 6994.

[0245] In some embodiments, the composition comprises nucleic acid sequences encoding one or more amino acid sequences derived from a KRAS G12D protein mutation. In some embodiments, the composition comprises nucleic acid sequences encoding two or more amino acid sequences selected from the group consisting of SEQ ID NOs: 6936 to 6994.

[0246] In another aspect, the invention provides for a peptide composition comprising one or more peptides selected from the group consisting of SEQ ID NOs: 6936 to 6994.

[0247] In some embodiments, the peptide composition comprises two or more peptides selected from the group consisting of SEQ ID NOs: 6936 to 6994. In some embodiments, the peptide composition comprises a peptide derived from a KRAS G12D protein mutation.

[0248] In another aspect, the invention provides for a composition comprising nucleic acid sequences encoding one or more amino acid sequences selected from the group consisting of SEQ ID NOs: 12271 to 12396.

[0249] In some embodiments, the composition comprises nucleic acid sequences encoding one or more amino acid sequences derived from a KRAS G12R protein mutation. In some embodiments, the composition comprises nucleic acid sequences encoding two or more amino acid sequences selected from the group consisting of SEQ ID NOs: 12271 to 12396.

[0250] In another aspect, the invention provides for a peptide composition comprising one or more peptides selected from the group consisting of SEQ ID NOs: 12271 to 12396.

[0251] In some embodiments, the peptide composition comprises two or more peptides selected from the group consisting of SEQ ID NOs: 12271 to 12396. In some embodiments, the peptide composition comprises a peptide derived from a KRAS G12R protein mutation.

[0252] In another aspect, the invention provides for a composition comprising nucleic acid sequences encoding one or more amino acid sequences selected from the group consisting of SEQ ID NOs: 49712 to 49814.

[0253] In some embodiments, the composition comprises nucleic acid sequences encoding one or more amino acid sequences derived from a KRAS G12V protein mutation. In some embodiments, the composition comprises nucleic acid sequences encoding two or more amino acid sequences selected from the group consisting of SEQ ID NOs: 49712 to 49814.

[0254] In another aspect, the invention provides for a peptide composition comprising one or more peptides selected from the group consisting of SEQ ID NOs: 49712 to 49814.

[0255] In some embodiments, the peptide composition comprises two or more peptides selected from the group consisting of SEQ ID NOs: 49712 to 49814. In some embodiments, the peptide composition comprises a peptide derived from a KRAS G12V protein mutation.

[0256] In another aspect, the invention provides for a composition comprising nucleic acid sequences encoding one or more amino acid sequences selected from the group consisting of SEQ ID NOs: 77044 to 77057.

[0257] In some embodiments, the composition comprises nucleic acid sequences encoding one or more amino acid sequences derived from a KRAS G13D protein mutation. In some embodiments, the composition comprises nucleic acid sequences encoding two or more amino acid sequences selected from the group consisting of SEQ ID NOs: 77044 to 77057.

[0258] In another aspect, the invention provides for a peptide composition comprising one or more peptides selected from the group consisting of SEQ ID NOs: 77044 to 77057.

[0259] In some embodiments, the peptide composition comprises two or more peptides selected from the group consisting of SEQ ID NOs: 77044 to 77057. In some embodiments, the peptide composition comprises a peptide derived from a KRAS G13D protein mutation.

[0260] In another aspect, the invention provides for nucleic acid sequences encoding one or more amino acid sequences selected from the group consisting of SEQ ID NOs: 1 to 99249.

[0261] In some embodiments, the nucleic acid sequences encode two or more amino acid sequences selected from the group consisting of SEQ ID NOs: 1 to 99249.

[0262] In another aspect, the invention provides for a composition comprising nucleic acid sequences encoding one or more amino acid sequences selected from the group consisting of SEQ ID NOs: 1 to 99249.

[0263] In some embodiments, the composition is administered to a subject. In some embodiments, the composition comprises nucleic acid sequences encoding two or more amino acid sequences selected from the group consisting of SEQ ID NOs: 1 to 99249. In some embodiments, the nucleic acid sequences are administered in a construct for expression in vivo. In some embodiments, the in vivo administration of the nucleic acid sequences are configured to produce one or more peptides that is displayed by an HLA molecule. In some embodiments, the one or more peptides is a modified or unmodified fragment of a mutated protein selected from the group consisting of KRAS. In some embodiments, the one or more peptides is a modified or unmodified fragment of a protein, wherein the protein comprises a mutation selected from the group consisting of KRAS G12C, KRAS G12D, KRAS G12R, KRAS G12V, and KRAS G13D. In some embodiments, the composition is administered in an effective amount to a subject to prevent cancer. In some embodiments, the composition is administered in an effective amount to a subject to treat cancer. In some embodiments, the cancer is selected from the group consisting of pancreas, colon, rectum, kidney, bronchus, lung, uterus, cervix, bladder, liver, stomach, brain, breast, ovary, thyroid, and skin. In some embodiments, the composition comprises nucleic acid sequences encoding at least three amino acid sequences selected from the group consisting of SEQ ID NOs: 1 to 99249.

[0264] In another aspect, the invention provides for a peptide composition comprising one or more peptides selected from the group consisting of SEQ ID NOs: 1 to 99249.

[0265] In some embodiments, the peptide composition comprises two or more peptides selected from the group consisting of SEQ ID NOs: 1 to 99249.

[0266] In another aspect, the invention provides for a composition comprising nucleic acid sequences encoding one or more amino acid sequences selected from the group consisting of SEQ ID NOs: 1 to 99249.

[0267] In some embodiments, the composition comprises nucleic acid sequences encoding one or more amino acid sequences derived from a KRAS protein mutation. In some embodiments, the composition comprises nucleic acid sequences encoding two or more amino acid sequences selected from the group consisting of SEQ ID NOs: 1 to 99249.

[0268] In another aspect, the invention provides for a peptide composition comprising one or more peptides selected from the group consisting of SEQ ID NOs: 1 to 99249.

[0269] In some embodiments, the peptide composition comprises two or more peptides selected from the group consisting of SEQ ID NOs: 1 to 99249. In some embodiments, the one or more peptides is a modified or unmodified fragment of a mutated KRAS protein.

[0270] In another aspect, the invention provides for a composition comprising nucleic acid sequences encoding one or more amino acid sequences selected from the group consisting of SEQ ID NOs: 1 to 6935.

[0271] In some embodiments, the composition comprises nucleic acid sequences encoding one or more amino acid sequences derived from a KRAS G12C protein mutation. In some embodiments, the composition comprises nucleic acid sequences encoding two or more amino acid sequences selected from the group consisting of SEQ ID NOs: 1 to 6935.

[0272] In another aspect, the invention provides for a peptide composition comprising one or more peptides selected from the group consisting of SEQ ID NOs: 1 to 6935.

[0273] In some embodiments, the peptide composition comprises two or more peptides selected from the group consisting of SEQ ID NOs: 1 to 6935. In some embodiments, the peptide composition comprises a peptide derived from a KRAS G12C protein mutation.

[0274] In another aspect, the invention provides for a composition comprising nucleic acid sequences encoding one or more amino acid sequences selected from the group consisting of SEQ ID NOs: 6936 to 12270.

[0275] In some embodiments, the composition comprises nucleic acid sequences encoding one or more amino acid sequences derived from a KRAS G12D protein mutation. In some embodiments, the composition comprises nucleic acid sequences encoding two or more amino acid sequences selected from the group consisting of SEQ ID NOs: 6936 to 12270.

[0276] In another aspect, the invention provides for a peptide composition comprising one or more peptides selected from the group consisting of SEQ ID NOs: 6936 to 12270.

[0277] In some embodiments, the peptide composition comprises two or more peptides selected from the group consisting of SEQ ID NOs: 6936 to 12270. In some embodiments, the peptide composition comprises a peptide derived from a KRAS G12D protein mutation.

[0278] In another aspect, the invention provides for a composition comprising nucleic acid sequences encoding one or more amino acid sequences selected from the group consisting of SEQ ID NOs: 12271 to 49711.

[0279] In some embodiments, the composition comprises nucleic acid sequences encoding one or more amino acid sequences derived from a KRAS G12R protein mutation. In some embodiments, the composition comprises nucleic acid sequences encoding two or more amino acid sequences selected from the group consisting of SEQ ID NOs: 12271 to 49711.

[0280] In another aspect, the invention provides for a peptide composition comprising one or more peptides selected from the group consisting of SEQ ID NOs: 12271 to 49711.

[0281] In some embodiments, the peptide composition comprises two or more peptides selected from the group consisting of SEQ ID NOs: 12271 to 49711. In some embodiments, the peptide composition comprises a peptide derived from a KRAS G12R protein mutation.

[0282] In another aspect, the invention provides for a composition comprising nucleic acid sequences encoding one or more amino acid sequences selected from the group consisting of SEQ ID NOs: 49712 to 77043.

[0283] In some embodiments, the composition comprises nucleic acid sequences encoding one or more amino acid sequences derived from a KRAS G12V protein mutation. In some embodiments, the composition comprises nucleic acid sequences encoding two or more amino acid sequences selected from the group consisting of SEQ ID NOs: 49712 to 77043.

[0284] In another aspect, the invention provides for a peptide composition comprising one or more peptides selected from the group consisting of SEQ ID NOs: 49712 to 77043.

[0285] In some embodiments, the peptide composition comprises two or more peptides selected from the group consisting of SEQ ID NOs: 49712 to 77043. In some embodiments, the peptide composition comprises a peptide derived from a KRAS G12V protein mutation.

[0286] In another aspect, the invention provides for a composition comprising nucleic acid sequences encoding one or more amino acid sequences selected from the group consisting of SEQ ID NOs: 77044 to 99249.

[0287] In some embodiments, the composition comprises nucleic acid sequences encoding one or more amino acid sequences derived from a KRAS G13D protein mutation. In some embodiments, the composition comprises nucleic acid sequences encoding two or more amino acid sequences selected from the group consisting of SEQ ID NOs: 77044 to 99249.

[0288] In another aspect, the invention provides for a peptide composition comprising one or more peptides selected from the group consisting of SEQ ID NOs: 77044 to 99249.

[0289] In some embodiments, the peptide composition comprises two or more peptides selected from the group consisting of SEQ ID NOs: 77044 to 99249. In some embodiments, the peptide composition comprises a peptide derived from a KRAS G13D protein mutation.

[0290] In some embodiments, the compositions, including peptide compositions, of the invention are immunogenic compositions. To this end, the invention provides for a method of inducing an immunogenic response in a subject comprising administering to the subject a composition of the invention.

[0291] In some embodiments, compositions, including peptide compositions, of the invention are vaccines.

### Compositions

[0292] In some embodiments, the nucleic acid sequences of this disclosure are administered in a composition. In some embodiments, the nucleic acid sequences of this disclosure are administered in a pharmaceutical composition that includes a pharmaceutically acceptable carrier. In some embodiments, the pharmaceutical composition is in the form of a spray, aerosol, gel, solution, emulsion, lipid nanoparticle, nanoparticle, or suspension. In some embodiments, the composition or pharmaceutical composition is in the form of a cationic nanoemulsion, one example of which is described by Brito et al., (2014) that is incorporated herein by reference.

[0293] In some embodiments, the one or more peptides of this disclosure are administered in a composition. In some embodiments, the one or more peptides of this disclosure are administered in a pharmaceutical composition that includes a pharmaceutically acceptable carrier. In some embodiments, the composition or pharmaceutical composition is comprised of the third peptide set, as described in this disclosure. In some embodiments, the pharmaceutical composition is in the form of a spray, aerosol, gel, solution, emulsion, lipid nanoparticle, nanoparticle, or suspension. In some embodiments, the composition pharmaceutical composition is in the form of a cationic nanoemulsion, one example of which is described by Brito et al., (2014) that is incorporated herein by reference.

[0294] The composition is preferably administered to a subject with a pharmaceutically acceptable carrier, i.e., as a pharmaceutical composition. Typically, in some embodiments, an appropriate amount of a pharmaceutically acceptable salt is used in the formulation, which in some embodiments can render the formulation isotonic.

[0295] In certain embodiments, nucleic acid sequences are provided as an immunogenic composition comprising any one of the nucleic acid sequences described herein and a pharmaceutically acceptable carrier. In some embodiments, modified RNA is used with full substitution of 5-Methoxy-U for uracil or other nucleoside analogs are used to reduce the immunogenicity of the RNA. Some embodiments of modified RNA are described in U.S. Pat. No. 10,232,055, incorporated by reference in its entirety herein. In some embodiments, the RNA is capped. One embodiment of capping is described in U.S. Pat. No. 10,494,399, incorporated by reference in its entirety herein. In some embodiments, the RNA is polyadenylated, for example with 120 adenosines. In some embodiments, the open reading frame of the RNA is flanked by a 5′ untranslated region (UTR) containing a strong Kozak translational initiation signal, and an alpha-globin 3′ UTR terminating with an oligo(dT) sequence for templated addition of a polyA tail as described in Warren et al., 2010, incorporated by reference in its entirety herein. In some embodiments, nucleic acid is encapsulated in lipid nanoparticles (LNPs). One embodiment of preparing lipid nanoparticles that contain RNA is described by Pardi et al., 2017, incorporated by reference in its entirety herein. In some embodiments, to prepare mRNA-LNPs, an ethanolic solution of ALC-0315 (described in International Patent Publication No. WO2017/075531, incorporated by reference in its entirety herein), cholesterol, distearoylphosphatidylcholine (DSPC), and 2-[(polyethylene glycol)-2000] N,N ditetradecylacetamide (ALC-0159, described in U.S. Pat. No. 9,738,593, incorporated by reference in its entirety herein) is rapidly mixed with a solution of RNA in citrate buffer at pH 4.0 (the composition is described in International Patent Publication No. WO2018/081480, incorporated by reference in its entirety herein).

[0296] In certain embodiments, the peptides are provided as an immunogenic composition comprising any one of the peptides described herein and a pharmaceutically acceptable carrier. In certain embodiments, the immunogenic composition further comprises an adjuvant. In certain embodiments, the peptides are conjugated with other molecules to increase their effectiveness as is known by those practiced in the art. For example, peptides can be coupled to antibodies that recognize cell surface proteins on antigen presenting cells to enhance vaccine effectiveness. One such method for increasing the effectiveness of peptide delivery is described in Woodham, et al., (2018). In certain embodiments for the treatment of autoimmune disorders, the peptides are delivered with a composition and protocol designed to induce tolerance as is known in the art. Example methods for using peptides for immune tolerization are described in Alhadj Ali, et al., (2017) and Gibson, et al., (2015).

[0297] In some embodiments, the pharmaceutically acceptable carrier is selected from the group consisting of saline, Ringer's solution, dextrose solution, and a combination thereof. Other suitable pharmaceutically acceptable carriers known in the art are contemplated. Suitable carriers and their formulations are described in Remington's Pharmaceutical Sciences, 2005, Mack Publishing Co. The pH of the solution is preferably from about 5 to about 8, and more preferably from about 7 to about 7.5. The formulation may also comprise a lyophilized powder. Further carriers include sustained release preparations such as semipermeable matrices of solid hydrophobic polymers, which matrices are in the form of shaped articles, e.g., films, liposomes or microparticles. It will be apparent to those persons skilled in the art that certain carriers may be more preferable depending upon, for instance, the route of administration and concentration of peptides being administered.

[0298] The phrase pharmaceutically acceptable carrier as used herein means a pharmaceutically acceptable material, composition or vehicle, such as a liquid or solid filler, diluent, excipient, solvent or encapsulating material, involved in carrying or transporting the subject pharmaceutical agent from one organ, or portion of the body, to another organ, or portion of the body. Each carrier is acceptable in the sense of being compatible with the other ingredients of the formulation and not injurious to the patient. Some examples of materials which can serve as pharmaceutically acceptable carriers include: sugars, such as lactose, glucose and sucrose; starches, such as corn starch and potato starch; cellulose, and its derivatives, such as sodium carboxymethyl cellulose, ethyl cellulose and cellulose acetate; powdered tragacanth; malt; gelatin; talc; excipients, such as cocoa butter and suppository waxes; oils, such as peanut oil, cottonseed oil, safflower oil, sesame oil, olive oil, corn oil and soybean oil; glycols, such as butylene glycol; polyols, such as glycerin, sorbitol, mannitol and polyethylene glycol; esters, such as ethyl oleate and ethyl laurate; agar; buffering agents, such as magnesium hydroxide and aluminum hydroxide; alginic acid; pyrogen-free water; isotonic saline; Ringer's solution; ethyl alcohol; phosphate buffer solutions; and other non-toxic compatible substances employed in pharmaceutical formulations. The term carrier denotes an organic or inorganic ingredient, natural or synthetic, with which the active ingredient is combined to facilitate the application. The components of the pharmaceutical compositions also are capable of being comingled with the compounds of the present invention, and with each other, in a manner such that there is no interaction which would substantially impair the desired pharmaceutical efficiency. The composition may also include additional agents such as an isotonicity agent, a preservative, a surfactant, and, a divalent cation, preferably, zinc.

[0299] The composition can also include an excipient, or an agent for stabilization of a peptide composition, such as a buffer, a reducing agent, a bulk protein, amino acids (such as e.g., glycine or praline) or a carbohydrate. Bulk proteins useful in formulating peptide compositions include albumin. Typical carbohydrates useful in formulating peptides include but are not limited to sucrose, mannitol, lactose, trehalose, or glucose.

[0300] Surfactants may also be used to prevent soluble and insoluble aggregation and/or precipitation of peptides or proteins included in the composition. Suitable surfactants include but are not limited to sorbitan trioleate, soya lecithin, and oleic acid. In certain cases, solution aerosols are preferred using solvents such as ethanol. Thus, formulations including peptides can also include a surfactant that can reduce or prevent surface-induced aggregation of peptides by atomization of the solution in forming an aerosol. Various conventional surfactants can be employed, such as polyoxyethylene fatty acid esters and alcohols, and polyoxyethylene sorbitol fatty acid esters. Amounts will generally range between 0.001% and 4% by weight of the formulation. In some embodiments, surfactants used with the present disclosure are polyoxyethylene sorbitan monooleate, polysorbate 80, polysorbate 20. Additional agents known in the art can also be included in the composition.

[0301] In some embodiments, the compositions and dosage forms further comprise one or more compounds that reduce the rate by which an active ingredient will decay, or the composition will change in character. So called stabilizers or preservatives may include, but are not limited to, amino acids, antioxidants, pH buffers, or salt buffers. Nonlimiting examples of antioxidants include butylated hydroxy anisole (BHA), ascorbic acid and derivatives thereof, tocopherol and derivatives thereof, butylated hydroxy anisole and cysteine. Nonlimiting examples of preservatives include parabens, such as methyl or propyl p-hydroxybenzoate and benzalkonium chloride. Additional nonlimiting examples of amino acids include glycine or proline.

[0302] The present invention also teaches the stabilization (preventing or minimizing thermally or mechanically induced soluble or insoluble aggregation and/or precipitation of an inhibitor protein) of liquid solutions containing peptides at neutral pH or less than neutral pH by the use of amino acids including proline or glycine, with or without divalent cations resulting in clear or nearly clear solutions that are stable at room temperature or preferred for pharmaceutical administration.

[0303] In one embodiment, the composition is of single unit or multiple unit dosage forms. Compositions of single unit or multiple unit dosage forms of the invention comprise a prophylactically or therapeutically effective amount of one or more compositions (e.g., a compound of the invention, or other prophylactic or therapeutic agent), typically, one or more vehicles, carriers, or excipients, stabilizing agents, and/or preservatives. Preferably, the vehicles, carriers, excipients, stabilizing agents and preservatives are pharmaceutically acceptable.

[0304] In some embodiments, the compositions and dosage forms comprise anhydrous compositions and dosage forms. Anhydrous compositions and dosage forms of the invention can be prepared using anhydrous or low moisture containing ingredients and low moisture or low humidity conditions. Compositions and dosage forms that comprise lactose and at least one active ingredient that comprise a primary or secondary amine are preferably anhydrous if substantial contact with moisture and/or humidity during manufacturing, packaging, and/or storage is expected. An anhydrous composition should be prepared and stored such that its anhydrous nature is maintained. Accordingly, anhydrous compositions are preferably packaged using materials known to prevent exposure to water such that they can be included in suitable formulary kits. Examples of suitable packaging include, but are not limited to, hermetically sealed foils, plastics, unit dose containers (e.g., vials), blister packs, and strip packs.

[0305] Suitable vehicles are well known to those skilled in the art of pharmacy, and non-limiting examples of suitable vehicles include glucose, sucrose, starch, lactose, gelatin, rice, silica gel, glycerol, talc, sodium chloride, dried skim milk, propylene glycol, water, sodium stearate, ethanol, and similar substances well known in the art. Saline solutions and aqueous dextrose and glycerol solutions can also be employed as liquid vehicles. Whether a particular vehicle is suitable for incorporation into a composition or dosage form depends on a variety of factors well known in the art including, but not limited to, the way in which the dosage form will be administered to a patient and the specific active ingredients in the dosage form. Pharmaceutical vehicles can be sterile liquids, such as water and oils, including those of petroleum, animal, vegetable or synthetic origin, such as peanut oil, soybean oil, mineral oil, sesame oil and the like.

[0306] The invention also provides that a composition can be packaged in a hermetically sealed container such as an ampoule or sachette indicating the quantity. In one embodiment, the composition can be supplied as a dry sterilized lyophilized powder in a delivery device suitable for administration to the lower airways of a patient. The compositions can, if desired, be presented in a pack or dispenser device that can contain one or more unit dosage forms containing the active ingredient. The pack can for example comprise metal or plastic foil, such as a blister pack. The pack or dispenser device can be accompanied by instructions for administration.

[0307] Methods of preparing these formulations or compositions include the step of bringing into association a compound of the present invention with the carrier and, optionally, one or more accessory ingredients. In general, the formulations are prepared by uniformly and intimately bringing into association a compound of the present invention with liquid carriers, or finely divided solid carriers, or both, and then, if necessary, shaping the product.

[0308] Formulations of the invention suitable for administration may be in the form of powders, granules, or as a solution or a suspension in an aqueous or non-aqueous liquid, or as an oil-in-water or water-in-oil liquid emulsion, or as an elixir or syrup, or as pastilles (using an inert base, such as gelatin and glycerin, or sucrose and acacia) and/or as mouthwashes and the like, each containing a predetermined amount of a compound of the present invention (e.g., peptides) as an active ingredient.

[0309] A liquid composition herein can be used as such with a delivery device, or they can be used for the preparation of pharmaceutically acceptable formulations comprising peptides that are prepared for example by the method of spray drying. The methods of spray freeze-drying peptides/proteins for pharmaceutical administration disclosed in Maa et al., Curr. Pharm. Biotechnol., 2001, 1, 283-302, are incorporated herein. In another embodiment, the liquid solutions herein are freeze spray dried and the spray-dried product is collected as a dispersible peptide-containing powder that is therapeutically effective when administered to an individual.

[0310] The compounds and compositions of the present invention can be employed in combination therapies, that is, the compounds and compositions can be administered concurrently with, prior to, or subsequent to, one or more other desired therapeutics or medical procedures (e.g., peptide vaccine can be used in combination therapy with another treatment such as chemotherapy, radiation, pharmaceutical agents, and/or another treatment). The particular combination of therapies (therapeutics or procedures) to employ in a combination regimen will take into account compatibility of the desired therapeutics and/or procedures and the desired therapeutic effect to be achieved. It will also be appreciated that the therapies employed may achieve a desired effect for the same disorder (for example, the compound of the present invention may be administered concurrently with another therapeutic or prophylactic).

[0311] The invention also provides a pharmaceutical pack or kit comprising one or more containers filled with one or more of the ingredients of the compositions of the invention. Optionally associated with such container(s) can be a notice in the form prescribed by a governmental agency regulating the manufacture, use or sale of pharmaceuticals or biological products, which notice reflects approval by the agency of manufacture, use or sale for human administration.

[0312] The current invention provides for dosage forms comprising nucleic acid sequences or peptides suitable for treating cancer or other diseases. The dosage forms can be formulated, e.g., as sprays, aerosols, nanoparticles, liposomes, or other forms known to one of skill in the art. See, e.g., Remington's Pharmaceutical Sciences; Remington: The Science and Practice of Pharmacy supra; Pharmaceutical Dosage Forms and Drug Delivery Systems by Howard C., Ansel et al., Lippincott Williams & Wilkins; 7th edition (Oct. 1, 1999).

[0313] Generally, a dosage form used in the acute treatment of a disease may contain larger amounts of one or more of the active ingredients it comprises than a dosage form used in the chronic treatment of the same disease. In addition, the prophylactically and therapeutically effective dosage form may vary among different conditions. For example, a therapeutically effective dosage form may contain peptides that has an appropriate immunogenic action when intending to treat cancer or other disease. On the other hand, a different effective dosage may contain nucleic acid sequences or peptides that has an appropriate immunogenic action when intending to use the peptides of the invention as a prophylactic (e.g., vaccine) against cancer or another disease/condition. These and other ways in which specific dosage forms encompassed by this invention will vary from one another and will be readily apparent to those skilled in the art. See, e.g., Remington's Pharmaceutical Sciences, 2005, Mack Publishing Co.; Remington: The Science and Practice of Pharmacy by Gennaro, Lippincott Williams & Wilkins; 20th edition (2003); Pharmaceutical Dosage Forms and Drug Delivery Systems by Howard C. Ansel et al., Lippincott Williams & Wilkins; 7th edition (Oct. 1, 1999); and Encyclopedia of Pharmaceutical Technology, edited by Swarbrick, J. & J. C. Boylan, Marcel Dekker, Inc., New York, 1988, which are incorporated herein by reference in their entirety.

[0314] The pH of a composition or dosage form may also be adjusted to improve delivery and/or stability of one or more active ingredients. Similarly, the polarity of a solvent carrier, its ionic strength, or tonicity can be adjusted to improve delivery. Compounds such as stearates can also be added to compositions or dosage forms to alter advantageously the hydrophilicity or lipophilicity of one or more active ingredients to improve delivery. In this regard, stearates can also serve as a lipid vehicle for the formulation, as an emulsifying agent or surfactant, and as a delivery enhancing or penetration-enhancing agent. Different salts, hydrates, or solvates of the active ingredients can be used to adjust further the properties of the resulting composition.

[0315] Compositions can be formulated with appropriate carriers and adjuvants using techniques to yield compositions suitable for immunization. The compositions can include an adjuvant, such as, for example but not limited to, alum, poly IC, MF-59, squalene-based adjuvants, or liposomal based adjuvants suitable for immunization.

[0316] In some embodiments, the compositions and methods comprise any suitable agent or immune modulation which could modulate mechanisms of host immune tolerance and release of the induced antibodies. In certain embodiments, an immunomodulatory agent is administered in at time and in an amount sufficient for transient modulation of the subject's immune response so as to induce an immune response which comprises antibodies against for example tumor neoantigens (i.e., tumor-specific antigens (TSA)).

### Expression Systems

[0317] In certain aspects, the invention provides culturing a cell line that expresses any one of the peptides of the invention in a culture medium comprising any of the peptides described herein.

[0318] Various expression systems for producing recombinant proteins/peptides are known in the art, and include, prokaryotic (e.g., bacteria), plant, insect, yeast, and mammalian expression systems. Suitable cell lines, can be transformed, transduced, or transfected with nucleic acids containing coding sequences for the peptides of the invention in order to produce the molecule of interest. Expression vectors containing such a nucleic acid sequence, which can be linked to at least one regulatory sequence in a manner that allows expression of the nucleotide sequence in a host cell, can be introduced via methods known in the art. Practitioners in the art understand that designing an expression vector can depend on factors, such as the choice of host cell to be transfected and/or the type and/or amount of desired protein to be expressed. Enhancer regions, which are those sequences found upstream or downstream of the promoter region in non-coding DNA regions, are also known in the art to be important in optimizing expression. If needed, origins of replication from viral sources can be employed, such as if a prokaryotic host is utilized for introduction of plasmid DNA. However, in eukaryotic organisms, chromosome integration is a common mechanism for DNA replication. For stable transfection of mammalian cells, a small fraction of cells can integrate introduced DNA into their genomes. The expression vector and transfection method utilized can be factors that contribute to a successful integration event. For stable amplification and expression of a desired protein, a vector containing DNA encoding a protein of interest is stably integrated into the genome of eukaryotic cells (for example mammalian cells), resulting in the stable expression of transfected genes. A gene that encodes a selectable marker (for example, resistance to antibiotics or drugs) can be introduced into host cells along with the gene of interest in order to identify and select clones that stably express a gene encoding a protein of interest. Cells containing the gene of interest can be identified by drug selection wherein cells that have incorporated the selectable marker gene will survive in the presence of the drug. Cells that have not incorporated the gene for the selectable marker die. Surviving cells can then be screened for the production of the desired protein molecule.

[0319] A host cell strain, which modulates the expression of the inserted sequences, or modifies and processes the nucleic acid in a specific fashion desired also may be chosen. Such modifications (for example, glycosylation and other post-translational modifications) and processing (for example, cleavage) of peptide/protein products may be important for the function of the peptide/protein. Different host cell strains have characteristic and specific mechanisms for the post-translational processing and modification of proteins and gene products. As such, appropriate host systems or cell lines can be chosen to ensure the correct modification and processing of the target protein expressed. Thus, eukaryotic host cells possessing the cellular machinery for proper processing of the primary transcript, glycosylation, and phosphorylation of the gene product may be used.

[0320] Various culturing parameters can be used with respect to the host cell being cultured. Appropriate culture conditions for mammalian cells are well known in the art (Cleveland W L, et al., J Immunol Methods, 1983, 56(2): 221-234) or can be determined by the skilled artisan (see, for example, Animal Cell Culture: A Practical Approach 2nd Ed., Rickwood, D. and Hames, B. D., eds. (Oxford University Press: New York, 1992)). Cell culturing conditions can vary according to the type of host cell selected. Commercially available medium can be utilized.

[0321] Peptides of the invention can be purified from any human or non-human cell which expresses the peptide, including those which have been transfected with expression constructs that express peptides of the invention. For protein recovery, isolation and/or purification, the cell culture medium or cell lysate is centrifuged to remove particulate cells and cell debris. The desired peptide molecule is isolated or purified away from contaminating soluble proteins and peptides by suitable purification techniques. Non-limiting purification methods for proteins include: size exclusion chromatography; affinity chromatography; ion exchange chromatography; ethanol precipitation; reverse phase HPLC; chromatography on a resin, such as silica, or cation exchange resin, e.g., DEAE; chromatofocusing; SDS-PAGE; ammonium sulfate precipitation; gel filtration using, e.g., Sephadex G-75, Sepharose; protein A sepharose chromatography for removal of immunoglobulin contaminants; and the like. Other additives, such as protease inhibitors (e.g., PMSF or proteinase K) can be used to inhibit proteolytic degradation during purification. Purification procedures that can select for carbohydrates can also be used, e.g., ion-exchange soft gel chromatography, or HPLC using cation- or anionexchange resins, in which the more acidic fraction(s) is/are collected.

### Methods of Treatment

[0322] In one embodiment, the subject matter disclosed herein relates to a preventive medical treatment started after following diagnosis of cancer in order to prevent the disease from worsening or curing the disease. In one embodiment, the subject matter disclosed herein relates to prophylaxis of subjects who are believed to be at risk for cancer or have previously been diagnosed with cancer (or another disease). In one embodiment, said subjects can be administered a composition of the invention. The invention contemplates using any of the nucleic acid sequences or peptides produced by the systems and methods described herein. In one embodiment, the compositions described herein can be administered subcutaneously via syringe or any other suitable method know in the art.

[0323] The compound(s) or combination of compounds disclosed herein, or pharmaceutical compositions may be administered to a cell, mammal, or human by any suitable means. Non-limiting examples of methods of administration include, among others, (a) administration though oral pathways, which includes administration in capsule, tablet, granule, spray, syrup, or other such forms; (b) administration through non-oral pathways such as intraocular, intranasal, intraauricular, rectal, vaginal, intraurethral, transmucosal, buccal, or transdermal, which includes administration as an aqueous suspension, an oily preparation or the like or as a drip, spray, suppository, salve, ointment or the like; (c) administration via injection, including subcutaneously, intraperitoneally, intravenously, intramuscularly, intradermally, intraorbitally, intracapsularly, intraspinally, intrasternally, or the like, including infusion pump delivery; (d) administration locally such as by injection directly in the renal or cardiac area, e.g., by depot implantation; (e) administration topically; as deemed appropriate by those of skill in the art for bringing the compound or combination of compounds disclosed herein into contact with living tissue; (f) administration via inhalation, including through aerosolized, nebulized, and powdered formulations; and (g) administration through implantation.

[0324] As will be readily apparent to one skilled in the art, the effective in vivo dose to be administered and the particular mode of administration will vary depending upon the age, weight and species treated, and the specific use for which the compound or combination of compounds disclosed herein are employed. The determination of effective dose levels, that is the dose levels necessary to achieve the desired result, can be accomplished by one skilled in the art using routine pharmacological methods. Typically, human clinical applications of products are commenced at lower dose levels, with dose level being increased until the desired effect is achieved. Alternatively, acceptable in vitro studies can be used to establish useful doses and routes of administration of the compositions identified by the present methods using established pharmacological methods. Effective animal doses from in vivo studies can be converted to appropriate human doses using conversion methods known in the art (e.g., see Nair A B, Jacob S. A simple practice guide for dose conversion between animals and human. Journal of basic and clinical pharmacy. 2016 March;7(2):27.)

### Methods of Prevention

[0325] In some embodiments, the peptides prepared using methods of the invention can be used as a vaccine to promote an immune response against cancer (e.g., against tumor neoantigens). In some embodiments, the invention provides compositions and methods for induction of immune response, for example induction of antibodies to tumor neoantigens. In some embodiments, the antibodies are broadly neutralizing antibodies. In some embodiments, the invention provides compositions and methods for induction of immune response, for example induction of a T cell response to neoantigens. In some embodiments, the compositions prepared using methods of the invention can be used as a vaccine to promote an immune response against a pathogen. In some embodiments, the nucleic acid sequences or peptides prepared using methods of the invention can be used to promote immune tolerance as an autoimmune disease therapeutic.

[0326] In some embodiments, the peptides prepared using methods of the invention can be combined with additional therapeutic components. In some embodiments, the combination can be encoded in one or more nucleic acids that encode the peptides produced with the methods described herein and additional therapeutic components (e.g., peptides or proteins) that are known in the art. In some embodiments, the combination is created by adding the peptides or proteins that encode the additional therapeutic components of the peptides that result from the methods described here for combined formulation and packaging. An example of the combination of components is the creation of vaccines that contain components of tumor cell associated proteins, such as MICA or MICB (Badrinath et al., 2022). In some embodiments, peptide components to invoke an adaptative immune response can be added to such combined vaccines (e.g., MICA or MICB) by using one or more nucleic acids to encode the components and packaging the nucleic acids in a mRNA-LNP or DNA formulation, or separately formulating different components as mRNA-LNP or DNA and then combining them for packaging or immediately before administration to a person. In some embodiments, cancer or other vaccines that encode one or more protein fragments to produce an antibody response can be combined with a peptide vaccine using the methods described herein to produce a cellular immune response.

[0327] The compositions, systems, and methods disclosed herein are not to be limited in scope to the specific embodiments described herein. Indeed, various modifications of the compositions, systems, and methods in addition to those described will become apparent to those of skill in the art from the foregoing description.

### REFERENCES

[0328] Alhadj A. M., et al., Metabolic and immune effects of immunotherapy with proinsulin peptide in human new-onset type 1 diabetes, Sci. Transl. Med., 2017, 9(402): eaaf7779.

[0329] Alvarez B., et al., MHC Peptidome Deconvolution for Accurate MHC Binding Motif Characterization and Improved T-cell Epitope Predictions, Mol. Cell. Proteomics, 2019, 18(12): 2459-2477.

[0330] Antunes D. A., et al., General Prediction of Peptide-MHC Binding Modes Using Incremental Docking: A Proof of Concept. Sci Rep., 2018 Mar. 12;8(1):4327-4339.

[0331] Badrinath S, Dellacherie M O, Li A, Zheng S, Zhang X, Sobral M, Pyrdol J W, Smith K L, Lu Y, Haag S, Ijaz H, Connor-Stroud F, Kaisho T, Dranoff G, Yuan GC, Mooney D J, Wucherpfennig K W. A vaccine targeting resistant tumours by dual T cell plus NK cell attack. Nature. 2022 June;606(7916):992-998. doi: 10.1038/s41586-022-04772-4. Epub 2022 May 25. PMID: 35614223.

[0332] Bear A. S., et al., Biochemical and functional characterization of mutant KRAS epitopes validates this oncoprotein for immunological targeting. Nat Commun., 2021 Jul. 16;12(1):4365-4380.

[0333] Brito L. A., et al., A cationic nanoemulsion for the delivery of next-generation RNA vaccines, Mol. Ther., 2014, 22(12): 2118-2129.

[0334] Bulik-Sullivan B., et al., Deep learning using tumor HLA peptide mass spectrometry datasets improves neoantigen identification, Nat Biotechnol., 2018, 37:55-63.

[0335] Candia M., et al., On peptides and altered peptide ligands: from origin, mode of action and design to clinical application (immunotherapy), Int. Arch. Allergy Immunol., 2016, 170(4): 211-233.

[0336] Chicz R. M., et al., Predominant naturally processed peptides bound to HLA-DR1 are derived from MHC-related molecules and are heterogeneous in size, Nature, 1992, 358(6389): 764-768.

[0337] Cleveland W. L., et al., Routine large-scale production of monoclonal antibodies in a protein-free culture medium, J. Immunol. Methods, 1983, 56(2): 221-234.

[0338] Croft N. P., et al., Most viral peptides displayed by class I MHC on infected cells are immunogenic, Proc. Natl. Acad. Sci. U.S.A., 2019, 116(8): 3112-3117.

[0339] Dai Z., et al., Machine learning optimization of peptides for presentation by class II MHCs, bioRxiv, 2020.

[0340] Geall A. J., et al., Nonviral delivery of self-amplifying RNA vaccines, Proc. Natl. Acad. Sci. U S A., 2012, 109(36):14604-14609.

[0341] Gibson V. B., et al., Proinsulin multi-peptide immunotherapy induces antigen-specific regulatory T cells and limits autoimmunity in a humanized model, Clin. Exp. Immunol., 2015, 182(3): 251-260.

[0342] Hie B., et al., Learning the language of viral evolution and escape, Science, 2021 15;371(6526):284-288.

[0343] Houghton C. S., Immunological validation of the EpitOptimizer program for streamlined design of heteroclitic epitopes, Vaccine, 2007, 25(29): 5330-5342.

[0344] Klinger M., et al., Multiplex identification of antigen-specific T cell receptors using a combination of immune assays and immune receptor sequencing, PLoS One, 2015, 10(10): e0141561.

[0345] Kranz L. M., et al., Systemic RNA delivery to dendritic cells exploits antiviral defense for cancer immunotherapy, Nature, 2016, 534(7607): 396-401.

[0346] Kreiter, S., et al., Increased antigen presentation efficiency by coupling antigens to MHC class I trafficking signals, J. Immunol., 2008, 180(1): 309-318.

[0347] Liu G., et al., Computationally optimized SARS-CoV-2 MHC class I and II vaccine formulations predicted to target human haplotype distributions, Cell Syst., 2020a, 11(2): 131-144.

[0348] Liu G., et al., Predicted cellular immunity population coverage gaps for sars-cov-2 subunit vaccines and their augmentation by compact peptide sets, Cell Syst., 2020b, 12(1): P102-P107.

[0349] Liu G., et al., Maximum n-times Coverage for Vaccine Design, https://arxiv.org/abs/2101.10902v3, 2021.

[0350] London N., et al., Rosetta FlexPepDock web server--high resolution modeling of peptide-protein interactions, Nucleic Acids Res., 2011 July;39(Web Server issue):W249-253.

[0351] Maa Y. F. & Prestrelski S. J., Biopharmaceutical powders: particle formation and formulation considerations, Curr. Pharm. Biotechnol., 2000, 1(3) 283-302.

[0352] Ng A. W. R., et al., In silico-guided sequence modifications of K-ras epitopes improve immunological outcome against G12V and G13D mutant KRAS antigens, PeerJ, 2018, 6:e5056.

[0353] Nielsen M., et al., The role of the proteasome in generating cytotoxic T-cell epitopes: insights obtained from improved predictions of proteasomal cleavage, Immunogenetics, 2005, 57(1-2): 33-41.

[0354] Nielsen M., et al., Quantitative predictions of peptide binding to any HLA-DR molecule of known sequence: NetMHCIIpan. PLoS Comput. Biol., 2008, 4(7): e1000107.

[0355] Nielsen M., et al., An artificial neural network-based alignment algorithm for MHC class II peptide binding prediction, BMC Bioinformatics, 2009, 10: 296.

[0356] Nielsen M, et al., NNAlign: a platform to construct and evaluate artificial neural network models of receptor-ligand interactions, Nucleic Acids Res., 2017, 45(W1): W344-W349.

[0357] O'Donnell T. J., et al., MHCflurry: open-source class I MHC binding affinity prediction, Cell Syst., 2018, 7(1): 129-132.

[0358] O'Donnell T. J., et al., MHCflurry 2.0: Improved pan-allele prediction of MHC class I-presented peptides by incorporating antigen processing. Cell Syst., 2020, 11(1): 42-48.
[0359] 1. Ogishi M., et al., Quantitative prediction of the landscape oft cell epitope immunogenicity in sequence space, Front. Immunol., 2019, 10: 827.
[0360] 2. Pardi N., et al., Zika virus protection by a single low-dose nucleoside-modified mRNA vaccination. Nature. 2017 Mar. 9;543(7644):248-251.

[0361] Park M. S., et al., Accurate structure prediction of peptide-MHC complexes for identifying highly immunogenic antigens, Mol. Immunol., 2013, 56(1-2): 81-90.

[0362] Reynisson B., et al., NetMHCpan-4.1 and NetMHCIIpan-4.0: improved predictions of MHC antigen presentation by concurrent motif deconvolution and integration of MS MHC eluted ligand data, Nucleic Acids Res., 2020, 48(W1):W449-W454.

[0363] Rist M. J., et al., HLA peptide length preferences control CD8+ T cell responses, J. Immunol., 2013, 191(2): 561-571.

[0364] Sahin U., et al., Personalized RNA mutanome vaccines mobilize poly-specific therapeutic immunity against cancer, Nature, 2017, 547(7662): 222-226.

[0365] Slota M., et al., ELISpot for measuring human immune responses to vaccines, Expert Rev. Vaccines, 2011, 10(3): 299-306.

[0366] Tapia-Calle G., et al., A PBMC-based system to assess human t cell responses to influenza vaccine candidates in vitro, Vaccines (Basel), 2019, 7(4): 181.

[0367] Toussaint N. C., et al., A mathematical framework for the selection of an optimal set of peptides for epitope-based vaccines. PLoS Comput. Biol., 2008, 4(12): e1000246.

[0368] Trolle T., et al., The length distribution of class I—restricted T cell epitopes is determined by both peptide supply and MHC allele-specific binding preference, J. Immunol., 2016, 196(4): 1480-1487.

[0369] Vita R., et al., The Immune Epitope Database (IEDB): 2018 update, Nucleic Acids Res., 2019, 47(D1): D339-D343.

[0370] Warren L., et al., Highly efficient reprogramming to pluripotency and directed differentiation of human cells with synthetic modified mRNA. Cell Stem Cell. 2010 Nov. 5;7(5):618-30.

[0371] Woodham A. W., et al., Nanobody-antigen conjugates elicit hpv-specific antitumor immune responses, Cancer Immunol. Res., 2018, 6(7): 870-880.

[0372] Zirlik, K. M., et al., Cytotoxic T cells generated against heteroclitic peptides kill primary tumor cells independent of the binding affinity of the native tumor antigen peptide, Blood, 2006, 108(12): 3865-3870.

What is claimed is:

1. A composition comprising nucleic acid sequences encoding at least two amino acid sequences selected from the group consisting of SEQ ID NOs: 1 to 247.

2. The composition of claim 1, wherein the nucleic acid sequences are contained in a construct for in vivo expression of the nucleic acid sequences.

3. The composition of claim 2, wherein an administration of the nucleic acid sequences causes one or more peptides encoded by the nucleic acid sequences to be displayed by a HLA class II molecule in a subject.

4. The composition of claim 2, wherein the nucleic acid sequences are contained in a construct for the in vivo expression of at least two peptides encoded by the nucleic acid sequences, wherein an administration of the nucleic acid sequences cases:
a first peptide of the at least two peptides to be displayed by a first plurality of HLA class II alleles; and
a second peptide of the at least two peptides to be displayed by a second plurality of HLA class II alleles,
wherein the first plurality of HLA class II alleles and the second plurality of HLA class II alleles differ by at least one HLA class II allele.

5. The composition of claim 1, wherein each of the at least two amino acid sequences comprises a heteroclitic modification of a fragment of a KRAS protein containing a G12C mutation.

6. The composition of claim 2, wherein the composition is an immunogenic composition and is administered in an effective amount to a subject to prevent or treat cancer.

7. A composition comprising nucleic acid sequences encoding at least two amino acid sequences selected from the group consisting of SEQ ID NOs: 6936 to 6994.

8. The composition of claim 7, wherein the nucleic acid sequences are contained in a construct for in vivo expression of the nucleic acid sequences.

9. The composition of claim 8, wherein an administration of the nucleic acid sequences causes one or more peptides encoded by the nucleic acid sequences to be displayed by a HLA class II molecule in a subject.

10. The composition of claim 8, wherein the nucleic acid sequences are contained in a construct for the in vivo expression of at least two peptides encoded by the nucleic acid sequences, wherein an administration of the nucleic acid sequences cases:
a first peptide of the at least two peptides to be displayed by a first plurality of HLA class II alleles; and
a second peptide of the at least two peptides to be displayed by a second plurality of HLA class II alleles,
wherein the first plurality of HLA class II alleles and the second plurality of HLA class II alleles differ by at least one HLA class II allele.

11. The composition of claim 7, wherein each of the at least two amino acid sequences comprises a heteroclitic modification of a fragment of a KRAS protein containing a G12D mutation.

12. The composition of claim 8, wherein the composition is an immunogenic composition and is administered in an effective amount to a subject to prevent or treat cancer.

13. A composition comprising nucleic acid sequences encoding at least two amino acid sequences selected from the group consisting of SEQ ID NOs: 12271 to 12396.

14. The composition of claim 13, wherein the nucleic acid sequences are contained in a construct for in vivo expression of the nucleic acid sequences.

15. The composition of claim 14, wherein an administration of the nucleic acid sequences causes one or more peptides encoded by the nucleic acid sequences that to be displayed by a HLA class II molecule in a subject.

16. The composition of claim 14, wherein the nucleic acid sequences are contained in a construct for the in vivo expression of at least two peptides encoded by the nucleic acid sequences, wherein an administration of the nucleic acid sequences cases:
a first peptide of the at least two peptides to be displayed by a first plurality of HLA class II alleles; and
a second peptide of the at least two peptides to be displayed by a second plurality of HLA class II alleles,
wherein the first plurality of HLA class II alleles and the second plurality of HLA class II alleles differ by at least one HLA class II allele.

17. The composition of claim 13, wherein each of the at least two amino acid sequences comprises a heteroclitic modification of a fragment of a KRAS protein containing a G12R mutation.

18. The composition of claim 14, wherein the composition is an immunogenic composition and is administered in an effective amount to a subject to prevent or treat cancer.

19. A composition comprising nucleic acid sequences encoding at least two amino acid sequences selected from the group consisting of SEQ ID NOs: 49712 to 49814.

20. The composition of claim 19, wherein the nucleic acid sequences are contained in a construct for in vivo expression of the nucleic acid sequences in a subject.

21. The composition of claim 20, wherein an administration of the nucleic acid sequences causes one or more peptides encoded by the nucleic acid sequences to be displayed by a HLA class II molecule in a subject.

22. The composition of claim 20, wherein the nucleic acid sequences are contained in a construct for the in vivo expression of at least two peptides encoded by the nucleic acid sequences, wherein an administration of the nucleic acid sequences causes:
a first peptide of the at least two peptides to be displayed by a first plurality of HLA class II alleles; and
a second peptide of the at least two peptides to be displayed by a second plurality of HLA class II alleles,
wherein the first plurality of HLA class I alleles and the second plurality of HLA class II alleles differ by at least one HLA class II allele.

23. The composition of claim 19, wherein each of the at least two amino acid sequences comprises a heteroclitic modification of a fragment of a KRAS protein containing a G12V mutation.

24. The composition of claim 20, wherein the composition is an immunogenic composition and is administered in an effective amount to a subject to prevent or treat cancer.

The application's sequence listing, which the Patent Office published only in electronic form, follows.

SEQUENCE LISTING (99285 sequences)

SEQ ID NO: 1 - protein, 9 aa, synthetic construct
  source 1..9: note = Seed: LVVVGACGV (KRAS G12C)
FVVAGACGA

SEQ ID NO: 2 - protein, 9 aa, synthetic construct
  source 1..9: note = Seed: LVVVGACGV (KRAS G12C)
FVVAGACGI

SEQ ID NO: 3 - protein, 9 aa, synthetic construct
  source 1..9: note = Seed: LVVVGACGV (KRAS G12C)
FVVAGACGL

SEQ ID NO: 4 - protein, 9 aa, synthetic construct
  source 1..9: note = Seed: LVVVGACGV (KRAS G12C)
FVVAGACGM

SEQ ID NO: 5 - protein, 9 aa, synthetic construct
  source 1..9: note = Seed: LVVVGACGV (KRAS G12C)
FVVAGACGT

SEQ ID NO: 6 - protein, 9 aa, synthetic construct
  source 1..9: note = Seed: LVVVGACGV (KRAS G12C)
FVVAGACGV

SEQ ID NO: 7 - protein, 9 aa, synthetic construct
  source 1..9: note = Seed: LVVVGACGV (KRAS G12C)
FVVAGGCGA

SEQ ID NO: 8 - protein, 9 aa, synthetic construct
  source 1..9: note = Seed: LVVVGACGV (KRAS G12C)
FVVAGGCGI

SEQ ID NO: 9 - protein, 9 aa, synthetic construct
  source 1..9: note = Seed: LVVVGACGV (KRAS G12C)
FVVAGGCGL

SEQ ID NO: 10 - protein, 9 aa, synthetic construct
  source 1..9: note = Seed: LVVVGACGV (KRAS G12C)
FVVAGGCGM

SEQ ID NO: 11 - protein, 9 aa, synthetic construct
  source 1..9: note = Seed: LVVVGACGV (KRAS G12C)
FVVAGGCGV

SEQ ID NO: 12 - protein, 9 aa, synthetic construct
  source 1..9: note = Seed: LVVVGACGV (KRAS G12C)
FVVAGNCGI

SEQ ID NO: 13 - protein, 9 aa, synthetic construct
  source 1..9: note = Seed: LVVVGACGV (KRAS G12C)
FVVAGNCGL

SEQ ID NO: 14 - protein, 9 aa, synthetic construct
  source 1..9: note = Seed: LVVVGACGV (KRAS G12C)
FVVAGNCGV

SEQ ID NO: 15 - protein, 9 aa, synthetic construct
  source 1..9: note = Seed: LVVVGACGV (KRAS G12C)
FVVAGPCGI

SEQ ID NO: 16 - protein, 9 aa, synthetic construct
  source 1..9: note = Seed: LVVVGACGV (KRAS G12C)
FVVAGPCGL

SEQ ID NO: 17 - protein, 9 aa, synthetic construct
  source 1..9: note = Seed: LVVVGACGV (KRAS G12C)
FVVAGPCGV

SEQ ID NO: 18 - protein, 9 aa, synthetic construct
  source 1..9: note = Seed: LVVVGACGV (KRAS G12C)
FVVAGSCGA

SEQ ID NO: 19 - protein, 9 aa, synthetic construct
  source 1..9: note = Seed: LVVVGACGV (KRAS G12C)
FVVAGSCGI

SEQ ID NO: 20 - protein, 9 aa, synthetic construct
  source 1..9: note = Seed: LVVVGACGV (KRAS G12C)
FVVAGSCGL

SEQ ID NO: 21 - protein, 9 aa, synthetic construct
  source 1..9: note = Seed: LVVVGACGV (KRAS G12C)
FVVAGSCGM

SEQ ID NO: 22 - protein, 9 aa, synthetic construct
  source 1..9: note = Seed: LVVVGACGV (KRAS G12C)
FVVAGSCGV

SEQ ID NO: 23 - protein, 9 aa, synthetic construct
  source 1..9: note = Seed: LVVVGACGV (KRAS G12C)
FVVAGTCGL

SEQ ID NO: 24 - protein, 9 aa, synthetic construct
  source 1..9: note = Seed: LVVVGACGV (KRAS G12C)
FVVAGTCGV

SEQ ID NO: 25 - protein, 9 aa, synthetic construct
  source 1..9: note = Seed: LVVVGACGV (KRAS G12C)
FVVEGACGL

SEQ ID NO: 26 - protein, 9 aa, synthetic construct
  source 1..9: note = Seed: LVVVGACGV (KRAS G12C)
FVVEGACGV

SEQ ID NO: 27 - protein, 9 aa, synthetic construct
  source 1..9: note = Seed: LVVVGACGV (KRAS G12C)
FVVIGACGA

SEQ ID NO: 28 - protein, 9 aa, synthetic construct
  source 1..9: note = Seed: LVVVGACGV (KRAS G12C)
FVVIGACGI

SEQ ID NO: 29 - protein, 9 aa, synthetic construct
  source 1..9: note = Seed: LVVVGACGV (KRAS G12C)
FVVIGACGL

SEQ ID NO: 30 - protein, 9 aa, synthetic construct
  source 1..9: note = Seed: LVVVGACGV (KRAS G12C)
FVVIGACGM

SEQ ID NO: 31 - protein, 9 aa, synthetic construct
  source 1..9: note = Seed: LVVVGACGV (KRAS G12C)
FVVIGACGT

SEQ ID NO: 32 - protein, 9 aa, synthetic construct
  source 1..9: note = Seed: LVVVGACGV (KRAS G12C)
FVVIGACGV

SEQ ID NO: 33 - protein, 9 aa, synthetic construct
  source 1..9: note = Seed: LVVVGACGV (KRAS G12C)
FVVIGGCGA

SEQ ID NO: 34 - protein, 9 aa, synthetic construct
  source 1..9: note = Seed: LVVVGACGV (KRAS G12C)
FVVIGGCGI

SEQ ID NO: 35 - protein, 9 aa, synthetic construct
  source 1..9: note = Seed: LVVVGACGV (KRAS G12C)
FVVIGGCGL

SEQ ID NO: 36 - protein, 9 aa, synthetic construct
  source 1..9: note = Seed: LVVVGACGV (KRAS G12C)
FVVIGGCGM

SEQ ID NO: 37 - protein, 9 aa, synthetic construct
  source 1..9: note = Seed: LVVVGACGV (KRAS G12C)
FVVIGGCGT

SEQ ID NO: 38 - protein, 9 aa, synthetic construct
  source 1..9: note = Seed: LVVVGACGV (KRAS G12C)
FVVIGGCGV

SEQ ID NO: 39 - protein, 9 aa, synthetic construct
  source 1..9: note = Seed: LVVVGACGV (KRAS G12C)
FVVIGNCGA

SEQ ID NO: 40 - protein, 9 aa, synthetic construct
  source 1..9: note = Seed: LVVVGACGV (KRAS G12C)
FVVIGNCGI

SEQ ID NO: 41 - protein, 9 aa, synthetic construct
  source 1..9: note = Seed: LVVVGACGV (KRAS G12C)
FVVIGNCGL

SEQ ID NO: 42 - protein, 9 aa, synthetic construct
  source 1..9: note = Seed: LVVVGACGV (KRAS G12C)
FVVIGNCGV

SEQ ID NO: 43 - protein, 9 aa, synthetic construct
  source 1..9: note = Seed: LVVVGACGV (KRAS G12C)
FVVIGPCGA

SEQ ID NO: 44 - protein, 9 aa, synthetic construct
  source 1..9: note = Seed: LVVVGACGV (KRAS G12C)
FVVIGPCGI

SEQ ID NO: 45 - protein, 9 aa, synthetic construct
  source 1..9: note = Seed: LVVVGACGV (KRAS G12C)
FVVIGPCGL

SEQ ID NO: 46 - protein, 9 aa, synthetic construct
  source 1..9: note = Seed: LVVVGACGV (KRAS G12C)
FVVIGPCGM

SEQ ID NO: 47 - protein, 9 aa, synthetic construct
  source 1..9: note = Seed: LVVVGACGV (KRAS G12C)
FVVIGPCGV

SEQ ID NO: 48 - protein, 9 aa, synthetic construct
  source 1..9: note = Seed: LVVVGACGV (KRAS G12C)
FVVIGSCGA

SEQ ID NO: 49 - protein, 9 aa, synthetic construct
  source 1..9: note = Seed: LVVVGACGV (KRAS G12C)
FVVIGSCGI

SEQ ID NO: 50 - protein, 9 aa, synthetic construct
  source 1..9: note = Seed: LVVVGACGV (KRAS G12C)
FVVIGSCGL

SEQ ID NO: 51 - protein, 9 aa, synthetic construct
  source 1..9: note = Seed: LVVVGACGV (KRAS G12C)
FVVIGSCGT

SEQ ID NO: 52 - protein, 9 aa, synthetic construct
  source 1..9: note = Seed: LVVVGACGV (KRAS G12C)
FVVIGSCGV

SEQ ID NO: 53 - protein, 9 aa, synthetic construct
  source 1..9: note = Seed: LVVVGACGV (KRAS G12C)
FVVLGACGA

SEQ ID NO: 54 - protein, 9 aa, synthetic construct
  source 1..9: note = Seed: LVVVGACGV (KRAS G12C)
FVVLGACGI

SEQ ID NO: 55 - protein, 9 aa, synthetic construct
  source 1..9: note = Seed: LVVVGACGV (KRAS G12C)
FVVLGACGL

SEQ ID NO: 56 - protein, 9 aa, synthetic construct
  source 1..9: note = Seed: LVVVGACGV (KRAS G12C)
FVVLGACGM

SEQ ID NO: 57 - protein, 9 aa, synthetic construct
  source 1..9: note = Seed: LVVVGACGV (KRAS G12C)
FVVLGACGS

SEQ ID NO: 58 - protein, 9 aa, synthetic construct
  source 1..9: note = Seed: LVVVGACGV (KRAS G12C)
FVVLGACGT

SEQ ID NO: 59 - protein, 9 aa, synthetic construct
  source 1..9: note = Seed: LVVVGACGV (KRAS G12C)
FVVLGACGV

SEQ ID NO: 60 - protein, 9 aa, synthetic construct
  source 1..9: note = Seed: LVVVGACGV (KRAS G12C)
FVVLGGCGA

SEQ ID NO: 61 - protein, 9 aa, synthetic construct
  source 1..9: note = Seed: LVVVGACGV (KRAS G12C)
FVVLGGCGI

SEQ ID NO: 62 - protein, 9 aa, synthetic construct
  source 1..9: note = Seed: LVVVGACGV (KRAS G12C)
FVVLGGCGL

SEQ ID NO: 63 - protein, 9 aa, synthetic construct
  source 1..9: note = Seed: LVVVGACGV (KRAS G12C)
FVVLGGCGM

SEQ ID NO: 64 - protein, 9 aa, synthetic construct
  source 1..9: note = Seed: LVVVGACGV (KRAS G12C)
FVVLGGCGS

SEQ ID NO: 65 - protein, 9 aa, synthetic construct
  source 1..9: note = Seed: LVVVGACGV (KRAS G12C)
FVVLGGCGT

SEQ ID NO: 66 - protein, 9 aa, synthetic construct
  source 1..9: note = Seed: LVVVGACGV (KRAS G12C)
FVVLGGCGV

SEQ ID NO: 67 - protein, 9 aa, synthetic construct
  source 1..9: note = Seed: LVVVGACGV (KRAS G12C)
FVVLGNCGA

SEQ ID NO: 68 - protein, 9 aa, synthetic construct
  source 1..9: note = Seed: LVVVGACGV (KRAS G12C)
FVVLGNCGI

SEQ ID NO: 69 - protein, 9 aa, synthetic construct
  source 1..9: note = Seed: LVVVGACGV (KRAS G12C)
FVVLGNCGL

SEQ ID NO: 70 - protein, 9 aa, synthetic construct
  source 1..9: note = Seed: LVVVGACGV (KRAS G12C)
FVVLGNCGM

SEQ ID NO: 71 - protein, 9 aa, synthetic construct
  source 1..9: note = Seed: LVVVGACGV (KRAS G12C)
FVVLGNCGS

SEQ ID NO: 72 - protein, 9 aa, synthetic construct
  source 1..9: note = Seed: LVVVGACGV (KRAS G12C)
FVVLGNCGT

SEQ ID NO: 73 - protein, 9 aa, synthetic construct
  source 1..9: note = Seed: LVVVGACGV (KRAS G12C)
FVVLGNCGV

SEQ ID NO: 74 - protein, 9 aa, synthetic construct
  source 1..9: note = Seed: LVVVGACGV (KRAS G12C)
FVVLGPCGA

SEQ ID NO: 75 - protein, 9 aa, synthetic construct
  source 1..9: note = Seed: LVVVGACGV (KRAS G12C)
FVVLGPCGI

SEQ ID NO: 76 - protein, 9 aa, synthetic construct
  source 1..9: note = Seed: LVVVGACGV (KRAS G12C)
FVVLGPCGL

SEQ ID NO: 77 - protein, 9 aa, synthetic construct
  source 1..9: note = Seed: LVVVGACGV (KRAS G12C)
FVVLGPCGM

SEQ ID NO: 78 - protein, 9 aa, synthetic construct
  source 1..9: note = Seed: LVVVGACGV (KRAS G12C)
FVVLGPCGS

SEQ ID NO: 79 - protein, 9 aa, synthetic construct
  source 1..9: note = Seed: LVVVGACGV (KRAS G12C)
FVVLGPCGT

SEQ ID NO: 80 - protein, 9 aa, synthetic construct
  source 1..9: note = Seed: LVVVGACGV (KRAS G12C)
FVVLGPCGV

SEQ ID NO: 81 - protein, 9 aa, synthetic construct
  source 1..9: note = Seed: LVVVGACGV (KRAS G12C)
FVVLGSCGA

SEQ ID NO: 82 - protein, 9 aa, synthetic construct
  source 1..9: note = Seed: LVVVGACGV (KRAS G12C)
FVVLGSCGI

SEQ ID NO: 83 - protein, 9 aa, synthetic construct
  source 1..9: note = Seed: LVVVGACGV (KRAS G12C)
FVVLGSCGL

SEQ ID NO: 84 - protein, 9 aa, synthetic construct
  source 1..9: note = Seed: LVVVGACGV (KRAS G12C)
FVVLGSCGM

SEQ ID NO: 85 - protein, 9 aa, synthetic construct
  source 1..9: note = Seed: LVVVGACGV (KRAS G12C)
FVVLGSCGS

SEQ ID NO: 86 - protein, 9 aa, synthetic construct
  source 1..9: note = Seed: LVVVGACGV (KRAS G12C)
FVVLGSCGT

SEQ ID NO: 87 - protein, 9 aa, synthetic construct
  source 1..9: note = Seed: LVVVGACGV (KRAS G12C)
FVVLGSCGV

SEQ ID NO: 88 - protein, 9 aa, synthetic construct
  source 1..9: note = Seed: LVVVGACGV (KRAS G12C)
FVVLGTCGA

SEQ ID NO: 89 - protein, 9 aa, synthetic construct
  source 1..9: note = Seed: LVVVGACGV (KRAS G12C)
FVVLGTCGI

SEQ ID NO: 90 - protein, 9 aa, synthetic construct
  source 1..9: note = Seed: LVVVGACGV (KRAS G12C)
FVVLGTCGL

SEQ ID NO: 91 - protein, 9 aa, synthetic construct
  source 1..9: note = Seed: LVVVGACGV (KRAS G12C)
FVVLGTCGT

SEQ ID NO: 92 - protein, 9 aa, synthetic construct
  source 1..9: note = Seed: LVVVGACGV (KRAS G12C)
FVVLGTCGV

SEQ ID NO: 93 - protein, 9 aa, synthetic construct
  source 1..9: note = Seed: LVVVGACGV (KRAS G12C)
FVVMGACGA

SEQ ID NO: 94 - protein, 9 aa, synthetic construct
  source 1..9: note = Seed: LVVVGACGV (KRAS G12C)
FVVMGACGI

SEQ ID NO: 95 - protein, 9 aa, synthetic construct
  source 1..9: note = Seed: LVVVGACGV (KRAS G12C)
FVVMGACGL

SEQ ID NO: 96 - protein, 9 aa, synthetic construct
  source 1..9: note = Seed: LVVVGACGV (KRAS G12C)
FVVMGACGM

SEQ ID NO: 97 - protein, 9 aa, synthetic construct
  source 1..9: note = Seed: LVVVGACGV (KRAS G12C)
FVVMGACGS

SEQ ID NO: 98 - protein, 9 aa, synthetic construct
  source 1..9: note = Seed: LVVVGACGV (KRAS G12C)
FVVMGACGT

SEQ ID NO: 99 - protein, 9 aa, synthetic construct
  source 1..9: note = Seed: LVVVGACGV (KRAS G12C)
FVVMGACGV

SEQ ID NO: 100 - protein, 9 aa, synthetic construct
  source 1..9: note = Seed: LVVVGACGV (KRAS G12C)
FVVMGGCGA

SEQ ID NO: 101 - protein, 9 aa, synthetic construct
  source 1..9: note = Seed: LVVVGACGV (KRAS G12C)
FVVMGGCGI

SEQ ID NO: 102 - protein, 9 aa, synthetic construct
  source 1..9: note = Seed: LVVVGACGV (KRAS G12C)
FVVMGGCGL

SEQ ID NO: 103 - protein, 9 aa, synthetic construct
  source 1..9: note = Seed: LVVVGACGV (KRAS G12C)
FVVMGGCGM

SEQ ID NO: 104 - protein, 9 aa, synthetic construct
  source 1..9: note = Seed: LVVVGACGV (KRAS G12C)
FVVMGGCGS

SEQ ID NO: 105 - protein, 9 aa, synthetic construct
  source 1..9: note = Seed: LVVVGACGV (KRAS G12C)
FVVMGGCGT

SEQ ID NO: 106 - protein, 9 aa, synthetic construct
  source 1..9: note = Seed: LVVVGACGV (KRAS G12C)
FVVMGGCGV

SEQ ID NO: 107 - protein, 9 aa, synthetic construct
  source 1..9: note = Seed: LVVVGACGV (KRAS G12C)
FVVMGNCGA

SEQ ID NO: 108 - protein, 9 aa, synthetic construct
  source 1..9: note = Seed: LVVVGACGV (KRAS G12C)
FVVMGNCGI

SEQ ID NO: 109 - protein, 9 aa, synthetic construct
  source 1..9: note = Seed: LVVVGACGV (KRAS G12C)
FVVMGNCGL

SEQ ID NO: 110 - protein, 9 aa, synthetic construct
  source 1..9: note = Seed: LVVVGACGV (KRAS G12C)
FVVMGNCGM

SEQ ID NO: 111 - protein, 9 aa, synthetic construct
  source 1..9: note = Seed: LVVVGACGV (KRAS G12C)
FVVMGNCGT

SEQ ID NO: 112 - protein, 9 aa, synthetic construct
  source 1..9: note = Seed: LVVVGACGV (KRAS G12C)
FVVMGNCGV

SEQ ID NO: 113 - protein, 9 aa, synthetic construct
  source 1..9: note = Seed: LVVVGACGV (KRAS G12C)
FVVMGPCGA

SEQ ID NO: 114 - protein, 9 aa, synthetic construct
  source 1..9: note = Seed: LVVVGACGV (KRAS G12C)
FVVMGPCGI

SEQ ID NO: 115 - protein, 9 aa, synthetic construct
  source 1..9: note = Seed: LVVVGACGV (KRAS G12C)
FVVMGPCGL

SEQ ID NO: 116 - protein, 9 aa, synthetic construct
  source 1..9: note = Seed: LVVVGACGV (KRAS G12C)
FVVMGPCGM

SEQ ID NO: 117 - protein, 9 aa, synthetic construct
  source 1..9: note = Seed: LVVVGACGV (KRAS G12C)
FVVMGPCGT

SEQ ID NO: 118 - protein, 9 aa, synthetic construct
  source 1..9: note = Seed: LVVVGACGV (KRAS G12C)
FVVMGPCGV

SEQ ID NO: 119 - protein, 9 aa, synthetic construct
  source 1..9: note = Seed: LVVVGACGV (KRAS G12C)
FVVMGSCGA

SEQ ID NO: 120 - protein, 9 aa, synthetic construct
  source 1..9: note = Seed: LVVVGACGV (KRAS G12C)
FVVMGSCGI

SEQ ID NO: 121 - protein, 9 aa, synthetic construct
  source 1..9: note = Seed: LVVVGACGV (KRAS G12C)
FVVMGSCGL

SEQ ID NO: 122 - protein, 9 aa, synthetic construct
  source 1..9: note = Seed: LVVVGACGV (KRAS G12C)
FVVMGSCGM

SEQ ID NO: 123 - protein, 9 aa, synthetic construct
  source 1..9: note = Seed: LVVVGACGV (KRAS G12C)
FVVMGSCGS

SEQ ID NO: 124 - protein, 9 aa, synthetic construct
  source 1..9: note = Seed: LVVVGACGV (KRAS G12C)
FVVMGSCGT

SEQ ID NO: 125 - protein, 9 aa, synthetic construct
  source 1..9: note = Seed: LVVVGACGV (KRAS G12C)
FVVMGSCGV

SEQ ID NO: 126 - protein, 9 aa, synthetic construct
  source 1..9: note = Seed: LVVVGACGV (KRAS G12C)
FVVMGTCGA

SEQ ID NO: 127 - protein, 9 aa, synthetic construct
  source 1..9: note = Seed: LVVVGACGV (KRAS G12C)
FVVMGTCGI

SEQ ID NO: 128 - protein, 9 aa, synthetic construct
  source 1..9: note = Seed: LVVVGACGV (KRAS G12C)
FVVMGTCGL

SEQ ID NO: 129 - protein, 9 aa, synthetic construct
  source 1..9: note = Seed: LVVVGACGV (KRAS G12C)
FVVMGTCGM

SEQ ID NO: 130 - protein, 9 aa, synthetic construct
  source 1..9: note = Seed: LVVVGACGV (KRAS G12C)
FVVMGTCGV

SEQ ID NO: 131 - protein, 9 aa, synthetic construct
  source 1..9: note = Seed: LVVVGACGV (KRAS G12C)
FVVQGACGA

SEQ ID NO: 132 - protein, 9 aa, synthetic construct
  source 1..9: note = Seed: LVVVGACGV (KRAS G12C)
FVVQGACGI

SEQ ID NO: 133 - protein, 9 aa, synthetic construct
  source 1..9: note = Seed: LVVVGACGV (KRAS G12C)
FVVQGACGL

SEQ ID NO: 134 - protein, 9 aa, synthetic construct
  source 1..9: note = Seed: LVVVGACGV (KRAS G12C)
FVVQGACGM

SEQ ID NO: 135 - protein, 9 aa, synthetic construct
  source 1..9: note = Seed: LVVVGACGV (KRAS G12C)
FVVQGACGV

SEQ ID NO: 136 - protein, 9 aa, synthetic construct
  source 1..9: note = Seed: LVVVGACGV (KRAS G12C)
FVVQGGCGA

SEQ ID NO: 137 - protein, 9 aa, synthetic construct
  source 1..9: note = Seed: LVVVGACGV (KRAS G12C)
FVVQGGCGI

SEQ ID NO: 138 - protein, 9 aa, synthetic construct
  source 1..9: note = Seed: LVVVGACGV (KRAS G12C)
FVVQGGCGL

SEQ ID NO: 139 - protein, 9 aa, synthetic construct
  source 1..9: note = Seed: LVVVGACGV (KRAS G12C)
FVVQGGCGV

SEQ ID NO: 140 - protein, 9 aa, synthetic construct
  source 1..9: note = Seed: LVVVGACGV (KRAS G12C)
FVVQGNCGI

SEQ ID NO: 141 - protein, 9 aa, synthetic construct
  source 1..9: note = Seed: LVVVGACGV (KRAS G12C)
FVVQGNCGL

SEQ ID NO: 142 - protein, 9 aa, synthetic construct
  source 1..9: note = Seed: LVVVGACGV (KRAS G12C)
FVVQGNCGV

SEQ ID NO: 143 - protein, 9 aa, synthetic construct
  source 1..9: note = Seed: LVVVGACGV (KRAS G12C)
FVVQGPCGL

SEQ ID NO: 144 - protein, 9 aa, synthetic construct
  source 1..9: note = Seed: LVVVGACGV (KRAS G12C)
FVVQGSCGA

SEQ ID NO: 145 - protein, 9 aa, synthetic construct
  source 1..9: note = Seed: LVVVGACGV (KRAS G12C)
FVVQGSCGI

SEQ ID NO: 146 - protein, 9 aa, synthetic construct
  source 1..9: note = Seed: LVVVGACGV (KRAS G12C)
FVVQGSCGL

SEQ ID NO: 147 - protein, 9 aa, synthetic construct
  source 1..9: note = Seed: LVVVGACGV (KRAS G12C)
FVVQGSCGM

SEQ ID NO: 148 - protein, 9 aa, synthetic construct
  source 1..9: note = Seed: LVVVGACGV (KRAS G12C)
FVVQGSCGV

SEQ ID NO: 149 - protein, 9 aa, synthetic construct
  source 1..9: note = Seed: LVVVGACGV (KRAS G12C)
FVVSGACGA

SEQ ID NO: 150 - protein, 9 aa, synthetic construct
  source 1..9: note = Seed: LVVVGACGV (KRAS G12C)
FVVSGACGI

SEQ ID NO: 151 - protein, 9 aa, synthetic construct
  source 1..9: note = Seed: LVVVGACGV (KRAS G12C)
FVVSGACGL

SEQ ID NO: 152 - protein, 9 aa, synthetic construct
  source 1..9: note = Seed: LVVVGACGV (KRAS G12C)
FVVSGGCGL

SEQ ID NO: 153 - protein, 9 aa, synthetic construct
  source 1..9: note = Seed: LVVVGACGV (KRAS G12C)
FVVSGSCGL

SEQ ID NO: 154 - protein, 9 aa, synthetic construct
  source 1..9: note = Seed: LVVVGACGV (KRAS G12C)
FVVVGACGA

SEQ ID NO: 155 - protein, 9 aa, synthetic construct
  source 1..9: note = Seed: LVVVGACGV (KRAS G12C)
FVVVGGCGV

SEQ ID NO: 156 - protein, 9 aa, synthetic construct
  source 1..9: note = Seed: LVVVGACGV (KRAS G12C)
FVVVGPCGL

SEQ ID NO: 157 - protein, 9 aa, synthetic construct
  source 1..9: note = Seed: LVVVGACGV (KRAS G12C)
FVVVGPCGV

SEQ ID NO: 158 - protein, 9 aa, synthetic construct
  source 1..9: note = Seed: LVVVGACGV (KRAS G12C)
YVVAGACGA

SEQ ID NO: 159 - protein, 9 aa, synthetic construct
  source 1..9: note = Seed: LVVVGACGV (KRAS G12C)
YVVAGACGI

SEQ ID NO: 160 - protein, 9 aa, synthetic construct
  source 1..9: note = Seed: LVVVGACGV (KRAS G12C)
YVVAGACGL

SEQ ID NO: 161 - protein, 9 aa, synthetic construct
  source 1..9: note = Seed: LVVVGACGV (KRAS G12C)
YVVAGACGM

SEQ ID NO: 162 - protein, 9 aa, synthetic construct
  source 1..9: note = Seed: LVVVGACGV (KRAS G12C)
YVVAGACGV

SEQ ID NO: 163 - protein, 9 aa, synthetic construct
  source 1..9: note = Seed: LVVVGACGV (KRAS G12C)
YVVAGGCGI

SEQ ID NO: 164 - protein, 9 aa, synthetic construct
  source 1..9: note = Seed: LVVVGACGV (KRAS G12C)
YVVAGGCGL

SEQ ID NO: 165 - protein, 9 aa, synthetic construct
  source 1..9: note = Seed: LVVVGACGV (KRAS G12C)
YVVAGGCGV

SEQ ID NO: 166 - protein, 9 aa, synthetic construct
  source 1..9: note = Seed: LVVVGACGV (KRAS G12C)
YVVAGPCGL

SEQ ID NO: 167 - protein, 9 aa, synthetic construct
  source 1..9: note = Seed: LVVVGACGV (KRAS G12C)
YVVAGPCGV

SEQ ID NO: 168 - protein, 9 aa, synthetic construct
  source 1..9: note = Seed: LVVVGACGV (KRAS G12C)
YVVAGSCGI

SEQ ID NO: 169 - protein, 9 aa, synthetic construct
  source 1..9: note = Seed: LVVVGACGV (KRAS G12C)
YVVAGSCGL

SEQ ID NO: 170 - protein, 9 aa, synthetic construct
  source 1..9: note = Seed: LVVVGACGV (KRAS G12C)
YVVAGSCGV

SEQ ID NO: 171 - protein, 9 aa, synthetic construct
  source 1..9: note = Seed: LVVVGACGV (KRAS G12C)
YVVIGACGA

SEQ ID NO: 172 - protein, 9 aa, synthetic construct
  source 1..9: note = Seed: LVVVGACGV (KRAS G12C)
YVVIGACGI

SEQ ID NO: 173 - protein, 9 aa, synthetic construct
  source 1..9: note = Seed: LVVVGACGV (KRAS G12C)
YVVIGACGL

SEQ ID NO: 174 - protein, 9 aa, synthetic construct
  source 1..9: note = Seed: LVVVGACGV (KRAS G12C)
YVVIGACGV

SEQ ID NO: 175 - protein, 9 aa, synthetic construct
  source 1..9: note = Seed: LVVVGACGV (KRAS G12C)
YVVIGGCGI

SEQ ID NO: 176 - protein, 9 aa, synthetic construct
  source 1..9: note = Seed: LVVVGACGV (KRAS G12C)
YVVIGGCGL

SEQ ID NO: 177 - protein, 9 aa, synthetic construct
  source 1..9: note = Seed: LVVVGACGV (KRAS G12C)
YVVIGGCGV

SEQ ID NO: 178 - protein, 9 aa, synthetic construct
  source 1..9: note = Seed: LVVVGACGV (KRAS G12C)
YVVIGPCGI

SEQ ID NO: 179 - protein, 9 aa, synthetic construct
  source 1..9: note = Seed: LVVVGACGV (KRAS G12C)
YVVIGPCGL

SEQ ID NO: 180 - protein, 9 aa, synthetic construct
  source 1..9: note = Seed: LVVVGACGV (KRAS G12C)
YVVIGPCGV

SEQ ID NO: 181 - protein, 9 aa, synthetic construct
  source 1..9: note = Seed: LVVVGACGV (KRAS G12C)
YVVIGSCGA

SEQ ID NO: 182 - protein, 9 aa, synthetic construct
  source 1..9: note = Seed: LVVVGACGV (KRAS G12C)
YVVIGSCGL

SEQ ID NO: 183 - protein, 9 aa, synthetic construct
  source 1..9: note = Seed: LVVVGACGV (KRAS G12C)
YVVIGSCGV

SEQ ID NO: 184 - protein, 9 aa, synthetic construct
  source 1..9: note = Seed: LVVVGACGV (KRAS G12C)
YVVLGACGA

SEQ ID NO: 185 - protein, 9 aa, synthetic construct
  source 1..9: note = Seed: LVVVGACGV (KRAS G12C)
YVVLGACGI

SEQ ID NO: 186 - protein, 9 aa, synthetic construct
  source 1..9: note = Seed: LVVVGACGV (KRAS G12C)
YVVLGACGL

SEQ ID NO: 187 - protein, 9 aa, synthetic construct
  source 1..9: note = Seed: LVVVGACGV (KRAS G12C)
YVVLGACGM

SEQ ID NO: 188 - protein, 9 aa, synthetic construct
  source 1..9: note = Seed: LVVVGACGV (KRAS G12C)
YVVLGACGS

SEQ ID NO: 189 - protein, 9 aa, synthetic construct
  source 1..9: note = Seed: LVVVGACGV (KRAS G12C)
YVVLGACGT

SEQ ID NO: 190 - protein, 9 aa, synthetic construct
  source 1..9: note = Seed: LVVVGACGV (KRAS G12C)
YVVLGACGV

SEQ ID NO: 191 - protein, 9 aa, synthetic construct
  source 1..9: note = Seed: LVVVGACGV (KRAS G12C)
YVVLGGCGA

SEQ ID NO: 192 - protein, 9 aa, synthetic construct
  source 1..9: note = Seed: LVVVGACGV (KRAS G12C)
YVVLGGCGI

SEQ ID NO: 193 - protein, 9 aa, synthetic construct
  source 1..9: note = Seed: LVVVGACGV (KRAS G12C)
YVVLGGCGL

SEQ ID NO: 194 - protein, 9 aa, synthetic construct
  source 1..9: note = Seed: LVVVGACGV (KRAS G12C)
YVVLGGCGM

SEQ ID NO: 195 - protein, 9 aa, synthetic construct
  source 1..9: note = Seed: LVVVGACGV (KRAS G12C)
YVVLGGCGS

SEQ ID NO: 196 - protein, 9 aa, synthetic construct
  source 1..9: note = Seed: LVVVGACGV (KRAS G12C)
YVVLGGCGT

SEQ ID NO: 197 - protein, 9 aa, synthetic construct
  source 1..9: note = Seed: LVVVGACGV (KRAS G12C)
YVVLGGCGV

SEQ ID NO: 198 - protein, 9 aa, synthetic construct
  source 1..9: note = Seed: LVVVGACGV (KRAS G12C)
YVVLGNCGA

SEQ ID NO: 199 - protein, 9 aa, synthetic construct
  source 1..9: note = Seed: LVVVGACGV (KRAS G12C)
YVVLGNCGI

SEQ ID NO: 200 - protein, 9 aa, synthetic construct
  source 1..9: note = Seed: LVVVGACGV (KRAS G12C)
YVVLGNCGL

SEQ ID NO: 201 - protein, 9 aa, synthetic construct
  source 1..9: note = Seed: LVVVGACGV (KRAS G12C)
YVVLGNCGV

SEQ ID NO: 202 - protein, 9 aa, synthetic construct
  source 1..9: note = Seed: LVVVGACGV (KRAS G12C)
YVVLGPCGA

SEQ ID NO: 203 - protein, 9 aa, synthetic construct
  source 1..9: note = Seed: LVVVGACGV (KRAS G12C)
YVVLGPCGI

SEQ ID NO: 204 - protein, 9 aa, synthetic construct
  source 1..9: note = Seed: LVVVGACGV (KRAS G12C)
YVVLGPCGL

SEQ ID NO: 205 - protein, 9 aa, synthetic construct
  source 1..9: note = Seed: LVVVGACGV (KRAS G12C)
YVVLGPCGM

SEQ ID NO: 206 - protein, 9 aa, synthetic construct
  source 1..9: note = Seed: LVVVGACGV (KRAS G12C)
YVVLGPCGV

SEQ ID NO: 207 - protein, 9 aa, synthetic construct
  source 1..9: note = Seed: LVVVGACGV (KRAS G12C)
YVVLGSCGA

SEQ ID NO: 208 - protein, 9 aa, synthetic construct
  source 1..9: note = Seed: LVVVGACGV (KRAS G12C)
YVVLGSCGI

SEQ ID NO: 209 - protein, 9 aa, synthetic construct
  source 1..9: note = Seed: LVVVGACGV (KRAS G12C)
YVVLGSCGL

SEQ ID NO: 210 - protein, 9 aa, synthetic construct
  source 1..9: note = Seed: LVVVGACGV (KRAS G12C)
YVVLGSCGM

SEQ ID NO: 211 - protein, 9 aa, synthetic construct
  source 1..9: note = Seed: LVVVGACGV (KRAS G12C)
YVVLGSCGS

SEQ ID NO: 212 - protein, 9 aa, synthetic construct
  source 1..9: note = Seed: LVVVGACGV (KRAS G12C)
YVVLGSCGT

SEQ ID NO: 213 - protein, 9 aa, synthetic construct
  source 1..9: note = Seed: LVVVGACGV (KRAS G12C)
YVVLGSCGV

SEQ ID NO: 214 - protein, 9 aa, synthetic construct
  source 1..9: note = Seed: LVVVGACGV (KRAS G12C)
YVVLGTCGL

SEQ ID NO: 215 - protein, 9 aa, synthetic construct
  source 1..9: note = Seed: LVVVGACGV (KRAS G12C)
YVVLGTCGV

SEQ ID NO: 216 - protein, 9 aa, synthetic construct
  source 1..9: note = Seed: LVVVGACGV (KRAS G12C)
YVVMGACGA

SEQ ID NO: 217 - protein, 9 aa, synthetic construct
  source 1..9: note = Seed: LVVVGACGV (KRAS G12C)
YVVMGACGI

SEQ ID NO: 218 - protein, 9 aa, synthetic construct
  source 1..9: note = Seed: LVVVGACGV (KRAS G12C)
YVVMGACGL

SEQ ID NO: 219 - protein, 9 aa, synthetic construct
  source 1..9: note = Seed: LVVVGACGV (KRAS G12C)
YVVMGACGM

SEQ ID NO: 220 - protein, 9 aa, synthetic construct
  source 1..9: note = Seed: LVVVGACGV (KRAS G12C)
YVVMGACGT

SEQ ID NO: 221 - protein, 9 aa, synthetic construct
  source 1..9: note = Seed: LVVVGACGV (KRAS G12C)
YVVMGACGV

SEQ ID NO: 222 - protein, 9 aa, synthetic construct
  source 1..9: note = Seed: LVVVGACGV (KRAS G12C)
YVVMGGCGA

SEQ ID NO: 223 - protein, 9 aa, synthetic construct
  source 1..9: note = Seed: LVVVGACGV (KRAS G12C)
YVVMGGCGI

SEQ ID NO: 224 - protein, 9 aa, synthetic construct
  source 1..9: note = Seed: LVVVGACGV (KRAS G12C)
YVVMGGCGL

SEQ ID NO: 225 - protein, 9 aa, synthetic construct
  source 1..9: note = Seed: LVVVGACGV (KRAS G12C)
YVVMGGCGM

SEQ ID NO: 226 - protein, 9 aa, synthetic construct
  source 1..9: note = Seed: LVVVGACGV (KRAS G12C)
YVVMGGCGV

SEQ ID NO: 227 - protein, 9 aa, synthetic construct
  source 1..9: note = Seed: LVVVGACGV (KRAS G12C)
YVVMGNCGI

SEQ ID NO: 228 - protein, 9 aa, synthetic construct
  source 1..9: note = Seed: LVVVGACGV (KRAS G12C)
YVVMGNCGL

SEQ ID NO: 229 - protein, 9 aa, synthetic construct
  source 1..9: note = Seed: LVVVGACGV (KRAS G12C)
YVVMGNCGV

SEQ ID NO: 230 - protein, 9 aa, synthetic construct
  source 1..9: note = Seed: LVVVGACGV (KRAS G12C)
YVVMGPCGI

SEQ ID NO: 231 - protein, 9 aa, synthetic construct
  source 1..9: note = Seed: LVVVGACGV (KRAS G12C)
YVVMGPCGL

SEQ ID NO: 232 - protein, 9 aa, synthetic construct
  source 1..9: note = Seed: LVVVGACGV (KRAS G12C)
YVVMGPCGV

SEQ ID NO: 233 - protein, 9 aa, synthetic construct
  source 1..9: note = Seed: LVVVGACGV (KRAS G12C)
YVVMGSCGA

SEQ ID NO: 234 - protein, 9 aa, synthetic construct
  source 1..9: note = Seed: LVVVGACGV (KRAS G12C)
YVVMGSCGI

SEQ ID NO: 235 - protein, 9 aa, synthetic construct
  source 1..9: note = Seed: LVVVGACGV (KRAS G12C)
YVVMGSCGL

SEQ ID NO: 236 - protein, 9 aa, synthetic construct
  source 1..9: note = Seed: LVVVGACGV (KRAS G12C)
YVVMGSCGM

SEQ ID NO: 237 - protein, 9 aa, synthetic construct
  source 1..9: note = Seed: LVVVGACGV (KRAS G12C)
YVVMGSCGT

SEQ ID NO: 238 - protein, 9 aa, synthetic construct
  source 1..9: note = Seed: LVVVGACGV (KRAS G12C)
YVVMGSCGV

SEQ ID NO: 239 - protein, 9 aa, synthetic construct
  source 1..9: note = Seed: LVVVGACGV (KRAS G12C)
YVVMGTCGL

SEQ ID NO: 240 - protein, 9 aa, synthetic construct
  source 1..9: note = Seed: LVVVGACGV (KRAS G12C)
YVVMGTCGV

SEQ ID NO: 241 - protein, 9 aa, synthetic construct
  source 1..9: note = Seed: LVVVGACGV (KRAS G12C)
YVVQGACGI

SEQ ID NO: 242 - protein, 9 aa, synthetic construct
  source 1..9: note = Seed: LVVVGACGV (KRAS G12C)
YVVQGACGL

SEQ ID NO: 243 - protein, 9 aa, synthetic construct
  source 1..9: note = Seed: LVVVGACGV (KRAS G12C)
YVVQGACGV

SEQ ID NO: 244 - protein, 9 aa, synthetic construct
  source 1..9: note = Seed: LVVVGACGV (KRAS G12C)
YVVQGGCGL

SEQ ID NO: 245 - protein, 9 aa, synthetic construct
  source 1..9: note = Seed: LVVVGACGV (KRAS G12C)
YVVQGSCGL

SEQ ID NO: 246 - protein, 9 aa, synthetic construct
  source 1..9: note = Seed: LVVVGACGV (KRAS G12C)
YVVQGSCGV

SEQ ID NO: 247 - protein, 9 aa, synthetic construct
  source 1..9: note = Seed: LVVVGACGV (KRAS G12C)
YVVSGACGL

SEQ ID NO: 248 - protein, 9 aa, synthetic construct
  source 1..9: note = Seed: LVVVGACGV (KRAS G12C)
CVVIGACGA

SEQ ID NO: 249 - protein, 9 aa, synthetic construct
  source 1..9: note = Seed: LVVVGACGV (KRAS G12C)
CVVIGACGI

SEQ ID NO: 250 - protein, 9 aa, synthetic construct
  source 1..9: note = Seed: LVVVGACGV (KRAS G12C)
CVVIGACGL

SEQ ID NO: 251 - protein, 9 aa, synthetic construct
  source 1..9: note = Seed: LVVVGACGV (KRAS G12C)
CVVIGACGM

SEQ ID NO: 252 - protein, 9 aa, synthetic construct
  source 1..9: note = Seed: LVVVGACGV (KRAS G12C)
CVVIGACGV

SEQ ID NO: 253 - protein, 9 aa, synthetic construct
  source 1..9: note = Seed: LVVVGACGV (KRAS G12C)
CVVIGGCGI

SEQ ID NO: 254 - protein, 9 aa, synthetic construct
  source 1..9: note = Seed: LVVVGACGV (KRAS G12C)
CVVIGGCGL

SEQ ID NO: 255 - protein, 9 aa, synthetic construct
  source 1..9: note = Seed: LVVVGACGV (KRAS G12C)
CVVIGGCGV

SEQ ID NO: 256 - protein, 9 aa, synthetic construct
  source 1..9: note = Seed: LVVVGACGV (KRAS G12C)
CVVIGSCGI

SEQ ID NO: 257 - protein, 9 aa, synthetic construct
  source 1..9: note = Seed: LVVVGACGV (KRAS G12C)
CVVIGSCGL

SEQ ID NO: 258 - protein, 9 aa, synthetic construct
  source 1..9: note = Seed: LVVVGACGV (KRAS G12C)
CVVIGSCGV

SEQ ID NO: 259 - protein, 9 aa, synthetic construct
  source 1..9: note = Seed: LVVVGACGV (KRAS G12C)
CVVLGACGA

SEQ ID NO: 260 - protein, 9 aa, synthetic construct
  source 1..9: note = Seed: LVVVGACGV (KRAS G12C)
CVVLGACGI

SEQ ID NO: 261 - protein, 9 aa, synthetic construct
  source 1..9: note = Seed: LVVVGACGV (KRAS G12C)
CVVLGACGL

SEQ ID NO: 262 - protein, 9 aa, synthetic construct
  source 1..9: note = Seed: LVVVGACGV (KRAS G12C)
CVVLGACGM

SEQ ID NO: 263 - protein, 9 aa, synthetic construct
  source 1..9: note = Seed: LVVVGACGV (KRAS G12C)
CVVLGACGS

SEQ ID NO: 264 - protein, 9 aa, synthetic construct
  source 1..9: note = Seed: LVVVGACGV (KRAS G12C)
CVVLGACGT

SEQ ID NO: 265 - protein, 9 aa, synthetic construct
  source 1..9: note = Seed: LVVVGACGV (KRAS G12C)
CVVLGACGV

SEQ ID NO: 266 - protein, 9 aa, synthetic construct
  source 1..9: note = Seed: LVVVGACGV (KRAS G12C)
CVVLGGCGA

SEQ ID NO: 267 - protein, 9 aa, synthetic construct
  source 1..9: note = Seed: LVVVGACGV (KRAS G12C)
CVVLGGCGI

SEQ ID NO: 268 - protein, 9 aa, synthetic construct
  source 1..9: note = Seed: LVVVGACGV (KRAS G12C)
CVVLGGCGL

SEQ ID NO: 269 - protein, 9 aa, synthetic construct
  source 1..9: note = Seed: LVVVGACGV (KRAS G12C)
CVVLGGCGM

SEQ ID NO: 270 - protein, 9 aa, synthetic construct
  source 1..9: note = Seed: LVVVGACGV (KRAS G12C)
CVVLGGCGV

SEQ ID NO: 271 - protein, 9 aa, synthetic construct
  source 1..9: note = Seed: LVVVGACGV (KRAS G12C)
CVVLGNCGI

SEQ ID NO: 272 - protein, 9 aa, synthetic construct
  source 1..9: note = Seed: LVVVGACGV (KRAS G12C)
CVVLGNCGL

SEQ ID NO: 273 - protein, 9 aa, synthetic construct
  source 1..9: note = Seed: LVVVGACGV (KRAS G12C)
CVVLGNCGV

SEQ ID NO: 274 - protein, 9 aa, synthetic construct
  source 1..9: note = Seed: LVVVGACGV (KRAS G12C)
CVVLGPCGI

SEQ ID NO: 275 - protein, 9 aa, synthetic construct
  source 1..9: note = Seed: LVVVGACGV (KRAS G12C)
CVVLGPCGL

SEQ ID NO: 276 - protein, 9 aa, synthetic construct
  source 1..9: note = Seed: LVVVGACGV (KRAS G12C)
CVVLGPCGM

SEQ ID NO: 277 - protein, 9 aa, synthetic construct
  source 1..9: note = Seed: LVVVGACGV (KRAS G12C)
CVVLGPCGV

SEQ ID NO: 278 - protein, 9 aa, synthetic construct
  source 1..9: note = Seed: LVVVGACGV (KRAS G12C)
CVVLGSCGA

SEQ ID NO: 279 - protein, 9 aa, synthetic construct
  source 1..9: note = Seed: LVVVGACGV (KRAS G12C)
CVVLGSCGI

SEQ ID NO: 280 - protein, 9 aa, synthetic construct
  source 1..9: note = Seed: LVVVGACGV (KRAS G12C)
CVVLGSCGL

SEQ ID NO: 281 - protein, 9 aa, synthetic construct
  source 1..9: note = Seed: LVVVGACGV (KRAS G12C)
CVVLGSCGM

SEQ ID NO: 282 - protein, 9 aa, synthetic construct
  source 1..9: note = Seed: LVVVGACGV (KRAS G12C)
CVVLGSCGT

SEQ ID NO: 283 - protein, 9 aa, synthetic construct
  source 1..9: note = Seed: LVVVGACGV (KRAS G12C)
CVVLGSCGV

SEQ ID NO: 284 - protein, 9 aa, synthetic construct
  source 1..9: note = Seed: LVVVGACGV (KRAS G12C)
CVVLGTCGI

SEQ ID NO: 285 - protein, 9 aa, synthetic construct
  source 1..9: note = Seed: LVVVGACGV (KRAS G12C)
CVVLGTCGL

SEQ ID NO: 286 - protein, 9 aa, synthetic construct
  source 1..9: note = Seed: LVVVGACGV (KRAS G12C)
CVVLGTCGV

SEQ ID NO: 287 - protein, 9 aa, synthetic construct
  source 1..9: note = Seed: LVVVGACGV (KRAS G12C)
CVVMGACGA

SEQ ID NO: 288 - protein, 9 aa, synthetic construct
  source 1..9: note = Seed: LVVVGACGV (KRAS G12C)
CVVMGACGI

SEQ ID NO: 289 - protein, 9 aa, synthetic construct
  source 1..9: note = Seed: LVVVGACGV (KRAS G12C)
CVVMGACGL

SEQ ID NO: 290 - protein, 9 aa, synthetic construct
  source 1..9: note = Seed: LVVVGACGV (KRAS G12C)
CVVMGACGM

SEQ ID NO: 291 - protein, 9 aa, synthetic construct
  source 1..9: note = Seed: LVVVGACGV (KRAS G12C)
CVVMGACGT

SEQ ID NO: 292 - protein, 9 aa, synthetic construct
  source 1..9: note = Seed: LVVVGACGV (KRAS G12C)
CVVMGACGV

SEQ ID NO: 293 - protein, 9 aa, synthetic construct
  source 1..9: note = Seed: LVVVGACGV (KRAS G12C)
CVVMGGCGA

SEQ ID NO: 294 - protein, 9 aa, synthetic construct
  source 1..9: note = Seed: LVVVGACGV (KRAS G12C)
CVVMGGCGI

SEQ ID NO: 295 - protein, 9 aa, synthetic construct
  source 1..9: note = Seed: LVVVGACGV (KRAS G12C)
CVVMGGCGL

SEQ ID NO: 296 - protein, 9 aa, synthetic construct
  source 1..9: note = Seed: LVVVGACGV (KRAS G12C)
CVVMGGCGM

SEQ ID NO: 297 - protein, 9 aa, synthetic construct
  source 1..9: note = Seed: LVVVGACGV (KRAS G12C)
CVVMGGCGV

SEQ ID NO: 298 - protein, 9 aa, synthetic construct
  source 1..9: note = Seed: LVVVGACGV (KRAS G12C)
CVVMGNCGI

SEQ ID NO: 299 - protein, 9 aa, synthetic construct
  source 1..9: note = Seed: LVVVGACGV (KRAS G12C)
CVVMGNCGL

SEQ ID NO: 300 - protein, 9 aa, synthetic construct
  source 1..9: note = Seed: LVVVGACGV (KRAS G12C)
CVVMGNCGV

SEQ ID NO: 301 - protein, 9 aa, synthetic construct
  source 1..9: note = Seed: LVVVGACGV (KRAS G12C)
CVVMGPCGI

SEQ ID NO: 302 - protein, 9 aa, synthetic construct
  source 1..9: note = Seed: LVVVGACGV (KRAS G12C)
CVVMGPCGL

SEQ ID NO: 303 - protein, 9 aa, synthetic construct
  source 1..9: note = Seed: LVVVGACGV (KRAS G12C)
CVVMGPCGV

SEQ ID NO: 304 - protein, 9 aa, synthetic construct
  source 1..9: note = Seed: LVVVGACGV (KRAS G12C)
CVVMGSCGA

SEQ ID NO: 305 - protein, 9 aa, synthetic construct
  source 1..9: note = Seed: LVVVGACGV (KRAS G12C)
CVVMGSCGI

SEQ ID NO: 306 - protein, 9 aa, synthetic construct
  source 1..9: note = Seed: LVVVGACGV (KRAS G12C)
CVVMGSCGL

SEQ ID NO: 307 - protein, 9 aa, synthetic construct
  source 1..9: note = Seed: LVVVGACGV (KRAS G12C)
CVVMGSCGM

SEQ ID NO: 308 - protein, 9 aa, synthetic construct
  source 1..9: note = Seed: LVVVGACGV (KRAS G12C)
CVVMGSCGV

SEQ ID NO: 309 - protein, 9 aa, synthetic construct
  source 1..9: note = Seed: LVVVGACGV (KRAS G12C)
CVVMGTCGI

SEQ ID NO: 310 - protein, 9 aa, synthetic construct
  source 1..9: note = Seed: LVVVGACGV (KRAS G12C)
CVVMGTCGL

SEQ ID NO: 311 - protein, 9 aa, synthetic construct
  source 1..9: note = Seed: LVVVGACGV (KRAS G12C)
CVVMGTCGV

SEQ ID NO: 312 - protein, 9 aa, synthetic construct
  source 1..9: note = Seed: LVVVGACGV (KRAS G12C)
CVVVGACGL

SEQ ID NO: 313 - protein, 9 aa, synthetic construct
  source 1..9: note = Seed: LVVVGACGV (KRAS G12C)
FVVAGACGC

SEQ ID NO: 314 - protein, 9 aa, synthetic construct
  source 1..9: note = Seed: LVVVGACGV (KRAS G12C)
FVVAGACGD

SEQ ID NO: 315 - protein, 9 aa, synthetic construct
  source 1..9: note = Seed: LVVVGACGV (KRAS G12C)
FVVAGACGE

SEQ ID NO: 316 - protein, 9 aa, synthetic construct
  source 1..9: note = Seed: LVVVGACGV (KRAS G12C)
FVVAGACGF

SEQ ID NO: 317 - protein, 9 aa, synthetic construct
  source 1..9: note = Seed: LVVVGACGV (KRAS G12C)
FVVAGACGG

SEQ ID NO: 318 - protein, 9 aa, synthetic construct
  source 1..9: note = Seed: LVVVGACGV (KRAS G12C)
FVVAGACGH

SEQ ID NO: 319 - protein, 9 aa, synthetic construct
  source 1..9: note = Seed: LVVVGACGV (KRAS G12C)
FVVAGACGK

SEQ ID NO: 320 - protein, 9 aa, synthetic construct
  source 1..9: note = Seed: LVVVGACGV (KRAS G12C)
FVVAGACGN

SEQ ID NO: 321 - protein, 9 aa, synthetic construct
  source 1..9: note = Seed: LVVVGACGV (KRAS G12C)
FVVAGACGP

SEQ ID NO: 322 - protein, 9 aa, synthetic construct
  source 1..9: note = Seed: LVVVGACGV (KRAS G12C)
FVVAGACGQ

SEQ ID NO: 323 - protein, 9 aa, synthetic construct
  source 1..9: note = Seed: LVVVGACGV (KRAS G12C)
FVVAGACGR

SEQ ID NO: 324 - protein, 9 aa, synthetic construct
  source 1..9: note = Seed: LVVVGACGV (KRAS G12C)
FVVAGACGS

SEQ ID NO: 325 - protein, 9 aa, synthetic construct
  source 1..9: note = Seed: LVVVGACGV (KRAS G12C)
FVVAGACGY

SEQ ID NO: 326 - protein, 9 aa, synthetic construct
  source 1..9: note = Seed: LVVVGACGV (KRAS G12C)
FVVAGDCGI

SEQ ID NO: 327 - protein, 9 aa, synthetic construct
  source 1..9: note = Seed: LVVVGACGV (KRAS G12C)
FVVAGDCGL

SEQ ID NO: 328 - protein, 9 aa, synthetic construct
  source 1..9: note = Seed: LVVVGACGV (KRAS G12C)
FVVAGDCGV

SEQ ID NO: 329 - protein, 9 aa, synthetic construct
  source 1..9: note = Seed: LVVVGACGV (KRAS G12C)
FVVAGECGI

SEQ ID NO: 330 - protein, 9 aa, synthetic construct
  source 1..9: note = Seed: LVVVGACGV (KRAS G12C)
FVVAGECGL

SEQ ID NO: 331 - protein, 9 aa, synthetic construct
  source 1..9: note = Seed: LVVVGACGV (KRAS G12C)
FVVAGECGV

SEQ ID NO: 332 - protein, 9 aa, synthetic construct
  source 1..9: note = Seed: LVVVGACGV (KRAS G12C)
FVVAGGCGC

SEQ ID NO: 333 - protein, 9 aa, synthetic construct
  source 1..9: note = Seed: LVVVGACGV (KRAS G12C)
FVVAGGCGF

SEQ ID NO: 334 - protein, 9 aa, synthetic construct
  source 1..9: note = Seed: LVVVGACGV (KRAS G12C)
FVVAGGCGG

SEQ ID NO: 335 - protein, 9 aa, synthetic construct
  source 1..9: note = Seed: LVVVGACGV (KRAS G12C)
FVVAGGCGH

SEQ ID NO: 336 - protein, 9 aa, synthetic construct
  source 1..9: note = Seed: LVVVGACGV (KRAS G12C)
FVVAGGCGN

SEQ ID NO: 337 - protein, 9 aa, synthetic construct
  source 1..9: note = Seed: LVVVGACGV (KRAS G12C)
FVVAGGCGQ

SEQ ID NO: 338 - protein, 9 aa, synthetic construct
  source 1..9: note = Seed: LVVVGACGV (KRAS G12C)
FVVAGGCGS

SEQ ID NO: 339 - protein, 9 aa, synthetic construct
  source 1..9: note = Seed: LVVVGACGV (KRAS G12C)
FVVAGGCGT

SEQ ID NO: 340 - protein, 9 aa, synthetic construct
  source 1..9: note = Seed: LVVVGACGV (KRAS G12C)
FVVAGGCGY

SEQ ID NO: 341 - protein, 9 aa, synthetic construct
  source 1..9: note = Seed: LVVVGACGV (KRAS G12C)
FVVAGHCGA

SEQ ID NO: 342 - protein, 9 aa, synthetic construct
  source 1..9: note = Seed: LVVVGACGV (KRAS G12C)
FVVAGHCGI

SEQ ID NO: 343 - protein, 9 aa, synthetic construct
  source 1..9: note = Seed: LVVVGACGV (KRAS G12C)
FVVAGHCGL

SEQ ID NO: 344 - protein, 9 aa, synthetic construct
  source 1..9: note = Seed: LVVVGACGV (KRAS G12C)
FVVAGHCGM

SEQ ID NO: 345 - protein, 9 aa, synthetic construct
  source 1..9: note = Seed: LVVVGACGV (KRAS G12C)
FVVAGHCGV

SEQ ID NO: 346 - protein, 9 aa, synthetic construct
  source 1..9: note = Seed: LVVVGACGV (KRAS G12C)
FVVAGICGA

SEQ ID NO: 347 - protein, 9 aa, synthetic construct
  source 1..9: note = Seed: LVVVGACGV (KRAS G12C)
FVVAGICGD

SEQ ID NO: 348 - protein, 9 aa, synthetic construct
  source 1..9: note = Seed: LVVVGACGV (KRAS G12C)
FVVAGICGE

SEQ ID NO: 349 - protein, 9 aa, synthetic construct
  source 1..9: note = Seed: LVVVGACGV (KRAS G12C)
FVVAGICGH

SEQ ID NO: 350 - protein, 9 aa, synthetic construct
  source 1..9: note = Seed: LVVVGACGV (KRAS G12C)
FVVAGICGL

SEQ ID NO: 351 - protein, 9 aa, synthetic construct
  source 1..9: note = Seed: LVVVGACGV (KRAS G12C)
FVVAGICGM

SEQ ID NO: 352 - protein, 9 aa, synthetic construct
  source 1..9: note = Seed: LVVVGACGV (KRAS G12C)
FVVAGICGN

SEQ ID NO: 353 - protein, 9 aa, synthetic construct
  source 1..9: note = Seed: LVVVGACGV (KRAS G12C)
FVVAGICGQ

SEQ ID NO: 354 - protein, 9 aa, synthetic construct
  source 1..9: note = Seed: LVVVGACGV (KRAS G12C)
FVVAGICGS

SEQ ID NO: 355 - protein, 9 aa, synthetic construct
  source 1..9: note = Seed: LVVVGACGV (KRAS G12C)
FVVAGICGT

SEQ ID NO: 356 - protein, 9 aa, synthetic construct
  source 1..9: note = Seed: LVVVGACGV (KRAS G12C)
FVVAGICGV

SEQ ID NO: 357 - protein, 9 aa, synthetic construct
  source 1..9: note = Seed: LVVVGACGV (KRAS G12C)
FVVAGLCGA

SEQ ID NO: 358 - protein, 9 aa, synthetic construct
  source 1..9: note = Seed: LVVVGACGV (KRAS G12C)
FVVAGLCGN

SEQ ID NO: 359 - protein, 9 aa, synthetic construct
  source 1..9: note = Seed: LVVVGACGV (KRAS G12C)
FVVAGLCGS

SEQ ID NO: 360 - protein, 9 aa, synthetic construct
  source 1..9: note = Seed: LVVVGACGV (KRAS G12C)
FVVAGMCGA

SEQ ID NO: 361 - protein, 9 aa, synthetic construct
  source 1..9: note = Seed: LVVVGACGV (KRAS G12C)
FVVAGMCGN

SEQ ID NO: 362 - protein, 9 aa, synthetic construct
  source 1..9: note = Seed: LVVVGACGV (KRAS G12C)
FVVAGMCGV

SEQ ID NO: 363 - protein, 9 aa, synthetic construct
  source 1..9: note = Seed: LVVVGACGV (KRAS G12C)
FVVAGNCGA

SEQ ID NO: 364 - protein, 9 aa, synthetic construct
  source 1..9: note = Seed: LVVVGACGV (KRAS G12C)
FVVAGNCGC

SEQ ID NO: 365 - protein, 9 aa, synthetic construct
  source 1..9: note = Seed: LVVVGACGV (KRAS G12C)
FVVAGNCGF

SEQ ID NO: 366 - protein, 9 aa, synthetic construct
  source 1..9: note = Seed: LVVVGACGV (KRAS G12C)
FVVAGNCGG

SEQ ID NO: 367 - protein, 9 aa, synthetic construct
  source 1..9: note = Seed: LVVVGACGV (KRAS G12C)
FVVAGNCGH

SEQ ID NO: 368 - protein, 9 aa, synthetic construct
  source 1..9: note = Seed: LVVVGACGV (KRAS G12C)
FVVAGNCGM

SEQ ID NO: 369 - protein, 9 aa, synthetic construct
  source 1..9: note = Seed: LVVVGACGV (KRAS G12C)
FVVAGNCGN

SEQ ID NO: 370 - protein, 9 aa, synthetic construct
  source 1..9: note = Seed: LVVVGACGV (KRAS G12C)
FVVAGNCGQ

SEQ ID NO: 371 - protein, 9 aa, synthetic construct
  source 1..9: note = Seed: LVVVGACGV (KRAS G12C)
FVVAGNCGS

SEQ ID NO: 372 - protein, 9 aa, synthetic construct
  source 1..9: note = Seed: LVVVGACGV (KRAS G12C)
FVVAGNCGT

SEQ ID NO: 373 - protein, 9 aa, synthetic construct
  source 1..9: note = Seed: LVVVGACGV (KRAS G12C)
FVVAGNCGY

SEQ ID NO: 374 - protein, 9 aa, synthetic construct
  source 1..9: note = Seed: LVVVGACGV (KRAS G12C)
FVVAGPCGA

SEQ ID NO: 375 - protein, 9 aa, synthetic construct
  source 1..9: note = Seed: LVVVGACGV (KRAS G12C)
FVVAGPCGC

SEQ ID NO: 376 - protein, 9 aa, synthetic construct
  source 1..9: note = Seed: LVVVGACGV (KRAS G12C)
FVVAGPCGE

SEQ ID NO: 377 - protein, 9 aa, synthetic construct
  source 1..9: note = Seed: LVVVGACGV (KRAS G12C)
FVVAGPCGF

SEQ ID NO: 378 - protein, 9 aa, synthetic construct
  source 1..9: note = Seed: LVVVGACGV (KRAS G12C)
FVVAGPCGG

SEQ ID NO: 379 - protein, 9 aa, synthetic construct
  source 1..9: note = Seed: LVVVGACGV (KRAS G12C)
FVVAGPCGH

SEQ ID NO: 380 - protein, 9 aa, synthetic construct
  source 1..9: note = Seed: LVVVGACGV (KRAS G12C)
FVVAGPCGM

SEQ ID NO: 381 - protein, 9 aa, synthetic construct
  source 1..9: note = Seed: LVVVGACGV (KRAS G12C)
FVVAGPCGN

SEQ ID NO: 382 - protein, 9 aa, synthetic construct
  source 1..9: note = Seed: LVVVGACGV (KRAS G12C)
FVVAGPCGQ

SEQ ID NO: 383 - protein, 9 aa, synthetic construct
  source 1..9: note = Seed: LVVVGACGV (KRAS G12C)
FVVAGPCGS

SEQ ID NO: 384 - protein, 9 aa, synthetic construct
  source 1..9: note = Seed: LVVVGACGV (KRAS G12C)
FVVAGPCGT

SEQ ID NO: 385 - protein, 9 aa, synthetic construct
  source 1..9: note = Seed: LVVVGACGV (KRAS G12C)
FVVAGPCGY

SEQ ID NO: 386 - protein, 9 aa, synthetic construct
  source 1..9: note = Seed: LVVVGACGV (KRAS G12C)
FVVAGQCGA

SEQ ID NO: 387 - protein, 9 aa, synthetic construct
  source 1..9: note = Seed: LVVVGACGV (KRAS G12C)
FVVAGQCGI

SEQ ID NO: 388 - protein, 9 aa, synthetic construct
  source 1..9: note = Seed: LVVVGACGV (KRAS G12C)
FVVAGQCGL

SEQ ID NO: 389 - protein, 9 aa, synthetic construct
  source 1..9: note = Seed: LVVVGACGV (KRAS G12C)
FVVAGQCGM

SEQ ID NO: 390 - protein, 9 aa, synthetic construct
  source 1..9: note = Seed: LVVVGACGV (KRAS G12C)
FVVAGQCGV

SEQ ID NO: 391 - protein, 9 aa, synthetic construct
  source 1..9: note = Seed: LVVVGACGV (KRAS G12C)
FVVAGRCGH

SEQ ID NO: 392 - protein, 9 aa, synthetic construct
  source 1..9: note = Seed: LVVVGACGV (KRAS G12C)
FVVAGSCGC

SEQ ID NO: 393 - protein, 9 aa, synthetic construct
  source 1..9: note = Seed: LVVVGACGV (KRAS G12C)
FVVAGSCGF

SEQ ID NO: 394 - protein, 9 aa, synthetic construct
  source 1..9: note = Seed: LVVVGACGV (KRAS G12C)
FVVAGSCGG

SEQ ID NO: 395 - protein, 9 aa, synthetic construct
  source 1..9: note = Seed: LVVVGACGV (KRAS G12C)
FVVAGSCGH

SEQ ID NO: 396 - protein, 9 aa, synthetic construct
  source 1..9: note = Seed: LVVVGACGV (KRAS G12C)
FVVAGSCGN

SEQ ID NO: 397 - protein, 9 aa, synthetic construct
  source 1..9: note = Seed: LVVVGACGV (KRAS G12C)
FVVAGSCGQ

SEQ ID NO: 398 - protein, 9 aa, synthetic construct
  source 1..9: note = Seed: LVVVGACGV (KRAS G12C)
FVVAGSCGS

SEQ ID NO: 399 - protein, 9 aa, synthetic construct
  source 1..9: note = Seed: LVVVGACGV (KRAS G12C)
FVVAGSCGT

SEQ ID NO: 400 - protein, 9 aa, synthetic construct
  source 1..9: note = Seed: LVVVGACGV (KRAS G12C)
FVVAGSCGY

SEQ ID NO: 401 - protein, 9 aa, synthetic construct
  source 1..9: note = Seed: LVVVGACGV (KRAS G12C)
FVVAGTCGA

SEQ ID NO: 402 - protein, 9 aa, synthetic construct
  source 1..9: note = Seed: LVVVGACGV (KRAS G12C)
FVVAGTCGF

SEQ ID NO: 403 - protein, 9 aa, synthetic construct
  source 1..9: note = Seed: LVVVGACGV (KRAS G12C)
FVVAGTCGG

SEQ ID NO: 404 - protein, 9 aa, synthetic construct
  source 1..9: note = Seed: LVVVGACGV (KRAS G12C)
FVVAGTCGH

SEQ ID NO: 405 - protein, 9 aa, synthetic construct
  source 1..9: note = Seed: LVVVGACGV (KRAS G12C)
FVVAGTCGI

SEQ ID NO: 406 - protein, 9 aa, synthetic construct
  source 1..9: note = Seed: LVVVGACGV (KRAS G12C)
FVVAGTCGM

SEQ ID NO: 407 - protein, 9 aa, synthetic construct
  source 1..9: note = Seed: LVVVGACGV (KRAS G12C)
FVVAGTCGN

SEQ ID NO: 408 - protein, 9 aa, synthetic construct
  source 1..9: note = Seed: LVVVGACGV (KRAS G12C)
FVVAGTCGQ

SEQ ID NO: 409 - protein, 9 aa, synthetic construct
  source 1..9: note = Seed: LVVVGACGV (KRAS G12C)
FVVAGTCGS

SEQ ID NO: 410 - protein, 9 aa, synthetic construct
  source 1..9: note = Seed: LVVVGACGV (KRAS G12C)
FVVAGTCGT

SEQ ID NO: 411 - protein, 9 aa, synthetic construct
  source 1..9: note = Seed: LVVVGACGV (KRAS G12C)
FVVAGTCGY

SEQ ID NO: 412 - protein, 9 aa, synthetic construct
  source 1..9: note = Seed: LVVVGACGV (KRAS G12C)
FVVAGVCGA

SEQ ID NO: 413 - protein, 9 aa, synthetic construct
  source 1..9: note = Seed: LVVVGACGV (KRAS G12C)
FVVAGVCGD

SEQ ID NO: 414 - protein, 9 aa, synthetic construct
  source 1..9: note = Seed: LVVVGACGV (KRAS G12C)
FVVAGVCGE

SEQ ID NO: 415 - protein, 9 aa, synthetic construct
  source 1..9: note = Seed: LVVVGACGV (KRAS G12C)
FVVAGVCGH

SEQ ID NO: 416 - protein, 9 aa, synthetic construct
  source 1..9: note = Seed: LVVVGACGV (KRAS G12C)
FVVAGVCGI

SEQ ID NO: 417 - protein, 9 aa, synthetic construct
  source 1..9: note = Seed: LVVVGACGV (KRAS G12C)
FVVAGVCGL

SEQ ID NO: 418 - protein, 9 aa, synthetic construct
  source 1..9: note = Seed: LVVVGACGV (KRAS G12C)
FVVAGVCGM

SEQ ID NO: 419 - protein, 9 aa, synthetic construct
  source 1..9: note = Seed: LVVVGACGV (KRAS G12C)
FVVAGVCGN

SEQ ID NO: 420 - protein, 9 aa, synthetic construct
  source 1..9: note = Seed: LVVVGACGV (KRAS G12C)
FVVAGVCGQ

SEQ ID NO: 421 - protein, 9 aa, synthetic construct
  source 1..9: note = Seed: LVVVGACGV (KRAS G12C)
FVVAGVCGS

SEQ ID NO: 422 - protein, 9 aa, synthetic construct
  source 1..9: note = Seed: LVVVGACGV (KRAS G12C)
FVVAGVCGT

SEQ ID NO: 423 - protein, 9 aa, synthetic construct
  source 1..9: note = Seed: LVVVGACGV (KRAS G12C)
FVVAGVCGV

SEQ ID NO: 424 - protein, 9 aa, synthetic construct
  source 1..9: note = Seed: LVVVGACGV (KRAS G12C)
FVVAGVCGY

SEQ ID NO: 425 - protein, 9 aa, synthetic construct
  source 1..9: note = Seed: LVVVGACGV (KRAS G12C)
FVVCGACGA

SEQ ID NO: 426 - protein, 9 aa, synthetic construct
  source 1..9: note = Seed: LVVVGACGV (KRAS G12C)
FVVCGACGI

SEQ ID NO: 427 - protein, 9 aa, synthetic construct
  source 1..9: note = Seed: LVVVGACGV (KRAS G12C)
FVVCGACGL

SEQ ID NO: 428 - protein, 9 aa, synthetic construct
  source 1..9: note = Seed: LVVVGACGV (KRAS G12C)
FVVCGACGM

SEQ ID NO: 429 - protein, 9 aa, synthetic construct
  source 1..9: note = Seed: LVVVGACGV (KRAS G12C)
FVVCGACGT

SEQ ID NO: 430 - protein, 9 aa, synthetic construct
  source 1..9: note = Seed: LVVVGACGV (KRAS G12C)
FVVCGACGV

SEQ ID NO: 431 - protein, 9 aa, synthetic construct
  source 1..9: note = Seed: LVVVGACGV (KRAS G12C)
FVVCGGCGA

SEQ ID NO: 432 - protein, 9 aa, synthetic construct
  source 1..9: note = Seed: LVVVGACGV (KRAS G12C)
FVVCGGCGI

SEQ ID NO: 433 - protein, 9 aa, synthetic construct
  source 1..9: note = Seed: LVVVGACGV (KRAS G12C)
FVVCGGCGL

SEQ ID NO: 434 - protein, 9 aa, synthetic construct
  source 1..9: note = Seed: LVVVGACGV (KRAS G12C)
FVVCGGCGM

SEQ ID NO: 435 - protein, 9 aa, synthetic construct
  source 1..9: note = Seed: LVVVGACGV (KRAS G12C)
FVVCGGCGV

SEQ ID NO: 436 - protein, 9 aa, synthetic construct
  source 1..9: note = Seed: LVVVGACGV (KRAS G12C)
FVVCGNCGI

SEQ ID NO: 437 - protein, 9 aa, synthetic construct
  source 1..9: note = Seed: LVVVGACGV (KRAS G12C)
FVVCGNCGL

SEQ ID NO: 438 - protein, 9 aa, synthetic construct
  source 1..9: note = Seed: LVVVGACGV (KRAS G12C)
FVVCGNCGV

SEQ ID NO: 439 - protein, 9 aa, synthetic construct
  source 1..9: note = Seed: LVVVGACGV (KRAS G12C)
FVVCGPCGI

SEQ ID NO: 440 - protein, 9 aa, synthetic construct
  source 1..9: note = Seed: LVVVGACGV (KRAS G12C)
FVVCGPCGL

SEQ ID NO: 441 - protein, 9 aa, synthetic construct
  source 1..9: note = Seed: LVVVGACGV (KRAS G12C)
FVVCGPCGV

SEQ ID NO: 442 - protein, 9 aa, synthetic construct
  source 1..9: note = Seed: LVVVGACGV (KRAS G12C)
FVVCGSCGA

SEQ ID NO: 443 - protein, 9 aa, synthetic construct
  source 1..9: note = Seed: LVVVGACGV (KRAS G12C)
FVVCGSCGI

SEQ ID NO: 444 - protein, 9 aa, synthetic construct
  source 1..9: note = Seed: LVVVGACGV (KRAS G12C)
FVVCGSCGL

SEQ ID NO: 445 - protein, 9 aa, synthetic construct
  source 1..9: note = Seed: LVVVGACGV (KRAS G12C)
FVVCGSCGM

SEQ ID NO: 446 - protein, 9 aa, synthetic construct
  source 1..9: note = Seed: LVVVGACGV (KRAS G12C)
FVVCGSCGV

SEQ ID NO: 447 - protein, 9 aa, synthetic construct
  source 1..9: note = Seed: LVVVGACGV (KRAS G12C)
FVVCGTCGL

SEQ ID NO: 448 - protein, 9 aa, synthetic construct
  source 1..9: note = Seed: LVVVGACGV (KRAS G12C)
FVVDGACGA

SEQ ID NO: 449 - protein, 9 aa, synthetic construct
  source 1..9: note = Seed: LVVVGACGV (KRAS G12C)
FVVDGACGI

SEQ ID NO: 450 - protein, 9 aa, synthetic construct
  source 1..9: note = Seed: LVVVGACGV (KRAS G12C)
FVVDGACGL

SEQ ID NO: 451 - protein, 9 aa, synthetic construct
  source 1..9: note = Seed: LVVVGACGV (KRAS G12C)
FVVDGACGM

SEQ ID NO: 452 - protein, 9 aa, synthetic construct
  source 1..9: note = Seed: LVVVGACGV (KRAS G12C)
FVVDGACGV

SEQ ID NO: 453 - protein, 9 aa, synthetic construct
  source 1..9: note = Seed: LVVVGACGV (KRAS G12C)
FVVDGGCGL

SEQ ID NO: 454 - protein, 9 aa, synthetic construct
  source 1..9: note = Seed: LVVVGACGV (KRAS G12C)
FVVDGGCGV

SEQ ID NO: 455 - protein, 9 aa, synthetic construct
  source 1..9: note = Seed: LVVVGACGV (KRAS G12C)
FVVDGNCGA

SEQ ID NO: 456 - protein, 9 aa, synthetic construct
  source 1..9: note = Seed: LVVVGACGV (KRAS G12C)
FVVDGNCGI

SEQ ID NO: 457 - protein, 9 aa, synthetic construct
  source 1..9: note = Seed: LVVVGACGV (KRAS G12C)
FVVDGNCGS

SEQ ID NO: 458 - protein, 9 aa, synthetic construct
  source 1..9: note = Seed: LVVVGACGV (KRAS G12C)
FVVDGNCGV

SEQ ID NO: 459 - protein, 9 aa, synthetic construct
  source 1..9: note = Seed: LVVVGACGV (KRAS G12C)
FVVDGSCGA

SEQ ID NO: 460 - protein, 9 aa, synthetic construct
  source 1..9: note = Seed: LVVVGACGV (KRAS G12C)
FVVDGSCGI

SEQ ID NO: 461 - protein, 9 aa, synthetic construct
  source 1..9: note = Seed: LVVVGACGV (KRAS G12C)
FVVDGSCGL

SEQ ID NO: 462 - protein, 9 aa, synthetic construct
  source 1..9: note = Seed: LVVVGACGV (KRAS G12C)
FVVDGTCGA

SEQ ID NO: 463 - protein, 9 aa, synthetic construct
  source 1..9: note = Seed: LVVVGACGV (KRAS G12C)
FVVDGVCGA

SEQ ID NO: 464 - protein, 9 aa, synthetic construct
  source 1..9: note = Seed: LVVVGACGV (KRAS G12C)
FVVEGACGA

SEQ ID NO: 465 - protein, 9 aa, synthetic construct
  source 1..9: note = Seed: LVVVGACGV (KRAS G12C)
FVVEGACGF

SEQ ID NO: 466 - protein, 9 aa, synthetic construct
  source 1..9: note = Seed: LVVVGACGV (KRAS G12C)
FVVEGACGG

SEQ ID NO: 467 - protein, 9 aa, synthetic construct
  source 1..9: note = Seed: LVVVGACGV (KRAS G12C)
FVVEGACGH

SEQ ID NO: 468 - protein, 9 aa, synthetic construct
  source 1..9: note = Seed: LVVVGACGV (KRAS G12C)
FVVEGACGI

SEQ ID NO: 469 - protein, 9 aa, synthetic construct
  source 1..9: note = Seed: LVVVGACGV (KRAS G12C)
FVVEGACGM

SEQ ID NO: 470 - protein, 9 aa, synthetic construct
  source 1..9: note = Seed: LVVVGACGV (KRAS G12C)
FVVEGACGN

SEQ ID NO: 471 - protein, 9 aa, synthetic construct
  source 1..9: note = Seed: LVVVGACGV (KRAS G12C)
FVVEGACGS

SEQ ID NO: 472 - protein, 9 aa, synthetic construct
  source 1..9: note = Seed: LVVVGACGV (KRAS G12C)
FVVEGACGT

SEQ ID NO: 473 - protein, 9 aa, synthetic construct
  source 1..9: note = Seed: LVVVGACGV (KRAS G12C)
FVVEGACGY

SEQ ID NO: 474 - protein, 9 aa, synthetic construct
  source 1..9: note = Seed: LVVVGACGV (KRAS G12C)
FVVEGGCGA

SEQ ID NO: 475 - protein, 9 aa, synthetic construct
  source 1..9: note = Seed: LVVVGACGV (KRAS G12C)
FVVEGGCGI

SEQ ID NO: 476 - protein, 9 aa, synthetic construct
  source 1..9: note = Seed: LVVVGACGV (KRAS G12C)
FVVEGGCGL

SEQ ID NO: 477 - protein, 9 aa, synthetic construct
  source 1..9: note = Seed: LVVVGACGV (KRAS G12C)
FVVEGGCGM

SEQ ID NO: 478 - protein, 9 aa, synthetic construct
  source 1..9: note = Seed: LVVVGACGV (KRAS G12C)
FVVEGGCGS

SEQ ID NO: 479 - protein, 9 aa, synthetic construct
  source 1..9: note = Seed: LVVVGACGV (KRAS G12C)
FVVEGGCGT

SEQ ID NO: 480 - protein, 9 aa, synthetic construct
  source 1..9: note = Seed: LVVVGACGV (KRAS G12C)
FVVEGGCGV

SEQ ID NO: 481 - protein, 9 aa, synthetic construct
  source 1..9: note = Seed: LVVVGACGV (KRAS G12C)
FVVEGICGA

SEQ ID NO: 482 - protein, 9 aa, synthetic construct
  source 1..9: note = Seed: LVVVGACGV (KRAS G12C)
FVVEGICGN

SEQ ID NO: 483 - protein, 9 aa, synthetic construct
  source 1..9: note = Seed: LVVVGACGV (KRAS G12C)
FVVEGNCGA

SEQ ID NO: 484 - protein, 9 aa, synthetic construct
  source 1..9: note = Seed: LVVVGACGV (KRAS G12C)
FVVEGNCGI

SEQ ID NO: 485 - protein, 9 aa, synthetic construct
  source 1..9: note = Seed: LVVVGACGV (KRAS G12C)
FVVEGNCGL

SEQ ID NO: 486 - protein, 9 aa, synthetic construct
  source 1..9: note = Seed: LVVVGACGV (KRAS G12C)
FVVEGNCGM

SEQ ID NO: 487 - protein, 9 aa, synthetic construct
  source 1..9: note = Seed: LVVVGACGV (KRAS G12C)
FVVEGNCGS

SEQ ID NO: 488 - protein, 9 aa, synthetic construct
  source 1..9: note = Seed: LVVVGACGV (KRAS G12C)
FVVEGNCGT

SEQ ID NO: 489 - protein, 9 aa, synthetic construct
  source 1..9: note = Seed: LVVVGACGV (KRAS G12C)
FVVEGNCGV

SEQ ID NO: 490 - protein, 9 aa, synthetic construct
  source 1..9: note = Seed: LVVVGACGV (KRAS G12C)
FVVEGPCGA

SEQ ID NO: 491 - protein, 9 aa, synthetic construct
  source 1..9: note = Seed: LVVVGACGV (KRAS G12C)
FVVEGPCGI

SEQ ID NO: 492 - protein, 9 aa, synthetic construct
  source 1..9: note = Seed: LVVVGACGV (KRAS G12C)
FVVEGPCGL

SEQ ID NO: 493 - protein, 9 aa, synthetic construct
  source 1..9: note = Seed: LVVVGACGV (KRAS G12C)
FVVEGPCGM

SEQ ID NO: 494 - protein, 9 aa, synthetic construct
  source 1..9: note = Seed: LVVVGACGV (KRAS G12C)
FVVEGPCGS

SEQ ID NO: 495 - protein, 9 aa, synthetic construct
  source 1..9: note = Seed: LVVVGACGV (KRAS G12C)
FVVEGPCGT

SEQ ID NO: 496 - protein, 9 aa, synthetic construct
  source 1..9: note = Seed: LVVVGACGV (KRAS G12C)
FVVEGPCGV

SEQ ID NO: 497 - protein, 9 aa, synthetic construct
  source 1..9: note = Seed: LVVVGACGV (KRAS G12C)
FVVEGSCGA

SEQ ID NO: 498 - protein, 9 aa, synthetic construct
  source 1..9: note = Seed: LVVVGACGV (KRAS G12C)
FVVEGSCGI

SEQ ID NO: 499 - protein, 9 aa, synthetic construct
  source 1..9: note = Seed: LVVVGACGV (KRAS G12C)
FVVEGSCGL

SEQ ID NO: 500 - protein, 9 aa, synthetic construct
  source 1..9: note = Seed: LVVVGACGV (KRAS G12C)
FVVEGSCGM

SEQ ID NO: 501 - protein, 9 aa, synthetic construct
  source 1..9: note = Seed: LVVVGACGV (KRAS G12C)
FVVEGSCGS

SEQ ID NO: 502 - protein, 9 aa, synthetic construct
  source 1..9: note = Seed: LVVVGACGV (KRAS G12C)
FVVEGSCGT

SEQ ID NO: 503 - protein, 9 aa, synthetic construct
  source 1..9: note = Seed: LVVVGACGV (KRAS G12C)
FVVEGSCGV

SEQ ID NO: 504 - protein, 9 aa, synthetic construct
  source 1..9: note = Seed: LVVVGACGV (KRAS G12C)
FVVEGTCGA

SEQ ID NO: 505 - protein, 9 aa, synthetic construct
  source 1..9: note = Seed: LVVVGACGV (KRAS G12C)
FVVEGTCGI

SEQ ID NO: 506 - protein, 9 aa, synthetic construct
  source 1..9: note = Seed: LVVVGACGV (KRAS G12C)
FVVEGTCGL

SEQ ID NO: 507 - protein, 9 aa, synthetic construct
  source 1..9: note = Seed: LVVVGACGV (KRAS G12C)
FVVEGTCGM

SEQ ID NO: 508 - protein, 9 aa, synthetic construct
  source 1..9: note = Seed: LVVVGACGV (KRAS G12C)
FVVEGTCGT

SEQ ID NO: 509 - protein, 9 aa, synthetic construct
  source 1..9: note = Seed: LVVVGACGV (KRAS G12C)
FVVEGTCGV

SEQ ID NO: 510 - protein, 9 aa, synthetic construct
  source 1..9: note = Seed: LVVVGACGV (KRAS G12C)
FVVEGVCGA

SEQ ID NO: 511 - protein, 9 aa, synthetic construct
  source 1..9: note = Seed: LVVVGACGV (KRAS G12C)
FVVEGVCGI

SEQ ID NO: 512 - protein, 9 aa, synthetic construct
  source 1..9: note = Seed: LVVVGACGV (KRAS G12C)
FVVEGVCGL

SEQ ID NO: 513 - protein, 9 aa, synthetic construct
  source 1..9: note = Seed: LVVVGACGV (KRAS G12C)
FVVEGVCGM

SEQ ID NO: 514 - protein, 9 aa, synthetic construct
  source 1..9: note = Seed: LVVVGACGV (KRAS G12C)
FVVEGVCGN

SEQ ID NO: 515 - protein, 9 aa, synthetic construct
  source 1..9: note = Seed: LVVVGACGV (KRAS G12C)
FVVEGVCGV

SEQ ID NO: 516 - protein, 9 aa, synthetic construct
  source 1..9: note = Seed: LVVVGACGV (KRAS G12C)
FVVFGACGA

SEQ ID NO: 517 - protein, 9 aa, synthetic construct
  source 1..9: note = Seed: LVVVGACGV (KRAS G12C)
FVVFGACGG

SEQ ID NO: 518 - protein, 9 aa, synthetic construct
  source 1..9: note = Seed: LVVVGACGV (KRAS G12C)
FVVFGACGH

SEQ ID NO: 519 - protein, 9 aa, synthetic construct
  source 1..9: note = Seed: LVVVGACGV (KRAS G12C)
FVVFGACGI

SEQ ID NO: 520 - protein, 9 aa, synthetic construct
  source 1..9: note = Seed: LVVVGACGV (KRAS G12C)
FVVFGACGL

SEQ ID NO: 521 - protein, 9 aa, synthetic construct
  source 1..9: note = Seed: LVVVGACGV (KRAS G12C)
FVVFGACGM

SEQ ID NO: 522 - protein, 9 aa, synthetic construct
  source 1..9: note = Seed: LVVVGACGV (KRAS G12C)
FVVFGACGN

SEQ ID NO: 523 - protein, 9 aa, synthetic construct
  source 1..9: note = Seed: LVVVGACGV (KRAS G12C)
FVVFGACGR

SEQ ID NO: 524 - protein, 9 aa, synthetic construct
  source 1..9: note = Seed: LVVVGACGV (KRAS G12C)
FVVFGACGS

SEQ ID NO: 525 - protein, 9 aa, synthetic construct
  source 1..9: note = Seed: LVVVGACGV (KRAS G12C)
FVVFGACGT

SEQ ID NO: 526 - protein, 9 aa, synthetic construct
  source 1..9: note = Seed: LVVVGACGV (KRAS G12C)
FVVFGACGV

SEQ ID NO: 527 - protein, 9 aa, synthetic construct
  source 1..9: note = Seed: LVVVGACGV (KRAS G12C)
FVVFGACGY

SEQ ID NO: 528 - protein, 9 aa, synthetic construct
  source 1..9: note = Seed: LVVVGACGV (KRAS G12C)
FVVFGGCGA

SEQ ID NO: 529 - protein, 9 aa, synthetic construct
  source 1..9: note = Seed: LVVVGACGV (KRAS G12C)
FVVFGGCGI

SEQ ID NO: 530 - protein, 9 aa, synthetic construct
  source 1..9: note = Seed: LVVVGACGV (KRAS G12C)
FVVFGGCGL

SEQ ID NO: 531 - protein, 9 aa, synthetic construct
  source 1..9: note = Seed: LVVVGACGV (KRAS G12C)
FVVFGGCGM

SEQ ID NO: 532 - protein, 9 aa, synthetic construct
  source 1..9: note = Seed: LVVVGACGV (KRAS G12C)
FVVFGGCGN

SEQ ID NO: 533 - protein, 9 aa, synthetic construct
  source 1..9: note = Seed: LVVVGACGV (KRAS G12C)
FVVFGGCGS

SEQ ID NO: 534 - protein, 9 aa, synthetic construct
  source 1..9: note = Seed: LVVVGACGV (KRAS G12C)
FVVFGGCGT

SEQ ID NO: 535 - protein, 9 aa, synthetic construct
  source 1..9: note = Seed: LVVVGACGV (KRAS G12C)
FVVFGGCGV

SEQ ID NO: 536 - protein, 9 aa, synthetic construct
  source 1..9: note = Seed: LVVVGACGV (KRAS G12C)
FVVFGKCGH

SEQ ID NO: 537 - protein, 9 aa, synthetic construct
  source 1..9: note = Seed: LVVVGACGV (KRAS G12C)
FVVFGKCGR

SEQ ID NO: 538 - protein, 9 aa, synthetic construct
  source 1..9: note = Seed: LVVVGACGV (KRAS G12C)
FVVFGNCGA

SEQ ID NO: 539 - protein, 9 aa, synthetic construct
  source 1..9: note = Seed: LVVVGACGV (KRAS G12C)
FVVFGNCGI

SEQ ID NO: 540 - protein, 9 aa, synthetic construct
  source 1..9: note = Seed: LVVVGACGV (KRAS G12C)
FVVFGNCGL

SEQ ID NO: 541 - protein, 9 aa, synthetic construct
  source 1..9: note = Seed: LVVVGACGV (KRAS G12C)
FVVFGNCGM

SEQ ID NO: 542 - protein, 9 aa, synthetic construct
  source 1..9: note = Seed: LVVVGACGV (KRAS G12C)
FVVFGNCGN

SEQ ID NO: 543 - protein, 9 aa, synthetic construct
  source 1..9: note = Seed: LVVVGACGV (KRAS G12C)
FVVFGNCGS

SEQ ID NO: 544 - protein, 9 aa, synthetic construct
  source 1..9: note = Seed: LVVVGACGV (KRAS G12C)
FVVFGNCGT

SEQ ID NO: 545 - protein, 9 aa, synthetic construct
  source 1..9: note = Seed: LVVVGACGV (KRAS G12C)
FVVFGNCGV

SEQ ID NO: 546 - protein, 9 aa, synthetic construct
  source 1..9: note = Seed: LVVVGACGV (KRAS G12C)
FVVFGPCGA

SEQ ID NO: 547 - protein, 9 aa, synthetic construct
  source 1..9: note = Seed: LVVVGACGV (KRAS G12C)
FVVFGPCGI

SEQ ID NO: 548 - protein, 9 aa, synthetic construct
  source 1..9: note = Seed: LVVVGACGV (KRAS G12C)
FVVFGPCGL

SEQ ID NO: 549 - protein, 9 aa, synthetic construct
  source 1..9: note = Seed: LVVVGACGV (KRAS G12C)
FVVFGPCGM

SEQ ID NO: 550 - protein, 9 aa, synthetic construct
  source 1..9: note = Seed: LVVVGACGV (KRAS G12C)
FVVFGPCGN

SEQ ID NO: 551 - protein, 9 aa, synthetic construct
  source 1..9: note = Seed: LVVVGACGV (KRAS G12C)
FVVFGPCGS

SEQ ID NO: 552 - protein, 9 aa, synthetic construct
  source 1..9: note = Seed: LVVVGACGV (KRAS G12C)
FVVFGPCGT

SEQ ID NO: 553 - protein, 9 aa, synthetic construct
  source 1..9: note = Seed: LVVVGACGV (KRAS G12C)
FVVFGPCGV

SEQ ID NO: 554 - protein, 9 aa, synthetic construct
  source 1..9: note = Seed: LVVVGACGV (KRAS G12C)
FVVFGRCGH

SEQ ID NO: 555 - protein, 9 aa, synthetic construct
  source 1..9: note = Seed: LVVVGACGV (KRAS G12C)
FVVFGRCGR

SEQ ID NO: 556 - protein, 9 aa, synthetic construct
  source 1..9: note = Seed: LVVVGACGV (KRAS G12C)
FVVFGSCGA

SEQ ID NO: 557 - protein, 9 aa, synthetic construct
  source 1..9: note = Seed: LVVVGACGV (KRAS G12C)
FVVFGSCGG

SEQ ID NO: 558 - protein, 9 aa, synthetic construct
  source 1..9: note = Seed: LVVVGACGV (KRAS G12C)
FVVFGSCGH

SEQ ID NO: 559 - protein, 9 aa, synthetic construct
  source 1..9: note = Seed: LVVVGACGV (KRAS G12C)
FVVFGSCGI

SEQ ID NO: 560 - protein, 9 aa, synthetic construct
  source 1..9: note = Seed: LVVVGACGV (KRAS G12C)
FVVFGSCGK

SEQ ID NO: 561 - protein, 9 aa, synthetic construct
  source 1..9: note = Seed: LVVVGACGV (KRAS G12C)
FVVFGSCGL

SEQ ID NO: 562 - protein, 9 aa, synthetic construct
  source 1..9: note = Seed: LVVVGACGV (KRAS G12C)
FVVFGSCGM

SEQ ID NO: 563 - protein, 9 aa, synthetic construct
  source 1..9: note = Seed: LVVVGACGV (KRAS G12C)
FVVFGSCGN

SEQ ID NO: 564 - protein, 9 aa, synthetic construct
  source 1..9: note = Seed: LVVVGACGV (KRAS G12C)
FVVFGSCGR

SEQ ID NO: 565 - protein, 9 aa, synthetic construct
  source 1..9: note = Seed: LVVVGACGV (KRAS G12C)
FVVFGSCGS

SEQ ID NO: 566 - protein, 9 aa, synthetic construct
  source 1..9: note = Seed: LVVVGACGV (KRAS G12C)
FVVFGSCGT

SEQ ID NO: 567 - protein, 9 aa, synthetic construct
  source 1..9: note = Seed: LVVVGACGV (KRAS G12C)
FVVFGSCGV

SEQ ID NO: 568 - protein, 9 aa, synthetic construct
  source 1..9: note = Seed: LVVVGACGV (KRAS G12C)
FVVFGTCGA

SEQ ID NO: 569 - protein, 9 aa, synthetic construct
  source 1..9: note = Seed: LVVVGACGV (KRAS G12C)
FVVFGTCGH

SEQ ID NO: 570 - protein, 9 aa, synthetic construct
  source 1..9: note = Seed: LVVVGACGV (KRAS G12C)
FVVFGTCGI

SEQ ID NO: 571 - protein, 9 aa, synthetic construct
  source 1..9: note = Seed: LVVVGACGV (KRAS G12C)
FVVFGTCGL

SEQ ID NO: 572 - protein, 9 aa, synthetic construct
  source 1..9: note = Seed: LVVVGACGV (KRAS G12C)
FVVFGTCGM

SEQ ID NO: 573 - protein, 9 aa, synthetic construct
  source 1..9: note = Seed: LVVVGACGV (KRAS G12C)
FVVFGTCGN

SEQ ID NO: 574 - protein, 9 aa, synthetic construct
  source 1..9: note = Seed: LVVVGACGV (KRAS G12C)
FVVFGTCGS

SEQ ID NO: 575 - protein, 9 aa, synthetic construct
  source 1..9: note = Seed: LVVVGACGV (KRAS G12C)
FVVFGTCGT

SEQ ID NO: 576 - protein, 9 aa, synthetic construct
  source 1..9: note = Seed: LVVVGACGV (KRAS G12C)
FVVFGTCGV

SEQ ID NO: 577 - protein, 9 aa, synthetic construct
  source 1..9: note = Seed: LVVVGACGV (KRAS G12C)
FVVFGVCGN

SEQ ID NO: 578 - protein, 9 aa, synthetic construct
  source 1..9: note = Seed: LVVVGACGV (KRAS G12C)
FVVGGACGA

SEQ ID NO: 579 - protein, 9 aa, synthetic construct
  source 1..9: note = Seed: LVVVGACGV (KRAS G12C)
FVVGGACGI

SEQ ID NO: 580 - protein, 9 aa, synthetic construct
  source 1..9: note = Seed: LVVVGACGV (KRAS G12C)
FVVGGACGL

SEQ ID NO: 581 - protein, 9 aa, synthetic construct
  source 1..9: note = Seed: LVVVGACGV (KRAS G12C)
FVVGGACGM

SEQ ID NO: 582 - protein, 9 aa, synthetic construct
  source 1..9: note = Seed: LVVVGACGV (KRAS G12C)
FVVGGACGS

SEQ ID NO: 583 - protein, 9 aa, synthetic construct
  source 1..9: note = Seed: LVVVGACGV (KRAS G12C)
FVVGGACGT

SEQ ID NO: 584 - protein, 9 aa, synthetic construct
  source 1..9: note = Seed: LVVVGACGV (KRAS G12C)
FVVGGACGV

SEQ ID NO: 585 - protein, 9 aa, synthetic construct
  source 1..9: note = Seed: LVVVGACGV (KRAS G12C)
FVVGGGCGA

SEQ ID NO: 586 - protein, 9 aa, synthetic construct
  source 1..9: note = Seed: LVVVGACGV (KRAS G12C)
FVVGGGCGI

SEQ ID NO: 587 - protein, 9 aa, synthetic construct
  source 1..9: note = Seed: LVVVGACGV (KRAS G12C)
FVVGGGCGL

SEQ ID NO: 588 - protein, 9 aa, synthetic construct
  source 1..9: note = Seed: LVVVGACGV (KRAS G12C)
FVVGGGCGM

SEQ ID NO: 589 - protein, 9 aa, synthetic construct
  source 1..9: note = Seed: LVVVGACGV (KRAS G12C)
FVVGGGCGV

SEQ ID NO: 590 - protein, 9 aa, synthetic construct
  source 1..9: note = Seed: LVVVGACGV (KRAS G12C)
FVVGGNCGI

SEQ ID NO: 591 - protein, 9 aa, synthetic construct
  source 1..9: note = Seed: LVVVGACGV (KRAS G12C)
FVVGGNCGL

SEQ ID NO: 592 - protein, 9 aa, synthetic construct
  source 1..9: note = Seed: LVVVGACGV (KRAS G12C)
FVVGGNCGV

SEQ ID NO: 593 - protein, 9 aa, synthetic construct
  source 1..9: note = Seed: LVVVGACGV (KRAS G12C)
FVVGGPCGI

SEQ ID NO: 594 - protein, 9 aa, synthetic construct
  source 1..9: note = Seed: LVVVGACGV (KRAS G12C)
FVVGGPCGL

SEQ ID NO: 595 - protein, 9 aa, synthetic construct
  source 1..9: note = Seed: LVVVGACGV (KRAS G12C)
FVVGGPCGM

SEQ ID NO: 596 - protein, 9 aa, synthetic construct
  source 1..9: note = Seed: LVVVGACGV (KRAS G12C)
FVVGGPCGV

SEQ ID NO: 597 - protein, 9 aa, synthetic construct
  source 1..9: note = Seed: LVVVGACGV (KRAS G12C)
FVVGGSCGA

SEQ ID NO: 598 - protein, 9 aa, synthetic construct
  source 1..9: note = Seed: LVVVGACGV (KRAS G12C)
FVVGGSCGI

SEQ ID NO: 599 - protein, 9 aa, synthetic construct
  source 1..9: note = Seed: LVVVGACGV (KRAS G12C)
FVVGGSCGL

SEQ ID NO: 600 - protein, 9 aa, synthetic construct
  source 1..9: note = Seed: LVVVGACGV (KRAS G12C)
FVVGGSCGM

SEQ ID NO: 601 - protein, 9 aa, synthetic construct
  source 1..9: note = Seed: LVVVGACGV (KRAS G12C)
FVVGGSCGV

SEQ ID NO: 602 - protein, 9 aa, synthetic construct
  source 1..9: note = Seed: LVVVGACGV (KRAS G12C)
FVVGGTCGI

SEQ ID NO: 603 - protein, 9 aa, synthetic construct
  source 1..9: note = Seed: LVVVGACGV (KRAS G12C)
FVVGGTCGL

SEQ ID NO: 604 - protein, 9 aa, synthetic construct
  source 1..9: note = Seed: LVVVGACGV (KRAS G12C)
FVVGGTCGV

SEQ ID NO: 605 - protein, 9 aa, synthetic construct
  source 1..9: note = Seed: LVVVGACGV (KRAS G12C)
FVVGGVCGL

SEQ ID NO: 606 - protein, 9 aa, synthetic construct
  source 1..9: note = Seed: LVVVGACGV (KRAS G12C)
FVVGGVCGV

SEQ ID NO: 607 - protein, 9 aa, synthetic construct
  source 1..9: note = Seed: LVVVGACGV (KRAS G12C)
FVVHGACGA

SEQ ID NO: 608 - protein, 9 aa, synthetic construct
  source 1..9: note = Seed: LVVVGACGV (KRAS G12C)
FVVHGACGF

SEQ ID NO: 609 - protein, 9 aa, synthetic construct
  source 1..9: note = Seed: LVVVGACGV (KRAS G12C)
FVVHGACGI

SEQ ID NO: 610 - protein, 9 aa, synthetic construct
  source 1..9: note = Seed: LVVVGACGV (KRAS G12C)
FVVHGACGL

SEQ ID NO: 611 - protein, 9 aa, synthetic construct
  source 1..9: note = Seed: LVVVGACGV (KRAS G12C)
FVVHGACGM

SEQ ID NO: 612 - protein, 9 aa, synthetic construct
  source 1..9: note = Seed: LVVVGACGV (KRAS G12C)
FVVHGACGS

SEQ ID NO: 613 - protein, 9 aa, synthetic construct
  source 1..9: note = Seed: LVVVGACGV (KRAS G12C)
FVVHGACGT

SEQ ID NO: 614 - protein, 9 aa, synthetic construct
  source 1..9: note = Seed: LVVVGACGV (KRAS G12C)
FVVHGACGV

SEQ ID NO: 615 - protein, 9 aa, synthetic construct
  source 1..9: note = Seed: LVVVGACGV (KRAS G12C)
FVVHGACGY

SEQ ID NO: 616 - protein, 9 aa, synthetic construct
  source 1..9: note = Seed: LVVVGACGV (KRAS G12C)
FVVHGGCGA

SEQ ID NO: 617 - protein, 9 aa, synthetic construct
  source 1..9: note = Seed: LVVVGACGV (KRAS G12C)
FVVHGGCGI

SEQ ID NO: 618 - protein, 9 aa, synthetic construct
  source 1..9: note = Seed: LVVVGACGV (KRAS G12C)
FVVHGGCGL

SEQ ID NO: 619 - protein, 9 aa, synthetic construct
  source 1..9: note = Seed: LVVVGACGV (KRAS G12C)
FVVHGGCGM

SEQ ID NO: 620 - protein, 9 aa, synthetic construct
  source 1..9: note = Seed: LVVVGACGV (KRAS G12C)
FVVHGGCGV

SEQ ID NO: 621 - protein, 9 aa, synthetic construct
  source 1..9: note = Seed: LVVVGACGV (KRAS G12C)
FVVHGNCGA

SEQ ID NO: 622 - protein, 9 aa, synthetic construct
  source 1..9: note = Seed: LVVVGACGV (KRAS G12C)
FVVHGNCGI

SEQ ID NO: 623 - protein, 9 aa, synthetic construct
  source 1..9: note = Seed: LVVVGACGV (KRAS G12C)
FVVHGNCGL

SEQ ID NO: 624 - protein, 9 aa, synthetic construct
  source 1..9: note = Seed: LVVVGACGV (KRAS G12C)
FVVHGNCGM

SEQ ID NO: 625 - protein, 9 aa, synthetic construct
  source 1..9: note = Seed: LVVVGACGV (KRAS G12C)
FVVHGNCGV

SEQ ID NO: 626 - protein, 9 aa, synthetic construct
  source 1..9: note = Seed: LVVVGACGV (KRAS G12C)
FVVHGPCGA

SEQ ID NO: 627 - protein, 9 aa, synthetic construct
  source 1..9: note = Seed: LVVVGACGV (KRAS G12C)
FVVHGPCGI

SEQ ID NO: 628 - protein, 9 aa, synthetic construct
  source 1..9: note = Seed: LVVVGACGV (KRAS G12C)
FVVHGPCGL

SEQ ID NO: 629 - protein, 9 aa, synthetic construct
  source 1..9: note = Seed: LVVVGACGV (KRAS G12C)
FVVHGPCGM

SEQ ID NO: 630 - protein, 9 aa, synthetic construct
  source 1..9: note = Seed: LVVVGACGV (KRAS G12C)
FVVHGPCGV

SEQ ID NO: 631 - protein, 9 aa, synthetic construct
  source 1..9: note = Seed: LVVVGACGV (KRAS G12C)
FVVHGSCGA

SEQ ID NO: 632 - protein, 9 aa, synthetic construct
  source 1..9: note = Seed: LVVVGACGV (KRAS G12C)
FVVHGSCGF

SEQ ID NO: 633 - protein, 9 aa, synthetic construct
  source 1..9: note = Seed: LVVVGACGV (KRAS G12C)
FVVHGSCGI

SEQ ID NO: 634 - protein, 9 aa, synthetic construct
  source 1..9: note = Seed: LVVVGACGV (KRAS G12C)
FVVHGSCGL

SEQ ID NO: 635 - protein, 9 aa, synthetic construct
  source 1..9: note = Seed: LVVVGACGV (KRAS G12C)
FVVHGSCGM

SEQ ID NO: 636 - protein, 9 aa, synthetic construct
  source 1..9: note = Seed: LVVVGACGV (KRAS G12C)
FVVHGSCGS

SEQ ID NO: 637 - protein, 9 aa, synthetic construct
  source 1..9: note = Seed: LVVVGACGV (KRAS G12C)
FVVHGSCGT

SEQ ID NO: 638 - protein, 9 aa, synthetic construct
  source 1..9: note = Seed: LVVVGACGV (KRAS G12C)
FVVHGSCGV

SEQ ID NO: 639 - protein, 9 aa, synthetic construct
  source 1..9: note = Seed: LVVVGACGV (KRAS G12C)
FVVHGTCGA

SEQ ID NO: 640 - protein, 9 aa, synthetic construct
  source 1..9: note = Seed: LVVVGACGV (KRAS G12C)
FVVHGTCGI

SEQ ID NO: 641 - protein, 9 aa, synthetic construct
  source 1..9: note = Seed: LVVVGACGV (KRAS G12C)
FVVHGTCGL

SEQ ID NO: 642 - protein, 9 aa, synthetic construct
  source 1..9: note = Seed: LVVVGACGV (KRAS G12C)
FVVHGTCGM

SEQ ID NO: 643 - protein, 9 aa, synthetic construct
  source 1..9: note = Seed: LVVVGACGV (KRAS G12C)
FVVHGTCGV

SEQ ID NO: 644 - protein, 9 aa, synthetic construct
  source 1..9: note = Seed: LVVVGACGV (KRAS G12C)
FVVHGVCGA

SEQ ID NO: 645 - protein, 9 aa, synthetic construct
  source 1..9: note = Seed: LVVVGACGV (KRAS G12C)
FVVHGVCGI

SEQ ID NO: 646 - protein, 9 aa, synthetic construct
  source 1..9: note = Seed: LVVVGACGV (KRAS G12C)
FVVHGVCGL

SEQ ID NO: 647 - protein, 9 aa, synthetic construct
  source 1..9: note = Seed: LVVVGACGV (KRAS G12C)
FVVHGVCGM

SEQ ID NO: 648 - protein, 9 aa, synthetic construct
  source 1..9: note = Seed: LVVVGACGV (KRAS G12C)
FVVHGVCGV

SEQ ID NO: 649 - protein, 9 aa, synthetic construct
  source 1..9: note = Seed: LVVVGACGV (KRAS G12C)
FVVIGACGC

SEQ ID NO: 650 - protein, 9 aa, synthetic construct
  source 1..9: note = Seed: LVVVGACGV (KRAS G12C)
FVVIGACGD

SEQ ID NO: 651 - protein, 9 aa, synthetic construct
  source 1..9: note = Seed: LVVVGACGV (KRAS G12C)
FVVIGACGE

SEQ ID NO: 652 - protein, 9 aa, synthetic construct
  source 1..9: note = Seed: LVVVGACGV (KRAS G12C)
FVVIGACGF

SEQ ID NO: 653 - protein, 9 aa, synthetic construct
  source 1..9: note = Seed: LVVVGACGV (KRAS G12C)
FVVIGACGG

SEQ ID NO: 654 - protein, 9 aa, synthetic construct
  source 1..9: note = Seed: LVVVGACGV (KRAS G12C)
FVVIGACGH

SEQ ID NO: 655 - protein, 9 aa, synthetic construct
  source 1..9: note = Seed: LVVVGACGV (KRAS G12C)
FVVIGACGK

SEQ ID NO: 656 - protein, 9 aa, synthetic construct
  source 1..9: note = Seed: LVVVGACGV (KRAS G12C)
FVVIGACGN

SEQ ID NO: 657 - protein, 9 aa, synthetic construct
  source 1..9: note = Seed: LVVVGACGV (KRAS G12C)
FVVIGACGP

SEQ ID NO: 658 - protein, 9 aa, synthetic construct
  source 1..9: note = Seed: LVVVGACGV (KRAS G12C)
FVVIGACGQ

SEQ ID NO: 659 - protein, 9 aa, synthetic construct
  source 1..9: note = Seed: LVVVGACGV (KRAS G12C)
FVVIGACGR

SEQ ID NO: 660 - protein, 9 aa, synthetic construct
  source 1..9: note = Seed: LVVVGACGV (KRAS G12C)
FVVIGACGS

SEQ ID NO: 661 - protein, 9 aa, synthetic construct
  source 1..9: note = Seed: LVVVGACGV (KRAS G12C)
FVVIGACGY

SEQ ID NO: 662 - protein, 9 aa, synthetic construct
  source 1..9: note = Seed: LVVVGACGV (KRAS G12C)
FVVIGDCGA

SEQ ID NO: 663 - protein, 9 aa, synthetic construct
  source 1..9: note = Seed: LVVVGACGV (KRAS G12C)
FVVIGDCGI

SEQ ID NO: 664 - protein, 9 aa, synthetic construct
  source 1..9: note = Seed: LVVVGACGV (KRAS G12C)
FVVIGDCGL

SEQ ID NO: 665 - protein, 9 aa, synthetic construct
  source 1..9: note = Seed: LVVVGACGV (KRAS G12C)
FVVIGDCGS

SEQ ID NO: 666 - protein, 9 aa, synthetic construct
  source 1..9: note = Seed: LVVVGACGV (KRAS G12C)
FVVIGDCGV

SEQ ID NO: 667 - protein, 9 aa, synthetic construct
  source 1..9: note = Seed: LVVVGACGV (KRAS G12C)
FVVIGECGA

SEQ ID NO: 668 - protein, 9 aa, synthetic construct
  source 1..9: note = Seed: LVVVGACGV (KRAS G12C)
FVVIGECGI

SEQ ID NO: 669 - protein, 9 aa, synthetic construct
  source 1..9: note = Seed: LVVVGACGV (KRAS G12C)
FVVIGECGL

SEQ ID NO: 670 - protein, 9 aa, synthetic construct
  source 1..9: note = Seed: LVVVGACGV (KRAS G12C)
FVVIGECGM

SEQ ID NO: 671 - protein, 9 aa, synthetic construct
  source 1..9: note = Seed: LVVVGACGV (KRAS G12C)
FVVIGECGV

SEQ ID NO: 672 - protein, 9 aa, synthetic construct
  source 1..9: note = Seed: LVVVGACGV (KRAS G12C)
FVVIGGCGC

SEQ ID NO: 673 - protein, 9 aa, synthetic construct
  source 1..9: note = Seed: LVVVGACGV (KRAS G12C)
FVVIGGCGD

SEQ ID NO: 674 - protein, 9 aa, synthetic construct
  source 1..9: note = Seed: LVVVGACGV (KRAS G12C)
FVVIGGCGE

SEQ ID NO: 675 - protein, 9 aa, synthetic construct
  source 1..9: note = Seed: LVVVGACGV (KRAS G12C)
FVVIGGCGF

SEQ ID NO: 676 - protein, 9 aa, synthetic construct
  source 1..9: note = Seed: LVVVGACGV (KRAS G12C)
FVVIGGCGG

SEQ ID NO: 677 - protein, 9 aa, synthetic construct
  source 1..9: note = Seed: LVVVGACGV (KRAS G12C)
FVVIGGCGH

SEQ ID NO: 678 - protein, 9 aa, synthetic construct
  source 1..9: note = Seed: LVVVGACGV (KRAS G12C)
FVVIGGCGK

SEQ ID NO: 679 - protein, 9 aa, synthetic construct
  source 1..9: note = Seed: LVVVGACGV (KRAS G12C)
FVVIGGCGN

SEQ ID NO: 680 - protein, 9 aa, synthetic construct
  source 1..9: note = Seed: LVVVGACGV (KRAS G12C)
FVVIGGCGP

SEQ ID NO: 681 - protein, 9 aa, synthetic construct
  source 1..9: note = Seed: LVVVGACGV (KRAS G12C)
FVVIGGCGQ

SEQ ID NO: 682 - protein, 9 aa, synthetic construct
  source 1..9: note = Seed: LVVVGACGV (KRAS G12C)
FVVIGGCGR

SEQ ID NO: 683 - protein, 9 aa, synthetic construct
  source 1..9: note = Seed: LVVVGACGV (KRAS G12C)
FVVIGGCGS

SEQ ID NO: 684 - protein, 9 aa, synthetic construct
  source 1..9: note = Seed: LVVVGACGV (KRAS G12C)
FVVIGGCGY

SEQ ID NO: 685 - protein, 9 aa, synthetic construct
  source 1..9: note = Seed: LVVVGACGV (KRAS G12C)
FVVIGHCGA

SEQ ID NO: 686 - protein, 9 aa, synthetic construct
  source 1..9: note = Seed: LVVVGACGV (KRAS G12C)
FVVIGHCGI

SEQ ID NO: 687 - protein, 9 aa, synthetic construct
  source 1..9: note = Seed: LVVVGACGV (KRAS G12C)
FVVIGHCGL

SEQ ID NO: 688 - protein, 9 aa, synthetic construct
  source 1..9: note = Seed: LVVVGACGV (KRAS G12C)
FVVIGHCGM

SEQ ID NO: 689 - protein, 9 aa, synthetic construct
  source 1..9: note = Seed: LVVVGACGV (KRAS G12C)
FVVIGHCGS

SEQ ID NO: 690 - protein, 9 aa, synthetic construct
  source 1..9: note = Seed: LVVVGACGV (KRAS G12C)
FVVIGHCGT

SEQ ID NO: 691 - protein, 9 aa, synthetic construct
  source 1..9: note = Seed: LVVVGACGV (KRAS G12C)
FVVIGHCGV

SEQ ID NO: 692 - protein, 9 aa, synthetic construct
  source 1..9: note = Seed: LVVVGACGV (KRAS G12C)
FVVIGICGA

SEQ ID NO: 693 - protein, 9 aa, synthetic construct
  source 1..9: note = Seed: LVVVGACGV (KRAS G12C)
FVVIGICGD

SEQ ID NO: 694 - protein, 9 aa, synthetic construct
  source 1..9: note = Seed: LVVVGACGV (KRAS G12C)
FVVIGICGE

SEQ ID NO: 695 - protein, 9 aa, synthetic construct
  source 1..9: note = Seed: LVVVGACGV (KRAS G12C)
FVVIGICGH

SEQ ID NO: 696 - protein, 9 aa, synthetic construct
  source 1..9: note = Seed: LVVVGACGV (KRAS G12C)
FVVIGICGN

SEQ ID NO: 697 - protein, 9 aa, synthetic construct
  source 1..9: note = Seed: LVVVGACGV (KRAS G12C)
FVVIGICGR

SEQ ID NO: 698 - protein, 9 aa, synthetic construct
  source 1..9: note = Seed: LVVVGACGV (KRAS G12C)
FVVIGICGS

SEQ ID NO: 699 - protein, 9 aa, synthetic construct
  source 1..9: note = Seed: LVVVGACGV (KRAS G12C)
FVVIGKCGA

SEQ ID NO: 700 - protein, 9 aa, synthetic construct
  source 1..9: note = Seed: LVVVGACGV (KRAS G12C)
FVVIGKCGH

SEQ ID NO: 701 - protein, 9 aa, synthetic construct
  source 1..9: note = Seed: LVVVGACGV (KRAS G12C)
FVVIGKCGK

SEQ ID NO: 702 - protein, 9 aa, synthetic construct
  source 1..9: note = Seed: LVVVGACGV (KRAS G12C)
FVVIGKCGM

SEQ ID NO: 703 - protein, 9 aa, synthetic construct
  source 1..9: note = Seed: LVVVGACGV (KRAS G12C)
FVVIGKCGQ

SEQ ID NO: 704 - protein, 9 aa, synthetic construct
  source 1..9: note = Seed: LVVVGACGV (KRAS G12C)
FVVIGKCGR

SEQ ID NO: 705 - protein, 9 aa, synthetic construct
  source 1..9: note = Seed: LVVVGACGV (KRAS G12C)
FVVIGKCGS

SEQ ID NO: 706 - protein, 9 aa, synthetic construct
  source 1..9: note = Seed: LVVVGACGV (KRAS G12C)
FVVIGKCGT

SEQ ID NO: 707 - protein, 9 aa, synthetic construct
  source 1..9: note = Seed: LVVVGACGV (KRAS G12C)
FVVIGKCGY

SEQ ID NO: 708 - protein, 9 aa, synthetic construct
  source 1..9: note = Seed: LVVVGACGV (KRAS G12C)
FVVIGLCGH

SEQ ID NO: 709 - protein, 9 aa, synthetic construct
  source 1..9: note = Seed: LVVVGACGV (KRAS G12C)
FVVIGLCGN

SEQ ID NO: 710 - protein, 9 aa, synthetic construct
  source 1..9: note = Seed: LVVVGACGV (KRAS G12C)
FVVIGLCGR

SEQ ID NO: 711 - protein, 9 aa, synthetic construct
  source 1..9: note = Seed: LVVVGACGV (KRAS G12C)
FVVIGMCGA

SEQ ID NO: 712 - protein, 9 aa, synthetic construct
  source 1..9: note = Seed: LVVVGACGV (KRAS G12C)
FVVIGMCGH

SEQ ID NO: 713 - protein, 9 aa, synthetic construct
  source 1..9: note = Seed: LVVVGACGV (KRAS G12C)
FVVIGMCGN

SEQ ID NO: 714 - protein, 9 aa, synthetic construct
  source 1..9: note = Seed: LVVVGACGV (KRAS G12C)
FVVIGMCGR

SEQ ID NO: 715 - protein, 9 aa, synthetic construct
  source 1..9: note = Seed: LVVVGACGV (KRAS G12C)
FVVIGNCGC

SEQ ID NO: 716 - protein, 9 aa, synthetic construct
  source 1..9: note = Seed: LVVVGACGV (KRAS G12C)
FVVIGNCGD

SEQ ID NO: 717 - protein, 9 aa, synthetic construct
  source 1..9: note = Seed: LVVVGACGV (KRAS G12C)
FVVIGNCGE

SEQ ID NO: 718 - protein, 9 aa, synthetic construct
  source 1..9: note = Seed: LVVVGACGV (KRAS G12C)
FVVIGNCGF

SEQ ID NO: 719 - protein, 9 aa, synthetic construct
  source 1..9: note = Seed: LVVVGACGV (KRAS G12C)
FVVIGNCGG

SEQ ID NO: 720 - protein, 9 aa, synthetic construct
  source 1..9: note = Seed: LVVVGACGV (KRAS G12C)
FVVIGNCGH

SEQ ID NO: 721 - protein, 9 aa, synthetic construct
  source 1..9: note = Seed: LVVVGACGV (KRAS G12C)
FVVIGNCGK

SEQ ID NO: 722 - protein, 9 aa, synthetic construct
  source 1..9: note = Seed: LVVVGACGV (KRAS G12C)
FVVIGNCGM

SEQ ID NO: 723 - protein, 9 aa, synthetic construct
  source 1..9: note = Seed: LVVVGACGV (KRAS G12C)
FVVIGNCGN

SEQ ID NO: 724 - protein, 9 aa, synthetic construct
  source 1..9: note = Seed: LVVVGACGV (KRAS G12C)
FVVIGNCGP

SEQ ID NO: 725 - protein, 9 aa, synthetic construct
  source 1..9: note = Seed: LVVVGACGV (KRAS G12C)
FVVIGNCGQ

SEQ ID NO: 726 - protein, 9 aa, synthetic construct
  source 1..9: note = Seed: LVVVGACGV (KRAS G12C)
FVVIGNCGR

SEQ ID NO: 727 - protein, 9 aa, synthetic construct
  source 1..9: note = Seed: LVVVGACGV (KRAS G12C)
FVVIGNCGS

SEQ ID NO: 728 - protein, 9 aa, synthetic construct
  source 1..9: note = Seed: LVVVGACGV (KRAS G12C)
FVVIGNCGT

SEQ ID NO: 729 - protein, 9 aa, synthetic construct
  source 1..9: note = Seed: LVVVGACGV (KRAS G12C)
FVVIGNCGY

SEQ ID NO: 730 - protein, 9 aa, synthetic construct
  source 1..9: note = Seed: LVVVGACGV (KRAS G12C)
FVVIGPCGC

SEQ ID NO: 731 - protein, 9 aa, synthetic construct
  source 1..9: note = Seed: LVVVGACGV (KRAS G12C)
FVVIGPCGD

SEQ ID NO: 732 - protein, 9 aa, synthetic construct
  source 1..9: note = Seed: LVVVGACGV (KRAS G12C)
FVVIGPCGE

SEQ ID NO: 733 - protein, 9 aa, synthetic construct
  source 1..9: note = Seed: LVVVGACGV (KRAS G12C)
FVVIGPCGF

SEQ ID NO: 734 - protein, 9 aa, synthetic construct
  source 1..9: note = Seed: LVVVGACGV (KRAS G12C)
FVVIGPCGG

SEQ ID NO: 735 - protein, 9 aa, synthetic construct
  source 1..9: note = Seed: LVVVGACGV (KRAS G12C)
FVVIGPCGH

SEQ ID NO: 736 - protein, 9 aa, synthetic construct
  source 1..9: note = Seed: LVVVGACGV (KRAS G12C)
FVVIGPCGK

SEQ ID NO: 737 - protein, 9 aa, synthetic construct
  source 1..9: note = Seed: LVVVGACGV (KRAS G12C)
FVVIGPCGN

SEQ ID NO: 738 - protein, 9 aa, synthetic construct
  source 1..9: note = Seed: LVVVGACGV (KRAS G12C)
FVVIGPCGP

SEQ ID NO: 739 - protein, 9 aa, synthetic construct
  source 1..9: note = Seed: LVVVGACGV (KRAS G12C)
FVVIGPCGQ

SEQ ID NO: 740 - protein, 9 aa, synthetic construct
  source 1..9: note = Seed: LVVVGACGV (KRAS G12C)
FVVIGPCGR

SEQ ID NO: 741 - protein, 9 aa, synthetic construct
  source 1..9: note = Seed: LVVVGACGV (KRAS G12C)
FVVIGPCGS

SEQ ID NO: 742 - protein, 9 aa, synthetic construct
  source 1..9: note = Seed: LVVVGACGV (KRAS G12C)
FVVIGPCGT

SEQ ID NO: 743 - protein, 9 aa, synthetic construct
  source 1..9: note = Seed: LVVVGACGV (KRAS G12C)
FVVIGPCGW

SEQ ID NO: 744 - protein, 9 aa, synthetic construct
  source 1..9: note = Seed: LVVVGACGV (KRAS G12C)
FVVIGPCGY

SEQ ID NO: 745 - protein, 9 aa, synthetic construct
  source 1..9: note = Seed: LVVVGACGV (KRAS G12C)
FVVIGQCGA

SEQ ID NO: 746 - protein, 9 aa, synthetic construct
  source 1..9: note = Seed: LVVVGACGV (KRAS G12C)
FVVIGQCGI

SEQ ID NO: 747 - protein, 9 aa, synthetic construct
  source 1..9: note = Seed: LVVVGACGV (KRAS G12C)
FVVIGQCGL

SEQ ID NO: 748 - protein, 9 aa, synthetic construct
  source 1..9: note = Seed: LVVVGACGV (KRAS G12C)
FVVIGQCGM

SEQ ID NO: 749 - protein, 9 aa, synthetic construct
  source 1..9: note = Seed: LVVVGACGV (KRAS G12C)
FVVIGQCGS

SEQ ID NO: 750 - protein, 9 aa, synthetic construct
  source 1..9: note = Seed: LVVVGACGV (KRAS G12C)
FVVIGQCGV

SEQ ID NO: 751 - protein, 9 aa, synthetic construct
  source 1..9: note = Seed: LVVVGACGV (KRAS G12C)
FVVIGRCGA

SEQ ID NO: 752 - protein, 9 aa, synthetic construct
  source 1..9: note = Seed: LVVVGACGV (KRAS G12C)
FVVIGRCGG

SEQ ID NO: 753 - protein, 9 aa, synthetic construct
  source 1..9: note = Seed: LVVVGACGV (KRAS G12C)
FVVIGRCGH

SEQ ID NO: 754 - protein, 9 aa, synthetic construct
  source 1..9: note = Seed: LVVVGACGV (KRAS G12C)
FVVIGRCGK

SEQ ID NO: 755 - protein, 9 aa, synthetic construct
  source 1..9: note = Seed: LVVVGACGV (KRAS G12C)
FVVIGRCGM

SEQ ID NO: 756 - protein, 9 aa, synthetic construct
  source 1..9: note = Seed: LVVVGACGV (KRAS G12C)
FVVIGRCGN

SEQ ID NO: 757 - protein, 9 aa, synthetic construct
  source 1..9: note = Seed: LVVVGACGV (KRAS G12C)
FVVIGRCGQ

SEQ ID NO: 758 - protein, 9 aa, synthetic construct
  source 1..9: note = Seed: LVVVGACGV (KRAS G12C)
FVVIGRCGR

SEQ ID NO: 759 - protein, 9 aa, synthetic construct
  source 1..9: note = Seed: LVVVGACGV (KRAS G12C)
FVVIGRCGS

SEQ ID NO: 760 - protein, 9 aa, synthetic construct
  source 1..9: note = Seed: LVVVGACGV (KRAS G12C)
FVVIGRCGT

SEQ ID NO: 761 - protein, 9 aa, synthetic construct
  source 1..9: note = Seed: LVVVGACGV (KRAS G12C)
FVVIGRCGY

SEQ ID NO: 762 - protein, 9 aa, synthetic construct
  source 1..9: note = Seed: LVVVGACGV (KRAS G12C)
FVVIGSCGC

SEQ ID NO: 763 - protein, 9 aa, synthetic construct
  source 1..9: note = Seed: LVVVGACGV (KRAS G12C)
FVVIGSCGD

SEQ ID NO: 764 - protein, 9 aa, synthetic construct
  source 1..9: note = Seed: LVVVGACGV (KRAS G12C)
FVVIGSCGE

SEQ ID NO: 765 - protein, 9 aa, synthetic construct
  source 1..9: note = Seed: LVVVGACGV (KRAS G12C)
FVVIGSCGF

SEQ ID NO: 766 - protein, 9 aa, synthetic construct
  source 1..9: note = Seed: LVVVGACGV (KRAS G12C)
FVVIGSCGG

SEQ ID NO: 767 - protein, 9 aa, synthetic construct
  source 1..9: note = Seed: LVVVGACGV (KRAS G12C)
FVVIGSCGH

SEQ ID NO: 768 - protein, 9 aa, synthetic construct
  source 1..9: note = Seed: LVVVGACGV (KRAS G12C)
FVVIGSCGK

SEQ ID NO: 769 - protein, 9 aa, synthetic construct
  source 1..9: note = Seed: LVVVGACGV (KRAS G12C)
FVVIGSCGM

SEQ ID NO: 770 - protein, 9 aa, synthetic construct
  source 1..9: note = Seed: LVVVGACGV (KRAS G12C)
FVVIGSCGN

SEQ ID NO: 771 - protein, 9 aa, synthetic construct
  source 1..9: note = Seed: LVVVGACGV (KRAS G12C)
FVVIGSCGP

SEQ ID NO: 772 - protein, 9 aa, synthetic construct
  source 1..9: note = Seed: LVVVGACGV (KRAS G12C)
FVVIGSCGQ

SEQ ID NO: 773 - protein, 9 aa, synthetic construct
  source 1..9: note = Seed: LVVVGACGV (KRAS G12C)
FVVIGSCGR

SEQ ID NO: 774 - protein, 9 aa, synthetic construct
  source 1..9: note = Seed: LVVVGACGV (KRAS G12C)
FVVIGSCGS

SEQ ID NO: 775 - protein, 9 aa, synthetic construct
  source 1..9: note = Seed: LVVVGACGV (KRAS G12C)
FVVIGSCGY

SEQ ID NO: 776 - protein, 9 aa, synthetic construct
  source 1..9: note = Seed: LVVVGACGV (KRAS G12C)
FVVIGTCGA

SEQ ID NO: 777 - protein, 9 aa, synthetic construct
  source 1..9: note = Seed: LVVVGACGV (KRAS G12C)
FVVIGTCGD

SEQ ID NO: 778 - protein, 9 aa, synthetic construct
  source 1..9: note = Seed: LVVVGACGV (KRAS G12C)
FVVIGTCGE

SEQ ID NO: 779 - protein, 9 aa, synthetic construct
  source 1..9: note = Seed: LVVVGACGV (KRAS G12C)
FVVIGTCGF

SEQ ID NO: 780 - protein, 9 aa, synthetic construct
  source 1..9: note = Seed: LVVVGACGV (KRAS G12C)
FVVIGTCGG

SEQ ID NO: 781 - protein, 9 aa, synthetic construct
  source 1..9: note = Seed: LVVVGACGV (KRAS G12C)
FVVIGTCGH

SEQ ID NO: 782 - protein, 9 aa, synthetic construct
  source 1..9: note = Seed: LVVVGACGV (KRAS G12C)
FVVIGTCGI

SEQ ID NO: 783 - protein, 9 aa, synthetic construct
  source 1..9: note = Seed: LVVVGACGV (KRAS G12C)
FVVIGTCGK

SEQ ID NO: 784 - protein, 9 aa, synthetic construct
  source 1..9: note = Seed: LVVVGACGV (KRAS G12C)
FVVIGTCGL

SEQ ID NO: 785 - protein, 9 aa, synthetic construct
  source 1..9: note = Seed: LVVVGACGV (KRAS G12C)
FVVIGTCGM

SEQ ID NO: 786 - protein, 9 aa, synthetic construct
  source 1..9: note = Seed: LVVVGACGV (KRAS G12C)
FVVIGTCGN

SEQ ID NO: 787 - protein, 9 aa, synthetic construct
  source 1..9: note = Seed: LVVVGACGV (KRAS G12C)
FVVIGTCGP

SEQ ID NO: 788 - protein, 9 aa, synthetic construct
  source 1..9: note = Seed: LVVVGACGV (KRAS G12C)
FVVIGTCGQ

SEQ ID NO: 789 - protein, 9 aa, synthetic construct
  source 1..9: note = Seed: LVVVGACGV (KRAS G12C)
FVVIGTCGR

SEQ ID NO: 790 - protein, 9 aa, synthetic construct
  source 1..9: note = Seed: LVVVGACGV (KRAS G12C)
FVVIGTCGS

SEQ ID NO: 791 - protein, 9 aa, synthetic construct
  source 1..9: note = Seed: LVVVGACGV (KRAS G12C)
FVVIGTCGT

SEQ ID NO: 792 - protein, 9 aa, synthetic construct
  source 1..9: note = Seed: LVVVGACGV (KRAS G12C)
FVVIGTCGV

SEQ ID NO: 793 - protein, 9 aa, synthetic construct
  source 1..9: note = Seed: LVVVGACGV (KRAS G12C)
FVVIGTCGY

SEQ ID NO: 794 - protein, 9 aa, synthetic construct
  source 1..9: note = Seed: LVVVGACGV (KRAS G12C)
FVVIGVCGA

SEQ ID NO: 795 - protein, 9 aa, synthetic construct
  source 1..9: note = Seed: LVVVGACGV (KRAS G12C)
FVVIGVCGD

SEQ ID NO: 796 - protein, 9 aa, synthetic construct
  source 1..9: note = Seed: LVVVGACGV (KRAS G12C)
FVVIGVCGE

SEQ ID NO: 797 - protein, 9 aa, synthetic construct
  source 1..9: note = Seed: LVVVGACGV (KRAS G12C)
FVVIGVCGH

SEQ ID NO: 798 - protein, 9 aa, synthetic construct
  source 1..9: note = Seed: LVVVGACGV (KRAS G12C)
FVVIGVCGI

SEQ ID NO: 799 - protein, 9 aa, synthetic construct
  source 1..9: note = Seed: LVVVGACGV (KRAS G12C)
FVVIGVCGL

SEQ ID NO: 800 - protein, 9 aa, synthetic construct
  source 1..9: note = Seed: LVVVGACGV (KRAS G12C)
FVVIGVCGM

SEQ ID NO: 801 - protein, 9 aa, synthetic construct
  source 1..9: note = Seed: LVVVGACGV (KRAS G12C)
FVVIGVCGN

SEQ ID NO: 802 - protein, 9 aa, synthetic construct
  source 1..9: note = Seed: LVVVGACGV (KRAS G12C)
FVVIGVCGP

SEQ ID NO: 803 - protein, 9 aa, synthetic construct
  source 1..9: note = Seed: LVVVGACGV (KRAS G12C)
FVVIGVCGQ

SEQ ID NO: 804 - protein, 9 aa, synthetic construct
  source 1..9: note = Seed: LVVVGACGV (KRAS G12C)
FVVIGVCGS

SEQ ID NO: 805 - protein, 9 aa, synthetic construct
  source 1..9: note = Seed: LVVVGACGV (KRAS G12C)
FVVIGVCGT

SEQ ID NO: 806 - protein, 9 aa, synthetic construct
  source 1..9: note = Seed: LVVVGACGV (KRAS G12C)
FVVIGVCGV

SEQ ID NO: 807 - protein, 9 aa, synthetic construct
  source 1..9: note = Seed: LVVVGACGV (KRAS G12C)
FVVKGACGA

SEQ ID NO: 808 - protein, 9 aa, synthetic construct
  source 1..9: note = Seed: LVVVGACGV (KRAS G12C)
FVVKGACGI

SEQ ID NO: 809 - protein, 9 aa, synthetic construct
  source 1..9: note = Seed: LVVVGACGV (KRAS G12C)
FVVKGACGL

SEQ ID NO: 810 - protein, 9 aa, synthetic construct
  source 1..9: note = Seed: LVVVGACGV (KRAS G12C)
FVVKGACGM

SEQ ID NO: 811 - protein, 9 aa, synthetic construct
  source 1..9: note = Seed: LVVVGACGV (KRAS G12C)
FVVKGACGV

SEQ ID NO: 812 - protein, 9 aa, synthetic construct
  source 1..9: note = Seed: LVVVGACGV (KRAS G12C)
FVVKGGCGI

SEQ ID NO: 813 - protein, 9 aa, synthetic construct
  source 1..9: note = Seed: LVVVGACGV (KRAS G12C)
FVVKGGCGL

SEQ ID NO: 814 - protein, 9 aa, synthetic construct
  source 1..9: note = Seed: LVVVGACGV (KRAS G12C)
FVVKGGCGV

SEQ ID NO: 815 - protein, 9 aa, synthetic construct
  source 1..9: note = Seed: LVVVGACGV (KRAS G12C)
FVVKGNCGI

SEQ ID NO: 816 - protein, 9 aa, synthetic construct
  source 1..9: note = Seed: LVVVGACGV (KRAS G12C)
FVVKGNCGL

SEQ ID NO: 817 - protein, 9 aa, synthetic construct
  source 1..9: note = Seed: LVVVGACGV (KRAS G12C)
FVVKGNCGV

SEQ ID NO: 818 - protein, 9 aa, synthetic construct
  source 1..9: note = Seed: LVVVGACGV (KRAS G12C)
FVVKGPCGL

SEQ ID NO: 819 - protein, 9 aa, synthetic construct
  source 1..9: note = Seed: LVVVGACGV (KRAS G12C)
FVVKGSCGI

SEQ ID NO: 820 - protein, 9 aa, synthetic construct
  source 1..9: note = Seed: LVVVGACGV (KRAS G12C)
FVVKGSCGL

SEQ ID NO: 821 - protein, 9 aa, synthetic construct
  source 1..9: note = Seed: LVVVGACGV (KRAS G12C)
FVVKGSCGM

SEQ ID NO: 822 - protein, 9 aa, synthetic construct
  source 1..9: note = Seed: LVVVGACGV (KRAS G12C)
FVVKGSCGV

SEQ ID NO: 823 - protein, 9 aa, synthetic construct
  source 1..9: note = Seed: LVVVGACGV (KRAS G12C)
FVVKGTCGL

SEQ ID NO: 824 - protein, 9 aa, synthetic construct
  source 1..9: note = Seed: LVVVGACGV (KRAS G12C)
FVVLGACGC

SEQ ID NO: 825 - protein, 9 aa, synthetic construct
  source 1..9: note = Seed: LVVVGACGV (KRAS G12C)
FVVLGACGD

SEQ ID NO: 826 - protein, 9 aa, synthetic construct
  source 1..9: note = Seed: LVVVGACGV (KRAS G12C)
FVVLGACGE

SEQ ID NO: 827 - protein, 9 aa, synthetic construct
  source 1..9: note = Seed: LVVVGACGV (KRAS G12C)
FVVLGACGF

SEQ ID NO: 828 - protein, 9 aa, synthetic construct
  source 1..9: note = Seed: LVVVGACGV (KRAS G12C)
FVVLGACGG

SEQ ID NO: 829 - protein, 9 aa, synthetic construct
  source 1..9: note = Seed: LVVVGACGV (KRAS G12C)
FVVLGACGH

SEQ ID NO: 830 - protein, 9 aa, synthetic construct
  source 1..9: note = Seed: LVVVGACGV (KRAS G12C)
FVVLGACGK

SEQ ID NO: 831 - protein, 9 aa, synthetic construct
  source 1..9: note = Seed: LVVVGACGV (KRAS G12C)
FVVLGACGN

SEQ ID NO: 832 - protein, 9 aa, synthetic construct
  source 1..9: note = Seed: LVVVGACGV (KRAS G12C)
FVVLGACGP

SEQ ID NO: 833 - protein, 9 aa, synthetic construct
  source 1..9: note = Seed: LVVVGACGV (KRAS G12C)
FVVLGACGQ

SEQ ID NO: 834 - protein, 9 aa, synthetic construct
  source 1..9: note = Seed: LVVVGACGV (KRAS G12C)
FVVLGACGR

SEQ ID NO: 835 - protein, 9 aa, synthetic construct
  source 1..9: note = Seed: LVVVGACGV (KRAS G12C)
FVVLGACGY

SEQ ID NO: 836 - protein, 9 aa, synthetic construct
  source 1..9: note = Seed: LVVVGACGV (KRAS G12C)
FVVLGDCGA

SEQ ID NO: 837 - protein, 9 aa, synthetic construct
  source 1..9: note = Seed: LVVVGACGV (KRAS G12C)
FVVLGDCGI

SEQ ID NO: 838 - protein, 9 aa, synthetic construct
  source 1..9: note = Seed: LVVVGACGV (KRAS G12C)
FVVLGDCGL

SEQ ID NO: 839 - protein, 9 aa, synthetic construct
  source 1..9: note = Seed: LVVVGACGV (KRAS G12C)
FVVLGDCGM

SEQ ID NO: 840 - protein, 9 aa, synthetic construct
  source 1..9: note = Seed: LVVVGACGV (KRAS G12C)
FVVLGDCGS

SEQ ID NO: 841 - protein, 9 aa, synthetic construct
  source 1..9: note = Seed: LVVVGACGV (KRAS G12C)
FVVLGDCGT

SEQ ID NO: 842 - protein, 9 aa, synthetic construct
  source 1..9: note = Seed: LVVVGACGV (KRAS G12C)
FVVLGDCGV

SEQ ID NO: 843 - protein, 9 aa, synthetic construct
  source 1..9: note = Seed: LVVVGACGV (KRAS G12C)
FVVLGECGA

SEQ ID NO: 844 - protein, 9 aa, synthetic construct
  source 1..9: note = Seed: LVVVGACGV (KRAS G12C)
FVVLGECGI

SEQ ID NO: 845 - protein, 9 aa, synthetic construct
  source 1..9: note = Seed: LVVVGACGV (KRAS G12C)
FVVLGECGL

SEQ ID NO: 846 - protein, 9 aa, synthetic construct
  source 1..9: note = Seed: LVVVGACGV (KRAS G12C)
FVVLGECGM

SEQ ID NO: 847 - protein, 9 aa, synthetic construct
  source 1..9: note = Seed: LVVVGACGV (KRAS G12C)
FVVLGECGS

SEQ ID NO: 848 - protein, 9 aa, synthetic construct
  source 1..9: note = Seed: LVVVGACGV (KRAS G12C)
FVVLGECGT

SEQ ID NO: 849 - protein, 9 aa, synthetic construct
  source 1..9: note = Seed: LVVVGACGV (KRAS G12C)
FVVLGECGV

SEQ ID NO: 850 - protein, 9 aa, synthetic construct
  source 1..9: note = Seed: LVVVGACGV (KRAS G12C)
FVVLGGCGC

SEQ ID NO: 851 - protein, 9 aa, synthetic construct
  source 1..9: note = Seed: LVVVGACGV (KRAS G12C)
FVVLGGCGD

SEQ ID NO: 852 - protein, 9 aa, synthetic construct
  source 1..9: note = Seed: LVVVGACGV (KRAS G12C)
FVVLGGCGE

SEQ ID NO: 853 - protein, 9 aa, synthetic construct
  source 1..9: note = Seed: LVVVGACGV (KRAS G12C)
FVVLGGCGF

SEQ ID NO: 854 - protein, 9 aa, synthetic construct
  source 1..9: note = Seed: LVVVGACGV (KRAS G12C)
FVVLGGCGG

SEQ ID NO: 855 - protein, 9 aa, synthetic construct
  source 1..9: note = Seed: LVVVGACGV (KRAS G12C)
FVVLGGCGH

SEQ ID NO: 856 - protein, 9 aa, synthetic construct
  source 1..9: note = Seed: LVVVGACGV (KRAS G12C)
FVVLGGCGK

SEQ ID NO: 857 - protein, 9 aa, synthetic construct
  source 1..9: note = Seed: LVVVGACGV (KRAS G12C)
FVVLGGCGN

SEQ ID NO: 858 - protein, 9 aa, synthetic construct
  source 1..9: note = Seed: LVVVGACGV (KRAS G12C)
FVVLGGCGP

SEQ ID NO: 859 - protein, 9 aa, synthetic construct
  source 1..9: note = Seed: LVVVGACGV (KRAS G12C)
FVVLGGCGQ

SEQ ID NO: 860 - protein, 9 aa, synthetic construct
  source 1..9: note = Seed: LVVVGACGV (KRAS G12C)
FVVLGGCGR

SEQ ID NO: 861 - protein, 9 aa, synthetic construct
  source 1..9: note = Seed: LVVVGACGV (KRAS G12C)
FVVLGGCGY

SEQ ID NO: 862 - protein, 9 aa, synthetic construct
  source 1..9: note = Seed: LVVVGACGV (KRAS G12C)
FVVLGHCGA

SEQ ID NO: 863 - protein, 9 aa, synthetic construct
  source 1..9: note = Seed: LVVVGACGV (KRAS G12C)
FVVLGHCGI

SEQ ID NO: 864 - protein, 9 aa, synthetic construct
  source 1..9: note = Seed: LVVVGACGV (KRAS G12C)
FVVLGHCGL

SEQ ID NO: 865 - protein, 9 aa, synthetic construct
  source 1..9: note = Seed: LVVVGACGV (KRAS G12C)
FVVLGHCGM

SEQ ID NO: 866 - protein, 9 aa, synthetic construct
  source 1..9: note = Seed: LVVVGACGV (KRAS G12C)
FVVLGHCGN

SEQ ID NO: 867 - protein, 9 aa, synthetic construct
  source 1..9: note = Seed: LVVVGACGV (KRAS G12C)
FVVLGHCGS

SEQ ID NO: 868 - protein, 9 aa, synthetic construct
  source 1..9: note = Seed: LVVVGACGV (KRAS G12C)
FVVLGHCGT

SEQ ID NO: 869 - protein, 9 aa, synthetic construct
  source 1..9: note = Seed: LVVVGACGV (KRAS G12C)
FVVLGHCGV

SEQ ID NO: 870 - protein, 9 aa, synthetic construct
  source 1..9: note = Seed: LVVVGACGV (KRAS G12C)
FVVLGICGA

SEQ ID NO: 871 - protein, 9 aa, synthetic construct
  source 1..9: note = Seed: LVVVGACGV (KRAS G12C)
FVVLGICGD

SEQ ID NO: 872 - protein, 9 aa, synthetic construct
  source 1..9: note = Seed: LVVVGACGV (KRAS G12C)
FVVLGICGE

SEQ ID NO: 873 - protein, 9 aa, synthetic construct
  source 1..9: note = Seed: LVVVGACGV (KRAS G12C)
FVVLGICGG

SEQ ID NO: 874 - protein, 9 aa, synthetic construct
  source 1..9: note = Seed: LVVVGACGV (KRAS G12C)
FVVLGICGH

SEQ ID NO: 875 - protein, 9 aa, synthetic construct
  source 1..9: note = Seed: LVVVGACGV (KRAS G12C)
FVVLGICGI

SEQ ID NO: 876 - protein, 9 aa, synthetic construct
  source 1..9: note = Seed: LVVVGACGV (KRAS G12C)
FVVLGICGL

SEQ ID NO: 877 - protein, 9 aa, synthetic construct
  source 1..9: note = Seed: LVVVGACGV (KRAS G12C)
FVVLGICGM

SEQ ID NO: 878 - protein, 9 aa, synthetic construct
  source 1..9: note = Seed: LVVVGACGV (KRAS G12C)
FVVLGICGN

SEQ ID NO: 879 - protein, 9 aa, synthetic construct
  source 1..9: note = Seed: LVVVGACGV (KRAS G12C)
FVVLGICGP

SEQ ID NO: 880 - protein, 9 aa, synthetic construct
  source 1..9: note = Seed: LVVVGACGV (KRAS G12C)
FVVLGICGQ

SEQ ID NO: 881 - protein, 9 aa, synthetic construct
  source 1..9: note = Seed: LVVVGACGV (KRAS G12C)
FVVLGICGR

SEQ ID NO: 882 - protein, 9 aa, synthetic construct
  source 1..9: note = Seed: LVVVGACGV (KRAS G12C)
FVVLGICGS

SEQ ID NO: 883 - protein, 9 aa, synthetic construct
  source 1..9: note = Seed: LVVVGACGV (KRAS G12C)
FVVLGICGT

SEQ ID NO: 884 - protein, 9 aa, synthetic construct
  source 1..9: note = Seed: LVVVGACGV (KRAS G12C)
FVVLGICGV

SEQ ID NO: 885 - protein, 9 aa, synthetic construct
  source 1..9: note = Seed: LVVVGACGV (KRAS G12C)
FVVLGKCGA

SEQ ID NO: 886 - protein, 9 aa, synthetic construct
  source 1..9: note = Seed: LVVVGACGV (KRAS G12C)
FVVLGKCGG

SEQ ID NO: 887 - protein, 9 aa, synthetic construct
  source 1..9: note = Seed: LVVVGACGV (KRAS G12C)
FVVLGKCGH

SEQ ID NO: 888 - protein, 9 aa, synthetic construct
  source 1..9: note = Seed: LVVVGACGV (KRAS G12C)
FVVLGKCGK

SEQ ID NO: 889 - protein, 9 aa, synthetic construct
  source 1..9: note = Seed: LVVVGACGV (KRAS G12C)
FVVLGKCGM

SEQ ID NO: 890 - protein, 9 aa, synthetic construct
  source 1..9: note = Seed: LVVVGACGV (KRAS G12C)
FVVLGKCGQ

SEQ ID NO: 891 - protein, 9 aa, synthetic construct
  source 1..9: note = Seed: LVVVGACGV (KRAS G12C)
FVVLGKCGR

SEQ ID NO: 892 - protein, 9 aa, synthetic construct
  source 1..9: note = Seed: LVVVGACGV (KRAS G12C)
FVVLGKCGS

SEQ ID NO: 893 - protein, 9 aa, synthetic construct
  source 1..9: note = Seed: LVVVGACGV (KRAS G12C)
FVVLGKCGT

SEQ ID NO: 894 - protein, 9 aa, synthetic construct
  source 1..9: note = Seed: LVVVGACGV (KRAS G12C)
FVVLGKCGY

SEQ ID NO: 895 - protein, 9 aa, synthetic construct
  source 1..9: note = Seed: LVVVGACGV (KRAS G12C)
FVVLGLCGA

SEQ ID NO: 896 - protein, 9 aa, synthetic construct
  source 1..9: note = Seed: LVVVGACGV (KRAS G12C)
FVVLGLCGH

SEQ ID NO: 897 - protein, 9 aa, synthetic construct
  source 1..9: note = Seed: LVVVGACGV (KRAS G12C)
FVVLGLCGN

SEQ ID NO: 898 - protein, 9 aa, synthetic construct
  source 1..9: note = Seed: LVVVGACGV (KRAS G12C)
FVVLGMCGA

SEQ ID NO: 899 - protein, 9 aa, synthetic construct
  source 1..9: note = Seed: LVVVGACGV (KRAS G12C)
FVVLGMCGH

SEQ ID NO: 900 - protein, 9 aa, synthetic construct
  source 1..9: note = Seed: LVVVGACGV (KRAS G12C)
FVVLGMCGL

SEQ ID NO: 901 - protein, 9 aa, synthetic construct
  source 1..9: note = Seed: LVVVGACGV (KRAS G12C)
FVVLGMCGN

SEQ ID NO: 902 - protein, 9 aa, synthetic construct
  source 1..9: note = Seed: LVVVGACGV (KRAS G12C)
FVVLGMCGV

SEQ ID NO: 903 - protein, 9 aa, synthetic construct
  source 1..9: note = Seed: LVVVGACGV (KRAS G12C)
FVVLGNCGC

SEQ ID NO: 904 - protein, 9 aa, synthetic construct
  source 1..9: note = Seed: LVVVGACGV (KRAS G12C)
FVVLGNCGD

SEQ ID NO: 905 - protein, 9 aa, synthetic construct
  source 1..9: note = Seed: LVVVGACGV (KRAS G12C)
FVVLGNCGE

SEQ ID NO: 906 - protein, 9 aa, synthetic construct
  source 1..9: note = Seed: LVVVGACGV (KRAS G12C)
FVVLGNCGF

SEQ ID NO: 907 - protein, 9 aa, synthetic construct
  source 1..9: note = Seed: LVVVGACGV (KRAS G12C)
FVVLGNCGG

SEQ ID NO: 908 - protein, 9 aa, synthetic construct
  source 1..9: note = Seed: LVVVGACGV (KRAS G12C)
FVVLGNCGH

SEQ ID NO: 909 - protein, 9 aa, synthetic construct
  source 1..9: note = Seed: LVVVGACGV (KRAS G12C)
FVVLGNCGK

SEQ ID NO: 910 - protein, 9 aa, synthetic construct
  source 1..9: note = Seed: LVVVGACGV (KRAS G12C)
FVVLGNCGN

SEQ ID NO: 911 - protein, 9 aa, synthetic construct
  source 1..9: note = Seed: LVVVGACGV (KRAS G12C)
FVVLGNCGP

SEQ ID NO: 912 - protein, 9 aa, synthetic construct
  source 1..9: note = Seed: LVVVGACGV (KRAS G12C)
FVVLGNCGQ

SEQ ID NO: 913 - protein, 9 aa, synthetic construct
  source 1..9: note = Seed: LVVVGACGV (KRAS G12C)
FVVLGNCGR

SEQ ID NO: 914 - protein, 9 aa, synthetic construct
  source 1..9: note = Seed: LVVVGACGV (KRAS G12C)
FVVLGNCGY

SEQ ID NO: 915 - protein, 9 aa, synthetic construct
  source 1..9: note = Seed: LVVVGACGV (KRAS G12C)
FVVLGPCGC

SEQ ID NO: 916 - protein, 9 aa, synthetic construct
  source 1..9: note = Seed: LVVVGACGV (KRAS G12C)
FVVLGPCGD

SEQ ID NO: 917 - protein, 9 aa, synthetic construct
  source 1..9: note = Seed: LVVVGACGV (KRAS G12C)
FVVLGPCGE

SEQ ID NO: 918 - protein, 9 aa, synthetic construct
  source 1..9: note = Seed: LVVVGACGV (KRAS G12C)
FVVLGPCGF

SEQ ID NO: 919 - protein, 9 aa, synthetic construct
  source 1..9: note = Seed: LVVVGACGV (KRAS G12C)
FVVLGPCGG

SEQ ID NO: 920 - protein, 9 aa, synthetic construct
  source 1..9: note = Seed: LVVVGACGV (KRAS G12C)
FVVLGPCGH

SEQ ID NO: 921 - protein, 9 aa, synthetic construct
  source 1..9: note = Seed: LVVVGACGV (KRAS G12C)
FVVLGPCGK

SEQ ID NO: 922 - protein, 9 aa, synthetic construct
  source 1..9: note = Seed: LVVVGACGV (KRAS G12C)
FVVLGPCGN

SEQ ID NO: 923 - protein, 9 aa, synthetic construct
  source 1..9: note = Seed: LVVVGACGV (KRAS G12C)
FVVLGPCGP

SEQ ID NO: 924 - protein, 9 aa, synthetic construct
  source 1..9: note = Seed: LVVVGACGV (KRAS G12C)
FVVLGPCGQ

SEQ ID NO: 925 - protein, 9 aa, synthetic construct
  source 1..9: note = Seed: LVVVGACGV (KRAS G12C)
FVVLGPCGR

SEQ ID NO: 926 - protein, 9 aa, synthetic construct
  source 1..9: note = Seed: LVVVGACGV (KRAS G12C)
FVVLGPCGW

SEQ ID NO: 927 - protein, 9 aa, synthetic construct
  source 1..9: note = Seed: LVVVGACGV (KRAS G12C)
FVVLGPCGY

SEQ ID NO: 928 - protein, 9 aa, synthetic construct
  source 1..9: note = Seed: LVVVGACGV (KRAS G12C)
FVVLGQCGA

SEQ ID NO: 929 - protein, 9 aa, synthetic construct
  source 1..9: note = Seed: LVVVGACGV (KRAS G12C)
FVVLGQCGI

SEQ ID NO: 930 - protein, 9 aa, synthetic construct
  source 1..9: note = Seed: LVVVGACGV (KRAS G12C)
FVVLGQCGL

SEQ ID NO: 931 - protein, 9 aa, synthetic construct
  source 1..9: note = Seed: LVVVGACGV (KRAS G12C)
FVVLGQCGM

SEQ ID NO: 932 - protein, 9 aa, synthetic construct
  source 1..9: note = Seed: LVVVGACGV (KRAS G12C)
FVVLGQCGN

SEQ ID NO: 933 - protein, 9 aa, synthetic construct
  source 1..9: note = Seed: LVVVGACGV (KRAS G12C)
FVVLGQCGS

SEQ ID NO: 934 - protein, 9 aa, synthetic construct
  source 1..9: note = Seed: LVVVGACGV (KRAS G12C)
FVVLGQCGT

SEQ ID NO: 935 - protein, 9 aa, synthetic construct
  source 1..9: note = Seed: LVVVGACGV (KRAS G12C)
FVVLGQCGV

SEQ ID NO: 936 - protein, 9 aa, synthetic construct
  source 1..9: note = Seed: LVVVGACGV (KRAS G12C)
FVVLGRCGA

SEQ ID NO: 937 - protein, 9 aa, synthetic construct
  source 1..9: note = Seed: LVVVGACGV (KRAS G12C)
FVVLGRCGG

SEQ ID NO: 938 - protein, 9 aa, synthetic construct
  source 1..9: note = Seed: LVVVGACGV (KRAS G12C)
FVVLGRCGH

SEQ ID NO: 939 - protein, 9 aa, synthetic construct
  source 1..9: note = Seed: LVVVGACGV (KRAS G12C)
FVVLGRCGK

SEQ ID NO: 940 - protein, 9 aa, synthetic construct
  source 1..9: note = Seed: LVVVGACGV (KRAS G12C)
FVVLGRCGM

SEQ ID NO: 941 - protein, 9 aa, synthetic construct
  source 1..9: note = Seed: LVVVGACGV (KRAS G12C)
FVVLGRCGN

SEQ ID NO: 942 - protein, 9 aa, synthetic construct
  source 1..9: note = Seed: LVVVGACGV (KRAS G12C)
FVVLGRCGQ

SEQ ID NO: 943 - protein, 9 aa, synthetic construct
  source 1..9: note = Seed: LVVVGACGV (KRAS G12C)
FVVLGRCGR

SEQ ID NO: 944 - protein, 9 aa, synthetic construct
  source 1..9: note = Seed: LVVVGACGV (KRAS G12C)
FVVLGRCGS

SEQ ID NO: 945 - protein, 9 aa, synthetic construct
  source 1..9: note = Seed: LVVVGACGV (KRAS G12C)
FVVLGRCGT

SEQ ID NO: 946 - protein, 9 aa, synthetic construct
  source 1..9: note = Seed: LVVVGACGV (KRAS G12C)
FVVLGRCGY

SEQ ID NO: 947 - protein, 9 aa, synthetic construct
  source 1..9: note = Seed: LVVVGACGV (KRAS G12C)
FVVLGSCGC

SEQ ID NO: 948 - protein, 9 aa, synthetic construct
  source 1..9: note = Seed: LVVVGACGV (KRAS G12C)
FVVLGSCGD

SEQ ID NO: 949 - protein, 9 aa, synthetic construct
  source 1..9: note = Seed: LVVVGACGV (KRAS G12C)
FVVLGSCGE

SEQ ID NO: 950 - protein, 9 aa, synthetic construct
  source 1..9: note = Seed: LVVVGACGV (KRAS G12C)
FVVLGSCGF

SEQ ID NO: 951 - protein, 9 aa, synthetic construct
  source 1..9: note = Seed: LVVVGACGV (KRAS G12C)
FVVLGSCGG

SEQ ID NO: 952 - protein, 9 aa, synthetic construct
  source 1..9: note = Seed: LVVVGACGV (KRAS G12C)
FVVLGSCGH

SEQ ID NO: 953 - protein, 9 aa, synthetic construct
  source 1..9: note = Seed: LVVVGACGV (KRAS G12C)
FVVLGSCGK

SEQ ID NO: 954 - protein, 9 aa, synthetic construct
  source 1..9: note = Seed: LVVVGACGV (KRAS G12C)
FVVLGSCGN

SEQ ID NO: 955 - protein, 9 aa, synthetic construct
  source 1..9: note = Seed: LVVVGACGV (KRAS G12C)
FVVLGSCGP

SEQ ID NO: 956 - protein, 9 aa, synthetic construct
  source 1..9: note = Seed: LVVVGACGV (KRAS G12C)
FVVLGSCGQ

SEQ ID NO: 957 - protein, 9 aa, synthetic construct
  source 1..9: note = Seed: LVVVGACGV (KRAS G12C)
FVVLGSCGR

SEQ ID NO: 958 - protein, 9 aa, synthetic construct
  source 1..9: note = Seed: LVVVGACGV (KRAS G12C)
FVVLGSCGY

SEQ ID NO: 959 - protein, 9 aa, synthetic construct
  source 1..9: note = Seed: LVVVGACGV (KRAS G12C)
FVVLGTCGC

SEQ ID NO: 960 - protein, 9 aa, synthetic construct
  source 1..9: note = Seed: LVVVGACGV (KRAS G12C)
FVVLGTCGD

SEQ ID NO: 961 - protein, 9 aa, synthetic construct
  source 1..9: note = Seed: LVVVGACGV (KRAS G12C)
FVVLGTCGE

SEQ ID NO: 962 - protein, 9 aa, synthetic construct
  source 1..9: note = Seed: LVVVGACGV (KRAS G12C)
FVVLGTCGF

SEQ ID NO: 963 - protein, 9 aa, synthetic construct
  source 1..9: note = Seed: LVVVGACGV (KRAS G12C)
FVVLGTCGG

SEQ ID NO: 964 - protein, 9 aa, synthetic construct
  source 1..9: note = Seed: LVVVGACGV (KRAS G12C)
FVVLGTCGH

SEQ ID NO: 965 - protein, 9 aa, synthetic construct
  source 1..9: note = Seed: LVVVGACGV (KRAS G12C)
FVVLGTCGK

SEQ ID NO: 966 - protein, 9 aa, synthetic construct
  source 1..9: note = Seed: LVVVGACGV (KRAS G12C)
FVVLGTCGM

SEQ ID NO: 967 - protein, 9 aa, synthetic construct
  source 1..9: note = Seed: LVVVGACGV (KRAS G12C)
FVVLGTCGN

SEQ ID NO: 968 - protein, 9 aa, synthetic construct
  source 1..9: note = Seed: LVVVGACGV (KRAS G12C)
FVVLGTCGP

SEQ ID NO: 969 - protein, 9 aa, synthetic construct
  source 1..9: note = Seed: LVVVGACGV (KRAS G12C)
FVVLGTCGQ

SEQ ID NO: 970 - protein, 9 aa, synthetic construct
  source 1..9: note = Seed: LVVVGACGV (KRAS G12C)
FVVLGTCGR

SEQ ID NO: 971 - protein, 9 aa, synthetic construct
  source 1..9: note = Seed: LVVVGACGV (KRAS G12C)
FVVLGTCGS

SEQ ID NO: 972 - protein, 9 aa, synthetic construct
  source 1..9: note = Seed: LVVVGACGV (KRAS G12C)
FVVLGTCGY

SEQ ID NO: 973 - protein, 9 aa, synthetic construct
  source 1..9: note = Seed: LVVVGACGV (KRAS G12C)
FVVLGVCGA

SEQ ID NO: 974 - protein, 9 aa, synthetic construct
  source 1..9: note = Seed: LVVVGACGV (KRAS G12C)
FVVLGVCGD

SEQ ID NO: 975 - protein, 9 aa, synthetic construct
  source 1..9: note = Seed: LVVVGACGV (KRAS G12C)
FVVLGVCGE

SEQ ID NO: 976 - protein, 9 aa, synthetic construct
  source 1..9: note = Seed: LVVVGACGV (KRAS G12C)
FVVLGVCGG

SEQ ID NO: 977 - protein, 9 aa, synthetic construct
  source 1..9: note = Seed: LVVVGACGV (KRAS G12C)
FVVLGVCGH

SEQ ID NO: 978 - protein, 9 aa, synthetic construct
  source 1..9: note = Seed: LVVVGACGV (KRAS G12C)
FVVLGVCGI

SEQ ID NO: 979 - protein, 9 aa, synthetic construct
  source 1..9: note = Seed: LVVVGACGV (KRAS G12C)
FVVLGVCGK

SEQ ID NO: 980 - protein, 9 aa, synthetic construct
  source 1..9: note = Seed: LVVVGACGV (KRAS G12C)
FVVLGVCGL

SEQ ID NO: 981 - protein, 9 aa, synthetic construct
  source 1..9: note = Seed: LVVVGACGV (KRAS G12C)
FVVLGVCGM

SEQ ID NO: 982 - protein, 9 aa, synthetic construct
  source 1..9: note = Seed: LVVVGACGV (KRAS G12C)
FVVLGVCGN

SEQ ID NO: 983 - protein, 9 aa, synthetic construct
  source 1..9: note = Seed: LVVVGACGV (KRAS G12C)
FVVLGVCGP

SEQ ID NO: 984 - protein, 9 aa, synthetic construct
  source 1..9: note = Seed: LVVVGACGV (KRAS G12C)
FVVLGVCGQ

SEQ ID NO: 985 - protein, 9 aa, synthetic construct
  source 1..9: note = Seed: LVVVGACGV (KRAS G12C)
FVVLGVCGR

SEQ ID NO: 986 - protein, 9 aa, synthetic construct
  source 1..9: note = Seed: LVVVGACGV (KRAS G12C)
FVVLGVCGS

SEQ ID NO: 987 - protein, 9 aa, synthetic construct
  source 1..9: note = Seed: LVVVGACGV (KRAS G12C)
FVVLGVCGT

SEQ ID NO: 988 - protein, 9 aa, synthetic construct
  source 1..9: note = Seed: LVVVGACGV (KRAS G12C)
FVVLGVCGV

SEQ ID NO: 989 - protein, 9 aa, synthetic construct
  source 1..9: note = Seed: LVVVGACGV (KRAS G12C)
FVVLGVCGY

SEQ ID NO: 990 - protein, 9 aa, synthetic construct
  source 1..9: note = Seed: LVVVGACGV (KRAS G12C)
FVVMGACGC

SEQ ID NO: 991 - protein, 9 aa, synthetic construct
  source 1..9: note = Seed: LVVVGACGV (KRAS G12C)
FVVMGACGD

SEQ ID NO: 992 - protein, 9 aa, synthetic construct
  source 1..9: note = Seed: LVVVGACGV (KRAS G12C)
FVVMGACGE

SEQ ID NO: 993 - protein, 9 aa, synthetic construct
  source 1..9: note = Seed: LVVVGACGV (KRAS G12C)
FVVMGACGF

SEQ ID NO: 994 - protein, 9 aa, synthetic construct
  source 1..9: note = Seed: LVVVGACGV (KRAS G12C)
FVVMGACGG

SEQ ID NO: 995 - protein, 9 aa, synthetic construct
  source 1..9: note = Seed: LVVVGACGV (KRAS G12C)
FVVMGACGH

SEQ ID NO: 996 - protein, 9 aa, synthetic construct
  source 1..9: note = Seed: LVVVGACGV (KRAS G12C)
FVVMGACGK

SEQ ID NO: 997 - protein, 9 aa, synthetic construct
  source 1..9: note = Seed: LVVVGACGV (KRAS G12C)
FVVMGACGN

SEQ ID NO: 998 - protein, 9 aa, synthetic construct
  source 1..9: note = Seed: LVVVGACGV (KRAS G12C)
FVVMGACGP

SEQ ID NO: 999 - protein, 9 aa, synthetic construct
  source 1..9: note = Seed: LVVVGACGV (KRAS G12C)
FVVMGACGQ

SEQ ID NO: 1000 - protein, 9 aa, synthetic construct
  source 1..9: note = Seed: LVVVGACGV (KRAS G12C)
FVVMGACGR

SEQ ID NO: 1001 - protein, 9 aa, synthetic construct
  source 1..9: note = Seed: LVVVGACGV (KRAS G12C)
FVVMGACGY

SEQ ID NO: 1002 - protein, 9 aa, synthetic construct
  source 1..9: note = Seed: LVVVGACGV (KRAS G12C)
FVVMGDCGA

SEQ ID NO: 1003 - protein, 9 aa, synthetic construct
  source 1..9: note = Seed: LVVVGACGV (KRAS G12C)
FVVMGDCGI

SEQ ID NO: 1004 - protein, 9 aa, synthetic construct
  source 1..9: note = Seed: LVVVGACGV (KRAS G12C)
FVVMGDCGL

SEQ ID NO: 1005 - protein, 9 aa, synthetic construct
  source 1..9: note = Seed: LVVVGACGV (KRAS G12C)
FVVMGDCGM

SEQ ID NO: 1006 - protein, 9 aa, synthetic construct
  source 1..9: note = Seed: LVVVGACGV (KRAS G12C)
FVVMGDCGS

SEQ ID NO: 1007 - protein, 9 aa, synthetic construct
  source 1..9: note = Seed: LVVVGACGV (KRAS G12C)
FVVMGDCGT

SEQ ID NO: 1008 - protein, 9 aa, synthetic construct
  source 1..9: note = Seed: LVVVGACGV (KRAS G12C)
FVVMGDCGV

SEQ ID NO: 1009 - protein, 9 aa, synthetic construct
  source 1..9: note = Seed: LVVVGACGV (KRAS G12C)
FVVMGECGA

SEQ ID NO: 1010 - protein, 9 aa, synthetic construct
  source 1..9: note = Seed: LVVVGACGV (KRAS G12C)
FVVMGECGI

SEQ ID NO: 1011 - protein, 9 aa, synthetic construct
  source 1..9: note = Seed: LVVVGACGV (KRAS G12C)
FVVMGECGL

SEQ ID NO: 1012 - protein, 9 aa, synthetic construct
  source 1..9: note = Seed: LVVVGACGV (KRAS G12C)
FVVMGECGM

SEQ ID NO: 1013 - protein, 9 aa, synthetic construct
  source 1..9: note = Seed: LVVVGACGV (KRAS G12C)
FVVMGECGS

SEQ ID NO: 1014 - protein, 9 aa, synthetic construct
  source 1..9: note = Seed: LVVVGACGV (KRAS G12C)
FVVMGECGT

SEQ ID NO: 1015 - protein, 9 aa, synthetic construct
  source 1..9: note = Seed: LVVVGACGV (KRAS G12C)
FVVMGECGV

SEQ ID NO: 1016 - protein, 9 aa, synthetic construct
  source 1..9: note = Seed: LVVVGACGV (KRAS G12C)
FVVMGGCGC

SEQ ID NO: 1017 - protein, 9 aa, synthetic construct
  source 1..9: note = Seed: LVVVGACGV (KRAS G12C)
FVVMGGCGD

SEQ ID NO: 1018 - protein, 9 aa, synthetic construct
  source 1..9: note = Seed: LVVVGACGV (KRAS G12C)
FVVMGGCGE

SEQ ID NO: 1019 - protein, 9 aa, synthetic construct
  source 1..9: note = Seed: LVVVGACGV (KRAS G12C)
FVVMGGCGF

SEQ ID NO: 1020 - protein, 9 aa, synthetic construct
  source 1..9: note = Seed: LVVVGACGV (KRAS G12C)
FVVMGGCGG

SEQ ID NO: 1021 - protein, 9 aa, synthetic construct
  source 1..9: note = Seed: LVVVGACGV (KRAS G12C)
FVVMGGCGH

SEQ ID NO: 1022 - protein, 9 aa, synthetic construct
  source 1..9: note = Seed: LVVVGACGV (KRAS G12C)
FVVMGGCGK

SEQ ID NO: 1023 - protein, 9 aa, synthetic construct
  source 1..9: note = Seed: LVVVGACGV (KRAS G12C)
FVVMGGCGN

SEQ ID NO: 1024 - protein, 9 aa, synthetic construct
  source 1..9: note = Seed: LVVVGACGV (KRAS G12C)
FVVMGGCGP

SEQ ID NO: 1025 - protein, 9 aa, synthetic construct
  source 1..9: note = Seed: LVVVGACGV (KRAS G12C)
FVVMGGCGQ

SEQ ID NO: 1026 - protein, 9 aa, synthetic construct
  source 1..9: note = Seed: LVVVGACGV (KRAS G12C)
FVVMGGCGR

SEQ ID NO: 1027 - protein, 9 aa, synthetic construct
  source 1..9: note = Seed: LVVVGACGV (KRAS G12C)
FVVMGGCGY

SEQ ID NO: 1028 - protein, 9 aa, synthetic construct
  source 1..9: note = Seed: LVVVGACGV (KRAS G12C)
FVVMGHCGA

SEQ ID NO: 1029 - protein, 9 aa, synthetic construct
  source 1..9: note = Seed: LVVVGACGV (KRAS G12C)
FVVMGHCGI

SEQ ID NO: 1030 - protein, 9 aa, synthetic construct
  source 1..9: note = Seed: LVVVGACGV (KRAS G12C)
FVVMGHCGL

SEQ ID NO: 1031 - protein, 9 aa, synthetic construct
  source 1..9: note = Seed: LVVVGACGV (KRAS G12C)
FVVMGHCGM

SEQ ID NO: 1032 - protein, 9 aa, synthetic construct
  source 1..9: note = Seed: LVVVGACGV (KRAS G12C)
FVVMGHCGS

SEQ ID NO: 1033 - protein, 9 aa, synthetic construct
  source 1..9: note = Seed: LVVVGACGV (KRAS G12C)
FVVMGHCGT

SEQ ID NO: 1034 - protein, 9 aa, synthetic construct
  source 1..9: note = Seed: LVVVGACGV (KRAS G12C)
FVVMGHCGV

SEQ ID NO: 1035 - protein, 9 aa, synthetic construct
  source 1..9: note = Seed: LVVVGACGV (KRAS G12C)
FVVMGICGA

SEQ ID NO: 1036 - protein, 9 aa, synthetic construct
  source 1..9: note = Seed: LVVVGACGV (KRAS G12C)
FVVMGICGD

SEQ ID NO: 1037 - protein, 9 aa, synthetic construct
  source 1..9: note = Seed: LVVVGACGV (KRAS G12C)
FVVMGICGE

SEQ ID NO: 1038 - protein, 9 aa, synthetic construct
  source 1..9: note = Seed: LVVVGACGV (KRAS G12C)
FVVMGICGG

SEQ ID NO: 1039 - protein, 9 aa, synthetic construct
  source 1..9: note = Seed: LVVVGACGV (KRAS G12C)
FVVMGICGH

SEQ ID NO: 1040 - protein, 9 aa, synthetic construct
  source 1..9: note = Seed: LVVVGACGV (KRAS G12C)
FVVMGICGI

SEQ ID NO: 1041 - protein, 9 aa, synthetic construct
  source 1..9: note = Seed: LVVVGACGV (KRAS G12C)
FVVMGICGK

SEQ ID NO: 1042 - protein, 9 aa, synthetic construct
  source 1..9: note = Seed: LVVVGACGV (KRAS G12C)
FVVMGICGL

SEQ ID NO: 1043 - protein, 9 aa, synthetic construct
  source 1..9: note = Seed: LVVVGACGV (KRAS G12C)
FVVMGICGM

SEQ ID NO: 1044 - protein, 9 aa, synthetic construct
  source 1..9: note = Seed: LVVVGACGV (KRAS G12C)
FVVMGICGN

SEQ ID NO: 1045 - protein, 9 aa, synthetic construct
  source 1..9: note = Seed: LVVVGACGV (KRAS G12C)
FVVMGICGP

SEQ ID NO: 1046 - protein, 9 aa, synthetic construct
  source 1..9: note = Seed: LVVVGACGV (KRAS G12C)
FVVMGICGQ

SEQ ID NO: 1047 - protein, 9 aa, synthetic construct
  source 1..9: note = Seed: LVVVGACGV (KRAS G12C)
FVVMGICGR

SEQ ID NO: 1048 - protein, 9 aa, synthetic construct
  source 1..9: note = Seed: LVVVGACGV (KRAS G12C)
FVVMGICGS

SEQ ID NO: 1049 - protein, 9 aa, synthetic construct
  source 1..9: note = Seed: LVVVGACGV (KRAS G12C)
FVVMGICGT

SEQ ID NO: 1050 - protein, 9 aa, synthetic construct
  source 1..9: note = Seed: LVVVGACGV (KRAS G12C)
FVVMGICGV

SEQ ID NO: 1051 - protein, 9 aa, synthetic construct
  source 1..9: note = Seed: LVVVGACGV (KRAS G12C)
FVVMGICGY

SEQ ID NO: 1052 - protein, 9 aa, synthetic construct
  source 1..9: note = Seed: LVVVGACGV (KRAS G12C)
FVVMGKCGA

SEQ ID NO: 1053 - protein, 9 aa, synthetic construct
  source 1..9: note = Seed: LVVVGACGV (KRAS G12C)
FVVMGKCGH

SEQ ID NO: 1054 - protein, 9 aa, synthetic construct
  source 1..9: note = Seed: LVVVGACGV (KRAS G12C)
FVVMGKCGK

SEQ ID NO: 1055 - protein, 9 aa, synthetic construct
  source 1..9: note = Seed: LVVVGACGV (KRAS G12C)
FVVMGKCGL

SEQ ID NO: 1056 - protein, 9 aa, synthetic construct
  source 1..9: note = Seed: LVVVGACGV (KRAS G12C)
FVVMGKCGM

SEQ ID NO: 1057 - protein, 9 aa, synthetic construct
  source 1..9: note = Seed: LVVVGACGV (KRAS G12C)
FVVMGKCGQ

SEQ ID NO: 1058 - protein, 9 aa, synthetic construct
  source 1..9: note = Seed: LVVVGACGV (KRAS G12C)
FVVMGKCGR

SEQ ID NO: 1059 - protein, 9 aa, synthetic construct
  source 1..9: note = Seed: LVVVGACGV (KRAS G12C)
FVVMGKCGS

SEQ ID NO: 1060 - protein, 9 aa, synthetic construct
  source 1..9: note = Seed: LVVVGACGV (KRAS G12C)
FVVMGKCGT

SEQ ID NO: 1061 - protein, 9 aa, synthetic construct
  source 1..9: note = Seed: LVVVGACGV (KRAS G12C)
FVVMGKCGY

SEQ ID NO: 1062 - protein, 9 aa, synthetic construct
  source 1..9: note = Seed: LVVVGACGV (KRAS G12C)
FVVMGLCGA

SEQ ID NO: 1063 - protein, 9 aa, synthetic construct
  source 1..9: note = Seed: LVVVGACGV (KRAS G12C)
FVVMGLCGH

SEQ ID NO: 1064 - protein, 9 aa, synthetic construct
  source 1..9: note = Seed: LVVVGACGV (KRAS G12C)
FVVMGLCGN

SEQ ID NO: 1065 - protein, 9 aa, synthetic construct
  source 1..9: note = Seed: LVVVGACGV (KRAS G12C)
FVVMGMCGA

SEQ ID NO: 1066 - protein, 9 aa, synthetic construct
  source 1..9: note = Seed: LVVVGACGV (KRAS G12C)
FVVMGMCGH

SEQ ID NO: 1067 - protein, 9 aa, synthetic construct
  source 1..9: note = Seed: LVVVGACGV (KRAS G12C)
FVVMGMCGI

SEQ ID NO: 1068 - protein, 9 aa, synthetic construct
  source 1..9: note = Seed: LVVVGACGV (KRAS G12C)
FVVMGMCGL

SEQ ID NO: 1069 - protein, 9 aa, synthetic construct
  source 1..9: note = Seed: LVVVGACGV (KRAS G12C)
FVVMGMCGM

SEQ ID NO: 1070 - protein, 9 aa, synthetic construct
  source 1..9: note = Seed: LVVVGACGV (KRAS G12C)
FVVMGMCGN

SEQ ID NO: 1071 - protein, 9 aa, synthetic construct
  source 1..9: note = Seed: LVVVGACGV (KRAS G12C)
FVVMGMCGR

SEQ ID NO: 1072 - protein, 9 aa, synthetic construct
  source 1..9: note = Seed: LVVVGACGV (KRAS G12C)
FVVMGMCGS

SEQ ID NO: 1073 - protein, 9 aa, synthetic construct
  source 1..9: note = Seed: LVVVGACGV (KRAS G12C)
FVVMGMCGV

SEQ ID NO: 1074 - protein, 9 aa, synthetic construct
  source 1..9: note = Seed: LVVVGACGV (KRAS G12C)
FVVMGNCGC

SEQ ID NO: 1075 - protein, 9 aa, synthetic construct
  source 1..9: note = Seed: LVVVGACGV (KRAS G12C)
FVVMGNCGD

SEQ ID NO: 1076 - protein, 9 aa, synthetic construct
  source 1..9: note = Seed: LVVVGACGV (KRAS G12C)
FVVMGNCGE

SEQ ID NO: 1077 - protein, 9 aa, synthetic construct
  source 1..9: note = Seed: LVVVGACGV (KRAS G12C)
FVVMGNCGF

SEQ ID NO: 1078 - protein, 9 aa, synthetic construct
  source 1..9: note = Seed: LVVVGACGV (KRAS G12C)
FVVMGNCGG

SEQ ID NO: 1079 - protein, 9 aa, synthetic construct
  source 1..9: note = Seed: LVVVGACGV (KRAS G12C)
FVVMGNCGH

SEQ ID NO: 1080 - protein, 9 aa, synthetic construct
  source 1..9: note = Seed: LVVVGACGV (KRAS G12C)
FVVMGNCGK

SEQ ID NO: 1081 - protein, 9 aa, synthetic construct
  source 1..9: note = Seed: LVVVGACGV (KRAS G12C)
FVVMGNCGN

SEQ ID NO: 1082 - protein, 9 aa, synthetic construct
  source 1..9: note = Seed: LVVVGACGV (KRAS G12C)
FVVMGNCGP

SEQ ID NO: 1083 - protein, 9 aa, synthetic construct
  source 1..9: note = Seed: LVVVGACGV (KRAS G12C)
FVVMGNCGQ

SEQ ID NO: 1084 - protein, 9 aa, synthetic construct
  source 1..9: note = Seed: LVVVGACGV (KRAS G12C)
FVVMGNCGR

SEQ ID NO: 1085 - protein, 9 aa, synthetic construct
  source 1..9: note = Seed: LVVVGACGV (KRAS G12C)
FVVMGNCGS

SEQ ID NO: 1086 - protein, 9 aa, synthetic construct
  source 1..9: note = Seed: LVVVGACGV (KRAS G12C)
FVVMGNCGY

SEQ ID NO: 1087 - protein, 9 aa, synthetic construct
  source 1..9: note = Seed: LVVVGACGV (KRAS G12C)
FVVMGPCGC

SEQ ID NO: 1088 - protein, 9 aa, synthetic construct
  source 1..9: note = Seed: LVVVGACGV (KRAS G12C)
FVVMGPCGD

SEQ ID NO: 1089 - protein, 9 aa, synthetic construct
  source 1..9: note = Seed: LVVVGACGV (KRAS G12C)
FVVMGPCGE

SEQ ID NO: 1090 - protein, 9 aa, synthetic construct
  source 1..9: note = Seed: LVVVGACGV (KRAS G12C)
FVVMGPCGF

SEQ ID NO: 1091 - protein, 9 aa, synthetic construct
  source 1..9: note = Seed: LVVVGACGV (KRAS G12C)
FVVMGPCGG

SEQ ID NO: 1092 - protein, 9 aa, synthetic construct
  source 1..9: note = Seed: LVVVGACGV (KRAS G12C)
FVVMGPCGH

SEQ ID NO: 1093 - protein, 9 aa, synthetic construct
  source 1..9: note = Seed: LVVVGACGV (KRAS G12C)
FVVMGPCGK

SEQ ID NO: 1094 - protein, 9 aa, synthetic construct
  source 1..9: note = Seed: LVVVGACGV (KRAS G12C)
FVVMGPCGN

SEQ ID NO: 1095 - protein, 9 aa, synthetic construct
  source 1..9: note = Seed: LVVVGACGV (KRAS G12C)
FVVMGPCGP

SEQ ID NO: 1096 - protein, 9 aa, synthetic construct
  source 1..9: note = Seed: LVVVGACGV (KRAS G12C)
FVVMGPCGQ

SEQ ID NO: 1097 - protein, 9 aa, synthetic construct
  source 1..9: note = Seed: LVVVGACGV (KRAS G12C)
FVVMGPCGR

SEQ ID NO: 1098 - protein, 9 aa, synthetic construct
  source 1..9: note = Seed: LVVVGACGV (KRAS G12C)
FVVMGPCGS

SEQ ID NO: 1099 - protein, 9 aa, synthetic construct
  source 1..9: note = Seed: LVVVGACGV (KRAS G12C)
FVVMGPCGW

SEQ ID NO: 1100 - protein, 9 aa, synthetic construct
  source 1..9: note = Seed: LVVVGACGV (KRAS G12C)
FVVMGPCGY

SEQ ID NO: 1101 - protein, 9 aa, synthetic construct
  source 1..9: note = Seed: LVVVGACGV (KRAS G12C)
FVVMGQCGA

SEQ ID NO: 1102 - protein, 9 aa, synthetic construct
  source 1..9: note = Seed: LVVVGACGV (KRAS G12C)
FVVMGQCGI

SEQ ID NO: 1103 - protein, 9 aa, synthetic construct
  source 1..9: note = Seed: LVVVGACGV (KRAS G12C)
FVVMGQCGL

SEQ ID NO: 1104 - protein, 9 aa, synthetic construct
  source 1..9: note = Seed: LVVVGACGV (KRAS G12C)
FVVMGQCGM

SEQ ID NO: 1105 - protein, 9 aa, synthetic construct
  source 1..9: note = Seed: LVVVGACGV (KRAS G12C)
FVVMGQCGN

SEQ ID NO: 1106 - protein, 9 aa, synthetic construct
  source 1..9: note = Seed: LVVVGACGV (KRAS G12C)
FVVMGQCGS

SEQ ID NO: 1107 - protein, 9 aa, synthetic construct
  source 1..9: note = Seed: LVVVGACGV (KRAS G12C)
FVVMGQCGT

SEQ ID NO: 1108 - protein, 9 aa, synthetic construct
  source 1..9: note = Seed: LVVVGACGV (KRAS G12C)
FVVMGQCGV

SEQ ID NO: 1109 - protein, 9 aa, synthetic construct
  source 1..9: note = Seed: LVVVGACGV (KRAS G12C)
FVVMGRCGA

SEQ ID NO: 1110 - protein, 9 aa, synthetic construct
  source 1..9: note = Seed: LVVVGACGV (KRAS G12C)
FVVMGRCGH

SEQ ID NO: 1111 - protein, 9 aa, synthetic construct
  source 1..9: note = Seed: LVVVGACGV (KRAS G12C)
FVVMGRCGK

SEQ ID NO: 1112 - protein, 9 aa, synthetic construct
  source 1..9: note = Seed: LVVVGACGV (KRAS G12C)
FVVMGRCGM

SEQ ID NO: 1113 - protein, 9 aa, synthetic construct
  source 1..9: note = Seed: LVVVGACGV (KRAS G12C)
FVVMGRCGN

SEQ ID NO: 1114 - protein, 9 aa, synthetic construct
  source 1..9: note = Seed: LVVVGACGV (KRAS G12C)
FVVMGRCGQ

SEQ ID NO: 1115 - protein, 9 aa, synthetic construct
  source 1..9: note = Seed: LVVVGACGV (KRAS G12C)
FVVMGRCGR

SEQ ID NO: 1116 - protein, 9 aa, synthetic construct
  source 1..9: note = Seed: LVVVGACGV (KRAS G12C)
FVVMGRCGS

SEQ ID NO: 1117 - protein, 9 aa, synthetic construct
  source 1..9: note = Seed: LVVVGACGV (KRAS G12C)
FVVMGRCGT

SEQ ID NO: 1118 - protein, 9 aa, synthetic construct
  source 1..9: note = Seed: LVVVGACGV (KRAS G12C)
FVVMGRCGY

SEQ ID NO: 1119 - protein, 9 aa, synthetic construct
  source 1..9: note = Seed: LVVVGACGV (KRAS G12C)
FVVMGSCGC

SEQ ID NO: 1120 - protein, 9 aa, synthetic construct
  source 1..9: note = Seed: LVVVGACGV (KRAS G12C)
FVVMGSCGD

SEQ ID NO: 1121 - protein, 9 aa, synthetic construct
  source 1..9: note = Seed: LVVVGACGV (KRAS G12C)
FVVMGSCGE

SEQ ID NO: 1122 - protein, 9 aa, synthetic construct
  source 1..9: note = Seed: LVVVGACGV (KRAS G12C)
FVVMGSCGF

SEQ ID NO: 1123 - protein, 9 aa, synthetic construct
  source 1..9: note = Seed: LVVVGACGV (KRAS G12C)
FVVMGSCGG

SEQ ID NO: 1124 - protein, 9 aa, synthetic construct
  source 1..9: note = Seed: LVVVGACGV (KRAS G12C)
FVVMGSCGH

SEQ ID NO: 1125 - protein, 9 aa, synthetic construct
  source 1..9: note = Seed: LVVVGACGV (KRAS G12C)
FVVMGSCGK

SEQ ID NO: 1126 - protein, 9 aa, synthetic construct
  source 1..9: note = Seed: LVVVGACGV (KRAS G12C)
FVVMGSCGN

SEQ ID NO: 1127 - protein, 9 aa, synthetic construct
  source 1..9: note = Seed: LVVVGACGV (KRAS G12C)
FVVMGSCGP

SEQ ID NO: 1128 - protein, 9 aa, synthetic construct
  source 1..9: note = Seed: LVVVGACGV (KRAS G12C)
FVVMGSCGQ

SEQ ID NO: 1129 - protein, 9 aa, synthetic construct
  source 1..9: note = Seed: LVVVGACGV (KRAS G12C)
FVVMGSCGR

SEQ ID NO: 1130 - protein, 9 aa, synthetic construct
  source 1..9: note = Seed: LVVVGACGV (KRAS G12C)
FVVMGSCGY

SEQ ID NO: 1131 - protein, 9 aa, synthetic construct
  source 1..9: note = Seed: LVVVGACGV (KRAS G12C)
FVVMGTCGC

SEQ ID NO: 1132 - protein, 9 aa, synthetic construct
  source 1..9: note = Seed: LVVVGACGV (KRAS G12C)
FVVMGTCGD

SEQ ID NO: 1133 - protein, 9 aa, synthetic construct
  source 1..9: note = Seed: LVVVGACGV (KRAS G12C)
FVVMGTCGE

SEQ ID NO: 1134 - protein, 9 aa, synthetic construct
  source 1..9: note = Seed: LVVVGACGV (KRAS G12C)
FVVMGTCGF

SEQ ID NO: 1135 - protein, 9 aa, synthetic construct
  source 1..9: note = Seed: LVVVGACGV (KRAS G12C)
FVVMGTCGG

SEQ ID NO: 1136 - protein, 9 aa, synthetic construct
  source 1..9: note = Seed: LVVVGACGV (KRAS G12C)
FVVMGTCGH

SEQ ID NO: 1137 - protein, 9 aa, synthetic construct
  source 1..9: note = Seed: LVVVGACGV (KRAS G12C)
FVVMGTCGK

SEQ ID NO: 1138 - protein, 9 aa, synthetic construct
  source 1..9: note = Seed: LVVVGACGV (KRAS G12C)
FVVMGTCGN

SEQ ID NO: 1139 - protein, 9 aa, synthetic construct
  source 1..9: note = Seed: LVVVGACGV (KRAS G12C)
FVVMGTCGP

SEQ ID NO: 1140 - protein, 9 aa, synthetic construct
  source 1..9: note = Seed: LVVVGACGV (KRAS G12C)
FVVMGTCGQ

SEQ ID NO: 1141 - protein, 9 aa, synthetic construct
  source 1..9: note = Seed: LVVVGACGV (KRAS G12C)
FVVMGTCGR

SEQ ID NO: 1142 - protein, 9 aa, synthetic construct
  source 1..9: note = Seed: LVVVGACGV (KRAS G12C)
FVVMGTCGS

SEQ ID NO: 1143 - protein, 9 aa, synthetic construct
  source 1..9: note = Seed: LVVVGACGV (KRAS G12C)
FVVMGTCGT

SEQ ID NO: 1144 - protein, 9 aa, synthetic construct
  source 1..9: note = Seed: LVVVGACGV (KRAS G12C)
FVVMGTCGY

SEQ ID NO: 1145 - protein, 9 aa, synthetic construct
  source 1..9: note = Seed: LVVVGACGV (KRAS G12C)
FVVMGVCGA

SEQ ID NO: 1146 - protein, 9 aa, synthetic construct
  source 1..9: note = Seed: LVVVGACGV (KRAS G12C)
FVVMGVCGD

SEQ ID NO: 1147 - protein, 9 aa, synthetic construct
  source 1..9: note = Seed: LVVVGACGV (KRAS G12C)
FVVMGVCGE

SEQ ID NO: 1148 - protein, 9 aa, synthetic construct
  source 1..9: note = Seed: LVVVGACGV (KRAS G12C)
FVVMGVCGG

SEQ ID NO: 1149 - protein, 9 aa, synthetic construct
  source 1..9: note = Seed: LVVVGACGV (KRAS G12C)
FVVMGVCGH

SEQ ID NO: 1150 - protein, 9 aa, synthetic construct
  source 1..9: note = Seed: LVVVGACGV (KRAS G12C)
FVVMGVCGI

SEQ ID NO: 1151 - protein, 9 aa, synthetic construct
  source 1..9: note = Seed: LVVVGACGV (KRAS G12C)
FVVMGVCGK

SEQ ID NO: 1152 - protein, 9 aa, synthetic construct
  source 1..9: note = Seed: LVVVGACGV (KRAS G12C)
FVVMGVCGL

SEQ ID NO: 1153 - protein, 9 aa, synthetic construct
  source 1..9: note = Seed: LVVVGACGV (KRAS G12C)
FVVMGVCGM

SEQ ID NO: 1154 - protein, 9 aa, synthetic construct
  source 1..9: note = Seed: LVVVGACGV (KRAS G12C)
FVVMGVCGN

SEQ ID NO: 1155 - protein, 9 aa, synthetic construct
  source 1..9: note = Seed: LVVVGACGV (KRAS G12C)
FVVMGVCGP

SEQ ID NO: 1156 - protein, 9 aa, synthetic construct
  source 1..9: note = Seed: LVVVGACGV (KRAS G12C)
FVVMGVCGQ

SEQ ID NO: 1157 - protein, 9 aa, synthetic construct
  source 1..9: note = Seed: LVVVGACGV (KRAS G12C)
FVVMGVCGR

SEQ ID NO: 1158 - protein, 9 aa, synthetic construct
  source 1..9: note = Seed: LVVVGACGV (KRAS G12C)
FVVMGVCGS

SEQ ID NO: 1159 - protein, 9 aa, synthetic construct
  source 1..9: note = Seed: LVVVGACGV (KRAS G12C)
FVVMGVCGT

SEQ ID NO: 1160 - protein, 9 aa, synthetic construct
  source 1..9: note = Seed: LVVVGACGV (KRAS G12C)
FVVMGVCGV

SEQ ID NO: 1161 - protein, 9 aa, synthetic construct
  source 1..9: note = Seed: LVVVGACGV (KRAS G12C)
FVVMGVCGY

SEQ ID NO: 1162 - protein, 9 aa, synthetic construct
  source 1..9: note = Seed: LVVVGACGV (KRAS G12C)
FVVNGACGA

SEQ ID NO: 1163 - protein, 9 aa, synthetic construct
  source 1..9: note = Seed: LVVVGACGV (KRAS G12C)
FVVNGACGF

SEQ ID NO: 1164 - protein, 9 aa, synthetic construct
  source 1..9: note = Seed: LVVVGACGV (KRAS G12C)
FVVNGACGI

SEQ ID NO: 1165 - protein, 9 aa, synthetic construct
  source 1..9: note = Seed: LVVVGACGV (KRAS G12C)
FVVNGACGL

SEQ ID NO: 1166 - protein, 9 aa, synthetic construct
  source 1..9: note = Seed: LVVVGACGV (KRAS G12C)
FVVNGACGM

SEQ ID NO: 1167 - protein, 9 aa, synthetic construct
  source 1..9: note = Seed: LVVVGACGV (KRAS G12C)
FVVNGACGN

SEQ ID NO: 1168 - protein, 9 aa, synthetic construct
  source 1..9: note = Seed: LVVVGACGV (KRAS G12C)
FVVNGACGS

SEQ ID NO: 1169 - protein, 9 aa, synthetic construct
  source 1..9: note = Seed: LVVVGACGV (KRAS G12C)
FVVNGACGT

SEQ ID NO: 1170 - protein, 9 aa, synthetic construct
  source 1..9: note = Seed: LVVVGACGV (KRAS G12C)
FVVNGACGV

SEQ ID NO: 1171 - protein, 9 aa, synthetic construct
  source 1..9: note = Seed: LVVVGACGV (KRAS G12C)
FVVNGACGY

SEQ ID NO: 1172 - protein, 9 aa, synthetic construct
  source 1..9: note = Seed: LVVVGACGV (KRAS G12C)
FVVNGDCGI

SEQ ID NO: 1173 - protein, 9 aa, synthetic construct
  source 1..9: note = Seed: LVVVGACGV (KRAS G12C)
FVVNGGCGA

SEQ ID NO: 1174 - protein, 9 aa, synthetic construct
  source 1..9: note = Seed: LVVVGACGV (KRAS G12C)
FVVNGGCGF

SEQ ID NO: 1175 - protein, 9 aa, synthetic construct
  source 1..9: note = Seed: LVVVGACGV (KRAS G12C)
FVVNGGCGI

SEQ ID NO: 1176 - protein, 9 aa, synthetic construct
  source 1..9: note = Seed: LVVVGACGV (KRAS G12C)
FVVNGGCGL

SEQ ID NO: 1177 - protein, 9 aa, synthetic construct
  source 1..9: note = Seed: LVVVGACGV (KRAS G12C)
FVVNGGCGM

SEQ ID NO: 1178 - protein, 9 aa, synthetic construct
  source 1..9: note = Seed: LVVVGACGV (KRAS G12C)
FVVNGGCGV

SEQ ID NO: 1179 - protein, 9 aa, synthetic construct
  source 1..9: note = Seed: LVVVGACGV (KRAS G12C)
FVVNGGCGY

SEQ ID NO: 1180 - protein, 9 aa, synthetic construct
  source 1..9: note = Seed: LVVVGACGV (KRAS G12C)
FVVNGHCGF

SEQ ID NO: 1181 - protein, 9 aa, synthetic construct
  source 1..9: note = Seed: LVVVGACGV (KRAS G12C)
FVVNGHCGI

SEQ ID NO: 1182 - protein, 9 aa, synthetic construct
  source 1..9: note = Seed: LVVVGACGV (KRAS G12C)
FVVNGHCGL

SEQ ID NO: 1183 - protein, 9 aa, synthetic construct
  source 1..9: note = Seed: LVVVGACGV (KRAS G12C)
FVVNGHCGV

SEQ ID NO: 1184 - protein, 9 aa, synthetic construct
  source 1..9: note = Seed: LVVVGACGV (KRAS G12C)
FVVNGICGA

SEQ ID NO: 1185 - protein, 9 aa, synthetic construct
  source 1..9: note = Seed: LVVVGACGV (KRAS G12C)
FVVNGICGF

SEQ ID NO: 1186 - protein, 9 aa, synthetic construct
  source 1..9: note = Seed: LVVVGACGV (KRAS G12C)
FVVNGICGI

SEQ ID NO: 1187 - protein, 9 aa, synthetic construct
  source 1..9: note = Seed: LVVVGACGV (KRAS G12C)
FVVNGICGL

SEQ ID NO: 1188 - protein, 9 aa, synthetic construct
  source 1..9: note = Seed: LVVVGACGV (KRAS G12C)
FVVNGICGM

SEQ ID NO: 1189 - protein, 9 aa, synthetic construct
  source 1..9: note = Seed: LVVVGACGV (KRAS G12C)
FVVNGICGV

SEQ ID NO: 1190 - protein, 9 aa, synthetic construct
  source 1..9: note = Seed: LVVVGACGV (KRAS G12C)
FVVNGICGY

SEQ ID NO: 1191 - protein, 9 aa, synthetic construct
  source 1..9: note = Seed: LVVVGACGV (KRAS G12C)
FVVNGLCGF

SEQ ID NO: 1192 - protein, 9 aa, synthetic construct
  source 1..9: note = Seed: LVVVGACGV (KRAS G12C)
FVVNGLCGI

SEQ ID NO: 1193 - protein, 9 aa, synthetic construct
  source 1..9: note = Seed: LVVVGACGV (KRAS G12C)
FVVNGLCGL

SEQ ID NO: 1194 - protein, 9 aa, synthetic construct
  source 1..9: note = Seed: LVVVGACGV (KRAS G12C)
FVVNGLCGM

SEQ ID NO: 1195 - protein, 9 aa, synthetic construct
  source 1..9: note = Seed: LVVVGACGV (KRAS G12C)
FVVNGLCGV

SEQ ID NO: 1196 - protein, 9 aa, synthetic construct
  source 1..9: note = Seed: LVVVGACGV (KRAS G12C)
FVVNGLCGY

SEQ ID NO: 1197 - protein, 9 aa, synthetic construct
  source 1..9: note = Seed: LVVVGACGV (KRAS G12C)
FVVNGMCGF

SEQ ID NO: 1198 - protein, 9 aa, synthetic construct
  source 1..9: note = Seed: LVVVGACGV (KRAS G12C)
FVVNGMCGI

SEQ ID NO: 1199 - protein, 9 aa, synthetic construct
  source 1..9: note = Seed: LVVVGACGV (KRAS G12C)
FVVNGMCGL

SEQ ID NO: 1200 - protein, 9 aa, synthetic construct
  source 1..9: note = Seed: LVVVGACGV (KRAS G12C)
FVVNGMCGM

SEQ ID NO: 1201 - protein, 9 aa, synthetic construct
  source 1..9: note = Seed: LVVVGACGV (KRAS G12C)
FVVNGMCGV

SEQ ID NO: 1202 - protein, 9 aa, synthetic construct
  source 1..9: note = Seed: LVVVGACGV (KRAS G12C)
FVVNGMCGY

SEQ ID NO: 1203 - protein, 9 aa, synthetic construct
  source 1..9: note = Seed: LVVVGACGV (KRAS G12C)
FVVNGNCGA

SEQ ID NO: 1204 - protein, 9 aa, synthetic construct
  source 1..9: note = Seed: LVVVGACGV (KRAS G12C)
FVVNGNCGF

SEQ ID NO: 1205 - protein, 9 aa, synthetic construct
  source 1..9: note = Seed: LVVVGACGV (KRAS G12C)
FVVNGNCGI

SEQ ID NO: 1206 - protein, 9 aa, synthetic construct
  source 1..9: note = Seed: LVVVGACGV (KRAS G12C)
FVVNGNCGL

SEQ ID NO: 1207 - protein, 9 aa, synthetic construct
  source 1..9: note = Seed: LVVVGACGV (KRAS G12C)
FVVNGNCGM

SEQ ID NO: 1208 - protein, 9 aa, synthetic construct
  source 1..9: note = Seed: LVVVGACGV (KRAS G12C)
FVVNGNCGV

SEQ ID NO: 1209 - protein, 9 aa, synthetic construct
  source 1..9: note = Seed: LVVVGACGV (KRAS G12C)
FVVNGNCGY

SEQ ID NO: 1210 - protein, 9 aa, synthetic construct
  source 1..9: note = Seed: LVVVGACGV (KRAS G12C)
FVVNGPCGA

SEQ ID NO: 1211 - protein, 9 aa, synthetic construct
  source 1..9: note = Seed: LVVVGACGV (KRAS G12C)
FVVNGPCGF

SEQ ID NO: 1212 - protein, 9 aa, synthetic construct
  source 1..9: note = Seed: LVVVGACGV (KRAS G12C)
FVVNGPCGI

SEQ ID NO: 1213 - protein, 9 aa, synthetic construct
  source 1..9: note = Seed: LVVVGACGV (KRAS G12C)
FVVNGPCGL

SEQ ID NO: 1214 - protein, 9 aa, synthetic construct
  source 1..9: note = Seed: LVVVGACGV (KRAS G12C)
FVVNGPCGM

SEQ ID NO: 1215 - protein, 9 aa, synthetic construct
  source 1..9: note = Seed: LVVVGACGV (KRAS G12C)
FVVNGPCGV

SEQ ID NO: 1216 - protein, 9 aa, synthetic construct
  source 1..9: note = Seed: LVVVGACGV (KRAS G12C)
FVVNGPCGY

SEQ ID NO: 1217 - protein, 9 aa, synthetic construct
  source 1..9: note = Seed: LVVVGACGV (KRAS G12C)
FVVNGQCGI

SEQ ID NO: 1218 - protein, 9 aa, synthetic construct
  source 1..9: note = Seed: LVVVGACGV (KRAS G12C)
FVVNGQCGV

SEQ ID NO: 1219 - protein, 9 aa, synthetic construct
  source 1..9: note = Seed: LVVVGACGV (KRAS G12C)
FVVNGSCGA

SEQ ID NO: 1220 - protein, 9 aa, synthetic construct
  source 1..9: note = Seed: LVVVGACGV (KRAS G12C)
FVVNGSCGF

SEQ ID NO: 1221 - protein, 9 aa, synthetic construct
  source 1..9: note = Seed: LVVVGACGV (KRAS G12C)
FVVNGSCGI

SEQ ID NO: 1222 - protein, 9 aa, synthetic construct
  source 1..9: note = Seed: LVVVGACGV (KRAS G12C)
FVVNGSCGL

SEQ ID NO: 1223 - protein, 9 aa, synthetic construct
  source 1..9: note = Seed: LVVVGACGV (KRAS G12C)
FVVNGSCGM

SEQ ID NO: 1224 - protein, 9 aa, synthetic construct
  source 1..9: note = Seed: LVVVGACGV (KRAS G12C)
FVVNGSCGS

SEQ ID NO: 1225 - protein, 9 aa, synthetic construct
  source 1..9: note = Seed: LVVVGACGV (KRAS G12C)
FVVNGSCGT

SEQ ID NO: 1226 - protein, 9 aa, synthetic construct
  source 1..9: note = Seed: LVVVGACGV (KRAS G12C)
FVVNGSCGV

SEQ ID NO: 1227 - protein, 9 aa, synthetic construct
  source 1..9: note = Seed: LVVVGACGV (KRAS G12C)
FVVNGSCGY

SEQ ID NO: 1228 - protein, 9 aa, synthetic construct
  source 1..9: note = Seed: LVVVGACGV (KRAS G12C)
FVVNGTCGA

SEQ ID NO: 1229 - protein, 9 aa, synthetic construct
  source 1..9: note = Seed: LVVVGACGV (KRAS G12C)
FVVNGTCGF

SEQ ID NO: 1230 - protein, 9 aa, synthetic construct
  source 1..9: note = Seed: LVVVGACGV (KRAS G12C)
FVVNGTCGI

SEQ ID NO: 1231 - protein, 9 aa, synthetic construct
  source 1..9: note = Seed: LVVVGACGV (KRAS G12C)
FVVNGTCGL

SEQ ID NO: 1232 - protein, 9 aa, synthetic construct
  source 1..9: note = Seed: LVVVGACGV (KRAS G12C)
FVVNGTCGM

SEQ ID NO: 1233 - protein, 9 aa, synthetic construct
  source 1..9: note = Seed: LVVVGACGV (KRAS G12C)
FVVNGTCGV

SEQ ID NO: 1234 - protein, 9 aa, synthetic construct
  source 1..9: note = Seed: LVVVGACGV (KRAS G12C)
FVVNGTCGY

SEQ ID NO: 1235 - protein, 9 aa, synthetic construct
  source 1..9: note = Seed: LVVVGACGV (KRAS G12C)
FVVNGVCGA

SEQ ID NO: 1236 - protein, 9 aa, synthetic construct
  source 1..9: note = Seed: LVVVGACGV (KRAS G12C)
FVVNGVCGF

SEQ ID NO: 1237 - protein, 9 aa, synthetic construct
  source 1..9: note = Seed: LVVVGACGV (KRAS G12C)
FVVNGVCGI

SEQ ID NO: 1238 - protein, 9 aa, synthetic construct
  source 1..9: note = Seed: LVVVGACGV (KRAS G12C)
FVVNGVCGL

SEQ ID NO: 1239 - protein, 9 aa, synthetic construct
  source 1..9: note = Seed: LVVVGACGV (KRAS G12C)
FVVNGVCGM

SEQ ID NO: 1240 - protein, 9 aa, synthetic construct
  source 1..9: note = Seed: LVVVGACGV (KRAS G12C)
FVVNGVCGV

SEQ ID NO: 1241 - protein, 9 aa, synthetic construct
  source 1..9: note = Seed: LVVVGACGV (KRAS G12C)
FVVNGVCGY

SEQ ID NO: 1242 - protein, 9 aa, synthetic construct
  source 1..9: note = Seed: LVVVGACGV (KRAS G12C)
FVVPGACGL

SEQ ID NO: 1243 - protein, 9 aa, synthetic construct
  source 1..9: note = Seed: LVVVGACGV (KRAS G12C)
FVVQGACGC

SEQ ID NO: 1244 - protein, 9 aa, synthetic construct
  source 1..9: note = Seed: LVVVGACGV (KRAS G12C)
FVVQGACGF

SEQ ID NO: 1245 - protein, 9 aa, synthetic construct
  source 1..9: note = Seed: LVVVGACGV (KRAS G12C)
FVVQGACGG

SEQ ID NO: 1246 - protein, 9 aa, synthetic construct
  source 1..9: note = Seed: LVVVGACGV (KRAS G12C)
FVVQGACGH

SEQ ID NO: 1247 - protein, 9 aa, synthetic construct
  source 1..9: note = Seed: LVVVGACGV (KRAS G12C)
FVVQGACGN

SEQ ID NO: 1248 - protein, 9 aa, synthetic construct
  source 1..9: note = Seed: LVVVGACGV (KRAS G12C)
FVVQGACGP

SEQ ID NO: 1249 - protein, 9 aa, synthetic construct
  source 1..9: note = Seed: LVVVGACGV (KRAS G12C)
FVVQGACGQ

SEQ ID NO: 1250 - protein, 9 aa, synthetic construct
  source 1..9: note = Seed: LVVVGACGV (KRAS G12C)
FVVQGACGR

SEQ ID NO: 1251 - protein, 9 aa, synthetic construct
  source 1..9: note = Seed: LVVVGACGV (KRAS G12C)
FVVQGACGS

SEQ ID NO: 1252 - protein, 9 aa, synthetic construct
  source 1..9: note = Seed: LVVVGACGV (KRAS G12C)
FVVQGACGT

SEQ ID NO: 1253 - protein, 9 aa, synthetic construct
  source 1..9: note = Seed: LVVVGACGV (KRAS G12C)
FVVQGACGW

SEQ ID NO: 1254 - protein, 9 aa, synthetic construct
  source 1..9: note = Seed: LVVVGACGV (KRAS G12C)
FVVQGACGY

SEQ ID NO: 1255 - protein, 9 aa, synthetic construct
  source 1..9: note = Seed: LVVVGACGV (KRAS G12C)
FVVQGDCGI

SEQ ID NO: 1256 - protein, 9 aa, synthetic construct
  source 1..9: note = Seed: LVVVGACGV (KRAS G12C)
FVVQGDCGL

SEQ ID NO: 1257 - protein, 9 aa, synthetic construct
  source 1..9: note = Seed: LVVVGACGV (KRAS G12C)
FVVQGDCGV

SEQ ID NO: 1258 - protein, 9 aa, synthetic construct
  source 1..9: note = Seed: LVVVGACGV (KRAS G12C)
FVVQGECGL

SEQ ID NO: 1259 - protein, 9 aa, synthetic construct
  source 1..9: note = Seed: LVVVGACGV (KRAS G12C)
FVVQGECGV

SEQ ID NO: 1260 - protein, 9 aa, synthetic construct
  source 1..9: note = Seed: LVVVGACGV (KRAS G12C)
FVVQGGCGC

SEQ ID NO: 1261 - protein, 9 aa, synthetic construct
  source 1..9: note = Seed: LVVVGACGV (KRAS G12C)
FVVQGGCGF

SEQ ID NO: 1262 - protein, 9 aa, synthetic construct
  source 1..9: note = Seed: LVVVGACGV (KRAS G12C)
FVVQGGCGG

SEQ ID NO: 1263 - protein, 9 aa, synthetic construct
  source 1..9: note = Seed: LVVVGACGV (KRAS G12C)
FVVQGGCGH

SEQ ID NO: 1264 - protein, 9 aa, synthetic construct
  source 1..9: note = Seed: LVVVGACGV (KRAS G12C)
FVVQGGCGM

SEQ ID NO: 1265 - protein, 9 aa, synthetic construct
  source 1..9: note = Seed: LVVVGACGV (KRAS G12C)
FVVQGGCGN

SEQ ID NO: 1266 - protein, 9 aa, synthetic construct
  source 1..9: note = Seed: LVVVGACGV (KRAS G12C)
FVVQGGCGP

SEQ ID NO: 1267 - protein, 9 aa, synthetic construct
  source 1..9: note = Seed: LVVVGACGV (KRAS G12C)
FVVQGGCGQ

SEQ ID NO: 1268 - protein, 9 aa, synthetic construct
  source 1..9: note = Seed: LVVVGACGV (KRAS G12C)
FVVQGGCGS

SEQ ID NO: 1269 - protein, 9 aa, synthetic construct
  source 1..9: note = Seed: LVVVGACGV (KRAS G12C)
FVVQGGCGT

SEQ ID NO: 1270 - protein, 9 aa, synthetic construct
  source 1..9: note = Seed: LVVVGACGV (KRAS G12C)
FVVQGGCGY

SEQ ID NO: 1271 - protein, 9 aa, synthetic construct
  source 1..9: note = Seed: LVVVGACGV (KRAS G12C)
FVVQGHCGA

SEQ ID NO: 1272 - protein, 9 aa, synthetic construct
  source 1..9: note = Seed: LVVVGACGV (KRAS G12C)
FVVQGHCGI

SEQ ID NO: 1273 - protein, 9 aa, synthetic construct
  source 1..9: note = Seed: LVVVGACGV (KRAS G12C)
FVVQGHCGL

SEQ ID NO: 1274 - protein, 9 aa, synthetic construct
  source 1..9: note = Seed: LVVVGACGV (KRAS G12C)
FVVQGHCGM

SEQ ID NO: 1275 - protein, 9 aa, synthetic construct
  source 1..9: note = Seed: LVVVGACGV (KRAS G12C)
FVVQGHCGV

SEQ ID NO: 1276 - protein, 9 aa, synthetic construct
  source 1..9: note = Seed: LVVVGACGV (KRAS G12C)
FVVQGICGA

SEQ ID NO: 1277 - protein, 9 aa, synthetic construct
  source 1..9: note = Seed: LVVVGACGV (KRAS G12C)
FVVQGICGH

SEQ ID NO: 1278 - protein, 9 aa, synthetic construct
  source 1..9: note = Seed: LVVVGACGV (KRAS G12C)
FVVQGICGI

SEQ ID NO: 1279 - protein, 9 aa, synthetic construct
  source 1..9: note = Seed: LVVVGACGV (KRAS G12C)
FVVQGICGL

SEQ ID NO: 1280 - protein, 9 aa, synthetic construct
  source 1..9: note = Seed: LVVVGACGV (KRAS G12C)
FVVQGICGM

SEQ ID NO: 1281 - protein, 9 aa, synthetic construct
  source 1..9: note = Seed: LVVVGACGV (KRAS G12C)
FVVQGICGN

SEQ ID NO: 1282 - protein, 9 aa, synthetic construct
  source 1..9: note = Seed: LVVVGACGV (KRAS G12C)
FVVQGICGS

SEQ ID NO: 1283 - protein, 9 aa, synthetic construct
  source 1..9: note = Seed: LVVVGACGV (KRAS G12C)
FVVQGICGT

SEQ ID NO: 1284 - protein, 9 aa, synthetic construct
  source 1..9: note = Seed: LVVVGACGV (KRAS G12C)
FVVQGICGV

SEQ ID NO: 1285 - protein, 9 aa, synthetic construct
  source 1..9: note = Seed: LVVVGACGV (KRAS G12C)
FVVQGLCGA

SEQ ID NO: 1286 - protein, 9 aa, synthetic construct
  source 1..9: note = Seed: LVVVGACGV (KRAS G12C)
FVVQGLCGL

SEQ ID NO: 1287 - protein, 9 aa, synthetic construct
  source 1..9: note = Seed: LVVVGACGV (KRAS G12C)
FVVQGLCGM

SEQ ID NO: 1288 - protein, 9 aa, synthetic construct
  source 1..9: note = Seed: LVVVGACGV (KRAS G12C)
FVVQGLCGN

SEQ ID NO: 1289 - protein, 9 aa, synthetic construct
  source 1..9: note = Seed: LVVVGACGV (KRAS G12C)
FVVQGLCGV

SEQ ID NO: 1290 - protein, 9 aa, synthetic construct
  source 1..9: note = Seed: LVVVGACGV (KRAS G12C)
FVVQGMCGA

SEQ ID NO: 1291 - protein, 9 aa, synthetic construct
  source 1..9: note = Seed: LVVVGACGV (KRAS G12C)
FVVQGMCGI

SEQ ID NO: 1292 - protein, 9 aa, synthetic construct
  source 1..9: note = Seed: LVVVGACGV (KRAS G12C)
FVVQGMCGL

SEQ ID NO: 1293 - protein, 9 aa, synthetic construct
  source 1..9: note = Seed: LVVVGACGV (KRAS G12C)
FVVQGMCGM

SEQ ID NO: 1294 - protein, 9 aa, synthetic construct
  source 1..9: note = Seed: LVVVGACGV (KRAS G12C)
FVVQGMCGV

SEQ ID NO: 1295 - protein, 9 aa, synthetic construct
  source 1..9: note = Seed: LVVVGACGV (KRAS G12C)
FVVQGNCGA

SEQ ID NO: 1296 - protein, 9 aa, synthetic construct
  source 1..9: note = Seed: LVVVGACGV (KRAS G12C)
FVVQGNCGC

SEQ ID NO: 1297 - protein, 9 aa, synthetic construct
  source 1..9: note = Seed: LVVVGACGV (KRAS G12C)
FVVQGNCGF

SEQ ID NO: 1298 - protein, 9 aa, synthetic construct
  source 1..9: note = Seed: LVVVGACGV (KRAS G12C)
FVVQGNCGG

SEQ ID NO: 1299 - protein, 9 aa, synthetic construct
  source 1..9: note = Seed: LVVVGACGV (KRAS G12C)
FVVQGNCGH

SEQ ID NO: 1300 - protein, 9 aa, synthetic construct
  source 1..9: note = Seed: LVVVGACGV (KRAS G12C)
FVVQGNCGM

SEQ ID NO: 1301 - protein, 9 aa, synthetic construct
  source 1..9: note = Seed: LVVVGACGV (KRAS G12C)
FVVQGNCGN

SEQ ID NO: 1302 - protein, 9 aa, synthetic construct
  source 1..9: note = Seed: LVVVGACGV (KRAS G12C)
FVVQGNCGQ

SEQ ID NO: 1303 - protein, 9 aa, synthetic construct
  source 1..9: note = Seed: LVVVGACGV (KRAS G12C)
FVVQGNCGS

SEQ ID NO: 1304 - protein, 9 aa, synthetic construct
  source 1..9: note = Seed: LVVVGACGV (KRAS G12C)
FVVQGNCGT

SEQ ID NO: 1305 - protein, 9 aa, synthetic construct
  source 1..9: note = Seed: LVVVGACGV (KRAS G12C)
FVVQGNCGY

SEQ ID NO: 1306 - protein, 9 aa, synthetic construct
  source 1..9: note = Seed: LVVVGACGV (KRAS G12C)
FVVQGPCGA

SEQ ID NO: 1307 - protein, 9 aa, synthetic construct
  source 1..9: note = Seed: LVVVGACGV (KRAS G12C)
FVVQGPCGF

SEQ ID NO: 1308 - protein, 9 aa, synthetic construct
  source 1..9: note = Seed: LVVVGACGV (KRAS G12C)
FVVQGPCGI

SEQ ID NO: 1309 - protein, 9 aa, synthetic construct
  source 1..9: note = Seed: LVVVGACGV (KRAS G12C)
FVVQGPCGM

SEQ ID NO: 1310 - protein, 9 aa, synthetic construct
  source 1..9: note = Seed: LVVVGACGV (KRAS G12C)
FVVQGPCGN

SEQ ID NO: 1311 - protein, 9 aa, synthetic construct
  source 1..9: note = Seed: LVVVGACGV (KRAS G12C)
FVVQGPCGS

SEQ ID NO: 1312 - protein, 9 aa, synthetic construct
  source 1..9: note = Seed: LVVVGACGV (KRAS G12C)
FVVQGPCGT

SEQ ID NO: 1313 - protein, 9 aa, synthetic construct
  source 1..9: note = Seed: LVVVGACGV (KRAS G12C)
FVVQGPCGV

SEQ ID NO: 1314 - protein, 9 aa, synthetic construct
  source 1..9: note = Seed: LVVVGACGV (KRAS G12C)
FVVQGPCGY

SEQ ID NO: 1315 - protein, 9 aa, synthetic construct
  source 1..9: note = Seed: LVVVGACGV (KRAS G12C)
FVVQGQCGA

SEQ ID NO: 1316 - protein, 9 aa, synthetic construct
  source 1..9: note = Seed: LVVVGACGV (KRAS G12C)
FVVQGQCGI

SEQ ID NO: 1317 - protein, 9 aa, synthetic construct
  source 1..9: note = Seed: LVVVGACGV (KRAS G12C)
FVVQGQCGL

SEQ ID NO: 1318 - protein, 9 aa, synthetic construct
  source 1..9: note = Seed: LVVVGACGV (KRAS G12C)
FVVQGQCGM

SEQ ID NO: 1319 - protein, 9 aa, synthetic construct
  source 1..9: note = Seed: LVVVGACGV (KRAS G12C)
FVVQGQCGV

SEQ ID NO: 1320 - protein, 9 aa, synthetic construct
  source 1..9: note = Seed: LVVVGACGV (KRAS G12C)
FVVQGRCGA

SEQ ID NO: 1321 - protein, 9 aa, synthetic construct
  source 1..9: note = Seed: LVVVGACGV (KRAS G12C)
FVVQGSCGC

SEQ ID NO: 1322 - protein, 9 aa, synthetic construct
  source 1..9: note = Seed: LVVVGACGV (KRAS G12C)
FVVQGSCGF

SEQ ID NO: 1323 - protein, 9 aa, synthetic construct
  source 1..9: note = Seed: LVVVGACGV (KRAS G12C)
FVVQGSCGG

SEQ ID NO: 1324 - protein, 9 aa, synthetic construct
  source 1..9: note = Seed: LVVVGACGV (KRAS G12C)
FVVQGSCGH

SEQ ID NO: 1325 - protein, 9 aa, synthetic construct
  source 1..9: note = Seed: LVVVGACGV (KRAS G12C)
FVVQGSCGN

SEQ ID NO: 1326 - protein, 9 aa, synthetic construct
  source 1..9: note = Seed: LVVVGACGV (KRAS G12C)
FVVQGSCGP

SEQ ID NO: 1327 - protein, 9 aa, synthetic construct
  source 1..9: note = Seed: LVVVGACGV (KRAS G12C)
FVVQGSCGQ

SEQ ID NO: 1328 - protein, 9 aa, synthetic construct
  source 1..9: note = Seed: LVVVGACGV (KRAS G12C)
FVVQGSCGS

SEQ ID NO: 1329 - protein, 9 aa, synthetic construct
  source 1..9: note = Seed: LVVVGACGV (KRAS G12C)
FVVQGSCGT

SEQ ID NO: 1330 - protein, 9 aa, synthetic construct
  source 1..9: note = Seed: LVVVGACGV (KRAS G12C)
FVVQGSCGY

SEQ ID NO: 1331 - protein, 9 aa, synthetic construct
  source 1..9: note = Seed: LVVVGACGV (KRAS G12C)
FVVQGTCGA

SEQ ID NO: 1332 - protein, 9 aa, synthetic construct
  source 1..9: note = Seed: LVVVGACGV (KRAS G12C)
FVVQGTCGF

SEQ ID NO: 1333 - protein, 9 aa, synthetic construct
  source 1..9: note = Seed: LVVVGACGV (KRAS G12C)
FVVQGTCGG

SEQ ID NO: 1334 - protein, 9 aa, synthetic construct
  source 1..9: note = Seed: LVVVGACGV (KRAS G12C)
FVVQGTCGH

SEQ ID NO: 1335 - protein, 9 aa, synthetic construct
  source 1..9: note = Seed: LVVVGACGV (KRAS G12C)
FVVQGTCGI

SEQ ID NO: 1336 - protein, 9 aa, synthetic construct
  source 1..9: note = Seed: LVVVGACGV (KRAS G12C)
FVVQGTCGL

SEQ ID NO: 1337 - protein, 9 aa, synthetic construct
  source 1..9: note = Seed: LVVVGACGV (KRAS G12C)
FVVQGTCGM

SEQ ID NO: 1338 - protein, 9 aa, synthetic construct
  source 1..9: note = Seed: LVVVGACGV (KRAS G12C)
FVVQGTCGN

SEQ ID NO: 1339 - protein, 9 aa, synthetic construct
  source 1..9: note = Seed: LVVVGACGV (KRAS G12C)
FVVQGTCGS

SEQ ID NO: 1340 - protein, 9 aa, synthetic construct
  source 1..9: note = Seed: LVVVGACGV (KRAS G12C)
FVVQGTCGT

SEQ ID NO: 1341 - protein, 9 aa, synthetic construct
  source 1..9: note = Seed: LVVVGACGV (KRAS G12C)
FVVQGTCGV

SEQ ID NO: 1342 - protein, 9 aa, synthetic construct
  source 1..9: note = Seed: LVVVGACGV (KRAS G12C)
FVVQGTCGY

SEQ ID NO: 1343 - protein, 9 aa, synthetic construct
  source 1..9: note = Seed: LVVVGACGV (KRAS G12C)
FVVQGVCGA

SEQ ID NO: 1344 - protein, 9 aa, synthetic construct
  source 1..9: note = Seed: LVVVGACGV (KRAS G12C)
FVVQGVCGF

SEQ ID NO: 1345 - protein, 9 aa, synthetic construct
  source 1..9: note = Seed: LVVVGACGV (KRAS G12C)
FVVQGVCGG

SEQ ID NO: 1346 - protein, 9 aa, synthetic construct
  source 1..9: note = Seed: LVVVGACGV (KRAS G12C)
FVVQGVCGH

SEQ ID NO: 1347 - protein, 9 aa, synthetic construct
  source 1..9: note = Seed: LVVVGACGV (KRAS G12C)
FVVQGVCGI

SEQ ID NO: 1348 - protein, 9 aa, synthetic construct
  source 1..9: note = Seed: LVVVGACGV (KRAS G12C)
FVVQGVCGL

SEQ ID NO: 1349 - protein, 9 aa, synthetic construct
  source 1..9: note = Seed: LVVVGACGV (KRAS G12C)
FVVQGVCGM

SEQ ID NO: 1350 - protein, 9 aa, synthetic construct
  source 1..9: note = Seed: LVVVGACGV (KRAS G12C)
FVVQGVCGN

SEQ ID NO: 1351 - protein, 9 aa, synthetic construct
  source 1..9: note = Seed: LVVVGACGV (KRAS G12C)
FVVQGVCGS

SEQ ID NO: 1352 - protein, 9 aa, synthetic construct
  source 1..9: note = Seed: LVVVGACGV (KRAS G12C)
FVVQGVCGT

SEQ ID NO: 1353 - protein, 9 aa, synthetic construct
  source 1..9: note = Seed: LVVVGACGV (KRAS G12C)
FVVQGVCGV

SEQ ID NO: 1354 - protein, 9 aa, synthetic construct
  source 1..9: note = Seed: LVVVGACGV (KRAS G12C)
FVVQGVCGY

SEQ ID NO: 1355 - protein, 9 aa, synthetic construct
  source 1..9: note = Seed: LVVVGACGV (KRAS G12C)
FVVRGACGI

SEQ ID NO: 1356 - protein, 9 aa, synthetic construct
  source 1..9: note = Seed: LVVVGACGV (KRAS G12C)
FVVRGACGL

SEQ ID NO: 1357 - protein, 9 aa, synthetic construct
  source 1..9: note = Seed: LVVVGACGV (KRAS G12C)
FVVRGACGM

SEQ ID NO: 1358 - protein, 9 aa, synthetic construct
  source 1..9: note = Seed: LVVVGACGV (KRAS G12C)
FVVRGACGV

SEQ ID NO: 1359 - protein, 9 aa, synthetic construct
  source 1..9: note = Seed: LVVVGACGV (KRAS G12C)
FVVRGSCGL

SEQ ID NO: 1360 - protein, 9 aa, synthetic construct
  source 1..9: note = Seed: LVVVGACGV (KRAS G12C)
FVVSGACGC

SEQ ID NO: 1361 - protein, 9 aa, synthetic construct
  source 1..9: note = Seed: LVVVGACGV (KRAS G12C)
FVVSGACGF

SEQ ID NO: 1362 - protein, 9 aa, synthetic construct
  source 1..9: note = Seed: LVVVGACGV (KRAS G12C)
FVVSGACGG

SEQ ID NO: 1363 - protein, 9 aa, synthetic construct
  source 1..9: note = Seed: LVVVGACGV (KRAS G12C)
FVVSGACGH

SEQ ID NO: 1364 - protein, 9 aa, synthetic construct
  source 1..9: note = Seed: LVVVGACGV (KRAS G12C)
FVVSGACGM

SEQ ID NO: 1365 - protein, 9 aa, synthetic construct
  source 1..9: note = Seed: LVVVGACGV (KRAS G12C)
FVVSGACGN

SEQ ID NO: 1366 - protein, 9 aa, synthetic construct
  source 1..9: note = Seed: LVVVGACGV (KRAS G12C)
FVVSGACGQ

SEQ ID NO: 1367 - protein, 9 aa, synthetic construct
  source 1..9: note = Seed: LVVVGACGV (KRAS G12C)
FVVSGACGS

SEQ ID NO: 1368 - protein, 9 aa, synthetic construct
  source 1..9: note = Seed: LVVVGACGV (KRAS G12C)
FVVSGACGT

SEQ ID NO: 1369 - protein, 9 aa, synthetic construct
  source 1..9: note = Seed: LVVVGACGV (KRAS G12C)
FVVSGACGV

SEQ ID NO: 1370 - protein, 9 aa, synthetic construct
  source 1..9: note = Seed: LVVVGACGV (KRAS G12C)
FVVSGACGY

SEQ ID NO: 1371 - protein, 9 aa, synthetic construct
  source 1..9: note = Seed: LVVVGACGV (KRAS G12C)
FVVSGGCGA

SEQ ID NO: 1372 - protein, 9 aa, synthetic construct
  source 1..9: note = Seed: LVVVGACGV (KRAS G12C)
FVVSGGCGF

SEQ ID NO: 1373 - protein, 9 aa, synthetic construct
  source 1..9: note = Seed: LVVVGACGV (KRAS G12C)
FVVSGGCGI

SEQ ID NO: 1374 - protein, 9 aa, synthetic construct
  source 1..9: note = Seed: LVVVGACGV (KRAS G12C)
FVVSGGCGM

SEQ ID NO: 1375 - protein, 9 aa, synthetic construct
  source 1..9: note = Seed: LVVVGACGV (KRAS G12C)
FVVSGGCGN

SEQ ID NO: 1376 - protein, 9 aa, synthetic construct
  source 1..9: note = Seed: LVVVGACGV (KRAS G12C)
FVVSGGCGS

SEQ ID NO: 1377 - protein, 9 aa, synthetic construct
  source 1..9: note = Seed: LVVVGACGV (KRAS G12C)
FVVSGGCGT

SEQ ID NO: 1378 - protein, 9 aa, synthetic construct
  source 1..9: note = Seed: LVVVGACGV (KRAS G12C)
FVVSGGCGV

SEQ ID NO: 1379 - protein, 9 aa, synthetic construct
  source 1..9: note = Seed: LVVVGACGV (KRAS G12C)
FVVSGGCGY

SEQ ID NO: 1380 - protein, 9 aa, synthetic construct
  source 1..9: note = Seed: LVVVGACGV (KRAS G12C)
FVVSGICGA

SEQ ID NO: 1381 - protein, 9 aa, synthetic construct
  source 1..9: note = Seed: LVVVGACGV (KRAS G12C)
FVVSGICGI

SEQ ID NO: 1382 - protein, 9 aa, synthetic construct
  source 1..9: note = Seed: LVVVGACGV (KRAS G12C)
FVVSGICGL

SEQ ID NO: 1383 - protein, 9 aa, synthetic construct
  source 1..9: note = Seed: LVVVGACGV (KRAS G12C)
FVVSGICGN

SEQ ID NO: 1384 - protein, 9 aa, synthetic construct
  source 1..9: note = Seed: LVVVGACGV (KRAS G12C)
FVVSGNCGA

SEQ ID NO: 1385 - protein, 9 aa, synthetic construct
  source 1..9: note = Seed: LVVVGACGV (KRAS G12C)
FVVSGNCGF

SEQ ID NO: 1386 - protein, 9 aa, synthetic construct
  source 1..9: note = Seed: LVVVGACGV (KRAS G12C)
FVVSGNCGG

SEQ ID NO: 1387 - protein, 9 aa, synthetic construct
  source 1..9: note = Seed: LVVVGACGV (KRAS G12C)
FVVSGNCGI

SEQ ID NO: 1388 - protein, 9 aa, synthetic construct
  source 1..9: note = Seed: LVVVGACGV (KRAS G12C)
FVVSGNCGL

SEQ ID NO: 1389 - protein, 9 aa, synthetic construct
  source 1..9: note = Seed: LVVVGACGV (KRAS G12C)
FVVSGNCGM

SEQ ID NO: 1390 - protein, 9 aa, synthetic construct
  source 1..9: note = Seed: LVVVGACGV (KRAS G12C)
FVVSGNCGS

SEQ ID NO: 1391 - protein, 9 aa, synthetic construct
  source 1..9: note = Seed: LVVVGACGV (KRAS G12C)
FVVSGNCGT

SEQ ID NO: 1392 - protein, 9 aa, synthetic construct
  source 1..9: note = Seed: LVVVGACGV (KRAS G12C)
FVVSGNCGV

SEQ ID NO: 1393 - protein, 9 aa, synthetic construct
  source 1..9: note = Seed: LVVVGACGV (KRAS G12C)
FVVSGPCGA

SEQ ID NO: 1394 - protein, 9 aa, synthetic construct
  source 1..9: note = Seed: LVVVGACGV (KRAS G12C)
FVVSGPCGF

SEQ ID NO: 1395 - protein, 9 aa, synthetic construct
  source 1..9: note = Seed: LVVVGACGV (KRAS G12C)
FVVSGPCGI

SEQ ID NO: 1396 - protein, 9 aa, synthetic construct
  source 1..9: note = Seed: LVVVGACGV (KRAS G12C)
FVVSGPCGL

SEQ ID NO: 1397 - protein, 9 aa, synthetic construct
  source 1..9: note = Seed: LVVVGACGV (KRAS G12C)
FVVSGPCGM

SEQ ID NO: 1398 - protein, 9 aa, synthetic construct
  source 1..9: note = Seed: LVVVGACGV (KRAS G12C)
FVVSGPCGN

SEQ ID NO: 1399 - protein, 9 aa, synthetic construct
  source 1..9: note = Seed: LVVVGACGV (KRAS G12C)
FVVSGPCGS

SEQ ID NO: 1400 - protein, 9 aa, synthetic construct
  source 1..9: note = Seed: LVVVGACGV (KRAS G12C)
FVVSGPCGT

SEQ ID NO: 1401 - protein, 9 aa, synthetic construct
  source 1..9: note = Seed: LVVVGACGV (KRAS G12C)
FVVSGPCGV

SEQ ID NO: 1402 - protein, 9 aa, synthetic construct
  source 1..9: note = Seed: LVVVGACGV (KRAS G12C)
FVVSGSCGA

SEQ ID NO: 1403 - protein, 9 aa, synthetic construct
  source 1..9: note = Seed: LVVVGACGV (KRAS G12C)
FVVSGSCGF

SEQ ID NO: 1404 - protein, 9 aa, synthetic construct
  source 1..9: note = Seed: LVVVGACGV (KRAS G12C)
FVVSGSCGG

SEQ ID NO: 1405 - protein, 9 aa, synthetic construct
  source 1..9: note = Seed: LVVVGACGV (KRAS G12C)
FVVSGSCGI

SEQ ID NO: 1406 - protein, 9 aa, synthetic construct
  source 1..9: note = Seed: LVVVGACGV (KRAS G12C)
FVVSGSCGM

SEQ ID NO: 1407 - protein, 9 aa, synthetic construct
  source 1..9: note = Seed: LVVVGACGV (KRAS G12C)
FVVSGSCGN

SEQ ID NO: 1408 - protein, 9 aa, synthetic construct
  source 1..9: note = Seed: LVVVGACGV (KRAS G12C)
FVVSGSCGS

SEQ ID NO: 1409 - protein, 9 aa, synthetic construct
  source 1..9: note = Seed: LVVVGACGV (KRAS G12C)
FVVSGSCGT

SEQ ID NO: 1410 - protein, 9 aa, synthetic construct
  source 1..9: note = Seed: LVVVGACGV (KRAS G12C)
FVVSGSCGV

SEQ ID NO: 1411 - protein, 9 aa, synthetic construct
  source 1..9: note = Seed: LVVVGACGV (KRAS G12C)
FVVSGSCGY

SEQ ID NO: 1412 - protein, 9 aa, synthetic construct
  source 1..9: note = Seed: LVVVGACGV (KRAS G12C)
FVVSGTCGA

SEQ ID NO: 1413 - protein, 9 aa, synthetic construct
  source 1..9: note = Seed: LVVVGACGV (KRAS G12C)
FVVSGTCGF

SEQ ID NO: 1414 - protein, 9 aa, synthetic construct
  source 1..9: note = Seed: LVVVGACGV (KRAS G12C)
FVVSGTCGI

SEQ ID NO: 1415 - protein, 9 aa, synthetic construct
  source 1..9: note = Seed: LVVVGACGV (KRAS G12C)
FVVSGTCGL

SEQ ID NO: 1416 - protein, 9 aa, synthetic construct
  source 1..9: note = Seed: LVVVGACGV (KRAS G12C)
FVVSGTCGM

SEQ ID NO: 1417 - protein, 9 aa, synthetic construct
  source 1..9: note = Seed: LVVVGACGV (KRAS G12C)
FVVSGTCGN

SEQ ID NO: 1418 - protein, 9 aa, synthetic construct
  source 1..9: note = Seed: LVVVGACGV (KRAS G12C)
FVVSGTCGS

SEQ ID NO: 1419 - protein, 9 aa, synthetic construct
  source 1..9: note = Seed: LVVVGACGV (KRAS G12C)
FVVSGTCGT

SEQ ID NO: 1420 - protein, 9 aa, synthetic construct
  source 1..9: note = Seed: LVVVGACGV (KRAS G12C)
FVVSGTCGV

SEQ ID NO: 1421 - protein, 9 aa, synthetic construct
  source 1..9: note = Seed: LVVVGACGV (KRAS G12C)
FVVSGVCGA

SEQ ID NO: 1422 - protein, 9 aa, synthetic construct
  source 1..9: note = Seed: LVVVGACGV (KRAS G12C)
FVVSGVCGI

SEQ ID NO: 1423 - protein, 9 aa, synthetic construct
  source 1..9: note = Seed: LVVVGACGV (KRAS G12C)
FVVSGVCGL

SEQ ID NO: 1424 - protein, 9 aa, synthetic construct
  source 1..9: note = Seed: LVVVGACGV (KRAS G12C)
FVVSGVCGM

SEQ ID NO: 1425 - protein, 9 aa, synthetic construct
  source 1..9: note = Seed: LVVVGACGV (KRAS G12C)
FVVSGVCGN

SEQ ID NO: 1426 - protein, 9 aa, synthetic construct
  source 1..9: note = Seed: LVVVGACGV (KRAS G12C)
FVVSGVCGS

SEQ ID NO: 1427 - protein, 9 aa, synthetic construct
  source 1..9: note = Seed: LVVVGACGV (KRAS G12C)
FVVSGVCGV

SEQ ID NO: 1428 - protein, 9 aa, synthetic construct
  source 1..9: note = Seed: LVVVGACGV (KRAS G12C)
FVVTGACGA

SEQ ID NO: 1429 - protein, 9 aa, synthetic construct
  source 1..9: note = Seed: LVVVGACGV (KRAS G12C)
FVVTGACGF

SEQ ID NO: 1430 - protein, 9 aa, synthetic construct
  source 1..9: note = Seed: LVVVGACGV (KRAS G12C)
FVVTGACGG

SEQ ID NO: 1431 - protein, 9 aa, synthetic construct
  source 1..9: note = Seed: LVVVGACGV (KRAS G12C)
FVVTGACGH

SEQ ID NO: 1432 - protein, 9 aa, synthetic construct
  source 1..9: note = Seed: LVVVGACGV (KRAS G12C)
FVVTGACGI

SEQ ID NO: 1433 - protein, 9 aa, synthetic construct
  source 1..9: note = Seed: LVVVGACGV (KRAS G12C)
FVVTGACGL

SEQ ID NO: 1434 - protein, 9 aa, synthetic construct
  source 1..9: note = Seed: LVVVGACGV (KRAS G12C)
FVVTGACGM

SEQ ID NO: 1435 - protein, 9 aa, synthetic construct
  source 1..9: note = Seed: LVVVGACGV (KRAS G12C)
FVVTGACGN

SEQ ID NO: 1436 - protein, 9 aa, synthetic construct
  source 1..9: note = Seed: LVVVGACGV (KRAS G12C)
FVVTGACGS

SEQ ID NO: 1437 - protein, 9 aa, synthetic construct
  source 1..9: note = Seed: LVVVGACGV (KRAS G12C)
FVVTGACGT

SEQ ID NO: 1438 - protein, 9 aa, synthetic construct
  source 1..9: note = Seed: LVVVGACGV (KRAS G12C)
FVVTGACGV

SEQ ID NO: 1439 - protein, 9 aa, synthetic construct
  source 1..9: note = Seed: LVVVGACGV (KRAS G12C)
FVVTGACGY

SEQ ID NO: 1440 - protein, 9 aa, synthetic construct
  source 1..9: note = Seed: LVVVGACGV (KRAS G12C)
FVVTGGCGA

SEQ ID NO: 1441 - protein, 9 aa, synthetic construct
  source 1..9: note = Seed: LVVVGACGV (KRAS G12C)
FVVTGGCGF

SEQ ID NO: 1442 - protein, 9 aa, synthetic construct
  source 1..9: note = Seed: LVVVGACGV (KRAS G12C)
FVVTGGCGI

SEQ ID NO: 1443 - protein, 9 aa, synthetic construct
  source 1..9: note = Seed: LVVVGACGV (KRAS G12C)
FVVTGGCGL

SEQ ID NO: 1444 - protein, 9 aa, synthetic construct
  source 1..9: note = Seed: LVVVGACGV (KRAS G12C)
FVVTGGCGM

SEQ ID NO: 1445 - protein, 9 aa, synthetic construct
  source 1..9: note = Seed: LVVVGACGV (KRAS G12C)
FVVTGGCGS

SEQ ID NO: 1446 - protein, 9 aa, synthetic construct
  source 1..9: note = Seed: LVVVGACGV (KRAS G12C)
FVVTGGCGT

SEQ ID NO: 1447 - protein, 9 aa, synthetic construct
  source 1..9: note = Seed: LVVVGACGV (KRAS G12C)
FVVTGGCGV

SEQ ID NO: 1448 - protein, 9 aa, synthetic construct
  source 1..9: note = Seed: LVVVGACGV (KRAS G12C)
FVVTGHCGL

SEQ ID NO: 1449 - protein, 9 aa, synthetic construct
  source 1..9: note = Seed: LVVVGACGV (KRAS G12C)
FVVTGICGN

SEQ ID NO: 1450 - protein, 9 aa, synthetic construct
  source 1..9: note = Seed: LVVVGACGV (KRAS G12C)
FVVTGNCGA

SEQ ID NO: 1451 - protein, 9 aa, synthetic construct
  source 1..9: note = Seed: LVVVGACGV (KRAS G12C)
FVVTGNCGF

SEQ ID NO: 1452 - protein, 9 aa, synthetic construct
  source 1..9: note = Seed: LVVVGACGV (KRAS G12C)
FVVTGNCGI

SEQ ID NO: 1453 - protein, 9 aa, synthetic construct
  source 1..9: note = Seed: LVVVGACGV (KRAS G12C)
FVVTGNCGL

SEQ ID NO: 1454 - protein, 9 aa, synthetic construct
  source 1..9: note = Seed: LVVVGACGV (KRAS G12C)
FVVTGNCGM

SEQ ID NO: 1455 - protein, 9 aa, synthetic construct
  source 1..9: note = Seed: LVVVGACGV (KRAS G12C)
FVVTGNCGS

SEQ ID NO: 1456 - protein, 9 aa, synthetic construct
  source 1..9: note = Seed: LVVVGACGV (KRAS G12C)
FVVTGNCGT

SEQ ID NO: 1457 - protein, 9 aa, synthetic construct
  source 1..9: note = Seed: LVVVGACGV (KRAS G12C)
FVVTGNCGV

SEQ ID NO: 1458 - protein, 9 aa, synthetic construct
  source 1..9: note = Seed: LVVVGACGV (KRAS G12C)
FVVTGPCGA

SEQ ID NO: 1459 - protein, 9 aa, synthetic construct
  source 1..9: note = Seed: LVVVGACGV (KRAS G12C)
FVVTGPCGF

SEQ ID NO: 1460 - protein, 9 aa, synthetic construct
  source 1..9: note = Seed: LVVVGACGV (KRAS G12C)
FVVTGPCGI

SEQ ID NO: 1461 - protein, 9 aa, synthetic construct
  source 1..9: note = Seed: LVVVGACGV (KRAS G12C)
FVVTGPCGL

SEQ ID NO: 1462 - protein, 9 aa, synthetic construct
  source 1..9: note = Seed: LVVVGACGV (KRAS G12C)
FVVTGPCGM

SEQ ID NO: 1463 - protein, 9 aa, synthetic construct
  source 1..9: note = Seed: LVVVGACGV (KRAS G12C)
FVVTGPCGN

SEQ ID NO: 1464 - protein, 9 aa, synthetic construct
  source 1..9: note = Seed: LVVVGACGV (KRAS G12C)
FVVTGPCGS

SEQ ID NO: 1465 - protein, 9 aa, synthetic construct
  source 1..9: note = Seed: LVVVGACGV (KRAS G12C)
FVVTGPCGT

SEQ ID NO: 1466 - protein, 9 aa, synthetic construct
  source 1..9: note = Seed: LVVVGACGV (KRAS G12C)
FVVTGPCGV

SEQ ID NO: 1467 - protein, 9 aa, synthetic construct
  source 1..9: note = Seed: LVVVGACGV (KRAS G12C)
FVVTGSCGA

SEQ ID NO: 1468 - protein, 9 aa, synthetic construct
  source 1..9: note = Seed: LVVVGACGV (KRAS G12C)
FVVTGSCGF

SEQ ID NO: 1469 - protein, 9 aa, synthetic construct
  source 1..9: note = Seed: LVVVGACGV (KRAS G12C)
FVVTGSCGG

SEQ ID NO: 1470 - protein, 9 aa, synthetic construct
  source 1..9: note = Seed: LVVVGACGV (KRAS G12C)
FVVTGSCGI

SEQ ID NO: 1471 - protein, 9 aa, synthetic construct
  source 1..9: note = Seed: LVVVGACGV (KRAS G12C)
FVVTGSCGL

SEQ ID NO: 1472 - protein, 9 aa, synthetic construct
  source 1..9: note = Seed: LVVVGACGV (KRAS G12C)
FVVTGSCGM

SEQ ID NO: 1473 - protein, 9 aa, synthetic construct
  source 1..9: note = Seed: LVVVGACGV (KRAS G12C)
FVVTGSCGN

SEQ ID NO: 1474 - protein, 9 aa, synthetic construct
  source 1..9: note = Seed: LVVVGACGV (KRAS G12C)
FVVTGSCGS

SEQ ID NO: 1475 - protein, 9 aa, synthetic construct
  source 1..9: note = Seed: LVVVGACGV (KRAS G12C)
FVVTGSCGT

SEQ ID NO: 1476 - protein, 9 aa, synthetic construct
  source 1..9: note = Seed: LVVVGACGV (KRAS G12C)
FVVTGSCGV

SEQ ID NO: 1477 - protein, 9 aa, synthetic construct
  source 1..9: note = Seed: LVVVGACGV (KRAS G12C)
FVVTGSCGY

SEQ ID NO: 1478 - protein, 9 aa, synthetic construct
  source 1..9: note = Seed: LVVVGACGV (KRAS G12C)
FVVTGTCGA

SEQ ID NO: 1479 - protein, 9 aa, synthetic construct
  source 1..9: note = Seed: LVVVGACGV (KRAS G12C)
FVVTGTCGF

SEQ ID NO: 1480 - protein, 9 aa, synthetic construct
  source 1..9: note = Seed: LVVVGACGV (KRAS G12C)
FVVTGTCGI

SEQ ID NO: 1481 - protein, 9 aa, synthetic construct
  source 1..9: note = Seed: LVVVGACGV (KRAS G12C)
FVVTGTCGL

SEQ ID NO: 1482 - protein, 9 aa, synthetic construct
  source 1..9: note = Seed: LVVVGACGV (KRAS G12C)
FVVTGTCGM

SEQ ID NO: 1483 - protein, 9 aa, synthetic construct
  source 1..9: note = Seed: LVVVGACGV (KRAS G12C)
FVVTGTCGN

SEQ ID NO: 1484 - protein, 9 aa, synthetic construct
  source 1..9: note = Seed: LVVVGACGV (KRAS G12C)
FVVTGTCGS

SEQ ID NO: 1485 - protein, 9 aa, synthetic construct
  source 1..9: note = Seed: LVVVGACGV (KRAS G12C)
FVVTGTCGT

SEQ ID NO: 1486 - protein, 9 aa, synthetic construct
  source 1..9: note = Seed: LVVVGACGV (KRAS G12C)
FVVTGTCGV

SEQ ID NO: 1487 - protein, 9 aa, synthetic construct
  source 1..9: note = Seed: LVVVGACGV (KRAS G12C)
FVVTGVCGA

SEQ ID NO: 1488 - protein, 9 aa, synthetic construct
  source 1..9: note = Seed: LVVVGACGV (KRAS G12C)
FVVTGVCGI

SEQ ID NO: 1489 - protein, 9 aa, synthetic construct
  source 1..9: note = Seed: LVVVGACGV (KRAS G12C)
FVVTGVCGL

SEQ ID NO: 1490 - protein, 9 aa, synthetic construct
  source 1..9: note = Seed: LVVVGACGV (KRAS G12C)
FVVTGVCGM

SEQ ID NO: 1491 - protein, 9 aa, synthetic construct
  source 1..9: note = Seed: LVVVGACGV (KRAS G12C)
FVVTGVCGN

SEQ ID NO: 1492 - protein, 9 aa, synthetic construct
  source 1..9: note = Seed: LVVVGACGV (KRAS G12C)
FVVTGVCGS

SEQ ID NO: 1493 - protein, 9 aa, synthetic construct
  source 1..9: note = Seed: LVVVGACGV (KRAS G12C)
FVVTGVCGV

SEQ ID NO: 1494 - protein, 9 aa, synthetic construct
  source 1..9: note = Seed: LVVVGACGV (KRAS G12C)
FVVVGACGD

SEQ ID NO: 1495 - protein, 9 aa, synthetic construct
  source 1..9: note = Seed: LVVVGACGV (KRAS G12C)
FVVVGACGE

SEQ ID NO: 1496 - protein, 9 aa, synthetic construct
  source 1..9: note = Seed: LVVVGACGV (KRAS G12C)
FVVVGACGF

SEQ ID NO: 1497 - protein, 9 aa, synthetic construct
  source 1..9: note = Seed: LVVVGACGV (KRAS G12C)
FVVVGACGG

SEQ ID NO: 1498 - protein, 9 aa, synthetic construct
  source 1..9: note = Seed: LVVVGACGV (KRAS G12C)
FVVVGACGH

SEQ ID NO: 1499 - protein, 9 aa, synthetic construct
  source 1..9: note = Seed: LVVVGACGV (KRAS G12C)
FVVVGACGI

SEQ ID NO: 1500 - protein, 9 aa, synthetic construct
  source 1..9: note = Seed: LVVVGACGV (KRAS G12C)
FVVVGACGK

SEQ ID NO: 1501 - protein, 9 aa, synthetic construct
  source 1..9: note = Seed: LVVVGACGV (KRAS G12C)
FVVVGACGL

SEQ ID NO: 1502 - protein, 9 aa, synthetic construct
  source 1..9: note = Seed: LVVVGACGV (KRAS G12C)
FVVVGACGM

SEQ ID NO: 1503 - protein, 9 aa, synthetic construct
  source 1..9: note = Seed: LVVVGACGV (KRAS G12C)
FVVVGACGN

SEQ ID NO: 1504 - protein, 9 aa, synthetic construct
  source 1..9: note = Seed: LVVVGACGV (KRAS G12C)
FVVVGACGP

SEQ ID NO: 1505 - protein, 9 aa, synthetic construct
  source 1..9: note = Seed: LVVVGACGV (KRAS G12C)
FVVVGACGQ

SEQ ID NO: 1506 - protein, 9 aa, synthetic construct
  source 1..9: note = Seed: LVVVGACGV (KRAS G12C)
FVVVGACGR

SEQ ID NO: 1507 - protein, 9 aa, synthetic construct
  source 1..9: note = Seed: LVVVGACGV (KRAS G12C)
FVVVGACGS

SEQ ID NO: 1508 - protein, 9 aa, synthetic construct
  source 1..9: note = Seed: LVVVGACGV (KRAS G12C)
FVVVGACGT

SEQ ID NO: 1509 - protein, 9 aa, synthetic construct
  source 1..9: note = Seed: LVVVGACGV (KRAS G12C)
FVVVGACGV

SEQ ID NO: 1510 - protein, 9 aa, synthetic construct
  source 1..9: note = Seed: LVVVGACGV (KRAS G12C)
FVVVGACGY

SEQ ID NO: 1511 - protein, 9 aa, synthetic construct
  source 1..9: note = Seed: LVVVGACGV (KRAS G12C)
FVVVGDCGL

SEQ ID NO: 1512 - protein, 9 aa, synthetic construct
  source 1..9: note = Seed: LVVVGACGV (KRAS G12C)
FVVVGDCGV

SEQ ID NO: 1513 - protein, 9 aa, synthetic construct
  source 1..9: note = Seed: LVVVGACGV (KRAS G12C)
FVVVGGCGA

SEQ ID NO: 1514 - protein, 9 aa, synthetic construct
  source 1..9: note = Seed: LVVVGACGV (KRAS G12C)
FVVVGGCGF

SEQ ID NO: 1515 - protein, 9 aa, synthetic construct
  source 1..9: note = Seed: LVVVGACGV (KRAS G12C)
FVVVGGCGG

SEQ ID NO: 1516 - protein, 9 aa, synthetic construct
  source 1..9: note = Seed: LVVVGACGV (KRAS G12C)
FVVVGGCGH

SEQ ID NO: 1517 - protein, 9 aa, synthetic construct
  source 1..9: note = Seed: LVVVGACGV (KRAS G12C)
FVVVGGCGI

SEQ ID NO: 1518 - protein, 9 aa, synthetic construct
  source 1..9: note = Seed: LVVVGACGV (KRAS G12C)
FVVVGGCGL

SEQ ID NO: 1519 - protein, 9 aa, synthetic construct
  source 1..9: note = Seed: LVVVGACGV (KRAS G12C)
FVVVGGCGM

SEQ ID NO: 1520 - protein, 9 aa, synthetic construct
  source 1..9: note = Seed: LVVVGACGV (KRAS G12C)
FVVVGGCGN

SEQ ID NO: 1521 - protein, 9 aa, synthetic construct
  source 1..9: note = Seed: LVVVGACGV (KRAS G12C)
FVVVGGCGP

SEQ ID NO: 1522 - protein, 9 aa, synthetic construct
  source 1..9: note = Seed: LVVVGACGV (KRAS G12C)
FVVVGGCGQ

SEQ ID NO: 1523 - protein, 9 aa, synthetic construct
  source 1..9: note = Seed: LVVVGACGV (KRAS G12C)
FVVVGGCGS

SEQ ID NO: 1524 - protein, 9 aa, synthetic construct
  source 1..9: note = Seed: LVVVGACGV (KRAS G12C)
FVVVGGCGT

SEQ ID NO: 1525 - protein, 9 aa, synthetic construct
  source 1..9: note = Seed: LVVVGACGV (KRAS G12C)
FVVVGGCGY

SEQ ID NO: 1526 - protein, 9 aa, synthetic construct
  source 1..9: note = Seed: LVVVGACGV (KRAS G12C)
FVVVGHCGA

SEQ ID NO: 1527 - protein, 9 aa, synthetic construct
  source 1..9: note = Seed: LVVVGACGV (KRAS G12C)
FVVVGHCGL

SEQ ID NO: 1528 - protein, 9 aa, synthetic construct
  source 1..9: note = Seed: LVVVGACGV (KRAS G12C)
FVVVGHCGM

SEQ ID NO: 1529 - protein, 9 aa, synthetic construct
  source 1..9: note = Seed: LVVVGACGV (KRAS G12C)
FVVVGHCGV

SEQ ID NO: 1530 - protein, 9 aa, synthetic construct
  source 1..9: note = Seed: LVVVGACGV (KRAS G12C)
FVVVGICGH

SEQ ID NO: 1531 - protein, 9 aa, synthetic construct
  source 1..9: note = Seed: LVVVGACGV (KRAS G12C)
FVVVGICGN

SEQ ID NO: 1532 - protein, 9 aa, synthetic construct
  source 1..9: note = Seed: LVVVGACGV (KRAS G12C)
FVVVGKCGA

SEQ ID NO: 1533 - protein, 9 aa, synthetic construct
  source 1..9: note = Seed: LVVVGACGV (KRAS G12C)
FVVVGKCGH

SEQ ID NO: 1534 - protein, 9 aa, synthetic construct
  source 1..9: note = Seed: LVVVGACGV (KRAS G12C)
FVVVGKCGR

SEQ ID NO: 1535 - protein, 9 aa, synthetic construct
  source 1..9: note = Seed: LVVVGACGV (KRAS G12C)
FVVVGKCGS

SEQ ID NO: 1536 - protein, 9 aa, synthetic construct
  source 1..9: note = Seed: LVVVGACGV (KRAS G12C)
FVVVGMCGN

SEQ ID NO: 1537 - protein, 9 aa, synthetic construct
  source 1..9: note = Seed: LVVVGACGV (KRAS G12C)
FVVVGNCGA

SEQ ID NO: 1538 - protein, 9 aa, synthetic construct
  source 1..9: note = Seed: LVVVGACGV (KRAS G12C)
FVVVGNCGF

SEQ ID NO: 1539 - protein, 9 aa, synthetic construct
  source 1..9: note = Seed: LVVVGACGV (KRAS G12C)
FVVVGNCGG

SEQ ID NO: 1540 - protein, 9 aa, synthetic construct
  source 1..9: note = Seed: LVVVGACGV (KRAS G12C)
FVVVGNCGH

SEQ ID NO: 1541 - protein, 9 aa, synthetic construct
  source 1..9: note = Seed: LVVVGACGV (KRAS G12C)
FVVVGNCGI

SEQ ID NO: 1542 - protein, 9 aa, synthetic construct
  source 1..9: note = Seed: LVVVGACGV (KRAS G12C)
FVVVGNCGL

SEQ ID NO: 1543 - protein, 9 aa, synthetic construct
  source 1..9: note = Seed: LVVVGACGV (KRAS G12C)
FVVVGNCGM

SEQ ID NO: 1544 - protein, 9 aa, synthetic construct
  source 1..9: note = Seed: LVVVGACGV (KRAS G12C)
FVVVGNCGN

SEQ ID NO: 1545 - protein, 9 aa, synthetic construct
  source 1..9: note = Seed: LVVVGACGV (KRAS G12C)
FVVVGNCGQ

SEQ ID NO: 1546 - protein, 9 aa, synthetic construct
  source 1..9: note = Seed: LVVVGACGV (KRAS G12C)
FVVVGNCGS

SEQ ID NO: 1547 - protein, 9 aa, synthetic construct
  source 1..9: note = Seed: LVVVGACGV (KRAS G12C)
FVVVGNCGT

SEQ ID NO: 1548 - protein, 9 aa, synthetic construct
  source 1..9: note = Seed: LVVVGACGV (KRAS G12C)
FVVVGNCGV

SEQ ID NO: 1549 - protein, 9 aa, synthetic construct
  source 1..9: note = Seed: LVVVGACGV (KRAS G12C)
FVVVGNCGY

SEQ ID NO: 1550 - protein, 9 aa, synthetic construct
  source 1..9: note = Seed: LVVVGACGV (KRAS G12C)
FVVVGPCGA

SEQ ID NO: 1551 - protein, 9 aa, synthetic construct
  source 1..9: note = Seed: LVVVGACGV (KRAS G12C)
FVVVGPCGC

SEQ ID NO: 1552 - protein, 9 aa, synthetic construct
  source 1..9: note = Seed: LVVVGACGV (KRAS G12C)
FVVVGPCGD

SEQ ID NO: 1553 - protein, 9 aa, synthetic construct
  source 1..9: note = Seed: LVVVGACGV (KRAS G12C)
FVVVGPCGE

SEQ ID NO: 1554 - protein, 9 aa, synthetic construct
  source 1..9: note = Seed: LVVVGACGV (KRAS G12C)
FVVVGPCGF

SEQ ID NO: 1555 - protein, 9 aa, synthetic construct
  source 1..9: note = Seed: LVVVGACGV (KRAS G12C)
FVVVGPCGG

SEQ ID NO: 1556 - protein, 9 aa, synthetic construct
  source 1..9: note = Seed: LVVVGACGV (KRAS G12C)
FVVVGPCGH

SEQ ID NO: 1557 - protein, 9 aa, synthetic construct
  source 1..9: note = Seed: LVVVGACGV (KRAS G12C)
FVVVGPCGI

SEQ ID NO: 1558 - protein, 9 aa, synthetic construct
  source 1..9: note = Seed: LVVVGACGV (KRAS G12C)
FVVVGPCGM

SEQ ID NO: 1559 - protein, 9 aa, synthetic construct
  source 1..9: note = Seed: LVVVGACGV (KRAS G12C)
FVVVGPCGN

SEQ ID NO: 1560 - protein, 9 aa, synthetic construct
  source 1..9: note = Seed: LVVVGACGV (KRAS G12C)
FVVVGPCGP

SEQ ID NO: 1561 - protein, 9 aa, synthetic construct
  source 1..9: note = Seed: LVVVGACGV (KRAS G12C)
FVVVGPCGQ

SEQ ID NO: 1562 - protein, 9 aa, synthetic construct
  source 1..9: note = Seed: LVVVGACGV (KRAS G12C)
FVVVGPCGS

SEQ ID NO: 1563 - protein, 9 aa, synthetic construct
  source 1..9: note = Seed: LVVVGACGV (KRAS G12C)
FVVVGPCGT

SEQ ID NO: 1564 - protein, 9 aa, synthetic construct
  source 1..9: note = Seed: LVVVGACGV (KRAS G12C)
FVVVGPCGY

SEQ ID NO: 1565 - protein, 9 aa, synthetic construct
  source 1..9: note = Seed: LVVVGACGV (KRAS G12C)
FVVVGQCGA

SEQ ID NO: 1566 - protein, 9 aa, synthetic construct
  source 1..9: note = Seed: LVVVGACGV (KRAS G12C)
FVVVGRCGA

SEQ ID NO: 1567 - protein, 9 aa, synthetic construct
  source 1..9: note = Seed: LVVVGACGV (KRAS G12C)
FVVVGRCGH

SEQ ID NO: 1568 - protein, 9 aa, synthetic construct
  source 1..9: note = Seed: LVVVGACGV (KRAS G12C)
FVVVGRCGK

SEQ ID NO: 1569 - protein, 9 aa, synthetic construct
  source 1..9: note = Seed: LVVVGACGV (KRAS G12C)
FVVVGRCGQ

SEQ ID NO: 1570 - protein, 9 aa, synthetic construct
  source 1..9: note = Seed: LVVVGACGV (KRAS G12C)
FVVVGRCGR

SEQ ID NO: 1571 - protein, 9 aa, synthetic construct
  source 1..9: note = Seed: LVVVGACGV (KRAS G12C)
FVVVGRCGS

SEQ ID NO: 1572 - protein, 9 aa, synthetic construct
  source 1..9: note = Seed: LVVVGACGV (KRAS G12C)
FVVVGSCGA

SEQ ID NO: 1573 - protein, 9 aa, synthetic construct
  source 1..9: note = Seed: LVVVGACGV (KRAS G12C)
FVVVGSCGF

SEQ ID NO: 1574 - protein, 9 aa, synthetic construct
  source 1..9: note = Seed: LVVVGACGV (KRAS G12C)
FVVVGSCGG

SEQ ID NO: 1575 - protein, 9 aa, synthetic construct
  source 1..9: note = Seed: LVVVGACGV (KRAS G12C)
FVVVGSCGH

SEQ ID NO: 1576 - protein, 9 aa, synthetic construct
  source 1..9: note = Seed: LVVVGACGV (KRAS G12C)
FVVVGSCGI

SEQ ID NO: 1577 - protein, 9 aa, synthetic construct
  source 1..9: note = Seed: LVVVGACGV (KRAS G12C)
FVVVGSCGK

SEQ ID NO: 1578 - protein, 9 aa, synthetic construct
  source 1..9: note = Seed: LVVVGACGV (KRAS G12C)
FVVVGSCGL

SEQ ID NO: 1579 - protein, 9 aa, synthetic construct
  source 1..9: note = Seed: LVVVGACGV (KRAS G12C)
FVVVGSCGM

SEQ ID NO: 1580 - protein, 9 aa, synthetic construct
  source 1..9: note = Seed: LVVVGACGV (KRAS G12C)
FVVVGSCGN

SEQ ID NO: 1581 - protein, 9 aa, synthetic construct
  source 1..9: note = Seed: LVVVGACGV (KRAS G12C)
FVVVGSCGP

SEQ ID NO: 1582 - protein, 9 aa, synthetic construct
  source 1..9: note = Seed: LVVVGACGV (KRAS G12C)
FVVVGSCGQ

SEQ ID NO: 1583 - protein, 9 aa, synthetic construct
  source 1..9: note = Seed: LVVVGACGV (KRAS G12C)
FVVVGSCGR

SEQ ID NO: 1584 - protein, 9 aa, synthetic construct
  source 1..9: note = Seed: LVVVGACGV (KRAS G12C)
FVVVGSCGS

SEQ ID NO: 1585 - protein, 9 aa, synthetic construct
  source 1..9: note = Seed: LVVVGACGV (KRAS G12C)
FVVVGSCGT

SEQ ID NO: 1586 - protein, 9 aa, synthetic construct
  source 1..9: note = Seed: LVVVGACGV (KRAS G12C)
FVVVGSCGV

SEQ ID NO: 1587 - protein, 9 aa, synthetic construct
  source 1..9: note = Seed: LVVVGACGV (KRAS G12C)
FVVVGSCGY

SEQ ID NO: 1588 - protein, 9 aa, synthetic construct
  source 1..9: note = Seed: LVVVGACGV (KRAS G12C)
FVVVGTCGA

SEQ ID NO: 1589 - protein, 9 aa, synthetic construct
  source 1..9: note = Seed: LVVVGACGV (KRAS G12C)
FVVVGTCGG

SEQ ID NO: 1590 - protein, 9 aa, synthetic construct
  source 1..9: note = Seed: LVVVGACGV (KRAS G12C)
FVVVGTCGH

SEQ ID NO: 1591 - protein, 9 aa, synthetic construct
  source 1..9: note = Seed: LVVVGACGV (KRAS G12C)
FVVVGTCGI

SEQ ID NO: 1592 - protein, 9 aa, synthetic construct
  source 1..9: note = Seed: LVVVGACGV (KRAS G12C)
FVVVGTCGL

SEQ ID NO: 1593 - protein, 9 aa, synthetic construct
  source 1..9: note = Seed: LVVVGACGV (KRAS G12C)
FVVVGTCGM

SEQ ID NO: 1594 - protein, 9 aa, synthetic construct
  source 1..9: note = Seed: LVVVGACGV (KRAS G12C)
FVVVGTCGN

SEQ ID NO: 1595 - protein, 9 aa, synthetic construct
  source 1..9: note = Seed: LVVVGACGV (KRAS G12C)
FVVVGTCGQ

SEQ ID NO: 1596 - protein, 9 aa, synthetic construct
  source 1..9: note = Seed: LVVVGACGV (KRAS G12C)
FVVVGTCGS

SEQ ID NO: 1597 - protein, 9 aa, synthetic construct
  source 1..9: note = Seed: LVVVGACGV (KRAS G12C)
FVVVGTCGT

SEQ ID NO: 1598 - protein, 9 aa, synthetic construct
  source 1..9: note = Seed: LVVVGACGV (KRAS G12C)
FVVVGTCGV

SEQ ID NO: 1599 - protein, 9 aa, synthetic construct
  source 1..9: note = Seed: LVVVGACGV (KRAS G12C)
FVVVGTCGY

SEQ ID NO: 1600 - protein, 9 aa, synthetic construct
  source 1..9: note = Seed: LVVVGACGV (KRAS G12C)
FVVVGVCGA

SEQ ID NO: 1601 - protein, 9 aa, synthetic construct
  source 1..9: note = Seed: LVVVGACGV (KRAS G12C)
FVVVGVCGH

SEQ ID NO: 1602 - protein, 9 aa, synthetic construct
  source 1..9: note = Seed: LVVVGACGV (KRAS G12C)
FVVVGVCGN

SEQ ID NO: 1603 - protein, 9 aa, synthetic construct
  source 1..9: note = Seed: LVVVGACGV (KRAS G12C)
FVVVGVCGS

SEQ ID NO: 1604 - protein, 9 aa, synthetic construct
  source 1..9: note = Seed: LVVVGACGV (KRAS G12C)
FVVWGACGA

SEQ ID NO: 1605 - protein, 9 aa, synthetic construct
  source 1..9: note = Seed: LVVVGACGV (KRAS G12C)
FVVWGACGI

SEQ ID NO: 1606 - protein, 9 aa, synthetic construct
  source 1..9: note = Seed: LVVVGACGV (KRAS G12C)
FVVWGACGL

SEQ ID NO: 1607 - protein, 9 aa, synthetic construct
  source 1..9: note = Seed: LVVVGACGV (KRAS G12C)
FVVWGACGM

SEQ ID NO: 1608 - protein, 9 aa, synthetic construct
  source 1..9: note = Seed: LVVVGACGV (KRAS G12C)
FVVWGACGT

SEQ ID NO: 1609 - protein, 9 aa, synthetic construct
  source 1..9: note = Seed: LVVVGACGV (KRAS G12C)
FVVWGACGV

SEQ ID NO: 1610 - protein, 9 aa, synthetic construct
  source 1..9: note = Seed: LVVVGACGV (KRAS G12C)
FVVWGGCGI

SEQ ID NO: 1611 - protein, 9 aa, synthetic construct
  source 1..9: note = Seed: LVVVGACGV (KRAS G12C)
FVVWGGCGL

SEQ ID NO: 1612 - protein, 9 aa, synthetic construct
  source 1..9: note = Seed: LVVVGACGV (KRAS G12C)
FVVWGGCGM

SEQ ID NO: 1613 - protein, 9 aa, synthetic construct
  source 1..9: note = Seed: LVVVGACGV (KRAS G12C)
FVVWGGCGV

SEQ ID NO: 1614 - protein, 9 aa, synthetic construct
  source 1..9: note = Seed: LVVVGACGV (KRAS G12C)
FVVWGNCGL

SEQ ID NO: 1615 - protein, 9 aa, synthetic construct
  source 1..9: note = Seed: LVVVGACGV (KRAS G12C)
FVVWGNCGV

SEQ ID NO: 1616 - protein, 9 aa, synthetic construct
  source 1..9: note = Seed: LVVVGACGV (KRAS G12C)
FVVWGPCGI

SEQ ID NO: 1617 - protein, 9 aa, synthetic construct
  source 1..9: note = Seed: LVVVGACGV (KRAS G12C)
FVVWGPCGL

SEQ ID NO: 1618 - protein, 9 aa, synthetic construct
  source 1..9: note = Seed: LVVVGACGV (KRAS G12C)
FVVWGPCGV

SEQ ID NO: 1619 - protein, 9 aa, synthetic construct
  source 1..9: note = Seed: LVVVGACGV (KRAS G12C)
FVVWGSCGA

SEQ ID NO: 1620 - protein, 9 aa, synthetic construct
  source 1..9: note = Seed: LVVVGACGV (KRAS G12C)
FVVWGSCGI

SEQ ID NO: 1621 - protein, 9 aa, synthetic construct
  source 1..9: note = Seed: LVVVGACGV (KRAS G12C)
FVVWGSCGL

SEQ ID NO: 1622 - protein, 9 aa, synthetic construct
  source 1..9: note = Seed: LVVVGACGV (KRAS G12C)
FVVWGSCGM

SEQ ID NO: 1623 - protein, 9 aa, synthetic construct
  source 1..9: note = Seed: LVVVGACGV (KRAS G12C)
FVVWGSCGV

SEQ ID NO: 1624 - protein, 9 aa, synthetic construct
  source 1..9: note = Seed: LVVVGACGV (KRAS G12C)
FVVWGTCGL

SEQ ID NO: 1625 - protein, 9 aa, synthetic construct
  source 1..9: note = Seed: LVVVGACGV (KRAS G12C)
FVVWGTCGV

SEQ ID NO: 1626 - protein, 9 aa, synthetic construct
  source 1..9: note = Seed: LVVVGACGV (KRAS G12C)
FVVYGACGA

SEQ ID NO: 1627 - protein, 9 aa, synthetic construct
  source 1..9: note = Seed: LVVVGACGV (KRAS G12C)
FVVYGACGI

SEQ ID NO: 1628 - protein, 9 aa, synthetic construct
  source 1..9: note = Seed: LVVVGACGV (KRAS G12C)
FVVYGACGL

SEQ ID NO: 1629 - protein, 9 aa, synthetic construct
  source 1..9: note = Seed: LVVVGACGV (KRAS G12C)
FVVYGACGM

SEQ ID NO: 1630 - protein, 9 aa, synthetic construct
  source 1..9: note = Seed: LVVVGACGV (KRAS G12C)
FVVYGACGV

SEQ ID NO: 1631 - protein, 9 aa, synthetic construct
  source 1..9: note = Seed: LVVVGACGV (KRAS G12C)
FVVYGNCGA

SEQ ID NO: 1632 - protein, 9 aa, synthetic construct
  source 1..9: note = Seed: LVVVGACGV (KRAS G12C)
FVVYGNCGF

SEQ ID NO: 1633 - protein, 9 aa, synthetic construct
  source 1..9: note = Seed: LVVVGACGV (KRAS G12C)
FVVYGNCGI

SEQ ID NO: 1634 - protein, 9 aa, synthetic construct
  source 1..9: note = Seed: LVVVGACGV (KRAS G12C)
FVVYGNCGL

SEQ ID NO: 1635 - protein, 9 aa, synthetic construct
  source 1..9: note = Seed: LVVVGACGV (KRAS G12C)
FVVYGNCGM

SEQ ID NO: 1636 - protein, 9 aa, synthetic construct
  source 1..9: note = Seed: LVVVGACGV (KRAS G12C)
FVVYGNCGV

SEQ ID NO: 1637 - protein, 9 aa, synthetic construct
  source 1..9: note = Seed: LVVVGACGV (KRAS G12C)
FVVYGSCGA

SEQ ID NO: 1638 - protein, 9 aa, synthetic construct
  source 1..9: note = Seed: LVVVGACGV (KRAS G12C)
FVVYGSCGI

SEQ ID NO: 1639 - protein, 9 aa, synthetic construct
  source 1..9: note = Seed: LVVVGACGV (KRAS G12C)
FVVYGSCGL

SEQ ID NO: 1640 - protein, 9 aa, synthetic construct
  source 1..9: note = Seed: LVVVGACGV (KRAS G12C)
FVVYGSCGM

SEQ ID NO: 1641 - protein, 9 aa, synthetic construct
  source 1..9: note = Seed: LVVVGACGV (KRAS G12C)
FVVYGSCGV

SEQ ID NO: 1642 - protein, 9 aa, synthetic construct
  source 1..9: note = Seed: LVVVGACGV (KRAS G12C)
HVVLGACGI

SEQ ID NO: 1643 - protein, 9 aa, synthetic construct
  source 1..9: note = Seed: LVVVGACGV (KRAS G12C)
HVVLGACGL

SEQ ID NO: 1644 - protein, 9 aa, synthetic construct
  source 1..9: note = Seed: LVVVGACGV (KRAS G12C)
HVVLGACGV

SEQ ID NO: 1645 - protein, 9 aa, synthetic construct
  source 1..9: note = Seed: LVVVGACGV (KRAS G12C)
HVVLGGCGI

SEQ ID NO: 1646 - protein, 9 aa, synthetic construct
  source 1..9: note = Seed: LVVVGACGV (KRAS G12C)
HVVLGGCGL

SEQ ID NO: 1647 - protein, 9 aa, synthetic construct
  source 1..9: note = Seed: LVVVGACGV (KRAS G12C)
HVVLGGCGV

SEQ ID NO: 1648 - protein, 9 aa, synthetic construct
  source 1..9: note = Seed: LVVVGACGV (KRAS G12C)
HVVLGSCGI

SEQ ID NO: 1649 - protein, 9 aa, synthetic construct
  source 1..9: note = Seed: LVVVGACGV (KRAS G12C)
HVVLGSCGL

SEQ ID NO: 1650 - protein, 9 aa, synthetic construct
  source 1..9: note = Seed: LVVVGACGV (KRAS G12C)
HVVLGSCGV

SEQ ID NO: 1651 - protein, 9 aa, synthetic construct
  source 1..9: note = Seed: LVVVGACGV (KRAS G12C)
HVVMGACGI

SEQ ID NO: 1652 - protein, 9 aa, synthetic construct
  source 1..9: note = Seed: LVVVGACGV (KRAS G12C)
HVVMGACGL

SEQ ID NO: 1653 - protein, 9 aa, synthetic construct
  source 1..9: note = Seed: LVVVGACGV (KRAS G12C)
HVVMGACGV

SEQ ID NO: 1654 - protein, 9 aa, synthetic construct
  source 1..9: note = Seed: LVVVGACGV (KRAS G12C)
HVVMGGCGL

SEQ ID NO: 1655 - protein, 9 aa, synthetic construct
  source 1..9: note = Seed: LVVVGACGV (KRAS G12C)
HVVMGSCGL

SEQ ID NO: 1656 - protein, 9 aa, synthetic construct
  source 1..9: note = Seed: LVVVGACGV (KRAS G12C)
IVVAGACGA

SEQ ID NO: 1657 - protein, 9 aa, synthetic construct
  source 1..9: note = Seed: LVVVGACGV (KRAS G12C)
IVVAGACGG

SEQ ID NO: 1658 - protein, 9 aa, synthetic construct
  source 1..9: note = Seed: LVVVGACGV (KRAS G12C)
IVVAGACGI

SEQ ID NO: 1659 - protein, 9 aa, synthetic construct
  source 1..9: note = Seed: LVVVGACGV (KRAS G12C)
IVVAGACGL

SEQ ID NO: 1660 - protein, 9 aa, synthetic construct
  source 1..9: note = Seed: LVVVGACGV (KRAS G12C)
IVVAGACGM

SEQ ID NO: 1661 - protein, 9 aa, synthetic construct
  source 1..9: note = Seed: LVVVGACGV (KRAS G12C)
IVVAGACGS

SEQ ID NO: 1662 - protein, 9 aa, synthetic construct
  source 1..9: note = Seed: LVVVGACGV (KRAS G12C)
IVVAGACGT

SEQ ID NO: 1663 - protein, 9 aa, synthetic construct
  source 1..9: note = Seed: LVVVGACGV (KRAS G12C)
IVVAGACGV

SEQ ID NO: 1664 - protein, 9 aa, synthetic construct
  source 1..9: note = Seed: LVVVGACGV (KRAS G12C)
IVVAGGCGA

SEQ ID NO: 1665 - protein, 9 aa, synthetic construct
  source 1..9: note = Seed: LVVVGACGV (KRAS G12C)
IVVAGGCGI

SEQ ID NO: 1666 - protein, 9 aa, synthetic construct
  source 1..9: note = Seed: LVVVGACGV (KRAS G12C)
IVVAGGCGL

SEQ ID NO: 1667 - protein, 9 aa, synthetic construct
  source 1..9: note = Seed: LVVVGACGV (KRAS G12C)
IVVAGGCGM

SEQ ID NO: 1668 - protein, 9 aa, synthetic construct
  source 1..9: note = Seed: LVVVGACGV (KRAS G12C)
IVVAGGCGS

SEQ ID NO: 1669 - protein, 9 aa, synthetic construct
  source 1..9: note = Seed: LVVVGACGV (KRAS G12C)
IVVAGGCGT

SEQ ID NO: 1670 - protein, 9 aa, synthetic construct
  source 1..9: note = Seed: LVVVGACGV (KRAS G12C)
IVVAGGCGV

SEQ ID NO: 1671 - protein, 9 aa, synthetic construct
  source 1..9: note = Seed: LVVVGACGV (KRAS G12C)
IVVAGKCGA

SEQ ID NO: 1672 - protein, 9 aa, synthetic construct
  source 1..9: note = Seed: LVVVGACGV (KRAS G12C)
IVVAGKCGH

SEQ ID NO: 1673 - protein, 9 aa, synthetic construct
  source 1..9: note = Seed: LVVVGACGV (KRAS G12C)
IVVAGKCGS

SEQ ID NO: 1674 - protein, 9 aa, synthetic construct
  source 1..9: note = Seed: LVVVGACGV (KRAS G12C)
IVVAGNCGA

SEQ ID NO: 1675 - protein, 9 aa, synthetic construct
  source 1..9: note = Seed: LVVVGACGV (KRAS G12C)
IVVAGNCGI

SEQ ID NO: 1676 - protein, 9 aa, synthetic construct
  source 1..9: note = Seed: LVVVGACGV (KRAS G12C)
IVVAGNCGL

SEQ ID NO: 1677 - protein, 9 aa, synthetic construct
  source 1..9: note = Seed: LVVVGACGV (KRAS G12C)
IVVAGNCGM

SEQ ID NO: 1678 - protein, 9 aa, synthetic construct
  source 1..9: note = Seed: LVVVGACGV (KRAS G12C)
IVVAGNCGS

SEQ ID NO: 1679 - protein, 9 aa, synthetic construct
  source 1..9: note = Seed: LVVVGACGV (KRAS G12C)
IVVAGNCGV

SEQ ID NO: 1680 - protein, 9 aa, synthetic construct
  source 1..9: note = Seed: LVVVGACGV (KRAS G12C)
IVVAGPCGA

SEQ ID NO: 1681 - protein, 9 aa, synthetic construct
  source 1..9: note = Seed: LVVVGACGV (KRAS G12C)
IVVAGPCGI

SEQ ID NO: 1682 - protein, 9 aa, synthetic construct
  source 1..9: note = Seed: LVVVGACGV (KRAS G12C)
IVVAGPCGL

SEQ ID NO: 1683 - protein, 9 aa, synthetic construct
  source 1..9: note = Seed: LVVVGACGV (KRAS G12C)
IVVAGPCGM

SEQ ID NO: 1684 - protein, 9 aa, synthetic construct
  source 1..9: note = Seed: LVVVGACGV (KRAS G12C)
IVVAGPCGV

SEQ ID NO: 1685 - protein, 9 aa, synthetic construct
  source 1..9: note = Seed: LVVVGACGV (KRAS G12C)
IVVAGRCGA

SEQ ID NO: 1686 - protein, 9 aa, synthetic construct
  source 1..9: note = Seed: LVVVGACGV (KRAS G12C)
IVVAGRCGH

SEQ ID NO: 1687 - protein, 9 aa, synthetic construct
  source 1..9: note = Seed: LVVVGACGV (KRAS G12C)
IVVAGRCGK

SEQ ID NO: 1688 - protein, 9 aa, synthetic construct
  source 1..9: note = Seed: LVVVGACGV (KRAS G12C)
IVVAGRCGQ

SEQ ID NO: 1689 - protein, 9 aa, synthetic construct
  source 1..9: note = Seed: LVVVGACGV (KRAS G12C)
IVVAGRCGR

SEQ ID NO: 1690 - protein, 9 aa, synthetic construct
  source 1..9: note = Seed: LVVVGACGV (KRAS G12C)
IVVAGRCGS

SEQ ID NO: 1691 - protein, 9 aa, synthetic construct
  source 1..9: note = Seed: LVVVGACGV (KRAS G12C)
IVVAGSCGA

SEQ ID NO: 1692 - protein, 9 aa, synthetic construct
  source 1..9: note = Seed: LVVVGACGV (KRAS G12C)
IVVAGSCGI

SEQ ID NO: 1693 - protein, 9 aa, synthetic construct
  source 1..9: note = Seed: LVVVGACGV (KRAS G12C)
IVVAGSCGL

SEQ ID NO: 1694 - protein, 9 aa, synthetic construct
  source 1..9: note = Seed: LVVVGACGV (KRAS G12C)
IVVAGSCGM

SEQ ID NO: 1695 - protein, 9 aa, synthetic construct
  source 1..9: note = Seed: LVVVGACGV (KRAS G12C)
IVVAGSCGS

SEQ ID NO: 1696 - protein, 9 aa, synthetic construct
  source 1..9: note = Seed: LVVVGACGV (KRAS G12C)
IVVAGSCGT

SEQ ID NO: 1697 - protein, 9 aa, synthetic construct
  source 1..9: note = Seed: LVVVGACGV (KRAS G12C)
IVVAGSCGV

SEQ ID NO: 1698 - protein, 9 aa, synthetic construct
  source 1..9: note = Seed: LVVVGACGV (KRAS G12C)
IVVAGTCGA

SEQ ID NO: 1699 - protein, 9 aa, synthetic construct
  source 1..9: note = Seed: LVVVGACGV (KRAS G12C)
IVVAGTCGI

SEQ ID NO: 1700 - protein, 9 aa, synthetic construct
  source 1..9: note = Seed: LVVVGACGV (KRAS G12C)
IVVAGTCGL

SEQ ID NO: 1701 - protein, 9 aa, synthetic construct
  source 1..9: note = Seed: LVVVGACGV (KRAS G12C)
IVVAGTCGM

SEQ ID NO: 1702 - protein, 9 aa, synthetic construct
  source 1..9: note = Seed: LVVVGACGV (KRAS G12C)
IVVAGTCGV

SEQ ID NO: 1703 - protein, 9 aa, synthetic construct
  source 1..9: note = Seed: LVVVGACGV (KRAS G12C)
IVVDGACGI

SEQ ID NO: 1704 - protein, 9 aa, synthetic construct
  source 1..9: note = Seed: LVVVGACGV (KRAS G12C)
IVVDGACGL

SEQ ID NO: 1705 - protein, 9 aa, synthetic construct
  source 1..9: note = Seed: LVVVGACGV (KRAS G12C)
IVVDGACGM

SEQ ID NO: 1706 - protein, 9 aa, synthetic construct
  source 1..9: note = Seed: LVVVGACGV (KRAS G12C)
IVVDGACGV

SEQ ID NO: 1707 - protein, 9 aa, synthetic construct
  source 1..9: note = Seed: LVVVGACGV (KRAS G12C)
IVVDGNCGI

SEQ ID NO: 1708 - protein, 9 aa, synthetic construct
  source 1..9: note = Seed: LVVVGACGV (KRAS G12C)
IVVDGNCGL

SEQ ID NO: 1709 - protein, 9 aa, synthetic construct
  source 1..9: note = Seed: LVVVGACGV (KRAS G12C)
IVVDGNCGV

SEQ ID NO: 1710 - protein, 9 aa, synthetic construct
  source 1..9: note = Seed: LVVVGACGV (KRAS G12C)
IVVDGSCGI

SEQ ID NO: 1711 - protein, 9 aa, synthetic construct
  source 1..9: note = Seed: LVVVGACGV (KRAS G12C)
IVVDGSCGV

SEQ ID NO: 1712 - protein, 9 aa, synthetic construct
  source 1..9: note = Seed: LVVVGACGV (KRAS G12C)
IVVDGTCGI

SEQ ID NO: 1713 - protein, 9 aa, synthetic construct
  source 1..9: note = Seed: LVVVGACGV (KRAS G12C)
IVVEGACGA

SEQ ID NO: 1714 - protein, 9 aa, synthetic construct
  source 1..9: note = Seed: LVVVGACGV (KRAS G12C)
IVVEGACGI

SEQ ID NO: 1715 - protein, 9 aa, synthetic construct
  source 1..9: note = Seed: LVVVGACGV (KRAS G12C)
IVVEGACGL

SEQ ID NO: 1716 - protein, 9 aa, synthetic construct
  source 1..9: note = Seed: LVVVGACGV (KRAS G12C)
IVVEGACGM

SEQ ID NO: 1717 - protein, 9 aa, synthetic construct
  source 1..9: note = Seed: LVVVGACGV (KRAS G12C)
IVVEGACGT

SEQ ID NO: 1718 - protein, 9 aa, synthetic construct
  source 1..9: note = Seed: LVVVGACGV (KRAS G12C)
IVVEGACGV

SEQ ID NO: 1719 - protein, 9 aa, synthetic construct
  source 1..9: note = Seed: LVVVGACGV (KRAS G12C)
IVVEGGCGA

SEQ ID NO: 1720 - protein, 9 aa, synthetic construct
  source 1..9: note = Seed: LVVVGACGV (KRAS G12C)
IVVEGGCGI

SEQ ID NO: 1721 - protein, 9 aa, synthetic construct
  source 1..9: note = Seed: LVVVGACGV (KRAS G12C)
IVVEGGCGL

SEQ ID NO: 1722 - protein, 9 aa, synthetic construct
  source 1..9: note = Seed: LVVVGACGV (KRAS G12C)
IVVEGGCGV

SEQ ID NO: 1723 - protein, 9 aa, synthetic construct
  source 1..9: note = Seed: LVVVGACGV (KRAS G12C)
IVVEGNCGI

SEQ ID NO: 1724 - protein, 9 aa, synthetic construct
  source 1..9: note = Seed: LVVVGACGV (KRAS G12C)
IVVEGNCGL

SEQ ID NO: 1725 - protein, 9 aa, synthetic construct
  source 1..9: note = Seed: LVVVGACGV (KRAS G12C)
IVVEGNCGV

SEQ ID NO: 1726 - protein, 9 aa, synthetic construct
  source 1..9: note = Seed: LVVVGACGV (KRAS G12C)
IVVEGPCGL

SEQ ID NO: 1727 - protein, 9 aa, synthetic construct
  source 1..9: note = Seed: LVVVGACGV (KRAS G12C)
IVVEGPCGV

SEQ ID NO: 1728 - protein, 9 aa, synthetic construct
  source 1..9: note = Seed: LVVVGACGV (KRAS G12C)
IVVEGSCGA

SEQ ID NO: 1729 - protein, 9 aa, synthetic construct
  source 1..9: note = Seed: LVVVGACGV (KRAS G12C)
IVVEGSCGI

SEQ ID NO: 1730 - protein, 9 aa, synthetic construct
  source 1..9: note = Seed: LVVVGACGV (KRAS G12C)
IVVEGSCGL

SEQ ID NO: 1731 - protein, 9 aa, synthetic construct
  source 1..9: note = Seed: LVVVGACGV (KRAS G12C)
IVVEGSCGV

SEQ ID NO: 1732 - protein, 9 aa, synthetic construct
  source 1..9: note = Seed: LVVVGACGV (KRAS G12C)
IVVFGACGA

SEQ ID NO: 1733 - protein, 9 aa, synthetic construct
  source 1..9: note = Seed: LVVVGACGV (KRAS G12C)
IVVFGACGL

SEQ ID NO: 1734 - protein, 9 aa, synthetic construct
  source 1..9: note = Seed: LVVVGACGV (KRAS G12C)
IVVFGACGM

SEQ ID NO: 1735 - protein, 9 aa, synthetic construct
  source 1..9: note = Seed: LVVVGACGV (KRAS G12C)
IVVFGACGV

SEQ ID NO: 1736 - protein, 9 aa, synthetic construct
  source 1..9: note = Seed: LVVVGACGV (KRAS G12C)
IVVFGDCGI

SEQ ID NO: 1737 - protein, 9 aa, synthetic construct
  source 1..9: note = Seed: LVVVGACGV (KRAS G12C)
IVVFGDCGL

SEQ ID NO: 1738 - protein, 9 aa, synthetic construct
  source 1..9: note = Seed: LVVVGACGV (KRAS G12C)
IVVFGDCGV

SEQ ID NO: 1739 - protein, 9 aa, synthetic construct
  source 1..9: note = Seed: LVVVGACGV (KRAS G12C)
IVVFGGCGA

SEQ ID NO: 1740 - protein, 9 aa, synthetic construct
  source 1..9: note = Seed: LVVVGACGV (KRAS G12C)
IVVFGGCGI

SEQ ID NO: 1741 - protein, 9 aa, synthetic construct
  source 1..9: note = Seed: LVVVGACGV (KRAS G12C)
IVVFGGCGL

SEQ ID NO: 1742 - protein, 9 aa, synthetic construct
  source 1..9: note = Seed: LVVVGACGV (KRAS G12C)
IVVFGGCGM

SEQ ID NO: 1743 - protein, 9 aa, synthetic construct
  source 1..9: note = Seed: LVVVGACGV (KRAS G12C)
IVVFGGCGV

SEQ ID NO: 1744 - protein, 9 aa, synthetic construct
  source 1..9: note = Seed: LVVVGACGV (KRAS G12C)
IVVFGKCGA

SEQ ID NO: 1745 - protein, 9 aa, synthetic construct
  source 1..9: note = Seed: LVVVGACGV (KRAS G12C)
IVVFGKCGH

SEQ ID NO: 1746 - protein, 9 aa, synthetic construct
  source 1..9: note = Seed: LVVVGACGV (KRAS G12C)
IVVFGKCGK

SEQ ID NO: 1747 - protein, 9 aa, synthetic construct
  source 1..9: note = Seed: LVVVGACGV (KRAS G12C)
IVVFGKCGR

SEQ ID NO: 1748 - protein, 9 aa, synthetic construct
  source 1..9: note = Seed: LVVVGACGV (KRAS G12C)
IVVFGKCGS

SEQ ID NO: 1749 - protein, 9 aa, synthetic construct
  source 1..9: note = Seed: LVVVGACGV (KRAS G12C)
IVVFGNCGA

SEQ ID NO: 1750 - protein, 9 aa, synthetic construct
  source 1..9: note = Seed: LVVVGACGV (KRAS G12C)
IVVFGNCGF

SEQ ID NO: 1751 - protein, 9 aa, synthetic construct
  source 1..9: note = Seed: LVVVGACGV (KRAS G12C)
IVVFGNCGH

SEQ ID NO: 1752 - protein, 9 aa, synthetic construct
  source 1..9: note = Seed: LVVVGACGV (KRAS G12C)
IVVFGNCGI

SEQ ID NO: 1753 - protein, 9 aa, synthetic construct
  source 1..9: note = Seed: LVVVGACGV (KRAS G12C)
IVVFGNCGL

SEQ ID NO: 1754 - protein, 9 aa, synthetic construct
  source 1..9: note = Seed: LVVVGACGV (KRAS G12C)
IVVFGNCGM

SEQ ID NO: 1755 - protein, 9 aa, synthetic construct
  source 1..9: note = Seed: LVVVGACGV (KRAS G12C)
IVVFGNCGS

SEQ ID NO: 1756 - protein, 9 aa, synthetic construct
  source 1..9: note = Seed: LVVVGACGV (KRAS G12C)
IVVFGNCGT

SEQ ID NO: 1757 - protein, 9 aa, synthetic construct
  source 1..9: note = Seed: LVVVGACGV (KRAS G12C)
IVVFGNCGV

SEQ ID NO: 1758 - protein, 9 aa, synthetic construct
  source 1..9: note = Seed: LVVVGACGV (KRAS G12C)
IVVFGNCGY

SEQ ID NO: 1759 - protein, 9 aa, synthetic construct
  source 1..9: note = Seed: LVVVGACGV (KRAS G12C)
IVVFGPCGA

SEQ ID NO: 1760 - protein, 9 aa, synthetic construct
  source 1..9: note = Seed: LVVVGACGV (KRAS G12C)
IVVFGPCGI

SEQ ID NO: 1761 - protein, 9 aa, synthetic construct
  source 1..9: note = Seed: LVVVGACGV (KRAS G12C)
IVVFGPCGL

SEQ ID NO: 1762 - protein, 9 aa, synthetic construct
  source 1..9: note = Seed: LVVVGACGV (KRAS G12C)
IVVFGPCGV

SEQ ID NO: 1763 - protein, 9 aa, synthetic construct
  source 1..9: note = Seed: LVVVGACGV (KRAS G12C)
IVVFGRCGA

SEQ ID NO: 1764 - protein, 9 aa, synthetic construct
  source 1..9: note = Seed: LVVVGACGV (KRAS G12C)
IVVFGRCGH

SEQ ID NO: 1765 - protein, 9 aa, synthetic construct
  source 1..9: note = Seed: LVVVGACGV (KRAS G12C)
IVVFGRCGK

SEQ ID NO: 1766 - protein, 9 aa, synthetic construct
  source 1..9: note = Seed: LVVVGACGV (KRAS G12C)
IVVFGRCGR

SEQ ID NO: 1767 - protein, 9 aa, synthetic construct
  source 1..9: note = Seed: LVVVGACGV (KRAS G12C)
IVVFGRCGS

SEQ ID NO: 1768 - protein, 9 aa, synthetic construct
  source 1..9: note = Seed: LVVVGACGV (KRAS G12C)
IVVFGSCGA

SEQ ID NO: 1769 - protein, 9 aa, synthetic construct
  source 1..9: note = Seed: LVVVGACGV (KRAS G12C)
IVVFGSCGF

SEQ ID NO: 1770 - protein, 9 aa, synthetic construct
  source 1..9: note = Seed: LVVVGACGV (KRAS G12C)
IVVFGSCGH

SEQ ID NO: 1771 - protein, 9 aa, synthetic construct
  source 1..9: note = Seed: LVVVGACGV (KRAS G12C)
IVVFGSCGI

SEQ ID NO: 1772 - protein, 9 aa, synthetic construct
  source 1..9: note = Seed: LVVVGACGV (KRAS G12C)
IVVFGSCGL

SEQ ID NO: 1773 - protein, 9 aa, synthetic construct
  source 1..9: note = Seed: LVVVGACGV (KRAS G12C)
IVVFGSCGM

SEQ ID NO: 1774 - protein, 9 aa, synthetic construct
  source 1..9: note = Seed: LVVVGACGV (KRAS G12C)
IVVFGSCGR

SEQ ID NO: 1775 - protein, 9 aa, synthetic construct
  source 1..9: note = Seed: LVVVGACGV (KRAS G12C)
IVVFGSCGS

SEQ ID NO: 1776 - protein, 9 aa, synthetic construct
  source 1..9: note = Seed: LVVVGACGV (KRAS G12C)
IVVFGSCGT

SEQ ID NO: 1777 - protein, 9 aa, synthetic construct
  source 1..9: note = Seed: LVVVGACGV (KRAS G12C)
IVVFGSCGV

SEQ ID NO: 1778 - protein, 9 aa, synthetic construct
  source 1..9: note = Seed: LVVVGACGV (KRAS G12C)
IVVFGSCGY

SEQ ID NO: 1779 - protein, 9 aa, synthetic construct
  source 1..9: note = Seed: LVVVGACGV (KRAS G12C)
IVVFGTCGA

SEQ ID NO: 1780 - protein, 9 aa, synthetic construct
  source 1..9: note = Seed: LVVVGACGV (KRAS G12C)
IVVFGTCGH

SEQ ID NO: 1781 - protein, 9 aa, synthetic construct
  source 1..9: note = Seed: LVVVGACGV (KRAS G12C)
IVVFGTCGI

SEQ ID NO: 1782 - protein, 9 aa, synthetic construct
  source 1..9: note = Seed: LVVVGACGV (KRAS G12C)
IVVFGTCGL

SEQ ID NO: 1783 - protein, 9 aa, synthetic construct
  source 1..9: note = Seed: LVVVGACGV (KRAS G12C)
IVVFGTCGM

SEQ ID NO: 1784 - protein, 9 aa, synthetic construct
  source 1..9: note = Seed: LVVVGACGV (KRAS G12C)
IVVFGTCGS

SEQ ID NO: 1785 - protein, 9 aa, synthetic construct
  source 1..9: note = Seed: LVVVGACGV (KRAS G12C)
IVVFGTCGV

SEQ ID NO: 1786 - protein, 9 aa, synthetic construct
  source 1..9: note = Seed: LVVVGACGV (KRAS G12C)
IVVGGACGI

SEQ ID NO: 1787 - protein, 9 aa, synthetic construct
  source 1..9: note = Seed: LVVVGACGV (KRAS G12C)
IVVGGACGL

SEQ ID NO: 1788 - protein, 9 aa, synthetic construct
  source 1..9: note = Seed: LVVVGACGV (KRAS G12C)
IVVGGACGV

SEQ ID NO: 1789 - protein, 9 aa, synthetic construct
  source 1..9: note = Seed: LVVVGACGV (KRAS G12C)
IVVGGGCGL

SEQ ID NO: 1790 - protein, 9 aa, synthetic construct
  source 1..9: note = Seed: LVVVGACGV (KRAS G12C)
IVVHGACGF

SEQ ID NO: 1791 - protein, 9 aa, synthetic construct
  source 1..9: note = Seed: LVVVGACGV (KRAS G12C)
IVVHGACGI

SEQ ID NO: 1792 - protein, 9 aa, synthetic construct
  source 1..9: note = Seed: LVVVGACGV (KRAS G12C)
IVVHGACGL

SEQ ID NO: 1793 - protein, 9 aa, synthetic construct
  source 1..9: note = Seed: LVVVGACGV (KRAS G12C)
IVVHGACGR

SEQ ID NO: 1794 - protein, 9 aa, synthetic construct
  source 1..9: note = Seed: LVVVGACGV (KRAS G12C)
IVVHGACGV

SEQ ID NO: 1795 - protein, 9 aa, synthetic construct
  source 1..9: note = Seed: LVVVGACGV (KRAS G12C)
IVVHGACGY

SEQ ID NO: 1796 - protein, 9 aa, synthetic construct
  source 1..9: note = Seed: LVVVGACGV (KRAS G12C)
IVVHGICGR

SEQ ID NO: 1797 - protein, 9 aa, synthetic construct
  source 1..9: note = Seed: LVVVGACGV (KRAS G12C)
IVVHGKCGF

SEQ ID NO: 1798 - protein, 9 aa, synthetic construct
  source 1..9: note = Seed: LVVVGACGV (KRAS G12C)
IVVHGKCGR

SEQ ID NO: 1799 - protein, 9 aa, synthetic construct
  source 1..9: note = Seed: LVVVGACGV (KRAS G12C)
IVVHGNCGF

SEQ ID NO: 1800 - protein, 9 aa, synthetic construct
  source 1..9: note = Seed: LVVVGACGV (KRAS G12C)
IVVHGNCGI

SEQ ID NO: 1801 - protein, 9 aa, synthetic construct
  source 1..9: note = Seed: LVVVGACGV (KRAS G12C)
IVVHGNCGL

SEQ ID NO: 1802 - protein, 9 aa, synthetic construct
  source 1..9: note = Seed: LVVVGACGV (KRAS G12C)
IVVHGNCGM

SEQ ID NO: 1803 - protein, 9 aa, synthetic construct
  source 1..9: note = Seed: LVVVGACGV (KRAS G12C)
IVVHGNCGR

SEQ ID NO: 1804 - protein, 9 aa, synthetic construct
  source 1..9: note = Seed: LVVVGACGV (KRAS G12C)
IVVHGNCGV

SEQ ID NO: 1805 - protein, 9 aa, synthetic construct
  source 1..9: note = Seed: LVVVGACGV (KRAS G12C)
IVVHGNCGY

SEQ ID NO: 1806 - protein, 9 aa, synthetic construct
  source 1..9: note = Seed: LVVVGACGV (KRAS G12C)
IVVHGRCGA

SEQ ID NO: 1807 - protein, 9 aa, synthetic construct
  source 1..9: note = Seed: LVVVGACGV (KRAS G12C)
IVVHGRCGF

SEQ ID NO: 1808 - protein, 9 aa, synthetic construct
  source 1..9: note = Seed: LVVVGACGV (KRAS G12C)
IVVHGRCGH

SEQ ID NO: 1809 - protein, 9 aa, synthetic construct
  source 1..9: note = Seed: LVVVGACGV (KRAS G12C)
IVVHGRCGI

SEQ ID NO: 1810 - protein, 9 aa, synthetic construct
  source 1..9: note = Seed: LVVVGACGV (KRAS G12C)
IVVHGRCGK

SEQ ID NO: 1811 - protein, 9 aa, synthetic construct
  source 1..9: note = Seed: LVVVGACGV (KRAS G12C)
IVVHGRCGL

SEQ ID NO: 1812 - protein, 9 aa, synthetic construct
  source 1..9: note = Seed: LVVVGACGV (KRAS G12C)
IVVHGRCGM

SEQ ID NO: 1813 - protein, 9 aa, synthetic construct
  source 1..9: note = Seed: LVVVGACGV (KRAS G12C)
IVVHGRCGR

SEQ ID NO: 1814 - protein, 9 aa, synthetic construct
  source 1..9: note = Seed: LVVVGACGV (KRAS G12C)
IVVHGRCGS

SEQ ID NO: 1815 - protein, 9 aa, synthetic construct
  source 1..9: note = Seed: LVVVGACGV (KRAS G12C)
IVVHGRCGV

SEQ ID NO: 1816 - protein, 9 aa, synthetic construct
  source 1..9: note = Seed: LVVVGACGV (KRAS G12C)
IVVHGRCGY

SEQ ID NO: 1817 - protein, 9 aa, synthetic construct
  source 1..9: note = Seed: LVVVGACGV (KRAS G12C)
IVVHGSCGF

SEQ ID NO: 1818 - protein, 9 aa, synthetic construct
  source 1..9: note = Seed: LVVVGACGV (KRAS G12C)
IVVHGSCGI

SEQ ID NO: 1819 - protein, 9 aa, synthetic construct
  source 1..9: note = Seed: LVVVGACGV (KRAS G12C)
IVVHGSCGL

SEQ ID NO: 1820 - protein, 9 aa, synthetic construct
  source 1..9: note = Seed: LVVVGACGV (KRAS G12C)
IVVHGSCGM

SEQ ID NO: 1821 - protein, 9 aa, synthetic construct
  source 1..9: note = Seed: LVVVGACGV (KRAS G12C)
IVVHGSCGR

SEQ ID NO: 1822 - protein, 9 aa, synthetic construct
  source 1..9: note = Seed: LVVVGACGV (KRAS G12C)
IVVHGSCGY

SEQ ID NO: 1823 - protein, 9 aa, synthetic construct
  source 1..9: note = Seed: LVVVGACGV (KRAS G12C)
IVVHGTCGR

SEQ ID NO: 1824 - protein, 9 aa, synthetic construct
  source 1..9: note = Seed: LVVVGACGV (KRAS G12C)
IVVHGTCGY

SEQ ID NO: 1825 - protein, 9 aa, synthetic construct
  source 1..9: note = Seed: LVVVGACGV (KRAS G12C)
IVVHGVCGR

SEQ ID NO: 1826 - protein, 9 aa, synthetic construct
  source 1..9: note = Seed: LVVVGACGV (KRAS G12C)
IVVIGACGA

SEQ ID NO: 1827 - protein, 9 aa, synthetic construct
  source 1..9: note = Seed: LVVVGACGV (KRAS G12C)
IVVIGACGH

SEQ ID NO: 1828 - protein, 9 aa, synthetic construct
  source 1..9: note = Seed: LVVVGACGV (KRAS G12C)
IVVIGACGI

SEQ ID NO: 1829 - protein, 9 aa, synthetic construct
  source 1..9: note = Seed: LVVVGACGV (KRAS G12C)
IVVIGACGL

SEQ ID NO: 1830 - protein, 9 aa, synthetic construct
  source 1..9: note = Seed: LVVVGACGV (KRAS G12C)
IVVIGACGM

SEQ ID NO: 1831 - protein, 9 aa, synthetic construct
  source 1..9: note = Seed: LVVVGACGV (KRAS G12C)
IVVIGACGN

SEQ ID NO: 1832 - protein, 9 aa, synthetic construct
  source 1..9: note = Seed: LVVVGACGV (KRAS G12C)
IVVIGACGS

SEQ ID NO: 1833 - protein, 9 aa, synthetic construct
  source 1..9: note = Seed: LVVVGACGV (KRAS G12C)
IVVIGACGT

SEQ ID NO: 1834 - protein, 9 aa, synthetic construct
  source 1..9: note = Seed: LVVVGACGV (KRAS G12C)
IVVIGACGV

SEQ ID NO: 1835 - protein, 9 aa, synthetic construct
  source 1..9: note = Seed: LVVVGACGV (KRAS G12C)
IVVIGDCGA

SEQ ID NO: 1836 - protein, 9 aa, synthetic construct
  source 1..9: note = Seed: LVVVGACGV (KRAS G12C)
IVVIGGCGA

SEQ ID NO: 1837 - protein, 9 aa, synthetic construct
  source 1..9: note = Seed: LVVVGACGV (KRAS G12C)
IVVIGGCGI

SEQ ID NO: 1838 - protein, 9 aa, synthetic construct
  source 1..9: note = Seed: LVVVGACGV (KRAS G12C)
IVVIGGCGL

SEQ ID NO: 1839 - protein, 9 aa, synthetic construct
  source 1..9: note = Seed: LVVVGACGV (KRAS G12C)
IVVIGGCGM

SEQ ID NO: 1840 - protein, 9 aa, synthetic construct
  source 1..9: note = Seed: LVVVGACGV (KRAS G12C)
IVVIGGCGN

SEQ ID NO: 1841 - protein, 9 aa, synthetic construct
  source 1..9: note = Seed: LVVVGACGV (KRAS G12C)
IVVIGGCGS

SEQ ID NO: 1842 - protein, 9 aa, synthetic construct
  source 1..9: note = Seed: LVVVGACGV (KRAS G12C)
IVVIGGCGT

SEQ ID NO: 1843 - protein, 9 aa, synthetic construct
  source 1..9: note = Seed: LVVVGACGV (KRAS G12C)
IVVIGGCGV

SEQ ID NO: 1844 - protein, 9 aa, synthetic construct
  source 1..9: note = Seed: LVVVGACGV (KRAS G12C)
IVVIGKCGA

SEQ ID NO: 1845 - protein, 9 aa, synthetic construct
  source 1..9: note = Seed: LVVVGACGV (KRAS G12C)
IVVIGKCGG

SEQ ID NO: 1846 - protein, 9 aa, synthetic construct
  source 1..9: note = Seed: LVVVGACGV (KRAS G12C)
IVVIGKCGH

SEQ ID NO: 1847 - protein, 9 aa, synthetic construct
  source 1..9: note = Seed: LVVVGACGV (KRAS G12C)
IVVIGKCGK

SEQ ID NO: 1848 - protein, 9 aa, synthetic construct
  source 1..9: note = Seed: LVVVGACGV (KRAS G12C)
IVVIGKCGM

SEQ ID NO: 1849 - protein, 9 aa, synthetic construct
  source 1..9: note = Seed: LVVVGACGV (KRAS G12C)
IVVIGKCGN

SEQ ID NO: 1850 - protein, 9 aa, synthetic construct
  source 1..9: note = Seed: LVVVGACGV (KRAS G12C)
IVVIGKCGQ

SEQ ID NO: 1851 - protein, 9 aa, synthetic construct
  source 1..9: note = Seed: LVVVGACGV (KRAS G12C)
IVVIGKCGR

SEQ ID NO: 1852 - protein, 9 aa, synthetic construct
  source 1..9: note = Seed: LVVVGACGV (KRAS G12C)
IVVIGKCGS

SEQ ID NO: 1853 - protein, 9 aa, synthetic construct
  source 1..9: note = Seed: LVVVGACGV (KRAS G12C)
IVVIGKCGT

SEQ ID NO: 1854 - protein, 9 aa, synthetic construct
  source 1..9: note = Seed: LVVVGACGV (KRAS G12C)
IVVIGKCGY

SEQ ID NO: 1855 - protein, 9 aa, synthetic construct
  source 1..9: note = Seed: LVVVGACGV (KRAS G12C)
IVVIGNCGA

SEQ ID NO: 1856 - protein, 9 aa, synthetic construct
  source 1..9: note = Seed: LVVVGACGV (KRAS G12C)
IVVIGNCGG

SEQ ID NO: 1857 - protein, 9 aa, synthetic construct
  source 1..9: note = Seed: LVVVGACGV (KRAS G12C)
IVVIGNCGH

SEQ ID NO: 1858 - protein, 9 aa, synthetic construct
  source 1..9: note = Seed: LVVVGACGV (KRAS G12C)
IVVIGNCGI

SEQ ID NO: 1859 - protein, 9 aa, synthetic construct
  source 1..9: note = Seed: LVVVGACGV (KRAS G12C)
IVVIGNCGL

SEQ ID NO: 1860 - protein, 9 aa, synthetic construct
  source 1..9: note = Seed: LVVVGACGV (KRAS G12C)
IVVIGNCGM

SEQ ID NO: 1861 - protein, 9 aa, synthetic construct
  source 1..9: note = Seed: LVVVGACGV (KRAS G12C)
IVVIGNCGN

SEQ ID NO: 1862 - protein, 9 aa, synthetic construct
  source 1..9: note = Seed: LVVVGACGV (KRAS G12C)
IVVIGNCGQ

SEQ ID NO: 1863 - protein, 9 aa, synthetic construct
  source 1..9: note = Seed: LVVVGACGV (KRAS G12C)
IVVIGNCGR

SEQ ID NO: 1864 - protein, 9 aa, synthetic construct
  source 1..9: note = Seed: LVVVGACGV (KRAS G12C)
IVVIGNCGS

SEQ ID NO: 1865 - protein, 9 aa, synthetic construct
  source 1..9: note = Seed: LVVVGACGV (KRAS G12C)
IVVIGNCGT

SEQ ID NO: 1866 - protein, 9 aa, synthetic construct
  source 1..9: note = Seed: LVVVGACGV (KRAS G12C)
IVVIGNCGV

SEQ ID NO: 1867 - protein, 9 aa, synthetic construct
  source 1..9: note = Seed: LVVVGACGV (KRAS G12C)
IVVIGPCGA

SEQ ID NO: 1868 - protein, 9 aa, synthetic construct
  source 1..9: note = Seed: LVVVGACGV (KRAS G12C)
IVVIGPCGI

SEQ ID NO: 1869 - protein, 9 aa, synthetic construct
  source 1..9: note = Seed: LVVVGACGV (KRAS G12C)
IVVIGPCGL

SEQ ID NO: 1870 - protein, 9 aa, synthetic construct
  source 1..9: note = Seed: LVVVGACGV (KRAS G12C)
IVVIGPCGM

SEQ ID NO: 1871 - protein, 9 aa, synthetic construct
  source 1..9: note = Seed: LVVVGACGV (KRAS G12C)
IVVIGPCGN

SEQ ID NO: 1872 - protein, 9 aa, synthetic construct
  source 1..9: note = Seed: LVVVGACGV (KRAS G12C)
IVVIGPCGS

SEQ ID NO: 1873 - protein, 9 aa, synthetic construct
  source 1..9: note = Seed: LVVVGACGV (KRAS G12C)
IVVIGPCGT

SEQ ID NO: 1874 - protein, 9 aa, synthetic construct
  source 1..9: note = Seed: LVVVGACGV (KRAS G12C)
IVVIGPCGV

SEQ ID NO: 1875 - protein, 9 aa, synthetic construct
  source 1..9: note = Seed: LVVVGACGV (KRAS G12C)
IVVIGRCGA

SEQ ID NO: 1876 - protein, 9 aa, synthetic construct
  source 1..9: note = Seed: LVVVGACGV (KRAS G12C)
IVVIGRCGG

SEQ ID NO: 1877 - protein, 9 aa, synthetic construct
  source 1..9: note = Seed: LVVVGACGV (KRAS G12C)
IVVIGRCGH

SEQ ID NO: 1878 - protein, 9 aa, synthetic construct
  source 1..9: note = Seed: LVVVGACGV (KRAS G12C)
IVVIGRCGK

SEQ ID NO: 1879 - protein, 9 aa, synthetic construct
  source 1..9: note = Seed: LVVVGACGV (KRAS G12C)
IVVIGRCGM

SEQ ID NO: 1880 - protein, 9 aa, synthetic construct
  source 1..9: note = Seed: LVVVGACGV (KRAS G12C)
IVVIGRCGN

SEQ ID NO: 1881 - protein, 9 aa, synthetic construct
  source 1..9: note = Seed: LVVVGACGV (KRAS G12C)
IVVIGRCGP

SEQ ID NO: 1882 - protein, 9 aa, synthetic construct
  source 1..9: note = Seed: LVVVGACGV (KRAS G12C)
IVVIGRCGQ

SEQ ID NO: 1883 - protein, 9 aa, synthetic construct
  source 1..9: note = Seed: LVVVGACGV (KRAS G12C)
IVVIGRCGR

SEQ ID NO: 1884 - protein, 9 aa, synthetic construct
  source 1..9: note = Seed: LVVVGACGV (KRAS G12C)
IVVIGRCGS

SEQ ID NO: 1885 - protein, 9 aa, synthetic construct
  source 1..9: note = Seed: LVVVGACGV (KRAS G12C)
IVVIGRCGT

SEQ ID NO: 1886 - protein, 9 aa, synthetic construct
  source 1..9: note = Seed: LVVVGACGV (KRAS G12C)
IVVIGRCGY

SEQ ID NO: 1887 - protein, 9 aa, synthetic construct
  source 1..9: note = Seed: LVVVGACGV (KRAS G12C)
IVVIGSCGA

SEQ ID NO: 1888 - protein, 9 aa, synthetic construct
  source 1..9: note = Seed: LVVVGACGV (KRAS G12C)
IVVIGSCGH

SEQ ID NO: 1889 - protein, 9 aa, synthetic construct
  source 1..9: note = Seed: LVVVGACGV (KRAS G12C)
IVVIGSCGI

SEQ ID NO: 1890 - protein, 9 aa, synthetic construct
  source 1..9: note = Seed: LVVVGACGV (KRAS G12C)
IVVIGSCGL

SEQ ID NO: 1891 - protein, 9 aa, synthetic construct
  source 1..9: note = Seed: LVVVGACGV (KRAS G12C)
IVVIGSCGM

SEQ ID NO: 1892 - protein, 9 aa, synthetic construct
  source 1..9: note = Seed: LVVVGACGV (KRAS G12C)
IVVIGSCGN

SEQ ID NO: 1893 - protein, 9 aa, synthetic construct
  source 1..9: note = Seed: LVVVGACGV (KRAS G12C)
IVVIGSCGR

SEQ ID NO: 1894 - protein, 9 aa, synthetic construct
  source 1..9: note = Seed: LVVVGACGV (KRAS G12C)
IVVIGSCGS

SEQ ID NO: 1895 - protein, 9 aa, synthetic construct
  source 1..9: note = Seed: LVVVGACGV (KRAS G12C)
IVVIGSCGT

SEQ ID NO: 1896 - protein, 9 aa, synthetic construct
  source 1..9: note = Seed: LVVVGACGV (KRAS G12C)
IVVIGSCGV

SEQ ID NO: 1897 - protein, 9 aa, synthetic construct
  source 1..9: note = Seed: LVVVGACGV (KRAS G12C)
IVVIGTCGA

SEQ ID NO: 1898 - protein, 9 aa, synthetic construct
  source 1..9: note = Seed: LVVVGACGV (KRAS G12C)
IVVIGTCGH

SEQ ID NO: 1899 - protein, 9 aa, synthetic construct
  source 1..9: note = Seed: LVVVGACGV (KRAS G12C)
IVVIGTCGI

SEQ ID NO: 1900 - protein, 9 aa, synthetic construct
  source 1..9: note = Seed: LVVVGACGV (KRAS G12C)
IVVIGTCGL

SEQ ID NO: 1901 - protein, 9 aa, synthetic construct
  source 1..9: note = Seed: LVVVGACGV (KRAS G12C)
IVVIGTCGM

SEQ ID NO: 1902 - protein, 9 aa, synthetic construct
  source 1..9: note = Seed: LVVVGACGV (KRAS G12C)
IVVIGTCGQ

SEQ ID NO: 1903 - protein, 9 aa, synthetic construct
  source 1..9: note = Seed: LVVVGACGV (KRAS G12C)
IVVIGTCGS

SEQ ID NO: 1904 - protein, 9 aa, synthetic construct
  source 1..9: note = Seed: LVVVGACGV (KRAS G12C)
IVVIGTCGT

SEQ ID NO: 1905 - protein, 9 aa, synthetic construct
  source 1..9: note = Seed: LVVVGACGV (KRAS G12C)
IVVIGTCGV

SEQ ID NO: 1906 - protein, 9 aa, synthetic construct
  source 1..9: note = Seed: LVVVGACGV (KRAS G12C)
IVVKGKCGA

SEQ ID NO: 1907 - protein, 9 aa, synthetic construct
  source 1..9: note = Seed: LVVVGACGV (KRAS G12C)
IVVKGRCGA

SEQ ID NO: 1908 - protein, 9 aa, synthetic construct
  source 1..9: note = Seed: LVVVGACGV (KRAS G12C)
IVVKGRCGH

SEQ ID NO: 1909 - protein, 9 aa, synthetic construct
  source 1..9: note = Seed: LVVVGACGV (KRAS G12C)
IVVKGRCGQ

SEQ ID NO: 1910 - protein, 9 aa, synthetic construct
  source 1..9: note = Seed: LVVVGACGV (KRAS G12C)
IVVKGRCGR

SEQ ID NO: 1911 - protein, 9 aa, synthetic construct
  source 1..9: note = Seed: LVVVGACGV (KRAS G12C)
IVVKGRCGS

SEQ ID NO: 1912 - protein, 9 aa, synthetic construct
  source 1..9: note = Seed: LVVVGACGV (KRAS G12C)
IVVLGACGA

SEQ ID NO: 1913 - protein, 9 aa, synthetic construct
  source 1..9: note = Seed: LVVVGACGV (KRAS G12C)
IVVLGACGF

SEQ ID NO: 1914 - protein, 9 aa, synthetic construct
  source 1..9: note = Seed: LVVVGACGV (KRAS G12C)
IVVLGACGG

SEQ ID NO: 1915 - protein, 9 aa, synthetic construct
  source 1..9: note = Seed: LVVVGACGV (KRAS G12C)
IVVLGACGH

SEQ ID NO: 1916 - protein, 9 aa, synthetic construct
  source 1..9: note = Seed: LVVVGACGV (KRAS G12C)
IVVLGACGI

SEQ ID NO: 1917 - protein, 9 aa, synthetic construct
  source 1..9: note = Seed: LVVVGACGV (KRAS G12C)
IVVLGACGK

SEQ ID NO: 1918 - protein, 9 aa, synthetic construct
  source 1..9: note = Seed: LVVVGACGV (KRAS G12C)
IVVLGACGL

SEQ ID NO: 1919 - protein, 9 aa, synthetic construct
  source 1..9: note = Seed: LVVVGACGV (KRAS G12C)
IVVLGACGM

SEQ ID NO: 1920 - protein, 9 aa, synthetic construct
  source 1..9: note = Seed: LVVVGACGV (KRAS G12C)
IVVLGACGN

SEQ ID NO: 1921 - protein, 9 aa, synthetic construct
  source 1..9: note = Seed: LVVVGACGV (KRAS G12C)
IVVLGACGP

SEQ ID NO: 1922 - protein, 9 aa, synthetic construct
  source 1..9: note = Seed: LVVVGACGV (KRAS G12C)
IVVLGACGQ

SEQ ID NO: 1923 - protein, 9 aa, synthetic construct
  source 1..9: note = Seed: LVVVGACGV (KRAS G12C)
IVVLGACGR

SEQ ID NO: 1924 - protein, 9 aa, synthetic construct
  source 1..9: note = Seed: LVVVGACGV (KRAS G12C)
IVVLGACGS

SEQ ID NO: 1925 - protein, 9 aa, synthetic construct
  source 1..9: note = Seed: LVVVGACGV (KRAS G12C)
IVVLGACGT

SEQ ID NO: 1926 - protein, 9 aa, synthetic construct
  source 1..9: note = Seed: LVVVGACGV (KRAS G12C)
IVVLGACGV

SEQ ID NO: 1927 - protein, 9 aa, synthetic construct
  source 1..9: note = Seed: LVVVGACGV (KRAS G12C)
IVVLGACGY

SEQ ID NO: 1928 - protein, 9 aa, synthetic construct
  source 1..9: note = Seed: LVVVGACGV (KRAS G12C)
IVVLGDCGA

SEQ ID NO: 1929 - protein, 9 aa, synthetic construct
  source 1..9: note = Seed: LVVVGACGV (KRAS G12C)
IVVLGGCGA

SEQ ID NO: 1930 - protein, 9 aa, synthetic construct
  source 1..9: note = Seed: LVVVGACGV (KRAS G12C)
IVVLGGCGG

SEQ ID NO: 1931 - protein, 9 aa, synthetic construct
  source 1..9: note = Seed: LVVVGACGV (KRAS G12C)
IVVLGGCGH

SEQ ID NO: 1932 - protein, 9 aa, synthetic construct
  source 1..9: note = Seed: LVVVGACGV (KRAS G12C)
IVVLGGCGI

SEQ ID NO: 1933 - protein, 9 aa, synthetic construct
  source 1..9: note = Seed: LVVVGACGV (KRAS G12C)
IVVLGGCGL

SEQ ID NO: 1934 - protein, 9 aa, synthetic construct
  source 1..9: note = Seed: LVVVGACGV (KRAS G12C)
IVVLGGCGM

SEQ ID NO: 1935 - protein, 9 aa, synthetic construct
  source 1..9: note = Seed: LVVVGACGV (KRAS G12C)
IVVLGGCGN

SEQ ID NO: 1936 - protein, 9 aa, synthetic construct
  source 1..9: note = Seed: LVVVGACGV (KRAS G12C)
IVVLGGCGP

SEQ ID NO: 1937 - protein, 9 aa, synthetic construct
  source 1..9: note = Seed: LVVVGACGV (KRAS G12C)
IVVLGGCGQ

SEQ ID NO: 1938 - protein, 9 aa, synthetic construct
  source 1..9: note = Seed: LVVVGACGV (KRAS G12C)
IVVLGGCGS

SEQ ID NO: 1939 - protein, 9 aa, synthetic construct
  source 1..9: note = Seed: LVVVGACGV (KRAS G12C)
IVVLGGCGT

SEQ ID NO: 1940 - protein, 9 aa, synthetic construct
  source 1..9: note = Seed: LVVVGACGV (KRAS G12C)
IVVLGGCGV

SEQ ID NO: 1941 - protein, 9 aa, synthetic construct
  source 1..9: note = Seed: LVVVGACGV (KRAS G12C)
IVVLGGCGY

SEQ ID NO: 1942 - protein, 9 aa, synthetic construct
  source 1..9: note = Seed: LVVVGACGV (KRAS G12C)
IVVLGHCGH

SEQ ID NO: 1943 - protein, 9 aa, synthetic construct
  source 1..9: note = Seed: LVVVGACGV (KRAS G12C)
IVVLGICGR

SEQ ID NO: 1944 - protein, 9 aa, synthetic construct
  source 1..9: note = Seed: LVVVGACGV (KRAS G12C)
IVVLGKCGA

SEQ ID NO: 1945 - protein, 9 aa, synthetic construct
  source 1..9: note = Seed: LVVVGACGV (KRAS G12C)
IVVLGKCGG

SEQ ID NO: 1946 - protein, 9 aa, synthetic construct
  source 1..9: note = Seed: LVVVGACGV (KRAS G12C)
IVVLGKCGH

SEQ ID NO: 1947 - protein, 9 aa, synthetic construct
  source 1..9: note = Seed: LVVVGACGV (KRAS G12C)
IVVLGKCGK

SEQ ID NO: 1948 - protein, 9 aa, synthetic construct
  source 1..9: note = Seed: LVVVGACGV (KRAS G12C)
IVVLGKCGL

SEQ ID NO: 1949 - protein, 9 aa, synthetic construct
  source 1..9: note = Seed: LVVVGACGV (KRAS G12C)
IVVLGKCGM

SEQ ID NO: 1950 - protein, 9 aa, synthetic construct
  source 1..9: note = Seed: LVVVGACGV (KRAS G12C)
IVVLGKCGN

SEQ ID NO: 1951 - protein, 9 aa, synthetic construct
  source 1..9: note = Seed: LVVVGACGV (KRAS G12C)
IVVLGKCGP

SEQ ID NO: 1952 - protein, 9 aa, synthetic construct
  source 1..9: note = Seed: LVVVGACGV (KRAS G12C)
IVVLGKCGQ

SEQ ID NO: 1953 - protein, 9 aa, synthetic construct
  source 1..9: note = Seed: LVVVGACGV (KRAS G12C)
IVVLGKCGR

SEQ ID NO: 1954 - protein, 9 aa, synthetic construct
  source 1..9: note = Seed: LVVVGACGV (KRAS G12C)
IVVLGKCGS

SEQ ID NO: 1955 - protein, 9 aa, synthetic construct
  source 1..9: note = Seed: LVVVGACGV (KRAS G12C)
IVVLGKCGT

SEQ ID NO: 1956 - protein, 9 aa, synthetic construct
  source 1..9: note = Seed: LVVVGACGV (KRAS G12C)
IVVLGKCGV

SEQ ID NO: 1957 - protein, 9 aa, synthetic construct
  source 1..9: note = Seed: LVVVGACGV (KRAS G12C)
IVVLGKCGY

SEQ ID NO: 1958 - protein, 9 aa, synthetic construct
  source 1..9: note = Seed: LVVVGACGV (KRAS G12C)
IVVLGNCGA

SEQ ID NO: 1959 - protein, 9 aa, synthetic construct
  source 1..9: note = Seed: LVVVGACGV (KRAS G12C)
IVVLGNCGF

SEQ ID NO: 1960 - protein, 9 aa, synthetic construct
  source 1..9: note = Seed: LVVVGACGV (KRAS G12C)
IVVLGNCGG

SEQ ID NO: 1961 - protein, 9 aa, synthetic construct
  source 1..9: note = Seed: LVVVGACGV (KRAS G12C)
IVVLGNCGH

SEQ ID NO: 1962 - protein, 9 aa, synthetic construct
  source 1..9: note = Seed: LVVVGACGV (KRAS G12C)
IVVLGNCGI

SEQ ID NO: 1963 - protein, 9 aa, synthetic construct
  source 1..9: note = Seed: LVVVGACGV (KRAS G12C)
IVVLGNCGL

SEQ ID NO: 1964 - protein, 9 aa, synthetic construct
  source 1..9: note = Seed: LVVVGACGV (KRAS G12C)
IVVLGNCGM

SEQ ID NO: 1965 - protein, 9 aa, synthetic construct
  source 1..9: note = Seed: LVVVGACGV (KRAS G12C)
IVVLGNCGN

SEQ ID NO: 1966 - protein, 9 aa, synthetic construct
  source 1..9: note = Seed: LVVVGACGV (KRAS G12C)
IVVLGNCGQ

SEQ ID NO: 1967 - protein, 9 aa, synthetic construct
  source 1..9: note = Seed: LVVVGACGV (KRAS G12C)
IVVLGNCGS

SEQ ID NO: 1968 - protein, 9 aa, synthetic construct
  source 1..9: note = Seed: LVVVGACGV (KRAS G12C)
IVVLGNCGT

SEQ ID NO: 1969 - protein, 9 aa, synthetic construct
  source 1..9: note = Seed: LVVVGACGV (KRAS G12C)
IVVLGNCGV

SEQ ID NO: 1970 - protein, 9 aa, synthetic construct
  source 1..9: note = Seed: LVVVGACGV (KRAS G12C)
IVVLGNCGY

SEQ ID NO: 1971 - protein, 9 aa, synthetic construct
  source 1..9: note = Seed: LVVVGACGV (KRAS G12C)
IVVLGPCGA

SEQ ID NO: 1972 - protein, 9 aa, synthetic construct
  source 1..9: note = Seed: LVVVGACGV (KRAS G12C)
IVVLGPCGF

SEQ ID NO: 1973 - protein, 9 aa, synthetic construct
  source 1..9: note = Seed: LVVVGACGV (KRAS G12C)
IVVLGPCGG

SEQ ID NO: 1974 - protein, 9 aa, synthetic construct
  source 1..9: note = Seed: LVVVGACGV (KRAS G12C)
IVVLGPCGH

SEQ ID NO: 1975 - protein, 9 aa, synthetic construct
  source 1..9: note = Seed: LVVVGACGV (KRAS G12C)
IVVLGPCGI

SEQ ID NO: 1976 - protein, 9 aa, synthetic construct
  source 1..9: note = Seed: LVVVGACGV (KRAS G12C)
IVVLGPCGL

SEQ ID NO: 1977 - protein, 9 aa, synthetic construct
  source 1..9: note = Seed: LVVVGACGV (KRAS G12C)
IVVLGPCGM

SEQ ID NO: 1978 - protein, 9 aa, synthetic construct
  source 1..9: note = Seed: LVVVGACGV (KRAS G12C)
IVVLGPCGN

SEQ ID NO: 1979 - protein, 9 aa, synthetic construct
  source 1..9: note = Seed: LVVVGACGV (KRAS G12C)
IVVLGPCGS

SEQ ID NO: 1980 - protein, 9 aa, synthetic construct
  source 1..9: note = Seed: LVVVGACGV (KRAS G12C)
IVVLGPCGT

SEQ ID NO: 1981 - protein, 9 aa, synthetic construct
  source 1..9: note = Seed: LVVVGACGV (KRAS G12C)
IVVLGPCGV

SEQ ID NO: 1982 - protein, 9 aa, synthetic construct
  source 1..9: note = Seed: LVVVGACGV (KRAS G12C)
IVVLGPCGY

SEQ ID NO: 1983 - protein, 9 aa, synthetic construct
  source 1..9: note = Seed: LVVVGACGV (KRAS G12C)
IVVLGRCGA

SEQ ID NO: 1984 - protein, 9 aa, synthetic construct
  source 1..9: note = Seed: LVVVGACGV (KRAS G12C)
IVVLGRCGE

SEQ ID NO: 1985 - protein, 9 aa, synthetic construct
  source 1..9: note = Seed: LVVVGACGV (KRAS G12C)
IVVLGRCGG

SEQ ID NO: 1986 - protein, 9 aa, synthetic construct
  source 1..9: note = Seed: LVVVGACGV (KRAS G12C)
IVVLGRCGH

SEQ ID NO: 1987 - protein, 9 aa, synthetic construct
  source 1..9: note = Seed: LVVVGACGV (KRAS G12C)
IVVLGRCGK

SEQ ID NO: 1988 - protein, 9 aa, synthetic construct
  source 1..9: note = Seed: LVVVGACGV (KRAS G12C)
IVVLGRCGM

SEQ ID NO: 1989 - protein, 9 aa, synthetic construct
  source 1..9: note = Seed: LVVVGACGV (KRAS G12C)
IVVLGRCGN

SEQ ID NO: 1990 - protein, 9 aa, synthetic construct
  source 1..9: note = Seed: LVVVGACGV (KRAS G12C)
IVVLGRCGP

SEQ ID NO: 1991 - protein, 9 aa, synthetic construct
  source 1..9: note = Seed: LVVVGACGV (KRAS G12C)
IVVLGRCGQ

SEQ ID NO: 1992 - protein, 9 aa, synthetic construct
  source 1..9: note = Seed: LVVVGACGV (KRAS G12C)
IVVLGRCGR

SEQ ID NO: 1993 - protein, 9 aa, synthetic construct
  source 1..9: note = Seed: LVVVGACGV (KRAS G12C)
IVVLGRCGS

SEQ ID NO: 1994 - protein, 9 aa, synthetic construct
  source 1..9: note = Seed: LVVVGACGV (KRAS G12C)
IVVLGRCGT

SEQ ID NO: 1995 - protein, 9 aa, synthetic construct
  source 1..9: note = Seed: LVVVGACGV (KRAS G12C)
IVVLGRCGV

SEQ ID NO: 1996 - protein, 9 aa, synthetic construct
  source 1..9: note = Seed: LVVVGACGV (KRAS G12C)
IVVLGRCGY

SEQ ID NO: 1997 - protein, 9 aa, synthetic construct
  source 1..9: note = Seed: LVVVGACGV (KRAS G12C)
IVVLGSCGA

SEQ ID NO: 1998 - protein, 9 aa, synthetic construct
  source 1..9: note = Seed: LVVVGACGV (KRAS G12C)
IVVLGSCGG

SEQ ID NO: 1999 - protein, 9 aa, synthetic construct
  source 1..9: note = Seed: LVVVGACGV (KRAS G12C)
IVVLGSCGH

SEQ ID NO: 2000 - protein, 9 aa, synthetic construct
  source 1..9: note = Seed: LVVVGACGV (KRAS G12C)
IVVLGSCGI

SEQ ID NO: 2001 - protein, 9 aa, synthetic construct
  source 1..9: note = Seed: LVVVGACGV (KRAS G12C)
IVVLGSCGL

SEQ ID NO: 2002 - protein, 9 aa, synthetic construct
  source 1..9: note = Seed: LVVVGACGV (KRAS G12C)
IVVLGSCGM

SEQ ID NO: 2003 - protein, 9 aa, synthetic construct
  source 1..9: note = Seed: LVVVGACGV (KRAS G12C)
IVVLGSCGN

SEQ ID NO: 2004 - protein, 9 aa, synthetic construct
  source 1..9: note = Seed: LVVVGACGV (KRAS G12C)
IVVLGSCGP

SEQ ID NO: 2005 - protein, 9 aa, synthetic construct
  source 1..9: note = Seed: LVVVGACGV (KRAS G12C)
IVVLGSCGQ

SEQ ID NO: 2006 - protein, 9 aa, synthetic construct
  source 1..9: note = Seed: LVVVGACGV (KRAS G12C)
IVVLGSCGR

SEQ ID NO: 2007 - protein, 9 aa, synthetic construct
  source 1..9: note = Seed: LVVVGACGV (KRAS G12C)
IVVLGSCGS

SEQ ID NO: 2008 - protein, 9 aa, synthetic construct
  source 1..9: note = Seed: LVVVGACGV (KRAS G12C)
IVVLGSCGT

SEQ ID NO: 2009 - protein, 9 aa, synthetic construct
  source 1..9: note = Seed: LVVVGACGV (KRAS G12C)
IVVLGSCGV

SEQ ID NO: 2010 - protein, 9 aa, synthetic construct
  source 1..9: note = Seed: LVVVGACGV (KRAS G12C)
IVVLGSCGY

SEQ ID NO: 2011 - protein, 9 aa, synthetic construct
  source 1..9: note = Seed: LVVVGACGV (KRAS G12C)
IVVLGTCGA

SEQ ID NO: 2012 - protein, 9 aa, synthetic construct
  source 1..9: note = Seed: LVVVGACGV (KRAS G12C)
IVVLGTCGH

SEQ ID NO: 2013 - protein, 9 aa, synthetic construct
  source 1..9: note = Seed: LVVVGACGV (KRAS G12C)
IVVLGTCGI

SEQ ID NO: 2014 - protein, 9 aa, synthetic construct
  source 1..9: note = Seed: LVVVGACGV (KRAS G12C)
IVVLGTCGL

SEQ ID NO: 2015 - protein, 9 aa, synthetic construct
  source 1..9: note = Seed: LVVVGACGV (KRAS G12C)
IVVLGTCGM

SEQ ID NO: 2016 - protein, 9 aa, synthetic construct
  source 1..9: note = Seed: LVVVGACGV (KRAS G12C)
IVVLGTCGN

SEQ ID NO: 2017 - protein, 9 aa, synthetic construct
  source 1..9: note = Seed: LVVVGACGV (KRAS G12C)
IVVLGTCGQ

SEQ ID NO: 2018 - protein, 9 aa, synthetic construct
  source 1..9: note = Seed: LVVVGACGV (KRAS G12C)
IVVLGTCGS

SEQ ID NO: 2019 - protein, 9 aa, synthetic construct
  source 1..9: note = Seed: LVVVGACGV (KRAS G12C)
IVVLGTCGT

SEQ ID NO: 2020 - protein, 9 aa, synthetic construct
  source 1..9: note = Seed: LVVVGACGV (KRAS G12C)
IVVLGTCGV

SEQ ID NO: 2021 - protein, 9 aa, synthetic construct
  source 1..9: note = Seed: LVVVGACGV (KRAS G12C)
IVVMGACGA

SEQ ID NO: 2022 - protein, 9 aa, synthetic construct
  source 1..9: note = Seed: LVVVGACGV (KRAS G12C)
IVVMGACGF

SEQ ID NO: 2023 - protein, 9 aa, synthetic construct
  source 1..9: note = Seed: LVVVGACGV (KRAS G12C)
IVVMGACGG

SEQ ID NO: 2024 - protein, 9 aa, synthetic construct
  source 1..9: note = Seed: LVVVGACGV (KRAS G12C)
IVVMGACGH

SEQ ID NO: 2025 - protein, 9 aa, synthetic construct
  source 1..9: note = Seed: LVVVGACGV (KRAS G12C)
IVVMGACGI

SEQ ID NO: 2026 - protein, 9 aa, synthetic construct
  source 1..9: note = Seed: LVVVGACGV (KRAS G12C)
IVVMGACGK

SEQ ID NO: 2027 - protein, 9 aa, synthetic construct
  source 1..9: note = Seed: LVVVGACGV (KRAS G12C)
IVVMGACGL

SEQ ID NO: 2028 - protein, 9 aa, synthetic construct
  source 1..9: note = Seed: LVVVGACGV (KRAS G12C)
IVVMGACGM

SEQ ID NO: 2029 - protein, 9 aa, synthetic construct
  source 1..9: note = Seed: LVVVGACGV (KRAS G12C)
IVVMGACGN

SEQ ID NO: 2030 - protein, 9 aa, synthetic construct
  source 1..9: note = Seed: LVVVGACGV (KRAS G12C)
IVVMGACGP

SEQ ID NO: 2031 - protein, 9 aa, synthetic construct
  source 1..9: note = Seed: LVVVGACGV (KRAS G12C)
IVVMGACGQ

SEQ ID NO: 2032 - protein, 9 aa, synthetic construct
  source 1..9: note = Seed: LVVVGACGV (KRAS G12C)
IVVMGACGR

SEQ ID NO: 2033 - protein, 9 aa, synthetic construct
  source 1..9: note = Seed: LVVVGACGV (KRAS G12C)
IVVMGACGS

SEQ ID NO: 2034 - protein, 9 aa, synthetic construct
  source 1..9: note = Seed: LVVVGACGV (KRAS G12C)
IVVMGACGT

SEQ ID NO: 2035 - protein, 9 aa, synthetic construct
  source 1..9: note = Seed: LVVVGACGV (KRAS G12C)
IVVMGACGV

SEQ ID NO: 2036 - protein, 9 aa, synthetic construct
  source 1..9: note = Seed: LVVVGACGV (KRAS G12C)
IVVMGACGY

SEQ ID NO: 2037 - protein, 9 aa, synthetic construct
  source 1..9: note = Seed: LVVVGACGV (KRAS G12C)
IVVMGDCGA

SEQ ID NO: 2038 - protein, 9 aa, synthetic construct
  source 1..9: note = Seed: LVVVGACGV (KRAS G12C)
IVVMGGCGA

SEQ ID NO: 2039 - protein, 9 aa, synthetic construct
  source 1..9: note = Seed: LVVVGACGV (KRAS G12C)
IVVMGGCGF

SEQ ID NO: 2040 - protein, 9 aa, synthetic construct
  source 1..9: note = Seed: LVVVGACGV (KRAS G12C)
IVVMGGCGG

SEQ ID NO: 2041 - protein, 9 aa, synthetic construct
  source 1..9: note = Seed: LVVVGACGV (KRAS G12C)
IVVMGGCGH

SEQ ID NO: 2042 - protein, 9 aa, synthetic construct
  source 1..9: note = Seed: LVVVGACGV (KRAS G12C)
IVVMGGCGI

SEQ ID NO: 2043 - protein, 9 aa, synthetic construct
  source 1..9: note = Seed: LVVVGACGV (KRAS G12C)
IVVMGGCGL

SEQ ID NO: 2044 - protein, 9 aa, synthetic construct
  source 1..9: note = Seed: LVVVGACGV (KRAS G12C)
IVVMGGCGM

SEQ ID NO: 2045 - protein, 9 aa, synthetic construct
  source 1..9: note = Seed: LVVVGACGV (KRAS G12C)
IVVMGGCGN

SEQ ID NO: 2046 - protein, 9 aa, synthetic construct
  source 1..9: note = Seed: LVVVGACGV (KRAS G12C)
IVVMGGCGQ

SEQ ID NO: 2047 - protein, 9 aa, synthetic construct
  source 1..9: note = Seed: LVVVGACGV (KRAS G12C)
IVVMGGCGS

SEQ ID NO: 2048 - protein, 9 aa, synthetic construct
  source 1..9: note = Seed: LVVVGACGV (KRAS G12C)
IVVMGGCGT

SEQ ID NO: 2049 - protein, 9 aa, synthetic construct
  source 1..9: note = Seed: LVVVGACGV (KRAS G12C)
IVVMGGCGV

SEQ ID NO: 2050 - protein, 9 aa, synthetic construct
  source 1..9: note = Seed: LVVVGACGV (KRAS G12C)
IVVMGGCGY

SEQ ID NO: 2051 - protein, 9 aa, synthetic construct
  source 1..9: note = Seed: LVVVGACGV (KRAS G12C)
IVVMGHCGH

SEQ ID NO: 2052 - protein, 9 aa, synthetic construct
  source 1..9: note = Seed: LVVVGACGV (KRAS G12C)
IVVMGHCGL

SEQ ID NO: 2053 - protein, 9 aa, synthetic construct
  source 1..9: note = Seed: LVVVGACGV (KRAS G12C)
IVVMGKCGA

SEQ ID NO: 2054 - protein, 9 aa, synthetic construct
  source 1..9: note = Seed: LVVVGACGV (KRAS G12C)
IVVMGKCGG

SEQ ID NO: 2055 - protein, 9 aa, synthetic construct
  source 1..9: note = Seed: LVVVGACGV (KRAS G12C)
IVVMGKCGH

SEQ ID NO: 2056 - protein, 9 aa, synthetic construct
  source 1..9: note = Seed: LVVVGACGV (KRAS G12C)
IVVMGKCGK

SEQ ID NO: 2057 - protein, 9 aa, synthetic construct
  source 1..9: note = Seed: LVVVGACGV (KRAS G12C)
IVVMGKCGL

SEQ ID NO: 2058 - protein, 9 aa, synthetic construct
  source 1..9: note = Seed: LVVVGACGV (KRAS G12C)
IVVMGKCGM

SEQ ID NO: 2059 - protein, 9 aa, synthetic construct
  source 1..9: note = Seed: LVVVGACGV (KRAS G12C)
IVVMGKCGN

SEQ ID NO: 2060 - protein, 9 aa, synthetic construct
  source 1..9: note = Seed: LVVVGACGV (KRAS G12C)
IVVMGKCGP

SEQ ID NO: 2061 - protein, 9 aa, synthetic construct
  source 1..9: note = Seed: LVVVGACGV (KRAS G12C)
IVVMGKCGQ

SEQ ID NO: 2062 - protein, 9 aa, synthetic construct
  source 1..9: note = Seed: LVVVGACGV (KRAS G12C)
IVVMGKCGR

SEQ ID NO: 2063 - protein, 9 aa, synthetic construct
  source 1..9: note = Seed: LVVVGACGV (KRAS G12C)
IVVMGKCGS

SEQ ID NO: 2064 - protein, 9 aa, synthetic construct
  source 1..9: note = Seed: LVVVGACGV (KRAS G12C)
IVVMGKCGT

SEQ ID NO: 2065 - protein, 9 aa, synthetic construct
  source 1..9: note = Seed: LVVVGACGV (KRAS G12C)
IVVMGKCGV

SEQ ID NO: 2066 - protein, 9 aa, synthetic construct
  source 1..9: note = Seed: LVVVGACGV (KRAS G12C)
IVVMGKCGY

SEQ ID NO: 2067 - protein, 9 aa, synthetic construct
  source 1..9: note = Seed: LVVVGACGV (KRAS G12C)
IVVMGNCGA

SEQ ID NO: 2068 - protein, 9 aa, synthetic construct
  source 1..9: note = Seed: LVVVGACGV (KRAS G12C)
IVVMGNCGF

SEQ ID NO: 2069 - protein, 9 aa, synthetic construct
  source 1..9: note = Seed: LVVVGACGV (KRAS G12C)
IVVMGNCGG

SEQ ID NO: 2070 - protein, 9 aa, synthetic construct
  source 1..9: note = Seed: LVVVGACGV (KRAS G12C)
IVVMGNCGH

SEQ ID NO: 2071 - protein, 9 aa, synthetic construct
  source 1..9: note = Seed: LVVVGACGV (KRAS G12C)
IVVMGNCGI

SEQ ID NO: 2072 - protein, 9 aa, synthetic construct
  source 1..9: note = Seed: LVVVGACGV (KRAS G12C)
IVVMGNCGL

SEQ ID NO: 2073 - protein, 9 aa, synthetic construct
  source 1..9: note = Seed: LVVVGACGV (KRAS G12C)
IVVMGNCGM

SEQ ID NO: 2074 - protein, 9 aa, synthetic construct
  source 1..9: note = Seed: LVVVGACGV (KRAS G12C)
IVVMGNCGN

SEQ ID NO: 2075 - protein, 9 aa, synthetic construct
  source 1..9: note = Seed: LVVVGACGV (KRAS G12C)
IVVMGNCGQ

SEQ ID NO: 2076 - protein, 9 aa, synthetic construct
  source 1..9: note = Seed: LVVVGACGV (KRAS G12C)
IVVMGNCGS

SEQ ID NO: 2077 - protein, 9 aa, synthetic construct
  source 1..9: note = Seed: LVVVGACGV (KRAS G12C)
IVVMGNCGT

SEQ ID NO: 2078 - protein, 9 aa, synthetic construct
  source 1..9: note = Seed: LVVVGACGV (KRAS G12C)
IVVMGNCGV

SEQ ID NO: 2079 - protein, 9 aa, synthetic construct
  source 1..9: note = Seed: LVVVGACGV (KRAS G12C)
IVVMGNCGY

SEQ ID NO: 2080 - protein, 9 aa, synthetic construct
  source 1..9: note = Seed: LVVVGACGV (KRAS G12C)
IVVMGPCGA

SEQ ID NO: 2081 - protein, 9 aa, synthetic construct
  source 1..9: note = Seed: LVVVGACGV (KRAS G12C)
IVVMGPCGF

SEQ ID NO: 2082 - protein, 9 aa, synthetic construct
  source 1..9: note = Seed: LVVVGACGV (KRAS G12C)
IVVMGPCGH

SEQ ID NO: 2083 - protein, 9 aa, synthetic construct
  source 1..9: note = Seed: LVVVGACGV (KRAS G12C)
IVVMGPCGI

SEQ ID NO: 2084 - protein, 9 aa, synthetic construct
  source 1..9: note = Seed: LVVVGACGV (KRAS G12C)
IVVMGPCGL

SEQ ID NO: 2085 - protein, 9 aa, synthetic construct
  source 1..9: note = Seed: LVVVGACGV (KRAS G12C)
IVVMGPCGM

SEQ ID NO: 2086 - protein, 9 aa, synthetic construct
  source 1..9: note = Seed: LVVVGACGV (KRAS G12C)
IVVMGPCGN

SEQ ID NO: 2087 - protein, 9 aa, synthetic construct
  source 1..9: note = Seed: LVVVGACGV (KRAS G12C)
IVVMGPCGS

SEQ ID NO: 2088 - protein, 9 aa, synthetic construct
  source 1..9: note = Seed: LVVVGACGV (KRAS G12C)
IVVMGPCGT

SEQ ID NO: 2089 - protein, 9 aa, synthetic construct
  source 1..9: note = Seed: LVVVGACGV (KRAS G12C)
IVVMGPCGV

SEQ ID NO: 2090 - protein, 9 aa, synthetic construct
  source 1..9: note = Seed: LVVVGACGV (KRAS G12C)
IVVMGPCGY

SEQ ID NO: 2091 - protein, 9 aa, synthetic construct
  source 1..9: note = Seed: LVVVGACGV (KRAS G12C)
IVVMGRCGA

SEQ ID NO: 2092 - protein, 9 aa, synthetic construct
  source 1..9: note = Seed: LVVVGACGV (KRAS G12C)
IVVMGRCGE

SEQ ID NO: 2093 - protein, 9 aa, synthetic construct
  source 1..9: note = Seed: LVVVGACGV (KRAS G12C)
IVVMGRCGG

SEQ ID NO: 2094 - protein, 9 aa, synthetic construct
  source 1..9: note = Seed: LVVVGACGV (KRAS G12C)
IVVMGRCGH

SEQ ID NO: 2095 - protein, 9 aa, synthetic construct
  source 1..9: note = Seed: LVVVGACGV (KRAS G12C)
IVVMGRCGK

SEQ ID NO: 2096 - protein, 9 aa, synthetic construct
  source 1..9: note = Seed: LVVVGACGV (KRAS G12C)
IVVMGRCGL

SEQ ID NO: 2097 - protein, 9 aa, synthetic construct
  source 1..9: note = Seed: LVVVGACGV (KRAS G12C)
IVVMGRCGM

SEQ ID NO: 2098 - protein, 9 aa, synthetic construct
  source 1..9: note = Seed: LVVVGACGV (KRAS G12C)
IVVMGRCGN

SEQ ID NO: 2099 - protein, 9 aa, synthetic construct
  source 1..9: note = Seed: LVVVGACGV (KRAS G12C)
IVVMGRCGP

SEQ ID NO: 2100 - protein, 9 aa, synthetic construct
  source 1..9: note = Seed: LVVVGACGV (KRAS G12C)
IVVMGRCGQ

SEQ ID NO: 2101 - protein, 9 aa, synthetic construct
  source 1..9: note = Seed: LVVVGACGV (KRAS G12C)
IVVMGRCGR

SEQ ID NO: 2102 - protein, 9 aa, synthetic construct
  source 1..9: note = Seed: LVVVGACGV (KRAS G12C)
IVVMGRCGS

SEQ ID NO: 2103 - protein, 9 aa, synthetic construct
  source 1..9: note = Seed: LVVVGACGV (KRAS G12C)
IVVMGRCGT

SEQ ID NO: 2104 - protein, 9 aa, synthetic construct
  source 1..9: note = Seed: LVVVGACGV (KRAS G12C)
IVVMGRCGV

SEQ ID NO: 2105 - protein, 9 aa, synthetic construct
  source 1..9: note = Seed: LVVVGACGV (KRAS G12C)
IVVMGRCGY

SEQ ID NO: 2106 - protein, 9 aa, synthetic construct
  source 1..9: note = Seed: LVVVGACGV (KRAS G12C)
IVVMGSCGA

SEQ ID NO: 2107 - protein, 9 aa, synthetic construct
  source 1..9: note = Seed: LVVVGACGV (KRAS G12C)
IVVMGSCGF

SEQ ID NO: 2108 - protein, 9 aa, synthetic construct
  source 1..9: note = Seed: LVVVGACGV (KRAS G12C)
IVVMGSCGG

SEQ ID NO: 2109 - protein, 9 aa, synthetic construct
  source 1..9: note = Seed: LVVVGACGV (KRAS G12C)
IVVMGSCGH

SEQ ID NO: 2110 - protein, 9 aa, synthetic construct
  source 1..9: note = Seed: LVVVGACGV (KRAS G12C)
IVVMGSCGI

SEQ ID NO: 2111 - protein, 9 aa, synthetic construct
  source 1..9: note = Seed: LVVVGACGV (KRAS G12C)
IVVMGSCGL

SEQ ID NO: 2112 - protein, 9 aa, synthetic construct
  source 1..9: note = Seed: LVVVGACGV (KRAS G12C)
IVVMGSCGM

SEQ ID NO: 2113 - protein, 9 aa, synthetic construct
  source 1..9: note = Seed: LVVVGACGV (KRAS G12C)
IVVMGSCGN

SEQ ID NO: 2114 - protein, 9 aa, synthetic construct
  source 1..9: note = Seed: LVVVGACGV (KRAS G12C)
IVVMGSCGQ

SEQ ID NO: 2115 - protein, 9 aa, synthetic construct
  source 1..9: note = Seed: LVVVGACGV (KRAS G12C)
IVVMGSCGR

SEQ ID NO: 2116 - protein, 9 aa, synthetic construct
  source 1..9: note = Seed: LVVVGACGV (KRAS G12C)
IVVMGSCGS

SEQ ID NO: 2117 - protein, 9 aa, synthetic construct
  source 1..9: note = Seed: LVVVGACGV (KRAS G12C)
IVVMGSCGT

SEQ ID NO: 2118 - protein, 9 aa, synthetic construct
  source 1..9: note = Seed: LVVVGACGV (KRAS G12C)
IVVMGSCGV

SEQ ID NO: 2119 - protein, 9 aa, synthetic construct
  source 1..9: note = Seed: LVVVGACGV (KRAS G12C)
IVVMGSCGY

SEQ ID NO: 2120 - protein, 9 aa, synthetic construct
  source 1..9: note = Seed: LVVVGACGV (KRAS G12C)
IVVMGTCGA

SEQ ID NO: 2121 - protein, 9 aa, synthetic construct
  source 1..9: note = Seed: LVVVGACGV (KRAS G12C)
IVVMGTCGH

SEQ ID NO: 2122 - protein, 9 aa, synthetic construct
  source 1..9: note = Seed: LVVVGACGV (KRAS G12C)
IVVMGTCGI

SEQ ID NO: 2123 - protein, 9 aa, synthetic construct
  source 1..9: note = Seed: LVVVGACGV (KRAS G12C)
IVVMGTCGL

SEQ ID NO: 2124 - protein, 9 aa, synthetic construct
  source 1..9: note = Seed: LVVVGACGV (KRAS G12C)
IVVMGTCGM

SEQ ID NO: 2125 - protein, 9 aa, synthetic construct
  source 1..9: note = Seed: LVVVGACGV (KRAS G12C)
IVVMGTCGN

SEQ ID NO: 2126 - protein, 9 aa, synthetic construct
  source 1..9: note = Seed: LVVVGACGV (KRAS G12C)
IVVMGTCGQ

SEQ ID NO: 2127 - protein, 9 aa, synthetic construct
  source 1..9: note = Seed: LVVVGACGV (KRAS G12C)
IVVMGTCGS

SEQ ID NO: 2128 - protein, 9 aa, synthetic construct
  source 1..9: note = Seed: LVVVGACGV (KRAS G12C)
IVVMGTCGT

SEQ ID NO: 2129 - protein, 9 aa, synthetic construct
  source 1..9: note = Seed: LVVVGACGV (KRAS G12C)
IVVMGTCGV

SEQ ID NO: 2130 - protein, 9 aa, synthetic construct
  source 1..9: note = Seed: LVVVGACGV (KRAS G12C)
IVVMGVCGH

SEQ ID NO: 2131 - protein, 9 aa, synthetic construct
  source 1..9: note = Seed: LVVVGACGV (KRAS G12C)
IVVNGACGA

SEQ ID NO: 2132 - protein, 9 aa, synthetic construct
  source 1..9: note = Seed: LVVVGACGV (KRAS G12C)
IVVNGACGF

SEQ ID NO: 2133 - protein, 9 aa, synthetic construct
  source 1..9: note = Seed: LVVVGACGV (KRAS G12C)
IVVNGACGI

SEQ ID NO: 2134 - protein, 9 aa, synthetic construct
  source 1..9: note = Seed: LVVVGACGV (KRAS G12C)
IVVNGACGL

SEQ ID NO: 2135 - protein, 9 aa, synthetic construct
  source 1..9: note = Seed: LVVVGACGV (KRAS G12C)
IVVNGACGM

SEQ ID NO: 2136 - protein, 9 aa, synthetic construct
  source 1..9: note = Seed: LVVVGACGV (KRAS G12C)
IVVNGACGS

SEQ ID NO: 2137 - protein, 9 aa, synthetic construct
  source 1..9: note = Seed: LVVVGACGV (KRAS G12C)
IVVNGACGT

SEQ ID NO: 2138 - protein, 9 aa, synthetic construct
  source 1..9: note = Seed: LVVVGACGV (KRAS G12C)
IVVNGACGV

SEQ ID NO: 2139 - protein, 9 aa, synthetic construct
  source 1..9: note = Seed: LVVVGACGV (KRAS G12C)
IVVNGACGW

SEQ ID NO: 2140 - protein, 9 aa, synthetic construct
  source 1..9: note = Seed: LVVVGACGV (KRAS G12C)
IVVNGACGY

SEQ ID NO: 2141 - protein, 9 aa, synthetic construct
  source 1..9: note = Seed: LVVVGACGV (KRAS G12C)
IVVNGDCGF

SEQ ID NO: 2142 - protein, 9 aa, synthetic construct
  source 1..9: note = Seed: LVVVGACGV (KRAS G12C)
IVVNGDCGI

SEQ ID NO: 2143 - protein, 9 aa, synthetic construct
  source 1..9: note = Seed: LVVVGACGV (KRAS G12C)
IVVNGDCGL

SEQ ID NO: 2144 - protein, 9 aa, synthetic construct
  source 1..9: note = Seed: LVVVGACGV (KRAS G12C)
IVVNGDCGV

SEQ ID NO: 2145 - protein, 9 aa, synthetic construct
  source 1..9: note = Seed: LVVVGACGV (KRAS G12C)
IVVNGFCGI

SEQ ID NO: 2146 - protein, 9 aa, synthetic construct
  source 1..9: note = Seed: LVVVGACGV (KRAS G12C)
IVVNGFCGV

SEQ ID NO: 2147 - protein, 9 aa, synthetic construct
  source 1..9: note = Seed: LVVVGACGV (KRAS G12C)
IVVNGGCGA

SEQ ID NO: 2148 - protein, 9 aa, synthetic construct
  source 1..9: note = Seed: LVVVGACGV (KRAS G12C)
IVVNGGCGF

SEQ ID NO: 2149 - protein, 9 aa, synthetic construct
  source 1..9: note = Seed: LVVVGACGV (KRAS G12C)
IVVNGGCGI

SEQ ID NO: 2150 - protein, 9 aa, synthetic construct
  source 1..9: note = Seed: LVVVGACGV (KRAS G12C)
IVVNGGCGL

SEQ ID NO: 2151 - protein, 9 aa, synthetic construct
  source 1..9: note = Seed: LVVVGACGV (KRAS G12C)
IVVNGGCGM

SEQ ID NO: 2152 - protein, 9 aa, synthetic construct
  source 1..9: note = Seed: LVVVGACGV (KRAS G12C)
IVVNGGCGV

SEQ ID NO: 2153 - protein, 9 aa, synthetic construct
  source 1..9: note = Seed: LVVVGACGV (KRAS G12C)
IVVNGGCGY

SEQ ID NO: 2154 - protein, 9 aa, synthetic construct
  source 1..9: note = Seed: LVVVGACGV (KRAS G12C)
IVVNGHCGF

SEQ ID NO: 2155 - protein, 9 aa, synthetic construct
  source 1..9: note = Seed: LVVVGACGV (KRAS G12C)
IVVNGHCGI

SEQ ID NO: 2156 - protein, 9 aa, synthetic construct
  source 1..9: note = Seed: LVVVGACGV (KRAS G12C)
IVVNGHCGL

SEQ ID NO: 2157 - protein, 9 aa, synthetic construct
  source 1..9: note = Seed: LVVVGACGV (KRAS G12C)
IVVNGHCGM

SEQ ID NO: 2158 - protein, 9 aa, synthetic construct
  source 1..9: note = Seed: LVVVGACGV (KRAS G12C)
IVVNGHCGV

SEQ ID NO: 2159 - protein, 9 aa, synthetic construct
  source 1..9: note = Seed: LVVVGACGV (KRAS G12C)
IVVNGHCGY

SEQ ID NO: 2160 - protein, 9 aa, synthetic construct
  source 1..9: note = Seed: LVVVGACGV (KRAS G12C)
IVVNGICGA

SEQ ID NO: 2161 - protein, 9 aa, synthetic construct
  source 1..9: note = Seed: LVVVGACGV (KRAS G12C)
IVVNGICGF

SEQ ID NO: 2162 - protein, 9 aa, synthetic construct
  source 1..9: note = Seed: LVVVGACGV (KRAS G12C)
IVVNGICGI

SEQ ID NO: 2163 - protein, 9 aa, synthetic construct
  source 1..9: note = Seed: LVVVGACGV (KRAS G12C)
IVVNGICGL

SEQ ID NO: 2164 - protein, 9 aa, synthetic construct
  source 1..9: note = Seed: LVVVGACGV (KRAS G12C)
IVVNGICGM

SEQ ID NO: 2165 - protein, 9 aa, synthetic construct
  source 1..9: note = Seed: LVVVGACGV (KRAS G12C)
IVVNGICGN

SEQ ID NO: 2166 - protein, 9 aa, synthetic construct
  source 1..9: note = Seed: LVVVGACGV (KRAS G12C)
IVVNGICGS

SEQ ID NO: 2167 - protein, 9 aa, synthetic construct
  source 1..9: note = Seed: LVVVGACGV (KRAS G12C)
IVVNGICGT

SEQ ID NO: 2168 - protein, 9 aa, synthetic construct
  source 1..9: note = Seed: LVVVGACGV (KRAS G12C)
IVVNGICGV

SEQ ID NO: 2169 - protein, 9 aa, synthetic construct
  source 1..9: note = Seed: LVVVGACGV (KRAS G12C)
IVVNGICGY

SEQ ID NO: 2170 - protein, 9 aa, synthetic construct
  source 1..9: note = Seed: LVVVGACGV (KRAS G12C)
IVVNGKCGI

SEQ ID NO: 2171 - protein, 9 aa, synthetic construct
  source 1..9: note = Seed: LVVVGACGV (KRAS G12C)
IVVNGLCGA

SEQ ID NO: 2172 - protein, 9 aa, synthetic construct
  source 1..9: note = Seed: LVVVGACGV (KRAS G12C)
IVVNGLCGF

SEQ ID NO: 2173 - protein, 9 aa, synthetic construct
  source 1..9: note = Seed: LVVVGACGV (KRAS G12C)
IVVNGLCGI

SEQ ID NO: 2174 - protein, 9 aa, synthetic construct
  source 1..9: note = Seed: LVVVGACGV (KRAS G12C)
IVVNGLCGL

SEQ ID NO: 2175 - protein, 9 aa, synthetic construct
  source 1..9: note = Seed: LVVVGACGV (KRAS G12C)
IVVNGLCGM

SEQ ID NO: 2176 - protein, 9 aa, synthetic construct
  source 1..9: note = Seed: LVVVGACGV (KRAS G12C)
IVVNGLCGV

SEQ ID NO: 2177 - protein, 9 aa, synthetic construct
  source 1..9: note = Seed: LVVVGACGV (KRAS G12C)
IVVNGLCGY

SEQ ID NO: 2178 - protein, 9 aa, synthetic construct
  source 1..9: note = Seed: LVVVGACGV (KRAS G12C)
IVVNGMCGF

SEQ ID NO: 2179 - protein, 9 aa, synthetic construct
  source 1..9: note = Seed: LVVVGACGV (KRAS G12C)
IVVNGMCGI

SEQ ID NO: 2180 - protein, 9 aa, synthetic construct
  source 1..9: note = Seed: LVVVGACGV (KRAS G12C)
IVVNGMCGL

SEQ ID NO: 2181 - protein, 9 aa, synthetic construct
  source 1..9: note = Seed: LVVVGACGV (KRAS G12C)
IVVNGMCGM

SEQ ID NO: 2182 - protein, 9 aa, synthetic construct
  source 1..9: note = Seed: LVVVGACGV (KRAS G12C)
IVVNGMCGV

SEQ ID NO: 2183 - protein, 9 aa, synthetic construct
  source 1..9: note = Seed: LVVVGACGV (KRAS G12C)
IVVNGMCGY

SEQ ID NO: 2184 - protein, 9 aa, synthetic construct
  source 1..9: note = Seed: LVVVGACGV (KRAS G12C)
IVVNGNCGA

SEQ ID NO: 2185 - protein, 9 aa, synthetic construct
  source 1..9: note = Seed: LVVVGACGV (KRAS G12C)
IVVNGNCGF

SEQ ID NO: 2186 - protein, 9 aa, synthetic construct
  source 1..9: note = Seed: LVVVGACGV (KRAS G12C)
IVVNGNCGI

SEQ ID NO: 2187 - protein, 9 aa, synthetic construct
  source 1..9: note = Seed: LVVVGACGV (KRAS G12C)
IVVNGNCGL

SEQ ID NO: 2188 - protein, 9 aa, synthetic construct
  source 1..9: note = Seed: LVVVGACGV (KRAS G12C)
IVVNGNCGM

SEQ ID NO: 2189 - protein, 9 aa, synthetic construct
  source 1..9: note = Seed: LVVVGACGV (KRAS G12C)
IVVNGNCGS

SEQ ID NO: 2190 - protein, 9 aa, synthetic construct
  source 1..9: note = Seed: LVVVGACGV (KRAS G12C)
IVVNGNCGT

SEQ ID NO: 2191 - protein, 9 aa, synthetic construct
  source 1..9: note = Seed: LVVVGACGV (KRAS G12C)
IVVNGNCGV

SEQ ID NO: 2192 - protein, 9 aa, synthetic construct
  source 1..9: note = Seed: LVVVGACGV (KRAS G12C)
IVVNGNCGW

SEQ ID NO: 2193 - protein, 9 aa, synthetic construct
  source 1..9: note = Seed: LVVVGACGV (KRAS G12C)
IVVNGNCGY

SEQ ID NO: 2194 - protein, 9 aa, synthetic construct
  source 1..9: note = Seed: LVVVGACGV (KRAS G12C)
IVVNGPCGF

SEQ ID NO: 2195 - protein, 9 aa, synthetic construct
  source 1..9: note = Seed: LVVVGACGV (KRAS G12C)
IVVNGPCGI

SEQ ID NO: 2196 - protein, 9 aa, synthetic construct
  source 1..9: note = Seed: LVVVGACGV (KRAS G12C)
IVVNGPCGL

SEQ ID NO: 2197 - protein, 9 aa, synthetic construct
  source 1..9: note = Seed: LVVVGACGV (KRAS G12C)
IVVNGPCGM

SEQ ID NO: 2198 - protein, 9 aa, synthetic construct
  source 1..9: note = Seed: LVVVGACGV (KRAS G12C)
IVVNGPCGV

SEQ ID NO: 2199 - protein, 9 aa, synthetic construct
  source 1..9: note = Seed: LVVVGACGV (KRAS G12C)
IVVNGPCGY

SEQ ID NO: 2200 - protein, 9 aa, synthetic construct
  source 1..9: note = Seed: LVVVGACGV (KRAS G12C)
IVVNGQCGF

SEQ ID NO: 2201 - protein, 9 aa, synthetic construct
  source 1..9: note = Seed: LVVVGACGV (KRAS G12C)
IVVNGQCGI

SEQ ID NO: 2202 - protein, 9 aa, synthetic construct
  source 1..9: note = Seed: LVVVGACGV (KRAS G12C)
IVVNGQCGL

SEQ ID NO: 2203 - protein, 9 aa, synthetic construct
  source 1..9: note = Seed: LVVVGACGV (KRAS G12C)
IVVNGQCGV

SEQ ID NO: 2204 - protein, 9 aa, synthetic construct
  source 1..9: note = Seed: LVVVGACGV (KRAS G12C)
IVVNGSCGA

SEQ ID NO: 2205 - protein, 9 aa, synthetic construct
  source 1..9: note = Seed: LVVVGACGV (KRAS G12C)
IVVNGSCGF

SEQ ID NO: 2206 - protein, 9 aa, synthetic construct
  source 1..9: note = Seed: LVVVGACGV (KRAS G12C)
IVVNGSCGI

SEQ ID NO: 2207 - protein, 9 aa, synthetic construct
  source 1..9: note = Seed: LVVVGACGV (KRAS G12C)
IVVNGSCGL

SEQ ID NO: 2208 - protein, 9 aa, synthetic construct
  source 1..9: note = Seed: LVVVGACGV (KRAS G12C)
IVVNGSCGM

SEQ ID NO: 2209 - protein, 9 aa, synthetic construct
  source 1..9: note = Seed: LVVVGACGV (KRAS G12C)
IVVNGSCGS

SEQ ID NO: 2210 - protein, 9 aa, synthetic construct
  source 1..9: note = Seed: LVVVGACGV (KRAS G12C)
IVVNGSCGT

SEQ ID NO: 2211 - protein, 9 aa, synthetic construct
  source 1..9: note = Seed: LVVVGACGV (KRAS G12C)
IVVNGSCGV

SEQ ID NO: 2212 - protein, 9 aa, synthetic construct
  source 1..9: note = Seed: LVVVGACGV (KRAS G12C)
IVVNGSCGY

SEQ ID NO: 2213 - protein, 9 aa, synthetic construct
  source 1..9: note = Seed: LVVVGACGV (KRAS G12C)
IVVNGTCGA

SEQ ID NO: 2214 - protein, 9 aa, synthetic construct
  source 1..9: note = Seed: LVVVGACGV (KRAS G12C)
IVVNGTCGF

SEQ ID NO: 2215 - protein, 9 aa, synthetic construct
  source 1..9: note = Seed: LVVVGACGV (KRAS G12C)
IVVNGTCGI

SEQ ID NO: 2216 - protein, 9 aa, synthetic construct
  source 1..9: note = Seed: LVVVGACGV (KRAS G12C)
IVVNGTCGL

SEQ ID NO: 2217 - protein, 9 aa, synthetic construct
  source 1..9: note = Seed: LVVVGACGV (KRAS G12C)
IVVNGTCGM

SEQ ID NO: 2218 - protein, 9 aa, synthetic construct
  source 1..9: note = Seed: LVVVGACGV (KRAS G12C)
IVVNGTCGV

SEQ ID NO: 2219 - protein, 9 aa, synthetic construct
  source 1..9: note = Seed: LVVVGACGV (KRAS G12C)
IVVNGTCGY

SEQ ID NO: 2220 - protein, 9 aa, synthetic construct
  source 1..9: note = Seed: LVVVGACGV (KRAS G12C)
IVVNGVCGA

SEQ ID NO: 2221 - protein, 9 aa, synthetic construct
  source 1..9: note = Seed: LVVVGACGV (KRAS G12C)
IVVNGVCGF

SEQ ID NO: 2222 - protein, 9 aa, synthetic construct
  source 1..9: note = Seed: LVVVGACGV (KRAS G12C)
IVVNGVCGI

SEQ ID NO: 2223 - protein, 9 aa, synthetic construct
  source 1..9: note = Seed: LVVVGACGV (KRAS G12C)
IVVNGVCGL

SEQ ID NO: 2224 - protein, 9 aa, synthetic construct
  source 1..9: note = Seed: LVVVGACGV (KRAS G12C)
IVVNGVCGM

SEQ ID NO: 2225 - protein, 9 aa, synthetic construct
  source 1..9: note = Seed: LVVVGACGV (KRAS G12C)
IVVNGVCGS

SEQ ID NO: 2226 - protein, 9 aa, synthetic construct
  source 1..9: note = Seed: LVVVGACGV (KRAS G12C)
IVVNGVCGT

SEQ ID NO: 2227 - protein, 9 aa, synthetic construct
  source 1..9: note = Seed: LVVVGACGV (KRAS G12C)
IVVNGVCGV

SEQ ID NO: 2228 - protein, 9 aa, synthetic construct
  source 1..9: note = Seed: LVVVGACGV (KRAS G12C)
IVVNGVCGY

SEQ ID NO: 2229 - protein, 9 aa, synthetic construct
  source 1..9: note = Seed: LVVVGACGV (KRAS G12C)
IVVNGYCGI

SEQ ID NO: 2230 - protein, 9 aa, synthetic construct
  source 1..9: note = Seed: LVVVGACGV (KRAS G12C)
IVVNGYCGL

SEQ ID NO: 2231 - protein, 9 aa, synthetic construct
  source 1..9: note = Seed: LVVVGACGV (KRAS G12C)
IVVNGYCGM

SEQ ID NO: 2232 - protein, 9 aa, synthetic construct
  source 1..9: note = Seed: LVVVGACGV (KRAS G12C)
IVVNGYCGV

SEQ ID NO: 2233 - protein, 9 aa, synthetic construct
  source 1..9: note = Seed: LVVVGACGV (KRAS G12C)
IVVQGACGA

SEQ ID NO: 2234 - protein, 9 aa, synthetic construct
  source 1..9: note = Seed: LVVVGACGV (KRAS G12C)
IVVQGACGF

SEQ ID NO: 2235 - protein, 9 aa, synthetic construct
  source 1..9: note = Seed: LVVVGACGV (KRAS G12C)
IVVQGACGI

SEQ ID NO: 2236 - protein, 9 aa, synthetic construct
  source 1..9: note = Seed: LVVVGACGV (KRAS G12C)
IVVQGACGL

SEQ ID NO: 2237 - protein, 9 aa, synthetic construct
  source 1..9: note = Seed: LVVVGACGV (KRAS G12C)
IVVQGACGM

SEQ ID NO: 2238 - protein, 9 aa, synthetic construct
  source 1..9: note = Seed: LVVVGACGV (KRAS G12C)
IVVQGACGS

SEQ ID NO: 2239 - protein, 9 aa, synthetic construct
  source 1..9: note = Seed: LVVVGACGV (KRAS G12C)
IVVQGACGT

SEQ ID NO: 2240 - protein, 9 aa, synthetic construct
  source 1..9: note = Seed: LVVVGACGV (KRAS G12C)
IVVQGACGV

SEQ ID NO: 2241 - protein, 9 aa, synthetic construct
  source 1..9: note = Seed: LVVVGACGV (KRAS G12C)
IVVQGGCGA

SEQ ID NO: 2242 - protein, 9 aa, synthetic construct
  source 1..9: note = Seed: LVVVGACGV (KRAS G12C)
IVVQGGCGI

SEQ ID NO: 2243 - protein, 9 aa, synthetic construct
  source 1..9: note = Seed: LVVVGACGV (KRAS G12C)
IVVQGGCGL

SEQ ID NO: 2244 - protein, 9 aa, synthetic construct
  source 1..9: note = Seed: LVVVGACGV (KRAS G12C)
IVVQGGCGM

SEQ ID NO: 2245 - protein, 9 aa, synthetic construct
  source 1..9: note = Seed: LVVVGACGV (KRAS G12C)
IVVQGGCGS

SEQ ID NO: 2246 - protein, 9 aa, synthetic construct
  source 1..9: note = Seed: LVVVGACGV (KRAS G12C)
IVVQGGCGV

SEQ ID NO: 2247 - protein, 9 aa, synthetic construct
  source 1..9: note = Seed: LVVVGACGV (KRAS G12C)
IVVQGKCGA

SEQ ID NO: 2248 - protein, 9 aa, synthetic construct
  source 1..9: note = Seed: LVVVGACGV (KRAS G12C)
IVVQGKCGS

SEQ ID NO: 2249 - protein, 9 aa, synthetic construct
  source 1..9: note = Seed: LVVVGACGV (KRAS G12C)
IVVQGNCGA

SEQ ID NO: 2250 - protein, 9 aa, synthetic construct
  source 1..9: note = Seed: LVVVGACGV (KRAS G12C)
IVVQGNCGI

SEQ ID NO: 2251 - protein, 9 aa, synthetic construct
  source 1..9: note = Seed: LVVVGACGV (KRAS G12C)
IVVQGNCGL

SEQ ID NO: 2252 - protein, 9 aa, synthetic construct
  source 1..9: note = Seed: LVVVGACGV (KRAS G12C)
IVVQGNCGM

SEQ ID NO: 2253 - protein, 9 aa, synthetic construct
  source 1..9: note = Seed: LVVVGACGV (KRAS G12C)
IVVQGNCGS

SEQ ID NO: 2254 - protein, 9 aa, synthetic construct
  source 1..9: note = Seed: LVVVGACGV (KRAS G12C)
IVVQGNCGV

SEQ ID NO: 2255 - protein, 9 aa, synthetic construct
  source 1..9: note = Seed: LVVVGACGV (KRAS G12C)
IVVQGPCGA

SEQ ID NO: 2256 - protein, 9 aa, synthetic construct
  source 1..9: note = Seed: LVVVGACGV (KRAS G12C)
IVVQGPCGI

SEQ ID NO: 2257 - protein, 9 aa, synthetic construct
  source 1..9: note = Seed: LVVVGACGV (KRAS G12C)
IVVQGPCGL

SEQ ID NO: 2258 - protein, 9 aa, synthetic construct
  source 1..9: note = Seed: LVVVGACGV (KRAS G12C)
IVVQGPCGM

SEQ ID NO: 2259 - protein, 9 aa, synthetic construct
  source 1..9: note = Seed: LVVVGACGV (KRAS G12C)
IVVQGPCGV

SEQ ID NO: 2260 - protein, 9 aa, synthetic construct
  source 1..9: note = Seed: LVVVGACGV (KRAS G12C)
IVVQGRCGA

SEQ ID NO: 2261 - protein, 9 aa, synthetic construct
  source 1..9: note = Seed: LVVVGACGV (KRAS G12C)
IVVQGRCGH

SEQ ID NO: 2262 - protein, 9 aa, synthetic construct
  source 1..9: note = Seed: LVVVGACGV (KRAS G12C)
IVVQGRCGL

SEQ ID NO: 2263 - protein, 9 aa, synthetic construct
  source 1..9: note = Seed: LVVVGACGV (KRAS G12C)
IVVQGRCGM

SEQ ID NO: 2264 - protein, 9 aa, synthetic construct
  source 1..9: note = Seed: LVVVGACGV (KRAS G12C)
IVVQGRCGQ

SEQ ID NO: 2265 - protein, 9 aa, synthetic construct
  source 1..9: note = Seed: LVVVGACGV (KRAS G12C)
IVVQGRCGS

SEQ ID NO: 2266 - protein, 9 aa, synthetic construct
  source 1..9: note = Seed: LVVVGACGV (KRAS G12C)
IVVQGSCGA

SEQ ID NO: 2267 - protein, 9 aa, synthetic construct
  source 1..9: note = Seed: LVVVGACGV (KRAS G12C)
IVVQGSCGI

SEQ ID NO: 2268 - protein, 9 aa, synthetic construct
  source 1..9: note = Seed: LVVVGACGV (KRAS G12C)
IVVQGSCGL

SEQ ID NO: 2269 - protein, 9 aa, synthetic construct
  source 1..9: note = Seed: LVVVGACGV (KRAS G12C)
IVVQGSCGM

SEQ ID NO: 2270 - protein, 9 aa, synthetic construct
  source 1..9: note = Seed: LVVVGACGV (KRAS G12C)
IVVQGSCGS

SEQ ID NO: 2271 - protein, 9 aa, synthetic construct
  source 1..9: note = Seed: LVVVGACGV (KRAS G12C)
IVVQGSCGT

SEQ ID NO: 2272 - protein, 9 aa, synthetic construct
  source 1..9: note = Seed: LVVVGACGV (KRAS G12C)
IVVQGSCGV

SEQ ID NO: 2273 - protein, 9 aa, synthetic construct
  source 1..9: note = Seed: LVVVGACGV (KRAS G12C)
IVVQGTCGA

SEQ ID NO: 2274 - protein, 9 aa, synthetic construct
  source 1..9: note = Seed: LVVVGACGV (KRAS G12C)
IVVQGTCGI

SEQ ID NO: 2275 - protein, 9 aa, synthetic construct
  source 1..9: note = Seed: LVVVGACGV (KRAS G12C)
IVVQGTCGL

SEQ ID NO: 2276 - protein, 9 aa, synthetic construct
  source 1..9: note = Seed: LVVVGACGV (KRAS G12C)
IVVQGTCGM

SEQ ID NO: 2277 - protein, 9 aa, synthetic construct
  source 1..9: note = Seed: LVVVGACGV (KRAS G12C)
IVVQGTCGV

SEQ ID NO: 2278 - protein, 9 aa, synthetic construct
  source 1..9: note = Seed: LVVVGACGV (KRAS G12C)
IVVQGVCGA

SEQ ID NO: 2279 - protein, 9 aa, synthetic construct
  source 1..9: note = Seed: LVVVGACGV (KRAS G12C)
IVVQGVCGL

SEQ ID NO: 2280 - protein, 9 aa, synthetic construct
  source 1..9: note = Seed: LVVVGACGV (KRAS G12C)
IVVQGVCGV

SEQ ID NO: 2281 - protein, 9 aa, synthetic construct
  source 1..9: note = Seed: LVVVGACGV (KRAS G12C)
IVVRGRCGA

SEQ ID NO: 2282 - protein, 9 aa, synthetic construct
  source 1..9: note = Seed: LVVVGACGV (KRAS G12C)
IVVRGRCGH

SEQ ID NO: 2283 - protein, 9 aa, synthetic construct
  source 1..9: note = Seed: LVVVGACGV (KRAS G12C)
IVVRGRCGL

SEQ ID NO: 2284 - protein, 9 aa, synthetic construct
  source 1..9: note = Seed: LVVVGACGV (KRAS G12C)
IVVRGRCGM

SEQ ID NO: 2285 - protein, 9 aa, synthetic construct
  source 1..9: note = Seed: LVVVGACGV (KRAS G12C)
IVVRGRCGR

SEQ ID NO: 2286 - protein, 9 aa, synthetic construct
  source 1..9: note = Seed: LVVVGACGV (KRAS G12C)
IVVSGACGA

SEQ ID NO: 2287 - protein, 9 aa, synthetic construct
  source 1..9: note = Seed: LVVVGACGV (KRAS G12C)
IVVSGACGF

SEQ ID NO: 2288 - protein, 9 aa, synthetic construct
  source 1..9: note = Seed: LVVVGACGV (KRAS G12C)
IVVSGACGI

SEQ ID NO: 2289 - protein, 9 aa, synthetic construct
  source 1..9: note = Seed: LVVVGACGV (KRAS G12C)
IVVSGACGL

SEQ ID NO: 2290 - protein, 9 aa, synthetic construct
  source 1..9: note = Seed: LVVVGACGV (KRAS G12C)
IVVSGACGM

SEQ ID NO: 2291 - protein, 9 aa, synthetic construct
  source 1..9: note = Seed: LVVVGACGV (KRAS G12C)
IVVSGACGS

SEQ ID NO: 2292 - protein, 9 aa, synthetic construct
  source 1..9: note = Seed: LVVVGACGV (KRAS G12C)
IVVSGACGT

SEQ ID NO: 2293 - protein, 9 aa, synthetic construct
  source 1..9: note = Seed: LVVVGACGV (KRAS G12C)
IVVSGACGV

SEQ ID NO: 2294 - protein, 9 aa, synthetic construct
  source 1..9: note = Seed: LVVVGACGV (KRAS G12C)
IVVSGACGY

SEQ ID NO: 2295 - protein, 9 aa, synthetic construct
  source 1..9: note = Seed: LVVVGACGV (KRAS G12C)
IVVSGGCGA

SEQ ID NO: 2296 - protein, 9 aa, synthetic construct
  source 1..9: note = Seed: LVVVGACGV (KRAS G12C)
IVVSGGCGI

SEQ ID NO: 2297 - protein, 9 aa, synthetic construct
  source 1..9: note = Seed: LVVVGACGV (KRAS G12C)
IVVSGGCGL

SEQ ID NO: 2298 - protein, 9 aa, synthetic construct
  source 1..9: note = Seed: LVVVGACGV (KRAS G12C)
IVVSGGCGM

SEQ ID NO: 2299 - protein, 9 aa, synthetic construct
  source 1..9: note = Seed: LVVVGACGV (KRAS G12C)
IVVSGGCGV

SEQ ID NO: 2300 - protein, 9 aa, synthetic construct
  source 1..9: note = Seed: LVVVGACGV (KRAS G12C)
IVVSGNCGF

SEQ ID NO: 2301 - protein, 9 aa, synthetic construct
  source 1..9: note = Seed: LVVVGACGV (KRAS G12C)
IVVSGNCGI

SEQ ID NO: 2302 - protein, 9 aa, synthetic construct
  source 1..9: note = Seed: LVVVGACGV (KRAS G12C)
IVVSGNCGL

SEQ ID NO: 2303 - protein, 9 aa, synthetic construct
  source 1..9: note = Seed: LVVVGACGV (KRAS G12C)
IVVSGNCGM

SEQ ID NO: 2304 - protein, 9 aa, synthetic construct
  source 1..9: note = Seed: LVVVGACGV (KRAS G12C)
IVVSGNCGV

SEQ ID NO: 2305 - protein, 9 aa, synthetic construct
  source 1..9: note = Seed: LVVVGACGV (KRAS G12C)
IVVSGNCGY

SEQ ID NO: 2306 - protein, 9 aa, synthetic construct
  source 1..9: note = Seed: LVVVGACGV (KRAS G12C)
IVVSGPCGI

SEQ ID NO: 2307 - protein, 9 aa, synthetic construct
  source 1..9: note = Seed: LVVVGACGV (KRAS G12C)
IVVSGPCGL

SEQ ID NO: 2308 - protein, 9 aa, synthetic construct
  source 1..9: note = Seed: LVVVGACGV (KRAS G12C)
IVVSGPCGV

SEQ ID NO: 2309 - protein, 9 aa, synthetic construct
  source 1..9: note = Seed: LVVVGACGV (KRAS G12C)
IVVSGRCGA

SEQ ID NO: 2310 - protein, 9 aa, synthetic construct
  source 1..9: note = Seed: LVVVGACGV (KRAS G12C)
IVVSGRCGH

SEQ ID NO: 2311 - protein, 9 aa, synthetic construct
  source 1..9: note = Seed: LVVVGACGV (KRAS G12C)
IVVSGRCGS

SEQ ID NO: 2312 - protein, 9 aa, synthetic construct
  source 1..9: note = Seed: LVVVGACGV (KRAS G12C)
IVVSGRCGY

SEQ ID NO: 2313 - protein, 9 aa, synthetic construct
  source 1..9: note = Seed: LVVVGACGV (KRAS G12C)
IVVSGSCGA

SEQ ID NO: 2314 - protein, 9 aa, synthetic construct
  source 1..9: note = Seed: LVVVGACGV (KRAS G12C)
IVVSGSCGF

SEQ ID NO: 2315 - protein, 9 aa, synthetic construct
  source 1..9: note = Seed: LVVVGACGV (KRAS G12C)
IVVSGSCGI

SEQ ID NO: 2316 - protein, 9 aa, synthetic construct
  source 1..9: note = Seed: LVVVGACGV (KRAS G12C)
IVVSGSCGL

SEQ ID NO: 2317 - protein, 9 aa, synthetic construct
  source 1..9: note = Seed: LVVVGACGV (KRAS G12C)
IVVSGSCGM

SEQ ID NO: 2318 - protein, 9 aa, synthetic construct
  source 1..9: note = Seed: LVVVGACGV (KRAS G12C)
IVVSGSCGV

SEQ ID NO: 2319 - protein, 9 aa, synthetic construct
  source 1..9: note = Seed: LVVVGACGV (KRAS G12C)
IVVSGSCGY

SEQ ID NO: 2320 - protein, 9 aa, synthetic construct
  source 1..9: note = Seed: LVVVGACGV (KRAS G12C)
IVVSGTCGI

SEQ ID NO: 2321 - protein, 9 aa, synthetic construct
  source 1..9: note = Seed: LVVVGACGV (KRAS G12C)
IVVSGTCGL

SEQ ID NO: 2322 - protein, 9 aa, synthetic construct
  source 1..9: note = Seed: LVVVGACGV (KRAS G12C)
IVVSGTCGV

SEQ ID NO: 2323 - protein, 9 aa, synthetic construct
  source 1..9: note = Seed: LVVVGACGV (KRAS G12C)
IVVTGACGA

SEQ ID NO: 2324 - protein, 9 aa, synthetic construct
  source 1..9: note = Seed: LVVVGACGV (KRAS G12C)
IVVTGACGI

SEQ ID NO: 2325 - protein, 9 aa, synthetic construct
  source 1..9: note = Seed: LVVVGACGV (KRAS G12C)
IVVTGACGL

SEQ ID NO: 2326 - protein, 9 aa, synthetic construct
  source 1..9: note = Seed: LVVVGACGV (KRAS G12C)
IVVTGACGM

SEQ ID NO: 2327 - protein, 9 aa, synthetic construct
  source 1..9: note = Seed: LVVVGACGV (KRAS G12C)
IVVTGACGV

SEQ ID NO: 2328 - protein, 9 aa, synthetic construct
  source 1..9: note = Seed: LVVVGACGV (KRAS G12C)
IVVTGGCGA

SEQ ID NO: 2329 - protein, 9 aa, synthetic construct
  source 1..9: note = Seed: LVVVGACGV (KRAS G12C)
IVVTGGCGI

SEQ ID NO: 2330 - protein, 9 aa, synthetic construct
  source 1..9: note = Seed: LVVVGACGV (KRAS G12C)
IVVTGGCGL

SEQ ID NO: 2331 - protein, 9 aa, synthetic construct
  source 1..9: note = Seed: LVVVGACGV (KRAS G12C)
IVVTGGCGV

SEQ ID NO: 2332 - protein, 9 aa, synthetic construct
  source 1..9: note = Seed: LVVVGACGV (KRAS G12C)
IVVTGNCGI

SEQ ID NO: 2333 - protein, 9 aa, synthetic construct
  source 1..9: note = Seed: LVVVGACGV (KRAS G12C)
IVVTGNCGL

SEQ ID NO: 2334 - protein, 9 aa, synthetic construct
  source 1..9: note = Seed: LVVVGACGV (KRAS G12C)
IVVTGNCGV

SEQ ID NO: 2335 - protein, 9 aa, synthetic construct
  source 1..9: note = Seed: LVVVGACGV (KRAS G12C)
IVVTGPCGI

SEQ ID NO: 2336 - protein, 9 aa, synthetic construct
  source 1..9: note = Seed: LVVVGACGV (KRAS G12C)
IVVTGPCGL

SEQ ID NO: 2337 - protein, 9 aa, synthetic construct
  source 1..9: note = Seed: LVVVGACGV (KRAS G12C)
IVVTGPCGV

SEQ ID NO: 2338 - protein, 9 aa, synthetic construct
  source 1..9: note = Seed: LVVVGACGV (KRAS G12C)
IVVTGRCGA

SEQ ID NO: 2339 - protein, 9 aa, synthetic construct
  source 1..9: note = Seed: LVVVGACGV (KRAS G12C)
IVVTGRCGH

SEQ ID NO: 2340 - protein, 9 aa, synthetic construct
  source 1..9: note = Seed: LVVVGACGV (KRAS G12C)
IVVTGRCGS

SEQ ID NO: 2341 - protein, 9 aa, synthetic construct
  source 1..9: note = Seed: LVVVGACGV (KRAS G12C)
IVVTGSCGA

SEQ ID NO: 2342 - protein, 9 aa, synthetic construct
  source 1..9: note = Seed: LVVVGACGV (KRAS G12C)
IVVTGSCGI

SEQ ID NO: 2343 - protein, 9 aa, synthetic construct
  source 1..9: note = Seed: LVVVGACGV (KRAS G12C)
IVVTGSCGL

SEQ ID NO: 2344 - protein, 9 aa, synthetic construct
  source 1..9: note = Seed: LVVVGACGV (KRAS G12C)
IVVTGSCGV

SEQ ID NO: 2345 - protein, 9 aa, synthetic construct
  source 1..9: note = Seed: LVVVGACGV (KRAS G12C)
IVVVGACGA

SEQ ID NO: 2346 - protein, 9 aa, synthetic construct
  source 1..9: note = Seed: LVVVGACGV (KRAS G12C)
IVVVGACGI

SEQ ID NO: 2347 - protein, 9 aa, synthetic construct
  source 1..9: note = Seed: LVVVGACGV (KRAS G12C)
IVVVGACGL

SEQ ID NO: 2348 - protein, 9 aa, synthetic construct
  source 1..9: note = Seed: LVVVGACGV (KRAS G12C)
IVVVGACGM

SEQ ID NO: 2349 - protein, 9 aa, synthetic construct
  source 1..9: note = Seed: LVVVGACGV (KRAS G12C)
IVVVGACGS

SEQ ID NO: 2350 - protein, 9 aa, synthetic construct
  source 1..9: note = Seed: LVVVGACGV (KRAS G12C)
IVVVGACGT

SEQ ID NO: 2351 - protein, 9 aa, synthetic construct
  source 1..9: note = Seed: LVVVGACGV (KRAS G12C)
IVVVGACGV

SEQ ID NO: 2352 - protein, 9 aa, synthetic construct
  source 1..9: note = Seed: LVVVGACGV (KRAS G12C)
IVVVGGCGA

SEQ ID NO: 2353 - protein, 9 aa, synthetic construct
  source 1..9: note = Seed: LVVVGACGV (KRAS G12C)
IVVVGGCGI

SEQ ID NO: 2354 - protein, 9 aa, synthetic construct
  source 1..9: note = Seed: LVVVGACGV (KRAS G12C)
IVVVGGCGL

SEQ ID NO: 2355 - protein, 9 aa, synthetic construct
  source 1..9: note = Seed: LVVVGACGV (KRAS G12C)
IVVVGGCGM

SEQ ID NO: 2356 - protein, 9 aa, synthetic construct
  source 1..9: note = Seed: LVVVGACGV (KRAS G12C)
IVVVGGCGS

SEQ ID NO: 2357 - protein, 9 aa, synthetic construct
  source 1..9: note = Seed: LVVVGACGV (KRAS G12C)
IVVVGGCGT

SEQ ID NO: 2358 - protein, 9 aa, synthetic construct
  source 1..9: note = Seed: LVVVGACGV (KRAS G12C)
IVVVGGCGV

SEQ ID NO: 2359 - protein, 9 aa, synthetic construct
  source 1..9: note = Seed: LVVVGACGV (KRAS G12C)
IVVVGKCGA

SEQ ID NO: 2360 - protein, 9 aa, synthetic construct
  source 1..9: note = Seed: LVVVGACGV (KRAS G12C)
IVVVGKCGH

SEQ ID NO: 2361 - protein, 9 aa, synthetic construct
  source 1..9: note = Seed: LVVVGACGV (KRAS G12C)
IVVVGKCGK

SEQ ID NO: 2362 - protein, 9 aa, synthetic construct
  source 1..9: note = Seed: LVVVGACGV (KRAS G12C)
IVVVGKCGQ

SEQ ID NO: 2363 - protein, 9 aa, synthetic construct
  source 1..9: note = Seed: LVVVGACGV (KRAS G12C)
IVVVGKCGR

SEQ ID NO: 2364 - protein, 9 aa, synthetic construct
  source 1..9: note = Seed: LVVVGACGV (KRAS G12C)
IVVVGKCGS

SEQ ID NO: 2365 - protein, 9 aa, synthetic construct
  source 1..9: note = Seed: LVVVGACGV (KRAS G12C)
IVVVGNCGA

SEQ ID NO: 2366 - protein, 9 aa, synthetic construct
  source 1..9: note = Seed: LVVVGACGV (KRAS G12C)
IVVVGNCGI

SEQ ID NO: 2367 - protein, 9 aa, synthetic construct
  source 1..9: note = Seed: LVVVGACGV (KRAS G12C)
IVVVGNCGL

SEQ ID NO: 2368 - protein, 9 aa, synthetic construct
  source 1..9: note = Seed: LVVVGACGV (KRAS G12C)
IVVVGNCGM

SEQ ID NO: 2369 - protein, 9 aa, synthetic construct
  source 1..9: note = Seed: LVVVGACGV (KRAS G12C)
IVVVGNCGS

SEQ ID NO: 2370 - protein, 9 aa, synthetic construct
  source 1..9: note = Seed: LVVVGACGV (KRAS G12C)
IVVVGNCGV

SEQ ID NO: 2371 - protein, 9 aa, synthetic construct
  source 1..9: note = Seed: LVVVGACGV (KRAS G12C)
IVVVGPCGA

SEQ ID NO: 2372 - protein, 9 aa, synthetic construct
  source 1..9: note = Seed: LVVVGACGV (KRAS G12C)
IVVVGPCGI

SEQ ID NO: 2373 - protein, 9 aa, synthetic construct
  source 1..9: note = Seed: LVVVGACGV (KRAS G12C)
IVVVGPCGL

SEQ ID NO: 2374 - protein, 9 aa, synthetic construct
  source 1..9: note = Seed: LVVVGACGV (KRAS G12C)
IVVVGPCGM

SEQ ID NO: 2375 - protein, 9 aa, synthetic construct
  source 1..9: note = Seed: LVVVGACGV (KRAS G12C)
IVVVGPCGT

SEQ ID NO: 2376 - protein, 9 aa, synthetic construct
  source 1..9: note = Seed: LVVVGACGV (KRAS G12C)
IVVVGPCGV

SEQ ID NO: 2377 - protein, 9 aa, synthetic construct
  source 1..9: note = Seed: LVVVGACGV (KRAS G12C)
IVVVGRCGA

SEQ ID NO: 2378 - protein, 9 aa, synthetic construct
  source 1..9: note = Seed: LVVVGACGV (KRAS G12C)
IVVVGRCGH

SEQ ID NO: 2379 - protein, 9 aa, synthetic construct
  source 1..9: note = Seed: LVVVGACGV (KRAS G12C)
IVVVGRCGK

SEQ ID NO: 2380 - protein, 9 aa, synthetic construct
  source 1..9: note = Seed: LVVVGACGV (KRAS G12C)
IVVVGRCGN

SEQ ID NO: 2381 - protein, 9 aa, synthetic construct
  source 1..9: note = Seed: LVVVGACGV (KRAS G12C)
IVVVGRCGQ

SEQ ID NO: 2382 - protein, 9 aa, synthetic construct
  source 1..9: note = Seed: LVVVGACGV (KRAS G12C)
IVVVGRCGR

SEQ ID NO: 2383 - protein, 9 aa, synthetic construct
  source 1..9: note = Seed: LVVVGACGV (KRAS G12C)
IVVVGRCGS

SEQ ID NO: 2384 - protein, 9 aa, synthetic construct
  source 1..9: note = Seed: LVVVGACGV (KRAS G12C)
IVVVGSCGA

SEQ ID NO: 2385 - protein, 9 aa, synthetic construct
  source 1..9: note = Seed: LVVVGACGV (KRAS G12C)
IVVVGSCGI

SEQ ID NO: 2386 - protein, 9 aa, synthetic construct
  source 1..9: note = Seed: LVVVGACGV (KRAS G12C)
IVVVGSCGL

SEQ ID NO: 2387 - protein, 9 aa, synthetic construct
  source 1..9: note = Seed: LVVVGACGV (KRAS G12C)
IVVVGSCGM

SEQ ID NO: 2388 - protein, 9 aa, synthetic construct
  source 1..9: note = Seed: LVVVGACGV (KRAS G12C)
IVVVGSCGS

SEQ ID NO: 2389 - protein, 9 aa, synthetic construct
  source 1..9: note = Seed: LVVVGACGV (KRAS G12C)
IVVVGSCGT

SEQ ID NO: 2390 - protein, 9 aa, synthetic construct
  source 1..9: note = Seed: LVVVGACGV (KRAS G12C)
IVVVGSCGV

SEQ ID NO: 2391 - protein, 9 aa, synthetic construct
  source 1..9: note = Seed: LVVVGACGV (KRAS G12C)
IVVVGTCGV

SEQ ID NO: 2392 - protein, 9 aa, synthetic construct
  source 1..9: note = Seed: LVVVGACGV (KRAS G12C)
IVVWGACGL

SEQ ID NO: 2393 - protein, 9 aa, synthetic construct
  source 1..9: note = Seed: LVVVGACGV (KRAS G12C)
IVVWGGCGL

SEQ ID NO: 2394 - protein, 9 aa, synthetic construct
  source 1..9: note = Seed: LVVVGACGV (KRAS G12C)
IVVWGNCGA

SEQ ID NO: 2395 - protein, 9 aa, synthetic construct
  source 1..9: note = Seed: LVVVGACGV (KRAS G12C)
IVVWGNCGF

SEQ ID NO: 2396 - protein, 9 aa, synthetic construct
  source 1..9: note = Seed: LVVVGACGV (KRAS G12C)
IVVWGNCGI

SEQ ID NO: 2397 - protein, 9 aa, synthetic construct
  source 1..9: note = Seed: LVVVGACGV (KRAS G12C)
IVVWGNCGL

SEQ ID NO: 2398 - protein, 9 aa, synthetic construct
  source 1..9: note = Seed: LVVVGACGV (KRAS G12C)
IVVWGNCGM

SEQ ID NO: 2399 - protein, 9 aa, synthetic construct
  source 1..9: note = Seed: LVVVGACGV (KRAS G12C)
IVVWGNCGV

SEQ ID NO: 2400 - protein, 9 aa, synthetic construct
  source 1..9: note = Seed: LVVVGACGV (KRAS G12C)
IVVWGRCGH

SEQ ID NO: 2401 - protein, 9 aa, synthetic construct
  source 1..9: note = Seed: LVVVGACGV (KRAS G12C)
IVVWGRCGR

SEQ ID NO: 2402 - protein, 9 aa, synthetic construct
  source 1..9: note = Seed: LVVVGACGV (KRAS G12C)
IVVWGSCGA

SEQ ID NO: 2403 - protein, 9 aa, synthetic construct
  source 1..9: note = Seed: LVVVGACGV (KRAS G12C)
IVVWGSCGI

SEQ ID NO: 2404 - protein, 9 aa, synthetic construct
  source 1..9: note = Seed: LVVVGACGV (KRAS G12C)
IVVWGSCGL

SEQ ID NO: 2405 - protein, 9 aa, synthetic construct
  source 1..9: note = Seed: LVVVGACGV (KRAS G12C)
IVVWGSCGM

SEQ ID NO: 2406 - protein, 9 aa, synthetic construct
  source 1..9: note = Seed: LVVVGACGV (KRAS G12C)
IVVWGSCGV

SEQ ID NO: 2407 - protein, 9 aa, synthetic construct
  source 1..9: note = Seed: LVVVGACGV (KRAS G12C)
IVVWGTCGL

SEQ ID NO: 2408 - protein, 9 aa, synthetic construct
  source 1..9: note = Seed: LVVVGACGV (KRAS G12C)
IVVYGACGA

SEQ ID NO: 2409 - protein, 9 aa, synthetic construct
  source 1..9: note = Seed: LVVVGACGV (KRAS G12C)
IVVYGACGI

SEQ ID NO: 2410 - protein, 9 aa, synthetic construct
  source 1..9: note = Seed: LVVVGACGV (KRAS G12C)
IVVYGACGL

SEQ ID NO: 2411 - protein, 9 aa, synthetic construct
  source 1..9: note = Seed: LVVVGACGV (KRAS G12C)
IVVYGACGM

SEQ ID NO: 2412 - protein, 9 aa, synthetic construct
  source 1..9: note = Seed: LVVVGACGV (KRAS G12C)
IVVYGACGV

SEQ ID NO: 2413 - protein, 9 aa, synthetic construct
  source 1..9: note = Seed: LVVVGACGV (KRAS G12C)
IVVYGDCGI

SEQ ID NO: 2414 - protein, 9 aa, synthetic construct
  source 1..9: note = Seed: LVVVGACGV (KRAS G12C)
IVVYGDCGL

SEQ ID NO: 2415 - protein, 9 aa, synthetic construct
  source 1..9: note = Seed: LVVVGACGV (KRAS G12C)
IVVYGDCGV

SEQ ID NO: 2416 - protein, 9 aa, synthetic construct
  source 1..9: note = Seed: LVVVGACGV (KRAS G12C)
IVVYGGCGA

SEQ ID NO: 2417 - protein, 9 aa, synthetic construct
  source 1..9: note = Seed: LVVVGACGV (KRAS G12C)
IVVYGGCGI

SEQ ID NO: 2418 - protein, 9 aa, synthetic construct
  source 1..9: note = Seed: LVVVGACGV (KRAS G12C)
IVVYGGCGL

SEQ ID NO: 2419 - protein, 9 aa, synthetic construct
  source 1..9: note = Seed: LVVVGACGV (KRAS G12C)
IVVYGGCGM

SEQ ID NO: 2420 - protein, 9 aa, synthetic construct
  source 1..9: note = Seed: LVVVGACGV (KRAS G12C)
IVVYGGCGV

SEQ ID NO: 2421 - protein, 9 aa, synthetic construct
  source 1..9: note = Seed: LVVVGACGV (KRAS G12C)
IVVYGNCGA

SEQ ID NO: 2422 - protein, 9 aa, synthetic construct
  source 1..9: note = Seed: LVVVGACGV (KRAS G12C)
IVVYGNCGF

SEQ ID NO: 2423 - protein, 9 aa, synthetic construct
  source 1..9: note = Seed: LVVVGACGV (KRAS G12C)
IVVYGNCGH

SEQ ID NO: 2424 - protein, 9 aa, synthetic construct
  source 1..9: note = Seed: LVVVGACGV (KRAS G12C)
IVVYGNCGI

SEQ ID NO: 2425 - protein, 9 aa, synthetic construct
  source 1..9: note = Seed: LVVVGACGV (KRAS G12C)
IVVYGNCGL

SEQ ID NO: 2426 - protein, 9 aa, synthetic construct
  source 1..9: note = Seed: LVVVGACGV (KRAS G12C)
IVVYGNCGM

SEQ ID NO: 2427 - protein, 9 aa, synthetic construct
  source 1..9: note = Seed: LVVVGACGV (KRAS G12C)
IVVYGNCGS

SEQ ID NO: 2428 - protein, 9 aa, synthetic construct
  source 1..9: note = Seed: LVVVGACGV (KRAS G12C)
IVVYGNCGT

SEQ ID NO: 2429 - protein, 9 aa, synthetic construct
  source 1..9: note = Seed: LVVVGACGV (KRAS G12C)
IVVYGNCGV

SEQ ID NO: 2430 - protein, 9 aa, synthetic construct
  source 1..9: note = Seed: LVVVGACGV (KRAS G12C)
IVVYGNCGY

SEQ ID NO: 2431 - protein, 9 aa, synthetic construct
  source 1..9: note = Seed: LVVVGACGV (KRAS G12C)
IVVYGPCGI

SEQ ID NO: 2432 - protein, 9 aa, synthetic construct
  source 1..9: note = Seed: LVVVGACGV (KRAS G12C)
IVVYGPCGL

SEQ ID NO: 2433 - protein, 9 aa, synthetic construct
  source 1..9: note = Seed: LVVVGACGV (KRAS G12C)
IVVYGPCGV

SEQ ID NO: 2434 - protein, 9 aa, synthetic construct
  source 1..9: note = Seed: LVVVGACGV (KRAS G12C)
IVVYGSCGA

SEQ ID NO: 2435 - protein, 9 aa, synthetic construct
  source 1..9: note = Seed: LVVVGACGV (KRAS G12C)
IVVYGSCGF

SEQ ID NO: 2436 - protein, 9 aa, synthetic construct
  source 1..9: note = Seed: LVVVGACGV (KRAS G12C)
IVVYGSCGH

SEQ ID NO: 2437 - protein, 9 aa, synthetic construct
  source 1..9: note = Seed: LVVVGACGV (KRAS G12C)
IVVYGSCGI

SEQ ID NO: 2438 - protein, 9 aa, synthetic construct
  source 1..9: note = Seed: LVVVGACGV (KRAS G12C)
IVVYGSCGL

SEQ ID NO: 2439 - protein, 9 aa, synthetic construct
  source 1..9: note = Seed: LVVVGACGV (KRAS G12C)
IVVYGSCGM

SEQ ID NO: 2440 - protein, 9 aa, synthetic construct
  source 1..9: note = Seed: LVVVGACGV (KRAS G12C)
IVVYGSCGR

SEQ ID NO: 2441 - protein, 9 aa, synthetic construct
  source 1..9: note = Seed: LVVVGACGV (KRAS G12C)
IVVYGSCGS

SEQ ID NO: 2442 - protein, 9 aa, synthetic construct
  source 1..9: note = Seed: LVVVGACGV (KRAS G12C)
IVVYGSCGT

SEQ ID NO: 2443 - protein, 9 aa, synthetic construct
  source 1..9: note = Seed: LVVVGACGV (KRAS G12C)
IVVYGSCGV

SEQ ID NO: 2444 - protein, 9 aa, synthetic construct
  source 1..9: note = Seed: LVVVGACGV (KRAS G12C)
IVVYGSCGY

SEQ ID NO: 2445 - protein, 9 aa, synthetic construct
  source 1..9: note = Seed: LVVVGACGV (KRAS G12C)
IVVYGTCGA

SEQ ID NO: 2446 - protein, 9 aa, synthetic construct
  source 1..9: note = Seed: LVVVGACGV (KRAS G12C)
IVVYGTCGI

SEQ ID NO: 2447 - protein, 9 aa, synthetic construct
  source 1..9: note = Seed: LVVVGACGV (KRAS G12C)
IVVYGTCGL

SEQ ID NO: 2448 - protein, 9 aa, synthetic construct
  source 1..9: note = Seed: LVVVGACGV (KRAS G12C)
IVVYGTCGM

SEQ ID NO: 2449 - protein, 9 aa, synthetic construct
  source 1..9: note = Seed: LVVVGACGV (KRAS G12C)
IVVYGTCGV

SEQ ID NO: 2450 - protein, 9 aa, synthetic construct
  source 1..9: note = Seed: LVVVGACGV (KRAS G12C)
LVVAGACGA

SEQ ID NO: 2451 - protein, 9 aa, synthetic construct
  source 1..9: note = Seed: LVVVGACGV (KRAS G12C)
LVVAGACGC

SEQ ID NO: 2452 - protein, 9 aa, synthetic construct
  source 1..9: note = Seed: LVVVGACGV (KRAS G12C)
LVVAGACGG

SEQ ID NO: 2453 - protein, 9 aa, synthetic construct
  source 1..9: note = Seed: LVVVGACGV (KRAS G12C)
LVVAGACGI

SEQ ID NO: 2454 - protein, 9 aa, synthetic construct
  source 1..9: note = Seed: LVVVGACGV (KRAS G12C)
LVVAGACGL

SEQ ID NO: 2455 - protein, 9 aa, synthetic construct
  source 1..9: note = Seed: LVVVGACGV (KRAS G12C)
LVVAGACGM

SEQ ID NO: 2456 - protein, 9 aa, synthetic construct
  source 1..9: note = Seed: LVVVGACGV (KRAS G12C)
LVVAGACGS

SEQ ID NO: 2457 - protein, 9 aa, synthetic construct
  source 1..9: note = Seed: LVVVGACGV (KRAS G12C)
LVVAGACGT

SEQ ID NO: 2458 - protein, 9 aa, synthetic construct
  source 1..9: note = Seed: LVVVGACGV (KRAS G12C)
LVVAGACGV

SEQ ID NO: 2459 - protein, 9 aa, synthetic construct
  source 1..9: note = Seed: LVVVGACGV (KRAS G12C)
LVVAGACGY

SEQ ID NO: 2460 - protein, 9 aa, synthetic construct
  source 1..9: note = Seed: LVVVGACGV (KRAS G12C)
LVVAGGCGA

SEQ ID NO: 2461 - protein, 9 aa, synthetic construct
  source 1..9: note = Seed: LVVVGACGV (KRAS G12C)
LVVAGGCGI

SEQ ID NO: 2462 - protein, 9 aa, synthetic construct
  source 1..9: note = Seed: LVVVGACGV (KRAS G12C)
LVVAGGCGL

SEQ ID NO: 2463 - protein, 9 aa, synthetic construct
  source 1..9: note = Seed: LVVVGACGV (KRAS G12C)
LVVAGGCGM

SEQ ID NO: 2464 - protein, 9 aa, synthetic construct
  source 1..9: note = Seed: LVVVGACGV (KRAS G12C)
LVVAGGCGS

SEQ ID NO: 2465 - protein, 9 aa, synthetic construct
  source 1..9: note = Seed: LVVVGACGV (KRAS G12C)
LVVAGGCGT

SEQ ID NO: 2466 - protein, 9 aa, synthetic construct
  source 1..9: note = Seed: LVVVGACGV (KRAS G12C)
LVVAGGCGV

SEQ ID NO: 2467 - protein, 9 aa, synthetic construct
  source 1..9: note = Seed: LVVVGACGV (KRAS G12C)
LVVAGKCGA

SEQ ID NO: 2468 - protein, 9 aa, synthetic construct
  source 1..9: note = Seed: LVVVGACGV (KRAS G12C)
LVVAGKCGH

SEQ ID NO: 2469 - protein, 9 aa, synthetic construct
  source 1..9: note = Seed: LVVVGACGV (KRAS G12C)
LVVAGKCGS

SEQ ID NO: 2470 - protein, 9 aa, synthetic construct
  source 1..9: note = Seed: LVVVGACGV (KRAS G12C)
LVVAGNCGA

SEQ ID NO: 2471 - protein, 9 aa, synthetic construct
  source 1..9: note = Seed: LVVVGACGV (KRAS G12C)
LVVAGNCGI

SEQ ID NO: 2472 - protein, 9 aa, synthetic construct
  source 1..9: note = Seed: LVVVGACGV (KRAS G12C)
LVVAGNCGL

SEQ ID NO: 2473 - protein, 9 aa, synthetic construct
  source 1..9: note = Seed: LVVVGACGV (KRAS G12C)
LVVAGNCGM

SEQ ID NO: 2474 - protein, 9 aa, synthetic construct
  source 1..9: note = Seed: LVVVGACGV (KRAS G12C)
LVVAGNCGS

SEQ ID NO: 2475 - protein, 9 aa, synthetic construct
  source 1..9: note = Seed: LVVVGACGV (KRAS G12C)
LVVAGNCGV

SEQ ID NO: 2476 - protein, 9 aa, synthetic construct
  source 1..9: note = Seed: LVVVGACGV (KRAS G12C)
LVVAGPCGA

SEQ ID NO: 2477 - protein, 9 aa, synthetic construct
  source 1..9: note = Seed: LVVVGACGV (KRAS G12C)
LVVAGPCGC

SEQ ID NO: 2478 - protein, 9 aa, synthetic construct
  source 1..9: note = Seed: LVVVGACGV (KRAS G12C)
LVVAGPCGI

SEQ ID NO: 2479 - protein, 9 aa, synthetic construct
  source 1..9: note = Seed: LVVVGACGV (KRAS G12C)
LVVAGPCGL

SEQ ID NO: 2480 - protein, 9 aa, synthetic construct
  source 1..9: note = Seed: LVVVGACGV (KRAS G12C)
LVVAGPCGM

SEQ ID NO: 2481 - protein, 9 aa, synthetic construct
  source 1..9: note = Seed: LVVVGACGV (KRAS G12C)
LVVAGPCGV

SEQ ID NO: 2482 - protein, 9 aa, synthetic construct
  source 1..9: note = Seed: LVVVGACGV (KRAS G12C)
LVVAGRCGA

SEQ ID NO: 2483 - protein, 9 aa, synthetic construct
  source 1..9: note = Seed: LVVVGACGV (KRAS G12C)
LVVAGRCGH

SEQ ID NO: 2484 - protein, 9 aa, synthetic construct
  source 1..9: note = Seed: LVVVGACGV (KRAS G12C)
LVVAGRCGK

SEQ ID NO: 2485 - protein, 9 aa, synthetic construct
  source 1..9: note = Seed: LVVVGACGV (KRAS G12C)
LVVAGRCGQ

SEQ ID NO: 2486 - protein, 9 aa, synthetic construct
  source 1..9: note = Seed: LVVVGACGV (KRAS G12C)
LVVAGRCGR

SEQ ID NO: 2487 - protein, 9 aa, synthetic construct
  source 1..9: note = Seed: LVVVGACGV (KRAS G12C)
LVVAGRCGS

SEQ ID NO: 2488 - protein, 9 aa, synthetic construct
  source 1..9: note = Seed: LVVVGACGV (KRAS G12C)
LVVAGSCGA

SEQ ID NO: 2489 - protein, 9 aa, synthetic construct
  source 1..9: note = Seed: LVVVGACGV (KRAS G12C)
LVVAGSCGI

SEQ ID NO: 2490 - protein, 9 aa, synthetic construct
  source 1..9: note = Seed: LVVVGACGV (KRAS G12C)
LVVAGSCGL

SEQ ID NO: 2491 - protein, 9 aa, synthetic construct
  source 1..9: note = Seed: LVVVGACGV (KRAS G12C)
LVVAGSCGM

SEQ ID NO: 2492 - protein, 9 aa, synthetic construct
  source 1..9: note = Seed: LVVVGACGV (KRAS G12C)
LVVAGSCGS

SEQ ID NO: 2493 - protein, 9 aa, synthetic construct
  source 1..9: note = Seed: LVVVGACGV (KRAS G12C)
LVVAGSCGT

SEQ ID NO: 2494 - protein, 9 aa, synthetic construct
  source 1..9: note = Seed: LVVVGACGV (KRAS G12C)
LVVAGSCGV

SEQ ID NO: 2495 - protein, 9 aa, synthetic construct
  source 1..9: note = Seed: LVVVGACGV (KRAS G12C)
LVVAGTCGA

SEQ ID NO: 2496 - protein, 9 aa, synthetic construct
  source 1..9: note = Seed: LVVVGACGV (KRAS G12C)
LVVAGTCGI

SEQ ID NO: 2497 - protein, 9 aa, synthetic construct
  source 1..9: note = Seed: LVVVGACGV (KRAS G12C)
LVVAGTCGL

SEQ ID NO: 2498 - protein, 9 aa, synthetic construct
  source 1..9: note = Seed: LVVVGACGV (KRAS G12C)
LVVAGTCGM

SEQ ID NO: 2499 - protein, 9 aa, synthetic construct
  source 1..9: note = Seed: LVVVGACGV (KRAS G12C)
LVVAGTCGV

SEQ ID NO: 2500 - protein, 9 aa, synthetic construct
  source 1..9: note = Seed: LVVVGACGV (KRAS G12C)
LVVDGACGI

SEQ ID NO: 2501 - protein, 9 aa, synthetic construct
  source 1..9: note = Seed: LVVVGACGV (KRAS G12C)
LVVDGACGL

SEQ ID NO: 2502 - protein, 9 aa, synthetic construct
  source 1..9: note = Seed: LVVVGACGV (KRAS G12C)
LVVDGACGV

SEQ ID NO: 2503 - protein, 9 aa, synthetic construct
  source 1..9: note = Seed: LVVVGACGV (KRAS G12C)
LVVDGNCGI

SEQ ID NO: 2504 - protein, 9 aa, synthetic construct
  source 1..9: note = Seed: LVVVGACGV (KRAS G12C)
LVVDGNCGL

SEQ ID NO: 2505 - protein, 9 aa, synthetic construct
  source 1..9: note = Seed: LVVVGACGV (KRAS G12C)
LVVDGNCGV

SEQ ID NO: 2506 - protein, 9 aa, synthetic construct
  source 1..9: note = Seed: LVVVGACGV (KRAS G12C)
LVVDGSCGI

SEQ ID NO: 2507 - protein, 9 aa, synthetic construct
  source 1..9: note = Seed: LVVVGACGV (KRAS G12C)
LVVDGSCGV

SEQ ID NO: 2508 - protein, 9 aa, synthetic construct
  source 1..9: note = Seed: LVVVGACGV (KRAS G12C)
LVVEGACGA

SEQ ID NO: 2509 - protein, 9 aa, synthetic construct
  source 1..9: note = Seed: LVVVGACGV (KRAS G12C)
LVVEGACGI

SEQ ID NO: 2510 - protein, 9 aa, synthetic construct
  source 1..9: note = Seed: LVVVGACGV (KRAS G12C)
LVVEGACGL

SEQ ID NO: 2511 - protein, 9 aa, synthetic construct
  source 1..9: note = Seed: LVVVGACGV (KRAS G12C)
LVVEGACGM

SEQ ID NO: 2512 - protein, 9 aa, synthetic construct
  source 1..9: note = Seed: LVVVGACGV (KRAS G12C)
LVVEGACGV

SEQ ID NO: 2513 - protein, 9 aa, synthetic construct
  source 1..9: note = Seed: LVVVGACGV (KRAS G12C)
LVVEGGCGA

SEQ ID NO: 2514 - protein, 9 aa, synthetic construct
  source 1..9: note = Seed: LVVVGACGV (KRAS G12C)
LVVEGGCGI

SEQ ID NO: 2515 - protein, 9 aa, synthetic construct
  source 1..9: note = Seed: LVVVGACGV (KRAS G12C)
LVVEGGCGL

SEQ ID NO: 2516 - protein, 9 aa, synthetic construct
  source 1..9: note = Seed: LVVVGACGV (KRAS G12C)
LVVEGGCGV

SEQ ID NO: 2517 - protein, 9 aa, synthetic construct
  source 1..9: note = Seed: LVVVGACGV (KRAS G12C)
LVVEGNCGL

SEQ ID NO: 2518 - protein, 9 aa, synthetic construct
  source 1..9: note = Seed: LVVVGACGV (KRAS G12C)
LVVEGNCGV

SEQ ID NO: 2519 - protein, 9 aa, synthetic construct
  source 1..9: note = Seed: LVVVGACGV (KRAS G12C)
LVVEGPCGL

SEQ ID NO: 2520 - protein, 9 aa, synthetic construct
  source 1..9: note = Seed: LVVVGACGV (KRAS G12C)
LVVEGSCGA

SEQ ID NO: 2521 - protein, 9 aa, synthetic construct
  source 1..9: note = Seed: LVVVGACGV (KRAS G12C)
LVVEGSCGI

SEQ ID NO: 2522 - protein, 9 aa, synthetic construct
  source 1..9: note = Seed: LVVVGACGV (KRAS G12C)
LVVEGSCGL

SEQ ID NO: 2523 - protein, 9 aa, synthetic construct
  source 1..9: note = Seed: LVVVGACGV (KRAS G12C)
LVVEGSCGV

SEQ ID NO: 2524 - protein, 9 aa, synthetic construct
  source 1..9: note = Seed: LVVVGACGV (KRAS G12C)
LVVFGACGA

SEQ ID NO: 2525 - protein, 9 aa, synthetic construct
  source 1..9: note = Seed: LVVVGACGV (KRAS G12C)
LVVFGACGL

SEQ ID NO: 2526 - protein, 9 aa, synthetic construct
  source 1..9: note = Seed: LVVVGACGV (KRAS G12C)
LVVFGACGV

SEQ ID NO: 2527 - protein, 9 aa, synthetic construct
  source 1..9: note = Seed: LVVVGACGV (KRAS G12C)
LVVFGDCGL

SEQ ID NO: 2528 - protein, 9 aa, synthetic construct
  source 1..9: note = Seed: LVVVGACGV (KRAS G12C)
LVVFGGCGL

SEQ ID NO: 2529 - protein, 9 aa, synthetic construct
  source 1..9: note = Seed: LVVVGACGV (KRAS G12C)
LVVFGGCGM

SEQ ID NO: 2530 - protein, 9 aa, synthetic construct
  source 1..9: note = Seed: LVVVGACGV (KRAS G12C)
LVVFGGCGV

SEQ ID NO: 2531 - protein, 9 aa, synthetic construct
  source 1..9: note = Seed: LVVVGACGV (KRAS G12C)
LVVFGKCGA

SEQ ID NO: 2532 - protein, 9 aa, synthetic construct
  source 1..9: note = Seed: LVVVGACGV (KRAS G12C)
LVVFGKCGH

SEQ ID NO: 2533 - protein, 9 aa, synthetic construct
  source 1..9: note = Seed: LVVVGACGV (KRAS G12C)
LVVFGKCGK

SEQ ID NO: 2534 - protein, 9 aa, synthetic construct
  source 1..9: note = Seed: LVVVGACGV (KRAS G12C)
LVVFGKCGR

SEQ ID NO: 2535 - protein, 9 aa, synthetic construct
  source 1..9: note = Seed: LVVVGACGV (KRAS G12C)
LVVFGKCGS

SEQ ID NO: 2536 - protein, 9 aa, synthetic construct
  source 1..9: note = Seed: LVVVGACGV (KRAS G12C)
LVVFGNCGA

SEQ ID NO: 2537 - protein, 9 aa, synthetic construct
  source 1..9: note = Seed: LVVVGACGV (KRAS G12C)
LVVFGNCGF

SEQ ID NO: 2538 - protein, 9 aa, synthetic construct
  source 1..9: note = Seed: LVVVGACGV (KRAS G12C)
LVVFGNCGI

SEQ ID NO: 2539 - protein, 9 aa, synthetic construct
  source 1..9: note = Seed: LVVVGACGV (KRAS G12C)
LVVFGNCGL

SEQ ID NO: 2540 - protein, 9 aa, synthetic construct
  source 1..9: note = Seed: LVVVGACGV (KRAS G12C)
LVVFGNCGM

SEQ ID NO: 2541 - protein, 9 aa, synthetic construct
  source 1..9: note = Seed: LVVVGACGV (KRAS G12C)
LVVFGNCGS

SEQ ID NO: 2542 - protein, 9 aa, synthetic construct
  source 1..9: note = Seed: LVVVGACGV (KRAS G12C)
LVVFGNCGT

SEQ ID NO: 2543 - protein, 9 aa, synthetic construct
  source 1..9: note = Seed: LVVVGACGV (KRAS G12C)
LVVFGNCGV

SEQ ID NO: 2544 - protein, 9 aa, synthetic construct
  source 1..9: note = Seed: LVVVGACGV (KRAS G12C)
LVVFGNCGY

SEQ ID NO: 2545 - protein, 9 aa, synthetic construct
  source 1..9: note = Seed: LVVVGACGV (KRAS G12C)
LVVFGPCGA

SEQ ID NO: 2546 - protein, 9 aa, synthetic construct
  source 1..9: note = Seed: LVVVGACGV (KRAS G12C)
LVVFGPCGL

SEQ ID NO: 2547 - protein, 9 aa, synthetic construct
  source 1..9: note = Seed: LVVVGACGV (KRAS G12C)
LVVFGPCGV

SEQ ID NO: 2548 - protein, 9 aa, synthetic construct
  source 1..9: note = Seed: LVVVGACGV (KRAS G12C)
LVVFGRCGA

SEQ ID NO: 2549 - protein, 9 aa, synthetic construct
  source 1..9: note = Seed: LVVVGACGV (KRAS G12C)
LVVFGRCGH

SEQ ID NO: 2550 - protein, 9 aa, synthetic construct
  source 1..9: note = Seed: LVVVGACGV (KRAS G12C)
LVVFGRCGK

SEQ ID NO: 2551 - protein, 9 aa, synthetic construct
  source 1..9: note = Seed: LVVVGACGV (KRAS G12C)
LVVFGRCGQ

SEQ ID NO: 2552 - protein, 9 aa, synthetic construct
  source 1..9: note = Seed: LVVVGACGV (KRAS G12C)
LVVFGRCGR

SEQ ID NO: 2553 - protein, 9 aa, synthetic construct
  source 1..9: note = Seed: LVVVGACGV (KRAS G12C)
LVVFGRCGS

SEQ ID NO: 2554 - protein, 9 aa, synthetic construct
  source 1..9: note = Seed: LVVVGACGV (KRAS G12C)
LVVFGSCGA

SEQ ID NO: 2555 - protein, 9 aa, synthetic construct
  source 1..9: note = Seed: LVVVGACGV (KRAS G12C)
LVVFGSCGI

SEQ ID NO: 2556 - protein, 9 aa, synthetic construct
  source 1..9: note = Seed: LVVVGACGV (KRAS G12C)
LVVFGSCGL

SEQ ID NO: 2557 - protein, 9 aa, synthetic construct
  source 1..9: note = Seed: LVVVGACGV (KRAS G12C)
LVVFGSCGM

SEQ ID NO: 2558 - protein, 9 aa, synthetic construct
  source 1..9: note = Seed: LVVVGACGV (KRAS G12C)
LVVFGSCGS

SEQ ID NO: 2559 - protein, 9 aa, synthetic construct
  source 1..9: note = Seed: LVVVGACGV (KRAS G12C)
LVVFGSCGT

SEQ ID NO: 2560 - protein, 9 aa, synthetic construct
  source 1..9: note = Seed: LVVVGACGV (KRAS G12C)
LVVFGSCGV

SEQ ID NO: 2561 - protein, 9 aa, synthetic construct
  source 1..9: note = Seed: LVVVGACGV (KRAS G12C)
LVVFGSCGY

SEQ ID NO: 2562 - protein, 9 aa, synthetic construct
  source 1..9: note = Seed: LVVVGACGV (KRAS G12C)
LVVFGTCGA

SEQ ID NO: 2563 - protein, 9 aa, synthetic construct
  source 1..9: note = Seed: LVVVGACGV (KRAS G12C)
LVVFGTCGL

SEQ ID NO: 2564 - protein, 9 aa, synthetic construct
  source 1..9: note = Seed: LVVVGACGV (KRAS G12C)
LVVFGTCGS

SEQ ID NO: 2565 - protein, 9 aa, synthetic construct
  source 1..9: note = Seed: LVVVGACGV (KRAS G12C)
LVVFGTCGV

SEQ ID NO: 2566 - protein, 9 aa, synthetic construct
  source 1..9: note = Seed: LVVVGACGV (KRAS G12C)
LVVGGACGI

SEQ ID NO: 2567 - protein, 9 aa, synthetic construct
  source 1..9: note = Seed: LVVVGACGV (KRAS G12C)
LVVGGACGL

SEQ ID NO: 2568 - protein, 9 aa, synthetic construct
  source 1..9: note = Seed: LVVVGACGV (KRAS G12C)
LVVGGACGV

SEQ ID NO: 2569 - protein, 9 aa, synthetic construct
  source 1..9: note = Seed: LVVVGACGV (KRAS G12C)
LVVGGGCGI

SEQ ID NO: 2570 - protein, 9 aa, synthetic construct
  source 1..9: note = Seed: LVVVGACGV (KRAS G12C)
LVVGGGCGL

SEQ ID NO: 2571 - protein, 9 aa, synthetic construct
  source 1..9: note = Seed: LVVVGACGV (KRAS G12C)
LVVGGGCGV

SEQ ID NO: 2572 - protein, 9 aa, synthetic construct
  source 1..9: note = Seed: LVVVGACGV (KRAS G12C)
LVVHGACGI

SEQ ID NO: 2573 - protein, 9 aa, synthetic construct
  source 1..9: note = Seed: LVVVGACGV (KRAS G12C)
LVVHGACGL

SEQ ID NO: 2574 - protein, 9 aa, synthetic construct
  source 1..9: note = Seed: LVVVGACGV (KRAS G12C)
LVVHGACGV

SEQ ID NO: 2575 - protein, 9 aa, synthetic construct
  source 1..9: note = Seed: LVVVGACGV (KRAS G12C)
LVVHGICGR

SEQ ID NO: 2576 - protein, 9 aa, synthetic construct
  source 1..9: note = Seed: LVVVGACGV (KRAS G12C)
LVVHGRCGF

SEQ ID NO: 2577 - protein, 9 aa, synthetic construct
  source 1..9: note = Seed: LVVVGACGV (KRAS G12C)
LVVHGRCGH

SEQ ID NO: 2578 - protein, 9 aa, synthetic construct
  source 1..9: note = Seed: LVVVGACGV (KRAS G12C)
LVVHGRCGL

SEQ ID NO: 2579 - protein, 9 aa, synthetic construct
  source 1..9: note = Seed: LVVVGACGV (KRAS G12C)
LVVHGRCGR

SEQ ID NO: 2580 - protein, 9 aa, synthetic construct
  source 1..9: note = Seed: LVVVGACGV (KRAS G12C)
LVVHGRCGY

SEQ ID NO: 2581 - protein, 9 aa, synthetic construct
  source 1..9: note = Seed: LVVVGACGV (KRAS G12C)
LVVHGSCGL

SEQ ID NO: 2582 - protein, 9 aa, synthetic construct
  source 1..9: note = Seed: LVVVGACGV (KRAS G12C)
LVVHGVCGR

SEQ ID NO: 2583 - protein, 9 aa, synthetic construct
  source 1..9: note = Seed: LVVVGACGV (KRAS G12C)
LVVIGACGA

SEQ ID NO: 2584 - protein, 9 aa, synthetic construct
  source 1..9: note = Seed: LVVVGACGV (KRAS G12C)
LVVIGACGG

SEQ ID NO: 2585 - protein, 9 aa, synthetic construct
  source 1..9: note = Seed: LVVVGACGV (KRAS G12C)
LVVIGACGH

SEQ ID NO: 2586 - protein, 9 aa, synthetic construct
  source 1..9: note = Seed: LVVVGACGV (KRAS G12C)
LVVIGACGI

SEQ ID NO: 2587 - protein, 9 aa, synthetic construct
  source 1..9: note = Seed: LVVVGACGV (KRAS G12C)
LVVIGACGL

SEQ ID NO: 2588 - protein, 9 aa, synthetic construct
  source 1..9: note = Seed: LVVVGACGV (KRAS G12C)
LVVIGACGM

SEQ ID NO: 2589 - protein, 9 aa, synthetic construct
  source 1..9: note = Seed: LVVVGACGV (KRAS G12C)
LVVIGACGN

SEQ ID NO: 2590 - protein, 9 aa, synthetic construct
  source 1..9: note = Seed: LVVVGACGV (KRAS G12C)
LVVIGACGS

SEQ ID NO: 2591 - protein, 9 aa, synthetic construct
  source 1..9: note = Seed: LVVVGACGV (KRAS G12C)
LVVIGACGT

SEQ ID NO: 2592 - protein, 9 aa, synthetic construct
  source 1..9: note = Seed: LVVVGACGV (KRAS G12C)
LVVIGACGV

SEQ ID NO: 2593 - protein, 9 aa, synthetic construct
  source 1..9: note = Seed: LVVVGACGV (KRAS G12C)
LVVIGGCGA

SEQ ID NO: 2594 - protein, 9 aa, synthetic construct
  source 1..9: note = Seed: LVVVGACGV (KRAS G12C)
LVVIGGCGI

SEQ ID NO: 2595 - protein, 9 aa, synthetic construct
  source 1..9: note = Seed: LVVVGACGV (KRAS G12C)
LVVIGGCGL

SEQ ID NO: 2596 - protein, 9 aa, synthetic construct
  source 1..9: note = Seed: LVVVGACGV (KRAS G12C)
LVVIGGCGM

SEQ ID NO: 2597 - protein, 9 aa, synthetic construct
  source 1..9: note = Seed: LVVVGACGV (KRAS G12C)
LVVIGGCGN

SEQ ID NO: 2598 - protein, 9 aa, synthetic construct
  source 1..9: note = Seed: LVVVGACGV (KRAS G12C)
LVVIGGCGS

SEQ ID NO: 2599 - protein, 9 aa, synthetic construct
  source 1..9: note = Seed: LVVVGACGV (KRAS G12C)
LVVIGGCGT

SEQ ID NO: 2600 - protein, 9 aa, synthetic construct
  source 1..9: note = Seed: LVVVGACGV (KRAS G12C)
LVVIGGCGV

SEQ ID NO: 2601 - protein, 9 aa, synthetic construct
  source 1..9: note = Seed: LVVVGACGV (KRAS G12C)
LVVIGKCGA

SEQ ID NO: 2602 - protein, 9 aa, synthetic construct
  source 1..9: note = Seed: LVVVGACGV (KRAS G12C)
LVVIGKCGG

SEQ ID NO: 2603 - protein, 9 aa, synthetic construct
  source 1..9: note = Seed: LVVVGACGV (KRAS G12C)
LVVIGKCGH

SEQ ID NO: 2604 - protein, 9 aa, synthetic construct
  source 1..9: note = Seed: LVVVGACGV (KRAS G12C)
LVVIGKCGK

SEQ ID NO: 2605 - protein, 9 aa, synthetic construct
  source 1..9: note = Seed: LVVVGACGV (KRAS G12C)
LVVIGKCGM

SEQ ID NO: 2606 - protein, 9 aa, synthetic construct
  source 1..9: note = Seed: LVVVGACGV (KRAS G12C)
LVVIGKCGN

SEQ ID NO: 2607 - protein, 9 aa, synthetic construct
  source 1..9: note = Seed: LVVVGACGV (KRAS G12C)
LVVIGKCGQ

SEQ ID NO: 2608 - protein, 9 aa, synthetic construct
  source 1..9: note = Seed: LVVVGACGV (KRAS G12C)
LVVIGKCGR

SEQ ID NO: 2609 - protein, 9 aa, synthetic construct
  source 1..9: note = Seed: LVVVGACGV (KRAS G12C)
LVVIGKCGS

SEQ ID NO: 2610 - protein, 9 aa, synthetic construct
  source 1..9: note = Seed: LVVVGACGV (KRAS G12C)
LVVIGKCGT

SEQ ID NO: 2611 - protein, 9 aa, synthetic construct
  source 1..9: note = Seed: LVVVGACGV (KRAS G12C)
LVVIGKCGV

SEQ ID NO: 2612 - protein, 9 aa, synthetic construct
  source 1..9: note = Seed: LVVVGACGV (KRAS G12C)
LVVIGKCGY

SEQ ID NO: 2613 - protein, 9 aa, synthetic construct
  source 1..9: note = Seed: LVVVGACGV (KRAS G12C)
LVVIGNCGA

SEQ ID NO: 2614 - protein, 9 aa, synthetic construct
  source 1..9: note = Seed: LVVVGACGV (KRAS G12C)
LVVIGNCGH

SEQ ID NO: 2615 - protein, 9 aa, synthetic construct
  source 1..9: note = Seed: LVVVGACGV (KRAS G12C)
LVVIGNCGI

SEQ ID NO: 2616 - protein, 9 aa, synthetic construct
  source 1..9: note = Seed: LVVVGACGV (KRAS G12C)
LVVIGNCGL

SEQ ID NO: 2617 - protein, 9 aa, synthetic construct
  source 1..9: note = Seed: LVVVGACGV (KRAS G12C)
LVVIGNCGM

SEQ ID NO: 2618 - protein, 9 aa, synthetic construct
  source 1..9: note = Seed: LVVVGACGV (KRAS G12C)
LVVIGNCGQ

SEQ ID NO: 2619 - protein, 9 aa, synthetic construct
  source 1..9: note = Seed: LVVVGACGV (KRAS G12C)
LVVIGNCGS

SEQ ID NO: 2620 - protein, 9 aa, synthetic construct
  source 1..9: note = Seed: LVVVGACGV (KRAS G12C)
LVVIGNCGT

SEQ ID NO: 2621 - protein, 9 aa, synthetic construct
  source 1..9: note = Seed: LVVVGACGV (KRAS G12C)
LVVIGNCGV

SEQ ID NO: 2622 - protein, 9 aa, synthetic construct
  source 1..9: note = Seed: LVVVGACGV (KRAS G12C)
LVVIGPCGA

SEQ ID NO: 2623 - protein, 9 aa, synthetic construct
  source 1..9: note = Seed: LVVVGACGV (KRAS G12C)
LVVIGPCGI

SEQ ID NO: 2624 - protein, 9 aa, synthetic construct
  source 1..9: note = Seed: LVVVGACGV (KRAS G12C)
LVVIGPCGL

SEQ ID NO: 2625 - protein, 9 aa, synthetic construct
  source 1..9: note = Seed: LVVVGACGV (KRAS G12C)
LVVIGPCGM

SEQ ID NO: 2626 - protein, 9 aa, synthetic construct
  source 1..9: note = Seed: LVVVGACGV (KRAS G12C)
LVVIGPCGN

SEQ ID NO: 2627 - protein, 9 aa, synthetic construct
  source 1..9: note = Seed: LVVVGACGV (KRAS G12C)
LVVIGPCGS

SEQ ID NO: 2628 - protein, 9 aa, synthetic construct
  source 1..9: note = Seed: LVVVGACGV (KRAS G12C)
LVVIGPCGT

SEQ ID NO: 2629 - protein, 9 aa, synthetic construct
  source 1..9: note = Seed: LVVVGACGV (KRAS G12C)
LVVIGPCGV

SEQ ID NO: 2630 - protein, 9 aa, synthetic construct
  source 1..9: note = Seed: LVVVGACGV (KRAS G12C)
LVVIGRCGA

SEQ ID NO: 2631 - protein, 9 aa, synthetic construct
  source 1..9: note = Seed: LVVVGACGV (KRAS G12C)
LVVIGRCGG

SEQ ID NO: 2632 - protein, 9 aa, synthetic construct
  source 1..9: note = Seed: LVVVGACGV (KRAS G12C)
LVVIGRCGH

SEQ ID NO: 2633 - protein, 9 aa, synthetic construct
  source 1..9: note = Seed: LVVVGACGV (KRAS G12C)
LVVIGRCGK

SEQ ID NO: 2634 - protein, 9 aa, synthetic construct
  source 1..9: note = Seed: LVVVGACGV (KRAS G12C)
LVVIGRCGM

SEQ ID NO: 2635 - protein, 9 aa, synthetic construct
  source 1..9: note = Seed: LVVVGACGV (KRAS G12C)
LVVIGRCGN

SEQ ID NO: 2636 - protein, 9 aa, synthetic construct
  source 1..9: note = Seed: LVVVGACGV (KRAS G12C)
LVVIGRCGP

SEQ ID NO: 2637 - protein, 9 aa, synthetic construct
  source 1..9: note = Seed: LVVVGACGV (KRAS G12C)
LVVIGRCGQ

SEQ ID NO: 2638 - protein, 9 aa, synthetic construct
  source 1..9: note = Seed: LVVVGACGV (KRAS G12C)
LVVIGRCGR

SEQ ID NO: 2639 - protein, 9 aa, synthetic construct
  source 1..9: note = Seed: LVVVGACGV (KRAS G12C)
LVVIGRCGS

SEQ ID NO: 2640 - protein, 9 aa, synthetic construct
  source 1..9: note = Seed: LVVVGACGV (KRAS G12C)
LVVIGRCGT

SEQ ID NO: 2641 - protein, 9 aa, synthetic construct
  source 1..9: note = Seed: LVVVGACGV (KRAS G12C)
LVVIGRCGV

SEQ ID NO: 2642 - protein, 9 aa, synthetic construct
  source 1..9: note = Seed: LVVVGACGV (KRAS G12C)
LVVIGRCGY

SEQ ID NO: 2643 - protein, 9 aa, synthetic construct
  source 1..9: note = Seed: LVVVGACGV (KRAS G12C)
LVVIGSCGA

SEQ ID NO: 2644 - protein, 9 aa, synthetic construct
  source 1..9: note = Seed: LVVVGACGV (KRAS G12C)
LVVIGSCGI

SEQ ID NO: 2645 - protein, 9 aa, synthetic construct
  source 1..9: note = Seed: LVVVGACGV (KRAS G12C)
LVVIGSCGL

SEQ ID NO: 2646 - protein, 9 aa, synthetic construct
  source 1..9: note = Seed: LVVVGACGV (KRAS G12C)
LVVIGSCGM

SEQ ID NO: 2647 - protein, 9 aa, synthetic construct
  source 1..9: note = Seed: LVVVGACGV (KRAS G12C)
LVVIGSCGN

SEQ ID NO: 2648 - protein, 9 aa, synthetic construct
  source 1..9: note = Seed: LVVVGACGV (KRAS G12C)
LVVIGSCGS

SEQ ID NO: 2649 - protein, 9 aa, synthetic construct
  source 1..9: note = Seed: LVVVGACGV (KRAS G12C)
LVVIGSCGT

SEQ ID NO: 2650 - protein, 9 aa, synthetic construct
  source 1..9: note = Seed: LVVVGACGV (KRAS G12C)
LVVIGSCGV

SEQ ID NO: 2651 - protein, 9 aa, synthetic construct
  source 1..9: note = Seed: LVVVGACGV (KRAS G12C)
LVVIGTCGA

SEQ ID NO: 2652 - protein, 9 aa, synthetic construct
  source 1..9: note = Seed: LVVVGACGV (KRAS G12C)
LVVIGTCGH

SEQ ID NO: 2653 - protein, 9 aa, synthetic construct
  source 1..9: note = Seed: LVVVGACGV (KRAS G12C)
LVVIGTCGI

SEQ ID NO: 2654 - protein, 9 aa, synthetic construct
  source 1..9: note = Seed: LVVVGACGV (KRAS G12C)
LVVIGTCGL

SEQ ID NO: 2655 - protein, 9 aa, synthetic construct
  source 1..9: note = Seed: LVVVGACGV (KRAS G12C)
LVVIGTCGM

SEQ ID NO: 2656 - protein, 9 aa, synthetic construct
  source 1..9: note = Seed: LVVVGACGV (KRAS G12C)
LVVIGTCGN

SEQ ID NO: 2657 - protein, 9 aa, synthetic construct
  source 1..9: note = Seed: LVVVGACGV (KRAS G12C)
LVVIGTCGQ

SEQ ID NO: 2658 - protein, 9 aa, synthetic construct
  source 1..9: note = Seed: LVVVGACGV (KRAS G12C)
LVVIGTCGS

SEQ ID NO: 2659 - protein, 9 aa, synthetic construct
  source 1..9: note = Seed: LVVVGACGV (KRAS G12C)
LVVIGTCGT

SEQ ID NO: 2660 - protein, 9 aa, synthetic construct
  source 1..9: note = Seed: LVVVGACGV (KRAS G12C)
LVVIGTCGV

SEQ ID NO: 2661 - protein, 9 aa, synthetic construct
  source 1..9: note = Seed: LVVVGACGV (KRAS G12C)
LVVKGRCGA

SEQ ID NO: 2662 - protein, 9 aa, synthetic construct
  source 1..9: note = Seed: LVVVGACGV (KRAS G12C)
LVVKGRCGQ

SEQ ID NO: 2663 - protein, 9 aa, synthetic construct
  source 1..9: note = Seed: LVVVGACGV (KRAS G12C)
LVVKGRCGR

SEQ ID NO: 2664 - protein, 9 aa, synthetic construct
  source 1..9: note = Seed: LVVVGACGV (KRAS G12C)
LVVLGACGA

SEQ ID NO: 2665 - protein, 9 aa, synthetic construct
  source 1..9: note = Seed: LVVVGACGV (KRAS G12C)
LVVLGACGF

SEQ ID NO: 2666 - protein, 9 aa, synthetic construct
  source 1..9: note = Seed: LVVVGACGV (KRAS G12C)
LVVLGACGG

SEQ ID NO: 2667 - protein, 9 aa, synthetic construct
  source 1..9: note = Seed: LVVVGACGV (KRAS G12C)
LVVLGACGH

SEQ ID NO: 2668 - protein, 9 aa, synthetic construct
  source 1..9: note = Seed: LVVVGACGV (KRAS G12C)
LVVLGACGI

SEQ ID NO: 2669 - protein, 9 aa, synthetic construct
  source 1..9: note = Seed: LVVVGACGV (KRAS G12C)
LVVLGACGK

SEQ ID NO: 2670 - protein, 9 aa, synthetic construct
  source 1..9: note = Seed: LVVVGACGV (KRAS G12C)
LVVLGACGL

SEQ ID NO: 2671 - protein, 9 aa, synthetic construct
  source 1..9: note = Seed: LVVVGACGV (KRAS G12C)
LVVLGACGM

SEQ ID NO: 2672 - protein, 9 aa, synthetic construct
  source 1..9: note = Seed: LVVVGACGV (KRAS G12C)
LVVLGACGN

SEQ ID NO: 2673 - protein, 9 aa, synthetic construct
  source 1..9: note = Seed: LVVVGACGV (KRAS G12C)
LVVLGACGP

SEQ ID NO: 2674 - protein, 9 aa, synthetic construct
  source 1..9: note = Seed: LVVVGACGV (KRAS G12C)
LVVLGACGQ

SEQ ID NO: 2675 - protein, 9 aa, synthetic construct
  source 1..9: note = Seed: LVVVGACGV (KRAS G12C)
LVVLGACGR

SEQ ID NO: 2676 - protein, 9 aa, synthetic construct
  source 1..9: note = Seed: LVVVGACGV (KRAS G12C)
LVVLGACGS

SEQ ID NO: 2677 - protein, 9 aa, synthetic construct
  source 1..9: note = Seed: LVVVGACGV (KRAS G12C)
LVVLGACGT

SEQ ID NO: 2678 - protein, 9 aa, synthetic construct
  source 1..9: note = Seed: LVVVGACGV (KRAS G12C)
LVVLGACGV

SEQ ID NO: 2679 - protein, 9 aa, synthetic construct
  source 1..9: note = Seed: LVVVGACGV (KRAS G12C)
LVVLGACGY

SEQ ID NO: 2680 - protein, 9 aa, synthetic construct
  source 1..9: note = Seed: LVVVGACGV (KRAS G12C)
LVVLGGCGA

SEQ ID NO: 2681 - protein, 9 aa, synthetic construct
  source 1..9: note = Seed: LVVVGACGV (KRAS G12C)
LVVLGGCGF

SEQ ID NO: 2682 - protein, 9 aa, synthetic construct
  source 1..9: note = Seed: LVVVGACGV (KRAS G12C)
LVVLGGCGG

SEQ ID NO: 2683 - protein, 9 aa, synthetic construct
  source 1..9: note = Seed: LVVVGACGV (KRAS G12C)
LVVLGGCGH

SEQ ID NO: 2684 - protein, 9 aa, synthetic construct
  source 1..9: note = Seed: LVVVGACGV (KRAS G12C)
LVVLGGCGI

SEQ ID NO: 2685 - protein, 9 aa, synthetic construct
  source 1..9: note = Seed: LVVVGACGV (KRAS G12C)
LVVLGGCGL

SEQ ID NO: 2686 - protein, 9 aa, synthetic construct
  source 1..9: note = Seed: LVVVGACGV (KRAS G12C)
LVVLGGCGM

SEQ ID NO: 2687 - protein, 9 aa, synthetic construct
  source 1..9: note = Seed: LVVVGACGV (KRAS G12C)
LVVLGGCGN

SEQ ID NO: 2688 - protein, 9 aa, synthetic construct
  source 1..9: note = Seed: LVVVGACGV (KRAS G12C)
LVVLGGCGP

SEQ ID NO: 2689 - protein, 9 aa, synthetic construct
  source 1..9: note = Seed: LVVVGACGV (KRAS G12C)
LVVLGGCGQ

SEQ ID NO: 2690 - protein, 9 aa, synthetic construct
  source 1..9: note = Seed: LVVVGACGV (KRAS G12C)
LVVLGGCGS

SEQ ID NO: 2691 - protein, 9 aa, synthetic construct
  source 1..9: note = Seed: LVVVGACGV (KRAS G12C)
LVVLGGCGT

SEQ ID NO: 2692 - protein, 9 aa, synthetic construct
  source 1..9: note = Seed: LVVVGACGV (KRAS G12C)
LVVLGGCGV

SEQ ID NO: 2693 - protein, 9 aa, synthetic construct
  source 1..9: note = Seed: LVVVGACGV (KRAS G12C)
LVVLGGCGY

SEQ ID NO: 2694 - protein, 9 aa, synthetic construct
  source 1..9: note = Seed: LVVVGACGV (KRAS G12C)
LVVLGICGR

SEQ ID NO: 2695 - protein, 9 aa, synthetic construct
  source 1..9: note = Seed: LVVVGACGV (KRAS G12C)
LVVLGKCGA

SEQ ID NO: 2696 - protein, 9 aa, synthetic construct
  source 1..9: note = Seed: LVVVGACGV (KRAS G12C)
LVVLGKCGG

SEQ ID NO: 2697 - protein, 9 aa, synthetic construct
  source 1..9: note = Seed: LVVVGACGV (KRAS G12C)
LVVLGKCGH

SEQ ID NO: 2698 - protein, 9 aa, synthetic construct
  source 1..9: note = Seed: LVVVGACGV (KRAS G12C)
LVVLGKCGK

SEQ ID NO: 2699 - protein, 9 aa, synthetic construct
  source 1..9: note = Seed: LVVVGACGV (KRAS G12C)
LVVLGKCGL

SEQ ID NO: 2700 - protein, 9 aa, synthetic construct
  source 1..9: note = Seed: LVVVGACGV (KRAS G12C)
LVVLGKCGM

SEQ ID NO: 2701 - protein, 9 aa, synthetic construct
  source 1..9: note = Seed: LVVVGACGV (KRAS G12C)
LVVLGKCGN

SEQ ID NO: 2702 - protein, 9 aa, synthetic construct
  source 1..9: note = Seed: LVVVGACGV (KRAS G12C)
LVVLGKCGP

SEQ ID NO: 2703 - protein, 9 aa, synthetic construct
  source 1..9: note = Seed: LVVVGACGV (KRAS G12C)
LVVLGKCGQ

SEQ ID NO: 2704 - protein, 9 aa, synthetic construct
  source 1..9: note = Seed: LVVVGACGV (KRAS G12C)
LVVLGKCGR

SEQ ID NO: 2705 - protein, 9 aa, synthetic construct
  source 1..9: note = Seed: LVVVGACGV (KRAS G12C)
LVVLGKCGS

SEQ ID NO: 2706 - protein, 9 aa, synthetic construct
  source 1..9: note = Seed: LVVVGACGV (KRAS G12C)
LVVLGKCGT

SEQ ID NO: 2707 - protein, 9 aa, synthetic construct
  source 1..9: note = Seed: LVVVGACGV (KRAS G12C)
LVVLGKCGV

SEQ ID NO: 2708 - protein, 9 aa, synthetic construct
  source 1..9: note = Seed: LVVVGACGV (KRAS G12C)
LVVLGKCGY

SEQ ID NO: 2709 - protein, 9 aa, synthetic construct
  source 1..9: note = Seed: LVVVGACGV (KRAS G12C)
LVVLGNCGA

SEQ ID NO: 2710 - protein, 9 aa, synthetic construct
  source 1..9: note = Seed: LVVVGACGV (KRAS G12C)
LVVLGNCGF

SEQ ID NO: 2711 - protein, 9 aa, synthetic construct
  source 1..9: note = Seed: LVVVGACGV (KRAS G12C)
LVVLGNCGG

SEQ ID NO: 2712 - protein, 9 aa, synthetic construct
  source 1..9: note = Seed: LVVVGACGV (KRAS G12C)
LVVLGNCGH

SEQ ID NO: 2713 - protein, 9 aa, synthetic construct
  source 1..9: note = Seed: LVVVGACGV (KRAS G12C)
LVVLGNCGI

SEQ ID NO: 2714 - protein, 9 aa, synthetic construct
  source 1..9: note = Seed: LVVVGACGV (KRAS G12C)
LVVLGNCGL

SEQ ID NO: 2715 - protein, 9 aa, synthetic construct
  source 1..9: note = Seed: LVVVGACGV (KRAS G12C)
LVVLGNCGM

SEQ ID NO: 2716 - protein, 9 aa, synthetic construct
  source 1..9: note = Seed: LVVVGACGV (KRAS G12C)
LVVLGNCGN

SEQ ID NO: 2717 - protein, 9 aa, synthetic construct
  source 1..9: note = Seed: LVVVGACGV (KRAS G12C)
LVVLGNCGQ

SEQ ID NO: 2718 - protein, 9 aa, synthetic construct
  source 1..9: note = Seed: LVVVGACGV (KRAS G12C)
LVVLGNCGS

SEQ ID NO: 2719 - protein, 9 aa, synthetic construct
  source 1..9: note = Seed: LVVVGACGV (KRAS G12C)
LVVLGNCGT

SEQ ID NO: 2720 - protein, 9 aa, synthetic construct
  source 1..9: note = Seed: LVVVGACGV (KRAS G12C)
LVVLGNCGV

SEQ ID NO: 2721 - protein, 9 aa, synthetic construct
  source 1..9: note = Seed: LVVVGACGV (KRAS G12C)
LVVLGNCGY

SEQ ID NO: 2722 - protein, 9 aa, synthetic construct
  source 1..9: note = Seed: LVVVGACGV (KRAS G12C)
LVVLGPCGA

SEQ ID NO: 2723 - protein, 9 aa, synthetic construct
  source 1..9: note = Seed: LVVVGACGV (KRAS G12C)
LVVLGPCGF

SEQ ID NO: 2724 - protein, 9 aa, synthetic construct
  source 1..9: note = Seed: LVVVGACGV (KRAS G12C)
LVVLGPCGG

SEQ ID NO: 2725 - protein, 9 aa, synthetic construct
  source 1..9: note = Seed: LVVVGACGV (KRAS G12C)
LVVLGPCGH

SEQ ID NO: 2726 - protein, 9 aa, synthetic construct
  source 1..9: note = Seed: LVVVGACGV (KRAS G12C)
LVVLGPCGI

SEQ ID NO: 2727 - protein, 9 aa, synthetic construct
  source 1..9: note = Seed: LVVVGACGV (KRAS G12C)
LVVLGPCGL

SEQ ID NO: 2728 - protein, 9 aa, synthetic construct
  source 1..9: note = Seed: LVVVGACGV (KRAS G12C)
LVVLGPCGM

SEQ ID NO: 2729 - protein, 9 aa, synthetic construct
  source 1..9: note = Seed: LVVVGACGV (KRAS G12C)
LVVLGPCGN

SEQ ID NO: 2730 - protein, 9 aa, synthetic construct
  source 1..9: note = Seed: LVVVGACGV (KRAS G12C)
LVVLGPCGS

SEQ ID NO: 2731 - protein, 9 aa, synthetic construct
  source 1..9: note = Seed: LVVVGACGV (KRAS G12C)
LVVLGPCGT

SEQ ID NO: 2732 - protein, 9 aa, synthetic construct
  source 1..9: note = Seed: LVVVGACGV (KRAS G12C)
LVVLGPCGV

SEQ ID NO: 2733 - protein, 9 aa, synthetic construct
  source 1..9: note = Seed: LVVVGACGV (KRAS G12C)
LVVLGPCGY

SEQ ID NO: 2734 - protein, 9 aa, synthetic construct
  source 1..9: note = Seed: LVVVGACGV (KRAS G12C)
LVVLGRCGA

SEQ ID NO: 2735 - protein, 9 aa, synthetic construct
  source 1..9: note = Seed: LVVVGACGV (KRAS G12C)
LVVLGRCGG

SEQ ID NO: 2736 - protein, 9 aa, synthetic construct
  source 1..9: note = Seed: LVVVGACGV (KRAS G12C)
LVVLGRCGH

SEQ ID NO: 2737 - protein, 9 aa, synthetic construct
  source 1..9: note = Seed: LVVVGACGV (KRAS G12C)
LVVLGRCGK

SEQ ID NO: 2738 - protein, 9 aa, synthetic construct
  source 1..9: note = Seed: LVVVGACGV (KRAS G12C)
LVVLGRCGL

SEQ ID NO: 2739 - protein, 9 aa, synthetic construct
  source 1..9: note = Seed: LVVVGACGV (KRAS G12C)
LVVLGRCGM

SEQ ID NO: 2740 - protein, 9 aa, synthetic construct
  source 1..9: note = Seed: LVVVGACGV (KRAS G12C)
LVVLGRCGN

SEQ ID NO: 2741 - protein, 9 aa, synthetic construct
  source 1..9: note = Seed: LVVVGACGV (KRAS G12C)
LVVLGRCGP

SEQ ID NO: 2742 - protein, 9 aa, synthetic construct
  source 1..9: note = Seed: LVVVGACGV (KRAS G12C)
LVVLGRCGQ

SEQ ID NO: 2743 - protein, 9 aa, synthetic construct
  source 1..9: note = Seed: LVVVGACGV (KRAS G12C)
LVVLGRCGR

SEQ ID NO: 2744 - protein, 9 aa, synthetic construct
  source 1..9: note = Seed: LVVVGACGV (KRAS G12C)
LVVLGRCGS

SEQ ID NO: 2745 - protein, 9 aa, synthetic construct
  source 1..9: note = Seed: LVVVGACGV (KRAS G12C)
LVVLGRCGT

SEQ ID NO: 2746 - protein, 9 aa, synthetic construct
  source 1..9: note = Seed: LVVVGACGV (KRAS G12C)
LVVLGRCGV

SEQ ID NO: 2747 - protein, 9 aa, synthetic construct
  source 1..9: note = Seed: LVVVGACGV (KRAS G12C)
LVVLGRCGY

SEQ ID NO: 2748 - protein, 9 aa, synthetic construct
  source 1..9: note = Seed: LVVVGACGV (KRAS G12C)
LVVLGSCGA

SEQ ID NO: 2749 - protein, 9 aa, synthetic construct
  source 1..9: note = Seed: LVVVGACGV (KRAS G12C)
LVVLGSCGF

SEQ ID NO: 2750 - protein, 9 aa, synthetic construct
  source 1..9: note = Seed: LVVVGACGV (KRAS G12C)
LVVLGSCGG

SEQ ID NO: 2751 - protein, 9 aa, synthetic construct
  source 1..9: note = Seed: LVVVGACGV (KRAS G12C)
LVVLGSCGH

SEQ ID NO: 2752 - protein, 9 aa, synthetic construct
  source 1..9: note = Seed: LVVVGACGV (KRAS G12C)
LVVLGSCGI

SEQ ID NO: 2753 - protein, 9 aa, synthetic construct
  source 1..9: note = Seed: LVVVGACGV (KRAS G12C)
LVVLGSCGK

SEQ ID NO: 2754 - protein, 9 aa, synthetic construct
  source 1..9: note = Seed: LVVVGACGV (KRAS G12C)
LVVLGSCGL

SEQ ID NO: 2755 - protein, 9 aa, synthetic construct
  source 1..9: note = Seed: LVVVGACGV (KRAS G12C)
LVVLGSCGM

SEQ ID NO: 2756 - protein, 9 aa, synthetic construct
  source 1..9: note = Seed: LVVVGACGV (KRAS G12C)
LVVLGSCGN

SEQ ID NO: 2757 - protein, 9 aa, synthetic construct
  source 1..9: note = Seed: LVVVGACGV (KRAS G12C)
LVVLGSCGP

SEQ ID NO: 2758 - protein, 9 aa, synthetic construct
  source 1..9: note = Seed: LVVVGACGV (KRAS G12C)
LVVLGSCGQ

SEQ ID NO: 2759 - protein, 9 aa, synthetic construct
  source 1..9: note = Seed: LVVVGACGV (KRAS G12C)
LVVLGSCGR

SEQ ID NO: 2760 - protein, 9 aa, synthetic construct
  source 1..9: note = Seed: LVVVGACGV (KRAS G12C)
LVVLGSCGS

SEQ ID NO: 2761 - protein, 9 aa, synthetic construct
  source 1..9: note = Seed: LVVVGACGV (KRAS G12C)
LVVLGSCGT

SEQ ID NO: 2762 - protein, 9 aa, synthetic construct
  source 1..9: note = Seed: LVVVGACGV (KRAS G12C)
LVVLGSCGV

SEQ ID NO: 2763 - protein, 9 aa, synthetic construct
  source 1..9: note = Seed: LVVVGACGV (KRAS G12C)
LVVLGSCGY

SEQ ID NO: 2764 - protein, 9 aa, synthetic construct
  source 1..9: note = Seed: LVVVGACGV (KRAS G12C)
LVVLGTCGA

SEQ ID NO: 2765 - protein, 9 aa, synthetic construct
  source 1..9: note = Seed: LVVVGACGV (KRAS G12C)
LVVLGTCGH

SEQ ID NO: 2766 - protein, 9 aa, synthetic construct
  source 1..9: note = Seed: LVVVGACGV (KRAS G12C)
LVVLGTCGI

SEQ ID NO: 2767 - protein, 9 aa, synthetic construct
  source 1..9: note = Seed: LVVVGACGV (KRAS G12C)
LVVLGTCGL

SEQ ID NO: 2768 - protein, 9 aa, synthetic construct
  source 1..9: note = Seed: LVVVGACGV (KRAS G12C)
LVVLGTCGM

SEQ ID NO: 2769 - protein, 9 aa, synthetic construct
  source 1..9: note = Seed: LVVVGACGV (KRAS G12C)
LVVLGTCGN

SEQ ID NO: 2770 - protein, 9 aa, synthetic construct
  source 1..9: note = Seed: LVVVGACGV (KRAS G12C)
LVVLGTCGS

SEQ ID NO: 2771 - protein, 9 aa, synthetic construct
  source 1..9: note = Seed: LVVVGACGV (KRAS G12C)
LVVLGTCGT

SEQ ID NO: 2772 - protein, 9 aa, synthetic construct
  source 1..9: note = Seed: LVVVGACGV (KRAS G12C)
LVVLGTCGV

SEQ ID NO: 2773 - protein, 9 aa, synthetic construct
  source 1..9: note = Seed: LVVVGACGV (KRAS G12C)
LVVLGVCGA

SEQ ID NO: 2774 - protein, 9 aa, synthetic construct
  source 1..9: note = Seed: LVVVGACGV (KRAS G12C)
LVVLGVCGH

SEQ ID NO: 2775 - protein, 9 aa, synthetic construct
  source 1..9: note = Seed: LVVVGACGV (KRAS G12C)
LVVLGVCGN

SEQ ID NO: 2776 - protein, 9 aa, synthetic construct
  source 1..9: note = Seed: LVVVGACGV (KRAS G12C)
LVVMGACGA

SEQ ID NO: 2777 - protein, 9 aa, synthetic construct
  source 1..9: note = Seed: LVVVGACGV (KRAS G12C)
LVVMGACGF

SEQ ID NO: 2778 - protein, 9 aa, synthetic construct
  source 1..9: note = Seed: LVVVGACGV (KRAS G12C)
LVVMGACGG

SEQ ID NO: 2779 - protein, 9 aa, synthetic construct
  source 1..9: note = Seed: LVVVGACGV (KRAS G12C)
LVVMGACGH

SEQ ID NO: 2780 - protein, 9 aa, synthetic construct
  source 1..9: note = Seed: LVVVGACGV (KRAS G12C)
LVVMGACGI

SEQ ID NO: 2781 - protein, 9 aa, synthetic construct
  source 1..9: note = Seed: LVVVGACGV (KRAS G12C)
LVVMGACGK

SEQ ID NO: 2782 - protein, 9 aa, synthetic construct
  source 1..9: note = Seed: LVVVGACGV (KRAS G12C)
LVVMGACGL

SEQ ID NO: 2783 - protein, 9 aa, synthetic construct
  source 1..9: note = Seed: LVVVGACGV (KRAS G12C)
LVVMGACGM

SEQ ID NO: 2784 - protein, 9 aa, synthetic construct
  source 1..9: note = Seed: LVVVGACGV (KRAS G12C)
LVVMGACGN

SEQ ID NO: 2785 - protein, 9 aa, synthetic construct
  source 1..9: note = Seed: LVVVGACGV (KRAS G12C)
LVVMGACGP

SEQ ID NO: 2786 - protein, 9 aa, synthetic construct
  source 1..9: note = Seed: LVVVGACGV (KRAS G12C)
LVVMGACGQ

SEQ ID NO: 2787 - protein, 9 aa, synthetic construct
  source 1..9: note = Seed: LVVVGACGV (KRAS G12C)
LVVMGACGR

SEQ ID NO: 2788 - protein, 9 aa, synthetic construct
  source 1..9: note = Seed: LVVVGACGV (KRAS G12C)
LVVMGACGS

SEQ ID NO: 2789 - protein, 9 aa, synthetic construct
  source 1..9: note = Seed: LVVVGACGV (KRAS G12C)
LVVMGACGT

SEQ ID NO: 2790 - protein, 9 aa, synthetic construct
  source 1..9: note = Seed: LVVVGACGV (KRAS G12C)
LVVMGACGV

SEQ ID NO: 2791 - protein, 9 aa, synthetic construct
  source 1..9: note = Seed: LVVVGACGV (KRAS G12C)
LVVMGACGY

SEQ ID NO: 2792 - protein, 9 aa, synthetic construct
  source 1..9: note = Seed: LVVVGACGV (KRAS G12C)
LVVMGGCGA

SEQ ID NO: 2793 - protein, 9 aa, synthetic construct
  source 1..9: note = Seed: LVVVGACGV (KRAS G12C)
LVVMGGCGF

SEQ ID NO: 2794 - protein, 9 aa, synthetic construct
  source 1..9: note = Seed: LVVVGACGV (KRAS G12C)
LVVMGGCGG

SEQ ID NO: 2795 - protein, 9 aa, synthetic construct
  source 1..9: note = Seed: LVVVGACGV (KRAS G12C)
LVVMGGCGH

SEQ ID NO: 2796 - protein, 9 aa, synthetic construct
  source 1..9: note = Seed: LVVVGACGV (KRAS G12C)
LVVMGGCGI

SEQ ID NO: 2797 - protein, 9 aa, synthetic construct
  source 1..9: note = Seed: LVVVGACGV (KRAS G12C)
LVVMGGCGL

SEQ ID NO: 2798 - protein, 9 aa, synthetic construct
  source 1..9: note = Seed: LVVVGACGV (KRAS G12C)
LVVMGGCGM

SEQ ID NO: 2799 - protein, 9 aa, synthetic construct
  source 1..9: note = Seed: LVVVGACGV (KRAS G12C)
LVVMGGCGN

SEQ ID NO: 2800 - protein, 9 aa, synthetic construct
  source 1..9: note = Seed: LVVVGACGV (KRAS G12C)
LVVMGGCGQ

SEQ ID NO: 2801 - protein, 9 aa, synthetic construct
  source 1..9: note = Seed: LVVVGACGV (KRAS G12C)
LVVMGGCGS

SEQ ID NO: 2802 - protein, 9 aa, synthetic construct
  source 1..9: note = Seed: LVVVGACGV (KRAS G12C)
LVVMGGCGT

SEQ ID NO: 2803 - protein, 9 aa, synthetic construct
  source 1..9: note = Seed: LVVVGACGV (KRAS G12C)
LVVMGGCGV

SEQ ID NO: 2804 - protein, 9 aa, synthetic construct
  source 1..9: note = Seed: LVVVGACGV (KRAS G12C)
LVVMGGCGY

SEQ ID NO: 2805 - protein, 9 aa, synthetic construct
  source 1..9: note = Seed: LVVVGACGV (KRAS G12C)
LVVMGHCGH

SEQ ID NO: 2806 - protein, 9 aa, synthetic construct
  source 1..9: note = Seed: LVVVGACGV (KRAS G12C)
LVVMGHCGL

SEQ ID NO: 2807 - protein, 9 aa, synthetic construct
  source 1..9: note = Seed: LVVVGACGV (KRAS G12C)
LVVMGICGN

SEQ ID NO: 2808 - protein, 9 aa, synthetic construct
  source 1..9: note = Seed: LVVVGACGV (KRAS G12C)
LVVMGKCGA

SEQ ID NO: 2809 - protein, 9 aa, synthetic construct
  source 1..9: note = Seed: LVVVGACGV (KRAS G12C)
LVVMGKCGG

SEQ ID NO: 2810 - protein, 9 aa, synthetic construct
  source 1..9: note = Seed: LVVVGACGV (KRAS G12C)
LVVMGKCGH

SEQ ID NO: 2811 - protein, 9 aa, synthetic construct
  source 1..9: note = Seed: LVVVGACGV (KRAS G12C)
LVVMGKCGK

SEQ ID NO: 2812 - protein, 9 aa, synthetic construct
  source 1..9: note = Seed: LVVVGACGV (KRAS G12C)
LVVMGKCGL

SEQ ID NO: 2813 - protein, 9 aa, synthetic construct
  source 1..9: note = Seed: LVVVGACGV (KRAS G12C)
LVVMGKCGM

SEQ ID NO: 2814 - protein, 9 aa, synthetic construct
  source 1..9: note = Seed: LVVVGACGV (KRAS G12C)
LVVMGKCGN

SEQ ID NO: 2815 - protein, 9 aa, synthetic construct
  source 1..9: note = Seed: LVVVGACGV (KRAS G12C)
LVVMGKCGQ

SEQ ID NO: 2816 - protein, 9 aa, synthetic construct
  source 1..9: note = Seed: LVVVGACGV (KRAS G12C)
LVVMGKCGR

SEQ ID NO: 2817 - protein, 9 aa, synthetic construct
  source 1..9: note = Seed: LVVVGACGV (KRAS G12C)
LVVMGKCGS

SEQ ID NO: 2818 - protein, 9 aa, synthetic construct
  source 1..9: note = Seed: LVVVGACGV (KRAS G12C)
LVVMGKCGT

SEQ ID NO: 2819 - protein, 9 aa, synthetic construct
  source 1..9: note = Seed: LVVVGACGV (KRAS G12C)
LVVMGKCGV

SEQ ID NO: 2820 - protein, 9 aa, synthetic construct
  source 1..9: note = Seed: LVVVGACGV (KRAS G12C)
LVVMGKCGY

SEQ ID NO: 2821 - protein, 9 aa, synthetic construct
  source 1..9: note = Seed: LVVVGACGV (KRAS G12C)
LVVMGNCGA

SEQ ID NO: 2822 - protein, 9 aa, synthetic construct
  source 1..9: note = Seed: LVVVGACGV (KRAS G12C)
LVVMGNCGF

SEQ ID NO: 2823 - protein, 9 aa, synthetic construct
  source 1..9: note = Seed: LVVVGACGV (KRAS G12C)
LVVMGNCGG

SEQ ID NO: 2824 - protein, 9 aa, synthetic construct
  source 1..9: note = Seed: LVVVGACGV (KRAS G12C)
LVVMGNCGH

SEQ ID NO: 2825 - protein, 9 aa, synthetic construct
  source 1..9: note = Seed: LVVVGACGV (KRAS G12C)
LVVMGNCGI

SEQ ID NO: 2826 - protein, 9 aa, synthetic construct
  source 1..9: note = Seed: LVVVGACGV (KRAS G12C)
LVVMGNCGL

SEQ ID NO: 2827 - protein, 9 aa, synthetic construct
  source 1..9: note = Seed: LVVVGACGV (KRAS G12C)
LVVMGNCGM

SEQ ID NO: 2828 - protein, 9 aa, synthetic construct
  source 1..9: note = Seed: LVVVGACGV (KRAS G12C)
LVVMGNCGN

SEQ ID NO: 2829 - protein, 9 aa, synthetic construct
  source 1..9: note = Seed: LVVVGACGV (KRAS G12C)
LVVMGNCGQ

SEQ ID NO: 2830 - protein, 9 aa, synthetic construct
  source 1..9: note = Seed: LVVVGACGV (KRAS G12C)
LVVMGNCGS

SEQ ID NO: 2831 - protein, 9 aa, synthetic construct
  source 1..9: note = Seed: LVVVGACGV (KRAS G12C)
LVVMGNCGT

SEQ ID NO: 2832 - protein, 9 aa, synthetic construct
  source 1..9: note = Seed: LVVVGACGV (KRAS G12C)
LVVMGNCGV

SEQ ID NO: 2833 - protein, 9 aa, synthetic construct
  source 1..9: note = Seed: LVVVGACGV (KRAS G12C)
LVVMGNCGY

SEQ ID NO: 2834 - protein, 9 aa, synthetic construct
  source 1..9: note = Seed: LVVVGACGV (KRAS G12C)
LVVMGPCGA

SEQ ID NO: 2835 - protein, 9 aa, synthetic construct
  source 1..9: note = Seed: LVVVGACGV (KRAS G12C)
LVVMGPCGF

SEQ ID NO: 2836 - protein, 9 aa, synthetic construct
  source 1..9: note = Seed: LVVVGACGV (KRAS G12C)
LVVMGPCGH

SEQ ID NO: 2837 - protein, 9 aa, synthetic construct
  source 1..9: note = Seed: LVVVGACGV (KRAS G12C)
LVVMGPCGI

SEQ ID NO: 2838 - protein, 9 aa, synthetic construct
  source 1..9: note = Seed: LVVVGACGV (KRAS G12C)
LVVMGPCGL

SEQ ID NO: 2839 - protein, 9 aa, synthetic construct
  source 1..9: note = Seed: LVVVGACGV (KRAS G12C)
LVVMGPCGM

SEQ ID NO: 2840 - protein, 9 aa, synthetic construct
  source 1..9: note = Seed: LVVVGACGV (KRAS G12C)
LVVMGPCGN

SEQ ID NO: 2841 - protein, 9 aa, synthetic construct
  source 1..9: note = Seed: LVVVGACGV (KRAS G12C)
LVVMGPCGS

SEQ ID NO: 2842 - protein, 9 aa, synthetic construct
  source 1..9: note = Seed: LVVVGACGV (KRAS G12C)
LVVMGPCGT

SEQ ID NO: 2843 - protein, 9 aa, synthetic construct
  source 1..9: note = Seed: LVVVGACGV (KRAS G12C)
LVVMGPCGV

SEQ ID NO: 2844 - protein, 9 aa, synthetic construct
  source 1..9: note = Seed: LVVVGACGV (KRAS G12C)
LVVMGPCGY

SEQ ID NO: 2845 - protein, 9 aa, synthetic construct
  source 1..9: note = Seed: LVVVGACGV (KRAS G12C)
LVVMGRCGA

SEQ ID NO: 2846 - protein, 9 aa, synthetic construct
  source 1..9: note = Seed: LVVVGACGV (KRAS G12C)
LVVMGRCGG

SEQ ID NO: 2847 - protein, 9 aa, synthetic construct
  source 1..9: note = Seed: LVVVGACGV (KRAS G12C)
LVVMGRCGH

SEQ ID NO: 2848 - protein, 9 aa, synthetic construct
  source 1..9: note = Seed: LVVVGACGV (KRAS G12C)
LVVMGRCGK

SEQ ID NO: 2849 - protein, 9 aa, synthetic construct
  source 1..9: note = Seed: LVVVGACGV (KRAS G12C)
LVVMGRCGL

SEQ ID NO: 2850 - protein, 9 aa, synthetic construct
  source 1..9: note = Seed: LVVVGACGV (KRAS G12C)
LVVMGRCGM

SEQ ID NO: 2851 - protein, 9 aa, synthetic construct
  source 1..9: note = Seed: LVVVGACGV (KRAS G12C)
LVVMGRCGN

SEQ ID NO: 2852 - protein, 9 aa, synthetic construct
  source 1..9: note = Seed: LVVVGACGV (KRAS G12C)
LVVMGRCGP

SEQ ID NO: 2853 - protein, 9 aa, synthetic construct
  source 1..9: note = Seed: LVVVGACGV (KRAS G12C)
LVVMGRCGQ

SEQ ID NO: 2854 - protein, 9 aa, synthetic construct
  source 1..9: note = Seed: LVVVGACGV (KRAS G12C)
LVVMGRCGR

SEQ ID NO: 2855 - protein, 9 aa, synthetic construct
  source 1..9: note = Seed: LVVVGACGV (KRAS G12C)
LVVMGRCGS

SEQ ID NO: 2856 - protein, 9 aa, synthetic construct
  source 1..9: note = Seed: LVVVGACGV (KRAS G12C)
LVVMGRCGT

SEQ ID NO: 2857 - protein, 9 aa, synthetic construct
  source 1..9: note = Seed: LVVVGACGV (KRAS G12C)
LVVMGRCGV

SEQ ID NO: 2858 - protein, 9 aa, synthetic construct
  source 1..9: note = Seed: LVVVGACGV (KRAS G12C)
LVVMGRCGY

SEQ ID NO: 2859 - protein, 9 aa, synthetic construct
  source 1..9: note = Seed: LVVVGACGV (KRAS G12C)
LVVMGSCGA

SEQ ID NO: 2860 - protein, 9 aa, synthetic construct
  source 1..9: note = Seed: LVVVGACGV (KRAS G12C)
LVVMGSCGF

SEQ ID NO: 2861 - protein, 9 aa, synthetic construct
  source 1..9: note = Seed: LVVVGACGV (KRAS G12C)
LVVMGSCGG

SEQ ID NO: 2862 - protein, 9 aa, synthetic construct
  source 1..9: note = Seed: LVVVGACGV (KRAS G12C)
LVVMGSCGH

SEQ ID NO: 2863 - protein, 9 aa, synthetic construct
  source 1..9: note = Seed: LVVVGACGV (KRAS G12C)
LVVMGSCGI

SEQ ID NO: 2864 - protein, 9 aa, synthetic construct
  source 1..9: note = Seed: LVVVGACGV (KRAS G12C)
LVVMGSCGL

SEQ ID NO: 2865 - protein, 9 aa, synthetic construct
  source 1..9: note = Seed: LVVVGACGV (KRAS G12C)
LVVMGSCGM

SEQ ID NO: 2866 - protein, 9 aa, synthetic construct
  source 1..9: note = Seed: LVVVGACGV (KRAS G12C)
LVVMGSCGN

SEQ ID NO: 2867 - protein, 9 aa, synthetic construct
  source 1..9: note = Seed: LVVVGACGV (KRAS G12C)
LVVMGSCGQ

SEQ ID NO: 2868 - protein, 9 aa, synthetic construct
  source 1..9: note = Seed: LVVVGACGV (KRAS G12C)
LVVMGSCGR

SEQ ID NO: 2869 - protein, 9 aa, synthetic construct
  source 1..9: note = Seed: LVVVGACGV (KRAS G12C)
LVVMGSCGS

SEQ ID NO: 2870 - protein, 9 aa, synthetic construct
  source 1..9: note = Seed: LVVVGACGV (KRAS G12C)
LVVMGSCGT

SEQ ID NO: 2871 - protein, 9 aa, synthetic construct
  source 1..9: note = Seed: LVVVGACGV (KRAS G12C)
LVVMGSCGV

SEQ ID NO: 2872 - protein, 9 aa, synthetic construct
  source 1..9: note = Seed: LVVVGACGV (KRAS G12C)
LVVMGSCGY

SEQ ID NO: 2873 - protein, 9 aa, synthetic construct
  source 1..9: note = Seed: LVVVGACGV (KRAS G12C)
LVVMGTCGA

SEQ ID NO: 2874 - protein, 9 aa, synthetic construct
  source 1..9: note = Seed: LVVVGACGV (KRAS G12C)
LVVMGTCGH

SEQ ID NO: 2875 - protein, 9 aa, synthetic construct
  source 1..9: note = Seed: LVVVGACGV (KRAS G12C)
LVVMGTCGI

SEQ ID NO: 2876 - protein, 9 aa, synthetic construct
  source 1..9: note = Seed: LVVVGACGV (KRAS G12C)
LVVMGTCGL

SEQ ID NO: 2877 - protein, 9 aa, synthetic construct
  source 1..9: note = Seed: LVVVGACGV (KRAS G12C)
LVVMGTCGM

SEQ ID NO: 2878 - protein, 9 aa, synthetic construct
  source 1..9: note = Seed: LVVVGACGV (KRAS G12C)
LVVMGTCGN

SEQ ID NO: 2879 - protein, 9 aa, synthetic construct
  source 1..9: note = Seed: LVVVGACGV (KRAS G12C)
LVVMGTCGQ

SEQ ID NO: 2880 - protein, 9 aa, synthetic construct
  source 1..9: note = Seed: LVVVGACGV (KRAS G12C)
LVVMGTCGS

SEQ ID NO: 2881 - protein, 9 aa, synthetic construct
  source 1..9: note = Seed: LVVVGACGV (KRAS G12C)
LVVMGTCGT

SEQ ID NO: 2882 - protein, 9 aa, synthetic construct
  source 1..9: note = Seed: LVVVGACGV (KRAS G12C)
LVVMGTCGV

SEQ ID NO: 2883 - protein, 9 aa, synthetic construct
  source 1..9: note = Seed: LVVVGACGV (KRAS G12C)
LVVMGVCGA

SEQ ID NO: 2884 - protein, 9 aa, synthetic construct
  source 1..9: note = Seed: LVVVGACGV (KRAS G12C)
LVVMGVCGH

SEQ ID NO: 2885 - protein, 9 aa, synthetic construct
  source 1..9: note = Seed: LVVVGACGV (KRAS G12C)
LVVMGVCGM

SEQ ID NO: 2886 - protein, 9 aa, synthetic construct
  source 1..9: note = Seed: LVVVGACGV (KRAS G12C)
LVVMGVCGN

SEQ ID NO: 2887 - protein, 9 aa, synthetic construct
  source 1..9: note = Seed: LVVVGACGV (KRAS G12C)
LVVMGVCGS

SEQ ID NO: 2888 - protein, 9 aa, synthetic construct
  source 1..9: note = Seed: LVVVGACGV (KRAS G12C)
LVVMGVCGV

SEQ ID NO: 2889 - protein, 9 aa, synthetic construct
  source 1..9: note = Seed: LVVVGACGV (KRAS G12C)
LVVNGACGA

SEQ ID NO: 2890 - protein, 9 aa, synthetic construct
  source 1..9: note = Seed: LVVVGACGV (KRAS G12C)
LVVNGACGF

SEQ ID NO: 2891 - protein, 9 aa, synthetic construct
  source 1..9: note = Seed: LVVVGACGV (KRAS G12C)
LVVNGACGI

SEQ ID NO: 2892 - protein, 9 aa, synthetic construct
  source 1..9: note = Seed: LVVVGACGV (KRAS G12C)
LVVNGACGL

SEQ ID NO: 2893 - protein, 9 aa, synthetic construct
  source 1..9: note = Seed: LVVVGACGV (KRAS G12C)
LVVNGACGM

SEQ ID NO: 2894 - protein, 9 aa, synthetic construct
  source 1..9: note = Seed: LVVVGACGV (KRAS G12C)
LVVNGACGT

SEQ ID NO: 2895 - protein, 9 aa, synthetic construct
  source 1..9: note = Seed: LVVVGACGV (KRAS G12C)
LVVNGACGV

SEQ ID NO: 2896 - protein, 9 aa, synthetic construct
  source 1..9: note = Seed: LVVVGACGV (KRAS G12C)
LVVNGACGY

SEQ ID NO: 2897 - protein, 9 aa, synthetic construct
  source 1..9: note = Seed: LVVVGACGV (KRAS G12C)
LVVNGDCGI

SEQ ID NO: 2898 - protein, 9 aa, synthetic construct
  source 1..9: note = Seed: LVVVGACGV (KRAS G12C)
LVVNGGCGF

SEQ ID NO: 2899 - protein, 9 aa, synthetic construct
  source 1..9: note = Seed: LVVVGACGV (KRAS G12C)
LVVNGGCGI

SEQ ID NO: 2900 - protein, 9 aa, synthetic construct
  source 1..9: note = Seed: LVVVGACGV (KRAS G12C)
LVVNGGCGL

SEQ ID NO: 2901 - protein, 9 aa, synthetic construct
  source 1..9: note = Seed: LVVVGACGV (KRAS G12C)
LVVNGGCGM

SEQ ID NO: 2902 - protein, 9 aa, synthetic construct
  source 1..9: note = Seed: LVVVGACGV (KRAS G12C)
LVVNGGCGV

SEQ ID NO: 2903 - protein, 9 aa, synthetic construct
  source 1..9: note = Seed: LVVVGACGV (KRAS G12C)
LVVNGGCGY

SEQ ID NO: 2904 - protein, 9 aa, synthetic construct
  source 1..9: note = Seed: LVVVGACGV (KRAS G12C)
LVVNGHCGF

SEQ ID NO: 2905 - protein, 9 aa, synthetic construct
  source 1..9: note = Seed: LVVVGACGV (KRAS G12C)
LVVNGHCGI

SEQ ID NO: 2906 - protein, 9 aa, synthetic construct
  source 1..9: note = Seed: LVVVGACGV (KRAS G12C)
LVVNGHCGL

SEQ ID NO: 2907 - protein, 9 aa, synthetic construct
  source 1..9: note = Seed: LVVVGACGV (KRAS G12C)
LVVNGHCGV

SEQ ID NO: 2908 - protein, 9 aa, synthetic construct
  source 1..9: note = Seed: LVVVGACGV (KRAS G12C)
LVVNGICGA

SEQ ID NO: 2909 - protein, 9 aa, synthetic construct
  source 1..9: note = Seed: LVVVGACGV (KRAS G12C)
LVVNGICGF

SEQ ID NO: 2910 - protein, 9 aa, synthetic construct
  source 1..9: note = Seed: LVVVGACGV (KRAS G12C)
LVVNGICGI

SEQ ID NO: 2911 - protein, 9 aa, synthetic construct
  source 1..9: note = Seed: LVVVGACGV (KRAS G12C)
LVVNGICGL

SEQ ID NO: 2912 - protein, 9 aa, synthetic construct
  source 1..9: note = Seed: LVVVGACGV (KRAS G12C)
LVVNGICGM

SEQ ID NO: 2913 - protein, 9 aa, synthetic construct
  source 1..9: note = Seed: LVVVGACGV (KRAS G12C)
LVVNGICGS

SEQ ID NO: 2914 - protein, 9 aa, synthetic construct
  source 1..9: note = Seed: LVVVGACGV (KRAS G12C)
LVVNGICGT

SEQ ID NO: 2915 - protein, 9 aa, synthetic construct
  source 1..9: note = Seed: LVVVGACGV (KRAS G12C)
LVVNGICGV

SEQ ID NO: 2916 - protein, 9 aa, synthetic construct
  source 1..9: note = Seed: LVVVGACGV (KRAS G12C)
LVVNGICGY

SEQ ID NO: 2917 - protein, 9 aa, synthetic construct
  source 1..9: note = Seed: LVVVGACGV (KRAS G12C)
LVVNGLCGF

SEQ ID NO: 2918 - protein, 9 aa, synthetic construct
  source 1..9: note = Seed: LVVVGACGV (KRAS G12C)
LVVNGLCGI

SEQ ID NO: 2919 - protein, 9 aa, synthetic construct
  source 1..9: note = Seed: LVVVGACGV (KRAS G12C)
LVVNGLCGL

SEQ ID NO: 2920 - protein, 9 aa, synthetic construct
  source 1..9: note = Seed: LVVVGACGV (KRAS G12C)
LVVNGLCGM

SEQ ID NO: 2921 - protein, 9 aa, synthetic construct
  source 1..9: note = Seed: LVVVGACGV (KRAS G12C)
LVVNGLCGV

SEQ ID NO: 2922 - protein, 9 aa, synthetic construct
  source 1..9: note = Seed: LVVVGACGV (KRAS G12C)
LVVNGLCGY

SEQ ID NO: 2923 - protein, 9 aa, synthetic construct
  source 1..9: note = Seed: LVVVGACGV (KRAS G12C)
LVVNGMCGF

SEQ ID NO: 2924 - protein, 9 aa, synthetic construct
  source 1..9: note = Seed: LVVVGACGV (KRAS G12C)
LVVNGMCGI

SEQ ID NO: 2925 - protein, 9 aa, synthetic construct
  source 1..9: note = Seed: LVVVGACGV (KRAS G12C)
LVVNGMCGL

SEQ ID NO: 2926 - protein, 9 aa, synthetic construct
  source 1..9: note = Seed: LVVVGACGV (KRAS G12C)
LVVNGMCGM

SEQ ID NO: 2927 - protein, 9 aa, synthetic construct
  source 1..9: note = Seed: LVVVGACGV (KRAS G12C)
LVVNGMCGV

SEQ ID NO: 2928 - protein, 9 aa, synthetic construct
  source 1..9: note = Seed: LVVVGACGV (KRAS G12C)
LVVNGMCGY

SEQ ID NO: 2929 - protein, 9 aa, synthetic construct
  source 1..9: note = Seed: LVVVGACGV (KRAS G12C)
LVVNGNCGA

SEQ ID NO: 2930 - protein, 9 aa, synthetic construct
  source 1..9: note = Seed: LVVVGACGV (KRAS G12C)
LVVNGNCGF

SEQ ID NO: 2931 - protein, 9 aa, synthetic construct
  source 1..9: note = Seed: LVVVGACGV (KRAS G12C)
LVVNGNCGI

SEQ ID NO: 2932 - protein, 9 aa, synthetic construct
  source 1..9: note = Seed: LVVVGACGV (KRAS G12C)
LVVNGNCGL

SEQ ID NO: 2933 - protein, 9 aa, synthetic construct
  source 1..9: note = Seed: LVVVGACGV (KRAS G12C)
LVVNGNCGM

SEQ ID NO: 2934 - protein, 9 aa, synthetic construct
  source 1..9: note = Seed: LVVVGACGV (KRAS G12C)
LVVNGNCGV

SEQ ID NO: 2935 - protein, 9 aa, synthetic construct
  source 1..9: note = Seed: LVVVGACGV (KRAS G12C)
LVVNGNCGY

SEQ ID NO: 2936 - protein, 9 aa, synthetic construct
  source 1..9: note = Seed: LVVVGACGV (KRAS G12C)
LVVNGPCGF

SEQ ID NO: 2937 - protein, 9 aa, synthetic construct
  source 1..9: note = Seed: LVVVGACGV (KRAS G12C)
LVVNGPCGI

SEQ ID NO: 2938 - protein, 9 aa, synthetic construct
  source 1..9: note = Seed: LVVVGACGV (KRAS G12C)
LVVNGPCGL

SEQ ID NO: 2939 - protein, 9 aa, synthetic construct
  source 1..9: note = Seed: LVVVGACGV (KRAS G12C)
LVVNGPCGM

SEQ ID NO: 2940 - protein, 9 aa, synthetic construct
  source 1..9: note = Seed: LVVVGACGV (KRAS G12C)
LVVNGPCGV

SEQ ID NO: 2941 - protein, 9 aa, synthetic construct
  source 1..9: note = Seed: LVVVGACGV (KRAS G12C)
LVVNGPCGY

SEQ ID NO: 2942 - protein, 9 aa, synthetic construct
  source 1..9: note = Seed: LVVVGACGV (KRAS G12C)
LVVNGQCGI

SEQ ID NO: 2943 - protein, 9 aa, synthetic construct
  source 1..9: note = Seed: LVVVGACGV (KRAS G12C)
LVVNGQCGL

SEQ ID NO: 2944 - protein, 9 aa, synthetic construct
  source 1..9: note = Seed: LVVVGACGV (KRAS G12C)
LVVNGQCGV

SEQ ID NO: 2945 - protein, 9 aa, synthetic construct
  source 1..9: note = Seed: LVVVGACGV (KRAS G12C)
LVVNGSCGA

SEQ ID NO: 2946 - protein, 9 aa, synthetic construct
  source 1..9: note = Seed: LVVVGACGV (KRAS G12C)
LVVNGSCGF

SEQ ID NO: 2947 - protein, 9 aa, synthetic construct
  source 1..9: note = Seed: LVVVGACGV (KRAS G12C)
LVVNGSCGI

SEQ ID NO: 2948 - protein, 9 aa, synthetic construct
  source 1..9: note = Seed: LVVVGACGV (KRAS G12C)
LVVNGSCGL

SEQ ID NO: 2949 - protein, 9 aa, synthetic construct
  source 1..9: note = Seed: LVVVGACGV (KRAS G12C)
LVVNGSCGM

SEQ ID NO: 2950 - protein, 9 aa, synthetic construct
  source 1..9: note = Seed: LVVVGACGV (KRAS G12C)
LVVNGSCGT

SEQ ID NO: 2951 - protein, 9 aa, synthetic construct
  source 1..9: note = Seed: LVVVGACGV (KRAS G12C)
LVVNGSCGV

SEQ ID NO: 2952 - protein, 9 aa, synthetic construct
  source 1..9: note = Seed: LVVVGACGV (KRAS G12C)
LVVNGSCGY

SEQ ID NO: 2953 - protein, 9 aa, synthetic construct
  source 1..9: note = Seed: LVVVGACGV (KRAS G12C)
LVVNGTCGA

SEQ ID NO: 2954 - protein, 9 aa, synthetic construct
  source 1..9: note = Seed: LVVVGACGV (KRAS G12C)
LVVNGTCGF

SEQ ID NO: 2955 - protein, 9 aa, synthetic construct
  source 1..9: note = Seed: LVVVGACGV (KRAS G12C)
LVVNGTCGI

SEQ ID NO: 2956 - protein, 9 aa, synthetic construct
  source 1..9: note = Seed: LVVVGACGV (KRAS G12C)
LVVNGTCGL

SEQ ID NO: 2957 - protein, 9 aa, synthetic construct
  source 1..9: note = Seed: LVVVGACGV (KRAS G12C)
LVVNGTCGM

SEQ ID NO: 2958 - protein, 9 aa, synthetic construct
  source 1..9: note = Seed: LVVVGACGV (KRAS G12C)
LVVNGTCGV

SEQ ID NO: 2959 - protein, 9 aa, synthetic construct
  source 1..9: note = Seed: LVVVGACGV (KRAS G12C)
LVVNGTCGY

SEQ ID NO: 2960 - protein, 9 aa, synthetic construct
  source 1..9: note = Seed: LVVVGACGV (KRAS G12C)
LVVNGVCGA

SEQ ID NO: 2961 - protein, 9 aa, synthetic construct
  source 1..9: note = Seed: LVVVGACGV (KRAS G12C)
LVVNGVCGF

SEQ ID NO: 2962 - protein, 9 aa, synthetic construct
  source 1..9: note = Seed: LVVVGACGV (KRAS G12C)
LVVNGVCGI

SEQ ID NO: 2963 - protein, 9 aa, synthetic construct
  source 1..9: note = Seed: LVVVGACGV (KRAS G12C)
LVVNGVCGL

SEQ ID NO: 2964 - protein, 9 aa, synthetic construct
  source 1..9: note = Seed: LVVVGACGV (KRAS G12C)
LVVNGVCGM

SEQ ID NO: 2965 - protein, 9 aa, synthetic construct
  source 1..9: note = Seed: LVVVGACGV (KRAS G12C)
LVVNGVCGV

SEQ ID NO: 2966 - protein, 9 aa, synthetic construct
  source 1..9: note = Seed: LVVVGACGV (KRAS G12C)
LVVNGVCGY

SEQ ID NO: 2967 - protein, 9 aa, synthetic construct
  source 1..9: note = Seed: LVVVGACGV (KRAS G12C)
LVVNGYCGI

SEQ ID NO: 2968 - protein, 9 aa, synthetic construct
  source 1..9: note = Seed: LVVVGACGV (KRAS G12C)
LVVNGYCGL

SEQ ID NO: 2969 - protein, 9 aa, synthetic construct
  source 1..9: note = Seed: LVVVGACGV (KRAS G12C)
LVVNGYCGV

SEQ ID NO: 2970 - protein, 9 aa, synthetic construct
  source 1..9: note = Seed: LVVVGACGV (KRAS G12C)
LVVQGACGA

SEQ ID NO: 2971 - protein, 9 aa, synthetic construct
  source 1..9: note = Seed: LVVVGACGV (KRAS G12C)
LVVQGACGF

SEQ ID NO: 2972 - protein, 9 aa, synthetic construct
  source 1..9: note = Seed: LVVVGACGV (KRAS G12C)
LVVQGACGI

SEQ ID NO: 2973 - protein, 9 aa, synthetic construct
  source 1..9: note = Seed: LVVVGACGV (KRAS G12C)
LVVQGACGL

SEQ ID NO: 2974 - protein, 9 aa, synthetic construct
  source 1..9: note = Seed: LVVVGACGV (KRAS G12C)
LVVQGACGM

SEQ ID NO: 2975 - protein, 9 aa, synthetic construct
  source 1..9: note = Seed: LVVVGACGV (KRAS G12C)
LVVQGACGS

SEQ ID NO: 2976 - protein, 9 aa, synthetic construct
  source 1..9: note = Seed: LVVVGACGV (KRAS G12C)
LVVQGACGT

SEQ ID NO: 2977 - protein, 9 aa, synthetic construct
  source 1..9: note = Seed: LVVVGACGV (KRAS G12C)
LVVQGACGV

SEQ ID NO: 2978 - protein, 9 aa, synthetic construct
  source 1..9: note = Seed: LVVVGACGV (KRAS G12C)
LVVQGGCGA

SEQ ID NO: 2979 - protein, 9 aa, synthetic construct
  source 1..9: note = Seed: LVVVGACGV (KRAS G12C)
LVVQGGCGI

SEQ ID NO: 2980 - protein, 9 aa, synthetic construct
  source 1..9: note = Seed: LVVVGACGV (KRAS G12C)
LVVQGGCGL

SEQ ID NO: 2981 - protein, 9 aa, synthetic construct
  source 1..9: note = Seed: LVVVGACGV (KRAS G12C)
LVVQGGCGM

SEQ ID NO: 2982 - protein, 9 aa, synthetic construct
  source 1..9: note = Seed: LVVVGACGV (KRAS G12C)
LVVQGGCGS

SEQ ID NO: 2983 - protein, 9 aa, synthetic construct
  source 1..9: note = Seed: LVVVGACGV (KRAS G12C)
LVVQGGCGT

SEQ ID NO: 2984 - protein, 9 aa, synthetic construct
  source 1..9: note = Seed: LVVVGACGV (KRAS G12C)
LVVQGGCGV

SEQ ID NO: 2985 - protein, 9 aa, synthetic construct
  source 1..9: note = Seed: LVVVGACGV (KRAS G12C)
LVVQGKCGA

SEQ ID NO: 2986 - protein, 9 aa, synthetic construct
  source 1..9: note = Seed: LVVVGACGV (KRAS G12C)
LVVQGKCGS

SEQ ID NO: 2987 - protein, 9 aa, synthetic construct
  source 1..9: note = Seed: LVVVGACGV (KRAS G12C)
LVVQGNCGA

SEQ ID NO: 2988 - protein, 9 aa, synthetic construct
  source 1..9: note = Seed: LVVVGACGV (KRAS G12C)
LVVQGNCGI

SEQ ID NO: 2989 - protein, 9 aa, synthetic construct
  source 1..9: note = Seed: LVVVGACGV (KRAS G12C)
LVVQGNCGL

SEQ ID NO: 2990 - protein, 9 aa, synthetic construct
  source 1..9: note = Seed: LVVVGACGV (KRAS G12C)
LVVQGNCGM

SEQ ID NO: 2991 - protein, 9 aa, synthetic construct
  source 1..9: note = Seed: LVVVGACGV (KRAS G12C)
LVVQGNCGS

SEQ ID NO: 2992 - protein, 9 aa, synthetic construct
  source 1..9: note = Seed: LVVVGACGV (KRAS G12C)
LVVQGNCGV

SEQ ID NO: 2993 - protein, 9 aa, synthetic construct
  source 1..9: note = Seed: LVVVGACGV (KRAS G12C)
LVVQGPCGA

SEQ ID NO: 2994 - protein, 9 aa, synthetic construct
  source 1..9: note = Seed: LVVVGACGV (KRAS G12C)
LVVQGPCGI

SEQ ID NO: 2995 - protein, 9 aa, synthetic construct
  source 1..9: note = Seed: LVVVGACGV (KRAS G12C)
LVVQGPCGL

SEQ ID NO: 2996 - protein, 9 aa, synthetic construct
  source 1..9: note = Seed: LVVVGACGV (KRAS G12C)
LVVQGPCGM

SEQ ID NO: 2997 - protein, 9 aa, synthetic construct
  source 1..9: note = Seed: LVVVGACGV (KRAS G12C)
LVVQGPCGV

SEQ ID NO: 2998 - protein, 9 aa, synthetic construct
  source 1..9: note = Seed: LVVVGACGV (KRAS G12C)
LVVQGRCGA

SEQ ID NO: 2999 - protein, 9 aa, synthetic construct
  source 1..9: note = Seed: LVVVGACGV (KRAS G12C)
LVVQGRCGH

SEQ ID NO: 3000 - protein, 9 aa, synthetic construct
  source 1..9: note = Seed: LVVVGACGV (KRAS G12C)
LVVQGRCGQ

SEQ ID NO: 3001 - protein, 9 aa, synthetic construct
  source 1..9: note = Seed: LVVVGACGV (KRAS G12C)
LVVQGRCGS

SEQ ID NO: 3002 - protein, 9 aa, synthetic construct
  source 1..9: note = Seed: LVVVGACGV (KRAS G12C)
LVVQGSCGA

SEQ ID NO: 3003 - protein, 9 aa, synthetic construct
  source 1..9: note = Seed: LVVVGACGV (KRAS G12C)
LVVQGSCGI

SEQ ID NO: 3004 - protein, 9 aa, synthetic construct
  source 1..9: note = Seed: LVVVGACGV (KRAS G12C)
LVVQGSCGL

SEQ ID NO: 3005 - protein, 9 aa, synthetic construct
  source 1..9: note = Seed: LVVVGACGV (KRAS G12C)
LVVQGSCGM

SEQ ID NO: 3006 - protein, 9 aa, synthetic construct
  source 1..9: note = Seed: LVVVGACGV (KRAS G12C)
LVVQGSCGS

SEQ ID NO: 3007 - protein, 9 aa, synthetic construct
  source 1..9: note = Seed: LVVVGACGV (KRAS G12C)
LVVQGSCGT

SEQ ID NO: 3008 - protein, 9 aa, synthetic construct
  source 1..9: note = Seed: LVVVGACGV (KRAS G12C)
LVVQGSCGV

SEQ ID NO: 3009 - protein, 9 aa, synthetic construct
  source 1..9: note = Seed: LVVVGACGV (KRAS G12C)
LVVQGTCGA

SEQ ID NO: 3010 - protein, 9 aa, synthetic construct
  source 1..9: note = Seed: LVVVGACGV (KRAS G12C)
LVVQGTCGI

SEQ ID NO: 3011 - protein, 9 aa, synthetic construct
  source 1..9: note = Seed: LVVVGACGV (KRAS G12C)
LVVQGTCGL

SEQ ID NO: 3012 - protein, 9 aa, synthetic construct
  source 1..9: note = Seed: LVVVGACGV (KRAS G12C)
LVVQGTCGM

SEQ ID NO: 3013 - protein, 9 aa, synthetic construct
  source 1..9: note = Seed: LVVVGACGV (KRAS G12C)
LVVQGTCGV

SEQ ID NO: 3014 - protein, 9 aa, synthetic construct
  source 1..9: note = Seed: LVVVGACGV (KRAS G12C)
LVVQGVCGA

SEQ ID NO: 3015 - protein, 9 aa, synthetic construct
  source 1..9: note = Seed: LVVVGACGV (KRAS G12C)
LVVQGVCGL

SEQ ID NO: 3016 - protein, 9 aa, synthetic construct
  source 1..9: note = Seed: LVVVGACGV (KRAS G12C)
LVVQGVCGV

SEQ ID NO: 3017 - protein, 9 aa, synthetic construct
  source 1..9: note = Seed: LVVVGACGV (KRAS G12C)
LVVRGRCGA

SEQ ID NO: 3018 - protein, 9 aa, synthetic construct
  source 1..9: note = Seed: LVVVGACGV (KRAS G12C)
LVVRGRCGH

SEQ ID NO: 3019 - protein, 9 aa, synthetic construct
  source 1..9: note = Seed: LVVVGACGV (KRAS G12C)
LVVRGRCGL

SEQ ID NO: 3020 - protein, 9 aa, synthetic construct
  source 1..9: note = Seed: LVVVGACGV (KRAS G12C)
LVVRGRCGM

SEQ ID NO: 3021 - protein, 9 aa, synthetic construct
  source 1..9: note = Seed: LVVVGACGV (KRAS G12C)
LVVRGRCGR

SEQ ID NO: 3022 - protein, 9 aa, synthetic construct
  source 1..9: note = Seed: LVVVGACGV (KRAS G12C)
LVVRGRCGS

SEQ ID NO: 3023 - protein, 9 aa, synthetic construct
  source 1..9: note = Seed: LVVVGACGV (KRAS G12C)
LVVRGRCGY

SEQ ID NO: 3024 - protein, 9 aa, synthetic construct
  source 1..9: note = Seed: LVVVGACGV (KRAS G12C)
LVVSGACGA

SEQ ID NO: 3025 - protein, 9 aa, synthetic construct
  source 1..9: note = Seed: LVVVGACGV (KRAS G12C)
LVVSGACGF

SEQ ID NO: 3026 - protein, 9 aa, synthetic construct
  source 1..9: note = Seed: LVVVGACGV (KRAS G12C)
LVVSGACGI

SEQ ID NO: 3027 - protein, 9 aa, synthetic construct
  source 1..9: note = Seed: LVVVGACGV (KRAS G12C)
LVVSGACGL

SEQ ID NO: 3028 - protein, 9 aa, synthetic construct
  source 1..9: note = Seed: LVVVGACGV (KRAS G12C)
LVVSGACGM

SEQ ID NO: 3029 - protein, 9 aa, synthetic construct
  source 1..9: note = Seed: LVVVGACGV (KRAS G12C)
LVVSGACGT

SEQ ID NO: 3030 - protein, 9 aa, synthetic construct
  source 1..9: note = Seed: LVVVGACGV (KRAS G12C)
LVVSGACGV

SEQ ID NO: 3031 - protein, 9 aa, synthetic construct
  source 1..9: note = Seed: LVVVGACGV (KRAS G12C)
LVVSGACGY

SEQ ID NO: 3032 - protein, 9 aa, synthetic construct
  source 1..9: note = Seed: LVVVGACGV (KRAS G12C)
LVVSGGCGA

SEQ ID NO: 3033 - protein, 9 aa, synthetic construct
  source 1..9: note = Seed: LVVVGACGV (KRAS G12C)
LVVSGGCGI

SEQ ID NO: 3034 - protein, 9 aa, synthetic construct
  source 1..9: note = Seed: LVVVGACGV (KRAS G12C)
LVVSGGCGL

SEQ ID NO: 3035 - protein, 9 aa, synthetic construct
  source 1..9: note = Seed: LVVVGACGV (KRAS G12C)
LVVSGGCGM

SEQ ID NO: 3036 - protein, 9 aa, synthetic construct
  source 1..9: note = Seed: LVVVGACGV (KRAS G12C)
LVVSGGCGV

SEQ ID NO: 3037 - protein, 9 aa, synthetic construct
  source 1..9: note = Seed: LVVVGACGV (KRAS G12C)
LVVSGNCGF

SEQ ID NO: 3038 - protein, 9 aa, synthetic construct
  source 1..9: note = Seed: LVVVGACGV (KRAS G12C)
LVVSGNCGI

SEQ ID NO: 3039 - protein, 9 aa, synthetic construct
  source 1..9: note = Seed: LVVVGACGV (KRAS G12C)
LVVSGNCGL

SEQ ID NO: 3040 - protein, 9 aa, synthetic construct
  source 1..9: note = Seed: LVVVGACGV (KRAS G12C)
LVVSGNCGM

SEQ ID NO: 3041 - protein, 9 aa, synthetic construct
  source 1..9: note = Seed: LVVVGACGV (KRAS G12C)
LVVSGNCGV

SEQ ID NO: 3042 - protein, 9 aa, synthetic construct
  source 1..9: note = Seed: LVVVGACGV (KRAS G12C)
LVVSGNCGY

SEQ ID NO: 3043 - protein, 9 aa, synthetic construct
  source 1..9: note = Seed: LVVVGACGV (KRAS G12C)
LVVSGPCGI

SEQ ID NO: 3044 - protein, 9 aa, synthetic construct
  source 1..9: note = Seed: LVVVGACGV (KRAS G12C)
LVVSGPCGL

SEQ ID NO: 3045 - protein, 9 aa, synthetic construct
  source 1..9: note = Seed: LVVVGACGV (KRAS G12C)
LVVSGPCGV

SEQ ID NO: 3046 - protein, 9 aa, synthetic construct
  source 1..9: note = Seed: LVVVGACGV (KRAS G12C)
LVVSGRCGA

SEQ ID NO: 3047 - protein, 9 aa, synthetic construct
  source 1..9: note = Seed: LVVVGACGV (KRAS G12C)
LVVSGSCGA

SEQ ID NO: 3048 - protein, 9 aa, synthetic construct
  source 1..9: note = Seed: LVVVGACGV (KRAS G12C)
LVVSGSCGF

SEQ ID NO: 3049 - protein, 9 aa, synthetic construct
  source 1..9: note = Seed: LVVVGACGV (KRAS G12C)
LVVSGSCGI

SEQ ID NO: 3050 - protein, 9 aa, synthetic construct
  source 1..9: note = Seed: LVVVGACGV (KRAS G12C)
LVVSGSCGL

SEQ ID NO: 3051 - protein, 9 aa, synthetic construct
  source 1..9: note = Seed: LVVVGACGV (KRAS G12C)
LVVSGSCGM

SEQ ID NO: 3052 - protein, 9 aa, synthetic construct
  source 1..9: note = Seed: LVVVGACGV (KRAS G12C)
LVVSGSCGV

SEQ ID NO: 3053 - protein, 9 aa, synthetic construct
  source 1..9: note = Seed: LVVVGACGV (KRAS G12C)
LVVSGTCGI

SEQ ID NO: 3054 - protein, 9 aa, synthetic construct
  source 1..9: note = Seed: LVVVGACGV (KRAS G12C)
LVVSGTCGL

SEQ ID NO: 3055 - protein, 9 aa, synthetic construct
  source 1..9: note = Seed: LVVVGACGV (KRAS G12C)
LVVSGTCGV

SEQ ID NO: 3056 - protein, 9 aa, synthetic construct
  source 1..9: note = Seed: LVVVGACGV (KRAS G12C)
LVVTGACGA

SEQ ID NO: 3057 - protein, 9 aa, synthetic construct
  source 1..9: note = Seed: LVVVGACGV (KRAS G12C)
LVVTGACGI

SEQ ID NO: 3058 - protein, 9 aa, synthetic construct
  source 1..9: note = Seed: LVVVGACGV (KRAS G12C)
LVVTGACGL

SEQ ID NO: 3059 - protein, 9 aa, synthetic construct
  source 1..9: note = Seed: LVVVGACGV (KRAS G12C)
LVVTGACGM

SEQ ID NO: 3060 - protein, 9 aa, synthetic construct
  source 1..9: note = Seed: LVVVGACGV (KRAS G12C)
LVVTGACGV

SEQ ID NO: 3061 - protein, 9 aa, synthetic construct
  source 1..9: note = Seed: LVVVGACGV (KRAS G12C)
LVVTGGCGA

SEQ ID NO: 3062 - protein, 9 aa, synthetic construct
  source 1..9: note = Seed: LVVVGACGV (KRAS G12C)
LVVTGGCGI

SEQ ID NO: 3063 - protein, 9 aa, synthetic construct
  source 1..9: note = Seed: LVVVGACGV (KRAS G12C)
LVVTGGCGL

SEQ ID NO: 3064 - protein, 9 aa, synthetic construct
  source 1..9: note = Seed: LVVVGACGV (KRAS G12C)
LVVTGGCGV

SEQ ID NO: 3065 - protein, 9 aa, synthetic construct
  source 1..9: note = Seed: LVVVGACGV (KRAS G12C)
LVVTGNCGI

SEQ ID NO: 3066 - protein, 9 aa, synthetic construct
  source 1..9: note = Seed: LVVVGACGV (KRAS G12C)
LVVTGNCGL

SEQ ID NO: 3067 - protein, 9 aa, synthetic construct
  source 1..9: note = Seed: LVVVGACGV (KRAS G12C)
LVVTGNCGV

SEQ ID NO: 3068 - protein, 9 aa, synthetic construct
  source 1..9: note = Seed: LVVVGACGV (KRAS G12C)
LVVTGPCGI

SEQ ID NO: 3069 - protein, 9 aa, synthetic construct
  source 1..9: note = Seed: LVVVGACGV (KRAS G12C)
LVVTGPCGL

SEQ ID NO: 3070 - protein, 9 aa, synthetic construct
  source 1..9: note = Seed: LVVVGACGV (KRAS G12C)
LVVTGPCGV

SEQ ID NO: 3071 - protein, 9 aa, synthetic construct
  source 1..9: note = Seed: LVVVGACGV (KRAS G12C)
LVVTGSCGA

SEQ ID NO: 3072 - protein, 9 aa, synthetic construct
  source 1..9: note = Seed: LVVVGACGV (KRAS G12C)
LVVTGSCGF

SEQ ID NO: 3073 - protein, 9 aa, synthetic construct
  source 1..9: note = Seed: LVVVGACGV (KRAS G12C)
LVVTGSCGI

SEQ ID NO: 3074 - protein, 9 aa, synthetic construct
  source 1..9: note = Seed: LVVVGACGV (KRAS G12C)
LVVTGSCGL

SEQ ID NO: 3075 - protein, 9 aa, synthetic construct
  source 1..9: note = Seed: LVVVGACGV (KRAS G12C)
LVVTGSCGM

SEQ ID NO: 3076 - protein, 9 aa, synthetic construct
  source 1..9: note = Seed: LVVVGACGV (KRAS G12C)
LVVTGSCGV

SEQ ID NO: 3077 - protein, 9 aa, synthetic construct
  source 1..9: note = Seed: LVVVGACGV (KRAS G12C)
LVVVGACGA

SEQ ID NO: 3078 - protein, 9 aa, synthetic construct
  source 1..9: note = Seed: LVVVGACGV (KRAS G12C)
LVVVGACGI

SEQ ID NO: 3079 - protein, 9 aa, synthetic construct
  source 1..9: note = Seed: LVVVGACGV (KRAS G12C)
LVVVGACGL

SEQ ID NO: 3080 - protein, 9 aa, synthetic construct
  source 1..9: note = Seed: LVVVGACGV (KRAS G12C)
LVVVGACGM

SEQ ID NO: 3081 - protein, 9 aa, synthetic construct
  source 1..9: note = Seed: LVVVGACGV (KRAS G12C)
LVVVGACGS

SEQ ID NO: 3082 - protein, 9 aa, synthetic construct
  source 1..9: note = Seed: LVVVGACGV (KRAS G12C)
LVVVGACGT

SEQ ID NO: 3083 - protein, 9 aa, synthetic construct
  source 1..9: note = Seed: LVVVGACGV (KRAS G12C)
LVVVGGCGA

SEQ ID NO: 3084 - protein, 9 aa, synthetic construct
  source 1..9: note = Seed: LVVVGACGV (KRAS G12C)
LVVVGGCGI

SEQ ID NO: 3085 - protein, 9 aa, synthetic construct
  source 1..9: note = Seed: LVVVGACGV (KRAS G12C)
LVVVGGCGL

SEQ ID NO: 3086 - protein, 9 aa, synthetic construct
  source 1..9: note = Seed: LVVVGACGV (KRAS G12C)
LVVVGGCGM

SEQ ID NO: 3087 - protein, 9 aa, synthetic construct
  source 1..9: note = Seed: LVVVGACGV (KRAS G12C)
LVVVGGCGS

SEQ ID NO: 3088 - protein, 9 aa, synthetic construct
  source 1..9: note = Seed: LVVVGACGV (KRAS G12C)
LVVVGGCGT

SEQ ID NO: 3089 - protein, 9 aa, synthetic construct
  source 1..9: note = Seed: LVVVGACGV (KRAS G12C)
LVVVGGCGV

SEQ ID NO: 3090 - protein, 9 aa, synthetic construct
  source 1..9: note = Seed: LVVVGACGV (KRAS G12C)
LVVVGKCGA

SEQ ID NO: 3091 - protein, 9 aa, synthetic construct
  source 1..9: note = Seed: LVVVGACGV (KRAS G12C)
LVVVGKCGH

SEQ ID NO: 3092 - protein, 9 aa, synthetic construct
  source 1..9: note = Seed: LVVVGACGV (KRAS G12C)
LVVVGKCGK

SEQ ID NO: 3093 - protein, 9 aa, synthetic construct
  source 1..9: note = Seed: LVVVGACGV (KRAS G12C)
LVVVGKCGQ

SEQ ID NO: 3094 - protein, 9 aa, synthetic construct
  source 1..9: note = Seed: LVVVGACGV (KRAS G12C)
LVVVGKCGR

SEQ ID NO: 3095 - protein, 9 aa, synthetic construct
  source 1..9: note = Seed: LVVVGACGV (KRAS G12C)
LVVVGKCGS

SEQ ID NO: 3096 - protein, 9 aa, synthetic construct
  source 1..9: note = Seed: LVVVGACGV (KRAS G12C)
LVVVGNCGA

SEQ ID NO: 3097 - protein, 9 aa, synthetic construct
  source 1..9: note = Seed: LVVVGACGV (KRAS G12C)
LVVVGNCGI

SEQ ID NO: 3098 - protein, 9 aa, synthetic construct
  source 1..9: note = Seed: LVVVGACGV (KRAS G12C)
LVVVGNCGL

SEQ ID NO: 3099 - protein, 9 aa, synthetic construct
  source 1..9: note = Seed: LVVVGACGV (KRAS G12C)
LVVVGNCGM

SEQ ID NO: 3100 - protein, 9 aa, synthetic construct
  source 1..9: note = Seed: LVVVGACGV (KRAS G12C)
LVVVGNCGS

SEQ ID NO: 3101 - protein, 9 aa, synthetic construct
  source 1..9: note = Seed: LVVVGACGV (KRAS G12C)
LVVVGNCGV

SEQ ID NO: 3102 - protein, 9 aa, synthetic construct
  source 1..9: note = Seed: LVVVGACGV (KRAS G12C)
LVVVGPCGA

SEQ ID NO: 3103 - protein, 9 aa, synthetic construct
  source 1..9: note = Seed: LVVVGACGV (KRAS G12C)
LVVVGPCGI

SEQ ID NO: 3104 - protein, 9 aa, synthetic construct
  source 1..9: note = Seed: LVVVGACGV (KRAS G12C)
LVVVGPCGL

SEQ ID NO: 3105 - protein, 9 aa, synthetic construct
  source 1..9: note = Seed: LVVVGACGV (KRAS G12C)
LVVVGPCGM

SEQ ID NO: 3106 - protein, 9 aa, synthetic construct
  source 1..9: note = Seed: LVVVGACGV (KRAS G12C)
LVVVGPCGS

SEQ ID NO: 3107 - protein, 9 aa, synthetic construct
  source 1..9: note = Seed: LVVVGACGV (KRAS G12C)
LVVVGPCGT

SEQ ID NO: 3108 - protein, 9 aa, synthetic construct
  source 1..9: note = Seed: LVVVGACGV (KRAS G12C)
LVVVGPCGV

SEQ ID NO: 3109 - protein, 9 aa, synthetic construct
  source 1..9: note = Seed: LVVVGACGV (KRAS G12C)
LVVVGRCGA

SEQ ID NO: 3110 - protein, 9 aa, synthetic construct
  source 1..9: note = Seed: LVVVGACGV (KRAS G12C)
LVVVGRCGG

SEQ ID NO: 3111 - protein, 9 aa, synthetic construct
  source 1..9: note = Seed: LVVVGACGV (KRAS G12C)
LVVVGRCGH

SEQ ID NO: 3112 - protein, 9 aa, synthetic construct
  source 1..9: note = Seed: LVVVGACGV (KRAS G12C)
LVVVGRCGK

SEQ ID NO: 3113 - protein, 9 aa, synthetic construct
  source 1..9: note = Seed: LVVVGACGV (KRAS G12C)
LVVVGRCGQ

SEQ ID NO: 3114 - protein, 9 aa, synthetic construct
  source 1..9: note = Seed: LVVVGACGV (KRAS G12C)
LVVVGRCGR

SEQ ID NO: 3115 - protein, 9 aa, synthetic construct
  source 1..9: note = Seed: LVVVGACGV (KRAS G12C)
LVVVGRCGS

SEQ ID NO: 3116 - protein, 9 aa, synthetic construct
  source 1..9: note = Seed: LVVVGACGV (KRAS G12C)
LVVVGRCGT

SEQ ID NO: 3117 - protein, 9 aa, synthetic construct
  source 1..9: note = Seed: LVVVGACGV (KRAS G12C)
LVVVGSCGA

SEQ ID NO: 3118 - protein, 9 aa, synthetic construct
  source 1..9: note = Seed: LVVVGACGV (KRAS G12C)
LVVVGSCGI

SEQ ID NO: 3119 - protein, 9 aa, synthetic construct
  source 1..9: note = Seed: LVVVGACGV (KRAS G12C)
LVVVGSCGL

SEQ ID NO: 3120 - protein, 9 aa, synthetic construct
  source 1..9: note = Seed: LVVVGACGV (KRAS G12C)
LVVVGSCGM

SEQ ID NO: 3121 - protein, 9 aa, synthetic construct
  source 1..9: note = Seed: LVVVGACGV (KRAS G12C)
LVVVGSCGS

SEQ ID NO: 3122 - protein, 9 aa, synthetic construct
  source 1..9: note = Seed: LVVVGACGV (KRAS G12C)
LVVVGSCGT

SEQ ID NO: 3123 - protein, 9 aa, synthetic construct
  source 1..9: note = Seed: LVVVGACGV (KRAS G12C)
LVVVGSCGV

SEQ ID NO: 3124 - protein, 9 aa, synthetic construct
  source 1..9: note = Seed: LVVVGACGV (KRAS G12C)
LVVVGTCGA

SEQ ID NO: 3125 - protein, 9 aa, synthetic construct
  source 1..9: note = Seed: LVVVGACGV (KRAS G12C)
LVVVGTCGL

SEQ ID NO: 3126 - protein, 9 aa, synthetic construct
  source 1..9: note = Seed: LVVVGACGV (KRAS G12C)
LVVVGTCGV

SEQ ID NO: 3127 - protein, 9 aa, synthetic construct
  source 1..9: note = Seed: LVVVGACGV (KRAS G12C)
LVVWGNCGI

SEQ ID NO: 3128 - protein, 9 aa, synthetic construct
  source 1..9: note = Seed: LVVVGACGV (KRAS G12C)
LVVWGNCGL

SEQ ID NO: 3129 - protein, 9 aa, synthetic construct
  source 1..9: note = Seed: LVVVGACGV (KRAS G12C)
LVVWGNCGM

SEQ ID NO: 3130 - protein, 9 aa, synthetic construct
  source 1..9: note = Seed: LVVVGACGV (KRAS G12C)
LVVWGNCGV

SEQ ID NO: 3131 - protein, 9 aa, synthetic construct
  source 1..9: note = Seed: LVVVGACGV (KRAS G12C)
LVVWGSCGI

SEQ ID NO: 3132 - protein, 9 aa, synthetic construct
  source 1..9: note = Seed: LVVVGACGV (KRAS G12C)
LVVWGSCGL

SEQ ID NO: 3133 - protein, 9 aa, synthetic construct
  source 1..9: note = Seed: LVVVGACGV (KRAS G12C)
LVVWGSCGM

SEQ ID NO: 3134 - protein, 9 aa, synthetic construct
  source 1..9: note = Seed: LVVVGACGV (KRAS G12C)
LVVWGSCGV

SEQ ID NO: 3135 - protein, 9 aa, synthetic construct
  source 1..9: note = Seed: LVVVGACGV (KRAS G12C)
LVVYGACGA

SEQ ID NO: 3136 - protein, 9 aa, synthetic construct
  source 1..9: note = Seed: LVVVGACGV (KRAS G12C)
LVVYGACGI

SEQ ID NO: 3137 - protein, 9 aa, synthetic construct
  source 1..9: note = Seed: LVVVGACGV (KRAS G12C)
LVVYGACGL

SEQ ID NO: 3138 - protein, 9 aa, synthetic construct
  source 1..9: note = Seed: LVVVGACGV (KRAS G12C)
LVVYGACGM

SEQ ID NO: 3139 - protein, 9 aa, synthetic construct
  source 1..9: note = Seed: LVVVGACGV (KRAS G12C)
LVVYGACGV

SEQ ID NO: 3140 - protein, 9 aa, synthetic construct
  source 1..9: note = Seed: LVVVGACGV (KRAS G12C)
LVVYGDCGI

SEQ ID NO: 3141 - protein, 9 aa, synthetic construct
  source 1..9: note = Seed: LVVVGACGV (KRAS G12C)
LVVYGDCGL

SEQ ID NO: 3142 - protein, 9 aa, synthetic construct
  source 1..9: note = Seed: LVVVGACGV (KRAS G12C)
LVVYGDCGV

SEQ ID NO: 3143 - protein, 9 aa, synthetic construct
  source 1..9: note = Seed: LVVVGACGV (KRAS G12C)
LVVYGGCGA

SEQ ID NO: 3144 - protein, 9 aa, synthetic construct
  source 1..9: note = Seed: LVVVGACGV (KRAS G12C)
LVVYGGCGI

SEQ ID NO: 3145 - protein, 9 aa, synthetic construct
  source 1..9: note = Seed: LVVVGACGV (KRAS G12C)
LVVYGGCGL

SEQ ID NO: 3146 - protein, 9 aa, synthetic construct
  source 1..9: note = Seed: LVVVGACGV (KRAS G12C)
LVVYGGCGM

SEQ ID NO: 3147 - protein, 9 aa, synthetic construct
  source 1..9: note = Seed: LVVVGACGV (KRAS G12C)
LVVYGGCGV

SEQ ID NO: 3148 - protein, 9 aa, synthetic construct
  source 1..9: note = Seed: LVVVGACGV (KRAS G12C)
LVVYGNCGA

SEQ ID NO: 3149 - protein, 9 aa, synthetic construct
  source 1..9: note = Seed: LVVVGACGV (KRAS G12C)
LVVYGNCGF

SEQ ID NO: 3150 - protein, 9 aa, synthetic construct
  source 1..9: note = Seed: LVVVGACGV (KRAS G12C)
LVVYGNCGI

SEQ ID NO: 3151 - protein, 9 aa, synthetic construct
  source 1..9: note = Seed: LVVVGACGV (KRAS G12C)
LVVYGNCGL

SEQ ID NO: 3152 - protein, 9 aa, synthetic construct
  source 1..9: note = Seed: LVVVGACGV (KRAS G12C)
LVVYGNCGM

SEQ ID NO: 3153 - protein, 9 aa, synthetic construct
  source 1..9: note = Seed: LVVVGACGV (KRAS G12C)
LVVYGNCGS

SEQ ID NO: 3154 - protein, 9 aa, synthetic construct
  source 1..9: note = Seed: LVVVGACGV (KRAS G12C)
LVVYGNCGT

SEQ ID NO: 3155 - protein, 9 aa, synthetic construct
  source 1..9: note = Seed: LVVVGACGV (KRAS G12C)
LVVYGNCGV

SEQ ID NO: 3156 - protein, 9 aa, synthetic construct
  source 1..9: note = Seed: LVVVGACGV (KRAS G12C)
LVVYGNCGY

SEQ ID NO: 3157 - protein, 9 aa, synthetic construct
  source 1..9: note = Seed: LVVVGACGV (KRAS G12C)
LVVYGSCGA

SEQ ID NO: 3158 - protein, 9 aa, synthetic construct
  source 1..9: note = Seed: LVVVGACGV (KRAS G12C)
LVVYGSCGF

SEQ ID NO: 3159 - protein, 9 aa, synthetic construct
  source 1..9: note = Seed: LVVVGACGV (KRAS G12C)
LVVYGSCGH

SEQ ID NO: 3160 - protein, 9 aa, synthetic construct
  source 1..9: note = Seed: LVVVGACGV (KRAS G12C)
LVVYGSCGI

SEQ ID NO: 3161 - protein, 9 aa, synthetic construct
  source 1..9: note = Seed: LVVVGACGV (KRAS G12C)
LVVYGSCGL

SEQ ID NO: 3162 - protein, 9 aa, synthetic construct
  source 1..9: note = Seed: LVVVGACGV (KRAS G12C)
LVVYGSCGM

SEQ ID NO: 3163 - protein, 9 aa, synthetic construct
  source 1..9: note = Seed: LVVVGACGV (KRAS G12C)
LVVYGSCGS

SEQ ID NO: 3164 - protein, 9 aa, synthetic construct
  source 1..9: note = Seed: LVVVGACGV (KRAS G12C)
LVVYGSCGT

SEQ ID NO: 3165 - protein, 9 aa, synthetic construct
  source 1..9: note = Seed: LVVVGACGV (KRAS G12C)
LVVYGSCGV

SEQ ID NO: 3166 - protein, 9 aa, synthetic construct
  source 1..9: note = Seed: LVVVGACGV (KRAS G12C)
LVVYGSCGY

SEQ ID NO: 3167 - protein, 9 aa, synthetic construct
  source 1..9: note = Seed: LVVVGACGV (KRAS G12C)
LVVYGTCGI

SEQ ID NO: 3168 - protein, 9 aa, synthetic construct
  source 1..9: note = Seed: LVVVGACGV (KRAS G12C)
LVVYGTCGL

SEQ ID NO: 3169 - protein, 9 aa, synthetic construct
  source 1..9: note = Seed: LVVVGACGV (KRAS G12C)
LVVYGTCGM

SEQ ID NO: 3170 - protein, 9 aa, synthetic construct
  source 1..9: note = Seed: LVVVGACGV (KRAS G12C)
LVVYGTCGV

SEQ ID NO: 3171 - protein, 9 aa, synthetic construct
  source 1..9: note = Seed: LVVVGACGV (KRAS G12C)
MVVAGACGA

SEQ ID NO: 3172 - protein, 9 aa, synthetic construct
  source 1..9: note = Seed: LVVVGACGV (KRAS G12C)
MVVAGACGI

SEQ ID NO: 3173 - protein, 9 aa, synthetic construct
  source 1..9: note = Seed: LVVVGACGV (KRAS G12C)
MVVAGACGL

SEQ ID NO: 3174 - protein, 9 aa, synthetic construct
  source 1..9: note = Seed: LVVVGACGV (KRAS G12C)
MVVAGACGM

SEQ ID NO: 3175 - protein, 9 aa, synthetic construct
  source 1..9: note = Seed: LVVVGACGV (KRAS G12C)
MVVAGACGV

SEQ ID NO: 3176 - protein, 9 aa, synthetic construct
  source 1..9: note = Seed: LVVVGACGV (KRAS G12C)
MVVAGGCGA

SEQ ID NO: 3177 - protein, 9 aa, synthetic construct
  source 1..9: note = Seed: LVVVGACGV (KRAS G12C)
MVVAGGCGI

SEQ ID NO: 3178 - protein, 9 aa, synthetic construct
  source 1..9: note = Seed: LVVVGACGV (KRAS G12C)
MVVAGGCGL

SEQ ID NO: 3179 - protein, 9 aa, synthetic construct
  source 1..9: note = Seed: LVVVGACGV (KRAS G12C)
MVVAGGCGM

SEQ ID NO: 3180 - protein, 9 aa, synthetic construct
  source 1..9: note = Seed: LVVVGACGV (KRAS G12C)
MVVAGGCGV

SEQ ID NO: 3181 - protein, 9 aa, synthetic construct
  source 1..9: note = Seed: LVVVGACGV (KRAS G12C)
MVVAGNCGI

SEQ ID NO: 3182 - protein, 9 aa, synthetic construct
  source 1..9: note = Seed: LVVVGACGV (KRAS G12C)
MVVAGNCGL

SEQ ID NO: 3183 - protein, 9 aa, synthetic construct
  source 1..9: note = Seed: LVVVGACGV (KRAS G12C)
MVVAGNCGV

SEQ ID NO: 3184 - protein, 9 aa, synthetic construct
  source 1..9: note = Seed: LVVVGACGV (KRAS G12C)
MVVAGPCGI

SEQ ID NO: 3185 - protein, 9 aa, synthetic construct
  source 1..9: note = Seed: LVVVGACGV (KRAS G12C)
MVVAGPCGL

SEQ ID NO: 3186 - protein, 9 aa, synthetic construct
  source 1..9: note = Seed: LVVVGACGV (KRAS G12C)
MVVAGPCGV

SEQ ID NO: 3187 - protein, 9 aa, synthetic construct
  source 1..9: note = Seed: LVVVGACGV (KRAS G12C)
MVVAGRCGA

SEQ ID NO: 3188 - protein, 9 aa, synthetic construct
  source 1..9: note = Seed: LVVVGACGV (KRAS G12C)
MVVAGSCGA

SEQ ID NO: 3189 - protein, 9 aa, synthetic construct
  source 1..9: note = Seed: LVVVGACGV (KRAS G12C)
MVVAGSCGI

SEQ ID NO: 3190 - protein, 9 aa, synthetic construct
  source 1..9: note = Seed: LVVVGACGV (KRAS G12C)
MVVAGSCGL

SEQ ID NO: 3191 - protein, 9 aa, synthetic construct
  source 1..9: note = Seed: LVVVGACGV (KRAS G12C)
MVVAGSCGM

SEQ ID NO: 3192 - protein, 9 aa, synthetic construct
  source 1..9: note = Seed: LVVVGACGV (KRAS G12C)
MVVAGSCGV

SEQ ID NO: 3193 - protein, 9 aa, synthetic construct
  source 1..9: note = Seed: LVVVGACGV (KRAS G12C)
MVVEGACGI

SEQ ID NO: 3194 - protein, 9 aa, synthetic construct
  source 1..9: note = Seed: LVVVGACGV (KRAS G12C)
MVVEGACGL

SEQ ID NO: 3195 - protein, 9 aa, synthetic construct
  source 1..9: note = Seed: LVVVGACGV (KRAS G12C)
MVVEGACGV

SEQ ID NO: 3196 - protein, 9 aa, synthetic construct
  source 1..9: note = Seed: LVVVGACGV (KRAS G12C)
MVVEGGCGL

SEQ ID NO: 3197 - protein, 9 aa, synthetic construct
  source 1..9: note = Seed: LVVVGACGV (KRAS G12C)
MVVFGACGA

SEQ ID NO: 3198 - protein, 9 aa, synthetic construct
  source 1..9: note = Seed: LVVVGACGV (KRAS G12C)
MVVFGACGL

SEQ ID NO: 3199 - protein, 9 aa, synthetic construct
  source 1..9: note = Seed: LVVVGACGV (KRAS G12C)
MVVFGACGV

SEQ ID NO: 3200 - protein, 9 aa, synthetic construct
  source 1..9: note = Seed: LVVVGACGV (KRAS G12C)
MVVFGGCGL

SEQ ID NO: 3201 - protein, 9 aa, synthetic construct
  source 1..9: note = Seed: LVVVGACGV (KRAS G12C)
MVVFGKCGA

SEQ ID NO: 3202 - protein, 9 aa, synthetic construct
  source 1..9: note = Seed: LVVVGACGV (KRAS G12C)
MVVFGKCGH

SEQ ID NO: 3203 - protein, 9 aa, synthetic construct
  source 1..9: note = Seed: LVVVGACGV (KRAS G12C)
MVVFGKCGR

SEQ ID NO: 3204 - protein, 9 aa, synthetic construct
  source 1..9: note = Seed: LVVVGACGV (KRAS G12C)
MVVFGKCGS

SEQ ID NO: 3205 - protein, 9 aa, synthetic construct
  source 1..9: note = Seed: LVVVGACGV (KRAS G12C)
MVVFGNCGA

SEQ ID NO: 3206 - protein, 9 aa, synthetic construct
  source 1..9: note = Seed: LVVVGACGV (KRAS G12C)
MVVFGNCGI

SEQ ID NO: 3207 - protein, 9 aa, synthetic construct
  source 1..9: note = Seed: LVVVGACGV (KRAS G12C)
MVVFGNCGL

SEQ ID NO: 3208 - protein, 9 aa, synthetic construct
  source 1..9: note = Seed: LVVVGACGV (KRAS G12C)
MVVFGNCGM

SEQ ID NO: 3209 - protein, 9 aa, synthetic construct
  source 1..9: note = Seed: LVVVGACGV (KRAS G12C)
MVVFGNCGV

SEQ ID NO: 3210 - protein, 9 aa, synthetic construct
  source 1..9: note = Seed: LVVVGACGV (KRAS G12C)
MVVFGRCGA

SEQ ID NO: 3211 - protein, 9 aa, synthetic construct
  source 1..9: note = Seed: LVVVGACGV (KRAS G12C)
MVVFGRCGH

SEQ ID NO: 3212 - protein, 9 aa, synthetic construct
  source 1..9: note = Seed: LVVVGACGV (KRAS G12C)
MVVFGRCGK

SEQ ID NO: 3213 - protein, 9 aa, synthetic construct
  source 1..9: note = Seed: LVVVGACGV (KRAS G12C)
MVVFGRCGR

SEQ ID NO: 3214 - protein, 9 aa, synthetic construct
  source 1..9: note = Seed: LVVVGACGV (KRAS G12C)
MVVFGRCGS

SEQ ID NO: 3215 - protein, 9 aa, synthetic construct
  source 1..9: note = Seed: LVVVGACGV (KRAS G12C)
MVVFGSCGA

SEQ ID NO: 3216 - protein, 9 aa, synthetic construct
  source 1..9: note = Seed: LVVVGACGV (KRAS G12C)
MVVFGSCGI

SEQ ID NO: 3217 - protein, 9 aa, synthetic construct
  source 1..9: note = Seed: LVVVGACGV (KRAS G12C)
MVVFGSCGL

SEQ ID NO: 3218 - protein, 9 aa, synthetic construct
  source 1..9: note = Seed: LVVVGACGV (KRAS G12C)
MVVFGSCGM

SEQ ID NO: 3219 - protein, 9 aa, synthetic construct
  source 1..9: note = Seed: LVVVGACGV (KRAS G12C)
MVVFGSCGV

SEQ ID NO: 3220 - protein, 9 aa, synthetic construct
  source 1..9: note = Seed: LVVVGACGV (KRAS G12C)
MVVFGTCGL

SEQ ID NO: 3221 - protein, 9 aa, synthetic construct
  source 1..9: note = Seed: LVVVGACGV (KRAS G12C)
MVVIGACGA

SEQ ID NO: 3222 - protein, 9 aa, synthetic construct
  source 1..9: note = Seed: LVVVGACGV (KRAS G12C)
MVVIGACGI

SEQ ID NO: 3223 - protein, 9 aa, synthetic construct
  source 1..9: note = Seed: LVVVGACGV (KRAS G12C)
MVVIGACGL

SEQ ID NO: 3224 - protein, 9 aa, synthetic construct
  source 1..9: note = Seed: LVVVGACGV (KRAS G12C)
MVVIGACGM

SEQ ID NO: 3225 - protein, 9 aa, synthetic construct
  source 1..9: note = Seed: LVVVGACGV (KRAS G12C)
MVVIGACGS

SEQ ID NO: 3226 - protein, 9 aa, synthetic construct
  source 1..9: note = Seed: LVVVGACGV (KRAS G12C)
MVVIGACGT

SEQ ID NO: 3227 - protein, 9 aa, synthetic construct
  source 1..9: note = Seed: LVVVGACGV (KRAS G12C)
MVVIGACGV

SEQ ID NO: 3228 - protein, 9 aa, synthetic construct
  source 1..9: note = Seed: LVVVGACGV (KRAS G12C)
MVVIGGCGA

SEQ ID NO: 3229 - protein, 9 aa, synthetic construct
  source 1..9: note = Seed: LVVVGACGV (KRAS G12C)
MVVIGGCGI

SEQ ID NO: 3230 - protein, 9 aa, synthetic construct
  source 1..9: note = Seed: LVVVGACGV (KRAS G12C)
MVVIGGCGL

SEQ ID NO: 3231 - protein, 9 aa, synthetic construct
  source 1..9: note = Seed: LVVVGACGV (KRAS G12C)
MVVIGGCGM

SEQ ID NO: 3232 - protein, 9 aa, synthetic construct
  source 1..9: note = Seed: LVVVGACGV (KRAS G12C)
MVVIGGCGS

SEQ ID NO: 3233 - protein, 9 aa, synthetic construct
  source 1..9: note = Seed: LVVVGACGV (KRAS G12C)
MVVIGGCGT

SEQ ID NO: 3234 - protein, 9 aa, synthetic construct
  source 1..9: note = Seed: LVVVGACGV (KRAS G12C)
MVVIGGCGV

SEQ ID NO: 3235 - protein, 9 aa, synthetic construct
  source 1..9: note = Seed: LVVVGACGV (KRAS G12C)
MVVIGKCGA

SEQ ID NO: 3236 - protein, 9 aa, synthetic construct
  source 1..9: note = Seed: LVVVGACGV (KRAS G12C)
MVVIGKCGG

SEQ ID NO: 3237 - protein, 9 aa, synthetic construct
  source 1..9: note = Seed: LVVVGACGV (KRAS G12C)
MVVIGKCGH

SEQ ID NO: 3238 - protein, 9 aa, synthetic construct
  source 1..9: note = Seed: LVVVGACGV (KRAS G12C)
MVVIGKCGK

SEQ ID NO: 3239 - protein, 9 aa, synthetic construct
  source 1..9: note = Seed: LVVVGACGV (KRAS G12C)
MVVIGKCGM

SEQ ID NO: 3240 - protein, 9 aa, synthetic construct
  source 1..9: note = Seed: LVVVGACGV (KRAS G12C)
MVVIGKCGQ

SEQ ID NO: 3241 - protein, 9 aa, synthetic construct
  source 1..9: note = Seed: LVVVGACGV (KRAS G12C)
MVVIGKCGR

SEQ ID NO: 3242 - protein, 9 aa, synthetic construct
  source 1..9: note = Seed: LVVVGACGV (KRAS G12C)
MVVIGKCGS

SEQ ID NO: 3243 - protein, 9 aa, synthetic construct
  source 1..9: note = Seed: LVVVGACGV (KRAS G12C)
MVVIGKCGT

SEQ ID NO: 3244 - protein, 9 aa, synthetic construct
  source 1..9: note = Seed: LVVVGACGV (KRAS G12C)
MVVIGNCGA

SEQ ID NO: 3245 - protein, 9 aa, synthetic construct
  source 1..9: note = Seed: LVVVGACGV (KRAS G12C)
MVVIGNCGI

SEQ ID NO: 3246 - protein, 9 aa, synthetic construct
  source 1..9: note = Seed: LVVVGACGV (KRAS G12C)
MVVIGNCGL

SEQ ID NO: 3247 - protein, 9 aa, synthetic construct
  source 1..9: note = Seed: LVVVGACGV (KRAS G12C)
MVVIGNCGM

SEQ ID NO: 3248 - protein, 9 aa, synthetic construct
  source 1..9: note = Seed: LVVVGACGV (KRAS G12C)
MVVIGNCGS

SEQ ID NO: 3249 - protein, 9 aa, synthetic construct
  source 1..9: note = Seed: LVVVGACGV (KRAS G12C)
MVVIGNCGT

SEQ ID NO: 3250 - protein, 9 aa, synthetic construct
  source 1..9: note = Seed: LVVVGACGV (KRAS G12C)
MVVIGNCGV

SEQ ID NO: 3251 - protein, 9 aa, synthetic construct
  source 1..9: note = Seed: LVVVGACGV (KRAS G12C)
MVVIGPCGA

SEQ ID NO: 3252 - protein, 9 aa, synthetic construct
  source 1..9: note = Seed: LVVVGACGV (KRAS G12C)
MVVIGPCGI

SEQ ID NO: 3253 - protein, 9 aa, synthetic construct
  source 1..9: note = Seed: LVVVGACGV (KRAS G12C)
MVVIGPCGL

SEQ ID NO: 3254 - protein, 9 aa, synthetic construct
  source 1..9: note = Seed: LVVVGACGV (KRAS G12C)
MVVIGPCGM

SEQ ID NO: 3255 - protein, 9 aa, synthetic construct
  source 1..9: note = Seed: LVVVGACGV (KRAS G12C)
MVVIGPCGT

SEQ ID NO: 3256 - protein, 9 aa, synthetic construct
  source 1..9: note = Seed: LVVVGACGV (KRAS G12C)
MVVIGPCGV

SEQ ID NO: 3257 - protein, 9 aa, synthetic construct
  source 1..9: note = Seed: LVVVGACGV (KRAS G12C)
MVVIGRCGA

SEQ ID NO: 3258 - protein, 9 aa, synthetic construct
  source 1..9: note = Seed: LVVVGACGV (KRAS G12C)
MVVIGRCGG

SEQ ID NO: 3259 - protein, 9 aa, synthetic construct
  source 1..9: note = Seed: LVVVGACGV (KRAS G12C)
MVVIGRCGH

SEQ ID NO: 3260 - protein, 9 aa, synthetic construct
  source 1..9: note = Seed: LVVVGACGV (KRAS G12C)
MVVIGRCGK

SEQ ID NO: 3261 - protein, 9 aa, synthetic construct
  source 1..9: note = Seed: LVVVGACGV (KRAS G12C)
MVVIGRCGM

SEQ ID NO: 3262 - protein, 9 aa, synthetic construct
  source 1..9: note = Seed: LVVVGACGV (KRAS G12C)
MVVIGRCGN

SEQ ID NO: 3263 - protein, 9 aa, synthetic construct
  source 1..9: note = Seed: LVVVGACGV (KRAS G12C)
MVVIGRCGQ

SEQ ID NO: 3264 - protein, 9 aa, synthetic construct
  source 1..9: note = Seed: LVVVGACGV (KRAS G12C)
MVVIGRCGR

SEQ ID NO: 3265 - protein, 9 aa, synthetic construct
  source 1..9: note = Seed: LVVVGACGV (KRAS G12C)
MVVIGRCGS

SEQ ID NO: 3266 - protein, 9 aa, synthetic construct
  source 1..9: note = Seed: LVVVGACGV (KRAS G12C)
MVVIGRCGT

SEQ ID NO: 3267 - protein, 9 aa, synthetic construct
  source 1..9: note = Seed: LVVVGACGV (KRAS G12C)
MVVIGRCGY

SEQ ID NO: 3268 - protein, 9 aa, synthetic construct
  source 1..9: note = Seed: LVVVGACGV (KRAS G12C)
MVVIGSCGA

SEQ ID NO: 3269 - protein, 9 aa, synthetic construct
  source 1..9: note = Seed: LVVVGACGV (KRAS G12C)
MVVIGSCGI

SEQ ID NO: 3270 - protein, 9 aa, synthetic construct
  source 1..9: note = Seed: LVVVGACGV (KRAS G12C)
MVVIGSCGL

SEQ ID NO: 3271 - protein, 9 aa, synthetic construct
  source 1..9: note = Seed: LVVVGACGV (KRAS G12C)
MVVIGSCGM

SEQ ID NO: 3272 - protein, 9 aa, synthetic construct
  source 1..9: note = Seed: LVVVGACGV (KRAS G12C)
MVVIGSCGS

SEQ ID NO: 3273 - protein, 9 aa, synthetic construct
  source 1..9: note = Seed: LVVVGACGV (KRAS G12C)
MVVIGSCGT

SEQ ID NO: 3274 - protein, 9 aa, synthetic construct
  source 1..9: note = Seed: LVVVGACGV (KRAS G12C)
MVVIGSCGV

SEQ ID NO: 3275 - protein, 9 aa, synthetic construct
  source 1..9: note = Seed: LVVVGACGV (KRAS G12C)
MVVIGTCGA

SEQ ID NO: 3276 - protein, 9 aa, synthetic construct
  source 1..9: note = Seed: LVVVGACGV (KRAS G12C)
MVVIGTCGI

SEQ ID NO: 3277 - protein, 9 aa, synthetic construct
  source 1..9: note = Seed: LVVVGACGV (KRAS G12C)
MVVIGTCGL

SEQ ID NO: 3278 - protein, 9 aa, synthetic construct
  source 1..9: note = Seed: LVVVGACGV (KRAS G12C)
MVVIGTCGV

SEQ ID NO: 3279 - protein, 9 aa, synthetic construct
  source 1..9: note = Seed: LVVVGACGV (KRAS G12C)
MVVLGACGA

SEQ ID NO: 3280 - protein, 9 aa, synthetic construct
  source 1..9: note = Seed: LVVVGACGV (KRAS G12C)
MVVLGACGF

SEQ ID NO: 3281 - protein, 9 aa, synthetic construct
  source 1..9: note = Seed: LVVVGACGV (KRAS G12C)
MVVLGACGG

SEQ ID NO: 3282 - protein, 9 aa, synthetic construct
  source 1..9: note = Seed: LVVVGACGV (KRAS G12C)
MVVLGACGH

SEQ ID NO: 3283 - protein, 9 aa, synthetic construct
  source 1..9: note = Seed: LVVVGACGV (KRAS G12C)
MVVLGACGI

SEQ ID NO: 3284 - protein, 9 aa, synthetic construct
  source 1..9: note = Seed: LVVVGACGV (KRAS G12C)
MVVLGACGL

SEQ ID NO: 3285 - protein, 9 aa, synthetic construct
  source 1..9: note = Seed: LVVVGACGV (KRAS G12C)
MVVLGACGM

SEQ ID NO: 3286 - protein, 9 aa, synthetic construct
  source 1..9: note = Seed: LVVVGACGV (KRAS G12C)
MVVLGACGN

SEQ ID NO: 3287 - protein, 9 aa, synthetic construct
  source 1..9: note = Seed: LVVVGACGV (KRAS G12C)
MVVLGACGP

SEQ ID NO: 3288 - protein, 9 aa, synthetic construct
  source 1..9: note = Seed: LVVVGACGV (KRAS G12C)
MVVLGACGR

SEQ ID NO: 3289 - protein, 9 aa, synthetic construct
  source 1..9: note = Seed: LVVVGACGV (KRAS G12C)
MVVLGACGS

SEQ ID NO: 3290 - protein, 9 aa, synthetic construct
  source 1..9: note = Seed: LVVVGACGV (KRAS G12C)
MVVLGACGT

SEQ ID NO: 3291 - protein, 9 aa, synthetic construct
  source 1..9: note = Seed: LVVVGACGV (KRAS G12C)
MVVLGACGV

SEQ ID NO: 3292 - protein, 9 aa, synthetic construct
  source 1..9: note = Seed: LVVVGACGV (KRAS G12C)
MVVLGACGY

SEQ ID NO: 3293 - protein, 9 aa, synthetic construct
  source 1..9: note = Seed: LVVVGACGV (KRAS G12C)
MVVLGGCGA

SEQ ID NO: 3294 - protein, 9 aa, synthetic construct
  source 1..9: note = Seed: LVVVGACGV (KRAS G12C)
MVVLGGCGF

SEQ ID NO: 3295 - protein, 9 aa, synthetic construct
  source 1..9: note = Seed: LVVVGACGV (KRAS G12C)
MVVLGGCGG

SEQ ID NO: 3296 - protein, 9 aa, synthetic construct
  source 1..9: note = Seed: LVVVGACGV (KRAS G12C)
MVVLGGCGI

SEQ ID NO: 3297 - protein, 9 aa, synthetic construct
  source 1..9: note = Seed: LVVVGACGV (KRAS G12C)
MVVLGGCGL

SEQ ID NO: 3298 - protein, 9 aa, synthetic construct
  source 1..9: note = Seed: LVVVGACGV (KRAS G12C)
MVVLGGCGM

SEQ ID NO: 3299 - protein, 9 aa, synthetic construct
  source 1..9: note = Seed: LVVVGACGV (KRAS G12C)
MVVLGGCGN

SEQ ID NO: 3300 - protein, 9 aa, synthetic construct
  source 1..9: note = Seed: LVVVGACGV (KRAS G12C)
MVVLGGCGS

SEQ ID NO: 3301 - protein, 9 aa, synthetic construct
  source 1..9: note = Seed: LVVVGACGV (KRAS G12C)
MVVLGGCGT

SEQ ID NO: 3302 - protein, 9 aa, synthetic construct
  source 1..9: note = Seed: LVVVGACGV (KRAS G12C)
MVVLGGCGV

SEQ ID NO: 3303 - protein, 9 aa, synthetic construct
  source 1..9: note = Seed: LVVVGACGV (KRAS G12C)
MVVLGKCGA

SEQ ID NO: 3304 - protein, 9 aa, synthetic construct
  source 1..9: note = Seed: LVVVGACGV (KRAS G12C)
MVVLGKCGG

SEQ ID NO: 3305 - protein, 9 aa, synthetic construct
  source 1..9: note = Seed: LVVVGACGV (KRAS G12C)
MVVLGKCGH

SEQ ID NO: 3306 - protein, 9 aa, synthetic construct
  source 1..9: note = Seed: LVVVGACGV (KRAS G12C)
MVVLGKCGK

SEQ ID NO: 3307 - protein, 9 aa, synthetic construct
  source 1..9: note = Seed: LVVVGACGV (KRAS G12C)
MVVLGKCGM

SEQ ID NO: 3308 - protein, 9 aa, synthetic construct
  source 1..9: note = Seed: LVVVGACGV (KRAS G12C)
MVVLGKCGN

SEQ ID NO: 3309 - protein, 9 aa, synthetic construct
  source 1..9: note = Seed: LVVVGACGV (KRAS G12C)
MVVLGKCGQ

SEQ ID NO: 3310 - protein, 9 aa, synthetic construct
  source 1..9: note = Seed: LVVVGACGV (KRAS G12C)
MVVLGKCGR

SEQ ID NO: 3311 - protein, 9 aa, synthetic construct
  source 1..9: note = Seed: LVVVGACGV (KRAS G12C)
MVVLGKCGS

SEQ ID NO: 3312 - protein, 9 aa, synthetic construct
  source 1..9: note = Seed: LVVVGACGV (KRAS G12C)
MVVLGKCGT

SEQ ID NO: 3313 - protein, 9 aa, synthetic construct
  source 1..9: note = Seed: LVVVGACGV (KRAS G12C)
MVVLGKCGV

SEQ ID NO: 3314 - protein, 9 aa, synthetic construct
  source 1..9: note = Seed: LVVVGACGV (KRAS G12C)
MVVLGNCGA

SEQ ID NO: 3315 - protein, 9 aa, synthetic construct
  source 1..9: note = Seed: LVVVGACGV (KRAS G12C)
MVVLGNCGI

SEQ ID NO: 3316 - protein, 9 aa, synthetic construct
  source 1..9: note = Seed: LVVVGACGV (KRAS G12C)
MVVLGNCGL

SEQ ID NO: 3317 - protein, 9 aa, synthetic construct
  source 1..9: note = Seed: LVVVGACGV (KRAS G12C)
MVVLGNCGM

SEQ ID NO: 3318 - protein, 9 aa, synthetic construct
  source 1..9: note = Seed: LVVVGACGV (KRAS G12C)
MVVLGNCGS

SEQ ID NO: 3319 - protein, 9 aa, synthetic construct
  source 1..9: note = Seed: LVVVGACGV (KRAS G12C)
MVVLGNCGT

SEQ ID NO: 3320 - protein, 9 aa, synthetic construct
  source 1..9: note = Seed: LVVVGACGV (KRAS G12C)
MVVLGNCGV

SEQ ID NO: 3321 - protein, 9 aa, synthetic construct
  source 1..9: note = Seed: LVVVGACGV (KRAS G12C)
MVVLGPCGA

SEQ ID NO: 3322 - protein, 9 aa, synthetic construct
  source 1..9: note = Seed: LVVVGACGV (KRAS G12C)
MVVLGPCGF

SEQ ID NO: 3323 - protein, 9 aa, synthetic construct
  source 1..9: note = Seed: LVVVGACGV (KRAS G12C)
MVVLGPCGI

SEQ ID NO: 3324 - protein, 9 aa, synthetic construct
  source 1..9: note = Seed: LVVVGACGV (KRAS G12C)
MVVLGPCGL

SEQ ID NO: 3325 - protein, 9 aa, synthetic construct
  source 1..9: note = Seed: LVVVGACGV (KRAS G12C)
MVVLGPCGM

SEQ ID NO: 3326 - protein, 9 aa, synthetic construct
  source 1..9: note = Seed: LVVVGACGV (KRAS G12C)
MVVLGPCGN

SEQ ID NO: 3327 - protein, 9 aa, synthetic construct
  source 1..9: note = Seed: LVVVGACGV (KRAS G12C)
MVVLGPCGS

SEQ ID NO: 3328 - protein, 9 aa, synthetic construct
  source 1..9: note = Seed: LVVVGACGV (KRAS G12C)
MVVLGPCGT

SEQ ID NO: 3329 - protein, 9 aa, synthetic construct
  source 1..9: note = Seed: LVVVGACGV (KRAS G12C)
MVVLGPCGV

SEQ ID NO: 3330 - protein, 9 aa, synthetic construct
  source 1..9: note = Seed: LVVVGACGV (KRAS G12C)
MVVLGRCGA

SEQ ID NO: 3331 - protein, 9 aa, synthetic construct
  source 1..9: note = Seed: LVVVGACGV (KRAS G12C)
MVVLGRCGG

SEQ ID NO: 3332 - protein, 9 aa, synthetic construct
  source 1..9: note = Seed: LVVVGACGV (KRAS G12C)
MVVLGRCGH

SEQ ID NO: 3333 - protein, 9 aa, synthetic construct
  source 1..9: note = Seed: LVVVGACGV (KRAS G12C)
MVVLGRCGK

SEQ ID NO: 3334 - protein, 9 aa, synthetic construct
  source 1..9: note = Seed: LVVVGACGV (KRAS G12C)
MVVLGRCGL

SEQ ID NO: 3335 - protein, 9 aa, synthetic construct
  source 1..9: note = Seed: LVVVGACGV (KRAS G12C)
MVVLGRCGM

SEQ ID NO: 3336 - protein, 9 aa, synthetic construct
  source 1..9: note = Seed: LVVVGACGV (KRAS G12C)
MVVLGRCGN

SEQ ID NO: 3337 - protein, 9 aa, synthetic construct
  source 1..9: note = Seed: LVVVGACGV (KRAS G12C)
MVVLGRCGP

SEQ ID NO: 3338 - protein, 9 aa, synthetic construct
  source 1..9: note = Seed: LVVVGACGV (KRAS G12C)
MVVLGRCGQ

SEQ ID NO: 3339 - protein, 9 aa, synthetic construct
  source 1..9: note = Seed: LVVVGACGV (KRAS G12C)
MVVLGRCGR

SEQ ID NO: 3340 - protein, 9 aa, synthetic construct
  source 1..9: note = Seed: LVVVGACGV (KRAS G12C)
MVVLGRCGS

SEQ ID NO: 3341 - protein, 9 aa, synthetic construct
  source 1..9: note = Seed: LVVVGACGV (KRAS G12C)
MVVLGRCGT

SEQ ID NO: 3342 - protein, 9 aa, synthetic construct
  source 1..9: note = Seed: LVVVGACGV (KRAS G12C)
MVVLGRCGV

SEQ ID NO: 3343 - protein, 9 aa, synthetic construct
  source 1..9: note = Seed: LVVVGACGV (KRAS G12C)
MVVLGRCGY

SEQ ID NO: 3344 - protein, 9 aa, synthetic construct
  source 1..9: note = Seed: LVVVGACGV (KRAS G12C)
MVVLGSCGA

SEQ ID NO: 3345 - protein, 9 aa, synthetic construct
  source 1..9: note = Seed: LVVVGACGV (KRAS G12C)
MVVLGSCGF

SEQ ID NO: 3346 - protein, 9 aa, synthetic construct
  source 1..9: note = Seed: LVVVGACGV (KRAS G12C)
MVVLGSCGG

SEQ ID NO: 3347 - protein, 9 aa, synthetic construct
  source 1..9: note = Seed: LVVVGACGV (KRAS G12C)
MVVLGSCGH

SEQ ID NO: 3348 - protein, 9 aa, synthetic construct
  source 1..9: note = Seed: LVVVGACGV (KRAS G12C)
MVVLGSCGI

SEQ ID NO: 3349 - protein, 9 aa, synthetic construct
  source 1..9: note = Seed: LVVVGACGV (KRAS G12C)
MVVLGSCGL

SEQ ID NO: 3350 - protein, 9 aa, synthetic construct
  source 1..9: note = Seed: LVVVGACGV (KRAS G12C)
MVVLGSCGM

SEQ ID NO: 3351 - protein, 9 aa, synthetic construct
  source 1..9: note = Seed: LVVVGACGV (KRAS G12C)
MVVLGSCGN

SEQ ID NO: 3352 - protein, 9 aa, synthetic construct
  source 1..9: note = Seed: LVVVGACGV (KRAS G12C)
MVVLGSCGS

SEQ ID NO: 3353 - protein, 9 aa, synthetic construct
  source 1..9: note = Seed: LVVVGACGV (KRAS G12C)
MVVLGSCGT

SEQ ID NO: 3354 - protein, 9 aa, synthetic construct
  source 1..9: note = Seed: LVVVGACGV (KRAS G12C)
MVVLGSCGV

SEQ ID NO: 3355 - protein, 9 aa, synthetic construct
  source 1..9: note = Seed: LVVVGACGV (KRAS G12C)
MVVLGTCGA

SEQ ID NO: 3356 - protein, 9 aa, synthetic construct
  source 1..9: note = Seed: LVVVGACGV (KRAS G12C)
MVVLGTCGI

SEQ ID NO: 3357 - protein, 9 aa, synthetic construct
  source 1..9: note = Seed: LVVVGACGV (KRAS G12C)
MVVLGTCGL

SEQ ID NO: 3358 - protein, 9 aa, synthetic construct
  source 1..9: note = Seed: LVVVGACGV (KRAS G12C)
MVVLGTCGM

SEQ ID NO: 3359 - protein, 9 aa, synthetic construct
  source 1..9: note = Seed: LVVVGACGV (KRAS G12C)
MVVLGTCGS

SEQ ID NO: 3360 - protein, 9 aa, synthetic construct
  source 1..9: note = Seed: LVVVGACGV (KRAS G12C)
MVVLGTCGT

SEQ ID NO: 3361 - protein, 9 aa, synthetic construct
  source 1..9: note = Seed: LVVVGACGV (KRAS G12C)
MVVLGTCGV

SEQ ID NO: 3362 - protein, 9 aa, synthetic construct
  source 1..9: note = Seed: LVVVGACGV (KRAS G12C)
MVVLGVCGA

SEQ ID NO: 3363 - protein, 9 aa, synthetic construct
  source 1..9: note = Seed: LVVVGACGV (KRAS G12C)
MVVLGVCGM

SEQ ID NO: 3364 - protein, 9 aa, synthetic construct
  source 1..9: note = Seed: LVVVGACGV (KRAS G12C)
MVVLGVCGN

SEQ ID NO: 3365 - protein, 9 aa, synthetic construct
  source 1..9: note = Seed: LVVVGACGV (KRAS G12C)
MVVLGVCGS

SEQ ID NO: 3366 - protein, 9 aa, synthetic construct
  source 1..9: note = Seed: LVVVGACGV (KRAS G12C)
MVVLGVCGV

SEQ ID NO: 3367 - protein, 9 aa, synthetic construct
  source 1..9: note = Seed: LVVVGACGV (KRAS G12C)
MVVMGACGA

SEQ ID NO: 3368 - protein, 9 aa, synthetic construct
  source 1..9: note = Seed: LVVVGACGV (KRAS G12C)
MVVMGACGF

SEQ ID NO: 3369 - protein, 9 aa, synthetic construct
  source 1..9: note = Seed: LVVVGACGV (KRAS G12C)
MVVMGACGH

SEQ ID NO: 3370 - protein, 9 aa, synthetic construct
  source 1..9: note = Seed: LVVVGACGV (KRAS G12C)
MVVMGACGI

SEQ ID NO: 3371 - protein, 9 aa, synthetic construct
  source 1..9: note = Seed: LVVVGACGV (KRAS G12C)
MVVMGACGL

SEQ ID NO: 3372 - protein, 9 aa, synthetic construct
  source 1..9: note = Seed: LVVVGACGV (KRAS G12C)
MVVMGACGM

SEQ ID NO: 3373 - protein, 9 aa, synthetic construct
  source 1..9: note = Seed: LVVVGACGV (KRAS G12C)
MVVMGACGN

SEQ ID NO: 3374 - protein, 9 aa, synthetic construct
  source 1..9: note = Seed: LVVVGACGV (KRAS G12C)
MVVMGACGS

SEQ ID NO: 3375 - protein, 9 aa, synthetic construct
  source 1..9: note = Seed: LVVVGACGV (KRAS G12C)
MVVMGACGT

SEQ ID NO: 3376 - protein, 9 aa, synthetic construct
  source 1..9: note = Seed: LVVVGACGV (KRAS G12C)
MVVMGACGV

SEQ ID NO: 3377 - protein, 9 aa, synthetic construct
  source 1..9: note = Seed: LVVVGACGV (KRAS G12C)
MVVMGACGY

SEQ ID NO: 3378 - protein, 9 aa, synthetic construct
  source 1..9: note = Seed: LVVVGACGV (KRAS G12C)
MVVMGGCGA

SEQ ID NO: 3379 - protein, 9 aa, synthetic construct
  source 1..9: note = Seed: LVVVGACGV (KRAS G12C)
MVVMGGCGI

SEQ ID NO: 3380 - protein, 9 aa, synthetic construct
  source 1..9: note = Seed: LVVVGACGV (KRAS G12C)
MVVMGGCGL

SEQ ID NO: 3381 - protein, 9 aa, synthetic construct
  source 1..9: note = Seed: LVVVGACGV (KRAS G12C)
MVVMGGCGM

SEQ ID NO: 3382 - protein, 9 aa, synthetic construct
  source 1..9: note = Seed: LVVVGACGV (KRAS G12C)
MVVMGGCGS

SEQ ID NO: 3383 - protein, 9 aa, synthetic construct
  source 1..9: note = Seed: LVVVGACGV (KRAS G12C)
MVVMGGCGT

SEQ ID NO: 3384 - protein, 9 aa, synthetic construct
  source 1..9: note = Seed: LVVVGACGV (KRAS G12C)
MVVMGGCGV

SEQ ID NO: 3385 - protein, 9 aa, synthetic construct
  source 1..9: note = Seed: LVVVGACGV (KRAS G12C)
MVVMGICGN

SEQ ID NO: 3386 - protein, 9 aa, synthetic construct
  source 1..9: note = Seed: LVVVGACGV (KRAS G12C)
MVVMGKCGA

SEQ ID NO: 3387 - protein, 9 aa, synthetic construct
  source 1..9: note = Seed: LVVVGACGV (KRAS G12C)
MVVMGKCGH

SEQ ID NO: 3388 - protein, 9 aa, synthetic construct
  source 1..9: note = Seed: LVVVGACGV (KRAS G12C)
MVVMGKCGK

SEQ ID NO: 3389 - protein, 9 aa, synthetic construct
  source 1..9: note = Seed: LVVVGACGV (KRAS G12C)
MVVMGKCGL

SEQ ID NO: 3390 - protein, 9 aa, synthetic construct
  source 1..9: note = Seed: LVVVGACGV (KRAS G12C)
MVVMGKCGM

SEQ ID NO: 3391 - protein, 9 aa, synthetic construct
  source 1..9: note = Seed: LVVVGACGV (KRAS G12C)
MVVMGKCGN

SEQ ID NO: 3392 - protein, 9 aa, synthetic construct
  source 1..9: note = Seed: LVVVGACGV (KRAS G12C)
MVVMGKCGQ

SEQ ID NO: 3393 - protein, 9 aa, synthetic construct
  source 1..9: note = Seed: LVVVGACGV (KRAS G12C)
MVVMGKCGR

SEQ ID NO: 3394 - protein, 9 aa, synthetic construct
  source 1..9: note = Seed: LVVVGACGV (KRAS G12C)
MVVMGKCGS

SEQ ID NO: 3395 - protein, 9 aa, synthetic construct
  source 1..9: note = Seed: LVVVGACGV (KRAS G12C)
MVVMGKCGT

SEQ ID NO: 3396 - protein, 9 aa, synthetic construct
  source 1..9: note = Seed: LVVVGACGV (KRAS G12C)
MVVMGKCGV

SEQ ID NO: 3397 - protein, 9 aa, synthetic construct
  source 1..9: note = Seed: LVVVGACGV (KRAS G12C)
MVVMGNCGA

SEQ ID NO: 3398 - protein, 9 aa, synthetic construct
  source 1..9: note = Seed: LVVVGACGV (KRAS G12C)
MVVMGNCGI

SEQ ID NO: 3399 - protein, 9 aa, synthetic construct
  source 1..9: note = Seed: LVVVGACGV (KRAS G12C)
MVVMGNCGL

SEQ ID NO: 3400 - protein, 9 aa, synthetic construct
  source 1..9: note = Seed: LVVVGACGV (KRAS G12C)
MVVMGNCGM

SEQ ID NO: 3401 - protein, 9 aa, synthetic construct
  source 1..9: note = Seed: LVVVGACGV (KRAS G12C)
MVVMGNCGS

SEQ ID NO: 3402 - protein, 9 aa, synthetic construct
  source 1..9: note = Seed: LVVVGACGV (KRAS G12C)
MVVMGNCGT

SEQ ID NO: 3403 - protein, 9 aa, synthetic construct
  source 1..9: note = Seed: LVVVGACGV (KRAS G12C)
MVVMGNCGV

SEQ ID NO: 3404 - protein, 9 aa, synthetic construct
  source 1..9: note = Seed: LVVVGACGV (KRAS G12C)
MVVMGPCGA

SEQ ID NO: 3405 - protein, 9 aa, synthetic construct
  source 1..9: note = Seed: LVVVGACGV (KRAS G12C)
MVVMGPCGI

SEQ ID NO: 3406 - protein, 9 aa, synthetic construct
  source 1..9: note = Seed: LVVVGACGV (KRAS G12C)
MVVMGPCGL

SEQ ID NO: 3407 - protein, 9 aa, synthetic construct
  source 1..9: note = Seed: LVVVGACGV (KRAS G12C)
MVVMGPCGM

SEQ ID NO: 3408 - protein, 9 aa, synthetic construct
  source 1..9: note = Seed: LVVVGACGV (KRAS G12C)
MVVMGPCGS

SEQ ID NO: 3409 - protein, 9 aa, synthetic construct
  source 1..9: note = Seed: LVVVGACGV (KRAS G12C)
MVVMGPCGT

SEQ ID NO: 3410 - protein, 9 aa, synthetic construct
  source 1..9: note = Seed: LVVVGACGV (KRAS G12C)
MVVMGPCGV

SEQ ID NO: 3411 - protein, 9 aa, synthetic construct
  source 1..9: note = Seed: LVVVGACGV (KRAS G12C)
MVVMGRCGA

SEQ ID NO: 3412 - protein, 9 aa, synthetic construct
  source 1..9: note = Seed: LVVVGACGV (KRAS G12C)
MVVMGRCGG

SEQ ID NO: 3413 - protein, 9 aa, synthetic construct
  source 1..9: note = Seed: LVVVGACGV (KRAS G12C)
MVVMGRCGH

SEQ ID NO: 3414 - protein, 9 aa, synthetic construct
  source 1..9: note = Seed: LVVVGACGV (KRAS G12C)
MVVMGRCGK

SEQ ID NO: 3415 - protein, 9 aa, synthetic construct
  source 1..9: note = Seed: LVVVGACGV (KRAS G12C)
MVVMGRCGL

SEQ ID NO: 3416 - protein, 9 aa, synthetic construct
  source 1..9: note = Seed: LVVVGACGV (KRAS G12C)
MVVMGRCGM

SEQ ID NO: 3417 - protein, 9 aa, synthetic construct
  source 1..9: note = Seed: LVVVGACGV (KRAS G12C)
MVVMGRCGN

SEQ ID NO: 3418 - protein, 9 aa, synthetic construct
  source 1..9: note = Seed: LVVVGACGV (KRAS G12C)
MVVMGRCGQ

SEQ ID NO: 3419 - protein, 9 aa, synthetic construct
  source 1..9: note = Seed: LVVVGACGV (KRAS G12C)
MVVMGRCGR

SEQ ID NO: 3420 - protein, 9 aa, synthetic construct
  source 1..9: note = Seed: LVVVGACGV (KRAS G12C)
MVVMGRCGS

SEQ ID NO: 3421 - protein, 9 aa, synthetic construct
  source 1..9: note = Seed: LVVVGACGV (KRAS G12C)
MVVMGRCGT

SEQ ID NO: 3422 - protein, 9 aa, synthetic construct
  source 1..9: note = Seed: LVVVGACGV (KRAS G12C)
MVVMGRCGV

SEQ ID NO: 3423 - protein, 9 aa, synthetic construct
  source 1..9: note = Seed: LVVVGACGV (KRAS G12C)
MVVMGRCGY

SEQ ID NO: 3424 - protein, 9 aa, synthetic construct
  source 1..9: note = Seed: LVVVGACGV (KRAS G12C)
MVVMGSCGA

SEQ ID NO: 3425 - protein, 9 aa, synthetic construct
  source 1..9: note = Seed: LVVVGACGV (KRAS G12C)
MVVMGSCGI

SEQ ID NO: 3426 - protein, 9 aa, synthetic construct
  source 1..9: note = Seed: LVVVGACGV (KRAS G12C)
MVVMGSCGL

SEQ ID NO: 3427 - protein, 9 aa, synthetic construct
  source 1..9: note = Seed: LVVVGACGV (KRAS G12C)
MVVMGSCGM

SEQ ID NO: 3428 - protein, 9 aa, synthetic construct
  source 1..9: note = Seed: LVVVGACGV (KRAS G12C)
MVVMGSCGN

SEQ ID NO: 3429 - protein, 9 aa, synthetic construct
  source 1..9: note = Seed: LVVVGACGV (KRAS G12C)
MVVMGSCGS

SEQ ID NO: 3430 - protein, 9 aa, synthetic construct
  source 1..9: note = Seed: LVVVGACGV (KRAS G12C)
MVVMGSCGT

SEQ ID NO: 3431 - protein, 9 aa, synthetic construct
  source 1..9: note = Seed: LVVVGACGV (KRAS G12C)
MVVMGSCGV

SEQ ID NO: 3432 - protein, 9 aa, synthetic construct
  source 1..9: note = Seed: LVVVGACGV (KRAS G12C)
MVVMGTCGA

SEQ ID NO: 3433 - protein, 9 aa, synthetic construct
  source 1..9: note = Seed: LVVVGACGV (KRAS G12C)
MVVMGTCGI

SEQ ID NO: 3434 - protein, 9 aa, synthetic construct
  source 1..9: note = Seed: LVVVGACGV (KRAS G12C)
MVVMGTCGL

SEQ ID NO: 3435 - protein, 9 aa, synthetic construct
  source 1..9: note = Seed: LVVVGACGV (KRAS G12C)
MVVMGTCGM

SEQ ID NO: 3436 - protein, 9 aa, synthetic construct
  source 1..9: note = Seed: LVVVGACGV (KRAS G12C)
MVVMGTCGS

SEQ ID NO: 3437 - protein, 9 aa, synthetic construct
  source 1..9: note = Seed: LVVVGACGV (KRAS G12C)
MVVMGTCGT

SEQ ID NO: 3438 - protein, 9 aa, synthetic construct
  source 1..9: note = Seed: LVVVGACGV (KRAS G12C)
MVVMGTCGV

SEQ ID NO: 3439 - protein, 9 aa, synthetic construct
  source 1..9: note = Seed: LVVVGACGV (KRAS G12C)
MVVMGVCGA

SEQ ID NO: 3440 - protein, 9 aa, synthetic construct
  source 1..9: note = Seed: LVVVGACGV (KRAS G12C)
MVVMGVCGL

SEQ ID NO: 3441 - protein, 9 aa, synthetic construct
  source 1..9: note = Seed: LVVVGACGV (KRAS G12C)
MVVMGVCGM

SEQ ID NO: 3442 - protein, 9 aa, synthetic construct
  source 1..9: note = Seed: LVVVGACGV (KRAS G12C)
MVVMGVCGV

SEQ ID NO: 3443 - protein, 9 aa, synthetic construct
  source 1..9: note = Seed: LVVVGACGV (KRAS G12C)
MVVNGACGF

SEQ ID NO: 3444 - protein, 9 aa, synthetic construct
  source 1..9: note = Seed: LVVVGACGV (KRAS G12C)
MVVNGACGI

SEQ ID NO: 3445 - protein, 9 aa, synthetic construct
  source 1..9: note = Seed: LVVVGACGV (KRAS G12C)
MVVNGACGL

SEQ ID NO: 3446 - protein, 9 aa, synthetic construct
  source 1..9: note = Seed: LVVVGACGV (KRAS G12C)
MVVNGACGM

SEQ ID NO: 3447 - protein, 9 aa, synthetic construct
  source 1..9: note = Seed: LVVVGACGV (KRAS G12C)
MVVNGACGV

SEQ ID NO: 3448 - protein, 9 aa, synthetic construct
  source 1..9: note = Seed: LVVVGACGV (KRAS G12C)
MVVNGACGY

SEQ ID NO: 3449 - protein, 9 aa, synthetic construct
  source 1..9: note = Seed: LVVVGACGV (KRAS G12C)
MVVNGGCGI

SEQ ID NO: 3450 - protein, 9 aa, synthetic construct
  source 1..9: note = Seed: LVVVGACGV (KRAS G12C)
MVVNGGCGL

SEQ ID NO: 3451 - protein, 9 aa, synthetic construct
  source 1..9: note = Seed: LVVVGACGV (KRAS G12C)
MVVNGGCGV

SEQ ID NO: 3452 - protein, 9 aa, synthetic construct
  source 1..9: note = Seed: LVVVGACGV (KRAS G12C)
MVVNGICGF

SEQ ID NO: 3453 - protein, 9 aa, synthetic construct
  source 1..9: note = Seed: LVVVGACGV (KRAS G12C)
MVVNGICGI

SEQ ID NO: 3454 - protein, 9 aa, synthetic construct
  source 1..9: note = Seed: LVVVGACGV (KRAS G12C)
MVVNGICGL

SEQ ID NO: 3455 - protein, 9 aa, synthetic construct
  source 1..9: note = Seed: LVVVGACGV (KRAS G12C)
MVVNGICGM

SEQ ID NO: 3456 - protein, 9 aa, synthetic construct
  source 1..9: note = Seed: LVVVGACGV (KRAS G12C)
MVVNGICGV

SEQ ID NO: 3457 - protein, 9 aa, synthetic construct
  source 1..9: note = Seed: LVVVGACGV (KRAS G12C)
MVVNGICGY

SEQ ID NO: 3458 - protein, 9 aa, synthetic construct
  source 1..9: note = Seed: LVVVGACGV (KRAS G12C)
MVVNGLCGI

SEQ ID NO: 3459 - protein, 9 aa, synthetic construct
  source 1..9: note = Seed: LVVVGACGV (KRAS G12C)
MVVNGLCGL

SEQ ID NO: 3460 - protein, 9 aa, synthetic construct
  source 1..9: note = Seed: LVVVGACGV (KRAS G12C)
MVVNGLCGV

SEQ ID NO: 3461 - protein, 9 aa, synthetic construct
  source 1..9: note = Seed: LVVVGACGV (KRAS G12C)
MVVNGMCGI

SEQ ID NO: 3462 - protein, 9 aa, synthetic construct
  source 1..9: note = Seed: LVVVGACGV (KRAS G12C)
MVVNGMCGV

SEQ ID NO: 3463 - protein, 9 aa, synthetic construct
  source 1..9: note = Seed: LVVVGACGV (KRAS G12C)
MVVNGNCGF

SEQ ID NO: 3464 - protein, 9 aa, synthetic construct
  source 1..9: note = Seed: LVVVGACGV (KRAS G12C)
MVVNGNCGI

SEQ ID NO: 3465 - protein, 9 aa, synthetic construct
  source 1..9: note = Seed: LVVVGACGV (KRAS G12C)
MVVNGNCGL

SEQ ID NO: 3466 - protein, 9 aa, synthetic construct
  source 1..9: note = Seed: LVVVGACGV (KRAS G12C)
MVVNGNCGM

SEQ ID NO: 3467 - protein, 9 aa, synthetic construct
  source 1..9: note = Seed: LVVVGACGV (KRAS G12C)
MVVNGNCGV

SEQ ID NO: 3468 - protein, 9 aa, synthetic construct
  source 1..9: note = Seed: LVVVGACGV (KRAS G12C)
MVVNGNCGY

SEQ ID NO: 3469 - protein, 9 aa, synthetic construct
  source 1..9: note = Seed: LVVVGACGV (KRAS G12C)
MVVNGPCGI

SEQ ID NO: 3470 - protein, 9 aa, synthetic construct
  source 1..9: note = Seed: LVVVGACGV (KRAS G12C)
MVVNGPCGL

SEQ ID NO: 3471 - protein, 9 aa, synthetic construct
  source 1..9: note = Seed: LVVVGACGV (KRAS G12C)
MVVNGPCGV

SEQ ID NO: 3472 - protein, 9 aa, synthetic construct
  source 1..9: note = Seed: LVVVGACGV (KRAS G12C)
MVVNGSCGF

SEQ ID NO: 3473 - protein, 9 aa, synthetic construct
  source 1..9: note = Seed: LVVVGACGV (KRAS G12C)
MVVNGSCGI

SEQ ID NO: 3474 - protein, 9 aa, synthetic construct
  source 1..9: note = Seed: LVVVGACGV (KRAS G12C)
MVVNGSCGL

SEQ ID NO: 3475 - protein, 9 aa, synthetic construct
  source 1..9: note = Seed: LVVVGACGV (KRAS G12C)
MVVNGSCGM

SEQ ID NO: 3476 - protein, 9 aa, synthetic construct
  source 1..9: note = Seed: LVVVGACGV (KRAS G12C)
MVVNGSCGV

SEQ ID NO: 3477 - protein, 9 aa, synthetic construct
  source 1..9: note = Seed: LVVVGACGV (KRAS G12C)
MVVNGSCGY

SEQ ID NO: 3478 - protein, 9 aa, synthetic construct
  source 1..9: note = Seed: LVVVGACGV (KRAS G12C)
MVVNGTCGF

SEQ ID NO: 3479 - protein, 9 aa, synthetic construct
  source 1..9: note = Seed: LVVVGACGV (KRAS G12C)
MVVNGTCGI

SEQ ID NO: 3480 - protein, 9 aa, synthetic construct
  source 1..9: note = Seed: LVVVGACGV (KRAS G12C)
MVVNGTCGL

SEQ ID NO: 3481 - protein, 9 aa, synthetic construct
  source 1..9: note = Seed: LVVVGACGV (KRAS G12C)
MVVNGTCGV

SEQ ID NO: 3482 - protein, 9 aa, synthetic construct
  source 1..9: note = Seed: LVVVGACGV (KRAS G12C)
MVVNGTCGY

SEQ ID NO: 3483 - protein, 9 aa, synthetic construct
  source 1..9: note = Seed: LVVVGACGV (KRAS G12C)
MVVNGVCGF

SEQ ID NO: 3484 - protein, 9 aa, synthetic construct
  source 1..9: note = Seed: LVVVGACGV (KRAS G12C)
MVVNGVCGI

SEQ ID NO: 3485 - protein, 9 aa, synthetic construct
  source 1..9: note = Seed: LVVVGACGV (KRAS G12C)
MVVNGVCGL

SEQ ID NO: 3486 - protein, 9 aa, synthetic construct
  source 1..9: note = Seed: LVVVGACGV (KRAS G12C)
MVVNGVCGM

SEQ ID NO: 3487 - protein, 9 aa, synthetic construct
  source 1..9: note = Seed: LVVVGACGV (KRAS G12C)
MVVNGVCGV

SEQ ID NO: 3488 - protein, 9 aa, synthetic construct
  source 1..9: note = Seed: LVVVGACGV (KRAS G12C)
MVVNGVCGY

SEQ ID NO: 3489 - protein, 9 aa, synthetic construct
  source 1..9: note = Seed: LVVVGACGV (KRAS G12C)
MVVQGACGA

SEQ ID NO: 3490 - protein, 9 aa, synthetic construct
  source 1..9: note = Seed: LVVVGACGV (KRAS G12C)
MVVQGACGI

SEQ ID NO: 3491 - protein, 9 aa, synthetic construct
  source 1..9: note = Seed: LVVVGACGV (KRAS G12C)
MVVQGACGL

SEQ ID NO: 3492 - protein, 9 aa, synthetic construct
  source 1..9: note = Seed: LVVVGACGV (KRAS G12C)
MVVQGACGM

SEQ ID NO: 3493 - protein, 9 aa, synthetic construct
  source 1..9: note = Seed: LVVVGACGV (KRAS G12C)
MVVQGACGT

SEQ ID NO: 3494 - protein, 9 aa, synthetic construct
  source 1..9: note = Seed: LVVVGACGV (KRAS G12C)
MVVQGACGV

SEQ ID NO: 3495 - protein, 9 aa, synthetic construct
  source 1..9: note = Seed: LVVVGACGV (KRAS G12C)
MVVQGGCGA

SEQ ID NO: 3496 - protein, 9 aa, synthetic construct
  source 1..9: note = Seed: LVVVGACGV (KRAS G12C)
MVVQGGCGI

SEQ ID NO: 3497 - protein, 9 aa, synthetic construct
  source 1..9: note = Seed: LVVVGACGV (KRAS G12C)
MVVQGGCGL

SEQ ID NO: 3498 - protein, 9 aa, synthetic construct
  source 1..9: note = Seed: LVVVGACGV (KRAS G12C)
MVVQGGCGM

SEQ ID NO: 3499 - protein, 9 aa, synthetic construct
  source 1..9: note = Seed: LVVVGACGV (KRAS G12C)
MVVQGGCGV

SEQ ID NO: 3500 - protein, 9 aa, synthetic construct
  source 1..9: note = Seed: LVVVGACGV (KRAS G12C)
MVVQGNCGI

SEQ ID NO: 3501 - protein, 9 aa, synthetic construct
  source 1..9: note = Seed: LVVVGACGV (KRAS G12C)
MVVQGNCGL

SEQ ID NO: 3502 - protein, 9 aa, synthetic construct
  source 1..9: note = Seed: LVVVGACGV (KRAS G12C)
MVVQGNCGV

SEQ ID NO: 3503 - protein, 9 aa, synthetic construct
  source 1..9: note = Seed: LVVVGACGV (KRAS G12C)
MVVQGPCGL

SEQ ID NO: 3504 - protein, 9 aa, synthetic construct
  source 1..9: note = Seed: LVVVGACGV (KRAS G12C)
MVVQGRCGA

SEQ ID NO: 3505 - protein, 9 aa, synthetic construct
  source 1..9: note = Seed: LVVVGACGV (KRAS G12C)
MVVQGSCGA

SEQ ID NO: 3506 - protein, 9 aa, synthetic construct
  source 1..9: note = Seed: LVVVGACGV (KRAS G12C)
MVVQGSCGI

SEQ ID NO: 3507 - protein, 9 aa, synthetic construct
  source 1..9: note = Seed: LVVVGACGV (KRAS G12C)
MVVQGSCGL

SEQ ID NO: 3508 - protein, 9 aa, synthetic construct
  source 1..9: note = Seed: LVVVGACGV (KRAS G12C)
MVVQGSCGM

SEQ ID NO: 3509 - protein, 9 aa, synthetic construct
  source 1..9: note = Seed: LVVVGACGV (KRAS G12C)
MVVQGSCGV

SEQ ID NO: 3510 - protein, 9 aa, synthetic construct
  source 1..9: note = Seed: LVVVGACGV (KRAS G12C)
MVVQGTCGL

SEQ ID NO: 3511 - protein, 9 aa, synthetic construct
  source 1..9: note = Seed: LVVVGACGV (KRAS G12C)
MVVRGRCGA

SEQ ID NO: 3512 - protein, 9 aa, synthetic construct
  source 1..9: note = Seed: LVVVGACGV (KRAS G12C)
MVVSGACGA

SEQ ID NO: 3513 - protein, 9 aa, synthetic construct
  source 1..9: note = Seed: LVVVGACGV (KRAS G12C)
MVVSGACGI

SEQ ID NO: 3514 - protein, 9 aa, synthetic construct
  source 1..9: note = Seed: LVVVGACGV (KRAS G12C)
MVVSGACGL

SEQ ID NO: 3515 - protein, 9 aa, synthetic construct
  source 1..9: note = Seed: LVVVGACGV (KRAS G12C)
MVVSGACGV

SEQ ID NO: 3516 - protein, 9 aa, synthetic construct
  source 1..9: note = Seed: LVVVGACGV (KRAS G12C)
MVVSGGCGI

SEQ ID NO: 3517 - protein, 9 aa, synthetic construct
  source 1..9: note = Seed: LVVVGACGV (KRAS G12C)
MVVSGGCGL

SEQ ID NO: 3518 - protein, 9 aa, synthetic construct
  source 1..9: note = Seed: LVVVGACGV (KRAS G12C)
MVVSGGCGV

SEQ ID NO: 3519 - protein, 9 aa, synthetic construct
  source 1..9: note = Seed: LVVVGACGV (KRAS G12C)
MVVSGNCGI

SEQ ID NO: 3520 - protein, 9 aa, synthetic construct
  source 1..9: note = Seed: LVVVGACGV (KRAS G12C)
MVVSGSCGI

SEQ ID NO: 3521 - protein, 9 aa, synthetic construct
  source 1..9: note = Seed: LVVVGACGV (KRAS G12C)
MVVSGSCGL

SEQ ID NO: 3522 - protein, 9 aa, synthetic construct
  source 1..9: note = Seed: LVVVGACGV (KRAS G12C)
MVVSGSCGV

SEQ ID NO: 3523 - protein, 9 aa, synthetic construct
  source 1..9: note = Seed: LVVVGACGV (KRAS G12C)
MVVTGACGA

SEQ ID NO: 3524 - protein, 9 aa, synthetic construct
  source 1..9: note = Seed: LVVVGACGV (KRAS G12C)
MVVTGACGI

SEQ ID NO: 3525 - protein, 9 aa, synthetic construct
  source 1..9: note = Seed: LVVVGACGV (KRAS G12C)
MVVTGACGL

SEQ ID NO: 3526 - protein, 9 aa, synthetic construct
  source 1..9: note = Seed: LVVVGACGV (KRAS G12C)
MVVTGACGV

SEQ ID NO: 3527 - protein, 9 aa, synthetic construct
  source 1..9: note = Seed: LVVVGACGV (KRAS G12C)
MVVTGPCGL

SEQ ID NO: 3528 - protein, 9 aa, synthetic construct
  source 1..9: note = Seed: LVVVGACGV (KRAS G12C)
MVVTGSCGI

SEQ ID NO: 3529 - protein, 9 aa, synthetic construct
  source 1..9: note = Seed: LVVVGACGV (KRAS G12C)
MVVTGSCGL

SEQ ID NO: 3530 - protein, 9 aa, synthetic construct
  source 1..9: note = Seed: LVVVGACGV (KRAS G12C)
MVVTGSCGV

SEQ ID NO: 3531 - protein, 9 aa, synthetic construct
  source 1..9: note = Seed: LVVVGACGV (KRAS G12C)
MVVVGACGA

SEQ ID NO: 3532 - protein, 9 aa, synthetic construct
  source 1..9: note = Seed: LVVVGACGV (KRAS G12C)
MVVVGACGI

SEQ ID NO: 3533 - protein, 9 aa, synthetic construct
  source 1..9: note = Seed: LVVVGACGV (KRAS G12C)
MVVVGACGL

SEQ ID NO: 3534 - protein, 9 aa, synthetic construct
  source 1..9: note = Seed: LVVVGACGV (KRAS G12C)
MVVVGACGM

SEQ ID NO: 3535 - protein, 9 aa, synthetic construct
  source 1..9: note = Seed: LVVVGACGV (KRAS G12C)
MVVVGACGV

SEQ ID NO: 3536 - protein, 9 aa, synthetic construct
  source 1..9: note = Seed: LVVVGACGV (KRAS G12C)
MVVVGGCGA

SEQ ID NO: 3537 - protein, 9 aa, synthetic construct
  source 1..9: note = Seed: LVVVGACGV (KRAS G12C)
MVVVGGCGI

SEQ ID NO: 3538 - protein, 9 aa, synthetic construct
  source 1..9: note = Seed: LVVVGACGV (KRAS G12C)
MVVVGGCGL

SEQ ID NO: 3539 - protein, 9 aa, synthetic construct
  source 1..9: note = Seed: LVVVGACGV (KRAS G12C)
MVVVGGCGV

SEQ ID NO: 3540 - protein, 9 aa, synthetic construct
  source 1..9: note = Seed: LVVVGACGV (KRAS G12C)
MVVVGKCGA

SEQ ID NO: 3541 - protein, 9 aa, synthetic construct
  source 1..9: note = Seed: LVVVGACGV (KRAS G12C)
MVVVGKCGH

SEQ ID NO: 3542 - protein, 9 aa, synthetic construct
  source 1..9: note = Seed: LVVVGACGV (KRAS G12C)
MVVVGKCGS

SEQ ID NO: 3543 - protein, 9 aa, synthetic construct
  source 1..9: note = Seed: LVVVGACGV (KRAS G12C)
MVVVGNCGL

SEQ ID NO: 3544 - protein, 9 aa, synthetic construct
  source 1..9: note = Seed: LVVVGACGV (KRAS G12C)
MVVVGNCGV

SEQ ID NO: 3545 - protein, 9 aa, synthetic construct
  source 1..9: note = Seed: LVVVGACGV (KRAS G12C)
MVVVGPCGA

SEQ ID NO: 3546 - protein, 9 aa, synthetic construct
  source 1..9: note = Seed: LVVVGACGV (KRAS G12C)
MVVVGPCGI

SEQ ID NO: 3547 - protein, 9 aa, synthetic construct
  source 1..9: note = Seed: LVVVGACGV (KRAS G12C)
MVVVGPCGL

SEQ ID NO: 3548 - protein, 9 aa, synthetic construct
  source 1..9: note = Seed: LVVVGACGV (KRAS G12C)
MVVVGPCGM

SEQ ID NO: 3549 - protein, 9 aa, synthetic construct
  source 1..9: note = Seed: LVVVGACGV (KRAS G12C)
MVVVGPCGV

SEQ ID NO: 3550 - protein, 9 aa, synthetic construct
  source 1..9: note = Seed: LVVVGACGV (KRAS G12C)
MVVVGRCGA

SEQ ID NO: 3551 - protein, 9 aa, synthetic construct
  source 1..9: note = Seed: LVVVGACGV (KRAS G12C)
MVVVGRCGH

SEQ ID NO: 3552 - protein, 9 aa, synthetic construct
  source 1..9: note = Seed: LVVVGACGV (KRAS G12C)
MVVVGRCGK

SEQ ID NO: 3553 - protein, 9 aa, synthetic construct
  source 1..9: note = Seed: LVVVGACGV (KRAS G12C)
MVVVGRCGQ

SEQ ID NO: 3554 - protein, 9 aa, synthetic construct
  source 1..9: note = Seed: LVVVGACGV (KRAS G12C)
MVVVGRCGR

SEQ ID NO: 3555 - protein, 9 aa, synthetic construct
  source 1..9: note = Seed: LVVVGACGV (KRAS G12C)
MVVVGRCGS

SEQ ID NO: 3556 - protein, 9 aa, synthetic construct
  source 1..9: note = Seed: LVVVGACGV (KRAS G12C)
MVVVGSCGA

SEQ ID NO: 3557 - protein, 9 aa, synthetic construct
  source 1..9: note = Seed: LVVVGACGV (KRAS G12C)
MVVVGSCGI

SEQ ID NO: 3558 - protein, 9 aa, synthetic construct
  source 1..9: note = Seed: LVVVGACGV (KRAS G12C)
MVVVGSCGL

SEQ ID NO: 3559 - protein, 9 aa, synthetic construct
  source 1..9: note = Seed: LVVVGACGV (KRAS G12C)
MVVVGSCGV

SEQ ID NO: 3560 - protein, 9 aa, synthetic construct
  source 1..9: note = Seed: LVVVGACGV (KRAS G12C)
MVVWGNCGL

SEQ ID NO: 3561 - protein, 9 aa, synthetic construct
  source 1..9: note = Seed: LVVVGACGV (KRAS G12C)
MVVWGSCGL

SEQ ID NO: 3562 - protein, 9 aa, synthetic construct
  source 1..9: note = Seed: LVVVGACGV (KRAS G12C)
MVVYGACGL

SEQ ID NO: 3563 - protein, 9 aa, synthetic construct
  source 1..9: note = Seed: LVVVGACGV (KRAS G12C)
MVVYGGCGL

SEQ ID NO: 3564 - protein, 9 aa, synthetic construct
  source 1..9: note = Seed: LVVVGACGV (KRAS G12C)
MVVYGNCGA

SEQ ID NO: 3565 - protein, 9 aa, synthetic construct
  source 1..9: note = Seed: LVVVGACGV (KRAS G12C)
MVVYGNCGI

SEQ ID NO: 3566 - protein, 9 aa, synthetic construct
  source 1..9: note = Seed: LVVVGACGV (KRAS G12C)
MVVYGNCGL

SEQ ID NO: 3567 - protein, 9 aa, synthetic construct
  source 1..9: note = Seed: LVVVGACGV (KRAS G12C)
MVVYGNCGM

SEQ ID NO: 3568 - protein, 9 aa, synthetic construct
  source 1..9: note = Seed: LVVVGACGV (KRAS G12C)
MVVYGNCGV

SEQ ID NO: 3569 - protein, 9 aa, synthetic construct
  source 1..9: note = Seed: LVVVGACGV (KRAS G12C)
MVVYGSCGA

SEQ ID NO: 3570 - protein, 9 aa, synthetic construct
  source 1..9: note = Seed: LVVVGACGV (KRAS G12C)
MVVYGSCGI

SEQ ID NO: 3571 - protein, 9 aa, synthetic construct
  source 1..9: note = Seed: LVVVGACGV (KRAS G12C)
MVVYGSCGL

SEQ ID NO: 3572 - protein, 9 aa, synthetic construct
  source 1..9: note = Seed: LVVVGACGV (KRAS G12C)
MVVYGSCGM

SEQ ID NO: 3573 - protein, 9 aa, synthetic construct
  source 1..9: note = Seed: LVVVGACGV (KRAS G12C)
MVVYGSCGV

SEQ ID NO: 3574 - protein, 9 aa, synthetic construct
  source 1..9: note = Seed: LVVVGACGV (KRAS G12C)
MVVYGTCGL

SEQ ID NO: 3575 - protein, 9 aa, synthetic construct
  source 1..9: note = Seed: LVVVGACGV (KRAS G12C)
QVVLGACGL

SEQ ID NO: 3576 - protein, 9 aa, synthetic construct
  source 1..9: note = Seed: LVVVGACGV (KRAS G12C)
VVVAGACGA

SEQ ID NO: 3577 - protein, 9 aa, synthetic construct
  source 1..9: note = Seed: LVVVGACGV (KRAS G12C)
VVVAGACGI

SEQ ID NO: 3578 - protein, 9 aa, synthetic construct
  source 1..9: note = Seed: LVVVGACGV (KRAS G12C)
VVVAGACGL

SEQ ID NO: 3579 - protein, 9 aa, synthetic construct
  source 1..9: note = Seed: LVVVGACGV (KRAS G12C)
VVVAGACGM

SEQ ID NO: 3580 - protein, 9 aa, synthetic construct
  source 1..9: note = Seed: LVVVGACGV (KRAS G12C)
VVVAGACGV

SEQ ID NO: 3581 - protein, 9 aa, synthetic construct
  source 1..9: note = Seed: LVVVGACGV (KRAS G12C)
VVVAGGCGA

SEQ ID NO: 3582 - protein, 9 aa, synthetic construct
  source 1..9: note = Seed: LVVVGACGV (KRAS G12C)
VVVAGGCGI

SEQ ID NO: 3583 - protein, 9 aa, synthetic construct
  source 1..9: note = Seed: LVVVGACGV (KRAS G12C)
VVVAGGCGL

SEQ ID NO: 3584 - protein, 9 aa, synthetic construct
  source 1..9: note = Seed: LVVVGACGV (KRAS G12C)
VVVAGGCGM

SEQ ID NO: 3585 - protein, 9 aa, synthetic construct
  source 1..9: note = Seed: LVVVGACGV (KRAS G12C)
VVVAGGCGV

SEQ ID NO: 3586 - protein, 9 aa, synthetic construct
  source 1..9: note = Seed: LVVVGACGV (KRAS G12C)
VVVAGSCGI

SEQ ID NO: 3587 - protein, 9 aa, synthetic construct
  source 1..9: note = Seed: LVVVGACGV (KRAS G12C)
VVVAGSCGL

SEQ ID NO: 3588 - protein, 9 aa, synthetic construct
  source 1..9: note = Seed: LVVVGACGV (KRAS G12C)
VVVAGSCGV

SEQ ID NO: 3589 - protein, 9 aa, synthetic construct
  source 1..9: note = Seed: LVVVGACGV (KRAS G12C)
VVVEGACGL

SEQ ID NO: 3590 - protein, 9 aa, synthetic construct
  source 1..9: note = Seed: LVVVGACGV (KRAS G12C)
VVVFGNCGA

SEQ ID NO: 3591 - protein, 9 aa, synthetic construct
  source 1..9: note = Seed: LVVVGACGV (KRAS G12C)
VVVFGNCGI

SEQ ID NO: 3592 - protein, 9 aa, synthetic construct
  source 1..9: note = Seed: LVVVGACGV (KRAS G12C)
VVVFGNCGL

SEQ ID NO: 3593 - protein, 9 aa, synthetic construct
  source 1..9: note = Seed: LVVVGACGV (KRAS G12C)
VVVFGNCGM

SEQ ID NO: 3594 - protein, 9 aa, synthetic construct
  source 1..9: note = Seed: LVVVGACGV (KRAS G12C)
VVVFGNCGV

SEQ ID NO: 3595 - protein, 9 aa, synthetic construct
  source 1..9: note = Seed: LVVVGACGV (KRAS G12C)
VVVFGRCGH

SEQ ID NO: 3596 - protein, 9 aa, synthetic construct
  source 1..9: note = Seed: LVVVGACGV (KRAS G12C)
VVVFGSCGA

SEQ ID NO: 3597 - protein, 9 aa, synthetic construct
  source 1..9: note = Seed: LVVVGACGV (KRAS G12C)
VVVFGSCGI

SEQ ID NO: 3598 - protein, 9 aa, synthetic construct
  source 1..9: note = Seed: LVVVGACGV (KRAS G12C)
VVVFGSCGL

SEQ ID NO: 3599 - protein, 9 aa, synthetic construct
  source 1..9: note = Seed: LVVVGACGV (KRAS G12C)
VVVFGSCGM

SEQ ID NO: 3600 - protein, 9 aa, synthetic construct
  source 1..9: note = Seed: LVVVGACGV (KRAS G12C)
VVVFGSCGV

SEQ ID NO: 3601 - protein, 9 aa, synthetic construct
  source 1..9: note = Seed: LVVVGACGV (KRAS G12C)
VVVIGACGA

SEQ ID NO: 3602 - protein, 9 aa, synthetic construct
  source 1..9: note = Seed: LVVVGACGV (KRAS G12C)
VVVIGACGI

SEQ ID NO: 3603 - protein, 9 aa, synthetic construct
  source 1..9: note = Seed: LVVVGACGV (KRAS G12C)
VVVIGACGL

SEQ ID NO: 3604 - protein, 9 aa, synthetic construct
  source 1..9: note = Seed: LVVVGACGV (KRAS G12C)
VVVIGACGM

SEQ ID NO: 3605 - protein, 9 aa, synthetic construct
  source 1..9: note = Seed: LVVVGACGV (KRAS G12C)
VVVIGACGV

SEQ ID NO: 3606 - protein, 9 aa, synthetic construct
  source 1..9: note = Seed: LVVVGACGV (KRAS G12C)
VVVIGGCGA

SEQ ID NO: 3607 - protein, 9 aa, synthetic construct
  source 1..9: note = Seed: LVVVGACGV (KRAS G12C)
VVVIGGCGI

SEQ ID NO: 3608 - protein, 9 aa, synthetic construct
  source 1..9: note = Seed: LVVVGACGV (KRAS G12C)
VVVIGGCGL

SEQ ID NO: 3609 - protein, 9 aa, synthetic construct
  source 1..9: note = Seed: LVVVGACGV (KRAS G12C)
VVVIGGCGM

SEQ ID NO: 3610 - protein, 9 aa, synthetic construct
  source 1..9: note = Seed: LVVVGACGV (KRAS G12C)
VVVIGGCGV

SEQ ID NO: 3611 - protein, 9 aa, synthetic construct
  source 1..9: note = Seed: LVVVGACGV (KRAS G12C)
VVVIGKCGA

SEQ ID NO: 3612 - protein, 9 aa, synthetic construct
  source 1..9: note = Seed: LVVVGACGV (KRAS G12C)
VVVIGKCGH

SEQ ID NO: 3613 - protein, 9 aa, synthetic construct
  source 1..9: note = Seed: LVVVGACGV (KRAS G12C)
VVVIGKCGQ

SEQ ID NO: 3614 - protein, 9 aa, synthetic construct
  source 1..9: note = Seed: LVVVGACGV (KRAS G12C)
VVVIGKCGS

SEQ ID NO: 3615 - protein, 9 aa, synthetic construct
  source 1..9: note = Seed: LVVVGACGV (KRAS G12C)
VVVIGNCGA

SEQ ID NO: 3616 - protein, 9 aa, synthetic construct
  source 1..9: note = Seed: LVVVGACGV (KRAS G12C)
VVVIGNCGI

SEQ ID NO: 3617 - protein, 9 aa, synthetic construct
  source 1..9: note = Seed: LVVVGACGV (KRAS G12C)
VVVIGNCGL

SEQ ID NO: 3618 - protein, 9 aa, synthetic construct
  source 1..9: note = Seed: LVVVGACGV (KRAS G12C)
VVVIGNCGS

SEQ ID NO: 3619 - protein, 9 aa, synthetic construct
  source 1..9: note = Seed: LVVVGACGV (KRAS G12C)
VVVIGNCGV

SEQ ID NO: 3620 - protein, 9 aa, synthetic construct
  source 1..9: note = Seed: LVVVGACGV (KRAS G12C)
VVVIGPCGA

SEQ ID NO: 3621 - protein, 9 aa, synthetic construct
  source 1..9: note = Seed: LVVVGACGV (KRAS G12C)
VVVIGPCGI

SEQ ID NO: 3622 - protein, 9 aa, synthetic construct
  source 1..9: note = Seed: LVVVGACGV (KRAS G12C)
VVVIGPCGL

SEQ ID NO: 3623 - protein, 9 aa, synthetic construct
  source 1..9: note = Seed: LVVVGACGV (KRAS G12C)
VVVIGPCGM

SEQ ID NO: 3624 - protein, 9 aa, synthetic construct
  source 1..9: note = Seed: LVVVGACGV (KRAS G12C)
VVVIGPCGV

SEQ ID NO: 3625 - protein, 9 aa, synthetic construct
  source 1..9: note = Seed: LVVVGACGV (KRAS G12C)
VVVIGRCGA

SEQ ID NO: 3626 - protein, 9 aa, synthetic construct
  source 1..9: note = Seed: LVVVGACGV (KRAS G12C)
VVVIGRCGH

SEQ ID NO: 3627 - protein, 9 aa, synthetic construct
  source 1..9: note = Seed: LVVVGACGV (KRAS G12C)
VVVIGRCGK

SEQ ID NO: 3628 - protein, 9 aa, synthetic construct
  source 1..9: note = Seed: LVVVGACGV (KRAS G12C)
VVVIGRCGQ

SEQ ID NO: 3629 - protein, 9 aa, synthetic construct
  source 1..9: note = Seed: LVVVGACGV (KRAS G12C)
VVVIGRCGR

SEQ ID NO: 3630 - protein, 9 aa, synthetic construct
  source 1..9: note = Seed: LVVVGACGV (KRAS G12C)
VVVIGRCGS

SEQ ID NO: 3631 - protein, 9 aa, synthetic construct
  source 1..9: note = Seed: LVVVGACGV (KRAS G12C)
VVVIGSCGA

SEQ ID NO: 3632 - protein, 9 aa, synthetic construct
  source 1..9: note = Seed: LVVVGACGV (KRAS G12C)
VVVIGSCGI

SEQ ID NO: 3633 - protein, 9 aa, synthetic construct
  source 1..9: note = Seed: LVVVGACGV (KRAS G12C)
VVVIGSCGL

SEQ ID NO: 3634 - protein, 9 aa, synthetic construct
  source 1..9: note = Seed: LVVVGACGV (KRAS G12C)
VVVIGSCGM

SEQ ID NO: 3635 - protein, 9 aa, synthetic construct
  source 1..9: note = Seed: LVVVGACGV (KRAS G12C)
VVVIGSCGV

SEQ ID NO: 3636 - protein, 9 aa, synthetic construct
  source 1..9: note = Seed: LVVVGACGV (KRAS G12C)
VVVLGACGA

SEQ ID NO: 3637 - protein, 9 aa, synthetic construct
  source 1..9: note = Seed: LVVVGACGV (KRAS G12C)
VVVLGACGI

SEQ ID NO: 3638 - protein, 9 aa, synthetic construct
  source 1..9: note = Seed: LVVVGACGV (KRAS G12C)
VVVLGACGL

SEQ ID NO: 3639 - protein, 9 aa, synthetic construct
  source 1..9: note = Seed: LVVVGACGV (KRAS G12C)
VVVLGACGM

SEQ ID NO: 3640 - protein, 9 aa, synthetic construct
  source 1..9: note = Seed: LVVVGACGV (KRAS G12C)
VVVLGACGS

SEQ ID NO: 3641 - protein, 9 aa, synthetic construct
  source 1..9: note = Seed: LVVVGACGV (KRAS G12C)
VVVLGACGT

SEQ ID NO: 3642 - protein, 9 aa, synthetic construct
  source 1..9: note = Seed: LVVVGACGV (KRAS G12C)
VVVLGACGV

SEQ ID NO: 3643 - protein, 9 aa, synthetic construct
  source 1..9: note = Seed: LVVVGACGV (KRAS G12C)
VVVLGGCGA

SEQ ID NO: 3644 - protein, 9 aa, synthetic construct
  source 1..9: note = Seed: LVVVGACGV (KRAS G12C)
VVVLGGCGI

SEQ ID NO: 3645 - protein, 9 aa, synthetic construct
  source 1..9: note = Seed: LVVVGACGV (KRAS G12C)
VVVLGGCGL

SEQ ID NO: 3646 - protein, 9 aa, synthetic construct
  source 1..9: note = Seed: LVVVGACGV (KRAS G12C)
VVVLGGCGM

SEQ ID NO: 3647 - protein, 9 aa, synthetic construct
  source 1..9: note = Seed: LVVVGACGV (KRAS G12C)
VVVLGGCGS

SEQ ID NO: 3648 - protein, 9 aa, synthetic construct
  source 1..9: note = Seed: LVVVGACGV (KRAS G12C)
VVVLGGCGT

SEQ ID NO: 3649 - protein, 9 aa, synthetic construct
  source 1..9: note = Seed: LVVVGACGV (KRAS G12C)
VVVLGGCGV

SEQ ID NO: 3650 - protein, 9 aa, synthetic construct
  source 1..9: note = Seed: LVVVGACGV (KRAS G12C)
VVVLGKCGA

SEQ ID NO: 3651 - protein, 9 aa, synthetic construct
  source 1..9: note = Seed: LVVVGACGV (KRAS G12C)
VVVLGKCGH

SEQ ID NO: 3652 - protein, 9 aa, synthetic construct
  source 1..9: note = Seed: LVVVGACGV (KRAS G12C)
VVVLGKCGK

SEQ ID NO: 3653 - protein, 9 aa, synthetic construct
  source 1..9: note = Seed: LVVVGACGV (KRAS G12C)
VVVLGKCGQ

SEQ ID NO: 3654 - protein, 9 aa, synthetic construct
  source 1..9: note = Seed: LVVVGACGV (KRAS G12C)
VVVLGKCGR

SEQ ID NO: 3655 - protein, 9 aa, synthetic construct
  source 1..9: note = Seed: LVVVGACGV (KRAS G12C)
VVVLGKCGS

SEQ ID NO: 3656 - protein, 9 aa, synthetic construct
  source 1..9: note = Seed: LVVVGACGV (KRAS G12C)
VVVLGNCGA

SEQ ID NO: 3657 - protein, 9 aa, synthetic construct
  source 1..9: note = Seed: LVVVGACGV (KRAS G12C)
VVVLGNCGI

SEQ ID NO: 3658 - protein, 9 aa, synthetic construct
  source 1..9: note = Seed: LVVVGACGV (KRAS G12C)
VVVLGNCGL

SEQ ID NO: 3659 - protein, 9 aa, synthetic construct
  source 1..9: note = Seed: LVVVGACGV (KRAS G12C)
VVVLGNCGM

SEQ ID NO: 3660 - protein, 9 aa, synthetic construct
  source 1..9: note = Seed: LVVVGACGV (KRAS G12C)
VVVLGNCGS

SEQ ID NO: 3661 - protein, 9 aa, synthetic construct
  source 1..9: note = Seed: LVVVGACGV (KRAS G12C)
VVVLGNCGT

SEQ ID NO: 3662 - protein, 9 aa, synthetic construct
  source 1..9: note = Seed: LVVVGACGV (KRAS G12C)
VVVLGNCGV

SEQ ID NO: 3663 - protein, 9 aa, synthetic construct
  source 1..9: note = Seed: LVVVGACGV (KRAS G12C)
VVVLGPCGA

SEQ ID NO: 3664 - protein, 9 aa, synthetic construct
  source 1..9: note = Seed: LVVVGACGV (KRAS G12C)
VVVLGPCGI

SEQ ID NO: 3665 - protein, 9 aa, synthetic construct
  source 1..9: note = Seed: LVVVGACGV (KRAS G12C)
VVVLGPCGL

SEQ ID NO: 3666 - protein, 9 aa, synthetic construct
  source 1..9: note = Seed: LVVVGACGV (KRAS G12C)
VVVLGPCGM

SEQ ID NO: 3667 - protein, 9 aa, synthetic construct
  source 1..9: note = Seed: LVVVGACGV (KRAS G12C)
VVVLGPCGS

SEQ ID NO: 3668 - protein, 9 aa, synthetic construct
  source 1..9: note = Seed: LVVVGACGV (KRAS G12C)
VVVLGPCGT

SEQ ID NO: 3669 - protein, 9 aa, synthetic construct
  source 1..9: note = Seed: LVVVGACGV (KRAS G12C)
VVVLGPCGV

SEQ ID NO: 3670 - protein, 9 aa, synthetic construct
  source 1..9: note = Seed: LVVVGACGV (KRAS G12C)
VVVLGRCGA

SEQ ID NO: 3671 - protein, 9 aa, synthetic construct
  source 1..9: note = Seed: LVVVGACGV (KRAS G12C)
VVVLGRCGG

SEQ ID NO: 3672 - protein, 9 aa, synthetic construct
  source 1..9: note = Seed: LVVVGACGV (KRAS G12C)
VVVLGRCGH

SEQ ID NO: 3673 - protein, 9 aa, synthetic construct
  source 1..9: note = Seed: LVVVGACGV (KRAS G12C)
VVVLGRCGK

SEQ ID NO: 3674 - protein, 9 aa, synthetic construct
  source 1..9: note = Seed: LVVVGACGV (KRAS G12C)
VVVLGRCGN

SEQ ID NO: 3675 - protein, 9 aa, synthetic construct
  source 1..9: note = Seed: LVVVGACGV (KRAS G12C)
VVVLGRCGQ

SEQ ID NO: 3676 - protein, 9 aa, synthetic construct
  source 1..9: note = Seed: LVVVGACGV (KRAS G12C)
VVVLGRCGR

SEQ ID NO: 3677 - protein, 9 aa, synthetic construct
  source 1..9: note = Seed: LVVVGACGV (KRAS G12C)
VVVLGRCGS

SEQ ID NO: 3678 - protein, 9 aa, synthetic construct
  source 1..9: note = Seed: LVVVGACGV (KRAS G12C)
VVVLGRCGT

SEQ ID NO: 3679 - protein, 9 aa, synthetic construct
  source 1..9: note = Seed: LVVVGACGV (KRAS G12C)
VVVLGSCGA

SEQ ID NO: 3680 - protein, 9 aa, synthetic construct
  source 1..9: note = Seed: LVVVGACGV (KRAS G12C)
VVVLGSCGI

SEQ ID NO: 3681 - protein, 9 aa, synthetic construct
  source 1..9: note = Seed: LVVVGACGV (KRAS G12C)
VVVLGSCGL

SEQ ID NO: 3682 - protein, 9 aa, synthetic construct
  source 1..9: note = Seed: LVVVGACGV (KRAS G12C)
VVVLGSCGM

SEQ ID NO: 3683 - protein, 9 aa, synthetic construct
  source 1..9: note = Seed: LVVVGACGV (KRAS G12C)
VVVLGSCGS

SEQ ID NO: 3684 - protein, 9 aa, synthetic construct
  source 1..9: note = Seed: LVVVGACGV (KRAS G12C)
VVVLGSCGT

SEQ ID NO: 3685 - protein, 9 aa, synthetic construct
  source 1..9: note = Seed: LVVVGACGV (KRAS G12C)
VVVLGSCGV

SEQ ID NO: 3686 - protein, 9 aa, synthetic construct
  source 1..9: note = Seed: LVVVGACGV (KRAS G12C)
VVVLGTCGA

SEQ ID NO: 3687 - protein, 9 aa, synthetic construct
  source 1..9: note = Seed: LVVVGACGV (KRAS G12C)
VVVLGTCGI

SEQ ID NO: 3688 - protein, 9 aa, synthetic construct
  source 1..9: note = Seed: LVVVGACGV (KRAS G12C)
VVVLGTCGL

SEQ ID NO: 3689 - protein, 9 aa, synthetic construct
  source 1..9: note = Seed: LVVVGACGV (KRAS G12C)
VVVLGTCGM

SEQ ID NO: 3690 - protein, 9 aa, synthetic construct
  source 1..9: note = Seed: LVVVGACGV (KRAS G12C)
VVVLGTCGT

SEQ ID NO: 3691 - protein, 9 aa, synthetic construct
  source 1..9: note = Seed: LVVVGACGV (KRAS G12C)
VVVLGTCGV

SEQ ID NO: 3692 - protein, 9 aa, synthetic construct
  source 1..9: note = Seed: LVVVGACGV (KRAS G12C)
VVVMGACGA

SEQ ID NO: 3693 - protein, 9 aa, synthetic construct
  source 1..9: note = Seed: LVVVGACGV (KRAS G12C)
VVVMGACGI

SEQ ID NO: 3694 - protein, 9 aa, synthetic construct
  source 1..9: note = Seed: LVVVGACGV (KRAS G12C)
VVVMGACGL

SEQ ID NO: 3695 - protein, 9 aa, synthetic construct
  source 1..9: note = Seed: LVVVGACGV (KRAS G12C)
VVVMGACGM

SEQ ID NO: 3696 - protein, 9 aa, synthetic construct
  source 1..9: note = Seed: LVVVGACGV (KRAS G12C)
VVVMGACGS

SEQ ID NO: 3697 - protein, 9 aa, synthetic construct
  source 1..9: note = Seed: LVVVGACGV (KRAS G12C)
VVVMGACGT

SEQ ID NO: 3698 - protein, 9 aa, synthetic construct
  source 1..9: note = Seed: LVVVGACGV (KRAS G12C)
VVVMGACGV

SEQ ID NO: 3699 - protein, 9 aa, synthetic construct
  source 1..9: note = Seed: LVVVGACGV (KRAS G12C)
VVVMGGCGA

SEQ ID NO: 3700 - protein, 9 aa, synthetic construct
  source 1..9: note = Seed: LVVVGACGV (KRAS G12C)
VVVMGGCGI

SEQ ID NO: 3701 - protein, 9 aa, synthetic construct
  source 1..9: note = Seed: LVVVGACGV (KRAS G12C)
VVVMGGCGL

SEQ ID NO: 3702 - protein, 9 aa, synthetic construct
  source 1..9: note = Seed: LVVVGACGV (KRAS G12C)
VVVMGGCGM

SEQ ID NO: 3703 - protein, 9 aa, synthetic construct
  source 1..9: note = Seed: LVVVGACGV (KRAS G12C)
VVVMGGCGS

SEQ ID NO: 3704 - protein, 9 aa, synthetic construct
  source 1..9: note = Seed: LVVVGACGV (KRAS G12C)
VVVMGGCGT

SEQ ID NO: 3705 - protein, 9 aa, synthetic construct
  source 1..9: note = Seed: LVVVGACGV (KRAS G12C)
VVVMGGCGV

SEQ ID NO: 3706 - protein, 9 aa, synthetic construct
  source 1..9: note = Seed: LVVVGACGV (KRAS G12C)
VVVMGKCGA

SEQ ID NO: 3707 - protein, 9 aa, synthetic construct
  source 1..9: note = Seed: LVVVGACGV (KRAS G12C)
VVVMGKCGH

SEQ ID NO: 3708 - protein, 9 aa, synthetic construct
  source 1..9: note = Seed: LVVVGACGV (KRAS G12C)
VVVMGKCGK

SEQ ID NO: 3709 - protein, 9 aa, synthetic construct
  source 1..9: note = Seed: LVVVGACGV (KRAS G12C)
VVVMGKCGQ

SEQ ID NO: 3710 - protein, 9 aa, synthetic construct
  source 1..9: note = Seed: LVVVGACGV (KRAS G12C)
VVVMGKCGR

SEQ ID NO: 3711 - protein, 9 aa, synthetic construct
  source 1..9: note = Seed: LVVVGACGV (KRAS G12C)
VVVMGKCGS

SEQ ID NO: 3712 - protein, 9 aa, synthetic construct
  source 1..9: note = Seed: LVVVGACGV (KRAS G12C)
VVVMGNCGA

SEQ ID NO: 3713 - protein, 9 aa, synthetic construct
  source 1..9: note = Seed: LVVVGACGV (KRAS G12C)
VVVMGNCGI

SEQ ID NO: 3714 - protein, 9 aa, synthetic construct
  source 1..9: note = Seed: LVVVGACGV (KRAS G12C)
VVVMGNCGL

SEQ ID NO: 3715 - protein, 9 aa, synthetic construct
  source 1..9: note = Seed: LVVVGACGV (KRAS G12C)
VVVMGNCGM

SEQ ID NO: 3716 - protein, 9 aa, synthetic construct
  source 1..9: note = Seed: LVVVGACGV (KRAS G12C)
VVVMGNCGS

SEQ ID NO: 3717 - protein, 9 aa, synthetic construct
  source 1..9: note = Seed: LVVVGACGV (KRAS G12C)
VVVMGNCGT

SEQ ID NO: 3718 - protein, 9 aa, synthetic construct
  source 1..9: note = Seed: LVVVGACGV (KRAS G12C)
VVVMGNCGV

SEQ ID NO: 3719 - protein, 9 aa, synthetic construct
  source 1..9: note = Seed: LVVVGACGV (KRAS G12C)
VVVMGPCGA

SEQ ID NO: 3720 - protein, 9 aa, synthetic construct
  source 1..9: note = Seed: LVVVGACGV (KRAS G12C)
VVVMGPCGI

SEQ ID NO: 3721 - protein, 9 aa, synthetic construct
  source 1..9: note = Seed: LVVVGACGV (KRAS G12C)
VVVMGPCGL

SEQ ID NO: 3722 - protein, 9 aa, synthetic construct
  source 1..9: note = Seed: LVVVGACGV (KRAS G12C)
VVVMGPCGM

SEQ ID NO: 3723 - protein, 9 aa, synthetic construct
  source 1..9: note = Seed: LVVVGACGV (KRAS G12C)
VVVMGPCGT

SEQ ID NO: 3724 - protein, 9 aa, synthetic construct
  source 1..9: note = Seed: LVVVGACGV (KRAS G12C)
VVVMGPCGV

SEQ ID NO: 3725 - protein, 9 aa, synthetic construct
  source 1..9: note = Seed: LVVVGACGV (KRAS G12C)
VVVMGRCGA

SEQ ID NO: 3726 - protein, 9 aa, synthetic construct
  source 1..9: note = Seed: LVVVGACGV (KRAS G12C)
VVVMGRCGH

SEQ ID NO: 3727 - protein, 9 aa, synthetic construct
  source 1..9: note = Seed: LVVVGACGV (KRAS G12C)
VVVMGRCGK

SEQ ID NO: 3728 - protein, 9 aa, synthetic construct
  source 1..9: note = Seed: LVVVGACGV (KRAS G12C)
VVVMGRCGM

SEQ ID NO: 3729 - protein, 9 aa, synthetic construct
  source 1..9: note = Seed: LVVVGACGV (KRAS G12C)
VVVMGRCGQ

SEQ ID NO: 3730 - protein, 9 aa, synthetic construct
  source 1..9: note = Seed: LVVVGACGV (KRAS G12C)
VVVMGRCGR

SEQ ID NO: 3731 - protein, 9 aa, synthetic construct
  source 1..9: note = Seed: LVVVGACGV (KRAS G12C)
VVVMGRCGS

SEQ ID NO: 3732 - protein, 9 aa, synthetic construct
  source 1..9: note = Seed: LVVVGACGV (KRAS G12C)
VVVMGSCGA

SEQ ID NO: 3733 - protein, 9 aa, synthetic construct
  source 1..9: note = Seed: LVVVGACGV (KRAS G12C)
VVVMGSCGI

SEQ ID NO: 3734 - protein, 9 aa, synthetic construct
  source 1..9: note = Seed: LVVVGACGV (KRAS G12C)
VVVMGSCGL

SEQ ID NO: 3735 - protein, 9 aa, synthetic construct
  source 1..9: note = Seed: LVVVGACGV (KRAS G12C)
VVVMGSCGM

SEQ ID NO: 3736 - protein, 9 aa, synthetic construct
  source 1..9: note = Seed: LVVVGACGV (KRAS G12C)
VVVMGSCGS

SEQ ID NO: 3737 - protein, 9 aa, synthetic construct
  source 1..9: note = Seed: LVVVGACGV (KRAS G12C)
VVVMGSCGT

SEQ ID NO: 3738 - protein, 9 aa, synthetic construct
  source 1..9: note = Seed: LVVVGACGV (KRAS G12C)
VVVMGSCGV

SEQ ID NO: 3739 - protein, 9 aa, synthetic construct
  source 1..9: note = Seed: LVVVGACGV (KRAS G12C)
VVVMGTCGA

SEQ ID NO: 3740 - protein, 9 aa, synthetic construct
  source 1..9: note = Seed: LVVVGACGV (KRAS G12C)
VVVMGTCGI

SEQ ID NO: 3741 - protein, 9 aa, synthetic construct
  source 1..9: note = Seed: LVVVGACGV (KRAS G12C)
VVVMGTCGL

SEQ ID NO: 3742 - protein, 9 aa, synthetic construct
  source 1..9: note = Seed: LVVVGACGV (KRAS G12C)
VVVMGTCGM

SEQ ID NO: 3743 - protein, 9 aa, synthetic construct
  source 1..9: note = Seed: LVVVGACGV (KRAS G12C)
VVVMGTCGV

SEQ ID NO: 3744 - protein, 9 aa, synthetic construct
  source 1..9: note = Seed: LVVVGACGV (KRAS G12C)
VVVNGACGF

SEQ ID NO: 3745 - protein, 9 aa, synthetic construct
  source 1..9: note = Seed: LVVVGACGV (KRAS G12C)
VVVNGACGI

SEQ ID NO: 3746 - protein, 9 aa, synthetic construct
  source 1..9: note = Seed: LVVVGACGV (KRAS G12C)
VVVNGACGL

SEQ ID NO: 3747 - protein, 9 aa, synthetic construct
  source 1..9: note = Seed: LVVVGACGV (KRAS G12C)
VVVNGACGM

SEQ ID NO: 3748 - protein, 9 aa, synthetic construct
  source 1..9: note = Seed: LVVVGACGV (KRAS G12C)
VVVNGACGV

SEQ ID NO: 3749 - protein, 9 aa, synthetic construct
  source 1..9: note = Seed: LVVVGACGV (KRAS G12C)
VVVNGACGY

SEQ ID NO: 3750 - protein, 9 aa, synthetic construct
  source 1..9: note = Seed: LVVVGACGV (KRAS G12C)
VVVNGGCGI

SEQ ID NO: 3751 - protein, 9 aa, synthetic construct
  source 1..9: note = Seed: LVVVGACGV (KRAS G12C)
VVVNGGCGL

SEQ ID NO: 3752 - protein, 9 aa, synthetic construct
  source 1..9: note = Seed: LVVVGACGV (KRAS G12C)
VVVNGGCGV

SEQ ID NO: 3753 - protein, 9 aa, synthetic construct
  source 1..9: note = Seed: LVVVGACGV (KRAS G12C)
VVVNGICGF

SEQ ID NO: 3754 - protein, 9 aa, synthetic construct
  source 1..9: note = Seed: LVVVGACGV (KRAS G12C)
VVVNGICGI

SEQ ID NO: 3755 - protein, 9 aa, synthetic construct
  source 1..9: note = Seed: LVVVGACGV (KRAS G12C)
VVVNGICGL

SEQ ID NO: 3756 - protein, 9 aa, synthetic construct
  source 1..9: note = Seed: LVVVGACGV (KRAS G12C)
VVVNGICGM

SEQ ID NO: 3757 - protein, 9 aa, synthetic construct
  source 1..9: note = Seed: LVVVGACGV (KRAS G12C)
VVVNGICGV

SEQ ID NO: 3758 - protein, 9 aa, synthetic construct
  source 1..9: note = Seed: LVVVGACGV (KRAS G12C)
VVVNGICGY

SEQ ID NO: 3759 - protein, 9 aa, synthetic construct
  source 1..9: note = Seed: LVVVGACGV (KRAS G12C)
VVVNGLCGI

SEQ ID NO: 3760 - protein, 9 aa, synthetic construct
  source 1..9: note = Seed: LVVVGACGV (KRAS G12C)
VVVNGLCGV

SEQ ID NO: 3761 - protein, 9 aa, synthetic construct
  source 1..9: note = Seed: LVVVGACGV (KRAS G12C)
VVVNGMCGI

SEQ ID NO: 3762 - protein, 9 aa, synthetic construct
  source 1..9: note = Seed: LVVVGACGV (KRAS G12C)
VVVNGNCGF

SEQ ID NO: 3763 - protein, 9 aa, synthetic construct
  source 1..9: note = Seed: LVVVGACGV (KRAS G12C)
VVVNGNCGI

SEQ ID NO: 3764 - protein, 9 aa, synthetic construct
  source 1..9: note = Seed: LVVVGACGV (KRAS G12C)
VVVNGNCGL

SEQ ID NO: 3765 - protein, 9 aa, synthetic construct
  source 1..9: note = Seed: LVVVGACGV (KRAS G12C)
VVVNGNCGM

SEQ ID NO: 3766 - protein, 9 aa, synthetic construct
  source 1..9: note = Seed: LVVVGACGV (KRAS G12C)
VVVNGNCGV

SEQ ID NO: 3767 - protein, 9 aa, synthetic construct
  source 1..9: note = Seed: LVVVGACGV (KRAS G12C)
VVVNGNCGY

SEQ ID NO: 3768 - protein, 9 aa, synthetic construct
  source 1..9: note = Seed: LVVVGACGV (KRAS G12C)
VVVNGPCGF

SEQ ID NO: 3769 - protein, 9 aa, synthetic construct
  source 1..9: note = Seed: LVVVGACGV (KRAS G12C)
VVVNGPCGI

SEQ ID NO: 3770 - protein, 9 aa, synthetic construct
  source 1..9: note = Seed: LVVVGACGV (KRAS G12C)
VVVNGPCGL

SEQ ID NO: 3771 - protein, 9 aa, synthetic construct
  source 1..9: note = Seed: LVVVGACGV (KRAS G12C)
VVVNGPCGV

SEQ ID NO: 3772 - protein, 9 aa, synthetic construct
  source 1..9: note = Seed: LVVVGACGV (KRAS G12C)
VVVNGSCGF

SEQ ID NO: 3773 - protein, 9 aa, synthetic construct
  source 1..9: note = Seed: LVVVGACGV (KRAS G12C)
VVVNGSCGI

SEQ ID NO: 3774 - protein, 9 aa, synthetic construct
  source 1..9: note = Seed: LVVVGACGV (KRAS G12C)
VVVNGSCGL

SEQ ID NO: 3775 - protein, 9 aa, synthetic construct
  source 1..9: note = Seed: LVVVGACGV (KRAS G12C)
VVVNGSCGM

SEQ ID NO: 3776 - protein, 9 aa, synthetic construct
  source 1..9: note = Seed: LVVVGACGV (KRAS G12C)
VVVNGSCGV

SEQ ID NO: 3777 - protein, 9 aa, synthetic construct
  source 1..9: note = Seed: LVVVGACGV (KRAS G12C)
VVVNGSCGY

SEQ ID NO: 3778 - protein, 9 aa, synthetic construct
  source 1..9: note = Seed: LVVVGACGV (KRAS G12C)
VVVNGTCGF

SEQ ID NO: 3779 - protein, 9 aa, synthetic construct
  source 1..9: note = Seed: LVVVGACGV (KRAS G12C)
VVVNGTCGI

SEQ ID NO: 3780 - protein, 9 aa, synthetic construct
  source 1..9: note = Seed: LVVVGACGV (KRAS G12C)
VVVNGTCGL

SEQ ID NO: 3781 - protein, 9 aa, synthetic construct
  source 1..9: note = Seed: LVVVGACGV (KRAS G12C)
VVVNGTCGM

SEQ ID NO: 3782 - protein, 9 aa, synthetic construct
  source 1..9: note = Seed: LVVVGACGV (KRAS G12C)
VVVNGTCGV

SEQ ID NO: 3783 - protein, 9 aa, synthetic construct
  source 1..9: note = Seed: LVVVGACGV (KRAS G12C)
VVVNGTCGY

SEQ ID NO: 3784 - protein, 9 aa, synthetic construct
  source 1..9: note = Seed: LVVVGACGV (KRAS G12C)
VVVNGVCGF

SEQ ID NO: 3785 - protein, 9 aa, synthetic construct
  source 1..9: note = Seed: LVVVGACGV (KRAS G12C)
VVVNGVCGI

SEQ ID NO: 3786 - protein, 9 aa, synthetic construct
  source 1..9: note = Seed: LVVVGACGV (KRAS G12C)
VVVNGVCGL

SEQ ID NO: 3787 - protein, 9 aa, synthetic construct
  source 1..9: note = Seed: LVVVGACGV (KRAS G12C)
VVVNGVCGM

SEQ ID NO: 3788 - protein, 9 aa, synthetic construct
  source 1..9: note = Seed: LVVVGACGV (KRAS G12C)
VVVNGVCGV

SEQ ID NO: 3789 - protein, 9 aa, synthetic construct
  source 1..9: note = Seed: LVVVGACGV (KRAS G12C)
VVVNGVCGY

SEQ ID NO: 3790 - protein, 9 aa, synthetic construct
  source 1..9: note = Seed: LVVVGACGV (KRAS G12C)
VVVQGACGA

SEQ ID NO: 3791 - protein, 9 aa, synthetic construct
  source 1..9: note = Seed: LVVVGACGV (KRAS G12C)
VVVQGACGI

SEQ ID NO: 3792 - protein, 9 aa, synthetic construct
  source 1..9: note = Seed: LVVVGACGV (KRAS G12C)
VVVQGACGL

SEQ ID NO: 3793 - protein, 9 aa, synthetic construct
  source 1..9: note = Seed: LVVVGACGV (KRAS G12C)
VVVQGACGM

SEQ ID NO: 3794 - protein, 9 aa, synthetic construct
  source 1..9: note = Seed: LVVVGACGV (KRAS G12C)
VVVQGACGV

SEQ ID NO: 3795 - protein, 9 aa, synthetic construct
  source 1..9: note = Seed: LVVVGACGV (KRAS G12C)
VVVQGGCGI

SEQ ID NO: 3796 - protein, 9 aa, synthetic construct
  source 1..9: note = Seed: LVVVGACGV (KRAS G12C)
VVVQGGCGL

SEQ ID NO: 3797 - protein, 9 aa, synthetic construct
  source 1..9: note = Seed: LVVVGACGV (KRAS G12C)
VVVQGGCGV

SEQ ID NO: 3798 - protein, 9 aa, synthetic construct
  source 1..9: note = Seed: LVVVGACGV (KRAS G12C)
VVVQGNCGL

SEQ ID NO: 3799 - protein, 9 aa, synthetic construct
  source 1..9: note = Seed: LVVVGACGV (KRAS G12C)
VVVQGSCGI

SEQ ID NO: 3800 - protein, 9 aa, synthetic construct
  source 1..9: note = Seed: LVVVGACGV (KRAS G12C)
VVVQGSCGL

SEQ ID NO: 3801 - protein, 9 aa, synthetic construct
  source 1..9: note = Seed: LVVVGACGV (KRAS G12C)
VVVQGSCGV

SEQ ID NO: 3802 - protein, 9 aa, synthetic construct
  source 1..9: note = Seed: LVVVGACGV (KRAS G12C)
VVVSGACGA

SEQ ID NO: 3803 - protein, 9 aa, synthetic construct
  source 1..9: note = Seed: LVVVGACGV (KRAS G12C)
VVVSGACGI

SEQ ID NO: 3804 - protein, 9 aa, synthetic construct
  source 1..9: note = Seed: LVVVGACGV (KRAS G12C)
VVVSGACGL

SEQ ID NO: 3805 - protein, 9 aa, synthetic construct
  source 1..9: note = Seed: LVVVGACGV (KRAS G12C)
VVVSGACGM

SEQ ID NO: 3806 - protein, 9 aa, synthetic construct
  source 1..9: note = Seed: LVVVGACGV (KRAS G12C)
VVVSGACGV

SEQ ID NO: 3807 - protein, 9 aa, synthetic construct
  source 1..9: note = Seed: LVVVGACGV (KRAS G12C)
VVVSGNCGI

SEQ ID NO: 3808 - protein, 9 aa, synthetic construct
  source 1..9: note = Seed: LVVVGACGV (KRAS G12C)
VVVSGNCGV

SEQ ID NO: 3809 - protein, 9 aa, synthetic construct
  source 1..9: note = Seed: LVVVGACGV (KRAS G12C)
VVVSGSCGI

SEQ ID NO: 3810 - protein, 9 aa, synthetic construct
  source 1..9: note = Seed: LVVVGACGV (KRAS G12C)
VVVSGSCGL

SEQ ID NO: 3811 - protein, 9 aa, synthetic construct
  source 1..9: note = Seed: LVVVGACGV (KRAS G12C)
VVVSGSCGV

SEQ ID NO: 3812 - protein, 9 aa, synthetic construct
  source 1..9: note = Seed: LVVVGACGV (KRAS G12C)
VVVTGSCGI

SEQ ID NO: 3813 - protein, 9 aa, synthetic construct
  source 1..9: note = Seed: LVVVGACGV (KRAS G12C)
VVVVGACGA

SEQ ID NO: 3814 - protein, 9 aa, synthetic construct
  source 1..9: note = Seed: LVVVGACGV (KRAS G12C)
VVVVGACGL

SEQ ID NO: 3815 - protein, 9 aa, synthetic construct
  source 1..9: note = Seed: LVVVGACGV (KRAS G12C)
VVVVGACGV

SEQ ID NO: 3816 - protein, 9 aa, synthetic construct
  source 1..9: note = Seed: LVVVGACGV (KRAS G12C)
VVVVGPCGL

SEQ ID NO: 3817 - protein, 9 aa, synthetic construct
  source 1..9: note = Seed: LVVVGACGV (KRAS G12C)
VVVVGPCGV

SEQ ID NO: 3818 - protein, 9 aa, synthetic construct
  source 1..9: note = Seed: LVVVGACGV (KRAS G12C)
VVVVGRCGH

SEQ ID NO: 3819 - protein, 9 aa, synthetic construct
  source 1..9: note = Seed: LVVVGACGV (KRAS G12C)
VVVVGSCGV

SEQ ID NO: 3820 - protein, 9 aa, synthetic construct
  source 1..9: note = Seed: LVVVGACGV (KRAS G12C)
VVVWGNCGI

SEQ ID NO: 3821 - protein, 9 aa, synthetic construct
  source 1..9: note = Seed: LVVVGACGV (KRAS G12C)
VVVWGNCGL

SEQ ID NO: 3822 - protein, 9 aa, synthetic construct
  source 1..9: note = Seed: LVVVGACGV (KRAS G12C)
VVVWGSCGL

SEQ ID NO: 3823 - protein, 9 aa, synthetic construct
  source 1..9: note = Seed: LVVVGACGV (KRAS G12C)
VVVYGNCGA

SEQ ID NO: 3824 - protein, 9 aa, synthetic construct
  source 1..9: note = Seed: LVVVGACGV (KRAS G12C)
VVVYGNCGF

SEQ ID NO: 3825 - protein, 9 aa, synthetic construct
  source 1..9: note = Seed: LVVVGACGV (KRAS G12C)
VVVYGNCGI

SEQ ID NO: 3826 - protein, 9 aa, synthetic construct
  source 1..9: note = Seed: LVVVGACGV (KRAS G12C)
VVVYGNCGL

SEQ ID NO: 3827 - protein, 9 aa, synthetic construct
  source 1..9: note = Seed: LVVVGACGV (KRAS G12C)
VVVYGNCGM

SEQ ID NO: 3828 - protein, 9 aa, synthetic construct
  source 1..9: note = Seed: LVVVGACGV (KRAS G12C)
VVVYGNCGV

SEQ ID NO: 3829 - protein, 9 aa, synthetic construct
  source 1..9: note = Seed: LVVVGACGV (KRAS G12C)
VVVYGSCGA

SEQ ID NO: 3830 - protein, 9 aa, synthetic construct
  source 1..9: note = Seed: LVVVGACGV (KRAS G12C)
VVVYGSCGI

SEQ ID NO: 3831 - protein, 9 aa, synthetic construct
  source 1..9: note = Seed: LVVVGACGV (KRAS G12C)
VVVYGSCGL

SEQ ID NO: 3832 - protein, 9 aa, synthetic construct
  source 1..9: note = Seed: LVVVGACGV (KRAS G12C)
VVVYGSCGM

SEQ ID NO: 3833 - protein, 9 aa, synthetic construct
  source 1..9: note = Seed: LVVVGACGV (KRAS G12C)
VVVYGSCGV

SEQ ID NO: 3834 - protein, 9 aa, synthetic construct
  source 1..9: note = Seed: LVVVGACGV (KRAS G12C)
VVVYGTCGL

SEQ ID NO: 3835 - protein, 9 aa, synthetic construct
  source 1..9: note = Seed: LVVVGACGV (KRAS G12C)
WVVAGACGA

SEQ ID NO: 3836 - protein, 9 aa, synthetic construct
  source 1..9: note = Seed: LVVVGACGV (KRAS G12C)
WVVAGACGF

SEQ ID NO: 3837 - protein, 9 aa, synthetic construct
  source 1..9: note = Seed: LVVVGACGV (KRAS G12C)
WVVAGACGG

SEQ ID NO: 3838 - protein, 9 aa, synthetic construct
  source 1..9: note = Seed: LVVVGACGV (KRAS G12C)
WVVAGACGH

SEQ ID NO: 3839 - protein, 9 aa, synthetic construct
  source 1..9: note = Seed: LVVVGACGV (KRAS G12C)
WVVAGACGI

SEQ ID NO: 3840 - protein, 9 aa, synthetic construct
  source 1..9: note = Seed: LVVVGACGV (KRAS G12C)
WVVAGACGL

SEQ ID NO: 3841 - protein, 9 aa, synthetic construct
  source 1..9: note = Seed: LVVVGACGV (KRAS G12C)
WVVAGACGM

SEQ ID NO: 3842 - protein, 9 aa, synthetic construct
  source 1..9: note = Seed: LVVVGACGV (KRAS G12C)
WVVAGACGN

SEQ ID NO: 3843 - protein, 9 aa, synthetic construct
  source 1..9: note = Seed: LVVVGACGV (KRAS G12C)
WVVAGACGS

SEQ ID NO: 3844 - protein, 9 aa, synthetic construct
  source 1..9: note = Seed: LVVVGACGV (KRAS G12C)
WVVAGACGT

SEQ ID NO: 3845 - protein, 9 aa, synthetic construct
  source 1..9: note = Seed: LVVVGACGV (KRAS G12C)
WVVAGACGV

SEQ ID NO: 3846 - protein, 9 aa, synthetic construct
  source 1..9: note = Seed: LVVVGACGV (KRAS G12C)
WVVAGACGY

SEQ ID NO: 3847 - protein, 9 aa, synthetic construct
  source 1..9: note = Seed: LVVVGACGV (KRAS G12C)
WVVAGGCGA

SEQ ID NO: 3848 - protein, 9 aa, synthetic construct
  source 1..9: note = Seed: LVVVGACGV (KRAS G12C)
WVVAGGCGI

SEQ ID NO: 3849 - protein, 9 aa, synthetic construct
  source 1..9: note = Seed: LVVVGACGV (KRAS G12C)
WVVAGGCGL

SEQ ID NO: 3850 - protein, 9 aa, synthetic construct
  source 1..9: note = Seed: LVVVGACGV (KRAS G12C)
WVVAGGCGM

SEQ ID NO: 3851 - protein, 9 aa, synthetic construct
  source 1..9: note = Seed: LVVVGACGV (KRAS G12C)
WVVAGGCGS

SEQ ID NO: 3852 - protein, 9 aa, synthetic construct
  source 1..9: note = Seed: LVVVGACGV (KRAS G12C)
WVVAGGCGT

SEQ ID NO: 3853 - protein, 9 aa, synthetic construct
  source 1..9: note = Seed: LVVVGACGV (KRAS G12C)
WVVAGGCGV

SEQ ID NO: 3854 - protein, 9 aa, synthetic construct
  source 1..9: note = Seed: LVVVGACGV (KRAS G12C)
WVVAGNCGA

SEQ ID NO: 3855 - protein, 9 aa, synthetic construct
  source 1..9: note = Seed: LVVVGACGV (KRAS G12C)
WVVAGNCGI

SEQ ID NO: 3856 - protein, 9 aa, synthetic construct
  source 1..9: note = Seed: LVVVGACGV (KRAS G12C)
WVVAGNCGL

SEQ ID NO: 3857 - protein, 9 aa, synthetic construct
  source 1..9: note = Seed: LVVVGACGV (KRAS G12C)
WVVAGNCGM

SEQ ID NO: 3858 - protein, 9 aa, synthetic construct
  source 1..9: note = Seed: LVVVGACGV (KRAS G12C)
WVVAGNCGS

SEQ ID NO: 3859 - protein, 9 aa, synthetic construct
  source 1..9: note = Seed: LVVVGACGV (KRAS G12C)
WVVAGNCGT

SEQ ID NO: 3860 - protein, 9 aa, synthetic construct
  source 1..9: note = Seed: LVVVGACGV (KRAS G12C)
WVVAGNCGV

SEQ ID NO: 3861 - protein, 9 aa, synthetic construct
  source 1..9: note = Seed: LVVVGACGV (KRAS G12C)
WVVAGPCGA

SEQ ID NO: 3862 - protein, 9 aa, synthetic construct
  source 1..9: note = Seed: LVVVGACGV (KRAS G12C)
WVVAGPCGI

SEQ ID NO: 3863 - protein, 9 aa, synthetic construct
  source 1..9: note = Seed: LVVVGACGV (KRAS G12C)
WVVAGPCGL

SEQ ID NO: 3864 - protein, 9 aa, synthetic construct
  source 1..9: note = Seed: LVVVGACGV (KRAS G12C)
WVVAGPCGM

SEQ ID NO: 3865 - protein, 9 aa, synthetic construct
  source 1..9: note = Seed: LVVVGACGV (KRAS G12C)
WVVAGPCGS

SEQ ID NO: 3866 - protein, 9 aa, synthetic construct
  source 1..9: note = Seed: LVVVGACGV (KRAS G12C)
WVVAGPCGT

SEQ ID NO: 3867 - protein, 9 aa, synthetic construct
  source 1..9: note = Seed: LVVVGACGV (KRAS G12C)
WVVAGPCGV

SEQ ID NO: 3868 - protein, 9 aa, synthetic construct
  source 1..9: note = Seed: LVVVGACGV (KRAS G12C)
WVVAGSCGA

SEQ ID NO: 3869 - protein, 9 aa, synthetic construct
  source 1..9: note = Seed: LVVVGACGV (KRAS G12C)
WVVAGSCGF

SEQ ID NO: 3870 - protein, 9 aa, synthetic construct
  source 1..9: note = Seed: LVVVGACGV (KRAS G12C)
WVVAGSCGI

SEQ ID NO: 3871 - protein, 9 aa, synthetic construct
  source 1..9: note = Seed: LVVVGACGV (KRAS G12C)
WVVAGSCGL

SEQ ID NO: 3872 - protein, 9 aa, synthetic construct
  source 1..9: note = Seed: LVVVGACGV (KRAS G12C)
WVVAGSCGM

SEQ ID NO: 3873 - protein, 9 aa, synthetic construct
  source 1..9: note = Seed: LVVVGACGV (KRAS G12C)
WVVAGSCGS

SEQ ID NO: 3874 - protein, 9 aa, synthetic construct
  source 1..9: note = Seed: LVVVGACGV (KRAS G12C)
WVVAGSCGT

SEQ ID NO: 3875 - protein, 9 aa, synthetic construct
  source 1..9: note = Seed: LVVVGACGV (KRAS G12C)
WVVAGSCGV

SEQ ID NO: 3876 - protein, 9 aa, synthetic construct
  source 1..9: note = Seed: LVVVGACGV (KRAS G12C)
WVVAGTCGA

SEQ ID NO: 3877 - protein, 9 aa, synthetic construct
  source 1..9: note = Seed: LVVVGACGV (KRAS G12C)
WVVAGTCGI

SEQ ID NO: 3878 - protein, 9 aa, synthetic construct
  source 1..9: note = Seed: LVVVGACGV (KRAS G12C)
WVVAGTCGL

SEQ ID NO: 3879 - protein, 9 aa, synthetic construct
  source 1..9: note = Seed: LVVVGACGV (KRAS G12C)
WVVAGTCGM

SEQ ID NO: 3880 - protein, 9 aa, synthetic construct
  source 1..9: note = Seed: LVVVGACGV (KRAS G12C)
WVVAGTCGS

SEQ ID NO: 3881 - protein, 9 aa, synthetic construct
  source 1..9: note = Seed: LVVVGACGV (KRAS G12C)
WVVAGTCGT

SEQ ID NO: 3882 - protein, 9 aa, synthetic construct
  source 1..9: note = Seed: LVVVGACGV (KRAS G12C)
WVVAGTCGV

SEQ ID NO: 3883 - protein, 9 aa, synthetic construct
  source 1..9: note = Seed: LVVVGACGV (KRAS G12C)
WVVAGVCGA

SEQ ID NO: 3884 - protein, 9 aa, synthetic construct
  source 1..9: note = Seed: LVVVGACGV (KRAS G12C)
WVVAGVCGI

SEQ ID NO: 3885 - protein, 9 aa, synthetic construct
  source 1..9: note = Seed: LVVVGACGV (KRAS G12C)
WVVAGVCGL

SEQ ID NO: 3886 - protein, 9 aa, synthetic construct
  source 1..9: note = Seed: LVVVGACGV (KRAS G12C)
WVVAGVCGM

SEQ ID NO: 3887 - protein, 9 aa, synthetic construct
  source 1..9: note = Seed: LVVVGACGV (KRAS G12C)
WVVAGVCGV

SEQ ID NO: 3888 - protein, 9 aa, synthetic construct
  source 1..9: note = Seed: LVVVGACGV (KRAS G12C)
WVVEGACGA

SEQ ID NO: 3889 - protein, 9 aa, synthetic construct
  source 1..9: note = Seed: LVVVGACGV (KRAS G12C)
WVVEGACGI

SEQ ID NO: 3890 - protein, 9 aa, synthetic construct
  source 1..9: note = Seed: LVVVGACGV (KRAS G12C)
WVVEGACGL

SEQ ID NO: 3891 - protein, 9 aa, synthetic construct
  source 1..9: note = Seed: LVVVGACGV (KRAS G12C)
WVVEGACGM

SEQ ID NO: 3892 - protein, 9 aa, synthetic construct
  source 1..9: note = Seed: LVVVGACGV (KRAS G12C)
WVVEGACGV

SEQ ID NO: 3893 - protein, 9 aa, synthetic construct
  source 1..9: note = Seed: LVVVGACGV (KRAS G12C)
WVVEGGCGA

SEQ ID NO: 3894 - protein, 9 aa, synthetic construct
  source 1..9: note = Seed: LVVVGACGV (KRAS G12C)
WVVEGGCGI

SEQ ID NO: 3895 - protein, 9 aa, synthetic construct
  source 1..9: note = Seed: LVVVGACGV (KRAS G12C)
WVVEGGCGL

SEQ ID NO: 3896 - protein, 9 aa, synthetic construct
  source 1..9: note = Seed: LVVVGACGV (KRAS G12C)
WVVEGGCGV

SEQ ID NO: 3897 - protein, 9 aa, synthetic construct
  source 1..9: note = Seed: LVVVGACGV (KRAS G12C)
WVVEGNCGI

SEQ ID NO: 3898 - protein, 9 aa, synthetic construct
  source 1..9: note = Seed: LVVVGACGV (KRAS G12C)
WVVEGNCGL

SEQ ID NO: 3899 - protein, 9 aa, synthetic construct
  source 1..9: note = Seed: LVVVGACGV (KRAS G12C)
WVVEGNCGV

SEQ ID NO: 3900 - protein, 9 aa, synthetic construct
  source 1..9: note = Seed: LVVVGACGV (KRAS G12C)
WVVEGPCGL

SEQ ID NO: 3901 - protein, 9 aa, synthetic construct
  source 1..9: note = Seed: LVVVGACGV (KRAS G12C)
WVVEGSCGA

SEQ ID NO: 3902 - protein, 9 aa, synthetic construct
  source 1..9: note = Seed: LVVVGACGV (KRAS G12C)
WVVEGSCGI

SEQ ID NO: 3903 - protein, 9 aa, synthetic construct
  source 1..9: note = Seed: LVVVGACGV (KRAS G12C)
WVVEGSCGL

SEQ ID NO: 3904 - protein, 9 aa, synthetic construct
  source 1..9: note = Seed: LVVVGACGV (KRAS G12C)
WVVEGSCGV

SEQ ID NO: 3905 - protein, 9 aa, synthetic construct
  source 1..9: note = Seed: LVVVGACGV (KRAS G12C)
WVVFGACGA

SEQ ID NO: 3906 - protein, 9 aa, synthetic construct
  source 1..9: note = Seed: LVVVGACGV (KRAS G12C)
WVVFGACGI

SEQ ID NO: 3907 - protein, 9 aa, synthetic construct
  source 1..9: note = Seed: LVVVGACGV (KRAS G12C)
WVVFGACGL

SEQ ID NO: 3908 - protein, 9 aa, synthetic construct
  source 1..9: note = Seed: LVVVGACGV (KRAS G12C)
WVVFGACGV

SEQ ID NO: 3909 - protein, 9 aa, synthetic construct
  source 1..9: note = Seed: LVVVGACGV (KRAS G12C)
WVVFGPCGA

SEQ ID NO: 3910 - protein, 9 aa, synthetic construct
  source 1..9: note = Seed: LVVVGACGV (KRAS G12C)
WVVFGPCGI

SEQ ID NO: 3911 - protein, 9 aa, synthetic construct
  source 1..9: note = Seed: LVVVGACGV (KRAS G12C)
WVVFGPCGL

SEQ ID NO: 3912 - protein, 9 aa, synthetic construct
  source 1..9: note = Seed: LVVVGACGV (KRAS G12C)
WVVFGPCGV

SEQ ID NO: 3913 - protein, 9 aa, synthetic construct
  source 1..9: note = Seed: LVVVGACGV (KRAS G12C)
WVVFGSCGA

SEQ ID NO: 3914 - protein, 9 aa, synthetic construct
  source 1..9: note = Seed: LVVVGACGV (KRAS G12C)
WVVGGACGI

SEQ ID NO: 3915 - protein, 9 aa, synthetic construct
  source 1..9: note = Seed: LVVVGACGV (KRAS G12C)
WVVGGACGL

SEQ ID NO: 3916 - protein, 9 aa, synthetic construct
  source 1..9: note = Seed: LVVVGACGV (KRAS G12C)
WVVGGACGV

SEQ ID NO: 3917 - protein, 9 aa, synthetic construct
  source 1..9: note = Seed: LVVVGACGV (KRAS G12C)
WVVGGSCGL

SEQ ID NO: 3918 - protein, 9 aa, synthetic construct
  source 1..9: note = Seed: LVVVGACGV (KRAS G12C)
WVVHGACGA

SEQ ID NO: 3919 - protein, 9 aa, synthetic construct
  source 1..9: note = Seed: LVVVGACGV (KRAS G12C)
WVVHGACGI

SEQ ID NO: 3920 - protein, 9 aa, synthetic construct
  source 1..9: note = Seed: LVVVGACGV (KRAS G12C)
WVVHGACGL

SEQ ID NO: 3921 - protein, 9 aa, synthetic construct
  source 1..9: note = Seed: LVVVGACGV (KRAS G12C)
WVVHGACGV

SEQ ID NO: 3922 - protein, 9 aa, synthetic construct
  source 1..9: note = Seed: LVVVGACGV (KRAS G12C)
WVVIGACGA

SEQ ID NO: 3923 - protein, 9 aa, synthetic construct
  source 1..9: note = Seed: LVVVGACGV (KRAS G12C)
WVVIGACGG

SEQ ID NO: 3924 - protein, 9 aa, synthetic construct
  source 1..9: note = Seed: LVVVGACGV (KRAS G12C)
WVVIGACGH

SEQ ID NO: 3925 - protein, 9 aa, synthetic construct
  source 1..9: note = Seed: LVVVGACGV (KRAS G12C)
WVVIGACGI

SEQ ID NO: 3926 - protein, 9 aa, synthetic construct
  source 1..9: note = Seed: LVVVGACGV (KRAS G12C)
WVVIGACGL

SEQ ID NO: 3927 - protein, 9 aa, synthetic construct
  source 1..9: note = Seed: LVVVGACGV (KRAS G12C)
WVVIGACGM

SEQ ID NO: 3928 - protein, 9 aa, synthetic construct
  source 1..9: note = Seed: LVVVGACGV (KRAS G12C)
WVVIGACGN

SEQ ID NO: 3929 - protein, 9 aa, synthetic construct
  source 1..9: note = Seed: LVVVGACGV (KRAS G12C)
WVVIGACGS

SEQ ID NO: 3930 - protein, 9 aa, synthetic construct
  source 1..9: note = Seed: LVVVGACGV (KRAS G12C)
WVVIGACGT

SEQ ID NO: 3931 - protein, 9 aa, synthetic construct
  source 1..9: note = Seed: LVVVGACGV (KRAS G12C)
WVVIGACGV

SEQ ID NO: 3932 - protein, 9 aa, synthetic construct
  source 1..9: note = Seed: LVVVGACGV (KRAS G12C)
WVVIGGCGA

SEQ ID NO: 3933 - protein, 9 aa, synthetic construct
  source 1..9: note = Seed: LVVVGACGV (KRAS G12C)
WVVIGGCGI

SEQ ID NO: 3934 - protein, 9 aa, synthetic construct
  source 1..9: note = Seed: LVVVGACGV (KRAS G12C)
WVVIGGCGL

SEQ ID NO: 3935 - protein, 9 aa, synthetic construct
  source 1..9: note = Seed: LVVVGACGV (KRAS G12C)
WVVIGGCGM

SEQ ID NO: 3936 - protein, 9 aa, synthetic construct
  source 1..9: note = Seed: LVVVGACGV (KRAS G12C)
WVVIGGCGN

SEQ ID NO: 3937 - protein, 9 aa, synthetic construct
  source 1..9: note = Seed: LVVVGACGV (KRAS G12C)
WVVIGGCGS

SEQ ID NO: 3938 - protein, 9 aa, synthetic construct
  source 1..9: note = Seed: LVVVGACGV (KRAS G12C)
WVVIGGCGT

SEQ ID NO: 3939 - protein, 9 aa, synthetic construct
  source 1..9: note = Seed: LVVVGACGV (KRAS G12C)
WVVIGGCGV

SEQ ID NO: 3940 - protein, 9 aa, synthetic construct
  source 1..9: note = Seed: LVVVGACGV (KRAS G12C)
WVVIGNCGA

SEQ ID NO: 3941 - protein, 9 aa, synthetic construct
  source 1..9: note = Seed: LVVVGACGV (KRAS G12C)
WVVIGNCGI

SEQ ID NO: 3942 - protein, 9 aa, synthetic construct
  source 1..9: note = Seed: LVVVGACGV (KRAS G12C)
WVVIGNCGL

SEQ ID NO: 3943 - protein, 9 aa, synthetic construct
  source 1..9: note = Seed: LVVVGACGV (KRAS G12C)
WVVIGNCGM

SEQ ID NO: 3944 - protein, 9 aa, synthetic construct
  source 1..9: note = Seed: LVVVGACGV (KRAS G12C)
WVVIGNCGS

SEQ ID NO: 3945 - protein, 9 aa, synthetic construct
  source 1..9: note = Seed: LVVVGACGV (KRAS G12C)
WVVIGNCGT

SEQ ID NO: 3946 - protein, 9 aa, synthetic construct
  source 1..9: note = Seed: LVVVGACGV (KRAS G12C)
WVVIGNCGV

SEQ ID NO: 3947 - protein, 9 aa, synthetic construct
  source 1..9: note = Seed: LVVVGACGV (KRAS G12C)
WVVIGPCGA

SEQ ID NO: 3948 - protein, 9 aa, synthetic construct
  source 1..9: note = Seed: LVVVGACGV (KRAS G12C)
WVVIGPCGI

SEQ ID NO: 3949 - protein, 9 aa, synthetic construct
  source 1..9: note = Seed: LVVVGACGV (KRAS G12C)
WVVIGPCGL

SEQ ID NO: 3950 - protein, 9 aa, synthetic construct
  source 1..9: note = Seed: LVVVGACGV (KRAS G12C)
WVVIGPCGM

SEQ ID NO: 3951 - protein, 9 aa, synthetic construct
  source 1..9: note = Seed: LVVVGACGV (KRAS G12C)
WVVIGPCGN

SEQ ID NO: 3952 - protein, 9 aa, synthetic construct
  source 1..9: note = Seed: LVVVGACGV (KRAS G12C)
WVVIGPCGS

SEQ ID NO: 3953 - protein, 9 aa, synthetic construct
  source 1..9: note = Seed: LVVVGACGV (KRAS G12C)
WVVIGPCGT

SEQ ID NO: 3954 - protein, 9 aa, synthetic construct
  source 1..9: note = Seed: LVVVGACGV (KRAS G12C)
WVVIGPCGV

SEQ ID NO: 3955 - protein, 9 aa, synthetic construct
  source 1..9: note = Seed: LVVVGACGV (KRAS G12C)
WVVIGSCGA

SEQ ID NO: 3956 - protein, 9 aa, synthetic construct
  source 1..9: note = Seed: LVVVGACGV (KRAS G12C)
WVVIGSCGI

SEQ ID NO: 3957 - protein, 9 aa, synthetic construct
  source 1..9: note = Seed: LVVVGACGV (KRAS G12C)
WVVIGSCGL

SEQ ID NO: 3958 - protein, 9 aa, synthetic construct
  source 1..9: note = Seed: LVVVGACGV (KRAS G12C)
WVVIGSCGM

SEQ ID NO: 3959 - protein, 9 aa, synthetic construct
  source 1..9: note = Seed: LVVVGACGV (KRAS G12C)
WVVIGSCGN

SEQ ID NO: 3960 - protein, 9 aa, synthetic construct
  source 1..9: note = Seed: LVVVGACGV (KRAS G12C)
WVVIGSCGS

SEQ ID NO: 3961 - protein, 9 aa, synthetic construct
  source 1..9: note = Seed: LVVVGACGV (KRAS G12C)
WVVIGSCGT

SEQ ID NO: 3962 - protein, 9 aa, synthetic construct
  source 1..9: note = Seed: LVVVGACGV (KRAS G12C)
WVVIGSCGV

SEQ ID NO: 3963 - protein, 9 aa, synthetic construct
  source 1..9: note = Seed: LVVVGACGV (KRAS G12C)
WVVIGTCGA

SEQ ID NO: 3964 - protein, 9 aa, synthetic construct
  source 1..9: note = Seed: LVVVGACGV (KRAS G12C)
WVVIGTCGI

SEQ ID NO: 3965 - protein, 9 aa, synthetic construct
  source 1..9: note = Seed: LVVVGACGV (KRAS G12C)
WVVIGTCGL

SEQ ID NO: 3966 - protein, 9 aa, synthetic construct
  source 1..9: note = Seed: LVVVGACGV (KRAS G12C)
WVVIGTCGM

SEQ ID NO: 3967 - protein, 9 aa, synthetic construct
  source 1..9: note = Seed: LVVVGACGV (KRAS G12C)
WVVIGTCGN

SEQ ID NO: 3968 - protein, 9 aa, synthetic construct
  source 1..9: note = Seed: LVVVGACGV (KRAS G12C)
WVVIGTCGS

SEQ ID NO: 3969 - protein, 9 aa, synthetic construct
  source 1..9: note = Seed: LVVVGACGV (KRAS G12C)
WVVIGTCGT

SEQ ID NO: 3970 - protein, 9 aa, synthetic construct
  source 1..9: note = Seed: LVVVGACGV (KRAS G12C)
WVVIGTCGV

SEQ ID NO: 3971 - protein, 9 aa, synthetic construct
  source 1..9: note = Seed: LVVVGACGV (KRAS G12C)
WVVIGVCGN

SEQ ID NO: 3972 - protein, 9 aa, synthetic construct
  source 1..9: note = Seed: LVVVGACGV (KRAS G12C)
WVVLGACGA

SEQ ID NO: 3973 - protein, 9 aa, synthetic construct
  source 1..9: note = Seed: LVVVGACGV (KRAS G12C)
WVVLGACGF

SEQ ID NO: 3974 - protein, 9 aa, synthetic construct
  source 1..9: note = Seed: LVVVGACGV (KRAS G12C)
WVVLGACGG

SEQ ID NO: 3975 - protein, 9 aa, synthetic construct
  source 1..9: note = Seed: LVVVGACGV (KRAS G12C)
WVVLGACGH

SEQ ID NO: 3976 - protein, 9 aa, synthetic construct
  source 1..9: note = Seed: LVVVGACGV (KRAS G12C)
WVVLGACGI

SEQ ID NO: 3977 - protein, 9 aa, synthetic construct
  source 1..9: note = Seed: LVVVGACGV (KRAS G12C)
WVVLGACGK

SEQ ID NO: 3978 - protein, 9 aa, synthetic construct
  source 1..9: note = Seed: LVVVGACGV (KRAS G12C)
WVVLGACGL

SEQ ID NO: 3979 - protein, 9 aa, synthetic construct
  source 1..9: note = Seed: LVVVGACGV (KRAS G12C)
WVVLGACGM

SEQ ID NO: 3980 - protein, 9 aa, synthetic construct
  source 1..9: note = Seed: LVVVGACGV (KRAS G12C)
WVVLGACGN

SEQ ID NO: 3981 - protein, 9 aa, synthetic construct
  source 1..9: note = Seed: LVVVGACGV (KRAS G12C)
WVVLGACGP

SEQ ID NO: 3982 - protein, 9 aa, synthetic construct
  source 1..9: note = Seed: LVVVGACGV (KRAS G12C)
WVVLGACGQ

SEQ ID NO: 3983 - protein, 9 aa, synthetic construct
  source 1..9: note = Seed: LVVVGACGV (KRAS G12C)
WVVLGACGR

SEQ ID NO: 3984 - protein, 9 aa, synthetic construct
  source 1..9: note = Seed: LVVVGACGV (KRAS G12C)
WVVLGACGS

SEQ ID NO: 3985 - protein, 9 aa, synthetic construct
  source 1..9: note = Seed: LVVVGACGV (KRAS G12C)
WVVLGACGT

SEQ ID NO: 3986 - protein, 9 aa, synthetic construct
  source 1..9: note = Seed: LVVVGACGV (KRAS G12C)
WVVLGACGV

SEQ ID NO: 3987 - protein, 9 aa, synthetic construct
  source 1..9: note = Seed: LVVVGACGV (KRAS G12C)
WVVLGACGY

SEQ ID NO: 3988 - protein, 9 aa, synthetic construct
  source 1..9: note = Seed: LVVVGACGV (KRAS G12C)
WVVLGDCGL

SEQ ID NO: 3989 - protein, 9 aa, synthetic construct
  source 1..9: note = Seed: LVVVGACGV (KRAS G12C)
WVVLGDCGV

SEQ ID NO: 3990 - protein, 9 aa, synthetic construct
  source 1..9: note = Seed: LVVVGACGV (KRAS G12C)
WVVLGGCGA

SEQ ID NO: 3991 - protein, 9 aa, synthetic construct
  source 1..9: note = Seed: LVVVGACGV (KRAS G12C)
WVVLGGCGG

SEQ ID NO: 3992 - protein, 9 aa, synthetic construct
  source 1..9: note = Seed: LVVVGACGV (KRAS G12C)
WVVLGGCGH

SEQ ID NO: 3993 - protein, 9 aa, synthetic construct
  source 1..9: note = Seed: LVVVGACGV (KRAS G12C)
WVVLGGCGI

SEQ ID NO: 3994 - protein, 9 aa, synthetic construct
  source 1..9: note = Seed: LVVVGACGV (KRAS G12C)
WVVLGGCGL

SEQ ID NO: 3995 - protein, 9 aa, synthetic construct
  source 1..9: note = Seed: LVVVGACGV (KRAS G12C)
WVVLGGCGM

SEQ ID NO: 3996 - protein, 9 aa, synthetic construct
  source 1..9: note = Seed: LVVVGACGV (KRAS G12C)
WVVLGGCGN

SEQ ID NO: 3997 - protein, 9 aa, synthetic construct
  source 1..9: note = Seed: LVVVGACGV (KRAS G12C)
WVVLGGCGP

SEQ ID NO: 3998 - protein, 9 aa, synthetic construct
  source 1..9: note = Seed: LVVVGACGV (KRAS G12C)
WVVLGGCGQ

SEQ ID NO: 3999 - protein, 9 aa, synthetic construct
  source 1..9: note = Seed: LVVVGACGV (KRAS G12C)
WVVLGGCGS

SEQ ID NO: 4000 - protein, 9 aa, synthetic construct
  source 1..9: note = Seed: LVVVGACGV (KRAS G12C)
WVVLGGCGT

SEQ ID NO: 4001 - protein, 9 aa, synthetic construct
  source 1..9: note = Seed: LVVVGACGV (KRAS G12C)
WVVLGGCGV

SEQ ID NO: 4002 - protein, 9 aa, synthetic construct
  source 1..9: note = Seed: LVVVGACGV (KRAS G12C)
WVVLGGCGY

SEQ ID NO: 4003 - protein, 9 aa, synthetic construct
  source 1..9: note = Seed: LVVVGACGV (KRAS G12C)
WVVLGICGN

SEQ ID NO: 4004 - protein, 9 aa, synthetic construct
  source 1..9: note = Seed: LVVVGACGV (KRAS G12C)
WVVLGNCGA

SEQ ID NO: 4005 - protein, 9 aa, synthetic construct
  source 1..9: note = Seed: LVVVGACGV (KRAS G12C)
WVVLGNCGF

SEQ ID NO: 4006 - protein, 9 aa, synthetic construct
  source 1..9: note = Seed: LVVVGACGV (KRAS G12C)
WVVLGNCGG

SEQ ID NO: 4007 - protein, 9 aa, synthetic construct
  source 1..9: note = Seed: LVVVGACGV (KRAS G12C)
WVVLGNCGH

SEQ ID NO: 4008 - protein, 9 aa, synthetic construct
  source 1..9: note = Seed: LVVVGACGV (KRAS G12C)
WVVLGNCGI

SEQ ID NO: 4009 - protein, 9 aa, synthetic construct
  source 1..9: note = Seed: LVVVGACGV (KRAS G12C)
WVVLGNCGL

SEQ ID NO: 4010 - protein, 9 aa, synthetic construct
  source 1..9: note = Seed: LVVVGACGV (KRAS G12C)
WVVLGNCGM

SEQ ID NO: 4011 - protein, 9 aa, synthetic construct
  source 1..9: note = Seed: LVVVGACGV (KRAS G12C)
WVVLGNCGN

SEQ ID NO: 4012 - protein, 9 aa, synthetic construct
  source 1..9: note = Seed: LVVVGACGV (KRAS G12C)
WVVLGNCGS

SEQ ID NO: 4013 - protein, 9 aa, synthetic construct
  source 1..9: note = Seed: LVVVGACGV (KRAS G12C)
WVVLGNCGT

SEQ ID NO: 4014 - protein, 9 aa, synthetic construct
  source 1..9: note = Seed: LVVVGACGV (KRAS G12C)
WVVLGNCGV

SEQ ID NO: 4015 - protein, 9 aa, synthetic construct
  source 1..9: note = Seed: LVVVGACGV (KRAS G12C)
WVVLGPCGA

SEQ ID NO: 4016 - protein, 9 aa, synthetic construct
  source 1..9: note = Seed: LVVVGACGV (KRAS G12C)
WVVLGPCGF

SEQ ID NO: 4017 - protein, 9 aa, synthetic construct
  source 1..9: note = Seed: LVVVGACGV (KRAS G12C)
WVVLGPCGG

SEQ ID NO: 4018 - protein, 9 aa, synthetic construct
  source 1..9: note = Seed: LVVVGACGV (KRAS G12C)
WVVLGPCGH

SEQ ID NO: 4019 - protein, 9 aa, synthetic construct
  source 1..9: note = Seed: LVVVGACGV (KRAS G12C)
WVVLGPCGI

SEQ ID NO: 4020 - protein, 9 aa, synthetic construct
  source 1..9: note = Seed: LVVVGACGV (KRAS G12C)
WVVLGPCGL

SEQ ID NO: 4021 - protein, 9 aa, synthetic construct
  source 1..9: note = Seed: LVVVGACGV (KRAS G12C)
WVVLGPCGM

SEQ ID NO: 4022 - protein, 9 aa, synthetic construct
  source 1..9: note = Seed: LVVVGACGV (KRAS G12C)
WVVLGPCGN

SEQ ID NO: 4023 - protein, 9 aa, synthetic construct
  source 1..9: note = Seed: LVVVGACGV (KRAS G12C)
WVVLGPCGS

SEQ ID NO: 4024 - protein, 9 aa, synthetic construct
  source 1..9: note = Seed: LVVVGACGV (KRAS G12C)
WVVLGPCGT

SEQ ID NO: 4025 - protein, 9 aa, synthetic construct
  source 1..9: note = Seed: LVVVGACGV (KRAS G12C)
WVVLGPCGV

SEQ ID NO: 4026 - protein, 9 aa, synthetic construct
  source 1..9: note = Seed: LVVVGACGV (KRAS G12C)
WVVLGPCGY

SEQ ID NO: 4027 - protein, 9 aa, synthetic construct
  source 1..9: note = Seed: LVVVGACGV (KRAS G12C)
WVVLGSCGA

SEQ ID NO: 4028 - protein, 9 aa, synthetic construct
  source 1..9: note = Seed: LVVVGACGV (KRAS G12C)
WVVLGSCGG

SEQ ID NO: 4029 - protein, 9 aa, synthetic construct
  source 1..9: note = Seed: LVVVGACGV (KRAS G12C)
WVVLGSCGH

SEQ ID NO: 4030 - protein, 9 aa, synthetic construct
  source 1..9: note = Seed: LVVVGACGV (KRAS G12C)
WVVLGSCGI

SEQ ID NO: 4031 - protein, 9 aa, synthetic construct
  source 1..9: note = Seed: LVVVGACGV (KRAS G12C)
WVVLGSCGK

SEQ ID NO: 4032 - protein, 9 aa, synthetic construct
  source 1..9: note = Seed: LVVVGACGV (KRAS G12C)
WVVLGSCGL

SEQ ID NO: 4033 - protein, 9 aa, synthetic construct
  source 1..9: note = Seed: LVVVGACGV (KRAS G12C)
WVVLGSCGM

SEQ ID NO: 4034 - protein, 9 aa, synthetic construct
  source 1..9: note = Seed: LVVVGACGV (KRAS G12C)
WVVLGSCGN

SEQ ID NO: 4035 - protein, 9 aa, synthetic construct
  source 1..9: note = Seed: LVVVGACGV (KRAS G12C)
WVVLGSCGP

SEQ ID NO: 4036 - protein, 9 aa, synthetic construct
  source 1..9: note = Seed: LVVVGACGV (KRAS G12C)
WVVLGSCGQ

SEQ ID NO: 4037 - protein, 9 aa, synthetic construct
  source 1..9: note = Seed: LVVVGACGV (KRAS G12C)
WVVLGSCGR

SEQ ID NO: 4038 - protein, 9 aa, synthetic construct
  source 1..9: note = Seed: LVVVGACGV (KRAS G12C)
WVVLGSCGS

SEQ ID NO: 4039 - protein, 9 aa, synthetic construct
  source 1..9: note = Seed: LVVVGACGV (KRAS G12C)
WVVLGSCGT

SEQ ID NO: 4040 - protein, 9 aa, synthetic construct
  source 1..9: note = Seed: LVVVGACGV (KRAS G12C)
WVVLGSCGV

SEQ ID NO: 4041 - protein, 9 aa, synthetic construct
  source 1..9: note = Seed: LVVVGACGV (KRAS G12C)
WVVLGSCGY

SEQ ID NO: 4042 - protein, 9 aa, synthetic construct
  source 1..9: note = Seed: LVVVGACGV (KRAS G12C)
WVVLGTCGA

SEQ ID NO: 4043 - protein, 9 aa, synthetic construct
  source 1..9: note = Seed: LVVVGACGV (KRAS G12C)
WVVLGTCGG

SEQ ID NO: 4044 - protein, 9 aa, synthetic construct
  source 1..9: note = Seed: LVVVGACGV (KRAS G12C)
WVVLGTCGH

SEQ ID NO: 4045 - protein, 9 aa, synthetic construct
  source 1..9: note = Seed: LVVVGACGV (KRAS G12C)
WVVLGTCGI

SEQ ID NO: 4046 - protein, 9 aa, synthetic construct
  source 1..9: note = Seed: LVVVGACGV (KRAS G12C)
WVVLGTCGL

SEQ ID NO: 4047 - protein, 9 aa, synthetic construct
  source 1..9: note = Seed: LVVVGACGV (KRAS G12C)
WVVLGTCGM

SEQ ID NO: 4048 - protein, 9 aa, synthetic construct
  source 1..9: note = Seed: LVVVGACGV (KRAS G12C)
WVVLGTCGN

SEQ ID NO: 4049 - protein, 9 aa, synthetic construct
  source 1..9: note = Seed: LVVVGACGV (KRAS G12C)
WVVLGTCGS

SEQ ID NO: 4050 - protein, 9 aa, synthetic construct
  source 1..9: note = Seed: LVVVGACGV (KRAS G12C)
WVVLGTCGT

SEQ ID NO: 4051 - protein, 9 aa, synthetic construct
  source 1..9: note = Seed: LVVVGACGV (KRAS G12C)
WVVLGTCGV

SEQ ID NO: 4052 - protein, 9 aa, synthetic construct
  source 1..9: note = Seed: LVVVGACGV (KRAS G12C)
WVVLGVCGA

SEQ ID NO: 4053 - protein, 9 aa, synthetic construct
  source 1..9: note = Seed: LVVVGACGV (KRAS G12C)
WVVLGVCGN

SEQ ID NO: 4054 - protein, 9 aa, synthetic construct
  source 1..9: note = Seed: LVVVGACGV (KRAS G12C)
WVVMGACGA

SEQ ID NO: 4055 - protein, 9 aa, synthetic construct
  source 1..9: note = Seed: LVVVGACGV (KRAS G12C)
WVVMGACGF

SEQ ID NO: 4056 - protein, 9 aa, synthetic construct
  source 1..9: note = Seed: LVVVGACGV (KRAS G12C)
WVVMGACGG

SEQ ID NO: 4057 - protein, 9 aa, synthetic construct
  source 1..9: note = Seed: LVVVGACGV (KRAS G12C)
WVVMGACGH

SEQ ID NO: 4058 - protein, 9 aa, synthetic construct
  source 1..9: note = Seed: LVVVGACGV (KRAS G12C)
WVVMGACGI

SEQ ID NO: 4059 - protein, 9 aa, synthetic construct
  source 1..9: note = Seed: LVVVGACGV (KRAS G12C)
WVVMGACGL

SEQ ID NO: 4060 - protein, 9 aa, synthetic construct
  source 1..9: note = Seed: LVVVGACGV (KRAS G12C)
WVVMGACGM

SEQ ID NO: 4061 - protein, 9 aa, synthetic construct
  source 1..9: note = Seed: LVVVGACGV (KRAS G12C)
WVVMGACGN

SEQ ID NO: 4062 - protein, 9 aa, synthetic construct
  source 1..9: note = Seed: LVVVGACGV (KRAS G12C)
WVVMGACGP

SEQ ID NO: 4063 - protein, 9 aa, synthetic construct
  source 1..9: note = Seed: LVVVGACGV (KRAS G12C)
WVVMGACGQ

SEQ ID NO: 4064 - protein, 9 aa, synthetic construct
  source 1..9: note = Seed: LVVVGACGV (KRAS G12C)
WVVMGACGR

SEQ ID NO: 4065 - protein, 9 aa, synthetic construct
  source 1..9: note = Seed: LVVVGACGV (KRAS G12C)
WVVMGACGS

SEQ ID NO: 4066 - protein, 9 aa, synthetic construct
  source 1..9: note = Seed: LVVVGACGV (KRAS G12C)
WVVMGACGT

SEQ ID NO: 4067 - protein, 9 aa, synthetic construct
  source 1..9: note = Seed: LVVVGACGV (KRAS G12C)
WVVMGACGV

SEQ ID NO: 4068 - protein, 9 aa, synthetic construct
  source 1..9: note = Seed: LVVVGACGV (KRAS G12C)
WVVMGACGY

SEQ ID NO: 4069 - protein, 9 aa, synthetic construct
  source 1..9: note = Seed: LVVVGACGV (KRAS G12C)
WVVMGDCGL

SEQ ID NO: 4070 - protein, 9 aa, synthetic construct
  source 1..9: note = Seed: LVVVGACGV (KRAS G12C)
WVVMGGCGA

SEQ ID NO: 4071 - protein, 9 aa, synthetic construct
  source 1..9: note = Seed: LVVVGACGV (KRAS G12C)
WVVMGGCGG

SEQ ID NO: 4072 - protein, 9 aa, synthetic construct
  source 1..9: note = Seed: LVVVGACGV (KRAS G12C)
WVVMGGCGH

SEQ ID NO: 4073 - protein, 9 aa, synthetic construct
  source 1..9: note = Seed: LVVVGACGV (KRAS G12C)
WVVMGGCGI

SEQ ID NO: 4074 - protein, 9 aa, synthetic construct
  source 1..9: note = Seed: LVVVGACGV (KRAS G12C)
WVVMGGCGL

SEQ ID NO: 4075 - protein, 9 aa, synthetic construct
  source 1..9: note = Seed: LVVVGACGV (KRAS G12C)
WVVMGGCGM

SEQ ID NO: 4076 - protein, 9 aa, synthetic construct
  source 1..9: note = Seed: LVVVGACGV (KRAS G12C)
WVVMGGCGN

SEQ ID NO: 4077 - protein, 9 aa, synthetic construct
  source 1..9: note = Seed: LVVVGACGV (KRAS G12C)
WVVMGGCGS

SEQ ID NO: 4078 - protein, 9 aa, synthetic construct
  source 1..9: note = Seed: LVVVGACGV (KRAS G12C)
WVVMGGCGT

SEQ ID NO: 4079 - protein, 9 aa, synthetic construct
  source 1..9: note = Seed: LVVVGACGV (KRAS G12C)
WVVMGGCGV

SEQ ID NO: 4080 - protein, 9 aa, synthetic construct
  source 1..9: note = Seed: LVVVGACGV (KRAS G12C)
WVVMGHCGL

SEQ ID NO: 4081 - protein, 9 aa, synthetic construct
  source 1..9: note = Seed: LVVVGACGV (KRAS G12C)
WVVMGICGN

SEQ ID NO: 4082 - protein, 9 aa, synthetic construct
  source 1..9: note = Seed: LVVVGACGV (KRAS G12C)
WVVMGNCGA

SEQ ID NO: 4083 - protein, 9 aa, synthetic construct
  source 1..9: note = Seed: LVVVGACGV (KRAS G12C)
WVVMGNCGF

SEQ ID NO: 4084 - protein, 9 aa, synthetic construct
  source 1..9: note = Seed: LVVVGACGV (KRAS G12C)
WVVMGNCGI

SEQ ID NO: 4085 - protein, 9 aa, synthetic construct
  source 1..9: note = Seed: LVVVGACGV (KRAS G12C)
WVVMGNCGL

SEQ ID NO: 4086 - protein, 9 aa, synthetic construct
  source 1..9: note = Seed: LVVVGACGV (KRAS G12C)
WVVMGNCGM

SEQ ID NO: 4087 - protein, 9 aa, synthetic construct
  source 1..9: note = Seed: LVVVGACGV (KRAS G12C)
WVVMGNCGN

SEQ ID NO: 4088 - protein, 9 aa, synthetic construct
  source 1..9: note = Seed: LVVVGACGV (KRAS G12C)
WVVMGNCGS

SEQ ID NO: 4089 - protein, 9 aa, synthetic construct
  source 1..9: note = Seed: LVVVGACGV (KRAS G12C)
WVVMGNCGT

SEQ ID NO: 4090 - protein, 9 aa, synthetic construct
  source 1..9: note = Seed: LVVVGACGV (KRAS G12C)
WVVMGNCGV

SEQ ID NO: 4091 - protein, 9 aa, synthetic construct
  source 1..9: note = Seed: LVVVGACGV (KRAS G12C)
WVVMGPCGA

SEQ ID NO: 4092 - protein, 9 aa, synthetic construct
  source 1..9: note = Seed: LVVVGACGV (KRAS G12C)
WVVMGPCGF

SEQ ID NO: 4093 - protein, 9 aa, synthetic construct
  source 1..9: note = Seed: LVVVGACGV (KRAS G12C)
WVVMGPCGI

SEQ ID NO: 4094 - protein, 9 aa, synthetic construct
  source 1..9: note = Seed: LVVVGACGV (KRAS G12C)
WVVMGPCGL

SEQ ID NO: 4095 - protein, 9 aa, synthetic construct
  source 1..9: note = Seed: LVVVGACGV (KRAS G12C)
WVVMGPCGM

SEQ ID NO: 4096 - protein, 9 aa, synthetic construct
  source 1..9: note = Seed: LVVVGACGV (KRAS G12C)
WVVMGPCGS

SEQ ID NO: 4097 - protein, 9 aa, synthetic construct
  source 1..9: note = Seed: LVVVGACGV (KRAS G12C)
WVVMGPCGT

SEQ ID NO: 4098 - protein, 9 aa, synthetic construct
  source 1..9: note = Seed: LVVVGACGV (KRAS G12C)
WVVMGPCGV

SEQ ID NO: 4099 - protein, 9 aa, synthetic construct
  source 1..9: note = Seed: LVVVGACGV (KRAS G12C)
WVVMGSCGA

SEQ ID NO: 4100 - protein, 9 aa, synthetic construct
  source 1..9: note = Seed: LVVVGACGV (KRAS G12C)
WVVMGSCGG

SEQ ID NO: 4101 - protein, 9 aa, synthetic construct
  source 1..9: note = Seed: LVVVGACGV (KRAS G12C)
WVVMGSCGH

SEQ ID NO: 4102 - protein, 9 aa, synthetic construct
  source 1..9: note = Seed: LVVVGACGV (KRAS G12C)
WVVMGSCGI

SEQ ID NO: 4103 - protein, 9 aa, synthetic construct
  source 1..9: note = Seed: LVVVGACGV (KRAS G12C)
WVVMGSCGL

SEQ ID NO: 4104 - protein, 9 aa, synthetic construct
  source 1..9: note = Seed: LVVVGACGV (KRAS G12C)
WVVMGSCGM

SEQ ID NO: 4105 - protein, 9 aa, synthetic construct
  source 1..9: note = Seed: LVVVGACGV (KRAS G12C)
WVVMGSCGN

SEQ ID NO: 4106 - protein, 9 aa, synthetic construct
  source 1..9: note = Seed: LVVVGACGV (KRAS G12C)
WVVMGSCGR

SEQ ID NO: 4107 - protein, 9 aa, synthetic construct
  source 1..9: note = Seed: LVVVGACGV (KRAS G12C)
WVVMGSCGS

SEQ ID NO: 4108 - protein, 9 aa, synthetic construct
  source 1..9: note = Seed: LVVVGACGV (KRAS G12C)
WVVMGSCGT

SEQ ID NO: 4109 - protein, 9 aa, synthetic construct
  source 1..9: note = Seed: LVVVGACGV (KRAS G12C)
WVVMGSCGV

SEQ ID NO: 4110 - protein, 9 aa, synthetic construct
  source 1..9: note = Seed: LVVVGACGV (KRAS G12C)
WVVMGSCGY

SEQ ID NO: 4111 - protein, 9 aa, synthetic construct
  source 1..9: note = Seed: LVVVGACGV (KRAS G12C)
WVVMGTCGA

SEQ ID NO: 4112 - protein, 9 aa, synthetic construct
  source 1..9: note = Seed: LVVVGACGV (KRAS G12C)
WVVMGTCGI

SEQ ID NO: 4113 - protein, 9 aa, synthetic construct
  source 1..9: note = Seed: LVVVGACGV (KRAS G12C)
WVVMGTCGL

SEQ ID NO: 4114 - protein, 9 aa, synthetic construct
  source 1..9: note = Seed: LVVVGACGV (KRAS G12C)
WVVMGTCGM

SEQ ID NO: 4115 - protein, 9 aa, synthetic construct
  source 1..9: note = Seed: LVVVGACGV (KRAS G12C)
WVVMGTCGN

SEQ ID NO: 4116 - protein, 9 aa, synthetic construct
  source 1..9: note = Seed: LVVVGACGV (KRAS G12C)
WVVMGTCGS

SEQ ID NO: 4117 - protein, 9 aa, synthetic construct
  source 1..9: note = Seed: LVVVGACGV (KRAS G12C)
WVVMGTCGT

SEQ ID NO: 4118 - protein, 9 aa, synthetic construct
  source 1..9: note = Seed: LVVVGACGV (KRAS G12C)
WVVMGTCGV

SEQ ID NO: 4119 - protein, 9 aa, synthetic construct
  source 1..9: note = Seed: LVVVGACGV (KRAS G12C)
WVVMGVCGA

SEQ ID NO: 4120 - protein, 9 aa, synthetic construct
  source 1..9: note = Seed: LVVVGACGV (KRAS G12C)
WVVMGVCGN

SEQ ID NO: 4121 - protein, 9 aa, synthetic construct
  source 1..9: note = Seed: LVVVGACGV (KRAS G12C)
WVVNGACGA

SEQ ID NO: 4122 - protein, 9 aa, synthetic construct
  source 1..9: note = Seed: LVVVGACGV (KRAS G12C)
WVVNGACGI

SEQ ID NO: 4123 - protein, 9 aa, synthetic construct
  source 1..9: note = Seed: LVVVGACGV (KRAS G12C)
WVVNGACGL

SEQ ID NO: 4124 - protein, 9 aa, synthetic construct
  source 1..9: note = Seed: LVVVGACGV (KRAS G12C)
WVVNGACGM

SEQ ID NO: 4125 - protein, 9 aa, synthetic construct
  source 1..9: note = Seed: LVVVGACGV (KRAS G12C)
WVVNGACGV

SEQ ID NO: 4126 - protein, 9 aa, synthetic construct
  source 1..9: note = Seed: LVVVGACGV (KRAS G12C)
WVVNGICGI

SEQ ID NO: 4127 - protein, 9 aa, synthetic construct
  source 1..9: note = Seed: LVVVGACGV (KRAS G12C)
WVVNGNCGF

SEQ ID NO: 4128 - protein, 9 aa, synthetic construct
  source 1..9: note = Seed: LVVVGACGV (KRAS G12C)
WVVNGNCGI

SEQ ID NO: 4129 - protein, 9 aa, synthetic construct
  source 1..9: note = Seed: LVVVGACGV (KRAS G12C)
WVVNGNCGL

SEQ ID NO: 4130 - protein, 9 aa, synthetic construct
  source 1..9: note = Seed: LVVVGACGV (KRAS G12C)
WVVNGNCGV

SEQ ID NO: 4131 - protein, 9 aa, synthetic construct
  source 1..9: note = Seed: LVVVGACGV (KRAS G12C)
WVVNGNCGY

SEQ ID NO: 4132 - protein, 9 aa, synthetic construct
  source 1..9: note = Seed: LVVVGACGV (KRAS G12C)
WVVNGSCGI

SEQ ID NO: 4133 - protein, 9 aa, synthetic construct
  source 1..9: note = Seed: LVVVGACGV (KRAS G12C)
WVVNGSCGL

SEQ ID NO: 4134 - protein, 9 aa, synthetic construct
  source 1..9: note = Seed: LVVVGACGV (KRAS G12C)
WVVNGSCGV

SEQ ID NO: 4135 - protein, 9 aa, synthetic construct
  source 1..9: note = Seed: LVVVGACGV (KRAS G12C)
WVVNGTCGI

SEQ ID NO: 4136 - protein, 9 aa, synthetic construct
  source 1..9: note = Seed: LVVVGACGV (KRAS G12C)
WVVNGVCGI

SEQ ID NO: 4137 - protein, 9 aa, synthetic construct
  source 1..9: note = Seed: LVVVGACGV (KRAS G12C)
WVVQGACGA

SEQ ID NO: 4138 - protein, 9 aa, synthetic construct
  source 1..9: note = Seed: LVVVGACGV (KRAS G12C)
WVVQGACGI

SEQ ID NO: 4139 - protein, 9 aa, synthetic construct
  source 1..9: note = Seed: LVVVGACGV (KRAS G12C)
WVVQGACGL

SEQ ID NO: 4140 - protein, 9 aa, synthetic construct
  source 1..9: note = Seed: LVVVGACGV (KRAS G12C)
WVVQGACGM

SEQ ID NO: 4141 - protein, 9 aa, synthetic construct
  source 1..9: note = Seed: LVVVGACGV (KRAS G12C)
WVVQGACGS

SEQ ID NO: 4142 - protein, 9 aa, synthetic construct
  source 1..9: note = Seed: LVVVGACGV (KRAS G12C)
WVVQGACGT

SEQ ID NO: 4143 - protein, 9 aa, synthetic construct
  source 1..9: note = Seed: LVVVGACGV (KRAS G12C)
WVVQGACGV

SEQ ID NO: 4144 - protein, 9 aa, synthetic construct
  source 1..9: note = Seed: LVVVGACGV (KRAS G12C)
WVVQGGCGA

SEQ ID NO: 4145 - protein, 9 aa, synthetic construct
  source 1..9: note = Seed: LVVVGACGV (KRAS G12C)
WVVQGGCGI

SEQ ID NO: 4146 - protein, 9 aa, synthetic construct
  source 1..9: note = Seed: LVVVGACGV (KRAS G12C)
WVVQGGCGL

SEQ ID NO: 4147 - protein, 9 aa, synthetic construct
  source 1..9: note = Seed: LVVVGACGV (KRAS G12C)
WVVQGGCGM

SEQ ID NO: 4148 - protein, 9 aa, synthetic construct
  source 1..9: note = Seed: LVVVGACGV (KRAS G12C)
WVVQGGCGT

SEQ ID NO: 4149 - protein, 9 aa, synthetic construct
  source 1..9: note = Seed: LVVVGACGV (KRAS G12C)
WVVQGGCGV

SEQ ID NO: 4150 - protein, 9 aa, synthetic construct
  source 1..9: note = Seed: LVVVGACGV (KRAS G12C)
WVVQGNCGA

SEQ ID NO: 4151 - protein, 9 aa, synthetic construct
  source 1..9: note = Seed: LVVVGACGV (KRAS G12C)
WVVQGNCGI

SEQ ID NO: 4152 - protein, 9 aa, synthetic construct
  source 1..9: note = Seed: LVVVGACGV (KRAS G12C)
WVVQGNCGL

SEQ ID NO: 4153 - protein, 9 aa, synthetic construct
  source 1..9: note = Seed: LVVVGACGV (KRAS G12C)
WVVQGNCGM

SEQ ID NO: 4154 - protein, 9 aa, synthetic construct
  source 1..9: note = Seed: LVVVGACGV (KRAS G12C)
WVVQGNCGV

SEQ ID NO: 4155 - protein, 9 aa, synthetic construct
  source 1..9: note = Seed: LVVVGACGV (KRAS G12C)
WVVQGPCGA

SEQ ID NO: 4156 - protein, 9 aa, synthetic construct
  source 1..9: note = Seed: LVVVGACGV (KRAS G12C)
WVVQGPCGI

SEQ ID NO: 4157 - protein, 9 aa, synthetic construct
  source 1..9: note = Seed: LVVVGACGV (KRAS G12C)
WVVQGPCGL

SEQ ID NO: 4158 - protein, 9 aa, synthetic construct
  source 1..9: note = Seed: LVVVGACGV (KRAS G12C)
WVVQGPCGM

SEQ ID NO: 4159 - protein, 9 aa, synthetic construct
  source 1..9: note = Seed: LVVVGACGV (KRAS G12C)
WVVQGPCGV

SEQ ID NO: 4160 - protein, 9 aa, synthetic construct
  source 1..9: note = Seed: LVVVGACGV (KRAS G12C)
WVVQGSCGA

SEQ ID NO: 4161 - protein, 9 aa, synthetic construct
  source 1..9: note = Seed: LVVVGACGV (KRAS G12C)
WVVQGSCGI

SEQ ID NO: 4162 - protein, 9 aa, synthetic construct
  source 1..9: note = Seed: LVVVGACGV (KRAS G12C)
WVVQGSCGL

SEQ ID NO: 4163 - protein, 9 aa, synthetic construct
  source 1..9: note = Seed: LVVVGACGV (KRAS G12C)
WVVQGSCGM

SEQ ID NO: 4164 - protein, 9 aa, synthetic construct
  source 1..9: note = Seed: LVVVGACGV (KRAS G12C)
WVVQGSCGS

SEQ ID NO: 4165 - protein, 9 aa, synthetic construct
  source 1..9: note = Seed: LVVVGACGV (KRAS G12C)
WVVQGSCGT

SEQ ID NO: 4166 - protein, 9 aa, synthetic construct
  source 1..9: note = Seed: LVVVGACGV (KRAS G12C)
WVVQGSCGV

SEQ ID NO: 4167 - protein, 9 aa, synthetic construct
  source 1..9: note = Seed: LVVVGACGV (KRAS G12C)
WVVQGTCGA

SEQ ID NO: 4168 - protein, 9 aa, synthetic construct
  source 1..9: note = Seed: LVVVGACGV (KRAS G12C)
WVVQGTCGI

SEQ ID NO: 4169 - protein, 9 aa, synthetic construct
  source 1..9: note = Seed: LVVVGACGV (KRAS G12C)
WVVQGTCGL

SEQ ID NO: 4170 - protein, 9 aa, synthetic construct
  source 1..9: note = Seed: LVVVGACGV (KRAS G12C)
WVVQGTCGM

SEQ ID NO: 4171 - protein, 9 aa, synthetic construct
  source 1..9: note = Seed: LVVVGACGV (KRAS G12C)
WVVQGTCGV

SEQ ID NO: 4172 - protein, 9 aa, synthetic construct
  source 1..9: note = Seed: LVVVGACGV (KRAS G12C)
WVVQGVCGA

SEQ ID NO: 4173 - protein, 9 aa, synthetic construct
  source 1..9: note = Seed: LVVVGACGV (KRAS G12C)
WVVQGVCGL

SEQ ID NO: 4174 - protein, 9 aa, synthetic construct
  source 1..9: note = Seed: LVVVGACGV (KRAS G12C)
WVVQGVCGV

SEQ ID NO: 4175 - protein, 9 aa, synthetic construct
  source 1..9: note = Seed: LVVVGACGV (KRAS G12C)
WVVSGACGA

SEQ ID NO: 4176 - protein, 9 aa, synthetic construct
  source 1..9: note = Seed: LVVVGACGV (KRAS G12C)
WVVSGACGI

SEQ ID NO: 4177 - protein, 9 aa, synthetic construct
  source 1..9: note = Seed: LVVVGACGV (KRAS G12C)
WVVSGACGL

SEQ ID NO: 4178 - protein, 9 aa, synthetic construct
  source 1..9: note = Seed: LVVVGACGV (KRAS G12C)
WVVSGACGM

SEQ ID NO: 4179 - protein, 9 aa, synthetic construct
  source 1..9: note = Seed: LVVVGACGV (KRAS G12C)
WVVSGACGS

SEQ ID NO: 4180 - protein, 9 aa, synthetic construct
  source 1..9: note = Seed: LVVVGACGV (KRAS G12C)
WVVSGACGT

SEQ ID NO: 4181 - protein, 9 aa, synthetic construct
  source 1..9: note = Seed: LVVVGACGV (KRAS G12C)
WVVSGACGV

SEQ ID NO: 4182 - protein, 9 aa, synthetic construct
  source 1..9: note = Seed: LVVVGACGV (KRAS G12C)
WVVSGGCGA

SEQ ID NO: 4183 - protein, 9 aa, synthetic construct
  source 1..9: note = Seed: LVVVGACGV (KRAS G12C)
WVVSGGCGI

SEQ ID NO: 4184 - protein, 9 aa, synthetic construct
  source 1..9: note = Seed: LVVVGACGV (KRAS G12C)
WVVSGGCGL

SEQ ID NO: 4185 - protein, 9 aa, synthetic construct
  source 1..9: note = Seed: LVVVGACGV (KRAS G12C)
WVVSGGCGM

SEQ ID NO: 4186 - protein, 9 aa, synthetic construct
  source 1..9: note = Seed: LVVVGACGV (KRAS G12C)
WVVSGGCGV

SEQ ID NO: 4187 - protein, 9 aa, synthetic construct
  source 1..9: note = Seed: LVVVGACGV (KRAS G12C)
WVVSGNCGI

SEQ ID NO: 4188 - protein, 9 aa, synthetic construct
  source 1..9: note = Seed: LVVVGACGV (KRAS G12C)
WVVSGNCGL

SEQ ID NO: 4189 - protein, 9 aa, synthetic construct
  source 1..9: note = Seed: LVVVGACGV (KRAS G12C)
WVVSGNCGV

SEQ ID NO: 4190 - protein, 9 aa, synthetic construct
  source 1..9: note = Seed: LVVVGACGV (KRAS G12C)
WVVSGPCGA

SEQ ID NO: 4191 - protein, 9 aa, synthetic construct
  source 1..9: note = Seed: LVVVGACGV (KRAS G12C)
WVVSGPCGI

SEQ ID NO: 4192 - protein, 9 aa, synthetic construct
  source 1..9: note = Seed: LVVVGACGV (KRAS G12C)
WVVSGPCGL

SEQ ID NO: 4193 - protein, 9 aa, synthetic construct
  source 1..9: note = Seed: LVVVGACGV (KRAS G12C)
WVVSGPCGM

SEQ ID NO: 4194 - protein, 9 aa, synthetic construct
  source 1..9: note = Seed: LVVVGACGV (KRAS G12C)
WVVSGPCGV

SEQ ID NO: 4195 - protein, 9 aa, synthetic construct
  source 1..9: note = Seed: LVVVGACGV (KRAS G12C)
WVVSGSCGA

SEQ ID NO: 4196 - protein, 9 aa, synthetic construct
  source 1..9: note = Seed: LVVVGACGV (KRAS G12C)
WVVSGSCGI

SEQ ID NO: 4197 - protein, 9 aa, synthetic construct
  source 1..9: note = Seed: LVVVGACGV (KRAS G12C)
WVVSGSCGL

SEQ ID NO: 4198 - protein, 9 aa, synthetic construct
  source 1..9: note = Seed: LVVVGACGV (KRAS G12C)
WVVSGSCGM

SEQ ID NO: 4199 - protein, 9 aa, synthetic construct
  source 1..9: note = Seed: LVVVGACGV (KRAS G12C)
WVVSGSCGV

SEQ ID NO: 4200 - protein, 9 aa, synthetic construct
  source 1..9: note = Seed: LVVVGACGV (KRAS G12C)
WVVSGTCGA

SEQ ID NO: 4201 - protein, 9 aa, synthetic construct
  source 1..9: note = Seed: LVVVGACGV (KRAS G12C)
WVVSGTCGI

SEQ ID NO: 4202 - protein, 9 aa, synthetic construct
  source 1..9: note = Seed: LVVVGACGV (KRAS G12C)
WVVSGTCGL

SEQ ID NO: 4203 - protein, 9 aa, synthetic construct
  source 1..9: note = Seed: LVVVGACGV (KRAS G12C)
WVVSGTCGV

SEQ ID NO: 4204 - protein, 9 aa, synthetic construct
  source 1..9: note = Seed: LVVVGACGV (KRAS G12C)
WVVTGACGA

SEQ ID NO: 4205 - protein, 9 aa, synthetic construct
  source 1..9: note = Seed: LVVVGACGV (KRAS G12C)
WVVTGACGI

SEQ ID NO: 4206 - protein, 9 aa, synthetic construct
  source 1..9: note = Seed: LVVVGACGV (KRAS G12C)
WVVTGACGL

SEQ ID NO: 4207 - protein, 9 aa, synthetic construct
  source 1..9: note = Seed: LVVVGACGV (KRAS G12C)
WVVTGACGM

SEQ ID NO: 4208 - protein, 9 aa, synthetic construct
  source 1..9: note = Seed: LVVVGACGV (KRAS G12C)
WVVTGACGV

SEQ ID NO: 4209 - protein, 9 aa, synthetic construct
  source 1..9: note = Seed: LVVVGACGV (KRAS G12C)
WVVTGGCGI

SEQ ID NO: 4210 - protein, 9 aa, synthetic construct
  source 1..9: note = Seed: LVVVGACGV (KRAS G12C)
WVVTGGCGL

SEQ ID NO: 4211 - protein, 9 aa, synthetic construct
  source 1..9: note = Seed: LVVVGACGV (KRAS G12C)
WVVTGGCGV

SEQ ID NO: 4212 - protein, 9 aa, synthetic construct
  source 1..9: note = Seed: LVVVGACGV (KRAS G12C)
WVVTGNCGL

SEQ ID NO: 4213 - protein, 9 aa, synthetic construct
  source 1..9: note = Seed: LVVVGACGV (KRAS G12C)
WVVTGPCGI

SEQ ID NO: 4214 - protein, 9 aa, synthetic construct
  source 1..9: note = Seed: LVVVGACGV (KRAS G12C)
WVVTGPCGL

SEQ ID NO: 4215 - protein, 9 aa, synthetic construct
  source 1..9: note = Seed: LVVVGACGV (KRAS G12C)
WVVTGPCGV

SEQ ID NO: 4216 - protein, 9 aa, synthetic construct
  source 1..9: note = Seed: LVVVGACGV (KRAS G12C)
WVVTGSCGA

SEQ ID NO: 4217 - protein, 9 aa, synthetic construct
  source 1..9: note = Seed: LVVVGACGV (KRAS G12C)
WVVTGSCGI

SEQ ID NO: 4218 - protein, 9 aa, synthetic construct
  source 1..9: note = Seed: LVVVGACGV (KRAS G12C)
WVVTGSCGL

SEQ ID NO: 4219 - protein, 9 aa, synthetic construct
  source 1..9: note = Seed: LVVVGACGV (KRAS G12C)
WVVTGSCGV

SEQ ID NO: 4220 - protein, 9 aa, synthetic construct
  source 1..9: note = Seed: LVVVGACGV (KRAS G12C)
WVVVGACGA

SEQ ID NO: 4221 - protein, 9 aa, synthetic construct
  source 1..9: note = Seed: LVVVGACGV (KRAS G12C)
WVVVGACGI

SEQ ID NO: 4222 - protein, 9 aa, synthetic construct
  source 1..9: note = Seed: LVVVGACGV (KRAS G12C)
WVVVGACGL

SEQ ID NO: 4223 - protein, 9 aa, synthetic construct
  source 1..9: note = Seed: LVVVGACGV (KRAS G12C)
WVVVGACGM

SEQ ID NO: 4224 - protein, 9 aa, synthetic construct
  source 1..9: note = Seed: LVVVGACGV (KRAS G12C)
WVVVGACGS

SEQ ID NO: 4225 - protein, 9 aa, synthetic construct
  source 1..9: note = Seed: LVVVGACGV (KRAS G12C)
WVVVGACGT

SEQ ID NO: 4226 - protein, 9 aa, synthetic construct
  source 1..9: note = Seed: LVVVGACGV (KRAS G12C)
WVVVGACGV

SEQ ID NO: 4227 - protein, 9 aa, synthetic construct
  source 1..9: note = Seed: LVVVGACGV (KRAS G12C)
WVVVGGCGA

SEQ ID NO: 4228 - protein, 9 aa, synthetic construct
  source 1..9: note = Seed: LVVVGACGV (KRAS G12C)
WVVVGGCGI

SEQ ID NO: 4229 - protein, 9 aa, synthetic construct
  source 1..9: note = Seed: LVVVGACGV (KRAS G12C)
WVVVGGCGL

SEQ ID NO: 4230 - protein, 9 aa, synthetic construct
  source 1..9: note = Seed: LVVVGACGV (KRAS G12C)
WVVVGGCGM

SEQ ID NO: 4231 - protein, 9 aa, synthetic construct
  source 1..9: note = Seed: LVVVGACGV (KRAS G12C)
WVVVGGCGS

SEQ ID NO: 4232 - protein, 9 aa, synthetic construct
  source 1..9: note = Seed: LVVVGACGV (KRAS G12C)
WVVVGGCGT

SEQ ID NO: 4233 - protein, 9 aa, synthetic construct
  source 1..9: note = Seed: LVVVGACGV (KRAS G12C)
WVVVGGCGV

SEQ ID NO: 4234 - protein, 9 aa, synthetic construct
  source 1..9: note = Seed: LVVVGACGV (KRAS G12C)
WVVVGNCGA

SEQ ID NO: 4235 - protein, 9 aa, synthetic construct
  source 1..9: note = Seed: LVVVGACGV (KRAS G12C)
WVVVGNCGI

SEQ ID NO: 4236 - protein, 9 aa, synthetic construct
  source 1..9: note = Seed: LVVVGACGV (KRAS G12C)
WVVVGNCGL

SEQ ID NO: 4237 - protein, 9 aa, synthetic construct
  source 1..9: note = Seed: LVVVGACGV (KRAS G12C)
WVVVGNCGM

SEQ ID NO: 4238 - protein, 9 aa, synthetic construct
  source 1..9: note = Seed: LVVVGACGV (KRAS G12C)
WVVVGNCGV

SEQ ID NO: 4239 - protein, 9 aa, synthetic construct
  source 1..9: note = Seed: LVVVGACGV (KRAS G12C)
WVVVGPCGA

SEQ ID NO: 4240 - protein, 9 aa, synthetic construct
  source 1..9: note = Seed: LVVVGACGV (KRAS G12C)
WVVVGPCGI

SEQ ID NO: 4241 - protein, 9 aa, synthetic construct
  source 1..9: note = Seed: LVVVGACGV (KRAS G12C)
WVVVGPCGL

SEQ ID NO: 4242 - protein, 9 aa, synthetic construct
  source 1..9: note = Seed: LVVVGACGV (KRAS G12C)
WVVVGPCGM

SEQ ID NO: 4243 - protein, 9 aa, synthetic construct
  source 1..9: note = Seed: LVVVGACGV (KRAS G12C)
WVVVGPCGT

SEQ ID NO: 4244 - protein, 9 aa, synthetic construct
  source 1..9: note = Seed: LVVVGACGV (KRAS G12C)
WVVVGPCGV

SEQ ID NO: 4245 - protein, 9 aa, synthetic construct
  source 1..9: note = Seed: LVVVGACGV (KRAS G12C)
WVVVGSCGA

SEQ ID NO: 4246 - protein, 9 aa, synthetic construct
  source 1..9: note = Seed: LVVVGACGV (KRAS G12C)
WVVVGSCGI

SEQ ID NO: 4247 - protein, 9 aa, synthetic construct
  source 1..9: note = Seed: LVVVGACGV (KRAS G12C)
WVVVGSCGL

SEQ ID NO: 4248 - protein, 9 aa, synthetic construct
  source 1..9: note = Seed: LVVVGACGV (KRAS G12C)
WVVVGSCGM

SEQ ID NO: 4249 - protein, 9 aa, synthetic construct
  source 1..9: note = Seed: LVVVGACGV (KRAS G12C)
WVVVGSCGS

SEQ ID NO: 4250 - protein, 9 aa, synthetic construct
  source 1..9: note = Seed: LVVVGACGV (KRAS G12C)
WVVVGSCGT

SEQ ID NO: 4251 - protein, 9 aa, synthetic construct
  source 1..9: note = Seed: LVVVGACGV (KRAS G12C)
WVVVGSCGV

SEQ ID NO: 4252 - protein, 9 aa, synthetic construct
  source 1..9: note = Seed: LVVVGACGV (KRAS G12C)
WVVVGTCGA

SEQ ID NO: 4253 - protein, 9 aa, synthetic construct
  source 1..9: note = Seed: LVVVGACGV (KRAS G12C)
WVVVGTCGL

SEQ ID NO: 4254 - protein, 9 aa, synthetic construct
  source 1..9: note = Seed: LVVVGACGV (KRAS G12C)
WVVVGTCGV

SEQ ID NO: 4255 - protein, 9 aa, synthetic construct
  source 1..9: note = Seed: LVVVGACGV (KRAS G12C)
YVVAGACGC

SEQ ID NO: 4256 - protein, 9 aa, synthetic construct
  source 1..9: note = Seed: LVVVGACGV (KRAS G12C)
YVVAGACGF

SEQ ID NO: 4257 - protein, 9 aa, synthetic construct
  source 1..9: note = Seed: LVVVGACGV (KRAS G12C)
YVVAGACGG

SEQ ID NO: 4258 - protein, 9 aa, synthetic construct
  source 1..9: note = Seed: LVVVGACGV (KRAS G12C)
YVVAGACGH

SEQ ID NO: 4259 - protein, 9 aa, synthetic construct
  source 1..9: note = Seed: LVVVGACGV (KRAS G12C)
YVVAGACGN

SEQ ID NO: 4260 - protein, 9 aa, synthetic construct
  source 1..9: note = Seed: LVVVGACGV (KRAS G12C)
YVVAGACGP

SEQ ID NO: 4261 - protein, 9 aa, synthetic construct
  source 1..9: note = Seed: LVVVGACGV (KRAS G12C)
YVVAGACGQ

SEQ ID NO: 4262 - protein, 9 aa, synthetic construct
  source 1..9: note = Seed: LVVVGACGV (KRAS G12C)
YVVAGACGR

SEQ ID NO: 4263 - protein, 9 aa, synthetic construct
  source 1..9: note = Seed: LVVVGACGV (KRAS G12C)
YVVAGACGS

SEQ ID NO: 4264 - protein, 9 aa, synthetic construct
  source 1..9: note = Seed: LVVVGACGV (KRAS G12C)
YVVAGACGT

SEQ ID NO: 4265 - protein, 9 aa, synthetic construct
  source 1..9: note = Seed: LVVVGACGV (KRAS G12C)
YVVAGACGY

SEQ ID NO: 4266 - protein, 9 aa, synthetic construct
  source 1..9: note = Seed: LVVVGACGV (KRAS G12C)
YVVAGECGL

SEQ ID NO: 4267 - protein, 9 aa, synthetic construct
  source 1..9: note = Seed: LVVVGACGV (KRAS G12C)
YVVAGGCGA

SEQ ID NO: 4268 - protein, 9 aa, synthetic construct
  source 1..9: note = Seed: LVVVGACGV (KRAS G12C)
YVVAGGCGF

SEQ ID NO: 4269 - protein, 9 aa, synthetic construct
  source 1..9: note = Seed: LVVVGACGV (KRAS G12C)
YVVAGGCGG

SEQ ID NO: 4270 - protein, 9 aa, synthetic construct
  source 1..9: note = Seed: LVVVGACGV (KRAS G12C)
YVVAGGCGM

SEQ ID NO: 4271 - protein, 9 aa, synthetic construct
  source 1..9: note = Seed: LVVVGACGV (KRAS G12C)
YVVAGGCGN

SEQ ID NO: 4272 - protein, 9 aa, synthetic construct
  source 1..9: note = Seed: LVVVGACGV (KRAS G12C)
YVVAGGCGS

SEQ ID NO: 4273 - protein, 9 aa, synthetic construct
  source 1..9: note = Seed: LVVVGACGV (KRAS G12C)
YVVAGGCGT

SEQ ID NO: 4274 - protein, 9 aa, synthetic construct
  source 1..9: note = Seed: LVVVGACGV (KRAS G12C)
YVVAGGCGY

SEQ ID NO: 4275 - protein, 9 aa, synthetic construct
  source 1..9: note = Seed: LVVVGACGV (KRAS G12C)
YVVAGHCGL

SEQ ID NO: 4276 - protein, 9 aa, synthetic construct
  source 1..9: note = Seed: LVVVGACGV (KRAS G12C)
YVVAGICGA

SEQ ID NO: 4277 - protein, 9 aa, synthetic construct
  source 1..9: note = Seed: LVVVGACGV (KRAS G12C)
YVVAGICGH

SEQ ID NO: 4278 - protein, 9 aa, synthetic construct
  source 1..9: note = Seed: LVVVGACGV (KRAS G12C)
YVVAGICGI

SEQ ID NO: 4279 - protein, 9 aa, synthetic construct
  source 1..9: note = Seed: LVVVGACGV (KRAS G12C)
YVVAGICGL

SEQ ID NO: 4280 - protein, 9 aa, synthetic construct
  source 1..9: note = Seed: LVVVGACGV (KRAS G12C)
YVVAGICGM

SEQ ID NO: 4281 - protein, 9 aa, synthetic construct
  source 1..9: note = Seed: LVVVGACGV (KRAS G12C)
YVVAGICGN

SEQ ID NO: 4282 - protein, 9 aa, synthetic construct
  source 1..9: note = Seed: LVVVGACGV (KRAS G12C)
YVVAGICGS

SEQ ID NO: 4283 - protein, 9 aa, synthetic construct
  source 1..9: note = Seed: LVVVGACGV (KRAS G12C)
YVVAGICGT

SEQ ID NO: 4284 - protein, 9 aa, synthetic construct
  source 1..9: note = Seed: LVVVGACGV (KRAS G12C)
YVVAGICGV

SEQ ID NO: 4285 - protein, 9 aa, synthetic construct
  source 1..9: note = Seed: LVVVGACGV (KRAS G12C)
YVVAGLCGN

SEQ ID NO: 4286 - protein, 9 aa, synthetic construct
  source 1..9: note = Seed: LVVVGACGV (KRAS G12C)
YVVAGMCGA

SEQ ID NO: 4287 - protein, 9 aa, synthetic construct
  source 1..9: note = Seed: LVVVGACGV (KRAS G12C)
YVVAGMCGM

SEQ ID NO: 4288 - protein, 9 aa, synthetic construct
  source 1..9: note = Seed: LVVVGACGV (KRAS G12C)
YVVAGMCGV

SEQ ID NO: 4289 - protein, 9 aa, synthetic construct
  source 1..9: note = Seed: LVVVGACGV (KRAS G12C)
YVVAGNCGA

SEQ ID NO: 4290 - protein, 9 aa, synthetic construct
  source 1..9: note = Seed: LVVVGACGV (KRAS G12C)
YVVAGNCGF

SEQ ID NO: 4291 - protein, 9 aa, synthetic construct
  source 1..9: note = Seed: LVVVGACGV (KRAS G12C)
YVVAGNCGG

SEQ ID NO: 4292 - protein, 9 aa, synthetic construct
  source 1..9: note = Seed: LVVVGACGV (KRAS G12C)
YVVAGNCGI

SEQ ID NO: 4293 - protein, 9 aa, synthetic construct
  source 1..9: note = Seed: LVVVGACGV (KRAS G12C)
YVVAGNCGL

SEQ ID NO: 4294 - protein, 9 aa, synthetic construct
  source 1..9: note = Seed: LVVVGACGV (KRAS G12C)
YVVAGNCGM

SEQ ID NO: 4295 - protein, 9 aa, synthetic construct
  source 1..9: note = Seed: LVVVGACGV (KRAS G12C)
YVVAGNCGS

SEQ ID NO: 4296 - protein, 9 aa, synthetic construct
  source 1..9: note = Seed: LVVVGACGV (KRAS G12C)
YVVAGNCGT

SEQ ID NO: 4297 - protein, 9 aa, synthetic construct
  source 1..9: note = Seed: LVVVGACGV (KRAS G12C)
YVVAGNCGV

SEQ ID NO: 4298 - protein, 9 aa, synthetic construct
  source 1..9: note = Seed: LVVVGACGV (KRAS G12C)
YVVAGNCGY

SEQ ID NO: 4299 - protein, 9 aa, synthetic construct
  source 1..9: note = Seed: LVVVGACGV (KRAS G12C)
YVVAGPCGA

SEQ ID NO: 4300 - protein, 9 aa, synthetic construct
  source 1..9: note = Seed: LVVVGACGV (KRAS G12C)
YVVAGPCGF

SEQ ID NO: 4301 - protein, 9 aa, synthetic construct
  source 1..9: note = Seed: LVVVGACGV (KRAS G12C)
YVVAGPCGG

SEQ ID NO: 4302 - protein, 9 aa, synthetic construct
  source 1..9: note = Seed: LVVVGACGV (KRAS G12C)
YVVAGPCGI

SEQ ID NO: 4303 - protein, 9 aa, synthetic construct
  source 1..9: note = Seed: LVVVGACGV (KRAS G12C)
YVVAGPCGM

SEQ ID NO: 4304 - protein, 9 aa, synthetic construct
  source 1..9: note = Seed: LVVVGACGV (KRAS G12C)
YVVAGPCGN

SEQ ID NO: 4305 - protein, 9 aa, synthetic construct
  source 1..9: note = Seed: LVVVGACGV (KRAS G12C)
YVVAGPCGS

SEQ ID NO: 4306 - protein, 9 aa, synthetic construct
  source 1..9: note = Seed: LVVVGACGV (KRAS G12C)
YVVAGPCGT

SEQ ID NO: 4307 - protein, 9 aa, synthetic construct
  source 1..9: note = Seed: LVVVGACGV (KRAS G12C)
YVVAGPCGY

SEQ ID NO: 4308 - protein, 9 aa, synthetic construct
  source 1..9: note = Seed: LVVVGACGV (KRAS G12C)
YVVAGQCGL

SEQ ID NO: 4309 - protein, 9 aa, synthetic construct
  source 1..9: note = Seed: LVVVGACGV (KRAS G12C)
YVVAGQCGV

SEQ ID NO: 4310 - protein, 9 aa, synthetic construct
  source 1..9: note = Seed: LVVVGACGV (KRAS G12C)
YVVAGSCGA

SEQ ID NO: 4311 - protein, 9 aa, synthetic construct
  source 1..9: note = Seed: LVVVGACGV (KRAS G12C)
YVVAGSCGF

SEQ ID NO: 4312 - protein, 9 aa, synthetic construct
  source 1..9: note = Seed: LVVVGACGV (KRAS G12C)
YVVAGSCGG

SEQ ID NO: 4313 - protein, 9 aa, synthetic construct
  source 1..9: note = Seed: LVVVGACGV (KRAS G12C)
YVVAGSCGM

SEQ ID NO: 4314 - protein, 9 aa, synthetic construct
  source 1..9: note = Seed: LVVVGACGV (KRAS G12C)
YVVAGSCGN

SEQ ID NO: 4315 - protein, 9 aa, synthetic construct
  source 1..9: note = Seed: LVVVGACGV (KRAS G12C)
YVVAGSCGS

SEQ ID NO: 4316 - protein, 9 aa, synthetic construct
  source 1..9: note = Seed: LVVVGACGV (KRAS G12C)
YVVAGSCGT

SEQ ID NO: 4317 - protein, 9 aa, synthetic construct
  source 1..9: note = Seed: LVVVGACGV (KRAS G12C)
YVVAGSCGY

SEQ ID NO: 4318 - protein, 9 aa, synthetic construct
  source 1..9: note = Seed: LVVVGACGV (KRAS G12C)
YVVAGTCGA

SEQ ID NO: 4319 - protein, 9 aa, synthetic construct
  source 1..9: note = Seed: LVVVGACGV (KRAS G12C)
YVVAGTCGF

SEQ ID NO: 4320 - protein, 9 aa, synthetic construct
  source 1..9: note = Seed: LVVVGACGV (KRAS G12C)
YVVAGTCGI

SEQ ID NO: 4321 - protein, 9 aa, synthetic construct
  source 1..9: note = Seed: LVVVGACGV (KRAS G12C)
YVVAGTCGL

SEQ ID NO: 4322 - protein, 9 aa, synthetic construct
  source 1..9: note = Seed: LVVVGACGV (KRAS G12C)
YVVAGTCGM

SEQ ID NO: 4323 - protein, 9 aa, synthetic construct
  source 1..9: note = Seed: LVVVGACGV (KRAS G12C)
YVVAGTCGN

SEQ ID NO: 4324 - protein, 9 aa, synthetic construct
  source 1..9: note = Seed: LVVVGACGV (KRAS G12C)
YVVAGTCGS

SEQ ID NO: 4325 - protein, 9 aa, synthetic construct
  source 1..9: note = Seed: LVVVGACGV (KRAS G12C)
YVVAGTCGT

SEQ ID NO: 4326 - protein, 9 aa, synthetic construct
  source 1..9: note = Seed: LVVVGACGV (KRAS G12C)
YVVAGTCGV

SEQ ID NO: 4327 - protein, 9 aa, synthetic construct
  source 1..9: note = Seed: LVVVGACGV (KRAS G12C)
YVVAGVCGA

SEQ ID NO: 4328 - protein, 9 aa, synthetic construct
  source 1..9: note = Seed: LVVVGACGV (KRAS G12C)
YVVAGVCGH

SEQ ID NO: 4329 - protein, 9 aa, synthetic construct
  source 1..9: note = Seed: LVVVGACGV (KRAS G12C)
YVVAGVCGI

SEQ ID NO: 4330 - protein, 9 aa, synthetic construct
  source 1..9: note = Seed: LVVVGACGV (KRAS G12C)
YVVAGVCGL

SEQ ID NO: 4331 - protein, 9 aa, synthetic construct
  source 1..9: note = Seed: LVVVGACGV (KRAS G12C)
YVVAGVCGM

SEQ ID NO: 4332 - protein, 9 aa, synthetic construct
  source 1..9: note = Seed: LVVVGACGV (KRAS G12C)
YVVAGVCGN

SEQ ID NO: 4333 - protein, 9 aa, synthetic construct
  source 1..9: note = Seed: LVVVGACGV (KRAS G12C)
YVVAGVCGS

SEQ ID NO: 4334 - protein, 9 aa, synthetic construct
  source 1..9: note = Seed: LVVVGACGV (KRAS G12C)
YVVAGVCGT

SEQ ID NO: 4335 - protein, 9 aa, synthetic construct
  source 1..9: note = Seed: LVVVGACGV (KRAS G12C)
YVVAGVCGV

SEQ ID NO: 4336 - protein, 9 aa, synthetic construct
  source 1..9: note = Seed: LVVVGACGV (KRAS G12C)
YVVCGACGA

SEQ ID NO: 4337 - protein, 9 aa, synthetic construct
  source 1..9: note = Seed: LVVVGACGV (KRAS G12C)
YVVCGACGI

SEQ ID NO: 4338 - protein, 9 aa, synthetic construct
  source 1..9: note = Seed: LVVVGACGV (KRAS G12C)
YVVCGACGL

SEQ ID NO: 4339 - protein, 9 aa, synthetic construct
  source 1..9: note = Seed: LVVVGACGV (KRAS G12C)
YVVCGACGM

SEQ ID NO: 4340 - protein, 9 aa, synthetic construct
  source 1..9: note = Seed: LVVVGACGV (KRAS G12C)
YVVCGACGV

SEQ ID NO: 4341 - protein, 9 aa, synthetic construct
  source 1..9: note = Seed: LVVVGACGV (KRAS G12C)
YVVCGGCGL

SEQ ID NO: 4342 - protein, 9 aa, synthetic construct
  source 1..9: note = Seed: LVVVGACGV (KRAS G12C)
YVVCGPCGL

SEQ ID NO: 4343 - protein, 9 aa, synthetic construct
  source 1..9: note = Seed: LVVVGACGV (KRAS G12C)
YVVCGSCGI

SEQ ID NO: 4344 - protein, 9 aa, synthetic construct
  source 1..9: note = Seed: LVVVGACGV (KRAS G12C)
YVVCGSCGL

SEQ ID NO: 4345 - protein, 9 aa, synthetic construct
  source 1..9: note = Seed: LVVVGACGV (KRAS G12C)
YVVCGSCGV

SEQ ID NO: 4346 - protein, 9 aa, synthetic construct
  source 1..9: note = Seed: LVVVGACGV (KRAS G12C)
YVVDGACGI

SEQ ID NO: 4347 - protein, 9 aa, synthetic construct
  source 1..9: note = Seed: LVVVGACGV (KRAS G12C)
YVVDGACGL

SEQ ID NO: 4348 - protein, 9 aa, synthetic construct
  source 1..9: note = Seed: LVVVGACGV (KRAS G12C)
YVVEGACGA

SEQ ID NO: 4349 - protein, 9 aa, synthetic construct
  source 1..9: note = Seed: LVVVGACGV (KRAS G12C)
YVVEGACGF

SEQ ID NO: 4350 - protein, 9 aa, synthetic construct
  source 1..9: note = Seed: LVVVGACGV (KRAS G12C)
YVVEGACGI

SEQ ID NO: 4351 - protein, 9 aa, synthetic construct
  source 1..9: note = Seed: LVVVGACGV (KRAS G12C)
YVVEGACGL

SEQ ID NO: 4352 - protein, 9 aa, synthetic construct
  source 1..9: note = Seed: LVVVGACGV (KRAS G12C)
YVVEGACGM

SEQ ID NO: 4353 - protein, 9 aa, synthetic construct
  source 1..9: note = Seed: LVVVGACGV (KRAS G12C)
YVVEGACGS

SEQ ID NO: 4354 - protein, 9 aa, synthetic construct
  source 1..9: note = Seed: LVVVGACGV (KRAS G12C)
YVVEGACGT

SEQ ID NO: 4355 - protein, 9 aa, synthetic construct
  source 1..9: note = Seed: LVVVGACGV (KRAS G12C)
YVVEGACGV

SEQ ID NO: 4356 - protein, 9 aa, synthetic construct
  source 1..9: note = Seed: LVVVGACGV (KRAS G12C)
YVVEGGCGA

SEQ ID NO: 4357 - protein, 9 aa, synthetic construct
  source 1..9: note = Seed: LVVVGACGV (KRAS G12C)
YVVEGGCGI

SEQ ID NO: 4358 - protein, 9 aa, synthetic construct
  source 1..9: note = Seed: LVVVGACGV (KRAS G12C)
YVVEGGCGL

SEQ ID NO: 4359 - protein, 9 aa, synthetic construct
  source 1..9: note = Seed: LVVVGACGV (KRAS G12C)
YVVEGGCGM

SEQ ID NO: 4360 - protein, 9 aa, synthetic construct
  source 1..9: note = Seed: LVVVGACGV (KRAS G12C)
YVVEGGCGV

SEQ ID NO: 4361 - protein, 9 aa, synthetic construct
  source 1..9: note = Seed: LVVVGACGV (KRAS G12C)
YVVEGNCGA

SEQ ID NO: 4362 - protein, 9 aa, synthetic construct
  source 1..9: note = Seed: LVVVGACGV (KRAS G12C)
YVVEGNCGI

SEQ ID NO: 4363 - protein, 9 aa, synthetic construct
  source 1..9: note = Seed: LVVVGACGV (KRAS G12C)
YVVEGNCGL

SEQ ID NO: 4364 - protein, 9 aa, synthetic construct
  source 1..9: note = Seed: LVVVGACGV (KRAS G12C)
YVVEGNCGM

SEQ ID NO: 4365 - protein, 9 aa, synthetic construct
  source 1..9: note = Seed: LVVVGACGV (KRAS G12C)
YVVEGNCGV

SEQ ID NO: 4366 - protein, 9 aa, synthetic construct
  source 1..9: note = Seed: LVVVGACGV (KRAS G12C)
YVVEGPCGA

SEQ ID NO: 4367 - protein, 9 aa, synthetic construct
  source 1..9: note = Seed: LVVVGACGV (KRAS G12C)
YVVEGPCGI

SEQ ID NO: 4368 - protein, 9 aa, synthetic construct
  source 1..9: note = Seed: LVVVGACGV (KRAS G12C)
YVVEGPCGL

SEQ ID NO: 4369 - protein, 9 aa, synthetic construct
  source 1..9: note = Seed: LVVVGACGV (KRAS G12C)
YVVEGPCGM

SEQ ID NO: 4370 - protein, 9 aa, synthetic construct
  source 1..9: note = Seed: LVVVGACGV (KRAS G12C)
YVVEGPCGV

SEQ ID NO: 4371 - protein, 9 aa, synthetic construct
  source 1..9: note = Seed: LVVVGACGV (KRAS G12C)
YVVEGSCGA

SEQ ID NO: 4372 - protein, 9 aa, synthetic construct
  source 1..9: note = Seed: LVVVGACGV (KRAS G12C)
YVVEGSCGI

SEQ ID NO: 4373 - protein, 9 aa, synthetic construct
  source 1..9: note = Seed: LVVVGACGV (KRAS G12C)
YVVEGSCGL

SEQ ID NO: 4374 - protein, 9 aa, synthetic construct
  source 1..9: note = Seed: LVVVGACGV (KRAS G12C)
YVVEGSCGM

SEQ ID NO: 4375 - protein, 9 aa, synthetic construct
  source 1..9: note = Seed: LVVVGACGV (KRAS G12C)
YVVEGSCGS

SEQ ID NO: 4376 - protein, 9 aa, synthetic construct
  source 1..9: note = Seed: LVVVGACGV (KRAS G12C)
YVVEGSCGT

SEQ ID NO: 4377 - protein, 9 aa, synthetic construct
  source 1..9: note = Seed: LVVVGACGV (KRAS G12C)
YVVEGSCGV

SEQ ID NO: 4378 - protein, 9 aa, synthetic construct
  source 1..9: note = Seed: LVVVGACGV (KRAS G12C)
YVVEGTCGI

SEQ ID NO: 4379 - protein, 9 aa, synthetic construct
  source 1..9: note = Seed: LVVVGACGV (KRAS G12C)
YVVEGTCGL

SEQ ID NO: 4380 - protein, 9 aa, synthetic construct
  source 1..9: note = Seed: LVVVGACGV (KRAS G12C)
YVVEGTCGV

SEQ ID NO: 4381 - protein, 9 aa, synthetic construct
  source 1..9: note = Seed: LVVVGACGV (KRAS G12C)
YVVEGVCGL

SEQ ID NO: 4382 - protein, 9 aa, synthetic construct
  source 1..9: note = Seed: LVVVGACGV (KRAS G12C)
YVVEGVCGV

SEQ ID NO: 4383 - protein, 9 aa, synthetic construct
  source 1..9: note = Seed: LVVVGACGV (KRAS G12C)
YVVFGACGA

SEQ ID NO: 4384 - protein, 9 aa, synthetic construct
  source 1..9: note = Seed: LVVVGACGV (KRAS G12C)
YVVFGACGH

SEQ ID NO: 4385 - protein, 9 aa, synthetic construct
  source 1..9: note = Seed: LVVVGACGV (KRAS G12C)
YVVFGACGI

SEQ ID NO: 4386 - protein, 9 aa, synthetic construct
  source 1..9: note = Seed: LVVVGACGV (KRAS G12C)
YVVFGACGL

SEQ ID NO: 4387 - protein, 9 aa, synthetic construct
  source 1..9: note = Seed: LVVVGACGV (KRAS G12C)
YVVFGACGM

SEQ ID NO: 4388 - protein, 9 aa, synthetic construct
  source 1..9: note = Seed: LVVVGACGV (KRAS G12C)
YVVFGACGN

SEQ ID NO: 4389 - protein, 9 aa, synthetic construct
  source 1..9: note = Seed: LVVVGACGV (KRAS G12C)
YVVFGACGS

SEQ ID NO: 4390 - protein, 9 aa, synthetic construct
  source 1..9: note = Seed: LVVVGACGV (KRAS G12C)
YVVFGACGT

SEQ ID NO: 4391 - protein, 9 aa, synthetic construct
  source 1..9: note = Seed: LVVVGACGV (KRAS G12C)
YVVFGACGV

SEQ ID NO: 4392 - protein, 9 aa, synthetic construct
  source 1..9: note = Seed: LVVVGACGV (KRAS G12C)
YVVFGGCGA

SEQ ID NO: 4393 - protein, 9 aa, synthetic construct
  source 1..9: note = Seed: LVVVGACGV (KRAS G12C)
YVVFGGCGI

SEQ ID NO: 4394 - protein, 9 aa, synthetic construct
  source 1..9: note = Seed: LVVVGACGV (KRAS G12C)
YVVFGGCGL

SEQ ID NO: 4395 - protein, 9 aa, synthetic construct
  source 1..9: note = Seed: LVVVGACGV (KRAS G12C)
YVVFGGCGM

SEQ ID NO: 4396 - protein, 9 aa, synthetic construct
  source 1..9: note = Seed: LVVVGACGV (KRAS G12C)
YVVFGGCGS

SEQ ID NO: 4397 - protein, 9 aa, synthetic construct
  source 1..9: note = Seed: LVVVGACGV (KRAS G12C)
YVVFGGCGT

SEQ ID NO: 4398 - protein, 9 aa, synthetic construct
  source 1..9: note = Seed: LVVVGACGV (KRAS G12C)
YVVFGGCGV

SEQ ID NO: 4399 - protein, 9 aa, synthetic construct
  source 1..9: note = Seed: LVVVGACGV (KRAS G12C)
YVVFGNCGA

SEQ ID NO: 4400 - protein, 9 aa, synthetic construct
  source 1..9: note = Seed: LVVVGACGV (KRAS G12C)
YVVFGNCGI

SEQ ID NO: 4401 - protein, 9 aa, synthetic construct
  source 1..9: note = Seed: LVVVGACGV (KRAS G12C)
YVVFGNCGL

SEQ ID NO: 4402 - protein, 9 aa, synthetic construct
  source 1..9: note = Seed: LVVVGACGV (KRAS G12C)
YVVFGNCGM

SEQ ID NO: 4403 - protein, 9 aa, synthetic construct
  source 1..9: note = Seed: LVVVGACGV (KRAS G12C)
YVVFGNCGV

SEQ ID NO: 4404 - protein, 9 aa, synthetic construct
  source 1..9: note = Seed: LVVVGACGV (KRAS G12C)
YVVFGPCGA

SEQ ID NO: 4405 - protein, 9 aa, synthetic construct
  source 1..9: note = Seed: LVVVGACGV (KRAS G12C)
YVVFGPCGI

SEQ ID NO: 4406 - protein, 9 aa, synthetic construct
  source 1..9: note = Seed: LVVVGACGV (KRAS G12C)
YVVFGPCGL

SEQ ID NO: 4407 - protein, 9 aa, synthetic construct
  source 1..9: note = Seed: LVVVGACGV (KRAS G12C)
YVVFGPCGM

SEQ ID NO: 4408 - protein, 9 aa, synthetic construct
  source 1..9: note = Seed: LVVVGACGV (KRAS G12C)
YVVFGPCGS

SEQ ID NO: 4409 - protein, 9 aa, synthetic construct
  source 1..9: note = Seed: LVVVGACGV (KRAS G12C)
YVVFGPCGT

SEQ ID NO: 4410 - protein, 9 aa, synthetic construct
  source 1..9: note = Seed: LVVVGACGV (KRAS G12C)
YVVFGPCGV

SEQ ID NO: 4411 - protein, 9 aa, synthetic construct
  source 1..9: note = Seed: LVVVGACGV (KRAS G12C)
YVVFGSCGA

SEQ ID NO: 4412 - protein, 9 aa, synthetic construct
  source 1..9: note = Seed: LVVVGACGV (KRAS G12C)
YVVFGSCGI

SEQ ID NO: 4413 - protein, 9 aa, synthetic construct
  source 1..9: note = Seed: LVVVGACGV (KRAS G12C)
YVVFGSCGL

SEQ ID NO: 4414 - protein, 9 aa, synthetic construct
  source 1..9: note = Seed: LVVVGACGV (KRAS G12C)
YVVFGSCGM

SEQ ID NO: 4415 - protein, 9 aa, synthetic construct
  source 1..9: note = Seed: LVVVGACGV (KRAS G12C)
YVVFGSCGS

SEQ ID NO: 4416 - protein, 9 aa, synthetic construct
  source 1..9: note = Seed: LVVVGACGV (KRAS G12C)
YVVFGSCGT

SEQ ID NO: 4417 - protein, 9 aa, synthetic construct
  source 1..9: note = Seed: LVVVGACGV (KRAS G12C)
YVVFGSCGV

SEQ ID NO: 4418 - protein, 9 aa, synthetic construct
  source 1..9: note = Seed: LVVVGACGV (KRAS G12C)
YVVFGTCGA

SEQ ID NO: 4419 - protein, 9 aa, synthetic construct
  source 1..9: note = Seed: LVVVGACGV (KRAS G12C)
YVVFGTCGI

SEQ ID NO: 4420 - protein, 9 aa, synthetic construct
  source 1..9: note = Seed: LVVVGACGV (KRAS G12C)
YVVFGTCGL

SEQ ID NO: 4421 - protein, 9 aa, synthetic construct
  source 1..9: note = Seed: LVVVGACGV (KRAS G12C)
YVVFGTCGM

SEQ ID NO: 4422 - protein, 9 aa, synthetic construct
  source 1..9: note = Seed: LVVVGACGV (KRAS G12C)
YVVFGTCGV

SEQ ID NO: 4423 - protein, 9 aa, synthetic construct
  source 1..9: note = Seed: LVVVGACGV (KRAS G12C)
YVVGGACGA

SEQ ID NO: 4424 - protein, 9 aa, synthetic construct
  source 1..9: note = Seed: LVVVGACGV (KRAS G12C)
YVVGGACGI

SEQ ID NO: 4425 - protein, 9 aa, synthetic construct
  source 1..9: note = Seed: LVVVGACGV (KRAS G12C)
YVVGGACGL

SEQ ID NO: 4426 - protein, 9 aa, synthetic construct
  source 1..9: note = Seed: LVVVGACGV (KRAS G12C)
YVVGGACGM

SEQ ID NO: 4427 - protein, 9 aa, synthetic construct
  source 1..9: note = Seed: LVVVGACGV (KRAS G12C)
YVVGGACGT

SEQ ID NO: 4428 - protein, 9 aa, synthetic construct
  source 1..9: note = Seed: LVVVGACGV (KRAS G12C)
YVVGGACGV

SEQ ID NO: 4429 - protein, 9 aa, synthetic construct
  source 1..9: note = Seed: LVVVGACGV (KRAS G12C)
YVVGGGCGI

SEQ ID NO: 4430 - protein, 9 aa, synthetic construct
  source 1..9: note = Seed: LVVVGACGV (KRAS G12C)
YVVGGGCGL

SEQ ID NO: 4431 - protein, 9 aa, synthetic construct
  source 1..9: note = Seed: LVVVGACGV (KRAS G12C)
YVVGGGCGM

SEQ ID NO: 4432 - protein, 9 aa, synthetic construct
  source 1..9: note = Seed: LVVVGACGV (KRAS G12C)
YVVGGGCGV

SEQ ID NO: 4433 - protein, 9 aa, synthetic construct
  source 1..9: note = Seed: LVVVGACGV (KRAS G12C)
YVVGGNCGI

SEQ ID NO: 4434 - protein, 9 aa, synthetic construct
  source 1..9: note = Seed: LVVVGACGV (KRAS G12C)
YVVGGNCGL

SEQ ID NO: 4435 - protein, 9 aa, synthetic construct
  source 1..9: note = Seed: LVVVGACGV (KRAS G12C)
YVVGGNCGV

SEQ ID NO: 4436 - protein, 9 aa, synthetic construct
  source 1..9: note = Seed: LVVVGACGV (KRAS G12C)
YVVGGPCGI

SEQ ID NO: 4437 - protein, 9 aa, synthetic construct
  source 1..9: note = Seed: LVVVGACGV (KRAS G12C)
YVVGGPCGL

SEQ ID NO: 4438 - protein, 9 aa, synthetic construct
  source 1..9: note = Seed: LVVVGACGV (KRAS G12C)
YVVGGPCGV

SEQ ID NO: 4439 - protein, 9 aa, synthetic construct
  source 1..9: note = Seed: LVVVGACGV (KRAS G12C)
YVVGGSCGA

SEQ ID NO: 4440 - protein, 9 aa, synthetic construct
  source 1..9: note = Seed: LVVVGACGV (KRAS G12C)
YVVGGSCGI

SEQ ID NO: 4441 - protein, 9 aa, synthetic construct
  source 1..9: note = Seed: LVVVGACGV (KRAS G12C)
YVVGGSCGL

SEQ ID NO: 4442 - protein, 9 aa, synthetic construct
  source 1..9: note = Seed: LVVVGACGV (KRAS G12C)
YVVGGSCGM

SEQ ID NO: 4443 - protein, 9 aa, synthetic construct
  source 1..9: note = Seed: LVVVGACGV (KRAS G12C)
YVVGGSCGV

SEQ ID NO: 4444 - protein, 9 aa, synthetic construct
  source 1..9: note = Seed: LVVVGACGV (KRAS G12C)
YVVGGTCGI

SEQ ID NO: 4445 - protein, 9 aa, synthetic construct
  source 1..9: note = Seed: LVVVGACGV (KRAS G12C)
YVVGGTCGL

SEQ ID NO: 4446 - protein, 9 aa, synthetic construct
  source 1..9: note = Seed: LVVVGACGV (KRAS G12C)
YVVGGTCGV

SEQ ID NO: 4447 - protein, 9 aa, synthetic construct
  source 1..9: note = Seed: LVVVGACGV (KRAS G12C)
YVVGGVCGL

SEQ ID NO: 4448 - protein, 9 aa, synthetic construct
  source 1..9: note = Seed: LVVVGACGV (KRAS G12C)
YVVHGACGA

SEQ ID NO: 4449 - protein, 9 aa, synthetic construct
  source 1..9: note = Seed: LVVVGACGV (KRAS G12C)
YVVHGACGI

SEQ ID NO: 4450 - protein, 9 aa, synthetic construct
  source 1..9: note = Seed: LVVVGACGV (KRAS G12C)
YVVHGACGL

SEQ ID NO: 4451 - protein, 9 aa, synthetic construct
  source 1..9: note = Seed: LVVVGACGV (KRAS G12C)
YVVHGACGM

SEQ ID NO: 4452 - protein, 9 aa, synthetic construct
  source 1..9: note = Seed: LVVVGACGV (KRAS G12C)
YVVHGACGV

SEQ ID NO: 4453 - protein, 9 aa, synthetic construct
  source 1..9: note = Seed: LVVVGACGV (KRAS G12C)
YVVHGGCGA

SEQ ID NO: 4454 - protein, 9 aa, synthetic construct
  source 1..9: note = Seed: LVVVGACGV (KRAS G12C)
YVVHGGCGI

SEQ ID NO: 4455 - protein, 9 aa, synthetic construct
  source 1..9: note = Seed: LVVVGACGV (KRAS G12C)
YVVHGGCGL

SEQ ID NO: 4456 - protein, 9 aa, synthetic construct
  source 1..9: note = Seed: LVVVGACGV (KRAS G12C)
YVVHGGCGM

SEQ ID NO: 4457 - protein, 9 aa, synthetic construct
  source 1..9: note = Seed: LVVVGACGV (KRAS G12C)
YVVHGGCGV

SEQ ID NO: 4458 - protein, 9 aa, synthetic construct
  source 1..9: note = Seed: LVVVGACGV (KRAS G12C)
YVVHGNCGI

SEQ ID NO: 4459 - protein, 9 aa, synthetic construct
  source 1..9: note = Seed: LVVVGACGV (KRAS G12C)
YVVHGNCGL

SEQ ID NO: 4460 - protein, 9 aa, synthetic construct
  source 1..9: note = Seed: LVVVGACGV (KRAS G12C)
YVVHGNCGV

SEQ ID NO: 4461 - protein, 9 aa, synthetic construct
  source 1..9: note = Seed: LVVVGACGV (KRAS G12C)
YVVHGPCGL

SEQ ID NO: 4462 - protein, 9 aa, synthetic construct
  source 1..9: note = Seed: LVVVGACGV (KRAS G12C)
YVVHGPCGV

SEQ ID NO: 4463 - protein, 9 aa, synthetic construct
  source 1..9: note = Seed: LVVVGACGV (KRAS G12C)
YVVHGSCGA

SEQ ID NO: 4464 - protein, 9 aa, synthetic construct
  source 1..9: note = Seed: LVVVGACGV (KRAS G12C)
YVVHGSCGI

SEQ ID NO: 4465 - protein, 9 aa, synthetic construct
  source 1..9: note = Seed: LVVVGACGV (KRAS G12C)
YVVHGSCGL

SEQ ID NO: 4466 - protein, 9 aa, synthetic construct
  source 1..9: note = Seed: LVVVGACGV (KRAS G12C)
YVVHGSCGM

SEQ ID NO: 4467 - protein, 9 aa, synthetic construct
  source 1..9: note = Seed: LVVVGACGV (KRAS G12C)
YVVHGSCGV

SEQ ID NO: 4468 - protein, 9 aa, synthetic construct
  source 1..9: note = Seed: LVVVGACGV (KRAS G12C)
YVVHGTCGL

SEQ ID NO: 4469 - protein, 9 aa, synthetic construct
  source 1..9: note = Seed: LVVVGACGV (KRAS G12C)
YVVHGVCGL

SEQ ID NO: 4470 - protein, 9 aa, synthetic construct
  source 1..9: note = Seed: LVVVGACGV (KRAS G12C)
YVVIGACGD

SEQ ID NO: 4471 - protein, 9 aa, synthetic construct
  source 1..9: note = Seed: LVVVGACGV (KRAS G12C)
YVVIGACGE

SEQ ID NO: 4472 - protein, 9 aa, synthetic construct
  source 1..9: note = Seed: LVVVGACGV (KRAS G12C)
YVVIGACGF

SEQ ID NO: 4473 - protein, 9 aa, synthetic construct
  source 1..9: note = Seed: LVVVGACGV (KRAS G12C)
YVVIGACGG

SEQ ID NO: 4474 - protein, 9 aa, synthetic construct
  source 1..9: note = Seed: LVVVGACGV (KRAS G12C)
YVVIGACGH

SEQ ID NO: 4475 - protein, 9 aa, synthetic construct
  source 1..9: note = Seed: LVVVGACGV (KRAS G12C)
YVVIGACGK

SEQ ID NO: 4476 - protein, 9 aa, synthetic construct
  source 1..9: note = Seed: LVVVGACGV (KRAS G12C)
YVVIGACGM

SEQ ID NO: 4477 - protein, 9 aa, synthetic construct
  source 1..9: note = Seed: LVVVGACGV (KRAS G12C)
YVVIGACGN

SEQ ID NO: 4478 - protein, 9 aa, synthetic construct
  source 1..9: note = Seed: LVVVGACGV (KRAS G12C)
YVVIGACGP

SEQ ID NO: 4479 - protein, 9 aa, synthetic construct
  source 1..9: note = Seed: LVVVGACGV (KRAS G12C)
YVVIGACGQ

SEQ ID NO: 4480 - protein, 9 aa, synthetic construct
  source 1..9: note = Seed: LVVVGACGV (KRAS G12C)
YVVIGACGR

SEQ ID NO: 4481 - protein, 9 aa, synthetic construct
  source 1..9: note = Seed: LVVVGACGV (KRAS G12C)
YVVIGACGS

SEQ ID NO: 4482 - protein, 9 aa, synthetic construct
  source 1..9: note = Seed: LVVVGACGV (KRAS G12C)
YVVIGACGT

SEQ ID NO: 4483 - protein, 9 aa, synthetic construct
  source 1..9: note = Seed: LVVVGACGV (KRAS G12C)
YVVIGACGY

SEQ ID NO: 4484 - protein, 9 aa, synthetic construct
  source 1..9: note = Seed: LVVVGACGV (KRAS G12C)
YVVIGDCGL

SEQ ID NO: 4485 - protein, 9 aa, synthetic construct
  source 1..9: note = Seed: LVVVGACGV (KRAS G12C)
YVVIGDCGV

SEQ ID NO: 4486 - protein, 9 aa, synthetic construct
  source 1..9: note = Seed: LVVVGACGV (KRAS G12C)
YVVIGECGA

SEQ ID NO: 4487 - protein, 9 aa, synthetic construct
  source 1..9: note = Seed: LVVVGACGV (KRAS G12C)
YVVIGECGI

SEQ ID NO: 4488 - protein, 9 aa, synthetic construct
  source 1..9: note = Seed: LVVVGACGV (KRAS G12C)
YVVIGECGL

SEQ ID NO: 4489 - protein, 9 aa, synthetic construct
  source 1..9: note = Seed: LVVVGACGV (KRAS G12C)
YVVIGECGV

SEQ ID NO: 4490 - protein, 9 aa, synthetic construct
  source 1..9: note = Seed: LVVVGACGV (KRAS G12C)
YVVIGGCGA

SEQ ID NO: 4491 - protein, 9 aa, synthetic construct
  source 1..9: note = Seed: LVVVGACGV (KRAS G12C)
YVVIGGCGF

SEQ ID NO: 4492 - protein, 9 aa, synthetic construct
  source 1..9: note = Seed: LVVVGACGV (KRAS G12C)
YVVIGGCGG

SEQ ID NO: 4493 - protein, 9 aa, synthetic construct
  source 1..9: note = Seed: LVVVGACGV (KRAS G12C)
YVVIGGCGH

SEQ ID NO: 4494 - protein, 9 aa, synthetic construct
  source 1..9: note = Seed: LVVVGACGV (KRAS G12C)
YVVIGGCGM

SEQ ID NO: 4495 - protein, 9 aa, synthetic construct
  source 1..9: note = Seed: LVVVGACGV (KRAS G12C)
YVVIGGCGN

SEQ ID NO: 4496 - protein, 9 aa, synthetic construct
  source 1..9: note = Seed: LVVVGACGV (KRAS G12C)
YVVIGGCGP

SEQ ID NO: 4497 - protein, 9 aa, synthetic construct
  source 1..9: note = Seed: LVVVGACGV (KRAS G12C)
YVVIGGCGQ

SEQ ID NO: 4498 - protein, 9 aa, synthetic construct
  source 1..9: note = Seed: LVVVGACGV (KRAS G12C)
YVVIGGCGS

SEQ ID NO: 4499 - protein, 9 aa, synthetic construct
  source 1..9: note = Seed: LVVVGACGV (KRAS G12C)
YVVIGGCGT

SEQ ID NO: 4500 - protein, 9 aa, synthetic construct
  source 1..9: note = Seed: LVVVGACGV (KRAS G12C)
YVVIGGCGY

SEQ ID NO: 4501 - protein, 9 aa, synthetic construct
  source 1..9: note = Seed: LVVVGACGV (KRAS G12C)
YVVIGHCGA

SEQ ID NO: 4502 - protein, 9 aa, synthetic construct
  source 1..9: note = Seed: LVVVGACGV (KRAS G12C)
YVVIGHCGI

SEQ ID NO: 4503 - protein, 9 aa, synthetic construct
  source 1..9: note = Seed: LVVVGACGV (KRAS G12C)
YVVIGHCGL

SEQ ID NO: 4504 - protein, 9 aa, synthetic construct
  source 1..9: note = Seed: LVVVGACGV (KRAS G12C)
YVVIGHCGM

SEQ ID NO: 4505 - protein, 9 aa, synthetic construct
  source 1..9: note = Seed: LVVVGACGV (KRAS G12C)
YVVIGHCGV

SEQ ID NO: 4506 - protein, 9 aa, synthetic construct
  source 1..9: note = Seed: LVVVGACGV (KRAS G12C)
YVVIGICGA

SEQ ID NO: 4507 - protein, 9 aa, synthetic construct
  source 1..9: note = Seed: LVVVGACGV (KRAS G12C)
YVVIGICGH

SEQ ID NO: 4508 - protein, 9 aa, synthetic construct
  source 1..9: note = Seed: LVVVGACGV (KRAS G12C)
YVVIGICGN

SEQ ID NO: 4509 - protein, 9 aa, synthetic construct
  source 1..9: note = Seed: LVVVGACGV (KRAS G12C)
YVVIGICGS

SEQ ID NO: 4510 - protein, 9 aa, synthetic construct
  source 1..9: note = Seed: LVVVGACGV (KRAS G12C)
YVVIGICGV

SEQ ID NO: 4511 - protein, 9 aa, synthetic construct
  source 1..9: note = Seed: LVVVGACGV (KRAS G12C)
YVVIGLCGA

SEQ ID NO: 4512 - protein, 9 aa, synthetic construct
  source 1..9: note = Seed: LVVVGACGV (KRAS G12C)
YVVIGLCGN

SEQ ID NO: 4513 - protein, 9 aa, synthetic construct
  source 1..9: note = Seed: LVVVGACGV (KRAS G12C)
YVVIGMCGA

SEQ ID NO: 4514 - protein, 9 aa, synthetic construct
  source 1..9: note = Seed: LVVVGACGV (KRAS G12C)
YVVIGMCGH

SEQ ID NO: 4515 - protein, 9 aa, synthetic construct
  source 1..9: note = Seed: LVVVGACGV (KRAS G12C)
YVVIGMCGL

SEQ ID NO: 4516 - protein, 9 aa, synthetic construct
  source 1..9: note = Seed: LVVVGACGV (KRAS G12C)
YVVIGMCGN

SEQ ID NO: 4517 - protein, 9 aa, synthetic construct
  source 1..9: note = Seed: LVVVGACGV (KRAS G12C)
YVVIGMCGS

SEQ ID NO: 4518 - protein, 9 aa, synthetic construct
  source 1..9: note = Seed: LVVVGACGV (KRAS G12C)
YVVIGMCGV

SEQ ID NO: 4519 - protein, 9 aa, synthetic construct
  source 1..9: note = Seed: LVVVGACGV (KRAS G12C)
YVVIGNCGA

SEQ ID NO: 4520 - protein, 9 aa, synthetic construct
  source 1..9: note = Seed: LVVVGACGV (KRAS G12C)
YVVIGNCGF

SEQ ID NO: 4521 - protein, 9 aa, synthetic construct
  source 1..9: note = Seed: LVVVGACGV (KRAS G12C)
YVVIGNCGG

SEQ ID NO: 4522 - protein, 9 aa, synthetic construct
  source 1..9: note = Seed: LVVVGACGV (KRAS G12C)
YVVIGNCGH

SEQ ID NO: 4523 - protein, 9 aa, synthetic construct
  source 1..9: note = Seed: LVVVGACGV (KRAS G12C)
YVVIGNCGI

SEQ ID NO: 4524 - protein, 9 aa, synthetic construct
  source 1..9: note = Seed: LVVVGACGV (KRAS G12C)
YVVIGNCGL

SEQ ID NO: 4525 - protein, 9 aa, synthetic construct
  source 1..9: note = Seed: LVVVGACGV (KRAS G12C)
YVVIGNCGM

SEQ ID NO: 4526 - protein, 9 aa, synthetic construct
  source 1..9: note = Seed: LVVVGACGV (KRAS G12C)
YVVIGNCGN

SEQ ID NO: 4527 - protein, 9 aa, synthetic construct
  source 1..9: note = Seed: LVVVGACGV (KRAS G12C)
YVVIGNCGP

SEQ ID NO: 4528 - protein, 9 aa, synthetic construct
  source 1..9: note = Seed: LVVVGACGV (KRAS G12C)
YVVIGNCGQ

SEQ ID NO: 4529 - protein, 9 aa, synthetic construct
  source 1..9: note = Seed: LVVVGACGV (KRAS G12C)
YVVIGNCGS

SEQ ID NO: 4530 - protein, 9 aa, synthetic construct
  source 1..9: note = Seed: LVVVGACGV (KRAS G12C)
YVVIGNCGT

SEQ ID NO: 4531 - protein, 9 aa, synthetic construct
  source 1..9: note = Seed: LVVVGACGV (KRAS G12C)
YVVIGNCGV

SEQ ID NO: 4532 - protein, 9 aa, synthetic construct
  source 1..9: note = Seed: LVVVGACGV (KRAS G12C)
YVVIGNCGY

SEQ ID NO: 4533 - protein, 9 aa, synthetic construct
  source 1..9: note = Seed: LVVVGACGV (KRAS G12C)
YVVIGPCGA

SEQ ID NO: 4534 - protein, 9 aa, synthetic construct
  source 1..9: note = Seed: LVVVGACGV (KRAS G12C)
YVVIGPCGC

SEQ ID NO: 4535 - protein, 9 aa, synthetic construct
  source 1..9: note = Seed: LVVVGACGV (KRAS G12C)
YVVIGPCGD

SEQ ID NO: 4536 - protein, 9 aa, synthetic construct
  source 1..9: note = Seed: LVVVGACGV (KRAS G12C)
YVVIGPCGE

SEQ ID NO: 4537 - protein, 9 aa, synthetic construct
  source 1..9: note = Seed: LVVVGACGV (KRAS G12C)
YVVIGPCGF

SEQ ID NO: 4538 - protein, 9 aa, synthetic construct
  source 1..9: note = Seed: LVVVGACGV (KRAS G12C)
YVVIGPCGG

SEQ ID NO: 4539 - protein, 9 aa, synthetic construct
  source 1..9: note = Seed: LVVVGACGV (KRAS G12C)
YVVIGPCGH

SEQ ID NO: 4540 - protein, 9 aa, synthetic construct
  source 1..9: note = Seed: LVVVGACGV (KRAS G12C)
YVVIGPCGM

SEQ ID NO: 4541 - protein, 9 aa, synthetic construct
  source 1..9: note = Seed: LVVVGACGV (KRAS G12C)
YVVIGPCGN

SEQ ID NO: 4542 - protein, 9 aa, synthetic construct
  source 1..9: note = Seed: LVVVGACGV (KRAS G12C)
YVVIGPCGP

SEQ ID NO: 4543 - protein, 9 aa, synthetic construct
  source 1..9: note = Seed: LVVVGACGV (KRAS G12C)
YVVIGPCGQ

SEQ ID NO: 4544 - protein, 9 aa, synthetic construct
  source 1..9: note = Seed: LVVVGACGV (KRAS G12C)
YVVIGPCGS

SEQ ID NO: 4545 - protein, 9 aa, synthetic construct
  source 1..9: note = Seed: LVVVGACGV (KRAS G12C)
YVVIGPCGT

SEQ ID NO: 4546 - protein, 9 aa, synthetic construct
  source 1..9: note = Seed: LVVVGACGV (KRAS G12C)
YVVIGPCGY

SEQ ID NO: 4547 - protein, 9 aa, synthetic construct
  source 1..9: note = Seed: LVVVGACGV (KRAS G12C)
YVVIGQCGA

SEQ ID NO: 4548 - protein, 9 aa, synthetic construct
  source 1..9: note = Seed: LVVVGACGV (KRAS G12C)
YVVIGQCGI

SEQ ID NO: 4549 - protein, 9 aa, synthetic construct
  source 1..9: note = Seed: LVVVGACGV (KRAS G12C)
YVVIGQCGL

SEQ ID NO: 4550 - protein, 9 aa, synthetic construct
  source 1..9: note = Seed: LVVVGACGV (KRAS G12C)
YVVIGQCGM

SEQ ID NO: 4551 - protein, 9 aa, synthetic construct
  source 1..9: note = Seed: LVVVGACGV (KRAS G12C)
YVVIGQCGV

SEQ ID NO: 4552 - protein, 9 aa, synthetic construct
  source 1..9: note = Seed: LVVVGACGV (KRAS G12C)
YVVIGRCGH

SEQ ID NO: 4553 - protein, 9 aa, synthetic construct
  source 1..9: note = Seed: LVVVGACGV (KRAS G12C)
YVVIGRCGR

SEQ ID NO: 4554 - protein, 9 aa, synthetic construct
  source 1..9: note = Seed: LVVVGACGV (KRAS G12C)
YVVIGSCGF

SEQ ID NO: 4555 - protein, 9 aa, synthetic construct
  source 1..9: note = Seed: LVVVGACGV (KRAS G12C)
YVVIGSCGG

SEQ ID NO: 4556 - protein, 9 aa, synthetic construct
  source 1..9: note = Seed: LVVVGACGV (KRAS G12C)
YVVIGSCGH

SEQ ID NO: 4557 - protein, 9 aa, synthetic construct
  source 1..9: note = Seed: LVVVGACGV (KRAS G12C)
YVVIGSCGI

SEQ ID NO: 4558 - protein, 9 aa, synthetic construct
  source 1..9: note = Seed: LVVVGACGV (KRAS G12C)
YVVIGSCGK

SEQ ID NO: 4559 - protein, 9 aa, synthetic construct
  source 1..9: note = Seed: LVVVGACGV (KRAS G12C)
YVVIGSCGM

SEQ ID NO: 4560 - protein, 9 aa, synthetic construct
  source 1..9: note = Seed: LVVVGACGV (KRAS G12C)
YVVIGSCGN

SEQ ID NO: 4561 - protein, 9 aa, synthetic construct
  source 1..9: note = Seed: LVVVGACGV (KRAS G12C)
YVVIGSCGP

SEQ ID NO: 4562 - protein, 9 aa, synthetic construct
  source 1..9: note = Seed: LVVVGACGV (KRAS G12C)
YVVIGSCGQ

SEQ ID NO: 4563 - protein, 9 aa, synthetic construct
  source 1..9: note = Seed: LVVVGACGV (KRAS G12C)
YVVIGSCGR

SEQ ID NO: 4564 - protein, 9 aa, synthetic construct
  source 1..9: note = Seed: LVVVGACGV (KRAS G12C)
YVVIGSCGS

SEQ ID NO: 4565 - protein, 9 aa, synthetic construct
  source 1..9: note = Seed: LVVVGACGV (KRAS G12C)
YVVIGSCGT

SEQ ID NO: 4566 - protein, 9 aa, synthetic construct
  source 1..9: note = Seed: LVVVGACGV (KRAS G12C)
YVVIGSCGY

SEQ ID NO: 4567 - protein, 9 aa, synthetic construct
  source 1..9: note = Seed: LVVVGACGV (KRAS G12C)
YVVIGTCGA

SEQ ID NO: 4568 - protein, 9 aa, synthetic construct
  source 1..9: note = Seed: LVVVGACGV (KRAS G12C)
YVVIGTCGF

SEQ ID NO: 4569 - protein, 9 aa, synthetic construct
  source 1..9: note = Seed: LVVVGACGV (KRAS G12C)
YVVIGTCGG

SEQ ID NO: 4570 - protein, 9 aa, synthetic construct
  source 1..9: note = Seed: LVVVGACGV (KRAS G12C)
YVVIGTCGH

SEQ ID NO: 4571 - protein, 9 aa, synthetic construct
  source 1..9: note = Seed: LVVVGACGV (KRAS G12C)
YVVIGTCGI

SEQ ID NO: 4572 - protein, 9 aa, synthetic construct
  source 1..9: note = Seed: LVVVGACGV (KRAS G12C)
YVVIGTCGL

SEQ ID NO: 4573 - protein, 9 aa, synthetic construct
  source 1..9: note = Seed: LVVVGACGV (KRAS G12C)
YVVIGTCGM

SEQ ID NO: 4574 - protein, 9 aa, synthetic construct
  source 1..9: note = Seed: LVVVGACGV (KRAS G12C)
YVVIGTCGN

SEQ ID NO: 4575 - protein, 9 aa, synthetic construct
  source 1..9: note = Seed: LVVVGACGV (KRAS G12C)
YVVIGTCGQ

SEQ ID NO: 4576 - protein, 9 aa, synthetic construct
  source 1..9: note = Seed: LVVVGACGV (KRAS G12C)
YVVIGTCGS

SEQ ID NO: 4577 - protein, 9 aa, synthetic construct
  source 1..9: note = Seed: LVVVGACGV (KRAS G12C)
YVVIGTCGT

SEQ ID NO: 4578 - protein, 9 aa, synthetic construct
  source 1..9: note = Seed: LVVVGACGV (KRAS G12C)
YVVIGTCGV

SEQ ID NO: 4579 - protein, 9 aa, synthetic construct
  source 1..9: note = Seed: LVVVGACGV (KRAS G12C)
YVVIGTCGY

SEQ ID NO: 4580 - protein, 9 aa, synthetic construct
  source 1..9: note = Seed: LVVVGACGV (KRAS G12C)
YVVIGVCGA

SEQ ID NO: 4581 - protein, 9 aa, synthetic construct
  source 1..9: note = Seed: LVVVGACGV (KRAS G12C)
YVVIGVCGD

SEQ ID NO: 4582 - protein, 9 aa, synthetic construct
  source 1..9: note = Seed: LVVVGACGV (KRAS G12C)
YVVIGVCGH

SEQ ID NO: 4583 - protein, 9 aa, synthetic construct
  source 1..9: note = Seed: LVVVGACGV (KRAS G12C)
YVVIGVCGI

SEQ ID NO: 4584 - protein, 9 aa, synthetic construct
  source 1..9: note = Seed: LVVVGACGV (KRAS G12C)
YVVIGVCGL

SEQ ID NO: 4585 - protein, 9 aa, synthetic construct
  source 1..9: note = Seed: LVVVGACGV (KRAS G12C)
YVVIGVCGM

SEQ ID NO: 4586 - protein, 9 aa, synthetic construct
  source 1..9: note = Seed: LVVVGACGV (KRAS G12C)
YVVIGVCGN

SEQ ID NO: 4587 - protein, 9 aa, synthetic construct
  source 1..9: note = Seed: LVVVGACGV (KRAS G12C)
YVVIGVCGQ

SEQ ID NO: 4588 - protein, 9 aa, synthetic construct
  source 1..9: note = Seed: LVVVGACGV (KRAS G12C)
YVVIGVCGS

SEQ ID NO: 4589 - protein, 9 aa, synthetic construct
  source 1..9: note = Seed: LVVVGACGV (KRAS G12C)
YVVIGVCGT

SEQ ID NO: 4590 - protein, 9 aa, synthetic construct
  source 1..9: note = Seed: LVVVGACGV (KRAS G12C)
YVVIGVCGV

SEQ ID NO: 4591 - protein, 9 aa, synthetic construct
  source 1..9: note = Seed: LVVVGACGV (KRAS G12C)
YVVKGACGI

SEQ ID NO: 4592 - protein, 9 aa, synthetic construct
  source 1..9: note = Seed: LVVVGACGV (KRAS G12C)
YVVKGACGL

SEQ ID NO: 4593 - protein, 9 aa, synthetic construct
  source 1..9: note = Seed: LVVVGACGV (KRAS G12C)
YVVKGACGV

SEQ ID NO: 4594 - protein, 9 aa, synthetic construct
  source 1..9: note = Seed: LVVVGACGV (KRAS G12C)
YVVKGSCGL

SEQ ID NO: 4595 - protein, 9 aa, synthetic construct
  source 1..9: note = Seed: LVVVGACGV (KRAS G12C)
YVVLGACGC

SEQ ID NO: 4596 - protein, 9 aa, synthetic construct
  source 1..9: note = Seed: LVVVGACGV (KRAS G12C)
YVVLGACGD

SEQ ID NO: 4597 - protein, 9 aa, synthetic construct
  source 1..9: note = Seed: LVVVGACGV (KRAS G12C)
YVVLGACGE

SEQ ID NO: 4598 - protein, 9 aa, synthetic construct
  source 1..9: note = Seed: LVVVGACGV (KRAS G12C)
YVVLGACGF

SEQ ID NO: 4599 - protein, 9 aa, synthetic construct
  source 1..9: note = Seed: LVVVGACGV (KRAS G12C)
YVVLGACGG

SEQ ID NO: 4600 - protein, 9 aa, synthetic construct
  source 1..9: note = Seed: LVVVGACGV (KRAS G12C)
YVVLGACGH

SEQ ID NO: 4601 - protein, 9 aa, synthetic construct
  source 1..9: note = Seed: LVVVGACGV (KRAS G12C)
YVVLGACGK

SEQ ID NO: 4602 - protein, 9 aa, synthetic construct
  source 1..9: note = Seed: LVVVGACGV (KRAS G12C)
YVVLGACGN

SEQ ID NO: 4603 - protein, 9 aa, synthetic construct
  source 1..9: note = Seed: LVVVGACGV (KRAS G12C)
YVVLGACGP

SEQ ID NO: 4604 - protein, 9 aa, synthetic construct
  source 1..9: note = Seed: LVVVGACGV (KRAS G12C)
YVVLGACGQ

SEQ ID NO: 4605 - protein, 9 aa, synthetic construct
  source 1..9: note = Seed: LVVVGACGV (KRAS G12C)
YVVLGACGR

SEQ ID NO: 4606 - protein, 9 aa, synthetic construct
  source 1..9: note = Seed: LVVVGACGV (KRAS G12C)
YVVLGACGY

SEQ ID NO: 4607 - protein, 9 aa, synthetic construct
  source 1..9: note = Seed: LVVVGACGV (KRAS G12C)
YVVLGDCGA

SEQ ID NO: 4608 - protein, 9 aa, synthetic construct
  source 1..9: note = Seed: LVVVGACGV (KRAS G12C)
YVVLGDCGI

SEQ ID NO: 4609 - protein, 9 aa, synthetic construct
  source 1..9: note = Seed: LVVVGACGV (KRAS G12C)
YVVLGDCGL

SEQ ID NO: 4610 - protein, 9 aa, synthetic construct
  source 1..9: note = Seed: LVVVGACGV (KRAS G12C)
YVVLGDCGV

SEQ ID NO: 4611 - protein, 9 aa, synthetic construct
  source 1..9: note = Seed: LVVVGACGV (KRAS G12C)
YVVLGECGA

SEQ ID NO: 4612 - protein, 9 aa, synthetic construct
  source 1..9: note = Seed: LVVVGACGV (KRAS G12C)
YVVLGECGI

SEQ ID NO: 4613 - protein, 9 aa, synthetic construct
  source 1..9: note = Seed: LVVVGACGV (KRAS G12C)
YVVLGECGL

SEQ ID NO: 4614 - protein, 9 aa, synthetic construct
  source 1..9: note = Seed: LVVVGACGV (KRAS G12C)
YVVLGECGM

SEQ ID NO: 4615 - protein, 9 aa, synthetic construct
  source 1..9: note = Seed: LVVVGACGV (KRAS G12C)
YVVLGECGV

SEQ ID NO: 4616 - protein, 9 aa, synthetic construct
  source 1..9: note = Seed: LVVVGACGV (KRAS G12C)
YVVLGGCGC

SEQ ID NO: 4617 - protein, 9 aa, synthetic construct
  source 1..9: note = Seed: LVVVGACGV (KRAS G12C)
YVVLGGCGD

SEQ ID NO: 4618 - protein, 9 aa, synthetic construct
  source 1..9: note = Seed: LVVVGACGV (KRAS G12C)
YVVLGGCGE

SEQ ID NO: 4619 - protein, 9 aa, synthetic construct
  source 1..9: note = Seed: LVVVGACGV (KRAS G12C)
YVVLGGCGF

SEQ ID NO: 4620 - protein, 9 aa, synthetic construct
  source 1..9: note = Seed: LVVVGACGV (KRAS G12C)
YVVLGGCGG

SEQ ID NO: 4621 - protein, 9 aa, synthetic construct
  source 1..9: note = Seed: LVVVGACGV (KRAS G12C)
YVVLGGCGH

SEQ ID NO: 4622 - protein, 9 aa, synthetic construct
  source 1..9: note = Seed: LVVVGACGV (KRAS G12C)
YVVLGGCGK

SEQ ID NO: 4623 - protein, 9 aa, synthetic construct
  source 1..9: note = Seed: LVVVGACGV (KRAS G12C)
YVVLGGCGN

SEQ ID NO: 4624 - protein, 9 aa, synthetic construct
  source 1..9: note = Seed: LVVVGACGV (KRAS G12C)
YVVLGGCGP

SEQ ID NO: 4625 - protein, 9 aa, synthetic construct
  source 1..9: note = Seed: LVVVGACGV (KRAS G12C)
YVVLGGCGQ

SEQ ID NO: 4626 - protein, 9 aa, synthetic construct
  source 1..9: note = Seed: LVVVGACGV (KRAS G12C)
YVVLGGCGR

SEQ ID NO: 4627 - protein, 9 aa, synthetic construct
  source 1..9: note = Seed: LVVVGACGV (KRAS G12C)
YVVLGGCGY

SEQ ID NO: 4628 - protein, 9 aa, synthetic construct
  source 1..9: note = Seed: LVVVGACGV (KRAS G12C)
YVVLGHCGA

SEQ ID NO: 4629 - protein, 9 aa, synthetic construct
  source 1..9: note = Seed: LVVVGACGV (KRAS G12C)
YVVLGHCGI

SEQ ID NO: 4630 - protein, 9 aa, synthetic construct
  source 1..9: note = Seed: LVVVGACGV (KRAS G12C)
YVVLGHCGL

SEQ ID NO: 4631 - protein, 9 aa, synthetic construct
  source 1..9: note = Seed: LVVVGACGV (KRAS G12C)
YVVLGHCGM

SEQ ID NO: 4632 - protein, 9 aa, synthetic construct
  source 1..9: note = Seed: LVVVGACGV (KRAS G12C)
YVVLGHCGS

SEQ ID NO: 4633 - protein, 9 aa, synthetic construct
  source 1..9: note = Seed: LVVVGACGV (KRAS G12C)
YVVLGHCGT

SEQ ID NO: 4634 - protein, 9 aa, synthetic construct
  source 1..9: note = Seed: LVVVGACGV (KRAS G12C)
YVVLGHCGV

SEQ ID NO: 4635 - protein, 9 aa, synthetic construct
  source 1..9: note = Seed: LVVVGACGV (KRAS G12C)
YVVLGICGA

SEQ ID NO: 4636 - protein, 9 aa, synthetic construct
  source 1..9: note = Seed: LVVVGACGV (KRAS G12C)
YVVLGICGD

SEQ ID NO: 4637 - protein, 9 aa, synthetic construct
  source 1..9: note = Seed: LVVVGACGV (KRAS G12C)
YVVLGICGE

SEQ ID NO: 4638 - protein, 9 aa, synthetic construct
  source 1..9: note = Seed: LVVVGACGV (KRAS G12C)
YVVLGICGH

SEQ ID NO: 4639 - protein, 9 aa, synthetic construct
  source 1..9: note = Seed: LVVVGACGV (KRAS G12C)
YVVLGICGI

SEQ ID NO: 4640 - protein, 9 aa, synthetic construct
  source 1..9: note = Seed: LVVVGACGV (KRAS G12C)
YVVLGICGL

SEQ ID NO: 4641 - protein, 9 aa, synthetic construct
  source 1..9: note = Seed: LVVVGACGV (KRAS G12C)
YVVLGICGM

SEQ ID NO: 4642 - protein, 9 aa, synthetic construct
  source 1..9: note = Seed: LVVVGACGV (KRAS G12C)
YVVLGICGN

SEQ ID NO: 4643 - protein, 9 aa, synthetic construct
  source 1..9: note = Seed: LVVVGACGV (KRAS G12C)
YVVLGICGS

SEQ ID NO: 4644 - protein, 9 aa, synthetic construct
  source 1..9: note = Seed: LVVVGACGV (KRAS G12C)
YVVLGICGT

SEQ ID NO: 4645 - protein, 9 aa, synthetic construct
  source 1..9: note = Seed: LVVVGACGV (KRAS G12C)
YVVLGICGV

SEQ ID NO: 4646 - protein, 9 aa, synthetic construct
  source 1..9: note = Seed: LVVVGACGV (KRAS G12C)
YVVLGLCGA

SEQ ID NO: 4647 - protein, 9 aa, synthetic construct
  source 1..9: note = Seed: LVVVGACGV (KRAS G12C)
YVVLGLCGH

SEQ ID NO: 4648 - protein, 9 aa, synthetic construct
  source 1..9: note = Seed: LVVVGACGV (KRAS G12C)
YVVLGLCGN

SEQ ID NO: 4649 - protein, 9 aa, synthetic construct
  source 1..9: note = Seed: LVVVGACGV (KRAS G12C)
YVVLGMCGA

SEQ ID NO: 4650 - protein, 9 aa, synthetic construct
  source 1..9: note = Seed: LVVVGACGV (KRAS G12C)
YVVLGMCGH

SEQ ID NO: 4651 - protein, 9 aa, synthetic construct
  source 1..9: note = Seed: LVVVGACGV (KRAS G12C)
YVVLGMCGL

SEQ ID NO: 4652 - protein, 9 aa, synthetic construct
  source 1..9: note = Seed: LVVVGACGV (KRAS G12C)
YVVLGMCGN

SEQ ID NO: 4653 - protein, 9 aa, synthetic construct
  source 1..9: note = Seed: LVVVGACGV (KRAS G12C)
YVVLGMCGV

SEQ ID NO: 4654 - protein, 9 aa, synthetic construct
  source 1..9: note = Seed: LVVVGACGV (KRAS G12C)
YVVLGNCGC

SEQ ID NO: 4655 - protein, 9 aa, synthetic construct
  source 1..9: note = Seed: LVVVGACGV (KRAS G12C)
YVVLGNCGF

SEQ ID NO: 4656 - protein, 9 aa, synthetic construct
  source 1..9: note = Seed: LVVVGACGV (KRAS G12C)
YVVLGNCGG

SEQ ID NO: 4657 - protein, 9 aa, synthetic construct
  source 1..9: note = Seed: LVVVGACGV (KRAS G12C)
YVVLGNCGH

SEQ ID NO: 4658 - protein, 9 aa, synthetic construct
  source 1..9: note = Seed: LVVVGACGV (KRAS G12C)
YVVLGNCGK

SEQ ID NO: 4659 - protein, 9 aa, synthetic construct
  source 1..9: note = Seed: LVVVGACGV (KRAS G12C)
YVVLGNCGM

SEQ ID NO: 4660 - protein, 9 aa, synthetic construct
  source 1..9: note = Seed: LVVVGACGV (KRAS G12C)
YVVLGNCGN

SEQ ID NO: 4661 - protein, 9 aa, synthetic construct
  source 1..9: note = Seed: LVVVGACGV (KRAS G12C)
YVVLGNCGP

SEQ ID NO: 4662 - protein, 9 aa, synthetic construct
  source 1..9: note = Seed: LVVVGACGV (KRAS G12C)
YVVLGNCGQ

SEQ ID NO: 4663 - protein, 9 aa, synthetic construct
  source 1..9: note = Seed: LVVVGACGV (KRAS G12C)
YVVLGNCGR

SEQ ID NO: 4664 - protein, 9 aa, synthetic construct
  source 1..9: note = Seed: LVVVGACGV (KRAS G12C)
YVVLGNCGS

SEQ ID NO: 4665 - protein, 9 aa, synthetic construct
  source 1..9: note = Seed: LVVVGACGV (KRAS G12C)
YVVLGNCGT

SEQ ID NO: 4666 - protein, 9 aa, synthetic construct
  source 1..9: note = Seed: LVVVGACGV (KRAS G12C)
YVVLGNCGY

SEQ ID NO: 4667 - protein, 9 aa, synthetic construct
  source 1..9: note = Seed: LVVVGACGV (KRAS G12C)
YVVLGPCGC

SEQ ID NO: 4668 - protein, 9 aa, synthetic construct
  source 1..9: note = Seed: LVVVGACGV (KRAS G12C)
YVVLGPCGD

SEQ ID NO: 4669 - protein, 9 aa, synthetic construct
  source 1..9: note = Seed: LVVVGACGV (KRAS G12C)
YVVLGPCGE

SEQ ID NO: 4670 - protein, 9 aa, synthetic construct
  source 1..9: note = Seed: LVVVGACGV (KRAS G12C)
YVVLGPCGF

SEQ ID NO: 4671 - protein, 9 aa, synthetic construct
  source 1..9: note = Seed: LVVVGACGV (KRAS G12C)
YVVLGPCGG

SEQ ID NO: 4672 - protein, 9 aa, synthetic construct
  source 1..9: note = Seed: LVVVGACGV (KRAS G12C)
YVVLGPCGH

SEQ ID NO: 4673 - protein, 9 aa, synthetic construct
  source 1..9: note = Seed: LVVVGACGV (KRAS G12C)
YVVLGPCGK

SEQ ID NO: 4674 - protein, 9 aa, synthetic construct
  source 1..9: note = Seed: LVVVGACGV (KRAS G12C)
YVVLGPCGN

SEQ ID NO: 4675 - protein, 9 aa, synthetic construct
  source 1..9: note = Seed: LVVVGACGV (KRAS G12C)
YVVLGPCGP

SEQ ID NO: 4676 - protein, 9 aa, synthetic construct
  source 1..9: note = Seed: LVVVGACGV (KRAS G12C)
YVVLGPCGQ

SEQ ID NO: 4677 - protein, 9 aa, synthetic construct
  source 1..9: note = Seed: LVVVGACGV (KRAS G12C)
YVVLGPCGR

SEQ ID NO: 4678 - protein, 9 aa, synthetic construct
  source 1..9: note = Seed: LVVVGACGV (KRAS G12C)
YVVLGPCGS

SEQ ID NO: 4679 - protein, 9 aa, synthetic construct
  source 1..9: note = Seed: LVVVGACGV (KRAS G12C)
YVVLGPCGT

SEQ ID NO: 4680 - protein, 9 aa, synthetic construct
  source 1..9: note = Seed: LVVVGACGV (KRAS G12C)
YVVLGPCGW

SEQ ID NO: 4681 - protein, 9 aa, synthetic construct
  source 1..9: note = Seed: LVVVGACGV (KRAS G12C)
YVVLGPCGY

SEQ ID NO: 4682 - protein, 9 aa, synthetic construct
  source 1..9: note = Seed: LVVVGACGV (KRAS G12C)
YVVLGQCGA

SEQ ID NO: 4683 - protein, 9 aa, synthetic construct
  source 1..9: note = Seed: LVVVGACGV (KRAS G12C)
YVVLGQCGI

SEQ ID NO: 4684 - protein, 9 aa, synthetic construct
  source 1..9: note = Seed: LVVVGACGV (KRAS G12C)
YVVLGQCGL

SEQ ID NO: 4685 - protein, 9 aa, synthetic construct
  source 1..9: note = Seed: LVVVGACGV (KRAS G12C)
YVVLGQCGM

SEQ ID NO: 4686 - protein, 9 aa, synthetic construct
  source 1..9: note = Seed: LVVVGACGV (KRAS G12C)
YVVLGQCGS

SEQ ID NO: 4687 - protein, 9 aa, synthetic construct
  source 1..9: note = Seed: LVVVGACGV (KRAS G12C)
YVVLGQCGT

SEQ ID NO: 4688 - protein, 9 aa, synthetic construct
  source 1..9: note = Seed: LVVVGACGV (KRAS G12C)
YVVLGQCGV

SEQ ID NO: 4689 - protein, 9 aa, synthetic construct
  source 1..9: note = Seed: LVVVGACGV (KRAS G12C)
YVVLGRCGH

SEQ ID NO: 4690 - protein, 9 aa, synthetic construct
  source 1..9: note = Seed: LVVVGACGV (KRAS G12C)
YVVLGRCGR

SEQ ID NO: 4691 - protein, 9 aa, synthetic construct
  source 1..9: note = Seed: LVVVGACGV (KRAS G12C)
YVVLGSCGC

SEQ ID NO: 4692 - protein, 9 aa, synthetic construct
  source 1..9: note = Seed: LVVVGACGV (KRAS G12C)
YVVLGSCGD

SEQ ID NO: 4693 - protein, 9 aa, synthetic construct
  source 1..9: note = Seed: LVVVGACGV (KRAS G12C)
YVVLGSCGE

SEQ ID NO: 4694 - protein, 9 aa, synthetic construct
  source 1..9: note = Seed: LVVVGACGV (KRAS G12C)
YVVLGSCGF

SEQ ID NO: 4695 - protein, 9 aa, synthetic construct
  source 1..9: note = Seed: LVVVGACGV (KRAS G12C)
YVVLGSCGG

SEQ ID NO: 4696 - protein, 9 aa, synthetic construct
  source 1..9: note = Seed: LVVVGACGV (KRAS G12C)
YVVLGSCGH

SEQ ID NO: 4697 - protein, 9 aa, synthetic construct
  source 1..9: note = Seed: LVVVGACGV (KRAS G12C)
YVVLGSCGK

SEQ ID NO: 4698 - protein, 9 aa, synthetic construct
  source 1..9: note = Seed: LVVVGACGV (KRAS G12C)
YVVLGSCGN

SEQ ID NO: 4699 - protein, 9 aa, synthetic construct
  source 1..9: note = Seed: LVVVGACGV (KRAS G12C)
YVVLGSCGP

SEQ ID NO: 4700 - protein, 9 aa, synthetic construct
  source 1..9: note = Seed: LVVVGACGV (KRAS G12C)
YVVLGSCGQ

SEQ ID NO: 4701 - protein, 9 aa, synthetic construct
  source 1..9: note = Seed: LVVVGACGV (KRAS G12C)
YVVLGSCGR

SEQ ID NO: 4702 - protein, 9 aa, synthetic construct
  source 1..9: note = Seed: LVVVGACGV (KRAS G12C)
YVVLGSCGY

SEQ ID NO: 4703 - protein, 9 aa, synthetic construct
  source 1..9: note = Seed: LVVVGACGV (KRAS G12C)
YVVLGTCGA

SEQ ID NO: 4704 - protein, 9 aa, synthetic construct
  source 1..9: note = Seed: LVVVGACGV (KRAS G12C)
YVVLGTCGE

SEQ ID NO: 4705 - protein, 9 aa, synthetic construct
  source 1..9: note = Seed: LVVVGACGV (KRAS G12C)
YVVLGTCGF

SEQ ID NO: 4706 - protein, 9 aa, synthetic construct
  source 1..9: note = Seed: LVVVGACGV (KRAS G12C)
YVVLGTCGG

SEQ ID NO: 4707 - protein, 9 aa, synthetic construct
  source 1..9: note = Seed: LVVVGACGV (KRAS G12C)
YVVLGTCGH

SEQ ID NO: 4708 - protein, 9 aa, synthetic construct
  source 1..9: note = Seed: LVVVGACGV (KRAS G12C)
YVVLGTCGI

SEQ ID NO: 4709 - protein, 9 aa, synthetic construct
  source 1..9: note = Seed: LVVVGACGV (KRAS G12C)
YVVLGTCGK

SEQ ID NO: 4710 - protein, 9 aa, synthetic construct
  source 1..9: note = Seed: LVVVGACGV (KRAS G12C)
YVVLGTCGM

SEQ ID NO: 4711 - protein, 9 aa, synthetic construct
  source 1..9: note = Seed: LVVVGACGV (KRAS G12C)
YVVLGTCGN

SEQ ID NO: 4712 - protein, 9 aa, synthetic construct
  source 1..9: note = Seed: LVVVGACGV (KRAS G12C)
YVVLGTCGP

SEQ ID NO: 4713 - protein, 9 aa, synthetic construct
  source 1..9: note = Seed: LVVVGACGV (KRAS G12C)
YVVLGTCGQ

SEQ ID NO: 4714 - protein, 9 aa, synthetic construct
  source 1..9: note = Seed: LVVVGACGV (KRAS G12C)
YVVLGTCGR

SEQ ID NO: 4715 - protein, 9 aa, synthetic construct
  source 1..9: note = Seed: LVVVGACGV (KRAS G12C)
YVVLGTCGS

SEQ ID NO: 4716 - protein, 9 aa, synthetic construct
  source 1..9: note = Seed: LVVVGACGV (KRAS G12C)
YVVLGTCGT

SEQ ID NO: 4717 - protein, 9 aa, synthetic construct
  source 1..9: note = Seed: LVVVGACGV (KRAS G12C)
YVVLGTCGY

SEQ ID NO: 4718 - protein, 9 aa, synthetic construct
  source 1..9: note = Seed: LVVVGACGV (KRAS G12C)
YVVLGVCGA

SEQ ID NO: 4719 - protein, 9 aa, synthetic construct
  source 1..9: note = Seed: LVVVGACGV (KRAS G12C)
YVVLGVCGD

SEQ ID NO: 4720 - protein, 9 aa, synthetic construct
  source 1..9: note = Seed: LVVVGACGV (KRAS G12C)
YVVLGVCGE

SEQ ID NO: 4721 - protein, 9 aa, synthetic construct
  source 1..9: note = Seed: LVVVGACGV (KRAS G12C)
YVVLGVCGG

SEQ ID NO: 4722 - protein, 9 aa, synthetic construct
  source 1..9: note = Seed: LVVVGACGV (KRAS G12C)
YVVLGVCGH

SEQ ID NO: 4723 - protein, 9 aa, synthetic construct
  source 1..9: note = Seed: LVVVGACGV (KRAS G12C)
YVVLGVCGI

SEQ ID NO: 4724 - protein, 9 aa, synthetic construct
  source 1..9: note = Seed: LVVVGACGV (KRAS G12C)
YVVLGVCGK

SEQ ID NO: 4725 - protein, 9 aa, synthetic construct
  source 1..9: note = Seed: LVVVGACGV (KRAS G12C)
YVVLGVCGL

SEQ ID NO: 4726 - protein, 9 aa, synthetic construct
  source 1..9: note = Seed: LVVVGACGV (KRAS G12C)
YVVLGVCGM

SEQ ID NO: 4727 - protein, 9 aa, synthetic construct
  source 1..9: note = Seed: LVVVGACGV (KRAS G12C)
YVVLGVCGN

SEQ ID NO: 4728 - protein, 9 aa, synthetic construct
  source 1..9: note = Seed: LVVVGACGV (KRAS G12C)
YVVLGVCGP

SEQ ID NO: 4729 - protein, 9 aa, synthetic construct
  source 1..9: note = Seed: LVVVGACGV (KRAS G12C)
YVVLGVCGQ

SEQ ID NO: 4730 - protein, 9 aa, synthetic construct
  source 1..9: note = Seed: LVVVGACGV (KRAS G12C)
YVVLGVCGR

SEQ ID NO: 4731 - protein, 9 aa, synthetic construct
  source 1..9: note = Seed: LVVVGACGV (KRAS G12C)
YVVLGVCGS

SEQ ID NO: 4732 - protein, 9 aa, synthetic construct
  source 1..9: note = Seed: LVVVGACGV (KRAS G12C)
YVVLGVCGT

SEQ ID NO: 4733 - protein, 9 aa, synthetic construct
  source 1..9: note = Seed: LVVVGACGV (KRAS G12C)
YVVLGVCGV

SEQ ID NO: 4734 - protein, 9 aa, synthetic construct
  source 1..9: note = Seed: LVVVGACGV (KRAS G12C)
YVVLGVCGY

SEQ ID NO: 4735 - protein, 9 aa, synthetic construct
  source 1..9: note = Seed: LVVVGACGV (KRAS G12C)
YVVMGACGC

SEQ ID NO: 4736 - protein, 9 aa, synthetic construct
  source 1..9: note = Seed: LVVVGACGV (KRAS G12C)
YVVMGACGD

SEQ ID NO: 4737 - protein, 9 aa, synthetic construct
  source 1..9: note = Seed: LVVVGACGV (KRAS G12C)
YVVMGACGE

SEQ ID NO: 4738 - protein, 9 aa, synthetic construct
  source 1..9: note = Seed: LVVVGACGV (KRAS G12C)
YVVMGACGF

SEQ ID NO: 4739 - protein, 9 aa, synthetic construct
  source 1..9: note = Seed: LVVVGACGV (KRAS G12C)
YVVMGACGG

SEQ ID NO: 4740 - protein, 9 aa, synthetic construct
  source 1..9: note = Seed: LVVVGACGV (KRAS G12C)
YVVMGACGH

SEQ ID NO: 4741 - protein, 9 aa, synthetic construct
  source 1..9: note = Seed: LVVVGACGV (KRAS G12C)
YVVMGACGK

SEQ ID NO: 4742 - protein, 9 aa, synthetic construct
  source 1..9: note = Seed: LVVVGACGV (KRAS G12C)
YVVMGACGN

SEQ ID NO: 4743 - protein, 9 aa, synthetic construct
  source 1..9: note = Seed: LVVVGACGV (KRAS G12C)
YVVMGACGP

SEQ ID NO: 4744 - protein, 9 aa, synthetic construct
  source 1..9: note = Seed: LVVVGACGV (KRAS G12C)
YVVMGACGQ

SEQ ID NO: 4745 - protein, 9 aa, synthetic construct
  source 1..9: note = Seed: LVVVGACGV (KRAS G12C)
YVVMGACGR

SEQ ID NO: 4746 - protein, 9 aa, synthetic construct
  source 1..9: note = Seed: LVVVGACGV (KRAS G12C)
YVVMGACGS

SEQ ID NO: 4747 - protein, 9 aa, synthetic construct
  source 1..9: note = Seed: LVVVGACGV (KRAS G12C)
YVVMGACGY

SEQ ID NO: 4748 - protein, 9 aa, synthetic construct
  source 1..9: note = Seed: LVVVGACGV (KRAS G12C)
YVVMGDCGI

SEQ ID NO: 4749 - protein, 9 aa, synthetic construct
  source 1..9: note = Seed: LVVVGACGV (KRAS G12C)
YVVMGDCGL

SEQ ID NO: 4750 - protein, 9 aa, synthetic construct
  source 1..9: note = Seed: LVVVGACGV (KRAS G12C)
YVVMGDCGV

SEQ ID NO: 4751 - protein, 9 aa, synthetic construct
  source 1..9: note = Seed: LVVVGACGV (KRAS G12C)
YVVMGECGA

SEQ ID NO: 4752 - protein, 9 aa, synthetic construct
  source 1..9: note = Seed: LVVVGACGV (KRAS G12C)
YVVMGECGI

SEQ ID NO: 4753 - protein, 9 aa, synthetic construct
  source 1..9: note = Seed: LVVVGACGV (KRAS G12C)
YVVMGECGL

SEQ ID NO: 4754 - protein, 9 aa, synthetic construct
  source 1..9: note = Seed: LVVVGACGV (KRAS G12C)
YVVMGECGM

SEQ ID NO: 4755 - protein, 9 aa, synthetic construct
  source 1..9: note = Seed: LVVVGACGV (KRAS G12C)
YVVMGECGV

SEQ ID NO: 4756 - protein, 9 aa, synthetic construct
  source 1..9: note = Seed: LVVVGACGV (KRAS G12C)
YVVMGGCGF

SEQ ID NO: 4757 - protein, 9 aa, synthetic construct
  source 1..9: note = Seed: LVVVGACGV (KRAS G12C)
YVVMGGCGG

SEQ ID NO: 4758 - protein, 9 aa, synthetic construct
  source 1..9: note = Seed: LVVVGACGV (KRAS G12C)
YVVMGGCGH

SEQ ID NO: 4759 - protein, 9 aa, synthetic construct
  source 1..9: note = Seed: LVVVGACGV (KRAS G12C)
YVVMGGCGN

SEQ ID NO: 4760 - protein, 9 aa, synthetic construct
  source 1..9: note = Seed: LVVVGACGV (KRAS G12C)
YVVMGGCGP

SEQ ID NO: 4761 - protein, 9 aa, synthetic construct
  source 1..9: note = Seed: LVVVGACGV (KRAS G12C)
YVVMGGCGQ

SEQ ID NO: 4762 - protein, 9 aa, synthetic construct
  source 1..9: note = Seed: LVVVGACGV (KRAS G12C)
YVVMGGCGR

SEQ ID NO: 4763 - protein, 9 aa, synthetic construct
  source 1..9: note = Seed: LVVVGACGV (KRAS G12C)
YVVMGGCGS

SEQ ID NO: 4764 - protein, 9 aa, synthetic construct
  source 1..9: note = Seed: LVVVGACGV (KRAS G12C)
YVVMGGCGT

SEQ ID NO: 4765 - protein, 9 aa, synthetic construct
  source 1..9: note = Seed: LVVVGACGV (KRAS G12C)
YVVMGGCGY

SEQ ID NO: 4766 - protein, 9 aa, synthetic construct
  source 1..9: note = Seed: LVVVGACGV (KRAS G12C)
YVVMGHCGA

SEQ ID NO: 4767 - protein, 9 aa, synthetic construct
  source 1..9: note = Seed: LVVVGACGV (KRAS G12C)
YVVMGHCGI

SEQ ID NO: 4768 - protein, 9 aa, synthetic construct
  source 1..9: note = Seed: LVVVGACGV (KRAS G12C)
YVVMGHCGL

SEQ ID NO: 4769 - protein, 9 aa, synthetic construct
  source 1..9: note = Seed: LVVVGACGV (KRAS G12C)
YVVMGHCGM

SEQ ID NO: 4770 - protein, 9 aa, synthetic construct
  source 1..9: note = Seed: LVVVGACGV (KRAS G12C)
YVVMGHCGV

SEQ ID NO: 4771 - protein, 9 aa, synthetic construct
  source 1..9: note = Seed: LVVVGACGV (KRAS G12C)
YVVMGICGA

SEQ ID NO: 4772 - protein, 9 aa, synthetic construct
  source 1..9: note = Seed: LVVVGACGV (KRAS G12C)
YVVMGICGD

SEQ ID NO: 4773 - protein, 9 aa, synthetic construct
  source 1..9: note = Seed: LVVVGACGV (KRAS G12C)
YVVMGICGE

SEQ ID NO: 4774 - protein, 9 aa, synthetic construct
  source 1..9: note = Seed: LVVVGACGV (KRAS G12C)
YVVMGICGH

SEQ ID NO: 4775 - protein, 9 aa, synthetic construct
  source 1..9: note = Seed: LVVVGACGV (KRAS G12C)
YVVMGICGI

SEQ ID NO: 4776 - protein, 9 aa, synthetic construct
  source 1..9: note = Seed: LVVVGACGV (KRAS G12C)
YVVMGICGL

SEQ ID NO: 4777 - protein, 9 aa, synthetic construct
  source 1..9: note = Seed: LVVVGACGV (KRAS G12C)
YVVMGICGM

SEQ ID NO: 4778 - protein, 9 aa, synthetic construct
  source 1..9: note = Seed: LVVVGACGV (KRAS G12C)
YVVMGICGN

SEQ ID NO: 4779 - protein, 9 aa, synthetic construct
  source 1..9: note = Seed: LVVVGACGV (KRAS G12C)
YVVMGICGR

SEQ ID NO: 4780 - protein, 9 aa, synthetic construct
  source 1..9: note = Seed: LVVVGACGV (KRAS G12C)
YVVMGICGS

SEQ ID NO: 4781 - protein, 9 aa, synthetic construct
  source 1..9: note = Seed: LVVVGACGV (KRAS G12C)
YVVMGICGT

SEQ ID NO: 4782 - protein, 9 aa, synthetic construct
  source 1..9: note = Seed: LVVVGACGV (KRAS G12C)
YVVMGICGV

SEQ ID NO: 4783 - protein, 9 aa, synthetic construct
  source 1..9: note = Seed: LVVVGACGV (KRAS G12C)
YVVMGLCGA

SEQ ID NO: 4784 - protein, 9 aa, synthetic construct
  source 1..9: note = Seed: LVVVGACGV (KRAS G12C)
YVVMGLCGH

SEQ ID NO: 4785 - protein, 9 aa, synthetic construct
  source 1..9: note = Seed: LVVVGACGV (KRAS G12C)
YVVMGLCGN

SEQ ID NO: 4786 - protein, 9 aa, synthetic construct
  source 1..9: note = Seed: LVVVGACGV (KRAS G12C)
YVVMGMCGA

SEQ ID NO: 4787 - protein, 9 aa, synthetic construct
  source 1..9: note = Seed: LVVVGACGV (KRAS G12C)
YVVMGMCGH

SEQ ID NO: 4788 - protein, 9 aa, synthetic construct
  source 1..9: note = Seed: LVVVGACGV (KRAS G12C)
YVVMGMCGI

SEQ ID NO: 4789 - protein, 9 aa, synthetic construct
  source 1..9: note = Seed: LVVVGACGV (KRAS G12C)
YVVMGMCGL

SEQ ID NO: 4790 - protein, 9 aa, synthetic construct
  source 1..9: note = Seed: LVVVGACGV (KRAS G12C)
YVVMGMCGM

SEQ ID NO: 4791 - protein, 9 aa, synthetic construct
  source 1..9: note = Seed: LVVVGACGV (KRAS G12C)
YVVMGMCGN

SEQ ID NO: 4792 - protein, 9 aa, synthetic construct
  source 1..9: note = Seed: LVVVGACGV (KRAS G12C)
YVVMGMCGV

SEQ ID NO: 4793 - protein, 9 aa, synthetic construct
  source 1..9: note = Seed: LVVVGACGV (KRAS G12C)
YVVMGNCGA

SEQ ID NO: 4794 - protein, 9 aa, synthetic construct
  source 1..9: note = Seed: LVVVGACGV (KRAS G12C)
YVVMGNCGF

SEQ ID NO: 4795 - protein, 9 aa, synthetic construct
  source 1..9: note = Seed: LVVVGACGV (KRAS G12C)
YVVMGNCGG

SEQ ID NO: 4796 - protein, 9 aa, synthetic construct
  source 1..9: note = Seed: LVVVGACGV (KRAS G12C)
YVVMGNCGH

SEQ ID NO: 4797 - protein, 9 aa, synthetic construct
  source 1..9: note = Seed: LVVVGACGV (KRAS G12C)
YVVMGNCGM

SEQ ID NO: 4798 - protein, 9 aa, synthetic construct
  source 1..9: note = Seed: LVVVGACGV (KRAS G12C)
YVVMGNCGN

SEQ ID NO: 4799 - protein, 9 aa, synthetic construct
  source 1..9: note = Seed: LVVVGACGV (KRAS G12C)
YVVMGNCGP

SEQ ID NO: 4800 - protein, 9 aa, synthetic construct
  source 1..9: note = Seed: LVVVGACGV (KRAS G12C)
YVVMGNCGQ

SEQ ID NO: 4801 - protein, 9 aa, synthetic construct
  source 1..9: note = Seed: LVVVGACGV (KRAS G12C)
YVVMGNCGR

SEQ ID NO: 4802 - protein, 9 aa, synthetic construct
  source 1..9: note = Seed: LVVVGACGV (KRAS G12C)
YVVMGNCGS

SEQ ID NO: 4803 - protein, 9 aa, synthetic construct
  source 1..9: note = Seed: LVVVGACGV (KRAS G12C)
YVVMGNCGT

SEQ ID NO: 4804 - protein, 9 aa, synthetic construct
  source 1..9: note = Seed: LVVVGACGV (KRAS G12C)
YVVMGNCGY

SEQ ID NO: 4805 - protein, 9 aa, synthetic construct
  source 1..9: note = Seed: LVVVGACGV (KRAS G12C)
YVVMGPCGA

SEQ ID NO: 4806 - protein, 9 aa, synthetic construct
  source 1..9: note = Seed: LVVVGACGV (KRAS G12C)
YVVMGPCGC

SEQ ID NO: 4807 - protein, 9 aa, synthetic construct
  source 1..9: note = Seed: LVVVGACGV (KRAS G12C)
YVVMGPCGF

SEQ ID NO: 4808 - protein, 9 aa, synthetic construct
  source 1..9: note = Seed: LVVVGACGV (KRAS G12C)
YVVMGPCGG

SEQ ID NO: 4809 - protein, 9 aa, synthetic construct
  source 1..9: note = Seed: LVVVGACGV (KRAS G12C)
YVVMGPCGH

SEQ ID NO: 4810 - protein, 9 aa, synthetic construct
  source 1..9: note = Seed: LVVVGACGV (KRAS G12C)
YVVMGPCGM

SEQ ID NO: 4811 - protein, 9 aa, synthetic construct
  source 1..9: note = Seed: LVVVGACGV (KRAS G12C)
YVVMGPCGN

SEQ ID NO: 4812 - protein, 9 aa, synthetic construct
  source 1..9: note = Seed: LVVVGACGV (KRAS G12C)
YVVMGPCGP

SEQ ID NO: 4813 - protein, 9 aa, synthetic construct
  source 1..9: note = Seed: LVVVGACGV (KRAS G12C)
YVVMGPCGQ

SEQ ID NO: 4814 - protein, 9 aa, synthetic construct
  source 1..9: note = Seed: LVVVGACGV (KRAS G12C)
YVVMGPCGR

SEQ ID NO: 4815 - protein, 9 aa, synthetic construct
  source 1..9: note = Seed: LVVVGACGV (KRAS G12C)
YVVMGPCGS

SEQ ID NO: 4816 - protein, 9 aa, synthetic construct
  source 1..9: note = Seed: LVVVGACGV (KRAS G12C)
YVVMGPCGT

SEQ ID NO: 4817 - protein, 9 aa, synthetic construct
  source 1..9: note = Seed: LVVVGACGV (KRAS G12C)
YVVMGPCGW

SEQ ID NO: 4818 - protein, 9 aa, synthetic construct
  source 1..9: note = Seed: LVVVGACGV (KRAS G12C)
YVVMGPCGY

SEQ ID NO: 4819 - protein, 9 aa, synthetic construct
  source 1..9: note = Seed: LVVVGACGV (KRAS G12C)
YVVMGQCGA

SEQ ID NO: 4820 - protein, 9 aa, synthetic construct
  source 1..9: note = Seed: LVVVGACGV (KRAS G12C)
YVVMGQCGI

SEQ ID NO: 4821 - protein, 9 aa, synthetic construct
  source 1..9: note = Seed: LVVVGACGV (KRAS G12C)
YVVMGQCGL

SEQ ID NO: 4822 - protein, 9 aa, synthetic construct
  source 1..9: note = Seed: LVVVGACGV (KRAS G12C)
YVVMGQCGM

SEQ ID NO: 4823 - protein, 9 aa, synthetic construct
  source 1..9: note = Seed: LVVVGACGV (KRAS G12C)
YVVMGQCGT

SEQ ID NO: 4824 - protein, 9 aa, synthetic construct
  source 1..9: note = Seed: LVVVGACGV (KRAS G12C)
YVVMGQCGV

SEQ ID NO: 4825 - protein, 9 aa, synthetic construct
  source 1..9: note = Seed: LVVVGACGV (KRAS G12C)
YVVMGRCGH

SEQ ID NO: 4826 - protein, 9 aa, synthetic construct
  source 1..9: note = Seed: LVVVGACGV (KRAS G12C)
YVVMGRCGR

SEQ ID NO: 4827 - protein, 9 aa, synthetic construct
  source 1..9: note = Seed: LVVVGACGV (KRAS G12C)
YVVMGSCGC

SEQ ID NO: 4828 - protein, 9 aa, synthetic construct
  source 1..9: note = Seed: LVVVGACGV (KRAS G12C)
YVVMGSCGE

SEQ ID NO: 4829 - protein, 9 aa, synthetic construct
  source 1..9: note = Seed: LVVVGACGV (KRAS G12C)
YVVMGSCGF

SEQ ID NO: 4830 - protein, 9 aa, synthetic construct
  source 1..9: note = Seed: LVVVGACGV (KRAS G12C)
YVVMGSCGG

SEQ ID NO: 4831 - protein, 9 aa, synthetic construct
  source 1..9: note = Seed: LVVVGACGV (KRAS G12C)
YVVMGSCGH

SEQ ID NO: 4832 - protein, 9 aa, synthetic construct
  source 1..9: note = Seed: LVVVGACGV (KRAS G12C)
YVVMGSCGK

SEQ ID NO: 4833 - protein, 9 aa, synthetic construct
  source 1..9: note = Seed: LVVVGACGV (KRAS G12C)
YVVMGSCGN

SEQ ID NO: 4834 - protein, 9 aa, synthetic construct
  source 1..9: note = Seed: LVVVGACGV (KRAS G12C)
YVVMGSCGP

SEQ ID NO: 4835 - protein, 9 aa, synthetic construct
  source 1..9: note = Seed: LVVVGACGV (KRAS G12C)
YVVMGSCGQ

SEQ ID NO: 4836 - protein, 9 aa, synthetic construct
  source 1..9: note = Seed: LVVVGACGV (KRAS G12C)
YVVMGSCGR

SEQ ID NO: 4837 - protein, 9 aa, synthetic construct
  source 1..9: note = Seed: LVVVGACGV (KRAS G12C)
YVVMGSCGS

SEQ ID NO: 4838 - protein, 9 aa, synthetic construct
  source 1..9: note = Seed: LVVVGACGV (KRAS G12C)
YVVMGSCGY

SEQ ID NO: 4839 - protein, 9 aa, synthetic construct
  source 1..9: note = Seed: LVVVGACGV (KRAS G12C)
YVVMGTCGA

SEQ ID NO: 4840 - protein, 9 aa, synthetic construct
  source 1..9: note = Seed: LVVVGACGV (KRAS G12C)
YVVMGTCGF

SEQ ID NO: 4841 - protein, 9 aa, synthetic construct
  source 1..9: note = Seed: LVVVGACGV (KRAS G12C)
YVVMGTCGG

SEQ ID NO: 4842 - protein, 9 aa, synthetic construct
  source 1..9: note = Seed: LVVVGACGV (KRAS G12C)
YVVMGTCGH

SEQ ID NO: 4843 - protein, 9 aa, synthetic construct
  source 1..9: note = Seed: LVVVGACGV (KRAS G12C)
YVVMGTCGI

SEQ ID NO: 4844 - protein, 9 aa, synthetic construct
  source 1..9: note = Seed: LVVVGACGV (KRAS G12C)
YVVMGTCGM

SEQ ID NO: 4845 - protein, 9 aa, synthetic construct
  source 1..9: note = Seed: LVVVGACGV (KRAS G12C)
YVVMGTCGN

SEQ ID NO: 4846 - protein, 9 aa, synthetic construct
  source 1..9: note = Seed: LVVVGACGV (KRAS G12C)
YVVMGTCGP

SEQ ID NO: 4847 - protein, 9 aa, synthetic construct
  source 1..9: note = Seed: LVVVGACGV (KRAS G12C)
YVVMGTCGQ

SEQ ID NO: 4848 - protein, 9 aa, synthetic construct
  source 1..9: note = Seed: LVVVGACGV (KRAS G12C)
YVVMGTCGR

SEQ ID NO: 4849 - protein, 9 aa, synthetic construct
  source 1..9: note = Seed: LVVVGACGV (KRAS G12C)
YVVMGTCGS

SEQ ID NO: 4850 - protein, 9 aa, synthetic construct
  source 1..9: note = Seed: LVVVGACGV (KRAS G12C)
YVVMGTCGT

SEQ ID NO: 4851 - protein, 9 aa, synthetic construct
  source 1..9: note = Seed: LVVVGACGV (KRAS G12C)
YVVMGTCGY

SEQ ID NO: 4852 - protein, 9 aa, synthetic construct
  source 1..9: note = Seed: LVVVGACGV (KRAS G12C)
YVVMGVCGA

SEQ ID NO: 4853 - protein, 9 aa, synthetic construct
  source 1..9: note = Seed: LVVVGACGV (KRAS G12C)
YVVMGVCGD

SEQ ID NO: 4854 - protein, 9 aa, synthetic construct
  source 1..9: note = Seed: LVVVGACGV (KRAS G12C)
YVVMGVCGE

SEQ ID NO: 4855 - protein, 9 aa, synthetic construct
  source 1..9: note = Seed: LVVVGACGV (KRAS G12C)
YVVMGVCGG

SEQ ID NO: 4856 - protein, 9 aa, synthetic construct
  source 1..9: note = Seed: LVVVGACGV (KRAS G12C)
YVVMGVCGH

SEQ ID NO: 4857 - protein, 9 aa, synthetic construct
  source 1..9: note = Seed: LVVVGACGV (KRAS G12C)
YVVMGVCGI

SEQ ID NO: 4858 - protein, 9 aa, synthetic construct
  source 1..9: note = Seed: LVVVGACGV (KRAS G12C)
YVVMGVCGL

SEQ ID NO: 4859 - protein, 9 aa, synthetic construct
  source 1..9: note = Seed: LVVVGACGV (KRAS G12C)
YVVMGVCGM

SEQ ID NO: 4860 - protein, 9 aa, synthetic construct
  source 1..9: note = Seed: LVVVGACGV (KRAS G12C)
YVVMGVCGN

SEQ ID NO: 4861 - protein, 9 aa, synthetic construct
  source 1..9: note = Seed: LVVVGACGV (KRAS G12C)
YVVMGVCGP

SEQ ID NO: 4862 - protein, 9 aa, synthetic construct
  source 1..9: note = Seed: LVVVGACGV (KRAS G12C)
YVVMGVCGR

SEQ ID NO: 4863 - protein, 9 aa, synthetic construct
  source 1..9: note = Seed: LVVVGACGV (KRAS G12C)
YVVMGVCGS

SEQ ID NO: 4864 - protein, 9 aa, synthetic construct
  source 1..9: note = Seed: LVVVGACGV (KRAS G12C)
YVVMGVCGT

SEQ ID NO: 4865 - protein, 9 aa, synthetic construct
  source 1..9: note = Seed: LVVVGACGV (KRAS G12C)
YVVMGVCGV

SEQ ID NO: 4866 - protein, 9 aa, synthetic construct
  source 1..9: note = Seed: LVVVGACGV (KRAS G12C)
YVVMGVCGY

SEQ ID NO: 4867 - protein, 9 aa, synthetic construct
  source 1..9: note = Seed: LVVVGACGV (KRAS G12C)
YVVNGACGA

SEQ ID NO: 4868 - protein, 9 aa, synthetic construct
  source 1..9: note = Seed: LVVVGACGV (KRAS G12C)
YVVNGACGF

SEQ ID NO: 4869 - protein, 9 aa, synthetic construct
  source 1..9: note = Seed: LVVVGACGV (KRAS G12C)
YVVNGACGI

SEQ ID NO: 4870 - protein, 9 aa, synthetic construct
  source 1..9: note = Seed: LVVVGACGV (KRAS G12C)
YVVNGACGL

SEQ ID NO: 4871 - protein, 9 aa, synthetic construct
  source 1..9: note = Seed: LVVVGACGV (KRAS G12C)
YVVNGACGM

SEQ ID NO: 4872 - protein, 9 aa, synthetic construct
  source 1..9: note = Seed: LVVVGACGV (KRAS G12C)
YVVNGACGV

SEQ ID NO: 4873 - protein, 9 aa, synthetic construct
  source 1..9: note = Seed: LVVVGACGV (KRAS G12C)
YVVNGACGY

SEQ ID NO: 4874 - protein, 9 aa, synthetic construct
  source 1..9: note = Seed: LVVVGACGV (KRAS G12C)
YVVNGGCGI

SEQ ID NO: 4875 - protein, 9 aa, synthetic construct
  source 1..9: note = Seed: LVVVGACGV (KRAS G12C)
YVVNGGCGL

SEQ ID NO: 4876 - protein, 9 aa, synthetic construct
  source 1..9: note = Seed: LVVVGACGV (KRAS G12C)
YVVNGGCGV

SEQ ID NO: 4877 - protein, 9 aa, synthetic construct
  source 1..9: note = Seed: LVVVGACGV (KRAS G12C)
YVVNGICGF

SEQ ID NO: 4878 - protein, 9 aa, synthetic construct
  source 1..9: note = Seed: LVVVGACGV (KRAS G12C)
YVVNGICGI

SEQ ID NO: 4879 - protein, 9 aa, synthetic construct
  source 1..9: note = Seed: LVVVGACGV (KRAS G12C)
YVVNGICGL

SEQ ID NO: 4880 - protein, 9 aa, synthetic construct
  source 1..9: note = Seed: LVVVGACGV (KRAS G12C)
YVVNGICGV

SEQ ID NO: 4881 - protein, 9 aa, synthetic construct
  source 1..9: note = Seed: LVVVGACGV (KRAS G12C)
YVVNGICGY

SEQ ID NO: 4882 - protein, 9 aa, synthetic construct
  source 1..9: note = Seed: LVVVGACGV (KRAS G12C)
YVVNGMCGL

SEQ ID NO: 4883 - protein, 9 aa, synthetic construct
  source 1..9: note = Seed: LVVVGACGV (KRAS G12C)
YVVNGNCGF

SEQ ID NO: 4884 - protein, 9 aa, synthetic construct
  source 1..9: note = Seed: LVVVGACGV (KRAS G12C)
YVVNGNCGI

SEQ ID NO: 4885 - protein, 9 aa, synthetic construct
  source 1..9: note = Seed: LVVVGACGV (KRAS G12C)
YVVNGNCGL

SEQ ID NO: 4886 - protein, 9 aa, synthetic construct
  source 1..9: note = Seed: LVVVGACGV (KRAS G12C)
YVVNGNCGM

SEQ ID NO: 4887 - protein, 9 aa, synthetic construct
  source 1..9: note = Seed: LVVVGACGV (KRAS G12C)
YVVNGNCGV

SEQ ID NO: 4888 - protein, 9 aa, synthetic construct
  source 1..9: note = Seed: LVVVGACGV (KRAS G12C)
YVVNGNCGY

SEQ ID NO: 4889 - protein, 9 aa, synthetic construct
  source 1..9: note = Seed: LVVVGACGV (KRAS G12C)
YVVNGPCGI

SEQ ID NO: 4890 - protein, 9 aa, synthetic construct
  source 1..9: note = Seed: LVVVGACGV (KRAS G12C)
YVVNGPCGL

SEQ ID NO: 4891 - protein, 9 aa, synthetic construct
  source 1..9: note = Seed: LVVVGACGV (KRAS G12C)
YVVNGPCGV

SEQ ID NO: 4892 - protein, 9 aa, synthetic construct
  source 1..9: note = Seed: LVVVGACGV (KRAS G12C)
YVVNGSCGA

SEQ ID NO: 4893 - protein, 9 aa, synthetic construct
  source 1..9: note = Seed: LVVVGACGV (KRAS G12C)
YVVNGSCGF

SEQ ID NO: 4894 - protein, 9 aa, synthetic construct
  source 1..9: note = Seed: LVVVGACGV (KRAS G12C)
YVVNGSCGI

SEQ ID NO: 4895 - protein, 9 aa, synthetic construct
  source 1..9: note = Seed: LVVVGACGV (KRAS G12C)
YVVNGSCGL

SEQ ID NO: 4896 - protein, 9 aa, synthetic construct
  source 1..9: note = Seed: LVVVGACGV (KRAS G12C)
YVVNGSCGM

SEQ ID NO: 4897 - protein, 9 aa, synthetic construct
  source 1..9: note = Seed: LVVVGACGV (KRAS G12C)
YVVNGSCGV

SEQ ID NO: 4898 - protein, 9 aa, synthetic construct
  source 1..9: note = Seed: LVVVGACGV (KRAS G12C)
YVVNGSCGY

SEQ ID NO: 4899 - protein, 9 aa, synthetic construct
  source 1..9: note = Seed: LVVVGACGV (KRAS G12C)
YVVNGTCGF

SEQ ID NO: 4900 - protein, 9 aa, synthetic construct
  source 1..9: note = Seed: LVVVGACGV (KRAS G12C)
YVVNGTCGI

SEQ ID NO: 4901 - protein, 9 aa, synthetic construct
  source 1..9: note = Seed: LVVVGACGV (KRAS G12C)
YVVNGTCGL

SEQ ID NO: 4902 - protein, 9 aa, synthetic construct
  source 1..9: note = Seed: LVVVGACGV (KRAS G12C)
YVVNGTCGV

SEQ ID NO: 4903 - protein, 9 aa, synthetic construct
  source 1..9: note = Seed: LVVVGACGV (KRAS G12C)
YVVNGVCGF

SEQ ID NO: 4904 - protein, 9 aa, synthetic construct
  source 1..9: note = Seed: LVVVGACGV (KRAS G12C)
YVVNGVCGI

SEQ ID NO: 4905 - protein, 9 aa, synthetic construct
  source 1..9: note = Seed: LVVVGACGV (KRAS G12C)
YVVNGVCGL

SEQ ID NO: 4906 - protein, 9 aa, synthetic construct
  source 1..9: note = Seed: LVVVGACGV (KRAS G12C)
YVVNGVCGM

SEQ ID NO: 4907 - protein, 9 aa, synthetic construct
  source 1..9: note = Seed: LVVVGACGV (KRAS G12C)
YVVNGVCGV

SEQ ID NO: 4908 - protein, 9 aa, synthetic construct
  source 1..9: note = Seed: LVVVGACGV (KRAS G12C)
YVVNGVCGY

SEQ ID NO: 4909 - protein, 9 aa, synthetic construct
  source 1..9: note = Seed: LVVVGACGV (KRAS G12C)
YVVQGACGA

SEQ ID NO: 4910 - protein, 9 aa, synthetic construct
  source 1..9: note = Seed: LVVVGACGV (KRAS G12C)
YVVQGACGF

SEQ ID NO: 4911 - protein, 9 aa, synthetic construct
  source 1..9: note = Seed: LVVVGACGV (KRAS G12C)
YVVQGACGG

SEQ ID NO: 4912 - protein, 9 aa, synthetic construct
  source 1..9: note = Seed: LVVVGACGV (KRAS G12C)
YVVQGACGH

SEQ ID NO: 4913 - protein, 9 aa, synthetic construct
  source 1..9: note = Seed: LVVVGACGV (KRAS G12C)
YVVQGACGM

SEQ ID NO: 4914 - protein, 9 aa, synthetic construct
  source 1..9: note = Seed: LVVVGACGV (KRAS G12C)
YVVQGACGN

SEQ ID NO: 4915 - protein, 9 aa, synthetic construct
  source 1..9: note = Seed: LVVVGACGV (KRAS G12C)
YVVQGACGP

SEQ ID NO: 4916 - protein, 9 aa, synthetic construct
  source 1..9: note = Seed: LVVVGACGV (KRAS G12C)
YVVQGACGQ

SEQ ID NO: 4917 - protein, 9 aa, synthetic construct
  source 1..9: note = Seed: LVVVGACGV (KRAS G12C)
YVVQGACGS

SEQ ID NO: 4918 - protein, 9 aa, synthetic construct
  source 1..9: note = Seed: LVVVGACGV (KRAS G12C)
YVVQGACGT

SEQ ID NO: 4919 - protein, 9 aa, synthetic construct
  source 1..9: note = Seed: LVVVGACGV (KRAS G12C)
YVVQGACGY

SEQ ID NO: 4920 - protein, 9 aa, synthetic construct
  source 1..9: note = Seed: LVVVGACGV (KRAS G12C)
YVVQGGCGA

SEQ ID NO: 4921 - protein, 9 aa, synthetic construct
  source 1..9: note = Seed: LVVVGACGV (KRAS G12C)
YVVQGGCGF

SEQ ID NO: 4922 - protein, 9 aa, synthetic construct
  source 1..9: note = Seed: LVVVGACGV (KRAS G12C)
YVVQGGCGI

SEQ ID NO: 4923 - protein, 9 aa, synthetic construct
  source 1..9: note = Seed: LVVVGACGV (KRAS G12C)
YVVQGGCGM

SEQ ID NO: 4924 - protein, 9 aa, synthetic construct
  source 1..9: note = Seed: LVVVGACGV (KRAS G12C)
YVVQGGCGS

SEQ ID NO: 4925 - protein, 9 aa, synthetic construct
  source 1..9: note = Seed: LVVVGACGV (KRAS G12C)
YVVQGGCGT

SEQ ID NO: 4926 - protein, 9 aa, synthetic construct
  source 1..9: note = Seed: LVVVGACGV (KRAS G12C)
YVVQGGCGV

SEQ ID NO: 4927 - protein, 9 aa, synthetic construct
  source 1..9: note = Seed: LVVVGACGV (KRAS G12C)
YVVQGHCGL

SEQ ID NO: 4928 - protein, 9 aa, synthetic construct
  source 1..9: note = Seed: LVVVGACGV (KRAS G12C)
YVVQGICGA

SEQ ID NO: 4929 - protein, 9 aa, synthetic construct
  source 1..9: note = Seed: LVVVGACGV (KRAS G12C)
YVVQGICGI

SEQ ID NO: 4930 - protein, 9 aa, synthetic construct
  source 1..9: note = Seed: LVVVGACGV (KRAS G12C)
YVVQGICGL

SEQ ID NO: 4931 - protein, 9 aa, synthetic construct
  source 1..9: note = Seed: LVVVGACGV (KRAS G12C)
YVVQGICGM

SEQ ID NO: 4932 - protein, 9 aa, synthetic construct
  source 1..9: note = Seed: LVVVGACGV (KRAS G12C)
YVVQGICGN

SEQ ID NO: 4933 - protein, 9 aa, synthetic construct
  source 1..9: note = Seed: LVVVGACGV (KRAS G12C)
YVVQGICGV

SEQ ID NO: 4934 - protein, 9 aa, synthetic construct
  source 1..9: note = Seed: LVVVGACGV (KRAS G12C)
YVVQGMCGL

SEQ ID NO: 4935 - protein, 9 aa, synthetic construct
  source 1..9: note = Seed: LVVVGACGV (KRAS G12C)
YVVQGMCGV

SEQ ID NO: 4936 - protein, 9 aa, synthetic construct
  source 1..9: note = Seed: LVVVGACGV (KRAS G12C)
YVVQGNCGA

SEQ ID NO: 4937 - protein, 9 aa, synthetic construct
  source 1..9: note = Seed: LVVVGACGV (KRAS G12C)
YVVQGNCGF

SEQ ID NO: 4938 - protein, 9 aa, synthetic construct
  source 1..9: note = Seed: LVVVGACGV (KRAS G12C)
YVVQGNCGI

SEQ ID NO: 4939 - protein, 9 aa, synthetic construct
  source 1..9: note = Seed: LVVVGACGV (KRAS G12C)
YVVQGNCGL

SEQ ID NO: 4940 - protein, 9 aa, synthetic construct
  source 1..9: note = Seed: LVVVGACGV (KRAS G12C)
YVVQGNCGM

SEQ ID NO: 4941 - protein, 9 aa, synthetic construct
  source 1..9: note = Seed: LVVVGACGV (KRAS G12C)
YVVQGNCGS

SEQ ID NO: 4942 - protein, 9 aa, synthetic construct
  source 1..9: note = Seed: LVVVGACGV (KRAS G12C)
YVVQGNCGT

SEQ ID NO: 4943 - protein, 9 aa, synthetic construct
  source 1..9: note = Seed: LVVVGACGV (KRAS G12C)
YVVQGNCGV

SEQ ID NO: 4944 - protein, 9 aa, synthetic construct
  source 1..9: note = Seed: LVVVGACGV (KRAS G12C)
YVVQGPCGA

SEQ ID NO: 4945 - protein, 9 aa, synthetic construct
  source 1..9: note = Seed: LVVVGACGV (KRAS G12C)
YVVQGPCGI

SEQ ID NO: 4946 - protein, 9 aa, synthetic construct
  source 1..9: note = Seed: LVVVGACGV (KRAS G12C)
YVVQGPCGL

SEQ ID NO: 4947 - protein, 9 aa, synthetic construct
  source 1..9: note = Seed: LVVVGACGV (KRAS G12C)
YVVQGPCGM

SEQ ID NO: 4948 - protein, 9 aa, synthetic construct
  source 1..9: note = Seed: LVVVGACGV (KRAS G12C)
YVVQGPCGS

SEQ ID NO: 4949 - protein, 9 aa, synthetic construct
  source 1..9: note = Seed: LVVVGACGV (KRAS G12C)
YVVQGPCGT

SEQ ID NO: 4950 - protein, 9 aa, synthetic construct
  source 1..9: note = Seed: LVVVGACGV (KRAS G12C)
YVVQGPCGV

SEQ ID NO: 4951 - protein, 9 aa, synthetic construct
  source 1..9: note = Seed: LVVVGACGV (KRAS G12C)
YVVQGQCGL

SEQ ID NO: 4952 - protein, 9 aa, synthetic construct
  source 1..9: note = Seed: LVVVGACGV (KRAS G12C)
YVVQGSCGA

SEQ ID NO: 4953 - protein, 9 aa, synthetic construct
  source 1..9: note = Seed: LVVVGACGV (KRAS G12C)
YVVQGSCGF

SEQ ID NO: 4954 - protein, 9 aa, synthetic construct
  source 1..9: note = Seed: LVVVGACGV (KRAS G12C)
YVVQGSCGI

SEQ ID NO: 4955 - protein, 9 aa, synthetic construct
  source 1..9: note = Seed: LVVVGACGV (KRAS G12C)
YVVQGSCGM

SEQ ID NO: 4956 - protein, 9 aa, synthetic construct
  source 1..9: note = Seed: LVVVGACGV (KRAS G12C)
YVVQGSCGS

SEQ ID NO: 4957 - protein, 9 aa, synthetic construct
  source 1..9: note = Seed: LVVVGACGV (KRAS G12C)
YVVQGSCGT

SEQ ID NO: 4958 - protein, 9 aa, synthetic construct
  source 1..9: note = Seed: LVVVGACGV (KRAS G12C)
YVVQGSCGY

SEQ ID NO: 4959 - protein, 9 aa, synthetic construct
  source 1..9: note = Seed: LVVVGACGV (KRAS G12C)
YVVQGTCGA

SEQ ID NO: 4960 - protein, 9 aa, synthetic construct
  source 1..9: note = Seed: LVVVGACGV (KRAS G12C)
YVVQGTCGI

SEQ ID NO: 4961 - protein, 9 aa, synthetic construct
  source 1..9: note = Seed: LVVVGACGV (KRAS G12C)
YVVQGTCGL

SEQ ID NO: 4962 - protein, 9 aa, synthetic construct
  source 1..9: note = Seed: LVVVGACGV (KRAS G12C)
YVVQGTCGM

SEQ ID NO: 4963 - protein, 9 aa, synthetic construct
  source 1..9: note = Seed: LVVVGACGV (KRAS G12C)
YVVQGTCGS

SEQ ID NO: 4964 - protein, 9 aa, synthetic construct
  source 1..9: note = Seed: LVVVGACGV (KRAS G12C)
YVVQGTCGT

SEQ ID NO: 4965 - protein, 9 aa, synthetic construct
  source 1..9: note = Seed: LVVVGACGV (KRAS G12C)
YVVQGTCGV

SEQ ID NO: 4966 - protein, 9 aa, synthetic construct
  source 1..9: note = Seed: LVVVGACGV (KRAS G12C)
YVVQGVCGA

SEQ ID NO: 4967 - protein, 9 aa, synthetic construct
  source 1..9: note = Seed: LVVVGACGV (KRAS G12C)
YVVQGVCGI

SEQ ID NO: 4968 - protein, 9 aa, synthetic construct
  source 1..9: note = Seed: LVVVGACGV (KRAS G12C)
YVVQGVCGL

SEQ ID NO: 4969 - protein, 9 aa, synthetic construct
  source 1..9: note = Seed: LVVVGACGV (KRAS G12C)
YVVQGVCGM

SEQ ID NO: 4970 - protein, 9 aa, synthetic construct
  source 1..9: note = Seed: LVVVGACGV (KRAS G12C)
YVVQGVCGN

SEQ ID NO: 4971 - protein, 9 aa, synthetic construct
  source 1..9: note = Seed: LVVVGACGV (KRAS G12C)
YVVQGVCGS

SEQ ID NO: 4972 - protein, 9 aa, synthetic construct
  source 1..9: note = Seed: LVVVGACGV (KRAS G12C)
YVVQGVCGT

SEQ ID NO: 4973 - protein, 9 aa, synthetic construct
  source 1..9: note = Seed: LVVVGACGV (KRAS G12C)
YVVQGVCGV

SEQ ID NO: 4974 - protein, 9 aa, synthetic construct
  source 1..9: note = Seed: LVVVGACGV (KRAS G12C)
YVVRGACGL

SEQ ID NO: 4975 - protein, 9 aa, synthetic construct
  source 1..9: note = Seed: LVVVGACGV (KRAS G12C)
YVVSGACGA

SEQ ID NO: 4976 - protein, 9 aa, synthetic construct
  source 1..9: note = Seed: LVVVGACGV (KRAS G12C)
YVVSGACGF

SEQ ID NO: 4977 - protein, 9 aa, synthetic construct
  source 1..9: note = Seed: LVVVGACGV (KRAS G12C)
YVVSGACGG

SEQ ID NO: 4978 - protein, 9 aa, synthetic construct
  source 1..9: note = Seed: LVVVGACGV (KRAS G12C)
YVVSGACGI

SEQ ID NO: 4979 - protein, 9 aa, synthetic construct
  source 1..9: note = Seed: LVVVGACGV (KRAS G12C)
YVVSGACGM

SEQ ID NO: 4980 - protein, 9 aa, synthetic construct
  source 1..9: note = Seed: LVVVGACGV (KRAS G12C)
YVVSGACGN

SEQ ID NO: 4981 - protein, 9 aa, synthetic construct
  source 1..9: note = Seed: LVVVGACGV (KRAS G12C)
YVVSGACGS

SEQ ID NO: 4982 - protein, 9 aa, synthetic construct
  source 1..9: note = Seed: LVVVGACGV (KRAS G12C)
YVVSGACGT

SEQ ID NO: 4983 - protein, 9 aa, synthetic construct
  source 1..9: note = Seed: LVVVGACGV (KRAS G12C)
YVVSGACGV

SEQ ID NO: 4984 - protein, 9 aa, synthetic construct
  source 1..9: note = Seed: LVVVGACGV (KRAS G12C)
YVVSGACGY

SEQ ID NO: 4985 - protein, 9 aa, synthetic construct
  source 1..9: note = Seed: LVVVGACGV (KRAS G12C)
YVVSGGCGA

SEQ ID NO: 4986 - protein, 9 aa, synthetic construct
  source 1..9: note = Seed: LVVVGACGV (KRAS G12C)
YVVSGGCGF

SEQ ID NO: 4987 - protein, 9 aa, synthetic construct
  source 1..9: note = Seed: LVVVGACGV (KRAS G12C)
YVVSGGCGI

SEQ ID NO: 4988 - protein, 9 aa, synthetic construct
  source 1..9: note = Seed: LVVVGACGV (KRAS G12C)
YVVSGGCGL

SEQ ID NO: 4989 - protein, 9 aa, synthetic construct
  source 1..9: note = Seed: LVVVGACGV (KRAS G12C)
YVVSGGCGM

SEQ ID NO: 4990 - protein, 9 aa, synthetic construct
  source 1..9: note = Seed: LVVVGACGV (KRAS G12C)
YVVSGGCGS

SEQ ID NO: 4991 - protein, 9 aa, synthetic construct
  source 1..9: note = Seed: LVVVGACGV (KRAS G12C)
YVVSGGCGT

SEQ ID NO: 4992 - protein, 9 aa, synthetic construct
  source 1..9: note = Seed: LVVVGACGV (KRAS G12C)
YVVSGGCGV

SEQ ID NO: 4993 - protein, 9 aa, synthetic construct
  source 1..9: note = Seed: LVVVGACGV (KRAS G12C)
YVVSGNCGA

SEQ ID NO: 4994 - protein, 9 aa, synthetic construct
  source 1..9: note = Seed: LVVVGACGV (KRAS G12C)
YVVSGNCGI

SEQ ID NO: 4995 - protein, 9 aa, synthetic construct
  source 1..9: note = Seed: LVVVGACGV (KRAS G12C)
YVVSGNCGL

SEQ ID NO: 4996 - protein, 9 aa, synthetic construct
  source 1..9: note = Seed: LVVVGACGV (KRAS G12C)
YVVSGNCGM

SEQ ID NO: 4997 - protein, 9 aa, synthetic construct
  source 1..9: note = Seed: LVVVGACGV (KRAS G12C)
YVVSGNCGS

SEQ ID NO: 4998 - protein, 9 aa, synthetic construct
  source 1..9: note = Seed: LVVVGACGV (KRAS G12C)
YVVSGNCGV

SEQ ID NO: 4999 - protein, 9 aa, synthetic construct
  source 1..9: note = Seed: LVVVGACGV (KRAS G12C)
YVVSGPCGA

SEQ ID NO: 5000 - protein, 9 aa, synthetic construct
  source 1..9: note = Seed: LVVVGACGV (KRAS G12C)
YVVSGPCGI

SEQ ID NO: 5001 - protein, 9 aa, synthetic construct
  source 1..9: note = Seed: LVVVGACGV (KRAS G12C)
YVVSGPCGL

SEQ ID NO: 5002 - protein, 9 aa, synthetic construct
  source 1..9: note = Seed: LVVVGACGV (KRAS G12C)
YVVSGPCGM

SEQ ID NO: 5003 - protein, 9 aa, synthetic construct
  source 1..9: note = Seed: LVVVGACGV (KRAS G12C)
YVVSGPCGV

SEQ ID NO: 5004 - protein, 9 aa, synthetic construct
  source 1..9: note = Seed: LVVVGACGV (KRAS G12C)
YVVSGQCGL

SEQ ID NO: 5005 - protein, 9 aa, synthetic construct
  source 1..9: note = Seed: LVVVGACGV (KRAS G12C)
YVVSGSCGA

SEQ ID NO: 5006 - protein, 9 aa, synthetic construct
  source 1..9: note = Seed: LVVVGACGV (KRAS G12C)
YVVSGSCGF

SEQ ID NO: 5007 - protein, 9 aa, synthetic construct
  source 1..9: note = Seed: LVVVGACGV (KRAS G12C)
YVVSGSCGI

SEQ ID NO: 5008 - protein, 9 aa, synthetic construct
  source 1..9: note = Seed: LVVVGACGV (KRAS G12C)
YVVSGSCGL

SEQ ID NO: 5009 - protein, 9 aa, synthetic construct
  source 1..9: note = Seed: LVVVGACGV (KRAS G12C)
YVVSGSCGM

SEQ ID NO: 5010 - protein, 9 aa, synthetic construct
  source 1..9: note = Seed: LVVVGACGV (KRAS G12C)
YVVSGSCGS

SEQ ID NO: 5011 - protein, 9 aa, synthetic construct
  source 1..9: note = Seed: LVVVGACGV (KRAS G12C)
YVVSGSCGT

SEQ ID NO: 5012 - protein, 9 aa, synthetic construct
  source 1..9: note = Seed: LVVVGACGV (KRAS G12C)
YVVSGSCGV

SEQ ID NO: 5013 - protein, 9 aa, synthetic construct
  source 1..9: note = Seed: LVVVGACGV (KRAS G12C)
YVVSGTCGA

SEQ ID NO: 5014 - protein, 9 aa, synthetic construct
  source 1..9: note = Seed: LVVVGACGV (KRAS G12C)
YVVSGTCGI

SEQ ID NO: 5015 - protein, 9 aa, synthetic construct
  source 1..9: note = Seed: LVVVGACGV (KRAS G12C)
YVVSGTCGL

SEQ ID NO: 5016 - protein, 9 aa, synthetic construct
  source 1..9: note = Seed: LVVVGACGV (KRAS G12C)
YVVSGTCGM

SEQ ID NO: 5017 - protein, 9 aa, synthetic construct
  source 1..9: note = Seed: LVVVGACGV (KRAS G12C)
YVVSGTCGV

SEQ ID NO: 5018 - protein, 9 aa, synthetic construct
  source 1..9: note = Seed: LVVVGACGV (KRAS G12C)
YVVSGVCGA

SEQ ID NO: 5019 - protein, 9 aa, synthetic construct
  source 1..9: note = Seed: LVVVGACGV (KRAS G12C)
YVVSGVCGI

SEQ ID NO: 5020 - protein, 9 aa, synthetic construct
  source 1..9: note = Seed: LVVVGACGV (KRAS G12C)
YVVSGVCGL

SEQ ID NO: 5021 - protein, 9 aa, synthetic construct
  source 1..9: note = Seed: LVVVGACGV (KRAS G12C)
YVVSGVCGM

SEQ ID NO: 5022 - protein, 9 aa, synthetic construct
  source 1..9: note = Seed: LVVVGACGV (KRAS G12C)
YVVSGVCGV

SEQ ID NO: 5023 - protein, 9 aa, synthetic construct
  source 1..9: note = Seed: LVVVGACGV (KRAS G12C)
YVVTGACGA

SEQ ID NO: 5024 - protein, 9 aa, synthetic construct
  source 1..9: note = Seed: LVVVGACGV (KRAS G12C)
YVVTGACGF

SEQ ID NO: 5025 - protein, 9 aa, synthetic construct
  source 1..9: note = Seed: LVVVGACGV (KRAS G12C)
YVVTGACGI

SEQ ID NO: 5026 - protein, 9 aa, synthetic construct
  source 1..9: note = Seed: LVVVGACGV (KRAS G12C)
YVVTGACGL

SEQ ID NO: 5027 - protein, 9 aa, synthetic construct
  source 1..9: note = Seed: LVVVGACGV (KRAS G12C)
YVVTGACGM

SEQ ID NO: 5028 - protein, 9 aa, synthetic construct
  source 1..9: note = Seed: LVVVGACGV (KRAS G12C)
YVVTGACGS

SEQ ID NO: 5029 - protein, 9 aa, synthetic construct
  source 1..9: note = Seed: LVVVGACGV (KRAS G12C)
YVVTGACGT

SEQ ID NO: 5030 - protein, 9 aa, synthetic construct
  source 1..9: note = Seed: LVVVGACGV (KRAS G12C)
YVVTGACGV

SEQ ID NO: 5031 - protein, 9 aa, synthetic construct
  source 1..9: note = Seed: LVVVGACGV (KRAS G12C)
YVVTGGCGA

SEQ ID NO: 5032 - protein, 9 aa, synthetic construct
  source 1..9: note = Seed: LVVVGACGV (KRAS G12C)
YVVTGGCGI

SEQ ID NO: 5033 - protein, 9 aa, synthetic construct
  source 1..9: note = Seed: LVVVGACGV (KRAS G12C)
YVVTGGCGL

SEQ ID NO: 5034 - protein, 9 aa, synthetic construct
  source 1..9: note = Seed: LVVVGACGV (KRAS G12C)
YVVTGGCGM

SEQ ID NO: 5035 - protein, 9 aa, synthetic construct
  source 1..9: note = Seed: LVVVGACGV (KRAS G12C)
YVVTGGCGV

SEQ ID NO: 5036 - protein, 9 aa, synthetic construct
  source 1..9: note = Seed: LVVVGACGV (KRAS G12C)
YVVTGMCGL

SEQ ID NO: 5037 - protein, 9 aa, synthetic construct
  source 1..9: note = Seed: LVVVGACGV (KRAS G12C)
YVVTGNCGA

SEQ ID NO: 5038 - protein, 9 aa, synthetic construct
  source 1..9: note = Seed: LVVVGACGV (KRAS G12C)
YVVTGNCGI

SEQ ID NO: 5039 - protein, 9 aa, synthetic construct
  source 1..9: note = Seed: LVVVGACGV (KRAS G12C)
YVVTGNCGL

SEQ ID NO: 5040 - protein, 9 aa, synthetic construct
  source 1..9: note = Seed: LVVVGACGV (KRAS G12C)
YVVTGNCGM

SEQ ID NO: 5041 - protein, 9 aa, synthetic construct
  source 1..9: note = Seed: LVVVGACGV (KRAS G12C)
YVVTGNCGV

SEQ ID NO: 5042 - protein, 9 aa, synthetic construct
  source 1..9: note = Seed: LVVVGACGV (KRAS G12C)
YVVTGPCGA

SEQ ID NO: 5043 - protein, 9 aa, synthetic construct
  source 1..9: note = Seed: LVVVGACGV (KRAS G12C)
YVVTGPCGI

SEQ ID NO: 5044 - protein, 9 aa, synthetic construct
  source 1..9: note = Seed: LVVVGACGV (KRAS G12C)
YVVTGPCGL

SEQ ID NO: 5045 - protein, 9 aa, synthetic construct
  source 1..9: note = Seed: LVVVGACGV (KRAS G12C)
YVVTGPCGM

SEQ ID NO: 5046 - protein, 9 aa, synthetic construct
  source 1..9: note = Seed: LVVVGACGV (KRAS G12C)
YVVTGPCGV

SEQ ID NO: 5047 - protein, 9 aa, synthetic construct
  source 1..9: note = Seed: LVVVGACGV (KRAS G12C)
YVVTGSCGA

SEQ ID NO: 5048 - protein, 9 aa, synthetic construct
  source 1..9: note = Seed: LVVVGACGV (KRAS G12C)
YVVTGSCGF

SEQ ID NO: 5049 - protein, 9 aa, synthetic construct
  source 1..9: note = Seed: LVVVGACGV (KRAS G12C)
YVVTGSCGI

SEQ ID NO: 5050 - protein, 9 aa, synthetic construct
  source 1..9: note = Seed: LVVVGACGV (KRAS G12C)
YVVTGSCGL

SEQ ID NO: 5051 - protein, 9 aa, synthetic construct
  source 1..9: note = Seed: LVVVGACGV (KRAS G12C)
YVVTGSCGM

SEQ ID NO: 5052 - protein, 9 aa, synthetic construct
  source 1..9: note = Seed: LVVVGACGV (KRAS G12C)
YVVTGSCGS

SEQ ID NO: 5053 - protein, 9 aa, synthetic construct
  source 1..9: note = Seed: LVVVGACGV (KRAS G12C)
YVVTGSCGT

SEQ ID NO: 5054 - protein, 9 aa, synthetic construct
  source 1..9: note = Seed: LVVVGACGV (KRAS G12C)
YVVTGSCGV

SEQ ID NO: 5055 - protein, 9 aa, synthetic construct
  source 1..9: note = Seed: LVVVGACGV (KRAS G12C)
YVVTGTCGA

SEQ ID NO: 5056 - protein, 9 aa, synthetic construct
  source 1..9: note = Seed: LVVVGACGV (KRAS G12C)
YVVTGTCGI

SEQ ID NO: 5057 - protein, 9 aa, synthetic construct
  source 1..9: note = Seed: LVVVGACGV (KRAS G12C)
YVVTGTCGL

SEQ ID NO: 5058 - protein, 9 aa, synthetic construct
  source 1..9: note = Seed: LVVVGACGV (KRAS G12C)
YVVTGTCGM

SEQ ID NO: 5059 - protein, 9 aa, synthetic construct
  source 1..9: note = Seed: LVVVGACGV (KRAS G12C)
YVVTGTCGV

SEQ ID NO: 5060 - protein, 9 aa, synthetic construct
  source 1..9: note = Seed: LVVVGACGV (KRAS G12C)
YVVTGVCGA

SEQ ID NO: 5061 - protein, 9 aa, synthetic construct
  source 1..9: note = Seed: LVVVGACGV (KRAS G12C)
YVVTGVCGL

SEQ ID NO: 5062 - protein, 9 aa, synthetic construct
  source 1..9: note = Seed: LVVVGACGV (KRAS G12C)
YVVTGVCGV

SEQ ID NO: 5063 - protein, 9 aa, synthetic construct
  source 1..9: note = Seed: LVVVGACGV (KRAS G12C)
YVVVGACGA

SEQ ID NO: 5064 - protein, 9 aa, synthetic construct
  source 1..9: note = Seed: LVVVGACGV (KRAS G12C)
YVVVGACGF

SEQ ID NO: 5065 - protein, 9 aa, synthetic construct
  source 1..9: note = Seed: LVVVGACGV (KRAS G12C)
YVVVGACGG

SEQ ID NO: 5066 - protein, 9 aa, synthetic construct
  source 1..9: note = Seed: LVVVGACGV (KRAS G12C)
YVVVGACGH

SEQ ID NO: 5067 - protein, 9 aa, synthetic construct
  source 1..9: note = Seed: LVVVGACGV (KRAS G12C)
YVVVGACGI

SEQ ID NO: 5068 - protein, 9 aa, synthetic construct
  source 1..9: note = Seed: LVVVGACGV (KRAS G12C)
YVVVGACGL

SEQ ID NO: 5069 - protein, 9 aa, synthetic construct
  source 1..9: note = Seed: LVVVGACGV (KRAS G12C)
YVVVGACGM

SEQ ID NO: 5070 - protein, 9 aa, synthetic construct
  source 1..9: note = Seed: LVVVGACGV (KRAS G12C)
YVVVGACGN

SEQ ID NO: 5071 - protein, 9 aa, synthetic construct
  source 1..9: note = Seed: LVVVGACGV (KRAS G12C)
YVVVGACGP

SEQ ID NO: 5072 - protein, 9 aa, synthetic construct
  source 1..9: note = Seed: LVVVGACGV (KRAS G12C)
YVVVGACGQ

SEQ ID NO: 5073 - protein, 9 aa, synthetic construct
  source 1..9: note = Seed: LVVVGACGV (KRAS G12C)
YVVVGACGR

SEQ ID NO: 5074 - protein, 9 aa, synthetic construct
  source 1..9: note = Seed: LVVVGACGV (KRAS G12C)
YVVVGACGS

SEQ ID NO: 5075 - protein, 9 aa, synthetic construct
  source 1..9: note = Seed: LVVVGACGV (KRAS G12C)
YVVVGACGT

SEQ ID NO: 5076 - protein, 9 aa, synthetic construct
  source 1..9: note = Seed: LVVVGACGV (KRAS G12C)
YVVVGACGV

SEQ ID NO: 5077 - protein, 9 aa, synthetic construct
  source 1..9: note = Seed: LVVVGACGV (KRAS G12C)
YVVVGACGY

SEQ ID NO: 5078 - protein, 9 aa, synthetic construct
  source 1..9: note = Seed: LVVVGACGV (KRAS G12C)
YVVVGGCGA

SEQ ID NO: 5079 - protein, 9 aa, synthetic construct
  source 1..9: note = Seed: LVVVGACGV (KRAS G12C)
YVVVGGCGF

SEQ ID NO: 5080 - protein, 9 aa, synthetic construct
  source 1..9: note = Seed: LVVVGACGV (KRAS G12C)
YVVVGGCGG

SEQ ID NO: 5081 - protein, 9 aa, synthetic construct
  source 1..9: note = Seed: LVVVGACGV (KRAS G12C)
YVVVGGCGI

SEQ ID NO: 5082 - protein, 9 aa, synthetic construct
  source 1..9: note = Seed: LVVVGACGV (KRAS G12C)
YVVVGGCGL

SEQ ID NO: 5083 - protein, 9 aa, synthetic construct
  source 1..9: note = Seed: LVVVGACGV (KRAS G12C)
YVVVGGCGM

SEQ ID NO: 5084 - protein, 9 aa, synthetic construct
  source 1..9: note = Seed: LVVVGACGV (KRAS G12C)
YVVVGGCGN

SEQ ID NO: 5085 - protein, 9 aa, synthetic construct
  source 1..9: note = Seed: LVVVGACGV (KRAS G12C)
YVVVGGCGS

SEQ ID NO: 5086 - protein, 9 aa, synthetic construct
  source 1..9: note = Seed: LVVVGACGV (KRAS G12C)
YVVVGGCGT

SEQ ID NO: 5087 - protein, 9 aa, synthetic construct
  source 1..9: note = Seed: LVVVGACGV (KRAS G12C)
YVVVGGCGV

SEQ ID NO: 5088 - protein, 9 aa, synthetic construct
  source 1..9: note = Seed: LVVVGACGV (KRAS G12C)
YVVVGHCGL

SEQ ID NO: 5089 - protein, 9 aa, synthetic construct
  source 1..9: note = Seed: LVVVGACGV (KRAS G12C)
YVVVGICGA

SEQ ID NO: 5090 - protein, 9 aa, synthetic construct
  source 1..9: note = Seed: LVVVGACGV (KRAS G12C)
YVVVGICGN

SEQ ID NO: 5091 - protein, 9 aa, synthetic construct
  source 1..9: note = Seed: LVVVGACGV (KRAS G12C)
YVVVGMCGA

SEQ ID NO: 5092 - protein, 9 aa, synthetic construct
  source 1..9: note = Seed: LVVVGACGV (KRAS G12C)
YVVVGMCGN

SEQ ID NO: 5093 - protein, 9 aa, synthetic construct
  source 1..9: note = Seed: LVVVGACGV (KRAS G12C)
YVVVGNCGA

SEQ ID NO: 5094 - protein, 9 aa, synthetic construct
  source 1..9: note = Seed: LVVVGACGV (KRAS G12C)
YVVVGNCGI

SEQ ID NO: 5095 - protein, 9 aa, synthetic construct
  source 1..9: note = Seed: LVVVGACGV (KRAS G12C)
YVVVGNCGL

SEQ ID NO: 5096 - protein, 9 aa, synthetic construct
  source 1..9: note = Seed: LVVVGACGV (KRAS G12C)
YVVVGNCGM

SEQ ID NO: 5097 - protein, 9 aa, synthetic construct
  source 1..9: note = Seed: LVVVGACGV (KRAS G12C)
YVVVGNCGN

SEQ ID NO: 5098 - protein, 9 aa, synthetic construct
  source 1..9: note = Seed: LVVVGACGV (KRAS G12C)
YVVVGNCGS

SEQ ID NO: 5099 - protein, 9 aa, synthetic construct
  source 1..9: note = Seed: LVVVGACGV (KRAS G12C)
YVVVGNCGT

SEQ ID NO: 5100 - protein, 9 aa, synthetic construct
  source 1..9: note = Seed: LVVVGACGV (KRAS G12C)
YVVVGNCGV

SEQ ID NO: 5101 - protein, 9 aa, synthetic construct
  source 1..9: note = Seed: LVVVGACGV (KRAS G12C)
YVVVGPCGA

SEQ ID NO: 5102 - protein, 9 aa, synthetic construct
  source 1..9: note = Seed: LVVVGACGV (KRAS G12C)
YVVVGPCGF

SEQ ID NO: 5103 - protein, 9 aa, synthetic construct
  source 1..9: note = Seed: LVVVGACGV (KRAS G12C)
YVVVGPCGH

SEQ ID NO: 5104 - protein, 9 aa, synthetic construct
  source 1..9: note = Seed: LVVVGACGV (KRAS G12C)
YVVVGPCGI

SEQ ID NO: 5105 - protein, 9 aa, synthetic construct
  source 1..9: note = Seed: LVVVGACGV (KRAS G12C)
YVVVGPCGL

SEQ ID NO: 5106 - protein, 9 aa, synthetic construct
  source 1..9: note = Seed: LVVVGACGV (KRAS G12C)
YVVVGPCGM

SEQ ID NO: 5107 - protein, 9 aa, synthetic construct
  source 1..9: note = Seed: LVVVGACGV (KRAS G12C)
YVVVGPCGN

SEQ ID NO: 5108 - protein, 9 aa, synthetic construct
  source 1..9: note = Seed: LVVVGACGV (KRAS G12C)
YVVVGPCGQ

SEQ ID NO: 5109 - protein, 9 aa, synthetic construct
  source 1..9: note = Seed: LVVVGACGV (KRAS G12C)
YVVVGPCGS

SEQ ID NO: 5110 - protein, 9 aa, synthetic construct
  source 1..9: note = Seed: LVVVGACGV (KRAS G12C)
YVVVGPCGT

SEQ ID NO: 5111 - protein, 9 aa, synthetic construct
  source 1..9: note = Seed: LVVVGACGV (KRAS G12C)
YVVVGPCGV

SEQ ID NO: 5112 - protein, 9 aa, synthetic construct
  source 1..9: note = Seed: LVVVGACGV (KRAS G12C)
YVVVGSCGA

SEQ ID NO: 5113 - protein, 9 aa, synthetic construct
  source 1..9: note = Seed: LVVVGACGV (KRAS G12C)
YVVVGSCGF

SEQ ID NO: 5114 - protein, 9 aa, synthetic construct
  source 1..9: note = Seed: LVVVGACGV (KRAS G12C)
YVVVGSCGG

SEQ ID NO: 5115 - protein, 9 aa, synthetic construct
  source 1..9: note = Seed: LVVVGACGV (KRAS G12C)
YVVVGSCGH

SEQ ID NO: 5116 - protein, 9 aa, synthetic construct
  source 1..9: note = Seed: LVVVGACGV (KRAS G12C)
YVVVGSCGI

SEQ ID NO: 5117 - protein, 9 aa, synthetic construct
  source 1..9: note = Seed: LVVVGACGV (KRAS G12C)
YVVVGSCGL

SEQ ID NO: 5118 - protein, 9 aa, synthetic construct
  source 1..9: note = Seed: LVVVGACGV (KRAS G12C)
YVVVGSCGM

SEQ ID NO: 5119 - protein, 9 aa, synthetic construct
  source 1..9: note = Seed: LVVVGACGV (KRAS G12C)
YVVVGSCGN

SEQ ID NO: 5120 - protein, 9 aa, synthetic construct
  source 1..9: note = Seed: LVVVGACGV (KRAS G12C)
YVVVGSCGS

SEQ ID NO: 5121 - protein, 9 aa, synthetic construct
  source 1..9: note = Seed: LVVVGACGV (KRAS G12C)
YVVVGSCGT

SEQ ID NO: 5122 - protein, 9 aa, synthetic construct
  source 1..9: note = Seed: LVVVGACGV (KRAS G12C)
YVVVGSCGV

SEQ ID NO: 5123 - protein, 9 aa, synthetic construct
  source 1..9: note = Seed: LVVVGACGV (KRAS G12C)
YVVVGSCGY

SEQ ID NO: 5124 - protein, 9 aa, synthetic construct
  source 1..9: note = Seed: LVVVGACGV (KRAS G12C)
YVVVGTCGA

SEQ ID NO: 5125 - protein, 9 aa, synthetic construct
  source 1..9: note = Seed: LVVVGACGV (KRAS G12C)
YVVVGTCGI

SEQ ID NO: 5126 - protein, 9 aa, synthetic construct
  source 1..9: note = Seed: LVVVGACGV (KRAS G12C)
YVVVGTCGL

SEQ ID NO: 5127 - protein, 9 aa, synthetic construct
  source 1..9: note = Seed: LVVVGACGV (KRAS G12C)
YVVVGTCGM

SEQ ID NO: 5128 - protein, 9 aa, synthetic construct
  source 1..9: note = Seed: LVVVGACGV (KRAS G12C)
YVVVGTCGN

SEQ ID NO: 5129 - protein, 9 aa, synthetic construct
  source 1..9: note = Seed: LVVVGACGV (KRAS G12C)
YVVVGTCGS

SEQ ID NO: 5130 - protein, 9 aa, synthetic construct
  source 1..9: note = Seed: LVVVGACGV (KRAS G12C)
YVVVGTCGT

SEQ ID NO: 5131 - protein, 9 aa, synthetic construct
  source 1..9: note = Seed: LVVVGACGV (KRAS G12C)
YVVVGTCGV

SEQ ID NO: 5132 - protein, 9 aa, synthetic construct
  source 1..9: note = Seed: LVVVGACGV (KRAS G12C)
YVVVGVCGA

SEQ ID NO: 5133 - protein, 9 aa, synthetic construct
  source 1..9: note = Seed: LVVVGACGV (KRAS G12C)
YVVVGVCGH

SEQ ID NO: 5134 - protein, 9 aa, synthetic construct
  source 1..9: note = Seed: LVVVGACGV (KRAS G12C)
YVVVGVCGN

SEQ ID NO: 5135 - protein, 9 aa, synthetic construct
  source 1..9: note = Seed: LVVVGACGV (KRAS G12C)
YVVVGVCGS

SEQ ID NO: 5136 - protein, 9 aa, synthetic construct
  source 1..9: note = Seed: LVVVGACGV (KRAS G12C)
YVVVGVCGV

SEQ ID NO: 5137 - protein, 9 aa, synthetic construct
  source 1..9: note = Seed: LVVVGACGV (KRAS G12C)
YVVWGACGA

SEQ ID NO: 5138 - protein, 9 aa, synthetic construct
  source 1..9: note = Seed: LVVVGACGV (KRAS G12C)
YVVWGACGI

SEQ ID NO: 5139 - protein, 9 aa, synthetic construct
  source 1..9: note = Seed: LVVVGACGV (KRAS G12C)
YVVWGACGL

SEQ ID NO: 5140 - protein, 9 aa, synthetic construct
  source 1..9: note = Seed: LVVVGACGV (KRAS G12C)
YVVWGACGM

SEQ ID NO: 5141 - protein, 9 aa, synthetic construct
  source 1..9: note = Seed: LVVVGACGV (KRAS G12C)
YVVWGACGV

SEQ ID NO: 5142 - protein, 9 aa, synthetic construct
  source 1..9: note = Seed: LVVVGACGV (KRAS G12C)
YVVWGSCGL

SEQ ID NO: 5143 - protein, 9 aa, synthetic construct
  source 1..9: note = Seed: LVVVGACGV (KRAS G12C)
YVVWGSCGV

SEQ ID NO: 5144 - protein, 9 aa, synthetic construct
  source 1..9: note = Seed: VVGACGVGK (KRAS G12C)
AVGHCRVGR

SEQ ID NO: 5145 - protein, 9 aa, synthetic construct
  source 1..9: note = Seed: VVGACGVGK (KRAS G12C)
FVGACKVGA

SEQ ID NO: 5146 - protein, 9 aa, synthetic construct
  source 1..9: note = Seed: VVGACGVGK (KRAS G12C)
FVGACKVGH

SEQ ID NO: 5147 - protein, 9 aa, synthetic construct
  source 1..9: note = Seed: VVGACGVGK (KRAS G12C)
FVGACKVGK

SEQ ID NO: 5148 - protein, 9 aa, synthetic construct
  source 1..9: note = Seed: VVGACGVGK (KRAS G12C)
FVGACKVGQ

SEQ ID NO: 5149 - protein, 9 aa, synthetic construct
  source 1..9: note = Seed: VVGACGVGK (KRAS G12C)
FVGACKVGR

SEQ ID NO: 5150 - protein, 9 aa, synthetic construct
  source 1..9: note = Seed: VVGACGVGK (KRAS G12C)
FVGACKVGS

SEQ ID NO: 5151 - protein, 9 aa, synthetic construct
  source 1..9: note = Seed: VVGACGVGK (KRAS G12C)
FVGACRVGA

SEQ ID NO: 5152 - protein, 9 aa, synthetic construct
  source 1..9: note = Seed: VVGACGVGK (KRAS G12C)
FVGACRVGG

SEQ ID NO: 5153 - protein, 9 aa, synthetic construct
  source 1..9: note = Seed: VVGACGVGK (KRAS G12C)
FVGACRVGH

SEQ ID NO: 5154 - protein, 9 aa, synthetic construct
  source 1..9: note = Seed: VVGACGVGK (KRAS G12C)
FVGACRVGK

SEQ ID NO: 5155 - protein, 9 aa, synthetic construct
  source 1..9: note = Seed: VVGACGVGK (KRAS G12C)
FVGACRVGQ

SEQ ID NO: 5156 - protein, 9 aa, synthetic construct
  source 1..9: note = Seed: VVGACGVGK (KRAS G12C)
FVGACRVGR

SEQ ID NO: 5157 - protein, 9 aa, synthetic construct
  source 1..9: note = Seed: VVGACGVGK (KRAS G12C)
FVGACRVGS

SEQ ID NO: 5158 - protein, 9 aa, synthetic construct
  source 1..9: note = Seed: VVGACGVGK (KRAS G12C)
FVGACRVGY

SEQ ID NO: 5159 - protein, 9 aa, synthetic construct
  source 1..9: note = Seed: VVGACGVGK (KRAS G12C)
FVGFCKVGA

SEQ ID NO: 5160 - protein, 9 aa, synthetic construct
  source 1..9: note = Seed: VVGACGVGK (KRAS G12C)
FVGFCKVGG

SEQ ID NO: 5161 - protein, 9 aa, synthetic construct
  source 1..9: note = Seed: VVGACGVGK (KRAS G12C)
FVGFCKVGH

SEQ ID NO: 5162 - protein, 9 aa, synthetic construct
  source 1..9: note = Seed: VVGACGVGK (KRAS G12C)
FVGFCKVGK

SEQ ID NO: 5163 - protein, 9 aa, synthetic construct
  source 1..9: note = Seed: VVGACGVGK (KRAS G12C)
FVGFCKVGQ

SEQ ID NO: 5164 - protein, 9 aa, synthetic construct
  source 1..9: note = Seed: VVGACGVGK (KRAS G12C)
FVGFCKVGR

SEQ ID NO: 5165 - protein, 9 aa, synthetic construct
  source 1..9: note = Seed: VVGACGVGK (KRAS G12C)
FVGFCKVGS

SEQ ID NO: 5166 - protein, 9 aa, synthetic construct
  source 1..9: note = Seed: VVGACGVGK (KRAS G12C)
FVGFCKVGY

SEQ ID NO: 5167 - protein, 9 aa, synthetic construct
  source 1..9: note = Seed: VVGACGVGK (KRAS G12C)
FVGFCRVGA

SEQ ID NO: 5168 - protein, 9 aa, synthetic construct
  source 1..9: note = Seed: VVGACGVGK (KRAS G12C)
FVGFCRVGG

SEQ ID NO: 5169 - protein, 9 aa, synthetic construct
  source 1..9: note = Seed: VVGACGVGK (KRAS G12C)
FVGFCRVGH

SEQ ID NO: 5170 - protein, 9 aa, synthetic construct
  source 1..9: note = Seed: VVGACGVGK (KRAS G12C)
FVGFCRVGK

SEQ ID NO: 5171 - protein, 9 aa, synthetic construct
  source 1..9: note = Seed: VVGACGVGK (KRAS G12C)
FVGFCRVGQ

SEQ ID NO: 5172 - protein, 9 aa, synthetic construct
  source 1..9: note = Seed: VVGACGVGK (KRAS G12C)
FVGFCRVGR

SEQ ID NO: 5173 - protein, 9 aa, synthetic construct
  source 1..9: note = Seed: VVGACGVGK (KRAS G12C)
FVGFCRVGS

SEQ ID NO: 5174 - protein, 9 aa, synthetic construct
  source 1..9: note = Seed: VVGACGVGK (KRAS G12C)
FVGFCRVGY

SEQ ID NO: 5175 - protein, 9 aa, synthetic construct
  source 1..9: note = Seed: VVGACGVGK (KRAS G12C)
FVGHCAVGR

SEQ ID NO: 5176 - protein, 9 aa, synthetic construct
  source 1..9: note = Seed: VVGACGVGK (KRAS G12C)
FVGHCKVGK

SEQ ID NO: 5177 - protein, 9 aa, synthetic construct
  source 1..9: note = Seed: VVGACGVGK (KRAS G12C)
FVGHCKVGR

SEQ ID NO: 5178 - protein, 9 aa, synthetic construct
  source 1..9: note = Seed: VVGACGVGK (KRAS G12C)
FVGHCPVGR

SEQ ID NO: 5179 - protein, 9 aa, synthetic construct
  source 1..9: note = Seed: VVGACGVGK (KRAS G12C)
FVGHCRVGA

SEQ ID NO: 5180 - protein, 9 aa, synthetic construct
  source 1..9: note = Seed: VVGACGVGK (KRAS G12C)
FVGHCRVGF

SEQ ID NO: 5181 - protein, 9 aa, synthetic construct
  source 1..9: note = Seed: VVGACGVGK (KRAS G12C)
FVGHCRVGH

SEQ ID NO: 5182 - protein, 9 aa, synthetic construct
  source 1..9: note = Seed: VVGACGVGK (KRAS G12C)
FVGHCRVGK

SEQ ID NO: 5183 - protein, 9 aa, synthetic construct
  source 1..9: note = Seed: VVGACGVGK (KRAS G12C)
FVGHCRVGQ

SEQ ID NO: 5184 - protein, 9 aa, synthetic construct
  source 1..9: note = Seed: VVGACGVGK (KRAS G12C)
FVGHCRVGR

SEQ ID NO: 5185 - protein, 9 aa, synthetic construct
  source 1..9: note = Seed: VVGACGVGK (KRAS G12C)
FVGHCRVGS

SEQ ID NO: 5186 - protein, 9 aa, synthetic construct
  source 1..9: note = Seed: VVGACGVGK (KRAS G12C)
FVGHCRVGY

SEQ ID NO: 5187 - protein, 9 aa, synthetic construct
  source 1..9: note = Seed: VVGACGVGK (KRAS G12C)
FVGHCVVGR

SEQ ID NO: 5188 - protein, 9 aa, synthetic construct
  source 1..9: note = Seed: VVGACGVGK (KRAS G12C)
FVGICKVGA

SEQ ID NO: 5189 - protein, 9 aa, synthetic construct
  source 1..9: note = Seed: VVGACGVGK (KRAS G12C)
FVGICKVGG

SEQ ID NO: 5190 - protein, 9 aa, synthetic construct
  source 1..9: note = Seed: VVGACGVGK (KRAS G12C)
FVGICKVGH

SEQ ID NO: 5191 - protein, 9 aa, synthetic construct
  source 1..9: note = Seed: VVGACGVGK (KRAS G12C)
FVGICKVGK

SEQ ID NO: 5192 - protein, 9 aa, synthetic construct
  source 1..9: note = Seed: VVGACGVGK (KRAS G12C)
FVGICKVGM

SEQ ID NO: 5193 - protein, 9 aa, synthetic construct
  source 1..9: note = Seed: VVGACGVGK (KRAS G12C)
FVGICKVGN

SEQ ID NO: 5194 - protein, 9 aa, synthetic construct
  source 1..9: note = Seed: VVGACGVGK (KRAS G12C)
FVGICKVGQ

SEQ ID NO: 5195 - protein, 9 aa, synthetic construct
  source 1..9: note = Seed: VVGACGVGK (KRAS G12C)
FVGICKVGR

SEQ ID NO: 5196 - protein, 9 aa, synthetic construct
  source 1..9: note = Seed: VVGACGVGK (KRAS G12C)
FVGICKVGS

SEQ ID NO: 5197 - protein, 9 aa, synthetic construct
  source 1..9: note = Seed: VVGACGVGK (KRAS G12C)
FVGICKVGT

SEQ ID NO: 5198 - protein, 9 aa, synthetic construct
  source 1..9: note = Seed: VVGACGVGK (KRAS G12C)
FVGICKVGY

SEQ ID NO: 5199 - protein, 9 aa, synthetic construct
  source 1..9: note = Seed: VVGACGVGK (KRAS G12C)
FVGICRVGA

SEQ ID NO: 5200 - protein, 9 aa, synthetic construct
  source 1..9: note = Seed: VVGACGVGK (KRAS G12C)
FVGICRVGG

SEQ ID NO: 5201 - protein, 9 aa, synthetic construct
  source 1..9: note = Seed: VVGACGVGK (KRAS G12C)
FVGICRVGH

SEQ ID NO: 5202 - protein, 9 aa, synthetic construct
  source 1..9: note = Seed: VVGACGVGK (KRAS G12C)
FVGICRVGK

SEQ ID NO: 5203 - protein, 9 aa, synthetic construct
  source 1..9: note = Seed: VVGACGVGK (KRAS G12C)
FVGICRVGM

SEQ ID NO: 5204 - protein, 9 aa, synthetic construct
  source 1..9: note = Seed: VVGACGVGK (KRAS G12C)
FVGICRVGN

SEQ ID NO: 5205 - protein, 9 aa, synthetic construct
  source 1..9: note = Seed: VVGACGVGK (KRAS G12C)
FVGICRVGP

SEQ ID NO: 5206 - protein, 9 aa, synthetic construct
  source 1..9: note = Seed: VVGACGVGK (KRAS G12C)
FVGICRVGQ

SEQ ID NO: 5207 - protein, 9 aa, synthetic construct
  source 1..9: note = Seed: VVGACGVGK (KRAS G12C)
FVGICRVGR

SEQ ID NO: 5208 - protein, 9 aa, synthetic construct
  source 1..9: note = Seed: VVGACGVGK (KRAS G12C)
FVGICRVGS

SEQ ID NO: 5209 - protein, 9 aa, synthetic construct
  source 1..9: note = Seed: VVGACGVGK (KRAS G12C)
FVGICRVGT

SEQ ID NO: 5210 - protein, 9 aa, synthetic construct
  source 1..9: note = Seed: VVGACGVGK (KRAS G12C)
FVGICRVGY

SEQ ID NO: 5211 - protein, 9 aa, synthetic construct
  source 1..9: note = Seed: VVGACGVGK (KRAS G12C)
FVGKCKVGA

SEQ ID NO: 5212 - protein, 9 aa, synthetic construct
  source 1..9: note = Seed: VVGACGVGK (KRAS G12C)
FVGKCKVGG

SEQ ID NO: 5213 - protein, 9 aa, synthetic construct
  source 1..9: note = Seed: VVGACGVGK (KRAS G12C)
FVGKCKVGH

SEQ ID NO: 5214 - protein, 9 aa, synthetic construct
  source 1..9: note = Seed: VVGACGVGK (KRAS G12C)
FVGKCKVGI

SEQ ID NO: 5215 - protein, 9 aa, synthetic construct
  source 1..9: note = Seed: VVGACGVGK (KRAS G12C)
FVGKCKVGK

SEQ ID NO: 5216 - protein, 9 aa, synthetic construct
  source 1..9: note = Seed: VVGACGVGK (KRAS G12C)
FVGKCKVGL

SEQ ID NO: 5217 - protein, 9 aa, synthetic construct
  source 1..9: note = Seed: VVGACGVGK (KRAS G12C)
FVGKCKVGM

SEQ ID NO: 5218 - protein, 9 aa, synthetic construct
  source 1..9: note = Seed: VVGACGVGK (KRAS G12C)
FVGKCKVGQ

SEQ ID NO: 5219 - protein, 9 aa, synthetic construct
  source 1..9: note = Seed: VVGACGVGK (KRAS G12C)
FVGKCKVGR

SEQ ID NO: 5220 - protein, 9 aa, synthetic construct
  source 1..9: note = Seed: VVGACGVGK (KRAS G12C)
FVGKCKVGS

SEQ ID NO: 5221 - protein, 9 aa, synthetic construct
  source 1..9: note = Seed: VVGACGVGK (KRAS G12C)
FVGKCKVGV

SEQ ID NO: 5222 - protein, 9 aa, synthetic construct
  source 1..9: note = Seed: VVGACGVGK (KRAS G12C)
FVGKCKVGY

SEQ ID NO: 5223 - protein, 9 aa, synthetic construct
  source 1..9: note = Seed: VVGACGVGK (KRAS G12C)
FVGKCRVGA

SEQ ID NO: 5224 - protein, 9 aa, synthetic construct
  source 1..9: note = Seed: VVGACGVGK (KRAS G12C)
FVGKCRVGF

SEQ ID NO: 5225 - protein, 9 aa, synthetic construct
  source 1..9: note = Seed: VVGACGVGK (KRAS G12C)
FVGKCRVGG

SEQ ID NO: 5226 - protein, 9 aa, synthetic construct
  source 1..9: note = Seed: VVGACGVGK (KRAS G12C)
FVGKCRVGH

SEQ ID NO: 5227 - protein, 9 aa, synthetic construct
  source 1..9: note = Seed: VVGACGVGK (KRAS G12C)
FVGKCRVGK

SEQ ID NO: 5228 - protein, 9 aa, synthetic construct
  source 1..9: note = Seed: VVGACGVGK (KRAS G12C)
FVGKCRVGL

SEQ ID NO: 5229 - protein, 9 aa, synthetic construct
  source 1..9: note = Seed: VVGACGVGK (KRAS G12C)
FVGKCRVGM

SEQ ID NO: 5230 - protein, 9 aa, synthetic construct
  source 1..9: note = Seed: VVGACGVGK (KRAS G12C)
FVGKCRVGQ

SEQ ID NO: 5231 - protein, 9 aa, synthetic construct
  source 1..9: note = Seed: VVGACGVGK (KRAS G12C)
FVGKCRVGR

SEQ ID NO: 5232 - protein, 9 aa, synthetic construct
  source 1..9: note = Seed: VVGACGVGK (KRAS G12C)
FVGKCRVGS

SEQ ID NO: 5233 - protein, 9 aa, synthetic construct
  source 1..9: note = Seed: VVGACGVGK (KRAS G12C)
FVGKCRVGV

SEQ ID NO: 5234 - protein, 9 aa, synthetic construct
  source 1..9: note = Seed: VVGACGVGK (KRAS G12C)
FVGKCRVGY

SEQ ID NO: 5235 - protein, 9 aa, synthetic construct
  source 1..9: note = Seed: VVGACGVGK (KRAS G12C)
FVGLCKVGA

SEQ ID NO: 5236 - protein, 9 aa, synthetic construct
  source 1..9: note = Seed: VVGACGVGK (KRAS G12C)
FVGLCKVGG

SEQ ID NO: 5237 - protein, 9 aa, synthetic construct
  source 1..9: note = Seed: VVGACGVGK (KRAS G12C)
FVGLCKVGH

SEQ ID NO: 5238 - protein, 9 aa, synthetic construct
  source 1..9: note = Seed: VVGACGVGK (KRAS G12C)
FVGLCKVGK

SEQ ID NO: 5239 - protein, 9 aa, synthetic construct
  source 1..9: note = Seed: VVGACGVGK (KRAS G12C)
FVGLCKVGM

SEQ ID NO: 5240 - protein, 9 aa, synthetic construct
  source 1..9: note = Seed: VVGACGVGK (KRAS G12C)
FVGLCKVGN

SEQ ID NO: 5241 - protein, 9 aa, synthetic construct
  source 1..9: note = Seed: VVGACGVGK (KRAS G12C)
FVGLCKVGQ

SEQ ID NO: 5242 - protein, 9 aa, synthetic construct
  source 1..9: note = Seed: VVGACGVGK (KRAS G12C)
FVGLCKVGR

SEQ ID NO: 5243 - protein, 9 aa, synthetic construct
  source 1..9: note = Seed: VVGACGVGK (KRAS G12C)
FVGLCKVGS

SEQ ID NO: 5244 - protein, 9 aa, synthetic construct
  source 1..9: note = Seed: VVGACGVGK (KRAS G12C)
FVGLCKVGT

SEQ ID NO: 5245 - protein, 9 aa, synthetic construct
  source 1..9: note = Seed: VVGACGVGK (KRAS G12C)
FVGLCKVGY

SEQ ID NO: 5246 - protein, 9 aa, synthetic construct
  source 1..9: note = Seed: VVGACGVGK (KRAS G12C)
FVGLCRVGA

SEQ ID NO: 5247 - protein, 9 aa, synthetic construct
  source 1..9: note = Seed: VVGACGVGK (KRAS G12C)
FVGLCRVGG

SEQ ID NO: 5248 - protein, 9 aa, synthetic construct
  source 1..9: note = Seed: VVGACGVGK (KRAS G12C)
FVGLCRVGH

SEQ ID NO: 5249 - protein, 9 aa, synthetic construct
  source 1..9: note = Seed: VVGACGVGK (KRAS G12C)
FVGLCRVGK

SEQ ID NO: 5250 - protein, 9 aa, synthetic construct
  source 1..9: note = Seed: VVGACGVGK (KRAS G12C)
FVGLCRVGM

SEQ ID NO: 5251 - protein, 9 aa, synthetic construct
  source 1..9: note = Seed: VVGACGVGK (KRAS G12C)
FVGLCRVGN

SEQ ID NO: 5252 - protein, 9 aa, synthetic construct
  source 1..9: note = Seed: VVGACGVGK (KRAS G12C)
FVGLCRVGP

SEQ ID NO: 5253 - protein, 9 aa, synthetic construct
  source 1..9: note = Seed: VVGACGVGK (KRAS G12C)
FVGLCRVGQ

SEQ ID NO: 5254 - protein, 9 aa, synthetic construct
  source 1..9: note = Seed: VVGACGVGK (KRAS G12C)
FVGLCRVGR

SEQ ID NO: 5255 - protein, 9 aa, synthetic construct
  source 1..9: note = Seed: VVGACGVGK (KRAS G12C)
FVGLCRVGS

SEQ ID NO: 5256 - protein, 9 aa, synthetic construct
  source 1..9: note = Seed: VVGACGVGK (KRAS G12C)
FVGLCRVGT

SEQ ID NO: 5257 - protein, 9 aa, synthetic construct
  source 1..9: note = Seed: VVGACGVGK (KRAS G12C)
FVGLCRVGV

SEQ ID NO: 5258 - protein, 9 aa, synthetic construct
  source 1..9: note = Seed: VVGACGVGK (KRAS G12C)
FVGLCRVGY

SEQ ID NO: 5259 - protein, 9 aa, synthetic construct
  source 1..9: note = Seed: VVGACGVGK (KRAS G12C)
FVGMCHVGR

SEQ ID NO: 5260 - protein, 9 aa, synthetic construct
  source 1..9: note = Seed: VVGACGVGK (KRAS G12C)
FVGMCKVGA

SEQ ID NO: 5261 - protein, 9 aa, synthetic construct
  source 1..9: note = Seed: VVGACGVGK (KRAS G12C)
FVGMCKVGG

SEQ ID NO: 5262 - protein, 9 aa, synthetic construct
  source 1..9: note = Seed: VVGACGVGK (KRAS G12C)
FVGMCKVGH

SEQ ID NO: 5263 - protein, 9 aa, synthetic construct
  source 1..9: note = Seed: VVGACGVGK (KRAS G12C)
FVGMCKVGK

SEQ ID NO: 5264 - protein, 9 aa, synthetic construct
  source 1..9: note = Seed: VVGACGVGK (KRAS G12C)
FVGMCKVGL

SEQ ID NO: 5265 - protein, 9 aa, synthetic construct
  source 1..9: note = Seed: VVGACGVGK (KRAS G12C)
FVGMCKVGM

SEQ ID NO: 5266 - protein, 9 aa, synthetic construct
  source 1..9: note = Seed: VVGACGVGK (KRAS G12C)
FVGMCKVGN

SEQ ID NO: 5267 - protein, 9 aa, synthetic construct
  source 1..9: note = Seed: VVGACGVGK (KRAS G12C)
FVGMCKVGP

SEQ ID NO: 5268 - protein, 9 aa, synthetic construct
  source 1..9: note = Seed: VVGACGVGK (KRAS G12C)
FVGMCKVGQ

SEQ ID NO: 5269 - protein, 9 aa, synthetic construct
  source 1..9: note = Seed: VVGACGVGK (KRAS G12C)
FVGMCKVGR

SEQ ID NO: 5270 - protein, 9 aa, synthetic construct
  source 1..9: note = Seed: VVGACGVGK (KRAS G12C)
FVGMCKVGS

SEQ ID NO: 5271 - protein, 9 aa, synthetic construct
  source 1..9: note = Seed: VVGACGVGK (KRAS G12C)
FVGMCKVGT

SEQ ID NO: 5272 - protein, 9 aa, synthetic construct
  source 1..9: note = Seed: VVGACGVGK (KRAS G12C)
FVGMCKVGV

SEQ ID NO: 5273 - protein, 9 aa, synthetic construct
  source 1..9: note = Seed: VVGACGVGK (KRAS G12C)
FVGMCKVGY

SEQ ID NO: 5274 - protein, 9 aa, synthetic construct
  source 1..9: note = Seed: VVGACGVGK (KRAS G12C)
FVGMCRVGA

SEQ ID NO: 5275 - protein, 9 aa, synthetic construct
  source 1..9: note = Seed: VVGACGVGK (KRAS G12C)
FVGMCRVGG

SEQ ID NO: 5276 - protein, 9 aa, synthetic construct
  source 1..9: note = Seed: VVGACGVGK (KRAS G12C)
FVGMCRVGH

SEQ ID NO: 5277 - protein, 9 aa, synthetic construct
  source 1..9: note = Seed: VVGACGVGK (KRAS G12C)
FVGMCRVGK

SEQ ID NO: 5278 - protein, 9 aa, synthetic construct
  source 1..9: note = Seed: VVGACGVGK (KRAS G12C)
FVGMCRVGL

SEQ ID NO: 5279 - protein, 9 aa, synthetic construct
  source 1..9: note = Seed: VVGACGVGK (KRAS G12C)
FVGMCRVGM

SEQ ID NO: 5280 - protein, 9 aa, synthetic construct
  source 1..9: note = Seed: VVGACGVGK (KRAS G12C)
FVGMCRVGN

SEQ ID NO: 5281 - protein, 9 aa, synthetic construct
  source 1..9: note = Seed: VVGACGVGK (KRAS G12C)
FVGMCRVGP

SEQ ID NO: 5282 - protein, 9 aa, synthetic construct
  source 1..9: note = Seed: VVGACGVGK (KRAS G12C)
FVGMCRVGQ

SEQ ID NO: 5283 - protein, 9 aa, synthetic construct
  source 1..9: note = Seed: VVGACGVGK (KRAS G12C)
FVGMCRVGR

SEQ ID NO: 5284 - protein, 9 aa, synthetic construct
  source 1..9: note = Seed: VVGACGVGK (KRAS G12C)
FVGMCRVGS

SEQ ID NO: 5285 - protein, 9 aa, synthetic construct
  source 1..9: note = Seed: VVGACGVGK (KRAS G12C)
FVGMCRVGT

SEQ ID NO: 5286 - protein, 9 aa, synthetic construct
  source 1..9: note = Seed: VVGACGVGK (KRAS G12C)
FVGMCRVGV

SEQ ID NO: 5287 - protein, 9 aa, synthetic construct
  source 1..9: note = Seed: VVGACGVGK (KRAS G12C)
FVGMCRVGY

SEQ ID NO: 5288 - protein, 9 aa, synthetic construct
  source 1..9: note = Seed: VVGACGVGK (KRAS G12C)
FVGNCRVGR

SEQ ID NO: 5289 - protein, 9 aa, synthetic construct
  source 1..9: note = Seed: VVGACGVGK (KRAS G12C)
FVGQCKVGA

SEQ ID NO: 5290 - protein, 9 aa, synthetic construct
  source 1..9: note = Seed: VVGACGVGK (KRAS G12C)
FVGQCKVGR

SEQ ID NO: 5291 - protein, 9 aa, synthetic construct
  source 1..9: note = Seed: VVGACGVGK (KRAS G12C)
FVGQCKVGS

SEQ ID NO: 5292 - protein, 9 aa, synthetic construct
  source 1..9: note = Seed: VVGACGVGK (KRAS G12C)
FVGQCRVGA

SEQ ID NO: 5293 - protein, 9 aa, synthetic construct
  source 1..9: note = Seed: VVGACGVGK (KRAS G12C)
FVGQCRVGG

SEQ ID NO: 5294 - protein, 9 aa, synthetic construct
  source 1..9: note = Seed: VVGACGVGK (KRAS G12C)
FVGQCRVGH

SEQ ID NO: 5295 - protein, 9 aa, synthetic construct
  source 1..9: note = Seed: VVGACGVGK (KRAS G12C)
FVGQCRVGK

SEQ ID NO: 5296 - protein, 9 aa, synthetic construct
  source 1..9: note = Seed: VVGACGVGK (KRAS G12C)
FVGQCRVGQ

SEQ ID NO: 5297 - protein, 9 aa, synthetic construct
  source 1..9: note = Seed: VVGACGVGK (KRAS G12C)
FVGQCRVGR

SEQ ID NO: 5298 - protein, 9 aa, synthetic construct
  source 1..9: note = Seed: VVGACGVGK (KRAS G12C)
FVGQCRVGS

SEQ ID NO: 5299 - protein, 9 aa, synthetic construct
  source 1..9: note = Seed: VVGACGVGK (KRAS G12C)
FVGQCRVGY

SEQ ID NO: 5300 - protein, 9 aa, synthetic construct
  source 1..9: note = Seed: VVGACGVGK (KRAS G12C)
FVGRCKVGA

SEQ ID NO: 5301 - protein, 9 aa, synthetic construct
  source 1..9: note = Seed: VVGACGVGK (KRAS G12C)
FVGRCKVGG

SEQ ID NO: 5302 - protein, 9 aa, synthetic construct
  source 1..9: note = Seed: VVGACGVGK (KRAS G12C)
FVGRCKVGH

SEQ ID NO: 5303 - protein, 9 aa, synthetic construct
  source 1..9: note = Seed: VVGACGVGK (KRAS G12C)
FVGRCKVGQ

SEQ ID NO: 5304 - protein, 9 aa, synthetic construct
  source 1..9: note = Seed: VVGACGVGK (KRAS G12C)
FVGRCKVGR

SEQ ID NO: 5305 - protein, 9 aa, synthetic construct
  source 1..9: note = Seed: VVGACGVGK (KRAS G12C)
FVGRCKVGS

SEQ ID NO: 5306 - protein, 9 aa, synthetic construct
  source 1..9: note = Seed: VVGACGVGK (KRAS G12C)
FVGRCKVGY

SEQ ID NO: 5307 - protein, 9 aa, synthetic construct
  source 1..9: note = Seed: VVGACGVGK (KRAS G12C)
FVGRCRVGA

SEQ ID NO: 5308 - protein, 9 aa, synthetic construct
  source 1..9: note = Seed: VVGACGVGK (KRAS G12C)
FVGRCRVGF

SEQ ID NO: 5309 - protein, 9 aa, synthetic construct
  source 1..9: note = Seed: VVGACGVGK (KRAS G12C)
FVGRCRVGG

SEQ ID NO: 5310 - protein, 9 aa, synthetic construct
  source 1..9: note = Seed: VVGACGVGK (KRAS G12C)
FVGRCRVGH

SEQ ID NO: 5311 - protein, 9 aa, synthetic construct
  source 1..9: note = Seed: VVGACGVGK (KRAS G12C)
FVGRCRVGM

SEQ ID NO: 5312 - protein, 9 aa, synthetic construct
  source 1..9: note = Seed: VVGACGVGK (KRAS G12C)
FVGRCRVGQ

SEQ ID NO: 5313 - protein, 9 aa, synthetic construct
  source 1..9: note = Seed: VVGACGVGK (KRAS G12C)
FVGRCRVGR

SEQ ID NO: 5314 - protein, 9 aa, synthetic construct
  source 1..9: note = Seed: VVGACGVGK (KRAS G12C)
FVGRCRVGS

SEQ ID NO: 5315 - protein, 9 aa, synthetic construct
  source 1..9: note = Seed: VVGACGVGK (KRAS G12C)
FVGRCRVGY

SEQ ID NO: 5316 - protein, 9 aa, synthetic construct
  source 1..9: note = Seed: VVGACGVGK (KRAS G12C)
FVGSCKVGR

SEQ ID NO: 5317 - protein, 9 aa, synthetic construct
  source 1..9: note = Seed: VVGACGVGK (KRAS G12C)
FVGSCRVGK

SEQ ID NO: 5318 - protein, 9 aa, synthetic construct
  source 1..9: note = Seed: VVGACGVGK (KRAS G12C)
FVGSCRVGR

SEQ ID NO: 5319 - protein, 9 aa, synthetic construct
  source 1..9: note = Seed: VVGACGVGK (KRAS G12C)
FVGSCRVGY

SEQ ID NO: 5320 - protein, 9 aa, synthetic construct
  source 1..9: note = Seed: VVGACGVGK (KRAS G12C)
FVGTCKVGR

SEQ ID NO: 5321 - protein, 9 aa, synthetic construct
  source 1..9: note = Seed: VVGACGVGK (KRAS G12C)
FVGTCRVGK

SEQ ID NO: 5322 - protein, 9 aa, synthetic construct
  source 1..9: note = Seed: VVGACGVGK (KRAS G12C)
FVGTCRVGR

SEQ ID NO: 5323 - protein, 9 aa, synthetic construct
  source 1..9: note = Seed: VVGACGVGK (KRAS G12C)
FVGTCRVGS

SEQ ID NO: 5324 - protein, 9 aa, synthetic construct
  source 1..9: note = Seed: VVGACGVGK (KRAS G12C)
FVGVCKVGA

SEQ ID NO: 5325 - protein, 9 aa, synthetic construct
  source 1..9: note = Seed: VVGACGVGK (KRAS G12C)
FVGVCKVGG

SEQ ID NO: 5326 - protein, 9 aa, synthetic construct
  source 1..9: note = Seed: VVGACGVGK (KRAS G12C)
FVGVCKVGH

SEQ ID NO: 5327 - protein, 9 aa, synthetic construct
  source 1..9: note = Seed: VVGACGVGK (KRAS G12C)
FVGVCKVGK

SEQ ID NO: 5328 - protein, 9 aa, synthetic construct
  source 1..9: note = Seed: VVGACGVGK (KRAS G12C)
FVGVCKVGQ

SEQ ID NO: 5329 - protein, 9 aa, synthetic construct
  source 1..9: note = Seed: VVGACGVGK (KRAS G12C)
FVGVCKVGR

SEQ ID NO: 5330 - protein, 9 aa, synthetic construct
  source 1..9: note = Seed: VVGACGVGK (KRAS G12C)
FVGVCKVGS

SEQ ID NO: 5331 - protein, 9 aa, synthetic construct
  source 1..9: note = Seed: VVGACGVGK (KRAS G12C)
FVGVCKVGT

SEQ ID NO: 5332 - protein, 9 aa, synthetic construct
  source 1..9: note = Seed: VVGACGVGK (KRAS G12C)
FVGVCRVGA

SEQ ID NO: 5333 - protein, 9 aa, synthetic construct
  source 1..9: note = Seed: VVGACGVGK (KRAS G12C)
FVGVCRVGG

SEQ ID NO: 5334 - protein, 9 aa, synthetic construct
  source 1..9: note = Seed: VVGACGVGK (KRAS G12C)
FVGVCRVGH

SEQ ID NO: 5335 - protein, 9 aa, synthetic construct
  source 1..9: note = Seed: VVGACGVGK (KRAS G12C)
FVGVCRVGK

SEQ ID NO: 5336 - protein, 9 aa, synthetic construct
  source 1..9: note = Seed: VVGACGVGK (KRAS G12C)
FVGVCRVGN

SEQ ID NO: 5337 - protein, 9 aa, synthetic construct
  source 1..9: note = Seed: VVGACGVGK (KRAS G12C)
FVGVCRVGQ

SEQ ID NO: 5338 - protein, 9 aa, synthetic construct
  source 1..9: note = Seed: VVGACGVGK (KRAS G12C)
FVGVCRVGR

SEQ ID NO: 5339 - protein, 9 aa, synthetic construct
  source 1..9: note = Seed: VVGACGVGK (KRAS G12C)
FVGVCRVGS

SEQ ID NO: 5340 - protein, 9 aa, synthetic construct
  source 1..9: note = Seed: VVGACGVGK (KRAS G12C)
FVGVCRVGT

SEQ ID NO: 5341 - protein, 9 aa, synthetic construct
  source 1..9: note = Seed: VVGACGVGK (KRAS G12C)
FVGVCRVGY

SEQ ID NO: 5342 - protein, 9 aa, synthetic construct
  source 1..9: note = Seed: VVGACGVGK (KRAS G12C)
FVGWCKVGH

SEQ ID NO: 5343 - protein, 9 aa, synthetic construct
  source 1..9: note = Seed: VVGACGVGK (KRAS G12C)
FVGWCKVGK

SEQ ID NO: 5344 - protein, 9 aa, synthetic construct
  source 1..9: note = Seed: VVGACGVGK (KRAS G12C)
FVGWCKVGR

SEQ ID NO: 5345 - protein, 9 aa, synthetic construct
  source 1..9: note = Seed: VVGACGVGK (KRAS G12C)
FVGWCKVGY

SEQ ID NO: 5346 - protein, 9 aa, synthetic construct
  source 1..9: note = Seed: VVGACGVGK (KRAS G12C)
FVGWCRVGA

SEQ ID NO: 5347 - protein, 9 aa, synthetic construct
  source 1..9: note = Seed: VVGACGVGK (KRAS G12C)
FVGWCRVGH

SEQ ID NO: 5348 - protein, 9 aa, synthetic construct
  source 1..9: note = Seed: VVGACGVGK (KRAS G12C)
FVGWCRVGK

SEQ ID NO: 5349 - protein, 9 aa, synthetic construct
  source 1..9: note = Seed: VVGACGVGK (KRAS G12C)
FVGWCRVGR

SEQ ID NO: 5350 - protein, 9 aa, synthetic construct
  source 1..9: note = Seed: VVGACGVGK (KRAS G12C)
FVGWCRVGS

SEQ ID NO: 5351 - protein, 9 aa, synthetic construct
  source 1..9: note = Seed: VVGACGVGK (KRAS G12C)
FVGWCRVGY

SEQ ID NO: 5352 - protein, 9 aa, synthetic construct
  source 1..9: note = Seed: VVGACGVGK (KRAS G12C)
FVGYCKVGR

SEQ ID NO: 5353 - protein, 9 aa, synthetic construct
  source 1..9: note = Seed: VVGACGVGK (KRAS G12C)
FVGYCRVGH

SEQ ID NO: 5354 - protein, 9 aa, synthetic construct
  source 1..9: note = Seed: VVGACGVGK (KRAS G12C)
FVGYCRVGK

SEQ ID NO: 5355 - protein, 9 aa, synthetic construct
  source 1..9: note = Seed: VVGACGVGK (KRAS G12C)
FVGYCRVGR

SEQ ID NO: 5356 - protein, 9 aa, synthetic construct
  source 1..9: note = Seed: VVGACGVGK (KRAS G12C)
IVGACAVGR

SEQ ID NO: 5357 - protein, 9 aa, synthetic construct
  source 1..9: note = Seed: VVGACGVGK (KRAS G12C)
IVGACHVGR

SEQ ID NO: 5358 - protein, 9 aa, synthetic construct
  source 1..9: note = Seed: VVGACGVGK (KRAS G12C)
IVGACKVGA

SEQ ID NO: 5359 - protein, 9 aa, synthetic construct
  source 1..9: note = Seed: VVGACGVGK (KRAS G12C)
IVGACKVGF

SEQ ID NO: 5360 - protein, 9 aa, synthetic construct
  source 1..9: note = Seed: VVGACGVGK (KRAS G12C)
IVGACKVGG

SEQ ID NO: 5361 - protein, 9 aa, synthetic construct
  source 1..9: note = Seed: VVGACGVGK (KRAS G12C)
IVGACKVGH

SEQ ID NO: 5362 - protein, 9 aa, synthetic construct
  source 1..9: note = Seed: VVGACGVGK (KRAS G12C)
IVGACKVGI

SEQ ID NO: 5363 - protein, 9 aa, synthetic construct
  source 1..9: note = Seed: VVGACGVGK (KRAS G12C)
IVGACKVGK

SEQ ID NO: 5364 - protein, 9 aa, synthetic construct
  source 1..9: note = Seed: VVGACGVGK (KRAS G12C)
IVGACKVGL

SEQ ID NO: 5365 - protein, 9 aa, synthetic construct
  source 1..9: note = Seed: VVGACGVGK (KRAS G12C)
IVGACKVGM

SEQ ID NO: 5366 - protein, 9 aa, synthetic construct
  source 1..9: note = Seed: VVGACGVGK (KRAS G12C)
IVGACKVGN

SEQ ID NO: 5367 - protein, 9 aa, synthetic construct
  source 1..9: note = Seed: VVGACGVGK (KRAS G12C)
IVGACKVGQ

SEQ ID NO: 5368 - protein, 9 aa, synthetic construct
  source 1..9: note = Seed: VVGACGVGK (KRAS G12C)
IVGACKVGR

SEQ ID NO: 5369 - protein, 9 aa, synthetic construct
  source 1..9: note = Seed: VVGACGVGK (KRAS G12C)
IVGACKVGS

SEQ ID NO: 5370 - protein, 9 aa, synthetic construct
  source 1..9: note = Seed: VVGACGVGK (KRAS G12C)
IVGACKVGT

SEQ ID NO: 5371 - protein, 9 aa, synthetic construct
  source 1..9: note = Seed: VVGACGVGK (KRAS G12C)
IVGACKVGV

SEQ ID NO: 5372 - protein, 9 aa, synthetic construct
  source 1..9: note = Seed: VVGACGVGK (KRAS G12C)
IVGACKVGY

SEQ ID NO: 5373 - protein, 9 aa, synthetic construct
  source 1..9: note = Seed: VVGACGVGK (KRAS G12C)
IVGACPVGR

SEQ ID NO: 5374 - protein, 9 aa, synthetic construct
  source 1..9: note = Seed: VVGACGVGK (KRAS G12C)
IVGACPVGY

SEQ ID NO: 5375 - protein, 9 aa, synthetic construct
  source 1..9: note = Seed: VVGACGVGK (KRAS G12C)
IVGACRVGA

SEQ ID NO: 5376 - protein, 9 aa, synthetic construct
  source 1..9: note = Seed: VVGACGVGK (KRAS G12C)
IVGACRVGF

SEQ ID NO: 5377 - protein, 9 aa, synthetic construct
  source 1..9: note = Seed: VVGACGVGK (KRAS G12C)
IVGACRVGG

SEQ ID NO: 5378 - protein, 9 aa, synthetic construct
  source 1..9: note = Seed: VVGACGVGK (KRAS G12C)
IVGACRVGH

SEQ ID NO: 5379 - protein, 9 aa, synthetic construct
  source 1..9: note = Seed: VVGACGVGK (KRAS G12C)
IVGACRVGI

SEQ ID NO: 5380 - protein, 9 aa, synthetic construct
  source 1..9: note = Seed: VVGACGVGK (KRAS G12C)
IVGACRVGK

SEQ ID NO: 5381 - protein, 9 aa, synthetic construct
  source 1..9: note = Seed: VVGACGVGK (KRAS G12C)
IVGACRVGL

SEQ ID NO: 5382 - protein, 9 aa, synthetic construct
  source 1..9: note = Seed: VVGACGVGK (KRAS G12C)
IVGACRVGM

SEQ ID NO: 5383 - protein, 9 aa, synthetic construct
  source 1..9: note = Seed: VVGACGVGK (KRAS G12C)
IVGACRVGN

SEQ ID NO: 5384 - protein, 9 aa, synthetic construct
  source 1..9: note = Seed: VVGACGVGK (KRAS G12C)
IVGACRVGQ

SEQ ID NO: 5385 - protein, 9 aa, synthetic construct
  source 1..9: note = Seed: VVGACGVGK (KRAS G12C)
IVGACRVGR

SEQ ID NO: 5386 - protein, 9 aa, synthetic construct
  source 1..9: note = Seed: VVGACGVGK (KRAS G12C)
IVGACRVGS

SEQ ID NO: 5387 - protein, 9 aa, synthetic construct
  source 1..9: note = Seed: VVGACGVGK (KRAS G12C)
IVGACRVGT

SEQ ID NO: 5388 - protein, 9 aa, synthetic construct
  source 1..9: note = Seed: VVGACGVGK (KRAS G12C)
IVGACRVGV

SEQ ID NO: 5389 - protein, 9 aa, synthetic construct
  source 1..9: note = Seed: VVGACGVGK (KRAS G12C)
IVGACRVGY

SEQ ID NO: 5390 - protein, 9 aa, synthetic construct
  source 1..9: note = Seed: VVGACGVGK (KRAS G12C)
IVGACSVGR

SEQ ID NO: 5391 - protein, 9 aa, synthetic construct
  source 1..9: note = Seed: VVGACGVGK (KRAS G12C)
IVGCCKVGS

SEQ ID NO: 5392 - protein, 9 aa, synthetic construct
  source 1..9: note = Seed: VVGACGVGK (KRAS G12C)
IVGCCRVGA

SEQ ID NO: 5393 - protein, 9 aa, synthetic construct
  source 1..9: note = Seed: VVGACGVGK (KRAS G12C)
IVGCCRVGG

SEQ ID NO: 5394 - protein, 9 aa, synthetic construct
  source 1..9: note = Seed: VVGACGVGK (KRAS G12C)
IVGCCRVGH

SEQ ID NO: 5395 - protein, 9 aa, synthetic construct
  source 1..9: note = Seed: VVGACGVGK (KRAS G12C)
IVGCCRVGQ

SEQ ID NO: 5396 - protein, 9 aa, synthetic construct
  source 1..9: note = Seed: VVGACGVGK (KRAS G12C)
IVGCCRVGR

SEQ ID NO: 5397 - protein, 9 aa, synthetic construct
  source 1..9: note = Seed: VVGACGVGK (KRAS G12C)
IVGCCRVGS

SEQ ID NO: 5398 - protein, 9 aa, synthetic construct
  source 1..9: note = Seed: VVGACGVGK (KRAS G12C)
IVGECRVGR

SEQ ID NO: 5399 - protein, 9 aa, synthetic construct
  source 1..9: note = Seed: VVGACGVGK (KRAS G12C)
IVGECRVGY

SEQ ID NO: 5400 - protein, 9 aa, synthetic construct
  source 1..9: note = Seed: VVGACGVGK (KRAS G12C)
IVGFCAVGR

SEQ ID NO: 5401 - protein, 9 aa, synthetic construct
  source 1..9: note = Seed: VVGACGVGK (KRAS G12C)
IVGFCHVGR

SEQ ID NO: 5402 - protein, 9 aa, synthetic construct
  source 1..9: note = Seed: VVGACGVGK (KRAS G12C)
IVGFCKVGA

SEQ ID NO: 5403 - protein, 9 aa, synthetic construct
  source 1..9: note = Seed: VVGACGVGK (KRAS G12C)
IVGFCKVGG

SEQ ID NO: 5404 - protein, 9 aa, synthetic construct
  source 1..9: note = Seed: VVGACGVGK (KRAS G12C)
IVGFCKVGH

SEQ ID NO: 5405 - protein, 9 aa, synthetic construct
  source 1..9: note = Seed: VVGACGVGK (KRAS G12C)
IVGFCKVGK

SEQ ID NO: 5406 - protein, 9 aa, synthetic construct
  source 1..9: note = Seed: VVGACGVGK (KRAS G12C)
IVGFCKVGM

SEQ ID NO: 5407 - protein, 9 aa, synthetic construct
  source 1..9: note = Seed: VVGACGVGK (KRAS G12C)
IVGFCKVGN

SEQ ID NO: 5408 - protein, 9 aa, synthetic construct
  source 1..9: note = Seed: VVGACGVGK (KRAS G12C)
IVGFCKVGQ

SEQ ID NO: 5409 - protein, 9 aa, synthetic construct
  source 1..9: note = Seed: VVGACGVGK (KRAS G12C)
IVGFCKVGR

SEQ ID NO: 5410 - protein, 9 aa, synthetic construct
  source 1..9: note = Seed: VVGACGVGK (KRAS G12C)
IVGFCKVGS

SEQ ID NO: 5411 - protein, 9 aa, synthetic construct
  source 1..9: note = Seed: VVGACGVGK (KRAS G12C)
IVGFCKVGT

SEQ ID NO: 5412 - protein, 9 aa, synthetic construct
  source 1..9: note = Seed: VVGACGVGK (KRAS G12C)
IVGFCKVGY

SEQ ID NO: 5413 - protein, 9 aa, synthetic construct
  source 1..9: note = Seed: VVGACGVGK (KRAS G12C)
IVGFCNVGR

SEQ ID NO: 5414 - protein, 9 aa, synthetic construct
  source 1..9: note = Seed: VVGACGVGK (KRAS G12C)
IVGFCPVGR

SEQ ID NO: 5415 - protein, 9 aa, synthetic construct
  source 1..9: note = Seed: VVGACGVGK (KRAS G12C)
IVGFCRVGA

SEQ ID NO: 5416 - protein, 9 aa, synthetic construct
  source 1..9: note = Seed: VVGACGVGK (KRAS G12C)
IVGFCRVGG

SEQ ID NO: 5417 - protein, 9 aa, synthetic construct
  source 1..9: note = Seed: VVGACGVGK (KRAS G12C)
IVGFCRVGH

SEQ ID NO: 5418 - protein, 9 aa, synthetic construct
  source 1..9: note = Seed: VVGACGVGK (KRAS G12C)
IVGFCRVGK

SEQ ID NO: 5419 - protein, 9 aa, synthetic construct
  source 1..9: note = Seed: VVGACGVGK (KRAS G12C)
IVGFCRVGM

SEQ ID NO: 5420 - protein, 9 aa, synthetic construct
  source 1..9: note = Seed: VVGACGVGK (KRAS G12C)
IVGFCRVGN

SEQ ID NO: 5421 - protein, 9 aa, synthetic construct
  source 1..9: note = Seed: VVGACGVGK (KRAS G12C)
IVGFCRVGQ

SEQ ID NO: 5422 - protein, 9 aa, synthetic construct
  source 1..9: note = Seed: VVGACGVGK (KRAS G12C)
IVGFCRVGR

SEQ ID NO: 5423 - protein, 9 aa, synthetic construct
  source 1..9: note = Seed: VVGACGVGK (KRAS G12C)
IVGFCRVGS

SEQ ID NO: 5424 - protein, 9 aa, synthetic construct
  source 1..9: note = Seed: VVGACGVGK (KRAS G12C)
IVGFCRVGT

SEQ ID NO: 5425 - protein, 9 aa, synthetic construct
  source 1..9: note = Seed: VVGACGVGK (KRAS G12C)
IVGFCRVGY

SEQ ID NO: 5426 - protein, 9 aa, synthetic construct
  source 1..9: note = Seed: VVGACGVGK (KRAS G12C)
IVGFCSVGR

SEQ ID NO: 5427 - protein, 9 aa, synthetic construct
  source 1..9: note = Seed: VVGACGVGK (KRAS G12C)
IVGFCTVGR

SEQ ID NO: 5428 - protein, 9 aa, synthetic construct
  source 1..9: note = Seed: VVGACGVGK (KRAS G12C)
IVGGCKVGR

SEQ ID NO: 5429 - protein, 9 aa, synthetic construct
  source 1..9: note = Seed: VVGACGVGK (KRAS G12C)
IVGGCRVGK

SEQ ID NO: 5430 - protein, 9 aa, synthetic construct
  source 1..9: note = Seed: VVGACGVGK (KRAS G12C)
IVGGCRVGR

SEQ ID NO: 5431 - protein, 9 aa, synthetic construct
  source 1..9: note = Seed: VVGACGVGK (KRAS G12C)
IVGGCRVGY

SEQ ID NO: 5432 - protein, 9 aa, synthetic construct
  source 1..9: note = Seed: VVGACGVGK (KRAS G12C)
IVGHCAVGF

SEQ ID NO: 5433 - protein, 9 aa, synthetic construct
  source 1..9: note = Seed: VVGACGVGK (KRAS G12C)
IVGHCAVGI

SEQ ID NO: 5434 - protein, 9 aa, synthetic construct
  source 1..9: note = Seed: VVGACGVGK (KRAS G12C)
IVGHCAVGK

SEQ ID NO: 5435 - protein, 9 aa, synthetic construct
  source 1..9: note = Seed: VVGACGVGK (KRAS G12C)
IVGHCAVGM

SEQ ID NO: 5436 - protein, 9 aa, synthetic construct
  source 1..9: note = Seed: VVGACGVGK (KRAS G12C)
IVGHCAVGR

SEQ ID NO: 5437 - protein, 9 aa, synthetic construct
  source 1..9: note = Seed: VVGACGVGK (KRAS G12C)
IVGHCAVGY

SEQ ID NO: 5438 - protein, 9 aa, synthetic construct
  source 1..9: note = Seed: VVGACGVGK (KRAS G12C)
IVGHCGVGR

SEQ ID NO: 5439 - protein, 9 aa, synthetic construct
  source 1..9: note = Seed: VVGACGVGK (KRAS G12C)
IVGHCGVGY

SEQ ID NO: 5440 - protein, 9 aa, synthetic construct
  source 1..9: note = Seed: VVGACGVGK (KRAS G12C)
IVGHCHVGF

SEQ ID NO: 5441 - protein, 9 aa, synthetic construct
  source 1..9: note = Seed: VVGACGVGK (KRAS G12C)
IVGHCHVGK

SEQ ID NO: 5442 - protein, 9 aa, synthetic construct
  source 1..9: note = Seed: VVGACGVGK (KRAS G12C)
IVGHCHVGM

SEQ ID NO: 5443 - protein, 9 aa, synthetic construct
  source 1..9: note = Seed: VVGACGVGK (KRAS G12C)
IVGHCHVGR

SEQ ID NO: 5444 - protein, 9 aa, synthetic construct
  source 1..9: note = Seed: VVGACGVGK (KRAS G12C)
IVGHCHVGY

SEQ ID NO: 5445 - protein, 9 aa, synthetic construct
  source 1..9: note = Seed: VVGACGVGK (KRAS G12C)
IVGHCIVGK

SEQ ID NO: 5446 - protein, 9 aa, synthetic construct
  source 1..9: note = Seed: VVGACGVGK (KRAS G12C)
IVGHCIVGR

SEQ ID NO: 5447 - protein, 9 aa, synthetic construct
  source 1..9: note = Seed: VVGACGVGK (KRAS G12C)
IVGHCIVGY

SEQ ID NO: 5448 - protein, 9 aa, synthetic construct
  source 1..9: note = Seed: VVGACGVGK (KRAS G12C)
IVGHCKVGA

SEQ ID NO: 5449 - protein, 9 aa, synthetic construct
  source 1..9: note = Seed: VVGACGVGK (KRAS G12C)
IVGHCKVGF

SEQ ID NO: 5450 - protein, 9 aa, synthetic construct
  source 1..9: note = Seed: VVGACGVGK (KRAS G12C)
IVGHCKVGH

SEQ ID NO: 5451 - protein, 9 aa, synthetic construct
  source 1..9: note = Seed: VVGACGVGK (KRAS G12C)
IVGHCKVGI

SEQ ID NO: 5452 - protein, 9 aa, synthetic construct
  source 1..9: note = Seed: VVGACGVGK (KRAS G12C)
IVGHCKVGK

SEQ ID NO: 5453 - protein, 9 aa, synthetic construct
  source 1..9: note = Seed: VVGACGVGK (KRAS G12C)
IVGHCKVGL

SEQ ID NO: 5454 - protein, 9 aa, synthetic construct
  source 1..9: note = Seed: VVGACGVGK (KRAS G12C)
IVGHCKVGM

SEQ ID NO: 5455 - protein, 9 aa, synthetic construct
  source 1..9: note = Seed: VVGACGVGK (KRAS G12C)
IVGHCKVGQ

SEQ ID NO: 5456 - protein, 9 aa, synthetic construct
  source 1..9: note = Seed: VVGACGVGK (KRAS G12C)
IVGHCKVGR

SEQ ID NO: 5457 - protein, 9 aa, synthetic construct
  source 1..9: note = Seed: VVGACGVGK (KRAS G12C)
IVGHCKVGS

SEQ ID NO: 5458 - protein, 9 aa, synthetic construct
  source 1..9: note = Seed: VVGACGVGK (KRAS G12C)
IVGHCKVGV

SEQ ID NO: 5459 - protein, 9 aa, synthetic construct
  source 1..9: note = Seed: VVGACGVGK (KRAS G12C)
IVGHCKVGW

SEQ ID NO: 5460 - protein, 9 aa, synthetic construct
  source 1..9: note = Seed: VVGACGVGK (KRAS G12C)
IVGHCKVGY

SEQ ID NO: 5461 - protein, 9 aa, synthetic construct
  source 1..9: note = Seed: VVGACGVGK (KRAS G12C)
IVGHCLVGR

SEQ ID NO: 5462 - protein, 9 aa, synthetic construct
  source 1..9: note = Seed: VVGACGVGK (KRAS G12C)
IVGHCMVGR

SEQ ID NO: 5463 - protein, 9 aa, synthetic construct
  source 1..9: note = Seed: VVGACGVGK (KRAS G12C)
IVGHCNVGF

SEQ ID NO: 5464 - protein, 9 aa, synthetic construct
  source 1..9: note = Seed: VVGACGVGK (KRAS G12C)
IVGHCNVGK

SEQ ID NO: 5465 - protein, 9 aa, synthetic construct
  source 1..9: note = Seed: VVGACGVGK (KRAS G12C)
IVGHCNVGR

SEQ ID NO: 5466 - protein, 9 aa, synthetic construct
  source 1..9: note = Seed: VVGACGVGK (KRAS G12C)
IVGHCNVGY

SEQ ID NO: 5467 - protein, 9 aa, synthetic construct
  source 1..9: note = Seed: VVGACGVGK (KRAS G12C)
IVGHCPVGF

SEQ ID NO: 5468 - protein, 9 aa, synthetic construct
  source 1..9: note = Seed: VVGACGVGK (KRAS G12C)
IVGHCPVGI

SEQ ID NO: 5469 - protein, 9 aa, synthetic construct
  source 1..9: note = Seed: VVGACGVGK (KRAS G12C)
IVGHCPVGK

SEQ ID NO: 5470 - protein, 9 aa, synthetic construct
  source 1..9: note = Seed: VVGACGVGK (KRAS G12C)
IVGHCPVGM

SEQ ID NO: 5471 - protein, 9 aa, synthetic construct
  source 1..9: note = Seed: VVGACGVGK (KRAS G12C)
IVGHCPVGR

SEQ ID NO: 5472 - protein, 9 aa, synthetic construct
  source 1..9: note = Seed: VVGACGVGK (KRAS G12C)
IVGHCPVGV

SEQ ID NO: 5473 - protein, 9 aa, synthetic construct
  source 1..9: note = Seed: VVGACGVGK (KRAS G12C)
IVGHCPVGY

SEQ ID NO: 5474 - protein, 9 aa, synthetic construct
  source 1..9: note = Seed: VVGACGVGK (KRAS G12C)
IVGHCQVGR

SEQ ID NO: 5475 - protein, 9 aa, synthetic construct
  source 1..9: note = Seed: VVGACGVGK (KRAS G12C)
IVGHCRVGA

SEQ ID NO: 5476 - protein, 9 aa, synthetic construct
  source 1..9: note = Seed: VVGACGVGK (KRAS G12C)
IVGHCRVGF

SEQ ID NO: 5477 - protein, 9 aa, synthetic construct
  source 1..9: note = Seed: VVGACGVGK (KRAS G12C)
IVGHCRVGG

SEQ ID NO: 5478 - protein, 9 aa, synthetic construct
  source 1..9: note = Seed: VVGACGVGK (KRAS G12C)
IVGHCRVGH

SEQ ID NO: 5479 - protein, 9 aa, synthetic construct
  source 1..9: note = Seed: VVGACGVGK (KRAS G12C)
IVGHCRVGI

SEQ ID NO: 5480 - protein, 9 aa, synthetic construct
  source 1..9: note = Seed: VVGACGVGK (KRAS G12C)
IVGHCRVGK

SEQ ID NO: 5481 - protein, 9 aa, synthetic construct
  source 1..9: note = Seed: VVGACGVGK (KRAS G12C)
IVGHCRVGL

SEQ ID NO: 5482 - protein, 9 aa, synthetic construct
  source 1..9: note = Seed: VVGACGVGK (KRAS G12C)
IVGHCRVGM

SEQ ID NO: 5483 - protein, 9 aa, synthetic construct
  source 1..9: note = Seed: VVGACGVGK (KRAS G12C)
IVGHCRVGN

SEQ ID NO: 5484 - protein, 9 aa, synthetic construct
  source 1..9: note = Seed: VVGACGVGK (KRAS G12C)
IVGHCRVGP

SEQ ID NO: 5485 - protein, 9 aa, synthetic construct
  source 1..9: note = Seed: VVGACGVGK (KRAS G12C)
IVGHCRVGQ

SEQ ID NO: 5486 - protein, 9 aa, synthetic construct
  source 1..9: note = Seed: VVGACGVGK (KRAS G12C)
IVGHCRVGR

SEQ ID NO: 5487 - protein, 9 aa, synthetic construct
  source 1..9: note = Seed: VVGACGVGK (KRAS G12C)
IVGHCRVGS

SEQ ID NO: 5488 - protein, 9 aa, synthetic construct
  source 1..9: note = Seed: VVGACGVGK (KRAS G12C)
IVGHCRVGT

SEQ ID NO: 5489 - protein, 9 aa, synthetic construct
  source 1..9: note = Seed: VVGACGVGK (KRAS G12C)
IVGHCRVGV

SEQ ID NO: 5490 - protein, 9 aa, synthetic construct
  source 1..9: note = Seed: VVGACGVGK (KRAS G12C)
IVGHCRVGW

SEQ ID NO: 5491 - protein, 9 aa, synthetic construct
  source 1..9: note = Seed: VVGACGVGK (KRAS G12C)
IVGHCRVGY

SEQ ID NO: 5492 - protein, 9 aa, synthetic construct
  source 1..9: note = Seed: VVGACGVGK (KRAS G12C)
IVGHCSVGK

SEQ ID NO: 5493 - protein, 9 aa, synthetic construct
  source 1..9: note = Seed: VVGACGVGK (KRAS G12C)
IVGHCSVGR

SEQ ID NO: 5494 - protein, 9 aa, synthetic construct
  source 1..9: note = Seed: VVGACGVGK (KRAS G12C)
IVGHCSVGY

SEQ ID NO: 5495 - protein, 9 aa, synthetic construct
  source 1..9: note = Seed: VVGACGVGK (KRAS G12C)
IVGHCTVGK

SEQ ID NO: 5496 - protein, 9 aa, synthetic construct
  source 1..9: note = Seed: VVGACGVGK (KRAS G12C)
IVGHCTVGR

SEQ ID NO: 5497 - protein, 9 aa, synthetic construct
  source 1..9: note = Seed: VVGACGVGK (KRAS G12C)
IVGHCTVGY

SEQ ID NO: 5498 - protein, 9 aa, synthetic construct
  source 1..9: note = Seed: VVGACGVGK (KRAS G12C)
IVGHCVVGK

SEQ ID NO: 5499 - protein, 9 aa, synthetic construct
  source 1..9: note = Seed: VVGACGVGK (KRAS G12C)
IVGHCVVGR

SEQ ID NO: 5500 - protein, 9 aa, synthetic construct
  source 1..9: note = Seed: VVGACGVGK (KRAS G12C)
IVGHCVVGY

SEQ ID NO: 5501 - protein, 9 aa, synthetic construct
  source 1..9: note = Seed: VVGACGVGK (KRAS G12C)
IVGICAVGR

SEQ ID NO: 5502 - protein, 9 aa, synthetic construct
  source 1..9: note = Seed: VVGACGVGK (KRAS G12C)
IVGICGVGR

SEQ ID NO: 5503 - protein, 9 aa, synthetic construct
  source 1..9: note = Seed: VVGACGVGK (KRAS G12C)
IVGICHVGK

SEQ ID NO: 5504 - protein, 9 aa, synthetic construct
  source 1..9: note = Seed: VVGACGVGK (KRAS G12C)
IVGICHVGR

SEQ ID NO: 5505 - protein, 9 aa, synthetic construct
  source 1..9: note = Seed: VVGACGVGK (KRAS G12C)
IVGICKVGA

SEQ ID NO: 5506 - protein, 9 aa, synthetic construct
  source 1..9: note = Seed: VVGACGVGK (KRAS G12C)
IVGICKVGG

SEQ ID NO: 5507 - protein, 9 aa, synthetic construct
  source 1..9: note = Seed: VVGACGVGK (KRAS G12C)
IVGICKVGH

SEQ ID NO: 5508 - protein, 9 aa, synthetic construct
  source 1..9: note = Seed: VVGACGVGK (KRAS G12C)
IVGICKVGI

SEQ ID NO: 5509 - protein, 9 aa, synthetic construct
  source 1..9: note = Seed: VVGACGVGK (KRAS G12C)
IVGICKVGK

SEQ ID NO: 5510 - protein, 9 aa, synthetic construct
  source 1..9: note = Seed: VVGACGVGK (KRAS G12C)
IVGICKVGL

SEQ ID NO: 5511 - protein, 9 aa, synthetic construct
  source 1..9: note = Seed: VVGACGVGK (KRAS G12C)
IVGICKVGM

SEQ ID NO: 5512 - protein, 9 aa, synthetic construct
  source 1..9: note = Seed: VVGACGVGK (KRAS G12C)
IVGICKVGN

SEQ ID NO: 5513 - protein, 9 aa, synthetic construct
  source 1..9: note = Seed: VVGACGVGK (KRAS G12C)
IVGICKVGP

SEQ ID NO: 5514 - protein, 9 aa, synthetic construct
  source 1..9: note = Seed: VVGACGVGK (KRAS G12C)
IVGICKVGQ

SEQ ID NO: 5515 - protein, 9 aa, synthetic construct
  source 1..9: note = Seed: VVGACGVGK (KRAS G12C)
IVGICKVGR

SEQ ID NO: 5516 - protein, 9 aa, synthetic construct
  source 1..9: note = Seed: VVGACGVGK (KRAS G12C)
IVGICKVGS

SEQ ID NO: 5517 - protein, 9 aa, synthetic construct
  source 1..9: note = Seed: VVGACGVGK (KRAS G12C)
IVGICKVGT

SEQ ID NO: 5518 - protein, 9 aa, synthetic construct
  source 1..9: note = Seed: VVGACGVGK (KRAS G12C)
IVGICKVGV

SEQ ID NO: 5519 - protein, 9 aa, synthetic construct
  source 1..9: note = Seed: VVGACGVGK (KRAS G12C)
IVGICKVGY

SEQ ID NO: 5520 - protein, 9 aa, synthetic construct
  source 1..9: note = Seed: VVGACGVGK (KRAS G12C)
IVGICNVGR

SEQ ID NO: 5521 - protein, 9 aa, synthetic construct
  source 1..9: note = Seed: VVGACGVGK (KRAS G12C)
IVGICPVGR

SEQ ID NO: 5522 - protein, 9 aa, synthetic construct
  source 1..9: note = Seed: VVGACGVGK (KRAS G12C)
IVGICRVGA

SEQ ID NO: 5523 - protein, 9 aa, synthetic construct
  source 1..9: note = Seed: VVGACGVGK (KRAS G12C)
IVGICRVGE

SEQ ID NO: 5524 - protein, 9 aa, synthetic construct
  source 1..9: note = Seed: VVGACGVGK (KRAS G12C)
IVGICRVGG

SEQ ID NO: 5525 - protein, 9 aa, synthetic construct
  source 1..9: note = Seed: VVGACGVGK (KRAS G12C)
IVGICRVGH

SEQ ID NO: 5526 - protein, 9 aa, synthetic construct
  source 1..9: note = Seed: VVGACGVGK (KRAS G12C)
IVGICRVGI

SEQ ID NO: 5527 - protein, 9 aa, synthetic construct
  source 1..9: note = Seed: VVGACGVGK (KRAS G12C)
IVGICRVGK

SEQ ID NO: 5528 - protein, 9 aa, synthetic construct
  source 1..9: note = Seed: VVGACGVGK (KRAS G12C)
IVGICRVGL

SEQ ID NO: 5529 - protein, 9 aa, synthetic construct
  source 1..9: note = Seed: VVGACGVGK (KRAS G12C)
IVGICRVGM

SEQ ID NO: 5530 - protein, 9 aa, synthetic construct
  source 1..9: note = Seed: VVGACGVGK (KRAS G12C)
IVGICRVGN

SEQ ID NO: 5531 - protein, 9 aa, synthetic construct
  source 1..9: note = Seed: VVGACGVGK (KRAS G12C)
IVGICRVGP

SEQ ID NO: 5532 - protein, 9 aa, synthetic construct
  source 1..9: note = Seed: VVGACGVGK (KRAS G12C)
IVGICRVGQ

SEQ ID NO: 5533 - protein, 9 aa, synthetic construct
  source 1..9: note = Seed: VVGACGVGK (KRAS G12C)
IVGICRVGR

SEQ ID NO: 5534 - protein, 9 aa, synthetic construct
  source 1..9: note = Seed: VVGACGVGK (KRAS G12C)
IVGICRVGS

SEQ ID NO: 5535 - protein, 9 aa, synthetic construct
  source 1..9: note = Seed: VVGACGVGK (KRAS G12C)
IVGICRVGT

SEQ ID NO: 5536 - protein, 9 aa, synthetic construct
  source 1..9: note = Seed: VVGACGVGK (KRAS G12C)
IVGICRVGV

SEQ ID NO: 5537 - protein, 9 aa, synthetic construct
  source 1..9: note = Seed: VVGACGVGK (KRAS G12C)
IVGICRVGY

SEQ ID NO: 5538 - protein, 9 aa, synthetic construct
  source 1..9: note = Seed: VVGACGVGK (KRAS G12C)
IVGICSVGR

SEQ ID NO: 5539 - protein, 9 aa, synthetic construct
  source 1..9: note = Seed: VVGACGVGK (KRAS G12C)
IVGICTVGR

SEQ ID NO: 5540 - protein, 9 aa, synthetic construct
  source 1..9: note = Seed: VVGACGVGK (KRAS G12C)
IVGKCAVGK

SEQ ID NO: 5541 - protein, 9 aa, synthetic construct
  source 1..9: note = Seed: VVGACGVGK (KRAS G12C)
IVGKCAVGR

SEQ ID NO: 5542 - protein, 9 aa, synthetic construct
  source 1..9: note = Seed: VVGACGVGK (KRAS G12C)
IVGKCAVGY

SEQ ID NO: 5543 - protein, 9 aa, synthetic construct
  source 1..9: note = Seed: VVGACGVGK (KRAS G12C)
IVGKCGVGR

SEQ ID NO: 5544 - protein, 9 aa, synthetic construct
  source 1..9: note = Seed: VVGACGVGK (KRAS G12C)
IVGKCHVGF

SEQ ID NO: 5545 - protein, 9 aa, synthetic construct
  source 1..9: note = Seed: VVGACGVGK (KRAS G12C)
IVGKCHVGK

SEQ ID NO: 5546 - protein, 9 aa, synthetic construct
  source 1..9: note = Seed: VVGACGVGK (KRAS G12C)
IVGKCHVGR

SEQ ID NO: 5547 - protein, 9 aa, synthetic construct
  source 1..9: note = Seed: VVGACGVGK (KRAS G12C)
IVGKCHVGY

SEQ ID NO: 5548 - protein, 9 aa, synthetic construct
  source 1..9: note = Seed: VVGACGVGK (KRAS G12C)
IVGKCIVGR

SEQ ID NO: 5549 - protein, 9 aa, synthetic construct
  source 1..9: note = Seed: VVGACGVGK (KRAS G12C)
IVGKCKVGA

SEQ ID NO: 5550 - protein, 9 aa, synthetic construct
  source 1..9: note = Seed: VVGACGVGK (KRAS G12C)
IVGKCKVGE

SEQ ID NO: 5551 - protein, 9 aa, synthetic construct
  source 1..9: note = Seed: VVGACGVGK (KRAS G12C)
IVGKCKVGF

SEQ ID NO: 5552 - protein, 9 aa, synthetic construct
  source 1..9: note = Seed: VVGACGVGK (KRAS G12C)
IVGKCKVGG

SEQ ID NO: 5553 - protein, 9 aa, synthetic construct
  source 1..9: note = Seed: VVGACGVGK (KRAS G12C)
IVGKCKVGH

SEQ ID NO: 5554 - protein, 9 aa, synthetic construct
  source 1..9: note = Seed: VVGACGVGK (KRAS G12C)
IVGKCKVGI

SEQ ID NO: 5555 - protein, 9 aa, synthetic construct
  source 1..9: note = Seed: VVGACGVGK (KRAS G12C)
IVGKCKVGK

SEQ ID NO: 5556 - protein, 9 aa, synthetic construct
  source 1..9: note = Seed: VVGACGVGK (KRAS G12C)
IVGKCKVGL

SEQ ID NO: 5557 - protein, 9 aa, synthetic construct
  source 1..9: note = Seed: VVGACGVGK (KRAS G12C)
IVGKCKVGM

SEQ ID NO: 5558 - protein, 9 aa, synthetic construct
  source 1..9: note = Seed: VVGACGVGK (KRAS G12C)
IVGKCKVGN

SEQ ID NO: 5559 - protein, 9 aa, synthetic construct
  source 1..9: note = Seed: VVGACGVGK (KRAS G12C)
IVGKCKVGQ

SEQ ID NO: 5560 - protein, 9 aa, synthetic construct
  source 1..9: note = Seed: VVGACGVGK (KRAS G12C)
IVGKCKVGR

SEQ ID NO: 5561 - protein, 9 aa, synthetic construct
  source 1..9: note = Seed: VVGACGVGK (KRAS G12C)
IVGKCKVGS

SEQ ID NO: 5562 - protein, 9 aa, synthetic construct
  source 1..9: note = Seed: VVGACGVGK (KRAS G12C)
IVGKCKVGT

SEQ ID NO: 5563 - protein, 9 aa, synthetic construct
  source 1..9: note = Seed: VVGACGVGK (KRAS G12C)
IVGKCKVGV

SEQ ID NO: 5564 - protein, 9 aa, synthetic construct
  source 1..9: note = Seed: VVGACGVGK (KRAS G12C)
IVGKCKVGW

SEQ ID NO: 5565 - protein, 9 aa, synthetic construct
  source 1..9: note = Seed: VVGACGVGK (KRAS G12C)
IVGKCKVGY

SEQ ID NO: 5566 - protein, 9 aa, synthetic construct
  source 1..9: note = Seed: VVGACGVGK (KRAS G12C)
IVGKCMVGR

SEQ ID NO: 5567 - protein, 9 aa, synthetic construct
  source 1..9: note = Seed: VVGACGVGK (KRAS G12C)
IVGKCNVGR

SEQ ID NO: 5568 - protein, 9 aa, synthetic construct
  source 1..9: note = Seed: VVGACGVGK (KRAS G12C)
IVGKCNVGY

SEQ ID NO: 5569 - protein, 9 aa, synthetic construct
  source 1..9: note = Seed: VVGACGVGK (KRAS G12C)
IVGKCPVGR

SEQ ID NO: 5570 - protein, 9 aa, synthetic construct
  source 1..9: note = Seed: VVGACGVGK (KRAS G12C)
IVGKCPVGY

SEQ ID NO: 5571 - protein, 9 aa, synthetic construct
  source 1..9: note = Seed: VVGACGVGK (KRAS G12C)
IVGKCQVGR

SEQ ID NO: 5572 - protein, 9 aa, synthetic construct
  source 1..9: note = Seed: VVGACGVGK (KRAS G12C)
IVGKCRVGA

SEQ ID NO: 5573 - protein, 9 aa, synthetic construct
  source 1..9: note = Seed: VVGACGVGK (KRAS G12C)
IVGKCRVGC

SEQ ID NO: 5574 - protein, 9 aa, synthetic construct
  source 1..9: note = Seed: VVGACGVGK (KRAS G12C)
IVGKCRVGD

SEQ ID NO: 5575 - protein, 9 aa, synthetic construct
  source 1..9: note = Seed: VVGACGVGK (KRAS G12C)
IVGKCRVGE

SEQ ID NO: 5576 - protein, 9 aa, synthetic construct
  source 1..9: note = Seed: VVGACGVGK (KRAS G12C)
IVGKCRVGF

SEQ ID NO: 5577 - protein, 9 aa, synthetic construct
  source 1..9: note = Seed: VVGACGVGK (KRAS G12C)
IVGKCRVGG

SEQ ID NO: 5578 - protein, 9 aa, synthetic construct
  source 1..9: note = Seed: VVGACGVGK (KRAS G12C)
IVGKCRVGH

SEQ ID NO: 5579 - protein, 9 aa, synthetic construct
  source 1..9: note = Seed: VVGACGVGK (KRAS G12C)
IVGKCRVGI

SEQ ID NO: 5580 - protein, 9 aa, synthetic construct
  source 1..9: note = Seed: VVGACGVGK (KRAS G12C)
IVGKCRVGK

SEQ ID NO: 5581 - protein, 9 aa, synthetic construct
  source 1..9: note = Seed: VVGACGVGK (KRAS G12C)
IVGKCRVGL

SEQ ID NO: 5582 - protein, 9 aa, synthetic construct
  source 1..9: note = Seed: VVGACGVGK (KRAS G12C)
IVGKCRVGM

SEQ ID NO: 5583 - protein, 9 aa, synthetic construct
  source 1..9: note = Seed: VVGACGVGK (KRAS G12C)
IVGKCRVGN

SEQ ID NO: 5584 - protein, 9 aa, synthetic construct
  source 1..9: note = Seed: VVGACGVGK (KRAS G12C)
IVGKCRVGP

SEQ ID NO: 5585 - protein, 9 aa, synthetic construct
  source 1..9: note = Seed: VVGACGVGK (KRAS G12C)
IVGKCRVGQ

SEQ ID NO: 5586 - protein, 9 aa, synthetic construct
  source 1..9: note = Seed: VVGACGVGK (KRAS G12C)
IVGKCRVGR

SEQ ID NO: 5587 - protein, 9 aa, synthetic construct
  source 1..9: note = Seed: VVGACGVGK (KRAS G12C)
IVGKCRVGS

SEQ ID NO: 5588 - protein, 9 aa, synthetic construct
  source 1..9: note = Seed: VVGACGVGK (KRAS G12C)
IVGKCRVGT

SEQ ID NO: 5589 - protein, 9 aa, synthetic construct
  source 1..9: note = Seed: VVGACGVGK (KRAS G12C)
IVGKCRVGV

SEQ ID NO: 5590 - protein, 9 aa, synthetic construct
  source 1..9: note = Seed: VVGACGVGK (KRAS G12C)
IVGKCRVGW

SEQ ID NO: 5591 - protein, 9 aa, synthetic construct
  source 1..9: note = Seed: VVGACGVGK (KRAS G12C)
IVGKCRVGY

SEQ ID NO: 5592 - protein, 9 aa, synthetic construct
  source 1..9: note = Seed: VVGACGVGK (KRAS G12C)
IVGKCSVGR

SEQ ID NO: 5593 - protein, 9 aa, synthetic construct
  source 1..9: note = Seed: VVGACGVGK (KRAS G12C)
IVGKCSVGY

SEQ ID NO: 5594 - protein, 9 aa, synthetic construct
  source 1..9: note = Seed: VVGACGVGK (KRAS G12C)
IVGKCTVGR

SEQ ID NO: 5595 - protein, 9 aa, synthetic construct
  source 1..9: note = Seed: VVGACGVGK (KRAS G12C)
IVGKCTVGY

SEQ ID NO: 5596 - protein, 9 aa, synthetic construct
  source 1..9: note = Seed: VVGACGVGK (KRAS G12C)
IVGKCVVGR

SEQ ID NO: 5597 - protein, 9 aa, synthetic construct
  source 1..9: note = Seed: VVGACGVGK (KRAS G12C)
IVGLCAVGR

SEQ ID NO: 5598 - protein, 9 aa, synthetic construct
  source 1..9: note = Seed: VVGACGVGK (KRAS G12C)
IVGLCHVGH

SEQ ID NO: 5599 - protein, 9 aa, synthetic construct
  source 1..9: note = Seed: VVGACGVGK (KRAS G12C)
IVGLCHVGK

SEQ ID NO: 5600 - protein, 9 aa, synthetic construct
  source 1..9: note = Seed: VVGACGVGK (KRAS G12C)
IVGLCHVGR

SEQ ID NO: 5601 - protein, 9 aa, synthetic construct
  source 1..9: note = Seed: VVGACGVGK (KRAS G12C)
IVGLCKVGA

SEQ ID NO: 5602 - protein, 9 aa, synthetic construct
  source 1..9: note = Seed: VVGACGVGK (KRAS G12C)
IVGLCKVGG

SEQ ID NO: 5603 - protein, 9 aa, synthetic construct
  source 1..9: note = Seed: VVGACGVGK (KRAS G12C)
IVGLCKVGH

SEQ ID NO: 5604 - protein, 9 aa, synthetic construct
  source 1..9: note = Seed: VVGACGVGK (KRAS G12C)
IVGLCKVGI

SEQ ID NO: 5605 - protein, 9 aa, synthetic construct
  source 1..9: note = Seed: VVGACGVGK (KRAS G12C)
IVGLCKVGK

SEQ ID NO: 5606 - protein, 9 aa, synthetic construct
  source 1..9: note = Seed: VVGACGVGK (KRAS G12C)
IVGLCKVGL

SEQ ID NO: 5607 - protein, 9 aa, synthetic construct
  source 1..9: note = Seed: VVGACGVGK (KRAS G12C)
IVGLCKVGM

SEQ ID NO: 5608 - protein, 9 aa, synthetic construct
  source 1..9: note = Seed: VVGACGVGK (KRAS G12C)
IVGLCKVGN

SEQ ID NO: 5609 - protein, 9 aa, synthetic construct
  source 1..9: note = Seed: VVGACGVGK (KRAS G12C)
IVGLCKVGP

SEQ ID NO: 5610 - protein, 9 aa, synthetic construct
  source 1..9: note = Seed: VVGACGVGK (KRAS G12C)
IVGLCKVGQ

SEQ ID NO: 5611 - protein, 9 aa, synthetic construct
  source 1..9: note = Seed: VVGACGVGK (KRAS G12C)
IVGLCKVGR

SEQ ID NO: 5612 - protein, 9 aa, synthetic construct
  source 1..9: note = Seed: VVGACGVGK (KRAS G12C)
IVGLCKVGS

SEQ ID NO: 5613 - protein, 9 aa, synthetic construct
  source 1..9: note = Seed: VVGACGVGK (KRAS G12C)
IVGLCKVGT

SEQ ID NO: 5614 - protein, 9 aa, synthetic construct
  source 1..9: note = Seed: VVGACGVGK (KRAS G12C)
IVGLCKVGV

SEQ ID NO: 5615 - protein, 9 aa, synthetic construct
  source 1..9: note = Seed: VVGACGVGK (KRAS G12C)
IVGLCKVGY

SEQ ID NO: 5616 - protein, 9 aa, synthetic construct
  source 1..9: note = Seed: VVGACGVGK (KRAS G12C)
IVGLCPVGR

SEQ ID NO: 5617 - protein, 9 aa, synthetic construct
  source 1..9: note = Seed: VVGACGVGK (KRAS G12C)
IVGLCRVGA

SEQ ID NO: 5618 - protein, 9 aa, synthetic construct
  source 1..9: note = Seed: VVGACGVGK (KRAS G12C)
IVGLCRVGE

SEQ ID NO: 5619 - protein, 9 aa, synthetic construct
  source 1..9: note = Seed: VVGACGVGK (KRAS G12C)
IVGLCRVGG

SEQ ID NO: 5620 - protein, 9 aa, synthetic construct
  source 1..9: note = Seed: VVGACGVGK (KRAS G12C)
IVGLCRVGH

SEQ ID NO: 5621 - protein, 9 aa, synthetic construct
  source 1..9: note = Seed: VVGACGVGK (KRAS G12C)
IVGLCRVGI

SEQ ID NO: 5622 - protein, 9 aa, synthetic construct
  source 1..9: note = Seed: VVGACGVGK (KRAS G12C)
IVGLCRVGK

SEQ ID NO: 5623 - protein, 9 aa, synthetic construct
  source 1..9: note = Seed: VVGACGVGK (KRAS G12C)
IVGLCRVGL

SEQ ID NO: 5624 - protein, 9 aa, synthetic construct
  source 1..9: note = Seed: VVGACGVGK (KRAS G12C)
IVGLCRVGM

SEQ ID NO: 5625 - protein, 9 aa, synthetic construct
  source 1..9: note = Seed: VVGACGVGK (KRAS G12C)
IVGLCRVGN

SEQ ID NO: 5626 - protein, 9 aa, synthetic construct
  source 1..9: note = Seed: VVGACGVGK (KRAS G12C)
IVGLCRVGP

SEQ ID NO: 5627 - protein, 9 aa, synthetic construct
  source 1..9: note = Seed: VVGACGVGK (KRAS G12C)
IVGLCRVGQ

SEQ ID NO: 5628 - protein, 9 aa, synthetic construct
  source 1..9: note = Seed: VVGACGVGK (KRAS G12C)
IVGLCRVGR

SEQ ID NO: 5629 - protein, 9 aa, synthetic construct
  source 1..9: note = Seed: VVGACGVGK (KRAS G12C)
IVGLCRVGS

SEQ ID NO: 5630 - protein, 9 aa, synthetic construct
  source 1..9: note = Seed: VVGACGVGK (KRAS G12C)
IVGLCRVGT

SEQ ID NO: 5631 - protein, 9 aa, synthetic construct
  source 1..9: note = Seed: VVGACGVGK (KRAS G12C)
IVGLCRVGV

SEQ ID NO: 5632 - protein, 9 aa, synthetic construct
  source 1..9: note = Seed: VVGACGVGK (KRAS G12C)
IVGLCRVGY

SEQ ID NO: 5633 - protein, 9 aa, synthetic construct
  source 1..9: note = Seed: VVGACGVGK (KRAS G12C)
IVGLCSVGR

SEQ ID NO: 5634 - protein, 9 aa, synthetic construct
  source 1..9: note = Seed: VVGACGVGK (KRAS G12C)
IVGLCTVGR

SEQ ID NO: 5635 - protein, 9 aa, synthetic construct
  source 1..9: note = Seed: VVGACGVGK (KRAS G12C)
IVGMCAVGR

SEQ ID NO: 5636 - protein, 9 aa, synthetic construct
  source 1..9: note = Seed: VVGACGVGK (KRAS G12C)
IVGMCHVGH

SEQ ID NO: 5637 - protein, 9 aa, synthetic construct
  source 1..9: note = Seed: VVGACGVGK (KRAS G12C)
IVGMCHVGK

SEQ ID NO: 5638 - protein, 9 aa, synthetic construct
  source 1..9: note = Seed: VVGACGVGK (KRAS G12C)
IVGMCHVGR

SEQ ID NO: 5639 - protein, 9 aa, synthetic construct
  source 1..9: note = Seed: VVGACGVGK (KRAS G12C)
IVGMCKVGA

SEQ ID NO: 5640 - protein, 9 aa, synthetic construct
  source 1..9: note = Seed: VVGACGVGK (KRAS G12C)
IVGMCKVGE

SEQ ID NO: 5641 - protein, 9 aa, synthetic construct
  source 1..9: note = Seed: VVGACGVGK (KRAS G12C)
IVGMCKVGF

SEQ ID NO: 5642 - protein, 9 aa, synthetic construct
  source 1..9: note = Seed: VVGACGVGK (KRAS G12C)
IVGMCKVGG

SEQ ID NO: 5643 - protein, 9 aa, synthetic construct
  source 1..9: note = Seed: VVGACGVGK (KRAS G12C)
IVGMCKVGH

SEQ ID NO: 5644 - protein, 9 aa, synthetic construct
  source 1..9: note = Seed: VVGACGVGK (KRAS G12C)
IVGMCKVGI

SEQ ID NO: 5645 - protein, 9 aa, synthetic construct
  source 1..9: note = Seed: VVGACGVGK (KRAS G12C)
IVGMCKVGK

SEQ ID NO: 5646 - protein, 9 aa, synthetic construct
  source 1..9: note = Seed: VVGACGVGK (KRAS G12C)
IVGMCKVGL

SEQ ID NO: 5647 - protein, 9 aa, synthetic construct
  source 1..9: note = Seed: VVGACGVGK (KRAS G12C)
IVGMCKVGM

SEQ ID NO: 5648 - protein, 9 aa, synthetic construct
  source 1..9: note = Seed: VVGACGVGK (KRAS G12C)
IVGMCKVGN

SEQ ID NO: 5649 - protein, 9 aa, synthetic construct
  source 1..9: note = Seed: VVGACGVGK (KRAS G12C)
IVGMCKVGP

SEQ ID NO: 5650 - protein, 9 aa, synthetic construct
  source 1..9: note = Seed: VVGACGVGK (KRAS G12C)
IVGMCKVGQ

SEQ ID NO: 5651 - protein, 9 aa, synthetic construct
  source 1..9: note = Seed: VVGACGVGK (KRAS G12C)
IVGMCKVGR

SEQ ID NO: 5652 - protein, 9 aa, synthetic construct
  source 1..9: note = Seed: VVGACGVGK (KRAS G12C)
IVGMCKVGS

SEQ ID NO: 5653 - protein, 9 aa, synthetic construct
  source 1..9: note = Seed: VVGACGVGK (KRAS G12C)
IVGMCKVGT

SEQ ID NO: 5654 - protein, 9 aa, synthetic construct
  source 1..9: note = Seed: VVGACGVGK (KRAS G12C)
IVGMCKVGV

SEQ ID NO: 5655 - protein, 9 aa, synthetic construct
  source 1..9: note = Seed: VVGACGVGK (KRAS G12C)
IVGMCKVGY

SEQ ID NO: 5656 - protein, 9 aa, synthetic construct
  source 1..9: note = Seed: VVGACGVGK (KRAS G12C)
IVGMCPVGR

SEQ ID NO: 5657 - protein, 9 aa, synthetic construct
  source 1..9: note = Seed: VVGACGVGK (KRAS G12C)
IVGMCRVGA

SEQ ID NO: 5658 - protein, 9 aa, synthetic construct
  source 1..9: note = Seed: VVGACGVGK (KRAS G12C)
IVGMCRVGE

SEQ ID NO: 5659 - protein, 9 aa, synthetic construct
  source 1..9: note = Seed: VVGACGVGK (KRAS G12C)
IVGMCRVGF

SEQ ID NO: 5660 - protein, 9 aa, synthetic construct
  source 1..9: note = Seed: VVGACGVGK (KRAS G12C)
IVGMCRVGG

SEQ ID NO: 5661 - protein, 9 aa, synthetic construct
  source 1..9: note = Seed: VVGACGVGK (KRAS G12C)
IVGMCRVGH

SEQ ID NO: 5662 - protein, 9 aa, synthetic construct
  source 1..9: note = Seed: VVGACGVGK (KRAS G12C)
IVGMCRVGI

SEQ ID NO: 5663 - protein, 9 aa, synthetic construct
  source 1..9: note = Seed: VVGACGVGK (KRAS G12C)
IVGMCRVGK

SEQ ID NO: 5664 - protein, 9 aa, synthetic construct
  source 1..9: note = Seed: VVGACGVGK (KRAS G12C)
IVGMCRVGL

SEQ ID NO: 5665 - protein, 9 aa, synthetic construct
  source 1..9: note = Seed: VVGACGVGK (KRAS G12C)
IVGMCRVGM

SEQ ID NO: 5666 - protein, 9 aa, synthetic construct
  source 1..9: note = Seed: VVGACGVGK (KRAS G12C)
IVGMCRVGN

SEQ ID NO: 5667 - protein, 9 aa, synthetic construct
  source 1..9: note = Seed: VVGACGVGK (KRAS G12C)
IVGMCRVGP

SEQ ID NO: 5668 - protein, 9 aa, synthetic construct
  source 1..9: note = Seed: VVGACGVGK (KRAS G12C)
IVGMCRVGQ

SEQ ID NO: 5669 - protein, 9 aa, synthetic construct
  source 1..9: note = Seed: VVGACGVGK (KRAS G12C)
IVGMCRVGR

SEQ ID NO: 5670 - protein, 9 aa, synthetic construct
  source 1..9: note = Seed: VVGACGVGK (KRAS G12C)
IVGMCRVGS

SEQ ID NO: 5671 - protein, 9 aa, synthetic construct
  source 1..9: note = Seed: VVGACGVGK (KRAS G12C)
IVGMCRVGT

SEQ ID NO: 5672 - protein, 9 aa, synthetic construct
  source 1..9: note = Seed: VVGACGVGK (KRAS G12C)
IVGMCRVGV

SEQ ID NO: 5673 - protein, 9 aa, synthetic construct
  source 1..9: note = Seed: VVGACGVGK (KRAS G12C)
IVGMCRVGY

SEQ ID NO: 5674 - protein, 9 aa, synthetic construct
  source 1..9: note = Seed: VVGACGVGK (KRAS G12C)
IVGMCSVGR

SEQ ID NO: 5675 - protein, 9 aa, synthetic construct
  source 1..9: note = Seed: VVGACGVGK (KRAS G12C)
IVGMCTVGR

SEQ ID NO: 5676 - protein, 9 aa, synthetic construct
  source 1..9: note = Seed: VVGACGVGK (KRAS G12C)
IVGNCAVGI

SEQ ID NO: 5677 - protein, 9 aa, synthetic construct
  source 1..9: note = Seed: VVGACGVGK (KRAS G12C)
IVGNCAVGR

SEQ ID NO: 5678 - protein, 9 aa, synthetic construct
  source 1..9: note = Seed: VVGACGVGK (KRAS G12C)
IVGNCAVGY

SEQ ID NO: 5679 - protein, 9 aa, synthetic construct
  source 1..9: note = Seed: VVGACGVGK (KRAS G12C)
IVGNCHVGY

SEQ ID NO: 5680 - protein, 9 aa, synthetic construct
  source 1..9: note = Seed: VVGACGVGK (KRAS G12C)
IVGNCKVGA

SEQ ID NO: 5681 - protein, 9 aa, synthetic construct
  source 1..9: note = Seed: VVGACGVGK (KRAS G12C)
IVGNCKVGF

SEQ ID NO: 5682 - protein, 9 aa, synthetic construct
  source 1..9: note = Seed: VVGACGVGK (KRAS G12C)
IVGNCKVGH

SEQ ID NO: 5683 - protein, 9 aa, synthetic construct
  source 1..9: note = Seed: VVGACGVGK (KRAS G12C)
IVGNCKVGI

SEQ ID NO: 5684 - protein, 9 aa, synthetic construct
  source 1..9: note = Seed: VVGACGVGK (KRAS G12C)
IVGNCKVGK

SEQ ID NO: 5685 - protein, 9 aa, synthetic construct
  source 1..9: note = Seed: VVGACGVGK (KRAS G12C)
IVGNCKVGL

SEQ ID NO: 5686 - protein, 9 aa, synthetic construct
  source 1..9: note = Seed: VVGACGVGK (KRAS G12C)
IVGNCKVGM

SEQ ID NO: 5687 - protein, 9 aa, synthetic construct
  source 1..9: note = Seed: VVGACGVGK (KRAS G12C)
IVGNCKVGR

SEQ ID NO: 5688 - protein, 9 aa, synthetic construct
  source 1..9: note = Seed: VVGACGVGK (KRAS G12C)
IVGNCKVGS

SEQ ID NO: 5689 - protein, 9 aa, synthetic construct
  source 1..9: note = Seed: VVGACGVGK (KRAS G12C)
IVGNCKVGV

SEQ ID NO: 5690 - protein, 9 aa, synthetic construct
  source 1..9: note = Seed: VVGACGVGK (KRAS G12C)
IVGNCKVGY

SEQ ID NO: 5691 - protein, 9 aa, synthetic construct
  source 1..9: note = Seed: VVGACGVGK (KRAS G12C)
IVGNCNVGY

SEQ ID NO: 5692 - protein, 9 aa, synthetic construct
  source 1..9: note = Seed: VVGACGVGK (KRAS G12C)
IVGNCPVGF

SEQ ID NO: 5693 - protein, 9 aa, synthetic construct
  source 1..9: note = Seed: VVGACGVGK (KRAS G12C)
IVGNCPVGI

SEQ ID NO: 5694 - protein, 9 aa, synthetic construct
  source 1..9: note = Seed: VVGACGVGK (KRAS G12C)
IVGNCPVGL

SEQ ID NO: 5695 - protein, 9 aa, synthetic construct
  source 1..9: note = Seed: VVGACGVGK (KRAS G12C)
IVGNCPVGR

SEQ ID NO: 5696 - protein, 9 aa, synthetic construct
  source 1..9: note = Seed: VVGACGVGK (KRAS G12C)
IVGNCPVGV

SEQ ID NO: 5697 - protein, 9 aa, synthetic construct
  source 1..9: note = Seed: VVGACGVGK (KRAS G12C)
IVGNCPVGY

SEQ ID NO: 5698 - protein, 9 aa, synthetic construct
  source 1..9: note = Seed: VVGACGVGK (KRAS G12C)
IVGNCRVGA

SEQ ID NO: 5699 - protein, 9 aa, synthetic construct
  source 1..9: note = Seed: VVGACGVGK (KRAS G12C)
IVGNCRVGF

SEQ ID NO: 5700 - protein, 9 aa, synthetic construct
  source 1..9: note = Seed: VVGACGVGK (KRAS G12C)
IVGNCRVGG

SEQ ID NO: 5701 - protein, 9 aa, synthetic construct
  source 1..9: note = Seed: VVGACGVGK (KRAS G12C)
IVGNCRVGH

SEQ ID NO: 5702 - protein, 9 aa, synthetic construct
  source 1..9: note = Seed: VVGACGVGK (KRAS G12C)
IVGNCRVGI

SEQ ID NO: 5703 - protein, 9 aa, synthetic construct
  source 1..9: note = Seed: VVGACGVGK (KRAS G12C)
IVGNCRVGK

SEQ ID NO: 5704 - protein, 9 aa, synthetic construct
  source 1..9: note = Seed: VVGACGVGK (KRAS G12C)
IVGNCRVGL

SEQ ID NO: 5705 - protein, 9 aa, synthetic construct
  source 1..9: note = Seed: VVGACGVGK (KRAS G12C)
IVGNCRVGM

SEQ ID NO: 5706 - protein, 9 aa, synthetic construct
  source 1..9: note = Seed: VVGACGVGK (KRAS G12C)
IVGNCRVGN

SEQ ID NO: 5707 - protein, 9 aa, synthetic construct
  source 1..9: note = Seed: VVGACGVGK (KRAS G12C)
IVGNCRVGQ

SEQ ID NO: 5708 - protein, 9 aa, synthetic construct
  source 1..9: note = Seed: VVGACGVGK (KRAS G12C)
IVGNCRVGR

SEQ ID NO: 5709 - protein, 9 aa, synthetic construct
  source 1..9: note = Seed: VVGACGVGK (KRAS G12C)
IVGNCRVGS

SEQ ID NO: 5710 - protein, 9 aa, synthetic construct
  source 1..9: note = Seed: VVGACGVGK (KRAS G12C)
IVGNCRVGT

SEQ ID NO: 5711 - protein, 9 aa, synthetic construct
  source 1..9: note = Seed: VVGACGVGK (KRAS G12C)
IVGNCRVGV

SEQ ID NO: 5712 - protein, 9 aa, synthetic construct
  source 1..9: note = Seed: VVGACGVGK (KRAS G12C)
IVGNCRVGW

SEQ ID NO: 5713 - protein, 9 aa, synthetic construct
  source 1..9: note = Seed: VVGACGVGK (KRAS G12C)
IVGNCRVGY

SEQ ID NO: 5714 - protein, 9 aa, synthetic construct
  source 1..9: note = Seed: VVGACGVGK (KRAS G12C)
IVGNCSVGY

SEQ ID NO: 5715 - protein, 9 aa, synthetic construct
  source 1..9: note = Seed: VVGACGVGK (KRAS G12C)
IVGQCAVGR

SEQ ID NO: 5716 - protein, 9 aa, synthetic construct
  source 1..9: note = Seed: VVGACGVGK (KRAS G12C)
IVGQCKVGA

SEQ ID NO: 5717 - protein, 9 aa, synthetic construct
  source 1..9: note = Seed: VVGACGVGK (KRAS G12C)
IVGQCKVGF

SEQ ID NO: 5718 - protein, 9 aa, synthetic construct
  source 1..9: note = Seed: VVGACGVGK (KRAS G12C)
IVGQCKVGG

SEQ ID NO: 5719 - protein, 9 aa, synthetic construct
  source 1..9: note = Seed: VVGACGVGK (KRAS G12C)
IVGQCKVGH

SEQ ID NO: 5720 - protein, 9 aa, synthetic construct
  source 1..9: note = Seed: VVGACGVGK (KRAS G12C)
IVGQCKVGI

SEQ ID NO: 5721 - protein, 9 aa, synthetic construct
  source 1..9: note = Seed: VVGACGVGK (KRAS G12C)
IVGQCKVGK

SEQ ID NO: 5722 - protein, 9 aa, synthetic construct
  source 1..9: note = Seed: VVGACGVGK (KRAS G12C)
IVGQCKVGL

SEQ ID NO: 5723 - protein, 9 aa, synthetic construct
  source 1..9: note = Seed: VVGACGVGK (KRAS G12C)
IVGQCKVGM

SEQ ID NO: 5724 - protein, 9 aa, synthetic construct
  source 1..9: note = Seed: VVGACGVGK (KRAS G12C)
IVGQCKVGQ

SEQ ID NO: 5725 - protein, 9 aa, synthetic construct
  source 1..9: note = Seed: VVGACGVGK (KRAS G12C)
IVGQCKVGR

SEQ ID NO: 5726 - protein, 9 aa, synthetic construct
  source 1..9: note = Seed: VVGACGVGK (KRAS G12C)
IVGQCKVGS

SEQ ID NO: 5727 - protein, 9 aa, synthetic construct
  source 1..9: note = Seed: VVGACGVGK (KRAS G12C)
IVGQCKVGV

SEQ ID NO: 5728 - protein, 9 aa, synthetic construct
  source 1..9: note = Seed: VVGACGVGK (KRAS G12C)
IVGQCKVGY

SEQ ID NO: 5729 - protein, 9 aa, synthetic construct
  source 1..9: note = Seed: VVGACGVGK (KRAS G12C)
IVGQCPVGR

SEQ ID NO: 5730 - protein, 9 aa, synthetic construct
  source 1..9: note = Seed: VVGACGVGK (KRAS G12C)
IVGQCRVGA

SEQ ID NO: 5731 - protein, 9 aa, synthetic construct
  source 1..9: note = Seed: VVGACGVGK (KRAS G12C)
IVGQCRVGF

SEQ ID NO: 5732 - protein, 9 aa, synthetic construct
  source 1..9: note = Seed: VVGACGVGK (KRAS G12C)
IVGQCRVGG

SEQ ID NO: 5733 - protein, 9 aa, synthetic construct
  source 1..9: note = Seed: VVGACGVGK (KRAS G12C)
IVGQCRVGH

SEQ ID NO: 5734 - protein, 9 aa, synthetic construct
  source 1..9: note = Seed: VVGACGVGK (KRAS G12C)
IVGQCRVGI

SEQ ID NO: 5735 - protein, 9 aa, synthetic construct
  source 1..9: note = Seed: VVGACGVGK (KRAS G12C)
IVGQCRVGK

SEQ ID NO: 5736 - protein, 9 aa, synthetic construct
  source 1..9: note = Seed: VVGACGVGK (KRAS G12C)
IVGQCRVGL

SEQ ID NO: 5737 - protein, 9 aa, synthetic construct
  source 1..9: note = Seed: VVGACGVGK (KRAS G12C)
IVGQCRVGM

SEQ ID NO: 5738 - protein, 9 aa, synthetic construct
  source 1..9: note = Seed: VVGACGVGK (KRAS G12C)
IVGQCRVGN

SEQ ID NO: 5739 - protein, 9 aa, synthetic construct
  source 1..9: note = Seed: VVGACGVGK (KRAS G12C)
IVGQCRVGQ

SEQ ID NO: 5740 - protein, 9 aa, synthetic construct
  source 1..9: note = Seed: VVGACGVGK (KRAS G12C)
IVGQCRVGR

SEQ ID NO: 5741 - protein, 9 aa, synthetic construct
  source 1..9: note = Seed: VVGACGVGK (KRAS G12C)
IVGQCRVGS

SEQ ID NO: 5742 - protein, 9 aa, synthetic construct
  source 1..9: note = Seed: VVGACGVGK (KRAS G12C)
IVGQCRVGT

SEQ ID NO: 5743 - protein, 9 aa, synthetic construct
  source 1..9: note = Seed: VVGACGVGK (KRAS G12C)
IVGQCRVGV

SEQ ID NO: 5744 - protein, 9 aa, synthetic construct
  source 1..9: note = Seed: VVGACGVGK (KRAS G12C)
IVGQCRVGY

SEQ ID NO: 5745 - protein, 9 aa, synthetic construct
  source 1..9: note = Seed: VVGACGVGK (KRAS G12C)
IVGQCSVGR

SEQ ID NO: 5746 - protein, 9 aa, synthetic construct
  source 1..9: note = Seed: VVGACGVGK (KRAS G12C)
IVGQCTVGR

SEQ ID NO: 5747 - protein, 9 aa, synthetic construct
  source 1..9: note = Seed: VVGACGVGK (KRAS G12C)
IVGRCAVGK

SEQ ID NO: 5748 - protein, 9 aa, synthetic construct
  source 1..9: note = Seed: VVGACGVGK (KRAS G12C)
IVGRCAVGR

SEQ ID NO: 5749 - protein, 9 aa, synthetic construct
  source 1..9: note = Seed: VVGACGVGK (KRAS G12C)
IVGRCAVGY

SEQ ID NO: 5750 - protein, 9 aa, synthetic construct
  source 1..9: note = Seed: VVGACGVGK (KRAS G12C)
IVGRCGVGR

SEQ ID NO: 5751 - protein, 9 aa, synthetic construct
  source 1..9: note = Seed: VVGACGVGK (KRAS G12C)
IVGRCHVGK

SEQ ID NO: 5752 - protein, 9 aa, synthetic construct
  source 1..9: note = Seed: VVGACGVGK (KRAS G12C)
IVGRCHVGR

SEQ ID NO: 5753 - protein, 9 aa, synthetic construct
  source 1..9: note = Seed: VVGACGVGK (KRAS G12C)
IVGRCHVGY

SEQ ID NO: 5754 - protein, 9 aa, synthetic construct
  source 1..9: note = Seed: VVGACGVGK (KRAS G12C)
IVGRCIVGR

SEQ ID NO: 5755 - protein, 9 aa, synthetic construct
  source 1..9: note = Seed: VVGACGVGK (KRAS G12C)
IVGRCKVGA

SEQ ID NO: 5756 - protein, 9 aa, synthetic construct
  source 1..9: note = Seed: VVGACGVGK (KRAS G12C)
IVGRCKVGF

SEQ ID NO: 5757 - protein, 9 aa, synthetic construct
  source 1..9: note = Seed: VVGACGVGK (KRAS G12C)
IVGRCKVGG

SEQ ID NO: 5758 - protein, 9 aa, synthetic construct
  source 1..9: note = Seed: VVGACGVGK (KRAS G12C)
IVGRCKVGH

SEQ ID NO: 5759 - protein, 9 aa, synthetic construct
  source 1..9: note = Seed: VVGACGVGK (KRAS G12C)
IVGRCKVGI

SEQ ID NO: 5760 - protein, 9 aa, synthetic construct
  source 1..9: note = Seed: VVGACGVGK (KRAS G12C)
IVGRCKVGK

SEQ ID NO: 5761 - protein, 9 aa, synthetic construct
  source 1..9: note = Seed: VVGACGVGK (KRAS G12C)
IVGRCKVGL

SEQ ID NO: 5762 - protein, 9 aa, synthetic construct
  source 1..9: note = Seed: VVGACGVGK (KRAS G12C)
IVGRCKVGM

SEQ ID NO: 5763 - protein, 9 aa, synthetic construct
  source 1..9: note = Seed: VVGACGVGK (KRAS G12C)
IVGRCKVGQ

SEQ ID NO: 5764 - protein, 9 aa, synthetic construct
  source 1..9: note = Seed: VVGACGVGK (KRAS G12C)
IVGRCKVGR

SEQ ID NO: 5765 - protein, 9 aa, synthetic construct
  source 1..9: note = Seed: VVGACGVGK (KRAS G12C)
IVGRCKVGS

SEQ ID NO: 5766 - protein, 9 aa, synthetic construct
  source 1..9: note = Seed: VVGACGVGK (KRAS G12C)
IVGRCKVGT

SEQ ID NO: 5767 - protein, 9 aa, synthetic construct
  source 1..9: note = Seed: VVGACGVGK (KRAS G12C)
IVGRCKVGV

SEQ ID NO: 5768 - protein, 9 aa, synthetic construct
  source 1..9: note = Seed: VVGACGVGK (KRAS G12C)
IVGRCKVGY

SEQ ID NO: 5769 - protein, 9 aa, synthetic construct
  source 1..9: note = Seed: VVGACGVGK (KRAS G12C)
IVGRCMVGR

SEQ ID NO: 5770 - protein, 9 aa, synthetic construct
  source 1..9: note = Seed: VVGACGVGK (KRAS G12C)
IVGRCNVGF

SEQ ID NO: 5771 - protein, 9 aa, synthetic construct
  source 1..9: note = Seed: VVGACGVGK (KRAS G12C)
IVGRCNVGR

SEQ ID NO: 5772 - protein, 9 aa, synthetic construct
  source 1..9: note = Seed: VVGACGVGK (KRAS G12C)
IVGRCNVGY

SEQ ID NO: 5773 - protein, 9 aa, synthetic construct
  source 1..9: note = Seed: VVGACGVGK (KRAS G12C)
IVGRCPVGR

SEQ ID NO: 5774 - protein, 9 aa, synthetic construct
  source 1..9: note = Seed: VVGACGVGK (KRAS G12C)
IVGRCPVGY

SEQ ID NO: 5775 - protein, 9 aa, synthetic construct
  source 1..9: note = Seed: VVGACGVGK (KRAS G12C)
IVGRCQVGR

SEQ ID NO: 5776 - protein, 9 aa, synthetic construct
  source 1..9: note = Seed: VVGACGVGK (KRAS G12C)
IVGRCRVGA

SEQ ID NO: 5777 - protein, 9 aa, synthetic construct
  source 1..9: note = Seed: VVGACGVGK (KRAS G12C)
IVGRCRVGE

SEQ ID NO: 5778 - protein, 9 aa, synthetic construct
  source 1..9: note = Seed: VVGACGVGK (KRAS G12C)
IVGRCRVGF

SEQ ID NO: 5779 - protein, 9 aa, synthetic construct
  source 1..9: note = Seed: VVGACGVGK (KRAS G12C)
IVGRCRVGG

SEQ ID NO: 5780 - protein, 9 aa, synthetic construct
  source 1..9: note = Seed: VVGACGVGK (KRAS G12C)
IVGRCRVGH

SEQ ID NO: 5781 - protein, 9 aa, synthetic construct
  source 1..9: note = Seed: VVGACGVGK (KRAS G12C)
IVGRCRVGI

SEQ ID NO: 5782 - protein, 9 aa, synthetic construct
  source 1..9: note = Seed: VVGACGVGK (KRAS G12C)
IVGRCRVGK

SEQ ID NO: 5783 - protein, 9 aa, synthetic construct
  source 1..9: note = Seed: VVGACGVGK (KRAS G12C)
IVGRCRVGL

SEQ ID NO: 5784 - protein, 9 aa, synthetic construct
  source 1..9: note = Seed: VVGACGVGK (KRAS G12C)
IVGRCRVGM

SEQ ID NO: 5785 - protein, 9 aa, synthetic construct
  source 1..9: note = Seed: VVGACGVGK (KRAS G12C)
IVGRCRVGN

SEQ ID NO: 5786 - protein, 9 aa, synthetic construct
  source 1..9: note = Seed: VVGACGVGK (KRAS G12C)
IVGRCRVGP

SEQ ID NO: 5787 - protein, 9 aa, synthetic construct
  source 1..9: note = Seed: VVGACGVGK (KRAS G12C)
IVGRCRVGQ

SEQ ID NO: 5788 - protein, 9 aa, synthetic construct
  source 1..9: note = Seed: VVGACGVGK (KRAS G12C)
IVGRCRVGR

SEQ ID NO: 5789 - protein, 9 aa, synthetic construct
  source 1..9: note = Seed: VVGACGVGK (KRAS G12C)
IVGRCRVGS

SEQ ID NO: 5790 - protein, 9 aa, synthetic construct
  source 1..9: note = Seed: VVGACGVGK (KRAS G12C)
IVGRCRVGT

SEQ ID NO: 5791 - protein, 9 aa, synthetic construct
  source 1..9: note = Seed: VVGACGVGK (KRAS G12C)
IVGRCRVGV

SEQ ID NO: 5792 - protein, 9 aa, synthetic construct
  source 1..9: note = Seed: VVGACGVGK (KRAS G12C)
IVGRCRVGY

SEQ ID NO: 5793 - protein, 9 aa, synthetic construct
  source 1..9: note = Seed: VVGACGVGK (KRAS G12C)
IVGRCSVGK

SEQ ID NO: 5794 - protein, 9 aa, synthetic construct
  source 1..9: note = Seed: VVGACGVGK (KRAS G12C)
IVGRCSVGR

SEQ ID NO: 5795 - protein, 9 aa, synthetic construct
  source 1..9: note = Seed: VVGACGVGK (KRAS G12C)
IVGRCSVGY

SEQ ID NO: 5796 - protein, 9 aa, synthetic construct
  source 1..9: note = Seed: VVGACGVGK (KRAS G12C)
IVGRCTVGR

SEQ ID NO: 5797 - protein, 9 aa, synthetic construct
  source 1..9: note = Seed: VVGACGVGK (KRAS G12C)
IVGRCTVGY

SEQ ID NO: 5798 - protein, 9 aa, synthetic construct
  source 1..9: note = Seed: VVGACGVGK (KRAS G12C)
IVGRCVVGR

SEQ ID NO: 5799 - protein, 9 aa, synthetic construct
  source 1..9: note = Seed: VVGACGVGK (KRAS G12C)
IVGSCAVGR

SEQ ID NO: 5800 - protein, 9 aa, synthetic construct
  source 1..9: note = Seed: VVGACGVGK (KRAS G12C)
IVGSCAVGY

SEQ ID NO: 5801 - protein, 9 aa, synthetic construct
  source 1..9: note = Seed: VVGACGVGK (KRAS G12C)
IVGSCHVGR

SEQ ID NO: 5802 - protein, 9 aa, synthetic construct
  source 1..9: note = Seed: VVGACGVGK (KRAS G12C)
IVGSCKVGA

SEQ ID NO: 5803 - protein, 9 aa, synthetic construct
  source 1..9: note = Seed: VVGACGVGK (KRAS G12C)
IVGSCKVGF

SEQ ID NO: 5804 - protein, 9 aa, synthetic construct
  source 1..9: note = Seed: VVGACGVGK (KRAS G12C)
IVGSCKVGH

SEQ ID NO: 5805 - protein, 9 aa, synthetic construct
  source 1..9: note = Seed: VVGACGVGK (KRAS G12C)
IVGSCKVGI

SEQ ID NO: 5806 - protein, 9 aa, synthetic construct
  source 1..9: note = Seed: VVGACGVGK (KRAS G12C)
IVGSCKVGK

SEQ ID NO: 5807 - protein, 9 aa, synthetic construct
  source 1..9: note = Seed: VVGACGVGK (KRAS G12C)
IVGSCKVGL

SEQ ID NO: 5808 - protein, 9 aa, synthetic construct
  source 1..9: note = Seed: VVGACGVGK (KRAS G12C)
IVGSCKVGM

SEQ ID NO: 5809 - protein, 9 aa, synthetic construct
  source 1..9: note = Seed: VVGACGVGK (KRAS G12C)
IVGSCKVGQ

SEQ ID NO: 5810 - protein, 9 aa, synthetic construct
  source 1..9: note = Seed: VVGACGVGK (KRAS G12C)
IVGSCKVGR

SEQ ID NO: 5811 - protein, 9 aa, synthetic construct
  source 1..9: note = Seed: VVGACGVGK (KRAS G12C)
IVGSCKVGS

SEQ ID NO: 5812 - protein, 9 aa, synthetic construct
  source 1..9: note = Seed: VVGACGVGK (KRAS G12C)
IVGSCKVGV

SEQ ID NO: 5813 - protein, 9 aa, synthetic construct
  source 1..9: note = Seed: VVGACGVGK (KRAS G12C)
IVGSCKVGY

SEQ ID NO: 5814 - protein, 9 aa, synthetic construct
  source 1..9: note = Seed: VVGACGVGK (KRAS G12C)
IVGSCPVGR

SEQ ID NO: 5815 - protein, 9 aa, synthetic construct
  source 1..9: note = Seed: VVGACGVGK (KRAS G12C)
IVGSCPVGY

SEQ ID NO: 5816 - protein, 9 aa, synthetic construct
  source 1..9: note = Seed: VVGACGVGK (KRAS G12C)
IVGSCRVGA

SEQ ID NO: 5817 - protein, 9 aa, synthetic construct
  source 1..9: note = Seed: VVGACGVGK (KRAS G12C)
IVGSCRVGF

SEQ ID NO: 5818 - protein, 9 aa, synthetic construct
  source 1..9: note = Seed: VVGACGVGK (KRAS G12C)
IVGSCRVGG

SEQ ID NO: 5819 - protein, 9 aa, synthetic construct
  source 1..9: note = Seed: VVGACGVGK (KRAS G12C)
IVGSCRVGH

SEQ ID NO: 5820 - protein, 9 aa, synthetic construct
  source 1..9: note = Seed: VVGACGVGK (KRAS G12C)
IVGSCRVGI

SEQ ID NO: 5821 - protein, 9 aa, synthetic construct
  source 1..9: note = Seed: VVGACGVGK (KRAS G12C)
IVGSCRVGK

SEQ ID NO: 5822 - protein, 9 aa, synthetic construct
  source 1..9: note = Seed: VVGACGVGK (KRAS G12C)
IVGSCRVGL

SEQ ID NO: 5823 - protein, 9 aa, synthetic construct
  source 1..9: note = Seed: VVGACGVGK (KRAS G12C)
IVGSCRVGM

SEQ ID NO: 5824 - protein, 9 aa, synthetic construct
  source 1..9: note = Seed: VVGACGVGK (KRAS G12C)
IVGSCRVGN

SEQ ID NO: 5825 - protein, 9 aa, synthetic construct
  source 1..9: note = Seed: VVGACGVGK (KRAS G12C)
IVGSCRVGQ

SEQ ID NO: 5826 - protein, 9 aa, synthetic construct
  source 1..9: note = Seed: VVGACGVGK (KRAS G12C)
IVGSCRVGR

SEQ ID NO: 5827 - protein, 9 aa, synthetic construct
  source 1..9: note = Seed: VVGACGVGK (KRAS G12C)
IVGSCRVGS

SEQ ID NO: 5828 - protein, 9 aa, synthetic construct
  source 1..9: note = Seed: VVGACGVGK (KRAS G12C)
IVGSCRVGT

SEQ ID NO: 5829 - protein, 9 aa, synthetic construct
  source 1..9: note = Seed: VVGACGVGK (KRAS G12C)
IVGSCRVGV

SEQ ID NO: 5830 - protein, 9 aa, synthetic construct
  source 1..9: note = Seed: VVGACGVGK (KRAS G12C)
IVGSCRVGY

SEQ ID NO: 5831 - protein, 9 aa, synthetic construct
  source 1..9: note = Seed: VVGACGVGK (KRAS G12C)
IVGSCSVGR

SEQ ID NO: 5832 - protein, 9 aa, synthetic construct
  source 1..9: note = Seed: VVGACGVGK (KRAS G12C)
IVGSCTVGR

SEQ ID NO: 5833 - protein, 9 aa, synthetic construct
  source 1..9: note = Seed: VVGACGVGK (KRAS G12C)
IVGTCAVGR

SEQ ID NO: 5834 - protein, 9 aa, synthetic construct
  source 1..9: note = Seed: VVGACGVGK (KRAS G12C)
IVGTCKVGA

SEQ ID NO: 5835 - protein, 9 aa, synthetic construct
  source 1..9: note = Seed: VVGACGVGK (KRAS G12C)
IVGTCKVGF

SEQ ID NO: 5836 - protein, 9 aa, synthetic construct
  source 1..9: note = Seed: VVGACGVGK (KRAS G12C)
IVGTCKVGG

SEQ ID NO: 5837 - protein, 9 aa, synthetic construct
  source 1..9: note = Seed: VVGACGVGK (KRAS G12C)
IVGTCKVGH

SEQ ID NO: 5838 - protein, 9 aa, synthetic construct
  source 1..9: note = Seed: VVGACGVGK (KRAS G12C)
IVGTCKVGK

SEQ ID NO: 5839 - protein, 9 aa, synthetic construct
  source 1..9: note = Seed: VVGACGVGK (KRAS G12C)
IVGTCKVGM

SEQ ID NO: 5840 - protein, 9 aa, synthetic construct
  source 1..9: note = Seed: VVGACGVGK (KRAS G12C)
IVGTCKVGQ

SEQ ID NO: 5841 - protein, 9 aa, synthetic construct
  source 1..9: note = Seed: VVGACGVGK (KRAS G12C)
IVGTCKVGR

SEQ ID NO: 5842 - protein, 9 aa, synthetic construct
  source 1..9: note = Seed: VVGACGVGK (KRAS G12C)
IVGTCKVGS

SEQ ID NO: 5843 - protein, 9 aa, synthetic construct
  source 1..9: note = Seed: VVGACGVGK (KRAS G12C)
IVGTCKVGV

SEQ ID NO: 5844 - protein, 9 aa, synthetic construct
  source 1..9: note = Seed: VVGACGVGK (KRAS G12C)
IVGTCKVGY

SEQ ID NO: 5845 - protein, 9 aa, synthetic construct
  source 1..9: note = Seed: VVGACGVGK (KRAS G12C)
IVGTCPVGR

SEQ ID NO: 5846 - protein, 9 aa, synthetic construct
  source 1..9: note = Seed: VVGACGVGK (KRAS G12C)
IVGTCPVGY

SEQ ID NO: 5847 - protein, 9 aa, synthetic construct
  source 1..9: note = Seed: VVGACGVGK (KRAS G12C)
IVGTCRVGA

SEQ ID NO: 5848 - protein, 9 aa, synthetic construct
  source 1..9: note = Seed: VVGACGVGK (KRAS G12C)
IVGTCRVGF

SEQ ID NO: 5849 - protein, 9 aa, synthetic construct
  source 1..9: note = Seed: VVGACGVGK (KRAS G12C)
IVGTCRVGG

SEQ ID NO: 5850 - protein, 9 aa, synthetic construct
  source 1..9: note = Seed: VVGACGVGK (KRAS G12C)
IVGTCRVGH

SEQ ID NO: 5851 - protein, 9 aa, synthetic construct
  source 1..9: note = Seed: VVGACGVGK (KRAS G12C)
IVGTCRVGI

SEQ ID NO: 5852 - protein, 9 aa, synthetic construct
  source 1..9: note = Seed: VVGACGVGK (KRAS G12C)
IVGTCRVGK

SEQ ID NO: 5853 - protein, 9 aa, synthetic construct
  source 1..9: note = Seed: VVGACGVGK (KRAS G12C)
IVGTCRVGL

SEQ ID NO: 5854 - protein, 9 aa, synthetic construct
  source 1..9: note = Seed: VVGACGVGK (KRAS G12C)
IVGTCRVGM

SEQ ID NO: 5855 - protein, 9 aa, synthetic construct
  source 1..9: note = Seed: VVGACGVGK (KRAS G12C)
IVGTCRVGQ

SEQ ID NO: 5856 - protein, 9 aa, synthetic construct
  source 1..9: note = Seed: VVGACGVGK (KRAS G12C)
IVGTCRVGR

SEQ ID NO: 5857 - protein, 9 aa, synthetic construct
  source 1..9: note = Seed: VVGACGVGK (KRAS G12C)
IVGTCRVGS

SEQ ID NO: 5858 - protein, 9 aa, synthetic construct
  source 1..9: note = Seed: VVGACGVGK (KRAS G12C)
IVGTCRVGT

SEQ ID NO: 5859 - protein, 9 aa, synthetic construct
  source 1..9: note = Seed: VVGACGVGK (KRAS G12C)
IVGTCRVGV

SEQ ID NO: 5860 - protein, 9 aa, synthetic construct
  source 1..9: note = Seed: VVGACGVGK (KRAS G12C)
IVGTCRVGY

SEQ ID NO: 5861 - protein, 9 aa, synthetic construct
  source 1..9: note = Seed: VVGACGVGK (KRAS G12C)
IVGVCAVGR

SEQ ID NO: 5862 - protein, 9 aa, synthetic construct
  source 1..9: note = Seed: VVGACGVGK (KRAS G12C)
IVGVCHVGR

SEQ ID NO: 5863 - protein, 9 aa, synthetic construct
  source 1..9: note = Seed: VVGACGVGK (KRAS G12C)
IVGVCKVGA

SEQ ID NO: 5864 - protein, 9 aa, synthetic construct
  source 1..9: note = Seed: VVGACGVGK (KRAS G12C)
IVGVCKVGG

SEQ ID NO: 5865 - protein, 9 aa, synthetic construct
  source 1..9: note = Seed: VVGACGVGK (KRAS G12C)
IVGVCKVGH

SEQ ID NO: 5866 - protein, 9 aa, synthetic construct
  source 1..9: note = Seed: VVGACGVGK (KRAS G12C)
IVGVCKVGK

SEQ ID NO: 5867 - protein, 9 aa, synthetic construct
  source 1..9: note = Seed: VVGACGVGK (KRAS G12C)
IVGVCKVGM

SEQ ID NO: 5868 - protein, 9 aa, synthetic construct
  source 1..9: note = Seed: VVGACGVGK (KRAS G12C)
IVGVCKVGN

SEQ ID NO: 5869 - protein, 9 aa, synthetic construct
  source 1..9: note = Seed: VVGACGVGK (KRAS G12C)
IVGVCKVGQ

SEQ ID NO: 5870 - protein, 9 aa, synthetic construct
  source 1..9: note = Seed: VVGACGVGK (KRAS G12C)
IVGVCKVGR

SEQ ID NO: 5871 - protein, 9 aa, synthetic construct
  source 1..9: note = Seed: VVGACGVGK (KRAS G12C)
IVGVCKVGS

SEQ ID NO: 5872 - protein, 9 aa, synthetic construct
  source 1..9: note = Seed: VVGACGVGK (KRAS G12C)
IVGVCKVGT

SEQ ID NO: 5873 - protein, 9 aa, synthetic construct
  source 1..9: note = Seed: VVGACGVGK (KRAS G12C)
IVGVCKVGY

SEQ ID NO: 5874 - protein, 9 aa, synthetic construct
  source 1..9: note = Seed: VVGACGVGK (KRAS G12C)
IVGVCPVGR

SEQ ID NO: 5875 - protein, 9 aa, synthetic construct
  source 1..9: note = Seed: VVGACGVGK (KRAS G12C)
IVGVCRVGA

SEQ ID NO: 5876 - protein, 9 aa, synthetic construct
  source 1..9: note = Seed: VVGACGVGK (KRAS G12C)
IVGVCRVGG

SEQ ID NO: 5877 - protein, 9 aa, synthetic construct
  source 1..9: note = Seed: VVGACGVGK (KRAS G12C)
IVGVCRVGH

SEQ ID NO: 5878 - protein, 9 aa, synthetic construct
  source 1..9: note = Seed: VVGACGVGK (KRAS G12C)
IVGVCRVGK

SEQ ID NO: 5879 - protein, 9 aa, synthetic construct
  source 1..9: note = Seed: VVGACGVGK (KRAS G12C)
IVGVCRVGM

SEQ ID NO: 5880 - protein, 9 aa, synthetic construct
  source 1..9: note = Seed: VVGACGVGK (KRAS G12C)
IVGVCRVGN

SEQ ID NO: 5881 - protein, 9 aa, synthetic construct
  source 1..9: note = Seed: VVGACGVGK (KRAS G12C)
IVGVCRVGP

SEQ ID NO: 5882 - protein, 9 aa, synthetic construct
  source 1..9: note = Seed: VVGACGVGK (KRAS G12C)
IVGVCRVGQ

SEQ ID NO: 5883 - protein, 9 aa, synthetic construct
  source 1..9: note = Seed: VVGACGVGK (KRAS G12C)
IVGVCRVGR

SEQ ID NO: 5884 - protein, 9 aa, synthetic construct
  source 1..9: note = Seed: VVGACGVGK (KRAS G12C)
IVGVCRVGS

SEQ ID NO: 5885 - protein, 9 aa, synthetic construct
  source 1..9: note = Seed: VVGACGVGK (KRAS G12C)
IVGVCRVGT

SEQ ID NO: 5886 - protein, 9 aa, synthetic construct
  source 1..9: note = Seed: VVGACGVGK (KRAS G12C)
IVGVCRVGV

SEQ ID NO: 5887 - protein, 9 aa, synthetic construct
  source 1..9: note = Seed: VVGACGVGK (KRAS G12C)
IVGVCRVGY

SEQ ID NO: 5888 - protein, 9 aa, synthetic construct
  source 1..9: note = Seed: VVGACGVGK (KRAS G12C)
IVGVCSVGR

SEQ ID NO: 5889 - protein, 9 aa, synthetic construct
  source 1..9: note = Seed: VVGACGVGK (KRAS G12C)
IVGVCTVGR

SEQ ID NO: 5890 - protein, 9 aa, synthetic construct
  source 1..9: note = Seed: VVGACGVGK (KRAS G12C)
IVGWCAVGR

SEQ ID NO: 5891 - protein, 9 aa, synthetic construct
  source 1..9: note = Seed: VVGACGVGK (KRAS G12C)
IVGWCHVGR

SEQ ID NO: 5892 - protein, 9 aa, synthetic construct
  source 1..9: note = Seed: VVGACGVGK (KRAS G12C)
IVGWCHVGY

SEQ ID NO: 5893 - protein, 9 aa, synthetic construct
  source 1..9: note = Seed: VVGACGVGK (KRAS G12C)
IVGWCIVGR

SEQ ID NO: 5894 - protein, 9 aa, synthetic construct
  source 1..9: note = Seed: VVGACGVGK (KRAS G12C)
IVGWCKVGA

SEQ ID NO: 5895 - protein, 9 aa, synthetic construct
  source 1..9: note = Seed: VVGACGVGK (KRAS G12C)
IVGWCKVGF

SEQ ID NO: 5896 - protein, 9 aa, synthetic construct
  source 1..9: note = Seed: VVGACGVGK (KRAS G12C)
IVGWCKVGH

SEQ ID NO: 5897 - protein, 9 aa, synthetic construct
  source 1..9: note = Seed: VVGACGVGK (KRAS G12C)
IVGWCKVGI

SEQ ID NO: 5898 - protein, 9 aa, synthetic construct
  source 1..9: note = Seed: VVGACGVGK (KRAS G12C)
IVGWCKVGK

SEQ ID NO: 5899 - protein, 9 aa, synthetic construct
  source 1..9: note = Seed: VVGACGVGK (KRAS G12C)
IVGWCKVGL

SEQ ID NO: 5900 - protein, 9 aa, synthetic construct
  source 1..9: note = Seed: VVGACGVGK (KRAS G12C)
IVGWCKVGM

SEQ ID NO: 5901 - protein, 9 aa, synthetic construct
  source 1..9: note = Seed: VVGACGVGK (KRAS G12C)
IVGWCKVGR

SEQ ID NO: 5902 - protein, 9 aa, synthetic construct
  source 1..9: note = Seed: VVGACGVGK (KRAS G12C)
IVGWCKVGS

SEQ ID NO: 5903 - protein, 9 aa, synthetic construct
  source 1..9: note = Seed: VVGACGVGK (KRAS G12C)
IVGWCKVGV

SEQ ID NO: 5904 - protein, 9 aa, synthetic construct
  source 1..9: note = Seed: VVGACGVGK (KRAS G12C)
IVGWCKVGY

SEQ ID NO: 5905 - protein, 9 aa, synthetic construct
  source 1..9: note = Seed: VVGACGVGK (KRAS G12C)
IVGWCNVGR

SEQ ID NO: 5906 - protein, 9 aa, synthetic construct
  source 1..9: note = Seed: VVGACGVGK (KRAS G12C)
IVGWCPVGR

SEQ ID NO: 5907 - protein, 9 aa, synthetic construct
  source 1..9: note = Seed: VVGACGVGK (KRAS G12C)
IVGWCRVGA

SEQ ID NO: 5908 - protein, 9 aa, synthetic construct
  source 1..9: note = Seed: VVGACGVGK (KRAS G12C)
IVGWCRVGF

SEQ ID NO: 5909 - protein, 9 aa, synthetic construct
  source 1..9: note = Seed: VVGACGVGK (KRAS G12C)
IVGWCRVGG

SEQ ID NO: 5910 - protein, 9 aa, synthetic construct
  source 1..9: note = Seed: VVGACGVGK (KRAS G12C)
IVGWCRVGH

SEQ ID NO: 5911 - protein, 9 aa, synthetic construct
  source 1..9: note = Seed: VVGACGVGK (KRAS G12C)
IVGWCRVGI

SEQ ID NO: 5912 - protein, 9 aa, synthetic construct
  source 1..9: note = Seed: VVGACGVGK (KRAS G12C)
IVGWCRVGK

SEQ ID NO: 5913 - protein, 9 aa, synthetic construct
  source 1..9: note = Seed: VVGACGVGK (KRAS G12C)
IVGWCRVGM

SEQ ID NO: 5914 - protein, 9 aa, synthetic construct
  source 1..9: note = Seed: VVGACGVGK (KRAS G12C)
IVGWCRVGQ

SEQ ID NO: 5915 - protein, 9 aa, synthetic construct
  source 1..9: note = Seed: VVGACGVGK (KRAS G12C)
IVGWCRVGR

SEQ ID NO: 5916 - protein, 9 aa, synthetic construct
  source 1..9: note = Seed: VVGACGVGK (KRAS G12C)
IVGWCRVGS

SEQ ID NO: 5917 - protein, 9 aa, synthetic construct
  source 1..9: note = Seed: VVGACGVGK (KRAS G12C)
IVGWCRVGV

SEQ ID NO: 5918 - protein, 9 aa, synthetic construct
  source 1..9: note = Seed: VVGACGVGK (KRAS G12C)
IVGWCRVGY

SEQ ID NO: 5919 - protein, 9 aa, synthetic construct
  source 1..9: note = Seed: VVGACGVGK (KRAS G12C)
IVGWCSVGR

SEQ ID NO: 5920 - protein, 9 aa, synthetic construct
  source 1..9: note = Seed: VVGACGVGK (KRAS G12C)
IVGWCTVGR

SEQ ID NO: 5921 - protein, 9 aa, synthetic construct
  source 1..9: note = Seed: VVGACGVGK (KRAS G12C)
IVGWCVVGR

SEQ ID NO: 5922 - protein, 9 aa, synthetic construct
  source 1..9: note = Seed: VVGACGVGK (KRAS G12C)
IVGYCAVGR

SEQ ID NO: 5923 - protein, 9 aa, synthetic construct
  source 1..9: note = Seed: VVGACGVGK (KRAS G12C)
IVGYCKVGH

SEQ ID NO: 5924 - protein, 9 aa, synthetic construct
  source 1..9: note = Seed: VVGACGVGK (KRAS G12C)
IVGYCKVGK

SEQ ID NO: 5925 - protein, 9 aa, synthetic construct
  source 1..9: note = Seed: VVGACGVGK (KRAS G12C)
IVGYCKVGR

SEQ ID NO: 5926 - protein, 9 aa, synthetic construct
  source 1..9: note = Seed: VVGACGVGK (KRAS G12C)
IVGYCKVGY

SEQ ID NO: 5927 - protein, 9 aa, synthetic construct
  source 1..9: note = Seed: VVGACGVGK (KRAS G12C)
IVGYCPVGR

SEQ ID NO: 5928 - protein, 9 aa, synthetic construct
  source 1..9: note = Seed: VVGACGVGK (KRAS G12C)
IVGYCRVGH

SEQ ID NO: 5929 - protein, 9 aa, synthetic construct
  source 1..9: note = Seed: VVGACGVGK (KRAS G12C)
IVGYCRVGK

SEQ ID NO: 5930 - protein, 9 aa, synthetic construct
  source 1..9: note = Seed: VVGACGVGK (KRAS G12C)
IVGYCRVGR

SEQ ID NO: 5931 - protein, 9 aa, synthetic construct
  source 1..9: note = Seed: VVGACGVGK (KRAS G12C)
IVGYCRVGY

SEQ ID NO: 5932 - protein, 9 aa, synthetic construct
  source 1..9: note = Seed: VVGACGVGK (KRAS G12C)
LVGACKVGA

SEQ ID NO: 5933 - protein, 9 aa, synthetic construct
  source 1..9: note = Seed: VVGACGVGK (KRAS G12C)
LVGACKVGG

SEQ ID NO: 5934 - protein, 9 aa, synthetic construct
  source 1..9: note = Seed: VVGACGVGK (KRAS G12C)
LVGACKVGH

SEQ ID NO: 5935 - protein, 9 aa, synthetic construct
  source 1..9: note = Seed: VVGACGVGK (KRAS G12C)
LVGACKVGK

SEQ ID NO: 5936 - protein, 9 aa, synthetic construct
  source 1..9: note = Seed: VVGACGVGK (KRAS G12C)
LVGACKVGQ

SEQ ID NO: 5937 - protein, 9 aa, synthetic construct
  source 1..9: note = Seed: VVGACGVGK (KRAS G12C)
LVGACKVGR

SEQ ID NO: 5938 - protein, 9 aa, synthetic construct
  source 1..9: note = Seed: VVGACGVGK (KRAS G12C)
LVGACKVGS

SEQ ID NO: 5939 - protein, 9 aa, synthetic construct
  source 1..9: note = Seed: VVGACGVGK (KRAS G12C)
LVGACKVGY

SEQ ID NO: 5940 - protein, 9 aa, synthetic construct
  source 1..9: note = Seed: VVGACGVGK (KRAS G12C)
LVGACPVGR

SEQ ID NO: 5941 - protein, 9 aa, synthetic construct
  source 1..9: note = Seed: VVGACGVGK (KRAS G12C)
LVGACRVGA

SEQ ID NO: 5942 - protein, 9 aa, synthetic construct
  source 1..9: note = Seed: VVGACGVGK (KRAS G12C)
LVGACRVGF

SEQ ID NO: 5943 - protein, 9 aa, synthetic construct
  source 1..9: note = Seed: VVGACGVGK (KRAS G12C)
LVGACRVGG

SEQ ID NO: 5944 - protein, 9 aa, synthetic construct
  source 1..9: note = Seed: VVGACGVGK (KRAS G12C)
LVGACRVGH

SEQ ID NO: 5945 - protein, 9 aa, synthetic construct
  source 1..9: note = Seed: VVGACGVGK (KRAS G12C)
LVGACRVGI

SEQ ID NO: 5946 - protein, 9 aa, synthetic construct
  source 1..9: note = Seed: VVGACGVGK (KRAS G12C)
LVGACRVGK

SEQ ID NO: 5947 - protein, 9 aa, synthetic construct
  source 1..9: note = Seed: VVGACGVGK (KRAS G12C)
LVGACRVGM

SEQ ID NO: 5948 - protein, 9 aa, synthetic construct
  source 1..9: note = Seed: VVGACGVGK (KRAS G12C)
LVGACRVGQ

SEQ ID NO: 5949 - protein, 9 aa, synthetic construct
  source 1..9: note = Seed: VVGACGVGK (KRAS G12C)
LVGACRVGR

SEQ ID NO: 5950 - protein, 9 aa, synthetic construct
  source 1..9: note = Seed: VVGACGVGK (KRAS G12C)
LVGACRVGS

SEQ ID NO: 5951 - protein, 9 aa, synthetic construct
  source 1..9: note = Seed: VVGACGVGK (KRAS G12C)
LVGACRVGT

SEQ ID NO: 5952 - protein, 9 aa, synthetic construct
  source 1..9: note = Seed: VVGACGVGK (KRAS G12C)
LVGACRVGV

SEQ ID NO: 5953 - protein, 9 aa, synthetic construct
  source 1..9: note = Seed: VVGACGVGK (KRAS G12C)
LVGACRVGY

SEQ ID NO: 5954 - protein, 9 aa, synthetic construct
  source 1..9: note = Seed: VVGACGVGK (KRAS G12C)
LVGCCRVGR

SEQ ID NO: 5955 - protein, 9 aa, synthetic construct
  source 1..9: note = Seed: VVGACGVGK (KRAS G12C)
LVGFCAVGR

SEQ ID NO: 5956 - protein, 9 aa, synthetic construct
  source 1..9: note = Seed: VVGACGVGK (KRAS G12C)
LVGFCKVGA

SEQ ID NO: 5957 - protein, 9 aa, synthetic construct
  source 1..9: note = Seed: VVGACGVGK (KRAS G12C)
LVGFCKVGG

SEQ ID NO: 5958 - protein, 9 aa, synthetic construct
  source 1..9: note = Seed: VVGACGVGK (KRAS G12C)
LVGFCKVGH

SEQ ID NO: 5959 - protein, 9 aa, synthetic construct
  source 1..9: note = Seed: VVGACGVGK (KRAS G12C)
LVGFCKVGK

SEQ ID NO: 5960 - protein, 9 aa, synthetic construct
  source 1..9: note = Seed: VVGACGVGK (KRAS G12C)
LVGFCKVGQ

SEQ ID NO: 5961 - protein, 9 aa, synthetic construct
  source 1..9: note = Seed: VVGACGVGK (KRAS G12C)
LVGFCKVGR

SEQ ID NO: 5962 - protein, 9 aa, synthetic construct
  source 1..9: note = Seed: VVGACGVGK (KRAS G12C)
LVGFCKVGS

SEQ ID NO: 5963 - protein, 9 aa, synthetic construct
  source 1..9: note = Seed: VVGACGVGK (KRAS G12C)
LVGFCKVGY

SEQ ID NO: 5964 - protein, 9 aa, synthetic construct
  source 1..9: note = Seed: VVGACGVGK (KRAS G12C)
LVGFCPVGR

SEQ ID NO: 5965 - protein, 9 aa, synthetic construct
  source 1..9: note = Seed: VVGACGVGK (KRAS G12C)
LVGFCRVGA

SEQ ID NO: 5966 - protein, 9 aa, synthetic construct
  source 1..9: note = Seed: VVGACGVGK (KRAS G12C)
LVGFCRVGG

SEQ ID NO: 5967 - protein, 9 aa, synthetic construct
  source 1..9: note = Seed: VVGACGVGK (KRAS G12C)
LVGFCRVGH

SEQ ID NO: 5968 - protein, 9 aa, synthetic construct
  source 1..9: note = Seed: VVGACGVGK (KRAS G12C)
LVGFCRVGK

SEQ ID NO: 5969 - protein, 9 aa, synthetic construct
  source 1..9: note = Seed: VVGACGVGK (KRAS G12C)
LVGFCRVGQ

SEQ ID NO: 5970 - protein, 9 aa, synthetic construct
  source 1..9: note = Seed: VVGACGVGK (KRAS G12C)
LVGFCRVGR

SEQ ID NO: 5971 - protein, 9 aa, synthetic construct
  source 1..9: note = Seed: VVGACGVGK (KRAS G12C)
LVGFCRVGS

SEQ ID NO: 5972 - protein, 9 aa, synthetic construct
  source 1..9: note = Seed: VVGACGVGK (KRAS G12C)
LVGFCRVGY

SEQ ID NO: 5973 - protein, 9 aa, synthetic construct
  source 1..9: note = Seed: VVGACGVGK (KRAS G12C)
LVGGCRVGR

SEQ ID NO: 5974 - protein, 9 aa, synthetic construct
  source 1..9: note = Seed: VVGACGVGK (KRAS G12C)
LVGHCAVGR

SEQ ID NO: 5975 - protein, 9 aa, synthetic construct
  source 1..9: note = Seed: VVGACGVGK (KRAS G12C)
LVGHCAVGY

SEQ ID NO: 5976 - protein, 9 aa, synthetic construct
  source 1..9: note = Seed: VVGACGVGK (KRAS G12C)
LVGHCGVGR

SEQ ID NO: 5977 - protein, 9 aa, synthetic construct
  source 1..9: note = Seed: VVGACGVGK (KRAS G12C)
LVGHCHVGR

SEQ ID NO: 5978 - protein, 9 aa, synthetic construct
  source 1..9: note = Seed: VVGACGVGK (KRAS G12C)
LVGHCIVGR

SEQ ID NO: 5979 - protein, 9 aa, synthetic construct
  source 1..9: note = Seed: VVGACGVGK (KRAS G12C)
LVGHCKVGF

SEQ ID NO: 5980 - protein, 9 aa, synthetic construct
  source 1..9: note = Seed: VVGACGVGK (KRAS G12C)
LVGHCKVGH

SEQ ID NO: 5981 - protein, 9 aa, synthetic construct
  source 1..9: note = Seed: VVGACGVGK (KRAS G12C)
LVGHCKVGI

SEQ ID NO: 5982 - protein, 9 aa, synthetic construct
  source 1..9: note = Seed: VVGACGVGK (KRAS G12C)
LVGHCKVGK

SEQ ID NO: 5983 - protein, 9 aa, synthetic construct
  source 1..9: note = Seed: VVGACGVGK (KRAS G12C)
LVGHCKVGL

SEQ ID NO: 5984 - protein, 9 aa, synthetic construct
  source 1..9: note = Seed: VVGACGVGK (KRAS G12C)
LVGHCKVGM

SEQ ID NO: 5985 - protein, 9 aa, synthetic construct
  source 1..9: note = Seed: VVGACGVGK (KRAS G12C)
LVGHCKVGR

SEQ ID NO: 5986 - protein, 9 aa, synthetic construct
  source 1..9: note = Seed: VVGACGVGK (KRAS G12C)
LVGHCKVGV

SEQ ID NO: 5987 - protein, 9 aa, synthetic construct
  source 1..9: note = Seed: VVGACGVGK (KRAS G12C)
LVGHCKVGY

SEQ ID NO: 5988 - protein, 9 aa, synthetic construct
  source 1..9: note = Seed: VVGACGVGK (KRAS G12C)
LVGHCNVGR

SEQ ID NO: 5989 - protein, 9 aa, synthetic construct
  source 1..9: note = Seed: VVGACGVGK (KRAS G12C)
LVGHCNVGY

SEQ ID NO: 5990 - protein, 9 aa, synthetic construct
  source 1..9: note = Seed: VVGACGVGK (KRAS G12C)
LVGHCPVGK

SEQ ID NO: 5991 - protein, 9 aa, synthetic construct
  source 1..9: note = Seed: VVGACGVGK (KRAS G12C)
LVGHCPVGR

SEQ ID NO: 5992 - protein, 9 aa, synthetic construct
  source 1..9: note = Seed: VVGACGVGK (KRAS G12C)
LVGHCPVGY

SEQ ID NO: 5993 - protein, 9 aa, synthetic construct
  source 1..9: note = Seed: VVGACGVGK (KRAS G12C)
LVGHCQVGR

SEQ ID NO: 5994 - protein, 9 aa, synthetic construct
  source 1..9: note = Seed: VVGACGVGK (KRAS G12C)
LVGHCRVGA

SEQ ID NO: 5995 - protein, 9 aa, synthetic construct
  source 1..9: note = Seed: VVGACGVGK (KRAS G12C)
LVGHCRVGF

SEQ ID NO: 5996 - protein, 9 aa, synthetic construct
  source 1..9: note = Seed: VVGACGVGK (KRAS G12C)
LVGHCRVGH

SEQ ID NO: 5997 - protein, 9 aa, synthetic construct
  source 1..9: note = Seed: VVGACGVGK (KRAS G12C)
LVGHCRVGI

SEQ ID NO: 5998 - protein, 9 aa, synthetic construct
  source 1..9: note = Seed: VVGACGVGK (KRAS G12C)
LVGHCRVGK

SEQ ID NO: 5999 - protein, 9 aa, synthetic construct
  source 1..9: note = Seed: VVGACGVGK (KRAS G12C)
LVGHCRVGL

SEQ ID NO: 6000 - protein, 9 aa, synthetic construct
  source 1..9: note = Seed: VVGACGVGK (KRAS G12C)
LVGHCRVGM

SEQ ID NO: 6001 - protein, 9 aa, synthetic construct
  source 1..9: note = Seed: VVGACGVGK (KRAS G12C)
LVGHCRVGQ

SEQ ID NO: 6002 - protein, 9 aa, synthetic construct
  source 1..9: note = Seed: VVGACGVGK (KRAS G12C)
LVGHCRVGR

SEQ ID NO: 6003 - protein, 9 aa, synthetic construct
  source 1..9: note = Seed: VVGACGVGK (KRAS G12C)
LVGHCRVGS

SEQ ID NO: 6004 - protein, 9 aa, synthetic construct
  source 1..9: note = Seed: VVGACGVGK (KRAS G12C)
LVGHCRVGV

SEQ ID NO: 6005 - protein, 9 aa, synthetic construct
  source 1..9: note = Seed: VVGACGVGK (KRAS G12C)
LVGHCRVGW

SEQ ID NO: 6006 - protein, 9 aa, synthetic construct
  source 1..9: note = Seed: VVGACGVGK (KRAS G12C)
LVGHCRVGY

SEQ ID NO: 6007 - protein, 9 aa, synthetic construct
  source 1..9: note = Seed: VVGACGVGK (KRAS G12C)
LVGHCSVGR

SEQ ID NO: 6008 - protein, 9 aa, synthetic construct
  source 1..9: note = Seed: VVGACGVGK (KRAS G12C)
LVGHCSVGY

SEQ ID NO: 6009 - protein, 9 aa, synthetic construct
  source 1..9: note = Seed: VVGACGVGK (KRAS G12C)
LVGHCTVGR

SEQ ID NO: 6010 - protein, 9 aa, synthetic construct
  source 1..9: note = Seed: VVGACGVGK (KRAS G12C)
LVGHCVVGR

SEQ ID NO: 6011 - protein, 9 aa, synthetic construct
  source 1..9: note = Seed: VVGACGVGK (KRAS G12C)
LVGICAVGR

SEQ ID NO: 6012 - protein, 9 aa, synthetic construct
  source 1..9: note = Seed: VVGACGVGK (KRAS G12C)
LVGICKVGA

SEQ ID NO: 6013 - protein, 9 aa, synthetic construct
  source 1..9: note = Seed: VVGACGVGK (KRAS G12C)
LVGICKVGG

SEQ ID NO: 6014 - protein, 9 aa, synthetic construct
  source 1..9: note = Seed: VVGACGVGK (KRAS G12C)
LVGICKVGH

SEQ ID NO: 6015 - protein, 9 aa, synthetic construct
  source 1..9: note = Seed: VVGACGVGK (KRAS G12C)
LVGICKVGK

SEQ ID NO: 6016 - protein, 9 aa, synthetic construct
  source 1..9: note = Seed: VVGACGVGK (KRAS G12C)
LVGICKVGM

SEQ ID NO: 6017 - protein, 9 aa, synthetic construct
  source 1..9: note = Seed: VVGACGVGK (KRAS G12C)
LVGICKVGN

SEQ ID NO: 6018 - protein, 9 aa, synthetic construct
  source 1..9: note = Seed: VVGACGVGK (KRAS G12C)
LVGICKVGQ

SEQ ID NO: 6019 - protein, 9 aa, synthetic construct
  source 1..9: note = Seed: VVGACGVGK (KRAS G12C)
LVGICKVGR

SEQ ID NO: 6020 - protein, 9 aa, synthetic construct
  source 1..9: note = Seed: VVGACGVGK (KRAS G12C)
LVGICKVGS

SEQ ID NO: 6021 - protein, 9 aa, synthetic construct
  source 1..9: note = Seed: VVGACGVGK (KRAS G12C)
LVGICKVGT

SEQ ID NO: 6022 - protein, 9 aa, synthetic construct
  source 1..9: note = Seed: VVGACGVGK (KRAS G12C)
LVGICKVGV

SEQ ID NO: 6023 - protein, 9 aa, synthetic construct
  source 1..9: note = Seed: VVGACGVGK (KRAS G12C)
LVGICKVGY

SEQ ID NO: 6024 - protein, 9 aa, synthetic construct
  source 1..9: note = Seed: VVGACGVGK (KRAS G12C)
LVGICPVGR

SEQ ID NO: 6025 - protein, 9 aa, synthetic construct
  source 1..9: note = Seed: VVGACGVGK (KRAS G12C)
LVGICRVGA

SEQ ID NO: 6026 - protein, 9 aa, synthetic construct
  source 1..9: note = Seed: VVGACGVGK (KRAS G12C)
LVGICRVGG

SEQ ID NO: 6027 - protein, 9 aa, synthetic construct
  source 1..9: note = Seed: VVGACGVGK (KRAS G12C)
LVGICRVGH

SEQ ID NO: 6028 - protein, 9 aa, synthetic construct
  source 1..9: note = Seed: VVGACGVGK (KRAS G12C)
LVGICRVGK

SEQ ID NO: 6029 - protein, 9 aa, synthetic construct
  source 1..9: note = Seed: VVGACGVGK (KRAS G12C)
LVGICRVGM

SEQ ID NO: 6030 - protein, 9 aa, synthetic construct
  source 1..9: note = Seed: VVGACGVGK (KRAS G12C)
LVGICRVGN

SEQ ID NO: 6031 - protein, 9 aa, synthetic construct
  source 1..9: note = Seed: VVGACGVGK (KRAS G12C)
LVGICRVGP

SEQ ID NO: 6032 - protein, 9 aa, synthetic construct
  source 1..9: note = Seed: VVGACGVGK (KRAS G12C)
LVGICRVGQ

SEQ ID NO: 6033 - protein, 9 aa, synthetic construct
  source 1..9: note = Seed: VVGACGVGK (KRAS G12C)
LVGICRVGR

SEQ ID NO: 6034 - protein, 9 aa, synthetic construct
  source 1..9: note = Seed: VVGACGVGK (KRAS G12C)
LVGICRVGS

SEQ ID NO: 6035 - protein, 9 aa, synthetic construct
  source 1..9: note = Seed: VVGACGVGK (KRAS G12C)
LVGICRVGT

SEQ ID NO: 6036 - protein, 9 aa, synthetic construct
  source 1..9: note = Seed: VVGACGVGK (KRAS G12C)
LVGICRVGV

SEQ ID NO: 6037 - protein, 9 aa, synthetic construct
  source 1..9: note = Seed: VVGACGVGK (KRAS G12C)
LVGICRVGY

SEQ ID NO: 6038 - protein, 9 aa, synthetic construct
  source 1..9: note = Seed: VVGACGVGK (KRAS G12C)
LVGICSVGR

SEQ ID NO: 6039 - protein, 9 aa, synthetic construct
  source 1..9: note = Seed: VVGACGVGK (KRAS G12C)
LVGICTVGR

SEQ ID NO: 6040 - protein, 9 aa, synthetic construct
  source 1..9: note = Seed: VVGACGVGK (KRAS G12C)
LVGKCAVGR

SEQ ID NO: 6041 - protein, 9 aa, synthetic construct
  source 1..9: note = Seed: VVGACGVGK (KRAS G12C)
LVGKCHVGR

SEQ ID NO: 6042 - protein, 9 aa, synthetic construct
  source 1..9: note = Seed: VVGACGVGK (KRAS G12C)
LVGKCHVGY

SEQ ID NO: 6043 - protein, 9 aa, synthetic construct
  source 1..9: note = Seed: VVGACGVGK (KRAS G12C)
LVGKCKVGA

SEQ ID NO: 6044 - protein, 9 aa, synthetic construct
  source 1..9: note = Seed: VVGACGVGK (KRAS G12C)
LVGKCKVGE

SEQ ID NO: 6045 - protein, 9 aa, synthetic construct
  source 1..9: note = Seed: VVGACGVGK (KRAS G12C)
LVGKCKVGF

SEQ ID NO: 6046 - protein, 9 aa, synthetic construct
  source 1..9: note = Seed: VVGACGVGK (KRAS G12C)
LVGKCKVGG

SEQ ID NO: 6047 - protein, 9 aa, synthetic construct
  source 1..9: note = Seed: VVGACGVGK (KRAS G12C)
LVGKCKVGH

SEQ ID NO: 6048 - protein, 9 aa, synthetic construct
  source 1..9: note = Seed: VVGACGVGK (KRAS G12C)
LVGKCKVGI

SEQ ID NO: 6049 - protein, 9 aa, synthetic construct
  source 1..9: note = Seed: VVGACGVGK (KRAS G12C)
LVGKCKVGK

SEQ ID NO: 6050 - protein, 9 aa, synthetic construct
  source 1..9: note = Seed: VVGACGVGK (KRAS G12C)
LVGKCKVGL

SEQ ID NO: 6051 - protein, 9 aa, synthetic construct
  source 1..9: note = Seed: VVGACGVGK (KRAS G12C)
LVGKCKVGM

SEQ ID NO: 6052 - protein, 9 aa, synthetic construct
  source 1..9: note = Seed: VVGACGVGK (KRAS G12C)
LVGKCKVGQ

SEQ ID NO: 6053 - protein, 9 aa, synthetic construct
  source 1..9: note = Seed: VVGACGVGK (KRAS G12C)
LVGKCKVGR

SEQ ID NO: 6054 - protein, 9 aa, synthetic construct
  source 1..9: note = Seed: VVGACGVGK (KRAS G12C)
LVGKCKVGS

SEQ ID NO: 6055 - protein, 9 aa, synthetic construct
  source 1..9: note = Seed: VVGACGVGK (KRAS G12C)
LVGKCKVGT

SEQ ID NO: 6056 - protein, 9 aa, synthetic construct
  source 1..9: note = Seed: VVGACGVGK (KRAS G12C)
LVGKCKVGV

SEQ ID NO: 6057 - protein, 9 aa, synthetic construct
  source 1..9: note = Seed: VVGACGVGK (KRAS G12C)
LVGKCKVGW

SEQ ID NO: 6058 - protein, 9 aa, synthetic construct
  source 1..9: note = Seed: VVGACGVGK (KRAS G12C)
LVGKCKVGY

SEQ ID NO: 6059 - protein, 9 aa, synthetic construct
  source 1..9: note = Seed: VVGACGVGK (KRAS G12C)
LVGKCNVGR

SEQ ID NO: 6060 - protein, 9 aa, synthetic construct
  source 1..9: note = Seed: VVGACGVGK (KRAS G12C)
LVGKCPVGR

SEQ ID NO: 6061 - protein, 9 aa, synthetic construct
  source 1..9: note = Seed: VVGACGVGK (KRAS G12C)
LVGKCPVGY

SEQ ID NO: 6062 - protein, 9 aa, synthetic construct
  source 1..9: note = Seed: VVGACGVGK (KRAS G12C)
LVGKCQVGR

SEQ ID NO: 6063 - protein, 9 aa, synthetic construct
  source 1..9: note = Seed: VVGACGVGK (KRAS G12C)
LVGKCRVGA

SEQ ID NO: 6064 - protein, 9 aa, synthetic construct
  source 1..9: note = Seed: VVGACGVGK (KRAS G12C)
LVGKCRVGE

SEQ ID NO: 6065 - protein, 9 aa, synthetic construct
  source 1..9: note = Seed: VVGACGVGK (KRAS G12C)
LVGKCRVGF

SEQ ID NO: 6066 - protein, 9 aa, synthetic construct
  source 1..9: note = Seed: VVGACGVGK (KRAS G12C)
LVGKCRVGG

SEQ ID NO: 6067 - protein, 9 aa, synthetic construct
  source 1..9: note = Seed: VVGACGVGK (KRAS G12C)
LVGKCRVGH

SEQ ID NO: 6068 - protein, 9 aa, synthetic construct
  source 1..9: note = Seed: VVGACGVGK (KRAS G12C)
LVGKCRVGI

SEQ ID NO: 6069 - protein, 9 aa, synthetic construct
  source 1..9: note = Seed: VVGACGVGK (KRAS G12C)
LVGKCRVGK

SEQ ID NO: 6070 - protein, 9 aa, synthetic construct
  source 1..9: note = Seed: VVGACGVGK (KRAS G12C)
LVGKCRVGL

SEQ ID NO: 6071 - protein, 9 aa, synthetic construct
  source 1..9: note = Seed: VVGACGVGK (KRAS G12C)
LVGKCRVGM

SEQ ID NO: 6072 - protein, 9 aa, synthetic construct
  source 1..9: note = Seed: VVGACGVGK (KRAS G12C)
LVGKCRVGN

SEQ ID NO: 6073 - protein, 9 aa, synthetic construct
  source 1..9: note = Seed: VVGACGVGK (KRAS G12C)
LVGKCRVGP

SEQ ID NO: 6074 - protein, 9 aa, synthetic construct
  source 1..9: note = Seed: VVGACGVGK (KRAS G12C)
LVGKCRVGQ

SEQ ID NO: 6075 - protein, 9 aa, synthetic construct
  source 1..9: note = Seed: VVGACGVGK (KRAS G12C)
LVGKCRVGR

SEQ ID NO: 6076 - protein, 9 aa, synthetic construct
  source 1..9: note = Seed: VVGACGVGK (KRAS G12C)
LVGKCRVGS

SEQ ID NO: 6077 - protein, 9 aa, synthetic construct
  source 1..9: note = Seed: VVGACGVGK (KRAS G12C)
LVGKCRVGT

SEQ ID NO: 6078 - protein, 9 aa, synthetic construct
  source 1..9: note = Seed: VVGACGVGK (KRAS G12C)
LVGKCRVGV

SEQ ID NO: 6079 - protein, 9 aa, synthetic construct
  source 1..9: note = Seed: VVGACGVGK (KRAS G12C)
LVGKCRVGY

SEQ ID NO: 6080 - protein, 9 aa, synthetic construct
  source 1..9: note = Seed: VVGACGVGK (KRAS G12C)
LVGKCSVGR

SEQ ID NO: 6081 - protein, 9 aa, synthetic construct
  source 1..9: note = Seed: VVGACGVGK (KRAS G12C)
LVGKCTVGR

SEQ ID NO: 6082 - protein, 9 aa, synthetic construct
  source 1..9: note = Seed: VVGACGVGK (KRAS G12C)
LVGKCVVGR

SEQ ID NO: 6083 - protein, 9 aa, synthetic construct
  source 1..9: note = Seed: VVGACGVGK (KRAS G12C)
LVGLCKVGA

SEQ ID NO: 6084 - protein, 9 aa, synthetic construct
  source 1..9: note = Seed: VVGACGVGK (KRAS G12C)
LVGLCKVGG

SEQ ID NO: 6085 - protein, 9 aa, synthetic construct
  source 1..9: note = Seed: VVGACGVGK (KRAS G12C)
LVGLCKVGH

SEQ ID NO: 6086 - protein, 9 aa, synthetic construct
  source 1..9: note = Seed: VVGACGVGK (KRAS G12C)
LVGLCKVGI

SEQ ID NO: 6087 - protein, 9 aa, synthetic construct
  source 1..9: note = Seed: VVGACGVGK (KRAS G12C)
LVGLCKVGK

SEQ ID NO: 6088 - protein, 9 aa, synthetic construct
  source 1..9: note = Seed: VVGACGVGK (KRAS G12C)
LVGLCKVGM

SEQ ID NO: 6089 - protein, 9 aa, synthetic construct
  source 1..9: note = Seed: VVGACGVGK (KRAS G12C)
LVGLCKVGN

SEQ ID NO: 6090 - protein, 9 aa, synthetic construct
  source 1..9: note = Seed: VVGACGVGK (KRAS G12C)
LVGLCKVGQ

SEQ ID NO: 6091 - protein, 9 aa, synthetic construct
  source 1..9: note = Seed: VVGACGVGK (KRAS G12C)
LVGLCKVGR

SEQ ID NO: 6092 - protein, 9 aa, synthetic construct
  source 1..9: note = Seed: VVGACGVGK (KRAS G12C)
LVGLCKVGS

SEQ ID NO: 6093 - protein, 9 aa, synthetic construct
  source 1..9: note = Seed: VVGACGVGK (KRAS G12C)
LVGLCKVGT

SEQ ID NO: 6094 - protein, 9 aa, synthetic construct
  source 1..9: note = Seed: VVGACGVGK (KRAS G12C)
LVGLCKVGV

SEQ ID NO: 6095 - protein, 9 aa, synthetic construct
  source 1..9: note = Seed: VVGACGVGK (KRAS G12C)
LVGLCKVGY

SEQ ID NO: 6096 - protein, 9 aa, synthetic construct
  source 1..9: note = Seed: VVGACGVGK (KRAS G12C)
LVGLCRVGA

SEQ ID NO: 6097 - protein, 9 aa, synthetic construct
  source 1..9: note = Seed: VVGACGVGK (KRAS G12C)
LVGLCRVGG

SEQ ID NO: 6098 - protein, 9 aa, synthetic construct
  source 1..9: note = Seed: VVGACGVGK (KRAS G12C)
LVGLCRVGH

SEQ ID NO: 6099 - protein, 9 aa, synthetic construct
  source 1..9: note = Seed: VVGACGVGK (KRAS G12C)
LVGLCRVGI

SEQ ID NO: 6100 - protein, 9 aa, synthetic construct
  source 1..9: note = Seed: VVGACGVGK (KRAS G12C)
LVGLCRVGK

SEQ ID NO: 6101 - protein, 9 aa, synthetic construct
  source 1..9: note = Seed: VVGACGVGK (KRAS G12C)
LVGLCRVGL

SEQ ID NO: 6102 - protein, 9 aa, synthetic construct
  source 1..9: note = Seed: VVGACGVGK (KRAS G12C)
LVGLCRVGM

SEQ ID NO: 6103 - protein, 9 aa, synthetic construct
  source 1..9: note = Seed: VVGACGVGK (KRAS G12C)
LVGLCRVGN

SEQ ID NO: 6104 - protein, 9 aa, synthetic construct
  source 1..9: note = Seed: VVGACGVGK (KRAS G12C)
LVGLCRVGP

SEQ ID NO: 6105 - protein, 9 aa, synthetic construct
  source 1..9: note = Seed: VVGACGVGK (KRAS G12C)
LVGLCRVGQ

SEQ ID NO: 6106 - protein, 9 aa, synthetic construct
  source 1..9: note = Seed: VVGACGVGK (KRAS G12C)
LVGLCRVGR

SEQ ID NO: 6107 - protein, 9 aa, synthetic construct
  source 1..9: note = Seed: VVGACGVGK (KRAS G12C)
LVGLCRVGS

SEQ ID NO: 6108 - protein, 9 aa, synthetic construct
  source 1..9: note = Seed: VVGACGVGK (KRAS G12C)
LVGLCRVGT

SEQ ID NO: 6109 - protein, 9 aa, synthetic construct
  source 1..9: note = Seed: VVGACGVGK (KRAS G12C)
LVGLCRVGV

SEQ ID NO: 6110 - protein, 9 aa, synthetic construct
  source 1..9: note = Seed: VVGACGVGK (KRAS G12C)
LVGLCRVGY

SEQ ID NO: 6111 - protein, 9 aa, synthetic construct
  source 1..9: note = Seed: VVGACGVGK (KRAS G12C)
LVGMCKVGA

SEQ ID NO: 6112 - protein, 9 aa, synthetic construct
  source 1..9: note = Seed: VVGACGVGK (KRAS G12C)
LVGMCKVGG

SEQ ID NO: 6113 - protein, 9 aa, synthetic construct
  source 1..9: note = Seed: VVGACGVGK (KRAS G12C)
LVGMCKVGH

SEQ ID NO: 6114 - protein, 9 aa, synthetic construct
  source 1..9: note = Seed: VVGACGVGK (KRAS G12C)
LVGMCKVGI

SEQ ID NO: 6115 - protein, 9 aa, synthetic construct
  source 1..9: note = Seed: VVGACGVGK (KRAS G12C)
LVGMCKVGK

SEQ ID NO: 6116 - protein, 9 aa, synthetic construct
  source 1..9: note = Seed: VVGACGVGK (KRAS G12C)
LVGMCKVGL

SEQ ID NO: 6117 - protein, 9 aa, synthetic construct
  source 1..9: note = Seed: VVGACGVGK (KRAS G12C)
LVGMCKVGM

SEQ ID NO: 6118 - protein, 9 aa, synthetic construct
  source 1..9: note = Seed: VVGACGVGK (KRAS G12C)
LVGMCKVGN

SEQ ID NO: 6119 - protein, 9 aa, synthetic construct
  source 1..9: note = Seed: VVGACGVGK (KRAS G12C)
LVGMCKVGP

SEQ ID NO: 6120 - protein, 9 aa, synthetic construct
  source 1..9: note = Seed: VVGACGVGK (KRAS G12C)
LVGMCKVGQ

SEQ ID NO: 6121 - protein, 9 aa, synthetic construct
  source 1..9: note = Seed: VVGACGVGK (KRAS G12C)
LVGMCKVGR

SEQ ID NO: 6122 - protein, 9 aa, synthetic construct
  source 1..9: note = Seed: VVGACGVGK (KRAS G12C)
LVGMCKVGS

SEQ ID NO: 6123 - protein, 9 aa, synthetic construct
  source 1..9: note = Seed: VVGACGVGK (KRAS G12C)
LVGMCKVGT

SEQ ID NO: 6124 - protein, 9 aa, synthetic construct
  source 1..9: note = Seed: VVGACGVGK (KRAS G12C)
LVGMCKVGV

SEQ ID NO: 6125 - protein, 9 aa, synthetic construct
  source 1..9: note = Seed: VVGACGVGK (KRAS G12C)
LVGMCKVGY

SEQ ID NO: 6126 - protein, 9 aa, synthetic construct
  source 1..9: note = Seed: VVGACGVGK (KRAS G12C)
LVGMCRVGA

SEQ ID NO: 6127 - protein, 9 aa, synthetic construct
  source 1..9: note = Seed: VVGACGVGK (KRAS G12C)
LVGMCRVGG

SEQ ID NO: 6128 - protein, 9 aa, synthetic construct
  source 1..9: note = Seed: VVGACGVGK (KRAS G12C)
LVGMCRVGH

SEQ ID NO: 6129 - protein, 9 aa, synthetic construct
  source 1..9: note = Seed: VVGACGVGK (KRAS G12C)
LVGMCRVGI

SEQ ID NO: 6130 - protein, 9 aa, synthetic construct
  source 1..9: note = Seed: VVGACGVGK (KRAS G12C)
LVGMCRVGK

SEQ ID NO: 6131 - protein, 9 aa, synthetic construct
  source 1..9: note = Seed: VVGACGVGK (KRAS G12C)
LVGMCRVGL

SEQ ID NO: 6132 - protein, 9 aa, synthetic construct
  source 1..9: note = Seed: VVGACGVGK (KRAS G12C)
LVGMCRVGM

SEQ ID NO: 6133 - protein, 9 aa, synthetic construct
  source 1..9: note = Seed: VVGACGVGK (KRAS G12C)
LVGMCRVGN

SEQ ID NO: 6134 - protein, 9 aa, synthetic construct
  source 1..9: note = Seed: VVGACGVGK (KRAS G12C)
LVGMCRVGP

SEQ ID NO: 6135 - protein, 9 aa, synthetic construct
  source 1..9: note = Seed: VVGACGVGK (KRAS G12C)
LVGMCRVGQ

SEQ ID NO: 6136 - protein, 9 aa, synthetic construct
  source 1..9: note = Seed: VVGACGVGK (KRAS G12C)
LVGMCRVGR

SEQ ID NO: 6137 - protein, 9 aa, synthetic construct
  source 1..9: note = Seed: VVGACGVGK (KRAS G12C)
LVGMCRVGS

SEQ ID NO: 6138 - protein, 9 aa, synthetic construct
  source 1..9: note = Seed: VVGACGVGK (KRAS G12C)
LVGMCRVGT

SEQ ID NO: 6139 - protein, 9 aa, synthetic construct
  source 1..9: note = Seed: VVGACGVGK (KRAS G12C)
LVGMCRVGV

SEQ ID NO: 6140 - protein, 9 aa, synthetic construct
  source 1..9: note = Seed: VVGACGVGK (KRAS G12C)
LVGMCRVGY

SEQ ID NO: 6141 - protein, 9 aa, synthetic construct
  source 1..9: note = Seed: VVGACGVGK (KRAS G12C)
LVGNCKVGK

SEQ ID NO: 6142 - protein, 9 aa, synthetic construct
  source 1..9: note = Seed: VVGACGVGK (KRAS G12C)
LVGNCKVGR

SEQ ID NO: 6143 - protein, 9 aa, synthetic construct
  source 1..9: note = Seed: VVGACGVGK (KRAS G12C)
LVGNCKVGY

SEQ ID NO: 6144 - protein, 9 aa, synthetic construct
  source 1..9: note = Seed: VVGACGVGK (KRAS G12C)
LVGNCPVGR

SEQ ID NO: 6145 - protein, 9 aa, synthetic construct
  source 1..9: note = Seed: VVGACGVGK (KRAS G12C)
LVGNCPVGY

SEQ ID NO: 6146 - protein, 9 aa, synthetic construct
  source 1..9: note = Seed: VVGACGVGK (KRAS G12C)
LVGNCRVGA

SEQ ID NO: 6147 - protein, 9 aa, synthetic construct
  source 1..9: note = Seed: VVGACGVGK (KRAS G12C)
LVGNCRVGF

SEQ ID NO: 6148 - protein, 9 aa, synthetic construct
  source 1..9: note = Seed: VVGACGVGK (KRAS G12C)
LVGNCRVGH

SEQ ID NO: 6149 - protein, 9 aa, synthetic construct
  source 1..9: note = Seed: VVGACGVGK (KRAS G12C)
LVGNCRVGI

SEQ ID NO: 6150 - protein, 9 aa, synthetic construct
  source 1..9: note = Seed: VVGACGVGK (KRAS G12C)
LVGNCRVGK

SEQ ID NO: 6151 - protein, 9 aa, synthetic construct
  source 1..9: note = Seed: VVGACGVGK (KRAS G12C)
LVGNCRVGL

SEQ ID NO: 6152 - protein, 9 aa, synthetic construct
  source 1..9: note = Seed: VVGACGVGK (KRAS G12C)
LVGNCRVGM

SEQ ID NO: 6153 - protein, 9 aa, synthetic construct
  source 1..9: note = Seed: VVGACGVGK (KRAS G12C)
LVGNCRVGR

SEQ ID NO: 6154 - protein, 9 aa, synthetic construct
  source 1..9: note = Seed: VVGACGVGK (KRAS G12C)
LVGNCRVGS

SEQ ID NO: 6155 - protein, 9 aa, synthetic construct
  source 1..9: note = Seed: VVGACGVGK (KRAS G12C)
LVGNCRVGV

SEQ ID NO: 6156 - protein, 9 aa, synthetic construct
  source 1..9: note = Seed: VVGACGVGK (KRAS G12C)
LVGNCRVGW

SEQ ID NO: 6157 - protein, 9 aa, synthetic construct
  source 1..9: note = Seed: VVGACGVGK (KRAS G12C)
LVGNCRVGY

SEQ ID NO: 6158 - protein, 9 aa, synthetic construct
  source 1..9: note = Seed: VVGACGVGK (KRAS G12C)
LVGQCKVGA

SEQ ID NO: 6159 - protein, 9 aa, synthetic construct
  source 1..9: note = Seed: VVGACGVGK (KRAS G12C)
LVGQCKVGH

SEQ ID NO: 6160 - protein, 9 aa, synthetic construct
  source 1..9: note = Seed: VVGACGVGK (KRAS G12C)
LVGQCKVGK

SEQ ID NO: 6161 - protein, 9 aa, synthetic construct
  source 1..9: note = Seed: VVGACGVGK (KRAS G12C)
LVGQCKVGQ

SEQ ID NO: 6162 - protein, 9 aa, synthetic construct
  source 1..9: note = Seed: VVGACGVGK (KRAS G12C)
LVGQCKVGR

SEQ ID NO: 6163 - protein, 9 aa, synthetic construct
  source 1..9: note = Seed: VVGACGVGK (KRAS G12C)
LVGQCKVGS

SEQ ID NO: 6164 - protein, 9 aa, synthetic construct
  source 1..9: note = Seed: VVGACGVGK (KRAS G12C)
LVGQCKVGY

SEQ ID NO: 6165 - protein, 9 aa, synthetic construct
  source 1..9: note = Seed: VVGACGVGK (KRAS G12C)
LVGQCRVGA

SEQ ID NO: 6166 - protein, 9 aa, synthetic construct
  source 1..9: note = Seed: VVGACGVGK (KRAS G12C)
LVGQCRVGF

SEQ ID NO: 6167 - protein, 9 aa, synthetic construct
  source 1..9: note = Seed: VVGACGVGK (KRAS G12C)
LVGQCRVGG

SEQ ID NO: 6168 - protein, 9 aa, synthetic construct
  source 1..9: note = Seed: VVGACGVGK (KRAS G12C)
LVGQCRVGH

SEQ ID NO: 6169 - protein, 9 aa, synthetic construct
  source 1..9: note = Seed: VVGACGVGK (KRAS G12C)
LVGQCRVGI

SEQ ID NO: 6170 - protein, 9 aa, synthetic construct
  source 1..9: note = Seed: VVGACGVGK (KRAS G12C)
LVGQCRVGK

SEQ ID NO: 6171 - protein, 9 aa, synthetic construct
  source 1..9: note = Seed: VVGACGVGK (KRAS G12C)
LVGQCRVGL

SEQ ID NO: 6172 - protein, 9 aa, synthetic construct
  source 1..9: note = Seed: VVGACGVGK (KRAS G12C)
LVGQCRVGQ

SEQ ID NO: 6173 - protein, 9 aa, synthetic construct
  source 1..9: note = Seed: VVGACGVGK (KRAS G12C)
LVGQCRVGR

SEQ ID NO: 6174 - protein, 9 aa, synthetic construct
  source 1..9: note = Seed: VVGACGVGK (KRAS G12C)
LVGQCRVGS

SEQ ID NO: 6175 - protein, 9 aa, synthetic construct
  source 1..9: note = Seed: VVGACGVGK (KRAS G12C)
LVGQCRVGV

SEQ ID NO: 6176 - protein, 9 aa, synthetic construct
  source 1..9: note = Seed: VVGACGVGK (KRAS G12C)
LVGQCRVGY

SEQ ID NO: 6177 - protein, 9 aa, synthetic construct
  source 1..9: note = Seed: VVGACGVGK (KRAS G12C)
LVGRCAVGR

SEQ ID NO: 6178 - protein, 9 aa, synthetic construct
  source 1..9: note = Seed: VVGACGVGK (KRAS G12C)
LVGRCHVGR

SEQ ID NO: 6179 - protein, 9 aa, synthetic construct
  source 1..9: note = Seed: VVGACGVGK (KRAS G12C)
LVGRCHVGY

SEQ ID NO: 6180 - protein, 9 aa, synthetic construct
  source 1..9: note = Seed: VVGACGVGK (KRAS G12C)
LVGRCKVGA

SEQ ID NO: 6181 - protein, 9 aa, synthetic construct
  source 1..9: note = Seed: VVGACGVGK (KRAS G12C)
LVGRCKVGF

SEQ ID NO: 6182 - protein, 9 aa, synthetic construct
  source 1..9: note = Seed: VVGACGVGK (KRAS G12C)
LVGRCKVGG

SEQ ID NO: 6183 - protein, 9 aa, synthetic construct
  source 1..9: note = Seed: VVGACGVGK (KRAS G12C)
LVGRCKVGH

SEQ ID NO: 6184 - protein, 9 aa, synthetic construct
  source 1..9: note = Seed: VVGACGVGK (KRAS G12C)
LVGRCKVGI

SEQ ID NO: 6185 - protein, 9 aa, synthetic construct
  source 1..9: note = Seed: VVGACGVGK (KRAS G12C)
LVGRCKVGK

SEQ ID NO: 6186 - protein, 9 aa, synthetic construct
  source 1..9: note = Seed: VVGACGVGK (KRAS G12C)
LVGRCKVGL

SEQ ID NO: 6187 - protein, 9 aa, synthetic construct
  source 1..9: note = Seed: VVGACGVGK (KRAS G12C)
LVGRCKVGM

SEQ ID NO: 6188 - protein, 9 aa, synthetic construct
  source 1..9: note = Seed: VVGACGVGK (KRAS G12C)
LVGRCKVGQ

SEQ ID NO: 6189 - protein, 9 aa, synthetic construct
  source 1..9: note = Seed: VVGACGVGK (KRAS G12C)
LVGRCKVGR

SEQ ID NO: 6190 - protein, 9 aa, synthetic construct
  source 1..9: note = Seed: VVGACGVGK (KRAS G12C)
LVGRCKVGS

SEQ ID NO: 6191 - protein, 9 aa, synthetic construct
  source 1..9: note = Seed: VVGACGVGK (KRAS G12C)
LVGRCKVGV

SEQ ID NO: 6192 - protein, 9 aa, synthetic construct
  source 1..9: note = Seed: VVGACGVGK (KRAS G12C)
LVGRCKVGY

SEQ ID NO: 6193 - protein, 9 aa, synthetic construct
  source 1..9: note = Seed: VVGACGVGK (KRAS G12C)
LVGRCNVGR

SEQ ID NO: 6194 - protein, 9 aa, synthetic construct
  source 1..9: note = Seed: VVGACGVGK (KRAS G12C)
LVGRCNVGY

SEQ ID NO: 6195 - protein, 9 aa, synthetic construct
  source 1..9: note = Seed: VVGACGVGK (KRAS G12C)
LVGRCPVGR

SEQ ID NO: 6196 - protein, 9 aa, synthetic construct
  source 1..9: note = Seed: VVGACGVGK (KRAS G12C)
LVGRCPVGY

SEQ ID NO: 6197 - protein, 9 aa, synthetic construct
  source 1..9: note = Seed: VVGACGVGK (KRAS G12C)
LVGRCQVGR

SEQ ID NO: 6198 - protein, 9 aa, synthetic construct
  source 1..9: note = Seed: VVGACGVGK (KRAS G12C)
LVGRCRVGA

SEQ ID NO: 6199 - protein, 9 aa, synthetic construct
  source 1..9: note = Seed: VVGACGVGK (KRAS G12C)
LVGRCRVGE

SEQ ID NO: 6200 - protein, 9 aa, synthetic construct
  source 1..9: note = Seed: VVGACGVGK (KRAS G12C)
LVGRCRVGF

SEQ ID NO: 6201 - protein, 9 aa, synthetic construct
  source 1..9: note = Seed: VVGACGVGK (KRAS G12C)
LVGRCRVGG

SEQ ID NO: 6202 - protein, 9 aa, synthetic construct
  source 1..9: note = Seed: VVGACGVGK (KRAS G12C)
LVGRCRVGH

SEQ ID NO: 6203 - protein, 9 aa, synthetic construct
  source 1..9: note = Seed: VVGACGVGK (KRAS G12C)
LVGRCRVGI

SEQ ID NO: 6204 - protein, 9 aa, synthetic construct
  source 1..9: note = Seed: VVGACGVGK (KRAS G12C)
LVGRCRVGK

SEQ ID NO: 6205 - protein, 9 aa, synthetic construct
  source 1..9: note = Seed: VVGACGVGK (KRAS G12C)
LVGRCRVGL

SEQ ID NO: 6206 - protein, 9 aa, synthetic construct
  source 1..9: note = Seed: VVGACGVGK (KRAS G12C)
LVGRCRVGM

SEQ ID NO: 6207 - protein, 9 aa, synthetic construct
  source 1..9: note = Seed: VVGACGVGK (KRAS G12C)
LVGRCRVGN

SEQ ID NO: 6208 - protein, 9 aa, synthetic construct
  source 1..9: note = Seed: VVGACGVGK (KRAS G12C)
LVGRCRVGQ

SEQ ID NO: 6209 - protein, 9 aa, synthetic construct
  source 1..9: note = Seed: VVGACGVGK (KRAS G12C)
LVGRCRVGR

SEQ ID NO: 6210 - protein, 9 aa, synthetic construct
  source 1..9: note = Seed: VVGACGVGK (KRAS G12C)
LVGRCRVGS

SEQ ID NO: 6211 - protein, 9 aa, synthetic construct
  source 1..9: note = Seed: VVGACGVGK (KRAS G12C)
LVGRCRVGT

SEQ ID NO: 6212 - protein, 9 aa, synthetic construct
  source 1..9: note = Seed: VVGACGVGK (KRAS G12C)
LVGRCRVGV

SEQ ID NO: 6213 - protein, 9 aa, synthetic construct
  source 1..9: note = Seed: VVGACGVGK (KRAS G12C)
LVGRCRVGY

SEQ ID NO: 6214 - protein, 9 aa, synthetic construct
  source 1..9: note = Seed: VVGACGVGK (KRAS G12C)
LVGRCSVGR

SEQ ID NO: 6215 - protein, 9 aa, synthetic construct
  source 1..9: note = Seed: VVGACGVGK (KRAS G12C)
LVGRCSVGY

SEQ ID NO: 6216 - protein, 9 aa, synthetic construct
  source 1..9: note = Seed: VVGACGVGK (KRAS G12C)
LVGRCTVGR

SEQ ID NO: 6217 - protein, 9 aa, synthetic construct
  source 1..9: note = Seed: VVGACGVGK (KRAS G12C)
LVGRCVVGR

SEQ ID NO: 6218 - protein, 9 aa, synthetic construct
  source 1..9: note = Seed: VVGACGVGK (KRAS G12C)
LVGSCAVGR

SEQ ID NO: 6219 - protein, 9 aa, synthetic construct
  source 1..9: note = Seed: VVGACGVGK (KRAS G12C)
LVGSCKVGK

SEQ ID NO: 6220 - protein, 9 aa, synthetic construct
  source 1..9: note = Seed: VVGACGVGK (KRAS G12C)
LVGSCKVGR

SEQ ID NO: 6221 - protein, 9 aa, synthetic construct
  source 1..9: note = Seed: VVGACGVGK (KRAS G12C)
LVGSCKVGY

SEQ ID NO: 6222 - protein, 9 aa, synthetic construct
  source 1..9: note = Seed: VVGACGVGK (KRAS G12C)
LVGSCPVGR

SEQ ID NO: 6223 - protein, 9 aa, synthetic construct
  source 1..9: note = Seed: VVGACGVGK (KRAS G12C)
LVGSCRVGA

SEQ ID NO: 6224 - protein, 9 aa, synthetic construct
  source 1..9: note = Seed: VVGACGVGK (KRAS G12C)
LVGSCRVGF

SEQ ID NO: 6225 - protein, 9 aa, synthetic construct
  source 1..9: note = Seed: VVGACGVGK (KRAS G12C)
LVGSCRVGH

SEQ ID NO: 6226 - protein, 9 aa, synthetic construct
  source 1..9: note = Seed: VVGACGVGK (KRAS G12C)
LVGSCRVGI

SEQ ID NO: 6227 - protein, 9 aa, synthetic construct
  source 1..9: note = Seed: VVGACGVGK (KRAS G12C)
LVGSCRVGK

SEQ ID NO: 6228 - protein, 9 aa, synthetic construct
  source 1..9: note = Seed: VVGACGVGK (KRAS G12C)
LVGSCRVGL

SEQ ID NO: 6229 - protein, 9 aa, synthetic construct
  source 1..9: note = Seed: VVGACGVGK (KRAS G12C)
LVGSCRVGM

SEQ ID NO: 6230 - protein, 9 aa, synthetic construct
  source 1..9: note = Seed: VVGACGVGK (KRAS G12C)
LVGSCRVGQ

SEQ ID NO: 6231 - protein, 9 aa, synthetic construct
  source 1..9: note = Seed: VVGACGVGK (KRAS G12C)
LVGSCRVGR

SEQ ID NO: 6232 - protein, 9 aa, synthetic construct
  source 1..9: note = Seed: VVGACGVGK (KRAS G12C)
LVGSCRVGS

SEQ ID NO: 6233 - protein, 9 aa, synthetic construct
  source 1..9: note = Seed: VVGACGVGK (KRAS G12C)
LVGSCRVGV

SEQ ID NO: 6234 - protein, 9 aa, synthetic construct
  source 1..9: note = Seed: VVGACGVGK (KRAS G12C)
LVGSCRVGY

SEQ ID NO: 6235 - protein, 9 aa, synthetic construct
  source 1..9: note = Seed: VVGACGVGK (KRAS G12C)
LVGTCKVGK

SEQ ID NO: 6236 - protein, 9 aa, synthetic construct
  source 1..9: note = Seed: VVGACGVGK (KRAS G12C)
LVGTCKVGR

SEQ ID NO: 6237 - protein, 9 aa, synthetic construct
  source 1..9: note = Seed: VVGACGVGK (KRAS G12C)
LVGTCKVGS

SEQ ID NO: 6238 - protein, 9 aa, synthetic construct
  source 1..9: note = Seed: VVGACGVGK (KRAS G12C)
LVGTCKVGY

SEQ ID NO: 6239 - protein, 9 aa, synthetic construct
  source 1..9: note = Seed: VVGACGVGK (KRAS G12C)
LVGTCRVGA

SEQ ID NO: 6240 - protein, 9 aa, synthetic construct
  source 1..9: note = Seed: VVGACGVGK (KRAS G12C)
LVGTCRVGG

SEQ ID NO: 6241 - protein, 9 aa, synthetic construct
  source 1..9: note = Seed: VVGACGVGK (KRAS G12C)
LVGTCRVGH

SEQ ID NO: 6242 - protein, 9 aa, synthetic construct
  source 1..9: note = Seed: VVGACGVGK (KRAS G12C)
LVGTCRVGK

SEQ ID NO: 6243 - protein, 9 aa, synthetic construct
  source 1..9: note = Seed: VVGACGVGK (KRAS G12C)
LVGTCRVGQ

SEQ ID NO: 6244 - protein, 9 aa, synthetic construct
  source 1..9: note = Seed: VVGACGVGK (KRAS G12C)
LVGTCRVGR

SEQ ID NO: 6245 - protein, 9 aa, synthetic construct
  source 1..9: note = Seed: VVGACGVGK (KRAS G12C)
LVGTCRVGS

SEQ ID NO: 6246 - protein, 9 aa, synthetic construct
  source 1..9: note = Seed: VVGACGVGK (KRAS G12C)
LVGTCRVGV

SEQ ID NO: 6247 - protein, 9 aa, synthetic construct
  source 1..9: note = Seed: VVGACGVGK (KRAS G12C)
LVGTCRVGY

SEQ ID NO: 6248 - protein, 9 aa, synthetic construct
  source 1..9: note = Seed: VVGACGVGK (KRAS G12C)
LVGVCKVGA

SEQ ID NO: 6249 - protein, 9 aa, synthetic construct
  source 1..9: note = Seed: VVGACGVGK (KRAS G12C)
LVGVCKVGG

SEQ ID NO: 6250 - protein, 9 aa, synthetic construct
  source 1..9: note = Seed: VVGACGVGK (KRAS G12C)
LVGVCKVGH

SEQ ID NO: 6251 - protein, 9 aa, synthetic construct
  source 1..9: note = Seed: VVGACGVGK (KRAS G12C)
LVGVCKVGK

SEQ ID NO: 6252 - protein, 9 aa, synthetic construct
  source 1..9: note = Seed: VVGACGVGK (KRAS G12C)
LVGVCKVGQ

SEQ ID NO: 6253 - protein, 9 aa, synthetic construct
  source 1..9: note = Seed: VVGACGVGK (KRAS G12C)
LVGVCKVGR

SEQ ID NO: 6254 - protein, 9 aa, synthetic construct
  source 1..9: note = Seed: VVGACGVGK (KRAS G12C)
LVGVCKVGS

SEQ ID NO: 6255 - protein, 9 aa, synthetic construct
  source 1..9: note = Seed: VVGACGVGK (KRAS G12C)
LVGVCKVGT

SEQ ID NO: 6256 - protein, 9 aa, synthetic construct
  source 1..9: note = Seed: VVGACGVGK (KRAS G12C)
LVGVCKVGY

SEQ ID NO: 6257 - protein, 9 aa, synthetic construct
  source 1..9: note = Seed: VVGACGVGK (KRAS G12C)
LVGVCRVGA

SEQ ID NO: 6258 - protein, 9 aa, synthetic construct
  source 1..9: note = Seed: VVGACGVGK (KRAS G12C)
LVGVCRVGG

SEQ ID NO: 6259 - protein, 9 aa, synthetic construct
  source 1..9: note = Seed: VVGACGVGK (KRAS G12C)
LVGVCRVGH

SEQ ID NO: 6260 - protein, 9 aa, synthetic construct
  source 1..9: note = Seed: VVGACGVGK (KRAS G12C)
LVGVCRVGK

SEQ ID NO: 6261 - protein, 9 aa, synthetic construct
  source 1..9: note = Seed: VVGACGVGK (KRAS G12C)
LVGVCRVGN

SEQ ID NO: 6262 - protein, 9 aa, synthetic construct
  source 1..9: note = Seed: VVGACGVGK (KRAS G12C)
LVGVCRVGQ

SEQ ID NO: 6263 - protein, 9 aa, synthetic construct
  source 1..9: note = Seed: VVGACGVGK (KRAS G12C)
LVGVCRVGR

SEQ ID NO: 6264 - protein, 9 aa, synthetic construct
  source 1..9: note = Seed: VVGACGVGK (KRAS G12C)
LVGVCRVGS

SEQ ID NO: 6265 - protein, 9 aa, synthetic construct
  source 1..9: note = Seed: VVGACGVGK (KRAS G12C)
LVGVCRVGT

SEQ ID NO: 6266 - protein, 9 aa, synthetic construct
  source 1..9: note = Seed: VVGACGVGK (KRAS G12C)
LVGVCRVGY

SEQ ID NO: 6267 - protein, 9 aa, synthetic construct
  source 1..9: note = Seed: VVGACGVGK (KRAS G12C)
LVGWCAVGR

SEQ ID NO: 6268 - protein, 9 aa, synthetic construct
  source 1..9: note = Seed: VVGACGVGK (KRAS G12C)
LVGWCHVGR

SEQ ID NO: 6269 - protein, 9 aa, synthetic construct
  source 1..9: note = Seed: VVGACGVGK (KRAS G12C)
LVGWCKVGA

SEQ ID NO: 6270 - protein, 9 aa, synthetic construct
  source 1..9: note = Seed: VVGACGVGK (KRAS G12C)
LVGWCKVGF

SEQ ID NO: 6271 - protein, 9 aa, synthetic construct
  source 1..9: note = Seed: VVGACGVGK (KRAS G12C)
LVGWCKVGH

SEQ ID NO: 6272 - protein, 9 aa, synthetic construct
  source 1..9: note = Seed: VVGACGVGK (KRAS G12C)
LVGWCKVGK

SEQ ID NO: 6273 - protein, 9 aa, synthetic construct
  source 1..9: note = Seed: VVGACGVGK (KRAS G12C)
LVGWCKVGM

SEQ ID NO: 6274 - protein, 9 aa, synthetic construct
  source 1..9: note = Seed: VVGACGVGK (KRAS G12C)
LVGWCKVGR

SEQ ID NO: 6275 - protein, 9 aa, synthetic construct
  source 1..9: note = Seed: VVGACGVGK (KRAS G12C)
LVGWCKVGS

SEQ ID NO: 6276 - protein, 9 aa, synthetic construct
  source 1..9: note = Seed: VVGACGVGK (KRAS G12C)
LVGWCKVGY

SEQ ID NO: 6277 - protein, 9 aa, synthetic construct
  source 1..9: note = Seed: VVGACGVGK (KRAS G12C)
LVGWCPVGR

SEQ ID NO: 6278 - protein, 9 aa, synthetic construct
  source 1..9: note = Seed: VVGACGVGK (KRAS G12C)
LVGWCRVGA

SEQ ID NO: 6279 - protein, 9 aa, synthetic construct
  source 1..9: note = Seed: VVGACGVGK (KRAS G12C)
LVGWCRVGF

SEQ ID NO: 6280 - protein, 9 aa, synthetic construct
  source 1..9: note = Seed: VVGACGVGK (KRAS G12C)
LVGWCRVGH

SEQ ID NO: 6281 - protein, 9 aa, synthetic construct
  source 1..9: note = Seed: VVGACGVGK (KRAS G12C)
LVGWCRVGK

SEQ ID NO: 6282 - protein, 9 aa, synthetic construct
  source 1..9: note = Seed: VVGACGVGK (KRAS G12C)
LVGWCRVGR

SEQ ID NO: 6283 - protein, 9 aa, synthetic construct
  source 1..9: note = Seed: VVGACGVGK (KRAS G12C)
LVGWCRVGS

SEQ ID NO: 6284 - protein, 9 aa, synthetic construct
  source 1..9: note = Seed: VVGACGVGK (KRAS G12C)
LVGWCRVGY

SEQ ID NO: 6285 - protein, 9 aa, synthetic construct
  source 1..9: note = Seed: VVGACGVGK (KRAS G12C)
LVGYCKVGH

SEQ ID NO: 6286 - protein, 9 aa, synthetic construct
  source 1..9: note = Seed: VVGACGVGK (KRAS G12C)
LVGYCKVGK

SEQ ID NO: 6287 - protein, 9 aa, synthetic construct
  source 1..9: note = Seed: VVGACGVGK (KRAS G12C)
LVGYCKVGR

SEQ ID NO: 6288 - protein, 9 aa, synthetic construct
  source 1..9: note = Seed: VVGACGVGK (KRAS G12C)
LVGYCKVGY

SEQ ID NO: 6289 - protein, 9 aa, synthetic construct
  source 1..9: note = Seed: VVGACGVGK (KRAS G12C)
LVGYCRVGH

SEQ ID NO: 6290 - protein, 9 aa, synthetic construct
  source 1..9: note = Seed: VVGACGVGK (KRAS G12C)
LVGYCRVGK

SEQ ID NO: 6291 - protein, 9 aa, synthetic construct
  source 1..9: note = Seed: VVGACGVGK (KRAS G12C)
LVGYCRVGR

SEQ ID NO: 6292 - protein, 9 aa, synthetic construct
  source 1..9: note = Seed: VVGACGVGK (KRAS G12C)
LVGYCRVGY

SEQ ID NO: 6293 - protein, 9 aa, synthetic construct
  source 1..9: note = Seed: VVGACGVGK (KRAS G12C)
MVGACKVGA

SEQ ID NO: 6294 - protein, 9 aa, synthetic construct
  source 1..9: note = Seed: VVGACGVGK (KRAS G12C)
MVGACKVGH

SEQ ID NO: 6295 - protein, 9 aa, synthetic construct
  source 1..9: note = Seed: VVGACGVGK (KRAS G12C)
MVGACKVGK

SEQ ID NO: 6296 - protein, 9 aa, synthetic construct
  source 1..9: note = Seed: VVGACGVGK (KRAS G12C)
MVGACKVGR

SEQ ID NO: 6297 - protein, 9 aa, synthetic construct
  source 1..9: note = Seed: VVGACGVGK (KRAS G12C)
MVGACKVGS

SEQ ID NO: 6298 - protein, 9 aa, synthetic construct
  source 1..9: note = Seed: VVGACGVGK (KRAS G12C)
MVGACKVGY

SEQ ID NO: 6299 - protein, 9 aa, synthetic construct
  source 1..9: note = Seed: VVGACGVGK (KRAS G12C)
MVGACRVGA

SEQ ID NO: 6300 - protein, 9 aa, synthetic construct
  source 1..9: note = Seed: VVGACGVGK (KRAS G12C)
MVGACRVGF

SEQ ID NO: 6301 - protein, 9 aa, synthetic construct
  source 1..9: note = Seed: VVGACGVGK (KRAS G12C)
MVGACRVGG

SEQ ID NO: 6302 - protein, 9 aa, synthetic construct
  source 1..9: note = Seed: VVGACGVGK (KRAS G12C)
MVGACRVGH

SEQ ID NO: 6303 - protein, 9 aa, synthetic construct
  source 1..9: note = Seed: VVGACGVGK (KRAS G12C)
MVGACRVGI

SEQ ID NO: 6304 - protein, 9 aa, synthetic construct
  source 1..9: note = Seed: VVGACGVGK (KRAS G12C)
MVGACRVGK

SEQ ID NO: 6305 - protein, 9 aa, synthetic construct
  source 1..9: note = Seed: VVGACGVGK (KRAS G12C)
MVGACRVGL

SEQ ID NO: 6306 - protein, 9 aa, synthetic construct
  source 1..9: note = Seed: VVGACGVGK (KRAS G12C)
MVGACRVGM

SEQ ID NO: 6307 - protein, 9 aa, synthetic construct
  source 1..9: note = Seed: VVGACGVGK (KRAS G12C)
MVGACRVGQ

SEQ ID NO: 6308 - protein, 9 aa, synthetic construct
  source 1..9: note = Seed: VVGACGVGK (KRAS G12C)
MVGACRVGR

SEQ ID NO: 6309 - protein, 9 aa, synthetic construct
  source 1..9: note = Seed: VVGACGVGK (KRAS G12C)
MVGACRVGS

SEQ ID NO: 6310 - protein, 9 aa, synthetic construct
  source 1..9: note = Seed: VVGACGVGK (KRAS G12C)
MVGACRVGV

SEQ ID NO: 6311 - protein, 9 aa, synthetic construct
  source 1..9: note = Seed: VVGACGVGK (KRAS G12C)
MVGACRVGY

SEQ ID NO: 6312 - protein, 9 aa, synthetic construct
  source 1..9: note = Seed: VVGACGVGK (KRAS G12C)
MVGFCKVGA

SEQ ID NO: 6313 - protein, 9 aa, synthetic construct
  source 1..9: note = Seed: VVGACGVGK (KRAS G12C)
MVGFCKVGG

SEQ ID NO: 6314 - protein, 9 aa, synthetic construct
  source 1..9: note = Seed: VVGACGVGK (KRAS G12C)
MVGFCKVGH

SEQ ID NO: 6315 - protein, 9 aa, synthetic construct
  source 1..9: note = Seed: VVGACGVGK (KRAS G12C)
MVGFCKVGK

SEQ ID NO: 6316 - protein, 9 aa, synthetic construct
  source 1..9: note = Seed: VVGACGVGK (KRAS G12C)
MVGFCKVGQ

SEQ ID NO: 6317 - protein, 9 aa, synthetic construct
  source 1..9: note = Seed: VVGACGVGK (KRAS G12C)
MVGFCKVGR

SEQ ID NO: 6318 - protein, 9 aa, synthetic construct
  source 1..9: note = Seed: VVGACGVGK (KRAS G12C)
MVGFCKVGS

SEQ ID NO: 6319 - protein, 9 aa, synthetic construct
  source 1..9: note = Seed: VVGACGVGK (KRAS G12C)
MVGFCKVGY

SEQ ID NO: 6320 - protein, 9 aa, synthetic construct
  source 1..9: note = Seed: VVGACGVGK (KRAS G12C)
MVGFCRVGA

SEQ ID NO: 6321 - protein, 9 aa, synthetic construct
  source 1..9: note = Seed: VVGACGVGK (KRAS G12C)
MVGFCRVGG

SEQ ID NO: 6322 - protein, 9 aa, synthetic construct
  source 1..9: note = Seed: VVGACGVGK (KRAS G12C)
MVGFCRVGH

SEQ ID NO: 6323 - protein, 9 aa, synthetic construct
  source 1..9: note = Seed: VVGACGVGK (KRAS G12C)
MVGFCRVGK

SEQ ID NO: 6324 - protein, 9 aa, synthetic construct
  source 1..9: note = Seed: VVGACGVGK (KRAS G12C)
MVGFCRVGQ

SEQ ID NO: 6325 - protein, 9 aa, synthetic construct
  source 1..9: note = Seed: VVGACGVGK (KRAS G12C)
MVGFCRVGR

SEQ ID NO: 6326 - protein, 9 aa, synthetic construct
  source 1..9: note = Seed: VVGACGVGK (KRAS G12C)
MVGFCRVGS

SEQ ID NO: 6327 - protein, 9 aa, synthetic construct
  source 1..9: note = Seed: VVGACGVGK (KRAS G12C)
MVGFCRVGY

SEQ ID NO: 6328 - protein, 9 aa, synthetic construct
  source 1..9: note = Seed: VVGACGVGK (KRAS G12C)
MVGGCRVGR

SEQ ID NO: 6329 - protein, 9 aa, synthetic construct
  source 1..9: note = Seed: VVGACGVGK (KRAS G12C)
MVGHCAVGR

SEQ ID NO: 6330 - protein, 9 aa, synthetic construct
  source 1..9: note = Seed: VVGACGVGK (KRAS G12C)
MVGHCHVGR

SEQ ID NO: 6331 - protein, 9 aa, synthetic construct
  source 1..9: note = Seed: VVGACGVGK (KRAS G12C)
MVGHCIVGR

SEQ ID NO: 6332 - protein, 9 aa, synthetic construct
  source 1..9: note = Seed: VVGACGVGK (KRAS G12C)
MVGHCKVGA

SEQ ID NO: 6333 - protein, 9 aa, synthetic construct
  source 1..9: note = Seed: VVGACGVGK (KRAS G12C)
MVGHCKVGF

SEQ ID NO: 6334 - protein, 9 aa, synthetic construct
  source 1..9: note = Seed: VVGACGVGK (KRAS G12C)
MVGHCKVGK

SEQ ID NO: 6335 - protein, 9 aa, synthetic construct
  source 1..9: note = Seed: VVGACGVGK (KRAS G12C)
MVGHCKVGM

SEQ ID NO: 6336 - protein, 9 aa, synthetic construct
  source 1..9: note = Seed: VVGACGVGK (KRAS G12C)
MVGHCKVGR

SEQ ID NO: 6337 - protein, 9 aa, synthetic construct
  source 1..9: note = Seed: VVGACGVGK (KRAS G12C)
MVGHCKVGV

SEQ ID NO: 6338 - protein, 9 aa, synthetic construct
  source 1..9: note = Seed: VVGACGVGK (KRAS G12C)
MVGHCKVGY

SEQ ID NO: 6339 - protein, 9 aa, synthetic construct
  source 1..9: note = Seed: VVGACGVGK (KRAS G12C)
MVGHCNVGR

SEQ ID NO: 6340 - protein, 9 aa, synthetic construct
  source 1..9: note = Seed: VVGACGVGK (KRAS G12C)
MVGHCPVGR

SEQ ID NO: 6341 - protein, 9 aa, synthetic construct
  source 1..9: note = Seed: VVGACGVGK (KRAS G12C)
MVGHCPVGY

SEQ ID NO: 6342 - protein, 9 aa, synthetic construct
  source 1..9: note = Seed: VVGACGVGK (KRAS G12C)
MVGHCRVGA

SEQ ID NO: 6343 - protein, 9 aa, synthetic construct
  source 1..9: note = Seed: VVGACGVGK (KRAS G12C)
MVGHCRVGF

SEQ ID NO: 6344 - protein, 9 aa, synthetic construct
  source 1..9: note = Seed: VVGACGVGK (KRAS G12C)
MVGHCRVGG

SEQ ID NO: 6345 - protein, 9 aa, synthetic construct
  source 1..9: note = Seed: VVGACGVGK (KRAS G12C)
MVGHCRVGH

SEQ ID NO: 6346 - protein, 9 aa, synthetic construct
  source 1..9: note = Seed: VVGACGVGK (KRAS G12C)
MVGHCRVGI

SEQ ID NO: 6347 - protein, 9 aa, synthetic construct
  source 1..9: note = Seed: VVGACGVGK (KRAS G12C)
MVGHCRVGK

SEQ ID NO: 6348 - protein, 9 aa, synthetic construct
  source 1..9: note = Seed: VVGACGVGK (KRAS G12C)
MVGHCRVGL

SEQ ID NO: 6349 - protein, 9 aa, synthetic construct
  source 1..9: note = Seed: VVGACGVGK (KRAS G12C)
MVGHCRVGM

SEQ ID NO: 6350 - protein, 9 aa, synthetic construct
  source 1..9: note = Seed: VVGACGVGK (KRAS G12C)
MVGHCRVGQ

SEQ ID NO: 6351 - protein, 9 aa, synthetic construct
  source 1..9: note = Seed: VVGACGVGK (KRAS G12C)
MVGHCRVGR

SEQ ID NO: 6352 - protein, 9 aa, synthetic construct
  source 1..9: note = Seed: VVGACGVGK (KRAS G12C)
MVGHCRVGS

SEQ ID NO: 6353 - protein, 9 aa, synthetic construct
  source 1..9: note = Seed: VVGACGVGK (KRAS G12C)
MVGHCRVGV

SEQ ID NO: 6354 - protein, 9 aa, synthetic construct
  source 1..9: note = Seed: VVGACGVGK (KRAS G12C)
MVGHCRVGW

SEQ ID NO: 6355 - protein, 9 aa, synthetic construct
  source 1..9: note = Seed: VVGACGVGK (KRAS G12C)
MVGHCRVGY

SEQ ID NO: 6356 - protein, 9 aa, synthetic construct
  source 1..9: note = Seed: VVGACGVGK (KRAS G12C)
MVGHCSVGR

SEQ ID NO: 6357 - protein, 9 aa, synthetic construct
  source 1..9: note = Seed: VVGACGVGK (KRAS G12C)
MVGHCTVGR

SEQ ID NO: 6358 - protein, 9 aa, synthetic construct
  source 1..9: note = Seed: VVGACGVGK (KRAS G12C)
MVGHCVVGR

SEQ ID NO: 6359 - protein, 9 aa, synthetic construct
  source 1..9: note = Seed: VVGACGVGK (KRAS G12C)
MVGICKVGA

SEQ ID NO: 6360 - protein, 9 aa, synthetic construct
  source 1..9: note = Seed: VVGACGVGK (KRAS G12C)
MVGICKVGG

SEQ ID NO: 6361 - protein, 9 aa, synthetic construct
  source 1..9: note = Seed: VVGACGVGK (KRAS G12C)
MVGICKVGH

SEQ ID NO: 6362 - protein, 9 aa, synthetic construct
  source 1..9: note = Seed: VVGACGVGK (KRAS G12C)
MVGICKVGK

SEQ ID NO: 6363 - protein, 9 aa, synthetic construct
  source 1..9: note = Seed: VVGACGVGK (KRAS G12C)
MVGICKVGQ

SEQ ID NO: 6364 - protein, 9 aa, synthetic construct
  source 1..9: note = Seed: VVGACGVGK (KRAS G12C)
MVGICKVGR

SEQ ID NO: 6365 - protein, 9 aa, synthetic construct
  source 1..9: note = Seed: VVGACGVGK (KRAS G12C)
MVGICKVGS

SEQ ID NO: 6366 - protein, 9 aa, synthetic construct
  source 1..9: note = Seed: VVGACGVGK (KRAS G12C)
MVGICKVGT

SEQ ID NO: 6367 - protein, 9 aa, synthetic construct
  source 1..9: note = Seed: VVGACGVGK (KRAS G12C)
MVGICKVGY

SEQ ID NO: 6368 - protein, 9 aa, synthetic construct
  source 1..9: note = Seed: VVGACGVGK (KRAS G12C)
MVGICPVGR

SEQ ID NO: 6369 - protein, 9 aa, synthetic construct
  source 1..9: note = Seed: VVGACGVGK (KRAS G12C)
MVGICRVGA

SEQ ID NO: 6370 - protein, 9 aa, synthetic construct
  source 1..9: note = Seed: VVGACGVGK (KRAS G12C)
MVGICRVGG

SEQ ID NO: 6371 - protein, 9 aa, synthetic construct
  source 1..9: note = Seed: VVGACGVGK (KRAS G12C)
MVGICRVGH

SEQ ID NO: 6372 - protein, 9 aa, synthetic construct
  source 1..9: note = Seed: VVGACGVGK (KRAS G12C)
MVGICRVGK

SEQ ID NO: 6373 - protein, 9 aa, synthetic construct
  source 1..9: note = Seed: VVGACGVGK (KRAS G12C)
MVGICRVGM

SEQ ID NO: 6374 - protein, 9 aa, synthetic construct
  source 1..9: note = Seed: VVGACGVGK (KRAS G12C)
MVGICRVGN

SEQ ID NO: 6375 - protein, 9 aa, synthetic construct
  source 1..9: note = Seed: VVGACGVGK (KRAS G12C)
MVGICRVGQ

SEQ ID NO: 6376 - protein, 9 aa, synthetic construct
  source 1..9: note = Seed: VVGACGVGK (KRAS G12C)
MVGICRVGR

SEQ ID NO: 6377 - protein, 9 aa, synthetic construct
  source 1..9: note = Seed: VVGACGVGK (KRAS G12C)
MVGICRVGS

SEQ ID NO: 6378 - protein, 9 aa, synthetic construct
  source 1..9: note = Seed: VVGACGVGK (KRAS G12C)
MVGICRVGT

SEQ ID NO: 6379 - protein, 9 aa, synthetic construct
  source 1..9: note = Seed: VVGACGVGK (KRAS G12C)
MVGICRVGV

SEQ ID NO: 6380 - protein, 9 aa, synthetic construct
  source 1..9: note = Seed: VVGACGVGK (KRAS G12C)
MVGICRVGY

SEQ ID NO: 6381 - protein, 9 aa, synthetic construct
  source 1..9: note = Seed: VVGACGVGK (KRAS G12C)
MVGKCAVGR

SEQ ID NO: 6382 - protein, 9 aa, synthetic construct
  source 1..9: note = Seed: VVGACGVGK (KRAS G12C)
MVGKCHVGR

SEQ ID NO: 6383 - protein, 9 aa, synthetic construct
  source 1..9: note = Seed: VVGACGVGK (KRAS G12C)
MVGKCHVGY

SEQ ID NO: 6384 - protein, 9 aa, synthetic construct
  source 1..9: note = Seed: VVGACGVGK (KRAS G12C)
MVGKCKVGA

SEQ ID NO: 6385 - protein, 9 aa, synthetic construct
  source 1..9: note = Seed: VVGACGVGK (KRAS G12C)
MVGKCKVGF

SEQ ID NO: 6386 - protein, 9 aa, synthetic construct
  source 1..9: note = Seed: VVGACGVGK (KRAS G12C)
MVGKCKVGG

SEQ ID NO: 6387 - protein, 9 aa, synthetic construct
  source 1..9: note = Seed: VVGACGVGK (KRAS G12C)
MVGKCKVGH

SEQ ID NO: 6388 - protein, 9 aa, synthetic construct
  source 1..9: note = Seed: VVGACGVGK (KRAS G12C)
MVGKCKVGI

SEQ ID NO: 6389 - protein, 9 aa, synthetic construct
  source 1..9: note = Seed: VVGACGVGK (KRAS G12C)
MVGKCKVGK

SEQ ID NO: 6390 - protein, 9 aa, synthetic construct
  source 1..9: note = Seed: VVGACGVGK (KRAS G12C)
MVGKCKVGL

SEQ ID NO: 6391 - protein, 9 aa, synthetic construct
  source 1..9: note = Seed: VVGACGVGK (KRAS G12C)
MVGKCKVGM

SEQ ID NO: 6392 - protein, 9 aa, synthetic construct
  source 1..9: note = Seed: VVGACGVGK (KRAS G12C)
MVGKCKVGQ

SEQ ID NO: 6393 - protein, 9 aa, synthetic construct
  source 1..9: note = Seed: VVGACGVGK (KRAS G12C)
MVGKCKVGR

SEQ ID NO: 6394 - protein, 9 aa, synthetic construct
  source 1..9: note = Seed: VVGACGVGK (KRAS G12C)
MVGKCKVGS

SEQ ID NO: 6395 - protein, 9 aa, synthetic construct
  source 1..9: note = Seed: VVGACGVGK (KRAS G12C)
MVGKCKVGT

SEQ ID NO: 6396 - protein, 9 aa, synthetic construct
  source 1..9: note = Seed: VVGACGVGK (KRAS G12C)
MVGKCKVGV

SEQ ID NO: 6397 - protein, 9 aa, synthetic construct
  source 1..9: note = Seed: VVGACGVGK (KRAS G12C)
MVGKCKVGY

SEQ ID NO: 6398 - protein, 9 aa, synthetic construct
  source 1..9: note = Seed: VVGACGVGK (KRAS G12C)
MVGKCNVGR

SEQ ID NO: 6399 - protein, 9 aa, synthetic construct
  source 1..9: note = Seed: VVGACGVGK (KRAS G12C)
MVGKCNVGY

SEQ ID NO: 6400 - protein, 9 aa, synthetic construct
  source 1..9: note = Seed: VVGACGVGK (KRAS G12C)
MVGKCQVGR

SEQ ID NO: 6401 - protein, 9 aa, synthetic construct
  source 1..9: note = Seed: VVGACGVGK (KRAS G12C)
MVGKCRVGA

SEQ ID NO: 6402 - protein, 9 aa, synthetic construct
  source 1..9: note = Seed: VVGACGVGK (KRAS G12C)
MVGKCRVGE

SEQ ID NO: 6403 - protein, 9 aa, synthetic construct
  source 1..9: note = Seed: VVGACGVGK (KRAS G12C)
MVGKCRVGF

SEQ ID NO: 6404 - protein, 9 aa, synthetic construct
  source 1..9: note = Seed: VVGACGVGK (KRAS G12C)
MVGKCRVGG

SEQ ID NO: 6405 - protein, 9 aa, synthetic construct
  source 1..9: note = Seed: VVGACGVGK (KRAS G12C)
MVGKCRVGH

SEQ ID NO: 6406 - protein, 9 aa, synthetic construct
  source 1..9: note = Seed: VVGACGVGK (KRAS G12C)
MVGKCRVGI

SEQ ID NO: 6407 - protein, 9 aa, synthetic construct
  source 1..9: note = Seed: VVGACGVGK (KRAS G12C)
MVGKCRVGK

SEQ ID NO: 6408 - protein, 9 aa, synthetic construct
  source 1..9: note = Seed: VVGACGVGK (KRAS G12C)
MVGKCRVGL

SEQ ID NO: 6409 - protein, 9 aa, synthetic construct
  source 1..9: note = Seed: VVGACGVGK (KRAS G12C)
MVGKCRVGM

SEQ ID NO: 6410 - protein, 9 aa, synthetic construct
  source 1..9: note = Seed: VVGACGVGK (KRAS G12C)
MVGKCRVGN

SEQ ID NO: 6411 - protein, 9 aa, synthetic construct
  source 1..9: note = Seed: VVGACGVGK (KRAS G12C)
MVGKCRVGQ

SEQ ID NO: 6412 - protein, 9 aa, synthetic construct
  source 1..9: note = Seed: VVGACGVGK (KRAS G12C)
MVGKCRVGR

SEQ ID NO: 6413 - protein, 9 aa, synthetic construct
  source 1..9: note = Seed: VVGACGVGK (KRAS G12C)
MVGKCRVGS

SEQ ID NO: 6414 - protein, 9 aa, synthetic construct
  source 1..9: note = Seed: VVGACGVGK (KRAS G12C)
MVGKCRVGT

SEQ ID NO: 6415 - protein, 9 aa, synthetic construct
  source 1..9: note = Seed: VVGACGVGK (KRAS G12C)
MVGKCRVGV

SEQ ID NO: 6416 - protein, 9 aa, synthetic construct
  source 1..9: note = Seed: VVGACGVGK (KRAS G12C)
MVGKCRVGY

SEQ ID NO: 6417 - protein, 9 aa, synthetic construct
  source 1..9: note = Seed: VVGACGVGK (KRAS G12C)
MVGKCSVGR

SEQ ID NO: 6418 - protein, 9 aa, synthetic construct
  source 1..9: note = Seed: VVGACGVGK (KRAS G12C)
MVGKCTVGR

SEQ ID NO: 6419 - protein, 9 aa, synthetic construct
  source 1..9: note = Seed: VVGACGVGK (KRAS G12C)
MVGKCVVGR

SEQ ID NO: 6420 - protein, 9 aa, synthetic construct
  source 1..9: note = Seed: VVGACGVGK (KRAS G12C)
MVGLCKVGA

SEQ ID NO: 6421 - protein, 9 aa, synthetic construct
  source 1..9: note = Seed: VVGACGVGK (KRAS G12C)
MVGLCKVGG

SEQ ID NO: 6422 - protein, 9 aa, synthetic construct
  source 1..9: note = Seed: VVGACGVGK (KRAS G12C)
MVGLCKVGH

SEQ ID NO: 6423 - protein, 9 aa, synthetic construct
  source 1..9: note = Seed: VVGACGVGK (KRAS G12C)
MVGLCKVGK

SEQ ID NO: 6424 - protein, 9 aa, synthetic construct
  source 1..9: note = Seed: VVGACGVGK (KRAS G12C)
MVGLCKVGM

SEQ ID NO: 6425 - protein, 9 aa, synthetic construct
  source 1..9: note = Seed: VVGACGVGK (KRAS G12C)
MVGLCKVGN

SEQ ID NO: 6426 - protein, 9 aa, synthetic construct
  source 1..9: note = Seed: VVGACGVGK (KRAS G12C)
MVGLCKVGQ

SEQ ID NO: 6427 - protein, 9 aa, synthetic construct
  source 1..9: note = Seed: VVGACGVGK (KRAS G12C)
MVGLCKVGR

SEQ ID NO: 6428 - protein, 9 aa, synthetic construct
  source 1..9: note = Seed: VVGACGVGK (KRAS G12C)
MVGLCKVGS

SEQ ID NO: 6429 - protein, 9 aa, synthetic construct
  source 1..9: note = Seed: VVGACGVGK (KRAS G12C)
MVGLCKVGT

SEQ ID NO: 6430 - protein, 9 aa, synthetic construct
  source 1..9: note = Seed: VVGACGVGK (KRAS G12C)
MVGLCKVGV

SEQ ID NO: 6431 - protein, 9 aa, synthetic construct
  source 1..9: note = Seed: VVGACGVGK (KRAS G12C)
MVGLCKVGY

SEQ ID NO: 6432 - protein, 9 aa, synthetic construct
  source 1..9: note = Seed: VVGACGVGK (KRAS G12C)
MVGLCRVGA

SEQ ID NO: 6433 - protein, 9 aa, synthetic construct
  source 1..9: note = Seed: VVGACGVGK (KRAS G12C)
MVGLCRVGG

SEQ ID NO: 6434 - protein, 9 aa, synthetic construct
  source 1..9: note = Seed: VVGACGVGK (KRAS G12C)
MVGLCRVGH

SEQ ID NO: 6435 - protein, 9 aa, synthetic construct
  source 1..9: note = Seed: VVGACGVGK (KRAS G12C)
MVGLCRVGI

SEQ ID NO: 6436 - protein, 9 aa, synthetic construct
  source 1..9: note = Seed: VVGACGVGK (KRAS G12C)
MVGLCRVGK

SEQ ID NO: 6437 - protein, 9 aa, synthetic construct
  source 1..9: note = Seed: VVGACGVGK (KRAS G12C)
MVGLCRVGL

SEQ ID NO: 6438 - protein, 9 aa, synthetic construct
  source 1..9: note = Seed: VVGACGVGK (KRAS G12C)
MVGLCRVGM

SEQ ID NO: 6439 - protein, 9 aa, synthetic construct
  source 1..9: note = Seed: VVGACGVGK (KRAS G12C)
MVGLCRVGN

SEQ ID NO: 6440 - protein, 9 aa, synthetic construct
  source 1..9: note = Seed: VVGACGVGK (KRAS G12C)
MVGLCRVGP

SEQ ID NO: 6441 - protein, 9 aa, synthetic construct
  source 1..9: note = Seed: VVGACGVGK (KRAS G12C)
MVGLCRVGQ

SEQ ID NO: 6442 - protein, 9 aa, synthetic construct
  source 1..9: note = Seed: VVGACGVGK (KRAS G12C)
MVGLCRVGR

SEQ ID NO: 6443 - protein, 9 aa, synthetic construct
  source 1..9: note = Seed: VVGACGVGK (KRAS G12C)
MVGLCRVGS

SEQ ID NO: 6444 - protein, 9 aa, synthetic construct
  source 1..9: note = Seed: VVGACGVGK (KRAS G12C)
MVGLCRVGT

SEQ ID NO: 6445 - protein, 9 aa, synthetic construct
  source 1..9: note = Seed: VVGACGVGK (KRAS G12C)
MVGLCRVGV

SEQ ID NO: 6446 - protein, 9 aa, synthetic construct
  source 1..9: note = Seed: VVGACGVGK (KRAS G12C)
MVGLCRVGY

SEQ ID NO: 6447 - protein, 9 aa, synthetic construct
  source 1..9: note = Seed: VVGACGVGK (KRAS G12C)
MVGMCKVGA

SEQ ID NO: 6448 - protein, 9 aa, synthetic construct
  source 1..9: note = Seed: VVGACGVGK (KRAS G12C)
MVGMCKVGG

SEQ ID NO: 6449 - protein, 9 aa, synthetic construct
  source 1..9: note = Seed: VVGACGVGK (KRAS G12C)
MVGMCKVGH

SEQ ID NO: 6450 - protein, 9 aa, synthetic construct
  source 1..9: note = Seed: VVGACGVGK (KRAS G12C)
MVGMCKVGI

SEQ ID NO: 6451 - protein, 9 aa, synthetic construct
  source 1..9: note = Seed: VVGACGVGK (KRAS G12C)
MVGMCKVGK

SEQ ID NO: 6452 - protein, 9 aa, synthetic construct
  source 1..9: note = Seed: VVGACGVGK (KRAS G12C)
MVGMCKVGL

SEQ ID NO: 6453 - protein, 9 aa, synthetic construct
  source 1..9: note = Seed: VVGACGVGK (KRAS G12C)
MVGMCKVGM

SEQ ID NO: 6454 - protein, 9 aa, synthetic construct
  source 1..9: note = Seed: VVGACGVGK (KRAS G12C)
MVGMCKVGN

SEQ ID NO: 6455 - protein, 9 aa, synthetic construct
  source 1..9: note = Seed: VVGACGVGK (KRAS G12C)
MVGMCKVGQ

SEQ ID NO: 6456 - protein, 9 aa, synthetic construct
  source 1..9: note = Seed: VVGACGVGK (KRAS G12C)
MVGMCKVGR

SEQ ID NO: 6457 - protein, 9 aa, synthetic construct
  source 1..9: note = Seed: VVGACGVGK (KRAS G12C)
MVGMCKVGS

SEQ ID NO: 6458 - protein, 9 aa, synthetic construct
  source 1..9: note = Seed: VVGACGVGK (KRAS G12C)
MVGMCKVGT

SEQ ID NO: 6459 - protein, 9 aa, synthetic construct
  source 1..9: note = Seed: VVGACGVGK (KRAS G12C)
MVGMCKVGV

SEQ ID NO: 6460 - protein, 9 aa, synthetic construct
  source 1..9: note = Seed: VVGACGVGK (KRAS G12C)
MVGMCKVGY

SEQ ID NO: 6461 - protein, 9 aa, synthetic construct
  source 1..9: note = Seed: VVGACGVGK (KRAS G12C)
MVGMCRVGA

SEQ ID NO: 6462 - protein, 9 aa, synthetic construct
  source 1..9: note = Seed: VVGACGVGK (KRAS G12C)
MVGMCRVGG

SEQ ID NO: 6463 - protein, 9 aa, synthetic construct
  source 1..9: note = Seed: VVGACGVGK (KRAS G12C)
MVGMCRVGH

SEQ ID NO: 6464 - protein, 9 aa, synthetic construct
  source 1..9: note = Seed: VVGACGVGK (KRAS G12C)
MVGMCRVGI

SEQ ID NO: 6465 - protein, 9 aa, synthetic construct
  source 1..9: note = Seed: VVGACGVGK (KRAS G12C)
MVGMCRVGK

SEQ ID NO: 6466 - protein, 9 aa, synthetic construct
  source 1..9: note = Seed: VVGACGVGK (KRAS G12C)
MVGMCRVGL

SEQ ID NO: 6467 - protein, 9 aa, synthetic construct
  source 1..9: note = Seed: VVGACGVGK (KRAS G12C)
MVGMCRVGM

SEQ ID NO: 6468 - protein, 9 aa, synthetic construct
  source 1..9: note = Seed: VVGACGVGK (KRAS G12C)
MVGMCRVGN

SEQ ID NO: 6469 - protein, 9 aa, synthetic construct
  source 1..9: note = Seed: VVGACGVGK (KRAS G12C)
MVGMCRVGP

SEQ ID NO: 6470 - protein, 9 aa, synthetic construct
  source 1..9: note = Seed: VVGACGVGK (KRAS G12C)
MVGMCRVGQ

SEQ ID NO: 6471 - protein, 9 aa, synthetic construct
  source 1..9: note = Seed: VVGACGVGK (KRAS G12C)
MVGMCRVGR

SEQ ID NO: 6472 - protein, 9 aa, synthetic construct
  source 1..9: note = Seed: VVGACGVGK (KRAS G12C)
MVGMCRVGS

SEQ ID NO: 6473 - protein, 9 aa, synthetic construct
  source 1..9: note = Seed: VVGACGVGK (KRAS G12C)
MVGMCRVGT

SEQ ID NO: 6474 - protein, 9 aa, synthetic construct
  source 1..9: note = Seed: VVGACGVGK (KRAS G12C)
MVGMCRVGV

SEQ ID NO: 6475 - protein, 9 aa, synthetic construct
  source 1..9: note = Seed: VVGACGVGK (KRAS G12C)
MVGMCRVGY

SEQ ID NO: 6476 - protein, 9 aa, synthetic construct
  source 1..9: note = Seed: VVGACGVGK (KRAS G12C)
MVGNCKVGF

SEQ ID NO: 6477 - protein, 9 aa, synthetic construct
  source 1..9: note = Seed: VVGACGVGK (KRAS G12C)
MVGNCKVGR

SEQ ID NO: 6478 - protein, 9 aa, synthetic construct
  source 1..9: note = Seed: VVGACGVGK (KRAS G12C)
MVGNCKVGV

SEQ ID NO: 6479 - protein, 9 aa, synthetic construct
  source 1..9: note = Seed: VVGACGVGK (KRAS G12C)
MVGNCKVGY

SEQ ID NO: 6480 - protein, 9 aa, synthetic construct
  source 1..9: note = Seed: VVGACGVGK (KRAS G12C)
MVGNCRVGA

SEQ ID NO: 6481 - protein, 9 aa, synthetic construct
  source 1..9: note = Seed: VVGACGVGK (KRAS G12C)
MVGNCRVGF

SEQ ID NO: 6482 - protein, 9 aa, synthetic construct
  source 1..9: note = Seed: VVGACGVGK (KRAS G12C)
MVGNCRVGI

SEQ ID NO: 6483 - protein, 9 aa, synthetic construct
  source 1..9: note = Seed: VVGACGVGK (KRAS G12C)
MVGNCRVGK

SEQ ID NO: 6484 - protein, 9 aa, synthetic construct
  source 1..9: note = Seed: VVGACGVGK (KRAS G12C)
MVGNCRVGL

SEQ ID NO: 6485 - protein, 9 aa, synthetic construct
  source 1..9: note = Seed: VVGACGVGK (KRAS G12C)
MVGNCRVGM

SEQ ID NO: 6486 - protein, 9 aa, synthetic construct
  source 1..9: note = Seed: VVGACGVGK (KRAS G12C)
MVGNCRVGQ

SEQ ID NO: 6487 - protein, 9 aa, synthetic construct
  source 1..9: note = Seed: VVGACGVGK (KRAS G12C)
MVGNCRVGR

SEQ ID NO: 6488 - protein, 9 aa, synthetic construct
  source 1..9: note = Seed: VVGACGVGK (KRAS G12C)
MVGNCRVGS

SEQ ID NO: 6489 - protein, 9 aa, synthetic construct
  source 1..9: note = Seed: VVGACGVGK (KRAS G12C)
MVGNCRVGV

SEQ ID NO: 6490 - protein, 9 aa, synthetic construct
  source 1..9: note = Seed: VVGACGVGK (KRAS G12C)
MVGNCRVGY

SEQ ID NO: 6491 - protein, 9 aa, synthetic construct
  source 1..9: note = Seed: VVGACGVGK (KRAS G12C)
MVGQCKVGK

SEQ ID NO: 6492 - protein, 9 aa, synthetic construct
  source 1..9: note = Seed: VVGACGVGK (KRAS G12C)
MVGQCKVGR

SEQ ID NO: 6493 - protein, 9 aa, synthetic construct
  source 1..9: note = Seed: VVGACGVGK (KRAS G12C)
MVGQCRVGA

SEQ ID NO: 6494 - protein, 9 aa, synthetic construct
  source 1..9: note = Seed: VVGACGVGK (KRAS G12C)
MVGQCRVGF

SEQ ID NO: 6495 - protein, 9 aa, synthetic construct
  source 1..9: note = Seed: VVGACGVGK (KRAS G12C)
MVGQCRVGK

SEQ ID NO: 6496 - protein, 9 aa, synthetic construct
  source 1..9: note = Seed: VVGACGVGK (KRAS G12C)
MVGQCRVGQ

SEQ ID NO: 6497 - protein, 9 aa, synthetic construct
  source 1..9: note = Seed: VVGACGVGK (KRAS G12C)
MVGQCRVGR

SEQ ID NO: 6498 - protein, 9 aa, synthetic construct
  source 1..9: note = Seed: VVGACGVGK (KRAS G12C)
MVGQCRVGS

SEQ ID NO: 6499 - protein, 9 aa, synthetic construct
  source 1..9: note = Seed: VVGACGVGK (KRAS G12C)
MVGQCRVGY

SEQ ID NO: 6500 - protein, 9 aa, synthetic construct
  source 1..9: note = Seed: VVGACGVGK (KRAS G12C)
MVGRCAVGR

SEQ ID NO: 6501 - protein, 9 aa, synthetic construct
  source 1..9: note = Seed: VVGACGVGK (KRAS G12C)
MVGRCHVGR

SEQ ID NO: 6502 - protein, 9 aa, synthetic construct
  source 1..9: note = Seed: VVGACGVGK (KRAS G12C)
MVGRCKVGA

SEQ ID NO: 6503 - protein, 9 aa, synthetic construct
  source 1..9: note = Seed: VVGACGVGK (KRAS G12C)
MVGRCKVGF

SEQ ID NO: 6504 - protein, 9 aa, synthetic construct
  source 1..9: note = Seed: VVGACGVGK (KRAS G12C)
MVGRCKVGG

SEQ ID NO: 6505 - protein, 9 aa, synthetic construct
  source 1..9: note = Seed: VVGACGVGK (KRAS G12C)
MVGRCKVGI

SEQ ID NO: 6506 - protein, 9 aa, synthetic construct
  source 1..9: note = Seed: VVGACGVGK (KRAS G12C)
MVGRCKVGL

SEQ ID NO: 6507 - protein, 9 aa, synthetic construct
  source 1..9: note = Seed: VVGACGVGK (KRAS G12C)
MVGRCKVGM

SEQ ID NO: 6508 - protein, 9 aa, synthetic construct
  source 1..9: note = Seed: VVGACGVGK (KRAS G12C)
MVGRCKVGQ

SEQ ID NO: 6509 - protein, 9 aa, synthetic construct
  source 1..9: note = Seed: VVGACGVGK (KRAS G12C)
MVGRCKVGR

SEQ ID NO: 6510 - protein, 9 aa, synthetic construct
  source 1..9: note = Seed: VVGACGVGK (KRAS G12C)
MVGRCKVGS

SEQ ID NO: 6511 - protein, 9 aa, synthetic construct
  source 1..9: note = Seed: VVGACGVGK (KRAS G12C)
MVGRCKVGV

SEQ ID NO: 6512 - protein, 9 aa, synthetic construct
  source 1..9: note = Seed: VVGACGVGK (KRAS G12C)
MVGRCKVGY

SEQ ID NO: 6513 - protein, 9 aa, synthetic construct
  source 1..9: note = Seed: VVGACGVGK (KRAS G12C)
MVGRCNVGR

SEQ ID NO: 6514 - protein, 9 aa, synthetic construct
  source 1..9: note = Seed: VVGACGVGK (KRAS G12C)
MVGRCNVGY

SEQ ID NO: 6515 - protein, 9 aa, synthetic construct
  source 1..9: note = Seed: VVGACGVGK (KRAS G12C)
MVGRCQVGR

SEQ ID NO: 6516 - protein, 9 aa, synthetic construct
  source 1..9: note = Seed: VVGACGVGK (KRAS G12C)
MVGRCRVGA

SEQ ID NO: 6517 - protein, 9 aa, synthetic construct
  source 1..9: note = Seed: VVGACGVGK (KRAS G12C)
MVGRCRVGF

SEQ ID NO: 6518 - protein, 9 aa, synthetic construct
  source 1..9: note = Seed: VVGACGVGK (KRAS G12C)
MVGRCRVGG

SEQ ID NO: 6519 - protein, 9 aa, synthetic construct
  source 1..9: note = Seed: VVGACGVGK (KRAS G12C)
MVGRCRVGI

SEQ ID NO: 6520 - protein, 9 aa, synthetic construct
  source 1..9: note = Seed: VVGACGVGK (KRAS G12C)
MVGRCRVGL

SEQ ID NO: 6521 - protein, 9 aa, synthetic construct
  source 1..9: note = Seed: VVGACGVGK (KRAS G12C)
MVGRCRVGM

SEQ ID NO: 6522 - protein, 9 aa, synthetic construct
  source 1..9: note = Seed: VVGACGVGK (KRAS G12C)
MVGRCRVGQ

SEQ ID NO: 6523 - protein, 9 aa, synthetic construct
  source 1..9: note = Seed: VVGACGVGK (KRAS G12C)
MVGRCRVGR

SEQ ID NO: 6524 - protein, 9 aa, synthetic construct
  source 1..9: note = Seed: VVGACGVGK (KRAS G12C)
MVGRCRVGS

SEQ ID NO: 6525 - protein, 9 aa, synthetic construct
  source 1..9: note = Seed: VVGACGVGK (KRAS G12C)
MVGRCRVGV

SEQ ID NO: 6526 - protein, 9 aa, synthetic construct
  source 1..9: note = Seed: VVGACGVGK (KRAS G12C)
MVGRCRVGY

SEQ ID NO: 6527 - protein, 9 aa, synthetic construct
  source 1..9: note = Seed: VVGACGVGK (KRAS G12C)
MVGRCSVGR

SEQ ID NO: 6528 - protein, 9 aa, synthetic construct
  source 1..9: note = Seed: VVGACGVGK (KRAS G12C)
MVGRCTVGR

SEQ ID NO: 6529 - protein, 9 aa, synthetic construct
  source 1..9: note = Seed: VVGACGVGK (KRAS G12C)
MVGRCVVGR

SEQ ID NO: 6530 - protein, 9 aa, synthetic construct
  source 1..9: note = Seed: VVGACGVGK (KRAS G12C)
MVGSCKVGK

SEQ ID NO: 6531 - protein, 9 aa, synthetic construct
  source 1..9: note = Seed: VVGACGVGK (KRAS G12C)
MVGSCKVGR

SEQ ID NO: 6532 - protein, 9 aa, synthetic construct
  source 1..9: note = Seed: VVGACGVGK (KRAS G12C)
MVGSCKVGY

SEQ ID NO: 6533 - protein, 9 aa, synthetic construct
  source 1..9: note = Seed: VVGACGVGK (KRAS G12C)
MVGSCRVGA

SEQ ID NO: 6534 - protein, 9 aa, synthetic construct
  source 1..9: note = Seed: VVGACGVGK (KRAS G12C)
MVGSCRVGF

SEQ ID NO: 6535 - protein, 9 aa, synthetic construct
  source 1..9: note = Seed: VVGACGVGK (KRAS G12C)
MVGSCRVGI

SEQ ID NO: 6536 - protein, 9 aa, synthetic construct
  source 1..9: note = Seed: VVGACGVGK (KRAS G12C)
MVGSCRVGK

SEQ ID NO: 6537 - protein, 9 aa, synthetic construct
  source 1..9: note = Seed: VVGACGVGK (KRAS G12C)
MVGSCRVGL

SEQ ID NO: 6538 - protein, 9 aa, synthetic construct
  source 1..9: note = Seed: VVGACGVGK (KRAS G12C)
MVGSCRVGM

SEQ ID NO: 6539 - protein, 9 aa, synthetic construct
  source 1..9: note = Seed: VVGACGVGK (KRAS G12C)
MVGSCRVGQ

SEQ ID NO: 6540 - protein, 9 aa, synthetic construct
  source 1..9: note = Seed: VVGACGVGK (KRAS G12C)
MVGSCRVGR

SEQ ID NO: 6541 - protein, 9 aa, synthetic construct
  source 1..9: note = Seed: VVGACGVGK (KRAS G12C)
MVGSCRVGS

SEQ ID NO: 6542 - protein, 9 aa, synthetic construct
  source 1..9: note = Seed: VVGACGVGK (KRAS G12C)
MVGSCRVGV

SEQ ID NO: 6543 - protein, 9 aa, synthetic construct
  source 1..9: note = Seed: VVGACGVGK (KRAS G12C)
MVGSCRVGY

SEQ ID NO: 6544 - protein, 9 aa, synthetic construct
  source 1..9: note = Seed: VVGACGVGK (KRAS G12C)
MVGTCKVGK

SEQ ID NO: 6545 - protein, 9 aa, synthetic construct
  source 1..9: note = Seed: VVGACGVGK (KRAS G12C)
MVGTCKVGR

SEQ ID NO: 6546 - protein, 9 aa, synthetic construct
  source 1..9: note = Seed: VVGACGVGK (KRAS G12C)
MVGTCKVGY

SEQ ID NO: 6547 - protein, 9 aa, synthetic construct
  source 1..9: note = Seed: VVGACGVGK (KRAS G12C)
MVGTCRVGA

SEQ ID NO: 6548 - protein, 9 aa, synthetic construct
  source 1..9: note = Seed: VVGACGVGK (KRAS G12C)
MVGTCRVGF

SEQ ID NO: 6549 - protein, 9 aa, synthetic construct
  source 1..9: note = Seed: VVGACGVGK (KRAS G12C)
MVGTCRVGH

SEQ ID NO: 6550 - protein, 9 aa, synthetic construct
  source 1..9: note = Seed: VVGACGVGK (KRAS G12C)
MVGTCRVGI

SEQ ID NO: 6551 - protein, 9 aa, synthetic construct
  source 1..9: note = Seed: VVGACGVGK (KRAS G12C)
MVGTCRVGK

SEQ ID NO: 6552 - protein, 9 aa, synthetic construct
  source 1..9: note = Seed: VVGACGVGK (KRAS G12C)
MVGTCRVGL

SEQ ID NO: 6553 - protein, 9 aa, synthetic construct
  source 1..9: note = Seed: VVGACGVGK (KRAS G12C)
MVGTCRVGM

SEQ ID NO: 6554 - protein, 9 aa, synthetic construct
  source 1..9: note = Seed: VVGACGVGK (KRAS G12C)
MVGTCRVGR

SEQ ID NO: 6555 - protein, 9 aa, synthetic construct
  source 1..9: note = Seed: VVGACGVGK (KRAS G12C)
MVGTCRVGS

SEQ ID NO: 6556 - protein, 9 aa, synthetic construct
  source 1..9: note = Seed: VVGACGVGK (KRAS G12C)
MVGTCRVGV

SEQ ID NO: 6557 - protein, 9 aa, synthetic construct
  source 1..9: note = Seed: VVGACGVGK (KRAS G12C)
MVGTCRVGY

SEQ ID NO: 6558 - protein, 9 aa, synthetic construct
  source 1..9: note = Seed: VVGACGVGK (KRAS G12C)
MVGVCKVGA

SEQ ID NO: 6559 - protein, 9 aa, synthetic construct
  source 1..9: note = Seed: VVGACGVGK (KRAS G12C)
MVGVCKVGG

SEQ ID NO: 6560 - protein, 9 aa, synthetic construct
  source 1..9: note = Seed: VVGACGVGK (KRAS G12C)
MVGVCKVGH

SEQ ID NO: 6561 - protein, 9 aa, synthetic construct
  source 1..9: note = Seed: VVGACGVGK (KRAS G12C)
MVGVCKVGK

SEQ ID NO: 6562 - protein, 9 aa, synthetic construct
  source 1..9: note = Seed: VVGACGVGK (KRAS G12C)
MVGVCKVGQ

SEQ ID NO: 6563 - protein, 9 aa, synthetic construct
  source 1..9: note = Seed: VVGACGVGK (KRAS G12C)
MVGVCKVGR

SEQ ID NO: 6564 - protein, 9 aa, synthetic construct
  source 1..9: note = Seed: VVGACGVGK (KRAS G12C)
MVGVCKVGS

SEQ ID NO: 6565 - protein, 9 aa, synthetic construct
  source 1..9: note = Seed: VVGACGVGK (KRAS G12C)
MVGVCKVGY

SEQ ID NO: 6566 - protein, 9 aa, synthetic construct
  source 1..9: note = Seed: VVGACGVGK (KRAS G12C)
MVGVCRVGA

SEQ ID NO: 6567 - protein, 9 aa, synthetic construct
  source 1..9: note = Seed: VVGACGVGK (KRAS G12C)
MVGVCRVGG

SEQ ID NO: 6568 - protein, 9 aa, synthetic construct
  source 1..9: note = Seed: VVGACGVGK (KRAS G12C)
MVGVCRVGH

SEQ ID NO: 6569 - protein, 9 aa, synthetic construct
  source 1..9: note = Seed: VVGACGVGK (KRAS G12C)
MVGVCRVGK

SEQ ID NO: 6570 - protein, 9 aa, synthetic construct
  source 1..9: note = Seed: VVGACGVGK (KRAS G12C)
MVGVCRVGQ

SEQ ID NO: 6571 - protein, 9 aa, synthetic construct
  source 1..9: note = Seed: VVGACGVGK (KRAS G12C)
MVGVCRVGR

SEQ ID NO: 6572 - protein, 9 aa, synthetic construct
  source 1..9: note = Seed: VVGACGVGK (KRAS G12C)
MVGVCRVGS

SEQ ID NO: 6573 - protein, 9 aa, synthetic construct
  source 1..9: note = Seed: VVGACGVGK (KRAS G12C)
MVGVCRVGT

SEQ ID NO: 6574 - protein, 9 aa, synthetic construct
  source 1..9: note = Seed: VVGACGVGK (KRAS G12C)
MVGVCRVGY

SEQ ID NO: 6575 - protein, 9 aa, synthetic construct
  source 1..9: note = Seed: VVGACGVGK (KRAS G12C)
MVGWCKVGF

SEQ ID NO: 6576 - protein, 9 aa, synthetic construct
  source 1..9: note = Seed: VVGACGVGK (KRAS G12C)
MVGWCKVGK

SEQ ID NO: 6577 - protein, 9 aa, synthetic construct
  source 1..9: note = Seed: VVGACGVGK (KRAS G12C)
MVGWCKVGR

SEQ ID NO: 6578 - protein, 9 aa, synthetic construct
  source 1..9: note = Seed: VVGACGVGK (KRAS G12C)
MVGWCKVGY

SEQ ID NO: 6579 - protein, 9 aa, synthetic construct
  source 1..9: note = Seed: VVGACGVGK (KRAS G12C)
MVGWCRVGA

SEQ ID NO: 6580 - protein, 9 aa, synthetic construct
  source 1..9: note = Seed: VVGACGVGK (KRAS G12C)
MVGWCRVGF

SEQ ID NO: 6581 - protein, 9 aa, synthetic construct
  source 1..9: note = Seed: VVGACGVGK (KRAS G12C)
MVGWCRVGH

SEQ ID NO: 6582 - protein, 9 aa, synthetic construct
  source 1..9: note = Seed: VVGACGVGK (KRAS G12C)
MVGWCRVGK

SEQ ID NO: 6583 - protein, 9 aa, synthetic construct
  source 1..9: note = Seed: VVGACGVGK (KRAS G12C)
MVGWCRVGR

SEQ ID NO: 6584 - protein, 9 aa, synthetic construct
  source 1..9: note = Seed: VVGACGVGK (KRAS G12C)
MVGWCRVGS

SEQ ID NO: 6585 - protein, 9 aa, synthetic construct
  source 1..9: note = Seed: VVGACGVGK (KRAS G12C)
MVGWCRVGY

SEQ ID NO: 6586 - protein, 9 aa, synthetic construct
  source 1..9: note = Seed: VVGACGVGK (KRAS G12C)
MVGYCKVGK

SEQ ID NO: 6587 - protein, 9 aa, synthetic construct
  source 1..9: note = Seed: VVGACGVGK (KRAS G12C)
MVGYCKVGR

SEQ ID NO: 6588 - protein, 9 aa, synthetic construct
  source 1..9: note = Seed: VVGACGVGK (KRAS G12C)
MVGYCKVGY

SEQ ID NO: 6589 - protein, 9 aa, synthetic construct
  source 1..9: note = Seed: VVGACGVGK (KRAS G12C)
MVGYCRVGH

SEQ ID NO: 6590 - protein, 9 aa, synthetic construct
  source 1..9: note = Seed: VVGACGVGK (KRAS G12C)
MVGYCRVGK

SEQ ID NO: 6591 - protein, 9 aa, synthetic construct
  source 1..9: note = Seed: VVGACGVGK (KRAS G12C)
MVGYCRVGR

SEQ ID NO: 6592 - protein, 9 aa, synthetic construct
  source 1..9: note = Seed: VVGACGVGK (KRAS G12C)
MVGYCRVGY

SEQ ID NO: 6593 - protein, 9 aa, synthetic construct
  source 1..9: note = Seed: VVGACGVGK (KRAS G12C)
VVGACKVGK

SEQ ID NO: 6594 - protein, 9 aa, synthetic construct
  source 1..9: note = Seed: VVGACGVGK (KRAS G12C)
VVGACKVGR

SEQ ID NO: 6595 - protein, 9 aa, synthetic construct
  source 1..9: note = Seed: VVGACGVGK (KRAS G12C)
VVGACKVGY

SEQ ID NO: 6596 - protein, 9 aa, synthetic construct
  source 1..9: note = Seed: VVGACGVGK (KRAS G12C)
VVGACRVGA

SEQ ID NO: 6597 - protein, 9 aa, synthetic construct
  source 1..9: note = Seed: VVGACGVGK (KRAS G12C)
VVGACRVGH

SEQ ID NO: 6598 - protein, 9 aa, synthetic construct
  source 1..9: note = Seed: VVGACGVGK (KRAS G12C)
VVGACRVGK

SEQ ID NO: 6599 - protein, 9 aa, synthetic construct
  source 1..9: note = Seed: VVGACGVGK (KRAS G12C)
VVGACRVGQ

SEQ ID NO: 6600 - protein, 9 aa, synthetic construct
  source 1..9: note = Seed: VVGACGVGK (KRAS G12C)
VVGACRVGR

SEQ ID NO: 6601 - protein, 9 aa, synthetic construct
  source 1..9: note = Seed: VVGACGVGK (KRAS G12C)
VVGACRVGS

SEQ ID NO: 6602 - protein, 9 aa, synthetic construct
  source 1..9: note = Seed: VVGACGVGK (KRAS G12C)
VVGACRVGY

SEQ ID NO: 6603 - protein, 9 aa, synthetic construct
  source 1..9: note = Seed: VVGACGVGK (KRAS G12C)
VVGFCKVGA

SEQ ID NO: 6604 - protein, 9 aa, synthetic construct
  source 1..9: note = Seed: VVGACGVGK (KRAS G12C)
VVGFCKVGG

SEQ ID NO: 6605 - protein, 9 aa, synthetic construct
  source 1..9: note = Seed: VVGACGVGK (KRAS G12C)
VVGFCKVGH

SEQ ID NO: 6606 - protein, 9 aa, synthetic construct
  source 1..9: note = Seed: VVGACGVGK (KRAS G12C)
VVGFCKVGK

SEQ ID NO: 6607 - protein, 9 aa, synthetic construct
  source 1..9: note = Seed: VVGACGVGK (KRAS G12C)
VVGFCKVGR

SEQ ID NO: 6608 - protein, 9 aa, synthetic construct
  source 1..9: note = Seed: VVGACGVGK (KRAS G12C)
VVGFCKVGS

SEQ ID NO: 6609 - protein, 9 aa, synthetic construct
  source 1..9: note = Seed: VVGACGVGK (KRAS G12C)
VVGFCKVGY

SEQ ID NO: 6610 - protein, 9 aa, synthetic construct
  source 1..9: note = Seed: VVGACGVGK (KRAS G12C)
VVGFCRVGA

SEQ ID NO: 6611 - protein, 9 aa, synthetic construct
  source 1..9: note = Seed: VVGACGVGK (KRAS G12C)
VVGFCRVGG

SEQ ID NO: 6612 - protein, 9 aa, synthetic construct
  source 1..9: note = Seed: VVGACGVGK (KRAS G12C)
VVGFCRVGH

SEQ ID NO: 6613 - protein, 9 aa, synthetic construct
  source 1..9: note = Seed: VVGACGVGK (KRAS G12C)
VVGFCRVGK

SEQ ID NO: 6614 - protein, 9 aa, synthetic construct
  source 1..9: note = Seed: VVGACGVGK (KRAS G12C)
VVGFCRVGQ

SEQ ID NO: 6615 - protein, 9 aa, synthetic construct
  source 1..9: note = Seed: VVGACGVGK (KRAS G12C)
VVGFCRVGR

SEQ ID NO: 6616 - protein, 9 aa, synthetic construct
  source 1..9: note = Seed: VVGACGVGK (KRAS G12C)
VVGFCRVGS

SEQ ID NO: 6617 - protein, 9 aa, synthetic construct
  source 1..9: note = Seed: VVGACGVGK (KRAS G12C)
VVGFCRVGY

SEQ ID NO: 6618 - protein, 9 aa, synthetic construct
  source 1..9: note = Seed: VVGACGVGK (KRAS G12C)
VVGGCRVGR

SEQ ID NO: 6619 - protein, 9 aa, synthetic construct
  source 1..9: note = Seed: VVGACGVGK (KRAS G12C)
VVGHCAVGR

SEQ ID NO: 6620 - protein, 9 aa, synthetic construct
  source 1..9: note = Seed: VVGACGVGK (KRAS G12C)
VVGHCIVGR

SEQ ID NO: 6621 - protein, 9 aa, synthetic construct
  source 1..9: note = Seed: VVGACGVGK (KRAS G12C)
VVGHCKVGF

SEQ ID NO: 6622 - protein, 9 aa, synthetic construct
  source 1..9: note = Seed: VVGACGVGK (KRAS G12C)
VVGHCKVGK

SEQ ID NO: 6623 - protein, 9 aa, synthetic construct
  source 1..9: note = Seed: VVGACGVGK (KRAS G12C)
VVGHCKVGR

SEQ ID NO: 6624 - protein, 9 aa, synthetic construct
  source 1..9: note = Seed: VVGACGVGK (KRAS G12C)
VVGHCKVGY

SEQ ID NO: 6625 - protein, 9 aa, synthetic construct
  source 1..9: note = Seed: VVGACGVGK (KRAS G12C)
VVGHCPVGR

SEQ ID NO: 6626 - protein, 9 aa, synthetic construct
  source 1..9: note = Seed: VVGACGVGK (KRAS G12C)
VVGHCRVGF

SEQ ID NO: 6627 - protein, 9 aa, synthetic construct
  source 1..9: note = Seed: VVGACGVGK (KRAS G12C)
VVGHCRVGH

SEQ ID NO: 6628 - protein, 9 aa, synthetic construct
  source 1..9: note = Seed: VVGACGVGK (KRAS G12C)
VVGHCRVGI

SEQ ID NO: 6629 - protein, 9 aa, synthetic construct
  source 1..9: note = Seed: VVGACGVGK (KRAS G12C)
VVGHCRVGK

SEQ ID NO: 6630 - protein, 9 aa, synthetic construct
  source 1..9: note = Seed: VVGACGVGK (KRAS G12C)
VVGHCRVGL

SEQ ID NO: 6631 - protein, 9 aa, synthetic construct
  source 1..9: note = Seed: VVGACGVGK (KRAS G12C)
VVGHCRVGM

SEQ ID NO: 6632 - protein, 9 aa, synthetic construct
  source 1..9: note = Seed: VVGACGVGK (KRAS G12C)
VVGHCRVGR

SEQ ID NO: 6633 - protein, 9 aa, synthetic construct
  source 1..9: note = Seed: VVGACGVGK (KRAS G12C)
VVGHCRVGV

SEQ ID NO: 6634 - protein, 9 aa, synthetic construct
  source 1..9: note = Seed: VVGACGVGK (KRAS G12C)
VVGHCRVGY

SEQ ID NO: 6635 - protein, 9 aa, synthetic construct
  source 1..9: note = Seed: VVGACGVGK (KRAS G12C)
VVGHCSVGR

SEQ ID NO: 6636 - protein, 9 aa, synthetic construct
  source 1..9: note = Seed: VVGACGVGK (KRAS G12C)
VVGHCTVGR

SEQ ID NO: 6637 - protein, 9 aa, synthetic construct
  source 1..9: note = Seed: VVGACGVGK (KRAS G12C)
VVGHCVVGR

SEQ ID NO: 6638 - protein, 9 aa, synthetic construct
  source 1..9: note = Seed: VVGACGVGK (KRAS G12C)
VVGICKVGA

SEQ ID NO: 6639 - protein, 9 aa, synthetic construct
  source 1..9: note = Seed: VVGACGVGK (KRAS G12C)
VVGICKVGG

SEQ ID NO: 6640 - protein, 9 aa, synthetic construct
  source 1..9: note = Seed: VVGACGVGK (KRAS G12C)
VVGICKVGH

SEQ ID NO: 6641 - protein, 9 aa, synthetic construct
  source 1..9: note = Seed: VVGACGVGK (KRAS G12C)
VVGICKVGK

SEQ ID NO: 6642 - protein, 9 aa, synthetic construct
  source 1..9: note = Seed: VVGACGVGK (KRAS G12C)
VVGICKVGQ

SEQ ID NO: 6643 - protein, 9 aa, synthetic construct
  source 1..9: note = Seed: VVGACGVGK (KRAS G12C)
VVGICKVGR

SEQ ID NO: 6644 - protein, 9 aa, synthetic construct
  source 1..9: note = Seed: VVGACGVGK (KRAS G12C)
VVGICKVGS

SEQ ID NO: 6645 - protein, 9 aa, synthetic construct
  source 1..9: note = Seed: VVGACGVGK (KRAS G12C)
VVGICKVGT

SEQ ID NO: 6646 - protein, 9 aa, synthetic construct
  source 1..9: note = Seed: VVGACGVGK (KRAS G12C)
VVGICKVGY

SEQ ID NO: 6647 - protein, 9 aa, synthetic construct
  source 1..9: note = Seed: VVGACGVGK (KRAS G12C)
VVGICRVGA

SEQ ID NO: 6648 - protein, 9 aa, synthetic construct
  source 1..9: note = Seed: VVGACGVGK (KRAS G12C)
VVGICRVGG

SEQ ID NO: 6649 - protein, 9 aa, synthetic construct
  source 1..9: note = Seed: VVGACGVGK (KRAS G12C)
VVGICRVGH

SEQ ID NO: 6650 - protein, 9 aa, synthetic construct
  source 1..9: note = Seed: VVGACGVGK (KRAS G12C)
VVGICRVGK

SEQ ID NO: 6651 - protein, 9 aa, synthetic construct
  source 1..9: note = Seed: VVGACGVGK (KRAS G12C)
VVGICRVGN

SEQ ID NO: 6652 - protein, 9 aa, synthetic construct
  source 1..9: note = Seed: VVGACGVGK (KRAS G12C)
VVGICRVGQ

SEQ ID NO: 6653 - protein, 9 aa, synthetic construct
  source 1..9: note = Seed: VVGACGVGK (KRAS G12C)
VVGICRVGR

SEQ ID NO: 6654 - protein, 9 aa, synthetic construct
  source 1..9: note = Seed: VVGACGVGK (KRAS G12C)
VVGICRVGS

SEQ ID NO: 6655 - protein, 9 aa, synthetic construct
  source 1..9: note = Seed: VVGACGVGK (KRAS G12C)
VVGICRVGT

SEQ ID NO: 6656 - protein, 9 aa, synthetic construct
  source 1..9: note = Seed: VVGACGVGK (KRAS G12C)
VVGICRVGY

SEQ ID NO: 6657 - protein, 9 aa, synthetic construct
  source 1..9: note = Seed: VVGACGVGK (KRAS G12C)
VVGKCAVGR

SEQ ID NO: 6658 - protein, 9 aa, synthetic construct
  source 1..9: note = Seed: VVGACGVGK (KRAS G12C)
VVGKCKVGA

SEQ ID NO: 6659 - protein, 9 aa, synthetic construct
  source 1..9: note = Seed: VVGACGVGK (KRAS G12C)
VVGKCKVGF

SEQ ID NO: 6660 - protein, 9 aa, synthetic construct
  source 1..9: note = Seed: VVGACGVGK (KRAS G12C)
VVGKCKVGH

SEQ ID NO: 6661 - protein, 9 aa, synthetic construct
  source 1..9: note = Seed: VVGACGVGK (KRAS G12C)
VVGKCKVGI

SEQ ID NO: 6662 - protein, 9 aa, synthetic construct
  source 1..9: note = Seed: VVGACGVGK (KRAS G12C)
VVGKCKVGK

SEQ ID NO: 6663 - protein, 9 aa, synthetic construct
  source 1..9: note = Seed: VVGACGVGK (KRAS G12C)
VVGKCKVGL

SEQ ID NO: 6664 - protein, 9 aa, synthetic construct
  source 1..9: note = Seed: VVGACGVGK (KRAS G12C)
VVGKCKVGM

SEQ ID NO: 6665 - protein, 9 aa, synthetic construct
  source 1..9: note = Seed: VVGACGVGK (KRAS G12C)
VVGKCKVGQ

SEQ ID NO: 6666 - protein, 9 aa, synthetic construct
  source 1..9: note = Seed: VVGACGVGK (KRAS G12C)
VVGKCKVGR

SEQ ID NO: 6667 - protein, 9 aa, synthetic construct
  source 1..9: note = Seed: VVGACGVGK (KRAS G12C)
VVGKCKVGS

SEQ ID NO: 6668 - protein, 9 aa, synthetic construct
  source 1..9: note = Seed: VVGACGVGK (KRAS G12C)
VVGKCKVGV

SEQ ID NO: 6669 - protein, 9 aa, synthetic construct
  source 1..9: note = Seed: VVGACGVGK (KRAS G12C)
VVGKCKVGY

SEQ ID NO: 6670 - protein, 9 aa, synthetic construct
  source 1..9: note = Seed: VVGACGVGK (KRAS G12C)
VVGKCPVGR

SEQ ID NO: 6671 - protein, 9 aa, synthetic construct
  source 1..9: note = Seed: VVGACGVGK (KRAS G12C)
VVGKCRVGA

SEQ ID NO: 6672 - protein, 9 aa, synthetic construct
  source 1..9: note = Seed: VVGACGVGK (KRAS G12C)
VVGKCRVGF

SEQ ID NO: 6673 - protein, 9 aa, synthetic construct
  source 1..9: note = Seed: VVGACGVGK (KRAS G12C)
VVGKCRVGG

SEQ ID NO: 6674 - protein, 9 aa, synthetic construct
  source 1..9: note = Seed: VVGACGVGK (KRAS G12C)
VVGKCRVGH

SEQ ID NO: 6675 - protein, 9 aa, synthetic construct
  source 1..9: note = Seed: VVGACGVGK (KRAS G12C)
VVGKCRVGI

SEQ ID NO: 6676 - protein, 9 aa, synthetic construct
  source 1..9: note = Seed: VVGACGVGK (KRAS G12C)
VVGKCRVGK

SEQ ID NO: 6677 - protein, 9 aa, synthetic construct
  source 1..9: note = Seed: VVGACGVGK (KRAS G12C)
VVGKCRVGL

SEQ ID NO: 6678 - protein, 9 aa, synthetic construct
  source 1..9: note = Seed: VVGACGVGK (KRAS G12C)
VVGKCRVGM

SEQ ID NO: 6679 - protein, 9 aa, synthetic construct
  source 1..9: note = Seed: VVGACGVGK (KRAS G12C)
VVGKCRVGQ

SEQ ID NO: 6680 - protein, 9 aa, synthetic construct
  source 1..9: note = Seed: VVGACGVGK (KRAS G12C)
VVGKCRVGR

SEQ ID NO: 6681 - protein, 9 aa, synthetic construct
  source 1..9: note = Seed: VVGACGVGK (KRAS G12C)
VVGKCRVGS

SEQ ID NO: 6682 - protein, 9 aa, synthetic construct
  source 1..9: note = Seed: VVGACGVGK (KRAS G12C)
VVGKCRVGT

SEQ ID NO: 6683 - protein, 9 aa, synthetic construct
  source 1..9: note = Seed: VVGACGVGK (KRAS G12C)
VVGKCRVGV

SEQ ID NO: 6684 - protein, 9 aa, synthetic construct
  source 1..9: note = Seed: VVGACGVGK (KRAS G12C)
VVGKCRVGY

SEQ ID NO: 6685 - protein, 9 aa, synthetic construct
  source 1..9: note = Seed: VVGACGVGK (KRAS G12C)
VVGKCSVGR

SEQ ID NO: 6686 - protein, 9 aa, synthetic construct
  source 1..9: note = Seed: VVGACGVGK (KRAS G12C)
VVGLCKVGA

SEQ ID NO: 6687 - protein, 9 aa, synthetic construct
  source 1..9: note = Seed: VVGACGVGK (KRAS G12C)
VVGLCKVGG

SEQ ID NO: 6688 - protein, 9 aa, synthetic construct
  source 1..9: note = Seed: VVGACGVGK (KRAS G12C)
VVGLCKVGH

SEQ ID NO: 6689 - protein, 9 aa, synthetic construct
  source 1..9: note = Seed: VVGACGVGK (KRAS G12C)
VVGLCKVGK

SEQ ID NO: 6690 - protein, 9 aa, synthetic construct
  source 1..9: note = Seed: VVGACGVGK (KRAS G12C)
VVGLCKVGM

SEQ ID NO: 6691 - protein, 9 aa, synthetic construct
  source 1..9: note = Seed: VVGACGVGK (KRAS G12C)
VVGLCKVGN

SEQ ID NO: 6692 - protein, 9 aa, synthetic construct
  source 1..9: note = Seed: VVGACGVGK (KRAS G12C)
VVGLCKVGQ

SEQ ID NO: 6693 - protein, 9 aa, synthetic construct
  source 1..9: note = Seed: VVGACGVGK (KRAS G12C)
VVGLCKVGR

SEQ ID NO: 6694 - protein, 9 aa, synthetic construct
  source 1..9: note = Seed: VVGACGVGK (KRAS G12C)
VVGLCKVGS

SEQ ID NO: 6695 - protein, 9 aa, synthetic construct
  source 1..9: note = Seed: VVGACGVGK (KRAS G12C)
VVGLCKVGT

SEQ ID NO: 6696 - protein, 9 aa, synthetic construct
  source 1..9: note = Seed: VVGACGVGK (KRAS G12C)
VVGLCKVGY

SEQ ID NO: 6697 - protein, 9 aa, synthetic construct
  source 1..9: note = Seed: VVGACGVGK (KRAS G12C)
VVGLCRVGA

SEQ ID NO: 6698 - protein, 9 aa, synthetic construct
  source 1..9: note = Seed: VVGACGVGK (KRAS G12C)
VVGLCRVGG

SEQ ID NO: 6699 - protein, 9 aa, synthetic construct
  source 1..9: note = Seed: VVGACGVGK (KRAS G12C)
VVGLCRVGH

SEQ ID NO: 6700 - protein, 9 aa, synthetic construct
  source 1..9: note = Seed: VVGACGVGK (KRAS G12C)
VVGLCRVGK

SEQ ID NO: 6701 - protein, 9 aa, synthetic construct
  source 1..9: note = Seed: VVGACGVGK (KRAS G12C)
VVGLCRVGM

SEQ ID NO: 6702 - protein, 9 aa, synthetic construct
  source 1..9: note = Seed: VVGACGVGK (KRAS G12C)
VVGLCRVGN

SEQ ID NO: 6703 - protein, 9 aa, synthetic construct
  source 1..9: note = Seed: VVGACGVGK (KRAS G12C)
VVGLCRVGQ

SEQ ID NO: 6704 - protein, 9 aa, synthetic construct
  source 1..9: note = Seed: VVGACGVGK (KRAS G12C)
VVGLCRVGR

SEQ ID NO: 6705 - protein, 9 aa, synthetic construct
  source 1..9: note = Seed: VVGACGVGK (KRAS G12C)
VVGLCRVGS

SEQ ID NO: 6706 - protein, 9 aa, synthetic construct
  source 1..9: note = Seed: VVGACGVGK (KRAS G12C)
VVGLCRVGT

SEQ ID NO: 6707 - protein, 9 aa, synthetic construct
  source 1..9: note = Seed: VVGACGVGK (KRAS G12C)
VVGLCRVGV

SEQ ID NO: 6708 - protein, 9 aa, synthetic construct
  source 1..9: note = Seed: VVGACGVGK (KRAS G12C)
VVGLCRVGY

SEQ ID NO: 6709 - protein, 9 aa, synthetic construct
  source 1..9: note = Seed: VVGACGVGK (KRAS G12C)
VVGMCKVGA

SEQ ID NO: 6710 - protein, 9 aa, synthetic construct
  source 1..9: note = Seed: VVGACGVGK (KRAS G12C)
VVGMCKVGG

SEQ ID NO: 6711 - protein, 9 aa, synthetic construct
  source 1..9: note = Seed: VVGACGVGK (KRAS G12C)
VVGMCKVGH

SEQ ID NO: 6712 - protein, 9 aa, synthetic construct
  source 1..9: note = Seed: VVGACGVGK (KRAS G12C)
VVGMCKVGK

SEQ ID NO: 6713 - protein, 9 aa, synthetic construct
  source 1..9: note = Seed: VVGACGVGK (KRAS G12C)
VVGMCKVGM

SEQ ID NO: 6714 - protein, 9 aa, synthetic construct
  source 1..9: note = Seed: VVGACGVGK (KRAS G12C)
VVGMCKVGN

SEQ ID NO: 6715 - protein, 9 aa, synthetic construct
  source 1..9: note = Seed: VVGACGVGK (KRAS G12C)
VVGMCKVGQ

SEQ ID NO: 6716 - protein, 9 aa, synthetic construct
  source 1..9: note = Seed: VVGACGVGK (KRAS G12C)
VVGMCKVGR

SEQ ID NO: 6717 - protein, 9 aa, synthetic construct
  source 1..9: note = Seed: VVGACGVGK (KRAS G12C)
VVGMCKVGS

SEQ ID NO: 6718 - protein, 9 aa, synthetic construct
  source 1..9: note = Seed: VVGACGVGK (KRAS G12C)
VVGMCKVGT

SEQ ID NO: 6719 - protein, 9 aa, synthetic construct
  source 1..9: note = Seed: VVGACGVGK (KRAS G12C)
VVGMCKVGV

SEQ ID NO: 6720 - protein, 9 aa, synthetic construct
  source 1..9: note = Seed: VVGACGVGK (KRAS G12C)
VVGMCKVGY

SEQ ID NO: 6721 - protein, 9 aa, synthetic construct
  source 1..9: note = Seed: VVGACGVGK (KRAS G12C)
VVGMCRVGA

SEQ ID NO: 6722 - protein, 9 aa, synthetic construct
  source 1..9: note = Seed: VVGACGVGK (KRAS G12C)
VVGMCRVGG

SEQ ID NO: 6723 - protein, 9 aa, synthetic construct
  source 1..9: note = Seed: VVGACGVGK (KRAS G12C)
VVGMCRVGH

SEQ ID NO: 6724 - protein, 9 aa, synthetic construct
  source 1..9: note = Seed: VVGACGVGK (KRAS G12C)
VVGMCRVGI

SEQ ID NO: 6725 - protein, 9 aa, synthetic construct
  source 1..9: note = Seed: VVGACGVGK (KRAS G12C)
VVGMCRVGK

SEQ ID NO: 6726 - protein, 9 aa, synthetic construct
  source 1..9: note = Seed: VVGACGVGK (KRAS G12C)
VVGMCRVGL

SEQ ID NO: 6727 - protein, 9 aa, synthetic construct
  source 1..9: note = Seed: VVGACGVGK (KRAS G12C)
VVGMCRVGM

SEQ ID NO: 6728 - protein, 9 aa, synthetic construct
  source 1..9: note = Seed: VVGACGVGK (KRAS G12C)
VVGMCRVGN

SEQ ID NO: 6729 - protein, 9 aa, synthetic construct
  source 1..9: note = Seed: VVGACGVGK (KRAS G12C)
VVGMCRVGP

SEQ ID NO: 6730 - protein, 9 aa, synthetic construct
  source 1..9: note = Seed: VVGACGVGK (KRAS G12C)
VVGMCRVGQ

SEQ ID NO: 6731 - protein, 9 aa, synthetic construct
  source 1..9: note = Seed: VVGACGVGK (KRAS G12C)
VVGMCRVGR

SEQ ID NO: 6732 - protein, 9 aa, synthetic construct
  source 1..9: note = Seed: VVGACGVGK (KRAS G12C)
VVGMCRVGS

SEQ ID NO: 6733 - protein, 9 aa, synthetic construct
  source 1..9: note = Seed: VVGACGVGK (KRAS G12C)
VVGMCRVGT

SEQ ID NO: 6734 - protein, 9 aa, synthetic construct
  source 1..9: note = Seed: VVGACGVGK (KRAS G12C)
VVGMCRVGV

SEQ ID NO: 6735 - protein, 9 aa, synthetic construct
  source 1..9: note = Seed: VVGACGVGK (KRAS G12C)
VVGMCRVGY

SEQ ID NO: 6736 - protein, 9 aa, synthetic construct
  source 1..9: note = Seed: VVGACGVGK (KRAS G12C)
VVGNCKVGR

SEQ ID NO: 6737 - protein, 9 aa, synthetic construct
  source 1..9: note = Seed: VVGACGVGK (KRAS G12C)
VVGNCRVGK

SEQ ID NO: 6738 - protein, 9 aa, synthetic construct
  source 1..9: note = Seed: VVGACGVGK (KRAS G12C)
VVGNCRVGR

SEQ ID NO: 6739 - protein, 9 aa, synthetic construct
  source 1..9: note = Seed: VVGACGVGK (KRAS G12C)
VVGNCRVGY

SEQ ID NO: 6740 - protein, 9 aa, synthetic construct
  source 1..9: note = Seed: VVGACGVGK (KRAS G12C)
VVGQCKVGR

SEQ ID NO: 6741 - protein, 9 aa, synthetic construct
  source 1..9: note = Seed: VVGACGVGK (KRAS G12C)
VVGQCRVGA

SEQ ID NO: 6742 - protein, 9 aa, synthetic construct
  source 1..9: note = Seed: VVGACGVGK (KRAS G12C)
VVGQCRVGK

SEQ ID NO: 6743 - protein, 9 aa, synthetic construct
  source 1..9: note = Seed: VVGACGVGK (KRAS G12C)
VVGQCRVGR

SEQ ID NO: 6744 - protein, 9 aa, synthetic construct
  source 1..9: note = Seed: VVGACGVGK (KRAS G12C)
VVGQCRVGS

SEQ ID NO: 6745 - protein, 9 aa, synthetic construct
  source 1..9: note = Seed: VVGACGVGK (KRAS G12C)
VVGQCRVGY

SEQ ID NO: 6746 - protein, 9 aa, synthetic construct
  source 1..9: note = Seed: VVGACGVGK (KRAS G12C)
VVGRCAVGR

SEQ ID NO: 6747 - protein, 9 aa, synthetic construct
  source 1..9: note = Seed: VVGACGVGK (KRAS G12C)
VVGRCKVGA

SEQ ID NO: 6748 - protein, 9 aa, synthetic construct
  source 1..9: note = Seed: VVGACGVGK (KRAS G12C)
VVGRCKVGF

SEQ ID NO: 6749 - protein, 9 aa, synthetic construct
  source 1..9: note = Seed: VVGACGVGK (KRAS G12C)
VVGRCKVGK

SEQ ID NO: 6750 - protein, 9 aa, synthetic construct
  source 1..9: note = Seed: VVGACGVGK (KRAS G12C)
VVGRCKVGM

SEQ ID NO: 6751 - protein, 9 aa, synthetic construct
  source 1..9: note = Seed: VVGACGVGK (KRAS G12C)
VVGRCKVGR

SEQ ID NO: 6752 - protein, 9 aa, synthetic construct
  source 1..9: note = Seed: VVGACGVGK (KRAS G12C)
VVGRCKVGS

SEQ ID NO: 6753 - protein, 9 aa, synthetic construct
  source 1..9: note = Seed: VVGACGVGK (KRAS G12C)
VVGRCKVGV

SEQ ID NO: 6754 - protein, 9 aa, synthetic construct
  source 1..9: note = Seed: VVGACGVGK (KRAS G12C)
VVGRCKVGY

SEQ ID NO: 6755 - protein, 9 aa, synthetic construct
  source 1..9: note = Seed: VVGACGVGK (KRAS G12C)
VVGRCPVGY

SEQ ID NO: 6756 - protein, 9 aa, synthetic construct
  source 1..9: note = Seed: VVGACGVGK (KRAS G12C)
VVGRCRVGA

SEQ ID NO: 6757 - protein, 9 aa, synthetic construct
  source 1..9: note = Seed: VVGACGVGK (KRAS G12C)
VVGRCRVGF

SEQ ID NO: 6758 - protein, 9 aa, synthetic construct
  source 1..9: note = Seed: VVGACGVGK (KRAS G12C)
VVGRCRVGG

SEQ ID NO: 6759 - protein, 9 aa, synthetic construct
  source 1..9: note = Seed: VVGACGVGK (KRAS G12C)
VVGRCRVGH

SEQ ID NO: 6760 - protein, 9 aa, synthetic construct
  source 1..9: note = Seed: VVGACGVGK (KRAS G12C)
VVGRCRVGI

SEQ ID NO: 6761 - protein, 9 aa, synthetic construct
  source 1..9: note = Seed: VVGACGVGK (KRAS G12C)
VVGRCRVGK

SEQ ID NO: 6762 - protein, 9 aa, synthetic construct
  source 1..9: note = Seed: VVGACGVGK (KRAS G12C)
VVGRCRVGL

SEQ ID NO: 6763 - protein, 9 aa, synthetic construct
  source 1..9: note = Seed: VVGACGVGK (KRAS G12C)
VVGRCRVGM

SEQ ID NO: 6764 - protein, 9 aa, synthetic construct
  source 1..9: note = Seed: VVGACGVGK (KRAS G12C)
VVGRCRVGQ

SEQ ID NO: 6765 - protein, 9 aa, synthetic construct
  source 1..9: note = Seed: VVGACGVGK (KRAS G12C)
VVGRCRVGR

SEQ ID NO: 6766 - protein, 9 aa, synthetic construct
  source 1..9: note = Seed: VVGACGVGK (KRAS G12C)
VVGRCRVGS

SEQ ID NO: 6767 - protein, 9 aa, synthetic construct
  source 1..9: note = Seed: VVGACGVGK (KRAS G12C)
VVGRCRVGV

SEQ ID NO: 6768 - protein, 9 aa, synthetic construct
  source 1..9: note = Seed: VVGACGVGK (KRAS G12C)
VVGRCRVGY

SEQ ID NO: 6769 - protein, 9 aa, synthetic construct
  source 1..9: note = Seed: VVGACGVGK (KRAS G12C)
VVGRCSVGR

SEQ ID NO: 6770 - protein, 9 aa, synthetic construct
  source 1..9: note = Seed: VVGACGVGK (KRAS G12C)
VVGSCKVGR

SEQ ID NO: 6771 - protein, 9 aa, synthetic construct
  source 1..9: note = Seed: VVGACGVGK (KRAS G12C)
VVGSCKVGY

SEQ ID NO: 6772 - protein, 9 aa, synthetic construct
  source 1..9: note = Seed: VVGACGVGK (KRAS G12C)
VVGSCRVGK

SEQ ID NO: 6773 - protein, 9 aa, synthetic construct
  source 1..9: note = Seed: VVGACGVGK (KRAS G12C)
VVGSCRVGR

SEQ ID NO: 6774 - protein, 9 aa, synthetic construct
  source 1..9: note = Seed: VVGACGVGK (KRAS G12C)
VVGSCRVGY

SEQ ID NO: 6775 - protein, 9 aa, synthetic construct
  source 1..9: note = Seed: VVGACGVGK (KRAS G12C)
VVGTCKVGR

SEQ ID NO: 6776 - protein, 9 aa, synthetic construct
  source 1..9: note = Seed: VVGACGVGK (KRAS G12C)
VVGTCRVGK

SEQ ID NO: 6777 - protein, 9 aa, synthetic construct
  source 1..9: note = Seed: VVGACGVGK (KRAS G12C)
VVGTCRVGR

SEQ ID NO: 6778 - protein, 9 aa, synthetic construct
  source 1..9: note = Seed: VVGACGVGK (KRAS G12C)
VVGTCRVGY

SEQ ID NO: 6779 - protein, 9 aa, synthetic construct
  source 1..9: note = Seed: VVGACGVGK (KRAS G12C)
VVGVCKVGA

SEQ ID NO: 6780 - protein, 9 aa, synthetic construct
  source 1..9: note = Seed: VVGACGVGK (KRAS G12C)
VVGVCKVGG

SEQ ID NO: 6781 - protein, 9 aa, synthetic construct
  source 1..9: note = Seed: VVGACGVGK (KRAS G12C)
VVGVCKVGH

SEQ ID NO: 6782 - protein, 9 aa, synthetic construct
  source 1..9: note = Seed: VVGACGVGK (KRAS G12C)
VVGVCKVGK

SEQ ID NO: 6783 - protein, 9 aa, synthetic construct
  source 1..9: note = Seed: VVGACGVGK (KRAS G12C)
VVGVCKVGQ

SEQ ID NO: 6784 - protein, 9 aa, synthetic construct
  source 1..9: note = Seed: VVGACGVGK (KRAS G12C)
VVGVCKVGR

SEQ ID NO: 6785 - protein, 9 aa, synthetic construct
  source 1..9: note = Seed: VVGACGVGK (KRAS G12C)
VVGVCKVGS

SEQ ID NO: 6786 - protein, 9 aa, synthetic construct
  source 1..9: note = Seed: VVGACGVGK (KRAS G12C)
VVGVCRVGA

SEQ ID NO: 6787 - protein, 9 aa, synthetic construct
  source 1..9: note = Seed: VVGACGVGK (KRAS G12C)
VVGVCRVGG

SEQ ID NO: 6788 - protein, 9 aa, synthetic construct
  source 1..9: note = Seed: VVGACGVGK (KRAS G12C)
VVGVCRVGH

SEQ ID NO: 6789 - protein, 9 aa, synthetic construct
  source 1..9: note = Seed: VVGACGVGK (KRAS G12C)
VVGVCRVGK

SEQ ID NO: 6790 - protein, 9 aa, synthetic construct
  source 1..9: note = Seed: VVGACGVGK (KRAS G12C)
VVGVCRVGQ

SEQ ID NO: 6791 - protein, 9 aa, synthetic construct
  source 1..9: note = Seed: VVGACGVGK (KRAS G12C)
VVGVCRVGR

SEQ ID NO: 6792 - protein, 9 aa, synthetic construct
  source 1..9: note = Seed: VVGACGVGK (KRAS G12C)
VVGVCRVGS

SEQ ID NO: 6793 - protein, 9 aa, synthetic construct
  source 1..9: note = Seed: VVGACGVGK (KRAS G12C)
VVGVCRVGY

SEQ ID NO: 6794 - protein, 9 aa, synthetic construct
  source 1..9: note = Seed: VVGACGVGK (KRAS G12C)
VVGWCKVGK

SEQ ID NO: 6795 - protein, 9 aa, synthetic construct
  source 1..9: note = Seed: VVGACGVGK (KRAS G12C)
VVGWCKVGR

SEQ ID NO: 6796 - protein, 9 aa, synthetic construct
  source 1..9: note = Seed: VVGACGVGK (KRAS G12C)
VVGWCKVGY

SEQ ID NO: 6797 - protein, 9 aa, synthetic construct
  source 1..9: note = Seed: VVGACGVGK (KRAS G12C)
VVGWCRVGH

SEQ ID NO: 6798 - protein, 9 aa, synthetic construct
  source 1..9: note = Seed: VVGACGVGK (KRAS G12C)
VVGWCRVGK

SEQ ID NO: 6799 - protein, 9 aa, synthetic construct
  source 1..9: note = Seed: VVGACGVGK (KRAS G12C)
VVGWCRVGR

SEQ ID NO: 6800 - protein, 9 aa, synthetic construct
  source 1..9: note = Seed: VVGACGVGK (KRAS G12C)
VVGWCRVGY

SEQ ID NO: 6801 - protein, 9 aa, synthetic construct
  source 1..9: note = Seed: VVGACGVGK (KRAS G12C)
VVGYCKVGK

SEQ ID NO: 6802 - protein, 9 aa, synthetic construct
  source 1..9: note = Seed: VVGACGVGK (KRAS G12C)
VVGYCKVGR

SEQ ID NO: 6803 - protein, 9 aa, synthetic construct
  source 1..9: note = Seed: VVGACGVGK (KRAS G12C)
VVGYCRVGH

SEQ ID NO: 6804 - protein, 9 aa, synthetic construct
  source 1..9: note = Seed: VVGACGVGK (KRAS G12C)
VVGYCRVGK

SEQ ID NO: 6805 - protein, 9 aa, synthetic construct
  source 1..9: note = Seed: VVGACGVGK (KRAS G12C)
VVGYCRVGR

SEQ ID NO: 6806 - protein, 9 aa, synthetic construct
  source 1..9: note = Seed: VVGACGVGK (KRAS G12C)
WVGACRVGR

SEQ ID NO: 6807 - protein, 9 aa, synthetic construct
  source 1..9: note = Seed: VVGACGVGK (KRAS G12C)
WVGFCRVGR

SEQ ID NO: 6808 - protein, 9 aa, synthetic construct
  source 1..9: note = Seed: VVGACGVGK (KRAS G12C)
WVGHCRVGR

SEQ ID NO: 6809 - protein, 9 aa, synthetic construct
  source 1..9: note = Seed: VVGACGVGK (KRAS G12C)
WVGICKVGR

SEQ ID NO: 6810 - protein, 9 aa, synthetic construct
  source 1..9: note = Seed: VVGACGVGK (KRAS G12C)
WVGICRVGH

SEQ ID NO: 6811 - protein, 9 aa, synthetic construct
  source 1..9: note = Seed: VVGACGVGK (KRAS G12C)
WVGICRVGK

SEQ ID NO: 6812 - protein, 9 aa, synthetic construct
  source 1..9: note = Seed: VVGACGVGK (KRAS G12C)
WVGICRVGR

SEQ ID NO: 6813 - protein, 9 aa, synthetic construct
  source 1..9: note = Seed: VVGACGVGK (KRAS G12C)
WVGKCKVGR

SEQ ID NO: 6814 - protein, 9 aa, synthetic construct
  source 1..9: note = Seed: VVGACGVGK (KRAS G12C)
WVGKCRVGA

SEQ ID NO: 6815 - protein, 9 aa, synthetic construct
  source 1..9: note = Seed: VVGACGVGK (KRAS G12C)
WVGKCRVGQ

SEQ ID NO: 6816 - protein, 9 aa, synthetic construct
  source 1..9: note = Seed: VVGACGVGK (KRAS G12C)
WVGKCRVGR

SEQ ID NO: 6817 - protein, 9 aa, synthetic construct
  source 1..9: note = Seed: VVGACGVGK (KRAS G12C)
WVGKCRVGS

SEQ ID NO: 6818 - protein, 9 aa, synthetic construct
  source 1..9: note = Seed: VVGACGVGK (KRAS G12C)
WVGLCKVGR

SEQ ID NO: 6819 - protein, 9 aa, synthetic construct
  source 1..9: note = Seed: VVGACGVGK (KRAS G12C)
WVGLCRVGH

SEQ ID NO: 6820 - protein, 9 aa, synthetic construct
  source 1..9: note = Seed: VVGACGVGK (KRAS G12C)
WVGLCRVGK

SEQ ID NO: 6821 - protein, 9 aa, synthetic construct
  source 1..9: note = Seed: VVGACGVGK (KRAS G12C)
WVGLCRVGR

SEQ ID NO: 6822 - protein, 9 aa, synthetic construct
  source 1..9: note = Seed: VVGACGVGK (KRAS G12C)
WVGLCRVGS

SEQ ID NO: 6823 - protein, 9 aa, synthetic construct
  source 1..9: note = Seed: VVGACGVGK (KRAS G12C)
WVGMCKVGK

SEQ ID NO: 6824 - protein, 9 aa, synthetic construct
  source 1..9: note = Seed: VVGACGVGK (KRAS G12C)
WVGMCKVGR

SEQ ID NO: 6825 - protein, 9 aa, synthetic construct
  source 1..9: note = Seed: VVGACGVGK (KRAS G12C)
WVGMCRVGH

SEQ ID NO: 6826 - protein, 9 aa, synthetic construct
  source 1..9: note = Seed: VVGACGVGK (KRAS G12C)
WVGMCRVGK

SEQ ID NO: 6827 - protein, 9 aa, synthetic construct
  source 1..9: note = Seed: VVGACGVGK (KRAS G12C)
WVGMCRVGR

SEQ ID NO: 6828 - protein, 9 aa, synthetic construct
  source 1..9: note = Seed: VVGACGVGK (KRAS G12C)
WVGMCRVGS

SEQ ID NO: 6829 - protein, 9 aa, synthetic construct
  source 1..9: note = Seed: VVGACGVGK (KRAS G12C)
WVGRCKVGR

SEQ ID NO: 6830 - protein, 9 aa, synthetic construct
  source 1..9: note = Seed: VVGACGVGK (KRAS G12C)
WVGRCRVGQ

SEQ ID NO: 6831 - protein, 9 aa, synthetic construct
  source 1..9: note = Seed: VVGACGVGK (KRAS G12C)
WVGRCRVGR

SEQ ID NO: 6832 - protein, 9 aa, synthetic construct
  source 1..9: note = Seed: VVGACGVGK (KRAS G12C)
WVGRCRVGY

SEQ ID NO: 6833 - protein, 9 aa, synthetic construct
  source 1..9: note = Seed: VVGACGVGK (KRAS G12C)
WVGSCRVGR

SEQ ID NO: 6834 - protein, 9 aa, synthetic construct
  source 1..9: note = Seed: VVGACGVGK (KRAS G12C)
WVGVCRVGR

SEQ ID NO: 6835 - protein, 9 aa, synthetic construct
  source 1..9: note = Seed: VVGACGVGK (KRAS G12C)
YVGACKVGR

SEQ ID NO: 6836 - protein, 9 aa, synthetic construct
  source 1..9: note = Seed: VVGACGVGK (KRAS G12C)
YVGACRVGA

SEQ ID NO: 6837 - protein, 9 aa, synthetic construct
  source 1..9: note = Seed: VVGACGVGK (KRAS G12C)
YVGACRVGH

SEQ ID NO: 6838 - protein, 9 aa, synthetic construct
  source 1..9: note = Seed: VVGACGVGK (KRAS G12C)
YVGACRVGK

SEQ ID NO: 6839 - protein, 9 aa, synthetic construct
  source 1..9: note = Seed: VVGACGVGK (KRAS G12C)
YVGACRVGR

SEQ ID NO: 6840 - protein, 9 aa, synthetic construct
  source 1..9: note = Seed: VVGACGVGK (KRAS G12C)
YVGACRVGS

SEQ ID NO: 6841 - protein, 9 aa, synthetic construct
  source 1..9: note = Seed: VVGACGVGK (KRAS G12C)
YVGFCKVGR

SEQ ID NO: 6842 - protein, 9 aa, synthetic construct
  source 1..9: note = Seed: VVGACGVGK (KRAS G12C)
YVGFCRVGH

SEQ ID NO: 6843 - protein, 9 aa, synthetic construct
  source 1..9: note = Seed: VVGACGVGK (KRAS G12C)
YVGFCRVGK

SEQ ID NO: 6844 - protein, 9 aa, synthetic construct
  source 1..9: note = Seed: VVGACGVGK (KRAS G12C)
YVGFCRVGR

SEQ ID NO: 6845 - protein, 9 aa, synthetic construct
  source 1..9: note = Seed: VVGACGVGK (KRAS G12C)
YVGHCRVGA

SEQ ID NO: 6846 - protein, 9 aa, synthetic construct
  source 1..9: note = Seed: VVGACGVGK (KRAS G12C)
YVGHCRVGK

SEQ ID NO: 6847 - protein, 9 aa, synthetic construct
  source 1..9: note = Seed: VVGACGVGK (KRAS G12C)
YVGHCRVGR

SEQ ID NO: 6848 - protein, 9 aa, synthetic construct
  source 1..9: note = Seed: VVGACGVGK (KRAS G12C)
YVGICKVGA

SEQ ID NO: 6849 - protein, 9 aa, synthetic construct
  source 1..9: note = Seed: VVGACGVGK (KRAS G12C)
YVGICKVGG

SEQ ID NO: 6850 - protein, 9 aa, synthetic construct
  source 1..9: note = Seed: VVGACGVGK (KRAS G12C)
YVGICKVGH

SEQ ID NO: 6851 - protein, 9 aa, synthetic construct
  source 1..9: note = Seed: VVGACGVGK (KRAS G12C)
YVGICKVGK

SEQ ID NO: 6852 - protein, 9 aa, synthetic construct
  source 1..9: note = Seed: VVGACGVGK (KRAS G12C)
YVGICKVGQ

SEQ ID NO: 6853 - protein, 9 aa, synthetic construct
  source 1..9: note = Seed: VVGACGVGK (KRAS G12C)
YVGICKVGR

SEQ ID NO: 6854 - protein, 9 aa, synthetic construct
  source 1..9: note = Seed: VVGACGVGK (KRAS G12C)
YVGICKVGS

SEQ ID NO: 6855 - protein, 9 aa, synthetic construct
  source 1..9: note = Seed: VVGACGVGK (KRAS G12C)
YVGICKVGT

SEQ ID NO: 6856 - protein, 9 aa, synthetic construct
  source 1..9: note = Seed: VVGACGVGK (KRAS G12C)
YVGICRVGA

SEQ ID NO: 6857 - protein, 9 aa, synthetic construct
  source 1..9: note = Seed: VVGACGVGK (KRAS G12C)
YVGICRVGG

SEQ ID NO: 6858 - protein, 9 aa, synthetic construct
  source 1..9: note = Seed: VVGACGVGK (KRAS G12C)
YVGICRVGH

SEQ ID NO: 6859 - protein, 9 aa, synthetic construct
  source 1..9: note = Seed: VVGACGVGK (KRAS G12C)
YVGICRVGK

SEQ ID NO: 6860 - protein, 9 aa, synthetic construct
  source 1..9: note = Seed: VVGACGVGK (KRAS G12C)
YVGICRVGQ

SEQ ID NO: 6861 - protein, 9 aa, synthetic construct
  source 1..9: note = Seed: VVGACGVGK (KRAS G12C)
YVGICRVGR

SEQ ID NO: 6862 - protein, 9 aa, synthetic construct
  source 1..9: note = Seed: VVGACGVGK (KRAS G12C)
YVGICRVGS

SEQ ID NO: 6863 - protein, 9 aa, synthetic construct
  source 1..9: note = Seed: VVGACGVGK (KRAS G12C)
YVGICRVGT

SEQ ID NO: 6864 - protein, 9 aa, synthetic construct
  source 1..9: note = Seed: VVGACGVGK (KRAS G12C)
YVGICRVGY

SEQ ID NO: 6865 - protein, 9 aa, synthetic construct
  source 1..9: note = Seed: VVGACGVGK (KRAS G12C)
YVGKCKVGA

SEQ ID NO: 6866 - protein, 9 aa, synthetic construct
  source 1..9: note = Seed: VVGACGVGK (KRAS G12C)
YVGKCKVGG

SEQ ID NO: 6867 - protein, 9 aa, synthetic construct
  source 1..9: note = Seed: VVGACGVGK (KRAS G12C)
YVGKCKVGQ

SEQ ID NO: 6868 - protein, 9 aa, synthetic construct
  source 1..9: note = Seed: VVGACGVGK (KRAS G12C)
YVGKCKVGR

SEQ ID NO: 6869 - protein, 9 aa, synthetic construct
  source 1..9: note = Seed: VVGACGVGK (KRAS G12C)
YVGKCKVGS

SEQ ID NO: 6870 - protein, 9 aa, synthetic construct
  source 1..9: note = Seed: VVGACGVGK (KRAS G12C)
YVGKCRVGA

SEQ ID NO: 6871 - protein, 9 aa, synthetic construct
  source 1..9: note = Seed: VVGACGVGK (KRAS G12C)
YVGKCRVGG

SEQ ID NO: 6872 - protein, 9 aa, synthetic construct
  source 1..9: note = Seed: VVGACGVGK (KRAS G12C)
YVGKCRVGQ

SEQ ID NO: 6873 - protein, 9 aa, synthetic construct
  source 1..9: note = Seed: VVGACGVGK (KRAS G12C)
YVGKCRVGR

SEQ ID NO: 6874 - protein, 9 aa, synthetic construct
  source 1..9: note = Seed: VVGACGVGK (KRAS G12C)
YVGKCRVGS

SEQ ID NO: 6875 - protein, 9 aa, synthetic construct
  source 1..9: note = Seed: VVGACGVGK (KRAS G12C)
YVGKCRVGY

SEQ ID NO: 6876 - protein, 9 aa, synthetic construct
  source 1..9: note = Seed: VVGACGVGK (KRAS G12C)
YVGLCKVGA

SEQ ID NO: 6877 - protein, 9 aa, synthetic construct
  source 1..9: note = Seed: VVGACGVGK (KRAS G12C)
YVGLCKVGG

SEQ ID NO: 6878 - protein, 9 aa, synthetic construct
  source 1..9: note = Seed: VVGACGVGK (KRAS G12C)
YVGLCKVGH

SEQ ID NO: 6879 - protein, 9 aa, synthetic construct
  source 1..9: note = Seed: VVGACGVGK (KRAS G12C)
YVGLCKVGK

SEQ ID NO: 6880 - protein, 9 aa, synthetic construct
  source 1..9: note = Seed: VVGACGVGK (KRAS G12C)
YVGLCKVGQ

SEQ ID NO: 6881 - protein, 9 aa, synthetic construct
  source 1..9: note = Seed: VVGACGVGK (KRAS G12C)
YVGLCKVGR

SEQ ID NO: 6882 - protein, 9 aa, synthetic construct
  source 1..9: note = Seed: VVGACGVGK (KRAS G12C)
YVGLCKVGS

SEQ ID NO: 6883 - protein, 9 aa, synthetic construct
  source 1..9: note = Seed: VVGACGVGK (KRAS G12C)
YVGLCRVGA

SEQ ID NO: 6884 - protein, 9 aa, synthetic construct
  source 1..9: note = Seed: VVGACGVGK (KRAS G12C)
YVGLCRVGG

SEQ ID NO: 6885 - protein, 9 aa, synthetic construct
  source 1..9: note = Seed: VVGACGVGK (KRAS G12C)
YVGLCRVGH

SEQ ID NO: 6886 - protein, 9 aa, synthetic construct
  source 1..9: note = Seed: VVGACGVGK (KRAS G12C)
YVGLCRVGK

SEQ ID NO: 6887 - protein, 9 aa, synthetic construct
  source 1..9: note = Seed: VVGACGVGK (KRAS G12C)
YVGLCRVGM

SEQ ID NO: 6888 - protein, 9 aa, synthetic construct
  source 1..9: note = Seed: VVGACGVGK (KRAS G12C)
YVGLCRVGN

SEQ ID NO: 6889 - protein, 9 aa, synthetic construct
  source 1..9: note = Seed: VVGACGVGK (KRAS G12C)
YVGLCRVGQ

SEQ ID NO: 6890 - protein, 9 aa, synthetic construct
  source 1..9: note = Seed: VVGACGVGK (KRAS G12C)
YVGLCRVGR

SEQ ID NO: 6891 - protein, 9 aa, synthetic construct
  source 1..9: note = Seed: VVGACGVGK (KRAS G12C)
YVGLCRVGS

SEQ ID NO: 6892 - protein, 9 aa, synthetic construct
  source 1..9: note = Seed: VVGACGVGK (KRAS G12C)
YVGLCRVGT

SEQ ID NO: 6893 - protein, 9 aa, synthetic construct
  source 1..9: note = Seed: VVGACGVGK (KRAS G12C)
YVGLCRVGY

SEQ ID NO: 6894 - protein, 9 aa, synthetic construct
  source 1..9: note = Seed: VVGACGVGK (KRAS G12C)
YVGMCKVGA

SEQ ID NO: 6895 - protein, 9 aa, synthetic construct
  source 1..9: note = Seed: VVGACGVGK (KRAS G12C)
YVGMCKVGG

SEQ ID NO: 6896 - protein, 9 aa, synthetic construct
  source 1..9: note = Seed: VVGACGVGK (KRAS G12C)
YVGMCKVGH

SEQ ID NO: 6897 - protein, 9 aa, synthetic construct
  source 1..9: note = Seed: VVGACGVGK (KRAS G12C)
YVGMCKVGK

SEQ ID NO: 6898 - protein, 9 aa, synthetic construct
  source 1..9: note = Seed: VVGACGVGK (KRAS G12C)
YVGMCKVGM

SEQ ID NO: 6899 - protein, 9 aa, synthetic construct
  source 1..9: note = Seed: VVGACGVGK (KRAS G12C)
YVGMCKVGQ

SEQ ID NO: 6900 - protein, 9 aa, synthetic construct
  source 1..9: note = Seed: VVGACGVGK (KRAS G12C)
YVGMCKVGR

SEQ ID NO: 6901 - protein, 9 aa, synthetic construct
  source 1..9: note = Seed: VVGACGVGK (KRAS G12C)
YVGMCKVGS

SEQ ID NO: 6902 - protein, 9 aa, synthetic construct
  source 1..9: note = Seed: VVGACGVGK (KRAS G12C)
YVGMCKVGT

SEQ ID NO: 6903 - protein, 9 aa, synthetic construct
  source 1..9: note = Seed: VVGACGVGK (KRAS G12C)
YVGMCRVGA

SEQ ID NO: 6904 - protein, 9 aa, synthetic construct
  source 1..9: note = Seed: VVGACGVGK (KRAS G12C)
YVGMCRVGG

SEQ ID NO: 6905 - protein, 9 aa, synthetic construct
  source 1..9: note = Seed: VVGACGVGK (KRAS G12C)
YVGMCRVGH

SEQ ID NO: 6906 - protein, 9 aa, synthetic construct
  source 1..9: note = Seed: VVGACGVGK (KRAS G12C)
YVGMCRVGK

SEQ ID NO: 6907 - protein, 9 aa, synthetic construct
  source 1..9: note = Seed: VVGACGVGK (KRAS G12C)
YVGMCRVGM

SEQ ID NO: 6908 - protein, 9 aa, synthetic construct
  source 1..9: note = Seed: VVGACGVGK (KRAS G12C)
YVGMCRVGN

SEQ ID NO: 6909 - protein, 9 aa, synthetic construct
  source 1..9: note = Seed: VVGACGVGK (KRAS G12C)
YVGMCRVGQ

SEQ ID NO: 6910 - protein, 9 aa, synthetic construct
  source 1..9: note = Seed: VVGACGVGK (KRAS G12C)
YVGMCRVGR

SEQ ID NO: 6911 - protein, 9 aa, synthetic construct
  source 1..9: note = Seed: VVGACGVGK (KRAS G12C)
YVGMCRVGS

SEQ ID NO: 6912 - protein, 9 aa, synthetic construct
  source 1..9: note = Seed: VVGACGVGK (KRAS G12C)
YVGMCRVGT

SEQ ID NO: 6913 - protein, 9 aa, synthetic construct
  source 1..9: note = Seed: VVGACGVGK (KRAS G12C)
YVGMCRVGY

SEQ ID NO: 6914 - protein, 9 aa, synthetic construct
  source 1..9: note = Seed: VVGACGVGK (KRAS G12C)
YVGQCRVGR

SEQ ID NO: 6915 - protein, 9 aa, synthetic construct
  source 1..9: note = Seed: VVGACGVGK (KRAS G12C)
YVGRCKVGA

SEQ ID NO: 6916 - protein, 9 aa, synthetic construct
  source 1..9: note = Seed: VVGACGVGK (KRAS G12C)
YVGRCKVGG

SEQ ID NO: 6917 - protein, 9 aa, synthetic construct
  source 1..9: note = Seed: VVGACGVGK (KRAS G12C)
YVGRCKVGQ

SEQ ID NO: 6918 - protein, 9 aa, synthetic construct
  source 1..9: note = Seed: VVGACGVGK (KRAS G12C)
YVGRCKVGR

SEQ ID NO: 6919 - protein, 9 aa, synthetic construct
  source 1..9: note = Seed: VVGACGVGK (KRAS G12C)
YVGRCRVGA

SEQ ID NO: 6920 - protein, 9 aa, synthetic construct
  source 1..9: note = Seed: VVGACGVGK (KRAS G12C)
YVGRCRVGG

SEQ ID NO: 6921 - protein, 9 aa, synthetic construct
  source 1..9: note = Seed: VVGACGVGK (KRAS G12C)
YVGRCRVGQ

SEQ ID NO: 6922 - protein, 9 aa, synthetic construct
  source 1..9: note = Seed: VVGACGVGK (KRAS G12C)
YVGRCRVGR

SEQ ID NO: 6923 - protein, 9 aa, synthetic construct
  source 1..9: note = Seed: VVGACGVGK (KRAS G12C)
YVGRCRVGY

SEQ ID NO: 6924 - protein, 9 aa, synthetic construct
  source 1..9: note = Seed: VVGACGVGK (KRAS G12C)
YVGSCRVGR

SEQ ID NO: 6925 - protein, 9 aa, synthetic construct
  source 1..9: note = Seed: VVGACGVGK (KRAS G12C)
YVGTCRVGR

SEQ ID NO: 6926 - protein, 9 aa, synthetic construct
  source 1..9: note = Seed: VVGACGVGK (KRAS G12C)
YVGVCKVGR

SEQ ID NO: 6927 - protein, 9 aa, synthetic construct
  source 1..9: note = Seed: VVGACGVGK (KRAS G12C)
YVGVCKVGS

SEQ ID NO: 6928 - protein, 9 aa, synthetic construct
  source 1..9: note = Seed: VVGACGVGK (KRAS G12C)
YVGVCRVGA

SEQ ID NO: 6929 - protein, 9 aa, synthetic construct
  source 1..9: note = Seed: VVGACGVGK (KRAS G12C)
YVGVCRVGH

SEQ ID NO: 6930 - protein, 9 aa, synthetic construct
  source 1..9: note = Seed: VVGACGVGK (KRAS G12C)
YVGVCRVGK

SEQ ID NO: 6931 - protein, 9 aa, synthetic construct
  source 1..9: note = Seed: VVGACGVGK (KRAS G12C)
YVGVCRVGR

SEQ ID NO: 6932 - protein, 9 aa, synthetic construct
  source 1..9: note = Seed: VVGACGVGK (KRAS G12C)
YVGVCRVGS

SEQ ID NO: 6933 - protein, 9 aa, synthetic construct
  source 1..9: note = Seed: VVGACGVGK (KRAS G12C)
YVGWCRVGR

SEQ ID NO: 6934 - protein, 9 aa, Homo sapiens
  source 1..9: note = Native (KRAS G12C)
LVVVGACGV

SEQ ID NO: 6935 - protein, 9 aa, Homo sapiens
  source 1..9: note = Native (KRAS G12C)
VVGACGVGK

SEQ ID NO: 6936 - protein, 9 aa, synthetic construct
  source 1..9: note = Seed: LVVVGADGV (KRAS G12D)
FVVAGADGI

SEQ ID NO: 6937 - protein, 9 aa, synthetic construct
  source 1..9: note = Seed: LVVVGADGV (KRAS G12D)
FVVAGADGL

SEQ ID NO: 6938 - protein, 9 aa, synthetic construct
  source 1..9: note = Seed: LVVVGADGV (KRAS G12D)
FVVAGADGV

SEQ ID NO: 6939 - protein, 9 aa, synthetic construct
  source 1..9: note = Seed: LVVVGADGV (KRAS G12D)
FVVIGADGA

SEQ ID NO: 6940 - protein, 9 aa, synthetic construct
  source 1..9: note = Seed: LVVVGADGV (KRAS G12D)
FVVIGADGI

SEQ ID NO: 6941 - protein, 9 aa, synthetic construct
  source 1..9: note = Seed: LVVVGADGV (KRAS G12D)
FVVIGADGL

SEQ ID NO: 6942 - protein, 9 aa, synthetic construct
  source 1..9: note = Seed: LVVVGADGV (KRAS G12D)
FVVIGADGV

SEQ ID NO: 6943 - protein, 9 aa, synthetic construct
  source 1..9: note = Seed: LVVVGADGV (KRAS G12D)
FVVIGGDGI

SEQ ID NO: 6944 - protein, 9 aa, synthetic construct
  source 1..9: note = Seed: LVVVGADGV (KRAS G12D)
FVVIGGDGL

SEQ ID NO: 6945 - protein, 9 aa, synthetic construct
  source 1..9: note = Seed: LVVVGADGV (KRAS G12D)
FVVIGGDGV

SEQ ID NO: 6946 - protein, 9 aa, synthetic construct
  source 1..9: note = Seed: LVVVGADGV (KRAS G12D)
FVVIGSDGI

SEQ ID NO: 6947 - protein, 9 aa, synthetic construct
  source 1..9: note = Seed: LVVVGADGV (KRAS G12D)
FVVIGSDGL

SEQ ID NO: 6948 - protein, 9 aa, synthetic construct
  source 1..9: note = Seed: LVVVGADGV (KRAS G12D)
FVVIGSDGV

SEQ ID NO: 6949 - protein, 9 aa, synthetic construct
  source 1..9: note = Seed: LVVVGADGV (KRAS G12D)
FVVLGADGI

SEQ ID NO: 6950 - protein, 9 aa, synthetic construct
  source 1..9: note = Seed: LVVVGADGV (KRAS G12D)
FVVLGADGL

SEQ ID NO: 6951 - protein, 9 aa, synthetic construct
  source 1..9: note = Seed: LVVVGADGV (KRAS G12D)
FVVLGADGM

SEQ ID NO: 6952 - protein, 9 aa, synthetic construct
  source 1..9: note = Seed: LVVVGADGV (KRAS G12D)
FVVLGADGT

SEQ ID NO: 6953 - protein, 9 aa, synthetic construct
  source 1..9: note = Seed: LVVVGADGV (KRAS G12D)
FVVLGADGV

SEQ ID NO: 6954 - protein, 9 aa, synthetic construct
  source 1..9: note = Seed: LVVVGADGV (KRAS G12D)
FVVLGGDGA

SEQ ID NO: 6955 - protein, 9 aa, synthetic construct
  source 1..9: note = Seed: LVVVGADGV (KRAS G12D)
FVVLGGDGI

SEQ ID NO: 6956 - protein, 9 aa, synthetic construct
  source 1..9: note = Seed: LVVVGADGV (KRAS G12D)
FVVLGGDGL

SEQ ID NO: 6957 - protein, 9 aa, synthetic construct
  source 1..9: note = Seed: LVVVGADGV (KRAS G12D)
FVVLGGDGM

SEQ ID NO: 6958 - protein, 9 aa, synthetic construct
  source 1..9: note = Seed: LVVVGADGV (KRAS G12D)
FVVLGGDGT

SEQ ID NO: 6959 - protein, 9 aa, synthetic construct
  source 1..9: note = Seed: LVVVGADGV (KRAS G12D)
FVVLGGDGV

SEQ ID NO: 6960 - protein, 9 aa, synthetic construct
  source 1..9: note = Seed: LVVVGADGV (KRAS G12D)
FVVLGNDGI

SEQ ID NO: 6961 - protein, 9 aa, synthetic construct
  source 1..9: note = Seed: LVVVGADGV (KRAS G12D)
FVVLGNDGL

SEQ ID NO: 6962 - protein, 9 aa, synthetic construct
  source 1..9: note = Seed: LVVVGADGV (KRAS G12D)
FVVLGNDGV

SEQ ID NO: 6963 - protein, 9 aa, synthetic construct
  source 1..9: note = Seed: LVVVGADGV (KRAS G12D)
FVVLGPDGL

SEQ ID NO: 6964 - protein, 9 aa, synthetic construct
  source 1..9: note = Seed: LVVVGADGV (KRAS G12D)
FVVLGPDGV

SEQ ID NO: 6965 - protein, 9 aa, synthetic construct
  source 1..9: note = Seed: LVVVGADGV (KRAS G12D)
FVVLGSDGA

SEQ ID NO: 6966 - protein, 9 aa, synthetic construct
  source 1..9: note = Seed: LVVVGADGV (KRAS G12D)
FVVLGSDGI

SEQ ID NO: 6967 - protein, 9 aa, synthetic construct
  source 1..9: note = Seed: LVVVGADGV (KRAS G12D)
FVVLGSDGL

SEQ ID NO: 6968 - protein, 9 aa, synthetic construct
  source 1..9: note = Seed: LVVVGADGV (KRAS G12D)
FVVLGSDGM

SEQ ID NO: 6969 - protein, 9 aa, synthetic construct
  source 1..9: note = Seed: LVVVGADGV (KRAS G12D)
FVVLGSDGT

SEQ ID NO: 6970 - protein, 9 aa, synthetic construct
  source 1..9: note = Seed: LVVVGADGV (KRAS G12D)
FVVLGSDGV

SEQ ID NO: 6971 - protein, 9 aa, synthetic construct
  source 1..9: note = Seed: LVVVGADGV (KRAS G12D)
FVVLGTDGL

SEQ ID NO: 6972 - protein, 9 aa, synthetic construct
  source 1..9: note = Seed: LVVVGADGV (KRAS G12D)
FVVMGADGA

SEQ ID NO: 6973 - protein, 9 aa, synthetic construct
  source 1..9: note = Seed: LVVVGADGV (KRAS G12D)
FVVMGADGI

SEQ ID NO: 6974 - protein, 9 aa, synthetic construct
  source 1..9: note = Seed: LVVVGADGV (KRAS G12D)
FVVMGADGL

SEQ ID NO: 6975 - protein, 9 aa, synthetic construct
  source 1..9: note = Seed: LVVVGADGV (KRAS G12D)
FVVMGADGM

SEQ ID NO: 6976 - protein, 9 aa, synthetic construct
  source 1..9: note = Seed: LVVVGADGV (KRAS G12D)
FVVMGADGV

SEQ ID NO: 6977 - protein, 9 aa, synthetic construct
  source 1..9: note = Seed: LVVVGADGV (KRAS G12D)
FVVMGGDGA

SEQ ID NO: 6978 - protein, 9 aa, synthetic construct
  source 1..9: note = Seed: LVVVGADGV (KRAS G12D)
FVVMGGDGI

SEQ ID NO: 6979 - protein, 9 aa, synthetic construct
  source 1..9: note = Seed: LVVVGADGV (KRAS G12D)
FVVMGGDGL

SEQ ID NO: 6980 - protein, 9 aa, synthetic construct
  source 1..9: note = Seed: LVVVGADGV (KRAS G12D)
FVVMGGDGV

SEQ ID NO: 6981 - protein, 9 aa, synthetic construct
  source 1..9: note = Seed: LVVVGADGV (KRAS G12D)
FVVMGNDGL

SEQ ID NO: 6982 - protein, 9 aa, synthetic construct
  source 1..9: note = Seed: LVVVGADGV (KRAS G12D)
FVVMGSDGA

SEQ ID NO: 6983 - protein, 9 aa, synthetic construct
  source 1..9: note = Seed: LVVVGADGV (KRAS G12D)
FVVMGSDGI

SEQ ID NO: 6984 - protein, 9 aa, synthetic construct
  source 1..9: note = Seed: LVVVGADGV (KRAS G12D)
FVVMGSDGL

SEQ ID NO: 6985 - protein, 9 aa, synthetic construct
  source 1..9: note = Seed: LVVVGADGV (KRAS G12D)
FVVMGSDGM

SEQ ID NO: 6986 - protein, 9 aa, synthetic construct
  source 1..9: note = Seed: LVVVGADGV (KRAS G12D)
FVVMGSDGV

SEQ ID NO: 6987 - protein, 9 aa, synthetic construct
  source 1..9: note = Seed: LVVVGADGV (KRAS G12D)
YVVLGADGI

SEQ ID NO: 6988 - protein, 9 aa, synthetic construct
  source 1..9: note = Seed: LVVVGADGV (KRAS G12D)
YVVLGADGL

SEQ ID NO: 6989 - protein, 9 aa, synthetic construct
  source 1..9: note = Seed: LVVVGADGV (KRAS G12D)
YVVLGADGV

SEQ ID NO: 6990 - protein, 9 aa, synthetic construct
  source 1..9: note = Seed: LVVVGADGV (KRAS G12D)
YVVLGGDGL

SEQ ID NO: 6991 - protein, 9 aa, synthetic construct
  source 1..9: note = Seed: LVVVGADGV (KRAS G12D)
YVVLGSDGL

SEQ ID NO: 6992 - protein, 9 aa, synthetic construct
  source 1..9: note = Seed: LVVVGADGV (KRAS G12D)
YVVLGSDGV

SEQ ID NO: 6993 - protein, 9 aa, synthetic construct
  source 1..9: note = Seed: LVVVGADGV (KRAS G12D)
YVVMGADGL

SEQ ID NO: 6994 - protein, 9 aa, synthetic construct
  source 1..9: note = Seed: LVVVGADGV (KRAS G12D)
YVVMGADGV

SEQ ID NO: 6995 - protein, 9 aa, synthetic construct
  source 1..9: note = Seed: LVVVGADGV (KRAS G12D)
CVVLGADGL

SEQ ID NO: 6996 - protein, 9 aa, synthetic construct
  source 1..9: note = Seed: LVVVGADGV (KRAS G12D)
FVVAGADGA

SEQ ID NO: 6997 - protein, 9 aa, synthetic construct
  source 1..9: note = Seed: LVVVGADGV (KRAS G12D)
FVVAGADGC

SEQ ID NO: 6998 - protein, 9 aa, synthetic construct
  source 1..9: note = Seed: LVVVGADGV (KRAS G12D)
FVVAGADGD

SEQ ID NO: 6999 - protein, 9 aa, synthetic construct
  source 1..9: note = Seed: LVVVGADGV (KRAS G12D)
FVVAGADGE

SEQ ID NO: 7000 - protein, 9 aa, synthetic construct
  source 1..9: note = Seed: LVVVGADGV (KRAS G12D)
FVVAGADGF

SEQ ID NO: 7001 - protein, 9 aa, synthetic construct
  source 1..9: note = Seed: LVVVGADGV (KRAS G12D)
FVVAGADGG

SEQ ID NO: 7002 - protein, 9 aa, synthetic construct
  source 1..9: note = Seed: LVVVGADGV (KRAS G12D)
FVVAGADGH

SEQ ID NO: 7003 - protein, 9 aa, synthetic construct
  source 1..9: note = Seed: LVVVGADGV (KRAS G12D)
FVVAGADGM

SEQ ID NO: 7004 - protein, 9 aa, synthetic construct
  source 1..9: note = Seed: LVVVGADGV (KRAS G12D)
FVVAGADGN

SEQ ID NO: 7005 - protein, 9 aa, synthetic construct
  source 1..9: note = Seed: LVVVGADGV (KRAS G12D)
FVVAGADGQ

SEQ ID NO: 7006 - protein, 9 aa, synthetic construct
  source 1..9: note = Seed: LVVVGADGV (KRAS G12D)
FVVAGADGS

SEQ ID NO: 7007 - protein, 9 aa, synthetic construct
  source 1..9: note = Seed: LVVVGADGV (KRAS G12D)
FVVAGADGT

SEQ ID NO: 7008 - protein, 9 aa, synthetic construct
  source 1..9: note = Seed: LVVVGADGV (KRAS G12D)
FVVAGADGW

SEQ ID NO: 7009 - protein, 9 aa, synthetic construct
  source 1..9: note = Seed: LVVVGADGV (KRAS G12D)
FVVAGADGY

SEQ ID NO: 7010 - protein, 9 aa, synthetic construct
  source 1..9: note = Seed: LVVVGADGV (KRAS G12D)
FVVAGCDGA

SEQ ID NO: 7011 - protein, 9 aa, synthetic construct
  source 1..9: note = Seed: LVVVGADGV (KRAS G12D)
FVVAGFDGI

SEQ ID NO: 7012 - protein, 9 aa, synthetic construct
  source 1..9: note = Seed: LVVVGADGV (KRAS G12D)
FVVAGFDGL

SEQ ID NO: 7013 - protein, 9 aa, synthetic construct
  source 1..9: note = Seed: LVVVGADGV (KRAS G12D)
FVVAGFDGV

SEQ ID NO: 7014 - protein, 9 aa, synthetic construct
  source 1..9: note = Seed: LVVVGADGV (KRAS G12D)
FVVAGGDGA

SEQ ID NO: 7015 - protein, 9 aa, synthetic construct
  source 1..9: note = Seed: LVVVGADGV (KRAS G12D)
FVVAGGDGI

SEQ ID NO: 7016 - protein, 9 aa, synthetic construct
  source 1..9: note = Seed: LVVVGADGV (KRAS G12D)
FVVAGGDGL

SEQ ID NO: 7017 - protein, 9 aa, synthetic construct
  source 1..9: note = Seed: LVVVGADGV (KRAS G12D)
FVVAGGDGM

SEQ ID NO: 7018 - protein, 9 aa, synthetic construct
  source 1..9: note = Seed: LVVVGADGV (KRAS G12D)
FVVAGGDGN

SEQ ID NO: 7019 - protein, 9 aa, synthetic construct
  source 1..9: note = Seed: LVVVGADGV (KRAS G12D)
FVVAGGDGS

SEQ ID NO: 7020 - protein, 9 aa, synthetic construct
  source 1..9: note = Seed: LVVVGADGV (KRAS G12D)
FVVAGGDGT

SEQ ID NO: 7021 - protein, 9 aa, synthetic construct
  source 1..9: note = Seed: LVVVGADGV (KRAS G12D)
FVVAGGDGV

SEQ ID NO: 7022 - protein, 9 aa, synthetic construct
  source 1..9: note = Seed: LVVVGADGV (KRAS G12D)
FVVAGHDGL

SEQ ID NO: 7023 - protein, 9 aa, synthetic construct
  source 1..9: note = Seed: LVVVGADGV (KRAS G12D)
FVVAGIDGA

SEQ ID NO: 7024 - protein, 9 aa, synthetic construct
  source 1..9: note = Seed: LVVVGADGV (KRAS G12D)
FVVAGIDGG

SEQ ID NO: 7025 - protein, 9 aa, synthetic construct
  source 1..9: note = Seed: LVVVGADGV (KRAS G12D)
FVVAGIDGH

SEQ ID NO: 7026 - protein, 9 aa, synthetic construct
  source 1..9: note = Seed: LVVVGADGV (KRAS G12D)
FVVAGIDGI

SEQ ID NO: 7027 - protein, 9 aa, synthetic construct
  source 1..9: note = Seed: LVVVGADGV (KRAS G12D)
FVVAGIDGL

SEQ ID NO: 7028 - protein, 9 aa, synthetic construct
  source 1..9: note = Seed: LVVVGADGV (KRAS G12D)
FVVAGIDGM

SEQ ID NO: 7029 - protein, 9 aa, synthetic construct
  source 1..9: note = Seed: LVVVGADGV (KRAS G12D)
FVVAGIDGN

SEQ ID NO: 7030 - protein, 9 aa, synthetic construct
  source 1..9: note = Seed: LVVVGADGV (KRAS G12D)
FVVAGIDGQ

SEQ ID NO: 7031 - protein, 9 aa, synthetic construct
  source 1..9: note = Seed: LVVVGADGV (KRAS G12D)
FVVAGIDGS

SEQ ID NO: 7032 - protein, 9 aa, synthetic construct
  source 1..9: note = Seed: LVVVGADGV (KRAS G12D)
FVVAGIDGT

SEQ ID NO: 7033 - protein, 9 aa, synthetic construct
  source 1..9: note = Seed: LVVVGADGV (KRAS G12D)
FVVAGIDGV

SEQ ID NO: 7034 - protein, 9 aa, synthetic construct
  source 1..9: note = Seed: LVVVGADGV (KRAS G12D)
FVVAGIDGY

SEQ ID NO: 7035 - protein, 9 aa, synthetic construct
  source 1..9: note = Seed: LVVVGADGV (KRAS G12D)
FVVAGLDGA

SEQ ID NO: 7036 - protein, 9 aa, synthetic construct
  source 1..9: note = Seed: LVVVGADGV (KRAS G12D)
FVVAGLDGG

SEQ ID NO: 7037 - protein, 9 aa, synthetic construct
  source 1..9: note = Seed: LVVVGADGV (KRAS G12D)
FVVAGLDGI

SEQ ID NO: 7038 - protein, 9 aa, synthetic construct
  source 1..9: note = Seed: LVVVGADGV (KRAS G12D)
FVVAGLDGL

SEQ ID NO: 7039 - protein, 9 aa, synthetic construct
  source 1..9: note = Seed: LVVVGADGV (KRAS G12D)
FVVAGLDGM

SEQ ID NO: 7040 - protein, 9 aa, synthetic construct
  source 1..9: note = Seed: LVVVGADGV (KRAS G12D)
FVVAGLDGN

SEQ ID NO: 7041 - protein, 9 aa, synthetic construct
  source 1..9: note = Seed: LVVVGADGV (KRAS G12D)
FVVAGLDGS

SEQ ID NO: 7042 - protein, 9 aa, synthetic construct
  source 1..9: note = Seed: LVVVGADGV (KRAS G12D)
FVVAGLDGT

SEQ ID NO: 7043 - protein, 9 aa, synthetic construct
  source 1..9: note = Seed: LVVVGADGV (KRAS G12D)
FVVAGLDGV

SEQ ID NO: 7044 - protein, 9 aa, synthetic construct
  source 1..9: note = Seed: LVVVGADGV (KRAS G12D)
FVVAGMDGA

SEQ ID NO: 7045 - protein, 9 aa, synthetic construct
  source 1..9: note = Seed: LVVVGADGV (KRAS G12D)
FVVAGMDGG

SEQ ID NO: 7046 - protein, 9 aa, synthetic construct
  source 1..9: note = Seed: LVVVGADGV (KRAS G12D)
FVVAGMDGI

SEQ ID NO: 7047 - protein, 9 aa, synthetic construct
  source 1..9: note = Seed: LVVVGADGV (KRAS G12D)
FVVAGMDGL

SEQ ID NO: 7048 - protein, 9 aa, synthetic construct
  source 1..9: note = Seed: LVVVGADGV (KRAS G12D)
FVVAGMDGM

SEQ ID NO: 7049 - protein, 9 aa, synthetic construct
  source 1..9: note = Seed: LVVVGADGV (KRAS G12D)
FVVAGMDGN

SEQ ID NO: 7050 - protein, 9 aa, synthetic construct
  source 1..9: note = Seed: LVVVGADGV (KRAS G12D)
FVVAGMDGQ

SEQ ID NO: 7051 - protein, 9 aa, synthetic construct
  source 1..9: note = Seed: LVVVGADGV (KRAS G12D)
FVVAGMDGS

SEQ ID NO: 7052 - protein, 9 aa, synthetic construct
  source 1..9: note = Seed: LVVVGADGV (KRAS G12D)
FVVAGMDGT

SEQ ID NO: 7053 - protein, 9 aa, synthetic construct
  source 1..9: note = Seed: LVVVGADGV (KRAS G12D)
FVVAGMDGV

SEQ ID NO: 7054 - protein, 9 aa, synthetic construct
  source 1..9: note = Seed: LVVVGADGV (KRAS G12D)
FVVAGNDGA

SEQ ID NO: 7055 - protein, 9 aa, synthetic construct
  source 1..9: note = Seed: LVVVGADGV (KRAS G12D)
FVVAGNDGG

SEQ ID NO: 7056 - protein, 9 aa, synthetic construct
  source 1..9: note = Seed: LVVVGADGV (KRAS G12D)
FVVAGNDGI

SEQ ID NO: 7057 - protein, 9 aa, synthetic construct
  source 1..9: note = Seed: LVVVGADGV (KRAS G12D)
FVVAGNDGL

SEQ ID NO: 7058 - protein, 9 aa, synthetic construct
  source 1..9: note = Seed: LVVVGADGV (KRAS G12D)
FVVAGNDGM

SEQ ID NO: 7059 - protein, 9 aa, synthetic construct
  source 1..9: note = Seed: LVVVGADGV (KRAS G12D)
FVVAGNDGN

SEQ ID NO: 7060 - protein, 9 aa, synthetic construct
  source 1..9: note = Seed: LVVVGADGV (KRAS G12D)
FVVAGNDGQ

SEQ ID NO: 7061 - protein, 9 aa, synthetic construct
  source 1..9: note = Seed: LVVVGADGV (KRAS G12D)
FVVAGNDGS

SEQ ID NO: 7062 - protein, 9 aa, synthetic construct
  source 1..9: note = Seed: LVVVGADGV (KRAS G12D)
FVVAGNDGT

SEQ ID NO: 7063 - protein, 9 aa, synthetic construct
  source 1..9: note = Seed: LVVVGADGV (KRAS G12D)
FVVAGNDGV

SEQ ID NO: 7064 - protein, 9 aa, synthetic construct
  source 1..9: note = Seed: LVVVGADGV (KRAS G12D)
FVVAGPDGA

SEQ ID NO: 7065 - protein, 9 aa, synthetic construct
  source 1..9: note = Seed: LVVVGADGV (KRAS G12D)
FVVAGPDGG

SEQ ID NO: 7066 - protein, 9 aa, synthetic construct
  source 1..9: note = Seed: LVVVGADGV (KRAS G12D)
FVVAGPDGI

SEQ ID NO: 7067 - protein, 9 aa, synthetic construct
  source 1..9: note = Seed: LVVVGADGV (KRAS G12D)
FVVAGPDGL

SEQ ID NO: 7068 - protein, 9 aa, synthetic construct
  source 1..9: note = Seed: LVVVGADGV (KRAS G12D)
FVVAGPDGM

SEQ ID NO: 7069 - protein, 9 aa, synthetic construct
  source 1..9: note = Seed: LVVVGADGV (KRAS G12D)
FVVAGPDGN

SEQ ID NO: 7070 - protein, 9 aa, synthetic construct
  source 1..9: note = Seed: LVVVGADGV (KRAS G12D)
FVVAGPDGQ

SEQ ID NO: 7071 - protein, 9 aa, synthetic construct
  source 1..9: note = Seed: LVVVGADGV (KRAS G12D)
FVVAGPDGS

SEQ ID NO: 7072 - protein, 9 aa, synthetic construct
  source 1..9: note = Seed: LVVVGADGV (KRAS G12D)
FVVAGPDGT

SEQ ID NO: 7073 - protein, 9 aa, synthetic construct
  source 1..9: note = Seed: LVVVGADGV (KRAS G12D)
FVVAGPDGV

SEQ ID NO: 7074 - protein, 9 aa, synthetic construct
  source 1..9: note = Seed: LVVVGADGV (KRAS G12D)
FVVAGPDGY

SEQ ID NO: 7075 - protein, 9 aa, synthetic construct
  source 1..9: note = Seed: LVVVGADGV (KRAS G12D)
FVVAGSDGA

SEQ ID NO: 7076 - protein, 9 aa, synthetic construct
  source 1..9: note = Seed: LVVVGADGV (KRAS G12D)
FVVAGSDGG

SEQ ID NO: 7077 - protein, 9 aa, synthetic construct
  source 1..9: note = Seed: LVVVGADGV (KRAS G12D)
FVVAGSDGH

SEQ ID NO: 7078 - protein, 9 aa, synthetic construct
  source 1..9: note = Seed: LVVVGADGV (KRAS G12D)
FVVAGSDGI

SEQ ID NO: 7079 - protein, 9 aa, synthetic construct
  source 1..9: note = Seed: LVVVGADGV (KRAS G12D)
FVVAGSDGL

SEQ ID NO: 7080 - protein, 9 aa, synthetic construct
  source 1..9: note = Seed: LVVVGADGV (KRAS G12D)
FVVAGSDGM

SEQ ID NO: 7081 - protein, 9 aa, synthetic construct
  source 1..9: note = Seed: LVVVGADGV (KRAS G12D)
FVVAGSDGN

SEQ ID NO: 7082 - protein, 9 aa, synthetic construct
  source 1..9: note = Seed: LVVVGADGV (KRAS G12D)
FVVAGSDGQ

SEQ ID NO: 7083 - protein, 9 aa, synthetic construct
  source 1..9: note = Seed: LVVVGADGV (KRAS G12D)
FVVAGSDGS

SEQ ID NO: 7084 - protein, 9 aa, synthetic construct
  source 1..9: note = Seed: LVVVGADGV (KRAS G12D)
FVVAGSDGT

SEQ ID NO: 7085 - protein, 9 aa, synthetic construct
  source 1..9: note = Seed: LVVVGADGV (KRAS G12D)
FVVAGSDGV

SEQ ID NO: 7086 - protein, 9 aa, synthetic construct
  source 1..9: note = Seed: LVVVGADGV (KRAS G12D)
FVVAGSDGY

SEQ ID NO: 7087 - protein, 9 aa, synthetic construct
  source 1..9: note = Seed: LVVVGADGV (KRAS G12D)
FVVAGTDGA

SEQ ID NO: 7088 - protein, 9 aa, synthetic construct
  source 1..9: note = Seed: LVVVGADGV (KRAS G12D)
FVVAGTDGF

SEQ ID NO: 7089 - protein, 9 aa, synthetic construct
  source 1..9: note = Seed: LVVVGADGV (KRAS G12D)
FVVAGTDGG

SEQ ID NO: 7090 - protein, 9 aa, synthetic construct
  source 1..9: note = Seed: LVVVGADGV (KRAS G12D)
FVVAGTDGH

SEQ ID NO: 7091 - protein, 9 aa, synthetic construct
  source 1..9: note = Seed: LVVVGADGV (KRAS G12D)
FVVAGTDGI

SEQ ID NO: 7092 - protein, 9 aa, synthetic construct
  source 1..9: note = Seed: LVVVGADGV (KRAS G12D)
FVVAGTDGL

SEQ ID NO: 7093 - protein, 9 aa, synthetic construct
  source 1..9: note = Seed: LVVVGADGV (KRAS G12D)
FVVAGTDGM

SEQ ID NO: 7094 - protein, 9 aa, synthetic construct
  source 1..9: note = Seed: LVVVGADGV (KRAS G12D)
FVVAGTDGN

SEQ ID NO: 7095 - protein, 9 aa, synthetic construct
  source 1..9: note = Seed: LVVVGADGV (KRAS G12D)
FVVAGTDGQ

SEQ ID NO: 7096 - protein, 9 aa, synthetic construct
  source 1..9: note = Seed: LVVVGADGV (KRAS G12D)
FVVAGTDGS

SEQ ID NO: 7097 - protein, 9 aa, synthetic construct
  source 1..9: note = Seed: LVVVGADGV (KRAS G12D)
FVVAGTDGT

SEQ ID NO: 7098 - protein, 9 aa, synthetic construct
  source 1..9: note = Seed: LVVVGADGV (KRAS G12D)
FVVAGTDGV

SEQ ID NO: 7099 - protein, 9 aa, synthetic construct
  source 1..9: note = Seed: LVVVGADGV (KRAS G12D)
FVVAGTDGY

SEQ ID NO: 7100 - protein, 9 aa, synthetic construct
  source 1..9: note = Seed: LVVVGADGV (KRAS G12D)
FVVAGVDGA

SEQ ID NO: 7101 - protein, 9 aa, synthetic construct
  source 1..9: note = Seed: LVVVGADGV (KRAS G12D)
FVVAGVDGF

SEQ ID NO: 7102 - protein, 9 aa, synthetic construct
  source 1..9: note = Seed: LVVVGADGV (KRAS G12D)
FVVAGVDGG

SEQ ID NO: 7103 - protein, 9 aa, synthetic construct
  source 1..9: note = Seed: LVVVGADGV (KRAS G12D)
FVVAGVDGH

SEQ ID NO: 7104 - protein, 9 aa, synthetic construct
  source 1..9: note = Seed: LVVVGADGV (KRAS G12D)
FVVAGVDGI

SEQ ID NO: 7105 - protein, 9 aa, synthetic construct
  source 1..9: note = Seed: LVVVGADGV (KRAS G12D)
FVVAGVDGL

SEQ ID NO: 7106 - protein, 9 aa, synthetic construct
  source 1..9: note = Seed: LVVVGADGV (KRAS G12D)
FVVAGVDGM

SEQ ID NO: 7107 - protein, 9 aa, synthetic construct
  source 1..9: note = Seed: LVVVGADGV (KRAS G12D)
FVVAGVDGN

SEQ ID NO: 7108 - protein, 9 aa, synthetic construct
  source 1..9: note = Seed: LVVVGADGV (KRAS G12D)
FVVAGVDGQ

SEQ ID NO: 7109 - protein, 9 aa, synthetic construct
  source 1..9: note = Seed: LVVVGADGV (KRAS G12D)
FVVAGVDGS

SEQ ID NO: 7110 - protein, 9 aa, synthetic construct
  source 1..9: note = Seed: LVVVGADGV (KRAS G12D)
FVVAGVDGT

SEQ ID NO: 7111 - protein, 9 aa, synthetic construct
  source 1..9: note = Seed: LVVVGADGV (KRAS G12D)
FVVAGVDGV

SEQ ID NO: 7112 - protein, 9 aa, synthetic construct
  source 1..9: note = Seed: LVVVGADGV (KRAS G12D)
FVVAGVDGY

SEQ ID NO: 7113 - protein, 9 aa, synthetic construct
  source 1..9: note = Seed: LVVVGADGV (KRAS G12D)
FVVCGADGA

SEQ ID NO: 7114 - protein, 9 aa, synthetic construct
  source 1..9: note = Seed: LVVVGADGV (KRAS G12D)
FVVCGADGI

SEQ ID NO: 7115 - protein, 9 aa, synthetic construct
  source 1..9: note = Seed: LVVVGADGV (KRAS G12D)
FVVCGADGL

SEQ ID NO: 7116 - protein, 9 aa, synthetic construct
  source 1..9: note = Seed: LVVVGADGV (KRAS G12D)
FVVCGADGV

SEQ ID NO: 7117 - protein, 9 aa, synthetic construct
  source 1..9: note = Seed: LVVVGADGV (KRAS G12D)
FVVCGGDGL

SEQ ID NO: 7118 - protein, 9 aa, synthetic construct
  source 1..9: note = Seed: LVVVGADGV (KRAS G12D)
FVVCGSDGL

SEQ ID NO: 7119 - protein, 9 aa, synthetic construct
  source 1..9: note = Seed: LVVVGADGV (KRAS G12D)
FVVCGSDGV

SEQ ID NO: 7120 - protein, 9 aa, synthetic construct
  source 1..9: note = Seed: LVVVGADGV (KRAS G12D)
FVVDGADGA

SEQ ID NO: 7121 - protein, 9 aa, synthetic construct
  source 1..9: note = Seed: LVVVGADGV (KRAS G12D)
FVVDGNDGA

SEQ ID NO: 7122 - protein, 9 aa, synthetic construct
  source 1..9: note = Seed: LVVVGADGV (KRAS G12D)
FVVDGNDGS

SEQ ID NO: 7123 - protein, 9 aa, synthetic construct
  source 1..9: note = Seed: LVVVGADGV (KRAS G12D)
FVVDGSDGA

SEQ ID NO: 7124 - protein, 9 aa, synthetic construct
  source 1..9: note = Seed: LVVVGADGV (KRAS G12D)
FVVDGSDGS

SEQ ID NO: 7125 - protein, 9 aa, synthetic construct
  source 1..9: note = Seed: LVVVGADGV (KRAS G12D)
FVVDGTDGA

SEQ ID NO: 7126 - protein, 9 aa, synthetic construct
  source 1..9: note = Seed: LVVVGADGV (KRAS G12D)
FVVDGTDGS

SEQ ID NO: 7127 - protein, 9 aa, synthetic construct
  source 1..9: note = Seed: LVVVGADGV (KRAS G12D)
FVVDGVDGA

SEQ ID NO: 7128 - protein, 9 aa, synthetic construct
  source 1..9: note = Seed: LVVVGADGV (KRAS G12D)
FVVEGADGA

SEQ ID NO: 7129 - protein, 9 aa, synthetic construct
  source 1..9: note = Seed: LVVVGADGV (KRAS G12D)
FVVEGADGI

SEQ ID NO: 7130 - protein, 9 aa, synthetic construct
  source 1..9: note = Seed: LVVVGADGV (KRAS G12D)
FVVEGADGL

SEQ ID NO: 7131 - protein, 9 aa, synthetic construct
  source 1..9: note = Seed: LVVVGADGV (KRAS G12D)
FVVEGADGV

SEQ ID NO: 7132 - protein, 9 aa, synthetic construct
  source 1..9: note = Seed: LVVVGADGV (KRAS G12D)
FVVEGGDGL

SEQ ID NO: 7133 - protein, 9 aa, synthetic construct
  source 1..9: note = Seed: LVVVGADGV (KRAS G12D)
FVVEGGDGV

SEQ ID NO: 7134 - protein, 9 aa, synthetic construct
  source 1..9: note = Seed: LVVVGADGV (KRAS G12D)
FVVEGNDGA

SEQ ID NO: 7135 - protein, 9 aa, synthetic construct
  source 1..9: note = Seed: LVVVGADGV (KRAS G12D)
FVVEGNDGS

SEQ ID NO: 7136 - protein, 9 aa, synthetic construct
  source 1..9: note = Seed: LVVVGADGV (KRAS G12D)
FVVEGSDGA

SEQ ID NO: 7137 - protein, 9 aa, synthetic construct
  source 1..9: note = Seed: LVVVGADGV (KRAS G12D)
FVVEGSDGI

SEQ ID NO: 7138 - protein, 9 aa, synthetic construct
  source 1..9: note = Seed: LVVVGADGV (KRAS G12D)
FVVEGSDGL

SEQ ID NO: 7139 - protein, 9 aa, synthetic construct
  source 1..9: note = Seed: LVVVGADGV (KRAS G12D)
FVVEGSDGV

SEQ ID NO: 7140 - protein, 9 aa, synthetic construct
  source 1..9: note = Seed: LVVVGADGV (KRAS G12D)
FVVEGTDGA

SEQ ID NO: 7141 - protein, 9 aa, synthetic construct
  source 1..9: note = Seed: LVVVGADGV (KRAS G12D)
FVVFGADGA

SEQ ID NO: 7142 - protein, 9 aa, synthetic construct
  source 1..9: note = Seed: LVVVGADGV (KRAS G12D)
FVVFGADGG

SEQ ID NO: 7143 - protein, 9 aa, synthetic construct
  source 1..9: note = Seed: LVVVGADGV (KRAS G12D)
FVVFGADGH

SEQ ID NO: 7144 - protein, 9 aa, synthetic construct
  source 1..9: note = Seed: LVVVGADGV (KRAS G12D)
FVVFGADGI

SEQ ID NO: 7145 - protein, 9 aa, synthetic construct
  source 1..9: note = Seed: LVVVGADGV (KRAS G12D)
FVVFGADGL

SEQ ID NO: 7146 - protein, 9 aa, synthetic construct
  source 1..9: note = Seed: LVVVGADGV (KRAS G12D)
FVVFGADGM

SEQ ID NO: 7147 - protein, 9 aa, synthetic construct
  source 1..9: note = Seed: LVVVGADGV (KRAS G12D)
FVVFGADGN

SEQ ID NO: 7148 - protein, 9 aa, synthetic construct
  source 1..9: note = Seed: LVVVGADGV (KRAS G12D)
FVVFGADGS

SEQ ID NO: 7149 - protein, 9 aa, synthetic construct
  source 1..9: note = Seed: LVVVGADGV (KRAS G12D)
FVVFGADGT

SEQ ID NO: 7150 - protein, 9 aa, synthetic construct
  source 1..9: note = Seed: LVVVGADGV (KRAS G12D)
FVVFGADGV

SEQ ID NO: 7151 - protein, 9 aa, synthetic construct
  source 1..9: note = Seed: LVVVGADGV (KRAS G12D)
FVVFGFDGL

SEQ ID NO: 7152 - protein, 9 aa, synthetic construct
  source 1..9: note = Seed: LVVVGADGV (KRAS G12D)
FVVFGFDGV

SEQ ID NO: 7153 - protein, 9 aa, synthetic construct
  source 1..9: note = Seed: LVVVGADGV (KRAS G12D)
FVVFGGDGA

SEQ ID NO: 7154 - protein, 9 aa, synthetic construct
  source 1..9: note = Seed: LVVVGADGV (KRAS G12D)
FVVFGGDGI

SEQ ID NO: 7155 - protein, 9 aa, synthetic construct
  source 1..9: note = Seed: LVVVGADGV (KRAS G12D)
FVVFGGDGL

SEQ ID NO: 7156 - protein, 9 aa, synthetic construct
  source 1..9: note = Seed: LVVVGADGV (KRAS G12D)
FVVFGGDGM

SEQ ID NO: 7157 - protein, 9 aa, synthetic construct
  source 1..9: note = Seed: LVVVGADGV (KRAS G12D)
FVVFGGDGS

SEQ ID NO: 7158 - protein, 9 aa, synthetic construct
  source 1..9: note = Seed: LVVVGADGV (KRAS G12D)
FVVFGGDGT

SEQ ID NO: 7159 - protein, 9 aa, synthetic construct
  source 1..9: note = Seed: LVVVGADGV (KRAS G12D)
FVVFGGDGV

SEQ ID NO: 7160 - protein, 9 aa, synthetic construct
  source 1..9: note = Seed: LVVVGADGV (KRAS G12D)
FVVFGIDGA

SEQ ID NO: 7161 - protein, 9 aa, synthetic construct
  source 1..9: note = Seed: LVVVGADGV (KRAS G12D)
FVVFGIDGM

SEQ ID NO: 7162 - protein, 9 aa, synthetic construct
  source 1..9: note = Seed: LVVVGADGV (KRAS G12D)
FVVFGIDGN

SEQ ID NO: 7163 - protein, 9 aa, synthetic construct
  source 1..9: note = Seed: LVVVGADGV (KRAS G12D)
FVVFGIDGS

SEQ ID NO: 7164 - protein, 9 aa, synthetic construct
  source 1..9: note = Seed: LVVVGADGV (KRAS G12D)
FVVFGIDGV

SEQ ID NO: 7165 - protein, 9 aa, synthetic construct
  source 1..9: note = Seed: LVVVGADGV (KRAS G12D)
FVVFGNDGA

SEQ ID NO: 7166 - protein, 9 aa, synthetic construct
  source 1..9: note = Seed: LVVVGADGV (KRAS G12D)
FVVFGNDGD

SEQ ID NO: 7167 - protein, 9 aa, synthetic construct
  source 1..9: note = Seed: LVVVGADGV (KRAS G12D)
FVVFGNDGE

SEQ ID NO: 7168 - protein, 9 aa, synthetic construct
  source 1..9: note = Seed: LVVVGADGV (KRAS G12D)
FVVFGNDGF

SEQ ID NO: 7169 - protein, 9 aa, synthetic construct
  source 1..9: note = Seed: LVVVGADGV (KRAS G12D)
FVVFGNDGG

SEQ ID NO: 7170 - protein, 9 aa, synthetic construct
  source 1..9: note = Seed: LVVVGADGV (KRAS G12D)
FVVFGNDGI

SEQ ID NO: 7171 - protein, 9 aa, synthetic construct
  source 1..9: note = Seed: LVVVGADGV (KRAS G12D)
FVVFGNDGL

SEQ ID NO: 7172 - protein, 9 aa, synthetic construct
  source 1..9: note = Seed: LVVVGADGV (KRAS G12D)
FVVFGNDGM

SEQ ID NO: 7173 - protein, 9 aa, synthetic construct
  source 1..9: note = Seed: LVVVGADGV (KRAS G12D)
FVVFGNDGS

SEQ ID NO: 7174 - protein, 9 aa, synthetic construct
  source 1..9: note = Seed: LVVVGADGV (KRAS G12D)
FVVFGNDGT

SEQ ID NO: 7175 - protein, 9 aa, synthetic construct
  source 1..9: note = Seed: LVVVGADGV (KRAS G12D)
FVVFGNDGV

SEQ ID NO: 7176 - protein, 9 aa, synthetic construct
  source 1..9: note = Seed: LVVVGADGV (KRAS G12D)
FVVFGPDGA

SEQ ID NO: 7177 - protein, 9 aa, synthetic construct
  source 1..9: note = Seed: LVVVGADGV (KRAS G12D)
FVVFGPDGI

SEQ ID NO: 7178 - protein, 9 aa, synthetic construct
  source 1..9: note = Seed: LVVVGADGV (KRAS G12D)
FVVFGPDGL

SEQ ID NO: 7179 - protein, 9 aa, synthetic construct
  source 1..9: note = Seed: LVVVGADGV (KRAS G12D)
FVVFGPDGM

SEQ ID NO: 7180 - protein, 9 aa, synthetic construct
  source 1..9: note = Seed: LVVVGADGV (KRAS G12D)
FVVFGPDGN

SEQ ID NO: 7181 - protein, 9 aa, synthetic construct
  source 1..9: note = Seed: LVVVGADGV (KRAS G12D)
FVVFGPDGS

SEQ ID NO: 7182 - protein, 9 aa, synthetic construct
  source 1..9: note = Seed: LVVVGADGV (KRAS G12D)
FVVFGPDGV

SEQ ID NO: 7183 - protein, 9 aa, synthetic construct
  source 1..9: note = Seed: LVVVGADGV (KRAS G12D)
FVVFGSDGA

SEQ ID NO: 7184 - protein, 9 aa, synthetic construct
  source 1..9: note = Seed: LVVVGADGV (KRAS G12D)
FVVFGSDGD

SEQ ID NO: 7185 - protein, 9 aa, synthetic construct
  source 1..9: note = Seed: LVVVGADGV (KRAS G12D)
FVVFGSDGE

SEQ ID NO: 7186 - protein, 9 aa, synthetic construct
  source 1..9: note = Seed: LVVVGADGV (KRAS G12D)
FVVFGSDGF

SEQ ID NO: 7187 - protein, 9 aa, synthetic construct
  source 1..9: note = Seed: LVVVGADGV (KRAS G12D)
FVVFGSDGI

SEQ ID NO: 7188 - protein, 9 aa, synthetic construct
  source 1..9: note = Seed: LVVVGADGV (KRAS G12D)
FVVFGSDGL

SEQ ID NO: 7189 - protein, 9 aa, synthetic construct
  source 1..9: note = Seed: LVVVGADGV (KRAS G12D)
FVVFGSDGM

SEQ ID NO: 7190 - protein, 9 aa, synthetic construct
  source 1..9: note = Seed: LVVVGADGV (KRAS G12D)
FVVFGSDGN

SEQ ID NO: 7191 - protein, 9 aa, synthetic construct
  source 1..9: note = Seed: LVVVGADGV (KRAS G12D)
FVVFGSDGS

SEQ ID NO: 7192 - protein, 9 aa, synthetic construct
  source 1..9: note = Seed: LVVVGADGV (KRAS G12D)
FVVFGSDGT

SEQ ID NO: 7193 - protein, 9 aa, synthetic construct
  source 1..9: note = Seed: LVVVGADGV (KRAS G12D)
FVVFGSDGV

SEQ ID NO: 7194 - protein, 9 aa, synthetic construct
  source 1..9: note = Seed: LVVVGADGV (KRAS G12D)
FVVFGTDGA

SEQ ID NO: 7195 - protein, 9 aa, synthetic construct
  source 1..9: note = Seed: LVVVGADGV (KRAS G12D)
FVVFGTDGD

SEQ ID NO: 7196 - protein, 9 aa, synthetic construct
  source 1..9: note = Seed: LVVVGADGV (KRAS G12D)
FVVFGTDGE

SEQ ID NO: 7197 - protein, 9 aa, synthetic construct
  source 1..9: note = Seed: LVVVGADGV (KRAS G12D)
FVVFGTDGI

SEQ ID NO: 7198 - protein, 9 aa, synthetic construct
  source 1..9: note = Seed: LVVVGADGV (KRAS G12D)
FVVFGTDGL

SEQ ID NO: 7199 - protein, 9 aa, synthetic construct
  source 1..9: note = Seed: LVVVGADGV (KRAS G12D)
FVVFGTDGM

SEQ ID NO: 7200 - protein, 9 aa, synthetic construct
  source 1..9: note = Seed: LVVVGADGV (KRAS G12D)
FVVFGTDGN

SEQ ID NO: 7201 - protein, 9 aa, synthetic construct
  source 1..9: note = Seed: LVVVGADGV (KRAS G12D)
FVVFGTDGS

SEQ ID NO: 7202 - protein, 9 aa, synthetic construct
  source 1..9: note = Seed: LVVVGADGV (KRAS G12D)
FVVFGTDGV

SEQ ID NO: 7203 - protein, 9 aa, synthetic construct
  source 1..9: note = Seed: LVVVGADGV (KRAS G12D)
FVVFGVDGA

SEQ ID NO: 7204 - protein, 9 aa, synthetic construct
  source 1..9: note = Seed: LVVVGADGV (KRAS G12D)
FVVFGVDGD

SEQ ID NO: 7205 - protein, 9 aa, synthetic construct
  source 1..9: note = Seed: LVVVGADGV (KRAS G12D)
FVVFGVDGI

SEQ ID NO: 7206 - protein, 9 aa, synthetic construct
  source 1..9: note = Seed: LVVVGADGV (KRAS G12D)
FVVFGVDGL

SEQ ID NO: 7207 - protein, 9 aa, synthetic construct
  source 1..9: note = Seed: LVVVGADGV (KRAS G12D)
FVVFGVDGM

SEQ ID NO: 7208 - protein, 9 aa, synthetic construct
  source 1..9: note = Seed: LVVVGADGV (KRAS G12D)
FVVFGVDGN

SEQ ID NO: 7209 - protein, 9 aa, synthetic construct
  source 1..9: note = Seed: LVVVGADGV (KRAS G12D)
FVVFGVDGS

SEQ ID NO: 7210 - protein, 9 aa, synthetic construct
  source 1..9: note = Seed: LVVVGADGV (KRAS G12D)
FVVFGVDGT

SEQ ID NO: 7211 - protein, 9 aa, synthetic construct
  source 1..9: note = Seed: LVVVGADGV (KRAS G12D)
FVVFGVDGV

SEQ ID NO: 7212 - protein, 9 aa, synthetic construct
  source 1..9: note = Seed: LVVVGADGV (KRAS G12D)
FVVGGADGA

SEQ ID NO: 7213 - protein, 9 aa, synthetic construct
  source 1..9: note = Seed: LVVVGADGV (KRAS G12D)
FVVGGADGI

SEQ ID NO: 7214 - protein, 9 aa, synthetic construct
  source 1..9: note = Seed: LVVVGADGV (KRAS G12D)
FVVGGADGL

SEQ ID NO: 7215 - protein, 9 aa, synthetic construct
  source 1..9: note = Seed: LVVVGADGV (KRAS G12D)
FVVGGADGV

SEQ ID NO: 7216 - protein, 9 aa, synthetic construct
  source 1..9: note = Seed: LVVVGADGV (KRAS G12D)
FVVGGSDGL

SEQ ID NO: 7217 - protein, 9 aa, synthetic construct
  source 1..9: note = Seed: LVVVGADGV (KRAS G12D)
FVVHGADGA

SEQ ID NO: 7218 - protein, 9 aa, synthetic construct
  source 1..9: note = Seed: LVVVGADGV (KRAS G12D)
FVVHGADGI

SEQ ID NO: 7219 - protein, 9 aa, synthetic construct
  source 1..9: note = Seed: LVVVGADGV (KRAS G12D)
FVVHGADGL

SEQ ID NO: 7220 - protein, 9 aa, synthetic construct
  source 1..9: note = Seed: LVVVGADGV (KRAS G12D)
FVVHGADGV

SEQ ID NO: 7221 - protein, 9 aa, synthetic construct
  source 1..9: note = Seed: LVVVGADGV (KRAS G12D)
FVVHGFDGF

SEQ ID NO: 7222 - protein, 9 aa, synthetic construct
  source 1..9: note = Seed: LVVVGADGV (KRAS G12D)
FVVHGFDGI

SEQ ID NO: 7223 - protein, 9 aa, synthetic construct
  source 1..9: note = Seed: LVVVGADGV (KRAS G12D)
FVVHGFDGL

SEQ ID NO: 7224 - protein, 9 aa, synthetic construct
  source 1..9: note = Seed: LVVVGADGV (KRAS G12D)
FVVHGFDGV

SEQ ID NO: 7225 - protein, 9 aa, synthetic construct
  source 1..9: note = Seed: LVVVGADGV (KRAS G12D)
FVVHGGDGL

SEQ ID NO: 7226 - protein, 9 aa, synthetic construct
  source 1..9: note = Seed: LVVVGADGV (KRAS G12D)
FVVHGSDGL

SEQ ID NO: 7227 - protein, 9 aa, synthetic construct
  source 1..9: note = Seed: LVVVGADGV (KRAS G12D)
FVVIGADGC

SEQ ID NO: 7228 - protein, 9 aa, synthetic construct
  source 1..9: note = Seed: LVVVGADGV (KRAS G12D)
FVVIGADGD

SEQ ID NO: 7229 - protein, 9 aa, synthetic construct
  source 1..9: note = Seed: LVVVGADGV (KRAS G12D)
FVVIGADGE

SEQ ID NO: 7230 - protein, 9 aa, synthetic construct
  source 1..9: note = Seed: LVVVGADGV (KRAS G12D)
FVVIGADGF

SEQ ID NO: 7231 - protein, 9 aa, synthetic construct
  source 1..9: note = Seed: LVVVGADGV (KRAS G12D)
FVVIGADGG

SEQ ID NO: 7232 - protein, 9 aa, synthetic construct
  source 1..9: note = Seed: LVVVGADGV (KRAS G12D)
FVVIGADGH

SEQ ID NO: 7233 - protein, 9 aa, synthetic construct
  source 1..9: note = Seed: LVVVGADGV (KRAS G12D)
FVVIGADGK

SEQ ID NO: 7234 - protein, 9 aa, synthetic construct
  source 1..9: note = Seed: LVVVGADGV (KRAS G12D)
FVVIGADGM

SEQ ID NO: 7235 - protein, 9 aa, synthetic construct
  source 1..9: note = Seed: LVVVGADGV (KRAS G12D)
FVVIGADGN

SEQ ID NO: 7236 - protein, 9 aa, synthetic construct
  source 1..9: note = Seed: LVVVGADGV (KRAS G12D)
FVVIGADGP

SEQ ID NO: 7237 - protein, 9 aa, synthetic construct
  source 1..9: note = Seed: LVVVGADGV (KRAS G12D)
FVVIGADGQ

SEQ ID NO: 7238 - protein, 9 aa, synthetic construct
  source 1..9: note = Seed: LVVVGADGV (KRAS G12D)
FVVIGADGR

SEQ ID NO: 7239 - protein, 9 aa, synthetic construct
  source 1..9: note = Seed: LVVVGADGV (KRAS G12D)
FVVIGADGS

SEQ ID NO: 7240 - protein, 9 aa, synthetic construct
  source 1..9: note = Seed: LVVVGADGV (KRAS G12D)
FVVIGADGT

SEQ ID NO: 7241 - protein, 9 aa, synthetic construct
  source 1..9: note = Seed: LVVVGADGV (KRAS G12D)
FVVIGADGW

SEQ ID NO: 7242 - protein, 9 aa, synthetic construct
  source 1..9: note = Seed: LVVVGADGV (KRAS G12D)
FVVIGADGY

SEQ ID NO: 7243 - protein, 9 aa, synthetic construct
  source 1..9: note = Seed: LVVVGADGV (KRAS G12D)
FVVIGDDGA

SEQ ID NO: 7244 - protein, 9 aa, synthetic construct
  source 1..9: note = Seed: LVVVGADGV (KRAS G12D)
FVVIGFDGI

SEQ ID NO: 7245 - protein, 9 aa, synthetic construct
  source 1..9: note = Seed: LVVVGADGV (KRAS G12D)
FVVIGFDGL

SEQ ID NO: 7246 - protein, 9 aa, synthetic construct
  source 1..9: note = Seed: LVVVGADGV (KRAS G12D)
FVVIGFDGV

SEQ ID NO: 7247 - protein, 9 aa, synthetic construct
  source 1..9: note = Seed: LVVVGADGV (KRAS G12D)
FVVIGGDGA

SEQ ID NO: 7248 - protein, 9 aa, synthetic construct
  source 1..9: note = Seed: LVVVGADGV (KRAS G12D)
FVVIGGDGC

SEQ ID NO: 7249 - protein, 9 aa, synthetic construct
  source 1..9: note = Seed: LVVVGADGV (KRAS G12D)
FVVIGGDGF

SEQ ID NO: 7250 - protein, 9 aa, synthetic construct
  source 1..9: note = Seed: LVVVGADGV (KRAS G12D)
FVVIGGDGG

SEQ ID NO: 7251 - protein, 9 aa, synthetic construct
  source 1..9: note = Seed: LVVVGADGV (KRAS G12D)
FVVIGGDGM

SEQ ID NO: 7252 - protein, 9 aa, synthetic construct
  source 1..9: note = Seed: LVVVGADGV (KRAS G12D)
FVVIGGDGN

SEQ ID NO: 7253 - protein, 9 aa, synthetic construct
  source 1..9: note = Seed: LVVVGADGV (KRAS G12D)
FVVIGGDGS

SEQ ID NO: 7254 - protein, 9 aa, synthetic construct
  source 1..9: note = Seed: LVVVGADGV (KRAS G12D)
FVVIGGDGT

SEQ ID NO: 7255 - protein, 9 aa, synthetic construct
  source 1..9: note = Seed: LVVVGADGV (KRAS G12D)
FVVIGHDGA

SEQ ID NO: 7256 - protein, 9 aa, synthetic construct
  source 1..9: note = Seed: LVVVGADGV (KRAS G12D)
FVVIGHDGL

SEQ ID NO: 7257 - protein, 9 aa, synthetic construct
  source 1..9: note = Seed: LVVVGADGV (KRAS G12D)
FVVIGHDGS

SEQ ID NO: 7258 - protein, 9 aa, synthetic construct
  source 1..9: note = Seed: LVVVGADGV (KRAS G12D)
FVVIGIDGA

SEQ ID NO: 7259 - protein, 9 aa, synthetic construct
  source 1..9: note = Seed: LVVVGADGV (KRAS G12D)
FVVIGIDGD

SEQ ID NO: 7260 - protein, 9 aa, synthetic construct
  source 1..9: note = Seed: LVVVGADGV (KRAS G12D)
FVVIGIDGF

SEQ ID NO: 7261 - protein, 9 aa, synthetic construct
  source 1..9: note = Seed: LVVVGADGV (KRAS G12D)
FVVIGIDGG

SEQ ID NO: 7262 - protein, 9 aa, synthetic construct
  source 1..9: note = Seed: LVVVGADGV (KRAS G12D)
FVVIGIDGH

SEQ ID NO: 7263 - protein, 9 aa, synthetic construct
  source 1..9: note = Seed: LVVVGADGV (KRAS G12D)
FVVIGIDGI

SEQ ID NO: 7264 - protein, 9 aa, synthetic construct
  source 1..9: note = Seed: LVVVGADGV (KRAS G12D)
FVVIGIDGL

SEQ ID NO: 7265 - protein, 9 aa, synthetic construct
  source 1..9: note = Seed: LVVVGADGV (KRAS G12D)
FVVIGIDGM

SEQ ID NO: 7266 - protein, 9 aa, synthetic construct
  source 1..9: note = Seed: LVVVGADGV (KRAS G12D)
FVVIGIDGN

SEQ ID NO: 7267 - protein, 9 aa, synthetic construct
  source 1..9: note = Seed: LVVVGADGV (KRAS G12D)
FVVIGIDGP

SEQ ID NO: 7268 - protein, 9 aa, synthetic construct
  source 1..9: note = Seed: LVVVGADGV (KRAS G12D)
FVVIGIDGQ

SEQ ID NO: 7269 - protein, 9 aa, synthetic construct
  source 1..9: note = Seed: LVVVGADGV (KRAS G12D)
FVVIGIDGS

SEQ ID NO: 7270 - protein, 9 aa, synthetic construct
  source 1..9: note = Seed: LVVVGADGV (KRAS G12D)
FVVIGIDGT

SEQ ID NO: 7271 - protein, 9 aa, synthetic construct
  source 1..9: note = Seed: LVVVGADGV (KRAS G12D)
FVVIGIDGV

SEQ ID NO: 7272 - protein, 9 aa, synthetic construct
  source 1..9: note = Seed: LVVVGADGV (KRAS G12D)
FVVIGIDGY

SEQ ID NO: 7273 - protein, 9 aa, synthetic construct
  source 1..9: note = Seed: LVVVGADGV (KRAS G12D)
FVVIGLDGA

SEQ ID NO: 7274 - protein, 9 aa, synthetic construct
  source 1..9: note = Seed: LVVVGADGV (KRAS G12D)
FVVIGLDGH

SEQ ID NO: 7275 - protein, 9 aa, synthetic construct
  source 1..9: note = Seed: LVVVGADGV (KRAS G12D)
FVVIGLDGI

SEQ ID NO: 7276 - protein, 9 aa, synthetic construct
  source 1..9: note = Seed: LVVVGADGV (KRAS G12D)
FVVIGLDGL

SEQ ID NO: 7277 - protein, 9 aa, synthetic construct
  source 1..9: note = Seed: LVVVGADGV (KRAS G12D)
FVVIGLDGM

SEQ ID NO: 7278 - protein, 9 aa, synthetic construct
  source 1..9: note = Seed: LVVVGADGV (KRAS G12D)
FVVIGLDGN

SEQ ID NO: 7279 - protein, 9 aa, synthetic construct
  source 1..9: note = Seed: LVVVGADGV (KRAS G12D)
FVVIGLDGS

SEQ ID NO: 7280 - protein, 9 aa, synthetic construct
  source 1..9: note = Seed: LVVVGADGV (KRAS G12D)
FVVIGLDGT

SEQ ID NO: 7281 - protein, 9 aa, synthetic construct
  source 1..9: note = Seed: LVVVGADGV (KRAS G12D)
FVVIGLDGV

SEQ ID NO: 7282 - protein, 9 aa, synthetic construct
  source 1..9: note = Seed: LVVVGADGV (KRAS G12D)
FVVIGMDGA

SEQ ID NO: 7283 - protein, 9 aa, synthetic construct
  source 1..9: note = Seed: LVVVGADGV (KRAS G12D)
FVVIGMDGH

SEQ ID NO: 7284 - protein, 9 aa, synthetic construct
  source 1..9: note = Seed: LVVVGADGV (KRAS G12D)
FVVIGMDGI

SEQ ID NO: 7285 - protein, 9 aa, synthetic construct
  source 1..9: note = Seed: LVVVGADGV (KRAS G12D)
FVVIGMDGL

SEQ ID NO: 7286 - protein, 9 aa, synthetic construct
  source 1..9: note = Seed: LVVVGADGV (KRAS G12D)
FVVIGMDGM

SEQ ID NO: 7287 - protein, 9 aa, synthetic construct
  source 1..9: note = Seed: LVVVGADGV (KRAS G12D)
FVVIGMDGN

SEQ ID NO: 7288 - protein, 9 aa, synthetic construct
  source 1..9: note = Seed: LVVVGADGV (KRAS G12D)
FVVIGMDGQ

SEQ ID NO: 7289 - protein, 9 aa, synthetic construct
  source 1..9: note = Seed: LVVVGADGV (KRAS G12D)
FVVIGMDGS

SEQ ID NO: 7290 - protein, 9 aa, synthetic construct
  source 1..9: note = Seed: LVVVGADGV (KRAS G12D)
FVVIGMDGT

SEQ ID NO: 7291 - protein, 9 aa, synthetic construct
  source 1..9: note = Seed: LVVVGADGV (KRAS G12D)
FVVIGMDGV

SEQ ID NO: 7292 - protein, 9 aa, synthetic construct
  source 1..9: note = Seed: LVVVGADGV (KRAS G12D)
FVVIGNDGA

SEQ ID NO: 7293 - protein, 9 aa, synthetic construct
  source 1..9: note = Seed: LVVVGADGV (KRAS G12D)
FVVIGNDGD

SEQ ID NO: 7294 - protein, 9 aa, synthetic construct
  source 1..9: note = Seed: LVVVGADGV (KRAS G12D)
FVVIGNDGE

SEQ ID NO: 7295 - protein, 9 aa, synthetic construct
  source 1..9: note = Seed: LVVVGADGV (KRAS G12D)
FVVIGNDGG

SEQ ID NO: 7296 - protein, 9 aa, synthetic construct
  source 1..9: note = Seed: LVVVGADGV (KRAS G12D)
FVVIGNDGH

SEQ ID NO: 7297 - protein, 9 aa, synthetic construct
  source 1..9: note = Seed: LVVVGADGV (KRAS G12D)
FVVIGNDGI

SEQ ID NO: 7298 - protein, 9 aa, synthetic construct
  source 1..9: note = Seed: LVVVGADGV (KRAS G12D)
FVVIGNDGL

SEQ ID NO: 7299 - protein, 9 aa, synthetic construct
  source 1..9: note = Seed: LVVVGADGV (KRAS G12D)
FVVIGNDGM

SEQ ID NO: 7300 - protein, 9 aa, synthetic construct
  source 1..9: note = Seed: LVVVGADGV (KRAS G12D)
FVVIGNDGN

SEQ ID NO: 7301 - protein, 9 aa, synthetic construct
  source 1..9: note = Seed: LVVVGADGV (KRAS G12D)
FVVIGNDGP

SEQ ID NO: 7302 - protein, 9 aa, synthetic construct
  source 1..9: note = Seed: LVVVGADGV (KRAS G12D)
FVVIGNDGQ

SEQ ID NO: 7303 - protein, 9 aa, synthetic construct
  source 1..9: note = Seed: LVVVGADGV (KRAS G12D)
FVVIGNDGS

SEQ ID NO: 7304 - protein, 9 aa, synthetic construct
  source 1..9: note = Seed: LVVVGADGV (KRAS G12D)
FVVIGNDGT

SEQ ID NO: 7305 - protein, 9 aa, synthetic construct
  source 1..9: note = Seed: LVVVGADGV (KRAS G12D)
FVVIGNDGV

SEQ ID NO: 7306 - protein, 9 aa, synthetic construct
  source 1..9: note = Seed: LVVVGADGV (KRAS G12D)
FVVIGNDGY

SEQ ID NO: 7307 - protein, 9 aa, synthetic construct
  source 1..9: note = Seed: LVVVGADGV (KRAS G12D)
FVVIGPDGA

SEQ ID NO: 7308 - protein, 9 aa, synthetic construct
  source 1..9: note = Seed: LVVVGADGV (KRAS G12D)
FVVIGPDGF

SEQ ID NO: 7309 - protein, 9 aa, synthetic construct
  source 1..9: note = Seed: LVVVGADGV (KRAS G12D)
FVVIGPDGG

SEQ ID NO: 7310 - protein, 9 aa, synthetic construct
  source 1..9: note = Seed: LVVVGADGV (KRAS G12D)
FVVIGPDGH

SEQ ID NO: 7311 - protein, 9 aa, synthetic construct
  source 1..9: note = Seed: LVVVGADGV (KRAS G12D)
FVVIGPDGI

SEQ ID NO: 7312 - protein, 9 aa, synthetic construct
  source 1..9: note = Seed: LVVVGADGV (KRAS G12D)
FVVIGPDGL

SEQ ID NO: 7313 - protein, 9 aa, synthetic construct
  source 1..9: note = Seed: LVVVGADGV (KRAS G12D)
FVVIGPDGM

SEQ ID NO: 7314 - protein, 9 aa, synthetic construct
  source 1..9: note = Seed: LVVVGADGV (KRAS G12D)
FVVIGPDGN

SEQ ID NO: 7315 - protein, 9 aa, synthetic construct
  source 1..9: note = Seed: LVVVGADGV (KRAS G12D)
FVVIGPDGP

SEQ ID NO: 7316 - protein, 9 aa, synthetic construct
  source 1..9: note = Seed: LVVVGADGV (KRAS G12D)
FVVIGPDGQ

SEQ ID NO: 7317 - protein, 9 aa, synthetic construct
  source 1..9: note = Seed: LVVVGADGV (KRAS G12D)
FVVIGPDGS

SEQ ID NO: 7318 - protein, 9 aa, synthetic construct
  source 1..9: note = Seed: LVVVGADGV (KRAS G12D)
FVVIGPDGT

SEQ ID NO: 7319 - protein, 9 aa, synthetic construct
  source 1..9: note = Seed: LVVVGADGV (KRAS G12D)
FVVIGPDGV

SEQ ID NO: 7320 - protein, 9 aa, synthetic construct
  source 1..9: note = Seed: LVVVGADGV (KRAS G12D)
FVVIGPDGW

SEQ ID NO: 7321 - protein, 9 aa, synthetic construct
  source 1..9: note = Seed: LVVVGADGV (KRAS G12D)
FVVIGPDGY

SEQ ID NO: 7322 - protein, 9 aa, synthetic construct
  source 1..9: note = Seed: LVVVGADGV (KRAS G12D)
FVVIGQDGA

SEQ ID NO: 7323 - protein, 9 aa, synthetic construct
  source 1..9: note = Seed: LVVVGADGV (KRAS G12D)
FVVIGSDGA

SEQ ID NO: 7324 - protein, 9 aa, synthetic construct
  source 1..9: note = Seed: LVVVGADGV (KRAS G12D)
FVVIGSDGC

SEQ ID NO: 7325 - protein, 9 aa, synthetic construct
  source 1..9: note = Seed: LVVVGADGV (KRAS G12D)
FVVIGSDGD

SEQ ID NO: 7326 - protein, 9 aa, synthetic construct
  source 1..9: note = Seed: LVVVGADGV (KRAS G12D)
FVVIGSDGE

SEQ ID NO: 7327 - protein, 9 aa, synthetic construct
  source 1..9: note = Seed: LVVVGADGV (KRAS G12D)
FVVIGSDGF

SEQ ID NO: 7328 - protein, 9 aa, synthetic construct
  source 1..9: note = Seed: LVVVGADGV (KRAS G12D)
FVVIGSDGG

SEQ ID NO: 7329 - protein, 9 aa, synthetic construct
  source 1..9: note = Seed: LVVVGADGV (KRAS G12D)
FVVIGSDGH

SEQ ID NO: 7330 - protein, 9 aa, synthetic construct
  source 1..9: note = Seed: LVVVGADGV (KRAS G12D)
FVVIGSDGM

SEQ ID NO: 7331 - protein, 9 aa, synthetic construct
  source 1..9: note = Seed: LVVVGADGV (KRAS G12D)
FVVIGSDGN

SEQ ID NO: 7332 - protein, 9 aa, synthetic construct
  source 1..9: note = Seed: LVVVGADGV (KRAS G12D)
FVVIGSDGQ

SEQ ID NO: 7333 - protein, 9 aa, synthetic construct
  source 1..9: note = Seed: LVVVGADGV (KRAS G12D)
FVVIGSDGS

SEQ ID NO: 7334 - protein, 9 aa, synthetic construct
  source 1..9: note = Seed: LVVVGADGV (KRAS G12D)
FVVIGSDGT

SEQ ID NO: 7335 - protein, 9 aa, synthetic construct
  source 1..9: note = Seed: LVVVGADGV (KRAS G12D)
FVVIGSDGY

SEQ ID NO: 7336 - protein, 9 aa, synthetic construct
  source 1..9: note = Seed: LVVVGADGV (KRAS G12D)
FVVIGTDGA

SEQ ID NO: 7337 - protein, 9 aa, synthetic construct
  source 1..9: note = Seed: LVVVGADGV (KRAS G12D)
FVVIGTDGD

SEQ ID NO: 7338 - protein, 9 aa, synthetic construct
  source 1..9: note = Seed: LVVVGADGV (KRAS G12D)
FVVIGTDGE

SEQ ID NO: 7339 - protein, 9 aa, synthetic construct
  source 1..9: note = Seed: LVVVGADGV (KRAS G12D)
FVVIGTDGF

SEQ ID NO: 7340 - protein, 9 aa, synthetic construct
  source 1..9: note = Seed: LVVVGADGV (KRAS G12D)
FVVIGTDGG

SEQ ID NO: 7341 - protein, 9 aa, synthetic construct
  source 1..9: note = Seed: LVVVGADGV (KRAS G12D)
FVVIGTDGH

SEQ ID NO: 7342 - protein, 9 aa, synthetic construct
  source 1..9: note = Seed: LVVVGADGV (KRAS G12D)
FVVIGTDGI

SEQ ID NO: 7343 - protein, 9 aa, synthetic construct
  source 1..9: note = Seed: LVVVGADGV (KRAS G12D)
FVVIGTDGL

SEQ ID NO: 7344 - protein, 9 aa, synthetic construct
  source 1..9: note = Seed: LVVVGADGV (KRAS G12D)
FVVIGTDGM

SEQ ID NO: 7345 - protein, 9 aa, synthetic construct
  source 1..9: note = Seed: LVVVGADGV (KRAS G12D)
FVVIGTDGN

SEQ ID NO: 7346 - protein, 9 aa, synthetic construct
  source 1..9: note = Seed: LVVVGADGV (KRAS G12D)
FVVIGTDGQ

SEQ ID NO: 7347 - protein, 9 aa, synthetic construct
  source 1..9: note = Seed: LVVVGADGV (KRAS G12D)
FVVIGTDGS

SEQ ID NO: 7348 - protein, 9 aa, synthetic construct
  source 1..9: note = Seed: LVVVGADGV (KRAS G12D)
FVVIGTDGT

SEQ ID NO: 7349 - protein, 9 aa, synthetic construct
  source 1..9: note = Seed: LVVVGADGV (KRAS G12D)
FVVIGTDGV

SEQ ID NO: 7350 - protein, 9 aa, synthetic construct
  source 1..9: note = Seed: LVVVGADGV (KRAS G12D)
FVVIGTDGY

SEQ ID NO: 7351 - protein, 9 aa, synthetic construct
  source 1..9: note = Seed: LVVVGADGV (KRAS G12D)
FVVIGVDGA

SEQ ID NO: 7352 - protein, 9 aa, synthetic construct
  source 1..9: note = Seed: LVVVGADGV (KRAS G12D)
FVVIGVDGD

SEQ ID NO: 7353 - protein, 9 aa, synthetic construct
  source 1..9: note = Seed: LVVVGADGV (KRAS G12D)
FVVIGVDGF

SEQ ID NO: 7354 - protein, 9 aa, synthetic construct
  source 1..9: note = Seed: LVVVGADGV (KRAS G12D)
FVVIGVDGG

SEQ ID NO: 7355 - protein, 9 aa, synthetic construct
  source 1..9: note = Seed: LVVVGADGV (KRAS G12D)
FVVIGVDGH

SEQ ID NO: 7356 - protein, 9 aa, synthetic construct
  source 1..9: note = Seed: LVVVGADGV (KRAS G12D)
FVVIGVDGI

SEQ ID NO: 7357 - protein, 9 aa, synthetic construct
  source 1..9: note = Seed: LVVVGADGV (KRAS G12D)
FVVIGVDGK

SEQ ID NO: 7358 - protein, 9 aa, synthetic construct
  source 1..9: note = Seed: LVVVGADGV (KRAS G12D)
FVVIGVDGL

SEQ ID NO: 7359 - protein, 9 aa, synthetic construct
  source 1..9: note = Seed: LVVVGADGV (KRAS G12D)
FVVIGVDGM

SEQ ID NO: 7360 - protein, 9 aa, synthetic construct
  source 1..9: note = Seed: LVVVGADGV (KRAS G12D)
FVVIGVDGN

SEQ ID NO: 7361 - protein, 9 aa, synthetic construct
  source 1..9: note = Seed: LVVVGADGV (KRAS G12D)
FVVIGVDGP

SEQ ID NO: 7362 - protein, 9 aa, synthetic construct
  source 1..9: note = Seed: LVVVGADGV (KRAS G12D)
FVVIGVDGQ

SEQ ID NO: 7363 - protein, 9 aa, synthetic construct
  source 1..9: note = Seed: LVVVGADGV (KRAS G12D)
FVVIGVDGS

SEQ ID NO: 7364 - protein, 9 aa, synthetic construct
  source 1..9: note = Seed: LVVVGADGV (KRAS G12D)
FVVIGVDGT

SEQ ID NO: 7365 - protein, 9 aa, synthetic construct
  source 1..9: note = Seed: LVVVGADGV (KRAS G12D)
FVVIGVDGV

SEQ ID NO: 7366 - protein, 9 aa, synthetic construct
  source 1..9: note = Seed: LVVVGADGV (KRAS G12D)
FVVIGVDGY

SEQ ID NO: 7367 - protein, 9 aa, synthetic construct
  source 1..9: note = Seed: LVVVGADGV (KRAS G12D)
FVVLGADGA

SEQ ID NO: 7368 - protein, 9 aa, synthetic construct
  source 1..9: note = Seed: LVVVGADGV (KRAS G12D)
FVVLGADGC

SEQ ID NO: 7369 - protein, 9 aa, synthetic construct
  source 1..9: note = Seed: LVVVGADGV (KRAS G12D)
FVVLGADGD

SEQ ID NO: 7370 - protein, 9 aa, synthetic construct
  source 1..9: note = Seed: LVVVGADGV (KRAS G12D)
FVVLGADGE

SEQ ID NO: 7371 - protein, 9 aa, synthetic construct
  source 1..9: note = Seed: LVVVGADGV (KRAS G12D)
FVVLGADGF

SEQ ID NO: 7372 - protein, 9 aa, synthetic construct
  source 1..9: note = Seed: LVVVGADGV (KRAS G12D)
FVVLGADGG

SEQ ID NO: 7373 - protein, 9 aa, synthetic construct
  source 1..9: note = Seed: LVVVGADGV (KRAS G12D)
FVVLGADGH

SEQ ID NO: 7374 - protein, 9 aa, synthetic construct
  source 1..9: note = Seed: LVVVGADGV (KRAS G12D)
FVVLGADGK

SEQ ID NO: 7375 - protein, 9 aa, synthetic construct
  source 1..9: note = Seed: LVVVGADGV (KRAS G12D)
FVVLGADGN

SEQ ID NO: 7376 - protein, 9 aa, synthetic construct
  source 1..9: note = Seed: LVVVGADGV (KRAS G12D)
FVVLGADGP

SEQ ID NO: 7377 - protein, 9 aa, synthetic construct
  source 1..9: note = Seed: LVVVGADGV (KRAS G12D)
FVVLGADGQ

SEQ ID NO: 7378 - protein, 9 aa, synthetic construct
  source 1..9: note = Seed: LVVVGADGV (KRAS G12D)
FVVLGADGR

SEQ ID NO: 7379 - protein, 9 aa, synthetic construct
  source 1..9: note = Seed: LVVVGADGV (KRAS G12D)
FVVLGADGS

SEQ ID NO: 7380 - protein, 9 aa, synthetic construct
  source 1..9: note = Seed: LVVVGADGV (KRAS G12D)
FVVLGADGW

SEQ ID NO: 7381 - protein, 9 aa, synthetic construct
  source 1..9: note = Seed: LVVVGADGV (KRAS G12D)
FVVLGADGY

SEQ ID NO: 7382 - protein, 9 aa, synthetic construct
  source 1..9: note = Seed: LVVVGADGV (KRAS G12D)
FVVLGCDGA

SEQ ID NO: 7383 - protein, 9 aa, synthetic construct
  source 1..9: note = Seed: LVVVGADGV (KRAS G12D)
FVVLGCDGI

SEQ ID NO: 7384 - protein, 9 aa, synthetic construct
  source 1..9: note = Seed: LVVVGADGV (KRAS G12D)
FVVLGCDGL

SEQ ID NO: 7385 - protein, 9 aa, synthetic construct
  source 1..9: note = Seed: LVVVGADGV (KRAS G12D)
FVVLGCDGV

SEQ ID NO: 7386 - protein, 9 aa, synthetic construct
  source 1..9: note = Seed: LVVVGADGV (KRAS G12D)
FVVLGDDGA

SEQ ID NO: 7387 - protein, 9 aa, synthetic construct
  source 1..9: note = Seed: LVVVGADGV (KRAS G12D)
FVVLGGDGC

SEQ ID NO: 7388 - protein, 9 aa, synthetic construct
  source 1..9: note = Seed: LVVVGADGV (KRAS G12D)
FVVLGGDGF

SEQ ID NO: 7389 - protein, 9 aa, synthetic construct
  source 1..9: note = Seed: LVVVGADGV (KRAS G12D)
FVVLGGDGG

SEQ ID NO: 7390 - protein, 9 aa, synthetic construct
  source 1..9: note = Seed: LVVVGADGV (KRAS G12D)
FVVLGGDGH

SEQ ID NO: 7391 - protein, 9 aa, synthetic construct
  source 1..9: note = Seed: LVVVGADGV (KRAS G12D)
FVVLGGDGN

SEQ ID NO: 7392 - protein, 9 aa, synthetic construct
  source 1..9: note = Seed: LVVVGADGV (KRAS G12D)
FVVLGGDGP

SEQ ID NO: 7393 - protein, 9 aa, synthetic construct
  source 1..9: note = Seed: LVVVGADGV (KRAS G12D)
FVVLGGDGQ

SEQ ID NO: 7394 - protein, 9 aa, synthetic construct
  source 1..9: note = Seed: LVVVGADGV (KRAS G12D)
FVVLGGDGS

SEQ ID NO: 7395 - protein, 9 aa, synthetic construct
  source 1..9: note = Seed: LVVVGADGV (KRAS G12D)
FVVLGGDGY

SEQ ID NO: 7396 - protein, 9 aa, synthetic construct
  source 1..9: note = Seed: LVVVGADGV (KRAS G12D)
FVVLGHDGA

SEQ ID NO: 7397 - protein, 9 aa, synthetic construct
  source 1..9: note = Seed: LVVVGADGV (KRAS G12D)
FVVLGHDGI

SEQ ID NO: 7398 - protein, 9 aa, synthetic construct
  source 1..9: note = Seed: LVVVGADGV (KRAS G12D)
FVVLGHDGL

SEQ ID NO: 7399 - protein, 9 aa, synthetic construct
  source 1..9: note = Seed: LVVVGADGV (KRAS G12D)
FVVLGHDGM

SEQ ID NO: 7400 - protein, 9 aa, synthetic construct
  source 1..9: note = Seed: LVVVGADGV (KRAS G12D)
FVVLGHDGV

SEQ ID NO: 7401 - protein, 9 aa, synthetic construct
  source 1..9: note = Seed: LVVVGADGV (KRAS G12D)
FVVLGIDGA

SEQ ID NO: 7402 - protein, 9 aa, synthetic construct
  source 1..9: note = Seed: LVVVGADGV (KRAS G12D)
FVVLGIDGD

SEQ ID NO: 7403 - protein, 9 aa, synthetic construct
  source 1..9: note = Seed: LVVVGADGV (KRAS G12D)
FVVLGIDGE

SEQ ID NO: 7404 - protein, 9 aa, synthetic construct
  source 1..9: note = Seed: LVVVGADGV (KRAS G12D)
FVVLGIDGF

SEQ ID NO: 7405 - protein, 9 aa, synthetic construct
  source 1..9: note = Seed: LVVVGADGV (KRAS G12D)
FVVLGIDGG

SEQ ID NO: 7406 - protein, 9 aa, synthetic construct
  source 1..9: note = Seed: LVVVGADGV (KRAS G12D)
FVVLGIDGH

SEQ ID NO: 7407 - protein, 9 aa, synthetic construct
  source 1..9: note = Seed: LVVVGADGV (KRAS G12D)
FVVLGIDGI

SEQ ID NO: 7408 - protein, 9 aa, synthetic construct
  source 1..9: note = Seed: LVVVGADGV (KRAS G12D)
FVVLGIDGL

SEQ ID NO: 7409 - protein, 9 aa, synthetic construct
  source 1..9: note = Seed: LVVVGADGV (KRAS G12D)
FVVLGIDGM

SEQ ID NO: 7410 - protein, 9 aa, synthetic construct
  source 1..9: note = Seed: LVVVGADGV (KRAS G12D)
FVVLGIDGN

SEQ ID NO: 7411 - protein, 9 aa, synthetic construct
  source 1..9: note = Seed: LVVVGADGV (KRAS G12D)
FVVLGIDGP

SEQ ID NO: 7412 - protein, 9 aa, synthetic construct
  source 1..9: note = Seed: LVVVGADGV (KRAS G12D)
FVVLGIDGQ

SEQ ID NO: 7413 - protein, 9 aa, synthetic construct
  source 1..9: note = Seed: LVVVGADGV (KRAS G12D)
FVVLGIDGS

SEQ ID NO: 7414 - protein, 9 aa, synthetic construct
  source 1..9: note = Seed: LVVVGADGV (KRAS G12D)
FVVLGIDGT

SEQ ID NO: 7415 - protein, 9 aa, synthetic construct
  source 1..9: note = Seed: LVVVGADGV (KRAS G12D)
FVVLGIDGV

SEQ ID NO: 7416 - protein, 9 aa, synthetic construct
  source 1..9: note = Seed: LVVVGADGV (KRAS G12D)
FVVLGIDGY

SEQ ID NO: 7417 - protein, 9 aa, synthetic construct
  source 1..9: note = Seed: LVVVGADGV (KRAS G12D)
FVVLGLDGA

SEQ ID NO: 7418 - protein, 9 aa, synthetic construct
  source 1..9: note = Seed: LVVVGADGV (KRAS G12D)
FVVLGLDGH

SEQ ID NO: 7419 - protein, 9 aa, synthetic construct
  source 1..9: note = Seed: LVVVGADGV (KRAS G12D)
FVVLGLDGI

SEQ ID NO: 7420 - protein, 9 aa, synthetic construct
  source 1..9: note = Seed: LVVVGADGV (KRAS G12D)
FVVLGLDGL

SEQ ID NO: 7421 - protein, 9 aa, synthetic construct
  source 1..9: note = Seed: LVVVGADGV (KRAS G12D)
FVVLGLDGM

SEQ ID NO: 7422 - protein, 9 aa, synthetic construct
  source 1..9: note = Seed: LVVVGADGV (KRAS G12D)
FVVLGLDGN

SEQ ID NO: 7423 - protein, 9 aa, synthetic construct
  source 1..9: note = Seed: LVVVGADGV (KRAS G12D)
FVVLGLDGS

SEQ ID NO: 7424 - protein, 9 aa, synthetic construct
  source 1..9: note = Seed: LVVVGADGV (KRAS G12D)
FVVLGLDGT

SEQ ID NO: 7425 - protein, 9 aa, synthetic construct
  source 1..9: note = Seed: LVVVGADGV (KRAS G12D)
FVVLGLDGV

SEQ ID NO: 7426 - protein, 9 aa, synthetic construct
  source 1..9: note = Seed: LVVVGADGV (KRAS G12D)
FVVLGMDGA

SEQ ID NO: 7427 - protein, 9 aa, synthetic construct
  source 1..9: note = Seed: LVVVGADGV (KRAS G12D)
FVVLGMDGH

SEQ ID NO: 7428 - protein, 9 aa, synthetic construct
  source 1..9: note = Seed: LVVVGADGV (KRAS G12D)
FVVLGMDGI

SEQ ID NO: 7429 - protein, 9 aa, synthetic construct
  source 1..9: note = Seed: LVVVGADGV (KRAS G12D)
FVVLGMDGL

SEQ ID NO: 7430 - protein, 9 aa, synthetic construct
  source 1..9: note = Seed: LVVVGADGV (KRAS G12D)
FVVLGMDGM

SEQ ID NO: 7431 - protein, 9 aa, synthetic construct
  source 1..9: note = Seed: LVVVGADGV (KRAS G12D)
FVVLGMDGN

SEQ ID NO: 7432 - protein, 9 aa, synthetic construct
  source 1..9: note = Seed: LVVVGADGV (KRAS G12D)
FVVLGMDGS

SEQ ID NO: 7433 - protein, 9 aa, synthetic construct
  source 1..9: note = Seed: LVVVGADGV (KRAS G12D)
FVVLGMDGT

SEQ ID NO: 7434 - protein, 9 aa, synthetic construct
  source 1..9: note = Seed: LVVVGADGV (KRAS G12D)
FVVLGMDGV

SEQ ID NO: 7435 - protein, 9 aa, synthetic construct
  source 1..9: note = Seed: LVVVGADGV (KRAS G12D)
FVVLGNDGA

SEQ ID NO: 7436 - protein, 9 aa, synthetic construct
  source 1..9: note = Seed: LVVVGADGV (KRAS G12D)
FVVLGNDGC

SEQ ID NO: 7437 - protein, 9 aa, synthetic construct
  source 1..9: note = Seed: LVVVGADGV (KRAS G12D)
FVVLGNDGD

SEQ ID NO: 7438 - protein, 9 aa, synthetic construct
  source 1..9: note = Seed: LVVVGADGV (KRAS G12D)
FVVLGNDGE

SEQ ID NO: 7439 - protein, 9 aa, synthetic construct
  source 1..9: note = Seed: LVVVGADGV (KRAS G12D)
FVVLGNDGF

SEQ ID NO: 7440 - protein, 9 aa, synthetic construct
  source 1..9: note = Seed: LVVVGADGV (KRAS G12D)
FVVLGNDGG

SEQ ID NO: 7441 - protein, 9 aa, synthetic construct
  source 1..9: note = Seed: LVVVGADGV (KRAS G12D)
FVVLGNDGH

SEQ ID NO: 7442 - protein, 9 aa, synthetic construct
  source 1..9: note = Seed: LVVVGADGV (KRAS G12D)
FVVLGNDGM

SEQ ID NO: 7443 - protein, 9 aa, synthetic construct
  source 1..9: note = Seed: LVVVGADGV (KRAS G12D)
FVVLGNDGN

SEQ ID NO: 7444 - protein, 9 aa, synthetic construct
  source 1..9: note = Seed: LVVVGADGV (KRAS G12D)
FVVLGNDGP

SEQ ID NO: 7445 - protein, 9 aa, synthetic construct
  source 1..9: note = Seed: LVVVGADGV (KRAS G12D)
FVVLGNDGQ

SEQ ID NO: 7446 - protein, 9 aa, synthetic construct
  source 1..9: note = Seed: LVVVGADGV (KRAS G12D)
FVVLGNDGS

SEQ ID NO: 7447 - protein, 9 aa, synthetic construct
  source 1..9: note = Seed: LVVVGADGV (KRAS G12D)
FVVLGNDGT

SEQ ID NO: 7448 - protein, 9 aa, synthetic construct
  source 1..9: note = Seed: LVVVGADGV (KRAS G12D)
FVVLGNDGW

SEQ ID NO: 7449 - protein, 9 aa, synthetic construct
  source 1..9: note = Seed: LVVVGADGV (KRAS G12D)
FVVLGNDGY

SEQ ID NO: 7450 - protein, 9 aa, synthetic construct
  source 1..9: note = Seed: LVVVGADGV (KRAS G12D)
FVVLGPDGA

SEQ ID NO: 7451 - protein, 9 aa, synthetic construct
  source 1..9: note = Seed: LVVVGADGV (KRAS G12D)
FVVLGPDGC

SEQ ID NO: 7452 - protein, 9 aa, synthetic construct
  source 1..9: note = Seed: LVVVGADGV (KRAS G12D)
FVVLGPDGF

SEQ ID NO: 7453 - protein, 9 aa, synthetic construct
  source 1..9: note = Seed: LVVVGADGV (KRAS G12D)
FVVLGPDGG

SEQ ID NO: 7454 - protein, 9 aa, synthetic construct
  source 1..9: note = Seed: LVVVGADGV (KRAS G12D)
FVVLGPDGH

SEQ ID NO: 7455 - protein, 9 aa, synthetic construct
  source 1..9: note = Seed: LVVVGADGV (KRAS G12D)
FVVLGPDGI

SEQ ID NO: 7456 - protein, 9 aa, synthetic construct
  source 1..9: note = Seed: LVVVGADGV (KRAS G12D)
FVVLGPDGM

SEQ ID NO: 7457 - protein, 9 aa, synthetic construct
  source 1..9: note = Seed: LVVVGADGV (KRAS G12D)
FVVLGPDGN

SEQ ID NO: 7458 - protein, 9 aa, synthetic construct
  source 1..9: note = Seed: LVVVGADGV (KRAS G12D)
FVVLGPDGP

SEQ ID NO: 7459 - protein, 9 aa, synthetic construct
  source 1..9: note = Seed: LVVVGADGV (KRAS G12D)
FVVLGPDGQ

SEQ ID NO: 7460 - protein, 9 aa, synthetic construct
  source 1..9: note = Seed: LVVVGADGV (KRAS G12D)
FVVLGPDGS

SEQ ID NO: 7461 - protein, 9 aa, synthetic construct
  source 1..9: note = Seed: LVVVGADGV (KRAS G12D)
FVVLGPDGT

SEQ ID NO: 7462 - protein, 9 aa, synthetic construct
  source 1..9: note = Seed: LVVVGADGV (KRAS G12D)
FVVLGPDGW

SEQ ID NO: 7463 - protein, 9 aa, synthetic construct
  source 1..9: note = Seed: LVVVGADGV (KRAS G12D)
FVVLGPDGY

SEQ ID NO: 7464 - protein, 9 aa, synthetic construct
  source 1..9: note = Seed: LVVVGADGV (KRAS G12D)
FVVLGQDGA

SEQ ID NO: 7465 - protein, 9 aa, synthetic construct
  source 1..9: note = Seed: LVVVGADGV (KRAS G12D)
FVVLGQDGI

SEQ ID NO: 7466 - protein, 9 aa, synthetic construct
  source 1..9: note = Seed: LVVVGADGV (KRAS G12D)
FVVLGQDGL

SEQ ID NO: 7467 - protein, 9 aa, synthetic construct
  source 1..9: note = Seed: LVVVGADGV (KRAS G12D)
FVVLGQDGV

SEQ ID NO: 7468 - protein, 9 aa, synthetic construct
  source 1..9: note = Seed: LVVVGADGV (KRAS G12D)
FVVLGSDGC

SEQ ID NO: 7469 - protein, 9 aa, synthetic construct
  source 1..9: note = Seed: LVVVGADGV (KRAS G12D)
FVVLGSDGD

SEQ ID NO: 7470 - protein, 9 aa, synthetic construct
  source 1..9: note = Seed: LVVVGADGV (KRAS G12D)
FVVLGSDGE

SEQ ID NO: 7471 - protein, 9 aa, synthetic construct
  source 1..9: note = Seed: LVVVGADGV (KRAS G12D)
FVVLGSDGF

SEQ ID NO: 7472 - protein, 9 aa, synthetic construct
  source 1..9: note = Seed: LVVVGADGV (KRAS G12D)
FVVLGSDGG

SEQ ID NO: 7473 - protein, 9 aa, synthetic construct
  source 1..9: note = Seed: LVVVGADGV (KRAS G12D)
FVVLGSDGH

SEQ ID NO: 7474 - protein, 9 aa, synthetic construct
  source 1..9: note = Seed: LVVVGADGV (KRAS G12D)
FVVLGSDGK

SEQ ID NO: 7475 - protein, 9 aa, synthetic construct
  source 1..9: note = Seed: LVVVGADGV (KRAS G12D)
FVVLGSDGN

SEQ ID NO: 7476 - protein, 9 aa, synthetic construct
  source 1..9: note = Seed: LVVVGADGV (KRAS G12D)
FVVLGSDGP

SEQ ID NO: 7477 - protein, 9 aa, synthetic construct
  source 1..9: note = Seed: LVVVGADGV (KRAS G12D)
FVVLGSDGQ

SEQ ID NO: 7478 - protein, 9 aa, synthetic construct
  source 1..9: note = Seed: LVVVGADGV (KRAS G12D)
FVVLGSDGR

SEQ ID NO: 7479 - protein, 9 aa, synthetic construct
  source 1..9: note = Seed: LVVVGADGV (KRAS G12D)
FVVLGSDGS

SEQ ID NO: 7480 - protein, 9 aa, synthetic construct
  source 1..9: note = Seed: LVVVGADGV (KRAS G12D)
FVVLGSDGW

SEQ ID NO: 7481 - protein, 9 aa, synthetic construct
  source 1..9: note = Seed: LVVVGADGV (KRAS G12D)
FVVLGSDGY

SEQ ID NO: 7482 - protein, 9 aa, synthetic construct
  source 1..9: note = Seed: LVVVGADGV (KRAS G12D)
FVVLGTDGA

SEQ ID NO: 7483 - protein, 9 aa, synthetic construct
  source 1..9: note = Seed: LVVVGADGV (KRAS G12D)
FVVLGTDGC

SEQ ID NO: 7484 - protein, 9 aa, synthetic construct
  source 1..9: note = Seed: LVVVGADGV (KRAS G12D)
FVVLGTDGD

SEQ ID NO: 7485 - protein, 9 aa, synthetic construct
  source 1..9: note = Seed: LVVVGADGV (KRAS G12D)
FVVLGTDGE

SEQ ID NO: 7486 - protein, 9 aa, synthetic construct
  source 1..9: note = Seed: LVVVGADGV (KRAS G12D)
FVVLGTDGF

SEQ ID NO: 7487 - protein, 9 aa, synthetic construct
  source 1..9: note = Seed: LVVVGADGV (KRAS G12D)
FVVLGTDGG

SEQ ID NO: 7488 - protein, 9 aa, synthetic construct
  source 1..9: note = Seed: LVVVGADGV (KRAS G12D)
FVVLGTDGH

SEQ ID NO: 7489 - protein, 9 aa, synthetic construct
  source 1..9: note = Seed: LVVVGADGV (KRAS G12D)
FVVLGTDGI

SEQ ID NO: 7490 - protein, 9 aa, synthetic construct
  source 1..9: note = Seed: LVVVGADGV (KRAS G12D)
FVVLGTDGM

SEQ ID NO: 7491 - protein, 9 aa, synthetic construct
  source 1..9: note = Seed: LVVVGADGV (KRAS G12D)
FVVLGTDGN

SEQ ID NO: 7492 - protein, 9 aa, synthetic construct
  source 1..9: note = Seed: LVVVGADGV (KRAS G12D)
FVVLGTDGP

SEQ ID NO: 7493 - protein, 9 aa, synthetic construct
  source 1..9: note = Seed: LVVVGADGV (KRAS G12D)
FVVLGTDGQ

SEQ ID NO: 7494 - protein, 9 aa, synthetic construct
  source 1..9: note = Seed: LVVVGADGV (KRAS G12D)
FVVLGTDGS

SEQ ID NO: 7495 - protein, 9 aa, synthetic construct
  source 1..9: note = Seed: LVVVGADGV (KRAS G12D)
FVVLGTDGT

SEQ ID NO: 7496 - protein, 9 aa, synthetic construct
  source 1..9: note = Seed: LVVVGADGV (KRAS G12D)
FVVLGTDGV

SEQ ID NO: 7497 - protein, 9 aa, synthetic construct
  source 1..9: note = Seed: LVVVGADGV (KRAS G12D)
FVVLGTDGY

SEQ ID NO: 7498 - protein, 9 aa, synthetic construct
  source 1..9: note = Seed: LVVVGADGV (KRAS G12D)
FVVLGVDGA

SEQ ID NO: 7499 - protein, 9 aa, synthetic construct
  source 1..9: note = Seed: LVVVGADGV (KRAS G12D)
FVVLGVDGC

SEQ ID NO: 7500 - protein, 9 aa, synthetic construct
  source 1..9: note = Seed: LVVVGADGV (KRAS G12D)
FVVLGVDGD

SEQ ID NO: 7501 - protein, 9 aa, synthetic construct
  source 1..9: note = Seed: LVVVGADGV (KRAS G12D)
FVVLGVDGE

SEQ ID NO: 7502 - protein, 9 aa, synthetic construct
  source 1..9: note = Seed: LVVVGADGV (KRAS G12D)
FVVLGVDGF

SEQ ID NO: 7503 - protein, 9 aa, synthetic construct
  source 1..9: note = Seed: LVVVGADGV (KRAS G12D)
FVVLGVDGG

SEQ ID NO: 7504 - protein, 9 aa, synthetic construct
  source 1..9: note = Seed: LVVVGADGV (KRAS G12D)
FVVLGVDGH

SEQ ID NO: 7505 - protein, 9 aa, synthetic construct
  source 1..9: note = Seed: LVVVGADGV (KRAS G12D)
FVVLGVDGI

SEQ ID NO: 7506 - protein, 9 aa, synthetic construct
  source 1..9: note = Seed: LVVVGADGV (KRAS G12D)
FVVLGVDGL

SEQ ID NO: 7507 - protein, 9 aa, synthetic construct
  source 1..9: note = Seed: LVVVGADGV (KRAS G12D)
FVVLGVDGM

SEQ ID NO: 7508 - protein, 9 aa, synthetic construct
  source 1..9: note = Seed: LVVVGADGV (KRAS G12D)
FVVLGVDGN

SEQ ID NO: 7509 - protein, 9 aa, synthetic construct
  source 1..9: note = Seed: LVVVGADGV (KRAS G12D)
FVVLGVDGP

SEQ ID NO: 7510 - protein, 9 aa, synthetic construct
  source 1..9: note = Seed: LVVVGADGV (KRAS G12D)
FVVLGVDGQ

SEQ ID NO: 7511 - protein, 9 aa, synthetic construct
  source 1..9: note = Seed: LVVVGADGV (KRAS G12D)
FVVLGVDGS

SEQ ID NO: 7512 - protein, 9 aa, synthetic construct
  source 1..9: note = Seed: LVVVGADGV (KRAS G12D)
FVVLGVDGT

SEQ ID NO: 7513 - protein, 9 aa, synthetic construct
  source 1..9: note = Seed: LVVVGADGV (KRAS G12D)
FVVLGVDGV

SEQ ID NO: 7514 - protein, 9 aa, synthetic construct
  source 1..9: note = Seed: LVVVGADGV (KRAS G12D)
FVVLGVDGY

SEQ ID NO: 7515 - protein, 9 aa, synthetic construct
  source 1..9: note = Seed: LVVVGADGV (KRAS G12D)
FVVMGADGC

SEQ ID NO: 7516 - protein, 9 aa, synthetic construct
  source 1..9: note = Seed: LVVVGADGV (KRAS G12D)
FVVMGADGD

SEQ ID NO: 7517 - protein, 9 aa, synthetic construct
  source 1..9: note = Seed: LVVVGADGV (KRAS G12D)
FVVMGADGE

SEQ ID NO: 7518 - protein, 9 aa, synthetic construct
  source 1..9: note = Seed: LVVVGADGV (KRAS G12D)
FVVMGADGF

SEQ ID NO: 7519 - protein, 9 aa, synthetic construct
  source 1..9: note = Seed: LVVVGADGV (KRAS G12D)
FVVMGADGG

SEQ ID NO: 7520 - protein, 9 aa, synthetic construct
  source 1..9: note = Seed: LVVVGADGV (KRAS G12D)
FVVMGADGH

SEQ ID NO: 7521 - protein, 9 aa, synthetic construct
  source 1..9: note = Seed: LVVVGADGV (KRAS G12D)
FVVMGADGK

SEQ ID NO: 7522 - protein, 9 aa, synthetic construct
  source 1..9: note = Seed: LVVVGADGV (KRAS G12D)
FVVMGADGN

SEQ ID NO: 7523 - protein, 9 aa, synthetic construct
  source 1..9: note = Seed: LVVVGADGV (KRAS G12D)
FVVMGADGP

SEQ ID NO: 7524 - protein, 9 aa, synthetic construct
  source 1..9: note = Seed: LVVVGADGV (KRAS G12D)
FVVMGADGQ

SEQ ID NO: 7525 - protein, 9 aa, synthetic construct
  source 1..9: note = Seed: LVVVGADGV (KRAS G12D)
FVVMGADGR

SEQ ID NO: 7526 - protein, 9 aa, synthetic construct
  source 1..9: note = Seed: LVVVGADGV (KRAS G12D)
FVVMGADGS

SEQ ID NO: 7527 - protein, 9 aa, synthetic construct
  source 1..9: note = Seed: LVVVGADGV (KRAS G12D)
FVVMGADGT

SEQ ID NO: 7528 - protein, 9 aa, synthetic construct
  source 1..9: note = Seed: LVVVGADGV (KRAS G12D)
FVVMGADGW

SEQ ID NO: 7529 - protein, 9 aa, synthetic construct
  source 1..9: note = Seed: LVVVGADGV (KRAS G12D)
FVVMGADGY

SEQ ID NO: 7530 - protein, 9 aa, synthetic construct
  source 1..9: note = Seed: LVVVGADGV (KRAS G12D)
FVVMGCDGA

SEQ ID NO: 7531 - protein, 9 aa, synthetic construct
  source 1..9: note = Seed: LVVVGADGV (KRAS G12D)
FVVMGCDGI

SEQ ID NO: 7532 - protein, 9 aa, synthetic construct
  source 1..9: note = Seed: LVVVGADGV (KRAS G12D)
FVVMGCDGL

SEQ ID NO: 7533 - protein, 9 aa, synthetic construct
  source 1..9: note = Seed: LVVVGADGV (KRAS G12D)
FVVMGCDGV

SEQ ID NO: 7534 - protein, 9 aa, synthetic construct
  source 1..9: note = Seed: LVVVGADGV (KRAS G12D)
FVVMGDDGA

SEQ ID NO: 7535 - protein, 9 aa, synthetic construct
  source 1..9: note = Seed: LVVVGADGV (KRAS G12D)
FVVMGGDGC

SEQ ID NO: 7536 - protein, 9 aa, synthetic construct
  source 1..9: note = Seed: LVVVGADGV (KRAS G12D)
FVVMGGDGF

SEQ ID NO: 7537 - protein, 9 aa, synthetic construct
  source 1..9: note = Seed: LVVVGADGV (KRAS G12D)
FVVMGGDGG

SEQ ID NO: 7538 - protein, 9 aa, synthetic construct
  source 1..9: note = Seed: LVVVGADGV (KRAS G12D)
FVVMGGDGH

SEQ ID NO: 7539 - protein, 9 aa, synthetic construct
  source 1..9: note = Seed: LVVVGADGV (KRAS G12D)
FVVMGGDGM

SEQ ID NO: 7540 - protein, 9 aa, synthetic construct
  source 1..9: note = Seed: LVVVGADGV (KRAS G12D)
FVVMGGDGN

SEQ ID NO: 7541 - protein, 9 aa, synthetic construct
  source 1..9: note = Seed: LVVVGADGV (KRAS G12D)
FVVMGGDGP

SEQ ID NO: 7542 - protein, 9 aa, synthetic construct
  source 1..9: note = Seed: LVVVGADGV (KRAS G12D)
FVVMGGDGQ

SEQ ID NO: 7543 - protein, 9 aa, synthetic construct
  source 1..9: note = Seed: LVVVGADGV (KRAS G12D)
FVVMGGDGS

SEQ ID NO: 7544 - protein, 9 aa, synthetic construct
  source 1..9: note = Seed: LVVVGADGV (KRAS G12D)
FVVMGGDGT

SEQ ID NO: 7545 - protein, 9 aa, synthetic construct
  source 1..9: note = Seed: LVVVGADGV (KRAS G12D)
FVVMGGDGY

SEQ ID NO: 7546 - protein, 9 aa, synthetic construct
  source 1..9: note = Seed: LVVVGADGV (KRAS G12D)
FVVMGHDGA

SEQ ID NO: 7547 - protein, 9 aa, synthetic construct
  source 1..9: note = Seed: LVVVGADGV (KRAS G12D)
FVVMGHDGI

SEQ ID NO: 7548 - protein, 9 aa, synthetic construct
  source 1..9: note = Seed: LVVVGADGV (KRAS G12D)
FVVMGHDGL

SEQ ID NO: 7549 - protein, 9 aa, synthetic construct
  source 1..9: note = Seed: LVVVGADGV (KRAS G12D)
FVVMGHDGM

SEQ ID NO: 7550 - protein, 9 aa, synthetic construct
  source 1..9: note = Seed: LVVVGADGV (KRAS G12D)
FVVMGHDGV

SEQ ID NO: 7551 - protein, 9 aa, synthetic construct
  source 1..9: note = Seed: LVVVGADGV (KRAS G12D)
FVVMGIDGA

SEQ ID NO: 7552 - protein, 9 aa, synthetic construct
  source 1..9: note = Seed: LVVVGADGV (KRAS G12D)
FVVMGIDGC

SEQ ID NO: 7553 - protein, 9 aa, synthetic construct
  source 1..9: note = Seed: LVVVGADGV (KRAS G12D)
FVVMGIDGD

SEQ ID NO: 7554 - protein, 9 aa, synthetic construct
  source 1..9: note = Seed: LVVVGADGV (KRAS G12D)
FVVMGIDGE

SEQ ID NO: 7555 - protein, 9 aa, synthetic construct
  source 1..9: note = Seed: LVVVGADGV (KRAS G12D)
FVVMGIDGF

SEQ ID NO: 7556 - protein, 9 aa, synthetic construct
  source 1..9: note = Seed: LVVVGADGV (KRAS G12D)
FVVMGIDGG

SEQ ID NO: 7557 - protein, 9 aa, synthetic construct
  source 1..9: note = Seed: LVVVGADGV (KRAS G12D)
FVVMGIDGH

SEQ ID NO: 7558 - protein, 9 aa, synthetic construct
  source 1..9: note = Seed: LVVVGADGV (KRAS G12D)
FVVMGIDGI

SEQ ID NO: 7559 - protein, 9 aa, synthetic construct
  source 1..9: note = Seed: LVVVGADGV (KRAS G12D)
FVVMGIDGK

SEQ ID NO: 7560 - protein, 9 aa, synthetic construct
  source 1..9: note = Seed: LVVVGADGV (KRAS G12D)
FVVMGIDGL

SEQ ID NO: 7561 - protein, 9 aa, synthetic construct
  source 1..9: note = Seed: LVVVGADGV (KRAS G12D)
FVVMGIDGM

SEQ ID NO: 7562 - protein, 9 aa, synthetic construct
  source 1..9: note = Seed: LVVVGADGV (KRAS G12D)
FVVMGIDGN

SEQ ID NO: 7563 - protein, 9 aa, synthetic construct
  source 1..9: note = Seed: LVVVGADGV (KRAS G12D)
FVVMGIDGP

SEQ ID NO: 7564 - protein, 9 aa, synthetic construct
  source 1..9: note = Seed: LVVVGADGV (KRAS G12D)
FVVMGIDGQ

SEQ ID NO: 7565 - protein, 9 aa, synthetic construct
  source 1..9: note = Seed: LVVVGADGV (KRAS G12D)
FVVMGIDGR

SEQ ID NO: 7566 - protein, 9 aa, synthetic construct
  source 1..9: note = Seed: LVVVGADGV (KRAS G12D)
FVVMGIDGS

SEQ ID NO: 7567 - protein, 9 aa, synthetic construct
  source 1..9: note = Seed: LVVVGADGV (KRAS G12D)
FVVMGIDGT

SEQ ID NO: 7568 - protein, 9 aa, synthetic construct
  source 1..9: note = Seed: LVVVGADGV (KRAS G12D)
FVVMGIDGV

SEQ ID NO: 7569 - protein, 9 aa, synthetic construct
  source 1..9: note = Seed: LVVVGADGV (KRAS G12D)
FVVMGIDGY

SEQ ID NO: 7570 - protein, 9 aa, synthetic construct
  source 1..9: note = Seed: LVVVGADGV (KRAS G12D)
FVVMGLDGA

SEQ ID NO: 7571 - protein, 9 aa, synthetic construct
  source 1..9: note = Seed: LVVVGADGV (KRAS G12D)
FVVMGLDGH

SEQ ID NO: 7572 - protein, 9 aa, synthetic construct
  source 1..9: note = Seed: LVVVGADGV (KRAS G12D)
FVVMGLDGI

SEQ ID NO: 7573 - protein, 9 aa, synthetic construct
  source 1..9: note = Seed: LVVVGADGV (KRAS G12D)
FVVMGLDGL

SEQ ID NO: 7574 - protein, 9 aa, synthetic construct
  source 1..9: note = Seed: LVVVGADGV (KRAS G12D)
FVVMGLDGM

SEQ ID NO: 7575 - protein, 9 aa, synthetic construct
  source 1..9: note = Seed: LVVVGADGV (KRAS G12D)
FVVMGLDGN

SEQ ID NO: 7576 - protein, 9 aa, synthetic construct
  source 1..9: note = Seed: LVVVGADGV (KRAS G12D)
FVVMGLDGQ

SEQ ID NO: 7577 - protein, 9 aa, synthetic construct
  source 1..9: note = Seed: LVVVGADGV (KRAS G12D)
FVVMGLDGS

SEQ ID NO: 7578 - protein, 9 aa, synthetic construct
  source 1..9: note = Seed: LVVVGADGV (KRAS G12D)
FVVMGLDGT

SEQ ID NO: 7579 - protein, 9 aa, synthetic construct
  source 1..9: note = Seed: LVVVGADGV (KRAS G12D)
FVVMGLDGV

SEQ ID NO: 7580 - protein, 9 aa, synthetic construct
  source 1..9: note = Seed: LVVVGADGV (KRAS G12D)
FVVMGMDGA

SEQ ID NO: 7581 - protein, 9 aa, synthetic construct
  source 1..9: note = Seed: LVVVGADGV (KRAS G12D)
FVVMGMDGH

SEQ ID NO: 7582 - protein, 9 aa, synthetic construct
  source 1..9: note = Seed: LVVVGADGV (KRAS G12D)
FVVMGMDGI

SEQ ID NO: 7583 - protein, 9 aa, synthetic construct
  source 1..9: note = Seed: LVVVGADGV (KRAS G12D)
FVVMGMDGL

SEQ ID NO: 7584 - protein, 9 aa, synthetic construct
  source 1..9: note = Seed: LVVVGADGV (KRAS G12D)
FVVMGMDGM

SEQ ID NO: 7585 - protein, 9 aa, synthetic construct
  source 1..9: note = Seed: LVVVGADGV (KRAS G12D)
FVVMGMDGN

SEQ ID NO: 7586 - protein, 9 aa, synthetic construct
  source 1..9: note = Seed: LVVVGADGV (KRAS G12D)
FVVMGMDGS

SEQ ID NO: 7587 - protein, 9 aa, synthetic construct
  source 1..9: note = Seed: LVVVGADGV (KRAS G12D)
FVVMGMDGT

SEQ ID NO: 7588 - protein, 9 aa, synthetic construct
  source 1..9: note = Seed: LVVVGADGV (KRAS G12D)
FVVMGMDGV

SEQ ID NO: 7589 - protein, 9 aa, synthetic construct
  source 1..9: note = Seed: LVVVGADGV (KRAS G12D)
FVVMGNDGA

SEQ ID NO: 7590 - protein, 9 aa, synthetic construct
  source 1..9: note = Seed: LVVVGADGV (KRAS G12D)
FVVMGNDGC

SEQ ID NO: 7591 - protein, 9 aa, synthetic construct
  source 1..9: note = Seed: LVVVGADGV (KRAS G12D)
FVVMGNDGD

SEQ ID NO: 7592 - protein, 9 aa, synthetic construct
  source 1..9: note = Seed: LVVVGADGV (KRAS G12D)
FVVMGNDGE

SEQ ID NO: 7593 - protein, 9 aa, synthetic construct
  source 1..9: note = Seed: LVVVGADGV (KRAS G12D)
FVVMGNDGF

SEQ ID NO: 7594 - protein, 9 aa, synthetic construct
  source 1..9: note = Seed: LVVVGADGV (KRAS G12D)
FVVMGNDGG

SEQ ID NO: 7595 - protein, 9 aa, synthetic construct
  source 1..9: note = Seed: LVVVGADGV (KRAS G12D)
FVVMGNDGH

SEQ ID NO: 7596 - protein, 9 aa, synthetic construct
  source 1..9: note = Seed: LVVVGADGV (KRAS G12D)
FVVMGNDGI

SEQ ID NO: 7597 - protein, 9 aa, synthetic construct
  source 1..9: note = Seed: LVVVGADGV (KRAS G12D)
FVVMGNDGM

SEQ ID NO: 7598 - protein, 9 aa, synthetic construct
  source 1..9: note = Seed: LVVVGADGV (KRAS G12D)
FVVMGNDGN

SEQ ID NO: 7599 - protein, 9 aa, synthetic construct
  source 1..9: note = Seed: LVVVGADGV (KRAS G12D)
FVVMGNDGP

SEQ ID NO: 7600 - protein, 9 aa, synthetic construct
  source 1..9: note = Seed: LVVVGADGV (KRAS G12D)
FVVMGNDGQ

SEQ ID NO: 7601 - protein, 9 aa, synthetic construct
  source 1..9: note = Seed: LVVVGADGV (KRAS G12D)
FVVMGNDGS

SEQ ID NO: 7602 - protein, 9 aa, synthetic construct
  source 1..9: note = Seed: LVVVGADGV (KRAS G12D)
FVVMGNDGT

SEQ ID NO: 7603 - protein, 9 aa, synthetic construct
  source 1..9: note = Seed: LVVVGADGV (KRAS G12D)
FVVMGNDGV

SEQ ID NO: 7604 - protein, 9 aa, synthetic construct
  source 1..9: note = Seed: LVVVGADGV (KRAS G12D)
FVVMGNDGY

SEQ ID NO: 7605 - protein, 9 aa, synthetic construct
  source 1..9: note = Seed: LVVVGADGV (KRAS G12D)
FVVMGPDGA

SEQ ID NO: 7606 - protein, 9 aa, synthetic construct
  source 1..9: note = Seed: LVVVGADGV (KRAS G12D)
FVVMGPDGF

SEQ ID NO: 7607 - protein, 9 aa, synthetic construct
  source 1..9: note = Seed: LVVVGADGV (KRAS G12D)
FVVMGPDGG

SEQ ID NO: 7608 - protein, 9 aa, synthetic construct
  source 1..9: note = Seed: LVVVGADGV (KRAS G12D)
FVVMGPDGH

SEQ ID NO: 7609 - protein, 9 aa, synthetic construct
  source 1..9: note = Seed: LVVVGADGV (KRAS G12D)
FVVMGPDGI

SEQ ID NO: 7610 - protein, 9 aa, synthetic construct
  source 1..9: note = Seed: LVVVGADGV (KRAS G12D)
FVVMGPDGL

SEQ ID NO: 7611 - protein, 9 aa, synthetic construct
  source 1..9: note = Seed: LVVVGADGV (KRAS G12D)
FVVMGPDGM

SEQ ID NO: 7612 - protein, 9 aa, synthetic construct
  source 1..9: note = Seed: LVVVGADGV (KRAS G12D)
FVVMGPDGN

SEQ ID NO: 7613 - protein, 9 aa, synthetic construct
  source 1..9: note = Seed: LVVVGADGV (KRAS G12D)
FVVMGPDGP

SEQ ID NO: 7614 - protein, 9 aa, synthetic construct
  source 1..9: note = Seed: LVVVGADGV (KRAS G12D)
FVVMGPDGQ

SEQ ID NO: 7615 - protein, 9 aa, synthetic construct
  source 1..9: note = Seed: LVVVGADGV (KRAS G12D)
FVVMGPDGS

SEQ ID NO: 7616 - protein, 9 aa, synthetic construct
  source 1..9: note = Seed: LVVVGADGV (KRAS G12D)
FVVMGPDGT

SEQ ID NO: 7617 - protein, 9 aa, synthetic construct
  source 1..9: note = Seed: LVVVGADGV (KRAS G12D)
FVVMGPDGV

SEQ ID NO: 7618 - protein, 9 aa, synthetic construct
  source 1..9: note = Seed: LVVVGADGV (KRAS G12D)
FVVMGPDGY

SEQ ID NO: 7619 - protein, 9 aa, synthetic construct
  source 1..9: note = Seed: LVVVGADGV (KRAS G12D)
FVVMGQDGA

SEQ ID NO: 7620 - protein, 9 aa, synthetic construct
  source 1..9: note = Seed: LVVVGADGV (KRAS G12D)
FVVMGQDGI

SEQ ID NO: 7621 - protein, 9 aa, synthetic construct
  source 1..9: note = Seed: LVVVGADGV (KRAS G12D)
FVVMGQDGL

SEQ ID NO: 7622 - protein, 9 aa, synthetic construct
  source 1..9: note = Seed: LVVVGADGV (KRAS G12D)
FVVMGQDGV

SEQ ID NO: 7623 - protein, 9 aa, synthetic construct
  source 1..9: note = Seed: LVVVGADGV (KRAS G12D)
FVVMGSDGC

SEQ ID NO: 7624 - protein, 9 aa, synthetic construct
  source 1..9: note = Seed: LVVVGADGV (KRAS G12D)
FVVMGSDGD

SEQ ID NO: 7625 - protein, 9 aa, synthetic construct
  source 1..9: note = Seed: LVVVGADGV (KRAS G12D)
FVVMGSDGE

SEQ ID NO: 7626 - protein, 9 aa, synthetic construct
  source 1..9: note = Seed: LVVVGADGV (KRAS G12D)
FVVMGSDGF

SEQ ID NO: 7627 - protein, 9 aa, synthetic construct
  source 1..9: note = Seed: LVVVGADGV (KRAS G12D)
FVVMGSDGG

SEQ ID NO: 7628 - protein, 9 aa, synthetic construct
  source 1..9: note = Seed: LVVVGADGV (KRAS G12D)
FVVMGSDGH

SEQ ID NO: 7629 - protein, 9 aa, synthetic construct
  source 1..9: note = Seed: LVVVGADGV (KRAS G12D)
FVVMGSDGN

SEQ ID NO: 7630 - protein, 9 aa, synthetic construct
  source 1..9: note = Seed: LVVVGADGV (KRAS G12D)
FVVMGSDGP

SEQ ID NO: 7631 - protein, 9 aa, synthetic construct
  source 1..9: note = Seed: LVVVGADGV (KRAS G12D)
FVVMGSDGQ

SEQ ID NO: 7632 - protein, 9 aa, synthetic construct
  source 1..9: note = Seed: LVVVGADGV (KRAS G12D)
FVVMGSDGS

SEQ ID NO: 7633 - protein, 9 aa, synthetic construct
  source 1..9: note = Seed: LVVVGADGV (KRAS G12D)
FVVMGSDGT

SEQ ID NO: 7634 - protein, 9 aa, synthetic construct
  source 1..9: note = Seed: LVVVGADGV (KRAS G12D)
FVVMGSDGW

SEQ ID NO: 7635 - protein, 9 aa, synthetic construct
  source 1..9: note = Seed: LVVVGADGV (KRAS G12D)
FVVMGSDGY

SEQ ID NO: 7636 - protein, 9 aa, synthetic construct
  source 1..9: note = Seed: LVVVGADGV (KRAS G12D)
FVVMGTDGA

SEQ ID NO: 7637 - protein, 9 aa, synthetic construct
  source 1..9: note = Seed: LVVVGADGV (KRAS G12D)
FVVMGTDGD

SEQ ID NO: 7638 - protein, 9 aa, synthetic construct
  source 1..9: note = Seed: LVVVGADGV (KRAS G12D)
FVVMGTDGE

SEQ ID NO: 7639 - protein, 9 aa, synthetic construct
  source 1..9: note = Seed: LVVVGADGV (KRAS G12D)
FVVMGTDGF

SEQ ID NO: 7640 - protein, 9 aa, synthetic construct
  source 1..9: note = Seed: LVVVGADGV (KRAS G12D)
FVVMGTDGG

SEQ ID NO: 7641 - protein, 9 aa, synthetic construct
  source 1..9: note = Seed: LVVVGADGV (KRAS G12D)
FVVMGTDGH

SEQ ID NO: 7642 - protein, 9 aa, synthetic construct
  source 1..9: note = Seed: LVVVGADGV (KRAS G12D)
FVVMGTDGI

SEQ ID NO: 7643 - protein, 9 aa, synthetic construct
  source 1..9: note = Seed: LVVVGADGV (KRAS G12D)
FVVMGTDGL

SEQ ID NO: 7644 - protein, 9 aa, synthetic construct
  source 1..9: note = Seed: LVVVGADGV (KRAS G12D)
FVVMGTDGM

SEQ ID NO: 7645 - protein, 9 aa, synthetic construct
  source 1..9: note = Seed: LVVVGADGV (KRAS G12D)
FVVMGTDGN

SEQ ID NO: 7646 - protein, 9 aa, synthetic construct
  source 1..9: note = Seed: LVVVGADGV (KRAS G12D)
FVVMGTDGP

SEQ ID NO: 7647 - protein, 9 aa, synthetic construct
  source 1..9: note = Seed: LVVVGADGV (KRAS G12D)
FVVMGTDGQ

SEQ ID NO: 7648 - protein, 9 aa, synthetic construct
  source 1..9: note = Seed: LVVVGADGV (KRAS G12D)
FVVMGTDGS

SEQ ID NO: 7649 - protein, 9 aa, synthetic construct
  source 1..9: note = Seed: LVVVGADGV (KRAS G12D)
FVVMGTDGT

SEQ ID NO: 7650 - protein, 9 aa, synthetic construct
  source 1..9: note = Seed: LVVVGADGV (KRAS G12D)
FVVMGTDGV

SEQ ID NO: 7651 - protein, 9 aa, synthetic construct
  source 1..9: note = Seed: LVVVGADGV (KRAS G12D)
FVVMGTDGY

SEQ ID NO: 7652 - protein, 9 aa, synthetic construct
  source 1..9: note = Seed: LVVVGADGV (KRAS G12D)
FVVMGVDGA

SEQ ID NO: 7653 - protein, 9 aa, synthetic construct
  source 1..9: note = Seed: LVVVGADGV (KRAS G12D)
FVVMGVDGC

SEQ ID NO: 7654 - protein, 9 aa, synthetic construct
  source 1..9: note = Seed: LVVVGADGV (KRAS G12D)
FVVMGVDGD

SEQ ID NO: 7655 - protein, 9 aa, synthetic construct
  source 1..9: note = Seed: LVVVGADGV (KRAS G12D)
FVVMGVDGE

SEQ ID NO: 7656 - protein, 9 aa, synthetic construct
  source 1..9: note = Seed: LVVVGADGV (KRAS G12D)
FVVMGVDGF

SEQ ID NO: 7657 - protein, 9 aa, synthetic construct
  source 1..9: note = Seed: LVVVGADGV (KRAS G12D)
FVVMGVDGG

SEQ ID NO: 7658 - protein, 9 aa, synthetic construct
  source 1..9: note = Seed: LVVVGADGV (KRAS G12D)
FVVMGVDGH

SEQ ID NO: 7659 - protein, 9 aa, synthetic construct
  source 1..9: note = Seed: LVVVGADGV (KRAS G12D)
FVVMGVDGI

SEQ ID NO: 7660 - protein, 9 aa, synthetic construct
  source 1..9: note = Seed: LVVVGADGV (KRAS G12D)
FVVMGVDGK

SEQ ID NO: 7661 - protein, 9 aa, synthetic construct
  source 1..9: note = Seed: LVVVGADGV (KRAS G12D)
FVVMGVDGL

SEQ ID NO: 7662 - protein, 9 aa, synthetic construct
  source 1..9: note = Seed: LVVVGADGV (KRAS G12D)
FVVMGVDGM

SEQ ID NO: 7663 - protein, 9 aa, synthetic construct
  source 1..9: note = Seed: LVVVGADGV (KRAS G12D)
FVVMGVDGN

SEQ ID NO: 7664 - protein, 9 aa, synthetic construct
  source 1..9: note = Seed: LVVVGADGV (KRAS G12D)
FVVMGVDGP

SEQ ID NO: 7665 - protein, 9 aa, synthetic construct
  source 1..9: note = Seed: LVVVGADGV (KRAS G12D)
FVVMGVDGQ

SEQ ID NO: 7666 - protein, 9 aa, synthetic construct
  source 1..9: note = Seed: LVVVGADGV (KRAS G12D)
FVVMGVDGR

SEQ ID NO: 7667 - protein, 9 aa, synthetic construct
  source 1..9: note = Seed: LVVVGADGV (KRAS G12D)
FVVMGVDGS

SEQ ID NO: 7668 - protein, 9 aa, synthetic construct
  source 1..9: note = Seed: LVVVGADGV (KRAS G12D)
FVVMGVDGT

SEQ ID NO: 7669 - protein, 9 aa, synthetic construct
  source 1..9: note = Seed: LVVVGADGV (KRAS G12D)
FVVMGVDGV

SEQ ID NO: 7670 - protein, 9 aa, synthetic construct
  source 1..9: note = Seed: LVVVGADGV (KRAS G12D)
FVVMGVDGY

SEQ ID NO: 7671 - protein, 9 aa, synthetic construct
  source 1..9: note = Seed: LVVVGADGV (KRAS G12D)
FVVNGADGA

SEQ ID NO: 7672 - protein, 9 aa, synthetic construct
  source 1..9: note = Seed: LVVVGADGV (KRAS G12D)
FVVNGADGF

SEQ ID NO: 7673 - protein, 9 aa, synthetic construct
  source 1..9: note = Seed: LVVVGADGV (KRAS G12D)
FVVNGADGI

SEQ ID NO: 7674 - protein, 9 aa, synthetic construct
  source 1..9: note = Seed: LVVVGADGV (KRAS G12D)
FVVNGADGL

SEQ ID NO: 7675 - protein, 9 aa, synthetic construct
  source 1..9: note = Seed: LVVVGADGV (KRAS G12D)
FVVNGADGM

SEQ ID NO: 7676 - protein, 9 aa, synthetic construct
  source 1..9: note = Seed: LVVVGADGV (KRAS G12D)
FVVNGADGV

SEQ ID NO: 7677 - protein, 9 aa, synthetic construct
  source 1..9: note = Seed: LVVVGADGV (KRAS G12D)
FVVNGADGY

SEQ ID NO: 7678 - protein, 9 aa, synthetic construct
  source 1..9: note = Seed: LVVVGADGV (KRAS G12D)
FVVNGFDGL

SEQ ID NO: 7679 - protein, 9 aa, synthetic construct
  source 1..9: note = Seed: LVVVGADGV (KRAS G12D)
FVVNGGDGF

SEQ ID NO: 7680 - protein, 9 aa, synthetic construct
  source 1..9: note = Seed: LVVVGADGV (KRAS G12D)
FVVNGGDGI

SEQ ID NO: 7681 - protein, 9 aa, synthetic construct
  source 1..9: note = Seed: LVVVGADGV (KRAS G12D)
FVVNGGDGL

SEQ ID NO: 7682 - protein, 9 aa, synthetic construct
  source 1..9: note = Seed: LVVVGADGV (KRAS G12D)
FVVNGGDGV

SEQ ID NO: 7683 - protein, 9 aa, synthetic construct
  source 1..9: note = Seed: LVVVGADGV (KRAS G12D)
FVVNGIDGF

SEQ ID NO: 7684 - protein, 9 aa, synthetic construct
  source 1..9: note = Seed: LVVVGADGV (KRAS G12D)
FVVNGIDGI

SEQ ID NO: 7685 - protein, 9 aa, synthetic construct
  source 1..9: note = Seed: LVVVGADGV (KRAS G12D)
FVVNGIDGL

SEQ ID NO: 7686 - protein, 9 aa, synthetic construct
  source 1..9: note = Seed: LVVVGADGV (KRAS G12D)
FVVNGIDGM

SEQ ID NO: 7687 - protein, 9 aa, synthetic construct
  source 1..9: note = Seed: LVVVGADGV (KRAS G12D)
FVVNGIDGV

SEQ ID NO: 7688 - protein, 9 aa, synthetic construct
  source 1..9: note = Seed: LVVVGADGV (KRAS G12D)
FVVNGIDGY

SEQ ID NO: 7689 - protein, 9 aa, synthetic construct
  source 1..9: note = Seed: LVVVGADGV (KRAS G12D)
FVVNGLDGI

SEQ ID NO: 7690 - protein, 9 aa, synthetic construct
  source 1..9: note = Seed: LVVVGADGV (KRAS G12D)
FVVNGLDGL

SEQ ID NO: 7691 - protein, 9 aa, synthetic construct
  source 1..9: note = Seed: LVVVGADGV (KRAS G12D)
FVVNGLDGV

SEQ ID NO: 7692 - protein, 9 aa, synthetic construct
  source 1..9: note = Seed: LVVVGADGV (KRAS G12D)
FVVNGMDGI

SEQ ID NO: 7693 - protein, 9 aa, synthetic construct
  source 1..9: note = Seed: LVVVGADGV (KRAS G12D)
FVVNGMDGL

SEQ ID NO: 7694 - protein, 9 aa, synthetic construct
  source 1..9: note = Seed: LVVVGADGV (KRAS G12D)
FVVNGMDGV

SEQ ID NO: 7695 - protein, 9 aa, synthetic construct
  source 1..9: note = Seed: LVVVGADGV (KRAS G12D)
FVVNGNDGA

SEQ ID NO: 7696 - protein, 9 aa, synthetic construct
  source 1..9: note = Seed: LVVVGADGV (KRAS G12D)
FVVNGNDGF

SEQ ID NO: 7697 - protein, 9 aa, synthetic construct
  source 1..9: note = Seed: LVVVGADGV (KRAS G12D)
FVVNGNDGI

SEQ ID NO: 7698 - protein, 9 aa, synthetic construct
  source 1..9: note = Seed: LVVVGADGV (KRAS G12D)
FVVNGNDGL

SEQ ID NO: 7699 - protein, 9 aa, synthetic construct
  source 1..9: note = Seed: LVVVGADGV (KRAS G12D)
FVVNGNDGM

SEQ ID NO: 7700 - protein, 9 aa, synthetic construct
  source 1..9: note = Seed: LVVVGADGV (KRAS G12D)
FVVNGNDGS

SEQ ID NO: 7701 - protein, 9 aa, synthetic construct
  source 1..9: note = Seed: LVVVGADGV (KRAS G12D)
FVVNGNDGV

SEQ ID NO: 7702 - protein, 9 aa, synthetic construct
  source 1..9: note = Seed: LVVVGADGV (KRAS G12D)
FVVNGNDGY

SEQ ID NO: 7703 - protein, 9 aa, synthetic construct
  source 1..9: note = Seed: LVVVGADGV (KRAS G12D)
FVVNGPDGF

SEQ ID NO: 7704 - protein, 9 aa, synthetic construct
  source 1..9: note = Seed: LVVVGADGV (KRAS G12D)
FVVNGPDGI

SEQ ID NO: 7705 - protein, 9 aa, synthetic construct
  source 1..9: note = Seed: LVVVGADGV (KRAS G12D)
FVVNGPDGL

SEQ ID NO: 7706 - protein, 9 aa, synthetic construct
  source 1..9: note = Seed: LVVVGADGV (KRAS G12D)
FVVNGPDGV

SEQ ID NO: 7707 - protein, 9 aa, synthetic construct
  source 1..9: note = Seed: LVVVGADGV (KRAS G12D)
FVVNGSDGF

SEQ ID NO: 7708 - protein, 9 aa, synthetic construct
  source 1..9: note = Seed: LVVVGADGV (KRAS G12D)
FVVNGSDGI

SEQ ID NO: 7709 - protein, 9 aa, synthetic construct
  source 1..9: note = Seed: LVVVGADGV (KRAS G12D)
FVVNGSDGL

SEQ ID NO: 7710 - protein, 9 aa, synthetic construct
  source 1..9: note = Seed: LVVVGADGV (KRAS G12D)
FVVNGSDGM

SEQ ID NO: 7711 - protein, 9 aa, synthetic construct
  source 1..9: note = Seed: LVVVGADGV (KRAS G12D)
FVVNGSDGV

SEQ ID NO: 7712 - protein, 9 aa, synthetic construct
  source 1..9: note = Seed: LVVVGADGV (KRAS G12D)
FVVNGSDGY

SEQ ID NO: 7713 - protein, 9 aa, synthetic construct
  source 1..9: note = Seed: LVVVGADGV (KRAS G12D)
FVVNGTDGF

SEQ ID NO: 7714 - protein, 9 aa, synthetic construct
  source 1..9: note = Seed: LVVVGADGV (KRAS G12D)
FVVNGTDGI

SEQ ID NO: 7715 - protein, 9 aa, synthetic construct
  source 1..9: note = Seed: LVVVGADGV (KRAS G12D)
FVVNGTDGL

SEQ ID NO: 7716 - protein, 9 aa, synthetic construct
  source 1..9: note = Seed: LVVVGADGV (KRAS G12D)
FVVNGTDGM

SEQ ID NO: 7717 - protein, 9 aa, synthetic construct
  source 1..9: note = Seed: LVVVGADGV (KRAS G12D)
FVVNGTDGV

SEQ ID NO: 7718 - protein, 9 aa, synthetic construct
  source 1..9: note = Seed: LVVVGADGV (KRAS G12D)
FVVNGTDGY

SEQ ID NO: 7719 - protein, 9 aa, synthetic construct
  source 1..9: note = Seed: LVVVGADGV (KRAS G12D)
FVVNGVDGF

SEQ ID NO: 7720 - protein, 9 aa, synthetic construct
  source 1..9: note = Seed: LVVVGADGV (KRAS G12D)
FVVNGVDGI

SEQ ID NO: 7721 - protein, 9 aa, synthetic construct
  source 1..9: note = Seed: LVVVGADGV (KRAS G12D)
FVVNGVDGL

SEQ ID NO: 7722 - protein, 9 aa, synthetic construct
  source 1..9: note = Seed: LVVVGADGV (KRAS G12D)
FVVNGVDGM

SEQ ID NO: 7723 - protein, 9 aa, synthetic construct
  source 1..9: note = Seed: LVVVGADGV (KRAS G12D)
FVVNGVDGV

SEQ ID NO: 7724 - protein, 9 aa, synthetic construct
  source 1..9: note = Seed: LVVVGADGV (KRAS G12D)
FVVNGVDGY

SEQ ID NO: 7725 - protein, 9 aa, synthetic construct
  source 1..9: note = Seed: LVVVGADGV (KRAS G12D)
FVVQGADGA

SEQ ID NO: 7726 - protein, 9 aa, synthetic construct
  source 1..9: note = Seed: LVVVGADGV (KRAS G12D)
FVVQGADGI

SEQ ID NO: 7727 - protein, 9 aa, synthetic construct
  source 1..9: note = Seed: LVVVGADGV (KRAS G12D)
FVVQGADGL

SEQ ID NO: 7728 - protein, 9 aa, synthetic construct
  source 1..9: note = Seed: LVVVGADGV (KRAS G12D)
FVVQGADGM

SEQ ID NO: 7729 - protein, 9 aa, synthetic construct
  source 1..9: note = Seed: LVVVGADGV (KRAS G12D)
FVVQGADGS

SEQ ID NO: 7730 - protein, 9 aa, synthetic construct
  source 1..9: note = Seed: LVVVGADGV (KRAS G12D)
FVVQGADGT

SEQ ID NO: 7731 - protein, 9 aa, synthetic construct
  source 1..9: note = Seed: LVVVGADGV (KRAS G12D)
FVVQGADGV

SEQ ID NO: 7732 - protein, 9 aa, synthetic construct
  source 1..9: note = Seed: LVVVGADGV (KRAS G12D)
FVVQGGDGA

SEQ ID NO: 7733 - protein, 9 aa, synthetic construct
  source 1..9: note = Seed: LVVVGADGV (KRAS G12D)
FVVQGGDGI

SEQ ID NO: 7734 - protein, 9 aa, synthetic construct
  source 1..9: note = Seed: LVVVGADGV (KRAS G12D)
FVVQGGDGL

SEQ ID NO: 7735 - protein, 9 aa, synthetic construct
  source 1..9: note = Seed: LVVVGADGV (KRAS G12D)
FVVQGGDGM

SEQ ID NO: 7736 - protein, 9 aa, synthetic construct
  source 1..9: note = Seed: LVVVGADGV (KRAS G12D)
FVVQGGDGV

SEQ ID NO: 7737 - protein, 9 aa, synthetic construct
  source 1..9: note = Seed: LVVVGADGV (KRAS G12D)
FVVQGIDGA

SEQ ID NO: 7738 - protein, 9 aa, synthetic construct
  source 1..9: note = Seed: LVVVGADGV (KRAS G12D)
FVVQGNDGA

SEQ ID NO: 7739 - protein, 9 aa, synthetic construct
  source 1..9: note = Seed: LVVVGADGV (KRAS G12D)
FVVQGNDGI

SEQ ID NO: 7740 - protein, 9 aa, synthetic construct
  source 1..9: note = Seed: LVVVGADGV (KRAS G12D)
FVVQGNDGL

SEQ ID NO: 7741 - protein, 9 aa, synthetic construct
  source 1..9: note = Seed: LVVVGADGV (KRAS G12D)
FVVQGNDGS

SEQ ID NO: 7742 - protein, 9 aa, synthetic construct
  source 1..9: note = Seed: LVVVGADGV (KRAS G12D)
FVVQGNDGV

SEQ ID NO: 7743 - protein, 9 aa, synthetic construct
  source 1..9: note = Seed: LVVVGADGV (KRAS G12D)
FVVQGPDGI

SEQ ID NO: 7744 - protein, 9 aa, synthetic construct
  source 1..9: note = Seed: LVVVGADGV (KRAS G12D)
FVVQGPDGL

SEQ ID NO: 7745 - protein, 9 aa, synthetic construct
  source 1..9: note = Seed: LVVVGADGV (KRAS G12D)
FVVQGPDGV

SEQ ID NO: 7746 - protein, 9 aa, synthetic construct
  source 1..9: note = Seed: LVVVGADGV (KRAS G12D)
FVVQGSDGA

SEQ ID NO: 7747 - protein, 9 aa, synthetic construct
  source 1..9: note = Seed: LVVVGADGV (KRAS G12D)
FVVQGSDGI

SEQ ID NO: 7748 - protein, 9 aa, synthetic construct
  source 1..9: note = Seed: LVVVGADGV (KRAS G12D)
FVVQGSDGL

SEQ ID NO: 7749 - protein, 9 aa, synthetic construct
  source 1..9: note = Seed: LVVVGADGV (KRAS G12D)
FVVQGSDGM

SEQ ID NO: 7750 - protein, 9 aa, synthetic construct
  source 1..9: note = Seed: LVVVGADGV (KRAS G12D)
FVVQGSDGV

SEQ ID NO: 7751 - protein, 9 aa, synthetic construct
  source 1..9: note = Seed: LVVVGADGV (KRAS G12D)
FVVQGTDGA

SEQ ID NO: 7752 - protein, 9 aa, synthetic construct
  source 1..9: note = Seed: LVVVGADGV (KRAS G12D)
FVVQGTDGI

SEQ ID NO: 7753 - protein, 9 aa, synthetic construct
  source 1..9: note = Seed: LVVVGADGV (KRAS G12D)
FVVQGTDGL

SEQ ID NO: 7754 - protein, 9 aa, synthetic construct
  source 1..9: note = Seed: LVVVGADGV (KRAS G12D)
FVVQGTDGS

SEQ ID NO: 7755 - protein, 9 aa, synthetic construct
  source 1..9: note = Seed: LVVVGADGV (KRAS G12D)
FVVQGTDGV

SEQ ID NO: 7756 - protein, 9 aa, synthetic construct
  source 1..9: note = Seed: LVVVGADGV (KRAS G12D)
FVVQGVDGA

SEQ ID NO: 7757 - protein, 9 aa, synthetic construct
  source 1..9: note = Seed: LVVVGADGV (KRAS G12D)
FVVQGVDGL

SEQ ID NO: 7758 - protein, 9 aa, synthetic construct
  source 1..9: note = Seed: LVVVGADGV (KRAS G12D)
FVVQGVDGS

SEQ ID NO: 7759 - protein, 9 aa, synthetic construct
  source 1..9: note = Seed: LVVVGADGV (KRAS G12D)
FVVQGVDGV

SEQ ID NO: 7760 - protein, 9 aa, synthetic construct
  source 1..9: note = Seed: LVVVGADGV (KRAS G12D)
FVVSGADGA

SEQ ID NO: 7761 - protein, 9 aa, synthetic construct
  source 1..9: note = Seed: LVVVGADGV (KRAS G12D)
FVVSGADGI

SEQ ID NO: 7762 - protein, 9 aa, synthetic construct
  source 1..9: note = Seed: LVVVGADGV (KRAS G12D)
FVVSGADGL

SEQ ID NO: 7763 - protein, 9 aa, synthetic construct
  source 1..9: note = Seed: LVVVGADGV (KRAS G12D)
FVVSGADGM

SEQ ID NO: 7764 - protein, 9 aa, synthetic construct
  source 1..9: note = Seed: LVVVGADGV (KRAS G12D)
FVVSGADGN

SEQ ID NO: 7765 - protein, 9 aa, synthetic construct
  source 1..9: note = Seed: LVVVGADGV (KRAS G12D)
FVVSGADGQ

SEQ ID NO: 7766 - protein, 9 aa, synthetic construct
  source 1..9: note = Seed: LVVVGADGV (KRAS G12D)
FVVSGADGS

SEQ ID NO: 7767 - protein, 9 aa, synthetic construct
  source 1..9: note = Seed: LVVVGADGV (KRAS G12D)
FVVSGADGT

SEQ ID NO: 7768 - protein, 9 aa, synthetic construct
  source 1..9: note = Seed: LVVVGADGV (KRAS G12D)
FVVSGADGV

SEQ ID NO: 7769 - protein, 9 aa, synthetic construct
  source 1..9: note = Seed: LVVVGADGV (KRAS G12D)
FVVSGFDGF

SEQ ID NO: 7770 - protein, 9 aa, synthetic construct
  source 1..9: note = Seed: LVVVGADGV (KRAS G12D)
FVVSGFDGI

SEQ ID NO: 7771 - protein, 9 aa, synthetic construct
  source 1..9: note = Seed: LVVVGADGV (KRAS G12D)
FVVSGFDGL

SEQ ID NO: 7772 - protein, 9 aa, synthetic construct
  source 1..9: note = Seed: LVVVGADGV (KRAS G12D)
FVVSGFDGV

SEQ ID NO: 7773 - protein, 9 aa, synthetic construct
  source 1..9: note = Seed: LVVVGADGV (KRAS G12D)
FVVSGGDGA

SEQ ID NO: 7774 - protein, 9 aa, synthetic construct
  source 1..9: note = Seed: LVVVGADGV (KRAS G12D)
FVVSGGDGI

SEQ ID NO: 7775 - protein, 9 aa, synthetic construct
  source 1..9: note = Seed: LVVVGADGV (KRAS G12D)
FVVSGGDGL

SEQ ID NO: 7776 - protein, 9 aa, synthetic construct
  source 1..9: note = Seed: LVVVGADGV (KRAS G12D)
FVVSGGDGM

SEQ ID NO: 7777 - protein, 9 aa, synthetic construct
  source 1..9: note = Seed: LVVVGADGV (KRAS G12D)
FVVSGGDGV

SEQ ID NO: 7778 - protein, 9 aa, synthetic construct
  source 1..9: note = Seed: LVVVGADGV (KRAS G12D)
FVVSGIDGA

SEQ ID NO: 7779 - protein, 9 aa, synthetic construct
  source 1..9: note = Seed: LVVVGADGV (KRAS G12D)
FVVSGIDGI

SEQ ID NO: 7780 - protein, 9 aa, synthetic construct
  source 1..9: note = Seed: LVVVGADGV (KRAS G12D)
FVVSGIDGL

SEQ ID NO: 7781 - protein, 9 aa, synthetic construct
  source 1..9: note = Seed: LVVVGADGV (KRAS G12D)
FVVSGIDGM

SEQ ID NO: 7782 - protein, 9 aa, synthetic construct
  source 1..9: note = Seed: LVVVGADGV (KRAS G12D)
FVVSGIDGN

SEQ ID NO: 7783 - protein, 9 aa, synthetic construct
  source 1..9: note = Seed: LVVVGADGV (KRAS G12D)
FVVSGIDGS

SEQ ID NO: 7784 - protein, 9 aa, synthetic construct
  source 1..9: note = Seed: LVVVGADGV (KRAS G12D)
FVVSGIDGV

SEQ ID NO: 7785 - protein, 9 aa, synthetic construct
  source 1..9: note = Seed: LVVVGADGV (KRAS G12D)
FVVSGLDGA

SEQ ID NO: 7786 - protein, 9 aa, synthetic construct
  source 1..9: note = Seed: LVVVGADGV (KRAS G12D)
FVVSGLDGI

SEQ ID NO: 7787 - protein, 9 aa, synthetic construct
  source 1..9: note = Seed: LVVVGADGV (KRAS G12D)
FVVSGLDGL

SEQ ID NO: 7788 - protein, 9 aa, synthetic construct
  source 1..9: note = Seed: LVVVGADGV (KRAS G12D)
FVVSGLDGM

SEQ ID NO: 7789 - protein, 9 aa, synthetic construct
  source 1..9: note = Seed: LVVVGADGV (KRAS G12D)
FVVSGLDGV

SEQ ID NO: 7790 - protein, 9 aa, synthetic construct
  source 1..9: note = Seed: LVVVGADGV (KRAS G12D)
FVVSGMDGA

SEQ ID NO: 7791 - protein, 9 aa, synthetic construct
  source 1..9: note = Seed: LVVVGADGV (KRAS G12D)
FVVSGMDGL

SEQ ID NO: 7792 - protein, 9 aa, synthetic construct
  source 1..9: note = Seed: LVVVGADGV (KRAS G12D)
FVVSGNDGA

SEQ ID NO: 7793 - protein, 9 aa, synthetic construct
  source 1..9: note = Seed: LVVVGADGV (KRAS G12D)
FVVSGNDGI

SEQ ID NO: 7794 - protein, 9 aa, synthetic construct
  source 1..9: note = Seed: LVVVGADGV (KRAS G12D)
FVVSGNDGL

SEQ ID NO: 7795 - protein, 9 aa, synthetic construct
  source 1..9: note = Seed: LVVVGADGV (KRAS G12D)
FVVSGNDGS

SEQ ID NO: 7796 - protein, 9 aa, synthetic construct
  source 1..9: note = Seed: LVVVGADGV (KRAS G12D)
FVVSGNDGV

SEQ ID NO: 7797 - protein, 9 aa, synthetic construct
  source 1..9: note = Seed: LVVVGADGV (KRAS G12D)
FVVSGPDGA

SEQ ID NO: 7798 - protein, 9 aa, synthetic construct
  source 1..9: note = Seed: LVVVGADGV (KRAS G12D)
FVVSGPDGI

SEQ ID NO: 7799 - protein, 9 aa, synthetic construct
  source 1..9: note = Seed: LVVVGADGV (KRAS G12D)
FVVSGPDGL

SEQ ID NO: 7800 - protein, 9 aa, synthetic construct
  source 1..9: note = Seed: LVVVGADGV (KRAS G12D)
FVVSGPDGS

SEQ ID NO: 7801 - protein, 9 aa, synthetic construct
  source 1..9: note = Seed: LVVVGADGV (KRAS G12D)
FVVSGPDGV

SEQ ID NO: 7802 - protein, 9 aa, synthetic construct
  source 1..9: note = Seed: LVVVGADGV (KRAS G12D)
FVVSGSDGA

SEQ ID NO: 7803 - protein, 9 aa, synthetic construct
  source 1..9: note = Seed: LVVVGADGV (KRAS G12D)
FVVSGSDGI

SEQ ID NO: 7804 - protein, 9 aa, synthetic construct
  source 1..9: note = Seed: LVVVGADGV (KRAS G12D)
FVVSGSDGL

SEQ ID NO: 7805 - protein, 9 aa, synthetic construct
  source 1..9: note = Seed: LVVVGADGV (KRAS G12D)
FVVSGSDGM

SEQ ID NO: 7806 - protein, 9 aa, synthetic construct
  source 1..9: note = Seed: LVVVGADGV (KRAS G12D)
FVVSGSDGS

SEQ ID NO: 7807 - protein, 9 aa, synthetic construct
  source 1..9: note = Seed: LVVVGADGV (KRAS G12D)
FVVSGSDGV

SEQ ID NO: 7808 - protein, 9 aa, synthetic construct
  source 1..9: note = Seed: LVVVGADGV (KRAS G12D)
FVVSGTDGA

SEQ ID NO: 7809 - protein, 9 aa, synthetic construct
  source 1..9: note = Seed: LVVVGADGV (KRAS G12D)
FVVSGTDGS

SEQ ID NO: 7810 - protein, 9 aa, synthetic construct
  source 1..9: note = Seed: LVVVGADGV (KRAS G12D)
FVVSGTDGV

SEQ ID NO: 7811 - protein, 9 aa, synthetic construct
  source 1..9: note = Seed: LVVVGADGV (KRAS G12D)
FVVSGVDGA

SEQ ID NO: 7812 - protein, 9 aa, synthetic construct
  source 1..9: note = Seed: LVVVGADGV (KRAS G12D)
FVVSGVDGI

SEQ ID NO: 7813 - protein, 9 aa, synthetic construct
  source 1..9: note = Seed: LVVVGADGV (KRAS G12D)
FVVSGVDGL

SEQ ID NO: 7814 - protein, 9 aa, synthetic construct
  source 1..9: note = Seed: LVVVGADGV (KRAS G12D)
FVVSGVDGM

SEQ ID NO: 7815 - protein, 9 aa, synthetic construct
  source 1..9: note = Seed: LVVVGADGV (KRAS G12D)
FVVSGVDGN

SEQ ID NO: 7816 - protein, 9 aa, synthetic construct
  source 1..9: note = Seed: LVVVGADGV (KRAS G12D)
FVVSGVDGS

SEQ ID NO: 7817 - protein, 9 aa, synthetic construct
  source 1..9: note = Seed: LVVVGADGV (KRAS G12D)
FVVSGVDGT

SEQ ID NO: 7818 - protein, 9 aa, synthetic construct
  source 1..9: note = Seed: LVVVGADGV (KRAS G12D)
FVVSGVDGV

SEQ ID NO: 7819 - protein, 9 aa, synthetic construct
  source 1..9: note = Seed: LVVVGADGV (KRAS G12D)
FVVTGADGA

SEQ ID NO: 7820 - protein, 9 aa, synthetic construct
  source 1..9: note = Seed: LVVVGADGV (KRAS G12D)
FVVTGADGF

SEQ ID NO: 7821 - protein, 9 aa, synthetic construct
  source 1..9: note = Seed: LVVVGADGV (KRAS G12D)
FVVTGADGI

SEQ ID NO: 7822 - protein, 9 aa, synthetic construct
  source 1..9: note = Seed: LVVVGADGV (KRAS G12D)
FVVTGADGL

SEQ ID NO: 7823 - protein, 9 aa, synthetic construct
  source 1..9: note = Seed: LVVVGADGV (KRAS G12D)
FVVTGADGM

SEQ ID NO: 7824 - protein, 9 aa, synthetic construct
  source 1..9: note = Seed: LVVVGADGV (KRAS G12D)
FVVTGADGN

SEQ ID NO: 7825 - protein, 9 aa, synthetic construct
  source 1..9: note = Seed: LVVVGADGV (KRAS G12D)
FVVTGADGQ

SEQ ID NO: 7826 - protein, 9 aa, synthetic construct
  source 1..9: note = Seed: LVVVGADGV (KRAS G12D)
FVVTGADGS

SEQ ID NO: 7827 - protein, 9 aa, synthetic construct
  source 1..9: note = Seed: LVVVGADGV (KRAS G12D)
FVVTGADGT

SEQ ID NO: 7828 - protein, 9 aa, synthetic construct
  source 1..9: note = Seed: LVVVGADGV (KRAS G12D)
FVVTGADGV

SEQ ID NO: 7829 - protein, 9 aa, synthetic construct
  source 1..9: note = Seed: LVVVGADGV (KRAS G12D)
FVVTGFDGF

SEQ ID NO: 7830 - protein, 9 aa, synthetic construct
  source 1..9: note = Seed: LVVVGADGV (KRAS G12D)
FVVTGFDGI

SEQ ID NO: 7831 - protein, 9 aa, synthetic construct
  source 1..9: note = Seed: LVVVGADGV (KRAS G12D)
FVVTGFDGL

SEQ ID NO: 7832 - protein, 9 aa, synthetic construct
  source 1..9: note = Seed: LVVVGADGV (KRAS G12D)
FVVTGFDGM

SEQ ID NO: 7833 - protein, 9 aa, synthetic construct
  source 1..9: note = Seed: LVVVGADGV (KRAS G12D)
FVVTGFDGV

SEQ ID NO: 7834 - protein, 9 aa, synthetic construct
  source 1..9: note = Seed: LVVVGADGV (KRAS G12D)
FVVTGGDGA

SEQ ID NO: 7835 - protein, 9 aa, synthetic construct
  source 1..9: note = Seed: LVVVGADGV (KRAS G12D)
FVVTGGDGI

SEQ ID NO: 7836 - protein, 9 aa, synthetic construct
  source 1..9: note = Seed: LVVVGADGV (KRAS G12D)
FVVTGGDGL

SEQ ID NO: 7837 - protein, 9 aa, synthetic construct
  source 1..9: note = Seed: LVVVGADGV (KRAS G12D)
FVVTGGDGV

SEQ ID NO: 7838 - protein, 9 aa, synthetic construct
  source 1..9: note = Seed: LVVVGADGV (KRAS G12D)
FVVTGIDGA

SEQ ID NO: 7839 - protein, 9 aa, synthetic construct
  source 1..9: note = Seed: LVVVGADGV (KRAS G12D)
FVVTGIDGI

SEQ ID NO: 7840 - protein, 9 aa, synthetic construct
  source 1..9: note = Seed: LVVVGADGV (KRAS G12D)
FVVTGIDGL

SEQ ID NO: 7841 - protein, 9 aa, synthetic construct
  source 1..9: note = Seed: LVVVGADGV (KRAS G12D)
FVVTGIDGM

SEQ ID NO: 7842 - protein, 9 aa, synthetic construct
  source 1..9: note = Seed: LVVVGADGV (KRAS G12D)
FVVTGIDGN

SEQ ID NO: 7843 - protein, 9 aa, synthetic construct
  source 1..9: note = Seed: LVVVGADGV (KRAS G12D)
FVVTGIDGS

SEQ ID NO: 7844 - protein, 9 aa, synthetic construct
  source 1..9: note = Seed: LVVVGADGV (KRAS G12D)
FVVTGIDGV

SEQ ID NO: 7845 - protein, 9 aa, synthetic construct
  source 1..9: note = Seed: LVVVGADGV (KRAS G12D)
FVVTGLDGA

SEQ ID NO: 7846 - protein, 9 aa, synthetic construct
  source 1..9: note = Seed: LVVVGADGV (KRAS G12D)
FVVTGLDGI

SEQ ID NO: 7847 - protein, 9 aa, synthetic construct
  source 1..9: note = Seed: LVVVGADGV (KRAS G12D)
FVVTGLDGL

SEQ ID NO: 7848 - protein, 9 aa, synthetic construct
  source 1..9: note = Seed: LVVVGADGV (KRAS G12D)
FVVTGLDGM

SEQ ID NO: 7849 - protein, 9 aa, synthetic construct
  source 1..9: note = Seed: LVVVGADGV (KRAS G12D)
FVVTGLDGV

SEQ ID NO: 7850 - protein, 9 aa, synthetic construct
  source 1..9: note = Seed: LVVVGADGV (KRAS G12D)
FVVTGMDGA

SEQ ID NO: 7851 - protein, 9 aa, synthetic construct
  source 1..9: note = Seed: LVVVGADGV (KRAS G12D)
FVVTGNDGA

SEQ ID NO: 7852 - protein, 9 aa, synthetic construct
  source 1..9: note = Seed: LVVVGADGV (KRAS G12D)
FVVTGNDGS

SEQ ID NO: 7853 - protein, 9 aa, synthetic construct
  source 1..9: note = Seed: LVVVGADGV (KRAS G12D)
FVVTGPDGA

SEQ ID NO: 7854 - protein, 9 aa, synthetic construct
  source 1..9: note = Seed: LVVVGADGV (KRAS G12D)
FVVTGPDGV

SEQ ID NO: 7855 - protein, 9 aa, synthetic construct
  source 1..9: note = Seed: LVVVGADGV (KRAS G12D)
FVVTGSDGA

SEQ ID NO: 7856 - protein, 9 aa, synthetic construct
  source 1..9: note = Seed: LVVVGADGV (KRAS G12D)
FVVTGSDGI

SEQ ID NO: 7857 - protein, 9 aa, synthetic construct
  source 1..9: note = Seed: LVVVGADGV (KRAS G12D)
FVVTGSDGL

SEQ ID NO: 7858 - protein, 9 aa, synthetic construct
  source 1..9: note = Seed: LVVVGADGV (KRAS G12D)
FVVTGSDGS

SEQ ID NO: 7859 - protein, 9 aa, synthetic construct
  source 1..9: note = Seed: LVVVGADGV (KRAS G12D)
FVVTGSDGV

SEQ ID NO: 7860 - protein, 9 aa, synthetic construct
  source 1..9: note = Seed: LVVVGADGV (KRAS G12D)
FVVTGTDGA

SEQ ID NO: 7861 - protein, 9 aa, synthetic construct
  source 1..9: note = Seed: LVVVGADGV (KRAS G12D)
FVVTGTDGV

SEQ ID NO: 7862 - protein, 9 aa, synthetic construct
  source 1..9: note = Seed: LVVVGADGV (KRAS G12D)
FVVTGVDGA

SEQ ID NO: 7863 - protein, 9 aa, synthetic construct
  source 1..9: note = Seed: LVVVGADGV (KRAS G12D)
FVVTGVDGI

SEQ ID NO: 7864 - protein, 9 aa, synthetic construct
  source 1..9: note = Seed: LVVVGADGV (KRAS G12D)
FVVTGVDGL

SEQ ID NO: 7865 - protein, 9 aa, synthetic construct
  source 1..9: note = Seed: LVVVGADGV (KRAS G12D)
FVVTGVDGM

SEQ ID NO: 7866 - protein, 9 aa, synthetic construct
  source 1..9: note = Seed: LVVVGADGV (KRAS G12D)
FVVTGVDGN

SEQ ID NO: 7867 - protein, 9 aa, synthetic construct
  source 1..9: note = Seed: LVVVGADGV (KRAS G12D)
FVVTGVDGS

SEQ ID NO: 7868 - protein, 9 aa, synthetic construct
  source 1..9: note = Seed: LVVVGADGV (KRAS G12D)
FVVTGVDGT

SEQ ID NO: 7869 - protein, 9 aa, synthetic construct
  source 1..9: note = Seed: LVVVGADGV (KRAS G12D)
FVVTGVDGV

SEQ ID NO: 7870 - protein, 9 aa, synthetic construct
  source 1..9: note = Seed: LVVVGADGV (KRAS G12D)
FVVVGADGA

SEQ ID NO: 7871 - protein, 9 aa, synthetic construct
  source 1..9: note = Seed: LVVVGADGV (KRAS G12D)
FVVVGADGE

SEQ ID NO: 7872 - protein, 9 aa, synthetic construct
  source 1..9: note = Seed: LVVVGADGV (KRAS G12D)
FVVVGADGF

SEQ ID NO: 7873 - protein, 9 aa, synthetic construct
  source 1..9: note = Seed: LVVVGADGV (KRAS G12D)
FVVVGADGG

SEQ ID NO: 7874 - protein, 9 aa, synthetic construct
  source 1..9: note = Seed: LVVVGADGV (KRAS G12D)
FVVVGADGH

SEQ ID NO: 7875 - protein, 9 aa, synthetic construct
  source 1..9: note = Seed: LVVVGADGV (KRAS G12D)
FVVVGADGI

SEQ ID NO: 7876 - protein, 9 aa, synthetic construct
  source 1..9: note = Seed: LVVVGADGV (KRAS G12D)
FVVVGADGL

SEQ ID NO: 7877 - protein, 9 aa, synthetic construct
  source 1..9: note = Seed: LVVVGADGV (KRAS G12D)
FVVVGADGM

SEQ ID NO: 7878 - protein, 9 aa, synthetic construct
  source 1..9: note = Seed: LVVVGADGV (KRAS G12D)
FVVVGADGN

SEQ ID NO: 7879 - protein, 9 aa, synthetic construct
  source 1..9: note = Seed: LVVVGADGV (KRAS G12D)
FVVVGADGP

SEQ ID NO: 7880 - protein, 9 aa, synthetic construct
  source 1..9: note = Seed: LVVVGADGV (KRAS G12D)
FVVVGADGQ

SEQ ID NO: 7881 - protein, 9 aa, synthetic construct
  source 1..9: note = Seed: LVVVGADGV (KRAS G12D)
FVVVGADGS

SEQ ID NO: 7882 - protein, 9 aa, synthetic construct
  source 1..9: note = Seed: LVVVGADGV (KRAS G12D)
FVVVGADGT

SEQ ID NO: 7883 - protein, 9 aa, synthetic construct
  source 1..9: note = Seed: LVVVGADGV (KRAS G12D)
FVVVGADGV

SEQ ID NO: 7884 - protein, 9 aa, synthetic construct
  source 1..9: note = Seed: LVVVGADGV (KRAS G12D)
FVVVGADGY

SEQ ID NO: 7885 - protein, 9 aa, synthetic construct
  source 1..9: note = Seed: LVVVGADGV (KRAS G12D)
FVVVGFDGI

SEQ ID NO: 7886 - protein, 9 aa, synthetic construct
  source 1..9: note = Seed: LVVVGADGV (KRAS G12D)
FVVVGFDGL

SEQ ID NO: 7887 - protein, 9 aa, synthetic construct
  source 1..9: note = Seed: LVVVGADGV (KRAS G12D)
FVVVGFDGV

SEQ ID NO: 7888 - protein, 9 aa, synthetic construct
  source 1..9: note = Seed: LVVVGADGV (KRAS G12D)
FVVVGGDGA

SEQ ID NO: 7889 - protein, 9 aa, synthetic construct
  source 1..9: note = Seed: LVVVGADGV (KRAS G12D)
FVVVGGDGI

SEQ ID NO: 7890 - protein, 9 aa, synthetic construct
  source 1..9: note = Seed: LVVVGADGV (KRAS G12D)
FVVVGGDGL

SEQ ID NO: 7891 - protein, 9 aa, synthetic construct
  source 1..9: note = Seed: LVVVGADGV (KRAS G12D)
FVVVGGDGM

SEQ ID NO: 7892 - protein, 9 aa, synthetic construct
  source 1..9: note = Seed: LVVVGADGV (KRAS G12D)
FVVVGGDGN

SEQ ID NO: 7893 - protein, 9 aa, synthetic construct
  source 1..9: note = Seed: LVVVGADGV (KRAS G12D)
FVVVGGDGS

SEQ ID NO: 7894 - protein, 9 aa, synthetic construct
  source 1..9: note = Seed: LVVVGADGV (KRAS G12D)
FVVVGGDGT

SEQ ID NO: 7895 - protein, 9 aa, synthetic construct
  source 1..9: note = Seed: LVVVGADGV (KRAS G12D)
FVVVGGDGV

SEQ ID NO: 7896 - protein, 9 aa, synthetic construct
  source 1..9: note = Seed: LVVVGADGV (KRAS G12D)
FVVVGIDGA

SEQ ID NO: 7897 - protein, 9 aa, synthetic construct
  source 1..9: note = Seed: LVVVGADGV (KRAS G12D)
FVVVGIDGG

SEQ ID NO: 7898 - protein, 9 aa, synthetic construct
  source 1..9: note = Seed: LVVVGADGV (KRAS G12D)
FVVVGIDGH

SEQ ID NO: 7899 - protein, 9 aa, synthetic construct
  source 1..9: note = Seed: LVVVGADGV (KRAS G12D)
FVVVGIDGI

SEQ ID NO: 7900 - protein, 9 aa, synthetic construct
  source 1..9: note = Seed: LVVVGADGV (KRAS G12D)
FVVVGIDGL

SEQ ID NO: 7901 - protein, 9 aa, synthetic construct
  source 1..9: note = Seed: LVVVGADGV (KRAS G12D)
FVVVGIDGM

SEQ ID NO: 7902 - protein, 9 aa, synthetic construct
  source 1..9: note = Seed: LVVVGADGV (KRAS G12D)
FVVVGIDGN

SEQ ID NO: 7903 - protein, 9 aa, synthetic construct
  source 1..9: note = Seed: LVVVGADGV (KRAS G12D)
FVVVGIDGQ

SEQ ID NO: 7904 - protein, 9 aa, synthetic construct
  source 1..9: note = Seed: LVVVGADGV (KRAS G12D)
FVVVGIDGS

SEQ ID NO: 7905 - protein, 9 aa, synthetic construct
  source 1..9: note = Seed: LVVVGADGV (KRAS G12D)
FVVVGIDGT

SEQ ID NO: 7906 - protein, 9 aa, synthetic construct
  source 1..9: note = Seed: LVVVGADGV (KRAS G12D)
FVVVGIDGV

SEQ ID NO: 7907 - protein, 9 aa, synthetic construct
  source 1..9: note = Seed: LVVVGADGV (KRAS G12D)
FVVVGLDGA

SEQ ID NO: 7908 - protein, 9 aa, synthetic construct
  source 1..9: note = Seed: LVVVGADGV (KRAS G12D)
FVVVGLDGI

SEQ ID NO: 7909 - protein, 9 aa, synthetic construct
  source 1..9: note = Seed: LVVVGADGV (KRAS G12D)
FVVVGLDGL

SEQ ID NO: 7910 - protein, 9 aa, synthetic construct
  source 1..9: note = Seed: LVVVGADGV (KRAS G12D)
FVVVGLDGM

SEQ ID NO: 7911 - protein, 9 aa, synthetic construct
  source 1..9: note = Seed: LVVVGADGV (KRAS G12D)
FVVVGLDGN

SEQ ID NO: 7912 - protein, 9 aa, synthetic construct
  source 1..9: note = Seed: LVVVGADGV (KRAS G12D)
FVVVGLDGS

SEQ ID NO: 7913 - protein, 9 aa, synthetic construct
  source 1..9: note = Seed: LVVVGADGV (KRAS G12D)
FVVVGLDGT

SEQ ID NO: 7914 - protein, 9 aa, synthetic construct
  source 1..9: note = Seed: LVVVGADGV (KRAS G12D)
FVVVGLDGV

SEQ ID NO: 7915 - protein, 9 aa, synthetic construct
  source 1..9: note = Seed: LVVVGADGV (KRAS G12D)
FVVVGMDGA

SEQ ID NO: 7916 - protein, 9 aa, synthetic construct
  source 1..9: note = Seed: LVVVGADGV (KRAS G12D)
FVVVGMDGH

SEQ ID NO: 7917 - protein, 9 aa, synthetic construct
  source 1..9: note = Seed: LVVVGADGV (KRAS G12D)
FVVVGMDGI

SEQ ID NO: 7918 - protein, 9 aa, synthetic construct
  source 1..9: note = Seed: LVVVGADGV (KRAS G12D)
FVVVGMDGL

SEQ ID NO: 7919 - protein, 9 aa, synthetic construct
  source 1..9: note = Seed: LVVVGADGV (KRAS G12D)
FVVVGMDGM

SEQ ID NO: 7920 - protein, 9 aa, synthetic construct
  source 1..9: note = Seed: LVVVGADGV (KRAS G12D)
FVVVGMDGN

SEQ ID NO: 7921 - protein, 9 aa, synthetic construct
  source 1..9: note = Seed: LVVVGADGV (KRAS G12D)
FVVVGMDGS

SEQ ID NO: 7922 - protein, 9 aa, synthetic construct
  source 1..9: note = Seed: LVVVGADGV (KRAS G12D)
FVVVGMDGT

SEQ ID NO: 7923 - protein, 9 aa, synthetic construct
  source 1..9: note = Seed: LVVVGADGV (KRAS G12D)
FVVVGMDGV

SEQ ID NO: 7924 - protein, 9 aa, synthetic construct
  source 1..9: note = Seed: LVVVGADGV (KRAS G12D)
FVVVGNDGA

SEQ ID NO: 7925 - protein, 9 aa, synthetic construct
  source 1..9: note = Seed: LVVVGADGV (KRAS G12D)
FVVVGNDGD

SEQ ID NO: 7926 - protein, 9 aa, synthetic construct
  source 1..9: note = Seed: LVVVGADGV (KRAS G12D)
FVVVGNDGE

SEQ ID NO: 7927 - protein, 9 aa, synthetic construct
  source 1..9: note = Seed: LVVVGADGV (KRAS G12D)
FVVVGNDGG

SEQ ID NO: 7928 - protein, 9 aa, synthetic construct
  source 1..9: note = Seed: LVVVGADGV (KRAS G12D)
FVVVGNDGI

SEQ ID NO: 7929 - protein, 9 aa, synthetic construct
  source 1..9: note = Seed: LVVVGADGV (KRAS G12D)
FVVVGNDGL

SEQ ID NO: 7930 - protein, 9 aa, synthetic construct
  source 1..9: note = Seed: LVVVGADGV (KRAS G12D)
FVVVGNDGM

SEQ ID NO: 7931 - protein, 9 aa, synthetic construct
  source 1..9: note = Seed: LVVVGADGV (KRAS G12D)
FVVVGNDGN

SEQ ID NO: 7932 - protein, 9 aa, synthetic construct
  source 1..9: note = Seed: LVVVGADGV (KRAS G12D)
FVVVGNDGQ

SEQ ID NO: 7933 - protein, 9 aa, synthetic construct
  source 1..9: note = Seed: LVVVGADGV (KRAS G12D)
FVVVGNDGS

SEQ ID NO: 7934 - protein, 9 aa, synthetic construct
  source 1..9: note = Seed: LVVVGADGV (KRAS G12D)
FVVVGNDGT

SEQ ID NO: 7935 - protein, 9 aa, synthetic construct
  source 1..9: note = Seed: LVVVGADGV (KRAS G12D)
FVVVGNDGV

SEQ ID NO: 7936 - protein, 9 aa, synthetic construct
  source 1..9: note = Seed: LVVVGADGV (KRAS G12D)
FVVVGPDGA

SEQ ID NO: 7937 - protein, 9 aa, synthetic construct
  source 1..9: note = Seed: LVVVGADGV (KRAS G12D)
FVVVGPDGG

SEQ ID NO: 7938 - protein, 9 aa, synthetic construct
  source 1..9: note = Seed: LVVVGADGV (KRAS G12D)
FVVVGPDGH

SEQ ID NO: 7939 - protein, 9 aa, synthetic construct
  source 1..9: note = Seed: LVVVGADGV (KRAS G12D)
FVVVGPDGI

SEQ ID NO: 7940 - protein, 9 aa, synthetic construct
  source 1..9: note = Seed: LVVVGADGV (KRAS G12D)
FVVVGPDGL

SEQ ID NO: 7941 - protein, 9 aa, synthetic construct
  source 1..9: note = Seed: LVVVGADGV (KRAS G12D)
FVVVGPDGM

SEQ ID NO: 7942 - protein, 9 aa, synthetic construct
  source 1..9: note = Seed: LVVVGADGV (KRAS G12D)
FVVVGPDGN

SEQ ID NO: 7943 - protein, 9 aa, synthetic construct
  source 1..9: note = Seed: LVVVGADGV (KRAS G12D)
FVVVGPDGQ

SEQ ID NO: 7944 - protein, 9 aa, synthetic construct
  source 1..9: note = Seed: LVVVGADGV (KRAS G12D)
FVVVGPDGS

SEQ ID NO: 7945 - protein, 9 aa, synthetic construct
  source 1..9: note = Seed: LVVVGADGV (KRAS G12D)
FVVVGPDGT

SEQ ID NO: 7946 - protein, 9 aa, synthetic construct
  source 1..9: note = Seed: LVVVGADGV (KRAS G12D)
FVVVGPDGV

SEQ ID NO: 7947 - protein, 9 aa, synthetic construct
  source 1..9: note = Seed: LVVVGADGV (KRAS G12D)
FVVVGSDGA

SEQ ID NO: 7948 - protein, 9 aa, synthetic construct
  source 1..9: note = Seed: LVVVGADGV (KRAS G12D)
FVVVGSDGD

SEQ ID NO: 7949 - protein, 9 aa, synthetic construct
  source 1..9: note = Seed: LVVVGADGV (KRAS G12D)
FVVVGSDGG

SEQ ID NO: 7950 - protein, 9 aa, synthetic construct
  source 1..9: note = Seed: LVVVGADGV (KRAS G12D)
FVVVGSDGH

SEQ ID NO: 7951 - protein, 9 aa, synthetic construct
  source 1..9: note = Seed: LVVVGADGV (KRAS G12D)
FVVVGSDGI

SEQ ID NO: 7952 - protein, 9 aa, synthetic construct
  source 1..9: note = Seed: LVVVGADGV (KRAS G12D)
FVVVGSDGL

SEQ ID NO: 7953 - protein, 9 aa, synthetic construct
  source 1..9: note = Seed: LVVVGADGV (KRAS G12D)
FVVVGSDGM

SEQ ID NO: 7954 - protein, 9 aa, synthetic construct
  source 1..9: note = Seed: LVVVGADGV (KRAS G12D)
FVVVGSDGN

SEQ ID NO: 7955 - protein, 9 aa, synthetic construct
  source 1..9: note = Seed: LVVVGADGV (KRAS G12D)
FVVVGSDGQ

SEQ ID NO: 7956 - protein, 9 aa, synthetic construct
  source 1..9: note = Seed: LVVVGADGV (KRAS G12D)
FVVVGSDGS

SEQ ID NO: 7957 - protein, 9 aa, synthetic construct
  source 1..9: note = Seed: LVVVGADGV (KRAS G12D)
FVVVGSDGT

SEQ ID NO: 7958 - protein, 9 aa, synthetic construct
  source 1..9: note = Seed: LVVVGADGV (KRAS G12D)
FVVVGSDGV

SEQ ID NO: 7959 - protein, 9 aa, synthetic construct
  source 1..9: note = Seed: LVVVGADGV (KRAS G12D)
FVVVGTDGA

SEQ ID NO: 7960 - protein, 9 aa, synthetic construct
  source 1..9: note = Seed: LVVVGADGV (KRAS G12D)
FVVVGTDGD

SEQ ID NO: 7961 - protein, 9 aa, synthetic construct
  source 1..9: note = Seed: LVVVGADGV (KRAS G12D)
FVVVGTDGG

SEQ ID NO: 7962 - protein, 9 aa, synthetic construct
  source 1..9: note = Seed: LVVVGADGV (KRAS G12D)
FVVVGTDGH

SEQ ID NO: 7963 - protein, 9 aa, synthetic construct
  source 1..9: note = Seed: LVVVGADGV (KRAS G12D)
FVVVGTDGI

SEQ ID NO: 7964 - protein, 9 aa, synthetic construct
  source 1..9: note = Seed: LVVVGADGV (KRAS G12D)
FVVVGTDGL

SEQ ID NO: 7965 - protein, 9 aa, synthetic construct
  source 1..9: note = Seed: LVVVGADGV (KRAS G12D)
FVVVGTDGM

SEQ ID NO: 7966 - protein, 9 aa, synthetic construct
  source 1..9: note = Seed: LVVVGADGV (KRAS G12D)
FVVVGTDGN

SEQ ID NO: 7967 - protein, 9 aa, synthetic construct
  source 1..9: note = Seed: LVVVGADGV (KRAS G12D)
FVVVGTDGQ

SEQ ID NO: 7968 - protein, 9 aa, synthetic construct
  source 1..9: note = Seed: LVVVGADGV (KRAS G12D)
FVVVGTDGS

SEQ ID NO: 7969 - protein, 9 aa, synthetic construct
  source 1..9: note = Seed: LVVVGADGV (KRAS G12D)
FVVVGTDGT

SEQ ID NO: 7970 - protein, 9 aa, synthetic construct
  source 1..9: note = Seed: LVVVGADGV (KRAS G12D)
FVVVGTDGV

SEQ ID NO: 7971 - protein, 9 aa, synthetic construct
  source 1..9: note = Seed: LVVVGADGV (KRAS G12D)
FVVVGVDGA

SEQ ID NO: 7972 - protein, 9 aa, synthetic construct
  source 1..9: note = Seed: LVVVGADGV (KRAS G12D)
FVVVGVDGG

SEQ ID NO: 7973 - protein, 9 aa, synthetic construct
  source 1..9: note = Seed: LVVVGADGV (KRAS G12D)
FVVVGVDGH

SEQ ID NO: 7974 - protein, 9 aa, synthetic construct
  source 1..9: note = Seed: LVVVGADGV (KRAS G12D)
FVVVGVDGI

SEQ ID NO: 7975 - protein, 9 aa, synthetic construct
  source 1..9: note = Seed: LVVVGADGV (KRAS G12D)
FVVVGVDGL

SEQ ID NO: 7976 - protein, 9 aa, synthetic construct
  source 1..9: note = Seed: LVVVGADGV (KRAS G12D)
FVVVGVDGM

SEQ ID NO: 7977 - protein, 9 aa, synthetic construct
  source 1..9: note = Seed: LVVVGADGV (KRAS G12D)
FVVVGVDGN

SEQ ID NO: 7978 - protein, 9 aa, synthetic construct
  source 1..9: note = Seed: LVVVGADGV (KRAS G12D)
FVVVGVDGQ

SEQ ID NO: 7979 - protein, 9 aa, synthetic construct
  source 1..9: note = Seed: LVVVGADGV (KRAS G12D)
FVVVGVDGS

SEQ ID NO: 7980 - protein, 9 aa, synthetic construct
  source 1..9: note = Seed: LVVVGADGV (KRAS G12D)
FVVVGVDGT

SEQ ID NO: 7981 - protein, 9 aa, synthetic construct
  source 1..9: note = Seed: LVVVGADGV (KRAS G12D)
FVVVGVDGV

SEQ ID NO: 7982 - protein, 9 aa, synthetic construct
  source 1..9: note = Seed: LVVVGADGV (KRAS G12D)
FVVWGADGL

SEQ ID NO: 7983 - protein, 9 aa, synthetic construct
  source 1..9: note = Seed: LVVVGADGV (KRAS G12D)
FVVWGADGV

SEQ ID NO: 7984 - protein, 9 aa, synthetic construct
  source 1..9: note = Seed: LVVVGADGV (KRAS G12D)
FVVWGIDGI

SEQ ID NO: 7985 - protein, 9 aa, synthetic construct
  source 1..9: note = Seed: LVVVGADGV (KRAS G12D)
FVVWGIDGL

SEQ ID NO: 7986 - protein, 9 aa, synthetic construct
  source 1..9: note = Seed: LVVVGADGV (KRAS G12D)
FVVWGNDGL

SEQ ID NO: 7987 - protein, 9 aa, synthetic construct
  source 1..9: note = Seed: LVVVGADGV (KRAS G12D)
FVVYGADGI

SEQ ID NO: 7988 - protein, 9 aa, synthetic construct
  source 1..9: note = Seed: LVVVGADGV (KRAS G12D)
FVVYGADGL

SEQ ID NO: 7989 - protein, 9 aa, synthetic construct
  source 1..9: note = Seed: LVVVGADGV (KRAS G12D)
FVVYGADGV

SEQ ID NO: 7990 - protein, 9 aa, synthetic construct
  source 1..9: note = Seed: LVVVGADGV (KRAS G12D)
FVVYGGDGL

SEQ ID NO: 7991 - protein, 9 aa, synthetic construct
  source 1..9: note = Seed: LVVVGADGV (KRAS G12D)
FVVYGIDGI

SEQ ID NO: 7992 - protein, 9 aa, synthetic construct
  source 1..9: note = Seed: LVVVGADGV (KRAS G12D)
FVVYGIDGM

SEQ ID NO: 7993 - protein, 9 aa, synthetic construct
  source 1..9: note = Seed: LVVVGADGV (KRAS G12D)
FVVYGIDGV

SEQ ID NO: 7994 - protein, 9 aa, synthetic construct
  source 1..9: note = Seed: LVVVGADGV (KRAS G12D)
FVVYGNDGA

SEQ ID NO: 7995 - protein, 9 aa, synthetic construct
  source 1..9: note = Seed: LVVVGADGV (KRAS G12D)
FVVYGNDGF

SEQ ID NO: 7996 - protein, 9 aa, synthetic construct
  source 1..9: note = Seed: LVVVGADGV (KRAS G12D)
FVVYGNDGI

SEQ ID NO: 7997 - protein, 9 aa, synthetic construct
  source 1..9: note = Seed: LVVVGADGV (KRAS G12D)
FVVYGNDGL

SEQ ID NO: 7998 - protein, 9 aa, synthetic construct
  source 1..9: note = Seed: LVVVGADGV (KRAS G12D)
FVVYGNDGM

SEQ ID NO: 7999 - protein, 9 aa, synthetic construct
  source 1..9: note = Seed: LVVVGADGV (KRAS G12D)
FVVYGNDGV

SEQ ID NO: 8000 - protein, 9 aa, synthetic construct
  source 1..9: note = Seed: LVVVGADGV (KRAS G12D)
FVVYGSDGA

SEQ ID NO: 8001 - protein, 9 aa, synthetic construct
  source 1..9: note = Seed: LVVVGADGV (KRAS G12D)
FVVYGSDGI

SEQ ID NO: 8002 - protein, 9 aa, synthetic construct
  source 1..9: note = Seed: LVVVGADGV (KRAS G12D)
FVVYGSDGL

SEQ ID NO: 8003 - protein, 9 aa, synthetic construct
  source 1..9: note = Seed: LVVVGADGV (KRAS G12D)
FVVYGSDGM

SEQ ID NO: 8004 - protein, 9 aa, synthetic construct
  source 1..9: note = Seed: LVVVGADGV (KRAS G12D)
FVVYGSDGV

SEQ ID NO: 8005 - protein, 9 aa, synthetic construct
  source 1..9: note = Seed: LVVVGADGV (KRAS G12D)
FVVYGTDGL

SEQ ID NO: 8006 - protein, 9 aa, synthetic construct
  source 1..9: note = Seed: LVVVGADGV (KRAS G12D)
FVVYGTDGV

SEQ ID NO: 8007 - protein, 9 aa, synthetic construct
  source 1..9: note = Seed: LVVVGADGV (KRAS G12D)
IVVAGADGA

SEQ ID NO: 8008 - protein, 9 aa, synthetic construct
  source 1..9: note = Seed: LVVVGADGV (KRAS G12D)
IVVAGADGI

SEQ ID NO: 8009 - protein, 9 aa, synthetic construct
  source 1..9: note = Seed: LVVVGADGV (KRAS G12D)
IVVAGADGL

SEQ ID NO: 8010 - protein, 9 aa, synthetic construct
  source 1..9: note = Seed: LVVVGADGV (KRAS G12D)
IVVAGADGV

SEQ ID NO: 8011 - protein, 9 aa, synthetic construct
  source 1..9: note = Seed: LVVVGADGV (KRAS G12D)
IVVAGGDGL

SEQ ID NO: 8012 - protein, 9 aa, synthetic construct
  source 1..9: note = Seed: LVVVGADGV (KRAS G12D)
IVVAGIDGA

SEQ ID NO: 8013 - protein, 9 aa, synthetic construct
  source 1..9: note = Seed: LVVVGADGV (KRAS G12D)
IVVAGIDGI

SEQ ID NO: 8014 - protein, 9 aa, synthetic construct
  source 1..9: note = Seed: LVVVGADGV (KRAS G12D)
IVVAGIDGL

SEQ ID NO: 8015 - protein, 9 aa, synthetic construct
  source 1..9: note = Seed: LVVVGADGV (KRAS G12D)
IVVAGIDGV

SEQ ID NO: 8016 - protein, 9 aa, synthetic construct
  source 1..9: note = Seed: LVVVGADGV (KRAS G12D)
IVVAGNDGA

SEQ ID NO: 8017 - protein, 9 aa, synthetic construct
  source 1..9: note = Seed: LVVVGADGV (KRAS G12D)
IVVAGNDGS

SEQ ID NO: 8018 - protein, 9 aa, synthetic construct
  source 1..9: note = Seed: LVVVGADGV (KRAS G12D)
IVVAGSDGI

SEQ ID NO: 8019 - protein, 9 aa, synthetic construct
  source 1..9: note = Seed: LVVVGADGV (KRAS G12D)
IVVAGSDGL

SEQ ID NO: 8020 - protein, 9 aa, synthetic construct
  source 1..9: note = Seed: LVVVGADGV (KRAS G12D)
IVVAGSDGV

SEQ ID NO: 8021 - protein, 9 aa, synthetic construct
  source 1..9: note = Seed: LVVVGADGV (KRAS G12D)
IVVAGVDGA

SEQ ID NO: 8022 - protein, 9 aa, synthetic construct
  source 1..9: note = Seed: LVVVGADGV (KRAS G12D)
IVVAGVDGL

SEQ ID NO: 8023 - protein, 9 aa, synthetic construct
  source 1..9: note = Seed: LVVVGADGV (KRAS G12D)
IVVFGADGA

SEQ ID NO: 8024 - protein, 9 aa, synthetic construct
  source 1..9: note = Seed: LVVVGADGV (KRAS G12D)
IVVFGADGI

SEQ ID NO: 8025 - protein, 9 aa, synthetic construct
  source 1..9: note = Seed: LVVVGADGV (KRAS G12D)
IVVFGADGL

SEQ ID NO: 8026 - protein, 9 aa, synthetic construct
  source 1..9: note = Seed: LVVVGADGV (KRAS G12D)
IVVFGADGM

SEQ ID NO: 8027 - protein, 9 aa, synthetic construct
  source 1..9: note = Seed: LVVVGADGV (KRAS G12D)
IVVFGADGV

SEQ ID NO: 8028 - protein, 9 aa, synthetic construct
  source 1..9: note = Seed: LVVVGADGV (KRAS G12D)
IVVFGDDGA

SEQ ID NO: 8029 - protein, 9 aa, synthetic construct
  source 1..9: note = Seed: LVVVGADGV (KRAS G12D)
IVVFGDDGI

SEQ ID NO: 8030 - protein, 9 aa, synthetic construct
  source 1..9: note = Seed: LVVVGADGV (KRAS G12D)
IVVFGDDGL

SEQ ID NO: 8031 - protein, 9 aa, synthetic construct
  source 1..9: note = Seed: LVVVGADGV (KRAS G12D)
IVVFGDDGV

SEQ ID NO: 8032 - protein, 9 aa, synthetic construct
  source 1..9: note = Seed: LVVVGADGV (KRAS G12D)
IVVFGGDGA

SEQ ID NO: 8033 - protein, 9 aa, synthetic construct
  source 1..9: note = Seed: LVVVGADGV (KRAS G12D)
IVVFGGDGI

SEQ ID NO: 8034 - protein, 9 aa, synthetic construct
  source 1..9: note = Seed: LVVVGADGV (KRAS G12D)
IVVFGGDGL

SEQ ID NO: 8035 - protein, 9 aa, synthetic construct
  source 1..9: note = Seed: LVVVGADGV (KRAS G12D)
IVVFGGDGM

SEQ ID NO: 8036 - protein, 9 aa, synthetic construct
  source 1..9: note = Seed: LVVVGADGV (KRAS G12D)
IVVFGGDGV

SEQ ID NO: 8037 - protein, 9 aa, synthetic construct
  source 1..9: note = Seed: LVVVGADGV (KRAS G12D)
IVVFGIDGA

SEQ ID NO: 8038 - protein, 9 aa, synthetic construct
  source 1..9: note = Seed: LVVVGADGV (KRAS G12D)
IVVFGIDGI

SEQ ID NO: 8039 - protein, 9 aa, synthetic construct
  source 1..9: note = Seed: LVVVGADGV (KRAS G12D)
IVVFGIDGL

SEQ ID NO: 8040 - protein, 9 aa, synthetic construct
  source 1..9: note = Seed: LVVVGADGV (KRAS G12D)
IVVFGIDGM

SEQ ID NO: 8041 - protein, 9 aa, synthetic construct
  source 1..9: note = Seed: LVVVGADGV (KRAS G12D)
IVVFGIDGV

SEQ ID NO: 8042 - protein, 9 aa, synthetic construct
  source 1..9: note = Seed: LVVVGADGV (KRAS G12D)
IVVFGNDGA

SEQ ID NO: 8043 - protein, 9 aa, synthetic construct
  source 1..9: note = Seed: LVVVGADGV (KRAS G12D)
IVVFGNDGF

SEQ ID NO: 8044 - protein, 9 aa, synthetic construct
  source 1..9: note = Seed: LVVVGADGV (KRAS G12D)
IVVFGNDGI

SEQ ID NO: 8045 - protein, 9 aa, synthetic construct
  source 1..9: note = Seed: LVVVGADGV (KRAS G12D)
IVVFGNDGL

SEQ ID NO: 8046 - protein, 9 aa, synthetic construct
  source 1..9: note = Seed: LVVVGADGV (KRAS G12D)
IVVFGNDGM

SEQ ID NO: 8047 - protein, 9 aa, synthetic construct
  source 1..9: note = Seed: LVVVGADGV (KRAS G12D)
IVVFGNDGS

SEQ ID NO: 8048 - protein, 9 aa, synthetic construct
  source 1..9: note = Seed: LVVVGADGV (KRAS G12D)
IVVFGNDGT

SEQ ID NO: 8049 - protein, 9 aa, synthetic construct
  source 1..9: note = Seed: LVVVGADGV (KRAS G12D)
IVVFGNDGV

SEQ ID NO: 8050 - protein, 9 aa, synthetic construct
  source 1..9: note = Seed: LVVVGADGV (KRAS G12D)
IVVFGPDGL

SEQ ID NO: 8051 - protein, 9 aa, synthetic construct
  source 1..9: note = Seed: LVVVGADGV (KRAS G12D)
IVVFGSDGA

SEQ ID NO: 8052 - protein, 9 aa, synthetic construct
  source 1..9: note = Seed: LVVVGADGV (KRAS G12D)
IVVFGSDGF

SEQ ID NO: 8053 - protein, 9 aa, synthetic construct
  source 1..9: note = Seed: LVVVGADGV (KRAS G12D)
IVVFGSDGI

SEQ ID NO: 8054 - protein, 9 aa, synthetic construct
  source 1..9: note = Seed: LVVVGADGV (KRAS G12D)
IVVFGSDGL

SEQ ID NO: 8055 - protein, 9 aa, synthetic construct
  source 1..9: note = Seed: LVVVGADGV (KRAS G12D)
IVVFGSDGM

SEQ ID NO: 8056 - protein, 9 aa, synthetic construct
  source 1..9: note = Seed: LVVVGADGV (KRAS G12D)
IVVFGSDGS

SEQ ID NO: 8057 - protein, 9 aa, synthetic construct
  source 1..9: note = Seed: LVVVGADGV (KRAS G12D)
IVVFGSDGT

SEQ ID NO: 8058 - protein, 9 aa, synthetic construct
  source 1..9: note = Seed: LVVVGADGV (KRAS G12D)
IVVFGSDGV

SEQ ID NO: 8059 - protein, 9 aa, synthetic construct
  source 1..9: note = Seed: LVVVGADGV (KRAS G12D)
IVVFGTDGA

SEQ ID NO: 8060 - protein, 9 aa, synthetic construct
  source 1..9: note = Seed: LVVVGADGV (KRAS G12D)
IVVFGTDGI

SEQ ID NO: 8061 - protein, 9 aa, synthetic construct
  source 1..9: note = Seed: LVVVGADGV (KRAS G12D)
IVVFGTDGL

SEQ ID NO: 8062 - protein, 9 aa, synthetic construct
  source 1..9: note = Seed: LVVVGADGV (KRAS G12D)
IVVFGTDGS

SEQ ID NO: 8063 - protein, 9 aa, synthetic construct
  source 1..9: note = Seed: LVVVGADGV (KRAS G12D)
IVVFGTDGV

SEQ ID NO: 8064 - protein, 9 aa, synthetic construct
  source 1..9: note = Seed: LVVVGADGV (KRAS G12D)
IVVFGVDGA

SEQ ID NO: 8065 - protein, 9 aa, synthetic construct
  source 1..9: note = Seed: LVVVGADGV (KRAS G12D)
IVVFGVDGL

SEQ ID NO: 8066 - protein, 9 aa, synthetic construct
  source 1..9: note = Seed: LVVVGADGV (KRAS G12D)
IVVFGVDGV

SEQ ID NO: 8067 - protein, 9 aa, synthetic construct
  source 1..9: note = Seed: LVVVGADGV (KRAS G12D)
IVVIGADGA

SEQ ID NO: 8068 - protein, 9 aa, synthetic construct
  source 1..9: note = Seed: LVVVGADGV (KRAS G12D)
IVVIGADGI

SEQ ID NO: 8069 - protein, 9 aa, synthetic construct
  source 1..9: note = Seed: LVVVGADGV (KRAS G12D)
IVVIGADGL

SEQ ID NO: 8070 - protein, 9 aa, synthetic construct
  source 1..9: note = Seed: LVVVGADGV (KRAS G12D)
IVVIGADGM

SEQ ID NO: 8071 - protein, 9 aa, synthetic construct
  source 1..9: note = Seed: LVVVGADGV (KRAS G12D)
IVVIGADGV

SEQ ID NO: 8072 - protein, 9 aa, synthetic construct
  source 1..9: note = Seed: LVVVGADGV (KRAS G12D)
IVVIGGDGA

SEQ ID NO: 8073 - protein, 9 aa, synthetic construct
  source 1..9: note = Seed: LVVVGADGV (KRAS G12D)
IVVIGGDGI

SEQ ID NO: 8074 - protein, 9 aa, synthetic construct
  source 1..9: note = Seed: LVVVGADGV (KRAS G12D)
IVVIGGDGL

SEQ ID NO: 8075 - protein, 9 aa, synthetic construct
  source 1..9: note = Seed: LVVVGADGV (KRAS G12D)
IVVIGGDGV

SEQ ID NO: 8076 - protein, 9 aa, synthetic construct
  source 1..9: note = Seed: LVVVGADGV (KRAS G12D)
IVVIGIDGA

SEQ ID NO: 8077 - protein, 9 aa, synthetic construct
  source 1..9: note = Seed: LVVVGADGV (KRAS G12D)
IVVIGNDGA

SEQ ID NO: 8078 - protein, 9 aa, synthetic construct
  source 1..9: note = Seed: LVVVGADGV (KRAS G12D)
IVVIGNDGI

SEQ ID NO: 8079 - protein, 9 aa, synthetic construct
  source 1..9: note = Seed: LVVVGADGV (KRAS G12D)
IVVIGNDGL

SEQ ID NO: 8080 - protein, 9 aa, synthetic construct
  source 1..9: note = Seed: LVVVGADGV (KRAS G12D)
IVVIGNDGS

SEQ ID NO: 8081 - protein, 9 aa, synthetic construct
  source 1..9: note = Seed: LVVVGADGV (KRAS G12D)
IVVIGNDGT

SEQ ID NO: 8082 - protein, 9 aa, synthetic construct
  source 1..9: note = Seed: LVVVGADGV (KRAS G12D)
IVVIGPDGA

SEQ ID NO: 8083 - protein, 9 aa, synthetic construct
  source 1..9: note = Seed: LVVVGADGV (KRAS G12D)
IVVIGRDGL

SEQ ID NO: 8084 - protein, 9 aa, synthetic construct
  source 1..9: note = Seed: LVVVGADGV (KRAS G12D)
IVVIGSDGA

SEQ ID NO: 8085 - protein, 9 aa, synthetic construct
  source 1..9: note = Seed: LVVVGADGV (KRAS G12D)
IVVIGSDGI

SEQ ID NO: 8086 - protein, 9 aa, synthetic construct
  source 1..9: note = Seed: LVVVGADGV (KRAS G12D)
IVVIGSDGL

SEQ ID NO: 8087 - protein, 9 aa, synthetic construct
  source 1..9: note = Seed: LVVVGADGV (KRAS G12D)
IVVIGSDGS

SEQ ID NO: 8088 - protein, 9 aa, synthetic construct
  source 1..9: note = Seed: LVVVGADGV (KRAS G12D)
IVVIGSDGV

SEQ ID NO: 8089 - protein, 9 aa, synthetic construct
  source 1..9: note = Seed: LVVVGADGV (KRAS G12D)
IVVIGTDGA

SEQ ID NO: 8090 - protein, 9 aa, synthetic construct
  source 1..9: note = Seed: LVVVGADGV (KRAS G12D)
IVVIGTDGM

SEQ ID NO: 8091 - protein, 9 aa, synthetic construct
  source 1..9: note = Seed: LVVVGADGV (KRAS G12D)
IVVIGTDGS

SEQ ID NO: 8092 - protein, 9 aa, synthetic construct
  source 1..9: note = Seed: LVVVGADGV (KRAS G12D)
IVVIGVDGA

SEQ ID NO: 8093 - protein, 9 aa, synthetic construct
  source 1..9: note = Seed: LVVVGADGV (KRAS G12D)
IVVLGADGA

SEQ ID NO: 8094 - protein, 9 aa, synthetic construct
  source 1..9: note = Seed: LVVVGADGV (KRAS G12D)
IVVLGADGI

SEQ ID NO: 8095 - protein, 9 aa, synthetic construct
  source 1..9: note = Seed: LVVVGADGV (KRAS G12D)
IVVLGADGL

SEQ ID NO: 8096 - protein, 9 aa, synthetic construct
  source 1..9: note = Seed: LVVVGADGV (KRAS G12D)
IVVLGADGM

SEQ ID NO: 8097 - protein, 9 aa, synthetic construct
  source 1..9: note = Seed: LVVVGADGV (KRAS G12D)
IVVLGADGS

SEQ ID NO: 8098 - protein, 9 aa, synthetic construct
  source 1..9: note = Seed: LVVVGADGV (KRAS G12D)
IVVLGADGT

SEQ ID NO: 8099 - protein, 9 aa, synthetic construct
  source 1..9: note = Seed: LVVVGADGV (KRAS G12D)
IVVLGADGV

SEQ ID NO: 8100 - protein, 9 aa, synthetic construct
  source 1..9: note = Seed: LVVVGADGV (KRAS G12D)
IVVLGGDGA

SEQ ID NO: 8101 - protein, 9 aa, synthetic construct
  source 1..9: note = Seed: LVVVGADGV (KRAS G12D)
IVVLGGDGI

SEQ ID NO: 8102 - protein, 9 aa, synthetic construct
  source 1..9: note = Seed: LVVVGADGV (KRAS G12D)
IVVLGGDGL

SEQ ID NO: 8103 - protein, 9 aa, synthetic construct
  source 1..9: note = Seed: LVVVGADGV (KRAS G12D)
IVVLGGDGM

SEQ ID NO: 8104 - protein, 9 aa, synthetic construct
  source 1..9: note = Seed: LVVVGADGV (KRAS G12D)
IVVLGGDGS

SEQ ID NO: 8105 - protein, 9 aa, synthetic construct
  source 1..9: note = Seed: LVVVGADGV (KRAS G12D)
IVVLGGDGT

SEQ ID NO: 8106 - protein, 9 aa, synthetic construct
  source 1..9: note = Seed: LVVVGADGV (KRAS G12D)
IVVLGGDGV

SEQ ID NO: 8107 - protein, 9 aa, synthetic construct
  source 1..9: note = Seed: LVVVGADGV (KRAS G12D)
IVVLGIDGA

SEQ ID NO: 8108 - protein, 9 aa, synthetic construct
  source 1..9: note = Seed: LVVVGADGV (KRAS G12D)
IVVLGIDGS

SEQ ID NO: 8109 - protein, 9 aa, synthetic construct
  source 1..9: note = Seed: LVVVGADGV (KRAS G12D)
IVVLGNDGA

SEQ ID NO: 8110 - protein, 9 aa, synthetic construct
  source 1..9: note = Seed: LVVVGADGV (KRAS G12D)
IVVLGNDGI

SEQ ID NO: 8111 - protein, 9 aa, synthetic construct
  source 1..9: note = Seed: LVVVGADGV (KRAS G12D)
IVVLGNDGL

SEQ ID NO: 8112 - protein, 9 aa, synthetic construct
  source 1..9: note = Seed: LVVVGADGV (KRAS G12D)
IVVLGNDGM

SEQ ID NO: 8113 - protein, 9 aa, synthetic construct
  source 1..9: note = Seed: LVVVGADGV (KRAS G12D)
IVVLGNDGS

SEQ ID NO: 8114 - protein, 9 aa, synthetic construct
  source 1..9: note = Seed: LVVVGADGV (KRAS G12D)
IVVLGNDGT

SEQ ID NO: 8115 - protein, 9 aa, synthetic construct
  source 1..9: note = Seed: LVVVGADGV (KRAS G12D)
IVVLGNDGV

SEQ ID NO: 8116 - protein, 9 aa, synthetic construct
  source 1..9: note = Seed: LVVVGADGV (KRAS G12D)
IVVLGPDGA

SEQ ID NO: 8117 - protein, 9 aa, synthetic construct
  source 1..9: note = Seed: LVVVGADGV (KRAS G12D)
IVVLGPDGI

SEQ ID NO: 8118 - protein, 9 aa, synthetic construct
  source 1..9: note = Seed: LVVVGADGV (KRAS G12D)
IVVLGPDGL

SEQ ID NO: 8119 - protein, 9 aa, synthetic construct
  source 1..9: note = Seed: LVVVGADGV (KRAS G12D)
IVVLGPDGV

SEQ ID NO: 8120 - protein, 9 aa, synthetic construct
  source 1..9: note = Seed: LVVVGADGV (KRAS G12D)
IVVLGSDGA

SEQ ID NO: 8121 - protein, 9 aa, synthetic construct
  source 1..9: note = Seed: LVVVGADGV (KRAS G12D)
IVVLGSDGI

SEQ ID NO: 8122 - protein, 9 aa, synthetic construct
  source 1..9: note = Seed: LVVVGADGV (KRAS G12D)
IVVLGSDGL

SEQ ID NO: 8123 - protein, 9 aa, synthetic construct
  source 1..9: note = Seed: LVVVGADGV (KRAS G12D)
IVVLGSDGM

SEQ ID NO: 8124 - protein, 9 aa, synthetic construct
  source 1..9: note = Seed: LVVVGADGV (KRAS G12D)
IVVLGSDGS

SEQ ID NO: 8125 - protein, 9 aa, synthetic construct
  source 1..9: note = Seed: LVVVGADGV (KRAS G12D)
IVVLGSDGT

SEQ ID NO: 8126 - protein, 9 aa, synthetic construct
  source 1..9: note = Seed: LVVVGADGV (KRAS G12D)
IVVLGSDGV

SEQ ID NO: 8127 - protein, 9 aa, synthetic construct
  source 1..9: note = Seed: LVVVGADGV (KRAS G12D)
IVVLGTDGA

SEQ ID NO: 8128 - protein, 9 aa, synthetic construct
  source 1..9: note = Seed: LVVVGADGV (KRAS G12D)
IVVLGTDGI

SEQ ID NO: 8129 - protein, 9 aa, synthetic construct
  source 1..9: note = Seed: LVVVGADGV (KRAS G12D)
IVVLGTDGL

SEQ ID NO: 8130 - protein, 9 aa, synthetic construct
  source 1..9: note = Seed: LVVVGADGV (KRAS G12D)
IVVLGTDGM

SEQ ID NO: 8131 - protein, 9 aa, synthetic construct
  source 1..9: note = Seed: LVVVGADGV (KRAS G12D)
IVVLGTDGS

SEQ ID NO: 8132 - protein, 9 aa, synthetic construct
  source 1..9: note = Seed: LVVVGADGV (KRAS G12D)
IVVLGTDGV

SEQ ID NO: 8133 - protein, 9 aa, synthetic construct
  source 1..9: note = Seed: LVVVGADGV (KRAS G12D)
IVVLGVDGA

SEQ ID NO: 8134 - protein, 9 aa, synthetic construct
  source 1..9: note = Seed: LVVVGADGV (KRAS G12D)
IVVLGVDGL

SEQ ID NO: 8135 - protein, 9 aa, synthetic construct
  source 1..9: note = Seed: LVVVGADGV (KRAS G12D)
IVVLGVDGS

SEQ ID NO: 8136 - protein, 9 aa, synthetic construct
  source 1..9: note = Seed: LVVVGADGV (KRAS G12D)
IVVMGADGA

SEQ ID NO: 8137 - protein, 9 aa, synthetic construct
  source 1..9: note = Seed: LVVVGADGV (KRAS G12D)
IVVMGADGI

SEQ ID NO: 8138 - protein, 9 aa, synthetic construct
  source 1..9: note = Seed: LVVVGADGV (KRAS G12D)
IVVMGADGL

SEQ ID NO: 8139 - protein, 9 aa, synthetic construct
  source 1..9: note = Seed: LVVVGADGV (KRAS G12D)
IVVMGADGM

SEQ ID NO: 8140 - protein, 9 aa, synthetic construct
  source 1..9: note = Seed: LVVVGADGV (KRAS G12D)
IVVMGADGS

SEQ ID NO: 8141 - protein, 9 aa, synthetic construct
  source 1..9: note = Seed: LVVVGADGV (KRAS G12D)
IVVMGADGT

SEQ ID NO: 8142 - protein, 9 aa, synthetic construct
  source 1..9: note = Seed: LVVVGADGV (KRAS G12D)
IVVMGADGV

SEQ ID NO: 8143 - protein, 9 aa, synthetic construct
  source 1..9: note = Seed: LVVVGADGV (KRAS G12D)
IVVMGGDGA

SEQ ID NO: 8144 - protein, 9 aa, synthetic construct
  source 1..9: note = Seed: LVVVGADGV (KRAS G12D)
IVVMGGDGI

SEQ ID NO: 8145 - protein, 9 aa, synthetic construct
  source 1..9: note = Seed: LVVVGADGV (KRAS G12D)
IVVMGGDGL

SEQ ID NO: 8146 - protein, 9 aa, synthetic construct
  source 1..9: note = Seed: LVVVGADGV (KRAS G12D)
IVVMGGDGM

SEQ ID NO: 8147 - protein, 9 aa, synthetic construct
  source 1..9: note = Seed: LVVVGADGV (KRAS G12D)
IVVMGGDGT

SEQ ID NO: 8148 - protein, 9 aa, synthetic construct
  source 1..9: note = Seed: LVVVGADGV (KRAS G12D)
IVVMGGDGV

SEQ ID NO: 8149 - protein, 9 aa, synthetic construct
  source 1..9: note = Seed: LVVVGADGV (KRAS G12D)
IVVMGIDGA

SEQ ID NO: 8150 - protein, 9 aa, synthetic construct
  source 1..9: note = Seed: LVVVGADGV (KRAS G12D)
IVVMGIDGI

SEQ ID NO: 8151 - protein, 9 aa, synthetic construct
  source 1..9: note = Seed: LVVVGADGV (KRAS G12D)
IVVMGIDGL

SEQ ID NO: 8152 - protein, 9 aa, synthetic construct
  source 1..9: note = Seed: LVVVGADGV (KRAS G12D)
IVVMGIDGM

SEQ ID NO: 8153 - protein, 9 aa, synthetic construct
  source 1..9: note = Seed: LVVVGADGV (KRAS G12D)
IVVMGIDGS

SEQ ID NO: 8154 - protein, 9 aa, synthetic construct
  source 1..9: note = Seed: LVVVGADGV (KRAS G12D)
IVVMGIDGV

SEQ ID NO: 8155 - protein, 9 aa, synthetic construct
  source 1..9: note = Seed: LVVVGADGV (KRAS G12D)
IVVMGNDGA

SEQ ID NO: 8156 - protein, 9 aa, synthetic construct
  source 1..9: note = Seed: LVVVGADGV (KRAS G12D)
IVVMGNDGI

SEQ ID NO: 8157 - protein, 9 aa, synthetic construct
  source 1..9: note = Seed: LVVVGADGV (KRAS G12D)
IVVMGNDGL

SEQ ID NO: 8158 - protein, 9 aa, synthetic construct
  source 1..9: note = Seed: LVVVGADGV (KRAS G12D)
IVVMGNDGM

SEQ ID NO: 8159 - protein, 9 aa, synthetic construct
  source 1..9: note = Seed: LVVVGADGV (KRAS G12D)
IVVMGNDGQ

SEQ ID NO: 8160 - protein, 9 aa, synthetic construct
  source 1..9: note = Seed: LVVVGADGV (KRAS G12D)
IVVMGNDGS

SEQ ID NO: 8161 - protein, 9 aa, synthetic construct
  source 1..9: note = Seed: LVVVGADGV (KRAS G12D)
IVVMGNDGT

SEQ ID NO: 8162 - protein, 9 aa, synthetic construct
  source 1..9: note = Seed: LVVVGADGV (KRAS G12D)
IVVMGNDGV

SEQ ID NO: 8163 - protein, 9 aa, synthetic construct
  source 1..9: note = Seed: LVVVGADGV (KRAS G12D)
IVVMGPDGI

SEQ ID NO: 8164 - protein, 9 aa, synthetic construct
  source 1..9: note = Seed: LVVVGADGV (KRAS G12D)
IVVMGPDGL

SEQ ID NO: 8165 - protein, 9 aa, synthetic construct
  source 1..9: note = Seed: LVVVGADGV (KRAS G12D)
IVVMGPDGV

SEQ ID NO: 8166 - protein, 9 aa, synthetic construct
  source 1..9: note = Seed: LVVVGADGV (KRAS G12D)
IVVMGSDGA

SEQ ID NO: 8167 - protein, 9 aa, synthetic construct
  source 1..9: note = Seed: LVVVGADGV (KRAS G12D)
IVVMGSDGI

SEQ ID NO: 8168 - protein, 9 aa, synthetic construct
  source 1..9: note = Seed: LVVVGADGV (KRAS G12D)
IVVMGSDGL

SEQ ID NO: 8169 - protein, 9 aa, synthetic construct
  source 1..9: note = Seed: LVVVGADGV (KRAS G12D)
IVVMGSDGM

SEQ ID NO: 8170 - protein, 9 aa, synthetic construct
  source 1..9: note = Seed: LVVVGADGV (KRAS G12D)
IVVMGSDGS

SEQ ID NO: 8171 - protein, 9 aa, synthetic construct
  source 1..9: note = Seed: LVVVGADGV (KRAS G12D)
IVVMGSDGT

SEQ ID NO: 8172 - protein, 9 aa, synthetic construct
  source 1..9: note = Seed: LVVVGADGV (KRAS G12D)
IVVMGSDGV

SEQ ID NO: 8173 - protein, 9 aa, synthetic construct
  source 1..9: note = Seed: LVVVGADGV (KRAS G12D)
IVVMGTDGA

SEQ ID NO: 8174 - protein, 9 aa, synthetic construct
  source 1..9: note = Seed: LVVVGADGV (KRAS G12D)
IVVMGTDGI

SEQ ID NO: 8175 - protein, 9 aa, synthetic construct
  source 1..9: note = Seed: LVVVGADGV (KRAS G12D)
IVVMGTDGL

SEQ ID NO: 8176 - protein, 9 aa, synthetic construct
  source 1..9: note = Seed: LVVVGADGV (KRAS G12D)
IVVMGTDGM

SEQ ID NO: 8177 - protein, 9 aa, synthetic construct
  source 1..9: note = Seed: LVVVGADGV (KRAS G12D)
IVVMGTDGS

SEQ ID NO: 8178 - protein, 9 aa, synthetic construct
  source 1..9: note = Seed: LVVVGADGV (KRAS G12D)
IVVMGTDGV

SEQ ID NO: 8179 - protein, 9 aa, synthetic construct
  source 1..9: note = Seed: LVVVGADGV (KRAS G12D)
IVVMGVDGA

SEQ ID NO: 8180 - protein, 9 aa, synthetic construct
  source 1..9: note = Seed: LVVVGADGV (KRAS G12D)
IVVMGVDGL

SEQ ID NO: 8181 - protein, 9 aa, synthetic construct
  source 1..9: note = Seed: LVVVGADGV (KRAS G12D)
IVVMGVDGM

SEQ ID NO: 8182 - protein, 9 aa, synthetic construct
  source 1..9: note = Seed: LVVVGADGV (KRAS G12D)
IVVMGVDGS

SEQ ID NO: 8183 - protein, 9 aa, synthetic construct
  source 1..9: note = Seed: LVVVGADGV (KRAS G12D)
IVVNGADGF

SEQ ID NO: 8184 - protein, 9 aa, synthetic construct
  source 1..9: note = Seed: LVVVGADGV (KRAS G12D)
IVVNGADGI

SEQ ID NO: 8185 - protein, 9 aa, synthetic construct
  source 1..9: note = Seed: LVVVGADGV (KRAS G12D)
IVVNGADGL

SEQ ID NO: 8186 - protein, 9 aa, synthetic construct
  source 1..9: note = Seed: LVVVGADGV (KRAS G12D)
IVVNGADGM

SEQ ID NO: 8187 - protein, 9 aa, synthetic construct
  source 1..9: note = Seed: LVVVGADGV (KRAS G12D)
IVVNGADGV

SEQ ID NO: 8188 - protein, 9 aa, synthetic construct
  source 1..9: note = Seed: LVVVGADGV (KRAS G12D)
IVVNGADGY

SEQ ID NO: 8189 - protein, 9 aa, synthetic construct
  source 1..9: note = Seed: LVVVGADGV (KRAS G12D)
IVVNGGDGI

SEQ ID NO: 8190 - protein, 9 aa, synthetic construct
  source 1..9: note = Seed: LVVVGADGV (KRAS G12D)
IVVNGGDGL

SEQ ID NO: 8191 - protein, 9 aa, synthetic construct
  source 1..9: note = Seed: LVVVGADGV (KRAS G12D)
IVVNGGDGV

SEQ ID NO: 8192 - protein, 9 aa, synthetic construct
  source 1..9: note = Seed: LVVVGADGV (KRAS G12D)
IVVNGIDGF

SEQ ID NO: 8193 - protein, 9 aa, synthetic construct
  source 1..9: note = Seed: LVVVGADGV (KRAS G12D)
IVVNGIDGI

SEQ ID NO: 8194 - protein, 9 aa, synthetic construct
  source 1..9: note = Seed: LVVVGADGV (KRAS G12D)
IVVNGIDGL

SEQ ID NO: 8195 - protein, 9 aa, synthetic construct
  source 1..9: note = Seed: LVVVGADGV (KRAS G12D)
IVVNGIDGM

SEQ ID NO: 8196 - protein, 9 aa, synthetic construct
  source 1..9: note = Seed: LVVVGADGV (KRAS G12D)
IVVNGIDGV

SEQ ID NO: 8197 - protein, 9 aa, synthetic construct
  source 1..9: note = Seed: LVVVGADGV (KRAS G12D)
IVVNGIDGY

SEQ ID NO: 8198 - protein, 9 aa, synthetic construct
  source 1..9: note = Seed: LVVVGADGV (KRAS G12D)
IVVNGLDGI

SEQ ID NO: 8199 - protein, 9 aa, synthetic construct
  source 1..9: note = Seed: LVVVGADGV (KRAS G12D)
IVVNGLDGL

SEQ ID NO: 8200 - protein, 9 aa, synthetic construct
  source 1..9: note = Seed: LVVVGADGV (KRAS G12D)
IVVNGLDGV

SEQ ID NO: 8201 - protein, 9 aa, synthetic construct
  source 1..9: note = Seed: LVVVGADGV (KRAS G12D)
IVVNGMDGI

SEQ ID NO: 8202 - protein, 9 aa, synthetic construct
  source 1..9: note = Seed: LVVVGADGV (KRAS G12D)
IVVNGMDGV

SEQ ID NO: 8203 - protein, 9 aa, synthetic construct
  source 1..9: note = Seed: LVVVGADGV (KRAS G12D)
IVVNGNDGF

SEQ ID NO: 8204 - protein, 9 aa, synthetic construct
  source 1..9: note = Seed: LVVVGADGV (KRAS G12D)
IVVNGNDGI

SEQ ID NO: 8205 - protein, 9 aa, synthetic construct
  source 1..9: note = Seed: LVVVGADGV (KRAS G12D)
IVVNGNDGL

SEQ ID NO: 8206 - protein, 9 aa, synthetic construct
  source 1..9: note = Seed: LVVVGADGV (KRAS G12D)
IVVNGNDGM

SEQ ID NO: 8207 - protein, 9 aa, synthetic construct
  source 1..9: note = Seed: LVVVGADGV (KRAS G12D)
IVVNGNDGV

SEQ ID NO: 8208 - protein, 9 aa, synthetic construct
  source 1..9: note = Seed: LVVVGADGV (KRAS G12D)
IVVNGNDGY

SEQ ID NO: 8209 - protein, 9 aa, synthetic construct
  source 1..9: note = Seed: LVVVGADGV (KRAS G12D)
IVVNGPDGI

SEQ ID NO: 8210 - protein, 9 aa, synthetic construct
  source 1..9: note = Seed: LVVVGADGV (KRAS G12D)
IVVNGPDGL

SEQ ID NO: 8211 - protein, 9 aa, synthetic construct
  source 1..9: note = Seed: LVVVGADGV (KRAS G12D)
IVVNGPDGV

SEQ ID NO: 8212 - protein, 9 aa, synthetic construct
  source 1..9: note = Seed: LVVVGADGV (KRAS G12D)
IVVNGSDGF

SEQ ID NO: 8213 - protein, 9 aa, synthetic construct
  source 1..9: note = Seed: LVVVGADGV (KRAS G12D)
IVVNGSDGI

SEQ ID NO: 8214 - protein, 9 aa, synthetic construct
  source 1..9: note = Seed: LVVVGADGV (KRAS G12D)
IVVNGSDGL

SEQ ID NO: 8215 - protein, 9 aa, synthetic construct
  source 1..9: note = Seed: LVVVGADGV (KRAS G12D)
IVVNGSDGM

SEQ ID NO: 8216 - protein, 9 aa, synthetic construct
  source 1..9: note = Seed: LVVVGADGV (KRAS G12D)
IVVNGSDGV

SEQ ID NO: 8217 - protein, 9 aa, synthetic construct
  source 1..9: note = Seed: LVVVGADGV (KRAS G12D)
IVVNGSDGY

SEQ ID NO: 8218 - protein, 9 aa, synthetic construct
  source 1..9: note = Seed: LVVVGADGV (KRAS G12D)
IVVNGTDGF

SEQ ID NO: 8219 - protein, 9 aa, synthetic construct
  source 1..9: note = Seed: LVVVGADGV (KRAS G12D)
IVVNGTDGI

SEQ ID NO: 8220 - protein, 9 aa, synthetic construct
  source 1..9: note = Seed: LVVVGADGV (KRAS G12D)
IVVNGTDGL

SEQ ID NO: 8221 - protein, 9 aa, synthetic construct
  source 1..9: note = Seed: LVVVGADGV (KRAS G12D)
IVVNGTDGV

SEQ ID NO: 8222 - protein, 9 aa, synthetic construct
  source 1..9: note = Seed: LVVVGADGV (KRAS G12D)
IVVNGTDGY

SEQ ID NO: 8223 - protein, 9 aa, synthetic construct
  source 1..9: note = Seed: LVVVGADGV (KRAS G12D)
IVVNGVDGF

SEQ ID NO: 8224 - protein, 9 aa, synthetic construct
  source 1..9: note = Seed: LVVVGADGV (KRAS G12D)
IVVNGVDGI

SEQ ID NO: 8225 - protein, 9 aa, synthetic construct
  source 1..9: note = Seed: LVVVGADGV (KRAS G12D)
IVVNGVDGL

SEQ ID NO: 8226 - protein, 9 aa, synthetic construct
  source 1..9: note = Seed: LVVVGADGV (KRAS G12D)
IVVNGVDGM

SEQ ID NO: 8227 - protein, 9 aa, synthetic construct
  source 1..9: note = Seed: LVVVGADGV (KRAS G12D)
IVVNGVDGV

SEQ ID NO: 8228 - protein, 9 aa, synthetic construct
  source 1..9: note = Seed: LVVVGADGV (KRAS G12D)
IVVNGVDGY

SEQ ID NO: 8229 - protein, 9 aa, synthetic construct
  source 1..9: note = Seed: LVVVGADGV (KRAS G12D)
IVVSGADGI

SEQ ID NO: 8230 - protein, 9 aa, synthetic construct
  source 1..9: note = Seed: LVVVGADGV (KRAS G12D)
IVVSGADGV

SEQ ID NO: 8231 - protein, 9 aa, synthetic construct
  source 1..9: note = Seed: LVVVGADGV (KRAS G12D)
IVVSGNDGI

SEQ ID NO: 8232 - protein, 9 aa, synthetic construct
  source 1..9: note = Seed: LVVVGADGV (KRAS G12D)
IVVSGNDGV

SEQ ID NO: 8233 - protein, 9 aa, synthetic construct
  source 1..9: note = Seed: LVVVGADGV (KRAS G12D)
IVVSGSDGI

SEQ ID NO: 8234 - protein, 9 aa, synthetic construct
  source 1..9: note = Seed: LVVVGADGV (KRAS G12D)
IVVVGADGA

SEQ ID NO: 8235 - protein, 9 aa, synthetic construct
  source 1..9: note = Seed: LVVVGADGV (KRAS G12D)
IVVVGADGI

SEQ ID NO: 8236 - protein, 9 aa, synthetic construct
  source 1..9: note = Seed: LVVVGADGV (KRAS G12D)
IVVVGADGL

SEQ ID NO: 8237 - protein, 9 aa, synthetic construct
  source 1..9: note = Seed: LVVVGADGV (KRAS G12D)
IVVVGADGV

SEQ ID NO: 8238 - protein, 9 aa, synthetic construct
  source 1..9: note = Seed: LVVVGADGV (KRAS G12D)
IVVVGNDGA

SEQ ID NO: 8239 - protein, 9 aa, synthetic construct
  source 1..9: note = Seed: LVVVGADGV (KRAS G12D)
IVVVGNDGS

SEQ ID NO: 8240 - protein, 9 aa, synthetic construct
  source 1..9: note = Seed: LVVVGADGV (KRAS G12D)
IVVVGSDGA

SEQ ID NO: 8241 - protein, 9 aa, synthetic construct
  source 1..9: note = Seed: LVVVGADGV (KRAS G12D)
IVVVGTDGA

SEQ ID NO: 8242 - protein, 9 aa, synthetic construct
  source 1..9: note = Seed: LVVVGADGV (KRAS G12D)
IVVWGIDGL

SEQ ID NO: 8243 - protein, 9 aa, synthetic construct
  source 1..9: note = Seed: LVVVGADGV (KRAS G12D)
IVVWGNDGI

SEQ ID NO: 8244 - protein, 9 aa, synthetic construct
  source 1..9: note = Seed: LVVVGADGV (KRAS G12D)
IVVWGNDGL

SEQ ID NO: 8245 - protein, 9 aa, synthetic construct
  source 1..9: note = Seed: LVVVGADGV (KRAS G12D)
IVVWGNDGV

SEQ ID NO: 8246 - protein, 9 aa, synthetic construct
  source 1..9: note = Seed: LVVVGADGV (KRAS G12D)
IVVWGSDGI

SEQ ID NO: 8247 - protein, 9 aa, synthetic construct
  source 1..9: note = Seed: LVVVGADGV (KRAS G12D)
IVVWGSDGL

SEQ ID NO: 8248 - protein, 9 aa, synthetic construct
  source 1..9: note = Seed: LVVVGADGV (KRAS G12D)
IVVWGSDGV

SEQ ID NO: 8249 - protein, 9 aa, synthetic construct
  source 1..9: note = Seed: LVVVGADGV (KRAS G12D)
IVVYGADGA

SEQ ID NO: 8250 - protein, 9 aa, synthetic construct
  source 1..9: note = Seed: LVVVGADGV (KRAS G12D)
IVVYGADGI

SEQ ID NO: 8251 - protein, 9 aa, synthetic construct
  source 1..9: note = Seed: LVVVGADGV (KRAS G12D)
IVVYGADGL

SEQ ID NO: 8252 - protein, 9 aa, synthetic construct
  source 1..9: note = Seed: LVVVGADGV (KRAS G12D)
IVVYGADGM

SEQ ID NO: 8253 - protein, 9 aa, synthetic construct
  source 1..9: note = Seed: LVVVGADGV (KRAS G12D)
IVVYGADGV

SEQ ID NO: 8254 - protein, 9 aa, synthetic construct
  source 1..9: note = Seed: LVVVGADGV (KRAS G12D)
IVVYGGDGA

SEQ ID NO: 8255 - protein, 9 aa, synthetic construct
  source 1..9: note = Seed: LVVVGADGV (KRAS G12D)
IVVYGGDGI

SEQ ID NO: 8256 - protein, 9 aa, synthetic construct
  source 1..9: note = Seed: LVVVGADGV (KRAS G12D)
IVVYGGDGL

SEQ ID NO: 8257 - protein, 9 aa, synthetic construct
  source 1..9: note = Seed: LVVVGADGV (KRAS G12D)
IVVYGGDGM

SEQ ID NO: 8258 - protein, 9 aa, synthetic construct
  source 1..9: note = Seed: LVVVGADGV (KRAS G12D)
IVVYGGDGV

SEQ ID NO: 8259 - protein, 9 aa, synthetic construct
  source 1..9: note = Seed: LVVVGADGV (KRAS G12D)
IVVYGIDGA

SEQ ID NO: 8260 - protein, 9 aa, synthetic construct
  source 1..9: note = Seed: LVVVGADGV (KRAS G12D)
IVVYGIDGI

SEQ ID NO: 8261 - protein, 9 aa, synthetic construct
  source 1..9: note = Seed: LVVVGADGV (KRAS G12D)
IVVYGIDGL

SEQ ID NO: 8262 - protein, 9 aa, synthetic construct
  source 1..9: note = Seed: LVVVGADGV (KRAS G12D)
IVVYGIDGV

SEQ ID NO: 8263 - protein, 9 aa, synthetic construct
  source 1..9: note = Seed: LVVVGADGV (KRAS G12D)
IVVYGNDGA

SEQ ID NO: 8264 - protein, 9 aa, synthetic construct
  source 1..9: note = Seed: LVVVGADGV (KRAS G12D)
IVVYGNDGF

SEQ ID NO: 8265 - protein, 9 aa, synthetic construct
  source 1..9: note = Seed: LVVVGADGV (KRAS G12D)
IVVYGNDGI

SEQ ID NO: 8266 - protein, 9 aa, synthetic construct
  source 1..9: note = Seed: LVVVGADGV (KRAS G12D)
IVVYGNDGL

SEQ ID NO: 8267 - protein, 9 aa, synthetic construct
  source 1..9: note = Seed: LVVVGADGV (KRAS G12D)
IVVYGNDGM

SEQ ID NO: 8268 - protein, 9 aa, synthetic construct
  source 1..9: note = Seed: LVVVGADGV (KRAS G12D)
IVVYGNDGS

SEQ ID NO: 8269 - protein, 9 aa, synthetic construct
  source 1..9: note = Seed: LVVVGADGV (KRAS G12D)
IVVYGNDGT

SEQ ID NO: 8270 - protein, 9 aa, synthetic construct
  source 1..9: note = Seed: LVVVGADGV (KRAS G12D)
IVVYGNDGV

SEQ ID NO: 8271 - protein, 9 aa, synthetic construct
  source 1..9: note = Seed: LVVVGADGV (KRAS G12D)
IVVYGSDGA

SEQ ID NO: 8272 - protein, 9 aa, synthetic construct
  source 1..9: note = Seed: LVVVGADGV (KRAS G12D)
IVVYGSDGF

SEQ ID NO: 8273 - protein, 9 aa, synthetic construct
  source 1..9: note = Seed: LVVVGADGV (KRAS G12D)
IVVYGSDGI

SEQ ID NO: 8274 - protein, 9 aa, synthetic construct
  source 1..9: note = Seed: LVVVGADGV (KRAS G12D)
IVVYGSDGL

SEQ ID NO: 8275 - protein, 9 aa, synthetic construct
  source 1..9: note = Seed: LVVVGADGV (KRAS G12D)
IVVYGSDGM

SEQ ID NO: 8276 - protein, 9 aa, synthetic construct
  source 1..9: note = Seed: LVVVGADGV (KRAS G12D)
IVVYGSDGS

SEQ ID NO: 8277 - protein, 9 aa, synthetic construct
  source 1..9: note = Seed: LVVVGADGV (KRAS G12D)
IVVYGSDGT

SEQ ID NO: 8278 - protein, 9 aa, synthetic construct
  source 1..9: note = Seed: LVVVGADGV (KRAS G12D)
IVVYGSDGV

SEQ ID NO: 8279 - protein, 9 aa, synthetic construct
  source 1..9: note = Seed: LVVVGADGV (KRAS G12D)
IVVYGTDGI

SEQ ID NO: 8280 - protein, 9 aa, synthetic construct
  source 1..9: note = Seed: LVVVGADGV (KRAS G12D)
IVVYGTDGL

SEQ ID NO: 8281 - protein, 9 aa, synthetic construct
  source 1..9: note = Seed: LVVVGADGV (KRAS G12D)
IVVYGTDGV

SEQ ID NO: 8282 - protein, 9 aa, synthetic construct
  source 1..9: note = Seed: LVVVGADGV (KRAS G12D)
LVVAGADGA

SEQ ID NO: 8283 - protein, 9 aa, synthetic construct
  source 1..9: note = Seed: LVVVGADGV (KRAS G12D)
LVVAGADGI

SEQ ID NO: 8284 - protein, 9 aa, synthetic construct
  source 1..9: note = Seed: LVVVGADGV (KRAS G12D)
LVVAGADGL

SEQ ID NO: 8285 - protein, 9 aa, synthetic construct
  source 1..9: note = Seed: LVVVGADGV (KRAS G12D)
LVVAGADGM

SEQ ID NO: 8286 - protein, 9 aa, synthetic construct
  source 1..9: note = Seed: LVVVGADGV (KRAS G12D)
LVVAGADGN

SEQ ID NO: 8287 - protein, 9 aa, synthetic construct
  source 1..9: note = Seed: LVVVGADGV (KRAS G12D)
LVVAGADGS

SEQ ID NO: 8288 - protein, 9 aa, synthetic construct
  source 1..9: note = Seed: LVVVGADGV (KRAS G12D)
LVVAGADGV

SEQ ID NO: 8289 - protein, 9 aa, synthetic construct
  source 1..9: note = Seed: LVVVGADGV (KRAS G12D)
LVVAGGDGL

SEQ ID NO: 8290 - protein, 9 aa, synthetic construct
  source 1..9: note = Seed: LVVVGADGV (KRAS G12D)
LVVAGIDGA

SEQ ID NO: 8291 - protein, 9 aa, synthetic construct
  source 1..9: note = Seed: LVVVGADGV (KRAS G12D)
LVVAGIDGI

SEQ ID NO: 8292 - protein, 9 aa, synthetic construct
  source 1..9: note = Seed: LVVVGADGV (KRAS G12D)
LVVAGIDGL

SEQ ID NO: 8293 - protein, 9 aa, synthetic construct
  source 1..9: note = Seed: LVVVGADGV (KRAS G12D)
LVVAGIDGN

SEQ ID NO: 8294 - protein, 9 aa, synthetic construct
  source 1..9: note = Seed: LVVVGADGV (KRAS G12D)
LVVAGIDGQ

SEQ ID NO: 8295 - protein, 9 aa, synthetic construct
  source 1..9: note = Seed: LVVVGADGV (KRAS G12D)
LVVAGIDGS

SEQ ID NO: 8296 - protein, 9 aa, synthetic construct
  source 1..9: note = Seed: LVVVGADGV (KRAS G12D)
LVVAGIDGT

SEQ ID NO: 8297 - protein, 9 aa, synthetic construct
  source 1..9: note = Seed: LVVVGADGV (KRAS G12D)
LVVAGIDGV

SEQ ID NO: 8298 - protein, 9 aa, synthetic construct
  source 1..9: note = Seed: LVVVGADGV (KRAS G12D)
LVVAGNDGA

SEQ ID NO: 8299 - protein, 9 aa, synthetic construct
  source 1..9: note = Seed: LVVVGADGV (KRAS G12D)
LVVAGPDGA

SEQ ID NO: 8300 - protein, 9 aa, synthetic construct
  source 1..9: note = Seed: LVVVGADGV (KRAS G12D)
LVVAGPDGV

SEQ ID NO: 8301 - protein, 9 aa, synthetic construct
  source 1..9: note = Seed: LVVVGADGV (KRAS G12D)
LVVAGSDGA

SEQ ID NO: 8302 - protein, 9 aa, synthetic construct
  source 1..9: note = Seed: LVVVGADGV (KRAS G12D)
LVVAGSDGI

SEQ ID NO: 8303 - protein, 9 aa, synthetic construct
  source 1..9: note = Seed: LVVVGADGV (KRAS G12D)
LVVAGSDGL

SEQ ID NO: 8304 - protein, 9 aa, synthetic construct
  source 1..9: note = Seed: LVVVGADGV (KRAS G12D)
LVVAGSDGM

SEQ ID NO: 8305 - protein, 9 aa, synthetic construct
  source 1..9: note = Seed: LVVVGADGV (KRAS G12D)
LVVAGSDGV

SEQ ID NO: 8306 - protein, 9 aa, synthetic construct
  source 1..9: note = Seed: LVVVGADGV (KRAS G12D)
LVVAGTDGA

SEQ ID NO: 8307 - protein, 9 aa, synthetic construct
  source 1..9: note = Seed: LVVVGADGV (KRAS G12D)
LVVAGTDGI

SEQ ID NO: 8308 - protein, 9 aa, synthetic construct
  source 1..9: note = Seed: LVVVGADGV (KRAS G12D)
LVVAGTDGL

SEQ ID NO: 8309 - protein, 9 aa, synthetic construct
  source 1..9: note = Seed: LVVVGADGV (KRAS G12D)
LVVAGTDGM

SEQ ID NO: 8310 - protein, 9 aa, synthetic construct
  source 1..9: note = Seed: LVVVGADGV (KRAS G12D)
LVVAGTDGV

SEQ ID NO: 8311 - protein, 9 aa, synthetic construct
  source 1..9: note = Seed: LVVVGADGV (KRAS G12D)
LVVAGVDGA

SEQ ID NO: 8312 - protein, 9 aa, synthetic construct
  source 1..9: note = Seed: LVVVGADGV (KRAS G12D)
LVVAGVDGI

SEQ ID NO: 8313 - protein, 9 aa, synthetic construct
  source 1..9: note = Seed: LVVVGADGV (KRAS G12D)
LVVAGVDGL

SEQ ID NO: 8314 - protein, 9 aa, synthetic construct
  source 1..9: note = Seed: LVVVGADGV (KRAS G12D)
LVVAGVDGM

SEQ ID NO: 8315 - protein, 9 aa, synthetic construct
  source 1..9: note = Seed: LVVVGADGV (KRAS G12D)
LVVAGVDGS

SEQ ID NO: 8316 - protein, 9 aa, synthetic construct
  source 1..9: note = Seed: LVVVGADGV (KRAS G12D)
LVVAGVDGV

SEQ ID NO: 8317 - protein, 9 aa, synthetic construct
  source 1..9: note = Seed: LVVVGADGV (KRAS G12D)
LVVFGADGI

SEQ ID NO: 8318 - protein, 9 aa, synthetic construct
  source 1..9: note = Seed: LVVVGADGV (KRAS G12D)
LVVFGADGL

SEQ ID NO: 8319 - protein, 9 aa, synthetic construct
  source 1..9: note = Seed: LVVVGADGV (KRAS G12D)
LVVFGADGV

SEQ ID NO: 8320 - protein, 9 aa, synthetic construct
  source 1..9: note = Seed: LVVVGADGV (KRAS G12D)
LVVFGGDGI

SEQ ID NO: 8321 - protein, 9 aa, synthetic construct
  source 1..9: note = Seed: LVVVGADGV (KRAS G12D)
LVVFGGDGL

SEQ ID NO: 8322 - protein, 9 aa, synthetic construct
  source 1..9: note = Seed: LVVVGADGV (KRAS G12D)
LVVFGGDGV

SEQ ID NO: 8323 - protein, 9 aa, synthetic construct
  source 1..9: note = Seed: LVVVGADGV (KRAS G12D)
LVVFGIDGA

SEQ ID NO: 8324 - protein, 9 aa, synthetic construct
  source 1..9: note = Seed: LVVVGADGV (KRAS G12D)
LVVFGIDGI

SEQ ID NO: 8325 - protein, 9 aa, synthetic construct
  source 1..9: note = Seed: LVVVGADGV (KRAS G12D)
LVVFGIDGM

SEQ ID NO: 8326 - protein, 9 aa, synthetic construct
  source 1..9: note = Seed: LVVVGADGV (KRAS G12D)
LVVFGIDGV

SEQ ID NO: 8327 - protein, 9 aa, synthetic construct
  source 1..9: note = Seed: LVVVGADGV (KRAS G12D)
LVVFGNDGA

SEQ ID NO: 8328 - protein, 9 aa, synthetic construct
  source 1..9: note = Seed: LVVVGADGV (KRAS G12D)
LVVFGNDGI

SEQ ID NO: 8329 - protein, 9 aa, synthetic construct
  source 1..9: note = Seed: LVVVGADGV (KRAS G12D)
LVVFGNDGL

SEQ ID NO: 8330 - protein, 9 aa, synthetic construct
  source 1..9: note = Seed: LVVVGADGV (KRAS G12D)
LVVFGNDGM

SEQ ID NO: 8331 - protein, 9 aa, synthetic construct
  source 1..9: note = Seed: LVVVGADGV (KRAS G12D)
LVVFGNDGS

SEQ ID NO: 8332 - protein, 9 aa, synthetic construct
  source 1..9: note = Seed: LVVVGADGV (KRAS G12D)
LVVFGNDGV

SEQ ID NO: 8333 - protein, 9 aa, synthetic construct
  source 1..9: note = Seed: LVVVGADGV (KRAS G12D)
LVVFGSDGA

SEQ ID NO: 8334 - protein, 9 aa, synthetic construct
  source 1..9: note = Seed: LVVVGADGV (KRAS G12D)
LVVFGSDGI

SEQ ID NO: 8335 - protein, 9 aa, synthetic construct
  source 1..9: note = Seed: LVVVGADGV (KRAS G12D)
LVVFGSDGL

SEQ ID NO: 8336 - protein, 9 aa, synthetic construct
  source 1..9: note = Seed: LVVVGADGV (KRAS G12D)
LVVFGSDGM

SEQ ID NO: 8337 - protein, 9 aa, synthetic construct
  source 1..9: note = Seed: LVVVGADGV (KRAS G12D)
LVVFGSDGT

SEQ ID NO: 8338 - protein, 9 aa, synthetic construct
  source 1..9: note = Seed: LVVVGADGV (KRAS G12D)
LVVFGSDGV

SEQ ID NO: 8339 - protein, 9 aa, synthetic construct
  source 1..9: note = Seed: LVVVGADGV (KRAS G12D)
LVVFGTDGA

SEQ ID NO: 8340 - protein, 9 aa, synthetic construct
  source 1..9: note = Seed: LVVVGADGV (KRAS G12D)
LVVFGTDGI

SEQ ID NO: 8341 - protein, 9 aa, synthetic construct
  source 1..9: note = Seed: LVVVGADGV (KRAS G12D)
LVVFGTDGL

SEQ ID NO: 8342 - protein, 9 aa, synthetic construct
  source 1..9: note = Seed: LVVVGADGV (KRAS G12D)
LVVFGTDGS

SEQ ID NO: 8343 - protein, 9 aa, synthetic construct
  source 1..9: note = Seed: LVVVGADGV (KRAS G12D)
LVVFGTDGV

SEQ ID NO: 8344 - protein, 9 aa, synthetic construct
  source 1..9: note = Seed: LVVVGADGV (KRAS G12D)
LVVFGVDGA

SEQ ID NO: 8345 - protein, 9 aa, synthetic construct
  source 1..9: note = Seed: LVVVGADGV (KRAS G12D)
LVVIGADGA

SEQ ID NO: 8346 - protein, 9 aa, synthetic construct
  source 1..9: note = Seed: LVVVGADGV (KRAS G12D)
LVVIGADGI

SEQ ID NO: 8347 - protein, 9 aa, synthetic construct
  source 1..9: note = Seed: LVVVGADGV (KRAS G12D)
LVVIGADGL

SEQ ID NO: 8348 - protein, 9 aa, synthetic construct
  source 1..9: note = Seed: LVVVGADGV (KRAS G12D)
LVVIGADGM

SEQ ID NO: 8349 - protein, 9 aa, synthetic construct
  source 1..9: note = Seed: LVVVGADGV (KRAS G12D)
LVVIGADGN

SEQ ID NO: 8350 - protein, 9 aa, synthetic construct
  source 1..9: note = Seed: LVVVGADGV (KRAS G12D)
LVVIGADGS

SEQ ID NO: 8351 - protein, 9 aa, synthetic construct
  source 1..9: note = Seed: LVVVGADGV (KRAS G12D)
LVVIGADGT

SEQ ID NO: 8352 - protein, 9 aa, synthetic construct
  source 1..9: note = Seed: LVVVGADGV (KRAS G12D)
LVVIGADGV

SEQ ID NO: 8353 - protein, 9 aa, synthetic construct
  source 1..9: note = Seed: LVVVGADGV (KRAS G12D)
LVVIGGDGA

SEQ ID NO: 8354 - protein, 9 aa, synthetic construct
  source 1..9: note = Seed: LVVVGADGV (KRAS G12D)
LVVIGGDGI

SEQ ID NO: 8355 - protein, 9 aa, synthetic construct
  source 1..9: note = Seed: LVVVGADGV (KRAS G12D)
LVVIGGDGL

SEQ ID NO: 8356 - protein, 9 aa, synthetic construct
  source 1..9: note = Seed: LVVVGADGV (KRAS G12D)
LVVIGGDGV

SEQ ID NO: 8357 - protein, 9 aa, synthetic construct
  source 1..9: note = Seed: LVVVGADGV (KRAS G12D)
LVVIGIDGA

SEQ ID NO: 8358 - protein, 9 aa, synthetic construct
  source 1..9: note = Seed: LVVVGADGV (KRAS G12D)
LVVIGLDGA

SEQ ID NO: 8359 - protein, 9 aa, synthetic construct
  source 1..9: note = Seed: LVVVGADGV (KRAS G12D)
LVVIGMDGA

SEQ ID NO: 8360 - protein, 9 aa, synthetic construct
  source 1..9: note = Seed: LVVVGADGV (KRAS G12D)
LVVIGMDGL

SEQ ID NO: 8361 - protein, 9 aa, synthetic construct
  source 1..9: note = Seed: LVVVGADGV (KRAS G12D)
LVVIGMDGS

SEQ ID NO: 8362 - protein, 9 aa, synthetic construct
  source 1..9: note = Seed: LVVVGADGV (KRAS G12D)
LVVIGNDGA

SEQ ID NO: 8363 - protein, 9 aa, synthetic construct
  source 1..9: note = Seed: LVVVGADGV (KRAS G12D)
LVVIGNDGS

SEQ ID NO: 8364 - protein, 9 aa, synthetic construct
  source 1..9: note = Seed: LVVVGADGV (KRAS G12D)
LVVIGPDGA

SEQ ID NO: 8365 - protein, 9 aa, synthetic construct
  source 1..9: note = Seed: LVVVGADGV (KRAS G12D)
LVVIGPDGL

SEQ ID NO: 8366 - protein, 9 aa, synthetic construct
  source 1..9: note = Seed: LVVVGADGV (KRAS G12D)
LVVIGPDGS

SEQ ID NO: 8367 - protein, 9 aa, synthetic construct
  source 1..9: note = Seed: LVVVGADGV (KRAS G12D)
LVVIGPDGV

SEQ ID NO: 8368 - protein, 9 aa, synthetic construct
  source 1..9: note = Seed: LVVVGADGV (KRAS G12D)
LVVIGSDGA

SEQ ID NO: 8369 - protein, 9 aa, synthetic construct
  source 1..9: note = Seed: LVVVGADGV (KRAS G12D)
LVVIGSDGI

SEQ ID NO: 8370 - protein, 9 aa, synthetic construct
  source 1..9: note = Seed: LVVVGADGV (KRAS G12D)
LVVIGSDGL

SEQ ID NO: 8371 - protein, 9 aa, synthetic construct
  source 1..9: note = Seed: LVVVGADGV (KRAS G12D)
LVVIGSDGS

SEQ ID NO: 8372 - protein, 9 aa, synthetic construct
  source 1..9: note = Seed: LVVVGADGV (KRAS G12D)
LVVIGSDGV

SEQ ID NO: 8373 - protein, 9 aa, synthetic construct
  source 1..9: note = Seed: LVVVGADGV (KRAS G12D)
LVVIGTDGA

SEQ ID NO: 8374 - protein, 9 aa, synthetic construct
  source 1..9: note = Seed: LVVVGADGV (KRAS G12D)
LVVIGTDGS

SEQ ID NO: 8375 - protein, 9 aa, synthetic construct
  source 1..9: note = Seed: LVVVGADGV (KRAS G12D)
LVVIGVDGA

SEQ ID NO: 8376 - protein, 9 aa, synthetic construct
  source 1..9: note = Seed: LVVVGADGV (KRAS G12D)
LVVIGVDGS

SEQ ID NO: 8377 - protein, 9 aa, synthetic construct
  source 1..9: note = Seed: LVVVGADGV (KRAS G12D)
LVVLGADGA

SEQ ID NO: 8378 - protein, 9 aa, synthetic construct
  source 1..9: note = Seed: LVVVGADGV (KRAS G12D)
LVVLGADGI

SEQ ID NO: 8379 - protein, 9 aa, synthetic construct
  source 1..9: note = Seed: LVVVGADGV (KRAS G12D)
LVVLGADGL

SEQ ID NO: 8380 - protein, 9 aa, synthetic construct
  source 1..9: note = Seed: LVVVGADGV (KRAS G12D)
LVVLGADGM

SEQ ID NO: 8381 - protein, 9 aa, synthetic construct
  source 1..9: note = Seed: LVVVGADGV (KRAS G12D)
LVVLGADGN

SEQ ID NO: 8382 - protein, 9 aa, synthetic construct
  source 1..9: note = Seed: LVVVGADGV (KRAS G12D)
LVVLGADGS

SEQ ID NO: 8383 - protein, 9 aa, synthetic construct
  source 1..9: note = Seed: LVVVGADGV (KRAS G12D)
LVVLGADGT

SEQ ID NO: 8384 - protein, 9 aa, synthetic construct
  source 1..9: note = Seed: LVVVGADGV (KRAS G12D)
LVVLGADGV

SEQ ID NO: 8385 - protein, 9 aa, synthetic construct
  source 1..9: note = Seed: LVVVGADGV (KRAS G12D)
LVVLGGDGA

SEQ ID NO: 8386 - protein, 9 aa, synthetic construct
  source 1..9: note = Seed: LVVVGADGV (KRAS G12D)
LVVLGGDGI

SEQ ID NO: 8387 - protein, 9 aa, synthetic construct
  source 1..9: note = Seed: LVVVGADGV (KRAS G12D)
LVVLGGDGL

SEQ ID NO: 8388 - protein, 9 aa, synthetic construct
  source 1..9: note = Seed: LVVVGADGV (KRAS G12D)
LVVLGGDGM

SEQ ID NO: 8389 - protein, 9 aa, synthetic construct
  source 1..9: note = Seed: LVVVGADGV (KRAS G12D)
LVVLGGDGS

SEQ ID NO: 8390 - protein, 9 aa, synthetic construct
  source 1..9: note = Seed: LVVVGADGV (KRAS G12D)
LVVLGGDGT

SEQ ID NO: 8391 - protein, 9 aa, synthetic construct
  source 1..9: note = Seed: LVVVGADGV (KRAS G12D)
LVVLGGDGV

SEQ ID NO: 8392 - protein, 9 aa, synthetic construct
  source 1..9: note = Seed: LVVVGADGV (KRAS G12D)
LVVLGIDGA

SEQ ID NO: 8393 - protein, 9 aa, synthetic construct
  source 1..9: note = Seed: LVVVGADGV (KRAS G12D)
LVVLGIDGS

SEQ ID NO: 8394 - protein, 9 aa, synthetic construct
  source 1..9: note = Seed: LVVVGADGV (KRAS G12D)
LVVLGNDGA

SEQ ID NO: 8395 - protein, 9 aa, synthetic construct
  source 1..9: note = Seed: LVVVGADGV (KRAS G12D)
LVVLGNDGI

SEQ ID NO: 8396 - protein, 9 aa, synthetic construct
  source 1..9: note = Seed: LVVVGADGV (KRAS G12D)
LVVLGNDGL

SEQ ID NO: 8397 - protein, 9 aa, synthetic construct
  source 1..9: note = Seed: LVVVGADGV (KRAS G12D)
LVVLGNDGS

SEQ ID NO: 8398 - protein, 9 aa, synthetic construct
  source 1..9: note = Seed: LVVVGADGV (KRAS G12D)
LVVLGNDGV

SEQ ID NO: 8399 - protein, 9 aa, synthetic construct
  source 1..9: note = Seed: LVVVGADGV (KRAS G12D)
LVVLGPDGA

SEQ ID NO: 8400 - protein, 9 aa, synthetic construct
  source 1..9: note = Seed: LVVVGADGV (KRAS G12D)
LVVLGPDGI

SEQ ID NO: 8401 - protein, 9 aa, synthetic construct
  source 1..9: note = Seed: LVVVGADGV (KRAS G12D)
LVVLGPDGL

SEQ ID NO: 8402 - protein, 9 aa, synthetic construct
  source 1..9: note = Seed: LVVVGADGV (KRAS G12D)
LVVLGPDGV

SEQ ID NO: 8403 - protein, 9 aa, synthetic construct
  source 1..9: note = Seed: LVVVGADGV (KRAS G12D)
LVVLGSDGA

SEQ ID NO: 8404 - protein, 9 aa, synthetic construct
  source 1..9: note = Seed: LVVVGADGV (KRAS G12D)
LVVLGSDGI

SEQ ID NO: 8405 - protein, 9 aa, synthetic construct
  source 1..9: note = Seed: LVVVGADGV (KRAS G12D)
LVVLGSDGL

SEQ ID NO: 8406 - protein, 9 aa, synthetic construct
  source 1..9: note = Seed: LVVVGADGV (KRAS G12D)
LVVLGSDGM

SEQ ID NO: 8407 - protein, 9 aa, synthetic construct
  source 1..9: note = Seed: LVVVGADGV (KRAS G12D)
LVVLGSDGS

SEQ ID NO: 8408 - protein, 9 aa, synthetic construct
  source 1..9: note = Seed: LVVVGADGV (KRAS G12D)
LVVLGSDGT

SEQ ID NO: 8409 - protein, 9 aa, synthetic construct
  source 1..9: note = Seed: LVVVGADGV (KRAS G12D)
LVVLGSDGV

SEQ ID NO: 8410 - protein, 9 aa, synthetic construct
  source 1..9: note = Seed: LVVVGADGV (KRAS G12D)
LVVLGTDGA

SEQ ID NO: 8411 - protein, 9 aa, synthetic construct
  source 1..9: note = Seed: LVVVGADGV (KRAS G12D)
LVVLGTDGI

SEQ ID NO: 8412 - protein, 9 aa, synthetic construct
  source 1..9: note = Seed: LVVVGADGV (KRAS G12D)
LVVLGTDGL

SEQ ID NO: 8413 - protein, 9 aa, synthetic construct
  source 1..9: note = Seed: LVVVGADGV (KRAS G12D)
LVVLGTDGM

SEQ ID NO: 8414 - protein, 9 aa, synthetic construct
  source 1..9: note = Seed: LVVVGADGV (KRAS G12D)
LVVLGTDGS

SEQ ID NO: 8415 - protein, 9 aa, synthetic construct
  source 1..9: note = Seed: LVVVGADGV (KRAS G12D)
LVVLGTDGV

SEQ ID NO: 8416 - protein, 9 aa, synthetic construct
  source 1..9: note = Seed: LVVVGADGV (KRAS G12D)
LVVLGVDGA

SEQ ID NO: 8417 - protein, 9 aa, synthetic construct
  source 1..9: note = Seed: LVVVGADGV (KRAS G12D)
LVVLGVDGL

SEQ ID NO: 8418 - protein, 9 aa, synthetic construct
  source 1..9: note = Seed: LVVVGADGV (KRAS G12D)
LVVLGVDGN

SEQ ID NO: 8419 - protein, 9 aa, synthetic construct
  source 1..9: note = Seed: LVVVGADGV (KRAS G12D)
LVVLGVDGS

SEQ ID NO: 8420 - protein, 9 aa, synthetic construct
  source 1..9: note = Seed: LVVVGADGV (KRAS G12D)
LVVMGADGA

SEQ ID NO: 8421 - protein, 9 aa, synthetic construct
  source 1..9: note = Seed: LVVVGADGV (KRAS G12D)
LVVMGADGI

SEQ ID NO: 8422 - protein, 9 aa, synthetic construct
  source 1..9: note = Seed: LVVVGADGV (KRAS G12D)
LVVMGADGL

SEQ ID NO: 8423 - protein, 9 aa, synthetic construct
  source 1..9: note = Seed: LVVVGADGV (KRAS G12D)
LVVMGADGM

SEQ ID NO: 8424 - protein, 9 aa, synthetic construct
  source 1..9: note = Seed: LVVVGADGV (KRAS G12D)
LVVMGADGN

SEQ ID NO: 8425 - protein, 9 aa, synthetic construct
  source 1..9: note = Seed: LVVVGADGV (KRAS G12D)
LVVMGADGS

SEQ ID NO: 8426 - protein, 9 aa, synthetic construct
  source 1..9: note = Seed: LVVVGADGV (KRAS G12D)
LVVMGADGT

SEQ ID NO: 8427 - protein, 9 aa, synthetic construct
  source 1..9: note = Seed: LVVVGADGV (KRAS G12D)
LVVMGADGV

SEQ ID NO: 8428 - protein, 9 aa, synthetic construct
  source 1..9: note = Seed: LVVVGADGV (KRAS G12D)
LVVMGGDGA

SEQ ID NO: 8429 - protein, 9 aa, synthetic construct
  source 1..9: note = Seed: LVVVGADGV (KRAS G12D)
LVVMGGDGI

SEQ ID NO: 8430 - protein, 9 aa, synthetic construct
  source 1..9: note = Seed: LVVVGADGV (KRAS G12D)
LVVMGGDGL

SEQ ID NO: 8431 - protein, 9 aa, synthetic construct
  source 1..9: note = Seed: LVVVGADGV (KRAS G12D)
LVVMGGDGM

SEQ ID NO: 8432 - protein, 9 aa, synthetic construct
  source 1..9: note = Seed: LVVVGADGV (KRAS G12D)
LVVMGGDGT

SEQ ID NO: 8433 - protein, 9 aa, synthetic construct
  source 1..9: note = Seed: LVVVGADGV (KRAS G12D)
LVVMGGDGV

SEQ ID NO: 8434 - protein, 9 aa, synthetic construct
  source 1..9: note = Seed: LVVVGADGV (KRAS G12D)
LVVMGIDGA

SEQ ID NO: 8435 - protein, 9 aa, synthetic construct
  source 1..9: note = Seed: LVVVGADGV (KRAS G12D)
LVVMGIDGI

SEQ ID NO: 8436 - protein, 9 aa, synthetic construct
  source 1..9: note = Seed: LVVVGADGV (KRAS G12D)
LVVMGIDGL

SEQ ID NO: 8437 - protein, 9 aa, synthetic construct
  source 1..9: note = Seed: LVVVGADGV (KRAS G12D)
LVVMGIDGM

SEQ ID NO: 8438 - protein, 9 aa, synthetic construct
  source 1..9: note = Seed: LVVVGADGV (KRAS G12D)
LVVMGIDGN

SEQ ID NO: 8439 - protein, 9 aa, synthetic construct
  source 1..9: note = Seed: LVVVGADGV (KRAS G12D)
LVVMGIDGS

SEQ ID NO: 8440 - protein, 9 aa, synthetic construct
  source 1..9: note = Seed: LVVVGADGV (KRAS G12D)
LVVMGIDGV

SEQ ID NO: 8441 - protein, 9 aa, synthetic construct
  source 1..9: note = Seed: LVVVGADGV (KRAS G12D)
LVVMGLDGA

SEQ ID NO: 8442 - protein, 9 aa, synthetic construct
  source 1..9: note = Seed: LVVVGADGV (KRAS G12D)
LVVMGMDGA

SEQ ID NO: 8443 - protein, 9 aa, synthetic construct
  source 1..9: note = Seed: LVVVGADGV (KRAS G12D)
LVVMGNDGA

SEQ ID NO: 8444 - protein, 9 aa, synthetic construct
  source 1..9: note = Seed: LVVVGADGV (KRAS G12D)
LVVMGNDGI

SEQ ID NO: 8445 - protein, 9 aa, synthetic construct
  source 1..9: note = Seed: LVVVGADGV (KRAS G12D)
LVVMGNDGL

SEQ ID NO: 8446 - protein, 9 aa, synthetic construct
  source 1..9: note = Seed: LVVVGADGV (KRAS G12D)
LVVMGNDGM

SEQ ID NO: 8447 - protein, 9 aa, synthetic construct
  source 1..9: note = Seed: LVVVGADGV (KRAS G12D)
LVVMGNDGS

SEQ ID NO: 8448 - protein, 9 aa, synthetic construct
  source 1..9: note = Seed: LVVVGADGV (KRAS G12D)
LVVMGNDGV

SEQ ID NO: 8449 - protein, 9 aa, synthetic construct
  source 1..9: note = Seed: LVVVGADGV (KRAS G12D)
LVVMGPDGA

SEQ ID NO: 8450 - protein, 9 aa, synthetic construct
  source 1..9: note = Seed: LVVVGADGV (KRAS G12D)
LVVMGPDGI

SEQ ID NO: 8451 - protein, 9 aa, synthetic construct
  source 1..9: note = Seed: LVVVGADGV (KRAS G12D)
LVVMGPDGL

SEQ ID NO: 8452 - protein, 9 aa, synthetic construct
  source 1..9: note = Seed: LVVVGADGV (KRAS G12D)
LVVMGPDGV

SEQ ID NO: 8453 - protein, 9 aa, synthetic construct
  source 1..9: note = Seed: LVVVGADGV (KRAS G12D)
LVVMGSDGA

SEQ ID NO: 8454 - protein, 9 aa, synthetic construct
  source 1..9: note = Seed: LVVVGADGV (KRAS G12D)
LVVMGSDGI

SEQ ID NO: 8455 - protein, 9 aa, synthetic construct
  source 1..9: note = Seed: LVVVGADGV (KRAS G12D)
LVVMGSDGL

SEQ ID NO: 8456 - protein, 9 aa, synthetic construct
  source 1..9: note = Seed: LVVVGADGV (KRAS G12D)
LVVMGSDGM

SEQ ID NO: 8457 - protein, 9 aa, synthetic construct
  source 1..9: note = Seed: LVVVGADGV (KRAS G12D)
LVVMGSDGS

SEQ ID NO: 8458 - protein, 9 aa, synthetic construct
  source 1..9: note = Seed: LVVVGADGV (KRAS G12D)
LVVMGSDGT

SEQ ID NO: 8459 - protein, 9 aa, synthetic construct
  source 1..9: note = Seed: LVVVGADGV (KRAS G12D)
LVVMGSDGV

SEQ ID NO: 8460 - protein, 9 aa, synthetic construct
  source 1..9: note = Seed: LVVVGADGV (KRAS G12D)
LVVMGTDGA

SEQ ID NO: 8461 - protein, 9 aa, synthetic construct
  source 1..9: note = Seed: LVVVGADGV (KRAS G12D)
LVVMGTDGI

SEQ ID NO: 8462 - protein, 9 aa, synthetic construct
  source 1..9: note = Seed: LVVVGADGV (KRAS G12D)
LVVMGTDGL

SEQ ID NO: 8463 - protein, 9 aa, synthetic construct
  source 1..9: note = Seed: LVVVGADGV (KRAS G12D)
LVVMGTDGM

SEQ ID NO: 8464 - protein, 9 aa, synthetic construct
  source 1..9: note = Seed: LVVVGADGV (KRAS G12D)
LVVMGTDGS

SEQ ID NO: 8465 - protein, 9 aa, synthetic construct
  source 1..9: note = Seed: LVVVGADGV (KRAS G12D)
LVVMGTDGV

SEQ ID NO: 8466 - protein, 9 aa, synthetic construct
  source 1..9: note = Seed: LVVVGADGV (KRAS G12D)
LVVMGVDGA

SEQ ID NO: 8467 - protein, 9 aa, synthetic construct
  source 1..9: note = Seed: LVVVGADGV (KRAS G12D)
LVVMGVDGL

SEQ ID NO: 8468 - protein, 9 aa, synthetic construct
  source 1..9: note = Seed: LVVVGADGV (KRAS G12D)
LVVMGVDGN

SEQ ID NO: 8469 - protein, 9 aa, synthetic construct
  source 1..9: note = Seed: LVVVGADGV (KRAS G12D)
LVVMGVDGS

SEQ ID NO: 8470 - protein, 9 aa, synthetic construct
  source 1..9: note = Seed: LVVVGADGV (KRAS G12D)
LVVNGADGF

SEQ ID NO: 8471 - protein, 9 aa, synthetic construct
  source 1..9: note = Seed: LVVVGADGV (KRAS G12D)
LVVNGADGI

SEQ ID NO: 8472 - protein, 9 aa, synthetic construct
  source 1..9: note = Seed: LVVVGADGV (KRAS G12D)
LVVNGADGL

SEQ ID NO: 8473 - protein, 9 aa, synthetic construct
  source 1..9: note = Seed: LVVVGADGV (KRAS G12D)
LVVNGADGM

SEQ ID NO: 8474 - protein, 9 aa, synthetic construct
  source 1..9: note = Seed: LVVVGADGV (KRAS G12D)
LVVNGADGV

SEQ ID NO: 8475 - protein, 9 aa, synthetic construct
  source 1..9: note = Seed: LVVVGADGV (KRAS G12D)
LVVNGADGY

SEQ ID NO: 8476 - protein, 9 aa, synthetic construct
  source 1..9: note = Seed: LVVVGADGV (KRAS G12D)
LVVNGGDGI

SEQ ID NO: 8477 - protein, 9 aa, synthetic construct
  source 1..9: note = Seed: LVVVGADGV (KRAS G12D)
LVVNGIDGF

SEQ ID NO: 8478 - protein, 9 aa, synthetic construct
  source 1..9: note = Seed: LVVVGADGV (KRAS G12D)
LVVNGIDGI

SEQ ID NO: 8479 - protein, 9 aa, synthetic construct
  source 1..9: note = Seed: LVVVGADGV (KRAS G12D)
LVVNGIDGL

SEQ ID NO: 8480 - protein, 9 aa, synthetic construct
  source 1..9: note = Seed: LVVVGADGV (KRAS G12D)
LVVNGIDGV

SEQ ID NO: 8481 - protein, 9 aa, synthetic construct
  source 1..9: note = Seed: LVVVGADGV (KRAS G12D)
LVVNGIDGY

SEQ ID NO: 8482 - protein, 9 aa, synthetic construct
  source 1..9: note = Seed: LVVVGADGV (KRAS G12D)
LVVNGLDGI

SEQ ID NO: 8483 - protein, 9 aa, synthetic construct
  source 1..9: note = Seed: LVVVGADGV (KRAS G12D)
LVVNGNDGF

SEQ ID NO: 8484 - protein, 9 aa, synthetic construct
  source 1..9: note = Seed: LVVVGADGV (KRAS G12D)
LVVNGNDGI

SEQ ID NO: 8485 - protein, 9 aa, synthetic construct
  source 1..9: note = Seed: LVVVGADGV (KRAS G12D)
LVVNGNDGL

SEQ ID NO: 8486 - protein, 9 aa, synthetic construct
  source 1..9: note = Seed: LVVVGADGV (KRAS G12D)
LVVNGNDGV

SEQ ID NO: 8487 - protein, 9 aa, synthetic construct
  source 1..9: note = Seed: LVVVGADGV (KRAS G12D)
LVVNGNDGY

SEQ ID NO: 8488 - protein, 9 aa, synthetic construct
  source 1..9: note = Seed: LVVVGADGV (KRAS G12D)
LVVNGPDGI

SEQ ID NO: 8489 - protein, 9 aa, synthetic construct
  source 1..9: note = Seed: LVVVGADGV (KRAS G12D)
LVVNGSDGF

SEQ ID NO: 8490 - protein, 9 aa, synthetic construct
  source 1..9: note = Seed: LVVVGADGV (KRAS G12D)
LVVNGSDGI

SEQ ID NO: 8491 - protein, 9 aa, synthetic construct
  source 1..9: note = Seed: LVVVGADGV (KRAS G12D)
LVVNGSDGL

SEQ ID NO: 8492 - protein, 9 aa, synthetic construct
  source 1..9: note = Seed: LVVVGADGV (KRAS G12D)
LVVNGSDGM

SEQ ID NO: 8493 - protein, 9 aa, synthetic construct
  source 1..9: note = Seed: LVVVGADGV (KRAS G12D)
LVVNGSDGV

SEQ ID NO: 8494 - protein, 9 aa, synthetic construct
  source 1..9: note = Seed: LVVVGADGV (KRAS G12D)
LVVNGSDGY

SEQ ID NO: 8495 - protein, 9 aa, synthetic construct
  source 1..9: note = Seed: LVVVGADGV (KRAS G12D)
LVVNGTDGI

SEQ ID NO: 8496 - protein, 9 aa, synthetic construct
  source 1..9: note = Seed: LVVVGADGV (KRAS G12D)
LVVNGTDGL

SEQ ID NO: 8497 - protein, 9 aa, synthetic construct
  source 1..9: note = Seed: LVVVGADGV (KRAS G12D)
LVVNGTDGV

SEQ ID NO: 8498 - protein, 9 aa, synthetic construct
  source 1..9: note = Seed: LVVVGADGV (KRAS G12D)
LVVNGVDGF

SEQ ID NO: 8499 - protein, 9 aa, synthetic construct
  source 1..9: note = Seed: LVVVGADGV (KRAS G12D)
LVVNGVDGI

SEQ ID NO: 8500 - protein, 9 aa, synthetic construct
  source 1..9: note = Seed: LVVVGADGV (KRAS G12D)
LVVNGVDGL

SEQ ID NO: 8501 - protein, 9 aa, synthetic construct
  source 1..9: note = Seed: LVVVGADGV (KRAS G12D)
LVVNGVDGV

SEQ ID NO: 8502 - protein, 9 aa, synthetic construct
  source 1..9: note = Seed: LVVVGADGV (KRAS G12D)
LVVNGVDGY

SEQ ID NO: 8503 - protein, 9 aa, synthetic construct
  source 1..9: note = Seed: LVVVGADGV (KRAS G12D)
LVVSGADGI

SEQ ID NO: 8504 - protein, 9 aa, synthetic construct
  source 1..9: note = Seed: LVVVGADGV (KRAS G12D)
LVVVGADGA

SEQ ID NO: 8505 - protein, 9 aa, synthetic construct
  source 1..9: note = Seed: LVVVGADGV (KRAS G12D)
LVVVGADGL

SEQ ID NO: 8506 - protein, 9 aa, synthetic construct
  source 1..9: note = Seed: LVVVGADGV (KRAS G12D)
LVVVGADGN

SEQ ID NO: 8507 - protein, 9 aa, synthetic construct
  source 1..9: note = Seed: LVVVGADGV (KRAS G12D)
LVVVGADGS

SEQ ID NO: 8508 - protein, 9 aa, synthetic construct
  source 1..9: note = Seed: LVVVGADGV (KRAS G12D)
LVVVGGDGL

SEQ ID NO: 8509 - protein, 9 aa, synthetic construct
  source 1..9: note = Seed: LVVVGADGV (KRAS G12D)
LVVVGIDGA

SEQ ID NO: 8510 - protein, 9 aa, synthetic construct
  source 1..9: note = Seed: LVVVGADGV (KRAS G12D)
LVVVGLDGA

SEQ ID NO: 8511 - protein, 9 aa, synthetic construct
  source 1..9: note = Seed: LVVVGADGV (KRAS G12D)
LVVVGLDGL

SEQ ID NO: 8512 - protein, 9 aa, synthetic construct
  source 1..9: note = Seed: LVVVGADGV (KRAS G12D)
LVVVGLDGM

SEQ ID NO: 8513 - protein, 9 aa, synthetic construct
  source 1..9: note = Seed: LVVVGADGV (KRAS G12D)
LVVVGLDGV

SEQ ID NO: 8514 - protein, 9 aa, synthetic construct
  source 1..9: note = Seed: LVVVGADGV (KRAS G12D)
LVVVGMDGA

SEQ ID NO: 8515 - protein, 9 aa, synthetic construct
  source 1..9: note = Seed: LVVVGADGV (KRAS G12D)
LVVVGMDGI

SEQ ID NO: 8516 - protein, 9 aa, synthetic construct
  source 1..9: note = Seed: LVVVGADGV (KRAS G12D)
LVVVGMDGL

SEQ ID NO: 8517 - protein, 9 aa, synthetic construct
  source 1..9: note = Seed: LVVVGADGV (KRAS G12D)
LVVVGMDGM

SEQ ID NO: 8518 - protein, 9 aa, synthetic construct
  source 1..9: note = Seed: LVVVGADGV (KRAS G12D)
LVVVGMDGV

SEQ ID NO: 8519 - protein, 9 aa, synthetic construct
  source 1..9: note = Seed: LVVVGADGV (KRAS G12D)
LVVVGNDGA

SEQ ID NO: 8520 - protein, 9 aa, synthetic construct
  source 1..9: note = Seed: LVVVGADGV (KRAS G12D)
LVVVGNDGS

SEQ ID NO: 8521 - protein, 9 aa, synthetic construct
  source 1..9: note = Seed: LVVVGADGV (KRAS G12D)
LVVVGSDGA

SEQ ID NO: 8522 - protein, 9 aa, synthetic construct
  source 1..9: note = Seed: LVVVGADGV (KRAS G12D)
LVVVGSDGL

SEQ ID NO: 8523 - protein, 9 aa, synthetic construct
  source 1..9: note = Seed: LVVVGADGV (KRAS G12D)
LVVVGTDGA

SEQ ID NO: 8524 - protein, 9 aa, synthetic construct
  source 1..9: note = Seed: LVVVGADGV (KRAS G12D)
LVVVGVDGA

SEQ ID NO: 8525 - protein, 9 aa, synthetic construct
  source 1..9: note = Seed: LVVVGADGV (KRAS G12D)
LVVWGIDGL

SEQ ID NO: 8526 - protein, 9 aa, synthetic construct
  source 1..9: note = Seed: LVVVGADGV (KRAS G12D)
LVVWGNDGL

SEQ ID NO: 8527 - protein, 9 aa, synthetic construct
  source 1..9: note = Seed: LVVVGADGV (KRAS G12D)
LVVWGSDGL

SEQ ID NO: 8528 - protein, 9 aa, synthetic construct
  source 1..9: note = Seed: LVVVGADGV (KRAS G12D)
LVVYGADGA

SEQ ID NO: 8529 - protein, 9 aa, synthetic construct
  source 1..9: note = Seed: LVVVGADGV (KRAS G12D)
LVVYGADGI

SEQ ID NO: 8530 - protein, 9 aa, synthetic construct
  source 1..9: note = Seed: LVVVGADGV (KRAS G12D)
LVVYGADGL

SEQ ID NO: 8531 - protein, 9 aa, synthetic construct
  source 1..9: note = Seed: LVVVGADGV (KRAS G12D)
LVVYGADGV

SEQ ID NO: 8532 - protein, 9 aa, synthetic construct
  source 1..9: note = Seed: LVVVGADGV (KRAS G12D)
LVVYGGDGI

SEQ ID NO: 8533 - protein, 9 aa, synthetic construct
  source 1..9: note = Seed: LVVVGADGV (KRAS G12D)
LVVYGGDGL

SEQ ID NO: 8534 - protein, 9 aa, synthetic construct
  source 1..9: note = Seed: LVVVGADGV (KRAS G12D)
LVVYGGDGV

SEQ ID NO: 8535 - protein, 9 aa, synthetic construct
  source 1..9: note = Seed: LVVVGADGV (KRAS G12D)
LVVYGIDGA

SEQ ID NO: 8536 - protein, 9 aa, synthetic construct
  source 1..9: note = Seed: LVVVGADGV (KRAS G12D)
LVVYGIDGI

SEQ ID NO: 8537 - protein, 9 aa, synthetic construct
  source 1..9: note = Seed: LVVVGADGV (KRAS G12D)
LVVYGIDGL

SEQ ID NO: 8538 - protein, 9 aa, synthetic construct
  source 1..9: note = Seed: LVVVGADGV (KRAS G12D)
LVVYGIDGV

SEQ ID NO: 8539 - protein, 9 aa, synthetic construct
  source 1..9: note = Seed: LVVVGADGV (KRAS G12D)
LVVYGNDGA

SEQ ID NO: 8540 - protein, 9 aa, synthetic construct
  source 1..9: note = Seed: LVVVGADGV (KRAS G12D)
LVVYGNDGI

SEQ ID NO: 8541 - protein, 9 aa, synthetic construct
  source 1..9: note = Seed: LVVVGADGV (KRAS G12D)
LVVYGNDGL

SEQ ID NO: 8542 - protein, 9 aa, synthetic construct
  source 1..9: note = Seed: LVVVGADGV (KRAS G12D)
LVVYGNDGM

SEQ ID NO: 8543 - protein, 9 aa, synthetic construct
  source 1..9: note = Seed: LVVVGADGV (KRAS G12D)
LVVYGNDGV

SEQ ID NO: 8544 - protein, 9 aa, synthetic construct
  source 1..9: note = Seed: LVVVGADGV (KRAS G12D)
LVVYGSDGA

SEQ ID NO: 8545 - protein, 9 aa, synthetic construct
  source 1..9: note = Seed: LVVVGADGV (KRAS G12D)
LVVYGSDGI

SEQ ID NO: 8546 - protein, 9 aa, synthetic construct
  source 1..9: note = Seed: LVVVGADGV (KRAS G12D)
LVVYGSDGL

SEQ ID NO: 8547 - protein, 9 aa, synthetic construct
  source 1..9: note = Seed: LVVVGADGV (KRAS G12D)
LVVYGSDGM

SEQ ID NO: 8548 - protein, 9 aa, synthetic construct
  source 1..9: note = Seed: LVVVGADGV (KRAS G12D)
LVVYGSDGV

SEQ ID NO: 8549 - protein, 9 aa, synthetic construct
  source 1..9: note = Seed: LVVVGADGV (KRAS G12D)
LVVYGTDGL

SEQ ID NO: 8550 - protein, 9 aa, synthetic construct
  source 1..9: note = Seed: LVVVGADGV (KRAS G12D)
LVVYGTDGV

SEQ ID NO: 8551 - protein, 9 aa, synthetic construct
  source 1..9: note = Seed: LVVVGADGV (KRAS G12D)
MVVAGVDGA

SEQ ID NO: 8552 - protein, 9 aa, synthetic construct
  source 1..9: note = Seed: LVVVGADGV (KRAS G12D)
MVVFGIDGA

SEQ ID NO: 8553 - protein, 9 aa, synthetic construct
  source 1..9: note = Seed: LVVVGADGV (KRAS G12D)
MVVFGIDGI

SEQ ID NO: 8554 - protein, 9 aa, synthetic construct
  source 1..9: note = Seed: LVVVGADGV (KRAS G12D)
MVVFGIDGL

SEQ ID NO: 8555 - protein, 9 aa, synthetic construct
  source 1..9: note = Seed: LVVVGADGV (KRAS G12D)
MVVFGIDGM

SEQ ID NO: 8556 - protein, 9 aa, synthetic construct
  source 1..9: note = Seed: LVVVGADGV (KRAS G12D)
MVVFGIDGV

SEQ ID NO: 8557 - protein, 9 aa, synthetic construct
  source 1..9: note = Seed: LVVVGADGV (KRAS G12D)
MVVFGNDGA

SEQ ID NO: 8558 - protein, 9 aa, synthetic construct
  source 1..9: note = Seed: LVVVGADGV (KRAS G12D)
MVVFGNDGI

SEQ ID NO: 8559 - protein, 9 aa, synthetic construct
  source 1..9: note = Seed: LVVVGADGV (KRAS G12D)
MVVFGNDGL

SEQ ID NO: 8560 - protein, 9 aa, synthetic construct
  source 1..9: note = Seed: LVVVGADGV (KRAS G12D)
MVVFGNDGV

SEQ ID NO: 8561 - protein, 9 aa, synthetic construct
  source 1..9: note = Seed: LVVVGADGV (KRAS G12D)
MVVFGSDGI

SEQ ID NO: 8562 - protein, 9 aa, synthetic construct
  source 1..9: note = Seed: LVVVGADGV (KRAS G12D)
MVVFGSDGL

SEQ ID NO: 8563 - protein, 9 aa, synthetic construct
  source 1..9: note = Seed: LVVVGADGV (KRAS G12D)
MVVFGSDGV

SEQ ID NO: 8564 - protein, 9 aa, synthetic construct
  source 1..9: note = Seed: LVVVGADGV (KRAS G12D)
MVVIGADGA

SEQ ID NO: 8565 - protein, 9 aa, synthetic construct
  source 1..9: note = Seed: LVVVGADGV (KRAS G12D)
MVVIGADGL

SEQ ID NO: 8566 - protein, 9 aa, synthetic construct
  source 1..9: note = Seed: LVVVGADGV (KRAS G12D)
MVVIGADGS

SEQ ID NO: 8567 - protein, 9 aa, synthetic construct
  source 1..9: note = Seed: LVVVGADGV (KRAS G12D)
MVVIGADGV

SEQ ID NO: 8568 - protein, 9 aa, synthetic construct
  source 1..9: note = Seed: LVVVGADGV (KRAS G12D)
MVVIGIDGA

SEQ ID NO: 8569 - protein, 9 aa, synthetic construct
  source 1..9: note = Seed: LVVVGADGV (KRAS G12D)
MVVIGLDGA

SEQ ID NO: 8570 - protein, 9 aa, synthetic construct
  source 1..9: note = Seed: LVVVGADGV (KRAS G12D)
MVVIGLDGL

SEQ ID NO: 8571 - protein, 9 aa, synthetic construct
  source 1..9: note = Seed: LVVVGADGV (KRAS G12D)
MVVIGMDGA

SEQ ID NO: 8572 - protein, 9 aa, synthetic construct
  source 1..9: note = Seed: LVVVGADGV (KRAS G12D)
MVVIGMDGL

SEQ ID NO: 8573 - protein, 9 aa, synthetic construct
  source 1..9: note = Seed: LVVVGADGV (KRAS G12D)
MVVIGMDGM

SEQ ID NO: 8574 - protein, 9 aa, synthetic construct
  source 1..9: note = Seed: LVVVGADGV (KRAS G12D)
MVVIGNDGA

SEQ ID NO: 8575 - protein, 9 aa, synthetic construct
  source 1..9: note = Seed: LVVVGADGV (KRAS G12D)
MVVIGPDGA

SEQ ID NO: 8576 - protein, 9 aa, synthetic construct
  source 1..9: note = Seed: LVVVGADGV (KRAS G12D)
MVVIGVDGA

SEQ ID NO: 8577 - protein, 9 aa, synthetic construct
  source 1..9: note = Seed: LVVVGADGV (KRAS G12D)
MVVLGADGA

SEQ ID NO: 8578 - protein, 9 aa, synthetic construct
  source 1..9: note = Seed: LVVVGADGV (KRAS G12D)
MVVLGADGI

SEQ ID NO: 8579 - protein, 9 aa, synthetic construct
  source 1..9: note = Seed: LVVVGADGV (KRAS G12D)
MVVLGADGL

SEQ ID NO: 8580 - protein, 9 aa, synthetic construct
  source 1..9: note = Seed: LVVVGADGV (KRAS G12D)
MVVLGADGM

SEQ ID NO: 8581 - protein, 9 aa, synthetic construct
  source 1..9: note = Seed: LVVVGADGV (KRAS G12D)
MVVLGADGV

SEQ ID NO: 8582 - protein, 9 aa, synthetic construct
  source 1..9: note = Seed: LVVVGADGV (KRAS G12D)
MVVLGGDGA

SEQ ID NO: 8583 - protein, 9 aa, synthetic construct
  source 1..9: note = Seed: LVVVGADGV (KRAS G12D)
MVVLGGDGI

SEQ ID NO: 8584 - protein, 9 aa, synthetic construct
  source 1..9: note = Seed: LVVVGADGV (KRAS G12D)
MVVLGGDGL

SEQ ID NO: 8585 - protein, 9 aa, synthetic construct
  source 1..9: note = Seed: LVVVGADGV (KRAS G12D)
MVVLGGDGV

SEQ ID NO: 8586 - protein, 9 aa, synthetic construct
  source 1..9: note = Seed: LVVVGADGV (KRAS G12D)
MVVLGIDGA

SEQ ID NO: 8587 - protein, 9 aa, synthetic construct
  source 1..9: note = Seed: LVVVGADGV (KRAS G12D)
MVVLGMDGA

SEQ ID NO: 8588 - protein, 9 aa, synthetic construct
  source 1..9: note = Seed: LVVVGADGV (KRAS G12D)
MVVLGNDGA

SEQ ID NO: 8589 - protein, 9 aa, synthetic construct
  source 1..9: note = Seed: LVVVGADGV (KRAS G12D)
MVVLGNDGL

SEQ ID NO: 8590 - protein, 9 aa, synthetic construct
  source 1..9: note = Seed: LVVVGADGV (KRAS G12D)
MVVLGSDGA

SEQ ID NO: 8591 - protein, 9 aa, synthetic construct
  source 1..9: note = Seed: LVVVGADGV (KRAS G12D)
MVVLGSDGI

SEQ ID NO: 8592 - protein, 9 aa, synthetic construct
  source 1..9: note = Seed: LVVVGADGV (KRAS G12D)
MVVLGSDGL

SEQ ID NO: 8593 - protein, 9 aa, synthetic construct
  source 1..9: note = Seed: LVVVGADGV (KRAS G12D)
MVVLGSDGV

SEQ ID NO: 8594 - protein, 9 aa, synthetic construct
  source 1..9: note = Seed: LVVVGADGV (KRAS G12D)
MVVLGVDGA

SEQ ID NO: 8595 - protein, 9 aa, synthetic construct
  source 1..9: note = Seed: LVVVGADGV (KRAS G12D)
MVVMGADGA

SEQ ID NO: 8596 - protein, 9 aa, synthetic construct
  source 1..9: note = Seed: LVVVGADGV (KRAS G12D)
MVVMGADGI

SEQ ID NO: 8597 - protein, 9 aa, synthetic construct
  source 1..9: note = Seed: LVVVGADGV (KRAS G12D)
MVVMGADGL

SEQ ID NO: 8598 - protein, 9 aa, synthetic construct
  source 1..9: note = Seed: LVVVGADGV (KRAS G12D)
MVVMGADGM

SEQ ID NO: 8599 - protein, 9 aa, synthetic construct
  source 1..9: note = Seed: LVVVGADGV (KRAS G12D)
MVVMGADGV

SEQ ID NO: 8600 - protein, 9 aa, synthetic construct
  source 1..9: note = Seed: LVVVGADGV (KRAS G12D)
MVVMGGDGI

SEQ ID NO: 8601 - protein, 9 aa, synthetic construct
  source 1..9: note = Seed: LVVVGADGV (KRAS G12D)
MVVMGGDGL

SEQ ID NO: 8602 - protein, 9 aa, synthetic construct
  source 1..9: note = Seed: LVVVGADGV (KRAS G12D)
MVVMGGDGV

SEQ ID NO: 8603 - protein, 9 aa, synthetic construct
  source 1..9: note = Seed: LVVVGADGV (KRAS G12D)
MVVMGIDGA

SEQ ID NO: 8604 - protein, 9 aa, synthetic construct
  source 1..9: note = Seed: LVVVGADGV (KRAS G12D)
MVVMGIDGS

SEQ ID NO: 8605 - protein, 9 aa, synthetic construct
  source 1..9: note = Seed: LVVVGADGV (KRAS G12D)
MVVMGIDGV

SEQ ID NO: 8606 - protein, 9 aa, synthetic construct
  source 1..9: note = Seed: LVVVGADGV (KRAS G12D)
MVVMGLDGA

SEQ ID NO: 8607 - protein, 9 aa, synthetic construct
  source 1..9: note = Seed: LVVVGADGV (KRAS G12D)
MVVMGMDGA

SEQ ID NO: 8608 - protein, 9 aa, synthetic construct
  source 1..9: note = Seed: LVVVGADGV (KRAS G12D)
MVVMGNDGA

SEQ ID NO: 8609 - protein, 9 aa, synthetic construct
  source 1..9: note = Seed: LVVVGADGV (KRAS G12D)
MVVMGNDGS

SEQ ID NO: 8610 - protein, 9 aa, synthetic construct
  source 1..9: note = Seed: LVVVGADGV (KRAS G12D)
MVVMGSDGI

SEQ ID NO: 8611 - protein, 9 aa, synthetic construct
  source 1..9: note = Seed: LVVVGADGV (KRAS G12D)
MVVMGSDGL

SEQ ID NO: 8612 - protein, 9 aa, synthetic construct
  source 1..9: note = Seed: LVVVGADGV (KRAS G12D)
MVVMGSDGV

SEQ ID NO: 8613 - protein, 9 aa, synthetic construct
  source 1..9: note = Seed: LVVVGADGV (KRAS G12D)
MVVMGVDGA

SEQ ID NO: 8614 - protein, 9 aa, synthetic construct
  source 1..9: note = Seed: LVVVGADGV (KRAS G12D)
MVVNGADGI

SEQ ID NO: 8615 - protein, 9 aa, synthetic construct
  source 1..9: note = Seed: LVVVGADGV (KRAS G12D)
MVVNGADGV

SEQ ID NO: 8616 - protein, 9 aa, synthetic construct
  source 1..9: note = Seed: LVVVGADGV (KRAS G12D)
MVVVGADGA

SEQ ID NO: 8617 - protein, 9 aa, synthetic construct
  source 1..9: note = Seed: LVVVGADGV (KRAS G12D)
MVVYGNDGI

SEQ ID NO: 8618 - protein, 9 aa, synthetic construct
  source 1..9: note = Seed: LVVVGADGV (KRAS G12D)
MVVYGNDGL

SEQ ID NO: 8619 - protein, 9 aa, synthetic construct
  source 1..9: note = Seed: LVVVGADGV (KRAS G12D)
MVVYGNDGV

SEQ ID NO: 8620 - protein, 9 aa, synthetic construct
  source 1..9: note = Seed: LVVVGADGV (KRAS G12D)
MVVYGSDGI

SEQ ID NO: 8621 - protein, 9 aa, synthetic construct
  source 1..9: note = Seed: LVVVGADGV (KRAS G12D)
MVVYGSDGL

SEQ ID NO: 8622 - protein, 9 aa, synthetic construct
  source 1..9: note = Seed: LVVVGADGV (KRAS G12D)
MVVYGSDGV

SEQ ID NO: 8623 - protein, 9 aa, synthetic construct
  source 1..9: note = Seed: LVVVGADGV (KRAS G12D)
VVVFGADGL

SEQ ID NO: 8624 - protein, 9 aa, synthetic construct
  source 1..9: note = Seed: LVVVGADGV (KRAS G12D)
VVVFGNDGI

SEQ ID NO: 8625 - protein, 9 aa, synthetic construct
  source 1..9: note = Seed: LVVVGADGV (KRAS G12D)
VVVFGNDGL

SEQ ID NO: 8626 - protein, 9 aa, synthetic construct
  source 1..9: note = Seed: LVVVGADGV (KRAS G12D)
VVVFGNDGV

SEQ ID NO: 8627 - protein, 9 aa, synthetic construct
  source 1..9: note = Seed: LVVVGADGV (KRAS G12D)
VVVFGSDGI

SEQ ID NO: 8628 - protein, 9 aa, synthetic construct
  source 1..9: note = Seed: LVVVGADGV (KRAS G12D)
VVVFGSDGL

SEQ ID NO: 8629 - protein, 9 aa, synthetic construct
  source 1..9: note = Seed: LVVVGADGV (KRAS G12D)
VVVFGSDGV

SEQ ID NO: 8630 - protein, 9 aa, synthetic construct
  source 1..9: note = Seed: LVVVGADGV (KRAS G12D)
VVVIGNDGA

SEQ ID NO: 8631 - protein, 9 aa, synthetic construct
  source 1..9: note = Seed: LVVVGADGV (KRAS G12D)
VVVLGADGA

SEQ ID NO: 8632 - protein, 9 aa, synthetic construct
  source 1..9: note = Seed: LVVVGADGV (KRAS G12D)
VVVLGADGI

SEQ ID NO: 8633 - protein, 9 aa, synthetic construct
  source 1..9: note = Seed: LVVVGADGV (KRAS G12D)
VVVLGADGL

SEQ ID NO: 8634 - protein, 9 aa, synthetic construct
  source 1..9: note = Seed: LVVVGADGV (KRAS G12D)
VVVLGADGV

SEQ ID NO: 8635 - protein, 9 aa, synthetic construct
  source 1..9: note = Seed: LVVVGADGV (KRAS G12D)
VVVLGGDGA

SEQ ID NO: 8636 - protein, 9 aa, synthetic construct
  source 1..9: note = Seed: LVVVGADGV (KRAS G12D)
VVVLGGDGI

SEQ ID NO: 8637 - protein, 9 aa, synthetic construct
  source 1..9: note = Seed: LVVVGADGV (KRAS G12D)
VVVLGGDGL

SEQ ID NO: 8638 - protein, 9 aa, synthetic construct
  source 1..9: note = Seed: LVVVGADGV (KRAS G12D)
VVVLGGDGV

SEQ ID NO: 8639 - protein, 9 aa, synthetic construct
  source 1..9: note = Seed: LVVVGADGV (KRAS G12D)
VVVLGNDGA

SEQ ID NO: 8640 - protein, 9 aa, synthetic construct
  source 1..9: note = Seed: LVVVGADGV (KRAS G12D)
VVVLGSDGA

SEQ ID NO: 8641 - protein, 9 aa, synthetic construct
  source 1..9: note = Seed: LVVVGADGV (KRAS G12D)
VVVLGSDGI

SEQ ID NO: 8642 - protein, 9 aa, synthetic construct
  source 1..9: note = Seed: LVVVGADGV (KRAS G12D)
VVVLGSDGL

SEQ ID NO: 8643 - protein, 9 aa, synthetic construct
  source 1..9: note = Seed: LVVVGADGV (KRAS G12D)
VVVLGSDGV

SEQ ID NO: 8644 - protein, 9 aa, synthetic construct
  source 1..9: note = Seed: LVVVGADGV (KRAS G12D)
VVVMGADGI

SEQ ID NO: 8645 - protein, 9 aa, synthetic construct
  source 1..9: note = Seed: LVVVGADGV (KRAS G12D)
VVVMGADGL

SEQ ID NO: 8646 - protein, 9 aa, synthetic construct
  source 1..9: note = Seed: LVVVGADGV (KRAS G12D)
VVVMGADGV

SEQ ID NO: 8647 - protein, 9 aa, synthetic construct
  source 1..9: note = Seed: LVVVGADGV (KRAS G12D)
VVVMGGDGI

SEQ ID NO: 8648 - protein, 9 aa, synthetic construct
  source 1..9: note = Seed: LVVVGADGV (KRAS G12D)
VVVMGGDGL

SEQ ID NO: 8649 - protein, 9 aa, synthetic construct
  source 1..9: note = Seed: LVVVGADGV (KRAS G12D)
VVVMGGDGV

SEQ ID NO: 8650 - protein, 9 aa, synthetic construct
  source 1..9: note = Seed: LVVVGADGV (KRAS G12D)
VVVMGNDGA

SEQ ID NO: 8651 - protein, 9 aa, synthetic construct
  source 1..9: note = Seed: LVVVGADGV (KRAS G12D)
VVVMGSDGI

SEQ ID NO: 8652 - protein, 9 aa, synthetic construct
  source 1..9: note = Seed: LVVVGADGV (KRAS G12D)
VVVMGSDGL

SEQ ID NO: 8653 - protein, 9 aa, synthetic construct
  source 1..9: note = Seed: LVVVGADGV (KRAS G12D)
VVVMGSDGV

SEQ ID NO: 8654 - protein, 9 aa, synthetic construct
  source 1..9: note = Seed: LVVVGADGV (KRAS G12D)
VVVNGADGI

SEQ ID NO: 8655 - protein, 9 aa, synthetic construct
  source 1..9: note = Seed: LVVVGADGV (KRAS G12D)
VVVNGADGL

SEQ ID NO: 8656 - protein, 9 aa, synthetic construct
  source 1..9: note = Seed: LVVVGADGV (KRAS G12D)
VVVNGADGV

SEQ ID NO: 8657 - protein, 9 aa, synthetic construct
  source 1..9: note = Seed: LVVVGADGV (KRAS G12D)
VVVNGIDGI

SEQ ID NO: 8658 - protein, 9 aa, synthetic construct
  source 1..9: note = Seed: LVVVGADGV (KRAS G12D)
VVVNGSDGI

SEQ ID NO: 8659 - protein, 9 aa, synthetic construct
  source 1..9: note = Seed: LVVVGADGV (KRAS G12D)
VVVYGNDGI

SEQ ID NO: 8660 - protein, 9 aa, synthetic construct
  source 1..9: note = Seed: LVVVGADGV (KRAS G12D)
VVVYGNDGL

SEQ ID NO: 8661 - protein, 9 aa, synthetic construct
  source 1..9: note = Seed: LVVVGADGV (KRAS G12D)
VVVYGNDGV

SEQ ID NO: 8662 - protein, 9 aa, synthetic construct
  source 1..9: note = Seed: LVVVGADGV (KRAS G12D)
VVVYGSDGA

SEQ ID NO: 8663 - protein, 9 aa, synthetic construct
  source 1..9: note = Seed: LVVVGADGV (KRAS G12D)
VVVYGSDGI

SEQ ID NO: 8664 - protein, 9 aa, synthetic construct
  source 1..9: note = Seed: LVVVGADGV (KRAS G12D)
VVVYGSDGL

SEQ ID NO: 8665 - protein, 9 aa, synthetic construct
  source 1..9: note = Seed: LVVVGADGV (KRAS G12D)
VVVYGSDGV

SEQ ID NO: 8666 - protein, 9 aa, synthetic construct
  source 1..9: note = Seed: LVVVGADGV (KRAS G12D)
WVVAGADGA

SEQ ID NO: 8667 - protein, 9 aa, synthetic construct
  source 1..9: note = Seed: LVVVGADGV (KRAS G12D)
WVVAGADGI

SEQ ID NO: 8668 - protein, 9 aa, synthetic construct
  source 1..9: note = Seed: LVVVGADGV (KRAS G12D)
WVVAGADGL

SEQ ID NO: 8669 - protein, 9 aa, synthetic construct
  source 1..9: note = Seed: LVVVGADGV (KRAS G12D)
WVVAGADGM

SEQ ID NO: 8670 - protein, 9 aa, synthetic construct
  source 1..9: note = Seed: LVVVGADGV (KRAS G12D)
WVVAGADGN

SEQ ID NO: 8671 - protein, 9 aa, synthetic construct
  source 1..9: note = Seed: LVVVGADGV (KRAS G12D)
WVVAGADGS

SEQ ID NO: 8672 - protein, 9 aa, synthetic construct
  source 1..9: note = Seed: LVVVGADGV (KRAS G12D)
WVVAGADGV

SEQ ID NO: 8673 - protein, 9 aa, synthetic construct
  source 1..9: note = Seed: LVVVGADGV (KRAS G12D)
WVVAGGDGI

SEQ ID NO: 8674 - protein, 9 aa, synthetic construct
  source 1..9: note = Seed: LVVVGADGV (KRAS G12D)
WVVAGGDGL

SEQ ID NO: 8675 - protein, 9 aa, synthetic construct
  source 1..9: note = Seed: LVVVGADGV (KRAS G12D)
WVVAGGDGV

SEQ ID NO: 8676 - protein, 9 aa, synthetic construct
  source 1..9: note = Seed: LVVVGADGV (KRAS G12D)
WVVAGIDGA

SEQ ID NO: 8677 - protein, 9 aa, synthetic construct
  source 1..9: note = Seed: LVVVGADGV (KRAS G12D)
WVVAGIDGN

SEQ ID NO: 8678 - protein, 9 aa, synthetic construct
  source 1..9: note = Seed: LVVVGADGV (KRAS G12D)
WVVAGIDGS

SEQ ID NO: 8679 - protein, 9 aa, synthetic construct
  source 1..9: note = Seed: LVVVGADGV (KRAS G12D)
WVVAGLDGA

SEQ ID NO: 8680 - protein, 9 aa, synthetic construct
  source 1..9: note = Seed: LVVVGADGV (KRAS G12D)
WVVAGLDGL

SEQ ID NO: 8681 - protein, 9 aa, synthetic construct
  source 1..9: note = Seed: LVVVGADGV (KRAS G12D)
WVVAGPDGA

SEQ ID NO: 8682 - protein, 9 aa, synthetic construct
  source 1..9: note = Seed: LVVVGADGV (KRAS G12D)
WVVAGSDGA

SEQ ID NO: 8683 - protein, 9 aa, synthetic construct
  source 1..9: note = Seed: LVVVGADGV (KRAS G12D)
WVVAGSDGI

SEQ ID NO: 8684 - protein, 9 aa, synthetic construct
  source 1..9: note = Seed: LVVVGADGV (KRAS G12D)
WVVAGSDGL

SEQ ID NO: 8685 - protein, 9 aa, synthetic construct
  source 1..9: note = Seed: LVVVGADGV (KRAS G12D)
WVVAGSDGV

SEQ ID NO: 8686 - protein, 9 aa, synthetic construct
  source 1..9: note = Seed: LVVVGADGV (KRAS G12D)
WVVAGTDGA

SEQ ID NO: 8687 - protein, 9 aa, synthetic construct
  source 1..9: note = Seed: LVVVGADGV (KRAS G12D)
WVVAGVDGA

SEQ ID NO: 8688 - protein, 9 aa, synthetic construct
  source 1..9: note = Seed: LVVVGADGV (KRAS G12D)
WVVAGVDGN

SEQ ID NO: 8689 - protein, 9 aa, synthetic construct
  source 1..9: note = Seed: LVVVGADGV (KRAS G12D)
WVVAGVDGS

SEQ ID NO: 8690 - protein, 9 aa, synthetic construct
  source 1..9: note = Seed: LVVVGADGV (KRAS G12D)
WVVAGVDGV

SEQ ID NO: 8691 - protein, 9 aa, synthetic construct
  source 1..9: note = Seed: LVVVGADGV (KRAS G12D)
WVVFGADGA

SEQ ID NO: 8692 - protein, 9 aa, synthetic construct
  source 1..9: note = Seed: LVVVGADGV (KRAS G12D)
WVVFGADGI

SEQ ID NO: 8693 - protein, 9 aa, synthetic construct
  source 1..9: note = Seed: LVVVGADGV (KRAS G12D)
WVVFGADGL

SEQ ID NO: 8694 - protein, 9 aa, synthetic construct
  source 1..9: note = Seed: LVVVGADGV (KRAS G12D)
WVVFGADGV

SEQ ID NO: 8695 - protein, 9 aa, synthetic construct
  source 1..9: note = Seed: LVVVGADGV (KRAS G12D)
WVVIGADGA

SEQ ID NO: 8696 - protein, 9 aa, synthetic construct
  source 1..9: note = Seed: LVVVGADGV (KRAS G12D)
WVVIGADGI

SEQ ID NO: 8697 - protein, 9 aa, synthetic construct
  source 1..9: note = Seed: LVVVGADGV (KRAS G12D)
WVVIGADGL

SEQ ID NO: 8698 - protein, 9 aa, synthetic construct
  source 1..9: note = Seed: LVVVGADGV (KRAS G12D)
WVVIGADGM

SEQ ID NO: 8699 - protein, 9 aa, synthetic construct
  source 1..9: note = Seed: LVVVGADGV (KRAS G12D)
WVVIGADGN

SEQ ID NO: 8700 - protein, 9 aa, synthetic construct
  source 1..9: note = Seed: LVVVGADGV (KRAS G12D)
WVVIGADGS

SEQ ID NO: 8701 - protein, 9 aa, synthetic construct
  source 1..9: note = Seed: LVVVGADGV (KRAS G12D)
WVVIGADGT

SEQ ID NO: 8702 - protein, 9 aa, synthetic construct
  source 1..9: note = Seed: LVVVGADGV (KRAS G12D)
WVVIGADGV

SEQ ID NO: 8703 - protein, 9 aa, synthetic construct
  source 1..9: note = Seed: LVVVGADGV (KRAS G12D)
WVVIGGDGA

SEQ ID NO: 8704 - protein, 9 aa, synthetic construct
  source 1..9: note = Seed: LVVVGADGV (KRAS G12D)
WVVIGGDGI

SEQ ID NO: 8705 - protein, 9 aa, synthetic construct
  source 1..9: note = Seed: LVVVGADGV (KRAS G12D)
WVVIGGDGL

SEQ ID NO: 8706 - protein, 9 aa, synthetic construct
  source 1..9: note = Seed: LVVVGADGV (KRAS G12D)
WVVIGGDGM

SEQ ID NO: 8707 - protein, 9 aa, synthetic construct
  source 1..9: note = Seed: LVVVGADGV (KRAS G12D)
WVVIGGDGV

SEQ ID NO: 8708 - protein, 9 aa, synthetic construct
  source 1..9: note = Seed: LVVVGADGV (KRAS G12D)
WVVIGIDGA

SEQ ID NO: 8709 - protein, 9 aa, synthetic construct
  source 1..9: note = Seed: LVVVGADGV (KRAS G12D)
WVVIGIDGS

SEQ ID NO: 8710 - protein, 9 aa, synthetic construct
  source 1..9: note = Seed: LVVVGADGV (KRAS G12D)
WVVIGMDGA

SEQ ID NO: 8711 - protein, 9 aa, synthetic construct
  source 1..9: note = Seed: LVVVGADGV (KRAS G12D)
WVVIGNDGA

SEQ ID NO: 8712 - protein, 9 aa, synthetic construct
  source 1..9: note = Seed: LVVVGADGV (KRAS G12D)
WVVIGNDGI

SEQ ID NO: 8713 - protein, 9 aa, synthetic construct
  source 1..9: note = Seed: LVVVGADGV (KRAS G12D)
WVVIGNDGL

SEQ ID NO: 8714 - protein, 9 aa, synthetic construct
  source 1..9: note = Seed: LVVVGADGV (KRAS G12D)
WVVIGNDGV

SEQ ID NO: 8715 - protein, 9 aa, synthetic construct
  source 1..9: note = Seed: LVVVGADGV (KRAS G12D)
WVVIGPDGA

SEQ ID NO: 8716 - protein, 9 aa, synthetic construct
  source 1..9: note = Seed: LVVVGADGV (KRAS G12D)
WVVIGPDGL

SEQ ID NO: 8717 - protein, 9 aa, synthetic construct
  source 1..9: note = Seed: LVVVGADGV (KRAS G12D)
WVVIGPDGV

SEQ ID NO: 8718 - protein, 9 aa, synthetic construct
  source 1..9: note = Seed: LVVVGADGV (KRAS G12D)
WVVIGSDGA

SEQ ID NO: 8719 - protein, 9 aa, synthetic construct
  source 1..9: note = Seed: LVVVGADGV (KRAS G12D)
WVVIGSDGI

SEQ ID NO: 8720 - protein, 9 aa, synthetic construct
  source 1..9: note = Seed: LVVVGADGV (KRAS G12D)
WVVIGSDGL

SEQ ID NO: 8721 - protein, 9 aa, synthetic construct
  source 1..9: note = Seed: LVVVGADGV (KRAS G12D)
WVVIGSDGM

SEQ ID NO: 8722 - protein, 9 aa, synthetic construct
  source 1..9: note = Seed: LVVVGADGV (KRAS G12D)
WVVIGSDGT

SEQ ID NO: 8723 - protein, 9 aa, synthetic construct
  source 1..9: note = Seed: LVVVGADGV (KRAS G12D)
WVVIGSDGV

SEQ ID NO: 8724 - protein, 9 aa, synthetic construct
  source 1..9: note = Seed: LVVVGADGV (KRAS G12D)
WVVIGTDGA

SEQ ID NO: 8725 - protein, 9 aa, synthetic construct
  source 1..9: note = Seed: LVVVGADGV (KRAS G12D)
WVVIGTDGI

SEQ ID NO: 8726 - protein, 9 aa, synthetic construct
  source 1..9: note = Seed: LVVVGADGV (KRAS G12D)
WVVIGTDGL

SEQ ID NO: 8727 - protein, 9 aa, synthetic construct
  source 1..9: note = Seed: LVVVGADGV (KRAS G12D)
WVVIGTDGV

SEQ ID NO: 8728 - protein, 9 aa, synthetic construct
  source 1..9: note = Seed: LVVVGADGV (KRAS G12D)
WVVIGVDGA

SEQ ID NO: 8729 - protein, 9 aa, synthetic construct
  source 1..9: note = Seed: LVVVGADGV (KRAS G12D)
WVVIGVDGN

SEQ ID NO: 8730 - protein, 9 aa, synthetic construct
  source 1..9: note = Seed: LVVVGADGV (KRAS G12D)
WVVIGVDGS

SEQ ID NO: 8731 - protein, 9 aa, synthetic construct
  source 1..9: note = Seed: LVVVGADGV (KRAS G12D)
WVVLGADGA

SEQ ID NO: 8732 - protein, 9 aa, synthetic construct
  source 1..9: note = Seed: LVVVGADGV (KRAS G12D)
WVVLGADGG

SEQ ID NO: 8733 - protein, 9 aa, synthetic construct
  source 1..9: note = Seed: LVVVGADGV (KRAS G12D)
WVVLGADGI

SEQ ID NO: 8734 - protein, 9 aa, synthetic construct
  source 1..9: note = Seed: LVVVGADGV (KRAS G12D)
WVVLGADGL

SEQ ID NO: 8735 - protein, 9 aa, synthetic construct
  source 1..9: note = Seed: LVVVGADGV (KRAS G12D)
WVVLGADGM

SEQ ID NO: 8736 - protein, 9 aa, synthetic construct
  source 1..9: note = Seed: LVVVGADGV (KRAS G12D)
WVVLGADGN

SEQ ID NO: 8737 - protein, 9 aa, synthetic construct
  source 1..9: note = Seed: LVVVGADGV (KRAS G12D)
WVVLGADGS

SEQ ID NO: 8738 - protein, 9 aa, synthetic construct
  source 1..9: note = Seed: LVVVGADGV (KRAS G12D)
WVVLGADGT

SEQ ID NO: 8739 - protein, 9 aa, synthetic construct
  source 1..9: note = Seed: LVVVGADGV (KRAS G12D)
WVVLGADGV

SEQ ID NO: 8740 - protein, 9 aa, synthetic construct
  source 1..9: note = Seed: LVVVGADGV (KRAS G12D)
WVVLGGDGA

SEQ ID NO: 8741 - protein, 9 aa, synthetic construct
  source 1..9: note = Seed: LVVVGADGV (KRAS G12D)
WVVLGGDGI

SEQ ID NO: 8742 - protein, 9 aa, synthetic construct
  source 1..9: note = Seed: LVVVGADGV (KRAS G12D)
WVVLGGDGL

SEQ ID NO: 8743 - protein, 9 aa, synthetic construct
  source 1..9: note = Seed: LVVVGADGV (KRAS G12D)
WVVLGGDGM

SEQ ID NO: 8744 - protein, 9 aa, synthetic construct
  source 1..9: note = Seed: LVVVGADGV (KRAS G12D)
WVVLGGDGS

SEQ ID NO: 8745 - protein, 9 aa, synthetic construct
  source 1..9: note = Seed: LVVVGADGV (KRAS G12D)
WVVLGGDGT

SEQ ID NO: 8746 - protein, 9 aa, synthetic construct
  source 1..9: note = Seed: LVVVGADGV (KRAS G12D)
WVVLGGDGV

SEQ ID NO: 8747 - protein, 9 aa, synthetic construct
  source 1..9: note = Seed: LVVVGADGV (KRAS G12D)
WVVLGIDGA

SEQ ID NO: 8748 - protein, 9 aa, synthetic construct
  source 1..9: note = Seed: LVVVGADGV (KRAS G12D)
WVVLGIDGL

SEQ ID NO: 8749 - protein, 9 aa, synthetic construct
  source 1..9: note = Seed: LVVVGADGV (KRAS G12D)
WVVLGIDGN

SEQ ID NO: 8750 - protein, 9 aa, synthetic construct
  source 1..9: note = Seed: LVVVGADGV (KRAS G12D)
WVVLGIDGS

SEQ ID NO: 8751 - protein, 9 aa, synthetic construct
  source 1..9: note = Seed: LVVVGADGV (KRAS G12D)
WVVLGNDGA

SEQ ID NO: 8752 - protein, 9 aa, synthetic construct
  source 1..9: note = Seed: LVVVGADGV (KRAS G12D)
WVVLGNDGI

SEQ ID NO: 8753 - protein, 9 aa, synthetic construct
  source 1..9: note = Seed: LVVVGADGV (KRAS G12D)
WVVLGNDGL

SEQ ID NO: 8754 - protein, 9 aa, synthetic construct
  source 1..9: note = Seed: LVVVGADGV (KRAS G12D)
WVVLGNDGM

SEQ ID NO: 8755 - protein, 9 aa, synthetic construct
  source 1..9: note = Seed: LVVVGADGV (KRAS G12D)
WVVLGNDGS

SEQ ID NO: 8756 - protein, 9 aa, synthetic construct
  source 1..9: note = Seed: LVVVGADGV (KRAS G12D)
WVVLGNDGT

SEQ ID NO: 8757 - protein, 9 aa, synthetic construct
  source 1..9: note = Seed: LVVVGADGV (KRAS G12D)
WVVLGNDGV

SEQ ID NO: 8758 - protein, 9 aa, synthetic construct
  source 1..9: note = Seed: LVVVGADGV (KRAS G12D)
WVVLGPDGA

SEQ ID NO: 8759 - protein, 9 aa, synthetic construct
  source 1..9: note = Seed: LVVVGADGV (KRAS G12D)
WVVLGPDGI

SEQ ID NO: 8760 - protein, 9 aa, synthetic construct
  source 1..9: note = Seed: LVVVGADGV (KRAS G12D)
WVVLGPDGL

SEQ ID NO: 8761 - protein, 9 aa, synthetic construct
  source 1..9: note = Seed: LVVVGADGV (KRAS G12D)
WVVLGPDGM

SEQ ID NO: 8762 - protein, 9 aa, synthetic construct
  source 1..9: note = Seed: LVVVGADGV (KRAS G12D)
WVVLGPDGS

SEQ ID NO: 8763 - protein, 9 aa, synthetic construct
  source 1..9: note = Seed: LVVVGADGV (KRAS G12D)
WVVLGPDGV

SEQ ID NO: 8764 - protein, 9 aa, synthetic construct
  source 1..9: note = Seed: LVVVGADGV (KRAS G12D)
WVVLGSDGA

SEQ ID NO: 8765 - protein, 9 aa, synthetic construct
  source 1..9: note = Seed: LVVVGADGV (KRAS G12D)
WVVLGSDGI

SEQ ID NO: 8766 - protein, 9 aa, synthetic construct
  source 1..9: note = Seed: LVVVGADGV (KRAS G12D)
WVVLGSDGL

SEQ ID NO: 8767 - protein, 9 aa, synthetic construct
  source 1..9: note = Seed: LVVVGADGV (KRAS G12D)
WVVLGSDGM

SEQ ID NO: 8768 - protein, 9 aa, synthetic construct
  source 1..9: note = Seed: LVVVGADGV (KRAS G12D)
WVVLGSDGS

SEQ ID NO: 8769 - protein, 9 aa, synthetic construct
  source 1..9: note = Seed: LVVVGADGV (KRAS G12D)
WVVLGSDGT

SEQ ID NO: 8770 - protein, 9 aa, synthetic construct
  source 1..9: note = Seed: LVVVGADGV (KRAS G12D)
WVVLGSDGV

SEQ ID NO: 8771 - protein, 9 aa, synthetic construct
  source 1..9: note = Seed: LVVVGADGV (KRAS G12D)
WVVLGTDGA

SEQ ID NO: 8772 - protein, 9 aa, synthetic construct
  source 1..9: note = Seed: LVVVGADGV (KRAS G12D)
WVVLGTDGI

SEQ ID NO: 8773 - protein, 9 aa, synthetic construct
  source 1..9: note = Seed: LVVVGADGV (KRAS G12D)
WVVLGTDGL

SEQ ID NO: 8774 - protein, 9 aa, synthetic construct
  source 1..9: note = Seed: LVVVGADGV (KRAS G12D)
WVVLGTDGM

SEQ ID NO: 8775 - protein, 9 aa, synthetic construct
  source 1..9: note = Seed: LVVVGADGV (KRAS G12D)
WVVLGTDGS

SEQ ID NO: 8776 - protein, 9 aa, synthetic construct
  source 1..9: note = Seed: LVVVGADGV (KRAS G12D)
WVVLGTDGT

SEQ ID NO: 8777 - protein, 9 aa, synthetic construct
  source 1..9: note = Seed: LVVVGADGV (KRAS G12D)
WVVLGTDGV

SEQ ID NO: 8778 - protein, 9 aa, synthetic construct
  source 1..9: note = Seed: LVVVGADGV (KRAS G12D)
WVVLGVDGA

SEQ ID NO: 8779 - protein, 9 aa, synthetic construct
  source 1..9: note = Seed: LVVVGADGV (KRAS G12D)
WVVLGVDGI

SEQ ID NO: 8780 - protein, 9 aa, synthetic construct
  source 1..9: note = Seed: LVVVGADGV (KRAS G12D)
WVVLGVDGL

SEQ ID NO: 8781 - protein, 9 aa, synthetic construct
  source 1..9: note = Seed: LVVVGADGV (KRAS G12D)
WVVLGVDGM

SEQ ID NO: 8782 - protein, 9 aa, synthetic construct
  source 1..9: note = Seed: LVVVGADGV (KRAS G12D)
WVVLGVDGN

SEQ ID NO: 8783 - protein, 9 aa, synthetic construct
  source 1..9: note = Seed: LVVVGADGV (KRAS G12D)
WVVLGVDGS

SEQ ID NO: 8784 - protein, 9 aa, synthetic construct
  source 1..9: note = Seed: LVVVGADGV (KRAS G12D)
WVVLGVDGV

SEQ ID NO: 8785 - protein, 9 aa, synthetic construct
  source 1..9: note = Seed: LVVVGADGV (KRAS G12D)
WVVMGADGA

SEQ ID NO: 8786 - protein, 9 aa, synthetic construct
  source 1..9: note = Seed: LVVVGADGV (KRAS G12D)
WVVMGADGI

SEQ ID NO: 8787 - protein, 9 aa, synthetic construct
  source 1..9: note = Seed: LVVVGADGV (KRAS G12D)
WVVMGADGL

SEQ ID NO: 8788 - protein, 9 aa, synthetic construct
  source 1..9: note = Seed: LVVVGADGV (KRAS G12D)
WVVMGADGM

SEQ ID NO: 8789 - protein, 9 aa, synthetic construct
  source 1..9: note = Seed: LVVVGADGV (KRAS G12D)
WVVMGADGN

SEQ ID NO: 8790 - protein, 9 aa, synthetic construct
  source 1..9: note = Seed: LVVVGADGV (KRAS G12D)
WVVMGADGS

SEQ ID NO: 8791 - protein, 9 aa, synthetic construct
  source 1..9: note = Seed: LVVVGADGV (KRAS G12D)
WVVMGADGT

SEQ ID NO: 8792 - protein, 9 aa, synthetic construct
  source 1..9: note = Seed: LVVVGADGV (KRAS G12D)
WVVMGADGV

SEQ ID NO: 8793 - protein, 9 aa, synthetic construct
  source 1..9: note = Seed: LVVVGADGV (KRAS G12D)
WVVMGGDGA

SEQ ID NO: 8794 - protein, 9 aa, synthetic construct
  source 1..9: note = Seed: LVVVGADGV (KRAS G12D)
WVVMGGDGI

SEQ ID NO: 8795 - protein, 9 aa, synthetic construct
  source 1..9: note = Seed: LVVVGADGV (KRAS G12D)
WVVMGGDGL

SEQ ID NO: 8796 - protein, 9 aa, synthetic construct
  source 1..9: note = Seed: LVVVGADGV (KRAS G12D)
WVVMGGDGM

SEQ ID NO: 8797 - protein, 9 aa, synthetic construct
  source 1..9: note = Seed: LVVVGADGV (KRAS G12D)
WVVMGGDGS

SEQ ID NO: 8798 - protein, 9 aa, synthetic construct
  source 1..9: note = Seed: LVVVGADGV (KRAS G12D)
WVVMGGDGT

SEQ ID NO: 8799 - protein, 9 aa, synthetic construct
  source 1..9: note = Seed: LVVVGADGV (KRAS G12D)
WVVMGGDGV

SEQ ID NO: 8800 - protein, 9 aa, synthetic construct
  source 1..9: note = Seed: LVVVGADGV (KRAS G12D)
WVVMGIDGA

SEQ ID NO: 8801 - protein, 9 aa, synthetic construct
  source 1..9: note = Seed: LVVVGADGV (KRAS G12D)
WVVMGIDGL

SEQ ID NO: 8802 - protein, 9 aa, synthetic construct
  source 1..9: note = Seed: LVVVGADGV (KRAS G12D)
WVVMGIDGM

SEQ ID NO: 8803 - protein, 9 aa, synthetic construct
  source 1..9: note = Seed: LVVVGADGV (KRAS G12D)
WVVMGIDGN

SEQ ID NO: 8804 - protein, 9 aa, synthetic construct
  source 1..9: note = Seed: LVVVGADGV (KRAS G12D)
WVVMGIDGS

SEQ ID NO: 8805 - protein, 9 aa, synthetic construct
  source 1..9: note = Seed: LVVVGADGV (KRAS G12D)
WVVMGIDGV

SEQ ID NO: 8806 - protein, 9 aa, synthetic construct
  source 1..9: note = Seed: LVVVGADGV (KRAS G12D)
WVVMGNDGA

SEQ ID NO: 8807 - protein, 9 aa, synthetic construct
  source 1..9: note = Seed: LVVVGADGV (KRAS G12D)
WVVMGNDGI

SEQ ID NO: 8808 - protein, 9 aa, synthetic construct
  source 1..9: note = Seed: LVVVGADGV (KRAS G12D)
WVVMGNDGL

SEQ ID NO: 8809 - protein, 9 aa, synthetic construct
  source 1..9: note = Seed: LVVVGADGV (KRAS G12D)
WVVMGNDGM

SEQ ID NO: 8810 - protein, 9 aa, synthetic construct
  source 1..9: note = Seed: LVVVGADGV (KRAS G12D)
WVVMGNDGV

SEQ ID NO: 8811 - protein, 9 aa, synthetic construct
  source 1..9: note = Seed: LVVVGADGV (KRAS G12D)
WVVMGPDGA

SEQ ID NO: 8812 - protein, 9 aa, synthetic construct
  source 1..9: note = Seed: LVVVGADGV (KRAS G12D)
WVVMGPDGI

SEQ ID NO: 8813 - protein, 9 aa, synthetic construct
  source 1..9: note = Seed: LVVVGADGV (KRAS G12D)
WVVMGPDGL

SEQ ID NO: 8814 - protein, 9 aa, synthetic construct
  source 1..9: note = Seed: LVVVGADGV (KRAS G12D)
WVVMGPDGM

SEQ ID NO: 8815 - protein, 9 aa, synthetic construct
  source 1..9: note = Seed: LVVVGADGV (KRAS G12D)
WVVMGPDGV

SEQ ID NO: 8816 - protein, 9 aa, synthetic construct
  source 1..9: note = Seed: LVVVGADGV (KRAS G12D)
WVVMGSDGA

SEQ ID NO: 8817 - protein, 9 aa, synthetic construct
  source 1..9: note = Seed: LVVVGADGV (KRAS G12D)
WVVMGSDGI

SEQ ID NO: 8818 - protein, 9 aa, synthetic construct
  source 1..9: note = Seed: LVVVGADGV (KRAS G12D)
WVVMGSDGL

SEQ ID NO: 8819 - protein, 9 aa, synthetic construct
  source 1..9: note = Seed: LVVVGADGV (KRAS G12D)
WVVMGSDGM

SEQ ID NO: 8820 - protein, 9 aa, synthetic construct
  source 1..9: note = Seed: LVVVGADGV (KRAS G12D)
WVVMGSDGS

SEQ ID NO: 8821 - protein, 9 aa, synthetic construct
  source 1..9: note = Seed: LVVVGADGV (KRAS G12D)
WVVMGSDGT

SEQ ID NO: 8822 - protein, 9 aa, synthetic construct
  source 1..9: note = Seed: LVVVGADGV (KRAS G12D)
WVVMGSDGV

SEQ ID NO: 8823 - protein, 9 aa, synthetic construct
  source 1..9: note = Seed: LVVVGADGV (KRAS G12D)
WVVMGTDGA

SEQ ID NO: 8824 - protein, 9 aa, synthetic construct
  source 1..9: note = Seed: LVVVGADGV (KRAS G12D)
WVVMGTDGI

SEQ ID NO: 8825 - protein, 9 aa, synthetic construct
  source 1..9: note = Seed: LVVVGADGV (KRAS G12D)
WVVMGTDGL

SEQ ID NO: 8826 - protein, 9 aa, synthetic construct
  source 1..9: note = Seed: LVVVGADGV (KRAS G12D)
WVVMGTDGM

SEQ ID NO: 8827 - protein, 9 aa, synthetic construct
  source 1..9: note = Seed: LVVVGADGV (KRAS G12D)
WVVMGTDGS

SEQ ID NO: 8828 - protein, 9 aa, synthetic construct
  source 1..9: note = Seed: LVVVGADGV (KRAS G12D)
WVVMGTDGV

SEQ ID NO: 8829 - protein, 9 aa, synthetic construct
  source 1..9: note = Seed: LVVVGADGV (KRAS G12D)
WVVMGVDGA

SEQ ID NO: 8830 - protein, 9 aa, synthetic construct
  source 1..9: note = Seed: LVVVGADGV (KRAS G12D)
WVVMGVDGI

SEQ ID NO: 8831 - protein, 9 aa, synthetic construct
  source 1..9: note = Seed: LVVVGADGV (KRAS G12D)
WVVMGVDGL

SEQ ID NO: 8832 - protein, 9 aa, synthetic construct
  source 1..9: note = Seed: LVVVGADGV (KRAS G12D)
WVVMGVDGM

SEQ ID NO: 8833 - protein, 9 aa, synthetic construct
  source 1..9: note = Seed: LVVVGADGV (KRAS G12D)
WVVMGVDGN

SEQ ID NO: 8834 - protein, 9 aa, synthetic construct
  source 1..9: note = Seed: LVVVGADGV (KRAS G12D)
WVVMGVDGS

SEQ ID NO: 8835 - protein, 9 aa, synthetic construct
  source 1..9: note = Seed: LVVVGADGV (KRAS G12D)
WVVMGVDGV

SEQ ID NO: 8836 - protein, 9 aa, synthetic construct
  source 1..9: note = Seed: LVVVGADGV (KRAS G12D)
WVVNGADGI

SEQ ID NO: 8837 - protein, 9 aa, synthetic construct
  source 1..9: note = Seed: LVVVGADGV (KRAS G12D)
WVVQGADGI

SEQ ID NO: 8838 - protein, 9 aa, synthetic construct
  source 1..9: note = Seed: LVVVGADGV (KRAS G12D)
WVVQGADGL

SEQ ID NO: 8839 - protein, 9 aa, synthetic construct
  source 1..9: note = Seed: LVVVGADGV (KRAS G12D)
WVVQGADGV

SEQ ID NO: 8840 - protein, 9 aa, synthetic construct
  source 1..9: note = Seed: LVVVGADGV (KRAS G12D)
WVVSGADGL

SEQ ID NO: 8841 - protein, 9 aa, synthetic construct
  source 1..9: note = Seed: LVVVGADGV (KRAS G12D)
WVVVGADGA

SEQ ID NO: 8842 - protein, 9 aa, synthetic construct
  source 1..9: note = Seed: LVVVGADGV (KRAS G12D)
WVVVGADGI

SEQ ID NO: 8843 - protein, 9 aa, synthetic construct
  source 1..9: note = Seed: LVVVGADGV (KRAS G12D)
WVVVGADGL

SEQ ID NO: 8844 - protein, 9 aa, synthetic construct
  source 1..9: note = Seed: LVVVGADGV (KRAS G12D)
WVVVGADGS

SEQ ID NO: 8845 - protein, 9 aa, synthetic construct
  source 1..9: note = Seed: LVVVGADGV (KRAS G12D)
WVVVGADGV

SEQ ID NO: 8846 - protein, 9 aa, synthetic construct
  source 1..9: note = Seed: LVVVGADGV (KRAS G12D)
WVVVGGDGA

SEQ ID NO: 8847 - protein, 9 aa, synthetic construct
  source 1..9: note = Seed: LVVVGADGV (KRAS G12D)
WVVVGGDGI

SEQ ID NO: 8848 - protein, 9 aa, synthetic construct
  source 1..9: note = Seed: LVVVGADGV (KRAS G12D)
WVVVGGDGL

SEQ ID NO: 8849 - protein, 9 aa, synthetic construct
  source 1..9: note = Seed: LVVVGADGV (KRAS G12D)
WVVVGGDGV

SEQ ID NO: 8850 - protein, 9 aa, synthetic construct
  source 1..9: note = Seed: LVVVGADGV (KRAS G12D)
WVVVGIDGA

SEQ ID NO: 8851 - protein, 9 aa, synthetic construct
  source 1..9: note = Seed: LVVVGADGV (KRAS G12D)
WVVVGPDGA

SEQ ID NO: 8852 - protein, 9 aa, synthetic construct
  source 1..9: note = Seed: LVVVGADGV (KRAS G12D)
WVVVGSDGA

SEQ ID NO: 8853 - protein, 9 aa, synthetic construct
  source 1..9: note = Seed: LVVVGADGV (KRAS G12D)
WVVVGSDGI

SEQ ID NO: 8854 - protein, 9 aa, synthetic construct
  source 1..9: note = Seed: LVVVGADGV (KRAS G12D)
WVVVGSDGL

SEQ ID NO: 8855 - protein, 9 aa, synthetic construct
  source 1..9: note = Seed: LVVVGADGV (KRAS G12D)
WVVVGSDGV

SEQ ID NO: 8856 - protein, 9 aa, synthetic construct
  source 1..9: note = Seed: LVVVGADGV (KRAS G12D)
WVVVGVDGA

SEQ ID NO: 8857 - protein, 9 aa, synthetic construct
  source 1..9: note = Seed: LVVVGADGV (KRAS G12D)
YVVAGADGA

SEQ ID NO: 8858 - protein, 9 aa, synthetic construct
  source 1..9: note = Seed: LVVVGADGV (KRAS G12D)
YVVAGADGE

SEQ ID NO: 8859 - protein, 9 aa, synthetic construct
  source 1..9: note = Seed: LVVVGADGV (KRAS G12D)
YVVAGADGG

SEQ ID NO: 8860 - protein, 9 aa, synthetic construct
  source 1..9: note = Seed: LVVVGADGV (KRAS G12D)
YVVAGADGH

SEQ ID NO: 8861 - protein, 9 aa, synthetic construct
  source 1..9: note = Seed: LVVVGADGV (KRAS G12D)
YVVAGADGI

SEQ ID NO: 8862 - protein, 9 aa, synthetic construct
  source 1..9: note = Seed: LVVVGADGV (KRAS G12D)
YVVAGADGL

SEQ ID NO: 8863 - protein, 9 aa, synthetic construct
  source 1..9: note = Seed: LVVVGADGV (KRAS G12D)
YVVAGADGM

SEQ ID NO: 8864 - protein, 9 aa, synthetic construct
  source 1..9: note = Seed: LVVVGADGV (KRAS G12D)
YVVAGADGN

SEQ ID NO: 8865 - protein, 9 aa, synthetic construct
  source 1..9: note = Seed: LVVVGADGV (KRAS G12D)
YVVAGADGQ

SEQ ID NO: 8866 - protein, 9 aa, synthetic construct
  source 1..9: note = Seed: LVVVGADGV (KRAS G12D)
YVVAGADGS

SEQ ID NO: 8867 - protein, 9 aa, synthetic construct
  source 1..9: note = Seed: LVVVGADGV (KRAS G12D)
YVVAGADGT

SEQ ID NO: 8868 - protein, 9 aa, synthetic construct
  source 1..9: note = Seed: LVVVGADGV (KRAS G12D)
YVVAGADGV

SEQ ID NO: 8869 - protein, 9 aa, synthetic construct
  source 1..9: note = Seed: LVVVGADGV (KRAS G12D)
YVVAGGDGA

SEQ ID NO: 8870 - protein, 9 aa, synthetic construct
  source 1..9: note = Seed: LVVVGADGV (KRAS G12D)
YVVAGGDGI

SEQ ID NO: 8871 - protein, 9 aa, synthetic construct
  source 1..9: note = Seed: LVVVGADGV (KRAS G12D)
YVVAGGDGL

SEQ ID NO: 8872 - protein, 9 aa, synthetic construct
  source 1..9: note = Seed: LVVVGADGV (KRAS G12D)
YVVAGGDGM

SEQ ID NO: 8873 - protein, 9 aa, synthetic construct
  source 1..9: note = Seed: LVVVGADGV (KRAS G12D)
YVVAGGDGV

SEQ ID NO: 8874 - protein, 9 aa, synthetic construct
  source 1..9: note = Seed: LVVVGADGV (KRAS G12D)
YVVAGIDGA

SEQ ID NO: 8875 - protein, 9 aa, synthetic construct
  source 1..9: note = Seed: LVVVGADGV (KRAS G12D)
YVVAGIDGG

SEQ ID NO: 8876 - protein, 9 aa, synthetic construct
  source 1..9: note = Seed: LVVVGADGV (KRAS G12D)
YVVAGIDGI

SEQ ID NO: 8877 - protein, 9 aa, synthetic construct
  source 1..9: note = Seed: LVVVGADGV (KRAS G12D)
YVVAGIDGL

SEQ ID NO: 8878 - protein, 9 aa, synthetic construct
  source 1..9: note = Seed: LVVVGADGV (KRAS G12D)
YVVAGIDGM

SEQ ID NO: 8879 - protein, 9 aa, synthetic construct
  source 1..9: note = Seed: LVVVGADGV (KRAS G12D)
YVVAGIDGN

SEQ ID NO: 8880 - protein, 9 aa, synthetic construct
  source 1..9: note = Seed: LVVVGADGV (KRAS G12D)
YVVAGIDGQ

SEQ ID NO: 8881 - protein, 9 aa, synthetic construct
  source 1..9: note = Seed: LVVVGADGV (KRAS G12D)
YVVAGIDGS

SEQ ID NO: 8882 - protein, 9 aa, synthetic construct
  source 1..9: note = Seed: LVVVGADGV (KRAS G12D)
YVVAGIDGT

SEQ ID NO: 8883 - protein, 9 aa, synthetic construct
  source 1..9: note = Seed: LVVVGADGV (KRAS G12D)
YVVAGIDGV

SEQ ID NO: 8884 - protein, 9 aa, synthetic construct
  source 1..9: note = Seed: LVVVGADGV (KRAS G12D)
YVVAGLDGA

SEQ ID NO: 8885 - protein, 9 aa, synthetic construct
  source 1..9: note = Seed: LVVVGADGV (KRAS G12D)
YVVAGLDGI

SEQ ID NO: 8886 - protein, 9 aa, synthetic construct
  source 1..9: note = Seed: LVVVGADGV (KRAS G12D)
YVVAGLDGL

SEQ ID NO: 8887 - protein, 9 aa, synthetic construct
  source 1..9: note = Seed: LVVVGADGV (KRAS G12D)
YVVAGLDGM

SEQ ID NO: 8888 - protein, 9 aa, synthetic construct
  source 1..9: note = Seed: LVVVGADGV (KRAS G12D)
YVVAGLDGN

SEQ ID NO: 8889 - protein, 9 aa, synthetic construct
  source 1..9: note = Seed: LVVVGADGV (KRAS G12D)
YVVAGLDGS

SEQ ID NO: 8890 - protein, 9 aa, synthetic construct
  source 1..9: note = Seed: LVVVGADGV (KRAS G12D)
YVVAGLDGT

SEQ ID NO: 8891 - protein, 9 aa, synthetic construct
  source 1..9: note = Seed: LVVVGADGV (KRAS G12D)
YVVAGLDGV

SEQ ID NO: 8892 - protein, 9 aa, synthetic construct
  source 1..9: note = Seed: LVVVGADGV (KRAS G12D)
YVVAGMDGA

SEQ ID NO: 8893 - protein, 9 aa, synthetic construct
  source 1..9: note = Seed: LVVVGADGV (KRAS G12D)
YVVAGMDGI

SEQ ID NO: 8894 - protein, 9 aa, synthetic construct
  source 1..9: note = Seed: LVVVGADGV (KRAS G12D)
YVVAGMDGL

SEQ ID NO: 8895 - protein, 9 aa, synthetic construct
  source 1..9: note = Seed: LVVVGADGV (KRAS G12D)
YVVAGMDGM

SEQ ID NO: 8896 - protein, 9 aa, synthetic construct
  source 1..9: note = Seed: LVVVGADGV (KRAS G12D)
YVVAGMDGN

SEQ ID NO: 8897 - protein, 9 aa, synthetic construct
  source 1..9: note = Seed: LVVVGADGV (KRAS G12D)
YVVAGMDGQ

SEQ ID NO: 8898 - protein, 9 aa, synthetic construct
  source 1..9: note = Seed: LVVVGADGV (KRAS G12D)
YVVAGMDGS

SEQ ID NO: 8899 - protein, 9 aa, synthetic construct
  source 1..9: note = Seed: LVVVGADGV (KRAS G12D)
YVVAGMDGT

SEQ ID NO: 8900 - protein, 9 aa, synthetic construct
  source 1..9: note = Seed: LVVVGADGV (KRAS G12D)
YVVAGMDGV

SEQ ID NO: 8901 - protein, 9 aa, synthetic construct
  source 1..9: note = Seed: LVVVGADGV (KRAS G12D)
YVVAGNDGA

SEQ ID NO: 8902 - protein, 9 aa, synthetic construct
  source 1..9: note = Seed: LVVVGADGV (KRAS G12D)
YVVAGNDGI

SEQ ID NO: 8903 - protein, 9 aa, synthetic construct
  source 1..9: note = Seed: LVVVGADGV (KRAS G12D)
YVVAGNDGL

SEQ ID NO: 8904 - protein, 9 aa, synthetic construct
  source 1..9: note = Seed: LVVVGADGV (KRAS G12D)
YVVAGNDGN

SEQ ID NO: 8905 - protein, 9 aa, synthetic construct
  source 1..9: note = Seed: LVVVGADGV (KRAS G12D)
YVVAGNDGS

SEQ ID NO: 8906 - protein, 9 aa, synthetic construct
  source 1..9: note = Seed: LVVVGADGV (KRAS G12D)
YVVAGNDGV

SEQ ID NO: 8907 - protein, 9 aa, synthetic construct
  source 1..9: note = Seed: LVVVGADGV (KRAS G12D)
YVVAGPDGA

SEQ ID NO: 8908 - protein, 9 aa, synthetic construct
  source 1..9: note = Seed: LVVVGADGV (KRAS G12D)
YVVAGPDGI

SEQ ID NO: 8909 - protein, 9 aa, synthetic construct
  source 1..9: note = Seed: LVVVGADGV (KRAS G12D)
YVVAGPDGL

SEQ ID NO: 8910 - protein, 9 aa, synthetic construct
  source 1..9: note = Seed: LVVVGADGV (KRAS G12D)
YVVAGPDGM

SEQ ID NO: 8911 - protein, 9 aa, synthetic construct
  source 1..9: note = Seed: LVVVGADGV (KRAS G12D)
YVVAGPDGN

SEQ ID NO: 8912 - protein, 9 aa, synthetic construct
  source 1..9: note = Seed: LVVVGADGV (KRAS G12D)
YVVAGPDGQ

SEQ ID NO: 8913 - protein, 9 aa, synthetic construct
  source 1..9: note = Seed: LVVVGADGV (KRAS G12D)
YVVAGPDGS

SEQ ID NO: 8914 - protein, 9 aa, synthetic construct
  source 1..9: note = Seed: LVVVGADGV (KRAS G12D)
YVVAGPDGT

SEQ ID NO: 8915 - protein, 9 aa, synthetic construct
  source 1..9: note = Seed: LVVVGADGV (KRAS G12D)
YVVAGPDGV

SEQ ID NO: 8916 - protein, 9 aa, synthetic construct
  source 1..9: note = Seed: LVVVGADGV (KRAS G12D)
YVVAGSDGA

SEQ ID NO: 8917 - protein, 9 aa, synthetic construct
  source 1..9: note = Seed: LVVVGADGV (KRAS G12D)
YVVAGSDGI

SEQ ID NO: 8918 - protein, 9 aa, synthetic construct
  source 1..9: note = Seed: LVVVGADGV (KRAS G12D)
YVVAGSDGL

SEQ ID NO: 8919 - protein, 9 aa, synthetic construct
  source 1..9: note = Seed: LVVVGADGV (KRAS G12D)
YVVAGSDGM

SEQ ID NO: 8920 - protein, 9 aa, synthetic construct
  source 1..9: note = Seed: LVVVGADGV (KRAS G12D)
YVVAGSDGN

SEQ ID NO: 8921 - protein, 9 aa, synthetic construct
  source 1..9: note = Seed: LVVVGADGV (KRAS G12D)
YVVAGSDGQ

SEQ ID NO: 8922 - protein, 9 aa, synthetic construct
  source 1..9: note = Seed: LVVVGADGV (KRAS G12D)
YVVAGSDGS

SEQ ID NO: 8923 - protein, 9 aa, synthetic construct
  source 1..9: note = Seed: LVVVGADGV (KRAS G12D)
YVVAGSDGT

SEQ ID NO: 8924 - protein, 9 aa, synthetic construct
  source 1..9: note = Seed: LVVVGADGV (KRAS G12D)
YVVAGSDGV

SEQ ID NO: 8925 - protein, 9 aa, synthetic construct
  source 1..9: note = Seed: LVVVGADGV (KRAS G12D)
YVVAGTDGA

SEQ ID NO: 8926 - protein, 9 aa, synthetic construct
  source 1..9: note = Seed: LVVVGADGV (KRAS G12D)
YVVAGTDGI

SEQ ID NO: 8927 - protein, 9 aa, synthetic construct
  source 1..9: note = Seed: LVVVGADGV (KRAS G12D)
YVVAGTDGL

SEQ ID NO: 8928 - protein, 9 aa, synthetic construct
  source 1..9: note = Seed: LVVVGADGV (KRAS G12D)
YVVAGTDGM

SEQ ID NO: 8929 - protein, 9 aa, synthetic construct
  source 1..9: note = Seed: LVVVGADGV (KRAS G12D)
YVVAGTDGN

SEQ ID NO: 8930 - protein, 9 aa, synthetic construct
  source 1..9: note = Seed: LVVVGADGV (KRAS G12D)
YVVAGTDGQ

SEQ ID NO: 8931 - protein, 9 aa, synthetic construct
  source 1..9: note = Seed: LVVVGADGV (KRAS G12D)
YVVAGTDGS

SEQ ID NO: 8932 - protein, 9 aa, synthetic construct
  source 1..9: note = Seed: LVVVGADGV (KRAS G12D)
YVVAGTDGT

SEQ ID NO: 8933 - protein, 9 aa, synthetic construct
  source 1..9: note = Seed: LVVVGADGV (KRAS G12D)
YVVAGTDGV

SEQ ID NO: 8934 - protein, 9 aa, synthetic construct
  source 1..9: note = Seed: LVVVGADGV (KRAS G12D)
YVVAGVDGA

SEQ ID NO: 8935 - protein, 9 aa, synthetic construct
  source 1..9: note = Seed: LVVVGADGV (KRAS G12D)
YVVAGVDGG

SEQ ID NO: 8936 - protein, 9 aa, synthetic construct
  source 1..9: note = Seed: LVVVGADGV (KRAS G12D)
YVVAGVDGH

SEQ ID NO: 8937 - protein, 9 aa, synthetic construct
  source 1..9: note = Seed: LVVVGADGV (KRAS G12D)
YVVAGVDGI

SEQ ID NO: 8938 - protein, 9 aa, synthetic construct
  source 1..9: note = Seed: LVVVGADGV (KRAS G12D)
YVVAGVDGL

SEQ ID NO: 8939 - protein, 9 aa, synthetic construct
  source 1..9: note = Seed: LVVVGADGV (KRAS G12D)
YVVAGVDGM

SEQ ID NO: 8940 - protein, 9 aa, synthetic construct
  source 1..9: note = Seed: LVVVGADGV (KRAS G12D)
YVVAGVDGN

SEQ ID NO: 8941 - protein, 9 aa, synthetic construct
  source 1..9: note = Seed: LVVVGADGV (KRAS G12D)
YVVAGVDGQ

SEQ ID NO: 8942 - protein, 9 aa, synthetic construct
  source 1..9: note = Seed: LVVVGADGV (KRAS G12D)
YVVAGVDGS

SEQ ID NO: 8943 - protein, 9 aa, synthetic construct
  source 1..9: note = Seed: LVVVGADGV (KRAS G12D)
YVVAGVDGT

SEQ ID NO: 8944 - protein, 9 aa, synthetic construct
  source 1..9: note = Seed: LVVVGADGV (KRAS G12D)
YVVAGVDGV

SEQ ID NO: 8945 - protein, 9 aa, synthetic construct
  source 1..9: note = Seed: LVVVGADGV (KRAS G12D)
YVVDGNDGA

SEQ ID NO: 8946 - protein, 9 aa, synthetic construct
  source 1..9: note = Seed: LVVVGADGV (KRAS G12D)
YVVEGADGL

SEQ ID NO: 8947 - protein, 9 aa, synthetic construct
  source 1..9: note = Seed: LVVVGADGV (KRAS G12D)
YVVFGADGA

SEQ ID NO: 8948 - protein, 9 aa, synthetic construct
  source 1..9: note = Seed: LVVVGADGV (KRAS G12D)
YVVFGADGI

SEQ ID NO: 8949 - protein, 9 aa, synthetic construct
  source 1..9: note = Seed: LVVVGADGV (KRAS G12D)
YVVFGADGL

SEQ ID NO: 8950 - protein, 9 aa, synthetic construct
  source 1..9: note = Seed: LVVVGADGV (KRAS G12D)
YVVFGADGM

SEQ ID NO: 8951 - protein, 9 aa, synthetic construct
  source 1..9: note = Seed: LVVVGADGV (KRAS G12D)
YVVFGADGN

SEQ ID NO: 8952 - protein, 9 aa, synthetic construct
  source 1..9: note = Seed: LVVVGADGV (KRAS G12D)
YVVFGADGS

SEQ ID NO: 8953 - protein, 9 aa, synthetic construct
  source 1..9: note = Seed: LVVVGADGV (KRAS G12D)
YVVFGADGV

SEQ ID NO: 8954 - protein, 9 aa, synthetic construct
  source 1..9: note = Seed: LVVVGADGV (KRAS G12D)
YVVFGGDGA

SEQ ID NO: 8955 - protein, 9 aa, synthetic construct
  source 1..9: note = Seed: LVVVGADGV (KRAS G12D)
YVVFGGDGI

SEQ ID NO: 8956 - protein, 9 aa, synthetic construct
  source 1..9: note = Seed: LVVVGADGV (KRAS G12D)
YVVFGGDGL

SEQ ID NO: 8957 - protein, 9 aa, synthetic construct
  source 1..9: note = Seed: LVVVGADGV (KRAS G12D)
YVVFGGDGV

SEQ ID NO: 8958 - protein, 9 aa, synthetic construct
  source 1..9: note = Seed: LVVVGADGV (KRAS G12D)
YVVFGIDGA

SEQ ID NO: 8959 - protein, 9 aa, synthetic construct
  source 1..9: note = Seed: LVVVGADGV (KRAS G12D)
YVVFGNDGA

SEQ ID NO: 8960 - protein, 9 aa, synthetic construct
  source 1..9: note = Seed: LVVVGADGV (KRAS G12D)
YVVFGNDGI

SEQ ID NO: 8961 - protein, 9 aa, synthetic construct
  source 1..9: note = Seed: LVVVGADGV (KRAS G12D)
YVVFGNDGL

SEQ ID NO: 8962 - protein, 9 aa, synthetic construct
  source 1..9: note = Seed: LVVVGADGV (KRAS G12D)
YVVFGNDGV

SEQ ID NO: 8963 - protein, 9 aa, synthetic construct
  source 1..9: note = Seed: LVVVGADGV (KRAS G12D)
YVVFGPDGA

SEQ ID NO: 8964 - protein, 9 aa, synthetic construct
  source 1..9: note = Seed: LVVVGADGV (KRAS G12D)
YVVFGPDGL

SEQ ID NO: 8965 - protein, 9 aa, synthetic construct
  source 1..9: note = Seed: LVVVGADGV (KRAS G12D)
YVVFGPDGV

SEQ ID NO: 8966 - protein, 9 aa, synthetic construct
  source 1..9: note = Seed: LVVVGADGV (KRAS G12D)
YVVFGSDGA

SEQ ID NO: 8967 - protein, 9 aa, synthetic construct
  source 1..9: note = Seed: LVVVGADGV (KRAS G12D)
YVVFGSDGI

SEQ ID NO: 8968 - protein, 9 aa, synthetic construct
  source 1..9: note = Seed: LVVVGADGV (KRAS G12D)
YVVFGSDGL

SEQ ID NO: 8969 - protein, 9 aa, synthetic construct
  source 1..9: note = Seed: LVVVGADGV (KRAS G12D)
YVVFGSDGV

SEQ ID NO: 8970 - protein, 9 aa, synthetic construct
  source 1..9: note = Seed: LVVVGADGV (KRAS G12D)
YVVFGTDGA

SEQ ID NO: 8971 - protein, 9 aa, synthetic construct
  source 1..9: note = Seed: LVVVGADGV (KRAS G12D)
YVVFGTDGL

SEQ ID NO: 8972 - protein, 9 aa, synthetic construct
  source 1..9: note = Seed: LVVVGADGV (KRAS G12D)
YVVFGVDGA

SEQ ID NO: 8973 - protein, 9 aa, synthetic construct
  source 1..9: note = Seed: LVVVGADGV (KRAS G12D)
YVVGGADGL

SEQ ID NO: 8974 - protein, 9 aa, synthetic construct
  source 1..9: note = Seed: LVVVGADGV (KRAS G12D)
YVVIGADGA

SEQ ID NO: 8975 - protein, 9 aa, synthetic construct
  source 1..9: note = Seed: LVVVGADGV (KRAS G12D)
YVVIGADGF

SEQ ID NO: 8976 - protein, 9 aa, synthetic construct
  source 1..9: note = Seed: LVVVGADGV (KRAS G12D)
YVVIGADGG

SEQ ID NO: 8977 - protein, 9 aa, synthetic construct
  source 1..9: note = Seed: LVVVGADGV (KRAS G12D)
YVVIGADGH

SEQ ID NO: 8978 - protein, 9 aa, synthetic construct
  source 1..9: note = Seed: LVVVGADGV (KRAS G12D)
YVVIGADGI

SEQ ID NO: 8979 - protein, 9 aa, synthetic construct
  source 1..9: note = Seed: LVVVGADGV (KRAS G12D)
YVVIGADGK

SEQ ID NO: 8980 - protein, 9 aa, synthetic construct
  source 1..9: note = Seed: LVVVGADGV (KRAS G12D)
YVVIGADGL

SEQ ID NO: 8981 - protein, 9 aa, synthetic construct
  source 1..9: note = Seed: LVVVGADGV (KRAS G12D)
YVVIGADGM

SEQ ID NO: 8982 - protein, 9 aa, synthetic construct
  source 1..9: note = Seed: LVVVGADGV (KRAS G12D)
YVVIGADGN

SEQ ID NO: 8983 - protein, 9 aa, synthetic construct
  source 1..9: note = Seed: LVVVGADGV (KRAS G12D)
YVVIGADGP

SEQ ID NO: 8984 - protein, 9 aa, synthetic construct
  source 1..9: note = Seed: LVVVGADGV (KRAS G12D)
YVVIGADGQ

SEQ ID NO: 8985 - protein, 9 aa, synthetic construct
  source 1..9: note = Seed: LVVVGADGV (KRAS G12D)
YVVIGADGR

SEQ ID NO: 8986 - protein, 9 aa, synthetic construct
  source 1..9: note = Seed: LVVVGADGV (KRAS G12D)
YVVIGADGS

SEQ ID NO: 8987 - protein, 9 aa, synthetic construct
  source 1..9: note = Seed: LVVVGADGV (KRAS G12D)
YVVIGADGT

SEQ ID NO: 8988 - protein, 9 aa, synthetic construct
  source 1..9: note = Seed: LVVVGADGV (KRAS G12D)
YVVIGADGV

SEQ ID NO: 8989 - protein, 9 aa, synthetic construct
  source 1..9: note = Seed: LVVVGADGV (KRAS G12D)
YVVIGADGY

SEQ ID NO: 8990 - protein, 9 aa, synthetic construct
  source 1..9: note = Seed: LVVVGADGV (KRAS G12D)
YVVIGGDGA

SEQ ID NO: 8991 - protein, 9 aa, synthetic construct
  source 1..9: note = Seed: LVVVGADGV (KRAS G12D)
YVVIGGDGI

SEQ ID NO: 8992 - protein, 9 aa, synthetic construct
  source 1..9: note = Seed: LVVVGADGV (KRAS G12D)
YVVIGGDGL

SEQ ID NO: 8993 - protein, 9 aa, synthetic construct
  source 1..9: note = Seed: LVVVGADGV (KRAS G12D)
YVVIGGDGM

SEQ ID NO: 8994 - protein, 9 aa, synthetic construct
  source 1..9: note = Seed: LVVVGADGV (KRAS G12D)
YVVIGGDGS

SEQ ID NO: 8995 - protein, 9 aa, synthetic construct
  source 1..9: note = Seed: LVVVGADGV (KRAS G12D)
YVVIGGDGT

SEQ ID NO: 8996 - protein, 9 aa, synthetic construct
  source 1..9: note = Seed: LVVVGADGV (KRAS G12D)
YVVIGGDGV

SEQ ID NO: 8997 - protein, 9 aa, synthetic construct
  source 1..9: note = Seed: LVVVGADGV (KRAS G12D)
YVVIGIDGA

SEQ ID NO: 8998 - protein, 9 aa, synthetic construct
  source 1..9: note = Seed: LVVVGADGV (KRAS G12D)
YVVIGIDGG

SEQ ID NO: 8999 - protein, 9 aa, synthetic construct
  source 1..9: note = Seed: LVVVGADGV (KRAS G12D)
YVVIGIDGH

SEQ ID NO: 9000 - protein, 9 aa, synthetic construct
  source 1..9: note = Seed: LVVVGADGV (KRAS G12D)
YVVIGIDGI

SEQ ID NO: 9001 - protein, 9 aa, synthetic construct
  source 1..9: note = Seed: LVVVGADGV (KRAS G12D)
YVVIGIDGL

SEQ ID NO: 9002 - protein, 9 aa, synthetic construct
  source 1..9: note = Seed: LVVVGADGV (KRAS G12D)
YVVIGIDGM

SEQ ID NO: 9003 - protein, 9 aa, synthetic construct
  source 1..9: note = Seed: LVVVGADGV (KRAS G12D)
YVVIGIDGN

SEQ ID NO: 9004 - protein, 9 aa, synthetic construct
  source 1..9: note = Seed: LVVVGADGV (KRAS G12D)
YVVIGIDGQ

SEQ ID NO: 9005 - protein, 9 aa, synthetic construct
  source 1..9: note = Seed: LVVVGADGV (KRAS G12D)
YVVIGIDGS

SEQ ID NO: 9006 - protein, 9 aa, synthetic construct
  source 1..9: note = Seed: LVVVGADGV (KRAS G12D)
YVVIGIDGT

SEQ ID NO: 9007 - protein, 9 aa, synthetic construct
  source 1..9: note = Seed: LVVVGADGV (KRAS G12D)
YVVIGIDGV

SEQ ID NO: 9008 - protein, 9 aa, synthetic construct
  source 1..9: note = Seed: LVVVGADGV (KRAS G12D)
YVVIGLDGA

SEQ ID NO: 9009 - protein, 9 aa, synthetic construct
  source 1..9: note = Seed: LVVVGADGV (KRAS G12D)
YVVIGLDGH

SEQ ID NO: 9010 - protein, 9 aa, synthetic construct
  source 1..9: note = Seed: LVVVGADGV (KRAS G12D)
YVVIGLDGI

SEQ ID NO: 9011 - protein, 9 aa, synthetic construct
  source 1..9: note = Seed: LVVVGADGV (KRAS G12D)
YVVIGLDGL

SEQ ID NO: 9012 - protein, 9 aa, synthetic construct
  source 1..9: note = Seed: LVVVGADGV (KRAS G12D)
YVVIGLDGM

SEQ ID NO: 9013 - protein, 9 aa, synthetic construct
  source 1..9: note = Seed: LVVVGADGV (KRAS G12D)
YVVIGLDGN

SEQ ID NO: 9014 - protein, 9 aa, synthetic construct
  source 1..9: note = Seed: LVVVGADGV (KRAS G12D)
YVVIGLDGS

SEQ ID NO: 9015 - protein, 9 aa, synthetic construct
  source 1..9: note = Seed: LVVVGADGV (KRAS G12D)
YVVIGLDGT

SEQ ID NO: 9016 - protein, 9 aa, synthetic construct
  source 1..9: note = Seed: LVVVGADGV (KRAS G12D)
YVVIGLDGV

SEQ ID NO: 9017 - protein, 9 aa, synthetic construct
  source 1..9: note = Seed: LVVVGADGV (KRAS G12D)
YVVIGMDGA

SEQ ID NO: 9018 - protein, 9 aa, synthetic construct
  source 1..9: note = Seed: LVVVGADGV (KRAS G12D)
YVVIGMDGH

SEQ ID NO: 9019 - protein, 9 aa, synthetic construct
  source 1..9: note = Seed: LVVVGADGV (KRAS G12D)
YVVIGMDGI

SEQ ID NO: 9020 - protein, 9 aa, synthetic construct
  source 1..9: note = Seed: LVVVGADGV (KRAS G12D)
YVVIGMDGL

SEQ ID NO: 9021 - protein, 9 aa, synthetic construct
  source 1..9: note = Seed: LVVVGADGV (KRAS G12D)
YVVIGMDGM

SEQ ID NO: 9022 - protein, 9 aa, synthetic construct
  source 1..9: note = Seed: LVVVGADGV (KRAS G12D)
YVVIGMDGN

SEQ ID NO: 9023 - protein, 9 aa, synthetic construct
  source 1..9: note = Seed: LVVVGADGV (KRAS G12D)
YVVIGMDGQ

SEQ ID NO: 9024 - protein, 9 aa, synthetic construct
  source 1..9: note = Seed: LVVVGADGV (KRAS G12D)
YVVIGMDGS

SEQ ID NO: 9025 - protein, 9 aa, synthetic construct
  source 1..9: note = Seed: LVVVGADGV (KRAS G12D)
YVVIGMDGT

SEQ ID NO: 9026 - protein, 9 aa, synthetic construct
  source 1..9: note = Seed: LVVVGADGV (KRAS G12D)
YVVIGMDGV

SEQ ID NO: 9027 - protein, 9 aa, synthetic construct
  source 1..9: note = Seed: LVVVGADGV (KRAS G12D)
YVVIGNDGA

SEQ ID NO: 9028 - protein, 9 aa, synthetic construct
  source 1..9: note = Seed: LVVVGADGV (KRAS G12D)
YVVIGNDGD

SEQ ID NO: 9029 - protein, 9 aa, synthetic construct
  source 1..9: note = Seed: LVVVGADGV (KRAS G12D)
YVVIGNDGI

SEQ ID NO: 9030 - protein, 9 aa, synthetic construct
  source 1..9: note = Seed: LVVVGADGV (KRAS G12D)
YVVIGNDGL

SEQ ID NO: 9031 - protein, 9 aa, synthetic construct
  source 1..9: note = Seed: LVVVGADGV (KRAS G12D)
YVVIGNDGM

SEQ ID NO: 9032 - protein, 9 aa, synthetic construct
  source 1..9: note = Seed: LVVVGADGV (KRAS G12D)
YVVIGNDGN

SEQ ID NO: 9033 - protein, 9 aa, synthetic construct
  source 1..9: note = Seed: LVVVGADGV (KRAS G12D)
YVVIGNDGS

SEQ ID NO: 9034 - protein, 9 aa, synthetic construct
  source 1..9: note = Seed: LVVVGADGV (KRAS G12D)
YVVIGNDGT

SEQ ID NO: 9035 - protein, 9 aa, synthetic construct
  source 1..9: note = Seed: LVVVGADGV (KRAS G12D)
YVVIGNDGV

SEQ ID NO: 9036 - protein, 9 aa, synthetic construct
  source 1..9: note = Seed: LVVVGADGV (KRAS G12D)
YVVIGPDGA

SEQ ID NO: 9037 - protein, 9 aa, synthetic construct
  source 1..9: note = Seed: LVVVGADGV (KRAS G12D)
YVVIGPDGF

SEQ ID NO: 9038 - protein, 9 aa, synthetic construct
  source 1..9: note = Seed: LVVVGADGV (KRAS G12D)
YVVIGPDGH

SEQ ID NO: 9039 - protein, 9 aa, synthetic construct
  source 1..9: note = Seed: LVVVGADGV (KRAS G12D)
YVVIGPDGI

SEQ ID NO: 9040 - protein, 9 aa, synthetic construct
  source 1..9: note = Seed: LVVVGADGV (KRAS G12D)
YVVIGPDGL

SEQ ID NO: 9041 - protein, 9 aa, synthetic construct
  source 1..9: note = Seed: LVVVGADGV (KRAS G12D)
YVVIGPDGM

SEQ ID NO: 9042 - protein, 9 aa, synthetic construct
  source 1..9: note = Seed: LVVVGADGV (KRAS G12D)
YVVIGPDGN

SEQ ID NO: 9043 - protein, 9 aa, synthetic construct
  source 1..9: note = Seed: LVVVGADGV (KRAS G12D)
YVVIGPDGQ

SEQ ID NO: 9044 - protein, 9 aa, synthetic construct
  source 1..9: note = Seed: LVVVGADGV (KRAS G12D)
YVVIGPDGS

SEQ ID NO: 9045 - protein, 9 aa, synthetic construct
  source 1..9: note = Seed: LVVVGADGV (KRAS G12D)
YVVIGPDGT

SEQ ID NO: 9046 - protein, 9 aa, synthetic construct
  source 1..9: note = Seed: LVVVGADGV (KRAS G12D)
YVVIGPDGV

SEQ ID NO: 9047 - protein, 9 aa, synthetic construct
  source 1..9: note = Seed: LVVVGADGV (KRAS G12D)
YVVIGSDGA

SEQ ID NO: 9048 - protein, 9 aa, synthetic construct
  source 1..9: note = Seed: LVVVGADGV (KRAS G12D)
YVVIGSDGI

SEQ ID NO: 9049 - protein, 9 aa, synthetic construct
  source 1..9: note = Seed: LVVVGADGV (KRAS G12D)
YVVIGSDGL

SEQ ID NO: 9050 - protein, 9 aa, synthetic construct
  source 1..9: note = Seed: LVVVGADGV (KRAS G12D)
YVVIGSDGM

SEQ ID NO: 9051 - protein, 9 aa, synthetic construct
  source 1..9: note = Seed: LVVVGADGV (KRAS G12D)
YVVIGSDGN

SEQ ID NO: 9052 - protein, 9 aa, synthetic construct
  source 1..9: note = Seed: LVVVGADGV (KRAS G12D)
YVVIGSDGQ

SEQ ID NO: 9053 - protein, 9 aa, synthetic construct
  source 1..9: note = Seed: LVVVGADGV (KRAS G12D)
YVVIGSDGS

SEQ ID NO: 9054 - protein, 9 aa, synthetic construct
  source 1..9: note = Seed: LVVVGADGV (KRAS G12D)
YVVIGSDGT

SEQ ID NO: 9055 - protein, 9 aa, synthetic construct
  source 1..9: note = Seed: LVVVGADGV (KRAS G12D)
YVVIGSDGV

SEQ ID NO: 9056 - protein, 9 aa, synthetic construct
  source 1..9: note = Seed: LVVVGADGV (KRAS G12D)
YVVIGTDGA

SEQ ID NO: 9057 - protein, 9 aa, synthetic construct
  source 1..9: note = Seed: LVVVGADGV (KRAS G12D)
YVVIGTDGH

SEQ ID NO: 9058 - protein, 9 aa, synthetic construct
  source 1..9: note = Seed: LVVVGADGV (KRAS G12D)
YVVIGTDGI

SEQ ID NO: 9059 - protein, 9 aa, synthetic construct
  source 1..9: note = Seed: LVVVGADGV (KRAS G12D)
YVVIGTDGL

SEQ ID NO: 9060 - protein, 9 aa, synthetic construct
  source 1..9: note = Seed: LVVVGADGV (KRAS G12D)
YVVIGTDGM

SEQ ID NO: 9061 - protein, 9 aa, synthetic construct
  source 1..9: note = Seed: LVVVGADGV (KRAS G12D)
YVVIGTDGN

SEQ ID NO: 9062 - protein, 9 aa, synthetic construct
  source 1..9: note = Seed: LVVVGADGV (KRAS G12D)
YVVIGTDGS

SEQ ID NO: 9063 - protein, 9 aa, synthetic construct
  source 1..9: note = Seed: LVVVGADGV (KRAS G12D)
YVVIGTDGT

SEQ ID NO: 9064 - protein, 9 aa, synthetic construct
  source 1..9: note = Seed: LVVVGADGV (KRAS G12D)
YVVIGTDGV

SEQ ID NO: 9065 - protein, 9 aa, synthetic construct
  source 1..9: note = Seed: LVVVGADGV (KRAS G12D)
YVVIGVDGA

SEQ ID NO: 9066 - protein, 9 aa, synthetic construct
  source 1..9: note = Seed: LVVVGADGV (KRAS G12D)
YVVIGVDGG

SEQ ID NO: 9067 - protein, 9 aa, synthetic construct
  source 1..9: note = Seed: LVVVGADGV (KRAS G12D)
YVVIGVDGH

SEQ ID NO: 9068 - protein, 9 aa, synthetic construct
  source 1..9: note = Seed: LVVVGADGV (KRAS G12D)
YVVIGVDGI

SEQ ID NO: 9069 - protein, 9 aa, synthetic construct
  source 1..9: note = Seed: LVVVGADGV (KRAS G12D)
YVVIGVDGL

SEQ ID NO: 9070 - protein, 9 aa, synthetic construct
  source 1..9: note = Seed: LVVVGADGV (KRAS G12D)
YVVIGVDGM

SEQ ID NO: 9071 - protein, 9 aa, synthetic construct
  source 1..9: note = Seed: LVVVGADGV (KRAS G12D)
YVVIGVDGN

SEQ ID NO: 9072 - protein, 9 aa, synthetic construct
  source 1..9: note = Seed: LVVVGADGV (KRAS G12D)
YVVIGVDGQ

SEQ ID NO: 9073 - protein, 9 aa, synthetic construct
  source 1..9: note = Seed: LVVVGADGV (KRAS G12D)
YVVIGVDGS

SEQ ID NO: 9074 - protein, 9 aa, synthetic construct
  source 1..9: note = Seed: LVVVGADGV (KRAS G12D)
YVVIGVDGT

SEQ ID NO: 9075 - protein, 9 aa, synthetic construct
  source 1..9: note = Seed: LVVVGADGV (KRAS G12D)
YVVIGVDGV

SEQ ID NO: 9076 - protein, 9 aa, synthetic construct
  source 1..9: note = Seed: LVVVGADGV (KRAS G12D)
YVVLGADGA

SEQ ID NO: 9077 - protein, 9 aa, synthetic construct
  source 1..9: note = Seed: LVVVGADGV (KRAS G12D)
YVVLGADGC

SEQ ID NO: 9078 - protein, 9 aa, synthetic construct
  source 1..9: note = Seed: LVVVGADGV (KRAS G12D)
YVVLGADGF

SEQ ID NO: 9079 - protein, 9 aa, synthetic construct
  source 1..9: note = Seed: LVVVGADGV (KRAS G12D)
YVVLGADGG

SEQ ID NO: 9080 - protein, 9 aa, synthetic construct
  source 1..9: note = Seed: LVVVGADGV (KRAS G12D)
YVVLGADGH

SEQ ID NO: 9081 - protein, 9 aa, synthetic construct
  source 1..9: note = Seed: LVVVGADGV (KRAS G12D)
YVVLGADGM

SEQ ID NO: 9082 - protein, 9 aa, synthetic construct
  source 1..9: note = Seed: LVVVGADGV (KRAS G12D)
YVVLGADGN

SEQ ID NO: 9083 - protein, 9 aa, synthetic construct
  source 1..9: note = Seed: LVVVGADGV (KRAS G12D)
YVVLGADGP

SEQ ID NO: 9084 - protein, 9 aa, synthetic construct
  source 1..9: note = Seed: LVVVGADGV (KRAS G12D)
YVVLGADGQ

SEQ ID NO: 9085 - protein, 9 aa, synthetic construct
  source 1..9: note = Seed: LVVVGADGV (KRAS G12D)
YVVLGADGS

SEQ ID NO: 9086 - protein, 9 aa, synthetic construct
  source 1..9: note = Seed: LVVVGADGV (KRAS G12D)
YVVLGADGT

SEQ ID NO: 9087 - protein, 9 aa, synthetic construct
  source 1..9: note = Seed: LVVVGADGV (KRAS G12D)
YVVLGADGY

SEQ ID NO: 9088 - protein, 9 aa, synthetic construct
  source 1..9: note = Seed: LVVVGADGV (KRAS G12D)
YVVLGGDGA

SEQ ID NO: 9089 - protein, 9 aa, synthetic construct
  source 1..9: note = Seed: LVVVGADGV (KRAS G12D)
YVVLGGDGC

SEQ ID NO: 9090 - protein, 9 aa, synthetic construct
  source 1..9: note = Seed: LVVVGADGV (KRAS G12D)
YVVLGGDGF

SEQ ID NO: 9091 - protein, 9 aa, synthetic construct
  source 1..9: note = Seed: LVVVGADGV (KRAS G12D)
YVVLGGDGG

SEQ ID NO: 9092 - protein, 9 aa, synthetic construct
  source 1..9: note = Seed: LVVVGADGV (KRAS G12D)
YVVLGGDGI

SEQ ID NO: 9093 - protein, 9 aa, synthetic construct
  source 1..9: note = Seed: LVVVGADGV (KRAS G12D)
YVVLGGDGM

SEQ ID NO: 9094 - protein, 9 aa, synthetic construct
  source 1..9: note = Seed: LVVVGADGV (KRAS G12D)
YVVLGGDGS

SEQ ID NO: 9095 - protein, 9 aa, synthetic construct
  source 1..9: note = Seed: LVVVGADGV (KRAS G12D)
YVVLGGDGT

SEQ ID NO: 9096 - protein, 9 aa, synthetic construct
  source 1..9: note = Seed: LVVVGADGV (KRAS G12D)
YVVLGGDGV

SEQ ID NO: 9097 - protein, 9 aa, synthetic construct
  source 1..9: note = Seed: LVVVGADGV (KRAS G12D)
YVVLGHDGL

SEQ ID NO: 9098 - protein, 9 aa, synthetic construct
  source 1..9: note = Seed: LVVVGADGV (KRAS G12D)
YVVLGIDGA

SEQ ID NO: 9099 - protein, 9 aa, synthetic construct
  source 1..9: note = Seed: LVVVGADGV (KRAS G12D)
YVVLGIDGG

SEQ ID NO: 9100 - protein, 9 aa, synthetic construct
  source 1..9: note = Seed: LVVVGADGV (KRAS G12D)
YVVLGIDGH

SEQ ID NO: 9101 - protein, 9 aa, synthetic construct
  source 1..9: note = Seed: LVVVGADGV (KRAS G12D)
YVVLGIDGI

SEQ ID NO: 9102 - protein, 9 aa, synthetic construct
  source 1..9: note = Seed: LVVVGADGV (KRAS G12D)
YVVLGIDGL

SEQ ID NO: 9103 - protein, 9 aa, synthetic construct
  source 1..9: note = Seed: LVVVGADGV (KRAS G12D)
YVVLGIDGM

SEQ ID NO: 9104 - protein, 9 aa, synthetic construct
  source 1..9: note = Seed: LVVVGADGV (KRAS G12D)
YVVLGIDGN

SEQ ID NO: 9105 - protein, 9 aa, synthetic construct
  source 1..9: note = Seed: LVVVGADGV (KRAS G12D)
YVVLGIDGQ

SEQ ID NO: 9106 - protein, 9 aa, synthetic construct
  source 1..9: note = Seed: LVVVGADGV (KRAS G12D)
YVVLGIDGS

SEQ ID NO: 9107 - protein, 9 aa, synthetic construct
  source 1..9: note = Seed: LVVVGADGV (KRAS G12D)
YVVLGIDGT

SEQ ID NO: 9108 - protein, 9 aa, synthetic construct
  source 1..9: note = Seed: LVVVGADGV (KRAS G12D)
YVVLGIDGV

SEQ ID NO: 9109 - protein, 9 aa, synthetic construct
  source 1..9: note = Seed: LVVVGADGV (KRAS G12D)
YVVLGLDGA

SEQ ID NO: 9110 - protein, 9 aa, synthetic construct
  source 1..9: note = Seed: LVVVGADGV (KRAS G12D)
YVVLGLDGI

SEQ ID NO: 9111 - protein, 9 aa, synthetic construct
  source 1..9: note = Seed: LVVVGADGV (KRAS G12D)
YVVLGLDGL

SEQ ID NO: 9112 - protein, 9 aa, synthetic construct
  source 1..9: note = Seed: LVVVGADGV (KRAS G12D)
YVVLGLDGM

SEQ ID NO: 9113 - protein, 9 aa, synthetic construct
  source 1..9: note = Seed: LVVVGADGV (KRAS G12D)
YVVLGLDGN

SEQ ID NO: 9114 - protein, 9 aa, synthetic construct
  source 1..9: note = Seed: LVVVGADGV (KRAS G12D)
YVVLGLDGS

SEQ ID NO: 9115 - protein, 9 aa, synthetic construct
  source 1..9: note = Seed: LVVVGADGV (KRAS G12D)
YVVLGLDGV

SEQ ID NO: 9116 - protein, 9 aa, synthetic construct
  source 1..9: note = Seed: LVVVGADGV (KRAS G12D)
YVVLGMDGA

SEQ ID NO: 9117 - protein, 9 aa, synthetic construct
  source 1..9: note = Seed: LVVVGADGV (KRAS G12D)
YVVLGMDGI

SEQ ID NO: 9118 - protein, 9 aa, synthetic construct
  source 1..9: note = Seed: LVVVGADGV (KRAS G12D)
YVVLGMDGL

SEQ ID NO: 9119 - protein, 9 aa, synthetic construct
  source 1..9: note = Seed: LVVVGADGV (KRAS G12D)
YVVLGMDGM

SEQ ID NO: 9120 - protein, 9 aa, synthetic construct
  source 1..9: note = Seed: LVVVGADGV (KRAS G12D)
YVVLGMDGN

SEQ ID NO: 9121 - protein, 9 aa, synthetic construct
  source 1..9: note = Seed: LVVVGADGV (KRAS G12D)
YVVLGMDGS

SEQ ID NO: 9122 - protein, 9 aa, synthetic construct
  source 1..9: note = Seed: LVVVGADGV (KRAS G12D)
YVVLGMDGV

SEQ ID NO: 9123 - protein, 9 aa, synthetic construct
  source 1..9: note = Seed: LVVVGADGV (KRAS G12D)
YVVLGNDGA

SEQ ID NO: 9124 - protein, 9 aa, synthetic construct
  source 1..9: note = Seed: LVVVGADGV (KRAS G12D)
YVVLGNDGI

SEQ ID NO: 9125 - protein, 9 aa, synthetic construct
  source 1..9: note = Seed: LVVVGADGV (KRAS G12D)
YVVLGNDGL

SEQ ID NO: 9126 - protein, 9 aa, synthetic construct
  source 1..9: note = Seed: LVVVGADGV (KRAS G12D)
YVVLGNDGM

SEQ ID NO: 9127 - protein, 9 aa, synthetic construct
  source 1..9: note = Seed: LVVVGADGV (KRAS G12D)
YVVLGNDGN

SEQ ID NO: 9128 - protein, 9 aa, synthetic construct
  source 1..9: note = Seed: LVVVGADGV (KRAS G12D)
YVVLGNDGS

SEQ ID NO: 9129 - protein, 9 aa, synthetic construct
  source 1..9: note = Seed: LVVVGADGV (KRAS G12D)
YVVLGNDGT

SEQ ID NO: 9130 - protein, 9 aa, synthetic construct
  source 1..9: note = Seed: LVVVGADGV (KRAS G12D)
YVVLGNDGV

SEQ ID NO: 9131 - protein, 9 aa, synthetic construct
  source 1..9: note = Seed: LVVVGADGV (KRAS G12D)
YVVLGPDGA

SEQ ID NO: 9132 - protein, 9 aa, synthetic construct
  source 1..9: note = Seed: LVVVGADGV (KRAS G12D)
YVVLGPDGI

SEQ ID NO: 9133 - protein, 9 aa, synthetic construct
  source 1..9: note = Seed: LVVVGADGV (KRAS G12D)
YVVLGPDGL

SEQ ID NO: 9134 - protein, 9 aa, synthetic construct
  source 1..9: note = Seed: LVVVGADGV (KRAS G12D)
YVVLGPDGM

SEQ ID NO: 9135 - protein, 9 aa, synthetic construct
  source 1..9: note = Seed: LVVVGADGV (KRAS G12D)
YVVLGPDGN

SEQ ID NO: 9136 - protein, 9 aa, synthetic construct
  source 1..9: note = Seed: LVVVGADGV (KRAS G12D)
YVVLGPDGS

SEQ ID NO: 9137 - protein, 9 aa, synthetic construct
  source 1..9: note = Seed: LVVVGADGV (KRAS G12D)
YVVLGPDGT

SEQ ID NO: 9138 - protein, 9 aa, synthetic construct
  source 1..9: note = Seed: LVVVGADGV (KRAS G12D)
YVVLGPDGV

SEQ ID NO: 9139 - protein, 9 aa, synthetic construct
  source 1..9: note = Seed: LVVVGADGV (KRAS G12D)
YVVLGSDGA

SEQ ID NO: 9140 - protein, 9 aa, synthetic construct
  source 1..9: note = Seed: LVVVGADGV (KRAS G12D)
YVVLGSDGC

SEQ ID NO: 9141 - protein, 9 aa, synthetic construct
  source 1..9: note = Seed: LVVVGADGV (KRAS G12D)
YVVLGSDGF

SEQ ID NO: 9142 - protein, 9 aa, synthetic construct
  source 1..9: note = Seed: LVVVGADGV (KRAS G12D)
YVVLGSDGG

SEQ ID NO: 9143 - protein, 9 aa, synthetic construct
  source 1..9: note = Seed: LVVVGADGV (KRAS G12D)
YVVLGSDGH

SEQ ID NO: 9144 - protein, 9 aa, synthetic construct
  source 1..9: note = Seed: LVVVGADGV (KRAS G12D)
YVVLGSDGI

SEQ ID NO: 9145 - protein, 9 aa, synthetic construct
  source 1..9: note = Seed: LVVVGADGV (KRAS G12D)
YVVLGSDGM

SEQ ID NO: 9146 - protein, 9 aa, synthetic construct
  source 1..9: note = Seed: LVVVGADGV (KRAS G12D)
YVVLGSDGN

SEQ ID NO: 9147 - protein, 9 aa, synthetic construct
  source 1..9: note = Seed: LVVVGADGV (KRAS G12D)
YVVLGSDGS

SEQ ID NO: 9148 - protein, 9 aa, synthetic construct
  source 1..9: note = Seed: LVVVGADGV (KRAS G12D)
YVVLGSDGT

SEQ ID NO: 9149 - protein, 9 aa, synthetic construct
  source 1..9: note = Seed: LVVVGADGV (KRAS G12D)
YVVLGTDGA

SEQ ID NO: 9150 - protein, 9 aa, synthetic construct
  source 1..9: note = Seed: LVVVGADGV (KRAS G12D)
YVVLGTDGH

SEQ ID NO: 9151 - protein, 9 aa, synthetic construct
  source 1..9: note = Seed: LVVVGADGV (KRAS G12D)
YVVLGTDGI

SEQ ID NO: 9152 - protein, 9 aa, synthetic construct
  source 1..9: note = Seed: LVVVGADGV (KRAS G12D)
YVVLGTDGL

SEQ ID NO: 9153 - protein, 9 aa, synthetic construct
  source 1..9: note = Seed: LVVVGADGV (KRAS G12D)
YVVLGTDGM

SEQ ID NO: 9154 - protein, 9 aa, synthetic construct
  source 1..9: note = Seed: LVVVGADGV (KRAS G12D)
YVVLGTDGN

SEQ ID NO: 9155 - protein, 9 aa, synthetic construct
  source 1..9: note = Seed: LVVVGADGV (KRAS G12D)
YVVLGTDGS

SEQ ID NO: 9156 - protein, 9 aa, synthetic construct
  source 1..9: note = Seed: LVVVGADGV (KRAS G12D)
YVVLGTDGT

SEQ ID NO: 9157 - protein, 9 aa, synthetic construct
  source 1..9: note = Seed: LVVVGADGV (KRAS G12D)
YVVLGTDGV

SEQ ID NO: 9158 - protein, 9 aa, synthetic construct
  source 1..9: note = Seed: LVVVGADGV (KRAS G12D)
YVVLGVDGA

SEQ ID NO: 9159 - protein, 9 aa, synthetic construct
  source 1..9: note = Seed: LVVVGADGV (KRAS G12D)
YVVLGVDGG

SEQ ID NO: 9160 - protein, 9 aa, synthetic construct
  source 1..9: note = Seed: LVVVGADGV (KRAS G12D)
YVVLGVDGH

SEQ ID NO: 9161 - protein, 9 aa, synthetic construct
  source 1..9: note = Seed: LVVVGADGV (KRAS G12D)
YVVLGVDGI

SEQ ID NO: 9162 - protein, 9 aa, synthetic construct
  source 1..9: note = Seed: LVVVGADGV (KRAS G12D)
YVVLGVDGL

SEQ ID NO: 9163 - protein, 9 aa, synthetic construct
  source 1..9: note = Seed: LVVVGADGV (KRAS G12D)
YVVLGVDGM

SEQ ID NO: 9164 - protein, 9 aa, synthetic construct
  source 1..9: note = Seed: LVVVGADGV (KRAS G12D)
YVVLGVDGN

SEQ ID NO: 9165 - protein, 9 aa, synthetic construct
  source 1..9: note = Seed: LVVVGADGV (KRAS G12D)
YVVLGVDGP

SEQ ID NO: 9166 - protein, 9 aa, synthetic construct
  source 1..9: note = Seed: LVVVGADGV (KRAS G12D)
YVVLGVDGQ

SEQ ID NO: 9167 - protein, 9 aa, synthetic construct
  source 1..9: note = Seed: LVVVGADGV (KRAS G12D)
YVVLGVDGS

SEQ ID NO: 9168 - protein, 9 aa, synthetic construct
  source 1..9: note = Seed: LVVVGADGV (KRAS G12D)
YVVLGVDGT

SEQ ID NO: 9169 - protein, 9 aa, synthetic construct
  source 1..9: note = Seed: LVVVGADGV (KRAS G12D)
YVVLGVDGV

SEQ ID NO: 9170 - protein, 9 aa, synthetic construct
  source 1..9: note = Seed: LVVVGADGV (KRAS G12D)
YVVMGADGA

SEQ ID NO: 9171 - protein, 9 aa, synthetic construct
  source 1..9: note = Seed: LVVVGADGV (KRAS G12D)
YVVMGADGC

SEQ ID NO: 9172 - protein, 9 aa, synthetic construct
  source 1..9: note = Seed: LVVVGADGV (KRAS G12D)
YVVMGADGF

SEQ ID NO: 9173 - protein, 9 aa, synthetic construct
  source 1..9: note = Seed: LVVVGADGV (KRAS G12D)
YVVMGADGG

SEQ ID NO: 9174 - protein, 9 aa, synthetic construct
  source 1..9: note = Seed: LVVVGADGV (KRAS G12D)
YVVMGADGH

SEQ ID NO: 9175 - protein, 9 aa, synthetic construct
  source 1..9: note = Seed: LVVVGADGV (KRAS G12D)
YVVMGADGI

SEQ ID NO: 9176 - protein, 9 aa, synthetic construct
  source 1..9: note = Seed: LVVVGADGV (KRAS G12D)
YVVMGADGM

SEQ ID NO: 9177 - protein, 9 aa, synthetic construct
  source 1..9: note = Seed: LVVVGADGV (KRAS G12D)
YVVMGADGN

SEQ ID NO: 9178 - protein, 9 aa, synthetic construct
  source 1..9: note = Seed: LVVVGADGV (KRAS G12D)
YVVMGADGP

SEQ ID NO: 9179 - protein, 9 aa, synthetic construct
  source 1..9: note = Seed: LVVVGADGV (KRAS G12D)
YVVMGADGQ

SEQ ID NO: 9180 - protein, 9 aa, synthetic construct
  source 1..9: note = Seed: LVVVGADGV (KRAS G12D)
YVVMGADGS

SEQ ID NO: 9181 - protein, 9 aa, synthetic construct
  source 1..9: note = Seed: LVVVGADGV (KRAS G12D)
YVVMGADGT

SEQ ID NO: 9182 - protein, 9 aa, synthetic construct
  source 1..9: note = Seed: LVVVGADGV (KRAS G12D)
YVVMGADGY

SEQ ID NO: 9183 - protein, 9 aa, synthetic construct
  source 1..9: note = Seed: LVVVGADGV (KRAS G12D)
YVVMGGDGA

SEQ ID NO: 9184 - protein, 9 aa, synthetic construct
  source 1..9: note = Seed: LVVVGADGV (KRAS G12D)
YVVMGGDGF

SEQ ID NO: 9185 - protein, 9 aa, synthetic construct
  source 1..9: note = Seed: LVVVGADGV (KRAS G12D)
YVVMGGDGI

SEQ ID NO: 9186 - protein, 9 aa, synthetic construct
  source 1..9: note = Seed: LVVVGADGV (KRAS G12D)
YVVMGGDGL

SEQ ID NO: 9187 - protein, 9 aa, synthetic construct
  source 1..9: note = Seed: LVVVGADGV (KRAS G12D)
YVVMGGDGM

SEQ ID NO: 9188 - protein, 9 aa, synthetic construct
  source 1..9: note = Seed: LVVVGADGV (KRAS G12D)
YVVMGGDGS

SEQ ID NO: 9189 - protein, 9 aa, synthetic construct
  source 1..9: note = Seed: LVVVGADGV (KRAS G12D)
YVVMGGDGT

SEQ ID NO: 9190 - protein, 9 aa, synthetic construct
  source 1..9: note = Seed: LVVVGADGV (KRAS G12D)
YVVMGGDGV

SEQ ID NO: 9191 - protein, 9 aa, synthetic construct
  source 1..9: note = Seed: LVVVGADGV (KRAS G12D)
YVVMGHDGL

SEQ ID NO: 9192 - protein, 9 aa, synthetic construct
  source 1..9: note = Seed: LVVVGADGV (KRAS G12D)
YVVMGIDGA

SEQ ID NO: 9193 - protein, 9 aa, synthetic construct
  source 1..9: note = Seed: LVVVGADGV (KRAS G12D)
YVVMGIDGG

SEQ ID NO: 9194 - protein, 9 aa, synthetic construct
  source 1..9: note = Seed: LVVVGADGV (KRAS G12D)
YVVMGIDGH

SEQ ID NO: 9195 - protein, 9 aa, synthetic construct
  source 1..9: note = Seed: LVVVGADGV (KRAS G12D)
YVVMGIDGI

SEQ ID NO: 9196 - protein, 9 aa, synthetic construct
  source 1..9: note = Seed: LVVVGADGV (KRAS G12D)
YVVMGIDGL

SEQ ID NO: 9197 - protein, 9 aa, synthetic construct
  source 1..9: note = Seed: LVVVGADGV (KRAS G12D)
YVVMGIDGM

SEQ ID NO: 9198 - protein, 9 aa, synthetic construct
  source 1..9: note = Seed: LVVVGADGV (KRAS G12D)
YVVMGIDGN

SEQ ID NO: 9199 - protein, 9 aa, synthetic construct
  source 1..9: note = Seed: LVVVGADGV (KRAS G12D)
YVVMGIDGQ

SEQ ID NO: 9200 - protein, 9 aa, synthetic construct
  source 1..9: note = Seed: LVVVGADGV (KRAS G12D)
YVVMGIDGS

SEQ ID NO: 9201 - protein, 9 aa, synthetic construct
  source 1..9: note = Seed: LVVVGADGV (KRAS G12D)
YVVMGIDGT

SEQ ID NO: 9202 - protein, 9 aa, synthetic construct
  source 1..9: note = Seed: LVVVGADGV (KRAS G12D)
YVVMGIDGV

SEQ ID NO: 9203 - protein, 9 aa, synthetic construct
  source 1..9: note = Seed: LVVVGADGV (KRAS G12D)
YVVMGLDGA

SEQ ID NO: 9204 - protein, 9 aa, synthetic construct
  source 1..9: note = Seed: LVVVGADGV (KRAS G12D)
YVVMGLDGI

SEQ ID NO: 9205 - protein, 9 aa, synthetic construct
  source 1..9: note = Seed: LVVVGADGV (KRAS G12D)
YVVMGLDGL

SEQ ID NO: 9206 - protein, 9 aa, synthetic construct
  source 1..9: note = Seed: LVVVGADGV (KRAS G12D)
YVVMGLDGM

SEQ ID NO: 9207 - protein, 9 aa, synthetic construct
  source 1..9: note = Seed: LVVVGADGV (KRAS G12D)
YVVMGLDGN

SEQ ID NO: 9208 - protein, 9 aa, synthetic construct
  source 1..9: note = Seed: LVVVGADGV (KRAS G12D)
YVVMGLDGS

SEQ ID NO: 9209 - protein, 9 aa, synthetic construct
  source 1..9: note = Seed: LVVVGADGV (KRAS G12D)
YVVMGLDGT

SEQ ID NO: 9210 - protein, 9 aa, synthetic construct
  source 1..9: note = Seed: LVVVGADGV (KRAS G12D)
YVVMGLDGV

SEQ ID NO: 9211 - protein, 9 aa, synthetic construct
  source 1..9: note = Seed: LVVVGADGV (KRAS G12D)
YVVMGMDGA

SEQ ID NO: 9212 - protein, 9 aa, synthetic construct
  source 1..9: note = Seed: LVVVGADGV (KRAS G12D)
YVVMGMDGH

SEQ ID NO: 9213 - protein, 9 aa, synthetic construct
  source 1..9: note = Seed: LVVVGADGV (KRAS G12D)
YVVMGMDGI

SEQ ID NO: 9214 - protein, 9 aa, synthetic construct
  source 1..9: note = Seed: LVVVGADGV (KRAS G12D)
YVVMGMDGL

SEQ ID NO: 9215 - protein, 9 aa, synthetic construct
  source 1..9: note = Seed: LVVVGADGV (KRAS G12D)
YVVMGMDGM

SEQ ID NO: 9216 - protein, 9 aa, synthetic construct
  source 1..9: note = Seed: LVVVGADGV (KRAS G12D)
YVVMGMDGN

SEQ ID NO: 9217 - protein, 9 aa, synthetic construct
  source 1..9: note = Seed: LVVVGADGV (KRAS G12D)
YVVMGMDGS

SEQ ID NO: 9218 - protein, 9 aa, synthetic construct
  source 1..9: note = Seed: LVVVGADGV (KRAS G12D)
YVVMGMDGT

SEQ ID NO: 9219 - protein, 9 aa, synthetic construct
  source 1..9: note = Seed: LVVVGADGV (KRAS G12D)
YVVMGMDGV

SEQ ID NO: 9220 - protein, 9 aa, synthetic construct
  source 1..9: note = Seed: LVVVGADGV (KRAS G12D)
YVVMGNDGA

SEQ ID NO: 9221 - protein, 9 aa, synthetic construct
  source 1..9: note = Seed: LVVVGADGV (KRAS G12D)
YVVMGNDGI

SEQ ID NO: 9222 - protein, 9 aa, synthetic construct
  source 1..9: note = Seed: LVVVGADGV (KRAS G12D)
YVVMGNDGL

SEQ ID NO: 9223 - protein, 9 aa, synthetic construct
  source 1..9: note = Seed: LVVVGADGV (KRAS G12D)
YVVMGNDGM

SEQ ID NO: 9224 - protein, 9 aa, synthetic construct
  source 1..9: note = Seed: LVVVGADGV (KRAS G12D)
YVVMGNDGN

SEQ ID NO: 9225 - protein, 9 aa, synthetic construct
  source 1..9: note = Seed: LVVVGADGV (KRAS G12D)
YVVMGNDGS

SEQ ID NO: 9226 - protein, 9 aa, synthetic construct
  source 1..9: note = Seed: LVVVGADGV (KRAS G12D)
YVVMGNDGT

SEQ ID NO: 9227 - protein, 9 aa, synthetic construct
  source 1..9: note = Seed: LVVVGADGV (KRAS G12D)
YVVMGNDGV

SEQ ID NO: 9228 - protein, 9 aa, synthetic construct
  source 1..9: note = Seed: LVVVGADGV (KRAS G12D)
YVVMGPDGA

SEQ ID NO: 9229 - protein, 9 aa, synthetic construct
  source 1..9: note = Seed: LVVVGADGV (KRAS G12D)
YVVMGPDGI

SEQ ID NO: 9230 - protein, 9 aa, synthetic construct
  source 1..9: note = Seed: LVVVGADGV (KRAS G12D)
YVVMGPDGL

SEQ ID NO: 9231 - protein, 9 aa, synthetic construct
  source 1..9: note = Seed: LVVVGADGV (KRAS G12D)
YVVMGPDGM

SEQ ID NO: 9232 - protein, 9 aa, synthetic construct
  source 1..9: note = Seed: LVVVGADGV (KRAS G12D)
YVVMGPDGN

SEQ ID NO: 9233 - protein, 9 aa, synthetic construct
  source 1..9: note = Seed: LVVVGADGV (KRAS G12D)
YVVMGPDGS

SEQ ID NO: 9234 - protein, 9 aa, synthetic construct
  source 1..9: note = Seed: LVVVGADGV (KRAS G12D)
YVVMGPDGT

SEQ ID NO: 9235 - protein, 9 aa, synthetic construct
  source 1..9: note = Seed: LVVVGADGV (KRAS G12D)
YVVMGPDGV

SEQ ID NO: 9236 - protein, 9 aa, synthetic construct
  source 1..9: note = Seed: LVVVGADGV (KRAS G12D)
YVVMGQDGL

SEQ ID NO: 9237 - protein, 9 aa, synthetic construct
  source 1..9: note = Seed: LVVVGADGV (KRAS G12D)
YVVMGSDGA

SEQ ID NO: 9238 - protein, 9 aa, synthetic construct
  source 1..9: note = Seed: LVVVGADGV (KRAS G12D)
YVVMGSDGF

SEQ ID NO: 9239 - protein, 9 aa, synthetic construct
  source 1..9: note = Seed: LVVVGADGV (KRAS G12D)
YVVMGSDGI

SEQ ID NO: 9240 - protein, 9 aa, synthetic construct
  source 1..9: note = Seed: LVVVGADGV (KRAS G12D)
YVVMGSDGL

SEQ ID NO: 9241 - protein, 9 aa, synthetic construct
  source 1..9: note = Seed: LVVVGADGV (KRAS G12D)
YVVMGSDGM

SEQ ID NO: 9242 - protein, 9 aa, synthetic construct
  source 1..9: note = Seed: LVVVGADGV (KRAS G12D)
YVVMGSDGN

SEQ ID NO: 9243 - protein, 9 aa, synthetic construct
  source 1..9: note = Seed: LVVVGADGV (KRAS G12D)
YVVMGSDGS

SEQ ID NO: 9244 - protein, 9 aa, synthetic construct
  source 1..9: note = Seed: LVVVGADGV (KRAS G12D)
YVVMGSDGT

SEQ ID NO: 9245 - protein, 9 aa, synthetic construct
  source 1..9: note = Seed: LVVVGADGV (KRAS G12D)
YVVMGSDGV

SEQ ID NO: 9246 - protein, 9 aa, synthetic construct
  source 1..9: note = Seed: LVVVGADGV (KRAS G12D)
YVVMGTDGA

SEQ ID NO: 9247 - protein, 9 aa, synthetic construct
  source 1..9: note = Seed: LVVVGADGV (KRAS G12D)
YVVMGTDGI

SEQ ID NO: 9248 - protein, 9 aa, synthetic construct
  source 1..9: note = Seed: LVVVGADGV (KRAS G12D)
YVVMGTDGL

SEQ ID NO: 9249 - protein, 9 aa, synthetic construct
  source 1..9: note = Seed: LVVVGADGV (KRAS G12D)
YVVMGTDGM

SEQ ID NO: 9250 - protein, 9 aa, synthetic construct
  source 1..9: note = Seed: LVVVGADGV (KRAS G12D)
YVVMGTDGN

SEQ ID NO: 9251 - protein, 9 aa, synthetic construct
  source 1..9: note = Seed: LVVVGADGV (KRAS G12D)
YVVMGTDGS

SEQ ID NO: 9252 - protein, 9 aa, synthetic construct
  source 1..9: note = Seed: LVVVGADGV (KRAS G12D)
YVVMGTDGT

SEQ ID NO: 9253 - protein, 9 aa, synthetic construct
  source 1..9: note = Seed: LVVVGADGV (KRAS G12D)
YVVMGTDGV

SEQ ID NO: 9254 - protein, 9 aa, synthetic construct
  source 1..9: note = Seed: LVVVGADGV (KRAS G12D)
YVVMGVDGA

SEQ ID NO: 9255 - protein, 9 aa, synthetic construct
  source 1..9: note = Seed: LVVVGADGV (KRAS G12D)
YVVMGVDGG

SEQ ID NO: 9256 - protein, 9 aa, synthetic construct
  source 1..9: note = Seed: LVVVGADGV (KRAS G12D)
YVVMGVDGH

SEQ ID NO: 9257 - protein, 9 aa, synthetic construct
  source 1..9: note = Seed: LVVVGADGV (KRAS G12D)
YVVMGVDGI

SEQ ID NO: 9258 - protein, 9 aa, synthetic construct
  source 1..9: note = Seed: LVVVGADGV (KRAS G12D)
YVVMGVDGL

SEQ ID NO: 9259 - protein, 9 aa, synthetic construct
  source 1..9: note = Seed: LVVVGADGV (KRAS G12D)
YVVMGVDGM

SEQ ID NO: 9260 - protein, 9 aa, synthetic construct
  source 1..9: note = Seed: LVVVGADGV (KRAS G12D)
YVVMGVDGN

SEQ ID NO: 9261 - protein, 9 aa, synthetic construct
  source 1..9: note = Seed: LVVVGADGV (KRAS G12D)
YVVMGVDGP

SEQ ID NO: 9262 - protein, 9 aa, synthetic construct
  source 1..9: note = Seed: LVVVGADGV (KRAS G12D)
YVVMGVDGQ

SEQ ID NO: 9263 - protein, 9 aa, synthetic construct
  source 1..9: note = Seed: LVVVGADGV (KRAS G12D)
YVVMGVDGS

SEQ ID NO: 9264 - protein, 9 aa, synthetic construct
  source 1..9: note = Seed: LVVVGADGV (KRAS G12D)
YVVMGVDGT

SEQ ID NO: 9265 - protein, 9 aa, synthetic construct
  source 1..9: note = Seed: LVVVGADGV (KRAS G12D)
YVVMGVDGV

SEQ ID NO: 9266 - protein, 9 aa, synthetic construct
  source 1..9: note = Seed: LVVVGADGV (KRAS G12D)
YVVMGVDGY

SEQ ID NO: 9267 - protein, 9 aa, synthetic construct
  source 1..9: note = Seed: LVVVGADGV (KRAS G12D)
YVVNGADGI

SEQ ID NO: 9268 - protein, 9 aa, synthetic construct
  source 1..9: note = Seed: LVVVGADGV (KRAS G12D)
YVVNGADGL

SEQ ID NO: 9269 - protein, 9 aa, synthetic construct
  source 1..9: note = Seed: LVVVGADGV (KRAS G12D)
YVVNGADGV

SEQ ID NO: 9270 - protein, 9 aa, synthetic construct
  source 1..9: note = Seed: LVVVGADGV (KRAS G12D)
YVVQGADGA

SEQ ID NO: 9271 - protein, 9 aa, synthetic construct
  source 1..9: note = Seed: LVVVGADGV (KRAS G12D)
YVVQGADGI

SEQ ID NO: 9272 - protein, 9 aa, synthetic construct
  source 1..9: note = Seed: LVVVGADGV (KRAS G12D)
YVVQGADGL

SEQ ID NO: 9273 - protein, 9 aa, synthetic construct
  source 1..9: note = Seed: LVVVGADGV (KRAS G12D)
YVVQGADGM

SEQ ID NO: 9274 - protein, 9 aa, synthetic construct
  source 1..9: note = Seed: LVVVGADGV (KRAS G12D)
YVVQGADGV

SEQ ID NO: 9275 - protein, 9 aa, synthetic construct
  source 1..9: note = Seed: LVVVGADGV (KRAS G12D)
YVVQGGDGI

SEQ ID NO: 9276 - protein, 9 aa, synthetic construct
  source 1..9: note = Seed: LVVVGADGV (KRAS G12D)
YVVQGGDGL

SEQ ID NO: 9277 - protein, 9 aa, synthetic construct
  source 1..9: note = Seed: LVVVGADGV (KRAS G12D)
YVVQGGDGV

SEQ ID NO: 9278 - protein, 9 aa, synthetic construct
  source 1..9: note = Seed: LVVVGADGV (KRAS G12D)
YVVQGSDGI

SEQ ID NO: 9279 - protein, 9 aa, synthetic construct
  source 1..9: note = Seed: LVVVGADGV (KRAS G12D)
YVVQGSDGL

SEQ ID NO: 9280 - protein, 9 aa, synthetic construct
  source 1..9: note = Seed: LVVVGADGV (KRAS G12D)
YVVQGSDGV

SEQ ID NO: 9281 - protein, 9 aa, synthetic construct
  source 1..9: note = Seed: LVVVGADGV (KRAS G12D)
YVVSGADGA

SEQ ID NO: 9282 - protein, 9 aa, synthetic construct
  source 1..9: note = Seed: LVVVGADGV (KRAS G12D)
YVVSGADGI

SEQ ID NO: 9283 - protein, 9 aa, synthetic construct
  source 1..9: note = Seed: LVVVGADGV (KRAS G12D)
YVVSGADGL

SEQ ID NO: 9284 - protein, 9 aa, synthetic construct
  source 1..9: note = Seed: LVVVGADGV (KRAS G12D)
YVVSGADGM

SEQ ID NO: 9285 - protein, 9 aa, synthetic construct
  source 1..9: note = Seed: LVVVGADGV (KRAS G12D)
YVVSGADGN

SEQ ID NO: 9286 - protein, 9 aa, synthetic construct
  source 1..9: note = Seed: LVVVGADGV (KRAS G12D)
YVVSGADGS

SEQ ID NO: 9287 - protein, 9 aa, synthetic construct
  source 1..9: note = Seed: LVVVGADGV (KRAS G12D)
YVVSGADGV

SEQ ID NO: 9288 - protein, 9 aa, synthetic construct
  source 1..9: note = Seed: LVVVGADGV (KRAS G12D)
YVVSGGDGL

SEQ ID NO: 9289 - protein, 9 aa, synthetic construct
  source 1..9: note = Seed: LVVVGADGV (KRAS G12D)
YVVSGIDGA

SEQ ID NO: 9290 - protein, 9 aa, synthetic construct
  source 1..9: note = Seed: LVVVGADGV (KRAS G12D)
YVVSGIDGL

SEQ ID NO: 9291 - protein, 9 aa, synthetic construct
  source 1..9: note = Seed: LVVVGADGV (KRAS G12D)
YVVSGIDGN

SEQ ID NO: 9292 - protein, 9 aa, synthetic construct
  source 1..9: note = Seed: LVVVGADGV (KRAS G12D)
YVVSGIDGS

SEQ ID NO: 9293 - protein, 9 aa, synthetic construct
  source 1..9: note = Seed: LVVVGADGV (KRAS G12D)
YVVSGLDGA

SEQ ID NO: 9294 - protein, 9 aa, synthetic construct
  source 1..9: note = Seed: LVVVGADGV (KRAS G12D)
YVVSGLDGL

SEQ ID NO: 9295 - protein, 9 aa, synthetic construct
  source 1..9: note = Seed: LVVVGADGV (KRAS G12D)
YVVSGNDGA

SEQ ID NO: 9296 - protein, 9 aa, synthetic construct
  source 1..9: note = Seed: LVVVGADGV (KRAS G12D)
YVVSGPDGA

SEQ ID NO: 9297 - protein, 9 aa, synthetic construct
  source 1..9: note = Seed: LVVVGADGV (KRAS G12D)
YVVSGSDGI

SEQ ID NO: 9298 - protein, 9 aa, synthetic construct
  source 1..9: note = Seed: LVVVGADGV (KRAS G12D)
YVVSGSDGL

SEQ ID NO: 9299 - protein, 9 aa, synthetic construct
  source 1..9: note = Seed: LVVVGADGV (KRAS G12D)
YVVSGVDGA

SEQ ID NO: 9300 - protein, 9 aa, synthetic construct
  source 1..9: note = Seed: LVVVGADGV (KRAS G12D)
YVVSGVDGI

SEQ ID NO: 9301 - protein, 9 aa, synthetic construct
  source 1..9: note = Seed: LVVVGADGV (KRAS G12D)
YVVSGVDGL

SEQ ID NO: 9302 - protein, 9 aa, synthetic construct
  source 1..9: note = Seed: LVVVGADGV (KRAS G12D)
YVVSGVDGM

SEQ ID NO: 9303 - protein, 9 aa, synthetic construct
  source 1..9: note = Seed: LVVVGADGV (KRAS G12D)
YVVSGVDGN

SEQ ID NO: 9304 - protein, 9 aa, synthetic construct
  source 1..9: note = Seed: LVVVGADGV (KRAS G12D)
YVVSGVDGS

SEQ ID NO: 9305 - protein, 9 aa, synthetic construct
  source 1..9: note = Seed: LVVVGADGV (KRAS G12D)
YVVSGVDGV

SEQ ID NO: 9306 - protein, 9 aa, synthetic construct
  source 1..9: note = Seed: LVVVGADGV (KRAS G12D)
YVVTGADGA

SEQ ID NO: 9307 - protein, 9 aa, synthetic construct
  source 1..9: note = Seed: LVVVGADGV (KRAS G12D)
YVVTGADGI

SEQ ID NO: 9308 - protein, 9 aa, synthetic construct
  source 1..9: note = Seed: LVVVGADGV (KRAS G12D)
YVVTGADGL

SEQ ID NO: 9309 - protein, 9 aa, synthetic construct
  source 1..9: note = Seed: LVVVGADGV (KRAS G12D)
YVVTGADGM

SEQ ID NO: 9310 - protein, 9 aa, synthetic construct
  source 1..9: note = Seed: LVVVGADGV (KRAS G12D)
YVVTGADGN

SEQ ID NO: 9311 - protein, 9 aa, synthetic construct
  source 1..9: note = Seed: LVVVGADGV (KRAS G12D)
YVVTGADGS

SEQ ID NO: 9312 - protein, 9 aa, synthetic construct
  source 1..9: note = Seed: LVVVGADGV (KRAS G12D)
YVVTGADGV

SEQ ID NO: 9313 - protein, 9 aa, synthetic construct
  source 1..9: note = Seed: LVVVGADGV (KRAS G12D)
YVVTGIDGA

SEQ ID NO: 9314 - protein, 9 aa, synthetic construct
  source 1..9: note = Seed: LVVVGADGV (KRAS G12D)
YVVTGIDGS

SEQ ID NO: 9315 - protein, 9 aa, synthetic construct
  source 1..9: note = Seed: LVVVGADGV (KRAS G12D)
YVVTGIDGV

SEQ ID NO: 9316 - protein, 9 aa, synthetic construct
  source 1..9: note = Seed: LVVVGADGV (KRAS G12D)
YVVTGLDGL

SEQ ID NO: 9317 - protein, 9 aa, synthetic construct
  source 1..9: note = Seed: LVVVGADGV (KRAS G12D)
YVVTGSDGI

SEQ ID NO: 9318 - protein, 9 aa, synthetic construct
  source 1..9: note = Seed: LVVVGADGV (KRAS G12D)
YVVTGVDGA

SEQ ID NO: 9319 - protein, 9 aa, synthetic construct
  source 1..9: note = Seed: LVVVGADGV (KRAS G12D)
YVVTGVDGI

SEQ ID NO: 9320 - protein, 9 aa, synthetic construct
  source 1..9: note = Seed: LVVVGADGV (KRAS G12D)
YVVTGVDGL

SEQ ID NO: 9321 - protein, 9 aa, synthetic construct
  source 1..9: note = Seed: LVVVGADGV (KRAS G12D)
YVVTGVDGS

SEQ ID NO: 9322 - protein, 9 aa, synthetic construct
  source 1..9: note = Seed: LVVVGADGV (KRAS G12D)
YVVTGVDGV

SEQ ID NO: 9323 - protein, 9 aa, synthetic construct
  source 1..9: note = Seed: LVVVGADGV (KRAS G12D)
YVVVGADGA

SEQ ID NO: 9324 - protein, 9 aa, synthetic construct
  source 1..9: note = Seed: LVVVGADGV (KRAS G12D)
YVVVGADGG

SEQ ID NO: 9325 - protein, 9 aa, synthetic construct
  source 1..9: note = Seed: LVVVGADGV (KRAS G12D)
YVVVGADGH

SEQ ID NO: 9326 - protein, 9 aa, synthetic construct
  source 1..9: note = Seed: LVVVGADGV (KRAS G12D)
YVVVGADGI

SEQ ID NO: 9327 - protein, 9 aa, synthetic construct
  source 1..9: note = Seed: LVVVGADGV (KRAS G12D)
YVVVGADGL

SEQ ID NO: 9328 - protein, 9 aa, synthetic construct
  source 1..9: note = Seed: LVVVGADGV (KRAS G12D)
YVVVGADGM

SEQ ID NO: 9329 - protein, 9 aa, synthetic construct
  source 1..9: note = Seed: LVVVGADGV (KRAS G12D)
YVVVGADGN

SEQ ID NO: 9330 - protein, 9 aa, synthetic construct
  source 1..9: note = Seed: LVVVGADGV (KRAS G12D)
YVVVGADGQ

SEQ ID NO: 9331 - protein, 9 aa, synthetic construct
  source 1..9: note = Seed: LVVVGADGV (KRAS G12D)
YVVVGADGS

SEQ ID NO: 9332 - protein, 9 aa, synthetic construct
  source 1..9: note = Seed: LVVVGADGV (KRAS G12D)
YVVVGADGT

SEQ ID NO: 9333 - protein, 9 aa, synthetic construct
  source 1..9: note = Seed: LVVVGADGV (KRAS G12D)
YVVVGADGV

SEQ ID NO: 9334 - protein, 9 aa, synthetic construct
  source 1..9: note = Seed: LVVVGADGV (KRAS G12D)
YVVVGADGY

SEQ ID NO: 9335 - protein, 9 aa, synthetic construct
  source 1..9: note = Seed: LVVVGADGV (KRAS G12D)
YVVVGGDGA

SEQ ID NO: 9336 - protein, 9 aa, synthetic construct
  source 1..9: note = Seed: LVVVGADGV (KRAS G12D)
YVVVGGDGI

SEQ ID NO: 9337 - protein, 9 aa, synthetic construct
  source 1..9: note = Seed: LVVVGADGV (KRAS G12D)
YVVVGGDGL

SEQ ID NO: 9338 - protein, 9 aa, synthetic construct
  source 1..9: note = Seed: LVVVGADGV (KRAS G12D)
YVVVGGDGM

SEQ ID NO: 9339 - protein, 9 aa, synthetic construct
  source 1..9: note = Seed: LVVVGADGV (KRAS G12D)
YVVVGGDGV

SEQ ID NO: 9340 - protein, 9 aa, synthetic construct
  source 1..9: note = Seed: LVVVGADGV (KRAS G12D)
YVVVGIDGA

SEQ ID NO: 9341 - protein, 9 aa, synthetic construct
  source 1..9: note = Seed: LVVVGADGV (KRAS G12D)
YVVVGIDGI

SEQ ID NO: 9342 - protein, 9 aa, synthetic construct
  source 1..9: note = Seed: LVVVGADGV (KRAS G12D)
YVVVGIDGL

SEQ ID NO: 9343 - protein, 9 aa, synthetic construct
  source 1..9: note = Seed: LVVVGADGV (KRAS G12D)
YVVVGIDGM

SEQ ID NO: 9344 - protein, 9 aa, synthetic construct
  source 1..9: note = Seed: LVVVGADGV (KRAS G12D)
YVVVGIDGN

SEQ ID NO: 9345 - protein, 9 aa, synthetic construct
  source 1..9: note = Seed: LVVVGADGV (KRAS G12D)
YVVVGIDGS

SEQ ID NO: 9346 - protein, 9 aa, synthetic construct
  source 1..9: note = Seed: LVVVGADGV (KRAS G12D)
YVVVGIDGT

SEQ ID NO: 9347 - protein, 9 aa, synthetic construct
  source 1..9: note = Seed: LVVVGADGV (KRAS G12D)
YVVVGIDGV

SEQ ID NO: 9348 - protein, 9 aa, synthetic construct
  source 1..9: note = Seed: LVVVGADGV (KRAS G12D)
YVVVGLDGA

SEQ ID NO: 9349 - protein, 9 aa, synthetic construct
  source 1..9: note = Seed: LVVVGADGV (KRAS G12D)
YVVVGLDGI

SEQ ID NO: 9350 - protein, 9 aa, synthetic construct
  source 1..9: note = Seed: LVVVGADGV (KRAS G12D)
YVVVGLDGL

SEQ ID NO: 9351 - protein, 9 aa, synthetic construct
  source 1..9: note = Seed: LVVVGADGV (KRAS G12D)
YVVVGLDGM

SEQ ID NO: 9352 - protein, 9 aa, synthetic construct
  source 1..9: note = Seed: LVVVGADGV (KRAS G12D)
YVVVGLDGS

SEQ ID NO: 9353 - protein, 9 aa, synthetic construct
  source 1..9: note = Seed: LVVVGADGV (KRAS G12D)
YVVVGLDGV

SEQ ID NO: 9354 - protein, 9 aa, synthetic construct
  source 1..9: note = Seed: LVVVGADGV (KRAS G12D)
YVVVGMDGA

SEQ ID NO: 9355 - protein, 9 aa, synthetic construct
  source 1..9: note = Seed: LVVVGADGV (KRAS G12D)
YVVVGMDGI

SEQ ID NO: 9356 - protein, 9 aa, synthetic construct
  source 1..9: note = Seed: LVVVGADGV (KRAS G12D)
YVVVGMDGL

SEQ ID NO: 9357 - protein, 9 aa, synthetic construct
  source 1..9: note = Seed: LVVVGADGV (KRAS G12D)
YVVVGMDGM

SEQ ID NO: 9358 - protein, 9 aa, synthetic construct
  source 1..9: note = Seed: LVVVGADGV (KRAS G12D)
YVVVGMDGN

SEQ ID NO: 9359 - protein, 9 aa, synthetic construct
  source 1..9: note = Seed: LVVVGADGV (KRAS G12D)
YVVVGMDGS

SEQ ID NO: 9360 - protein, 9 aa, synthetic construct
  source 1..9: note = Seed: LVVVGADGV (KRAS G12D)
YVVVGMDGV

SEQ ID NO: 9361 - protein, 9 aa, synthetic construct
  source 1..9: note = Seed: LVVVGADGV (KRAS G12D)
YVVVGNDGA

SEQ ID NO: 9362 - protein, 9 aa, synthetic construct
  source 1..9: note = Seed: LVVVGADGV (KRAS G12D)
YVVVGNDGI

SEQ ID NO: 9363 - protein, 9 aa, synthetic construct
  source 1..9: note = Seed: LVVVGADGV (KRAS G12D)
YVVVGNDGL

SEQ ID NO: 9364 - protein, 9 aa, synthetic construct
  source 1..9: note = Seed: LVVVGADGV (KRAS G12D)
YVVVGNDGS

SEQ ID NO: 9365 - protein, 9 aa, synthetic construct
  source 1..9: note = Seed: LVVVGADGV (KRAS G12D)
YVVVGNDGV

SEQ ID NO: 9366 - protein, 9 aa, synthetic construct
  source 1..9: note = Seed: LVVVGADGV (KRAS G12D)
YVVVGPDGA

SEQ ID NO: 9367 - protein, 9 aa, synthetic construct
  source 1..9: note = Seed: LVVVGADGV (KRAS G12D)
YVVVGPDGI

SEQ ID NO: 9368 - protein, 9 aa, synthetic construct
  source 1..9: note = Seed: LVVVGADGV (KRAS G12D)
YVVVGPDGL

SEQ ID NO: 9369 - protein, 9 aa, synthetic construct
  source 1..9: note = Seed: LVVVGADGV (KRAS G12D)
YVVVGPDGM

SEQ ID NO: 9370 - protein, 9 aa, synthetic construct
  source 1..9: note = Seed: LVVVGADGV (KRAS G12D)
YVVVGPDGN

SEQ ID NO: 9371 - protein, 9 aa, synthetic construct
  source 1..9: note = Seed: LVVVGADGV (KRAS G12D)
YVVVGPDGS

SEQ ID NO: 9372 - protein, 9 aa, synthetic construct
  source 1..9: note = Seed: LVVVGADGV (KRAS G12D)
YVVVGPDGT

SEQ ID NO: 9373 - protein, 9 aa, synthetic construct
  source 1..9: note = Seed: LVVVGADGV (KRAS G12D)
YVVVGPDGV

SEQ ID NO: 9374 - protein, 9 aa, synthetic construct
  source 1..9: note = Seed: LVVVGADGV (KRAS G12D)
YVVVGSDGA

SEQ ID NO: 9375 - protein, 9 aa, synthetic construct
  source 1..9: note = Seed: LVVVGADGV (KRAS G12D)
YVVVGSDGI

SEQ ID NO: 9376 - protein, 9 aa, synthetic construct
  source 1..9: note = Seed: LVVVGADGV (KRAS G12D)
YVVVGSDGL

SEQ ID NO: 9377 - protein, 9 aa, synthetic construct
  source 1..9: note = Seed: LVVVGADGV (KRAS G12D)
YVVVGSDGM

SEQ ID NO: 9378 - protein, 9 aa, synthetic construct
  source 1..9: note = Seed: LVVVGADGV (KRAS G12D)
YVVVGSDGN

SEQ ID NO: 9379 - protein, 9 aa, synthetic construct
  source 1..9: note = Seed: LVVVGADGV (KRAS G12D)
YVVVGSDGS

SEQ ID NO: 9380 - protein, 9 aa, synthetic construct
  source 1..9: note = Seed: LVVVGADGV (KRAS G12D)
YVVVGSDGT

SEQ ID NO: 9381 - protein, 9 aa, synthetic construct
  source 1..9: note = Seed: LVVVGADGV (KRAS G12D)
YVVVGSDGV

SEQ ID NO: 9382 - protein, 9 aa, synthetic construct
  source 1..9: note = Seed: LVVVGADGV (KRAS G12D)
YVVVGTDGA

SEQ ID NO: 9383 - protein, 9 aa, synthetic construct
  source 1..9: note = Seed: LVVVGADGV (KRAS G12D)
YVVVGTDGI

SEQ ID NO: 9384 - protein, 9 aa, synthetic construct
  source 1..9: note = Seed: LVVVGADGV (KRAS G12D)
YVVVGTDGL

SEQ ID NO: 9385 - protein, 9 aa, synthetic construct
  source 1..9: note = Seed: LVVVGADGV (KRAS G12D)
YVVVGTDGM

SEQ ID NO: 9386 - protein, 9 aa, synthetic construct
  source 1..9: note = Seed: LVVVGADGV (KRAS G12D)
YVVVGTDGN

SEQ ID NO: 9387 - protein, 9 aa, synthetic construct
  source 1..9: note = Seed: LVVVGADGV (KRAS G12D)
YVVVGTDGS

SEQ ID NO: 9388 - protein, 9 aa, synthetic construct
  source 1..9: note = Seed: LVVVGADGV (KRAS G12D)
YVVVGTDGT

SEQ ID NO: 9389 - protein, 9 aa, synthetic construct
  source 1..9: note = Seed: LVVVGADGV (KRAS G12D)
YVVVGTDGV

SEQ ID NO: 9390 - protein, 9 aa, synthetic construct
  source 1..9: note = Seed: LVVVGADGV (KRAS G12D)
YVVVGVDGA

SEQ ID NO: 9391 - protein, 9 aa, synthetic construct
  source 1..9: note = Seed: LVVVGADGV (KRAS G12D)
YVVVGVDGH

SEQ ID NO: 9392 - protein, 9 aa, synthetic construct
  source 1..9: note = Seed: LVVVGADGV (KRAS G12D)
YVVVGVDGI

SEQ ID NO: 9393 - protein, 9 aa, synthetic construct
  source 1..9: note = Seed: LVVVGADGV (KRAS G12D)
YVVVGVDGL

SEQ ID NO: 9394 - protein, 9 aa, synthetic construct
  source 1..9: note = Seed: LVVVGADGV (KRAS G12D)
YVVVGVDGM

SEQ ID NO: 9395 - protein, 9 aa, synthetic construct
  source 1..9: note = Seed: LVVVGADGV (KRAS G12D)
YVVVGVDGN

SEQ ID NO: 9396 - protein, 9 aa, synthetic construct
  source 1..9: note = Seed: LVVVGADGV (KRAS G12D)
YVVVGVDGS

SEQ ID NO: 9397 - protein, 9 aa, synthetic construct
  source 1..9: note = Seed: LVVVGADGV (KRAS G12D)
YVVVGVDGT

SEQ ID NO: 9398 - protein, 9 aa, synthetic construct
  source 1..9: note = Seed: LVVVGADGV (KRAS G12D)
YVVVGVDGV

SEQ ID NO: 9399 - protein, 9 aa, synthetic construct
  source 1..9: note = Seed: VVGADGVGK (KRAS G12D)
CVGLDAVGI

SEQ ID NO: 9400 - protein, 9 aa, synthetic construct
  source 1..9: note = Seed: VVGADGVGK (KRAS G12D)
CVGLDAVGL

SEQ ID NO: 9401 - protein, 9 aa, synthetic construct
  source 1..9: note = Seed: VVGADGVGK (KRAS G12D)
CVGLDAVGV

SEQ ID NO: 9402 - protein, 9 aa, synthetic construct
  source 1..9: note = Seed: VVGADGVGK (KRAS G12D)
FVGADAVGA

SEQ ID NO: 9403 - protein, 9 aa, synthetic construct
  source 1..9: note = Seed: VVGADGVGK (KRAS G12D)
FVGADAVGC

SEQ ID NO: 9404 - protein, 9 aa, synthetic construct
  source 1..9: note = Seed: VVGADGVGK (KRAS G12D)
FVGADAVGF

SEQ ID NO: 9405 - protein, 9 aa, synthetic construct
  source 1..9: note = Seed: VVGADGVGK (KRAS G12D)
FVGADAVGG

SEQ ID NO: 9406 - protein, 9 aa, synthetic construct
  source 1..9: note = Seed: VVGADGVGK (KRAS G12D)
FVGADAVGH

SEQ ID NO: 9407 - protein, 9 aa, synthetic construct
  source 1..9: note = Seed: VVGADGVGK (KRAS G12D)
FVGADAVGI

SEQ ID NO: 9408 - protein, 9 aa, synthetic construct
  source 1..9: note = Seed: VVGADGVGK (KRAS G12D)
FVGADAVGK

SEQ ID NO: 9409 - protein, 9 aa, synthetic construct
  source 1..9: note = Seed: VVGADGVGK (KRAS G12D)
FVGADAVGL

SEQ ID NO: 9410 - protein, 9 aa, synthetic construct
  source 1..9: note = Seed: VVGADGVGK (KRAS G12D)
FVGADAVGM

SEQ ID NO: 9411 - protein, 9 aa, synthetic construct
  source 1..9: note = Seed: VVGADGVGK (KRAS G12D)
FVGADAVGN

SEQ ID NO: 9412 - protein, 9 aa, synthetic construct
  source 1..9: note = Seed: VVGADGVGK (KRAS G12D)
FVGADAVGP

SEQ ID NO: 9413 - protein, 9 aa, synthetic construct
  source 1..9: note = Seed: VVGADGVGK (KRAS G12D)
FVGADAVGQ

SEQ ID NO: 9414 - protein, 9 aa, synthetic construct
  source 1..9: note = Seed: VVGADGVGK (KRAS G12D)
FVGADAVGR

SEQ ID NO: 9415 - protein, 9 aa, synthetic construct
  source 1..9: note = Seed: VVGADGVGK (KRAS G12D)
FVGADAVGS

SEQ ID NO: 9416 - protein, 9 aa, synthetic construct
  source 1..9: note = Seed: VVGADGVGK (KRAS G12D)
FVGADAVGT

SEQ ID NO: 9417 - protein, 9 aa, synthetic construct
  source 1..9: note = Seed: VVGADGVGK (KRAS G12D)
FVGADAVGV

SEQ ID NO: 9418 - protein, 9 aa, synthetic construct
  source 1..9: note = Seed: VVGADGVGK (KRAS G12D)
FVGADAVGY

SEQ ID NO: 9419 - protein, 9 aa, synthetic construct
  source 1..9: note = Seed: VVGADGVGK (KRAS G12D)
FVGADGVGA

SEQ ID NO: 9420 - protein, 9 aa, synthetic construct
  source 1..9: note = Seed: VVGADGVGK (KRAS G12D)
FVGADGVGF

SEQ ID NO: 9421 - protein, 9 aa, synthetic construct
  source 1..9: note = Seed: VVGADGVGK (KRAS G12D)
FVGADGVGG

SEQ ID NO: 9422 - protein, 9 aa, synthetic construct
  source 1..9: note = Seed: VVGADGVGK (KRAS G12D)
FVGADGVGH

SEQ ID NO: 9423 - protein, 9 aa, synthetic construct
  source 1..9: note = Seed: VVGADGVGK (KRAS G12D)
FVGADGVGI

SEQ ID NO: 9424 - protein, 9 aa, synthetic construct
  source 1..9: note = Seed: VVGADGVGK (KRAS G12D)
FVGADGVGL

SEQ ID NO: 9425 - protein, 9 aa, synthetic construct
  source 1..9: note = Seed: VVGADGVGK (KRAS G12D)
FVGADGVGM

SEQ ID NO: 9426 - protein, 9 aa, synthetic construct
  source 1..9: note = Seed: VVGADGVGK (KRAS G12D)
FVGADGVGN

SEQ ID NO: 9427 - protein, 9 aa, synthetic construct
  source 1..9: note = Seed: VVGADGVGK (KRAS G12D)
FVGADGVGQ

SEQ ID NO: 9428 - protein, 9 aa, synthetic construct
  source 1..9: note = Seed: VVGADGVGK (KRAS G12D)
FVGADGVGS

SEQ ID NO: 9429 - protein, 9 aa, synthetic construct
  source 1..9: note = Seed: VVGADGVGK (KRAS G12D)
FVGADGVGT

SEQ ID NO: 9430 - protein, 9 aa, synthetic construct
  source 1..9: note = Seed: VVGADGVGK (KRAS G12D)
FVGADGVGV

SEQ ID NO: 9431 - protein, 9 aa, synthetic construct
  source 1..9: note = Seed: VVGADGVGK (KRAS G12D)
FVGADGVGY

SEQ ID NO: 9432 - protein, 9 aa, synthetic construct
  source 1..9: note = Seed: VVGADGVGK (KRAS G12D)
FVGADHVGA

SEQ ID NO: 9433 - protein, 9 aa, synthetic construct
  source 1..9: note = Seed: VVGADGVGK (KRAS G12D)
FVGADIVGA

SEQ ID NO: 9434 - protein, 9 aa, synthetic construct
  source 1..9: note = Seed: VVGADGVGK (KRAS G12D)
FVGADIVGI

SEQ ID NO: 9435 - protein, 9 aa, synthetic construct
  source 1..9: note = Seed: VVGADGVGK (KRAS G12D)
FVGADIVGS

SEQ ID NO: 9436 - protein, 9 aa, synthetic construct
  source 1..9: note = Seed: VVGADGVGK (KRAS G12D)
FVGADIVGV

SEQ ID NO: 9437 - protein, 9 aa, synthetic construct
  source 1..9: note = Seed: VVGADGVGK (KRAS G12D)
FVGADMVGA

SEQ ID NO: 9438 - protein, 9 aa, synthetic construct
  source 1..9: note = Seed: VVGADGVGK (KRAS G12D)
FVGADNVGA

SEQ ID NO: 9439 - protein, 9 aa, synthetic construct
  source 1..9: note = Seed: VVGADGVGK (KRAS G12D)
FVGADNVGG

SEQ ID NO: 9440 - protein, 9 aa, synthetic construct
  source 1..9: note = Seed: VVGADGVGK (KRAS G12D)
FVGADNVGI

SEQ ID NO: 9441 - protein, 9 aa, synthetic construct
  source 1..9: note = Seed: VVGADGVGK (KRAS G12D)
FVGADNVGL

SEQ ID NO: 9442 - protein, 9 aa, synthetic construct
  source 1..9: note = Seed: VVGADGVGK (KRAS G12D)
FVGADNVGM

SEQ ID NO: 9443 - protein, 9 aa, synthetic construct
  source 1..9: note = Seed: VVGADGVGK (KRAS G12D)
FVGADNVGS

SEQ ID NO: 9444 - protein, 9 aa, synthetic construct
  source 1..9: note = Seed: VVGADGVGK (KRAS G12D)
FVGADNVGT

SEQ ID NO: 9445 - protein, 9 aa, synthetic construct
  source 1..9: note = Seed: VVGADGVGK (KRAS G12D)
FVGADNVGV

SEQ ID NO: 9446 - protein, 9 aa, synthetic construct
  source 1..9: note = Seed: VVGADGVGK (KRAS G12D)
FVGADPVGA

SEQ ID NO: 9447 - protein, 9 aa, synthetic construct
  source 1..9: note = Seed: VVGADGVGK (KRAS G12D)
FVGADPVGC

SEQ ID NO: 9448 - protein, 9 aa, synthetic construct
  source 1..9: note = Seed: VVGADGVGK (KRAS G12D)
FVGADPVGF

SEQ ID NO: 9449 - protein, 9 aa, synthetic construct
  source 1..9: note = Seed: VVGADGVGK (KRAS G12D)
FVGADPVGG

SEQ ID NO: 9450 - protein, 9 aa, synthetic construct
  source 1..9: note = Seed: VVGADGVGK (KRAS G12D)
FVGADPVGH

SEQ ID NO: 9451 - protein, 9 aa, synthetic construct
  source 1..9: note = Seed: VVGADGVGK (KRAS G12D)
FVGADPVGI

SEQ ID NO: 9452 - protein, 9 aa, synthetic construct
  source 1..9: note = Seed: VVGADGVGK (KRAS G12D)
FVGADPVGK

SEQ ID NO: 9453 - protein, 9 aa, synthetic construct
  source 1..9: note = Seed: VVGADGVGK (KRAS G12D)
FVGADPVGL

SEQ ID NO: 9454 - protein, 9 aa, synthetic construct
  source 1..9: note = Seed: VVGADGVGK (KRAS G12D)
FVGADPVGM

SEQ ID NO: 9455 - protein, 9 aa, synthetic construct
  source 1..9: note = Seed: VVGADGVGK (KRAS G12D)
FVGADPVGN

SEQ ID NO: 9456 - protein, 9 aa, synthetic construct
  source 1..9: note = Seed: VVGADGVGK (KRAS G12D)
FVGADPVGQ

SEQ ID NO: 9457 - protein, 9 aa, synthetic construct
  source 1..9: note = Seed: VVGADGVGK (KRAS G12D)
FVGADPVGR

SEQ ID NO: 9458 - protein, 9 aa, synthetic construct
  source 1..9: note = Seed: VVGADGVGK (KRAS G12D)
FVGADPVGS

SEQ ID NO: 9459 - protein, 9 aa, synthetic construct
  source 1..9: note = Seed: VVGADGVGK (KRAS G12D)
FVGADPVGT

SEQ ID NO: 9460 - protein, 9 aa, synthetic construct
  source 1..9: note = Seed: VVGADGVGK (KRAS G12D)
FVGADPVGV

SEQ ID NO: 9461 - protein, 9 aa, synthetic construct
  source 1..9: note = Seed: VVGADGVGK (KRAS G12D)
FVGADPVGY

SEQ ID NO: 9462 - protein, 9 aa, synthetic construct
  source 1..9: note = Seed: VVGADGVGK (KRAS G12D)
FVGADRVGR

SEQ ID NO: 9463 - protein, 9 aa, synthetic construct
  source 1..9: note = Seed: VVGADGVGK (KRAS G12D)
FVGADRVGY

SEQ ID NO: 9464 - protein, 9 aa, synthetic construct
  source 1..9: note = Seed: VVGADGVGK (KRAS G12D)
FVGADSVGA

SEQ ID NO: 9465 - protein, 9 aa, synthetic construct
  source 1..9: note = Seed: VVGADGVGK (KRAS G12D)
FVGADSVGG

SEQ ID NO: 9466 - protein, 9 aa, synthetic construct
  source 1..9: note = Seed: VVGADGVGK (KRAS G12D)
FVGADSVGH

SEQ ID NO: 9467 - protein, 9 aa, synthetic construct
  source 1..9: note = Seed: VVGADGVGK (KRAS G12D)
FVGADSVGI

SEQ ID NO: 9468 - protein, 9 aa, synthetic construct
  source 1..9: note = Seed: VVGADGVGK (KRAS G12D)
FVGADSVGL

SEQ ID NO: 9469 - protein, 9 aa, synthetic construct
  source 1..9: note = Seed: VVGADGVGK (KRAS G12D)
FVGADSVGM

SEQ ID NO: 9470 - protein, 9 aa, synthetic construct
  source 1..9: note = Seed: VVGADGVGK (KRAS G12D)
FVGADSVGN

SEQ ID NO: 9471 - protein, 9 aa, synthetic construct
  source 1..9: note = Seed: VVGADGVGK (KRAS G12D)
FVGADSVGQ

SEQ ID NO: 9472 - protein, 9 aa, synthetic construct
  source 1..9: note = Seed: VVGADGVGK (KRAS G12D)
FVGADSVGS

SEQ ID NO: 9473 - protein, 9 aa, synthetic construct
  source 1..9: note = Seed: VVGADGVGK (KRAS G12D)
FVGADSVGT

SEQ ID NO: 9474 - protein, 9 aa, synthetic construct
  source 1..9: note = Seed: VVGADGVGK (KRAS G12D)
FVGADSVGV

SEQ ID NO: 9475 - protein, 9 aa, synthetic construct
  source 1..9: note = Seed: VVGADGVGK (KRAS G12D)
FVGADSVGY

SEQ ID NO: 9476 - protein, 9 aa, synthetic construct
  source 1..9: note = Seed: VVGADGVGK (KRAS G12D)
FVGADTVGA

SEQ ID NO: 9477 - protein, 9 aa, synthetic construct
  source 1..9: note = Seed: VVGADGVGK (KRAS G12D)
FVGADTVGG

SEQ ID NO: 9478 - protein, 9 aa, synthetic construct
  source 1..9: note = Seed: VVGADGVGK (KRAS G12D)
FVGADTVGI

SEQ ID NO: 9479 - protein, 9 aa, synthetic construct
  source 1..9: note = Seed: VVGADGVGK (KRAS G12D)
FVGADTVGL

SEQ ID NO: 9480 - protein, 9 aa, synthetic construct
  source 1..9: note = Seed: VVGADGVGK (KRAS G12D)
FVGADTVGM

SEQ ID NO: 9481 - protein, 9 aa, synthetic construct
  source 1..9: note = Seed: VVGADGVGK (KRAS G12D)
FVGADTVGN

SEQ ID NO: 9482 - protein, 9 aa, synthetic construct
  source 1..9: note = Seed: VVGADGVGK (KRAS G12D)
FVGADTVGS

SEQ ID NO: 9483 - protein, 9 aa, synthetic construct
  source 1..9: note = Seed: VVGADGVGK (KRAS G12D)
FVGADTVGT

SEQ ID NO: 9484 - protein, 9 aa, synthetic construct
  source 1..9: note = Seed: VVGADGVGK (KRAS G12D)
FVGADTVGV

SEQ ID NO: 9485 - protein, 9 aa, synthetic construct
  source 1..9: note = Seed: VVGADGVGK (KRAS G12D)
FVGADVVGA

SEQ ID NO: 9486 - protein, 9 aa, synthetic construct
  source 1..9: note = Seed: VVGADGVGK (KRAS G12D)
FVGADVVGG

SEQ ID NO: 9487 - protein, 9 aa, synthetic construct
  source 1..9: note = Seed: VVGADGVGK (KRAS G12D)
FVGADVVGI

SEQ ID NO: 9488 - protein, 9 aa, synthetic construct
  source 1..9: note = Seed: VVGADGVGK (KRAS G12D)
FVGADVVGL

SEQ ID NO: 9489 - protein, 9 aa, synthetic construct
  source 1..9: note = Seed: VVGADGVGK (KRAS G12D)
FVGADVVGM

SEQ ID NO: 9490 - protein, 9 aa, synthetic construct
  source 1..9: note = Seed: VVGADGVGK (KRAS G12D)
FVGADVVGN

SEQ ID NO: 9491 - protein, 9 aa, synthetic construct
  source 1..9: note = Seed: VVGADGVGK (KRAS G12D)
FVGADVVGS

SEQ ID NO: 9492 - protein, 9 aa, synthetic construct
  source 1..9: note = Seed: VVGADGVGK (KRAS G12D)
FVGADVVGT

SEQ ID NO: 9493 - protein, 9 aa, synthetic construct
  source 1..9: note = Seed: VVGADGVGK (KRAS G12D)
FVGADVVGV

SEQ ID NO: 9494 - protein, 9 aa, synthetic construct
  source 1..9: note = Seed: VVGADGVGK (KRAS G12D)
FVGCDAVGA

SEQ ID NO: 9495 - protein, 9 aa, synthetic construct
  source 1..9: note = Seed: VVGADGVGK (KRAS G12D)
FVGCDAVGI

SEQ ID NO: 9496 - protein, 9 aa, synthetic construct
  source 1..9: note = Seed: VVGADGVGK (KRAS G12D)
FVGCDAVGL

SEQ ID NO: 9497 - protein, 9 aa, synthetic construct
  source 1..9: note = Seed: VVGADGVGK (KRAS G12D)
FVGCDAVGM

SEQ ID NO: 9498 - protein, 9 aa, synthetic construct
  source 1..9: note = Seed: VVGADGVGK (KRAS G12D)
FVGCDAVGS

SEQ ID NO: 9499 - protein, 9 aa, synthetic construct
  source 1..9: note = Seed: VVGADGVGK (KRAS G12D)
FVGCDAVGT

SEQ ID NO: 9500 - protein, 9 aa, synthetic construct
  source 1..9: note = Seed: VVGADGVGK (KRAS G12D)
FVGCDAVGV

SEQ ID NO: 9501 - protein, 9 aa, synthetic construct
  source 1..9: note = Seed: VVGADGVGK (KRAS G12D)
FVGCDGVGA

SEQ ID NO: 9502 - protein, 9 aa, synthetic construct
  source 1..9: note = Seed: VVGADGVGK (KRAS G12D)
FVGCDGVGI

SEQ ID NO: 9503 - protein, 9 aa, synthetic construct
  source 1..9: note = Seed: VVGADGVGK (KRAS G12D)
FVGCDGVGL

SEQ ID NO: 9504 - protein, 9 aa, synthetic construct
  source 1..9: note = Seed: VVGADGVGK (KRAS G12D)
FVGCDGVGV

SEQ ID NO: 9505 - protein, 9 aa, synthetic construct
  source 1..9: note = Seed: VVGADGVGK (KRAS G12D)
FVGCDPVGA

SEQ ID NO: 9506 - protein, 9 aa, synthetic construct
  source 1..9: note = Seed: VVGADGVGK (KRAS G12D)
FVGCDPVGI

SEQ ID NO: 9507 - protein, 9 aa, synthetic construct
  source 1..9: note = Seed: VVGADGVGK (KRAS G12D)
FVGCDPVGL

SEQ ID NO: 9508 - protein, 9 aa, synthetic construct
  source 1..9: note = Seed: VVGADGVGK (KRAS G12D)
FVGCDPVGV

SEQ ID NO: 9509 - protein, 9 aa, synthetic construct
  source 1..9: note = Seed: VVGADGVGK (KRAS G12D)
FVGCDSVGA

SEQ ID NO: 9510 - protein, 9 aa, synthetic construct
  source 1..9: note = Seed: VVGADGVGK (KRAS G12D)
FVGCDSVGI

SEQ ID NO: 9511 - protein, 9 aa, synthetic construct
  source 1..9: note = Seed: VVGADGVGK (KRAS G12D)
FVGCDSVGL

SEQ ID NO: 9512 - protein, 9 aa, synthetic construct
  source 1..9: note = Seed: VVGADGVGK (KRAS G12D)
FVGCDSVGV

SEQ ID NO: 9513 - protein, 9 aa, synthetic construct
  source 1..9: note = Seed: VVGADGVGK (KRAS G12D)
FVGEDAVGA

SEQ ID NO: 9514 - protein, 9 aa, synthetic construct
  source 1..9: note = Seed: VVGADGVGK (KRAS G12D)
FVGEDAVGG

SEQ ID NO: 9515 - protein, 9 aa, synthetic construct
  source 1..9: note = Seed: VVGADGVGK (KRAS G12D)
FVGEDAVGI

SEQ ID NO: 9516 - protein, 9 aa, synthetic construct
  source 1..9: note = Seed: VVGADGVGK (KRAS G12D)
FVGEDAVGL

SEQ ID NO: 9517 - protein, 9 aa, synthetic construct
  source 1..9: note = Seed: VVGADGVGK (KRAS G12D)
FVGEDAVGM

SEQ ID NO: 9518 - protein, 9 aa, synthetic construct
  source 1..9: note = Seed: VVGADGVGK (KRAS G12D)
FVGEDAVGS

SEQ ID NO: 9519 - protein, 9 aa, synthetic construct
  source 1..9: note = Seed: VVGADGVGK (KRAS G12D)
FVGEDAVGT

SEQ ID NO: 9520 - protein, 9 aa, synthetic construct
  source 1..9: note = Seed: VVGADGVGK (KRAS G12D)
FVGEDAVGV

SEQ ID NO: 9521 - protein, 9 aa, synthetic construct
  source 1..9: note = Seed: VVGADGVGK (KRAS G12D)
FVGEDGVGA

SEQ ID NO: 9522 - protein, 9 aa, synthetic construct
  source 1..9: note = Seed: VVGADGVGK (KRAS G12D)
FVGEDGVGI

SEQ ID NO: 9523 - protein, 9 aa, synthetic construct
  source 1..9: note = Seed: VVGADGVGK (KRAS G12D)
FVGEDGVGL

SEQ ID NO: 9524 - protein, 9 aa, synthetic construct
  source 1..9: note = Seed: VVGADGVGK (KRAS G12D)
FVGEDGVGM

SEQ ID NO: 9525 - protein, 9 aa, synthetic construct
  source 1..9: note = Seed: VVGADGVGK (KRAS G12D)
FVGEDGVGS

SEQ ID NO: 9526 - protein, 9 aa, synthetic construct
  source 1..9: note = Seed: VVGADGVGK (KRAS G12D)
FVGEDGVGT

SEQ ID NO: 9527 - protein, 9 aa, synthetic construct
  source 1..9: note = Seed: VVGADGVGK (KRAS G12D)
FVGEDGVGV

SEQ ID NO: 9528 - protein, 9 aa, synthetic construct
  source 1..9: note = Seed: VVGADGVGK (KRAS G12D)
FVGEDNVGA

SEQ ID NO: 9529 - protein, 9 aa, synthetic construct
  source 1..9: note = Seed: VVGADGVGK (KRAS G12D)
FVGEDNVGL

SEQ ID NO: 9530 - protein, 9 aa, synthetic construct
  source 1..9: note = Seed: VVGADGVGK (KRAS G12D)
FVGEDNVGV

SEQ ID NO: 9531 - protein, 9 aa, synthetic construct
  source 1..9: note = Seed: VVGADGVGK (KRAS G12D)
FVGEDPVGA

SEQ ID NO: 9532 - protein, 9 aa, synthetic construct
  source 1..9: note = Seed: VVGADGVGK (KRAS G12D)
FVGEDPVGI

SEQ ID NO: 9533 - protein, 9 aa, synthetic construct
  source 1..9: note = Seed: VVGADGVGK (KRAS G12D)
FVGEDPVGL

SEQ ID NO: 9534 - protein, 9 aa, synthetic construct
  source 1..9: note = Seed: VVGADGVGK (KRAS G12D)
FVGEDPVGM

SEQ ID NO: 9535 - protein, 9 aa, synthetic construct
  source 1..9: note = Seed: VVGADGVGK (KRAS G12D)
FVGEDPVGV

SEQ ID NO: 9536 - protein, 9 aa, synthetic construct
  source 1..9: note = Seed: VVGADGVGK (KRAS G12D)
FVGEDSVGA

SEQ ID NO: 9537 - protein, 9 aa, synthetic construct
  source 1..9: note = Seed: VVGADGVGK (KRAS G12D)
FVGEDSVGI

SEQ ID NO: 9538 - protein, 9 aa, synthetic construct
  source 1..9: note = Seed: VVGADGVGK (KRAS G12D)
FVGEDSVGL

SEQ ID NO: 9539 - protein, 9 aa, synthetic construct
  source 1..9: note = Seed: VVGADGVGK (KRAS G12D)
FVGEDSVGM

SEQ ID NO: 9540 - protein, 9 aa, synthetic construct
  source 1..9: note = Seed: VVGADGVGK (KRAS G12D)
FVGEDSVGS

SEQ ID NO: 9541 - protein, 9 aa, synthetic construct
  source 1..9: note = Seed: VVGADGVGK (KRAS G12D)
FVGEDSVGT

SEQ ID NO: 9542 - protein, 9 aa, synthetic construct
  source 1..9: note = Seed: VVGADGVGK (KRAS G12D)
FVGEDSVGV

SEQ ID NO: 9543 - protein, 9 aa, synthetic construct
  source 1..9: note = Seed: VVGADGVGK (KRAS G12D)
FVGEDTVGA

SEQ ID NO: 9544 - protein, 9 aa, synthetic construct
  source 1..9: note = Seed: VVGADGVGK (KRAS G12D)
FVGEDTVGV

SEQ ID NO: 9545 - protein, 9 aa, synthetic construct
  source 1..9: note = Seed: VVGADGVGK (KRAS G12D)
FVGFDAVGA

SEQ ID NO: 9546 - protein, 9 aa, synthetic construct
  source 1..9: note = Seed: VVGADGVGK (KRAS G12D)
FVGFDAVGG

SEQ ID NO: 9547 - protein, 9 aa, synthetic construct
  source 1..9: note = Seed: VVGADGVGK (KRAS G12D)
FVGFDAVGH

SEQ ID NO: 9548 - protein, 9 aa, synthetic construct
  source 1..9: note = Seed: VVGADGVGK (KRAS G12D)
FVGFDAVGI

SEQ ID NO: 9549 - protein, 9 aa, synthetic construct
  source 1..9: note = Seed: VVGADGVGK (KRAS G12D)
FVGFDAVGL

SEQ ID NO: 9550 - protein, 9 aa, synthetic construct
  source 1..9: note = Seed: VVGADGVGK (KRAS G12D)
FVGFDAVGM

SEQ ID NO: 9551 - protein, 9 aa, synthetic construct
  source 1..9: note = Seed: VVGADGVGK (KRAS G12D)
FVGFDAVGN

SEQ ID NO: 9552 - protein, 9 aa, synthetic construct
  source 1..9: note = Seed: VVGADGVGK (KRAS G12D)
FVGFDAVGS

SEQ ID NO: 9553 - protein, 9 aa, synthetic construct
  source 1..9: note = Seed: VVGADGVGK (KRAS G12D)
FVGFDAVGT

SEQ ID NO: 9554 - protein, 9 aa, synthetic construct
  source 1..9: note = Seed: VVGADGVGK (KRAS G12D)
FVGFDAVGV

SEQ ID NO: 9555 - protein, 9 aa, synthetic construct
  source 1..9: note = Seed: VVGADGVGK (KRAS G12D)
FVGFDGVGA

SEQ ID NO: 9556 - protein, 9 aa, synthetic construct
  source 1..9: note = Seed: VVGADGVGK (KRAS G12D)
FVGFDGVGG

SEQ ID NO: 9557 - protein, 9 aa, synthetic construct
  source 1..9: note = Seed: VVGADGVGK (KRAS G12D)
FVGFDGVGI

SEQ ID NO: 9558 - protein, 9 aa, synthetic construct
  source 1..9: note = Seed: VVGADGVGK (KRAS G12D)
FVGFDGVGL

SEQ ID NO: 9559 - protein, 9 aa, synthetic construct
  source 1..9: note = Seed: VVGADGVGK (KRAS G12D)
FVGFDGVGM

SEQ ID NO: 9560 - protein, 9 aa, synthetic construct
  source 1..9: note = Seed: VVGADGVGK (KRAS G12D)
FVGFDGVGS

SEQ ID NO: 9561 - protein, 9 aa, synthetic construct
  source 1..9: note = Seed: VVGADGVGK (KRAS G12D)
FVGFDGVGT

SEQ ID NO: 9562 - protein, 9 aa, synthetic construct
  source 1..9: note = Seed: VVGADGVGK (KRAS G12D)
FVGFDGVGV

SEQ ID NO: 9563 - protein, 9 aa, synthetic construct
  source 1..9: note = Seed: VVGADGVGK (KRAS G12D)
FVGFDNVGA

SEQ ID NO: 9564 - protein, 9 aa, synthetic construct
  source 1..9: note = Seed: VVGADGVGK (KRAS G12D)
FVGFDNVGV

SEQ ID NO: 9565 - protein, 9 aa, synthetic construct
  source 1..9: note = Seed: VVGADGVGK (KRAS G12D)
FVGFDPVGA

SEQ ID NO: 9566 - protein, 9 aa, synthetic construct
  source 1..9: note = Seed: VVGADGVGK (KRAS G12D)
FVGFDPVGG

SEQ ID NO: 9567 - protein, 9 aa, synthetic construct
  source 1..9: note = Seed: VVGADGVGK (KRAS G12D)
FVGFDPVGI

SEQ ID NO: 9568 - protein, 9 aa, synthetic construct
  source 1..9: note = Seed: VVGADGVGK (KRAS G12D)
FVGFDPVGL

SEQ ID NO: 9569 - protein, 9 aa, synthetic construct
  source 1..9: note = Seed: VVGADGVGK (KRAS G12D)
FVGFDPVGM

SEQ ID NO: 9570 - protein, 9 aa, synthetic construct
  source 1..9: note = Seed: VVGADGVGK (KRAS G12D)
FVGFDPVGS

SEQ ID NO: 9571 - protein, 9 aa, synthetic construct
  source 1..9: note = Seed: VVGADGVGK (KRAS G12D)
FVGFDPVGT

SEQ ID NO: 9572 - protein, 9 aa, synthetic construct
  source 1..9: note = Seed: VVGADGVGK (KRAS G12D)
FVGFDPVGV

SEQ ID NO: 9573 - protein, 9 aa, synthetic construct
  source 1..9: note = Seed: VVGADGVGK (KRAS G12D)
FVGFDRVGR

SEQ ID NO: 9574 - protein, 9 aa, synthetic construct
  source 1..9: note = Seed: VVGADGVGK (KRAS G12D)
FVGFDSVGI

SEQ ID NO: 9575 - protein, 9 aa, synthetic construct
  source 1..9: note = Seed: VVGADGVGK (KRAS G12D)
FVGFDSVGL

SEQ ID NO: 9576 - protein, 9 aa, synthetic construct
  source 1..9: note = Seed: VVGADGVGK (KRAS G12D)
FVGFDSVGM

SEQ ID NO: 9577 - protein, 9 aa, synthetic construct
  source 1..9: note = Seed: VVGADGVGK (KRAS G12D)
FVGFDSVGN

SEQ ID NO: 9578 - protein, 9 aa, synthetic construct
  source 1..9: note = Seed: VVGADGVGK (KRAS G12D)
FVGFDSVGS

SEQ ID NO: 9579 - protein, 9 aa, synthetic construct
  source 1..9: note = Seed: VVGADGVGK (KRAS G12D)
FVGFDSVGT

SEQ ID NO: 9580 - protein, 9 aa, synthetic construct
  source 1..9: note = Seed: VVGADGVGK (KRAS G12D)
FVGFDSVGV

SEQ ID NO: 9581 - protein, 9 aa, synthetic construct
  source 1..9: note = Seed: VVGADGVGK (KRAS G12D)
FVGFDTVGA

SEQ ID NO: 9582 - protein, 9 aa, synthetic construct
  source 1..9: note = Seed: VVGADGVGK (KRAS G12D)
FVGFDTVGS

SEQ ID NO: 9583 - protein, 9 aa, synthetic construct
  source 1..9: note = Seed: VVGADGVGK (KRAS G12D)
FVGFDTVGV

SEQ ID NO: 9584 - protein, 9 aa, synthetic construct
  source 1..9: note = Seed: VVGADGVGK (KRAS G12D)
FVGGDAVGA

SEQ ID NO: 9585 - protein, 9 aa, synthetic construct
  source 1..9: note = Seed: VVGADGVGK (KRAS G12D)
FVGGDAVGI

SEQ ID NO: 9586 - protein, 9 aa, synthetic construct
  source 1..9: note = Seed: VVGADGVGK (KRAS G12D)
FVGGDAVGL

SEQ ID NO: 9587 - protein, 9 aa, synthetic construct
  source 1..9: note = Seed: VVGADGVGK (KRAS G12D)
FVGGDAVGM

SEQ ID NO: 9588 - protein, 9 aa, synthetic construct
  source 1..9: note = Seed: VVGADGVGK (KRAS G12D)
FVGGDAVGS

SEQ ID NO: 9589 - protein, 9 aa, synthetic construct
  source 1..9: note = Seed: VVGADGVGK (KRAS G12D)
FVGGDAVGT

SEQ ID NO: 9590 - protein, 9 aa, synthetic construct
  source 1..9: note = Seed: VVGADGVGK (KRAS G12D)
FVGGDAVGV

SEQ ID NO: 9591 - protein, 9 aa, synthetic construct
  source 1..9: note = Seed: VVGADGVGK (KRAS G12D)
FVGGDGVGA

SEQ ID NO: 9592 - protein, 9 aa, synthetic construct
  source 1..9: note = Seed: VVGADGVGK (KRAS G12D)
FVGGDGVGI

SEQ ID NO: 9593 - protein, 9 aa, synthetic construct
  source 1..9: note = Seed: VVGADGVGK (KRAS G12D)
FVGGDGVGL

SEQ ID NO: 9594 - protein, 9 aa, synthetic construct
  source 1..9: note = Seed: VVGADGVGK (KRAS G12D)
FVGGDGVGM

SEQ ID NO: 9595 - protein, 9 aa, synthetic construct
  source 1..9: note = Seed: VVGADGVGK (KRAS G12D)
FVGGDGVGV

SEQ ID NO: 9596 - protein, 9 aa, synthetic construct
  source 1..9: note = Seed: VVGADGVGK (KRAS G12D)
FVGGDPVGA

SEQ ID NO: 9597 - protein, 9 aa, synthetic construct
  source 1..9: note = Seed: VVGADGVGK (KRAS G12D)
FVGGDPVGI

SEQ ID NO: 9598 - protein, 9 aa, synthetic construct
  source 1..9: note = Seed: VVGADGVGK (KRAS G12D)
FVGGDPVGL

SEQ ID NO: 9599 - protein, 9 aa, synthetic construct
  source 1..9: note = Seed: VVGADGVGK (KRAS G12D)
FVGGDPVGM

SEQ ID NO: 9600 - protein, 9 aa, synthetic construct
  source 1..9: note = Seed: VVGADGVGK (KRAS G12D)
FVGGDPVGV

SEQ ID NO: 9601 - protein, 9 aa, synthetic construct
  source 1..9: note = Seed: VVGADGVGK (KRAS G12D)
FVGGDSVGA

SEQ ID NO: 9602 - protein, 9 aa, synthetic construct
  source 1..9: note = Seed: VVGADGVGK (KRAS G12D)
FVGGDSVGI

SEQ ID NO: 9603 - protein, 9 aa, synthetic construct
  source 1..9: note = Seed: VVGADGVGK (KRAS G12D)
FVGGDSVGL

SEQ ID NO: 9604 - protein, 9 aa, synthetic construct
  source 1..9: note = Seed: VVGADGVGK (KRAS G12D)
FVGGDSVGM

SEQ ID NO: 9605 - protein, 9 aa, synthetic construct
  source 1..9: note = Seed: VVGADGVGK (KRAS G12D)
FVGGDSVGV

SEQ ID NO: 9606 - protein, 9 aa, synthetic construct
  source 1..9: note = Seed: VVGADGVGK (KRAS G12D)
FVGHDAVGA

SEQ ID NO: 9607 - protein, 9 aa, synthetic construct
  source 1..9: note = Seed: VVGADGVGK (KRAS G12D)
FVGHDAVGI

SEQ ID NO: 9608 - protein, 9 aa, synthetic construct
  source 1..9: note = Seed: VVGADGVGK (KRAS G12D)
FVGHDAVGL

SEQ ID NO: 9609 - protein, 9 aa, synthetic construct
  source 1..9: note = Seed: VVGADGVGK (KRAS G12D)
FVGHDAVGM

SEQ ID NO: 9610 - protein, 9 aa, synthetic construct
  source 1..9: note = Seed: VVGADGVGK (KRAS G12D)
FVGHDAVGS

SEQ ID NO: 9611 - protein, 9 aa, synthetic construct
  source 1..9: note = Seed: VVGADGVGK (KRAS G12D)
FVGHDAVGT

SEQ ID NO: 9612 - protein, 9 aa, synthetic construct
  source 1..9: note = Seed: VVGADGVGK (KRAS G12D)
FVGHDAVGV

SEQ ID NO: 9613 - protein, 9 aa, synthetic construct
  source 1..9: note = Seed: VVGADGVGK (KRAS G12D)
FVGHDGVGA

SEQ ID NO: 9614 - protein, 9 aa, synthetic construct
  source 1..9: note = Seed: VVGADGVGK (KRAS G12D)
FVGHDGVGI

SEQ ID NO: 9615 - protein, 9 aa, synthetic construct
  source 1..9: note = Seed: VVGADGVGK (KRAS G12D)
FVGHDGVGL

SEQ ID NO: 9616 - protein, 9 aa, synthetic construct
  source 1..9: note = Seed: VVGADGVGK (KRAS G12D)
FVGHDGVGV

SEQ ID NO: 9617 - protein, 9 aa, synthetic construct
  source 1..9: note = Seed: VVGADGVGK (KRAS G12D)
FVGHDPVGA

SEQ ID NO: 9618 - protein, 9 aa, synthetic construct
  source 1..9: note = Seed: VVGADGVGK (KRAS G12D)
FVGHDPVGI

SEQ ID NO: 9619 - protein, 9 aa, synthetic construct
  source 1..9: note = Seed: VVGADGVGK (KRAS G12D)
FVGHDPVGL

SEQ ID NO: 9620 - protein, 9 aa, synthetic construct
  source 1..9: note = Seed: VVGADGVGK (KRAS G12D)
FVGHDPVGV

SEQ ID NO: 9621 - protein, 9 aa, synthetic construct
  source 1..9: note = Seed: VVGADGVGK (KRAS G12D)
FVGHDRVGR

SEQ ID NO: 9622 - protein, 9 aa, synthetic construct
  source 1..9: note = Seed: VVGADGVGK (KRAS G12D)
FVGHDRVGY

SEQ ID NO: 9623 - protein, 9 aa, synthetic construct
  source 1..9: note = Seed: VVGADGVGK (KRAS G12D)
FVGHDSVGA

SEQ ID NO: 9624 - protein, 9 aa, synthetic construct
  source 1..9: note = Seed: VVGADGVGK (KRAS G12D)
FVGHDSVGI

SEQ ID NO: 9625 - protein, 9 aa, synthetic construct
  source 1..9: note = Seed: VVGADGVGK (KRAS G12D)
FVGHDSVGL

SEQ ID NO: 9626 - protein, 9 aa, synthetic construct
  source 1..9: note = Seed: VVGADGVGK (KRAS G12D)
FVGHDSVGV

SEQ ID NO: 9627 - protein, 9 aa, synthetic construct
  source 1..9: note = Seed: VVGADGVGK (KRAS G12D)
FVGIDAVGA

SEQ ID NO: 9628 - protein, 9 aa, synthetic construct
  source 1..9: note = Seed: VVGADGVGK (KRAS G12D)
FVGIDAVGC

SEQ ID NO: 9629 - protein, 9 aa, synthetic construct
  source 1..9: note = Seed: VVGADGVGK (KRAS G12D)
FVGIDAVGF

SEQ ID NO: 9630 - protein, 9 aa, synthetic construct
  source 1..9: note = Seed: VVGADGVGK (KRAS G12D)
FVGIDAVGG

SEQ ID NO: 9631 - protein, 9 aa, synthetic construct
  source 1..9: note = Seed: VVGADGVGK (KRAS G12D)
FVGIDAVGH

SEQ ID NO: 9632 - protein, 9 aa, synthetic construct
  source 1..9: note = Seed: VVGADGVGK (KRAS G12D)
FVGIDAVGI

SEQ ID NO: 9633 - protein, 9 aa, synthetic construct
  source 1..9: note = Seed: VVGADGVGK (KRAS G12D)
FVGIDAVGK

SEQ ID NO: 9634 - protein, 9 aa, synthetic construct
  source 1..9: note = Seed: VVGADGVGK (KRAS G12D)
FVGIDAVGL

SEQ ID NO: 9635 - protein, 9 aa, synthetic construct
  source 1..9: note = Seed: VVGADGVGK (KRAS G12D)
FVGIDAVGM

SEQ ID NO: 9636 - protein, 9 aa, synthetic construct
  source 1..9: note = Seed: VVGADGVGK (KRAS G12D)
FVGIDAVGN

SEQ ID NO: 9637 - protein, 9 aa, synthetic construct
  source 1..9: note = Seed: VVGADGVGK (KRAS G12D)
FVGIDAVGP

SEQ ID NO: 9638 - protein, 9 aa, synthetic construct
  source 1..9: note = Seed: VVGADGVGK (KRAS G12D)
FVGIDAVGQ

SEQ ID NO: 9639 - protein, 9 aa, synthetic construct
  source 1..9: note = Seed: VVGADGVGK (KRAS G12D)
FVGIDAVGR

SEQ ID NO: 9640 - protein, 9 aa, synthetic construct
  source 1..9: note = Seed: VVGADGVGK (KRAS G12D)
FVGIDAVGS

SEQ ID NO: 9641 - protein, 9 aa, synthetic construct
  source 1..9: note = Seed: VVGADGVGK (KRAS G12D)
FVGIDAVGT

SEQ ID NO: 9642 - protein, 9 aa, synthetic construct
  source 1..9: note = Seed: VVGADGVGK (KRAS G12D)
FVGIDAVGV

SEQ ID NO: 9643 - protein, 9 aa, synthetic construct
  source 1..9: note = Seed: VVGADGVGK (KRAS G12D)
FVGIDAVGY

SEQ ID NO: 9644 - protein, 9 aa, synthetic construct
  source 1..9: note = Seed: VVGADGVGK (KRAS G12D)
FVGIDGVGA

SEQ ID NO: 9645 - protein, 9 aa, synthetic construct
  source 1..9: note = Seed: VVGADGVGK (KRAS G12D)
FVGIDGVGC

SEQ ID NO: 9646 - protein, 9 aa, synthetic construct
  source 1..9: note = Seed: VVGADGVGK (KRAS G12D)
FVGIDGVGF

SEQ ID NO: 9647 - protein, 9 aa, synthetic construct
  source 1..9: note = Seed: VVGADGVGK (KRAS G12D)
FVGIDGVGG

SEQ ID NO: 9648 - protein, 9 aa, synthetic construct
  source 1..9: note = Seed: VVGADGVGK (KRAS G12D)
FVGIDGVGH

SEQ ID NO: 9649 - protein, 9 aa, synthetic construct
  source 1..9: note = Seed: VVGADGVGK (KRAS G12D)
FVGIDGVGI

SEQ ID NO: 9650 - protein, 9 aa, synthetic construct
  source 1..9: note = Seed: VVGADGVGK (KRAS G12D)
FVGIDGVGL

SEQ ID NO: 9651 - protein, 9 aa, synthetic construct
  source 1..9: note = Seed: VVGADGVGK (KRAS G12D)
FVGIDGVGM

SEQ ID NO: 9652 - protein, 9 aa, synthetic construct
  source 1..9: note = Seed: VVGADGVGK (KRAS G12D)
FVGIDGVGN

SEQ ID NO: 9653 - protein, 9 aa, synthetic construct
  source 1..9: note = Seed: VVGADGVGK (KRAS G12D)
FVGIDGVGP

SEQ ID NO: 9654 - protein, 9 aa, synthetic construct
  source 1..9: note = Seed: VVGADGVGK (KRAS G12D)
FVGIDGVGQ

SEQ ID NO: 9655 - protein, 9 aa, synthetic construct
  source 1..9: note = Seed: VVGADGVGK (KRAS G12D)
FVGIDGVGR

SEQ ID NO: 9656 - protein, 9 aa, synthetic construct
  source 1..9: note = Seed: VVGADGVGK (KRAS G12D)
FVGIDGVGS

SEQ ID NO: 9657 - protein, 9 aa, synthetic construct
  source 1..9: note = Seed: VVGADGVGK (KRAS G12D)
FVGIDGVGT

SEQ ID NO: 9658 - protein, 9 aa, synthetic construct
  source 1..9: note = Seed: VVGADGVGK (KRAS G12D)
FVGIDGVGV

SEQ ID NO: 9659 - protein, 9 aa, synthetic construct
  source 1..9: note = Seed: VVGADGVGK (KRAS G12D)
FVGIDHVGA

SEQ ID NO: 9660 - protein, 9 aa, synthetic construct
  source 1..9: note = Seed: VVGADGVGK (KRAS G12D)
FVGIDHVGS

SEQ ID NO: 9661 - protein, 9 aa, synthetic construct
  source 1..9: note = Seed: VVGADGVGK (KRAS G12D)
FVGIDKVGR

SEQ ID NO: 9662 - protein, 9 aa, synthetic construct
  source 1..9: note = Seed: VVGADGVGK (KRAS G12D)
FVGIDNVGA

SEQ ID NO: 9663 - protein, 9 aa, synthetic construct
  source 1..9: note = Seed: VVGADGVGK (KRAS G12D)
FVGIDNVGG

SEQ ID NO: 9664 - protein, 9 aa, synthetic construct
  source 1..9: note = Seed: VVGADGVGK (KRAS G12D)
FVGIDNVGI

SEQ ID NO: 9665 - protein, 9 aa, synthetic construct
  source 1..9: note = Seed: VVGADGVGK (KRAS G12D)
FVGIDNVGL

SEQ ID NO: 9666 - protein, 9 aa, synthetic construct
  source 1..9: note = Seed: VVGADGVGK (KRAS G12D)
FVGIDNVGM

SEQ ID NO: 9667 - protein, 9 aa, synthetic construct
  source 1..9: note = Seed: VVGADGVGK (KRAS G12D)
FVGIDNVGN

SEQ ID NO: 9668 - protein, 9 aa, synthetic construct
  source 1..9: note = Seed: VVGADGVGK (KRAS G12D)
FVGIDNVGS

SEQ ID NO: 9669 - protein, 9 aa, synthetic construct
  source 1..9: note = Seed: VVGADGVGK (KRAS G12D)
FVGIDNVGT

SEQ ID NO: 9670 - protein, 9 aa, synthetic construct
  source 1..9: note = Seed: VVGADGVGK (KRAS G12D)
FVGIDNVGV

SEQ ID NO: 9671 - protein, 9 aa, synthetic construct
  source 1..9: note = Seed: VVGADGVGK (KRAS G12D)
FVGIDPVGA

SEQ ID NO: 9672 - protein, 9 aa, synthetic construct
  source 1..9: note = Seed: VVGADGVGK (KRAS G12D)
FVGIDPVGC

SEQ ID NO: 9673 - protein, 9 aa, synthetic construct
  source 1..9: note = Seed: VVGADGVGK (KRAS G12D)
FVGIDPVGF

SEQ ID NO: 9674 - protein, 9 aa, synthetic construct
  source 1..9: note = Seed: VVGADGVGK (KRAS G12D)
FVGIDPVGG

SEQ ID NO: 9675 - protein, 9 aa, synthetic construct
  source 1..9: note = Seed: VVGADGVGK (KRAS G12D)
FVGIDPVGH

SEQ ID NO: 9676 - protein, 9 aa, synthetic construct
  source 1..9: note = Seed: VVGADGVGK (KRAS G12D)
FVGIDPVGI

SEQ ID NO: 9677 - protein, 9 aa, synthetic construct
  source 1..9: note = Seed: VVGADGVGK (KRAS G12D)
FVGIDPVGK

SEQ ID NO: 9678 - protein, 9 aa, synthetic construct
  source 1..9: note = Seed: VVGADGVGK (KRAS G12D)
FVGIDPVGL

SEQ ID NO: 9679 - protein, 9 aa, synthetic construct
  source 1..9: note = Seed: VVGADGVGK (KRAS G12D)
FVGIDPVGM

SEQ ID NO: 9680 - protein, 9 aa, synthetic construct
  source 1..9: note = Seed: VVGADGVGK (KRAS G12D)
FVGIDPVGN

SEQ ID NO: 9681 - protein, 9 aa, synthetic construct
  source 1..9: note = Seed: VVGADGVGK (KRAS G12D)
FVGIDPVGP

SEQ ID NO: 9682 - protein, 9 aa, synthetic construct
  source 1..9: note = Seed: VVGADGVGK (KRAS G12D)
FVGIDPVGQ

SEQ ID NO: 9683 - protein, 9 aa, synthetic construct
  source 1..9: note = Seed: VVGADGVGK (KRAS G12D)
FVGIDPVGR

SEQ ID NO: 9684 - protein, 9 aa, synthetic construct
  source 1..9: note = Seed: VVGADGVGK (KRAS G12D)
FVGIDPVGS

SEQ ID NO: 9685 - protein, 9 aa, synthetic construct
  source 1..9: note = Seed: VVGADGVGK (KRAS G12D)
FVGIDPVGT

SEQ ID NO: 9686 - protein, 9 aa, synthetic construct
  source 1..9: note = Seed: VVGADGVGK (KRAS G12D)
FVGIDPVGV

SEQ ID NO: 9687 - protein, 9 aa, synthetic construct
  source 1..9: note = Seed: VVGADGVGK (KRAS G12D)
FVGIDPVGY

SEQ ID NO: 9688 - protein, 9 aa, synthetic construct
  source 1..9: note = Seed: VVGADGVGK (KRAS G12D)
FVGIDRVGK

SEQ ID NO: 9689 - protein, 9 aa, synthetic construct
  source 1..9: note = Seed: VVGADGVGK (KRAS G12D)
FVGIDRVGR

SEQ ID NO: 9690 - protein, 9 aa, synthetic construct
  source 1..9: note = Seed: VVGADGVGK (KRAS G12D)
FVGIDRVGY

SEQ ID NO: 9691 - protein, 9 aa, synthetic construct
  source 1..9: note = Seed: VVGADGVGK (KRAS G12D)
FVGIDSVGA

SEQ ID NO: 9692 - protein, 9 aa, synthetic construct
  source 1..9: note = Seed: VVGADGVGK (KRAS G12D)
FVGIDSVGC

SEQ ID NO: 9693 - protein, 9 aa, synthetic construct
  source 1..9: note = Seed: VVGADGVGK (KRAS G12D)
FVGIDSVGG

SEQ ID NO: 9694 - protein, 9 aa, synthetic construct
  source 1..9: note = Seed: VVGADGVGK (KRAS G12D)
FVGIDSVGH

SEQ ID NO: 9695 - protein, 9 aa, synthetic construct
  source 1..9: note = Seed: VVGADGVGK (KRAS G12D)
FVGIDSVGI

SEQ ID NO: 9696 - protein, 9 aa, synthetic construct
  source 1..9: note = Seed: VVGADGVGK (KRAS G12D)
FVGIDSVGK

SEQ ID NO: 9697 - protein, 9 aa, synthetic construct
  source 1..9: note = Seed: VVGADGVGK (KRAS G12D)
FVGIDSVGL

SEQ ID NO: 9698 - protein, 9 aa, synthetic construct
  source 1..9: note = Seed: VVGADGVGK (KRAS G12D)
FVGIDSVGM

SEQ ID NO: 9699 - protein, 9 aa, synthetic construct
  source 1..9: note = Seed: VVGADGVGK (KRAS G12D)
FVGIDSVGN

SEQ ID NO: 9700 - protein, 9 aa, synthetic construct
  source 1..9: note = Seed: VVGADGVGK (KRAS G12D)
FVGIDSVGR

SEQ ID NO: 9701 - protein, 9 aa, synthetic construct
  source 1..9: note = Seed: VVGADGVGK (KRAS G12D)
FVGIDSVGS

SEQ ID NO: 9702 - protein, 9 aa, synthetic construct
  source 1..9: note = Seed: VVGADGVGK (KRAS G12D)
FVGIDSVGT

SEQ ID NO: 9703 - protein, 9 aa, synthetic construct
  source 1..9: note = Seed: VVGADGVGK (KRAS G12D)
FVGIDSVGV

SEQ ID NO: 9704 - protein, 9 aa, synthetic construct
  source 1..9: note = Seed: VVGADGVGK (KRAS G12D)
FVGIDTVGA

SEQ ID NO: 9705 - protein, 9 aa, synthetic construct
  source 1..9: note = Seed: VVGADGVGK (KRAS G12D)
FVGIDTVGG

SEQ ID NO: 9706 - protein, 9 aa, synthetic construct
  source 1..9: note = Seed: VVGADGVGK (KRAS G12D)
FVGIDTVGH

SEQ ID NO: 9707 - protein, 9 aa, synthetic construct
  source 1..9: note = Seed: VVGADGVGK (KRAS G12D)
FVGIDTVGI

SEQ ID NO: 9708 - protein, 9 aa, synthetic construct
  source 1..9: note = Seed: VVGADGVGK (KRAS G12D)
FVGIDTVGL

SEQ ID NO: 9709 - protein, 9 aa, synthetic construct
  source 1..9: note = Seed: VVGADGVGK (KRAS G12D)
FVGIDTVGM

SEQ ID NO: 9710 - protein, 9 aa, synthetic construct
  source 1..9: note = Seed: VVGADGVGK (KRAS G12D)
FVGIDTVGN

SEQ ID NO: 9711 - protein, 9 aa, synthetic construct
  source 1..9: note = Seed: VVGADGVGK (KRAS G12D)
FVGIDTVGS

SEQ ID NO: 9712 - protein, 9 aa, synthetic construct
  source 1..9: note = Seed: VVGADGVGK (KRAS G12D)
FVGIDTVGT

SEQ ID NO: 9713 - protein, 9 aa, synthetic construct
  source 1..9: note = Seed: VVGADGVGK (KRAS G12D)
FVGIDTVGV

SEQ ID NO: 9714 - protein, 9 aa, synthetic construct
  source 1..9: note = Seed: VVGADGVGK (KRAS G12D)
FVGIDVVGA

SEQ ID NO: 9715 - protein, 9 aa, synthetic construct
  source 1..9: note = Seed: VVGADGVGK (KRAS G12D)
FVGIDVVGG

SEQ ID NO: 9716 - protein, 9 aa, synthetic construct
  source 1..9: note = Seed: VVGADGVGK (KRAS G12D)
FVGIDVVGN

SEQ ID NO: 9717 - protein, 9 aa, synthetic construct
  source 1..9: note = Seed: VVGADGVGK (KRAS G12D)
FVGIDVVGS

SEQ ID NO: 9718 - protein, 9 aa, synthetic construct
  source 1..9: note = Seed: VVGADGVGK (KRAS G12D)
FVGIDVVGT

SEQ ID NO: 9719 - protein, 9 aa, synthetic construct
  source 1..9: note = Seed: VVGADGVGK (KRAS G12D)
FVGIDVVGV

SEQ ID NO: 9720 - protein, 9 aa, synthetic construct
  source 1..9: note = Seed: VVGADGVGK (KRAS G12D)
FVGKDAVGA

SEQ ID NO: 9721 - protein, 9 aa, synthetic construct
  source 1..9: note = Seed: VVGADGVGK (KRAS G12D)
FVGKDAVGI

SEQ ID NO: 9722 - protein, 9 aa, synthetic construct
  source 1..9: note = Seed: VVGADGVGK (KRAS G12D)
FVGKDAVGL

SEQ ID NO: 9723 - protein, 9 aa, synthetic construct
  source 1..9: note = Seed: VVGADGVGK (KRAS G12D)
FVGKDAVGM

SEQ ID NO: 9724 - protein, 9 aa, synthetic construct
  source 1..9: note = Seed: VVGADGVGK (KRAS G12D)
FVGKDAVGV

SEQ ID NO: 9725 - protein, 9 aa, synthetic construct
  source 1..9: note = Seed: VVGADGVGK (KRAS G12D)
FVGKDGVGL

SEQ ID NO: 9726 - protein, 9 aa, synthetic construct
  source 1..9: note = Seed: VVGADGVGK (KRAS G12D)
FVGKDRVGF

SEQ ID NO: 9727 - protein, 9 aa, synthetic construct
  source 1..9: note = Seed: VVGADGVGK (KRAS G12D)
FVGKDRVGL

SEQ ID NO: 9728 - protein, 9 aa, synthetic construct
  source 1..9: note = Seed: VVGADGVGK (KRAS G12D)
FVGKDRVGM

SEQ ID NO: 9729 - protein, 9 aa, synthetic construct
  source 1..9: note = Seed: VVGADGVGK (KRAS G12D)
FVGKDRVGR

SEQ ID NO: 9730 - protein, 9 aa, synthetic construct
  source 1..9: note = Seed: VVGADGVGK (KRAS G12D)
FVGKDRVGY

SEQ ID NO: 9731 - protein, 9 aa, synthetic construct
  source 1..9: note = Seed: VVGADGVGK (KRAS G12D)
FVGKDSVGL

SEQ ID NO: 9732 - protein, 9 aa, synthetic construct
  source 1..9: note = Seed: VVGADGVGK (KRAS G12D)
FVGKDSVGV

SEQ ID NO: 9733 - protein, 9 aa, synthetic construct
  source 1..9: note = Seed: VVGADGVGK (KRAS G12D)
FVGLDAVGA

SEQ ID NO: 9734 - protein, 9 aa, synthetic construct
  source 1..9: note = Seed: VVGADGVGK (KRAS G12D)
FVGLDAVGC

SEQ ID NO: 9735 - protein, 9 aa, synthetic construct
  source 1..9: note = Seed: VVGADGVGK (KRAS G12D)
FVGLDAVGD

SEQ ID NO: 9736 - protein, 9 aa, synthetic construct
  source 1..9: note = Seed: VVGADGVGK (KRAS G12D)
FVGLDAVGE

SEQ ID NO: 9737 - protein, 9 aa, synthetic construct
  source 1..9: note = Seed: VVGADGVGK (KRAS G12D)
FVGLDAVGF

SEQ ID NO: 9738 - protein, 9 aa, synthetic construct
  source 1..9: note = Seed: VVGADGVGK (KRAS G12D)
FVGLDAVGG

SEQ ID NO: 9739 - protein, 9 aa, synthetic construct
  source 1..9: note = Seed: VVGADGVGK (KRAS G12D)
FVGLDAVGH

SEQ ID NO: 9740 - protein, 9 aa, synthetic construct
  source 1..9: note = Seed: VVGADGVGK (KRAS G12D)
FVGLDAVGI

SEQ ID NO: 9741 - protein, 9 aa, synthetic construct
  source 1..9: note = Seed: VVGADGVGK (KRAS G12D)
FVGLDAVGK

SEQ ID NO: 9742 - protein, 9 aa, synthetic construct
  source 1..9: note = Seed: VVGADGVGK (KRAS G12D)
FVGLDAVGL

SEQ ID NO: 9743 - protein, 9 aa, synthetic construct
  source 1..9: note = Seed: VVGADGVGK (KRAS G12D)
FVGLDAVGM

SEQ ID NO: 9744 - protein, 9 aa, synthetic construct
  source 1..9: note = Seed: VVGADGVGK (KRAS G12D)
FVGLDAVGN

SEQ ID NO: 9745 - protein, 9 aa, synthetic construct
  source 1..9: note = Seed: VVGADGVGK (KRAS G12D)
FVGLDAVGP

SEQ ID NO: 9746 - protein, 9 aa, synthetic construct
  source 1..9: note = Seed: VVGADGVGK (KRAS G12D)
FVGLDAVGQ

SEQ ID NO: 9747 - protein, 9 aa, synthetic construct
  source 1..9: note = Seed: VVGADGVGK (KRAS G12D)
FVGLDAVGR

SEQ ID NO: 9748 - protein, 9 aa, synthetic construct
  source 1..9: note = Seed: VVGADGVGK (KRAS G12D)
FVGLDAVGS

SEQ ID NO: 9749 - protein, 9 aa, synthetic construct
  source 1..9: note = Seed: VVGADGVGK (KRAS G12D)
FVGLDAVGT

SEQ ID NO: 9750 - protein, 9 aa, synthetic construct
  source 1..9: note = Seed: VVGADGVGK (KRAS G12D)
FVGLDAVGV

SEQ ID NO: 9751 - protein, 9 aa, synthetic construct
  source 1..9: note = Seed: VVGADGVGK (KRAS G12D)
FVGLDAVGY

SEQ ID NO: 9752 - protein, 9 aa, synthetic construct
  source 1..9: note = Seed: VVGADGVGK (KRAS G12D)
FVGLDDVGA

SEQ ID NO: 9753 - protein, 9 aa, synthetic construct
  source 1..9: note = Seed: VVGADGVGK (KRAS G12D)
FVGLDDVGI

SEQ ID NO: 9754 - protein, 9 aa, synthetic construct
  source 1..9: note = Seed: VVGADGVGK (KRAS G12D)
FVGLDDVGL

SEQ ID NO: 9755 - protein, 9 aa, synthetic construct
  source 1..9: note = Seed: VVGADGVGK (KRAS G12D)
FVGLDDVGV

SEQ ID NO: 9756 - protein, 9 aa, synthetic construct
  source 1..9: note = Seed: VVGADGVGK (KRAS G12D)
FVGLDEVGA

SEQ ID NO: 9757 - protein, 9 aa, synthetic construct
  source 1..9: note = Seed: VVGADGVGK (KRAS G12D)
FVGLDEVGI

SEQ ID NO: 9758 - protein, 9 aa, synthetic construct
  source 1..9: note = Seed: VVGADGVGK (KRAS G12D)
FVGLDEVGL

SEQ ID NO: 9759 - protein, 9 aa, synthetic construct
  source 1..9: note = Seed: VVGADGVGK (KRAS G12D)
FVGLDEVGV

SEQ ID NO: 9760 - protein, 9 aa, synthetic construct
  source 1..9: note = Seed: VVGADGVGK (KRAS G12D)
FVGLDGVGA

SEQ ID NO: 9761 - protein, 9 aa, synthetic construct
  source 1..9: note = Seed: VVGADGVGK (KRAS G12D)
FVGLDGVGC

SEQ ID NO: 9762 - protein, 9 aa, synthetic construct
  source 1..9: note = Seed: VVGADGVGK (KRAS G12D)
FVGLDGVGD

SEQ ID NO: 9763 - protein, 9 aa, synthetic construct
  source 1..9: note = Seed: VVGADGVGK (KRAS G12D)
FVGLDGVGE

SEQ ID NO: 9764 - protein, 9 aa, synthetic construct
  source 1..9: note = Seed: VVGADGVGK (KRAS G12D)
FVGLDGVGF

SEQ ID NO: 9765 - protein, 9 aa, synthetic construct
  source 1..9: note = Seed: VVGADGVGK (KRAS G12D)
FVGLDGVGG

SEQ ID NO: 9766 - protein, 9 aa, synthetic construct
  source 1..9: note = Seed: VVGADGVGK (KRAS G12D)
FVGLDGVGH

SEQ ID NO: 9767 - protein, 9 aa, synthetic construct
  source 1..9: note = Seed: VVGADGVGK (KRAS G12D)
FVGLDGVGI

SEQ ID NO: 9768 - protein, 9 aa, synthetic construct
  source 1..9: note = Seed: VVGADGVGK (KRAS G12D)
FVGLDGVGK

SEQ ID NO: 9769 - protein, 9 aa, synthetic construct
  source 1..9: note = Seed: VVGADGVGK (KRAS G12D)
FVGLDGVGL

SEQ ID NO: 9770 - protein, 9 aa, synthetic construct
  source 1..9: note = Seed: VVGADGVGK (KRAS G12D)
FVGLDGVGM

SEQ ID NO: 9771 - protein, 9 aa, synthetic construct
  source 1..9: note = Seed: VVGADGVGK (KRAS G12D)
FVGLDGVGN

SEQ ID NO: 9772 - protein, 9 aa, synthetic construct
  source 1..9: note = Seed: VVGADGVGK (KRAS G12D)
FVGLDGVGP

SEQ ID NO: 9773 - protein, 9 aa, synthetic construct
  source 1..9: note = Seed: VVGADGVGK (KRAS G12D)
FVGLDGVGQ

SEQ ID NO: 9774 - protein, 9 aa, synthetic construct
  source 1..9: note = Seed: VVGADGVGK (KRAS G12D)
FVGLDGVGR

SEQ ID NO: 9775 - protein, 9 aa, synthetic construct
  source 1..9: note = Seed: VVGADGVGK (KRAS G12D)
FVGLDGVGS

SEQ ID NO: 9776 - protein, 9 aa, synthetic construct
  source 1..9: note = Seed: VVGADGVGK (KRAS G12D)
FVGLDGVGT

SEQ ID NO: 9777 - protein, 9 aa, synthetic construct
  source 1..9: note = Seed: VVGADGVGK (KRAS G12D)
FVGLDGVGV

SEQ ID NO: 9778 - protein, 9 aa, synthetic construct
  source 1..9: note = Seed: VVGADGVGK (KRAS G12D)
FVGLDGVGY

SEQ ID NO: 9779 - protein, 9 aa, synthetic construct
  source 1..9: note = Seed: VVGADGVGK (KRAS G12D)
FVGLDHVGA

SEQ ID NO: 9780 - protein, 9 aa, synthetic construct
  source 1..9: note = Seed: VVGADGVGK (KRAS G12D)
FVGLDHVGG

SEQ ID NO: 9781 - protein, 9 aa, synthetic construct
  source 1..9: note = Seed: VVGADGVGK (KRAS G12D)
FVGLDHVGI

SEQ ID NO: 9782 - protein, 9 aa, synthetic construct
  source 1..9: note = Seed: VVGADGVGK (KRAS G12D)
FVGLDHVGL

SEQ ID NO: 9783 - protein, 9 aa, synthetic construct
  source 1..9: note = Seed: VVGADGVGK (KRAS G12D)
FVGLDHVGM

SEQ ID NO: 9784 - protein, 9 aa, synthetic construct
  source 1..9: note = Seed: VVGADGVGK (KRAS G12D)
FVGLDHVGS

SEQ ID NO: 9785 - protein, 9 aa, synthetic construct
  source 1..9: note = Seed: VVGADGVGK (KRAS G12D)
FVGLDHVGT

SEQ ID NO: 9786 - protein, 9 aa, synthetic construct
  source 1..9: note = Seed: VVGADGVGK (KRAS G12D)
FVGLDHVGV

SEQ ID NO: 9787 - protein, 9 aa, synthetic construct
  source 1..9: note = Seed: VVGADGVGK (KRAS G12D)
FVGLDIVGA

SEQ ID NO: 9788 - protein, 9 aa, synthetic construct
  source 1..9: note = Seed: VVGADGVGK (KRAS G12D)
FVGLDIVGG

SEQ ID NO: 9789 - protein, 9 aa, synthetic construct
  source 1..9: note = Seed: VVGADGVGK (KRAS G12D)
FVGLDIVGH

SEQ ID NO: 9790 - protein, 9 aa, synthetic construct
  source 1..9: note = Seed: VVGADGVGK (KRAS G12D)
FVGLDIVGN

SEQ ID NO: 9791 - protein, 9 aa, synthetic construct
  source 1..9: note = Seed: VVGADGVGK (KRAS G12D)
FVGLDIVGS

SEQ ID NO: 9792 - protein, 9 aa, synthetic construct
  source 1..9: note = Seed: VVGADGVGK (KRAS G12D)
FVGLDIVGT

SEQ ID NO: 9793 - protein, 9 aa, synthetic construct
  source 1..9: note = Seed: VVGADGVGK (KRAS G12D)
FVGLDIVGV

SEQ ID NO: 9794 - protein, 9 aa, synthetic construct
  source 1..9: note = Seed: VVGADGVGK (KRAS G12D)
FVGLDKVGA

SEQ ID NO: 9795 - protein, 9 aa, synthetic construct
  source 1..9: note = Seed: VVGADGVGK (KRAS G12D)
FVGLDLVGA

SEQ ID NO: 9796 - protein, 9 aa, synthetic construct
  source 1..9: note = Seed: VVGADGVGK (KRAS G12D)
FVGLDMVGS

SEQ ID NO: 9797 - protein, 9 aa, synthetic construct
  source 1..9: note = Seed: VVGADGVGK (KRAS G12D)
FVGLDNVGA

SEQ ID NO: 9798 - protein, 9 aa, synthetic construct
  source 1..9: note = Seed: VVGADGVGK (KRAS G12D)
FVGLDNVGC

SEQ ID NO: 9799 - protein, 9 aa, synthetic construct
  source 1..9: note = Seed: VVGADGVGK (KRAS G12D)
FVGLDNVGF

SEQ ID NO: 9800 - protein, 9 aa, synthetic construct
  source 1..9: note = Seed: VVGADGVGK (KRAS G12D)
FVGLDNVGG

SEQ ID NO: 9801 - protein, 9 aa, synthetic construct
  source 1..9: note = Seed: VVGADGVGK (KRAS G12D)
FVGLDNVGH

SEQ ID NO: 9802 - protein, 9 aa, synthetic construct
  source 1..9: note = Seed: VVGADGVGK (KRAS G12D)
FVGLDNVGI

SEQ ID NO: 9803 - protein, 9 aa, synthetic construct
  source 1..9: note = Seed: VVGADGVGK (KRAS G12D)
FVGLDNVGK

SEQ ID NO: 9804 - protein, 9 aa, synthetic construct
  source 1..9: note = Seed: VVGADGVGK (KRAS G12D)
FVGLDNVGL

SEQ ID NO: 9805 - protein, 9 aa, synthetic construct
  source 1..9: note = Seed: VVGADGVGK (KRAS G12D)
FVGLDNVGM

SEQ ID NO: 9806 - protein, 9 aa, synthetic construct
  source 1..9: note = Seed: VVGADGVGK (KRAS G12D)
FVGLDNVGN

SEQ ID NO: 9807 - protein, 9 aa, synthetic construct
  source 1..9: note = Seed: VVGADGVGK (KRAS G12D)
FVGLDNVGP

SEQ ID NO: 9808 - protein, 9 aa, synthetic construct
  source 1..9: note = Seed: VVGADGVGK (KRAS G12D)
FVGLDNVGQ

SEQ ID NO: 9809 - protein, 9 aa, synthetic construct
  source 1..9: note = Seed: VVGADGVGK (KRAS G12D)
FVGLDNVGR

SEQ ID NO: 9810 - protein, 9 aa, synthetic construct
  source 1..9: note = Seed: VVGADGVGK (KRAS G12D)
FVGLDNVGS

SEQ ID NO: 9811 - protein, 9 aa, synthetic construct
  source 1..9: note = Seed: VVGADGVGK (KRAS G12D)
FVGLDNVGT

SEQ ID NO: 9812 - protein, 9 aa, synthetic construct
  source 1..9: note = Seed: VVGADGVGK (KRAS G12D)
FVGLDNVGV

SEQ ID NO: 9813 - protein, 9 aa, synthetic construct
  source 1..9: note = Seed: VVGADGVGK (KRAS G12D)
FVGLDNVGY

SEQ ID NO: 9814 - protein, 9 aa, synthetic construct
  source 1..9: note = Seed: VVGADGVGK (KRAS G12D)
FVGLDPVGA

SEQ ID NO: 9815 - protein, 9 aa, synthetic construct
  source 1..9: note = Seed: VVGADGVGK (KRAS G12D)
FVGLDPVGC

SEQ ID NO: 9816 - protein, 9 aa, synthetic construct
  source 1..9: note = Seed: VVGADGVGK (KRAS G12D)
FVGLDPVGF

SEQ ID NO: 9817 - protein, 9 aa, synthetic construct
  source 1..9: note = Seed: VVGADGVGK (KRAS G12D)
FVGLDPVGG

SEQ ID NO: 9818 - protein, 9 aa, synthetic construct
  source 1..9: note = Seed: VVGADGVGK (KRAS G12D)
FVGLDPVGH

SEQ ID NO: 9819 - protein, 9 aa, synthetic construct
  source 1..9: note = Seed: VVGADGVGK (KRAS G12D)
FVGLDPVGI

SEQ ID NO: 9820 - protein, 9 aa, synthetic construct
  source 1..9: note = Seed: VVGADGVGK (KRAS G12D)
FVGLDPVGK

SEQ ID NO: 9821 - protein, 9 aa, synthetic construct
  source 1..9: note = Seed: VVGADGVGK (KRAS G12D)
FVGLDPVGL

SEQ ID NO: 9822 - protein, 9 aa, synthetic construct
  source 1..9: note = Seed: VVGADGVGK (KRAS G12D)
FVGLDPVGM

SEQ ID NO: 9823 - protein, 9 aa, synthetic construct
  source 1..9: note = Seed: VVGADGVGK (KRAS G12D)
FVGLDPVGN

SEQ ID NO: 9824 - protein, 9 aa, synthetic construct
  source 1..9: note = Seed: VVGADGVGK (KRAS G12D)
FVGLDPVGP

SEQ ID NO: 9825 - protein, 9 aa, synthetic construct
  source 1..9: note = Seed: VVGADGVGK (KRAS G12D)
FVGLDPVGQ

SEQ ID NO: 9826 - protein, 9 aa, synthetic construct
  source 1..9: note = Seed: VVGADGVGK (KRAS G12D)
FVGLDPVGR

SEQ ID NO: 9827 - protein, 9 aa, synthetic construct
  source 1..9: note = Seed: VVGADGVGK (KRAS G12D)
FVGLDPVGS

SEQ ID NO: 9828 - protein, 9 aa, synthetic construct
  source 1..9: note = Seed: VVGADGVGK (KRAS G12D)
FVGLDPVGT

SEQ ID NO: 9829 - protein, 9 aa, synthetic construct
  source 1..9: note = Seed: VVGADGVGK (KRAS G12D)
FVGLDPVGV

SEQ ID NO: 9830 - protein, 9 aa, synthetic construct
  source 1..9: note = Seed: VVGADGVGK (KRAS G12D)
FVGLDPVGY

SEQ ID NO: 9831 - protein, 9 aa, synthetic construct
  source 1..9: note = Seed: VVGADGVGK (KRAS G12D)
FVGLDQVGA

SEQ ID NO: 9832 - protein, 9 aa, synthetic construct
  source 1..9: note = Seed: VVGADGVGK (KRAS G12D)
FVGLDQVGI

SEQ ID NO: 9833 - protein, 9 aa, synthetic construct
  source 1..9: note = Seed: VVGADGVGK (KRAS G12D)
FVGLDQVGL

SEQ ID NO: 9834 - protein, 9 aa, synthetic construct
  source 1..9: note = Seed: VVGADGVGK (KRAS G12D)
FVGLDQVGS

SEQ ID NO: 9835 - protein, 9 aa, synthetic construct
  source 1..9: note = Seed: VVGADGVGK (KRAS G12D)
FVGLDQVGV

SEQ ID NO: 9836 - protein, 9 aa, synthetic construct
  source 1..9: note = Seed: VVGADGVGK (KRAS G12D)
FVGLDRVGR

SEQ ID NO: 9837 - protein, 9 aa, synthetic construct
  source 1..9: note = Seed: VVGADGVGK (KRAS G12D)
FVGLDSVGA

SEQ ID NO: 9838 - protein, 9 aa, synthetic construct
  source 1..9: note = Seed: VVGADGVGK (KRAS G12D)
FVGLDSVGC

SEQ ID NO: 9839 - protein, 9 aa, synthetic construct
  source 1..9: note = Seed: VVGADGVGK (KRAS G12D)
FVGLDSVGF

SEQ ID NO: 9840 - protein, 9 aa, synthetic construct
  source 1..9: note = Seed: VVGADGVGK (KRAS G12D)
FVGLDSVGG

SEQ ID NO: 9841 - protein, 9 aa, synthetic construct
  source 1..9: note = Seed: VVGADGVGK (KRAS G12D)
FVGLDSVGH

SEQ ID NO: 9842 - protein, 9 aa, synthetic construct
  source 1..9: note = Seed: VVGADGVGK (KRAS G12D)
FVGLDSVGI

SEQ ID NO: 9843 - protein, 9 aa, synthetic construct
  source 1..9: note = Seed: VVGADGVGK (KRAS G12D)
FVGLDSVGK

SEQ ID NO: 9844 - protein, 9 aa, synthetic construct
  source 1..9: note = Seed: VVGADGVGK (KRAS G12D)
FVGLDSVGL

SEQ ID NO: 9845 - protein, 9 aa, synthetic construct
  source 1..9: note = Seed: VVGADGVGK (KRAS G12D)
FVGLDSVGM

SEQ ID NO: 9846 - protein, 9 aa, synthetic construct
  source 1..9: note = Seed: VVGADGVGK (KRAS G12D)
FVGLDSVGN

SEQ ID NO: 9847 - protein, 9 aa, synthetic construct
  source 1..9: note = Seed: VVGADGVGK (KRAS G12D)
FVGLDSVGP

SEQ ID NO: 9848 - protein, 9 aa, synthetic construct
  source 1..9: note = Seed: VVGADGVGK (KRAS G12D)
FVGLDSVGQ

SEQ ID NO: 9849 - protein, 9 aa, synthetic construct
  source 1..9: note = Seed: VVGADGVGK (KRAS G12D)
FVGLDSVGR

SEQ ID NO: 9850 - protein, 9 aa, synthetic construct
  source 1..9: note = Seed: VVGADGVGK (KRAS G12D)
FVGLDSVGS

SEQ ID NO: 9851 - protein, 9 aa, synthetic construct
  source 1..9: note = Seed: VVGADGVGK (KRAS G12D)
FVGLDSVGT

SEQ ID NO: 9852 - protein, 9 aa, synthetic construct
  source 1..9: note = Seed: VVGADGVGK (KRAS G12D)
FVGLDSVGV

SEQ ID NO: 9853 - protein, 9 aa, synthetic construct
  source 1..9: note = Seed: VVGADGVGK (KRAS G12D)
FVGLDSVGY

SEQ ID NO: 9854 - protein, 9 aa, synthetic construct
  source 1..9: note = Seed: VVGADGVGK (KRAS G12D)
FVGLDTVGA

SEQ ID NO: 9855 - protein, 9 aa, synthetic construct
  source 1..9: note = Seed: VVGADGVGK (KRAS G12D)
FVGLDTVGC

SEQ ID NO: 9856 - protein, 9 aa, synthetic construct
  source 1..9: note = Seed: VVGADGVGK (KRAS G12D)
FVGLDTVGF

SEQ ID NO: 9857 - protein, 9 aa, synthetic construct
  source 1..9: note = Seed: VVGADGVGK (KRAS G12D)
FVGLDTVGG

SEQ ID NO: 9858 - protein, 9 aa, synthetic construct
  source 1..9: note = Seed: VVGADGVGK (KRAS G12D)
FVGLDTVGH

SEQ ID NO: 9859 - protein, 9 aa, synthetic construct
  source 1..9: note = Seed: VVGADGVGK (KRAS G12D)
FVGLDTVGI

SEQ ID NO: 9860 - protein, 9 aa, synthetic construct
  source 1..9: note = Seed: VVGADGVGK (KRAS G12D)
FVGLDTVGK

SEQ ID NO: 9861 - protein, 9 aa, synthetic construct
  source 1..9: note = Seed: VVGADGVGK (KRAS G12D)
FVGLDTVGL

SEQ ID NO: 9862 - protein, 9 aa, synthetic construct
  source 1..9: note = Seed: VVGADGVGK (KRAS G12D)
FVGLDTVGM

SEQ ID NO: 9863 - protein, 9 aa, synthetic construct
  source 1..9: note = Seed: VVGADGVGK (KRAS G12D)
FVGLDTVGN

SEQ ID NO: 9864 - protein, 9 aa, synthetic construct
  source 1..9: note = Seed: VVGADGVGK (KRAS G12D)
FVGLDTVGP

SEQ ID NO: 9865 - protein, 9 aa, synthetic construct
  source 1..9: note = Seed: VVGADGVGK (KRAS G12D)
FVGLDTVGQ

SEQ ID NO: 9866 - protein, 9 aa, synthetic construct
  source 1..9: note = Seed: VVGADGVGK (KRAS G12D)
FVGLDTVGR

SEQ ID NO: 9867 - protein, 9 aa, synthetic construct
  source 1..9: note = Seed: VVGADGVGK (KRAS G12D)
FVGLDTVGS

SEQ ID NO: 9868 - protein, 9 aa, synthetic construct
  source 1..9: note = Seed: VVGADGVGK (KRAS G12D)
FVGLDTVGT

SEQ ID NO: 9869 - protein, 9 aa, synthetic construct
  source 1..9: note = Seed: VVGADGVGK (KRAS G12D)
FVGLDTVGV

SEQ ID NO: 9870 - protein, 9 aa, synthetic construct
  source 1..9: note = Seed: VVGADGVGK (KRAS G12D)
FVGLDTVGY

SEQ ID NO: 9871 - protein, 9 aa, synthetic construct
  source 1..9: note = Seed: VVGADGVGK (KRAS G12D)
FVGLDVVGA

SEQ ID NO: 9872 - protein, 9 aa, synthetic construct
  source 1..9: note = Seed: VVGADGVGK (KRAS G12D)
FVGLDVVGG

SEQ ID NO: 9873 - protein, 9 aa, synthetic construct
  source 1..9: note = Seed: VVGADGVGK (KRAS G12D)
FVGLDVVGH

SEQ ID NO: 9874 - protein, 9 aa, synthetic construct
  source 1..9: note = Seed: VVGADGVGK (KRAS G12D)
FVGLDVVGI

SEQ ID NO: 9875 - protein, 9 aa, synthetic construct
  source 1..9: note = Seed: VVGADGVGK (KRAS G12D)
FVGLDVVGL

SEQ ID NO: 9876 - protein, 9 aa, synthetic construct
  source 1..9: note = Seed: VVGADGVGK (KRAS G12D)
FVGLDVVGM

SEQ ID NO: 9877 - protein, 9 aa, synthetic construct
  source 1..9: note = Seed: VVGADGVGK (KRAS G12D)
FVGLDVVGN

SEQ ID NO: 9878 - protein, 9 aa, synthetic construct
  source 1..9: note = Seed: VVGADGVGK (KRAS G12D)
FVGLDVVGS

SEQ ID NO: 9879 - protein, 9 aa, synthetic construct
  source 1..9: note = Seed: VVGADGVGK (KRAS G12D)
FVGLDVVGT

SEQ ID NO: 9880 - protein, 9 aa, synthetic construct
  source 1..9: note = Seed: VVGADGVGK (KRAS G12D)
FVGLDVVGV

SEQ ID NO: 9881 - protein, 9 aa, synthetic construct
  source 1..9: note = Seed: VVGADGVGK (KRAS G12D)
FVGMDAVGA

SEQ ID NO: 9882 - protein, 9 aa, synthetic construct
  source 1..9: note = Seed: VVGADGVGK (KRAS G12D)
FVGMDAVGC

SEQ ID NO: 9883 - protein, 9 aa, synthetic construct
  source 1..9: note = Seed: VVGADGVGK (KRAS G12D)
FVGMDAVGD

SEQ ID NO: 9884 - protein, 9 aa, synthetic construct
  source 1..9: note = Seed: VVGADGVGK (KRAS G12D)
FVGMDAVGE

SEQ ID NO: 9885 - protein, 9 aa, synthetic construct
  source 1..9: note = Seed: VVGADGVGK (KRAS G12D)
FVGMDAVGF

SEQ ID NO: 9886 - protein, 9 aa, synthetic construct
  source 1..9: note = Seed: VVGADGVGK (KRAS G12D)
FVGMDAVGG

SEQ ID NO: 9887 - protein, 9 aa, synthetic construct
  source 1..9: note = Seed: VVGADGVGK (KRAS G12D)
FVGMDAVGH

SEQ ID NO: 9888 - protein, 9 aa, synthetic construct
  source 1..9: note = Seed: VVGADGVGK (KRAS G12D)
FVGMDAVGI

SEQ ID NO: 9889 - protein, 9 aa, synthetic construct
  source 1..9: note = Seed: VVGADGVGK (KRAS G12D)
FVGMDAVGK

SEQ ID NO: 9890 - protein, 9 aa, synthetic construct
  source 1..9: note = Seed: VVGADGVGK (KRAS G12D)
FVGMDAVGL

SEQ ID NO: 9891 - protein, 9 aa, synthetic construct
  source 1..9: note = Seed: VVGADGVGK (KRAS G12D)
FVGMDAVGM

SEQ ID NO: 9892 - protein, 9 aa, synthetic construct
  source 1..9: note = Seed: VVGADGVGK (KRAS G12D)
FVGMDAVGN

SEQ ID NO: 9893 - protein, 9 aa, synthetic construct
  source 1..9: note = Seed: VVGADGVGK (KRAS G12D)
FVGMDAVGP

SEQ ID NO: 9894 - protein, 9 aa, synthetic construct
  source 1..9: note = Seed: VVGADGVGK (KRAS G12D)
FVGMDAVGQ

SEQ ID NO: 9895 - protein, 9 aa, synthetic construct
  source 1..9: note = Seed: VVGADGVGK (KRAS G12D)
FVGMDAVGR

SEQ ID NO: 9896 - protein, 9 aa, synthetic construct
  source 1..9: note = Seed: VVGADGVGK (KRAS G12D)
FVGMDAVGS

SEQ ID NO: 9897 - protein, 9 aa, synthetic construct
  source 1..9: note = Seed: VVGADGVGK (KRAS G12D)
FVGMDAVGT

SEQ ID NO: 9898 - protein, 9 aa, synthetic construct
  source 1..9: note = Seed: VVGADGVGK (KRAS G12D)
FVGMDAVGV

SEQ ID NO: 9899 - protein, 9 aa, synthetic construct
  source 1..9: note = Seed: VVGADGVGK (KRAS G12D)
FVGMDAVGY

SEQ ID NO: 9900 - protein, 9 aa, synthetic construct
  source 1..9: note = Seed: VVGADGVGK (KRAS G12D)
FVGMDDVGA

SEQ ID NO: 9901 - protein, 9 aa, synthetic construct
  source 1..9: note = Seed: VVGADGVGK (KRAS G12D)
FVGMDDVGI

SEQ ID NO: 9902 - protein, 9 aa, synthetic construct
  source 1..9: note = Seed: VVGADGVGK (KRAS G12D)
FVGMDDVGL

SEQ ID NO: 9903 - protein, 9 aa, synthetic construct
  source 1..9: note = Seed: VVGADGVGK (KRAS G12D)
FVGMDDVGV

SEQ ID NO: 9904 - protein, 9 aa, synthetic construct
  source 1..9: note = Seed: VVGADGVGK (KRAS G12D)
FVGMDEVGA

SEQ ID NO: 9905 - protein, 9 aa, synthetic construct
  source 1..9: note = Seed: VVGADGVGK (KRAS G12D)
FVGMDEVGL

SEQ ID NO: 9906 - protein, 9 aa, synthetic construct
  source 1..9: note = Seed: VVGADGVGK (KRAS G12D)
FVGMDEVGV

SEQ ID NO: 9907 - protein, 9 aa, synthetic construct
  source 1..9: note = Seed: VVGADGVGK (KRAS G12D)
FVGMDGVGA

SEQ ID NO: 9908 - protein, 9 aa, synthetic construct
  source 1..9: note = Seed: VVGADGVGK (KRAS G12D)
FVGMDGVGC

SEQ ID NO: 9909 - protein, 9 aa, synthetic construct
  source 1..9: note = Seed: VVGADGVGK (KRAS G12D)
FVGMDGVGF

SEQ ID NO: 9910 - protein, 9 aa, synthetic construct
  source 1..9: note = Seed: VVGADGVGK (KRAS G12D)
FVGMDGVGG

SEQ ID NO: 9911 - protein, 9 aa, synthetic construct
  source 1..9: note = Seed: VVGADGVGK (KRAS G12D)
FVGMDGVGH

SEQ ID NO: 9912 - protein, 9 aa, synthetic construct
  source 1..9: note = Seed: VVGADGVGK (KRAS G12D)
FVGMDGVGI

SEQ ID NO: 9913 - protein, 9 aa, synthetic construct
  source 1..9: note = Seed: VVGADGVGK (KRAS G12D)
FVGMDGVGK

SEQ ID NO: 9914 - protein, 9 aa, synthetic construct
  source 1..9: note = Seed: VVGADGVGK (KRAS G12D)
FVGMDGVGL

SEQ ID NO: 9915 - protein, 9 aa, synthetic construct
  source 1..9: note = Seed: VVGADGVGK (KRAS G12D)
FVGMDGVGM

SEQ ID NO: 9916 - protein, 9 aa, synthetic construct
  source 1..9: note = Seed: VVGADGVGK (KRAS G12D)
FVGMDGVGN

SEQ ID NO: 9917 - protein, 9 aa, synthetic construct
  source 1..9: note = Seed: VVGADGVGK (KRAS G12D)
FVGMDGVGP

SEQ ID NO: 9918 - protein, 9 aa, synthetic construct
  source 1..9: note = Seed: VVGADGVGK (KRAS G12D)
FVGMDGVGQ

SEQ ID NO: 9919 - protein, 9 aa, synthetic construct
  source 1..9: note = Seed: VVGADGVGK (KRAS G12D)
FVGMDGVGR

SEQ ID NO: 9920 - protein, 9 aa, synthetic construct
  source 1..9: note = Seed: VVGADGVGK (KRAS G12D)
FVGMDGVGS

SEQ ID NO: 9921 - protein, 9 aa, synthetic construct
  source 1..9: note = Seed: VVGADGVGK (KRAS G12D)
FVGMDGVGT

SEQ ID NO: 9922 - protein, 9 aa, synthetic construct
  source 1..9: note = Seed: VVGADGVGK (KRAS G12D)
FVGMDGVGV

SEQ ID NO: 9923 - protein, 9 aa, synthetic construct
  source 1..9: note = Seed: VVGADGVGK (KRAS G12D)
FVGMDGVGY

SEQ ID NO: 9924 - protein, 9 aa, synthetic construct
  source 1..9: note = Seed: VVGADGVGK (KRAS G12D)
FVGMDHVGA

SEQ ID NO: 9925 - protein, 9 aa, synthetic construct
  source 1..9: note = Seed: VVGADGVGK (KRAS G12D)
FVGMDHVGI

SEQ ID NO: 9926 - protein, 9 aa, synthetic construct
  source 1..9: note = Seed: VVGADGVGK (KRAS G12D)
FVGMDHVGL

SEQ ID NO: 9927 - protein, 9 aa, synthetic construct
  source 1..9: note = Seed: VVGADGVGK (KRAS G12D)
FVGMDHVGM

SEQ ID NO: 9928 - protein, 9 aa, synthetic construct
  source 1..9: note = Seed: VVGADGVGK (KRAS G12D)
FVGMDHVGS

SEQ ID NO: 9929 - protein, 9 aa, synthetic construct
  source 1..9: note = Seed: VVGADGVGK (KRAS G12D)
FVGMDHVGT

SEQ ID NO: 9930 - protein, 9 aa, synthetic construct
  source 1..9: note = Seed: VVGADGVGK (KRAS G12D)
FVGMDHVGV

SEQ ID NO: 9931 - protein, 9 aa, synthetic construct
  source 1..9: note = Seed: VVGADGVGK (KRAS G12D)
FVGMDIVGA

SEQ ID NO: 9932 - protein, 9 aa, synthetic construct
  source 1..9: note = Seed: VVGADGVGK (KRAS G12D)
FVGMDIVGG

SEQ ID NO: 9933 - protein, 9 aa, synthetic construct
  source 1..9: note = Seed: VVGADGVGK (KRAS G12D)
FVGMDIVGH

SEQ ID NO: 9934 - protein, 9 aa, synthetic construct
  source 1..9: note = Seed: VVGADGVGK (KRAS G12D)
FVGMDIVGN

SEQ ID NO: 9935 - protein, 9 aa, synthetic construct
  source 1..9: note = Seed: VVGADGVGK (KRAS G12D)
FVGMDIVGS

SEQ ID NO: 9936 - protein, 9 aa, synthetic construct
  source 1..9: note = Seed: VVGADGVGK (KRAS G12D)
FVGMDIVGT

SEQ ID NO: 9937 - protein, 9 aa, synthetic construct
  source 1..9: note = Seed: VVGADGVGK (KRAS G12D)
FVGMDIVGV

SEQ ID NO: 9938 - protein, 9 aa, synthetic construct
  source 1..9: note = Seed: VVGADGVGK (KRAS G12D)
FVGMDLVGA

SEQ ID NO: 9939 - protein, 9 aa, synthetic construct
  source 1..9: note = Seed: VVGADGVGK (KRAS G12D)
FVGMDMVGA

SEQ ID NO: 9940 - protein, 9 aa, synthetic construct
  source 1..9: note = Seed: VVGADGVGK (KRAS G12D)
FVGMDNVGA

SEQ ID NO: 9941 - protein, 9 aa, synthetic construct
  source 1..9: note = Seed: VVGADGVGK (KRAS G12D)
FVGMDNVGC

SEQ ID NO: 9942 - protein, 9 aa, synthetic construct
  source 1..9: note = Seed: VVGADGVGK (KRAS G12D)
FVGMDNVGF

SEQ ID NO: 9943 - protein, 9 aa, synthetic construct
  source 1..9: note = Seed: VVGADGVGK (KRAS G12D)
FVGMDNVGG

SEQ ID NO: 9944 - protein, 9 aa, synthetic construct
  source 1..9: note = Seed: VVGADGVGK (KRAS G12D)
FVGMDNVGH

SEQ ID NO: 9945 - protein, 9 aa, synthetic construct
  source 1..9: note = Seed: VVGADGVGK (KRAS G12D)
FVGMDNVGI

SEQ ID NO: 9946 - protein, 9 aa, synthetic construct
  source 1..9: note = Seed: VVGADGVGK (KRAS G12D)
FVGMDNVGK

SEQ ID NO: 9947 - protein, 9 aa, synthetic construct
  source 1..9: note = Seed: VVGADGVGK (KRAS G12D)
FVGMDNVGL

SEQ ID NO: 9948 - protein, 9 aa, synthetic construct
  source 1..9: note = Seed: VVGADGVGK (KRAS G12D)
FVGMDNVGM

SEQ ID NO: 9949 - protein, 9 aa, synthetic construct
  source 1..9: note = Seed: VVGADGVGK (KRAS G12D)
FVGMDNVGN

SEQ ID NO: 9950 - protein, 9 aa, synthetic construct
  source 1..9: note = Seed: VVGADGVGK (KRAS G12D)
FVGMDNVGP

SEQ ID NO: 9951 - protein, 9 aa, synthetic construct
  source 1..9: note = Seed: VVGADGVGK (KRAS G12D)
FVGMDNVGQ

SEQ ID NO: 9952 - protein, 9 aa, synthetic construct
  source 1..9: note = Seed: VVGADGVGK (KRAS G12D)
FVGMDNVGR

SEQ ID NO: 9953 - protein, 9 aa, synthetic construct
  source 1..9: note = Seed: VVGADGVGK (KRAS G12D)
FVGMDNVGS

SEQ ID NO: 9954 - protein, 9 aa, synthetic construct
  source 1..9: note = Seed: VVGADGVGK (KRAS G12D)
FVGMDNVGT

SEQ ID NO: 9955 - protein, 9 aa, synthetic construct
  source 1..9: note = Seed: VVGADGVGK (KRAS G12D)
FVGMDNVGV

SEQ ID NO: 9956 - protein, 9 aa, synthetic construct
  source 1..9: note = Seed: VVGADGVGK (KRAS G12D)
FVGMDNVGY

SEQ ID NO: 9957 - protein, 9 aa, synthetic construct
  source 1..9: note = Seed: VVGADGVGK (KRAS G12D)
FVGMDPVGA

SEQ ID NO: 9958 - protein, 9 aa, synthetic construct
  source 1..9: note = Seed: VVGADGVGK (KRAS G12D)
FVGMDPVGC

SEQ ID NO: 9959 - protein, 9 aa, synthetic construct
  source 1..9: note = Seed: VVGADGVGK (KRAS G12D)
FVGMDPVGF

SEQ ID NO: 9960 - protein, 9 aa, synthetic construct
  source 1..9: note = Seed: VVGADGVGK (KRAS G12D)
FVGMDPVGG

SEQ ID NO: 9961 - protein, 9 aa, synthetic construct
  source 1..9: note = Seed: VVGADGVGK (KRAS G12D)
FVGMDPVGH

SEQ ID NO: 9962 - protein, 9 aa, synthetic construct
  source 1..9: note = Seed: VVGADGVGK (KRAS G12D)
FVGMDPVGI

SEQ ID NO: 9963 - protein, 9 aa, synthetic construct
  source 1..9: note = Seed: VVGADGVGK (KRAS G12D)
FVGMDPVGK

SEQ ID NO: 9964 - protein, 9 aa, synthetic construct
  source 1..9: note = Seed: VVGADGVGK (KRAS G12D)
FVGMDPVGL

SEQ ID NO: 9965 - protein, 9 aa, synthetic construct
  source 1..9: note = Seed: VVGADGVGK (KRAS G12D)
FVGMDPVGM

SEQ ID NO: 9966 - protein, 9 aa, synthetic construct
  source 1..9: note = Seed: VVGADGVGK (KRAS G12D)
FVGMDPVGN

SEQ ID NO: 9967 - protein, 9 aa, synthetic construct
  source 1..9: note = Seed: VVGADGVGK (KRAS G12D)
FVGMDPVGP

SEQ ID NO: 9968 - protein, 9 aa, synthetic construct
  source 1..9: note = Seed: VVGADGVGK (KRAS G12D)
FVGMDPVGQ

SEQ ID NO: 9969 - protein, 9 aa, synthetic construct
  source 1..9: note = Seed: VVGADGVGK (KRAS G12D)
FVGMDPVGR

SEQ ID NO: 9970 - protein, 9 aa, synthetic construct
  source 1..9: note = Seed: VVGADGVGK (KRAS G12D)
FVGMDPVGS

SEQ ID NO: 9971 - protein, 9 aa, synthetic construct
  source 1..9: note = Seed: VVGADGVGK (KRAS G12D)
FVGMDPVGT

SEQ ID NO: 9972 - protein, 9 aa, synthetic construct
  source 1..9: note = Seed: VVGADGVGK (KRAS G12D)
FVGMDPVGV

SEQ ID NO: 9973 - protein, 9 aa, synthetic construct
  source 1..9: note = Seed: VVGADGVGK (KRAS G12D)
FVGMDPVGY

SEQ ID NO: 9974 - protein, 9 aa, synthetic construct
  source 1..9: note = Seed: VVGADGVGK (KRAS G12D)
FVGMDQVGA

SEQ ID NO: 9975 - protein, 9 aa, synthetic construct
  source 1..9: note = Seed: VVGADGVGK (KRAS G12D)
FVGMDQVGI

SEQ ID NO: 9976 - protein, 9 aa, synthetic construct
  source 1..9: note = Seed: VVGADGVGK (KRAS G12D)
FVGMDQVGL

SEQ ID NO: 9977 - protein, 9 aa, synthetic construct
  source 1..9: note = Seed: VVGADGVGK (KRAS G12D)
FVGMDQVGV

SEQ ID NO: 9978 - protein, 9 aa, synthetic construct
  source 1..9: note = Seed: VVGADGVGK (KRAS G12D)
FVGMDRVGR

SEQ ID NO: 9979 - protein, 9 aa, synthetic construct
  source 1..9: note = Seed: VVGADGVGK (KRAS G12D)
FVGMDSVGA

SEQ ID NO: 9980 - protein, 9 aa, synthetic construct
  source 1..9: note = Seed: VVGADGVGK (KRAS G12D)
FVGMDSVGC

SEQ ID NO: 9981 - protein, 9 aa, synthetic construct
  source 1..9: note = Seed: VVGADGVGK (KRAS G12D)
FVGMDSVGF

SEQ ID NO: 9982 - protein, 9 aa, synthetic construct
  source 1..9: note = Seed: VVGADGVGK (KRAS G12D)
FVGMDSVGG

SEQ ID NO: 9983 - protein, 9 aa, synthetic construct
  source 1..9: note = Seed: VVGADGVGK (KRAS G12D)
FVGMDSVGH

SEQ ID NO: 9984 - protein, 9 aa, synthetic construct
  source 1..9: note = Seed: VVGADGVGK (KRAS G12D)
FVGMDSVGI

SEQ ID NO: 9985 - protein, 9 aa, synthetic construct
  source 1..9: note = Seed: VVGADGVGK (KRAS G12D)
FVGMDSVGK

SEQ ID NO: 9986 - protein, 9 aa, synthetic construct
  source 1..9: note = Seed: VVGADGVGK (KRAS G12D)
FVGMDSVGL

SEQ ID NO: 9987 - protein, 9 aa, synthetic construct
  source 1..9: note = Seed: VVGADGVGK (KRAS G12D)
FVGMDSVGM

SEQ ID NO: 9988 - protein, 9 aa, synthetic construct
  source 1..9: note = Seed: VVGADGVGK (KRAS G12D)
FVGMDSVGN

SEQ ID NO: 9989 - protein, 9 aa, synthetic construct
  source 1..9: note = Seed: VVGADGVGK (KRAS G12D)
FVGMDSVGP

SEQ ID NO: 9990 - protein, 9 aa, synthetic construct
  source 1..9: note = Seed: VVGADGVGK (KRAS G12D)
FVGMDSVGQ

SEQ ID NO: 9991 - protein, 9 aa, synthetic construct
  source 1..9: note = Seed: VVGADGVGK (KRAS G12D)
FVGMDSVGR

SEQ ID NO: 9992 - protein, 9 aa, synthetic construct
  source 1..9: note = Seed: VVGADGVGK (KRAS G12D)
FVGMDSVGS

SEQ ID NO: 9993 - protein, 9 aa, synthetic construct
  source 1..9: note = Seed: VVGADGVGK (KRAS G12D)
FVGMDSVGT

SEQ ID NO: 9994 - protein, 9 aa, synthetic construct
  source 1..9: note = Seed: VVGADGVGK (KRAS G12D)
FVGMDSVGV

SEQ ID NO: 9995 - protein, 9 aa, synthetic construct
  source 1..9: note = Seed: VVGADGVGK (KRAS G12D)
FVGMDSVGY

SEQ ID NO: 9996 - protein, 9 aa, synthetic construct
  source 1..9: note = Seed: VVGADGVGK (KRAS G12D)
FVGMDTVGA

SEQ ID NO: 9997 - protein, 9 aa, synthetic construct
  source 1..9: note = Seed: VVGADGVGK (KRAS G12D)
FVGMDTVGG

SEQ ID NO: 9998 - protein, 9 aa, synthetic construct
  source 1..9: note = Seed: VVGADGVGK (KRAS G12D)
FVGMDTVGH

SEQ ID NO: 9999 - protein, 9 aa, synthetic construct
  source 1..9: note = Seed: VVGADGVGK (KRAS G12D)
FVGMDTVGI

SEQ ID NO: 10000 - protein, 9 aa, synthetic construct
  source 1..9: note = Seed: VVGADGVGK (KRAS G12D)
FVGMDTVGK

SEQ ID NO: 10001 - protein, 9 aa, synthetic construct
  source 1..9: note = Seed: VVGADGVGK (KRAS G12D)
FVGMDTVGL

SEQ ID NO: 10002 - protein, 9 aa, synthetic construct
  source 1..9: note = Seed: VVGADGVGK (KRAS G12D)
FVGMDTVGM

SEQ ID NO: 10003 - protein, 9 aa, synthetic construct
  source 1..9: note = Seed: VVGADGVGK (KRAS G12D)
FVGMDTVGN

SEQ ID NO: 10004 - protein, 9 aa, synthetic construct
  source 1..9: note = Seed: VVGADGVGK (KRAS G12D)
FVGMDTVGP

SEQ ID NO: 10005 - protein, 9 aa, synthetic construct
  source 1..9: note = Seed: VVGADGVGK (KRAS G12D)
FVGMDTVGQ

SEQ ID NO: 10006 - protein, 9 aa, synthetic construct
  source 1..9: note = Seed: VVGADGVGK (KRAS G12D)
FVGMDTVGR

SEQ ID NO: 10007 - protein, 9 aa, synthetic construct
  source 1..9: note = Seed: VVGADGVGK (KRAS G12D)
FVGMDTVGS

SEQ ID NO: 10008 - protein, 9 aa, synthetic construct
  source 1..9: note = Seed: VVGADGVGK (KRAS G12D)
FVGMDTVGT

SEQ ID NO: 10009 - protein, 9 aa, synthetic construct
  source 1..9: note = Seed: VVGADGVGK (KRAS G12D)
FVGMDTVGV

SEQ ID NO: 10010 - protein, 9 aa, synthetic construct
  source 1..9: note = Seed: VVGADGVGK (KRAS G12D)
FVGMDTVGY

SEQ ID NO: 10011 - protein, 9 aa, synthetic construct
  source 1..9: note = Seed: VVGADGVGK (KRAS G12D)
FVGMDVVGA

SEQ ID NO: 10012 - protein, 9 aa, synthetic construct
  source 1..9: note = Seed: VVGADGVGK (KRAS G12D)
FVGMDVVGG

SEQ ID NO: 10013 - protein, 9 aa, synthetic construct
  source 1..9: note = Seed: VVGADGVGK (KRAS G12D)
FVGMDVVGH

SEQ ID NO: 10014 - protein, 9 aa, synthetic construct
  source 1..9: note = Seed: VVGADGVGK (KRAS G12D)
FVGMDVVGI

SEQ ID NO: 10015 - protein, 9 aa, synthetic construct
  source 1..9: note = Seed: VVGADGVGK (KRAS G12D)
FVGMDVVGL

SEQ ID NO: 10016 - protein, 9 aa, synthetic construct
  source 1..9: note = Seed: VVGADGVGK (KRAS G12D)
FVGMDVVGM

SEQ ID NO: 10017 - protein, 9 aa, synthetic construct
  source 1..9: note = Seed: VVGADGVGK (KRAS G12D)
FVGMDVVGN

SEQ ID NO: 10018 - protein, 9 aa, synthetic construct
  source 1..9: note = Seed: VVGADGVGK (KRAS G12D)
FVGMDVVGS

SEQ ID NO: 10019 - protein, 9 aa, synthetic construct
  source 1..9: note = Seed: VVGADGVGK (KRAS G12D)
FVGMDVVGT

SEQ ID NO: 10020 - protein, 9 aa, synthetic construct
  source 1..9: note = Seed: VVGADGVGK (KRAS G12D)
FVGMDVVGV

SEQ ID NO: 10021 - protein, 9 aa, synthetic construct
  source 1..9: note = Seed: VVGADGVGK (KRAS G12D)
FVGNDAVGA

SEQ ID NO: 10022 - protein, 9 aa, synthetic construct
  source 1..9: note = Seed: VVGADGVGK (KRAS G12D)
FVGNDAVGI

SEQ ID NO: 10023 - protein, 9 aa, synthetic construct
  source 1..9: note = Seed: VVGADGVGK (KRAS G12D)
FVGNDAVGL

SEQ ID NO: 10024 - protein, 9 aa, synthetic construct
  source 1..9: note = Seed: VVGADGVGK (KRAS G12D)
FVGNDAVGM

SEQ ID NO: 10025 - protein, 9 aa, synthetic construct
  source 1..9: note = Seed: VVGADGVGK (KRAS G12D)
FVGNDAVGS

SEQ ID NO: 10026 - protein, 9 aa, synthetic construct
  source 1..9: note = Seed: VVGADGVGK (KRAS G12D)
FVGNDAVGT

SEQ ID NO: 10027 - protein, 9 aa, synthetic construct
  source 1..9: note = Seed: VVGADGVGK (KRAS G12D)
FVGNDAVGV

SEQ ID NO: 10028 - protein, 9 aa, synthetic construct
  source 1..9: note = Seed: VVGADGVGK (KRAS G12D)
FVGNDGVGI

SEQ ID NO: 10029 - protein, 9 aa, synthetic construct
  source 1..9: note = Seed: VVGADGVGK (KRAS G12D)
FVGNDGVGL

SEQ ID NO: 10030 - protein, 9 aa, synthetic construct
  source 1..9: note = Seed: VVGADGVGK (KRAS G12D)
FVGNDGVGV

SEQ ID NO: 10031 - protein, 9 aa, synthetic construct
  source 1..9: note = Seed: VVGADGVGK (KRAS G12D)
FVGNDPVGI

SEQ ID NO: 10032 - protein, 9 aa, synthetic construct
  source 1..9: note = Seed: VVGADGVGK (KRAS G12D)
FVGNDPVGL

SEQ ID NO: 10033 - protein, 9 aa, synthetic construct
  source 1..9: note = Seed: VVGADGVGK (KRAS G12D)
FVGNDPVGV

SEQ ID NO: 10034 - protein, 9 aa, synthetic construct
  source 1..9: note = Seed: VVGADGVGK (KRAS G12D)
FVGNDSVGL

SEQ ID NO: 10035 - protein, 9 aa, synthetic construct
  source 1..9: note = Seed: VVGADGVGK (KRAS G12D)
FVGNDSVGV

SEQ ID NO: 10036 - protein, 9 aa, synthetic construct
  source 1..9: note = Seed: VVGADGVGK (KRAS G12D)
FVGQDAVGA

SEQ ID NO: 10037 - protein, 9 aa, synthetic construct
  source 1..9: note = Seed: VVGADGVGK (KRAS G12D)
FVGQDAVGC

SEQ ID NO: 10038 - protein, 9 aa, synthetic construct
  source 1..9: note = Seed: VVGADGVGK (KRAS G12D)
FVGQDAVGF

SEQ ID NO: 10039 - protein, 9 aa, synthetic construct
  source 1..9: note = Seed: VVGADGVGK (KRAS G12D)
FVGQDAVGG

SEQ ID NO: 10040 - protein, 9 aa, synthetic construct
  source 1..9: note = Seed: VVGADGVGK (KRAS G12D)
FVGQDAVGH

SEQ ID NO: 10041 - protein, 9 aa, synthetic construct
  source 1..9: note = Seed: VVGADGVGK (KRAS G12D)
FVGQDAVGI

SEQ ID NO: 10042 - protein, 9 aa, synthetic construct
  source 1..9: note = Seed: VVGADGVGK (KRAS G12D)
FVGQDAVGK

SEQ ID NO: 10043 - protein, 9 aa, synthetic construct
  source 1..9: note = Seed: VVGADGVGK (KRAS G12D)
FVGQDAVGL

SEQ ID NO: 10044 - protein, 9 aa, synthetic construct
  source 1..9: note = Seed: VVGADGVGK (KRAS G12D)
FVGQDAVGM

SEQ ID NO: 10045 - protein, 9 aa, synthetic construct
  source 1..9: note = Seed: VVGADGVGK (KRAS G12D)
FVGQDAVGN

SEQ ID NO: 10046 - protein, 9 aa, synthetic construct
  source 1..9: note = Seed: VVGADGVGK (KRAS G12D)
FVGQDAVGQ

SEQ ID NO: 10047 - protein, 9 aa, synthetic construct
  source 1..9: note = Seed: VVGADGVGK (KRAS G12D)
FVGQDAVGR

SEQ ID NO: 10048 - protein, 9 aa, synthetic construct
  source 1..9: note = Seed: VVGADGVGK (KRAS G12D)
FVGQDAVGS

SEQ ID NO: 10049 - protein, 9 aa, synthetic construct
  source 1..9: note = Seed: VVGADGVGK (KRAS G12D)
FVGQDAVGT

SEQ ID NO: 10050 - protein, 9 aa, synthetic construct
  source 1..9: note = Seed: VVGADGVGK (KRAS G12D)
FVGQDAVGV

SEQ ID NO: 10051 - protein, 9 aa, synthetic construct
  source 1..9: note = Seed: VVGADGVGK (KRAS G12D)
FVGQDAVGY

SEQ ID NO: 10052 - protein, 9 aa, synthetic construct
  source 1..9: note = Seed: VVGADGVGK (KRAS G12D)
FVGQDGVGA

SEQ ID NO: 10053 - protein, 9 aa, synthetic construct
  source 1..9: note = Seed: VVGADGVGK (KRAS G12D)
FVGQDGVGG

SEQ ID NO: 10054 - protein, 9 aa, synthetic construct
  source 1..9: note = Seed: VVGADGVGK (KRAS G12D)
FVGQDGVGI

SEQ ID NO: 10055 - protein, 9 aa, synthetic construct
  source 1..9: note = Seed: VVGADGVGK (KRAS G12D)
FVGQDGVGL

SEQ ID NO: 10056 - protein, 9 aa, synthetic construct
  source 1..9: note = Seed: VVGADGVGK (KRAS G12D)
FVGQDGVGM

SEQ ID NO: 10057 - protein, 9 aa, synthetic construct
  source 1..9: note = Seed: VVGADGVGK (KRAS G12D)
FVGQDGVGN

SEQ ID NO: 10058 - protein, 9 aa, synthetic construct
  source 1..9: note = Seed: VVGADGVGK (KRAS G12D)
FVGQDGVGS

SEQ ID NO: 10059 - protein, 9 aa, synthetic construct
  source 1..9: note = Seed: VVGADGVGK (KRAS G12D)
FVGQDGVGT

SEQ ID NO: 10060 - protein, 9 aa, synthetic construct
  source 1..9: note = Seed: VVGADGVGK (KRAS G12D)
FVGQDGVGV

SEQ ID NO: 10061 - protein, 9 aa, synthetic construct
  source 1..9: note = Seed: VVGADGVGK (KRAS G12D)
FVGQDNVGA

SEQ ID NO: 10062 - protein, 9 aa, synthetic construct
  source 1..9: note = Seed: VVGADGVGK (KRAS G12D)
FVGQDNVGG

SEQ ID NO: 10063 - protein, 9 aa, synthetic construct
  source 1..9: note = Seed: VVGADGVGK (KRAS G12D)
FVGQDNVGI

SEQ ID NO: 10064 - protein, 9 aa, synthetic construct
  source 1..9: note = Seed: VVGADGVGK (KRAS G12D)
FVGQDNVGL

SEQ ID NO: 10065 - protein, 9 aa, synthetic construct
  source 1..9: note = Seed: VVGADGVGK (KRAS G12D)
FVGQDNVGM

SEQ ID NO: 10066 - protein, 9 aa, synthetic construct
  source 1..9: note = Seed: VVGADGVGK (KRAS G12D)
FVGQDNVGS

SEQ ID NO: 10067 - protein, 9 aa, synthetic construct
  source 1..9: note = Seed: VVGADGVGK (KRAS G12D)
FVGQDNVGT

SEQ ID NO: 10068 - protein, 9 aa, synthetic construct
  source 1..9: note = Seed: VVGADGVGK (KRAS G12D)
FVGQDNVGV

SEQ ID NO: 10069 - protein, 9 aa, synthetic construct
  source 1..9: note = Seed: VVGADGVGK (KRAS G12D)
FVGQDPVGA

SEQ ID NO: 10070 - protein, 9 aa, synthetic construct
  source 1..9: note = Seed: VVGADGVGK (KRAS G12D)
FVGQDPVGG

SEQ ID NO: 10071 - protein, 9 aa, synthetic construct
  source 1..9: note = Seed: VVGADGVGK (KRAS G12D)
FVGQDPVGI

SEQ ID NO: 10072 - protein, 9 aa, synthetic construct
  source 1..9: note = Seed: VVGADGVGK (KRAS G12D)
FVGQDPVGL

SEQ ID NO: 10073 - protein, 9 aa, synthetic construct
  source 1..9: note = Seed: VVGADGVGK (KRAS G12D)
FVGQDPVGM

SEQ ID NO: 10074 - protein, 9 aa, synthetic construct
  source 1..9: note = Seed: VVGADGVGK (KRAS G12D)
FVGQDPVGS

SEQ ID NO: 10075 - protein, 9 aa, synthetic construct
  source 1..9: note = Seed: VVGADGVGK (KRAS G12D)
FVGQDPVGT

SEQ ID NO: 10076 - protein, 9 aa, synthetic construct
  source 1..9: note = Seed: VVGADGVGK (KRAS G12D)
FVGQDPVGV

SEQ ID NO: 10077 - protein, 9 aa, synthetic construct
  source 1..9: note = Seed: VVGADGVGK (KRAS G12D)
FVGQDSVGA

SEQ ID NO: 10078 - protein, 9 aa, synthetic construct
  source 1..9: note = Seed: VVGADGVGK (KRAS G12D)
FVGQDSVGG

SEQ ID NO: 10079 - protein, 9 aa, synthetic construct
  source 1..9: note = Seed: VVGADGVGK (KRAS G12D)
FVGQDSVGI

SEQ ID NO: 10080 - protein, 9 aa, synthetic construct
  source 1..9: note = Seed: VVGADGVGK (KRAS G12D)
FVGQDSVGL

SEQ ID NO: 10081 - protein, 9 aa, synthetic construct
  source 1..9: note = Seed: VVGADGVGK (KRAS G12D)
FVGQDSVGM

SEQ ID NO: 10082 - protein, 9 aa, synthetic construct
  source 1..9: note = Seed: VVGADGVGK (KRAS G12D)
FVGQDSVGN

SEQ ID NO: 10083 - protein, 9 aa, synthetic construct
  source 1..9: note = Seed: VVGADGVGK (KRAS G12D)
FVGQDSVGS

SEQ ID NO: 10084 - protein, 9 aa, synthetic construct
  source 1..9: note = Seed: VVGADGVGK (KRAS G12D)
FVGQDSVGT

SEQ ID NO: 10085 - protein, 9 aa, synthetic construct
  source 1..9: note = Seed: VVGADGVGK (KRAS G12D)
FVGQDSVGV

SEQ ID NO: 10086 - protein, 9 aa, synthetic construct
  source 1..9: note = Seed: VVGADGVGK (KRAS G12D)
FVGQDTVGA

SEQ ID NO: 10087 - protein, 9 aa, synthetic construct
  source 1..9: note = Seed: VVGADGVGK (KRAS G12D)
FVGQDTVGI

SEQ ID NO: 10088 - protein, 9 aa, synthetic construct
  source 1..9: note = Seed: VVGADGVGK (KRAS G12D)
FVGQDTVGL

SEQ ID NO: 10089 - protein, 9 aa, synthetic construct
  source 1..9: note = Seed: VVGADGVGK (KRAS G12D)
FVGQDTVGM

SEQ ID NO: 10090 - protein, 9 aa, synthetic construct
  source 1..9: note = Seed: VVGADGVGK (KRAS G12D)
FVGQDTVGS

SEQ ID NO: 10091 - protein, 9 aa, synthetic construct
  source 1..9: note = Seed: VVGADGVGK (KRAS G12D)
FVGQDTVGT

SEQ ID NO: 10092 - protein, 9 aa, synthetic construct
  source 1..9: note = Seed: VVGADGVGK (KRAS G12D)
FVGQDTVGV

SEQ ID NO: 10093 - protein, 9 aa, synthetic construct
  source 1..9: note = Seed: VVGADGVGK (KRAS G12D)
FVGQDVVGA

SEQ ID NO: 10094 - protein, 9 aa, synthetic construct
  source 1..9: note = Seed: VVGADGVGK (KRAS G12D)
FVGQDVVGI

SEQ ID NO: 10095 - protein, 9 aa, synthetic construct
  source 1..9: note = Seed: VVGADGVGK (KRAS G12D)
FVGQDVVGL

SEQ ID NO: 10096 - protein, 9 aa, synthetic construct
  source 1..9: note = Seed: VVGADGVGK (KRAS G12D)
FVGQDVVGS

SEQ ID NO: 10097 - protein, 9 aa, synthetic construct
  source 1..9: note = Seed: VVGADGVGK (KRAS G12D)
FVGQDVVGT

SEQ ID NO: 10098 - protein, 9 aa, synthetic construct
  source 1..9: note = Seed: VVGADGVGK (KRAS G12D)
FVGQDVVGV

SEQ ID NO: 10099 - protein, 9 aa, synthetic construct
  source 1..9: note = Seed: VVGADGVGK (KRAS G12D)
FVGRDAVGL

SEQ ID NO: 10100 - protein, 9 aa, synthetic construct
  source 1..9: note = Seed: VVGADGVGK (KRAS G12D)
FVGRDKVGR

SEQ ID NO: 10101 - protein, 9 aa, synthetic construct
  source 1..9: note = Seed: VVGADGVGK (KRAS G12D)
FVGRDKVGY

SEQ ID NO: 10102 - protein, 9 aa, synthetic construct
  source 1..9: note = Seed: VVGADGVGK (KRAS G12D)
FVGRDRVGF

SEQ ID NO: 10103 - protein, 9 aa, synthetic construct
  source 1..9: note = Seed: VVGADGVGK (KRAS G12D)
FVGRDRVGH

SEQ ID NO: 10104 - protein, 9 aa, synthetic construct
  source 1..9: note = Seed: VVGADGVGK (KRAS G12D)
FVGRDRVGI

SEQ ID NO: 10105 - protein, 9 aa, synthetic construct
  source 1..9: note = Seed: VVGADGVGK (KRAS G12D)
FVGRDRVGK

SEQ ID NO: 10106 - protein, 9 aa, synthetic construct
  source 1..9: note = Seed: VVGADGVGK (KRAS G12D)
FVGRDRVGL

SEQ ID NO: 10107 - protein, 9 aa, synthetic construct
  source 1..9: note = Seed: VVGADGVGK (KRAS G12D)
FVGRDRVGM

SEQ ID NO: 10108 - protein, 9 aa, synthetic construct
  source 1..9: note = Seed: VVGADGVGK (KRAS G12D)
FVGRDRVGR

SEQ ID NO: 10109 - protein, 9 aa, synthetic construct
  source 1..9: note = Seed: VVGADGVGK (KRAS G12D)
FVGRDRVGV

SEQ ID NO: 10110 - protein, 9 aa, synthetic construct
  source 1..9: note = Seed: VVGADGVGK (KRAS G12D)
FVGRDRVGY

SEQ ID NO: 10111 - protein, 9 aa, synthetic construct
  source 1..9: note = Seed: VVGADGVGK (KRAS G12D)
FVGSDAVGA

SEQ ID NO: 10112 - protein, 9 aa, synthetic construct
  source 1..9: note = Seed: VVGADGVGK (KRAS G12D)
FVGSDAVGF

SEQ ID NO: 10113 - protein, 9 aa, synthetic construct
  source 1..9: note = Seed: VVGADGVGK (KRAS G12D)
FVGSDAVGG

SEQ ID NO: 10114 - protein, 9 aa, synthetic construct
  source 1..9: note = Seed: VVGADGVGK (KRAS G12D)
FVGSDAVGH

SEQ ID NO: 10115 - protein, 9 aa, synthetic construct
  source 1..9: note = Seed: VVGADGVGK (KRAS G12D)
FVGSDAVGI

SEQ ID NO: 10116 - protein, 9 aa, synthetic construct
  source 1..9: note = Seed: VVGADGVGK (KRAS G12D)
FVGSDAVGL

SEQ ID NO: 10117 - protein, 9 aa, synthetic construct
  source 1..9: note = Seed: VVGADGVGK (KRAS G12D)
FVGSDAVGM

SEQ ID NO: 10118 - protein, 9 aa, synthetic construct
  source 1..9: note = Seed: VVGADGVGK (KRAS G12D)
FVGSDAVGN

SEQ ID NO: 10119 - protein, 9 aa, synthetic construct
  source 1..9: note = Seed: VVGADGVGK (KRAS G12D)
FVGSDAVGS

SEQ ID NO: 10120 - protein, 9 aa, synthetic construct
  source 1..9: note = Seed: VVGADGVGK (KRAS G12D)
FVGSDAVGT

SEQ ID NO: 10121 - protein, 9 aa, synthetic construct
  source 1..9: note = Seed: VVGADGVGK (KRAS G12D)
FVGSDAVGV

SEQ ID NO: 10122 - protein, 9 aa, synthetic construct
  source 1..9: note = Seed: VVGADGVGK (KRAS G12D)
FVGSDAVGY

SEQ ID NO: 10123 - protein, 9 aa, synthetic construct
  source 1..9: note = Seed: VVGADGVGK (KRAS G12D)
FVGSDGVGA

SEQ ID NO: 10124 - protein, 9 aa, synthetic construct
  source 1..9: note = Seed: VVGADGVGK (KRAS G12D)
FVGSDGVGI

SEQ ID NO: 10125 - protein, 9 aa, synthetic construct
  source 1..9: note = Seed: VVGADGVGK (KRAS G12D)
FVGSDGVGL

SEQ ID NO: 10126 - protein, 9 aa, synthetic construct
  source 1..9: note = Seed: VVGADGVGK (KRAS G12D)
FVGSDGVGM

SEQ ID NO: 10127 - protein, 9 aa, synthetic construct
  source 1..9: note = Seed: VVGADGVGK (KRAS G12D)
FVGSDGVGS

SEQ ID NO: 10128 - protein, 9 aa, synthetic construct
  source 1..9: note = Seed: VVGADGVGK (KRAS G12D)
FVGSDGVGT

SEQ ID NO: 10129 - protein, 9 aa, synthetic construct
  source 1..9: note = Seed: VVGADGVGK (KRAS G12D)
FVGSDGVGV

SEQ ID NO: 10130 - protein, 9 aa, synthetic construct
  source 1..9: note = Seed: VVGADGVGK (KRAS G12D)
FVGSDNVGA

SEQ ID NO: 10131 - protein, 9 aa, synthetic construct
  source 1..9: note = Seed: VVGADGVGK (KRAS G12D)
FVGSDPVGA

SEQ ID NO: 10132 - protein, 9 aa, synthetic construct
  source 1..9: note = Seed: VVGADGVGK (KRAS G12D)
FVGSDPVGI

SEQ ID NO: 10133 - protein, 9 aa, synthetic construct
  source 1..9: note = Seed: VVGADGVGK (KRAS G12D)
FVGSDPVGL

SEQ ID NO: 10134 - protein, 9 aa, synthetic construct
  source 1..9: note = Seed: VVGADGVGK (KRAS G12D)
FVGSDPVGM

SEQ ID NO: 10135 - protein, 9 aa, synthetic construct
  source 1..9: note = Seed: VVGADGVGK (KRAS G12D)
FVGSDPVGS

SEQ ID NO: 10136 - protein, 9 aa, synthetic construct
  source 1..9: note = Seed: VVGADGVGK (KRAS G12D)
FVGSDPVGT

SEQ ID NO: 10137 - protein, 9 aa, synthetic construct
  source 1..9: note = Seed: VVGADGVGK (KRAS G12D)
FVGSDPVGV

SEQ ID NO: 10138 - protein, 9 aa, synthetic construct
  source 1..9: note = Seed: VVGADGVGK (KRAS G12D)
FVGSDRVGR

SEQ ID NO: 10139 - protein, 9 aa, synthetic construct
  source 1..9: note = Seed: VVGADGVGK (KRAS G12D)
FVGSDSVGA

SEQ ID NO: 10140 - protein, 9 aa, synthetic construct
  source 1..9: note = Seed: VVGADGVGK (KRAS G12D)
FVGSDSVGI

SEQ ID NO: 10141 - protein, 9 aa, synthetic construct
  source 1..9: note = Seed: VVGADGVGK (KRAS G12D)
FVGSDSVGL

SEQ ID NO: 10142 - protein, 9 aa, synthetic construct
  source 1..9: note = Seed: VVGADGVGK (KRAS G12D)
FVGSDSVGM

SEQ ID NO: 10143 - protein, 9 aa, synthetic construct
  source 1..9: note = Seed: VVGADGVGK (KRAS G12D)
FVGSDSVGS

SEQ ID NO: 10144 - protein, 9 aa, synthetic construct
  source 1..9: note = Seed: VVGADGVGK (KRAS G12D)
FVGSDSVGT

SEQ ID NO: 10145 - protein, 9 aa, synthetic construct
  source 1..9: note = Seed: VVGADGVGK (KRAS G12D)
FVGSDSVGV

SEQ ID NO: 10146 - protein, 9 aa, synthetic construct
  source 1..9: note = Seed: VVGADGVGK (KRAS G12D)
FVGSDTVGA

SEQ ID NO: 10147 - protein, 9 aa, synthetic construct
  source 1..9: note = Seed: VVGADGVGK (KRAS G12D)
FVGSDTVGI

SEQ ID NO: 10148 - protein, 9 aa, synthetic construct
  source 1..9: note = Seed: VVGADGVGK (KRAS G12D)
FVGSDTVGL

SEQ ID NO: 10149 - protein, 9 aa, synthetic construct
  source 1..9: note = Seed: VVGADGVGK (KRAS G12D)
FVGSDTVGV

SEQ ID NO: 10150 - protein, 9 aa, synthetic construct
  source 1..9: note = Seed: VVGADGVGK (KRAS G12D)
FVGSDVVGA

SEQ ID NO: 10151 - protein, 9 aa, synthetic construct
  source 1..9: note = Seed: VVGADGVGK (KRAS G12D)
FVGTDAVGA

SEQ ID NO: 10152 - protein, 9 aa, synthetic construct
  source 1..9: note = Seed: VVGADGVGK (KRAS G12D)
FVGTDAVGG

SEQ ID NO: 10153 - protein, 9 aa, synthetic construct
  source 1..9: note = Seed: VVGADGVGK (KRAS G12D)
FVGTDAVGI

SEQ ID NO: 10154 - protein, 9 aa, synthetic construct
  source 1..9: note = Seed: VVGADGVGK (KRAS G12D)
FVGTDAVGL

SEQ ID NO: 10155 - protein, 9 aa, synthetic construct
  source 1..9: note = Seed: VVGADGVGK (KRAS G12D)
FVGTDAVGM

SEQ ID NO: 10156 - protein, 9 aa, synthetic construct
  source 1..9: note = Seed: VVGADGVGK (KRAS G12D)
FVGTDAVGS

SEQ ID NO: 10157 - protein, 9 aa, synthetic construct
  source 1..9: note = Seed: VVGADGVGK (KRAS G12D)
FVGTDAVGT

SEQ ID NO: 10158 - protein, 9 aa, synthetic construct
  source 1..9: note = Seed: VVGADGVGK (KRAS G12D)
FVGTDAVGV

SEQ ID NO: 10159 - protein, 9 aa, synthetic construct
  source 1..9: note = Seed: VVGADGVGK (KRAS G12D)
FVGTDGVGA

SEQ ID NO: 10160 - protein, 9 aa, synthetic construct
  source 1..9: note = Seed: VVGADGVGK (KRAS G12D)
FVGTDGVGI

SEQ ID NO: 10161 - protein, 9 aa, synthetic construct
  source 1..9: note = Seed: VVGADGVGK (KRAS G12D)
FVGTDGVGL

SEQ ID NO: 10162 - protein, 9 aa, synthetic construct
  source 1..9: note = Seed: VVGADGVGK (KRAS G12D)
FVGTDGVGM

SEQ ID NO: 10163 - protein, 9 aa, synthetic construct
  source 1..9: note = Seed: VVGADGVGK (KRAS G12D)
FVGTDGVGV

SEQ ID NO: 10164 - protein, 9 aa, synthetic construct
  source 1..9: note = Seed: VVGADGVGK (KRAS G12D)
FVGTDPVGA

SEQ ID NO: 10165 - protein, 9 aa, synthetic construct
  source 1..9: note = Seed: VVGADGVGK (KRAS G12D)
FVGTDPVGI

SEQ ID NO: 10166 - protein, 9 aa, synthetic construct
  source 1..9: note = Seed: VVGADGVGK (KRAS G12D)
FVGTDPVGL

SEQ ID NO: 10167 - protein, 9 aa, synthetic construct
  source 1..9: note = Seed: VVGADGVGK (KRAS G12D)
FVGTDPVGM

SEQ ID NO: 10168 - protein, 9 aa, synthetic construct
  source 1..9: note = Seed: VVGADGVGK (KRAS G12D)
FVGTDPVGV

SEQ ID NO: 10169 - protein, 9 aa, synthetic construct
  source 1..9: note = Seed: VVGADGVGK (KRAS G12D)
FVGTDSVGA

SEQ ID NO: 10170 - protein, 9 aa, synthetic construct
  source 1..9: note = Seed: VVGADGVGK (KRAS G12D)
FVGTDSVGI

SEQ ID NO: 10171 - protein, 9 aa, synthetic construct
  source 1..9: note = Seed: VVGADGVGK (KRAS G12D)
FVGTDSVGL

SEQ ID NO: 10172 - protein, 9 aa, synthetic construct
  source 1..9: note = Seed: VVGADGVGK (KRAS G12D)
FVGTDSVGM

SEQ ID NO: 10173 - protein, 9 aa, synthetic construct
  source 1..9: note = Seed: VVGADGVGK (KRAS G12D)
FVGTDSVGV

SEQ ID NO: 10174 - protein, 9 aa, synthetic construct
  source 1..9: note = Seed: VVGADGVGK (KRAS G12D)
FVGVDAVGA

SEQ ID NO: 10175 - protein, 9 aa, synthetic construct
  source 1..9: note = Seed: VVGADGVGK (KRAS G12D)
FVGVDAVGG

SEQ ID NO: 10176 - protein, 9 aa, synthetic construct
  source 1..9: note = Seed: VVGADGVGK (KRAS G12D)
FVGVDAVGH

SEQ ID NO: 10177 - protein, 9 aa, synthetic construct
  source 1..9: note = Seed: VVGADGVGK (KRAS G12D)
FVGVDAVGI

SEQ ID NO: 10178 - protein, 9 aa, synthetic construct
  source 1..9: note = Seed: VVGADGVGK (KRAS G12D)
FVGVDAVGK

SEQ ID NO: 10179 - protein, 9 aa, synthetic construct
  source 1..9: note = Seed: VVGADGVGK (KRAS G12D)
FVGVDAVGL

SEQ ID NO: 10180 - protein, 9 aa, synthetic construct
  source 1..9: note = Seed: VVGADGVGK (KRAS G12D)
FVGVDAVGM

SEQ ID NO: 10181 - protein, 9 aa, synthetic construct
  source 1..9: note = Seed: VVGADGVGK (KRAS G12D)
FVGVDAVGN

SEQ ID NO: 10182 - protein, 9 aa, synthetic construct
  source 1..9: note = Seed: VVGADGVGK (KRAS G12D)
FVGVDAVGR

SEQ ID NO: 10183 - protein, 9 aa, synthetic construct
  source 1..9: note = Seed: VVGADGVGK (KRAS G12D)
FVGVDAVGS

SEQ ID NO: 10184 - protein, 9 aa, synthetic construct
  source 1..9: note = Seed: VVGADGVGK (KRAS G12D)
FVGVDAVGT

SEQ ID NO: 10185 - protein, 9 aa, synthetic construct
  source 1..9: note = Seed: VVGADGVGK (KRAS G12D)
FVGVDAVGV

SEQ ID NO: 10186 - protein, 9 aa, synthetic construct
  source 1..9: note = Seed: VVGADGVGK (KRAS G12D)
FVGVDGVGA

SEQ ID NO: 10187 - protein, 9 aa, synthetic construct
  source 1..9: note = Seed: VVGADGVGK (KRAS G12D)
FVGVDGVGG

SEQ ID NO: 10188 - protein, 9 aa, synthetic construct
  source 1..9: note = Seed: VVGADGVGK (KRAS G12D)
FVGVDGVGI

SEQ ID NO: 10189 - protein, 9 aa, synthetic construct
  source 1..9: note = Seed: VVGADGVGK (KRAS G12D)
FVGVDGVGL

SEQ ID NO: 10190 - protein, 9 aa, synthetic construct
  source 1..9: note = Seed: VVGADGVGK (KRAS G12D)
FVGVDGVGM

SEQ ID NO: 10191 - protein, 9 aa, synthetic construct
  source 1..9: note = Seed: VVGADGVGK (KRAS G12D)
FVGVDGVGN

SEQ ID NO: 10192 - protein, 9 aa, synthetic construct
  source 1..9: note = Seed: VVGADGVGK (KRAS G12D)
FVGVDGVGS

SEQ ID NO: 10193 - protein, 9 aa, synthetic construct
  source 1..9: note = Seed: VVGADGVGK (KRAS G12D)
FVGVDGVGT

SEQ ID NO: 10194 - protein, 9 aa, synthetic construct
  source 1..9: note = Seed: VVGADGVGK (KRAS G12D)
FVGVDGVGV

SEQ ID NO: 10195 - protein, 9 aa, synthetic construct
  source 1..9: note = Seed: VVGADGVGK (KRAS G12D)
FVGVDKVGR

SEQ ID NO: 10196 - protein, 9 aa, synthetic construct
  source 1..9: note = Seed: VVGADGVGK (KRAS G12D)
FVGVDNVGA

SEQ ID NO: 10197 - protein, 9 aa, synthetic construct
  source 1..9: note = Seed: VVGADGVGK (KRAS G12D)
FVGVDNVGI

SEQ ID NO: 10198 - protein, 9 aa, synthetic construct
  source 1..9: note = Seed: VVGADGVGK (KRAS G12D)
FVGVDNVGL

SEQ ID NO: 10199 - protein, 9 aa, synthetic construct
  source 1..9: note = Seed: VVGADGVGK (KRAS G12D)
FVGVDNVGM

SEQ ID NO: 10200 - protein, 9 aa, synthetic construct
  source 1..9: note = Seed: VVGADGVGK (KRAS G12D)
FVGVDNVGS

SEQ ID NO: 10201 - protein, 9 aa, synthetic construct
  source 1..9: note = Seed: VVGADGVGK (KRAS G12D)
FVGVDNVGT

SEQ ID NO: 10202 - protein, 9 aa, synthetic construct
  source 1..9: note = Seed: VVGADGVGK (KRAS G12D)
FVGVDNVGV

SEQ ID NO: 10203 - protein, 9 aa, synthetic construct
  source 1..9: note = Seed: VVGADGVGK (KRAS G12D)
FVGVDPVGA

SEQ ID NO: 10204 - protein, 9 aa, synthetic construct
  source 1..9: note = Seed: VVGADGVGK (KRAS G12D)
FVGVDPVGG

SEQ ID NO: 10205 - protein, 9 aa, synthetic construct
  source 1..9: note = Seed: VVGADGVGK (KRAS G12D)
FVGVDPVGI

SEQ ID NO: 10206 - protein, 9 aa, synthetic construct
  source 1..9: note = Seed: VVGADGVGK (KRAS G12D)
FVGVDPVGL

SEQ ID NO: 10207 - protein, 9 aa, synthetic construct
  source 1..9: note = Seed: VVGADGVGK (KRAS G12D)
FVGVDPVGM

SEQ ID NO: 10208 - protein, 9 aa, synthetic construct
  source 1..9: note = Seed: VVGADGVGK (KRAS G12D)
FVGVDPVGN

SEQ ID NO: 10209 - protein, 9 aa, synthetic construct
  source 1..9: note = Seed: VVGADGVGK (KRAS G12D)
FVGVDPVGS

SEQ ID NO: 10210 - protein, 9 aa, synthetic construct
  source 1..9: note = Seed: VVGADGVGK (KRAS G12D)
FVGVDPVGT

SEQ ID NO: 10211 - protein, 9 aa, synthetic construct
  source 1..9: note = Seed: VVGADGVGK (KRAS G12D)
FVGVDPVGV

SEQ ID NO: 10212 - protein, 9 aa, synthetic construct
  source 1..9: note = Seed: VVGADGVGK (KRAS G12D)
FVGVDRVGR

SEQ ID NO: 10213 - protein, 9 aa, synthetic construct
  source 1..9: note = Seed: VVGADGVGK (KRAS G12D)
FVGVDSVGA

SEQ ID NO: 10214 - protein, 9 aa, synthetic construct
  source 1..9: note = Seed: VVGADGVGK (KRAS G12D)
FVGVDSVGG

SEQ ID NO: 10215 - protein, 9 aa, synthetic construct
  source 1..9: note = Seed: VVGADGVGK (KRAS G12D)
FVGVDSVGI

SEQ ID NO: 10216 - protein, 9 aa, synthetic construct
  source 1..9: note = Seed: VVGADGVGK (KRAS G12D)
FVGVDSVGL

SEQ ID NO: 10217 - protein, 9 aa, synthetic construct
  source 1..9: note = Seed: VVGADGVGK (KRAS G12D)
FVGVDSVGM

SEQ ID NO: 10218 - protein, 9 aa, synthetic construct
  source 1..9: note = Seed: VVGADGVGK (KRAS G12D)
FVGVDSVGN

SEQ ID NO: 10219 - protein, 9 aa, synthetic construct
  source 1..9: note = Seed: VVGADGVGK (KRAS G12D)
FVGVDSVGS

SEQ ID NO: 10220 - protein, 9 aa, synthetic construct
  source 1..9: note = Seed: VVGADGVGK (KRAS G12D)
FVGVDSVGT

SEQ ID NO: 10221 - protein, 9 aa, synthetic construct
  source 1..9: note = Seed: VVGADGVGK (KRAS G12D)
FVGVDSVGV

SEQ ID NO: 10222 - protein, 9 aa, synthetic construct
  source 1..9: note = Seed: VVGADGVGK (KRAS G12D)
FVGVDTVGA

SEQ ID NO: 10223 - protein, 9 aa, synthetic construct
  source 1..9: note = Seed: VVGADGVGK (KRAS G12D)
FVGVDTVGI

SEQ ID NO: 10224 - protein, 9 aa, synthetic construct
  source 1..9: note = Seed: VVGADGVGK (KRAS G12D)
FVGVDTVGL

SEQ ID NO: 10225 - protein, 9 aa, synthetic construct
  source 1..9: note = Seed: VVGADGVGK (KRAS G12D)
FVGVDTVGM

SEQ ID NO: 10226 - protein, 9 aa, synthetic construct
  source 1..9: note = Seed: VVGADGVGK (KRAS G12D)
FVGVDTVGS

SEQ ID NO: 10227 - protein, 9 aa, synthetic construct
  source 1..9: note = Seed: VVGADGVGK (KRAS G12D)
FVGVDTVGT

SEQ ID NO: 10228 - protein, 9 aa, synthetic construct
  source 1..9: note = Seed: VVGADGVGK (KRAS G12D)
FVGVDTVGV

SEQ ID NO: 10229 - protein, 9 aa, synthetic construct
  source 1..9: note = Seed: VVGADGVGK (KRAS G12D)
FVGWDAVGA

SEQ ID NO: 10230 - protein, 9 aa, synthetic construct
  source 1..9: note = Seed: VVGADGVGK (KRAS G12D)
FVGWDAVGI

SEQ ID NO: 10231 - protein, 9 aa, synthetic construct
  source 1..9: note = Seed: VVGADGVGK (KRAS G12D)
FVGWDAVGL

SEQ ID NO: 10232 - protein, 9 aa, synthetic construct
  source 1..9: note = Seed: VVGADGVGK (KRAS G12D)
FVGWDAVGM

SEQ ID NO: 10233 - protein, 9 aa, synthetic construct
  source 1..9: note = Seed: VVGADGVGK (KRAS G12D)
FVGWDAVGS

SEQ ID NO: 10234 - protein, 9 aa, synthetic construct
  source 1..9: note = Seed: VVGADGVGK (KRAS G12D)
FVGWDAVGV

SEQ ID NO: 10235 - protein, 9 aa, synthetic construct
  source 1..9: note = Seed: VVGADGVGK (KRAS G12D)
FVGWDPVGA

SEQ ID NO: 10236 - protein, 9 aa, synthetic construct
  source 1..9: note = Seed: VVGADGVGK (KRAS G12D)
FVGWDSVGA

SEQ ID NO: 10237 - protein, 9 aa, synthetic construct
  source 1..9: note = Seed: VVGADGVGK (KRAS G12D)
IVGADAVGA

SEQ ID NO: 10238 - protein, 9 aa, synthetic construct
  source 1..9: note = Seed: VVGADGVGK (KRAS G12D)
IVGADAVGI

SEQ ID NO: 10239 - protein, 9 aa, synthetic construct
  source 1..9: note = Seed: VVGADGVGK (KRAS G12D)
IVGADAVGL

SEQ ID NO: 10240 - protein, 9 aa, synthetic construct
  source 1..9: note = Seed: VVGADGVGK (KRAS G12D)
IVGADAVGM

SEQ ID NO: 10241 - protein, 9 aa, synthetic construct
  source 1..9: note = Seed: VVGADGVGK (KRAS G12D)
IVGADAVGR

SEQ ID NO: 10242 - protein, 9 aa, synthetic construct
  source 1..9: note = Seed: VVGADGVGK (KRAS G12D)
IVGADAVGS

SEQ ID NO: 10243 - protein, 9 aa, synthetic construct
  source 1..9: note = Seed: VVGADGVGK (KRAS G12D)
IVGADAVGT

SEQ ID NO: 10244 - protein, 9 aa, synthetic construct
  source 1..9: note = Seed: VVGADGVGK (KRAS G12D)
IVGADAVGV

SEQ ID NO: 10245 - protein, 9 aa, synthetic construct
  source 1..9: note = Seed: VVGADGVGK (KRAS G12D)
IVGADGVGA

SEQ ID NO: 10246 - protein, 9 aa, synthetic construct
  source 1..9: note = Seed: VVGADGVGK (KRAS G12D)
IVGADGVGI

SEQ ID NO: 10247 - protein, 9 aa, synthetic construct
  source 1..9: note = Seed: VVGADGVGK (KRAS G12D)
IVGADGVGL

SEQ ID NO: 10248 - protein, 9 aa, synthetic construct
  source 1..9: note = Seed: VVGADGVGK (KRAS G12D)
IVGADGVGM

SEQ ID NO: 10249 - protein, 9 aa, synthetic construct
  source 1..9: note = Seed: VVGADGVGK (KRAS G12D)
IVGADGVGS

SEQ ID NO: 10250 - protein, 9 aa, synthetic construct
  source 1..9: note = Seed: VVGADGVGK (KRAS G12D)
IVGADGVGV

SEQ ID NO: 10251 - protein, 9 aa, synthetic construct
  source 1..9: note = Seed: VVGADGVGK (KRAS G12D)
IVGADKVGF

SEQ ID NO: 10252 - protein, 9 aa, synthetic construct
  source 1..9: note = Seed: VVGADGVGK (KRAS G12D)
IVGADKVGI

SEQ ID NO: 10253 - protein, 9 aa, synthetic construct
  source 1..9: note = Seed: VVGADGVGK (KRAS G12D)
IVGADKVGK

SEQ ID NO: 10254 - protein, 9 aa, synthetic construct
  source 1..9: note = Seed: VVGADGVGK (KRAS G12D)
IVGADKVGL

SEQ ID NO: 10255 - protein, 9 aa, synthetic construct
  source 1..9: note = Seed: VVGADGVGK (KRAS G12D)
IVGADKVGM

SEQ ID NO: 10256 - protein, 9 aa, synthetic construct
  source 1..9: note = Seed: VVGADGVGK (KRAS G12D)
IVGADKVGR

SEQ ID NO: 10257 - protein, 9 aa, synthetic construct
  source 1..9: note = Seed: VVGADGVGK (KRAS G12D)
IVGADKVGV

SEQ ID NO: 10258 - protein, 9 aa, synthetic construct
  source 1..9: note = Seed: VVGADGVGK (KRAS G12D)
IVGADKVGY

SEQ ID NO: 10259 - protein, 9 aa, synthetic construct
  source 1..9: note = Seed: VVGADGVGK (KRAS G12D)
IVGADPVGA

SEQ ID NO: 10260 - protein, 9 aa, synthetic construct
  source 1..9: note = Seed: VVGADGVGK (KRAS G12D)
IVGADPVGI

SEQ ID NO: 10261 - protein, 9 aa, synthetic construct
  source 1..9: note = Seed: VVGADGVGK (KRAS G12D)
IVGADPVGL

SEQ ID NO: 10262 - protein, 9 aa, synthetic construct
  source 1..9: note = Seed: VVGADGVGK (KRAS G12D)
IVGADPVGM

SEQ ID NO: 10263 - protein, 9 aa, synthetic construct
  source 1..9: note = Seed: VVGADGVGK (KRAS G12D)
IVGADPVGV

SEQ ID NO: 10264 - protein, 9 aa, synthetic construct
  source 1..9: note = Seed: VVGADGVGK (KRAS G12D)
IVGADRVGA

SEQ ID NO: 10265 - protein, 9 aa, synthetic construct
  source 1..9: note = Seed: VVGADGVGK (KRAS G12D)
IVGADRVGF

SEQ ID NO: 10266 - protein, 9 aa, synthetic construct
  source 1..9: note = Seed: VVGADGVGK (KRAS G12D)
IVGADRVGH

SEQ ID NO: 10267 - protein, 9 aa, synthetic construct
  source 1..9: note = Seed: VVGADGVGK (KRAS G12D)
IVGADRVGI

SEQ ID NO: 10268 - protein, 9 aa, synthetic construct
  source 1..9: note = Seed: VVGADGVGK (KRAS G12D)
IVGADRVGK

SEQ ID NO: 10269 - protein, 9 aa, synthetic construct
  source 1..9: note = Seed: VVGADGVGK (KRAS G12D)
IVGADRVGL

SEQ ID NO: 10270 - protein, 9 aa, synthetic construct
  source 1..9: note = Seed: VVGADGVGK (KRAS G12D)
IVGADRVGM

SEQ ID NO: 10271 - protein, 9 aa, synthetic construct
  source 1..9: note = Seed: VVGADGVGK (KRAS G12D)
IVGADRVGQ

SEQ ID NO: 10272 - protein, 9 aa, synthetic construct
  source 1..9: note = Seed: VVGADGVGK (KRAS G12D)
IVGADRVGR

SEQ ID NO: 10273 - protein, 9 aa, synthetic construct
  source 1..9: note = Seed: VVGADGVGK (KRAS G12D)
IVGADRVGS

SEQ ID NO: 10274 - protein, 9 aa, synthetic construct
  source 1..9: note = Seed: VVGADGVGK (KRAS G12D)
IVGADRVGV

SEQ ID NO: 10275 - protein, 9 aa, synthetic construct
  source 1..9: note = Seed: VVGADGVGK (KRAS G12D)
IVGADRVGY

SEQ ID NO: 10276 - protein, 9 aa, synthetic construct
  source 1..9: note = Seed: VVGADGVGK (KRAS G12D)
IVGADSVGA

SEQ ID NO: 10277 - protein, 9 aa, synthetic construct
  source 1..9: note = Seed: VVGADGVGK (KRAS G12D)
IVGADSVGI

SEQ ID NO: 10278 - protein, 9 aa, synthetic construct
  source 1..9: note = Seed: VVGADGVGK (KRAS G12D)
IVGADSVGL

SEQ ID NO: 10279 - protein, 9 aa, synthetic construct
  source 1..9: note = Seed: VVGADGVGK (KRAS G12D)
IVGADSVGV

SEQ ID NO: 10280 - protein, 9 aa, synthetic construct
  source 1..9: note = Seed: VVGADGVGK (KRAS G12D)
IVGCDRVGR

SEQ ID NO: 10281 - protein, 9 aa, synthetic construct
  source 1..9: note = Seed: VVGADGVGK (KRAS G12D)
IVGCDRVGY

SEQ ID NO: 10282 - protein, 9 aa, synthetic construct
  source 1..9: note = Seed: VVGADGVGK (KRAS G12D)
IVGEDAVGA

SEQ ID NO: 10283 - protein, 9 aa, synthetic construct
  source 1..9: note = Seed: VVGADGVGK (KRAS G12D)
IVGEDAVGI

SEQ ID NO: 10284 - protein, 9 aa, synthetic construct
  source 1..9: note = Seed: VVGADGVGK (KRAS G12D)
IVGEDAVGL

SEQ ID NO: 10285 - protein, 9 aa, synthetic construct
  source 1..9: note = Seed: VVGADGVGK (KRAS G12D)
IVGEDAVGV

SEQ ID NO: 10286 - protein, 9 aa, synthetic construct
  source 1..9: note = Seed: VVGADGVGK (KRAS G12D)
IVGFDAVGR

SEQ ID NO: 10287 - protein, 9 aa, synthetic construct
  source 1..9: note = Seed: VVGADGVGK (KRAS G12D)
IVGFDAVGV

SEQ ID NO: 10288 - protein, 9 aa, synthetic construct
  source 1..9: note = Seed: VVGADGVGK (KRAS G12D)
IVGFDHVGR

SEQ ID NO: 10289 - protein, 9 aa, synthetic construct
  source 1..9: note = Seed: VVGADGVGK (KRAS G12D)
IVGFDKVGA

SEQ ID NO: 10290 - protein, 9 aa, synthetic construct
  source 1..9: note = Seed: VVGADGVGK (KRAS G12D)
IVGFDKVGH

SEQ ID NO: 10291 - protein, 9 aa, synthetic construct
  source 1..9: note = Seed: VVGADGVGK (KRAS G12D)
IVGFDKVGI

SEQ ID NO: 10292 - protein, 9 aa, synthetic construct
  source 1..9: note = Seed: VVGADGVGK (KRAS G12D)
IVGFDKVGK

SEQ ID NO: 10293 - protein, 9 aa, synthetic construct
  source 1..9: note = Seed: VVGADGVGK (KRAS G12D)
IVGFDKVGL

SEQ ID NO: 10294 - protein, 9 aa, synthetic construct
  source 1..9: note = Seed: VVGADGVGK (KRAS G12D)
IVGFDKVGM

SEQ ID NO: 10295 - protein, 9 aa, synthetic construct
  source 1..9: note = Seed: VVGADGVGK (KRAS G12D)
IVGFDKVGR

SEQ ID NO: 10296 - protein, 9 aa, synthetic construct
  source 1..9: note = Seed: VVGADGVGK (KRAS G12D)
IVGFDKVGV

SEQ ID NO: 10297 - protein, 9 aa, synthetic construct
  source 1..9: note = Seed: VVGADGVGK (KRAS G12D)
IVGFDKVGY

SEQ ID NO: 10298 - protein, 9 aa, synthetic construct
  source 1..9: note = Seed: VVGADGVGK (KRAS G12D)
IVGFDPVGR

SEQ ID NO: 10299 - protein, 9 aa, synthetic construct
  source 1..9: note = Seed: VVGADGVGK (KRAS G12D)
IVGFDRVGA

SEQ ID NO: 10300 - protein, 9 aa, synthetic construct
  source 1..9: note = Seed: VVGADGVGK (KRAS G12D)
IVGFDRVGF

SEQ ID NO: 10301 - protein, 9 aa, synthetic construct
  source 1..9: note = Seed: VVGADGVGK (KRAS G12D)
IVGFDRVGH

SEQ ID NO: 10302 - protein, 9 aa, synthetic construct
  source 1..9: note = Seed: VVGADGVGK (KRAS G12D)
IVGFDRVGI

SEQ ID NO: 10303 - protein, 9 aa, synthetic construct
  source 1..9: note = Seed: VVGADGVGK (KRAS G12D)
IVGFDRVGK

SEQ ID NO: 10304 - protein, 9 aa, synthetic construct
  source 1..9: note = Seed: VVGADGVGK (KRAS G12D)
IVGFDRVGL

SEQ ID NO: 10305 - protein, 9 aa, synthetic construct
  source 1..9: note = Seed: VVGADGVGK (KRAS G12D)
IVGFDRVGM

SEQ ID NO: 10306 - protein, 9 aa, synthetic construct
  source 1..9: note = Seed: VVGADGVGK (KRAS G12D)
IVGFDRVGR

SEQ ID NO: 10307 - protein, 9 aa, synthetic construct
  source 1..9: note = Seed: VVGADGVGK (KRAS G12D)
IVGFDRVGS

SEQ ID NO: 10308 - protein, 9 aa, synthetic construct
  source 1..9: note = Seed: VVGADGVGK (KRAS G12D)
IVGFDRVGV

SEQ ID NO: 10309 - protein, 9 aa, synthetic construct
  source 1..9: note = Seed: VVGADGVGK (KRAS G12D)
IVGFDRVGY

SEQ ID NO: 10310 - protein, 9 aa, synthetic construct
  source 1..9: note = Seed: VVGADGVGK (KRAS G12D)
IVGFDSVGR

SEQ ID NO: 10311 - protein, 9 aa, synthetic construct
  source 1..9: note = Seed: VVGADGVGK (KRAS G12D)
IVGFDTVGR

SEQ ID NO: 10312 - protein, 9 aa, synthetic construct
  source 1..9: note = Seed: VVGADGVGK (KRAS G12D)
IVGGDRVGR

SEQ ID NO: 10313 - protein, 9 aa, synthetic construct
  source 1..9: note = Seed: VVGADGVGK (KRAS G12D)
IVGHDAVGF

SEQ ID NO: 10314 - protein, 9 aa, synthetic construct
  source 1..9: note = Seed: VVGADGVGK (KRAS G12D)
IVGHDAVGK

SEQ ID NO: 10315 - protein, 9 aa, synthetic construct
  source 1..9: note = Seed: VVGADGVGK (KRAS G12D)
IVGHDAVGR

SEQ ID NO: 10316 - protein, 9 aa, synthetic construct
  source 1..9: note = Seed: VVGADGVGK (KRAS G12D)
IVGHDAVGY

SEQ ID NO: 10317 - protein, 9 aa, synthetic construct
  source 1..9: note = Seed: VVGADGVGK (KRAS G12D)
IVGHDGVGR

SEQ ID NO: 10318 - protein, 9 aa, synthetic construct
  source 1..9: note = Seed: VVGADGVGK (KRAS G12D)
IVGHDHVGR

SEQ ID NO: 10319 - protein, 9 aa, synthetic construct
  source 1..9: note = Seed: VVGADGVGK (KRAS G12D)
IVGHDHVGY

SEQ ID NO: 10320 - protein, 9 aa, synthetic construct
  source 1..9: note = Seed: VVGADGVGK (KRAS G12D)
IVGHDIVGK

SEQ ID NO: 10321 - protein, 9 aa, synthetic construct
  source 1..9: note = Seed: VVGADGVGK (KRAS G12D)
IVGHDIVGR

SEQ ID NO: 10322 - protein, 9 aa, synthetic construct
  source 1..9: note = Seed: VVGADGVGK (KRAS G12D)
IVGHDKVGA

SEQ ID NO: 10323 - protein, 9 aa, synthetic construct
  source 1..9: note = Seed: VVGADGVGK (KRAS G12D)
IVGHDKVGF

SEQ ID NO: 10324 - protein, 9 aa, synthetic construct
  source 1..9: note = Seed: VVGADGVGK (KRAS G12D)
IVGHDKVGH

SEQ ID NO: 10325 - protein, 9 aa, synthetic construct
  source 1..9: note = Seed: VVGADGVGK (KRAS G12D)
IVGHDKVGI

SEQ ID NO: 10326 - protein, 9 aa, synthetic construct
  source 1..9: note = Seed: VVGADGVGK (KRAS G12D)
IVGHDKVGK

SEQ ID NO: 10327 - protein, 9 aa, synthetic construct
  source 1..9: note = Seed: VVGADGVGK (KRAS G12D)
IVGHDKVGL

SEQ ID NO: 10328 - protein, 9 aa, synthetic construct
  source 1..9: note = Seed: VVGADGVGK (KRAS G12D)
IVGHDKVGM

SEQ ID NO: 10329 - protein, 9 aa, synthetic construct
  source 1..9: note = Seed: VVGADGVGK (KRAS G12D)
IVGHDKVGR

SEQ ID NO: 10330 - protein, 9 aa, synthetic construct
  source 1..9: note = Seed: VVGADGVGK (KRAS G12D)
IVGHDKVGV

SEQ ID NO: 10331 - protein, 9 aa, synthetic construct
  source 1..9: note = Seed: VVGADGVGK (KRAS G12D)
IVGHDKVGY

SEQ ID NO: 10332 - protein, 9 aa, synthetic construct
  source 1..9: note = Seed: VVGADGVGK (KRAS G12D)
IVGHDLVGR

SEQ ID NO: 10333 - protein, 9 aa, synthetic construct
  source 1..9: note = Seed: VVGADGVGK (KRAS G12D)
IVGHDMVGR

SEQ ID NO: 10334 - protein, 9 aa, synthetic construct
  source 1..9: note = Seed: VVGADGVGK (KRAS G12D)
IVGHDNVGR

SEQ ID NO: 10335 - protein, 9 aa, synthetic construct
  source 1..9: note = Seed: VVGADGVGK (KRAS G12D)
IVGHDNVGY

SEQ ID NO: 10336 - protein, 9 aa, synthetic construct
  source 1..9: note = Seed: VVGADGVGK (KRAS G12D)
IVGHDPVGK

SEQ ID NO: 10337 - protein, 9 aa, synthetic construct
  source 1..9: note = Seed: VVGADGVGK (KRAS G12D)
IVGHDPVGR

SEQ ID NO: 10338 - protein, 9 aa, synthetic construct
  source 1..9: note = Seed: VVGADGVGK (KRAS G12D)
IVGHDPVGY

SEQ ID NO: 10339 - protein, 9 aa, synthetic construct
  source 1..9: note = Seed: VVGADGVGK (KRAS G12D)
IVGHDRVGA

SEQ ID NO: 10340 - protein, 9 aa, synthetic construct
  source 1..9: note = Seed: VVGADGVGK (KRAS G12D)
IVGHDRVGF

SEQ ID NO: 10341 - protein, 9 aa, synthetic construct
  source 1..9: note = Seed: VVGADGVGK (KRAS G12D)
IVGHDRVGH

SEQ ID NO: 10342 - protein, 9 aa, synthetic construct
  source 1..9: note = Seed: VVGADGVGK (KRAS G12D)
IVGHDRVGI

SEQ ID NO: 10343 - protein, 9 aa, synthetic construct
  source 1..9: note = Seed: VVGADGVGK (KRAS G12D)
IVGHDRVGK

SEQ ID NO: 10344 - protein, 9 aa, synthetic construct
  source 1..9: note = Seed: VVGADGVGK (KRAS G12D)
IVGHDRVGL

SEQ ID NO: 10345 - protein, 9 aa, synthetic construct
  source 1..9: note = Seed: VVGADGVGK (KRAS G12D)
IVGHDRVGM

SEQ ID NO: 10346 - protein, 9 aa, synthetic construct
  source 1..9: note = Seed: VVGADGVGK (KRAS G12D)
IVGHDRVGQ

SEQ ID NO: 10347 - protein, 9 aa, synthetic construct
  source 1..9: note = Seed: VVGADGVGK (KRAS G12D)
IVGHDRVGR

SEQ ID NO: 10348 - protein, 9 aa, synthetic construct
  source 1..9: note = Seed: VVGADGVGK (KRAS G12D)
IVGHDRVGS

SEQ ID NO: 10349 - protein, 9 aa, synthetic construct
  source 1..9: note = Seed: VVGADGVGK (KRAS G12D)
IVGHDRVGT

SEQ ID NO: 10350 - protein, 9 aa, synthetic construct
  source 1..9: note = Seed: VVGADGVGK (KRAS G12D)
IVGHDRVGV

SEQ ID NO: 10351 - protein, 9 aa, synthetic construct
  source 1..9: note = Seed: VVGADGVGK (KRAS G12D)
IVGHDRVGW

SEQ ID NO: 10352 - protein, 9 aa, synthetic construct
  source 1..9: note = Seed: VVGADGVGK (KRAS G12D)
IVGHDRVGY

SEQ ID NO: 10353 - protein, 9 aa, synthetic construct
  source 1..9: note = Seed: VVGADGVGK (KRAS G12D)
IVGHDSVGK

SEQ ID NO: 10354 - protein, 9 aa, synthetic construct
  source 1..9: note = Seed: VVGADGVGK (KRAS G12D)
IVGHDSVGR

SEQ ID NO: 10355 - protein, 9 aa, synthetic construct
  source 1..9: note = Seed: VVGADGVGK (KRAS G12D)
IVGHDSVGY

SEQ ID NO: 10356 - protein, 9 aa, synthetic construct
  source 1..9: note = Seed: VVGADGVGK (KRAS G12D)
IVGHDTVGR

SEQ ID NO: 10357 - protein, 9 aa, synthetic construct
  source 1..9: note = Seed: VVGADGVGK (KRAS G12D)
IVGHDTVGY

SEQ ID NO: 10358 - protein, 9 aa, synthetic construct
  source 1..9: note = Seed: VVGADGVGK (KRAS G12D)
IVGHDVVGK

SEQ ID NO: 10359 - protein, 9 aa, synthetic construct
  source 1..9: note = Seed: VVGADGVGK (KRAS G12D)
IVGHDVVGR

SEQ ID NO: 10360 - protein, 9 aa, synthetic construct
  source 1..9: note = Seed: VVGADGVGK (KRAS G12D)
IVGHDVVGY

SEQ ID NO: 10361 - protein, 9 aa, synthetic construct
  source 1..9: note = Seed: VVGADGVGK (KRAS G12D)
IVGIDAVGA

SEQ ID NO: 10362 - protein, 9 aa, synthetic construct
  source 1..9: note = Seed: VVGADGVGK (KRAS G12D)
IVGIDAVGG

SEQ ID NO: 10363 - protein, 9 aa, synthetic construct
  source 1..9: note = Seed: VVGADGVGK (KRAS G12D)
IVGIDAVGI

SEQ ID NO: 10364 - protein, 9 aa, synthetic construct
  source 1..9: note = Seed: VVGADGVGK (KRAS G12D)
IVGIDAVGL

SEQ ID NO: 10365 - protein, 9 aa, synthetic construct
  source 1..9: note = Seed: VVGADGVGK (KRAS G12D)
IVGIDAVGM

SEQ ID NO: 10366 - protein, 9 aa, synthetic construct
  source 1..9: note = Seed: VVGADGVGK (KRAS G12D)
IVGIDAVGR

SEQ ID NO: 10367 - protein, 9 aa, synthetic construct
  source 1..9: note = Seed: VVGADGVGK (KRAS G12D)
IVGIDAVGS

SEQ ID NO: 10368 - protein, 9 aa, synthetic construct
  source 1..9: note = Seed: VVGADGVGK (KRAS G12D)
IVGIDAVGT

SEQ ID NO: 10369 - protein, 9 aa, synthetic construct
  source 1..9: note = Seed: VVGADGVGK (KRAS G12D)
IVGIDAVGV

SEQ ID NO: 10370 - protein, 9 aa, synthetic construct
  source 1..9: note = Seed: VVGADGVGK (KRAS G12D)
IVGIDGVGA

SEQ ID NO: 10371 - protein, 9 aa, synthetic construct
  source 1..9: note = Seed: VVGADGVGK (KRAS G12D)
IVGIDGVGI

SEQ ID NO: 10372 - protein, 9 aa, synthetic construct
  source 1..9: note = Seed: VVGADGVGK (KRAS G12D)
IVGIDGVGL

SEQ ID NO: 10373 - protein, 9 aa, synthetic construct
  source 1..9: note = Seed: VVGADGVGK (KRAS G12D)
IVGIDGVGM

SEQ ID NO: 10374 - protein, 9 aa, synthetic construct
  source 1..9: note = Seed: VVGADGVGK (KRAS G12D)
IVGIDGVGS

SEQ ID NO: 10375 - protein, 9 aa, synthetic construct
  source 1..9: note = Seed: VVGADGVGK (KRAS G12D)
IVGIDGVGT

SEQ ID NO: 10376 - protein, 9 aa, synthetic construct
  source 1..9: note = Seed: VVGADGVGK (KRAS G12D)
IVGIDGVGV

SEQ ID NO: 10377 - protein, 9 aa, synthetic construct
  source 1..9: note = Seed: VVGADGVGK (KRAS G12D)
IVGIDHVGR

SEQ ID NO: 10378 - protein, 9 aa, synthetic construct
  source 1..9: note = Seed: VVGADGVGK (KRAS G12D)
IVGIDHVGY

SEQ ID NO: 10379 - protein, 9 aa, synthetic construct
  source 1..9: note = Seed: VVGADGVGK (KRAS G12D)
IVGIDIVGR

SEQ ID NO: 10380 - protein, 9 aa, synthetic construct
  source 1..9: note = Seed: VVGADGVGK (KRAS G12D)
IVGIDKVGA

SEQ ID NO: 10381 - protein, 9 aa, synthetic construct
  source 1..9: note = Seed: VVGADGVGK (KRAS G12D)
IVGIDKVGF

SEQ ID NO: 10382 - protein, 9 aa, synthetic construct
  source 1..9: note = Seed: VVGADGVGK (KRAS G12D)
IVGIDKVGH

SEQ ID NO: 10383 - protein, 9 aa, synthetic construct
  source 1..9: note = Seed: VVGADGVGK (KRAS G12D)
IVGIDKVGI

SEQ ID NO: 10384 - protein, 9 aa, synthetic construct
  source 1..9: note = Seed: VVGADGVGK (KRAS G12D)
IVGIDKVGK

SEQ ID NO: 10385 - protein, 9 aa, synthetic construct
  source 1..9: note = Seed: VVGADGVGK (KRAS G12D)
IVGIDKVGL

SEQ ID NO: 10386 - protein, 9 aa, synthetic construct
  source 1..9: note = Seed: VVGADGVGK (KRAS G12D)
IVGIDKVGM

SEQ ID NO: 10387 - protein, 9 aa, synthetic construct
  source 1..9: note = Seed: VVGADGVGK (KRAS G12D)
IVGIDKVGR

SEQ ID NO: 10388 - protein, 9 aa, synthetic construct
  source 1..9: note = Seed: VVGADGVGK (KRAS G12D)
IVGIDKVGS

SEQ ID NO: 10389 - protein, 9 aa, synthetic construct
  source 1..9: note = Seed: VVGADGVGK (KRAS G12D)
IVGIDKVGT

SEQ ID NO: 10390 - protein, 9 aa, synthetic construct
  source 1..9: note = Seed: VVGADGVGK (KRAS G12D)
IVGIDKVGV

SEQ ID NO: 10391 - protein, 9 aa, synthetic construct
  source 1..9: note = Seed: VVGADGVGK (KRAS G12D)
IVGIDKVGY

SEQ ID NO: 10392 - protein, 9 aa, synthetic construct
  source 1..9: note = Seed: VVGADGVGK (KRAS G12D)
IVGIDNVGR

SEQ ID NO: 10393 - protein, 9 aa, synthetic construct
  source 1..9: note = Seed: VVGADGVGK (KRAS G12D)
IVGIDPVGA

SEQ ID NO: 10394 - protein, 9 aa, synthetic construct
  source 1..9: note = Seed: VVGADGVGK (KRAS G12D)
IVGIDPVGI

SEQ ID NO: 10395 - protein, 9 aa, synthetic construct
  source 1..9: note = Seed: VVGADGVGK (KRAS G12D)
IVGIDPVGL

SEQ ID NO: 10396 - protein, 9 aa, synthetic construct
  source 1..9: note = Seed: VVGADGVGK (KRAS G12D)
IVGIDPVGM

SEQ ID NO: 10397 - protein, 9 aa, synthetic construct
  source 1..9: note = Seed: VVGADGVGK (KRAS G12D)
IVGIDPVGR

SEQ ID NO: 10398 - protein, 9 aa, synthetic construct
  source 1..9: note = Seed: VVGADGVGK (KRAS G12D)
IVGIDPVGS

SEQ ID NO: 10399 - protein, 9 aa, synthetic construct
  source 1..9: note = Seed: VVGADGVGK (KRAS G12D)
IVGIDPVGT

SEQ ID NO: 10400 - protein, 9 aa, synthetic construct
  source 1..9: note = Seed: VVGADGVGK (KRAS G12D)
IVGIDPVGV

SEQ ID NO: 10401 - protein, 9 aa, synthetic construct
  source 1..9: note = Seed: VVGADGVGK (KRAS G12D)
IVGIDRVGA

SEQ ID NO: 10402 - protein, 9 aa, synthetic construct
  source 1..9: note = Seed: VVGADGVGK (KRAS G12D)
IVGIDRVGF

SEQ ID NO: 10403 - protein, 9 aa, synthetic construct
  source 1..9: note = Seed: VVGADGVGK (KRAS G12D)
IVGIDRVGG

SEQ ID NO: 10404 - protein, 9 aa, synthetic construct
  source 1..9: note = Seed: VVGADGVGK (KRAS G12D)
IVGIDRVGH

SEQ ID NO: 10405 - protein, 9 aa, synthetic construct
  source 1..9: note = Seed: VVGADGVGK (KRAS G12D)
IVGIDRVGI

SEQ ID NO: 10406 - protein, 9 aa, synthetic construct
  source 1..9: note = Seed: VVGADGVGK (KRAS G12D)
IVGIDRVGK

SEQ ID NO: 10407 - protein, 9 aa, synthetic construct
  source 1..9: note = Seed: VVGADGVGK (KRAS G12D)
IVGIDRVGL

SEQ ID NO: 10408 - protein, 9 aa, synthetic construct
  source 1..9: note = Seed: VVGADGVGK (KRAS G12D)
IVGIDRVGM

SEQ ID NO: 10409 - protein, 9 aa, synthetic construct
  source 1..9: note = Seed: VVGADGVGK (KRAS G12D)
IVGIDRVGQ

SEQ ID NO: 10410 - protein, 9 aa, synthetic construct
  source 1..9: note = Seed: VVGADGVGK (KRAS G12D)
IVGIDRVGR

SEQ ID NO: 10411 - protein, 9 aa, synthetic construct
  source 1..9: note = Seed: VVGADGVGK (KRAS G12D)
IVGIDRVGS

SEQ ID NO: 10412 - protein, 9 aa, synthetic construct
  source 1..9: note = Seed: VVGADGVGK (KRAS G12D)
IVGIDRVGT

SEQ ID NO: 10413 - protein, 9 aa, synthetic construct
  source 1..9: note = Seed: VVGADGVGK (KRAS G12D)
IVGIDRVGV

SEQ ID NO: 10414 - protein, 9 aa, synthetic construct
  source 1..9: note = Seed: VVGADGVGK (KRAS G12D)
IVGIDRVGY

SEQ ID NO: 10415 - protein, 9 aa, synthetic construct
  source 1..9: note = Seed: VVGADGVGK (KRAS G12D)
IVGIDSVGA

SEQ ID NO: 10416 - protein, 9 aa, synthetic construct
  source 1..9: note = Seed: VVGADGVGK (KRAS G12D)
IVGIDSVGI

SEQ ID NO: 10417 - protein, 9 aa, synthetic construct
  source 1..9: note = Seed: VVGADGVGK (KRAS G12D)
IVGIDSVGL

SEQ ID NO: 10418 - protein, 9 aa, synthetic construct
  source 1..9: note = Seed: VVGADGVGK (KRAS G12D)
IVGIDSVGR

SEQ ID NO: 10419 - protein, 9 aa, synthetic construct
  source 1..9: note = Seed: VVGADGVGK (KRAS G12D)
IVGIDSVGS

SEQ ID NO: 10420 - protein, 9 aa, synthetic construct
  source 1..9: note = Seed: VVGADGVGK (KRAS G12D)
IVGIDSVGT

SEQ ID NO: 10421 - protein, 9 aa, synthetic construct
  source 1..9: note = Seed: VVGADGVGK (KRAS G12D)
IVGIDSVGV

SEQ ID NO: 10422 - protein, 9 aa, synthetic construct
  source 1..9: note = Seed: VVGADGVGK (KRAS G12D)
IVGIDTVGR

SEQ ID NO: 10423 - protein, 9 aa, synthetic construct
  source 1..9: note = Seed: VVGADGVGK (KRAS G12D)
IVGIDVVGR

SEQ ID NO: 10424 - protein, 9 aa, synthetic construct
  source 1..9: note = Seed: VVGADGVGK (KRAS G12D)
IVGKDAVGR

SEQ ID NO: 10425 - protein, 9 aa, synthetic construct
  source 1..9: note = Seed: VVGADGVGK (KRAS G12D)
IVGKDAVGY

SEQ ID NO: 10426 - protein, 9 aa, synthetic construct
  source 1..9: note = Seed: VVGADGVGK (KRAS G12D)
IVGKDHVGY

SEQ ID NO: 10427 - protein, 9 aa, synthetic construct
  source 1..9: note = Seed: VVGADGVGK (KRAS G12D)
IVGKDIVGR

SEQ ID NO: 10428 - protein, 9 aa, synthetic construct
  source 1..9: note = Seed: VVGADGVGK (KRAS G12D)
IVGKDKVGA

SEQ ID NO: 10429 - protein, 9 aa, synthetic construct
  source 1..9: note = Seed: VVGADGVGK (KRAS G12D)
IVGKDKVGF

SEQ ID NO: 10430 - protein, 9 aa, synthetic construct
  source 1..9: note = Seed: VVGADGVGK (KRAS G12D)
IVGKDKVGI

SEQ ID NO: 10431 - protein, 9 aa, synthetic construct
  source 1..9: note = Seed: VVGADGVGK (KRAS G12D)
IVGKDKVGK

SEQ ID NO: 10432 - protein, 9 aa, synthetic construct
  source 1..9: note = Seed: VVGADGVGK (KRAS G12D)
IVGKDKVGL

SEQ ID NO: 10433 - protein, 9 aa, synthetic construct
  source 1..9: note = Seed: VVGADGVGK (KRAS G12D)
IVGKDKVGM

SEQ ID NO: 10434 - protein, 9 aa, synthetic construct
  source 1..9: note = Seed: VVGADGVGK (KRAS G12D)
IVGKDKVGR

SEQ ID NO: 10435 - protein, 9 aa, synthetic construct
  source 1..9: note = Seed: VVGADGVGK (KRAS G12D)
IVGKDKVGV

SEQ ID NO: 10436 - protein, 9 aa, synthetic construct
  source 1..9: note = Seed: VVGADGVGK (KRAS G12D)
IVGKDKVGY

SEQ ID NO: 10437 - protein, 9 aa, synthetic construct
  source 1..9: note = Seed: VVGADGVGK (KRAS G12D)
IVGKDMVGR

SEQ ID NO: 10438 - protein, 9 aa, synthetic construct
  source 1..9: note = Seed: VVGADGVGK (KRAS G12D)
IVGKDNVGR

SEQ ID NO: 10439 - protein, 9 aa, synthetic construct
  source 1..9: note = Seed: VVGADGVGK (KRAS G12D)
IVGKDNVGY

SEQ ID NO: 10440 - protein, 9 aa, synthetic construct
  source 1..9: note = Seed: VVGADGVGK (KRAS G12D)
IVGKDPVGR

SEQ ID NO: 10441 - protein, 9 aa, synthetic construct
  source 1..9: note = Seed: VVGADGVGK (KRAS G12D)
IVGKDPVGY

SEQ ID NO: 10442 - protein, 9 aa, synthetic construct
  source 1..9: note = Seed: VVGADGVGK (KRAS G12D)
IVGKDRVGA

SEQ ID NO: 10443 - protein, 9 aa, synthetic construct
  source 1..9: note = Seed: VVGADGVGK (KRAS G12D)
IVGKDRVGF

SEQ ID NO: 10444 - protein, 9 aa, synthetic construct
  source 1..9: note = Seed: VVGADGVGK (KRAS G12D)
IVGKDRVGH

SEQ ID NO: 10445 - protein, 9 aa, synthetic construct
  source 1..9: note = Seed: VVGADGVGK (KRAS G12D)
IVGKDRVGI

SEQ ID NO: 10446 - protein, 9 aa, synthetic construct
  source 1..9: note = Seed: VVGADGVGK (KRAS G12D)
IVGKDRVGK

SEQ ID NO: 10447 - protein, 9 aa, synthetic construct
  source 1..9: note = Seed: VVGADGVGK (KRAS G12D)
IVGKDRVGL

SEQ ID NO: 10448 - protein, 9 aa, synthetic construct
  source 1..9: note = Seed: VVGADGVGK (KRAS G12D)
IVGKDRVGM

SEQ ID NO: 10449 - protein, 9 aa, synthetic construct
  source 1..9: note = Seed: VVGADGVGK (KRAS G12D)
IVGKDRVGQ

SEQ ID NO: 10450 - protein, 9 aa, synthetic construct
  source 1..9: note = Seed: VVGADGVGK (KRAS G12D)
IVGKDRVGR

SEQ ID NO: 10451 - protein, 9 aa, synthetic construct
  source 1..9: note = Seed: VVGADGVGK (KRAS G12D)
IVGKDRVGS

SEQ ID NO: 10452 - protein, 9 aa, synthetic construct
  source 1..9: note = Seed: VVGADGVGK (KRAS G12D)
IVGKDRVGT

SEQ ID NO: 10453 - protein, 9 aa, synthetic construct
  source 1..9: note = Seed: VVGADGVGK (KRAS G12D)
IVGKDRVGV

SEQ ID NO: 10454 - protein, 9 aa, synthetic construct
  source 1..9: note = Seed: VVGADGVGK (KRAS G12D)
IVGKDRVGW

SEQ ID NO: 10455 - protein, 9 aa, synthetic construct
  source 1..9: note = Seed: VVGADGVGK (KRAS G12D)
IVGKDRVGY

SEQ ID NO: 10456 - protein, 9 aa, synthetic construct
  source 1..9: note = Seed: VVGADGVGK (KRAS G12D)
IVGKDSVGR

SEQ ID NO: 10457 - protein, 9 aa, synthetic construct
  source 1..9: note = Seed: VVGADGVGK (KRAS G12D)
IVGKDSVGY

SEQ ID NO: 10458 - protein, 9 aa, synthetic construct
  source 1..9: note = Seed: VVGADGVGK (KRAS G12D)
IVGKDTVGR

SEQ ID NO: 10459 - protein, 9 aa, synthetic construct
  source 1..9: note = Seed: VVGADGVGK (KRAS G12D)
IVGKDVVGR

SEQ ID NO: 10460 - protein, 9 aa, synthetic construct
  source 1..9: note = Seed: VVGADGVGK (KRAS G12D)
IVGLDAVGA

SEQ ID NO: 10461 - protein, 9 aa, synthetic construct
  source 1..9: note = Seed: VVGADGVGK (KRAS G12D)
IVGLDAVGG

SEQ ID NO: 10462 - protein, 9 aa, synthetic construct
  source 1..9: note = Seed: VVGADGVGK (KRAS G12D)
IVGLDAVGH

SEQ ID NO: 10463 - protein, 9 aa, synthetic construct
  source 1..9: note = Seed: VVGADGVGK (KRAS G12D)
IVGLDAVGI

SEQ ID NO: 10464 - protein, 9 aa, synthetic construct
  source 1..9: note = Seed: VVGADGVGK (KRAS G12D)
IVGLDAVGL

SEQ ID NO: 10465 - protein, 9 aa, synthetic construct
  source 1..9: note = Seed: VVGADGVGK (KRAS G12D)
IVGLDAVGM

SEQ ID NO: 10466 - protein, 9 aa, synthetic construct
  source 1..9: note = Seed: VVGADGVGK (KRAS G12D)
IVGLDAVGN

SEQ ID NO: 10467 - protein, 9 aa, synthetic construct
  source 1..9: note = Seed: VVGADGVGK (KRAS G12D)
IVGLDAVGR

SEQ ID NO: 10468 - protein, 9 aa, synthetic construct
  source 1..9: note = Seed: VVGADGVGK (KRAS G12D)
IVGLDAVGS

SEQ ID NO: 10469 - protein, 9 aa, synthetic construct
  source 1..9: note = Seed: VVGADGVGK (KRAS G12D)
IVGLDAVGT

SEQ ID NO: 10470 - protein, 9 aa, synthetic construct
  source 1..9: note = Seed: VVGADGVGK (KRAS G12D)
IVGLDAVGV

SEQ ID NO: 10471 - protein, 9 aa, synthetic construct
  source 1..9: note = Seed: VVGADGVGK (KRAS G12D)
IVGLDGVGA

SEQ ID NO: 10472 - protein, 9 aa, synthetic construct
  source 1..9: note = Seed: VVGADGVGK (KRAS G12D)
IVGLDGVGG

SEQ ID NO: 10473 - protein, 9 aa, synthetic construct
  source 1..9: note = Seed: VVGADGVGK (KRAS G12D)
IVGLDGVGH

SEQ ID NO: 10474 - protein, 9 aa, synthetic construct
  source 1..9: note = Seed: VVGADGVGK (KRAS G12D)
IVGLDGVGI

SEQ ID NO: 10475 - protein, 9 aa, synthetic construct
  source 1..9: note = Seed: VVGADGVGK (KRAS G12D)
IVGLDGVGL

SEQ ID NO: 10476 - protein, 9 aa, synthetic construct
  source 1..9: note = Seed: VVGADGVGK (KRAS G12D)
IVGLDGVGM

SEQ ID NO: 10477 - protein, 9 aa, synthetic construct
  source 1..9: note = Seed: VVGADGVGK (KRAS G12D)
IVGLDGVGN

SEQ ID NO: 10478 - protein, 9 aa, synthetic construct
  source 1..9: note = Seed: VVGADGVGK (KRAS G12D)
IVGLDGVGS

SEQ ID NO: 10479 - protein, 9 aa, synthetic construct
  source 1..9: note = Seed: VVGADGVGK (KRAS G12D)
IVGLDGVGT

SEQ ID NO: 10480 - protein, 9 aa, synthetic construct
  source 1..9: note = Seed: VVGADGVGK (KRAS G12D)
IVGLDGVGV

SEQ ID NO: 10481 - protein, 9 aa, synthetic construct
  source 1..9: note = Seed: VVGADGVGK (KRAS G12D)
IVGLDKVGA

SEQ ID NO: 10482 - protein, 9 aa, synthetic construct
  source 1..9: note = Seed: VVGADGVGK (KRAS G12D)
IVGLDKVGF

SEQ ID NO: 10483 - protein, 9 aa, synthetic construct
  source 1..9: note = Seed: VVGADGVGK (KRAS G12D)
IVGLDKVGH

SEQ ID NO: 10484 - protein, 9 aa, synthetic construct
  source 1..9: note = Seed: VVGADGVGK (KRAS G12D)
IVGLDKVGI

SEQ ID NO: 10485 - protein, 9 aa, synthetic construct
  source 1..9: note = Seed: VVGADGVGK (KRAS G12D)
IVGLDKVGK

SEQ ID NO: 10486 - protein, 9 aa, synthetic construct
  source 1..9: note = Seed: VVGADGVGK (KRAS G12D)
IVGLDKVGL

SEQ ID NO: 10487 - protein, 9 aa, synthetic construct
  source 1..9: note = Seed: VVGADGVGK (KRAS G12D)
IVGLDKVGM

SEQ ID NO: 10488 - protein, 9 aa, synthetic construct
  source 1..9: note = Seed: VVGADGVGK (KRAS G12D)
IVGLDKVGR

SEQ ID NO: 10489 - protein, 9 aa, synthetic construct
  source 1..9: note = Seed: VVGADGVGK (KRAS G12D)
IVGLDKVGS

SEQ ID NO: 10490 - protein, 9 aa, synthetic construct
  source 1..9: note = Seed: VVGADGVGK (KRAS G12D)
IVGLDKVGV

SEQ ID NO: 10491 - protein, 9 aa, synthetic construct
  source 1..9: note = Seed: VVGADGVGK (KRAS G12D)
IVGLDKVGY

SEQ ID NO: 10492 - protein, 9 aa, synthetic construct
  source 1..9: note = Seed: VVGADGVGK (KRAS G12D)
IVGLDNVGA

SEQ ID NO: 10493 - protein, 9 aa, synthetic construct
  source 1..9: note = Seed: VVGADGVGK (KRAS G12D)
IVGLDNVGI

SEQ ID NO: 10494 - protein, 9 aa, synthetic construct
  source 1..9: note = Seed: VVGADGVGK (KRAS G12D)
IVGLDNVGL

SEQ ID NO: 10495 - protein, 9 aa, synthetic construct
  source 1..9: note = Seed: VVGADGVGK (KRAS G12D)
IVGLDNVGM

SEQ ID NO: 10496 - protein, 9 aa, synthetic construct
  source 1..9: note = Seed: VVGADGVGK (KRAS G12D)
IVGLDNVGS

SEQ ID NO: 10497 - protein, 9 aa, synthetic construct
  source 1..9: note = Seed: VVGADGVGK (KRAS G12D)
IVGLDNVGT

SEQ ID NO: 10498 - protein, 9 aa, synthetic construct
  source 1..9: note = Seed: VVGADGVGK (KRAS G12D)
IVGLDNVGV

SEQ ID NO: 10499 - protein, 9 aa, synthetic construct
  source 1..9: note = Seed: VVGADGVGK (KRAS G12D)
IVGLDPVGA

SEQ ID NO: 10500 - protein, 9 aa, synthetic construct
  source 1..9: note = Seed: VVGADGVGK (KRAS G12D)
IVGLDPVGG

SEQ ID NO: 10501 - protein, 9 aa, synthetic construct
  source 1..9: note = Seed: VVGADGVGK (KRAS G12D)
IVGLDPVGI

SEQ ID NO: 10502 - protein, 9 aa, synthetic construct
  source 1..9: note = Seed: VVGADGVGK (KRAS G12D)
IVGLDPVGL

SEQ ID NO: 10503 - protein, 9 aa, synthetic construct
  source 1..9: note = Seed: VVGADGVGK (KRAS G12D)
IVGLDPVGM

SEQ ID NO: 10504 - protein, 9 aa, synthetic construct
  source 1..9: note = Seed: VVGADGVGK (KRAS G12D)
IVGLDPVGN

SEQ ID NO: 10505 - protein, 9 aa, synthetic construct
  source 1..9: note = Seed: VVGADGVGK (KRAS G12D)
IVGLDPVGR

SEQ ID NO: 10506 - protein, 9 aa, synthetic construct
  source 1..9: note = Seed: VVGADGVGK (KRAS G12D)
IVGLDPVGS

SEQ ID NO: 10507 - protein, 9 aa, synthetic construct
  source 1..9: note = Seed: VVGADGVGK (KRAS G12D)
IVGLDPVGT

SEQ ID NO: 10508 - protein, 9 aa, synthetic construct
  source 1..9: note = Seed: VVGADGVGK (KRAS G12D)
IVGLDPVGV

SEQ ID NO: 10509 - protein, 9 aa, synthetic construct
  source 1..9: note = Seed: VVGADGVGK (KRAS G12D)
IVGLDRVGA

SEQ ID NO: 10510 - protein, 9 aa, synthetic construct
  source 1..9: note = Seed: VVGADGVGK (KRAS G12D)
IVGLDRVGF

SEQ ID NO: 10511 - protein, 9 aa, synthetic construct
  source 1..9: note = Seed: VVGADGVGK (KRAS G12D)
IVGLDRVGH

SEQ ID NO: 10512 - protein, 9 aa, synthetic construct
  source 1..9: note = Seed: VVGADGVGK (KRAS G12D)
IVGLDRVGI

SEQ ID NO: 10513 - protein, 9 aa, synthetic construct
  source 1..9: note = Seed: VVGADGVGK (KRAS G12D)
IVGLDRVGK

SEQ ID NO: 10514 - protein, 9 aa, synthetic construct
  source 1..9: note = Seed: VVGADGVGK (KRAS G12D)
IVGLDRVGL

SEQ ID NO: 10515 - protein, 9 aa, synthetic construct
  source 1..9: note = Seed: VVGADGVGK (KRAS G12D)
IVGLDRVGM

SEQ ID NO: 10516 - protein, 9 aa, synthetic construct
  source 1..9: note = Seed: VVGADGVGK (KRAS G12D)
IVGLDRVGQ

SEQ ID NO: 10517 - protein, 9 aa, synthetic construct
  source 1..9: note = Seed: VVGADGVGK (KRAS G12D)
IVGLDRVGR

SEQ ID NO: 10518 - protein, 9 aa, synthetic construct
  source 1..9: note = Seed: VVGADGVGK (KRAS G12D)
IVGLDRVGS

SEQ ID NO: 10519 - protein, 9 aa, synthetic construct
  source 1..9: note = Seed: VVGADGVGK (KRAS G12D)
IVGLDRVGT

SEQ ID NO: 10520 - protein, 9 aa, synthetic construct
  source 1..9: note = Seed: VVGADGVGK (KRAS G12D)
IVGLDRVGV

SEQ ID NO: 10521 - protein, 9 aa, synthetic construct
  source 1..9: note = Seed: VVGADGVGK (KRAS G12D)
IVGLDRVGY

SEQ ID NO: 10522 - protein, 9 aa, synthetic construct
  source 1..9: note = Seed: VVGADGVGK (KRAS G12D)
IVGLDSVGA

SEQ ID NO: 10523 - protein, 9 aa, synthetic construct
  source 1..9: note = Seed: VVGADGVGK (KRAS G12D)
IVGLDSVGG

SEQ ID NO: 10524 - protein, 9 aa, synthetic construct
  source 1..9: note = Seed: VVGADGVGK (KRAS G12D)
IVGLDSVGI

SEQ ID NO: 10525 - protein, 9 aa, synthetic construct
  source 1..9: note = Seed: VVGADGVGK (KRAS G12D)
IVGLDSVGL

SEQ ID NO: 10526 - protein, 9 aa, synthetic construct
  source 1..9: note = Seed: VVGADGVGK (KRAS G12D)
IVGLDSVGM

SEQ ID NO: 10527 - protein, 9 aa, synthetic construct
  source 1..9: note = Seed: VVGADGVGK (KRAS G12D)
IVGLDSVGN

SEQ ID NO: 10528 - protein, 9 aa, synthetic construct
  source 1..9: note = Seed: VVGADGVGK (KRAS G12D)
IVGLDSVGS

SEQ ID NO: 10529 - protein, 9 aa, synthetic construct
  source 1..9: note = Seed: VVGADGVGK (KRAS G12D)
IVGLDSVGT

SEQ ID NO: 10530 - protein, 9 aa, synthetic construct
  source 1..9: note = Seed: VVGADGVGK (KRAS G12D)
IVGLDSVGV

SEQ ID NO: 10531 - protein, 9 aa, synthetic construct
  source 1..9: note = Seed: VVGADGVGK (KRAS G12D)
IVGLDTVGA

SEQ ID NO: 10532 - protein, 9 aa, synthetic construct
  source 1..9: note = Seed: VVGADGVGK (KRAS G12D)
IVGLDTVGI

SEQ ID NO: 10533 - protein, 9 aa, synthetic construct
  source 1..9: note = Seed: VVGADGVGK (KRAS G12D)
IVGLDTVGL

SEQ ID NO: 10534 - protein, 9 aa, synthetic construct
  source 1..9: note = Seed: VVGADGVGK (KRAS G12D)
IVGLDTVGM

SEQ ID NO: 10535 - protein, 9 aa, synthetic construct
  source 1..9: note = Seed: VVGADGVGK (KRAS G12D)
IVGLDTVGR

SEQ ID NO: 10536 - protein, 9 aa, synthetic construct
  source 1..9: note = Seed: VVGADGVGK (KRAS G12D)
IVGLDTVGS

SEQ ID NO: 10537 - protein, 9 aa, synthetic construct
  source 1..9: note = Seed: VVGADGVGK (KRAS G12D)
IVGLDTVGT

SEQ ID NO: 10538 - protein, 9 aa, synthetic construct
  source 1..9: note = Seed: VVGADGVGK (KRAS G12D)
IVGLDTVGV

SEQ ID NO: 10539 - protein, 9 aa, synthetic construct
  source 1..9: note = Seed: VVGADGVGK (KRAS G12D)
IVGMDAVGA

SEQ ID NO: 10540 - protein, 9 aa, synthetic construct
  source 1..9: note = Seed: VVGADGVGK (KRAS G12D)
IVGMDAVGG

SEQ ID NO: 10541 - protein, 9 aa, synthetic construct
  source 1..9: note = Seed: VVGADGVGK (KRAS G12D)
IVGMDAVGH

SEQ ID NO: 10542 - protein, 9 aa, synthetic construct
  source 1..9: note = Seed: VVGADGVGK (KRAS G12D)
IVGMDAVGI

SEQ ID NO: 10543 - protein, 9 aa, synthetic construct
  source 1..9: note = Seed: VVGADGVGK (KRAS G12D)
IVGMDAVGL

SEQ ID NO: 10544 - protein, 9 aa, synthetic construct
  source 1..9: note = Seed: VVGADGVGK (KRAS G12D)
IVGMDAVGM

SEQ ID NO: 10545 - protein, 9 aa, synthetic construct
  source 1..9: note = Seed: VVGADGVGK (KRAS G12D)
IVGMDAVGN

SEQ ID NO: 10546 - protein, 9 aa, synthetic construct
  source 1..9: note = Seed: VVGADGVGK (KRAS G12D)
IVGMDAVGR

SEQ ID NO: 10547 - protein, 9 aa, synthetic construct
  source 1..9: note = Seed: VVGADGVGK (KRAS G12D)
IVGMDAVGS

SEQ ID NO: 10548 - protein, 9 aa, synthetic construct
  source 1..9: note = Seed: VVGADGVGK (KRAS G12D)
IVGMDAVGT

SEQ ID NO: 10549 - protein, 9 aa, synthetic construct
  source 1..9: note = Seed: VVGADGVGK (KRAS G12D)
IVGMDAVGV

SEQ ID NO: 10550 - protein, 9 aa, synthetic construct
  source 1..9: note = Seed: VVGADGVGK (KRAS G12D)
IVGMDGVGA

SEQ ID NO: 10551 - protein, 9 aa, synthetic construct
  source 1..9: note = Seed: VVGADGVGK (KRAS G12D)
IVGMDGVGG

SEQ ID NO: 10552 - protein, 9 aa, synthetic construct
  source 1..9: note = Seed: VVGADGVGK (KRAS G12D)
IVGMDGVGI

SEQ ID NO: 10553 - protein, 9 aa, synthetic construct
  source 1..9: note = Seed: VVGADGVGK (KRAS G12D)
IVGMDGVGL

SEQ ID NO: 10554 - protein, 9 aa, synthetic construct
  source 1..9: note = Seed: VVGADGVGK (KRAS G12D)
IVGMDGVGM

SEQ ID NO: 10555 - protein, 9 aa, synthetic construct
  source 1..9: note = Seed: VVGADGVGK (KRAS G12D)
IVGMDGVGN

SEQ ID NO: 10556 - protein, 9 aa, synthetic construct
  source 1..9: note = Seed: VVGADGVGK (KRAS G12D)
IVGMDGVGS

SEQ ID NO: 10557 - protein, 9 aa, synthetic construct
  source 1..9: note = Seed: VVGADGVGK (KRAS G12D)
IVGMDGVGT

SEQ ID NO: 10558 - protein, 9 aa, synthetic construct
  source 1..9: note = Seed: VVGADGVGK (KRAS G12D)
IVGMDGVGV

SEQ ID NO: 10559 - protein, 9 aa, synthetic construct
  source 1..9: note = Seed: VVGADGVGK (KRAS G12D)
IVGMDIVGR

SEQ ID NO: 10560 - protein, 9 aa, synthetic construct
  source 1..9: note = Seed: VVGADGVGK (KRAS G12D)
IVGMDKVGA

SEQ ID NO: 10561 - protein, 9 aa, synthetic construct
  source 1..9: note = Seed: VVGADGVGK (KRAS G12D)
IVGMDKVGF

SEQ ID NO: 10562 - protein, 9 aa, synthetic construct
  source 1..9: note = Seed: VVGADGVGK (KRAS G12D)
IVGMDKVGH

SEQ ID NO: 10563 - protein, 9 aa, synthetic construct
  source 1..9: note = Seed: VVGADGVGK (KRAS G12D)
IVGMDKVGI

SEQ ID NO: 10564 - protein, 9 aa, synthetic construct
  source 1..9: note = Seed: VVGADGVGK (KRAS G12D)
IVGMDKVGK

SEQ ID NO: 10565 - protein, 9 aa, synthetic construct
  source 1..9: note = Seed: VVGADGVGK (KRAS G12D)
IVGMDKVGL

SEQ ID NO: 10566 - protein, 9 aa, synthetic construct
  source 1..9: note = Seed: VVGADGVGK (KRAS G12D)
IVGMDKVGM

SEQ ID NO: 10567 - protein, 9 aa, synthetic construct
  source 1..9: note = Seed: VVGADGVGK (KRAS G12D)
IVGMDKVGR

SEQ ID NO: 10568 - protein, 9 aa, synthetic construct
  source 1..9: note = Seed: VVGADGVGK (KRAS G12D)
IVGMDKVGS

SEQ ID NO: 10569 - protein, 9 aa, synthetic construct
  source 1..9: note = Seed: VVGADGVGK (KRAS G12D)
IVGMDKVGV

SEQ ID NO: 10570 - protein, 9 aa, synthetic construct
  source 1..9: note = Seed: VVGADGVGK (KRAS G12D)
IVGMDKVGY

SEQ ID NO: 10571 - protein, 9 aa, synthetic construct
  source 1..9: note = Seed: VVGADGVGK (KRAS G12D)
IVGMDNVGA

SEQ ID NO: 10572 - protein, 9 aa, synthetic construct
  source 1..9: note = Seed: VVGADGVGK (KRAS G12D)
IVGMDNVGI

SEQ ID NO: 10573 - protein, 9 aa, synthetic construct
  source 1..9: note = Seed: VVGADGVGK (KRAS G12D)
IVGMDNVGL

SEQ ID NO: 10574 - protein, 9 aa, synthetic construct
  source 1..9: note = Seed: VVGADGVGK (KRAS G12D)
IVGMDNVGM

SEQ ID NO: 10575 - protein, 9 aa, synthetic construct
  source 1..9: note = Seed: VVGADGVGK (KRAS G12D)
IVGMDNVGS

SEQ ID NO: 10576 - protein, 9 aa, synthetic construct
  source 1..9: note = Seed: VVGADGVGK (KRAS G12D)
IVGMDNVGT

SEQ ID NO: 10577 - protein, 9 aa, synthetic construct
  source 1..9: note = Seed: VVGADGVGK (KRAS G12D)
IVGMDNVGV

SEQ ID NO: 10578 - protein, 9 aa, synthetic construct
  source 1..9: note = Seed: VVGADGVGK (KRAS G12D)
IVGMDPVGA

SEQ ID NO: 10579 - protein, 9 aa, synthetic construct
  source 1..9: note = Seed: VVGADGVGK (KRAS G12D)
IVGMDPVGI

SEQ ID NO: 10580 - protein, 9 aa, synthetic construct
  source 1..9: note = Seed: VVGADGVGK (KRAS G12D)
IVGMDPVGL

SEQ ID NO: 10581 - protein, 9 aa, synthetic construct
  source 1..9: note = Seed: VVGADGVGK (KRAS G12D)
IVGMDPVGM

SEQ ID NO: 10582 - protein, 9 aa, synthetic construct
  source 1..9: note = Seed: VVGADGVGK (KRAS G12D)
IVGMDPVGS

SEQ ID NO: 10583 - protein, 9 aa, synthetic construct
  source 1..9: note = Seed: VVGADGVGK (KRAS G12D)
IVGMDPVGT

SEQ ID NO: 10584 - protein, 9 aa, synthetic construct
  source 1..9: note = Seed: VVGADGVGK (KRAS G12D)
IVGMDPVGV

SEQ ID NO: 10585 - protein, 9 aa, synthetic construct
  source 1..9: note = Seed: VVGADGVGK (KRAS G12D)
IVGMDRVGA

SEQ ID NO: 10586 - protein, 9 aa, synthetic construct
  source 1..9: note = Seed: VVGADGVGK (KRAS G12D)
IVGMDRVGF

SEQ ID NO: 10587 - protein, 9 aa, synthetic construct
  source 1..9: note = Seed: VVGADGVGK (KRAS G12D)
IVGMDRVGH

SEQ ID NO: 10588 - protein, 9 aa, synthetic construct
  source 1..9: note = Seed: VVGADGVGK (KRAS G12D)
IVGMDRVGI

SEQ ID NO: 10589 - protein, 9 aa, synthetic construct
  source 1..9: note = Seed: VVGADGVGK (KRAS G12D)
IVGMDRVGK

SEQ ID NO: 10590 - protein, 9 aa, synthetic construct
  source 1..9: note = Seed: VVGADGVGK (KRAS G12D)
IVGMDRVGL

SEQ ID NO: 10591 - protein, 9 aa, synthetic construct
  source 1..9: note = Seed: VVGADGVGK (KRAS G12D)
IVGMDRVGM

SEQ ID NO: 10592 - protein, 9 aa, synthetic construct
  source 1..9: note = Seed: VVGADGVGK (KRAS G12D)
IVGMDRVGR

SEQ ID NO: 10593 - protein, 9 aa, synthetic construct
  source 1..9: note = Seed: VVGADGVGK (KRAS G12D)
IVGMDRVGS

SEQ ID NO: 10594 - protein, 9 aa, synthetic construct
  source 1..9: note = Seed: VVGADGVGK (KRAS G12D)
IVGMDRVGT

SEQ ID NO: 10595 - protein, 9 aa, synthetic construct
  source 1..9: note = Seed: VVGADGVGK (KRAS G12D)
IVGMDRVGV

SEQ ID NO: 10596 - protein, 9 aa, synthetic construct
  source 1..9: note = Seed: VVGADGVGK (KRAS G12D)
IVGMDRVGY

SEQ ID NO: 10597 - protein, 9 aa, synthetic construct
  source 1..9: note = Seed: VVGADGVGK (KRAS G12D)
IVGMDSVGA

SEQ ID NO: 10598 - protein, 9 aa, synthetic construct
  source 1..9: note = Seed: VVGADGVGK (KRAS G12D)
IVGMDSVGG

SEQ ID NO: 10599 - protein, 9 aa, synthetic construct
  source 1..9: note = Seed: VVGADGVGK (KRAS G12D)
IVGMDSVGI

SEQ ID NO: 10600 - protein, 9 aa, synthetic construct
  source 1..9: note = Seed: VVGADGVGK (KRAS G12D)
IVGMDSVGL

SEQ ID NO: 10601 - protein, 9 aa, synthetic construct
  source 1..9: note = Seed: VVGADGVGK (KRAS G12D)
IVGMDSVGM

SEQ ID NO: 10602 - protein, 9 aa, synthetic construct
  source 1..9: note = Seed: VVGADGVGK (KRAS G12D)
IVGMDSVGN

SEQ ID NO: 10603 - protein, 9 aa, synthetic construct
  source 1..9: note = Seed: VVGADGVGK (KRAS G12D)
IVGMDSVGS

SEQ ID NO: 10604 - protein, 9 aa, synthetic construct
  source 1..9: note = Seed: VVGADGVGK (KRAS G12D)
IVGMDSVGT

SEQ ID NO: 10605 - protein, 9 aa, synthetic construct
  source 1..9: note = Seed: VVGADGVGK (KRAS G12D)
IVGMDSVGV

SEQ ID NO: 10606 - protein, 9 aa, synthetic construct
  source 1..9: note = Seed: VVGADGVGK (KRAS G12D)
IVGMDTVGA

SEQ ID NO: 10607 - protein, 9 aa, synthetic construct
  source 1..9: note = Seed: VVGADGVGK (KRAS G12D)
IVGMDTVGI

SEQ ID NO: 10608 - protein, 9 aa, synthetic construct
  source 1..9: note = Seed: VVGADGVGK (KRAS G12D)
IVGMDTVGL

SEQ ID NO: 10609 - protein, 9 aa, synthetic construct
  source 1..9: note = Seed: VVGADGVGK (KRAS G12D)
IVGMDTVGM

SEQ ID NO: 10610 - protein, 9 aa, synthetic construct
  source 1..9: note = Seed: VVGADGVGK (KRAS G12D)
IVGMDTVGS

SEQ ID NO: 10611 - protein, 9 aa, synthetic construct
  source 1..9: note = Seed: VVGADGVGK (KRAS G12D)
IVGMDTVGT

SEQ ID NO: 10612 - protein, 9 aa, synthetic construct
  source 1..9: note = Seed: VVGADGVGK (KRAS G12D)
IVGMDTVGV

SEQ ID NO: 10613 - protein, 9 aa, synthetic construct
  source 1..9: note = Seed: VVGADGVGK (KRAS G12D)
IVGMDVVGR

SEQ ID NO: 10614 - protein, 9 aa, synthetic construct
  source 1..9: note = Seed: VVGADGVGK (KRAS G12D)
IVGNDAVGY

SEQ ID NO: 10615 - protein, 9 aa, synthetic construct
  source 1..9: note = Seed: VVGADGVGK (KRAS G12D)
IVGNDKVGY

SEQ ID NO: 10616 - protein, 9 aa, synthetic construct
  source 1..9: note = Seed: VVGADGVGK (KRAS G12D)
IVGNDRVGF

SEQ ID NO: 10617 - protein, 9 aa, synthetic construct
  source 1..9: note = Seed: VVGADGVGK (KRAS G12D)
IVGNDRVGI

SEQ ID NO: 10618 - protein, 9 aa, synthetic construct
  source 1..9: note = Seed: VVGADGVGK (KRAS G12D)
IVGNDRVGK

SEQ ID NO: 10619 - protein, 9 aa, synthetic construct
  source 1..9: note = Seed: VVGADGVGK (KRAS G12D)
IVGNDRVGL

SEQ ID NO: 10620 - protein, 9 aa, synthetic construct
  source 1..9: note = Seed: VVGADGVGK (KRAS G12D)
IVGNDRVGM

SEQ ID NO: 10621 - protein, 9 aa, synthetic construct
  source 1..9: note = Seed: VVGADGVGK (KRAS G12D)
IVGNDRVGR

SEQ ID NO: 10622 - protein, 9 aa, synthetic construct
  source 1..9: note = Seed: VVGADGVGK (KRAS G12D)
IVGNDRVGV

SEQ ID NO: 10623 - protein, 9 aa, synthetic construct
  source 1..9: note = Seed: VVGADGVGK (KRAS G12D)
IVGNDRVGY

SEQ ID NO: 10624 - protein, 9 aa, synthetic construct
  source 1..9: note = Seed: VVGADGVGK (KRAS G12D)
IVGQDAVGA

SEQ ID NO: 10625 - protein, 9 aa, synthetic construct
  source 1..9: note = Seed: VVGADGVGK (KRAS G12D)
IVGQDAVGI

SEQ ID NO: 10626 - protein, 9 aa, synthetic construct
  source 1..9: note = Seed: VVGADGVGK (KRAS G12D)
IVGQDAVGL

SEQ ID NO: 10627 - protein, 9 aa, synthetic construct
  source 1..9: note = Seed: VVGADGVGK (KRAS G12D)
IVGQDAVGM

SEQ ID NO: 10628 - protein, 9 aa, synthetic construct
  source 1..9: note = Seed: VVGADGVGK (KRAS G12D)
IVGQDAVGS

SEQ ID NO: 10629 - protein, 9 aa, synthetic construct
  source 1..9: note = Seed: VVGADGVGK (KRAS G12D)
IVGQDAVGT

SEQ ID NO: 10630 - protein, 9 aa, synthetic construct
  source 1..9: note = Seed: VVGADGVGK (KRAS G12D)
IVGQDAVGV

SEQ ID NO: 10631 - protein, 9 aa, synthetic construct
  source 1..9: note = Seed: VVGADGVGK (KRAS G12D)
IVGQDGVGA

SEQ ID NO: 10632 - protein, 9 aa, synthetic construct
  source 1..9: note = Seed: VVGADGVGK (KRAS G12D)
IVGQDGVGI

SEQ ID NO: 10633 - protein, 9 aa, synthetic construct
  source 1..9: note = Seed: VVGADGVGK (KRAS G12D)
IVGQDGVGL

SEQ ID NO: 10634 - protein, 9 aa, synthetic construct
  source 1..9: note = Seed: VVGADGVGK (KRAS G12D)
IVGQDGVGV

SEQ ID NO: 10635 - protein, 9 aa, synthetic construct
  source 1..9: note = Seed: VVGADGVGK (KRAS G12D)
IVGQDKVGF

SEQ ID NO: 10636 - protein, 9 aa, synthetic construct
  source 1..9: note = Seed: VVGADGVGK (KRAS G12D)
IVGQDKVGI

SEQ ID NO: 10637 - protein, 9 aa, synthetic construct
  source 1..9: note = Seed: VVGADGVGK (KRAS G12D)
IVGQDKVGL

SEQ ID NO: 10638 - protein, 9 aa, synthetic construct
  source 1..9: note = Seed: VVGADGVGK (KRAS G12D)
IVGQDKVGM

SEQ ID NO: 10639 - protein, 9 aa, synthetic construct
  source 1..9: note = Seed: VVGADGVGK (KRAS G12D)
IVGQDKVGR

SEQ ID NO: 10640 - protein, 9 aa, synthetic construct
  source 1..9: note = Seed: VVGADGVGK (KRAS G12D)
IVGQDKVGV

SEQ ID NO: 10641 - protein, 9 aa, synthetic construct
  source 1..9: note = Seed: VVGADGVGK (KRAS G12D)
IVGQDKVGY

SEQ ID NO: 10642 - protein, 9 aa, synthetic construct
  source 1..9: note = Seed: VVGADGVGK (KRAS G12D)
IVGQDPVGV

SEQ ID NO: 10643 - protein, 9 aa, synthetic construct
  source 1..9: note = Seed: VVGADGVGK (KRAS G12D)
IVGQDRVGA

SEQ ID NO: 10644 - protein, 9 aa, synthetic construct
  source 1..9: note = Seed: VVGADGVGK (KRAS G12D)
IVGQDRVGF

SEQ ID NO: 10645 - protein, 9 aa, synthetic construct
  source 1..9: note = Seed: VVGADGVGK (KRAS G12D)
IVGQDRVGH

SEQ ID NO: 10646 - protein, 9 aa, synthetic construct
  source 1..9: note = Seed: VVGADGVGK (KRAS G12D)
IVGQDRVGI

SEQ ID NO: 10647 - protein, 9 aa, synthetic construct
  source 1..9: note = Seed: VVGADGVGK (KRAS G12D)
IVGQDRVGK

SEQ ID NO: 10648 - protein, 9 aa, synthetic construct
  source 1..9: note = Seed: VVGADGVGK (KRAS G12D)
IVGQDRVGL

SEQ ID NO: 10649 - protein, 9 aa, synthetic construct
  source 1..9: note = Seed: VVGADGVGK (KRAS G12D)
IVGQDRVGM

SEQ ID NO: 10650 - protein, 9 aa, synthetic construct
  source 1..9: note = Seed: VVGADGVGK (KRAS G12D)
IVGQDRVGR

SEQ ID NO: 10651 - protein, 9 aa, synthetic construct
  source 1..9: note = Seed: VVGADGVGK (KRAS G12D)
IVGQDRVGV

SEQ ID NO: 10652 - protein, 9 aa, synthetic construct
  source 1..9: note = Seed: VVGADGVGK (KRAS G12D)
IVGQDRVGY

SEQ ID NO: 10653 - protein, 9 aa, synthetic construct
  source 1..9: note = Seed: VVGADGVGK (KRAS G12D)
IVGQDSVGA

SEQ ID NO: 10654 - protein, 9 aa, synthetic construct
  source 1..9: note = Seed: VVGADGVGK (KRAS G12D)
IVGQDSVGI

SEQ ID NO: 10655 - protein, 9 aa, synthetic construct
  source 1..9: note = Seed: VVGADGVGK (KRAS G12D)
IVGQDSVGL

SEQ ID NO: 10656 - protein, 9 aa, synthetic construct
  source 1..9: note = Seed: VVGADGVGK (KRAS G12D)
IVGQDSVGV

SEQ ID NO: 10657 - protein, 9 aa, synthetic construct
  source 1..9: note = Seed: VVGADGVGK (KRAS G12D)
IVGRDAVGF

SEQ ID NO: 10658 - protein, 9 aa, synthetic construct
  source 1..9: note = Seed: VVGADGVGK (KRAS G12D)
IVGRDAVGK

SEQ ID NO: 10659 - protein, 9 aa, synthetic construct
  source 1..9: note = Seed: VVGADGVGK (KRAS G12D)
IVGRDAVGR

SEQ ID NO: 10660 - protein, 9 aa, synthetic construct
  source 1..9: note = Seed: VVGADGVGK (KRAS G12D)
IVGRDAVGY

SEQ ID NO: 10661 - protein, 9 aa, synthetic construct
  source 1..9: note = Seed: VVGADGVGK (KRAS G12D)
IVGRDGVGR

SEQ ID NO: 10662 - protein, 9 aa, synthetic construct
  source 1..9: note = Seed: VVGADGVGK (KRAS G12D)
IVGRDHVGF

SEQ ID NO: 10663 - protein, 9 aa, synthetic construct
  source 1..9: note = Seed: VVGADGVGK (KRAS G12D)
IVGRDHVGR

SEQ ID NO: 10664 - protein, 9 aa, synthetic construct
  source 1..9: note = Seed: VVGADGVGK (KRAS G12D)
IVGRDHVGY

SEQ ID NO: 10665 - protein, 9 aa, synthetic construct
  source 1..9: note = Seed: VVGADGVGK (KRAS G12D)
IVGRDIVGR

SEQ ID NO: 10666 - protein, 9 aa, synthetic construct
  source 1..9: note = Seed: VVGADGVGK (KRAS G12D)
IVGRDKVGA

SEQ ID NO: 10667 - protein, 9 aa, synthetic construct
  source 1..9: note = Seed: VVGADGVGK (KRAS G12D)
IVGRDKVGF

SEQ ID NO: 10668 - protein, 9 aa, synthetic construct
  source 1..9: note = Seed: VVGADGVGK (KRAS G12D)
IVGRDKVGH

SEQ ID NO: 10669 - protein, 9 aa, synthetic construct
  source 1..9: note = Seed: VVGADGVGK (KRAS G12D)
IVGRDKVGI

SEQ ID NO: 10670 - protein, 9 aa, synthetic construct
  source 1..9: note = Seed: VVGADGVGK (KRAS G12D)
IVGRDKVGK

SEQ ID NO: 10671 - protein, 9 aa, synthetic construct
  source 1..9: note = Seed: VVGADGVGK (KRAS G12D)
IVGRDKVGL

SEQ ID NO: 10672 - protein, 9 aa, synthetic construct
  source 1..9: note = Seed: VVGADGVGK (KRAS G12D)
IVGRDKVGM

SEQ ID NO: 10673 - protein, 9 aa, synthetic construct
  source 1..9: note = Seed: VVGADGVGK (KRAS G12D)
IVGRDKVGR

SEQ ID NO: 10674 - protein, 9 aa, synthetic construct
  source 1..9: note = Seed: VVGADGVGK (KRAS G12D)
IVGRDKVGS

SEQ ID NO: 10675 - protein, 9 aa, synthetic construct
  source 1..9: note = Seed: VVGADGVGK (KRAS G12D)
IVGRDKVGV

SEQ ID NO: 10676 - protein, 9 aa, synthetic construct
  source 1..9: note = Seed: VVGADGVGK (KRAS G12D)
IVGRDKVGW

SEQ ID NO: 10677 - protein, 9 aa, synthetic construct
  source 1..9: note = Seed: VVGADGVGK (KRAS G12D)
IVGRDKVGY

SEQ ID NO: 10678 - protein, 9 aa, synthetic construct
  source 1..9: note = Seed: VVGADGVGK (KRAS G12D)
IVGRDLVGR

SEQ ID NO: 10679 - protein, 9 aa, synthetic construct
  source 1..9: note = Seed: VVGADGVGK (KRAS G12D)
IVGRDMVGR

SEQ ID NO: 10680 - protein, 9 aa, synthetic construct
  source 1..9: note = Seed: VVGADGVGK (KRAS G12D)
IVGRDNVGR

SEQ ID NO: 10681 - protein, 9 aa, synthetic construct
  source 1..9: note = Seed: VVGADGVGK (KRAS G12D)
IVGRDNVGY

SEQ ID NO: 10682 - protein, 9 aa, synthetic construct
  source 1..9: note = Seed: VVGADGVGK (KRAS G12D)
IVGRDPVGF

SEQ ID NO: 10683 - protein, 9 aa, synthetic construct
  source 1..9: note = Seed: VVGADGVGK (KRAS G12D)
IVGRDPVGR

SEQ ID NO: 10684 - protein, 9 aa, synthetic construct
  source 1..9: note = Seed: VVGADGVGK (KRAS G12D)
IVGRDPVGY

SEQ ID NO: 10685 - protein, 9 aa, synthetic construct
  source 1..9: note = Seed: VVGADGVGK (KRAS G12D)
IVGRDRVGA

SEQ ID NO: 10686 - protein, 9 aa, synthetic construct
  source 1..9: note = Seed: VVGADGVGK (KRAS G12D)
IVGRDRVGF

SEQ ID NO: 10687 - protein, 9 aa, synthetic construct
  source 1..9: note = Seed: VVGADGVGK (KRAS G12D)
IVGRDRVGG

SEQ ID NO: 10688 - protein, 9 aa, synthetic construct
  source 1..9: note = Seed: VVGADGVGK (KRAS G12D)
IVGRDRVGH

SEQ ID NO: 10689 - protein, 9 aa, synthetic construct
  source 1..9: note = Seed: VVGADGVGK (KRAS G12D)
IVGRDRVGI

SEQ ID NO: 10690 - protein, 9 aa, synthetic construct
  source 1..9: note = Seed: VVGADGVGK (KRAS G12D)
IVGRDRVGK

SEQ ID NO: 10691 - protein, 9 aa, synthetic construct
  source 1..9: note = Seed: VVGADGVGK (KRAS G12D)
IVGRDRVGL

SEQ ID NO: 10692 - protein, 9 aa, synthetic construct
  source 1..9: note = Seed: VVGADGVGK (KRAS G12D)
IVGRDRVGM

SEQ ID NO: 10693 - protein, 9 aa, synthetic construct
  source 1..9: note = Seed: VVGADGVGK (KRAS G12D)
IVGRDRVGN

SEQ ID NO: 10694 - protein, 9 aa, synthetic construct
  source 1..9: note = Seed: VVGADGVGK (KRAS G12D)
IVGRDRVGQ

SEQ ID NO: 10695 - protein, 9 aa, synthetic construct
  source 1..9: note = Seed: VVGADGVGK (KRAS G12D)
IVGRDRVGR

SEQ ID NO: 10696 - protein, 9 aa, synthetic construct
  source 1..9: note = Seed: VVGADGVGK (KRAS G12D)
IVGRDRVGS

SEQ ID NO: 10697 - protein, 9 aa, synthetic construct
  source 1..9: note = Seed: VVGADGVGK (KRAS G12D)
IVGRDRVGT

SEQ ID NO: 10698 - protein, 9 aa, synthetic construct
  source 1..9: note = Seed: VVGADGVGK (KRAS G12D)
IVGRDRVGV

SEQ ID NO: 10699 - protein, 9 aa, synthetic construct
  source 1..9: note = Seed: VVGADGVGK (KRAS G12D)
IVGRDRVGW

SEQ ID NO: 10700 - protein, 9 aa, synthetic construct
  source 1..9: note = Seed: VVGADGVGK (KRAS G12D)
IVGRDRVGY

SEQ ID NO: 10701 - protein, 9 aa, synthetic construct
  source 1..9: note = Seed: VVGADGVGK (KRAS G12D)
IVGRDSVGR

SEQ ID NO: 10702 - protein, 9 aa, synthetic construct
  source 1..9: note = Seed: VVGADGVGK (KRAS G12D)
IVGRDSVGY

SEQ ID NO: 10703 - protein, 9 aa, synthetic construct
  source 1..9: note = Seed: VVGADGVGK (KRAS G12D)
IVGRDTVGR

SEQ ID NO: 10704 - protein, 9 aa, synthetic construct
  source 1..9: note = Seed: VVGADGVGK (KRAS G12D)
IVGRDTVGY

SEQ ID NO: 10705 - protein, 9 aa, synthetic construct
  source 1..9: note = Seed: VVGADGVGK (KRAS G12D)
IVGRDVVGR

SEQ ID NO: 10706 - protein, 9 aa, synthetic construct
  source 1..9: note = Seed: VVGADGVGK (KRAS G12D)
IVGRDVVGY

SEQ ID NO: 10707 - protein, 9 aa, synthetic construct
  source 1..9: note = Seed: VVGADGVGK (KRAS G12D)
IVGSDAVGA

SEQ ID NO: 10708 - protein, 9 aa, synthetic construct
  source 1..9: note = Seed: VVGADGVGK (KRAS G12D)
IVGSDAVGI

SEQ ID NO: 10709 - protein, 9 aa, synthetic construct
  source 1..9: note = Seed: VVGADGVGK (KRAS G12D)
IVGSDAVGL

SEQ ID NO: 10710 - protein, 9 aa, synthetic construct
  source 1..9: note = Seed: VVGADGVGK (KRAS G12D)
IVGSDAVGR

SEQ ID NO: 10711 - protein, 9 aa, synthetic construct
  source 1..9: note = Seed: VVGADGVGK (KRAS G12D)
IVGSDAVGV

SEQ ID NO: 10712 - protein, 9 aa, synthetic construct
  source 1..9: note = Seed: VVGADGVGK (KRAS G12D)
IVGSDKVGF

SEQ ID NO: 10713 - protein, 9 aa, synthetic construct
  source 1..9: note = Seed: VVGADGVGK (KRAS G12D)
IVGSDKVGI

SEQ ID NO: 10714 - protein, 9 aa, synthetic construct
  source 1..9: note = Seed: VVGADGVGK (KRAS G12D)
IVGSDKVGK

SEQ ID NO: 10715 - protein, 9 aa, synthetic construct
  source 1..9: note = Seed: VVGADGVGK (KRAS G12D)
IVGSDKVGL

SEQ ID NO: 10716 - protein, 9 aa, synthetic construct
  source 1..9: note = Seed: VVGADGVGK (KRAS G12D)
IVGSDKVGM

SEQ ID NO: 10717 - protein, 9 aa, synthetic construct
  source 1..9: note = Seed: VVGADGVGK (KRAS G12D)
IVGSDKVGR

SEQ ID NO: 10718 - protein, 9 aa, synthetic construct
  source 1..9: note = Seed: VVGADGVGK (KRAS G12D)
IVGSDKVGV

SEQ ID NO: 10719 - protein, 9 aa, synthetic construct
  source 1..9: note = Seed: VVGADGVGK (KRAS G12D)
IVGSDKVGY

SEQ ID NO: 10720 - protein, 9 aa, synthetic construct
  source 1..9: note = Seed: VVGADGVGK (KRAS G12D)
IVGSDPVGR

SEQ ID NO: 10721 - protein, 9 aa, synthetic construct
  source 1..9: note = Seed: VVGADGVGK (KRAS G12D)
IVGSDRVGA

SEQ ID NO: 10722 - protein, 9 aa, synthetic construct
  source 1..9: note = Seed: VVGADGVGK (KRAS G12D)
IVGSDRVGF

SEQ ID NO: 10723 - protein, 9 aa, synthetic construct
  source 1..9: note = Seed: VVGADGVGK (KRAS G12D)
IVGSDRVGH

SEQ ID NO: 10724 - protein, 9 aa, synthetic construct
  source 1..9: note = Seed: VVGADGVGK (KRAS G12D)
IVGSDRVGI

SEQ ID NO: 10725 - protein, 9 aa, synthetic construct
  source 1..9: note = Seed: VVGADGVGK (KRAS G12D)
IVGSDRVGK

SEQ ID NO: 10726 - protein, 9 aa, synthetic construct
  source 1..9: note = Seed: VVGADGVGK (KRAS G12D)
IVGSDRVGL

SEQ ID NO: 10727 - protein, 9 aa, synthetic construct
  source 1..9: note = Seed: VVGADGVGK (KRAS G12D)
IVGSDRVGM

SEQ ID NO: 10728 - protein, 9 aa, synthetic construct
  source 1..9: note = Seed: VVGADGVGK (KRAS G12D)
IVGSDRVGQ

SEQ ID NO: 10729 - protein, 9 aa, synthetic construct
  source 1..9: note = Seed: VVGADGVGK (KRAS G12D)
IVGSDRVGR

SEQ ID NO: 10730 - protein, 9 aa, synthetic construct
  source 1..9: note = Seed: VVGADGVGK (KRAS G12D)
IVGSDRVGS

SEQ ID NO: 10731 - protein, 9 aa, synthetic construct
  source 1..9: note = Seed: VVGADGVGK (KRAS G12D)
IVGSDRVGV

SEQ ID NO: 10732 - protein, 9 aa, synthetic construct
  source 1..9: note = Seed: VVGADGVGK (KRAS G12D)
IVGSDRVGY

SEQ ID NO: 10733 - protein, 9 aa, synthetic construct
  source 1..9: note = Seed: VVGADGVGK (KRAS G12D)
IVGSDVVGR

SEQ ID NO: 10734 - protein, 9 aa, synthetic construct
  source 1..9: note = Seed: VVGADGVGK (KRAS G12D)
IVGTDKVGR

SEQ ID NO: 10735 - protein, 9 aa, synthetic construct
  source 1..9: note = Seed: VVGADGVGK (KRAS G12D)
IVGTDKVGY

SEQ ID NO: 10736 - protein, 9 aa, synthetic construct
  source 1..9: note = Seed: VVGADGVGK (KRAS G12D)
IVGTDRVGF

SEQ ID NO: 10737 - protein, 9 aa, synthetic construct
  source 1..9: note = Seed: VVGADGVGK (KRAS G12D)
IVGTDRVGK

SEQ ID NO: 10738 - protein, 9 aa, synthetic construct
  source 1..9: note = Seed: VVGADGVGK (KRAS G12D)
IVGTDRVGL

SEQ ID NO: 10739 - protein, 9 aa, synthetic construct
  source 1..9: note = Seed: VVGADGVGK (KRAS G12D)
IVGTDRVGM

SEQ ID NO: 10740 - protein, 9 aa, synthetic construct
  source 1..9: note = Seed: VVGADGVGK (KRAS G12D)
IVGTDRVGR

SEQ ID NO: 10741 - protein, 9 aa, synthetic construct
  source 1..9: note = Seed: VVGADGVGK (KRAS G12D)
IVGTDRVGY

SEQ ID NO: 10742 - protein, 9 aa, synthetic construct
  source 1..9: note = Seed: VVGADGVGK (KRAS G12D)
IVGVDAVGA

SEQ ID NO: 10743 - protein, 9 aa, synthetic construct
  source 1..9: note = Seed: VVGADGVGK (KRAS G12D)
IVGVDAVGI

SEQ ID NO: 10744 - protein, 9 aa, synthetic construct
  source 1..9: note = Seed: VVGADGVGK (KRAS G12D)
IVGVDAVGL

SEQ ID NO: 10745 - protein, 9 aa, synthetic construct
  source 1..9: note = Seed: VVGADGVGK (KRAS G12D)
IVGVDAVGR

SEQ ID NO: 10746 - protein, 9 aa, synthetic construct
  source 1..9: note = Seed: VVGADGVGK (KRAS G12D)
IVGVDAVGV

SEQ ID NO: 10747 - protein, 9 aa, synthetic construct
  source 1..9: note = Seed: VVGADGVGK (KRAS G12D)
IVGVDGVGA

SEQ ID NO: 10748 - protein, 9 aa, synthetic construct
  source 1..9: note = Seed: VVGADGVGK (KRAS G12D)
IVGVDGVGV

SEQ ID NO: 10749 - protein, 9 aa, synthetic construct
  source 1..9: note = Seed: VVGADGVGK (KRAS G12D)
IVGVDKVGA

SEQ ID NO: 10750 - protein, 9 aa, synthetic construct
  source 1..9: note = Seed: VVGADGVGK (KRAS G12D)
IVGVDKVGF

SEQ ID NO: 10751 - protein, 9 aa, synthetic construct
  source 1..9: note = Seed: VVGADGVGK (KRAS G12D)
IVGVDKVGH

SEQ ID NO: 10752 - protein, 9 aa, synthetic construct
  source 1..9: note = Seed: VVGADGVGK (KRAS G12D)
IVGVDKVGI

SEQ ID NO: 10753 - protein, 9 aa, synthetic construct
  source 1..9: note = Seed: VVGADGVGK (KRAS G12D)
IVGVDKVGK

SEQ ID NO: 10754 - protein, 9 aa, synthetic construct
  source 1..9: note = Seed: VVGADGVGK (KRAS G12D)
IVGVDKVGL

SEQ ID NO: 10755 - protein, 9 aa, synthetic construct
  source 1..9: note = Seed: VVGADGVGK (KRAS G12D)
IVGVDKVGM

SEQ ID NO: 10756 - protein, 9 aa, synthetic construct
  source 1..9: note = Seed: VVGADGVGK (KRAS G12D)
IVGVDKVGR

SEQ ID NO: 10757 - protein, 9 aa, synthetic construct
  source 1..9: note = Seed: VVGADGVGK (KRAS G12D)
IVGVDKVGS

SEQ ID NO: 10758 - protein, 9 aa, synthetic construct
  source 1..9: note = Seed: VVGADGVGK (KRAS G12D)
IVGVDKVGV

SEQ ID NO: 10759 - protein, 9 aa, synthetic construct
  source 1..9: note = Seed: VVGADGVGK (KRAS G12D)
IVGVDKVGY

SEQ ID NO: 10760 - protein, 9 aa, synthetic construct
  source 1..9: note = Seed: VVGADGVGK (KRAS G12D)
IVGVDPVGR

SEQ ID NO: 10761 - protein, 9 aa, synthetic construct
  source 1..9: note = Seed: VVGADGVGK (KRAS G12D)
IVGVDPVGV

SEQ ID NO: 10762 - protein, 9 aa, synthetic construct
  source 1..9: note = Seed: VVGADGVGK (KRAS G12D)
IVGVDRVGA

SEQ ID NO: 10763 - protein, 9 aa, synthetic construct
  source 1..9: note = Seed: VVGADGVGK (KRAS G12D)
IVGVDRVGF

SEQ ID NO: 10764 - protein, 9 aa, synthetic construct
  source 1..9: note = Seed: VVGADGVGK (KRAS G12D)
IVGVDRVGH

SEQ ID NO: 10765 - protein, 9 aa, synthetic construct
  source 1..9: note = Seed: VVGADGVGK (KRAS G12D)
IVGVDRVGI

SEQ ID NO: 10766 - protein, 9 aa, synthetic construct
  source 1..9: note = Seed: VVGADGVGK (KRAS G12D)
IVGVDRVGK

SEQ ID NO: 10767 - protein, 9 aa, synthetic construct
  source 1..9: note = Seed: VVGADGVGK (KRAS G12D)
IVGVDRVGL

SEQ ID NO: 10768 - protein, 9 aa, synthetic construct
  source 1..9: note = Seed: VVGADGVGK (KRAS G12D)
IVGVDRVGM

SEQ ID NO: 10769 - protein, 9 aa, synthetic construct
  source 1..9: note = Seed: VVGADGVGK (KRAS G12D)
IVGVDRVGR

SEQ ID NO: 10770 - protein, 9 aa, synthetic construct
  source 1..9: note = Seed: VVGADGVGK (KRAS G12D)
IVGVDRVGS

SEQ ID NO: 10771 - protein, 9 aa, synthetic construct
  source 1..9: note = Seed: VVGADGVGK (KRAS G12D)
IVGVDRVGT

SEQ ID NO: 10772 - protein, 9 aa, synthetic construct
  source 1..9: note = Seed: VVGADGVGK (KRAS G12D)
IVGVDRVGV

SEQ ID NO: 10773 - protein, 9 aa, synthetic construct
  source 1..9: note = Seed: VVGADGVGK (KRAS G12D)
IVGVDRVGY

SEQ ID NO: 10774 - protein, 9 aa, synthetic construct
  source 1..9: note = Seed: VVGADGVGK (KRAS G12D)
IVGVDTVGR

SEQ ID NO: 10775 - protein, 9 aa, synthetic construct
  source 1..9: note = Seed: VVGADGVGK (KRAS G12D)
IVGWDAVGR

SEQ ID NO: 10776 - protein, 9 aa, synthetic construct
  source 1..9: note = Seed: VVGADGVGK (KRAS G12D)
IVGWDKVGA

SEQ ID NO: 10777 - protein, 9 aa, synthetic construct
  source 1..9: note = Seed: VVGADGVGK (KRAS G12D)
IVGWDKVGF

SEQ ID NO: 10778 - protein, 9 aa, synthetic construct
  source 1..9: note = Seed: VVGADGVGK (KRAS G12D)
IVGWDKVGI

SEQ ID NO: 10779 - protein, 9 aa, synthetic construct
  source 1..9: note = Seed: VVGADGVGK (KRAS G12D)
IVGWDKVGK

SEQ ID NO: 10780 - protein, 9 aa, synthetic construct
  source 1..9: note = Seed: VVGADGVGK (KRAS G12D)
IVGWDKVGL

SEQ ID NO: 10781 - protein, 9 aa, synthetic construct
  source 1..9: note = Seed: VVGADGVGK (KRAS G12D)
IVGWDKVGM

SEQ ID NO: 10782 - protein, 9 aa, synthetic construct
  source 1..9: note = Seed: VVGADGVGK (KRAS G12D)
IVGWDKVGR

SEQ ID NO: 10783 - protein, 9 aa, synthetic construct
  source 1..9: note = Seed: VVGADGVGK (KRAS G12D)
IVGWDKVGV

SEQ ID NO: 10784 - protein, 9 aa, synthetic construct
  source 1..9: note = Seed: VVGADGVGK (KRAS G12D)
IVGWDKVGY

SEQ ID NO: 10785 - protein, 9 aa, synthetic construct
  source 1..9: note = Seed: VVGADGVGK (KRAS G12D)
IVGWDPVGR

SEQ ID NO: 10786 - protein, 9 aa, synthetic construct
  source 1..9: note = Seed: VVGADGVGK (KRAS G12D)
IVGWDRVGA

SEQ ID NO: 10787 - protein, 9 aa, synthetic construct
  source 1..9: note = Seed: VVGADGVGK (KRAS G12D)
IVGWDRVGF

SEQ ID NO: 10788 - protein, 9 aa, synthetic construct
  source 1..9: note = Seed: VVGADGVGK (KRAS G12D)
IVGWDRVGH

SEQ ID NO: 10789 - protein, 9 aa, synthetic construct
  source 1..9: note = Seed: VVGADGVGK (KRAS G12D)
IVGWDRVGI

SEQ ID NO: 10790 - protein, 9 aa, synthetic construct
  source 1..9: note = Seed: VVGADGVGK (KRAS G12D)
IVGWDRVGK

SEQ ID NO: 10791 - protein, 9 aa, synthetic construct
  source 1..9: note = Seed: VVGADGVGK (KRAS G12D)
IVGWDRVGL

SEQ ID NO: 10792 - protein, 9 aa, synthetic construct
  source 1..9: note = Seed: VVGADGVGK (KRAS G12D)
IVGWDRVGM

SEQ ID NO: 10793 - protein, 9 aa, synthetic construct
  source 1..9: note = Seed: VVGADGVGK (KRAS G12D)
IVGWDRVGR

SEQ ID NO: 10794 - protein, 9 aa, synthetic construct
  source 1..9: note = Seed: VVGADGVGK (KRAS G12D)
IVGWDRVGV

SEQ ID NO: 10795 - protein, 9 aa, synthetic construct
  source 1..9: note = Seed: VVGADGVGK (KRAS G12D)
IVGWDRVGY

SEQ ID NO: 10796 - protein, 9 aa, synthetic construct
  source 1..9: note = Seed: VVGADGVGK (KRAS G12D)
IVGYDAVGR

SEQ ID NO: 10797 - protein, 9 aa, synthetic construct
  source 1..9: note = Seed: VVGADGVGK (KRAS G12D)
IVGYDKVGR

SEQ ID NO: 10798 - protein, 9 aa, synthetic construct
  source 1..9: note = Seed: VVGADGVGK (KRAS G12D)
IVGYDKVGY

SEQ ID NO: 10799 - protein, 9 aa, synthetic construct
  source 1..9: note = Seed: VVGADGVGK (KRAS G12D)
IVGYDRVGH

SEQ ID NO: 10800 - protein, 9 aa, synthetic construct
  source 1..9: note = Seed: VVGADGVGK (KRAS G12D)
IVGYDRVGK

SEQ ID NO: 10801 - protein, 9 aa, synthetic construct
  source 1..9: note = Seed: VVGADGVGK (KRAS G12D)
IVGYDRVGM

SEQ ID NO: 10802 - protein, 9 aa, synthetic construct
  source 1..9: note = Seed: VVGADGVGK (KRAS G12D)
IVGYDRVGR

SEQ ID NO: 10803 - protein, 9 aa, synthetic construct
  source 1..9: note = Seed: VVGADGVGK (KRAS G12D)
IVGYDRVGY

SEQ ID NO: 10804 - protein, 9 aa, synthetic construct
  source 1..9: note = Seed: VVGADGVGK (KRAS G12D)
LVGADAVGA

SEQ ID NO: 10805 - protein, 9 aa, synthetic construct
  source 1..9: note = Seed: VVGADGVGK (KRAS G12D)
LVGADAVGI

SEQ ID NO: 10806 - protein, 9 aa, synthetic construct
  source 1..9: note = Seed: VVGADGVGK (KRAS G12D)
LVGADAVGL

SEQ ID NO: 10807 - protein, 9 aa, synthetic construct
  source 1..9: note = Seed: VVGADGVGK (KRAS G12D)
LVGADAVGM

SEQ ID NO: 10808 - protein, 9 aa, synthetic construct
  source 1..9: note = Seed: VVGADGVGK (KRAS G12D)
LVGADAVGS

SEQ ID NO: 10809 - protein, 9 aa, synthetic construct
  source 1..9: note = Seed: VVGADGVGK (KRAS G12D)
LVGADAVGT

SEQ ID NO: 10810 - protein, 9 aa, synthetic construct
  source 1..9: note = Seed: VVGADGVGK (KRAS G12D)
LVGADAVGV

SEQ ID NO: 10811 - protein, 9 aa, synthetic construct
  source 1..9: note = Seed: VVGADGVGK (KRAS G12D)
LVGADGVGA

SEQ ID NO: 10812 - protein, 9 aa, synthetic construct
  source 1..9: note = Seed: VVGADGVGK (KRAS G12D)
LVGADGVGI

SEQ ID NO: 10813 - protein, 9 aa, synthetic construct
  source 1..9: note = Seed: VVGADGVGK (KRAS G12D)
LVGADGVGL

SEQ ID NO: 10814 - protein, 9 aa, synthetic construct
  source 1..9: note = Seed: VVGADGVGK (KRAS G12D)
LVGADGVGV

SEQ ID NO: 10815 - protein, 9 aa, synthetic construct
  source 1..9: note = Seed: VVGADGVGK (KRAS G12D)
LVGADKVGR

SEQ ID NO: 10816 - protein, 9 aa, synthetic construct
  source 1..9: note = Seed: VVGADGVGK (KRAS G12D)
LVGADKVGY

SEQ ID NO: 10817 - protein, 9 aa, synthetic construct
  source 1..9: note = Seed: VVGADGVGK (KRAS G12D)
LVGADPVGA

SEQ ID NO: 10818 - protein, 9 aa, synthetic construct
  source 1..9: note = Seed: VVGADGVGK (KRAS G12D)
LVGADPVGI

SEQ ID NO: 10819 - protein, 9 aa, synthetic construct
  source 1..9: note = Seed: VVGADGVGK (KRAS G12D)
LVGADPVGL

SEQ ID NO: 10820 - protein, 9 aa, synthetic construct
  source 1..9: note = Seed: VVGADGVGK (KRAS G12D)
LVGADPVGM

SEQ ID NO: 10821 - protein, 9 aa, synthetic construct
  source 1..9: note = Seed: VVGADGVGK (KRAS G12D)
LVGADPVGV

SEQ ID NO: 10822 - protein, 9 aa, synthetic construct
  source 1..9: note = Seed: VVGADGVGK (KRAS G12D)
LVGADRVGF

SEQ ID NO: 10823 - protein, 9 aa, synthetic construct
  source 1..9: note = Seed: VVGADGVGK (KRAS G12D)
LVGADRVGI

SEQ ID NO: 10824 - protein, 9 aa, synthetic construct
  source 1..9: note = Seed: VVGADGVGK (KRAS G12D)
LVGADRVGK

SEQ ID NO: 10825 - protein, 9 aa, synthetic construct
  source 1..9: note = Seed: VVGADGVGK (KRAS G12D)
LVGADRVGL

SEQ ID NO: 10826 - protein, 9 aa, synthetic construct
  source 1..9: note = Seed: VVGADGVGK (KRAS G12D)
LVGADRVGM

SEQ ID NO: 10827 - protein, 9 aa, synthetic construct
  source 1..9: note = Seed: VVGADGVGK (KRAS G12D)
LVGADRVGR

SEQ ID NO: 10828 - protein, 9 aa, synthetic construct
  source 1..9: note = Seed: VVGADGVGK (KRAS G12D)
LVGADRVGV

SEQ ID NO: 10829 - protein, 9 aa, synthetic construct
  source 1..9: note = Seed: VVGADGVGK (KRAS G12D)
LVGADRVGY

SEQ ID NO: 10830 - protein, 9 aa, synthetic construct
  source 1..9: note = Seed: VVGADGVGK (KRAS G12D)
LVGADSVGA

SEQ ID NO: 10831 - protein, 9 aa, synthetic construct
  source 1..9: note = Seed: VVGADGVGK (KRAS G12D)
LVGADSVGI

SEQ ID NO: 10832 - protein, 9 aa, synthetic construct
  source 1..9: note = Seed: VVGADGVGK (KRAS G12D)
LVGADSVGL

SEQ ID NO: 10833 - protein, 9 aa, synthetic construct
  source 1..9: note = Seed: VVGADGVGK (KRAS G12D)
LVGADSVGV

SEQ ID NO: 10834 - protein, 9 aa, synthetic construct
  source 1..9: note = Seed: VVGADGVGK (KRAS G12D)
LVGEDAVGA

SEQ ID NO: 10835 - protein, 9 aa, synthetic construct
  source 1..9: note = Seed: VVGADGVGK (KRAS G12D)
LVGFDAVGR

SEQ ID NO: 10836 - protein, 9 aa, synthetic construct
  source 1..9: note = Seed: VVGADGVGK (KRAS G12D)
LVGFDAVGV

SEQ ID NO: 10837 - protein, 9 aa, synthetic construct
  source 1..9: note = Seed: VVGADGVGK (KRAS G12D)
LVGFDKVGK

SEQ ID NO: 10838 - protein, 9 aa, synthetic construct
  source 1..9: note = Seed: VVGADGVGK (KRAS G12D)
LVGFDKVGR

SEQ ID NO: 10839 - protein, 9 aa, synthetic construct
  source 1..9: note = Seed: VVGADGVGK (KRAS G12D)
LVGFDKVGY

SEQ ID NO: 10840 - protein, 9 aa, synthetic construct
  source 1..9: note = Seed: VVGADGVGK (KRAS G12D)
LVGFDPVGR

SEQ ID NO: 10841 - protein, 9 aa, synthetic construct
  source 1..9: note = Seed: VVGADGVGK (KRAS G12D)
LVGFDRVGH

SEQ ID NO: 10842 - protein, 9 aa, synthetic construct
  source 1..9: note = Seed: VVGADGVGK (KRAS G12D)
LVGFDRVGK

SEQ ID NO: 10843 - protein, 9 aa, synthetic construct
  source 1..9: note = Seed: VVGADGVGK (KRAS G12D)
LVGFDRVGM

SEQ ID NO: 10844 - protein, 9 aa, synthetic construct
  source 1..9: note = Seed: VVGADGVGK (KRAS G12D)
LVGFDRVGR

SEQ ID NO: 10845 - protein, 9 aa, synthetic construct
  source 1..9: note = Seed: VVGADGVGK (KRAS G12D)
LVGFDRVGY

SEQ ID NO: 10846 - protein, 9 aa, synthetic construct
  source 1..9: note = Seed: VVGADGVGK (KRAS G12D)
LVGHDAVGK

SEQ ID NO: 10847 - protein, 9 aa, synthetic construct
  source 1..9: note = Seed: VVGADGVGK (KRAS G12D)
LVGHDAVGR

SEQ ID NO: 10848 - protein, 9 aa, synthetic construct
  source 1..9: note = Seed: VVGADGVGK (KRAS G12D)
LVGHDAVGY

SEQ ID NO: 10849 - protein, 9 aa, synthetic construct
  source 1..9: note = Seed: VVGADGVGK (KRAS G12D)
LVGHDIVGR

SEQ ID NO: 10850 - protein, 9 aa, synthetic construct
  source 1..9: note = Seed: VVGADGVGK (KRAS G12D)
LVGHDKVGF

SEQ ID NO: 10851 - protein, 9 aa, synthetic construct
  source 1..9: note = Seed: VVGADGVGK (KRAS G12D)
LVGHDKVGI

SEQ ID NO: 10852 - protein, 9 aa, synthetic construct
  source 1..9: note = Seed: VVGADGVGK (KRAS G12D)
LVGHDKVGK

SEQ ID NO: 10853 - protein, 9 aa, synthetic construct
  source 1..9: note = Seed: VVGADGVGK (KRAS G12D)
LVGHDKVGL

SEQ ID NO: 10854 - protein, 9 aa, synthetic construct
  source 1..9: note = Seed: VVGADGVGK (KRAS G12D)
LVGHDKVGM

SEQ ID NO: 10855 - protein, 9 aa, synthetic construct
  source 1..9: note = Seed: VVGADGVGK (KRAS G12D)
LVGHDKVGR

SEQ ID NO: 10856 - protein, 9 aa, synthetic construct
  source 1..9: note = Seed: VVGADGVGK (KRAS G12D)
LVGHDKVGY

SEQ ID NO: 10857 - protein, 9 aa, synthetic construct
  source 1..9: note = Seed: VVGADGVGK (KRAS G12D)
LVGHDNVGR

SEQ ID NO: 10858 - protein, 9 aa, synthetic construct
  source 1..9: note = Seed: VVGADGVGK (KRAS G12D)
LVGHDPVGR

SEQ ID NO: 10859 - protein, 9 aa, synthetic construct
  source 1..9: note = Seed: VVGADGVGK (KRAS G12D)
LVGHDRVGA

SEQ ID NO: 10860 - protein, 9 aa, synthetic construct
  source 1..9: note = Seed: VVGADGVGK (KRAS G12D)
LVGHDRVGF

SEQ ID NO: 10861 - protein, 9 aa, synthetic construct
  source 1..9: note = Seed: VVGADGVGK (KRAS G12D)
LVGHDRVGH

SEQ ID NO: 10862 - protein, 9 aa, synthetic construct
  source 1..9: note = Seed: VVGADGVGK (KRAS G12D)
LVGHDRVGI

SEQ ID NO: 10863 - protein, 9 aa, synthetic construct
  source 1..9: note = Seed: VVGADGVGK (KRAS G12D)
LVGHDRVGK

SEQ ID NO: 10864 - protein, 9 aa, synthetic construct
  source 1..9: note = Seed: VVGADGVGK (KRAS G12D)
LVGHDRVGL

SEQ ID NO: 10865 - protein, 9 aa, synthetic construct
  source 1..9: note = Seed: VVGADGVGK (KRAS G12D)
LVGHDRVGM

SEQ ID NO: 10866 - protein, 9 aa, synthetic construct
  source 1..9: note = Seed: VVGADGVGK (KRAS G12D)
LVGHDRVGR

SEQ ID NO: 10867 - protein, 9 aa, synthetic construct
  source 1..9: note = Seed: VVGADGVGK (KRAS G12D)
LVGHDRVGS

SEQ ID NO: 10868 - protein, 9 aa, synthetic construct
  source 1..9: note = Seed: VVGADGVGK (KRAS G12D)
LVGHDRVGV

SEQ ID NO: 10869 - protein, 9 aa, synthetic construct
  source 1..9: note = Seed: VVGADGVGK (KRAS G12D)
LVGHDRVGW

SEQ ID NO: 10870 - protein, 9 aa, synthetic construct
  source 1..9: note = Seed: VVGADGVGK (KRAS G12D)
LVGHDRVGY

SEQ ID NO: 10871 - protein, 9 aa, synthetic construct
  source 1..9: note = Seed: VVGADGVGK (KRAS G12D)
LVGHDSVGR

SEQ ID NO: 10872 - protein, 9 aa, synthetic construct
  source 1..9: note = Seed: VVGADGVGK (KRAS G12D)
LVGHDTVGR

SEQ ID NO: 10873 - protein, 9 aa, synthetic construct
  source 1..9: note = Seed: VVGADGVGK (KRAS G12D)
LVGHDVVGR

SEQ ID NO: 10874 - protein, 9 aa, synthetic construct
  source 1..9: note = Seed: VVGADGVGK (KRAS G12D)
LVGIDAVGA

SEQ ID NO: 10875 - protein, 9 aa, synthetic construct
  source 1..9: note = Seed: VVGADGVGK (KRAS G12D)
LVGIDAVGG

SEQ ID NO: 10876 - protein, 9 aa, synthetic construct
  source 1..9: note = Seed: VVGADGVGK (KRAS G12D)
LVGIDAVGI

SEQ ID NO: 10877 - protein, 9 aa, synthetic construct
  source 1..9: note = Seed: VVGADGVGK (KRAS G12D)
LVGIDAVGL

SEQ ID NO: 10878 - protein, 9 aa, synthetic construct
  source 1..9: note = Seed: VVGADGVGK (KRAS G12D)
LVGIDAVGM

SEQ ID NO: 10879 - protein, 9 aa, synthetic construct
  source 1..9: note = Seed: VVGADGVGK (KRAS G12D)
LVGIDAVGR

SEQ ID NO: 10880 - protein, 9 aa, synthetic construct
  source 1..9: note = Seed: VVGADGVGK (KRAS G12D)
LVGIDAVGS

SEQ ID NO: 10881 - protein, 9 aa, synthetic construct
  source 1..9: note = Seed: VVGADGVGK (KRAS G12D)
LVGIDAVGT

SEQ ID NO: 10882 - protein, 9 aa, synthetic construct
  source 1..9: note = Seed: VVGADGVGK (KRAS G12D)
LVGIDAVGV

SEQ ID NO: 10883 - protein, 9 aa, synthetic construct
  source 1..9: note = Seed: VVGADGVGK (KRAS G12D)
LVGIDGVGA

SEQ ID NO: 10884 - protein, 9 aa, synthetic construct
  source 1..9: note = Seed: VVGADGVGK (KRAS G12D)
LVGIDGVGI

SEQ ID NO: 10885 - protein, 9 aa, synthetic construct
  source 1..9: note = Seed: VVGADGVGK (KRAS G12D)
LVGIDGVGL

SEQ ID NO: 10886 - protein, 9 aa, synthetic construct
  source 1..9: note = Seed: VVGADGVGK (KRAS G12D)
LVGIDGVGS

SEQ ID NO: 10887 - protein, 9 aa, synthetic construct
  source 1..9: note = Seed: VVGADGVGK (KRAS G12D)
LVGIDGVGT

SEQ ID NO: 10888 - protein, 9 aa, synthetic construct
  source 1..9: note = Seed: VVGADGVGK (KRAS G12D)
LVGIDGVGV

SEQ ID NO: 10889 - protein, 9 aa, synthetic construct
  source 1..9: note = Seed: VVGADGVGK (KRAS G12D)
LVGIDKVGA

SEQ ID NO: 10890 - protein, 9 aa, synthetic construct
  source 1..9: note = Seed: VVGADGVGK (KRAS G12D)
LVGIDKVGF

SEQ ID NO: 10891 - protein, 9 aa, synthetic construct
  source 1..9: note = Seed: VVGADGVGK (KRAS G12D)
LVGIDKVGK

SEQ ID NO: 10892 - protein, 9 aa, synthetic construct
  source 1..9: note = Seed: VVGADGVGK (KRAS G12D)
LVGIDKVGM

SEQ ID NO: 10893 - protein, 9 aa, synthetic construct
  source 1..9: note = Seed: VVGADGVGK (KRAS G12D)
LVGIDKVGR

SEQ ID NO: 10894 - protein, 9 aa, synthetic construct
  source 1..9: note = Seed: VVGADGVGK (KRAS G12D)
LVGIDKVGV

SEQ ID NO: 10895 - protein, 9 aa, synthetic construct
  source 1..9: note = Seed: VVGADGVGK (KRAS G12D)
LVGIDKVGY

SEQ ID NO: 10896 - protein, 9 aa, synthetic construct
  source 1..9: note = Seed: VVGADGVGK (KRAS G12D)
LVGIDPVGA

SEQ ID NO: 10897 - protein, 9 aa, synthetic construct
  source 1..9: note = Seed: VVGADGVGK (KRAS G12D)
LVGIDPVGI

SEQ ID NO: 10898 - protein, 9 aa, synthetic construct
  source 1..9: note = Seed: VVGADGVGK (KRAS G12D)
LVGIDPVGL

SEQ ID NO: 10899 - protein, 9 aa, synthetic construct
  source 1..9: note = Seed: VVGADGVGK (KRAS G12D)
LVGIDPVGR

SEQ ID NO: 10900 - protein, 9 aa, synthetic construct
  source 1..9: note = Seed: VVGADGVGK (KRAS G12D)
LVGIDPVGV

SEQ ID NO: 10901 - protein, 9 aa, synthetic construct
  source 1..9: note = Seed: VVGADGVGK (KRAS G12D)
LVGIDRVGA

SEQ ID NO: 10902 - protein, 9 aa, synthetic construct
  source 1..9: note = Seed: VVGADGVGK (KRAS G12D)
LVGIDRVGF

SEQ ID NO: 10903 - protein, 9 aa, synthetic construct
  source 1..9: note = Seed: VVGADGVGK (KRAS G12D)
LVGIDRVGH

SEQ ID NO: 10904 - protein, 9 aa, synthetic construct
  source 1..9: note = Seed: VVGADGVGK (KRAS G12D)
LVGIDRVGI

SEQ ID NO: 10905 - protein, 9 aa, synthetic construct
  source 1..9: note = Seed: VVGADGVGK (KRAS G12D)
LVGIDRVGK

SEQ ID NO: 10906 - protein, 9 aa, synthetic construct
  source 1..9: note = Seed: VVGADGVGK (KRAS G12D)
LVGIDRVGL

SEQ ID NO: 10907 - protein, 9 aa, synthetic construct
  source 1..9: note = Seed: VVGADGVGK (KRAS G12D)
LVGIDRVGM

SEQ ID NO: 10908 - protein, 9 aa, synthetic construct
  source 1..9: note = Seed: VVGADGVGK (KRAS G12D)
LVGIDRVGR

SEQ ID NO: 10909 - protein, 9 aa, synthetic construct
  source 1..9: note = Seed: VVGADGVGK (KRAS G12D)
LVGIDRVGS

SEQ ID NO: 10910 - protein, 9 aa, synthetic construct
  source 1..9: note = Seed: VVGADGVGK (KRAS G12D)
LVGIDRVGV

SEQ ID NO: 10911 - protein, 9 aa, synthetic construct
  source 1..9: note = Seed: VVGADGVGK (KRAS G12D)
LVGIDRVGY

SEQ ID NO: 10912 - protein, 9 aa, synthetic construct
  source 1..9: note = Seed: VVGADGVGK (KRAS G12D)
LVGIDSVGA

SEQ ID NO: 10913 - protein, 9 aa, synthetic construct
  source 1..9: note = Seed: VVGADGVGK (KRAS G12D)
LVGIDSVGV

SEQ ID NO: 10914 - protein, 9 aa, synthetic construct
  source 1..9: note = Seed: VVGADGVGK (KRAS G12D)
LVGIDTVGR

SEQ ID NO: 10915 - protein, 9 aa, synthetic construct
  source 1..9: note = Seed: VVGADGVGK (KRAS G12D)
LVGKDAVGR

SEQ ID NO: 10916 - protein, 9 aa, synthetic construct
  source 1..9: note = Seed: VVGADGVGK (KRAS G12D)
LVGKDIVGR

SEQ ID NO: 10917 - protein, 9 aa, synthetic construct
  source 1..9: note = Seed: VVGADGVGK (KRAS G12D)
LVGKDKVGF

SEQ ID NO: 10918 - protein, 9 aa, synthetic construct
  source 1..9: note = Seed: VVGADGVGK (KRAS G12D)
LVGKDKVGI

SEQ ID NO: 10919 - protein, 9 aa, synthetic construct
  source 1..9: note = Seed: VVGADGVGK (KRAS G12D)
LVGKDKVGL

SEQ ID NO: 10920 - protein, 9 aa, synthetic construct
  source 1..9: note = Seed: VVGADGVGK (KRAS G12D)
LVGKDKVGM

SEQ ID NO: 10921 - protein, 9 aa, synthetic construct
  source 1..9: note = Seed: VVGADGVGK (KRAS G12D)
LVGKDKVGR

SEQ ID NO: 10922 - protein, 9 aa, synthetic construct
  source 1..9: note = Seed: VVGADGVGK (KRAS G12D)
LVGKDKVGV

SEQ ID NO: 10923 - protein, 9 aa, synthetic construct
  source 1..9: note = Seed: VVGADGVGK (KRAS G12D)
LVGKDKVGY

SEQ ID NO: 10924 - protein, 9 aa, synthetic construct
  source 1..9: note = Seed: VVGADGVGK (KRAS G12D)
LVGKDPVGR

SEQ ID NO: 10925 - protein, 9 aa, synthetic construct
  source 1..9: note = Seed: VVGADGVGK (KRAS G12D)
LVGKDRVGA

SEQ ID NO: 10926 - protein, 9 aa, synthetic construct
  source 1..9: note = Seed: VVGADGVGK (KRAS G12D)
LVGKDRVGF

SEQ ID NO: 10927 - protein, 9 aa, synthetic construct
  source 1..9: note = Seed: VVGADGVGK (KRAS G12D)
LVGKDRVGH

SEQ ID NO: 10928 - protein, 9 aa, synthetic construct
  source 1..9: note = Seed: VVGADGVGK (KRAS G12D)
LVGKDRVGI

SEQ ID NO: 10929 - protein, 9 aa, synthetic construct
  source 1..9: note = Seed: VVGADGVGK (KRAS G12D)
LVGKDRVGK

SEQ ID NO: 10930 - protein, 9 aa, synthetic construct
  source 1..9: note = Seed: VVGADGVGK (KRAS G12D)
LVGKDRVGL

SEQ ID NO: 10931 - protein, 9 aa, synthetic construct
  source 1..9: note = Seed: VVGADGVGK (KRAS G12D)
LVGKDRVGM

SEQ ID NO: 10932 - protein, 9 aa, synthetic construct
  source 1..9: note = Seed: VVGADGVGK (KRAS G12D)
LVGKDRVGQ

SEQ ID NO: 10933 - protein, 9 aa, synthetic construct
  source 1..9: note = Seed: VVGADGVGK (KRAS G12D)
LVGKDRVGR

SEQ ID NO: 10934 - protein, 9 aa, synthetic construct
  source 1..9: note = Seed: VVGADGVGK (KRAS G12D)
LVGKDRVGS

SEQ ID NO: 10935 - protein, 9 aa, synthetic construct
  source 1..9: note = Seed: VVGADGVGK (KRAS G12D)
LVGKDRVGT

SEQ ID NO: 10936 - protein, 9 aa, synthetic construct
  source 1..9: note = Seed: VVGADGVGK (KRAS G12D)
LVGKDRVGV

SEQ ID NO: 10937 - protein, 9 aa, synthetic construct
  source 1..9: note = Seed: VVGADGVGK (KRAS G12D)
LVGKDRVGW

SEQ ID NO: 10938 - protein, 9 aa, synthetic construct
  source 1..9: note = Seed: VVGADGVGK (KRAS G12D)
LVGKDRVGY

SEQ ID NO: 10939 - protein, 9 aa, synthetic construct
  source 1..9: note = Seed: VVGADGVGK (KRAS G12D)
LVGKDSVGR

SEQ ID NO: 10940 - protein, 9 aa, synthetic construct
  source 1..9: note = Seed: VVGADGVGK (KRAS G12D)
LVGKDTVGR

SEQ ID NO: 10941 - protein, 9 aa, synthetic construct
  source 1..9: note = Seed: VVGADGVGK (KRAS G12D)
LVGKDVVGR

SEQ ID NO: 10942 - protein, 9 aa, synthetic construct
  source 1..9: note = Seed: VVGADGVGK (KRAS G12D)
LVGLDAVGA

SEQ ID NO: 10943 - protein, 9 aa, synthetic construct
  source 1..9: note = Seed: VVGADGVGK (KRAS G12D)
LVGLDAVGG

SEQ ID NO: 10944 - protein, 9 aa, synthetic construct
  source 1..9: note = Seed: VVGADGVGK (KRAS G12D)
LVGLDAVGH

SEQ ID NO: 10945 - protein, 9 aa, synthetic construct
  source 1..9: note = Seed: VVGADGVGK (KRAS G12D)
LVGLDAVGI

SEQ ID NO: 10946 - protein, 9 aa, synthetic construct
  source 1..9: note = Seed: VVGADGVGK (KRAS G12D)
LVGLDAVGL

SEQ ID NO: 10947 - protein, 9 aa, synthetic construct
  source 1..9: note = Seed: VVGADGVGK (KRAS G12D)
LVGLDAVGM

SEQ ID NO: 10948 - protein, 9 aa, synthetic construct
  source 1..9: note = Seed: VVGADGVGK (KRAS G12D)
LVGLDAVGN

SEQ ID NO: 10949 - protein, 9 aa, synthetic construct
  source 1..9: note = Seed: VVGADGVGK (KRAS G12D)
LVGLDAVGS

SEQ ID NO: 10950 - protein, 9 aa, synthetic construct
  source 1..9: note = Seed: VVGADGVGK (KRAS G12D)
LVGLDAVGT

SEQ ID NO: 10951 - protein, 9 aa, synthetic construct
  source 1..9: note = Seed: VVGADGVGK (KRAS G12D)
LVGLDAVGV

SEQ ID NO: 10952 - protein, 9 aa, synthetic construct
  source 1..9: note = Seed: VVGADGVGK (KRAS G12D)
LVGLDGVGA

SEQ ID NO: 10953 - protein, 9 aa, synthetic construct
  source 1..9: note = Seed: VVGADGVGK (KRAS G12D)
LVGLDGVGG

SEQ ID NO: 10954 - protein, 9 aa, synthetic construct
  source 1..9: note = Seed: VVGADGVGK (KRAS G12D)
LVGLDGVGI

SEQ ID NO: 10955 - protein, 9 aa, synthetic construct
  source 1..9: note = Seed: VVGADGVGK (KRAS G12D)
LVGLDGVGL

SEQ ID NO: 10956 - protein, 9 aa, synthetic construct
  source 1..9: note = Seed: VVGADGVGK (KRAS G12D)
LVGLDGVGM

SEQ ID NO: 10957 - protein, 9 aa, synthetic construct
  source 1..9: note = Seed: VVGADGVGK (KRAS G12D)
LVGLDGVGN

SEQ ID NO: 10958 - protein, 9 aa, synthetic construct
  source 1..9: note = Seed: VVGADGVGK (KRAS G12D)
LVGLDGVGS

SEQ ID NO: 10959 - protein, 9 aa, synthetic construct
  source 1..9: note = Seed: VVGADGVGK (KRAS G12D)
LVGLDGVGT

SEQ ID NO: 10960 - protein, 9 aa, synthetic construct
  source 1..9: note = Seed: VVGADGVGK (KRAS G12D)
LVGLDGVGV

SEQ ID NO: 10961 - protein, 9 aa, synthetic construct
  source 1..9: note = Seed: VVGADGVGK (KRAS G12D)
LVGLDKVGR

SEQ ID NO: 10962 - protein, 9 aa, synthetic construct
  source 1..9: note = Seed: VVGADGVGK (KRAS G12D)
LVGLDKVGY

SEQ ID NO: 10963 - protein, 9 aa, synthetic construct
  source 1..9: note = Seed: VVGADGVGK (KRAS G12D)
LVGLDNVGA

SEQ ID NO: 10964 - protein, 9 aa, synthetic construct
  source 1..9: note = Seed: VVGADGVGK (KRAS G12D)
LVGLDNVGI

SEQ ID NO: 10965 - protein, 9 aa, synthetic construct
  source 1..9: note = Seed: VVGADGVGK (KRAS G12D)
LVGLDNVGL

SEQ ID NO: 10966 - protein, 9 aa, synthetic construct
  source 1..9: note = Seed: VVGADGVGK (KRAS G12D)
LVGLDNVGS

SEQ ID NO: 10967 - protein, 9 aa, synthetic construct
  source 1..9: note = Seed: VVGADGVGK (KRAS G12D)
LVGLDNVGT

SEQ ID NO: 10968 - protein, 9 aa, synthetic construct
  source 1..9: note = Seed: VVGADGVGK (KRAS G12D)
LVGLDNVGV

SEQ ID NO: 10969 - protein, 9 aa, synthetic construct
  source 1..9: note = Seed: VVGADGVGK (KRAS G12D)
LVGLDPVGA

SEQ ID NO: 10970 - protein, 9 aa, synthetic construct
  source 1..9: note = Seed: VVGADGVGK (KRAS G12D)
LVGLDPVGG

SEQ ID NO: 10971 - protein, 9 aa, synthetic construct
  source 1..9: note = Seed: VVGADGVGK (KRAS G12D)
LVGLDPVGI

SEQ ID NO: 10972 - protein, 9 aa, synthetic construct
  source 1..9: note = Seed: VVGADGVGK (KRAS G12D)
LVGLDPVGL

SEQ ID NO: 10973 - protein, 9 aa, synthetic construct
  source 1..9: note = Seed: VVGADGVGK (KRAS G12D)
LVGLDPVGM

SEQ ID NO: 10974 - protein, 9 aa, synthetic construct
  source 1..9: note = Seed: VVGADGVGK (KRAS G12D)
LVGLDPVGN

SEQ ID NO: 10975 - protein, 9 aa, synthetic construct
  source 1..9: note = Seed: VVGADGVGK (KRAS G12D)
LVGLDPVGS

SEQ ID NO: 10976 - protein, 9 aa, synthetic construct
  source 1..9: note = Seed: VVGADGVGK (KRAS G12D)
LVGLDPVGT

SEQ ID NO: 10977 - protein, 9 aa, synthetic construct
  source 1..9: note = Seed: VVGADGVGK (KRAS G12D)
LVGLDPVGV

SEQ ID NO: 10978 - protein, 9 aa, synthetic construct
  source 1..9: note = Seed: VVGADGVGK (KRAS G12D)
LVGLDRVGA

SEQ ID NO: 10979 - protein, 9 aa, synthetic construct
  source 1..9: note = Seed: VVGADGVGK (KRAS G12D)
LVGLDRVGH

SEQ ID NO: 10980 - protein, 9 aa, synthetic construct
  source 1..9: note = Seed: VVGADGVGK (KRAS G12D)
LVGLDRVGK

SEQ ID NO: 10981 - protein, 9 aa, synthetic construct
  source 1..9: note = Seed: VVGADGVGK (KRAS G12D)
LVGLDRVGL

SEQ ID NO: 10982 - protein, 9 aa, synthetic construct
  source 1..9: note = Seed: VVGADGVGK (KRAS G12D)
LVGLDRVGM

SEQ ID NO: 10983 - protein, 9 aa, synthetic construct
  source 1..9: note = Seed: VVGADGVGK (KRAS G12D)
LVGLDRVGR

SEQ ID NO: 10984 - protein, 9 aa, synthetic construct
  source 1..9: note = Seed: VVGADGVGK (KRAS G12D)
LVGLDRVGS

SEQ ID NO: 10985 - protein, 9 aa, synthetic construct
  source 1..9: note = Seed: VVGADGVGK (KRAS G12D)
LVGLDRVGV

SEQ ID NO: 10986 - protein, 9 aa, synthetic construct
  source 1..9: note = Seed: VVGADGVGK (KRAS G12D)
LVGLDRVGY

SEQ ID NO: 10987 - protein, 9 aa, synthetic construct
  source 1..9: note = Seed: VVGADGVGK (KRAS G12D)
LVGLDSVGA

SEQ ID NO: 10988 - protein, 9 aa, synthetic construct
  source 1..9: note = Seed: VVGADGVGK (KRAS G12D)
LVGLDSVGG

SEQ ID NO: 10989 - protein, 9 aa, synthetic construct
  source 1..9: note = Seed: VVGADGVGK (KRAS G12D)
LVGLDSVGI

SEQ ID NO: 10990 - protein, 9 aa, synthetic construct
  source 1..9: note = Seed: VVGADGVGK (KRAS G12D)
LVGLDSVGL

SEQ ID NO: 10991 - protein, 9 aa, synthetic construct
  source 1..9: note = Seed: VVGADGVGK (KRAS G12D)
LVGLDSVGM

SEQ ID NO: 10992 - protein, 9 aa, synthetic construct
  source 1..9: note = Seed: VVGADGVGK (KRAS G12D)
LVGLDSVGN

SEQ ID NO: 10993 - protein, 9 aa, synthetic construct
  source 1..9: note = Seed: VVGADGVGK (KRAS G12D)
LVGLDSVGS

SEQ ID NO: 10994 - protein, 9 aa, synthetic construct
  source 1..9: note = Seed: VVGADGVGK (KRAS G12D)
LVGLDSVGT

SEQ ID NO: 10995 - protein, 9 aa, synthetic construct
  source 1..9: note = Seed: VVGADGVGK (KRAS G12D)
LVGLDSVGV

SEQ ID NO: 10996 - protein, 9 aa, synthetic construct
  source 1..9: note = Seed: VVGADGVGK (KRAS G12D)
LVGLDTVGA

SEQ ID NO: 10997 - protein, 9 aa, synthetic construct
  source 1..9: note = Seed: VVGADGVGK (KRAS G12D)
LVGLDTVGI

SEQ ID NO: 10998 - protein, 9 aa, synthetic construct
  source 1..9: note = Seed: VVGADGVGK (KRAS G12D)
LVGLDTVGL

SEQ ID NO: 10999 - protein, 9 aa, synthetic construct
  source 1..9: note = Seed: VVGADGVGK (KRAS G12D)
LVGLDTVGS

SEQ ID NO: 11000 - protein, 9 aa, synthetic construct
  source 1..9: note = Seed: VVGADGVGK (KRAS G12D)
LVGLDTVGT

SEQ ID NO: 11001 - protein, 9 aa, synthetic construct
  source 1..9: note = Seed: VVGADGVGK (KRAS G12D)
LVGLDTVGV

SEQ ID NO: 11002 - protein, 9 aa, synthetic construct
  source 1..9: note = Seed: VVGADGVGK (KRAS G12D)
LVGMDAVGA

SEQ ID NO: 11003 - protein, 9 aa, synthetic construct
  source 1..9: note = Seed: VVGADGVGK (KRAS G12D)
LVGMDAVGG

SEQ ID NO: 11004 - protein, 9 aa, synthetic construct
  source 1..9: note = Seed: VVGADGVGK (KRAS G12D)
LVGMDAVGH

SEQ ID NO: 11005 - protein, 9 aa, synthetic construct
  source 1..9: note = Seed: VVGADGVGK (KRAS G12D)
LVGMDAVGI

SEQ ID NO: 11006 - protein, 9 aa, synthetic construct
  source 1..9: note = Seed: VVGADGVGK (KRAS G12D)
LVGMDAVGL

SEQ ID NO: 11007 - protein, 9 aa, synthetic construct
  source 1..9: note = Seed: VVGADGVGK (KRAS G12D)
LVGMDAVGM

SEQ ID NO: 11008 - protein, 9 aa, synthetic construct
  source 1..9: note = Seed: VVGADGVGK (KRAS G12D)
LVGMDAVGN

SEQ ID NO: 11009 - protein, 9 aa, synthetic construct
  source 1..9: note = Seed: VVGADGVGK (KRAS G12D)
LVGMDAVGS

SEQ ID NO: 11010 - protein, 9 aa, synthetic construct
  source 1..9: note = Seed: VVGADGVGK (KRAS G12D)
LVGMDAVGT

SEQ ID NO: 11011 - protein, 9 aa, synthetic construct
  source 1..9: note = Seed: VVGADGVGK (KRAS G12D)
LVGMDAVGV

SEQ ID NO: 11012 - protein, 9 aa, synthetic construct
  source 1..9: note = Seed: VVGADGVGK (KRAS G12D)
LVGMDGVGA

SEQ ID NO: 11013 - protein, 9 aa, synthetic construct
  source 1..9: note = Seed: VVGADGVGK (KRAS G12D)
LVGMDGVGG

SEQ ID NO: 11014 - protein, 9 aa, synthetic construct
  source 1..9: note = Seed: VVGADGVGK (KRAS G12D)
LVGMDGVGI

SEQ ID NO: 11015 - protein, 9 aa, synthetic construct
  source 1..9: note = Seed: VVGADGVGK (KRAS G12D)
LVGMDGVGL

SEQ ID NO: 11016 - protein, 9 aa, synthetic construct
  source 1..9: note = Seed: VVGADGVGK (KRAS G12D)
LVGMDGVGM

SEQ ID NO: 11017 - protein, 9 aa, synthetic construct
  source 1..9: note = Seed: VVGADGVGK (KRAS G12D)
LVGMDGVGN

SEQ ID NO: 11018 - protein, 9 aa, synthetic construct
  source 1..9: note = Seed: VVGADGVGK (KRAS G12D)
LVGMDGVGS

SEQ ID NO: 11019 - protein, 9 aa, synthetic construct
  source 1..9: note = Seed: VVGADGVGK (KRAS G12D)
LVGMDGVGT

SEQ ID NO: 11020 - protein, 9 aa, synthetic construct
  source 1..9: note = Seed: VVGADGVGK (KRAS G12D)
LVGMDGVGV

SEQ ID NO: 11021 - protein, 9 aa, synthetic construct
  source 1..9: note = Seed: VVGADGVGK (KRAS G12D)
LVGMDKVGL

SEQ ID NO: 11022 - protein, 9 aa, synthetic construct
  source 1..9: note = Seed: VVGADGVGK (KRAS G12D)
LVGMDKVGM

SEQ ID NO: 11023 - protein, 9 aa, synthetic construct
  source 1..9: note = Seed: VVGADGVGK (KRAS G12D)
LVGMDKVGR

SEQ ID NO: 11024 - protein, 9 aa, synthetic construct
  source 1..9: note = Seed: VVGADGVGK (KRAS G12D)
LVGMDKVGY

SEQ ID NO: 11025 - protein, 9 aa, synthetic construct
  source 1..9: note = Seed: VVGADGVGK (KRAS G12D)
LVGMDNVGA

SEQ ID NO: 11026 - protein, 9 aa, synthetic construct
  source 1..9: note = Seed: VVGADGVGK (KRAS G12D)
LVGMDNVGI

SEQ ID NO: 11027 - protein, 9 aa, synthetic construct
  source 1..9: note = Seed: VVGADGVGK (KRAS G12D)
LVGMDNVGL

SEQ ID NO: 11028 - protein, 9 aa, synthetic construct
  source 1..9: note = Seed: VVGADGVGK (KRAS G12D)
LVGMDNVGS

SEQ ID NO: 11029 - protein, 9 aa, synthetic construct
  source 1..9: note = Seed: VVGADGVGK (KRAS G12D)
LVGMDNVGT

SEQ ID NO: 11030 - protein, 9 aa, synthetic construct
  source 1..9: note = Seed: VVGADGVGK (KRAS G12D)
LVGMDNVGV

SEQ ID NO: 11031 - protein, 9 aa, synthetic construct
  source 1..9: note = Seed: VVGADGVGK (KRAS G12D)
LVGMDPVGA

SEQ ID NO: 11032 - protein, 9 aa, synthetic construct
  source 1..9: note = Seed: VVGADGVGK (KRAS G12D)
LVGMDPVGI

SEQ ID NO: 11033 - protein, 9 aa, synthetic construct
  source 1..9: note = Seed: VVGADGVGK (KRAS G12D)
LVGMDPVGL

SEQ ID NO: 11034 - protein, 9 aa, synthetic construct
  source 1..9: note = Seed: VVGADGVGK (KRAS G12D)
LVGMDPVGM

SEQ ID NO: 11035 - protein, 9 aa, synthetic construct
  source 1..9: note = Seed: VVGADGVGK (KRAS G12D)
LVGMDPVGS

SEQ ID NO: 11036 - protein, 9 aa, synthetic construct
  source 1..9: note = Seed: VVGADGVGK (KRAS G12D)
LVGMDPVGT

SEQ ID NO: 11037 - protein, 9 aa, synthetic construct
  source 1..9: note = Seed: VVGADGVGK (KRAS G12D)
LVGMDPVGV

SEQ ID NO: 11038 - protein, 9 aa, synthetic construct
  source 1..9: note = Seed: VVGADGVGK (KRAS G12D)
LVGMDRVGA

SEQ ID NO: 11039 - protein, 9 aa, synthetic construct
  source 1..9: note = Seed: VVGADGVGK (KRAS G12D)
LVGMDRVGF

SEQ ID NO: 11040 - protein, 9 aa, synthetic construct
  source 1..9: note = Seed: VVGADGVGK (KRAS G12D)
LVGMDRVGH

SEQ ID NO: 11041 - protein, 9 aa, synthetic construct
  source 1..9: note = Seed: VVGADGVGK (KRAS G12D)
LVGMDRVGK

SEQ ID NO: 11042 - protein, 9 aa, synthetic construct
  source 1..9: note = Seed: VVGADGVGK (KRAS G12D)
LVGMDRVGL

SEQ ID NO: 11043 - protein, 9 aa, synthetic construct
  source 1..9: note = Seed: VVGADGVGK (KRAS G12D)
LVGMDRVGM

SEQ ID NO: 11044 - protein, 9 aa, synthetic construct
  source 1..9: note = Seed: VVGADGVGK (KRAS G12D)
LVGMDRVGR

SEQ ID NO: 11045 - protein, 9 aa, synthetic construct
  source 1..9: note = Seed: VVGADGVGK (KRAS G12D)
LVGMDRVGV

SEQ ID NO: 11046 - protein, 9 aa, synthetic construct
  source 1..9: note = Seed: VVGADGVGK (KRAS G12D)
LVGMDRVGY

SEQ ID NO: 11047 - protein, 9 aa, synthetic construct
  source 1..9: note = Seed: VVGADGVGK (KRAS G12D)
LVGMDSVGA

SEQ ID NO: 11048 - protein, 9 aa, synthetic construct
  source 1..9: note = Seed: VVGADGVGK (KRAS G12D)
LVGMDSVGI

SEQ ID NO: 11049 - protein, 9 aa, synthetic construct
  source 1..9: note = Seed: VVGADGVGK (KRAS G12D)
LVGMDSVGL

SEQ ID NO: 11050 - protein, 9 aa, synthetic construct
  source 1..9: note = Seed: VVGADGVGK (KRAS G12D)
LVGMDSVGM

SEQ ID NO: 11051 - protein, 9 aa, synthetic construct
  source 1..9: note = Seed: VVGADGVGK (KRAS G12D)
LVGMDSVGS

SEQ ID NO: 11052 - protein, 9 aa, synthetic construct
  source 1..9: note = Seed: VVGADGVGK (KRAS G12D)
LVGMDSVGT

SEQ ID NO: 11053 - protein, 9 aa, synthetic construct
  source 1..9: note = Seed: VVGADGVGK (KRAS G12D)
LVGMDSVGV

SEQ ID NO: 11054 - protein, 9 aa, synthetic construct
  source 1..9: note = Seed: VVGADGVGK (KRAS G12D)
LVGMDTVGA

SEQ ID NO: 11055 - protein, 9 aa, synthetic construct
  source 1..9: note = Seed: VVGADGVGK (KRAS G12D)
LVGMDTVGI

SEQ ID NO: 11056 - protein, 9 aa, synthetic construct
  source 1..9: note = Seed: VVGADGVGK (KRAS G12D)
LVGMDTVGL

SEQ ID NO: 11057 - protein, 9 aa, synthetic construct
  source 1..9: note = Seed: VVGADGVGK (KRAS G12D)
LVGMDTVGS

SEQ ID NO: 11058 - protein, 9 aa, synthetic construct
  source 1..9: note = Seed: VVGADGVGK (KRAS G12D)
LVGMDTVGT

SEQ ID NO: 11059 - protein, 9 aa, synthetic construct
  source 1..9: note = Seed: VVGADGVGK (KRAS G12D)
LVGMDTVGV

SEQ ID NO: 11060 - protein, 9 aa, synthetic construct
  source 1..9: note = Seed: VVGADGVGK (KRAS G12D)
LVGNDRVGR

SEQ ID NO: 11061 - protein, 9 aa, synthetic construct
  source 1..9: note = Seed: VVGADGVGK (KRAS G12D)
LVGNDRVGY

SEQ ID NO: 11062 - protein, 9 aa, synthetic construct
  source 1..9: note = Seed: VVGADGVGK (KRAS G12D)
LVGQDAVGA

SEQ ID NO: 11063 - protein, 9 aa, synthetic construct
  source 1..9: note = Seed: VVGADGVGK (KRAS G12D)
LVGQDAVGI

SEQ ID NO: 11064 - protein, 9 aa, synthetic construct
  source 1..9: note = Seed: VVGADGVGK (KRAS G12D)
LVGQDAVGL

SEQ ID NO: 11065 - protein, 9 aa, synthetic construct
  source 1..9: note = Seed: VVGADGVGK (KRAS G12D)
LVGQDAVGM

SEQ ID NO: 11066 - protein, 9 aa, synthetic construct
  source 1..9: note = Seed: VVGADGVGK (KRAS G12D)
LVGQDAVGS

SEQ ID NO: 11067 - protein, 9 aa, synthetic construct
  source 1..9: note = Seed: VVGADGVGK (KRAS G12D)
LVGQDAVGT

SEQ ID NO: 11068 - protein, 9 aa, synthetic construct
  source 1..9: note = Seed: VVGADGVGK (KRAS G12D)
LVGQDAVGV

SEQ ID NO: 11069 - protein, 9 aa, synthetic construct
  source 1..9: note = Seed: VVGADGVGK (KRAS G12D)
LVGQDGVGA

SEQ ID NO: 11070 - protein, 9 aa, synthetic construct
  source 1..9: note = Seed: VVGADGVGK (KRAS G12D)
LVGQDGVGI

SEQ ID NO: 11071 - protein, 9 aa, synthetic construct
  source 1..9: note = Seed: VVGADGVGK (KRAS G12D)
LVGQDGVGL

SEQ ID NO: 11072 - protein, 9 aa, synthetic construct
  source 1..9: note = Seed: VVGADGVGK (KRAS G12D)
LVGQDGVGV

SEQ ID NO: 11073 - protein, 9 aa, synthetic construct
  source 1..9: note = Seed: VVGADGVGK (KRAS G12D)
LVGQDKVGR

SEQ ID NO: 11074 - protein, 9 aa, synthetic construct
  source 1..9: note = Seed: VVGADGVGK (KRAS G12D)
LVGQDKVGY

SEQ ID NO: 11075 - protein, 9 aa, synthetic construct
  source 1..9: note = Seed: VVGADGVGK (KRAS G12D)
LVGQDRVGF

SEQ ID NO: 11076 - protein, 9 aa, synthetic construct
  source 1..9: note = Seed: VVGADGVGK (KRAS G12D)
LVGQDRVGK

SEQ ID NO: 11077 - protein, 9 aa, synthetic construct
  source 1..9: note = Seed: VVGADGVGK (KRAS G12D)
LVGQDRVGR

SEQ ID NO: 11078 - protein, 9 aa, synthetic construct
  source 1..9: note = Seed: VVGADGVGK (KRAS G12D)
LVGQDRVGY

SEQ ID NO: 11079 - protein, 9 aa, synthetic construct
  source 1..9: note = Seed: VVGADGVGK (KRAS G12D)
LVGQDSVGV

SEQ ID NO: 11080 - protein, 9 aa, synthetic construct
  source 1..9: note = Seed: VVGADGVGK (KRAS G12D)
LVGRDAVGK

SEQ ID NO: 11081 - protein, 9 aa, synthetic construct
  source 1..9: note = Seed: VVGADGVGK (KRAS G12D)
LVGRDAVGR

SEQ ID NO: 11082 - protein, 9 aa, synthetic construct
  source 1..9: note = Seed: VVGADGVGK (KRAS G12D)
LVGRDAVGY

SEQ ID NO: 11083 - protein, 9 aa, synthetic construct
  source 1..9: note = Seed: VVGADGVGK (KRAS G12D)
LVGRDIVGR

SEQ ID NO: 11084 - protein, 9 aa, synthetic construct
  source 1..9: note = Seed: VVGADGVGK (KRAS G12D)
LVGRDKVGA

SEQ ID NO: 11085 - protein, 9 aa, synthetic construct
  source 1..9: note = Seed: VVGADGVGK (KRAS G12D)
LVGRDKVGF

SEQ ID NO: 11086 - protein, 9 aa, synthetic construct
  source 1..9: note = Seed: VVGADGVGK (KRAS G12D)
LVGRDKVGI

SEQ ID NO: 11087 - protein, 9 aa, synthetic construct
  source 1..9: note = Seed: VVGADGVGK (KRAS G12D)
LVGRDKVGK

SEQ ID NO: 11088 - protein, 9 aa, synthetic construct
  source 1..9: note = Seed: VVGADGVGK (KRAS G12D)
LVGRDKVGL

SEQ ID NO: 11089 - protein, 9 aa, synthetic construct
  source 1..9: note = Seed: VVGADGVGK (KRAS G12D)
LVGRDKVGM

SEQ ID NO: 11090 - protein, 9 aa, synthetic construct
  source 1..9: note = Seed: VVGADGVGK (KRAS G12D)
LVGRDKVGR

SEQ ID NO: 11091 - protein, 9 aa, synthetic construct
  source 1..9: note = Seed: VVGADGVGK (KRAS G12D)
LVGRDKVGV

SEQ ID NO: 11092 - protein, 9 aa, synthetic construct
  source 1..9: note = Seed: VVGADGVGK (KRAS G12D)
LVGRDKVGW

SEQ ID NO: 11093 - protein, 9 aa, synthetic construct
  source 1..9: note = Seed: VVGADGVGK (KRAS G12D)
LVGRDKVGY

SEQ ID NO: 11094 - protein, 9 aa, synthetic construct
  source 1..9: note = Seed: VVGADGVGK (KRAS G12D)
LVGRDMVGR

SEQ ID NO: 11095 - protein, 9 aa, synthetic construct
  source 1..9: note = Seed: VVGADGVGK (KRAS G12D)
LVGRDNVGR

SEQ ID NO: 11096 - protein, 9 aa, synthetic construct
  source 1..9: note = Seed: VVGADGVGK (KRAS G12D)
LVGRDPVGR

SEQ ID NO: 11097 - protein, 9 aa, synthetic construct
  source 1..9: note = Seed: VVGADGVGK (KRAS G12D)
LVGRDPVGY

SEQ ID NO: 11098 - protein, 9 aa, synthetic construct
  source 1..9: note = Seed: VVGADGVGK (KRAS G12D)
LVGRDRVGA

SEQ ID NO: 11099 - protein, 9 aa, synthetic construct
  source 1..9: note = Seed: VVGADGVGK (KRAS G12D)
LVGRDRVGF

SEQ ID NO: 11100 - protein, 9 aa, synthetic construct
  source 1..9: note = Seed: VVGADGVGK (KRAS G12D)
LVGRDRVGG

SEQ ID NO: 11101 - protein, 9 aa, synthetic construct
  source 1..9: note = Seed: VVGADGVGK (KRAS G12D)
LVGRDRVGH

SEQ ID NO: 11102 - protein, 9 aa, synthetic construct
  source 1..9: note = Seed: VVGADGVGK (KRAS G12D)
LVGRDRVGI

SEQ ID NO: 11103 - protein, 9 aa, synthetic construct
  source 1..9: note = Seed: VVGADGVGK (KRAS G12D)
LVGRDRVGK

SEQ ID NO: 11104 - protein, 9 aa, synthetic construct
  source 1..9: note = Seed: VVGADGVGK (KRAS G12D)
LVGRDRVGL

SEQ ID NO: 11105 - protein, 9 aa, synthetic construct
  source 1..9: note = Seed: VVGADGVGK (KRAS G12D)
LVGRDRVGM

SEQ ID NO: 11106 - protein, 9 aa, synthetic construct
  source 1..9: note = Seed: VVGADGVGK (KRAS G12D)
LVGRDRVGQ

SEQ ID NO: 11107 - protein, 9 aa, synthetic construct
  source 1..9: note = Seed: VVGADGVGK (KRAS G12D)
LVGRDRVGR

SEQ ID NO: 11108 - protein, 9 aa, synthetic construct
  source 1..9: note = Seed: VVGADGVGK (KRAS G12D)
LVGRDRVGS

SEQ ID NO: 11109 - protein, 9 aa, synthetic construct
  source 1..9: note = Seed: VVGADGVGK (KRAS G12D)
LVGRDRVGT

SEQ ID NO: 11110 - protein, 9 aa, synthetic construct
  source 1..9: note = Seed: VVGADGVGK (KRAS G12D)
LVGRDRVGV

SEQ ID NO: 11111 - protein, 9 aa, synthetic construct
  source 1..9: note = Seed: VVGADGVGK (KRAS G12D)
LVGRDRVGW

SEQ ID NO: 11112 - protein, 9 aa, synthetic construct
  source 1..9: note = Seed: VVGADGVGK (KRAS G12D)
LVGRDRVGY

SEQ ID NO: 11113 - protein, 9 aa, synthetic construct
  source 1..9: note = Seed: VVGADGVGK (KRAS G12D)
LVGRDSVGR

SEQ ID NO: 11114 - protein, 9 aa, synthetic construct
  source 1..9: note = Seed: VVGADGVGK (KRAS G12D)
LVGRDSVGY

SEQ ID NO: 11115 - protein, 9 aa, synthetic construct
  source 1..9: note = Seed: VVGADGVGK (KRAS G12D)
LVGRDTVGR

SEQ ID NO: 11116 - protein, 9 aa, synthetic construct
  source 1..9: note = Seed: VVGADGVGK (KRAS G12D)
LVGRDVVGR

SEQ ID NO: 11117 - protein, 9 aa, synthetic construct
  source 1..9: note = Seed: VVGADGVGK (KRAS G12D)
LVGSDAVGV

SEQ ID NO: 11118 - protein, 9 aa, synthetic construct
  source 1..9: note = Seed: VVGADGVGK (KRAS G12D)
LVGSDKVGR

SEQ ID NO: 11119 - protein, 9 aa, synthetic construct
  source 1..9: note = Seed: VVGADGVGK (KRAS G12D)
LVGSDKVGY

SEQ ID NO: 11120 - protein, 9 aa, synthetic construct
  source 1..9: note = Seed: VVGADGVGK (KRAS G12D)
LVGSDRVGF

SEQ ID NO: 11121 - protein, 9 aa, synthetic construct
  source 1..9: note = Seed: VVGADGVGK (KRAS G12D)
LVGSDRVGI

SEQ ID NO: 11122 - protein, 9 aa, synthetic construct
  source 1..9: note = Seed: VVGADGVGK (KRAS G12D)
LVGSDRVGK

SEQ ID NO: 11123 - protein, 9 aa, synthetic construct
  source 1..9: note = Seed: VVGADGVGK (KRAS G12D)
LVGSDRVGL

SEQ ID NO: 11124 - protein, 9 aa, synthetic construct
  source 1..9: note = Seed: VVGADGVGK (KRAS G12D)
LVGSDRVGM

SEQ ID NO: 11125 - protein, 9 aa, synthetic construct
  source 1..9: note = Seed: VVGADGVGK (KRAS G12D)
LVGSDRVGR

SEQ ID NO: 11126 - protein, 9 aa, synthetic construct
  source 1..9: note = Seed: VVGADGVGK (KRAS G12D)
LVGSDRVGV

SEQ ID NO: 11127 - protein, 9 aa, synthetic construct
  source 1..9: note = Seed: VVGADGVGK (KRAS G12D)
LVGSDRVGY

SEQ ID NO: 11128 - protein, 9 aa, synthetic construct
  source 1..9: note = Seed: VVGADGVGK (KRAS G12D)
LVGTDKVGR

SEQ ID NO: 11129 - protein, 9 aa, synthetic construct
  source 1..9: note = Seed: VVGADGVGK (KRAS G12D)
LVGTDRVGR

SEQ ID NO: 11130 - protein, 9 aa, synthetic construct
  source 1..9: note = Seed: VVGADGVGK (KRAS G12D)
LVGTDRVGY

SEQ ID NO: 11131 - protein, 9 aa, synthetic construct
  source 1..9: note = Seed: VVGADGVGK (KRAS G12D)
LVGVDAVGA

SEQ ID NO: 11132 - protein, 9 aa, synthetic construct
  source 1..9: note = Seed: VVGADGVGK (KRAS G12D)
LVGVDAVGI

SEQ ID NO: 11133 - protein, 9 aa, synthetic construct
  source 1..9: note = Seed: VVGADGVGK (KRAS G12D)
LVGVDAVGV

SEQ ID NO: 11134 - protein, 9 aa, synthetic construct
  source 1..9: note = Seed: VVGADGVGK (KRAS G12D)
LVGVDKVGK

SEQ ID NO: 11135 - protein, 9 aa, synthetic construct
  source 1..9: note = Seed: VVGADGVGK (KRAS G12D)
LVGVDKVGR

SEQ ID NO: 11136 - protein, 9 aa, synthetic construct
  source 1..9: note = Seed: VVGADGVGK (KRAS G12D)
LVGVDKVGY

SEQ ID NO: 11137 - protein, 9 aa, synthetic construct
  source 1..9: note = Seed: VVGADGVGK (KRAS G12D)
LVGVDRVGA

SEQ ID NO: 11138 - protein, 9 aa, synthetic construct
  source 1..9: note = Seed: VVGADGVGK (KRAS G12D)
LVGVDRVGF

SEQ ID NO: 11139 - protein, 9 aa, synthetic construct
  source 1..9: note = Seed: VVGADGVGK (KRAS G12D)
LVGVDRVGH

SEQ ID NO: 11140 - protein, 9 aa, synthetic construct
  source 1..9: note = Seed: VVGADGVGK (KRAS G12D)
LVGVDRVGK

SEQ ID NO: 11141 - protein, 9 aa, synthetic construct
  source 1..9: note = Seed: VVGADGVGK (KRAS G12D)
LVGVDRVGL

SEQ ID NO: 11142 - protein, 9 aa, synthetic construct
  source 1..9: note = Seed: VVGADGVGK (KRAS G12D)
LVGVDRVGM

SEQ ID NO: 11143 - protein, 9 aa, synthetic construct
  source 1..9: note = Seed: VVGADGVGK (KRAS G12D)
LVGVDRVGR

SEQ ID NO: 11144 - protein, 9 aa, synthetic construct
  source 1..9: note = Seed: VVGADGVGK (KRAS G12D)
LVGVDRVGV

SEQ ID NO: 11145 - protein, 9 aa, synthetic construct
  source 1..9: note = Seed: VVGADGVGK (KRAS G12D)
LVGVDRVGY

SEQ ID NO: 11146 - protein, 9 aa, synthetic construct
  source 1..9: note = Seed: VVGADGVGK (KRAS G12D)
LVGWDAVGR

SEQ ID NO: 11147 - protein, 9 aa, synthetic construct
  source 1..9: note = Seed: VVGADGVGK (KRAS G12D)
LVGWDKVGR

SEQ ID NO: 11148 - protein, 9 aa, synthetic construct
  source 1..9: note = Seed: VVGADGVGK (KRAS G12D)
LVGWDKVGY

SEQ ID NO: 11149 - protein, 9 aa, synthetic construct
  source 1..9: note = Seed: VVGADGVGK (KRAS G12D)
LVGWDRVGF

SEQ ID NO: 11150 - protein, 9 aa, synthetic construct
  source 1..9: note = Seed: VVGADGVGK (KRAS G12D)
LVGWDRVGK

SEQ ID NO: 11151 - protein, 9 aa, synthetic construct
  source 1..9: note = Seed: VVGADGVGK (KRAS G12D)
LVGWDRVGL

SEQ ID NO: 11152 - protein, 9 aa, synthetic construct
  source 1..9: note = Seed: VVGADGVGK (KRAS G12D)
LVGWDRVGM

SEQ ID NO: 11153 - protein, 9 aa, synthetic construct
  source 1..9: note = Seed: VVGADGVGK (KRAS G12D)
LVGWDRVGR

SEQ ID NO: 11154 - protein, 9 aa, synthetic construct
  source 1..9: note = Seed: VVGADGVGK (KRAS G12D)
LVGWDRVGV

SEQ ID NO: 11155 - protein, 9 aa, synthetic construct
  source 1..9: note = Seed: VVGADGVGK (KRAS G12D)
LVGWDRVGY

SEQ ID NO: 11156 - protein, 9 aa, synthetic construct
  source 1..9: note = Seed: VVGADGVGK (KRAS G12D)
LVGYDKVGR

SEQ ID NO: 11157 - protein, 9 aa, synthetic construct
  source 1..9: note = Seed: VVGADGVGK (KRAS G12D)
LVGYDRVGR

SEQ ID NO: 11158 - protein, 9 aa, synthetic construct
  source 1..9: note = Seed: VVGADGVGK (KRAS G12D)
LVGYDRVGY

SEQ ID NO: 11159 - protein, 9 aa, synthetic construct
  source 1..9: note = Seed: VVGADGVGK (KRAS G12D)
MVGADAVGA

SEQ ID NO: 11160 - protein, 9 aa, synthetic construct
  source 1..9: note = Seed: VVGADGVGK (KRAS G12D)
MVGADAVGI

SEQ ID NO: 11161 - protein, 9 aa, synthetic construct
  source 1..9: note = Seed: VVGADGVGK (KRAS G12D)
MVGADAVGL

SEQ ID NO: 11162 - protein, 9 aa, synthetic construct
  source 1..9: note = Seed: VVGADGVGK (KRAS G12D)
MVGADAVGM

SEQ ID NO: 11163 - protein, 9 aa, synthetic construct
  source 1..9: note = Seed: VVGADGVGK (KRAS G12D)
MVGADAVGV

SEQ ID NO: 11164 - protein, 9 aa, synthetic construct
  source 1..9: note = Seed: VVGADGVGK (KRAS G12D)
MVGADIVGA

SEQ ID NO: 11165 - protein, 9 aa, synthetic construct
  source 1..9: note = Seed: VVGADGVGK (KRAS G12D)
MVGADRVGK

SEQ ID NO: 11166 - protein, 9 aa, synthetic construct
  source 1..9: note = Seed: VVGADGVGK (KRAS G12D)
MVGADRVGR

SEQ ID NO: 11167 - protein, 9 aa, synthetic construct
  source 1..9: note = Seed: VVGADGVGK (KRAS G12D)
MVGADRVGY

SEQ ID NO: 11168 - protein, 9 aa, synthetic construct
  source 1..9: note = Seed: VVGADGVGK (KRAS G12D)
MVGADVVGA

SEQ ID NO: 11169 - protein, 9 aa, synthetic construct
  source 1..9: note = Seed: VVGADGVGK (KRAS G12D)
MVGFDKVGR

SEQ ID NO: 11170 - protein, 9 aa, synthetic construct
  source 1..9: note = Seed: VVGADGVGK (KRAS G12D)
MVGFDKVGY

SEQ ID NO: 11171 - protein, 9 aa, synthetic construct
  source 1..9: note = Seed: VVGADGVGK (KRAS G12D)
MVGFDRVGK

SEQ ID NO: 11172 - protein, 9 aa, synthetic construct
  source 1..9: note = Seed: VVGADGVGK (KRAS G12D)
MVGFDRVGR

SEQ ID NO: 11173 - protein, 9 aa, synthetic construct
  source 1..9: note = Seed: VVGADGVGK (KRAS G12D)
MVGFDRVGY

SEQ ID NO: 11174 - protein, 9 aa, synthetic construct
  source 1..9: note = Seed: VVGADGVGK (KRAS G12D)
MVGHDAVGR

SEQ ID NO: 11175 - protein, 9 aa, synthetic construct
  source 1..9: note = Seed: VVGADGVGK (KRAS G12D)
MVGHDKVGR

SEQ ID NO: 11176 - protein, 9 aa, synthetic construct
  source 1..9: note = Seed: VVGADGVGK (KRAS G12D)
MVGHDRVGF

SEQ ID NO: 11177 - protein, 9 aa, synthetic construct
  source 1..9: note = Seed: VVGADGVGK (KRAS G12D)
MVGHDRVGK

SEQ ID NO: 11178 - protein, 9 aa, synthetic construct
  source 1..9: note = Seed: VVGADGVGK (KRAS G12D)
MVGHDRVGL

SEQ ID NO: 11179 - protein, 9 aa, synthetic construct
  source 1..9: note = Seed: VVGADGVGK (KRAS G12D)
MVGHDRVGM

SEQ ID NO: 11180 - protein, 9 aa, synthetic construct
  source 1..9: note = Seed: VVGADGVGK (KRAS G12D)
MVGHDRVGR

SEQ ID NO: 11181 - protein, 9 aa, synthetic construct
  source 1..9: note = Seed: VVGADGVGK (KRAS G12D)
MVGHDRVGY

SEQ ID NO: 11182 - protein, 9 aa, synthetic construct
  source 1..9: note = Seed: VVGADGVGK (KRAS G12D)
MVGHDVVGR

SEQ ID NO: 11183 - protein, 9 aa, synthetic construct
  source 1..9: note = Seed: VVGADGVGK (KRAS G12D)
MVGIDAVGA

SEQ ID NO: 11184 - protein, 9 aa, synthetic construct
  source 1..9: note = Seed: VVGADGVGK (KRAS G12D)
MVGIDAVGI

SEQ ID NO: 11185 - protein, 9 aa, synthetic construct
  source 1..9: note = Seed: VVGADGVGK (KRAS G12D)
MVGIDAVGL

SEQ ID NO: 11186 - protein, 9 aa, synthetic construct
  source 1..9: note = Seed: VVGADGVGK (KRAS G12D)
MVGIDAVGS

SEQ ID NO: 11187 - protein, 9 aa, synthetic construct
  source 1..9: note = Seed: VVGADGVGK (KRAS G12D)
MVGIDAVGV

SEQ ID NO: 11188 - protein, 9 aa, synthetic construct
  source 1..9: note = Seed: VVGADGVGK (KRAS G12D)
MVGIDKVGK

SEQ ID NO: 11189 - protein, 9 aa, synthetic construct
  source 1..9: note = Seed: VVGADGVGK (KRAS G12D)
MVGIDKVGR

SEQ ID NO: 11190 - protein, 9 aa, synthetic construct
  source 1..9: note = Seed: VVGADGVGK (KRAS G12D)
MVGIDKVGY

SEQ ID NO: 11191 - protein, 9 aa, synthetic construct
  source 1..9: note = Seed: VVGADGVGK (KRAS G12D)
MVGIDRVGF

SEQ ID NO: 11192 - protein, 9 aa, synthetic construct
  source 1..9: note = Seed: VVGADGVGK (KRAS G12D)
MVGIDRVGK

SEQ ID NO: 11193 - protein, 9 aa, synthetic construct
  source 1..9: note = Seed: VVGADGVGK (KRAS G12D)
MVGIDRVGL

SEQ ID NO: 11194 - protein, 9 aa, synthetic construct
  source 1..9: note = Seed: VVGADGVGK (KRAS G12D)
MVGIDRVGM

SEQ ID NO: 11195 - protein, 9 aa, synthetic construct
  source 1..9: note = Seed: VVGADGVGK (KRAS G12D)
MVGIDRVGR

SEQ ID NO: 11196 - protein, 9 aa, synthetic construct
  source 1..9: note = Seed: VVGADGVGK (KRAS G12D)
MVGIDRVGV

SEQ ID NO: 11197 - protein, 9 aa, synthetic construct
  source 1..9: note = Seed: VVGADGVGK (KRAS G12D)
MVGIDRVGY

SEQ ID NO: 11198 - protein, 9 aa, synthetic construct
  source 1..9: note = Seed: VVGADGVGK (KRAS G12D)
MVGKDKVGF

SEQ ID NO: 11199 - protein, 9 aa, synthetic construct
  source 1..9: note = Seed: VVGADGVGK (KRAS G12D)
MVGKDKVGR

SEQ ID NO: 11200 - protein, 9 aa, synthetic construct
  source 1..9: note = Seed: VVGADGVGK (KRAS G12D)
MVGKDKVGY

SEQ ID NO: 11201 - protein, 9 aa, synthetic construct
  source 1..9: note = Seed: VVGADGVGK (KRAS G12D)
MVGKDRVGA

SEQ ID NO: 11202 - protein, 9 aa, synthetic construct
  source 1..9: note = Seed: VVGADGVGK (KRAS G12D)
MVGKDRVGF

SEQ ID NO: 11203 - protein, 9 aa, synthetic construct
  source 1..9: note = Seed: VVGADGVGK (KRAS G12D)
MVGKDRVGI

SEQ ID NO: 11204 - protein, 9 aa, synthetic construct
  source 1..9: note = Seed: VVGADGVGK (KRAS G12D)
MVGKDRVGK

SEQ ID NO: 11205 - protein, 9 aa, synthetic construct
  source 1..9: note = Seed: VVGADGVGK (KRAS G12D)
MVGKDRVGL

SEQ ID NO: 11206 - protein, 9 aa, synthetic construct
  source 1..9: note = Seed: VVGADGVGK (KRAS G12D)
MVGKDRVGM

SEQ ID NO: 11207 - protein, 9 aa, synthetic construct
  source 1..9: note = Seed: VVGADGVGK (KRAS G12D)
MVGKDRVGR

SEQ ID NO: 11208 - protein, 9 aa, synthetic construct
  source 1..9: note = Seed: VVGADGVGK (KRAS G12D)
MVGKDRVGV

SEQ ID NO: 11209 - protein, 9 aa, synthetic construct
  source 1..9: note = Seed: VVGADGVGK (KRAS G12D)
MVGKDRVGW

SEQ ID NO: 11210 - protein, 9 aa, synthetic construct
  source 1..9: note = Seed: VVGADGVGK (KRAS G12D)
MVGKDRVGY

SEQ ID NO: 11211 - protein, 9 aa, synthetic construct
  source 1..9: note = Seed: VVGADGVGK (KRAS G12D)
MVGLDAVGA

SEQ ID NO: 11212 - protein, 9 aa, synthetic construct
  source 1..9: note = Seed: VVGADGVGK (KRAS G12D)
MVGLDAVGG

SEQ ID NO: 11213 - protein, 9 aa, synthetic construct
  source 1..9: note = Seed: VVGADGVGK (KRAS G12D)
MVGLDAVGI

SEQ ID NO: 11214 - protein, 9 aa, synthetic construct
  source 1..9: note = Seed: VVGADGVGK (KRAS G12D)
MVGLDAVGL

SEQ ID NO: 11215 - protein, 9 aa, synthetic construct
  source 1..9: note = Seed: VVGADGVGK (KRAS G12D)
MVGLDAVGM

SEQ ID NO: 11216 - protein, 9 aa, synthetic construct
  source 1..9: note = Seed: VVGADGVGK (KRAS G12D)
MVGLDAVGN

SEQ ID NO: 11217 - protein, 9 aa, synthetic construct
  source 1..9: note = Seed: VVGADGVGK (KRAS G12D)
MVGLDAVGS

SEQ ID NO: 11218 - protein, 9 aa, synthetic construct
  source 1..9: note = Seed: VVGADGVGK (KRAS G12D)
MVGLDAVGT

SEQ ID NO: 11219 - protein, 9 aa, synthetic construct
  source 1..9: note = Seed: VVGADGVGK (KRAS G12D)
MVGLDAVGV

SEQ ID NO: 11220 - protein, 9 aa, synthetic construct
  source 1..9: note = Seed: VVGADGVGK (KRAS G12D)
MVGLDGVGA

SEQ ID NO: 11221 - protein, 9 aa, synthetic construct
  source 1..9: note = Seed: VVGADGVGK (KRAS G12D)
MVGLDGVGI

SEQ ID NO: 11222 - protein, 9 aa, synthetic construct
  source 1..9: note = Seed: VVGADGVGK (KRAS G12D)
MVGLDGVGL

SEQ ID NO: 11223 - protein, 9 aa, synthetic construct
  source 1..9: note = Seed: VVGADGVGK (KRAS G12D)
MVGLDGVGM

SEQ ID NO: 11224 - protein, 9 aa, synthetic construct
  source 1..9: note = Seed: VVGADGVGK (KRAS G12D)
MVGLDGVGS

SEQ ID NO: 11225 - protein, 9 aa, synthetic construct
  source 1..9: note = Seed: VVGADGVGK (KRAS G12D)
MVGLDGVGT

SEQ ID NO: 11226 - protein, 9 aa, synthetic construct
  source 1..9: note = Seed: VVGADGVGK (KRAS G12D)
MVGLDGVGV

SEQ ID NO: 11227 - protein, 9 aa, synthetic construct
  source 1..9: note = Seed: VVGADGVGK (KRAS G12D)
MVGLDKVGR

SEQ ID NO: 11228 - protein, 9 aa, synthetic construct
  source 1..9: note = Seed: VVGADGVGK (KRAS G12D)
MVGLDNVGA

SEQ ID NO: 11229 - protein, 9 aa, synthetic construct
  source 1..9: note = Seed: VVGADGVGK (KRAS G12D)
MVGLDNVGV

SEQ ID NO: 11230 - protein, 9 aa, synthetic construct
  source 1..9: note = Seed: VVGADGVGK (KRAS G12D)
MVGLDPVGA

SEQ ID NO: 11231 - protein, 9 aa, synthetic construct
  source 1..9: note = Seed: VVGADGVGK (KRAS G12D)
MVGLDPVGI

SEQ ID NO: 11232 - protein, 9 aa, synthetic construct
  source 1..9: note = Seed: VVGADGVGK (KRAS G12D)
MVGLDPVGL

SEQ ID NO: 11233 - protein, 9 aa, synthetic construct
  source 1..9: note = Seed: VVGADGVGK (KRAS G12D)
MVGLDPVGM

SEQ ID NO: 11234 - protein, 9 aa, synthetic construct
  source 1..9: note = Seed: VVGADGVGK (KRAS G12D)
MVGLDPVGS

SEQ ID NO: 11235 - protein, 9 aa, synthetic construct
  source 1..9: note = Seed: VVGADGVGK (KRAS G12D)
MVGLDPVGT

SEQ ID NO: 11236 - protein, 9 aa, synthetic construct
  source 1..9: note = Seed: VVGADGVGK (KRAS G12D)
MVGLDPVGV

SEQ ID NO: 11237 - protein, 9 aa, synthetic construct
  source 1..9: note = Seed: VVGADGVGK (KRAS G12D)
MVGLDRVGK

SEQ ID NO: 11238 - protein, 9 aa, synthetic construct
  source 1..9: note = Seed: VVGADGVGK (KRAS G12D)
MVGLDRVGR

SEQ ID NO: 11239 - protein, 9 aa, synthetic construct
  source 1..9: note = Seed: VVGADGVGK (KRAS G12D)
MVGLDRVGY

SEQ ID NO: 11240 - protein, 9 aa, synthetic construct
  source 1..9: note = Seed: VVGADGVGK (KRAS G12D)
MVGLDSVGA

SEQ ID NO: 11241 - protein, 9 aa, synthetic construct
  source 1..9: note = Seed: VVGADGVGK (KRAS G12D)
MVGLDSVGI

SEQ ID NO: 11242 - protein, 9 aa, synthetic construct
  source 1..9: note = Seed: VVGADGVGK (KRAS G12D)
MVGLDSVGL

SEQ ID NO: 11243 - protein, 9 aa, synthetic construct
  source 1..9: note = Seed: VVGADGVGK (KRAS G12D)
MVGLDSVGM

SEQ ID NO: 11244 - protein, 9 aa, synthetic construct
  source 1..9: note = Seed: VVGADGVGK (KRAS G12D)
MVGLDSVGS

SEQ ID NO: 11245 - protein, 9 aa, synthetic construct
  source 1..9: note = Seed: VVGADGVGK (KRAS G12D)
MVGLDSVGT

SEQ ID NO: 11246 - protein, 9 aa, synthetic construct
  source 1..9: note = Seed: VVGADGVGK (KRAS G12D)
MVGLDSVGV

SEQ ID NO: 11247 - protein, 9 aa, synthetic construct
  source 1..9: note = Seed: VVGADGVGK (KRAS G12D)
MVGLDTVGA

SEQ ID NO: 11248 - protein, 9 aa, synthetic construct
  source 1..9: note = Seed: VVGADGVGK (KRAS G12D)
MVGMDAVGA

SEQ ID NO: 11249 - protein, 9 aa, synthetic construct
  source 1..9: note = Seed: VVGADGVGK (KRAS G12D)
MVGMDAVGI

SEQ ID NO: 11250 - protein, 9 aa, synthetic construct
  source 1..9: note = Seed: VVGADGVGK (KRAS G12D)
MVGMDAVGL

SEQ ID NO: 11251 - protein, 9 aa, synthetic construct
  source 1..9: note = Seed: VVGADGVGK (KRAS G12D)
MVGMDAVGM

SEQ ID NO: 11252 - protein, 9 aa, synthetic construct
  source 1..9: note = Seed: VVGADGVGK (KRAS G12D)
MVGMDAVGS

SEQ ID NO: 11253 - protein, 9 aa, synthetic construct
  source 1..9: note = Seed: VVGADGVGK (KRAS G12D)
MVGMDAVGT

SEQ ID NO: 11254 - protein, 9 aa, synthetic construct
  source 1..9: note = Seed: VVGADGVGK (KRAS G12D)
MVGMDAVGV

SEQ ID NO: 11255 - protein, 9 aa, synthetic construct
  source 1..9: note = Seed: VVGADGVGK (KRAS G12D)
MVGMDGVGA

SEQ ID NO: 11256 - protein, 9 aa, synthetic construct
  source 1..9: note = Seed: VVGADGVGK (KRAS G12D)
MVGMDGVGI

SEQ ID NO: 11257 - protein, 9 aa, synthetic construct
  source 1..9: note = Seed: VVGADGVGK (KRAS G12D)
MVGMDGVGL

SEQ ID NO: 11258 - protein, 9 aa, synthetic construct
  source 1..9: note = Seed: VVGADGVGK (KRAS G12D)
MVGMDGVGM

SEQ ID NO: 11259 - protein, 9 aa, synthetic construct
  source 1..9: note = Seed: VVGADGVGK (KRAS G12D)
MVGMDGVGS

SEQ ID NO: 11260 - protein, 9 aa, synthetic construct
  source 1..9: note = Seed: VVGADGVGK (KRAS G12D)
MVGMDGVGT

SEQ ID NO: 11261 - protein, 9 aa, synthetic construct
  source 1..9: note = Seed: VVGADGVGK (KRAS G12D)
MVGMDGVGV

SEQ ID NO: 11262 - protein, 9 aa, synthetic construct
  source 1..9: note = Seed: VVGADGVGK (KRAS G12D)
MVGMDKVGR

SEQ ID NO: 11263 - protein, 9 aa, synthetic construct
  source 1..9: note = Seed: VVGADGVGK (KRAS G12D)
MVGMDPVGA

SEQ ID NO: 11264 - protein, 9 aa, synthetic construct
  source 1..9: note = Seed: VVGADGVGK (KRAS G12D)
MVGMDPVGI

SEQ ID NO: 11265 - protein, 9 aa, synthetic construct
  source 1..9: note = Seed: VVGADGVGK (KRAS G12D)
MVGMDPVGL

SEQ ID NO: 11266 - protein, 9 aa, synthetic construct
  source 1..9: note = Seed: VVGADGVGK (KRAS G12D)
MVGMDPVGM

SEQ ID NO: 11267 - protein, 9 aa, synthetic construct
  source 1..9: note = Seed: VVGADGVGK (KRAS G12D)
MVGMDPVGT

SEQ ID NO: 11268 - protein, 9 aa, synthetic construct
  source 1..9: note = Seed: VVGADGVGK (KRAS G12D)
MVGMDPVGV

SEQ ID NO: 11269 - protein, 9 aa, synthetic construct
  source 1..9: note = Seed: VVGADGVGK (KRAS G12D)
MVGMDRVGK

SEQ ID NO: 11270 - protein, 9 aa, synthetic construct
  source 1..9: note = Seed: VVGADGVGK (KRAS G12D)
MVGMDRVGR

SEQ ID NO: 11271 - protein, 9 aa, synthetic construct
  source 1..9: note = Seed: VVGADGVGK (KRAS G12D)
MVGMDRVGY

SEQ ID NO: 11272 - protein, 9 aa, synthetic construct
  source 1..9: note = Seed: VVGADGVGK (KRAS G12D)
MVGMDSVGA

SEQ ID NO: 11273 - protein, 9 aa, synthetic construct
  source 1..9: note = Seed: VVGADGVGK (KRAS G12D)
MVGMDSVGI

SEQ ID NO: 11274 - protein, 9 aa, synthetic construct
  source 1..9: note = Seed: VVGADGVGK (KRAS G12D)
MVGMDSVGL

SEQ ID NO: 11275 - protein, 9 aa, synthetic construct
  source 1..9: note = Seed: VVGADGVGK (KRAS G12D)
MVGMDSVGS

SEQ ID NO: 11276 - protein, 9 aa, synthetic construct
  source 1..9: note = Seed: VVGADGVGK (KRAS G12D)
MVGMDSVGT

SEQ ID NO: 11277 - protein, 9 aa, synthetic construct
  source 1..9: note = Seed: VVGADGVGK (KRAS G12D)
MVGMDSVGV

SEQ ID NO: 11278 - protein, 9 aa, synthetic construct
  source 1..9: note = Seed: VVGADGVGK (KRAS G12D)
MVGMDTVGA

SEQ ID NO: 11279 - protein, 9 aa, synthetic construct
  source 1..9: note = Seed: VVGADGVGK (KRAS G12D)
MVGQDAVGI

SEQ ID NO: 11280 - protein, 9 aa, synthetic construct
  source 1..9: note = Seed: VVGADGVGK (KRAS G12D)
MVGQDAVGL

SEQ ID NO: 11281 - protein, 9 aa, synthetic construct
  source 1..9: note = Seed: VVGADGVGK (KRAS G12D)
MVGQDAVGV

SEQ ID NO: 11282 - protein, 9 aa, synthetic construct
  source 1..9: note = Seed: VVGADGVGK (KRAS G12D)
MVGQDRVGR

SEQ ID NO: 11283 - protein, 9 aa, synthetic construct
  source 1..9: note = Seed: VVGADGVGK (KRAS G12D)
MVGRDAVGR

SEQ ID NO: 11284 - protein, 9 aa, synthetic construct
  source 1..9: note = Seed: VVGADGVGK (KRAS G12D)
MVGRDKVGF

SEQ ID NO: 11285 - protein, 9 aa, synthetic construct
  source 1..9: note = Seed: VVGADGVGK (KRAS G12D)
MVGRDKVGI

SEQ ID NO: 11286 - protein, 9 aa, synthetic construct
  source 1..9: note = Seed: VVGADGVGK (KRAS G12D)
MVGRDKVGL

SEQ ID NO: 11287 - protein, 9 aa, synthetic construct
  source 1..9: note = Seed: VVGADGVGK (KRAS G12D)
MVGRDKVGM

SEQ ID NO: 11288 - protein, 9 aa, synthetic construct
  source 1..9: note = Seed: VVGADGVGK (KRAS G12D)
MVGRDKVGR

SEQ ID NO: 11289 - protein, 9 aa, synthetic construct
  source 1..9: note = Seed: VVGADGVGK (KRAS G12D)
MVGRDKVGV

SEQ ID NO: 11290 - protein, 9 aa, synthetic construct
  source 1..9: note = Seed: VVGADGVGK (KRAS G12D)
MVGRDKVGY

SEQ ID NO: 11291 - protein, 9 aa, synthetic construct
  source 1..9: note = Seed: VVGADGVGK (KRAS G12D)
MVGRDPVGR

SEQ ID NO: 11292 - protein, 9 aa, synthetic construct
  source 1..9: note = Seed: VVGADGVGK (KRAS G12D)
MVGRDRVGA

SEQ ID NO: 11293 - protein, 9 aa, synthetic construct
  source 1..9: note = Seed: VVGADGVGK (KRAS G12D)
MVGRDRVGF

SEQ ID NO: 11294 - protein, 9 aa, synthetic construct
  source 1..9: note = Seed: VVGADGVGK (KRAS G12D)
MVGRDRVGH

SEQ ID NO: 11295 - protein, 9 aa, synthetic construct
  source 1..9: note = Seed: VVGADGVGK (KRAS G12D)
MVGRDRVGI

SEQ ID NO: 11296 - protein, 9 aa, synthetic construct
  source 1..9: note = Seed: VVGADGVGK (KRAS G12D)
MVGRDRVGK

SEQ ID NO: 11297 - protein, 9 aa, synthetic construct
  source 1..9: note = Seed: VVGADGVGK (KRAS G12D)
MVGRDRVGL

SEQ ID NO: 11298 - protein, 9 aa, synthetic construct
  source 1..9: note = Seed: VVGADGVGK (KRAS G12D)
MVGRDRVGM

SEQ ID NO: 11299 - protein, 9 aa, synthetic construct
  source 1..9: note = Seed: VVGADGVGK (KRAS G12D)
MVGRDRVGQ

SEQ ID NO: 11300 - protein, 9 aa, synthetic construct
  source 1..9: note = Seed: VVGADGVGK (KRAS G12D)
MVGRDRVGR

SEQ ID NO: 11301 - protein, 9 aa, synthetic construct
  source 1..9: note = Seed: VVGADGVGK (KRAS G12D)
MVGRDRVGS

SEQ ID NO: 11302 - protein, 9 aa, synthetic construct
  source 1..9: note = Seed: VVGADGVGK (KRAS G12D)
MVGRDRVGT

SEQ ID NO: 11303 - protein, 9 aa, synthetic construct
  source 1..9: note = Seed: VVGADGVGK (KRAS G12D)
MVGRDRVGV

SEQ ID NO: 11304 - protein, 9 aa, synthetic construct
  source 1..9: note = Seed: VVGADGVGK (KRAS G12D)
MVGRDRVGY

SEQ ID NO: 11305 - protein, 9 aa, synthetic construct
  source 1..9: note = Seed: VVGADGVGK (KRAS G12D)
MVGRDVVGR

SEQ ID NO: 11306 - protein, 9 aa, synthetic construct
  source 1..9: note = Seed: VVGADGVGK (KRAS G12D)
MVGSDIVGA

SEQ ID NO: 11307 - protein, 9 aa, synthetic construct
  source 1..9: note = Seed: VVGADGVGK (KRAS G12D)
MVGSDRVGR

SEQ ID NO: 11308 - protein, 9 aa, synthetic construct
  source 1..9: note = Seed: VVGADGVGK (KRAS G12D)
MVGSDRVGY

SEQ ID NO: 11309 - protein, 9 aa, synthetic construct
  source 1..9: note = Seed: VVGADGVGK (KRAS G12D)
MVGTDRVGR

SEQ ID NO: 11310 - protein, 9 aa, synthetic construct
  source 1..9: note = Seed: VVGADGVGK (KRAS G12D)
MVGVDKVGR

SEQ ID NO: 11311 - protein, 9 aa, synthetic construct
  source 1..9: note = Seed: VVGADGVGK (KRAS G12D)
MVGVDKVGY

SEQ ID NO: 11312 - protein, 9 aa, synthetic construct
  source 1..9: note = Seed: VVGADGVGK (KRAS G12D)
MVGVDRVGK

SEQ ID NO: 11313 - protein, 9 aa, synthetic construct
  source 1..9: note = Seed: VVGADGVGK (KRAS G12D)
MVGVDRVGR

SEQ ID NO: 11314 - protein, 9 aa, synthetic construct
  source 1..9: note = Seed: VVGADGVGK (KRAS G12D)
MVGVDRVGY

SEQ ID NO: 11315 - protein, 9 aa, synthetic construct
  source 1..9: note = Seed: VVGADGVGK (KRAS G12D)
MVGWDKVGR

SEQ ID NO: 11316 - protein, 9 aa, synthetic construct
  source 1..9: note = Seed: VVGADGVGK (KRAS G12D)
MVGWDRVGK

SEQ ID NO: 11317 - protein, 9 aa, synthetic construct
  source 1..9: note = Seed: VVGADGVGK (KRAS G12D)
MVGWDRVGR

SEQ ID NO: 11318 - protein, 9 aa, synthetic construct
  source 1..9: note = Seed: VVGADGVGK (KRAS G12D)
MVGWDRVGY

SEQ ID NO: 11319 - protein, 9 aa, synthetic construct
  source 1..9: note = Seed: VVGADGVGK (KRAS G12D)
MVGYDRVGR

SEQ ID NO: 11320 - protein, 9 aa, synthetic construct
  source 1..9: note = Seed: VVGADGVGK (KRAS G12D)
NVGADAVGA

SEQ ID NO: 11321 - protein, 9 aa, synthetic construct
  source 1..9: note = Seed: VVGADGVGK (KRAS G12D)
NVGADAVGS

SEQ ID NO: 11322 - protein, 9 aa, synthetic construct
  source 1..9: note = Seed: VVGADGVGK (KRAS G12D)
NVGADIVGA

SEQ ID NO: 11323 - protein, 9 aa, synthetic construct
  source 1..9: note = Seed: VVGADGVGK (KRAS G12D)
NVGADIVGS

SEQ ID NO: 11324 - protein, 9 aa, synthetic construct
  source 1..9: note = Seed: VVGADGVGK (KRAS G12D)
NVGADIVGV

SEQ ID NO: 11325 - protein, 9 aa, synthetic construct
  source 1..9: note = Seed: VVGADGVGK (KRAS G12D)
NVGADLVGA

SEQ ID NO: 11326 - protein, 9 aa, synthetic construct
  source 1..9: note = Seed: VVGADGVGK (KRAS G12D)
NVGADLVGS

SEQ ID NO: 11327 - protein, 9 aa, synthetic construct
  source 1..9: note = Seed: VVGADGVGK (KRAS G12D)
NVGADMVGA

SEQ ID NO: 11328 - protein, 9 aa, synthetic construct
  source 1..9: note = Seed: VVGADGVGK (KRAS G12D)
NVGADVVGA

SEQ ID NO: 11329 - protein, 9 aa, synthetic construct
  source 1..9: note = Seed: VVGADGVGK (KRAS G12D)
NVGADVVGS

SEQ ID NO: 11330 - protein, 9 aa, synthetic construct
  source 1..9: note = Seed: VVGADGVGK (KRAS G12D)
NVGADVVGV

SEQ ID NO: 11331 - protein, 9 aa, synthetic construct
  source 1..9: note = Seed: VVGADGVGK (KRAS G12D)
NVGGDIVGA

SEQ ID NO: 11332 - protein, 9 aa, synthetic construct
  source 1..9: note = Seed: VVGADGVGK (KRAS G12D)
NVGSDAVGA

SEQ ID NO: 11333 - protein, 9 aa, synthetic construct
  source 1..9: note = Seed: VVGADGVGK (KRAS G12D)
NVGSDIVGA

SEQ ID NO: 11334 - protein, 9 aa, synthetic construct
  source 1..9: note = Seed: VVGADGVGK (KRAS G12D)
NVGSDIVGS

SEQ ID NO: 11335 - protein, 9 aa, synthetic construct
  source 1..9: note = Seed: VVGADGVGK (KRAS G12D)
NVGSDVVGA

SEQ ID NO: 11336 - protein, 9 aa, synthetic construct
  source 1..9: note = Seed: VVGADGVGK (KRAS G12D)
NVGSDVVGS

SEQ ID NO: 11337 - protein, 9 aa, synthetic construct
  source 1..9: note = Seed: VVGADGVGK (KRAS G12D)
VVGADAVGA

SEQ ID NO: 11338 - protein, 9 aa, synthetic construct
  source 1..9: note = Seed: VVGADGVGK (KRAS G12D)
VVGADAVGI

SEQ ID NO: 11339 - protein, 9 aa, synthetic construct
  source 1..9: note = Seed: VVGADGVGK (KRAS G12D)
VVGADAVGL

SEQ ID NO: 11340 - protein, 9 aa, synthetic construct
  source 1..9: note = Seed: VVGADGVGK (KRAS G12D)
VVGADAVGV

SEQ ID NO: 11341 - protein, 9 aa, synthetic construct
  source 1..9: note = Seed: VVGADGVGK (KRAS G12D)
VVGADKVGR

SEQ ID NO: 11342 - protein, 9 aa, synthetic construct
  source 1..9: note = Seed: VVGADGVGK (KRAS G12D)
VVGADRVGK

SEQ ID NO: 11343 - protein, 9 aa, synthetic construct
  source 1..9: note = Seed: VVGADGVGK (KRAS G12D)
VVGADRVGR

SEQ ID NO: 11344 - protein, 9 aa, synthetic construct
  source 1..9: note = Seed: VVGADGVGK (KRAS G12D)
VVGADRVGY

SEQ ID NO: 11345 - protein, 9 aa, synthetic construct
  source 1..9: note = Seed: VVGADGVGK (KRAS G12D)
VVGFDKVGR

SEQ ID NO: 11346 - protein, 9 aa, synthetic construct
  source 1..9: note = Seed: VVGADGVGK (KRAS G12D)
VVGFDKVGY

SEQ ID NO: 11347 - protein, 9 aa, synthetic construct
  source 1..9: note = Seed: VVGADGVGK (KRAS G12D)
VVGFDRVGK

SEQ ID NO: 11348 - protein, 9 aa, synthetic construct
  source 1..9: note = Seed: VVGADGVGK (KRAS G12D)
VVGFDRVGR

SEQ ID NO: 11349 - protein, 9 aa, synthetic construct
  source 1..9: note = Seed: VVGADGVGK (KRAS G12D)
VVGFDRVGY

SEQ ID NO: 11350 - protein, 9 aa, synthetic construct
  source 1..9: note = Seed: VVGADGVGK (KRAS G12D)
VVGHDAVGR

SEQ ID NO: 11351 - protein, 9 aa, synthetic construct
  source 1..9: note = Seed: VVGADGVGK (KRAS G12D)
VVGHDKVGR

SEQ ID NO: 11352 - protein, 9 aa, synthetic construct
  source 1..9: note = Seed: VVGADGVGK (KRAS G12D)
VVGHDRVGF

SEQ ID NO: 11353 - protein, 9 aa, synthetic construct
  source 1..9: note = Seed: VVGADGVGK (KRAS G12D)
VVGHDRVGI

SEQ ID NO: 11354 - protein, 9 aa, synthetic construct
  source 1..9: note = Seed: VVGADGVGK (KRAS G12D)
VVGHDRVGK

SEQ ID NO: 11355 - protein, 9 aa, synthetic construct
  source 1..9: note = Seed: VVGADGVGK (KRAS G12D)
VVGHDRVGL

SEQ ID NO: 11356 - protein, 9 aa, synthetic construct
  source 1..9: note = Seed: VVGADGVGK (KRAS G12D)
VVGHDRVGM

SEQ ID NO: 11357 - protein, 9 aa, synthetic construct
  source 1..9: note = Seed: VVGADGVGK (KRAS G12D)
VVGHDRVGR

SEQ ID NO: 11358 - protein, 9 aa, synthetic construct
  source 1..9: note = Seed: VVGADGVGK (KRAS G12D)
VVGHDRVGY

SEQ ID NO: 11359 - protein, 9 aa, synthetic construct
  source 1..9: note = Seed: VVGADGVGK (KRAS G12D)
VVGHDVVGR

SEQ ID NO: 11360 - protein, 9 aa, synthetic construct
  source 1..9: note = Seed: VVGADGVGK (KRAS G12D)
VVGIDAVGA

SEQ ID NO: 11361 - protein, 9 aa, synthetic construct
  source 1..9: note = Seed: VVGADGVGK (KRAS G12D)
VVGIDAVGI

SEQ ID NO: 11362 - protein, 9 aa, synthetic construct
  source 1..9: note = Seed: VVGADGVGK (KRAS G12D)
VVGIDAVGL

SEQ ID NO: 11363 - protein, 9 aa, synthetic construct
  source 1..9: note = Seed: VVGADGVGK (KRAS G12D)
VVGIDAVGV

SEQ ID NO: 11364 - protein, 9 aa, synthetic construct
  source 1..9: note = Seed: VVGADGVGK (KRAS G12D)
VVGIDKVGK

SEQ ID NO: 11365 - protein, 9 aa, synthetic construct
  source 1..9: note = Seed: VVGADGVGK (KRAS G12D)
VVGIDKVGR

SEQ ID NO: 11366 - protein, 9 aa, synthetic construct
  source 1..9: note = Seed: VVGADGVGK (KRAS G12D)
VVGIDKVGY

SEQ ID NO: 11367 - protein, 9 aa, synthetic construct
  source 1..9: note = Seed: VVGADGVGK (KRAS G12D)
VVGIDRVGA

SEQ ID NO: 11368 - protein, 9 aa, synthetic construct
  source 1..9: note = Seed: VVGADGVGK (KRAS G12D)
VVGIDRVGF

SEQ ID NO: 11369 - protein, 9 aa, synthetic construct
  source 1..9: note = Seed: VVGADGVGK (KRAS G12D)
VVGIDRVGH

SEQ ID NO: 11370 - protein, 9 aa, synthetic construct
  source 1..9: note = Seed: VVGADGVGK (KRAS G12D)
VVGIDRVGK

SEQ ID NO: 11371 - protein, 9 aa, synthetic construct
  source 1..9: note = Seed: VVGADGVGK (KRAS G12D)
VVGIDRVGL

SEQ ID NO: 11372 - protein, 9 aa, synthetic construct
  source 1..9: note = Seed: VVGADGVGK (KRAS G12D)
VVGIDRVGM

SEQ ID NO: 11373 - protein, 9 aa, synthetic construct
  source 1..9: note = Seed: VVGADGVGK (KRAS G12D)
VVGIDRVGR

SEQ ID NO: 11374 - protein, 9 aa, synthetic construct
  source 1..9: note = Seed: VVGADGVGK (KRAS G12D)
VVGIDRVGV

SEQ ID NO: 11375 - protein, 9 aa, synthetic construct
  source 1..9: note = Seed: VVGADGVGK (KRAS G12D)
VVGIDRVGY

SEQ ID NO: 11376 - protein, 9 aa, synthetic construct
  source 1..9: note = Seed: VVGADGVGK (KRAS G12D)
VVGKDRVGF

SEQ ID NO: 11377 - protein, 9 aa, synthetic construct
  source 1..9: note = Seed: VVGADGVGK (KRAS G12D)
VVGKDRVGI

SEQ ID NO: 11378 - protein, 9 aa, synthetic construct
  source 1..9: note = Seed: VVGADGVGK (KRAS G12D)
VVGKDRVGL

SEQ ID NO: 11379 - protein, 9 aa, synthetic construct
  source 1..9: note = Seed: VVGADGVGK (KRAS G12D)
VVGKDRVGM

SEQ ID NO: 11380 - protein, 9 aa, synthetic construct
  source 1..9: note = Seed: VVGADGVGK (KRAS G12D)
VVGKDRVGR

SEQ ID NO: 11381 - protein, 9 aa, synthetic construct
  source 1..9: note = Seed: VVGADGVGK (KRAS G12D)
VVGKDRVGV

SEQ ID NO: 11382 - protein, 9 aa, synthetic construct
  source 1..9: note = Seed: VVGADGVGK (KRAS G12D)
VVGKDRVGY

SEQ ID NO: 11383 - protein, 9 aa, synthetic construct
  source 1..9: note = Seed: VVGADGVGK (KRAS G12D)
VVGLDAVGA

SEQ ID NO: 11384 - protein, 9 aa, synthetic construct
  source 1..9: note = Seed: VVGADGVGK (KRAS G12D)
VVGLDAVGG

SEQ ID NO: 11385 - protein, 9 aa, synthetic construct
  source 1..9: note = Seed: VVGADGVGK (KRAS G12D)
VVGLDAVGI

SEQ ID NO: 11386 - protein, 9 aa, synthetic construct
  source 1..9: note = Seed: VVGADGVGK (KRAS G12D)
VVGLDAVGL

SEQ ID NO: 11387 - protein, 9 aa, synthetic construct
  source 1..9: note = Seed: VVGADGVGK (KRAS G12D)
VVGLDAVGM

SEQ ID NO: 11388 - protein, 9 aa, synthetic construct
  source 1..9: note = Seed: VVGADGVGK (KRAS G12D)
VVGLDAVGS

SEQ ID NO: 11389 - protein, 9 aa, synthetic construct
  source 1..9: note = Seed: VVGADGVGK (KRAS G12D)
VVGLDAVGT

SEQ ID NO: 11390 - protein, 9 aa, synthetic construct
  source 1..9: note = Seed: VVGADGVGK (KRAS G12D)
VVGLDAVGV

SEQ ID NO: 11391 - protein, 9 aa, synthetic construct
  source 1..9: note = Seed: VVGADGVGK (KRAS G12D)
VVGLDGVGA

SEQ ID NO: 11392 - protein, 9 aa, synthetic construct
  source 1..9: note = Seed: VVGADGVGK (KRAS G12D)
VVGLDGVGI

SEQ ID NO: 11393 - protein, 9 aa, synthetic construct
  source 1..9: note = Seed: VVGADGVGK (KRAS G12D)
VVGLDGVGL

SEQ ID NO: 11394 - protein, 9 aa, synthetic construct
  source 1..9: note = Seed: VVGADGVGK (KRAS G12D)
VVGLDGVGM

SEQ ID NO: 11395 - protein, 9 aa, synthetic construct
  source 1..9: note = Seed: VVGADGVGK (KRAS G12D)
VVGLDGVGS

SEQ ID NO: 11396 - protein, 9 aa, synthetic construct
  source 1..9: note = Seed: VVGADGVGK (KRAS G12D)
VVGLDGVGT

SEQ ID NO: 11397 - protein, 9 aa, synthetic construct
  source 1..9: note = Seed: VVGADGVGK (KRAS G12D)
VVGLDGVGV

SEQ ID NO: 11398 - protein, 9 aa, synthetic construct
  source 1..9: note = Seed: VVGADGVGK (KRAS G12D)
VVGLDKVGR

SEQ ID NO: 11399 - protein, 9 aa, synthetic construct
  source 1..9: note = Seed: VVGADGVGK (KRAS G12D)
VVGLDNVGA

SEQ ID NO: 11400 - protein, 9 aa, synthetic construct
  source 1..9: note = Seed: VVGADGVGK (KRAS G12D)
VVGLDNVGV

SEQ ID NO: 11401 - protein, 9 aa, synthetic construct
  source 1..9: note = Seed: VVGADGVGK (KRAS G12D)
VVGLDPVGA

SEQ ID NO: 11402 - protein, 9 aa, synthetic construct
  source 1..9: note = Seed: VVGADGVGK (KRAS G12D)
VVGLDPVGI

SEQ ID NO: 11403 - protein, 9 aa, synthetic construct
  source 1..9: note = Seed: VVGADGVGK (KRAS G12D)
VVGLDPVGL

SEQ ID NO: 11404 - protein, 9 aa, synthetic construct
  source 1..9: note = Seed: VVGADGVGK (KRAS G12D)
VVGLDPVGM

SEQ ID NO: 11405 - protein, 9 aa, synthetic construct
  source 1..9: note = Seed: VVGADGVGK (KRAS G12D)
VVGLDPVGS

SEQ ID NO: 11406 - protein, 9 aa, synthetic construct
  source 1..9: note = Seed: VVGADGVGK (KRAS G12D)
VVGLDPVGT

SEQ ID NO: 11407 - protein, 9 aa, synthetic construct
  source 1..9: note = Seed: VVGADGVGK (KRAS G12D)
VVGLDPVGV

SEQ ID NO: 11408 - protein, 9 aa, synthetic construct
  source 1..9: note = Seed: VVGADGVGK (KRAS G12D)
VVGLDRVGK

SEQ ID NO: 11409 - protein, 9 aa, synthetic construct
  source 1..9: note = Seed: VVGADGVGK (KRAS G12D)
VVGLDRVGR

SEQ ID NO: 11410 - protein, 9 aa, synthetic construct
  source 1..9: note = Seed: VVGADGVGK (KRAS G12D)
VVGLDRVGY

SEQ ID NO: 11411 - protein, 9 aa, synthetic construct
  source 1..9: note = Seed: VVGADGVGK (KRAS G12D)
VVGLDSVGA

SEQ ID NO: 11412 - protein, 9 aa, synthetic construct
  source 1..9: note = Seed: VVGADGVGK (KRAS G12D)
VVGLDSVGI

SEQ ID NO: 11413 - protein, 9 aa, synthetic construct
  source 1..9: note = Seed: VVGADGVGK (KRAS G12D)
VVGLDSVGL

SEQ ID NO: 11414 - protein, 9 aa, synthetic construct
  source 1..9: note = Seed: VVGADGVGK (KRAS G12D)
VVGLDSVGM

SEQ ID NO: 11415 - protein, 9 aa, synthetic construct
  source 1..9: note = Seed: VVGADGVGK (KRAS G12D)
VVGLDSVGS

SEQ ID NO: 11416 - protein, 9 aa, synthetic construct
  source 1..9: note = Seed: VVGADGVGK (KRAS G12D)
VVGLDSVGT

SEQ ID NO: 11417 - protein, 9 aa, synthetic construct
  source 1..9: note = Seed: VVGADGVGK (KRAS G12D)
VVGLDSVGV

SEQ ID NO: 11418 - protein, 9 aa, synthetic construct
  source 1..9: note = Seed: VVGADGVGK (KRAS G12D)
VVGMDAVGA

SEQ ID NO: 11419 - protein, 9 aa, synthetic construct
  source 1..9: note = Seed: VVGADGVGK (KRAS G12D)
VVGMDAVGI

SEQ ID NO: 11420 - protein, 9 aa, synthetic construct
  source 1..9: note = Seed: VVGADGVGK (KRAS G12D)
VVGMDAVGL

SEQ ID NO: 11421 - protein, 9 aa, synthetic construct
  source 1..9: note = Seed: VVGADGVGK (KRAS G12D)
VVGMDAVGM

SEQ ID NO: 11422 - protein, 9 aa, synthetic construct
  source 1..9: note = Seed: VVGADGVGK (KRAS G12D)
VVGMDAVGS

SEQ ID NO: 11423 - protein, 9 aa, synthetic construct
  source 1..9: note = Seed: VVGADGVGK (KRAS G12D)
VVGMDAVGT

SEQ ID NO: 11424 - protein, 9 aa, synthetic construct
  source 1..9: note = Seed: VVGADGVGK (KRAS G12D)
VVGMDAVGV

SEQ ID NO: 11425 - protein, 9 aa, synthetic construct
  source 1..9: note = Seed: VVGADGVGK (KRAS G12D)
VVGMDGVGA

SEQ ID NO: 11426 - protein, 9 aa, synthetic construct
  source 1..9: note = Seed: VVGADGVGK (KRAS G12D)
VVGMDGVGI

SEQ ID NO: 11427 - protein, 9 aa, synthetic construct
  source 1..9: note = Seed: VVGADGVGK (KRAS G12D)
VVGMDGVGL

SEQ ID NO: 11428 - protein, 9 aa, synthetic construct
  source 1..9: note = Seed: VVGADGVGK (KRAS G12D)
VVGMDGVGM

SEQ ID NO: 11429 - protein, 9 aa, synthetic construct
  source 1..9: note = Seed: VVGADGVGK (KRAS G12D)
VVGMDGVGS

SEQ ID NO: 11430 - protein, 9 aa, synthetic construct
  source 1..9: note = Seed: VVGADGVGK (KRAS G12D)
VVGMDGVGT

SEQ ID NO: 11431 - protein, 9 aa, synthetic construct
  source 1..9: note = Seed: VVGADGVGK (KRAS G12D)
VVGMDGVGV

SEQ ID NO: 11432 - protein, 9 aa, synthetic construct
  source 1..9: note = Seed: VVGADGVGK (KRAS G12D)
VVGMDKVGR

SEQ ID NO: 11433 - protein, 9 aa, synthetic construct
  source 1..9: note = Seed: VVGADGVGK (KRAS G12D)
VVGMDPVGA

SEQ ID NO: 11434 - protein, 9 aa, synthetic construct
  source 1..9: note = Seed: VVGADGVGK (KRAS G12D)
VVGMDPVGI

SEQ ID NO: 11435 - protein, 9 aa, synthetic construct
  source 1..9: note = Seed: VVGADGVGK (KRAS G12D)
VVGMDPVGL

SEQ ID NO: 11436 - protein, 9 aa, synthetic construct
  source 1..9: note = Seed: VVGADGVGK (KRAS G12D)
VVGMDPVGM

SEQ ID NO: 11437 - protein, 9 aa, synthetic construct
  source 1..9: note = Seed: VVGADGVGK (KRAS G12D)
VVGMDPVGV

SEQ ID NO: 11438 - protein, 9 aa, synthetic construct
  source 1..9: note = Seed: VVGADGVGK (KRAS G12D)
VVGMDRVGK

SEQ ID NO: 11439 - protein, 9 aa, synthetic construct
  source 1..9: note = Seed: VVGADGVGK (KRAS G12D)
VVGMDRVGM

SEQ ID NO: 11440 - protein, 9 aa, synthetic construct
  source 1..9: note = Seed: VVGADGVGK (KRAS G12D)
VVGMDRVGR

SEQ ID NO: 11441 - protein, 9 aa, synthetic construct
  source 1..9: note = Seed: VVGADGVGK (KRAS G12D)
VVGMDRVGY

SEQ ID NO: 11442 - protein, 9 aa, synthetic construct
  source 1..9: note = Seed: VVGADGVGK (KRAS G12D)
VVGMDSVGA

SEQ ID NO: 11443 - protein, 9 aa, synthetic construct
  source 1..9: note = Seed: VVGADGVGK (KRAS G12D)
VVGMDSVGI

SEQ ID NO: 11444 - protein, 9 aa, synthetic construct
  source 1..9: note = Seed: VVGADGVGK (KRAS G12D)
VVGMDSVGL

SEQ ID NO: 11445 - protein, 9 aa, synthetic construct
  source 1..9: note = Seed: VVGADGVGK (KRAS G12D)
VVGMDSVGT

SEQ ID NO: 11446 - protein, 9 aa, synthetic construct
  source 1..9: note = Seed: VVGADGVGK (KRAS G12D)
VVGMDSVGV

SEQ ID NO: 11447 - protein, 9 aa, synthetic construct
  source 1..9: note = Seed: VVGADGVGK (KRAS G12D)
VVGQDAVGL

SEQ ID NO: 11448 - protein, 9 aa, synthetic construct
  source 1..9: note = Seed: VVGADGVGK (KRAS G12D)
VVGQDAVGV

SEQ ID NO: 11449 - protein, 9 aa, synthetic construct
  source 1..9: note = Seed: VVGADGVGK (KRAS G12D)
VVGQDRVGR

SEQ ID NO: 11450 - protein, 9 aa, synthetic construct
  source 1..9: note = Seed: VVGADGVGK (KRAS G12D)
VVGRDAVGR

SEQ ID NO: 11451 - protein, 9 aa, synthetic construct
  source 1..9: note = Seed: VVGADGVGK (KRAS G12D)
VVGRDKVGF

SEQ ID NO: 11452 - protein, 9 aa, synthetic construct
  source 1..9: note = Seed: VVGADGVGK (KRAS G12D)
VVGRDKVGL

SEQ ID NO: 11453 - protein, 9 aa, synthetic construct
  source 1..9: note = Seed: VVGADGVGK (KRAS G12D)
VVGRDKVGR

SEQ ID NO: 11454 - protein, 9 aa, synthetic construct
  source 1..9: note = Seed: VVGADGVGK (KRAS G12D)
VVGRDKVGY

SEQ ID NO: 11455 - protein, 9 aa, synthetic construct
  source 1..9: note = Seed: VVGADGVGK (KRAS G12D)
VVGRDRVGA

SEQ ID NO: 11456 - protein, 9 aa, synthetic construct
  source 1..9: note = Seed: VVGADGVGK (KRAS G12D)
VVGRDRVGF

SEQ ID NO: 11457 - protein, 9 aa, synthetic construct
  source 1..9: note = Seed: VVGADGVGK (KRAS G12D)
VVGRDRVGH

SEQ ID NO: 11458 - protein, 9 aa, synthetic construct
  source 1..9: note = Seed: VVGADGVGK (KRAS G12D)
VVGRDRVGI

SEQ ID NO: 11459 - protein, 9 aa, synthetic construct
  source 1..9: note = Seed: VVGADGVGK (KRAS G12D)
VVGRDRVGK

SEQ ID NO: 11460 - protein, 9 aa, synthetic construct
  source 1..9: note = Seed: VVGADGVGK (KRAS G12D)
VVGRDRVGL

SEQ ID NO: 11461 - protein, 9 aa, synthetic construct
  source 1..9: note = Seed: VVGADGVGK (KRAS G12D)
VVGRDRVGM

SEQ ID NO: 11462 - protein, 9 aa, synthetic construct
  source 1..9: note = Seed: VVGADGVGK (KRAS G12D)
VVGRDRVGR

SEQ ID NO: 11463 - protein, 9 aa, synthetic construct
  source 1..9: note = Seed: VVGADGVGK (KRAS G12D)
VVGRDRVGV

SEQ ID NO: 11464 - protein, 9 aa, synthetic construct
  source 1..9: note = Seed: VVGADGVGK (KRAS G12D)
VVGRDRVGW

SEQ ID NO: 11465 - protein, 9 aa, synthetic construct
  source 1..9: note = Seed: VVGADGVGK (KRAS G12D)
VVGRDRVGY

SEQ ID NO: 11466 - protein, 9 aa, synthetic construct
  source 1..9: note = Seed: VVGADGVGK (KRAS G12D)
VVGSDRVGR

SEQ ID NO: 11467 - protein, 9 aa, synthetic construct
  source 1..9: note = Seed: VVGADGVGK (KRAS G12D)
VVGSDRVGY

SEQ ID NO: 11468 - protein, 9 aa, synthetic construct
  source 1..9: note = Seed: VVGADGVGK (KRAS G12D)
VVGTDRVGR

SEQ ID NO: 11469 - protein, 9 aa, synthetic construct
  source 1..9: note = Seed: VVGADGVGK (KRAS G12D)
VVGVDKVGR

SEQ ID NO: 11470 - protein, 9 aa, synthetic construct
  source 1..9: note = Seed: VVGADGVGK (KRAS G12D)
VVGVDKVGY

SEQ ID NO: 11471 - protein, 9 aa, synthetic construct
  source 1..9: note = Seed: VVGADGVGK (KRAS G12D)
VVGVDRVGK

SEQ ID NO: 11472 - protein, 9 aa, synthetic construct
  source 1..9: note = Seed: VVGADGVGK (KRAS G12D)
VVGVDRVGR

SEQ ID NO: 11473 - protein, 9 aa, synthetic construct
  source 1..9: note = Seed: VVGADGVGK (KRAS G12D)
VVGVDRVGY

SEQ ID NO: 11474 - protein, 9 aa, synthetic construct
  source 1..9: note = Seed: VVGADGVGK (KRAS G12D)
VVGWDKVGR

SEQ ID NO: 11475 - protein, 9 aa, synthetic construct
  source 1..9: note = Seed: VVGADGVGK (KRAS G12D)
VVGWDRVGR

SEQ ID NO: 11476 - protein, 9 aa, synthetic construct
  source 1..9: note = Seed: VVGADGVGK (KRAS G12D)
VVGWDRVGY

SEQ ID NO: 11477 - protein, 9 aa, synthetic construct
  source 1..9: note = Seed: VVGADGVGK (KRAS G12D)
VVGYDRVGR

SEQ ID NO: 11478 - protein, 9 aa, synthetic construct
  source 1..9: note = Seed: VVGADGVGK (KRAS G12D)
WVGADAVGA

SEQ ID NO: 11479 - protein, 9 aa, synthetic construct
  source 1..9: note = Seed: VVGADGVGK (KRAS G12D)
WVGADAVGG

SEQ ID NO: 11480 - protein, 9 aa, synthetic construct
  source 1..9: note = Seed: VVGADGVGK (KRAS G12D)
WVGADAVGI

SEQ ID NO: 11481 - protein, 9 aa, synthetic construct
  source 1..9: note = Seed: VVGADGVGK (KRAS G12D)
WVGADAVGL

SEQ ID NO: 11482 - protein, 9 aa, synthetic construct
  source 1..9: note = Seed: VVGADGVGK (KRAS G12D)
WVGADAVGM

SEQ ID NO: 11483 - protein, 9 aa, synthetic construct
  source 1..9: note = Seed: VVGADGVGK (KRAS G12D)
WVGADAVGS

SEQ ID NO: 11484 - protein, 9 aa, synthetic construct
  source 1..9: note = Seed: VVGADGVGK (KRAS G12D)
WVGADAVGT

SEQ ID NO: 11485 - protein, 9 aa, synthetic construct
  source 1..9: note = Seed: VVGADGVGK (KRAS G12D)
WVGADAVGV

SEQ ID NO: 11486 - protein, 9 aa, synthetic construct
  source 1..9: note = Seed: VVGADGVGK (KRAS G12D)
WVGADGVGA

SEQ ID NO: 11487 - protein, 9 aa, synthetic construct
  source 1..9: note = Seed: VVGADGVGK (KRAS G12D)
WVGADGVGI

SEQ ID NO: 11488 - protein, 9 aa, synthetic construct
  source 1..9: note = Seed: VVGADGVGK (KRAS G12D)
WVGADGVGL

SEQ ID NO: 11489 - protein, 9 aa, synthetic construct
  source 1..9: note = Seed: VVGADGVGK (KRAS G12D)
WVGADGVGV

SEQ ID NO: 11490 - protein, 9 aa, synthetic construct
  source 1..9: note = Seed: VVGADGVGK (KRAS G12D)
WVGADPVGA

SEQ ID NO: 11491 - protein, 9 aa, synthetic construct
  source 1..9: note = Seed: VVGADGVGK (KRAS G12D)
WVGADPVGI

SEQ ID NO: 11492 - protein, 9 aa, synthetic construct
  source 1..9: note = Seed: VVGADGVGK (KRAS G12D)
WVGADPVGL

SEQ ID NO: 11493 - protein, 9 aa, synthetic construct
  source 1..9: note = Seed: VVGADGVGK (KRAS G12D)
WVGADPVGM

SEQ ID NO: 11494 - protein, 9 aa, synthetic construct
  source 1..9: note = Seed: VVGADGVGK (KRAS G12D)
WVGADPVGV

SEQ ID NO: 11495 - protein, 9 aa, synthetic construct
  source 1..9: note = Seed: VVGADGVGK (KRAS G12D)
WVGADSVGA

SEQ ID NO: 11496 - protein, 9 aa, synthetic construct
  source 1..9: note = Seed: VVGADGVGK (KRAS G12D)
WVGADSVGI

SEQ ID NO: 11497 - protein, 9 aa, synthetic construct
  source 1..9: note = Seed: VVGADGVGK (KRAS G12D)
WVGADSVGL

SEQ ID NO: 11498 - protein, 9 aa, synthetic construct
  source 1..9: note = Seed: VVGADGVGK (KRAS G12D)
WVGADSVGV

SEQ ID NO: 11499 - protein, 9 aa, synthetic construct
  source 1..9: note = Seed: VVGADGVGK (KRAS G12D)
WVGEDAVGA

SEQ ID NO: 11500 - protein, 9 aa, synthetic construct
  source 1..9: note = Seed: VVGADGVGK (KRAS G12D)
WVGEDAVGV

SEQ ID NO: 11501 - protein, 9 aa, synthetic construct
  source 1..9: note = Seed: VVGADGVGK (KRAS G12D)
WVGFDAVGA

SEQ ID NO: 11502 - protein, 9 aa, synthetic construct
  source 1..9: note = Seed: VVGADGVGK (KRAS G12D)
WVGFDAVGS

SEQ ID NO: 11503 - protein, 9 aa, synthetic construct
  source 1..9: note = Seed: VVGADGVGK (KRAS G12D)
WVGFDAVGV

SEQ ID NO: 11504 - protein, 9 aa, synthetic construct
  source 1..9: note = Seed: VVGADGVGK (KRAS G12D)
WVGFDGVGA

SEQ ID NO: 11505 - protein, 9 aa, synthetic construct
  source 1..9: note = Seed: VVGADGVGK (KRAS G12D)
WVGFDPVGA

SEQ ID NO: 11506 - protein, 9 aa, synthetic construct
  source 1..9: note = Seed: VVGADGVGK (KRAS G12D)
WVGIDAVGA

SEQ ID NO: 11507 - protein, 9 aa, synthetic construct
  source 1..9: note = Seed: VVGADGVGK (KRAS G12D)
WVGIDAVGG

SEQ ID NO: 11508 - protein, 9 aa, synthetic construct
  source 1..9: note = Seed: VVGADGVGK (KRAS G12D)
WVGIDAVGI

SEQ ID NO: 11509 - protein, 9 aa, synthetic construct
  source 1..9: note = Seed: VVGADGVGK (KRAS G12D)
WVGIDAVGL

SEQ ID NO: 11510 - protein, 9 aa, synthetic construct
  source 1..9: note = Seed: VVGADGVGK (KRAS G12D)
WVGIDAVGM

SEQ ID NO: 11511 - protein, 9 aa, synthetic construct
  source 1..9: note = Seed: VVGADGVGK (KRAS G12D)
WVGIDAVGS

SEQ ID NO: 11512 - protein, 9 aa, synthetic construct
  source 1..9: note = Seed: VVGADGVGK (KRAS G12D)
WVGIDAVGT

SEQ ID NO: 11513 - protein, 9 aa, synthetic construct
  source 1..9: note = Seed: VVGADGVGK (KRAS G12D)
WVGIDAVGV

SEQ ID NO: 11514 - protein, 9 aa, synthetic construct
  source 1..9: note = Seed: VVGADGVGK (KRAS G12D)
WVGIDGVGA

SEQ ID NO: 11515 - protein, 9 aa, synthetic construct
  source 1..9: note = Seed: VVGADGVGK (KRAS G12D)
WVGIDGVGI

SEQ ID NO: 11516 - protein, 9 aa, synthetic construct
  source 1..9: note = Seed: VVGADGVGK (KRAS G12D)
WVGIDGVGL

SEQ ID NO: 11517 - protein, 9 aa, synthetic construct
  source 1..9: note = Seed: VVGADGVGK (KRAS G12D)
WVGIDGVGM

SEQ ID NO: 11518 - protein, 9 aa, synthetic construct
  source 1..9: note = Seed: VVGADGVGK (KRAS G12D)
WVGIDGVGS

SEQ ID NO: 11519 - protein, 9 aa, synthetic construct
  source 1..9: note = Seed: VVGADGVGK (KRAS G12D)
WVGIDGVGT

SEQ ID NO: 11520 - protein, 9 aa, synthetic construct
  source 1..9: note = Seed: VVGADGVGK (KRAS G12D)
WVGIDGVGV

SEQ ID NO: 11521 - protein, 9 aa, synthetic construct
  source 1..9: note = Seed: VVGADGVGK (KRAS G12D)
WVGIDNVGA

SEQ ID NO: 11522 - protein, 9 aa, synthetic construct
  source 1..9: note = Seed: VVGADGVGK (KRAS G12D)
WVGIDPVGA

SEQ ID NO: 11523 - protein, 9 aa, synthetic construct
  source 1..9: note = Seed: VVGADGVGK (KRAS G12D)
WVGIDPVGI

SEQ ID NO: 11524 - protein, 9 aa, synthetic construct
  source 1..9: note = Seed: VVGADGVGK (KRAS G12D)
WVGIDPVGL

SEQ ID NO: 11525 - protein, 9 aa, synthetic construct
  source 1..9: note = Seed: VVGADGVGK (KRAS G12D)
WVGIDPVGM

SEQ ID NO: 11526 - protein, 9 aa, synthetic construct
  source 1..9: note = Seed: VVGADGVGK (KRAS G12D)
WVGIDPVGS

SEQ ID NO: 11527 - protein, 9 aa, synthetic construct
  source 1..9: note = Seed: VVGADGVGK (KRAS G12D)
WVGIDPVGT

SEQ ID NO: 11528 - protein, 9 aa, synthetic construct
  source 1..9: note = Seed: VVGADGVGK (KRAS G12D)
WVGIDPVGV

SEQ ID NO: 11529 - protein, 9 aa, synthetic construct
  source 1..9: note = Seed: VVGADGVGK (KRAS G12D)
WVGIDSVGA

SEQ ID NO: 11530 - protein, 9 aa, synthetic construct
  source 1..9: note = Seed: VVGADGVGK (KRAS G12D)
WVGIDSVGI

SEQ ID NO: 11531 - protein, 9 aa, synthetic construct
  source 1..9: note = Seed: VVGADGVGK (KRAS G12D)
WVGIDSVGL

SEQ ID NO: 11532 - protein, 9 aa, synthetic construct
  source 1..9: note = Seed: VVGADGVGK (KRAS G12D)
WVGIDSVGS

SEQ ID NO: 11533 - protein, 9 aa, synthetic construct
  source 1..9: note = Seed: VVGADGVGK (KRAS G12D)
WVGIDSVGT

SEQ ID NO: 11534 - protein, 9 aa, synthetic construct
  source 1..9: note = Seed: VVGADGVGK (KRAS G12D)
WVGIDSVGV

SEQ ID NO: 11535 - protein, 9 aa, synthetic construct
  source 1..9: note = Seed: VVGADGVGK (KRAS G12D)
WVGIDTVGA

SEQ ID NO: 11536 - protein, 9 aa, synthetic construct
  source 1..9: note = Seed: VVGADGVGK (KRAS G12D)
WVGLDAVGA

SEQ ID NO: 11537 - protein, 9 aa, synthetic construct
  source 1..9: note = Seed: VVGADGVGK (KRAS G12D)
WVGLDAVGG

SEQ ID NO: 11538 - protein, 9 aa, synthetic construct
  source 1..9: note = Seed: VVGADGVGK (KRAS G12D)
WVGLDAVGH

SEQ ID NO: 11539 - protein, 9 aa, synthetic construct
  source 1..9: note = Seed: VVGADGVGK (KRAS G12D)
WVGLDAVGI

SEQ ID NO: 11540 - protein, 9 aa, synthetic construct
  source 1..9: note = Seed: VVGADGVGK (KRAS G12D)
WVGLDAVGL

SEQ ID NO: 11541 - protein, 9 aa, synthetic construct
  source 1..9: note = Seed: VVGADGVGK (KRAS G12D)
WVGLDAVGM

SEQ ID NO: 11542 - protein, 9 aa, synthetic construct
  source 1..9: note = Seed: VVGADGVGK (KRAS G12D)
WVGLDAVGN

SEQ ID NO: 11543 - protein, 9 aa, synthetic construct
  source 1..9: note = Seed: VVGADGVGK (KRAS G12D)
WVGLDAVGR

SEQ ID NO: 11544 - protein, 9 aa, synthetic construct
  source 1..9: note = Seed: VVGADGVGK (KRAS G12D)
WVGLDAVGS

SEQ ID NO: 11545 - protein, 9 aa, synthetic construct
  source 1..9: note = Seed: VVGADGVGK (KRAS G12D)
WVGLDAVGT

SEQ ID NO: 11546 - protein, 9 aa, synthetic construct
  source 1..9: note = Seed: VVGADGVGK (KRAS G12D)
WVGLDAVGV

SEQ ID NO: 11547 - protein, 9 aa, synthetic construct
  source 1..9: note = Seed: VVGADGVGK (KRAS G12D)
WVGLDGVGA

SEQ ID NO: 11548 - protein, 9 aa, synthetic construct
  source 1..9: note = Seed: VVGADGVGK (KRAS G12D)
WVGLDGVGG

SEQ ID NO: 11549 - protein, 9 aa, synthetic construct
  source 1..9: note = Seed: VVGADGVGK (KRAS G12D)
WVGLDGVGI

SEQ ID NO: 11550 - protein, 9 aa, synthetic construct
  source 1..9: note = Seed: VVGADGVGK (KRAS G12D)
WVGLDGVGL

SEQ ID NO: 11551 - protein, 9 aa, synthetic construct
  source 1..9: note = Seed: VVGADGVGK (KRAS G12D)
WVGLDGVGM

SEQ ID NO: 11552 - protein, 9 aa, synthetic construct
  source 1..9: note = Seed: VVGADGVGK (KRAS G12D)
WVGLDGVGN

SEQ ID NO: 11553 - protein, 9 aa, synthetic construct
  source 1..9: note = Seed: VVGADGVGK (KRAS G12D)
WVGLDGVGS

SEQ ID NO: 11554 - protein, 9 aa, synthetic construct
  source 1..9: note = Seed: VVGADGVGK (KRAS G12D)
WVGLDGVGT

SEQ ID NO: 11555 - protein, 9 aa, synthetic construct
  source 1..9: note = Seed: VVGADGVGK (KRAS G12D)
WVGLDGVGV

SEQ ID NO: 11556 - protein, 9 aa, synthetic construct
  source 1..9: note = Seed: VVGADGVGK (KRAS G12D)
WVGLDNVGA

SEQ ID NO: 11557 - protein, 9 aa, synthetic construct
  source 1..9: note = Seed: VVGADGVGK (KRAS G12D)
WVGLDNVGI

SEQ ID NO: 11558 - protein, 9 aa, synthetic construct
  source 1..9: note = Seed: VVGADGVGK (KRAS G12D)
WVGLDNVGL

SEQ ID NO: 11559 - protein, 9 aa, synthetic construct
  source 1..9: note = Seed: VVGADGVGK (KRAS G12D)
WVGLDNVGM

SEQ ID NO: 11560 - protein, 9 aa, synthetic construct
  source 1..9: note = Seed: VVGADGVGK (KRAS G12D)
WVGLDNVGS

SEQ ID NO: 11561 - protein, 9 aa, synthetic construct
  source 1..9: note = Seed: VVGADGVGK (KRAS G12D)
WVGLDNVGT

SEQ ID NO: 11562 - protein, 9 aa, synthetic construct
  source 1..9: note = Seed: VVGADGVGK (KRAS G12D)
WVGLDNVGV

SEQ ID NO: 11563 - protein, 9 aa, synthetic construct
  source 1..9: note = Seed: VVGADGVGK (KRAS G12D)
WVGLDPVGA

SEQ ID NO: 11564 - protein, 9 aa, synthetic construct
  source 1..9: note = Seed: VVGADGVGK (KRAS G12D)
WVGLDPVGG

SEQ ID NO: 11565 - protein, 9 aa, synthetic construct
  source 1..9: note = Seed: VVGADGVGK (KRAS G12D)
WVGLDPVGI

SEQ ID NO: 11566 - protein, 9 aa, synthetic construct
  source 1..9: note = Seed: VVGADGVGK (KRAS G12D)
WVGLDPVGL

SEQ ID NO: 11567 - protein, 9 aa, synthetic construct
  source 1..9: note = Seed: VVGADGVGK (KRAS G12D)
WVGLDPVGM

SEQ ID NO: 11568 - protein, 9 aa, synthetic construct
  source 1..9: note = Seed: VVGADGVGK (KRAS G12D)
WVGLDPVGN

SEQ ID NO: 11569 - protein, 9 aa, synthetic construct
  source 1..9: note = Seed: VVGADGVGK (KRAS G12D)
WVGLDPVGS

SEQ ID NO: 11570 - protein, 9 aa, synthetic construct
  source 1..9: note = Seed: VVGADGVGK (KRAS G12D)
WVGLDPVGT

SEQ ID NO: 11571 - protein, 9 aa, synthetic construct
  source 1..9: note = Seed: VVGADGVGK (KRAS G12D)
WVGLDPVGV

SEQ ID NO: 11572 - protein, 9 aa, synthetic construct
  source 1..9: note = Seed: VVGADGVGK (KRAS G12D)
WVGLDSVGA

SEQ ID NO: 11573 - protein, 9 aa, synthetic construct
  source 1..9: note = Seed: VVGADGVGK (KRAS G12D)
WVGLDSVGG

SEQ ID NO: 11574 - protein, 9 aa, synthetic construct
  source 1..9: note = Seed: VVGADGVGK (KRAS G12D)
WVGLDSVGI

SEQ ID NO: 11575 - protein, 9 aa, synthetic construct
  source 1..9: note = Seed: VVGADGVGK (KRAS G12D)
WVGLDSVGL

SEQ ID NO: 11576 - protein, 9 aa, synthetic construct
  source 1..9: note = Seed: VVGADGVGK (KRAS G12D)
WVGLDSVGM

SEQ ID NO: 11577 - protein, 9 aa, synthetic construct
  source 1..9: note = Seed: VVGADGVGK (KRAS G12D)
WVGLDSVGN

SEQ ID NO: 11578 - protein, 9 aa, synthetic construct
  source 1..9: note = Seed: VVGADGVGK (KRAS G12D)
WVGLDSVGS

SEQ ID NO: 11579 - protein, 9 aa, synthetic construct
  source 1..9: note = Seed: VVGADGVGK (KRAS G12D)
WVGLDSVGT

SEQ ID NO: 11580 - protein, 9 aa, synthetic construct
  source 1..9: note = Seed: VVGADGVGK (KRAS G12D)
WVGLDSVGV

SEQ ID NO: 11581 - protein, 9 aa, synthetic construct
  source 1..9: note = Seed: VVGADGVGK (KRAS G12D)
WVGLDTVGA

SEQ ID NO: 11582 - protein, 9 aa, synthetic construct
  source 1..9: note = Seed: VVGADGVGK (KRAS G12D)
WVGLDTVGI

SEQ ID NO: 11583 - protein, 9 aa, synthetic construct
  source 1..9: note = Seed: VVGADGVGK (KRAS G12D)
WVGLDTVGL

SEQ ID NO: 11584 - protein, 9 aa, synthetic construct
  source 1..9: note = Seed: VVGADGVGK (KRAS G12D)
WVGLDTVGM

SEQ ID NO: 11585 - protein, 9 aa, synthetic construct
  source 1..9: note = Seed: VVGADGVGK (KRAS G12D)
WVGLDTVGS

SEQ ID NO: 11586 - protein, 9 aa, synthetic construct
  source 1..9: note = Seed: VVGADGVGK (KRAS G12D)
WVGLDTVGT

SEQ ID NO: 11587 - protein, 9 aa, synthetic construct
  source 1..9: note = Seed: VVGADGVGK (KRAS G12D)
WVGLDTVGV

SEQ ID NO: 11588 - protein, 9 aa, synthetic construct
  source 1..9: note = Seed: VVGADGVGK (KRAS G12D)
WVGMDAVGA

SEQ ID NO: 11589 - protein, 9 aa, synthetic construct
  source 1..9: note = Seed: VVGADGVGK (KRAS G12D)
WVGMDAVGG

SEQ ID NO: 11590 - protein, 9 aa, synthetic construct
  source 1..9: note = Seed: VVGADGVGK (KRAS G12D)
WVGMDAVGH

SEQ ID NO: 11591 - protein, 9 aa, synthetic construct
  source 1..9: note = Seed: VVGADGVGK (KRAS G12D)
WVGMDAVGI

SEQ ID NO: 11592 - protein, 9 aa, synthetic construct
  source 1..9: note = Seed: VVGADGVGK (KRAS G12D)
WVGMDAVGL

SEQ ID NO: 11593 - protein, 9 aa, synthetic construct
  source 1..9: note = Seed: VVGADGVGK (KRAS G12D)
WVGMDAVGM

SEQ ID NO: 11594 - protein, 9 aa, synthetic construct
  source 1..9: note = Seed: VVGADGVGK (KRAS G12D)
WVGMDAVGN

SEQ ID NO: 11595 - protein, 9 aa, synthetic construct
  source 1..9: note = Seed: VVGADGVGK (KRAS G12D)
WVGMDAVGR

SEQ ID NO: 11596 - protein, 9 aa, synthetic construct
  source 1..9: note = Seed: VVGADGVGK (KRAS G12D)
WVGMDAVGS

SEQ ID NO: 11597 - protein, 9 aa, synthetic construct
  source 1..9: note = Seed: VVGADGVGK (KRAS G12D)
WVGMDAVGT

SEQ ID NO: 11598 - protein, 9 aa, synthetic construct
  source 1..9: note = Seed: VVGADGVGK (KRAS G12D)
WVGMDAVGV

SEQ ID NO: 11599 - protein, 9 aa, synthetic construct
  source 1..9: note = Seed: VVGADGVGK (KRAS G12D)
WVGMDGVGA

SEQ ID NO: 11600 - protein, 9 aa, synthetic construct
  source 1..9: note = Seed: VVGADGVGK (KRAS G12D)
WVGMDGVGG

SEQ ID NO: 11601 - protein, 9 aa, synthetic construct
  source 1..9: note = Seed: VVGADGVGK (KRAS G12D)
WVGMDGVGI

SEQ ID NO: 11602 - protein, 9 aa, synthetic construct
  source 1..9: note = Seed: VVGADGVGK (KRAS G12D)
WVGMDGVGL

SEQ ID NO: 11603 - protein, 9 aa, synthetic construct
  source 1..9: note = Seed: VVGADGVGK (KRAS G12D)
WVGMDGVGM

SEQ ID NO: 11604 - protein, 9 aa, synthetic construct
  source 1..9: note = Seed: VVGADGVGK (KRAS G12D)
WVGMDGVGN

SEQ ID NO: 11605 - protein, 9 aa, synthetic construct
  source 1..9: note = Seed: VVGADGVGK (KRAS G12D)
WVGMDGVGS

SEQ ID NO: 11606 - protein, 9 aa, synthetic construct
  source 1..9: note = Seed: VVGADGVGK (KRAS G12D)
WVGMDGVGT

SEQ ID NO: 11607 - protein, 9 aa, synthetic construct
  source 1..9: note = Seed: VVGADGVGK (KRAS G12D)
WVGMDGVGV

SEQ ID NO: 11608 - protein, 9 aa, synthetic construct
  source 1..9: note = Seed: VVGADGVGK (KRAS G12D)
WVGMDNVGA

SEQ ID NO: 11609 - protein, 9 aa, synthetic construct
  source 1..9: note = Seed: VVGADGVGK (KRAS G12D)
WVGMDNVGI

SEQ ID NO: 11610 - protein, 9 aa, synthetic construct
  source 1..9: note = Seed: VVGADGVGK (KRAS G12D)
WVGMDNVGL

SEQ ID NO: 11611 - protein, 9 aa, synthetic construct
  source 1..9: note = Seed: VVGADGVGK (KRAS G12D)
WVGMDNVGM

SEQ ID NO: 11612 - protein, 9 aa, synthetic construct
  source 1..9: note = Seed: VVGADGVGK (KRAS G12D)
WVGMDNVGS

SEQ ID NO: 11613 - protein, 9 aa, synthetic construct
  source 1..9: note = Seed: VVGADGVGK (KRAS G12D)
WVGMDNVGT

SEQ ID NO: 11614 - protein, 9 aa, synthetic construct
  source 1..9: note = Seed: VVGADGVGK (KRAS G12D)
WVGMDNVGV

SEQ ID NO: 11615 - protein, 9 aa, synthetic construct
  source 1..9: note = Seed: VVGADGVGK (KRAS G12D)
WVGMDPVGA

SEQ ID NO: 11616 - protein, 9 aa, synthetic construct
  source 1..9: note = Seed: VVGADGVGK (KRAS G12D)
WVGMDPVGI

SEQ ID NO: 11617 - protein, 9 aa, synthetic construct
  source 1..9: note = Seed: VVGADGVGK (KRAS G12D)
WVGMDPVGL

SEQ ID NO: 11618 - protein, 9 aa, synthetic construct
  source 1..9: note = Seed: VVGADGVGK (KRAS G12D)
WVGMDPVGM

SEQ ID NO: 11619 - protein, 9 aa, synthetic construct
  source 1..9: note = Seed: VVGADGVGK (KRAS G12D)
WVGMDPVGS

SEQ ID NO: 11620 - protein, 9 aa, synthetic construct
  source 1..9: note = Seed: VVGADGVGK (KRAS G12D)
WVGMDPVGT

SEQ ID NO: 11621 - protein, 9 aa, synthetic construct
  source 1..9: note = Seed: VVGADGVGK (KRAS G12D)
WVGMDPVGV

SEQ ID NO: 11622 - protein, 9 aa, synthetic construct
  source 1..9: note = Seed: VVGADGVGK (KRAS G12D)
WVGMDSVGA

SEQ ID NO: 11623 - protein, 9 aa, synthetic construct
  source 1..9: note = Seed: VVGADGVGK (KRAS G12D)
WVGMDSVGG

SEQ ID NO: 11624 - protein, 9 aa, synthetic construct
  source 1..9: note = Seed: VVGADGVGK (KRAS G12D)
WVGMDSVGI

SEQ ID NO: 11625 - protein, 9 aa, synthetic construct
  source 1..9: note = Seed: VVGADGVGK (KRAS G12D)
WVGMDSVGL

SEQ ID NO: 11626 - protein, 9 aa, synthetic construct
  source 1..9: note = Seed: VVGADGVGK (KRAS G12D)
WVGMDSVGM

SEQ ID NO: 11627 - protein, 9 aa, synthetic construct
  source 1..9: note = Seed: VVGADGVGK (KRAS G12D)
WVGMDSVGS

SEQ ID NO: 11628 - protein, 9 aa, synthetic construct
  source 1..9: note = Seed: VVGADGVGK (KRAS G12D)
WVGMDSVGT

SEQ ID NO: 11629 - protein, 9 aa, synthetic construct
  source 1..9: note = Seed: VVGADGVGK (KRAS G12D)
WVGMDSVGV

SEQ ID NO: 11630 - protein, 9 aa, synthetic construct
  source 1..9: note = Seed: VVGADGVGK (KRAS G12D)
WVGMDTVGA

SEQ ID NO: 11631 - protein, 9 aa, synthetic construct
  source 1..9: note = Seed: VVGADGVGK (KRAS G12D)
WVGMDTVGI

SEQ ID NO: 11632 - protein, 9 aa, synthetic construct
  source 1..9: note = Seed: VVGADGVGK (KRAS G12D)
WVGMDTVGL

SEQ ID NO: 11633 - protein, 9 aa, synthetic construct
  source 1..9: note = Seed: VVGADGVGK (KRAS G12D)
WVGMDTVGM

SEQ ID NO: 11634 - protein, 9 aa, synthetic construct
  source 1..9: note = Seed: VVGADGVGK (KRAS G12D)
WVGMDTVGS

SEQ ID NO: 11635 - protein, 9 aa, synthetic construct
  source 1..9: note = Seed: VVGADGVGK (KRAS G12D)
WVGMDTVGT

SEQ ID NO: 11636 - protein, 9 aa, synthetic construct
  source 1..9: note = Seed: VVGADGVGK (KRAS G12D)
WVGMDTVGV

SEQ ID NO: 11637 - protein, 9 aa, synthetic construct
  source 1..9: note = Seed: VVGADGVGK (KRAS G12D)
WVGQDAVGA

SEQ ID NO: 11638 - protein, 9 aa, synthetic construct
  source 1..9: note = Seed: VVGADGVGK (KRAS G12D)
WVGQDAVGI

SEQ ID NO: 11639 - protein, 9 aa, synthetic construct
  source 1..9: note = Seed: VVGADGVGK (KRAS G12D)
WVGQDAVGL

SEQ ID NO: 11640 - protein, 9 aa, synthetic construct
  source 1..9: note = Seed: VVGADGVGK (KRAS G12D)
WVGQDAVGM

SEQ ID NO: 11641 - protein, 9 aa, synthetic construct
  source 1..9: note = Seed: VVGADGVGK (KRAS G12D)
WVGQDAVGS

SEQ ID NO: 11642 - protein, 9 aa, synthetic construct
  source 1..9: note = Seed: VVGADGVGK (KRAS G12D)
WVGQDAVGT

SEQ ID NO: 11643 - protein, 9 aa, synthetic construct
  source 1..9: note = Seed: VVGADGVGK (KRAS G12D)
WVGQDAVGV

SEQ ID NO: 11644 - protein, 9 aa, synthetic construct
  source 1..9: note = Seed: VVGADGVGK (KRAS G12D)
WVGQDGVGA

SEQ ID NO: 11645 - protein, 9 aa, synthetic construct
  source 1..9: note = Seed: VVGADGVGK (KRAS G12D)
WVGQDGVGI

SEQ ID NO: 11646 - protein, 9 aa, synthetic construct
  source 1..9: note = Seed: VVGADGVGK (KRAS G12D)
WVGQDGVGL

SEQ ID NO: 11647 - protein, 9 aa, synthetic construct
  source 1..9: note = Seed: VVGADGVGK (KRAS G12D)
WVGQDGVGV

SEQ ID NO: 11648 - protein, 9 aa, synthetic construct
  source 1..9: note = Seed: VVGADGVGK (KRAS G12D)
WVGQDSVGA

SEQ ID NO: 11649 - protein, 9 aa, synthetic construct
  source 1..9: note = Seed: VVGADGVGK (KRAS G12D)
WVGQDSVGI

SEQ ID NO: 11650 - protein, 9 aa, synthetic construct
  source 1..9: note = Seed: VVGADGVGK (KRAS G12D)
WVGQDSVGL

SEQ ID NO: 11651 - protein, 9 aa, synthetic construct
  source 1..9: note = Seed: VVGADGVGK (KRAS G12D)
WVGQDSVGV

SEQ ID NO: 11652 - protein, 9 aa, synthetic construct
  source 1..9: note = Seed: VVGADGVGK (KRAS G12D)
WVGSDAVGA

SEQ ID NO: 11653 - protein, 9 aa, synthetic construct
  source 1..9: note = Seed: VVGADGVGK (KRAS G12D)
WVGSDAVGI

SEQ ID NO: 11654 - protein, 9 aa, synthetic construct
  source 1..9: note = Seed: VVGADGVGK (KRAS G12D)
WVGSDAVGL

SEQ ID NO: 11655 - protein, 9 aa, synthetic construct
  source 1..9: note = Seed: VVGADGVGK (KRAS G12D)
WVGSDAVGV

SEQ ID NO: 11656 - protein, 9 aa, synthetic construct
  source 1..9: note = Seed: VVGADGVGK (KRAS G12D)
WVGVDAVGA

SEQ ID NO: 11657 - protein, 9 aa, synthetic construct
  source 1..9: note = Seed: VVGADGVGK (KRAS G12D)
WVGVDAVGI

SEQ ID NO: 11658 - protein, 9 aa, synthetic construct
  source 1..9: note = Seed: VVGADGVGK (KRAS G12D)
WVGVDAVGL

SEQ ID NO: 11659 - protein, 9 aa, synthetic construct
  source 1..9: note = Seed: VVGADGVGK (KRAS G12D)
WVGVDAVGV

SEQ ID NO: 11660 - protein, 9 aa, synthetic construct
  source 1..9: note = Seed: VVGADGVGK (KRAS G12D)
WVGVDGVGA

SEQ ID NO: 11661 - protein, 9 aa, synthetic construct
  source 1..9: note = Seed: VVGADGVGK (KRAS G12D)
WVGVDGVGV

SEQ ID NO: 11662 - protein, 9 aa, synthetic construct
  source 1..9: note = Seed: VVGADGVGK (KRAS G12D)
WVGVDPVGV

SEQ ID NO: 11663 - protein, 9 aa, synthetic construct
  source 1..9: note = Seed: VVGADGVGK (KRAS G12D)
YVGADAVGA

SEQ ID NO: 11664 - protein, 9 aa, synthetic construct
  source 1..9: note = Seed: VVGADGVGK (KRAS G12D)
YVGADAVGC

SEQ ID NO: 11665 - protein, 9 aa, synthetic construct
  source 1..9: note = Seed: VVGADGVGK (KRAS G12D)
YVGADAVGF

SEQ ID NO: 11666 - protein, 9 aa, synthetic construct
  source 1..9: note = Seed: VVGADGVGK (KRAS G12D)
YVGADAVGG

SEQ ID NO: 11667 - protein, 9 aa, synthetic construct
  source 1..9: note = Seed: VVGADGVGK (KRAS G12D)
YVGADAVGH

SEQ ID NO: 11668 - protein, 9 aa, synthetic construct
  source 1..9: note = Seed: VVGADGVGK (KRAS G12D)
YVGADAVGI

SEQ ID NO: 11669 - protein, 9 aa, synthetic construct
  source 1..9: note = Seed: VVGADGVGK (KRAS G12D)
YVGADAVGK

SEQ ID NO: 11670 - protein, 9 aa, synthetic construct
  source 1..9: note = Seed: VVGADGVGK (KRAS G12D)
YVGADAVGL

SEQ ID NO: 11671 - protein, 9 aa, synthetic construct
  source 1..9: note = Seed: VVGADGVGK (KRAS G12D)
YVGADAVGM

SEQ ID NO: 11672 - protein, 9 aa, synthetic construct
  source 1..9: note = Seed: VVGADGVGK (KRAS G12D)
YVGADAVGN

SEQ ID NO: 11673 - protein, 9 aa, synthetic construct
  source 1..9: note = Seed: VVGADGVGK (KRAS G12D)
YVGADAVGP

SEQ ID NO: 11674 - protein, 9 aa, synthetic construct
  source 1..9: note = Seed: VVGADGVGK (KRAS G12D)
YVGADAVGQ

SEQ ID NO: 11675 - protein, 9 aa, synthetic construct
  source 1..9: note = Seed: VVGADGVGK (KRAS G12D)
YVGADAVGR

SEQ ID NO: 11676 - protein, 9 aa, synthetic construct
  source 1..9: note = Seed: VVGADGVGK (KRAS G12D)
YVGADAVGS

SEQ ID NO: 11677 - protein, 9 aa, synthetic construct
  source 1..9: note = Seed: VVGADGVGK (KRAS G12D)
YVGADAVGT

SEQ ID NO: 11678 - protein, 9 aa, synthetic construct
  source 1..9: note = Seed: VVGADGVGK (KRAS G12D)
YVGADAVGV

SEQ ID NO: 11679 - protein, 9 aa, synthetic construct
  source 1..9: note = Seed: VVGADGVGK (KRAS G12D)
YVGADAVGY

SEQ ID NO: 11680 - protein, 9 aa, synthetic construct
  source 1..9: note = Seed: VVGADGVGK (KRAS G12D)
YVGADGVGA

SEQ ID NO: 11681 - protein, 9 aa, synthetic construct
  source 1..9: note = Seed: VVGADGVGK (KRAS G12D)
YVGADGVGG

SEQ ID NO: 11682 - protein, 9 aa, synthetic construct
  source 1..9: note = Seed: VVGADGVGK (KRAS G12D)
YVGADGVGI

SEQ ID NO: 11683 - protein, 9 aa, synthetic construct
  source 1..9: note = Seed: VVGADGVGK (KRAS G12D)
YVGADGVGL

SEQ ID NO: 11684 - protein, 9 aa, synthetic construct
  source 1..9: note = Seed: VVGADGVGK (KRAS G12D)
YVGADGVGM

SEQ ID NO: 11685 - protein, 9 aa, synthetic construct
  source 1..9: note = Seed: VVGADGVGK (KRAS G12D)
YVGADGVGN

SEQ ID NO: 11686 - protein, 9 aa, synthetic construct
  source 1..9: note = Seed: VVGADGVGK (KRAS G12D)
YVGADGVGS

SEQ ID NO: 11687 - protein, 9 aa, synthetic construct
  source 1..9: note = Seed: VVGADGVGK (KRAS G12D)
YVGADGVGT

SEQ ID NO: 11688 - protein, 9 aa, synthetic construct
  source 1..9: note = Seed: VVGADGVGK (KRAS G12D)
YVGADGVGV

SEQ ID NO: 11689 - protein, 9 aa, synthetic construct
  source 1..9: note = Seed: VVGADGVGK (KRAS G12D)
YVGADIVGA

SEQ ID NO: 11690 - protein, 9 aa, synthetic construct
  source 1..9: note = Seed: VVGADGVGK (KRAS G12D)
YVGADIVGV

SEQ ID NO: 11691 - protein, 9 aa, synthetic construct
  source 1..9: note = Seed: VVGADGVGK (KRAS G12D)
YVGADNVGA

SEQ ID NO: 11692 - protein, 9 aa, synthetic construct
  source 1..9: note = Seed: VVGADGVGK (KRAS G12D)
YVGADNVGI

SEQ ID NO: 11693 - protein, 9 aa, synthetic construct
  source 1..9: note = Seed: VVGADGVGK (KRAS G12D)
YVGADNVGL

SEQ ID NO: 11694 - protein, 9 aa, synthetic construct
  source 1..9: note = Seed: VVGADGVGK (KRAS G12D)
YVGADNVGM

SEQ ID NO: 11695 - protein, 9 aa, synthetic construct
  source 1..9: note = Seed: VVGADGVGK (KRAS G12D)
YVGADNVGS

SEQ ID NO: 11696 - protein, 9 aa, synthetic construct
  source 1..9: note = Seed: VVGADGVGK (KRAS G12D)
YVGADNVGT

SEQ ID NO: 11697 - protein, 9 aa, synthetic construct
  source 1..9: note = Seed: VVGADGVGK (KRAS G12D)
YVGADNVGV

SEQ ID NO: 11698 - protein, 9 aa, synthetic construct
  source 1..9: note = Seed: VVGADGVGK (KRAS G12D)
YVGADPVGA

SEQ ID NO: 11699 - protein, 9 aa, synthetic construct
  source 1..9: note = Seed: VVGADGVGK (KRAS G12D)
YVGADPVGF

SEQ ID NO: 11700 - protein, 9 aa, synthetic construct
  source 1..9: note = Seed: VVGADGVGK (KRAS G12D)
YVGADPVGG

SEQ ID NO: 11701 - protein, 9 aa, synthetic construct
  source 1..9: note = Seed: VVGADGVGK (KRAS G12D)
YVGADPVGI

SEQ ID NO: 11702 - protein, 9 aa, synthetic construct
  source 1..9: note = Seed: VVGADGVGK (KRAS G12D)
YVGADPVGL

SEQ ID NO: 11703 - protein, 9 aa, synthetic construct
  source 1..9: note = Seed: VVGADGVGK (KRAS G12D)
YVGADPVGM

SEQ ID NO: 11704 - protein, 9 aa, synthetic construct
  source 1..9: note = Seed: VVGADGVGK (KRAS G12D)
YVGADPVGN

SEQ ID NO: 11705 - protein, 9 aa, synthetic construct
  source 1..9: note = Seed: VVGADGVGK (KRAS G12D)
YVGADPVGS

SEQ ID NO: 11706 - protein, 9 aa, synthetic construct
  source 1..9: note = Seed: VVGADGVGK (KRAS G12D)
YVGADPVGT

SEQ ID NO: 11707 - protein, 9 aa, synthetic construct
  source 1..9: note = Seed: VVGADGVGK (KRAS G12D)
YVGADPVGV

SEQ ID NO: 11708 - protein, 9 aa, synthetic construct
  source 1..9: note = Seed: VVGADGVGK (KRAS G12D)
YVGADPVGY

SEQ ID NO: 11709 - protein, 9 aa, synthetic construct
  source 1..9: note = Seed: VVGADGVGK (KRAS G12D)
YVGADSVGA

SEQ ID NO: 11710 - protein, 9 aa, synthetic construct
  source 1..9: note = Seed: VVGADGVGK (KRAS G12D)
YVGADSVGG

SEQ ID NO: 11711 - protein, 9 aa, synthetic construct
  source 1..9: note = Seed: VVGADGVGK (KRAS G12D)
YVGADSVGI

SEQ ID NO: 11712 - protein, 9 aa, synthetic construct
  source 1..9: note = Seed: VVGADGVGK (KRAS G12D)
YVGADSVGL

SEQ ID NO: 11713 - protein, 9 aa, synthetic construct
  source 1..9: note = Seed: VVGADGVGK (KRAS G12D)
YVGADSVGM

SEQ ID NO: 11714 - protein, 9 aa, synthetic construct
  source 1..9: note = Seed: VVGADGVGK (KRAS G12D)
YVGADSVGN

SEQ ID NO: 11715 - protein, 9 aa, synthetic construct
  source 1..9: note = Seed: VVGADGVGK (KRAS G12D)
YVGADSVGS

SEQ ID NO: 11716 - protein, 9 aa, synthetic construct
  source 1..9: note = Seed: VVGADGVGK (KRAS G12D)
YVGADSVGT

SEQ ID NO: 11717 - protein, 9 aa, synthetic construct
  source 1..9: note = Seed: VVGADGVGK (KRAS G12D)
YVGADSVGV

SEQ ID NO: 11718 - protein, 9 aa, synthetic construct
  source 1..9: note = Seed: VVGADGVGK (KRAS G12D)
YVGADTVGA

SEQ ID NO: 11719 - protein, 9 aa, synthetic construct
  source 1..9: note = Seed: VVGADGVGK (KRAS G12D)
YVGADTVGI

SEQ ID NO: 11720 - protein, 9 aa, synthetic construct
  source 1..9: note = Seed: VVGADGVGK (KRAS G12D)
YVGADTVGL

SEQ ID NO: 11721 - protein, 9 aa, synthetic construct
  source 1..9: note = Seed: VVGADGVGK (KRAS G12D)
YVGADTVGM

SEQ ID NO: 11722 - protein, 9 aa, synthetic construct
  source 1..9: note = Seed: VVGADGVGK (KRAS G12D)
YVGADTVGS

SEQ ID NO: 11723 - protein, 9 aa, synthetic construct
  source 1..9: note = Seed: VVGADGVGK (KRAS G12D)
YVGADTVGT

SEQ ID NO: 11724 - protein, 9 aa, synthetic construct
  source 1..9: note = Seed: VVGADGVGK (KRAS G12D)
YVGADTVGV

SEQ ID NO: 11725 - protein, 9 aa, synthetic construct
  source 1..9: note = Seed: VVGADGVGK (KRAS G12D)
YVGADVVGA

SEQ ID NO: 11726 - protein, 9 aa, synthetic construct
  source 1..9: note = Seed: VVGADGVGK (KRAS G12D)
YVGADVVGI

SEQ ID NO: 11727 - protein, 9 aa, synthetic construct
  source 1..9: note = Seed: VVGADGVGK (KRAS G12D)
YVGADVVGL

SEQ ID NO: 11728 - protein, 9 aa, synthetic construct
  source 1..9: note = Seed: VVGADGVGK (KRAS G12D)
YVGADVVGM

SEQ ID NO: 11729 - protein, 9 aa, synthetic construct
  source 1..9: note = Seed: VVGADGVGK (KRAS G12D)
YVGADVVGS

SEQ ID NO: 11730 - protein, 9 aa, synthetic construct
  source 1..9: note = Seed: VVGADGVGK (KRAS G12D)
YVGADVVGT

SEQ ID NO: 11731 - protein, 9 aa, synthetic construct
  source 1..9: note = Seed: VVGADGVGK (KRAS G12D)
YVGADVVGV

SEQ ID NO: 11732 - protein, 9 aa, synthetic construct
  source 1..9: note = Seed: VVGADGVGK (KRAS G12D)
YVGCDAVGA

SEQ ID NO: 11733 - protein, 9 aa, synthetic construct
  source 1..9: note = Seed: VVGADGVGK (KRAS G12D)
YVGCDAVGI

SEQ ID NO: 11734 - protein, 9 aa, synthetic construct
  source 1..9: note = Seed: VVGADGVGK (KRAS G12D)
YVGCDAVGL

SEQ ID NO: 11735 - protein, 9 aa, synthetic construct
  source 1..9: note = Seed: VVGADGVGK (KRAS G12D)
YVGCDAVGV

SEQ ID NO: 11736 - protein, 9 aa, synthetic construct
  source 1..9: note = Seed: VVGADGVGK (KRAS G12D)
YVGEDAVGA

SEQ ID NO: 11737 - protein, 9 aa, synthetic construct
  source 1..9: note = Seed: VVGADGVGK (KRAS G12D)
YVGEDAVGG

SEQ ID NO: 11738 - protein, 9 aa, synthetic construct
  source 1..9: note = Seed: VVGADGVGK (KRAS G12D)
YVGEDAVGI

SEQ ID NO: 11739 - protein, 9 aa, synthetic construct
  source 1..9: note = Seed: VVGADGVGK (KRAS G12D)
YVGEDAVGL

SEQ ID NO: 11740 - protein, 9 aa, synthetic construct
  source 1..9: note = Seed: VVGADGVGK (KRAS G12D)
YVGEDAVGM

SEQ ID NO: 11741 - protein, 9 aa, synthetic construct
  source 1..9: note = Seed: VVGADGVGK (KRAS G12D)
YVGEDAVGS

SEQ ID NO: 11742 - protein, 9 aa, synthetic construct
  source 1..9: note = Seed: VVGADGVGK (KRAS G12D)
YVGEDAVGT

SEQ ID NO: 11743 - protein, 9 aa, synthetic construct
  source 1..9: note = Seed: VVGADGVGK (KRAS G12D)
YVGEDAVGV

SEQ ID NO: 11744 - protein, 9 aa, synthetic construct
  source 1..9: note = Seed: VVGADGVGK (KRAS G12D)
YVGEDGVGA

SEQ ID NO: 11745 - protein, 9 aa, synthetic construct
  source 1..9: note = Seed: VVGADGVGK (KRAS G12D)
YVGEDGVGI

SEQ ID NO: 11746 - protein, 9 aa, synthetic construct
  source 1..9: note = Seed: VVGADGVGK (KRAS G12D)
YVGEDGVGL

SEQ ID NO: 11747 - protein, 9 aa, synthetic construct
  source 1..9: note = Seed: VVGADGVGK (KRAS G12D)
YVGEDGVGV

SEQ ID NO: 11748 - protein, 9 aa, synthetic construct
  source 1..9: note = Seed: VVGADGVGK (KRAS G12D)
YVGEDPVGI

SEQ ID NO: 11749 - protein, 9 aa, synthetic construct
  source 1..9: note = Seed: VVGADGVGK (KRAS G12D)
YVGEDPVGL

SEQ ID NO: 11750 - protein, 9 aa, synthetic construct
  source 1..9: note = Seed: VVGADGVGK (KRAS G12D)
YVGEDPVGV

SEQ ID NO: 11751 - protein, 9 aa, synthetic construct
  source 1..9: note = Seed: VVGADGVGK (KRAS G12D)
YVGEDSVGA

SEQ ID NO: 11752 - protein, 9 aa, synthetic construct
  source 1..9: note = Seed: VVGADGVGK (KRAS G12D)
YVGEDSVGI

SEQ ID NO: 11753 - protein, 9 aa, synthetic construct
  source 1..9: note = Seed: VVGADGVGK (KRAS G12D)
YVGEDSVGL

SEQ ID NO: 11754 - protein, 9 aa, synthetic construct
  source 1..9: note = Seed: VVGADGVGK (KRAS G12D)
YVGEDSVGV

SEQ ID NO: 11755 - protein, 9 aa, synthetic construct
  source 1..9: note = Seed: VVGADGVGK (KRAS G12D)
YVGFDAVGA

SEQ ID NO: 11756 - protein, 9 aa, synthetic construct
  source 1..9: note = Seed: VVGADGVGK (KRAS G12D)
YVGFDAVGG

SEQ ID NO: 11757 - protein, 9 aa, synthetic construct
  source 1..9: note = Seed: VVGADGVGK (KRAS G12D)
YVGFDAVGH

SEQ ID NO: 11758 - protein, 9 aa, synthetic construct
  source 1..9: note = Seed: VVGADGVGK (KRAS G12D)
YVGFDAVGI

SEQ ID NO: 11759 - protein, 9 aa, synthetic construct
  source 1..9: note = Seed: VVGADGVGK (KRAS G12D)
YVGFDAVGL

SEQ ID NO: 11760 - protein, 9 aa, synthetic construct
  source 1..9: note = Seed: VVGADGVGK (KRAS G12D)
YVGFDAVGM

SEQ ID NO: 11761 - protein, 9 aa, synthetic construct
  source 1..9: note = Seed: VVGADGVGK (KRAS G12D)
YVGFDAVGN

SEQ ID NO: 11762 - protein, 9 aa, synthetic construct
  source 1..9: note = Seed: VVGADGVGK (KRAS G12D)
YVGFDAVGS

SEQ ID NO: 11763 - protein, 9 aa, synthetic construct
  source 1..9: note = Seed: VVGADGVGK (KRAS G12D)
YVGFDAVGT

SEQ ID NO: 11764 - protein, 9 aa, synthetic construct
  source 1..9: note = Seed: VVGADGVGK (KRAS G12D)
YVGFDAVGV

SEQ ID NO: 11765 - protein, 9 aa, synthetic construct
  source 1..9: note = Seed: VVGADGVGK (KRAS G12D)
YVGFDGVGA

SEQ ID NO: 11766 - protein, 9 aa, synthetic construct
  source 1..9: note = Seed: VVGADGVGK (KRAS G12D)
YVGFDGVGI

SEQ ID NO: 11767 - protein, 9 aa, synthetic construct
  source 1..9: note = Seed: VVGADGVGK (KRAS G12D)
YVGFDGVGL

SEQ ID NO: 11768 - protein, 9 aa, synthetic construct
  source 1..9: note = Seed: VVGADGVGK (KRAS G12D)
YVGFDGVGM

SEQ ID NO: 11769 - protein, 9 aa, synthetic construct
  source 1..9: note = Seed: VVGADGVGK (KRAS G12D)
YVGFDGVGS

SEQ ID NO: 11770 - protein, 9 aa, synthetic construct
  source 1..9: note = Seed: VVGADGVGK (KRAS G12D)
YVGFDGVGV

SEQ ID NO: 11771 - protein, 9 aa, synthetic construct
  source 1..9: note = Seed: VVGADGVGK (KRAS G12D)
YVGFDNVGA

SEQ ID NO: 11772 - protein, 9 aa, synthetic construct
  source 1..9: note = Seed: VVGADGVGK (KRAS G12D)
YVGFDPVGA

SEQ ID NO: 11773 - protein, 9 aa, synthetic construct
  source 1..9: note = Seed: VVGADGVGK (KRAS G12D)
YVGFDPVGI

SEQ ID NO: 11774 - protein, 9 aa, synthetic construct
  source 1..9: note = Seed: VVGADGVGK (KRAS G12D)
YVGFDPVGL

SEQ ID NO: 11775 - protein, 9 aa, synthetic construct
  source 1..9: note = Seed: VVGADGVGK (KRAS G12D)
YVGFDPVGM

SEQ ID NO: 11776 - protein, 9 aa, synthetic construct
  source 1..9: note = Seed: VVGADGVGK (KRAS G12D)
YVGFDPVGS

SEQ ID NO: 11777 - protein, 9 aa, synthetic construct
  source 1..9: note = Seed: VVGADGVGK (KRAS G12D)
YVGFDPVGT

SEQ ID NO: 11778 - protein, 9 aa, synthetic construct
  source 1..9: note = Seed: VVGADGVGK (KRAS G12D)
YVGFDPVGV

SEQ ID NO: 11779 - protein, 9 aa, synthetic construct
  source 1..9: note = Seed: VVGADGVGK (KRAS G12D)
YVGFDSVGI

SEQ ID NO: 11780 - protein, 9 aa, synthetic construct
  source 1..9: note = Seed: VVGADGVGK (KRAS G12D)
YVGFDSVGL

SEQ ID NO: 11781 - protein, 9 aa, synthetic construct
  source 1..9: note = Seed: VVGADGVGK (KRAS G12D)
YVGFDSVGM

SEQ ID NO: 11782 - protein, 9 aa, synthetic construct
  source 1..9: note = Seed: VVGADGVGK (KRAS G12D)
YVGFDSVGS

SEQ ID NO: 11783 - protein, 9 aa, synthetic construct
  source 1..9: note = Seed: VVGADGVGK (KRAS G12D)
YVGFDSVGT

SEQ ID NO: 11784 - protein, 9 aa, synthetic construct
  source 1..9: note = Seed: VVGADGVGK (KRAS G12D)
YVGFDSVGV

SEQ ID NO: 11785 - protein, 9 aa, synthetic construct
  source 1..9: note = Seed: VVGADGVGK (KRAS G12D)
YVGFDTVGA

SEQ ID NO: 11786 - protein, 9 aa, synthetic construct
  source 1..9: note = Seed: VVGADGVGK (KRAS G12D)
YVGFDTVGS

SEQ ID NO: 11787 - protein, 9 aa, synthetic construct
  source 1..9: note = Seed: VVGADGVGK (KRAS G12D)
YVGFDTVGV

SEQ ID NO: 11788 - protein, 9 aa, synthetic construct
  source 1..9: note = Seed: VVGADGVGK (KRAS G12D)
YVGGDAVGA

SEQ ID NO: 11789 - protein, 9 aa, synthetic construct
  source 1..9: note = Seed: VVGADGVGK (KRAS G12D)
YVGGDAVGI

SEQ ID NO: 11790 - protein, 9 aa, synthetic construct
  source 1..9: note = Seed: VVGADGVGK (KRAS G12D)
YVGGDAVGL

SEQ ID NO: 11791 - protein, 9 aa, synthetic construct
  source 1..9: note = Seed: VVGADGVGK (KRAS G12D)
YVGGDAVGM

SEQ ID NO: 11792 - protein, 9 aa, synthetic construct
  source 1..9: note = Seed: VVGADGVGK (KRAS G12D)
YVGGDAVGV

SEQ ID NO: 11793 - protein, 9 aa, synthetic construct
  source 1..9: note = Seed: VVGADGVGK (KRAS G12D)
YVGGDGVGI

SEQ ID NO: 11794 - protein, 9 aa, synthetic construct
  source 1..9: note = Seed: VVGADGVGK (KRAS G12D)
YVGGDGVGL

SEQ ID NO: 11795 - protein, 9 aa, synthetic construct
  source 1..9: note = Seed: VVGADGVGK (KRAS G12D)
YVGGDGVGV

SEQ ID NO: 11796 - protein, 9 aa, synthetic construct
  source 1..9: note = Seed: VVGADGVGK (KRAS G12D)
YVGGDPVGI

SEQ ID NO: 11797 - protein, 9 aa, synthetic construct
  source 1..9: note = Seed: VVGADGVGK (KRAS G12D)
YVGGDPVGL

SEQ ID NO: 11798 - protein, 9 aa, synthetic construct
  source 1..9: note = Seed: VVGADGVGK (KRAS G12D)
YVGGDPVGV

SEQ ID NO: 11799 - protein, 9 aa, synthetic construct
  source 1..9: note = Seed: VVGADGVGK (KRAS G12D)
YVGGDSVGA

SEQ ID NO: 11800 - protein, 9 aa, synthetic construct
  source 1..9: note = Seed: VVGADGVGK (KRAS G12D)
YVGGDSVGI

SEQ ID NO: 11801 - protein, 9 aa, synthetic construct
  source 1..9: note = Seed: VVGADGVGK (KRAS G12D)
YVGGDSVGL

SEQ ID NO: 11802 - protein, 9 aa, synthetic construct
  source 1..9: note = Seed: VVGADGVGK (KRAS G12D)
YVGGDSVGV

SEQ ID NO: 11803 - protein, 9 aa, synthetic construct
  source 1..9: note = Seed: VVGADGVGK (KRAS G12D)
YVGHDAVGA

SEQ ID NO: 11804 - protein, 9 aa, synthetic construct
  source 1..9: note = Seed: VVGADGVGK (KRAS G12D)
YVGHDAVGI

SEQ ID NO: 11805 - protein, 9 aa, synthetic construct
  source 1..9: note = Seed: VVGADGVGK (KRAS G12D)
YVGHDAVGL

SEQ ID NO: 11806 - protein, 9 aa, synthetic construct
  source 1..9: note = Seed: VVGADGVGK (KRAS G12D)
YVGHDAVGM

SEQ ID NO: 11807 - protein, 9 aa, synthetic construct
  source 1..9: note = Seed: VVGADGVGK (KRAS G12D)
YVGHDAVGV

SEQ ID NO: 11808 - protein, 9 aa, synthetic construct
  source 1..9: note = Seed: VVGADGVGK (KRAS G12D)
YVGHDGVGL

SEQ ID NO: 11809 - protein, 9 aa, synthetic construct
  source 1..9: note = Seed: VVGADGVGK (KRAS G12D)
YVGHDGVGV

SEQ ID NO: 11810 - protein, 9 aa, synthetic construct
  source 1..9: note = Seed: VVGADGVGK (KRAS G12D)
YVGHDSVGL

SEQ ID NO: 11811 - protein, 9 aa, synthetic construct
  source 1..9: note = Seed: VVGADGVGK (KRAS G12D)
YVGHDSVGV

SEQ ID NO: 11812 - protein, 9 aa, synthetic construct
  source 1..9: note = Seed: VVGADGVGK (KRAS G12D)
YVGIDAVGA

SEQ ID NO: 11813 - protein, 9 aa, synthetic construct
  source 1..9: note = Seed: VVGADGVGK (KRAS G12D)
YVGIDAVGC

SEQ ID NO: 11814 - protein, 9 aa, synthetic construct
  source 1..9: note = Seed: VVGADGVGK (KRAS G12D)
YVGIDAVGF

SEQ ID NO: 11815 - protein, 9 aa, synthetic construct
  source 1..9: note = Seed: VVGADGVGK (KRAS G12D)
YVGIDAVGG

SEQ ID NO: 11816 - protein, 9 aa, synthetic construct
  source 1..9: note = Seed: VVGADGVGK (KRAS G12D)
YVGIDAVGH

SEQ ID NO: 11817 - protein, 9 aa, synthetic construct
  source 1..9: note = Seed: VVGADGVGK (KRAS G12D)
YVGIDAVGI

SEQ ID NO: 11818 - protein, 9 aa, synthetic construct
  source 1..9: note = Seed: VVGADGVGK (KRAS G12D)
YVGIDAVGK

SEQ ID NO: 11819 - protein, 9 aa, synthetic construct
  source 1..9: note = Seed: VVGADGVGK (KRAS G12D)
YVGIDAVGL

SEQ ID NO: 11820 - protein, 9 aa, synthetic construct
  source 1..9: note = Seed: VVGADGVGK (KRAS G12D)
YVGIDAVGM

SEQ ID NO: 11821 - protein, 9 aa, synthetic construct
  source 1..9: note = Seed: VVGADGVGK (KRAS G12D)
YVGIDAVGN

SEQ ID NO: 11822 - protein, 9 aa, synthetic construct
  source 1..9: note = Seed: VVGADGVGK (KRAS G12D)
YVGIDAVGP

SEQ ID NO: 11823 - protein, 9 aa, synthetic construct
  source 1..9: note = Seed: VVGADGVGK (KRAS G12D)
YVGIDAVGQ

SEQ ID NO: 11824 - protein, 9 aa, synthetic construct
  source 1..9: note = Seed: VVGADGVGK (KRAS G12D)
YVGIDAVGR

SEQ ID NO: 11825 - protein, 9 aa, synthetic construct
  source 1..9: note = Seed: VVGADGVGK (KRAS G12D)
YVGIDAVGS

SEQ ID NO: 11826 - protein, 9 aa, synthetic construct
  source 1..9: note = Seed: VVGADGVGK (KRAS G12D)
YVGIDAVGT

SEQ ID NO: 11827 - protein, 9 aa, synthetic construct
  source 1..9: note = Seed: VVGADGVGK (KRAS G12D)
YVGIDAVGV

SEQ ID NO: 11828 - protein, 9 aa, synthetic construct
  source 1..9: note = Seed: VVGADGVGK (KRAS G12D)
YVGIDAVGY

SEQ ID NO: 11829 - protein, 9 aa, synthetic construct
  source 1..9: note = Seed: VVGADGVGK (KRAS G12D)
YVGIDGVGA

SEQ ID NO: 11830 - protein, 9 aa, synthetic construct
  source 1..9: note = Seed: VVGADGVGK (KRAS G12D)
YVGIDGVGG

SEQ ID NO: 11831 - protein, 9 aa, synthetic construct
  source 1..9: note = Seed: VVGADGVGK (KRAS G12D)
YVGIDGVGH

SEQ ID NO: 11832 - protein, 9 aa, synthetic construct
  source 1..9: note = Seed: VVGADGVGK (KRAS G12D)
YVGIDGVGI

SEQ ID NO: 11833 - protein, 9 aa, synthetic construct
  source 1..9: note = Seed: VVGADGVGK (KRAS G12D)
YVGIDGVGL

SEQ ID NO: 11834 - protein, 9 aa, synthetic construct
  source 1..9: note = Seed: VVGADGVGK (KRAS G12D)
YVGIDGVGM

SEQ ID NO: 11835 - protein, 9 aa, synthetic construct
  source 1..9: note = Seed: VVGADGVGK (KRAS G12D)
YVGIDGVGN

SEQ ID NO: 11836 - protein, 9 aa, synthetic construct
  source 1..9: note = Seed: VVGADGVGK (KRAS G12D)
YVGIDGVGS

SEQ ID NO: 11837 - protein, 9 aa, synthetic construct
  source 1..9: note = Seed: VVGADGVGK (KRAS G12D)
YVGIDGVGT

SEQ ID NO: 11838 - protein, 9 aa, synthetic construct
  source 1..9: note = Seed: VVGADGVGK (KRAS G12D)
YVGIDGVGV

SEQ ID NO: 11839 - protein, 9 aa, synthetic construct
  source 1..9: note = Seed: VVGADGVGK (KRAS G12D)
YVGIDHVGA

SEQ ID NO: 11840 - protein, 9 aa, synthetic construct
  source 1..9: note = Seed: VVGADGVGK (KRAS G12D)
YVGIDNVGA

SEQ ID NO: 11841 - protein, 9 aa, synthetic construct
  source 1..9: note = Seed: VVGADGVGK (KRAS G12D)
YVGIDNVGG

SEQ ID NO: 11842 - protein, 9 aa, synthetic construct
  source 1..9: note = Seed: VVGADGVGK (KRAS G12D)
YVGIDNVGI

SEQ ID NO: 11843 - protein, 9 aa, synthetic construct
  source 1..9: note = Seed: VVGADGVGK (KRAS G12D)
YVGIDNVGL

SEQ ID NO: 11844 - protein, 9 aa, synthetic construct
  source 1..9: note = Seed: VVGADGVGK (KRAS G12D)
YVGIDNVGM

SEQ ID NO: 11845 - protein, 9 aa, synthetic construct
  source 1..9: note = Seed: VVGADGVGK (KRAS G12D)
YVGIDNVGS

SEQ ID NO: 11846 - protein, 9 aa, synthetic construct
  source 1..9: note = Seed: VVGADGVGK (KRAS G12D)
YVGIDNVGT

SEQ ID NO: 11847 - protein, 9 aa, synthetic construct
  source 1..9: note = Seed: VVGADGVGK (KRAS G12D)
YVGIDNVGV

SEQ ID NO: 11848 - protein, 9 aa, synthetic construct
  source 1..9: note = Seed: VVGADGVGK (KRAS G12D)
YVGIDPVGA

SEQ ID NO: 11849 - protein, 9 aa, synthetic construct
  source 1..9: note = Seed: VVGADGVGK (KRAS G12D)
YVGIDPVGG

SEQ ID NO: 11850 - protein, 9 aa, synthetic construct
  source 1..9: note = Seed: VVGADGVGK (KRAS G12D)
YVGIDPVGH

SEQ ID NO: 11851 - protein, 9 aa, synthetic construct
  source 1..9: note = Seed: VVGADGVGK (KRAS G12D)
YVGIDPVGI

SEQ ID NO: 11852 - protein, 9 aa, synthetic construct
  source 1..9: note = Seed: VVGADGVGK (KRAS G12D)
YVGIDPVGL

SEQ ID NO: 11853 - protein, 9 aa, synthetic construct
  source 1..9: note = Seed: VVGADGVGK (KRAS G12D)
YVGIDPVGM

SEQ ID NO: 11854 - protein, 9 aa, synthetic construct
  source 1..9: note = Seed: VVGADGVGK (KRAS G12D)
YVGIDPVGN

SEQ ID NO: 11855 - protein, 9 aa, synthetic construct
  source 1..9: note = Seed: VVGADGVGK (KRAS G12D)
YVGIDPVGS

SEQ ID NO: 11856 - protein, 9 aa, synthetic construct
  source 1..9: note = Seed: VVGADGVGK (KRAS G12D)
YVGIDPVGT

SEQ ID NO: 11857 - protein, 9 aa, synthetic construct
  source 1..9: note = Seed: VVGADGVGK (KRAS G12D)
YVGIDPVGV

SEQ ID NO: 11858 - protein, 9 aa, synthetic construct
  source 1..9: note = Seed: VVGADGVGK (KRAS G12D)
YVGIDSVGA

SEQ ID NO: 11859 - protein, 9 aa, synthetic construct
  source 1..9: note = Seed: VVGADGVGK (KRAS G12D)
YVGIDSVGG

SEQ ID NO: 11860 - protein, 9 aa, synthetic construct
  source 1..9: note = Seed: VVGADGVGK (KRAS G12D)
YVGIDSVGH

SEQ ID NO: 11861 - protein, 9 aa, synthetic construct
  source 1..9: note = Seed: VVGADGVGK (KRAS G12D)
YVGIDSVGI

SEQ ID NO: 11862 - protein, 9 aa, synthetic construct
  source 1..9: note = Seed: VVGADGVGK (KRAS G12D)
YVGIDSVGL

SEQ ID NO: 11863 - protein, 9 aa, synthetic construct
  source 1..9: note = Seed: VVGADGVGK (KRAS G12D)
YVGIDSVGM

SEQ ID NO: 11864 - protein, 9 aa, synthetic construct
  source 1..9: note = Seed: VVGADGVGK (KRAS G12D)
YVGIDSVGN

SEQ ID NO: 11865 - protein, 9 aa, synthetic construct
  source 1..9: note = Seed: VVGADGVGK (KRAS G12D)
YVGIDSVGS

SEQ ID NO: 11866 - protein, 9 aa, synthetic construct
  source 1..9: note = Seed: VVGADGVGK (KRAS G12D)
YVGIDSVGT

SEQ ID NO: 11867 - protein, 9 aa, synthetic construct
  source 1..9: note = Seed: VVGADGVGK (KRAS G12D)
YVGIDSVGV

SEQ ID NO: 11868 - protein, 9 aa, synthetic construct
  source 1..9: note = Seed: VVGADGVGK (KRAS G12D)
YVGIDTVGA

SEQ ID NO: 11869 - protein, 9 aa, synthetic construct
  source 1..9: note = Seed: VVGADGVGK (KRAS G12D)
YVGIDTVGG

SEQ ID NO: 11870 - protein, 9 aa, synthetic construct
  source 1..9: note = Seed: VVGADGVGK (KRAS G12D)
YVGIDTVGI

SEQ ID NO: 11871 - protein, 9 aa, synthetic construct
  source 1..9: note = Seed: VVGADGVGK (KRAS G12D)
YVGIDTVGL

SEQ ID NO: 11872 - protein, 9 aa, synthetic construct
  source 1..9: note = Seed: VVGADGVGK (KRAS G12D)
YVGIDTVGM

SEQ ID NO: 11873 - protein, 9 aa, synthetic construct
  source 1..9: note = Seed: VVGADGVGK (KRAS G12D)
YVGIDTVGN

SEQ ID NO: 11874 - protein, 9 aa, synthetic construct
  source 1..9: note = Seed: VVGADGVGK (KRAS G12D)
YVGIDTVGS

SEQ ID NO: 11875 - protein, 9 aa, synthetic construct
  source 1..9: note = Seed: VVGADGVGK (KRAS G12D)
YVGIDTVGT

SEQ ID NO: 11876 - protein, 9 aa, synthetic construct
  source 1..9: note = Seed: VVGADGVGK (KRAS G12D)
YVGIDTVGV

SEQ ID NO: 11877 - protein, 9 aa, synthetic construct
  source 1..9: note = Seed: VVGADGVGK (KRAS G12D)
YVGIDVVGA

SEQ ID NO: 11878 - protein, 9 aa, synthetic construct
  source 1..9: note = Seed: VVGADGVGK (KRAS G12D)
YVGIDVVGG

SEQ ID NO: 11879 - protein, 9 aa, synthetic construct
  source 1..9: note = Seed: VVGADGVGK (KRAS G12D)
YVGIDVVGS

SEQ ID NO: 11880 - protein, 9 aa, synthetic construct
  source 1..9: note = Seed: VVGADGVGK (KRAS G12D)
YVGIDVVGT

SEQ ID NO: 11881 - protein, 9 aa, synthetic construct
  source 1..9: note = Seed: VVGADGVGK (KRAS G12D)
YVGIDVVGV

SEQ ID NO: 11882 - protein, 9 aa, synthetic construct
  source 1..9: note = Seed: VVGADGVGK (KRAS G12D)
YVGKDAVGI

SEQ ID NO: 11883 - protein, 9 aa, synthetic construct
  source 1..9: note = Seed: VVGADGVGK (KRAS G12D)
YVGKDAVGL

SEQ ID NO: 11884 - protein, 9 aa, synthetic construct
  source 1..9: note = Seed: VVGADGVGK (KRAS G12D)
YVGKDAVGV

SEQ ID NO: 11885 - protein, 9 aa, synthetic construct
  source 1..9: note = Seed: VVGADGVGK (KRAS G12D)
YVGLDAVGA

SEQ ID NO: 11886 - protein, 9 aa, synthetic construct
  source 1..9: note = Seed: VVGADGVGK (KRAS G12D)
YVGLDAVGC

SEQ ID NO: 11887 - protein, 9 aa, synthetic construct
  source 1..9: note = Seed: VVGADGVGK (KRAS G12D)
YVGLDAVGF

SEQ ID NO: 11888 - protein, 9 aa, synthetic construct
  source 1..9: note = Seed: VVGADGVGK (KRAS G12D)
YVGLDAVGG

SEQ ID NO: 11889 - protein, 9 aa, synthetic construct
  source 1..9: note = Seed: VVGADGVGK (KRAS G12D)
YVGLDAVGH

SEQ ID NO: 11890 - protein, 9 aa, synthetic construct
  source 1..9: note = Seed: VVGADGVGK (KRAS G12D)
YVGLDAVGI

SEQ ID NO: 11891 - protein, 9 aa, synthetic construct
  source 1..9: note = Seed: VVGADGVGK (KRAS G12D)
YVGLDAVGK

SEQ ID NO: 11892 - protein, 9 aa, synthetic construct
  source 1..9: note = Seed: VVGADGVGK (KRAS G12D)
YVGLDAVGL

SEQ ID NO: 11893 - protein, 9 aa, synthetic construct
  source 1..9: note = Seed: VVGADGVGK (KRAS G12D)
YVGLDAVGM

SEQ ID NO: 11894 - protein, 9 aa, synthetic construct
  source 1..9: note = Seed: VVGADGVGK (KRAS G12D)
YVGLDAVGN

SEQ ID NO: 11895 - protein, 9 aa, synthetic construct
  source 1..9: note = Seed: VVGADGVGK (KRAS G12D)
YVGLDAVGP

SEQ ID NO: 11896 - protein, 9 aa, synthetic construct
  source 1..9: note = Seed: VVGADGVGK (KRAS G12D)
YVGLDAVGQ

SEQ ID NO: 11897 - protein, 9 aa, synthetic construct
  source 1..9: note = Seed: VVGADGVGK (KRAS G12D)
YVGLDAVGR

SEQ ID NO: 11898 - protein, 9 aa, synthetic construct
  source 1..9: note = Seed: VVGADGVGK (KRAS G12D)
YVGLDAVGS

SEQ ID NO: 11899 - protein, 9 aa, synthetic construct
  source 1..9: note = Seed: VVGADGVGK (KRAS G12D)
YVGLDAVGT

SEQ ID NO: 11900 - protein, 9 aa, synthetic construct
  source 1..9: note = Seed: VVGADGVGK (KRAS G12D)
YVGLDAVGV

SEQ ID NO: 11901 - protein, 9 aa, synthetic construct
  source 1..9: note = Seed: VVGADGVGK (KRAS G12D)
YVGLDAVGY

SEQ ID NO: 11902 - protein, 9 aa, synthetic construct
  source 1..9: note = Seed: VVGADGVGK (KRAS G12D)
YVGLDEVGL

SEQ ID NO: 11903 - protein, 9 aa, synthetic construct
  source 1..9: note = Seed: VVGADGVGK (KRAS G12D)
YVGLDEVGV

SEQ ID NO: 11904 - protein, 9 aa, synthetic construct
  source 1..9: note = Seed: VVGADGVGK (KRAS G12D)
YVGLDGVGA

SEQ ID NO: 11905 - protein, 9 aa, synthetic construct
  source 1..9: note = Seed: VVGADGVGK (KRAS G12D)
YVGLDGVGC

SEQ ID NO: 11906 - protein, 9 aa, synthetic construct
  source 1..9: note = Seed: VVGADGVGK (KRAS G12D)
YVGLDGVGF

SEQ ID NO: 11907 - protein, 9 aa, synthetic construct
  source 1..9: note = Seed: VVGADGVGK (KRAS G12D)
YVGLDGVGG

SEQ ID NO: 11908 - protein, 9 aa, synthetic construct
  source 1..9: note = Seed: VVGADGVGK (KRAS G12D)
YVGLDGVGH

SEQ ID NO: 11909 - protein, 9 aa, synthetic construct
  source 1..9: note = Seed: VVGADGVGK (KRAS G12D)
YVGLDGVGI

SEQ ID NO: 11910 - protein, 9 aa, synthetic construct
  source 1..9: note = Seed: VVGADGVGK (KRAS G12D)
YVGLDGVGK

SEQ ID NO: 11911 - protein, 9 aa, synthetic construct
  source 1..9: note = Seed: VVGADGVGK (KRAS G12D)
YVGLDGVGL

SEQ ID NO: 11912 - protein, 9 aa, synthetic construct
  source 1..9: note = Seed: VVGADGVGK (KRAS G12D)
YVGLDGVGM

SEQ ID NO: 11913 - protein, 9 aa, synthetic construct
  source 1..9: note = Seed: VVGADGVGK (KRAS G12D)
YVGLDGVGN

SEQ ID NO: 11914 - protein, 9 aa, synthetic construct
  source 1..9: note = Seed: VVGADGVGK (KRAS G12D)
YVGLDGVGP

SEQ ID NO: 11915 - protein, 9 aa, synthetic construct
  source 1..9: note = Seed: VVGADGVGK (KRAS G12D)
YVGLDGVGQ

SEQ ID NO: 11916 - protein, 9 aa, synthetic construct
  source 1..9: note = Seed: VVGADGVGK (KRAS G12D)
YVGLDGVGR

SEQ ID NO: 11917 - protein, 9 aa, synthetic construct
  source 1..9: note = Seed: VVGADGVGK (KRAS G12D)
YVGLDGVGS

SEQ ID NO: 11918 - protein, 9 aa, synthetic construct
  source 1..9: note = Seed: VVGADGVGK (KRAS G12D)
YVGLDGVGT

SEQ ID NO: 11919 - protein, 9 aa, synthetic construct
  source 1..9: note = Seed: VVGADGVGK (KRAS G12D)
YVGLDGVGV

SEQ ID NO: 11920 - protein, 9 aa, synthetic construct
  source 1..9: note = Seed: VVGADGVGK (KRAS G12D)
YVGLDGVGY

SEQ ID NO: 11921 - protein, 9 aa, synthetic construct
  source 1..9: note = Seed: VVGADGVGK (KRAS G12D)
YVGLDHVGA

SEQ ID NO: 11922 - protein, 9 aa, synthetic construct
  source 1..9: note = Seed: VVGADGVGK (KRAS G12D)
YVGLDHVGI

SEQ ID NO: 11923 - protein, 9 aa, synthetic construct
  source 1..9: note = Seed: VVGADGVGK (KRAS G12D)
YVGLDHVGL

SEQ ID NO: 11924 - protein, 9 aa, synthetic construct
  source 1..9: note = Seed: VVGADGVGK (KRAS G12D)
YVGLDHVGM

SEQ ID NO: 11925 - protein, 9 aa, synthetic construct
  source 1..9: note = Seed: VVGADGVGK (KRAS G12D)
YVGLDHVGS

SEQ ID NO: 11926 - protein, 9 aa, synthetic construct
  source 1..9: note = Seed: VVGADGVGK (KRAS G12D)
YVGLDHVGT

SEQ ID NO: 11927 - protein, 9 aa, synthetic construct
  source 1..9: note = Seed: VVGADGVGK (KRAS G12D)
YVGLDHVGV

SEQ ID NO: 11928 - protein, 9 aa, synthetic construct
  source 1..9: note = Seed: VVGADGVGK (KRAS G12D)
YVGLDIVGA

SEQ ID NO: 11929 - protein, 9 aa, synthetic construct
  source 1..9: note = Seed: VVGADGVGK (KRAS G12D)
YVGLDIVGG

SEQ ID NO: 11930 - protein, 9 aa, synthetic construct
  source 1..9: note = Seed: VVGADGVGK (KRAS G12D)
YVGLDIVGN

SEQ ID NO: 11931 - protein, 9 aa, synthetic construct
  source 1..9: note = Seed: VVGADGVGK (KRAS G12D)
YVGLDIVGS

SEQ ID NO: 11932 - protein, 9 aa, synthetic construct
  source 1..9: note = Seed: VVGADGVGK (KRAS G12D)
YVGLDIVGT

SEQ ID NO: 11933 - protein, 9 aa, synthetic construct
  source 1..9: note = Seed: VVGADGVGK (KRAS G12D)
YVGLDIVGV

SEQ ID NO: 11934 - protein, 9 aa, synthetic construct
  source 1..9: note = Seed: VVGADGVGK (KRAS G12D)
YVGLDKVGA

SEQ ID NO: 11935 - protein, 9 aa, synthetic construct
  source 1..9: note = Seed: VVGADGVGK (KRAS G12D)
YVGLDLVGA

SEQ ID NO: 11936 - protein, 9 aa, synthetic construct
  source 1..9: note = Seed: VVGADGVGK (KRAS G12D)
YVGLDMVGA

SEQ ID NO: 11937 - protein, 9 aa, synthetic construct
  source 1..9: note = Seed: VVGADGVGK (KRAS G12D)
YVGLDMVGS

SEQ ID NO: 11938 - protein, 9 aa, synthetic construct
  source 1..9: note = Seed: VVGADGVGK (KRAS G12D)
YVGLDNVGA

SEQ ID NO: 11939 - protein, 9 aa, synthetic construct
  source 1..9: note = Seed: VVGADGVGK (KRAS G12D)
YVGLDNVGG

SEQ ID NO: 11940 - protein, 9 aa, synthetic construct
  source 1..9: note = Seed: VVGADGVGK (KRAS G12D)
YVGLDNVGH

SEQ ID NO: 11941 - protein, 9 aa, synthetic construct
  source 1..9: note = Seed: VVGADGVGK (KRAS G12D)
YVGLDNVGI

SEQ ID NO: 11942 - protein, 9 aa, synthetic construct
  source 1..9: note = Seed: VVGADGVGK (KRAS G12D)
YVGLDNVGL

SEQ ID NO: 11943 - protein, 9 aa, synthetic construct
  source 1..9: note = Seed: VVGADGVGK (KRAS G12D)
YVGLDNVGM

SEQ ID NO: 11944 - protein, 9 aa, synthetic construct
  source 1..9: note = Seed: VVGADGVGK (KRAS G12D)
YVGLDNVGN

SEQ ID NO: 11945 - protein, 9 aa, synthetic construct
  source 1..9: note = Seed: VVGADGVGK (KRAS G12D)
YVGLDNVGQ

SEQ ID NO: 11946 - protein, 9 aa, synthetic construct
  source 1..9: note = Seed: VVGADGVGK (KRAS G12D)
YVGLDNVGS

SEQ ID NO: 11947 - protein, 9 aa, synthetic construct
  source 1..9: note = Seed: VVGADGVGK (KRAS G12D)
YVGLDNVGT

SEQ ID NO: 11948 - protein, 9 aa, synthetic construct
  source 1..9: note = Seed: VVGADGVGK (KRAS G12D)
YVGLDNVGV

SEQ ID NO: 11949 - protein, 9 aa, synthetic construct
  source 1..9: note = Seed: VVGADGVGK (KRAS G12D)
YVGLDPVGA

SEQ ID NO: 11950 - protein, 9 aa, synthetic construct
  source 1..9: note = Seed: VVGADGVGK (KRAS G12D)
YVGLDPVGC

SEQ ID NO: 11951 - protein, 9 aa, synthetic construct
  source 1..9: note = Seed: VVGADGVGK (KRAS G12D)
YVGLDPVGF

SEQ ID NO: 11952 - protein, 9 aa, synthetic construct
  source 1..9: note = Seed: VVGADGVGK (KRAS G12D)
YVGLDPVGG

SEQ ID NO: 11953 - protein, 9 aa, synthetic construct
  source 1..9: note = Seed: VVGADGVGK (KRAS G12D)
YVGLDPVGH

SEQ ID NO: 11954 - protein, 9 aa, synthetic construct
  source 1..9: note = Seed: VVGADGVGK (KRAS G12D)
YVGLDPVGI

SEQ ID NO: 11955 - protein, 9 aa, synthetic construct
  source 1..9: note = Seed: VVGADGVGK (KRAS G12D)
YVGLDPVGK

SEQ ID NO: 11956 - protein, 9 aa, synthetic construct
  source 1..9: note = Seed: VVGADGVGK (KRAS G12D)
YVGLDPVGL

SEQ ID NO: 11957 - protein, 9 aa, synthetic construct
  source 1..9: note = Seed: VVGADGVGK (KRAS G12D)
YVGLDPVGM

SEQ ID NO: 11958 - protein, 9 aa, synthetic construct
  source 1..9: note = Seed: VVGADGVGK (KRAS G12D)
YVGLDPVGN

SEQ ID NO: 11959 - protein, 9 aa, synthetic construct
  source 1..9: note = Seed: VVGADGVGK (KRAS G12D)
YVGLDPVGP

SEQ ID NO: 11960 - protein, 9 aa, synthetic construct
  source 1..9: note = Seed: VVGADGVGK (KRAS G12D)
YVGLDPVGQ

SEQ ID NO: 11961 - protein, 9 aa, synthetic construct
  source 1..9: note = Seed: VVGADGVGK (KRAS G12D)
YVGLDPVGR

SEQ ID NO: 11962 - protein, 9 aa, synthetic construct
  source 1..9: note = Seed: VVGADGVGK (KRAS G12D)
YVGLDPVGS

SEQ ID NO: 11963 - protein, 9 aa, synthetic construct
  source 1..9: note = Seed: VVGADGVGK (KRAS G12D)
YVGLDPVGT

SEQ ID NO: 11964 - protein, 9 aa, synthetic construct
  source 1..9: note = Seed: VVGADGVGK (KRAS G12D)
YVGLDPVGV

SEQ ID NO: 11965 - protein, 9 aa, synthetic construct
  source 1..9: note = Seed: VVGADGVGK (KRAS G12D)
YVGLDPVGY

SEQ ID NO: 11966 - protein, 9 aa, synthetic construct
  source 1..9: note = Seed: VVGADGVGK (KRAS G12D)
YVGLDQVGA

SEQ ID NO: 11967 - protein, 9 aa, synthetic construct
  source 1..9: note = Seed: VVGADGVGK (KRAS G12D)
YVGLDQVGI

SEQ ID NO: 11968 - protein, 9 aa, synthetic construct
  source 1..9: note = Seed: VVGADGVGK (KRAS G12D)
YVGLDQVGL

SEQ ID NO: 11969 - protein, 9 aa, synthetic construct
  source 1..9: note = Seed: VVGADGVGK (KRAS G12D)
YVGLDQVGV

SEQ ID NO: 11970 - protein, 9 aa, synthetic construct
  source 1..9: note = Seed: VVGADGVGK (KRAS G12D)
YVGLDSVGA

SEQ ID NO: 11971 - protein, 9 aa, synthetic construct
  source 1..9: note = Seed: VVGADGVGK (KRAS G12D)
YVGLDSVGC

SEQ ID NO: 11972 - protein, 9 aa, synthetic construct
  source 1..9: note = Seed: VVGADGVGK (KRAS G12D)
YVGLDSVGF

SEQ ID NO: 11973 - protein, 9 aa, synthetic construct
  source 1..9: note = Seed: VVGADGVGK (KRAS G12D)
YVGLDSVGG

SEQ ID NO: 11974 - protein, 9 aa, synthetic construct
  source 1..9: note = Seed: VVGADGVGK (KRAS G12D)
YVGLDSVGH

SEQ ID NO: 11975 - protein, 9 aa, synthetic construct
  source 1..9: note = Seed: VVGADGVGK (KRAS G12D)
YVGLDSVGI

SEQ ID NO: 11976 - protein, 9 aa, synthetic construct
  source 1..9: note = Seed: VVGADGVGK (KRAS G12D)
YVGLDSVGK

SEQ ID NO: 11977 - protein, 9 aa, synthetic construct
  source 1..9: note = Seed: VVGADGVGK (KRAS G12D)
YVGLDSVGL

SEQ ID NO: 11978 - protein, 9 aa, synthetic construct
  source 1..9: note = Seed: VVGADGVGK (KRAS G12D)
YVGLDSVGM

SEQ ID NO: 11979 - protein, 9 aa, synthetic construct
  source 1..9: note = Seed: VVGADGVGK (KRAS G12D)
YVGLDSVGN

SEQ ID NO: 11980 - protein, 9 aa, synthetic construct
  source 1..9: note = Seed: VVGADGVGK (KRAS G12D)
YVGLDSVGP

SEQ ID NO: 11981 - protein, 9 aa, synthetic construct
  source 1..9: note = Seed: VVGADGVGK (KRAS G12D)
YVGLDSVGQ

SEQ ID NO: 11982 - protein, 9 aa, synthetic construct
  source 1..9: note = Seed: VVGADGVGK (KRAS G12D)
YVGLDSVGR

SEQ ID NO: 11983 - protein, 9 aa, synthetic construct
  source 1..9: note = Seed: VVGADGVGK (KRAS G12D)
YVGLDSVGS

SEQ ID NO: 11984 - protein, 9 aa, synthetic construct
  source 1..9: note = Seed: VVGADGVGK (KRAS G12D)
YVGLDSVGT

SEQ ID NO: 11985 - protein, 9 aa, synthetic construct
  source 1..9: note = Seed: VVGADGVGK (KRAS G12D)
YVGLDSVGV

SEQ ID NO: 11986 - protein, 9 aa, synthetic construct
  source 1..9: note = Seed: VVGADGVGK (KRAS G12D)
YVGLDSVGY

SEQ ID NO: 11987 - protein, 9 aa, synthetic construct
  source 1..9: note = Seed: VVGADGVGK (KRAS G12D)
YVGLDTVGA

SEQ ID NO: 11988 - protein, 9 aa, synthetic construct
  source 1..9: note = Seed: VVGADGVGK (KRAS G12D)
YVGLDTVGG

SEQ ID NO: 11989 - protein, 9 aa, synthetic construct
  source 1..9: note = Seed: VVGADGVGK (KRAS G12D)
YVGLDTVGH

SEQ ID NO: 11990 - protein, 9 aa, synthetic construct
  source 1..9: note = Seed: VVGADGVGK (KRAS G12D)
YVGLDTVGI

SEQ ID NO: 11991 - protein, 9 aa, synthetic construct
  source 1..9: note = Seed: VVGADGVGK (KRAS G12D)
YVGLDTVGK

SEQ ID NO: 11992 - protein, 9 aa, synthetic construct
  source 1..9: note = Seed: VVGADGVGK (KRAS G12D)
YVGLDTVGL

SEQ ID NO: 11993 - protein, 9 aa, synthetic construct
  source 1..9: note = Seed: VVGADGVGK (KRAS G12D)
YVGLDTVGM

SEQ ID NO: 11994 - protein, 9 aa, synthetic construct
  source 1..9: note = Seed: VVGADGVGK (KRAS G12D)
YVGLDTVGN

SEQ ID NO: 11995 - protein, 9 aa, synthetic construct
  source 1..9: note = Seed: VVGADGVGK (KRAS G12D)
YVGLDTVGQ

SEQ ID NO: 11996 - protein, 9 aa, synthetic construct
  source 1..9: note = Seed: VVGADGVGK (KRAS G12D)
YVGLDTVGR

SEQ ID NO: 11997 - protein, 9 aa, synthetic construct
  source 1..9: note = Seed: VVGADGVGK (KRAS G12D)
YVGLDTVGS

SEQ ID NO: 11998 - protein, 9 aa, synthetic construct
  source 1..9: note = Seed: VVGADGVGK (KRAS G12D)
YVGLDTVGT

SEQ ID NO: 11999 - protein, 9 aa, synthetic construct
  source 1..9: note = Seed: VVGADGVGK (KRAS G12D)
YVGLDTVGV

SEQ ID NO: 12000 - protein, 9 aa, synthetic construct
  source 1..9: note = Seed: VVGADGVGK (KRAS G12D)
YVGLDVVGA

SEQ ID NO: 12001 - protein, 9 aa, synthetic construct
  source 1..9: note = Seed: VVGADGVGK (KRAS G12D)
YVGLDVVGG

SEQ ID NO: 12002 - protein, 9 aa, synthetic construct
  source 1..9: note = Seed: VVGADGVGK (KRAS G12D)
YVGLDVVGH

SEQ ID NO: 12003 - protein, 9 aa, synthetic construct
  source 1..9: note = Seed: VVGADGVGK (KRAS G12D)
YVGLDVVGI

SEQ ID NO: 12004 - protein, 9 aa, synthetic construct
  source 1..9: note = Seed: VVGADGVGK (KRAS G12D)
YVGLDVVGL

SEQ ID NO: 12005 - protein, 9 aa, synthetic construct
  source 1..9: note = Seed: VVGADGVGK (KRAS G12D)
YVGLDVVGM

SEQ ID NO: 12006 - protein, 9 aa, synthetic construct
  source 1..9: note = Seed: VVGADGVGK (KRAS G12D)
YVGLDVVGN

SEQ ID NO: 12007 - protein, 9 aa, synthetic construct
  source 1..9: note = Seed: VVGADGVGK (KRAS G12D)
YVGLDVVGS

SEQ ID NO: 12008 - protein, 9 aa, synthetic construct
  source 1..9: note = Seed: VVGADGVGK (KRAS G12D)
YVGLDVVGT

SEQ ID NO: 12009 - protein, 9 aa, synthetic construct
  source 1..9: note = Seed: VVGADGVGK (KRAS G12D)
YVGLDVVGV

SEQ ID NO: 12010 - protein, 9 aa, synthetic construct
  source 1..9: note = Seed: VVGADGVGK (KRAS G12D)
YVGMDAVGA

SEQ ID NO: 12011 - protein, 9 aa, synthetic construct
  source 1..9: note = Seed: VVGADGVGK (KRAS G12D)
YVGMDAVGC

SEQ ID NO: 12012 - protein, 9 aa, synthetic construct
  source 1..9: note = Seed: VVGADGVGK (KRAS G12D)
YVGMDAVGF

SEQ ID NO: 12013 - protein, 9 aa, synthetic construct
  source 1..9: note = Seed: VVGADGVGK (KRAS G12D)
YVGMDAVGG

SEQ ID NO: 12014 - protein, 9 aa, synthetic construct
  source 1..9: note = Seed: VVGADGVGK (KRAS G12D)
YVGMDAVGH

SEQ ID NO: 12015 - protein, 9 aa, synthetic construct
  source 1..9: note = Seed: VVGADGVGK (KRAS G12D)
YVGMDAVGI

SEQ ID NO: 12016 - protein, 9 aa, synthetic construct
  source 1..9: note = Seed: VVGADGVGK (KRAS G12D)
YVGMDAVGK

SEQ ID NO: 12017 - protein, 9 aa, synthetic construct
  source 1..9: note = Seed: VVGADGVGK (KRAS G12D)
YVGMDAVGL

SEQ ID NO: 12018 - protein, 9 aa, synthetic construct
  source 1..9: note = Seed: VVGADGVGK (KRAS G12D)
YVGMDAVGM

SEQ ID NO: 12019 - protein, 9 aa, synthetic construct
  source 1..9: note = Seed: VVGADGVGK (KRAS G12D)
YVGMDAVGN

SEQ ID NO: 12020 - protein, 9 aa, synthetic construct
  source 1..9: note = Seed: VVGADGVGK (KRAS G12D)
YVGMDAVGP

SEQ ID NO: 12021 - protein, 9 aa, synthetic construct
  source 1..9: note = Seed: VVGADGVGK (KRAS G12D)
YVGMDAVGQ

SEQ ID NO: 12022 - protein, 9 aa, synthetic construct
  source 1..9: note = Seed: VVGADGVGK (KRAS G12D)
YVGMDAVGR

SEQ ID NO: 12023 - protein, 9 aa, synthetic construct
  source 1..9: note = Seed: VVGADGVGK (KRAS G12D)
YVGMDAVGS

SEQ ID NO: 12024 - protein, 9 aa, synthetic construct
  source 1..9: note = Seed: VVGADGVGK (KRAS G12D)
YVGMDAVGT

SEQ ID NO: 12025 - protein, 9 aa, synthetic construct
  source 1..9: note = Seed: VVGADGVGK (KRAS G12D)
YVGMDAVGV

SEQ ID NO: 12026 - protein, 9 aa, synthetic construct
  source 1..9: note = Seed: VVGADGVGK (KRAS G12D)
YVGMDAVGY

SEQ ID NO: 12027 - protein, 9 aa, synthetic construct
  source 1..9: note = Seed: VVGADGVGK (KRAS G12D)
YVGMDGVGA

SEQ ID NO: 12028 - protein, 9 aa, synthetic construct
  source 1..9: note = Seed: VVGADGVGK (KRAS G12D)
YVGMDGVGC

SEQ ID NO: 12029 - protein, 9 aa, synthetic construct
  source 1..9: note = Seed: VVGADGVGK (KRAS G12D)
YVGMDGVGF

SEQ ID NO: 12030 - protein, 9 aa, synthetic construct
  source 1..9: note = Seed: VVGADGVGK (KRAS G12D)
YVGMDGVGG

SEQ ID NO: 12031 - protein, 9 aa, synthetic construct
  source 1..9: note = Seed: VVGADGVGK (KRAS G12D)
YVGMDGVGH

SEQ ID NO: 12032 - protein, 9 aa, synthetic construct
  source 1..9: note = Seed: VVGADGVGK (KRAS G12D)
YVGMDGVGI

SEQ ID NO: 12033 - protein, 9 aa, synthetic construct
  source 1..9: note = Seed: VVGADGVGK (KRAS G12D)
YVGMDGVGK

SEQ ID NO: 12034 - protein, 9 aa, synthetic construct
  source 1..9: note = Seed: VVGADGVGK (KRAS G12D)
YVGMDGVGL

SEQ ID NO: 12035 - protein, 9 aa, synthetic construct
  source 1..9: note = Seed: VVGADGVGK (KRAS G12D)
YVGMDGVGM

SEQ ID NO: 12036 - protein, 9 aa, synthetic construct
  source 1..9: note = Seed: VVGADGVGK (KRAS G12D)
YVGMDGVGN

SEQ ID NO: 12037 - protein, 9 aa, synthetic construct
  source 1..9: note = Seed: VVGADGVGK (KRAS G12D)
YVGMDGVGP

SEQ ID NO: 12038 - protein, 9 aa, synthetic construct
  source 1..9: note = Seed: VVGADGVGK (KRAS G12D)
YVGMDGVGQ

SEQ ID NO: 12039 - protein, 9 aa, synthetic construct
  source 1..9: note = Seed: VVGADGVGK (KRAS G12D)
YVGMDGVGR

SEQ ID NO: 12040 - protein, 9 aa, synthetic construct
  source 1..9: note = Seed: VVGADGVGK (KRAS G12D)
YVGMDGVGS

SEQ ID NO: 12041 - protein, 9 aa, synthetic construct
  source 1..9: note = Seed: VVGADGVGK (KRAS G12D)
YVGMDGVGT

SEQ ID NO: 12042 - protein, 9 aa, synthetic construct
  source 1..9: note = Seed: VVGADGVGK (KRAS G12D)
YVGMDGVGV

SEQ ID NO: 12043 - protein, 9 aa, synthetic construct
  source 1..9: note = Seed: VVGADGVGK (KRAS G12D)
YVGMDGVGY

SEQ ID NO: 12044 - protein, 9 aa, synthetic construct
  source 1..9: note = Seed: VVGADGVGK (KRAS G12D)
YVGMDHVGA

SEQ ID NO: 12045 - protein, 9 aa, synthetic construct
  source 1..9: note = Seed: VVGADGVGK (KRAS G12D)
YVGMDHVGI

SEQ ID NO: 12046 - protein, 9 aa, synthetic construct
  source 1..9: note = Seed: VVGADGVGK (KRAS G12D)
YVGMDHVGL

SEQ ID NO: 12047 - protein, 9 aa, synthetic construct
  source 1..9: note = Seed: VVGADGVGK (KRAS G12D)
YVGMDHVGM

SEQ ID NO: 12048 - protein, 9 aa, synthetic construct
  source 1..9: note = Seed: VVGADGVGK (KRAS G12D)
YVGMDHVGV

SEQ ID NO: 12049 - protein, 9 aa, synthetic construct
  source 1..9: note = Seed: VVGADGVGK (KRAS G12D)
YVGMDIVGA

SEQ ID NO: 12050 - protein, 9 aa, synthetic construct
  source 1..9: note = Seed: VVGADGVGK (KRAS G12D)
YVGMDIVGS

SEQ ID NO: 12051 - protein, 9 aa, synthetic construct
  source 1..9: note = Seed: VVGADGVGK (KRAS G12D)
YVGMDIVGT

SEQ ID NO: 12052 - protein, 9 aa, synthetic construct
  source 1..9: note = Seed: VVGADGVGK (KRAS G12D)
YVGMDIVGV

SEQ ID NO: 12053 - protein, 9 aa, synthetic construct
  source 1..9: note = Seed: VVGADGVGK (KRAS G12D)
YVGMDLVGA

SEQ ID NO: 12054 - protein, 9 aa, synthetic construct
  source 1..9: note = Seed: VVGADGVGK (KRAS G12D)
YVGMDMVGA

SEQ ID NO: 12055 - protein, 9 aa, synthetic construct
  source 1..9: note = Seed: VVGADGVGK (KRAS G12D)
YVGMDNVGA

SEQ ID NO: 12056 - protein, 9 aa, synthetic construct
  source 1..9: note = Seed: VVGADGVGK (KRAS G12D)
YVGMDNVGG

SEQ ID NO: 12057 - protein, 9 aa, synthetic construct
  source 1..9: note = Seed: VVGADGVGK (KRAS G12D)
YVGMDNVGH

SEQ ID NO: 12058 - protein, 9 aa, synthetic construct
  source 1..9: note = Seed: VVGADGVGK (KRAS G12D)
YVGMDNVGI

SEQ ID NO: 12059 - protein, 9 aa, synthetic construct
  source 1..9: note = Seed: VVGADGVGK (KRAS G12D)
YVGMDNVGL

SEQ ID NO: 12060 - protein, 9 aa, synthetic construct
  source 1..9: note = Seed: VVGADGVGK (KRAS G12D)
YVGMDNVGM

SEQ ID NO: 12061 - protein, 9 aa, synthetic construct
  source 1..9: note = Seed: VVGADGVGK (KRAS G12D)
YVGMDNVGN

SEQ ID NO: 12062 - protein, 9 aa, synthetic construct
  source 1..9: note = Seed: VVGADGVGK (KRAS G12D)
YVGMDNVGQ

SEQ ID NO: 12063 - protein, 9 aa, synthetic construct
  source 1..9: note = Seed: VVGADGVGK (KRAS G12D)
YVGMDNVGS

SEQ ID NO: 12064 - protein, 9 aa, synthetic construct
  source 1..9: note = Seed: VVGADGVGK (KRAS G12D)
YVGMDNVGT

SEQ ID NO: 12065 - protein, 9 aa, synthetic construct
  source 1..9: note = Seed: VVGADGVGK (KRAS G12D)
YVGMDNVGV

SEQ ID NO: 12066 - protein, 9 aa, synthetic construct
  source 1..9: note = Seed: VVGADGVGK (KRAS G12D)
YVGMDPVGA

SEQ ID NO: 12067 - protein, 9 aa, synthetic construct
  source 1..9: note = Seed: VVGADGVGK (KRAS G12D)
YVGMDPVGC

SEQ ID NO: 12068 - protein, 9 aa, synthetic construct
  source 1..9: note = Seed: VVGADGVGK (KRAS G12D)
YVGMDPVGF

SEQ ID NO: 12069 - protein, 9 aa, synthetic construct
  source 1..9: note = Seed: VVGADGVGK (KRAS G12D)
YVGMDPVGG

SEQ ID NO: 12070 - protein, 9 aa, synthetic construct
  source 1..9: note = Seed: VVGADGVGK (KRAS G12D)
YVGMDPVGH

SEQ ID NO: 12071 - protein, 9 aa, synthetic construct
  source 1..9: note = Seed: VVGADGVGK (KRAS G12D)
YVGMDPVGI

SEQ ID NO: 12072 - protein, 9 aa, synthetic construct
  source 1..9: note = Seed: VVGADGVGK (KRAS G12D)
YVGMDPVGK

SEQ ID NO: 12073 - protein, 9 aa, synthetic construct
  source 1..9: note = Seed: VVGADGVGK (KRAS G12D)
YVGMDPVGL

SEQ ID NO: 12074 - protein, 9 aa, synthetic construct
  source 1..9: note = Seed: VVGADGVGK (KRAS G12D)
YVGMDPVGM

SEQ ID NO: 12075 - protein, 9 aa, synthetic construct
  source 1..9: note = Seed: VVGADGVGK (KRAS G12D)
YVGMDPVGN

SEQ ID NO: 12076 - protein, 9 aa, synthetic construct
  source 1..9: note = Seed: VVGADGVGK (KRAS G12D)
YVGMDPVGP

SEQ ID NO: 12077 - protein, 9 aa, synthetic construct
  source 1..9: note = Seed: VVGADGVGK (KRAS G12D)
YVGMDPVGQ

SEQ ID NO: 12078 - protein, 9 aa, synthetic construct
  source 1..9: note = Seed: VVGADGVGK (KRAS G12D)
YVGMDPVGR

SEQ ID NO: 12079 - protein, 9 aa, synthetic construct
  source 1..9: note = Seed: VVGADGVGK (KRAS G12D)
YVGMDPVGS

SEQ ID NO: 12080 - protein, 9 aa, synthetic construct
  source 1..9: note = Seed: VVGADGVGK (KRAS G12D)
YVGMDPVGT

SEQ ID NO: 12081 - protein, 9 aa, synthetic construct
  source 1..9: note = Seed: VVGADGVGK (KRAS G12D)
YVGMDPVGV

SEQ ID NO: 12082 - protein, 9 aa, synthetic construct
  source 1..9: note = Seed: VVGADGVGK (KRAS G12D)
YVGMDPVGY

SEQ ID NO: 12083 - protein, 9 aa, synthetic construct
  source 1..9: note = Seed: VVGADGVGK (KRAS G12D)
YVGMDQVGA

SEQ ID NO: 12084 - protein, 9 aa, synthetic construct
  source 1..9: note = Seed: VVGADGVGK (KRAS G12D)
YVGMDQVGL

SEQ ID NO: 12085 - protein, 9 aa, synthetic construct
  source 1..9: note = Seed: VVGADGVGK (KRAS G12D)
YVGMDQVGV

SEQ ID NO: 12086 - protein, 9 aa, synthetic construct
  source 1..9: note = Seed: VVGADGVGK (KRAS G12D)
YVGMDSVGA

SEQ ID NO: 12087 - protein, 9 aa, synthetic construct
  source 1..9: note = Seed: VVGADGVGK (KRAS G12D)
YVGMDSVGC

SEQ ID NO: 12088 - protein, 9 aa, synthetic construct
  source 1..9: note = Seed: VVGADGVGK (KRAS G12D)
YVGMDSVGF

SEQ ID NO: 12089 - protein, 9 aa, synthetic construct
  source 1..9: note = Seed: VVGADGVGK (KRAS G12D)
YVGMDSVGG

SEQ ID NO: 12090 - protein, 9 aa, synthetic construct
  source 1..9: note = Seed: VVGADGVGK (KRAS G12D)
YVGMDSVGH

SEQ ID NO: 12091 - protein, 9 aa, synthetic construct
  source 1..9: note = Seed: VVGADGVGK (KRAS G12D)
YVGMDSVGI

SEQ ID NO: 12092 - protein, 9 aa, synthetic construct
  source 1..9: note = Seed: VVGADGVGK (KRAS G12D)
YVGMDSVGK

SEQ ID NO: 12093 - protein, 9 aa, synthetic construct
  source 1..9: note = Seed: VVGADGVGK (KRAS G12D)
YVGMDSVGL

SEQ ID NO: 12094 - protein, 9 aa, synthetic construct
  source 1..9: note = Seed: VVGADGVGK (KRAS G12D)
YVGMDSVGM

SEQ ID NO: 12095 - protein, 9 aa, synthetic construct
  source 1..9: note = Seed: VVGADGVGK (KRAS G12D)
YVGMDSVGN

SEQ ID NO: 12096 - protein, 9 aa, synthetic construct
  source 1..9: note = Seed: VVGADGVGK (KRAS G12D)
YVGMDSVGP

SEQ ID NO: 12097 - protein, 9 aa, synthetic construct
  source 1..9: note = Seed: VVGADGVGK (KRAS G12D)
YVGMDSVGQ

SEQ ID NO: 12098 - protein, 9 aa, synthetic construct
  source 1..9: note = Seed: VVGADGVGK (KRAS G12D)
YVGMDSVGR

SEQ ID NO: 12099 - protein, 9 aa, synthetic construct
  source 1..9: note = Seed: VVGADGVGK (KRAS G12D)
YVGMDSVGS

SEQ ID NO: 12100 - protein, 9 aa, synthetic construct
  source 1..9: note = Seed: VVGADGVGK (KRAS G12D)
YVGMDSVGT

SEQ ID NO: 12101 - protein, 9 aa, synthetic construct
  source 1..9: note = Seed: VVGADGVGK (KRAS G12D)
YVGMDSVGV

SEQ ID NO: 12102 - protein, 9 aa, synthetic construct
  source 1..9: note = Seed: VVGADGVGK (KRAS G12D)
YVGMDSVGY

SEQ ID NO: 12103 - protein, 9 aa, synthetic construct
  source 1..9: note = Seed: VVGADGVGK (KRAS G12D)
YVGMDTVGA

SEQ ID NO: 12104 - protein, 9 aa, synthetic construct
  source 1..9: note = Seed: VVGADGVGK (KRAS G12D)
YVGMDTVGG

SEQ ID NO: 12105 - protein, 9 aa, synthetic construct
  source 1..9: note = Seed: VVGADGVGK (KRAS G12D)
YVGMDTVGH

SEQ ID NO: 12106 - protein, 9 aa, synthetic construct
  source 1..9: note = Seed: VVGADGVGK (KRAS G12D)
YVGMDTVGI

SEQ ID NO: 12107 - protein, 9 aa, synthetic construct
  source 1..9: note = Seed: VVGADGVGK (KRAS G12D)
YVGMDTVGL

SEQ ID NO: 12108 - protein, 9 aa, synthetic construct
  source 1..9: note = Seed: VVGADGVGK (KRAS G12D)
YVGMDTVGM

SEQ ID NO: 12109 - protein, 9 aa, synthetic construct
  source 1..9: note = Seed: VVGADGVGK (KRAS G12D)
YVGMDTVGN

SEQ ID NO: 12110 - protein, 9 aa, synthetic construct
  source 1..9: note = Seed: VVGADGVGK (KRAS G12D)
YVGMDTVGR

SEQ ID NO: 12111 - protein, 9 aa, synthetic construct
  source 1..9: note = Seed: VVGADGVGK (KRAS G12D)
YVGMDTVGS

SEQ ID NO: 12112 - protein, 9 aa, synthetic construct
  source 1..9: note = Seed: VVGADGVGK (KRAS G12D)
YVGMDTVGT

SEQ ID NO: 12113 - protein, 9 aa, synthetic construct
  source 1..9: note = Seed: VVGADGVGK (KRAS G12D)
YVGMDTVGV

SEQ ID NO: 12114 - protein, 9 aa, synthetic construct
  source 1..9: note = Seed: VVGADGVGK (KRAS G12D)
YVGMDVVGA

SEQ ID NO: 12115 - protein, 9 aa, synthetic construct
  source 1..9: note = Seed: VVGADGVGK (KRAS G12D)
YVGMDVVGG

SEQ ID NO: 12116 - protein, 9 aa, synthetic construct
  source 1..9: note = Seed: VVGADGVGK (KRAS G12D)
YVGMDVVGH

SEQ ID NO: 12117 - protein, 9 aa, synthetic construct
  source 1..9: note = Seed: VVGADGVGK (KRAS G12D)
YVGMDVVGI

SEQ ID NO: 12118 - protein, 9 aa, synthetic construct
  source 1..9: note = Seed: VVGADGVGK (KRAS G12D)
YVGMDVVGL

SEQ ID NO: 12119 - protein, 9 aa, synthetic construct
  source 1..9: note = Seed: VVGADGVGK (KRAS G12D)
YVGMDVVGM

SEQ ID NO: 12120 - protein, 9 aa, synthetic construct
  source 1..9: note = Seed: VVGADGVGK (KRAS G12D)
YVGMDVVGN

SEQ ID NO: 12121 - protein, 9 aa, synthetic construct
  source 1..9: note = Seed: VVGADGVGK (KRAS G12D)
YVGMDVVGS

SEQ ID NO: 12122 - protein, 9 aa, synthetic construct
  source 1..9: note = Seed: VVGADGVGK (KRAS G12D)
YVGMDVVGT

SEQ ID NO: 12123 - protein, 9 aa, synthetic construct
  source 1..9: note = Seed: VVGADGVGK (KRAS G12D)
YVGMDVVGV

SEQ ID NO: 12124 - protein, 9 aa, synthetic construct
  source 1..9: note = Seed: VVGADGVGK (KRAS G12D)
YVGNDAVGA

SEQ ID NO: 12125 - protein, 9 aa, synthetic construct
  source 1..9: note = Seed: VVGADGVGK (KRAS G12D)
YVGNDAVGI

SEQ ID NO: 12126 - protein, 9 aa, synthetic construct
  source 1..9: note = Seed: VVGADGVGK (KRAS G12D)
YVGNDAVGL

SEQ ID NO: 12127 - protein, 9 aa, synthetic construct
  source 1..9: note = Seed: VVGADGVGK (KRAS G12D)
YVGNDAVGM

SEQ ID NO: 12128 - protein, 9 aa, synthetic construct
  source 1..9: note = Seed: VVGADGVGK (KRAS G12D)
YVGNDAVGV

SEQ ID NO: 12129 - protein, 9 aa, synthetic construct
  source 1..9: note = Seed: VVGADGVGK (KRAS G12D)
YVGQDAVGA

SEQ ID NO: 12130 - protein, 9 aa, synthetic construct
  source 1..9: note = Seed: VVGADGVGK (KRAS G12D)
YVGQDAVGF

SEQ ID NO: 12131 - protein, 9 aa, synthetic construct
  source 1..9: note = Seed: VVGADGVGK (KRAS G12D)
YVGQDAVGG

SEQ ID NO: 12132 - protein, 9 aa, synthetic construct
  source 1..9: note = Seed: VVGADGVGK (KRAS G12D)
YVGQDAVGH

SEQ ID NO: 12133 - protein, 9 aa, synthetic construct
  source 1..9: note = Seed: VVGADGVGK (KRAS G12D)
YVGQDAVGI

SEQ ID NO: 12134 - protein, 9 aa, synthetic construct
  source 1..9: note = Seed: VVGADGVGK (KRAS G12D)
YVGQDAVGL

SEQ ID NO: 12135 - protein, 9 aa, synthetic construct
  source 1..9: note = Seed: VVGADGVGK (KRAS G12D)
YVGQDAVGM

SEQ ID NO: 12136 - protein, 9 aa, synthetic construct
  source 1..9: note = Seed: VVGADGVGK (KRAS G12D)
YVGQDAVGN

SEQ ID NO: 12137 - protein, 9 aa, synthetic construct
  source 1..9: note = Seed: VVGADGVGK (KRAS G12D)
YVGQDAVGQ

SEQ ID NO: 12138 - protein, 9 aa, synthetic construct
  source 1..9: note = Seed: VVGADGVGK (KRAS G12D)
YVGQDAVGS

SEQ ID NO: 12139 - protein, 9 aa, synthetic construct
  source 1..9: note = Seed: VVGADGVGK (KRAS G12D)
YVGQDAVGT

SEQ ID NO: 12140 - protein, 9 aa, synthetic construct
  source 1..9: note = Seed: VVGADGVGK (KRAS G12D)
YVGQDAVGV

SEQ ID NO: 12141 - protein, 9 aa, synthetic construct
  source 1..9: note = Seed: VVGADGVGK (KRAS G12D)
YVGQDGVGA

SEQ ID NO: 12142 - protein, 9 aa, synthetic construct
  source 1..9: note = Seed: VVGADGVGK (KRAS G12D)
YVGQDGVGG

SEQ ID NO: 12143 - protein, 9 aa, synthetic construct
  source 1..9: note = Seed: VVGADGVGK (KRAS G12D)
YVGQDGVGI

SEQ ID NO: 12144 - protein, 9 aa, synthetic construct
  source 1..9: note = Seed: VVGADGVGK (KRAS G12D)
YVGQDGVGL

SEQ ID NO: 12145 - protein, 9 aa, synthetic construct
  source 1..9: note = Seed: VVGADGVGK (KRAS G12D)
YVGQDGVGM

SEQ ID NO: 12146 - protein, 9 aa, synthetic construct
  source 1..9: note = Seed: VVGADGVGK (KRAS G12D)
YVGQDGVGS

SEQ ID NO: 12147 - protein, 9 aa, synthetic construct
  source 1..9: note = Seed: VVGADGVGK (KRAS G12D)
YVGQDGVGT

SEQ ID NO: 12148 - protein, 9 aa, synthetic construct
  source 1..9: note = Seed: VVGADGVGK (KRAS G12D)
YVGQDGVGV

SEQ ID NO: 12149 - protein, 9 aa, synthetic construct
  source 1..9: note = Seed: VVGADGVGK (KRAS G12D)
YVGQDNVGA

SEQ ID NO: 12150 - protein, 9 aa, synthetic construct
  source 1..9: note = Seed: VVGADGVGK (KRAS G12D)
YVGQDNVGI

SEQ ID NO: 12151 - protein, 9 aa, synthetic construct
  source 1..9: note = Seed: VVGADGVGK (KRAS G12D)
YVGQDNVGL

SEQ ID NO: 12152 - protein, 9 aa, synthetic construct
  source 1..9: note = Seed: VVGADGVGK (KRAS G12D)
YVGQDNVGS

SEQ ID NO: 12153 - protein, 9 aa, synthetic construct
  source 1..9: note = Seed: VVGADGVGK (KRAS G12D)
YVGQDNVGV

SEQ ID NO: 12154 - protein, 9 aa, synthetic construct
  source 1..9: note = Seed: VVGADGVGK (KRAS G12D)
YVGQDPVGA

SEQ ID NO: 12155 - protein, 9 aa, synthetic construct
  source 1..9: note = Seed: VVGADGVGK (KRAS G12D)
YVGQDPVGI

SEQ ID NO: 12156 - protein, 9 aa, synthetic construct
  source 1..9: note = Seed: VVGADGVGK (KRAS G12D)
YVGQDPVGL

SEQ ID NO: 12157 - protein, 9 aa, synthetic construct
  source 1..9: note = Seed: VVGADGVGK (KRAS G12D)
YVGQDPVGM

SEQ ID NO: 12158 - protein, 9 aa, synthetic construct
  source 1..9: note = Seed: VVGADGVGK (KRAS G12D)
YVGQDPVGS

SEQ ID NO: 12159 - protein, 9 aa, synthetic construct
  source 1..9: note = Seed: VVGADGVGK (KRAS G12D)
YVGQDPVGT

SEQ ID NO: 12160 - protein, 9 aa, synthetic construct
  source 1..9: note = Seed: VVGADGVGK (KRAS G12D)
YVGQDPVGV

SEQ ID NO: 12161 - protein, 9 aa, synthetic construct
  source 1..9: note = Seed: VVGADGVGK (KRAS G12D)
YVGQDSVGA

SEQ ID NO: 12162 - protein, 9 aa, synthetic construct
  source 1..9: note = Seed: VVGADGVGK (KRAS G12D)
YVGQDSVGG

SEQ ID NO: 12163 - protein, 9 aa, synthetic construct
  source 1..9: note = Seed: VVGADGVGK (KRAS G12D)
YVGQDSVGI

SEQ ID NO: 12164 - protein, 9 aa, synthetic construct
  source 1..9: note = Seed: VVGADGVGK (KRAS G12D)
YVGQDSVGL

SEQ ID NO: 12165 - protein, 9 aa, synthetic construct
  source 1..9: note = Seed: VVGADGVGK (KRAS G12D)
YVGQDSVGM

SEQ ID NO: 12166 - protein, 9 aa, synthetic construct
  source 1..9: note = Seed: VVGADGVGK (KRAS G12D)
YVGQDSVGS

SEQ ID NO: 12167 - protein, 9 aa, synthetic construct
  source 1..9: note = Seed: VVGADGVGK (KRAS G12D)
YVGQDSVGT

SEQ ID NO: 12168 - protein, 9 aa, synthetic construct
  source 1..9: note = Seed: VVGADGVGK (KRAS G12D)
YVGQDSVGV

SEQ ID NO: 12169 - protein, 9 aa, synthetic construct
  source 1..9: note = Seed: VVGADGVGK (KRAS G12D)
YVGQDTVGA

SEQ ID NO: 12170 - protein, 9 aa, synthetic construct
  source 1..9: note = Seed: VVGADGVGK (KRAS G12D)
YVGQDTVGI

SEQ ID NO: 12171 - protein, 9 aa, synthetic construct
  source 1..9: note = Seed: VVGADGVGK (KRAS G12D)
YVGQDTVGL

SEQ ID NO: 12172 - protein, 9 aa, synthetic construct
  source 1..9: note = Seed: VVGADGVGK (KRAS G12D)
YVGQDTVGM

SEQ ID NO: 12173 - protein, 9 aa, synthetic construct
  source 1..9: note = Seed: VVGADGVGK (KRAS G12D)
YVGQDTVGS

SEQ ID NO: 12174 - protein, 9 aa, synthetic construct
  source 1..9: note = Seed: VVGADGVGK (KRAS G12D)
YVGQDTVGT

SEQ ID NO: 12175 - protein, 9 aa, synthetic construct
  source 1..9: note = Seed: VVGADGVGK (KRAS G12D)
YVGQDTVGV

SEQ ID NO: 12176 - protein, 9 aa, synthetic construct
  source 1..9: note = Seed: VVGADGVGK (KRAS G12D)
YVGQDVVGA

SEQ ID NO: 12177 - protein, 9 aa, synthetic construct
  source 1..9: note = Seed: VVGADGVGK (KRAS G12D)
YVGQDVVGV

SEQ ID NO: 12178 - protein, 9 aa, synthetic construct
  source 1..9: note = Seed: VVGADGVGK (KRAS G12D)
YVGSDAVGA

SEQ ID NO: 12179 - protein, 9 aa, synthetic construct
  source 1..9: note = Seed: VVGADGVGK (KRAS G12D)
YVGSDAVGG

SEQ ID NO: 12180 - protein, 9 aa, synthetic construct
  source 1..9: note = Seed: VVGADGVGK (KRAS G12D)
YVGSDAVGI

SEQ ID NO: 12181 - protein, 9 aa, synthetic construct
  source 1..9: note = Seed: VVGADGVGK (KRAS G12D)
YVGSDAVGL

SEQ ID NO: 12182 - protein, 9 aa, synthetic construct
  source 1..9: note = Seed: VVGADGVGK (KRAS G12D)
YVGSDAVGM

SEQ ID NO: 12183 - protein, 9 aa, synthetic construct
  source 1..9: note = Seed: VVGADGVGK (KRAS G12D)
YVGSDAVGS

SEQ ID NO: 12184 - protein, 9 aa, synthetic construct
  source 1..9: note = Seed: VVGADGVGK (KRAS G12D)
YVGSDAVGT

SEQ ID NO: 12185 - protein, 9 aa, synthetic construct
  source 1..9: note = Seed: VVGADGVGK (KRAS G12D)
YVGSDAVGV

SEQ ID NO: 12186 - protein, 9 aa, synthetic construct
  source 1..9: note = Seed: VVGADGVGK (KRAS G12D)
YVGSDGVGA

SEQ ID NO: 12187 - protein, 9 aa, synthetic construct
  source 1..9: note = Seed: VVGADGVGK (KRAS G12D)
YVGSDGVGI

SEQ ID NO: 12188 - protein, 9 aa, synthetic construct
  source 1..9: note = Seed: VVGADGVGK (KRAS G12D)
YVGSDGVGL

SEQ ID NO: 12189 - protein, 9 aa, synthetic construct
  source 1..9: note = Seed: VVGADGVGK (KRAS G12D)
YVGSDGVGM

SEQ ID NO: 12190 - protein, 9 aa, synthetic construct
  source 1..9: note = Seed: VVGADGVGK (KRAS G12D)
YVGSDGVGV

SEQ ID NO: 12191 - protein, 9 aa, synthetic construct
  source 1..9: note = Seed: VVGADGVGK (KRAS G12D)
YVGSDPVGA

SEQ ID NO: 12192 - protein, 9 aa, synthetic construct
  source 1..9: note = Seed: VVGADGVGK (KRAS G12D)
YVGSDPVGI

SEQ ID NO: 12193 - protein, 9 aa, synthetic construct
  source 1..9: note = Seed: VVGADGVGK (KRAS G12D)
YVGSDPVGL

SEQ ID NO: 12194 - protein, 9 aa, synthetic construct
  source 1..9: note = Seed: VVGADGVGK (KRAS G12D)
YVGSDPVGM

SEQ ID NO: 12195 - protein, 9 aa, synthetic construct
  source 1..9: note = Seed: VVGADGVGK (KRAS G12D)
YVGSDPVGV

SEQ ID NO: 12196 - protein, 9 aa, synthetic construct
  source 1..9: note = Seed: VVGADGVGK (KRAS G12D)
YVGSDSVGA

SEQ ID NO: 12197 - protein, 9 aa, synthetic construct
  source 1..9: note = Seed: VVGADGVGK (KRAS G12D)
YVGSDSVGI

SEQ ID NO: 12198 - protein, 9 aa, synthetic construct
  source 1..9: note = Seed: VVGADGVGK (KRAS G12D)
YVGSDSVGL

SEQ ID NO: 12199 - protein, 9 aa, synthetic construct
  source 1..9: note = Seed: VVGADGVGK (KRAS G12D)
YVGSDSVGM

SEQ ID NO: 12200 - protein, 9 aa, synthetic construct
  source 1..9: note = Seed: VVGADGVGK (KRAS G12D)
YVGSDSVGS

SEQ ID NO: 12201 - protein, 9 aa, synthetic construct
  source 1..9: note = Seed: VVGADGVGK (KRAS G12D)
YVGSDSVGV

SEQ ID NO: 12202 - protein, 9 aa, synthetic construct
  source 1..9: note = Seed: VVGADGVGK (KRAS G12D)
YVGTDAVGA

SEQ ID NO: 12203 - protein, 9 aa, synthetic construct
  source 1..9: note = Seed: VVGADGVGK (KRAS G12D)
YVGTDAVGI

SEQ ID NO: 12204 - protein, 9 aa, synthetic construct
  source 1..9: note = Seed: VVGADGVGK (KRAS G12D)
YVGTDAVGL

SEQ ID NO: 12205 - protein, 9 aa, synthetic construct
  source 1..9: note = Seed: VVGADGVGK (KRAS G12D)
YVGTDAVGM

SEQ ID NO: 12206 - protein, 9 aa, synthetic construct
  source 1..9: note = Seed: VVGADGVGK (KRAS G12D)
YVGTDAVGS

SEQ ID NO: 12207 - protein, 9 aa, synthetic construct
  source 1..9: note = Seed: VVGADGVGK (KRAS G12D)
YVGTDAVGT

SEQ ID NO: 12208 - protein, 9 aa, synthetic construct
  source 1..9: note = Seed: VVGADGVGK (KRAS G12D)
YVGTDAVGV

SEQ ID NO: 12209 - protein, 9 aa, synthetic construct
  source 1..9: note = Seed: VVGADGVGK (KRAS G12D)
YVGTDGVGA

SEQ ID NO: 12210 - protein, 9 aa, synthetic construct
  source 1..9: note = Seed: VVGADGVGK (KRAS G12D)
YVGTDGVGI

SEQ ID NO: 12211 - protein, 9 aa, synthetic construct
  source 1..9: note = Seed: VVGADGVGK (KRAS G12D)
YVGTDGVGL

SEQ ID NO: 12212 - protein, 9 aa, synthetic construct
  source 1..9: note = Seed: VVGADGVGK (KRAS G12D)
YVGTDGVGV

SEQ ID NO: 12213 - protein, 9 aa, synthetic construct
  source 1..9: note = Seed: VVGADGVGK (KRAS G12D)
YVGTDPVGA

SEQ ID NO: 12214 - protein, 9 aa, synthetic construct
  source 1..9: note = Seed: VVGADGVGK (KRAS G12D)
YVGTDPVGI

SEQ ID NO: 12215 - protein, 9 aa, synthetic construct
  source 1..9: note = Seed: VVGADGVGK (KRAS G12D)
YVGTDPVGL

SEQ ID NO: 12216 - protein, 9 aa, synthetic construct
  source 1..9: note = Seed: VVGADGVGK (KRAS G12D)
YVGTDPVGV

SEQ ID NO: 12217 - protein, 9 aa, synthetic construct
  source 1..9: note = Seed: VVGADGVGK (KRAS G12D)
YVGTDSVGA

SEQ ID NO: 12218 - protein, 9 aa, synthetic construct
  source 1..9: note = Seed: VVGADGVGK (KRAS G12D)
YVGTDSVGI

SEQ ID NO: 12219 - protein, 9 aa, synthetic construct
  source 1..9: note = Seed: VVGADGVGK (KRAS G12D)
YVGTDSVGL

SEQ ID NO: 12220 - protein, 9 aa, synthetic construct
  source 1..9: note = Seed: VVGADGVGK (KRAS G12D)
YVGTDSVGV

SEQ ID NO: 12221 - protein, 9 aa, synthetic construct
  source 1..9: note = Seed: VVGADGVGK (KRAS G12D)
YVGVDAVGA

SEQ ID NO: 12222 - protein, 9 aa, synthetic construct
  source 1..9: note = Seed: VVGADGVGK (KRAS G12D)
YVGVDAVGG

SEQ ID NO: 12223 - protein, 9 aa, synthetic construct
  source 1..9: note = Seed: VVGADGVGK (KRAS G12D)
YVGVDAVGH

SEQ ID NO: 12224 - protein, 9 aa, synthetic construct
  source 1..9: note = Seed: VVGADGVGK (KRAS G12D)
YVGVDAVGI

SEQ ID NO: 12225 - protein, 9 aa, synthetic construct
  source 1..9: note = Seed: VVGADGVGK (KRAS G12D)
YVGVDAVGL

SEQ ID NO: 12226 - protein, 9 aa, synthetic construct
  source 1..9: note = Seed: VVGADGVGK (KRAS G12D)
YVGVDAVGM

SEQ ID NO: 12227 - protein, 9 aa, synthetic construct
  source 1..9: note = Seed: VVGADGVGK (KRAS G12D)
YVGVDAVGN

SEQ ID NO: 12228 - protein, 9 aa, synthetic construct
  source 1..9: note = Seed: VVGADGVGK (KRAS G12D)
YVGVDAVGS

SEQ ID NO: 12229 - protein, 9 aa, synthetic construct
  source 1..9: note = Seed: VVGADGVGK (KRAS G12D)
YVGVDAVGT

SEQ ID NO: 12230 - protein, 9 aa, synthetic construct
  source 1..9: note = Seed: VVGADGVGK (KRAS G12D)
YVGVDAVGV

SEQ ID NO: 12231 - protein, 9 aa, synthetic construct
  source 1..9: note = Seed: VVGADGVGK (KRAS G12D)
YVGVDGVGA

SEQ ID NO: 12232 - protein, 9 aa, synthetic construct
  source 1..9: note = Seed: VVGADGVGK (KRAS G12D)
YVGVDGVGG

SEQ ID NO: 12233 - protein, 9 aa, synthetic construct
  source 1..9: note = Seed: VVGADGVGK (KRAS G12D)
YVGVDGVGI

SEQ ID NO: 12234 - protein, 9 aa, synthetic construct
  source 1..9: note = Seed: VVGADGVGK (KRAS G12D)
YVGVDGVGL

SEQ ID NO: 12235 - protein, 9 aa, synthetic construct
  source 1..9: note = Seed: VVGADGVGK (KRAS G12D)
YVGVDGVGM

SEQ ID NO: 12236 - protein, 9 aa, synthetic construct
  source 1..9: note = Seed: VVGADGVGK (KRAS G12D)
YVGVDGVGS

SEQ ID NO: 12237 - protein, 9 aa, synthetic construct
  source 1..9: note = Seed: VVGADGVGK (KRAS G12D)
YVGVDGVGT

SEQ ID NO: 12238 - protein, 9 aa, synthetic construct
  source 1..9: note = Seed: VVGADGVGK (KRAS G12D)
YVGVDGVGV

SEQ ID NO: 12239 - protein, 9 aa, synthetic construct
  source 1..9: note = Seed: VVGADGVGK (KRAS G12D)
YVGVDNVGA

SEQ ID NO: 12240 - protein, 9 aa, synthetic construct
  source 1..9: note = Seed: VVGADGVGK (KRAS G12D)
YVGVDNVGI

SEQ ID NO: 12241 - protein, 9 aa, synthetic construct
  source 1..9: note = Seed: VVGADGVGK (KRAS G12D)
YVGVDNVGL

SEQ ID NO: 12242 - protein, 9 aa, synthetic construct
  source 1..9: note = Seed: VVGADGVGK (KRAS G12D)
YVGVDNVGV

SEQ ID NO: 12243 - protein, 9 aa, synthetic construct
  source 1..9: note = Seed: VVGADGVGK (KRAS G12D)
YVGVDPVGA

SEQ ID NO: 12244 - protein, 9 aa, synthetic construct
  source 1..9: note = Seed: VVGADGVGK (KRAS G12D)
YVGVDPVGG

SEQ ID NO: 12245 - protein, 9 aa, synthetic construct
  source 1..9: note = Seed: VVGADGVGK (KRAS G12D)
YVGVDPVGI

SEQ ID NO: 12246 - protein, 9 aa, synthetic construct
  source 1..9: note = Seed: VVGADGVGK (KRAS G12D)
YVGVDPVGL

SEQ ID NO: 12247 - protein, 9 aa, synthetic construct
  source 1..9: note = Seed: VVGADGVGK (KRAS G12D)
YVGVDPVGM

SEQ ID NO: 12248 - protein, 9 aa, synthetic construct
  source 1..9: note = Seed: VVGADGVGK (KRAS G12D)
YVGVDPVGS

SEQ ID NO: 12249 - protein, 9 aa, synthetic construct
  source 1..9: note = Seed: VVGADGVGK (KRAS G12D)
YVGVDPVGT

SEQ ID NO: 12250 - protein, 9 aa, synthetic construct
  source 1..9: note = Seed: VVGADGVGK (KRAS G12D)
YVGVDPVGV

SEQ ID NO: 12251 - protein, 9 aa, synthetic construct
  source 1..9: note = Seed: VVGADGVGK (KRAS G12D)
YVGVDSVGA

SEQ ID NO: 12252 - protein, 9 aa, synthetic construct
  source 1..9: note = Seed: VVGADGVGK (KRAS G12D)
YVGVDSVGG

SEQ ID NO: 12253 - protein, 9 aa, synthetic construct
  source 1..9: note = Seed: VVGADGVGK (KRAS G12D)
YVGVDSVGI

SEQ ID NO: 12254 - protein, 9 aa, synthetic construct
  source 1..9: note = Seed: VVGADGVGK (KRAS G12D)
YVGVDSVGL

SEQ ID NO: 12255 - protein, 9 aa, synthetic construct
  source 1..9: note = Seed: VVGADGVGK (KRAS G12D)
YVGVDSVGM

SEQ ID NO: 12256 - protein, 9 aa, synthetic construct
  source 1..9: note = Seed: VVGADGVGK (KRAS G12D)
YVGVDSVGS

SEQ ID NO: 12257 - protein, 9 aa, synthetic construct
  source 1..9: note = Seed: VVGADGVGK (KRAS G12D)
YVGVDSVGT

SEQ ID NO: 12258 - protein, 9 aa, synthetic construct
  source 1..9: note = Seed: VVGADGVGK (KRAS G12D)
YVGVDSVGV

SEQ ID NO: 12259 - protein, 9 aa, synthetic construct
  source 1..9: note = Seed: VVGADGVGK (KRAS G12D)
YVGVDTVGA

SEQ ID NO: 12260 - protein, 9 aa, synthetic construct
  source 1..9: note = Seed: VVGADGVGK (KRAS G12D)
YVGVDTVGI

SEQ ID NO: 12261 - protein, 9 aa, synthetic construct
  source 1..9: note = Seed: VVGADGVGK (KRAS G12D)
YVGVDTVGL

SEQ ID NO: 12262 - protein, 9 aa, synthetic construct
  source 1..9: note = Seed: VVGADGVGK (KRAS G12D)
YVGVDTVGS

SEQ ID NO: 12263 - protein, 9 aa, synthetic construct
  source 1..9: note = Seed: VVGADGVGK (KRAS G12D)
YVGVDTVGT

SEQ ID NO: 12264 - protein, 9 aa, synthetic construct
  source 1..9: note = Seed: VVGADGVGK (KRAS G12D)
YVGVDTVGV

SEQ ID NO: 12265 - protein, 9 aa, synthetic construct
  source 1..9: note = Seed: VVGADGVGK (KRAS G12D)
YVGWDAVGA

SEQ ID NO: 12266 - protein, 9 aa, synthetic construct
  source 1..9: note = Seed: VVGADGVGK (KRAS G12D)
YVGWDAVGI

SEQ ID NO: 12267 - protein, 9 aa, synthetic construct
  source 1..9: note = Seed: VVGADGVGK (KRAS G12D)
YVGWDAVGL

SEQ ID NO: 12268 - protein, 9 aa, synthetic construct
  source 1..9: note = Seed: VVGADGVGK (KRAS G12D)
YVGWDAVGV

SEQ ID NO: 12269 - protein, 9 aa, Homo sapiens
  source 1..9: note = Native (KRAS G12D)
LVVVGADGV

SEQ ID NO: 12270 - protein, 9 aa, Homo sapiens
  source 1..9: note = Native (KRAS G12D)
VVGADGVGK

SEQ ID NO: 12271 - protein, 9 aa, synthetic construct
  source 1..9: note = Seed: LVVVGARGV (KRAS G12R)
FVVAGARGA

SEQ ID NO: 12272 - protein, 9 aa, synthetic construct
  source 1..9: note = Seed: LVVVGARGV (KRAS G12R)
FVVAGARGI

SEQ ID NO: 12273 - protein, 9 aa, synthetic construct
  source 1..9: note = Seed: LVVVGARGV (KRAS G12R)
FVVAGARGL

SEQ ID NO: 12274 - protein, 9 aa, synthetic construct
  source 1..9: note = Seed: LVVVGARGV (KRAS G12R)
FVVAGARGM

SEQ ID NO: 12275 - protein, 9 aa, synthetic construct
  source 1..9: note = Seed: LVVVGARGV (KRAS G12R)
FVVAGARGV

SEQ ID NO: 12276 - protein, 9 aa, synthetic construct
  source 1..9: note = Seed: LVVVGARGV (KRAS G12R)
FVVAGGRGI

SEQ ID NO: 12277 - protein, 9 aa, synthetic construct
  source 1..9: note = Seed: LVVVGARGV (KRAS G12R)
FVVAGGRGL

SEQ ID NO: 12278 - protein, 9 aa, synthetic construct
  source 1..9: note = Seed: LVVVGARGV (KRAS G12R)
FVVAGGRGV

SEQ ID NO: 12279 - protein, 9 aa, synthetic construct
  source 1..9: note = Seed: LVVVGARGV (KRAS G12R)
FVVAGSRGI

SEQ ID NO: 12280 - protein, 9 aa, synthetic construct
  source 1..9: note = Seed: LVVVGARGV (KRAS G12R)
FVVAGSRGL

SEQ ID NO: 12281 - protein, 9 aa, synthetic construct
  source 1..9: note = Seed: LVVVGARGV (KRAS G12R)
FVVAGSRGV

SEQ ID NO: 12282 - protein, 9 aa, synthetic construct
  source 1..9: note = Seed: LVVVGARGV (KRAS G12R)
FVVIGARGA

SEQ ID NO: 12283 - protein, 9 aa, synthetic construct
  source 1..9: note = Seed: LVVVGARGV (KRAS G12R)
FVVIGARGI

SEQ ID NO: 12284 - protein, 9 aa, synthetic construct
  source 1..9: note = Seed: LVVVGARGV (KRAS G12R)
FVVIGARGL

SEQ ID NO: 12285 - protein, 9 aa, synthetic construct
  source 1..9: note = Seed: LVVVGARGV (KRAS G12R)
FVVIGARGT

SEQ ID NO: 12286 - protein, 9 aa, synthetic construct
  source 1..9: note = Seed: LVVVGARGV (KRAS G12R)
FVVIGARGV

SEQ ID NO: 12287 - protein, 9 aa, synthetic construct
  source 1..9: note = Seed: LVVVGARGV (KRAS G12R)
FVVIGGRGA

SEQ ID NO: 12288 - protein, 9 aa, synthetic construct
  source 1..9: note = Seed: LVVVGARGV (KRAS G12R)
FVVIGGRGI

SEQ ID NO: 12289 - protein, 9 aa, synthetic construct
  source 1..9: note = Seed: LVVVGARGV (KRAS G12R)
FVVIGGRGL

SEQ ID NO: 12290 - protein, 9 aa, synthetic construct
  source 1..9: note = Seed: LVVVGARGV (KRAS G12R)
FVVIGGRGV

SEQ ID NO: 12291 - protein, 9 aa, synthetic construct
  source 1..9: note = Seed: LVVVGARGV (KRAS G12R)
FVVIGPRGV

SEQ ID NO: 12292 - protein, 9 aa, synthetic construct
  source 1..9: note = Seed: LVVVGARGV (KRAS G12R)
FVVIGSRGA

SEQ ID NO: 12293 - protein, 9 aa, synthetic construct
  source 1..9: note = Seed: LVVVGARGV (KRAS G12R)
FVVIGSRGI

SEQ ID NO: 12294 - protein, 9 aa, synthetic construct
  source 1..9: note = Seed: LVVVGARGV (KRAS G12R)
FVVIGSRGL

SEQ ID NO: 12295 - protein, 9 aa, synthetic construct
  source 1..9: note = Seed: LVVVGARGV (KRAS G12R)
FVVIGSRGV

SEQ ID NO: 12296 - protein, 9 aa, synthetic construct
  source 1..9: note = Seed: LVVVGARGV (KRAS G12R)
FVVLGARGA

SEQ ID NO: 12297 - protein, 9 aa, synthetic construct
  source 1..9: note = Seed: LVVVGARGV (KRAS G12R)
FVVLGARGI

SEQ ID NO: 12298 - protein, 9 aa, synthetic construct
  source 1..9: note = Seed: LVVVGARGV (KRAS G12R)
FVVLGARGL

SEQ ID NO: 12299 - protein, 9 aa, synthetic construct
  source 1..9: note = Seed: LVVVGARGV (KRAS G12R)
FVVLGARGM

SEQ ID NO: 12300 - protein, 9 aa, synthetic construct
  source 1..9: note = Seed: LVVVGARGV (KRAS G12R)
FVVLGARGS

SEQ ID NO: 12301 - protein, 9 aa, synthetic construct
  source 1..9: note = Seed: LVVVGARGV (KRAS G12R)
FVVLGARGT

SEQ ID NO: 12302 - protein, 9 aa, synthetic construct
  source 1..9: note = Seed: LVVVGARGV (KRAS G12R)
FVVLGARGV

SEQ ID NO: 12303 - protein, 9 aa, synthetic construct
  source 1..9: note = Seed: LVVVGARGV (KRAS G12R)
FVVLGGRGA

SEQ ID NO: 12304 - protein, 9 aa, synthetic construct
  source 1..9: note = Seed: LVVVGARGV (KRAS G12R)
FVVLGGRGI

SEQ ID NO: 12305 - protein, 9 aa, synthetic construct
  source 1..9: note = Seed: LVVVGARGV (KRAS G12R)
FVVLGGRGL

SEQ ID NO: 12306 - protein, 9 aa, synthetic construct
  source 1..9: note = Seed: LVVVGARGV (KRAS G12R)
FVVLGGRGM

SEQ ID NO: 12307 - protein, 9 aa, synthetic construct
  source 1..9: note = Seed: LVVVGARGV (KRAS G12R)
FVVLGGRGS

SEQ ID NO: 12308 - protein, 9 aa, synthetic construct
  source 1..9: note = Seed: LVVVGARGV (KRAS G12R)
FVVLGGRGT

SEQ ID NO: 12309 - protein, 9 aa, synthetic construct
  source 1..9: note = Seed: LVVVGARGV (KRAS G12R)
FVVLGGRGV

SEQ ID NO: 12310 - protein, 9 aa, synthetic construct
  source 1..9: note = Seed: LVVVGARGV (KRAS G12R)
FVVLGNRGI

SEQ ID NO: 12311 - protein, 9 aa, synthetic construct
  source 1..9: note = Seed: LVVVGARGV (KRAS G12R)
FVVLGNRGL

SEQ ID NO: 12312 - protein, 9 aa, synthetic construct
  source 1..9: note = Seed: LVVVGARGV (KRAS G12R)
FVVLGNRGV

SEQ ID NO: 12313 - protein, 9 aa, synthetic construct
  source 1..9: note = Seed: LVVVGARGV (KRAS G12R)
FVVLGPRGA

SEQ ID NO: 12314 - protein, 9 aa, synthetic construct
  source 1..9: note = Seed: LVVVGARGV (KRAS G12R)
FVVLGPRGI

SEQ ID NO: 12315 - protein, 9 aa, synthetic construct
  source 1..9: note = Seed: LVVVGARGV (KRAS G12R)
FVVLGPRGL

SEQ ID NO: 12316 - protein, 9 aa, synthetic construct
  source 1..9: note = Seed: LVVVGARGV (KRAS G12R)
FVVLGPRGV

SEQ ID NO: 12317 - protein, 9 aa, synthetic construct
  source 1..9: note = Seed: LVVVGARGV (KRAS G12R)
FVVLGSRGA

SEQ ID NO: 12318 - protein, 9 aa, synthetic construct
  source 1..9: note = Seed: LVVVGARGV (KRAS G12R)
FVVLGSRGI

SEQ ID NO: 12319 - protein, 9 aa, synthetic construct
  source 1..9: note = Seed: LVVVGARGV (KRAS G12R)
FVVLGSRGL

SEQ ID NO: 12320 - protein, 9 aa, synthetic construct
  source 1..9: note = Seed: LVVVGARGV (KRAS G12R)
FVVLGSRGM

SEQ ID NO: 12321 - protein, 9 aa, synthetic construct
  source 1..9: note = Seed: LVVVGARGV (KRAS G12R)
FVVLGSRGS

SEQ ID NO: 12322 - protein, 9 aa, synthetic construct
  source 1..9: note = Seed: LVVVGARGV (KRAS G12R)
FVVLGSRGT

SEQ ID NO: 12323 - protein, 9 aa, synthetic construct
  source 1..9: note = Seed: LVVVGARGV (KRAS G12R)
FVVLGSRGV

SEQ ID NO: 12324 - protein, 9 aa, synthetic construct
  source 1..9: note = Seed: LVVVGARGV (KRAS G12R)
FVVLGTRGI

SEQ ID NO: 12325 - protein, 9 aa, synthetic construct
  source 1..9: note = Seed: LVVVGARGV (KRAS G12R)
FVVLGTRGL

SEQ ID NO: 12326 - protein, 9 aa, synthetic construct
  source 1..9: note = Seed: LVVVGARGV (KRAS G12R)
FVVLGTRGV

SEQ ID NO: 12327 - protein, 9 aa, synthetic construct
  source 1..9: note = Seed: LVVVGARGV (KRAS G12R)
FVVMGARGA

SEQ ID NO: 12328 - protein, 9 aa, synthetic construct
  source 1..9: note = Seed: LVVVGARGV (KRAS G12R)
FVVMGARGI

SEQ ID NO: 12329 - protein, 9 aa, synthetic construct
  source 1..9: note = Seed: LVVVGARGV (KRAS G12R)
FVVMGARGL

SEQ ID NO: 12330 - protein, 9 aa, synthetic construct
  source 1..9: note = Seed: LVVVGARGV (KRAS G12R)
FVVMGARGM

SEQ ID NO: 12331 - protein, 9 aa, synthetic construct
  source 1..9: note = Seed: LVVVGARGV (KRAS G12R)
FVVMGARGS

SEQ ID NO: 12332 - protein, 9 aa, synthetic construct
  source 1..9: note = Seed: LVVVGARGV (KRAS G12R)
FVVMGARGT

SEQ ID NO: 12333 - protein, 9 aa, synthetic construct
  source 1..9: note = Seed: LVVVGARGV (KRAS G12R)
FVVMGARGV

SEQ ID NO: 12334 - protein, 9 aa, synthetic construct
  source 1..9: note = Seed: LVVVGARGV (KRAS G12R)
FVVMGGRGA

SEQ ID NO: 12335 - protein, 9 aa, synthetic construct
  source 1..9: note = Seed: LVVVGARGV (KRAS G12R)
FVVMGGRGI

SEQ ID NO: 12336 - protein, 9 aa, synthetic construct
  source 1..9: note = Seed: LVVVGARGV (KRAS G12R)
FVVMGGRGL

SEQ ID NO: 12337 - protein, 9 aa, synthetic construct
  source 1..9: note = Seed: LVVVGARGV (KRAS G12R)
FVVMGGRGM

SEQ ID NO: 12338 - protein, 9 aa, synthetic construct
  source 1..9: note = Seed: LVVVGARGV (KRAS G12R)
FVVMGGRGT

SEQ ID NO: 12339 - protein, 9 aa, synthetic construct
  source 1..9: note = Seed: LVVVGARGV (KRAS G12R)
FVVMGGRGV

SEQ ID NO: 12340 - protein, 9 aa, synthetic construct
  source 1..9: note = Seed: LVVVGARGV (KRAS G12R)
FVVMGNRGI

SEQ ID NO: 12341 - protein, 9 aa, synthetic construct
  source 1..9: note = Seed: LVVVGARGV (KRAS G12R)
FVVMGNRGL

SEQ ID NO: 12342 - protein, 9 aa, synthetic construct
  source 1..9: note = Seed: LVVVGARGV (KRAS G12R)
FVVMGNRGV

SEQ ID NO: 12343 - protein, 9 aa, synthetic construct
  source 1..9: note = Seed: LVVVGARGV (KRAS G12R)
FVVMGPRGA

SEQ ID NO: 12344 - protein, 9 aa, synthetic construct
  source 1..9: note = Seed: LVVVGARGV (KRAS G12R)
FVVMGPRGI

SEQ ID NO: 12345 - protein, 9 aa, synthetic construct
  source 1..9: note = Seed: LVVVGARGV (KRAS G12R)
FVVMGPRGL

SEQ ID NO: 12346 - protein, 9 aa, synthetic construct
  source 1..9: note = Seed: LVVVGARGV (KRAS G12R)
FVVMGPRGV

SEQ ID NO: 12347 - protein, 9 aa, synthetic construct
  source 1..9: note = Seed: LVVVGARGV (KRAS G12R)
FVVMGSRGI

SEQ ID NO: 12348 - protein, 9 aa, synthetic construct
  source 1..9: note = Seed: LVVVGARGV (KRAS G12R)
FVVMGSRGL

SEQ ID NO: 12349 - protein, 9 aa, synthetic construct
  source 1..9: note = Seed: LVVVGARGV (KRAS G12R)
FVVMGSRGM

SEQ ID NO: 12350 - protein, 9 aa, synthetic construct
  source 1..9: note = Seed: LVVVGARGV (KRAS G12R)
FVVMGSRGT

SEQ ID NO: 12351 - protein, 9 aa, synthetic construct
  source 1..9: note = Seed: LVVVGARGV (KRAS G12R)
FVVMGSRGV

SEQ ID NO: 12352 - protein, 9 aa, synthetic construct
  source 1..9: note = Seed: LVVVGARGV (KRAS G12R)
FVVMGTRGI

SEQ ID NO: 12353 - protein, 9 aa, synthetic construct
  source 1..9: note = Seed: LVVVGARGV (KRAS G12R)
FVVMGTRGL

SEQ ID NO: 12354 - protein, 9 aa, synthetic construct
  source 1..9: note = Seed: LVVVGARGV (KRAS G12R)
FVVMGTRGV

SEQ ID NO: 12355 - protein, 9 aa, synthetic construct
  source 1..9: note = Seed: LVVVGARGV (KRAS G12R)
FVVQGARGI

SEQ ID NO: 12356 - protein, 9 aa, synthetic construct
  source 1..9: note = Seed: LVVVGARGV (KRAS G12R)
FVVQGARGL

SEQ ID NO: 12357 - protein, 9 aa, synthetic construct
  source 1..9: note = Seed: LVVVGARGV (KRAS G12R)
FVVQGARGV

SEQ ID NO: 12358 - protein, 9 aa, synthetic construct
  source 1..9: note = Seed: LVVVGARGV (KRAS G12R)
FVVQGGRGL

SEQ ID NO: 12359 - protein, 9 aa, synthetic construct
  source 1..9: note = Seed: LVVVGARGV (KRAS G12R)
FVVQGSRGL

SEQ ID NO: 12360 - protein, 9 aa, synthetic construct
  source 1..9: note = Seed: LVVVGARGV (KRAS G12R)
FVVVGARGL

SEQ ID NO: 12361 - protein, 9 aa, synthetic construct
  source 1..9: note = Seed: LVVVGARGV (KRAS G12R)
FVVVGARGV

SEQ ID NO: 12362 - protein, 9 aa, synthetic construct
  source 1..9: note = Seed: LVVVGARGV (KRAS G12R)
FVVVGGRGL

SEQ ID NO: 12363 - protein, 9 aa, synthetic construct
  source 1..9: note = Seed: LVVVGARGV (KRAS G12R)
FVVVGGRGV

SEQ ID NO: 12364 - protein, 9 aa, synthetic construct
  source 1..9: note = Seed: LVVVGARGV (KRAS G12R)
FVVVGSRGL

SEQ ID NO: 12365 - protein, 9 aa, synthetic construct
  source 1..9: note = Seed: LVVVGARGV (KRAS G12R)
YVVAGARGL

SEQ ID NO: 12366 - protein, 9 aa, synthetic construct
  source 1..9: note = Seed: LVVVGARGV (KRAS G12R)
YVVIGARGI

SEQ ID NO: 12367 - protein, 9 aa, synthetic construct
  source 1..9: note = Seed: LVVVGARGV (KRAS G12R)
YVVIGARGL

SEQ ID NO: 12368 - protein, 9 aa, synthetic construct
  source 1..9: note = Seed: LVVVGARGV (KRAS G12R)
YVVIGARGV

SEQ ID NO: 12369 - protein, 9 aa, synthetic construct
  source 1..9: note = Seed: LVVVGARGV (KRAS G12R)
YVVIGGRGL

SEQ ID NO: 12370 - protein, 9 aa, synthetic construct
  source 1..9: note = Seed: LVVVGARGV (KRAS G12R)
YVVIGGRGV

SEQ ID NO: 12371 - protein, 9 aa, synthetic construct
  source 1..9: note = Seed: LVVVGARGV (KRAS G12R)
YVVIGSRGL

SEQ ID NO: 12372 - protein, 9 aa, synthetic construct
  source 1..9: note = Seed: LVVVGARGV (KRAS G12R)
YVVIGSRGV

SEQ ID NO: 12373 - protein, 9 aa, synthetic construct
  source 1..9: note = Seed: LVVVGARGV (KRAS G12R)
YVVLGARGA

SEQ ID NO: 12374 - protein, 9 aa, synthetic construct
  source 1..9: note = Seed: LVVVGARGV (KRAS G12R)
YVVLGARGI

SEQ ID NO: 12375 - protein, 9 aa, synthetic construct
  source 1..9: note = Seed: LVVVGARGV (KRAS G12R)
YVVLGARGL

SEQ ID NO: 12376 - protein, 9 aa, synthetic construct
  source 1..9: note = Seed: LVVVGARGV (KRAS G12R)
YVVLGARGT

SEQ ID NO: 12377 - protein, 9 aa, synthetic construct
  source 1..9: note = Seed: LVVVGARGV (KRAS G12R)
YVVLGARGV

SEQ ID NO: 12378 - protein, 9 aa, synthetic construct
  source 1..9: note = Seed: LVVVGARGV (KRAS G12R)
YVVLGGRGA

SEQ ID NO: 12379 - protein, 9 aa, synthetic construct
  source 1..9: note = Seed: LVVVGARGV (KRAS G12R)
YVVLGGRGI

SEQ ID NO: 12380 - protein, 9 aa, synthetic construct
  source 1..9: note = Seed: LVVVGARGV (KRAS G12R)
YVVLGGRGL

SEQ ID NO: 12381 - protein, 9 aa, synthetic construct
  source 1..9: note = Seed: LVVVGARGV (KRAS G12R)
YVVLGGRGV

SEQ ID NO: 12382 - protein, 9 aa, synthetic construct
  source 1..9: note = Seed: LVVVGARGV (KRAS G12R)
YVVLGPRGL

SEQ ID NO: 12383 - protein, 9 aa, synthetic construct
  source 1..9: note = Seed: LVVVGARGV (KRAS G12R)
YVVLGPRGV

SEQ ID NO: 12384 - protein, 9 aa, synthetic construct
  source 1..9: note = Seed: LVVVGARGV (KRAS G12R)
YVVLGSRGA

SEQ ID NO: 12385 - protein, 9 aa, synthetic construct
  source 1..9: note = Seed: LVVVGARGV (KRAS G12R)
YVVLGSRGI

SEQ ID NO: 12386 - protein, 9 aa, synthetic construct
  source 1..9: note = Seed: LVVVGARGV (KRAS G12R)
YVVLGSRGL

SEQ ID NO: 12387 - protein, 9 aa, synthetic construct
  source 1..9: note = Seed: LVVVGARGV (KRAS G12R)
YVVLGSRGV

SEQ ID NO: 12388 - protein, 9 aa, synthetic construct
  source 1..9: note = Seed: LVVVGARGV (KRAS G12R)
YVVMGARGI

SEQ ID NO: 12389 - protein, 9 aa, synthetic construct
  source 1..9: note = Seed: LVVVGARGV (KRAS G12R)
YVVMGARGL

SEQ ID NO: 12390 - protein, 9 aa, synthetic construct
  source 1..9: note = Seed: LVVVGARGV (KRAS G12R)
YVVMGARGV

SEQ ID NO: 12391 - protein, 9 aa, synthetic construct
  source 1..9: note = Seed: LVVVGARGV (KRAS G12R)
YVVMGGRGI

SEQ ID NO: 12392 - protein, 9 aa, synthetic construct
  source 1..9: note = Seed: LVVVGARGV (KRAS G12R)
YVVMGGRGL

SEQ ID NO: 12393 - protein, 9 aa, synthetic construct
  source 1..9: note = Seed: LVVVGARGV (KRAS G12R)
YVVMGGRGV

SEQ ID NO: 12394 - protein, 9 aa, synthetic construct
  source 1..9: note = Seed: LVVVGARGV (KRAS G12R)
YVVMGSRGI

SEQ ID NO: 12395 - protein, 9 aa, synthetic construct
  source 1..9: note = Seed: LVVVGARGV (KRAS G12R)
YVVMGSRGL

SEQ ID NO: 12396 - protein, 9 aa, synthetic construct
  source 1..9: note = Seed: LVVVGARGV (KRAS G12R)
YVVMGSRGV

SEQ ID NO: 12397 - protein, 9 aa, synthetic construct
  source 1..9: note = Seed: ARGVGKSAL (KRAS G12R)
ARGAGASAA

SEQ ID NO: 12398 - protein, 9 aa, synthetic construct
  source 1..9: note = Seed: ARGVGKSAL (KRAS G12R)
ARGAGASAI

SEQ ID NO: 12399 - protein, 9 aa, synthetic construct
  source 1..9: note = Seed: ARGVGKSAL (KRAS G12R)
ARGAGASAM

SEQ ID NO: 12400 - protein, 9 aa, synthetic construct
  source 1..9: note = Seed: ARGVGKSAL (KRAS G12R)
ARGAGASAS

SEQ ID NO: 12401 - protein, 9 aa, synthetic construct
  source 1..9: note = Seed: ARGVGKSAL (KRAS G12R)
ARGAGASAV

SEQ ID NO: 12402 - protein, 9 aa, synthetic construct
  source 1..9: note = Seed: ARGVGKSAL (KRAS G12R)
ARGAGISAA

SEQ ID NO: 12403 - protein, 9 aa, synthetic construct
  source 1..9: note = Seed: ARGVGKSAL (KRAS G12R)
ARGAGISAG

SEQ ID NO: 12404 - protein, 9 aa, synthetic construct
  source 1..9: note = Seed: ARGVGKSAL (KRAS G12R)
ARGAGISAS

SEQ ID NO: 12405 - protein, 9 aa, synthetic construct
  source 1..9: note = Seed: ARGVGKSAL (KRAS G12R)
ARGAGLSAA

SEQ ID NO: 12406 - protein, 9 aa, synthetic construct
  source 1..9: note = Seed: ARGVGKSAL (KRAS G12R)
ARGAGLSAS

SEQ ID NO: 12407 - protein, 9 aa, synthetic construct
  source 1..9: note = Seed: ARGVGKSAL (KRAS G12R)
ARGAGMSAA

SEQ ID NO: 12408 - protein, 9 aa, synthetic construct
  source 1..9: note = Seed: ARGVGKSAL (KRAS G12R)
ARGAGMSAS

SEQ ID NO: 12409 - protein, 9 aa, synthetic construct
  source 1..9: note = Seed: ARGVGKSAL (KRAS G12R)
ARGAGNSAA

SEQ ID NO: 12410 - protein, 9 aa, synthetic construct
  source 1..9: note = Seed: ARGVGKSAL (KRAS G12R)
ARGAGSSAA

SEQ ID NO: 12411 - protein, 9 aa, synthetic construct
  source 1..9: note = Seed: ARGVGKSAL (KRAS G12R)
ARGAGVSAA

SEQ ID NO: 12412 - protein, 9 aa, synthetic construct
  source 1..9: note = Seed: ARGVGKSAL (KRAS G12R)
ARGAGVSAS

SEQ ID NO: 12413 - protein, 9 aa, synthetic construct
  source 1..9: note = Seed: ARGVGKSAL (KRAS G12R)
ARGGGISAA

SEQ ID NO: 12414 - protein, 9 aa, synthetic construct
  source 1..9: note = Seed: ARGVGKSAL (KRAS G12R)
ARGIGASAA

SEQ ID NO: 12415 - protein, 9 aa, synthetic construct
  source 1..9: note = Seed: ARGVGKSAL (KRAS G12R)
ARGSGASAA

SEQ ID NO: 12416 - protein, 9 aa, synthetic construct
  source 1..9: note = Seed: ARGVGKSAL (KRAS G12R)
ARGSGASAS

SEQ ID NO: 12417 - protein, 9 aa, synthetic construct
  source 1..9: note = Seed: ARGVGKSAL (KRAS G12R)
ARGSGASAV

SEQ ID NO: 12418 - protein, 9 aa, synthetic construct
  source 1..9: note = Seed: ARGVGKSAL (KRAS G12R)
ARGSGISAA

SEQ ID NO: 12419 - protein, 9 aa, synthetic construct
  source 1..9: note = Seed: ARGVGKSAL (KRAS G12R)
ARGSGISAS

SEQ ID NO: 12420 - protein, 9 aa, synthetic construct
  source 1..9: note = Seed: ARGVGKSAL (KRAS G12R)
ARGSGLSAA

SEQ ID NO: 12421 - protein, 9 aa, synthetic construct
  source 1..9: note = Seed: ARGVGKSAL (KRAS G12R)
ARGSGMSAA

SEQ ID NO: 12422 - protein, 9 aa, synthetic construct
  source 1..9: note = Seed: ARGVGKSAL (KRAS G12R)
ARGSGVSAA

SEQ ID NO: 12423 - protein, 9 aa, synthetic construct
  source 1..9: note = Seed: ARGVGKSAL (KRAS G12R)
ARGSGVSAS

SEQ ID NO: 12424 - protein, 9 aa, synthetic construct
  source 1..9: note = Seed: ARGVGKSAL (KRAS G12R)
ARGTGISAA

SEQ ID NO: 12425 - protein, 9 aa, synthetic construct
  source 1..9: note = Seed: ARGVGKSAL (KRAS G12R)
ARGVGASAA

SEQ ID NO: 12426 - protein, 9 aa, synthetic construct
  source 1..9: note = Seed: ARGVGKSAL (KRAS G12R)
CRGAGASAA

SEQ ID NO: 12427 - protein, 9 aa, synthetic construct
  source 1..9: note = Seed: ARGVGKSAL (KRAS G12R)
CRGAGISAA

SEQ ID NO: 12428 - protein, 9 aa, synthetic construct
  source 1..9: note = Seed: ARGVGKSAL (KRAS G12R)
CRGAGISAS

SEQ ID NO: 12429 - protein, 9 aa, synthetic construct
  source 1..9: note = Seed: ARGVGKSAL (KRAS G12R)
CRGAGMSAA

SEQ ID NO: 12430 - protein, 9 aa, synthetic construct
  source 1..9: note = Seed: ARGVGKSAL (KRAS G12R)
CRGAGVSAA

SEQ ID NO: 12431 - protein, 9 aa, synthetic construct
  source 1..9: note = Seed: ARGVGKSAL (KRAS G12R)
CRGAGVSAS

SEQ ID NO: 12432 - protein, 9 aa, synthetic construct
  source 1..9: note = Seed: ARGVGKSAL (KRAS G12R)
CRGSGISAA

SEQ ID NO: 12433 - protein, 9 aa, synthetic construct
  source 1..9: note = Seed: ARGVGKSAL (KRAS G12R)
CRGSGISAS

SEQ ID NO: 12434 - protein, 9 aa, synthetic construct
  source 1..9: note = Seed: ARGVGKSAL (KRAS G12R)
CRGSGVSAA

SEQ ID NO: 12435 - protein, 9 aa, synthetic construct
  source 1..9: note = Seed: ARGVGKSAL (KRAS G12R)
DRGAGISAA

SEQ ID NO: 12436 - protein, 9 aa, synthetic construct
  source 1..9: note = Seed: ARGVGKSAL (KRAS G12R)
ERGAGISAA

SEQ ID NO: 12437 - protein, 9 aa, synthetic construct
  source 1..9: note = Seed: ARGVGKSAL (KRAS G12R)
FRGAGASAA

SEQ ID NO: 12438 - protein, 9 aa, synthetic construct
  source 1..9: note = Seed: ARGVGKSAL (KRAS G12R)
FRGAGASAS

SEQ ID NO: 12439 - protein, 9 aa, synthetic construct
  source 1..9: note = Seed: ARGVGKSAL (KRAS G12R)
FRGAGASAV

SEQ ID NO: 12440 - protein, 9 aa, synthetic construct
  source 1..9: note = Seed: ARGVGKSAL (KRAS G12R)
FRGAGFSAI

SEQ ID NO: 12441 - protein, 9 aa, synthetic construct
  source 1..9: note = Seed: ARGVGKSAL (KRAS G12R)
FRGAGFSAV

SEQ ID NO: 12442 - protein, 9 aa, synthetic construct
  source 1..9: note = Seed: ARGVGKSAL (KRAS G12R)
FRGAGISAA

SEQ ID NO: 12443 - protein, 9 aa, synthetic construct
  source 1..9: note = Seed: ARGVGKSAL (KRAS G12R)
FRGAGISAG

SEQ ID NO: 12444 - protein, 9 aa, synthetic construct
  source 1..9: note = Seed: ARGVGKSAL (KRAS G12R)
FRGAGISAI

SEQ ID NO: 12445 - protein, 9 aa, synthetic construct
  source 1..9: note = Seed: ARGVGKSAL (KRAS G12R)
FRGAGISAM

SEQ ID NO: 12446 - protein, 9 aa, synthetic construct
  source 1..9: note = Seed: ARGVGKSAL (KRAS G12R)
FRGAGISAS

SEQ ID NO: 12447 - protein, 9 aa, synthetic construct
  source 1..9: note = Seed: ARGVGKSAL (KRAS G12R)
FRGAGISAV

SEQ ID NO: 12448 - protein, 9 aa, synthetic construct
  source 1..9: note = Seed: ARGVGKSAL (KRAS G12R)
FRGAGLSAA

SEQ ID NO: 12449 - protein, 9 aa, synthetic construct
  source 1..9: note = Seed: ARGVGKSAL (KRAS G12R)
FRGAGMSAA

SEQ ID NO: 12450 - protein, 9 aa, synthetic construct
  source 1..9: note = Seed: ARGVGKSAL (KRAS G12R)
FRGAGMSAS

SEQ ID NO: 12451 - protein, 9 aa, synthetic construct
  source 1..9: note = Seed: ARGVGKSAL (KRAS G12R)
FRGAGNSAA

SEQ ID NO: 12452 - protein, 9 aa, synthetic construct
  source 1..9: note = Seed: ARGVGKSAL (KRAS G12R)
FRGAGRSAA

SEQ ID NO: 12453 - protein, 9 aa, synthetic construct
  source 1..9: note = Seed: ARGVGKSAL (KRAS G12R)
FRGAGRSAK

SEQ ID NO: 12454 - protein, 9 aa, synthetic construct
  source 1..9: note = Seed: ARGVGKSAL (KRAS G12R)
FRGAGRSAL

SEQ ID NO: 12455 - protein, 9 aa, synthetic construct
  source 1..9: note = Seed: ARGVGKSAL (KRAS G12R)
FRGAGRSAR

SEQ ID NO: 12456 - protein, 9 aa, synthetic construct
  source 1..9: note = Seed: ARGVGKSAL (KRAS G12R)
FRGAGRSAS

SEQ ID NO: 12457 - protein, 9 aa, synthetic construct
  source 1..9: note = Seed: ARGVGKSAL (KRAS G12R)
FRGAGRSAY

SEQ ID NO: 12458 - protein, 9 aa, synthetic construct
  source 1..9: note = Seed: ARGVGKSAL (KRAS G12R)
FRGAGSSAA

SEQ ID NO: 12459 - protein, 9 aa, synthetic construct
  source 1..9: note = Seed: ARGVGKSAL (KRAS G12R)
FRGAGTSAA

SEQ ID NO: 12460 - protein, 9 aa, synthetic construct
  source 1..9: note = Seed: ARGVGKSAL (KRAS G12R)
FRGAGVSAA

SEQ ID NO: 12461 - protein, 9 aa, synthetic construct
  source 1..9: note = Seed: ARGVGKSAL (KRAS G12R)
FRGAGVSAG

SEQ ID NO: 12462 - protein, 9 aa, synthetic construct
  source 1..9: note = Seed: ARGVGKSAL (KRAS G12R)
FRGAGVSAS

SEQ ID NO: 12463 - protein, 9 aa, synthetic construct
  source 1..9: note = Seed: ARGVGKSAL (KRAS G12R)
FRGAGVSAV

SEQ ID NO: 12464 - protein, 9 aa, synthetic construct
  source 1..9: note = Seed: ARGVGKSAL (KRAS G12R)
FRGDGFSAI

SEQ ID NO: 12465 - protein, 9 aa, synthetic construct
  source 1..9: note = Seed: ARGVGKSAL (KRAS G12R)
FRGDGFSAL

SEQ ID NO: 12466 - protein, 9 aa, synthetic construct
  source 1..9: note = Seed: ARGVGKSAL (KRAS G12R)
FRGDGFSAV

SEQ ID NO: 12467 - protein, 9 aa, synthetic construct
  source 1..9: note = Seed: ARGVGKSAL (KRAS G12R)
FRGEGFSAE

SEQ ID NO: 12468 - protein, 9 aa, synthetic construct
  source 1..9: note = Seed: ARGVGKSAL (KRAS G12R)
FRGEGFSAF

SEQ ID NO: 12469 - protein, 9 aa, synthetic construct
  source 1..9: note = Seed: ARGVGKSAL (KRAS G12R)
FRGEGFSAI

SEQ ID NO: 12470 - protein, 9 aa, synthetic construct
  source 1..9: note = Seed: ARGVGKSAL (KRAS G12R)
FRGEGFSAL

SEQ ID NO: 12471 - protein, 9 aa, synthetic construct
  source 1..9: note = Seed: ARGVGKSAL (KRAS G12R)
FRGEGFSAM

SEQ ID NO: 12472 - protein, 9 aa, synthetic construct
  source 1..9: note = Seed: ARGVGKSAL (KRAS G12R)
FRGEGFSAN

SEQ ID NO: 12473 - protein, 9 aa, synthetic construct
  source 1..9: note = Seed: ARGVGKSAL (KRAS G12R)
FRGEGFSAT

SEQ ID NO: 12474 - protein, 9 aa, synthetic construct
  source 1..9: note = Seed: ARGVGKSAL (KRAS G12R)
FRGEGFSAV

SEQ ID NO: 12475 - protein, 9 aa, synthetic construct
  source 1..9: note = Seed: ARGVGKSAL (KRAS G12R)
FRGFGKSAA

SEQ ID NO: 12476 - protein, 9 aa, synthetic construct
  source 1..9: note = Seed: ARGVGKSAL (KRAS G12R)
FRGFGKSAF

SEQ ID NO: 12477 - protein, 9 aa, synthetic construct
  source 1..9: note = Seed: ARGVGKSAL (KRAS G12R)
FRGFGKSAH

SEQ ID NO: 12478 - protein, 9 aa, synthetic construct
  source 1..9: note = Seed: ARGVGKSAL (KRAS G12R)
FRGFGKSAI

SEQ ID NO: 12479 - protein, 9 aa, synthetic construct
  source 1..9: note = Seed: ARGVGKSAL (KRAS G12R)
FRGFGKSAK

SEQ ID NO: 12480 - protein, 9 aa, synthetic construct
  source 1..9: note = Seed: ARGVGKSAL (KRAS G12R)
FRGFGKSAL

SEQ ID NO: 12481 - protein, 9 aa, synthetic construct
  source 1..9: note = Seed: ARGVGKSAL (KRAS G12R)
FRGFGKSAM

SEQ ID NO: 12482 - protein, 9 aa, synthetic construct
  source 1..9: note = Seed: ARGVGKSAL (KRAS G12R)
FRGFGKSAQ

SEQ ID NO: 12483 - protein, 9 aa, synthetic construct
  source 1..9: note = Seed: ARGVGKSAL (KRAS G12R)
FRGFGKSAR

SEQ ID NO: 12484 - protein, 9 aa, synthetic construct
  source 1..9: note = Seed: ARGVGKSAL (KRAS G12R)
FRGFGKSAS

SEQ ID NO: 12485 - protein, 9 aa, synthetic construct
  source 1..9: note = Seed: ARGVGKSAL (KRAS G12R)
FRGFGKSAV

SEQ ID NO: 12486 - protein, 9 aa, synthetic construct
  source 1..9: note = Seed: ARGVGKSAL (KRAS G12R)
FRGFGKSAY

SEQ ID NO: 12487 - protein, 9 aa, synthetic construct
  source 1..9: note = Seed: ARGVGKSAL (KRAS G12R)
FRGFGRSAA

SEQ ID NO: 12488 - protein, 9 aa, synthetic construct
  source 1..9: note = Seed: ARGVGKSAL (KRAS G12R)
FRGFGRSAF

SEQ ID NO: 12489 - protein, 9 aa, synthetic construct
  source 1..9: note = Seed: ARGVGKSAL (KRAS G12R)
FRGFGRSAG

SEQ ID NO: 12490 - protein, 9 aa, synthetic construct
  source 1..9: note = Seed: ARGVGKSAL (KRAS G12R)
FRGFGRSAH

SEQ ID NO: 12491 - protein, 9 aa, synthetic construct
  source 1..9: note = Seed: ARGVGKSAL (KRAS G12R)
FRGFGRSAI

SEQ ID NO: 12492 - protein, 9 aa, synthetic construct
  source 1..9: note = Seed: ARGVGKSAL (KRAS G12R)
FRGFGRSAK

SEQ ID NO: 12493 - protein, 9 aa, synthetic construct
  source 1..9: note = Seed: ARGVGKSAL (KRAS G12R)
FRGFGRSAL

SEQ ID NO: 12494 - protein, 9 aa, synthetic construct
  source 1..9: note = Seed: ARGVGKSAL (KRAS G12R)
FRGFGRSAM

SEQ ID NO: 12495 - protein, 9 aa, synthetic construct
  source 1..9: note = Seed: ARGVGKSAL (KRAS G12R)
FRGFGRSAQ

SEQ ID NO: 12496 - protein, 9 aa, synthetic construct
  source 1..9: note = Seed: ARGVGKSAL (KRAS G12R)
FRGFGRSAR

SEQ ID NO: 12497 - protein, 9 aa, synthetic construct
  source 1..9: note = Seed: ARGVGKSAL (KRAS G12R)
FRGFGRSAS

SEQ ID NO: 12498 - protein, 9 aa, synthetic construct
  source 1..9: note = Seed: ARGVGKSAL (KRAS G12R)
FRGFGRSAT

SEQ ID NO: 12499 - protein, 9 aa, synthetic construct
  source 1..9: note = Seed: ARGVGKSAL (KRAS G12R)
FRGFGRSAV

SEQ ID NO: 12500 - protein, 9 aa, synthetic construct
  source 1..9: note = Seed: ARGVGKSAL (KRAS G12R)
FRGFGRSAW

SEQ ID NO: 12501 - protein, 9 aa, synthetic construct
  source 1..9: note = Seed: ARGVGKSAL (KRAS G12R)
FRGFGRSAY

SEQ ID NO: 12502 - protein, 9 aa, synthetic construct
  source 1..9: note = Seed: ARGVGKSAL (KRAS G12R)
FRGGGISAA

SEQ ID NO: 12503 - protein, 9 aa, synthetic construct
  source 1..9: note = Seed: ARGVGKSAL (KRAS G12R)
FRGGGISAS

SEQ ID NO: 12504 - protein, 9 aa, synthetic construct
  source 1..9: note = Seed: ARGVGKSAL (KRAS G12R)
FRGGGMSAA

SEQ ID NO: 12505 - protein, 9 aa, synthetic construct
  source 1..9: note = Seed: ARGVGKSAL (KRAS G12R)
FRGGGVSAA

SEQ ID NO: 12506 - protein, 9 aa, synthetic construct
  source 1..9: note = Seed: ARGVGKSAL (KRAS G12R)
FRGHGISAR

SEQ ID NO: 12507 - protein, 9 aa, synthetic construct
  source 1..9: note = Seed: ARGVGKSAL (KRAS G12R)
FRGHGKSAR

SEQ ID NO: 12508 - protein, 9 aa, synthetic construct
  source 1..9: note = Seed: ARGVGKSAL (KRAS G12R)
FRGHGRSAA

SEQ ID NO: 12509 - protein, 9 aa, synthetic construct
  source 1..9: note = Seed: ARGVGKSAL (KRAS G12R)
FRGHGRSAF

SEQ ID NO: 12510 - protein, 9 aa, synthetic construct
  source 1..9: note = Seed: ARGVGKSAL (KRAS G12R)
FRGHGRSAH

SEQ ID NO: 12511 - protein, 9 aa, synthetic construct
  source 1..9: note = Seed: ARGVGKSAL (KRAS G12R)
FRGHGRSAI

SEQ ID NO: 12512 - protein, 9 aa, synthetic construct
  source 1..9: note = Seed: ARGVGKSAL (KRAS G12R)
FRGHGRSAK

SEQ ID NO: 12513 - protein, 9 aa, synthetic construct
  source 1..9: note = Seed: ARGVGKSAL (KRAS G12R)
FRGHGRSAL

SEQ ID NO: 12514 - protein, 9 aa, synthetic construct
  source 1..9: note = Seed: ARGVGKSAL (KRAS G12R)
FRGHGRSAM

SEQ ID NO: 12515 - protein, 9 aa, synthetic construct
  source 1..9: note = Seed: ARGVGKSAL (KRAS G12R)
FRGHGRSAR

SEQ ID NO: 12516 - protein, 9 aa, synthetic construct
  source 1..9: note = Seed: ARGVGKSAL (KRAS G12R)
FRGHGRSAS

SEQ ID NO: 12517 - protein, 9 aa, synthetic construct
  source 1..9: note = Seed: ARGVGKSAL (KRAS G12R)
FRGHGRSAV

SEQ ID NO: 12518 - protein, 9 aa, synthetic construct
  source 1..9: note = Seed: ARGVGKSAL (KRAS G12R)
FRGHGRSAY

SEQ ID NO: 12519 - protein, 9 aa, synthetic construct
  source 1..9: note = Seed: ARGVGKSAL (KRAS G12R)
FRGHGVSAR

SEQ ID NO: 12520 - protein, 9 aa, synthetic construct
  source 1..9: note = Seed: ARGVGKSAL (KRAS G12R)
FRGIGFSAI

SEQ ID NO: 12521 - protein, 9 aa, synthetic construct
  source 1..9: note = Seed: ARGVGKSAL (KRAS G12R)
FRGIGFSAL

SEQ ID NO: 12522 - protein, 9 aa, synthetic construct
  source 1..9: note = Seed: ARGVGKSAL (KRAS G12R)
FRGIGFSAV

SEQ ID NO: 12523 - protein, 9 aa, synthetic construct
  source 1..9: note = Seed: ARGVGKSAL (KRAS G12R)
FRGIGKSAA

SEQ ID NO: 12524 - protein, 9 aa, synthetic construct
  source 1..9: note = Seed: ARGVGKSAL (KRAS G12R)
FRGIGKSAF

SEQ ID NO: 12525 - protein, 9 aa, synthetic construct
  source 1..9: note = Seed: ARGVGKSAL (KRAS G12R)
FRGIGKSAG

SEQ ID NO: 12526 - protein, 9 aa, synthetic construct
  source 1..9: note = Seed: ARGVGKSAL (KRAS G12R)
FRGIGKSAH

SEQ ID NO: 12527 - protein, 9 aa, synthetic construct
  source 1..9: note = Seed: ARGVGKSAL (KRAS G12R)
FRGIGKSAI

SEQ ID NO: 12528 - protein, 9 aa, synthetic construct
  source 1..9: note = Seed: ARGVGKSAL (KRAS G12R)
FRGIGKSAK

SEQ ID NO: 12529 - protein, 9 aa, synthetic construct
  source 1..9: note = Seed: ARGVGKSAL (KRAS G12R)
FRGIGKSAL

SEQ ID NO: 12530 - protein, 9 aa, synthetic construct
  source 1..9: note = Seed: ARGVGKSAL (KRAS G12R)
FRGIGKSAM

SEQ ID NO: 12531 - protein, 9 aa, synthetic construct
  source 1..9: note = Seed: ARGVGKSAL (KRAS G12R)
FRGIGKSAQ

SEQ ID NO: 12532 - protein, 9 aa, synthetic construct
  source 1..9: note = Seed: ARGVGKSAL (KRAS G12R)
FRGIGKSAR

SEQ ID NO: 12533 - protein, 9 aa, synthetic construct
  source 1..9: note = Seed: ARGVGKSAL (KRAS G12R)
FRGIGKSAS

SEQ ID NO: 12534 - protein, 9 aa, synthetic construct
  source 1..9: note = Seed: ARGVGKSAL (KRAS G12R)
FRGIGKSAT

SEQ ID NO: 12535 - protein, 9 aa, synthetic construct
  source 1..9: note = Seed: ARGVGKSAL (KRAS G12R)
FRGIGKSAV

SEQ ID NO: 12536 - protein, 9 aa, synthetic construct
  source 1..9: note = Seed: ARGVGKSAL (KRAS G12R)
FRGIGKSAY

SEQ ID NO: 12537 - protein, 9 aa, synthetic construct
  source 1..9: note = Seed: ARGVGKSAL (KRAS G12R)
FRGIGRSAA

SEQ ID NO: 12538 - protein, 9 aa, synthetic construct
  source 1..9: note = Seed: ARGVGKSAL (KRAS G12R)
FRGIGRSAF

SEQ ID NO: 12539 - protein, 9 aa, synthetic construct
  source 1..9: note = Seed: ARGVGKSAL (KRAS G12R)
FRGIGRSAG

SEQ ID NO: 12540 - protein, 9 aa, synthetic construct
  source 1..9: note = Seed: ARGVGKSAL (KRAS G12R)
FRGIGRSAH

SEQ ID NO: 12541 - protein, 9 aa, synthetic construct
  source 1..9: note = Seed: ARGVGKSAL (KRAS G12R)
FRGIGRSAI

SEQ ID NO: 12542 - protein, 9 aa, synthetic construct
  source 1..9: note = Seed: ARGVGKSAL (KRAS G12R)
FRGIGRSAK

SEQ ID NO: 12543 - protein, 9 aa, synthetic construct
  source 1..9: note = Seed: ARGVGKSAL (KRAS G12R)
FRGIGRSAL

SEQ ID NO: 12544 - protein, 9 aa, synthetic construct
  source 1..9: note = Seed: ARGVGKSAL (KRAS G12R)
FRGIGRSAM

SEQ ID NO: 12545 - protein, 9 aa, synthetic construct
  source 1..9: note = Seed: ARGVGKSAL (KRAS G12R)
FRGIGRSAN

SEQ ID NO: 12546 - protein, 9 aa, synthetic construct
  source 1..9: note = Seed: ARGVGKSAL (KRAS G12R)
FRGIGRSAP

SEQ ID NO: 12547 - protein, 9 aa, synthetic construct
  source 1..9: note = Seed: ARGVGKSAL (KRAS G12R)
FRGIGRSAQ

SEQ ID NO: 12548 - protein, 9 aa, synthetic construct
  source 1..9: note = Seed: ARGVGKSAL (KRAS G12R)
FRGIGRSAR

SEQ ID NO: 12549 - protein, 9 aa, synthetic construct
  source 1..9: note = Seed: ARGVGKSAL (KRAS G12R)
FRGIGRSAS

SEQ ID NO: 12550 - protein, 9 aa, synthetic construct
  source 1..9: note = Seed: ARGVGKSAL (KRAS G12R)
FRGIGRSAT

SEQ ID NO: 12551 - protein, 9 aa, synthetic construct
  source 1..9: note = Seed: ARGVGKSAL (KRAS G12R)
FRGIGRSAV

SEQ ID NO: 12552 - protein, 9 aa, synthetic construct
  source 1..9: note = Seed: ARGVGKSAL (KRAS G12R)
FRGIGRSAW

SEQ ID NO: 12553 - protein, 9 aa, synthetic construct
  source 1..9: note = Seed: ARGVGKSAL (KRAS G12R)
FRGIGRSAY

SEQ ID NO: 12554 - protein, 9 aa, synthetic construct
  source 1..9: note = Seed: ARGVGKSAL (KRAS G12R)
FRGKGRSAA

SEQ ID NO: 12555 - protein, 9 aa, synthetic construct
  source 1..9: note = Seed: ARGVGKSAL (KRAS G12R)
FRGKGRSAF

SEQ ID NO: 12556 - protein, 9 aa, synthetic construct
  source 1..9: note = Seed: ARGVGKSAL (KRAS G12R)
FRGKGRSAI

SEQ ID NO: 12557 - protein, 9 aa, synthetic construct
  source 1..9: note = Seed: ARGVGKSAL (KRAS G12R)
FRGKGRSAL

SEQ ID NO: 12558 - protein, 9 aa, synthetic construct
  source 1..9: note = Seed: ARGVGKSAL (KRAS G12R)
FRGKGRSAM

SEQ ID NO: 12559 - protein, 9 aa, synthetic construct
  source 1..9: note = Seed: ARGVGKSAL (KRAS G12R)
FRGKGRSAQ

SEQ ID NO: 12560 - protein, 9 aa, synthetic construct
  source 1..9: note = Seed: ARGVGKSAL (KRAS G12R)
FRGKGRSAR

SEQ ID NO: 12561 - protein, 9 aa, synthetic construct
  source 1..9: note = Seed: ARGVGKSAL (KRAS G12R)
FRGKGRSAS

SEQ ID NO: 12562 - protein, 9 aa, synthetic construct
  source 1..9: note = Seed: ARGVGKSAL (KRAS G12R)
FRGKGRSAV

SEQ ID NO: 12563 - protein, 9 aa, synthetic construct
  source 1..9: note = Seed: ARGVGKSAL (KRAS G12R)
FRGKGRSAY

SEQ ID NO: 12564 - protein, 9 aa, synthetic construct
  source 1..9: note = Seed: ARGVGKSAL (KRAS G12R)
FRGLGKSAA

SEQ ID NO: 12565 - protein, 9 aa, synthetic construct
  source 1..9: note = Seed: ARGVGKSAL (KRAS G12R)
FRGLGKSAF

SEQ ID NO: 12566 - protein, 9 aa, synthetic construct
  source 1..9: note = Seed: ARGVGKSAL (KRAS G12R)
FRGLGKSAG

SEQ ID NO: 12567 - protein, 9 aa, synthetic construct
  source 1..9: note = Seed: ARGVGKSAL (KRAS G12R)
FRGLGKSAH

SEQ ID NO: 12568 - protein, 9 aa, synthetic construct
  source 1..9: note = Seed: ARGVGKSAL (KRAS G12R)
FRGLGKSAI

SEQ ID NO: 12569 - protein, 9 aa, synthetic construct
  source 1..9: note = Seed: ARGVGKSAL (KRAS G12R)
FRGLGKSAK

SEQ ID NO: 12570 - protein, 9 aa, synthetic construct
  source 1..9: note = Seed: ARGVGKSAL (KRAS G12R)
FRGLGKSAL

SEQ ID NO: 12571 - protein, 9 aa, synthetic construct
  source 1..9: note = Seed: ARGVGKSAL (KRAS G12R)
FRGLGKSAM

SEQ ID NO: 12572 - protein, 9 aa, synthetic construct
  source 1..9: note = Seed: ARGVGKSAL (KRAS G12R)
FRGLGKSAN

SEQ ID NO: 12573 - protein, 9 aa, synthetic construct
  source 1..9: note = Seed: ARGVGKSAL (KRAS G12R)
FRGLGKSAQ

SEQ ID NO: 12574 - protein, 9 aa, synthetic construct
  source 1..9: note = Seed: ARGVGKSAL (KRAS G12R)
FRGLGKSAR

SEQ ID NO: 12575 - protein, 9 aa, synthetic construct
  source 1..9: note = Seed: ARGVGKSAL (KRAS G12R)
FRGLGKSAS

SEQ ID NO: 12576 - protein, 9 aa, synthetic construct
  source 1..9: note = Seed: ARGVGKSAL (KRAS G12R)
FRGLGKSAT

SEQ ID NO: 12577 - protein, 9 aa, synthetic construct
  source 1..9: note = Seed: ARGVGKSAL (KRAS G12R)
FRGLGKSAV

SEQ ID NO: 12578 - protein, 9 aa, synthetic construct
  source 1..9: note = Seed: ARGVGKSAL (KRAS G12R)
FRGLGKSAW

SEQ ID NO: 12579 - protein, 9 aa, synthetic construct
  source 1..9: note = Seed: ARGVGKSAL (KRAS G12R)
FRGLGKSAY

SEQ ID NO: 12580 - protein, 9 aa, synthetic construct
  source 1..9: note = Seed: ARGVGKSAL (KRAS G12R)
FRGLGRSAA

SEQ ID NO: 12581 - protein, 9 aa, synthetic construct
  source 1..9: note = Seed: ARGVGKSAL (KRAS G12R)
FRGLGRSAC

SEQ ID NO: 12582 - protein, 9 aa, synthetic construct
  source 1..9: note = Seed: ARGVGKSAL (KRAS G12R)
FRGLGRSAE

SEQ ID NO: 12583 - protein, 9 aa, synthetic construct
  source 1..9: note = Seed: ARGVGKSAL (KRAS G12R)
FRGLGRSAF

SEQ ID NO: 12584 - protein, 9 aa, synthetic construct
  source 1..9: note = Seed: ARGVGKSAL (KRAS G12R)
FRGLGRSAG

SEQ ID NO: 12585 - protein, 9 aa, synthetic construct
  source 1..9: note = Seed: ARGVGKSAL (KRAS G12R)
FRGLGRSAH

SEQ ID NO: 12586 - protein, 9 aa, synthetic construct
  source 1..9: note = Seed: ARGVGKSAL (KRAS G12R)
FRGLGRSAI

SEQ ID NO: 12587 - protein, 9 aa, synthetic construct
  source 1..9: note = Seed: ARGVGKSAL (KRAS G12R)
FRGLGRSAK

SEQ ID NO: 12588 - protein, 9 aa, synthetic construct
  source 1..9: note = Seed: ARGVGKSAL (KRAS G12R)
FRGLGRSAL

SEQ ID NO: 12589 - protein, 9 aa, synthetic construct
  source 1..9: note = Seed: ARGVGKSAL (KRAS G12R)
FRGLGRSAM

SEQ ID NO: 12590 - protein, 9 aa, synthetic construct
  source 1..9: note = Seed: ARGVGKSAL (KRAS G12R)
FRGLGRSAN

SEQ ID NO: 12591 - protein, 9 aa, synthetic construct
  source 1..9: note = Seed: ARGVGKSAL (KRAS G12R)
FRGLGRSAP

SEQ ID NO: 12592 - protein, 9 aa, synthetic construct
  source 1..9: note = Seed: ARGVGKSAL (KRAS G12R)
FRGLGRSAQ

SEQ ID NO: 12593 - protein, 9 aa, synthetic construct
  source 1..9: note = Seed: ARGVGKSAL (KRAS G12R)
FRGLGRSAR

SEQ ID NO: 12594 - protein, 9 aa, synthetic construct
  source 1..9: note = Seed: ARGVGKSAL (KRAS G12R)
FRGLGRSAS

SEQ ID NO: 12595 - protein, 9 aa, synthetic construct
  source 1..9: note = Seed: ARGVGKSAL (KRAS G12R)
FRGLGRSAT

SEQ ID NO: 12596 - protein, 9 aa, synthetic construct
  source 1..9: note = Seed: ARGVGKSAL (KRAS G12R)
FRGLGRSAV

SEQ ID NO: 12597 - protein, 9 aa, synthetic construct
  source 1..9: note = Seed: ARGVGKSAL (KRAS G12R)
FRGLGRSAW

SEQ ID NO: 12598 - protein, 9 aa, synthetic construct
  source 1..9: note = Seed: ARGVGKSAL (KRAS G12R)
FRGLGRSAY

SEQ ID NO: 12599 - protein, 9 aa, synthetic construct
  source 1..9: note = Seed: ARGVGKSAL (KRAS G12R)
FRGMGKSAA

SEQ ID NO: 12600 - protein, 9 aa, synthetic construct
  source 1..9: note = Seed: ARGVGKSAL (KRAS G12R)
FRGMGKSAF

SEQ ID NO: 12601 - protein, 9 aa, synthetic construct
  source 1..9: note = Seed: ARGVGKSAL (KRAS G12R)
FRGMGKSAG

SEQ ID NO: 12602 - protein, 9 aa, synthetic construct
  source 1..9: note = Seed: ARGVGKSAL (KRAS G12R)
FRGMGKSAH

SEQ ID NO: 12603 - protein, 9 aa, synthetic construct
  source 1..9: note = Seed: ARGVGKSAL (KRAS G12R)
FRGMGKSAI

SEQ ID NO: 12604 - protein, 9 aa, synthetic construct
  source 1..9: note = Seed: ARGVGKSAL (KRAS G12R)
FRGMGKSAK

SEQ ID NO: 12605 - protein, 9 aa, synthetic construct
  source 1..9: note = Seed: ARGVGKSAL (KRAS G12R)
FRGMGKSAL

SEQ ID NO: 12606 - protein, 9 aa, synthetic construct
  source 1..9: note = Seed: ARGVGKSAL (KRAS G12R)
FRGMGKSAM

SEQ ID NO: 12607 - protein, 9 aa, synthetic construct
  source 1..9: note = Seed: ARGVGKSAL (KRAS G12R)
FRGMGKSAN

SEQ ID NO: 12608 - protein, 9 aa, synthetic construct
  source 1..9: note = Seed: ARGVGKSAL (KRAS G12R)
FRGMGKSAQ

SEQ ID NO: 12609 - protein, 9 aa, synthetic construct
  source 1..9: note = Seed: ARGVGKSAL (KRAS G12R)
FRGMGKSAR

SEQ ID NO: 12610 - protein, 9 aa, synthetic construct
  source 1..9: note = Seed: ARGVGKSAL (KRAS G12R)
FRGMGKSAS

SEQ ID NO: 12611 - protein, 9 aa, synthetic construct
  source 1..9: note = Seed: ARGVGKSAL (KRAS G12R)
FRGMGKSAT

SEQ ID NO: 12612 - protein, 9 aa, synthetic construct
  source 1..9: note = Seed: ARGVGKSAL (KRAS G12R)
FRGMGKSAV

SEQ ID NO: 12613 - protein, 9 aa, synthetic construct
  source 1..9: note = Seed: ARGVGKSAL (KRAS G12R)
FRGMGKSAY

SEQ ID NO: 12614 - protein, 9 aa, synthetic construct
  source 1..9: note = Seed: ARGVGKSAL (KRAS G12R)
FRGMGRSAA

SEQ ID NO: 12615 - protein, 9 aa, synthetic construct
  source 1..9: note = Seed: ARGVGKSAL (KRAS G12R)
FRGMGRSAF

SEQ ID NO: 12616 - protein, 9 aa, synthetic construct
  source 1..9: note = Seed: ARGVGKSAL (KRAS G12R)
FRGMGRSAG

SEQ ID NO: 12617 - protein, 9 aa, synthetic construct
  source 1..9: note = Seed: ARGVGKSAL (KRAS G12R)
FRGMGRSAH

SEQ ID NO: 12618 - protein, 9 aa, synthetic construct
  source 1..9: note = Seed: ARGVGKSAL (KRAS G12R)
FRGMGRSAI

SEQ ID NO: 12619 - protein, 9 aa, synthetic construct
  source 1..9: note = Seed: ARGVGKSAL (KRAS G12R)
FRGMGRSAK

SEQ ID NO: 12620 - protein, 9 aa, synthetic construct
  source 1..9: note = Seed: ARGVGKSAL (KRAS G12R)
FRGMGRSAL

SEQ ID NO: 12621 - protein, 9 aa, synthetic construct
  source 1..9: note = Seed: ARGVGKSAL (KRAS G12R)
FRGMGRSAM

SEQ ID NO: 12622 - protein, 9 aa, synthetic construct
  source 1..9: note = Seed: ARGVGKSAL (KRAS G12R)
FRGMGRSAN

SEQ ID NO: 12623 - protein, 9 aa, synthetic construct
  source 1..9: note = Seed: ARGVGKSAL (KRAS G12R)
FRGMGRSAP

SEQ ID NO: 12624 - protein, 9 aa, synthetic construct
  source 1..9: note = Seed: ARGVGKSAL (KRAS G12R)
FRGMGRSAQ

SEQ ID NO: 12625 - protein, 9 aa, synthetic construct
  source 1..9: note = Seed: ARGVGKSAL (KRAS G12R)
FRGMGRSAR

SEQ ID NO: 12626 - protein, 9 aa, synthetic construct
  source 1..9: note = Seed: ARGVGKSAL (KRAS G12R)
FRGMGRSAS

SEQ ID NO: 12627 - protein, 9 aa, synthetic construct
  source 1..9: note = Seed: ARGVGKSAL (KRAS G12R)
FRGMGRSAT

SEQ ID NO: 12628 - protein, 9 aa, synthetic construct
  source 1..9: note = Seed: ARGVGKSAL (KRAS G12R)
FRGMGRSAV

SEQ ID NO: 12629 - protein, 9 aa, synthetic construct
  source 1..9: note = Seed: ARGVGKSAL (KRAS G12R)
FRGMGRSAW

SEQ ID NO: 12630 - protein, 9 aa, synthetic construct
  source 1..9: note = Seed: ARGVGKSAL (KRAS G12R)
FRGMGRSAY

SEQ ID NO: 12631 - protein, 9 aa, synthetic construct
  source 1..9: note = Seed: ARGVGKSAL (KRAS G12R)
FRGNGFSAI

SEQ ID NO: 12632 - protein, 9 aa, synthetic construct
  source 1..9: note = Seed: ARGVGKSAL (KRAS G12R)
FRGNGFSAV

SEQ ID NO: 12633 - protein, 9 aa, synthetic construct
  source 1..9: note = Seed: ARGVGKSAL (KRAS G12R)
FRGNGISAA

SEQ ID NO: 12634 - protein, 9 aa, synthetic construct
  source 1..9: note = Seed: ARGVGKSAL (KRAS G12R)
FRGQGRSAA

SEQ ID NO: 12635 - protein, 9 aa, synthetic construct
  source 1..9: note = Seed: ARGVGKSAL (KRAS G12R)
FRGQGRSAF

SEQ ID NO: 12636 - protein, 9 aa, synthetic construct
  source 1..9: note = Seed: ARGVGKSAL (KRAS G12R)
FRGQGRSAL

SEQ ID NO: 12637 - protein, 9 aa, synthetic construct
  source 1..9: note = Seed: ARGVGKSAL (KRAS G12R)
FRGQGRSAM

SEQ ID NO: 12638 - protein, 9 aa, synthetic construct
  source 1..9: note = Seed: ARGVGKSAL (KRAS G12R)
FRGQGRSAR

SEQ ID NO: 12639 - protein, 9 aa, synthetic construct
  source 1..9: note = Seed: ARGVGKSAL (KRAS G12R)
FRGQGRSAS

SEQ ID NO: 12640 - protein, 9 aa, synthetic construct
  source 1..9: note = Seed: ARGVGKSAL (KRAS G12R)
FRGQGRSAY

SEQ ID NO: 12641 - protein, 9 aa, synthetic construct
  source 1..9: note = Seed: ARGVGKSAL (KRAS G12R)
FRGRGISAR

SEQ ID NO: 12642 - protein, 9 aa, synthetic construct
  source 1..9: note = Seed: ARGVGKSAL (KRAS G12R)
FRGRGKSAA

SEQ ID NO: 12643 - protein, 9 aa, synthetic construct
  source 1..9: note = Seed: ARGVGKSAL (KRAS G12R)
FRGRGKSAI

SEQ ID NO: 12644 - protein, 9 aa, synthetic construct
  source 1..9: note = Seed: ARGVGKSAL (KRAS G12R)
FRGRGKSAL

SEQ ID NO: 12645 - protein, 9 aa, synthetic construct
  source 1..9: note = Seed: ARGVGKSAL (KRAS G12R)
FRGRGKSAM

SEQ ID NO: 12646 - protein, 9 aa, synthetic construct
  source 1..9: note = Seed: ARGVGKSAL (KRAS G12R)
FRGRGKSAQ

SEQ ID NO: 12647 - protein, 9 aa, synthetic construct
  source 1..9: note = Seed: ARGVGKSAL (KRAS G12R)
FRGRGKSAR

SEQ ID NO: 12648 - protein, 9 aa, synthetic construct
  source 1..9: note = Seed: ARGVGKSAL (KRAS G12R)
FRGRGKSAS

SEQ ID NO: 12649 - protein, 9 aa, synthetic construct
  source 1..9: note = Seed: ARGVGKSAL (KRAS G12R)
FRGRGKSAV

SEQ ID NO: 12650 - protein, 9 aa, synthetic construct
  source 1..9: note = Seed: ARGVGKSAL (KRAS G12R)
FRGRGKSAY

SEQ ID NO: 12651 - protein, 9 aa, synthetic construct
  source 1..9: note = Seed: ARGVGKSAL (KRAS G12R)
FRGRGRSAA

SEQ ID NO: 12652 - protein, 9 aa, synthetic construct
  source 1..9: note = Seed: ARGVGKSAL (KRAS G12R)
FRGRGRSAF

SEQ ID NO: 12653 - protein, 9 aa, synthetic construct
  source 1..9: note = Seed: ARGVGKSAL (KRAS G12R)
FRGRGRSAG

SEQ ID NO: 12654 - protein, 9 aa, synthetic construct
  source 1..9: note = Seed: ARGVGKSAL (KRAS G12R)
FRGRGRSAI

SEQ ID NO: 12655 - protein, 9 aa, synthetic construct
  source 1..9: note = Seed: ARGVGKSAL (KRAS G12R)
FRGRGRSAL

SEQ ID NO: 12656 - protein, 9 aa, synthetic construct
  source 1..9: note = Seed: ARGVGKSAL (KRAS G12R)
FRGRGRSAM

SEQ ID NO: 12657 - protein, 9 aa, synthetic construct
  source 1..9: note = Seed: ARGVGKSAL (KRAS G12R)
FRGRGRSAQ

SEQ ID NO: 12658 - protein, 9 aa, synthetic construct
  source 1..9: note = Seed: ARGVGKSAL (KRAS G12R)
FRGRGRSAR

SEQ ID NO: 12659 - protein, 9 aa, synthetic construct
  source 1..9: note = Seed: ARGVGKSAL (KRAS G12R)
FRGRGRSAS

SEQ ID NO: 12660 - protein, 9 aa, synthetic construct
  source 1..9: note = Seed: ARGVGKSAL (KRAS G12R)
FRGRGRSAT

SEQ ID NO: 12661 - protein, 9 aa, synthetic construct
  source 1..9: note = Seed: ARGVGKSAL (KRAS G12R)
FRGRGRSAV

SEQ ID NO: 12662 - protein, 9 aa, synthetic construct
  source 1..9: note = Seed: ARGVGKSAL (KRAS G12R)
FRGRGRSAY

SEQ ID NO: 12663 - protein, 9 aa, synthetic construct
  source 1..9: note = Seed: ARGVGKSAL (KRAS G12R)
FRGRGVSAR

SEQ ID NO: 12664 - protein, 9 aa, synthetic construct
  source 1..9: note = Seed: ARGVGKSAL (KRAS G12R)
FRGSGASAA

SEQ ID NO: 12665 - protein, 9 aa, synthetic construct
  source 1..9: note = Seed: ARGVGKSAL (KRAS G12R)
FRGSGASAS

SEQ ID NO: 12666 - protein, 9 aa, synthetic construct
  source 1..9: note = Seed: ARGVGKSAL (KRAS G12R)
FRGSGFSAE

SEQ ID NO: 12667 - protein, 9 aa, synthetic construct
  source 1..9: note = Seed: ARGVGKSAL (KRAS G12R)
FRGSGFSAF

SEQ ID NO: 12668 - protein, 9 aa, synthetic construct
  source 1..9: note = Seed: ARGVGKSAL (KRAS G12R)
FRGSGFSAI

SEQ ID NO: 12669 - protein, 9 aa, synthetic construct
  source 1..9: note = Seed: ARGVGKSAL (KRAS G12R)
FRGSGFSAL

SEQ ID NO: 12670 - protein, 9 aa, synthetic construct
  source 1..9: note = Seed: ARGVGKSAL (KRAS G12R)
FRGSGFSAM

SEQ ID NO: 12671 - protein, 9 aa, synthetic construct
  source 1..9: note = Seed: ARGVGKSAL (KRAS G12R)
FRGSGFSAT

SEQ ID NO: 12672 - protein, 9 aa, synthetic construct
  source 1..9: note = Seed: ARGVGKSAL (KRAS G12R)
FRGSGFSAV

SEQ ID NO: 12673 - protein, 9 aa, synthetic construct
  source 1..9: note = Seed: ARGVGKSAL (KRAS G12R)
FRGSGISAA

SEQ ID NO: 12674 - protein, 9 aa, synthetic construct
  source 1..9: note = Seed: ARGVGKSAL (KRAS G12R)
FRGSGISAG

SEQ ID NO: 12675 - protein, 9 aa, synthetic construct
  source 1..9: note = Seed: ARGVGKSAL (KRAS G12R)
FRGSGISAS

SEQ ID NO: 12676 - protein, 9 aa, synthetic construct
  source 1..9: note = Seed: ARGVGKSAL (KRAS G12R)
FRGSGLSAA

SEQ ID NO: 12677 - protein, 9 aa, synthetic construct
  source 1..9: note = Seed: ARGVGKSAL (KRAS G12R)
FRGSGMSAA

SEQ ID NO: 12678 - protein, 9 aa, synthetic construct
  source 1..9: note = Seed: ARGVGKSAL (KRAS G12R)
FRGSGMSAS

SEQ ID NO: 12679 - protein, 9 aa, synthetic construct
  source 1..9: note = Seed: ARGVGKSAL (KRAS G12R)
FRGSGNSAA

SEQ ID NO: 12680 - protein, 9 aa, synthetic construct
  source 1..9: note = Seed: ARGVGKSAL (KRAS G12R)
FRGSGRSAR

SEQ ID NO: 12681 - protein, 9 aa, synthetic construct
  source 1..9: note = Seed: ARGVGKSAL (KRAS G12R)
FRGSGVSAA

SEQ ID NO: 12682 - protein, 9 aa, synthetic construct
  source 1..9: note = Seed: ARGVGKSAL (KRAS G12R)
FRGSGVSAS

SEQ ID NO: 12683 - protein, 9 aa, synthetic construct
  source 1..9: note = Seed: ARGVGKSAL (KRAS G12R)
FRGTGFSAE

SEQ ID NO: 12684 - protein, 9 aa, synthetic construct
  source 1..9: note = Seed: ARGVGKSAL (KRAS G12R)
FRGTGFSAF

SEQ ID NO: 12685 - protein, 9 aa, synthetic construct
  source 1..9: note = Seed: ARGVGKSAL (KRAS G12R)
FRGTGFSAI

SEQ ID NO: 12686 - protein, 9 aa, synthetic construct
  source 1..9: note = Seed: ARGVGKSAL (KRAS G12R)
FRGTGFSAL

SEQ ID NO: 12687 - protein, 9 aa, synthetic construct
  source 1..9: note = Seed: ARGVGKSAL (KRAS G12R)
FRGTGFSAM

SEQ ID NO: 12688 - protein, 9 aa, synthetic construct
  source 1..9: note = Seed: ARGVGKSAL (KRAS G12R)
FRGTGFSAT

SEQ ID NO: 12689 - protein, 9 aa, synthetic construct
  source 1..9: note = Seed: ARGVGKSAL (KRAS G12R)
FRGTGFSAV

SEQ ID NO: 12690 - protein, 9 aa, synthetic construct
  source 1..9: note = Seed: ARGVGKSAL (KRAS G12R)
FRGTGISAA

SEQ ID NO: 12691 - protein, 9 aa, synthetic construct
  source 1..9: note = Seed: ARGVGKSAL (KRAS G12R)
FRGTGISAS

SEQ ID NO: 12692 - protein, 9 aa, synthetic construct
  source 1..9: note = Seed: ARGVGKSAL (KRAS G12R)
FRGVGFSAI

SEQ ID NO: 12693 - protein, 9 aa, synthetic construct
  source 1..9: note = Seed: ARGVGKSAL (KRAS G12R)
FRGVGFSAL

SEQ ID NO: 12694 - protein, 9 aa, synthetic construct
  source 1..9: note = Seed: ARGVGKSAL (KRAS G12R)
FRGVGFSAV

SEQ ID NO: 12695 - protein, 9 aa, synthetic construct
  source 1..9: note = Seed: ARGVGKSAL (KRAS G12R)
FRGVGKSAA

SEQ ID NO: 12696 - protein, 9 aa, synthetic construct
  source 1..9: note = Seed: ARGVGKSAL (KRAS G12R)
FRGVGKSAH

SEQ ID NO: 12697 - protein, 9 aa, synthetic construct
  source 1..9: note = Seed: ARGVGKSAL (KRAS G12R)
FRGVGKSAK

SEQ ID NO: 12698 - protein, 9 aa, synthetic construct
  source 1..9: note = Seed: ARGVGKSAL (KRAS G12R)
FRGVGKSAR

SEQ ID NO: 12699 - protein, 9 aa, synthetic construct
  source 1..9: note = Seed: ARGVGKSAL (KRAS G12R)
FRGVGKSAS

SEQ ID NO: 12700 - protein, 9 aa, synthetic construct
  source 1..9: note = Seed: ARGVGKSAL (KRAS G12R)
FRGVGRSAA

SEQ ID NO: 12701 - protein, 9 aa, synthetic construct
  source 1..9: note = Seed: ARGVGKSAL (KRAS G12R)
FRGVGRSAF

SEQ ID NO: 12702 - protein, 9 aa, synthetic construct
  source 1..9: note = Seed: ARGVGKSAL (KRAS G12R)
FRGVGRSAG

SEQ ID NO: 12703 - protein, 9 aa, synthetic construct
  source 1..9: note = Seed: ARGVGKSAL (KRAS G12R)
FRGVGRSAH

SEQ ID NO: 12704 - protein, 9 aa, synthetic construct
  source 1..9: note = Seed: ARGVGKSAL (KRAS G12R)
FRGVGRSAI

SEQ ID NO: 12705 - protein, 9 aa, synthetic construct
  source 1..9: note = Seed: ARGVGKSAL (KRAS G12R)
FRGVGRSAK

SEQ ID NO: 12706 - protein, 9 aa, synthetic construct
  source 1..9: note = Seed: ARGVGKSAL (KRAS G12R)
FRGVGRSAL

SEQ ID NO: 12707 - protein, 9 aa, synthetic construct
  source 1..9: note = Seed: ARGVGKSAL (KRAS G12R)
FRGVGRSAM

SEQ ID NO: 12708 - protein, 9 aa, synthetic construct
  source 1..9: note = Seed: ARGVGKSAL (KRAS G12R)
FRGVGRSAQ

SEQ ID NO: 12709 - protein, 9 aa, synthetic construct
  source 1..9: note = Seed: ARGVGKSAL (KRAS G12R)
FRGVGRSAR

SEQ ID NO: 12710 - protein, 9 aa, synthetic construct
  source 1..9: note = Seed: ARGVGKSAL (KRAS G12R)
FRGVGRSAS

SEQ ID NO: 12711 - protein, 9 aa, synthetic construct
  source 1..9: note = Seed: ARGVGKSAL (KRAS G12R)
FRGVGRSAT

SEQ ID NO: 12712 - protein, 9 aa, synthetic construct
  source 1..9: note = Seed: ARGVGKSAL (KRAS G12R)
FRGVGRSAV

SEQ ID NO: 12713 - protein, 9 aa, synthetic construct
  source 1..9: note = Seed: ARGVGKSAL (KRAS G12R)
FRGVGRSAY

SEQ ID NO: 12714 - protein, 9 aa, synthetic construct
  source 1..9: note = Seed: ARGVGKSAL (KRAS G12R)
FRGWGKSAK

SEQ ID NO: 12715 - protein, 9 aa, synthetic construct
  source 1..9: note = Seed: ARGVGKSAL (KRAS G12R)
FRGWGKSAR

SEQ ID NO: 12716 - protein, 9 aa, synthetic construct
  source 1..9: note = Seed: ARGVGKSAL (KRAS G12R)
FRGWGRSAA

SEQ ID NO: 12717 - protein, 9 aa, synthetic construct
  source 1..9: note = Seed: ARGVGKSAL (KRAS G12R)
FRGWGRSAF

SEQ ID NO: 12718 - protein, 9 aa, synthetic construct
  source 1..9: note = Seed: ARGVGKSAL (KRAS G12R)
FRGWGRSAH

SEQ ID NO: 12719 - protein, 9 aa, synthetic construct
  source 1..9: note = Seed: ARGVGKSAL (KRAS G12R)
FRGWGRSAI

SEQ ID NO: 12720 - protein, 9 aa, synthetic construct
  source 1..9: note = Seed: ARGVGKSAL (KRAS G12R)
FRGWGRSAK

SEQ ID NO: 12721 - protein, 9 aa, synthetic construct
  source 1..9: note = Seed: ARGVGKSAL (KRAS G12R)
FRGWGRSAL

SEQ ID NO: 12722 - protein, 9 aa, synthetic construct
  source 1..9: note = Seed: ARGVGKSAL (KRAS G12R)
FRGWGRSAM

SEQ ID NO: 12723 - protein, 9 aa, synthetic construct
  source 1..9: note = Seed: ARGVGKSAL (KRAS G12R)
FRGWGRSAR

SEQ ID NO: 12724 - protein, 9 aa, synthetic construct
  source 1..9: note = Seed: ARGVGKSAL (KRAS G12R)
FRGWGRSAS

SEQ ID NO: 12725 - protein, 9 aa, synthetic construct
  source 1..9: note = Seed: ARGVGKSAL (KRAS G12R)
FRGWGRSAV

SEQ ID NO: 12726 - protein, 9 aa, synthetic construct
  source 1..9: note = Seed: ARGVGKSAL (KRAS G12R)
FRGWGRSAY

SEQ ID NO: 12727 - protein, 9 aa, synthetic construct
  source 1..9: note = Seed: ARGVGKSAL (KRAS G12R)
FRGYGISAR

SEQ ID NO: 12728 - protein, 9 aa, synthetic construct
  source 1..9: note = Seed: ARGVGKSAL (KRAS G12R)
FRGYGKSAR

SEQ ID NO: 12729 - protein, 9 aa, synthetic construct
  source 1..9: note = Seed: ARGVGKSAL (KRAS G12R)
FRGYGRSAA

SEQ ID NO: 12730 - protein, 9 aa, synthetic construct
  source 1..9: note = Seed: ARGVGKSAL (KRAS G12R)
FRGYGRSAF

SEQ ID NO: 12731 - protein, 9 aa, synthetic construct
  source 1..9: note = Seed: ARGVGKSAL (KRAS G12R)
FRGYGRSAH

SEQ ID NO: 12732 - protein, 9 aa, synthetic construct
  source 1..9: note = Seed: ARGVGKSAL (KRAS G12R)
FRGYGRSAI

SEQ ID NO: 12733 - protein, 9 aa, synthetic construct
  source 1..9: note = Seed: ARGVGKSAL (KRAS G12R)
FRGYGRSAK

SEQ ID NO: 12734 - protein, 9 aa, synthetic construct
  source 1..9: note = Seed: ARGVGKSAL (KRAS G12R)
FRGYGRSAL

SEQ ID NO: 12735 - protein, 9 aa, synthetic construct
  source 1..9: note = Seed: ARGVGKSAL (KRAS G12R)
FRGYGRSAM

SEQ ID NO: 12736 - protein, 9 aa, synthetic construct
  source 1..9: note = Seed: ARGVGKSAL (KRAS G12R)
FRGYGRSAR

SEQ ID NO: 12737 - protein, 9 aa, synthetic construct
  source 1..9: note = Seed: ARGVGKSAL (KRAS G12R)
FRGYGRSAV

SEQ ID NO: 12738 - protein, 9 aa, synthetic construct
  source 1..9: note = Seed: ARGVGKSAL (KRAS G12R)
FRGYGRSAW

SEQ ID NO: 12739 - protein, 9 aa, synthetic construct
  source 1..9: note = Seed: ARGVGKSAL (KRAS G12R)
FRGYGRSAY

SEQ ID NO: 12740 - protein, 9 aa, synthetic construct
  source 1..9: note = Seed: ARGVGKSAL (KRAS G12R)
FRGYGVSAR

SEQ ID NO: 12741 - protein, 9 aa, synthetic construct
  source 1..9: note = Seed: ARGVGKSAL (KRAS G12R)
GRGAGISAA

SEQ ID NO: 12742 - protein, 9 aa, synthetic construct
  source 1..9: note = Seed: ARGVGKSAL (KRAS G12R)
GRGAGVSAA

SEQ ID NO: 12743 - protein, 9 aa, synthetic construct
  source 1..9: note = Seed: ARGVGKSAL (KRAS G12R)
HRGAGISAA

SEQ ID NO: 12744 - protein, 9 aa, synthetic construct
  source 1..9: note = Seed: ARGVGKSAL (KRAS G12R)
HRGAGISAS

SEQ ID NO: 12745 - protein, 9 aa, synthetic construct
  source 1..9: note = Seed: ARGVGKSAL (KRAS G12R)
HRGAGVSAA

SEQ ID NO: 12746 - protein, 9 aa, synthetic construct
  source 1..9: note = Seed: ARGVGKSAL (KRAS G12R)
HRGSGISAA

SEQ ID NO: 12747 - protein, 9 aa, synthetic construct
  source 1..9: note = Seed: ARGVGKSAL (KRAS G12R)
HRGSGVSAA

SEQ ID NO: 12748 - protein, 9 aa, synthetic construct
  source 1..9: note = Seed: ARGVGKSAL (KRAS G12R)
IRGAGASAA

SEQ ID NO: 12749 - protein, 9 aa, synthetic construct
  source 1..9: note = Seed: ARGVGKSAL (KRAS G12R)
IRGAGASAG

SEQ ID NO: 12750 - protein, 9 aa, synthetic construct
  source 1..9: note = Seed: ARGVGKSAL (KRAS G12R)
IRGAGASAH

SEQ ID NO: 12751 - protein, 9 aa, synthetic construct
  source 1..9: note = Seed: ARGVGKSAL (KRAS G12R)
IRGAGASAI

SEQ ID NO: 12752 - protein, 9 aa, synthetic construct
  source 1..9: note = Seed: ARGVGKSAL (KRAS G12R)
IRGAGASAL

SEQ ID NO: 12753 - protein, 9 aa, synthetic construct
  source 1..9: note = Seed: ARGVGKSAL (KRAS G12R)
IRGAGASAM

SEQ ID NO: 12754 - protein, 9 aa, synthetic construct
  source 1..9: note = Seed: ARGVGKSAL (KRAS G12R)
IRGAGASAN

SEQ ID NO: 12755 - protein, 9 aa, synthetic construct
  source 1..9: note = Seed: ARGVGKSAL (KRAS G12R)
IRGAGASAQ

SEQ ID NO: 12756 - protein, 9 aa, synthetic construct
  source 1..9: note = Seed: ARGVGKSAL (KRAS G12R)
IRGAGASAS

SEQ ID NO: 12757 - protein, 9 aa, synthetic construct
  source 1..9: note = Seed: ARGVGKSAL (KRAS G12R)
IRGAGASAT

SEQ ID NO: 12758 - protein, 9 aa, synthetic construct
  source 1..9: note = Seed: ARGVGKSAL (KRAS G12R)
IRGAGASAV

SEQ ID NO: 12759 - protein, 9 aa, synthetic construct
  source 1..9: note = Seed: ARGVGKSAL (KRAS G12R)
IRGAGASAY

SEQ ID NO: 12760 - protein, 9 aa, synthetic construct
  source 1..9: note = Seed: ARGVGKSAL (KRAS G12R)
IRGAGISAA

SEQ ID NO: 12761 - protein, 9 aa, synthetic construct
  source 1..9: note = Seed: ARGVGKSAL (KRAS G12R)
IRGAGISAG

SEQ ID NO: 12762 - protein, 9 aa, synthetic construct
  source 1..9: note = Seed: ARGVGKSAL (KRAS G12R)
IRGAGISAH

SEQ ID NO: 12763 - protein, 9 aa, synthetic construct
  source 1..9: note = Seed: ARGVGKSAL (KRAS G12R)
IRGAGISAI

SEQ ID NO: 12764 - protein, 9 aa, synthetic construct
  source 1..9: note = Seed: ARGVGKSAL (KRAS G12R)
IRGAGISAL

SEQ ID NO: 12765 - protein, 9 aa, synthetic construct
  source 1..9: note = Seed: ARGVGKSAL (KRAS G12R)
IRGAGISAM

SEQ ID NO: 12766 - protein, 9 aa, synthetic construct
  source 1..9: note = Seed: ARGVGKSAL (KRAS G12R)
IRGAGISAN

SEQ ID NO: 12767 - protein, 9 aa, synthetic construct
  source 1..9: note = Seed: ARGVGKSAL (KRAS G12R)
IRGAGISAQ

SEQ ID NO: 12768 - protein, 9 aa, synthetic construct
  source 1..9: note = Seed: ARGVGKSAL (KRAS G12R)
IRGAGISAS

SEQ ID NO: 12769 - protein, 9 aa, synthetic construct
  source 1..9: note = Seed: ARGVGKSAL (KRAS G12R)
IRGAGISAT

SEQ ID NO: 12770 - protein, 9 aa, synthetic construct
  source 1..9: note = Seed: ARGVGKSAL (KRAS G12R)
IRGAGISAV

SEQ ID NO: 12771 - protein, 9 aa, synthetic construct
  source 1..9: note = Seed: ARGVGKSAL (KRAS G12R)
IRGAGISAY

SEQ ID NO: 12772 - protein, 9 aa, synthetic construct
  source 1..9: note = Seed: ARGVGKSAL (KRAS G12R)
IRGAGKSAA

SEQ ID NO: 12773 - protein, 9 aa, synthetic construct
  source 1..9: note = Seed: ARGVGKSAL (KRAS G12R)
IRGAGKSAF

SEQ ID NO: 12774 - protein, 9 aa, synthetic construct
  source 1..9: note = Seed: ARGVGKSAL (KRAS G12R)
IRGAGKSAI

SEQ ID NO: 12775 - protein, 9 aa, synthetic construct
  source 1..9: note = Seed: ARGVGKSAL (KRAS G12R)
IRGAGKSAL

SEQ ID NO: 12776 - protein, 9 aa, synthetic construct
  source 1..9: note = Seed: ARGVGKSAL (KRAS G12R)
IRGAGKSAM

SEQ ID NO: 12777 - protein, 9 aa, synthetic construct
  source 1..9: note = Seed: ARGVGKSAL (KRAS G12R)
IRGAGKSAR

SEQ ID NO: 12778 - protein, 9 aa, synthetic construct
  source 1..9: note = Seed: ARGVGKSAL (KRAS G12R)
IRGAGKSAS

SEQ ID NO: 12779 - protein, 9 aa, synthetic construct
  source 1..9: note = Seed: ARGVGKSAL (KRAS G12R)
IRGAGKSAV

SEQ ID NO: 12780 - protein, 9 aa, synthetic construct
  source 1..9: note = Seed: ARGVGKSAL (KRAS G12R)
IRGAGKSAY

SEQ ID NO: 12781 - protein, 9 aa, synthetic construct
  source 1..9: note = Seed: ARGVGKSAL (KRAS G12R)
IRGAGLSAA

SEQ ID NO: 12782 - protein, 9 aa, synthetic construct
  source 1..9: note = Seed: ARGVGKSAL (KRAS G12R)
IRGAGLSAG

SEQ ID NO: 12783 - protein, 9 aa, synthetic construct
  source 1..9: note = Seed: ARGVGKSAL (KRAS G12R)
IRGAGLSAM

SEQ ID NO: 12784 - protein, 9 aa, synthetic construct
  source 1..9: note = Seed: ARGVGKSAL (KRAS G12R)
IRGAGLSAS

SEQ ID NO: 12785 - protein, 9 aa, synthetic construct
  source 1..9: note = Seed: ARGVGKSAL (KRAS G12R)
IRGAGLSAT

SEQ ID NO: 12786 - protein, 9 aa, synthetic construct
  source 1..9: note = Seed: ARGVGKSAL (KRAS G12R)
IRGAGLSAV

SEQ ID NO: 12787 - protein, 9 aa, synthetic construct
  source 1..9: note = Seed: ARGVGKSAL (KRAS G12R)
IRGAGMSAA

SEQ ID NO: 12788 - protein, 9 aa, synthetic construct
  source 1..9: note = Seed: ARGVGKSAL (KRAS G12R)
IRGAGMSAG

SEQ ID NO: 12789 - protein, 9 aa, synthetic construct
  source 1..9: note = Seed: ARGVGKSAL (KRAS G12R)
IRGAGMSAH

SEQ ID NO: 12790 - protein, 9 aa, synthetic construct
  source 1..9: note = Seed: ARGVGKSAL (KRAS G12R)
IRGAGMSAI

SEQ ID NO: 12791 - protein, 9 aa, synthetic construct
  source 1..9: note = Seed: ARGVGKSAL (KRAS G12R)
IRGAGMSAM

SEQ ID NO: 12792 - protein, 9 aa, synthetic construct
  source 1..9: note = Seed: ARGVGKSAL (KRAS G12R)
IRGAGMSAS

SEQ ID NO: 12793 - protein, 9 aa, synthetic construct
  source 1..9: note = Seed: ARGVGKSAL (KRAS G12R)
IRGAGMSAT

SEQ ID NO: 12794 - protein, 9 aa, synthetic construct
  source 1..9: note = Seed: ARGVGKSAL (KRAS G12R)
IRGAGMSAV

SEQ ID NO: 12795 - protein, 9 aa, synthetic construct
  source 1..9: note = Seed: ARGVGKSAL (KRAS G12R)
IRGAGNSAA

SEQ ID NO: 12796 - protein, 9 aa, synthetic construct
  source 1..9: note = Seed: ARGVGKSAL (KRAS G12R)
IRGAGNSAS

SEQ ID NO: 12797 - protein, 9 aa, synthetic construct
  source 1..9: note = Seed: ARGVGKSAL (KRAS G12R)
IRGAGPSAA

SEQ ID NO: 12798 - protein, 9 aa, synthetic construct
  source 1..9: note = Seed: ARGVGKSAL (KRAS G12R)
IRGAGPSAI

SEQ ID NO: 12799 - protein, 9 aa, synthetic construct
  source 1..9: note = Seed: ARGVGKSAL (KRAS G12R)
IRGAGPSAS

SEQ ID NO: 12800 - protein, 9 aa, synthetic construct
  source 1..9: note = Seed: ARGVGKSAL (KRAS G12R)
IRGAGPSAT

SEQ ID NO: 12801 - protein, 9 aa, synthetic construct
  source 1..9: note = Seed: ARGVGKSAL (KRAS G12R)
IRGAGPSAV

SEQ ID NO: 12802 - protein, 9 aa, synthetic construct
  source 1..9: note = Seed: ARGVGKSAL (KRAS G12R)
IRGAGRSAA

SEQ ID NO: 12803 - protein, 9 aa, synthetic construct
  source 1..9: note = Seed: ARGVGKSAL (KRAS G12R)
IRGAGRSAF

SEQ ID NO: 12804 - protein, 9 aa, synthetic construct
  source 1..9: note = Seed: ARGVGKSAL (KRAS G12R)
IRGAGRSAH

SEQ ID NO: 12805 - protein, 9 aa, synthetic construct
  source 1..9: note = Seed: ARGVGKSAL (KRAS G12R)
IRGAGRSAI

SEQ ID NO: 12806 - protein, 9 aa, synthetic construct
  source 1..9: note = Seed: ARGVGKSAL (KRAS G12R)
IRGAGRSAK

SEQ ID NO: 12807 - protein, 9 aa, synthetic construct
  source 1..9: note = Seed: ARGVGKSAL (KRAS G12R)
IRGAGRSAL

SEQ ID NO: 12808 - protein, 9 aa, synthetic construct
  source 1..9: note = Seed: ARGVGKSAL (KRAS G12R)
IRGAGRSAM

SEQ ID NO: 12809 - protein, 9 aa, synthetic construct
  source 1..9: note = Seed: ARGVGKSAL (KRAS G12R)
IRGAGRSAQ

SEQ ID NO: 12810 - protein, 9 aa, synthetic construct
  source 1..9: note = Seed: ARGVGKSAL (KRAS G12R)
IRGAGRSAR

SEQ ID NO: 12811 - protein, 9 aa, synthetic construct
  source 1..9: note = Seed: ARGVGKSAL (KRAS G12R)
IRGAGRSAS

SEQ ID NO: 12812 - protein, 9 aa, synthetic construct
  source 1..9: note = Seed: ARGVGKSAL (KRAS G12R)
IRGAGRSAT

SEQ ID NO: 12813 - protein, 9 aa, synthetic construct
  source 1..9: note = Seed: ARGVGKSAL (KRAS G12R)
IRGAGRSAV

SEQ ID NO: 12814 - protein, 9 aa, synthetic construct
  source 1..9: note = Seed: ARGVGKSAL (KRAS G12R)
IRGAGRSAW

SEQ ID NO: 12815 - protein, 9 aa, synthetic construct
  source 1..9: note = Seed: ARGVGKSAL (KRAS G12R)
IRGAGRSAY

SEQ ID NO: 12816 - protein, 9 aa, synthetic construct
  source 1..9: note = Seed: ARGVGKSAL (KRAS G12R)
IRGAGSSAA

SEQ ID NO: 12817 - protein, 9 aa, synthetic construct
  source 1..9: note = Seed: ARGVGKSAL (KRAS G12R)
IRGAGSSAS

SEQ ID NO: 12818 - protein, 9 aa, synthetic construct
  source 1..9: note = Seed: ARGVGKSAL (KRAS G12R)
IRGAGSSAV

SEQ ID NO: 12819 - protein, 9 aa, synthetic construct
  source 1..9: note = Seed: ARGVGKSAL (KRAS G12R)
IRGAGTSAA

SEQ ID NO: 12820 - protein, 9 aa, synthetic construct
  source 1..9: note = Seed: ARGVGKSAL (KRAS G12R)
IRGAGTSAI

SEQ ID NO: 12821 - protein, 9 aa, synthetic construct
  source 1..9: note = Seed: ARGVGKSAL (KRAS G12R)
IRGAGTSAM

SEQ ID NO: 12822 - protein, 9 aa, synthetic construct
  source 1..9: note = Seed: ARGVGKSAL (KRAS G12R)
IRGAGTSAS

SEQ ID NO: 12823 - protein, 9 aa, synthetic construct
  source 1..9: note = Seed: ARGVGKSAL (KRAS G12R)
IRGAGTSAV

SEQ ID NO: 12824 - protein, 9 aa, synthetic construct
  source 1..9: note = Seed: ARGVGKSAL (KRAS G12R)
IRGAGVSAA

SEQ ID NO: 12825 - protein, 9 aa, synthetic construct
  source 1..9: note = Seed: ARGVGKSAL (KRAS G12R)
IRGAGVSAG

SEQ ID NO: 12826 - protein, 9 aa, synthetic construct
  source 1..9: note = Seed: ARGVGKSAL (KRAS G12R)
IRGAGVSAH

SEQ ID NO: 12827 - protein, 9 aa, synthetic construct
  source 1..9: note = Seed: ARGVGKSAL (KRAS G12R)
IRGAGVSAI

SEQ ID NO: 12828 - protein, 9 aa, synthetic construct
  source 1..9: note = Seed: ARGVGKSAL (KRAS G12R)
IRGAGVSAL

SEQ ID NO: 12829 - protein, 9 aa, synthetic construct
  source 1..9: note = Seed: ARGVGKSAL (KRAS G12R)
IRGAGVSAM

SEQ ID NO: 12830 - protein, 9 aa, synthetic construct
  source 1..9: note = Seed: ARGVGKSAL (KRAS G12R)
IRGAGVSAN

SEQ ID NO: 12831 - protein, 9 aa, synthetic construct
  source 1..9: note = Seed: ARGVGKSAL (KRAS G12R)
IRGAGVSAQ

SEQ ID NO: 12832 - protein, 9 aa, synthetic construct
  source 1..9: note = Seed: ARGVGKSAL (KRAS G12R)
IRGAGVSAS

SEQ ID NO: 12833 - protein, 9 aa, synthetic construct
  source 1..9: note = Seed: ARGVGKSAL (KRAS G12R)
IRGAGVSAT

SEQ ID NO: 12834 - protein, 9 aa, synthetic construct
  source 1..9: note = Seed: ARGVGKSAL (KRAS G12R)
IRGAGVSAV

SEQ ID NO: 12835 - protein, 9 aa, synthetic construct
  source 1..9: note = Seed: ARGVGKSAL (KRAS G12R)
IRGAGVSAY

SEQ ID NO: 12836 - protein, 9 aa, synthetic construct
  source 1..9: note = Seed: ARGVGKSAL (KRAS G12R)
IRGCGRSAR

SEQ ID NO: 12837 - protein, 9 aa, synthetic construct
  source 1..9: note = Seed: ARGVGKSAL (KRAS G12R)
IRGFGASAA

SEQ ID NO: 12838 - protein, 9 aa, synthetic construct
  source 1..9: note = Seed: ARGVGKSAL (KRAS G12R)
IRGFGASAR

SEQ ID NO: 12839 - protein, 9 aa, synthetic construct
  source 1..9: note = Seed: ARGVGKSAL (KRAS G12R)
IRGFGHSAF

SEQ ID NO: 12840 - protein, 9 aa, synthetic construct
  source 1..9: note = Seed: ARGVGKSAL (KRAS G12R)
IRGFGHSAI

SEQ ID NO: 12841 - protein, 9 aa, synthetic construct
  source 1..9: note = Seed: ARGVGKSAL (KRAS G12R)
IRGFGHSAK

SEQ ID NO: 12842 - protein, 9 aa, synthetic construct
  source 1..9: note = Seed: ARGVGKSAL (KRAS G12R)
IRGFGHSAL

SEQ ID NO: 12843 - protein, 9 aa, synthetic construct
  source 1..9: note = Seed: ARGVGKSAL (KRAS G12R)
IRGFGHSAM

SEQ ID NO: 12844 - protein, 9 aa, synthetic construct
  source 1..9: note = Seed: ARGVGKSAL (KRAS G12R)
IRGFGHSAR

SEQ ID NO: 12845 - protein, 9 aa, synthetic construct
  source 1..9: note = Seed: ARGVGKSAL (KRAS G12R)
IRGFGHSAV

SEQ ID NO: 12846 - protein, 9 aa, synthetic construct
  source 1..9: note = Seed: ARGVGKSAL (KRAS G12R)
IRGFGHSAY

SEQ ID NO: 12847 - protein, 9 aa, synthetic construct
  source 1..9: note = Seed: ARGVGKSAL (KRAS G12R)
IRGFGISAK

SEQ ID NO: 12848 - protein, 9 aa, synthetic construct
  source 1..9: note = Seed: ARGVGKSAL (KRAS G12R)
IRGFGISAR

SEQ ID NO: 12849 - protein, 9 aa, synthetic construct
  source 1..9: note = Seed: ARGVGKSAL (KRAS G12R)
IRGFGISAY

SEQ ID NO: 12850 - protein, 9 aa, synthetic construct
  source 1..9: note = Seed: ARGVGKSAL (KRAS G12R)
IRGFGKSAA

SEQ ID NO: 12851 - protein, 9 aa, synthetic construct
  source 1..9: note = Seed: ARGVGKSAL (KRAS G12R)
IRGFGKSAF

SEQ ID NO: 12852 - protein, 9 aa, synthetic construct
  source 1..9: note = Seed: ARGVGKSAL (KRAS G12R)
IRGFGKSAG

SEQ ID NO: 12853 - protein, 9 aa, synthetic construct
  source 1..9: note = Seed: ARGVGKSAL (KRAS G12R)
IRGFGKSAH

SEQ ID NO: 12854 - protein, 9 aa, synthetic construct
  source 1..9: note = Seed: ARGVGKSAL (KRAS G12R)
IRGFGKSAI

SEQ ID NO: 12855 - protein, 9 aa, synthetic construct
  source 1..9: note = Seed: ARGVGKSAL (KRAS G12R)
IRGFGKSAK

SEQ ID NO: 12856 - protein, 9 aa, synthetic construct
  source 1..9: note = Seed: ARGVGKSAL (KRAS G12R)
IRGFGKSAL

SEQ ID NO: 12857 - protein, 9 aa, synthetic construct
  source 1..9: note = Seed: ARGVGKSAL (KRAS G12R)
IRGFGKSAM

SEQ ID NO: 12858 - protein, 9 aa, synthetic construct
  source 1..9: note = Seed: ARGVGKSAL (KRAS G12R)
IRGFGKSAN

SEQ ID NO: 12859 - protein, 9 aa, synthetic construct
  source 1..9: note = Seed: ARGVGKSAL (KRAS G12R)
IRGFGKSAQ

SEQ ID NO: 12860 - protein, 9 aa, synthetic construct
  source 1..9: note = Seed: ARGVGKSAL (KRAS G12R)
IRGFGKSAR

SEQ ID NO: 12861 - protein, 9 aa, synthetic construct
  source 1..9: note = Seed: ARGVGKSAL (KRAS G12R)
IRGFGKSAS

SEQ ID NO: 12862 - protein, 9 aa, synthetic construct
  source 1..9: note = Seed: ARGVGKSAL (KRAS G12R)
IRGFGKSAT

SEQ ID NO: 12863 - protein, 9 aa, synthetic construct
  source 1..9: note = Seed: ARGVGKSAL (KRAS G12R)
IRGFGKSAV

SEQ ID NO: 12864 - protein, 9 aa, synthetic construct
  source 1..9: note = Seed: ARGVGKSAL (KRAS G12R)
IRGFGKSAW

SEQ ID NO: 12865 - protein, 9 aa, synthetic construct
  source 1..9: note = Seed: ARGVGKSAL (KRAS G12R)
IRGFGKSAY

SEQ ID NO: 12866 - protein, 9 aa, synthetic construct
  source 1..9: note = Seed: ARGVGKSAL (KRAS G12R)
IRGFGLSAK

SEQ ID NO: 12867 - protein, 9 aa, synthetic construct
  source 1..9: note = Seed: ARGVGKSAL (KRAS G12R)
IRGFGLSAR

SEQ ID NO: 12868 - protein, 9 aa, synthetic construct
  source 1..9: note = Seed: ARGVGKSAL (KRAS G12R)
IRGFGMSAK

SEQ ID NO: 12869 - protein, 9 aa, synthetic construct
  source 1..9: note = Seed: ARGVGKSAL (KRAS G12R)
IRGFGMSAR

SEQ ID NO: 12870 - protein, 9 aa, synthetic construct
  source 1..9: note = Seed: ARGVGKSAL (KRAS G12R)
IRGFGNSAR

SEQ ID NO: 12871 - protein, 9 aa, synthetic construct
  source 1..9: note = Seed: ARGVGKSAL (KRAS G12R)
IRGFGPSAR

SEQ ID NO: 12872 - protein, 9 aa, synthetic construct
  source 1..9: note = Seed: ARGVGKSAL (KRAS G12R)
IRGFGRSAA

SEQ ID NO: 12873 - protein, 9 aa, synthetic construct
  source 1..9: note = Seed: ARGVGKSAL (KRAS G12R)
IRGFGRSAE

SEQ ID NO: 12874 - protein, 9 aa, synthetic construct
  source 1..9: note = Seed: ARGVGKSAL (KRAS G12R)
IRGFGRSAF

SEQ ID NO: 12875 - protein, 9 aa, synthetic construct
  source 1..9: note = Seed: ARGVGKSAL (KRAS G12R)
IRGFGRSAG

SEQ ID NO: 12876 - protein, 9 aa, synthetic construct
  source 1..9: note = Seed: ARGVGKSAL (KRAS G12R)
IRGFGRSAH

SEQ ID NO: 12877 - protein, 9 aa, synthetic construct
  source 1..9: note = Seed: ARGVGKSAL (KRAS G12R)
IRGFGRSAI

SEQ ID NO: 12878 - protein, 9 aa, synthetic construct
  source 1..9: note = Seed: ARGVGKSAL (KRAS G12R)
IRGFGRSAK

SEQ ID NO: 12879 - protein, 9 aa, synthetic construct
  source 1..9: note = Seed: ARGVGKSAL (KRAS G12R)
IRGFGRSAL

SEQ ID NO: 12880 - protein, 9 aa, synthetic construct
  source 1..9: note = Seed: ARGVGKSAL (KRAS G12R)
IRGFGRSAM

SEQ ID NO: 12881 - protein, 9 aa, synthetic construct
  source 1..9: note = Seed: ARGVGKSAL (KRAS G12R)
IRGFGRSAN

SEQ ID NO: 12882 - protein, 9 aa, synthetic construct
  source 1..9: note = Seed: ARGVGKSAL (KRAS G12R)
IRGFGRSAP

SEQ ID NO: 12883 - protein, 9 aa, synthetic construct
  source 1..9: note = Seed: ARGVGKSAL (KRAS G12R)
IRGFGRSAQ

SEQ ID NO: 12884 - protein, 9 aa, synthetic construct
  source 1..9: note = Seed: ARGVGKSAL (KRAS G12R)
IRGFGRSAR

SEQ ID NO: 12885 - protein, 9 aa, synthetic construct
  source 1..9: note = Seed: ARGVGKSAL (KRAS G12R)
IRGFGRSAS

SEQ ID NO: 12886 - protein, 9 aa, synthetic construct
  source 1..9: note = Seed: ARGVGKSAL (KRAS G12R)
IRGFGRSAT

SEQ ID NO: 12887 - protein, 9 aa, synthetic construct
  source 1..9: note = Seed: ARGVGKSAL (KRAS G12R)
IRGFGRSAV

SEQ ID NO: 12888 - protein, 9 aa, synthetic construct
  source 1..9: note = Seed: ARGVGKSAL (KRAS G12R)
IRGFGRSAW

SEQ ID NO: 12889 - protein, 9 aa, synthetic construct
  source 1..9: note = Seed: ARGVGKSAL (KRAS G12R)
IRGFGRSAY

SEQ ID NO: 12890 - protein, 9 aa, synthetic construct
  source 1..9: note = Seed: ARGVGKSAL (KRAS G12R)
IRGFGSSAR

SEQ ID NO: 12891 - protein, 9 aa, synthetic construct
  source 1..9: note = Seed: ARGVGKSAL (KRAS G12R)
IRGFGTSAR

SEQ ID NO: 12892 - protein, 9 aa, synthetic construct
  source 1..9: note = Seed: ARGVGKSAL (KRAS G12R)
IRGFGVSAK

SEQ ID NO: 12893 - protein, 9 aa, synthetic construct
  source 1..9: note = Seed: ARGVGKSAL (KRAS G12R)
IRGFGVSAR

SEQ ID NO: 12894 - protein, 9 aa, synthetic construct
  source 1..9: note = Seed: ARGVGKSAL (KRAS G12R)
IRGFGVSAY

SEQ ID NO: 12895 - protein, 9 aa, synthetic construct
  source 1..9: note = Seed: ARGVGKSAL (KRAS G12R)
IRGFGYSAR

SEQ ID NO: 12896 - protein, 9 aa, synthetic construct
  source 1..9: note = Seed: ARGVGKSAL (KRAS G12R)
IRGGGASAA

SEQ ID NO: 12897 - protein, 9 aa, synthetic construct
  source 1..9: note = Seed: ARGVGKSAL (KRAS G12R)
IRGGGASAS

SEQ ID NO: 12898 - protein, 9 aa, synthetic construct
  source 1..9: note = Seed: ARGVGKSAL (KRAS G12R)
IRGGGASAV

SEQ ID NO: 12899 - protein, 9 aa, synthetic construct
  source 1..9: note = Seed: ARGVGKSAL (KRAS G12R)
IRGGGISAA

SEQ ID NO: 12900 - protein, 9 aa, synthetic construct
  source 1..9: note = Seed: ARGVGKSAL (KRAS G12R)
IRGGGISAG

SEQ ID NO: 12901 - protein, 9 aa, synthetic construct
  source 1..9: note = Seed: ARGVGKSAL (KRAS G12R)
IRGGGISAI

SEQ ID NO: 12902 - protein, 9 aa, synthetic construct
  source 1..9: note = Seed: ARGVGKSAL (KRAS G12R)
IRGGGISAM

SEQ ID NO: 12903 - protein, 9 aa, synthetic construct
  source 1..9: note = Seed: ARGVGKSAL (KRAS G12R)
IRGGGISAS

SEQ ID NO: 12904 - protein, 9 aa, synthetic construct
  source 1..9: note = Seed: ARGVGKSAL (KRAS G12R)
IRGGGISAT

SEQ ID NO: 12905 - protein, 9 aa, synthetic construct
  source 1..9: note = Seed: ARGVGKSAL (KRAS G12R)
IRGGGISAV

SEQ ID NO: 12906 - protein, 9 aa, synthetic construct
  source 1..9: note = Seed: ARGVGKSAL (KRAS G12R)
IRGGGLSAA

SEQ ID NO: 12907 - protein, 9 aa, synthetic construct
  source 1..9: note = Seed: ARGVGKSAL (KRAS G12R)
IRGGGLSAS

SEQ ID NO: 12908 - protein, 9 aa, synthetic construct
  source 1..9: note = Seed: ARGVGKSAL (KRAS G12R)
IRGGGMSAA

SEQ ID NO: 12909 - protein, 9 aa, synthetic construct
  source 1..9: note = Seed: ARGVGKSAL (KRAS G12R)
IRGGGMSAS

SEQ ID NO: 12910 - protein, 9 aa, synthetic construct
  source 1..9: note = Seed: ARGVGKSAL (KRAS G12R)
IRGGGNSAA

SEQ ID NO: 12911 - protein, 9 aa, synthetic construct
  source 1..9: note = Seed: ARGVGKSAL (KRAS G12R)
IRGGGSSAA

SEQ ID NO: 12912 - protein, 9 aa, synthetic construct
  source 1..9: note = Seed: ARGVGKSAL (KRAS G12R)
IRGGGTSAA

SEQ ID NO: 12913 - protein, 9 aa, synthetic construct
  source 1..9: note = Seed: ARGVGKSAL (KRAS G12R)
IRGGGVSAA

SEQ ID NO: 12914 - protein, 9 aa, synthetic construct
  source 1..9: note = Seed: ARGVGKSAL (KRAS G12R)
IRGGGVSAG

SEQ ID NO: 12915 - protein, 9 aa, synthetic construct
  source 1..9: note = Seed: ARGVGKSAL (KRAS G12R)
IRGGGVSAS

SEQ ID NO: 12916 - protein, 9 aa, synthetic construct
  source 1..9: note = Seed: ARGVGKSAL (KRAS G12R)
IRGGGVSAV

SEQ ID NO: 12917 - protein, 9 aa, synthetic construct
  source 1..9: note = Seed: ARGVGKSAL (KRAS G12R)
IRGHGASAA

SEQ ID NO: 12918 - protein, 9 aa, synthetic construct
  source 1..9: note = Seed: ARGVGKSAL (KRAS G12R)
IRGHGASAR

SEQ ID NO: 12919 - protein, 9 aa, synthetic construct
  source 1..9: note = Seed: ARGVGKSAL (KRAS G12R)
IRGHGASAY

SEQ ID NO: 12920 - protein, 9 aa, synthetic construct
  source 1..9: note = Seed: ARGVGKSAL (KRAS G12R)
IRGHGHSAR

SEQ ID NO: 12921 - protein, 9 aa, synthetic construct
  source 1..9: note = Seed: ARGVGKSAL (KRAS G12R)
IRGHGISAA

SEQ ID NO: 12922 - protein, 9 aa, synthetic construct
  source 1..9: note = Seed: ARGVGKSAL (KRAS G12R)
IRGHGISAK

SEQ ID NO: 12923 - protein, 9 aa, synthetic construct
  source 1..9: note = Seed: ARGVGKSAL (KRAS G12R)
IRGHGISAR

SEQ ID NO: 12924 - protein, 9 aa, synthetic construct
  source 1..9: note = Seed: ARGVGKSAL (KRAS G12R)
IRGHGISAS

SEQ ID NO: 12925 - protein, 9 aa, synthetic construct
  source 1..9: note = Seed: ARGVGKSAL (KRAS G12R)
IRGHGISAY

SEQ ID NO: 12926 - protein, 9 aa, synthetic construct
  source 1..9: note = Seed: ARGVGKSAL (KRAS G12R)
IRGHGKSAA

SEQ ID NO: 12927 - protein, 9 aa, synthetic construct
  source 1..9: note = Seed: ARGVGKSAL (KRAS G12R)
IRGHGKSAF

SEQ ID NO: 12928 - protein, 9 aa, synthetic construct
  source 1..9: note = Seed: ARGVGKSAL (KRAS G12R)
IRGHGKSAI

SEQ ID NO: 12929 - protein, 9 aa, synthetic construct
  source 1..9: note = Seed: ARGVGKSAL (KRAS G12R)
IRGHGKSAK

SEQ ID NO: 12930 - protein, 9 aa, synthetic construct
  source 1..9: note = Seed: ARGVGKSAL (KRAS G12R)
IRGHGKSAL

SEQ ID NO: 12931 - protein, 9 aa, synthetic construct
  source 1..9: note = Seed: ARGVGKSAL (KRAS G12R)
IRGHGKSAM

SEQ ID NO: 12932 - protein, 9 aa, synthetic construct
  source 1..9: note = Seed: ARGVGKSAL (KRAS G12R)
IRGHGKSAR

SEQ ID NO: 12933 - protein, 9 aa, synthetic construct
  source 1..9: note = Seed: ARGVGKSAL (KRAS G12R)
IRGHGKSAV

SEQ ID NO: 12934 - protein, 9 aa, synthetic construct
  source 1..9: note = Seed: ARGVGKSAL (KRAS G12R)
IRGHGKSAW

SEQ ID NO: 12935 - protein, 9 aa, synthetic construct
  source 1..9: note = Seed: ARGVGKSAL (KRAS G12R)
IRGHGKSAY

SEQ ID NO: 12936 - protein, 9 aa, synthetic construct
  source 1..9: note = Seed: ARGVGKSAL (KRAS G12R)
IRGHGLSAK

SEQ ID NO: 12937 - protein, 9 aa, synthetic construct
  source 1..9: note = Seed: ARGVGKSAL (KRAS G12R)
IRGHGLSAR

SEQ ID NO: 12938 - protein, 9 aa, synthetic construct
  source 1..9: note = Seed: ARGVGKSAL (KRAS G12R)
IRGHGLSAY

SEQ ID NO: 12939 - protein, 9 aa, synthetic construct
  source 1..9: note = Seed: ARGVGKSAL (KRAS G12R)
IRGHGMSAA

SEQ ID NO: 12940 - protein, 9 aa, synthetic construct
  source 1..9: note = Seed: ARGVGKSAL (KRAS G12R)
IRGHGMSAR

SEQ ID NO: 12941 - protein, 9 aa, synthetic construct
  source 1..9: note = Seed: ARGVGKSAL (KRAS G12R)
IRGHGNSAR

SEQ ID NO: 12942 - protein, 9 aa, synthetic construct
  source 1..9: note = Seed: ARGVGKSAL (KRAS G12R)
IRGHGRSAA

SEQ ID NO: 12943 - protein, 9 aa, synthetic construct
  source 1..9: note = Seed: ARGVGKSAL (KRAS G12R)
IRGHGRSAF

SEQ ID NO: 12944 - protein, 9 aa, synthetic construct
  source 1..9: note = Seed: ARGVGKSAL (KRAS G12R)
IRGHGRSAH

SEQ ID NO: 12945 - protein, 9 aa, synthetic construct
  source 1..9: note = Seed: ARGVGKSAL (KRAS G12R)
IRGHGRSAI

SEQ ID NO: 12946 - protein, 9 aa, synthetic construct
  source 1..9: note = Seed: ARGVGKSAL (KRAS G12R)
IRGHGRSAK

SEQ ID NO: 12947 - protein, 9 aa, synthetic construct
  source 1..9: note = Seed: ARGVGKSAL (KRAS G12R)
IRGHGRSAL

SEQ ID NO: 12948 - protein, 9 aa, synthetic construct
  source 1..9: note = Seed: ARGVGKSAL (KRAS G12R)
IRGHGRSAM

SEQ ID NO: 12949 - protein, 9 aa, synthetic construct
  source 1..9: note = Seed: ARGVGKSAL (KRAS G12R)
IRGHGRSAQ

SEQ ID NO: 12950 - protein, 9 aa, synthetic construct
  source 1..9: note = Seed: ARGVGKSAL (KRAS G12R)
IRGHGRSAR

SEQ ID NO: 12951 - protein, 9 aa, synthetic construct
  source 1..9: note = Seed: ARGVGKSAL (KRAS G12R)
IRGHGRSAS

SEQ ID NO: 12952 - protein, 9 aa, synthetic construct
  source 1..9: note = Seed: ARGVGKSAL (KRAS G12R)
IRGHGRSAT

SEQ ID NO: 12953 - protein, 9 aa, synthetic construct
  source 1..9: note = Seed: ARGVGKSAL (KRAS G12R)
IRGHGRSAV

SEQ ID NO: 12954 - protein, 9 aa, synthetic construct
  source 1..9: note = Seed: ARGVGKSAL (KRAS G12R)
IRGHGRSAW

SEQ ID NO: 12955 - protein, 9 aa, synthetic construct
  source 1..9: note = Seed: ARGVGKSAL (KRAS G12R)
IRGHGRSAY

SEQ ID NO: 12956 - protein, 9 aa, synthetic construct
  source 1..9: note = Seed: ARGVGKSAL (KRAS G12R)
IRGHGSSAR

SEQ ID NO: 12957 - protein, 9 aa, synthetic construct
  source 1..9: note = Seed: ARGVGKSAL (KRAS G12R)
IRGHGSSAY

SEQ ID NO: 12958 - protein, 9 aa, synthetic construct
  source 1..9: note = Seed: ARGVGKSAL (KRAS G12R)
IRGHGTSAR

SEQ ID NO: 12959 - protein, 9 aa, synthetic construct
  source 1..9: note = Seed: ARGVGKSAL (KRAS G12R)
IRGHGVSAA

SEQ ID NO: 12960 - protein, 9 aa, synthetic construct
  source 1..9: note = Seed: ARGVGKSAL (KRAS G12R)
IRGHGVSAK

SEQ ID NO: 12961 - protein, 9 aa, synthetic construct
  source 1..9: note = Seed: ARGVGKSAL (KRAS G12R)
IRGHGVSAR

SEQ ID NO: 12962 - protein, 9 aa, synthetic construct
  source 1..9: note = Seed: ARGVGKSAL (KRAS G12R)
IRGHGVSAS

SEQ ID NO: 12963 - protein, 9 aa, synthetic construct
  source 1..9: note = Seed: ARGVGKSAL (KRAS G12R)
IRGHGVSAY

SEQ ID NO: 12964 - protein, 9 aa, synthetic construct
  source 1..9: note = Seed: ARGVGKSAL (KRAS G12R)
IRGIGASAA

SEQ ID NO: 12965 - protein, 9 aa, synthetic construct
  source 1..9: note = Seed: ARGVGKSAL (KRAS G12R)
IRGIGASAR

SEQ ID NO: 12966 - protein, 9 aa, synthetic construct
  source 1..9: note = Seed: ARGVGKSAL (KRAS G12R)
IRGIGHSAR

SEQ ID NO: 12967 - protein, 9 aa, synthetic construct
  source 1..9: note = Seed: ARGVGKSAL (KRAS G12R)
IRGIGHSAY

SEQ ID NO: 12968 - protein, 9 aa, synthetic construct
  source 1..9: note = Seed: ARGVGKSAL (KRAS G12R)
IRGIGISAA

SEQ ID NO: 12969 - protein, 9 aa, synthetic construct
  source 1..9: note = Seed: ARGVGKSAL (KRAS G12R)
IRGIGISAR

SEQ ID NO: 12970 - protein, 9 aa, synthetic construct
  source 1..9: note = Seed: ARGVGKSAL (KRAS G12R)
IRGIGISAS

SEQ ID NO: 12971 - protein, 9 aa, synthetic construct
  source 1..9: note = Seed: ARGVGKSAL (KRAS G12R)
IRGIGKSAA

SEQ ID NO: 12972 - protein, 9 aa, synthetic construct
  source 1..9: note = Seed: ARGVGKSAL (KRAS G12R)
IRGIGKSAF

SEQ ID NO: 12973 - protein, 9 aa, synthetic construct
  source 1..9: note = Seed: ARGVGKSAL (KRAS G12R)
IRGIGKSAG

SEQ ID NO: 12974 - protein, 9 aa, synthetic construct
  source 1..9: note = Seed: ARGVGKSAL (KRAS G12R)
IRGIGKSAH

SEQ ID NO: 12975 - protein, 9 aa, synthetic construct
  source 1..9: note = Seed: ARGVGKSAL (KRAS G12R)
IRGIGKSAI

SEQ ID NO: 12976 - protein, 9 aa, synthetic construct
  source 1..9: note = Seed: ARGVGKSAL (KRAS G12R)
IRGIGKSAK

SEQ ID NO: 12977 - protein, 9 aa, synthetic construct
  source 1..9: note = Seed: ARGVGKSAL (KRAS G12R)
IRGIGKSAL

SEQ ID NO: 12978 - protein, 9 aa, synthetic construct
  source 1..9: note = Seed: ARGVGKSAL (KRAS G12R)
IRGIGKSAM

SEQ ID NO: 12979 - protein, 9 aa, synthetic construct
  source 1..9: note = Seed: ARGVGKSAL (KRAS G12R)
IRGIGKSAN

SEQ ID NO: 12980 - protein, 9 aa, synthetic construct
  source 1..9: note = Seed: ARGVGKSAL (KRAS G12R)
IRGIGKSAQ

SEQ ID NO: 12981 - protein, 9 aa, synthetic construct
  source 1..9: note = Seed: ARGVGKSAL (KRAS G12R)
IRGIGKSAR

SEQ ID NO: 12982 - protein, 9 aa, synthetic construct
  source 1..9: note = Seed: ARGVGKSAL (KRAS G12R)
IRGIGKSAS

SEQ ID NO: 12983 - protein, 9 aa, synthetic construct
  source 1..9: note = Seed: ARGVGKSAL (KRAS G12R)
IRGIGKSAT

SEQ ID NO: 12984 - protein, 9 aa, synthetic construct
  source 1..9: note = Seed: ARGVGKSAL (KRAS G12R)
IRGIGKSAV

SEQ ID NO: 12985 - protein, 9 aa, synthetic construct
  source 1..9: note = Seed: ARGVGKSAL (KRAS G12R)
IRGIGKSAW

SEQ ID NO: 12986 - protein, 9 aa, synthetic construct
  source 1..9: note = Seed: ARGVGKSAL (KRAS G12R)
IRGIGKSAY

SEQ ID NO: 12987 - protein, 9 aa, synthetic construct
  source 1..9: note = Seed: ARGVGKSAL (KRAS G12R)
IRGIGLSAA

SEQ ID NO: 12988 - protein, 9 aa, synthetic construct
  source 1..9: note = Seed: ARGVGKSAL (KRAS G12R)
IRGIGLSAR

SEQ ID NO: 12989 - protein, 9 aa, synthetic construct
  source 1..9: note = Seed: ARGVGKSAL (KRAS G12R)
IRGIGMSAA

SEQ ID NO: 12990 - protein, 9 aa, synthetic construct
  source 1..9: note = Seed: ARGVGKSAL (KRAS G12R)
IRGIGMSAR

SEQ ID NO: 12991 - protein, 9 aa, synthetic construct
  source 1..9: note = Seed: ARGVGKSAL (KRAS G12R)
IRGIGRSAA

SEQ ID NO: 12992 - protein, 9 aa, synthetic construct
  source 1..9: note = Seed: ARGVGKSAL (KRAS G12R)
IRGIGRSAC

SEQ ID NO: 12993 - protein, 9 aa, synthetic construct
  source 1..9: note = Seed: ARGVGKSAL (KRAS G12R)
IRGIGRSAF

SEQ ID NO: 12994 - protein, 9 aa, synthetic construct
  source 1..9: note = Seed: ARGVGKSAL (KRAS G12R)
IRGIGRSAG

SEQ ID NO: 12995 - protein, 9 aa, synthetic construct
  source 1..9: note = Seed: ARGVGKSAL (KRAS G12R)
IRGIGRSAH

SEQ ID NO: 12996 - protein, 9 aa, synthetic construct
  source 1..9: note = Seed: ARGVGKSAL (KRAS G12R)
IRGIGRSAI

SEQ ID NO: 12997 - protein, 9 aa, synthetic construct
  source 1..9: note = Seed: ARGVGKSAL (KRAS G12R)
IRGIGRSAK

SEQ ID NO: 12998 - protein, 9 aa, synthetic construct
  source 1..9: note = Seed: ARGVGKSAL (KRAS G12R)
IRGIGRSAL

SEQ ID NO: 12999 - protein, 9 aa, synthetic construct
  source 1..9: note = Seed: ARGVGKSAL (KRAS G12R)
IRGIGRSAM

SEQ ID NO: 13000 - protein, 9 aa, synthetic construct
  source 1..9: note = Seed: ARGVGKSAL (KRAS G12R)
IRGIGRSAN

SEQ ID NO: 13001 - protein, 9 aa, synthetic construct
  source 1..9: note = Seed: ARGVGKSAL (KRAS G12R)
IRGIGRSAP

SEQ ID NO: 13002 - protein, 9 aa, synthetic construct
  source 1..9: note = Seed: ARGVGKSAL (KRAS G12R)
IRGIGRSAQ

SEQ ID NO: 13003 - protein, 9 aa, synthetic construct
  source 1..9: note = Seed: ARGVGKSAL (KRAS G12R)
IRGIGRSAR

SEQ ID NO: 13004 - protein, 9 aa, synthetic construct
  source 1..9: note = Seed: ARGVGKSAL (KRAS G12R)
IRGIGRSAS

SEQ ID NO: 13005 - protein, 9 aa, synthetic construct
  source 1..9: note = Seed: ARGVGKSAL (KRAS G12R)
IRGIGRSAT

SEQ ID NO: 13006 - protein, 9 aa, synthetic construct
  source 1..9: note = Seed: ARGVGKSAL (KRAS G12R)
IRGIGRSAV

SEQ ID NO: 13007 - protein, 9 aa, synthetic construct
  source 1..9: note = Seed: ARGVGKSAL (KRAS G12R)
IRGIGRSAW

SEQ ID NO: 13008 - protein, 9 aa, synthetic construct
  source 1..9: note = Seed: ARGVGKSAL (KRAS G12R)
IRGIGRSAY

SEQ ID NO: 13009 - protein, 9 aa, synthetic construct
  source 1..9: note = Seed: ARGVGKSAL (KRAS G12R)
IRGIGSSAR

SEQ ID NO: 13010 - protein, 9 aa, synthetic construct
  source 1..9: note = Seed: ARGVGKSAL (KRAS G12R)
IRGIGTSAR

SEQ ID NO: 13011 - protein, 9 aa, synthetic construct
  source 1..9: note = Seed: ARGVGKSAL (KRAS G12R)
IRGIGVSAA

SEQ ID NO: 13012 - protein, 9 aa, synthetic construct
  source 1..9: note = Seed: ARGVGKSAL (KRAS G12R)
IRGIGVSAR

SEQ ID NO: 13013 - protein, 9 aa, synthetic construct
  source 1..9: note = Seed: ARGVGKSAL (KRAS G12R)
IRGIGVSAS

SEQ ID NO: 13014 - protein, 9 aa, synthetic construct
  source 1..9: note = Seed: ARGVGKSAL (KRAS G12R)
IRGKGKSAK

SEQ ID NO: 13015 - protein, 9 aa, synthetic construct
  source 1..9: note = Seed: ARGVGKSAL (KRAS G12R)
IRGKGKSAL

SEQ ID NO: 13016 - protein, 9 aa, synthetic construct
  source 1..9: note = Seed: ARGVGKSAL (KRAS G12R)
IRGKGKSAR

SEQ ID NO: 13017 - protein, 9 aa, synthetic construct
  source 1..9: note = Seed: ARGVGKSAL (KRAS G12R)
IRGKGRSAA

SEQ ID NO: 13018 - protein, 9 aa, synthetic construct
  source 1..9: note = Seed: ARGVGKSAL (KRAS G12R)
IRGKGRSAF

SEQ ID NO: 13019 - protein, 9 aa, synthetic construct
  source 1..9: note = Seed: ARGVGKSAL (KRAS G12R)
IRGKGRSAH

SEQ ID NO: 13020 - protein, 9 aa, synthetic construct
  source 1..9: note = Seed: ARGVGKSAL (KRAS G12R)
IRGKGRSAI

SEQ ID NO: 13021 - protein, 9 aa, synthetic construct
  source 1..9: note = Seed: ARGVGKSAL (KRAS G12R)
IRGKGRSAK

SEQ ID NO: 13022 - protein, 9 aa, synthetic construct
  source 1..9: note = Seed: ARGVGKSAL (KRAS G12R)
IRGKGRSAL

SEQ ID NO: 13023 - protein, 9 aa, synthetic construct
  source 1..9: note = Seed: ARGVGKSAL (KRAS G12R)
IRGKGRSAM

SEQ ID NO: 13024 - protein, 9 aa, synthetic construct
  source 1..9: note = Seed: ARGVGKSAL (KRAS G12R)
IRGKGRSAQ

SEQ ID NO: 13025 - protein, 9 aa, synthetic construct
  source 1..9: note = Seed: ARGVGKSAL (KRAS G12R)
IRGKGRSAR

SEQ ID NO: 13026 - protein, 9 aa, synthetic construct
  source 1..9: note = Seed: ARGVGKSAL (KRAS G12R)
IRGKGRSAS

SEQ ID NO: 13027 - protein, 9 aa, synthetic construct
  source 1..9: note = Seed: ARGVGKSAL (KRAS G12R)
IRGKGRSAT

SEQ ID NO: 13028 - protein, 9 aa, synthetic construct
  source 1..9: note = Seed: ARGVGKSAL (KRAS G12R)
IRGKGRSAV

SEQ ID NO: 13029 - protein, 9 aa, synthetic construct
  source 1..9: note = Seed: ARGVGKSAL (KRAS G12R)
IRGKGRSAW

SEQ ID NO: 13030 - protein, 9 aa, synthetic construct
  source 1..9: note = Seed: ARGVGKSAL (KRAS G12R)
IRGKGRSAY

SEQ ID NO: 13031 - protein, 9 aa, synthetic construct
  source 1..9: note = Seed: ARGVGKSAL (KRAS G12R)
IRGLGASAR

SEQ ID NO: 13032 - protein, 9 aa, synthetic construct
  source 1..9: note = Seed: ARGVGKSAL (KRAS G12R)
IRGLGHSAA

SEQ ID NO: 13033 - protein, 9 aa, synthetic construct
  source 1..9: note = Seed: ARGVGKSAL (KRAS G12R)
IRGLGHSAK

SEQ ID NO: 13034 - protein, 9 aa, synthetic construct
  source 1..9: note = Seed: ARGVGKSAL (KRAS G12R)
IRGLGHSAR

SEQ ID NO: 13035 - protein, 9 aa, synthetic construct
  source 1..9: note = Seed: ARGVGKSAL (KRAS G12R)
IRGLGHSAS

SEQ ID NO: 13036 - protein, 9 aa, synthetic construct
  source 1..9: note = Seed: ARGVGKSAL (KRAS G12R)
IRGLGISAA

SEQ ID NO: 13037 - protein, 9 aa, synthetic construct
  source 1..9: note = Seed: ARGVGKSAL (KRAS G12R)
IRGLGISAR

SEQ ID NO: 13038 - protein, 9 aa, synthetic construct
  source 1..9: note = Seed: ARGVGKSAL (KRAS G12R)
IRGLGKSAA

SEQ ID NO: 13039 - protein, 9 aa, synthetic construct
  source 1..9: note = Seed: ARGVGKSAL (KRAS G12R)
IRGLGKSAC

SEQ ID NO: 13040 - protein, 9 aa, synthetic construct
  source 1..9: note = Seed: ARGVGKSAL (KRAS G12R)
IRGLGKSAF

SEQ ID NO: 13041 - protein, 9 aa, synthetic construct
  source 1..9: note = Seed: ARGVGKSAL (KRAS G12R)
IRGLGKSAG

SEQ ID NO: 13042 - protein, 9 aa, synthetic construct
  source 1..9: note = Seed: ARGVGKSAL (KRAS G12R)
IRGLGKSAH

SEQ ID NO: 13043 - protein, 9 aa, synthetic construct
  source 1..9: note = Seed: ARGVGKSAL (KRAS G12R)
IRGLGKSAI

SEQ ID NO: 13044 - protein, 9 aa, synthetic construct
  source 1..9: note = Seed: ARGVGKSAL (KRAS G12R)
IRGLGKSAK

SEQ ID NO: 13045 - protein, 9 aa, synthetic construct
  source 1..9: note = Seed: ARGVGKSAL (KRAS G12R)
IRGLGKSAL

SEQ ID NO: 13046 - protein, 9 aa, synthetic construct
  source 1..9: note = Seed: ARGVGKSAL (KRAS G12R)
IRGLGKSAM

SEQ ID NO: 13047 - protein, 9 aa, synthetic construct
  source 1..9: note = Seed: ARGVGKSAL (KRAS G12R)
IRGLGKSAN

SEQ ID NO: 13048 - protein, 9 aa, synthetic construct
  source 1..9: note = Seed: ARGVGKSAL (KRAS G12R)
IRGLGKSAP

SEQ ID NO: 13049 - protein, 9 aa, synthetic construct
  source 1..9: note = Seed: ARGVGKSAL (KRAS G12R)
IRGLGKSAQ

SEQ ID NO: 13050 - protein, 9 aa, synthetic construct
  source 1..9: note = Seed: ARGVGKSAL (KRAS G12R)
IRGLGKSAR

SEQ ID NO: 13051 - protein, 9 aa, synthetic construct
  source 1..9: note = Seed: ARGVGKSAL (KRAS G12R)
IRGLGKSAS

SEQ ID NO: 13052 - protein, 9 aa, synthetic construct
  source 1..9: note = Seed: ARGVGKSAL (KRAS G12R)
IRGLGKSAT

SEQ ID NO: 13053 - protein, 9 aa, synthetic construct
  source 1..9: note = Seed: ARGVGKSAL (KRAS G12R)
IRGLGKSAV

SEQ ID NO: 13054 - protein, 9 aa, synthetic construct
  source 1..9: note = Seed: ARGVGKSAL (KRAS G12R)
IRGLGKSAW

SEQ ID NO: 13055 - protein, 9 aa, synthetic construct
  source 1..9: note = Seed: ARGVGKSAL (KRAS G12R)
IRGLGKSAY

SEQ ID NO: 13056 - protein, 9 aa, synthetic construct
  source 1..9: note = Seed: ARGVGKSAL (KRAS G12R)
IRGLGLSAR

SEQ ID NO: 13057 - protein, 9 aa, synthetic construct
  source 1..9: note = Seed: ARGVGKSAL (KRAS G12R)
IRGLGMSAR

SEQ ID NO: 13058 - protein, 9 aa, synthetic construct
  source 1..9: note = Seed: ARGVGKSAL (KRAS G12R)
IRGLGRSAA

SEQ ID NO: 13059 - protein, 9 aa, synthetic construct
  source 1..9: note = Seed: ARGVGKSAL (KRAS G12R)
IRGLGRSAC

SEQ ID NO: 13060 - protein, 9 aa, synthetic construct
  source 1..9: note = Seed: ARGVGKSAL (KRAS G12R)
IRGLGRSAE

SEQ ID NO: 13061 - protein, 9 aa, synthetic construct
  source 1..9: note = Seed: ARGVGKSAL (KRAS G12R)
IRGLGRSAF

SEQ ID NO: 13062 - protein, 9 aa, synthetic construct
  source 1..9: note = Seed: ARGVGKSAL (KRAS G12R)
IRGLGRSAG

SEQ ID NO: 13063 - protein, 9 aa, synthetic construct
  source 1..9: note = Seed: ARGVGKSAL (KRAS G12R)
IRGLGRSAH

SEQ ID NO: 13064 - protein, 9 aa, synthetic construct
  source 1..9: note = Seed: ARGVGKSAL (KRAS G12R)
IRGLGRSAI

SEQ ID NO: 13065 - protein, 9 aa, synthetic construct
  source 1..9: note = Seed: ARGVGKSAL (KRAS G12R)
IRGLGRSAK

SEQ ID NO: 13066 - protein, 9 aa, synthetic construct
  source 1..9: note = Seed: ARGVGKSAL (KRAS G12R)
IRGLGRSAL

SEQ ID NO: 13067 - protein, 9 aa, synthetic construct
  source 1..9: note = Seed: ARGVGKSAL (KRAS G12R)
IRGLGRSAM

SEQ ID NO: 13068 - protein, 9 aa, synthetic construct
  source 1..9: note = Seed: ARGVGKSAL (KRAS G12R)
IRGLGRSAN

SEQ ID NO: 13069 - protein, 9 aa, synthetic construct
  source 1..9: note = Seed: ARGVGKSAL (KRAS G12R)
IRGLGRSAP

SEQ ID NO: 13070 - protein, 9 aa, synthetic construct
  source 1..9: note = Seed: ARGVGKSAL (KRAS G12R)
IRGLGRSAQ

SEQ ID NO: 13071 - protein, 9 aa, synthetic construct
  source 1..9: note = Seed: ARGVGKSAL (KRAS G12R)
IRGLGRSAR

SEQ ID NO: 13072 - protein, 9 aa, synthetic construct
  source 1..9: note = Seed: ARGVGKSAL (KRAS G12R)
IRGLGRSAS

SEQ ID NO: 13073 - protein, 9 aa, synthetic construct
  source 1..9: note = Seed: ARGVGKSAL (KRAS G12R)
IRGLGRSAT

SEQ ID NO: 13074 - protein, 9 aa, synthetic construct
  source 1..9: note = Seed: ARGVGKSAL (KRAS G12R)
IRGLGRSAV

SEQ ID NO: 13075 - protein, 9 aa, synthetic construct
  source 1..9: note = Seed: ARGVGKSAL (KRAS G12R)
IRGLGRSAW

SEQ ID NO: 13076 - protein, 9 aa, synthetic construct
  source 1..9: note = Seed: ARGVGKSAL (KRAS G12R)
IRGLGRSAY

SEQ ID NO: 13077 - protein, 9 aa, synthetic construct
  source 1..9: note = Seed: ARGVGKSAL (KRAS G12R)
IRGLGSSAR

SEQ ID NO: 13078 - protein, 9 aa, synthetic construct
  source 1..9: note = Seed: ARGVGKSAL (KRAS G12R)
IRGLGTSAR

SEQ ID NO: 13079 - protein, 9 aa, synthetic construct
  source 1..9: note = Seed: ARGVGKSAL (KRAS G12R)
IRGLGVSAR

SEQ ID NO: 13080 - protein, 9 aa, synthetic construct
  source 1..9: note = Seed: ARGVGKSAL (KRAS G12R)
IRGLGYSAR

SEQ ID NO: 13081 - protein, 9 aa, synthetic construct
  source 1..9: note = Seed: ARGVGKSAL (KRAS G12R)
IRGMGASAA

SEQ ID NO: 13082 - protein, 9 aa, synthetic construct
  source 1..9: note = Seed: ARGVGKSAL (KRAS G12R)
IRGMGASAR

SEQ ID NO: 13083 - protein, 9 aa, synthetic construct
  source 1..9: note = Seed: ARGVGKSAL (KRAS G12R)
IRGMGHSAR

SEQ ID NO: 13084 - protein, 9 aa, synthetic construct
  source 1..9: note = Seed: ARGVGKSAL (KRAS G12R)
IRGMGISAA

SEQ ID NO: 13085 - protein, 9 aa, synthetic construct
  source 1..9: note = Seed: ARGVGKSAL (KRAS G12R)
IRGMGISAR

SEQ ID NO: 13086 - protein, 9 aa, synthetic construct
  source 1..9: note = Seed: ARGVGKSAL (KRAS G12R)
IRGMGISAS

SEQ ID NO: 13087 - protein, 9 aa, synthetic construct
  source 1..9: note = Seed: ARGVGKSAL (KRAS G12R)
IRGMGKSAA

SEQ ID NO: 13088 - protein, 9 aa, synthetic construct
  source 1..9: note = Seed: ARGVGKSAL (KRAS G12R)
IRGMGKSAF

SEQ ID NO: 13089 - protein, 9 aa, synthetic construct
  source 1..9: note = Seed: ARGVGKSAL (KRAS G12R)
IRGMGKSAG

SEQ ID NO: 13090 - protein, 9 aa, synthetic construct
  source 1..9: note = Seed: ARGVGKSAL (KRAS G12R)
IRGMGKSAH

SEQ ID NO: 13091 - protein, 9 aa, synthetic construct
  source 1..9: note = Seed: ARGVGKSAL (KRAS G12R)
IRGMGKSAI

SEQ ID NO: 13092 - protein, 9 aa, synthetic construct
  source 1..9: note = Seed: ARGVGKSAL (KRAS G12R)
IRGMGKSAK

SEQ ID NO: 13093 - protein, 9 aa, synthetic construct
  source 1..9: note = Seed: ARGVGKSAL (KRAS G12R)
IRGMGKSAL

SEQ ID NO: 13094 - protein, 9 aa, synthetic construct
  source 1..9: note = Seed: ARGVGKSAL (KRAS G12R)
IRGMGKSAM

SEQ ID NO: 13095 - protein, 9 aa, synthetic construct
  source 1..9: note = Seed: ARGVGKSAL (KRAS G12R)
IRGMGKSAN

SEQ ID NO: 13096 - protein, 9 aa, synthetic construct
  source 1..9: note = Seed: ARGVGKSAL (KRAS G12R)
IRGMGKSAP

SEQ ID NO: 13097 - protein, 9 aa, synthetic construct
  source 1..9: note = Seed: ARGVGKSAL (KRAS G12R)
IRGMGKSAQ

SEQ ID NO: 13098 - protein, 9 aa, synthetic construct
  source 1..9: note = Seed: ARGVGKSAL (KRAS G12R)
IRGMGKSAR

SEQ ID NO: 13099 - protein, 9 aa, synthetic construct
  source 1..9: note = Seed: ARGVGKSAL (KRAS G12R)
IRGMGKSAS

SEQ ID NO: 13100 - protein, 9 aa, synthetic construct
  source 1..9: note = Seed: ARGVGKSAL (KRAS G12R)
IRGMGKSAT

SEQ ID NO: 13101 - protein, 9 aa, synthetic construct
  source 1..9: note = Seed: ARGVGKSAL (KRAS G12R)
IRGMGKSAV

SEQ ID NO: 13102 - protein, 9 aa, synthetic construct
  source 1..9: note = Seed: ARGVGKSAL (KRAS G12R)
IRGMGKSAW

SEQ ID NO: 13103 - protein, 9 aa, synthetic construct
  source 1..9: note = Seed: ARGVGKSAL (KRAS G12R)
IRGMGKSAY

SEQ ID NO: 13104 - protein, 9 aa, synthetic construct
  source 1..9: note = Seed: ARGVGKSAL (KRAS G12R)
IRGMGLSAR

SEQ ID NO: 13105 - protein, 9 aa, synthetic construct
  source 1..9: note = Seed: ARGVGKSAL (KRAS G12R)
IRGMGMSAA

SEQ ID NO: 13106 - protein, 9 aa, synthetic construct
  source 1..9: note = Seed: ARGVGKSAL (KRAS G12R)
IRGMGRSAA

SEQ ID NO: 13107 - protein, 9 aa, synthetic construct
  source 1..9: note = Seed: ARGVGKSAL (KRAS G12R)
IRGMGRSAC

SEQ ID NO: 13108 - protein, 9 aa, synthetic construct
  source 1..9: note = Seed: ARGVGKSAL (KRAS G12R)
IRGMGRSAF

SEQ ID NO: 13109 - protein, 9 aa, synthetic construct
  source 1..9: note = Seed: ARGVGKSAL (KRAS G12R)
IRGMGRSAG

SEQ ID NO: 13110 - protein, 9 aa, synthetic construct
  source 1..9: note = Seed: ARGVGKSAL (KRAS G12R)
IRGMGRSAH

SEQ ID NO: 13111 - protein, 9 aa, synthetic construct
  source 1..9: note = Seed: ARGVGKSAL (KRAS G12R)
IRGMGRSAI

SEQ ID NO: 13112 - protein, 9 aa, synthetic construct
  source 1..9: note = Seed: ARGVGKSAL (KRAS G12R)
IRGMGRSAK

SEQ ID NO: 13113 - protein, 9 aa, synthetic construct
  source 1..9: note = Seed: ARGVGKSAL (KRAS G12R)
IRGMGRSAL

SEQ ID NO: 13114 - protein, 9 aa, synthetic construct
  source 1..9: note = Seed: ARGVGKSAL (KRAS G12R)
IRGMGRSAM

SEQ ID NO: 13115 - protein, 9 aa, synthetic construct
  source 1..9: note = Seed: ARGVGKSAL (KRAS G12R)
IRGMGRSAN

SEQ ID NO: 13116 - protein, 9 aa, synthetic construct
  source 1..9: note = Seed: ARGVGKSAL (KRAS G12R)
IRGMGRSAP

SEQ ID NO: 13117 - protein, 9 aa, synthetic construct
  source 1..9: note = Seed: ARGVGKSAL (KRAS G12R)
IRGMGRSAQ

SEQ ID NO: 13118 - protein, 9 aa, synthetic construct
  source 1..9: note = Seed: ARGVGKSAL (KRAS G12R)
IRGMGRSAR

SEQ ID NO: 13119 - protein, 9 aa, synthetic construct
  source 1..9: note = Seed: ARGVGKSAL (KRAS G12R)
IRGMGRSAS

SEQ ID NO: 13120 - protein, 9 aa, synthetic construct
  source 1..9: note = Seed: ARGVGKSAL (KRAS G12R)
IRGMGRSAT

SEQ ID NO: 13121 - protein, 9 aa, synthetic construct
  source 1..9: note = Seed: ARGVGKSAL (KRAS G12R)
IRGMGRSAV

SEQ ID NO: 13122 - protein, 9 aa, synthetic construct
  source 1..9: note = Seed: ARGVGKSAL (KRAS G12R)
IRGMGRSAW

SEQ ID NO: 13123 - protein, 9 aa, synthetic construct
  source 1..9: note = Seed: ARGVGKSAL (KRAS G12R)
IRGMGRSAY

SEQ ID NO: 13124 - protein, 9 aa, synthetic construct
  source 1..9: note = Seed: ARGVGKSAL (KRAS G12R)
IRGMGVSAA

SEQ ID NO: 13125 - protein, 9 aa, synthetic construct
  source 1..9: note = Seed: ARGVGKSAL (KRAS G12R)
IRGMGVSAR

SEQ ID NO: 13126 - protein, 9 aa, synthetic construct
  source 1..9: note = Seed: ARGVGKSAL (KRAS G12R)
IRGMGVSAS

SEQ ID NO: 13127 - protein, 9 aa, synthetic construct
  source 1..9: note = Seed: ARGVGKSAL (KRAS G12R)
IRGMGYSAR

SEQ ID NO: 13128 - protein, 9 aa, synthetic construct
  source 1..9: note = Seed: ARGVGKSAL (KRAS G12R)
IRGNGASAA

SEQ ID NO: 13129 - protein, 9 aa, synthetic construct
  source 1..9: note = Seed: ARGVGKSAL (KRAS G12R)
IRGNGASAS

SEQ ID NO: 13130 - protein, 9 aa, synthetic construct
  source 1..9: note = Seed: ARGVGKSAL (KRAS G12R)
IRGNGASAV

SEQ ID NO: 13131 - protein, 9 aa, synthetic construct
  source 1..9: note = Seed: ARGVGKSAL (KRAS G12R)
IRGNGISAA

SEQ ID NO: 13132 - protein, 9 aa, synthetic construct
  source 1..9: note = Seed: ARGVGKSAL (KRAS G12R)
IRGNGISAS

SEQ ID NO: 13133 - protein, 9 aa, synthetic construct
  source 1..9: note = Seed: ARGVGKSAL (KRAS G12R)
IRGNGMSAA

SEQ ID NO: 13134 - protein, 9 aa, synthetic construct
  source 1..9: note = Seed: ARGVGKSAL (KRAS G12R)
IRGNGRSAF

SEQ ID NO: 13135 - protein, 9 aa, synthetic construct
  source 1..9: note = Seed: ARGVGKSAL (KRAS G12R)
IRGNGRSAI

SEQ ID NO: 13136 - protein, 9 aa, synthetic construct
  source 1..9: note = Seed: ARGVGKSAL (KRAS G12R)
IRGNGRSAL

SEQ ID NO: 13137 - protein, 9 aa, synthetic construct
  source 1..9: note = Seed: ARGVGKSAL (KRAS G12R)
IRGNGRSAM

SEQ ID NO: 13138 - protein, 9 aa, synthetic construct
  source 1..9: note = Seed: ARGVGKSAL (KRAS G12R)
IRGNGRSAR

SEQ ID NO: 13139 - protein, 9 aa, synthetic construct
  source 1..9: note = Seed: ARGVGKSAL (KRAS G12R)
IRGNGRSAV

SEQ ID NO: 13140 - protein, 9 aa, synthetic construct
  source 1..9: note = Seed: ARGVGKSAL (KRAS G12R)
IRGNGRSAY

SEQ ID NO: 13141 - protein, 9 aa, synthetic construct
  source 1..9: note = Seed: ARGVGKSAL (KRAS G12R)
IRGNGVSAA

SEQ ID NO: 13142 - protein, 9 aa, synthetic construct
  source 1..9: note = Seed: ARGVGKSAL (KRAS G12R)
IRGNGVSAS

SEQ ID NO: 13143 - protein, 9 aa, synthetic construct
  source 1..9: note = Seed: ARGVGKSAL (KRAS G12R)
IRGQGKSAF

SEQ ID NO: 13144 - protein, 9 aa, synthetic construct
  source 1..9: note = Seed: ARGVGKSAL (KRAS G12R)
IRGQGKSAI

SEQ ID NO: 13145 - protein, 9 aa, synthetic construct
  source 1..9: note = Seed: ARGVGKSAL (KRAS G12R)
IRGQGKSAL

SEQ ID NO: 13146 - protein, 9 aa, synthetic construct
  source 1..9: note = Seed: ARGVGKSAL (KRAS G12R)
IRGQGKSAM

SEQ ID NO: 13147 - protein, 9 aa, synthetic construct
  source 1..9: note = Seed: ARGVGKSAL (KRAS G12R)
IRGQGKSAR

SEQ ID NO: 13148 - protein, 9 aa, synthetic construct
  source 1..9: note = Seed: ARGVGKSAL (KRAS G12R)
IRGQGKSAV

SEQ ID NO: 13149 - protein, 9 aa, synthetic construct
  source 1..9: note = Seed: ARGVGKSAL (KRAS G12R)
IRGQGKSAY

SEQ ID NO: 13150 - protein, 9 aa, synthetic construct
  source 1..9: note = Seed: ARGVGKSAL (KRAS G12R)
IRGQGRSAA

SEQ ID NO: 13151 - protein, 9 aa, synthetic construct
  source 1..9: note = Seed: ARGVGKSAL (KRAS G12R)
IRGQGRSAF

SEQ ID NO: 13152 - protein, 9 aa, synthetic construct
  source 1..9: note = Seed: ARGVGKSAL (KRAS G12R)
IRGQGRSAH

SEQ ID NO: 13153 - protein, 9 aa, synthetic construct
  source 1..9: note = Seed: ARGVGKSAL (KRAS G12R)
IRGQGRSAI

SEQ ID NO: 13154 - protein, 9 aa, synthetic construct
  source 1..9: note = Seed: ARGVGKSAL (KRAS G12R)
IRGQGRSAK

SEQ ID NO: 13155 - protein, 9 aa, synthetic construct
  source 1..9: note = Seed: ARGVGKSAL (KRAS G12R)
IRGQGRSAL

SEQ ID NO: 13156 - protein, 9 aa, synthetic construct
  source 1..9: note = Seed: ARGVGKSAL (KRAS G12R)
IRGQGRSAM

SEQ ID NO: 13157 - protein, 9 aa, synthetic construct
  source 1..9: note = Seed: ARGVGKSAL (KRAS G12R)
IRGQGRSAQ

SEQ ID NO: 13158 - protein, 9 aa, synthetic construct
  source 1..9: note = Seed: ARGVGKSAL (KRAS G12R)
IRGQGRSAR

SEQ ID NO: 13159 - protein, 9 aa, synthetic construct
  source 1..9: note = Seed: ARGVGKSAL (KRAS G12R)
IRGQGRSAS

SEQ ID NO: 13160 - protein, 9 aa, synthetic construct
  source 1..9: note = Seed: ARGVGKSAL (KRAS G12R)
IRGQGRSAV

SEQ ID NO: 13161 - protein, 9 aa, synthetic construct
  source 1..9: note = Seed: ARGVGKSAL (KRAS G12R)
IRGQGRSAW

SEQ ID NO: 13162 - protein, 9 aa, synthetic construct
  source 1..9: note = Seed: ARGVGKSAL (KRAS G12R)
IRGQGRSAY

SEQ ID NO: 13163 - protein, 9 aa, synthetic construct
  source 1..9: note = Seed: ARGVGKSAL (KRAS G12R)
IRGRGASAR

SEQ ID NO: 13164 - protein, 9 aa, synthetic construct
  source 1..9: note = Seed: ARGVGKSAL (KRAS G12R)
IRGRGISAF

SEQ ID NO: 13165 - protein, 9 aa, synthetic construct
  source 1..9: note = Seed: ARGVGKSAL (KRAS G12R)
IRGRGISAK

SEQ ID NO: 13166 - protein, 9 aa, synthetic construct
  source 1..9: note = Seed: ARGVGKSAL (KRAS G12R)
IRGRGISAR

SEQ ID NO: 13167 - protein, 9 aa, synthetic construct
  source 1..9: note = Seed: ARGVGKSAL (KRAS G12R)
IRGRGISAY

SEQ ID NO: 13168 - protein, 9 aa, synthetic construct
  source 1..9: note = Seed: ARGVGKSAL (KRAS G12R)
IRGRGKSAA

SEQ ID NO: 13169 - protein, 9 aa, synthetic construct
  source 1..9: note = Seed: ARGVGKSAL (KRAS G12R)
IRGRGKSAF

SEQ ID NO: 13170 - protein, 9 aa, synthetic construct
  source 1..9: note = Seed: ARGVGKSAL (KRAS G12R)
IRGRGKSAH

SEQ ID NO: 13171 - protein, 9 aa, synthetic construct
  source 1..9: note = Seed: ARGVGKSAL (KRAS G12R)
IRGRGKSAI

SEQ ID NO: 13172 - protein, 9 aa, synthetic construct
  source 1..9: note = Seed: ARGVGKSAL (KRAS G12R)
IRGRGKSAK

SEQ ID NO: 13173 - protein, 9 aa, synthetic construct
  source 1..9: note = Seed: ARGVGKSAL (KRAS G12R)
IRGRGKSAL

SEQ ID NO: 13174 - protein, 9 aa, synthetic construct
  source 1..9: note = Seed: ARGVGKSAL (KRAS G12R)
IRGRGKSAM

SEQ ID NO: 13175 - protein, 9 aa, synthetic construct
  source 1..9: note = Seed: ARGVGKSAL (KRAS G12R)
IRGRGKSAQ

SEQ ID NO: 13176 - protein, 9 aa, synthetic construct
  source 1..9: note = Seed: ARGVGKSAL (KRAS G12R)
IRGRGKSAR

SEQ ID NO: 13177 - protein, 9 aa, synthetic construct
  source 1..9: note = Seed: ARGVGKSAL (KRAS G12R)
IRGRGKSAS

SEQ ID NO: 13178 - protein, 9 aa, synthetic construct
  source 1..9: note = Seed: ARGVGKSAL (KRAS G12R)
IRGRGKSAV

SEQ ID NO: 13179 - protein, 9 aa, synthetic construct
  source 1..9: note = Seed: ARGVGKSAL (KRAS G12R)
IRGRGKSAY

SEQ ID NO: 13180 - protein, 9 aa, synthetic construct
  source 1..9: note = Seed: ARGVGKSAL (KRAS G12R)
IRGRGLSAR

SEQ ID NO: 13181 - protein, 9 aa, synthetic construct
  source 1..9: note = Seed: ARGVGKSAL (KRAS G12R)
IRGRGLSAY

SEQ ID NO: 13182 - protein, 9 aa, synthetic construct
  source 1..9: note = Seed: ARGVGKSAL (KRAS G12R)
IRGRGMSAR

SEQ ID NO: 13183 - protein, 9 aa, synthetic construct
  source 1..9: note = Seed: ARGVGKSAL (KRAS G12R)
IRGRGRSAA

SEQ ID NO: 13184 - protein, 9 aa, synthetic construct
  source 1..9: note = Seed: ARGVGKSAL (KRAS G12R)
IRGRGRSAF

SEQ ID NO: 13185 - protein, 9 aa, synthetic construct
  source 1..9: note = Seed: ARGVGKSAL (KRAS G12R)
IRGRGRSAG

SEQ ID NO: 13186 - protein, 9 aa, synthetic construct
  source 1..9: note = Seed: ARGVGKSAL (KRAS G12R)
IRGRGRSAH

SEQ ID NO: 13187 - protein, 9 aa, synthetic construct
  source 1..9: note = Seed: ARGVGKSAL (KRAS G12R)
IRGRGRSAI

SEQ ID NO: 13188 - protein, 9 aa, synthetic construct
  source 1..9: note = Seed: ARGVGKSAL (KRAS G12R)
IRGRGRSAK

SEQ ID NO: 13189 - protein, 9 aa, synthetic construct
  source 1..9: note = Seed: ARGVGKSAL (KRAS G12R)
IRGRGRSAL

SEQ ID NO: 13190 - protein, 9 aa, synthetic construct
  source 1..9: note = Seed: ARGVGKSAL (KRAS G12R)
IRGRGRSAM

SEQ ID NO: 13191 - protein, 9 aa, synthetic construct
  source 1..9: note = Seed: ARGVGKSAL (KRAS G12R)
IRGRGRSAN

SEQ ID NO: 13192 - protein, 9 aa, synthetic construct
  source 1..9: note = Seed: ARGVGKSAL (KRAS G12R)
IRGRGRSAQ

SEQ ID NO: 13193 - protein, 9 aa, synthetic construct
  source 1..9: note = Seed: ARGVGKSAL (KRAS G12R)
IRGRGRSAR

SEQ ID NO: 13194 - protein, 9 aa, synthetic construct
  source 1..9: note = Seed: ARGVGKSAL (KRAS G12R)
IRGRGRSAS

SEQ ID NO: 13195 - protein, 9 aa, synthetic construct
  source 1..9: note = Seed: ARGVGKSAL (KRAS G12R)
IRGRGRSAT

SEQ ID NO: 13196 - protein, 9 aa, synthetic construct
  source 1..9: note = Seed: ARGVGKSAL (KRAS G12R)
IRGRGRSAV

SEQ ID NO: 13197 - protein, 9 aa, synthetic construct
  source 1..9: note = Seed: ARGVGKSAL (KRAS G12R)
IRGRGRSAW

SEQ ID NO: 13198 - protein, 9 aa, synthetic construct
  source 1..9: note = Seed: ARGVGKSAL (KRAS G12R)
IRGRGRSAY

SEQ ID NO: 13199 - protein, 9 aa, synthetic construct
  source 1..9: note = Seed: ARGVGKSAL (KRAS G12R)
IRGRGSSAR

SEQ ID NO: 13200 - protein, 9 aa, synthetic construct
  source 1..9: note = Seed: ARGVGKSAL (KRAS G12R)
IRGRGVSAF

SEQ ID NO: 13201 - protein, 9 aa, synthetic construct
  source 1..9: note = Seed: ARGVGKSAL (KRAS G12R)
IRGRGVSAR

SEQ ID NO: 13202 - protein, 9 aa, synthetic construct
  source 1..9: note = Seed: ARGVGKSAL (KRAS G12R)
IRGRGVSAY

SEQ ID NO: 13203 - protein, 9 aa, synthetic construct
  source 1..9: note = Seed: ARGVGKSAL (KRAS G12R)
IRGSGASAA

SEQ ID NO: 13204 - protein, 9 aa, synthetic construct
  source 1..9: note = Seed: ARGVGKSAL (KRAS G12R)
IRGSGASAG

SEQ ID NO: 13205 - protein, 9 aa, synthetic construct
  source 1..9: note = Seed: ARGVGKSAL (KRAS G12R)
IRGSGASAH

SEQ ID NO: 13206 - protein, 9 aa, synthetic construct
  source 1..9: note = Seed: ARGVGKSAL (KRAS G12R)
IRGSGASAI

SEQ ID NO: 13207 - protein, 9 aa, synthetic construct
  source 1..9: note = Seed: ARGVGKSAL (KRAS G12R)
IRGSGASAL

SEQ ID NO: 13208 - protein, 9 aa, synthetic construct
  source 1..9: note = Seed: ARGVGKSAL (KRAS G12R)
IRGSGASAM

SEQ ID NO: 13209 - protein, 9 aa, synthetic construct
  source 1..9: note = Seed: ARGVGKSAL (KRAS G12R)
IRGSGASAN

SEQ ID NO: 13210 - protein, 9 aa, synthetic construct
  source 1..9: note = Seed: ARGVGKSAL (KRAS G12R)
IRGSGASAQ

SEQ ID NO: 13211 - protein, 9 aa, synthetic construct
  source 1..9: note = Seed: ARGVGKSAL (KRAS G12R)
IRGSGASAS

SEQ ID NO: 13212 - protein, 9 aa, synthetic construct
  source 1..9: note = Seed: ARGVGKSAL (KRAS G12R)
IRGSGASAT

SEQ ID NO: 13213 - protein, 9 aa, synthetic construct
  source 1..9: note = Seed: ARGVGKSAL (KRAS G12R)
IRGSGASAV

SEQ ID NO: 13214 - protein, 9 aa, synthetic construct
  source 1..9: note = Seed: ARGVGKSAL (KRAS G12R)
IRGSGASAY

SEQ ID NO: 13215 - protein, 9 aa, synthetic construct
  source 1..9: note = Seed: ARGVGKSAL (KRAS G12R)
IRGSGISAA

SEQ ID NO: 13216 - protein, 9 aa, synthetic construct
  source 1..9: note = Seed: ARGVGKSAL (KRAS G12R)
IRGSGISAG

SEQ ID NO: 13217 - protein, 9 aa, synthetic construct
  source 1..9: note = Seed: ARGVGKSAL (KRAS G12R)
IRGSGISAH

SEQ ID NO: 13218 - protein, 9 aa, synthetic construct
  source 1..9: note = Seed: ARGVGKSAL (KRAS G12R)
IRGSGISAI

SEQ ID NO: 13219 - protein, 9 aa, synthetic construct
  source 1..9: note = Seed: ARGVGKSAL (KRAS G12R)
IRGSGISAL

SEQ ID NO: 13220 - protein, 9 aa, synthetic construct
  source 1..9: note = Seed: ARGVGKSAL (KRAS G12R)
IRGSGISAM

SEQ ID NO: 13221 - protein, 9 aa, synthetic construct
  source 1..9: note = Seed: ARGVGKSAL (KRAS G12R)
IRGSGISAN

SEQ ID NO: 13222 - protein, 9 aa, synthetic construct
  source 1..9: note = Seed: ARGVGKSAL (KRAS G12R)
IRGSGISAQ

SEQ ID NO: 13223 - protein, 9 aa, synthetic construct
  source 1..9: note = Seed: ARGVGKSAL (KRAS G12R)
IRGSGISAS

SEQ ID NO: 13224 - protein, 9 aa, synthetic construct
  source 1..9: note = Seed: ARGVGKSAL (KRAS G12R)
IRGSGISAT

SEQ ID NO: 13225 - protein, 9 aa, synthetic construct
  source 1..9: note = Seed: ARGVGKSAL (KRAS G12R)
IRGSGISAV

SEQ ID NO: 13226 - protein, 9 aa, synthetic construct
  source 1..9: note = Seed: ARGVGKSAL (KRAS G12R)
IRGSGKSAI

SEQ ID NO: 13227 - protein, 9 aa, synthetic construct
  source 1..9: note = Seed: ARGVGKSAL (KRAS G12R)
IRGSGKSAL

SEQ ID NO: 13228 - protein, 9 aa, synthetic construct
  source 1..9: note = Seed: ARGVGKSAL (KRAS G12R)
IRGSGKSAR

SEQ ID NO: 13229 - protein, 9 aa, synthetic construct
  source 1..9: note = Seed: ARGVGKSAL (KRAS G12R)
IRGSGKSAY

SEQ ID NO: 13230 - protein, 9 aa, synthetic construct
  source 1..9: note = Seed: ARGVGKSAL (KRAS G12R)
IRGSGLSAA

SEQ ID NO: 13231 - protein, 9 aa, synthetic construct
  source 1..9: note = Seed: ARGVGKSAL (KRAS G12R)
IRGSGLSAG

SEQ ID NO: 13232 - protein, 9 aa, synthetic construct
  source 1..9: note = Seed: ARGVGKSAL (KRAS G12R)
IRGSGLSAS

SEQ ID NO: 13233 - protein, 9 aa, synthetic construct
  source 1..9: note = Seed: ARGVGKSAL (KRAS G12R)
IRGSGLSAT

SEQ ID NO: 13234 - protein, 9 aa, synthetic construct
  source 1..9: note = Seed: ARGVGKSAL (KRAS G12R)
IRGSGLSAV

SEQ ID NO: 13235 - protein, 9 aa, synthetic construct
  source 1..9: note = Seed: ARGVGKSAL (KRAS G12R)
IRGSGMSAA

SEQ ID NO: 13236 - protein, 9 aa, synthetic construct
  source 1..9: note = Seed: ARGVGKSAL (KRAS G12R)
IRGSGMSAG

SEQ ID NO: 13237 - protein, 9 aa, synthetic construct
  source 1..9: note = Seed: ARGVGKSAL (KRAS G12R)
IRGSGMSAI

SEQ ID NO: 13238 - protein, 9 aa, synthetic construct
  source 1..9: note = Seed: ARGVGKSAL (KRAS G12R)
IRGSGMSAS

SEQ ID NO: 13239 - protein, 9 aa, synthetic construct
  source 1..9: note = Seed: ARGVGKSAL (KRAS G12R)
IRGSGMSAT

SEQ ID NO: 13240 - protein, 9 aa, synthetic construct
  source 1..9: note = Seed: ARGVGKSAL (KRAS G12R)
IRGSGMSAV

SEQ ID NO: 13241 - protein, 9 aa, synthetic construct
  source 1..9: note = Seed: ARGVGKSAL (KRAS G12R)
IRGSGNSAA

SEQ ID NO: 13242 - protein, 9 aa, synthetic construct
  source 1..9: note = Seed: ARGVGKSAL (KRAS G12R)
IRGSGNSAS

SEQ ID NO: 13243 - protein, 9 aa, synthetic construct
  source 1..9: note = Seed: ARGVGKSAL (KRAS G12R)
IRGSGPSAA

SEQ ID NO: 13244 - protein, 9 aa, synthetic construct
  source 1..9: note = Seed: ARGVGKSAL (KRAS G12R)
IRGSGPSAS

SEQ ID NO: 13245 - protein, 9 aa, synthetic construct
  source 1..9: note = Seed: ARGVGKSAL (KRAS G12R)
IRGSGPSAV

SEQ ID NO: 13246 - protein, 9 aa, synthetic construct
  source 1..9: note = Seed: ARGVGKSAL (KRAS G12R)
IRGSGRSAF

SEQ ID NO: 13247 - protein, 9 aa, synthetic construct
  source 1..9: note = Seed: ARGVGKSAL (KRAS G12R)
IRGSGRSAI

SEQ ID NO: 13248 - protein, 9 aa, synthetic construct
  source 1..9: note = Seed: ARGVGKSAL (KRAS G12R)
IRGSGRSAK

SEQ ID NO: 13249 - protein, 9 aa, synthetic construct
  source 1..9: note = Seed: ARGVGKSAL (KRAS G12R)
IRGSGRSAL

SEQ ID NO: 13250 - protein, 9 aa, synthetic construct
  source 1..9: note = Seed: ARGVGKSAL (KRAS G12R)
IRGSGRSAM

SEQ ID NO: 13251 - protein, 9 aa, synthetic construct
  source 1..9: note = Seed: ARGVGKSAL (KRAS G12R)
IRGSGRSAR

SEQ ID NO: 13252 - protein, 9 aa, synthetic construct
  source 1..9: note = Seed: ARGVGKSAL (KRAS G12R)
IRGSGRSAV

SEQ ID NO: 13253 - protein, 9 aa, synthetic construct
  source 1..9: note = Seed: ARGVGKSAL (KRAS G12R)
IRGSGRSAY

SEQ ID NO: 13254 - protein, 9 aa, synthetic construct
  source 1..9: note = Seed: ARGVGKSAL (KRAS G12R)
IRGSGSSAA

SEQ ID NO: 13255 - protein, 9 aa, synthetic construct
  source 1..9: note = Seed: ARGVGKSAL (KRAS G12R)
IRGSGSSAS

SEQ ID NO: 13256 - protein, 9 aa, synthetic construct
  source 1..9: note = Seed: ARGVGKSAL (KRAS G12R)
IRGSGTSAA

SEQ ID NO: 13257 - protein, 9 aa, synthetic construct
  source 1..9: note = Seed: ARGVGKSAL (KRAS G12R)
IRGSGTSAS

SEQ ID NO: 13258 - protein, 9 aa, synthetic construct
  source 1..9: note = Seed: ARGVGKSAL (KRAS G12R)
IRGSGVSAA

SEQ ID NO: 13259 - protein, 9 aa, synthetic construct
  source 1..9: note = Seed: ARGVGKSAL (KRAS G12R)
IRGSGVSAG

SEQ ID NO: 13260 - protein, 9 aa, synthetic construct
  source 1..9: note = Seed: ARGVGKSAL (KRAS G12R)
IRGSGVSAH

SEQ ID NO: 13261 - protein, 9 aa, synthetic construct
  source 1..9: note = Seed: ARGVGKSAL (KRAS G12R)
IRGSGVSAI

SEQ ID NO: 13262 - protein, 9 aa, synthetic construct
  source 1..9: note = Seed: ARGVGKSAL (KRAS G12R)
IRGSGVSAL

SEQ ID NO: 13263 - protein, 9 aa, synthetic construct
  source 1..9: note = Seed: ARGVGKSAL (KRAS G12R)
IRGSGVSAM

SEQ ID NO: 13264 - protein, 9 aa, synthetic construct
  source 1..9: note = Seed: ARGVGKSAL (KRAS G12R)
IRGSGVSAN

SEQ ID NO: 13265 - protein, 9 aa, synthetic construct
  source 1..9: note = Seed: ARGVGKSAL (KRAS G12R)
IRGSGVSAS

SEQ ID NO: 13266 - protein, 9 aa, synthetic construct
  source 1..9: note = Seed: ARGVGKSAL (KRAS G12R)
IRGSGVSAT

SEQ ID NO: 13267 - protein, 9 aa, synthetic construct
  source 1..9: note = Seed: ARGVGKSAL (KRAS G12R)
IRGSGVSAV

SEQ ID NO: 13268 - protein, 9 aa, synthetic construct
  source 1..9: note = Seed: ARGVGKSAL (KRAS G12R)
IRGTGASAA

SEQ ID NO: 13269 - protein, 9 aa, synthetic construct
  source 1..9: note = Seed: ARGVGKSAL (KRAS G12R)
IRGTGASAS

SEQ ID NO: 13270 - protein, 9 aa, synthetic construct
  source 1..9: note = Seed: ARGVGKSAL (KRAS G12R)
IRGTGISAA

SEQ ID NO: 13271 - protein, 9 aa, synthetic construct
  source 1..9: note = Seed: ARGVGKSAL (KRAS G12R)
IRGTGISAG

SEQ ID NO: 13272 - protein, 9 aa, synthetic construct
  source 1..9: note = Seed: ARGVGKSAL (KRAS G12R)
IRGTGISAS

SEQ ID NO: 13273 - protein, 9 aa, synthetic construct
  source 1..9: note = Seed: ARGVGKSAL (KRAS G12R)
IRGTGISAT

SEQ ID NO: 13274 - protein, 9 aa, synthetic construct
  source 1..9: note = Seed: ARGVGKSAL (KRAS G12R)
IRGTGISAV

SEQ ID NO: 13275 - protein, 9 aa, synthetic construct
  source 1..9: note = Seed: ARGVGKSAL (KRAS G12R)
IRGTGLSAA

SEQ ID NO: 13276 - protein, 9 aa, synthetic construct
  source 1..9: note = Seed: ARGVGKSAL (KRAS G12R)
IRGTGLSAS

SEQ ID NO: 13277 - protein, 9 aa, synthetic construct
  source 1..9: note = Seed: ARGVGKSAL (KRAS G12R)
IRGTGMSAA

SEQ ID NO: 13278 - protein, 9 aa, synthetic construct
  source 1..9: note = Seed: ARGVGKSAL (KRAS G12R)
IRGTGMSAS

SEQ ID NO: 13279 - protein, 9 aa, synthetic construct
  source 1..9: note = Seed: ARGVGKSAL (KRAS G12R)
IRGTGPSAA

SEQ ID NO: 13280 - protein, 9 aa, synthetic construct
  source 1..9: note = Seed: ARGVGKSAL (KRAS G12R)
IRGTGRSAF

SEQ ID NO: 13281 - protein, 9 aa, synthetic construct
  source 1..9: note = Seed: ARGVGKSAL (KRAS G12R)
IRGTGRSAI

SEQ ID NO: 13282 - protein, 9 aa, synthetic construct
  source 1..9: note = Seed: ARGVGKSAL (KRAS G12R)
IRGTGRSAL

SEQ ID NO: 13283 - protein, 9 aa, synthetic construct
  source 1..9: note = Seed: ARGVGKSAL (KRAS G12R)
IRGTGRSAM

SEQ ID NO: 13284 - protein, 9 aa, synthetic construct
  source 1..9: note = Seed: ARGVGKSAL (KRAS G12R)
IRGTGRSAR

SEQ ID NO: 13285 - protein, 9 aa, synthetic construct
  source 1..9: note = Seed: ARGVGKSAL (KRAS G12R)
IRGTGRSAV

SEQ ID NO: 13286 - protein, 9 aa, synthetic construct
  source 1..9: note = Seed: ARGVGKSAL (KRAS G12R)
IRGTGRSAY

SEQ ID NO: 13287 - protein, 9 aa, synthetic construct
  source 1..9: note = Seed: ARGVGKSAL (KRAS G12R)
IRGTGTSAA

SEQ ID NO: 13288 - protein, 9 aa, synthetic construct
  source 1..9: note = Seed: ARGVGKSAL (KRAS G12R)
IRGTGVSAA

SEQ ID NO: 13289 - protein, 9 aa, synthetic construct
  source 1..9: note = Seed: ARGVGKSAL (KRAS G12R)
IRGTGVSAS

SEQ ID NO: 13290 - protein, 9 aa, synthetic construct
  source 1..9: note = Seed: ARGVGKSAL (KRAS G12R)
IRGTGVSAT

SEQ ID NO: 13291 - protein, 9 aa, synthetic construct
  source 1..9: note = Seed: ARGVGKSAL (KRAS G12R)
IRGTGVSAV

SEQ ID NO: 13292 - protein, 9 aa, synthetic construct
  source 1..9: note = Seed: ARGVGKSAL (KRAS G12R)
IRGVGASAA

SEQ ID NO: 13293 - protein, 9 aa, synthetic construct
  source 1..9: note = Seed: ARGVGKSAL (KRAS G12R)
IRGVGASAR

SEQ ID NO: 13294 - protein, 9 aa, synthetic construct
  source 1..9: note = Seed: ARGVGKSAL (KRAS G12R)
IRGVGHSAR

SEQ ID NO: 13295 - protein, 9 aa, synthetic construct
  source 1..9: note = Seed: ARGVGKSAL (KRAS G12R)
IRGVGISAA

SEQ ID NO: 13296 - protein, 9 aa, synthetic construct
  source 1..9: note = Seed: ARGVGKSAL (KRAS G12R)
IRGVGISAR

SEQ ID NO: 13297 - protein, 9 aa, synthetic construct
  source 1..9: note = Seed: ARGVGKSAL (KRAS G12R)
IRGVGISAS

SEQ ID NO: 13298 - protein, 9 aa, synthetic construct
  source 1..9: note = Seed: ARGVGKSAL (KRAS G12R)
IRGVGKSAA

SEQ ID NO: 13299 - protein, 9 aa, synthetic construct
  source 1..9: note = Seed: ARGVGKSAL (KRAS G12R)
IRGVGKSAF

SEQ ID NO: 13300 - protein, 9 aa, synthetic construct
  source 1..9: note = Seed: ARGVGKSAL (KRAS G12R)
IRGVGKSAG

SEQ ID NO: 13301 - protein, 9 aa, synthetic construct
  source 1..9: note = Seed: ARGVGKSAL (KRAS G12R)
IRGVGKSAH

SEQ ID NO: 13302 - protein, 9 aa, synthetic construct
  source 1..9: note = Seed: ARGVGKSAL (KRAS G12R)
IRGVGKSAI

SEQ ID NO: 13303 - protein, 9 aa, synthetic construct
  source 1..9: note = Seed: ARGVGKSAL (KRAS G12R)
IRGVGKSAK

SEQ ID NO: 13304 - protein, 9 aa, synthetic construct
  source 1..9: note = Seed: ARGVGKSAL (KRAS G12R)
IRGVGKSAL

SEQ ID NO: 13305 - protein, 9 aa, synthetic construct
  source 1..9: note = Seed: ARGVGKSAL (KRAS G12R)
IRGVGKSAM

SEQ ID NO: 13306 - protein, 9 aa, synthetic construct
  source 1..9: note = Seed: ARGVGKSAL (KRAS G12R)
IRGVGKSAQ

SEQ ID NO: 13307 - protein, 9 aa, synthetic construct
  source 1..9: note = Seed: ARGVGKSAL (KRAS G12R)
IRGVGKSAR

SEQ ID NO: 13308 - protein, 9 aa, synthetic construct
  source 1..9: note = Seed: ARGVGKSAL (KRAS G12R)
IRGVGKSAS

SEQ ID NO: 13309 - protein, 9 aa, synthetic construct
  source 1..9: note = Seed: ARGVGKSAL (KRAS G12R)
IRGVGKSAT

SEQ ID NO: 13310 - protein, 9 aa, synthetic construct
  source 1..9: note = Seed: ARGVGKSAL (KRAS G12R)
IRGVGKSAV

SEQ ID NO: 13311 - protein, 9 aa, synthetic construct
  source 1..9: note = Seed: ARGVGKSAL (KRAS G12R)
IRGVGKSAY

SEQ ID NO: 13312 - protein, 9 aa, synthetic construct
  source 1..9: note = Seed: ARGVGKSAL (KRAS G12R)
IRGVGLSAA

SEQ ID NO: 13313 - protein, 9 aa, synthetic construct
  source 1..9: note = Seed: ARGVGKSAL (KRAS G12R)
IRGVGMSAA

SEQ ID NO: 13314 - protein, 9 aa, synthetic construct
  source 1..9: note = Seed: ARGVGKSAL (KRAS G12R)
IRGVGMSAS

SEQ ID NO: 13315 - protein, 9 aa, synthetic construct
  source 1..9: note = Seed: ARGVGKSAL (KRAS G12R)
IRGVGRSAA

SEQ ID NO: 13316 - protein, 9 aa, synthetic construct
  source 1..9: note = Seed: ARGVGKSAL (KRAS G12R)
IRGVGRSAF

SEQ ID NO: 13317 - protein, 9 aa, synthetic construct
  source 1..9: note = Seed: ARGVGKSAL (KRAS G12R)
IRGVGRSAG

SEQ ID NO: 13318 - protein, 9 aa, synthetic construct
  source 1..9: note = Seed: ARGVGKSAL (KRAS G12R)
IRGVGRSAH

SEQ ID NO: 13319 - protein, 9 aa, synthetic construct
  source 1..9: note = Seed: ARGVGKSAL (KRAS G12R)
IRGVGRSAI

SEQ ID NO: 13320 - protein, 9 aa, synthetic construct
  source 1..9: note = Seed: ARGVGKSAL (KRAS G12R)
IRGVGRSAK

SEQ ID NO: 13321 - protein, 9 aa, synthetic construct
  source 1..9: note = Seed: ARGVGKSAL (KRAS G12R)
IRGVGRSAL

SEQ ID NO: 13322 - protein, 9 aa, synthetic construct
  source 1..9: note = Seed: ARGVGKSAL (KRAS G12R)
IRGVGRSAM

SEQ ID NO: 13323 - protein, 9 aa, synthetic construct
  source 1..9: note = Seed: ARGVGKSAL (KRAS G12R)
IRGVGRSAN

SEQ ID NO: 13324 - protein, 9 aa, synthetic construct
  source 1..9: note = Seed: ARGVGKSAL (KRAS G12R)
IRGVGRSAQ

SEQ ID NO: 13325 - protein, 9 aa, synthetic construct
  source 1..9: note = Seed: ARGVGKSAL (KRAS G12R)
IRGVGRSAR

SEQ ID NO: 13326 - protein, 9 aa, synthetic construct
  source 1..9: note = Seed: ARGVGKSAL (KRAS G12R)
IRGVGRSAS

SEQ ID NO: 13327 - protein, 9 aa, synthetic construct
  source 1..9: note = Seed: ARGVGKSAL (KRAS G12R)
IRGVGRSAT

SEQ ID NO: 13328 - protein, 9 aa, synthetic construct
  source 1..9: note = Seed: ARGVGKSAL (KRAS G12R)
IRGVGRSAV

SEQ ID NO: 13329 - protein, 9 aa, synthetic construct
  source 1..9: note = Seed: ARGVGKSAL (KRAS G12R)
IRGVGRSAW

SEQ ID NO: 13330 - protein, 9 aa, synthetic construct
  source 1..9: note = Seed: ARGVGKSAL (KRAS G12R)
IRGVGRSAY

SEQ ID NO: 13331 - protein, 9 aa, synthetic construct
  source 1..9: note = Seed: ARGVGKSAL (KRAS G12R)
IRGVGVSAA

SEQ ID NO: 13332 - protein, 9 aa, synthetic construct
  source 1..9: note = Seed: ARGVGKSAL (KRAS G12R)
IRGVGVSAR

SEQ ID NO: 13333 - protein, 9 aa, synthetic construct
  source 1..9: note = Seed: ARGVGKSAL (KRAS G12R)
IRGVGVSAS

SEQ ID NO: 13334 - protein, 9 aa, synthetic construct
  source 1..9: note = Seed: ARGVGKSAL (KRAS G12R)
IRGWGASAR

SEQ ID NO: 13335 - protein, 9 aa, synthetic construct
  source 1..9: note = Seed: ARGVGKSAL (KRAS G12R)
IRGWGHSAF

SEQ ID NO: 13336 - protein, 9 aa, synthetic construct
  source 1..9: note = Seed: ARGVGKSAL (KRAS G12R)
IRGWGHSAR

SEQ ID NO: 13337 - protein, 9 aa, synthetic construct
  source 1..9: note = Seed: ARGVGKSAL (KRAS G12R)
IRGWGHSAY

SEQ ID NO: 13338 - protein, 9 aa, synthetic construct
  source 1..9: note = Seed: ARGVGKSAL (KRAS G12R)
IRGWGISAR

SEQ ID NO: 13339 - protein, 9 aa, synthetic construct
  source 1..9: note = Seed: ARGVGKSAL (KRAS G12R)
IRGWGKSAA

SEQ ID NO: 13340 - protein, 9 aa, synthetic construct
  source 1..9: note = Seed: ARGVGKSAL (KRAS G12R)
IRGWGKSAF

SEQ ID NO: 13341 - protein, 9 aa, synthetic construct
  source 1..9: note = Seed: ARGVGKSAL (KRAS G12R)
IRGWGKSAH

SEQ ID NO: 13342 - protein, 9 aa, synthetic construct
  source 1..9: note = Seed: ARGVGKSAL (KRAS G12R)
IRGWGKSAI

SEQ ID NO: 13343 - protein, 9 aa, synthetic construct
  source 1..9: note = Seed: ARGVGKSAL (KRAS G12R)
IRGWGKSAK

SEQ ID NO: 13344 - protein, 9 aa, synthetic construct
  source 1..9: note = Seed: ARGVGKSAL (KRAS G12R)
IRGWGKSAL

SEQ ID NO: 13345 - protein, 9 aa, synthetic construct
  source 1..9: note = Seed: ARGVGKSAL (KRAS G12R)
IRGWGKSAM

SEQ ID NO: 13346 - protein, 9 aa, synthetic construct
  source 1..9: note = Seed: ARGVGKSAL (KRAS G12R)
IRGWGKSAR

SEQ ID NO: 13347 - protein, 9 aa, synthetic construct
  source 1..9: note = Seed: ARGVGKSAL (KRAS G12R)
IRGWGKSAS

SEQ ID NO: 13348 - protein, 9 aa, synthetic construct
  source 1..9: note = Seed: ARGVGKSAL (KRAS G12R)
IRGWGKSAV

SEQ ID NO: 13349 - protein, 9 aa, synthetic construct
  source 1..9: note = Seed: ARGVGKSAL (KRAS G12R)
IRGWGKSAY

SEQ ID NO: 13350 - protein, 9 aa, synthetic construct
  source 1..9: note = Seed: ARGVGKSAL (KRAS G12R)
IRGWGLSAR

SEQ ID NO: 13351 - protein, 9 aa, synthetic construct
  source 1..9: note = Seed: ARGVGKSAL (KRAS G12R)
IRGWGMSAR

SEQ ID NO: 13352 - protein, 9 aa, synthetic construct
  source 1..9: note = Seed: ARGVGKSAL (KRAS G12R)
IRGWGRSAA

SEQ ID NO: 13353 - protein, 9 aa, synthetic construct
  source 1..9: note = Seed: ARGVGKSAL (KRAS G12R)
IRGWGRSAF

SEQ ID NO: 13354 - protein, 9 aa, synthetic construct
  source 1..9: note = Seed: ARGVGKSAL (KRAS G12R)
IRGWGRSAG

SEQ ID NO: 13355 - protein, 9 aa, synthetic construct
  source 1..9: note = Seed: ARGVGKSAL (KRAS G12R)
IRGWGRSAH

SEQ ID NO: 13356 - protein, 9 aa, synthetic construct
  source 1..9: note = Seed: ARGVGKSAL (KRAS G12R)
IRGWGRSAI

SEQ ID NO: 13357 - protein, 9 aa, synthetic construct
  source 1..9: note = Seed: ARGVGKSAL (KRAS G12R)
IRGWGRSAK

SEQ ID NO: 13358 - protein, 9 aa, synthetic construct
  source 1..9: note = Seed: ARGVGKSAL (KRAS G12R)
IRGWGRSAL

SEQ ID NO: 13359 - protein, 9 aa, synthetic construct
  source 1..9: note = Seed: ARGVGKSAL (KRAS G12R)
IRGWGRSAM

SEQ ID NO: 13360 - protein, 9 aa, synthetic construct
  source 1..9: note = Seed: ARGVGKSAL (KRAS G12R)
IRGWGRSAQ

SEQ ID NO: 13361 - protein, 9 aa, synthetic construct
  source 1..9: note = Seed: ARGVGKSAL (KRAS G12R)
IRGWGRSAR

SEQ ID NO: 13362 - protein, 9 aa, synthetic construct
  source 1..9: note = Seed: ARGVGKSAL (KRAS G12R)
IRGWGRSAS

SEQ ID NO: 13363 - protein, 9 aa, synthetic construct
  source 1..9: note = Seed: ARGVGKSAL (KRAS G12R)
IRGWGRSAT

SEQ ID NO: 13364 - protein, 9 aa, synthetic construct
  source 1..9: note = Seed: ARGVGKSAL (KRAS G12R)
IRGWGRSAV

SEQ ID NO: 13365 - protein, 9 aa, synthetic construct
  source 1..9: note = Seed: ARGVGKSAL (KRAS G12R)
IRGWGRSAW

SEQ ID NO: 13366 - protein, 9 aa, synthetic construct
  source 1..9: note = Seed: ARGVGKSAL (KRAS G12R)
IRGWGRSAY

SEQ ID NO: 13367 - protein, 9 aa, synthetic construct
  source 1..9: note = Seed: ARGVGKSAL (KRAS G12R)
IRGWGSSAR

SEQ ID NO: 13368 - protein, 9 aa, synthetic construct
  source 1..9: note = Seed: ARGVGKSAL (KRAS G12R)
IRGWGVSAR

SEQ ID NO: 13369 - protein, 9 aa, synthetic construct
  source 1..9: note = Seed: ARGVGKSAL (KRAS G12R)
IRGYGASAR

SEQ ID NO: 13370 - protein, 9 aa, synthetic construct
  source 1..9: note = Seed: ARGVGKSAL (KRAS G12R)
IRGYGISAK

SEQ ID NO: 13371 - protein, 9 aa, synthetic construct
  source 1..9: note = Seed: ARGVGKSAL (KRAS G12R)
IRGYGISAR

SEQ ID NO: 13372 - protein, 9 aa, synthetic construct
  source 1..9: note = Seed: ARGVGKSAL (KRAS G12R)
IRGYGISAY

SEQ ID NO: 13373 - protein, 9 aa, synthetic construct
  source 1..9: note = Seed: ARGVGKSAL (KRAS G12R)
IRGYGKSAA

SEQ ID NO: 13374 - protein, 9 aa, synthetic construct
  source 1..9: note = Seed: ARGVGKSAL (KRAS G12R)
IRGYGKSAF

SEQ ID NO: 13375 - protein, 9 aa, synthetic construct
  source 1..9: note = Seed: ARGVGKSAL (KRAS G12R)
IRGYGKSAH

SEQ ID NO: 13376 - protein, 9 aa, synthetic construct
  source 1..9: note = Seed: ARGVGKSAL (KRAS G12R)
IRGYGKSAI

SEQ ID NO: 13377 - protein, 9 aa, synthetic construct
  source 1..9: note = Seed: ARGVGKSAL (KRAS G12R)
IRGYGKSAK

SEQ ID NO: 13378 - protein, 9 aa, synthetic construct
  source 1..9: note = Seed: ARGVGKSAL (KRAS G12R)
IRGYGKSAL

SEQ ID NO: 13379 - protein, 9 aa, synthetic construct
  source 1..9: note = Seed: ARGVGKSAL (KRAS G12R)
IRGYGKSAM

SEQ ID NO: 13380 - protein, 9 aa, synthetic construct
  source 1..9: note = Seed: ARGVGKSAL (KRAS G12R)
IRGYGKSAR

SEQ ID NO: 13381 - protein, 9 aa, synthetic construct
  source 1..9: note = Seed: ARGVGKSAL (KRAS G12R)
IRGYGKSAS

SEQ ID NO: 13382 - protein, 9 aa, synthetic construct
  source 1..9: note = Seed: ARGVGKSAL (KRAS G12R)
IRGYGKSAV

SEQ ID NO: 13383 - protein, 9 aa, synthetic construct
  source 1..9: note = Seed: ARGVGKSAL (KRAS G12R)
IRGYGKSAY

SEQ ID NO: 13384 - protein, 9 aa, synthetic construct
  source 1..9: note = Seed: ARGVGKSAL (KRAS G12R)
IRGYGLSAK

SEQ ID NO: 13385 - protein, 9 aa, synthetic construct
  source 1..9: note = Seed: ARGVGKSAL (KRAS G12R)
IRGYGLSAR

SEQ ID NO: 13386 - protein, 9 aa, synthetic construct
  source 1..9: note = Seed: ARGVGKSAL (KRAS G12R)
IRGYGMSAR

SEQ ID NO: 13387 - protein, 9 aa, synthetic construct
  source 1..9: note = Seed: ARGVGKSAL (KRAS G12R)
IRGYGRSAA

SEQ ID NO: 13388 - protein, 9 aa, synthetic construct
  source 1..9: note = Seed: ARGVGKSAL (KRAS G12R)
IRGYGRSAF

SEQ ID NO: 13389 - protein, 9 aa, synthetic construct
  source 1..9: note = Seed: ARGVGKSAL (KRAS G12R)
IRGYGRSAG

SEQ ID NO: 13390 - protein, 9 aa, synthetic construct
  source 1..9: note = Seed: ARGVGKSAL (KRAS G12R)
IRGYGRSAH

SEQ ID NO: 13391 - protein, 9 aa, synthetic construct
  source 1..9: note = Seed: ARGVGKSAL (KRAS G12R)
IRGYGRSAI

SEQ ID NO: 13392 - protein, 9 aa, synthetic construct
  source 1..9: note = Seed: ARGVGKSAL (KRAS G12R)
IRGYGRSAK

SEQ ID NO: 13393 - protein, 9 aa, synthetic construct
  source 1..9: note = Seed: ARGVGKSAL (KRAS G12R)
IRGYGRSAL

SEQ ID NO: 13394 - protein, 9 aa, synthetic construct
  source 1..9: note = Seed: ARGVGKSAL (KRAS G12R)
IRGYGRSAM

SEQ ID NO: 13395 - protein, 9 aa, synthetic construct
  source 1..9: note = Seed: ARGVGKSAL (KRAS G12R)
IRGYGRSAQ

SEQ ID NO: 13396 - protein, 9 aa, synthetic construct
  source 1..9: note = Seed: ARGVGKSAL (KRAS G12R)
IRGYGRSAR

SEQ ID NO: 13397 - protein, 9 aa, synthetic construct
  source 1..9: note = Seed: ARGVGKSAL (KRAS G12R)
IRGYGRSAS

SEQ ID NO: 13398 - protein, 9 aa, synthetic construct
  source 1..9: note = Seed: ARGVGKSAL (KRAS G12R)
IRGYGRSAT

SEQ ID NO: 13399 - protein, 9 aa, synthetic construct
  source 1..9: note = Seed: ARGVGKSAL (KRAS G12R)
IRGYGRSAV

SEQ ID NO: 13400 - protein, 9 aa, synthetic construct
  source 1..9: note = Seed: ARGVGKSAL (KRAS G12R)
IRGYGRSAW

SEQ ID NO: 13401 - protein, 9 aa, synthetic construct
  source 1..9: note = Seed: ARGVGKSAL (KRAS G12R)
IRGYGRSAY

SEQ ID NO: 13402 - protein, 9 aa, synthetic construct
  source 1..9: note = Seed: ARGVGKSAL (KRAS G12R)
IRGYGVSAK

SEQ ID NO: 13403 - protein, 9 aa, synthetic construct
  source 1..9: note = Seed: ARGVGKSAL (KRAS G12R)
IRGYGVSAR

SEQ ID NO: 13404 - protein, 9 aa, synthetic construct
  source 1..9: note = Seed: ARGVGKSAL (KRAS G12R)
KRGAGISAA

SEQ ID NO: 13405 - protein, 9 aa, synthetic construct
  source 1..9: note = Seed: ARGVGKSAL (KRAS G12R)
LRGAGASAA

SEQ ID NO: 13406 - protein, 9 aa, synthetic construct
  source 1..9: note = Seed: ARGVGKSAL (KRAS G12R)
LRGAGASAG

SEQ ID NO: 13407 - protein, 9 aa, synthetic construct
  source 1..9: note = Seed: ARGVGKSAL (KRAS G12R)
LRGAGASAM

SEQ ID NO: 13408 - protein, 9 aa, synthetic construct
  source 1..9: note = Seed: ARGVGKSAL (KRAS G12R)
LRGAGASAS

SEQ ID NO: 13409 - protein, 9 aa, synthetic construct
  source 1..9: note = Seed: ARGVGKSAL (KRAS G12R)
LRGAGASAV

SEQ ID NO: 13410 - protein, 9 aa, synthetic construct
  source 1..9: note = Seed: ARGVGKSAL (KRAS G12R)
LRGAGISAA

SEQ ID NO: 13411 - protein, 9 aa, synthetic construct
  source 1..9: note = Seed: ARGVGKSAL (KRAS G12R)
LRGAGISAG

SEQ ID NO: 13412 - protein, 9 aa, synthetic construct
  source 1..9: note = Seed: ARGVGKSAL (KRAS G12R)
LRGAGISAH

SEQ ID NO: 13413 - protein, 9 aa, synthetic construct
  source 1..9: note = Seed: ARGVGKSAL (KRAS G12R)
LRGAGISAI

SEQ ID NO: 13414 - protein, 9 aa, synthetic construct
  source 1..9: note = Seed: ARGVGKSAL (KRAS G12R)
LRGAGISAM

SEQ ID NO: 13415 - protein, 9 aa, synthetic construct
  source 1..9: note = Seed: ARGVGKSAL (KRAS G12R)
LRGAGISAN

SEQ ID NO: 13416 - protein, 9 aa, synthetic construct
  source 1..9: note = Seed: ARGVGKSAL (KRAS G12R)
LRGAGISAQ

SEQ ID NO: 13417 - protein, 9 aa, synthetic construct
  source 1..9: note = Seed: ARGVGKSAL (KRAS G12R)
LRGAGISAS

SEQ ID NO: 13418 - protein, 9 aa, synthetic construct
  source 1..9: note = Seed: ARGVGKSAL (KRAS G12R)
LRGAGISAT

SEQ ID NO: 13419 - protein, 9 aa, synthetic construct
  source 1..9: note = Seed: ARGVGKSAL (KRAS G12R)
LRGAGISAV

SEQ ID NO: 13420 - protein, 9 aa, synthetic construct
  source 1..9: note = Seed: ARGVGKSAL (KRAS G12R)
LRGAGKSAR

SEQ ID NO: 13421 - protein, 9 aa, synthetic construct
  source 1..9: note = Seed: ARGVGKSAL (KRAS G12R)
LRGAGLSAA

SEQ ID NO: 13422 - protein, 9 aa, synthetic construct
  source 1..9: note = Seed: ARGVGKSAL (KRAS G12R)
LRGAGLSAS

SEQ ID NO: 13423 - protein, 9 aa, synthetic construct
  source 1..9: note = Seed: ARGVGKSAL (KRAS G12R)
LRGAGMSAA

SEQ ID NO: 13424 - protein, 9 aa, synthetic construct
  source 1..9: note = Seed: ARGVGKSAL (KRAS G12R)
LRGAGMSAS

SEQ ID NO: 13425 - protein, 9 aa, synthetic construct
  source 1..9: note = Seed: ARGVGKSAL (KRAS G12R)
LRGAGNSAA

SEQ ID NO: 13426 - protein, 9 aa, synthetic construct
  source 1..9: note = Seed: ARGVGKSAL (KRAS G12R)
LRGAGPSAA

SEQ ID NO: 13427 - protein, 9 aa, synthetic construct
  source 1..9: note = Seed: ARGVGKSAL (KRAS G12R)
LRGAGPSAS

SEQ ID NO: 13428 - protein, 9 aa, synthetic construct
  source 1..9: note = Seed: ARGVGKSAL (KRAS G12R)
LRGAGRSAA

SEQ ID NO: 13429 - protein, 9 aa, synthetic construct
  source 1..9: note = Seed: ARGVGKSAL (KRAS G12R)
LRGAGRSAF

SEQ ID NO: 13430 - protein, 9 aa, synthetic construct
  source 1..9: note = Seed: ARGVGKSAL (KRAS G12R)
LRGAGRSAH

SEQ ID NO: 13431 - protein, 9 aa, synthetic construct
  source 1..9: note = Seed: ARGVGKSAL (KRAS G12R)
LRGAGRSAI

SEQ ID NO: 13432 - protein, 9 aa, synthetic construct
  source 1..9: note = Seed: ARGVGKSAL (KRAS G12R)
LRGAGRSAK

SEQ ID NO: 13433 - protein, 9 aa, synthetic construct
  source 1..9: note = Seed: ARGVGKSAL (KRAS G12R)
LRGAGRSAL

SEQ ID NO: 13434 - protein, 9 aa, synthetic construct
  source 1..9: note = Seed: ARGVGKSAL (KRAS G12R)
LRGAGRSAM

SEQ ID NO: 13435 - protein, 9 aa, synthetic construct
  source 1..9: note = Seed: ARGVGKSAL (KRAS G12R)
LRGAGRSAQ

SEQ ID NO: 13436 - protein, 9 aa, synthetic construct
  source 1..9: note = Seed: ARGVGKSAL (KRAS G12R)
LRGAGRSAR

SEQ ID NO: 13437 - protein, 9 aa, synthetic construct
  source 1..9: note = Seed: ARGVGKSAL (KRAS G12R)
LRGAGRSAS

SEQ ID NO: 13438 - protein, 9 aa, synthetic construct
  source 1..9: note = Seed: ARGVGKSAL (KRAS G12R)
LRGAGRSAV

SEQ ID NO: 13439 - protein, 9 aa, synthetic construct
  source 1..9: note = Seed: ARGVGKSAL (KRAS G12R)
LRGAGRSAY

SEQ ID NO: 13440 - protein, 9 aa, synthetic construct
  source 1..9: note = Seed: ARGVGKSAL (KRAS G12R)
LRGAGSSAA

SEQ ID NO: 13441 - protein, 9 aa, synthetic construct
  source 1..9: note = Seed: ARGVGKSAL (KRAS G12R)
LRGAGSSAS

SEQ ID NO: 13442 - protein, 9 aa, synthetic construct
  source 1..9: note = Seed: ARGVGKSAL (KRAS G12R)
LRGAGTSAA

SEQ ID NO: 13443 - protein, 9 aa, synthetic construct
  source 1..9: note = Seed: ARGVGKSAL (KRAS G12R)
LRGAGTSAS

SEQ ID NO: 13444 - protein, 9 aa, synthetic construct
  source 1..9: note = Seed: ARGVGKSAL (KRAS G12R)
LRGAGVSAA

SEQ ID NO: 13445 - protein, 9 aa, synthetic construct
  source 1..9: note = Seed: ARGVGKSAL (KRAS G12R)
LRGAGVSAG

SEQ ID NO: 13446 - protein, 9 aa, synthetic construct
  source 1..9: note = Seed: ARGVGKSAL (KRAS G12R)
LRGAGVSAH

SEQ ID NO: 13447 - protein, 9 aa, synthetic construct
  source 1..9: note = Seed: ARGVGKSAL (KRAS G12R)
LRGAGVSAI

SEQ ID NO: 13448 - protein, 9 aa, synthetic construct
  source 1..9: note = Seed: ARGVGKSAL (KRAS G12R)
LRGAGVSAM

SEQ ID NO: 13449 - protein, 9 aa, synthetic construct
  source 1..9: note = Seed: ARGVGKSAL (KRAS G12R)
LRGAGVSAS

SEQ ID NO: 13450 - protein, 9 aa, synthetic construct
  source 1..9: note = Seed: ARGVGKSAL (KRAS G12R)
LRGAGVSAT

SEQ ID NO: 13451 - protein, 9 aa, synthetic construct
  source 1..9: note = Seed: ARGVGKSAL (KRAS G12R)
LRGAGVSAV

SEQ ID NO: 13452 - protein, 9 aa, synthetic construct
  source 1..9: note = Seed: ARGVGKSAL (KRAS G12R)
LRGFGASAR

SEQ ID NO: 13453 - protein, 9 aa, synthetic construct
  source 1..9: note = Seed: ARGVGKSAL (KRAS G12R)
LRGFGHSAR

SEQ ID NO: 13454 - protein, 9 aa, synthetic construct
  source 1..9: note = Seed: ARGVGKSAL (KRAS G12R)
LRGFGISAR

SEQ ID NO: 13455 - protein, 9 aa, synthetic construct
  source 1..9: note = Seed: ARGVGKSAL (KRAS G12R)
LRGFGKSAA

SEQ ID NO: 13456 - protein, 9 aa, synthetic construct
  source 1..9: note = Seed: ARGVGKSAL (KRAS G12R)
LRGFGKSAF

SEQ ID NO: 13457 - protein, 9 aa, synthetic construct
  source 1..9: note = Seed: ARGVGKSAL (KRAS G12R)
LRGFGKSAG

SEQ ID NO: 13458 - protein, 9 aa, synthetic construct
  source 1..9: note = Seed: ARGVGKSAL (KRAS G12R)
LRGFGKSAH

SEQ ID NO: 13459 - protein, 9 aa, synthetic construct
  source 1..9: note = Seed: ARGVGKSAL (KRAS G12R)
LRGFGKSAI

SEQ ID NO: 13460 - protein, 9 aa, synthetic construct
  source 1..9: note = Seed: ARGVGKSAL (KRAS G12R)
LRGFGKSAK

SEQ ID NO: 13461 - protein, 9 aa, synthetic construct
  source 1..9: note = Seed: ARGVGKSAL (KRAS G12R)
LRGFGKSAL

SEQ ID NO: 13462 - protein, 9 aa, synthetic construct
  source 1..9: note = Seed: ARGVGKSAL (KRAS G12R)
LRGFGKSAM

SEQ ID NO: 13463 - protein, 9 aa, synthetic construct
  source 1..9: note = Seed: ARGVGKSAL (KRAS G12R)
LRGFGKSAQ

SEQ ID NO: 13464 - protein, 9 aa, synthetic construct
  source 1..9: note = Seed: ARGVGKSAL (KRAS G12R)
LRGFGKSAR

SEQ ID NO: 13465 - protein, 9 aa, synthetic construct
  source 1..9: note = Seed: ARGVGKSAL (KRAS G12R)
LRGFGKSAS

SEQ ID NO: 13466 - protein, 9 aa, synthetic construct
  source 1..9: note = Seed: ARGVGKSAL (KRAS G12R)
LRGFGKSAT

SEQ ID NO: 13467 - protein, 9 aa, synthetic construct
  source 1..9: note = Seed: ARGVGKSAL (KRAS G12R)
LRGFGKSAV

SEQ ID NO: 13468 - protein, 9 aa, synthetic construct
  source 1..9: note = Seed: ARGVGKSAL (KRAS G12R)
LRGFGKSAY

SEQ ID NO: 13469 - protein, 9 aa, synthetic construct
  source 1..9: note = Seed: ARGVGKSAL (KRAS G12R)
LRGFGLSAR

SEQ ID NO: 13470 - protein, 9 aa, synthetic construct
  source 1..9: note = Seed: ARGVGKSAL (KRAS G12R)
LRGFGRSAA

SEQ ID NO: 13471 - protein, 9 aa, synthetic construct
  source 1..9: note = Seed: ARGVGKSAL (KRAS G12R)
LRGFGRSAF

SEQ ID NO: 13472 - protein, 9 aa, synthetic construct
  source 1..9: note = Seed: ARGVGKSAL (KRAS G12R)
LRGFGRSAG

SEQ ID NO: 13473 - protein, 9 aa, synthetic construct
  source 1..9: note = Seed: ARGVGKSAL (KRAS G12R)
LRGFGRSAH

SEQ ID NO: 13474 - protein, 9 aa, synthetic construct
  source 1..9: note = Seed: ARGVGKSAL (KRAS G12R)
LRGFGRSAI

SEQ ID NO: 13475 - protein, 9 aa, synthetic construct
  source 1..9: note = Seed: ARGVGKSAL (KRAS G12R)
LRGFGRSAK

SEQ ID NO: 13476 - protein, 9 aa, synthetic construct
  source 1..9: note = Seed: ARGVGKSAL (KRAS G12R)
LRGFGRSAL

SEQ ID NO: 13477 - protein, 9 aa, synthetic construct
  source 1..9: note = Seed: ARGVGKSAL (KRAS G12R)
LRGFGRSAM

SEQ ID NO: 13478 - protein, 9 aa, synthetic construct
  source 1..9: note = Seed: ARGVGKSAL (KRAS G12R)
LRGFGRSAN

SEQ ID NO: 13479 - protein, 9 aa, synthetic construct
  source 1..9: note = Seed: ARGVGKSAL (KRAS G12R)
LRGFGRSAQ

SEQ ID NO: 13480 - protein, 9 aa, synthetic construct
  source 1..9: note = Seed: ARGVGKSAL (KRAS G12R)
LRGFGRSAR

SEQ ID NO: 13481 - protein, 9 aa, synthetic construct
  source 1..9: note = Seed: ARGVGKSAL (KRAS G12R)
LRGFGRSAS

SEQ ID NO: 13482 - protein, 9 aa, synthetic construct
  source 1..9: note = Seed: ARGVGKSAL (KRAS G12R)
LRGFGRSAT

SEQ ID NO: 13483 - protein, 9 aa, synthetic construct
  source 1..9: note = Seed: ARGVGKSAL (KRAS G12R)
LRGFGRSAV

SEQ ID NO: 13484 - protein, 9 aa, synthetic construct
  source 1..9: note = Seed: ARGVGKSAL (KRAS G12R)
LRGFGRSAW

SEQ ID NO: 13485 - protein, 9 aa, synthetic construct
  source 1..9: note = Seed: ARGVGKSAL (KRAS G12R)
LRGFGRSAY

SEQ ID NO: 13486 - protein, 9 aa, synthetic construct
  source 1..9: note = Seed: ARGVGKSAL (KRAS G12R)
LRGFGSSAR

SEQ ID NO: 13487 - protein, 9 aa, synthetic construct
  source 1..9: note = Seed: ARGVGKSAL (KRAS G12R)
LRGFGVSAR

SEQ ID NO: 13488 - protein, 9 aa, synthetic construct
  source 1..9: note = Seed: ARGVGKSAL (KRAS G12R)
LRGGGASAA

SEQ ID NO: 13489 - protein, 9 aa, synthetic construct
  source 1..9: note = Seed: ARGVGKSAL (KRAS G12R)
LRGGGISAA

SEQ ID NO: 13490 - protein, 9 aa, synthetic construct
  source 1..9: note = Seed: ARGVGKSAL (KRAS G12R)
LRGGGISAG

SEQ ID NO: 13491 - protein, 9 aa, synthetic construct
  source 1..9: note = Seed: ARGVGKSAL (KRAS G12R)
LRGGGISAS

SEQ ID NO: 13492 - protein, 9 aa, synthetic construct
  source 1..9: note = Seed: ARGVGKSAL (KRAS G12R)
LRGGGLSAA

SEQ ID NO: 13493 - protein, 9 aa, synthetic construct
  source 1..9: note = Seed: ARGVGKSAL (KRAS G12R)
LRGGGMSAA

SEQ ID NO: 13494 - protein, 9 aa, synthetic construct
  source 1..9: note = Seed: ARGVGKSAL (KRAS G12R)
LRGGGVSAA

SEQ ID NO: 13495 - protein, 9 aa, synthetic construct
  source 1..9: note = Seed: ARGVGKSAL (KRAS G12R)
LRGGGVSAS

SEQ ID NO: 13496 - protein, 9 aa, synthetic construct
  source 1..9: note = Seed: ARGVGKSAL (KRAS G12R)
LRGHGASAA

SEQ ID NO: 13497 - protein, 9 aa, synthetic construct
  source 1..9: note = Seed: ARGVGKSAL (KRAS G12R)
LRGHGASAR

SEQ ID NO: 13498 - protein, 9 aa, synthetic construct
  source 1..9: note = Seed: ARGVGKSAL (KRAS G12R)
LRGHGISAA

SEQ ID NO: 13499 - protein, 9 aa, synthetic construct
  source 1..9: note = Seed: ARGVGKSAL (KRAS G12R)
LRGHGISAR

SEQ ID NO: 13500 - protein, 9 aa, synthetic construct
  source 1..9: note = Seed: ARGVGKSAL (KRAS G12R)
LRGHGKSAF

SEQ ID NO: 13501 - protein, 9 aa, synthetic construct
  source 1..9: note = Seed: ARGVGKSAL (KRAS G12R)
LRGHGKSAI

SEQ ID NO: 13502 - protein, 9 aa, synthetic construct
  source 1..9: note = Seed: ARGVGKSAL (KRAS G12R)
LRGHGKSAK

SEQ ID NO: 13503 - protein, 9 aa, synthetic construct
  source 1..9: note = Seed: ARGVGKSAL (KRAS G12R)
LRGHGKSAL

SEQ ID NO: 13504 - protein, 9 aa, synthetic construct
  source 1..9: note = Seed: ARGVGKSAL (KRAS G12R)
LRGHGKSAM

SEQ ID NO: 13505 - protein, 9 aa, synthetic construct
  source 1..9: note = Seed: ARGVGKSAL (KRAS G12R)
LRGHGKSAR

SEQ ID NO: 13506 - protein, 9 aa, synthetic construct
  source 1..9: note = Seed: ARGVGKSAL (KRAS G12R)
LRGHGKSAV

SEQ ID NO: 13507 - protein, 9 aa, synthetic construct
  source 1..9: note = Seed: ARGVGKSAL (KRAS G12R)
LRGHGKSAY

SEQ ID NO: 13508 - protein, 9 aa, synthetic construct
  source 1..9: note = Seed: ARGVGKSAL (KRAS G12R)
LRGHGLSAR

SEQ ID NO: 13509 - protein, 9 aa, synthetic construct
  source 1..9: note = Seed: ARGVGKSAL (KRAS G12R)
LRGHGRSAA

SEQ ID NO: 13510 - protein, 9 aa, synthetic construct
  source 1..9: note = Seed: ARGVGKSAL (KRAS G12R)
LRGHGRSAF

SEQ ID NO: 13511 - protein, 9 aa, synthetic construct
  source 1..9: note = Seed: ARGVGKSAL (KRAS G12R)
LRGHGRSAH

SEQ ID NO: 13512 - protein, 9 aa, synthetic construct
  source 1..9: note = Seed: ARGVGKSAL (KRAS G12R)
LRGHGRSAI

SEQ ID NO: 13513 - protein, 9 aa, synthetic construct
  source 1..9: note = Seed: ARGVGKSAL (KRAS G12R)
LRGHGRSAK

SEQ ID NO: 13514 - protein, 9 aa, synthetic construct
  source 1..9: note = Seed: ARGVGKSAL (KRAS G12R)
LRGHGRSAL

SEQ ID NO: 13515 - protein, 9 aa, synthetic construct
  source 1..9: note = Seed: ARGVGKSAL (KRAS G12R)
LRGHGRSAM

SEQ ID NO: 13516 - protein, 9 aa, synthetic construct
  source 1..9: note = Seed: ARGVGKSAL (KRAS G12R)
LRGHGRSAQ

SEQ ID NO: 13517 - protein, 9 aa, synthetic construct
  source 1..9: note = Seed: ARGVGKSAL (KRAS G12R)
LRGHGRSAR

SEQ ID NO: 13518 - protein, 9 aa, synthetic construct
  source 1..9: note = Seed: ARGVGKSAL (KRAS G12R)
LRGHGRSAS

SEQ ID NO: 13519 - protein, 9 aa, synthetic construct
  source 1..9: note = Seed: ARGVGKSAL (KRAS G12R)
LRGHGRSAV

SEQ ID NO: 13520 - protein, 9 aa, synthetic construct
  source 1..9: note = Seed: ARGVGKSAL (KRAS G12R)
LRGHGRSAW

SEQ ID NO: 13521 - protein, 9 aa, synthetic construct
  source 1..9: note = Seed: ARGVGKSAL (KRAS G12R)
LRGHGRSAY

SEQ ID NO: 13522 - protein, 9 aa, synthetic construct
  source 1..9: note = Seed: ARGVGKSAL (KRAS G12R)
LRGHGSSAR

SEQ ID NO: 13523 - protein, 9 aa, synthetic construct
  source 1..9: note = Seed: ARGVGKSAL (KRAS G12R)
LRGHGVSAR

SEQ ID NO: 13524 - protein, 9 aa, synthetic construct
  source 1..9: note = Seed: ARGVGKSAL (KRAS G12R)
LRGIGISAA

SEQ ID NO: 13525 - protein, 9 aa, synthetic construct
  source 1..9: note = Seed: ARGVGKSAL (KRAS G12R)
LRGIGISAS

SEQ ID NO: 13526 - protein, 9 aa, synthetic construct
  source 1..9: note = Seed: ARGVGKSAL (KRAS G12R)
LRGIGKSAA

SEQ ID NO: 13527 - protein, 9 aa, synthetic construct
  source 1..9: note = Seed: ARGVGKSAL (KRAS G12R)
LRGIGKSAF

SEQ ID NO: 13528 - protein, 9 aa, synthetic construct
  source 1..9: note = Seed: ARGVGKSAL (KRAS G12R)
LRGIGKSAG

SEQ ID NO: 13529 - protein, 9 aa, synthetic construct
  source 1..9: note = Seed: ARGVGKSAL (KRAS G12R)
LRGIGKSAH

SEQ ID NO: 13530 - protein, 9 aa, synthetic construct
  source 1..9: note = Seed: ARGVGKSAL (KRAS G12R)
LRGIGKSAI

SEQ ID NO: 13531 - protein, 9 aa, synthetic construct
  source 1..9: note = Seed: ARGVGKSAL (KRAS G12R)
LRGIGKSAK

SEQ ID NO: 13532 - protein, 9 aa, synthetic construct
  source 1..9: note = Seed: ARGVGKSAL (KRAS G12R)
LRGIGKSAL

SEQ ID NO: 13533 - protein, 9 aa, synthetic construct
  source 1..9: note = Seed: ARGVGKSAL (KRAS G12R)
LRGIGKSAM

SEQ ID NO: 13534 - protein, 9 aa, synthetic construct
  source 1..9: note = Seed: ARGVGKSAL (KRAS G12R)
LRGIGKSAN

SEQ ID NO: 13535 - protein, 9 aa, synthetic construct
  source 1..9: note = Seed: ARGVGKSAL (KRAS G12R)
LRGIGKSAQ

SEQ ID NO: 13536 - protein, 9 aa, synthetic construct
  source 1..9: note = Seed: ARGVGKSAL (KRAS G12R)
LRGIGKSAR

SEQ ID NO: 13537 - protein, 9 aa, synthetic construct
  source 1..9: note = Seed: ARGVGKSAL (KRAS G12R)
LRGIGKSAS

SEQ ID NO: 13538 - protein, 9 aa, synthetic construct
  source 1..9: note = Seed: ARGVGKSAL (KRAS G12R)
LRGIGKSAT

SEQ ID NO: 13539 - protein, 9 aa, synthetic construct
  source 1..9: note = Seed: ARGVGKSAL (KRAS G12R)
LRGIGKSAV

SEQ ID NO: 13540 - protein, 9 aa, synthetic construct
  source 1..9: note = Seed: ARGVGKSAL (KRAS G12R)
LRGIGKSAY

SEQ ID NO: 13541 - protein, 9 aa, synthetic construct
  source 1..9: note = Seed: ARGVGKSAL (KRAS G12R)
LRGIGRSAA

SEQ ID NO: 13542 - protein, 9 aa, synthetic construct
  source 1..9: note = Seed: ARGVGKSAL (KRAS G12R)
LRGIGRSAC

SEQ ID NO: 13543 - protein, 9 aa, synthetic construct
  source 1..9: note = Seed: ARGVGKSAL (KRAS G12R)
LRGIGRSAF

SEQ ID NO: 13544 - protein, 9 aa, synthetic construct
  source 1..9: note = Seed: ARGVGKSAL (KRAS G12R)
LRGIGRSAG

SEQ ID NO: 13545 - protein, 9 aa, synthetic construct
  source 1..9: note = Seed: ARGVGKSAL (KRAS G12R)
LRGIGRSAH

SEQ ID NO: 13546 - protein, 9 aa, synthetic construct
  source 1..9: note = Seed: ARGVGKSAL (KRAS G12R)
LRGIGRSAI

SEQ ID NO: 13547 - protein, 9 aa, synthetic construct
  source 1..9: note = Seed: ARGVGKSAL (KRAS G12R)
LRGIGRSAK

SEQ ID NO: 13548 - protein, 9 aa, synthetic construct
  source 1..9: note = Seed: ARGVGKSAL (KRAS G12R)
LRGIGRSAL

SEQ ID NO: 13549 - protein, 9 aa, synthetic construct
  source 1..9: note = Seed: ARGVGKSAL (KRAS G12R)
LRGIGRSAM

SEQ ID NO: 13550 - protein, 9 aa, synthetic construct
  source 1..9: note = Seed: ARGVGKSAL (KRAS G12R)
LRGIGRSAN

SEQ ID NO: 13551 - protein, 9 aa, synthetic construct
  source 1..9: note = Seed: ARGVGKSAL (KRAS G12R)
LRGIGRSAP

SEQ ID NO: 13552 - protein, 9 aa, synthetic construct
  source 1..9: note = Seed: ARGVGKSAL (KRAS G12R)
LRGIGRSAQ

SEQ ID NO: 13553 - protein, 9 aa, synthetic construct
  source 1..9: note = Seed: ARGVGKSAL (KRAS G12R)
LRGIGRSAR

SEQ ID NO: 13554 - protein, 9 aa, synthetic construct
  source 1..9: note = Seed: ARGVGKSAL (KRAS G12R)
LRGIGRSAS

SEQ ID NO: 13555 - protein, 9 aa, synthetic construct
  source 1..9: note = Seed: ARGVGKSAL (KRAS G12R)
LRGIGRSAT

SEQ ID NO: 13556 - protein, 9 aa, synthetic construct
  source 1..9: note = Seed: ARGVGKSAL (KRAS G12R)
LRGIGRSAV

SEQ ID NO: 13557 - protein, 9 aa, synthetic construct
  source 1..9: note = Seed: ARGVGKSAL (KRAS G12R)
LRGIGRSAW

SEQ ID NO: 13558 - protein, 9 aa, synthetic construct
  source 1..9: note = Seed: ARGVGKSAL (KRAS G12R)
LRGIGRSAY

SEQ ID NO: 13559 - protein, 9 aa, synthetic construct
  source 1..9: note = Seed: ARGVGKSAL (KRAS G12R)
LRGIGVSAA

SEQ ID NO: 13560 - protein, 9 aa, synthetic construct
  source 1..9: note = Seed: ARGVGKSAL (KRAS G12R)
LRGKGKSAR

SEQ ID NO: 13561 - protein, 9 aa, synthetic construct
  source 1..9: note = Seed: ARGVGKSAL (KRAS G12R)
LRGKGRSAA

SEQ ID NO: 13562 - protein, 9 aa, synthetic construct
  source 1..9: note = Seed: ARGVGKSAL (KRAS G12R)
LRGKGRSAF

SEQ ID NO: 13563 - protein, 9 aa, synthetic construct
  source 1..9: note = Seed: ARGVGKSAL (KRAS G12R)
LRGKGRSAH

SEQ ID NO: 13564 - protein, 9 aa, synthetic construct
  source 1..9: note = Seed: ARGVGKSAL (KRAS G12R)
LRGKGRSAI

SEQ ID NO: 13565 - protein, 9 aa, synthetic construct
  source 1..9: note = Seed: ARGVGKSAL (KRAS G12R)
LRGKGRSAK

SEQ ID NO: 13566 - protein, 9 aa, synthetic construct
  source 1..9: note = Seed: ARGVGKSAL (KRAS G12R)
LRGKGRSAL

SEQ ID NO: 13567 - protein, 9 aa, synthetic construct
  source 1..9: note = Seed: ARGVGKSAL (KRAS G12R)
LRGKGRSAM

SEQ ID NO: 13568 - protein, 9 aa, synthetic construct
  source 1..9: note = Seed: ARGVGKSAL (KRAS G12R)
LRGKGRSAQ

SEQ ID NO: 13569 - protein, 9 aa, synthetic construct
  source 1..9: note = Seed: ARGVGKSAL (KRAS G12R)
LRGKGRSAR

SEQ ID NO: 13570 - protein, 9 aa, synthetic construct
  source 1..9: note = Seed: ARGVGKSAL (KRAS G12R)
LRGKGRSAS

SEQ ID NO: 13571 - protein, 9 aa, synthetic construct
  source 1..9: note = Seed: ARGVGKSAL (KRAS G12R)
LRGKGRSAV

SEQ ID NO: 13572 - protein, 9 aa, synthetic construct
  source 1..9: note = Seed: ARGVGKSAL (KRAS G12R)
LRGKGRSAY

SEQ ID NO: 13573 - protein, 9 aa, synthetic construct
  source 1..9: note = Seed: ARGVGKSAL (KRAS G12R)
LRGLGHSAR

SEQ ID NO: 13574 - protein, 9 aa, synthetic construct
  source 1..9: note = Seed: ARGVGKSAL (KRAS G12R)
LRGLGKSAA

SEQ ID NO: 13575 - protein, 9 aa, synthetic construct
  source 1..9: note = Seed: ARGVGKSAL (KRAS G12R)
LRGLGKSAC

SEQ ID NO: 13576 - protein, 9 aa, synthetic construct
  source 1..9: note = Seed: ARGVGKSAL (KRAS G12R)
LRGLGKSAF

SEQ ID NO: 13577 - protein, 9 aa, synthetic construct
  source 1..9: note = Seed: ARGVGKSAL (KRAS G12R)
LRGLGKSAG

SEQ ID NO: 13578 - protein, 9 aa, synthetic construct
  source 1..9: note = Seed: ARGVGKSAL (KRAS G12R)
LRGLGKSAH

SEQ ID NO: 13579 - protein, 9 aa, synthetic construct
  source 1..9: note = Seed: ARGVGKSAL (KRAS G12R)
LRGLGKSAI

SEQ ID NO: 13580 - protein, 9 aa, synthetic construct
  source 1..9: note = Seed: ARGVGKSAL (KRAS G12R)
LRGLGKSAK

SEQ ID NO: 13581 - protein, 9 aa, synthetic construct
  source 1..9: note = Seed: ARGVGKSAL (KRAS G12R)
LRGLGKSAL

SEQ ID NO: 13582 - protein, 9 aa, synthetic construct
  source 1..9: note = Seed: ARGVGKSAL (KRAS G12R)
LRGLGKSAM

SEQ ID NO: 13583 - protein, 9 aa, synthetic construct
  source 1..9: note = Seed: ARGVGKSAL (KRAS G12R)
LRGLGKSAN

SEQ ID NO: 13584 - protein, 9 aa, synthetic construct
  source 1..9: note = Seed: ARGVGKSAL (KRAS G12R)
LRGLGKSAP

SEQ ID NO: 13585 - protein, 9 aa, synthetic construct
  source 1..9: note = Seed: ARGVGKSAL (KRAS G12R)
LRGLGKSAQ

SEQ ID NO: 13586 - protein, 9 aa, synthetic construct
  source 1..9: note = Seed: ARGVGKSAL (KRAS G12R)
LRGLGKSAR

SEQ ID NO: 13587 - protein, 9 aa, synthetic construct
  source 1..9: note = Seed: ARGVGKSAL (KRAS G12R)
LRGLGKSAS

SEQ ID NO: 13588 - protein, 9 aa, synthetic construct
  source 1..9: note = Seed: ARGVGKSAL (KRAS G12R)
LRGLGKSAT

SEQ ID NO: 13589 - protein, 9 aa, synthetic construct
  source 1..9: note = Seed: ARGVGKSAL (KRAS G12R)
LRGLGKSAV

SEQ ID NO: 13590 - protein, 9 aa, synthetic construct
  source 1..9: note = Seed: ARGVGKSAL (KRAS G12R)
LRGLGKSAW

SEQ ID NO: 13591 - protein, 9 aa, synthetic construct
  source 1..9: note = Seed: ARGVGKSAL (KRAS G12R)
LRGLGKSAY

SEQ ID NO: 13592 - protein, 9 aa, synthetic construct
  source 1..9: note = Seed: ARGVGKSAL (KRAS G12R)
LRGLGRSAA

SEQ ID NO: 13593 - protein, 9 aa, synthetic construct
  source 1..9: note = Seed: ARGVGKSAL (KRAS G12R)
LRGLGRSAC

SEQ ID NO: 13594 - protein, 9 aa, synthetic construct
  source 1..9: note = Seed: ARGVGKSAL (KRAS G12R)
LRGLGRSAE

SEQ ID NO: 13595 - protein, 9 aa, synthetic construct
  source 1..9: note = Seed: ARGVGKSAL (KRAS G12R)
LRGLGRSAF

SEQ ID NO: 13596 - protein, 9 aa, synthetic construct
  source 1..9: note = Seed: ARGVGKSAL (KRAS G12R)
LRGLGRSAG

SEQ ID NO: 13597 - protein, 9 aa, synthetic construct
  source 1..9: note = Seed: ARGVGKSAL (KRAS G12R)
LRGLGRSAH

SEQ ID NO: 13598 - protein, 9 aa, synthetic construct
  source 1..9: note = Seed: ARGVGKSAL (KRAS G12R)
LRGLGRSAI

SEQ ID NO: 13599 - protein, 9 aa, synthetic construct
  source 1..9: note = Seed: ARGVGKSAL (KRAS G12R)
LRGLGRSAK

SEQ ID NO: 13600 - protein, 9 aa, synthetic construct
  source 1..9: note = Seed: ARGVGKSAL (KRAS G12R)
LRGLGRSAL

SEQ ID NO: 13601 - protein, 9 aa, synthetic construct
  source 1..9: note = Seed: ARGVGKSAL (KRAS G12R)
LRGLGRSAM

SEQ ID NO: 13602 - protein, 9 aa, synthetic construct
  source 1..9: note = Seed: ARGVGKSAL (KRAS G12R)
LRGLGRSAN

SEQ ID NO: 13603 - protein, 9 aa, synthetic construct
  source 1..9: note = Seed: ARGVGKSAL (KRAS G12R)
LRGLGRSAP

SEQ ID NO: 13604 - protein, 9 aa, synthetic construct
  source 1..9: note = Seed: ARGVGKSAL (KRAS G12R)
LRGLGRSAQ

SEQ ID NO: 13605 - protein, 9 aa, synthetic construct
  source 1..9: note = Seed: ARGVGKSAL (KRAS G12R)
LRGLGRSAR

SEQ ID NO: 13606 - protein, 9 aa, synthetic construct
  source 1..9: note = Seed: ARGVGKSAL (KRAS G12R)
LRGLGRSAS

SEQ ID NO: 13607 - protein, 9 aa, synthetic construct
  source 1..9: note = Seed: ARGVGKSAL (KRAS G12R)
LRGLGRSAT

SEQ ID NO: 13608 - protein, 9 aa, synthetic construct
  source 1..9: note = Seed: ARGVGKSAL (KRAS G12R)
LRGLGRSAV

SEQ ID NO: 13609 - protein, 9 aa, synthetic construct
  source 1..9: note = Seed: ARGVGKSAL (KRAS G12R)
LRGLGRSAW

SEQ ID NO: 13610 - protein, 9 aa, synthetic construct
  source 1..9: note = Seed: ARGVGKSAL (KRAS G12R)
LRGLGRSAY

SEQ ID NO: 13611 - protein, 9 aa, synthetic construct
  source 1..9: note = Seed: ARGVGKSAL (KRAS G12R)
LRGMGISAA

SEQ ID NO: 13612 - protein, 9 aa, synthetic construct
  source 1..9: note = Seed: ARGVGKSAL (KRAS G12R)
LRGMGISAS

SEQ ID NO: 13613 - protein, 9 aa, synthetic construct
  source 1..9: note = Seed: ARGVGKSAL (KRAS G12R)
LRGMGKSAA

SEQ ID NO: 13614 - protein, 9 aa, synthetic construct
  source 1..9: note = Seed: ARGVGKSAL (KRAS G12R)
LRGMGKSAF

SEQ ID NO: 13615 - protein, 9 aa, synthetic construct
  source 1..9: note = Seed: ARGVGKSAL (KRAS G12R)
LRGMGKSAG

SEQ ID NO: 13616 - protein, 9 aa, synthetic construct
  source 1..9: note = Seed: ARGVGKSAL (KRAS G12R)
LRGMGKSAH

SEQ ID NO: 13617 - protein, 9 aa, synthetic construct
  source 1..9: note = Seed: ARGVGKSAL (KRAS G12R)
LRGMGKSAI

SEQ ID NO: 13618 - protein, 9 aa, synthetic construct
  source 1..9: note = Seed: ARGVGKSAL (KRAS G12R)
LRGMGKSAK

SEQ ID NO: 13619 - protein, 9 aa, synthetic construct
  source 1..9: note = Seed: ARGVGKSAL (KRAS G12R)
LRGMGKSAL

SEQ ID NO: 13620 - protein, 9 aa, synthetic construct
  source 1..9: note = Seed: ARGVGKSAL (KRAS G12R)
LRGMGKSAM

SEQ ID NO: 13621 - protein, 9 aa, synthetic construct
  source 1..9: note = Seed: ARGVGKSAL (KRAS G12R)
LRGMGKSAN

SEQ ID NO: 13622 - protein, 9 aa, synthetic construct
  source 1..9: note = Seed: ARGVGKSAL (KRAS G12R)
LRGMGKSAQ

SEQ ID NO: 13623 - protein, 9 aa, synthetic construct
  source 1..9: note = Seed: ARGVGKSAL (KRAS G12R)
LRGMGKSAR

SEQ ID NO: 13624 - protein, 9 aa, synthetic construct
  source 1..9: note = Seed: ARGVGKSAL (KRAS G12R)
LRGMGKSAS

SEQ ID NO: 13625 - protein, 9 aa, synthetic construct
  source 1..9: note = Seed: ARGVGKSAL (KRAS G12R)
LRGMGKSAT

SEQ ID NO: 13626 - protein, 9 aa, synthetic construct
  source 1..9: note = Seed: ARGVGKSAL (KRAS G12R)
LRGMGKSAV

SEQ ID NO: 13627 - protein, 9 aa, synthetic construct
  source 1..9: note = Seed: ARGVGKSAL (KRAS G12R)
LRGMGKSAW

SEQ ID NO: 13628 - protein, 9 aa, synthetic construct
  source 1..9: note = Seed: ARGVGKSAL (KRAS G12R)
LRGMGKSAY

SEQ ID NO: 13629 - protein, 9 aa, synthetic construct
  source 1..9: note = Seed: ARGVGKSAL (KRAS G12R)
LRGMGRSAA

SEQ ID NO: 13630 - protein, 9 aa, synthetic construct
  source 1..9: note = Seed: ARGVGKSAL (KRAS G12R)
LRGMGRSAC

SEQ ID NO: 13631 - protein, 9 aa, synthetic construct
  source 1..9: note = Seed: ARGVGKSAL (KRAS G12R)
LRGMGRSAF

SEQ ID NO: 13632 - protein, 9 aa, synthetic construct
  source 1..9: note = Seed: ARGVGKSAL (KRAS G12R)
LRGMGRSAG

SEQ ID NO: 13633 - protein, 9 aa, synthetic construct
  source 1..9: note = Seed: ARGVGKSAL (KRAS G12R)
LRGMGRSAH

SEQ ID NO: 13634 - protein, 9 aa, synthetic construct
  source 1..9: note = Seed: ARGVGKSAL (KRAS G12R)
LRGMGRSAI

SEQ ID NO: 13635 - protein, 9 aa, synthetic construct
  source 1..9: note = Seed: ARGVGKSAL (KRAS G12R)
LRGMGRSAK

SEQ ID NO: 13636 - protein, 9 aa, synthetic construct
  source 1..9: note = Seed: ARGVGKSAL (KRAS G12R)
LRGMGRSAL

SEQ ID NO: 13637 - protein, 9 aa, synthetic construct
  source 1..9: note = Seed: ARGVGKSAL (KRAS G12R)
LRGMGRSAM

SEQ ID NO: 13638 - protein, 9 aa, synthetic construct
  source 1..9: note = Seed: ARGVGKSAL (KRAS G12R)
LRGMGRSAN

SEQ ID NO: 13639 - protein, 9 aa, synthetic construct
  source 1..9: note = Seed: ARGVGKSAL (KRAS G12R)
LRGMGRSAP

SEQ ID NO: 13640 - protein, 9 aa, synthetic construct
  source 1..9: note = Seed: ARGVGKSAL (KRAS G12R)
LRGMGRSAQ

SEQ ID NO: 13641 - protein, 9 aa, synthetic construct
  source 1..9: note = Seed: ARGVGKSAL (KRAS G12R)
LRGMGRSAR

SEQ ID NO: 13642 - protein, 9 aa, synthetic construct
  source 1..9: note = Seed: ARGVGKSAL (KRAS G12R)
LRGMGRSAS

SEQ ID NO: 13643 - protein, 9 aa, synthetic construct
  source 1..9: note = Seed: ARGVGKSAL (KRAS G12R)
LRGMGRSAT

SEQ ID NO: 13644 - protein, 9 aa, synthetic construct
  source 1..9: note = Seed: ARGVGKSAL (KRAS G12R)
LRGMGRSAV

SEQ ID NO: 13645 - protein, 9 aa, synthetic construct
  source 1..9: note = Seed: ARGVGKSAL (KRAS G12R)
LRGMGRSAW

SEQ ID NO: 13646 - protein, 9 aa, synthetic construct
  source 1..9: note = Seed: ARGVGKSAL (KRAS G12R)
LRGMGRSAY

SEQ ID NO: 13647 - protein, 9 aa, synthetic construct
  source 1..9: note = Seed: ARGVGKSAL (KRAS G12R)
LRGMGVSAA

SEQ ID NO: 13648 - protein, 9 aa, synthetic construct
  source 1..9: note = Seed: ARGVGKSAL (KRAS G12R)
LRGNGASAA

SEQ ID NO: 13649 - protein, 9 aa, synthetic construct
  source 1..9: note = Seed: ARGVGKSAL (KRAS G12R)
LRGNGISAA

SEQ ID NO: 13650 - protein, 9 aa, synthetic construct
  source 1..9: note = Seed: ARGVGKSAL (KRAS G12R)
LRGNGRSAR

SEQ ID NO: 13651 - protein, 9 aa, synthetic construct
  source 1..9: note = Seed: ARGVGKSAL (KRAS G12R)
LRGNGVSAA

SEQ ID NO: 13652 - protein, 9 aa, synthetic construct
  source 1..9: note = Seed: ARGVGKSAL (KRAS G12R)
LRGQGKSAR

SEQ ID NO: 13653 - protein, 9 aa, synthetic construct
  source 1..9: note = Seed: ARGVGKSAL (KRAS G12R)
LRGQGRSAA

SEQ ID NO: 13654 - protein, 9 aa, synthetic construct
  source 1..9: note = Seed: ARGVGKSAL (KRAS G12R)
LRGQGRSAF

SEQ ID NO: 13655 - protein, 9 aa, synthetic construct
  source 1..9: note = Seed: ARGVGKSAL (KRAS G12R)
LRGQGRSAI

SEQ ID NO: 13656 - protein, 9 aa, synthetic construct
  source 1..9: note = Seed: ARGVGKSAL (KRAS G12R)
LRGQGRSAK

SEQ ID NO: 13657 - protein, 9 aa, synthetic construct
  source 1..9: note = Seed: ARGVGKSAL (KRAS G12R)
LRGQGRSAL

SEQ ID NO: 13658 - protein, 9 aa, synthetic construct
  source 1..9: note = Seed: ARGVGKSAL (KRAS G12R)
LRGQGRSAM

SEQ ID NO: 13659 - protein, 9 aa, synthetic construct
  source 1..9: note = Seed: ARGVGKSAL (KRAS G12R)
LRGQGRSAR

SEQ ID NO: 13660 - protein, 9 aa, synthetic construct
  source 1..9: note = Seed: ARGVGKSAL (KRAS G12R)
LRGQGRSAS

SEQ ID NO: 13661 - protein, 9 aa, synthetic construct
  source 1..9: note = Seed: ARGVGKSAL (KRAS G12R)
LRGQGRSAV

SEQ ID NO: 13662 - protein, 9 aa, synthetic construct
  source 1..9: note = Seed: ARGVGKSAL (KRAS G12R)
LRGQGRSAY

SEQ ID NO: 13663 - protein, 9 aa, synthetic construct
  source 1..9: note = Seed: ARGVGKSAL (KRAS G12R)
LRGRGISAR

SEQ ID NO: 13664 - protein, 9 aa, synthetic construct
  source 1..9: note = Seed: ARGVGKSAL (KRAS G12R)
LRGRGKSAA

SEQ ID NO: 13665 - protein, 9 aa, synthetic construct
  source 1..9: note = Seed: ARGVGKSAL (KRAS G12R)
LRGRGKSAF

SEQ ID NO: 13666 - protein, 9 aa, synthetic construct
  source 1..9: note = Seed: ARGVGKSAL (KRAS G12R)
LRGRGKSAI

SEQ ID NO: 13667 - protein, 9 aa, synthetic construct
  source 1..9: note = Seed: ARGVGKSAL (KRAS G12R)
LRGRGKSAK

SEQ ID NO: 13668 - protein, 9 aa, synthetic construct
  source 1..9: note = Seed: ARGVGKSAL (KRAS G12R)
LRGRGKSAL

SEQ ID NO: 13669 - protein, 9 aa, synthetic construct
  source 1..9: note = Seed: ARGVGKSAL (KRAS G12R)
LRGRGKSAM

SEQ ID NO: 13670 - protein, 9 aa, synthetic construct
  source 1..9: note = Seed: ARGVGKSAL (KRAS G12R)
LRGRGKSAR

SEQ ID NO: 13671 - protein, 9 aa, synthetic construct
  source 1..9: note = Seed: ARGVGKSAL (KRAS G12R)
LRGRGKSAV

SEQ ID NO: 13672 - protein, 9 aa, synthetic construct
  source 1..9: note = Seed: ARGVGKSAL (KRAS G12R)
LRGRGKSAY

SEQ ID NO: 13673 - protein, 9 aa, synthetic construct
  source 1..9: note = Seed: ARGVGKSAL (KRAS G12R)
LRGRGRSAA

SEQ ID NO: 13674 - protein, 9 aa, synthetic construct
  source 1..9: note = Seed: ARGVGKSAL (KRAS G12R)
LRGRGRSAF

SEQ ID NO: 13675 - protein, 9 aa, synthetic construct
  source 1..9: note = Seed: ARGVGKSAL (KRAS G12R)
LRGRGRSAG

SEQ ID NO: 13676 - protein, 9 aa, synthetic construct
  source 1..9: note = Seed: ARGVGKSAL (KRAS G12R)
LRGRGRSAH

SEQ ID NO: 13677 - protein, 9 aa, synthetic construct
  source 1..9: note = Seed: ARGVGKSAL (KRAS G12R)
LRGRGRSAI

SEQ ID NO: 13678 - protein, 9 aa, synthetic construct
  source 1..9: note = Seed: ARGVGKSAL (KRAS G12R)
LRGRGRSAK

SEQ ID NO: 13679 - protein, 9 aa, synthetic construct
  source 1..9: note = Seed: ARGVGKSAL (KRAS G12R)
LRGRGRSAL

SEQ ID NO: 13680 - protein, 9 aa, synthetic construct
  source 1..9: note = Seed: ARGVGKSAL (KRAS G12R)
LRGRGRSAM

SEQ ID NO: 13681 - protein, 9 aa, synthetic construct
  source 1..9: note = Seed: ARGVGKSAL (KRAS G12R)
LRGRGRSAN

SEQ ID NO: 13682 - protein, 9 aa, synthetic construct
  source 1..9: note = Seed: ARGVGKSAL (KRAS G12R)
LRGRGRSAQ

SEQ ID NO: 13683 - protein, 9 aa, synthetic construct
  source 1..9: note = Seed: ARGVGKSAL (KRAS G12R)
LRGRGRSAR

SEQ ID NO: 13684 - protein, 9 aa, synthetic construct
  source 1..9: note = Seed: ARGVGKSAL (KRAS G12R)
LRGRGRSAS

SEQ ID NO: 13685 - protein, 9 aa, synthetic construct
  source 1..9: note = Seed: ARGVGKSAL (KRAS G12R)
LRGRGRSAT

SEQ ID NO: 13686 - protein, 9 aa, synthetic construct
  source 1..9: note = Seed: ARGVGKSAL (KRAS G12R)
LRGRGRSAV

SEQ ID NO: 13687 - protein, 9 aa, synthetic construct
  source 1..9: note = Seed: ARGVGKSAL (KRAS G12R)
LRGRGRSAW

SEQ ID NO: 13688 - protein, 9 aa, synthetic construct
  source 1..9: note = Seed: ARGVGKSAL (KRAS G12R)
LRGRGRSAY

SEQ ID NO: 13689 - protein, 9 aa, synthetic construct
  source 1..9: note = Seed: ARGVGKSAL (KRAS G12R)
LRGRGVSAR

SEQ ID NO: 13690 - protein, 9 aa, synthetic construct
  source 1..9: note = Seed: ARGVGKSAL (KRAS G12R)
LRGSGASAA

SEQ ID NO: 13691 - protein, 9 aa, synthetic construct
  source 1..9: note = Seed: ARGVGKSAL (KRAS G12R)
LRGSGASAG

SEQ ID NO: 13692 - protein, 9 aa, synthetic construct
  source 1..9: note = Seed: ARGVGKSAL (KRAS G12R)
LRGSGASAI

SEQ ID NO: 13693 - protein, 9 aa, synthetic construct
  source 1..9: note = Seed: ARGVGKSAL (KRAS G12R)
LRGSGASAS

SEQ ID NO: 13694 - protein, 9 aa, synthetic construct
  source 1..9: note = Seed: ARGVGKSAL (KRAS G12R)
LRGSGASAV

SEQ ID NO: 13695 - protein, 9 aa, synthetic construct
  source 1..9: note = Seed: ARGVGKSAL (KRAS G12R)
LRGSGISAA

SEQ ID NO: 13696 - protein, 9 aa, synthetic construct
  source 1..9: note = Seed: ARGVGKSAL (KRAS G12R)
LRGSGISAG

SEQ ID NO: 13697 - protein, 9 aa, synthetic construct
  source 1..9: note = Seed: ARGVGKSAL (KRAS G12R)
LRGSGISAH

SEQ ID NO: 13698 - protein, 9 aa, synthetic construct
  source 1..9: note = Seed: ARGVGKSAL (KRAS G12R)
LRGSGISAI

SEQ ID NO: 13699 - protein, 9 aa, synthetic construct
  source 1..9: note = Seed: ARGVGKSAL (KRAS G12R)
LRGSGISAM

SEQ ID NO: 13700 - protein, 9 aa, synthetic construct
  source 1..9: note = Seed: ARGVGKSAL (KRAS G12R)
LRGSGISAS

SEQ ID NO: 13701 - protein, 9 aa, synthetic construct
  source 1..9: note = Seed: ARGVGKSAL (KRAS G12R)
LRGSGISAT

SEQ ID NO: 13702 - protein, 9 aa, synthetic construct
  source 1..9: note = Seed: ARGVGKSAL (KRAS G12R)
LRGSGISAV

SEQ ID NO: 13703 - protein, 9 aa, synthetic construct
  source 1..9: note = Seed: ARGVGKSAL (KRAS G12R)
LRGSGLSAA

SEQ ID NO: 13704 - protein, 9 aa, synthetic construct
  source 1..9: note = Seed: ARGVGKSAL (KRAS G12R)
LRGSGLSAS

SEQ ID NO: 13705 - protein, 9 aa, synthetic construct
  source 1..9: note = Seed: ARGVGKSAL (KRAS G12R)
LRGSGMSAA

SEQ ID NO: 13706 - protein, 9 aa, synthetic construct
  source 1..9: note = Seed: ARGVGKSAL (KRAS G12R)
LRGSGMSAS

SEQ ID NO: 13707 - protein, 9 aa, synthetic construct
  source 1..9: note = Seed: ARGVGKSAL (KRAS G12R)
LRGSGNSAA

SEQ ID NO: 13708 - protein, 9 aa, synthetic construct
  source 1..9: note = Seed: ARGVGKSAL (KRAS G12R)
LRGSGPSAA

SEQ ID NO: 13709 - protein, 9 aa, synthetic construct
  source 1..9: note = Seed: ARGVGKSAL (KRAS G12R)
LRGSGRSAL

SEQ ID NO: 13710 - protein, 9 aa, synthetic construct
  source 1..9: note = Seed: ARGVGKSAL (KRAS G12R)
LRGSGRSAR

SEQ ID NO: 13711 - protein, 9 aa, synthetic construct
  source 1..9: note = Seed: ARGVGKSAL (KRAS G12R)
LRGSGRSAY

SEQ ID NO: 13712 - protein, 9 aa, synthetic construct
  source 1..9: note = Seed: ARGVGKSAL (KRAS G12R)
LRGSGSSAA

SEQ ID NO: 13713 - protein, 9 aa, synthetic construct
  source 1..9: note = Seed: ARGVGKSAL (KRAS G12R)
LRGSGTSAA

SEQ ID NO: 13714 - protein, 9 aa, synthetic construct
  source 1..9: note = Seed: ARGVGKSAL (KRAS G12R)
LRGSGVSAA

SEQ ID NO: 13715 - protein, 9 aa, synthetic construct
  source 1..9: note = Seed: ARGVGKSAL (KRAS G12R)
LRGSGVSAG

SEQ ID NO: 13716 - protein, 9 aa, synthetic construct
  source 1..9: note = Seed: ARGVGKSAL (KRAS G12R)
LRGSGVSAM

SEQ ID NO: 13717 - protein, 9 aa, synthetic construct
  source 1..9: note = Seed: ARGVGKSAL (KRAS G12R)
LRGSGVSAS

SEQ ID NO: 13718 - protein, 9 aa, synthetic construct
  source 1..9: note = Seed: ARGVGKSAL (KRAS G12R)
LRGSGVSAT

SEQ ID NO: 13719 - protein, 9 aa, synthetic construct
  source 1..9: note = Seed: ARGVGKSAL (KRAS G12R)
LRGSGVSAV

SEQ ID NO: 13720 - protein, 9 aa, synthetic construct
  source 1..9: note = Seed: ARGVGKSAL (KRAS G12R)
LRGTGASAA

SEQ ID NO: 13721 - protein, 9 aa, synthetic construct
  source 1..9: note = Seed: ARGVGKSAL (KRAS G12R)
LRGTGISAA

SEQ ID NO: 13722 - protein, 9 aa, synthetic construct
  source 1..9: note = Seed: ARGVGKSAL (KRAS G12R)
LRGTGISAS

SEQ ID NO: 13723 - protein, 9 aa, synthetic construct
  source 1..9: note = Seed: ARGVGKSAL (KRAS G12R)
LRGTGRSAR

SEQ ID NO: 13724 - protein, 9 aa, synthetic construct
  source 1..9: note = Seed: ARGVGKSAL (KRAS G12R)
LRGTGVSAA

SEQ ID NO: 13725 - protein, 9 aa, synthetic construct
  source 1..9: note = Seed: ARGVGKSAL (KRAS G12R)
LRGTGVSAS

SEQ ID NO: 13726 - protein, 9 aa, synthetic construct
  source 1..9: note = Seed: ARGVGKSAL (KRAS G12R)
LRGVGISAA

SEQ ID NO: 13727 - protein, 9 aa, synthetic construct
  source 1..9: note = Seed: ARGVGKSAL (KRAS G12R)
LRGVGISAS

SEQ ID NO: 13728 - protein, 9 aa, synthetic construct
  source 1..9: note = Seed: ARGVGKSAL (KRAS G12R)
LRGVGKSAA

SEQ ID NO: 13729 - protein, 9 aa, synthetic construct
  source 1..9: note = Seed: ARGVGKSAL (KRAS G12R)
LRGVGKSAF

SEQ ID NO: 13730 - protein, 9 aa, synthetic construct
  source 1..9: note = Seed: ARGVGKSAL (KRAS G12R)
LRGVGKSAH

SEQ ID NO: 13731 - protein, 9 aa, synthetic construct
  source 1..9: note = Seed: ARGVGKSAL (KRAS G12R)
LRGVGKSAI

SEQ ID NO: 13732 - protein, 9 aa, synthetic construct
  source 1..9: note = Seed: ARGVGKSAL (KRAS G12R)
LRGVGKSAK

SEQ ID NO: 13733 - protein, 9 aa, synthetic construct
  source 1..9: note = Seed: ARGVGKSAL (KRAS G12R)
LRGVGKSAL

SEQ ID NO: 13734 - protein, 9 aa, synthetic construct
  source 1..9: note = Seed: ARGVGKSAL (KRAS G12R)
LRGVGKSAM

SEQ ID NO: 13735 - protein, 9 aa, synthetic construct
  source 1..9: note = Seed: ARGVGKSAL (KRAS G12R)
LRGVGKSAQ

SEQ ID NO: 13736 - protein, 9 aa, synthetic construct
  source 1..9: note = Seed: ARGVGKSAL (KRAS G12R)
LRGVGKSAR

SEQ ID NO: 13737 - protein, 9 aa, synthetic construct
  source 1..9: note = Seed: ARGVGKSAL (KRAS G12R)
LRGVGKSAS

SEQ ID NO: 13738 - protein, 9 aa, synthetic construct
  source 1..9: note = Seed: ARGVGKSAL (KRAS G12R)
LRGVGKSAT

SEQ ID NO: 13739 - protein, 9 aa, synthetic construct
  source 1..9: note = Seed: ARGVGKSAL (KRAS G12R)
LRGVGKSAV

SEQ ID NO: 13740 - protein, 9 aa, synthetic construct
  source 1..9: note = Seed: ARGVGKSAL (KRAS G12R)
LRGVGKSAY

SEQ ID NO: 13741 - protein, 9 aa, synthetic construct
  source 1..9: note = Seed: ARGVGKSAL (KRAS G12R)
LRGVGRSAA

SEQ ID NO: 13742 - protein, 9 aa, synthetic construct
  source 1..9: note = Seed: ARGVGKSAL (KRAS G12R)
LRGVGRSAF

SEQ ID NO: 13743 - protein, 9 aa, synthetic construct
  source 1..9: note = Seed: ARGVGKSAL (KRAS G12R)
LRGVGRSAG

SEQ ID NO: 13744 - protein, 9 aa, synthetic construct
  source 1..9: note = Seed: ARGVGKSAL (KRAS G12R)
LRGVGRSAH

SEQ ID NO: 13745 - protein, 9 aa, synthetic construct
  source 1..9: note = Seed: ARGVGKSAL (KRAS G12R)
LRGVGRSAI

SEQ ID NO: 13746 - protein, 9 aa, synthetic construct
  source 1..9: note = Seed: ARGVGKSAL (KRAS G12R)
LRGVGRSAK

SEQ ID NO: 13747 - protein, 9 aa, synthetic construct
  source 1..9: note = Seed: ARGVGKSAL (KRAS G12R)
LRGVGRSAL

SEQ ID NO: 13748 - protein, 9 aa, synthetic construct
  source 1..9: note = Seed: ARGVGKSAL (KRAS G12R)
LRGVGRSAM

SEQ ID NO: 13749 - protein, 9 aa, synthetic construct
  source 1..9: note = Seed: ARGVGKSAL (KRAS G12R)
LRGVGRSAN

SEQ ID NO: 13750 - protein, 9 aa, synthetic construct
  source 1..9: note = Seed: ARGVGKSAL (KRAS G12R)
LRGVGRSAQ

SEQ ID NO: 13751 - protein, 9 aa, synthetic construct
  source 1..9: note = Seed: ARGVGKSAL (KRAS G12R)
LRGVGRSAR

SEQ ID NO: 13752 - protein, 9 aa, synthetic construct
  source 1..9: note = Seed: ARGVGKSAL (KRAS G12R)
LRGVGRSAS

SEQ ID NO: 13753 - protein, 9 aa, synthetic construct
  source 1..9: note = Seed: ARGVGKSAL (KRAS G12R)
LRGVGRSAT

SEQ ID NO: 13754 - protein, 9 aa, synthetic construct
  source 1..9: note = Seed: ARGVGKSAL (KRAS G12R)
LRGVGRSAV

SEQ ID NO: 13755 - protein, 9 aa, synthetic construct
  source 1..9: note = Seed: ARGVGKSAL (KRAS G12R)
LRGVGRSAW

SEQ ID NO: 13756 - protein, 9 aa, synthetic construct
  source 1..9: note = Seed: ARGVGKSAL (KRAS G12R)
LRGVGRSAY

SEQ ID NO: 13757 - protein, 9 aa, synthetic construct
  source 1..9: note = Seed: ARGVGKSAL (KRAS G12R)
LRGVGVSAA

SEQ ID NO: 13758 - protein, 9 aa, synthetic construct
  source 1..9: note = Seed: ARGVGKSAL (KRAS G12R)
LRGWGASAR

SEQ ID NO: 13759 - protein, 9 aa, synthetic construct
  source 1..9: note = Seed: ARGVGKSAL (KRAS G12R)
LRGWGKSAF

SEQ ID NO: 13760 - protein, 9 aa, synthetic construct
  source 1..9: note = Seed: ARGVGKSAL (KRAS G12R)
LRGWGKSAI

SEQ ID NO: 13761 - protein, 9 aa, synthetic construct
  source 1..9: note = Seed: ARGVGKSAL (KRAS G12R)
LRGWGKSAK

SEQ ID NO: 13762 - protein, 9 aa, synthetic construct
  source 1..9: note = Seed: ARGVGKSAL (KRAS G12R)
LRGWGKSAL

SEQ ID NO: 13763 - protein, 9 aa, synthetic construct
  source 1..9: note = Seed: ARGVGKSAL (KRAS G12R)
LRGWGKSAM

SEQ ID NO: 13764 - protein, 9 aa, synthetic construct
  source 1..9: note = Seed: ARGVGKSAL (KRAS G12R)
LRGWGKSAR

SEQ ID NO: 13765 - protein, 9 aa, synthetic construct
  source 1..9: note = Seed: ARGVGKSAL (KRAS G12R)
LRGWGKSAV

SEQ ID NO: 13766 - protein, 9 aa, synthetic construct
  source 1..9: note = Seed: ARGVGKSAL (KRAS G12R)
LRGWGKSAY

SEQ ID NO: 13767 - protein, 9 aa, synthetic construct
  source 1..9: note = Seed: ARGVGKSAL (KRAS G12R)
LRGWGRSAA

SEQ ID NO: 13768 - protein, 9 aa, synthetic construct
  source 1..9: note = Seed: ARGVGKSAL (KRAS G12R)
LRGWGRSAF

SEQ ID NO: 13769 - protein, 9 aa, synthetic construct
  source 1..9: note = Seed: ARGVGKSAL (KRAS G12R)
LRGWGRSAH

SEQ ID NO: 13770 - protein, 9 aa, synthetic construct
  source 1..9: note = Seed: ARGVGKSAL (KRAS G12R)
LRGWGRSAI

SEQ ID NO: 13771 - protein, 9 aa, synthetic construct
  source 1..9: note = Seed: ARGVGKSAL (KRAS G12R)
LRGWGRSAK

SEQ ID NO: 13772 - protein, 9 aa, synthetic construct
  source 1..9: note = Seed: ARGVGKSAL (KRAS G12R)
LRGWGRSAL

SEQ ID NO: 13773 - protein, 9 aa, synthetic construct
  source 1..9: note = Seed: ARGVGKSAL (KRAS G12R)
LRGWGRSAM

SEQ ID NO: 13774 - protein, 9 aa, synthetic construct
  source 1..9: note = Seed: ARGVGKSAL (KRAS G12R)
LRGWGRSAQ

SEQ ID NO: 13775 - protein, 9 aa, synthetic construct
  source 1..9: note = Seed: ARGVGKSAL (KRAS G12R)
LRGWGRSAR

SEQ ID NO: 13776 - protein, 9 aa, synthetic construct
  source 1..9: note = Seed: ARGVGKSAL (KRAS G12R)
LRGWGRSAS

SEQ ID NO: 13777 - protein, 9 aa, synthetic construct
  source 1..9: note = Seed: ARGVGKSAL (KRAS G12R)
LRGWGRSAV

SEQ ID NO: 13778 - protein, 9 aa, synthetic construct
  source 1..9: note = Seed: ARGVGKSAL (KRAS G12R)
LRGWGRSAY

SEQ ID NO: 13779 - protein, 9 aa, synthetic construct
  source 1..9: note = Seed: ARGVGKSAL (KRAS G12R)
LRGYGISAR

SEQ ID NO: 13780 - protein, 9 aa, synthetic construct
  source 1..9: note = Seed: ARGVGKSAL (KRAS G12R)
LRGYGKSAF

SEQ ID NO: 13781 - protein, 9 aa, synthetic construct
  source 1..9: note = Seed: ARGVGKSAL (KRAS G12R)
LRGYGKSAI

SEQ ID NO: 13782 - protein, 9 aa, synthetic construct
  source 1..9: note = Seed: ARGVGKSAL (KRAS G12R)
LRGYGKSAK

SEQ ID NO: 13783 - protein, 9 aa, synthetic construct
  source 1..9: note = Seed: ARGVGKSAL (KRAS G12R)
LRGYGKSAL

SEQ ID NO: 13784 - protein, 9 aa, synthetic construct
  source 1..9: note = Seed: ARGVGKSAL (KRAS G12R)
LRGYGKSAM

SEQ ID NO: 13785 - protein, 9 aa, synthetic construct
  source 1..9: note = Seed: ARGVGKSAL (KRAS G12R)
LRGYGKSAR

SEQ ID NO: 13786 - protein, 9 aa, synthetic construct
  source 1..9: note = Seed: ARGVGKSAL (KRAS G12R)
LRGYGKSAY

SEQ ID NO: 13787 - protein, 9 aa, synthetic construct
  source 1..9: note = Seed: ARGVGKSAL (KRAS G12R)
LRGYGLSAR

SEQ ID NO: 13788 - protein, 9 aa, synthetic construct
  source 1..9: note = Seed: ARGVGKSAL (KRAS G12R)
LRGYGRSAA

SEQ ID NO: 13789 - protein, 9 aa, synthetic construct
  source 1..9: note = Seed: ARGVGKSAL (KRAS G12R)
LRGYGRSAF

SEQ ID NO: 13790 - protein, 9 aa, synthetic construct
  source 1..9: note = Seed: ARGVGKSAL (KRAS G12R)
LRGYGRSAH

SEQ ID NO: 13791 - protein, 9 aa, synthetic construct
  source 1..9: note = Seed: ARGVGKSAL (KRAS G12R)
LRGYGRSAI

SEQ ID NO: 13792 - protein, 9 aa, synthetic construct
  source 1..9: note = Seed: ARGVGKSAL (KRAS G12R)
LRGYGRSAK

SEQ ID NO: 13793 - protein, 9 aa, synthetic construct
  source 1..9: note = Seed: ARGVGKSAL (KRAS G12R)
LRGYGRSAL

SEQ ID NO: 13794 - protein, 9 aa, synthetic construct
  source 1..9: note = Seed: ARGVGKSAL (KRAS G12R)
LRGYGRSAM

SEQ ID NO: 13795 - protein, 9 aa, synthetic construct
  source 1..9: note = Seed: ARGVGKSAL (KRAS G12R)
LRGYGRSAR

SEQ ID NO: 13796 - protein, 9 aa, synthetic construct
  source 1..9: note = Seed: ARGVGKSAL (KRAS G12R)
LRGYGRSAS

SEQ ID NO: 13797 - protein, 9 aa, synthetic construct
  source 1..9: note = Seed: ARGVGKSAL (KRAS G12R)
LRGYGRSAV

SEQ ID NO: 13798 - protein, 9 aa, synthetic construct
  source 1..9: note = Seed: ARGVGKSAL (KRAS G12R)
LRGYGRSAW

SEQ ID NO: 13799 - protein, 9 aa, synthetic construct
  source 1..9: note = Seed: ARGVGKSAL (KRAS G12R)
LRGYGRSAY

SEQ ID NO: 13800 - protein, 9 aa, synthetic construct
  source 1..9: note = Seed: ARGVGKSAL (KRAS G12R)
LRGYGVSAR

SEQ ID NO: 13801 - protein, 9 aa, synthetic construct
  source 1..9: note = Seed: ARGVGKSAL (KRAS G12R)
MRGAGASAA

SEQ ID NO: 13802 - protein, 9 aa, synthetic construct
  source 1..9: note = Seed: ARGVGKSAL (KRAS G12R)
MRGAGASAG

SEQ ID NO: 13803 - protein, 9 aa, synthetic construct
  source 1..9: note = Seed: ARGVGKSAL (KRAS G12R)
MRGAGASAH

SEQ ID NO: 13804 - protein, 9 aa, synthetic construct
  source 1..9: note = Seed: ARGVGKSAL (KRAS G12R)
MRGAGASAI

SEQ ID NO: 13805 - protein, 9 aa, synthetic construct
  source 1..9: note = Seed: ARGVGKSAL (KRAS G12R)
MRGAGASAM

SEQ ID NO: 13806 - protein, 9 aa, synthetic construct
  source 1..9: note = Seed: ARGVGKSAL (KRAS G12R)
MRGAGASAS

SEQ ID NO: 13807 - protein, 9 aa, synthetic construct
  source 1..9: note = Seed: ARGVGKSAL (KRAS G12R)
MRGAGASAT

SEQ ID NO: 13808 - protein, 9 aa, synthetic construct
  source 1..9: note = Seed: ARGVGKSAL (KRAS G12R)
MRGAGASAV

SEQ ID NO: 13809 - protein, 9 aa, synthetic construct
  source 1..9: note = Seed: ARGVGKSAL (KRAS G12R)
MRGAGISAA

SEQ ID NO: 13810 - protein, 9 aa, synthetic construct
  source 1..9: note = Seed: ARGVGKSAL (KRAS G12R)
MRGAGISAG

SEQ ID NO: 13811 - protein, 9 aa, synthetic construct
  source 1..9: note = Seed: ARGVGKSAL (KRAS G12R)
MRGAGISAH

SEQ ID NO: 13812 - protein, 9 aa, synthetic construct
  source 1..9: note = Seed: ARGVGKSAL (KRAS G12R)
MRGAGISAI

SEQ ID NO: 13813 - protein, 9 aa, synthetic construct
  source 1..9: note = Seed: ARGVGKSAL (KRAS G12R)
MRGAGISAL

SEQ ID NO: 13814 - protein, 9 aa, synthetic construct
  source 1..9: note = Seed: ARGVGKSAL (KRAS G12R)
MRGAGISAM

SEQ ID NO: 13815 - protein, 9 aa, synthetic construct
  source 1..9: note = Seed: ARGVGKSAL (KRAS G12R)
MRGAGISAN

SEQ ID NO: 13816 - protein, 9 aa, synthetic construct
  source 1..9: note = Seed: ARGVGKSAL (KRAS G12R)
MRGAGISAQ

SEQ ID NO: 13817 - protein, 9 aa, synthetic construct
  source 1..9: note = Seed: ARGVGKSAL (KRAS G12R)
MRGAGISAS

SEQ ID NO: 13818 - protein, 9 aa, synthetic construct
  source 1..9: note = Seed: ARGVGKSAL (KRAS G12R)
MRGAGISAT

SEQ ID NO: 13819 - protein, 9 aa, synthetic construct
  source 1..9: note = Seed: ARGVGKSAL (KRAS G12R)
MRGAGISAV

SEQ ID NO: 13820 - protein, 9 aa, synthetic construct
  source 1..9: note = Seed: ARGVGKSAL (KRAS G12R)
MRGAGLSAA

SEQ ID NO: 13821 - protein, 9 aa, synthetic construct
  source 1..9: note = Seed: ARGVGKSAL (KRAS G12R)
MRGAGLSAG

SEQ ID NO: 13822 - protein, 9 aa, synthetic construct
  source 1..9: note = Seed: ARGVGKSAL (KRAS G12R)
MRGAGLSAS

SEQ ID NO: 13823 - protein, 9 aa, synthetic construct
  source 1..9: note = Seed: ARGVGKSAL (KRAS G12R)
MRGAGLSAT

SEQ ID NO: 13824 - protein, 9 aa, synthetic construct
  source 1..9: note = Seed: ARGVGKSAL (KRAS G12R)
MRGAGLSAV

SEQ ID NO: 13825 - protein, 9 aa, synthetic construct
  source 1..9: note = Seed: ARGVGKSAL (KRAS G12R)
MRGAGMSAA

SEQ ID NO: 13826 - protein, 9 aa, synthetic construct
  source 1..9: note = Seed: ARGVGKSAL (KRAS G12R)
MRGAGMSAG

SEQ ID NO: 13827 - protein, 9 aa, synthetic construct
  source 1..9: note = Seed: ARGVGKSAL (KRAS G12R)
MRGAGMSAM

SEQ ID NO: 13828 - protein, 9 aa, synthetic construct
  source 1..9: note = Seed: ARGVGKSAL (KRAS G12R)
MRGAGMSAS

SEQ ID NO: 13829 - protein, 9 aa, synthetic construct
  source 1..9: note = Seed: ARGVGKSAL (KRAS G12R)
MRGAGMSAV

SEQ ID NO: 13830 - protein, 9 aa, synthetic construct
  source 1..9: note = Seed: ARGVGKSAL (KRAS G12R)
MRGAGNSAA

SEQ ID NO: 13831 - protein, 9 aa, synthetic construct
  source 1..9: note = Seed: ARGVGKSAL (KRAS G12R)
MRGAGPSAA

SEQ ID NO: 13832 - protein, 9 aa, synthetic construct
  source 1..9: note = Seed: ARGVGKSAL (KRAS G12R)
MRGAGPSAS

SEQ ID NO: 13833 - protein, 9 aa, synthetic construct
  source 1..9: note = Seed: ARGVGKSAL (KRAS G12R)
MRGAGRSAR

SEQ ID NO: 13834 - protein, 9 aa, synthetic construct
  source 1..9: note = Seed: ARGVGKSAL (KRAS G12R)
MRGAGSSAA

SEQ ID NO: 13835 - protein, 9 aa, synthetic construct
  source 1..9: note = Seed: ARGVGKSAL (KRAS G12R)
MRGAGSSAS

SEQ ID NO: 13836 - protein, 9 aa, synthetic construct
  source 1..9: note = Seed: ARGVGKSAL (KRAS G12R)
MRGAGTSAA

SEQ ID NO: 13837 - protein, 9 aa, synthetic construct
  source 1..9: note = Seed: ARGVGKSAL (KRAS G12R)
MRGAGTSAS

SEQ ID NO: 13838 - protein, 9 aa, synthetic construct
  source 1..9: note = Seed: ARGVGKSAL (KRAS G12R)
MRGAGVSAA

SEQ ID NO: 13839 - protein, 9 aa, synthetic construct
  source 1..9: note = Seed: ARGVGKSAL (KRAS G12R)
MRGAGVSAG

SEQ ID NO: 13840 - protein, 9 aa, synthetic construct
  source 1..9: note = Seed: ARGVGKSAL (KRAS G12R)
MRGAGVSAH

SEQ ID NO: 13841 - protein, 9 aa, synthetic construct
  source 1..9: note = Seed: ARGVGKSAL (KRAS G12R)
MRGAGVSAI

SEQ ID NO: 13842 - protein, 9 aa, synthetic construct
  source 1..9: note = Seed: ARGVGKSAL (KRAS G12R)
MRGAGVSAL

SEQ ID NO: 13843 - protein, 9 aa, synthetic construct
  source 1..9: note = Seed: ARGVGKSAL (KRAS G12R)
MRGAGVSAM

SEQ ID NO: 13844 - protein, 9 aa, synthetic construct
  source 1..9: note = Seed: ARGVGKSAL (KRAS G12R)
MRGAGVSAN

SEQ ID NO: 13845 - protein, 9 aa, synthetic construct
  source 1..9: note = Seed: ARGVGKSAL (KRAS G12R)
MRGAGVSAQ

SEQ ID NO: 13846 - protein, 9 aa, synthetic construct
  source 1..9: note = Seed: ARGVGKSAL (KRAS G12R)
MRGAGVSAS

SEQ ID NO: 13847 - protein, 9 aa, synthetic construct
  source 1..9: note = Seed: ARGVGKSAL (KRAS G12R)
MRGAGVSAT

SEQ ID NO: 13848 - protein, 9 aa, synthetic construct
  source 1..9: note = Seed: ARGVGKSAL (KRAS G12R)
MRGAGVSAV

SEQ ID NO: 13849 - protein, 9 aa, synthetic construct
  source 1..9: note = Seed: ARGVGKSAL (KRAS G12R)
MRGFGISAA

SEQ ID NO: 13850 - protein, 9 aa, synthetic construct
  source 1..9: note = Seed: ARGVGKSAL (KRAS G12R)
MRGFGISAR

SEQ ID NO: 13851 - protein, 9 aa, synthetic construct
  source 1..9: note = Seed: ARGVGKSAL (KRAS G12R)
MRGFGKSAA

SEQ ID NO: 13852 - protein, 9 aa, synthetic construct
  source 1..9: note = Seed: ARGVGKSAL (KRAS G12R)
MRGFGKSAF

SEQ ID NO: 13853 - protein, 9 aa, synthetic construct
  source 1..9: note = Seed: ARGVGKSAL (KRAS G12R)
MRGFGKSAH

SEQ ID NO: 13854 - protein, 9 aa, synthetic construct
  source 1..9: note = Seed: ARGVGKSAL (KRAS G12R)
MRGFGKSAI

SEQ ID NO: 13855 - protein, 9 aa, synthetic construct
  source 1..9: note = Seed: ARGVGKSAL (KRAS G12R)
MRGFGKSAK

SEQ ID NO: 13856 - protein, 9 aa, synthetic construct
  source 1..9: note = Seed: ARGVGKSAL (KRAS G12R)
MRGFGKSAL

SEQ ID NO: 13857 - protein, 9 aa, synthetic construct
  source 1..9: note = Seed: ARGVGKSAL (KRAS G12R)
MRGFGKSAM

SEQ ID NO: 13858 - protein, 9 aa, synthetic construct
  source 1..9: note = Seed: ARGVGKSAL (KRAS G12R)
MRGFGKSAQ

SEQ ID NO: 13859 - protein, 9 aa, synthetic construct
  source 1..9: note = Seed: ARGVGKSAL (KRAS G12R)
MRGFGKSAR

SEQ ID NO: 13860 - protein, 9 aa, synthetic construct
  source 1..9: note = Seed: ARGVGKSAL (KRAS G12R)
MRGFGKSAS

SEQ ID NO: 13861 - protein, 9 aa, synthetic construct
  source 1..9: note = Seed: ARGVGKSAL (KRAS G12R)
MRGFGKSAV

SEQ ID NO: 13862 - protein, 9 aa, synthetic construct
  source 1..9: note = Seed: ARGVGKSAL (KRAS G12R)
MRGFGKSAY

SEQ ID NO: 13863 - protein, 9 aa, synthetic construct
  source 1..9: note = Seed: ARGVGKSAL (KRAS G12R)
MRGFGRSAA

SEQ ID NO: 13864 - protein, 9 aa, synthetic construct
  source 1..9: note = Seed: ARGVGKSAL (KRAS G12R)
MRGFGRSAF

SEQ ID NO: 13865 - protein, 9 aa, synthetic construct
  source 1..9: note = Seed: ARGVGKSAL (KRAS G12R)
MRGFGRSAG

SEQ ID NO: 13866 - protein, 9 aa, synthetic construct
  source 1..9: note = Seed: ARGVGKSAL (KRAS G12R)
MRGFGRSAH

SEQ ID NO: 13867 - protein, 9 aa, synthetic construct
  source 1..9: note = Seed: ARGVGKSAL (KRAS G12R)
MRGFGRSAI

SEQ ID NO: 13868 - protein, 9 aa, synthetic construct
  source 1..9: note = Seed: ARGVGKSAL (KRAS G12R)
MRGFGRSAK

SEQ ID NO: 13869 - protein, 9 aa, synthetic construct
  source 1..9: note = Seed: ARGVGKSAL (KRAS G12R)
MRGFGRSAL

SEQ ID NO: 13870 - protein, 9 aa, synthetic construct
  source 1..9: note = Seed: ARGVGKSAL (KRAS G12R)
MRGFGRSAM

SEQ ID NO: 13871 - protein, 9 aa, synthetic construct
  source 1..9: note = Seed: ARGVGKSAL (KRAS G12R)
MRGFGRSAQ

SEQ ID NO: 13872 - protein, 9 aa, synthetic construct
  source 1..9: note = Seed: ARGVGKSAL (KRAS G12R)
MRGFGRSAR

SEQ ID NO: 13873 - protein, 9 aa, synthetic construct
  source 1..9: note = Seed: ARGVGKSAL (KRAS G12R)
MRGFGRSAS

SEQ ID NO: 13874 - protein, 9 aa, synthetic construct
  source 1..9: note = Seed: ARGVGKSAL (KRAS G12R)
MRGFGRSAT

SEQ ID NO: 13875 - protein, 9 aa, synthetic construct
  source 1..9: note = Seed: ARGVGKSAL (KRAS G12R)
MRGFGRSAV

SEQ ID NO: 13876 - protein, 9 aa, synthetic construct
  source 1..9: note = Seed: ARGVGKSAL (KRAS G12R)
MRGFGRSAW

SEQ ID NO: 13877 - protein, 9 aa, synthetic construct
  source 1..9: note = Seed: ARGVGKSAL (KRAS G12R)
MRGFGRSAY

SEQ ID NO: 13878 - protein, 9 aa, synthetic construct
  source 1..9: note = Seed: ARGVGKSAL (KRAS G12R)
MRGFGVSAR

SEQ ID NO: 13879 - protein, 9 aa, synthetic construct
  source 1..9: note = Seed: ARGVGKSAL (KRAS G12R)
MRGGGASAA

SEQ ID NO: 13880 - protein, 9 aa, synthetic construct
  source 1..9: note = Seed: ARGVGKSAL (KRAS G12R)
MRGGGISAA

SEQ ID NO: 13881 - protein, 9 aa, synthetic construct
  source 1..9: note = Seed: ARGVGKSAL (KRAS G12R)
MRGGGISAG

SEQ ID NO: 13882 - protein, 9 aa, synthetic construct
  source 1..9: note = Seed: ARGVGKSAL (KRAS G12R)
MRGGGISAS

SEQ ID NO: 13883 - protein, 9 aa, synthetic construct
  source 1..9: note = Seed: ARGVGKSAL (KRAS G12R)
MRGGGISAV

SEQ ID NO: 13884 - protein, 9 aa, synthetic construct
  source 1..9: note = Seed: ARGVGKSAL (KRAS G12R)
MRGGGLSAA

SEQ ID NO: 13885 - protein, 9 aa, synthetic construct
  source 1..9: note = Seed: ARGVGKSAL (KRAS G12R)
MRGGGMSAA

SEQ ID NO: 13886 - protein, 9 aa, synthetic construct
  source 1..9: note = Seed: ARGVGKSAL (KRAS G12R)
MRGGGVSAA

SEQ ID NO: 13887 - protein, 9 aa, synthetic construct
  source 1..9: note = Seed: ARGVGKSAL (KRAS G12R)
MRGGGVSAS

SEQ ID NO: 13888 - protein, 9 aa, synthetic construct
  source 1..9: note = Seed: ARGVGKSAL (KRAS G12R)
MRGHGASAA

SEQ ID NO: 13889 - protein, 9 aa, synthetic construct
  source 1..9: note = Seed: ARGVGKSAL (KRAS G12R)
MRGHGISAA

SEQ ID NO: 13890 - protein, 9 aa, synthetic construct
  source 1..9: note = Seed: ARGVGKSAL (KRAS G12R)
MRGHGISAR

SEQ ID NO: 13891 - protein, 9 aa, synthetic construct
  source 1..9: note = Seed: ARGVGKSAL (KRAS G12R)
MRGHGISAS

SEQ ID NO: 13892 - protein, 9 aa, synthetic construct
  source 1..9: note = Seed: ARGVGKSAL (KRAS G12R)
MRGHGRSAF

SEQ ID NO: 13893 - protein, 9 aa, synthetic construct
  source 1..9: note = Seed: ARGVGKSAL (KRAS G12R)
MRGHGRSAI

SEQ ID NO: 13894 - protein, 9 aa, synthetic construct
  source 1..9: note = Seed: ARGVGKSAL (KRAS G12R)
MRGHGRSAK

SEQ ID NO: 13895 - protein, 9 aa, synthetic construct
  source 1..9: note = Seed: ARGVGKSAL (KRAS G12R)
MRGHGRSAL

SEQ ID NO: 13896 - protein, 9 aa, synthetic construct
  source 1..9: note = Seed: ARGVGKSAL (KRAS G12R)
MRGHGRSAM

SEQ ID NO: 13897 - protein, 9 aa, synthetic construct
  source 1..9: note = Seed: ARGVGKSAL (KRAS G12R)
MRGHGRSAR

SEQ ID NO: 13898 - protein, 9 aa, synthetic construct
  source 1..9: note = Seed: ARGVGKSAL (KRAS G12R)
MRGHGRSAV

SEQ ID NO: 13899 - protein, 9 aa, synthetic construct
  source 1..9: note = Seed: ARGVGKSAL (KRAS G12R)
MRGHGRSAY

SEQ ID NO: 13900 - protein, 9 aa, synthetic construct
  source 1..9: note = Seed: ARGVGKSAL (KRAS G12R)
MRGHGVSAA

SEQ ID NO: 13901 - protein, 9 aa, synthetic construct
  source 1..9: note = Seed: ARGVGKSAL (KRAS G12R)
MRGIGASAA

SEQ ID NO: 13902 - protein, 9 aa, synthetic construct
  source 1..9: note = Seed: ARGVGKSAL (KRAS G12R)
MRGIGISAA

SEQ ID NO: 13903 - protein, 9 aa, synthetic construct
  source 1..9: note = Seed: ARGVGKSAL (KRAS G12R)
MRGIGISAS

SEQ ID NO: 13904 - protein, 9 aa, synthetic construct
  source 1..9: note = Seed: ARGVGKSAL (KRAS G12R)
MRGIGKSAA

SEQ ID NO: 13905 - protein, 9 aa, synthetic construct
  source 1..9: note = Seed: ARGVGKSAL (KRAS G12R)
MRGIGKSAH

SEQ ID NO: 13906 - protein, 9 aa, synthetic construct
  source 1..9: note = Seed: ARGVGKSAL (KRAS G12R)
MRGIGKSAI

SEQ ID NO: 13907 - protein, 9 aa, synthetic construct
  source 1..9: note = Seed: ARGVGKSAL (KRAS G12R)
MRGIGKSAK

SEQ ID NO: 13908 - protein, 9 aa, synthetic construct
  source 1..9: note = Seed: ARGVGKSAL (KRAS G12R)
MRGIGKSAL

SEQ ID NO: 13909 - protein, 9 aa, synthetic construct
  source 1..9: note = Seed: ARGVGKSAL (KRAS G12R)
MRGIGKSAM

SEQ ID NO: 13910 - protein, 9 aa, synthetic construct
  source 1..9: note = Seed: ARGVGKSAL (KRAS G12R)
MRGIGKSAQ

SEQ ID NO: 13911 - protein, 9 aa, synthetic construct
  source 1..9: note = Seed: ARGVGKSAL (KRAS G12R)
MRGIGKSAR

SEQ ID NO: 13912 - protein, 9 aa, synthetic construct
  source 1..9: note = Seed: ARGVGKSAL (KRAS G12R)
MRGIGKSAS

SEQ ID NO: 13913 - protein, 9 aa, synthetic construct
  source 1..9: note = Seed: ARGVGKSAL (KRAS G12R)
MRGIGKSAT

SEQ ID NO: 13914 - protein, 9 aa, synthetic construct
  source 1..9: note = Seed: ARGVGKSAL (KRAS G12R)
MRGIGKSAV

SEQ ID NO: 13915 - protein, 9 aa, synthetic construct
  source 1..9: note = Seed: ARGVGKSAL (KRAS G12R)
MRGIGKSAY

SEQ ID NO: 13916 - protein, 9 aa, synthetic construct
  source 1..9: note = Seed: ARGVGKSAL (KRAS G12R)
MRGIGLSAA

SEQ ID NO: 13917 - protein, 9 aa, synthetic construct
  source 1..9: note = Seed: ARGVGKSAL (KRAS G12R)
MRGIGMSAA

SEQ ID NO: 13918 - protein, 9 aa, synthetic construct
  source 1..9: note = Seed: ARGVGKSAL (KRAS G12R)
MRGIGRSAA

SEQ ID NO: 13919 - protein, 9 aa, synthetic construct
  source 1..9: note = Seed: ARGVGKSAL (KRAS G12R)
MRGIGRSAF

SEQ ID NO: 13920 - protein, 9 aa, synthetic construct
  source 1..9: note = Seed: ARGVGKSAL (KRAS G12R)
MRGIGRSAG

SEQ ID NO: 13921 - protein, 9 aa, synthetic construct
  source 1..9: note = Seed: ARGVGKSAL (KRAS G12R)
MRGIGRSAH

SEQ ID NO: 13922 - protein, 9 aa, synthetic construct
  source 1..9: note = Seed: ARGVGKSAL (KRAS G12R)
MRGIGRSAI

SEQ ID NO: 13923 - protein, 9 aa, synthetic construct
  source 1..9: note = Seed: ARGVGKSAL (KRAS G12R)
MRGIGRSAK

SEQ ID NO: 13924 - protein, 9 aa, synthetic construct
  source 1..9: note = Seed: ARGVGKSAL (KRAS G12R)
MRGIGRSAL

SEQ ID NO: 13925 - protein, 9 aa, synthetic construct
  source 1..9: note = Seed: ARGVGKSAL (KRAS G12R)
MRGIGRSAM

SEQ ID NO: 13926 - protein, 9 aa, synthetic construct
  source 1..9: note = Seed: ARGVGKSAL (KRAS G12R)
MRGIGRSAN

SEQ ID NO: 13927 - protein, 9 aa, synthetic construct
  source 1..9: note = Seed: ARGVGKSAL (KRAS G12R)
MRGIGRSAQ

SEQ ID NO: 13928 - protein, 9 aa, synthetic construct
  source 1..9: note = Seed: ARGVGKSAL (KRAS G12R)
MRGIGRSAR

SEQ ID NO: 13929 - protein, 9 aa, synthetic construct
  source 1..9: note = Seed: ARGVGKSAL (KRAS G12R)
MRGIGRSAS

SEQ ID NO: 13930 - protein, 9 aa, synthetic construct
  source 1..9: note = Seed: ARGVGKSAL (KRAS G12R)
MRGIGRSAT

SEQ ID NO: 13931 - protein, 9 aa, synthetic construct
  source 1..9: note = Seed: ARGVGKSAL (KRAS G12R)
MRGIGRSAV

SEQ ID NO: 13932 - protein, 9 aa, synthetic construct
  source 1..9: note = Seed: ARGVGKSAL (KRAS G12R)
MRGIGRSAW

SEQ ID NO: 13933 - protein, 9 aa, synthetic construct
  source 1..9: note = Seed: ARGVGKSAL (KRAS G12R)
MRGIGRSAY

SEQ ID NO: 13934 - protein, 9 aa, synthetic construct
  source 1..9: note = Seed: ARGVGKSAL (KRAS G12R)
MRGIGVSAA

SEQ ID NO: 13935 - protein, 9 aa, synthetic construct
  source 1..9: note = Seed: ARGVGKSAL (KRAS G12R)
MRGIGVSAS

SEQ ID NO: 13936 - protein, 9 aa, synthetic construct
  source 1..9: note = Seed: ARGVGKSAL (KRAS G12R)
MRGKGRSAF

SEQ ID NO: 13937 - protein, 9 aa, synthetic construct
  source 1..9: note = Seed: ARGVGKSAL (KRAS G12R)
MRGKGRSAI

SEQ ID NO: 13938 - protein, 9 aa, synthetic construct
  source 1..9: note = Seed: ARGVGKSAL (KRAS G12R)
MRGKGRSAK

SEQ ID NO: 13939 - protein, 9 aa, synthetic construct
  source 1..9: note = Seed: ARGVGKSAL (KRAS G12R)
MRGKGRSAL

SEQ ID NO: 13940 - protein, 9 aa, synthetic construct
  source 1..9: note = Seed: ARGVGKSAL (KRAS G12R)
MRGKGRSAR

SEQ ID NO: 13941 - protein, 9 aa, synthetic construct
  source 1..9: note = Seed: ARGVGKSAL (KRAS G12R)
MRGKGRSAV

SEQ ID NO: 13942 - protein, 9 aa, synthetic construct
  source 1..9: note = Seed: ARGVGKSAL (KRAS G12R)
MRGKGRSAY

SEQ ID NO: 13943 - protein, 9 aa, synthetic construct
  source 1..9: note = Seed: ARGVGKSAL (KRAS G12R)
MRGLGISAA

SEQ ID NO: 13944 - protein, 9 aa, synthetic construct
  source 1..9: note = Seed: ARGVGKSAL (KRAS G12R)
MRGLGKSAA

SEQ ID NO: 13945 - protein, 9 aa, synthetic construct
  source 1..9: note = Seed: ARGVGKSAL (KRAS G12R)
MRGLGKSAF

SEQ ID NO: 13946 - protein, 9 aa, synthetic construct
  source 1..9: note = Seed: ARGVGKSAL (KRAS G12R)
MRGLGKSAG

SEQ ID NO: 13947 - protein, 9 aa, synthetic construct
  source 1..9: note = Seed: ARGVGKSAL (KRAS G12R)
MRGLGKSAH

SEQ ID NO: 13948 - protein, 9 aa, synthetic construct
  source 1..9: note = Seed: ARGVGKSAL (KRAS G12R)
MRGLGKSAI

SEQ ID NO: 13949 - protein, 9 aa, synthetic construct
  source 1..9: note = Seed: ARGVGKSAL (KRAS G12R)
MRGLGKSAK

SEQ ID NO: 13950 - protein, 9 aa, synthetic construct
  source 1..9: note = Seed: ARGVGKSAL (KRAS G12R)
MRGLGKSAL

SEQ ID NO: 13951 - protein, 9 aa, synthetic construct
  source 1..9: note = Seed: ARGVGKSAL (KRAS G12R)
MRGLGKSAM

SEQ ID NO: 13952 - protein, 9 aa, synthetic construct
  source 1..9: note = Seed: ARGVGKSAL (KRAS G12R)
MRGLGKSAN

SEQ ID NO: 13953 - protein, 9 aa, synthetic construct
  source 1..9: note = Seed: ARGVGKSAL (KRAS G12R)
MRGLGKSAQ

SEQ ID NO: 13954 - protein, 9 aa, synthetic construct
  source 1..9: note = Seed: ARGVGKSAL (KRAS G12R)
MRGLGKSAR

SEQ ID NO: 13955 - protein, 9 aa, synthetic construct
  source 1..9: note = Seed: ARGVGKSAL (KRAS G12R)
MRGLGKSAS

SEQ ID NO: 13956 - protein, 9 aa, synthetic construct
  source 1..9: note = Seed: ARGVGKSAL (KRAS G12R)
MRGLGKSAT

SEQ ID NO: 13957 - protein, 9 aa, synthetic construct
  source 1..9: note = Seed: ARGVGKSAL (KRAS G12R)
MRGLGKSAV

SEQ ID NO: 13958 - protein, 9 aa, synthetic construct
  source 1..9: note = Seed: ARGVGKSAL (KRAS G12R)
MRGLGKSAW

SEQ ID NO: 13959 - protein, 9 aa, synthetic construct
  source 1..9: note = Seed: ARGVGKSAL (KRAS G12R)
MRGLGKSAY

SEQ ID NO: 13960 - protein, 9 aa, synthetic construct
  source 1..9: note = Seed: ARGVGKSAL (KRAS G12R)
MRGLGRSAA

SEQ ID NO: 13961 - protein, 9 aa, synthetic construct
  source 1..9: note = Seed: ARGVGKSAL (KRAS G12R)
MRGLGRSAF

SEQ ID NO: 13962 - protein, 9 aa, synthetic construct
  source 1..9: note = Seed: ARGVGKSAL (KRAS G12R)
MRGLGRSAG

SEQ ID NO: 13963 - protein, 9 aa, synthetic construct
  source 1..9: note = Seed: ARGVGKSAL (KRAS G12R)
MRGLGRSAH

SEQ ID NO: 13964 - protein, 9 aa, synthetic construct
  source 1..9: note = Seed: ARGVGKSAL (KRAS G12R)
MRGLGRSAI

SEQ ID NO: 13965 - protein, 9 aa, synthetic construct
  source 1..9: note = Seed: ARGVGKSAL (KRAS G12R)
MRGLGRSAK

SEQ ID NO: 13966 - protein, 9 aa, synthetic construct
  source 1..9: note = Seed: ARGVGKSAL (KRAS G12R)
MRGLGRSAL

SEQ ID NO: 13967 - protein, 9 aa, synthetic construct
  source 1..9: note = Seed: ARGVGKSAL (KRAS G12R)
MRGLGRSAM

SEQ ID NO: 13968 - protein, 9 aa, synthetic construct
  source 1..9: note = Seed: ARGVGKSAL (KRAS G12R)
MRGLGRSAN

SEQ ID NO: 13969 - protein, 9 aa, synthetic construct
  source 1..9: note = Seed: ARGVGKSAL (KRAS G12R)
MRGLGRSAP

SEQ ID NO: 13970 - protein, 9 aa, synthetic construct
  source 1..9: note = Seed: ARGVGKSAL (KRAS G12R)
MRGLGRSAQ

SEQ ID NO: 13971 - protein, 9 aa, synthetic construct
  source 1..9: note = Seed: ARGVGKSAL (KRAS G12R)
MRGLGRSAR

SEQ ID NO: 13972 - protein, 9 aa, synthetic construct
  source 1..9: note = Seed: ARGVGKSAL (KRAS G12R)
MRGLGRSAS

SEQ ID NO: 13973 - protein, 9 aa, synthetic construct
  source 1..9: note = Seed: ARGVGKSAL (KRAS G12R)
MRGLGRSAT

SEQ ID NO: 13974 - protein, 9 aa, synthetic construct
  source 1..9: note = Seed: ARGVGKSAL (KRAS G12R)
MRGLGRSAV

SEQ ID NO: 13975 - protein, 9 aa, synthetic construct
  source 1..9: note = Seed: ARGVGKSAL (KRAS G12R)
MRGLGRSAW

SEQ ID NO: 13976 - protein, 9 aa, synthetic construct
  source 1..9: note = Seed: ARGVGKSAL (KRAS G12R)
MRGLGRSAY

SEQ ID NO: 13977 - protein, 9 aa, synthetic construct
  source 1..9: note = Seed: ARGVGKSAL (KRAS G12R)
MRGMGASAA

SEQ ID NO: 13978 - protein, 9 aa, synthetic construct
  source 1..9: note = Seed: ARGVGKSAL (KRAS G12R)
MRGMGISAA

SEQ ID NO: 13979 - protein, 9 aa, synthetic construct
  source 1..9: note = Seed: ARGVGKSAL (KRAS G12R)
MRGMGISAS

SEQ ID NO: 13980 - protein, 9 aa, synthetic construct
  source 1..9: note = Seed: ARGVGKSAL (KRAS G12R)
MRGMGKSAA

SEQ ID NO: 13981 - protein, 9 aa, synthetic construct
  source 1..9: note = Seed: ARGVGKSAL (KRAS G12R)
MRGMGKSAH

SEQ ID NO: 13982 - protein, 9 aa, synthetic construct
  source 1..9: note = Seed: ARGVGKSAL (KRAS G12R)
MRGMGKSAI

SEQ ID NO: 13983 - protein, 9 aa, synthetic construct
  source 1..9: note = Seed: ARGVGKSAL (KRAS G12R)
MRGMGKSAK

SEQ ID NO: 13984 - protein, 9 aa, synthetic construct
  source 1..9: note = Seed: ARGVGKSAL (KRAS G12R)
MRGMGKSAL

SEQ ID NO: 13985 - protein, 9 aa, synthetic construct
  source 1..9: note = Seed: ARGVGKSAL (KRAS G12R)
MRGMGKSAM

SEQ ID NO: 13986 - protein, 9 aa, synthetic construct
  source 1..9: note = Seed: ARGVGKSAL (KRAS G12R)
MRGMGKSAQ

SEQ ID NO: 13987 - protein, 9 aa, synthetic construct
  source 1..9: note = Seed: ARGVGKSAL (KRAS G12R)
MRGMGKSAR

SEQ ID NO: 13988 - protein, 9 aa, synthetic construct
  source 1..9: note = Seed: ARGVGKSAL (KRAS G12R)
MRGMGKSAS

SEQ ID NO: 13989 - protein, 9 aa, synthetic construct
  source 1..9: note = Seed: ARGVGKSAL (KRAS G12R)
MRGMGKSAT

SEQ ID NO: 13990 - protein, 9 aa, synthetic construct
  source 1..9: note = Seed: ARGVGKSAL (KRAS G12R)
MRGMGKSAV

SEQ ID NO: 13991 - protein, 9 aa, synthetic construct
  source 1..9: note = Seed: ARGVGKSAL (KRAS G12R)
MRGMGKSAY

SEQ ID NO: 13992 - protein, 9 aa, synthetic construct
  source 1..9: note = Seed: ARGVGKSAL (KRAS G12R)
MRGMGLSAA

SEQ ID NO: 13993 - protein, 9 aa, synthetic construct
  source 1..9: note = Seed: ARGVGKSAL (KRAS G12R)
MRGMGMSAA

SEQ ID NO: 13994 - protein, 9 aa, synthetic construct
  source 1..9: note = Seed: ARGVGKSAL (KRAS G12R)
MRGMGRSAA

SEQ ID NO: 13995 - protein, 9 aa, synthetic construct
  source 1..9: note = Seed: ARGVGKSAL (KRAS G12R)
MRGMGRSAF

SEQ ID NO: 13996 - protein, 9 aa, synthetic construct
  source 1..9: note = Seed: ARGVGKSAL (KRAS G12R)
MRGMGRSAG

SEQ ID NO: 13997 - protein, 9 aa, synthetic construct
  source 1..9: note = Seed: ARGVGKSAL (KRAS G12R)
MRGMGRSAH

SEQ ID NO: 13998 - protein, 9 aa, synthetic construct
  source 1..9: note = Seed: ARGVGKSAL (KRAS G12R)
MRGMGRSAI

SEQ ID NO: 13999 - protein, 9 aa, synthetic construct
  source 1..9: note = Seed: ARGVGKSAL (KRAS G12R)
MRGMGRSAK

SEQ ID NO: 14000 - protein, 9 aa, synthetic construct
  source 1..9: note = Seed: ARGVGKSAL (KRAS G12R)
MRGMGRSAL

SEQ ID NO: 14001 - protein, 9 aa, synthetic construct
  source 1..9: note = Seed: ARGVGKSAL (KRAS G12R)
MRGMGRSAM

SEQ ID NO: 14002 - protein, 9 aa, synthetic construct
  source 1..9: note = Seed: ARGVGKSAL (KRAS G12R)
MRGMGRSAN

SEQ ID NO: 14003 - protein, 9 aa, synthetic construct
  source 1..9: note = Seed: ARGVGKSAL (KRAS G12R)
MRGMGRSAQ

SEQ ID NO: 14004 - protein, 9 aa, synthetic construct
  source 1..9: note = Seed: ARGVGKSAL (KRAS G12R)
MRGMGRSAR

SEQ ID NO: 14005 - protein, 9 aa, synthetic construct
  source 1..9: note = Seed: ARGVGKSAL (KRAS G12R)
MRGMGRSAS

SEQ ID NO: 14006 - protein, 9 aa, synthetic construct
  source 1..9: note = Seed: ARGVGKSAL (KRAS G12R)
MRGMGRSAT

SEQ ID NO: 14007 - protein, 9 aa, synthetic construct
  source 1..9: note = Seed: ARGVGKSAL (KRAS G12R)
MRGMGRSAV

SEQ ID NO: 14008 - protein, 9 aa, synthetic construct
  source 1..9: note = Seed: ARGVGKSAL (KRAS G12R)
MRGMGRSAY

SEQ ID NO: 14009 - protein, 9 aa, synthetic construct
  source 1..9: note = Seed: ARGVGKSAL (KRAS G12R)
MRGMGVSAA

SEQ ID NO: 14010 - protein, 9 aa, synthetic construct
  source 1..9: note = Seed: ARGVGKSAL (KRAS G12R)
MRGNGASAA

SEQ ID NO: 14011 - protein, 9 aa, synthetic construct
  source 1..9: note = Seed: ARGVGKSAL (KRAS G12R)
MRGNGISAA

SEQ ID NO: 14012 - protein, 9 aa, synthetic construct
  source 1..9: note = Seed: ARGVGKSAL (KRAS G12R)
MRGNGISAS

SEQ ID NO: 14013 - protein, 9 aa, synthetic construct
  source 1..9: note = Seed: ARGVGKSAL (KRAS G12R)
MRGNGMSAA

SEQ ID NO: 14014 - protein, 9 aa, synthetic construct
  source 1..9: note = Seed: ARGVGKSAL (KRAS G12R)
MRGNGVSAA

SEQ ID NO: 14015 - protein, 9 aa, synthetic construct
  source 1..9: note = Seed: ARGVGKSAL (KRAS G12R)
MRGQGRSAR

SEQ ID NO: 14016 - protein, 9 aa, synthetic construct
  source 1..9: note = Seed: ARGVGKSAL (KRAS G12R)
MRGRGKSAI

SEQ ID NO: 14017 - protein, 9 aa, synthetic construct
  source 1..9: note = Seed: ARGVGKSAL (KRAS G12R)
MRGRGKSAL

SEQ ID NO: 14018 - protein, 9 aa, synthetic construct
  source 1..9: note = Seed: ARGVGKSAL (KRAS G12R)
MRGRGKSAM

SEQ ID NO: 14019 - protein, 9 aa, synthetic construct
  source 1..9: note = Seed: ARGVGKSAL (KRAS G12R)
MRGRGKSAR

SEQ ID NO: 14020 - protein, 9 aa, synthetic construct
  source 1..9: note = Seed: ARGVGKSAL (KRAS G12R)
MRGRGKSAV

SEQ ID NO: 14021 - protein, 9 aa, synthetic construct
  source 1..9: note = Seed: ARGVGKSAL (KRAS G12R)
MRGRGKSAY

SEQ ID NO: 14022 - protein, 9 aa, synthetic construct
  source 1..9: note = Seed: ARGVGKSAL (KRAS G12R)
MRGRGRSAA

SEQ ID NO: 14023 - protein, 9 aa, synthetic construct
  source 1..9: note = Seed: ARGVGKSAL (KRAS G12R)
MRGRGRSAF

SEQ ID NO: 14024 - protein, 9 aa, synthetic construct
  source 1..9: note = Seed: ARGVGKSAL (KRAS G12R)
MRGRGRSAI

SEQ ID NO: 14025 - protein, 9 aa, synthetic construct
  source 1..9: note = Seed: ARGVGKSAL (KRAS G12R)
MRGRGRSAL

SEQ ID NO: 14026 - protein, 9 aa, synthetic construct
  source 1..9: note = Seed: ARGVGKSAL (KRAS G12R)
MRGRGRSAM

SEQ ID NO: 14027 - protein, 9 aa, synthetic construct
  source 1..9: note = Seed: ARGVGKSAL (KRAS G12R)
MRGRGRSAQ

SEQ ID NO: 14028 - protein, 9 aa, synthetic construct
  source 1..9: note = Seed: ARGVGKSAL (KRAS G12R)
MRGRGRSAR

SEQ ID NO: 14029 - protein, 9 aa, synthetic construct
  source 1..9: note = Seed: ARGVGKSAL (KRAS G12R)
MRGRGRSAS

SEQ ID NO: 14030 - protein, 9 aa, synthetic construct
  source 1..9: note = Seed: ARGVGKSAL (KRAS G12R)
MRGRGRSAV

SEQ ID NO: 14031 - protein, 9 aa, synthetic construct
  source 1..9: note = Seed: ARGVGKSAL (KRAS G12R)
MRGRGRSAY

SEQ ID NO: 14032 - protein, 9 aa, synthetic construct
  source 1..9: note = Seed: ARGVGKSAL (KRAS G12R)
MRGSGASAA

SEQ ID NO: 14033 - protein, 9 aa, synthetic construct
  source 1..9: note = Seed: ARGVGKSAL (KRAS G12R)
MRGSGASAG

SEQ ID NO: 14034 - protein, 9 aa, synthetic construct
  source 1..9: note = Seed: ARGVGKSAL (KRAS G12R)
MRGSGASAI

SEQ ID NO: 14035 - protein, 9 aa, synthetic construct
  source 1..9: note = Seed: ARGVGKSAL (KRAS G12R)
MRGSGASAM

SEQ ID NO: 14036 - protein, 9 aa, synthetic construct
  source 1..9: note = Seed: ARGVGKSAL (KRAS G12R)
MRGSGASAS

SEQ ID NO: 14037 - protein, 9 aa, synthetic construct
  source 1..9: note = Seed: ARGVGKSAL (KRAS G12R)
MRGSGASAT

SEQ ID NO: 14038 - protein, 9 aa, synthetic construct
  source 1..9: note = Seed: ARGVGKSAL (KRAS G12R)
MRGSGASAV

SEQ ID NO: 14039 - protein, 9 aa, synthetic construct
  source 1..9: note = Seed: ARGVGKSAL (KRAS G12R)
MRGSGISAA

SEQ ID NO: 14040 - protein, 9 aa, synthetic construct
  source 1..9: note = Seed: ARGVGKSAL (KRAS G12R)
MRGSGISAG

SEQ ID NO: 14041 - protein, 9 aa, synthetic construct
  source 1..9: note = Seed: ARGVGKSAL (KRAS G12R)
MRGSGISAH

SEQ ID NO: 14042 - protein, 9 aa, synthetic construct
  source 1..9: note = Seed: ARGVGKSAL (KRAS G12R)
MRGSGISAI

SEQ ID NO: 14043 - protein, 9 aa, synthetic construct
  source 1..9: note = Seed: ARGVGKSAL (KRAS G12R)
MRGSGISAL

SEQ ID NO: 14044 - protein, 9 aa, synthetic construct
  source 1..9: note = Seed: ARGVGKSAL (KRAS G12R)
MRGSGISAM

SEQ ID NO: 14045 - protein, 9 aa, synthetic construct
  source 1..9: note = Seed: ARGVGKSAL (KRAS G12R)
MRGSGISAN

SEQ ID NO: 14046 - protein, 9 aa, synthetic construct
  source 1..9: note = Seed: ARGVGKSAL (KRAS G12R)
MRGSGISAS

SEQ ID NO: 14047 - protein, 9 aa, synthetic construct
  source 1..9: note = Seed: ARGVGKSAL (KRAS G12R)
MRGSGISAT

SEQ ID NO: 14048 - protein, 9 aa, synthetic construct
  source 1..9: note = Seed: ARGVGKSAL (KRAS G12R)
MRGSGISAV

SEQ ID NO: 14049 - protein, 9 aa, synthetic construct
  source 1..9: note = Seed: ARGVGKSAL (KRAS G12R)
MRGSGLSAA

SEQ ID NO: 14050 - protein, 9 aa, synthetic construct
  source 1..9: note = Seed: ARGVGKSAL (KRAS G12R)
MRGSGLSAS

SEQ ID NO: 14051 - protein, 9 aa, synthetic construct
  source 1..9: note = Seed: ARGVGKSAL (KRAS G12R)
MRGSGLSAV

SEQ ID NO: 14052 - protein, 9 aa, synthetic construct
  source 1..9: note = Seed: ARGVGKSAL (KRAS G12R)
MRGSGMSAA

SEQ ID NO: 14053 - protein, 9 aa, synthetic construct
  source 1..9: note = Seed: ARGVGKSAL (KRAS G12R)
MRGSGMSAS

SEQ ID NO: 14054 - protein, 9 aa, synthetic construct
  source 1..9: note = Seed: ARGVGKSAL (KRAS G12R)
MRGSGMSAV

SEQ ID NO: 14055 - protein, 9 aa, synthetic construct
  source 1..9: note = Seed: ARGVGKSAL (KRAS G12R)
MRGSGNSAA

SEQ ID NO: 14056 - protein, 9 aa, synthetic construct
  source 1..9: note = Seed: ARGVGKSAL (KRAS G12R)
MRGSGPSAA

SEQ ID NO: 14057 - protein, 9 aa, synthetic construct
  source 1..9: note = Seed: ARGVGKSAL (KRAS G12R)
MRGSGSSAA

SEQ ID NO: 14058 - protein, 9 aa, synthetic construct
  source 1..9: note = Seed: ARGVGKSAL (KRAS G12R)
MRGSGTSAA

SEQ ID NO: 14059 - protein, 9 aa, synthetic construct
  source 1..9: note = Seed: ARGVGKSAL (KRAS G12R)
MRGSGTSAS

SEQ ID NO: 14060 - protein, 9 aa, synthetic construct
  source 1..9: note = Seed: ARGVGKSAL (KRAS G12R)
MRGSGVSAA

SEQ ID NO: 14061 - protein, 9 aa, synthetic construct
  source 1..9: note = Seed: ARGVGKSAL (KRAS G12R)
MRGSGVSAG

SEQ ID NO: 14062 - protein, 9 aa, synthetic construct
  source 1..9: note = Seed: ARGVGKSAL (KRAS G12R)
MRGSGVSAH

SEQ ID NO: 14063 - protein, 9 aa, synthetic construct
  source 1..9: note = Seed: ARGVGKSAL (KRAS G12R)
MRGSGVSAI

SEQ ID NO: 14064 - protein, 9 aa, synthetic construct
  source 1..9: note = Seed: ARGVGKSAL (KRAS G12R)
MRGSGVSAM

SEQ ID NO: 14065 - protein, 9 aa, synthetic construct
  source 1..9: note = Seed: ARGVGKSAL (KRAS G12R)
MRGSGVSAS

SEQ ID NO: 14066 - protein, 9 aa, synthetic construct
  source 1..9: note = Seed: ARGVGKSAL (KRAS G12R)
MRGSGVSAT

SEQ ID NO: 14067 - protein, 9 aa, synthetic construct
  source 1..9: note = Seed: ARGVGKSAL (KRAS G12R)
MRGSGVSAV

SEQ ID NO: 14068 - protein, 9 aa, synthetic construct
  source 1..9: note = Seed: ARGVGKSAL (KRAS G12R)
MRGTGASAA

SEQ ID NO: 14069 - protein, 9 aa, synthetic construct
  source 1..9: note = Seed: ARGVGKSAL (KRAS G12R)
MRGTGISAA

SEQ ID NO: 14070 - protein, 9 aa, synthetic construct
  source 1..9: note = Seed: ARGVGKSAL (KRAS G12R)
MRGTGISAG

SEQ ID NO: 14071 - protein, 9 aa, synthetic construct
  source 1..9: note = Seed: ARGVGKSAL (KRAS G12R)
MRGTGISAS

SEQ ID NO: 14072 - protein, 9 aa, synthetic construct
  source 1..9: note = Seed: ARGVGKSAL (KRAS G12R)
MRGTGLSAA

SEQ ID NO: 14073 - protein, 9 aa, synthetic construct
  source 1..9: note = Seed: ARGVGKSAL (KRAS G12R)
MRGTGMSAA

SEQ ID NO: 14074 - protein, 9 aa, synthetic construct
  source 1..9: note = Seed: ARGVGKSAL (KRAS G12R)
MRGTGVSAA

SEQ ID NO: 14075 - protein, 9 aa, synthetic construct
  source 1..9: note = Seed: ARGVGKSAL (KRAS G12R)
MRGTGVSAS

SEQ ID NO: 14076 - protein, 9 aa, synthetic construct
  source 1..9: note = Seed: ARGVGKSAL (KRAS G12R)
MRGVGASAA

SEQ ID NO: 14077 - protein, 9 aa, synthetic construct
  source 1..9: note = Seed: ARGVGKSAL (KRAS G12R)
MRGVGISAA

SEQ ID NO: 14078 - protein, 9 aa, synthetic construct
  source 1..9: note = Seed: ARGVGKSAL (KRAS G12R)
MRGVGISAS

SEQ ID NO: 14079 - protein, 9 aa, synthetic construct
  source 1..9: note = Seed: ARGVGKSAL (KRAS G12R)
MRGVGKSAA

SEQ ID NO: 14080 - protein, 9 aa, synthetic construct
  source 1..9: note = Seed: ARGVGKSAL (KRAS G12R)
MRGVGLSAA

SEQ ID NO: 14081 - protein, 9 aa, synthetic construct
  source 1..9: note = Seed: ARGVGKSAL (KRAS G12R)
MRGVGMSAA

SEQ ID NO: 14082 - protein, 9 aa, synthetic construct
  source 1..9: note = Seed: ARGVGKSAL (KRAS G12R)
MRGVGRSAA

SEQ ID NO: 14083 - protein, 9 aa, synthetic construct
  source 1..9: note = Seed: ARGVGKSAL (KRAS G12R)
MRGVGRSAF

SEQ ID NO: 14084 - protein, 9 aa, synthetic construct
  source 1..9: note = Seed: ARGVGKSAL (KRAS G12R)
MRGVGRSAH

SEQ ID NO: 14085 - protein, 9 aa, synthetic construct
  source 1..9: note = Seed: ARGVGKSAL (KRAS G12R)
MRGVGRSAI

SEQ ID NO: 14086 - protein, 9 aa, synthetic construct
  source 1..9: note = Seed: ARGVGKSAL (KRAS G12R)
MRGVGRSAK

SEQ ID NO: 14087 - protein, 9 aa, synthetic construct
  source 1..9: note = Seed: ARGVGKSAL (KRAS G12R)
MRGVGRSAL

SEQ ID NO: 14088 - protein, 9 aa, synthetic construct
  source 1..9: note = Seed: ARGVGKSAL (KRAS G12R)
MRGVGRSAM

SEQ ID NO: 14089 - protein, 9 aa, synthetic construct
  source 1..9: note = Seed: ARGVGKSAL (KRAS G12R)
MRGVGRSAQ

SEQ ID NO: 14090 - protein, 9 aa, synthetic construct
  source 1..9: note = Seed: ARGVGKSAL (KRAS G12R)
MRGVGRSAR

SEQ ID NO: 14091 - protein, 9 aa, synthetic construct
  source 1..9: note = Seed: ARGVGKSAL (KRAS G12R)
MRGVGRSAS

SEQ ID NO: 14092 - protein, 9 aa, synthetic construct
  source 1..9: note = Seed: ARGVGKSAL (KRAS G12R)
MRGVGRSAV

SEQ ID NO: 14093 - protein, 9 aa, synthetic construct
  source 1..9: note = Seed: ARGVGKSAL (KRAS G12R)
MRGVGRSAY

SEQ ID NO: 14094 - protein, 9 aa, synthetic construct
  source 1..9: note = Seed: ARGVGKSAL (KRAS G12R)
MRGVGVSAA

SEQ ID NO: 14095 - protein, 9 aa, synthetic construct
  source 1..9: note = Seed: ARGVGKSAL (KRAS G12R)
MRGVGVSAS

SEQ ID NO: 14096 - protein, 9 aa, synthetic construct
  source 1..9: note = Seed: ARGVGKSAL (KRAS G12R)
MRGWGKSAK

SEQ ID NO: 14097 - protein, 9 aa, synthetic construct
  source 1..9: note = Seed: ARGVGKSAL (KRAS G12R)
MRGWGKSAR

SEQ ID NO: 14098 - protein, 9 aa, synthetic construct
  source 1..9: note = Seed: ARGVGKSAL (KRAS G12R)
MRGWGRSAA

SEQ ID NO: 14099 - protein, 9 aa, synthetic construct
  source 1..9: note = Seed: ARGVGKSAL (KRAS G12R)
MRGWGRSAF

SEQ ID NO: 14100 - protein, 9 aa, synthetic construct
  source 1..9: note = Seed: ARGVGKSAL (KRAS G12R)
MRGWGRSAI

SEQ ID NO: 14101 - protein, 9 aa, synthetic construct
  source 1..9: note = Seed: ARGVGKSAL (KRAS G12R)
MRGWGRSAK

SEQ ID NO: 14102 - protein, 9 aa, synthetic construct
  source 1..9: note = Seed: ARGVGKSAL (KRAS G12R)
MRGWGRSAL

SEQ ID NO: 14103 - protein, 9 aa, synthetic construct
  source 1..9: note = Seed: ARGVGKSAL (KRAS G12R)
MRGWGRSAM

SEQ ID NO: 14104 - protein, 9 aa, synthetic construct
  source 1..9: note = Seed: ARGVGKSAL (KRAS G12R)
MRGWGRSAR

SEQ ID NO: 14105 - protein, 9 aa, synthetic construct
  source 1..9: note = Seed: ARGVGKSAL (KRAS G12R)
MRGWGRSAV

SEQ ID NO: 14106 - protein, 9 aa, synthetic construct
  source 1..9: note = Seed: ARGVGKSAL (KRAS G12R)
MRGWGRSAY

SEQ ID NO: 14107 - protein, 9 aa, synthetic construct
  source 1..9: note = Seed: ARGVGKSAL (KRAS G12R)
MRGYGKSAR

SEQ ID NO: 14108 - protein, 9 aa, synthetic construct
  source 1..9: note = Seed: ARGVGKSAL (KRAS G12R)
MRGYGRSAA

SEQ ID NO: 14109 - protein, 9 aa, synthetic construct
  source 1..9: note = Seed: ARGVGKSAL (KRAS G12R)
MRGYGRSAF

SEQ ID NO: 14110 - protein, 9 aa, synthetic construct
  source 1..9: note = Seed: ARGVGKSAL (KRAS G12R)
MRGYGRSAH

SEQ ID NO: 14111 - protein, 9 aa, synthetic construct
  source 1..9: note = Seed: ARGVGKSAL (KRAS G12R)
MRGYGRSAI

SEQ ID NO: 14112 - protein, 9 aa, synthetic construct
  source 1..9: note = Seed: ARGVGKSAL (KRAS G12R)
MRGYGRSAK

SEQ ID NO: 14113 - protein, 9 aa, synthetic construct
  source 1..9: note = Seed: ARGVGKSAL (KRAS G12R)
MRGYGRSAL

SEQ ID NO: 14114 - protein, 9 aa, synthetic construct
  source 1..9: note = Seed: ARGVGKSAL (KRAS G12R)
MRGYGRSAM

SEQ ID NO: 14115 - protein, 9 aa, synthetic construct
  source 1..9: note = Seed: ARGVGKSAL (KRAS G12R)
MRGYGRSAR

SEQ ID NO: 14116 - protein, 9 aa, synthetic construct
  source 1..9: note = Seed: ARGVGKSAL (KRAS G12R)
MRGYGRSAV

SEQ ID NO: 14117 - protein, 9 aa, synthetic construct
  source 1..9: note = Seed: ARGVGKSAL (KRAS G12R)
MRGYGRSAY

SEQ ID NO: 14118 - protein, 9 aa, synthetic construct
  source 1..9: note = Seed: ARGVGKSAL (KRAS G12R)
NRGAGASAA

SEQ ID NO: 14119 - protein, 9 aa, synthetic construct
  source 1..9: note = Seed: ARGVGKSAL (KRAS G12R)
NRGAGASAI

SEQ ID NO: 14120 - protein, 9 aa, synthetic construct
  source 1..9: note = Seed: ARGVGKSAL (KRAS G12R)
NRGAGASAM

SEQ ID NO: 14121 - protein, 9 aa, synthetic construct
  source 1..9: note = Seed: ARGVGKSAL (KRAS G12R)
NRGAGASAS

SEQ ID NO: 14122 - protein, 9 aa, synthetic construct
  source 1..9: note = Seed: ARGVGKSAL (KRAS G12R)
NRGAGASAT

SEQ ID NO: 14123 - protein, 9 aa, synthetic construct
  source 1..9: note = Seed: ARGVGKSAL (KRAS G12R)
NRGAGASAV

SEQ ID NO: 14124 - protein, 9 aa, synthetic construct
  source 1..9: note = Seed: ARGVGKSAL (KRAS G12R)
NRGAGISAA

SEQ ID NO: 14125 - protein, 9 aa, synthetic construct
  source 1..9: note = Seed: ARGVGKSAL (KRAS G12R)
NRGAGISAG

SEQ ID NO: 14126 - protein, 9 aa, synthetic construct
  source 1..9: note = Seed: ARGVGKSAL (KRAS G12R)
NRGAGISAH

SEQ ID NO: 14127 - protein, 9 aa, synthetic construct
  source 1..9: note = Seed: ARGVGKSAL (KRAS G12R)
NRGAGISAI

SEQ ID NO: 14128 - protein, 9 aa, synthetic construct
  source 1..9: note = Seed: ARGVGKSAL (KRAS G12R)
NRGAGISAL

SEQ ID NO: 14129 - protein, 9 aa, synthetic construct
  source 1..9: note = Seed: ARGVGKSAL (KRAS G12R)
NRGAGISAM

SEQ ID NO: 14130 - protein, 9 aa, synthetic construct
  source 1..9: note = Seed: ARGVGKSAL (KRAS G12R)
NRGAGISAN

SEQ ID NO: 14131 - protein, 9 aa, synthetic construct
  source 1..9: note = Seed: ARGVGKSAL (KRAS G12R)
NRGAGISAQ

SEQ ID NO: 14132 - protein, 9 aa, synthetic construct
  source 1..9: note = Seed: ARGVGKSAL (KRAS G12R)
NRGAGISAS

SEQ ID NO: 14133 - protein, 9 aa, synthetic construct
  source 1..9: note = Seed: ARGVGKSAL (KRAS G12R)
NRGAGISAT

SEQ ID NO: 14134 - protein, 9 aa, synthetic construct
  source 1..9: note = Seed: ARGVGKSAL (KRAS G12R)
NRGAGISAV

SEQ ID NO: 14135 - protein, 9 aa, synthetic construct
  source 1..9: note = Seed: ARGVGKSAL (KRAS G12R)
NRGAGLSAA

SEQ ID NO: 14136 - protein, 9 aa, synthetic construct
  source 1..9: note = Seed: ARGVGKSAL (KRAS G12R)
NRGAGLSAG

SEQ ID NO: 14137 - protein, 9 aa, synthetic construct
  source 1..9: note = Seed: ARGVGKSAL (KRAS G12R)
NRGAGLSAI

SEQ ID NO: 14138 - protein, 9 aa, synthetic construct
  source 1..9: note = Seed: ARGVGKSAL (KRAS G12R)
NRGAGLSAM

SEQ ID NO: 14139 - protein, 9 aa, synthetic construct
  source 1..9: note = Seed: ARGVGKSAL (KRAS G12R)
NRGAGLSAS

SEQ ID NO: 14140 - protein, 9 aa, synthetic construct
  source 1..9: note = Seed: ARGVGKSAL (KRAS G12R)
NRGAGLSAT

SEQ ID NO: 14141 - protein, 9 aa, synthetic construct
  source 1..9: note = Seed: ARGVGKSAL (KRAS G12R)
NRGAGLSAV

SEQ ID NO: 14142 - protein, 9 aa, synthetic construct
  source 1..9: note = Seed: ARGVGKSAL (KRAS G12R)
NRGAGMSAA

SEQ ID NO: 14143 - protein, 9 aa, synthetic construct
  source 1..9: note = Seed: ARGVGKSAL (KRAS G12R)
NRGAGMSAG

SEQ ID NO: 14144 - protein, 9 aa, synthetic construct
  source 1..9: note = Seed: ARGVGKSAL (KRAS G12R)
NRGAGMSAI

SEQ ID NO: 14145 - protein, 9 aa, synthetic construct
  source 1..9: note = Seed: ARGVGKSAL (KRAS G12R)
NRGAGMSAS

SEQ ID NO: 14146 - protein, 9 aa, synthetic construct
  source 1..9: note = Seed: ARGVGKSAL (KRAS G12R)
NRGAGMSAT

SEQ ID NO: 14147 - protein, 9 aa, synthetic construct
  source 1..9: note = Seed: ARGVGKSAL (KRAS G12R)
NRGAGMSAV

SEQ ID NO: 14148 - protein, 9 aa, synthetic construct
  source 1..9: note = Seed: ARGVGKSAL (KRAS G12R)
NRGAGNSAA

SEQ ID NO: 14149 - protein, 9 aa, synthetic construct
  source 1..9: note = Seed: ARGVGKSAL (KRAS G12R)
NRGAGPSAA

SEQ ID NO: 14150 - protein, 9 aa, synthetic construct
  source 1..9: note = Seed: ARGVGKSAL (KRAS G12R)
NRGAGSSAA

SEQ ID NO: 14151 - protein, 9 aa, synthetic construct
  source 1..9: note = Seed: ARGVGKSAL (KRAS G12R)
NRGAGTSAA

SEQ ID NO: 14152 - protein, 9 aa, synthetic construct
  source 1..9: note = Seed: ARGVGKSAL (KRAS G12R)
NRGAGVSAA

SEQ ID NO: 14153 - protein, 9 aa, synthetic construct
  source 1..9: note = Seed: ARGVGKSAL (KRAS G12R)
NRGAGVSAG

SEQ ID NO: 14154 - protein, 9 aa, synthetic construct
  source 1..9: note = Seed: ARGVGKSAL (KRAS G12R)
NRGAGVSAI

SEQ ID NO: 14155 - protein, 9 aa, synthetic construct
  source 1..9: note = Seed: ARGVGKSAL (KRAS G12R)
NRGAGVSAL

SEQ ID NO: 14156 - protein, 9 aa, synthetic construct
  source 1..9: note = Seed: ARGVGKSAL (KRAS G12R)
NRGAGVSAM

SEQ ID NO: 14157 - protein, 9 aa, synthetic construct
  source 1..9: note = Seed: ARGVGKSAL (KRAS G12R)
NRGAGVSAS

SEQ ID NO: 14158 - protein, 9 aa, synthetic construct
  source 1..9: note = Seed: ARGVGKSAL (KRAS G12R)
NRGAGVSAT

SEQ ID NO: 14159 - protein, 9 aa, synthetic construct
  source 1..9: note = Seed: ARGVGKSAL (KRAS G12R)
NRGAGVSAV

SEQ ID NO: 14160 - protein, 9 aa, synthetic construct
  source 1..9: note = Seed: ARGVGKSAL (KRAS G12R)
NRGFGISAA

SEQ ID NO: 14161 - protein, 9 aa, synthetic construct
  source 1..9: note = Seed: ARGVGKSAL (KRAS G12R)
NRGGGISAA

SEQ ID NO: 14162 - protein, 9 aa, synthetic construct
  source 1..9: note = Seed: ARGVGKSAL (KRAS G12R)
NRGGGISAS

SEQ ID NO: 14163 - protein, 9 aa, synthetic construct
  source 1..9: note = Seed: ARGVGKSAL (KRAS G12R)
NRGGGISAV

SEQ ID NO: 14164 - protein, 9 aa, synthetic construct
  source 1..9: note = Seed: ARGVGKSAL (KRAS G12R)
NRGGGMSAA

SEQ ID NO: 14165 - protein, 9 aa, synthetic construct
  source 1..9: note = Seed: ARGVGKSAL (KRAS G12R)
NRGGGVSAA

SEQ ID NO: 14166 - protein, 9 aa, synthetic construct
  source 1..9: note = Seed: ARGVGKSAL (KRAS G12R)
NRGGGVSAS

SEQ ID NO: 14167 - protein, 9 aa, synthetic construct
  source 1..9: note = Seed: ARGVGKSAL (KRAS G12R)
NRGIGASAA

SEQ ID NO: 14168 - protein, 9 aa, synthetic construct
  source 1..9: note = Seed: ARGVGKSAL (KRAS G12R)
NRGIGISAA

SEQ ID NO: 14169 - protein, 9 aa, synthetic construct
  source 1..9: note = Seed: ARGVGKSAL (KRAS G12R)
NRGIGISAS

SEQ ID NO: 14170 - protein, 9 aa, synthetic construct
  source 1..9: note = Seed: ARGVGKSAL (KRAS G12R)
NRGIGLSAA

SEQ ID NO: 14171 - protein, 9 aa, synthetic construct
  source 1..9: note = Seed: ARGVGKSAL (KRAS G12R)
NRGIGLSAS

SEQ ID NO: 14172 - protein, 9 aa, synthetic construct
  source 1..9: note = Seed: ARGVGKSAL (KRAS G12R)
NRGIGMSAA

SEQ ID NO: 14173 - protein, 9 aa, synthetic construct
  source 1..9: note = Seed: ARGVGKSAL (KRAS G12R)
NRGIGVSAA

SEQ ID NO: 14174 - protein, 9 aa, synthetic construct
  source 1..9: note = Seed: ARGVGKSAL (KRAS G12R)
NRGIGVSAS

SEQ ID NO: 14175 - protein, 9 aa, synthetic construct
  source 1..9: note = Seed: ARGVGKSAL (KRAS G12R)
NRGLGISAA

SEQ ID NO: 14176 - protein, 9 aa, synthetic construct
  source 1..9: note = Seed: ARGVGKSAL (KRAS G12R)
NRGLGVSAA

SEQ ID NO: 14177 - protein, 9 aa, synthetic construct
  source 1..9: note = Seed: ARGVGKSAL (KRAS G12R)
NRGMGASAA

SEQ ID NO: 14178 - protein, 9 aa, synthetic construct
  source 1..9: note = Seed: ARGVGKSAL (KRAS G12R)
NRGMGISAA

SEQ ID NO: 14179 - protein, 9 aa, synthetic construct
  source 1..9: note = Seed: ARGVGKSAL (KRAS G12R)
NRGMGISAS

SEQ ID NO: 14180 - protein, 9 aa, synthetic construct
  source 1..9: note = Seed: ARGVGKSAL (KRAS G12R)
NRGMGVSAA

SEQ ID NO: 14181 - protein, 9 aa, synthetic construct
  source 1..9: note = Seed: ARGVGKSAL (KRAS G12R)
NRGNGISAA

SEQ ID NO: 14182 - protein, 9 aa, synthetic construct
  source 1..9: note = Seed: ARGVGKSAL (KRAS G12R)
NRGSGASAA

SEQ ID NO: 14183 - protein, 9 aa, synthetic construct
  source 1..9: note = Seed: ARGVGKSAL (KRAS G12R)
NRGSGASAS

SEQ ID NO: 14184 - protein, 9 aa, synthetic construct
  source 1..9: note = Seed: ARGVGKSAL (KRAS G12R)
NRGSGASAV

SEQ ID NO: 14185 - protein, 9 aa, synthetic construct
  source 1..9: note = Seed: ARGVGKSAL (KRAS G12R)
NRGSGISAA

SEQ ID NO: 14186 - protein, 9 aa, synthetic construct
  source 1..9: note = Seed: ARGVGKSAL (KRAS G12R)
NRGSGISAG

SEQ ID NO: 14187 - protein, 9 aa, synthetic construct
  source 1..9: note = Seed: ARGVGKSAL (KRAS G12R)
NRGSGISAI

SEQ ID NO: 14188 - protein, 9 aa, synthetic construct
  source 1..9: note = Seed: ARGVGKSAL (KRAS G12R)
NRGSGISAM

SEQ ID NO: 14189 - protein, 9 aa, synthetic construct
  source 1..9: note = Seed: ARGVGKSAL (KRAS G12R)
NRGSGISAS

SEQ ID NO: 14190 - protein, 9 aa, synthetic construct
  source 1..9: note = Seed: ARGVGKSAL (KRAS G12R)
NRGSGISAT

SEQ ID NO: 14191 - protein, 9 aa, synthetic construct
  source 1..9: note = Seed: ARGVGKSAL (KRAS G12R)
NRGSGISAV

SEQ ID NO: 14192 - protein, 9 aa, synthetic construct
  source 1..9: note = Seed: ARGVGKSAL (KRAS G12R)
NRGSGLSAA

SEQ ID NO: 14193 - protein, 9 aa, synthetic construct
  source 1..9: note = Seed: ARGVGKSAL (KRAS G12R)
NRGSGLSAS

SEQ ID NO: 14194 - protein, 9 aa, synthetic construct
  source 1..9: note = Seed: ARGVGKSAL (KRAS G12R)
NRGSGMSAA

SEQ ID NO: 14195 - protein, 9 aa, synthetic construct
  source 1..9: note = Seed: ARGVGKSAL (KRAS G12R)
NRGSGMSAS

SEQ ID NO: 14196 - protein, 9 aa, synthetic construct
  source 1..9: note = Seed: ARGVGKSAL (KRAS G12R)
NRGSGVSAA

SEQ ID NO: 14197 - protein, 9 aa, synthetic construct
  source 1..9: note = Seed: ARGVGKSAL (KRAS G12R)
NRGSGVSAG

SEQ ID NO: 14198 - protein, 9 aa, synthetic construct
  source 1..9: note = Seed: ARGVGKSAL (KRAS G12R)
NRGSGVSAI

SEQ ID NO: 14199 - protein, 9 aa, synthetic construct
  source 1..9: note = Seed: ARGVGKSAL (KRAS G12R)
NRGSGVSAM

SEQ ID NO: 14200 - protein, 9 aa, synthetic construct
  source 1..9: note = Seed: ARGVGKSAL (KRAS G12R)
NRGSGVSAS

SEQ ID NO: 14201 - protein, 9 aa, synthetic construct
  source 1..9: note = Seed: ARGVGKSAL (KRAS G12R)
NRGSGVSAT

SEQ ID NO: 14202 - protein, 9 aa, synthetic construct
  source 1..9: note = Seed: ARGVGKSAL (KRAS G12R)
NRGSGVSAV

SEQ ID NO: 14203 - protein, 9 aa, synthetic construct
  source 1..9: note = Seed: ARGVGKSAL (KRAS G12R)
NRGTGASAA

SEQ ID NO: 14204 - protein, 9 aa, synthetic construct
  source 1..9: note = Seed: ARGVGKSAL (KRAS G12R)
NRGTGISAA

SEQ ID NO: 14205 - protein, 9 aa, synthetic construct
  source 1..9: note = Seed: ARGVGKSAL (KRAS G12R)
NRGTGISAS

SEQ ID NO: 14206 - protein, 9 aa, synthetic construct
  source 1..9: note = Seed: ARGVGKSAL (KRAS G12R)
NRGTGLSAA

SEQ ID NO: 14207 - protein, 9 aa, synthetic construct
  source 1..9: note = Seed: ARGVGKSAL (KRAS G12R)
NRGTGMSAA

SEQ ID NO: 14208 - protein, 9 aa, synthetic construct
  source 1..9: note = Seed: ARGVGKSAL (KRAS G12R)
NRGTGVSAA

SEQ ID NO: 14209 - protein, 9 aa, synthetic construct
  source 1..9: note = Seed: ARGVGKSAL (KRAS G12R)
NRGTGVSAS

SEQ ID NO: 14210 - protein, 9 aa, synthetic construct
  source 1..9: note = Seed: ARGVGKSAL (KRAS G12R)
NRGVGASAA

SEQ ID NO: 14211 - protein, 9 aa, synthetic construct
  source 1..9: note = Seed: ARGVGKSAL (KRAS G12R)
NRGVGISAA

SEQ ID NO: 14212 - protein, 9 aa, synthetic construct
  source 1..9: note = Seed: ARGVGKSAL (KRAS G12R)
NRGVGISAS

SEQ ID NO: 14213 - protein, 9 aa, synthetic construct
  source 1..9: note = Seed: ARGVGKSAL (KRAS G12R)
NRGVGISAV

SEQ ID NO: 14214 - protein, 9 aa, synthetic construct
  source 1..9: note = Seed: ARGVGKSAL (KRAS G12R)
NRGVGLSAA

SEQ ID NO: 14215 - protein, 9 aa, synthetic construct
  source 1..9: note = Seed: ARGVGKSAL (KRAS G12R)
NRGVGMSAA

SEQ ID NO: 14216 - protein, 9 aa, synthetic construct
  source 1..9: note = Seed: ARGVGKSAL (KRAS G12R)
NRGVGVSAA

SEQ ID NO: 14217 - protein, 9 aa, synthetic construct
  source 1..9: note = Seed: ARGVGKSAL (KRAS G12R)
NRGVGVSAS

SEQ ID NO: 14218 - protein, 9 aa, synthetic construct
  source 1..9: note = Seed: ARGVGKSAL (KRAS G12R)
QRGAGISAA

SEQ ID NO: 14219 - protein, 9 aa, synthetic construct
  source 1..9: note = Seed: ARGVGKSAL (KRAS G12R)
QRGAGISAS

SEQ ID NO: 14220 - protein, 9 aa, synthetic construct
  source 1..9: note = Seed: ARGVGKSAL (KRAS G12R)
QRGAGMSAA

SEQ ID NO: 14221 - protein, 9 aa, synthetic construct
  source 1..9: note = Seed: ARGVGKSAL (KRAS G12R)
QRGAGVSAA

SEQ ID NO: 14222 - protein, 9 aa, synthetic construct
  source 1..9: note = Seed: ARGVGKSAL (KRAS G12R)
QRGSGISAA

SEQ ID NO: 14223 - protein, 9 aa, synthetic construct
  source 1..9: note = Seed: ARGVGKSAL (KRAS G12R)
QRGSGVSAA

SEQ ID NO: 14224 - protein, 9 aa, synthetic construct
  source 1..9: note = Seed: ARGVGKSAL (KRAS G12R)
SRGAGASAA

SEQ ID NO: 14225 - protein, 9 aa, synthetic construct
  source 1..9: note = Seed: ARGVGKSAL (KRAS G12R)
SRGAGASAS

SEQ ID NO: 14226 - protein, 9 aa, synthetic construct
  source 1..9: note = Seed: ARGVGKSAL (KRAS G12R)
SRGAGASAV

SEQ ID NO: 14227 - protein, 9 aa, synthetic construct
  source 1..9: note = Seed: ARGVGKSAL (KRAS G12R)
SRGAGISAA

SEQ ID NO: 14228 - protein, 9 aa, synthetic construct
  source 1..9: note = Seed: ARGVGKSAL (KRAS G12R)
SRGAGISAG

SEQ ID NO: 14229 - protein, 9 aa, synthetic construct
  source 1..9: note = Seed: ARGVGKSAL (KRAS G12R)
SRGAGISAS

SEQ ID NO: 14230 - protein, 9 aa, synthetic construct
  source 1..9: note = Seed: ARGVGKSAL (KRAS G12R)
SRGAGLSAA

SEQ ID NO: 14231 - protein, 9 aa, synthetic construct
  source 1..9: note = Seed: ARGVGKSAL (KRAS G12R)
SRGAGLSAS

SEQ ID NO: 14232 - protein, 9 aa, synthetic construct
  source 1..9: note = Seed: ARGVGKSAL (KRAS G12R)
SRGAGMSAA

SEQ ID NO: 14233 - protein, 9 aa, synthetic construct
  source 1..9: note = Seed: ARGVGKSAL (KRAS G12R)
SRGAGMSAS

SEQ ID NO: 14234 - protein, 9 aa, synthetic construct
  source 1..9: note = Seed: ARGVGKSAL (KRAS G12R)
SRGAGSSAA

SEQ ID NO: 14235 - protein, 9 aa, synthetic construct
  source 1..9: note = Seed: ARGVGKSAL (KRAS G12R)
SRGAGVSAA

SEQ ID NO: 14236 - protein, 9 aa, synthetic construct
  source 1..9: note = Seed: ARGVGKSAL (KRAS G12R)
SRGAGVSAS

SEQ ID NO: 14237 - protein, 9 aa, synthetic construct
  source 1..9: note = Seed: ARGVGKSAL (KRAS G12R)
SRGIGASAA

SEQ ID NO: 14238 - protein, 9 aa, synthetic construct
  source 1..9: note = Seed: ARGVGKSAL (KRAS G12R)
SRGIGISAA

SEQ ID NO: 14239 - protein, 9 aa, synthetic construct
  source 1..9: note = Seed: ARGVGKSAL (KRAS G12R)
SRGMGASAA

SEQ ID NO: 14240 - protein, 9 aa, synthetic construct
  source 1..9: note = Seed: ARGVGKSAL (KRAS G12R)
SRGMGISAA

SEQ ID NO: 14241 - protein, 9 aa, synthetic construct
  source 1..9: note = Seed: ARGVGKSAL (KRAS G12R)
SRGSGASAA

SEQ ID NO: 14242 - protein, 9 aa, synthetic construct
  source 1..9: note = Seed: ARGVGKSAL (KRAS G12R)
SRGSGISAA

SEQ ID NO: 14243 - protein, 9 aa, synthetic construct
  source 1..9: note = Seed: ARGVGKSAL (KRAS G12R)
SRGSGISAS

SEQ ID NO: 14244 - protein, 9 aa, synthetic construct
  source 1..9: note = Seed: ARGVGKSAL (KRAS G12R)
SRGSGMSAA

SEQ ID NO: 14245 - protein, 9 aa, synthetic construct
  source 1..9: note = Seed: ARGVGKSAL (KRAS G12R)
SRGSGVSAA

SEQ ID NO: 14246 - protein, 9 aa, synthetic construct
  source 1..9: note = Seed: ARGVGKSAL (KRAS G12R)
SRGSGVSAS

SEQ ID NO: 14247 - protein, 9 aa, synthetic construct
  source 1..9: note = Seed: ARGVGKSAL (KRAS G12R)
SRGTGISAA

SEQ ID NO: 14248 - protein, 9 aa, synthetic construct
  source 1..9: note = Seed: ARGVGKSAL (KRAS G12R)
SRGVGASAA

SEQ ID NO: 14249 - protein, 9 aa, synthetic construct
  source 1..9: note = Seed: ARGVGKSAL (KRAS G12R)
SRGVGISAA

SEQ ID NO: 14250 - protein, 9 aa, synthetic construct
  source 1..9: note = Seed: ARGVGKSAL (KRAS G12R)
TRGAGASAA

SEQ ID NO: 14251 - protein, 9 aa, synthetic construct
  source 1..9: note = Seed: ARGVGKSAL (KRAS G12R)
TRGAGISAA

SEQ ID NO: 14252 - protein, 9 aa, synthetic construct
  source 1..9: note = Seed: ARGVGKSAL (KRAS G12R)
TRGAGISAS

SEQ ID NO: 14253 - protein, 9 aa, synthetic construct
  source 1..9: note = Seed: ARGVGKSAL (KRAS G12R)
TRGAGLSAA

SEQ ID NO: 14254 - protein, 9 aa, synthetic construct
  source 1..9: note = Seed: ARGVGKSAL (KRAS G12R)
TRGAGMSAA

SEQ ID NO: 14255 - protein, 9 aa, synthetic construct
  source 1..9: note = Seed: ARGVGKSAL (KRAS G12R)
TRGAGMSAS

SEQ ID NO: 14256 - protein, 9 aa, synthetic construct
  source 1..9: note = Seed: ARGVGKSAL (KRAS G12R)
TRGAGVSAA

SEQ ID NO: 14257 - protein, 9 aa, synthetic construct
  source 1..9: note = Seed: ARGVGKSAL (KRAS G12R)
TRGAGVSAS

SEQ ID NO: 14258 - protein, 9 aa, synthetic construct
  source 1..9: note = Seed: ARGVGKSAL (KRAS G12R)
TRGSGASAA

SEQ ID NO: 14259 - protein, 9 aa, synthetic construct
  source 1..9: note = Seed: ARGVGKSAL (KRAS G12R)
TRGSGISAA

SEQ ID NO: 14260 - protein, 9 aa, synthetic construct
  source 1..9: note = Seed: ARGVGKSAL (KRAS G12R)
TRGSGISAS

SEQ ID NO: 14261 - protein, 9 aa, synthetic construct
  source 1..9: note = Seed: ARGVGKSAL (KRAS G12R)
TRGSGMSAA

SEQ ID NO: 14262 - protein, 9 aa, synthetic construct
  source 1..9: note = Seed: ARGVGKSAL (KRAS G12R)
TRGSGVSAA

SEQ ID NO: 14263 - protein, 9 aa, synthetic construct
  source 1..9: note = Seed: ARGVGKSAL (KRAS G12R)
VRGAGASAA

SEQ ID NO: 14264 - protein, 9 aa, synthetic construct
  source 1..9: note = Seed: ARGVGKSAL (KRAS G12R)
VRGAGASAG

SEQ ID NO: 14265 - protein, 9 aa, synthetic construct
  source 1..9: note = Seed: ARGVGKSAL (KRAS G12R)
VRGAGASAH

SEQ ID NO: 14266 - protein, 9 aa, synthetic construct
  source 1..9: note = Seed: ARGVGKSAL (KRAS G12R)
VRGAGASAI

SEQ ID NO: 14267 - protein, 9 aa, synthetic construct
  source 1..9: note = Seed: ARGVGKSAL (KRAS G12R)
VRGAGASAM

SEQ ID NO: 14268 - protein, 9 aa, synthetic construct
  source 1..9: note = Seed: ARGVGKSAL (KRAS G12R)
VRGAGASAS

SEQ ID NO: 14269 - protein, 9 aa, synthetic construct
  source 1..9: note = Seed: ARGVGKSAL (KRAS G12R)
VRGAGASAV

SEQ ID NO: 14270 - protein, 9 aa, synthetic construct
  source 1..9: note = Seed: ARGVGKSAL (KRAS G12R)
VRGAGISAA

SEQ ID NO: 14271 - protein, 9 aa, synthetic construct
  source 1..9: note = Seed: ARGVGKSAL (KRAS G12R)
VRGAGISAG

SEQ ID NO: 14272 - protein, 9 aa, synthetic construct
  source 1..9: note = Seed: ARGVGKSAL (KRAS G12R)
VRGAGISAH

SEQ ID NO: 14273 - protein, 9 aa, synthetic construct
  source 1..9: note = Seed: ARGVGKSAL (KRAS G12R)
VRGAGISAI

SEQ ID NO: 14274 - protein, 9 aa, synthetic construct
  source 1..9: note = Seed: ARGVGKSAL (KRAS G12R)
VRGAGISAM

SEQ ID NO: 14275 - protein, 9 aa, synthetic construct
  source 1..9: note = Seed: ARGVGKSAL (KRAS G12R)
VRGAGISAN

SEQ ID NO: 14276 - protein, 9 aa, synthetic construct
  source 1..9: note = Seed: ARGVGKSAL (KRAS G12R)
VRGAGISAS

SEQ ID NO: 14277 - protein, 9 aa, synthetic construct
  source 1..9: note = Seed: ARGVGKSAL (KRAS G12R)
VRGAGISAT

SEQ ID NO: 14278 - protein, 9 aa, synthetic construct
  source 1..9: note = Seed: ARGVGKSAL (KRAS G12R)
VRGAGISAV

SEQ ID NO: 14279 - protein, 9 aa, synthetic construct
  source 1..9: note = Seed: ARGVGKSAL (KRAS G12R)
VRGAGLSAA

SEQ ID NO: 14280 - protein, 9 aa, synthetic construct
  source 1..9: note = Seed: ARGVGKSAL (KRAS G12R)
VRGAGLSAS

SEQ ID NO: 14281 - protein, 9 aa, synthetic construct
  source 1..9: note = Seed: ARGVGKSAL (KRAS G12R)
VRGAGMSAA

SEQ ID NO: 14282 - protein, 9 aa, synthetic construct
  source 1..9: note = Seed: ARGVGKSAL (KRAS G12R)
VRGAGMSAG

SEQ ID NO: 14283 - protein, 9 aa, synthetic construct
  source 1..9: note = Seed: ARGVGKSAL (KRAS G12R)
VRGAGMSAS

SEQ ID NO: 14284 - protein, 9 aa, synthetic construct
  source 1..9: note = Seed: ARGVGKSAL (KRAS G12R)
VRGAGNSAA

SEQ ID NO: 14285 - protein, 9 aa, synthetic construct
  source 1..9: note = Seed: ARGVGKSAL (KRAS G12R)
VRGAGPSAA

SEQ ID NO: 14286 - protein, 9 aa, synthetic construct
  source 1..9: note = Seed: ARGVGKSAL (KRAS G12R)
VRGAGPSAS

SEQ ID NO: 14287 - protein, 9 aa, synthetic construct
  source 1..9: note = Seed: ARGVGKSAL (KRAS G12R)
VRGAGRSAR

SEQ ID NO: 14288 - protein, 9 aa, synthetic construct
  source 1..9: note = Seed: ARGVGKSAL (KRAS G12R)
VRGAGSSAA

SEQ ID NO: 14289 - protein, 9 aa, synthetic construct
  source 1..9: note = Seed: ARGVGKSAL (KRAS G12R)
VRGAGSSAS

SEQ ID NO: 14290 - protein, 9 aa, synthetic construct
  source 1..9: note = Seed: ARGVGKSAL (KRAS G12R)
VRGAGTSAA

SEQ ID NO: 14291 - protein, 9 aa, synthetic construct
  source 1..9: note = Seed: ARGVGKSAL (KRAS G12R)
VRGAGTSAS

SEQ ID NO: 14292 - protein, 9 aa, synthetic construct
  source 1..9: note = Seed: ARGVGKSAL (KRAS G12R)
VRGAGVSAA

SEQ ID NO: 14293 - protein, 9 aa, synthetic construct
  source 1..9: note = Seed: ARGVGKSAL (KRAS G12R)
VRGAGVSAG

SEQ ID NO: 14294 - protein, 9 aa, synthetic construct
  source 1..9: note = Seed: ARGVGKSAL (KRAS G12R)
VRGAGVSAH

SEQ ID NO: 14295 - protein, 9 aa, synthetic construct
  source 1..9: note = Seed: ARGVGKSAL (KRAS G12R)
VRGAGVSAI

SEQ ID NO: 14296 - protein, 9 aa, synthetic construct
  source 1..9: note = Seed: ARGVGKSAL (KRAS G12R)
VRGAGVSAM

SEQ ID NO: 14297 - protein, 9 aa, synthetic construct
  source 1..9: note = Seed: ARGVGKSAL (KRAS G12R)
VRGAGVSAS

SEQ ID NO: 14298 - protein, 9 aa, synthetic construct
  source 1..9: note = Seed: ARGVGKSAL (KRAS G12R)
VRGAGVSAT

SEQ ID NO: 14299 - protein, 9 aa, synthetic construct
  source 1..9: note = Seed: ARGVGKSAL (KRAS G12R)
VRGAGVSAV

SEQ ID NO: 14300 - protein, 9 aa, synthetic construct
  source 1..9: note = Seed: ARGVGKSAL (KRAS G12R)
VRGFGKSAA

SEQ ID NO: 14301 - protein, 9 aa, synthetic construct
  source 1..9: note = Seed: ARGVGKSAL (KRAS G12R)
VRGFGKSAF

SEQ ID NO: 14302 - protein, 9 aa, synthetic construct
  source 1..9: note = Seed: ARGVGKSAL (KRAS G12R)
VRGFGKSAI

SEQ ID NO: 14303 - protein, 9 aa, synthetic construct
  source 1..9: note = Seed: ARGVGKSAL (KRAS G12R)
VRGFGKSAK

SEQ ID NO: 14304 - protein, 9 aa, synthetic construct
  source 1..9: note = Seed: ARGVGKSAL (KRAS G12R)
VRGFGKSAL

SEQ ID NO: 14305 - protein, 9 aa, synthetic construct
  source 1..9: note = Seed: ARGVGKSAL (KRAS G12R)
VRGFGKSAM

SEQ ID NO: 14306 - protein, 9 aa, synthetic construct
  source 1..9: note = Seed: ARGVGKSAL (KRAS G12R)
VRGFGKSAR

SEQ ID NO: 14307 - protein, 9 aa, synthetic construct
  source 1..9: note = Seed: ARGVGKSAL (KRAS G12R)
VRGFGKSAS

SEQ ID NO: 14308 - protein, 9 aa, synthetic construct
  source 1..9: note = Seed: ARGVGKSAL (KRAS G12R)
VRGFGKSAV

SEQ ID NO: 14309 - protein, 9 aa, synthetic construct
  source 1..9: note = Seed: ARGVGKSAL (KRAS G12R)
VRGFGKSAY

SEQ ID NO: 14310 - protein, 9 aa, synthetic construct
  source 1..9: note = Seed: ARGVGKSAL (KRAS G12R)
VRGFGRSAA

SEQ ID NO: 14311 - protein, 9 aa, synthetic construct
  source 1..9: note = Seed: ARGVGKSAL (KRAS G12R)
VRGFGRSAF

SEQ ID NO: 14312 - protein, 9 aa, synthetic construct
  source 1..9: note = Seed: ARGVGKSAL (KRAS G12R)
VRGFGRSAG

SEQ ID NO: 14313 - protein, 9 aa, synthetic construct
  source 1..9: note = Seed: ARGVGKSAL (KRAS G12R)
VRGFGRSAH

SEQ ID NO: 14314 - protein, 9 aa, synthetic construct
  source 1..9: note = Seed: ARGVGKSAL (KRAS G12R)
VRGFGRSAI

SEQ ID NO: 14315 - protein, 9 aa, synthetic construct
  source 1..9: note = Seed: ARGVGKSAL (KRAS G12R)
VRGFGRSAK

SEQ ID NO: 14316 - protein, 9 aa, synthetic construct
  source 1..9: note = Seed: ARGVGKSAL (KRAS G12R)
VRGFGRSAL

SEQ ID NO: 14317 - protein, 9 aa, synthetic construct
  source 1..9: note = Seed: ARGVGKSAL (KRAS G12R)
VRGFGRSAM

SEQ ID NO: 14318 - protein, 9 aa, synthetic construct
  source 1..9: note = Seed: ARGVGKSAL (KRAS G12R)
VRGFGRSAQ

SEQ ID NO: 14319 - protein, 9 aa, synthetic construct
  source 1..9: note = Seed: ARGVGKSAL (KRAS G12R)
VRGFGRSAR

SEQ ID NO: 14320 - protein, 9 aa, synthetic construct
  source 1..9: note = Seed: ARGVGKSAL (KRAS G12R)
VRGFGRSAS

SEQ ID NO: 14321 - protein, 9 aa, synthetic construct
  source 1..9: note = Seed: ARGVGKSAL (KRAS G12R)
VRGFGRSAT

SEQ ID NO: 14322 - protein, 9 aa, synthetic construct
  source 1..9: note = Seed: ARGVGKSAL (KRAS G12R)
VRGFGRSAV

SEQ ID NO: 14323 - protein, 9 aa, synthetic construct
  source 1..9: note = Seed: ARGVGKSAL (KRAS G12R)
VRGFGRSAW

SEQ ID NO: 14324 - protein, 9 aa, synthetic construct
  source 1..9: note = Seed: ARGVGKSAL (KRAS G12R)
VRGFGRSAY

SEQ ID NO: 14325 - protein, 9 aa, synthetic construct
  source 1..9: note = Seed: ARGVGKSAL (KRAS G12R)
VRGGGASAA

SEQ ID NO: 14326 - protein, 9 aa, synthetic construct
  source 1..9: note = Seed: ARGVGKSAL (KRAS G12R)
VRGGGISAA

SEQ ID NO: 14327 - protein, 9 aa, synthetic construct
  source 1..9: note = Seed: ARGVGKSAL (KRAS G12R)
VRGGGISAS

SEQ ID NO: 14328 - protein, 9 aa, synthetic construct
  source 1..9: note = Seed: ARGVGKSAL (KRAS G12R)
VRGGGLSAA

SEQ ID NO: 14329 - protein, 9 aa, synthetic construct
  source 1..9: note = Seed: ARGVGKSAL (KRAS G12R)
VRGGGMSAA

SEQ ID NO: 14330 - protein, 9 aa, synthetic construct
  source 1..9: note = Seed: ARGVGKSAL (KRAS G12R)
VRGGGVSAA

SEQ ID NO: 14331 - protein, 9 aa, synthetic construct
  source 1..9: note = Seed: ARGVGKSAL (KRAS G12R)
VRGGGVSAS

SEQ ID NO: 14332 - protein, 9 aa, synthetic construct
  source 1..9: note = Seed: ARGVGKSAL (KRAS G12R)
VRGHGISAA

SEQ ID NO: 14333 - protein, 9 aa, synthetic construct
  source 1..9: note = Seed: ARGVGKSAL (KRAS G12R)
VRGHGRSAF

SEQ ID NO: 14334 - protein, 9 aa, synthetic construct
  source 1..9: note = Seed: ARGVGKSAL (KRAS G12R)
VRGHGRSAI

SEQ ID NO: 14335 - protein, 9 aa, synthetic construct
  source 1..9: note = Seed: ARGVGKSAL (KRAS G12R)
VRGHGRSAL

SEQ ID NO: 14336 - protein, 9 aa, synthetic construct
  source 1..9: note = Seed: ARGVGKSAL (KRAS G12R)
VRGHGRSAM

SEQ ID NO: 14337 - protein, 9 aa, synthetic construct
  source 1..9: note = Seed: ARGVGKSAL (KRAS G12R)
VRGHGRSAR

SEQ ID NO: 14338 - protein, 9 aa, synthetic construct
  source 1..9: note = Seed: ARGVGKSAL (KRAS G12R)
VRGHGRSAV

SEQ ID NO: 14339 - protein, 9 aa, synthetic construct
  source 1..9: note = Seed: ARGVGKSAL (KRAS G12R)
VRGHGRSAY

SEQ ID NO: 14340 - protein, 9 aa, synthetic construct
  source 1..9: note = Seed: ARGVGKSAL (KRAS G12R)
VRGIGISAA

SEQ ID NO: 14341 - protein, 9 aa, synthetic construct
  source 1..9: note = Seed: ARGVGKSAL (KRAS G12R)
VRGIGKSAA

SEQ ID NO: 14342 - protein, 9 aa, synthetic construct
  source 1..9: note = Seed: ARGVGKSAL (KRAS G12R)
VRGIGKSAI

SEQ ID NO: 14343 - protein, 9 aa, synthetic construct
  source 1..9: note = Seed: ARGVGKSAL (KRAS G12R)
VRGIGKSAK

SEQ ID NO: 14344 - protein, 9 aa, synthetic construct
  source 1..9: note = Seed: ARGVGKSAL (KRAS G12R)
VRGIGKSAL

SEQ ID NO: 14345 - protein, 9 aa, synthetic construct
  source 1..9: note = Seed: ARGVGKSAL (KRAS G12R)
VRGIGKSAM

SEQ ID NO: 14346 - protein, 9 aa, synthetic construct
  source 1..9: note = Seed: ARGVGKSAL (KRAS G12R)
VRGIGKSAR

SEQ ID NO: 14347 - protein, 9 aa, synthetic construct
  source 1..9: note = Seed: ARGVGKSAL (KRAS G12R)
VRGIGKSAS

SEQ ID NO: 14348 - protein, 9 aa, synthetic construct
  source 1..9: note = Seed: ARGVGKSAL (KRAS G12R)
VRGIGKSAV

SEQ ID NO: 14349 - protein, 9 aa, synthetic construct
  source 1..9: note = Seed: ARGVGKSAL (KRAS G12R)
VRGIGKSAY

SEQ ID NO: 14350 - protein, 9 aa, synthetic construct
  source 1..9: note = Seed: ARGVGKSAL (KRAS G12R)
VRGIGRSAA

SEQ ID NO: 14351 - protein, 9 aa, synthetic construct
  source 1..9: note = Seed: ARGVGKSAL (KRAS G12R)
VRGIGRSAF

SEQ ID NO: 14352 - protein, 9 aa, synthetic construct
  source 1..9: note = Seed: ARGVGKSAL (KRAS G12R)
VRGIGRSAG

SEQ ID NO: 14353 - protein, 9 aa, synthetic construct
  source 1..9: note = Seed: ARGVGKSAL (KRAS G12R)
VRGIGRSAH

SEQ ID NO: 14354 - protein, 9 aa, synthetic construct
  source 1..9: note = Seed: ARGVGKSAL (KRAS G12R)
VRGIGRSAI

SEQ ID NO: 14355 - protein, 9 aa, synthetic construct
  source 1..9: note = Seed: ARGVGKSAL (KRAS G12R)
VRGIGRSAK

SEQ ID NO: 14356 - protein, 9 aa, synthetic construct
  source 1..9: note = Seed: ARGVGKSAL (KRAS G12R)
VRGIGRSAL

SEQ ID NO: 14357 - protein, 9 aa, synthetic construct
  source 1..9: note = Seed: ARGVGKSAL (KRAS G12R)
VRGIGRSAM

SEQ ID NO: 14358 - protein, 9 aa, synthetic construct
  source 1..9: note = Seed: ARGVGKSAL (KRAS G12R)
VRGIGRSAQ

SEQ ID NO: 14359 - protein, 9 aa, synthetic construct
  source 1..9: note = Seed: ARGVGKSAL (KRAS G12R)
VRGIGRSAR

SEQ ID NO: 14360 - protein, 9 aa, synthetic construct
  source 1..9: note = Seed: ARGVGKSAL (KRAS G12R)
VRGIGRSAS

SEQ ID NO: 14361 - protein, 9 aa, synthetic construct
  source 1..9: note = Seed: ARGVGKSAL (KRAS G12R)
VRGIGRSAT

SEQ ID NO: 14362 - protein, 9 aa, synthetic construct
  source 1..9: note = Seed: ARGVGKSAL (KRAS G12R)
VRGIGRSAV

SEQ ID NO: 14363 - protein, 9 aa, synthetic construct
  source 1..9: note = Seed: ARGVGKSAL (KRAS G12R)
VRGIGRSAW

SEQ ID NO: 14364 - protein, 9 aa, synthetic construct
  source 1..9: note = Seed: ARGVGKSAL (KRAS G12R)
VRGIGRSAY

SEQ ID NO: 14365 - protein, 9 aa, synthetic construct
  source 1..9: note = Seed: ARGVGKSAL (KRAS G12R)
VRGLGKSAA

SEQ ID NO: 14366 - protein, 9 aa, synthetic construct
  source 1..9: note = Seed: ARGVGKSAL (KRAS G12R)
VRGLGKSAF

SEQ ID NO: 14367 - protein, 9 aa, synthetic construct
  source 1..9: note = Seed: ARGVGKSAL (KRAS G12R)
VRGLGKSAG

SEQ ID NO: 14368 - protein, 9 aa, synthetic construct
  source 1..9: note = Seed: ARGVGKSAL (KRAS G12R)
VRGLGKSAH

SEQ ID NO: 14369 - protein, 9 aa, synthetic construct
  source 1..9: note = Seed: ARGVGKSAL (KRAS G12R)
VRGLGKSAI

SEQ ID NO: 14370 - protein, 9 aa, synthetic construct
  source 1..9: note = Seed: ARGVGKSAL (KRAS G12R)
VRGLGKSAK

SEQ ID NO: 14371 - protein, 9 aa, synthetic construct
  source 1..9: note = Seed: ARGVGKSAL (KRAS G12R)
VRGLGKSAL

SEQ ID NO: 14372 - protein, 9 aa, synthetic construct
  source 1..9: note = Seed: ARGVGKSAL (KRAS G12R)
VRGLGKSAM

SEQ ID NO: 14373 - protein, 9 aa, synthetic construct
  source 1..9: note = Seed: ARGVGKSAL (KRAS G12R)
VRGLGKSAQ

SEQ ID NO: 14374 - protein, 9 aa, synthetic construct
  source 1..9: note = Seed: ARGVGKSAL (KRAS G12R)
VRGLGKSAR

SEQ ID NO: 14375 - protein, 9 aa, synthetic construct
  source 1..9: note = Seed: ARGVGKSAL (KRAS G12R)
VRGLGKSAS

SEQ ID NO: 14376 - protein, 9 aa, synthetic construct
  source 1..9: note = Seed: ARGVGKSAL (KRAS G12R)
VRGLGKSAT

SEQ ID NO: 14377 - protein, 9 aa, synthetic construct
  source 1..9: note = Seed: ARGVGKSAL (KRAS G12R)
VRGLGKSAV

SEQ ID NO: 14378 - protein, 9 aa, synthetic construct
  source 1..9: note = Seed: ARGVGKSAL (KRAS G12R)
VRGLGKSAY

SEQ ID NO: 14379 - protein, 9 aa, synthetic construct
  source 1..9: note = Seed: ARGVGKSAL (KRAS G12R)
VRGLGRSAA

SEQ ID NO: 14380 - protein, 9 aa, synthetic construct
  source 1..9: note = Seed: ARGVGKSAL (KRAS G12R)
VRGLGRSAF

SEQ ID NO: 14381 - protein, 9 aa, synthetic construct
  source 1..9: note = Seed: ARGVGKSAL (KRAS G12R)
VRGLGRSAG

SEQ ID NO: 14382 - protein, 9 aa, synthetic construct
  source 1..9: note = Seed: ARGVGKSAL (KRAS G12R)
VRGLGRSAH

SEQ ID NO: 14383 - protein, 9 aa, synthetic construct
  source 1..9: note = Seed: ARGVGKSAL (KRAS G12R)
VRGLGRSAI

SEQ ID NO: 14384 - protein, 9 aa, synthetic construct
  source 1..9: note = Seed: ARGVGKSAL (KRAS G12R)
VRGLGRSAK

SEQ ID NO: 14385 - protein, 9 aa, synthetic construct
  source 1..9: note = Seed: ARGVGKSAL (KRAS G12R)
VRGLGRSAL

SEQ ID NO: 14386 - protein, 9 aa, synthetic construct
  source 1..9: note = Seed: ARGVGKSAL (KRAS G12R)
VRGLGRSAM

SEQ ID NO: 14387 - protein, 9 aa, synthetic construct
  source 1..9: note = Seed: ARGVGKSAL (KRAS G12R)
VRGLGRSAN

SEQ ID NO: 14388 - protein, 9 aa, synthetic construct
  source 1..9: note = Seed: ARGVGKSAL (KRAS G12R)
VRGLGRSAQ

SEQ ID NO: 14389 - protein, 9 aa, synthetic construct
  source 1..9: note = Seed: ARGVGKSAL (KRAS G12R)
VRGLGRSAR

SEQ ID NO: 14390 - protein, 9 aa, synthetic construct
  source 1..9: note = Seed: ARGVGKSAL (KRAS G12R)
VRGLGRSAS

SEQ ID NO: 14391 - protein, 9 aa, synthetic construct
  source 1..9: note = Seed: ARGVGKSAL (KRAS G12R)
VRGLGRSAT

SEQ ID NO: 14392 - protein, 9 aa, synthetic construct
  source 1..9: note = Seed: ARGVGKSAL (KRAS G12R)
VRGLGRSAV

SEQ ID NO: 14393 - protein, 9 aa, synthetic construct
  source 1..9: note = Seed: ARGVGKSAL (KRAS G12R)
VRGLGRSAW

SEQ ID NO: 14394 - protein, 9 aa, synthetic construct
  source 1..9: note = Seed: ARGVGKSAL (KRAS G12R)
VRGLGRSAY

SEQ ID NO: 14395 - protein, 9 aa, synthetic construct
  source 1..9: note = Seed: ARGVGKSAL (KRAS G12R)
VRGMGISAA

SEQ ID NO: 14396 - protein, 9 aa, synthetic construct
  source 1..9: note = Seed: ARGVGKSAL (KRAS G12R)
VRGMGKSAA

SEQ ID NO: 14397 - protein, 9 aa, synthetic construct
  source 1..9: note = Seed: ARGVGKSAL (KRAS G12R)
VRGMGKSAH

SEQ ID NO: 14398 - protein, 9 aa, synthetic construct
  source 1..9: note = Seed: ARGVGKSAL (KRAS G12R)
VRGMGKSAI

SEQ ID NO: 14399 - protein, 9 aa, synthetic construct
  source 1..9: note = Seed: ARGVGKSAL (KRAS G12R)
VRGMGKSAK

SEQ ID NO: 14400 - protein, 9 aa, synthetic construct
  source 1..9: note = Seed: ARGVGKSAL (KRAS G12R)
VRGMGKSAL

SEQ ID NO: 14401 - protein, 9 aa, synthetic construct
  source 1..9: note = Seed: ARGVGKSAL (KRAS G12R)
VRGMGKSAM

SEQ ID NO: 14402 - protein, 9 aa, synthetic construct
  source 1..9: note = Seed: ARGVGKSAL (KRAS G12R)
VRGMGKSAQ

SEQ ID NO: 14403 - protein, 9 aa, synthetic construct
  source 1..9: note = Seed: ARGVGKSAL (KRAS G12R)
VRGMGKSAR

SEQ ID NO: 14404 - protein, 9 aa, synthetic construct
  source 1..9: note = Seed: ARGVGKSAL (KRAS G12R)
VRGMGKSAS

SEQ ID NO: 14405 - protein, 9 aa, synthetic construct
  source 1..9: note = Seed: ARGVGKSAL (KRAS G12R)
VRGMGKSAT

SEQ ID NO: 14406 - protein, 9 aa, synthetic construct
  source 1..9: note = Seed: ARGVGKSAL (KRAS G12R)
VRGMGKSAV

SEQ ID NO: 14407 - protein, 9 aa, synthetic construct
  source 1..9: note = Seed: ARGVGKSAL (KRAS G12R)
VRGMGRSAA

SEQ ID NO: 14408 - protein, 9 aa, synthetic construct
  source 1..9: note = Seed: ARGVGKSAL (KRAS G12R)
VRGMGRSAF

SEQ ID NO: 14409 - protein, 9 aa, synthetic construct
  source 1..9: note = Seed: ARGVGKSAL (KRAS G12R)
VRGMGRSAG

SEQ ID NO: 14410 - protein, 9 aa, synthetic construct
  source 1..9: note = Seed: ARGVGKSAL (KRAS G12R)
VRGMGRSAH

SEQ ID NO: 14411 - protein, 9 aa, synthetic construct
  source 1..9: note = Seed: ARGVGKSAL (KRAS G12R)
VRGMGRSAI

SEQ ID NO: 14412 - protein, 9 aa, synthetic construct
  source 1..9: note = Seed: ARGVGKSAL (KRAS G12R)
VRGMGRSAK

SEQ ID NO: 14413 - protein, 9 aa, synthetic construct
  source 1..9: note = Seed: ARGVGKSAL (KRAS G12R)
VRGMGRSAL

SEQ ID NO: 14414 - protein, 9 aa, synthetic construct
  source 1..9: note = Seed: ARGVGKSAL (KRAS G12R)
VRGMGRSAM

SEQ ID NO: 14415 - protein, 9 aa, synthetic construct
  source 1..9: note = Seed: ARGVGKSAL (KRAS G12R)
VRGMGRSAQ

SEQ ID NO: 14416 - protein, 9 aa, synthetic construct
  source 1..9: note = Seed: ARGVGKSAL (KRAS G12R)
VRGMGRSAR

SEQ ID NO: 14417 - protein, 9 aa, synthetic construct
  source 1..9: note = Seed: ARGVGKSAL (KRAS G12R)
VRGMGRSAS

SEQ ID NO: 14418 - protein, 9 aa, synthetic construct
  source 1..9: note = Seed: ARGVGKSAL (KRAS G12R)
VRGMGRSAT

SEQ ID NO: 14419 - protein, 9 aa, synthetic construct
  source 1..9: note = Seed: ARGVGKSAL (KRAS G12R)
VRGMGRSAV

SEQ ID NO: 14420 - protein, 9 aa, synthetic construct
  source 1..9: note = Seed: ARGVGKSAL (KRAS G12R)
VRGMGRSAY

SEQ ID NO: 14421 - protein, 9 aa, synthetic construct
  source 1..9: note = Seed: ARGVGKSAL (KRAS G12R)
VRGNGASAA

SEQ ID NO: 14422 - protein, 9 aa, synthetic construct
  source 1..9: note = Seed: ARGVGKSAL (KRAS G12R)
VRGNGISAA

SEQ ID NO: 14423 - protein, 9 aa, synthetic construct
  source 1..9: note = Seed: ARGVGKSAL (KRAS G12R)
VRGNGVSAA

SEQ ID NO: 14424 - protein, 9 aa, synthetic construct
  source 1..9: note = Seed: ARGVGKSAL (KRAS G12R)
VRGQGRSAI

SEQ ID NO: 14425 - protein, 9 aa, synthetic construct
  source 1..9: note = Seed: ARGVGKSAL (KRAS G12R)
VRGQGRSAL

SEQ ID NO: 14426 - protein, 9 aa, synthetic construct
  source 1..9: note = Seed: ARGVGKSAL (KRAS G12R)
VRGQGRSAR

SEQ ID NO: 14427 - protein, 9 aa, synthetic construct
  source 1..9: note = Seed: ARGVGKSAL (KRAS G12R)
VRGRGRSAA

SEQ ID NO: 14428 - protein, 9 aa, synthetic construct
  source 1..9: note = Seed: ARGVGKSAL (KRAS G12R)
VRGRGRSAF

SEQ ID NO: 14429 - protein, 9 aa, synthetic construct
  source 1..9: note = Seed: ARGVGKSAL (KRAS G12R)
VRGRGRSAI

SEQ ID NO: 14430 - protein, 9 aa, synthetic construct
  source 1..9: note = Seed: ARGVGKSAL (KRAS G12R)
VRGRGRSAK

SEQ ID NO: 14431 - protein, 9 aa, synthetic construct
  source 1..9: note = Seed: ARGVGKSAL (KRAS G12R)
VRGRGRSAL

SEQ ID NO: 14432 - protein, 9 aa, synthetic construct
  source 1..9: note = Seed: ARGVGKSAL (KRAS G12R)
VRGRGRSAM

SEQ ID NO: 14433 - protein, 9 aa, synthetic construct
  source 1..9: note = Seed: ARGVGKSAL (KRAS G12R)
VRGRGRSAR

SEQ ID NO: 14434 - protein, 9 aa, synthetic construct
  source 1..9: note = Seed: ARGVGKSAL (KRAS G12R)
VRGRGRSAV

SEQ ID NO: 14435 - protein, 9 aa, synthetic construct
  source 1..9: note = Seed: ARGVGKSAL (KRAS G12R)
VRGRGRSAY

SEQ ID NO: 14436 - protein, 9 aa, synthetic construct
  source 1..9: note = Seed: ARGVGKSAL (KRAS G12R)
VRGSGASAA

SEQ ID NO: 14437 - protein, 9 aa, synthetic construct
  source 1..9: note = Seed: ARGVGKSAL (KRAS G12R)
VRGSGASAG

SEQ ID NO: 14438 - protein, 9 aa, synthetic construct
  source 1..9: note = Seed: ARGVGKSAL (KRAS G12R)
VRGSGASAI

SEQ ID NO: 14439 - protein, 9 aa, synthetic construct
  source 1..9: note = Seed: ARGVGKSAL (KRAS G12R)
VRGSGASAM

SEQ ID NO: 14440 - protein, 9 aa, synthetic construct
  source 1..9: note = Seed: ARGVGKSAL (KRAS G12R)
VRGSGASAS

SEQ ID NO: 14441 - protein, 9 aa, synthetic construct
  source 1..9: note = Seed: ARGVGKSAL (KRAS G12R)
VRGSGASAV

SEQ ID NO: 14442 - protein, 9 aa, synthetic construct
  source 1..9: note = Seed: ARGVGKSAL (KRAS G12R)
VRGSGISAA

SEQ ID NO: 14443 - protein, 9 aa, synthetic construct
  source 1..9: note = Seed: ARGVGKSAL (KRAS G12R)
VRGSGISAG

SEQ ID NO: 14444 - protein, 9 aa, synthetic construct
  source 1..9: note = Seed: ARGVGKSAL (KRAS G12R)
VRGSGISAI

SEQ ID NO: 14445 - protein, 9 aa, synthetic construct
  source 1..9: note = Seed: ARGVGKSAL (KRAS G12R)
VRGSGISAM

SEQ ID NO: 14446 - protein, 9 aa, synthetic construct
  source 1..9: note = Seed: ARGVGKSAL (KRAS G12R)
VRGSGISAS

SEQ ID NO: 14447 - protein, 9 aa, synthetic construct
  source 1..9: note = Seed: ARGVGKSAL (KRAS G12R)
VRGSGISAT

SEQ ID NO: 14448 - protein, 9 aa, synthetic construct
  source 1..9: note = Seed: ARGVGKSAL (KRAS G12R)
VRGSGISAV

SEQ ID NO: 14449 - protein, 9 aa, synthetic construct
  source 1..9: note = Seed: ARGVGKSAL (KRAS G12R)
VRGSGLSAA

SEQ ID NO: 14450 - protein, 9 aa, synthetic construct
  source 1..9: note = Seed: ARGVGKSAL (KRAS G12R)
VRGSGLSAS

SEQ ID NO: 14451 - protein, 9 aa, synthetic construct
  source 1..9: note = Seed: ARGVGKSAL (KRAS G12R)
VRGSGMSAA

SEQ ID NO: 14452 - protein, 9 aa, synthetic construct
  source 1..9: note = Seed: ARGVGKSAL (KRAS G12R)
VRGSGMSAS

SEQ ID NO: 14453 - protein, 9 aa, synthetic construct
  source 1..9: note = Seed: ARGVGKSAL (KRAS G12R)
VRGSGNSAA

SEQ ID NO: 14454 - protein, 9 aa, synthetic construct
  source 1..9: note = Seed: ARGVGKSAL (KRAS G12R)
VRGSGPSAA

SEQ ID NO: 14455 - protein, 9 aa, synthetic construct
  source 1..9: note = Seed: ARGVGKSAL (KRAS G12R)
VRGSGSSAA

SEQ ID NO: 14456 - protein, 9 aa, synthetic construct
  source 1..9: note = Seed: ARGVGKSAL (KRAS G12R)
VRGSGTSAA

SEQ ID NO: 14457 - protein, 9 aa, synthetic construct
  source 1..9: note = Seed: ARGVGKSAL (KRAS G12R)
VRGSGVSAA

SEQ ID NO: 14458 - protein, 9 aa, synthetic construct
  source 1..9: note = Seed: ARGVGKSAL (KRAS G12R)
VRGSGVSAG

SEQ ID NO: 14459 - protein, 9 aa, synthetic construct
  source 1..9: note = Seed: ARGVGKSAL (KRAS G12R)
VRGSGVSAM

SEQ ID NO: 14460 - protein, 9 aa, synthetic construct
  source 1..9: note = Seed: ARGVGKSAL (KRAS G12R)
VRGSGVSAS

SEQ ID NO: 14461 - protein, 9 aa, synthetic construct
  source 1..9: note = Seed: ARGVGKSAL (KRAS G12R)
VRGSGVSAT

SEQ ID NO: 14462 - protein, 9 aa, synthetic construct
  source 1..9: note = Seed: ARGVGKSAL (KRAS G12R)
VRGSGVSAV

SEQ ID NO: 14463 - protein, 9 aa, synthetic construct
  source 1..9: note = Seed: ARGVGKSAL (KRAS G12R)
VRGTGASAA

SEQ ID NO: 14464 - protein, 9 aa, synthetic construct
  source 1..9: note = Seed: ARGVGKSAL (KRAS G12R)
VRGTGISAA

SEQ ID NO: 14465 - protein, 9 aa, synthetic construct
  source 1..9: note = Seed: ARGVGKSAL (KRAS G12R)
VRGTGISAS

SEQ ID NO: 14466 - protein, 9 aa, synthetic construct
  source 1..9: note = Seed: ARGVGKSAL (KRAS G12R)
VRGTGMSAA

SEQ ID NO: 14467 - protein, 9 aa, synthetic construct
  source 1..9: note = Seed: ARGVGKSAL (KRAS G12R)
VRGTGVSAA

SEQ ID NO: 14468 - protein, 9 aa, synthetic construct
  source 1..9: note = Seed: ARGVGKSAL (KRAS G12R)
VRGTGVSAS

SEQ ID NO: 14469 - protein, 9 aa, synthetic construct
  source 1..9: note = Seed: ARGVGKSAL (KRAS G12R)
VRGVGISAA

SEQ ID NO: 14470 - protein, 9 aa, synthetic construct
  source 1..9: note = Seed: ARGVGKSAL (KRAS G12R)
VRGVGISAS

SEQ ID NO: 14471 - protein, 9 aa, synthetic construct
  source 1..9: note = Seed: ARGVGKSAL (KRAS G12R)
VRGVGKSAR

SEQ ID NO: 14472 - protein, 9 aa, synthetic construct
  source 1..9: note = Seed: ARGVGKSAL (KRAS G12R)
VRGVGRSAA

SEQ ID NO: 14473 - protein, 9 aa, synthetic construct
  source 1..9: note = Seed: ARGVGKSAL (KRAS G12R)
VRGVGRSAF

SEQ ID NO: 14474 - protein, 9 aa, synthetic construct
  source 1..9: note = Seed: ARGVGKSAL (KRAS G12R)
VRGVGRSAI

SEQ ID NO: 14475 - protein, 9 aa, synthetic construct
  source 1..9: note = Seed: ARGVGKSAL (KRAS G12R)
VRGVGRSAK

SEQ ID NO: 14476 - protein, 9 aa, synthetic construct
  source 1..9: note = Seed: ARGVGKSAL (KRAS G12R)
VRGVGRSAL

SEQ ID NO: 14477 - protein, 9 aa, synthetic construct
  source 1..9: note = Seed: ARGVGKSAL (KRAS G12R)
VRGVGRSAM

SEQ ID NO: 14478 - protein, 9 aa, synthetic construct
  source 1..9: note = Seed: ARGVGKSAL (KRAS G12R)
VRGVGRSAR

SEQ ID NO: 14479 - protein, 9 aa, synthetic construct
  source 1..9: note = Seed: ARGVGKSAL (KRAS G12R)
VRGVGRSAS

SEQ ID NO: 14480 - protein, 9 aa, synthetic construct
  source 1..9: note = Seed: ARGVGKSAL (KRAS G12R)
VRGVGRSAV

SEQ ID NO: 14481 - protein, 9 aa, synthetic construct
  source 1..9: note = Seed: ARGVGKSAL (KRAS G12R)
VRGVGRSAY

SEQ ID NO: 14482 - protein, 9 aa, synthetic construct
  source 1..9: note = Seed: ARGVGKSAL (KRAS G12R)
VRGWGKSAR

SEQ ID NO: 14483 - protein, 9 aa, synthetic construct
  source 1..9: note = Seed: ARGVGKSAL (KRAS G12R)
VRGWGRSAF

SEQ ID NO: 14484 - protein, 9 aa, synthetic construct
  source 1..9: note = Seed: ARGVGKSAL (KRAS G12R)
VRGWGRSAI

SEQ ID NO: 14485 - protein, 9 aa, synthetic construct
  source 1..9: note = Seed: ARGVGKSAL (KRAS G12R)
VRGWGRSAK

SEQ ID NO: 14486 - protein, 9 aa, synthetic construct
  source 1..9: note = Seed: ARGVGKSAL (KRAS G12R)
VRGWGRSAL

SEQ ID NO: 14487 - protein, 9 aa, synthetic construct
  source 1..9: note = Seed: ARGVGKSAL (KRAS G12R)
VRGWGRSAM

SEQ ID NO: 14488 - protein, 9 aa, synthetic construct
  source 1..9: note = Seed: ARGVGKSAL (KRAS G12R)
VRGWGRSAR

SEQ ID NO: 14489 - protein, 9 aa, synthetic construct
  source 1..9: note = Seed: ARGVGKSAL (KRAS G12R)
VRGWGRSAV

SEQ ID NO: 14490 - protein, 9 aa, synthetic construct
  source 1..9: note = Seed: ARGVGKSAL (KRAS G12R)
VRGWGRSAY

SEQ ID NO: 14491 - protein, 9 aa, synthetic construct
  source 1..9: note = Seed: ARGVGKSAL (KRAS G12R)
VRGYGRSAF

SEQ ID NO: 14492 - protein, 9 aa, synthetic construct
  source 1..9: note = Seed: ARGVGKSAL (KRAS G12R)
VRGYGRSAI

SEQ ID NO: 14493 - protein, 9 aa, synthetic construct
  source 1..9: note = Seed: ARGVGKSAL (KRAS G12R)
VRGYGRSAK

SEQ ID NO: 14494 - protein, 9 aa, synthetic construct
  source 1..9: note = Seed: ARGVGKSAL (KRAS G12R)
VRGYGRSAL

SEQ ID NO: 14495 - protein, 9 aa, synthetic construct
  source 1..9: note = Seed: ARGVGKSAL (KRAS G12R)
VRGYGRSAM

SEQ ID NO: 14496 - protein, 9 aa, synthetic construct
  source 1..9: note = Seed: ARGVGKSAL (KRAS G12R)
VRGYGRSAR

SEQ ID NO: 14497 - protein, 9 aa, synthetic construct
  source 1..9: note = Seed: ARGVGKSAL (KRAS G12R)
VRGYGRSAV

SEQ ID NO: 14498 - protein, 9 aa, synthetic construct
  source 1..9: note = Seed: ARGVGKSAL (KRAS G12R)
VRGYGRSAY

SEQ ID NO: 14499 - protein, 9 aa, synthetic construct
  source 1..9: note = Seed: ARGVGKSAL (KRAS G12R)
WRGAGASAA

SEQ ID NO: 14500 - protein, 9 aa, synthetic construct
  source 1..9: note = Seed: ARGVGKSAL (KRAS G12R)
WRGAGISAA

SEQ ID NO: 14501 - protein, 9 aa, synthetic construct
  source 1..9: note = Seed: ARGVGKSAL (KRAS G12R)
WRGAGISAS

SEQ ID NO: 14502 - protein, 9 aa, synthetic construct
  source 1..9: note = Seed: ARGVGKSAL (KRAS G12R)
WRGAGVSAA

SEQ ID NO: 14503 - protein, 9 aa, synthetic construct
  source 1..9: note = Seed: ARGVGKSAL (KRAS G12R)
WRGFGRSAF

SEQ ID NO: 14504 - protein, 9 aa, synthetic construct
  source 1..9: note = Seed: ARGVGKSAL (KRAS G12R)
WRGFGRSAI

SEQ ID NO: 14505 - protein, 9 aa, synthetic construct
  source 1..9: note = Seed: ARGVGKSAL (KRAS G12R)
WRGFGRSAL

SEQ ID NO: 14506 - protein, 9 aa, synthetic construct
  source 1..9: note = Seed: ARGVGKSAL (KRAS G12R)
WRGFGRSAM

SEQ ID NO: 14507 - protein, 9 aa, synthetic construct
  source 1..9: note = Seed: ARGVGKSAL (KRAS G12R)
WRGFGRSAR

SEQ ID NO: 14508 - protein, 9 aa, synthetic construct
  source 1..9: note = Seed: ARGVGKSAL (KRAS G12R)
WRGFGRSAV

SEQ ID NO: 14509 - protein, 9 aa, synthetic construct
  source 1..9: note = Seed: ARGVGKSAL (KRAS G12R)
WRGFGRSAY

SEQ ID NO: 14510 - protein, 9 aa, synthetic construct
  source 1..9: note = Seed: ARGVGKSAL (KRAS G12R)
WRGIGRSAF

SEQ ID NO: 14511 - protein, 9 aa, synthetic construct
  source 1..9: note = Seed: ARGVGKSAL (KRAS G12R)
WRGIGRSAL

SEQ ID NO: 14512 - protein, 9 aa, synthetic construct
  source 1..9: note = Seed: ARGVGKSAL (KRAS G12R)
WRGIGRSAM

SEQ ID NO: 14513 - protein, 9 aa, synthetic construct
  source 1..9: note = Seed: ARGVGKSAL (KRAS G12R)
WRGIGRSAR

SEQ ID NO: 14514 - protein, 9 aa, synthetic construct
  source 1..9: note = Seed: ARGVGKSAL (KRAS G12R)
WRGIGRSAV

SEQ ID NO: 14515 - protein, 9 aa, synthetic construct
  source 1..9: note = Seed: ARGVGKSAL (KRAS G12R)
WRGIGRSAY

SEQ ID NO: 14516 - protein, 9 aa, synthetic construct
  source 1..9: note = Seed: ARGVGKSAL (KRAS G12R)
WRGLGRSAA

SEQ ID NO: 14517 - protein, 9 aa, synthetic construct
  source 1..9: note = Seed: ARGVGKSAL (KRAS G12R)
WRGLGRSAH

SEQ ID NO: 14518 - protein, 9 aa, synthetic construct
  source 1..9: note = Seed: ARGVGKSAL (KRAS G12R)
WRGLGRSAK

SEQ ID NO: 14519 - protein, 9 aa, synthetic construct
  source 1..9: note = Seed: ARGVGKSAL (KRAS G12R)
WRGLGRSAR

SEQ ID NO: 14520 - protein, 9 aa, synthetic construct
  source 1..9: note = Seed: ARGVGKSAL (KRAS G12R)
WRGLGRSAS

SEQ ID NO: 14521 - protein, 9 aa, synthetic construct
  source 1..9: note = Seed: ARGVGKSAL (KRAS G12R)
WRGLGRSAT

SEQ ID NO: 14522 - protein, 9 aa, synthetic construct
  source 1..9: note = Seed: ARGVGKSAL (KRAS G12R)
WRGMGRSAA

SEQ ID NO: 14523 - protein, 9 aa, synthetic construct
  source 1..9: note = Seed: ARGVGKSAL (KRAS G12R)
WRGMGRSAF

SEQ ID NO: 14524 - protein, 9 aa, synthetic construct
  source 1..9: note = Seed: ARGVGKSAL (KRAS G12R)
WRGMGRSAL

SEQ ID NO: 14525 - protein, 9 aa, synthetic construct
  source 1..9: note = Seed: ARGVGKSAL (KRAS G12R)
WRGMGRSAR

SEQ ID NO: 14526 - protein, 9 aa, synthetic construct
  source 1..9: note = Seed: ARGVGKSAL (KRAS G12R)
WRGMGRSAS

SEQ ID NO: 14527 - protein, 9 aa, synthetic construct
  source 1..9: note = Seed: ARGVGKSAL (KRAS G12R)
WRGMGRSAV

SEQ ID NO: 14528 - protein, 9 aa, synthetic construct
  source 1..9: note = Seed: ARGVGKSAL (KRAS G12R)
WRGMGRSAY

SEQ ID NO: 14529 - protein, 9 aa, synthetic construct
  source 1..9: note = Seed: ARGVGKSAL (KRAS G12R)
WRGRGRSAA

SEQ ID NO: 14530 - protein, 9 aa, synthetic construct
  source 1..9: note = Seed: ARGVGKSAL (KRAS G12R)
WRGRGRSAI

SEQ ID NO: 14531 - protein, 9 aa, synthetic construct
  source 1..9: note = Seed: ARGVGKSAL (KRAS G12R)
WRGRGRSAL

SEQ ID NO: 14532 - protein, 9 aa, synthetic construct
  source 1..9: note = Seed: ARGVGKSAL (KRAS G12R)
WRGRGRSAM

SEQ ID NO: 14533 - protein, 9 aa, synthetic construct
  source 1..9: note = Seed: ARGVGKSAL (KRAS G12R)
WRGRGRSAR

SEQ ID NO: 14534 - protein, 9 aa, synthetic construct
  source 1..9: note = Seed: ARGVGKSAL (KRAS G12R)
WRGRGRSAV

SEQ ID NO: 14535 - protein, 9 aa, synthetic construct
  source 1..9: note = Seed: ARGVGKSAL (KRAS G12R)
WRGRGRSAY

SEQ ID NO: 14536 - protein, 9 aa, synthetic construct
  source 1..9: note = Seed: ARGVGKSAL (KRAS G12R)
WRGSGASAA

SEQ ID NO: 14537 - protein, 9 aa, synthetic construct
  source 1..9: note = Seed: ARGVGKSAL (KRAS G12R)
WRGSGISAA

SEQ ID NO: 14538 - protein, 9 aa, synthetic construct
  source 1..9: note = Seed: ARGVGKSAL (KRAS G12R)
WRGSGVSAA

SEQ ID NO: 14539 - protein, 9 aa, synthetic construct
  source 1..9: note = Seed: ARGVGKSAL (KRAS G12R)
YRGAGASAA

SEQ ID NO: 14540 - protein, 9 aa, synthetic construct
  source 1..9: note = Seed: ARGVGKSAL (KRAS G12R)
YRGAGISAA

SEQ ID NO: 14541 - protein, 9 aa, synthetic construct
  source 1..9: note = Seed: ARGVGKSAL (KRAS G12R)
YRGAGISAS

SEQ ID NO: 14542 - protein, 9 aa, synthetic construct
  source 1..9: note = Seed: ARGVGKSAL (KRAS G12R)
YRGAGVSAA

SEQ ID NO: 14543 - protein, 9 aa, synthetic construct
  source 1..9: note = Seed: ARGVGKSAL (KRAS G12R)
YRGFGRSAF

SEQ ID NO: 14544 - protein, 9 aa, synthetic construct
  source 1..9: note = Seed: ARGVGKSAL (KRAS G12R)
YRGFGRSAR

SEQ ID NO: 14545 - protein, 9 aa, synthetic construct
  source 1..9: note = Seed: ARGVGKSAL (KRAS G12R)
YRGFGRSAY

SEQ ID NO: 14546 - protein, 9 aa, synthetic construct
  source 1..9: note = Seed: ARGVGKSAL (KRAS G12R)
YRGIGRSAA

SEQ ID NO: 14547 - protein, 9 aa, synthetic construct
  source 1..9: note = Seed: ARGVGKSAL (KRAS G12R)
YRGIGRSAF

SEQ ID NO: 14548 - protein, 9 aa, synthetic construct
  source 1..9: note = Seed: ARGVGKSAL (KRAS G12R)
YRGIGRSAK

SEQ ID NO: 14549 - protein, 9 aa, synthetic construct
  source 1..9: note = Seed: ARGVGKSAL (KRAS G12R)
YRGIGRSAM

SEQ ID NO: 14550 - protein, 9 aa, synthetic construct
  source 1..9: note = Seed: ARGVGKSAL (KRAS G12R)
YRGIGRSAR

SEQ ID NO: 14551 - protein, 9 aa, synthetic construct
  source 1..9: note = Seed: ARGVGKSAL (KRAS G12R)
YRGIGRSAS

SEQ ID NO: 14552 - protein, 9 aa, synthetic construct
  source 1..9: note = Seed: ARGVGKSAL (KRAS G12R)
YRGIGRSAV

SEQ ID NO: 14553 - protein, 9 aa, synthetic construct
  source 1..9: note = Seed: ARGVGKSAL (KRAS G12R)
YRGIGRSAY

SEQ ID NO: 14554 - protein, 9 aa, synthetic construct
  source 1..9: note = Seed: ARGVGKSAL (KRAS G12R)
YRGLGRSAA

SEQ ID NO: 14555 - protein, 9 aa, synthetic construct
  source 1..9: note = Seed: ARGVGKSAL (KRAS G12R)
YRGLGRSAH

SEQ ID NO: 14556 - protein, 9 aa, synthetic construct
  source 1..9: note = Seed: ARGVGKSAL (KRAS G12R)
YRGLGRSAI

SEQ ID NO: 14557 - protein, 9 aa, synthetic construct
  source 1..9: note = Seed: ARGVGKSAL (KRAS G12R)
YRGLGRSAK

SEQ ID NO: 14558 - protein, 9 aa, synthetic construct
  source 1..9: note = Seed: ARGVGKSAL (KRAS G12R)
YRGLGRSAL

SEQ ID NO: 14559 - protein, 9 aa, synthetic construct
  source 1..9: note = Seed: ARGVGKSAL (KRAS G12R)
YRGLGRSAM

SEQ ID NO: 14560 - protein, 9 aa, synthetic construct
  source 1..9: note = Seed: ARGVGKSAL (KRAS G12R)
YRGLGRSAQ

SEQ ID NO: 14561 - protein, 9 aa, synthetic construct
  source 1..9: note = Seed: ARGVGKSAL (KRAS G12R)
YRGLGRSAR

SEQ ID NO: 14562 - protein, 9 aa, synthetic construct
  source 1..9: note = Seed: ARGVGKSAL (KRAS G12R)
YRGLGRSAS

SEQ ID NO: 14563 - protein, 9 aa, synthetic construct
  source 1..9: note = Seed: ARGVGKSAL (KRAS G12R)
YRGLGRSAT

SEQ ID NO: 14564 - protein, 9 aa, synthetic construct
  source 1..9: note = Seed: ARGVGKSAL (KRAS G12R)
YRGLGRSAV

SEQ ID NO: 14565 - protein, 9 aa, synthetic construct
  source 1..9: note = Seed: ARGVGKSAL (KRAS G12R)
YRGLGRSAY

SEQ ID NO: 14566 - protein, 9 aa, synthetic construct
  source 1..9: note = Seed: ARGVGKSAL (KRAS G12R)
YRGMGRSAA

SEQ ID NO: 14567 - protein, 9 aa, synthetic construct
  source 1..9: note = Seed: ARGVGKSAL (KRAS G12R)
YRGMGRSAF

SEQ ID NO: 14568 - protein, 9 aa, synthetic construct
  source 1..9: note = Seed: ARGVGKSAL (KRAS G12R)
YRGMGRSAH

SEQ ID NO: 14569 - protein, 9 aa, synthetic construct
  source 1..9: note = Seed: ARGVGKSAL (KRAS G12R)
YRGMGRSAI

SEQ ID NO: 14570 - protein, 9 aa, synthetic construct
  source 1..9: note = Seed: ARGVGKSAL (KRAS G12R)
YRGMGRSAL

SEQ ID NO: 14571 - protein, 9 aa, synthetic construct
  source 1..9: note = Seed: ARGVGKSAL (KRAS G12R)
YRGMGRSAM

SEQ ID NO: 14572 - protein, 9 aa, synthetic construct
  source 1..9: note = Seed: ARGVGKSAL (KRAS G12R)
YRGMGRSAR

SEQ ID NO: 14573 - protein, 9 aa, synthetic construct
  source 1..9: note = Seed: ARGVGKSAL (KRAS G12R)
YRGMGRSAS

SEQ ID NO: 14574 - protein, 9 aa, synthetic construct
  source 1..9: note = Seed: ARGVGKSAL (KRAS G12R)
YRGMGRSAV

SEQ ID NO: 14575 - protein, 9 aa, synthetic construct
  source 1..9: note = Seed: ARGVGKSAL (KRAS G12R)
YRGRGRSAY

SEQ ID NO: 14576 - protein, 9 aa, synthetic construct
  source 1..9: note = Seed: ARGVGKSAL (KRAS G12R)
YRGSGASAA

SEQ ID NO: 14577 - protein, 9 aa, synthetic construct
  source 1..9: note = Seed: ARGVGKSAL (KRAS G12R)
YRGSGISAA

SEQ ID NO: 14578 - protein, 9 aa, synthetic construct
  source 1..9: note = Seed: ARGVGKSAL (KRAS G12R)
YRGSGISAS

SEQ ID NO: 14579 - protein, 9 aa, synthetic construct
  source 1..9: note = Seed: ARGVGKSAL (KRAS G12R)
YRGSGVSAA

SEQ ID NO: 14580 - protein, 9 aa, synthetic construct
  source 1..9: note = Seed: GARGVGKSA (KRAS G12R)
AARAVAKSA

SEQ ID NO: 14581 - protein, 9 aa, synthetic construct
  source 1..9: note = Seed: GARGVGKSA (KRAS G12R)
AARAVAKSF

SEQ ID NO: 14582 - protein, 9 aa, synthetic construct
  source 1..9: note = Seed: GARGVGKSA (KRAS G12R)
AARAVAKSG

SEQ ID NO: 14583 - protein, 9 aa, synthetic construct
  source 1..9: note = Seed: GARGVGKSA (KRAS G12R)
AARAVAKSI

SEQ ID NO: 14584 - protein, 9 aa, synthetic construct
  source 1..9: note = Seed: GARGVGKSA (KRAS G12R)
AARAVAKSL

SEQ ID NO: 14585 - protein, 9 aa, synthetic construct
  source 1..9: note = Seed: GARGVGKSA (KRAS G12R)
AARAVAKSM

SEQ ID NO: 14586 - protein, 9 aa, synthetic construct
  source 1..9: note = Seed: GARGVGKSA (KRAS G12R)
AARAVAKSN

SEQ ID NO: 14587 - protein, 9 aa, synthetic construct
  source 1..9: note = Seed: GARGVGKSA (KRAS G12R)
AARAVAKSS

SEQ ID NO: 14588 - protein, 9 aa, synthetic construct
  source 1..9: note = Seed: GARGVGKSA (KRAS G12R)
AARAVAKST

SEQ ID NO: 14589 - protein, 9 aa, synthetic construct
  source 1..9: note = Seed: GARGVGKSA (KRAS G12R)
AARAVAKSV

SEQ ID NO: 14590 - protein, 9 aa, synthetic construct
  source 1..9: note = Seed: GARGVGKSA (KRAS G12R)
AARAVPKSA

SEQ ID NO: 14591 - protein, 9 aa, synthetic construct
  source 1..9: note = Seed: GARGVGKSA (KRAS G12R)
AARAVPKSI

SEQ ID NO: 14592 - protein, 9 aa, synthetic construct
  source 1..9: note = Seed: GARGVGKSA (KRAS G12R)
AARAVPKSS

SEQ ID NO: 14593 - protein, 9 aa, synthetic construct
  source 1..9: note = Seed: GARGVGKSA (KRAS G12R)
AARAVPKST

SEQ ID NO: 14594 - protein, 9 aa, synthetic construct
  source 1..9: note = Seed: GARGVGKSA (KRAS G12R)
AARAVPKSV

SEQ ID NO: 14595 - protein, 9 aa, synthetic construct
  source 1..9: note = Seed: GARGVGKSA (KRAS G12R)
AARAVVKSA

SEQ ID NO: 14596 - protein, 9 aa, synthetic construct
  source 1..9: note = Seed: GARGVGKSA (KRAS G12R)
AARAVVKSS

SEQ ID NO: 14597 - protein, 9 aa, synthetic construct
  source 1..9: note = Seed: GARGVGKSA (KRAS G12R)
AARAVVKST

SEQ ID NO: 14598 - protein, 9 aa, synthetic construct
  source 1..9: note = Seed: GARGVGKSA (KRAS G12R)
AARAVVKSV

SEQ ID NO: 14599 - protein, 9 aa, synthetic construct
  source 1..9: note = Seed: GARGVGKSA (KRAS G12R)
AARGVAKSA

SEQ ID NO: 14600 - protein, 9 aa, synthetic construct
  source 1..9: note = Seed: GARGVGKSA (KRAS G12R)
AARGVAKSI

SEQ ID NO: 14601 - protein, 9 aa, synthetic construct
  source 1..9: note = Seed: GARGVGKSA (KRAS G12R)
AARGVAKSS

SEQ ID NO: 14602 - protein, 9 aa, synthetic construct
  source 1..9: note = Seed: GARGVGKSA (KRAS G12R)
AARGVAKST

SEQ ID NO: 14603 - protein, 9 aa, synthetic construct
  source 1..9: note = Seed: GARGVGKSA (KRAS G12R)
AARGVAKSV

SEQ ID NO: 14604 - protein, 9 aa, synthetic construct
  source 1..9: note = Seed: GARGVGKSA (KRAS G12R)
AARGVPKSA

SEQ ID NO: 14605 - protein, 9 aa, synthetic construct
  source 1..9: note = Seed: GARGVGKSA (KRAS G12R)
AARGVPKSV

SEQ ID NO: 14606 - protein, 9 aa, synthetic construct
  source 1..9: note = Seed: GARGVGKSA (KRAS G12R)
AARGVVKSA

SEQ ID NO: 14607 - protein, 9 aa, synthetic construct
  source 1..9: note = Seed: GARGVGKSA (KRAS G12R)
AARGVVKSV

SEQ ID NO: 14608 - protein, 9 aa, synthetic construct
  source 1..9: note = Seed: GARGVGKSA (KRAS G12R)
AARSVAKSA

SEQ ID NO: 14609 - protein, 9 aa, synthetic construct
  source 1..9: note = Seed: GARGVGKSA (KRAS G12R)
FARAVAKSA

SEQ ID NO: 14610 - protein, 9 aa, synthetic construct
  source 1..9: note = Seed: GARGVGKSA (KRAS G12R)
FARAVAKSI

SEQ ID NO: 14611 - protein, 9 aa, synthetic construct
  source 1..9: note = Seed: GARGVGKSA (KRAS G12R)
FARAVAKSM

SEQ ID NO: 14612 - protein, 9 aa, synthetic construct
  source 1..9: note = Seed: GARGVGKSA (KRAS G12R)
FARAVAKSS

SEQ ID NO: 14613 - protein, 9 aa, synthetic construct
  source 1..9: note = Seed: GARGVGKSA (KRAS G12R)
FARAVAKST

SEQ ID NO: 14614 - protein, 9 aa, synthetic construct
  source 1..9: note = Seed: GARGVGKSA (KRAS G12R)
FARAVAKSV

SEQ ID NO: 14615 - protein, 9 aa, synthetic construct
  source 1..9: note = Seed: GARGVGKSA (KRAS G12R)
FARAVPKSA

SEQ ID NO: 14616 - protein, 9 aa, synthetic construct
  source 1..9: note = Seed: GARGVGKSA (KRAS G12R)
FARAVPKSI

SEQ ID NO: 14617 - protein, 9 aa, synthetic construct
  source 1..9: note = Seed: GARGVGKSA (KRAS G12R)
FARAVPKSS

SEQ ID NO: 14618 - protein, 9 aa, synthetic construct
  source 1..9: note = Seed: GARGVGKSA (KRAS G12R)
FARAVPKST

SEQ ID NO: 14619 - protein, 9 aa, synthetic construct
  source 1..9: note = Seed: GARGVGKSA (KRAS G12R)
FARAVPKSV

SEQ ID NO: 14620 - protein, 9 aa, synthetic construct
  source 1..9: note = Seed: GARGVGKSA (KRAS G12R)
FARAVVKSA

SEQ ID NO: 14621 - protein, 9 aa, synthetic construct
  source 1..9: note = Seed: GARGVGKSA (KRAS G12R)
FARAVVKSS

SEQ ID NO: 14622 - protein, 9 aa, synthetic construct
  source 1..9: note = Seed: GARGVGKSA (KRAS G12R)
FARAVVKST

SEQ ID NO: 14623 - protein, 9 aa, synthetic construct
  source 1..9: note = Seed: GARGVGKSA (KRAS G12R)
FARAVVKSV

SEQ ID NO: 14624 - protein, 9 aa, synthetic construct
  source 1..9: note = Seed: GARGVGKSA (KRAS G12R)
FARGVAKSA

SEQ ID NO: 14625 - protein, 9 aa, synthetic construct
  source 1..9: note = Seed: GARGVGKSA (KRAS G12R)
FARGVAKSF

SEQ ID NO: 14626 - protein, 9 aa, synthetic construct
  source 1..9: note = Seed: GARGVGKSA (KRAS G12R)
FARGVAKSG

SEQ ID NO: 14627 - protein, 9 aa, synthetic construct
  source 1..9: note = Seed: GARGVGKSA (KRAS G12R)
FARGVAKSI

SEQ ID NO: 14628 - protein, 9 aa, synthetic construct
  source 1..9: note = Seed: GARGVGKSA (KRAS G12R)
FARGVAKSL

SEQ ID NO: 14629 - protein, 9 aa, synthetic construct
  source 1..9: note = Seed: GARGVGKSA (KRAS G12R)
FARGVAKSM

SEQ ID NO: 14630 - protein, 9 aa, synthetic construct
  source 1..9: note = Seed: GARGVGKSA (KRAS G12R)
FARGVAKSS

SEQ ID NO: 14631 - protein, 9 aa, synthetic construct
  source 1..9: note = Seed: GARGVGKSA (KRAS G12R)
FARGVAKST

SEQ ID NO: 14632 - protein, 9 aa, synthetic construct
  source 1..9: note = Seed: GARGVGKSA (KRAS G12R)
FARGVAKSV

SEQ ID NO: 14633 - protein, 9 aa, synthetic construct
  source 1..9: note = Seed: GARGVGKSA (KRAS G12R)
FARGVIKSA

SEQ ID NO: 14634 - protein, 9 aa, synthetic construct
  source 1..9: note = Seed: GARGVGKSA (KRAS G12R)
FARGVIKST

SEQ ID NO: 14635 - protein, 9 aa, synthetic construct
  source 1..9: note = Seed: GARGVGKSA (KRAS G12R)
FARGVIKSV

SEQ ID NO: 14636 - protein, 9 aa, synthetic construct
  source 1..9: note = Seed: GARGVGKSA (KRAS G12R)
FARGVPKSA

SEQ ID NO: 14637 - protein, 9 aa, synthetic construct
  source 1..9: note = Seed: GARGVGKSA (KRAS G12R)
FARGVPKSI

SEQ ID NO: 14638 - protein, 9 aa, synthetic construct
  source 1..9: note = Seed: GARGVGKSA (KRAS G12R)
FARGVPKSM

SEQ ID NO: 14639 - protein, 9 aa, synthetic construct
  source 1..9: note = Seed: GARGVGKSA (KRAS G12R)
FARGVPKSS

SEQ ID NO: 14640 - protein, 9 aa, synthetic construct
  source 1..9: note = Seed: GARGVGKSA (KRAS G12R)
FARGVPKST

SEQ ID NO: 14641 - protein, 9 aa, synthetic construct
  source 1..9: note = Seed: GARGVGKSA (KRAS G12R)
FARGVPKSV

SEQ ID NO: 14642 - protein, 9 aa, synthetic construct
  source 1..9: note = Seed: GARGVGKSA (KRAS G12R)
FARGVVKSA

SEQ ID NO: 14643 - protein, 9 aa, synthetic construct
  source 1..9: note = Seed: GARGVGKSA (KRAS G12R)
FARGVVKSI

SEQ ID NO: 14644 - protein, 9 aa, synthetic construct
  source 1..9: note = Seed: GARGVGKSA (KRAS G12R)
FARGVVKSM

SEQ ID NO: 14645 - protein, 9 aa, synthetic construct
  source 1..9: note = Seed: GARGVGKSA (KRAS G12R)
FARGVVKSS

SEQ ID NO: 14646 - protein, 9 aa, synthetic construct
  source 1..9: note = Seed: GARGVGKSA (KRAS G12R)
FARGVVKST

SEQ ID NO: 14647 - protein, 9 aa, synthetic construct
  source 1..9: note = Seed: GARGVGKSA (KRAS G12R)
FARGVVKSV

SEQ ID NO: 14648 - protein, 9 aa, synthetic construct
  source 1..9: note = Seed: GARGVGKSA (KRAS G12R)
FARSVAKSA

SEQ ID NO: 14649 - protein, 9 aa, synthetic construct
  source 1..9: note = Seed: GARGVGKSA (KRAS G12R)
GARAVAKSA

SEQ ID NO: 14650 - protein, 9 aa, synthetic construct
  source 1..9: note = Seed: GARGVGKSA (KRAS G12R)
GARAVAKSI

SEQ ID NO: 14651 - protein, 9 aa, synthetic construct
  source 1..9: note = Seed: GARGVGKSA (KRAS G12R)
GARAVAKSS

SEQ ID NO: 14652 - protein, 9 aa, synthetic construct
  source 1..9: note = Seed: GARGVGKSA (KRAS G12R)
GARAVAKSV

SEQ ID NO: 14653 - protein, 9 aa, synthetic construct
  source 1..9: note = Seed: GARGVGKSA (KRAS G12R)
IARAVAKSA

SEQ ID NO: 14654 - protein, 9 aa, synthetic construct
  source 1..9: note = Seed: GARGVGKSA (KRAS G12R)
IARAVAKSG

SEQ ID NO: 14655 - protein, 9 aa, synthetic construct
  source 1..9: note = Seed: GARGVGKSA (KRAS G12R)
IARAVAKSI

SEQ ID NO: 14656 - protein, 9 aa, synthetic construct
  source 1..9: note = Seed: GARGVGKSA (KRAS G12R)
IARAVAKSL

SEQ ID NO: 14657 - protein, 9 aa, synthetic construct
  source 1..9: note = Seed: GARGVGKSA (KRAS G12R)
IARAVAKSM

SEQ ID NO: 14658 - protein, 9 aa, synthetic construct
  source 1..9: note = Seed: GARGVGKSA (KRAS G12R)
IARAVAKSN

SEQ ID NO: 14659 - protein, 9 aa, synthetic construct
  source 1..9: note = Seed: GARGVGKSA (KRAS G12R)
IARAVAKSS

SEQ ID NO: 14660 - protein, 9 aa, synthetic construct
  source 1..9: note = Seed: GARGVGKSA (KRAS G12R)
IARAVAKST

SEQ ID NO: 14661 - protein, 9 aa, synthetic construct
  source 1..9: note = Seed: GARGVGKSA (KRAS G12R)
IARAVAKSV

SEQ ID NO: 14662 - protein, 9 aa, synthetic construct
  source 1..9: note = Seed: GARGVGKSA (KRAS G12R)
IARAVPKSA

SEQ ID NO: 14663 - protein, 9 aa, synthetic construct
  source 1..9: note = Seed: GARGVGKSA (KRAS G12R)
IARAVPKSI

SEQ ID NO: 14664 - protein, 9 aa, synthetic construct
  source 1..9: note = Seed: GARGVGKSA (KRAS G12R)
IARAVPKSS

SEQ ID NO: 14665 - protein, 9 aa, synthetic construct
  source 1..9: note = Seed: GARGVGKSA (KRAS G12R)
IARAVPKST

SEQ ID NO: 14666 - protein, 9 aa, synthetic construct
  source 1..9: note = Seed: GARGVGKSA (KRAS G12R)
IARAVPKSV

SEQ ID NO: 14667 - protein, 9 aa, synthetic construct
  source 1..9: note = Seed: GARGVGKSA (KRAS G12R)
IARAVVKSA

SEQ ID NO: 14668 - protein, 9 aa, synthetic construct
  source 1..9: note = Seed: GARGVGKSA (KRAS G12R)
IARAVVKSS

SEQ ID NO: 14669 - protein, 9 aa, synthetic construct
  source 1..9: note = Seed: GARGVGKSA (KRAS G12R)
IARAVVKST

SEQ ID NO: 14670 - protein, 9 aa, synthetic construct
  source 1..9: note = Seed: GARGVGKSA (KRAS G12R)
IARGVAKSA

SEQ ID NO: 14671 - protein, 9 aa, synthetic construct
  source 1..9: note = Seed: GARGVGKSA (KRAS G12R)
IARGVAKSF

SEQ ID NO: 14672 - protein, 9 aa, synthetic construct
  source 1..9: note = Seed: GARGVGKSA (KRAS G12R)
IARGVAKSG

SEQ ID NO: 14673 - protein, 9 aa, synthetic construct
  source 1..9: note = Seed: GARGVGKSA (KRAS G12R)
IARGVAKSI

SEQ ID NO: 14674 - protein, 9 aa, synthetic construct
  source 1..9: note = Seed: GARGVGKSA (KRAS G12R)
IARGVAKSL

SEQ ID NO: 14675 - protein, 9 aa, synthetic construct
  source 1..9: note = Seed: GARGVGKSA (KRAS G12R)
IARGVAKSM

SEQ ID NO: 14676 - protein, 9 aa, synthetic construct
  source 1..9: note = Seed: GARGVGKSA (KRAS G12R)
IARGVAKSN

SEQ ID NO: 14677 - protein, 9 aa, synthetic construct
  source 1..9: note = Seed: GARGVGKSA (KRAS G12R)
IARGVAKSS

SEQ ID NO: 14678 - protein, 9 aa, synthetic construct
  source 1..9: note = Seed: GARGVGKSA (KRAS G12R)
IARGVAKST

SEQ ID NO: 14679 - protein, 9 aa, synthetic construct
  source 1..9: note = Seed: GARGVGKSA (KRAS G12R)
IARGVAKSV

SEQ ID NO: 14680 - protein, 9 aa, synthetic construct
  source 1..9: note = Seed: GARGVGKSA (KRAS G12R)
IARGVIKSA

SEQ ID NO: 14681 - protein, 9 aa, synthetic construct
  source 1..9: note = Seed: GARGVGKSA (KRAS G12R)
IARGVIKSS

SEQ ID NO: 14682 - protein, 9 aa, synthetic construct
  source 1..9: note = Seed: GARGVGKSA (KRAS G12R)
IARGVIKST

SEQ ID NO: 14683 - protein, 9 aa, synthetic construct
  source 1..9: note = Seed: GARGVGKSA (KRAS G12R)
IARGVIKSV

SEQ ID NO: 14684 - protein, 9 aa, synthetic construct
  source 1..9: note = Seed: GARGVGKSA (KRAS G12R)
IARGVPKSA

SEQ ID NO: 14685 - protein, 9 aa, synthetic construct
  source 1..9: note = Seed: GARGVGKSA (KRAS G12R)
IARGVPKSI

SEQ ID NO: 14686 - protein, 9 aa, synthetic construct
  source 1..9: note = Seed: GARGVGKSA (KRAS G12R)
IARGVPKSL

SEQ ID NO: 14687 - protein, 9 aa, synthetic construct
  source 1..9: note = Seed: GARGVGKSA (KRAS G12R)
IARGVPKSM

SEQ ID NO: 14688 - protein, 9 aa, synthetic construct
  source 1..9: note = Seed: GARGVGKSA (KRAS G12R)
IARGVPKSS

SEQ ID NO: 14689 - protein, 9 aa, synthetic construct
  source 1..9: note = Seed: GARGVGKSA (KRAS G12R)
IARGVPKST

SEQ ID NO: 14690 - protein, 9 aa, synthetic construct
  source 1..9: note = Seed: GARGVGKSA (KRAS G12R)
IARGVPKSV

SEQ ID NO: 14691 - protein, 9 aa, synthetic construct
  source 1..9: note = Seed: GARGVGKSA (KRAS G12R)
IARGVVKSA

SEQ ID NO: 14692 - protein, 9 aa, synthetic construct
  source 1..9: note = Seed: GARGVGKSA (KRAS G12R)
IARGVVKSI

SEQ ID NO: 14693 - protein, 9 aa, synthetic construct
  source 1..9: note = Seed: GARGVGKSA (KRAS G12R)
IARGVVKSM

SEQ ID NO: 14694 - protein, 9 aa, synthetic construct
  source 1..9: note = Seed: GARGVGKSA (KRAS G12R)
IARGVVKSS

SEQ ID NO: 14695 - protein, 9 aa, synthetic construct
  source 1..9: note = Seed: GARGVGKSA (KRAS G12R)
IARGVVKST

SEQ ID NO: 14696 - protein, 9 aa, synthetic construct
  source 1..9: note = Seed: GARGVGKSA (KRAS G12R)
IARGVVKSV

SEQ ID NO: 14697 - protein, 9 aa, synthetic construct
  source 1..9: note = Seed: GARGVGKSA (KRAS G12R)
IARSVAKSA

SEQ ID NO: 14698 - protein, 9 aa, synthetic construct
  source 1..9: note = Seed: GARGVGKSA (KRAS G12R)
IARSVAKSS

SEQ ID NO: 14699 - protein, 9 aa, synthetic construct
  source 1..9: note = Seed: GARGVGKSA (KRAS G12R)
IARSVAKSV

SEQ ID NO: 14700 - protein, 9 aa, synthetic construct
  source 1..9: note = Seed: GARGVGKSA (KRAS G12R)
IARSVPKSA

SEQ ID NO: 14701 - protein, 9 aa, synthetic construct
  source 1..9: note = Seed: GARGVGKSA (KRAS G12R)
LARAVAKSA

SEQ ID NO: 14702 - protein, 9 aa, synthetic construct
  source 1..9: note = Seed: GARGVGKSA (KRAS G12R)
LARAVAKSS

SEQ ID NO: 14703 - protein, 9 aa, synthetic construct
  source 1..9: note = Seed: GARGVGKSA (KRAS G12R)
LARAVAKST

SEQ ID NO: 14704 - protein, 9 aa, synthetic construct
  source 1..9: note = Seed: GARGVGKSA (KRAS G12R)
LARAVAKSV

SEQ ID NO: 14705 - protein, 9 aa, synthetic construct
  source 1..9: note = Seed: GARGVGKSA (KRAS G12R)
LARAVPKSA

SEQ ID NO: 14706 - protein, 9 aa, synthetic construct
  source 1..9: note = Seed: GARGVGKSA (KRAS G12R)
LARGVAKSA

SEQ ID NO: 14707 - protein, 9 aa, synthetic construct
  source 1..9: note = Seed: GARGVGKSA (KRAS G12R)
LARGVAKSI

SEQ ID NO: 14708 - protein, 9 aa, synthetic construct
  source 1..9: note = Seed: GARGVGKSA (KRAS G12R)
LARGVAKSS

SEQ ID NO: 14709 - protein, 9 aa, synthetic construct
  source 1..9: note = Seed: GARGVGKSA (KRAS G12R)
LARGVAKSV

SEQ ID NO: 14710 - protein, 9 aa, synthetic construct
  source 1..9: note = Seed: GARGVGKSA (KRAS G12R)
MARAVAKSA

SEQ ID NO: 14711 - protein, 9 aa, synthetic construct
  source 1..9: note = Seed: GARGVGKSA (KRAS G12R)
MARAVAKSI

SEQ ID NO: 14712 - protein, 9 aa, synthetic construct
  source 1..9: note = Seed: GARGVGKSA (KRAS G12R)
MARAVAKSM

SEQ ID NO: 14713 - protein, 9 aa, synthetic construct
  source 1..9: note = Seed: GARGVGKSA (KRAS G12R)
MARAVAKSS

SEQ ID NO: 14714 - protein, 9 aa, synthetic construct
  source 1..9: note = Seed: GARGVGKSA (KRAS G12R)
MARAVAKST

SEQ ID NO: 14715 - protein, 9 aa, synthetic construct
  source 1..9: note = Seed: GARGVGKSA (KRAS G12R)
MARAVAKSV

SEQ ID NO: 14716 - protein, 9 aa, synthetic construct
  source 1..9: note = Seed: GARGVGKSA (KRAS G12R)
MARAVPKSA

SEQ ID NO: 14717 - protein, 9 aa, synthetic construct
  source 1..9: note = Seed: GARGVGKSA (KRAS G12R)
MARAVPKSI

SEQ ID NO: 14718 - protein, 9 aa, synthetic construct
  source 1..9: note = Seed: GARGVGKSA (KRAS G12R)
MARAVPKSS

SEQ ID NO: 14719 - protein, 9 aa, synthetic construct
  source 1..9: note = Seed: GARGVGKSA (KRAS G12R)
MARAVPKST

SEQ ID NO: 14720 - protein, 9 aa, synthetic construct
  source 1..9: note = Seed: GARGVGKSA (KRAS G12R)
MARAVPKSV

SEQ ID NO: 14721 - protein, 9 aa, synthetic construct
  source 1..9: note = Seed: GARGVGKSA (KRAS G12R)
MARAVVKSA

SEQ ID NO: 14722 - protein, 9 aa, synthetic construct
  source 1..9: note = Seed: GARGVGKSA (KRAS G12R)
MARGVAKSA

SEQ ID NO: 14723 - protein, 9 aa, synthetic construct
  source 1..9: note = Seed: GARGVGKSA (KRAS G12R)
MARGVAKSI

SEQ ID NO: 14724 - protein, 9 aa, synthetic construct
  source 1..9: note = Seed: GARGVGKSA (KRAS G12R)
MARGVAKSS

SEQ ID NO: 14725 - protein, 9 aa, synthetic construct
  source 1..9: note = Seed: GARGVGKSA (KRAS G12R)
MARGVAKST

SEQ ID NO: 14726 - protein, 9 aa, synthetic construct
  source 1..9: note = Seed: GARGVGKSA (KRAS G12R)
MARGVAKSV

SEQ ID NO: 14727 - protein, 9 aa, synthetic construct
  source 1..9: note = Seed: GARGVGKSA (KRAS G12R)
MARGVPKSA

SEQ ID NO: 14728 - protein, 9 aa, synthetic construct
  source 1..9: note = Seed: GARGVGKSA (KRAS G12R)
MARGVPKSV

SEQ ID NO: 14729 - protein, 9 aa, synthetic construct
  source 1..9: note = Seed: GARGVGKSA (KRAS G12R)
MARGVVKSA

SEQ ID NO: 14730 - protein, 9 aa, synthetic construct
  source 1..9: note = Seed: GARGVGKSA (KRAS G12R)
MARGVVKSS

SEQ ID NO: 14731 - protein, 9 aa, synthetic construct
  source 1..9: note = Seed: GARGVGKSA (KRAS G12R)
MARGVVKST

SEQ ID NO: 14732 - protein, 9 aa, synthetic construct
  source 1..9: note = Seed: GARGVGKSA (KRAS G12R)
MARGVVKSV

SEQ ID NO: 14733 - protein, 9 aa, synthetic construct
  source 1..9: note = Seed: GARGVGKSA (KRAS G12R)
PARAVAKSA

SEQ ID NO: 14734 - protein, 9 aa, synthetic construct
  source 1..9: note = Seed: GARGVGKSA (KRAS G12R)
PARAVAKSI

SEQ ID NO: 14735 - protein, 9 aa, synthetic construct
  source 1..9: note = Seed: GARGVGKSA (KRAS G12R)
PARAVAKSS

SEQ ID NO: 14736 - protein, 9 aa, synthetic construct
  source 1..9: note = Seed: GARGVGKSA (KRAS G12R)
PARAVAKST

SEQ ID NO: 14737 - protein, 9 aa, synthetic construct
  source 1..9: note = Seed: GARGVGKSA (KRAS G12R)
PARAVAKSV

SEQ ID NO: 14738 - protein, 9 aa, synthetic construct
  source 1..9: note = Seed: GARGVGKSA (KRAS G12R)
PARAVIKSA

SEQ ID NO: 14739 - protein, 9 aa, synthetic construct
  source 1..9: note = Seed: GARGVGKSA (KRAS G12R)
PARAVIKSS

SEQ ID NO: 14740 - protein, 9 aa, synthetic construct
  source 1..9: note = Seed: GARGVGKSA (KRAS G12R)
PARAVPKSA

SEQ ID NO: 14741 - protein, 9 aa, synthetic construct
  source 1..9: note = Seed: GARGVGKSA (KRAS G12R)
PARAVPKSS

SEQ ID NO: 14742 - protein, 9 aa, synthetic construct
  source 1..9: note = Seed: GARGVGKSA (KRAS G12R)
PARAVPKST

SEQ ID NO: 14743 - protein, 9 aa, synthetic construct
  source 1..9: note = Seed: GARGVGKSA (KRAS G12R)
PARAVPKSV

SEQ ID NO: 14744 - protein, 9 aa, synthetic construct
  source 1..9: note = Seed: GARGVGKSA (KRAS G12R)
PARAVVKSA

SEQ ID NO: 14745 - protein, 9 aa, synthetic construct
  source 1..9: note = Seed: GARGVGKSA (KRAS G12R)
PARAVVKSI

SEQ ID NO: 14746 - protein, 9 aa, synthetic construct
  source 1..9: note = Seed: GARGVGKSA (KRAS G12R)
PARAVVKSS

SEQ ID NO: 14747 - protein, 9 aa, synthetic construct
  source 1..9: note = Seed: GARGVGKSA (KRAS G12R)
PARAVVKST

SEQ ID NO: 14748 - protein, 9 aa, synthetic construct
  source 1..9: note = Seed: GARGVGKSA (KRAS G12R)
PARAVVKSV

SEQ ID NO: 14749 - protein, 9 aa, synthetic construct
  source 1..9: note = Seed: GARGVGKSA (KRAS G12R)
PARGVAKSA

SEQ ID NO: 14750 - protein, 9 aa, synthetic construct
  source 1..9: note = Seed: GARGVGKSA (KRAS G12R)
PARGVAKSI

SEQ ID NO: 14751 - protein, 9 aa, synthetic construct
  source 1..9: note = Seed: GARGVGKSA (KRAS G12R)
PARGVAKSM

SEQ ID NO: 14752 - protein, 9 aa, synthetic construct
  source 1..9: note = Seed: GARGVGKSA (KRAS G12R)
PARGVAKSS

SEQ ID NO: 14753 - protein, 9 aa, synthetic construct
  source 1..9: note = Seed: GARGVGKSA (KRAS G12R)
PARGVAKST

SEQ ID NO: 14754 - protein, 9 aa, synthetic construct
  source 1..9: note = Seed: GARGVGKSA (KRAS G12R)
PARGVAKSV

SEQ ID NO: 14755 - protein, 9 aa, synthetic construct
  source 1..9: note = Seed: GARGVGKSA (KRAS G12R)
PARGVIKSA

SEQ ID NO: 14756 - protein, 9 aa, synthetic construct
  source 1..9: note = Seed: GARGVGKSA (KRAS G12R)
PARGVIKSS

SEQ ID NO: 14757 - protein, 9 aa, synthetic construct
  source 1..9: note = Seed: GARGVGKSA (KRAS G12R)
PARGVIKSV

SEQ ID NO: 14758 - protein, 9 aa, synthetic construct
  source 1..9: note = Seed: GARGVGKSA (KRAS G12R)
PARGVPKSA

SEQ ID NO: 14759 - protein, 9 aa, synthetic construct
  source 1..9: note = Seed: GARGVGKSA (KRAS G12R)
PARGVPKSS

SEQ ID NO: 14760 - protein, 9 aa, synthetic construct
  source 1..9: note = Seed: GARGVGKSA (KRAS G12R)
PARGVPKST

SEQ ID NO: 14761 - protein, 9 aa, synthetic construct
  source 1..9: note = Seed: GARGVGKSA (KRAS G12R)
PARGVPKSV

SEQ ID NO: 14762 - protein, 9 aa, synthetic construct
  source 1..9: note = Seed: GARGVGKSA (KRAS G12R)
PARGVVKSA

SEQ ID NO: 14763 - protein, 9 aa, synthetic construct
  source 1..9: note = Seed: GARGVGKSA (KRAS G12R)
PARGVVKSI

SEQ ID NO: 14764 - protein, 9 aa, synthetic construct
  source 1..9: note = Seed: GARGVGKSA (KRAS G12R)
PARGVVKSS

SEQ ID NO: 14765 - protein, 9 aa, synthetic construct
  source 1..9: note = Seed: GARGVGKSA (KRAS G12R)
PARGVVKST

SEQ ID NO: 14766 - protein, 9 aa, synthetic construct
  source 1..9: note = Seed: GARGVGKSA (KRAS G12R)
PARGVVKSV

SEQ ID NO: 14767 - protein, 9 aa, synthetic construct
  source 1..9: note = Seed: GARGVGKSA (KRAS G12R)
SARAVAKSA

SEQ ID NO: 14768 - protein, 9 aa, synthetic construct
  source 1..9: note = Seed: GARGVGKSA (KRAS G12R)
SARAVAKSI

SEQ ID NO: 14769 - protein, 9 aa, synthetic construct
  source 1..9: note = Seed: GARGVGKSA (KRAS G12R)
SARAVAKSM

SEQ ID NO: 14770 - protein, 9 aa, synthetic construct
  source 1..9: note = Seed: GARGVGKSA (KRAS G12R)
SARAVAKSS

SEQ ID NO: 14771 - protein, 9 aa, synthetic construct
  source 1..9: note = Seed: GARGVGKSA (KRAS G12R)
SARAVAKST

SEQ ID NO: 14772 - protein, 9 aa, synthetic construct
  source 1..9: note = Seed: GARGVGKSA (KRAS G12R)
SARAVAKSV

SEQ ID NO: 14773 - protein, 9 aa, synthetic construct
  source 1..9: note = Seed: GARGVGKSA (KRAS G12R)
SARAVPKSA

SEQ ID NO: 14774 - protein, 9 aa, synthetic construct
  source 1..9: note = Seed: GARGVGKSA (KRAS G12R)
SARAVVKSA

SEQ ID NO: 14775 - protein, 9 aa, synthetic construct
  source 1..9: note = Seed: GARGVGKSA (KRAS G12R)
SARGVAKSA

SEQ ID NO: 14776 - protein, 9 aa, synthetic construct
  source 1..9: note = Seed: GARGVGKSA (KRAS G12R)
SARGVAKSV

SEQ ID NO: 14777 - protein, 9 aa, synthetic construct
  source 1..9: note = Seed: GARGVGKSA (KRAS G12R)
TARAVAKSA

SEQ ID NO: 14778 - protein, 9 aa, synthetic construct
  source 1..9: note = Seed: GARGVGKSA (KRAS G12R)
TARAVAKSI

SEQ ID NO: 14779 - protein, 9 aa, synthetic construct
  source 1..9: note = Seed: GARGVGKSA (KRAS G12R)
TARAVAKSM

SEQ ID NO: 14780 - protein, 9 aa, synthetic construct
  source 1..9: note = Seed: GARGVGKSA (KRAS G12R)
TARAVAKSN

SEQ ID NO: 14781 - protein, 9 aa, synthetic construct
  source 1..9: note = Seed: GARGVGKSA (KRAS G12R)
TARAVAKSS

SEQ ID NO: 14782 - protein, 9 aa, synthetic construct
  source 1..9: note = Seed: GARGVGKSA (KRAS G12R)
TARAVAKST

SEQ ID NO: 14783 - protein, 9 aa, synthetic construct
  source 1..9: note = Seed: GARGVGKSA (KRAS G12R)
TARAVAKSV

SEQ ID NO: 14784 - protein, 9 aa, synthetic construct
  source 1..9: note = Seed: GARGVGKSA (KRAS G12R)
TARAVPKSA

SEQ ID NO: 14785 - protein, 9 aa, synthetic construct
  source 1..9: note = Seed: GARGVGKSA (KRAS G12R)
TARAVPKSI

SEQ ID NO: 14786 - protein, 9 aa, synthetic construct
  source 1..9: note = Seed: GARGVGKSA (KRAS G12R)
TARAVPKSS

SEQ ID NO: 14787 - protein, 9 aa, synthetic construct
  source 1..9: note = Seed: GARGVGKSA (KRAS G12R)
TARAVPKST

SEQ ID NO: 14788 - protein, 9 aa, synthetic construct
  source 1..9: note = Seed: GARGVGKSA (KRAS G12R)
TARAVPKSV

SEQ ID NO: 14789 - protein, 9 aa, synthetic construct
  source 1..9: note = Seed: GARGVGKSA (KRAS G12R)
TARAVVKSA

SEQ ID NO: 14790 - protein, 9 aa, synthetic construct
  source 1..9: note = Seed: GARGVGKSA (KRAS G12R)
TARAVVKSS

SEQ ID NO: 14791 - protein, 9 aa, synthetic construct
  source 1..9: note = Seed: GARGVGKSA (KRAS G12R)
TARAVVKST

SEQ ID NO: 14792 - protein, 9 aa, synthetic construct
  source 1..9: note = Seed: GARGVGKSA (KRAS G12R)
TARAVVKSV

SEQ ID NO: 14793 - protein, 9 aa, synthetic construct
  source 1..9: note = Seed: GARGVGKSA (KRAS G12R)
TARGVAKSA

SEQ ID NO: 14794 - protein, 9 aa, synthetic construct
  source 1..9: note = Seed: GARGVGKSA (KRAS G12R)
TARGVAKSI

SEQ ID NO: 14795 - protein, 9 aa, synthetic construct
  source 1..9: note = Seed: GARGVGKSA (KRAS G12R)
TARGVAKSS

SEQ ID NO: 14796 - protein, 9 aa, synthetic construct
  source 1..9: note = Seed: GARGVGKSA (KRAS G12R)
TARGVAKST

SEQ ID NO: 14797 - protein, 9 aa, synthetic construct
  source 1..9: note = Seed: GARGVGKSA (KRAS G12R)
TARGVAKSV

SEQ ID NO: 14798 - protein, 9 aa, synthetic construct
  source 1..9: note = Seed: GARGVGKSA (KRAS G12R)
TARGVVKSA

SEQ ID NO: 14799 - protein, 9 aa, synthetic construct
  source 1..9: note = Seed: GARGVGKSA (KRAS G12R)
TARGVVKSV

SEQ ID NO: 14800 - protein, 9 aa, synthetic construct
  source 1..9: note = Seed: GARGVGKSA (KRAS G12R)
VARAVAKSA

SEQ ID NO: 14801 - protein, 9 aa, synthetic construct
  source 1..9: note = Seed: GARGVGKSA (KRAS G12R)
VARAVAKSG

SEQ ID NO: 14802 - protein, 9 aa, synthetic construct
  source 1..9: note = Seed: GARGVGKSA (KRAS G12R)
VARAVAKSI

SEQ ID NO: 14803 - protein, 9 aa, synthetic construct
  source 1..9: note = Seed: GARGVGKSA (KRAS G12R)
VARAVAKSM

SEQ ID NO: 14804 - protein, 9 aa, synthetic construct
  source 1..9: note = Seed: GARGVGKSA (KRAS G12R)
VARAVAKSN

SEQ ID NO: 14805 - protein, 9 aa, synthetic construct
  source 1..9: note = Seed: GARGVGKSA (KRAS G12R)
VARAVAKSS

SEQ ID NO: 14806 - protein, 9 aa, synthetic construct
  source 1..9: note = Seed: GARGVGKSA (KRAS G12R)
VARAVAKST

SEQ ID NO: 14807 - protein, 9 aa, synthetic construct
  source 1..9: note = Seed: GARGVGKSA (KRAS G12R)
VARAVAKSV

SEQ ID NO: 14808 - protein, 9 aa, synthetic construct
  source 1..9: note = Seed: GARGVGKSA (KRAS G12R)
VARAVPKSA

SEQ ID NO: 14809 - protein, 9 aa, synthetic construct
  source 1..9: note = Seed: GARGVGKSA (KRAS G12R)
VARAVPKSI

SEQ ID NO: 14810 - protein, 9 aa, synthetic construct
  source 1..9: note = Seed: GARGVGKSA (KRAS G12R)
VARAVPKSS

SEQ ID NO: 14811 - protein, 9 aa, synthetic construct
  source 1..9: note = Seed: GARGVGKSA (KRAS G12R)
VARAVPKST

SEQ ID NO: 14812 - protein, 9 aa, synthetic construct
  source 1..9: note = Seed: GARGVGKSA (KRAS G12R)
VARAVPKSV

SEQ ID NO: 14813 - protein, 9 aa, synthetic construct
  source 1..9: note = Seed: GARGVGKSA (KRAS G12R)
VARAVVKSA

SEQ ID NO: 14814 - protein, 9 aa, synthetic construct
  source 1..9: note = Seed: GARGVGKSA (KRAS G12R)
VARAVVKSS

SEQ ID NO: 14815 - protein, 9 aa, synthetic construct
  source 1..9: note = Seed: GARGVGKSA (KRAS G12R)
VARAVVKST

SEQ ID NO: 14816 - protein, 9 aa, synthetic construct
  source 1..9: note = Seed: GARGVGKSA (KRAS G12R)
VARGVAKSA

SEQ ID NO: 14817 - protein, 9 aa, synthetic construct
  source 1..9: note = Seed: GARGVGKSA (KRAS G12R)
VARGVAKSG

SEQ ID NO: 14818 - protein, 9 aa, synthetic construct
  source 1..9: note = Seed: GARGVGKSA (KRAS G12R)
VARGVAKSI

SEQ ID NO: 14819 - protein, 9 aa, synthetic construct
  source 1..9: note = Seed: GARGVGKSA (KRAS G12R)
VARGVAKSL

SEQ ID NO: 14820 - protein, 9 aa, synthetic construct
  source 1..9: note = Seed: GARGVGKSA (KRAS G12R)
VARGVAKSM

SEQ ID NO: 14821 - protein, 9 aa, synthetic construct
  source 1..9: note = Seed: GARGVGKSA (KRAS G12R)
VARGVAKSN

SEQ ID NO: 14822 - protein, 9 aa, synthetic construct
  source 1..9: note = Seed: GARGVGKSA (KRAS G12R)
VARGVAKSS

SEQ ID NO: 14823 - protein, 9 aa, synthetic construct
  source 1..9: note = Seed: GARGVGKSA (KRAS G12R)
VARGVAKST

SEQ ID NO: 14824 - protein, 9 aa, synthetic construct
  source 1..9: note = Seed: GARGVGKSA (KRAS G12R)
VARGVAKSV

SEQ ID NO: 14825 - protein, 9 aa, synthetic construct
  source 1..9: note = Seed: GARGVGKSA (KRAS G12R)
VARGVIKSA

SEQ ID NO: 14826 - protein, 9 aa, synthetic construct
  source 1..9: note = Seed: GARGVGKSA (KRAS G12R)
VARGVPKSA

SEQ ID NO: 14827 - protein, 9 aa, synthetic construct
  source 1..9: note = Seed: GARGVGKSA (KRAS G12R)
VARGVPKSI

SEQ ID NO: 14828 - protein, 9 aa, synthetic construct
  source 1..9: note = Seed: GARGVGKSA (KRAS G12R)
VARGVPKSL

SEQ ID NO: 14829 - protein, 9 aa, synthetic construct
  source 1..9: note = Seed: GARGVGKSA (KRAS G12R)
VARGVPKSM

SEQ ID NO: 14830 - protein, 9 aa, synthetic construct
  source 1..9: note = Seed: GARGVGKSA (KRAS G12R)
VARGVPKSS

SEQ ID NO: 14831 - protein, 9 aa, synthetic construct
  source 1..9: note = Seed: GARGVGKSA (KRAS G12R)
VARGVPKST

SEQ ID NO: 14832 - protein, 9 aa, synthetic construct
  source 1..9: note = Seed: GARGVGKSA (KRAS G12R)
VARGVPKSV

SEQ ID NO: 14833 - protein, 9 aa, synthetic construct
  source 1..9: note = Seed: GARGVGKSA (KRAS G12R)
VARGVVKSA

SEQ ID NO: 14834 - protein, 9 aa, synthetic construct
  source 1..9: note = Seed: GARGVGKSA (KRAS G12R)
VARGVVKSI

SEQ ID NO: 14835 - protein, 9 aa, synthetic construct
  source 1..9: note = Seed: GARGVGKSA (KRAS G12R)
VARGVVKSS

SEQ ID NO: 14836 - protein, 9 aa, synthetic construct
  source 1..9: note = Seed: GARGVGKSA (KRAS G12R)
VARGVVKST

SEQ ID NO: 14837 - protein, 9 aa, synthetic construct
  source 1..9: note = Seed: GARGVGKSA (KRAS G12R)
VARGVVKSV

SEQ ID NO: 14838 - protein, 9 aa, synthetic construct
  source 1..9: note = Seed: GARGVGKSA (KRAS G12R)
VARSVAKSA

SEQ ID NO: 14839 - protein, 9 aa, synthetic construct
  source 1..9: note = Seed: GARGVGKSA (KRAS G12R)
WARAVAKSA

SEQ ID NO: 14840 - protein, 9 aa, synthetic construct
  source 1..9: note = Seed: GARGVGKSA (KRAS G12R)
WARAVAKSS

SEQ ID NO: 14841 - protein, 9 aa, synthetic construct
  source 1..9: note = Seed: GARGVGKSA (KRAS G12R)
WARAVAKST

SEQ ID NO: 14842 - protein, 9 aa, synthetic construct
  source 1..9: note = Seed: GARGVGKSA (KRAS G12R)
WARAVAKSV

SEQ ID NO: 14843 - protein, 9 aa, synthetic construct
  source 1..9: note = Seed: GARGVGKSA (KRAS G12R)
WARAVPKSA

SEQ ID NO: 14844 - protein, 9 aa, synthetic construct
  source 1..9: note = Seed: GARGVGKSA (KRAS G12R)
WARAVPKSV

SEQ ID NO: 14845 - protein, 9 aa, synthetic construct
  source 1..9: note = Seed: GARGVGKSA (KRAS G12R)
WARAVVKSA

SEQ ID NO: 14846 - protein, 9 aa, synthetic construct
  source 1..9: note = Seed: GARGVGKSA (KRAS G12R)
WARGVAKSA

SEQ ID NO: 14847 - protein, 9 aa, synthetic construct
  source 1..9: note = Seed: GARGVGKSA (KRAS G12R)
WARGVAKSI

SEQ ID NO: 14848 - protein, 9 aa, synthetic construct
  source 1..9: note = Seed: GARGVGKSA (KRAS G12R)
WARGVAKSS

SEQ ID NO: 14849 - protein, 9 aa, synthetic construct
  source 1..9: note = Seed: GARGVGKSA (KRAS G12R)
WARGVAKST

SEQ ID NO: 14850 - protein, 9 aa, synthetic construct
  source 1..9: note = Seed: GARGVGKSA (KRAS G12R)
WARGVAKSV

SEQ ID NO: 14851 - protein, 9 aa, synthetic construct
  source 1..9: note = Seed: GARGVGKSA (KRAS G12R)
WARGVPKSA

SEQ ID NO: 14852 - protein, 9 aa, synthetic construct
  source 1..9: note = Seed: GARGVGKSA (KRAS G12R)
WARGVPKSV

SEQ ID NO: 14853 - protein, 9 aa, synthetic construct
  source 1..9: note = Seed: GARGVGKSA (KRAS G12R)
WARGVVKSA

SEQ ID NO: 14854 - protein, 9 aa, synthetic construct
  source 1..9: note = Seed: GARGVGKSA (KRAS G12R)
WARGVVKSS

SEQ ID NO: 14855 - protein, 9 aa, synthetic construct
  source 1..9: note = Seed: GARGVGKSA (KRAS G12R)
WARGVVKST

SEQ ID NO: 14856 - protein, 9 aa, synthetic construct
  source 1..9: note = Seed: GARGVGKSA (KRAS G12R)
WARGVVKSV

SEQ ID NO: 14857 - protein, 9 aa, synthetic construct
  source 1..9: note = Seed: GARGVGKSA (KRAS G12R)
YARAVAKSA

SEQ ID NO: 14858 - protein, 9 aa, synthetic construct
  source 1..9: note = Seed: GARGVGKSA (KRAS G12R)
YARAVAKSI

SEQ ID NO: 14859 - protein, 9 aa, synthetic construct
  source 1..9: note = Seed: GARGVGKSA (KRAS G12R)
YARAVAKSS

SEQ ID NO: 14860 - protein, 9 aa, synthetic construct
  source 1..9: note = Seed: GARGVGKSA (KRAS G12R)
YARAVAKST

SEQ ID NO: 14861 - protein, 9 aa, synthetic construct
  source 1..9: note = Seed: GARGVGKSA (KRAS G12R)
YARAVAKSV

SEQ ID NO: 14862 - protein, 9 aa, synthetic construct
  source 1..9: note = Seed: GARGVGKSA (KRAS G12R)
YARAVPKSA

SEQ ID NO: 14863 - protein, 9 aa, synthetic construct
  source 1..9: note = Seed: GARGVGKSA (KRAS G12R)
YARAVPKSV

SEQ ID NO: 14864 - protein, 9 aa, synthetic construct
  source 1..9: note = Seed: GARGVGKSA (KRAS G12R)
YARAVVKSA

SEQ ID NO: 14865 - protein, 9 aa, synthetic construct
  source 1..9: note = Seed: GARGVGKSA (KRAS G12R)
YARGVAKSA

SEQ ID NO: 14866 - protein, 9 aa, synthetic construct
  source 1..9: note = Seed: GARGVGKSA (KRAS G12R)
YARGVAKSI

SEQ ID NO: 14867 - protein, 9 aa, synthetic construct
  source 1..9: note = Seed: GARGVGKSA (KRAS G12R)
YARGVAKSM

SEQ ID NO: 14868 - protein, 9 aa, synthetic construct
  source 1..9: note = Seed: GARGVGKSA (KRAS G12R)
YARGVAKSS

SEQ ID NO: 14869 - protein, 9 aa, synthetic construct
  source 1..9: note = Seed: GARGVGKSA (KRAS G12R)
YARGVAKST

SEQ ID NO: 14870 - protein, 9 aa, synthetic construct
  source 1..9: note = Seed: GARGVGKSA (KRAS G12R)
YARGVAKSV

SEQ ID NO: 14871 - protein, 9 aa, synthetic construct
  source 1..9: note = Seed: GARGVGKSA (KRAS G12R)
YARGVPKSA

SEQ ID NO: 14872 - protein, 9 aa, synthetic construct
  source 1..9: note = Seed: GARGVGKSA (KRAS G12R)
YARGVPKSI

SEQ ID NO: 14873 - protein, 9 aa, synthetic construct
  source 1..9: note = Seed: GARGVGKSA (KRAS G12R)
YARGVPKSV

SEQ ID NO: 14874 - protein, 9 aa, synthetic construct
  source 1..9: note = Seed: GARGVGKSA (KRAS G12R)
YARGVVKSA

SEQ ID NO: 14875 - protein, 9 aa, synthetic construct
  source 1..9: note = Seed: GARGVGKSA (KRAS G12R)
YARGVVKSS

SEQ ID NO: 14876 - protein, 9 aa, synthetic construct
  source 1..9: note = Seed: GARGVGKSA (KRAS G12R)
YARGVVKST

SEQ ID NO: 14877 - protein, 9 aa, synthetic construct
  source 1..9: note = Seed: GARGVGKSA (KRAS G12R)
YARGVVKSV

SEQ ID NO: 14878 - protein, 9 aa, synthetic construct
  source 1..9: note = Seed: KLVVVGARG (KRAS G12R)
FLVAVAARA

SEQ ID NO: 14879 - protein, 9 aa, synthetic construct
  source 1..9: note = Seed: KLVVVGARG (KRAS G12R)
FLVAVAARD

SEQ ID NO: 14880 - protein, 9 aa, synthetic construct
  source 1..9: note = Seed: KLVVVGARG (KRAS G12R)
FLVAVAARE

SEQ ID NO: 14881 - protein, 9 aa, synthetic construct
  source 1..9: note = Seed: KLVVVGARG (KRAS G12R)
FLVAVAARH

SEQ ID NO: 14882 - protein, 9 aa, synthetic construct
  source 1..9: note = Seed: KLVVVGARG (KRAS G12R)
FLVAVAARK

SEQ ID NO: 14883 - protein, 9 aa, synthetic construct
  source 1..9: note = Seed: KLVVVGARG (KRAS G12R)
FLVAVAARM

SEQ ID NO: 14884 - protein, 9 aa, synthetic construct
  source 1..9: note = Seed: KLVVVGARG (KRAS G12R)
FLVAVAARN

SEQ ID NO: 14885 - protein, 9 aa, synthetic construct
  source 1..9: note = Seed: KLVVVGARG (KRAS G12R)
FLVAVAARR

SEQ ID NO: 14886 - protein, 9 aa, synthetic construct
  source 1..9: note = Seed: KLVVVGARG (KRAS G12R)
FLVAVAARS

SEQ ID NO: 14887 - protein, 9 aa, synthetic construct
  source 1..9: note = Seed: KLVVVGARG (KRAS G12R)
FLVAVGARN

SEQ ID NO: 14888 - protein, 9 aa, synthetic construct
  source 1..9: note = Seed: KLVVVGARG (KRAS G12R)
FLVAVIARH

SEQ ID NO: 14889 - protein, 9 aa, synthetic construct
  source 1..9: note = Seed: KLVVVGARG (KRAS G12R)
FLVAVIARN

SEQ ID NO: 14890 - protein, 9 aa, synthetic construct
  source 1..9: note = Seed: KLVVVGARG (KRAS G12R)
FLVAVPARA

SEQ ID NO: 14891 - protein, 9 aa, synthetic construct
  source 1..9: note = Seed: KLVVVGARG (KRAS G12R)
FLVAVPARD

SEQ ID NO: 14892 - protein, 9 aa, synthetic construct
  source 1..9: note = Seed: KLVVVGARG (KRAS G12R)
FLVAVPARE

SEQ ID NO: 14893 - protein, 9 aa, synthetic construct
  source 1..9: note = Seed: KLVVVGARG (KRAS G12R)
FLVAVPARH

SEQ ID NO: 14894 - protein, 9 aa, synthetic construct
  source 1..9: note = Seed: KLVVVGARG (KRAS G12R)
FLVAVPARI

SEQ ID NO: 14895 - protein, 9 aa, synthetic construct
  source 1..9: note = Seed: KLVVVGARG (KRAS G12R)
FLVAVPARK

SEQ ID NO: 14896 - protein, 9 aa, synthetic construct
  source 1..9: note = Seed: KLVVVGARG (KRAS G12R)
FLVAVPARL

SEQ ID NO: 14897 - protein, 9 aa, synthetic construct
  source 1..9: note = Seed: KLVVVGARG (KRAS G12R)
FLVAVPARM

SEQ ID NO: 14898 - protein, 9 aa, synthetic construct
  source 1..9: note = Seed: KLVVVGARG (KRAS G12R)
FLVAVPARN

SEQ ID NO: 14899 - protein, 9 aa, synthetic construct
  source 1..9: note = Seed: KLVVVGARG (KRAS G12R)
FLVAVPARR

SEQ ID NO: 14900 - protein, 9 aa, synthetic construct
  source 1..9: note = Seed: KLVVVGARG (KRAS G12R)
FLVAVPARS

SEQ ID NO: 14901 - protein, 9 aa, synthetic construct
  source 1..9: note = Seed: KLVVVGARG (KRAS G12R)
FLVAVPART

SEQ ID NO: 14902 - protein, 9 aa, synthetic construct
  source 1..9: note = Seed: KLVVVGARG (KRAS G12R)
FLVAVPARV

SEQ ID NO: 14903 - protein, 9 aa, synthetic construct
  source 1..9: note = Seed: KLVVVGARG (KRAS G12R)
FLVAVSARN

SEQ ID NO: 14904 - protein, 9 aa, synthetic construct
  source 1..9: note = Seed: KLVVVGARG (KRAS G12R)
FLVAVTARN

SEQ ID NO: 14905 - protein, 9 aa, synthetic construct
  source 1..9: note = Seed: KLVVVGARG (KRAS G12R)
FLVAVVARH

SEQ ID NO: 14906 - protein, 9 aa, synthetic construct
  source 1..9: note = Seed: KLVVVGARG (KRAS G12R)
FLVAVVARN

SEQ ID NO: 14907 - protein, 9 aa, synthetic construct
  source 1..9: note = Seed: KLVVVGARG (KRAS G12R)
FLVGVPARN

SEQ ID NO: 14908 - protein, 9 aa, synthetic construct
  source 1..9: note = Seed: KLVVVGARG (KRAS G12R)
FLVHVAARN

SEQ ID NO: 14909 - protein, 9 aa, synthetic construct
  source 1..9: note = Seed: KLVVVGARG (KRAS G12R)
FLVHVFARR

SEQ ID NO: 14910 - protein, 9 aa, synthetic construct
  source 1..9: note = Seed: KLVVVGARG (KRAS G12R)
FLVHVLARR

SEQ ID NO: 14911 - protein, 9 aa, synthetic construct
  source 1..9: note = Seed: KLVVVGARG (KRAS G12R)
FLVHVPARN

SEQ ID NO: 14912 - protein, 9 aa, synthetic construct
  source 1..9: note = Seed: KLVVVGARG (KRAS G12R)
FLVIVPARN

SEQ ID NO: 14913 - protein, 9 aa, synthetic construct
  source 1..9: note = Seed: KLVVVGARG (KRAS G12R)
FLVMVPARN

SEQ ID NO: 14914 - protein, 9 aa, synthetic construct
  source 1..9: note = Seed: KLVVVGARG (KRAS G12R)
FLVSVAARA

SEQ ID NO: 14915 - protein, 9 aa, synthetic construct
  source 1..9: note = Seed: KLVVVGARG (KRAS G12R)
FLVSVAARD

SEQ ID NO: 14916 - protein, 9 aa, synthetic construct
  source 1..9: note = Seed: KLVVVGARG (KRAS G12R)
FLVSVAARE

SEQ ID NO: 14917 - protein, 9 aa, synthetic construct
  source 1..9: note = Seed: KLVVVGARG (KRAS G12R)
FLVSVAARH

SEQ ID NO: 14918 - protein, 9 aa, synthetic construct
  source 1..9: note = Seed: KLVVVGARG (KRAS G12R)
FLVSVAARK

SEQ ID NO: 14919 - protein, 9 aa, synthetic construct
  source 1..9: note = Seed: KLVVVGARG (KRAS G12R)
FLVSVAARL

SEQ ID NO: 14920 - protein, 9 aa, synthetic construct
  source 1..9: note = Seed: KLVVVGARG (KRAS G12R)
FLVSVAARM

SEQ ID NO: 14921 - protein, 9 aa, synthetic construct
  source 1..9: note = Seed: KLVVVGARG (KRAS G12R)
FLVSVAARN

SEQ ID NO: 14922 - protein, 9 aa, synthetic construct
  source 1..9: note = Seed: KLVVVGARG (KRAS G12R)
FLVSVAARR

SEQ ID NO: 14923 - protein, 9 aa, synthetic construct
  source 1..9: note = Seed: KLVVVGARG (KRAS G12R)
FLVSVAARS

SEQ ID NO: 14924 - protein, 9 aa, synthetic construct
  source 1..9: note = Seed: KLVVVGARG (KRAS G12R)
FLVSVAART

SEQ ID NO: 14925 - protein, 9 aa, synthetic construct
  source 1..9: note = Seed: KLVVVGARG (KRAS G12R)
FLVSVAARV

SEQ ID NO: 14926 - protein, 9 aa, synthetic construct
  source 1..9: note = Seed: KLVVVGARG (KRAS G12R)
FLVSVFARH

SEQ ID NO: 14927 - protein, 9 aa, synthetic construct
  source 1..9: note = Seed: KLVVVGARG (KRAS G12R)
FLVSVFARK

SEQ ID NO: 14928 - protein, 9 aa, synthetic construct
  source 1..9: note = Seed: KLVVVGARG (KRAS G12R)
FLVSVFARN

SEQ ID NO: 14929 - protein, 9 aa, synthetic construct
  source 1..9: note = Seed: KLVVVGARG (KRAS G12R)
FLVSVFARR

SEQ ID NO: 14930 - protein, 9 aa, synthetic construct
  source 1..9: note = Seed: KLVVVGARG (KRAS G12R)
FLVSVIARH

SEQ ID NO: 14931 - protein, 9 aa, synthetic construct
  source 1..9: note = Seed: KLVVVGARG (KRAS G12R)
FLVSVIARN

SEQ ID NO: 14932 - protein, 9 aa, synthetic construct
  source 1..9: note = Seed: KLVVVGARG (KRAS G12R)
FLVSVLARR

SEQ ID NO: 14933 - protein, 9 aa, synthetic construct
  source 1..9: note = Seed: KLVVVGARG (KRAS G12R)
FLVSVMARN

SEQ ID NO: 14934 - protein, 9 aa, synthetic construct
  source 1..9: note = Seed: KLVVVGARG (KRAS G12R)
FLVSVPARA

SEQ ID NO: 14935 - protein, 9 aa, synthetic construct
  source 1..9: note = Seed: KLVVVGARG (KRAS G12R)
FLVSVPARH

SEQ ID NO: 14936 - protein, 9 aa, synthetic construct
  source 1..9: note = Seed: KLVVVGARG (KRAS G12R)
FLVSVPARI

SEQ ID NO: 14937 - protein, 9 aa, synthetic construct
  source 1..9: note = Seed: KLVVVGARG (KRAS G12R)
FLVSVPARK

SEQ ID NO: 14938 - protein, 9 aa, synthetic construct
  source 1..9: note = Seed: KLVVVGARG (KRAS G12R)
FLVSVPARL

SEQ ID NO: 14939 - protein, 9 aa, synthetic construct
  source 1..9: note = Seed: KLVVVGARG (KRAS G12R)
FLVSVPARM

SEQ ID NO: 14940 - protein, 9 aa, synthetic construct
  source 1..9: note = Seed: KLVVVGARG (KRAS G12R)
FLVSVPARN

SEQ ID NO: 14941 - protein, 9 aa, synthetic construct
  source 1..9: note = Seed: KLVVVGARG (KRAS G12R)
FLVSVPARR

SEQ ID NO: 14942 - protein, 9 aa, synthetic construct
  source 1..9: note = Seed: KLVVVGARG (KRAS G12R)
FLVSVPARS

SEQ ID NO: 14943 - protein, 9 aa, synthetic construct
  source 1..9: note = Seed: KLVVVGARG (KRAS G12R)
FLVSVPART

SEQ ID NO: 14944 - protein, 9 aa, synthetic construct
  source 1..9: note = Seed: KLVVVGARG (KRAS G12R)
FLVSVPARV

SEQ ID NO: 14945 - protein, 9 aa, synthetic construct
  source 1..9: note = Seed: KLVVVGARG (KRAS G12R)
FLVSVSARN

SEQ ID NO: 14946 - protein, 9 aa, synthetic construct
  source 1..9: note = Seed: KLVVVGARG (KRAS G12R)
FLVSVTARN

SEQ ID NO: 14947 - protein, 9 aa, synthetic construct
  source 1..9: note = Seed: KLVVVGARG (KRAS G12R)
FLVSVVARH

SEQ ID NO: 14948 - protein, 9 aa, synthetic construct
  source 1..9: note = Seed: KLVVVGARG (KRAS G12R)
FLVSVVARN

SEQ ID NO: 14949 - protein, 9 aa, synthetic construct
  source 1..9: note = Seed: KLVVVGARG (KRAS G12R)
FLVSVYARR

SEQ ID NO: 14950 - protein, 9 aa, synthetic construct
  source 1..9: note = Seed: KLVVVGARG (KRAS G12R)
FLVTVAARH

SEQ ID NO: 14951 - protein, 9 aa, synthetic construct
  source 1..9: note = Seed: KLVVVGARG (KRAS G12R)
FLVTVAARN

SEQ ID NO: 14952 - protein, 9 aa, synthetic construct
  source 1..9: note = Seed: KLVVVGARG (KRAS G12R)
FLVTVAARS

SEQ ID NO: 14953 - protein, 9 aa, synthetic construct
  source 1..9: note = Seed: KLVVVGARG (KRAS G12R)
FLVTVFARR

SEQ ID NO: 14954 - protein, 9 aa, synthetic construct
  source 1..9: note = Seed: KLVVVGARG (KRAS G12R)
FLVTVPARA

SEQ ID NO: 14955 - protein, 9 aa, synthetic construct
  source 1..9: note = Seed: KLVVVGARG (KRAS G12R)
FLVTVPARH

SEQ ID NO: 14956 - protein, 9 aa, synthetic construct
  source 1..9: note = Seed: KLVVVGARG (KRAS G12R)
FLVTVPARI

SEQ ID NO: 14957 - protein, 9 aa, synthetic construct
  source 1..9: note = Seed: KLVVVGARG (KRAS G12R)
FLVTVPARL

SEQ ID NO: 14958 - protein, 9 aa, synthetic construct
  source 1..9: note = Seed: KLVVVGARG (KRAS G12R)
FLVTVPARM

SEQ ID NO: 14959 - protein, 9 aa, synthetic construct
  source 1..9: note = Seed: KLVVVGARG (KRAS G12R)
FLVTVPARN

SEQ ID NO: 14960 - protein, 9 aa, synthetic construct
  source 1..9: note = Seed: KLVVVGARG (KRAS G12R)
FLVTVPARS

SEQ ID NO: 14961 - protein, 9 aa, synthetic construct
  source 1..9: note = Seed: KLVVVGARG (KRAS G12R)
FLVTVPART

SEQ ID NO: 14962 - protein, 9 aa, synthetic construct
  source 1..9: note = Seed: KLVVVGARG (KRAS G12R)
FLVTVPARV

SEQ ID NO: 14963 - protein, 9 aa, synthetic construct
  source 1..9: note = Seed: KLVVVGARG (KRAS G12R)
FLVTVYARR

SEQ ID NO: 14964 - protein, 9 aa, synthetic construct
  source 1..9: note = Seed: KLVVVGARG (KRAS G12R)
FLVVVPARN

SEQ ID NO: 14965 - protein, 9 aa, synthetic construct
  source 1..9: note = Seed: KLVVVGARG (KRAS G12R)
ILVAVAARN

SEQ ID NO: 14966 - protein, 9 aa, synthetic construct
  source 1..9: note = Seed: KLVVVGARG (KRAS G12R)
ILVAVPARN

SEQ ID NO: 14967 - protein, 9 aa, synthetic construct
  source 1..9: note = Seed: KLVVVGARG (KRAS G12R)
ILVSVAARN

SEQ ID NO: 14968 - protein, 9 aa, synthetic construct
  source 1..9: note = Seed: KLVVVGARG (KRAS G12R)
ILVSVPARN

SEQ ID NO: 14969 - protein, 9 aa, synthetic construct
  source 1..9: note = Seed: KLVVVGARG (KRAS G12R)
ILVTVPARN

SEQ ID NO: 14970 - protein, 9 aa, synthetic construct
  source 1..9: note = Seed: KLVVVGARG (KRAS G12R)
KLVAVAARA

SEQ ID NO: 14971 - protein, 9 aa, synthetic construct
  source 1..9: note = Seed: KLVVVGARG (KRAS G12R)
KLVAVAARD

SEQ ID NO: 14972 - protein, 9 aa, synthetic construct
  source 1..9: note = Seed: KLVVVGARG (KRAS G12R)
KLVAVAARE

SEQ ID NO: 14973 - protein, 9 aa, synthetic construct
  source 1..9: note = Seed: KLVVVGARG (KRAS G12R)
KLVAVAARH

SEQ ID NO: 14974 - protein, 9 aa, synthetic construct
  source 1..9: note = Seed: KLVVVGARG (KRAS G12R)
KLVAVAARI

SEQ ID NO: 14975 - protein, 9 aa, synthetic construct
  source 1..9: note = Seed: KLVVVGARG (KRAS G12R)
KLVAVAARL

SEQ ID NO: 14976 - protein, 9 aa, synthetic construct
  source 1..9: note = Seed: KLVVVGARG (KRAS G12R)
KLVAVAARM

SEQ ID NO: 14977 - protein, 9 aa, synthetic construct
  source 1..9: note = Seed: KLVVVGARG (KRAS G12R)
KLVAVAARN

SEQ ID NO: 14978 - protein, 9 aa, synthetic construct
  source 1..9: note = Seed: KLVVVGARG (KRAS G12R)
KLVAVAARS

SEQ ID NO: 14979 - protein, 9 aa, synthetic construct
  source 1..9: note = Seed: KLVVVGARG (KRAS G12R)
KLVAVAART

SEQ ID NO: 14980 - protein, 9 aa, synthetic construct
  source 1..9: note = Seed: KLVVVGARG (KRAS G12R)
KLVAVAARV

SEQ ID NO: 14981 - protein, 9 aa, synthetic construct
  source 1..9: note = Seed: KLVVVGARG (KRAS G12R)
KLVAVIARN

SEQ ID NO: 14982 - protein, 9 aa, synthetic construct
  source 1..9: note = Seed: KLVVVGARG (KRAS G12R)
KLVAVPARA

SEQ ID NO: 14983 - protein, 9 aa, synthetic construct
  source 1..9: note = Seed: KLVVVGARG (KRAS G12R)
KLVAVPARH

SEQ ID NO: 14984 - protein, 9 aa, synthetic construct
  source 1..9: note = Seed: KLVVVGARG (KRAS G12R)
KLVAVPARI

SEQ ID NO: 14985 - protein, 9 aa, synthetic construct
  source 1..9: note = Seed: KLVVVGARG (KRAS G12R)
KLVAVPARL

SEQ ID NO: 14986 - protein, 9 aa, synthetic construct
  source 1..9: note = Seed: KLVVVGARG (KRAS G12R)
KLVAVPARM

SEQ ID NO: 14987 - protein, 9 aa, synthetic construct
  source 1..9: note = Seed: KLVVVGARG (KRAS G12R)
KLVAVPARN

SEQ ID NO: 14988 - protein, 9 aa, synthetic construct
  source 1..9: note = Seed: KLVVVGARG (KRAS G12R)
KLVAVPARS

SEQ ID NO: 14989 - protein, 9 aa, synthetic construct
  source 1..9: note = Seed: KLVVVGARG (KRAS G12R)
KLVAVPART

SEQ ID NO: 14990 - protein, 9 aa, synthetic construct
  source 1..9: note = Seed: KLVVVGARG (KRAS G12R)
KLVAVPARV

SEQ ID NO: 14991 - protein, 9 aa, synthetic construct
  source 1..9: note = Seed: KLVVVGARG (KRAS G12R)
KLVAVVARN

SEQ ID NO: 14992 - protein, 9 aa, synthetic construct
  source 1..9: note = Seed: KLVVVGARG (KRAS G12R)
KLVHVAARA

SEQ ID NO: 14993 - protein, 9 aa, synthetic construct
  source 1..9: note = Seed: KLVVVGARG (KRAS G12R)
KLVHVAARN

SEQ ID NO: 14994 - protein, 9 aa, synthetic construct
  source 1..9: note = Seed: KLVVVGARG (KRAS G12R)
KLVIVAARN

SEQ ID NO: 14995 - protein, 9 aa, synthetic construct
  source 1..9: note = Seed: KLVVVGARG (KRAS G12R)
KLVIVPARN

SEQ ID NO: 14996 - protein, 9 aa, synthetic construct
  source 1..9: note = Seed: KLVVVGARG (KRAS G12R)
KLVIVPARS

SEQ ID NO: 14997 - protein, 9 aa, synthetic construct
  source 1..9: note = Seed: KLVVVGARG (KRAS G12R)
KLVMVPARN

SEQ ID NO: 14998 - protein, 9 aa, synthetic construct
  source 1..9: note = Seed: KLVVVGARG (KRAS G12R)
KLVSVAARA

SEQ ID NO: 14999 - protein, 9 aa, synthetic construct
  source 1..9: note = Seed: KLVVVGARG (KRAS G12R)
KLVSVAARD

SEQ ID NO: 15000 - protein, 9 aa, synthetic construct
  source 1..9: note = Seed: KLVVVGARG (KRAS G12R)
KLVSVAARE

SEQ ID NO: 15001 - protein, 9 aa, synthetic construct
  source 1..9: note = Seed: KLVVVGARG (KRAS G12R)
KLVSVAARH

SEQ ID NO: 15002 - protein, 9 aa, synthetic construct
  source 1..9: note = Seed: KLVVVGARG (KRAS G12R)
KLVSVAARI

SEQ ID NO: 15003 - protein, 9 aa, synthetic construct
  source 1..9: note = Seed: KLVVVGARG (KRAS G12R)
KLVSVAARL

SEQ ID NO: 15004 - protein, 9 aa, synthetic construct
  source 1..9: note = Seed: KLVVVGARG (KRAS G12R)
KLVSVAARM

SEQ ID NO: 15005 - protein, 9 aa, synthetic construct
  source 1..9: note = Seed: KLVVVGARG (KRAS G12R)
KLVSVAARN

SEQ ID NO: 15006 - protein, 9 aa, synthetic construct
  source 1..9: note = Seed: KLVVVGARG (KRAS G12R)
KLVSVAARS

SEQ ID NO: 15007 - protein, 9 aa, synthetic construct
  source 1..9: note = Seed: KLVVVGARG (KRAS G12R)
KLVSVAART

SEQ ID NO: 15008 - protein, 9 aa, synthetic construct
  source 1..9: note = Seed: KLVVVGARG (KRAS G12R)
KLVSVAARV

SEQ ID NO: 15009 - protein, 9 aa, synthetic construct
  source 1..9: note = Seed: KLVVVGARG (KRAS G12R)
KLVSVIARN

SEQ ID NO: 15010 - protein, 9 aa, synthetic construct
  source 1..9: note = Seed: KLVVVGARG (KRAS G12R)
KLVSVPARA

SEQ ID NO: 15011 - protein, 9 aa, synthetic construct
  source 1..9: note = Seed: KLVVVGARG (KRAS G12R)
KLVSVPARH

SEQ ID NO: 15012 - protein, 9 aa, synthetic construct
  source 1..9: note = Seed: KLVVVGARG (KRAS G12R)
KLVSVPARI

SEQ ID NO: 15013 - protein, 9 aa, synthetic construct
  source 1..9: note = Seed: KLVVVGARG (KRAS G12R)
KLVSVPARM

SEQ ID NO: 15014 - protein, 9 aa, synthetic construct
  source 1..9: note = Seed: KLVVVGARG (KRAS G12R)
KLVSVPARN

SEQ ID NO: 15015 - protein, 9 aa, synthetic construct
  source 1..9: note = Seed: KLVVVGARG (KRAS G12R)
KLVSVPARS

SEQ ID NO: 15016 - protein, 9 aa, synthetic construct
  source 1..9: note = Seed: KLVVVGARG (KRAS G12R)
KLVSVPART

SEQ ID NO: 15017 - protein, 9 aa, synthetic construct
  source 1..9: note = Seed: KLVVVGARG (KRAS G12R)
KLVSVPARV

SEQ ID NO: 15018 - protein, 9 aa, synthetic construct
  source 1..9: note = Seed: KLVVVGARG (KRAS G12R)
KLVSVVARN

SEQ ID NO: 15019 - protein, 9 aa, synthetic construct
  source 1..9: note = Seed: KLVVVGARG (KRAS G12R)
KLVTVAARA

SEQ ID NO: 15020 - protein, 9 aa, synthetic construct
  source 1..9: note = Seed: KLVVVGARG (KRAS G12R)
KLVTVAARH

SEQ ID NO: 15021 - protein, 9 aa, synthetic construct
  source 1..9: note = Seed: KLVVVGARG (KRAS G12R)
KLVTVAARI

SEQ ID NO: 15022 - protein, 9 aa, synthetic construct
  source 1..9: note = Seed: KLVVVGARG (KRAS G12R)
KLVTVAARL

SEQ ID NO: 15023 - protein, 9 aa, synthetic construct
  source 1..9: note = Seed: KLVVVGARG (KRAS G12R)
KLVTVAARM

SEQ ID NO: 15024 - protein, 9 aa, synthetic construct
  source 1..9: note = Seed: KLVVVGARG (KRAS G12R)
KLVTVAARN

SEQ ID NO: 15025 - protein, 9 aa, synthetic construct
  source 1..9: note = Seed: KLVVVGARG (KRAS G12R)
KLVTVAARS

SEQ ID NO: 15026 - protein, 9 aa, synthetic construct
  source 1..9: note = Seed: KLVVVGARG (KRAS G12R)
KLVTVAART

SEQ ID NO: 15027 - protein, 9 aa, synthetic construct
  source 1..9: note = Seed: KLVVVGARG (KRAS G12R)
KLVTVAARV

SEQ ID NO: 15028 - protein, 9 aa, synthetic construct
  source 1..9: note = Seed: KLVVVGARG (KRAS G12R)
KLVTVPARA

SEQ ID NO: 15029 - protein, 9 aa, synthetic construct
  source 1..9: note = Seed: KLVVVGARG (KRAS G12R)
KLVTVPARN

SEQ ID NO: 15030 - protein, 9 aa, synthetic construct
  source 1..9: note = Seed: KLVVVGARG (KRAS G12R)
KLVTVPARS

SEQ ID NO: 15031 - protein, 9 aa, synthetic construct
  source 1..9: note = Seed: KLVVVGARG (KRAS G12R)
KLVTVPARV

SEQ ID NO: 15032 - protein, 9 aa, synthetic construct
  source 1..9: note = Seed: KLVVVGARG (KRAS G12R)
KLVVVAARN

SEQ ID NO: 15033 - protein, 9 aa, synthetic construct
  source 1..9: note = Seed: KLVVVGARG (KRAS G12R)
KLVVVPARN

SEQ ID NO: 15034 - protein, 9 aa, synthetic construct
  source 1..9: note = Seed: KLVVVGARG (KRAS G12R)
LLVAVAARH

SEQ ID NO: 15035 - protein, 9 aa, synthetic construct
  source 1..9: note = Seed: KLVVVGARG (KRAS G12R)
LLVAVAARN

SEQ ID NO: 15036 - protein, 9 aa, synthetic construct
  source 1..9: note = Seed: KLVVVGARG (KRAS G12R)
LLVAVPARN

SEQ ID NO: 15037 - protein, 9 aa, synthetic construct
  source 1..9: note = Seed: KLVVVGARG (KRAS G12R)
LLVSVAARH

SEQ ID NO: 15038 - protein, 9 aa, synthetic construct
  source 1..9: note = Seed: KLVVVGARG (KRAS G12R)
LLVSVAARN

SEQ ID NO: 15039 - protein, 9 aa, synthetic construct
  source 1..9: note = Seed: KLVVVGARG (KRAS G12R)
LLVSVAARS

SEQ ID NO: 15040 - protein, 9 aa, synthetic construct
  source 1..9: note = Seed: KLVVVGARG (KRAS G12R)
LLVSVPARN

SEQ ID NO: 15041 - protein, 9 aa, synthetic construct
  source 1..9: note = Seed: KLVVVGARG (KRAS G12R)
LLVSVPARS

SEQ ID NO: 15042 - protein, 9 aa, synthetic construct
  source 1..9: note = Seed: KLVVVGARG (KRAS G12R)
LLVTVAARN

SEQ ID NO: 15043 - protein, 9 aa, synthetic construct
  source 1..9: note = Seed: KLVVVGARG (KRAS G12R)
LLVTVPARN

SEQ ID NO: 15044 - protein, 9 aa, synthetic construct
  source 1..9: note = Seed: KLVVVGARG (KRAS G12R)
MLVAVAARN

SEQ ID NO: 15045 - protein, 9 aa, synthetic construct
  source 1..9: note = Seed: KLVVVGARG (KRAS G12R)
MLVAVPARN

SEQ ID NO: 15046 - protein, 9 aa, synthetic construct
  source 1..9: note = Seed: KLVVVGARG (KRAS G12R)
MLVSVAARN

SEQ ID NO: 15047 - protein, 9 aa, synthetic construct
  source 1..9: note = Seed: KLVVVGARG (KRAS G12R)
MLVSVAARS

SEQ ID NO: 15048 - protein, 9 aa, synthetic construct
  source 1..9: note = Seed: KLVVVGARG (KRAS G12R)
MLVSVPARN

SEQ ID NO: 15049 - protein, 9 aa, synthetic construct
  source 1..9: note = Seed: KLVVVGARG (KRAS G12R)
MLVTVAARN

SEQ ID NO: 15050 - protein, 9 aa, synthetic construct
  source 1..9: note = Seed: KLVVVGARG (KRAS G12R)
MLVTVPARN

SEQ ID NO: 15051 - protein, 9 aa, synthetic construct
  source 1..9: note = Seed: KLVVVGARG (KRAS G12R)
RLVAVAARA

SEQ ID NO: 15052 - protein, 9 aa, synthetic construct
  source 1..9: note = Seed: KLVVVGARG (KRAS G12R)
RLVAVAARC

SEQ ID NO: 15053 - protein, 9 aa, synthetic construct
  source 1..9: note = Seed: KLVVVGARG (KRAS G12R)
RLVAVAARD

SEQ ID NO: 15054 - protein, 9 aa, synthetic construct
  source 1..9: note = Seed: KLVVVGARG (KRAS G12R)
RLVAVAARE

SEQ ID NO: 15055 - protein, 9 aa, synthetic construct
  source 1..9: note = Seed: KLVVVGARG (KRAS G12R)
RLVAVAARF

SEQ ID NO: 15056 - protein, 9 aa, synthetic construct
  source 1..9: note = Seed: KLVVVGARG (KRAS G12R)
RLVAVAARG

SEQ ID NO: 15057 - protein, 9 aa, synthetic construct
  source 1..9: note = Seed: KLVVVGARG (KRAS G12R)
RLVAVAARH

SEQ ID NO: 15058 - protein, 9 aa, synthetic construct
  source 1..9: note = Seed: KLVVVGARG (KRAS G12R)
RLVAVAARI

SEQ ID NO: 15059 - protein, 9 aa, synthetic construct
  source 1..9: note = Seed: KLVVVGARG (KRAS G12R)
RLVAVAARK

SEQ ID NO: 15060 - protein, 9 aa, synthetic construct
  source 1..9: note = Seed: KLVVVGARG (KRAS G12R)
RLVAVAARL

SEQ ID NO: 15061 - protein, 9 aa, synthetic construct
  source 1..9: note = Seed: KLVVVGARG (KRAS G12R)
RLVAVAARM

SEQ ID NO: 15062 - protein, 9 aa, synthetic construct
  source 1..9: note = Seed: KLVVVGARG (KRAS G12R)
RLVAVAARN

SEQ ID NO: 15063 - protein, 9 aa, synthetic construct
  source 1..9: note = Seed: KLVVVGARG (KRAS G12R)
RLVAVAARP

SEQ ID NO: 15064 - protein, 9 aa, synthetic construct
  source 1..9: note = Seed: KLVVVGARG (KRAS G12R)
RLVAVAARQ

SEQ ID NO: 15065 - protein, 9 aa, synthetic construct
  source 1..9: note = Seed: KLVVVGARG (KRAS G12R)
RLVAVAARR

SEQ ID NO: 15066 - protein, 9 aa, synthetic construct
  source 1..9: note = Seed: KLVVVGARG (KRAS G12R)
RLVAVAARS

SEQ ID NO: 15067 - protein, 9 aa, synthetic construct
  source 1..9: note = Seed: KLVVVGARG (KRAS G12R)
RLVAVAART

SEQ ID NO: 15068 - protein, 9 aa, synthetic construct
  source 1..9: note = Seed: KLVVVGARG (KRAS G12R)
RLVAVAARV

SEQ ID NO: 15069 - protein, 9 aa, synthetic construct
  source 1..9: note = Seed: KLVVVGARG (KRAS G12R)
RLVAVAARY

SEQ ID NO: 15070 - protein, 9 aa, synthetic construct
  source 1..9: note = Seed: KLVVVGARG (KRAS G12R)
RLVAVCARN

SEQ ID NO: 15071 - protein, 9 aa, synthetic construct
  source 1..9: note = Seed: KLVVVGARG (KRAS G12R)
RLVAVFARA

SEQ ID NO: 15072 - protein, 9 aa, synthetic construct
  source 1..9: note = Seed: KLVVVGARG (KRAS G12R)
RLVAVFARH

SEQ ID NO: 15073 - protein, 9 aa, synthetic construct
  source 1..9: note = Seed: KLVVVGARG (KRAS G12R)
RLVAVFARN

SEQ ID NO: 15074 - protein, 9 aa, synthetic construct
  source 1..9: note = Seed: KLVVVGARG (KRAS G12R)
RLVAVFARS

SEQ ID NO: 15075 - protein, 9 aa, synthetic construct
  source 1..9: note = Seed: KLVVVGARG (KRAS G12R)
RLVAVGARA

SEQ ID NO: 15076 - protein, 9 aa, synthetic construct
  source 1..9: note = Seed: KLVVVGARG (KRAS G12R)
RLVAVGARD

SEQ ID NO: 15077 - protein, 9 aa, synthetic construct
  source 1..9: note = Seed: KLVVVGARG (KRAS G12R)
RLVAVGARE

SEQ ID NO: 15078 - protein, 9 aa, synthetic construct
  source 1..9: note = Seed: KLVVVGARG (KRAS G12R)
RLVAVGARH

SEQ ID NO: 15079 - protein, 9 aa, synthetic construct
  source 1..9: note = Seed: KLVVVGARG (KRAS G12R)
RLVAVGARI

SEQ ID NO: 15080 - protein, 9 aa, synthetic construct
  source 1..9: note = Seed: KLVVVGARG (KRAS G12R)
RLVAVGARL

SEQ ID NO: 15081 - protein, 9 aa, synthetic construct
  source 1..9: note = Seed: KLVVVGARG (KRAS G12R)
RLVAVGARM

SEQ ID NO: 15082 - protein, 9 aa, synthetic construct
  source 1..9: note = Seed: KLVVVGARG (KRAS G12R)
RLVAVGARN

SEQ ID NO: 15083 - protein, 9 aa, synthetic construct
  source 1..9: note = Seed: KLVVVGARG (KRAS G12R)
RLVAVGARQ

SEQ ID NO: 15084 - protein, 9 aa, synthetic construct
  source 1..9: note = Seed: KLVVVGARG (KRAS G12R)
RLVAVGARS

SEQ ID NO: 15085 - protein, 9 aa, synthetic construct
  source 1..9: note = Seed: KLVVVGARG (KRAS G12R)
RLVAVGART

SEQ ID NO: 15086 - protein, 9 aa, synthetic construct
  source 1..9: note = Seed: KLVVVGARG (KRAS G12R)
RLVAVGARV

SEQ ID NO: 15087 - protein, 9 aa, synthetic construct
  source 1..9: note = Seed: KLVVVGARG (KRAS G12R)
RLVAVIARA

SEQ ID NO: 15088 - protein, 9 aa, synthetic construct
  source 1..9: note = Seed: KLVVVGARG (KRAS G12R)
RLVAVIARD

SEQ ID NO: 15089 - protein, 9 aa, synthetic construct
  source 1..9: note = Seed: KLVVVGARG (KRAS G12R)
RLVAVIARE

SEQ ID NO: 15090 - protein, 9 aa, synthetic construct
  source 1..9: note = Seed: KLVVVGARG (KRAS G12R)
RLVAVIARF

SEQ ID NO: 15091 - protein, 9 aa, synthetic construct
  source 1..9: note = Seed: KLVVVGARG (KRAS G12R)
RLVAVIARG

SEQ ID NO: 15092 - protein, 9 aa, synthetic construct
  source 1..9: note = Seed: KLVVVGARG (KRAS G12R)
RLVAVIARH

SEQ ID NO: 15093 - protein, 9 aa, synthetic construct
  source 1..9: note = Seed: KLVVVGARG (KRAS G12R)
RLVAVIARI

SEQ ID NO: 15094 - protein, 9 aa, synthetic construct
  source 1..9: note = Seed: KLVVVGARG (KRAS G12R)
RLVAVIARK

SEQ ID NO: 15095 - protein, 9 aa, synthetic construct
  source 1..9: note = Seed: KLVVVGARG (KRAS G12R)
RLVAVIARL

SEQ ID NO: 15096 - protein, 9 aa, synthetic construct
  source 1..9: note = Seed: KLVVVGARG (KRAS G12R)
RLVAVIARM

SEQ ID NO: 15097 - protein, 9 aa, synthetic construct
  source 1..9: note = Seed: KLVVVGARG (KRAS G12R)
RLVAVIARN

SEQ ID NO: 15098 - protein, 9 aa, synthetic construct
  source 1..9: note = Seed: KLVVVGARG (KRAS G12R)
RLVAVIARP

SEQ ID NO: 15099 - protein, 9 aa, synthetic construct
  source 1..9: note = Seed: KLVVVGARG (KRAS G12R)
RLVAVIARQ

SEQ ID NO: 15100 - protein, 9 aa, synthetic construct
  source 1..9: note = Seed: KLVVVGARG (KRAS G12R)
RLVAVIARR

SEQ ID NO: 15101 - protein, 9 aa, synthetic construct
  source 1..9: note = Seed: KLVVVGARG (KRAS G12R)
RLVAVIARS

SEQ ID NO: 15102 - protein, 9 aa, synthetic construct
  source 1..9: note = Seed: KLVVVGARG (KRAS G12R)
RLVAVIART

SEQ ID NO: 15103 - protein, 9 aa, synthetic construct
  source 1..9: note = Seed: KLVVVGARG (KRAS G12R)
RLVAVIARV

SEQ ID NO: 15104 - protein, 9 aa, synthetic construct
  source 1..9: note = Seed: KLVVVGARG (KRAS G12R)
RLVAVIARY

SEQ ID NO: 15105 - protein, 9 aa, synthetic construct
  source 1..9: note = Seed: KLVVVGARG (KRAS G12R)
RLVAVLARA

SEQ ID NO: 15106 - protein, 9 aa, synthetic construct
  source 1..9: note = Seed: KLVVVGARG (KRAS G12R)
RLVAVLARD

SEQ ID NO: 15107 - protein, 9 aa, synthetic construct
  source 1..9: note = Seed: KLVVVGARG (KRAS G12R)
RLVAVLARE

SEQ ID NO: 15108 - protein, 9 aa, synthetic construct
  source 1..9: note = Seed: KLVVVGARG (KRAS G12R)
RLVAVLARH

SEQ ID NO: 15109 - protein, 9 aa, synthetic construct
  source 1..9: note = Seed: KLVVVGARG (KRAS G12R)
RLVAVLARI

SEQ ID NO: 15110 - protein, 9 aa, synthetic construct
  source 1..9: note = Seed: KLVVVGARG (KRAS G12R)
RLVAVLARK

SEQ ID NO: 15111 - protein, 9 aa, synthetic construct
  source 1..9: note = Seed: KLVVVGARG (KRAS G12R)
RLVAVLARL

SEQ ID NO: 15112 - protein, 9 aa, synthetic construct
  source 1..9: note = Seed: KLVVVGARG (KRAS G12R)
RLVAVLARM

SEQ ID NO: 15113 - protein, 9 aa, synthetic construct
  source 1..9: note = Seed: KLVVVGARG (KRAS G12R)
RLVAVLARN

SEQ ID NO: 15114 - protein, 9 aa, synthetic construct
  source 1..9: note = Seed: KLVVVGARG (KRAS G12R)
RLVAVLARP

SEQ ID NO: 15115 - protein, 9 aa, synthetic construct
  source 1..9: note = Seed: KLVVVGARG (KRAS G12R)
RLVAVLARQ

SEQ ID NO: 15116 - protein, 9 aa, synthetic construct
  source 1..9: note = Seed: KLVVVGARG (KRAS G12R)
RLVAVLARR

SEQ ID NO: 15117 - protein, 9 aa, synthetic construct
  source 1..9: note = Seed: KLVVVGARG (KRAS G12R)
RLVAVLARS

SEQ ID NO: 15118 - protein, 9 aa, synthetic construct
  source 1..9: note = Seed: KLVVVGARG (KRAS G12R)
RLVAVLART

SEQ ID NO: 15119 - protein, 9 aa, synthetic construct
  source 1..9: note = Seed: KLVVVGARG (KRAS G12R)
RLVAVLARV

SEQ ID NO: 15120 - protein, 9 aa, synthetic construct
  source 1..9: note = Seed: KLVVVGARG (KRAS G12R)
RLVAVMARA

SEQ ID NO: 15121 - protein, 9 aa, synthetic construct
  source 1..9: note = Seed: KLVVVGARG (KRAS G12R)
RLVAVMARD

SEQ ID NO: 15122 - protein, 9 aa, synthetic construct
  source 1..9: note = Seed: KLVVVGARG (KRAS G12R)
RLVAVMARE

SEQ ID NO: 15123 - protein, 9 aa, synthetic construct
  source 1..9: note = Seed: KLVVVGARG (KRAS G12R)
RLVAVMARH

SEQ ID NO: 15124 - protein, 9 aa, synthetic construct
  source 1..9: note = Seed: KLVVVGARG (KRAS G12R)
RLVAVMARI

SEQ ID NO: 15125 - protein, 9 aa, synthetic construct
  source 1..9: note = Seed: KLVVVGARG (KRAS G12R)
RLVAVMARK

SEQ ID NO: 15126 - protein, 9 aa, synthetic construct
  source 1..9: note = Seed: KLVVVGARG (KRAS G12R)
RLVAVMARL

SEQ ID NO: 15127 - protein, 9 aa, synthetic construct
  source 1..9: note = Seed: KLVVVGARG (KRAS G12R)
RLVAVMARM

SEQ ID NO: 15128 - protein, 9 aa, synthetic construct
  source 1..9: note = Seed: KLVVVGARG (KRAS G12R)
RLVAVMARN

SEQ ID NO: 15129 - protein, 9 aa, synthetic construct
  source 1..9: note = Seed: KLVVVGARG (KRAS G12R)
RLVAVMARP

SEQ ID NO: 15130 - protein, 9 aa, synthetic construct
  source 1..9: note = Seed: KLVVVGARG (KRAS G12R)
RLVAVMARQ

SEQ ID NO: 15131 - protein, 9 aa, synthetic construct
  source 1..9: note = Seed: KLVVVGARG (KRAS G12R)
RLVAVMARR

SEQ ID NO: 15132 - protein, 9 aa, synthetic construct
  source 1..9: note = Seed: KLVVVGARG (KRAS G12R)
RLVAVMARS

SEQ ID NO: 15133 - protein, 9 aa, synthetic construct
  source 1..9: note = Seed: KLVVVGARG (KRAS G12R)
RLVAVMART

SEQ ID NO: 15134 - protein, 9 aa, synthetic construct
  source 1..9: note = Seed: KLVVVGARG (KRAS G12R)
RLVAVMARV

SEQ ID NO: 15135 - protein, 9 aa, synthetic construct
  source 1..9: note = Seed: KLVVVGARG (KRAS G12R)
RLVAVNARA

SEQ ID NO: 15136 - protein, 9 aa, synthetic construct
  source 1..9: note = Seed: KLVVVGARG (KRAS G12R)
RLVAVNARN

SEQ ID NO: 15137 - protein, 9 aa, synthetic construct
  source 1..9: note = Seed: KLVVVGARG (KRAS G12R)
RLVAVNARS

SEQ ID NO: 15138 - protein, 9 aa, synthetic construct
  source 1..9: note = Seed: KLVVVGARG (KRAS G12R)
RLVAVNARV

SEQ ID NO: 15139 - protein, 9 aa, synthetic construct
  source 1..9: note = Seed: KLVVVGARG (KRAS G12R)
RLVAVPARA

SEQ ID NO: 15140 - protein, 9 aa, synthetic construct
  source 1..9: note = Seed: KLVVVGARG (KRAS G12R)
RLVAVPARC

SEQ ID NO: 15141 - protein, 9 aa, synthetic construct
  source 1..9: note = Seed: KLVVVGARG (KRAS G12R)
RLVAVPARD

SEQ ID NO: 15142 - protein, 9 aa, synthetic construct
  source 1..9: note = Seed: KLVVVGARG (KRAS G12R)
RLVAVPARE

SEQ ID NO: 15143 - protein, 9 aa, synthetic construct
  source 1..9: note = Seed: KLVVVGARG (KRAS G12R)
RLVAVPARF

SEQ ID NO: 15144 - protein, 9 aa, synthetic construct
  source 1..9: note = Seed: KLVVVGARG (KRAS G12R)
RLVAVPARG

SEQ ID NO: 15145 - protein, 9 aa, synthetic construct
  source 1..9: note = Seed: KLVVVGARG (KRAS G12R)
RLVAVPARH

SEQ ID NO: 15146 - protein, 9 aa, synthetic construct
  source 1..9: note = Seed: KLVVVGARG (KRAS G12R)
RLVAVPARI

SEQ ID NO: 15147 - protein, 9 aa, synthetic construct
  source 1..9: note = Seed: KLVVVGARG (KRAS G12R)
RLVAVPARK

SEQ ID NO: 15148 - protein, 9 aa, synthetic construct
  source 1..9: note = Seed: KLVVVGARG (KRAS G12R)
RLVAVPARL

SEQ ID NO: 15149 - protein, 9 aa, synthetic construct
  source 1..9: note = Seed: KLVVVGARG (KRAS G12R)
RLVAVPARM

SEQ ID NO: 15150 - protein, 9 aa, synthetic construct
  source 1..9: note = Seed: KLVVVGARG (KRAS G12R)
RLVAVPARN

SEQ ID NO: 15151 - protein, 9 aa, synthetic construct
  source 1..9: note = Seed: KLVVVGARG (KRAS G12R)
RLVAVPARP

SEQ ID NO: 15152 - protein, 9 aa, synthetic construct
  source 1..9: note = Seed: KLVVVGARG (KRAS G12R)
RLVAVPARQ

SEQ ID NO: 15153 - protein, 9 aa, synthetic construct
  source 1..9: note = Seed: KLVVVGARG (KRAS G12R)
RLVAVPARR

SEQ ID NO: 15154 - protein, 9 aa, synthetic construct
  source 1..9: note = Seed: KLVVVGARG (KRAS G12R)
RLVAVPARS

SEQ ID NO: 15155 - protein, 9 aa, synthetic construct
  source 1..9: note = Seed: KLVVVGARG (KRAS G12R)
RLVAVPART

SEQ ID NO: 15156 - protein, 9 aa, synthetic construct
  source 1..9: note = Seed: KLVVVGARG (KRAS G12R)
RLVAVPARV

SEQ ID NO: 15157 - protein, 9 aa, synthetic construct
  source 1..9: note = Seed: KLVVVGARG (KRAS G12R)
RLVAVPARY

SEQ ID NO: 15158 - protein, 9 aa, synthetic construct
  source 1..9: note = Seed: KLVVVGARG (KRAS G12R)
RLVAVSARA

SEQ ID NO: 15159 - protein, 9 aa, synthetic construct
  source 1..9: note = Seed: KLVVVGARG (KRAS G12R)
RLVAVSARD

SEQ ID NO: 15160 - protein, 9 aa, synthetic construct
  source 1..9: note = Seed: KLVVVGARG (KRAS G12R)
RLVAVSARE

SEQ ID NO: 15161 - protein, 9 aa, synthetic construct
  source 1..9: note = Seed: KLVVVGARG (KRAS G12R)
RLVAVSARF

SEQ ID NO: 15162 - protein, 9 aa, synthetic construct
  source 1..9: note = Seed: KLVVVGARG (KRAS G12R)
RLVAVSARH

SEQ ID NO: 15163 - protein, 9 aa, synthetic construct
  source 1..9: note = Seed: KLVVVGARG (KRAS G12R)
RLVAVSARI

SEQ ID NO: 15164 - protein, 9 aa, synthetic construct
  source 1..9: note = Seed: KLVVVGARG (KRAS G12R)
RLVAVSARL

SEQ ID NO: 15165 - protein, 9 aa, synthetic construct
  source 1..9: note = Seed: KLVVVGARG (KRAS G12R)
RLVAVSARM

SEQ ID NO: 15166 - protein, 9 aa, synthetic construct
  source 1..9: note = Seed: KLVVVGARG (KRAS G12R)
RLVAVSARN

SEQ ID NO: 15167 - protein, 9 aa, synthetic construct
  source 1..9: note = Seed: KLVVVGARG (KRAS G12R)
RLVAVSARQ

SEQ ID NO: 15168 - protein, 9 aa, synthetic construct
  source 1..9: note = Seed: KLVVVGARG (KRAS G12R)
RLVAVSARS

SEQ ID NO: 15169 - protein, 9 aa, synthetic construct
  source 1..9: note = Seed: KLVVVGARG (KRAS G12R)
RLVAVSART

SEQ ID NO: 15170 - protein, 9 aa, synthetic construct
  source 1..9: note = Seed: KLVVVGARG (KRAS G12R)
RLVAVSARV

SEQ ID NO: 15171 - protein, 9 aa, synthetic construct
  source 1..9: note = Seed: KLVVVGARG (KRAS G12R)
RLVAVTARA

SEQ ID NO: 15172 - protein, 9 aa, synthetic construct
  source 1..9: note = Seed: KLVVVGARG (KRAS G12R)
RLVAVTARD

SEQ ID NO: 15173 - protein, 9 aa, synthetic construct
  source 1..9: note = Seed: KLVVVGARG (KRAS G12R)
RLVAVTARE

SEQ ID NO: 15174 - protein, 9 aa, synthetic construct
  source 1..9: note = Seed: KLVVVGARG (KRAS G12R)
RLVAVTARH

SEQ ID NO: 15175 - protein, 9 aa, synthetic construct
  source 1..9: note = Seed: KLVVVGARG (KRAS G12R)
RLVAVTARI

SEQ ID NO: 15176 - protein, 9 aa, synthetic construct
  source 1..9: note = Seed: KLVVVGARG (KRAS G12R)
RLVAVTARL

SEQ ID NO: 15177 - protein, 9 aa, synthetic construct
  source 1..9: note = Seed: KLVVVGARG (KRAS G12R)
RLVAVTARM

SEQ ID NO: 15178 - protein, 9 aa, synthetic construct
  source 1..9: note = Seed: KLVVVGARG (KRAS G12R)
RLVAVTARN

SEQ ID NO: 15179 - protein, 9 aa, synthetic construct
  source 1..9: note = Seed: KLVVVGARG (KRAS G12R)
RLVAVTARS

SEQ ID NO: 15180 - protein, 9 aa, synthetic construct
  source 1..9: note = Seed: KLVVVGARG (KRAS G12R)
RLVAVTART

SEQ ID NO: 15181 - protein, 9 aa, synthetic construct
  source 1..9: note = Seed: KLVVVGARG (KRAS G12R)
RLVAVTARV

SEQ ID NO: 15182 - protein, 9 aa, synthetic construct
  source 1..9: note = Seed: KLVVVGARG (KRAS G12R)
RLVAVVARA

SEQ ID NO: 15183 - protein, 9 aa, synthetic construct
  source 1..9: note = Seed: KLVVVGARG (KRAS G12R)
RLVAVVARD

SEQ ID NO: 15184 - protein, 9 aa, synthetic construct
  source 1..9: note = Seed: KLVVVGARG (KRAS G12R)
RLVAVVARE

SEQ ID NO: 15185 - protein, 9 aa, synthetic construct
  source 1..9: note = Seed: KLVVVGARG (KRAS G12R)
RLVAVVARF

SEQ ID NO: 15186 - protein, 9 aa, synthetic construct
  source 1..9: note = Seed: KLVVVGARG (KRAS G12R)
RLVAVVARG

SEQ ID NO: 15187 - protein, 9 aa, synthetic construct
  source 1..9: note = Seed: KLVVVGARG (KRAS G12R)
RLVAVVARH

SEQ ID NO: 15188 - protein, 9 aa, synthetic construct
  source 1..9: note = Seed: KLVVVGARG (KRAS G12R)
RLVAVVARI

SEQ ID NO: 15189 - protein, 9 aa, synthetic construct
  source 1..9: note = Seed: KLVVVGARG (KRAS G12R)
RLVAVVARK

SEQ ID NO: 15190 - protein, 9 aa, synthetic construct
  source 1..9: note = Seed: KLVVVGARG (KRAS G12R)
RLVAVVARL

SEQ ID NO: 15191 - protein, 9 aa, synthetic construct
  source 1..9: note = Seed: KLVVVGARG (KRAS G12R)
RLVAVVARM

SEQ ID NO: 15192 - protein, 9 aa, synthetic construct
  source 1..9: note = Seed: KLVVVGARG (KRAS G12R)
RLVAVVARN

SEQ ID NO: 15193 - protein, 9 aa, synthetic construct
  source 1..9: note = Seed: KLVVVGARG (KRAS G12R)
RLVAVVARP

SEQ ID NO: 15194 - protein, 9 aa, synthetic construct
  source 1..9: note = Seed: KLVVVGARG (KRAS G12R)
RLVAVVARQ

SEQ ID NO: 15195 - protein, 9 aa, synthetic construct
  source 1..9: note = Seed: KLVVVGARG (KRAS G12R)
RLVAVVARR

SEQ ID NO: 15196 - protein, 9 aa, synthetic construct
  source 1..9: note = Seed: KLVVVGARG (KRAS G12R)
RLVAVVARS

SEQ ID NO: 15197 - protein, 9 aa, synthetic construct
  source 1..9: note = Seed: KLVVVGARG (KRAS G12R)
RLVAVVART

SEQ ID NO: 15198 - protein, 9 aa, synthetic construct
  source 1..9: note = Seed: KLVVVGARG (KRAS G12R)
RLVAVVARV

SEQ ID NO: 15199 - protein, 9 aa, synthetic construct
  source 1..9: note = Seed: KLVVVGARG (KRAS G12R)
RLVAVVARY

SEQ ID NO: 15200 - protein, 9 aa, synthetic construct
  source 1..9: note = Seed: KLVVVGARG (KRAS G12R)
RLVCVAARA

SEQ ID NO: 15201 - protein, 9 aa, synthetic construct
  source 1..9: note = Seed: KLVVVGARG (KRAS G12R)
RLVCVAARN

SEQ ID NO: 15202 - protein, 9 aa, synthetic construct
  source 1..9: note = Seed: KLVVVGARG (KRAS G12R)
RLVDVAARA

SEQ ID NO: 15203 - protein, 9 aa, synthetic construct
  source 1..9: note = Seed: KLVVVGARG (KRAS G12R)
RLVDVAARH

SEQ ID NO: 15204 - protein, 9 aa, synthetic construct
  source 1..9: note = Seed: KLVVVGARG (KRAS G12R)
RLVDVAARI

SEQ ID NO: 15205 - protein, 9 aa, synthetic construct
  source 1..9: note = Seed: KLVVVGARG (KRAS G12R)
RLVDVAARL

SEQ ID NO: 15206 - protein, 9 aa, synthetic construct
  source 1..9: note = Seed: KLVVVGARG (KRAS G12R)
RLVDVAARM

SEQ ID NO: 15207 - protein, 9 aa, synthetic construct
  source 1..9: note = Seed: KLVVVGARG (KRAS G12R)
RLVDVAARN

SEQ ID NO: 15208 - protein, 9 aa, synthetic construct
  source 1..9: note = Seed: KLVVVGARG (KRAS G12R)
RLVDVAARS

SEQ ID NO: 15209 - protein, 9 aa, synthetic construct
  source 1..9: note = Seed: KLVVVGARG (KRAS G12R)
RLVDVAART

SEQ ID NO: 15210 - protein, 9 aa, synthetic construct
  source 1..9: note = Seed: KLVVVGARG (KRAS G12R)
RLVDVAARV

SEQ ID NO: 15211 - protein, 9 aa, synthetic construct
  source 1..9: note = Seed: KLVVVGARG (KRAS G12R)
RLVDVIARA

SEQ ID NO: 15212 - protein, 9 aa, synthetic construct
  source 1..9: note = Seed: KLVVVGARG (KRAS G12R)
RLVDVIARN

SEQ ID NO: 15213 - protein, 9 aa, synthetic construct
  source 1..9: note = Seed: KLVVVGARG (KRAS G12R)
RLVDVPARA

SEQ ID NO: 15214 - protein, 9 aa, synthetic construct
  source 1..9: note = Seed: KLVVVGARG (KRAS G12R)
RLVDVPARS

SEQ ID NO: 15215 - protein, 9 aa, synthetic construct
  source 1..9: note = Seed: KLVVVGARG (KRAS G12R)
RLVDVPARV

SEQ ID NO: 15216 - protein, 9 aa, synthetic construct
  source 1..9: note = Seed: KLVVVGARG (KRAS G12R)
RLVDVVARA

SEQ ID NO: 15217 - protein, 9 aa, synthetic construct
  source 1..9: note = Seed: KLVVVGARG (KRAS G12R)
RLVDVVARN

SEQ ID NO: 15218 - protein, 9 aa, synthetic construct
  source 1..9: note = Seed: KLVVVGARG (KRAS G12R)
RLVDVVARS

SEQ ID NO: 15219 - protein, 9 aa, synthetic construct
  source 1..9: note = Seed: KLVVVGARG (KRAS G12R)
RLVEVAARA

SEQ ID NO: 15220 - protein, 9 aa, synthetic construct
  source 1..9: note = Seed: KLVVVGARG (KRAS G12R)
RLVEVAARD

SEQ ID NO: 15221 - protein, 9 aa, synthetic construct
  source 1..9: note = Seed: KLVVVGARG (KRAS G12R)
RLVEVAARE

SEQ ID NO: 15222 - protein, 9 aa, synthetic construct
  source 1..9: note = Seed: KLVVVGARG (KRAS G12R)
RLVEVAARF

SEQ ID NO: 15223 - protein, 9 aa, synthetic construct
  source 1..9: note = Seed: KLVVVGARG (KRAS G12R)
RLVEVAARG

SEQ ID NO: 15224 - protein, 9 aa, synthetic construct
  source 1..9: note = Seed: KLVVVGARG (KRAS G12R)
RLVEVAARH

SEQ ID NO: 15225 - protein, 9 aa, synthetic construct
  source 1..9: note = Seed: KLVVVGARG (KRAS G12R)
RLVEVAARI

SEQ ID NO: 15226 - protein, 9 aa, synthetic construct
  source 1..9: note = Seed: KLVVVGARG (KRAS G12R)
RLVEVAARL

SEQ ID NO: 15227 - protein, 9 aa, synthetic construct
  source 1..9: note = Seed: KLVVVGARG (KRAS G12R)
RLVEVAARM

SEQ ID NO: 15228 - protein, 9 aa, synthetic construct
  source 1..9: note = Seed: KLVVVGARG (KRAS G12R)
RLVEVAARN

SEQ ID NO: 15229 - protein, 9 aa, synthetic construct
  source 1..9: note = Seed: KLVVVGARG (KRAS G12R)
RLVEVAARP

SEQ ID NO: 15230 - protein, 9 aa, synthetic construct
  source 1..9: note = Seed: KLVVVGARG (KRAS G12R)
RLVEVAARQ

SEQ ID NO: 15231 - protein, 9 aa, synthetic construct
  source 1..9: note = Seed: KLVVVGARG (KRAS G12R)
RLVEVAARS

SEQ ID NO: 15232 - protein, 9 aa, synthetic construct
  source 1..9: note = Seed: KLVVVGARG (KRAS G12R)
RLVEVAART

SEQ ID NO: 15233 - protein, 9 aa, synthetic construct
  source 1..9: note = Seed: KLVVVGARG (KRAS G12R)
RLVEVAARV

SEQ ID NO: 15234 - protein, 9 aa, synthetic construct
  source 1..9: note = Seed: KLVVVGARG (KRAS G12R)
RLVEVFARH

SEQ ID NO: 15235 - protein, 9 aa, synthetic construct
  source 1..9: note = Seed: KLVVVGARG (KRAS G12R)
RLVEVIARA

SEQ ID NO: 15236 - protein, 9 aa, synthetic construct
  source 1..9: note = Seed: KLVVVGARG (KRAS G12R)
RLVEVIARH

SEQ ID NO: 15237 - protein, 9 aa, synthetic construct
  source 1..9: note = Seed: KLVVVGARG (KRAS G12R)
RLVEVIARI

SEQ ID NO: 15238 - protein, 9 aa, synthetic construct
  source 1..9: note = Seed: KLVVVGARG (KRAS G12R)
RLVEVIARL

SEQ ID NO: 15239 - protein, 9 aa, synthetic construct
  source 1..9: note = Seed: KLVVVGARG (KRAS G12R)
RLVEVIARM

SEQ ID NO: 15240 - protein, 9 aa, synthetic construct
  source 1..9: note = Seed: KLVVVGARG (KRAS G12R)
RLVEVIARN

SEQ ID NO: 15241 - protein, 9 aa, synthetic construct
  source 1..9: note = Seed: KLVVVGARG (KRAS G12R)
RLVEVIARS

SEQ ID NO: 15242 - protein, 9 aa, synthetic construct
  source 1..9: note = Seed: KLVVVGARG (KRAS G12R)
RLVEVIART

SEQ ID NO: 15243 - protein, 9 aa, synthetic construct
  source 1..9: note = Seed: KLVVVGARG (KRAS G12R)
RLVEVIARV

SEQ ID NO: 15244 - protein, 9 aa, synthetic construct
  source 1..9: note = Seed: KLVVVGARG (KRAS G12R)
RLVEVLARN

SEQ ID NO: 15245 - protein, 9 aa, synthetic construct
  source 1..9: note = Seed: KLVVVGARG (KRAS G12R)
RLVEVPARA

SEQ ID NO: 15246 - protein, 9 aa, synthetic construct
  source 1..9: note = Seed: KLVVVGARG (KRAS G12R)
RLVEVPARH

SEQ ID NO: 15247 - protein, 9 aa, synthetic construct
  source 1..9: note = Seed: KLVVVGARG (KRAS G12R)
RLVEVPARI

SEQ ID NO: 15248 - protein, 9 aa, synthetic construct
  source 1..9: note = Seed: KLVVVGARG (KRAS G12R)
RLVEVPARL

SEQ ID NO: 15249 - protein, 9 aa, synthetic construct
  source 1..9: note = Seed: KLVVVGARG (KRAS G12R)
RLVEVPARM

SEQ ID NO: 15250 - protein, 9 aa, synthetic construct
  source 1..9: note = Seed: KLVVVGARG (KRAS G12R)
RLVEVPARN

SEQ ID NO: 15251 - protein, 9 aa, synthetic construct
  source 1..9: note = Seed: KLVVVGARG (KRAS G12R)
RLVEVPARQ

SEQ ID NO: 15252 - protein, 9 aa, synthetic construct
  source 1..9: note = Seed: KLVVVGARG (KRAS G12R)
RLVEVPARS

SEQ ID NO: 15253 - protein, 9 aa, synthetic construct
  source 1..9: note = Seed: KLVVVGARG (KRAS G12R)
RLVEVPART

SEQ ID NO: 15254 - protein, 9 aa, synthetic construct
  source 1..9: note = Seed: KLVVVGARG (KRAS G12R)
RLVEVPARV

SEQ ID NO: 15255 - protein, 9 aa, synthetic construct
  source 1..9: note = Seed: KLVVVGARG (KRAS G12R)
RLVEVSARA

SEQ ID NO: 15256 - protein, 9 aa, synthetic construct
  source 1..9: note = Seed: KLVVVGARG (KRAS G12R)
RLVEVSARN

SEQ ID NO: 15257 - protein, 9 aa, synthetic construct
  source 1..9: note = Seed: KLVVVGARG (KRAS G12R)
RLVEVSARS

SEQ ID NO: 15258 - protein, 9 aa, synthetic construct
  source 1..9: note = Seed: KLVVVGARG (KRAS G12R)
RLVEVSART

SEQ ID NO: 15259 - protein, 9 aa, synthetic construct
  source 1..9: note = Seed: KLVVVGARG (KRAS G12R)
RLVEVSARV

SEQ ID NO: 15260 - protein, 9 aa, synthetic construct
  source 1..9: note = Seed: KLVVVGARG (KRAS G12R)
RLVEVTARA

SEQ ID NO: 15261 - protein, 9 aa, synthetic construct
  source 1..9: note = Seed: KLVVVGARG (KRAS G12R)
RLVEVTARN

SEQ ID NO: 15262 - protein, 9 aa, synthetic construct
  source 1..9: note = Seed: KLVVVGARG (KRAS G12R)
RLVEVTARS

SEQ ID NO: 15263 - protein, 9 aa, synthetic construct
  source 1..9: note = Seed: KLVVVGARG (KRAS G12R)
RLVEVVARA

SEQ ID NO: 15264 - protein, 9 aa, synthetic construct
  source 1..9: note = Seed: KLVVVGARG (KRAS G12R)
RLVEVVARH

SEQ ID NO: 15265 - protein, 9 aa, synthetic construct
  source 1..9: note = Seed: KLVVVGARG (KRAS G12R)
RLVEVVARI

SEQ ID NO: 15266 - protein, 9 aa, synthetic construct
  source 1..9: note = Seed: KLVVVGARG (KRAS G12R)
RLVEVVARL

SEQ ID NO: 15267 - protein, 9 aa, synthetic construct
  source 1..9: note = Seed: KLVVVGARG (KRAS G12R)
RLVEVVARM

SEQ ID NO: 15268 - protein, 9 aa, synthetic construct
  source 1..9: note = Seed: KLVVVGARG (KRAS G12R)
RLVEVVARN

SEQ ID NO: 15269 - protein, 9 aa, synthetic construct
  source 1..9: note = Seed: KLVVVGARG (KRAS G12R)
RLVEVVARS

SEQ ID NO: 15270 - protein, 9 aa, synthetic construct
  source 1..9: note = Seed: KLVVVGARG (KRAS G12R)
RLVEVVART

SEQ ID NO: 15271 - protein, 9 aa, synthetic construct
  source 1..9: note = Seed: KLVVVGARG (KRAS G12R)
RLVEVVARV

SEQ ID NO: 15272 - protein, 9 aa, synthetic construct
  source 1..9: note = Seed: KLVVVGARG (KRAS G12R)
RLVFVAARA

SEQ ID NO: 15273 - protein, 9 aa, synthetic construct
  source 1..9: note = Seed: KLVVVGARG (KRAS G12R)
RLVFVAARD

SEQ ID NO: 15274 - protein, 9 aa, synthetic construct
  source 1..9: note = Seed: KLVVVGARG (KRAS G12R)
RLVFVAARE

SEQ ID NO: 15275 - protein, 9 aa, synthetic construct
  source 1..9: note = Seed: KLVVVGARG (KRAS G12R)
RLVFVAARH

SEQ ID NO: 15276 - protein, 9 aa, synthetic construct
  source 1..9: note = Seed: KLVVVGARG (KRAS G12R)
RLVFVAARI

SEQ ID NO: 15277 - protein, 9 aa, synthetic construct
  source 1..9: note = Seed: KLVVVGARG (KRAS G12R)
RLVFVAARL

SEQ ID NO: 15278 - protein, 9 aa, synthetic construct
  source 1..9: note = Seed: KLVVVGARG (KRAS G12R)
RLVFVAARM

SEQ ID NO: 15279 - protein, 9 aa, synthetic construct
  source 1..9: note = Seed: KLVVVGARG (KRAS G12R)
RLVFVAARN

SEQ ID NO: 15280 - protein, 9 aa, synthetic construct
  source 1..9: note = Seed: KLVVVGARG (KRAS G12R)
RLVFVAARP

SEQ ID NO: 15281 - protein, 9 aa, synthetic construct
  source 1..9: note = Seed: KLVVVGARG (KRAS G12R)
RLVFVAARS

SEQ ID NO: 15282 - protein, 9 aa, synthetic construct
  source 1..9: note = Seed: KLVVVGARG (KRAS G12R)
RLVFVAART

SEQ ID NO: 15283 - protein, 9 aa, synthetic construct
  source 1..9: note = Seed: KLVVVGARG (KRAS G12R)
RLVFVAARV

SEQ ID NO: 15284 - protein, 9 aa, synthetic construct
  source 1..9: note = Seed: KLVVVGARG (KRAS G12R)
RLVFVPARA

SEQ ID NO: 15285 - protein, 9 aa, synthetic construct
  source 1..9: note = Seed: KLVVVGARG (KRAS G12R)
RLVFVPARE

SEQ ID NO: 15286 - protein, 9 aa, synthetic construct
  source 1..9: note = Seed: KLVVVGARG (KRAS G12R)
RLVFVPARH

SEQ ID NO: 15287 - protein, 9 aa, synthetic construct
  source 1..9: note = Seed: KLVVVGARG (KRAS G12R)
RLVFVPARI

SEQ ID NO: 15288 - protein, 9 aa, synthetic construct
  source 1..9: note = Seed: KLVVVGARG (KRAS G12R)
RLVFVPARL

SEQ ID NO: 15289 - protein, 9 aa, synthetic construct
  source 1..9: note = Seed: KLVVVGARG (KRAS G12R)
RLVFVPARM

SEQ ID NO: 15290 - protein, 9 aa, synthetic construct
  source 1..9: note = Seed: KLVVVGARG (KRAS G12R)
RLVFVPARN

SEQ ID NO: 15291 - protein, 9 aa, synthetic construct
  source 1..9: note = Seed: KLVVVGARG (KRAS G12R)
RLVFVPARQ

SEQ ID NO: 15292 - protein, 9 aa, synthetic construct
  source 1..9: note = Seed: KLVVVGARG (KRAS G12R)
RLVFVPARS

SEQ ID NO: 15293 - protein, 9 aa, synthetic construct
  source 1..9: note = Seed: KLVVVGARG (KRAS G12R)
RLVFVPART

SEQ ID NO: 15294 - protein, 9 aa, synthetic construct
  source 1..9: note = Seed: KLVVVGARG (KRAS G12R)
RLVFVPARV

SEQ ID NO: 15295 - protein, 9 aa, synthetic construct
  source 1..9: note = Seed: KLVVVGARG (KRAS G12R)
RLVFVVARN

SEQ ID NO: 15296 - protein, 9 aa, synthetic construct
  source 1..9: note = Seed: KLVVVGARG (KRAS G12R)
RLVGVAARA

SEQ ID NO: 15297 - protein, 9 aa, synthetic construct
  source 1..9: note = Seed: KLVVVGARG (KRAS G12R)
RLVGVAARD

SEQ ID NO: 15298 - protein, 9 aa, synthetic construct
  source 1..9: note = Seed: KLVVVGARG (KRAS G12R)
RLVGVAARE

SEQ ID NO: 15299 - protein, 9 aa, synthetic construct
  source 1..9: note = Seed: KLVVVGARG (KRAS G12R)
RLVGVAARF

SEQ ID NO: 15300 - protein, 9 aa, synthetic construct
  source 1..9: note = Seed: KLVVVGARG (KRAS G12R)
RLVGVAARH

SEQ ID NO: 15301 - protein, 9 aa, synthetic construct
  source 1..9: note = Seed: KLVVVGARG (KRAS G12R)
RLVGVAARI

SEQ ID NO: 15302 - protein, 9 aa, synthetic construct
  source 1..9: note = Seed: KLVVVGARG (KRAS G12R)
RLVGVAARL

SEQ ID NO: 15303 - protein, 9 aa, synthetic construct
  source 1..9: note = Seed: KLVVVGARG (KRAS G12R)
RLVGVAARM

SEQ ID NO: 15304 - protein, 9 aa, synthetic construct
  source 1..9: note = Seed: KLVVVGARG (KRAS G12R)
RLVGVAARN

SEQ ID NO: 15305 - protein, 9 aa, synthetic construct
  source 1..9: note = Seed: KLVVVGARG (KRAS G12R)
RLVGVAARP

SEQ ID NO: 15306 - protein, 9 aa, synthetic construct
  source 1..9: note = Seed: KLVVVGARG (KRAS G12R)
RLVGVAARQ

SEQ ID NO: 15307 - protein, 9 aa, synthetic construct
  source 1..9: note = Seed: KLVVVGARG (KRAS G12R)
RLVGVAARS

SEQ ID NO: 15308 - protein, 9 aa, synthetic construct
  source 1..9: note = Seed: KLVVVGARG (KRAS G12R)
RLVGVAART

SEQ ID NO: 15309 - protein, 9 aa, synthetic construct
  source 1..9: note = Seed: KLVVVGARG (KRAS G12R)
RLVGVAARV

SEQ ID NO: 15310 - protein, 9 aa, synthetic construct
  source 1..9: note = Seed: KLVVVGARG (KRAS G12R)
RLVGVAARY

SEQ ID NO: 15311 - protein, 9 aa, synthetic construct
  source 1..9: note = Seed: KLVVVGARG (KRAS G12R)
RLVGVIARA

SEQ ID NO: 15312 - protein, 9 aa, synthetic construct
  source 1..9: note = Seed: KLVVVGARG (KRAS G12R)
RLVGVIARE

SEQ ID NO: 15313 - protein, 9 aa, synthetic construct
  source 1..9: note = Seed: KLVVVGARG (KRAS G12R)
RLVGVIARH

SEQ ID NO: 15314 - protein, 9 aa, synthetic construct
  source 1..9: note = Seed: KLVVVGARG (KRAS G12R)
RLVGVIARI

SEQ ID NO: 15315 - protein, 9 aa, synthetic construct
  source 1..9: note = Seed: KLVVVGARG (KRAS G12R)
RLVGVIARL

SEQ ID NO: 15316 - protein, 9 aa, synthetic construct
  source 1..9: note = Seed: KLVVVGARG (KRAS G12R)
RLVGVIARM

SEQ ID NO: 15317 - protein, 9 aa, synthetic construct
  source 1..9: note = Seed: KLVVVGARG (KRAS G12R)
RLVGVIARN

SEQ ID NO: 15318 - protein, 9 aa, synthetic construct
  source 1..9: note = Seed: KLVVVGARG (KRAS G12R)
RLVGVIARS

SEQ ID NO: 15319 - protein, 9 aa, synthetic construct
  source 1..9: note = Seed: KLVVVGARG (KRAS G12R)
RLVGVIART

SEQ ID NO: 15320 - protein, 9 aa, synthetic construct
  source 1..9: note = Seed: KLVVVGARG (KRAS G12R)
RLVGVIARV

SEQ ID NO: 15321 - protein, 9 aa, synthetic construct
  source 1..9: note = Seed: KLVVVGARG (KRAS G12R)
RLVGVLARA

SEQ ID NO: 15322 - protein, 9 aa, synthetic construct
  source 1..9: note = Seed: KLVVVGARG (KRAS G12R)
RLVGVLARH

SEQ ID NO: 15323 - protein, 9 aa, synthetic construct
  source 1..9: note = Seed: KLVVVGARG (KRAS G12R)
RLVGVLARM

SEQ ID NO: 15324 - protein, 9 aa, synthetic construct
  source 1..9: note = Seed: KLVVVGARG (KRAS G12R)
RLVGVLARN

SEQ ID NO: 15325 - protein, 9 aa, synthetic construct
  source 1..9: note = Seed: KLVVVGARG (KRAS G12R)
RLVGVLARS

SEQ ID NO: 15326 - protein, 9 aa, synthetic construct
  source 1..9: note = Seed: KLVVVGARG (KRAS G12R)
RLVGVPARA

SEQ ID NO: 15327 - protein, 9 aa, synthetic construct
  source 1..9: note = Seed: KLVVVGARG (KRAS G12R)
RLVGVPARE

SEQ ID NO: 15328 - protein, 9 aa, synthetic construct
  source 1..9: note = Seed: KLVVVGARG (KRAS G12R)
RLVGVPARF

SEQ ID NO: 15329 - protein, 9 aa, synthetic construct
  source 1..9: note = Seed: KLVVVGARG (KRAS G12R)
RLVGVPARH

SEQ ID NO: 15330 - protein, 9 aa, synthetic construct
  source 1..9: note = Seed: KLVVVGARG (KRAS G12R)
RLVGVPARI

SEQ ID NO: 15331 - protein, 9 aa, synthetic construct
  source 1..9: note = Seed: KLVVVGARG (KRAS G12R)
RLVGVPARL

SEQ ID NO: 15332 - protein, 9 aa, synthetic construct
  source 1..9: note = Seed: KLVVVGARG (KRAS G12R)
RLVGVPARM

SEQ ID NO: 15333 - protein, 9 aa, synthetic construct
  source 1..9: note = Seed: KLVVVGARG (KRAS G12R)
RLVGVPARN

SEQ ID NO: 15334 - protein, 9 aa, synthetic construct
  source 1..9: note = Seed: KLVVVGARG (KRAS G12R)
RLVGVPARQ

SEQ ID NO: 15335 - protein, 9 aa, synthetic construct
  source 1..9: note = Seed: KLVVVGARG (KRAS G12R)
RLVGVPARS

SEQ ID NO: 15336 - protein, 9 aa, synthetic construct
  source 1..9: note = Seed: KLVVVGARG (KRAS G12R)
RLVGVPART

SEQ ID NO: 15337 - protein, 9 aa, synthetic construct
  source 1..9: note = Seed: KLVVVGARG (KRAS G12R)
RLVGVPARV

SEQ ID NO: 15338 - protein, 9 aa, synthetic construct
  source 1..9: note = Seed: KLVVVGARG (KRAS G12R)
RLVGVSARA

SEQ ID NO: 15339 - protein, 9 aa, synthetic construct
  source 1..9: note = Seed: KLVVVGARG (KRAS G12R)
RLVGVSARN

SEQ ID NO: 15340 - protein, 9 aa, synthetic construct
  source 1..9: note = Seed: KLVVVGARG (KRAS G12R)
RLVGVSARS

SEQ ID NO: 15341 - protein, 9 aa, synthetic construct
  source 1..9: note = Seed: KLVVVGARG (KRAS G12R)
RLVGVTARN

SEQ ID NO: 15342 - protein, 9 aa, synthetic construct
  source 1..9: note = Seed: KLVVVGARG (KRAS G12R)
RLVGVVARA

SEQ ID NO: 15343 - protein, 9 aa, synthetic construct
  source 1..9: note = Seed: KLVVVGARG (KRAS G12R)
RLVGVVARE

SEQ ID NO: 15344 - protein, 9 aa, synthetic construct
  source 1..9: note = Seed: KLVVVGARG (KRAS G12R)
RLVGVVARH

SEQ ID NO: 15345 - protein, 9 aa, synthetic construct
  source 1..9: note = Seed: KLVVVGARG (KRAS G12R)
RLVGVVARI

SEQ ID NO: 15346 - protein, 9 aa, synthetic construct
  source 1..9: note = Seed: KLVVVGARG (KRAS G12R)
RLVGVVARL

SEQ ID NO: 15347 - protein, 9 aa, synthetic construct
  source 1..9: note = Seed: KLVVVGARG (KRAS G12R)
RLVGVVARM

SEQ ID NO: 15348 - protein, 9 aa, synthetic construct
  source 1..9: note = Seed: KLVVVGARG (KRAS G12R)
RLVGVVARN

SEQ ID NO: 15349 - protein, 9 aa, synthetic construct
  source 1..9: note = Seed: KLVVVGARG (KRAS G12R)
RLVGVVARS

SEQ ID NO: 15350 - protein, 9 aa, synthetic construct
  source 1..9: note = Seed: KLVVVGARG (KRAS G12R)
RLVGVVART

SEQ ID NO: 15351 - protein, 9 aa, synthetic construct
  source 1..9: note = Seed: KLVVVGARG (KRAS G12R)
RLVGVVARV

SEQ ID NO: 15352 - protein, 9 aa, synthetic construct
  source 1..9: note = Seed: KLVVVGARG (KRAS G12R)
RLVHVAARA

SEQ ID NO: 15353 - protein, 9 aa, synthetic construct
  source 1..9: note = Seed: KLVVVGARG (KRAS G12R)
RLVHVAARC

SEQ ID NO: 15354 - protein, 9 aa, synthetic construct
  source 1..9: note = Seed: KLVVVGARG (KRAS G12R)
RLVHVAARD

SEQ ID NO: 15355 - protein, 9 aa, synthetic construct
  source 1..9: note = Seed: KLVVVGARG (KRAS G12R)
RLVHVAARE

SEQ ID NO: 15356 - protein, 9 aa, synthetic construct
  source 1..9: note = Seed: KLVVVGARG (KRAS G12R)
RLVHVAARG

SEQ ID NO: 15357 - protein, 9 aa, synthetic construct
  source 1..9: note = Seed: KLVVVGARG (KRAS G12R)
RLVHVAARH

SEQ ID NO: 15358 - protein, 9 aa, synthetic construct
  source 1..9: note = Seed: KLVVVGARG (KRAS G12R)
RLVHVAARI

SEQ ID NO: 15359 - protein, 9 aa, synthetic construct
  source 1..9: note = Seed: KLVVVGARG (KRAS G12R)
RLVHVAARL

SEQ ID NO: 15360 - protein, 9 aa, synthetic construct
  source 1..9: note = Seed: KLVVVGARG (KRAS G12R)
RLVHVAARM

SEQ ID NO: 15361 - protein, 9 aa, synthetic construct
  source 1..9: note = Seed: KLVVVGARG (KRAS G12R)
RLVHVAARN

SEQ ID NO: 15362 - protein, 9 aa, synthetic construct
  source 1..9: note = Seed: KLVVVGARG (KRAS G12R)
RLVHVAARQ

SEQ ID NO: 15363 - protein, 9 aa, synthetic construct
  source 1..9: note = Seed: KLVVVGARG (KRAS G12R)
RLVHVAARS

SEQ ID NO: 15364 - protein, 9 aa, synthetic construct
  source 1..9: note = Seed: KLVVVGARG (KRAS G12R)
RLVHVAART

SEQ ID NO: 15365 - protein, 9 aa, synthetic construct
  source 1..9: note = Seed: KLVVVGARG (KRAS G12R)
RLVHVAARV

SEQ ID NO: 15366 - protein, 9 aa, synthetic construct
  source 1..9: note = Seed: KLVVVGARG (KRAS G12R)
RLVHVIARA

SEQ ID NO: 15367 - protein, 9 aa, synthetic construct
  source 1..9: note = Seed: KLVVVGARG (KRAS G12R)
RLVHVIARE

SEQ ID NO: 15368 - protein, 9 aa, synthetic construct
  source 1..9: note = Seed: KLVVVGARG (KRAS G12R)
RLVHVIARH

SEQ ID NO: 15369 - protein, 9 aa, synthetic construct
  source 1..9: note = Seed: KLVVVGARG (KRAS G12R)
RLVHVIARI

SEQ ID NO: 15370 - protein, 9 aa, synthetic construct
  source 1..9: note = Seed: KLVVVGARG (KRAS G12R)
RLVHVIARL

SEQ ID NO: 15371 - protein, 9 aa, synthetic construct
  source 1..9: note = Seed: KLVVVGARG (KRAS G12R)
RLVHVIARM

SEQ ID NO: 15372 - protein, 9 aa, synthetic construct
  source 1..9: note = Seed: KLVVVGARG (KRAS G12R)
RLVHVIARN

SEQ ID NO: 15373 - protein, 9 aa, synthetic construct
  source 1..9: note = Seed: KLVVVGARG (KRAS G12R)
RLVHVIARQ

SEQ ID NO: 15374 - protein, 9 aa, synthetic construct
  source 1..9: note = Seed: KLVVVGARG (KRAS G12R)
RLVHVIARS

SEQ ID NO: 15375 - protein, 9 aa, synthetic construct
  source 1..9: note = Seed: KLVVVGARG (KRAS G12R)
RLVHVIART

SEQ ID NO: 15376 - protein, 9 aa, synthetic construct
  source 1..9: note = Seed: KLVVVGARG (KRAS G12R)
RLVHVIARV

SEQ ID NO: 15377 - protein, 9 aa, synthetic construct
  source 1..9: note = Seed: KLVVVGARG (KRAS G12R)
RLVHVLARA

SEQ ID NO: 15378 - protein, 9 aa, synthetic construct
  source 1..9: note = Seed: KLVVVGARG (KRAS G12R)
RLVHVLARI

SEQ ID NO: 15379 - protein, 9 aa, synthetic construct
  source 1..9: note = Seed: KLVVVGARG (KRAS G12R)
RLVHVLARM

SEQ ID NO: 15380 - protein, 9 aa, synthetic construct
  source 1..9: note = Seed: KLVVVGARG (KRAS G12R)
RLVHVLARN

SEQ ID NO: 15381 - protein, 9 aa, synthetic construct
  source 1..9: note = Seed: KLVVVGARG (KRAS G12R)
RLVHVLARS

SEQ ID NO: 15382 - protein, 9 aa, synthetic construct
  source 1..9: note = Seed: KLVVVGARG (KRAS G12R)
RLVHVLARV

SEQ ID NO: 15383 - protein, 9 aa, synthetic construct
  source 1..9: note = Seed: KLVVVGARG (KRAS G12R)
RLVHVMARA

SEQ ID NO: 15384 - protein, 9 aa, synthetic construct
  source 1..9: note = Seed: KLVVVGARG (KRAS G12R)
RLVHVMARM

SEQ ID NO: 15385 - protein, 9 aa, synthetic construct
  source 1..9: note = Seed: KLVVVGARG (KRAS G12R)
RLVHVMARN

SEQ ID NO: 15386 - protein, 9 aa, synthetic construct
  source 1..9: note = Seed: KLVVVGARG (KRAS G12R)
RLVHVMARS

SEQ ID NO: 15387 - protein, 9 aa, synthetic construct
  source 1..9: note = Seed: KLVVVGARG (KRAS G12R)
RLVHVMARV

SEQ ID NO: 15388 - protein, 9 aa, synthetic construct
  source 1..9: note = Seed: KLVVVGARG (KRAS G12R)
RLVHVPARA

SEQ ID NO: 15389 - protein, 9 aa, synthetic construct
  source 1..9: note = Seed: KLVVVGARG (KRAS G12R)
RLVHVPARE

SEQ ID NO: 15390 - protein, 9 aa, synthetic construct
  source 1..9: note = Seed: KLVVVGARG (KRAS G12R)
RLVHVPARH

SEQ ID NO: 15391 - protein, 9 aa, synthetic construct
  source 1..9: note = Seed: KLVVVGARG (KRAS G12R)
RLVHVPARI

SEQ ID NO: 15392 - protein, 9 aa, synthetic construct
  source 1..9: note = Seed: KLVVVGARG (KRAS G12R)
RLVHVPARL

SEQ ID NO: 15393 - protein, 9 aa, synthetic construct
  source 1..9: note = Seed: KLVVVGARG (KRAS G12R)
RLVHVPARM

SEQ ID NO: 15394 - protein, 9 aa, synthetic construct
  source 1..9: note = Seed: KLVVVGARG (KRAS G12R)
RLVHVPARN

SEQ ID NO: 15395 - protein, 9 aa, synthetic construct
  source 1..9: note = Seed: KLVVVGARG (KRAS G12R)
RLVHVPARQ

SEQ ID NO: 15396 - protein, 9 aa, synthetic construct
  source 1..9: note = Seed: KLVVVGARG (KRAS G12R)
RLVHVPARS

SEQ ID NO: 15397 - protein, 9 aa, synthetic construct
  source 1..9: note = Seed: KLVVVGARG (KRAS G12R)
RLVHVPART

SEQ ID NO: 15398 - protein, 9 aa, synthetic construct
  source 1..9: note = Seed: KLVVVGARG (KRAS G12R)
RLVHVPARV

SEQ ID NO: 15399 - protein, 9 aa, synthetic construct
  source 1..9: note = Seed: KLVVVGARG (KRAS G12R)
RLVHVSARA

SEQ ID NO: 15400 - protein, 9 aa, synthetic construct
  source 1..9: note = Seed: KLVVVGARG (KRAS G12R)
RLVHVSARN

SEQ ID NO: 15401 - protein, 9 aa, synthetic construct
  source 1..9: note = Seed: KLVVVGARG (KRAS G12R)
RLVHVSARS

SEQ ID NO: 15402 - protein, 9 aa, synthetic construct
  source 1..9: note = Seed: KLVVVGARG (KRAS G12R)
RLVHVSART

SEQ ID NO: 15403 - protein, 9 aa, synthetic construct
  source 1..9: note = Seed: KLVVVGARG (KRAS G12R)
RLVHVTARA

SEQ ID NO: 15404 - protein, 9 aa, synthetic construct
  source 1..9: note = Seed: KLVVVGARG (KRAS G12R)
RLVHVTARI

SEQ ID NO: 15405 - protein, 9 aa, synthetic construct
  source 1..9: note = Seed: KLVVVGARG (KRAS G12R)
RLVHVTARL

SEQ ID NO: 15406 - protein, 9 aa, synthetic construct
  source 1..9: note = Seed: KLVVVGARG (KRAS G12R)
RLVHVTARM

SEQ ID NO: 15407 - protein, 9 aa, synthetic construct
  source 1..9: note = Seed: KLVVVGARG (KRAS G12R)
RLVHVTARN

SEQ ID NO: 15408 - protein, 9 aa, synthetic construct
  source 1..9: note = Seed: KLVVVGARG (KRAS G12R)
RLVHVTARS

SEQ ID NO: 15409 - protein, 9 aa, synthetic construct
  source 1..9: note = Seed: KLVVVGARG (KRAS G12R)
RLVHVTARV

SEQ ID NO: 15410 - protein, 9 aa, synthetic construct
  source 1..9: note = Seed: KLVVVGARG (KRAS G12R)
RLVHVVARA

SEQ ID NO: 15411 - protein, 9 aa, synthetic construct
  source 1..9: note = Seed: KLVVVGARG (KRAS G12R)
RLVHVVARE

SEQ ID NO: 15412 - protein, 9 aa, synthetic construct
  source 1..9: note = Seed: KLVVVGARG (KRAS G12R)
RLVHVVARH

SEQ ID NO: 15413 - protein, 9 aa, synthetic construct
  source 1..9: note = Seed: KLVVVGARG (KRAS G12R)
RLVHVVARI

SEQ ID NO: 15414 - protein, 9 aa, synthetic construct
  source 1..9: note = Seed: KLVVVGARG (KRAS G12R)
RLVHVVARL

SEQ ID NO: 15415 - protein, 9 aa, synthetic construct
  source 1..9: note = Seed: KLVVVGARG (KRAS G12R)
RLVHVVARM

SEQ ID NO: 15416 - protein, 9 aa, synthetic construct
  source 1..9: note = Seed: KLVVVGARG (KRAS G12R)
RLVHVVARN

SEQ ID NO: 15417 - protein, 9 aa, synthetic construct
  source 1..9: note = Seed: KLVVVGARG (KRAS G12R)
RLVHVVARQ

SEQ ID NO: 15418 - protein, 9 aa, synthetic construct
  source 1..9: note = Seed: KLVVVGARG (KRAS G12R)
RLVHVVARS

SEQ ID NO: 15419 - protein, 9 aa, synthetic construct
  source 1..9: note = Seed: KLVVVGARG (KRAS G12R)
RLVHVVART

SEQ ID NO: 15420 - protein, 9 aa, synthetic construct
  source 1..9: note = Seed: KLVVVGARG (KRAS G12R)
RLVHVVARV

SEQ ID NO: 15421 - protein, 9 aa, synthetic construct
  source 1..9: note = Seed: KLVVVGARG (KRAS G12R)
RLVIVAARA

SEQ ID NO: 15422 - protein, 9 aa, synthetic construct
  source 1..9: note = Seed: KLVVVGARG (KRAS G12R)
RLVIVAARD

SEQ ID NO: 15423 - protein, 9 aa, synthetic construct
  source 1..9: note = Seed: KLVVVGARG (KRAS G12R)
RLVIVAARE

SEQ ID NO: 15424 - protein, 9 aa, synthetic construct
  source 1..9: note = Seed: KLVVVGARG (KRAS G12R)
RLVIVAARF

SEQ ID NO: 15425 - protein, 9 aa, synthetic construct
  source 1..9: note = Seed: KLVVVGARG (KRAS G12R)
RLVIVAARG

SEQ ID NO: 15426 - protein, 9 aa, synthetic construct
  source 1..9: note = Seed: KLVVVGARG (KRAS G12R)
RLVIVAARH

SEQ ID NO: 15427 - protein, 9 aa, synthetic construct
  source 1..9: note = Seed: KLVVVGARG (KRAS G12R)
RLVIVAARI

SEQ ID NO: 15428 - protein, 9 aa, synthetic construct
  source 1..9: note = Seed: KLVVVGARG (KRAS G12R)
RLVIVAARK

SEQ ID NO: 15429 - protein, 9 aa, synthetic construct
  source 1..9: note = Seed: KLVVVGARG (KRAS G12R)
RLVIVAARL

SEQ ID NO: 15430 - protein, 9 aa, synthetic construct
  source 1..9: note = Seed: KLVVVGARG (KRAS G12R)
RLVIVAARM

SEQ ID NO: 15431 - protein, 9 aa, synthetic construct
  source 1..9: note = Seed: KLVVVGARG (KRAS G12R)
RLVIVAARN

SEQ ID NO: 15432 - protein, 9 aa, synthetic construct
  source 1..9: note = Seed: KLVVVGARG (KRAS G12R)
RLVIVAARP

SEQ ID NO: 15433 - protein, 9 aa, synthetic construct
  source 1..9: note = Seed: KLVVVGARG (KRAS G12R)
RLVIVAARQ

SEQ ID NO: 15434 - protein, 9 aa, synthetic construct
  source 1..9: note = Seed: KLVVVGARG (KRAS G12R)
RLVIVAARR

SEQ ID NO: 15435 - protein, 9 aa, synthetic construct
  source 1..9: note = Seed: KLVVVGARG (KRAS G12R)
RLVIVAARS

SEQ ID NO: 15436 - protein, 9 aa, synthetic construct
  source 1..9: note = Seed: KLVVVGARG (KRAS G12R)
RLVIVAART

SEQ ID NO: 15437 - protein, 9 aa, synthetic construct
  source 1..9: note = Seed: KLVVVGARG (KRAS G12R)
RLVIVAARV

SEQ ID NO: 15438 - protein, 9 aa, synthetic construct
  source 1..9: note = Seed: KLVVVGARG (KRAS G12R)
RLVIVAARY

SEQ ID NO: 15439 - protein, 9 aa, synthetic construct
  source 1..9: note = Seed: KLVVVGARG (KRAS G12R)
RLVIVGARA

SEQ ID NO: 15440 - protein, 9 aa, synthetic construct
  source 1..9: note = Seed: KLVVVGARG (KRAS G12R)
RLVIVGARH

SEQ ID NO: 15441 - protein, 9 aa, synthetic construct
  source 1..9: note = Seed: KLVVVGARG (KRAS G12R)
RLVIVGARN

SEQ ID NO: 15442 - protein, 9 aa, synthetic construct
  source 1..9: note = Seed: KLVVVGARG (KRAS G12R)
RLVIVGARS

SEQ ID NO: 15443 - protein, 9 aa, synthetic construct
  source 1..9: note = Seed: KLVVVGARG (KRAS G12R)
RLVIVIARA

SEQ ID NO: 15444 - protein, 9 aa, synthetic construct
  source 1..9: note = Seed: KLVVVGARG (KRAS G12R)
RLVIVIARE

SEQ ID NO: 15445 - protein, 9 aa, synthetic construct
  source 1..9: note = Seed: KLVVVGARG (KRAS G12R)
RLVIVIARH

SEQ ID NO: 15446 - protein, 9 aa, synthetic construct
  source 1..9: note = Seed: KLVVVGARG (KRAS G12R)
RLVIVIARN

SEQ ID NO: 15447 - protein, 9 aa, synthetic construct
  source 1..9: note = Seed: KLVVVGARG (KRAS G12R)
RLVIVIARS

SEQ ID NO: 15448 - protein, 9 aa, synthetic construct
  source 1..9: note = Seed: KLVVVGARG (KRAS G12R)
RLVIVLARN

SEQ ID NO: 15449 - protein, 9 aa, synthetic construct
  source 1..9: note = Seed: KLVVVGARG (KRAS G12R)
RLVIVMARN

SEQ ID NO: 15450 - protein, 9 aa, synthetic construct
  source 1..9: note = Seed: KLVVVGARG (KRAS G12R)
RLVIVPARA

SEQ ID NO: 15451 - protein, 9 aa, synthetic construct
  source 1..9: note = Seed: KLVVVGARG (KRAS G12R)
RLVIVPARC

SEQ ID NO: 15452 - protein, 9 aa, synthetic construct
  source 1..9: note = Seed: KLVVVGARG (KRAS G12R)
RLVIVPARD

SEQ ID NO: 15453 - protein, 9 aa, synthetic construct
  source 1..9: note = Seed: KLVVVGARG (KRAS G12R)
RLVIVPARE

SEQ ID NO: 15454 - protein, 9 aa, synthetic construct
  source 1..9: note = Seed: KLVVVGARG (KRAS G12R)
RLVIVPARF

SEQ ID NO: 15455 - protein, 9 aa, synthetic construct
  source 1..9: note = Seed: KLVVVGARG (KRAS G12R)
RLVIVPARG

SEQ ID NO: 15456 - protein, 9 aa, synthetic construct
  source 1..9: note = Seed: KLVVVGARG (KRAS G12R)
RLVIVPARH

SEQ ID NO: 15457 - protein, 9 aa, synthetic construct
  source 1..9: note = Seed: KLVVVGARG (KRAS G12R)
RLVIVPARI

SEQ ID NO: 15458 - protein, 9 aa, synthetic construct
  source 1..9: note = Seed: KLVVVGARG (KRAS G12R)
RLVIVPARK

SEQ ID NO: 15459 - protein, 9 aa, synthetic construct
  source 1..9: note = Seed: KLVVVGARG (KRAS G12R)
RLVIVPARL

SEQ ID NO: 15460 - protein, 9 aa, synthetic construct
  source 1..9: note = Seed: KLVVVGARG (KRAS G12R)
RLVIVPARM

SEQ ID NO: 15461 - protein, 9 aa, synthetic construct
  source 1..9: note = Seed: KLVVVGARG (KRAS G12R)
RLVIVPARN

SEQ ID NO: 15462 - protein, 9 aa, synthetic construct
  source 1..9: note = Seed: KLVVVGARG (KRAS G12R)
RLVIVPARP

SEQ ID NO: 15463 - protein, 9 aa, synthetic construct
  source 1..9: note = Seed: KLVVVGARG (KRAS G12R)
RLVIVPARQ

SEQ ID NO: 15464 - protein, 9 aa, synthetic construct
  source 1..9: note = Seed: KLVVVGARG (KRAS G12R)
RLVIVPARR

SEQ ID NO: 15465 - protein, 9 aa, synthetic construct
  source 1..9: note = Seed: KLVVVGARG (KRAS G12R)
RLVIVPARS

SEQ ID NO: 15466 - protein, 9 aa, synthetic construct
  source 1..9: note = Seed: KLVVVGARG (KRAS G12R)
RLVIVPART

SEQ ID NO: 15467 - protein, 9 aa, synthetic construct
  source 1..9: note = Seed: KLVVVGARG (KRAS G12R)
RLVIVPARV

SEQ ID NO: 15468 - protein, 9 aa, synthetic construct
  source 1..9: note = Seed: KLVVVGARG (KRAS G12R)
RLVIVPARY

SEQ ID NO: 15469 - protein, 9 aa, synthetic construct
  source 1..9: note = Seed: KLVVVGARG (KRAS G12R)
RLVIVSARA

SEQ ID NO: 15470 - protein, 9 aa, synthetic construct
  source 1..9: note = Seed: KLVVVGARG (KRAS G12R)
RLVIVSARD

SEQ ID NO: 15471 - protein, 9 aa, synthetic construct
  source 1..9: note = Seed: KLVVVGARG (KRAS G12R)
RLVIVSARE

SEQ ID NO: 15472 - protein, 9 aa, synthetic construct
  source 1..9: note = Seed: KLVVVGARG (KRAS G12R)
RLVIVSARH

SEQ ID NO: 15473 - protein, 9 aa, synthetic construct
  source 1..9: note = Seed: KLVVVGARG (KRAS G12R)
RLVIVSARL

SEQ ID NO: 15474 - protein, 9 aa, synthetic construct
  source 1..9: note = Seed: KLVVVGARG (KRAS G12R)
RLVIVSARM

SEQ ID NO: 15475 - protein, 9 aa, synthetic construct
  source 1..9: note = Seed: KLVVVGARG (KRAS G12R)
RLVIVSARN

SEQ ID NO: 15476 - protein, 9 aa, synthetic construct
  source 1..9: note = Seed: KLVVVGARG (KRAS G12R)
RLVIVSARS

SEQ ID NO: 15477 - protein, 9 aa, synthetic construct
  source 1..9: note = Seed: KLVVVGARG (KRAS G12R)
RLVIVSART

SEQ ID NO: 15478 - protein, 9 aa, synthetic construct
  source 1..9: note = Seed: KLVVVGARG (KRAS G12R)
RLVIVSARV

SEQ ID NO: 15479 - protein, 9 aa, synthetic construct
  source 1..9: note = Seed: KLVVVGARG (KRAS G12R)
RLVIVTARA

SEQ ID NO: 15480 - protein, 9 aa, synthetic construct
  source 1..9: note = Seed: KLVVVGARG (KRAS G12R)
RLVIVTARH

SEQ ID NO: 15481 - protein, 9 aa, synthetic construct
  source 1..9: note = Seed: KLVVVGARG (KRAS G12R)
RLVIVTARM

SEQ ID NO: 15482 - protein, 9 aa, synthetic construct
  source 1..9: note = Seed: KLVVVGARG (KRAS G12R)
RLVIVTARN

SEQ ID NO: 15483 - protein, 9 aa, synthetic construct
  source 1..9: note = Seed: KLVVVGARG (KRAS G12R)
RLVIVTARS

SEQ ID NO: 15484 - protein, 9 aa, synthetic construct
  source 1..9: note = Seed: KLVVVGARG (KRAS G12R)
RLVIVVARA

SEQ ID NO: 15485 - protein, 9 aa, synthetic construct
  source 1..9: note = Seed: KLVVVGARG (KRAS G12R)
RLVIVVARE

SEQ ID NO: 15486 - protein, 9 aa, synthetic construct
  source 1..9: note = Seed: KLVVVGARG (KRAS G12R)
RLVIVVARH

SEQ ID NO: 15487 - protein, 9 aa, synthetic construct
  source 1..9: note = Seed: KLVVVGARG (KRAS G12R)
RLVIVVARN

SEQ ID NO: 15488 - protein, 9 aa, synthetic construct
  source 1..9: note = Seed: KLVVVGARG (KRAS G12R)
RLVIVVARS

SEQ ID NO: 15489 - protein, 9 aa, synthetic construct
  source 1..9: note = Seed: KLVVVGARG (KRAS G12R)
RLVKVAARA

SEQ ID NO: 15490 - protein, 9 aa, synthetic construct
  source 1..9: note = Seed: KLVVVGARG (KRAS G12R)
RLVKVAARH

SEQ ID NO: 15491 - protein, 9 aa, synthetic construct
  source 1..9: note = Seed: KLVVVGARG (KRAS G12R)
RLVKVAARI

SEQ ID NO: 15492 - protein, 9 aa, synthetic construct
  source 1..9: note = Seed: KLVVVGARG (KRAS G12R)
RLVKVAARM

SEQ ID NO: 15493 - protein, 9 aa, synthetic construct
  source 1..9: note = Seed: KLVVVGARG (KRAS G12R)
RLVKVAARN

SEQ ID NO: 15494 - protein, 9 aa, synthetic construct
  source 1..9: note = Seed: KLVVVGARG (KRAS G12R)
RLVKVAARQ

SEQ ID NO: 15495 - protein, 9 aa, synthetic construct
  source 1..9: note = Seed: KLVVVGARG (KRAS G12R)
RLVKVAARS

SEQ ID NO: 15496 - protein, 9 aa, synthetic construct
  source 1..9: note = Seed: KLVVVGARG (KRAS G12R)
RLVKVAART

SEQ ID NO: 15497 - protein, 9 aa, synthetic construct
  source 1..9: note = Seed: KLVVVGARG (KRAS G12R)
RLVKVAARV

SEQ ID NO: 15498 - protein, 9 aa, synthetic construct
  source 1..9: note = Seed: KLVVVGARG (KRAS G12R)
RLVLVAARA

SEQ ID NO: 15499 - protein, 9 aa, synthetic construct
  source 1..9: note = Seed: KLVVVGARG (KRAS G12R)
RLVLVAARD

SEQ ID NO: 15500 - protein, 9 aa, synthetic construct
  source 1..9: note = Seed: KLVVVGARG (KRAS G12R)
RLVLVAARE

SEQ ID NO: 15501 - protein, 9 aa, synthetic construct
  source 1..9: note = Seed: KLVVVGARG (KRAS G12R)
RLVLVAARH

SEQ ID NO: 15502 - protein, 9 aa, synthetic construct
  source 1..9: note = Seed: KLVVVGARG (KRAS G12R)
RLVLVAARI

SEQ ID NO: 15503 - protein, 9 aa, synthetic construct
  source 1..9: note = Seed: KLVVVGARG (KRAS G12R)
RLVLVAARL

SEQ ID NO: 15504 - protein, 9 aa, synthetic construct
  source 1..9: note = Seed: KLVVVGARG (KRAS G12R)
RLVLVAARM

SEQ ID NO: 15505 - protein, 9 aa, synthetic construct
  source 1..9: note = Seed: KLVVVGARG (KRAS G12R)
RLVLVAARN

SEQ ID NO: 15506 - protein, 9 aa, synthetic construct
  source 1..9: note = Seed: KLVVVGARG (KRAS G12R)
RLVLVAARP

SEQ ID NO: 15507 - protein, 9 aa, synthetic construct
  source 1..9: note = Seed: KLVVVGARG (KRAS G12R)
RLVLVAARQ

SEQ ID NO: 15508 - protein, 9 aa, synthetic construct
  source 1..9: note = Seed: KLVVVGARG (KRAS G12R)
RLVLVAARS

SEQ ID NO: 15509 - protein, 9 aa, synthetic construct
  source 1..9: note = Seed: KLVVVGARG (KRAS G12R)
RLVLVAART

SEQ ID NO: 15510 - protein, 9 aa, synthetic construct
  source 1..9: note = Seed: KLVVVGARG (KRAS G12R)
RLVLVAARV

SEQ ID NO: 15511 - protein, 9 aa, synthetic construct
  source 1..9: note = Seed: KLVVVGARG (KRAS G12R)
RLVLVIARH

SEQ ID NO: 15512 - protein, 9 aa, synthetic construct
  source 1..9: note = Seed: KLVVVGARG (KRAS G12R)
RLVLVIARN

SEQ ID NO: 15513 - protein, 9 aa, synthetic construct
  source 1..9: note = Seed: KLVVVGARG (KRAS G12R)
RLVLVPARA

SEQ ID NO: 15514 - protein, 9 aa, synthetic construct
  source 1..9: note = Seed: KLVVVGARG (KRAS G12R)
RLVLVPARD

SEQ ID NO: 15515 - protein, 9 aa, synthetic construct
  source 1..9: note = Seed: KLVVVGARG (KRAS G12R)
RLVLVPARE

SEQ ID NO: 15516 - protein, 9 aa, synthetic construct
  source 1..9: note = Seed: KLVVVGARG (KRAS G12R)
RLVLVPARF

SEQ ID NO: 15517 - protein, 9 aa, synthetic construct
  source 1..9: note = Seed: KLVVVGARG (KRAS G12R)
RLVLVPARG

SEQ ID NO: 15518 - protein, 9 aa, synthetic construct
  source 1..9: note = Seed: KLVVVGARG (KRAS G12R)
RLVLVPARH

SEQ ID NO: 15519 - protein, 9 aa, synthetic construct
  source 1..9: note = Seed: KLVVVGARG (KRAS G12R)
RLVLVPARI

SEQ ID NO: 15520 - protein, 9 aa, synthetic construct
  source 1..9: note = Seed: KLVVVGARG (KRAS G12R)
RLVLVPARL

SEQ ID NO: 15521 - protein, 9 aa, synthetic construct
  source 1..9: note = Seed: KLVVVGARG (KRAS G12R)
RLVLVPARM

SEQ ID NO: 15522 - protein, 9 aa, synthetic construct
  source 1..9: note = Seed: KLVVVGARG (KRAS G12R)
RLVLVPARN

SEQ ID NO: 15523 - protein, 9 aa, synthetic construct
  source 1..9: note = Seed: KLVVVGARG (KRAS G12R)
RLVLVPARQ

SEQ ID NO: 15524 - protein, 9 aa, synthetic construct
  source 1..9: note = Seed: KLVVVGARG (KRAS G12R)
RLVLVPARS

SEQ ID NO: 15525 - protein, 9 aa, synthetic construct
  source 1..9: note = Seed: KLVVVGARG (KRAS G12R)
RLVLVPART

SEQ ID NO: 15526 - protein, 9 aa, synthetic construct
  source 1..9: note = Seed: KLVVVGARG (KRAS G12R)
RLVLVPARV

SEQ ID NO: 15527 - protein, 9 aa, synthetic construct
  source 1..9: note = Seed: KLVVVGARG (KRAS G12R)
RLVLVSARA

SEQ ID NO: 15528 - protein, 9 aa, synthetic construct
  source 1..9: note = Seed: KLVVVGARG (KRAS G12R)
RLVLVSARH

SEQ ID NO: 15529 - protein, 9 aa, synthetic construct
  source 1..9: note = Seed: KLVVVGARG (KRAS G12R)
RLVLVSARN

SEQ ID NO: 15530 - protein, 9 aa, synthetic construct
  source 1..9: note = Seed: KLVVVGARG (KRAS G12R)
RLVLVSARS

SEQ ID NO: 15531 - protein, 9 aa, synthetic construct
  source 1..9: note = Seed: KLVVVGARG (KRAS G12R)
RLVLVVARH

SEQ ID NO: 15532 - protein, 9 aa, synthetic construct
  source 1..9: note = Seed: KLVVVGARG (KRAS G12R)
RLVLVVARN

SEQ ID NO: 15533 - protein, 9 aa, synthetic construct
  source 1..9: note = Seed: KLVVVGARG (KRAS G12R)
RLVMVAARA

SEQ ID NO: 15534 - protein, 9 aa, synthetic construct
  source 1..9: note = Seed: KLVVVGARG (KRAS G12R)
RLVMVAARD

SEQ ID NO: 15535 - protein, 9 aa, synthetic construct
  source 1..9: note = Seed: KLVVVGARG (KRAS G12R)
RLVMVAARE

SEQ ID NO: 15536 - protein, 9 aa, synthetic construct
  source 1..9: note = Seed: KLVVVGARG (KRAS G12R)
RLVMVAARG

SEQ ID NO: 15537 - protein, 9 aa, synthetic construct
  source 1..9: note = Seed: KLVVVGARG (KRAS G12R)
RLVMVAARH

SEQ ID NO: 15538 - protein, 9 aa, synthetic construct
  source 1..9: note = Seed: KLVVVGARG (KRAS G12R)
RLVMVAARI

SEQ ID NO: 15539 - protein, 9 aa, synthetic construct
  source 1..9: note = Seed: KLVVVGARG (KRAS G12R)
RLVMVAARL

SEQ ID NO: 15540 - protein, 9 aa, synthetic construct
  source 1..9: note = Seed: KLVVVGARG (KRAS G12R)
RLVMVAARM

SEQ ID NO: 15541 - protein, 9 aa, synthetic construct
  source 1..9: note = Seed: KLVVVGARG (KRAS G12R)
RLVMVAARN

SEQ ID NO: 15542 - protein, 9 aa, synthetic construct
  source 1..9: note = Seed: KLVVVGARG (KRAS G12R)
RLVMVAARP

SEQ ID NO: 15543 - protein, 9 aa, synthetic construct
  source 1..9: note = Seed: KLVVVGARG (KRAS G12R)
RLVMVAARQ

SEQ ID NO: 15544 - protein, 9 aa, synthetic construct
  source 1..9: note = Seed: KLVVVGARG (KRAS G12R)
RLVMVAARS

SEQ ID NO: 15545 - protein, 9 aa, synthetic construct
  source 1..9: note = Seed: KLVVVGARG (KRAS G12R)
RLVMVAART

SEQ ID NO: 15546 - protein, 9 aa, synthetic construct
  source 1..9: note = Seed: KLVVVGARG (KRAS G12R)
RLVMVAARV

SEQ ID NO: 15547 - protein, 9 aa, synthetic construct
  source 1..9: note = Seed: KLVVVGARG (KRAS G12R)
RLVMVAARY

SEQ ID NO: 15548 - protein, 9 aa, synthetic construct
  source 1..9: note = Seed: KLVVVGARG (KRAS G12R)
RLVMVGARN

SEQ ID NO: 15549 - protein, 9 aa, synthetic construct
  source 1..9: note = Seed: KLVVVGARG (KRAS G12R)
RLVMVIARA

SEQ ID NO: 15550 - protein, 9 aa, synthetic construct
  source 1..9: note = Seed: KLVVVGARG (KRAS G12R)
RLVMVIARH

SEQ ID NO: 15551 - protein, 9 aa, synthetic construct
  source 1..9: note = Seed: KLVVVGARG (KRAS G12R)
RLVMVIARM

SEQ ID NO: 15552 - protein, 9 aa, synthetic construct
  source 1..9: note = Seed: KLVVVGARG (KRAS G12R)
RLVMVIARN

SEQ ID NO: 15553 - protein, 9 aa, synthetic construct
  source 1..9: note = Seed: KLVVVGARG (KRAS G12R)
RLVMVIARS

SEQ ID NO: 15554 - protein, 9 aa, synthetic construct
  source 1..9: note = Seed: KLVVVGARG (KRAS G12R)
RLVMVLARN

SEQ ID NO: 15555 - protein, 9 aa, synthetic construct
  source 1..9: note = Seed: KLVVVGARG (KRAS G12R)
RLVMVMARA

SEQ ID NO: 15556 - protein, 9 aa, synthetic construct
  source 1..9: note = Seed: KLVVVGARG (KRAS G12R)
RLVMVMARN

SEQ ID NO: 15557 - protein, 9 aa, synthetic construct
  source 1..9: note = Seed: KLVVVGARG (KRAS G12R)
RLVMVMARS

SEQ ID NO: 15558 - protein, 9 aa, synthetic construct
  source 1..9: note = Seed: KLVVVGARG (KRAS G12R)
RLVMVPARA

SEQ ID NO: 15559 - protein, 9 aa, synthetic construct
  source 1..9: note = Seed: KLVVVGARG (KRAS G12R)
RLVMVPARD

SEQ ID NO: 15560 - protein, 9 aa, synthetic construct
  source 1..9: note = Seed: KLVVVGARG (KRAS G12R)
RLVMVPARE

SEQ ID NO: 15561 - protein, 9 aa, synthetic construct
  source 1..9: note = Seed: KLVVVGARG (KRAS G12R)
RLVMVPARF

SEQ ID NO: 15562 - protein, 9 aa, synthetic construct
  source 1..9: note = Seed: KLVVVGARG (KRAS G12R)
RLVMVPARG

SEQ ID NO: 15563 - protein, 9 aa, synthetic construct
  source 1..9: note = Seed: KLVVVGARG (KRAS G12R)
RLVMVPARH

SEQ ID NO: 15564 - protein, 9 aa, synthetic construct
  source 1..9: note = Seed: KLVVVGARG (KRAS G12R)
RLVMVPARI

SEQ ID NO: 15565 - protein, 9 aa, synthetic construct
  source 1..9: note = Seed: KLVVVGARG (KRAS G12R)
RLVMVPARL

SEQ ID NO: 15566 - protein, 9 aa, synthetic construct
  source 1..9: note = Seed: KLVVVGARG (KRAS G12R)
RLVMVPARM

SEQ ID NO: 15567 - protein, 9 aa, synthetic construct
  source 1..9: note = Seed: KLVVVGARG (KRAS G12R)
RLVMVPARN

SEQ ID NO: 15568 - protein, 9 aa, synthetic construct
  source 1..9: note = Seed: KLVVVGARG (KRAS G12R)
RLVMVPARP

SEQ ID NO: 15569 - protein, 9 aa, synthetic construct
  source 1..9: note = Seed: KLVVVGARG (KRAS G12R)
RLVMVPARQ

SEQ ID NO: 15570 - protein, 9 aa, synthetic construct
  source 1..9: note = Seed: KLVVVGARG (KRAS G12R)
RLVMVPARS

SEQ ID NO: 15571 - protein, 9 aa, synthetic construct
  source 1..9: note = Seed: KLVVVGARG (KRAS G12R)
RLVMVPART

SEQ ID NO: 15572 - protein, 9 aa, synthetic construct
  source 1..9: note = Seed: KLVVVGARG (KRAS G12R)
RLVMVPARV

SEQ ID NO: 15573 - protein, 9 aa, synthetic construct
  source 1..9: note = Seed: KLVVVGARG (KRAS G12R)
RLVMVPARY

SEQ ID NO: 15574 - protein, 9 aa, synthetic construct
  source 1..9: note = Seed: KLVVVGARG (KRAS G12R)
RLVMVSARA

SEQ ID NO: 15575 - protein, 9 aa, synthetic construct
  source 1..9: note = Seed: KLVVVGARG (KRAS G12R)
RLVMVSARH

SEQ ID NO: 15576 - protein, 9 aa, synthetic construct
  source 1..9: note = Seed: KLVVVGARG (KRAS G12R)
RLVMVSARI

SEQ ID NO: 15577 - protein, 9 aa, synthetic construct
  source 1..9: note = Seed: KLVVVGARG (KRAS G12R)
RLVMVSARL

SEQ ID NO: 15578 - protein, 9 aa, synthetic construct
  source 1..9: note = Seed: KLVVVGARG (KRAS G12R)
RLVMVSARM

SEQ ID NO: 15579 - protein, 9 aa, synthetic construct
  source 1..9: note = Seed: KLVVVGARG (KRAS G12R)
RLVMVSARN

SEQ ID NO: 15580 - protein, 9 aa, synthetic construct
  source 1..9: note = Seed: KLVVVGARG (KRAS G12R)
RLVMVSARS

SEQ ID NO: 15581 - protein, 9 aa, synthetic construct
  source 1..9: note = Seed: KLVVVGARG (KRAS G12R)
RLVMVSARV

SEQ ID NO: 15582 - protein, 9 aa, synthetic construct
  source 1..9: note = Seed: KLVVVGARG (KRAS G12R)
RLVMVTARM

SEQ ID NO: 15583 - protein, 9 aa, synthetic construct
  source 1..9: note = Seed: KLVVVGARG (KRAS G12R)
RLVMVTARN

SEQ ID NO: 15584 - protein, 9 aa, synthetic construct
  source 1..9: note = Seed: KLVVVGARG (KRAS G12R)
RLVMVVARA

SEQ ID NO: 15585 - protein, 9 aa, synthetic construct
  source 1..9: note = Seed: KLVVVGARG (KRAS G12R)
RLVMVVARH

SEQ ID NO: 15586 - protein, 9 aa, synthetic construct
  source 1..9: note = Seed: KLVVVGARG (KRAS G12R)
RLVMVVARM

SEQ ID NO: 15587 - protein, 9 aa, synthetic construct
  source 1..9: note = Seed: KLVVVGARG (KRAS G12R)
RLVMVVARN

SEQ ID NO: 15588 - protein, 9 aa, synthetic construct
  source 1..9: note = Seed: KLVVVGARG (KRAS G12R)
RLVMVVARS

SEQ ID NO: 15589 - protein, 9 aa, synthetic construct
  source 1..9: note = Seed: KLVVVGARG (KRAS G12R)
RLVNVAARA

SEQ ID NO: 15590 - protein, 9 aa, synthetic construct
  source 1..9: note = Seed: KLVVVGARG (KRAS G12R)
RLVNVAARD

SEQ ID NO: 15591 - protein, 9 aa, synthetic construct
  source 1..9: note = Seed: KLVVVGARG (KRAS G12R)
RLVNVAARE

SEQ ID NO: 15592 - protein, 9 aa, synthetic construct
  source 1..9: note = Seed: KLVVVGARG (KRAS G12R)
RLVNVAARH

SEQ ID NO: 15593 - protein, 9 aa, synthetic construct
  source 1..9: note = Seed: KLVVVGARG (KRAS G12R)
RLVNVAARI

SEQ ID NO: 15594 - protein, 9 aa, synthetic construct
  source 1..9: note = Seed: KLVVVGARG (KRAS G12R)
RLVNVAARL

SEQ ID NO: 15595 - protein, 9 aa, synthetic construct
  source 1..9: note = Seed: KLVVVGARG (KRAS G12R)
RLVNVAARM

SEQ ID NO: 15596 - protein, 9 aa, synthetic construct
  source 1..9: note = Seed: KLVVVGARG (KRAS G12R)
RLVNVAARN

SEQ ID NO: 15597 - protein, 9 aa, synthetic construct
  source 1..9: note = Seed: KLVVVGARG (KRAS G12R)
RLVNVAARQ

SEQ ID NO: 15598 - protein, 9 aa, synthetic construct
  source 1..9: note = Seed: KLVVVGARG (KRAS G12R)
RLVNVAARS

SEQ ID NO: 15599 - protein, 9 aa, synthetic construct
  source 1..9: note = Seed: KLVVVGARG (KRAS G12R)
RLVNVAART

SEQ ID NO: 15600 - protein, 9 aa, synthetic construct
  source 1..9: note = Seed: KLVVVGARG (KRAS G12R)
RLVNVAARV

SEQ ID NO: 15601 - protein, 9 aa, synthetic construct
  source 1..9: note = Seed: KLVVVGARG (KRAS G12R)
RLVNVIARA

SEQ ID NO: 15602 - protein, 9 aa, synthetic construct
  source 1..9: note = Seed: KLVVVGARG (KRAS G12R)
RLVNVIARH

SEQ ID NO: 15603 - protein, 9 aa, synthetic construct
  source 1..9: note = Seed: KLVVVGARG (KRAS G12R)
RLVNVIARM

SEQ ID NO: 15604 - protein, 9 aa, synthetic construct
  source 1..9: note = Seed: KLVVVGARG (KRAS G12R)
RLVNVIARN

SEQ ID NO: 15605 - protein, 9 aa, synthetic construct
  source 1..9: note = Seed: KLVVVGARG (KRAS G12R)
RLVNVIARS

SEQ ID NO: 15606 - protein, 9 aa, synthetic construct
  source 1..9: note = Seed: KLVVVGARG (KRAS G12R)
RLVNVIART

SEQ ID NO: 15607 - protein, 9 aa, synthetic construct
  source 1..9: note = Seed: KLVVVGARG (KRAS G12R)
RLVNVIARV

SEQ ID NO: 15608 - protein, 9 aa, synthetic construct
  source 1..9: note = Seed: KLVVVGARG (KRAS G12R)
RLVNVPARA

SEQ ID NO: 15609 - protein, 9 aa, synthetic construct
  source 1..9: note = Seed: KLVVVGARG (KRAS G12R)
RLVNVPARH

SEQ ID NO: 15610 - protein, 9 aa, synthetic construct
  source 1..9: note = Seed: KLVVVGARG (KRAS G12R)
RLVNVPARI

SEQ ID NO: 15611 - protein, 9 aa, synthetic construct
  source 1..9: note = Seed: KLVVVGARG (KRAS G12R)
RLVNVPARL

SEQ ID NO: 15612 - protein, 9 aa, synthetic construct
  source 1..9: note = Seed: KLVVVGARG (KRAS G12R)
RLVNVPARM

SEQ ID NO: 15613 - protein, 9 aa, synthetic construct
  source 1..9: note = Seed: KLVVVGARG (KRAS G12R)
RLVNVPARN

SEQ ID NO: 15614 - protein, 9 aa, synthetic construct
  source 1..9: note = Seed: KLVVVGARG (KRAS G12R)
RLVNVPARS

SEQ ID NO: 15615 - protein, 9 aa, synthetic construct
  source 1..9: note = Seed: KLVVVGARG (KRAS G12R)
RLVNVPART

SEQ ID NO: 15616 - protein, 9 aa, synthetic construct
  source 1..9: note = Seed: KLVVVGARG (KRAS G12R)
RLVNVPARV

SEQ ID NO: 15617 - protein, 9 aa, synthetic construct
  source 1..9: note = Seed: KLVVVGARG (KRAS G12R)
RLVNVVARA

SEQ ID NO: 15618 - protein, 9 aa, synthetic construct
  source 1..9: note = Seed: KLVVVGARG (KRAS G12R)
RLVNVVARH

SEQ ID NO: 15619 - protein, 9 aa, synthetic construct
  source 1..9: note = Seed: KLVVVGARG (KRAS G12R)
RLVNVVARI

SEQ ID NO: 15620 - protein, 9 aa, synthetic construct
  source 1..9: note = Seed: KLVVVGARG (KRAS G12R)
RLVNVVARL

SEQ ID NO: 15621 - protein, 9 aa, synthetic construct
  source 1..9: note = Seed: KLVVVGARG (KRAS G12R)
RLVNVVARM

SEQ ID NO: 15622 - protein, 9 aa, synthetic construct
  source 1..9: note = Seed: KLVVVGARG (KRAS G12R)
RLVNVVARN

SEQ ID NO: 15623 - protein, 9 aa, synthetic construct
  source 1..9: note = Seed: KLVVVGARG (KRAS G12R)
RLVNVVARS

SEQ ID NO: 15624 - protein, 9 aa, synthetic construct
  source 1..9: note = Seed: KLVVVGARG (KRAS G12R)
RLVNVVART

SEQ ID NO: 15625 - protein, 9 aa, synthetic construct
  source 1..9: note = Seed: KLVVVGARG (KRAS G12R)
RLVNVVARV

SEQ ID NO: 15626 - protein, 9 aa, synthetic construct
  source 1..9: note = Seed: KLVVVGARG (KRAS G12R)
RLVPVAARA

SEQ ID NO: 15627 - protein, 9 aa, synthetic construct
  source 1..9: note = Seed: KLVVVGARG (KRAS G12R)
RLVPVAARD

SEQ ID NO: 15628 - protein, 9 aa, synthetic construct
  source 1..9: note = Seed: KLVVVGARG (KRAS G12R)
RLVPVAARE

SEQ ID NO: 15629 - protein, 9 aa, synthetic construct
  source 1..9: note = Seed: KLVVVGARG (KRAS G12R)
RLVPVAARF

SEQ ID NO: 15630 - protein, 9 aa, synthetic construct
  source 1..9: note = Seed: KLVVVGARG (KRAS G12R)
RLVPVAARH

SEQ ID NO: 15631 - protein, 9 aa, synthetic construct
  source 1..9: note = Seed: KLVVVGARG (KRAS G12R)
RLVPVAARI

SEQ ID NO: 15632 - protein, 9 aa, synthetic construct
  source 1..9: note = Seed: KLVVVGARG (KRAS G12R)
RLVPVAARL

SEQ ID NO: 15633 - protein, 9 aa, synthetic construct
  source 1..9: note = Seed: KLVVVGARG (KRAS G12R)
RLVPVAARM

SEQ ID NO: 15634 - protein, 9 aa, synthetic construct
  source 1..9: note = Seed: KLVVVGARG (KRAS G12R)
RLVPVAARN

SEQ ID NO: 15635 - protein, 9 aa, synthetic construct
  source 1..9: note = Seed: KLVVVGARG (KRAS G12R)
RLVPVAARP

SEQ ID NO: 15636 - protein, 9 aa, synthetic construct
  source 1..9: note = Seed: KLVVVGARG (KRAS G12R)
RLVPVAARQ

SEQ ID NO: 15637 - protein, 9 aa, synthetic construct
  source 1..9: note = Seed: KLVVVGARG (KRAS G12R)
RLVPVAARS

SEQ ID NO: 15638 - protein, 9 aa, synthetic construct
  source 1..9: note = Seed: KLVVVGARG (KRAS G12R)
RLVPVAART

SEQ ID NO: 15639 - protein, 9 aa, synthetic construct
  source 1..9: note = Seed: KLVVVGARG (KRAS G12R)
RLVPVAARV

SEQ ID NO: 15640 - protein, 9 aa, synthetic construct
  source 1..9: note = Seed: KLVVVGARG (KRAS G12R)
RLVPVIARA

SEQ ID NO: 15641 - protein, 9 aa, synthetic construct
  source 1..9: note = Seed: KLVVVGARG (KRAS G12R)
RLVPVIARH

SEQ ID NO: 15642 - protein, 9 aa, synthetic construct
  source 1..9: note = Seed: KLVVVGARG (KRAS G12R)
RLVPVIARI

SEQ ID NO: 15643 - protein, 9 aa, synthetic construct
  source 1..9: note = Seed: KLVVVGARG (KRAS G12R)
RLVPVIARL

SEQ ID NO: 15644 - protein, 9 aa, synthetic construct
  source 1..9: note = Seed: KLVVVGARG (KRAS G12R)
RLVPVIARM

SEQ ID NO: 15645 - protein, 9 aa, synthetic construct
  source 1..9: note = Seed: KLVVVGARG (KRAS G12R)
RLVPVIARN

SEQ ID NO: 15646 - protein, 9 aa, synthetic construct
  source 1..9: note = Seed: KLVVVGARG (KRAS G12R)
RLVPVIARQ

SEQ ID NO: 15647 - protein, 9 aa, synthetic construct
  source 1..9: note = Seed: KLVVVGARG (KRAS G12R)
RLVPVIARS

SEQ ID NO: 15648 - protein, 9 aa, synthetic construct
  source 1..9: note = Seed: KLVVVGARG (KRAS G12R)
RLVPVIART

SEQ ID NO: 15649 - protein, 9 aa, synthetic construct
  source 1..9: note = Seed: KLVVVGARG (KRAS G12R)
RLVPVIARV

SEQ ID NO: 15650 - protein, 9 aa, synthetic construct
  source 1..9: note = Seed: KLVVVGARG (KRAS G12R)
RLVPVLARA

SEQ ID NO: 15651 - protein, 9 aa, synthetic construct
  source 1..9: note = Seed: KLVVVGARG (KRAS G12R)
RLVPVPARA

SEQ ID NO: 15652 - protein, 9 aa, synthetic construct
  source 1..9: note = Seed: KLVVVGARG (KRAS G12R)
RLVPVPARI

SEQ ID NO: 15653 - protein, 9 aa, synthetic construct
  source 1..9: note = Seed: KLVVVGARG (KRAS G12R)
RLVPVPARL

SEQ ID NO: 15654 - protein, 9 aa, synthetic construct
  source 1..9: note = Seed: KLVVVGARG (KRAS G12R)
RLVPVPARM

SEQ ID NO: 15655 - protein, 9 aa, synthetic construct
  source 1..9: note = Seed: KLVVVGARG (KRAS G12R)
RLVPVPARS

SEQ ID NO: 15656 - protein, 9 aa, synthetic construct
  source 1..9: note = Seed: KLVVVGARG (KRAS G12R)
RLVPVPARV

SEQ ID NO: 15657 - protein, 9 aa, synthetic construct
  source 1..9: note = Seed: KLVVVGARG (KRAS G12R)
RLVPVSARA

SEQ ID NO: 15658 - protein, 9 aa, synthetic construct
  source 1..9: note = Seed: KLVVVGARG (KRAS G12R)
RLVPVSARV

SEQ ID NO: 15659 - protein, 9 aa, synthetic construct
  source 1..9: note = Seed: KLVVVGARG (KRAS G12R)
RLVPVVARA

SEQ ID NO: 15660 - protein, 9 aa, synthetic construct
  source 1..9: note = Seed: KLVVVGARG (KRAS G12R)
RLVPVVARH

SEQ ID NO: 15661 - protein, 9 aa, synthetic construct
  source 1..9: note = Seed: KLVVVGARG (KRAS G12R)
RLVPVVARI

SEQ ID NO: 15662 - protein, 9 aa, synthetic construct
  source 1..9: note = Seed: KLVVVGARG (KRAS G12R)
RLVPVVARL

SEQ ID NO: 15663 - protein, 9 aa, synthetic construct
  source 1..9: note = Seed: KLVVVGARG (KRAS G12R)
RLVPVVARM

SEQ ID NO: 15664 - protein, 9 aa, synthetic construct
  source 1..9: note = Seed: KLVVVGARG (KRAS G12R)
RLVPVVARN

SEQ ID NO: 15665 - protein, 9 aa, synthetic construct
  source 1..9: note = Seed: KLVVVGARG (KRAS G12R)
RLVPVVARQ

SEQ ID NO: 15666 - protein, 9 aa, synthetic construct
  source 1..9: note = Seed: KLVVVGARG (KRAS G12R)
RLVPVVARS

SEQ ID NO: 15667 - protein, 9 aa, synthetic construct
  source 1..9: note = Seed: KLVVVGARG (KRAS G12R)
RLVPVVART

SEQ ID NO: 15668 - protein, 9 aa, synthetic construct
  source 1..9: note = Seed: KLVVVGARG (KRAS G12R)
RLVPVVARV

SEQ ID NO: 15669 - protein, 9 aa, synthetic construct
  source 1..9: note = Seed: KLVVVGARG (KRAS G12R)
RLVQVAARA

SEQ ID NO: 15670 - protein, 9 aa, synthetic construct
  source 1..9: note = Seed: KLVVVGARG (KRAS G12R)
RLVQVAARD

SEQ ID NO: 15671 - protein, 9 aa, synthetic construct
  source 1..9: note = Seed: KLVVVGARG (KRAS G12R)
RLVQVAARE

SEQ ID NO: 15672 - protein, 9 aa, synthetic construct
  source 1..9: note = Seed: KLVVVGARG (KRAS G12R)
RLVQVAARF

SEQ ID NO: 15673 - protein, 9 aa, synthetic construct
  source 1..9: note = Seed: KLVVVGARG (KRAS G12R)
RLVQVAARG

SEQ ID NO: 15674 - protein, 9 aa, synthetic construct
  source 1..9: note = Seed: KLVVVGARG (KRAS G12R)
RLVQVAARH

SEQ ID NO: 15675 - protein, 9 aa, synthetic construct
  source 1..9: note = Seed: KLVVVGARG (KRAS G12R)
RLVQVAARI

SEQ ID NO: 15676 - protein, 9 aa, synthetic construct
  source 1..9: note = Seed: KLVVVGARG (KRAS G12R)
RLVQVAARL

SEQ ID NO: 15677 - protein, 9 aa, synthetic construct
  source 1..9: note = Seed: KLVVVGARG (KRAS G12R)
RLVQVAARM

SEQ ID NO: 15678 - protein, 9 aa, synthetic construct
  source 1..9: note = Seed: KLVVVGARG (KRAS G12R)
RLVQVAARN

SEQ ID NO: 15679 - protein, 9 aa, synthetic construct
  source 1..9: note = Seed: KLVVVGARG (KRAS G12R)
RLVQVAARQ

SEQ ID NO: 15680 - protein, 9 aa, synthetic construct
  source 1..9: note = Seed: KLVVVGARG (KRAS G12R)
RLVQVAARS

SEQ ID NO: 15681 - protein, 9 aa, synthetic construct
  source 1..9: note = Seed: KLVVVGARG (KRAS G12R)
RLVQVAART

SEQ ID NO: 15682 - protein, 9 aa, synthetic construct
  source 1..9: note = Seed: KLVVVGARG (KRAS G12R)
RLVQVAARV

SEQ ID NO: 15683 - protein, 9 aa, synthetic construct
  source 1..9: note = Seed: KLVVVGARG (KRAS G12R)
RLVQVIARA

SEQ ID NO: 15684 - protein, 9 aa, synthetic construct
  source 1..9: note = Seed: KLVVVGARG (KRAS G12R)
RLVQVIARH

SEQ ID NO: 15685 - protein, 9 aa, synthetic construct
  source 1..9: note = Seed: KLVVVGARG (KRAS G12R)
RLVQVIARM

SEQ ID NO: 15686 - protein, 9 aa, synthetic construct
  source 1..9: note = Seed: KLVVVGARG (KRAS G12R)
RLVQVIARN

SEQ ID NO: 15687 - protein, 9 aa, synthetic construct
  source 1..9: note = Seed: KLVVVGARG (KRAS G12R)
RLVQVIARS

SEQ ID NO: 15688 - protein, 9 aa, synthetic construct
  source 1..9: note = Seed: KLVVVGARG (KRAS G12R)
RLVQVIARV

SEQ ID NO: 15689 - protein, 9 aa, synthetic construct
  source 1..9: note = Seed: KLVVVGARG (KRAS G12R)
RLVQVPARA

SEQ ID NO: 15690 - protein, 9 aa, synthetic construct
  source 1..9: note = Seed: KLVVVGARG (KRAS G12R)
RLVQVPARH

SEQ ID NO: 15691 - protein, 9 aa, synthetic construct
  source 1..9: note = Seed: KLVVVGARG (KRAS G12R)
RLVQVPARI

SEQ ID NO: 15692 - protein, 9 aa, synthetic construct
  source 1..9: note = Seed: KLVVVGARG (KRAS G12R)
RLVQVPARL

SEQ ID NO: 15693 - protein, 9 aa, synthetic construct
  source 1..9: note = Seed: KLVVVGARG (KRAS G12R)
RLVQVPARM

SEQ ID NO: 15694 - protein, 9 aa, synthetic construct
  source 1..9: note = Seed: KLVVVGARG (KRAS G12R)
RLVQVPARN

SEQ ID NO: 15695 - protein, 9 aa, synthetic construct
  source 1..9: note = Seed: KLVVVGARG (KRAS G12R)
RLVQVPARS

SEQ ID NO: 15696 - protein, 9 aa, synthetic construct
  source 1..9: note = Seed: KLVVVGARG (KRAS G12R)
RLVQVPART

SEQ ID NO: 15697 - protein, 9 aa, synthetic construct
  source 1..9: note = Seed: KLVVVGARG (KRAS G12R)
RLVQVPARV

SEQ ID NO: 15698 - protein, 9 aa, synthetic construct
  source 1..9: note = Seed: KLVVVGARG (KRAS G12R)
RLVQVSARA

SEQ ID NO: 15699 - protein, 9 aa, synthetic construct
  source 1..9: note = Seed: KLVVVGARG (KRAS G12R)
RLVQVSARN

SEQ ID NO: 15700 - protein, 9 aa, synthetic construct
  source 1..9: note = Seed: KLVVVGARG (KRAS G12R)
RLVQVSARS

SEQ ID NO: 15701 - protein, 9 aa, synthetic construct
  source 1..9: note = Seed: KLVVVGARG (KRAS G12R)
RLVQVTARN

SEQ ID NO: 15702 - protein, 9 aa, synthetic construct
  source 1..9: note = Seed: KLVVVGARG (KRAS G12R)
RLVQVVARA

SEQ ID NO: 15703 - protein, 9 aa, synthetic construct
  source 1..9: note = Seed: KLVVVGARG (KRAS G12R)
RLVQVVARH

SEQ ID NO: 15704 - protein, 9 aa, synthetic construct
  source 1..9: note = Seed: KLVVVGARG (KRAS G12R)
RLVQVVARI

SEQ ID NO: 15705 - protein, 9 aa, synthetic construct
  source 1..9: note = Seed: KLVVVGARG (KRAS G12R)
RLVQVVARL

SEQ ID NO: 15706 - protein, 9 aa, synthetic construct
  source 1..9: note = Seed: KLVVVGARG (KRAS G12R)
RLVQVVARM

SEQ ID NO: 15707 - protein, 9 aa, synthetic construct
  source 1..9: note = Seed: KLVVVGARG (KRAS G12R)
RLVQVVARN

SEQ ID NO: 15708 - protein, 9 aa, synthetic construct
  source 1..9: note = Seed: KLVVVGARG (KRAS G12R)
RLVQVVARS

SEQ ID NO: 15709 - protein, 9 aa, synthetic construct
  source 1..9: note = Seed: KLVVVGARG (KRAS G12R)
RLVQVVART

SEQ ID NO: 15710 - protein, 9 aa, synthetic construct
  source 1..9: note = Seed: KLVVVGARG (KRAS G12R)
RLVQVVARV

SEQ ID NO: 15711 - protein, 9 aa, synthetic construct
  source 1..9: note = Seed: KLVVVGARG (KRAS G12R)
RLVRVAARA

SEQ ID NO: 15712 - protein, 9 aa, synthetic construct
  source 1..9: note = Seed: KLVVVGARG (KRAS G12R)
RLVRVAARN

SEQ ID NO: 15713 - protein, 9 aa, synthetic construct
  source 1..9: note = Seed: KLVVVGARG (KRAS G12R)
RLVRVAARS

SEQ ID NO: 15714 - protein, 9 aa, synthetic construct
  source 1..9: note = Seed: KLVVVGARG (KRAS G12R)
RLVSVAARA

SEQ ID NO: 15715 - protein, 9 aa, synthetic construct
  source 1..9: note = Seed: KLVVVGARG (KRAS G12R)
RLVSVAARC

SEQ ID NO: 15716 - protein, 9 aa, synthetic construct
  source 1..9: note = Seed: KLVVVGARG (KRAS G12R)
RLVSVAARD

SEQ ID NO: 15717 - protein, 9 aa, synthetic construct
  source 1..9: note = Seed: KLVVVGARG (KRAS G12R)
RLVSVAARE

SEQ ID NO: 15718 - protein, 9 aa, synthetic construct
  source 1..9: note = Seed: KLVVVGARG (KRAS G12R)
RLVSVAARF

SEQ ID NO: 15719 - protein, 9 aa, synthetic construct
  source 1..9: note = Seed: KLVVVGARG (KRAS G12R)
RLVSVAARG

SEQ ID NO: 15720 - protein, 9 aa, synthetic construct
  source 1..9: note = Seed: KLVVVGARG (KRAS G12R)
RLVSVAARH

SEQ ID NO: 15721 - protein, 9 aa, synthetic construct
  source 1..9: note = Seed: KLVVVGARG (KRAS G12R)
RLVSVAARI

SEQ ID NO: 15722 - protein, 9 aa, synthetic construct
  source 1..9: note = Seed: KLVVVGARG (KRAS G12R)
RLVSVAARK

SEQ ID NO: 15723 - protein, 9 aa, synthetic construct
  source 1..9: note = Seed: KLVVVGARG (KRAS G12R)
RLVSVAARL

SEQ ID NO: 15724 - protein, 9 aa, synthetic construct
  source 1..9: note = Seed: KLVVVGARG (KRAS G12R)
RLVSVAARM

SEQ ID NO: 15725 - protein, 9 aa, synthetic construct
  source 1..9: note = Seed: KLVVVGARG (KRAS G12R)
RLVSVAARN

SEQ ID NO: 15726 - protein, 9 aa, synthetic construct
  source 1..9: note = Seed: KLVVVGARG (KRAS G12R)
RLVSVAARP

SEQ ID NO: 15727 - protein, 9 aa, synthetic construct
  source 1..9: note = Seed: KLVVVGARG (KRAS G12R)
RLVSVAARQ

SEQ ID NO: 15728 - protein, 9 aa, synthetic construct
  source 1..9: note = Seed: KLVVVGARG (KRAS G12R)
RLVSVAARR

SEQ ID NO: 15729 - protein, 9 aa, synthetic construct
  source 1..9: note = Seed: KLVVVGARG (KRAS G12R)
RLVSVAARS

SEQ ID NO: 15730 - protein, 9 aa, synthetic construct
  source 1..9: note = Seed: KLVVVGARG (KRAS G12R)
RLVSVAART

SEQ ID NO: 15731 - protein, 9 aa, synthetic construct
  source 1..9: note = Seed: KLVVVGARG (KRAS G12R)
RLVSVAARV

SEQ ID NO: 15732 - protein, 9 aa, synthetic construct
  source 1..9: note = Seed: KLVVVGARG (KRAS G12R)
RLVSVAARY

SEQ ID NO: 15733 - protein, 9 aa, synthetic construct
  source 1..9: note = Seed: KLVVVGARG (KRAS G12R)
RLVSVCARA

SEQ ID NO: 15734 - protein, 9 aa, synthetic construct
  source 1..9: note = Seed: KLVVVGARG (KRAS G12R)
RLVSVCARN

SEQ ID NO: 15735 - protein, 9 aa, synthetic construct
  source 1..9: note = Seed: KLVVVGARG (KRAS G12R)
RLVSVCARS

SEQ ID NO: 15736 - protein, 9 aa, synthetic construct
  source 1..9: note = Seed: KLVVVGARG (KRAS G12R)
RLVSVFARA

SEQ ID NO: 15737 - protein, 9 aa, synthetic construct
  source 1..9: note = Seed: KLVVVGARG (KRAS G12R)
RLVSVFARD

SEQ ID NO: 15738 - protein, 9 aa, synthetic construct
  source 1..9: note = Seed: KLVVVGARG (KRAS G12R)
RLVSVFARE

SEQ ID NO: 15739 - protein, 9 aa, synthetic construct
  source 1..9: note = Seed: KLVVVGARG (KRAS G12R)
RLVSVFARH

SEQ ID NO: 15740 - protein, 9 aa, synthetic construct
  source 1..9: note = Seed: KLVVVGARG (KRAS G12R)
RLVSVFARI

SEQ ID NO: 15741 - protein, 9 aa, synthetic construct
  source 1..9: note = Seed: KLVVVGARG (KRAS G12R)
RLVSVFARL

SEQ ID NO: 15742 - protein, 9 aa, synthetic construct
  source 1..9: note = Seed: KLVVVGARG (KRAS G12R)
RLVSVFARM

SEQ ID NO: 15743 - protein, 9 aa, synthetic construct
  source 1..9: note = Seed: KLVVVGARG (KRAS G12R)
RLVSVFARN

SEQ ID NO: 15744 - protein, 9 aa, synthetic construct
  source 1..9: note = Seed: KLVVVGARG (KRAS G12R)
RLVSVFARP

SEQ ID NO: 15745 - protein, 9 aa, synthetic construct
  source 1..9: note = Seed: KLVVVGARG (KRAS G12R)
RLVSVFARR

SEQ ID NO: 15746 - protein, 9 aa, synthetic construct
  source 1..9: note = Seed: KLVVVGARG (KRAS G12R)
RLVSVFARS

SEQ ID NO: 15747 - protein, 9 aa, synthetic construct
  source 1..9: note = Seed: KLVVVGARG (KRAS G12R)
RLVSVFARV

SEQ ID NO: 15748 - protein, 9 aa, synthetic construct
  source 1..9: note = Seed: KLVVVGARG (KRAS G12R)
RLVSVGARA

SEQ ID NO: 15749 - protein, 9 aa, synthetic construct
  source 1..9: note = Seed: KLVVVGARG (KRAS G12R)
RLVSVGARD

SEQ ID NO: 15750 - protein, 9 aa, synthetic construct
  source 1..9: note = Seed: KLVVVGARG (KRAS G12R)
RLVSVGARE

SEQ ID NO: 15751 - protein, 9 aa, synthetic construct
  source 1..9: note = Seed: KLVVVGARG (KRAS G12R)
RLVSVGARH

SEQ ID NO: 15752 - protein, 9 aa, synthetic construct
  source 1..9: note = Seed: KLVVVGARG (KRAS G12R)
RLVSVGARI

SEQ ID NO: 15753 - protein, 9 aa, synthetic construct
  source 1..9: note = Seed: KLVVVGARG (KRAS G12R)
RLVSVGARL

SEQ ID NO: 15754 - protein, 9 aa, synthetic construct
  source 1..9: note = Seed: KLVVVGARG (KRAS G12R)
RLVSVGARM

SEQ ID NO: 15755 - protein, 9 aa, synthetic construct
  source 1..9: note = Seed: KLVVVGARG (KRAS G12R)
RLVSVGARN

SEQ ID NO: 15756 - protein, 9 aa, synthetic construct
  source 1..9: note = Seed: KLVVVGARG (KRAS G12R)
RLVSVGARQ

SEQ ID NO: 15757 - protein, 9 aa, synthetic construct
  source 1..9: note = Seed: KLVVVGARG (KRAS G12R)
RLVSVGARS

SEQ ID NO: 15758 - protein, 9 aa, synthetic construct
  source 1..9: note = Seed: KLVVVGARG (KRAS G12R)
RLVSVGART

SEQ ID NO: 15759 - protein, 9 aa, synthetic construct
  source 1..9: note = Seed: KLVVVGARG (KRAS G12R)
RLVSVGARV

SEQ ID NO: 15760 - protein, 9 aa, synthetic construct
  source 1..9: note = Seed: KLVVVGARG (KRAS G12R)
RLVSVIARA

SEQ ID NO: 15761 - protein, 9 aa, synthetic construct
  source 1..9: note = Seed: KLVVVGARG (KRAS G12R)
RLVSVIARC

SEQ ID NO: 15762 - protein, 9 aa, synthetic construct
  source 1..9: note = Seed: KLVVVGARG (KRAS G12R)
RLVSVIARD

SEQ ID NO: 15763 - protein, 9 aa, synthetic construct
  source 1..9: note = Seed: KLVVVGARG (KRAS G12R)
RLVSVIARE

SEQ ID NO: 15764 - protein, 9 aa, synthetic construct
  source 1..9: note = Seed: KLVVVGARG (KRAS G12R)
RLVSVIARF

SEQ ID NO: 15765 - protein, 9 aa, synthetic construct
  source 1..9: note = Seed: KLVVVGARG (KRAS G12R)
RLVSVIARG

SEQ ID NO: 15766 - protein, 9 aa, synthetic construct
  source 1..9: note = Seed: KLVVVGARG (KRAS G12R)
RLVSVIARH

SEQ ID NO: 15767 - protein, 9 aa, synthetic construct
  source 1..9: note = Seed: KLVVVGARG (KRAS G12R)
RLVSVIARI

SEQ ID NO: 15768 - protein, 9 aa, synthetic construct
  source 1..9: note = Seed: KLVVVGARG (KRAS G12R)
RLVSVIARK

SEQ ID NO: 15769 - protein, 9 aa, synthetic construct
  source 1..9: note = Seed: KLVVVGARG (KRAS G12R)
RLVSVIARL

SEQ ID NO: 15770 - protein, 9 aa, synthetic construct
  source 1..9: note = Seed: KLVVVGARG (KRAS G12R)
RLVSVIARM

SEQ ID NO: 15771 - protein, 9 aa, synthetic construct
  source 1..9: note = Seed: KLVVVGARG (KRAS G12R)
RLVSVIARN

SEQ ID NO: 15772 - protein, 9 aa, synthetic construct
  source 1..9: note = Seed: KLVVVGARG (KRAS G12R)
RLVSVIARP

SEQ ID NO: 15773 - protein, 9 aa, synthetic construct
  source 1..9: note = Seed: KLVVVGARG (KRAS G12R)
RLVSVIARQ

SEQ ID NO: 15774 - protein, 9 aa, synthetic construct
  source 1..9: note = Seed: KLVVVGARG (KRAS G12R)
RLVSVIARR

SEQ ID NO: 15775 - protein, 9 aa, synthetic construct
  source 1..9: note = Seed: KLVVVGARG (KRAS G12R)
RLVSVIARS

SEQ ID NO: 15776 - protein, 9 aa, synthetic construct
  source 1..9: note = Seed: KLVVVGARG (KRAS G12R)
RLVSVIART

SEQ ID NO: 15777 - protein, 9 aa, synthetic construct
  source 1..9: note = Seed: KLVVVGARG (KRAS G12R)
RLVSVIARV

SEQ ID NO: 15778 - protein, 9 aa, synthetic construct
  source 1..9: note = Seed: KLVVVGARG (KRAS G12R)
RLVSVIARY

SEQ ID NO: 15779 - protein, 9 aa, synthetic construct
  source 1..9: note = Seed: KLVVVGARG (KRAS G12R)
RLVSVLARA

SEQ ID NO: 15780 - protein, 9 aa, synthetic construct
  source 1..9: note = Seed: KLVVVGARG (KRAS G12R)
RLVSVLARD

SEQ ID NO: 15781 - protein, 9 aa, synthetic construct
  source 1..9: note = Seed: KLVVVGARG (KRAS G12R)
RLVSVLARE

SEQ ID NO: 15782 - protein, 9 aa, synthetic construct
  source 1..9: note = Seed: KLVVVGARG (KRAS G12R)
RLVSVLARH

SEQ ID NO: 15783 - protein, 9 aa, synthetic construct
  source 1..9: note = Seed: KLVVVGARG (KRAS G12R)
RLVSVLARI

SEQ ID NO: 15784 - protein, 9 aa, synthetic construct
  source 1..9: note = Seed: KLVVVGARG (KRAS G12R)
RLVSVLARK

SEQ ID NO: 15785 - protein, 9 aa, synthetic construct
  source 1..9: note = Seed: KLVVVGARG (KRAS G12R)
RLVSVLARL

SEQ ID NO: 15786 - protein, 9 aa, synthetic construct
  source 1..9: note = Seed: KLVVVGARG (KRAS G12R)
RLVSVLARM

SEQ ID NO: 15787 - protein, 9 aa, synthetic construct
  source 1..9: note = Seed: KLVVVGARG (KRAS G12R)
RLVSVLARN

SEQ ID NO: 15788 - protein, 9 aa, synthetic construct
  source 1..9: note = Seed: KLVVVGARG (KRAS G12R)
RLVSVLARP

SEQ ID NO: 15789 - protein, 9 aa, synthetic construct
  source 1..9: note = Seed: KLVVVGARG (KRAS G12R)
RLVSVLARQ

SEQ ID NO: 15790 - protein, 9 aa, synthetic construct
  source 1..9: note = Seed: KLVVVGARG (KRAS G12R)
RLVSVLARR

SEQ ID NO: 15791 - protein, 9 aa, synthetic construct
  source 1..9: note = Seed: KLVVVGARG (KRAS G12R)
RLVSVLARS

SEQ ID NO: 15792 - protein, 9 aa, synthetic construct
  source 1..9: note = Seed: KLVVVGARG (KRAS G12R)
RLVSVLART

SEQ ID NO: 15793 - protein, 9 aa, synthetic construct
  source 1..9: note = Seed: KLVVVGARG (KRAS G12R)
RLVSVLARV

SEQ ID NO: 15794 - protein, 9 aa, synthetic construct
  source 1..9: note = Seed: KLVVVGARG (KRAS G12R)
RLVSVLARY

SEQ ID NO: 15795 - protein, 9 aa, synthetic construct
  source 1..9: note = Seed: KLVVVGARG (KRAS G12R)
RLVSVMARA

SEQ ID NO: 15796 - protein, 9 aa, synthetic construct
  source 1..9: note = Seed: KLVVVGARG (KRAS G12R)
RLVSVMARD

SEQ ID NO: 15797 - protein, 9 aa, synthetic construct
  source 1..9: note = Seed: KLVVVGARG (KRAS G12R)
RLVSVMARE

SEQ ID NO: 15798 - protein, 9 aa, synthetic construct
  source 1..9: note = Seed: KLVVVGARG (KRAS G12R)
RLVSVMARH

SEQ ID NO: 15799 - protein, 9 aa, synthetic construct
  source 1..9: note = Seed: KLVVVGARG (KRAS G12R)
RLVSVMARI

SEQ ID NO: 15800 - protein, 9 aa, synthetic construct
  source 1..9: note = Seed: KLVVVGARG (KRAS G12R)
RLVSVMARL

SEQ ID NO: 15801 - protein, 9 aa, synthetic construct
  source 1..9: note = Seed: KLVVVGARG (KRAS G12R)
RLVSVMARM

SEQ ID NO: 15802 - protein, 9 aa, synthetic construct
  source 1..9: note = Seed: KLVVVGARG (KRAS G12R)
RLVSVMARN

SEQ ID NO: 15803 - protein, 9 aa, synthetic construct
  source 1..9: note = Seed: KLVVVGARG (KRAS G12R)
RLVSVMARP

SEQ ID NO: 15804 - protein, 9 aa, synthetic construct
  source 1..9: note = Seed: KLVVVGARG (KRAS G12R)
RLVSVMARQ

SEQ ID NO: 15805 - protein, 9 aa, synthetic construct
  source 1..9: note = Seed: KLVVVGARG (KRAS G12R)
RLVSVMARS

SEQ ID NO: 15806 - protein, 9 aa, synthetic construct
  source 1..9: note = Seed: KLVVVGARG (KRAS G12R)
RLVSVMART

SEQ ID NO: 15807 - protein, 9 aa, synthetic construct
  source 1..9: note = Seed: KLVVVGARG (KRAS G12R)
RLVSVMARV

SEQ ID NO: 15808 - protein, 9 aa, synthetic construct
  source 1..9: note = Seed: KLVVVGARG (KRAS G12R)
RLVSVNARA

SEQ ID NO: 15809 - protein, 9 aa, synthetic construct
  source 1..9: note = Seed: KLVVVGARG (KRAS G12R)
RLVSVNARN

SEQ ID NO: 15810 - protein, 9 aa, synthetic construct
  source 1..9: note = Seed: KLVVVGARG (KRAS G12R)
RLVSVNARS

SEQ ID NO: 15811 - protein, 9 aa, synthetic construct
  source 1..9: note = Seed: KLVVVGARG (KRAS G12R)
RLVSVPARA

SEQ ID NO: 15812 - protein, 9 aa, synthetic construct
  source 1..9: note = Seed: KLVVVGARG (KRAS G12R)
RLVSVPARC

SEQ ID NO: 15813 - protein, 9 aa, synthetic construct
  source 1..9: note = Seed: KLVVVGARG (KRAS G12R)
RLVSVPARD

SEQ ID NO: 15814 - protein, 9 aa, synthetic construct
  source 1..9: note = Seed: KLVVVGARG (KRAS G12R)
RLVSVPARE

SEQ ID NO: 15815 - protein, 9 aa, synthetic construct
  source 1..9: note = Seed: KLVVVGARG (KRAS G12R)
RLVSVPARF

SEQ ID NO: 15816 - protein, 9 aa, synthetic construct
  source 1..9: note = Seed: KLVVVGARG (KRAS G12R)
RLVSVPARG

SEQ ID NO: 15817 - protein, 9 aa, synthetic construct
  source 1..9: note = Seed: KLVVVGARG (KRAS G12R)
RLVSVPARH

SEQ ID NO: 15818 - protein, 9 aa, synthetic construct
  source 1..9: note = Seed: KLVVVGARG (KRAS G12R)
RLVSVPARI

SEQ ID NO: 15819 - protein, 9 aa, synthetic construct
  source 1..9: note = Seed: KLVVVGARG (KRAS G12R)
RLVSVPARL

SEQ ID NO: 15820 - protein, 9 aa, synthetic construct
  source 1..9: note = Seed: KLVVVGARG (KRAS G12R)
RLVSVPARM

SEQ ID NO: 15821 - protein, 9 aa, synthetic construct
  source 1..9: note = Seed: KLVVVGARG (KRAS G12R)
RLVSVPARN

SEQ ID NO: 15822 - protein, 9 aa, synthetic construct
  source 1..9: note = Seed: KLVVVGARG (KRAS G12R)
RLVSVPARP

SEQ ID NO: 15823 - protein, 9 aa, synthetic construct
  source 1..9: note = Seed: KLVVVGARG (KRAS G12R)
RLVSVPARQ

SEQ ID NO: 15824 - protein, 9 aa, synthetic construct
  source 1..9: note = Seed: KLVVVGARG (KRAS G12R)
RLVSVPARS

SEQ ID NO: 15825 - protein, 9 aa, synthetic construct
  source 1..9: note = Seed: KLVVVGARG (KRAS G12R)
RLVSVPART

SEQ ID NO: 15826 - protein, 9 aa, synthetic construct
  source 1..9: note = Seed: KLVVVGARG (KRAS G12R)
RLVSVPARV

SEQ ID NO: 15827 - protein, 9 aa, synthetic construct
  source 1..9: note = Seed: KLVVVGARG (KRAS G12R)
RLVSVPARY

SEQ ID NO: 15828 - protein, 9 aa, synthetic construct
  source 1..9: note = Seed: KLVVVGARG (KRAS G12R)
RLVSVSARA

SEQ ID NO: 15829 - protein, 9 aa, synthetic construct
  source 1..9: note = Seed: KLVVVGARG (KRAS G12R)
RLVSVSARD

SEQ ID NO: 15830 - protein, 9 aa, synthetic construct
  source 1..9: note = Seed: KLVVVGARG (KRAS G12R)
RLVSVSARE

SEQ ID NO: 15831 - protein, 9 aa, synthetic construct
  source 1..9: note = Seed: KLVVVGARG (KRAS G12R)
RLVSVSARG

SEQ ID NO: 15832 - protein, 9 aa, synthetic construct
  source 1..9: note = Seed: KLVVVGARG (KRAS G12R)
RLVSVSARH

SEQ ID NO: 15833 - protein, 9 aa, synthetic construct
  source 1..9: note = Seed: KLVVVGARG (KRAS G12R)
RLVSVSARI

SEQ ID NO: 15834 - protein, 9 aa, synthetic construct
  source 1..9: note = Seed: KLVVVGARG (KRAS G12R)
RLVSVSARL

SEQ ID NO: 15835 - protein, 9 aa, synthetic construct
  source 1..9: note = Seed: KLVVVGARG (KRAS G12R)
RLVSVSARM

SEQ ID NO: 15836 - protein, 9 aa, synthetic construct
  source 1..9: note = Seed: KLVVVGARG (KRAS G12R)
RLVSVSARN

SEQ ID NO: 15837 - protein, 9 aa, synthetic construct
  source 1..9: note = Seed: KLVVVGARG (KRAS G12R)
RLVSVSARQ

SEQ ID NO: 15838 - protein, 9 aa, synthetic construct
  source 1..9: note = Seed: KLVVVGARG (KRAS G12R)
RLVSVSARS

SEQ ID NO: 15839 - protein, 9 aa, synthetic construct
  source 1..9: note = Seed: KLVVVGARG (KRAS G12R)
RLVSVSART

SEQ ID NO: 15840 - protein, 9 aa, synthetic construct
  source 1..9: note = Seed: KLVVVGARG (KRAS G12R)
RLVSVSARV

SEQ ID NO: 15841 - protein, 9 aa, synthetic construct
  source 1..9: note = Seed: KLVVVGARG (KRAS G12R)
RLVSVTARA

SEQ ID NO: 15842 - protein, 9 aa, synthetic construct
  source 1..9: note = Seed: KLVVVGARG (KRAS G12R)
RLVSVTARD

SEQ ID NO: 15843 - protein, 9 aa, synthetic construct
  source 1..9: note = Seed: KLVVVGARG (KRAS G12R)
RLVSVTARE

SEQ ID NO: 15844 - protein, 9 aa, synthetic construct
  source 1..9: note = Seed: KLVVVGARG (KRAS G12R)
RLVSVTARH

SEQ ID NO: 15845 - protein, 9 aa, synthetic construct
  source 1..9: note = Seed: KLVVVGARG (KRAS G12R)
RLVSVTARI

SEQ ID NO: 15846 - protein, 9 aa, synthetic construct
  source 1..9: note = Seed: KLVVVGARG (KRAS G12R)
RLVSVTARL

SEQ ID NO: 15847 - protein, 9 aa, synthetic construct
  source 1..9: note = Seed: KLVVVGARG (KRAS G12R)
RLVSVTARM

SEQ ID NO: 15848 - protein, 9 aa, synthetic construct
  source 1..9: note = Seed: KLVVVGARG (KRAS G12R)
RLVSVTARN

SEQ ID NO: 15849 - protein, 9 aa, synthetic construct
  source 1..9: note = Seed: KLVVVGARG (KRAS G12R)
RLVSVTARP

SEQ ID NO: 15850 - protein, 9 aa, synthetic construct
  source 1..9: note = Seed: KLVVVGARG (KRAS G12R)
RLVSVTARQ

SEQ ID NO: 15851 - protein, 9 aa, synthetic construct
  source 1..9: note = Seed: KLVVVGARG (KRAS G12R)
RLVSVTARS

SEQ ID NO: 15852 - protein, 9 aa, synthetic construct
  source 1..9: note = Seed: KLVVVGARG (KRAS G12R)
RLVSVTART

SEQ ID NO: 15853 - protein, 9 aa, synthetic construct
  source 1..9: note = Seed: KLVVVGARG (KRAS G12R)
RLVSVTARV

SEQ ID NO: 15854 - protein, 9 aa, synthetic construct
  source 1..9: note = Seed: KLVVVGARG (KRAS G12R)
RLVSVVARA

SEQ ID NO: 15855 - protein, 9 aa, synthetic construct
  source 1..9: note = Seed: KLVVVGARG (KRAS G12R)
RLVSVVARC

SEQ ID NO: 15856 - protein, 9 aa, synthetic construct
  source 1..9: note = Seed: KLVVVGARG (KRAS G12R)
RLVSVVARD

SEQ ID NO: 15857 - protein, 9 aa, synthetic construct
  source 1..9: note = Seed: KLVVVGARG (KRAS G12R)
RLVSVVARE

SEQ ID NO: 15858 - protein, 9 aa, synthetic construct
  source 1..9: note = Seed: KLVVVGARG (KRAS G12R)
RLVSVVARF

SEQ ID NO: 15859 - protein, 9 aa, synthetic construct
  source 1..9: note = Seed: KLVVVGARG (KRAS G12R)
RLVSVVARG

SEQ ID NO: 15860 - protein, 9 aa, synthetic construct
  source 1..9: note = Seed: KLVVVGARG (KRAS G12R)
RLVSVVARH

SEQ ID NO: 15861 - protein, 9 aa, synthetic construct
  source 1..9: note = Seed: KLVVVGARG (KRAS G12R)
RLVSVVARI

SEQ ID NO: 15862 - protein, 9 aa, synthetic construct
  source 1..9: note = Seed: KLVVVGARG (KRAS G12R)
RLVSVVARK

SEQ ID NO: 15863 - protein, 9 aa, synthetic construct
  source 1..9: note = Seed: KLVVVGARG (KRAS G12R)
RLVSVVARL

SEQ ID NO: 15864 - protein, 9 aa, synthetic construct
  source 1..9: note = Seed: KLVVVGARG (KRAS G12R)
RLVSVVARM

SEQ ID NO: 15865 - protein, 9 aa, synthetic construct
  source 1..9: note = Seed: KLVVVGARG (KRAS G12R)
RLVSVVARN

SEQ ID NO: 15866 - protein, 9 aa, synthetic construct
  source 1..9: note = Seed: KLVVVGARG (KRAS G12R)
RLVSVVARP

SEQ ID NO: 15867 - protein, 9 aa, synthetic construct
  source 1..9: note = Seed: KLVVVGARG (KRAS G12R)
RLVSVVARQ

SEQ ID NO: 15868 - protein, 9 aa, synthetic construct
  source 1..9: note = Seed: KLVVVGARG (KRAS G12R)
RLVSVVARR

SEQ ID NO: 15869 - protein, 9 aa, synthetic construct
  source 1..9: note = Seed: KLVVVGARG (KRAS G12R)
RLVSVVARS

SEQ ID NO: 15870 - protein, 9 aa, synthetic construct
  source 1..9: note = Seed: KLVVVGARG (KRAS G12R)
RLVSVVART

SEQ ID NO: 15871 - protein, 9 aa, synthetic construct
  source 1..9: note = Seed: KLVVVGARG (KRAS G12R)
RLVSVVARV

SEQ ID NO: 15872 - protein, 9 aa, synthetic construct
  source 1..9: note = Seed: KLVVVGARG (KRAS G12R)
RLVSVVARY

SEQ ID NO: 15873 - protein, 9 aa, synthetic construct
  source 1..9: note = Seed: KLVVVGARG (KRAS G12R)
RLVTVAARA

SEQ ID NO: 15874 - protein, 9 aa, synthetic construct
  source 1..9: note = Seed: KLVVVGARG (KRAS G12R)
RLVTVAARC

SEQ ID NO: 15875 - protein, 9 aa, synthetic construct
  source 1..9: note = Seed: KLVVVGARG (KRAS G12R)
RLVTVAARD

SEQ ID NO: 15876 - protein, 9 aa, synthetic construct
  source 1..9: note = Seed: KLVVVGARG (KRAS G12R)
RLVTVAARE

SEQ ID NO: 15877 - protein, 9 aa, synthetic construct
  source 1..9: note = Seed: KLVVVGARG (KRAS G12R)
RLVTVAARF

SEQ ID NO: 15878 - protein, 9 aa, synthetic construct
  source 1..9: note = Seed: KLVVVGARG (KRAS G12R)
RLVTVAARG

SEQ ID NO: 15879 - protein, 9 aa, synthetic construct
  source 1..9: note = Seed: KLVVVGARG (KRAS G12R)
RLVTVAARH

SEQ ID NO: 15880 - protein, 9 aa, synthetic construct
  source 1..9: note = Seed: KLVVVGARG (KRAS G12R)
RLVTVAARI

SEQ ID NO: 15881 - protein, 9 aa, synthetic construct
  source 1..9: note = Seed: KLVVVGARG (KRAS G12R)
RLVTVAARK

SEQ ID NO: 15882 - protein, 9 aa, synthetic construct
  source 1..9: note = Seed: KLVVVGARG (KRAS G12R)
RLVTVAARL

SEQ ID NO: 15883 - protein, 9 aa, synthetic construct
  source 1..9: note = Seed: KLVVVGARG (KRAS G12R)
RLVTVAARM

SEQ ID NO: 15884 - protein, 9 aa, synthetic construct
  source 1..9: note = Seed: KLVVVGARG (KRAS G12R)
RLVTVAARN

SEQ ID NO: 15885 - protein, 9 aa, synthetic construct
  source 1..9: note = Seed: KLVVVGARG (KRAS G12R)
RLVTVAARP

SEQ ID NO: 15886 - protein, 9 aa, synthetic construct
  source 1..9: note = Seed: KLVVVGARG (KRAS G12R)
RLVTVAARQ

SEQ ID NO: 15887 - protein, 9 aa, synthetic construct
  source 1..9: note = Seed: KLVVVGARG (KRAS G12R)
RLVTVAARR

SEQ ID NO: 15888 - protein, 9 aa, synthetic construct
  source 1..9: note = Seed: KLVVVGARG (KRAS G12R)
RLVTVAARS

SEQ ID NO: 15889 - protein, 9 aa, synthetic construct
  source 1..9: note = Seed: KLVVVGARG (KRAS G12R)
RLVTVAART

SEQ ID NO: 15890 - protein, 9 aa, synthetic construct
  source 1..9: note = Seed: KLVVVGARG (KRAS G12R)
RLVTVAARV

SEQ ID NO: 15891 - protein, 9 aa, synthetic construct
  source 1..9: note = Seed: KLVVVGARG (KRAS G12R)
RLVTVAARY

SEQ ID NO: 15892 - protein, 9 aa, synthetic construct
  source 1..9: note = Seed: KLVVVGARG (KRAS G12R)
RLVTVFARE

SEQ ID NO: 15893 - protein, 9 aa, synthetic construct
  source 1..9: note = Seed: KLVVVGARG (KRAS G12R)
RLVTVFARH

SEQ ID NO: 15894 - protein, 9 aa, synthetic construct
  source 1..9: note = Seed: KLVVVGARG (KRAS G12R)
RLVTVFARN

SEQ ID NO: 15895 - protein, 9 aa, synthetic construct
  source 1..9: note = Seed: KLVVVGARG (KRAS G12R)
RLVTVFARR

SEQ ID NO: 15896 - protein, 9 aa, synthetic construct
  source 1..9: note = Seed: KLVVVGARG (KRAS G12R)
RLVTVGARA

SEQ ID NO: 15897 - protein, 9 aa, synthetic construct
  source 1..9: note = Seed: KLVVVGARG (KRAS G12R)
RLVTVGARE

SEQ ID NO: 15898 - protein, 9 aa, synthetic construct
  source 1..9: note = Seed: KLVVVGARG (KRAS G12R)
RLVTVGARH

SEQ ID NO: 15899 - protein, 9 aa, synthetic construct
  source 1..9: note = Seed: KLVVVGARG (KRAS G12R)
RLVTVGARI

SEQ ID NO: 15900 - protein, 9 aa, synthetic construct
  source 1..9: note = Seed: KLVVVGARG (KRAS G12R)
RLVTVGARL

SEQ ID NO: 15901 - protein, 9 aa, synthetic construct
  source 1..9: note = Seed: KLVVVGARG (KRAS G12R)
RLVTVGARM

SEQ ID NO: 15902 - protein, 9 aa, synthetic construct
  source 1..9: note = Seed: KLVVVGARG (KRAS G12R)
RLVTVGARN

SEQ ID NO: 15903 - protein, 9 aa, synthetic construct
  source 1..9: note = Seed: KLVVVGARG (KRAS G12R)
RLVTVGARS

SEQ ID NO: 15904 - protein, 9 aa, synthetic construct
  source 1..9: note = Seed: KLVVVGARG (KRAS G12R)
RLVTVGART

SEQ ID NO: 15905 - protein, 9 aa, synthetic construct
  source 1..9: note = Seed: KLVVVGARG (KRAS G12R)
RLVTVGARV

SEQ ID NO: 15906 - protein, 9 aa, synthetic construct
  source 1..9: note = Seed: KLVVVGARG (KRAS G12R)
RLVTVIARA

SEQ ID NO: 15907 - protein, 9 aa, synthetic construct
  source 1..9: note = Seed: KLVVVGARG (KRAS G12R)
RLVTVIARD

SEQ ID NO: 15908 - protein, 9 aa, synthetic construct
  source 1..9: note = Seed: KLVVVGARG (KRAS G12R)
RLVTVIARE

SEQ ID NO: 15909 - protein, 9 aa, synthetic construct
  source 1..9: note = Seed: KLVVVGARG (KRAS G12R)
RLVTVIARH

SEQ ID NO: 15910 - protein, 9 aa, synthetic construct
  source 1..9: note = Seed: KLVVVGARG (KRAS G12R)
RLVTVIARI

SEQ ID NO: 15911 - protein, 9 aa, synthetic construct
  source 1..9: note = Seed: KLVVVGARG (KRAS G12R)
RLVTVIARK

SEQ ID NO: 15912 - protein, 9 aa, synthetic construct
  source 1..9: note = Seed: KLVVVGARG (KRAS G12R)
RLVTVIARL

SEQ ID NO: 15913 - protein, 9 aa, synthetic construct
  source 1..9: note = Seed: KLVVVGARG (KRAS G12R)
RLVTVIARM

SEQ ID NO: 15914 - protein, 9 aa, synthetic construct
  source 1..9: note = Seed: KLVVVGARG (KRAS G12R)
RLVTVIARN

SEQ ID NO: 15915 - protein, 9 aa, synthetic construct
  source 1..9: note = Seed: KLVVVGARG (KRAS G12R)
RLVTVIARP

SEQ ID NO: 15916 - protein, 9 aa, synthetic construct
  source 1..9: note = Seed: KLVVVGARG (KRAS G12R)
RLVTVIARQ

SEQ ID NO: 15917 - protein, 9 aa, synthetic construct
  source 1..9: note = Seed: KLVVVGARG (KRAS G12R)
RLVTVIARS

SEQ ID NO: 15918 - protein, 9 aa, synthetic construct
  source 1..9: note = Seed: KLVVVGARG (KRAS G12R)
RLVTVIART

SEQ ID NO: 15919 - protein, 9 aa, synthetic construct
  source 1..9: note = Seed: KLVVVGARG (KRAS G12R)
RLVTVIARV

SEQ ID NO: 15920 - protein, 9 aa, synthetic construct
  source 1..9: note = Seed: KLVVVGARG (KRAS G12R)
RLVTVIARY

SEQ ID NO: 15921 - protein, 9 aa, synthetic construct
  source 1..9: note = Seed: KLVVVGARG (KRAS G12R)
RLVTVLARA

SEQ ID NO: 15922 - protein, 9 aa, synthetic construct
  source 1..9: note = Seed: KLVVVGARG (KRAS G12R)
RLVTVLARD

SEQ ID NO: 15923 - protein, 9 aa, synthetic construct
  source 1..9: note = Seed: KLVVVGARG (KRAS G12R)
RLVTVLARE

SEQ ID NO: 15924 - protein, 9 aa, synthetic construct
  source 1..9: note = Seed: KLVVVGARG (KRAS G12R)
RLVTVLARH

SEQ ID NO: 15925 - protein, 9 aa, synthetic construct
  source 1..9: note = Seed: KLVVVGARG (KRAS G12R)
RLVTVLARI

SEQ ID NO: 15926 - protein, 9 aa, synthetic construct
  source 1..9: note = Seed: KLVVVGARG (KRAS G12R)
RLVTVLARL

SEQ ID NO: 15927 - protein, 9 aa, synthetic construct
  source 1..9: note = Seed: KLVVVGARG (KRAS G12R)
RLVTVLARM

SEQ ID NO: 15928 - protein, 9 aa, synthetic construct
  source 1..9: note = Seed: KLVVVGARG (KRAS G12R)
RLVTVLARN

SEQ ID NO: 15929 - protein, 9 aa, synthetic construct
  source 1..9: note = Seed: KLVVVGARG (KRAS G12R)
RLVTVLARS

SEQ ID NO: 15930 - protein, 9 aa, synthetic construct
  source 1..9: note = Seed: KLVVVGARG (KRAS G12R)
RLVTVLART

SEQ ID NO: 15931 - protein, 9 aa, synthetic construct
  source 1..9: note = Seed: KLVVVGARG (KRAS G12R)
RLVTVLARV

SEQ ID NO: 15932 - protein, 9 aa, synthetic construct
  source 1..9: note = Seed: KLVVVGARG (KRAS G12R)
RLVTVMARA

SEQ ID NO: 15933 - protein, 9 aa, synthetic construct
  source 1..9: note = Seed: KLVVVGARG (KRAS G12R)
RLVTVMARH

SEQ ID NO: 15934 - protein, 9 aa, synthetic construct
  source 1..9: note = Seed: KLVVVGARG (KRAS G12R)
RLVTVMARL

SEQ ID NO: 15935 - protein, 9 aa, synthetic construct
  source 1..9: note = Seed: KLVVVGARG (KRAS G12R)
RLVTVMARM

SEQ ID NO: 15936 - protein, 9 aa, synthetic construct
  source 1..9: note = Seed: KLVVVGARG (KRAS G12R)
RLVTVMARN

SEQ ID NO: 15937 - protein, 9 aa, synthetic construct
  source 1..9: note = Seed: KLVVVGARG (KRAS G12R)
RLVTVMARS

SEQ ID NO: 15938 - protein, 9 aa, synthetic construct
  source 1..9: note = Seed: KLVVVGARG (KRAS G12R)
RLVTVMART

SEQ ID NO: 15939 - protein, 9 aa, synthetic construct
  source 1..9: note = Seed: KLVVVGARG (KRAS G12R)
RLVTVMARV

SEQ ID NO: 15940 - protein, 9 aa, synthetic construct
  source 1..9: note = Seed: KLVVVGARG (KRAS G12R)
RLVTVPARA

SEQ ID NO: 15941 - protein, 9 aa, synthetic construct
  source 1..9: note = Seed: KLVVVGARG (KRAS G12R)
RLVTVPARC

SEQ ID NO: 15942 - protein, 9 aa, synthetic construct
  source 1..9: note = Seed: KLVVVGARG (KRAS G12R)
RLVTVPARD

SEQ ID NO: 15943 - protein, 9 aa, synthetic construct
  source 1..9: note = Seed: KLVVVGARG (KRAS G12R)
RLVTVPARE

SEQ ID NO: 15944 - protein, 9 aa, synthetic construct
  source 1..9: note = Seed: KLVVVGARG (KRAS G12R)
RLVTVPARF

SEQ ID NO: 15945 - protein, 9 aa, synthetic construct
  source 1..9: note = Seed: KLVVVGARG (KRAS G12R)
RLVTVPARG

SEQ ID NO: 15946 - protein, 9 aa, synthetic construct
  source 1..9: note = Seed: KLVVVGARG (KRAS G12R)
RLVTVPARH

SEQ ID NO: 15947 - protein, 9 aa, synthetic construct
  source 1..9: note = Seed: KLVVVGARG (KRAS G12R)
RLVTVPARI

SEQ ID NO: 15948 - protein, 9 aa, synthetic construct
  source 1..9: note = Seed: KLVVVGARG (KRAS G12R)
RLVTVPARL

SEQ ID NO: 15949 - protein, 9 aa, synthetic construct
  source 1..9: note = Seed: KLVVVGARG (KRAS G12R)
RLVTVPARM

SEQ ID NO: 15950 - protein, 9 aa, synthetic construct
  source 1..9: note = Seed: KLVVVGARG (KRAS G12R)
RLVTVPARN

SEQ ID NO: 15951 - protein, 9 aa, synthetic construct
  source 1..9: note = Seed: KLVVVGARG (KRAS G12R)
RLVTVPARP

SEQ ID NO: 15952 - protein, 9 aa, synthetic construct
  source 1..9: note = Seed: KLVVVGARG (KRAS G12R)
RLVTVPARQ

SEQ ID NO: 15953 - protein, 9 aa, synthetic construct
  source 1..9: note = Seed: KLVVVGARG (KRAS G12R)
RLVTVPARS

SEQ ID NO: 15954 - protein, 9 aa, synthetic construct
  source 1..9: note = Seed: KLVVVGARG (KRAS G12R)
RLVTVPART

SEQ ID NO: 15955 - protein, 9 aa, synthetic construct
  source 1..9: note = Seed: KLVVVGARG (KRAS G12R)
RLVTVPARV

SEQ ID NO: 15956 - protein, 9 aa, synthetic construct
  source 1..9: note = Seed: KLVVVGARG (KRAS G12R)
RLVTVPARY

SEQ ID NO: 15957 - protein, 9 aa, synthetic construct
  source 1..9: note = Seed: KLVVVGARG (KRAS G12R)
RLVTVSARA

SEQ ID NO: 15958 - protein, 9 aa, synthetic construct
  source 1..9: note = Seed: KLVVVGARG (KRAS G12R)
RLVTVSARD

SEQ ID NO: 15959 - protein, 9 aa, synthetic construct
  source 1..9: note = Seed: KLVVVGARG (KRAS G12R)
RLVTVSARE

SEQ ID NO: 15960 - protein, 9 aa, synthetic construct
  source 1..9: note = Seed: KLVVVGARG (KRAS G12R)
RLVTVSARH

SEQ ID NO: 15961 - protein, 9 aa, synthetic construct
  source 1..9: note = Seed: KLVVVGARG (KRAS G12R)
RLVTVSARI

SEQ ID NO: 15962 - protein, 9 aa, synthetic construct
  source 1..9: note = Seed: KLVVVGARG (KRAS G12R)
RLVTVSARL

SEQ ID NO: 15963 - protein, 9 aa, synthetic construct
  source 1..9: note = Seed: KLVVVGARG (KRAS G12R)
RLVTVSARM

SEQ ID NO: 15964 - protein, 9 aa, synthetic construct
  source 1..9: note = Seed: KLVVVGARG (KRAS G12R)
RLVTVSARN

SEQ ID NO: 15965 - protein, 9 aa, synthetic construct
  source 1..9: note = Seed: KLVVVGARG (KRAS G12R)
RLVTVSARQ

SEQ ID NO: 15966 - protein, 9 aa, synthetic construct
  source 1..9: note = Seed: KLVVVGARG (KRAS G12R)
RLVTVSARS

SEQ ID NO: 15967 - protein, 9 aa, synthetic construct
  source 1..9: note = Seed: KLVVVGARG (KRAS G12R)
RLVTVSART

SEQ ID NO: 15968 - protein, 9 aa, synthetic construct
  source 1..9: note = Seed: KLVVVGARG (KRAS G12R)
RLVTVSARV

SEQ ID NO: 15969 - protein, 9 aa, synthetic construct
  source 1..9: note = Seed: KLVVVGARG (KRAS G12R)
RLVTVTARA

SEQ ID NO: 15970 - protein, 9 aa, synthetic construct
  source 1..9: note = Seed: KLVVVGARG (KRAS G12R)
RLVTVTARH

SEQ ID NO: 15971 - protein, 9 aa, synthetic construct
  source 1..9: note = Seed: KLVVVGARG (KRAS G12R)
RLVTVTARI

SEQ ID NO: 15972 - protein, 9 aa, synthetic construct
  source 1..9: note = Seed: KLVVVGARG (KRAS G12R)
RLVTVTARL

SEQ ID NO: 15973 - protein, 9 aa, synthetic construct
  source 1..9: note = Seed: KLVVVGARG (KRAS G12R)
RLVTVTARM

SEQ ID NO: 15974 - protein, 9 aa, synthetic construct
  source 1..9: note = Seed: KLVVVGARG (KRAS G12R)
RLVTVTARN

SEQ ID NO: 15975 - protein, 9 aa, synthetic construct
  source 1..9: note = Seed: KLVVVGARG (KRAS G12R)
RLVTVTARS

SEQ ID NO: 15976 - protein, 9 aa, synthetic construct
  source 1..9: note = Seed: KLVVVGARG (KRAS G12R)
RLVTVTART

SEQ ID NO: 15977 - protein, 9 aa, synthetic construct
  source 1..9: note = Seed: KLVVVGARG (KRAS G12R)
RLVTVTARV

SEQ ID NO: 15978 - protein, 9 aa, synthetic construct
  source 1..9: note = Seed: KLVVVGARG (KRAS G12R)
RLVTVVARA

SEQ ID NO: 15979 - protein, 9 aa, synthetic construct
  source 1..9: note = Seed: KLVVVGARG (KRAS G12R)
RLVTVVARD

SEQ ID NO: 15980 - protein, 9 aa, synthetic construct
  source 1..9: note = Seed: KLVVVGARG (KRAS G12R)
RLVTVVARE

SEQ ID NO: 15981 - protein, 9 aa, synthetic construct
  source 1..9: note = Seed: KLVVVGARG (KRAS G12R)
RLVTVVARF

SEQ ID NO: 15982 - protein, 9 aa, synthetic construct
  source 1..9: note = Seed: KLVVVGARG (KRAS G12R)
RLVTVVARG

SEQ ID NO: 15983 - protein, 9 aa, synthetic construct
  source 1..9: note = Seed: KLVVVGARG (KRAS G12R)
RLVTVVARH

SEQ ID NO: 15984 - protein, 9 aa, synthetic construct
  source 1..9: note = Seed: KLVVVGARG (KRAS G12R)
RLVTVVARI

SEQ ID NO: 15985 - protein, 9 aa, synthetic construct
  source 1..9: note = Seed: KLVVVGARG (KRAS G12R)
RLVTVVARL

SEQ ID NO: 15986 - protein, 9 aa, synthetic construct
  source 1..9: note = Seed: KLVVVGARG (KRAS G12R)
RLVTVVARM

SEQ ID NO: 15987 - protein, 9 aa, synthetic construct
  source 1..9: note = Seed: KLVVVGARG (KRAS G12R)
RLVTVVARN

SEQ ID NO: 15988 - protein, 9 aa, synthetic construct
  source 1..9: note = Seed: KLVVVGARG (KRAS G12R)
RLVTVVARP

SEQ ID NO: 15989 - protein, 9 aa, synthetic construct
  source 1..9: note = Seed: KLVVVGARG (KRAS G12R)
RLVTVVARQ

SEQ ID NO: 15990 - protein, 9 aa, synthetic construct
  source 1..9: note = Seed: KLVVVGARG (KRAS G12R)
RLVTVVARS

SEQ ID NO: 15991 - protein, 9 aa, synthetic construct
  source 1..9: note = Seed: KLVVVGARG (KRAS G12R)
RLVTVVART

SEQ ID NO: 15992 - protein, 9 aa, synthetic construct
  source 1..9: note = Seed: KLVVVGARG (KRAS G12R)
RLVTVVARV

SEQ ID NO: 15993 - protein, 9 aa, synthetic construct
  source 1..9: note = Seed: KLVVVGARG (KRAS G12R)
RLVTVVARY

SEQ ID NO: 15994 - protein, 9 aa, synthetic construct
  source 1..9: note = Seed: KLVVVGARG (KRAS G12R)
RLVVVAARA

SEQ ID NO: 15995 - protein, 9 aa, synthetic construct
  source 1..9: note = Seed: KLVVVGARG (KRAS G12R)
RLVVVAARD

SEQ ID NO: 15996 - protein, 9 aa, synthetic construct
  source 1..9: note = Seed: KLVVVGARG (KRAS G12R)
RLVVVAARE

SEQ ID NO: 15997 - protein, 9 aa, synthetic construct
  source 1..9: note = Seed: KLVVVGARG (KRAS G12R)
RLVVVAARF

SEQ ID NO: 15998 - protein, 9 aa, synthetic construct
  source 1..9: note = Seed: KLVVVGARG (KRAS G12R)
RLVVVAARG

SEQ ID NO: 15999 - protein, 9 aa, synthetic construct
  source 1..9: note = Seed: KLVVVGARG (KRAS G12R)
RLVVVAARH

SEQ ID NO: 16000 - protein, 9 aa, synthetic construct
  source 1..9: note = Seed: KLVVVGARG (KRAS G12R)
RLVVVAARI

SEQ ID NO: 16001 - protein, 9 aa, synthetic construct
  source 1..9: note = Seed: KLVVVGARG (KRAS G12R)
RLVVVAARK

SEQ ID NO: 16002 - protein, 9 aa, synthetic construct
  source 1..9: note = Seed: KLVVVGARG (KRAS G12R)
RLVVVAARL

SEQ ID NO: 16003 - protein, 9 aa, synthetic construct
  source 1..9: note = Seed: KLVVVGARG (KRAS G12R)
RLVVVAARM

SEQ ID NO: 16004 - protein, 9 aa, synthetic construct
  source 1..9: note = Seed: KLVVVGARG (KRAS G12R)
RLVVVAARN

SEQ ID NO: 16005 - protein, 9 aa, synthetic construct
  source 1..9: note = Seed: KLVVVGARG (KRAS G12R)
RLVVVAARP

SEQ ID NO: 16006 - protein, 9 aa, synthetic construct
  source 1..9: note = Seed: KLVVVGARG (KRAS G12R)
RLVVVAARQ

SEQ ID NO: 16007 - protein, 9 aa, synthetic construct
  source 1..9: note = Seed: KLVVVGARG (KRAS G12R)
RLVVVAARS

SEQ ID NO: 16008 - protein, 9 aa, synthetic construct
  source 1..9: note = Seed: KLVVVGARG (KRAS G12R)
RLVVVAART

SEQ ID NO: 16009 - protein, 9 aa, synthetic construct
  source 1..9: note = Seed: KLVVVGARG (KRAS G12R)
RLVVVAARV

SEQ ID NO: 16010 - protein, 9 aa, synthetic construct
  source 1..9: note = Seed: KLVVVGARG (KRAS G12R)
RLVVVAARY

SEQ ID NO: 16011 - protein, 9 aa, synthetic construct
  source 1..9: note = Seed: KLVVVGARG (KRAS G12R)
RLVVVGARA

SEQ ID NO: 16012 - protein, 9 aa, synthetic construct
  source 1..9: note = Seed: KLVVVGARG (KRAS G12R)
RLVVVGARH

SEQ ID NO: 16013 - protein, 9 aa, synthetic construct
  source 1..9: note = Seed: KLVVVGARG (KRAS G12R)
RLVVVGARN

SEQ ID NO: 16014 - protein, 9 aa, synthetic construct
  source 1..9: note = Seed: KLVVVGARG (KRAS G12R)
RLVVVGARS

SEQ ID NO: 16015 - protein, 9 aa, synthetic construct
  source 1..9: note = Seed: KLVVVGARG (KRAS G12R)
RLVVVIARE

SEQ ID NO: 16016 - protein, 9 aa, synthetic construct
  source 1..9: note = Seed: KLVVVGARG (KRAS G12R)
RLVVVIARH

SEQ ID NO: 16017 - protein, 9 aa, synthetic construct
  source 1..9: note = Seed: KLVVVGARG (KRAS G12R)
RLVVVIARN

SEQ ID NO: 16018 - protein, 9 aa, synthetic construct
  source 1..9: note = Seed: KLVVVGARG (KRAS G12R)
RLVVVIARS

SEQ ID NO: 16019 - protein, 9 aa, synthetic construct
  source 1..9: note = Seed: KLVVVGARG (KRAS G12R)
RLVVVLARN

SEQ ID NO: 16020 - protein, 9 aa, synthetic construct
  source 1..9: note = Seed: KLVVVGARG (KRAS G12R)
RLVVVMARN

SEQ ID NO: 16021 - protein, 9 aa, synthetic construct
  source 1..9: note = Seed: KLVVVGARG (KRAS G12R)
RLVVVPARA

SEQ ID NO: 16022 - protein, 9 aa, synthetic construct
  source 1..9: note = Seed: KLVVVGARG (KRAS G12R)
RLVVVPARC

SEQ ID NO: 16023 - protein, 9 aa, synthetic construct
  source 1..9: note = Seed: KLVVVGARG (KRAS G12R)
RLVVVPARD

SEQ ID NO: 16024 - protein, 9 aa, synthetic construct
  source 1..9: note = Seed: KLVVVGARG (KRAS G12R)
RLVVVPARE

SEQ ID NO: 16025 - protein, 9 aa, synthetic construct
  source 1..9: note = Seed: KLVVVGARG (KRAS G12R)
RLVVVPARF

SEQ ID NO: 16026 - protein, 9 aa, synthetic construct
  source 1..9: note = Seed: KLVVVGARG (KRAS G12R)
RLVVVPARG

SEQ ID NO: 16027 - protein, 9 aa, synthetic construct
  source 1..9: note = Seed: KLVVVGARG (KRAS G12R)
RLVVVPARH

SEQ ID NO: 16028 - protein, 9 aa, synthetic construct
  source 1..9: note = Seed: KLVVVGARG (KRAS G12R)
RLVVVPARI

SEQ ID NO: 16029 - protein, 9 aa, synthetic construct
  source 1..9: note = Seed: KLVVVGARG (KRAS G12R)
RLVVVPARL

SEQ ID NO: 16030 - protein, 9 aa, synthetic construct
  source 1..9: note = Seed: KLVVVGARG (KRAS G12R)
RLVVVPARM

SEQ ID NO: 16031 - protein, 9 aa, synthetic construct
  source 1..9: note = Seed: KLVVVGARG (KRAS G12R)
RLVVVPARN

SEQ ID NO: 16032 - protein, 9 aa, synthetic construct
  source 1..9: note = Seed: KLVVVGARG (KRAS G12R)
RLVVVPARP

SEQ ID NO: 16033 - protein, 9 aa, synthetic construct
  source 1..9: note = Seed: KLVVVGARG (KRAS G12R)
RLVVVPARQ

SEQ ID NO: 16034 - protein, 9 aa, synthetic construct
  source 1..9: note = Seed: KLVVVGARG (KRAS G12R)
RLVVVPARS

SEQ ID NO: 16035 - protein, 9 aa, synthetic construct
  source 1..9: note = Seed: KLVVVGARG (KRAS G12R)
RLVVVPART

SEQ ID NO: 16036 - protein, 9 aa, synthetic construct
  source 1..9: note = Seed: KLVVVGARG (KRAS G12R)
RLVVVPARV

SEQ ID NO: 16037 - protein, 9 aa, synthetic construct
  source 1..9: note = Seed: KLVVVGARG (KRAS G12R)
RLVVVPARY

SEQ ID NO: 16038 - protein, 9 aa, synthetic construct
  source 1..9: note = Seed: KLVVVGARG (KRAS G12R)
RLVVVSARA

SEQ ID NO: 16039 - protein, 9 aa, synthetic construct
  source 1..9: note = Seed: KLVVVGARG (KRAS G12R)
RLVVVSARH

SEQ ID NO: 16040 - protein, 9 aa, synthetic construct
  source 1..9: note = Seed: KLVVVGARG (KRAS G12R)
RLVVVSARM

SEQ ID NO: 16041 - protein, 9 aa, synthetic construct
  source 1..9: note = Seed: KLVVVGARG (KRAS G12R)
RLVVVSARN

SEQ ID NO: 16042 - protein, 9 aa, synthetic construct
  source 1..9: note = Seed: KLVVVGARG (KRAS G12R)
RLVVVSARS

SEQ ID NO: 16043 - protein, 9 aa, synthetic construct
  source 1..9: note = Seed: KLVVVGARG (KRAS G12R)
RLVVVSART

SEQ ID NO: 16044 - protein, 9 aa, synthetic construct
  source 1..9: note = Seed: KLVVVGARG (KRAS G12R)
RLVVVSARV

SEQ ID NO: 16045 - protein, 9 aa, synthetic construct
  source 1..9: note = Seed: KLVVVGARG (KRAS G12R)
RLVVVTARA

SEQ ID NO: 16046 - protein, 9 aa, synthetic construct
  source 1..9: note = Seed: KLVVVGARG (KRAS G12R)
RLVVVTARH

SEQ ID NO: 16047 - protein, 9 aa, synthetic construct
  source 1..9: note = Seed: KLVVVGARG (KRAS G12R)
RLVVVTARN

SEQ ID NO: 16048 - protein, 9 aa, synthetic construct
  source 1..9: note = Seed: KLVVVGARG (KRAS G12R)
RLVVVTARS

SEQ ID NO: 16049 - protein, 9 aa, synthetic construct
  source 1..9: note = Seed: KLVVVGARG (KRAS G12R)
RLVVVVARA

SEQ ID NO: 16050 - protein, 9 aa, synthetic construct
  source 1..9: note = Seed: KLVVVGARG (KRAS G12R)
RLVVVVARE

SEQ ID NO: 16051 - protein, 9 aa, synthetic construct
  source 1..9: note = Seed: KLVVVGARG (KRAS G12R)
RLVVVVARH

SEQ ID NO: 16052 - protein, 9 aa, synthetic construct
  source 1..9: note = Seed: KLVVVGARG (KRAS G12R)
RLVVVVARN

SEQ ID NO: 16053 - protein, 9 aa, synthetic construct
  source 1..9: note = Seed: KLVVVGARG (KRAS G12R)
RLVVVVARS

SEQ ID NO: 16054 - protein, 9 aa, synthetic construct
  source 1..9: note = Seed: KLVVVGARG (KRAS G12R)
RLVWVAARA

SEQ ID NO: 16055 - protein, 9 aa, synthetic construct
  source 1..9: note = Seed: KLVVVGARG (KRAS G12R)
RLVWVAARH

SEQ ID NO: 16056 - protein, 9 aa, synthetic construct
  source 1..9: note = Seed: KLVVVGARG (KRAS G12R)
RLVWVAARL

SEQ ID NO: 16057 - protein, 9 aa, synthetic construct
  source 1..9: note = Seed: KLVVVGARG (KRAS G12R)
RLVWVAARM

SEQ ID NO: 16058 - protein, 9 aa, synthetic construct
  source 1..9: note = Seed: KLVVVGARG (KRAS G12R)
RLVWVAARN

SEQ ID NO: 16059 - protein, 9 aa, synthetic construct
  source 1..9: note = Seed: KLVVVGARG (KRAS G12R)
RLVWVAARS

SEQ ID NO: 16060 - protein, 9 aa, synthetic construct
  source 1..9: note = Seed: KLVVVGARG (KRAS G12R)
RLVWVAART

SEQ ID NO: 16061 - protein, 9 aa, synthetic construct
  source 1..9: note = Seed: KLVVVGARG (KRAS G12R)
RLVWVAARV

SEQ ID NO: 16062 - protein, 9 aa, synthetic construct
  source 1..9: note = Seed: KLVVVGARG (KRAS G12R)
RLVWVPARA

SEQ ID NO: 16063 - protein, 9 aa, synthetic construct
  source 1..9: note = Seed: KLVVVGARG (KRAS G12R)
RLVWVPARI

SEQ ID NO: 16064 - protein, 9 aa, synthetic construct
  source 1..9: note = Seed: KLVVVGARG (KRAS G12R)
RLVWVPARM

SEQ ID NO: 16065 - protein, 9 aa, synthetic construct
  source 1..9: note = Seed: KLVVVGARG (KRAS G12R)
RLVWVPARN

SEQ ID NO: 16066 - protein, 9 aa, synthetic construct
  source 1..9: note = Seed: KLVVVGARG (KRAS G12R)
RLVWVPARS

SEQ ID NO: 16067 - protein, 9 aa, synthetic construct
  source 1..9: note = Seed: KLVVVGARG (KRAS G12R)
RLVWVPART

SEQ ID NO: 16068 - protein, 9 aa, synthetic construct
  source 1..9: note = Seed: KLVVVGARG (KRAS G12R)
RLVWVPARV

SEQ ID NO: 16069 - protein, 9 aa, synthetic construct
  source 1..9: note = Seed: KLVVVGARG (KRAS G12R)
RLVYVAARA

SEQ ID NO: 16070 - protein, 9 aa, synthetic construct
  source 1..9: note = Seed: KLVVVGARG (KRAS G12R)
RLVYVAARH

SEQ ID NO: 16071 - protein, 9 aa, synthetic construct
  source 1..9: note = Seed: KLVVVGARG (KRAS G12R)
RLVYVAARM

SEQ ID NO: 16072 - protein, 9 aa, synthetic construct
  source 1..9: note = Seed: KLVVVGARG (KRAS G12R)
RLVYVAARN

SEQ ID NO: 16073 - protein, 9 aa, synthetic construct
  source 1..9: note = Seed: KLVVVGARG (KRAS G12R)
RLVYVAARS

SEQ ID NO: 16074 - protein, 9 aa, synthetic construct
  source 1..9: note = Seed: KLVVVGARG (KRAS G12R)
RLVYVAART

SEQ ID NO: 16075 - protein, 9 aa, synthetic construct
  source 1..9: note = Seed: KLVVVGARG (KRAS G12R)
RLVYVAARV

SEQ ID NO: 16076 - protein, 9 aa, synthetic construct
  source 1..9: note = Seed: KLVVVGARG (KRAS G12R)
RLVYVPARA

SEQ ID NO: 16077 - protein, 9 aa, synthetic construct
  source 1..9: note = Seed: KLVVVGARG (KRAS G12R)
RLVYVPARN

SEQ ID NO: 16078 - protein, 9 aa, synthetic construct
  source 1..9: note = Seed: KLVVVGARG (KRAS G12R)
RLVYVPARS

SEQ ID NO: 16079 - protein, 9 aa, synthetic construct
  source 1..9: note = Seed: KLVVVGARG (KRAS G12R)
VLVAVPARN

SEQ ID NO: 16080 - protein, 9 aa, synthetic construct
  source 1..9: note = Seed: KLVVVGARG (KRAS G12R)
VLVSVAARN

SEQ ID NO: 16081 - protein, 9 aa, synthetic construct
  source 1..9: note = Seed: KLVVVGARG (KRAS G12R)
VLVSVPARN

SEQ ID NO: 16082 - protein, 9 aa, synthetic construct
  source 1..9: note = Seed: KLVVVGARG (KRAS G12R)
YLVAVAARH

SEQ ID NO: 16083 - protein, 9 aa, synthetic construct
  source 1..9: note = Seed: KLVVVGARG (KRAS G12R)
YLVAVAARN

SEQ ID NO: 16084 - protein, 9 aa, synthetic construct
  source 1..9: note = Seed: KLVVVGARG (KRAS G12R)
YLVAVPARA

SEQ ID NO: 16085 - protein, 9 aa, synthetic construct
  source 1..9: note = Seed: KLVVVGARG (KRAS G12R)
YLVAVPARN

SEQ ID NO: 16086 - protein, 9 aa, synthetic construct
  source 1..9: note = Seed: KLVVVGARG (KRAS G12R)
YLVAVPARS

SEQ ID NO: 16087 - protein, 9 aa, synthetic construct
  source 1..9: note = Seed: KLVVVGARG (KRAS G12R)
YLVSVAARH

SEQ ID NO: 16088 - protein, 9 aa, synthetic construct
  source 1..9: note = Seed: KLVVVGARG (KRAS G12R)
YLVSVAARN

SEQ ID NO: 16089 - protein, 9 aa, synthetic construct
  source 1..9: note = Seed: KLVVVGARG (KRAS G12R)
YLVSVAARS

SEQ ID NO: 16090 - protein, 9 aa, synthetic construct
  source 1..9: note = Seed: KLVVVGARG (KRAS G12R)
YLVSVPARN

SEQ ID NO: 16091 - protein, 9 aa, synthetic construct
  source 1..9: note = Seed: KLVVVGARG (KRAS G12R)
YLVSVPARS

SEQ ID NO: 16092 - protein, 9 aa, synthetic construct
  source 1..9: note = Seed: KLVVVGARG (KRAS G12R)
YLVTVAARN

SEQ ID NO: 16093 - protein, 9 aa, synthetic construct
  source 1..9: note = Seed: KLVVVGARG (KRAS G12R)
YLVTVPARN

SEQ ID NO: 16094 - protein, 9 aa, synthetic construct
  source 1..9: note = Seed: LVVVGARGV (KRAS G12R)
AVVAGARGA

SEQ ID NO: 16095 - protein, 9 aa, synthetic construct
  source 1..9: note = Seed: LVVVGARGV (KRAS G12R)
AVVAGARGV

SEQ ID NO: 16096 - protein, 9 aa, synthetic construct
  source 1..9: note = Seed: LVVVGARGV (KRAS G12R)
AVVFGRRGA

SEQ ID NO: 16097 - protein, 9 aa, synthetic construct
  source 1..9: note = Seed: LVVVGARGV (KRAS G12R)
AVVFGRRGI

SEQ ID NO: 16098 - protein, 9 aa, synthetic construct
  source 1..9: note = Seed: LVVVGARGV (KRAS G12R)
AVVFGRRGL

SEQ ID NO: 16099 - protein, 9 aa, synthetic construct
  source 1..9: note = Seed: LVVVGARGV (KRAS G12R)
AVVFGRRGM

SEQ ID NO: 16100 - protein, 9 aa, synthetic construct
  source 1..9: note = Seed: LVVVGARGV (KRAS G12R)
AVVFGRRGR

SEQ ID NO: 16101 - protein, 9 aa, synthetic construct
  source 1..9: note = Seed: LVVVGARGV (KRAS G12R)
AVVFGRRGS

SEQ ID NO: 16102 - protein, 9 aa, synthetic construct
  source 1..9: note = Seed: LVVVGARGV (KRAS G12R)
AVVFGRRGV

SEQ ID NO: 16103 - protein, 9 aa, synthetic construct
  source 1..9: note = Seed: LVVVGARGV (KRAS G12R)
AVVHGRRGR

SEQ ID NO: 16104 - protein, 9 aa, synthetic construct
  source 1..9: note = Seed: LVVVGARGV (KRAS G12R)
AVVIGRRGR

SEQ ID NO: 16105 - protein, 9 aa, synthetic construct
  source 1..9: note = Seed: LVVVGARGV (KRAS G12R)
AVVLGARGI

SEQ ID NO: 16106 - protein, 9 aa, synthetic construct
  source 1..9: note = Seed: LVVVGARGV (KRAS G12R)
AVVLGARGL

SEQ ID NO: 16107 - protein, 9 aa, synthetic construct
  source 1..9: note = Seed: LVVVGARGV (KRAS G12R)
AVVLGARGV

SEQ ID NO: 16108 - protein, 9 aa, synthetic construct
  source 1..9: note = Seed: LVVVGARGV (KRAS G12R)
AVVLGGRGI

SEQ ID NO: 16109 - protein, 9 aa, synthetic construct
  source 1..9: note = Seed: LVVVGARGV (KRAS G12R)
AVVLGGRGL

SEQ ID NO: 16110 - protein, 9 aa, synthetic construct
  source 1..9: note = Seed: LVVVGARGV (KRAS G12R)
AVVLGGRGV

SEQ ID NO: 16111 - protein, 9 aa, synthetic construct
  source 1..9: note = Seed: LVVVGARGV (KRAS G12R)
AVVLGRRGA

SEQ ID NO: 16112 - protein, 9 aa, synthetic construct
  source 1..9: note = Seed: LVVVGARGV (KRAS G12R)
AVVLGRRGF

SEQ ID NO: 16113 - protein, 9 aa, synthetic construct
  source 1..9: note = Seed: LVVVGARGV (KRAS G12R)
AVVLGRRGG

SEQ ID NO: 16114 - protein, 9 aa, synthetic construct
  source 1..9: note = Seed: LVVVGARGV (KRAS G12R)
AVVLGRRGR

SEQ ID NO: 16115 - protein, 9 aa, synthetic construct
  source 1..9: note = Seed: LVVVGARGV (KRAS G12R)
AVVLGRRGS

SEQ ID NO: 16116 - protein, 9 aa, synthetic construct
  source 1..9: note = Seed: LVVVGARGV (KRAS G12R)
AVVLGSRGI

SEQ ID NO: 16117 - protein, 9 aa, synthetic construct
  source 1..9: note = Seed: LVVVGARGV (KRAS G12R)
AVVLGSRGL

SEQ ID NO: 16118 - protein, 9 aa, synthetic construct
  source 1..9: note = Seed: LVVVGARGV (KRAS G12R)
AVVLGSRGV

SEQ ID NO: 16119 - protein, 9 aa, synthetic construct
  source 1..9: note = Seed: LVVVGARGV (KRAS G12R)
AVVMGARGI

SEQ ID NO: 16120 - protein, 9 aa, synthetic construct
  source 1..9: note = Seed: LVVVGARGV (KRAS G12R)
AVVMGARGL

SEQ ID NO: 16121 - protein, 9 aa, synthetic construct
  source 1..9: note = Seed: LVVVGARGV (KRAS G12R)
AVVMGARGV

SEQ ID NO: 16122 - protein, 9 aa, synthetic construct
  source 1..9: note = Seed: LVVVGARGV (KRAS G12R)
AVVMGGRGL

SEQ ID NO: 16123 - protein, 9 aa, synthetic construct
  source 1..9: note = Seed: LVVVGARGV (KRAS G12R)
AVVMGRRGA

SEQ ID NO: 16124 - protein, 9 aa, synthetic construct
  source 1..9: note = Seed: LVVVGARGV (KRAS G12R)
AVVMGRRGG

SEQ ID NO: 16125 - protein, 9 aa, synthetic construct
  source 1..9: note = Seed: LVVVGARGV (KRAS G12R)
AVVMGRRGL

SEQ ID NO: 16126 - protein, 9 aa, synthetic construct
  source 1..9: note = Seed: LVVVGARGV (KRAS G12R)
AVVMGRRGR

SEQ ID NO: 16127 - protein, 9 aa, synthetic construct
  source 1..9: note = Seed: LVVVGARGV (KRAS G12R)
AVVMGRRGS

SEQ ID NO: 16128 - protein, 9 aa, synthetic construct
  source 1..9: note = Seed: LVVVGARGV (KRAS G12R)
AVVMGSRGI

SEQ ID NO: 16129 - protein, 9 aa, synthetic construct
  source 1..9: note = Seed: LVVVGARGV (KRAS G12R)
AVVMGSRGL

SEQ ID NO: 16130 - protein, 9 aa, synthetic construct
  source 1..9: note = Seed: LVVVGARGV (KRAS G12R)
AVVMGSRGV

SEQ ID NO: 16131 - protein, 9 aa, synthetic construct
  source 1..9: note = Seed: LVVVGARGV (KRAS G12R)
AVVWGRRGA

SEQ ID NO: 16132 - protein, 9 aa, synthetic construct
  source 1..9: note = Seed: LVVVGARGV (KRAS G12R)
AVVWGRRGM

SEQ ID NO: 16133 - protein, 9 aa, synthetic construct
  source 1..9: note = Seed: LVVVGARGV (KRAS G12R)
AVVWGRRGV

SEQ ID NO: 16134 - protein, 9 aa, synthetic construct
  source 1..9: note = Seed: LVVVGARGV (KRAS G12R)
CVVAGARGA

SEQ ID NO: 16135 - protein, 9 aa, synthetic construct
  source 1..9: note = Seed: LVVVGARGV (KRAS G12R)
CVVAGARGI

SEQ ID NO: 16136 - protein, 9 aa, synthetic construct
  source 1..9: note = Seed: LVVVGARGV (KRAS G12R)
CVVAGARGL

SEQ ID NO: 16137 - protein, 9 aa, synthetic construct
  source 1..9: note = Seed: LVVVGARGV (KRAS G12R)
CVVAGARGM

SEQ ID NO: 16138 - protein, 9 aa, synthetic construct
  source 1..9: note = Seed: LVVVGARGV (KRAS G12R)
CVVAGARGV

SEQ ID NO: 16139 - protein, 9 aa, synthetic construct
  source 1..9: note = Seed: LVVVGARGV (KRAS G12R)
CVVAGGRGI

SEQ ID NO: 16140 - protein, 9 aa, synthetic construct
  source 1..9: note = Seed: LVVVGARGV (KRAS G12R)
CVVAGGRGL

SEQ ID NO: 16141 - protein, 9 aa, synthetic construct
  source 1..9: note = Seed: LVVVGARGV (KRAS G12R)
CVVAGGRGV

SEQ ID NO: 16142 - protein, 9 aa, synthetic construct
  source 1..9: note = Seed: LVVVGARGV (KRAS G12R)
CVVAGSRGI

SEQ ID NO: 16143 - protein, 9 aa, synthetic construct
  source 1..9: note = Seed: LVVVGARGV (KRAS G12R)
CVVAGSRGL

SEQ ID NO: 16144 - protein, 9 aa, synthetic construct
  source 1..9: note = Seed: LVVVGARGV (KRAS G12R)
CVVAGSRGV

SEQ ID NO: 16145 - protein, 9 aa, synthetic construct
  source 1..9: note = Seed: LVVVGARGV (KRAS G12R)
CVVFGARGI

SEQ ID NO: 16146 - protein, 9 aa, synthetic construct
  source 1..9: note = Seed: LVVVGARGV (KRAS G12R)
CVVFGARGL

SEQ ID NO: 16147 - protein, 9 aa, synthetic construct
  source 1..9: note = Seed: LVVVGARGV (KRAS G12R)
CVVFGARGV

SEQ ID NO: 16148 - protein, 9 aa, synthetic construct
  source 1..9: note = Seed: LVVVGARGV (KRAS G12R)
CVVFGKRGA

SEQ ID NO: 16149 - protein, 9 aa, synthetic construct
  source 1..9: note = Seed: LVVVGARGV (KRAS G12R)
CVVFGKRGV

SEQ ID NO: 16150 - protein, 9 aa, synthetic construct
  source 1..9: note = Seed: LVVVGARGV (KRAS G12R)
CVVFGNRGI

SEQ ID NO: 16151 - protein, 9 aa, synthetic construct
  source 1..9: note = Seed: LVVVGARGV (KRAS G12R)
CVVFGNRGL

SEQ ID NO: 16152 - protein, 9 aa, synthetic construct
  source 1..9: note = Seed: LVVVGARGV (KRAS G12R)
CVVFGNRGV

SEQ ID NO: 16153 - protein, 9 aa, synthetic construct
  source 1..9: note = Seed: LVVVGARGV (KRAS G12R)
CVVFGRRGA

SEQ ID NO: 16154 - protein, 9 aa, synthetic construct
  source 1..9: note = Seed: LVVVGARGV (KRAS G12R)
CVVFGRRGF

SEQ ID NO: 16155 - protein, 9 aa, synthetic construct
  source 1..9: note = Seed: LVVVGARGV (KRAS G12R)
CVVFGRRGI

SEQ ID NO: 16156 - protein, 9 aa, synthetic construct
  source 1..9: note = Seed: LVVVGARGV (KRAS G12R)
CVVFGRRGL

SEQ ID NO: 16157 - protein, 9 aa, synthetic construct
  source 1..9: note = Seed: LVVVGARGV (KRAS G12R)
CVVFGRRGM

SEQ ID NO: 16158 - protein, 9 aa, synthetic construct
  source 1..9: note = Seed: LVVVGARGV (KRAS G12R)
CVVFGRRGQ

SEQ ID NO: 16159 - protein, 9 aa, synthetic construct
  source 1..9: note = Seed: LVVVGARGV (KRAS G12R)
CVVFGRRGR

SEQ ID NO: 16160 - protein, 9 aa, synthetic construct
  source 1..9: note = Seed: LVVVGARGV (KRAS G12R)
CVVFGRRGS

SEQ ID NO: 16161 - protein, 9 aa, synthetic construct
  source 1..9: note = Seed: LVVVGARGV (KRAS G12R)
CVVFGRRGV

SEQ ID NO: 16162 - protein, 9 aa, synthetic construct
  source 1..9: note = Seed: LVVVGARGV (KRAS G12R)
CVVFGSRGI

SEQ ID NO: 16163 - protein, 9 aa, synthetic construct
  source 1..9: note = Seed: LVVVGARGV (KRAS G12R)
CVVFGSRGL

SEQ ID NO: 16164 - protein, 9 aa, synthetic construct
  source 1..9: note = Seed: LVVVGARGV (KRAS G12R)
CVVFGSRGV

SEQ ID NO: 16165 - protein, 9 aa, synthetic construct
  source 1..9: note = Seed: LVVVGARGV (KRAS G12R)
CVVIGARGA

SEQ ID NO: 16166 - protein, 9 aa, synthetic construct
  source 1..9: note = Seed: LVVVGARGV (KRAS G12R)
CVVIGARGI

SEQ ID NO: 16167 - protein, 9 aa, synthetic construct
  source 1..9: note = Seed: LVVVGARGV (KRAS G12R)
CVVIGARGL

SEQ ID NO: 16168 - protein, 9 aa, synthetic construct
  source 1..9: note = Seed: LVVVGARGV (KRAS G12R)
CVVIGARGM

SEQ ID NO: 16169 - protein, 9 aa, synthetic construct
  source 1..9: note = Seed: LVVVGARGV (KRAS G12R)
CVVIGARGT

SEQ ID NO: 16170 - protein, 9 aa, synthetic construct
  source 1..9: note = Seed: LVVVGARGV (KRAS G12R)
CVVIGARGV

SEQ ID NO: 16171 - protein, 9 aa, synthetic construct
  source 1..9: note = Seed: LVVVGARGV (KRAS G12R)
CVVIGGRGA

SEQ ID NO: 16172 - protein, 9 aa, synthetic construct
  source 1..9: note = Seed: LVVVGARGV (KRAS G12R)
CVVIGGRGI

SEQ ID NO: 16173 - protein, 9 aa, synthetic construct
  source 1..9: note = Seed: LVVVGARGV (KRAS G12R)
CVVIGGRGL

SEQ ID NO: 16174 - protein, 9 aa, synthetic construct
  source 1..9: note = Seed: LVVVGARGV (KRAS G12R)
CVVIGGRGM

SEQ ID NO: 16175 - protein, 9 aa, synthetic construct
  source 1..9: note = Seed: LVVVGARGV (KRAS G12R)
CVVIGGRGV

SEQ ID NO: 16176 - protein, 9 aa, synthetic construct
  source 1..9: note = Seed: LVVVGARGV (KRAS G12R)
CVVIGNRGI

SEQ ID NO: 16177 - protein, 9 aa, synthetic construct
  source 1..9: note = Seed: LVVVGARGV (KRAS G12R)
CVVIGNRGL

SEQ ID NO: 16178 - protein, 9 aa, synthetic construct
  source 1..9: note = Seed: LVVVGARGV (KRAS G12R)
CVVIGNRGV

SEQ ID NO: 16179 - protein, 9 aa, synthetic construct
  source 1..9: note = Seed: LVVVGARGV (KRAS G12R)
CVVIGPRGI

SEQ ID NO: 16180 - protein, 9 aa, synthetic construct
  source 1..9: note = Seed: LVVVGARGV (KRAS G12R)
CVVIGPRGL

SEQ ID NO: 16181 - protein, 9 aa, synthetic construct
  source 1..9: note = Seed: LVVVGARGV (KRAS G12R)
CVVIGPRGV

SEQ ID NO: 16182 - protein, 9 aa, synthetic construct
  source 1..9: note = Seed: LVVVGARGV (KRAS G12R)
CVVIGRRGA

SEQ ID NO: 16183 - protein, 9 aa, synthetic construct
  source 1..9: note = Seed: LVVVGARGV (KRAS G12R)
CVVIGRRGF

SEQ ID NO: 16184 - protein, 9 aa, synthetic construct
  source 1..9: note = Seed: LVVVGARGV (KRAS G12R)
CVVIGRRGR

SEQ ID NO: 16185 - protein, 9 aa, synthetic construct
  source 1..9: note = Seed: LVVVGARGV (KRAS G12R)
CVVIGRRGV

SEQ ID NO: 16186 - protein, 9 aa, synthetic construct
  source 1..9: note = Seed: LVVVGARGV (KRAS G12R)
CVVIGRRGY

SEQ ID NO: 16187 - protein, 9 aa, synthetic construct
  source 1..9: note = Seed: LVVVGARGV (KRAS G12R)
CVVIGSRGA

SEQ ID NO: 16188 - protein, 9 aa, synthetic construct
  source 1..9: note = Seed: LVVVGARGV (KRAS G12R)
CVVIGSRGI

SEQ ID NO: 16189 - protein, 9 aa, synthetic construct
  source 1..9: note = Seed: LVVVGARGV (KRAS G12R)
CVVIGSRGL

SEQ ID NO: 16190 - protein, 9 aa, synthetic construct
  source 1..9: note = Seed: LVVVGARGV (KRAS G12R)
CVVIGSRGM

SEQ ID NO: 16191 - protein, 9 aa, synthetic construct
  source 1..9: note = Seed: LVVVGARGV (KRAS G12R)
CVVIGSRGT

SEQ ID NO: 16192 - protein, 9 aa, synthetic construct
  source 1..9: note = Seed: LVVVGARGV (KRAS G12R)
CVVIGSRGV

SEQ ID NO: 16193 - protein, 9 aa, synthetic construct
  source 1..9: note = Seed: LVVVGARGV (KRAS G12R)
CVVIGTRGI

SEQ ID NO: 16194 - protein, 9 aa, synthetic construct
  source 1..9: note = Seed: LVVVGARGV (KRAS G12R)
CVVIGTRGL

SEQ ID NO: 16195 - protein, 9 aa, synthetic construct
  source 1..9: note = Seed: LVVVGARGV (KRAS G12R)
CVVIGTRGV

SEQ ID NO: 16196 - protein, 9 aa, synthetic construct
  source 1..9: note = Seed: LVVVGARGV (KRAS G12R)
CVVLGARGA

SEQ ID NO: 16197 - protein, 9 aa, synthetic construct
  source 1..9: note = Seed: LVVVGARGV (KRAS G12R)
CVVLGARGF

SEQ ID NO: 16198 - protein, 9 aa, synthetic construct
  source 1..9: note = Seed: LVVVGARGV (KRAS G12R)
CVVLGARGI

SEQ ID NO: 16199 - protein, 9 aa, synthetic construct
  source 1..9: note = Seed: LVVVGARGV (KRAS G12R)
CVVLGARGL

SEQ ID NO: 16200 - protein, 9 aa, synthetic construct
  source 1..9: note = Seed: LVVVGARGV (KRAS G12R)
CVVLGARGM

SEQ ID NO: 16201 - protein, 9 aa, synthetic construct
  source 1..9: note = Seed: LVVVGARGV (KRAS G12R)
CVVLGARGS

SEQ ID NO: 16202 - protein, 9 aa, synthetic construct
  source 1..9: note = Seed: LVVVGARGV (KRAS G12R)
CVVLGARGT

SEQ ID NO: 16203 - protein, 9 aa, synthetic construct
  source 1..9: note = Seed: LVVVGARGV (KRAS G12R)
CVVLGARGV

SEQ ID NO: 16204 - protein, 9 aa, synthetic construct
  source 1..9: note = Seed: LVVVGARGV (KRAS G12R)
CVVLGGRGA

SEQ ID NO: 16205 - protein, 9 aa, synthetic construct
  source 1..9: note = Seed: LVVVGARGV (KRAS G12R)
CVVLGGRGI

SEQ ID NO: 16206 - protein, 9 aa, synthetic construct
  source 1..9: note = Seed: LVVVGARGV (KRAS G12R)
CVVLGGRGL

SEQ ID NO: 16207 - protein, 9 aa, synthetic construct
  source 1..9: note = Seed: LVVVGARGV (KRAS G12R)
CVVLGGRGM

SEQ ID NO: 16208 - protein, 9 aa, synthetic construct
  source 1..9: note = Seed: LVVVGARGV (KRAS G12R)
CVVLGGRGS

SEQ ID NO: 16209 - protein, 9 aa, synthetic construct
  source 1..9: note = Seed: LVVVGARGV (KRAS G12R)
CVVLGGRGT

SEQ ID NO: 16210 - protein, 9 aa, synthetic construct
  source 1..9: note = Seed: LVVVGARGV (KRAS G12R)
CVVLGGRGV

SEQ ID NO: 16211 - protein, 9 aa, synthetic construct
  source 1..9: note = Seed: LVVVGARGV (KRAS G12R)
CVVLGIRGI

SEQ ID NO: 16212 - protein, 9 aa, synthetic construct
  source 1..9: note = Seed: LVVVGARGV (KRAS G12R)
CVVLGIRGL

SEQ ID NO: 16213 - protein, 9 aa, synthetic construct
  source 1..9: note = Seed: LVVVGARGV (KRAS G12R)
CVVLGIRGV

SEQ ID NO: 16214 - protein, 9 aa, synthetic construct
  source 1..9: note = Seed: LVVVGARGV (KRAS G12R)
CVVLGMRGL

SEQ ID NO: 16215 - protein, 9 aa, synthetic construct
  source 1..9: note = Seed: LVVVGARGV (KRAS G12R)
CVVLGNRGA

SEQ ID NO: 16216 - protein, 9 aa, synthetic construct
  source 1..9: note = Seed: LVVVGARGV (KRAS G12R)
CVVLGNRGI

SEQ ID NO: 16217 - protein, 9 aa, synthetic construct
  source 1..9: note = Seed: LVVVGARGV (KRAS G12R)
CVVLGNRGL

SEQ ID NO: 16218 - protein, 9 aa, synthetic construct
  source 1..9: note = Seed: LVVVGARGV (KRAS G12R)
CVVLGNRGM

SEQ ID NO: 16219 - protein, 9 aa, synthetic construct
  source 1..9: note = Seed: LVVVGARGV (KRAS G12R)
CVVLGNRGV

SEQ ID NO: 16220 - protein, 9 aa, synthetic construct
  source 1..9: note = Seed: LVVVGARGV (KRAS G12R)
CVVLGPRGA

SEQ ID NO: 16221 - protein, 9 aa, synthetic construct
  source 1..9: note = Seed: LVVVGARGV (KRAS G12R)
CVVLGPRGI

SEQ ID NO: 16222 - protein, 9 aa, synthetic construct
  source 1..9: note = Seed: LVVVGARGV (KRAS G12R)
CVVLGPRGL

SEQ ID NO: 16223 - protein, 9 aa, synthetic construct
  source 1..9: note = Seed: LVVVGARGV (KRAS G12R)
CVVLGPRGM

SEQ ID NO: 16224 - protein, 9 aa, synthetic construct
  source 1..9: note = Seed: LVVVGARGV (KRAS G12R)
CVVLGPRGV

SEQ ID NO: 16225 - protein, 9 aa, synthetic construct
  source 1..9: note = Seed: LVVVGARGV (KRAS G12R)
CVVLGRRGA

SEQ ID NO: 16226 - protein, 9 aa, synthetic construct
  source 1..9: note = Seed: LVVVGARGV (KRAS G12R)
CVVLGRRGF

SEQ ID NO: 16227 - protein, 9 aa, synthetic construct
  source 1..9: note = Seed: LVVVGARGV (KRAS G12R)
CVVLGRRGG

SEQ ID NO: 16228 - protein, 9 aa, synthetic construct
  source 1..9: note = Seed: LVVVGARGV (KRAS G12R)
CVVLGRRGR

SEQ ID NO: 16229 - protein, 9 aa, synthetic construct
  source 1..9: note = Seed: LVVVGARGV (KRAS G12R)
CVVLGRRGS

SEQ ID NO: 16230 - protein, 9 aa, synthetic construct
  source 1..9: note = Seed: LVVVGARGV (KRAS G12R)
CVVLGRRGV

SEQ ID NO: 16231 - protein, 9 aa, synthetic construct
  source 1..9: note = Seed: LVVVGARGV (KRAS G12R)
CVVLGSRGA

SEQ ID NO: 16232 - protein, 9 aa, synthetic construct
  source 1..9: note = Seed: LVVVGARGV (KRAS G12R)
CVVLGSRGF

SEQ ID NO: 16233 - protein, 9 aa, synthetic construct
  source 1..9: note = Seed: LVVVGARGV (KRAS G12R)
CVVLGSRGI

SEQ ID NO: 16234 - protein, 9 aa, synthetic construct
  source 1..9: note = Seed: LVVVGARGV (KRAS G12R)
CVVLGSRGL

SEQ ID NO: 16235 - protein, 9 aa, synthetic construct
  source 1..9: note = Seed: LVVVGARGV (KRAS G12R)
CVVLGSRGM

SEQ ID NO: 16236 - protein, 9 aa, synthetic construct
  source 1..9: note = Seed: LVVVGARGV (KRAS G12R)
CVVLGSRGS

SEQ ID NO: 16237 - protein, 9 aa, synthetic construct
  source 1..9: note = Seed: LVVVGARGV (KRAS G12R)
CVVLGSRGT

SEQ ID NO: 16238 - protein, 9 aa, synthetic construct
  source 1..9: note = Seed: LVVVGARGV (KRAS G12R)
CVVLGSRGV

SEQ ID NO: 16239 - protein, 9 aa, synthetic construct
  source 1..9: note = Seed: LVVVGARGV (KRAS G12R)
CVVLGTRGA

SEQ ID NO: 16240 - protein, 9 aa, synthetic construct
  source 1..9: note = Seed: LVVVGARGV (KRAS G12R)
CVVLGTRGI

SEQ ID NO: 16241 - protein, 9 aa, synthetic construct
  source 1..9: note = Seed: LVVVGARGV (KRAS G12R)
CVVLGTRGL

SEQ ID NO: 16242 - protein, 9 aa, synthetic construct
  source 1..9: note = Seed: LVVVGARGV (KRAS G12R)
CVVLGTRGM

SEQ ID NO: 16243 - protein, 9 aa, synthetic construct
  source 1..9: note = Seed: LVVVGARGV (KRAS G12R)
CVVLGTRGV

SEQ ID NO: 16244 - protein, 9 aa, synthetic construct
  source 1..9: note = Seed: LVVVGARGV (KRAS G12R)
CVVLGVRGI

SEQ ID NO: 16245 - protein, 9 aa, synthetic construct
  source 1..9: note = Seed: LVVVGARGV (KRAS G12R)
CVVLGVRGL

SEQ ID NO: 16246 - protein, 9 aa, synthetic construct
  source 1..9: note = Seed: LVVVGARGV (KRAS G12R)
CVVLGVRGV

SEQ ID NO: 16247 - protein, 9 aa, synthetic construct
  source 1..9: note = Seed: LVVVGARGV (KRAS G12R)
CVVMGARGA

SEQ ID NO: 16248 - protein, 9 aa, synthetic construct
  source 1..9: note = Seed: LVVVGARGV (KRAS G12R)
CVVMGARGF

SEQ ID NO: 16249 - protein, 9 aa, synthetic construct
  source 1..9: note = Seed: LVVVGARGV (KRAS G12R)
CVVMGARGI

SEQ ID NO: 16250 - protein, 9 aa, synthetic construct
  source 1..9: note = Seed: LVVVGARGV (KRAS G12R)
CVVMGARGL

SEQ ID NO: 16251 - protein, 9 aa, synthetic construct
  source 1..9: note = Seed: LVVVGARGV (KRAS G12R)
CVVMGARGM

SEQ ID NO: 16252 - protein, 9 aa, synthetic construct
  source 1..9: note = Seed: LVVVGARGV (KRAS G12R)
CVVMGARGS

SEQ ID NO: 16253 - protein, 9 aa, synthetic construct
  source 1..9: note = Seed: LVVVGARGV (KRAS G12R)
CVVMGARGT

SEQ ID NO: 16254 - protein, 9 aa, synthetic construct
  source 1..9: note = Seed: LVVVGARGV (KRAS G12R)
CVVMGARGV

SEQ ID NO: 16255 - protein, 9 aa, synthetic construct
  source 1..9: note = Seed: LVVVGARGV (KRAS G12R)
CVVMGGRGA

SEQ ID NO: 16256 - protein, 9 aa, synthetic construct
  source 1..9: note = Seed: LVVVGARGV (KRAS G12R)
CVVMGGRGI

SEQ ID NO: 16257 - protein, 9 aa, synthetic construct
  source 1..9: note = Seed: LVVVGARGV (KRAS G12R)
CVVMGGRGL

SEQ ID NO: 16258 - protein, 9 aa, synthetic construct
  source 1..9: note = Seed: LVVVGARGV (KRAS G12R)
CVVMGGRGM

SEQ ID NO: 16259 - protein, 9 aa, synthetic construct
  source 1..9: note = Seed: LVVVGARGV (KRAS G12R)
CVVMGGRGT

SEQ ID NO: 16260 - protein, 9 aa, synthetic construct
  source 1..9: note = Seed: LVVVGARGV (KRAS G12R)
CVVMGGRGV

SEQ ID NO: 16261 - protein, 9 aa, synthetic construct
  source 1..9: note = Seed: LVVVGARGV (KRAS G12R)
CVVMGIRGI

SEQ ID NO: 16262 - protein, 9 aa, synthetic construct
  source 1..9: note = Seed: LVVVGARGV (KRAS G12R)
CVVMGIRGL

SEQ ID NO: 16263 - protein, 9 aa, synthetic construct
  source 1..9: note = Seed: LVVVGARGV (KRAS G12R)
CVVMGIRGV

SEQ ID NO: 16264 - protein, 9 aa, synthetic construct
  source 1..9: note = Seed: LVVVGARGV (KRAS G12R)
CVVMGLRGV

SEQ ID NO: 16265 - protein, 9 aa, synthetic construct
  source 1..9: note = Seed: LVVVGARGV (KRAS G12R)
CVVMGMRGI

SEQ ID NO: 16266 - protein, 9 aa, synthetic construct
  source 1..9: note = Seed: LVVVGARGV (KRAS G12R)
CVVMGMRGL

SEQ ID NO: 16267 - protein, 9 aa, synthetic construct
  source 1..9: note = Seed: LVVVGARGV (KRAS G12R)
CVVMGMRGV

SEQ ID NO: 16268 - protein, 9 aa, synthetic construct
  source 1..9: note = Seed: LVVVGARGV (KRAS G12R)
CVVMGNRGI

SEQ ID NO: 16269 - protein, 9 aa, synthetic construct
  source 1..9: note = Seed: LVVVGARGV (KRAS G12R)
CVVMGNRGL

SEQ ID NO: 16270 - protein, 9 aa, synthetic construct
  source 1..9: note = Seed: LVVVGARGV (KRAS G12R)
CVVMGNRGM

SEQ ID NO: 16271 - protein, 9 aa, synthetic construct
  source 1..9: note = Seed: LVVVGARGV (KRAS G12R)
CVVMGNRGV

SEQ ID NO: 16272 - protein, 9 aa, synthetic construct
  source 1..9: note = Seed: LVVVGARGV (KRAS G12R)
CVVMGPRGI

SEQ ID NO: 16273 - protein, 9 aa, synthetic construct
  source 1..9: note = Seed: LVVVGARGV (KRAS G12R)
CVVMGPRGL

SEQ ID NO: 16274 - protein, 9 aa, synthetic construct
  source 1..9: note = Seed: LVVVGARGV (KRAS G12R)
CVVMGPRGM

SEQ ID NO: 16275 - protein, 9 aa, synthetic construct
  source 1..9: note = Seed: LVVVGARGV (KRAS G12R)
CVVMGPRGV

SEQ ID NO: 16276 - protein, 9 aa, synthetic construct
  source 1..9: note = Seed: LVVVGARGV (KRAS G12R)
CVVMGRRGA

SEQ ID NO: 16277 - protein, 9 aa, synthetic construct
  source 1..9: note = Seed: LVVVGARGV (KRAS G12R)
CVVMGRRGF

SEQ ID NO: 16278 - protein, 9 aa, synthetic construct
  source 1..9: note = Seed: LVVVGARGV (KRAS G12R)
CVVMGRRGG

SEQ ID NO: 16279 - protein, 9 aa, synthetic construct
  source 1..9: note = Seed: LVVVGARGV (KRAS G12R)
CVVMGRRGI

SEQ ID NO: 16280 - protein, 9 aa, synthetic construct
  source 1..9: note = Seed: LVVVGARGV (KRAS G12R)
CVVMGRRGL

SEQ ID NO: 16281 - protein, 9 aa, synthetic construct
  source 1..9: note = Seed: LVVVGARGV (KRAS G12R)
CVVMGRRGM

SEQ ID NO: 16282 - protein, 9 aa, synthetic construct
  source 1..9: note = Seed: LVVVGARGV (KRAS G12R)
CVVMGRRGR

SEQ ID NO: 16283 - protein, 9 aa, synthetic construct
  source 1..9: note = Seed: LVVVGARGV (KRAS G12R)
CVVMGRRGS

SEQ ID NO: 16284 - protein, 9 aa, synthetic construct
  source 1..9: note = Seed: LVVVGARGV (KRAS G12R)
CVVMGRRGV

SEQ ID NO: 16285 - protein, 9 aa, synthetic construct
  source 1..9: note = Seed: LVVVGARGV (KRAS G12R)
CVVMGSRGA

SEQ ID NO: 16286 - protein, 9 aa, synthetic construct
  source 1..9: note = Seed: LVVVGARGV (KRAS G12R)
CVVMGSRGF

SEQ ID NO: 16287 - protein, 9 aa, synthetic construct
  source 1..9: note = Seed: LVVVGARGV (KRAS G12R)
CVVMGSRGI

SEQ ID NO: 16288 - protein, 9 aa, synthetic construct
  source 1..9: note = Seed: LVVVGARGV (KRAS G12R)
CVVMGSRGL

SEQ ID NO: 16289 - protein, 9 aa, synthetic construct
  source 1..9: note = Seed: LVVVGARGV (KRAS G12R)
CVVMGSRGM

SEQ ID NO: 16290 - protein, 9 aa, synthetic construct
  source 1..9: note = Seed: LVVVGARGV (KRAS G12R)
CVVMGSRGS

SEQ ID NO: 16291 - protein, 9 aa, synthetic construct
  source 1..9: note = Seed: LVVVGARGV (KRAS G12R)
CVVMGSRGT

SEQ ID NO: 16292 - protein, 9 aa, synthetic construct
  source 1..9: note = Seed: LVVVGARGV (KRAS G12R)
CVVMGSRGV

SEQ ID NO: 16293 - protein, 9 aa, synthetic construct
  source 1..9: note = Seed: LVVVGARGV (KRAS G12R)
CVVMGTRGA

SEQ ID NO: 16294 - protein, 9 aa, synthetic construct
  source 1..9: note = Seed: LVVVGARGV (KRAS G12R)
CVVMGTRGI

SEQ ID NO: 16295 - protein, 9 aa, synthetic construct
  source 1..9: note = Seed: LVVVGARGV (KRAS G12R)
CVVMGTRGL

SEQ ID NO: 16296 - protein, 9 aa, synthetic construct
  source 1..9: note = Seed: LVVVGARGV (KRAS G12R)
CVVMGTRGM

SEQ ID NO: 16297 - protein, 9 aa, synthetic construct
  source 1..9: note = Seed: LVVVGARGV (KRAS G12R)
CVVMGTRGV

SEQ ID NO: 16298 - protein, 9 aa, synthetic construct
  source 1..9: note = Seed: LVVVGARGV (KRAS G12R)
CVVMGVRGI

SEQ ID NO: 16299 - protein, 9 aa, synthetic construct
  source 1..9: note = Seed: LVVVGARGV (KRAS G12R)
CVVMGVRGL

SEQ ID NO: 16300 - protein, 9 aa, synthetic construct
  source 1..9: note = Seed: LVVVGARGV (KRAS G12R)
CVVMGVRGV

SEQ ID NO: 16301 - protein, 9 aa, synthetic construct
  source 1..9: note = Seed: LVVVGARGV (KRAS G12R)
CVVNGARGI

SEQ ID NO: 16302 - protein, 9 aa, synthetic construct
  source 1..9: note = Seed: LVVVGARGV (KRAS G12R)
CVVNGNRGI

SEQ ID NO: 16303 - protein, 9 aa, synthetic construct
  source 1..9: note = Seed: LVVVGARGV (KRAS G12R)
CVVNGSRGI

SEQ ID NO: 16304 - protein, 9 aa, synthetic construct
  source 1..9: note = Seed: LVVVGARGV (KRAS G12R)
CVVQGARGI

SEQ ID NO: 16305 - protein, 9 aa, synthetic construct
  source 1..9: note = Seed: LVVVGARGV (KRAS G12R)
CVVQGARGL

SEQ ID NO: 16306 - protein, 9 aa, synthetic construct
  source 1..9: note = Seed: LVVVGARGV (KRAS G12R)
CVVQGARGV

SEQ ID NO: 16307 - protein, 9 aa, synthetic construct
  source 1..9: note = Seed: LVVVGARGV (KRAS G12R)
CVVQGSRGL

SEQ ID NO: 16308 - protein, 9 aa, synthetic construct
  source 1..9: note = Seed: LVVVGARGV (KRAS G12R)
CVVSGARGI

SEQ ID NO: 16309 - protein, 9 aa, synthetic construct
  source 1..9: note = Seed: LVVVGARGV (KRAS G12R)
CVVSGARGL

SEQ ID NO: 16310 - protein, 9 aa, synthetic construct
  source 1..9: note = Seed: LVVVGARGV (KRAS G12R)
CVVSGARGV

SEQ ID NO: 16311 - protein, 9 aa, synthetic construct
  source 1..9: note = Seed: LVVVGARGV (KRAS G12R)
CVVSGSRGI

SEQ ID NO: 16312 - protein, 9 aa, synthetic construct
  source 1..9: note = Seed: LVVVGARGV (KRAS G12R)
CVVTGARGI

SEQ ID NO: 16313 - protein, 9 aa, synthetic construct
  source 1..9: note = Seed: LVVVGARGV (KRAS G12R)
CVVTGSRGI

SEQ ID NO: 16314 - protein, 9 aa, synthetic construct
  source 1..9: note = Seed: LVVVGARGV (KRAS G12R)
CVVTGSRGL

SEQ ID NO: 16315 - protein, 9 aa, synthetic construct
  source 1..9: note = Seed: LVVVGARGV (KRAS G12R)
CVVVGARGI

SEQ ID NO: 16316 - protein, 9 aa, synthetic construct
  source 1..9: note = Seed: LVVVGARGV (KRAS G12R)
CVVVGARGL

SEQ ID NO: 16317 - protein, 9 aa, synthetic construct
  source 1..9: note = Seed: LVVVGARGV (KRAS G12R)
CVVVGARGM

SEQ ID NO: 16318 - protein, 9 aa, synthetic construct
  source 1..9: note = Seed: LVVVGARGV (KRAS G12R)
CVVVGARGV

SEQ ID NO: 16319 - protein, 9 aa, synthetic construct
  source 1..9: note = Seed: LVVVGARGV (KRAS G12R)
CVVVGGRGI

SEQ ID NO: 16320 - protein, 9 aa, synthetic construct
  source 1..9: note = Seed: LVVVGARGV (KRAS G12R)
CVVVGGRGL

SEQ ID NO: 16321 - protein, 9 aa, synthetic construct
  source 1..9: note = Seed: LVVVGARGV (KRAS G12R)
CVVVGGRGV

SEQ ID NO: 16322 - protein, 9 aa, synthetic construct
  source 1..9: note = Seed: LVVVGARGV (KRAS G12R)
CVVVGSRGI

SEQ ID NO: 16323 - protein, 9 aa, synthetic construct
  source 1..9: note = Seed: LVVVGARGV (KRAS G12R)
CVVVGSRGL

SEQ ID NO: 16324 - protein, 9 aa, synthetic construct
  source 1..9: note = Seed: LVVVGARGV (KRAS G12R)
CVVVGSRGV

SEQ ID NO: 16325 - protein, 9 aa, synthetic construct
  source 1..9: note = Seed: LVVVGARGV (KRAS G12R)
CVVWGRRGA

SEQ ID NO: 16326 - protein, 9 aa, synthetic construct
  source 1..9: note = Seed: LVVVGARGV (KRAS G12R)
CVVWGRRGI

SEQ ID NO: 16327 - protein, 9 aa, synthetic construct
  source 1..9: note = Seed: LVVVGARGV (KRAS G12R)
CVVWGRRGM

SEQ ID NO: 16328 - protein, 9 aa, synthetic construct
  source 1..9: note = Seed: LVVVGARGV (KRAS G12R)
CVVWGRRGV

SEQ ID NO: 16329 - protein, 9 aa, synthetic construct
  source 1..9: note = Seed: LVVVGARGV (KRAS G12R)
CVVYGNRGL

SEQ ID NO: 16330 - protein, 9 aa, synthetic construct
  source 1..9: note = Seed: LVVVGARGV (KRAS G12R)
CVVYGRRGA

SEQ ID NO: 16331 - protein, 9 aa, synthetic construct
  source 1..9: note = Seed: LVVVGARGV (KRAS G12R)
CVVYGSRGL

SEQ ID NO: 16332 - protein, 9 aa, synthetic construct
  source 1..9: note = Seed: LVVVGARGV (KRAS G12R)
FVVAGARGC

SEQ ID NO: 16333 - protein, 9 aa, synthetic construct
  source 1..9: note = Seed: LVVVGARGV (KRAS G12R)
FVVAGARGD

SEQ ID NO: 16334 - protein, 9 aa, synthetic construct
  source 1..9: note = Seed: LVVVGARGV (KRAS G12R)
FVVAGARGE

SEQ ID NO: 16335 - protein, 9 aa, synthetic construct
  source 1..9: note = Seed: LVVVGARGV (KRAS G12R)
FVVAGARGF

SEQ ID NO: 16336 - protein, 9 aa, synthetic construct
  source 1..9: note = Seed: LVVVGARGV (KRAS G12R)
FVVAGARGG

SEQ ID NO: 16337 - protein, 9 aa, synthetic construct
  source 1..9: note = Seed: LVVVGARGV (KRAS G12R)
FVVAGARGH

SEQ ID NO: 16338 - protein, 9 aa, synthetic construct
  source 1..9: note = Seed: LVVVGARGV (KRAS G12R)
FVVAGARGK

SEQ ID NO: 16339 - protein, 9 aa, synthetic construct
  source 1..9: note = Seed: LVVVGARGV (KRAS G12R)
FVVAGARGN

SEQ ID NO: 16340 - protein, 9 aa, synthetic construct
  source 1..9: note = Seed: LVVVGARGV (KRAS G12R)
FVVAGARGP

SEQ ID NO: 16341 - protein, 9 aa, synthetic construct
  source 1..9: note = Seed: LVVVGARGV (KRAS G12R)
FVVAGARGQ

SEQ ID NO: 16342 - protein, 9 aa, synthetic construct
  source 1..9: note = Seed: LVVVGARGV (KRAS G12R)
FVVAGARGR

SEQ ID NO: 16343 - protein, 9 aa, synthetic construct
  source 1..9: note = Seed: LVVVGARGV (KRAS G12R)
FVVAGARGS

SEQ ID NO: 16344 - protein, 9 aa, synthetic construct
  source 1..9: note = Seed: LVVVGARGV (KRAS G12R)
FVVAGARGT

SEQ ID NO: 16345 - protein, 9 aa, synthetic construct
  source 1..9: note = Seed: LVVVGARGV (KRAS G12R)
FVVAGARGW

SEQ ID NO: 16346 - protein, 9 aa, synthetic construct
  source 1..9: note = Seed: LVVVGARGV (KRAS G12R)
FVVAGARGY

SEQ ID NO: 16347 - protein, 9 aa, synthetic construct
  source 1..9: note = Seed: LVVVGARGV (KRAS G12R)
FVVAGCRGA

SEQ ID NO: 16348 - protein, 9 aa, synthetic construct
  source 1..9: note = Seed: LVVVGARGV (KRAS G12R)
FVVAGCRGF

SEQ ID NO: 16349 - protein, 9 aa, synthetic construct
  source 1..9: note = Seed: LVVVGARGV (KRAS G12R)
FVVAGCRGG

SEQ ID NO: 16350 - protein, 9 aa, synthetic construct
  source 1..9: note = Seed: LVVVGARGV (KRAS G12R)
FVVAGCRGI

SEQ ID NO: 16351 - protein, 9 aa, synthetic construct
  source 1..9: note = Seed: LVVVGARGV (KRAS G12R)
FVVAGCRGL

SEQ ID NO: 16352 - protein, 9 aa, synthetic construct
  source 1..9: note = Seed: LVVVGARGV (KRAS G12R)
FVVAGCRGM

SEQ ID NO: 16353 - protein, 9 aa, synthetic construct
  source 1..9: note = Seed: LVVVGARGV (KRAS G12R)
FVVAGCRGN

SEQ ID NO: 16354 - protein, 9 aa, synthetic construct
  source 1..9: note = Seed: LVVVGARGV (KRAS G12R)
FVVAGCRGS

SEQ ID NO: 16355 - protein, 9 aa, synthetic construct
  source 1..9: note = Seed: LVVVGARGV (KRAS G12R)
FVVAGCRGT

SEQ ID NO: 16356 - protein, 9 aa, synthetic construct
  source 1..9: note = Seed: LVVVGARGV (KRAS G12R)
FVVAGCRGV

SEQ ID NO: 16357 - protein, 9 aa, synthetic construct
  source 1..9: note = Seed: LVVVGARGV (KRAS G12R)
FVVAGCRGY

SEQ ID NO: 16358 - protein, 9 aa, synthetic construct
  source 1..9: note = Seed: LVVVGARGV (KRAS G12R)
FVVAGDRGA

SEQ ID NO: 16359 - protein, 9 aa, synthetic construct
  source 1..9: note = Seed: LVVVGARGV (KRAS G12R)
FVVAGDRGI

SEQ ID NO: 16360 - protein, 9 aa, synthetic construct
  source 1..9: note = Seed: LVVVGARGV (KRAS G12R)
FVVAGDRGL

SEQ ID NO: 16361 - protein, 9 aa, synthetic construct
  source 1..9: note = Seed: LVVVGARGV (KRAS G12R)
FVVAGDRGM

SEQ ID NO: 16362 - protein, 9 aa, synthetic construct
  source 1..9: note = Seed: LVVVGARGV (KRAS G12R)
FVVAGDRGT

SEQ ID NO: 16363 - protein, 9 aa, synthetic construct
  source 1..9: note = Seed: LVVVGARGV (KRAS G12R)
FVVAGDRGV

SEQ ID NO: 16364 - protein, 9 aa, synthetic construct
  source 1..9: note = Seed: LVVVGARGV (KRAS G12R)
FVVAGERGA

SEQ ID NO: 16365 - protein, 9 aa, synthetic construct
  source 1..9: note = Seed: LVVVGARGV (KRAS G12R)
FVVAGERGI

SEQ ID NO: 16366 - protein, 9 aa, synthetic construct
  source 1..9: note = Seed: LVVVGARGV (KRAS G12R)
FVVAGERGL

SEQ ID NO: 16367 - protein, 9 aa, synthetic construct
  source 1..9: note = Seed: LVVVGARGV (KRAS G12R)
FVVAGERGM

SEQ ID NO: 16368 - protein, 9 aa, synthetic construct
  source 1..9: note = Seed: LVVVGARGV (KRAS G12R)
FVVAGERGV

SEQ ID NO: 16369 - protein, 9 aa, synthetic construct
  source 1..9: note = Seed: LVVVGARGV (KRAS G12R)
FVVAGFRGA

SEQ ID NO: 16370 - protein, 9 aa, synthetic construct
  source 1..9: note = Seed: LVVVGARGV (KRAS G12R)
FVVAGFRGF

SEQ ID NO: 16371 - protein, 9 aa, synthetic construct
  source 1..9: note = Seed: LVVVGARGV (KRAS G12R)
FVVAGFRGI

SEQ ID NO: 16372 - protein, 9 aa, synthetic construct
  source 1..9: note = Seed: LVVVGARGV (KRAS G12R)
FVVAGFRGL

SEQ ID NO: 16373 - protein, 9 aa, synthetic construct
  source 1..9: note = Seed: LVVVGARGV (KRAS G12R)
FVVAGFRGM

SEQ ID NO: 16374 - protein, 9 aa, synthetic construct
  source 1..9: note = Seed: LVVVGARGV (KRAS G12R)
FVVAGFRGN

SEQ ID NO: 16375 - protein, 9 aa, synthetic construct
  source 1..9: note = Seed: LVVVGARGV (KRAS G12R)
FVVAGFRGS

SEQ ID NO: 16376 - protein, 9 aa, synthetic construct
  source 1..9: note = Seed: LVVVGARGV (KRAS G12R)
FVVAGFRGT

SEQ ID NO: 16377 - protein, 9 aa, synthetic construct
  source 1..9: note = Seed: LVVVGARGV (KRAS G12R)
FVVAGFRGV

SEQ ID NO: 16378 - protein, 9 aa, synthetic construct
  source 1..9: note = Seed: LVVVGARGV (KRAS G12R)
FVVAGFRGY

SEQ ID NO: 16379 - protein, 9 aa, synthetic construct
  source 1..9: note = Seed: LVVVGARGV (KRAS G12R)
FVVAGGRGA

SEQ ID NO: 16380 - protein, 9 aa, synthetic construct
  source 1..9: note = Seed: LVVVGARGV (KRAS G12R)
FVVAGGRGC

SEQ ID NO: 16381 - protein, 9 aa, synthetic construct
  source 1..9: note = Seed: LVVVGARGV (KRAS G12R)
FVVAGGRGD

SEQ ID NO: 16382 - protein, 9 aa, synthetic construct
  source 1..9: note = Seed: LVVVGARGV (KRAS G12R)
FVVAGGRGE

SEQ ID NO: 16383 - protein, 9 aa, synthetic construct
  source 1..9: note = Seed: LVVVGARGV (KRAS G12R)
FVVAGGRGF

SEQ ID NO: 16384 - protein, 9 aa, synthetic construct
  source 1..9: note = Seed: LVVVGARGV (KRAS G12R)
FVVAGGRGG

SEQ ID NO: 16385 - protein, 9 aa, synthetic construct
  source 1..9: note = Seed: LVVVGARGV (KRAS G12R)
FVVAGGRGH

SEQ ID NO: 16386 - protein, 9 aa, synthetic construct
  source 1..9: note = Seed: LVVVGARGV (KRAS G12R)
FVVAGGRGK

SEQ ID NO: 16387 - protein, 9 aa, synthetic construct
  source 1..9: note = Seed: LVVVGARGV (KRAS G12R)
FVVAGGRGM

SEQ ID NO: 16388 - protein, 9 aa, synthetic construct
  source 1..9: note = Seed: LVVVGARGV (KRAS G12R)
FVVAGGRGN

SEQ ID NO: 16389 - protein, 9 aa, synthetic construct
  source 1..9: note = Seed: LVVVGARGV (KRAS G12R)
FVVAGGRGP

SEQ ID NO: 16390 - protein, 9 aa, synthetic construct
  source 1..9: note = Seed: LVVVGARGV (KRAS G12R)
FVVAGGRGQ

SEQ ID NO: 16391 - protein, 9 aa, synthetic construct
  source 1..9: note = Seed: LVVVGARGV (KRAS G12R)
FVVAGGRGR

SEQ ID NO: 16392 - protein, 9 aa, synthetic construct
  source 1..9: note = Seed: LVVVGARGV (KRAS G12R)
FVVAGGRGS

SEQ ID NO: 16393 - protein, 9 aa, synthetic construct
  source 1..9: note = Seed: LVVVGARGV (KRAS G12R)
FVVAGGRGT

SEQ ID NO: 16394 - protein, 9 aa, synthetic construct
  source 1..9: note = Seed: LVVVGARGV (KRAS G12R)
FVVAGGRGW

SEQ ID NO: 16395 - protein, 9 aa, synthetic construct
  source 1..9: note = Seed: LVVVGARGV (KRAS G12R)
FVVAGGRGY

SEQ ID NO: 16396 - protein, 9 aa, synthetic construct
  source 1..9: note = Seed: LVVVGARGV (KRAS G12R)
FVVAGHRGA

SEQ ID NO: 16397 - protein, 9 aa, synthetic construct
  source 1..9: note = Seed: LVVVGARGV (KRAS G12R)
FVVAGHRGF

SEQ ID NO: 16398 - protein, 9 aa, synthetic construct
  source 1..9: note = Seed: LVVVGARGV (KRAS G12R)
FVVAGHRGH

SEQ ID NO: 16399 - protein, 9 aa, synthetic construct
  source 1..9: note = Seed: LVVVGARGV (KRAS G12R)
FVVAGHRGI

SEQ ID NO: 16400 - protein, 9 aa, synthetic construct
  source 1..9: note = Seed: LVVVGARGV (KRAS G12R)
FVVAGHRGK

SEQ ID NO: 16401 - protein, 9 aa, synthetic construct
  source 1..9: note = Seed: LVVVGARGV (KRAS G12R)
FVVAGHRGL

SEQ ID NO: 16402 - protein, 9 aa, synthetic construct
  source 1..9: note = Seed: LVVVGARGV (KRAS G12R)
FVVAGHRGM

SEQ ID NO: 16403 - protein, 9 aa, synthetic construct
  source 1..9: note = Seed: LVVVGARGV (KRAS G12R)
FVVAGHRGQ

SEQ ID NO: 16404 - protein, 9 aa, synthetic construct
  source 1..9: note = Seed: LVVVGARGV (KRAS G12R)
FVVAGHRGR

SEQ ID NO: 16405 - protein, 9 aa, synthetic construct
  source 1..9: note = Seed: LVVVGARGV (KRAS G12R)
FVVAGHRGS

SEQ ID NO: 16406 - protein, 9 aa, synthetic construct
  source 1..9: note = Seed: LVVVGARGV (KRAS G12R)
FVVAGHRGT

SEQ ID NO: 16407 - protein, 9 aa, synthetic construct
  source 1..9: note = Seed: LVVVGARGV (KRAS G12R)
FVVAGHRGV

SEQ ID NO: 16408 - protein, 9 aa, synthetic construct
  source 1..9: note = Seed: LVVVGARGV (KRAS G12R)
FVVAGHRGW

SEQ ID NO: 16409 - protein, 9 aa, synthetic construct
  source 1..9: note = Seed: LVVVGARGV (KRAS G12R)
FVVAGHRGY

SEQ ID NO: 16410 - protein, 9 aa, synthetic construct
  source 1..9: note = Seed: LVVVGARGV (KRAS G12R)
FVVAGIRGA

SEQ ID NO: 16411 - protein, 9 aa, synthetic construct
  source 1..9: note = Seed: LVVVGARGV (KRAS G12R)
FVVAGIRGC

SEQ ID NO: 16412 - protein, 9 aa, synthetic construct
  source 1..9: note = Seed: LVVVGARGV (KRAS G12R)
FVVAGIRGD

SEQ ID NO: 16413 - protein, 9 aa, synthetic construct
  source 1..9: note = Seed: LVVVGARGV (KRAS G12R)
FVVAGIRGE

SEQ ID NO: 16414 - protein, 9 aa, synthetic construct
  source 1..9: note = Seed: LVVVGARGV (KRAS G12R)
FVVAGIRGF

SEQ ID NO: 16415 - protein, 9 aa, synthetic construct
  source 1..9: note = Seed: LVVVGARGV (KRAS G12R)
FVVAGIRGG

SEQ ID NO: 16416 - protein, 9 aa, synthetic construct
  source 1..9: note = Seed: LVVVGARGV (KRAS G12R)
FVVAGIRGH

SEQ ID NO: 16417 - protein, 9 aa, synthetic construct
  source 1..9: note = Seed: LVVVGARGV (KRAS G12R)
FVVAGIRGI

SEQ ID NO: 16418 - protein, 9 aa, synthetic construct
  source 1..9: note = Seed: LVVVGARGV (KRAS G12R)
FVVAGIRGK

SEQ ID NO: 16419 - protein, 9 aa, synthetic construct
  source 1..9: note = Seed: LVVVGARGV (KRAS G12R)
FVVAGIRGL

SEQ ID NO: 16420 - protein, 9 aa, synthetic construct
  source 1..9: note = Seed: LVVVGARGV (KRAS G12R)
FVVAGIRGM

SEQ ID NO: 16421 - protein, 9 aa, synthetic construct
  source 1..9: note = Seed: LVVVGARGV (KRAS G12R)
FVVAGIRGN

SEQ ID NO: 16422 - protein, 9 aa, synthetic construct
  source 1..9: note = Seed: LVVVGARGV (KRAS G12R)
FVVAGIRGP

SEQ ID NO: 16423 - protein, 9 aa, synthetic construct
  source 1..9: note = Seed: LVVVGARGV (KRAS G12R)
FVVAGIRGQ

SEQ ID NO: 16424 - protein, 9 aa, synthetic construct
  source 1..9: note = Seed: LVVVGARGV (KRAS G12R)
FVVAGIRGR

SEQ ID NO: 16425 - protein, 9 aa, synthetic construct
  source 1..9: note = Seed: LVVVGARGV (KRAS G12R)
FVVAGIRGS

SEQ ID NO: 16426 - protein, 9 aa, synthetic construct
  source 1..9: note = Seed: LVVVGARGV (KRAS G12R)
FVVAGIRGT

SEQ ID NO: 16427 - protein, 9 aa, synthetic construct
  source 1..9: note = Seed: LVVVGARGV (KRAS G12R)
FVVAGIRGV

SEQ ID NO: 16428 - protein, 9 aa, synthetic construct
  source 1..9: note = Seed: LVVVGARGV (KRAS G12R)
FVVAGIRGW

SEQ ID NO: 16429 - protein, 9 aa, synthetic construct
  source 1..9: note = Seed: LVVVGARGV (KRAS G12R)
FVVAGIRGY

SEQ ID NO: 16430 - protein, 9 aa, synthetic construct
  source 1..9: note = Seed: LVVVGARGV (KRAS G12R)
FVVAGKRGA

SEQ ID NO: 16431 - protein, 9 aa, synthetic construct
  source 1..9: note = Seed: LVVVGARGV (KRAS G12R)
FVVAGKRGC

SEQ ID NO: 16432 - protein, 9 aa, synthetic construct
  source 1..9: note = Seed: LVVVGARGV (KRAS G12R)
FVVAGKRGF

SEQ ID NO: 16433 - protein, 9 aa, synthetic construct
  source 1..9: note = Seed: LVVVGARGV (KRAS G12R)
FVVAGKRGG

SEQ ID NO: 16434 - protein, 9 aa, synthetic construct
  source 1..9: note = Seed: LVVVGARGV (KRAS G12R)
FVVAGKRGH

SEQ ID NO: 16435 - protein, 9 aa, synthetic construct
  source 1..9: note = Seed: LVVVGARGV (KRAS G12R)
FVVAGKRGI

SEQ ID NO: 16436 - protein, 9 aa, synthetic construct
  source 1..9: note = Seed: LVVVGARGV (KRAS G12R)
FVVAGKRGK

SEQ ID NO: 16437 - protein, 9 aa, synthetic construct
  source 1..9: note = Seed: LVVVGARGV (KRAS G12R)
FVVAGKRGL

SEQ ID NO: 16438 - protein, 9 aa, synthetic construct
  source 1..9: note = Seed: LVVVGARGV (KRAS G12R)
FVVAGKRGM

SEQ ID NO: 16439 - protein, 9 aa, synthetic construct
  source 1..9: note = Seed: LVVVGARGV (KRAS G12R)
FVVAGKRGN

SEQ ID NO: 16440 - protein, 9 aa, synthetic construct
  source 1..9: note = Seed: LVVVGARGV (KRAS G12R)
FVVAGKRGP

SEQ ID NO: 16441 - protein, 9 aa, synthetic construct
  source 1..9: note = Seed: LVVVGARGV (KRAS G12R)
FVVAGKRGQ

SEQ ID NO: 16442 - protein, 9 aa, synthetic construct
  source 1..9: note = Seed: LVVVGARGV (KRAS G12R)
FVVAGKRGR

SEQ ID NO: 16443 - protein, 9 aa, synthetic construct
  source 1..9: note = Seed: LVVVGARGV (KRAS G12R)
FVVAGKRGS

SEQ ID NO: 16444 - protein, 9 aa, synthetic construct
  source 1..9: note = Seed: LVVVGARGV (KRAS G12R)
FVVAGKRGT

SEQ ID NO: 16445 - protein, 9 aa, synthetic construct
  source 1..9: note = Seed: LVVVGARGV (KRAS G12R)
FVVAGKRGV

SEQ ID NO: 16446 - protein, 9 aa, synthetic construct
  source 1..9: note = Seed: LVVVGARGV (KRAS G12R)
FVVAGKRGW

SEQ ID NO: 16447 - protein, 9 aa, synthetic construct
  source 1..9: note = Seed: LVVVGARGV (KRAS G12R)
FVVAGKRGY

SEQ ID NO: 16448 - protein, 9 aa, synthetic construct
  source 1..9: note = Seed: LVVVGARGV (KRAS G12R)
FVVAGLRGA

SEQ ID NO: 16449 - protein, 9 aa, synthetic construct
  source 1..9: note = Seed: LVVVGARGV (KRAS G12R)
FVVAGLRGC

SEQ ID NO: 16450 - protein, 9 aa, synthetic construct
  source 1..9: note = Seed: LVVVGARGV (KRAS G12R)
FVVAGLRGD

SEQ ID NO: 16451 - protein, 9 aa, synthetic construct
  source 1..9: note = Seed: LVVVGARGV (KRAS G12R)
FVVAGLRGE

SEQ ID NO: 16452 - protein, 9 aa, synthetic construct
  source 1..9: note = Seed: LVVVGARGV (KRAS G12R)
FVVAGLRGF

SEQ ID NO: 16453 - protein, 9 aa, synthetic construct
  source 1..9: note = Seed: LVVVGARGV (KRAS G12R)
FVVAGLRGG

SEQ ID NO: 16454 - protein, 9 aa, synthetic construct
  source 1..9: note = Seed: LVVVGARGV (KRAS G12R)
FVVAGLRGH

SEQ ID NO: 16455 - protein, 9 aa, synthetic construct
  source 1..9: note = Seed: LVVVGARGV (KRAS G12R)
FVVAGLRGI

SEQ ID NO: 16456 - protein, 9 aa, synthetic construct
  source 1..9: note = Seed: LVVVGARGV (KRAS G12R)
FVVAGLRGL

SEQ ID NO: 16457 - protein, 9 aa, synthetic construct
  source 1..9: note = Seed: LVVVGARGV (KRAS G12R)
FVVAGLRGM

SEQ ID NO: 16458 - protein, 9 aa, synthetic construct
  source 1..9: note = Seed: LVVVGARGV (KRAS G12R)
FVVAGLRGN

SEQ ID NO: 16459 - protein, 9 aa, synthetic construct
  source 1..9: note = Seed: LVVVGARGV (KRAS G12R)
FVVAGLRGQ

SEQ ID NO: 16460 - protein, 9 aa, synthetic construct
  source 1..9: note = Seed: LVVVGARGV (KRAS G12R)
FVVAGLRGR

SEQ ID NO: 16461 - protein, 9 aa, synthetic construct
  source 1..9: note = Seed: LVVVGARGV (KRAS G12R)
FVVAGLRGS

SEQ ID NO: 16462 - protein, 9 aa, synthetic construct
  source 1..9: note = Seed: LVVVGARGV (KRAS G12R)
FVVAGLRGT

SEQ ID NO: 16463 - protein, 9 aa, synthetic construct
  source 1..9: note = Seed: LVVVGARGV (KRAS G12R)
FVVAGLRGV

SEQ ID NO: 16464 - protein, 9 aa, synthetic construct
  source 1..9: note = Seed: LVVVGARGV (KRAS G12R)
FVVAGLRGY

SEQ ID NO: 16465 - protein, 9 aa, synthetic construct
  source 1..9: note = Seed: LVVVGARGV (KRAS G12R)
FVVAGMRGA

SEQ ID NO: 16466 - protein, 9 aa, synthetic construct
  source 1..9: note = Seed: LVVVGARGV (KRAS G12R)
FVVAGMRGC

SEQ ID NO: 16467 - protein, 9 aa, synthetic construct
  source 1..9: note = Seed: LVVVGARGV (KRAS G12R)
FVVAGMRGD

SEQ ID NO: 16468 - protein, 9 aa, synthetic construct
  source 1..9: note = Seed: LVVVGARGV (KRAS G12R)
FVVAGMRGE

SEQ ID NO: 16469 - protein, 9 aa, synthetic construct
  source 1..9: note = Seed: LVVVGARGV (KRAS G12R)
FVVAGMRGF

SEQ ID NO: 16470 - protein, 9 aa, synthetic construct
  source 1..9: note = Seed: LVVVGARGV (KRAS G12R)
FVVAGMRGG

SEQ ID NO: 16471 - protein, 9 aa, synthetic construct
  source 1..9: note = Seed: LVVVGARGV (KRAS G12R)
FVVAGMRGH

SEQ ID NO: 16472 - protein, 9 aa, synthetic construct
  source 1..9: note = Seed: LVVVGARGV (KRAS G12R)
FVVAGMRGI

SEQ ID NO: 16473 - protein, 9 aa, synthetic construct
  source 1..9: note = Seed: LVVVGARGV (KRAS G12R)
FVVAGMRGL

SEQ ID NO: 16474 - protein, 9 aa, synthetic construct
  source 1..9: note = Seed: LVVVGARGV (KRAS G12R)
FVVAGMRGM

SEQ ID NO: 16475 - protein, 9 aa, synthetic construct
  source 1..9: note = Seed: LVVVGARGV (KRAS G12R)
FVVAGMRGN

SEQ ID NO: 16476 - protein, 9 aa, synthetic construct
  source 1..9: note = Seed: LVVVGARGV (KRAS G12R)
FVVAGMRGQ

SEQ ID NO: 16477 - protein, 9 aa, synthetic construct
  source 1..9: note = Seed: LVVVGARGV (KRAS G12R)
FVVAGMRGR

SEQ ID NO: 16478 - protein, 9 aa, synthetic construct
  source 1..9: note = Seed: LVVVGARGV (KRAS G12R)
FVVAGMRGS

SEQ ID NO: 16479 - protein, 9 aa, synthetic construct
  source 1..9: note = Seed: LVVVGARGV (KRAS G12R)
FVVAGMRGT

SEQ ID NO: 16480 - protein, 9 aa, synthetic construct
  source 1..9: note = Seed: LVVVGARGV (KRAS G12R)
FVVAGMRGV

SEQ ID NO: 16481 - protein, 9 aa, synthetic construct
  source 1..9: note = Seed: LVVVGARGV (KRAS G12R)
FVVAGMRGW

SEQ ID NO: 16482 - protein, 9 aa, synthetic construct
  source 1..9: note = Seed: LVVVGARGV (KRAS G12R)
FVVAGMRGY

SEQ ID NO: 16483 - protein, 9 aa, synthetic construct
  source 1..9: note = Seed: LVVVGARGV (KRAS G12R)
FVVAGNRGA

SEQ ID NO: 16484 - protein, 9 aa, synthetic construct
  source 1..9: note = Seed: LVVVGARGV (KRAS G12R)
FVVAGNRGC

SEQ ID NO: 16485 - protein, 9 aa, synthetic construct
  source 1..9: note = Seed: LVVVGARGV (KRAS G12R)
FVVAGNRGD

SEQ ID NO: 16486 - protein, 9 aa, synthetic construct
  source 1..9: note = Seed: LVVVGARGV (KRAS G12R)
FVVAGNRGE

SEQ ID NO: 16487 - protein, 9 aa, synthetic construct
  source 1..9: note = Seed: LVVVGARGV (KRAS G12R)
FVVAGNRGF

SEQ ID NO: 16488 - protein, 9 aa, synthetic construct
  source 1..9: note = Seed: LVVVGARGV (KRAS G12R)
FVVAGNRGG

SEQ ID NO: 16489 - protein, 9 aa, synthetic construct
  source 1..9: note = Seed: LVVVGARGV (KRAS G12R)
FVVAGNRGH

SEQ ID NO: 16490 - protein, 9 aa, synthetic construct
  source 1..9: note = Seed: LVVVGARGV (KRAS G12R)
FVVAGNRGI

SEQ ID NO: 16491 - protein, 9 aa, synthetic construct
  source 1..9: note = Seed: LVVVGARGV (KRAS G12R)
FVVAGNRGK

SEQ ID NO: 16492 - protein, 9 aa, synthetic construct
  source 1..9: note = Seed: LVVVGARGV (KRAS G12R)
FVVAGNRGL

SEQ ID NO: 16493 - protein, 9 aa, synthetic construct
  source 1..9: note = Seed: LVVVGARGV (KRAS G12R)
FVVAGNRGM

SEQ ID NO: 16494 - protein, 9 aa, synthetic construct
  source 1..9: note = Seed: LVVVGARGV (KRAS G12R)
FVVAGNRGN

SEQ ID NO: 16495 - protein, 9 aa, synthetic construct
  source 1..9: note = Seed: LVVVGARGV (KRAS G12R)
FVVAGNRGP

SEQ ID NO: 16496 - protein, 9 aa, synthetic construct
  source 1..9: note = Seed: LVVVGARGV (KRAS G12R)
FVVAGNRGQ

SEQ ID NO: 16497 - protein, 9 aa, synthetic construct
  source 1..9: note = Seed: LVVVGARGV (KRAS G12R)
FVVAGNRGR

SEQ ID NO: 16498 - protein, 9 aa, synthetic construct
  source 1..9: note = Seed: LVVVGARGV (KRAS G12R)
FVVAGNRGS

SEQ ID NO: 16499 - protein, 9 aa, synthetic construct
  source 1..9: note = Seed: LVVVGARGV (KRAS G12R)
FVVAGNRGT

SEQ ID NO: 16500 - protein, 9 aa, synthetic construct
  source 1..9: note = Seed: LVVVGARGV (KRAS G12R)
FVVAGNRGV

SEQ ID NO: 16501 - protein, 9 aa, synthetic construct
  source 1..9: note = Seed: LVVVGARGV (KRAS G12R)
FVVAGNRGW

SEQ ID NO: 16502 - protein, 9 aa, synthetic construct
  source 1..9: note = Seed: LVVVGARGV (KRAS G12R)
FVVAGNRGY

SEQ ID NO: 16503 - protein, 9 aa, synthetic construct
  source 1..9: note = Seed: LVVVGARGV (KRAS G12R)
FVVAGPRGA

SEQ ID NO: 16504 - protein, 9 aa, synthetic construct
  source 1..9: note = Seed: LVVVGARGV (KRAS G12R)
FVVAGPRGC

SEQ ID NO: 16505 - protein, 9 aa, synthetic construct
  source 1..9: note = Seed: LVVVGARGV (KRAS G12R)
FVVAGPRGD

SEQ ID NO: 16506 - protein, 9 aa, synthetic construct
  source 1..9: note = Seed: LVVVGARGV (KRAS G12R)
FVVAGPRGE

SEQ ID NO: 16507 - protein, 9 aa, synthetic construct
  source 1..9: note = Seed: LVVVGARGV (KRAS G12R)
FVVAGPRGF

SEQ ID NO: 16508 - protein, 9 aa, synthetic construct
  source 1..9: note = Seed: LVVVGARGV (KRAS G12R)
FVVAGPRGG

SEQ ID NO: 16509 - protein, 9 aa, synthetic construct
  source 1..9: note = Seed: LVVVGARGV (KRAS G12R)
FVVAGPRGH

SEQ ID NO: 16510 - protein, 9 aa, synthetic construct
  source 1..9: note = Seed: LVVVGARGV (KRAS G12R)
FVVAGPRGI

SEQ ID NO: 16511 - protein, 9 aa, synthetic construct
  source 1..9: note = Seed: LVVVGARGV (KRAS G12R)
FVVAGPRGK

SEQ ID NO: 16512 - protein, 9 aa, synthetic construct
  source 1..9: note = Seed: LVVVGARGV (KRAS G12R)
FVVAGPRGL

SEQ ID NO: 16513 - protein, 9 aa, synthetic construct
  source 1..9: note = Seed: LVVVGARGV (KRAS G12R)
FVVAGPRGM

SEQ ID NO: 16514 - protein, 9 aa, synthetic construct
  source 1..9: note = Seed: LVVVGARGV (KRAS G12R)
FVVAGPRGN

SEQ ID NO: 16515 - protein, 9 aa, synthetic construct
  source 1..9: note = Seed: LVVVGARGV (KRAS G12R)
FVVAGPRGP

SEQ ID NO: 16516 - protein, 9 aa, synthetic construct
  source 1..9: note = Seed: LVVVGARGV (KRAS G12R)
FVVAGPRGQ

SEQ ID NO: 16517 - protein, 9 aa, synthetic construct
  source 1..9: note = Seed: LVVVGARGV (KRAS G12R)
FVVAGPRGR

SEQ ID NO: 16518 - protein, 9 aa, synthetic construct
  source 1..9: note = Seed: LVVVGARGV (KRAS G12R)
FVVAGPRGS

SEQ ID NO: 16519 - protein, 9 aa, synthetic construct
  source 1..9: note = Seed: LVVVGARGV (KRAS G12R)
FVVAGPRGT

SEQ ID NO: 16520 - protein, 9 aa, synthetic construct
  source 1..9: note = Seed: LVVVGARGV (KRAS G12R)
FVVAGPRGV

SEQ ID NO: 16521 - protein, 9 aa, synthetic construct
  source 1..9: note = Seed: LVVVGARGV (KRAS G12R)
FVVAGPRGW

SEQ ID NO: 16522 - protein, 9 aa, synthetic construct
  source 1..9: note = Seed: LVVVGARGV (KRAS G12R)
FVVAGPRGY

SEQ ID NO: 16523 - protein, 9 aa, synthetic construct
  source 1..9: note = Seed: LVVVGARGV (KRAS G12R)
FVVAGQRGA

SEQ ID NO: 16524 - protein, 9 aa, synthetic construct
  source 1..9: note = Seed: LVVVGARGV (KRAS G12R)
FVVAGQRGF

SEQ ID NO: 16525 - protein, 9 aa, synthetic construct
  source 1..9: note = Seed: LVVVGARGV (KRAS G12R)
FVVAGQRGI

SEQ ID NO: 16526 - protein, 9 aa, synthetic construct
  source 1..9: note = Seed: LVVVGARGV (KRAS G12R)
FVVAGQRGL

SEQ ID NO: 16527 - protein, 9 aa, synthetic construct
  source 1..9: note = Seed: LVVVGARGV (KRAS G12R)
FVVAGQRGM

SEQ ID NO: 16528 - protein, 9 aa, synthetic construct
  source 1..9: note = Seed: LVVVGARGV (KRAS G12R)
FVVAGQRGN

SEQ ID NO: 16529 - protein, 9 aa, synthetic construct
  source 1..9: note = Seed: LVVVGARGV (KRAS G12R)
FVVAGQRGR

SEQ ID NO: 16530 - protein, 9 aa, synthetic construct
  source 1..9: note = Seed: LVVVGARGV (KRAS G12R)
FVVAGQRGS

SEQ ID NO: 16531 - protein, 9 aa, synthetic construct
  source 1..9: note = Seed: LVVVGARGV (KRAS G12R)
FVVAGQRGT

SEQ ID NO: 16532 - protein, 9 aa, synthetic construct
  source 1..9: note = Seed: LVVVGARGV (KRAS G12R)
FVVAGQRGV

SEQ ID NO: 16533 - protein, 9 aa, synthetic construct
  source 1..9: note = Seed: LVVVGARGV (KRAS G12R)
FVVAGRRGA

SEQ ID NO: 16534 - protein, 9 aa, synthetic construct
  source 1..9: note = Seed: LVVVGARGV (KRAS G12R)
FVVAGRRGC

SEQ ID NO: 16535 - protein, 9 aa, synthetic construct
  source 1..9: note = Seed: LVVVGARGV (KRAS G12R)
FVVAGRRGD

SEQ ID NO: 16536 - protein, 9 aa, synthetic construct
  source 1..9: note = Seed: LVVVGARGV (KRAS G12R)
FVVAGRRGE

SEQ ID NO: 16537 - protein, 9 aa, synthetic construct
  source 1..9: note = Seed: LVVVGARGV (KRAS G12R)
FVVAGRRGF

SEQ ID NO: 16538 - protein, 9 aa, synthetic construct
  source 1..9: note = Seed: LVVVGARGV (KRAS G12R)
FVVAGRRGG

SEQ ID NO: 16539 - protein, 9 aa, synthetic construct
  source 1..9: note = Seed: LVVVGARGV (KRAS G12R)
FVVAGRRGH

SEQ ID NO: 16540 - protein, 9 aa, synthetic construct
  source 1..9: note = Seed: LVVVGARGV (KRAS G12R)
FVVAGRRGI

SEQ ID NO: 16541 - protein, 9 aa, synthetic construct
  source 1..9: note = Seed: LVVVGARGV (KRAS G12R)
FVVAGRRGK

SEQ ID NO: 16542 - protein, 9 aa, synthetic construct
  source 1..9: note = Seed: LVVVGARGV (KRAS G12R)
FVVAGRRGL

SEQ ID NO: 16543 - protein, 9 aa, synthetic construct
  source 1..9: note = Seed: LVVVGARGV (KRAS G12R)
FVVAGRRGM

SEQ ID NO: 16544 - protein, 9 aa, synthetic construct
  source 1..9: note = Seed: LVVVGARGV (KRAS G12R)
FVVAGRRGN

SEQ ID NO: 16545 - protein, 9 aa, synthetic construct
  source 1..9: note = Seed: LVVVGARGV (KRAS G12R)
FVVAGRRGP

SEQ ID NO: 16546 - protein, 9 aa, synthetic construct
  source 1..9: note = Seed: LVVVGARGV (KRAS G12R)
FVVAGRRGQ

SEQ ID NO: 16547 - protein, 9 aa, synthetic construct
  source 1..9: note = Seed: LVVVGARGV (KRAS G12R)
FVVAGRRGR

SEQ ID NO: 16548 - protein, 9 aa, synthetic construct
  source 1..9: note = Seed: LVVVGARGV (KRAS G12R)
FVVAGRRGS

SEQ ID NO: 16549 - protein, 9 aa, synthetic construct
  source 1..9: note = Seed: LVVVGARGV (KRAS G12R)
FVVAGRRGT

SEQ ID NO: 16550 - protein, 9 aa, synthetic construct
  source 1..9: note = Seed: LVVVGARGV (KRAS G12R)
FVVAGRRGV

SEQ ID NO: 16551 - protein, 9 aa, synthetic construct
  source 1..9: note = Seed: LVVVGARGV (KRAS G12R)
FVVAGRRGW

SEQ ID NO: 16552 - protein, 9 aa, synthetic construct
  source 1..9: note = Seed: LVVVGARGV (KRAS G12R)
FVVAGRRGY

SEQ ID NO: 16553 - protein, 9 aa, synthetic construct
  source 1..9: note = Seed: LVVVGARGV (KRAS G12R)
FVVAGSRGA

SEQ ID NO: 16554 - protein, 9 aa, synthetic construct
  source 1..9: note = Seed: LVVVGARGV (KRAS G12R)
FVVAGSRGC

SEQ ID NO: 16555 - protein, 9 aa, synthetic construct
  source 1..9: note = Seed: LVVVGARGV (KRAS G12R)
FVVAGSRGD

SEQ ID NO: 16556 - protein, 9 aa, synthetic construct
  source 1..9: note = Seed: LVVVGARGV (KRAS G12R)
FVVAGSRGE

SEQ ID NO: 16557 - protein, 9 aa, synthetic construct
  source 1..9: note = Seed: LVVVGARGV (KRAS G12R)
FVVAGSRGF

SEQ ID NO: 16558 - protein, 9 aa, synthetic construct
  source 1..9: note = Seed: LVVVGARGV (KRAS G12R)
FVVAGSRGG

SEQ ID NO: 16559 - protein, 9 aa, synthetic construct
  source 1..9: note = Seed: LVVVGARGV (KRAS G12R)
FVVAGSRGH

SEQ ID NO: 16560 - protein, 9 aa, synthetic construct
  source 1..9: note = Seed: LVVVGARGV (KRAS G12R)
FVVAGSRGK

SEQ ID NO: 16561 - protein, 9 aa, synthetic construct
  source 1..9: note = Seed: LVVVGARGV (KRAS G12R)
FVVAGSRGM

SEQ ID NO: 16562 - protein, 9 aa, synthetic construct
  source 1..9: note = Seed: LVVVGARGV (KRAS G12R)
FVVAGSRGN

SEQ ID NO: 16563 - protein, 9 aa, synthetic construct
  source 1..9: note = Seed: LVVVGARGV (KRAS G12R)
FVVAGSRGP

SEQ ID NO: 16564 - protein, 9 aa, synthetic construct
  source 1..9: note = Seed: LVVVGARGV (KRAS G12R)
FVVAGSRGQ

SEQ ID NO: 16565 - protein, 9 aa, synthetic construct
  source 1..9: note = Seed: LVVVGARGV (KRAS G12R)
FVVAGSRGR

SEQ ID NO: 16566 - protein, 9 aa, synthetic construct
  source 1..9: note = Seed: LVVVGARGV (KRAS G12R)
FVVAGSRGS

SEQ ID NO: 16567 - protein, 9 aa, synthetic construct
  source 1..9: note = Seed: LVVVGARGV (KRAS G12R)
FVVAGSRGT

SEQ ID NO: 16568 - protein, 9 aa, synthetic construct
  source 1..9: note = Seed: LVVVGARGV (KRAS G12R)
FVVAGSRGW

SEQ ID NO: 16569 - protein, 9 aa, synthetic construct
  source 1..9: note = Seed: LVVVGARGV (KRAS G12R)
FVVAGSRGY

SEQ ID NO: 16570 - protein, 9 aa, synthetic construct
  source 1..9: note = Seed: LVVVGARGV (KRAS G12R)
FVVAGTRGA

SEQ ID NO: 16571 - protein, 9 aa, synthetic construct
  source 1..9: note = Seed: LVVVGARGV (KRAS G12R)
FVVAGTRGC

SEQ ID NO: 16572 - protein, 9 aa, synthetic construct
  source 1..9: note = Seed: LVVVGARGV (KRAS G12R)
FVVAGTRGD

SEQ ID NO: 16573 - protein, 9 aa, synthetic construct
  source 1..9: note = Seed: LVVVGARGV (KRAS G12R)
FVVAGTRGE

SEQ ID NO: 16574 - protein, 9 aa, synthetic construct
  source 1..9: note = Seed: LVVVGARGV (KRAS G12R)
FVVAGTRGF

SEQ ID NO: 16575 - protein, 9 aa, synthetic construct
  source 1..9: note = Seed: LVVVGARGV (KRAS G12R)
FVVAGTRGG

SEQ ID NO: 16576 - protein, 9 aa, synthetic construct
  source 1..9: note = Seed: LVVVGARGV (KRAS G12R)
FVVAGTRGH

SEQ ID NO: 16577 - protein, 9 aa, synthetic construct
  source 1..9: note = Seed: LVVVGARGV (KRAS G12R)
FVVAGTRGI

SEQ ID NO: 16578 - protein, 9 aa, synthetic construct
  source 1..9: note = Seed: LVVVGARGV (KRAS G12R)
FVVAGTRGK

SEQ ID NO: 16579 - protein, 9 aa, synthetic construct
  source 1..9: note = Seed: LVVVGARGV (KRAS G12R)
FVVAGTRGL

SEQ ID NO: 16580 - protein, 9 aa, synthetic construct
  source 1..9: note = Seed: LVVVGARGV (KRAS G12R)
FVVAGTRGM

SEQ ID NO: 16581 - protein, 9 aa, synthetic construct
  source 1..9: note = Seed: LVVVGARGV (KRAS G12R)
FVVAGTRGN

SEQ ID NO: 16582 - protein, 9 aa, synthetic construct
  source 1..9: note = Seed: LVVVGARGV (KRAS G12R)
FVVAGTRGP

SEQ ID NO: 16583 - protein, 9 aa, synthetic construct
  source 1..9: note = Seed: LVVVGARGV (KRAS G12R)
FVVAGTRGQ

SEQ ID NO: 16584 - protein, 9 aa, synthetic construct
  source 1..9: note = Seed: LVVVGARGV (KRAS G12R)
FVVAGTRGR

SEQ ID NO: 16585 - protein, 9 aa, synthetic construct
  source 1..9: note = Seed: LVVVGARGV (KRAS G12R)
FVVAGTRGS

SEQ ID NO: 16586 - protein, 9 aa, synthetic construct
  source 1..9: note = Seed: LVVVGARGV (KRAS G12R)
FVVAGTRGT

SEQ ID NO: 16587 - protein, 9 aa, synthetic construct
  source 1..9: note = Seed: LVVVGARGV (KRAS G12R)
FVVAGTRGV

SEQ ID NO: 16588 - protein, 9 aa, synthetic construct
  source 1..9: note = Seed: LVVVGARGV (KRAS G12R)
FVVAGTRGW

SEQ ID NO: 16589 - protein, 9 aa, synthetic construct
  source 1..9: note = Seed: LVVVGARGV (KRAS G12R)
FVVAGTRGY

SEQ ID NO: 16590 - protein, 9 aa, synthetic construct
  source 1..9: note = Seed: LVVVGARGV (KRAS G12R)
FVVAGVRGA

SEQ ID NO: 16591 - protein, 9 aa, synthetic construct
  source 1..9: note = Seed: LVVVGARGV (KRAS G12R)
FVVAGVRGC

SEQ ID NO: 16592 - protein, 9 aa, synthetic construct
  source 1..9: note = Seed: LVVVGARGV (KRAS G12R)
FVVAGVRGD

SEQ ID NO: 16593 - protein, 9 aa, synthetic construct
  source 1..9: note = Seed: LVVVGARGV (KRAS G12R)
FVVAGVRGE

SEQ ID NO: 16594 - protein, 9 aa, synthetic construct
  source 1..9: note = Seed: LVVVGARGV (KRAS G12R)
FVVAGVRGF

SEQ ID NO: 16595 - protein, 9 aa, synthetic construct
  source 1..9: note = Seed: LVVVGARGV (KRAS G12R)
FVVAGVRGG

SEQ ID NO: 16596 - protein, 9 aa, synthetic construct
  source 1..9: note = Seed: LVVVGARGV (KRAS G12R)
FVVAGVRGH

SEQ ID NO: 16597 - protein, 9 aa, synthetic construct
  source 1..9: note = Seed: LVVVGARGV (KRAS G12R)
FVVAGVRGI

SEQ ID NO: 16598 - protein, 9 aa, synthetic construct
  source 1..9: note = Seed: LVVVGARGV (KRAS G12R)
FVVAGVRGK

SEQ ID NO: 16599 - protein, 9 aa, synthetic construct
  source 1..9: note = Seed: LVVVGARGV (KRAS G12R)
FVVAGVRGL

SEQ ID NO: 16600 - protein, 9 aa, synthetic construct
  source 1..9: note = Seed: LVVVGARGV (KRAS G12R)
FVVAGVRGM

SEQ ID NO: 16601 - protein, 9 aa, synthetic construct
  source 1..9: note = Seed: LVVVGARGV (KRAS G12R)
FVVAGVRGN

SEQ ID NO: 16602 - protein, 9 aa, synthetic construct
  source 1..9: note = Seed: LVVVGARGV (KRAS G12R)
FVVAGVRGP

SEQ ID NO: 16603 - protein, 9 aa, synthetic construct
  source 1..9: note = Seed: LVVVGARGV (KRAS G12R)
FVVAGVRGQ

SEQ ID NO: 16604 - protein, 9 aa, synthetic construct
  source 1..9: note = Seed: LVVVGARGV (KRAS G12R)
FVVAGVRGR

SEQ ID NO: 16605 - protein, 9 aa, synthetic construct
  source 1..9: note = Seed: LVVVGARGV (KRAS G12R)
FVVAGVRGS

SEQ ID NO: 16606 - protein, 9 aa, synthetic construct
  source 1..9: note = Seed: LVVVGARGV (KRAS G12R)
FVVAGVRGT

SEQ ID NO: 16607 - protein, 9 aa, synthetic construct
  source 1..9: note = Seed: LVVVGARGV (KRAS G12R)
FVVAGVRGV

SEQ ID NO: 16608 - protein, 9 aa, synthetic construct
  source 1..9: note = Seed: LVVVGARGV (KRAS G12R)
FVVAGVRGW

SEQ ID NO: 16609 - protein, 9 aa, synthetic construct
  source 1..9: note = Seed: LVVVGARGV (KRAS G12R)
FVVAGVRGY

SEQ ID NO: 16610 - protein, 9 aa, synthetic construct
  source 1..9: note = Seed: LVVVGARGV (KRAS G12R)
FVVAGWRGA

SEQ ID NO: 16611 - protein, 9 aa, synthetic construct
  source 1..9: note = Seed: LVVVGARGV (KRAS G12R)
FVVAGWRGF

SEQ ID NO: 16612 - protein, 9 aa, synthetic construct
  source 1..9: note = Seed: LVVVGARGV (KRAS G12R)
FVVAGWRGI

SEQ ID NO: 16613 - protein, 9 aa, synthetic construct
  source 1..9: note = Seed: LVVVGARGV (KRAS G12R)
FVVAGWRGL

SEQ ID NO: 16614 - protein, 9 aa, synthetic construct
  source 1..9: note = Seed: LVVVGARGV (KRAS G12R)
FVVAGWRGM

SEQ ID NO: 16615 - protein, 9 aa, synthetic construct
  source 1..9: note = Seed: LVVVGARGV (KRAS G12R)
FVVAGWRGS

SEQ ID NO: 16616 - protein, 9 aa, synthetic construct
  source 1..9: note = Seed: LVVVGARGV (KRAS G12R)
FVVAGWRGT

SEQ ID NO: 16617 - protein, 9 aa, synthetic construct
  source 1..9: note = Seed: LVVVGARGV (KRAS G12R)
FVVAGWRGV

SEQ ID NO: 16618 - protein, 9 aa, synthetic construct
  source 1..9: note = Seed: LVVVGARGV (KRAS G12R)
FVVAGYRGA

SEQ ID NO: 16619 - protein, 9 aa, synthetic construct
  source 1..9: note = Seed: LVVVGARGV (KRAS G12R)
FVVAGYRGF

SEQ ID NO: 16620 - protein, 9 aa, synthetic construct
  source 1..9: note = Seed: LVVVGARGV (KRAS G12R)
FVVAGYRGI

SEQ ID NO: 16621 - protein, 9 aa, synthetic construct
  source 1..9: note = Seed: LVVVGARGV (KRAS G12R)
FVVAGYRGL

SEQ ID NO: 16622 - protein, 9 aa, synthetic construct
  source 1..9: note = Seed: LVVVGARGV (KRAS G12R)
FVVAGYRGM

SEQ ID NO: 16623 - protein, 9 aa, synthetic construct
  source 1..9: note = Seed: LVVVGARGV (KRAS G12R)
FVVAGYRGR

SEQ ID NO: 16624 - protein, 9 aa, synthetic construct
  source 1..9: note = Seed: LVVVGARGV (KRAS G12R)
FVVAGYRGS

SEQ ID NO: 16625 - protein, 9 aa, synthetic construct
  source 1..9: note = Seed: LVVVGARGV (KRAS G12R)
FVVAGYRGV

SEQ ID NO: 16626 - protein, 9 aa, synthetic construct
  source 1..9: note = Seed: LVVVGARGV (KRAS G12R)
FVVCGARGA

SEQ ID NO: 16627 - protein, 9 aa, synthetic construct
  source 1..9: note = Seed: LVVVGARGV (KRAS G12R)
FVVCGARGC

SEQ ID NO: 16628 - protein, 9 aa, synthetic construct
  source 1..9: note = Seed: LVVVGARGV (KRAS G12R)
FVVCGARGF

SEQ ID NO: 16629 - protein, 9 aa, synthetic construct
  source 1..9: note = Seed: LVVVGARGV (KRAS G12R)
FVVCGARGG

SEQ ID NO: 16630 - protein, 9 aa, synthetic construct
  source 1..9: note = Seed: LVVVGARGV (KRAS G12R)
FVVCGARGI

SEQ ID NO: 16631 - protein, 9 aa, synthetic construct
  source 1..9: note = Seed: LVVVGARGV (KRAS G12R)
FVVCGARGL

SEQ ID NO: 16632 - protein, 9 aa, synthetic construct
  source 1..9: note = Seed: LVVVGARGV (KRAS G12R)
FVVCGARGM

SEQ ID NO: 16633 - protein, 9 aa, synthetic construct
  source 1..9: note = Seed: LVVVGARGV (KRAS G12R)
FVVCGARGN

SEQ ID NO: 16634 - protein, 9 aa, synthetic construct
  source 1..9: note = Seed: LVVVGARGV (KRAS G12R)
FVVCGARGS

SEQ ID NO: 16635 - protein, 9 aa, synthetic construct
  source 1..9: note = Seed: LVVVGARGV (KRAS G12R)
FVVCGARGT

SEQ ID NO: 16636 - protein, 9 aa, synthetic construct
  source 1..9: note = Seed: LVVVGARGV (KRAS G12R)
FVVCGARGV

SEQ ID NO: 16637 - protein, 9 aa, synthetic construct
  source 1..9: note = Seed: LVVVGARGV (KRAS G12R)
FVVCGARGY

SEQ ID NO: 16638 - protein, 9 aa, synthetic construct
  source 1..9: note = Seed: LVVVGARGV (KRAS G12R)
FVVCGFRGL

SEQ ID NO: 16639 - protein, 9 aa, synthetic construct
  source 1..9: note = Seed: LVVVGARGV (KRAS G12R)
FVVCGGRGA

SEQ ID NO: 16640 - protein, 9 aa, synthetic construct
  source 1..9: note = Seed: LVVVGARGV (KRAS G12R)
FVVCGGRGF

SEQ ID NO: 16641 - protein, 9 aa, synthetic construct
  source 1..9: note = Seed: LVVVGARGV (KRAS G12R)
FVVCGGRGI

SEQ ID NO: 16642 - protein, 9 aa, synthetic construct
  source 1..9: note = Seed: LVVVGARGV (KRAS G12R)
FVVCGGRGL

SEQ ID NO: 16643 - protein, 9 aa, synthetic construct
  source 1..9: note = Seed: LVVVGARGV (KRAS G12R)
FVVCGGRGM

SEQ ID NO: 16644 - protein, 9 aa, synthetic construct
  source 1..9: note = Seed: LVVVGARGV (KRAS G12R)
FVVCGGRGS

SEQ ID NO: 16645 - protein, 9 aa, synthetic construct
  source 1..9: note = Seed: LVVVGARGV (KRAS G12R)
FVVCGGRGT

SEQ ID NO: 16646 - protein, 9 aa, synthetic construct
  source 1..9: note = Seed: LVVVGARGV (KRAS G12R)
FVVCGGRGV

SEQ ID NO: 16647 - protein, 9 aa, synthetic construct
  source 1..9: note = Seed: LVVVGARGV (KRAS G12R)
FVVCGIRGA

SEQ ID NO: 16648 - protein, 9 aa, synthetic construct
  source 1..9: note = Seed: LVVVGARGV (KRAS G12R)
FVVCGIRGI

SEQ ID NO: 16649 - protein, 9 aa, synthetic construct
  source 1..9: note = Seed: LVVVGARGV (KRAS G12R)
FVVCGIRGL

SEQ ID NO: 16650 - protein, 9 aa, synthetic construct
  source 1..9: note = Seed: LVVVGARGV (KRAS G12R)
FVVCGIRGR

SEQ ID NO: 16651 - protein, 9 aa, synthetic construct
  source 1..9: note = Seed: LVVVGARGV (KRAS G12R)
FVVCGIRGV

SEQ ID NO: 16652 - protein, 9 aa, synthetic construct
  source 1..9: note = Seed: LVVVGARGV (KRAS G12R)
FVVCGKRGA

SEQ ID NO: 16653 - protein, 9 aa, synthetic construct
  source 1..9: note = Seed: LVVVGARGV (KRAS G12R)
FVVCGKRGH

SEQ ID NO: 16654 - protein, 9 aa, synthetic construct
  source 1..9: note = Seed: LVVVGARGV (KRAS G12R)
FVVCGKRGL

SEQ ID NO: 16655 - protein, 9 aa, synthetic construct
  source 1..9: note = Seed: LVVVGARGV (KRAS G12R)
FVVCGKRGM

SEQ ID NO: 16656 - protein, 9 aa, synthetic construct
  source 1..9: note = Seed: LVVVGARGV (KRAS G12R)
FVVCGKRGR

SEQ ID NO: 16657 - protein, 9 aa, synthetic construct
  source 1..9: note = Seed: LVVVGARGV (KRAS G12R)
FVVCGKRGS

SEQ ID NO: 16658 - protein, 9 aa, synthetic construct
  source 1..9: note = Seed: LVVVGARGV (KRAS G12R)
FVVCGMRGL

SEQ ID NO: 16659 - protein, 9 aa, synthetic construct
  source 1..9: note = Seed: LVVVGARGV (KRAS G12R)
FVVCGNRGA

SEQ ID NO: 16660 - protein, 9 aa, synthetic construct
  source 1..9: note = Seed: LVVVGARGV (KRAS G12R)
FVVCGNRGI

SEQ ID NO: 16661 - protein, 9 aa, synthetic construct
  source 1..9: note = Seed: LVVVGARGV (KRAS G12R)
FVVCGNRGL

SEQ ID NO: 16662 - protein, 9 aa, synthetic construct
  source 1..9: note = Seed: LVVVGARGV (KRAS G12R)
FVVCGNRGM

SEQ ID NO: 16663 - protein, 9 aa, synthetic construct
  source 1..9: note = Seed: LVVVGARGV (KRAS G12R)
FVVCGNRGT

SEQ ID NO: 16664 - protein, 9 aa, synthetic construct
  source 1..9: note = Seed: LVVVGARGV (KRAS G12R)
FVVCGNRGV

SEQ ID NO: 16665 - protein, 9 aa, synthetic construct
  source 1..9: note = Seed: LVVVGARGV (KRAS G12R)
FVVCGPRGA

SEQ ID NO: 16666 - protein, 9 aa, synthetic construct
  source 1..9: note = Seed: LVVVGARGV (KRAS G12R)
FVVCGPRGI

SEQ ID NO: 16667 - protein, 9 aa, synthetic construct
  source 1..9: note = Seed: LVVVGARGV (KRAS G12R)
FVVCGPRGL

SEQ ID NO: 16668 - protein, 9 aa, synthetic construct
  source 1..9: note = Seed: LVVVGARGV (KRAS G12R)
FVVCGPRGM

SEQ ID NO: 16669 - protein, 9 aa, synthetic construct
  source 1..9: note = Seed: LVVVGARGV (KRAS G12R)
FVVCGPRGT

SEQ ID NO: 16670 - protein, 9 aa, synthetic construct
  source 1..9: note = Seed: LVVVGARGV (KRAS G12R)
FVVCGPRGV

SEQ ID NO: 16671 - protein, 9 aa, synthetic construct
  source 1..9: note = Seed: LVVVGARGV (KRAS G12R)
FVVCGRRGA

SEQ ID NO: 16672 - protein, 9 aa, synthetic construct
  source 1..9: note = Seed: LVVVGARGV (KRAS G12R)
FVVCGRRGF

SEQ ID NO: 16673 - protein, 9 aa, synthetic construct
  source 1..9: note = Seed: LVVVGARGV (KRAS G12R)
FVVCGRRGG

SEQ ID NO: 16674 - protein, 9 aa, synthetic construct
  source 1..9: note = Seed: LVVVGARGV (KRAS G12R)
FVVCGRRGH

SEQ ID NO: 16675 - protein, 9 aa, synthetic construct
  source 1..9: note = Seed: LVVVGARGV (KRAS G12R)
FVVCGRRGI

SEQ ID NO: 16676 - protein, 9 aa, synthetic construct
  source 1..9: note = Seed: LVVVGARGV (KRAS G12R)
FVVCGRRGK

SEQ ID NO: 16677 - protein, 9 aa, synthetic construct
  source 1..9: note = Seed: LVVVGARGV (KRAS G12R)
FVVCGRRGL

SEQ ID NO: 16678 - protein, 9 aa, synthetic construct
  source 1..9: note = Seed: LVVVGARGV (KRAS G12R)
FVVCGRRGM

SEQ ID NO: 16679 - protein, 9 aa, synthetic construct
  source 1..9: note = Seed: LVVVGARGV (KRAS G12R)
FVVCGRRGQ

SEQ ID NO: 16680 - protein, 9 aa, synthetic construct
  source 1..9: note = Seed: LVVVGARGV (KRAS G12R)
FVVCGRRGR

SEQ ID NO: 16681 - protein, 9 aa, synthetic construct
  source 1..9: note = Seed: LVVVGARGV (KRAS G12R)
FVVCGRRGS

SEQ ID NO: 16682 - protein, 9 aa, synthetic construct
  source 1..9: note = Seed: LVVVGARGV (KRAS G12R)
FVVCGRRGT

SEQ ID NO: 16683 - protein, 9 aa, synthetic construct
  source 1..9: note = Seed: LVVVGARGV (KRAS G12R)
FVVCGRRGV

SEQ ID NO: 16684 - protein, 9 aa, synthetic construct
  source 1..9: note = Seed: LVVVGARGV (KRAS G12R)
FVVCGRRGY

SEQ ID NO: 16685 - protein, 9 aa, synthetic construct
  source 1..9: note = Seed: LVVVGARGV (KRAS G12R)
FVVCGSRGA

SEQ ID NO: 16686 - protein, 9 aa, synthetic construct
  source 1..9: note = Seed: LVVVGARGV (KRAS G12R)
FVVCGSRGF

SEQ ID NO: 16687 - protein, 9 aa, synthetic construct
  source 1..9: note = Seed: LVVVGARGV (KRAS G12R)
FVVCGSRGI

SEQ ID NO: 16688 - protein, 9 aa, synthetic construct
  source 1..9: note = Seed: LVVVGARGV (KRAS G12R)
FVVCGSRGL

SEQ ID NO: 16689 - protein, 9 aa, synthetic construct
  source 1..9: note = Seed: LVVVGARGV (KRAS G12R)
FVVCGSRGM

SEQ ID NO: 16690 - protein, 9 aa, synthetic construct
  source 1..9: note = Seed: LVVVGARGV (KRAS G12R)
FVVCGSRGS

SEQ ID NO: 16691 - protein, 9 aa, synthetic construct
  source 1..9: note = Seed: LVVVGARGV (KRAS G12R)
FVVCGSRGT

SEQ ID NO: 16692 - protein, 9 aa, synthetic construct
  source 1..9: note = Seed: LVVVGARGV (KRAS G12R)
FVVCGSRGV

SEQ ID NO: 16693 - protein, 9 aa, synthetic construct
  source 1..9: note = Seed: LVVVGARGV (KRAS G12R)
FVVCGTRGA

SEQ ID NO: 16694 - protein, 9 aa, synthetic construct
  source 1..9: note = Seed: LVVVGARGV (KRAS G12R)
FVVCGTRGI

SEQ ID NO: 16695 - protein, 9 aa, synthetic construct
  source 1..9: note = Seed: LVVVGARGV (KRAS G12R)
FVVCGTRGL

SEQ ID NO: 16696 - protein, 9 aa, synthetic construct
  source 1..9: note = Seed: LVVVGARGV (KRAS G12R)
FVVCGTRGM

SEQ ID NO: 16697 - protein, 9 aa, synthetic construct
  source 1..9: note = Seed: LVVVGARGV (KRAS G12R)
FVVCGTRGV

SEQ ID NO: 16698 - protein, 9 aa, synthetic construct
  source 1..9: note = Seed: LVVVGARGV (KRAS G12R)
FVVCGVRGA

SEQ ID NO: 16699 - protein, 9 aa, synthetic construct
  source 1..9: note = Seed: LVVVGARGV (KRAS G12R)
FVVCGVRGI

SEQ ID NO: 16700 - protein, 9 aa, synthetic construct
  source 1..9: note = Seed: LVVVGARGV (KRAS G12R)
FVVCGVRGL

SEQ ID NO: 16701 - protein, 9 aa, synthetic construct
  source 1..9: note = Seed: LVVVGARGV (KRAS G12R)
FVVCGVRGM

SEQ ID NO: 16702 - protein, 9 aa, synthetic construct
  source 1..9: note = Seed: LVVVGARGV (KRAS G12R)
FVVCGVRGV

SEQ ID NO: 16703 - protein, 9 aa, synthetic construct
  source 1..9: note = Seed: LVVVGARGV (KRAS G12R)
FVVDGARGA

SEQ ID NO: 16704 - protein, 9 aa, synthetic construct
  source 1..9: note = Seed: LVVVGARGV (KRAS G12R)
FVVDGARGF

SEQ ID NO: 16705 - protein, 9 aa, synthetic construct
  source 1..9: note = Seed: LVVVGARGV (KRAS G12R)
FVVDGARGI

SEQ ID NO: 16706 - protein, 9 aa, synthetic construct
  source 1..9: note = Seed: LVVVGARGV (KRAS G12R)
FVVDGARGL

SEQ ID NO: 16707 - protein, 9 aa, synthetic construct
  source 1..9: note = Seed: LVVVGARGV (KRAS G12R)
FVVDGARGM

SEQ ID NO: 16708 - protein, 9 aa, synthetic construct
  source 1..9: note = Seed: LVVVGARGV (KRAS G12R)
FVVDGARGS

SEQ ID NO: 16709 - protein, 9 aa, synthetic construct
  source 1..9: note = Seed: LVVVGARGV (KRAS G12R)
FVVDGARGT

SEQ ID NO: 16710 - protein, 9 aa, synthetic construct
  source 1..9: note = Seed: LVVVGARGV (KRAS G12R)
FVVDGARGV

SEQ ID NO: 16711 - protein, 9 aa, synthetic construct
  source 1..9: note = Seed: LVVVGARGV (KRAS G12R)
FVVDGARGY

SEQ ID NO: 16712 - protein, 9 aa, synthetic construct
  source 1..9: note = Seed: LVVVGARGV (KRAS G12R)
FVVDGDRGA

SEQ ID NO: 16713 - protein, 9 aa, synthetic construct
  source 1..9: note = Seed: LVVVGARGV (KRAS G12R)
FVVDGFRGF

SEQ ID NO: 16714 - protein, 9 aa, synthetic construct
  source 1..9: note = Seed: LVVVGARGV (KRAS G12R)
FVVDGFRGI

SEQ ID NO: 16715 - protein, 9 aa, synthetic construct
  source 1..9: note = Seed: LVVVGARGV (KRAS G12R)
FVVDGFRGL

SEQ ID NO: 16716 - protein, 9 aa, synthetic construct
  source 1..9: note = Seed: LVVVGARGV (KRAS G12R)
FVVDGFRGM

SEQ ID NO: 16717 - protein, 9 aa, synthetic construct
  source 1..9: note = Seed: LVVVGARGV (KRAS G12R)
FVVDGFRGV

SEQ ID NO: 16718 - protein, 9 aa, synthetic construct
  source 1..9: note = Seed: LVVVGARGV (KRAS G12R)
FVVDGGRGA

SEQ ID NO: 16719 - protein, 9 aa, synthetic construct
  source 1..9: note = Seed: LVVVGARGV (KRAS G12R)
FVVDGGRGI

SEQ ID NO: 16720 - protein, 9 aa, synthetic construct
  source 1..9: note = Seed: LVVVGARGV (KRAS G12R)
FVVDGGRGL

SEQ ID NO: 16721 - protein, 9 aa, synthetic construct
  source 1..9: note = Seed: LVVVGARGV (KRAS G12R)
FVVDGGRGM

SEQ ID NO: 16722 - protein, 9 aa, synthetic construct
  source 1..9: note = Seed: LVVVGARGV (KRAS G12R)
FVVDGGRGV

SEQ ID NO: 16723 - protein, 9 aa, synthetic construct
  source 1..9: note = Seed: LVVVGARGV (KRAS G12R)
FVVDGIRGA

SEQ ID NO: 16724 - protein, 9 aa, synthetic construct
  source 1..9: note = Seed: LVVVGARGV (KRAS G12R)
FVVDGIRGF

SEQ ID NO: 16725 - protein, 9 aa, synthetic construct
  source 1..9: note = Seed: LVVVGARGV (KRAS G12R)
FVVDGIRGI

SEQ ID NO: 16726 - protein, 9 aa, synthetic construct
  source 1..9: note = Seed: LVVVGARGV (KRAS G12R)
FVVDGIRGL

SEQ ID NO: 16727 - protein, 9 aa, synthetic construct
  source 1..9: note = Seed: LVVVGARGV (KRAS G12R)
FVVDGIRGS

SEQ ID NO: 16728 - protein, 9 aa, synthetic construct
  source 1..9: note = Seed: LVVVGARGV (KRAS G12R)
FVVDGIRGV

SEQ ID NO: 16729 - protein, 9 aa, synthetic construct
  source 1..9: note = Seed: LVVVGARGV (KRAS G12R)
FVVDGMRGI

SEQ ID NO: 16730 - protein, 9 aa, synthetic construct
  source 1..9: note = Seed: LVVVGARGV (KRAS G12R)
FVVDGNRGA

SEQ ID NO: 16731 - protein, 9 aa, synthetic construct
  source 1..9: note = Seed: LVVVGARGV (KRAS G12R)
FVVDGNRGF

SEQ ID NO: 16732 - protein, 9 aa, synthetic construct
  source 1..9: note = Seed: LVVVGARGV (KRAS G12R)
FVVDGNRGG

SEQ ID NO: 16733 - protein, 9 aa, synthetic construct
  source 1..9: note = Seed: LVVVGARGV (KRAS G12R)
FVVDGNRGH

SEQ ID NO: 16734 - protein, 9 aa, synthetic construct
  source 1..9: note = Seed: LVVVGARGV (KRAS G12R)
FVVDGNRGI

SEQ ID NO: 16735 - protein, 9 aa, synthetic construct
  source 1..9: note = Seed: LVVVGARGV (KRAS G12R)
FVVDGNRGL

SEQ ID NO: 16736 - protein, 9 aa, synthetic construct
  source 1..9: note = Seed: LVVVGARGV (KRAS G12R)
FVVDGNRGM

SEQ ID NO: 16737 - protein, 9 aa, synthetic construct
  source 1..9: note = Seed: LVVVGARGV (KRAS G12R)
FVVDGNRGN

SEQ ID NO: 16738 - protein, 9 aa, synthetic construct
  source 1..9: note = Seed: LVVVGARGV (KRAS G12R)
FVVDGNRGQ

SEQ ID NO: 16739 - protein, 9 aa, synthetic construct
  source 1..9: note = Seed: LVVVGARGV (KRAS G12R)
FVVDGNRGS

SEQ ID NO: 16740 - protein, 9 aa, synthetic construct
  source 1..9: note = Seed: LVVVGARGV (KRAS G12R)
FVVDGNRGT

SEQ ID NO: 16741 - protein, 9 aa, synthetic construct
  source 1..9: note = Seed: LVVVGARGV (KRAS G12R)
FVVDGNRGV

SEQ ID NO: 16742 - protein, 9 aa, synthetic construct
  source 1..9: note = Seed: LVVVGARGV (KRAS G12R)
FVVDGNRGY

SEQ ID NO: 16743 - protein, 9 aa, synthetic construct
  source 1..9: note = Seed: LVVVGARGV (KRAS G12R)
FVVDGPRGA

SEQ ID NO: 16744 - protein, 9 aa, synthetic construct
  source 1..9: note = Seed: LVVVGARGV (KRAS G12R)
FVVDGPRGI

SEQ ID NO: 16745 - protein, 9 aa, synthetic construct
  source 1..9: note = Seed: LVVVGARGV (KRAS G12R)
FVVDGPRGL

SEQ ID NO: 16746 - protein, 9 aa, synthetic construct
  source 1..9: note = Seed: LVVVGARGV (KRAS G12R)
FVVDGPRGV

SEQ ID NO: 16747 - protein, 9 aa, synthetic construct
  source 1..9: note = Seed: LVVVGARGV (KRAS G12R)
FVVDGSRGA

SEQ ID NO: 16748 - protein, 9 aa, synthetic construct
  source 1..9: note = Seed: LVVVGARGV (KRAS G12R)
FVVDGSRGF

SEQ ID NO: 16749 - protein, 9 aa, synthetic construct
  source 1..9: note = Seed: LVVVGARGV (KRAS G12R)
FVVDGSRGI

SEQ ID NO: 16750 - protein, 9 aa, synthetic construct
  source 1..9: note = Seed: LVVVGARGV (KRAS G12R)
FVVDGSRGL

SEQ ID NO: 16751 - protein, 9 aa, synthetic construct
  source 1..9: note = Seed: LVVVGARGV (KRAS G12R)
FVVDGSRGM

SEQ ID NO: 16752 - protein, 9 aa, synthetic construct
  source 1..9: note = Seed: LVVVGARGV (KRAS G12R)
FVVDGSRGQ

SEQ ID NO: 16753 - protein, 9 aa, synthetic construct
  source 1..9: note = Seed: LVVVGARGV (KRAS G12R)
FVVDGSRGS

SEQ ID NO: 16754 - protein, 9 aa, synthetic construct
  source 1..9: note = Seed: LVVVGARGV (KRAS G12R)
FVVDGSRGT

SEQ ID NO: 16755 - protein, 9 aa, synthetic construct
  source 1..9: note = Seed: LVVVGARGV (KRAS G12R)
FVVDGSRGV

SEQ ID NO: 16756 - protein, 9 aa, synthetic construct
  source 1..9: note = Seed: LVVVGARGV (KRAS G12R)
FVVDGTRGA

SEQ ID NO: 16757 - protein, 9 aa, synthetic construct
  source 1..9: note = Seed: LVVVGARGV (KRAS G12R)
FVVDGTRGF

SEQ ID NO: 16758 - protein, 9 aa, synthetic construct
  source 1..9: note = Seed: LVVVGARGV (KRAS G12R)
FVVDGTRGG

SEQ ID NO: 16759 - protein, 9 aa, synthetic construct
  source 1..9: note = Seed: LVVVGARGV (KRAS G12R)
FVVDGTRGI

SEQ ID NO: 16760 - protein, 9 aa, synthetic construct
  source 1..9: note = Seed: LVVVGARGV (KRAS G12R)
FVVDGTRGL

SEQ ID NO: 16761 - protein, 9 aa, synthetic construct
  source 1..9: note = Seed: LVVVGARGV (KRAS G12R)
FVVDGTRGM

SEQ ID NO: 16762 - protein, 9 aa, synthetic construct
  source 1..9: note = Seed: LVVVGARGV (KRAS G12R)
FVVDGTRGN

SEQ ID NO: 16763 - protein, 9 aa, synthetic construct
  source 1..9: note = Seed: LVVVGARGV (KRAS G12R)
FVVDGTRGQ

SEQ ID NO: 16764 - protein, 9 aa, synthetic construct
  source 1..9: note = Seed: LVVVGARGV (KRAS G12R)
FVVDGTRGS

SEQ ID NO: 16765 - protein, 9 aa, synthetic construct
  source 1..9: note = Seed: LVVVGARGV (KRAS G12R)
FVVDGTRGT

SEQ ID NO: 16766 - protein, 9 aa, synthetic construct
  source 1..9: note = Seed: LVVVGARGV (KRAS G12R)
FVVDGTRGV

SEQ ID NO: 16767 - protein, 9 aa, synthetic construct
  source 1..9: note = Seed: LVVVGARGV (KRAS G12R)
FVVDGVRGA

SEQ ID NO: 16768 - protein, 9 aa, synthetic construct
  source 1..9: note = Seed: LVVVGARGV (KRAS G12R)
FVVDGVRGF

SEQ ID NO: 16769 - protein, 9 aa, synthetic construct
  source 1..9: note = Seed: LVVVGARGV (KRAS G12R)
FVVDGVRGI

SEQ ID NO: 16770 - protein, 9 aa, synthetic construct
  source 1..9: note = Seed: LVVVGARGV (KRAS G12R)
FVVDGVRGL

SEQ ID NO: 16771 - protein, 9 aa, synthetic construct
  source 1..9: note = Seed: LVVVGARGV (KRAS G12R)
FVVDGVRGM

SEQ ID NO: 16772 - protein, 9 aa, synthetic construct
  source 1..9: note = Seed: LVVVGARGV (KRAS G12R)
FVVDGVRGQ

SEQ ID NO: 16773 - protein, 9 aa, synthetic construct
  source 1..9: note = Seed: LVVVGARGV (KRAS G12R)
FVVDGVRGS

SEQ ID NO: 16774 - protein, 9 aa, synthetic construct
  source 1..9: note = Seed: LVVVGARGV (KRAS G12R)
FVVDGVRGV

SEQ ID NO: 16775 - protein, 9 aa, synthetic construct
  source 1..9: note = Seed: LVVVGARGV (KRAS G12R)
FVVEGARGA

SEQ ID NO: 16776 - protein, 9 aa, synthetic construct
  source 1..9: note = Seed: LVVVGARGV (KRAS G12R)
FVVEGARGC

SEQ ID NO: 16777 - protein, 9 aa, synthetic construct
  source 1..9: note = Seed: LVVVGARGV (KRAS G12R)
FVVEGARGF

SEQ ID NO: 16778 - protein, 9 aa, synthetic construct
  source 1..9: note = Seed: LVVVGARGV (KRAS G12R)
FVVEGARGG

SEQ ID NO: 16779 - protein, 9 aa, synthetic construct
  source 1..9: note = Seed: LVVVGARGV (KRAS G12R)
FVVEGARGH

SEQ ID NO: 16780 - protein, 9 aa, synthetic construct
  source 1..9: note = Seed: LVVVGARGV (KRAS G12R)
FVVEGARGI

SEQ ID NO: 16781 - protein, 9 aa, synthetic construct
  source 1..9: note = Seed: LVVVGARGV (KRAS G12R)
FVVEGARGL

SEQ ID NO: 16782 - protein, 9 aa, synthetic construct
  source 1..9: note = Seed: LVVVGARGV (KRAS G12R)
FVVEGARGM

SEQ ID NO: 16783 - protein, 9 aa, synthetic construct
  source 1..9: note = Seed: LVVVGARGV (KRAS G12R)
FVVEGARGN

SEQ ID NO: 16784 - protein, 9 aa, synthetic construct
  source 1..9: note = Seed: LVVVGARGV (KRAS G12R)
FVVEGARGP

SEQ ID NO: 16785 - protein, 9 aa, synthetic construct
  source 1..9: note = Seed: LVVVGARGV (KRAS G12R)
FVVEGARGQ

SEQ ID NO: 16786 - protein, 9 aa, synthetic construct
  source 1..9: note = Seed: LVVVGARGV (KRAS G12R)
FVVEGARGS

SEQ ID NO: 16787 - protein, 9 aa, synthetic construct
  source 1..9: note = Seed: LVVVGARGV (KRAS G12R)
FVVEGARGT

SEQ ID NO: 16788 - protein, 9 aa, synthetic construct
  source 1..9: note = Seed: LVVVGARGV (KRAS G12R)
FVVEGARGV

SEQ ID NO: 16789 - protein, 9 aa, synthetic construct
  source 1..9: note = Seed: LVVVGARGV (KRAS G12R)
FVVEGARGW

SEQ ID NO: 16790 - protein, 9 aa, synthetic construct
  source 1..9: note = Seed: LVVVGARGV (KRAS G12R)
FVVEGARGY

SEQ ID NO: 16791 - protein, 9 aa, synthetic construct
  source 1..9: note = Seed: LVVVGARGV (KRAS G12R)
FVVEGCRGI

SEQ ID NO: 16792 - protein, 9 aa, synthetic construct
  source 1..9: note = Seed: LVVVGARGV (KRAS G12R)
FVVEGCRGL

SEQ ID NO: 16793 - protein, 9 aa, synthetic construct
  source 1..9: note = Seed: LVVVGARGV (KRAS G12R)
FVVEGCRGV

SEQ ID NO: 16794 - protein, 9 aa, synthetic construct
  source 1..9: note = Seed: LVVVGARGV (KRAS G12R)
FVVEGFRGA

SEQ ID NO: 16795 - protein, 9 aa, synthetic construct
  source 1..9: note = Seed: LVVVGARGV (KRAS G12R)
FVVEGFRGF

SEQ ID NO: 16796 - protein, 9 aa, synthetic construct
  source 1..9: note = Seed: LVVVGARGV (KRAS G12R)
FVVEGFRGI

SEQ ID NO: 16797 - protein, 9 aa, synthetic construct
  source 1..9: note = Seed: LVVVGARGV (KRAS G12R)
FVVEGFRGL

SEQ ID NO: 16798 - protein, 9 aa, synthetic construct
  source 1..9: note = Seed: LVVVGARGV (KRAS G12R)
FVVEGFRGM

SEQ ID NO: 16799 - protein, 9 aa, synthetic construct
  source 1..9: note = Seed: LVVVGARGV (KRAS G12R)
FVVEGFRGN

SEQ ID NO: 16800 - protein, 9 aa, synthetic construct
  source 1..9: note = Seed: LVVVGARGV (KRAS G12R)
FVVEGFRGS

SEQ ID NO: 16801 - protein, 9 aa, synthetic construct
  source 1..9: note = Seed: LVVVGARGV (KRAS G12R)
FVVEGFRGT

SEQ ID NO: 16802 - protein, 9 aa, synthetic construct
  source 1..9: note = Seed: LVVVGARGV (KRAS G12R)
FVVEGFRGV

SEQ ID NO: 16803 - protein, 9 aa, synthetic construct
  source 1..9: note = Seed: LVVVGARGV (KRAS G12R)
FVVEGFRGY

SEQ ID NO: 16804 - protein, 9 aa, synthetic construct
  source 1..9: note = Seed: LVVVGARGV (KRAS G12R)
FVVEGGRGA

SEQ ID NO: 16805 - protein, 9 aa, synthetic construct
  source 1..9: note = Seed: LVVVGARGV (KRAS G12R)
FVVEGGRGC

SEQ ID NO: 16806 - protein, 9 aa, synthetic construct
  source 1..9: note = Seed: LVVVGARGV (KRAS G12R)
FVVEGGRGF

SEQ ID NO: 16807 - protein, 9 aa, synthetic construct
  source 1..9: note = Seed: LVVVGARGV (KRAS G12R)
FVVEGGRGG

SEQ ID NO: 16808 - protein, 9 aa, synthetic construct
  source 1..9: note = Seed: LVVVGARGV (KRAS G12R)
FVVEGGRGI

SEQ ID NO: 16809 - protein, 9 aa, synthetic construct
  source 1..9: note = Seed: LVVVGARGV (KRAS G12R)
FVVEGGRGL

SEQ ID NO: 16810 - protein, 9 aa, synthetic construct
  source 1..9: note = Seed: LVVVGARGV (KRAS G12R)
FVVEGGRGM

SEQ ID NO: 16811 - protein, 9 aa, synthetic construct
  source 1..9: note = Seed: LVVVGARGV (KRAS G12R)
FVVEGGRGN

SEQ ID NO: 16812 - protein, 9 aa, synthetic construct
  source 1..9: note = Seed: LVVVGARGV (KRAS G12R)
FVVEGGRGS

SEQ ID NO: 16813 - protein, 9 aa, synthetic construct
  source 1..9: note = Seed: LVVVGARGV (KRAS G12R)
FVVEGGRGT

SEQ ID NO: 16814 - protein, 9 aa, synthetic construct
  source 1..9: note = Seed: LVVVGARGV (KRAS G12R)
FVVEGGRGV

SEQ ID NO: 16815 - protein, 9 aa, synthetic construct
  source 1..9: note = Seed: LVVVGARGV (KRAS G12R)
FVVEGHRGL

SEQ ID NO: 16816 - protein, 9 aa, synthetic construct
  source 1..9: note = Seed: LVVVGARGV (KRAS G12R)
FVVEGIRGA

SEQ ID NO: 16817 - protein, 9 aa, synthetic construct
  source 1..9: note = Seed: LVVVGARGV (KRAS G12R)
FVVEGIRGI

SEQ ID NO: 16818 - protein, 9 aa, synthetic construct
  source 1..9: note = Seed: LVVVGARGV (KRAS G12R)
FVVEGIRGL

SEQ ID NO: 16819 - protein, 9 aa, synthetic construct
  source 1..9: note = Seed: LVVVGARGV (KRAS G12R)
FVVEGIRGM

SEQ ID NO: 16820 - protein, 9 aa, synthetic construct
  source 1..9: note = Seed: LVVVGARGV (KRAS G12R)
FVVEGIRGN

SEQ ID NO: 16821 - protein, 9 aa, synthetic construct
  source 1..9: note = Seed: LVVVGARGV (KRAS G12R)
FVVEGIRGS

SEQ ID NO: 16822 - protein, 9 aa, synthetic construct
  source 1..9: note = Seed: LVVVGARGV (KRAS G12R)
FVVEGIRGT

SEQ ID NO: 16823 - protein, 9 aa, synthetic construct
  source 1..9: note = Seed: LVVVGARGV (KRAS G12R)
FVVEGIRGV

SEQ ID NO: 16824 - protein, 9 aa, synthetic construct
  source 1..9: note = Seed: LVVVGARGV (KRAS G12R)
FVVEGLRGI

SEQ ID NO: 16825 - protein, 9 aa, synthetic construct
  source 1..9: note = Seed: LVVVGARGV (KRAS G12R)
FVVEGLRGL

SEQ ID NO: 16826 - protein, 9 aa, synthetic construct
  source 1..9: note = Seed: LVVVGARGV (KRAS G12R)
FVVEGLRGV

SEQ ID NO: 16827 - protein, 9 aa, synthetic construct
  source 1..9: note = Seed: LVVVGARGV (KRAS G12R)
FVVEGMRGA

SEQ ID NO: 16828 - protein, 9 aa, synthetic construct
  source 1..9: note = Seed: LVVVGARGV (KRAS G12R)
FVVEGMRGI

SEQ ID NO: 16829 - protein, 9 aa, synthetic construct
  source 1..9: note = Seed: LVVVGARGV (KRAS G12R)
FVVEGMRGL

SEQ ID NO: 16830 - protein, 9 aa, synthetic construct
  source 1..9: note = Seed: LVVVGARGV (KRAS G12R)
FVVEGMRGV

SEQ ID NO: 16831 - protein, 9 aa, synthetic construct
  source 1..9: note = Seed: LVVVGARGV (KRAS G12R)
FVVEGNRGA

SEQ ID NO: 16832 - protein, 9 aa, synthetic construct
  source 1..9: note = Seed: LVVVGARGV (KRAS G12R)
FVVEGNRGF

SEQ ID NO: 16833 - protein, 9 aa, synthetic construct
  source 1..9: note = Seed: LVVVGARGV (KRAS G12R)
FVVEGNRGG

SEQ ID NO: 16834 - protein, 9 aa, synthetic construct
  source 1..9: note = Seed: LVVVGARGV (KRAS G12R)
FVVEGNRGI

SEQ ID NO: 16835 - protein, 9 aa, synthetic construct
  source 1..9: note = Seed: LVVVGARGV (KRAS G12R)
FVVEGNRGL

SEQ ID NO: 16836 - protein, 9 aa, synthetic construct
  source 1..9: note = Seed: LVVVGARGV (KRAS G12R)
FVVEGNRGM

SEQ ID NO: 16837 - protein, 9 aa, synthetic construct
  source 1..9: note = Seed: LVVVGARGV (KRAS G12R)
FVVEGNRGN

SEQ ID NO: 16838 - protein, 9 aa, synthetic construct
  source 1..9: note = Seed: LVVVGARGV (KRAS G12R)
FVVEGNRGS

SEQ ID NO: 16839 - protein, 9 aa, synthetic construct
  source 1..9: note = Seed: LVVVGARGV (KRAS G12R)
FVVEGNRGT

SEQ ID NO: 16840 - protein, 9 aa, synthetic construct
  source 1..9: note = Seed: LVVVGARGV (KRAS G12R)
FVVEGNRGV

SEQ ID NO: 16841 - protein, 9 aa, synthetic construct
  source 1..9: note = Seed: LVVVGARGV (KRAS G12R)
FVVEGPRGA

SEQ ID NO: 16842 - protein, 9 aa, synthetic construct
  source 1..9: note = Seed: LVVVGARGV (KRAS G12R)
FVVEGPRGF

SEQ ID NO: 16843 - protein, 9 aa, synthetic construct
  source 1..9: note = Seed: LVVVGARGV (KRAS G12R)
FVVEGPRGG

SEQ ID NO: 16844 - protein, 9 aa, synthetic construct
  source 1..9: note = Seed: LVVVGARGV (KRAS G12R)
FVVEGPRGI

SEQ ID NO: 16845 - protein, 9 aa, synthetic construct
  source 1..9: note = Seed: LVVVGARGV (KRAS G12R)
FVVEGPRGL

SEQ ID NO: 16846 - protein, 9 aa, synthetic construct
  source 1..9: note = Seed: LVVVGARGV (KRAS G12R)
FVVEGPRGM

SEQ ID NO: 16847 - protein, 9 aa, synthetic construct
  source 1..9: note = Seed: LVVVGARGV (KRAS G12R)
FVVEGPRGN

SEQ ID NO: 16848 - protein, 9 aa, synthetic construct
  source 1..9: note = Seed: LVVVGARGV (KRAS G12R)
FVVEGPRGS

SEQ ID NO: 16849 - protein, 9 aa, synthetic construct
  source 1..9: note = Seed: LVVVGARGV (KRAS G12R)
FVVEGPRGT

SEQ ID NO: 16850 - protein, 9 aa, synthetic construct
  source 1..9: note = Seed: LVVVGARGV (KRAS G12R)
FVVEGPRGV

SEQ ID NO: 16851 - protein, 9 aa, synthetic construct
  source 1..9: note = Seed: LVVVGARGV (KRAS G12R)
FVVEGRRGA

SEQ ID NO: 16852 - protein, 9 aa, synthetic construct
  source 1..9: note = Seed: LVVVGARGV (KRAS G12R)
FVVEGRRGH

SEQ ID NO: 16853 - protein, 9 aa, synthetic construct
  source 1..9: note = Seed: LVVVGARGV (KRAS G12R)
FVVEGRRGL

SEQ ID NO: 16854 - protein, 9 aa, synthetic construct
  source 1..9: note = Seed: LVVVGARGV (KRAS G12R)
FVVEGRRGM

SEQ ID NO: 16855 - protein, 9 aa, synthetic construct
  source 1..9: note = Seed: LVVVGARGV (KRAS G12R)
FVVEGRRGR

SEQ ID NO: 16856 - protein, 9 aa, synthetic construct
  source 1..9: note = Seed: LVVVGARGV (KRAS G12R)
FVVEGRRGS

SEQ ID NO: 16857 - protein, 9 aa, synthetic construct
  source 1..9: note = Seed: LVVVGARGV (KRAS G12R)
FVVEGSRGA

SEQ ID NO: 16858 - protein, 9 aa, synthetic construct
  source 1..9: note = Seed: LVVVGARGV (KRAS G12R)
FVVEGSRGC

SEQ ID NO: 16859 - protein, 9 aa, synthetic construct
  source 1..9: note = Seed: LVVVGARGV (KRAS G12R)
FVVEGSRGF

SEQ ID NO: 16860 - protein, 9 aa, synthetic construct
  source 1..9: note = Seed: LVVVGARGV (KRAS G12R)
FVVEGSRGG

SEQ ID NO: 16861 - protein, 9 aa, synthetic construct
  source 1..9: note = Seed: LVVVGARGV (KRAS G12R)
FVVEGSRGH

SEQ ID NO: 16862 - protein, 9 aa, synthetic construct
  source 1..9: note = Seed: LVVVGARGV (KRAS G12R)
FVVEGSRGI

SEQ ID NO: 16863 - protein, 9 aa, synthetic construct
  source 1..9: note = Seed: LVVVGARGV (KRAS G12R)
FVVEGSRGL

SEQ ID NO: 16864 - protein, 9 aa, synthetic construct
  source 1..9: note = Seed: LVVVGARGV (KRAS G12R)
FVVEGSRGM

SEQ ID NO: 16865 - protein, 9 aa, synthetic construct
  source 1..9: note = Seed: LVVVGARGV (KRAS G12R)
FVVEGSRGN

SEQ ID NO: 16866 - protein, 9 aa, synthetic construct
  source 1..9: note = Seed: LVVVGARGV (KRAS G12R)
FVVEGSRGP

SEQ ID NO: 16867 - protein, 9 aa, synthetic construct
  source 1..9: note = Seed: LVVVGARGV (KRAS G12R)
FVVEGSRGS

SEQ ID NO: 16868 - protein, 9 aa, synthetic construct
  source 1..9: note = Seed: LVVVGARGV (KRAS G12R)
FVVEGSRGT

SEQ ID NO: 16869 - protein, 9 aa, synthetic construct
  source 1..9: note = Seed: LVVVGARGV (KRAS G12R)
FVVEGSRGV

SEQ ID NO: 16870 - protein, 9 aa, synthetic construct
  source 1..9: note = Seed: LVVVGARGV (KRAS G12R)
FVVEGSRGW

SEQ ID NO: 16871 - protein, 9 aa, synthetic construct
  source 1..9: note = Seed: LVVVGARGV (KRAS G12R)
FVVEGSRGY

SEQ ID NO: 16872 - protein, 9 aa, synthetic construct
  source 1..9: note = Seed: LVVVGARGV (KRAS G12R)
FVVEGTRGA

SEQ ID NO: 16873 - protein, 9 aa, synthetic construct
  source 1..9: note = Seed: LVVVGARGV (KRAS G12R)
FVVEGTRGF

SEQ ID NO: 16874 - protein, 9 aa, synthetic construct
  source 1..9: note = Seed: LVVVGARGV (KRAS G12R)
FVVEGTRGG

SEQ ID NO: 16875 - protein, 9 aa, synthetic construct
  source 1..9: note = Seed: LVVVGARGV (KRAS G12R)
FVVEGTRGI

SEQ ID NO: 16876 - protein, 9 aa, synthetic construct
  source 1..9: note = Seed: LVVVGARGV (KRAS G12R)
FVVEGTRGL

SEQ ID NO: 16877 - protein, 9 aa, synthetic construct
  source 1..9: note = Seed: LVVVGARGV (KRAS G12R)
FVVEGTRGM

SEQ ID NO: 16878 - protein, 9 aa, synthetic construct
  source 1..9: note = Seed: LVVVGARGV (KRAS G12R)
FVVEGTRGN

SEQ ID NO: 16879 - protein, 9 aa, synthetic construct
  source 1..9: note = Seed: LVVVGARGV (KRAS G12R)
FVVEGTRGS

SEQ ID NO: 16880 - protein, 9 aa, synthetic construct
  source 1..9: note = Seed: LVVVGARGV (KRAS G12R)
FVVEGTRGT

SEQ ID NO: 16881 - protein, 9 aa, synthetic construct
  source 1..9: note = Seed: LVVVGARGV (KRAS G12R)
FVVEGTRGV

SEQ ID NO: 16882 - protein, 9 aa, synthetic construct
  source 1..9: note = Seed: LVVVGARGV (KRAS G12R)
FVVEGVRGA

SEQ ID NO: 16883 - protein, 9 aa, synthetic construct
  source 1..9: note = Seed: LVVVGARGV (KRAS G12R)
FVVEGVRGG

SEQ ID NO: 16884 - protein, 9 aa, synthetic construct
  source 1..9: note = Seed: LVVVGARGV (KRAS G12R)
FVVEGVRGI

SEQ ID NO: 16885 - protein, 9 aa, synthetic construct
  source 1..9: note = Seed: LVVVGARGV (KRAS G12R)
FVVEGVRGL

SEQ ID NO: 16886 - protein, 9 aa, synthetic construct
  source 1..9: note = Seed: LVVVGARGV (KRAS G12R)
FVVEGVRGM

SEQ ID NO: 16887 - protein, 9 aa, synthetic construct
  source 1..9: note = Seed: LVVVGARGV (KRAS G12R)
FVVEGVRGN

SEQ ID NO: 16888 - protein, 9 aa, synthetic construct
  source 1..9: note = Seed: LVVVGARGV (KRAS G12R)
FVVEGVRGS

SEQ ID NO: 16889 - protein, 9 aa, synthetic construct
  source 1..9: note = Seed: LVVVGARGV (KRAS G12R)
FVVEGVRGT

SEQ ID NO: 16890 - protein, 9 aa, synthetic construct
  source 1..9: note = Seed: LVVVGARGV (KRAS G12R)
FVVEGVRGV

SEQ ID NO: 16891 - protein, 9 aa, synthetic construct
  source 1..9: note = Seed: LVVVGARGV (KRAS G12R)
FVVEGWRGI

SEQ ID NO: 16892 - protein, 9 aa, synthetic construct
  source 1..9: note = Seed: LVVVGARGV (KRAS G12R)
FVVEGWRGL

SEQ ID NO: 16893 - protein, 9 aa, synthetic construct
  source 1..9: note = Seed: LVVVGARGV (KRAS G12R)
FVVEGWRGV

SEQ ID NO: 16894 - protein, 9 aa, synthetic construct
  source 1..9: note = Seed: LVVVGARGV (KRAS G12R)
FVVEGYRGI

SEQ ID NO: 16895 - protein, 9 aa, synthetic construct
  source 1..9: note = Seed: LVVVGARGV (KRAS G12R)
FVVEGYRGL

SEQ ID NO: 16896 - protein, 9 aa, synthetic construct
  source 1..9: note = Seed: LVVVGARGV (KRAS G12R)
FVVEGYRGV

SEQ ID NO: 16897 - protein, 9 aa, synthetic construct
  source 1..9: note = Seed: LVVVGARGV (KRAS G12R)
FVVFGARGA

SEQ ID NO: 16898 - protein, 9 aa, synthetic construct
  source 1..9: note = Seed: LVVVGARGV (KRAS G12R)
FVVFGARGC

SEQ ID NO: 16899 - protein, 9 aa, synthetic construct
  source 1..9: note = Seed: LVVVGARGV (KRAS G12R)
FVVFGARGD

SEQ ID NO: 16900 - protein, 9 aa, synthetic construct
  source 1..9: note = Seed: LVVVGARGV (KRAS G12R)
FVVFGARGE

SEQ ID NO: 16901 - protein, 9 aa, synthetic construct
  source 1..9: note = Seed: LVVVGARGV (KRAS G12R)
FVVFGARGF

SEQ ID NO: 16902 - protein, 9 aa, synthetic construct
  source 1..9: note = Seed: LVVVGARGV (KRAS G12R)
FVVFGARGG

SEQ ID NO: 16903 - protein, 9 aa, synthetic construct
  source 1..9: note = Seed: LVVVGARGV (KRAS G12R)
FVVFGARGH

SEQ ID NO: 16904 - protein, 9 aa, synthetic construct
  source 1..9: note = Seed: LVVVGARGV (KRAS G12R)
FVVFGARGI

SEQ ID NO: 16905 - protein, 9 aa, synthetic construct
  source 1..9: note = Seed: LVVVGARGV (KRAS G12R)
FVVFGARGK

SEQ ID NO: 16906 - protein, 9 aa, synthetic construct
  source 1..9: note = Seed: LVVVGARGV (KRAS G12R)
FVVFGARGL

SEQ ID NO: 16907 - protein, 9 aa, synthetic construct
  source 1..9: note = Seed: LVVVGARGV (KRAS G12R)
FVVFGARGM

SEQ ID NO: 16908 - protein, 9 aa, synthetic construct
  source 1..9: note = Seed: LVVVGARGV (KRAS G12R)
FVVFGARGN

SEQ ID NO: 16909 - protein, 9 aa, synthetic construct
  source 1..9: note = Seed: LVVVGARGV (KRAS G12R)
FVVFGARGP

SEQ ID NO: 16910 - protein, 9 aa, synthetic construct
  source 1..9: note = Seed: LVVVGARGV (KRAS G12R)
FVVFGARGQ

SEQ ID NO: 16911 - protein, 9 aa, synthetic construct
  source 1..9: note = Seed: LVVVGARGV (KRAS G12R)
FVVFGARGR

SEQ ID NO: 16912 - protein, 9 aa, synthetic construct
  source 1..9: note = Seed: LVVVGARGV (KRAS G12R)
FVVFGARGS

SEQ ID NO: 16913 - protein, 9 aa, synthetic construct
  source 1..9: note = Seed: LVVVGARGV (KRAS G12R)
FVVFGARGT

SEQ ID NO: 16914 - protein, 9 aa, synthetic construct
  source 1..9: note = Seed: LVVVGARGV (KRAS G12R)
FVVFGARGV

SEQ ID NO: 16915 - protein, 9 aa, synthetic construct
  source 1..9: note = Seed: LVVVGARGV (KRAS G12R)
FVVFGARGW

SEQ ID NO: 16916 - protein, 9 aa, synthetic construct
  source 1..9: note = Seed: LVVVGARGV (KRAS G12R)
FVVFGARGY

SEQ ID NO: 16917 - protein, 9 aa, synthetic construct
  source 1..9: note = Seed: LVVVGARGV (KRAS G12R)
FVVFGCRGI

SEQ ID NO: 16918 - protein, 9 aa, synthetic construct
  source 1..9: note = Seed: LVVVGARGV (KRAS G12R)
FVVFGCRGL

SEQ ID NO: 16919 - protein, 9 aa, synthetic construct
  source 1..9: note = Seed: LVVVGARGV (KRAS G12R)
FVVFGCRGR

SEQ ID NO: 16920 - protein, 9 aa, synthetic construct
  source 1..9: note = Seed: LVVVGARGV (KRAS G12R)
FVVFGCRGV

SEQ ID NO: 16921 - protein, 9 aa, synthetic construct
  source 1..9: note = Seed: LVVVGARGV (KRAS G12R)
FVVFGDRGI

SEQ ID NO: 16922 - protein, 9 aa, synthetic construct
  source 1..9: note = Seed: LVVVGARGV (KRAS G12R)
FVVFGDRGL

SEQ ID NO: 16923 - protein, 9 aa, synthetic construct
  source 1..9: note = Seed: LVVVGARGV (KRAS G12R)
FVVFGDRGV

SEQ ID NO: 16924 - protein, 9 aa, synthetic construct
  source 1..9: note = Seed: LVVVGARGV (KRAS G12R)
FVVFGERGR

SEQ ID NO: 16925 - protein, 9 aa, synthetic construct
  source 1..9: note = Seed: LVVVGARGV (KRAS G12R)
FVVFGFRGA

SEQ ID NO: 16926 - protein, 9 aa, synthetic construct
  source 1..9: note = Seed: LVVVGARGV (KRAS G12R)
FVVFGFRGD

SEQ ID NO: 16927 - protein, 9 aa, synthetic construct
  source 1..9: note = Seed: LVVVGARGV (KRAS G12R)
FVVFGFRGE

SEQ ID NO: 16928 - protein, 9 aa, synthetic construct
  source 1..9: note = Seed: LVVVGARGV (KRAS G12R)
FVVFGFRGF

SEQ ID NO: 16929 - protein, 9 aa, synthetic construct
  source 1..9: note = Seed: LVVVGARGV (KRAS G12R)
FVVFGFRGI

SEQ ID NO: 16930 - protein, 9 aa, synthetic construct
  source 1..9: note = Seed: LVVVGARGV (KRAS G12R)
FVVFGFRGL

SEQ ID NO: 16931 - protein, 9 aa, synthetic construct
  source 1..9: note = Seed: LVVVGARGV (KRAS G12R)
FVVFGFRGM

SEQ ID NO: 16932 - protein, 9 aa, synthetic construct
  source 1..9: note = Seed: LVVVGARGV (KRAS G12R)
FVVFGFRGN

SEQ ID NO: 16933 - protein, 9 aa, synthetic construct
  source 1..9: note = Seed: LVVVGARGV (KRAS G12R)
FVVFGFRGR

SEQ ID NO: 16934 - protein, 9 aa, synthetic construct
  source 1..9: note = Seed: LVVVGARGV (KRAS G12R)
FVVFGFRGS

SEQ ID NO: 16935 - protein, 9 aa, synthetic construct
  source 1..9: note = Seed: LVVVGARGV (KRAS G12R)
FVVFGFRGT

SEQ ID NO: 16936 - protein, 9 aa, synthetic construct
  source 1..9: note = Seed: LVVVGARGV (KRAS G12R)
FVVFGFRGV

SEQ ID NO: 16937 - protein, 9 aa, synthetic construct
  source 1..9: note = Seed: LVVVGARGV (KRAS G12R)
FVVFGFRGY

SEQ ID NO: 16938 - protein, 9 aa, synthetic construct
  source 1..9: note = Seed: LVVVGARGV (KRAS G12R)
FVVFGGRGA

SEQ ID NO: 16939 - protein, 9 aa, synthetic construct
  source 1..9: note = Seed: LVVVGARGV (KRAS G12R)
FVVFGGRGC

SEQ ID NO: 16940 - protein, 9 aa, synthetic construct
  source 1..9: note = Seed: LVVVGARGV (KRAS G12R)
FVVFGGRGF

SEQ ID NO: 16941 - protein, 9 aa, synthetic construct
  source 1..9: note = Seed: LVVVGARGV (KRAS G12R)
FVVFGGRGG

SEQ ID NO: 16942 - protein, 9 aa, synthetic construct
  source 1..9: note = Seed: LVVVGARGV (KRAS G12R)
FVVFGGRGH

SEQ ID NO: 16943 - protein, 9 aa, synthetic construct
  source 1..9: note = Seed: LVVVGARGV (KRAS G12R)
FVVFGGRGI

SEQ ID NO: 16944 - protein, 9 aa, synthetic construct
  source 1..9: note = Seed: LVVVGARGV (KRAS G12R)
FVVFGGRGK

SEQ ID NO: 16945 - protein, 9 aa, synthetic construct
  source 1..9: note = Seed: LVVVGARGV (KRAS G12R)
FVVFGGRGL

SEQ ID NO: 16946 - protein, 9 aa, synthetic construct
  source 1..9: note = Seed: LVVVGARGV (KRAS G12R)
FVVFGGRGM

SEQ ID NO: 16947 - protein, 9 aa, synthetic construct
  source 1..9: note = Seed: LVVVGARGV (KRAS G12R)
FVVFGGRGN

SEQ ID NO: 16948 - protein, 9 aa, synthetic construct
  source 1..9: note = Seed: LVVVGARGV (KRAS G12R)
FVVFGGRGP

SEQ ID NO: 16949 - protein, 9 aa, synthetic construct
  source 1..9: note = Seed: LVVVGARGV (KRAS G12R)
FVVFGGRGQ

SEQ ID NO: 16950 - protein, 9 aa, synthetic construct
  source 1..9: note = Seed: LVVVGARGV (KRAS G12R)
FVVFGGRGR

SEQ ID NO: 16951 - protein, 9 aa, synthetic construct
  source 1..9: note = Seed: LVVVGARGV (KRAS G12R)
FVVFGGRGS

SEQ ID NO: 16952 - protein, 9 aa, synthetic construct
  source 1..9: note = Seed: LVVVGARGV (KRAS G12R)
FVVFGGRGT

SEQ ID NO: 16953 - protein, 9 aa, synthetic construct
  source 1..9: note = Seed: LVVVGARGV (KRAS G12R)
FVVFGGRGV

SEQ ID NO: 16954 - protein, 9 aa, synthetic construct
  source 1..9: note = Seed: LVVVGARGV (KRAS G12R)
FVVFGGRGY

SEQ ID NO: 16955 - protein, 9 aa, synthetic construct
  source 1..9: note = Seed: LVVVGARGV (KRAS G12R)
FVVFGHRGA

SEQ ID NO: 16956 - protein, 9 aa, synthetic construct
  source 1..9: note = Seed: LVVVGARGV (KRAS G12R)
FVVFGHRGF

SEQ ID NO: 16957 - protein, 9 aa, synthetic construct
  source 1..9: note = Seed: LVVVGARGV (KRAS G12R)
FVVFGHRGG

SEQ ID NO: 16958 - protein, 9 aa, synthetic construct
  source 1..9: note = Seed: LVVVGARGV (KRAS G12R)
FVVFGHRGH

SEQ ID NO: 16959 - protein, 9 aa, synthetic construct
  source 1..9: note = Seed: LVVVGARGV (KRAS G12R)
FVVFGHRGI

SEQ ID NO: 16960 - protein, 9 aa, synthetic construct
  source 1..9: note = Seed: LVVVGARGV (KRAS G12R)
FVVFGHRGK

SEQ ID NO: 16961 - protein, 9 aa, synthetic construct
  source 1..9: note = Seed: LVVVGARGV (KRAS G12R)
FVVFGHRGL

SEQ ID NO: 16962 - protein, 9 aa, synthetic construct
  source 1..9: note = Seed: LVVVGARGV (KRAS G12R)
FVVFGHRGM

SEQ ID NO: 16963 - protein, 9 aa, synthetic construct
  source 1..9: note = Seed: LVVVGARGV (KRAS G12R)
FVVFGHRGQ

SEQ ID NO: 16964 - protein, 9 aa, synthetic construct
  source 1..9: note = Seed: LVVVGARGV (KRAS G12R)
FVVFGHRGR

SEQ ID NO: 16965 - protein, 9 aa, synthetic construct
  source 1..9: note = Seed: LVVVGARGV (KRAS G12R)
FVVFGHRGS

SEQ ID NO: 16966 - protein, 9 aa, synthetic construct
  source 1..9: note = Seed: LVVVGARGV (KRAS G12R)
FVVFGHRGT

SEQ ID NO: 16967 - protein, 9 aa, synthetic construct
  source 1..9: note = Seed: LVVVGARGV (KRAS G12R)
FVVFGHRGV

SEQ ID NO: 16968 - protein, 9 aa, synthetic construct
  source 1..9: note = Seed: LVVVGARGV (KRAS G12R)
FVVFGHRGY

SEQ ID NO: 16969 - protein, 9 aa, synthetic construct
  source 1..9: note = Seed: LVVVGARGV (KRAS G12R)
FVVFGIRGA

SEQ ID NO: 16970 - protein, 9 aa, synthetic construct
  source 1..9: note = Seed: LVVVGARGV (KRAS G12R)
FVVFGIRGD

SEQ ID NO: 16971 - protein, 9 aa, synthetic construct
  source 1..9: note = Seed: LVVVGARGV (KRAS G12R)
FVVFGIRGF

SEQ ID NO: 16972 - protein, 9 aa, synthetic construct
  source 1..9: note = Seed: LVVVGARGV (KRAS G12R)
FVVFGIRGG

SEQ ID NO: 16973 - protein, 9 aa, synthetic construct
  source 1..9: note = Seed: LVVVGARGV (KRAS G12R)
FVVFGIRGH

SEQ ID NO: 16974 - protein, 9 aa, synthetic construct
  source 1..9: note = Seed: LVVVGARGV (KRAS G12R)
FVVFGIRGI

SEQ ID NO: 16975 - protein, 9 aa, synthetic construct
  source 1..9: note = Seed: LVVVGARGV (KRAS G12R)
FVVFGIRGK

SEQ ID NO: 16976 - protein, 9 aa, synthetic construct
  source 1..9: note = Seed: LVVVGARGV (KRAS G12R)
FVVFGIRGL

SEQ ID NO: 16977 - protein, 9 aa, synthetic construct
  source 1..9: note = Seed: LVVVGARGV (KRAS G12R)
FVVFGIRGM

SEQ ID NO: 16978 - protein, 9 aa, synthetic construct
  source 1..9: note = Seed: LVVVGARGV (KRAS G12R)
FVVFGIRGN

SEQ ID NO: 16979 - protein, 9 aa, synthetic construct
  source 1..9: note = Seed: LVVVGARGV (KRAS G12R)
FVVFGIRGQ

SEQ ID NO: 16980 - protein, 9 aa, synthetic construct
  source 1..9: note = Seed: LVVVGARGV (KRAS G12R)
FVVFGIRGR

SEQ ID NO: 16981 - protein, 9 aa, synthetic construct
  source 1..9: note = Seed: LVVVGARGV (KRAS G12R)
FVVFGIRGS

SEQ ID NO: 16982 - protein, 9 aa, synthetic construct
  source 1..9: note = Seed: LVVVGARGV (KRAS G12R)
FVVFGIRGT

SEQ ID NO: 16983 - protein, 9 aa, synthetic construct
  source 1..9: note = Seed: LVVVGARGV (KRAS G12R)
FVVFGIRGV

SEQ ID NO: 16984 - protein, 9 aa, synthetic construct
  source 1..9: note = Seed: LVVVGARGV (KRAS G12R)
FVVFGIRGY

SEQ ID NO: 16985 - protein, 9 aa, synthetic construct
  source 1..9: note = Seed: LVVVGARGV (KRAS G12R)
FVVFGKRGA

SEQ ID NO: 16986 - protein, 9 aa, synthetic construct
  source 1..9: note = Seed: LVVVGARGV (KRAS G12R)
FVVFGKRGC

SEQ ID NO: 16987 - protein, 9 aa, synthetic construct
  source 1..9: note = Seed: LVVVGARGV (KRAS G12R)
FVVFGKRGF

SEQ ID NO: 16988 - protein, 9 aa, synthetic construct
  source 1..9: note = Seed: LVVVGARGV (KRAS G12R)
FVVFGKRGG

SEQ ID NO: 16989 - protein, 9 aa, synthetic construct
  source 1..9: note = Seed: LVVVGARGV (KRAS G12R)
FVVFGKRGH

SEQ ID NO: 16990 - protein, 9 aa, synthetic construct
  source 1..9: note = Seed: LVVVGARGV (KRAS G12R)
FVVFGKRGI

SEQ ID NO: 16991 - protein, 9 aa, synthetic construct
  source 1..9: note = Seed: LVVVGARGV (KRAS G12R)
FVVFGKRGK

SEQ ID NO: 16992 - protein, 9 aa, synthetic construct
  source 1..9: note = Seed: LVVVGARGV (KRAS G12R)
FVVFGKRGL

SEQ ID NO: 16993 - protein, 9 aa, synthetic construct
  source 1..9: note = Seed: LVVVGARGV (KRAS G12R)
FVVFGKRGM

SEQ ID NO: 16994 - protein, 9 aa, synthetic construct
  source 1..9: note = Seed: LVVVGARGV (KRAS G12R)
FVVFGKRGN

SEQ ID NO: 16995 - protein, 9 aa, synthetic construct
  source 1..9: note = Seed: LVVVGARGV (KRAS G12R)
FVVFGKRGP

SEQ ID NO: 16996 - protein, 9 aa, synthetic construct
  source 1..9: note = Seed: LVVVGARGV (KRAS G12R)
FVVFGKRGQ

SEQ ID NO: 16997 - protein, 9 aa, synthetic construct
  source 1..9: note = Seed: LVVVGARGV (KRAS G12R)
FVVFGKRGR

SEQ ID NO: 16998 - protein, 9 aa, synthetic construct
  source 1..9: note = Seed: LVVVGARGV (KRAS G12R)
FVVFGKRGS

SEQ ID NO: 16999 - protein, 9 aa, synthetic construct
  source 1..9: note = Seed: LVVVGARGV (KRAS G12R)
FVVFGKRGT

SEQ ID NO: 17000 - protein, 9 aa, synthetic construct
  source 1..9: note = Seed: LVVVGARGV (KRAS G12R)
FVVFGKRGV

SEQ ID NO: 17001 - protein, 9 aa, synthetic construct
  source 1..9: note = Seed: LVVVGARGV (KRAS G12R)
FVVFGKRGW

SEQ ID NO: 17002 - protein, 9 aa, synthetic construct
  source 1..9: note = Seed: LVVVGARGV (KRAS G12R)
FVVFGKRGY

SEQ ID NO: 17003 - protein, 9 aa, synthetic construct
  source 1..9: note = Seed: LVVVGARGV (KRAS G12R)
FVVFGLRGA

SEQ ID NO: 17004 - protein, 9 aa, synthetic construct
  source 1..9: note = Seed: LVVVGARGV (KRAS G12R)
FVVFGLRGF

SEQ ID NO: 17005 - protein, 9 aa, synthetic construct
  source 1..9: note = Seed: LVVVGARGV (KRAS G12R)
FVVFGLRGI

SEQ ID NO: 17006 - protein, 9 aa, synthetic construct
  source 1..9: note = Seed: LVVVGARGV (KRAS G12R)
FVVFGLRGK

SEQ ID NO: 17007 - protein, 9 aa, synthetic construct
  source 1..9: note = Seed: LVVVGARGV (KRAS G12R)
FVVFGLRGL

SEQ ID NO: 17008 - protein, 9 aa, synthetic construct
  source 1..9: note = Seed: LVVVGARGV (KRAS G12R)
FVVFGLRGM

SEQ ID NO: 17009 - protein, 9 aa, synthetic construct
  source 1..9: note = Seed: LVVVGARGV (KRAS G12R)
FVVFGLRGQ

SEQ ID NO: 17010 - protein, 9 aa, synthetic construct
  source 1..9: note = Seed: LVVVGARGV (KRAS G12R)
FVVFGLRGR

SEQ ID NO: 17011 - protein, 9 aa, synthetic construct
  source 1..9: note = Seed: LVVVGARGV (KRAS G12R)
FVVFGLRGS

SEQ ID NO: 17012 - protein, 9 aa, synthetic construct
  source 1..9: note = Seed: LVVVGARGV (KRAS G12R)
FVVFGLRGV

SEQ ID NO: 17013 - protein, 9 aa, synthetic construct
  source 1..9: note = Seed: LVVVGARGV (KRAS G12R)
FVVFGLRGY

SEQ ID NO: 17014 - protein, 9 aa, synthetic construct
  source 1..9: note = Seed: LVVVGARGV (KRAS G12R)
FVVFGMRGA

SEQ ID NO: 17015 - protein, 9 aa, synthetic construct
  source 1..9: note = Seed: LVVVGARGV (KRAS G12R)
FVVFGMRGF

SEQ ID NO: 17016 - protein, 9 aa, synthetic construct
  source 1..9: note = Seed: LVVVGARGV (KRAS G12R)
FVVFGMRGI

SEQ ID NO: 17017 - protein, 9 aa, synthetic construct
  source 1..9: note = Seed: LVVVGARGV (KRAS G12R)
FVVFGMRGK

SEQ ID NO: 17018 - protein, 9 aa, synthetic construct
  source 1..9: note = Seed: LVVVGARGV (KRAS G12R)
FVVFGMRGL

SEQ ID NO: 17019 - protein, 9 aa, synthetic construct
  source 1..9: note = Seed: LVVVGARGV (KRAS G12R)
FVVFGMRGM

SEQ ID NO: 17020 - protein, 9 aa, synthetic construct
  source 1..9: note = Seed: LVVVGARGV (KRAS G12R)
FVVFGMRGN

SEQ ID NO: 17021 - protein, 9 aa, synthetic construct
  source 1..9: note = Seed: LVVVGARGV (KRAS G12R)
FVVFGMRGQ

SEQ ID NO: 17022 - protein, 9 aa, synthetic construct
  source 1..9: note = Seed: LVVVGARGV (KRAS G12R)
FVVFGMRGR

SEQ ID NO: 17023 - protein, 9 aa, synthetic construct
  source 1..9: note = Seed: LVVVGARGV (KRAS G12R)
FVVFGMRGS

SEQ ID NO: 17024 - protein, 9 aa, synthetic construct
  source 1..9: note = Seed: LVVVGARGV (KRAS G12R)
FVVFGMRGV

SEQ ID NO: 17025 - protein, 9 aa, synthetic construct
  source 1..9: note = Seed: LVVVGARGV (KRAS G12R)
FVVFGMRGY

SEQ ID NO: 17026 - protein, 9 aa, synthetic construct
  source 1..9: note = Seed: LVVVGARGV (KRAS G12R)
FVVFGNRGA

SEQ ID NO: 17027 - protein, 9 aa, synthetic construct
  source 1..9: note = Seed: LVVVGARGV (KRAS G12R)
FVVFGNRGD

SEQ ID NO: 17028 - protein, 9 aa, synthetic construct
  source 1..9: note = Seed: LVVVGARGV (KRAS G12R)
FVVFGNRGE

SEQ ID NO: 17029 - protein, 9 aa, synthetic construct
  source 1..9: note = Seed: LVVVGARGV (KRAS G12R)
FVVFGNRGF

SEQ ID NO: 17030 - protein, 9 aa, synthetic construct
  source 1..9: note = Seed: LVVVGARGV (KRAS G12R)
FVVFGNRGG

SEQ ID NO: 17031 - protein, 9 aa, synthetic construct
  source 1..9: note = Seed: LVVVGARGV (KRAS G12R)
FVVFGNRGH

SEQ ID NO: 17032 - protein, 9 aa, synthetic construct
  source 1..9: note = Seed: LVVVGARGV (KRAS G12R)
FVVFGNRGI

SEQ ID NO: 17033 - protein, 9 aa, synthetic construct
  source 1..9: note = Seed: LVVVGARGV (KRAS G12R)
FVVFGNRGK

SEQ ID NO: 17034 - protein, 9 aa, synthetic construct
  source 1..9: note = Seed: LVVVGARGV (KRAS G12R)
FVVFGNRGL

SEQ ID NO: 17035 - protein, 9 aa, synthetic construct
  source 1..9: note = Seed: LVVVGARGV (KRAS G12R)
FVVFGNRGM

SEQ ID NO: 17036 - protein, 9 aa, synthetic construct
  source 1..9: note = Seed: LVVVGARGV (KRAS G12R)
FVVFGNRGN

SEQ ID NO: 17037 - protein, 9 aa, synthetic construct
  source 1..9: note = Seed: LVVVGARGV (KRAS G12R)
FVVFGNRGP

SEQ ID NO: 17038 - protein, 9 aa, synthetic construct
  source 1..9: note = Seed: LVVVGARGV (KRAS G12R)
FVVFGNRGQ

SEQ ID NO: 17039 - protein, 9 aa, synthetic construct
  source 1..9: note = Seed: LVVVGARGV (KRAS G12R)
FVVFGNRGR

SEQ ID NO: 17040 - protein, 9 aa, synthetic construct
  source 1..9: note = Seed: LVVVGARGV (KRAS G12R)
FVVFGNRGS

SEQ ID NO: 17041 - protein, 9 aa, synthetic construct
  source 1..9: note = Seed: LVVVGARGV (KRAS G12R)
FVVFGNRGT

SEQ ID NO: 17042 - protein, 9 aa, synthetic construct
  source 1..9: note = Seed: LVVVGARGV (KRAS G12R)
FVVFGNRGV

SEQ ID NO: 17043 - protein, 9 aa, synthetic construct
  source 1..9: note = Seed: LVVVGARGV (KRAS G12R)
FVVFGNRGW

SEQ ID NO: 17044 - protein, 9 aa, synthetic construct
  source 1..9: note = Seed: LVVVGARGV (KRAS G12R)
FVVFGNRGY

SEQ ID NO: 17045 - protein, 9 aa, synthetic construct
  source 1..9: note = Seed: LVVVGARGV (KRAS G12R)
FVVFGPRGA

SEQ ID NO: 17046 - protein, 9 aa, synthetic construct
  source 1..9: note = Seed: LVVVGARGV (KRAS G12R)
FVVFGPRGC

SEQ ID NO: 17047 - protein, 9 aa, synthetic construct
  source 1..9: note = Seed: LVVVGARGV (KRAS G12R)
FVVFGPRGF

SEQ ID NO: 17048 - protein, 9 aa, synthetic construct
  source 1..9: note = Seed: LVVVGARGV (KRAS G12R)
FVVFGPRGG

SEQ ID NO: 17049 - protein, 9 aa, synthetic construct
  source 1..9: note = Seed: LVVVGARGV (KRAS G12R)
FVVFGPRGH

SEQ ID NO: 17050 - protein, 9 aa, synthetic construct
  source 1..9: note = Seed: LVVVGARGV (KRAS G12R)
FVVFGPRGI

SEQ ID NO: 17051 - protein, 9 aa, synthetic construct
  source 1..9: note = Seed: LVVVGARGV (KRAS G12R)
FVVFGPRGK

SEQ ID NO: 17052 - protein, 9 aa, synthetic construct
  source 1..9: note = Seed: LVVVGARGV (KRAS G12R)
FVVFGPRGL

SEQ ID NO: 17053 - protein, 9 aa, synthetic construct
  source 1..9: note = Seed: LVVVGARGV (KRAS G12R)
FVVFGPRGM

SEQ ID NO: 17054 - protein, 9 aa, synthetic construct
  source 1..9: note = Seed: LVVVGARGV (KRAS G12R)
FVVFGPRGN

SEQ ID NO: 17055 - protein, 9 aa, synthetic construct
  source 1..9: note = Seed: LVVVGARGV (KRAS G12R)
FVVFGPRGR

SEQ ID NO: 17056 - protein, 9 aa, synthetic construct
  source 1..9: note = Seed: LVVVGARGV (KRAS G12R)
FVVFGPRGS

SEQ ID NO: 17057 - protein, 9 aa, synthetic construct
  source 1..9: note = Seed: LVVVGARGV (KRAS G12R)
FVVFGPRGT

SEQ ID NO: 17058 - protein, 9 aa, synthetic construct
  source 1..9: note = Seed: LVVVGARGV (KRAS G12R)
FVVFGPRGV

SEQ ID NO: 17059 - protein, 9 aa, synthetic construct
  source 1..9: note = Seed: LVVVGARGV (KRAS G12R)
FVVFGQRGA

SEQ ID NO: 17060 - protein, 9 aa, synthetic construct
  source 1..9: note = Seed: LVVVGARGV (KRAS G12R)
FVVFGQRGH

SEQ ID NO: 17061 - protein, 9 aa, synthetic construct
  source 1..9: note = Seed: LVVVGARGV (KRAS G12R)
FVVFGQRGI

SEQ ID NO: 17062 - protein, 9 aa, synthetic construct
  source 1..9: note = Seed: LVVVGARGV (KRAS G12R)
FVVFGQRGK

SEQ ID NO: 17063 - protein, 9 aa, synthetic construct
  source 1..9: note = Seed: LVVVGARGV (KRAS G12R)
FVVFGQRGL

SEQ ID NO: 17064 - protein, 9 aa, synthetic construct
  source 1..9: note = Seed: LVVVGARGV (KRAS G12R)
FVVFGQRGM

SEQ ID NO: 17065 - protein, 9 aa, synthetic construct
  source 1..9: note = Seed: LVVVGARGV (KRAS G12R)
FVVFGQRGR

SEQ ID NO: 17066 - protein, 9 aa, synthetic construct
  source 1..9: note = Seed: LVVVGARGV (KRAS G12R)
FVVFGQRGS

SEQ ID NO: 17067 - protein, 9 aa, synthetic construct
  source 1..9: note = Seed: LVVVGARGV (KRAS G12R)
FVVFGQRGV

SEQ ID NO: 17068 - protein, 9 aa, synthetic construct
  source 1..9: note = Seed: LVVVGARGV (KRAS G12R)
FVVFGRRGA

SEQ ID NO: 17069 - protein, 9 aa, synthetic construct
  source 1..9: note = Seed: LVVVGARGV (KRAS G12R)
FVVFGRRGC

SEQ ID NO: 17070 - protein, 9 aa, synthetic construct
  source 1..9: note = Seed: LVVVGARGV (KRAS G12R)
FVVFGRRGE

SEQ ID NO: 17071 - protein, 9 aa, synthetic construct
  source 1..9: note = Seed: LVVVGARGV (KRAS G12R)
FVVFGRRGF

SEQ ID NO: 17072 - protein, 9 aa, synthetic construct
  source 1..9: note = Seed: LVVVGARGV (KRAS G12R)
FVVFGRRGG

SEQ ID NO: 17073 - protein, 9 aa, synthetic construct
  source 1..9: note = Seed: LVVVGARGV (KRAS G12R)
FVVFGRRGH

SEQ ID NO: 17074 - protein, 9 aa, synthetic construct
  source 1..9: note = Seed: LVVVGARGV (KRAS G12R)
FVVFGRRGI

SEQ ID NO: 17075 - protein, 9 aa, synthetic construct
  source 1..9: note = Seed: LVVVGARGV (KRAS G12R)
FVVFGRRGK

SEQ ID NO: 17076 - protein, 9 aa, synthetic construct
  source 1..9: note = Seed: LVVVGARGV (KRAS G12R)
FVVFGRRGL

SEQ ID NO: 17077 - protein, 9 aa, synthetic construct
  source 1..9: note = Seed: LVVVGARGV (KRAS G12R)
FVVFGRRGM

SEQ ID NO: 17078 - protein, 9 aa, synthetic construct
  source 1..9: note = Seed: LVVVGARGV (KRAS G12R)
FVVFGRRGN

SEQ ID NO: 17079 - protein, 9 aa, synthetic construct
  source 1..9: note = Seed: LVVVGARGV (KRAS G12R)
FVVFGRRGP

SEQ ID NO: 17080 - protein, 9 aa, synthetic construct
  source 1..9: note = Seed: LVVVGARGV (KRAS G12R)
FVVFGRRGQ

SEQ ID NO: 17081 - protein, 9 aa, synthetic construct
  source 1..9: note = Seed: LVVVGARGV (KRAS G12R)
FVVFGRRGR

SEQ ID NO: 17082 - protein, 9 aa, synthetic construct
  source 1..9: note = Seed: LVVVGARGV (KRAS G12R)
FVVFGRRGS

SEQ ID NO: 17083 - protein, 9 aa, synthetic construct
  source 1..9: note = Seed: LVVVGARGV (KRAS G12R)
FVVFGRRGT

SEQ ID NO: 17084 - protein, 9 aa, synthetic construct
  source 1..9: note = Seed: LVVVGARGV (KRAS G12R)
FVVFGRRGV

SEQ ID NO: 17085 - protein, 9 aa, synthetic construct
  source 1..9: note = Seed: LVVVGARGV (KRAS G12R)
FVVFGRRGW

SEQ ID NO: 17086 - protein, 9 aa, synthetic construct
  source 1..9: note = Seed: LVVVGARGV (KRAS G12R)
FVVFGRRGY

SEQ ID NO: 17087 - protein, 9 aa, synthetic construct
  source 1..9: note = Seed: LVVVGARGV (KRAS G12R)
FVVFGSRGA

SEQ ID NO: 17088 - protein, 9 aa, synthetic construct
  source 1..9: note = Seed: LVVVGARGV (KRAS G12R)
FVVFGSRGC

SEQ ID NO: 17089 - protein, 9 aa, synthetic construct
  source 1..9: note = Seed: LVVVGARGV (KRAS G12R)
FVVFGSRGD

SEQ ID NO: 17090 - protein, 9 aa, synthetic construct
  source 1..9: note = Seed: LVVVGARGV (KRAS G12R)
FVVFGSRGE

SEQ ID NO: 17091 - protein, 9 aa, synthetic construct
  source 1..9: note = Seed: LVVVGARGV (KRAS G12R)
FVVFGSRGF

SEQ ID NO: 17092 - protein, 9 aa, synthetic construct
  source 1..9: note = Seed: LVVVGARGV (KRAS G12R)
FVVFGSRGG

SEQ ID NO: 17093 - protein, 9 aa, synthetic construct
  source 1..9: note = Seed: LVVVGARGV (KRAS G12R)
FVVFGSRGH

SEQ ID NO: 17094 - protein, 9 aa, synthetic construct
  source 1..9: note = Seed: LVVVGARGV (KRAS G12R)
FVVFGSRGI

SEQ ID NO: 17095 - protein, 9 aa, synthetic construct
  source 1..9: note = Seed: LVVVGARGV (KRAS G12R)
FVVFGSRGK

SEQ ID NO: 17096 - protein, 9 aa, synthetic construct
  source 1..9: note = Seed: LVVVGARGV (KRAS G12R)
FVVFGSRGL

SEQ ID NO: 17097 - protein, 9 aa, synthetic construct
  source 1..9: note = Seed: LVVVGARGV (KRAS G12R)
FVVFGSRGM

SEQ ID NO: 17098 - protein, 9 aa, synthetic construct
  source 1..9: note = Seed: LVVVGARGV (KRAS G12R)
FVVFGSRGN

SEQ ID NO: 17099 - protein, 9 aa, synthetic construct
  source 1..9: note = Seed: LVVVGARGV (KRAS G12R)
FVVFGSRGP

SEQ ID NO: 17100 - protein, 9 aa, synthetic construct
  source 1..9: note = Seed: LVVVGARGV (KRAS G12R)
FVVFGSRGQ

SEQ ID NO: 17101 - protein, 9 aa, synthetic construct
  source 1..9: note = Seed: LVVVGARGV (KRAS G12R)
FVVFGSRGR

SEQ ID NO: 17102 - protein, 9 aa, synthetic construct
  source 1..9: note = Seed: LVVVGARGV (KRAS G12R)
FVVFGSRGS

SEQ ID NO: 17103 - protein, 9 aa, synthetic construct
  source 1..9: note = Seed: LVVVGARGV (KRAS G12R)
FVVFGSRGT

SEQ ID NO: 17104 - protein, 9 aa, synthetic construct
  source 1..9: note = Seed: LVVVGARGV (KRAS G12R)
FVVFGSRGV

SEQ ID NO: 17105 - protein, 9 aa, synthetic construct
  source 1..9: note = Seed: LVVVGARGV (KRAS G12R)
FVVFGSRGW

SEQ ID NO: 17106 - protein, 9 aa, synthetic construct
  source 1..9: note = Seed: LVVVGARGV (KRAS G12R)
FVVFGSRGY

SEQ ID NO: 17107 - protein, 9 aa, synthetic construct
  source 1..9: note = Seed: LVVVGARGV (KRAS G12R)
FVVFGTRGA

SEQ ID NO: 17108 - protein, 9 aa, synthetic construct
  source 1..9: note = Seed: LVVVGARGV (KRAS G12R)
FVVFGTRGD

SEQ ID NO: 17109 - protein, 9 aa, synthetic construct
  source 1..9: note = Seed: LVVVGARGV (KRAS G12R)
FVVFGTRGE

SEQ ID NO: 17110 - protein, 9 aa, synthetic construct
  source 1..9: note = Seed: LVVVGARGV (KRAS G12R)
FVVFGTRGF

SEQ ID NO: 17111 - protein, 9 aa, synthetic construct
  source 1..9: note = Seed: LVVVGARGV (KRAS G12R)
FVVFGTRGG

SEQ ID NO: 17112 - protein, 9 aa, synthetic construct
  source 1..9: note = Seed: LVVVGARGV (KRAS G12R)
FVVFGTRGH

SEQ ID NO: 17113 - protein, 9 aa, synthetic construct
  source 1..9: note = Seed: LVVVGARGV (KRAS G12R)
FVVFGTRGI

SEQ ID NO: 17114 - protein, 9 aa, synthetic construct
  source 1..9: note = Seed: LVVVGARGV (KRAS G12R)
FVVFGTRGK

SEQ ID NO: 17115 - protein, 9 aa, synthetic construct
  source 1..9: note = Seed: LVVVGARGV (KRAS G12R)
FVVFGTRGL

SEQ ID NO: 17116 - protein, 9 aa, synthetic construct
  source 1..9: note = Seed: LVVVGARGV (KRAS G12R)
FVVFGTRGM

SEQ ID NO: 17117 - protein, 9 aa, synthetic construct
  source 1..9: note = Seed: LVVVGARGV (KRAS G12R)
FVVFGTRGN

SEQ ID NO: 17118 - protein, 9 aa, synthetic construct
  source 1..9: note = Seed: LVVVGARGV (KRAS G12R)
FVVFGTRGQ

SEQ ID NO: 17119 - protein, 9 aa, synthetic construct
  source 1..9: note = Seed: LVVVGARGV (KRAS G12R)
FVVFGTRGR

SEQ ID NO: 17120 - protein, 9 aa, synthetic construct
  source 1..9: note = Seed: LVVVGARGV (KRAS G12R)
FVVFGTRGS

SEQ ID NO: 17121 - protein, 9 aa, synthetic construct
  source 1..9: note = Seed: LVVVGARGV (KRAS G12R)
FVVFGTRGT

SEQ ID NO: 17122 - protein, 9 aa, synthetic construct
  source 1..9: note = Seed: LVVVGARGV (KRAS G12R)
FVVFGTRGV

SEQ ID NO: 17123 - protein, 9 aa, synthetic construct
  source 1..9: note = Seed: LVVVGARGV (KRAS G12R)
FVVFGTRGY

SEQ ID NO: 17124 - protein, 9 aa, synthetic construct
  source 1..9: note = Seed: LVVVGARGV (KRAS G12R)
FVVFGVRGA

SEQ ID NO: 17125 - protein, 9 aa, synthetic construct
  source 1..9: note = Seed: LVVVGARGV (KRAS G12R)
FVVFGVRGD

SEQ ID NO: 17126 - protein, 9 aa, synthetic construct
  source 1..9: note = Seed: LVVVGARGV (KRAS G12R)
FVVFGVRGF

SEQ ID NO: 17127 - protein, 9 aa, synthetic construct
  source 1..9: note = Seed: LVVVGARGV (KRAS G12R)
FVVFGVRGG

SEQ ID NO: 17128 - protein, 9 aa, synthetic construct
  source 1..9: note = Seed: LVVVGARGV (KRAS G12R)
FVVFGVRGH

SEQ ID NO: 17129 - protein, 9 aa, synthetic construct
  source 1..9: note = Seed: LVVVGARGV (KRAS G12R)
FVVFGVRGI

SEQ ID NO: 17130 - protein, 9 aa, synthetic construct
  source 1..9: note = Seed: LVVVGARGV (KRAS G12R)
FVVFGVRGK

SEQ ID NO: 17131 - protein, 9 aa, synthetic construct
  source 1..9: note = Seed: LVVVGARGV (KRAS G12R)
FVVFGVRGL

SEQ ID NO: 17132 - protein, 9 aa, synthetic construct
  source 1..9: note = Seed: LVVVGARGV (KRAS G12R)
FVVFGVRGM

SEQ ID NO: 17133 - protein, 9 aa, synthetic construct
  source 1..9: note = Seed: LVVVGARGV (KRAS G12R)
FVVFGVRGN

SEQ ID NO: 17134 - protein, 9 aa, synthetic construct
  source 1..9: note = Seed: LVVVGARGV (KRAS G12R)
FVVFGVRGQ

SEQ ID NO: 17135 - protein, 9 aa, synthetic construct
  source 1..9: note = Seed: LVVVGARGV (KRAS G12R)
FVVFGVRGR

SEQ ID NO: 17136 - protein, 9 aa, synthetic construct
  source 1..9: note = Seed: LVVVGARGV (KRAS G12R)
FVVFGVRGS

SEQ ID NO: 17137 - protein, 9 aa, synthetic construct
  source 1..9: note = Seed: LVVVGARGV (KRAS G12R)
FVVFGVRGT

SEQ ID NO: 17138 - protein, 9 aa, synthetic construct
  source 1..9: note = Seed: LVVVGARGV (KRAS G12R)
FVVFGVRGV

SEQ ID NO: 17139 - protein, 9 aa, synthetic construct
  source 1..9: note = Seed: LVVVGARGV (KRAS G12R)
FVVFGVRGY

SEQ ID NO: 17140 - protein, 9 aa, synthetic construct
  source 1..9: note = Seed: LVVVGARGV (KRAS G12R)
FVVFGWRGL

SEQ ID NO: 17141 - protein, 9 aa, synthetic construct
  source 1..9: note = Seed: LVVVGARGV (KRAS G12R)
FVVFGYRGF

SEQ ID NO: 17142 - protein, 9 aa, synthetic construct
  source 1..9: note = Seed: LVVVGARGV (KRAS G12R)
FVVFGYRGI

SEQ ID NO: 17143 - protein, 9 aa, synthetic construct
  source 1..9: note = Seed: LVVVGARGV (KRAS G12R)
FVVFGYRGL

SEQ ID NO: 17144 - protein, 9 aa, synthetic construct
  source 1..9: note = Seed: LVVVGARGV (KRAS G12R)
FVVFGYRGM

SEQ ID NO: 17145 - protein, 9 aa, synthetic construct
  source 1..9: note = Seed: LVVVGARGV (KRAS G12R)
FVVFGYRGR

SEQ ID NO: 17146 - protein, 9 aa, synthetic construct
  source 1..9: note = Seed: LVVVGARGV (KRAS G12R)
FVVFGYRGV

SEQ ID NO: 17147 - protein, 9 aa, synthetic construct
  source 1..9: note = Seed: LVVVGARGV (KRAS G12R)
FVVGGARGA

SEQ ID NO: 17148 - protein, 9 aa, synthetic construct
  source 1..9: note = Seed: LVVVGARGV (KRAS G12R)
FVVGGARGC

SEQ ID NO: 17149 - protein, 9 aa, synthetic construct
  source 1..9: note = Seed: LVVVGARGV (KRAS G12R)
FVVGGARGF

SEQ ID NO: 17150 - protein, 9 aa, synthetic construct
  source 1..9: note = Seed: LVVVGARGV (KRAS G12R)
FVVGGARGG

SEQ ID NO: 17151 - protein, 9 aa, synthetic construct
  source 1..9: note = Seed: LVVVGARGV (KRAS G12R)
FVVGGARGH

SEQ ID NO: 17152 - protein, 9 aa, synthetic construct
  source 1..9: note = Seed: LVVVGARGV (KRAS G12R)
FVVGGARGI

SEQ ID NO: 17153 - protein, 9 aa, synthetic construct
  source 1..9: note = Seed: LVVVGARGV (KRAS G12R)
FVVGGARGL

SEQ ID NO: 17154 - protein, 9 aa, synthetic construct
  source 1..9: note = Seed: LVVVGARGV (KRAS G12R)
FVVGGARGM

SEQ ID NO: 17155 - protein, 9 aa, synthetic construct
  source 1..9: note = Seed: LVVVGARGV (KRAS G12R)
FVVGGARGN

SEQ ID NO: 17156 - protein, 9 aa, synthetic construct
  source 1..9: note = Seed: LVVVGARGV (KRAS G12R)
FVVGGARGP

SEQ ID NO: 17157 - protein, 9 aa, synthetic construct
  source 1..9: note = Seed: LVVVGARGV (KRAS G12R)
FVVGGARGQ

SEQ ID NO: 17158 - protein, 9 aa, synthetic construct
  source 1..9: note = Seed: LVVVGARGV (KRAS G12R)
FVVGGARGS

SEQ ID NO: 17159 - protein, 9 aa, synthetic construct
  source 1..9: note = Seed: LVVVGARGV (KRAS G12R)
FVVGGARGT

SEQ ID NO: 17160 - protein, 9 aa, synthetic construct
  source 1..9: note = Seed: LVVVGARGV (KRAS G12R)
FVVGGARGV

SEQ ID NO: 17161 - protein, 9 aa, synthetic construct
  source 1..9: note = Seed: LVVVGARGV (KRAS G12R)
FVVGGARGW

SEQ ID NO: 17162 - protein, 9 aa, synthetic construct
  source 1..9: note = Seed: LVVVGARGV (KRAS G12R)
FVVGGARGY

SEQ ID NO: 17163 - protein, 9 aa, synthetic construct
  source 1..9: note = Seed: LVVVGARGV (KRAS G12R)
FVVGGCRGI

SEQ ID NO: 17164 - protein, 9 aa, synthetic construct
  source 1..9: note = Seed: LVVVGARGV (KRAS G12R)
FVVGGCRGL

SEQ ID NO: 17165 - protein, 9 aa, synthetic construct
  source 1..9: note = Seed: LVVVGARGV (KRAS G12R)
FVVGGCRGV

SEQ ID NO: 17166 - protein, 9 aa, synthetic construct
  source 1..9: note = Seed: LVVVGARGV (KRAS G12R)
FVVGGFRGI

SEQ ID NO: 17167 - protein, 9 aa, synthetic construct
  source 1..9: note = Seed: LVVVGARGV (KRAS G12R)
FVVGGFRGL

SEQ ID NO: 17168 - protein, 9 aa, synthetic construct
  source 1..9: note = Seed: LVVVGARGV (KRAS G12R)
FVVGGFRGV

SEQ ID NO: 17169 - protein, 9 aa, synthetic construct
  source 1..9: note = Seed: LVVVGARGV (KRAS G12R)
FVVGGGRGA

SEQ ID NO: 17170 - protein, 9 aa, synthetic construct
  source 1..9: note = Seed: LVVVGARGV (KRAS G12R)
FVVGGGRGF

SEQ ID NO: 17171 - protein, 9 aa, synthetic construct
  source 1..9: note = Seed: LVVVGARGV (KRAS G12R)
FVVGGGRGI

SEQ ID NO: 17172 - protein, 9 aa, synthetic construct
  source 1..9: note = Seed: LVVVGARGV (KRAS G12R)
FVVGGGRGL

SEQ ID NO: 17173 - protein, 9 aa, synthetic construct
  source 1..9: note = Seed: LVVVGARGV (KRAS G12R)
FVVGGGRGM

SEQ ID NO: 17174 - protein, 9 aa, synthetic construct
  source 1..9: note = Seed: LVVVGARGV (KRAS G12R)
FVVGGGRGS

SEQ ID NO: 17175 - protein, 9 aa, synthetic construct
  source 1..9: note = Seed: LVVVGARGV (KRAS G12R)
FVVGGGRGT

SEQ ID NO: 17176 - protein, 9 aa, synthetic construct
  source 1..9: note = Seed: LVVVGARGV (KRAS G12R)
FVVGGGRGV

SEQ ID NO: 17177 - protein, 9 aa, synthetic construct
  source 1..9: note = Seed: LVVVGARGV (KRAS G12R)
FVVGGIRGA

SEQ ID NO: 17178 - protein, 9 aa, synthetic construct
  source 1..9: note = Seed: LVVVGARGV (KRAS G12R)
FVVGGIRGF

SEQ ID NO: 17179 - protein, 9 aa, synthetic construct
  source 1..9: note = Seed: LVVVGARGV (KRAS G12R)
FVVGGIRGI

SEQ ID NO: 17180 - protein, 9 aa, synthetic construct
  source 1..9: note = Seed: LVVVGARGV (KRAS G12R)
FVVGGIRGL

SEQ ID NO: 17181 - protein, 9 aa, synthetic construct
  source 1..9: note = Seed: LVVVGARGV (KRAS G12R)
FVVGGIRGM

SEQ ID NO: 17182 - protein, 9 aa, synthetic construct
  source 1..9: note = Seed: LVVVGARGV (KRAS G12R)
FVVGGIRGS

SEQ ID NO: 17183 - protein, 9 aa, synthetic construct
  source 1..9: note = Seed: LVVVGARGV (KRAS G12R)
FVVGGIRGT

SEQ ID NO: 17184 - protein, 9 aa, synthetic construct
  source 1..9: note = Seed: LVVVGARGV (KRAS G12R)
FVVGGIRGV

SEQ ID NO: 17185 - protein, 9 aa, synthetic construct
  source 1..9: note = Seed: LVVVGARGV (KRAS G12R)
FVVGGKRGR

SEQ ID NO: 17186 - protein, 9 aa, synthetic construct
  source 1..9: note = Seed: LVVVGARGV (KRAS G12R)
FVVGGLRGA

SEQ ID NO: 17187 - protein, 9 aa, synthetic construct
  source 1..9: note = Seed: LVVVGARGV (KRAS G12R)
FVVGGLRGI

SEQ ID NO: 17188 - protein, 9 aa, synthetic construct
  source 1..9: note = Seed: LVVVGARGV (KRAS G12R)
FVVGGLRGL

SEQ ID NO: 17189 - protein, 9 aa, synthetic construct
  source 1..9: note = Seed: LVVVGARGV (KRAS G12R)
FVVGGLRGM

SEQ ID NO: 17190 - protein, 9 aa, synthetic construct
  source 1..9: note = Seed: LVVVGARGV (KRAS G12R)
FVVGGLRGV

SEQ ID NO: 17191 - protein, 9 aa, synthetic construct
  source 1..9: note = Seed: LVVVGARGV (KRAS G12R)
FVVGGMRGA

SEQ ID NO: 17192 - protein, 9 aa, synthetic construct
  source 1..9: note = Seed: LVVVGARGV (KRAS G12R)
FVVGGMRGF

SEQ ID NO: 17193 - protein, 9 aa, synthetic construct
  source 1..9: note = Seed: LVVVGARGV (KRAS G12R)
FVVGGMRGI

SEQ ID NO: 17194 - protein, 9 aa, synthetic construct
  source 1..9: note = Seed: LVVVGARGV (KRAS G12R)
FVVGGMRGL

SEQ ID NO: 17195 - protein, 9 aa, synthetic construct
  source 1..9: note = Seed: LVVVGARGV (KRAS G12R)
FVVGGMRGM

SEQ ID NO: 17196 - protein, 9 aa, synthetic construct
  source 1..9: note = Seed: LVVVGARGV (KRAS G12R)
FVVGGMRGV

SEQ ID NO: 17197 - protein, 9 aa, synthetic construct
  source 1..9: note = Seed: LVVVGARGV (KRAS G12R)
FVVGGNRGA

SEQ ID NO: 17198 - protein, 9 aa, synthetic construct
  source 1..9: note = Seed: LVVVGARGV (KRAS G12R)
FVVGGNRGF

SEQ ID NO: 17199 - protein, 9 aa, synthetic construct
  source 1..9: note = Seed: LVVVGARGV (KRAS G12R)
FVVGGNRGI

SEQ ID NO: 17200 - protein, 9 aa, synthetic construct
  source 1..9: note = Seed: LVVVGARGV (KRAS G12R)
FVVGGNRGL

SEQ ID NO: 17201 - protein, 9 aa, synthetic construct
  source 1..9: note = Seed: LVVVGARGV (KRAS G12R)
FVVGGNRGM

SEQ ID NO: 17202 - protein, 9 aa, synthetic construct
  source 1..9: note = Seed: LVVVGARGV (KRAS G12R)
FVVGGNRGS

SEQ ID NO: 17203 - protein, 9 aa, synthetic construct
  source 1..9: note = Seed: LVVVGARGV (KRAS G12R)
FVVGGNRGT

SEQ ID NO: 17204 - protein, 9 aa, synthetic construct
  source 1..9: note = Seed: LVVVGARGV (KRAS G12R)
FVVGGNRGV

SEQ ID NO: 17205 - protein, 9 aa, synthetic construct
  source 1..9: note = Seed: LVVVGARGV (KRAS G12R)
FVVGGPRGA

SEQ ID NO: 17206 - protein, 9 aa, synthetic construct
  source 1..9: note = Seed: LVVVGARGV (KRAS G12R)
FVVGGPRGF

SEQ ID NO: 17207 - protein, 9 aa, synthetic construct
  source 1..9: note = Seed: LVVVGARGV (KRAS G12R)
FVVGGPRGI

SEQ ID NO: 17208 - protein, 9 aa, synthetic construct
  source 1..9: note = Seed: LVVVGARGV (KRAS G12R)
FVVGGPRGL

SEQ ID NO: 17209 - protein, 9 aa, synthetic construct
  source 1..9: note = Seed: LVVVGARGV (KRAS G12R)
FVVGGPRGM

SEQ ID NO: 17210 - protein, 9 aa, synthetic construct
  source 1..9: note = Seed: LVVVGARGV (KRAS G12R)
FVVGGPRGS

SEQ ID NO: 17211 - protein, 9 aa, synthetic construct
  source 1..9: note = Seed: LVVVGARGV (KRAS G12R)
FVVGGPRGT

SEQ ID NO: 17212 - protein, 9 aa, synthetic construct
  source 1..9: note = Seed: LVVVGARGV (KRAS G12R)
FVVGGPRGV

SEQ ID NO: 17213 - protein, 9 aa, synthetic construct
  source 1..9: note = Seed: LVVVGARGV (KRAS G12R)
FVVGGQRGL

SEQ ID NO: 17214 - protein, 9 aa, synthetic construct
  source 1..9: note = Seed: LVVVGARGV (KRAS G12R)
FVVGGRRGA

SEQ ID NO: 17215 - protein, 9 aa, synthetic construct
  source 1..9: note = Seed: LVVVGARGV (KRAS G12R)
FVVGGRRGI

SEQ ID NO: 17216 - protein, 9 aa, synthetic construct
  source 1..9: note = Seed: LVVVGARGV (KRAS G12R)
FVVGGRRGL

SEQ ID NO: 17217 - protein, 9 aa, synthetic construct
  source 1..9: note = Seed: LVVVGARGV (KRAS G12R)
FVVGGRRGM

SEQ ID NO: 17218 - protein, 9 aa, synthetic construct
  source 1..9: note = Seed: LVVVGARGV (KRAS G12R)
FVVGGRRGQ

SEQ ID NO: 17219 - protein, 9 aa, synthetic construct
  source 1..9: note = Seed: LVVVGARGV (KRAS G12R)
FVVGGRRGR

SEQ ID NO: 17220 - protein, 9 aa, synthetic construct
  source 1..9: note = Seed: LVVVGARGV (KRAS G12R)
FVVGGRRGS

SEQ ID NO: 17221 - protein, 9 aa, synthetic construct
  source 1..9: note = Seed: LVVVGARGV (KRAS G12R)
FVVGGRRGY

SEQ ID NO: 17222 - protein, 9 aa, synthetic construct
  source 1..9: note = Seed: LVVVGARGV (KRAS G12R)
FVVGGSRGA

SEQ ID NO: 17223 - protein, 9 aa, synthetic construct
  source 1..9: note = Seed: LVVVGARGV (KRAS G12R)
FVVGGSRGF

SEQ ID NO: 17224 - protein, 9 aa, synthetic construct
  source 1..9: note = Seed: LVVVGARGV (KRAS G12R)
FVVGGSRGI

SEQ ID NO: 17225 - protein, 9 aa, synthetic construct
  source 1..9: note = Seed: LVVVGARGV (KRAS G12R)
FVVGGSRGL

SEQ ID NO: 17226 - protein, 9 aa, synthetic construct
  source 1..9: note = Seed: LVVVGARGV (KRAS G12R)
FVVGGSRGM

SEQ ID NO: 17227 - protein, 9 aa, synthetic construct
  source 1..9: note = Seed: LVVVGARGV (KRAS G12R)
FVVGGSRGS

SEQ ID NO: 17228 - protein, 9 aa, synthetic construct
  source 1..9: note = Seed: LVVVGARGV (KRAS G12R)
FVVGGSRGT

SEQ ID NO: 17229 - protein, 9 aa, synthetic construct
  source 1..9: note = Seed: LVVVGARGV (KRAS G12R)
FVVGGSRGV

SEQ ID NO: 17230 - protein, 9 aa, synthetic construct
  source 1..9: note = Seed: LVVVGARGV (KRAS G12R)
FVVGGSRGY

SEQ ID NO: 17231 - protein, 9 aa, synthetic construct
  source 1..9: note = Seed: LVVVGARGV (KRAS G12R)
FVVGGTRGA

SEQ ID NO: 17232 - protein, 9 aa, synthetic construct
  source 1..9: note = Seed: LVVVGARGV (KRAS G12R)
FVVGGTRGF

SEQ ID NO: 17233 - protein, 9 aa, synthetic construct
  source 1..9: note = Seed: LVVVGARGV (KRAS G12R)
FVVGGTRGI

SEQ ID NO: 17234 - protein, 9 aa, synthetic construct
  source 1..9: note = Seed: LVVVGARGV (KRAS G12R)
FVVGGTRGL

SEQ ID NO: 17235 - protein, 9 aa, synthetic construct
  source 1..9: note = Seed: LVVVGARGV (KRAS G12R)
FVVGGTRGM

SEQ ID NO: 17236 - protein, 9 aa, synthetic construct
  source 1..9: note = Seed: LVVVGARGV (KRAS G12R)
FVVGGTRGS

SEQ ID NO: 17237 - protein, 9 aa, synthetic construct
  source 1..9: note = Seed: LVVVGARGV (KRAS G12R)
FVVGGTRGT

SEQ ID NO: 17238 - protein, 9 aa, synthetic construct
  source 1..9: note = Seed: LVVVGARGV (KRAS G12R)
FVVGGTRGV

SEQ ID NO: 17239 - protein, 9 aa, synthetic construct
  source 1..9: note = Seed: LVVVGARGV (KRAS G12R)
FVVGGVRGA

SEQ ID NO: 17240 - protein, 9 aa, synthetic construct
  source 1..9: note = Seed: LVVVGARGV (KRAS G12R)
FVVGGVRGF

SEQ ID NO: 17241 - protein, 9 aa, synthetic construct
  source 1..9: note = Seed: LVVVGARGV (KRAS G12R)
FVVGGVRGI

SEQ ID NO: 17242 - protein, 9 aa, synthetic construct
  source 1..9: note = Seed: LVVVGARGV (KRAS G12R)
FVVGGVRGL

SEQ ID NO: 17243 - protein, 9 aa, synthetic construct
  source 1..9: note = Seed: LVVVGARGV (KRAS G12R)
FVVGGVRGM

SEQ ID NO: 17244 - protein, 9 aa, synthetic construct
  source 1..9: note = Seed: LVVVGARGV (KRAS G12R)
FVVGGVRGS

SEQ ID NO: 17245 - protein, 9 aa, synthetic construct
  source 1..9: note = Seed: LVVVGARGV (KRAS G12R)
FVVGGVRGT

SEQ ID NO: 17246 - protein, 9 aa, synthetic construct
  source 1..9: note = Seed: LVVVGARGV (KRAS G12R)
FVVGGVRGV

SEQ ID NO: 17247 - protein, 9 aa, synthetic construct
  source 1..9: note = Seed: LVVVGARGV (KRAS G12R)
FVVGGVRGY

SEQ ID NO: 17248 - protein, 9 aa, synthetic construct
  source 1..9: note = Seed: LVVVGARGV (KRAS G12R)
FVVHGARGA

SEQ ID NO: 17249 - protein, 9 aa, synthetic construct
  source 1..9: note = Seed: LVVVGARGV (KRAS G12R)
FVVHGARGC

SEQ ID NO: 17250 - protein, 9 aa, synthetic construct
  source 1..9: note = Seed: LVVVGARGV (KRAS G12R)
FVVHGARGF

SEQ ID NO: 17251 - protein, 9 aa, synthetic construct
  source 1..9: note = Seed: LVVVGARGV (KRAS G12R)
FVVHGARGG

SEQ ID NO: 17252 - protein, 9 aa, synthetic construct
  source 1..9: note = Seed: LVVVGARGV (KRAS G12R)
FVVHGARGH

SEQ ID NO: 17253 - protein, 9 aa, synthetic construct
  source 1..9: note = Seed: LVVVGARGV (KRAS G12R)
FVVHGARGI

SEQ ID NO: 17254 - protein, 9 aa, synthetic construct
  source 1..9: note = Seed: LVVVGARGV (KRAS G12R)
FVVHGARGK

SEQ ID NO: 17255 - protein, 9 aa, synthetic construct
  source 1..9: note = Seed: LVVVGARGV (KRAS G12R)
FVVHGARGL

SEQ ID NO: 17256 - protein, 9 aa, synthetic construct
  source 1..9: note = Seed: LVVVGARGV (KRAS G12R)
FVVHGARGM

SEQ ID NO: 17257 - protein, 9 aa, synthetic construct
  source 1..9: note = Seed: LVVVGARGV (KRAS G12R)
FVVHGARGN

SEQ ID NO: 17258 - protein, 9 aa, synthetic construct
  source 1..9: note = Seed: LVVVGARGV (KRAS G12R)
FVVHGARGR

SEQ ID NO: 17259 - protein, 9 aa, synthetic construct
  source 1..9: note = Seed: LVVVGARGV (KRAS G12R)
FVVHGARGS

SEQ ID NO: 17260 - protein, 9 aa, synthetic construct
  source 1..9: note = Seed: LVVVGARGV (KRAS G12R)
FVVHGARGT

SEQ ID NO: 17261 - protein, 9 aa, synthetic construct
  source 1..9: note = Seed: LVVVGARGV (KRAS G12R)
FVVHGARGV

SEQ ID NO: 17262 - protein, 9 aa, synthetic construct
  source 1..9: note = Seed: LVVVGARGV (KRAS G12R)
FVVHGARGW

SEQ ID NO: 17263 - protein, 9 aa, synthetic construct
  source 1..9: note = Seed: LVVVGARGV (KRAS G12R)
FVVHGARGY

SEQ ID NO: 17264 - protein, 9 aa, synthetic construct
  source 1..9: note = Seed: LVVVGARGV (KRAS G12R)
FVVHGFRGA

SEQ ID NO: 17265 - protein, 9 aa, synthetic construct
  source 1..9: note = Seed: LVVVGARGV (KRAS G12R)
FVVHGFRGF

SEQ ID NO: 17266 - protein, 9 aa, synthetic construct
  source 1..9: note = Seed: LVVVGARGV (KRAS G12R)
FVVHGFRGI

SEQ ID NO: 17267 - protein, 9 aa, synthetic construct
  source 1..9: note = Seed: LVVVGARGV (KRAS G12R)
FVVHGFRGL

SEQ ID NO: 17268 - protein, 9 aa, synthetic construct
  source 1..9: note = Seed: LVVVGARGV (KRAS G12R)
FVVHGFRGM

SEQ ID NO: 17269 - protein, 9 aa, synthetic construct
  source 1..9: note = Seed: LVVVGARGV (KRAS G12R)
FVVHGFRGR

SEQ ID NO: 17270 - protein, 9 aa, synthetic construct
  source 1..9: note = Seed: LVVVGARGV (KRAS G12R)
FVVHGFRGS

SEQ ID NO: 17271 - protein, 9 aa, synthetic construct
  source 1..9: note = Seed: LVVVGARGV (KRAS G12R)
FVVHGFRGT

SEQ ID NO: 17272 - protein, 9 aa, synthetic construct
  source 1..9: note = Seed: LVVVGARGV (KRAS G12R)
FVVHGFRGV

SEQ ID NO: 17273 - protein, 9 aa, synthetic construct
  source 1..9: note = Seed: LVVVGARGV (KRAS G12R)
FVVHGFRGY

SEQ ID NO: 17274 - protein, 9 aa, synthetic construct
  source 1..9: note = Seed: LVVVGARGV (KRAS G12R)
FVVHGGRGA

SEQ ID NO: 17275 - protein, 9 aa, synthetic construct
  source 1..9: note = Seed: LVVVGARGV (KRAS G12R)
FVVHGGRGF

SEQ ID NO: 17276 - protein, 9 aa, synthetic construct
  source 1..9: note = Seed: LVVVGARGV (KRAS G12R)
FVVHGGRGI

SEQ ID NO: 17277 - protein, 9 aa, synthetic construct
  source 1..9: note = Seed: LVVVGARGV (KRAS G12R)
FVVHGGRGL

SEQ ID NO: 17278 - protein, 9 aa, synthetic construct
  source 1..9: note = Seed: LVVVGARGV (KRAS G12R)
FVVHGGRGM

SEQ ID NO: 17279 - protein, 9 aa, synthetic construct
  source 1..9: note = Seed: LVVVGARGV (KRAS G12R)
FVVHGGRGR

SEQ ID NO: 17280 - protein, 9 aa, synthetic construct
  source 1..9: note = Seed: LVVVGARGV (KRAS G12R)
FVVHGGRGS

SEQ ID NO: 17281 - protein, 9 aa, synthetic construct
  source 1..9: note = Seed: LVVVGARGV (KRAS G12R)
FVVHGGRGT

SEQ ID NO: 17282 - protein, 9 aa, synthetic construct
  source 1..9: note = Seed: LVVVGARGV (KRAS G12R)
FVVHGGRGV

SEQ ID NO: 17283 - protein, 9 aa, synthetic construct
  source 1..9: note = Seed: LVVVGARGV (KRAS G12R)
FVVHGHRGA

SEQ ID NO: 17284 - protein, 9 aa, synthetic construct
  source 1..9: note = Seed: LVVVGARGV (KRAS G12R)
FVVHGHRGF

SEQ ID NO: 17285 - protein, 9 aa, synthetic construct
  source 1..9: note = Seed: LVVVGARGV (KRAS G12R)
FVVHGHRGH

SEQ ID NO: 17286 - protein, 9 aa, synthetic construct
  source 1..9: note = Seed: LVVVGARGV (KRAS G12R)
FVVHGHRGI

SEQ ID NO: 17287 - protein, 9 aa, synthetic construct
  source 1..9: note = Seed: LVVVGARGV (KRAS G12R)
FVVHGHRGK

SEQ ID NO: 17288 - protein, 9 aa, synthetic construct
  source 1..9: note = Seed: LVVVGARGV (KRAS G12R)
FVVHGHRGL

SEQ ID NO: 17289 - protein, 9 aa, synthetic construct
  source 1..9: note = Seed: LVVVGARGV (KRAS G12R)
FVVHGHRGM

SEQ ID NO: 17290 - protein, 9 aa, synthetic construct
  source 1..9: note = Seed: LVVVGARGV (KRAS G12R)
FVVHGHRGR

SEQ ID NO: 17291 - protein, 9 aa, synthetic construct
  source 1..9: note = Seed: LVVVGARGV (KRAS G12R)
FVVHGHRGV

SEQ ID NO: 17292 - protein, 9 aa, synthetic construct
  source 1..9: note = Seed: LVVVGARGV (KRAS G12R)
FVVHGHRGY

SEQ ID NO: 17293 - protein, 9 aa, synthetic construct
  source 1..9: note = Seed: LVVVGARGV (KRAS G12R)
FVVHGIRGA

SEQ ID NO: 17294 - protein, 9 aa, synthetic construct
  source 1..9: note = Seed: LVVVGARGV (KRAS G12R)
FVVHGIRGF

SEQ ID NO: 17295 - protein, 9 aa, synthetic construct
  source 1..9: note = Seed: LVVVGARGV (KRAS G12R)
FVVHGIRGH

SEQ ID NO: 17296 - protein, 9 aa, synthetic construct
  source 1..9: note = Seed: LVVVGARGV (KRAS G12R)
FVVHGIRGI

SEQ ID NO: 17297 - protein, 9 aa, synthetic construct
  source 1..9: note = Seed: LVVVGARGV (KRAS G12R)
FVVHGIRGK

SEQ ID NO: 17298 - protein, 9 aa, synthetic construct
  source 1..9: note = Seed: LVVVGARGV (KRAS G12R)
FVVHGIRGL

SEQ ID NO: 17299 - protein, 9 aa, synthetic construct
  source 1..9: note = Seed: LVVVGARGV (KRAS G12R)
FVVHGIRGM

SEQ ID NO: 17300 - protein, 9 aa, synthetic construct
  source 1..9: note = Seed: LVVVGARGV (KRAS G12R)
FVVHGIRGQ

SEQ ID NO: 17301 - protein, 9 aa, synthetic construct
  source 1..9: note = Seed: LVVVGARGV (KRAS G12R)
FVVHGIRGR

SEQ ID NO: 17302 - protein, 9 aa, synthetic construct
  source 1..9: note = Seed: LVVVGARGV (KRAS G12R)
FVVHGIRGV

SEQ ID NO: 17303 - protein, 9 aa, synthetic construct
  source 1..9: note = Seed: LVVVGARGV (KRAS G12R)
FVVHGIRGW

SEQ ID NO: 17304 - protein, 9 aa, synthetic construct
  source 1..9: note = Seed: LVVVGARGV (KRAS G12R)
FVVHGIRGY

SEQ ID NO: 17305 - protein, 9 aa, synthetic construct
  source 1..9: note = Seed: LVVVGARGV (KRAS G12R)
FVVHGKRGA

SEQ ID NO: 17306 - protein, 9 aa, synthetic construct
  source 1..9: note = Seed: LVVVGARGV (KRAS G12R)
FVVHGKRGF

SEQ ID NO: 17307 - protein, 9 aa, synthetic construct
  source 1..9: note = Seed: LVVVGARGV (KRAS G12R)
FVVHGKRGG

SEQ ID NO: 17308 - protein, 9 aa, synthetic construct
  source 1..9: note = Seed: LVVVGARGV (KRAS G12R)
FVVHGKRGH

SEQ ID NO: 17309 - protein, 9 aa, synthetic construct
  source 1..9: note = Seed: LVVVGARGV (KRAS G12R)
FVVHGKRGI

SEQ ID NO: 17310 - protein, 9 aa, synthetic construct
  source 1..9: note = Seed: LVVVGARGV (KRAS G12R)
FVVHGKRGK

SEQ ID NO: 17311 - protein, 9 aa, synthetic construct
  source 1..9: note = Seed: LVVVGARGV (KRAS G12R)
FVVHGKRGL

SEQ ID NO: 17312 - protein, 9 aa, synthetic construct
  source 1..9: note = Seed: LVVVGARGV (KRAS G12R)
FVVHGKRGM

SEQ ID NO: 17313 - protein, 9 aa, synthetic construct
  source 1..9: note = Seed: LVVVGARGV (KRAS G12R)
FVVHGKRGQ

SEQ ID NO: 17314 - protein, 9 aa, synthetic construct
  source 1..9: note = Seed: LVVVGARGV (KRAS G12R)
FVVHGKRGR

SEQ ID NO: 17315 - protein, 9 aa, synthetic construct
  source 1..9: note = Seed: LVVVGARGV (KRAS G12R)
FVVHGKRGS

SEQ ID NO: 17316 - protein, 9 aa, synthetic construct
  source 1..9: note = Seed: LVVVGARGV (KRAS G12R)
FVVHGKRGT

SEQ ID NO: 17317 - protein, 9 aa, synthetic construct
  source 1..9: note = Seed: LVVVGARGV (KRAS G12R)
FVVHGKRGV

SEQ ID NO: 17318 - protein, 9 aa, synthetic construct
  source 1..9: note = Seed: LVVVGARGV (KRAS G12R)
FVVHGKRGW

SEQ ID NO: 17319 - protein, 9 aa, synthetic construct
  source 1..9: note = Seed: LVVVGARGV (KRAS G12R)
FVVHGKRGY

SEQ ID NO: 17320 - protein, 9 aa, synthetic construct
  source 1..9: note = Seed: LVVVGARGV (KRAS G12R)
FVVHGLRGA

SEQ ID NO: 17321 - protein, 9 aa, synthetic construct
  source 1..9: note = Seed: LVVVGARGV (KRAS G12R)
FVVHGLRGF

SEQ ID NO: 17322 - protein, 9 aa, synthetic construct
  source 1..9: note = Seed: LVVVGARGV (KRAS G12R)
FVVHGLRGI

SEQ ID NO: 17323 - protein, 9 aa, synthetic construct
  source 1..9: note = Seed: LVVVGARGV (KRAS G12R)
FVVHGLRGK

SEQ ID NO: 17324 - protein, 9 aa, synthetic construct
  source 1..9: note = Seed: LVVVGARGV (KRAS G12R)
FVVHGLRGL

SEQ ID NO: 17325 - protein, 9 aa, synthetic construct
  source 1..9: note = Seed: LVVVGARGV (KRAS G12R)
FVVHGLRGM

SEQ ID NO: 17326 - protein, 9 aa, synthetic construct
  source 1..9: note = Seed: LVVVGARGV (KRAS G12R)
FVVHGLRGQ

SEQ ID NO: 17327 - protein, 9 aa, synthetic construct
  source 1..9: note = Seed: LVVVGARGV (KRAS G12R)
FVVHGLRGR

SEQ ID NO: 17328 - protein, 9 aa, synthetic construct
  source 1..9: note = Seed: LVVVGARGV (KRAS G12R)
FVVHGLRGV

SEQ ID NO: 17329 - protein, 9 aa, synthetic construct
  source 1..9: note = Seed: LVVVGARGV (KRAS G12R)
FVVHGLRGW

SEQ ID NO: 17330 - protein, 9 aa, synthetic construct
  source 1..9: note = Seed: LVVVGARGV (KRAS G12R)
FVVHGLRGY

SEQ ID NO: 17331 - protein, 9 aa, synthetic construct
  source 1..9: note = Seed: LVVVGARGV (KRAS G12R)
FVVHGMRGA

SEQ ID NO: 17332 - protein, 9 aa, synthetic construct
  source 1..9: note = Seed: LVVVGARGV (KRAS G12R)
FVVHGMRGF

SEQ ID NO: 17333 - protein, 9 aa, synthetic construct
  source 1..9: note = Seed: LVVVGARGV (KRAS G12R)
FVVHGMRGI

SEQ ID NO: 17334 - protein, 9 aa, synthetic construct
  source 1..9: note = Seed: LVVVGARGV (KRAS G12R)
FVVHGMRGK

SEQ ID NO: 17335 - protein, 9 aa, synthetic construct
  source 1..9: note = Seed: LVVVGARGV (KRAS G12R)
FVVHGMRGL

SEQ ID NO: 17336 - protein, 9 aa, synthetic construct
  source 1..9: note = Seed: LVVVGARGV (KRAS G12R)
FVVHGMRGM

SEQ ID NO: 17337 - protein, 9 aa, synthetic construct
  source 1..9: note = Seed: LVVVGARGV (KRAS G12R)
FVVHGMRGQ

SEQ ID NO: 17338 - protein, 9 aa, synthetic construct
  source 1..9: note = Seed: LVVVGARGV (KRAS G12R)
FVVHGMRGR

SEQ ID NO: 17339 - protein, 9 aa, synthetic construct
  source 1..9: note = Seed: LVVVGARGV (KRAS G12R)
FVVHGMRGV

SEQ ID NO: 17340 - protein, 9 aa, synthetic construct
  source 1..9: note = Seed: LVVVGARGV (KRAS G12R)
FVVHGMRGY

SEQ ID NO: 17341 - protein, 9 aa, synthetic construct
  source 1..9: note = Seed: LVVVGARGV (KRAS G12R)
FVVHGNRGA

SEQ ID NO: 17342 - protein, 9 aa, synthetic construct
  source 1..9: note = Seed: LVVVGARGV (KRAS G12R)
FVVHGNRGF

SEQ ID NO: 17343 - protein, 9 aa, synthetic construct
  source 1..9: note = Seed: LVVVGARGV (KRAS G12R)
FVVHGNRGI

SEQ ID NO: 17344 - protein, 9 aa, synthetic construct
  source 1..9: note = Seed: LVVVGARGV (KRAS G12R)
FVVHGNRGL

SEQ ID NO: 17345 - protein, 9 aa, synthetic construct
  source 1..9: note = Seed: LVVVGARGV (KRAS G12R)
FVVHGNRGM

SEQ ID NO: 17346 - protein, 9 aa, synthetic construct
  source 1..9: note = Seed: LVVVGARGV (KRAS G12R)
FVVHGNRGR

SEQ ID NO: 17347 - protein, 9 aa, synthetic construct
  source 1..9: note = Seed: LVVVGARGV (KRAS G12R)
FVVHGNRGV

SEQ ID NO: 17348 - protein, 9 aa, synthetic construct
  source 1..9: note = Seed: LVVVGARGV (KRAS G12R)
FVVHGNRGY

SEQ ID NO: 17349 - protein, 9 aa, synthetic construct
  source 1..9: note = Seed: LVVVGARGV (KRAS G12R)
FVVHGPRGA

SEQ ID NO: 17350 - protein, 9 aa, synthetic construct
  source 1..9: note = Seed: LVVVGARGV (KRAS G12R)
FVVHGPRGI

SEQ ID NO: 17351 - protein, 9 aa, synthetic construct
  source 1..9: note = Seed: LVVVGARGV (KRAS G12R)
FVVHGPRGL

SEQ ID NO: 17352 - protein, 9 aa, synthetic construct
  source 1..9: note = Seed: LVVVGARGV (KRAS G12R)
FVVHGPRGM

SEQ ID NO: 17353 - protein, 9 aa, synthetic construct
  source 1..9: note = Seed: LVVVGARGV (KRAS G12R)
FVVHGPRGR

SEQ ID NO: 17354 - protein, 9 aa, synthetic construct
  source 1..9: note = Seed: LVVVGARGV (KRAS G12R)
FVVHGPRGV

SEQ ID NO: 17355 - protein, 9 aa, synthetic construct
  source 1..9: note = Seed: LVVVGARGV (KRAS G12R)
FVVHGQRGL

SEQ ID NO: 17356 - protein, 9 aa, synthetic construct
  source 1..9: note = Seed: LVVVGARGV (KRAS G12R)
FVVHGQRGM

SEQ ID NO: 17357 - protein, 9 aa, synthetic construct
  source 1..9: note = Seed: LVVVGARGV (KRAS G12R)
FVVHGQRGR

SEQ ID NO: 17358 - protein, 9 aa, synthetic construct
  source 1..9: note = Seed: LVVVGARGV (KRAS G12R)
FVVHGRRGA

SEQ ID NO: 17359 - protein, 9 aa, synthetic construct
  source 1..9: note = Seed: LVVVGARGV (KRAS G12R)
FVVHGRRGF

SEQ ID NO: 17360 - protein, 9 aa, synthetic construct
  source 1..9: note = Seed: LVVVGARGV (KRAS G12R)
FVVHGRRGG

SEQ ID NO: 17361 - protein, 9 aa, synthetic construct
  source 1..9: note = Seed: LVVVGARGV (KRAS G12R)
FVVHGRRGH

SEQ ID NO: 17362 - protein, 9 aa, synthetic construct
  source 1..9: note = Seed: LVVVGARGV (KRAS G12R)
FVVHGRRGI

SEQ ID NO: 17363 - protein, 9 aa, synthetic construct
  source 1..9: note = Seed: LVVVGARGV (KRAS G12R)
FVVHGRRGK

SEQ ID NO: 17364 - protein, 9 aa, synthetic construct
  source 1..9: note = Seed: LVVVGARGV (KRAS G12R)
FVVHGRRGL

SEQ ID NO: 17365 - protein, 9 aa, synthetic construct
  source 1..9: note = Seed: LVVVGARGV (KRAS G12R)
FVVHGRRGM

SEQ ID NO: 17366 - protein, 9 aa, synthetic construct
  source 1..9: note = Seed: LVVVGARGV (KRAS G12R)
FVVHGRRGN

SEQ ID NO: 17367 - protein, 9 aa, synthetic construct
  source 1..9: note = Seed: LVVVGARGV (KRAS G12R)
FVVHGRRGP

SEQ ID NO: 17368 - protein, 9 aa, synthetic construct
  source 1..9: note = Seed: LVVVGARGV (KRAS G12R)
FVVHGRRGQ

SEQ ID NO: 17369 - protein, 9 aa, synthetic construct
  source 1..9: note = Seed: LVVVGARGV (KRAS G12R)
FVVHGRRGR

SEQ ID NO: 17370 - protein, 9 aa, synthetic construct
  source 1..9: note = Seed: LVVVGARGV (KRAS G12R)
FVVHGRRGS

SEQ ID NO: 17371 - protein, 9 aa, synthetic construct
  source 1..9: note = Seed: LVVVGARGV (KRAS G12R)
FVVHGRRGT

SEQ ID NO: 17372 - protein, 9 aa, synthetic construct
  source 1..9: note = Seed: LVVVGARGV (KRAS G12R)
FVVHGRRGV

SEQ ID NO: 17373 - protein, 9 aa, synthetic construct
  source 1..9: note = Seed: LVVVGARGV (KRAS G12R)
FVVHGRRGW

SEQ ID NO: 17374 - protein, 9 aa, synthetic construct
  source 1..9: note = Seed: LVVVGARGV (KRAS G12R)
FVVHGRRGY

SEQ ID NO: 17375 - protein, 9 aa, synthetic construct
  source 1..9: note = Seed: LVVVGARGV (KRAS G12R)
FVVHGSRGA

SEQ ID NO: 17376 - protein, 9 aa, synthetic construct
  source 1..9: note = Seed: LVVVGARGV (KRAS G12R)
FVVHGSRGF

SEQ ID NO: 17377 - protein, 9 aa, synthetic construct
  source 1..9: note = Seed: LVVVGARGV (KRAS G12R)
FVVHGSRGI

SEQ ID NO: 17378 - protein, 9 aa, synthetic construct
  source 1..9: note = Seed: LVVVGARGV (KRAS G12R)
FVVHGSRGK

SEQ ID NO: 17379 - protein, 9 aa, synthetic construct
  source 1..9: note = Seed: LVVVGARGV (KRAS G12R)
FVVHGSRGL

SEQ ID NO: 17380 - protein, 9 aa, synthetic construct
  source 1..9: note = Seed: LVVVGARGV (KRAS G12R)
FVVHGSRGM

SEQ ID NO: 17381 - protein, 9 aa, synthetic construct
  source 1..9: note = Seed: LVVVGARGV (KRAS G12R)
FVVHGSRGR

SEQ ID NO: 17382 - protein, 9 aa, synthetic construct
  source 1..9: note = Seed: LVVVGARGV (KRAS G12R)
FVVHGSRGS

SEQ ID NO: 17383 - protein, 9 aa, synthetic construct
  source 1..9: note = Seed: LVVVGARGV (KRAS G12R)
FVVHGSRGT

SEQ ID NO: 17384 - protein, 9 aa, synthetic construct
  source 1..9: note = Seed: LVVVGARGV (KRAS G12R)
FVVHGSRGV

SEQ ID NO: 17385 - protein, 9 aa, synthetic construct
  source 1..9: note = Seed: LVVVGARGV (KRAS G12R)
FVVHGSRGY

SEQ ID NO: 17386 - protein, 9 aa, synthetic construct
  source 1..9: note = Seed: LVVVGARGV (KRAS G12R)
FVVHGTRGA

SEQ ID NO: 17387 - protein, 9 aa, synthetic construct
  source 1..9: note = Seed: LVVVGARGV (KRAS G12R)
FVVHGTRGF

SEQ ID NO: 17388 - protein, 9 aa, synthetic construct
  source 1..9: note = Seed: LVVVGARGV (KRAS G12R)
FVVHGTRGI

SEQ ID NO: 17389 - protein, 9 aa, synthetic construct
  source 1..9: note = Seed: LVVVGARGV (KRAS G12R)
FVVHGTRGK

SEQ ID NO: 17390 - protein, 9 aa, synthetic construct
  source 1..9: note = Seed: LVVVGARGV (KRAS G12R)
FVVHGTRGL

SEQ ID NO: 17391 - protein, 9 aa, synthetic construct
  source 1..9: note = Seed: LVVVGARGV (KRAS G12R)
FVVHGTRGM

SEQ ID NO: 17392 - protein, 9 aa, synthetic construct
  source 1..9: note = Seed: LVVVGARGV (KRAS G12R)
FVVHGTRGR

SEQ ID NO: 17393 - protein, 9 aa, synthetic construct
  source 1..9: note = Seed: LVVVGARGV (KRAS G12R)
FVVHGTRGV

SEQ ID NO: 17394 - protein, 9 aa, synthetic construct
  source 1..9: note = Seed: LVVVGARGV (KRAS G12R)
FVVHGTRGY

SEQ ID NO: 17395 - protein, 9 aa, synthetic construct
  source 1..9: note = Seed: LVVVGARGV (KRAS G12R)
FVVHGVRGA

SEQ ID NO: 17396 - protein, 9 aa, synthetic construct
  source 1..9: note = Seed: LVVVGARGV (KRAS G12R)
FVVHGVRGF

SEQ ID NO: 17397 - protein, 9 aa, synthetic construct
  source 1..9: note = Seed: LVVVGARGV (KRAS G12R)
FVVHGVRGH

SEQ ID NO: 17398 - protein, 9 aa, synthetic construct
  source 1..9: note = Seed: LVVVGARGV (KRAS G12R)
FVVHGVRGI

SEQ ID NO: 17399 - protein, 9 aa, synthetic construct
  source 1..9: note = Seed: LVVVGARGV (KRAS G12R)
FVVHGVRGK

SEQ ID NO: 17400 - protein, 9 aa, synthetic construct
  source 1..9: note = Seed: LVVVGARGV (KRAS G12R)
FVVHGVRGL

SEQ ID NO: 17401 - protein, 9 aa, synthetic construct
  source 1..9: note = Seed: LVVVGARGV (KRAS G12R)
FVVHGVRGM

SEQ ID NO: 17402 - protein, 9 aa, synthetic construct
  source 1..9: note = Seed: LVVVGARGV (KRAS G12R)
FVVHGVRGR

SEQ ID NO: 17403 - protein, 9 aa, synthetic construct
  source 1..9: note = Seed: LVVVGARGV (KRAS G12R)
FVVHGVRGV

SEQ ID NO: 17404 - protein, 9 aa, synthetic construct
  source 1..9: note = Seed: LVVVGARGV (KRAS G12R)
FVVHGVRGY

SEQ ID NO: 17405 - protein, 9 aa, synthetic construct
  source 1..9: note = Seed: LVVVGARGV (KRAS G12R)
FVVHGWRGR

SEQ ID NO: 17406 - protein, 9 aa, synthetic construct
  source 1..9: note = Seed: LVVVGARGV (KRAS G12R)
FVVHGWRGY

SEQ ID NO: 17407 - protein, 9 aa, synthetic construct
  source 1..9: note = Seed: LVVVGARGV (KRAS G12R)
FVVHGYRGI

SEQ ID NO: 17408 - protein, 9 aa, synthetic construct
  source 1..9: note = Seed: LVVVGARGV (KRAS G12R)
FVVHGYRGL

SEQ ID NO: 17409 - protein, 9 aa, synthetic construct
  source 1..9: note = Seed: LVVVGARGV (KRAS G12R)
FVVHGYRGR

SEQ ID NO: 17410 - protein, 9 aa, synthetic construct
  source 1..9: note = Seed: LVVVGARGV (KRAS G12R)
FVVIGARGC

SEQ ID NO: 17411 - protein, 9 aa, synthetic construct
  source 1..9: note = Seed: LVVVGARGV (KRAS G12R)
FVVIGARGD

SEQ ID NO: 17412 - protein, 9 aa, synthetic construct
  source 1..9: note = Seed: LVVVGARGV (KRAS G12R)
FVVIGARGE

SEQ ID NO: 17413 - protein, 9 aa, synthetic construct
  source 1..9: note = Seed: LVVVGARGV (KRAS G12R)
FVVIGARGF

SEQ ID NO: 17414 - protein, 9 aa, synthetic construct
  source 1..9: note = Seed: LVVVGARGV (KRAS G12R)
FVVIGARGG

SEQ ID NO: 17415 - protein, 9 aa, synthetic construct
  source 1..9: note = Seed: LVVVGARGV (KRAS G12R)
FVVIGARGH

SEQ ID NO: 17416 - protein, 9 aa, synthetic construct
  source 1..9: note = Seed: LVVVGARGV (KRAS G12R)
FVVIGARGK

SEQ ID NO: 17417 - protein, 9 aa, synthetic construct
  source 1..9: note = Seed: LVVVGARGV (KRAS G12R)
FVVIGARGM

SEQ ID NO: 17418 - protein, 9 aa, synthetic construct
  source 1..9: note = Seed: LVVVGARGV (KRAS G12R)
FVVIGARGN

SEQ ID NO: 17419 - protein, 9 aa, synthetic construct
  source 1..9: note = Seed: LVVVGARGV (KRAS G12R)
FVVIGARGP

SEQ ID NO: 17420 - protein, 9 aa, synthetic construct
  source 1..9: note = Seed: LVVVGARGV (KRAS G12R)
FVVIGARGQ

SEQ ID NO: 17421 - protein, 9 aa, synthetic construct
  source 1..9: note = Seed: LVVVGARGV (KRAS G12R)
FVVIGARGR

SEQ ID NO: 17422 - protein, 9 aa, synthetic construct
  source 1..9: note = Seed: LVVVGARGV (KRAS G12R)
FVVIGARGS

SEQ ID NO: 17423 - protein, 9 aa, synthetic construct
  source 1..9: note = Seed: LVVVGARGV (KRAS G12R)
FVVIGARGW

SEQ ID NO: 17424 - protein, 9 aa, synthetic construct
  source 1..9: note = Seed: LVVVGARGV (KRAS G12R)
FVVIGARGY

SEQ ID NO: 17425 - protein, 9 aa, synthetic construct
  source 1..9: note = Seed: LVVVGARGV (KRAS G12R)
FVVIGCRGA

SEQ ID NO: 17426 - protein, 9 aa, synthetic construct
  source 1..9: note = Seed: LVVVGARGV (KRAS G12R)
FVVIGCRGI

SEQ ID NO: 17427 - protein, 9 aa, synthetic construct
  source 1..9: note = Seed: LVVVGARGV (KRAS G12R)
FVVIGCRGL

SEQ ID NO: 17428 - protein, 9 aa, synthetic construct
  source 1..9: note = Seed: LVVVGARGV (KRAS G12R)
FVVIGCRGM

SEQ ID NO: 17429 - protein, 9 aa, synthetic construct
  source 1..9: note = Seed: LVVVGARGV (KRAS G12R)
FVVIGCRGN

SEQ ID NO: 17430 - protein, 9 aa, synthetic construct
  source 1..9: note = Seed: LVVVGARGV (KRAS G12R)
FVVIGCRGR

SEQ ID NO: 17431 - protein, 9 aa, synthetic construct
  source 1..9: note = Seed: LVVVGARGV (KRAS G12R)
FVVIGCRGS

SEQ ID NO: 17432 - protein, 9 aa, synthetic construct
  source 1..9: note = Seed: LVVVGARGV (KRAS G12R)
FVVIGCRGT

SEQ ID NO: 17433 - protein, 9 aa, synthetic construct
  source 1..9: note = Seed: LVVVGARGV (KRAS G12R)
FVVIGCRGV

SEQ ID NO: 17434 - protein, 9 aa, synthetic construct
  source 1..9: note = Seed: LVVVGARGV (KRAS G12R)
FVVIGDRGA

SEQ ID NO: 17435 - protein, 9 aa, synthetic construct
  source 1..9: note = Seed: LVVVGARGV (KRAS G12R)
FVVIGDRGI

SEQ ID NO: 17436 - protein, 9 aa, synthetic construct
  source 1..9: note = Seed: LVVVGARGV (KRAS G12R)
FVVIGDRGL

SEQ ID NO: 17437 - protein, 9 aa, synthetic construct
  source 1..9: note = Seed: LVVVGARGV (KRAS G12R)
FVVIGDRGM

SEQ ID NO: 17438 - protein, 9 aa, synthetic construct
  source 1..9: note = Seed: LVVVGARGV (KRAS G12R)
FVVIGDRGS

SEQ ID NO: 17439 - protein, 9 aa, synthetic construct
  source 1..9: note = Seed: LVVVGARGV (KRAS G12R)
FVVIGDRGT

SEQ ID NO: 17440 - protein, 9 aa, synthetic construct
  source 1..9: note = Seed: LVVVGARGV (KRAS G12R)
FVVIGDRGV

SEQ ID NO: 17441 - protein, 9 aa, synthetic construct
  source 1..9: note = Seed: LVVVGARGV (KRAS G12R)
FVVIGERGA

SEQ ID NO: 17442 - protein, 9 aa, synthetic construct
  source 1..9: note = Seed: LVVVGARGV (KRAS G12R)
FVVIGERGI

SEQ ID NO: 17443 - protein, 9 aa, synthetic construct
  source 1..9: note = Seed: LVVVGARGV (KRAS G12R)
FVVIGERGL

SEQ ID NO: 17444 - protein, 9 aa, synthetic construct
  source 1..9: note = Seed: LVVVGARGV (KRAS G12R)
FVVIGERGM

SEQ ID NO: 17445 - protein, 9 aa, synthetic construct
  source 1..9: note = Seed: LVVVGARGV (KRAS G12R)
FVVIGERGR

SEQ ID NO: 17446 - protein, 9 aa, synthetic construct
  source 1..9: note = Seed: LVVVGARGV (KRAS G12R)
FVVIGERGS

SEQ ID NO: 17447 - protein, 9 aa, synthetic construct
  source 1..9: note = Seed: LVVVGARGV (KRAS G12R)
FVVIGERGT

SEQ ID NO: 17448 - protein, 9 aa, synthetic construct
  source 1..9: note = Seed: LVVVGARGV (KRAS G12R)
FVVIGERGV

SEQ ID NO: 17449 - protein, 9 aa, synthetic construct
  source 1..9: note = Seed: LVVVGARGV (KRAS G12R)
FVVIGFRGA

SEQ ID NO: 17450 - protein, 9 aa, synthetic construct
  source 1..9: note = Seed: LVVVGARGV (KRAS G12R)
FVVIGFRGD

SEQ ID NO: 17451 - protein, 9 aa, synthetic construct
  source 1..9: note = Seed: LVVVGARGV (KRAS G12R)
FVVIGFRGE

SEQ ID NO: 17452 - protein, 9 aa, synthetic construct
  source 1..9: note = Seed: LVVVGARGV (KRAS G12R)
FVVIGFRGF

SEQ ID NO: 17453 - protein, 9 aa, synthetic construct
  source 1..9: note = Seed: LVVVGARGV (KRAS G12R)
FVVIGFRGI

SEQ ID NO: 17454 - protein, 9 aa, synthetic construct
  source 1..9: note = Seed: LVVVGARGV (KRAS G12R)
FVVIGFRGL

SEQ ID NO: 17455 - protein, 9 aa, synthetic construct
  source 1..9: note = Seed: LVVVGARGV (KRAS G12R)
FVVIGFRGM

SEQ ID NO: 17456 - protein, 9 aa, synthetic construct
  source 1..9: note = Seed: LVVVGARGV (KRAS G12R)
FVVIGFRGN

SEQ ID NO: 17457 - protein, 9 aa, synthetic construct
  source 1..9: note = Seed: LVVVGARGV (KRAS G12R)
FVVIGFRGS

SEQ ID NO: 17458 - protein, 9 aa, synthetic construct
  source 1..9: note = Seed: LVVVGARGV (KRAS G12R)
FVVIGFRGT

SEQ ID NO: 17459 - protein, 9 aa, synthetic construct
  source 1..9: note = Seed: LVVVGARGV (KRAS G12R)
FVVIGFRGV

SEQ ID NO: 17460 - protein, 9 aa, synthetic construct
  source 1..9: note = Seed: LVVVGARGV (KRAS G12R)
FVVIGFRGY

SEQ ID NO: 17461 - protein, 9 aa, synthetic construct
  source 1..9: note = Seed: LVVVGARGV (KRAS G12R)
FVVIGGRGC

SEQ ID NO: 17462 - protein, 9 aa, synthetic construct
  source 1..9: note = Seed: LVVVGARGV (KRAS G12R)
FVVIGGRGD

SEQ ID NO: 17463 - protein, 9 aa, synthetic construct
  source 1..9: note = Seed: LVVVGARGV (KRAS G12R)
FVVIGGRGE

SEQ ID NO: 17464 - protein, 9 aa, synthetic construct
  source 1..9: note = Seed: LVVVGARGV (KRAS G12R)
FVVIGGRGF

SEQ ID NO: 17465 - protein, 9 aa, synthetic construct
  source 1..9: note = Seed: LVVVGARGV (KRAS G12R)
FVVIGGRGG

SEQ ID NO: 17466 - protein, 9 aa, synthetic construct
  source 1..9: note = Seed: LVVVGARGV (KRAS G12R)
FVVIGGRGH

SEQ ID NO: 17467 - protein, 9 aa, synthetic construct
  source 1..9: note = Seed: LVVVGARGV (KRAS G12R)
FVVIGGRGK

SEQ ID NO: 17468 - protein, 9 aa, synthetic construct
  source 1..9: note = Seed: LVVVGARGV (KRAS G12R)
FVVIGGRGM

SEQ ID NO: 17469 - protein, 9 aa, synthetic construct
  source 1..9: note = Seed: LVVVGARGV (KRAS G12R)
FVVIGGRGN

SEQ ID NO: 17470 - protein, 9 aa, synthetic construct
  source 1..9: note = Seed: LVVVGARGV (KRAS G12R)
FVVIGGRGP

SEQ ID NO: 17471 - protein, 9 aa, synthetic construct
  source 1..9: note = Seed: LVVVGARGV (KRAS G12R)
FVVIGGRGQ

SEQ ID NO: 17472 - protein, 9 aa, synthetic construct
  source 1..9: note = Seed: LVVVGARGV (KRAS G12R)
FVVIGGRGR

SEQ ID NO: 17473 - protein, 9 aa, synthetic construct
  source 1..9: note = Seed: LVVVGARGV (KRAS G12R)
FVVIGGRGS

SEQ ID NO: 17474 - protein, 9 aa, synthetic construct
  source 1..9: note = Seed: LVVVGARGV (KRAS G12R)
FVVIGGRGT

SEQ ID NO: 17475 - protein, 9 aa, synthetic construct
  source 1..9: note = Seed: LVVVGARGV (KRAS G12R)
FVVIGGRGW

SEQ ID NO: 17476 - protein, 9 aa, synthetic construct
  source 1..9: note = Seed: LVVVGARGV (KRAS G12R)
FVVIGGRGY

SEQ ID NO: 17477 - protein, 9 aa, synthetic construct
  source 1..9: note = Seed: LVVVGARGV (KRAS G12R)
FVVIGHRGA

SEQ ID NO: 17478 - protein, 9 aa, synthetic construct
  source 1..9: note = Seed: LVVVGARGV (KRAS G12R)
FVVIGHRGC

SEQ ID NO: 17479 - protein, 9 aa, synthetic construct
  source 1..9: note = Seed: LVVVGARGV (KRAS G12R)
FVVIGHRGD

SEQ ID NO: 17480 - protein, 9 aa, synthetic construct
  source 1..9: note = Seed: LVVVGARGV (KRAS G12R)
FVVIGHRGF

SEQ ID NO: 17481 - protein, 9 aa, synthetic construct
  source 1..9: note = Seed: LVVVGARGV (KRAS G12R)
FVVIGHRGG

SEQ ID NO: 17482 - protein, 9 aa, synthetic construct
  source 1..9: note = Seed: LVVVGARGV (KRAS G12R)
FVVIGHRGH

SEQ ID NO: 17483 - protein, 9 aa, synthetic construct
  source 1..9: note = Seed: LVVVGARGV (KRAS G12R)
FVVIGHRGI

SEQ ID NO: 17484 - protein, 9 aa, synthetic construct
  source 1..9: note = Seed: LVVVGARGV (KRAS G12R)
FVVIGHRGK

SEQ ID NO: 17485 - protein, 9 aa, synthetic construct
  source 1..9: note = Seed: LVVVGARGV (KRAS G12R)
FVVIGHRGL

SEQ ID NO: 17486 - protein, 9 aa, synthetic construct
  source 1..9: note = Seed: LVVVGARGV (KRAS G12R)
FVVIGHRGM

SEQ ID NO: 17487 - protein, 9 aa, synthetic construct
  source 1..9: note = Seed: LVVVGARGV (KRAS G12R)
FVVIGHRGN

SEQ ID NO: 17488 - protein, 9 aa, synthetic construct
  source 1..9: note = Seed: LVVVGARGV (KRAS G12R)
FVVIGHRGQ

SEQ ID NO: 17489 - protein, 9 aa, synthetic construct
  source 1..9: note = Seed: LVVVGARGV (KRAS G12R)
FVVIGHRGR

SEQ ID NO: 17490 - protein, 9 aa, synthetic construct
  source 1..9: note = Seed: LVVVGARGV (KRAS G12R)
FVVIGHRGS

SEQ ID NO: 17491 - protein, 9 aa, synthetic construct
  source 1..9: note = Seed: LVVVGARGV (KRAS G12R)
FVVIGHRGT

SEQ ID NO: 17492 - protein, 9 aa, synthetic construct
  source 1..9: note = Seed: LVVVGARGV (KRAS G12R)
FVVIGHRGV

SEQ ID NO: 17493 - protein, 9 aa, synthetic construct
  source 1..9: note = Seed: LVVVGARGV (KRAS G12R)
FVVIGHRGW

SEQ ID NO: 17494 - protein, 9 aa, synthetic construct
  source 1..9: note = Seed: LVVVGARGV (KRAS G12R)
FVVIGHRGY

SEQ ID NO: 17495 - protein, 9 aa, synthetic construct
  source 1..9: note = Seed: LVVVGARGV (KRAS G12R)
FVVIGIRGA

SEQ ID NO: 17496 - protein, 9 aa, synthetic construct
  source 1..9: note = Seed: LVVVGARGV (KRAS G12R)
FVVIGIRGC

SEQ ID NO: 17497 - protein, 9 aa, synthetic construct
  source 1..9: note = Seed: LVVVGARGV (KRAS G12R)
FVVIGIRGD

SEQ ID NO: 17498 - protein, 9 aa, synthetic construct
  source 1..9: note = Seed: LVVVGARGV (KRAS G12R)
FVVIGIRGE

SEQ ID NO: 17499 - protein, 9 aa, synthetic construct
  source 1..9: note = Seed: LVVVGARGV (KRAS G12R)
FVVIGIRGF

SEQ ID NO: 17500 - protein, 9 aa, synthetic construct
  source 1..9: note = Seed: LVVVGARGV (KRAS G12R)
FVVIGIRGG

SEQ ID NO: 17501 - protein, 9 aa, synthetic construct
  source 1..9: note = Seed: LVVVGARGV (KRAS G12R)
FVVIGIRGH

SEQ ID NO: 17502 - protein, 9 aa, synthetic construct
  source 1..9: note = Seed: LVVVGARGV (KRAS G12R)
FVVIGIRGI

SEQ ID NO: 17503 - protein, 9 aa, synthetic construct
  source 1..9: note = Seed: LVVVGARGV (KRAS G12R)
FVVIGIRGK

SEQ ID NO: 17504 - protein, 9 aa, synthetic construct
  source 1..9: note = Seed: LVVVGARGV (KRAS G12R)
FVVIGIRGL

SEQ ID NO: 17505 - protein, 9 aa, synthetic construct
  source 1..9: note = Seed: LVVVGARGV (KRAS G12R)
FVVIGIRGM

SEQ ID NO: 17506 - protein, 9 aa, synthetic construct
  source 1..9: note = Seed: LVVVGARGV (KRAS G12R)
FVVIGIRGN

SEQ ID NO: 17507 - protein, 9 aa, synthetic construct
  source 1..9: note = Seed: LVVVGARGV (KRAS G12R)
FVVIGIRGP

SEQ ID NO: 17508 - protein, 9 aa, synthetic construct
  source 1..9: note = Seed: LVVVGARGV (KRAS G12R)
FVVIGIRGQ

SEQ ID NO: 17509 - protein, 9 aa, synthetic construct
  source 1..9: note = Seed: LVVVGARGV (KRAS G12R)
FVVIGIRGR

SEQ ID NO: 17510 - protein, 9 aa, synthetic construct
  source 1..9: note = Seed: LVVVGARGV (KRAS G12R)
FVVIGIRGS

SEQ ID NO: 17511 - protein, 9 aa, synthetic construct
  source 1..9: note = Seed: LVVVGARGV (KRAS G12R)
FVVIGIRGT

SEQ ID NO: 17512 - protein, 9 aa, synthetic construct
  source 1..9: note = Seed: LVVVGARGV (KRAS G12R)
FVVIGIRGV

SEQ ID NO: 17513 - protein, 9 aa, synthetic construct
  source 1..9: note = Seed: LVVVGARGV (KRAS G12R)
FVVIGIRGY

SEQ ID NO: 17514 - protein, 9 aa, synthetic construct
  source 1..9: note = Seed: LVVVGARGV (KRAS G12R)
FVVIGKRGA

SEQ ID NO: 17515 - protein, 9 aa, synthetic construct
  source 1..9: note = Seed: LVVVGARGV (KRAS G12R)
FVVIGKRGC

SEQ ID NO: 17516 - protein, 9 aa, synthetic construct
  source 1..9: note = Seed: LVVVGARGV (KRAS G12R)
FVVIGKRGD

SEQ ID NO: 17517 - protein, 9 aa, synthetic construct
  source 1..9: note = Seed: LVVVGARGV (KRAS G12R)
FVVIGKRGE

SEQ ID NO: 17518 - protein, 9 aa, synthetic construct
  source 1..9: note = Seed: LVVVGARGV (KRAS G12R)
FVVIGKRGF

SEQ ID NO: 17519 - protein, 9 aa, synthetic construct
  source 1..9: note = Seed: LVVVGARGV (KRAS G12R)
FVVIGKRGG

SEQ ID NO: 17520 - protein, 9 aa, synthetic construct
  source 1..9: note = Seed: LVVVGARGV (KRAS G12R)
FVVIGKRGH

SEQ ID NO: 17521 - protein, 9 aa, synthetic construct
  source 1..9: note = Seed: LVVVGARGV (KRAS G12R)
FVVIGKRGI

SEQ ID NO: 17522 - protein, 9 aa, synthetic construct
  source 1..9: note = Seed: LVVVGARGV (KRAS G12R)
FVVIGKRGK

SEQ ID NO: 17523 - protein, 9 aa, synthetic construct
  source 1..9: note = Seed: LVVVGARGV (KRAS G12R)
FVVIGKRGL

SEQ ID NO: 17524 - protein, 9 aa, synthetic construct
  source 1..9: note = Seed: LVVVGARGV (KRAS G12R)
FVVIGKRGM

SEQ ID NO: 17525 - protein, 9 aa, synthetic construct
  source 1..9: note = Seed: LVVVGARGV (KRAS G12R)
FVVIGKRGN

SEQ ID NO: 17526 - protein, 9 aa, synthetic construct
  source 1..9: note = Seed: LVVVGARGV (KRAS G12R)
FVVIGKRGP

SEQ ID NO: 17527 - protein, 9 aa, synthetic construct
  source 1..9: note = Seed: LVVVGARGV (KRAS G12R)
FVVIGKRGQ

SEQ ID NO: 17528 - protein, 9 aa, synthetic construct
  source 1..9: note = Seed: LVVVGARGV (KRAS G12R)
FVVIGKRGR

SEQ ID NO: 17529 - protein, 9 aa, synthetic construct
  source 1..9: note = Seed: LVVVGARGV (KRAS G12R)
FVVIGKRGS

SEQ ID NO: 17530 - protein, 9 aa, synthetic construct
  source 1..9: note = Seed: LVVVGARGV (KRAS G12R)
FVVIGKRGT

SEQ ID NO: 17531 - protein, 9 aa, synthetic construct
  source 1..9: note = Seed: LVVVGARGV (KRAS G12R)
FVVIGKRGV

SEQ ID NO: 17532 - protein, 9 aa, synthetic construct
  source 1..9: note = Seed: LVVVGARGV (KRAS G12R)
FVVIGKRGW

SEQ ID NO: 17533 - protein, 9 aa, synthetic construct
  source 1..9: note = Seed: LVVVGARGV (KRAS G12R)
FVVIGKRGY

SEQ ID NO: 17534 - protein, 9 aa, synthetic construct
  source 1..9: note = Seed: LVVVGARGV (KRAS G12R)
FVVIGLRGA

SEQ ID NO: 17535 - protein, 9 aa, synthetic construct
  source 1..9: note = Seed: LVVVGARGV (KRAS G12R)
FVVIGLRGD

SEQ ID NO: 17536 - protein, 9 aa, synthetic construct
  source 1..9: note = Seed: LVVVGARGV (KRAS G12R)
FVVIGLRGF

SEQ ID NO: 17537 - protein, 9 aa, synthetic construct
  source 1..9: note = Seed: LVVVGARGV (KRAS G12R)
FVVIGLRGG

SEQ ID NO: 17538 - protein, 9 aa, synthetic construct
  source 1..9: note = Seed: LVVVGARGV (KRAS G12R)
FVVIGLRGH

SEQ ID NO: 17539 - protein, 9 aa, synthetic construct
  source 1..9: note = Seed: LVVVGARGV (KRAS G12R)
FVVIGLRGI

SEQ ID NO: 17540 - protein, 9 aa, synthetic construct
  source 1..9: note = Seed: LVVVGARGV (KRAS G12R)
FVVIGLRGL

SEQ ID NO: 17541 - protein, 9 aa, synthetic construct
  source 1..9: note = Seed: LVVVGARGV (KRAS G12R)
FVVIGLRGM

SEQ ID NO: 17542 - protein, 9 aa, synthetic construct
  source 1..9: note = Seed: LVVVGARGV (KRAS G12R)
FVVIGLRGN

SEQ ID NO: 17543 - protein, 9 aa, synthetic construct
  source 1..9: note = Seed: LVVVGARGV (KRAS G12R)
FVVIGLRGP

SEQ ID NO: 17544 - protein, 9 aa, synthetic construct
  source 1..9: note = Seed: LVVVGARGV (KRAS G12R)
FVVIGLRGQ

SEQ ID NO: 17545 - protein, 9 aa, synthetic construct
  source 1..9: note = Seed: LVVVGARGV (KRAS G12R)
FVVIGLRGR

SEQ ID NO: 17546 - protein, 9 aa, synthetic construct
  source 1..9: note = Seed: LVVVGARGV (KRAS G12R)
FVVIGLRGS

SEQ ID NO: 17547 - protein, 9 aa, synthetic construct
  source 1..9: note = Seed: LVVVGARGV (KRAS G12R)
FVVIGLRGT

SEQ ID NO: 17548 - protein, 9 aa, synthetic construct
  source 1..9: note = Seed: LVVVGARGV (KRAS G12R)
FVVIGLRGV

SEQ ID NO: 17549 - protein, 9 aa, synthetic construct
  source 1..9: note = Seed: LVVVGARGV (KRAS G12R)
FVVIGLRGY

SEQ ID NO: 17550 - protein, 9 aa, synthetic construct
  source 1..9: note = Seed: LVVVGARGV (KRAS G12R)
FVVIGMRGA

SEQ ID NO: 17551 - protein, 9 aa, synthetic construct
  source 1..9: note = Seed: LVVVGARGV (KRAS G12R)
FVVIGMRGC

SEQ ID NO: 17552 - protein, 9 aa, synthetic construct
  source 1..9: note = Seed: LVVVGARGV (KRAS G12R)
FVVIGMRGD

SEQ ID NO: 17553 - protein, 9 aa, synthetic construct
  source 1..9: note = Seed: LVVVGARGV (KRAS G12R)
FVVIGMRGE

SEQ ID NO: 17554 - protein, 9 aa, synthetic construct
  source 1..9: note = Seed: LVVVGARGV (KRAS G12R)
FVVIGMRGF

SEQ ID NO: 17555 - protein, 9 aa, synthetic construct
  source 1..9: note = Seed: LVVVGARGV (KRAS G12R)
FVVIGMRGG

SEQ ID NO: 17556 - protein, 9 aa, synthetic construct
  source 1..9: note = Seed: LVVVGARGV (KRAS G12R)
FVVIGMRGH

SEQ ID NO: 17557 - protein, 9 aa, synthetic construct
  source 1..9: note = Seed: LVVVGARGV (KRAS G12R)
FVVIGMRGI

SEQ ID NO: 17558 - protein, 9 aa, synthetic construct
  source 1..9: note = Seed: LVVVGARGV (KRAS G12R)
FVVIGMRGL

SEQ ID NO: 17559 - protein, 9 aa, synthetic construct
  source 1..9: note = Seed: LVVVGARGV (KRAS G12R)
FVVIGMRGM

SEQ ID NO: 17560 - protein, 9 aa, synthetic construct
  source 1..9: note = Seed: LVVVGARGV (KRAS G12R)
FVVIGMRGN

SEQ ID NO: 17561 - protein, 9 aa, synthetic construct
  source 1..9: note = Seed: LVVVGARGV (KRAS G12R)
FVVIGMRGP

SEQ ID NO: 17562 - protein, 9 aa, synthetic construct
  source 1..9: note = Seed: LVVVGARGV (KRAS G12R)
FVVIGMRGQ

SEQ ID NO: 17563 - protein, 9 aa, synthetic construct
  source 1..9: note = Seed: LVVVGARGV (KRAS G12R)
FVVIGMRGR

SEQ ID NO: 17564 - protein, 9 aa, synthetic construct
  source 1..9: note = Seed: LVVVGARGV (KRAS G12R)
FVVIGMRGS

SEQ ID NO: 17565 - protein, 9 aa, synthetic construct
  source 1..9: note = Seed: LVVVGARGV (KRAS G12R)
FVVIGMRGT

SEQ ID NO: 17566 - protein, 9 aa, synthetic construct
  source 1..9: note = Seed: LVVVGARGV (KRAS G12R)
FVVIGMRGV

SEQ ID NO: 17567 - protein, 9 aa, synthetic construct
  source 1..9: note = Seed: LVVVGARGV (KRAS G12R)
FVVIGMRGY

SEQ ID NO: 17568 - protein, 9 aa, synthetic construct
  source 1..9: note = Seed: LVVVGARGV (KRAS G12R)
FVVIGNRGA

SEQ ID NO: 17569 - protein, 9 aa, synthetic construct
  source 1..9: note = Seed: LVVVGARGV (KRAS G12R)
FVVIGNRGC

SEQ ID NO: 17570 - protein, 9 aa, synthetic construct
  source 1..9: note = Seed: LVVVGARGV (KRAS G12R)
FVVIGNRGD

SEQ ID NO: 17571 - protein, 9 aa, synthetic construct
  source 1..9: note = Seed: LVVVGARGV (KRAS G12R)
FVVIGNRGE

SEQ ID NO: 17572 - protein, 9 aa, synthetic construct
  source 1..9: note = Seed: LVVVGARGV (KRAS G12R)
FVVIGNRGF

SEQ ID NO: 17573 - protein, 9 aa, synthetic construct
  source 1..9: note = Seed: LVVVGARGV (KRAS G12R)
FVVIGNRGG

SEQ ID NO: 17574 - protein, 9 aa, synthetic construct
  source 1..9: note = Seed: LVVVGARGV (KRAS G12R)
FVVIGNRGH

SEQ ID NO: 17575 - protein, 9 aa, synthetic construct
  source 1..9: note = Seed: LVVVGARGV (KRAS G12R)
FVVIGNRGI

SEQ ID NO: 17576 - protein, 9 aa, synthetic construct
  source 1..9: note = Seed: LVVVGARGV (KRAS G12R)
FVVIGNRGK

SEQ ID NO: 17577 - protein, 9 aa, synthetic construct
  source 1..9: note = Seed: LVVVGARGV (KRAS G12R)
FVVIGNRGL

SEQ ID NO: 17578 - protein, 9 aa, synthetic construct
  source 1..9: note = Seed: LVVVGARGV (KRAS G12R)
FVVIGNRGM

SEQ ID NO: 17579 - protein, 9 aa, synthetic construct
  source 1..9: note = Seed: LVVVGARGV (KRAS G12R)
FVVIGNRGN

SEQ ID NO: 17580 - protein, 9 aa, synthetic construct
  source 1..9: note = Seed: LVVVGARGV (KRAS G12R)
FVVIGNRGP

SEQ ID NO: 17581 - protein, 9 aa, synthetic construct
  source 1..9: note = Seed: LVVVGARGV (KRAS G12R)
FVVIGNRGQ

SEQ ID NO: 17582 - protein, 9 aa, synthetic construct
  source 1..9: note = Seed: LVVVGARGV (KRAS G12R)
FVVIGNRGR

SEQ ID NO: 17583 - protein, 9 aa, synthetic construct
  source 1..9: note = Seed: LVVVGARGV (KRAS G12R)
FVVIGNRGS

SEQ ID NO: 17584 - protein, 9 aa, synthetic construct
  source 1..9: note = Seed: LVVVGARGV (KRAS G12R)
FVVIGNRGT

SEQ ID NO: 17585 - protein, 9 aa, synthetic construct
  source 1..9: note = Seed: LVVVGARGV (KRAS G12R)
FVVIGNRGV

SEQ ID NO: 17586 - protein, 9 aa, synthetic construct
  source 1..9: note = Seed: LVVVGARGV (KRAS G12R)
FVVIGNRGW

SEQ ID NO: 17587 - protein, 9 aa, synthetic construct
  source 1..9: note = Seed: LVVVGARGV (KRAS G12R)
FVVIGNRGY

SEQ ID NO: 17588 - protein, 9 aa, synthetic construct
  source 1..9: note = Seed: LVVVGARGV (KRAS G12R)
FVVIGPRGA

SEQ ID NO: 17589 - protein, 9 aa, synthetic construct
  source 1..9: note = Seed: LVVVGARGV (KRAS G12R)
FVVIGPRGC

SEQ ID NO: 17590 - protein, 9 aa, synthetic construct
  source 1..9: note = Seed: LVVVGARGV (KRAS G12R)
FVVIGPRGD

SEQ ID NO: 17591 - protein, 9 aa, synthetic construct
  source 1..9: note = Seed: LVVVGARGV (KRAS G12R)
FVVIGPRGE

SEQ ID NO: 17592 - protein, 9 aa, synthetic construct
  source 1..9: note = Seed: LVVVGARGV (KRAS G12R)
FVVIGPRGF

SEQ ID NO: 17593 - protein, 9 aa, synthetic construct
  source 1..9: note = Seed: LVVVGARGV (KRAS G12R)
FVVIGPRGG

SEQ ID NO: 17594 - protein, 9 aa, synthetic construct
  source 1..9: note = Seed: LVVVGARGV (KRAS G12R)
FVVIGPRGH

SEQ ID NO: 17595 - protein, 9 aa, synthetic construct
  source 1..9: note = Seed: LVVVGARGV (KRAS G12R)
FVVIGPRGI

SEQ ID NO: 17596 - protein, 9 aa, synthetic construct
  source 1..9: note = Seed: LVVVGARGV (KRAS G12R)
FVVIGPRGK

SEQ ID NO: 17597 - protein, 9 aa, synthetic construct
  source 1..9: note = Seed: LVVVGARGV (KRAS G12R)
FVVIGPRGL

SEQ ID NO: 17598 - protein, 9 aa, synthetic construct
  source 1..9: note = Seed: LVVVGARGV (KRAS G12R)
FVVIGPRGM

SEQ ID NO: 17599 - protein, 9 aa, synthetic construct
  source 1..9: note = Seed: LVVVGARGV (KRAS G12R)
FVVIGPRGN

SEQ ID NO: 17600 - protein, 9 aa, synthetic construct
  source 1..9: note = Seed: LVVVGARGV (KRAS G12R)
FVVIGPRGP

SEQ ID NO: 17601 - protein, 9 aa, synthetic construct
  source 1..9: note = Seed: LVVVGARGV (KRAS G12R)
FVVIGPRGQ

SEQ ID NO: 17602 - protein, 9 aa, synthetic construct
  source 1..9: note = Seed: LVVVGARGV (KRAS G12R)
FVVIGPRGR

SEQ ID NO: 17603 - protein, 9 aa, synthetic construct
  source 1..9: note = Seed: LVVVGARGV (KRAS G12R)
FVVIGPRGS

SEQ ID NO: 17604 - protein, 9 aa, synthetic construct
  source 1..9: note = Seed: LVVVGARGV (KRAS G12R)
FVVIGPRGT

SEQ ID NO: 17605 - protein, 9 aa, synthetic construct
  source 1..9: note = Seed: LVVVGARGV (KRAS G12R)
FVVIGPRGW

SEQ ID NO: 17606 - protein, 9 aa, synthetic construct
  source 1..9: note = Seed: LVVVGARGV (KRAS G12R)
FVVIGPRGY

SEQ ID NO: 17607 - protein, 9 aa, synthetic construct
  source 1..9: note = Seed: LVVVGARGV (KRAS G12R)
FVVIGQRGA

SEQ ID NO: 17608 - protein, 9 aa, synthetic construct
  source 1..9: note = Seed: LVVVGARGV (KRAS G12R)
FVVIGQRGF

SEQ ID NO: 17609 - protein, 9 aa, synthetic construct
  source 1..9: note = Seed: LVVVGARGV (KRAS G12R)
FVVIGQRGG

SEQ ID NO: 17610 - protein, 9 aa, synthetic construct
  source 1..9: note = Seed: LVVVGARGV (KRAS G12R)
FVVIGQRGI

SEQ ID NO: 17611 - protein, 9 aa, synthetic construct
  source 1..9: note = Seed: LVVVGARGV (KRAS G12R)
FVVIGQRGL

SEQ ID NO: 17612 - protein, 9 aa, synthetic construct
  source 1..9: note = Seed: LVVVGARGV (KRAS G12R)
FVVIGQRGM

SEQ ID NO: 17613 - protein, 9 aa, synthetic construct
  source 1..9: note = Seed: LVVVGARGV (KRAS G12R)
FVVIGQRGN

SEQ ID NO: 17614 - protein, 9 aa, synthetic construct
  source 1..9: note = Seed: LVVVGARGV (KRAS G12R)
FVVIGQRGQ

SEQ ID NO: 17615 - protein, 9 aa, synthetic construct
  source 1..9: note = Seed: LVVVGARGV (KRAS G12R)
FVVIGQRGR

SEQ ID NO: 17616 - protein, 9 aa, synthetic construct
  source 1..9: note = Seed: LVVVGARGV (KRAS G12R)
FVVIGQRGS

SEQ ID NO: 17617 - protein, 9 aa, synthetic construct
  source 1..9: note = Seed: LVVVGARGV (KRAS G12R)
FVVIGQRGT

SEQ ID NO: 17618 - protein, 9 aa, synthetic construct
  source 1..9: note = Seed: LVVVGARGV (KRAS G12R)
FVVIGQRGV

SEQ ID NO: 17619 - protein, 9 aa, synthetic construct
  source 1..9: note = Seed: LVVVGARGV (KRAS G12R)
FVVIGQRGY

SEQ ID NO: 17620 - protein, 9 aa, synthetic construct
  source 1..9: note = Seed: LVVVGARGV (KRAS G12R)
FVVIGRRGA

SEQ ID NO: 17621 - protein, 9 aa, synthetic construct
  source 1..9: note = Seed: LVVVGARGV (KRAS G12R)
FVVIGRRGC

SEQ ID NO: 17622 - protein, 9 aa, synthetic construct
  source 1..9: note = Seed: LVVVGARGV (KRAS G12R)
FVVIGRRGD

SEQ ID NO: 17623 - protein, 9 aa, synthetic construct
  source 1..9: note = Seed: LVVVGARGV (KRAS G12R)
FVVIGRRGE

SEQ ID NO: 17624 - protein, 9 aa, synthetic construct
  source 1..9: note = Seed: LVVVGARGV (KRAS G12R)
FVVIGRRGF

SEQ ID NO: 17625 - protein, 9 aa, synthetic construct
  source 1..9: note = Seed: LVVVGARGV (KRAS G12R)
FVVIGRRGG

SEQ ID NO: 17626 - protein, 9 aa, synthetic construct
  source 1..9: note = Seed: LVVVGARGV (KRAS G12R)
FVVIGRRGH

SEQ ID NO: 17627 - protein, 9 aa, synthetic construct
  source 1..9: note = Seed: LVVVGARGV (KRAS G12R)
FVVIGRRGI

SEQ ID NO: 17628 - protein, 9 aa, synthetic construct
  source 1..9: note = Seed: LVVVGARGV (KRAS G12R)
FVVIGRRGK

SEQ ID NO: 17629 - protein, 9 aa, synthetic construct
  source 1..9: note = Seed: LVVVGARGV (KRAS G12R)
FVVIGRRGL

SEQ ID NO: 17630 - protein, 9 aa, synthetic construct
  source 1..9: note = Seed: LVVVGARGV (KRAS G12R)
FVVIGRRGM

SEQ ID NO: 17631 - protein, 9 aa, synthetic construct
  source 1..9: note = Seed: LVVVGARGV (KRAS G12R)
FVVIGRRGN

SEQ ID NO: 17632 - protein, 9 aa, synthetic construct
  source 1..9: note = Seed: LVVVGARGV (KRAS G12R)
FVVIGRRGP

SEQ ID NO: 17633 - protein, 9 aa, synthetic construct
  source 1..9: note = Seed: LVVVGARGV (KRAS G12R)
FVVIGRRGQ

SEQ ID NO: 17634 - protein, 9 aa, synthetic construct
  source 1..9: note = Seed: LVVVGARGV (KRAS G12R)
FVVIGRRGR

SEQ ID NO: 17635 - protein, 9 aa, synthetic construct
  source 1..9: note = Seed: LVVVGARGV (KRAS G12R)
FVVIGRRGS

SEQ ID NO: 17636 - protein, 9 aa, synthetic construct
  source 1..9: note = Seed: LVVVGARGV (KRAS G12R)
FVVIGRRGT

SEQ ID NO: 17637 - protein, 9 aa, synthetic construct
  source 1..9: note = Seed: LVVVGARGV (KRAS G12R)
FVVIGRRGV

SEQ ID NO: 17638 - protein, 9 aa, synthetic construct
  source 1..9: note = Seed: LVVVGARGV (KRAS G12R)
FVVIGRRGW

SEQ ID NO: 17639 - protein, 9 aa, synthetic construct
  source 1..9: note = Seed: LVVVGARGV (KRAS G12R)
FVVIGRRGY

SEQ ID NO: 17640 - protein, 9 aa, synthetic construct
  source 1..9: note = Seed: LVVVGARGV (KRAS G12R)
FVVIGSRGC

SEQ ID NO: 17641 - protein, 9 aa, synthetic construct
  source 1..9: note = Seed: LVVVGARGV (KRAS G12R)
FVVIGSRGD

SEQ ID NO: 17642 - protein, 9 aa, synthetic construct
  source 1..9: note = Seed: LVVVGARGV (KRAS G12R)
FVVIGSRGE

SEQ ID NO: 17643 - protein, 9 aa, synthetic construct
  source 1..9: note = Seed: LVVVGARGV (KRAS G12R)
FVVIGSRGF

SEQ ID NO: 17644 - protein, 9 aa, synthetic construct
  source 1..9: note = Seed: LVVVGARGV (KRAS G12R)
FVVIGSRGG

SEQ ID NO: 17645 - protein, 9 aa, synthetic construct
  source 1..9: note = Seed: LVVVGARGV (KRAS G12R)
FVVIGSRGH

SEQ ID NO: 17646 - protein, 9 aa, synthetic construct
  source 1..9: note = Seed: LVVVGARGV (KRAS G12R)
FVVIGSRGK

SEQ ID NO: 17647 - protein, 9 aa, synthetic construct
  source 1..9: note = Seed: LVVVGARGV (KRAS G12R)
FVVIGSRGM

SEQ ID NO: 17648 - protein, 9 aa, synthetic construct
  source 1..9: note = Seed: LVVVGARGV (KRAS G12R)
FVVIGSRGN

SEQ ID NO: 17649 - protein, 9 aa, synthetic construct
  source 1..9: note = Seed: LVVVGARGV (KRAS G12R)
FVVIGSRGP

SEQ ID NO: 17650 - protein, 9 aa, synthetic construct
  source 1..9: note = Seed: LVVVGARGV (KRAS G12R)
FVVIGSRGQ

SEQ ID NO: 17651 - protein, 9 aa, synthetic construct
  source 1..9: note = Seed: LVVVGARGV (KRAS G12R)
FVVIGSRGR

SEQ ID NO: 17652 - protein, 9 aa, synthetic construct
  source 1..9: note = Seed: LVVVGARGV (KRAS G12R)
FVVIGSRGS

SEQ ID NO: 17653 - protein, 9 aa, synthetic construct
  source 1..9: note = Seed: LVVVGARGV (KRAS G12R)
FVVIGSRGT

SEQ ID NO: 17654 - protein, 9 aa, synthetic construct
  source 1..9: note = Seed: LVVVGARGV (KRAS G12R)
FVVIGSRGW

SEQ ID NO: 17655 - protein, 9 aa, synthetic construct
  source 1..9: note = Seed: LVVVGARGV (KRAS G12R)
FVVIGSRGY

SEQ ID NO: 17656 - protein, 9 aa, synthetic construct
  source 1..9: note = Seed: LVVVGARGV (KRAS G12R)
FVVIGTRGA

SEQ ID NO: 17657 - protein, 9 aa, synthetic construct
  source 1..9: note = Seed: LVVVGARGV (KRAS G12R)
FVVIGTRGC

SEQ ID NO: 17658 - protein, 9 aa, synthetic construct
  source 1..9: note = Seed: LVVVGARGV (KRAS G12R)
FVVIGTRGD

SEQ ID NO: 17659 - protein, 9 aa, synthetic construct
  source 1..9: note = Seed: LVVVGARGV (KRAS G12R)
FVVIGTRGE

SEQ ID NO: 17660 - protein, 9 aa, synthetic construct
  source 1..9: note = Seed: LVVVGARGV (KRAS G12R)
FVVIGTRGF

SEQ ID NO: 17661 - protein, 9 aa, synthetic construct
  source 1..9: note = Seed: LVVVGARGV (KRAS G12R)
FVVIGTRGG

SEQ ID NO: 17662 - protein, 9 aa, synthetic construct
  source 1..9: note = Seed: LVVVGARGV (KRAS G12R)
FVVIGTRGH

SEQ ID NO: 17663 - protein, 9 aa, synthetic construct
  source 1..9: note = Seed: LVVVGARGV (KRAS G12R)
FVVIGTRGI

SEQ ID NO: 17664 - protein, 9 aa, synthetic construct
  source 1..9: note = Seed: LVVVGARGV (KRAS G12R)
FVVIGTRGK

SEQ ID NO: 17665 - protein, 9 aa, synthetic construct
  source 1..9: note = Seed: LVVVGARGV (KRAS G12R)
FVVIGTRGL

SEQ ID NO: 17666 - protein, 9 aa, synthetic construct
  source 1..9: note = Seed: LVVVGARGV (KRAS G12R)
FVVIGTRGM

SEQ ID NO: 17667 - protein, 9 aa, synthetic construct
  source 1..9: note = Seed: LVVVGARGV (KRAS G12R)
FVVIGTRGN

SEQ ID NO: 17668 - protein, 9 aa, synthetic construct
  source 1..9: note = Seed: LVVVGARGV (KRAS G12R)
FVVIGTRGP

SEQ ID NO: 17669 - protein, 9 aa, synthetic construct
  source 1..9: note = Seed: LVVVGARGV (KRAS G12R)
FVVIGTRGQ

SEQ ID NO: 17670 - protein, 9 aa, synthetic construct
  source 1..9: note = Seed: LVVVGARGV (KRAS G12R)
FVVIGTRGR

SEQ ID NO: 17671 - protein, 9 aa, synthetic construct
  source 1..9: note = Seed: LVVVGARGV (KRAS G12R)
FVVIGTRGS

SEQ ID NO: 17672 - protein, 9 aa, synthetic construct
  source 1..9: note = Seed: LVVVGARGV (KRAS G12R)
FVVIGTRGT

SEQ ID NO: 17673 - protein, 9 aa, synthetic construct
  source 1..9: note = Seed: LVVVGARGV (KRAS G12R)
FVVIGTRGV

SEQ ID NO: 17674 - protein, 9 aa, synthetic construct
  source 1..9: note = Seed: LVVVGARGV (KRAS G12R)
FVVIGTRGW

SEQ ID NO: 17675 - protein, 9 aa, synthetic construct
  source 1..9: note = Seed: LVVVGARGV (KRAS G12R)
FVVIGTRGY

SEQ ID NO: 17676 - protein, 9 aa, synthetic construct
  source 1..9: note = Seed: LVVVGARGV (KRAS G12R)
FVVIGVRGA

SEQ ID NO: 17677 - protein, 9 aa, synthetic construct
  source 1..9: note = Seed: LVVVGARGV (KRAS G12R)
FVVIGVRGC

SEQ ID NO: 17678 - protein, 9 aa, synthetic construct
  source 1..9: note = Seed: LVVVGARGV (KRAS G12R)
FVVIGVRGD

SEQ ID NO: 17679 - protein, 9 aa, synthetic construct
  source 1..9: note = Seed: LVVVGARGV (KRAS G12R)
FVVIGVRGE

SEQ ID NO: 17680 - protein, 9 aa, synthetic construct
  source 1..9: note = Seed: LVVVGARGV (KRAS G12R)
FVVIGVRGF

SEQ ID NO: 17681 - protein, 9 aa, synthetic construct
  source 1..9: note = Seed: LVVVGARGV (KRAS G12R)
FVVIGVRGG

SEQ ID NO: 17682 - protein, 9 aa, synthetic construct
  source 1..9: note = Seed: LVVVGARGV (KRAS G12R)
FVVIGVRGH

SEQ ID NO: 17683 - protein, 9 aa, synthetic construct
  source 1..9: note = Seed: LVVVGARGV (KRAS G12R)
FVVIGVRGI

SEQ ID NO: 17684 - protein, 9 aa, synthetic construct
  source 1..9: note = Seed: LVVVGARGV (KRAS G12R)
FVVIGVRGK

SEQ ID NO: 17685 - protein, 9 aa, synthetic construct
  source 1..9: note = Seed: LVVVGARGV (KRAS G12R)
FVVIGVRGL

SEQ ID NO: 17686 - protein, 9 aa, synthetic construct
  source 1..9: note = Seed: LVVVGARGV (KRAS G12R)
FVVIGVRGM

SEQ ID NO: 17687 - protein, 9 aa, synthetic construct
  source 1..9: note = Seed: LVVVGARGV (KRAS G12R)
FVVIGVRGN

SEQ ID NO: 17688 - protein, 9 aa, synthetic construct
  source 1..9: note = Seed: LVVVGARGV (KRAS G12R)
FVVIGVRGP

SEQ ID NO: 17689 - protein, 9 aa, synthetic construct
  source 1..9: note = Seed: LVVVGARGV (KRAS G12R)
FVVIGVRGQ

SEQ ID NO: 17690 - protein, 9 aa, synthetic construct
  source 1..9: note = Seed: LVVVGARGV (KRAS G12R)
FVVIGVRGR

SEQ ID NO: 17691 - protein, 9 aa, synthetic construct
  source 1..9: note = Seed: LVVVGARGV (KRAS G12R)
FVVIGVRGS

SEQ ID NO: 17692 - protein, 9 aa, synthetic construct
  source 1..9: note = Seed: LVVVGARGV (KRAS G12R)
FVVIGVRGT

SEQ ID NO: 17693 - protein, 9 aa, synthetic construct
  source 1..9: note = Seed: LVVVGARGV (KRAS G12R)
FVVIGVRGV

SEQ ID NO: 17694 - protein, 9 aa, synthetic construct
  source 1..9: note = Seed: LVVVGARGV (KRAS G12R)
FVVIGVRGW

SEQ ID NO: 17695 - protein, 9 aa, synthetic construct
  source 1..9: note = Seed: LVVVGARGV (KRAS G12R)
FVVIGVRGY

SEQ ID NO: 17696 - protein, 9 aa, synthetic construct
  source 1..9: note = Seed: LVVVGARGV (KRAS G12R)
FVVIGWRGA

SEQ ID NO: 17697 - protein, 9 aa, synthetic construct
  source 1..9: note = Seed: LVVVGARGV (KRAS G12R)
FVVIGWRGI

SEQ ID NO: 17698 - protein, 9 aa, synthetic construct
  source 1..9: note = Seed: LVVVGARGV (KRAS G12R)
FVVIGWRGL

SEQ ID NO: 17699 - protein, 9 aa, synthetic construct
  source 1..9: note = Seed: LVVVGARGV (KRAS G12R)
FVVIGWRGM

SEQ ID NO: 17700 - protein, 9 aa, synthetic construct
  source 1..9: note = Seed: LVVVGARGV (KRAS G12R)
FVVIGWRGR

SEQ ID NO: 17701 - protein, 9 aa, synthetic construct
  source 1..9: note = Seed: LVVVGARGV (KRAS G12R)
FVVIGWRGS

SEQ ID NO: 17702 - protein, 9 aa, synthetic construct
  source 1..9: note = Seed: LVVVGARGV (KRAS G12R)
FVVIGWRGT

SEQ ID NO: 17703 - protein, 9 aa, synthetic construct
  source 1..9: note = Seed: LVVVGARGV (KRAS G12R)
FVVIGWRGV

SEQ ID NO: 17704 - protein, 9 aa, synthetic construct
  source 1..9: note = Seed: LVVVGARGV (KRAS G12R)
FVVIGYRGA

SEQ ID NO: 17705 - protein, 9 aa, synthetic construct
  source 1..9: note = Seed: LVVVGARGV (KRAS G12R)
FVVIGYRGF

SEQ ID NO: 17706 - protein, 9 aa, synthetic construct
  source 1..9: note = Seed: LVVVGARGV (KRAS G12R)
FVVIGYRGI

SEQ ID NO: 17707 - protein, 9 aa, synthetic construct
  source 1..9: note = Seed: LVVVGARGV (KRAS G12R)
FVVIGYRGL

SEQ ID NO: 17708 - protein, 9 aa, synthetic construct
  source 1..9: note = Seed: LVVVGARGV (KRAS G12R)
FVVIGYRGM

SEQ ID NO: 17709 - protein, 9 aa, synthetic construct
  source 1..9: note = Seed: LVVVGARGV (KRAS G12R)
FVVIGYRGR

SEQ ID NO: 17710 - protein, 9 aa, synthetic construct
  source 1..9: note = Seed: LVVVGARGV (KRAS G12R)
FVVIGYRGV

SEQ ID NO: 17711 - protein, 9 aa, synthetic construct
  source 1..9: note = Seed: LVVVGARGV (KRAS G12R)
FVVKGARGA

SEQ ID NO: 17712 - protein, 9 aa, synthetic construct
  source 1..9: note = Seed: LVVVGARGV (KRAS G12R)
FVVKGARGF

SEQ ID NO: 17713 - protein, 9 aa, synthetic construct
  source 1..9: note = Seed: LVVVGARGV (KRAS G12R)
FVVKGARGI

SEQ ID NO: 17714 - protein, 9 aa, synthetic construct
  source 1..9: note = Seed: LVVVGARGV (KRAS G12R)
FVVKGARGL

SEQ ID NO: 17715 - protein, 9 aa, synthetic construct
  source 1..9: note = Seed: LVVVGARGV (KRAS G12R)
FVVKGARGM

SEQ ID NO: 17716 - protein, 9 aa, synthetic construct
  source 1..9: note = Seed: LVVVGARGV (KRAS G12R)
FVVKGARGR

SEQ ID NO: 17717 - protein, 9 aa, synthetic construct
  source 1..9: note = Seed: LVVVGARGV (KRAS G12R)
FVVKGARGV

SEQ ID NO: 17718 - protein, 9 aa, synthetic construct
  source 1..9: note = Seed: LVVVGARGV (KRAS G12R)
FVVKGARGW

SEQ ID NO: 17719 - protein, 9 aa, synthetic construct
  source 1..9: note = Seed: LVVVGARGV (KRAS G12R)
FVVKGARGY

SEQ ID NO: 17720 - protein, 9 aa, synthetic construct
  source 1..9: note = Seed: LVVVGARGV (KRAS G12R)
FVVKGCRGR

SEQ ID NO: 17721 - protein, 9 aa, synthetic construct
  source 1..9: note = Seed: LVVVGARGV (KRAS G12R)
FVVKGFRGI

SEQ ID NO: 17722 - protein, 9 aa, synthetic construct
  source 1..9: note = Seed: LVVVGARGV (KRAS G12R)
FVVKGFRGL

SEQ ID NO: 17723 - protein, 9 aa, synthetic construct
  source 1..9: note = Seed: LVVVGARGV (KRAS G12R)
FVVKGFRGM

SEQ ID NO: 17724 - protein, 9 aa, synthetic construct
  source 1..9: note = Seed: LVVVGARGV (KRAS G12R)
FVVKGFRGV

SEQ ID NO: 17725 - protein, 9 aa, synthetic construct
  source 1..9: note = Seed: LVVVGARGV (KRAS G12R)
FVVKGGRGA

SEQ ID NO: 17726 - protein, 9 aa, synthetic construct
  source 1..9: note = Seed: LVVVGARGV (KRAS G12R)
FVVKGGRGI

SEQ ID NO: 17727 - protein, 9 aa, synthetic construct
  source 1..9: note = Seed: LVVVGARGV (KRAS G12R)
FVVKGGRGL

SEQ ID NO: 17728 - protein, 9 aa, synthetic construct
  source 1..9: note = Seed: LVVVGARGV (KRAS G12R)
FVVKGGRGM

SEQ ID NO: 17729 - protein, 9 aa, synthetic construct
  source 1..9: note = Seed: LVVVGARGV (KRAS G12R)
FVVKGGRGR

SEQ ID NO: 17730 - protein, 9 aa, synthetic construct
  source 1..9: note = Seed: LVVVGARGV (KRAS G12R)
FVVKGGRGV

SEQ ID NO: 17731 - protein, 9 aa, synthetic construct
  source 1..9: note = Seed: LVVVGARGV (KRAS G12R)
FVVKGHRGA

SEQ ID NO: 17732 - protein, 9 aa, synthetic construct
  source 1..9: note = Seed: LVVVGARGV (KRAS G12R)
FVVKGHRGF

SEQ ID NO: 17733 - protein, 9 aa, synthetic construct
  source 1..9: note = Seed: LVVVGARGV (KRAS G12R)
FVVKGHRGI

SEQ ID NO: 17734 - protein, 9 aa, synthetic construct
  source 1..9: note = Seed: LVVVGARGV (KRAS G12R)
FVVKGHRGL

SEQ ID NO: 17735 - protein, 9 aa, synthetic construct
  source 1..9: note = Seed: LVVVGARGV (KRAS G12R)
FVVKGHRGM

SEQ ID NO: 17736 - protein, 9 aa, synthetic construct
  source 1..9: note = Seed: LVVVGARGV (KRAS G12R)
FVVKGHRGQ

SEQ ID NO: 17737 - protein, 9 aa, synthetic construct
  source 1..9: note = Seed: LVVVGARGV (KRAS G12R)
FVVKGHRGR

SEQ ID NO: 17738 - protein, 9 aa, synthetic construct
  source 1..9: note = Seed: LVVVGARGV (KRAS G12R)
FVVKGHRGS

SEQ ID NO: 17739 - protein, 9 aa, synthetic construct
  source 1..9: note = Seed: LVVVGARGV (KRAS G12R)
FVVKGHRGT

SEQ ID NO: 17740 - protein, 9 aa, synthetic construct
  source 1..9: note = Seed: LVVVGARGV (KRAS G12R)
FVVKGHRGV

SEQ ID NO: 17741 - protein, 9 aa, synthetic construct
  source 1..9: note = Seed: LVVVGARGV (KRAS G12R)
FVVKGHRGW

SEQ ID NO: 17742 - protein, 9 aa, synthetic construct
  source 1..9: note = Seed: LVVVGARGV (KRAS G12R)
FVVKGHRGY

SEQ ID NO: 17743 - protein, 9 aa, synthetic construct
  source 1..9: note = Seed: LVVVGARGV (KRAS G12R)
FVVKGIRGA

SEQ ID NO: 17744 - protein, 9 aa, synthetic construct
  source 1..9: note = Seed: LVVVGARGV (KRAS G12R)
FVVKGIRGF

SEQ ID NO: 17745 - protein, 9 aa, synthetic construct
  source 1..9: note = Seed: LVVVGARGV (KRAS G12R)
FVVKGIRGG

SEQ ID NO: 17746 - protein, 9 aa, synthetic construct
  source 1..9: note = Seed: LVVVGARGV (KRAS G12R)
FVVKGIRGI

SEQ ID NO: 17747 - protein, 9 aa, synthetic construct
  source 1..9: note = Seed: LVVVGARGV (KRAS G12R)
FVVKGIRGL

SEQ ID NO: 17748 - protein, 9 aa, synthetic construct
  source 1..9: note = Seed: LVVVGARGV (KRAS G12R)
FVVKGIRGM

SEQ ID NO: 17749 - protein, 9 aa, synthetic construct
  source 1..9: note = Seed: LVVVGARGV (KRAS G12R)
FVVKGIRGQ

SEQ ID NO: 17750 - protein, 9 aa, synthetic construct
  source 1..9: note = Seed: LVVVGARGV (KRAS G12R)
FVVKGIRGR

SEQ ID NO: 17751 - protein, 9 aa, synthetic construct
  source 1..9: note = Seed: LVVVGARGV (KRAS G12R)
FVVKGIRGS

SEQ ID NO: 17752 - protein, 9 aa, synthetic construct
  source 1..9: note = Seed: LVVVGARGV (KRAS G12R)
FVVKGIRGV

SEQ ID NO: 17753 - protein, 9 aa, synthetic construct
  source 1..9: note = Seed: LVVVGARGV (KRAS G12R)
FVVKGIRGW

SEQ ID NO: 17754 - protein, 9 aa, synthetic construct
  source 1..9: note = Seed: LVVVGARGV (KRAS G12R)
FVVKGIRGY

SEQ ID NO: 17755 - protein, 9 aa, synthetic construct
  source 1..9: note = Seed: LVVVGARGV (KRAS G12R)
FVVKGKRGA

SEQ ID NO: 17756 - protein, 9 aa, synthetic construct
  source 1..9: note = Seed: LVVVGARGV (KRAS G12R)
FVVKGKRGF

SEQ ID NO: 17757 - protein, 9 aa, synthetic construct
  source 1..9: note = Seed: LVVVGARGV (KRAS G12R)
FVVKGKRGG

SEQ ID NO: 17758 - protein, 9 aa, synthetic construct
  source 1..9: note = Seed: LVVVGARGV (KRAS G12R)
FVVKGKRGH

SEQ ID NO: 17759 - protein, 9 aa, synthetic construct
  source 1..9: note = Seed: LVVVGARGV (KRAS G12R)
FVVKGKRGI

SEQ ID NO: 17760 - protein, 9 aa, synthetic construct
  source 1..9: note = Seed: LVVVGARGV (KRAS G12R)
FVVKGKRGK

SEQ ID NO: 17761 - protein, 9 aa, synthetic construct
  source 1..9: note = Seed: LVVVGARGV (KRAS G12R)
FVVKGKRGL

SEQ ID NO: 17762 - protein, 9 aa, synthetic construct
  source 1..9: note = Seed: LVVVGARGV (KRAS G12R)
FVVKGKRGM

SEQ ID NO: 17763 - protein, 9 aa, synthetic construct
  source 1..9: note = Seed: LVVVGARGV (KRAS G12R)
FVVKGKRGN

SEQ ID NO: 17764 - protein, 9 aa, synthetic construct
  source 1..9: note = Seed: LVVVGARGV (KRAS G12R)
FVVKGKRGP

SEQ ID NO: 17765 - protein, 9 aa, synthetic construct
  source 1..9: note = Seed: LVVVGARGV (KRAS G12R)
FVVKGKRGQ

SEQ ID NO: 17766 - protein, 9 aa, synthetic construct
  source 1..9: note = Seed: LVVVGARGV (KRAS G12R)
FVVKGKRGR

SEQ ID NO: 17767 - protein, 9 aa, synthetic construct
  source 1..9: note = Seed: LVVVGARGV (KRAS G12R)
FVVKGKRGS

SEQ ID NO: 17768 - protein, 9 aa, synthetic construct
  source 1..9: note = Seed: LVVVGARGV (KRAS G12R)
FVVKGKRGT

SEQ ID NO: 17769 - protein, 9 aa, synthetic construct
  source 1..9: note = Seed: LVVVGARGV (KRAS G12R)
FVVKGKRGV

SEQ ID NO: 17770 - protein, 9 aa, synthetic construct
  source 1..9: note = Seed: LVVVGARGV (KRAS G12R)
FVVKGKRGW

SEQ ID NO: 17771 - protein, 9 aa, synthetic construct
  source 1..9: note = Seed: LVVVGARGV (KRAS G12R)
FVVKGKRGY

SEQ ID NO: 17772 - protein, 9 aa, synthetic construct
  source 1..9: note = Seed: LVVVGARGV (KRAS G12R)
FVVKGLRGF

SEQ ID NO: 17773 - protein, 9 aa, synthetic construct
  source 1..9: note = Seed: LVVVGARGV (KRAS G12R)
FVVKGLRGG

SEQ ID NO: 17774 - protein, 9 aa, synthetic construct
  source 1..9: note = Seed: LVVVGARGV (KRAS G12R)
FVVKGLRGI

SEQ ID NO: 17775 - protein, 9 aa, synthetic construct
  source 1..9: note = Seed: LVVVGARGV (KRAS G12R)
FVVKGLRGL

SEQ ID NO: 17776 - protein, 9 aa, synthetic construct
  source 1..9: note = Seed: LVVVGARGV (KRAS G12R)
FVVKGLRGM

SEQ ID NO: 17777 - protein, 9 aa, synthetic construct
  source 1..9: note = Seed: LVVVGARGV (KRAS G12R)
FVVKGLRGQ

SEQ ID NO: 17778 - protein, 9 aa, synthetic construct
  source 1..9: note = Seed: LVVVGARGV (KRAS G12R)
FVVKGLRGR

SEQ ID NO: 17779 - protein, 9 aa, synthetic construct
  source 1..9: note = Seed: LVVVGARGV (KRAS G12R)
FVVKGLRGS

SEQ ID NO: 17780 - protein, 9 aa, synthetic construct
  source 1..9: note = Seed: LVVVGARGV (KRAS G12R)
FVVKGLRGY

SEQ ID NO: 17781 - protein, 9 aa, synthetic construct
  source 1..9: note = Seed: LVVVGARGV (KRAS G12R)
FVVKGMRGF

SEQ ID NO: 17782 - protein, 9 aa, synthetic construct
  source 1..9: note = Seed: LVVVGARGV (KRAS G12R)
FVVKGMRGG

SEQ ID NO: 17783 - protein, 9 aa, synthetic construct
  source 1..9: note = Seed: LVVVGARGV (KRAS G12R)
FVVKGMRGI

SEQ ID NO: 17784 - protein, 9 aa, synthetic construct
  source 1..9: note = Seed: LVVVGARGV (KRAS G12R)
FVVKGMRGL

SEQ ID NO: 17785 - protein, 9 aa, synthetic construct
  source 1..9: note = Seed: LVVVGARGV (KRAS G12R)
FVVKGMRGM

SEQ ID NO: 17786 - protein, 9 aa, synthetic construct
  source 1..9: note = Seed: LVVVGARGV (KRAS G12R)
FVVKGMRGR

SEQ ID NO: 17787 - protein, 9 aa, synthetic construct
  source 1..9: note = Seed: LVVVGARGV (KRAS G12R)
FVVKGMRGS

SEQ ID NO: 17788 - protein, 9 aa, synthetic construct
  source 1..9: note = Seed: LVVVGARGV (KRAS G12R)
FVVKGMRGV

SEQ ID NO: 17789 - protein, 9 aa, synthetic construct
  source 1..9: note = Seed: LVVVGARGV (KRAS G12R)
FVVKGMRGY

SEQ ID NO: 17790 - protein, 9 aa, synthetic construct
  source 1..9: note = Seed: LVVVGARGV (KRAS G12R)
FVVKGNRGA

SEQ ID NO: 17791 - protein, 9 aa, synthetic construct
  source 1..9: note = Seed: LVVVGARGV (KRAS G12R)
FVVKGNRGF

SEQ ID NO: 17792 - protein, 9 aa, synthetic construct
  source 1..9: note = Seed: LVVVGARGV (KRAS G12R)
FVVKGNRGH

SEQ ID NO: 17793 - protein, 9 aa, synthetic construct
  source 1..9: note = Seed: LVVVGARGV (KRAS G12R)
FVVKGNRGI

SEQ ID NO: 17794 - protein, 9 aa, synthetic construct
  source 1..9: note = Seed: LVVVGARGV (KRAS G12R)
FVVKGNRGK

SEQ ID NO: 17795 - protein, 9 aa, synthetic construct
  source 1..9: note = Seed: LVVVGARGV (KRAS G12R)
FVVKGNRGL

SEQ ID NO: 17796 - protein, 9 aa, synthetic construct
  source 1..9: note = Seed: LVVVGARGV (KRAS G12R)
FVVKGNRGM

SEQ ID NO: 17797 - protein, 9 aa, synthetic construct
  source 1..9: note = Seed: LVVVGARGV (KRAS G12R)
FVVKGNRGR

SEQ ID NO: 17798 - protein, 9 aa, synthetic construct
  source 1..9: note = Seed: LVVVGARGV (KRAS G12R)
FVVKGNRGV

SEQ ID NO: 17799 - protein, 9 aa, synthetic construct
  source 1..9: note = Seed: LVVVGARGV (KRAS G12R)
FVVKGNRGY

SEQ ID NO: 17800 - protein, 9 aa, synthetic construct
  source 1..9: note = Seed: LVVVGARGV (KRAS G12R)
FVVKGPRGI

SEQ ID NO: 17801 - protein, 9 aa, synthetic construct
  source 1..9: note = Seed: LVVVGARGV (KRAS G12R)
FVVKGPRGL

SEQ ID NO: 17802 - protein, 9 aa, synthetic construct
  source 1..9: note = Seed: LVVVGARGV (KRAS G12R)
FVVKGPRGR

SEQ ID NO: 17803 - protein, 9 aa, synthetic construct
  source 1..9: note = Seed: LVVVGARGV (KRAS G12R)
FVVKGPRGV

SEQ ID NO: 17804 - protein, 9 aa, synthetic construct
  source 1..9: note = Seed: LVVVGARGV (KRAS G12R)
FVVKGQRGF

SEQ ID NO: 17805 - protein, 9 aa, synthetic construct
  source 1..9: note = Seed: LVVVGARGV (KRAS G12R)
FVVKGQRGI

SEQ ID NO: 17806 - protein, 9 aa, synthetic construct
  source 1..9: note = Seed: LVVVGARGV (KRAS G12R)
FVVKGQRGK

SEQ ID NO: 17807 - protein, 9 aa, synthetic construct
  source 1..9: note = Seed: LVVVGARGV (KRAS G12R)
FVVKGQRGL

SEQ ID NO: 17808 - protein, 9 aa, synthetic construct
  source 1..9: note = Seed: LVVVGARGV (KRAS G12R)
FVVKGQRGM

SEQ ID NO: 17809 - protein, 9 aa, synthetic construct
  source 1..9: note = Seed: LVVVGARGV (KRAS G12R)
FVVKGQRGR

SEQ ID NO: 17810 - protein, 9 aa, synthetic construct
  source 1..9: note = Seed: LVVVGARGV (KRAS G12R)
FVVKGQRGV

SEQ ID NO: 17811 - protein, 9 aa, synthetic construct
  source 1..9: note = Seed: LVVVGARGV (KRAS G12R)
FVVKGQRGY

SEQ ID NO: 17812 - protein, 9 aa, synthetic construct
  source 1..9: note = Seed: LVVVGARGV (KRAS G12R)
FVVKGRRGA

SEQ ID NO: 17813 - protein, 9 aa, synthetic construct
  source 1..9: note = Seed: LVVVGARGV (KRAS G12R)
FVVKGRRGC

SEQ ID NO: 17814 - protein, 9 aa, synthetic construct
  source 1..9: note = Seed: LVVVGARGV (KRAS G12R)
FVVKGRRGE

SEQ ID NO: 17815 - protein, 9 aa, synthetic construct
  source 1..9: note = Seed: LVVVGARGV (KRAS G12R)
FVVKGRRGF

SEQ ID NO: 17816 - protein, 9 aa, synthetic construct
  source 1..9: note = Seed: LVVVGARGV (KRAS G12R)
FVVKGRRGG

SEQ ID NO: 17817 - protein, 9 aa, synthetic construct
  source 1..9: note = Seed: LVVVGARGV (KRAS G12R)
FVVKGRRGH

SEQ ID NO: 17818 - protein, 9 aa, synthetic construct
  source 1..9: note = Seed: LVVVGARGV (KRAS G12R)
FVVKGRRGI

SEQ ID NO: 17819 - protein, 9 aa, synthetic construct
  source 1..9: note = Seed: LVVVGARGV (KRAS G12R)
FVVKGRRGK

SEQ ID NO: 17820 - protein, 9 aa, synthetic construct
  source 1..9: note = Seed: LVVVGARGV (KRAS G12R)
FVVKGRRGL

SEQ ID NO: 17821 - protein, 9 aa, synthetic construct
  source 1..9: note = Seed: LVVVGARGV (KRAS G12R)
FVVKGRRGM

SEQ ID NO: 17822 - protein, 9 aa, synthetic construct
  source 1..9: note = Seed: LVVVGARGV (KRAS G12R)
FVVKGRRGN

SEQ ID NO: 17823 - protein, 9 aa, synthetic construct
  source 1..9: note = Seed: LVVVGARGV (KRAS G12R)
FVVKGRRGP

SEQ ID NO: 17824 - protein, 9 aa, synthetic construct
  source 1..9: note = Seed: LVVVGARGV (KRAS G12R)
FVVKGRRGQ

SEQ ID NO: 17825 - protein, 9 aa, synthetic construct
  source 1..9: note = Seed: LVVVGARGV (KRAS G12R)
FVVKGRRGR

SEQ ID NO: 17826 - protein, 9 aa, synthetic construct
  source 1..9: note = Seed: LVVVGARGV (KRAS G12R)
FVVKGRRGS

SEQ ID NO: 17827 - protein, 9 aa, synthetic construct
  source 1..9: note = Seed: LVVVGARGV (KRAS G12R)
FVVKGRRGT

SEQ ID NO: 17828 - protein, 9 aa, synthetic construct
  source 1..9: note = Seed: LVVVGARGV (KRAS G12R)
FVVKGRRGV

SEQ ID NO: 17829 - protein, 9 aa, synthetic construct
  source 1..9: note = Seed: LVVVGARGV (KRAS G12R)
FVVKGRRGW

SEQ ID NO: 17830 - protein, 9 aa, synthetic construct
  source 1..9: note = Seed: LVVVGARGV (KRAS G12R)
FVVKGRRGY

SEQ ID NO: 17831 - protein, 9 aa, synthetic construct
  source 1..9: note = Seed: LVVVGARGV (KRAS G12R)
FVVKGSRGA

SEQ ID NO: 17832 - protein, 9 aa, synthetic construct
  source 1..9: note = Seed: LVVVGARGV (KRAS G12R)
FVVKGSRGF

SEQ ID NO: 17833 - protein, 9 aa, synthetic construct
  source 1..9: note = Seed: LVVVGARGV (KRAS G12R)
FVVKGSRGH

SEQ ID NO: 17834 - protein, 9 aa, synthetic construct
  source 1..9: note = Seed: LVVVGARGV (KRAS G12R)
FVVKGSRGI

SEQ ID NO: 17835 - protein, 9 aa, synthetic construct
  source 1..9: note = Seed: LVVVGARGV (KRAS G12R)
FVVKGSRGK

SEQ ID NO: 17836 - protein, 9 aa, synthetic construct
  source 1..9: note = Seed: LVVVGARGV (KRAS G12R)
FVVKGSRGL

SEQ ID NO: 17837 - protein, 9 aa, synthetic construct
  source 1..9: note = Seed: LVVVGARGV (KRAS G12R)
FVVKGSRGM

SEQ ID NO: 17838 - protein, 9 aa, synthetic construct
  source 1..9: note = Seed: LVVVGARGV (KRAS G12R)
FVVKGSRGR

SEQ ID NO: 17839 - protein, 9 aa, synthetic construct
  source 1..9: note = Seed: LVVVGARGV (KRAS G12R)
FVVKGSRGV

SEQ ID NO: 17840 - protein, 9 aa, synthetic construct
  source 1..9: note = Seed: LVVVGARGV (KRAS G12R)
FVVKGSRGY

SEQ ID NO: 17841 - protein, 9 aa, synthetic construct
  source 1..9: note = Seed: LVVVGARGV (KRAS G12R)
FVVKGTRGA

SEQ ID NO: 17842 - protein, 9 aa, synthetic construct
  source 1..9: note = Seed: LVVVGARGV (KRAS G12R)
FVVKGTRGF

SEQ ID NO: 17843 - protein, 9 aa, synthetic construct
  source 1..9: note = Seed: LVVVGARGV (KRAS G12R)
FVVKGTRGH

SEQ ID NO: 17844 - protein, 9 aa, synthetic construct
  source 1..9: note = Seed: LVVVGARGV (KRAS G12R)
FVVKGTRGI

SEQ ID NO: 17845 - protein, 9 aa, synthetic construct
  source 1..9: note = Seed: LVVVGARGV (KRAS G12R)
FVVKGTRGK

SEQ ID NO: 17846 - protein, 9 aa, synthetic construct
  source 1..9: note = Seed: LVVVGARGV (KRAS G12R)
FVVKGTRGL

SEQ ID NO: 17847 - protein, 9 aa, synthetic construct
  source 1..9: note = Seed: LVVVGARGV (KRAS G12R)
FVVKGTRGM

SEQ ID NO: 17848 - protein, 9 aa, synthetic construct
  source 1..9: note = Seed: LVVVGARGV (KRAS G12R)
FVVKGTRGQ

SEQ ID NO: 17849 - protein, 9 aa, synthetic construct
  source 1..9: note = Seed: LVVVGARGV (KRAS G12R)
FVVKGTRGR

SEQ ID NO: 17850 - protein, 9 aa, synthetic construct
  source 1..9: note = Seed: LVVVGARGV (KRAS G12R)
FVVKGTRGS

SEQ ID NO: 17851 - protein, 9 aa, synthetic construct
  source 1..9: note = Seed: LVVVGARGV (KRAS G12R)
FVVKGTRGV

SEQ ID NO: 17852 - protein, 9 aa, synthetic construct
  source 1..9: note = Seed: LVVVGARGV (KRAS G12R)
FVVKGTRGY

SEQ ID NO: 17853 - protein, 9 aa, synthetic construct
  source 1..9: note = Seed: LVVVGARGV (KRAS G12R)
FVVKGVRGA

SEQ ID NO: 17854 - protein, 9 aa, synthetic construct
  source 1..9: note = Seed: LVVVGARGV (KRAS G12R)
FVVKGVRGF

SEQ ID NO: 17855 - protein, 9 aa, synthetic construct
  source 1..9: note = Seed: LVVVGARGV (KRAS G12R)
FVVKGVRGI

SEQ ID NO: 17856 - protein, 9 aa, synthetic construct
  source 1..9: note = Seed: LVVVGARGV (KRAS G12R)
FVVKGVRGL

SEQ ID NO: 17857 - protein, 9 aa, synthetic construct
  source 1..9: note = Seed: LVVVGARGV (KRAS G12R)
FVVKGVRGM

SEQ ID NO: 17858 - protein, 9 aa, synthetic construct
  source 1..9: note = Seed: LVVVGARGV (KRAS G12R)
FVVKGVRGQ

SEQ ID NO: 17859 - protein, 9 aa, synthetic construct
  source 1..9: note = Seed: LVVVGARGV (KRAS G12R)
FVVKGVRGR

SEQ ID NO: 17860 - protein, 9 aa, synthetic construct
  source 1..9: note = Seed: LVVVGARGV (KRAS G12R)
FVVKGVRGS

SEQ ID NO: 17861 - protein, 9 aa, synthetic construct
  source 1..9: note = Seed: LVVVGARGV (KRAS G12R)
FVVKGVRGV

SEQ ID NO: 17862 - protein, 9 aa, synthetic construct
  source 1..9: note = Seed: LVVVGARGV (KRAS G12R)
FVVKGVRGW

SEQ ID NO: 17863 - protein, 9 aa, synthetic construct
  source 1..9: note = Seed: LVVVGARGV (KRAS G12R)
FVVKGVRGY

SEQ ID NO: 17864 - protein, 9 aa, synthetic construct
  source 1..9: note = Seed: LVVVGARGV (KRAS G12R)
FVVLGARGC

SEQ ID NO: 17865 - protein, 9 aa, synthetic construct
  source 1..9: note = Seed: LVVVGARGV (KRAS G12R)
FVVLGARGD

SEQ ID NO: 17866 - protein, 9 aa, synthetic construct
  source 1..9: note = Seed: LVVVGARGV (KRAS G12R)
FVVLGARGE

SEQ ID NO: 17867 - protein, 9 aa, synthetic construct
  source 1..9: note = Seed: LVVVGARGV (KRAS G12R)
FVVLGARGF

SEQ ID NO: 17868 - protein, 9 aa, synthetic construct
  source 1..9: note = Seed: LVVVGARGV (KRAS G12R)
FVVLGARGG

SEQ ID NO: 17869 - protein, 9 aa, synthetic construct
  source 1..9: note = Seed: LVVVGARGV (KRAS G12R)
FVVLGARGH

SEQ ID NO: 17870 - protein, 9 aa, synthetic construct
  source 1..9: note = Seed: LVVVGARGV (KRAS G12R)
FVVLGARGK

SEQ ID NO: 17871 - protein, 9 aa, synthetic construct
  source 1..9: note = Seed: LVVVGARGV (KRAS G12R)
FVVLGARGN

SEQ ID NO: 17872 - protein, 9 aa, synthetic construct
  source 1..9: note = Seed: LVVVGARGV (KRAS G12R)
FVVLGARGP

SEQ ID NO: 17873 - protein, 9 aa, synthetic construct
  source 1..9: note = Seed: LVVVGARGV (KRAS G12R)
FVVLGARGQ

SEQ ID NO: 17874 - protein, 9 aa, synthetic construct
  source 1..9: note = Seed: LVVVGARGV (KRAS G12R)
FVVLGARGR

SEQ ID NO: 17875 - protein, 9 aa, synthetic construct
  source 1..9: note = Seed: LVVVGARGV (KRAS G12R)
FVVLGARGW

SEQ ID NO: 17876 - protein, 9 aa, synthetic construct
  source 1..9: note = Seed: LVVVGARGV (KRAS G12R)
FVVLGARGY

SEQ ID NO: 17877 - protein, 9 aa, synthetic construct
  source 1..9: note = Seed: LVVVGARGV (KRAS G12R)
FVVLGCRGA

SEQ ID NO: 17878 - protein, 9 aa, synthetic construct
  source 1..9: note = Seed: LVVVGARGV (KRAS G12R)
FVVLGCRGF

SEQ ID NO: 17879 - protein, 9 aa, synthetic construct
  source 1..9: note = Seed: LVVVGARGV (KRAS G12R)
FVVLGCRGG

SEQ ID NO: 17880 - protein, 9 aa, synthetic construct
  source 1..9: note = Seed: LVVVGARGV (KRAS G12R)
FVVLGCRGI

SEQ ID NO: 17881 - protein, 9 aa, synthetic construct
  source 1..9: note = Seed: LVVVGARGV (KRAS G12R)
FVVLGCRGL

SEQ ID NO: 17882 - protein, 9 aa, synthetic construct
  source 1..9: note = Seed: LVVVGARGV (KRAS G12R)
FVVLGCRGM

SEQ ID NO: 17883 - protein, 9 aa, synthetic construct
  source 1..9: note = Seed: LVVVGARGV (KRAS G12R)
FVVLGCRGN

SEQ ID NO: 17884 - protein, 9 aa, synthetic construct
  source 1..9: note = Seed: LVVVGARGV (KRAS G12R)
FVVLGCRGR

SEQ ID NO: 17885 - protein, 9 aa, synthetic construct
  source 1..9: note = Seed: LVVVGARGV (KRAS G12R)
FVVLGCRGS

SEQ ID NO: 17886 - protein, 9 aa, synthetic construct
  source 1..9: note = Seed: LVVVGARGV (KRAS G12R)
FVVLGCRGT

SEQ ID NO: 17887 - protein, 9 aa, synthetic construct
  source 1..9: note = Seed: LVVVGARGV (KRAS G12R)
FVVLGCRGV

SEQ ID NO: 17888 - protein, 9 aa, synthetic construct
  source 1..9: note = Seed: LVVVGARGV (KRAS G12R)
FVVLGDRGA

SEQ ID NO: 17889 - protein, 9 aa, synthetic construct
  source 1..9: note = Seed: LVVVGARGV (KRAS G12R)
FVVLGDRGF

SEQ ID NO: 17890 - protein, 9 aa, synthetic construct
  source 1..9: note = Seed: LVVVGARGV (KRAS G12R)
FVVLGDRGI

SEQ ID NO: 17891 - protein, 9 aa, synthetic construct
  source 1..9: note = Seed: LVVVGARGV (KRAS G12R)
FVVLGDRGL

SEQ ID NO: 17892 - protein, 9 aa, synthetic construct
  source 1..9: note = Seed: LVVVGARGV (KRAS G12R)
FVVLGDRGM

SEQ ID NO: 17893 - protein, 9 aa, synthetic construct
  source 1..9: note = Seed: LVVVGARGV (KRAS G12R)
FVVLGDRGS

SEQ ID NO: 17894 - protein, 9 aa, synthetic construct
  source 1..9: note = Seed: LVVVGARGV (KRAS G12R)
FVVLGDRGT

SEQ ID NO: 17895 - protein, 9 aa, synthetic construct
  source 1..9: note = Seed: LVVVGARGV (KRAS G12R)
FVVLGDRGV

SEQ ID NO: 17896 - protein, 9 aa, synthetic construct
  source 1..9: note = Seed: LVVVGARGV (KRAS G12R)
FVVLGERGA

SEQ ID NO: 17897 - protein, 9 aa, synthetic construct
  source 1..9: note = Seed: LVVVGARGV (KRAS G12R)
FVVLGERGF

SEQ ID NO: 17898 - protein, 9 aa, synthetic construct
  source 1..9: note = Seed: LVVVGARGV (KRAS G12R)
FVVLGERGI

SEQ ID NO: 17899 - protein, 9 aa, synthetic construct
  source 1..9: note = Seed: LVVVGARGV (KRAS G12R)
FVVLGERGL

SEQ ID NO: 17900 - protein, 9 aa, synthetic construct
  source 1..9: note = Seed: LVVVGARGV (KRAS G12R)
FVVLGERGM

SEQ ID NO: 17901 - protein, 9 aa, synthetic construct
  source 1..9: note = Seed: LVVVGARGV (KRAS G12R)
FVVLGERGR

SEQ ID NO: 17902 - protein, 9 aa, synthetic construct
  source 1..9: note = Seed: LVVVGARGV (KRAS G12R)
FVVLGERGS

SEQ ID NO: 17903 - protein, 9 aa, synthetic construct
  source 1..9: note = Seed: LVVVGARGV (KRAS G12R)
FVVLGERGT

SEQ ID NO: 17904 - protein, 9 aa, synthetic construct
  source 1..9: note = Seed: LVVVGARGV (KRAS G12R)
FVVLGERGV

SEQ ID NO: 17905 - protein, 9 aa, synthetic construct
  source 1..9: note = Seed: LVVVGARGV (KRAS G12R)
FVVLGFRGA

SEQ ID NO: 17906 - protein, 9 aa, synthetic construct
  source 1..9: note = Seed: LVVVGARGV (KRAS G12R)
FVVLGFRGE

SEQ ID NO: 17907 - protein, 9 aa, synthetic construct
  source 1..9: note = Seed: LVVVGARGV (KRAS G12R)
FVVLGFRGF

SEQ ID NO: 17908 - protein, 9 aa, synthetic construct
  source 1..9: note = Seed: LVVVGARGV (KRAS G12R)
FVVLGFRGI

SEQ ID NO: 17909 - protein, 9 aa, synthetic construct
  source 1..9: note = Seed: LVVVGARGV (KRAS G12R)
FVVLGFRGL

SEQ ID NO: 17910 - protein, 9 aa, synthetic construct
  source 1..9: note = Seed: LVVVGARGV (KRAS G12R)
FVVLGFRGM

SEQ ID NO: 17911 - protein, 9 aa, synthetic construct
  source 1..9: note = Seed: LVVVGARGV (KRAS G12R)
FVVLGFRGN

SEQ ID NO: 17912 - protein, 9 aa, synthetic construct
  source 1..9: note = Seed: LVVVGARGV (KRAS G12R)
FVVLGFRGS

SEQ ID NO: 17913 - protein, 9 aa, synthetic construct
  source 1..9: note = Seed: LVVVGARGV (KRAS G12R)
FVVLGFRGT

SEQ ID NO: 17914 - protein, 9 aa, synthetic construct
  source 1..9: note = Seed: LVVVGARGV (KRAS G12R)
FVVLGFRGV

SEQ ID NO: 17915 - protein, 9 aa, synthetic construct
  source 1..9: note = Seed: LVVVGARGV (KRAS G12R)
FVVLGFRGY

SEQ ID NO: 17916 - protein, 9 aa, synthetic construct
  source 1..9: note = Seed: LVVVGARGV (KRAS G12R)
FVVLGGRGC

SEQ ID NO: 17917 - protein, 9 aa, synthetic construct
  source 1..9: note = Seed: LVVVGARGV (KRAS G12R)
FVVLGGRGD

SEQ ID NO: 17918 - protein, 9 aa, synthetic construct
  source 1..9: note = Seed: LVVVGARGV (KRAS G12R)
FVVLGGRGE

SEQ ID NO: 17919 - protein, 9 aa, synthetic construct
  source 1..9: note = Seed: LVVVGARGV (KRAS G12R)
FVVLGGRGF

SEQ ID NO: 17920 - protein, 9 aa, synthetic construct
  source 1..9: note = Seed: LVVVGARGV (KRAS G12R)
FVVLGGRGG

SEQ ID NO: 17921 - protein, 9 aa, synthetic construct
  source 1..9: note = Seed: LVVVGARGV (KRAS G12R)
FVVLGGRGH

SEQ ID NO: 17922 - protein, 9 aa, synthetic construct
  source 1..9: note = Seed: LVVVGARGV (KRAS G12R)
FVVLGGRGK

SEQ ID NO: 17923 - protein, 9 aa, synthetic construct
  source 1..9: note = Seed: LVVVGARGV (KRAS G12R)
FVVLGGRGN

SEQ ID NO: 17924 - protein, 9 aa, synthetic construct
  source 1..9: note = Seed: LVVVGARGV (KRAS G12R)
FVVLGGRGP

SEQ ID NO: 17925 - protein, 9 aa, synthetic construct
  source 1..9: note = Seed: LVVVGARGV (KRAS G12R)
FVVLGGRGQ

SEQ ID NO: 17926 - protein, 9 aa, synthetic construct
  source 1..9: note = Seed: LVVVGARGV (KRAS G12R)
FVVLGGRGR

SEQ ID NO: 17927 - protein, 9 aa, synthetic construct
  source 1..9: note = Seed: LVVVGARGV (KRAS G12R)
FVVLGGRGW

SEQ ID NO: 17928 - protein, 9 aa, synthetic construct
  source 1..9: note = Seed: LVVVGARGV (KRAS G12R)
FVVLGGRGY

SEQ ID NO: 17929 - protein, 9 aa, synthetic construct
  source 1..9: note = Seed: LVVVGARGV (KRAS G12R)
FVVLGHRGA

SEQ ID NO: 17930 - protein, 9 aa, synthetic construct
  source 1..9: note = Seed: LVVVGARGV (KRAS G12R)
FVVLGHRGF

SEQ ID NO: 17931 - protein, 9 aa, synthetic construct
  source 1..9: note = Seed: LVVVGARGV (KRAS G12R)
FVVLGHRGG

SEQ ID NO: 17932 - protein, 9 aa, synthetic construct
  source 1..9: note = Seed: LVVVGARGV (KRAS G12R)
FVVLGHRGH

SEQ ID NO: 17933 - protein, 9 aa, synthetic construct
  source 1..9: note = Seed: LVVVGARGV (KRAS G12R)
FVVLGHRGI

SEQ ID NO: 17934 - protein, 9 aa, synthetic construct
  source 1..9: note = Seed: LVVVGARGV (KRAS G12R)
FVVLGHRGK

SEQ ID NO: 17935 - protein, 9 aa, synthetic construct
  source 1..9: note = Seed: LVVVGARGV (KRAS G12R)
FVVLGHRGL

SEQ ID NO: 17936 - protein, 9 aa, synthetic construct
  source 1..9: note = Seed: LVVVGARGV (KRAS G12R)
FVVLGHRGM

SEQ ID NO: 17937 - protein, 9 aa, synthetic construct
  source 1..9: note = Seed: LVVVGARGV (KRAS G12R)
FVVLGHRGN

SEQ ID NO: 17938 - protein, 9 aa, synthetic construct
  source 1..9: note = Seed: LVVVGARGV (KRAS G12R)
FVVLGHRGP

SEQ ID NO: 17939 - protein, 9 aa, synthetic construct
  source 1..9: note = Seed: LVVVGARGV (KRAS G12R)
FVVLGHRGQ

SEQ ID NO: 17940 - protein, 9 aa, synthetic construct
  source 1..9: note = Seed: LVVVGARGV (KRAS G12R)
FVVLGHRGR

SEQ ID NO: 17941 - protein, 9 aa, synthetic construct
  source 1..9: note = Seed: LVVVGARGV (KRAS G12R)
FVVLGHRGS

SEQ ID NO: 17942 - protein, 9 aa, synthetic construct
  source 1..9: note = Seed: LVVVGARGV (KRAS G12R)
FVVLGHRGT

SEQ ID NO: 17943 - protein, 9 aa, synthetic construct
  source 1..9: note = Seed: LVVVGARGV (KRAS G12R)
FVVLGHRGV

SEQ ID NO: 17944 - protein, 9 aa, synthetic construct
  source 1..9: note = Seed: LVVVGARGV (KRAS G12R)
FVVLGHRGW

SEQ ID NO: 17945 - protein, 9 aa, synthetic construct
  source 1..9: note = Seed: LVVVGARGV (KRAS G12R)
FVVLGHRGY

SEQ ID NO: 17946 - protein, 9 aa, synthetic construct
  source 1..9: note = Seed: LVVVGARGV (KRAS G12R)
FVVLGIRGA

SEQ ID NO: 17947 - protein, 9 aa, synthetic construct
  source 1..9: note = Seed: LVVVGARGV (KRAS G12R)
FVVLGIRGC

SEQ ID NO: 17948 - protein, 9 aa, synthetic construct
  source 1..9: note = Seed: LVVVGARGV (KRAS G12R)
FVVLGIRGD

SEQ ID NO: 17949 - protein, 9 aa, synthetic construct
  source 1..9: note = Seed: LVVVGARGV (KRAS G12R)
FVVLGIRGE

SEQ ID NO: 17950 - protein, 9 aa, synthetic construct
  source 1..9: note = Seed: LVVVGARGV (KRAS G12R)
FVVLGIRGF

SEQ ID NO: 17951 - protein, 9 aa, synthetic construct
  source 1..9: note = Seed: LVVVGARGV (KRAS G12R)
FVVLGIRGG

SEQ ID NO: 17952 - protein, 9 aa, synthetic construct
  source 1..9: note = Seed: LVVVGARGV (KRAS G12R)
FVVLGIRGH

SEQ ID NO: 17953 - protein, 9 aa, synthetic construct
  source 1..9: note = Seed: LVVVGARGV (KRAS G12R)
FVVLGIRGI

SEQ ID NO: 17954 - protein, 9 aa, synthetic construct
  source 1..9: note = Seed: LVVVGARGV (KRAS G12R)
FVVLGIRGK

SEQ ID NO: 17955 - protein, 9 aa, synthetic construct
  source 1..9: note = Seed: LVVVGARGV (KRAS G12R)
FVVLGIRGL

SEQ ID NO: 17956 - protein, 9 aa, synthetic construct
  source 1..9: note = Seed: LVVVGARGV (KRAS G12R)
FVVLGIRGM

SEQ ID NO: 17957 - protein, 9 aa, synthetic construct
  source 1..9: note = Seed: LVVVGARGV (KRAS G12R)
FVVLGIRGN

SEQ ID NO: 17958 - protein, 9 aa, synthetic construct
  source 1..9: note = Seed: LVVVGARGV (KRAS G12R)
FVVLGIRGP

SEQ ID NO: 17959 - protein, 9 aa, synthetic construct
  source 1..9: note = Seed: LVVVGARGV (KRAS G12R)
FVVLGIRGQ

SEQ ID NO: 17960 - protein, 9 aa, synthetic construct
  source 1..9: note = Seed: LVVVGARGV (KRAS G12R)
FVVLGIRGR

SEQ ID NO: 17961 - protein, 9 aa, synthetic construct
  source 1..9: note = Seed: LVVVGARGV (KRAS G12R)
FVVLGIRGS

SEQ ID NO: 17962 - protein, 9 aa, synthetic construct
  source 1..9: note = Seed: LVVVGARGV (KRAS G12R)
FVVLGIRGT

SEQ ID NO: 17963 - protein, 9 aa, synthetic construct
  source 1..9: note = Seed: LVVVGARGV (KRAS G12R)
FVVLGIRGV

SEQ ID NO: 17964 - protein, 9 aa, synthetic construct
  source 1..9: note = Seed: LVVVGARGV (KRAS G12R)
FVVLGIRGW

SEQ ID NO: 17965 - protein, 9 aa, synthetic construct
  source 1..9: note = Seed: LVVVGARGV (KRAS G12R)
FVVLGIRGY

SEQ ID NO: 17966 - protein, 9 aa, synthetic construct
  source 1..9: note = Seed: LVVVGARGV (KRAS G12R)
FVVLGKRGA

SEQ ID NO: 17967 - protein, 9 aa, synthetic construct
  source 1..9: note = Seed: LVVVGARGV (KRAS G12R)
FVVLGKRGC

SEQ ID NO: 17968 - protein, 9 aa, synthetic construct
  source 1..9: note = Seed: LVVVGARGV (KRAS G12R)
FVVLGKRGD

SEQ ID NO: 17969 - protein, 9 aa, synthetic construct
  source 1..9: note = Seed: LVVVGARGV (KRAS G12R)
FVVLGKRGE

SEQ ID NO: 17970 - protein, 9 aa, synthetic construct
  source 1..9: note = Seed: LVVVGARGV (KRAS G12R)
FVVLGKRGF

SEQ ID NO: 17971 - protein, 9 aa, synthetic construct
  source 1..9: note = Seed: LVVVGARGV (KRAS G12R)
FVVLGKRGG

SEQ ID NO: 17972 - protein, 9 aa, synthetic construct
  source 1..9: note = Seed: LVVVGARGV (KRAS G12R)
FVVLGKRGH

SEQ ID NO: 17973 - protein, 9 aa, synthetic construct
  source 1..9: note = Seed: LVVVGARGV (KRAS G12R)
FVVLGKRGI

SEQ ID NO: 17974 - protein, 9 aa, synthetic construct
  source 1..9: note = Seed: LVVVGARGV (KRAS G12R)
FVVLGKRGK

SEQ ID NO: 17975 - protein, 9 aa, synthetic construct
  source 1..9: note = Seed: LVVVGARGV (KRAS G12R)
FVVLGKRGL

SEQ ID NO: 17976 - protein, 9 aa, synthetic construct
  source 1..9: note = Seed: LVVVGARGV (KRAS G12R)
FVVLGKRGM

SEQ ID NO: 17977 - protein, 9 aa, synthetic construct
  source 1..9: note = Seed: LVVVGARGV (KRAS G12R)
FVVLGKRGN

SEQ ID NO: 17978 - protein, 9 aa, synthetic construct
  source 1..9: note = Seed: LVVVGARGV (KRAS G12R)
FVVLGKRGP

SEQ ID NO: 17979 - protein, 9 aa, synthetic construct
  source 1..9: note = Seed: LVVVGARGV (KRAS G12R)
FVVLGKRGQ

SEQ ID NO: 17980 - protein, 9 aa, synthetic construct
  source 1..9: note = Seed: LVVVGARGV (KRAS G12R)
FVVLGKRGR

SEQ ID NO: 17981 - protein, 9 aa, synthetic construct
  source 1..9: note = Seed: LVVVGARGV (KRAS G12R)
FVVLGKRGS

SEQ ID NO: 17982 - protein, 9 aa, synthetic construct
  source 1..9: note = Seed: LVVVGARGV (KRAS G12R)
FVVLGKRGT

SEQ ID NO: 17983 - protein, 9 aa, synthetic construct
  source 1..9: note = Seed: LVVVGARGV (KRAS G12R)
FVVLGKRGV

SEQ ID NO: 17984 - protein, 9 aa, synthetic construct
  source 1..9: note = Seed: LVVVGARGV (KRAS G12R)
FVVLGKRGW

SEQ ID NO: 17985 - protein, 9 aa, synthetic construct
  source 1..9: note = Seed: LVVVGARGV (KRAS G12R)
FVVLGKRGY

SEQ ID NO: 17986 - protein, 9 aa, synthetic construct
  source 1..9: note = Seed: LVVVGARGV (KRAS G12R)
FVVLGLRGA

SEQ ID NO: 17987 - protein, 9 aa, synthetic construct
  source 1..9: note = Seed: LVVVGARGV (KRAS G12R)
FVVLGLRGC

SEQ ID NO: 17988 - protein, 9 aa, synthetic construct
  source 1..9: note = Seed: LVVVGARGV (KRAS G12R)
FVVLGLRGD

SEQ ID NO: 17989 - protein, 9 aa, synthetic construct
  source 1..9: note = Seed: LVVVGARGV (KRAS G12R)
FVVLGLRGE

SEQ ID NO: 17990 - protein, 9 aa, synthetic construct
  source 1..9: note = Seed: LVVVGARGV (KRAS G12R)
FVVLGLRGF

SEQ ID NO: 17991 - protein, 9 aa, synthetic construct
  source 1..9: note = Seed: LVVVGARGV (KRAS G12R)
FVVLGLRGG

SEQ ID NO: 17992 - protein, 9 aa, synthetic construct
  source 1..9: note = Seed: LVVVGARGV (KRAS G12R)
FVVLGLRGH

SEQ ID NO: 17993 - protein, 9 aa, synthetic construct
  source 1..9: note = Seed: LVVVGARGV (KRAS G12R)
FVVLGLRGI

SEQ ID NO: 17994 - protein, 9 aa, synthetic construct
  source 1..9: note = Seed: LVVVGARGV (KRAS G12R)
FVVLGLRGL

SEQ ID NO: 17995 - protein, 9 aa, synthetic construct
  source 1..9: note = Seed: LVVVGARGV (KRAS G12R)
FVVLGLRGM

SEQ ID NO: 17996 - protein, 9 aa, synthetic construct
  source 1..9: note = Seed: LVVVGARGV (KRAS G12R)
FVVLGLRGN

SEQ ID NO: 17997 - protein, 9 aa, synthetic construct
  source 1..9: note = Seed: LVVVGARGV (KRAS G12R)
FVVLGLRGP

SEQ ID NO: 17998 - protein, 9 aa, synthetic construct
  source 1..9: note = Seed: LVVVGARGV (KRAS G12R)
FVVLGLRGQ

SEQ ID NO: 17999 - protein, 9 aa, synthetic construct
  source 1..9: note = Seed: LVVVGARGV (KRAS G12R)
FVVLGLRGR

SEQ ID NO: 18000 - protein, 9 aa, synthetic construct
  source 1..9: note = Seed: LVVVGARGV (KRAS G12R)
FVVLGLRGS

SEQ ID NO: 18001 - protein, 9 aa, synthetic construct
  source 1..9: note = Seed: LVVVGARGV (KRAS G12R)
FVVLGLRGT

SEQ ID NO: 18002 - protein, 9 aa, synthetic construct
  source 1..9: note = Seed: LVVVGARGV (KRAS G12R)
FVVLGLRGV

SEQ ID NO: 18003 - protein, 9 aa, synthetic construct
  source 1..9: note = Seed: LVVVGARGV (KRAS G12R)
FVVLGLRGY

SEQ ID NO: 18004 - protein, 9 aa, synthetic construct
  source 1..9: note = Seed: LVVVGARGV (KRAS G12R)
FVVLGMRGA

SEQ ID NO: 18005 - protein, 9 aa, synthetic construct
  source 1..9: note = Seed: LVVVGARGV (KRAS G12R)
FVVLGMRGC

SEQ ID NO: 18006 - protein, 9 aa, synthetic construct
  source 1..9: note = Seed: LVVVGARGV (KRAS G12R)
FVVLGMRGD

SEQ ID NO: 18007 - protein, 9 aa, synthetic construct
  source 1..9: note = Seed: LVVVGARGV (KRAS G12R)
FVVLGMRGE

SEQ ID NO: 18008 - protein, 9 aa, synthetic construct
  source 1..9: note = Seed: LVVVGARGV (KRAS G12R)
FVVLGMRGF

SEQ ID NO: 18009 - protein, 9 aa, synthetic construct
  source 1..9: note = Seed: LVVVGARGV (KRAS G12R)
FVVLGMRGG

SEQ ID NO: 18010 - protein, 9 aa, synthetic construct
  source 1..9: note = Seed: LVVVGARGV (KRAS G12R)
FVVLGMRGH

SEQ ID NO: 18011 - protein, 9 aa, synthetic construct
  source 1..9: note = Seed: LVVVGARGV (KRAS G12R)
FVVLGMRGI

SEQ ID NO: 18012 - protein, 9 aa, synthetic construct
  source 1..9: note = Seed: LVVVGARGV (KRAS G12R)
FVVLGMRGK

SEQ ID NO: 18013 - protein, 9 aa, synthetic construct
  source 1..9: note = Seed: LVVVGARGV (KRAS G12R)
FVVLGMRGL

SEQ ID NO: 18014 - protein, 9 aa, synthetic construct
  source 1..9: note = Seed: LVVVGARGV (KRAS G12R)
FVVLGMRGM

SEQ ID NO: 18015 - protein, 9 aa, synthetic construct
  source 1..9: note = Seed: LVVVGARGV (KRAS G12R)
FVVLGMRGN

SEQ ID NO: 18016 - protein, 9 aa, synthetic construct
  source 1..9: note = Seed: LVVVGARGV (KRAS G12R)
FVVLGMRGP

SEQ ID NO: 18017 - protein, 9 aa, synthetic construct
  source 1..9: note = Seed: LVVVGARGV (KRAS G12R)
FVVLGMRGQ

SEQ ID NO: 18018 - protein, 9 aa, synthetic construct
  source 1..9: note = Seed: LVVVGARGV (KRAS G12R)
FVVLGMRGR

SEQ ID NO: 18019 - protein, 9 aa, synthetic construct
  source 1..9: note = Seed: LVVVGARGV (KRAS G12R)
FVVLGMRGS

SEQ ID NO: 18020 - protein, 9 aa, synthetic construct
  source 1..9: note = Seed: LVVVGARGV (KRAS G12R)
FVVLGMRGT

SEQ ID NO: 18021 - protein, 9 aa, synthetic construct
  source 1..9: note = Seed: LVVVGARGV (KRAS G12R)
FVVLGMRGV

SEQ ID NO: 18022 - protein, 9 aa, synthetic construct
  source 1..9: note = Seed: LVVVGARGV (KRAS G12R)
FVVLGMRGW

SEQ ID NO: 18023 - protein, 9 aa, synthetic construct
  source 1..9: note = Seed: LVVVGARGV (KRAS G12R)
FVVLGMRGY

SEQ ID NO: 18024 - protein, 9 aa, synthetic construct
  source 1..9: note = Seed: LVVVGARGV (KRAS G12R)
FVVLGNRGA

SEQ ID NO: 18025 - protein, 9 aa, synthetic construct
  source 1..9: note = Seed: LVVVGARGV (KRAS G12R)
FVVLGNRGC

SEQ ID NO: 18026 - protein, 9 aa, synthetic construct
  source 1..9: note = Seed: LVVVGARGV (KRAS G12R)
FVVLGNRGD

SEQ ID NO: 18027 - protein, 9 aa, synthetic construct
  source 1..9: note = Seed: LVVVGARGV (KRAS G12R)
FVVLGNRGE

SEQ ID NO: 18028 - protein, 9 aa, synthetic construct
  source 1..9: note = Seed: LVVVGARGV (KRAS G12R)
FVVLGNRGF

SEQ ID NO: 18029 - protein, 9 aa, synthetic construct
  source 1..9: note = Seed: LVVVGARGV (KRAS G12R)
FVVLGNRGG

SEQ ID NO: 18030 - protein, 9 aa, synthetic construct
  source 1..9: note = Seed: LVVVGARGV (KRAS G12R)
FVVLGNRGH

SEQ ID NO: 18031 - protein, 9 aa, synthetic construct
  source 1..9: note = Seed: LVVVGARGV (KRAS G12R)
FVVLGNRGK

SEQ ID NO: 18032 - protein, 9 aa, synthetic construct
  source 1..9: note = Seed: LVVVGARGV (KRAS G12R)
FVVLGNRGM

SEQ ID NO: 18033 - protein, 9 aa, synthetic construct
  source 1..9: note = Seed: LVVVGARGV (KRAS G12R)
FVVLGNRGN

SEQ ID NO: 18034 - protein, 9 aa, synthetic construct
  source 1..9: note = Seed: LVVVGARGV (KRAS G12R)
FVVLGNRGP

SEQ ID NO: 18035 - protein, 9 aa, synthetic construct
  source 1..9: note = Seed: LVVVGARGV (KRAS G12R)
FVVLGNRGQ

SEQ ID NO: 18036 - protein, 9 aa, synthetic construct
  source 1..9: note = Seed: LVVVGARGV (KRAS G12R)
FVVLGNRGR

SEQ ID NO: 18037 - protein, 9 aa, synthetic construct
  source 1..9: note = Seed: LVVVGARGV (KRAS G12R)
FVVLGNRGS

SEQ ID NO: 18038 - protein, 9 aa, synthetic construct
  source 1..9: note = Seed: LVVVGARGV (KRAS G12R)
FVVLGNRGT

SEQ ID NO: 18039 - protein, 9 aa, synthetic construct
  source 1..9: note = Seed: LVVVGARGV (KRAS G12R)
FVVLGNRGW

SEQ ID NO: 18040 - protein, 9 aa, synthetic construct
  source 1..9: note = Seed: LVVVGARGV (KRAS G12R)
FVVLGNRGY

SEQ ID NO: 18041 - protein, 9 aa, synthetic construct
  source 1..9: note = Seed: LVVVGARGV (KRAS G12R)
FVVLGPRGC

SEQ ID NO: 18042 - protein, 9 aa, synthetic construct
  source 1..9: note = Seed: LVVVGARGV (KRAS G12R)
FVVLGPRGD

SEQ ID NO: 18043 - protein, 9 aa, synthetic construct
  source 1..9: note = Seed: LVVVGARGV (KRAS G12R)
FVVLGPRGE

SEQ ID NO: 18044 - protein, 9 aa, synthetic construct
  source 1..9: note = Seed: LVVVGARGV (KRAS G12R)
FVVLGPRGF

SEQ ID NO: 18045 - protein, 9 aa, synthetic construct
  source 1..9: note = Seed: LVVVGARGV (KRAS G12R)
FVVLGPRGG

SEQ ID NO: 18046 - protein, 9 aa, synthetic construct
  source 1..9: note = Seed: LVVVGARGV (KRAS G12R)
FVVLGPRGH

SEQ ID NO: 18047 - protein, 9 aa, synthetic construct
  source 1..9: note = Seed: LVVVGARGV (KRAS G12R)
FVVLGPRGK

SEQ ID NO: 18048 - protein, 9 aa, synthetic construct
  source 1..9: note = Seed: LVVVGARGV (KRAS G12R)
FVVLGPRGM

SEQ ID NO: 18049 - protein, 9 aa, synthetic construct
  source 1..9: note = Seed: LVVVGARGV (KRAS G12R)
FVVLGPRGN

SEQ ID NO: 18050 - protein, 9 aa, synthetic construct
  source 1..9: note = Seed: LVVVGARGV (KRAS G12R)
FVVLGPRGP

SEQ ID NO: 18051 - protein, 9 aa, synthetic construct
  source 1..9: note = Seed: LVVVGARGV (KRAS G12R)
FVVLGPRGQ

SEQ ID NO: 18052 - protein, 9 aa, synthetic construct
  source 1..9: note = Seed: LVVVGARGV (KRAS G12R)
FVVLGPRGR

SEQ ID NO: 18053 - protein, 9 aa, synthetic construct
  source 1..9: note = Seed: LVVVGARGV (KRAS G12R)
FVVLGPRGS

SEQ ID NO: 18054 - protein, 9 aa, synthetic construct
  source 1..9: note = Seed: LVVVGARGV (KRAS G12R)
FVVLGPRGT

SEQ ID NO: 18055 - protein, 9 aa, synthetic construct
  source 1..9: note = Seed: LVVVGARGV (KRAS G12R)
FVVLGPRGW

SEQ ID NO: 18056 - protein, 9 aa, synthetic construct
  source 1..9: note = Seed: LVVVGARGV (KRAS G12R)
FVVLGPRGY

SEQ ID NO: 18057 - protein, 9 aa, synthetic construct
  source 1..9: note = Seed: LVVVGARGV (KRAS G12R)
FVVLGQRGA

SEQ ID NO: 18058 - protein, 9 aa, synthetic construct
  source 1..9: note = Seed: LVVVGARGV (KRAS G12R)
FVVLGQRGF

SEQ ID NO: 18059 - protein, 9 aa, synthetic construct
  source 1..9: note = Seed: LVVVGARGV (KRAS G12R)
FVVLGQRGG

SEQ ID NO: 18060 - protein, 9 aa, synthetic construct
  source 1..9: note = Seed: LVVVGARGV (KRAS G12R)
FVVLGQRGH

SEQ ID NO: 18061 - protein, 9 aa, synthetic construct
  source 1..9: note = Seed: LVVVGARGV (KRAS G12R)
FVVLGQRGI

SEQ ID NO: 18062 - protein, 9 aa, synthetic construct
  source 1..9: note = Seed: LVVVGARGV (KRAS G12R)
FVVLGQRGK

SEQ ID NO: 18063 - protein, 9 aa, synthetic construct
  source 1..9: note = Seed: LVVVGARGV (KRAS G12R)
FVVLGQRGL

SEQ ID NO: 18064 - protein, 9 aa, synthetic construct
  source 1..9: note = Seed: LVVVGARGV (KRAS G12R)
FVVLGQRGM

SEQ ID NO: 18065 - protein, 9 aa, synthetic construct
  source 1..9: note = Seed: LVVVGARGV (KRAS G12R)
FVVLGQRGN

SEQ ID NO: 18066 - protein, 9 aa, synthetic construct
  source 1..9: note = Seed: LVVVGARGV (KRAS G12R)
FVVLGQRGQ

SEQ ID NO: 18067 - protein, 9 aa, synthetic construct
  source 1..9: note = Seed: LVVVGARGV (KRAS G12R)
FVVLGQRGR

SEQ ID NO: 18068 - protein, 9 aa, synthetic construct
  source 1..9: note = Seed: LVVVGARGV (KRAS G12R)
FVVLGQRGS

SEQ ID NO: 18069 - protein, 9 aa, synthetic construct
  source 1..9: note = Seed: LVVVGARGV (KRAS G12R)
FVVLGQRGT

SEQ ID NO: 18070 - protein, 9 aa, synthetic construct
  source 1..9: note = Seed: LVVVGARGV (KRAS G12R)
FVVLGQRGV

SEQ ID NO: 18071 - protein, 9 aa, synthetic construct
  source 1..9: note = Seed: LVVVGARGV (KRAS G12R)
FVVLGQRGY

SEQ ID NO: 18072 - protein, 9 aa, synthetic construct
  source 1..9: note = Seed: LVVVGARGV (KRAS G12R)
FVVLGRRGA

SEQ ID NO: 18073 - protein, 9 aa, synthetic construct
  source 1..9: note = Seed: LVVVGARGV (KRAS G12R)
FVVLGRRGC

SEQ ID NO: 18074 - protein, 9 aa, synthetic construct
  source 1..9: note = Seed: LVVVGARGV (KRAS G12R)
FVVLGRRGD

SEQ ID NO: 18075 - protein, 9 aa, synthetic construct
  source 1..9: note = Seed: LVVVGARGV (KRAS G12R)
FVVLGRRGE

SEQ ID NO: 18076 - protein, 9 aa, synthetic construct
  source 1..9: note = Seed: LVVVGARGV (KRAS G12R)
FVVLGRRGF

SEQ ID NO: 18077 - protein, 9 aa, synthetic construct
  source 1..9: note = Seed: LVVVGARGV (KRAS G12R)
FVVLGRRGG

SEQ ID NO: 18078 - protein, 9 aa, synthetic construct
  source 1..9: note = Seed: LVVVGARGV (KRAS G12R)
FVVLGRRGH

SEQ ID NO: 18079 - protein, 9 aa, synthetic construct
  source 1..9: note = Seed: LVVVGARGV (KRAS G12R)
FVVLGRRGI

SEQ ID NO: 18080 - protein, 9 aa, synthetic construct
  source 1..9: note = Seed: LVVVGARGV (KRAS G12R)
FVVLGRRGK

SEQ ID NO: 18081 - protein, 9 aa, synthetic construct
  source 1..9: note = Seed: LVVVGARGV (KRAS G12R)
FVVLGRRGL

SEQ ID NO: 18082 - protein, 9 aa, synthetic construct
  source 1..9: note = Seed: LVVVGARGV (KRAS G12R)
FVVLGRRGM

SEQ ID NO: 18083 - protein, 9 aa, synthetic construct
  source 1..9: note = Seed: LVVVGARGV (KRAS G12R)
FVVLGRRGN

SEQ ID NO: 18084 - protein, 9 aa, synthetic construct
  source 1..9: note = Seed: LVVVGARGV (KRAS G12R)
FVVLGRRGP

SEQ ID NO: 18085 - protein, 9 aa, synthetic construct
  source 1..9: note = Seed: LVVVGARGV (KRAS G12R)
FVVLGRRGQ

SEQ ID NO: 18086 - protein, 9 aa, synthetic construct
  source 1..9: note = Seed: LVVVGARGV (KRAS G12R)
FVVLGRRGR

SEQ ID NO: 18087 - protein, 9 aa, synthetic construct
  source 1..9: note = Seed: LVVVGARGV (KRAS G12R)
FVVLGRRGS

SEQ ID NO: 18088 - protein, 9 aa, synthetic construct
  source 1..9: note = Seed: LVVVGARGV (KRAS G12R)
FVVLGRRGT

SEQ ID NO: 18089 - protein, 9 aa, synthetic construct
  source 1..9: note = Seed: LVVVGARGV (KRAS G12R)
FVVLGRRGV

SEQ ID NO: 18090 - protein, 9 aa, synthetic construct
  source 1..9: note = Seed: LVVVGARGV (KRAS G12R)
FVVLGRRGW

SEQ ID NO: 18091 - protein, 9 aa, synthetic construct
  source 1..9: note = Seed: LVVVGARGV (KRAS G12R)
FVVLGRRGY

SEQ ID NO: 18092 - protein, 9 aa, synthetic construct
  source 1..9: note = Seed: LVVVGARGV (KRAS G12R)
FVVLGSRGC

SEQ ID NO: 18093 - protein, 9 aa, synthetic construct
  source 1..9: note = Seed: LVVVGARGV (KRAS G12R)
FVVLGSRGD

SEQ ID NO: 18094 - protein, 9 aa, synthetic construct
  source 1..9: note = Seed: LVVVGARGV (KRAS G12R)
FVVLGSRGE

SEQ ID NO: 18095 - protein, 9 aa, synthetic construct
  source 1..9: note = Seed: LVVVGARGV (KRAS G12R)
FVVLGSRGF

SEQ ID NO: 18096 - protein, 9 aa, synthetic construct
  source 1..9: note = Seed: LVVVGARGV (KRAS G12R)
FVVLGSRGG

SEQ ID NO: 18097 - protein, 9 aa, synthetic construct
  source 1..9: note = Seed: LVVVGARGV (KRAS G12R)
FVVLGSRGH

SEQ ID NO: 18098 - protein, 9 aa, synthetic construct
  source 1..9: note = Seed: LVVVGARGV (KRAS G12R)
FVVLGSRGK

SEQ ID NO: 18099 - protein, 9 aa, synthetic construct
  source 1..9: note = Seed: LVVVGARGV (KRAS G12R)
FVVLGSRGN

SEQ ID NO: 18100 - protein, 9 aa, synthetic construct
  source 1..9: note = Seed: LVVVGARGV (KRAS G12R)
FVVLGSRGP

SEQ ID NO: 18101 - protein, 9 aa, synthetic construct
  source 1..9: note = Seed: LVVVGARGV (KRAS G12R)
FVVLGSRGQ

SEQ ID NO: 18102 - protein, 9 aa, synthetic construct
  source 1..9: note = Seed: LVVVGARGV (KRAS G12R)
FVVLGSRGR

SEQ ID NO: 18103 - protein, 9 aa, synthetic construct
  source 1..9: note = Seed: LVVVGARGV (KRAS G12R)
FVVLGSRGW

SEQ ID NO: 18104 - protein, 9 aa, synthetic construct
  source 1..9: note = Seed: LVVVGARGV (KRAS G12R)
FVVLGSRGY

SEQ ID NO: 18105 - protein, 9 aa, synthetic construct
  source 1..9: note = Seed: LVVVGARGV (KRAS G12R)
FVVLGTRGA

SEQ ID NO: 18106 - protein, 9 aa, synthetic construct
  source 1..9: note = Seed: LVVVGARGV (KRAS G12R)
FVVLGTRGC

SEQ ID NO: 18107 - protein, 9 aa, synthetic construct
  source 1..9: note = Seed: LVVVGARGV (KRAS G12R)
FVVLGTRGD

SEQ ID NO: 18108 - protein, 9 aa, synthetic construct
  source 1..9: note = Seed: LVVVGARGV (KRAS G12R)
FVVLGTRGE

SEQ ID NO: 18109 - protein, 9 aa, synthetic construct
  source 1..9: note = Seed: LVVVGARGV (KRAS G12R)
FVVLGTRGF

SEQ ID NO: 18110 - protein, 9 aa, synthetic construct
  source 1..9: note = Seed: LVVVGARGV (KRAS G12R)
FVVLGTRGG

SEQ ID NO: 18111 - protein, 9 aa, synthetic construct
  source 1..9: note = Seed: LVVVGARGV (KRAS G12R)
FVVLGTRGH

SEQ ID NO: 18112 - protein, 9 aa, synthetic construct
  source 1..9: note = Seed: LVVVGARGV (KRAS G12R)
FVVLGTRGK

SEQ ID NO: 18113 - protein, 9 aa, synthetic construct
  source 1..9: note = Seed: LVVVGARGV (KRAS G12R)
FVVLGTRGM

SEQ ID NO: 18114 - protein, 9 aa, synthetic construct
  source 1..9: note = Seed: LVVVGARGV (KRAS G12R)
FVVLGTRGN

SEQ ID NO: 18115 - protein, 9 aa, synthetic construct
  source 1..9: note = Seed: LVVVGARGV (KRAS G12R)
FVVLGTRGP

SEQ ID NO: 18116 - protein, 9 aa, synthetic construct
  source 1..9: note = Seed: LVVVGARGV (KRAS G12R)
FVVLGTRGQ

SEQ ID NO: 18117 - protein, 9 aa, synthetic construct
  source 1..9: note = Seed: LVVVGARGV (KRAS G12R)
FVVLGTRGR

SEQ ID NO: 18118 - protein, 9 aa, synthetic construct
  source 1..9: note = Seed: LVVVGARGV (KRAS G12R)
FVVLGTRGS

SEQ ID NO: 18119 - protein, 9 aa, synthetic construct
  source 1..9: note = Seed: LVVVGARGV (KRAS G12R)
FVVLGTRGT

SEQ ID NO: 18120 - protein, 9 aa, synthetic construct
  source 1..9: note = Seed: LVVVGARGV (KRAS G12R)
FVVLGTRGW

SEQ ID NO: 18121 - protein, 9 aa, synthetic construct
  source 1..9: note = Seed: LVVVGARGV (KRAS G12R)
FVVLGTRGY

SEQ ID NO: 18122 - protein, 9 aa, synthetic construct
  source 1..9: note = Seed: LVVVGARGV (KRAS G12R)
FVVLGVRGA

SEQ ID NO: 18123 - protein, 9 aa, synthetic construct
  source 1..9: note = Seed: LVVVGARGV (KRAS G12R)
FVVLGVRGC

SEQ ID NO: 18124 - protein, 9 aa, synthetic construct
  source 1..9: note = Seed: LVVVGARGV (KRAS G12R)
FVVLGVRGD

SEQ ID NO: 18125 - protein, 9 aa, synthetic construct
  source 1..9: note = Seed: LVVVGARGV (KRAS G12R)
FVVLGVRGE

SEQ ID NO: 18126 - protein, 9 aa, synthetic construct
  source 1..9: note = Seed: LVVVGARGV (KRAS G12R)
FVVLGVRGF

SEQ ID NO: 18127 - protein, 9 aa, synthetic construct
  source 1..9: note = Seed: LVVVGARGV (KRAS G12R)
FVVLGVRGG

SEQ ID NO: 18128 - protein, 9 aa, synthetic construct
  source 1..9: note = Seed: LVVVGARGV (KRAS G12R)
FVVLGVRGH

SEQ ID NO: 18129 - protein, 9 aa, synthetic construct
  source 1..9: note = Seed: LVVVGARGV (KRAS G12R)
FVVLGVRGI

SEQ ID NO: 18130 - protein, 9 aa, synthetic construct
  source 1..9: note = Seed: LVVVGARGV (KRAS G12R)
FVVLGVRGK

SEQ ID NO: 18131 - protein, 9 aa, synthetic construct
  source 1..9: note = Seed: LVVVGARGV (KRAS G12R)
FVVLGVRGL

SEQ ID NO: 18132 - protein, 9 aa, synthetic construct
  source 1..9: note = Seed: LVVVGARGV (KRAS G12R)
FVVLGVRGM

SEQ ID NO: 18133 - protein, 9 aa, synthetic construct
  source 1..9: note = Seed: LVVVGARGV (KRAS G12R)
FVVLGVRGN

SEQ ID NO: 18134 - protein, 9 aa, synthetic construct
  source 1..9: note = Seed: LVVVGARGV (KRAS G12R)
FVVLGVRGP

SEQ ID NO: 18135 - protein, 9 aa, synthetic construct
  source 1..9: note = Seed: LVVVGARGV (KRAS G12R)
FVVLGVRGQ

SEQ ID NO: 18136 - protein, 9 aa, synthetic construct
  source 1..9: note = Seed: LVVVGARGV (KRAS G12R)
FVVLGVRGR

SEQ ID NO: 18137 - protein, 9 aa, synthetic construct
  source 1..9: note = Seed: LVVVGARGV (KRAS G12R)
FVVLGVRGS

SEQ ID NO: 18138 - protein, 9 aa, synthetic construct
  source 1..9: note = Seed: LVVVGARGV (KRAS G12R)
FVVLGVRGT

SEQ ID NO: 18139 - protein, 9 aa, synthetic construct
  source 1..9: note = Seed: LVVVGARGV (KRAS G12R)
FVVLGVRGV

SEQ ID NO: 18140 - protein, 9 aa, synthetic construct
  source 1..9: note = Seed: LVVVGARGV (KRAS G12R)
FVVLGVRGW

SEQ ID NO: 18141 - protein, 9 aa, synthetic construct
  source 1..9: note = Seed: LVVVGARGV (KRAS G12R)
FVVLGVRGY

SEQ ID NO: 18142 - protein, 9 aa, synthetic construct
  source 1..9: note = Seed: LVVVGARGV (KRAS G12R)
FVVLGWRGA

SEQ ID NO: 18143 - protein, 9 aa, synthetic construct
  source 1..9: note = Seed: LVVVGARGV (KRAS G12R)
FVVLGWRGF

SEQ ID NO: 18144 - protein, 9 aa, synthetic construct
  source 1..9: note = Seed: LVVVGARGV (KRAS G12R)
FVVLGWRGI

SEQ ID NO: 18145 - protein, 9 aa, synthetic construct
  source 1..9: note = Seed: LVVVGARGV (KRAS G12R)
FVVLGWRGL

SEQ ID NO: 18146 - protein, 9 aa, synthetic construct
  source 1..9: note = Seed: LVVVGARGV (KRAS G12R)
FVVLGWRGM

SEQ ID NO: 18147 - protein, 9 aa, synthetic construct
  source 1..9: note = Seed: LVVVGARGV (KRAS G12R)
FVVLGWRGR

SEQ ID NO: 18148 - protein, 9 aa, synthetic construct
  source 1..9: note = Seed: LVVVGARGV (KRAS G12R)
FVVLGWRGS

SEQ ID NO: 18149 - protein, 9 aa, synthetic construct
  source 1..9: note = Seed: LVVVGARGV (KRAS G12R)
FVVLGWRGT

SEQ ID NO: 18150 - protein, 9 aa, synthetic construct
  source 1..9: note = Seed: LVVVGARGV (KRAS G12R)
FVVLGWRGV

SEQ ID NO: 18151 - protein, 9 aa, synthetic construct
  source 1..9: note = Seed: LVVVGARGV (KRAS G12R)
FVVLGYRGA

SEQ ID NO: 18152 - protein, 9 aa, synthetic construct
  source 1..9: note = Seed: LVVVGARGV (KRAS G12R)
FVVLGYRGI

SEQ ID NO: 18153 - protein, 9 aa, synthetic construct
  source 1..9: note = Seed: LVVVGARGV (KRAS G12R)
FVVLGYRGL

SEQ ID NO: 18154 - protein, 9 aa, synthetic construct
  source 1..9: note = Seed: LVVVGARGV (KRAS G12R)
FVVLGYRGM

SEQ ID NO: 18155 - protein, 9 aa, synthetic construct
  source 1..9: note = Seed: LVVVGARGV (KRAS G12R)
FVVLGYRGR

SEQ ID NO: 18156 - protein, 9 aa, synthetic construct
  source 1..9: note = Seed: LVVVGARGV (KRAS G12R)
FVVLGYRGS

SEQ ID NO: 18157 - protein, 9 aa, synthetic construct
  source 1..9: note = Seed: LVVVGARGV (KRAS G12R)
FVVLGYRGT

SEQ ID NO: 18158 - protein, 9 aa, synthetic construct
  source 1..9: note = Seed: LVVVGARGV (KRAS G12R)
FVVLGYRGV

SEQ ID NO: 18159 - protein, 9 aa, synthetic construct
  source 1..9: note = Seed: LVVVGARGV (KRAS G12R)
FVVMGARGC

SEQ ID NO: 18160 - protein, 9 aa, synthetic construct
  source 1..9: note = Seed: LVVVGARGV (KRAS G12R)
FVVMGARGD

SEQ ID NO: 18161 - protein, 9 aa, synthetic construct
  source 1..9: note = Seed: LVVVGARGV (KRAS G12R)
FVVMGARGE

SEQ ID NO: 18162 - protein, 9 aa, synthetic construct
  source 1..9: note = Seed: LVVVGARGV (KRAS G12R)
FVVMGARGF

SEQ ID NO: 18163 - protein, 9 aa, synthetic construct
  source 1..9: note = Seed: LVVVGARGV (KRAS G12R)
FVVMGARGG

SEQ ID NO: 18164 - protein, 9 aa, synthetic construct
  source 1..9: note = Seed: LVVVGARGV (KRAS G12R)
FVVMGARGH

SEQ ID NO: 18165 - protein, 9 aa, synthetic construct
  source 1..9: note = Seed: LVVVGARGV (KRAS G12R)
FVVMGARGK

SEQ ID NO: 18166 - protein, 9 aa, synthetic construct
  source 1..9: note = Seed: LVVVGARGV (KRAS G12R)
FVVMGARGN

SEQ ID NO: 18167 - protein, 9 aa, synthetic construct
  source 1..9: note = Seed: LVVVGARGV (KRAS G12R)
FVVMGARGP

SEQ ID NO: 18168 - protein, 9 aa, synthetic construct
  source 1..9: note = Seed: LVVVGARGV (KRAS G12R)
FVVMGARGQ

SEQ ID NO: 18169 - protein, 9 aa, synthetic construct
  source 1..9: note = Seed: LVVVGARGV (KRAS G12R)
FVVMGARGR

SEQ ID NO: 18170 - protein, 9 aa, synthetic construct
  source 1..9: note = Seed: LVVVGARGV (KRAS G12R)
FVVMGARGW

SEQ ID NO: 18171 - protein, 9 aa, synthetic construct
  source 1..9: note = Seed: LVVVGARGV (KRAS G12R)
FVVMGARGY

SEQ ID NO: 18172 - protein, 9 aa, synthetic construct
  source 1..9: note = Seed: LVVVGARGV (KRAS G12R)
FVVMGCRGA

SEQ ID NO: 18173 - protein, 9 aa, synthetic construct
  source 1..9: note = Seed: LVVVGARGV (KRAS G12R)
FVVMGCRGF

SEQ ID NO: 18174 - protein, 9 aa, synthetic construct
  source 1..9: note = Seed: LVVVGARGV (KRAS G12R)
FVVMGCRGG

SEQ ID NO: 18175 - protein, 9 aa, synthetic construct
  source 1..9: note = Seed: LVVVGARGV (KRAS G12R)
FVVMGCRGI

SEQ ID NO: 18176 - protein, 9 aa, synthetic construct
  source 1..9: note = Seed: LVVVGARGV (KRAS G12R)
FVVMGCRGL

SEQ ID NO: 18177 - protein, 9 aa, synthetic construct
  source 1..9: note = Seed: LVVVGARGV (KRAS G12R)
FVVMGCRGM

SEQ ID NO: 18178 - protein, 9 aa, synthetic construct
  source 1..9: note = Seed: LVVVGARGV (KRAS G12R)
FVVMGCRGN

SEQ ID NO: 18179 - protein, 9 aa, synthetic construct
  source 1..9: note = Seed: LVVVGARGV (KRAS G12R)
FVVMGCRGR

SEQ ID NO: 18180 - protein, 9 aa, synthetic construct
  source 1..9: note = Seed: LVVVGARGV (KRAS G12R)
FVVMGCRGS

SEQ ID NO: 18181 - protein, 9 aa, synthetic construct
  source 1..9: note = Seed: LVVVGARGV (KRAS G12R)
FVVMGCRGT

SEQ ID NO: 18182 - protein, 9 aa, synthetic construct
  source 1..9: note = Seed: LVVVGARGV (KRAS G12R)
FVVMGCRGV

SEQ ID NO: 18183 - protein, 9 aa, synthetic construct
  source 1..9: note = Seed: LVVVGARGV (KRAS G12R)
FVVMGDRGA

SEQ ID NO: 18184 - protein, 9 aa, synthetic construct
  source 1..9: note = Seed: LVVVGARGV (KRAS G12R)
FVVMGDRGF

SEQ ID NO: 18185 - protein, 9 aa, synthetic construct
  source 1..9: note = Seed: LVVVGARGV (KRAS G12R)
FVVMGDRGI

SEQ ID NO: 18186 - protein, 9 aa, synthetic construct
  source 1..9: note = Seed: LVVVGARGV (KRAS G12R)
FVVMGDRGL

SEQ ID NO: 18187 - protein, 9 aa, synthetic construct
  source 1..9: note = Seed: LVVVGARGV (KRAS G12R)
FVVMGDRGM

SEQ ID NO: 18188 - protein, 9 aa, synthetic construct
  source 1..9: note = Seed: LVVVGARGV (KRAS G12R)
FVVMGDRGN

SEQ ID NO: 18189 - protein, 9 aa, synthetic construct
  source 1..9: note = Seed: LVVVGARGV (KRAS G12R)
FVVMGDRGS

SEQ ID NO: 18190 - protein, 9 aa, synthetic construct
  source 1..9: note = Seed: LVVVGARGV (KRAS G12R)
FVVMGDRGT

SEQ ID NO: 18191 - protein, 9 aa, synthetic construct
  source 1..9: note = Seed: LVVVGARGV (KRAS G12R)
FVVMGDRGV

SEQ ID NO: 18192 - protein, 9 aa, synthetic construct
  source 1..9: note = Seed: LVVVGARGV (KRAS G12R)
FVVMGERGA

SEQ ID NO: 18193 - protein, 9 aa, synthetic construct
  source 1..9: note = Seed: LVVVGARGV (KRAS G12R)
FVVMGERGF

SEQ ID NO: 18194 - protein, 9 aa, synthetic construct
  source 1..9: note = Seed: LVVVGARGV (KRAS G12R)
FVVMGERGI

SEQ ID NO: 18195 - protein, 9 aa, synthetic construct
  source 1..9: note = Seed: LVVVGARGV (KRAS G12R)
FVVMGERGL

SEQ ID NO: 18196 - protein, 9 aa, synthetic construct
  source 1..9: note = Seed: LVVVGARGV (KRAS G12R)
FVVMGERGM

SEQ ID NO: 18197 - protein, 9 aa, synthetic construct
  source 1..9: note = Seed: LVVVGARGV (KRAS G12R)
FVVMGERGN

SEQ ID NO: 18198 - protein, 9 aa, synthetic construct
  source 1..9: note = Seed: LVVVGARGV (KRAS G12R)
FVVMGERGR

SEQ ID NO: 18199 - protein, 9 aa, synthetic construct
  source 1..9: note = Seed: LVVVGARGV (KRAS G12R)
FVVMGERGS

SEQ ID NO: 18200 - protein, 9 aa, synthetic construct
  source 1..9: note = Seed: LVVVGARGV (KRAS G12R)
FVVMGERGT

SEQ ID NO: 18201 - protein, 9 aa, synthetic construct
  source 1..9: note = Seed: LVVVGARGV (KRAS G12R)
FVVMGERGV

SEQ ID NO: 18202 - protein, 9 aa, synthetic construct
  source 1..9: note = Seed: LVVVGARGV (KRAS G12R)
FVVMGFRGA

SEQ ID NO: 18203 - protein, 9 aa, synthetic construct
  source 1..9: note = Seed: LVVVGARGV (KRAS G12R)
FVVMGFRGF

SEQ ID NO: 18204 - protein, 9 aa, synthetic construct
  source 1..9: note = Seed: LVVVGARGV (KRAS G12R)
FVVMGFRGH

SEQ ID NO: 18205 - protein, 9 aa, synthetic construct
  source 1..9: note = Seed: LVVVGARGV (KRAS G12R)
FVVMGFRGI

SEQ ID NO: 18206 - protein, 9 aa, synthetic construct
  source 1..9: note = Seed: LVVVGARGV (KRAS G12R)
FVVMGFRGL

SEQ ID NO: 18207 - protein, 9 aa, synthetic construct
  source 1..9: note = Seed: LVVVGARGV (KRAS G12R)
FVVMGFRGM

SEQ ID NO: 18208 - protein, 9 aa, synthetic construct
  source 1..9: note = Seed: LVVVGARGV (KRAS G12R)
FVVMGFRGN

SEQ ID NO: 18209 - protein, 9 aa, synthetic construct
  source 1..9: note = Seed: LVVVGARGV (KRAS G12R)
FVVMGFRGR

SEQ ID NO: 18210 - protein, 9 aa, synthetic construct
  source 1..9: note = Seed: LVVVGARGV (KRAS G12R)
FVVMGFRGS

SEQ ID NO: 18211 - protein, 9 aa, synthetic construct
  source 1..9: note = Seed: LVVVGARGV (KRAS G12R)
FVVMGFRGT

SEQ ID NO: 18212 - protein, 9 aa, synthetic construct
  source 1..9: note = Seed: LVVVGARGV (KRAS G12R)
FVVMGFRGV

SEQ ID NO: 18213 - protein, 9 aa, synthetic construct
  source 1..9: note = Seed: LVVVGARGV (KRAS G12R)
FVVMGFRGY

SEQ ID NO: 18214 - protein, 9 aa, synthetic construct
  source 1..9: note = Seed: LVVVGARGV (KRAS G12R)
FVVMGGRGC

SEQ ID NO: 18215 - protein, 9 aa, synthetic construct
  source 1..9: note = Seed: LVVVGARGV (KRAS G12R)
FVVMGGRGD

SEQ ID NO: 18216 - protein, 9 aa, synthetic construct
  source 1..9: note = Seed: LVVVGARGV (KRAS G12R)
FVVMGGRGE

SEQ ID NO: 18217 - protein, 9 aa, synthetic construct
  source 1..9: note = Seed: LVVVGARGV (KRAS G12R)
FVVMGGRGF

SEQ ID NO: 18218 - protein, 9 aa, synthetic construct
  source 1..9: note = Seed: LVVVGARGV (KRAS G12R)
FVVMGGRGG

SEQ ID NO: 18219 - protein, 9 aa, synthetic construct
  source 1..9: note = Seed: LVVVGARGV (KRAS G12R)
FVVMGGRGH

SEQ ID NO: 18220 - protein, 9 aa, synthetic construct
  source 1..9: note = Seed: LVVVGARGV (KRAS G12R)
FVVMGGRGK

SEQ ID NO: 18221 - protein, 9 aa, synthetic construct
  source 1..9: note = Seed: LVVVGARGV (KRAS G12R)
FVVMGGRGN

SEQ ID NO: 18222 - protein, 9 aa, synthetic construct
  source 1..9: note = Seed: LVVVGARGV (KRAS G12R)
FVVMGGRGP

SEQ ID NO: 18223 - protein, 9 aa, synthetic construct
  source 1..9: note = Seed: LVVVGARGV (KRAS G12R)
FVVMGGRGQ

SEQ ID NO: 18224 - protein, 9 aa, synthetic construct
  source 1..9: note = Seed: LVVVGARGV (KRAS G12R)
FVVMGGRGR

SEQ ID NO: 18225 - protein, 9 aa, synthetic construct
  source 1..9: note = Seed: LVVVGARGV (KRAS G12R)
FVVMGGRGS

SEQ ID NO: 18226 - protein, 9 aa, synthetic construct
  source 1..9: note = Seed: LVVVGARGV (KRAS G12R)
FVVMGGRGW

SEQ ID NO: 18227 - protein, 9 aa, synthetic construct
  source 1..9: note = Seed: LVVVGARGV (KRAS G12R)
FVVMGGRGY

SEQ ID NO: 18228 - protein, 9 aa, synthetic construct
  source 1..9: note = Seed: LVVVGARGV (KRAS G12R)
FVVMGHRGA

SEQ ID NO: 18229 - protein, 9 aa, synthetic construct
  source 1..9: note = Seed: LVVVGARGV (KRAS G12R)
FVVMGHRGF

SEQ ID NO: 18230 - protein, 9 aa, synthetic construct
  source 1..9: note = Seed: LVVVGARGV (KRAS G12R)
FVVMGHRGG

SEQ ID NO: 18231 - protein, 9 aa, synthetic construct
  source 1..9: note = Seed: LVVVGARGV (KRAS G12R)
FVVMGHRGH

SEQ ID NO: 18232 - protein, 9 aa, synthetic construct
  source 1..9: note = Seed: LVVVGARGV (KRAS G12R)
FVVMGHRGI

SEQ ID NO: 18233 - protein, 9 aa, synthetic construct
  source 1..9: note = Seed: LVVVGARGV (KRAS G12R)
FVVMGHRGK

SEQ ID NO: 18234 - protein, 9 aa, synthetic construct
  source 1..9: note = Seed: LVVVGARGV (KRAS G12R)
FVVMGHRGL

SEQ ID NO: 18235 - protein, 9 aa, synthetic construct
  source 1..9: note = Seed: LVVVGARGV (KRAS G12R)
FVVMGHRGM

SEQ ID NO: 18236 - protein, 9 aa, synthetic construct
  source 1..9: note = Seed: LVVVGARGV (KRAS G12R)
FVVMGHRGN

SEQ ID NO: 18237 - protein, 9 aa, synthetic construct
  source 1..9: note = Seed: LVVVGARGV (KRAS G12R)
FVVMGHRGP

SEQ ID NO: 18238 - protein, 9 aa, synthetic construct
  source 1..9: note = Seed: LVVVGARGV (KRAS G12R)
FVVMGHRGQ

SEQ ID NO: 18239 - protein, 9 aa, synthetic construct
  source 1..9: note = Seed: LVVVGARGV (KRAS G12R)
FVVMGHRGR

SEQ ID NO: 18240 - protein, 9 aa, synthetic construct
  source 1..9: note = Seed: LVVVGARGV (KRAS G12R)
FVVMGHRGS

SEQ ID NO: 18241 - protein, 9 aa, synthetic construct
  source 1..9: note = Seed: LVVVGARGV (KRAS G12R)
FVVMGHRGT

SEQ ID NO: 18242 - protein, 9 aa, synthetic construct
  source 1..9: note = Seed: LVVVGARGV (KRAS G12R)
FVVMGHRGV

SEQ ID NO: 18243 - protein, 9 aa, synthetic construct
  source 1..9: note = Seed: LVVVGARGV (KRAS G12R)
FVVMGHRGW

SEQ ID NO: 18244 - protein, 9 aa, synthetic construct
  source 1..9: note = Seed: LVVVGARGV (KRAS G12R)
FVVMGHRGY

SEQ ID NO: 18245 - protein, 9 aa, synthetic construct
  source 1..9: note = Seed: LVVVGARGV (KRAS G12R)
FVVMGIRGA

SEQ ID NO: 18246 - protein, 9 aa, synthetic construct
  source 1..9: note = Seed: LVVVGARGV (KRAS G12R)
FVVMGIRGC

SEQ ID NO: 18247 - protein, 9 aa, synthetic construct
  source 1..9: note = Seed: LVVVGARGV (KRAS G12R)
FVVMGIRGD

SEQ ID NO: 18248 - protein, 9 aa, synthetic construct
  source 1..9: note = Seed: LVVVGARGV (KRAS G12R)
FVVMGIRGE

SEQ ID NO: 18249 - protein, 9 aa, synthetic construct
  source 1..9: note = Seed: LVVVGARGV (KRAS G12R)
FVVMGIRGF

SEQ ID NO: 18250 - protein, 9 aa, synthetic construct
  source 1..9: note = Seed: LVVVGARGV (KRAS G12R)
FVVMGIRGG

SEQ ID NO: 18251 - protein, 9 aa, synthetic construct
  source 1..9: note = Seed: LVVVGARGV (KRAS G12R)
FVVMGIRGH

SEQ ID NO: 18252 - protein, 9 aa, synthetic construct
  source 1..9: note = Seed: LVVVGARGV (KRAS G12R)
FVVMGIRGI

SEQ ID NO: 18253 - protein, 9 aa, synthetic construct
  source 1..9: note = Seed: LVVVGARGV (KRAS G12R)
FVVMGIRGK

SEQ ID NO: 18254 - protein, 9 aa, synthetic construct
  source 1..9: note = Seed: LVVVGARGV (KRAS G12R)
FVVMGIRGL

SEQ ID NO: 18255 - protein, 9 aa, synthetic construct
  source 1..9: note = Seed: LVVVGARGV (KRAS G12R)
FVVMGIRGM

SEQ ID NO: 18256 - protein, 9 aa, synthetic construct
  source 1..9: note = Seed: LVVVGARGV (KRAS G12R)
FVVMGIRGN

SEQ ID NO: 18257 - protein, 9 aa, synthetic construct
  source 1..9: note = Seed: LVVVGARGV (KRAS G12R)
FVVMGIRGP

SEQ ID NO: 18258 - protein, 9 aa, synthetic construct
  source 1..9: note = Seed: LVVVGARGV (KRAS G12R)
FVVMGIRGQ

SEQ ID NO: 18259 - protein, 9 aa, synthetic construct
  source 1..9: note = Seed: LVVVGARGV (KRAS G12R)
FVVMGIRGR

SEQ ID NO: 18260 - protein, 9 aa, synthetic construct
  source 1..9: note = Seed: LVVVGARGV (KRAS G12R)
FVVMGIRGS

SEQ ID NO: 18261 - protein, 9 aa, synthetic construct
  source 1..9: note = Seed: LVVVGARGV (KRAS G12R)
FVVMGIRGT

SEQ ID NO: 18262 - protein, 9 aa, synthetic construct
  source 1..9: note = Seed: LVVVGARGV (KRAS G12R)
FVVMGIRGV

SEQ ID NO: 18263 - protein, 9 aa, synthetic construct
  source 1..9: note = Seed: LVVVGARGV (KRAS G12R)
FVVMGIRGW

SEQ ID NO: 18264 - protein, 9 aa, synthetic construct
  source 1..9: note = Seed: LVVVGARGV (KRAS G12R)
FVVMGIRGY

SEQ ID NO: 18265 - protein, 9 aa, synthetic construct
  source 1..9: note = Seed: LVVVGARGV (KRAS G12R)
FVVMGKRGA

SEQ ID NO: 18266 - protein, 9 aa, synthetic construct
  source 1..9: note = Seed: LVVVGARGV (KRAS G12R)
FVVMGKRGC

SEQ ID NO: 18267 - protein, 9 aa, synthetic construct
  source 1..9: note = Seed: LVVVGARGV (KRAS G12R)
FVVMGKRGD

SEQ ID NO: 18268 - protein, 9 aa, synthetic construct
  source 1..9: note = Seed: LVVVGARGV (KRAS G12R)
FVVMGKRGE

SEQ ID NO: 18269 - protein, 9 aa, synthetic construct
  source 1..9: note = Seed: LVVVGARGV (KRAS G12R)
FVVMGKRGF

SEQ ID NO: 18270 - protein, 9 aa, synthetic construct
  source 1..9: note = Seed: LVVVGARGV (KRAS G12R)
FVVMGKRGG

SEQ ID NO: 18271 - protein, 9 aa, synthetic construct
  source 1..9: note = Seed: LVVVGARGV (KRAS G12R)
FVVMGKRGH

SEQ ID NO: 18272 - protein, 9 aa, synthetic construct
  source 1..9: note = Seed: LVVVGARGV (KRAS G12R)
FVVMGKRGI

SEQ ID NO: 18273 - protein, 9 aa, synthetic construct
  source 1..9: note = Seed: LVVVGARGV (KRAS G12R)
FVVMGKRGK

SEQ ID NO: 18274 - protein, 9 aa, synthetic construct
  source 1..9: note = Seed: LVVVGARGV (KRAS G12R)
FVVMGKRGL

SEQ ID NO: 18275 - protein, 9 aa, synthetic construct
  source 1..9: note = Seed: LVVVGARGV (KRAS G12R)
FVVMGKRGM

SEQ ID NO: 18276 - protein, 9 aa, synthetic construct
  source 1..9: note = Seed: LVVVGARGV (KRAS G12R)
FVVMGKRGN

SEQ ID NO: 18277 - protein, 9 aa, synthetic construct
  source 1..9: note = Seed: LVVVGARGV (KRAS G12R)
FVVMGKRGP

SEQ ID NO: 18278 - protein, 9 aa, synthetic construct
  source 1..9: note = Seed: LVVVGARGV (KRAS G12R)
FVVMGKRGQ

SEQ ID NO: 18279 - protein, 9 aa, synthetic construct
  source 1..9: note = Seed: LVVVGARGV (KRAS G12R)
FVVMGKRGR

SEQ ID NO: 18280 - protein, 9 aa, synthetic construct
  source 1..9: note = Seed: LVVVGARGV (KRAS G12R)
FVVMGKRGS

SEQ ID NO: 18281 - protein, 9 aa, synthetic construct
  source 1..9: note = Seed: LVVVGARGV (KRAS G12R)
FVVMGKRGT

SEQ ID NO: 18282 - protein, 9 aa, synthetic construct
  source 1..9: note = Seed: LVVVGARGV (KRAS G12R)
FVVMGKRGV

SEQ ID NO: 18283 - protein, 9 aa, synthetic construct
  source 1..9: note = Seed: LVVVGARGV (KRAS G12R)
FVVMGKRGW

SEQ ID NO: 18284 - protein, 9 aa, synthetic construct
  source 1..9: note = Seed: LVVVGARGV (KRAS G12R)
FVVMGKRGY

SEQ ID NO: 18285 - protein, 9 aa, synthetic construct
  source 1..9: note = Seed: LVVVGARGV (KRAS G12R)
FVVMGLRGA

SEQ ID NO: 18286 - protein, 9 aa, synthetic construct
  source 1..9: note = Seed: LVVVGARGV (KRAS G12R)
FVVMGLRGC

SEQ ID NO: 18287 - protein, 9 aa, synthetic construct
  source 1..9: note = Seed: LVVVGARGV (KRAS G12R)
FVVMGLRGD

SEQ ID NO: 18288 - protein, 9 aa, synthetic construct
  source 1..9: note = Seed: LVVVGARGV (KRAS G12R)
FVVMGLRGE

SEQ ID NO: 18289 - protein, 9 aa, synthetic construct
  source 1..9: note = Seed: LVVVGARGV (KRAS G12R)
FVVMGLRGF

SEQ ID NO: 18290 - protein, 9 aa, synthetic construct
  source 1..9: note = Seed: LVVVGARGV (KRAS G12R)
FVVMGLRGG

SEQ ID NO: 18291 - protein, 9 aa, synthetic construct
  source 1..9: note = Seed: LVVVGARGV (KRAS G12R)
FVVMGLRGH

SEQ ID NO: 18292 - protein, 9 aa, synthetic construct
  source 1..9: note = Seed: LVVVGARGV (KRAS G12R)
FVVMGLRGI

SEQ ID NO: 18293 - protein, 9 aa, synthetic construct
  source 1..9: note = Seed: LVVVGARGV (KRAS G12R)
FVVMGLRGK

SEQ ID NO: 18294 - protein, 9 aa, synthetic construct
  source 1..9: note = Seed: LVVVGARGV (KRAS G12R)
FVVMGLRGL

SEQ ID NO: 18295 - protein, 9 aa, synthetic construct
  source 1..9: note = Seed: LVVVGARGV (KRAS G12R)
FVVMGLRGM

SEQ ID NO: 18296 - protein, 9 aa, synthetic construct
  source 1..9: note = Seed: LVVVGARGV (KRAS G12R)
FVVMGLRGN

SEQ ID NO: 18297 - protein, 9 aa, synthetic construct
  source 1..9: note = Seed: LVVVGARGV (KRAS G12R)
FVVMGLRGP

SEQ ID NO: 18298 - protein, 9 aa, synthetic construct
  source 1..9: note = Seed: LVVVGARGV (KRAS G12R)
FVVMGLRGQ

SEQ ID NO: 18299 - protein, 9 aa, synthetic construct
  source 1..9: note = Seed: LVVVGARGV (KRAS G12R)
FVVMGLRGR

SEQ ID NO: 18300 - protein, 9 aa, synthetic construct
  source 1..9: note = Seed: LVVVGARGV (KRAS G12R)
FVVMGLRGS

SEQ ID NO: 18301 - protein, 9 aa, synthetic construct
  source 1..9: note = Seed: LVVVGARGV (KRAS G12R)
FVVMGLRGT

SEQ ID NO: 18302 - protein, 9 aa, synthetic construct
  source 1..9: note = Seed: LVVVGARGV (KRAS G12R)
FVVMGLRGV

SEQ ID NO: 18303 - protein, 9 aa, synthetic construct
  source 1..9: note = Seed: LVVVGARGV (KRAS G12R)
FVVMGLRGW

SEQ ID NO: 18304 - protein, 9 aa, synthetic construct
  source 1..9: note = Seed: LVVVGARGV (KRAS G12R)
FVVMGLRGY

SEQ ID NO: 18305 - protein, 9 aa, synthetic construct
  source 1..9: note = Seed: LVVVGARGV (KRAS G12R)
FVVMGMRGA

SEQ ID NO: 18306 - protein, 9 aa, synthetic construct
  source 1..9: note = Seed: LVVVGARGV (KRAS G12R)
FVVMGMRGC

SEQ ID NO: 18307 - protein, 9 aa, synthetic construct
  source 1..9: note = Seed: LVVVGARGV (KRAS G12R)
FVVMGMRGD

SEQ ID NO: 18308 - protein, 9 aa, synthetic construct
  source 1..9: note = Seed: LVVVGARGV (KRAS G12R)
FVVMGMRGE

SEQ ID NO: 18309 - protein, 9 aa, synthetic construct
  source 1..9: note = Seed: LVVVGARGV (KRAS G12R)
FVVMGMRGF

SEQ ID NO: 18310 - protein, 9 aa, synthetic construct
  source 1..9: note = Seed: LVVVGARGV (KRAS G12R)
FVVMGMRGG

SEQ ID NO: 18311 - protein, 9 aa, synthetic construct
  source 1..9: note = Seed: LVVVGARGV (KRAS G12R)
FVVMGMRGH

SEQ ID NO: 18312 - protein, 9 aa, synthetic construct
  source 1..9: note = Seed: LVVVGARGV (KRAS G12R)
FVVMGMRGI

SEQ ID NO: 18313 - protein, 9 aa, synthetic construct
  source 1..9: note = Seed: LVVVGARGV (KRAS G12R)
FVVMGMRGK

SEQ ID NO: 18314 - protein, 9 aa, synthetic construct
  source 1..9: note = Seed: LVVVGARGV (KRAS G12R)
FVVMGMRGL

SEQ ID NO: 18315 - protein, 9 aa, synthetic construct
  source 1..9: note = Seed: LVVVGARGV (KRAS G12R)
FVVMGMRGM

SEQ ID NO: 18316 - protein, 9 aa, synthetic construct
  source 1..9: note = Seed: LVVVGARGV (KRAS G12R)
FVVMGMRGN

SEQ ID NO: 18317 - protein, 9 aa, synthetic construct
  source 1..9: note = Seed: LVVVGARGV (KRAS G12R)
FVVMGMRGP

SEQ ID NO: 18318 - protein, 9 aa, synthetic construct
  source 1..9: note = Seed: LVVVGARGV (KRAS G12R)
FVVMGMRGQ

SEQ ID NO: 18319 - protein, 9 aa, synthetic construct
  source 1..9: note = Seed: LVVVGARGV (KRAS G12R)
FVVMGMRGR

SEQ ID NO: 18320 - protein, 9 aa, synthetic construct
  source 1..9: note = Seed: LVVVGARGV (KRAS G12R)
FVVMGMRGS

SEQ ID NO: 18321 - protein, 9 aa, synthetic construct
  source 1..9: note = Seed: LVVVGARGV (KRAS G12R)
FVVMGMRGT

SEQ ID NO: 18322 - protein, 9 aa, synthetic construct
  source 1..9: note = Seed: LVVVGARGV (KRAS G12R)
FVVMGMRGV

SEQ ID NO: 18323 - protein, 9 aa, synthetic construct
  source 1..9: note = Seed: LVVVGARGV (KRAS G12R)
FVVMGMRGW

SEQ ID NO: 18324 - protein, 9 aa, synthetic construct
  source 1..9: note = Seed: LVVVGARGV (KRAS G12R)
FVVMGMRGY

SEQ ID NO: 18325 - protein, 9 aa, synthetic construct
  source 1..9: note = Seed: LVVVGARGV (KRAS G12R)
FVVMGNRGA

SEQ ID NO: 18326 - protein, 9 aa, synthetic construct
  source 1..9: note = Seed: LVVVGARGV (KRAS G12R)
FVVMGNRGC

SEQ ID NO: 18327 - protein, 9 aa, synthetic construct
  source 1..9: note = Seed: LVVVGARGV (KRAS G12R)
FVVMGNRGD

SEQ ID NO: 18328 - protein, 9 aa, synthetic construct
  source 1..9: note = Seed: LVVVGARGV (KRAS G12R)
FVVMGNRGE

SEQ ID NO: 18329 - protein, 9 aa, synthetic construct
  source 1..9: note = Seed: LVVVGARGV (KRAS G12R)
FVVMGNRGF

SEQ ID NO: 18330 - protein, 9 aa, synthetic construct
  source 1..9: note = Seed: LVVVGARGV (KRAS G12R)
FVVMGNRGG

SEQ ID NO: 18331 - protein, 9 aa, synthetic construct
  source 1..9: note = Seed: LVVVGARGV (KRAS G12R)
FVVMGNRGH

SEQ ID NO: 18332 - protein, 9 aa, synthetic construct
  source 1..9: note = Seed: LVVVGARGV (KRAS G12R)
FVVMGNRGK

SEQ ID NO: 18333 - protein, 9 aa, synthetic construct
  source 1..9: note = Seed: LVVVGARGV (KRAS G12R)
FVVMGNRGM

SEQ ID NO: 18334 - protein, 9 aa, synthetic construct
  source 1..9: note = Seed: LVVVGARGV (KRAS G12R)
FVVMGNRGN

SEQ ID NO: 18335 - protein, 9 aa, synthetic construct
  source 1..9: note = Seed: LVVVGARGV (KRAS G12R)
FVVMGNRGP

SEQ ID NO: 18336 - protein, 9 aa, synthetic construct
  source 1..9: note = Seed: LVVVGARGV (KRAS G12R)
FVVMGNRGQ

SEQ ID NO: 18337 - protein, 9 aa, synthetic construct
  source 1..9: note = Seed: LVVVGARGV (KRAS G12R)
FVVMGNRGR

SEQ ID NO: 18338 - protein, 9 aa, synthetic construct
  source 1..9: note = Seed: LVVVGARGV (KRAS G12R)
FVVMGNRGS

SEQ ID NO: 18339 - protein, 9 aa, synthetic construct
  source 1..9: note = Seed: LVVVGARGV (KRAS G12R)
FVVMGNRGT

SEQ ID NO: 18340 - protein, 9 aa, synthetic construct
  source 1..9: note = Seed: LVVVGARGV (KRAS G12R)
FVVMGNRGW

SEQ ID NO: 18341 - protein, 9 aa, synthetic construct
  source 1..9: note = Seed: LVVVGARGV (KRAS G12R)
FVVMGNRGY

SEQ ID NO: 18342 - protein, 9 aa, synthetic construct
  source 1..9: note = Seed: LVVVGARGV (KRAS G12R)
FVVMGPRGC

SEQ ID NO: 18343 - protein, 9 aa, synthetic construct
  source 1..9: note = Seed: LVVVGARGV (KRAS G12R)
FVVMGPRGD

SEQ ID NO: 18344 - protein, 9 aa, synthetic construct
  source 1..9: note = Seed: LVVVGARGV (KRAS G12R)
FVVMGPRGE

SEQ ID NO: 18345 - protein, 9 aa, synthetic construct
  source 1..9: note = Seed: LVVVGARGV (KRAS G12R)
FVVMGPRGF

SEQ ID NO: 18346 - protein, 9 aa, synthetic construct
  source 1..9: note = Seed: LVVVGARGV (KRAS G12R)
FVVMGPRGG

SEQ ID NO: 18347 - protein, 9 aa, synthetic construct
  source 1..9: note = Seed: LVVVGARGV (KRAS G12R)
FVVMGPRGH

SEQ ID NO: 18348 - protein, 9 aa, synthetic construct
  source 1..9: note = Seed: LVVVGARGV (KRAS G12R)
FVVMGPRGK

SEQ ID NO: 18349 - protein, 9 aa, synthetic construct
  source 1..9: note = Seed: LVVVGARGV (KRAS G12R)
FVVMGPRGM

SEQ ID NO: 18350 - protein, 9 aa, synthetic construct
  source 1..9: note = Seed: LVVVGARGV (KRAS G12R)
FVVMGPRGN

SEQ ID NO: 18351 - protein, 9 aa, synthetic construct
  source 1..9: note = Seed: LVVVGARGV (KRAS G12R)
FVVMGPRGP

SEQ ID NO: 18352 - protein, 9 aa, synthetic construct
  source 1..9: note = Seed: LVVVGARGV (KRAS G12R)
FVVMGPRGQ

SEQ ID NO: 18353 - protein, 9 aa, synthetic construct
  source 1..9: note = Seed: LVVVGARGV (KRAS G12R)
FVVMGPRGR

SEQ ID NO: 18354 - protein, 9 aa, synthetic construct
  source 1..9: note = Seed: LVVVGARGV (KRAS G12R)
FVVMGPRGS

SEQ ID NO: 18355 - protein, 9 aa, synthetic construct
  source 1..9: note = Seed: LVVVGARGV (KRAS G12R)
FVVMGPRGT

SEQ ID NO: 18356 - protein, 9 aa, synthetic construct
  source 1..9: note = Seed: LVVVGARGV (KRAS G12R)
FVVMGPRGW

SEQ ID NO: 18357 - protein, 9 aa, synthetic construct
  source 1..9: note = Seed: LVVVGARGV (KRAS G12R)
FVVMGPRGY

SEQ ID NO: 18358 - protein, 9 aa, synthetic construct
  source 1..9: note = Seed: LVVVGARGV (KRAS G12R)
FVVMGQRGA

SEQ ID NO: 18359 - protein, 9 aa, synthetic construct
  source 1..9: note = Seed: LVVVGARGV (KRAS G12R)
FVVMGQRGF

SEQ ID NO: 18360 - protein, 9 aa, synthetic construct
  source 1..9: note = Seed: LVVVGARGV (KRAS G12R)
FVVMGQRGG

SEQ ID NO: 18361 - protein, 9 aa, synthetic construct
  source 1..9: note = Seed: LVVVGARGV (KRAS G12R)
FVVMGQRGH

SEQ ID NO: 18362 - protein, 9 aa, synthetic construct
  source 1..9: note = Seed: LVVVGARGV (KRAS G12R)
FVVMGQRGI

SEQ ID NO: 18363 - protein, 9 aa, synthetic construct
  source 1..9: note = Seed: LVVVGARGV (KRAS G12R)
FVVMGQRGK

SEQ ID NO: 18364 - protein, 9 aa, synthetic construct
  source 1..9: note = Seed: LVVVGARGV (KRAS G12R)
FVVMGQRGL

SEQ ID NO: 18365 - protein, 9 aa, synthetic construct
  source 1..9: note = Seed: LVVVGARGV (KRAS G12R)
FVVMGQRGM

SEQ ID NO: 18366 - protein, 9 aa, synthetic construct
  source 1..9: note = Seed: LVVVGARGV (KRAS G12R)
FVVMGQRGN

SEQ ID NO: 18367 - protein, 9 aa, synthetic construct
  source 1..9: note = Seed: LVVVGARGV (KRAS G12R)
FVVMGQRGQ

SEQ ID NO: 18368 - protein, 9 aa, synthetic construct
  source 1..9: note = Seed: LVVVGARGV (KRAS G12R)
FVVMGQRGR

SEQ ID NO: 18369 - protein, 9 aa, synthetic construct
  source 1..9: note = Seed: LVVVGARGV (KRAS G12R)
FVVMGQRGS

SEQ ID NO: 18370 - protein, 9 aa, synthetic construct
  source 1..9: note = Seed: LVVVGARGV (KRAS G12R)
FVVMGQRGT

SEQ ID NO: 18371 - protein, 9 aa, synthetic construct
  source 1..9: note = Seed: LVVVGARGV (KRAS G12R)
FVVMGQRGV

SEQ ID NO: 18372 - protein, 9 aa, synthetic construct
  source 1..9: note = Seed: LVVVGARGV (KRAS G12R)
FVVMGQRGW

SEQ ID NO: 18373 - protein, 9 aa, synthetic construct
  source 1..9: note = Seed: LVVVGARGV (KRAS G12R)
FVVMGQRGY

SEQ ID NO: 18374 - protein, 9 aa, synthetic construct
  source 1..9: note = Seed: LVVVGARGV (KRAS G12R)
FVVMGRRGA

SEQ ID NO: 18375 - protein, 9 aa, synthetic construct
  source 1..9: note = Seed: LVVVGARGV (KRAS G12R)
FVVMGRRGC

SEQ ID NO: 18376 - protein, 9 aa, synthetic construct
  source 1..9: note = Seed: LVVVGARGV (KRAS G12R)
FVVMGRRGD

SEQ ID NO: 18377 - protein, 9 aa, synthetic construct
  source 1..9: note = Seed: LVVVGARGV (KRAS G12R)
FVVMGRRGE

SEQ ID NO: 18378 - protein, 9 aa, synthetic construct
  source 1..9: note = Seed: LVVVGARGV (KRAS G12R)
FVVMGRRGF

SEQ ID NO: 18379 - protein, 9 aa, synthetic construct
  source 1..9: note = Seed: LVVVGARGV (KRAS G12R)
FVVMGRRGG

SEQ ID NO: 18380 - protein, 9 aa, synthetic construct
  source 1..9: note = Seed: LVVVGARGV (KRAS G12R)
FVVMGRRGH

SEQ ID NO: 18381 - protein, 9 aa, synthetic construct
  source 1..9: note = Seed: LVVVGARGV (KRAS G12R)
FVVMGRRGI

SEQ ID NO: 18382 - protein, 9 aa, synthetic construct
  source 1..9: note = Seed: LVVVGARGV (KRAS G12R)
FVVMGRRGK

SEQ ID NO: 18383 - protein, 9 aa, synthetic construct
  source 1..9: note = Seed: LVVVGARGV (KRAS G12R)
FVVMGRRGL

SEQ ID NO: 18384 - protein, 9 aa, synthetic construct
  source 1..9: note = Seed: LVVVGARGV (KRAS G12R)
FVVMGRRGM

SEQ ID NO: 18385 - protein, 9 aa, synthetic construct
  source 1..9: note = Seed: LVVVGARGV (KRAS G12R)
FVVMGRRGN

SEQ ID NO: 18386 - protein, 9 aa, synthetic construct
  source 1..9: note = Seed: LVVVGARGV (KRAS G12R)
FVVMGRRGP

SEQ ID NO: 18387 - protein, 9 aa, synthetic construct
  source 1..9: note = Seed: LVVVGARGV (KRAS G12R)
FVVMGRRGQ

SEQ ID NO: 18388 - protein, 9 aa, synthetic construct
  source 1..9: note = Seed: LVVVGARGV (KRAS G12R)
FVVMGRRGR

SEQ ID NO: 18389 - protein, 9 aa, synthetic construct
  source 1..9: note = Seed: LVVVGARGV (KRAS G12R)
FVVMGRRGS

SEQ ID NO: 18390 - protein, 9 aa, synthetic construct
  source 1..9: note = Seed: LVVVGARGV (KRAS G12R)
FVVMGRRGT

SEQ ID NO: 18391 - protein, 9 aa, synthetic construct
  source 1..9: note = Seed: LVVVGARGV (KRAS G12R)
FVVMGRRGV

SEQ ID NO: 18392 - protein, 9 aa, synthetic construct
  source 1..9: note = Seed: LVVVGARGV (KRAS G12R)
FVVMGRRGW

SEQ ID NO: 18393 - protein, 9 aa, synthetic construct
  source 1..9: note = Seed: LVVVGARGV (KRAS G12R)
FVVMGRRGY

SEQ ID NO: 18394 - protein, 9 aa, synthetic construct
  source 1..9: note = Seed: LVVVGARGV (KRAS G12R)
FVVMGSRGA

SEQ ID NO: 18395 - protein, 9 aa, synthetic construct
  source 1..9: note = Seed: LVVVGARGV (KRAS G12R)
FVVMGSRGC

SEQ ID NO: 18396 - protein, 9 aa, synthetic construct
  source 1..9: note = Seed: LVVVGARGV (KRAS G12R)
FVVMGSRGD

SEQ ID NO: 18397 - protein, 9 aa, synthetic construct
  source 1..9: note = Seed: LVVVGARGV (KRAS G12R)
FVVMGSRGE

SEQ ID NO: 18398 - protein, 9 aa, synthetic construct
  source 1..9: note = Seed: LVVVGARGV (KRAS G12R)
FVVMGSRGF

SEQ ID NO: 18399 - protein, 9 aa, synthetic construct
  source 1..9: note = Seed: LVVVGARGV (KRAS G12R)
FVVMGSRGG

SEQ ID NO: 18400 - protein, 9 aa, synthetic construct
  source 1..9: note = Seed: LVVVGARGV (KRAS G12R)
FVVMGSRGH

SEQ ID NO: 18401 - protein, 9 aa, synthetic construct
  source 1..9: note = Seed: LVVVGARGV (KRAS G12R)
FVVMGSRGK

SEQ ID NO: 18402 - protein, 9 aa, synthetic construct
  source 1..9: note = Seed: LVVVGARGV (KRAS G12R)
FVVMGSRGN

SEQ ID NO: 18403 - protein, 9 aa, synthetic construct
  source 1..9: note = Seed: LVVVGARGV (KRAS G12R)
FVVMGSRGP

SEQ ID NO: 18404 - protein, 9 aa, synthetic construct
  source 1..9: note = Seed: LVVVGARGV (KRAS G12R)
FVVMGSRGQ

SEQ ID NO: 18405 - protein, 9 aa, synthetic construct
  source 1..9: note = Seed: LVVVGARGV (KRAS G12R)
FVVMGSRGR

SEQ ID NO: 18406 - protein, 9 aa, synthetic construct
  source 1..9: note = Seed: LVVVGARGV (KRAS G12R)
FVVMGSRGS

SEQ ID NO: 18407 - protein, 9 aa, synthetic construct
  source 1..9: note = Seed: LVVVGARGV (KRAS G12R)
FVVMGSRGW

SEQ ID NO: 18408 - protein, 9 aa, synthetic construct
  source 1..9: note = Seed: LVVVGARGV (KRAS G12R)
FVVMGSRGY

SEQ ID NO: 18409 - protein, 9 aa, synthetic construct
  source 1..9: note = Seed: LVVVGARGV (KRAS G12R)
FVVMGTRGA

SEQ ID NO: 18410 - protein, 9 aa, synthetic construct
  source 1..9: note = Seed: LVVVGARGV (KRAS G12R)
FVVMGTRGC

SEQ ID NO: 18411 - protein, 9 aa, synthetic construct
  source 1..9: note = Seed: LVVVGARGV (KRAS G12R)
FVVMGTRGD

SEQ ID NO: 18412 - protein, 9 aa, synthetic construct
  source 1..9: note = Seed: LVVVGARGV (KRAS G12R)
FVVMGTRGE

SEQ ID NO: 18413 - protein, 9 aa, synthetic construct
  source 1..9: note = Seed: LVVVGARGV (KRAS G12R)
FVVMGTRGF

SEQ ID NO: 18414 - protein, 9 aa, synthetic construct
  source 1..9: note = Seed: LVVVGARGV (KRAS G12R)
FVVMGTRGG

SEQ ID NO: 18415 - protein, 9 aa, synthetic construct
  source 1..9: note = Seed: LVVVGARGV (KRAS G12R)
FVVMGTRGH

SEQ ID NO: 18416 - protein, 9 aa, synthetic construct
  source 1..9: note = Seed: LVVVGARGV (KRAS G12R)
FVVMGTRGK

SEQ ID NO: 18417 - protein, 9 aa, synthetic construct
  source 1..9: note = Seed: LVVVGARGV (KRAS G12R)
FVVMGTRGM

SEQ ID NO: 18418 - protein, 9 aa, synthetic construct
  source 1..9: note = Seed: LVVVGARGV (KRAS G12R)
FVVMGTRGN

SEQ ID NO: 18419 - protein, 9 aa, synthetic construct
  source 1..9: note = Seed: LVVVGARGV (KRAS G12R)
FVVMGTRGP

SEQ ID NO: 18420 - protein, 9 aa, synthetic construct
  source 1..9: note = Seed: LVVVGARGV (KRAS G12R)
FVVMGTRGQ

SEQ ID NO: 18421 - protein, 9 aa, synthetic construct
  source 1..9: note = Seed: LVVVGARGV (KRAS G12R)
FVVMGTRGR

SEQ ID NO: 18422 - protein, 9 aa, synthetic construct
  source 1..9: note = Seed: LVVVGARGV (KRAS G12R)
FVVMGTRGS

SEQ ID NO: 18423 - protein, 9 aa, synthetic construct
  source 1..9: note = Seed: LVVVGARGV (KRAS G12R)
FVVMGTRGT

SEQ ID NO: 18424 - protein, 9 aa, synthetic construct
  source 1..9: note = Seed: LVVVGARGV (KRAS G12R)
FVVMGTRGW

SEQ ID NO: 18425 - protein, 9 aa, synthetic construct
  source 1..9: note = Seed: LVVVGARGV (KRAS G12R)
FVVMGTRGY

SEQ ID NO: 18426 - protein, 9 aa, synthetic construct
  source 1..9: note = Seed: LVVVGARGV (KRAS G12R)
FVVMGVRGA

SEQ ID NO: 18427 - protein, 9 aa, synthetic construct
  source 1..9: note = Seed: LVVVGARGV (KRAS G12R)
FVVMGVRGC

SEQ ID NO: 18428 - protein, 9 aa, synthetic construct
  source 1..9: note = Seed: LVVVGARGV (KRAS G12R)
FVVMGVRGD

SEQ ID NO: 18429 - protein, 9 aa, synthetic construct
  source 1..9: note = Seed: LVVVGARGV (KRAS G12R)
FVVMGVRGE

SEQ ID NO: 18430 - protein, 9 aa, synthetic construct
  source 1..9: note = Seed: LVVVGARGV (KRAS G12R)
FVVMGVRGF

SEQ ID NO: 18431 - protein, 9 aa, synthetic construct
  source 1..9: note = Seed: LVVVGARGV (KRAS G12R)
FVVMGVRGG

SEQ ID NO: 18432 - protein, 9 aa, synthetic construct
  source 1..9: note = Seed: LVVVGARGV (KRAS G12R)
FVVMGVRGH

SEQ ID NO: 18433 - protein, 9 aa, synthetic construct
  source 1..9: note = Seed: LVVVGARGV (KRAS G12R)
FVVMGVRGI

SEQ ID NO: 18434 - protein, 9 aa, synthetic construct
  source 1..9: note = Seed: LVVVGARGV (KRAS G12R)
FVVMGVRGK

SEQ ID NO: 18435 - protein, 9 aa, synthetic construct
  source 1..9: note = Seed: LVVVGARGV (KRAS G12R)
FVVMGVRGL

SEQ ID NO: 18436 - protein, 9 aa, synthetic construct
  source 1..9: note = Seed: LVVVGARGV (KRAS G12R)
FVVMGVRGM

SEQ ID NO: 18437 - protein, 9 aa, synthetic construct
  source 1..9: note = Seed: LVVVGARGV (KRAS G12R)
FVVMGVRGN

SEQ ID NO: 18438 - protein, 9 aa, synthetic construct
  source 1..9: note = Seed: LVVVGARGV (KRAS G12R)
FVVMGVRGP

SEQ ID NO: 18439 - protein, 9 aa, synthetic construct
  source 1..9: note = Seed: LVVVGARGV (KRAS G12R)
FVVMGVRGQ

SEQ ID NO: 18440 - protein, 9 aa, synthetic construct
  source 1..9: note = Seed: LVVVGARGV (KRAS G12R)
FVVMGVRGR

SEQ ID NO: 18441 - protein, 9 aa, synthetic construct
  source 1..9: note = Seed: LVVVGARGV (KRAS G12R)
FVVMGVRGS

SEQ ID NO: 18442 - protein, 9 aa, synthetic construct
  source 1..9: note = Seed: LVVVGARGV (KRAS G12R)
FVVMGVRGT

SEQ ID NO: 18443 - protein, 9 aa, synthetic construct
  source 1..9: note = Seed: LVVVGARGV (KRAS G12R)
FVVMGVRGV

SEQ ID NO: 18444 - protein, 9 aa, synthetic construct
  source 1..9: note = Seed: LVVVGARGV (KRAS G12R)
FVVMGVRGW

SEQ ID NO: 18445 - protein, 9 aa, synthetic construct
  source 1..9: note = Seed: LVVVGARGV (KRAS G12R)
FVVMGVRGY

SEQ ID NO: 18446 - protein, 9 aa, synthetic construct
  source 1..9: note = Seed: LVVVGARGV (KRAS G12R)
FVVMGWRGA

SEQ ID NO: 18447 - protein, 9 aa, synthetic construct
  source 1..9: note = Seed: LVVVGARGV (KRAS G12R)
FVVMGWRGF

SEQ ID NO: 18448 - protein, 9 aa, synthetic construct
  source 1..9: note = Seed: LVVVGARGV (KRAS G12R)
FVVMGWRGI

SEQ ID NO: 18449 - protein, 9 aa, synthetic construct
  source 1..9: note = Seed: LVVVGARGV (KRAS G12R)
FVVMGWRGL

SEQ ID NO: 18450 - protein, 9 aa, synthetic construct
  source 1..9: note = Seed: LVVVGARGV (KRAS G12R)
FVVMGWRGM

SEQ ID NO: 18451 - protein, 9 aa, synthetic construct
  source 1..9: note = Seed: LVVVGARGV (KRAS G12R)
FVVMGWRGN

SEQ ID NO: 18452 - protein, 9 aa, synthetic construct
  source 1..9: note = Seed: LVVVGARGV (KRAS G12R)
FVVMGWRGR

SEQ ID NO: 18453 - protein, 9 aa, synthetic construct
  source 1..9: note = Seed: LVVVGARGV (KRAS G12R)
FVVMGWRGS

SEQ ID NO: 18454 - protein, 9 aa, synthetic construct
  source 1..9: note = Seed: LVVVGARGV (KRAS G12R)
FVVMGWRGT

SEQ ID NO: 18455 - protein, 9 aa, synthetic construct
  source 1..9: note = Seed: LVVVGARGV (KRAS G12R)
FVVMGWRGV

SEQ ID NO: 18456 - protein, 9 aa, synthetic construct
  source 1..9: note = Seed: LVVVGARGV (KRAS G12R)
FVVMGWRGY

SEQ ID NO: 18457 - protein, 9 aa, synthetic construct
  source 1..9: note = Seed: LVVVGARGV (KRAS G12R)
FVVMGYRGA

SEQ ID NO: 18458 - protein, 9 aa, synthetic construct
  source 1..9: note = Seed: LVVVGARGV (KRAS G12R)
FVVMGYRGF

SEQ ID NO: 18459 - protein, 9 aa, synthetic construct
  source 1..9: note = Seed: LVVVGARGV (KRAS G12R)
FVVMGYRGI

SEQ ID NO: 18460 - protein, 9 aa, synthetic construct
  source 1..9: note = Seed: LVVVGARGV (KRAS G12R)
FVVMGYRGL

SEQ ID NO: 18461 - protein, 9 aa, synthetic construct
  source 1..9: note = Seed: LVVVGARGV (KRAS G12R)
FVVMGYRGM

SEQ ID NO: 18462 - protein, 9 aa, synthetic construct
  source 1..9: note = Seed: LVVVGARGV (KRAS G12R)
FVVMGYRGN

SEQ ID NO: 18463 - protein, 9 aa, synthetic construct
  source 1..9: note = Seed: LVVVGARGV (KRAS G12R)
FVVMGYRGQ

SEQ ID NO: 18464 - protein, 9 aa, synthetic construct
  source 1..9: note = Seed: LVVVGARGV (KRAS G12R)
FVVMGYRGR

SEQ ID NO: 18465 - protein, 9 aa, synthetic construct
  source 1..9: note = Seed: LVVVGARGV (KRAS G12R)
FVVMGYRGS

SEQ ID NO: 18466 - protein, 9 aa, synthetic construct
  source 1..9: note = Seed: LVVVGARGV (KRAS G12R)
FVVMGYRGT

SEQ ID NO: 18467 - protein, 9 aa, synthetic construct
  source 1..9: note = Seed: LVVVGARGV (KRAS G12R)
FVVMGYRGV

SEQ ID NO: 18468 - protein, 9 aa, synthetic construct
  source 1..9: note = Seed: LVVVGARGV (KRAS G12R)
FVVNGARGA

SEQ ID NO: 18469 - protein, 9 aa, synthetic construct
  source 1..9: note = Seed: LVVVGARGV (KRAS G12R)
FVVNGARGC

SEQ ID NO: 18470 - protein, 9 aa, synthetic construct
  source 1..9: note = Seed: LVVVGARGV (KRAS G12R)
FVVNGARGF

SEQ ID NO: 18471 - protein, 9 aa, synthetic construct
  source 1..9: note = Seed: LVVVGARGV (KRAS G12R)
FVVNGARGG

SEQ ID NO: 18472 - protein, 9 aa, synthetic construct
  source 1..9: note = Seed: LVVVGARGV (KRAS G12R)
FVVNGARGH

SEQ ID NO: 18473 - protein, 9 aa, synthetic construct
  source 1..9: note = Seed: LVVVGARGV (KRAS G12R)
FVVNGARGI

SEQ ID NO: 18474 - protein, 9 aa, synthetic construct
  source 1..9: note = Seed: LVVVGARGV (KRAS G12R)
FVVNGARGL

SEQ ID NO: 18475 - protein, 9 aa, synthetic construct
  source 1..9: note = Seed: LVVVGARGV (KRAS G12R)
FVVNGARGM

SEQ ID NO: 18476 - protein, 9 aa, synthetic construct
  source 1..9: note = Seed: LVVVGARGV (KRAS G12R)
FVVNGARGN

SEQ ID NO: 18477 - protein, 9 aa, synthetic construct
  source 1..9: note = Seed: LVVVGARGV (KRAS G12R)
FVVNGARGQ

SEQ ID NO: 18478 - protein, 9 aa, synthetic construct
  source 1..9: note = Seed: LVVVGARGV (KRAS G12R)
FVVNGARGS

SEQ ID NO: 18479 - protein, 9 aa, synthetic construct
  source 1..9: note = Seed: LVVVGARGV (KRAS G12R)
FVVNGARGT

SEQ ID NO: 18480 - protein, 9 aa, synthetic construct
  source 1..9: note = Seed: LVVVGARGV (KRAS G12R)
FVVNGARGV

SEQ ID NO: 18481 - protein, 9 aa, synthetic construct
  source 1..9: note = Seed: LVVVGARGV (KRAS G12R)
FVVNGARGW

SEQ ID NO: 18482 - protein, 9 aa, synthetic construct
  source 1..9: note = Seed: LVVVGARGV (KRAS G12R)
FVVNGARGY

SEQ ID NO: 18483 - protein, 9 aa, synthetic construct
  source 1..9: note = Seed: LVVVGARGV (KRAS G12R)
FVVNGCRGF

SEQ ID NO: 18484 - protein, 9 aa, synthetic construct
  source 1..9: note = Seed: LVVVGARGV (KRAS G12R)
FVVNGCRGI

SEQ ID NO: 18485 - protein, 9 aa, synthetic construct
  source 1..9: note = Seed: LVVVGARGV (KRAS G12R)
FVVNGCRGL

SEQ ID NO: 18486 - protein, 9 aa, synthetic construct
  source 1..9: note = Seed: LVVVGARGV (KRAS G12R)
FVVNGCRGM

SEQ ID NO: 18487 - protein, 9 aa, synthetic construct
  source 1..9: note = Seed: LVVVGARGV (KRAS G12R)
FVVNGCRGV

SEQ ID NO: 18488 - protein, 9 aa, synthetic construct
  source 1..9: note = Seed: LVVVGARGV (KRAS G12R)
FVVNGDRGF

SEQ ID NO: 18489 - protein, 9 aa, synthetic construct
  source 1..9: note = Seed: LVVVGARGV (KRAS G12R)
FVVNGDRGI

SEQ ID NO: 18490 - protein, 9 aa, synthetic construct
  source 1..9: note = Seed: LVVVGARGV (KRAS G12R)
FVVNGDRGL

SEQ ID NO: 18491 - protein, 9 aa, synthetic construct
  source 1..9: note = Seed: LVVVGARGV (KRAS G12R)
FVVNGDRGV

SEQ ID NO: 18492 - protein, 9 aa, synthetic construct
  source 1..9: note = Seed: LVVVGARGV (KRAS G12R)
FVVNGERGI

SEQ ID NO: 18493 - protein, 9 aa, synthetic construct
  source 1..9: note = Seed: LVVVGARGV (KRAS G12R)
FVVNGERGV

SEQ ID NO: 18494 - protein, 9 aa, synthetic construct
  source 1..9: note = Seed: LVVVGARGV (KRAS G12R)
FVVNGFRGA

SEQ ID NO: 18495 - protein, 9 aa, synthetic construct
  source 1..9: note = Seed: LVVVGARGV (KRAS G12R)
FVVNGFRGF

SEQ ID NO: 18496 - protein, 9 aa, synthetic construct
  source 1..9: note = Seed: LVVVGARGV (KRAS G12R)
FVVNGFRGI

SEQ ID NO: 18497 - protein, 9 aa, synthetic construct
  source 1..9: note = Seed: LVVVGARGV (KRAS G12R)
FVVNGFRGL

SEQ ID NO: 18498 - protein, 9 aa, synthetic construct
  source 1..9: note = Seed: LVVVGARGV (KRAS G12R)
FVVNGFRGM

SEQ ID NO: 18499 - protein, 9 aa, synthetic construct
  source 1..9: note = Seed: LVVVGARGV (KRAS G12R)
FVVNGFRGT

SEQ ID NO: 18500 - protein, 9 aa, synthetic construct
  source 1..9: note = Seed: LVVVGARGV (KRAS G12R)
FVVNGFRGV

SEQ ID NO: 18501 - protein, 9 aa, synthetic construct
  source 1..9: note = Seed: LVVVGARGV (KRAS G12R)
FVVNGGRGA

SEQ ID NO: 18502 - protein, 9 aa, synthetic construct
  source 1..9: note = Seed: LVVVGARGV (KRAS G12R)
FVVNGGRGF

SEQ ID NO: 18503 - protein, 9 aa, synthetic construct
  source 1..9: note = Seed: LVVVGARGV (KRAS G12R)
FVVNGGRGI

SEQ ID NO: 18504 - protein, 9 aa, synthetic construct
  source 1..9: note = Seed: LVVVGARGV (KRAS G12R)
FVVNGGRGL

SEQ ID NO: 18505 - protein, 9 aa, synthetic construct
  source 1..9: note = Seed: LVVVGARGV (KRAS G12R)
FVVNGGRGM

SEQ ID NO: 18506 - protein, 9 aa, synthetic construct
  source 1..9: note = Seed: LVVVGARGV (KRAS G12R)
FVVNGGRGS

SEQ ID NO: 18507 - protein, 9 aa, synthetic construct
  source 1..9: note = Seed: LVVVGARGV (KRAS G12R)
FVVNGGRGT

SEQ ID NO: 18508 - protein, 9 aa, synthetic construct
  source 1..9: note = Seed: LVVVGARGV (KRAS G12R)
FVVNGGRGV

SEQ ID NO: 18509 - protein, 9 aa, synthetic construct
  source 1..9: note = Seed: LVVVGARGV (KRAS G12R)
FVVNGGRGW

SEQ ID NO: 18510 - protein, 9 aa, synthetic construct
  source 1..9: note = Seed: LVVVGARGV (KRAS G12R)
FVVNGGRGY

SEQ ID NO: 18511 - protein, 9 aa, synthetic construct
  source 1..9: note = Seed: LVVVGARGV (KRAS G12R)
FVVNGHRGF

SEQ ID NO: 18512 - protein, 9 aa, synthetic construct
  source 1..9: note = Seed: LVVVGARGV (KRAS G12R)
FVVNGHRGI

SEQ ID NO: 18513 - protein, 9 aa, synthetic construct
  source 1..9: note = Seed: LVVVGARGV (KRAS G12R)
FVVNGHRGL

SEQ ID NO: 18514 - protein, 9 aa, synthetic construct
  source 1..9: note = Seed: LVVVGARGV (KRAS G12R)
FVVNGHRGM

SEQ ID NO: 18515 - protein, 9 aa, synthetic construct
  source 1..9: note = Seed: LVVVGARGV (KRAS G12R)
FVVNGHRGR

SEQ ID NO: 18516 - protein, 9 aa, synthetic construct
  source 1..9: note = Seed: LVVVGARGV (KRAS G12R)
FVVNGHRGV

SEQ ID NO: 18517 - protein, 9 aa, synthetic construct
  source 1..9: note = Seed: LVVVGARGV (KRAS G12R)
FVVNGHRGY

SEQ ID NO: 18518 - protein, 9 aa, synthetic construct
  source 1..9: note = Seed: LVVVGARGV (KRAS G12R)
FVVNGIRGA

SEQ ID NO: 18519 - protein, 9 aa, synthetic construct
  source 1..9: note = Seed: LVVVGARGV (KRAS G12R)
FVVNGIRGF

SEQ ID NO: 18520 - protein, 9 aa, synthetic construct
  source 1..9: note = Seed: LVVVGARGV (KRAS G12R)
FVVNGIRGI

SEQ ID NO: 18521 - protein, 9 aa, synthetic construct
  source 1..9: note = Seed: LVVVGARGV (KRAS G12R)
FVVNGIRGL

SEQ ID NO: 18522 - protein, 9 aa, synthetic construct
  source 1..9: note = Seed: LVVVGARGV (KRAS G12R)
FVVNGIRGM

SEQ ID NO: 18523 - protein, 9 aa, synthetic construct
  source 1..9: note = Seed: LVVVGARGV (KRAS G12R)
FVVNGIRGN

SEQ ID NO: 18524 - protein, 9 aa, synthetic construct
  source 1..9: note = Seed: LVVVGARGV (KRAS G12R)
FVVNGIRGR

SEQ ID NO: 18525 - protein, 9 aa, synthetic construct
  source 1..9: note = Seed: LVVVGARGV (KRAS G12R)
FVVNGIRGS

SEQ ID NO: 18526 - protein, 9 aa, synthetic construct
  source 1..9: note = Seed: LVVVGARGV (KRAS G12R)
FVVNGIRGT

SEQ ID NO: 18527 - protein, 9 aa, synthetic construct
  source 1..9: note = Seed: LVVVGARGV (KRAS G12R)
FVVNGIRGV

SEQ ID NO: 18528 - protein, 9 aa, synthetic construct
  source 1..9: note = Seed: LVVVGARGV (KRAS G12R)
FVVNGIRGW

SEQ ID NO: 18529 - protein, 9 aa, synthetic construct
  source 1..9: note = Seed: LVVVGARGV (KRAS G12R)
FVVNGIRGY

SEQ ID NO: 18530 - protein, 9 aa, synthetic construct
  source 1..9: note = Seed: LVVVGARGV (KRAS G12R)
FVVNGKRGA

SEQ ID NO: 18531 - protein, 9 aa, synthetic construct
  source 1..9: note = Seed: LVVVGARGV (KRAS G12R)
FVVNGKRGI

SEQ ID NO: 18532 - protein, 9 aa, synthetic construct
  source 1..9: note = Seed: LVVVGARGV (KRAS G12R)
FVVNGKRGL

SEQ ID NO: 18533 - protein, 9 aa, synthetic construct
  source 1..9: note = Seed: LVVVGARGV (KRAS G12R)
FVVNGKRGM

SEQ ID NO: 18534 - protein, 9 aa, synthetic construct
  source 1..9: note = Seed: LVVVGARGV (KRAS G12R)
FVVNGKRGR

SEQ ID NO: 18535 - protein, 9 aa, synthetic construct
  source 1..9: note = Seed: LVVVGARGV (KRAS G12R)
FVVNGKRGV

SEQ ID NO: 18536 - protein, 9 aa, synthetic construct
  source 1..9: note = Seed: LVVVGARGV (KRAS G12R)
FVVNGKRGY

SEQ ID NO: 18537 - protein, 9 aa, synthetic construct
  source 1..9: note = Seed: LVVVGARGV (KRAS G12R)
FVVNGLRGA

SEQ ID NO: 18538 - protein, 9 aa, synthetic construct
  source 1..9: note = Seed: LVVVGARGV (KRAS G12R)
FVVNGLRGF

SEQ ID NO: 18539 - protein, 9 aa, synthetic construct
  source 1..9: note = Seed: LVVVGARGV (KRAS G12R)
FVVNGLRGI

SEQ ID NO: 18540 - protein, 9 aa, synthetic construct
  source 1..9: note = Seed: LVVVGARGV (KRAS G12R)
FVVNGLRGL

SEQ ID NO: 18541 - protein, 9 aa, synthetic construct
  source 1..9: note = Seed: LVVVGARGV (KRAS G12R)
FVVNGLRGM

SEQ ID NO: 18542 - protein, 9 aa, synthetic construct
  source 1..9: note = Seed: LVVVGARGV (KRAS G12R)
FVVNGLRGR

SEQ ID NO: 18543 - protein, 9 aa, synthetic construct
  source 1..9: note = Seed: LVVVGARGV (KRAS G12R)
FVVNGLRGV

SEQ ID NO: 18544 - protein, 9 aa, synthetic construct
  source 1..9: note = Seed: LVVVGARGV (KRAS G12R)
FVVNGLRGY

SEQ ID NO: 18545 - protein, 9 aa, synthetic construct
  source 1..9: note = Seed: LVVVGARGV (KRAS G12R)
FVVNGMRGA

SEQ ID NO: 18546 - protein, 9 aa, synthetic construct
  source 1..9: note = Seed: LVVVGARGV (KRAS G12R)
FVVNGMRGF

SEQ ID NO: 18547 - protein, 9 aa, synthetic construct
  source 1..9: note = Seed: LVVVGARGV (KRAS G12R)
FVVNGMRGI

SEQ ID NO: 18548 - protein, 9 aa, synthetic construct
  source 1..9: note = Seed: LVVVGARGV (KRAS G12R)
FVVNGMRGL

SEQ ID NO: 18549 - protein, 9 aa, synthetic construct
  source 1..9: note = Seed: LVVVGARGV (KRAS G12R)
FVVNGMRGM

SEQ ID NO: 18550 - protein, 9 aa, synthetic construct
  source 1..9: note = Seed: LVVVGARGV (KRAS G12R)
FVVNGMRGR

SEQ ID NO: 18551 - protein, 9 aa, synthetic construct
  source 1..9: note = Seed: LVVVGARGV (KRAS G12R)
FVVNGMRGV

SEQ ID NO: 18552 - protein, 9 aa, synthetic construct
  source 1..9: note = Seed: LVVVGARGV (KRAS G12R)
FVVNGMRGW

SEQ ID NO: 18553 - protein, 9 aa, synthetic construct
  source 1..9: note = Seed: LVVVGARGV (KRAS G12R)
FVVNGMRGY

SEQ ID NO: 18554 - protein, 9 aa, synthetic construct
  source 1..9: note = Seed: LVVVGARGV (KRAS G12R)
FVVNGNRGA

SEQ ID NO: 18555 - protein, 9 aa, synthetic construct
  source 1..9: note = Seed: LVVVGARGV (KRAS G12R)
FVVNGNRGF

SEQ ID NO: 18556 - protein, 9 aa, synthetic construct
  source 1..9: note = Seed: LVVVGARGV (KRAS G12R)
FVVNGNRGI

SEQ ID NO: 18557 - protein, 9 aa, synthetic construct
  source 1..9: note = Seed: LVVVGARGV (KRAS G12R)
FVVNGNRGL

SEQ ID NO: 18558 - protein, 9 aa, synthetic construct
  source 1..9: note = Seed: LVVVGARGV (KRAS G12R)
FVVNGNRGM

SEQ ID NO: 18559 - protein, 9 aa, synthetic construct
  source 1..9: note = Seed: LVVVGARGV (KRAS G12R)
FVVNGNRGN

SEQ ID NO: 18560 - protein, 9 aa, synthetic construct
  source 1..9: note = Seed: LVVVGARGV (KRAS G12R)
FVVNGNRGQ

SEQ ID NO: 18561 - protein, 9 aa, synthetic construct
  source 1..9: note = Seed: LVVVGARGV (KRAS G12R)
FVVNGNRGS

SEQ ID NO: 18562 - protein, 9 aa, synthetic construct
  source 1..9: note = Seed: LVVVGARGV (KRAS G12R)
FVVNGNRGT

SEQ ID NO: 18563 - protein, 9 aa, synthetic construct
  source 1..9: note = Seed: LVVVGARGV (KRAS G12R)
FVVNGNRGV

SEQ ID NO: 18564 - protein, 9 aa, synthetic construct
  source 1..9: note = Seed: LVVVGARGV (KRAS G12R)
FVVNGNRGW

SEQ ID NO: 18565 - protein, 9 aa, synthetic construct
  source 1..9: note = Seed: LVVVGARGV (KRAS G12R)
FVVNGNRGY

SEQ ID NO: 18566 - protein, 9 aa, synthetic construct
  source 1..9: note = Seed: LVVVGARGV (KRAS G12R)
FVVNGPRGA

SEQ ID NO: 18567 - protein, 9 aa, synthetic construct
  source 1..9: note = Seed: LVVVGARGV (KRAS G12R)
FVVNGPRGF

SEQ ID NO: 18568 - protein, 9 aa, synthetic construct
  source 1..9: note = Seed: LVVVGARGV (KRAS G12R)
FVVNGPRGI

SEQ ID NO: 18569 - protein, 9 aa, synthetic construct
  source 1..9: note = Seed: LVVVGARGV (KRAS G12R)
FVVNGPRGL

SEQ ID NO: 18570 - protein, 9 aa, synthetic construct
  source 1..9: note = Seed: LVVVGARGV (KRAS G12R)
FVVNGPRGM

SEQ ID NO: 18571 - protein, 9 aa, synthetic construct
  source 1..9: note = Seed: LVVVGARGV (KRAS G12R)
FVVNGPRGS

SEQ ID NO: 18572 - protein, 9 aa, synthetic construct
  source 1..9: note = Seed: LVVVGARGV (KRAS G12R)
FVVNGPRGT

SEQ ID NO: 18573 - protein, 9 aa, synthetic construct
  source 1..9: note = Seed: LVVVGARGV (KRAS G12R)
FVVNGPRGV

SEQ ID NO: 18574 - protein, 9 aa, synthetic construct
  source 1..9: note = Seed: LVVVGARGV (KRAS G12R)
FVVNGPRGW

SEQ ID NO: 18575 - protein, 9 aa, synthetic construct
  source 1..9: note = Seed: LVVVGARGV (KRAS G12R)
FVVNGPRGY

SEQ ID NO: 18576 - protein, 9 aa, synthetic construct
  source 1..9: note = Seed: LVVVGARGV (KRAS G12R)
FVVNGQRGF

SEQ ID NO: 18577 - protein, 9 aa, synthetic construct
  source 1..9: note = Seed: LVVVGARGV (KRAS G12R)
FVVNGQRGI

SEQ ID NO: 18578 - protein, 9 aa, synthetic construct
  source 1..9: note = Seed: LVVVGARGV (KRAS G12R)
FVVNGQRGL

SEQ ID NO: 18579 - protein, 9 aa, synthetic construct
  source 1..9: note = Seed: LVVVGARGV (KRAS G12R)
FVVNGQRGV

SEQ ID NO: 18580 - protein, 9 aa, synthetic construct
  source 1..9: note = Seed: LVVVGARGV (KRAS G12R)
FVVNGRRGA

SEQ ID NO: 18581 - protein, 9 aa, synthetic construct
  source 1..9: note = Seed: LVVVGARGV (KRAS G12R)
FVVNGRRGF

SEQ ID NO: 18582 - protein, 9 aa, synthetic construct
  source 1..9: note = Seed: LVVVGARGV (KRAS G12R)
FVVNGRRGH

SEQ ID NO: 18583 - protein, 9 aa, synthetic construct
  source 1..9: note = Seed: LVVVGARGV (KRAS G12R)
FVVNGRRGI

SEQ ID NO: 18584 - protein, 9 aa, synthetic construct
  source 1..9: note = Seed: LVVVGARGV (KRAS G12R)
FVVNGRRGK

SEQ ID NO: 18585 - protein, 9 aa, synthetic construct
  source 1..9: note = Seed: LVVVGARGV (KRAS G12R)
FVVNGRRGL

SEQ ID NO: 18586 - protein, 9 aa, synthetic construct
  source 1..9: note = Seed: LVVVGARGV (KRAS G12R)
FVVNGRRGM

SEQ ID NO: 18587 - protein, 9 aa, synthetic construct
  source 1..9: note = Seed: LVVVGARGV (KRAS G12R)
FVVNGRRGQ

SEQ ID NO: 18588 - protein, 9 aa, synthetic construct
  source 1..9: note = Seed: LVVVGARGV (KRAS G12R)
FVVNGRRGR

SEQ ID NO: 18589 - protein, 9 aa, synthetic construct
  source 1..9: note = Seed: LVVVGARGV (KRAS G12R)
FVVNGRRGS

SEQ ID NO: 18590 - protein, 9 aa, synthetic construct
  source 1..9: note = Seed: LVVVGARGV (KRAS G12R)
FVVNGRRGV

SEQ ID NO: 18591 - protein, 9 aa, synthetic construct
  source 1..9: note = Seed: LVVVGARGV (KRAS G12R)
FVVNGRRGW

SEQ ID NO: 18592 - protein, 9 aa, synthetic construct
  source 1..9: note = Seed: LVVVGARGV (KRAS G12R)
FVVNGRRGY

SEQ ID NO: 18593 - protein, 9 aa, synthetic construct
  source 1..9: note = Seed: LVVVGARGV (KRAS G12R)
FVVNGSRGA

SEQ ID NO: 18594 - protein, 9 aa, synthetic construct
  source 1..9: note = Seed: LVVVGARGV (KRAS G12R)
FVVNGSRGF

SEQ ID NO: 18595 - protein, 9 aa, synthetic construct
  source 1..9: note = Seed: LVVVGARGV (KRAS G12R)
FVVNGSRGI

SEQ ID NO: 18596 - protein, 9 aa, synthetic construct
  source 1..9: note = Seed: LVVVGARGV (KRAS G12R)
FVVNGSRGL

SEQ ID NO: 18597 - protein, 9 aa, synthetic construct
  source 1..9: note = Seed: LVVVGARGV (KRAS G12R)
FVVNGSRGM

SEQ ID NO: 18598 - protein, 9 aa, synthetic construct
  source 1..9: note = Seed: LVVVGARGV (KRAS G12R)
FVVNGSRGN

SEQ ID NO: 18599 - protein, 9 aa, synthetic construct
  source 1..9: note = Seed: LVVVGARGV (KRAS G12R)
FVVNGSRGS

SEQ ID NO: 18600 - protein, 9 aa, synthetic construct
  source 1..9: note = Seed: LVVVGARGV (KRAS G12R)
FVVNGSRGT

SEQ ID NO: 18601 - protein, 9 aa, synthetic construct
  source 1..9: note = Seed: LVVVGARGV (KRAS G12R)
FVVNGSRGV

SEQ ID NO: 18602 - protein, 9 aa, synthetic construct
  source 1..9: note = Seed: LVVVGARGV (KRAS G12R)
FVVNGSRGW

SEQ ID NO: 18603 - protein, 9 aa, synthetic construct
  source 1..9: note = Seed: LVVVGARGV (KRAS G12R)
FVVNGSRGY

SEQ ID NO: 18604 - protein, 9 aa, synthetic construct
  source 1..9: note = Seed: LVVVGARGV (KRAS G12R)
FVVNGTRGA

SEQ ID NO: 18605 - protein, 9 aa, synthetic construct
  source 1..9: note = Seed: LVVVGARGV (KRAS G12R)
FVVNGTRGF

SEQ ID NO: 18606 - protein, 9 aa, synthetic construct
  source 1..9: note = Seed: LVVVGARGV (KRAS G12R)
FVVNGTRGI

SEQ ID NO: 18607 - protein, 9 aa, synthetic construct
  source 1..9: note = Seed: LVVVGARGV (KRAS G12R)
FVVNGTRGL

SEQ ID NO: 18608 - protein, 9 aa, synthetic construct
  source 1..9: note = Seed: LVVVGARGV (KRAS G12R)
FVVNGTRGM

SEQ ID NO: 18609 - protein, 9 aa, synthetic construct
  source 1..9: note = Seed: LVVVGARGV (KRAS G12R)
FVVNGTRGS

SEQ ID NO: 18610 - protein, 9 aa, synthetic construct
  source 1..9: note = Seed: LVVVGARGV (KRAS G12R)
FVVNGTRGT

SEQ ID NO: 18611 - protein, 9 aa, synthetic construct
  source 1..9: note = Seed: LVVVGARGV (KRAS G12R)
FVVNGTRGV

SEQ ID NO: 18612 - protein, 9 aa, synthetic construct
  source 1..9: note = Seed: LVVVGARGV (KRAS G12R)
FVVNGTRGW

SEQ ID NO: 18613 - protein, 9 aa, synthetic construct
  source 1..9: note = Seed: LVVVGARGV (KRAS G12R)
FVVNGTRGY

SEQ ID NO: 18614 - protein, 9 aa, synthetic construct
  source 1..9: note = Seed: LVVVGARGV (KRAS G12R)
FVVNGVRGA

SEQ ID NO: 18615 - protein, 9 aa, synthetic construct
  source 1..9: note = Seed: LVVVGARGV (KRAS G12R)
FVVNGVRGF

SEQ ID NO: 18616 - protein, 9 aa, synthetic construct
  source 1..9: note = Seed: LVVVGARGV (KRAS G12R)
FVVNGVRGI

SEQ ID NO: 18617 - protein, 9 aa, synthetic construct
  source 1..9: note = Seed: LVVVGARGV (KRAS G12R)
FVVNGVRGL

SEQ ID NO: 18618 - protein, 9 aa, synthetic construct
  source 1..9: note = Seed: LVVVGARGV (KRAS G12R)
FVVNGVRGM

SEQ ID NO: 18619 - protein, 9 aa, synthetic construct
  source 1..9: note = Seed: LVVVGARGV (KRAS G12R)
FVVNGVRGN

SEQ ID NO: 18620 - protein, 9 aa, synthetic construct
  source 1..9: note = Seed: LVVVGARGV (KRAS G12R)
FVVNGVRGR

SEQ ID NO: 18621 - protein, 9 aa, synthetic construct
  source 1..9: note = Seed: LVVVGARGV (KRAS G12R)
FVVNGVRGS

SEQ ID NO: 18622 - protein, 9 aa, synthetic construct
  source 1..9: note = Seed: LVVVGARGV (KRAS G12R)
FVVNGVRGT

SEQ ID NO: 18623 - protein, 9 aa, synthetic construct
  source 1..9: note = Seed: LVVVGARGV (KRAS G12R)
FVVNGVRGV

SEQ ID NO: 18624 - protein, 9 aa, synthetic construct
  source 1..9: note = Seed: LVVVGARGV (KRAS G12R)
FVVNGVRGW

SEQ ID NO: 18625 - protein, 9 aa, synthetic construct
  source 1..9: note = Seed: LVVVGARGV (KRAS G12R)
FVVNGVRGY

SEQ ID NO: 18626 - protein, 9 aa, synthetic construct
  source 1..9: note = Seed: LVVVGARGV (KRAS G12R)
FVVNGWRGI

SEQ ID NO: 18627 - protein, 9 aa, synthetic construct
  source 1..9: note = Seed: LVVVGARGV (KRAS G12R)
FVVNGYRGF

SEQ ID NO: 18628 - protein, 9 aa, synthetic construct
  source 1..9: note = Seed: LVVVGARGV (KRAS G12R)
FVVNGYRGI

SEQ ID NO: 18629 - protein, 9 aa, synthetic construct
  source 1..9: note = Seed: LVVVGARGV (KRAS G12R)
FVVNGYRGL

SEQ ID NO: 18630 - protein, 9 aa, synthetic construct
  source 1..9: note = Seed: LVVVGARGV (KRAS G12R)
FVVNGYRGV

SEQ ID NO: 18631 - protein, 9 aa, synthetic construct
  source 1..9: note = Seed: LVVVGARGV (KRAS G12R)
FVVPGARGA

SEQ ID NO: 18632 - protein, 9 aa, synthetic construct
  source 1..9: note = Seed: LVVVGARGV (KRAS G12R)
FVVPGARGI

SEQ ID NO: 18633 - protein, 9 aa, synthetic construct
  source 1..9: note = Seed: LVVVGARGV (KRAS G12R)
FVVPGARGL

SEQ ID NO: 18634 - protein, 9 aa, synthetic construct
  source 1..9: note = Seed: LVVVGARGV (KRAS G12R)
FVVPGARGM

SEQ ID NO: 18635 - protein, 9 aa, synthetic construct
  source 1..9: note = Seed: LVVVGARGV (KRAS G12R)
FVVPGARGV

SEQ ID NO: 18636 - protein, 9 aa, synthetic construct
  source 1..9: note = Seed: LVVVGARGV (KRAS G12R)
FVVPGNRGL

SEQ ID NO: 18637 - protein, 9 aa, synthetic construct
  source 1..9: note = Seed: LVVVGARGV (KRAS G12R)
FVVPGSRGI

SEQ ID NO: 18638 - protein, 9 aa, synthetic construct
  source 1..9: note = Seed: LVVVGARGV (KRAS G12R)
FVVPGSRGL

SEQ ID NO: 18639 - protein, 9 aa, synthetic construct
  source 1..9: note = Seed: LVVVGARGV (KRAS G12R)
FVVPGSRGV

SEQ ID NO: 18640 - protein, 9 aa, synthetic construct
  source 1..9: note = Seed: LVVVGARGV (KRAS G12R)
FVVPGVRGL

SEQ ID NO: 18641 - protein, 9 aa, synthetic construct
  source 1..9: note = Seed: LVVVGARGV (KRAS G12R)
FVVQGARGA

SEQ ID NO: 18642 - protein, 9 aa, synthetic construct
  source 1..9: note = Seed: LVVVGARGV (KRAS G12R)
FVVQGARGC

SEQ ID NO: 18643 - protein, 9 aa, synthetic construct
  source 1..9: note = Seed: LVVVGARGV (KRAS G12R)
FVVQGARGD

SEQ ID NO: 18644 - protein, 9 aa, synthetic construct
  source 1..9: note = Seed: LVVVGARGV (KRAS G12R)
FVVQGARGE

SEQ ID NO: 18645 - protein, 9 aa, synthetic construct
  source 1..9: note = Seed: LVVVGARGV (KRAS G12R)
FVVQGARGF

SEQ ID NO: 18646 - protein, 9 aa, synthetic construct
  source 1..9: note = Seed: LVVVGARGV (KRAS G12R)
FVVQGARGG

SEQ ID NO: 18647 - protein, 9 aa, synthetic construct
  source 1..9: note = Seed: LVVVGARGV (KRAS G12R)
FVVQGARGH

SEQ ID NO: 18648 - protein, 9 aa, synthetic construct
  source 1..9: note = Seed: LVVVGARGV (KRAS G12R)
FVVQGARGK

SEQ ID NO: 18649 - protein, 9 aa, synthetic construct
  source 1..9: note = Seed: LVVVGARGV (KRAS G12R)
FVVQGARGM

SEQ ID NO: 18650 - protein, 9 aa, synthetic construct
  source 1..9: note = Seed: LVVVGARGV (KRAS G12R)
FVVQGARGN

SEQ ID NO: 18651 - protein, 9 aa, synthetic construct
  source 1..9: note = Seed: LVVVGARGV (KRAS G12R)
FVVQGARGP

SEQ ID NO: 18652 - protein, 9 aa, synthetic construct
  source 1..9: note = Seed: LVVVGARGV (KRAS G12R)
FVVQGARGQ

SEQ ID NO: 18653 - protein, 9 aa, synthetic construct
  source 1..9: note = Seed: LVVVGARGV (KRAS G12R)
FVVQGARGR

SEQ ID NO: 18654 - protein, 9 aa, synthetic construct
  source 1..9: note = Seed: LVVVGARGV (KRAS G12R)
FVVQGARGS

SEQ ID NO: 18655 - protein, 9 aa, synthetic construct
  source 1..9: note = Seed: LVVVGARGV (KRAS G12R)
FVVQGARGT

SEQ ID NO: 18656 - protein, 9 aa, synthetic construct
  source 1..9: note = Seed: LVVVGARGV (KRAS G12R)
FVVQGARGW

SEQ ID NO: 18657 - protein, 9 aa, synthetic construct
  source 1..9: note = Seed: LVVVGARGV (KRAS G12R)
FVVQGARGY

SEQ ID NO: 18658 - protein, 9 aa, synthetic construct
  source 1..9: note = Seed: LVVVGARGV (KRAS G12R)
FVVQGCRGA

SEQ ID NO: 18659 - protein, 9 aa, synthetic construct
  source 1..9: note = Seed: LVVVGARGV (KRAS G12R)
FVVQGCRGI

SEQ ID NO: 18660 - protein, 9 aa, synthetic construct
  source 1..9: note = Seed: LVVVGARGV (KRAS G12R)
FVVQGCRGL

SEQ ID NO: 18661 - protein, 9 aa, synthetic construct
  source 1..9: note = Seed: LVVVGARGV (KRAS G12R)
FVVQGCRGM

SEQ ID NO: 18662 - protein, 9 aa, synthetic construct
  source 1..9: note = Seed: LVVVGARGV (KRAS G12R)
FVVQGCRGV

SEQ ID NO: 18663 - protein, 9 aa, synthetic construct
  source 1..9: note = Seed: LVVVGARGV (KRAS G12R)
FVVQGDRGA

SEQ ID NO: 18664 - protein, 9 aa, synthetic construct
  source 1..9: note = Seed: LVVVGARGV (KRAS G12R)
FVVQGDRGI

SEQ ID NO: 18665 - protein, 9 aa, synthetic construct
  source 1..9: note = Seed: LVVVGARGV (KRAS G12R)
FVVQGDRGL

SEQ ID NO: 18666 - protein, 9 aa, synthetic construct
  source 1..9: note = Seed: LVVVGARGV (KRAS G12R)
FVVQGDRGV

SEQ ID NO: 18667 - protein, 9 aa, synthetic construct
  source 1..9: note = Seed: LVVVGARGV (KRAS G12R)
FVVQGERGA

SEQ ID NO: 18668 - protein, 9 aa, synthetic construct
  source 1..9: note = Seed: LVVVGARGV (KRAS G12R)
FVVQGERGI

SEQ ID NO: 18669 - protein, 9 aa, synthetic construct
  source 1..9: note = Seed: LVVVGARGV (KRAS G12R)
FVVQGERGL

SEQ ID NO: 18670 - protein, 9 aa, synthetic construct
  source 1..9: note = Seed: LVVVGARGV (KRAS G12R)
FVVQGERGV

SEQ ID NO: 18671 - protein, 9 aa, synthetic construct
  source 1..9: note = Seed: LVVVGARGV (KRAS G12R)
FVVQGFRGF

SEQ ID NO: 18672 - protein, 9 aa, synthetic construct
  source 1..9: note = Seed: LVVVGARGV (KRAS G12R)
FVVQGFRGI

SEQ ID NO: 18673 - protein, 9 aa, synthetic construct
  source 1..9: note = Seed: LVVVGARGV (KRAS G12R)
FVVQGFRGL

SEQ ID NO: 18674 - protein, 9 aa, synthetic construct
  source 1..9: note = Seed: LVVVGARGV (KRAS G12R)
FVVQGFRGM

SEQ ID NO: 18675 - protein, 9 aa, synthetic construct
  source 1..9: note = Seed: LVVVGARGV (KRAS G12R)
FVVQGFRGV

SEQ ID NO: 18676 - protein, 9 aa, synthetic construct
  source 1..9: note = Seed: LVVVGARGV (KRAS G12R)
FVVQGGRGA

SEQ ID NO: 18677 - protein, 9 aa, synthetic construct
  source 1..9: note = Seed: LVVVGARGV (KRAS G12R)
FVVQGGRGC

SEQ ID NO: 18678 - protein, 9 aa, synthetic construct
  source 1..9: note = Seed: LVVVGARGV (KRAS G12R)
FVVQGGRGF

SEQ ID NO: 18679 - protein, 9 aa, synthetic construct
  source 1..9: note = Seed: LVVVGARGV (KRAS G12R)
FVVQGGRGG

SEQ ID NO: 18680 - protein, 9 aa, synthetic construct
  source 1..9: note = Seed: LVVVGARGV (KRAS G12R)
FVVQGGRGH

SEQ ID NO: 18681 - protein, 9 aa, synthetic construct
  source 1..9: note = Seed: LVVVGARGV (KRAS G12R)
FVVQGGRGI

SEQ ID NO: 18682 - protein, 9 aa, synthetic construct
  source 1..9: note = Seed: LVVVGARGV (KRAS G12R)
FVVQGGRGM

SEQ ID NO: 18683 - protein, 9 aa, synthetic construct
  source 1..9: note = Seed: LVVVGARGV (KRAS G12R)
FVVQGGRGN

SEQ ID NO: 18684 - protein, 9 aa, synthetic construct
  source 1..9: note = Seed: LVVVGARGV (KRAS G12R)
FVVQGGRGP

SEQ ID NO: 18685 - protein, 9 aa, synthetic construct
  source 1..9: note = Seed: LVVVGARGV (KRAS G12R)
FVVQGGRGQ

SEQ ID NO: 18686 - protein, 9 aa, synthetic construct
  source 1..9: note = Seed: LVVVGARGV (KRAS G12R)
FVVQGGRGS

SEQ ID NO: 18687 - protein, 9 aa, synthetic construct
  source 1..9: note = Seed: LVVVGARGV (KRAS G12R)
FVVQGGRGT

SEQ ID NO: 18688 - protein, 9 aa, synthetic construct
  source 1..9: note = Seed: LVVVGARGV (KRAS G12R)
FVVQGGRGV

SEQ ID NO: 18689 - protein, 9 aa, synthetic construct
  source 1..9: note = Seed: LVVVGARGV (KRAS G12R)
FVVQGGRGW

SEQ ID NO: 18690 - protein, 9 aa, synthetic construct
  source 1..9: note = Seed: LVVVGARGV (KRAS G12R)
FVVQGGRGY

SEQ ID NO: 18691 - protein, 9 aa, synthetic construct
  source 1..9: note = Seed: LVVVGARGV (KRAS G12R)
FVVQGHRGA

SEQ ID NO: 18692 - protein, 9 aa, synthetic construct
  source 1..9: note = Seed: LVVVGARGV (KRAS G12R)
FVVQGHRGF

SEQ ID NO: 18693 - protein, 9 aa, synthetic construct
  source 1..9: note = Seed: LVVVGARGV (KRAS G12R)
FVVQGHRGI

SEQ ID NO: 18694 - protein, 9 aa, synthetic construct
  source 1..9: note = Seed: LVVVGARGV (KRAS G12R)
FVVQGHRGL

SEQ ID NO: 18695 - protein, 9 aa, synthetic construct
  source 1..9: note = Seed: LVVVGARGV (KRAS G12R)
FVVQGHRGM

SEQ ID NO: 18696 - protein, 9 aa, synthetic construct
  source 1..9: note = Seed: LVVVGARGV (KRAS G12R)
FVVQGHRGR

SEQ ID NO: 18697 - protein, 9 aa, synthetic construct
  source 1..9: note = Seed: LVVVGARGV (KRAS G12R)
FVVQGHRGS

SEQ ID NO: 18698 - protein, 9 aa, synthetic construct
  source 1..9: note = Seed: LVVVGARGV (KRAS G12R)
FVVQGHRGV

SEQ ID NO: 18699 - protein, 9 aa, synthetic construct
  source 1..9: note = Seed: LVVVGARGV (KRAS G12R)
FVVQGHRGY

SEQ ID NO: 18700 - protein, 9 aa, synthetic construct
  source 1..9: note = Seed: LVVVGARGV (KRAS G12R)
FVVQGIRGA

SEQ ID NO: 18701 - protein, 9 aa, synthetic construct
  source 1..9: note = Seed: LVVVGARGV (KRAS G12R)
FVVQGIRGF

SEQ ID NO: 18702 - protein, 9 aa, synthetic construct
  source 1..9: note = Seed: LVVVGARGV (KRAS G12R)
FVVQGIRGG

SEQ ID NO: 18703 - protein, 9 aa, synthetic construct
  source 1..9: note = Seed: LVVVGARGV (KRAS G12R)
FVVQGIRGH

SEQ ID NO: 18704 - protein, 9 aa, synthetic construct
  source 1..9: note = Seed: LVVVGARGV (KRAS G12R)
FVVQGIRGI

SEQ ID NO: 18705 - protein, 9 aa, synthetic construct
  source 1..9: note = Seed: LVVVGARGV (KRAS G12R)
FVVQGIRGK

SEQ ID NO: 18706 - protein, 9 aa, synthetic construct
  source 1..9: note = Seed: LVVVGARGV (KRAS G12R)
FVVQGIRGL

SEQ ID NO: 18707 - protein, 9 aa, synthetic construct
  source 1..9: note = Seed: LVVVGARGV (KRAS G12R)
FVVQGIRGM

SEQ ID NO: 18708 - protein, 9 aa, synthetic construct
  source 1..9: note = Seed: LVVVGARGV (KRAS G12R)
FVVQGIRGN

SEQ ID NO: 18709 - protein, 9 aa, synthetic construct
  source 1..9: note = Seed: LVVVGARGV (KRAS G12R)
FVVQGIRGR

SEQ ID NO: 18710 - protein, 9 aa, synthetic construct
  source 1..9: note = Seed: LVVVGARGV (KRAS G12R)
FVVQGIRGS

SEQ ID NO: 18711 - protein, 9 aa, synthetic construct
  source 1..9: note = Seed: LVVVGARGV (KRAS G12R)
FVVQGIRGT

SEQ ID NO: 18712 - protein, 9 aa, synthetic construct
  source 1..9: note = Seed: LVVVGARGV (KRAS G12R)
FVVQGIRGV

SEQ ID NO: 18713 - protein, 9 aa, synthetic construct
  source 1..9: note = Seed: LVVVGARGV (KRAS G12R)
FVVQGIRGY

SEQ ID NO: 18714 - protein, 9 aa, synthetic construct
  source 1..9: note = Seed: LVVVGARGV (KRAS G12R)
FVVQGKRGA

SEQ ID NO: 18715 - protein, 9 aa, synthetic construct
  source 1..9: note = Seed: LVVVGARGV (KRAS G12R)
FVVQGKRGF

SEQ ID NO: 18716 - protein, 9 aa, synthetic construct
  source 1..9: note = Seed: LVVVGARGV (KRAS G12R)
FVVQGKRGG

SEQ ID NO: 18717 - protein, 9 aa, synthetic construct
  source 1..9: note = Seed: LVVVGARGV (KRAS G12R)
FVVQGKRGH

SEQ ID NO: 18718 - protein, 9 aa, synthetic construct
  source 1..9: note = Seed: LVVVGARGV (KRAS G12R)
FVVQGKRGI

SEQ ID NO: 18719 - protein, 9 aa, synthetic construct
  source 1..9: note = Seed: LVVVGARGV (KRAS G12R)
FVVQGKRGK

SEQ ID NO: 18720 - protein, 9 aa, synthetic construct
  source 1..9: note = Seed: LVVVGARGV (KRAS G12R)
FVVQGKRGL

SEQ ID NO: 18721 - protein, 9 aa, synthetic construct
  source 1..9: note = Seed: LVVVGARGV (KRAS G12R)
FVVQGKRGM

SEQ ID NO: 18722 - protein, 9 aa, synthetic construct
  source 1..9: note = Seed: LVVVGARGV (KRAS G12R)
FVVQGKRGN

SEQ ID NO: 18723 - protein, 9 aa, synthetic construct
  source 1..9: note = Seed: LVVVGARGV (KRAS G12R)
FVVQGKRGQ

SEQ ID NO: 18724 - protein, 9 aa, synthetic construct
  source 1..9: note = Seed: LVVVGARGV (KRAS G12R)
FVVQGKRGR

SEQ ID NO: 18725 - protein, 9 aa, synthetic construct
  source 1..9: note = Seed: LVVVGARGV (KRAS G12R)
FVVQGKRGS

SEQ ID NO: 18726 - protein, 9 aa, synthetic construct
  source 1..9: note = Seed: LVVVGARGV (KRAS G12R)
FVVQGKRGT

SEQ ID NO: 18727 - protein, 9 aa, synthetic construct
  source 1..9: note = Seed: LVVVGARGV (KRAS G12R)
FVVQGKRGV

SEQ ID NO: 18728 - protein, 9 aa, synthetic construct
  source 1..9: note = Seed: LVVVGARGV (KRAS G12R)
FVVQGKRGW

SEQ ID NO: 18729 - protein, 9 aa, synthetic construct
  source 1..9: note = Seed: LVVVGARGV (KRAS G12R)
FVVQGKRGY

SEQ ID NO: 18730 - protein, 9 aa, synthetic construct
  source 1..9: note = Seed: LVVVGARGV (KRAS G12R)
FVVQGLRGA

SEQ ID NO: 18731 - protein, 9 aa, synthetic construct
  source 1..9: note = Seed: LVVVGARGV (KRAS G12R)
FVVQGLRGF

SEQ ID NO: 18732 - protein, 9 aa, synthetic construct
  source 1..9: note = Seed: LVVVGARGV (KRAS G12R)
FVVQGLRGI

SEQ ID NO: 18733 - protein, 9 aa, synthetic construct
  source 1..9: note = Seed: LVVVGARGV (KRAS G12R)
FVVQGLRGK

SEQ ID NO: 18734 - protein, 9 aa, synthetic construct
  source 1..9: note = Seed: LVVVGARGV (KRAS G12R)
FVVQGLRGL

SEQ ID NO: 18735 - protein, 9 aa, synthetic construct
  source 1..9: note = Seed: LVVVGARGV (KRAS G12R)
FVVQGLRGM

SEQ ID NO: 18736 - protein, 9 aa, synthetic construct
  source 1..9: note = Seed: LVVVGARGV (KRAS G12R)
FVVQGLRGN

SEQ ID NO: 18737 - protein, 9 aa, synthetic construct
  source 1..9: note = Seed: LVVVGARGV (KRAS G12R)
FVVQGLRGR

SEQ ID NO: 18738 - protein, 9 aa, synthetic construct
  source 1..9: note = Seed: LVVVGARGV (KRAS G12R)
FVVQGLRGS

SEQ ID NO: 18739 - protein, 9 aa, synthetic construct
  source 1..9: note = Seed: LVVVGARGV (KRAS G12R)
FVVQGLRGT

SEQ ID NO: 18740 - protein, 9 aa, synthetic construct
  source 1..9: note = Seed: LVVVGARGV (KRAS G12R)
FVVQGLRGV

SEQ ID NO: 18741 - protein, 9 aa, synthetic construct
  source 1..9: note = Seed: LVVVGARGV (KRAS G12R)
FVVQGLRGY

SEQ ID NO: 18742 - protein, 9 aa, synthetic construct
  source 1..9: note = Seed: LVVVGARGV (KRAS G12R)
FVVQGMRGA

SEQ ID NO: 18743 - protein, 9 aa, synthetic construct
  source 1..9: note = Seed: LVVVGARGV (KRAS G12R)
FVVQGMRGF

SEQ ID NO: 18744 - protein, 9 aa, synthetic construct
  source 1..9: note = Seed: LVVVGARGV (KRAS G12R)
FVVQGMRGI

SEQ ID NO: 18745 - protein, 9 aa, synthetic construct
  source 1..9: note = Seed: LVVVGARGV (KRAS G12R)
FVVQGMRGL

SEQ ID NO: 18746 - protein, 9 aa, synthetic construct
  source 1..9: note = Seed: LVVVGARGV (KRAS G12R)
FVVQGMRGM

SEQ ID NO: 18747 - protein, 9 aa, synthetic construct
  source 1..9: note = Seed: LVVVGARGV (KRAS G12R)
FVVQGMRGN

SEQ ID NO: 18748 - protein, 9 aa, synthetic construct
  source 1..9: note = Seed: LVVVGARGV (KRAS G12R)
FVVQGMRGR

SEQ ID NO: 18749 - protein, 9 aa, synthetic construct
  source 1..9: note = Seed: LVVVGARGV (KRAS G12R)
FVVQGMRGS

SEQ ID NO: 18750 - protein, 9 aa, synthetic construct
  source 1..9: note = Seed: LVVVGARGV (KRAS G12R)
FVVQGMRGT

SEQ ID NO: 18751 - protein, 9 aa, synthetic construct
  source 1..9: note = Seed: LVVVGARGV (KRAS G12R)
FVVQGMRGV

SEQ ID NO: 18752 - protein, 9 aa, synthetic construct
  source 1..9: note = Seed: LVVVGARGV (KRAS G12R)
FVVQGMRGY

SEQ ID NO: 18753 - protein, 9 aa, synthetic construct
  source 1..9: note = Seed: LVVVGARGV (KRAS G12R)
FVVQGNRGA

SEQ ID NO: 18754 - protein, 9 aa, synthetic construct
  source 1..9: note = Seed: LVVVGARGV (KRAS G12R)
FVVQGNRGC

SEQ ID NO: 18755 - protein, 9 aa, synthetic construct
  source 1..9: note = Seed: LVVVGARGV (KRAS G12R)
FVVQGNRGF

SEQ ID NO: 18756 - protein, 9 aa, synthetic construct
  source 1..9: note = Seed: LVVVGARGV (KRAS G12R)
FVVQGNRGG

SEQ ID NO: 18757 - protein, 9 aa, synthetic construct
  source 1..9: note = Seed: LVVVGARGV (KRAS G12R)
FVVQGNRGH

SEQ ID NO: 18758 - protein, 9 aa, synthetic construct
  source 1..9: note = Seed: LVVVGARGV (KRAS G12R)
FVVQGNRGI

SEQ ID NO: 18759 - protein, 9 aa, synthetic construct
  source 1..9: note = Seed: LVVVGARGV (KRAS G12R)
FVVQGNRGL

SEQ ID NO: 18760 - protein, 9 aa, synthetic construct
  source 1..9: note = Seed: LVVVGARGV (KRAS G12R)
FVVQGNRGM

SEQ ID NO: 18761 - protein, 9 aa, synthetic construct
  source 1..9: note = Seed: LVVVGARGV (KRAS G12R)
FVVQGNRGN

SEQ ID NO: 18762 - protein, 9 aa, synthetic construct
  source 1..9: note = Seed: LVVVGARGV (KRAS G12R)
FVVQGNRGP

SEQ ID NO: 18763 - protein, 9 aa, synthetic construct
  source 1..9: note = Seed: LVVVGARGV (KRAS G12R)
FVVQGNRGQ

SEQ ID NO: 18764 - protein, 9 aa, synthetic construct
  source 1..9: note = Seed: LVVVGARGV (KRAS G12R)
FVVQGNRGR

SEQ ID NO: 18765 - protein, 9 aa, synthetic construct
  source 1..9: note = Seed: LVVVGARGV (KRAS G12R)
FVVQGNRGS

SEQ ID NO: 18766 - protein, 9 aa, synthetic construct
  source 1..9: note = Seed: LVVVGARGV (KRAS G12R)
FVVQGNRGT

SEQ ID NO: 18767 - protein, 9 aa, synthetic construct
  source 1..9: note = Seed: LVVVGARGV (KRAS G12R)
FVVQGNRGV

SEQ ID NO: 18768 - protein, 9 aa, synthetic construct
  source 1..9: note = Seed: LVVVGARGV (KRAS G12R)
FVVQGNRGW

SEQ ID NO: 18769 - protein, 9 aa, synthetic construct
  source 1..9: note = Seed: LVVVGARGV (KRAS G12R)
FVVQGNRGY

SEQ ID NO: 18770 - protein, 9 aa, synthetic construct
  source 1..9: note = Seed: LVVVGARGV (KRAS G12R)
FVVQGPRGA

SEQ ID NO: 18771 - protein, 9 aa, synthetic construct
  source 1..9: note = Seed: LVVVGARGV (KRAS G12R)
FVVQGPRGC

SEQ ID NO: 18772 - protein, 9 aa, synthetic construct
  source 1..9: note = Seed: LVVVGARGV (KRAS G12R)
FVVQGPRGF

SEQ ID NO: 18773 - protein, 9 aa, synthetic construct
  source 1..9: note = Seed: LVVVGARGV (KRAS G12R)
FVVQGPRGG

SEQ ID NO: 18774 - protein, 9 aa, synthetic construct
  source 1..9: note = Seed: LVVVGARGV (KRAS G12R)
FVVQGPRGH

SEQ ID NO: 18775 - protein, 9 aa, synthetic construct
  source 1..9: note = Seed: LVVVGARGV (KRAS G12R)
FVVQGPRGI

SEQ ID NO: 18776 - protein, 9 aa, synthetic construct
  source 1..9: note = Seed: LVVVGARGV (KRAS G12R)
FVVQGPRGL

SEQ ID NO: 18777 - protein, 9 aa, synthetic construct
  source 1..9: note = Seed: LVVVGARGV (KRAS G12R)
FVVQGPRGM

SEQ ID NO: 18778 - protein, 9 aa, synthetic construct
  source 1..9: note = Seed: LVVVGARGV (KRAS G12R)
FVVQGPRGN

SEQ ID NO: 18779 - protein, 9 aa, synthetic construct
  source 1..9: note = Seed: LVVVGARGV (KRAS G12R)
FVVQGPRGP

SEQ ID NO: 18780 - protein, 9 aa, synthetic construct
  source 1..9: note = Seed: LVVVGARGV (KRAS G12R)
FVVQGPRGQ

SEQ ID NO: 18781 - protein, 9 aa, synthetic construct
  source 1..9: note = Seed: LVVVGARGV (KRAS G12R)
FVVQGPRGS

SEQ ID NO: 18782 - protein, 9 aa, synthetic construct
  source 1..9: note = Seed: LVVVGARGV (KRAS G12R)
FVVQGPRGT

SEQ ID NO: 18783 - protein, 9 aa, synthetic construct
  source 1..9: note = Seed: LVVVGARGV (KRAS G12R)
FVVQGPRGV

SEQ ID NO: 18784 - protein, 9 aa, synthetic construct
  source 1..9: note = Seed: LVVVGARGV (KRAS G12R)
FVVQGPRGW

SEQ ID NO: 18785 - protein, 9 aa, synthetic construct
  source 1..9: note = Seed: LVVVGARGV (KRAS G12R)
FVVQGPRGY

SEQ ID NO: 18786 - protein, 9 aa, synthetic construct
  source 1..9: note = Seed: LVVVGARGV (KRAS G12R)
FVVQGQRGA

SEQ ID NO: 18787 - protein, 9 aa, synthetic construct
  source 1..9: note = Seed: LVVVGARGV (KRAS G12R)
FVVQGQRGI

SEQ ID NO: 18788 - protein, 9 aa, synthetic construct
  source 1..9: note = Seed: LVVVGARGV (KRAS G12R)
FVVQGQRGL

SEQ ID NO: 18789 - protein, 9 aa, synthetic construct
  source 1..9: note = Seed: LVVVGARGV (KRAS G12R)
FVVQGQRGM

SEQ ID NO: 18790 - protein, 9 aa, synthetic construct
  source 1..9: note = Seed: LVVVGARGV (KRAS G12R)
FVVQGQRGV

SEQ ID NO: 18791 - protein, 9 aa, synthetic construct
  source 1..9: note = Seed: LVVVGARGV (KRAS G12R)
FVVQGRRGA

SEQ ID NO: 18792 - protein, 9 aa, synthetic construct
  source 1..9: note = Seed: LVVVGARGV (KRAS G12R)
FVVQGRRGC

SEQ ID NO: 18793 - protein, 9 aa, synthetic construct
  source 1..9: note = Seed: LVVVGARGV (KRAS G12R)
FVVQGRRGF

SEQ ID NO: 18794 - protein, 9 aa, synthetic construct
  source 1..9: note = Seed: LVVVGARGV (KRAS G12R)
FVVQGRRGG

SEQ ID NO: 18795 - protein, 9 aa, synthetic construct
  source 1..9: note = Seed: LVVVGARGV (KRAS G12R)
FVVQGRRGH

SEQ ID NO: 18796 - protein, 9 aa, synthetic construct
  source 1..9: note = Seed: LVVVGARGV (KRAS G12R)
FVVQGRRGI

SEQ ID NO: 18797 - protein, 9 aa, synthetic construct
  source 1..9: note = Seed: LVVVGARGV (KRAS G12R)
FVVQGRRGK

SEQ ID NO: 18798 - protein, 9 aa, synthetic construct
  source 1..9: note = Seed: LVVVGARGV (KRAS G12R)
FVVQGRRGL

SEQ ID NO: 18799 - protein, 9 aa, synthetic construct
  source 1..9: note = Seed: LVVVGARGV (KRAS G12R)
FVVQGRRGM

SEQ ID NO: 18800 - protein, 9 aa, synthetic construct
  source 1..9: note = Seed: LVVVGARGV (KRAS G12R)
FVVQGRRGN

SEQ ID NO: 18801 - protein, 9 aa, synthetic construct
  source 1..9: note = Seed: LVVVGARGV (KRAS G12R)
FVVQGRRGP

SEQ ID NO: 18802 - protein, 9 aa, synthetic construct
  source 1..9: note = Seed: LVVVGARGV (KRAS G12R)
FVVQGRRGQ

SEQ ID NO: 18803 - protein, 9 aa, synthetic construct
  source 1..9: note = Seed: LVVVGARGV (KRAS G12R)
FVVQGRRGR

SEQ ID NO: 18804 - protein, 9 aa, synthetic construct
  source 1..9: note = Seed: LVVVGARGV (KRAS G12R)
FVVQGRRGS

SEQ ID NO: 18805 - protein, 9 aa, synthetic construct
  source 1..9: note = Seed: LVVVGARGV (KRAS G12R)
FVVQGRRGT

SEQ ID NO: 18806 - protein, 9 aa, synthetic construct
  source 1..9: note = Seed: LVVVGARGV (KRAS G12R)
FVVQGRRGV

SEQ ID NO: 18807 - protein, 9 aa, synthetic construct
  source 1..9: note = Seed: LVVVGARGV (KRAS G12R)
FVVQGRRGW

SEQ ID NO: 18808 - protein, 9 aa, synthetic construct
  source 1..9: note = Seed: LVVVGARGV (KRAS G12R)
FVVQGRRGY

SEQ ID NO: 18809 - protein, 9 aa, synthetic construct
  source 1..9: note = Seed: LVVVGARGV (KRAS G12R)
FVVQGSRGA

SEQ ID NO: 18810 - protein, 9 aa, synthetic construct
  source 1..9: note = Seed: LVVVGARGV (KRAS G12R)
FVVQGSRGC

SEQ ID NO: 18811 - protein, 9 aa, synthetic construct
  source 1..9: note = Seed: LVVVGARGV (KRAS G12R)
FVVQGSRGF

SEQ ID NO: 18812 - protein, 9 aa, synthetic construct
  source 1..9: note = Seed: LVVVGARGV (KRAS G12R)
FVVQGSRGG

SEQ ID NO: 18813 - protein, 9 aa, synthetic construct
  source 1..9: note = Seed: LVVVGARGV (KRAS G12R)
FVVQGSRGH

SEQ ID NO: 18814 - protein, 9 aa, synthetic construct
  source 1..9: note = Seed: LVVVGARGV (KRAS G12R)
FVVQGSRGI

SEQ ID NO: 18815 - protein, 9 aa, synthetic construct
  source 1..9: note = Seed: LVVVGARGV (KRAS G12R)
FVVQGSRGK

SEQ ID NO: 18816 - protein, 9 aa, synthetic construct
  source 1..9: note = Seed: LVVVGARGV (KRAS G12R)
FVVQGSRGM

SEQ ID NO: 18817 - protein, 9 aa, synthetic construct
  source 1..9: note = Seed: LVVVGARGV (KRAS G12R)
FVVQGSRGN

SEQ ID NO: 18818 - protein, 9 aa, synthetic construct
  source 1..9: note = Seed: LVVVGARGV (KRAS G12R)
FVVQGSRGP

SEQ ID NO: 18819 - protein, 9 aa, synthetic construct
  source 1..9: note = Seed: LVVVGARGV (KRAS G12R)
FVVQGSRGQ

SEQ ID NO: 18820 - protein, 9 aa, synthetic construct
  source 1..9: note = Seed: LVVVGARGV (KRAS G12R)
FVVQGSRGR

SEQ ID NO: 18821 - protein, 9 aa, synthetic construct
  source 1..9: note = Seed: LVVVGARGV (KRAS G12R)
FVVQGSRGS

SEQ ID NO: 18822 - protein, 9 aa, synthetic construct
  source 1..9: note = Seed: LVVVGARGV (KRAS G12R)
FVVQGSRGT

SEQ ID NO: 18823 - protein, 9 aa, synthetic construct
  source 1..9: note = Seed: LVVVGARGV (KRAS G12R)
FVVQGSRGV

SEQ ID NO: 18824 - protein, 9 aa, synthetic construct
  source 1..9: note = Seed: LVVVGARGV (KRAS G12R)
FVVQGSRGW

SEQ ID NO: 18825 - protein, 9 aa, synthetic construct
  source 1..9: note = Seed: LVVVGARGV (KRAS G12R)
FVVQGSRGY

SEQ ID NO: 18826 - protein, 9 aa, synthetic construct
  source 1..9: note = Seed: LVVVGARGV (KRAS G12R)
FVVQGTRGA

SEQ ID NO: 18827 - protein, 9 aa, synthetic construct
  source 1..9: note = Seed: LVVVGARGV (KRAS G12R)
FVVQGTRGC

SEQ ID NO: 18828 - protein, 9 aa, synthetic construct
  source 1..9: note = Seed: LVVVGARGV (KRAS G12R)
FVVQGTRGF

SEQ ID NO: 18829 - protein, 9 aa, synthetic construct
  source 1..9: note = Seed: LVVVGARGV (KRAS G12R)
FVVQGTRGG

SEQ ID NO: 18830 - protein, 9 aa, synthetic construct
  source 1..9: note = Seed: LVVVGARGV (KRAS G12R)
FVVQGTRGH

SEQ ID NO: 18831 - protein, 9 aa, synthetic construct
  source 1..9: note = Seed: LVVVGARGV (KRAS G12R)
FVVQGTRGI

SEQ ID NO: 18832 - protein, 9 aa, synthetic construct
  source 1..9: note = Seed: LVVVGARGV (KRAS G12R)
FVVQGTRGL

SEQ ID NO: 18833 - protein, 9 aa, synthetic construct
  source 1..9: note = Seed: LVVVGARGV (KRAS G12R)
FVVQGTRGM

SEQ ID NO: 18834 - protein, 9 aa, synthetic construct
  source 1..9: note = Seed: LVVVGARGV (KRAS G12R)
FVVQGTRGN

SEQ ID NO: 18835 - protein, 9 aa, synthetic construct
  source 1..9: note = Seed: LVVVGARGV (KRAS G12R)
FVVQGTRGP

SEQ ID NO: 18836 - protein, 9 aa, synthetic construct
  source 1..9: note = Seed: LVVVGARGV (KRAS G12R)
FVVQGTRGQ

SEQ ID NO: 18837 - protein, 9 aa, synthetic construct
  source 1..9: note = Seed: LVVVGARGV (KRAS G12R)
FVVQGTRGR

SEQ ID NO: 18838 - protein, 9 aa, synthetic construct
  source 1..9: note = Seed: LVVVGARGV (KRAS G12R)
FVVQGTRGS

SEQ ID NO: 18839 - protein, 9 aa, synthetic construct
  source 1..9: note = Seed: LVVVGARGV (KRAS G12R)
FVVQGTRGT

SEQ ID NO: 18840 - protein, 9 aa, synthetic construct
  source 1..9: note = Seed: LVVVGARGV (KRAS G12R)
FVVQGTRGV

SEQ ID NO: 18841 - protein, 9 aa, synthetic construct
  source 1..9: note = Seed: LVVVGARGV (KRAS G12R)
FVVQGTRGW

SEQ ID NO: 18842 - protein, 9 aa, synthetic construct
  source 1..9: note = Seed: LVVVGARGV (KRAS G12R)
FVVQGTRGY

SEQ ID NO: 18843 - protein, 9 aa, synthetic construct
  source 1..9: note = Seed: LVVVGARGV (KRAS G12R)
FVVQGVRGA

SEQ ID NO: 18844 - protein, 9 aa, synthetic construct
  source 1..9: note = Seed: LVVVGARGV (KRAS G12R)
FVVQGVRGC

SEQ ID NO: 18845 - protein, 9 aa, synthetic construct
  source 1..9: note = Seed: LVVVGARGV (KRAS G12R)
FVVQGVRGF

SEQ ID NO: 18846 - protein, 9 aa, synthetic construct
  source 1..9: note = Seed: LVVVGARGV (KRAS G12R)
FVVQGVRGG

SEQ ID NO: 18847 - protein, 9 aa, synthetic construct
  source 1..9: note = Seed: LVVVGARGV (KRAS G12R)
FVVQGVRGH

SEQ ID NO: 18848 - protein, 9 aa, synthetic construct
  source 1..9: note = Seed: LVVVGARGV (KRAS G12R)
FVVQGVRGI

SEQ ID NO: 18849 - protein, 9 aa, synthetic construct
  source 1..9: note = Seed: LVVVGARGV (KRAS G12R)
FVVQGVRGK

SEQ ID NO: 18850 - protein, 9 aa, synthetic construct
  source 1..9: note = Seed: LVVVGARGV (KRAS G12R)
FVVQGVRGL

SEQ ID NO: 18851 - protein, 9 aa, synthetic construct
  source 1..9: note = Seed: LVVVGARGV (KRAS G12R)
FVVQGVRGM

SEQ ID NO: 18852 - protein, 9 aa, synthetic construct
  source 1..9: note = Seed: LVVVGARGV (KRAS G12R)
FVVQGVRGN

SEQ ID NO: 18853 - protein, 9 aa, synthetic construct
  source 1..9: note = Seed: LVVVGARGV (KRAS G12R)
FVVQGVRGP

SEQ ID NO: 18854 - protein, 9 aa, synthetic construct
  source 1..9: note = Seed: LVVVGARGV (KRAS G12R)
FVVQGVRGQ

SEQ ID NO: 18855 - protein, 9 aa, synthetic construct
  source 1..9: note = Seed: LVVVGARGV (KRAS G12R)
FVVQGVRGR

SEQ ID NO: 18856 - protein, 9 aa, synthetic construct
  source 1..9: note = Seed: LVVVGARGV (KRAS G12R)
FVVQGVRGS

SEQ ID NO: 18857 - protein, 9 aa, synthetic construct
  source 1..9: note = Seed: LVVVGARGV (KRAS G12R)
FVVQGVRGT

SEQ ID NO: 18858 - protein, 9 aa, synthetic construct
  source 1..9: note = Seed: LVVVGARGV (KRAS G12R)
FVVQGVRGV

SEQ ID NO: 18859 - protein, 9 aa, synthetic construct
  source 1..9: note = Seed: LVVVGARGV (KRAS G12R)
FVVQGVRGW

SEQ ID NO: 18860 - protein, 9 aa, synthetic construct
  source 1..9: note = Seed: LVVVGARGV (KRAS G12R)
FVVQGVRGY

SEQ ID NO: 18861 - protein, 9 aa, synthetic construct
  source 1..9: note = Seed: LVVVGARGV (KRAS G12R)
FVVQGWRGI

SEQ ID NO: 18862 - protein, 9 aa, synthetic construct
  source 1..9: note = Seed: LVVVGARGV (KRAS G12R)
FVVQGWRGL

SEQ ID NO: 18863 - protein, 9 aa, synthetic construct
  source 1..9: note = Seed: LVVVGARGV (KRAS G12R)
FVVQGWRGV

SEQ ID NO: 18864 - protein, 9 aa, synthetic construct
  source 1..9: note = Seed: LVVVGARGV (KRAS G12R)
FVVQGYRGL

SEQ ID NO: 18865 - protein, 9 aa, synthetic construct
  source 1..9: note = Seed: LVVVGARGV (KRAS G12R)
FVVRGARGA

SEQ ID NO: 18866 - protein, 9 aa, synthetic construct
  source 1..9: note = Seed: LVVVGARGV (KRAS G12R)
FVVRGARGF

SEQ ID NO: 18867 - protein, 9 aa, synthetic construct
  source 1..9: note = Seed: LVVVGARGV (KRAS G12R)
FVVRGARGI

SEQ ID NO: 18868 - protein, 9 aa, synthetic construct
  source 1..9: note = Seed: LVVVGARGV (KRAS G12R)
FVVRGARGL

SEQ ID NO: 18869 - protein, 9 aa, synthetic construct
  source 1..9: note = Seed: LVVVGARGV (KRAS G12R)
FVVRGARGM

SEQ ID NO: 18870 - protein, 9 aa, synthetic construct
  source 1..9: note = Seed: LVVVGARGV (KRAS G12R)
FVVRGARGQ

SEQ ID NO: 18871 - protein, 9 aa, synthetic construct
  source 1..9: note = Seed: LVVVGARGV (KRAS G12R)
FVVRGARGR

SEQ ID NO: 18872 - protein, 9 aa, synthetic construct
  source 1..9: note = Seed: LVVVGARGV (KRAS G12R)
FVVRGARGS

SEQ ID NO: 18873 - protein, 9 aa, synthetic construct
  source 1..9: note = Seed: LVVVGARGV (KRAS G12R)
FVVRGARGV

SEQ ID NO: 18874 - protein, 9 aa, synthetic construct
  source 1..9: note = Seed: LVVVGARGV (KRAS G12R)
FVVRGARGW

SEQ ID NO: 18875 - protein, 9 aa, synthetic construct
  source 1..9: note = Seed: LVVVGARGV (KRAS G12R)
FVVRGARGY

SEQ ID NO: 18876 - protein, 9 aa, synthetic construct
  source 1..9: note = Seed: LVVVGARGV (KRAS G12R)
FVVRGCRGR

SEQ ID NO: 18877 - protein, 9 aa, synthetic construct
  source 1..9: note = Seed: LVVVGARGV (KRAS G12R)
FVVRGCRGY

SEQ ID NO: 18878 - protein, 9 aa, synthetic construct
  source 1..9: note = Seed: LVVVGARGV (KRAS G12R)
FVVRGGRGI

SEQ ID NO: 18879 - protein, 9 aa, synthetic construct
  source 1..9: note = Seed: LVVVGARGV (KRAS G12R)
FVVRGGRGL

SEQ ID NO: 18880 - protein, 9 aa, synthetic construct
  source 1..9: note = Seed: LVVVGARGV (KRAS G12R)
FVVRGGRGR

SEQ ID NO: 18881 - protein, 9 aa, synthetic construct
  source 1..9: note = Seed: LVVVGARGV (KRAS G12R)
FVVRGGRGV

SEQ ID NO: 18882 - protein, 9 aa, synthetic construct
  source 1..9: note = Seed: LVVVGARGV (KRAS G12R)
FVVRGHRGA

SEQ ID NO: 18883 - protein, 9 aa, synthetic construct
  source 1..9: note = Seed: LVVVGARGV (KRAS G12R)
FVVRGHRGF

SEQ ID NO: 18884 - protein, 9 aa, synthetic construct
  source 1..9: note = Seed: LVVVGARGV (KRAS G12R)
FVVRGHRGG

SEQ ID NO: 18885 - protein, 9 aa, synthetic construct
  source 1..9: note = Seed: LVVVGARGV (KRAS G12R)
FVVRGHRGI

SEQ ID NO: 18886 - protein, 9 aa, synthetic construct
  source 1..9: note = Seed: LVVVGARGV (KRAS G12R)
FVVRGHRGL

SEQ ID NO: 18887 - protein, 9 aa, synthetic construct
  source 1..9: note = Seed: LVVVGARGV (KRAS G12R)
FVVRGHRGM

SEQ ID NO: 18888 - protein, 9 aa, synthetic construct
  source 1..9: note = Seed: LVVVGARGV (KRAS G12R)
FVVRGHRGQ

SEQ ID NO: 18889 - protein, 9 aa, synthetic construct
  source 1..9: note = Seed: LVVVGARGV (KRAS G12R)
FVVRGHRGR

SEQ ID NO: 18890 - protein, 9 aa, synthetic construct
  source 1..9: note = Seed: LVVVGARGV (KRAS G12R)
FVVRGHRGS

SEQ ID NO: 18891 - protein, 9 aa, synthetic construct
  source 1..9: note = Seed: LVVVGARGV (KRAS G12R)
FVVRGHRGV

SEQ ID NO: 18892 - protein, 9 aa, synthetic construct
  source 1..9: note = Seed: LVVVGARGV (KRAS G12R)
FVVRGHRGW

SEQ ID NO: 18893 - protein, 9 aa, synthetic construct
  source 1..9: note = Seed: LVVVGARGV (KRAS G12R)
FVVRGHRGY

SEQ ID NO: 18894 - protein, 9 aa, synthetic construct
  source 1..9: note = Seed: LVVVGARGV (KRAS G12R)
FVVRGIRGA

SEQ ID NO: 18895 - protein, 9 aa, synthetic construct
  source 1..9: note = Seed: LVVVGARGV (KRAS G12R)
FVVRGIRGF

SEQ ID NO: 18896 - protein, 9 aa, synthetic construct
  source 1..9: note = Seed: LVVVGARGV (KRAS G12R)
FVVRGIRGG

SEQ ID NO: 18897 - protein, 9 aa, synthetic construct
  source 1..9: note = Seed: LVVVGARGV (KRAS G12R)
FVVRGIRGI

SEQ ID NO: 18898 - protein, 9 aa, synthetic construct
  source 1..9: note = Seed: LVVVGARGV (KRAS G12R)
FVVRGIRGK

SEQ ID NO: 18899 - protein, 9 aa, synthetic construct
  source 1..9: note = Seed: LVVVGARGV (KRAS G12R)
FVVRGIRGL

SEQ ID NO: 18900 - protein, 9 aa, synthetic construct
  source 1..9: note = Seed: LVVVGARGV (KRAS G12R)
FVVRGIRGM

SEQ ID NO: 18901 - protein, 9 aa, synthetic construct
  source 1..9: note = Seed: LVVVGARGV (KRAS G12R)
FVVRGIRGQ

SEQ ID NO: 18902 - protein, 9 aa, synthetic construct
  source 1..9: note = Seed: LVVVGARGV (KRAS G12R)
FVVRGIRGR

SEQ ID NO: 18903 - protein, 9 aa, synthetic construct
  source 1..9: note = Seed: LVVVGARGV (KRAS G12R)
FVVRGIRGS

SEQ ID NO: 18904 - protein, 9 aa, synthetic construct
  source 1..9: note = Seed: LVVVGARGV (KRAS G12R)
FVVRGIRGV

SEQ ID NO: 18905 - protein, 9 aa, synthetic construct
  source 1..9: note = Seed: LVVVGARGV (KRAS G12R)
FVVRGIRGY

SEQ ID NO: 18906 - protein, 9 aa, synthetic construct
  source 1..9: note = Seed: LVVVGARGV (KRAS G12R)
FVVRGKRGA

SEQ ID NO: 18907 - protein, 9 aa, synthetic construct
  source 1..9: note = Seed: LVVVGARGV (KRAS G12R)
FVVRGKRGC

SEQ ID NO: 18908 - protein, 9 aa, synthetic construct
  source 1..9: note = Seed: LVVVGARGV (KRAS G12R)
FVVRGKRGF

SEQ ID NO: 18909 - protein, 9 aa, synthetic construct
  source 1..9: note = Seed: LVVVGARGV (KRAS G12R)
FVVRGKRGG

SEQ ID NO: 18910 - protein, 9 aa, synthetic construct
  source 1..9: note = Seed: LVVVGARGV (KRAS G12R)
FVVRGKRGH

SEQ ID NO: 18911 - protein, 9 aa, synthetic construct
  source 1..9: note = Seed: LVVVGARGV (KRAS G12R)
FVVRGKRGI

SEQ ID NO: 18912 - protein, 9 aa, synthetic construct
  source 1..9: note = Seed: LVVVGARGV (KRAS G12R)
FVVRGKRGK

SEQ ID NO: 18913 - protein, 9 aa, synthetic construct
  source 1..9: note = Seed: LVVVGARGV (KRAS G12R)
FVVRGKRGL

SEQ ID NO: 18914 - protein, 9 aa, synthetic construct
  source 1..9: note = Seed: LVVVGARGV (KRAS G12R)
FVVRGKRGM

SEQ ID NO: 18915 - protein, 9 aa, synthetic construct
  source 1..9: note = Seed: LVVVGARGV (KRAS G12R)
FVVRGKRGN

SEQ ID NO: 18916 - protein, 9 aa, synthetic construct
  source 1..9: note = Seed: LVVVGARGV (KRAS G12R)
FVVRGKRGP

SEQ ID NO: 18917 - protein, 9 aa, synthetic construct
  source 1..9: note = Seed: LVVVGARGV (KRAS G12R)
FVVRGKRGQ

SEQ ID NO: 18918 - protein, 9 aa, synthetic construct
  source 1..9: note = Seed: LVVVGARGV (KRAS G12R)
FVVRGKRGR

SEQ ID NO: 18919 - protein, 9 aa, synthetic construct
  source 1..9: note = Seed: LVVVGARGV (KRAS G12R)
FVVRGKRGS

SEQ ID NO: 18920 - protein, 9 aa, synthetic construct
  source 1..9: note = Seed: LVVVGARGV (KRAS G12R)
FVVRGKRGT

SEQ ID NO: 18921 - protein, 9 aa, synthetic construct
  source 1..9: note = Seed: LVVVGARGV (KRAS G12R)
FVVRGKRGV

SEQ ID NO: 18922 - protein, 9 aa, synthetic construct
  source 1..9: note = Seed: LVVVGARGV (KRAS G12R)
FVVRGKRGW

SEQ ID NO: 18923 - protein, 9 aa, synthetic construct
  source 1..9: note = Seed: LVVVGARGV (KRAS G12R)
FVVRGKRGY

SEQ ID NO: 18924 - protein, 9 aa, synthetic construct
  source 1..9: note = Seed: LVVVGARGV (KRAS G12R)
FVVRGLRGA

SEQ ID NO: 18925 - protein, 9 aa, synthetic construct
  source 1..9: note = Seed: LVVVGARGV (KRAS G12R)
FVVRGLRGC

SEQ ID NO: 18926 - protein, 9 aa, synthetic construct
  source 1..9: note = Seed: LVVVGARGV (KRAS G12R)
FVVRGLRGF

SEQ ID NO: 18927 - protein, 9 aa, synthetic construct
  source 1..9: note = Seed: LVVVGARGV (KRAS G12R)
FVVRGLRGG

SEQ ID NO: 18928 - protein, 9 aa, synthetic construct
  source 1..9: note = Seed: LVVVGARGV (KRAS G12R)
FVVRGLRGI

SEQ ID NO: 18929 - protein, 9 aa, synthetic construct
  source 1..9: note = Seed: LVVVGARGV (KRAS G12R)
FVVRGLRGK

SEQ ID NO: 18930 - protein, 9 aa, synthetic construct
  source 1..9: note = Seed: LVVVGARGV (KRAS G12R)
FVVRGLRGL

SEQ ID NO: 18931 - protein, 9 aa, synthetic construct
  source 1..9: note = Seed: LVVVGARGV (KRAS G12R)
FVVRGLRGM

SEQ ID NO: 18932 - protein, 9 aa, synthetic construct
  source 1..9: note = Seed: LVVVGARGV (KRAS G12R)
FVVRGLRGR

SEQ ID NO: 18933 - protein, 9 aa, synthetic construct
  source 1..9: note = Seed: LVVVGARGV (KRAS G12R)
FVVRGLRGV

SEQ ID NO: 18934 - protein, 9 aa, synthetic construct
  source 1..9: note = Seed: LVVVGARGV (KRAS G12R)
FVVRGLRGY

SEQ ID NO: 18935 - protein, 9 aa, synthetic construct
  source 1..9: note = Seed: LVVVGARGV (KRAS G12R)
FVVRGMRGC

SEQ ID NO: 18936 - protein, 9 aa, synthetic construct
  source 1..9: note = Seed: LVVVGARGV (KRAS G12R)
FVVRGMRGF

SEQ ID NO: 18937 - protein, 9 aa, synthetic construct
  source 1..9: note = Seed: LVVVGARGV (KRAS G12R)
FVVRGMRGI

SEQ ID NO: 18938 - protein, 9 aa, synthetic construct
  source 1..9: note = Seed: LVVVGARGV (KRAS G12R)
FVVRGMRGL

SEQ ID NO: 18939 - protein, 9 aa, synthetic construct
  source 1..9: note = Seed: LVVVGARGV (KRAS G12R)
FVVRGMRGM

SEQ ID NO: 18940 - protein, 9 aa, synthetic construct
  source 1..9: note = Seed: LVVVGARGV (KRAS G12R)
FVVRGMRGR

SEQ ID NO: 18941 - protein, 9 aa, synthetic construct
  source 1..9: note = Seed: LVVVGARGV (KRAS G12R)
FVVRGMRGV

SEQ ID NO: 18942 - protein, 9 aa, synthetic construct
  source 1..9: note = Seed: LVVVGARGV (KRAS G12R)
FVVRGMRGY

SEQ ID NO: 18943 - protein, 9 aa, synthetic construct
  source 1..9: note = Seed: LVVVGARGV (KRAS G12R)
FVVRGNRGA

SEQ ID NO: 18944 - protein, 9 aa, synthetic construct
  source 1..9: note = Seed: LVVVGARGV (KRAS G12R)
FVVRGNRGF

SEQ ID NO: 18945 - protein, 9 aa, synthetic construct
  source 1..9: note = Seed: LVVVGARGV (KRAS G12R)
FVVRGNRGH

SEQ ID NO: 18946 - protein, 9 aa, synthetic construct
  source 1..9: note = Seed: LVVVGARGV (KRAS G12R)
FVVRGNRGI

SEQ ID NO: 18947 - protein, 9 aa, synthetic construct
  source 1..9: note = Seed: LVVVGARGV (KRAS G12R)
FVVRGNRGL

SEQ ID NO: 18948 - protein, 9 aa, synthetic construct
  source 1..9: note = Seed: LVVVGARGV (KRAS G12R)
FVVRGNRGM

SEQ ID NO: 18949 - protein, 9 aa, synthetic construct
  source 1..9: note = Seed: LVVVGARGV (KRAS G12R)
FVVRGNRGR

SEQ ID NO: 18950 - protein, 9 aa, synthetic construct
  source 1..9: note = Seed: LVVVGARGV (KRAS G12R)
FVVRGNRGV

SEQ ID NO: 18951 - protein, 9 aa, synthetic construct
  source 1..9: note = Seed: LVVVGARGV (KRAS G12R)
FVVRGNRGY

SEQ ID NO: 18952 - protein, 9 aa, synthetic construct
  source 1..9: note = Seed: LVVVGARGV (KRAS G12R)
FVVRGPRGY

SEQ ID NO: 18953 - protein, 9 aa, synthetic construct
  source 1..9: note = Seed: LVVVGARGV (KRAS G12R)
FVVRGQRGA

SEQ ID NO: 18954 - protein, 9 aa, synthetic construct
  source 1..9: note = Seed: LVVVGARGV (KRAS G12R)
FVVRGQRGF

SEQ ID NO: 18955 - protein, 9 aa, synthetic construct
  source 1..9: note = Seed: LVVVGARGV (KRAS G12R)
FVVRGQRGI

SEQ ID NO: 18956 - protein, 9 aa, synthetic construct
  source 1..9: note = Seed: LVVVGARGV (KRAS G12R)
FVVRGQRGL

SEQ ID NO: 18957 - protein, 9 aa, synthetic construct
  source 1..9: note = Seed: LVVVGARGV (KRAS G12R)
FVVRGQRGM

SEQ ID NO: 18958 - protein, 9 aa, synthetic construct
  source 1..9: note = Seed: LVVVGARGV (KRAS G12R)
FVVRGQRGR

SEQ ID NO: 18959 - protein, 9 aa, synthetic construct
  source 1..9: note = Seed: LVVVGARGV (KRAS G12R)
FVVRGQRGV

SEQ ID NO: 18960 - protein, 9 aa, synthetic construct
  source 1..9: note = Seed: LVVVGARGV (KRAS G12R)
FVVRGQRGY

SEQ ID NO: 18961 - protein, 9 aa, synthetic construct
  source 1..9: note = Seed: LVVVGARGV (KRAS G12R)
FVVRGRRGA

SEQ ID NO: 18962 - protein, 9 aa, synthetic construct
  source 1..9: note = Seed: LVVVGARGV (KRAS G12R)
FVVRGRRGC

SEQ ID NO: 18963 - protein, 9 aa, synthetic construct
  source 1..9: note = Seed: LVVVGARGV (KRAS G12R)
FVVRGRRGD

SEQ ID NO: 18964 - protein, 9 aa, synthetic construct
  source 1..9: note = Seed: LVVVGARGV (KRAS G12R)
FVVRGRRGE

SEQ ID NO: 18965 - protein, 9 aa, synthetic construct
  source 1..9: note = Seed: LVVVGARGV (KRAS G12R)
FVVRGRRGF

SEQ ID NO: 18966 - protein, 9 aa, synthetic construct
  source 1..9: note = Seed: LVVVGARGV (KRAS G12R)
FVVRGRRGG

SEQ ID NO: 18967 - protein, 9 aa, synthetic construct
  source 1..9: note = Seed: LVVVGARGV (KRAS G12R)
FVVRGRRGH

SEQ ID NO: 18968 - protein, 9 aa, synthetic construct
  source 1..9: note = Seed: LVVVGARGV (KRAS G12R)
FVVRGRRGI

SEQ ID NO: 18969 - protein, 9 aa, synthetic construct
  source 1..9: note = Seed: LVVVGARGV (KRAS G12R)
FVVRGRRGK

SEQ ID NO: 18970 - protein, 9 aa, synthetic construct
  source 1..9: note = Seed: LVVVGARGV (KRAS G12R)
FVVRGRRGL

SEQ ID NO: 18971 - protein, 9 aa, synthetic construct
  source 1..9: note = Seed: LVVVGARGV (KRAS G12R)
FVVRGRRGM

SEQ ID NO: 18972 - protein, 9 aa, synthetic construct
  source 1..9: note = Seed: LVVVGARGV (KRAS G12R)
FVVRGRRGN

SEQ ID NO: 18973 - protein, 9 aa, synthetic construct
  source 1..9: note = Seed: LVVVGARGV (KRAS G12R)
FVVRGRRGP

SEQ ID NO: 18974 - protein, 9 aa, synthetic construct
  source 1..9: note = Seed: LVVVGARGV (KRAS G12R)
FVVRGRRGQ

SEQ ID NO: 18975 - protein, 9 aa, synthetic construct
  source 1..9: note = Seed: LVVVGARGV (KRAS G12R)
FVVRGRRGR

SEQ ID NO: 18976 - protein, 9 aa, synthetic construct
  source 1..9: note = Seed: LVVVGARGV (KRAS G12R)
FVVRGRRGS

SEQ ID NO: 18977 - protein, 9 aa, synthetic construct
  source 1..9: note = Seed: LVVVGARGV (KRAS G12R)
FVVRGRRGT

SEQ ID NO: 18978 - protein, 9 aa, synthetic construct
  source 1..9: note = Seed: LVVVGARGV (KRAS G12R)
FVVRGRRGV

SEQ ID NO: 18979 - protein, 9 aa, synthetic construct
  source 1..9: note = Seed: LVVVGARGV (KRAS G12R)
FVVRGRRGW

SEQ ID NO: 18980 - protein, 9 aa, synthetic construct
  source 1..9: note = Seed: LVVVGARGV (KRAS G12R)
FVVRGRRGY

SEQ ID NO: 18981 - protein, 9 aa, synthetic construct
  source 1..9: note = Seed: LVVVGARGV (KRAS G12R)
FVVRGSRGA

SEQ ID NO: 18982 - protein, 9 aa, synthetic construct
  source 1..9: note = Seed: LVVVGARGV (KRAS G12R)
FVVRGSRGF

SEQ ID NO: 18983 - protein, 9 aa, synthetic construct
  source 1..9: note = Seed: LVVVGARGV (KRAS G12R)
FVVRGSRGI

SEQ ID NO: 18984 - protein, 9 aa, synthetic construct
  source 1..9: note = Seed: LVVVGARGV (KRAS G12R)
FVVRGSRGL

SEQ ID NO: 18985 - protein, 9 aa, synthetic construct
  source 1..9: note = Seed: LVVVGARGV (KRAS G12R)
FVVRGSRGM

SEQ ID NO: 18986 - protein, 9 aa, synthetic construct
  source 1..9: note = Seed: LVVVGARGV (KRAS G12R)
FVVRGSRGQ

SEQ ID NO: 18987 - protein, 9 aa, synthetic construct
  source 1..9: note = Seed: LVVVGARGV (KRAS G12R)
FVVRGSRGR

SEQ ID NO: 18988 - protein, 9 aa, synthetic construct
  source 1..9: note = Seed: LVVVGARGV (KRAS G12R)
FVVRGSRGS

SEQ ID NO: 18989 - protein, 9 aa, synthetic construct
  source 1..9: note = Seed: LVVVGARGV (KRAS G12R)
FVVRGSRGV

SEQ ID NO: 18990 - protein, 9 aa, synthetic construct
  source 1..9: note = Seed: LVVVGARGV (KRAS G12R)
FVVRGSRGY

SEQ ID NO: 18991 - protein, 9 aa, synthetic construct
  source 1..9: note = Seed: LVVVGARGV (KRAS G12R)
FVVRGTRGA

SEQ ID NO: 18992 - protein, 9 aa, synthetic construct
  source 1..9: note = Seed: LVVVGARGV (KRAS G12R)
FVVRGTRGF

SEQ ID NO: 18993 - protein, 9 aa, synthetic construct
  source 1..9: note = Seed: LVVVGARGV (KRAS G12R)
FVVRGTRGI

SEQ ID NO: 18994 - protein, 9 aa, synthetic construct
  source 1..9: note = Seed: LVVVGARGV (KRAS G12R)
FVVRGTRGL

SEQ ID NO: 18995 - protein, 9 aa, synthetic construct
  source 1..9: note = Seed: LVVVGARGV (KRAS G12R)
FVVRGTRGM

SEQ ID NO: 18996 - protein, 9 aa, synthetic construct
  source 1..9: note = Seed: LVVVGARGV (KRAS G12R)
FVVRGTRGQ

SEQ ID NO: 18997 - protein, 9 aa, synthetic construct
  source 1..9: note = Seed: LVVVGARGV (KRAS G12R)
FVVRGTRGR

SEQ ID NO: 18998 - protein, 9 aa, synthetic construct
  source 1..9: note = Seed: LVVVGARGV (KRAS G12R)
FVVRGTRGS

SEQ ID NO: 18999 - protein, 9 aa, synthetic construct
  source 1..9: note = Seed: LVVVGARGV (KRAS G12R)
FVVRGTRGV

SEQ ID NO: 19000 - protein, 9 aa, synthetic construct
  source 1..9: note = Seed: LVVVGARGV (KRAS G12R)
FVVRGTRGW

SEQ ID NO: 19001 - protein, 9 aa, synthetic construct
  source 1..9: note = Seed: LVVVGARGV (KRAS G12R)
FVVRGTRGY

SEQ ID NO: 19002 - protein, 9 aa, synthetic construct
  source 1..9: note = Seed: LVVVGARGV (KRAS G12R)
FVVRGVRGA

SEQ ID NO: 19003 - protein, 9 aa, synthetic construct
  source 1..9: note = Seed: LVVVGARGV (KRAS G12R)
FVVRGVRGF

SEQ ID NO: 19004 - protein, 9 aa, synthetic construct
  source 1..9: note = Seed: LVVVGARGV (KRAS G12R)
FVVRGVRGG

SEQ ID NO: 19005 - protein, 9 aa, synthetic construct
  source 1..9: note = Seed: LVVVGARGV (KRAS G12R)
FVVRGVRGI

SEQ ID NO: 19006 - protein, 9 aa, synthetic construct
  source 1..9: note = Seed: LVVVGARGV (KRAS G12R)
FVVRGVRGL

SEQ ID NO: 19007 - protein, 9 aa, synthetic construct
  source 1..9: note = Seed: LVVVGARGV (KRAS G12R)
FVVRGVRGM

SEQ ID NO: 19008 - protein, 9 aa, synthetic construct
  source 1..9: note = Seed: LVVVGARGV (KRAS G12R)
FVVRGVRGQ

SEQ ID NO: 19009 - protein, 9 aa, synthetic construct
  source 1..9: note = Seed: LVVVGARGV (KRAS G12R)
FVVRGVRGR

SEQ ID NO: 19010 - protein, 9 aa, synthetic construct
  source 1..9: note = Seed: LVVVGARGV (KRAS G12R)
FVVRGVRGS

SEQ ID NO: 19011 - protein, 9 aa, synthetic construct
  source 1..9: note = Seed: LVVVGARGV (KRAS G12R)
FVVRGVRGV

SEQ ID NO: 19012 - protein, 9 aa, synthetic construct
  source 1..9: note = Seed: LVVVGARGV (KRAS G12R)
FVVRGVRGW

SEQ ID NO: 19013 - protein, 9 aa, synthetic construct
  source 1..9: note = Seed: LVVVGARGV (KRAS G12R)
FVVRGVRGY

SEQ ID NO: 19014 - protein, 9 aa, synthetic construct
  source 1..9: note = Seed: LVVVGARGV (KRAS G12R)
FVVSGARGA

SEQ ID NO: 19015 - protein, 9 aa, synthetic construct
  source 1..9: note = Seed: LVVVGARGV (KRAS G12R)
FVVSGARGC

SEQ ID NO: 19016 - protein, 9 aa, synthetic construct
  source 1..9: note = Seed: LVVVGARGV (KRAS G12R)
FVVSGARGD

SEQ ID NO: 19017 - protein, 9 aa, synthetic construct
  source 1..9: note = Seed: LVVVGARGV (KRAS G12R)
FVVSGARGE

SEQ ID NO: 19018 - protein, 9 aa, synthetic construct
  source 1..9: note = Seed: LVVVGARGV (KRAS G12R)
FVVSGARGF

SEQ ID NO: 19019 - protein, 9 aa, synthetic construct
  source 1..9: note = Seed: LVVVGARGV (KRAS G12R)
FVVSGARGG

SEQ ID NO: 19020 - protein, 9 aa, synthetic construct
  source 1..9: note = Seed: LVVVGARGV (KRAS G12R)
FVVSGARGH

SEQ ID NO: 19021 - protein, 9 aa, synthetic construct
  source 1..9: note = Seed: LVVVGARGV (KRAS G12R)
FVVSGARGI

SEQ ID NO: 19022 - protein, 9 aa, synthetic construct
  source 1..9: note = Seed: LVVVGARGV (KRAS G12R)
FVVSGARGK

SEQ ID NO: 19023 - protein, 9 aa, synthetic construct
  source 1..9: note = Seed: LVVVGARGV (KRAS G12R)
FVVSGARGL

SEQ ID NO: 19024 - protein, 9 aa, synthetic construct
  source 1..9: note = Seed: LVVVGARGV (KRAS G12R)
FVVSGARGM

SEQ ID NO: 19025 - protein, 9 aa, synthetic construct
  source 1..9: note = Seed: LVVVGARGV (KRAS G12R)
FVVSGARGN

SEQ ID NO: 19026 - protein, 9 aa, synthetic construct
  source 1..9: note = Seed: LVVVGARGV (KRAS G12R)
FVVSGARGP

SEQ ID NO: 19027 - protein, 9 aa, synthetic construct
  source 1..9: note = Seed: LVVVGARGV (KRAS G12R)
FVVSGARGQ

SEQ ID NO: 19028 - protein, 9 aa, synthetic construct
  source 1..9: note = Seed: LVVVGARGV (KRAS G12R)
FVVSGARGR

SEQ ID NO: 19029 - protein, 9 aa, synthetic construct
  source 1..9: note = Seed: LVVVGARGV (KRAS G12R)
FVVSGARGS

SEQ ID NO: 19030 - protein, 9 aa, synthetic construct
  source 1..9: note = Seed: LVVVGARGV (KRAS G12R)
FVVSGARGT

SEQ ID NO: 19031 - protein, 9 aa, synthetic construct
  source 1..9: note = Seed: LVVVGARGV (KRAS G12R)
FVVSGARGV

SEQ ID NO: 19032 - protein, 9 aa, synthetic construct
  source 1..9: note = Seed: LVVVGARGV (KRAS G12R)
FVVSGARGW

SEQ ID NO: 19033 - protein, 9 aa, synthetic construct
  source 1..9: note = Seed: LVVVGARGV (KRAS G12R)
FVVSGARGY

SEQ ID NO: 19034 - protein, 9 aa, synthetic construct
  source 1..9: note = Seed: LVVVGARGV (KRAS G12R)
FVVSGCRGA

SEQ ID NO: 19035 - protein, 9 aa, synthetic construct
  source 1..9: note = Seed: LVVVGARGV (KRAS G12R)
FVVSGCRGF

SEQ ID NO: 19036 - protein, 9 aa, synthetic construct
  source 1..9: note = Seed: LVVVGARGV (KRAS G12R)
FVVSGCRGI

SEQ ID NO: 19037 - protein, 9 aa, synthetic construct
  source 1..9: note = Seed: LVVVGARGV (KRAS G12R)
FVVSGCRGL

SEQ ID NO: 19038 - protein, 9 aa, synthetic construct
  source 1..9: note = Seed: LVVVGARGV (KRAS G12R)
FVVSGCRGM

SEQ ID NO: 19039 - protein, 9 aa, synthetic construct
  source 1..9: note = Seed: LVVVGARGV (KRAS G12R)
FVVSGCRGV

SEQ ID NO: 19040 - protein, 9 aa, synthetic construct
  source 1..9: note = Seed: LVVVGARGV (KRAS G12R)
FVVSGDRGI

SEQ ID NO: 19041 - protein, 9 aa, synthetic construct
  source 1..9: note = Seed: LVVVGARGV (KRAS G12R)
FVVSGDRGL

SEQ ID NO: 19042 - protein, 9 aa, synthetic construct
  source 1..9: note = Seed: LVVVGARGV (KRAS G12R)
FVVSGDRGV

SEQ ID NO: 19043 - protein, 9 aa, synthetic construct
  source 1..9: note = Seed: LVVVGARGV (KRAS G12R)
FVVSGERGI

SEQ ID NO: 19044 - protein, 9 aa, synthetic construct
  source 1..9: note = Seed: LVVVGARGV (KRAS G12R)
FVVSGERGL

SEQ ID NO: 19045 - protein, 9 aa, synthetic construct
  source 1..9: note = Seed: LVVVGARGV (KRAS G12R)
FVVSGERGV

SEQ ID NO: 19046 - protein, 9 aa, synthetic construct
  source 1..9: note = Seed: LVVVGARGV (KRAS G12R)
FVVSGFRGA

SEQ ID NO: 19047 - protein, 9 aa, synthetic construct
  source 1..9: note = Seed: LVVVGARGV (KRAS G12R)
FVVSGFRGD

SEQ ID NO: 19048 - protein, 9 aa, synthetic construct
  source 1..9: note = Seed: LVVVGARGV (KRAS G12R)
FVVSGFRGE

SEQ ID NO: 19049 - protein, 9 aa, synthetic construct
  source 1..9: note = Seed: LVVVGARGV (KRAS G12R)
FVVSGFRGF

SEQ ID NO: 19050 - protein, 9 aa, synthetic construct
  source 1..9: note = Seed: LVVVGARGV (KRAS G12R)
FVVSGFRGI

SEQ ID NO: 19051 - protein, 9 aa, synthetic construct
  source 1..9: note = Seed: LVVVGARGV (KRAS G12R)
FVVSGFRGL

SEQ ID NO: 19052 - protein, 9 aa, synthetic construct
  source 1..9: note = Seed: LVVVGARGV (KRAS G12R)
FVVSGFRGM

SEQ ID NO: 19053 - protein, 9 aa, synthetic construct
  source 1..9: note = Seed: LVVVGARGV (KRAS G12R)
FVVSGFRGN

SEQ ID NO: 19054 - protein, 9 aa, synthetic construct
  source 1..9: note = Seed: LVVVGARGV (KRAS G12R)
FVVSGFRGS

SEQ ID NO: 19055 - protein, 9 aa, synthetic construct
  source 1..9: note = Seed: LVVVGARGV (KRAS G12R)
FVVSGFRGT

SEQ ID NO: 19056 - protein, 9 aa, synthetic construct
  source 1..9: note = Seed: LVVVGARGV (KRAS G12R)
FVVSGFRGV

SEQ ID NO: 19057 - protein, 9 aa, synthetic construct
  source 1..9: note = Seed: LVVVGARGV (KRAS G12R)
FVVSGFRGY

SEQ ID NO: 19058 - protein, 9 aa, synthetic construct
  source 1..9: note = Seed: LVVVGARGV (KRAS G12R)
FVVSGGRGA

SEQ ID NO: 19059 - protein, 9 aa, synthetic construct
  source 1..9: note = Seed: LVVVGARGV (KRAS G12R)
FVVSGGRGC

SEQ ID NO: 19060 - protein, 9 aa, synthetic construct
  source 1..9: note = Seed: LVVVGARGV (KRAS G12R)
FVVSGGRGF

SEQ ID NO: 19061 - protein, 9 aa, synthetic construct
  source 1..9: note = Seed: LVVVGARGV (KRAS G12R)
FVVSGGRGG

SEQ ID NO: 19062 - protein, 9 aa, synthetic construct
  source 1..9: note = Seed: LVVVGARGV (KRAS G12R)
FVVSGGRGH

SEQ ID NO: 19063 - protein, 9 aa, synthetic construct
  source 1..9: note = Seed: LVVVGARGV (KRAS G12R)
FVVSGGRGI

SEQ ID NO: 19064 - protein, 9 aa, synthetic construct
  source 1..9: note = Seed: LVVVGARGV (KRAS G12R)
FVVSGGRGL

SEQ ID NO: 19065 - protein, 9 aa, synthetic construct
  source 1..9: note = Seed: LVVVGARGV (KRAS G12R)
FVVSGGRGM

SEQ ID NO: 19066 - protein, 9 aa, synthetic construct
  source 1..9: note = Seed: LVVVGARGV (KRAS G12R)
FVVSGGRGN

SEQ ID NO: 19067 - protein, 9 aa, synthetic construct
  source 1..9: note = Seed: LVVVGARGV (KRAS G12R)
FVVSGGRGP

SEQ ID NO: 19068 - protein, 9 aa, synthetic construct
  source 1..9: note = Seed: LVVVGARGV (KRAS G12R)
FVVSGGRGQ

SEQ ID NO: 19069 - protein, 9 aa, synthetic construct
  source 1..9: note = Seed: LVVVGARGV (KRAS G12R)
FVVSGGRGS

SEQ ID NO: 19070 - protein, 9 aa, synthetic construct
  source 1..9: note = Seed: LVVVGARGV (KRAS G12R)
FVVSGGRGT

SEQ ID NO: 19071 - protein, 9 aa, synthetic construct
  source 1..9: note = Seed: LVVVGARGV (KRAS G12R)
FVVSGGRGV

SEQ ID NO: 19072 - protein, 9 aa, synthetic construct
  source 1..9: note = Seed: LVVVGARGV (KRAS G12R)
FVVSGGRGW

SEQ ID NO: 19073 - protein, 9 aa, synthetic construct
  source 1..9: note = Seed: LVVVGARGV (KRAS G12R)
FVVSGGRGY

SEQ ID NO: 19074 - protein, 9 aa, synthetic construct
  source 1..9: note = Seed: LVVVGARGV (KRAS G12R)
FVVSGHRGA

SEQ ID NO: 19075 - protein, 9 aa, synthetic construct
  source 1..9: note = Seed: LVVVGARGV (KRAS G12R)
FVVSGHRGF

SEQ ID NO: 19076 - protein, 9 aa, synthetic construct
  source 1..9: note = Seed: LVVVGARGV (KRAS G12R)
FVVSGHRGI

SEQ ID NO: 19077 - protein, 9 aa, synthetic construct
  source 1..9: note = Seed: LVVVGARGV (KRAS G12R)
FVVSGHRGL

SEQ ID NO: 19078 - protein, 9 aa, synthetic construct
  source 1..9: note = Seed: LVVVGARGV (KRAS G12R)
FVVSGHRGM

SEQ ID NO: 19079 - protein, 9 aa, synthetic construct
  source 1..9: note = Seed: LVVVGARGV (KRAS G12R)
FVVSGHRGR

SEQ ID NO: 19080 - protein, 9 aa, synthetic construct
  source 1..9: note = Seed: LVVVGARGV (KRAS G12R)
FVVSGHRGV

SEQ ID NO: 19081 - protein, 9 aa, synthetic construct
  source 1..9: note = Seed: LVVVGARGV (KRAS G12R)
FVVSGHRGY

SEQ ID NO: 19082 - protein, 9 aa, synthetic construct
  source 1..9: note = Seed: LVVVGARGV (KRAS G12R)
FVVSGIRGA

SEQ ID NO: 19083 - protein, 9 aa, synthetic construct
  source 1..9: note = Seed: LVVVGARGV (KRAS G12R)
FVVSGIRGF

SEQ ID NO: 19084 - protein, 9 aa, synthetic construct
  source 1..9: note = Seed: LVVVGARGV (KRAS G12R)
FVVSGIRGG

SEQ ID NO: 19085 - protein, 9 aa, synthetic construct
  source 1..9: note = Seed: LVVVGARGV (KRAS G12R)
FVVSGIRGH

SEQ ID NO: 19086 - protein, 9 aa, synthetic construct
  source 1..9: note = Seed: LVVVGARGV (KRAS G12R)
FVVSGIRGI

SEQ ID NO: 19087 - protein, 9 aa, synthetic construct
  source 1..9: note = Seed: LVVVGARGV (KRAS G12R)
FVVSGIRGL

SEQ ID NO: 19088 - protein, 9 aa, synthetic construct
  source 1..9: note = Seed: LVVVGARGV (KRAS G12R)
FVVSGIRGM

SEQ ID NO: 19089 - protein, 9 aa, synthetic construct
  source 1..9: note = Seed: LVVVGARGV (KRAS G12R)
FVVSGIRGN

SEQ ID NO: 19090 - protein, 9 aa, synthetic construct
  source 1..9: note = Seed: LVVVGARGV (KRAS G12R)
FVVSGIRGR

SEQ ID NO: 19091 - protein, 9 aa, synthetic construct
  source 1..9: note = Seed: LVVVGARGV (KRAS G12R)
FVVSGIRGS

SEQ ID NO: 19092 - protein, 9 aa, synthetic construct
  source 1..9: note = Seed: LVVVGARGV (KRAS G12R)
FVVSGIRGT

SEQ ID NO: 19093 - protein, 9 aa, synthetic construct
  source 1..9: note = Seed: LVVVGARGV (KRAS G12R)
FVVSGIRGV

SEQ ID NO: 19094 - protein, 9 aa, synthetic construct
  source 1..9: note = Seed: LVVVGARGV (KRAS G12R)
FVVSGIRGY

SEQ ID NO: 19095 - protein, 9 aa, synthetic construct
  source 1..9: note = Seed: LVVVGARGV (KRAS G12R)
FVVSGKRGA

SEQ ID NO: 19096 - protein, 9 aa, synthetic construct
  source 1..9: note = Seed: LVVVGARGV (KRAS G12R)
FVVSGKRGF

SEQ ID NO: 19097 - protein, 9 aa, synthetic construct
  source 1..9: note = Seed: LVVVGARGV (KRAS G12R)
FVVSGKRGG

SEQ ID NO: 19098 - protein, 9 aa, synthetic construct
  source 1..9: note = Seed: LVVVGARGV (KRAS G12R)
FVVSGKRGH

SEQ ID NO: 19099 - protein, 9 aa, synthetic construct
  source 1..9: note = Seed: LVVVGARGV (KRAS G12R)
FVVSGKRGI

SEQ ID NO: 19100 - protein, 9 aa, synthetic construct
  source 1..9: note = Seed: LVVVGARGV (KRAS G12R)
FVVSGKRGK

SEQ ID NO: 19101 - protein, 9 aa, synthetic construct
  source 1..9: note = Seed: LVVVGARGV (KRAS G12R)
FVVSGKRGL

SEQ ID NO: 19102 - protein, 9 aa, synthetic construct
  source 1..9: note = Seed: LVVVGARGV (KRAS G12R)
FVVSGKRGM

SEQ ID NO: 19103 - protein, 9 aa, synthetic construct
  source 1..9: note = Seed: LVVVGARGV (KRAS G12R)
FVVSGKRGN

SEQ ID NO: 19104 - protein, 9 aa, synthetic construct
  source 1..9: note = Seed: LVVVGARGV (KRAS G12R)
FVVSGKRGQ

SEQ ID NO: 19105 - protein, 9 aa, synthetic construct
  source 1..9: note = Seed: LVVVGARGV (KRAS G12R)
FVVSGKRGR

SEQ ID NO: 19106 - protein, 9 aa, synthetic construct
  source 1..9: note = Seed: LVVVGARGV (KRAS G12R)
FVVSGKRGS

SEQ ID NO: 19107 - protein, 9 aa, synthetic construct
  source 1..9: note = Seed: LVVVGARGV (KRAS G12R)
FVVSGKRGT

SEQ ID NO: 19108 - protein, 9 aa, synthetic construct
  source 1..9: note = Seed: LVVVGARGV (KRAS G12R)
FVVSGKRGV

SEQ ID NO: 19109 - protein, 9 aa, synthetic construct
  source 1..9: note = Seed: LVVVGARGV (KRAS G12R)
FVVSGKRGW

SEQ ID NO: 19110 - protein, 9 aa, synthetic construct
  source 1..9: note = Seed: LVVVGARGV (KRAS G12R)
FVVSGKRGY

SEQ ID NO: 19111 - protein, 9 aa, synthetic construct
  source 1..9: note = Seed: LVVVGARGV (KRAS G12R)
FVVSGLRGA

SEQ ID NO: 19112 - protein, 9 aa, synthetic construct
  source 1..9: note = Seed: LVVVGARGV (KRAS G12R)
FVVSGLRGF

SEQ ID NO: 19113 - protein, 9 aa, synthetic construct
  source 1..9: note = Seed: LVVVGARGV (KRAS G12R)
FVVSGLRGI

SEQ ID NO: 19114 - protein, 9 aa, synthetic construct
  source 1..9: note = Seed: LVVVGARGV (KRAS G12R)
FVVSGLRGL

SEQ ID NO: 19115 - protein, 9 aa, synthetic construct
  source 1..9: note = Seed: LVVVGARGV (KRAS G12R)
FVVSGLRGM

SEQ ID NO: 19116 - protein, 9 aa, synthetic construct
  source 1..9: note = Seed: LVVVGARGV (KRAS G12R)
FVVSGLRGN

SEQ ID NO: 19117 - protein, 9 aa, synthetic construct
  source 1..9: note = Seed: LVVVGARGV (KRAS G12R)
FVVSGLRGR

SEQ ID NO: 19118 - protein, 9 aa, synthetic construct
  source 1..9: note = Seed: LVVVGARGV (KRAS G12R)
FVVSGLRGS

SEQ ID NO: 19119 - protein, 9 aa, synthetic construct
  source 1..9: note = Seed: LVVVGARGV (KRAS G12R)
FVVSGLRGT

SEQ ID NO: 19120 - protein, 9 aa, synthetic construct
  source 1..9: note = Seed: LVVVGARGV (KRAS G12R)
FVVSGLRGV

SEQ ID NO: 19121 - protein, 9 aa, synthetic construct
  source 1..9: note = Seed: LVVVGARGV (KRAS G12R)
FVVSGLRGY

SEQ ID NO: 19122 - protein, 9 aa, synthetic construct
  source 1..9: note = Seed: LVVVGARGV (KRAS G12R)
FVVSGMRGA

SEQ ID NO: 19123 - protein, 9 aa, synthetic construct
  source 1..9: note = Seed: LVVVGARGV (KRAS G12R)
FVVSGMRGF

SEQ ID NO: 19124 - protein, 9 aa, synthetic construct
  source 1..9: note = Seed: LVVVGARGV (KRAS G12R)
FVVSGMRGI

SEQ ID NO: 19125 - protein, 9 aa, synthetic construct
  source 1..9: note = Seed: LVVVGARGV (KRAS G12R)
FVVSGMRGL

SEQ ID NO: 19126 - protein, 9 aa, synthetic construct
  source 1..9: note = Seed: LVVVGARGV (KRAS G12R)
FVVSGMRGM

SEQ ID NO: 19127 - protein, 9 aa, synthetic construct
  source 1..9: note = Seed: LVVVGARGV (KRAS G12R)
FVVSGMRGN

SEQ ID NO: 19128 - protein, 9 aa, synthetic construct
  source 1..9: note = Seed: LVVVGARGV (KRAS G12R)
FVVSGMRGR

SEQ ID NO: 19129 - protein, 9 aa, synthetic construct
  source 1..9: note = Seed: LVVVGARGV (KRAS G12R)
FVVSGMRGS

SEQ ID NO: 19130 - protein, 9 aa, synthetic construct
  source 1..9: note = Seed: LVVVGARGV (KRAS G12R)
FVVSGMRGT

SEQ ID NO: 19131 - protein, 9 aa, synthetic construct
  source 1..9: note = Seed: LVVVGARGV (KRAS G12R)
FVVSGMRGV

SEQ ID NO: 19132 - protein, 9 aa, synthetic construct
  source 1..9: note = Seed: LVVVGARGV (KRAS G12R)
FVVSGMRGY

SEQ ID NO: 19133 - protein, 9 aa, synthetic construct
  source 1..9: note = Seed: LVVVGARGV (KRAS G12R)
FVVSGNRGA

SEQ ID NO: 19134 - protein, 9 aa, synthetic construct
  source 1..9: note = Seed: LVVVGARGV (KRAS G12R)
FVVSGNRGC

SEQ ID NO: 19135 - protein, 9 aa, synthetic construct
  source 1..9: note = Seed: LVVVGARGV (KRAS G12R)
FVVSGNRGF

SEQ ID NO: 19136 - protein, 9 aa, synthetic construct
  source 1..9: note = Seed: LVVVGARGV (KRAS G12R)
FVVSGNRGG

SEQ ID NO: 19137 - protein, 9 aa, synthetic construct
  source 1..9: note = Seed: LVVVGARGV (KRAS G12R)
FVVSGNRGH

SEQ ID NO: 19138 - protein, 9 aa, synthetic construct
  source 1..9: note = Seed: LVVVGARGV (KRAS G12R)
FVVSGNRGI

SEQ ID NO: 19139 - protein, 9 aa, synthetic construct
  source 1..9: note = Seed: LVVVGARGV (KRAS G12R)
FVVSGNRGL

SEQ ID NO: 19140 - protein, 9 aa, synthetic construct
  source 1..9: note = Seed: LVVVGARGV (KRAS G12R)
FVVSGNRGM

SEQ ID NO: 19141 - protein, 9 aa, synthetic construct
  source 1..9: note = Seed: LVVVGARGV (KRAS G12R)
FVVSGNRGN

SEQ ID NO: 19142 - protein, 9 aa, synthetic construct
  source 1..9: note = Seed: LVVVGARGV (KRAS G12R)
FVVSGNRGQ

SEQ ID NO: 19143 - protein, 9 aa, synthetic construct
  source 1..9: note = Seed: LVVVGARGV (KRAS G12R)
FVVSGNRGR

SEQ ID NO: 19144 - protein, 9 aa, synthetic construct
  source 1..9: note = Seed: LVVVGARGV (KRAS G12R)
FVVSGNRGS

SEQ ID NO: 19145 - protein, 9 aa, synthetic construct
  source 1..9: note = Seed: LVVVGARGV (KRAS G12R)
FVVSGNRGT

SEQ ID NO: 19146 - protein, 9 aa, synthetic construct
  source 1..9: note = Seed: LVVVGARGV (KRAS G12R)
FVVSGNRGV

SEQ ID NO: 19147 - protein, 9 aa, synthetic construct
  source 1..9: note = Seed: LVVVGARGV (KRAS G12R)
FVVSGNRGW

SEQ ID NO: 19148 - protein, 9 aa, synthetic construct
  source 1..9: note = Seed: LVVVGARGV (KRAS G12R)
FVVSGNRGY

SEQ ID NO: 19149 - protein, 9 aa, synthetic construct
  source 1..9: note = Seed: LVVVGARGV (KRAS G12R)
FVVSGPRGA

SEQ ID NO: 19150 - protein, 9 aa, synthetic construct
  source 1..9: note = Seed: LVVVGARGV (KRAS G12R)
FVVSGPRGC

SEQ ID NO: 19151 - protein, 9 aa, synthetic construct
  source 1..9: note = Seed: LVVVGARGV (KRAS G12R)
FVVSGPRGF

SEQ ID NO: 19152 - protein, 9 aa, synthetic construct
  source 1..9: note = Seed: LVVVGARGV (KRAS G12R)
FVVSGPRGG

SEQ ID NO: 19153 - protein, 9 aa, synthetic construct
  source 1..9: note = Seed: LVVVGARGV (KRAS G12R)
FVVSGPRGH

SEQ ID NO: 19154 - protein, 9 aa, synthetic construct
  source 1..9: note = Seed: LVVVGARGV (KRAS G12R)
FVVSGPRGI

SEQ ID NO: 19155 - protein, 9 aa, synthetic construct
  source 1..9: note = Seed: LVVVGARGV (KRAS G12R)
FVVSGPRGL

SEQ ID NO: 19156 - protein, 9 aa, synthetic construct
  source 1..9: note = Seed: LVVVGARGV (KRAS G12R)
FVVSGPRGM

SEQ ID NO: 19157 - protein, 9 aa, synthetic construct
  source 1..9: note = Seed: LVVVGARGV (KRAS G12R)
FVVSGPRGN

SEQ ID NO: 19158 - protein, 9 aa, synthetic construct
  source 1..9: note = Seed: LVVVGARGV (KRAS G12R)
FVVSGPRGP

SEQ ID NO: 19159 - protein, 9 aa, synthetic construct
  source 1..9: note = Seed: LVVVGARGV (KRAS G12R)
FVVSGPRGQ

SEQ ID NO: 19160 - protein, 9 aa, synthetic construct
  source 1..9: note = Seed: LVVVGARGV (KRAS G12R)
FVVSGPRGS

SEQ ID NO: 19161 - protein, 9 aa, synthetic construct
  source 1..9: note = Seed: LVVVGARGV (KRAS G12R)
FVVSGPRGT

SEQ ID NO: 19162 - protein, 9 aa, synthetic construct
  source 1..9: note = Seed: LVVVGARGV (KRAS G12R)
FVVSGPRGV

SEQ ID NO: 19163 - protein, 9 aa, synthetic construct
  source 1..9: note = Seed: LVVVGARGV (KRAS G12R)
FVVSGPRGW

SEQ ID NO: 19164 - protein, 9 aa, synthetic construct
  source 1..9: note = Seed: LVVVGARGV (KRAS G12R)
FVVSGPRGY

SEQ ID NO: 19165 - protein, 9 aa, synthetic construct
  source 1..9: note = Seed: LVVVGARGV (KRAS G12R)
FVVSGQRGA

SEQ ID NO: 19166 - protein, 9 aa, synthetic construct
  source 1..9: note = Seed: LVVVGARGV (KRAS G12R)
FVVSGQRGI

SEQ ID NO: 19167 - protein, 9 aa, synthetic construct
  source 1..9: note = Seed: LVVVGARGV (KRAS G12R)
FVVSGQRGL

SEQ ID NO: 19168 - protein, 9 aa, synthetic construct
  source 1..9: note = Seed: LVVVGARGV (KRAS G12R)
FVVSGQRGM

SEQ ID NO: 19169 - protein, 9 aa, synthetic construct
  source 1..9: note = Seed: LVVVGARGV (KRAS G12R)
FVVSGQRGR

SEQ ID NO: 19170 - protein, 9 aa, synthetic construct
  source 1..9: note = Seed: LVVVGARGV (KRAS G12R)
FVVSGQRGV

SEQ ID NO: 19171 - protein, 9 aa, synthetic construct
  source 1..9: note = Seed: LVVVGARGV (KRAS G12R)
FVVSGRRGA

SEQ ID NO: 19172 - protein, 9 aa, synthetic construct
  source 1..9: note = Seed: LVVVGARGV (KRAS G12R)
FVVSGRRGF

SEQ ID NO: 19173 - protein, 9 aa, synthetic construct
  source 1..9: note = Seed: LVVVGARGV (KRAS G12R)
FVVSGRRGG

SEQ ID NO: 19174 - protein, 9 aa, synthetic construct
  source 1..9: note = Seed: LVVVGARGV (KRAS G12R)
FVVSGRRGH

SEQ ID NO: 19175 - protein, 9 aa, synthetic construct
  source 1..9: note = Seed: LVVVGARGV (KRAS G12R)
FVVSGRRGI

SEQ ID NO: 19176 - protein, 9 aa, synthetic construct
  source 1..9: note = Seed: LVVVGARGV (KRAS G12R)
FVVSGRRGK

SEQ ID NO: 19177 - protein, 9 aa, synthetic construct
  source 1..9: note = Seed: LVVVGARGV (KRAS G12R)
FVVSGRRGL

SEQ ID NO: 19178 - protein, 9 aa, synthetic construct
  source 1..9: note = Seed: LVVVGARGV (KRAS G12R)
FVVSGRRGM

SEQ ID NO: 19179 - protein, 9 aa, synthetic construct
  source 1..9: note = Seed: LVVVGARGV (KRAS G12R)
FVVSGRRGN

SEQ ID NO: 19180 - protein, 9 aa, synthetic construct
  source 1..9: note = Seed: LVVVGARGV (KRAS G12R)
FVVSGRRGP

SEQ ID NO: 19181 - protein, 9 aa, synthetic construct
  source 1..9: note = Seed: LVVVGARGV (KRAS G12R)
FVVSGRRGQ

SEQ ID NO: 19182 - protein, 9 aa, synthetic construct
  source 1..9: note = Seed: LVVVGARGV (KRAS G12R)
FVVSGRRGR

SEQ ID NO: 19183 - protein, 9 aa, synthetic construct
  source 1..9: note = Seed: LVVVGARGV (KRAS G12R)
FVVSGRRGS

SEQ ID NO: 19184 - protein, 9 aa, synthetic construct
  source 1..9: note = Seed: LVVVGARGV (KRAS G12R)
FVVSGRRGT

SEQ ID NO: 19185 - protein, 9 aa, synthetic construct
  source 1..9: note = Seed: LVVVGARGV (KRAS G12R)
FVVSGRRGV

SEQ ID NO: 19186 - protein, 9 aa, synthetic construct
  source 1..9: note = Seed: LVVVGARGV (KRAS G12R)
FVVSGRRGW

SEQ ID NO: 19187 - protein, 9 aa, synthetic construct
  source 1..9: note = Seed: LVVVGARGV (KRAS G12R)
FVVSGRRGY

SEQ ID NO: 19188 - protein, 9 aa, synthetic construct
  source 1..9: note = Seed: LVVVGARGV (KRAS G12R)
FVVSGSRGA

SEQ ID NO: 19189 - protein, 9 aa, synthetic construct
  source 1..9: note = Seed: LVVVGARGV (KRAS G12R)
FVVSGSRGC

SEQ ID NO: 19190 - protein, 9 aa, synthetic construct
  source 1..9: note = Seed: LVVVGARGV (KRAS G12R)
FVVSGSRGF

SEQ ID NO: 19191 - protein, 9 aa, synthetic construct
  source 1..9: note = Seed: LVVVGARGV (KRAS G12R)
FVVSGSRGG

SEQ ID NO: 19192 - protein, 9 aa, synthetic construct
  source 1..9: note = Seed: LVVVGARGV (KRAS G12R)
FVVSGSRGH

SEQ ID NO: 19193 - protein, 9 aa, synthetic construct
  source 1..9: note = Seed: LVVVGARGV (KRAS G12R)
FVVSGSRGI

SEQ ID NO: 19194 - protein, 9 aa, synthetic construct
  source 1..9: note = Seed: LVVVGARGV (KRAS G12R)
FVVSGSRGK

SEQ ID NO: 19195 - protein, 9 aa, synthetic construct
  source 1..9: note = Seed: LVVVGARGV (KRAS G12R)
FVVSGSRGL

SEQ ID NO: 19196 - protein, 9 aa, synthetic construct
  source 1..9: note = Seed: LVVVGARGV (KRAS G12R)
FVVSGSRGM

SEQ ID NO: 19197 - protein, 9 aa, synthetic construct
  source 1..9: note = Seed: LVVVGARGV (KRAS G12R)
FVVSGSRGN

SEQ ID NO: 19198 - protein, 9 aa, synthetic construct
  source 1..9: note = Seed: LVVVGARGV (KRAS G12R)
FVVSGSRGP

SEQ ID NO: 19199 - protein, 9 aa, synthetic construct
  source 1..9: note = Seed: LVVVGARGV (KRAS G12R)
FVVSGSRGQ

SEQ ID NO: 19200 - protein, 9 aa, synthetic construct
  source 1..9: note = Seed: LVVVGARGV (KRAS G12R)
FVVSGSRGR

SEQ ID NO: 19201 - protein, 9 aa, synthetic construct
  source 1..9: note = Seed: LVVVGARGV (KRAS G12R)
FVVSGSRGS

SEQ ID NO: 19202 - protein, 9 aa, synthetic construct
  source 1..9: note = Seed: LVVVGARGV (KRAS G12R)
FVVSGSRGT

SEQ ID NO: 19203 - protein, 9 aa, synthetic construct
  source 1..9: note = Seed: LVVVGARGV (KRAS G12R)
FVVSGSRGV

SEQ ID NO: 19204 - protein, 9 aa, synthetic construct
  source 1..9: note = Seed: LVVVGARGV (KRAS G12R)
FVVSGSRGW

SEQ ID NO: 19205 - protein, 9 aa, synthetic construct
  source 1..9: note = Seed: LVVVGARGV (KRAS G12R)
FVVSGSRGY

SEQ ID NO: 19206 - protein, 9 aa, synthetic construct
  source 1..9: note = Seed: LVVVGARGV (KRAS G12R)
FVVSGTRGA

SEQ ID NO: 19207 - protein, 9 aa, synthetic construct
  source 1..9: note = Seed: LVVVGARGV (KRAS G12R)
FVVSGTRGC

SEQ ID NO: 19208 - protein, 9 aa, synthetic construct
  source 1..9: note = Seed: LVVVGARGV (KRAS G12R)
FVVSGTRGF

SEQ ID NO: 19209 - protein, 9 aa, synthetic construct
  source 1..9: note = Seed: LVVVGARGV (KRAS G12R)
FVVSGTRGG

SEQ ID NO: 19210 - protein, 9 aa, synthetic construct
  source 1..9: note = Seed: LVVVGARGV (KRAS G12R)
FVVSGTRGI

SEQ ID NO: 19211 - protein, 9 aa, synthetic construct
  source 1..9: note = Seed: LVVVGARGV (KRAS G12R)
FVVSGTRGL

SEQ ID NO: 19212 - protein, 9 aa, synthetic construct
  source 1..9: note = Seed: LVVVGARGV (KRAS G12R)
FVVSGTRGM

SEQ ID NO: 19213 - protein, 9 aa, synthetic construct
  source 1..9: note = Seed: LVVVGARGV (KRAS G12R)
FVVSGTRGN

SEQ ID NO: 19214 - protein, 9 aa, synthetic construct
  source 1..9: note = Seed: LVVVGARGV (KRAS G12R)
FVVSGTRGR

SEQ ID NO: 19215 - protein, 9 aa, synthetic construct
  source 1..9: note = Seed: LVVVGARGV (KRAS G12R)
FVVSGTRGS

SEQ ID NO: 19216 - protein, 9 aa, synthetic construct
  source 1..9: note = Seed: LVVVGARGV (KRAS G12R)
FVVSGTRGT

SEQ ID NO: 19217 - protein, 9 aa, synthetic construct
  source 1..9: note = Seed: LVVVGARGV (KRAS G12R)
FVVSGTRGV

SEQ ID NO: 19218 - protein, 9 aa, synthetic construct
  source 1..9: note = Seed: LVVVGARGV (KRAS G12R)
FVVSGTRGW

SEQ ID NO: 19219 - protein, 9 aa, synthetic construct
  source 1..9: note = Seed: LVVVGARGV (KRAS G12R)
FVVSGTRGY

SEQ ID NO: 19220 - protein, 9 aa, synthetic construct
  source 1..9: note = Seed: LVVVGARGV (KRAS G12R)
FVVSGVRGA

SEQ ID NO: 19221 - protein, 9 aa, synthetic construct
  source 1..9: note = Seed: LVVVGARGV (KRAS G12R)
FVVSGVRGC

SEQ ID NO: 19222 - protein, 9 aa, synthetic construct
  source 1..9: note = Seed: LVVVGARGV (KRAS G12R)
FVVSGVRGF

SEQ ID NO: 19223 - protein, 9 aa, synthetic construct
  source 1..9: note = Seed: LVVVGARGV (KRAS G12R)
FVVSGVRGG

SEQ ID NO: 19224 - protein, 9 aa, synthetic construct
  source 1..9: note = Seed: LVVVGARGV (KRAS G12R)
FVVSGVRGH

SEQ ID NO: 19225 - protein, 9 aa, synthetic construct
  source 1..9: note = Seed: LVVVGARGV (KRAS G12R)
FVVSGVRGI

SEQ ID NO: 19226 - protein, 9 aa, synthetic construct
  source 1..9: note = Seed: LVVVGARGV (KRAS G12R)
FVVSGVRGL

SEQ ID NO: 19227 - protein, 9 aa, synthetic construct
  source 1..9: note = Seed: LVVVGARGV (KRAS G12R)
FVVSGVRGM

SEQ ID NO: 19228 - protein, 9 aa, synthetic construct
  source 1..9: note = Seed: LVVVGARGV (KRAS G12R)
FVVSGVRGN

SEQ ID NO: 19229 - protein, 9 aa, synthetic construct
  source 1..9: note = Seed: LVVVGARGV (KRAS G12R)
FVVSGVRGQ

SEQ ID NO: 19230 - protein, 9 aa, synthetic construct
  source 1..9: note = Seed: LVVVGARGV (KRAS G12R)
FVVSGVRGR

SEQ ID NO: 19231 - protein, 9 aa, synthetic construct
  source 1..9: note = Seed: LVVVGARGV (KRAS G12R)
FVVSGVRGS

SEQ ID NO: 19232 - protein, 9 aa, synthetic construct
  source 1..9: note = Seed: LVVVGARGV (KRAS G12R)
FVVSGVRGT

SEQ ID NO: 19233 - protein, 9 aa, synthetic construct
  source 1..9: note = Seed: LVVVGARGV (KRAS G12R)
FVVSGVRGV

SEQ ID NO: 19234 - protein, 9 aa, synthetic construct
  source 1..9: note = Seed: LVVVGARGV (KRAS G12R)
FVVSGVRGW

SEQ ID NO: 19235 - protein, 9 aa, synthetic construct
  source 1..9: note = Seed: LVVVGARGV (KRAS G12R)
FVVSGVRGY

SEQ ID NO: 19236 - protein, 9 aa, synthetic construct
  source 1..9: note = Seed: LVVVGARGV (KRAS G12R)
FVVSGWRGA

SEQ ID NO: 19237 - protein, 9 aa, synthetic construct
  source 1..9: note = Seed: LVVVGARGV (KRAS G12R)
FVVSGWRGI

SEQ ID NO: 19238 - protein, 9 aa, synthetic construct
  source 1..9: note = Seed: LVVVGARGV (KRAS G12R)
FVVSGWRGL

SEQ ID NO: 19239 - protein, 9 aa, synthetic construct
  source 1..9: note = Seed: LVVVGARGV (KRAS G12R)
FVVSGWRGM

SEQ ID NO: 19240 - protein, 9 aa, synthetic construct
  source 1..9: note = Seed: LVVVGARGV (KRAS G12R)
FVVSGWRGV

SEQ ID NO: 19241 - protein, 9 aa, synthetic construct
  source 1..9: note = Seed: LVVVGARGV (KRAS G12R)
FVVSGYRGF

SEQ ID NO: 19242 - protein, 9 aa, synthetic construct
  source 1..9: note = Seed: LVVVGARGV (KRAS G12R)
FVVSGYRGI

SEQ ID NO: 19243 - protein, 9 aa, synthetic construct
  source 1..9: note = Seed: LVVVGARGV (KRAS G12R)
FVVSGYRGL

SEQ ID NO: 19244 - protein, 9 aa, synthetic construct
  source 1..9: note = Seed: LVVVGARGV (KRAS G12R)
FVVSGYRGR

SEQ ID NO: 19245 - protein, 9 aa, synthetic construct
  source 1..9: note = Seed: LVVVGARGV (KRAS G12R)
FVVSGYRGV

SEQ ID NO: 19246 - protein, 9 aa, synthetic construct
  source 1..9: note = Seed: LVVVGARGV (KRAS G12R)
FVVTGARGA

SEQ ID NO: 19247 - protein, 9 aa, synthetic construct
  source 1..9: note = Seed: LVVVGARGV (KRAS G12R)
FVVTGARGC

SEQ ID NO: 19248 - protein, 9 aa, synthetic construct
  source 1..9: note = Seed: LVVVGARGV (KRAS G12R)
FVVTGARGD

SEQ ID NO: 19249 - protein, 9 aa, synthetic construct
  source 1..9: note = Seed: LVVVGARGV (KRAS G12R)
FVVTGARGE

SEQ ID NO: 19250 - protein, 9 aa, synthetic construct
  source 1..9: note = Seed: LVVVGARGV (KRAS G12R)
FVVTGARGF

SEQ ID NO: 19251 - protein, 9 aa, synthetic construct
  source 1..9: note = Seed: LVVVGARGV (KRAS G12R)
FVVTGARGG

SEQ ID NO: 19252 - protein, 9 aa, synthetic construct
  source 1..9: note = Seed: LVVVGARGV (KRAS G12R)
FVVTGARGH

SEQ ID NO: 19253 - protein, 9 aa, synthetic construct
  source 1..9: note = Seed: LVVVGARGV (KRAS G12R)
FVVTGARGI

SEQ ID NO: 19254 - protein, 9 aa, synthetic construct
  source 1..9: note = Seed: LVVVGARGV (KRAS G12R)
FVVTGARGK

SEQ ID NO: 19255 - protein, 9 aa, synthetic construct
  source 1..9: note = Seed: LVVVGARGV (KRAS G12R)
FVVTGARGL

SEQ ID NO: 19256 - protein, 9 aa, synthetic construct
  source 1..9: note = Seed: LVVVGARGV (KRAS G12R)
FVVTGARGM

SEQ ID NO: 19257 - protein, 9 aa, synthetic construct
  source 1..9: note = Seed: LVVVGARGV (KRAS G12R)
FVVTGARGN

SEQ ID NO: 19258 - protein, 9 aa, synthetic construct
  source 1..9: note = Seed: LVVVGARGV (KRAS G12R)
FVVTGARGP

SEQ ID NO: 19259 - protein, 9 aa, synthetic construct
  source 1..9: note = Seed: LVVVGARGV (KRAS G12R)
FVVTGARGQ

SEQ ID NO: 19260 - protein, 9 aa, synthetic construct
  source 1..9: note = Seed: LVVVGARGV (KRAS G12R)
FVVTGARGR

SEQ ID NO: 19261 - protein, 9 aa, synthetic construct
  source 1..9: note = Seed: LVVVGARGV (KRAS G12R)
FVVTGARGS

SEQ ID NO: 19262 - protein, 9 aa, synthetic construct
  source 1..9: note = Seed: LVVVGARGV (KRAS G12R)
FVVTGARGT

SEQ ID NO: 19263 - protein, 9 aa, synthetic construct
  source 1..9: note = Seed: LVVVGARGV (KRAS G12R)
FVVTGARGV

SEQ ID NO: 19264 - protein, 9 aa, synthetic construct
  source 1..9: note = Seed: LVVVGARGV (KRAS G12R)
FVVTGARGW

SEQ ID NO: 19265 - protein, 9 aa, synthetic construct
  source 1..9: note = Seed: LVVVGARGV (KRAS G12R)
FVVTGARGY

SEQ ID NO: 19266 - protein, 9 aa, synthetic construct
  source 1..9: note = Seed: LVVVGARGV (KRAS G12R)
FVVTGCRGI

SEQ ID NO: 19267 - protein, 9 aa, synthetic construct
  source 1..9: note = Seed: LVVVGARGV (KRAS G12R)
FVVTGCRGL

SEQ ID NO: 19268 - protein, 9 aa, synthetic construct
  source 1..9: note = Seed: LVVVGARGV (KRAS G12R)
FVVTGCRGV

SEQ ID NO: 19269 - protein, 9 aa, synthetic construct
  source 1..9: note = Seed: LVVVGARGV (KRAS G12R)
FVVTGDRGI

SEQ ID NO: 19270 - protein, 9 aa, synthetic construct
  source 1..9: note = Seed: LVVVGARGV (KRAS G12R)
FVVTGFRGA

SEQ ID NO: 19271 - protein, 9 aa, synthetic construct
  source 1..9: note = Seed: LVVVGARGV (KRAS G12R)
FVVTGFRGD

SEQ ID NO: 19272 - protein, 9 aa, synthetic construct
  source 1..9: note = Seed: LVVVGARGV (KRAS G12R)
FVVTGFRGE

SEQ ID NO: 19273 - protein, 9 aa, synthetic construct
  source 1..9: note = Seed: LVVVGARGV (KRAS G12R)
FVVTGFRGF

SEQ ID NO: 19274 - protein, 9 aa, synthetic construct
  source 1..9: note = Seed: LVVVGARGV (KRAS G12R)
FVVTGFRGI

SEQ ID NO: 19275 - protein, 9 aa, synthetic construct
  source 1..9: note = Seed: LVVVGARGV (KRAS G12R)
FVVTGFRGL

SEQ ID NO: 19276 - protein, 9 aa, synthetic construct
  source 1..9: note = Seed: LVVVGARGV (KRAS G12R)
FVVTGFRGM

SEQ ID NO: 19277 - protein, 9 aa, synthetic construct
  source 1..9: note = Seed: LVVVGARGV (KRAS G12R)
FVVTGFRGN

SEQ ID NO: 19278 - protein, 9 aa, synthetic construct
  source 1..9: note = Seed: LVVVGARGV (KRAS G12R)
FVVTGFRGS

SEQ ID NO: 19279 - protein, 9 aa, synthetic construct
  source 1..9: note = Seed: LVVVGARGV (KRAS G12R)
FVVTGFRGT

SEQ ID NO: 19280 - protein, 9 aa, synthetic construct
  source 1..9: note = Seed: LVVVGARGV (KRAS G12R)
FVVTGFRGV

SEQ ID NO: 19281 - protein, 9 aa, synthetic construct
  source 1..9: note = Seed: LVVVGARGV (KRAS G12R)
FVVTGFRGY

SEQ ID NO: 19282 - protein, 9 aa, synthetic construct
  source 1..9: note = Seed: LVVVGARGV (KRAS G12R)
FVVTGGRGA

SEQ ID NO: 19283 - protein, 9 aa, synthetic construct
  source 1..9: note = Seed: LVVVGARGV (KRAS G12R)
FVVTGGRGC

SEQ ID NO: 19284 - protein, 9 aa, synthetic construct
  source 1..9: note = Seed: LVVVGARGV (KRAS G12R)
FVVTGGRGF

SEQ ID NO: 19285 - protein, 9 aa, synthetic construct
  source 1..9: note = Seed: LVVVGARGV (KRAS G12R)
FVVTGGRGG

SEQ ID NO: 19286 - protein, 9 aa, synthetic construct
  source 1..9: note = Seed: LVVVGARGV (KRAS G12R)
FVVTGGRGI

SEQ ID NO: 19287 - protein, 9 aa, synthetic construct
  source 1..9: note = Seed: LVVVGARGV (KRAS G12R)
FVVTGGRGL

SEQ ID NO: 19288 - protein, 9 aa, synthetic construct
  source 1..9: note = Seed: LVVVGARGV (KRAS G12R)
FVVTGGRGM

SEQ ID NO: 19289 - protein, 9 aa, synthetic construct
  source 1..9: note = Seed: LVVVGARGV (KRAS G12R)
FVVTGGRGN

SEQ ID NO: 19290 - protein, 9 aa, synthetic construct
  source 1..9: note = Seed: LVVVGARGV (KRAS G12R)
FVVTGGRGS

SEQ ID NO: 19291 - protein, 9 aa, synthetic construct
  source 1..9: note = Seed: LVVVGARGV (KRAS G12R)
FVVTGGRGT

SEQ ID NO: 19292 - protein, 9 aa, synthetic construct
  source 1..9: note = Seed: LVVVGARGV (KRAS G12R)
FVVTGGRGV

SEQ ID NO: 19293 - protein, 9 aa, synthetic construct
  source 1..9: note = Seed: LVVVGARGV (KRAS G12R)
FVVTGGRGW

SEQ ID NO: 19294 - protein, 9 aa, synthetic construct
  source 1..9: note = Seed: LVVVGARGV (KRAS G12R)
FVVTGGRGY

SEQ ID NO: 19295 - protein, 9 aa, synthetic construct
  source 1..9: note = Seed: LVVVGARGV (KRAS G12R)
FVVTGHRGA

SEQ ID NO: 19296 - protein, 9 aa, synthetic construct
  source 1..9: note = Seed: LVVVGARGV (KRAS G12R)
FVVTGHRGF

SEQ ID NO: 19297 - protein, 9 aa, synthetic construct
  source 1..9: note = Seed: LVVVGARGV (KRAS G12R)
FVVTGHRGI

SEQ ID NO: 19298 - protein, 9 aa, synthetic construct
  source 1..9: note = Seed: LVVVGARGV (KRAS G12R)
FVVTGHRGL

SEQ ID NO: 19299 - protein, 9 aa, synthetic construct
  source 1..9: note = Seed: LVVVGARGV (KRAS G12R)
FVVTGHRGM

SEQ ID NO: 19300 - protein, 9 aa, synthetic construct
  source 1..9: note = Seed: LVVVGARGV (KRAS G12R)
FVVTGHRGR

SEQ ID NO: 19301 - protein, 9 aa, synthetic construct
  source 1..9: note = Seed: LVVVGARGV (KRAS G12R)
FVVTGHRGV

SEQ ID NO: 19302 - protein, 9 aa, synthetic construct
  source 1..9: note = Seed: LVVVGARGV (KRAS G12R)
FVVTGHRGY

SEQ ID NO: 19303 - protein, 9 aa, synthetic construct
  source 1..9: note = Seed: LVVVGARGV (KRAS G12R)
FVVTGIRGA

SEQ ID NO: 19304 - protein, 9 aa, synthetic construct
  source 1..9: note = Seed: LVVVGARGV (KRAS G12R)
FVVTGIRGF

SEQ ID NO: 19305 - protein, 9 aa, synthetic construct
  source 1..9: note = Seed: LVVVGARGV (KRAS G12R)
FVVTGIRGI

SEQ ID NO: 19306 - protein, 9 aa, synthetic construct
  source 1..9: note = Seed: LVVVGARGV (KRAS G12R)
FVVTGIRGL

SEQ ID NO: 19307 - protein, 9 aa, synthetic construct
  source 1..9: note = Seed: LVVVGARGV (KRAS G12R)
FVVTGIRGM

SEQ ID NO: 19308 - protein, 9 aa, synthetic construct
  source 1..9: note = Seed: LVVVGARGV (KRAS G12R)
FVVTGIRGN

SEQ ID NO: 19309 - protein, 9 aa, synthetic construct
  source 1..9: note = Seed: LVVVGARGV (KRAS G12R)
FVVTGIRGR

SEQ ID NO: 19310 - protein, 9 aa, synthetic construct
  source 1..9: note = Seed: LVVVGARGV (KRAS G12R)
FVVTGIRGS

SEQ ID NO: 19311 - protein, 9 aa, synthetic construct
  source 1..9: note = Seed: LVVVGARGV (KRAS G12R)
FVVTGIRGT

SEQ ID NO: 19312 - protein, 9 aa, synthetic construct
  source 1..9: note = Seed: LVVVGARGV (KRAS G12R)
FVVTGIRGV

SEQ ID NO: 19313 - protein, 9 aa, synthetic construct
  source 1..9: note = Seed: LVVVGARGV (KRAS G12R)
FVVTGIRGY

SEQ ID NO: 19314 - protein, 9 aa, synthetic construct
  source 1..9: note = Seed: LVVVGARGV (KRAS G12R)
FVVTGKRGA

SEQ ID NO: 19315 - protein, 9 aa, synthetic construct
  source 1..9: note = Seed: LVVVGARGV (KRAS G12R)
FVVTGKRGF

SEQ ID NO: 19316 - protein, 9 aa, synthetic construct
  source 1..9: note = Seed: LVVVGARGV (KRAS G12R)
FVVTGKRGG

SEQ ID NO: 19317 - protein, 9 aa, synthetic construct
  source 1..9: note = Seed: LVVVGARGV (KRAS G12R)
FVVTGKRGH

SEQ ID NO: 19318 - protein, 9 aa, synthetic construct
  source 1..9: note = Seed: LVVVGARGV (KRAS G12R)
FVVTGKRGI

SEQ ID NO: 19319 - protein, 9 aa, synthetic construct
  source 1..9: note = Seed: LVVVGARGV (KRAS G12R)
FVVTGKRGK

SEQ ID NO: 19320 - protein, 9 aa, synthetic construct
  source 1..9: note = Seed: LVVVGARGV (KRAS G12R)
FVVTGKRGL

SEQ ID NO: 19321 - protein, 9 aa, synthetic construct
  source 1..9: note = Seed: LVVVGARGV (KRAS G12R)
FVVTGKRGM

SEQ ID NO: 19322 - protein, 9 aa, synthetic construct
  source 1..9: note = Seed: LVVVGARGV (KRAS G12R)
FVVTGKRGQ

SEQ ID NO: 19323 - protein, 9 aa, synthetic construct
  source 1..9: note = Seed: LVVVGARGV (KRAS G12R)
FVVTGKRGR

SEQ ID NO: 19324 - protein, 9 aa, synthetic construct
  source 1..9: note = Seed: LVVVGARGV (KRAS G12R)
FVVTGKRGS

SEQ ID NO: 19325 - protein, 9 aa, synthetic construct
  source 1..9: note = Seed: LVVVGARGV (KRAS G12R)
FVVTGKRGT

SEQ ID NO: 19326 - protein, 9 aa, synthetic construct
  source 1..9: note = Seed: LVVVGARGV (KRAS G12R)
FVVTGKRGV

SEQ ID NO: 19327 - protein, 9 aa, synthetic construct
  source 1..9: note = Seed: LVVVGARGV (KRAS G12R)
FVVTGKRGW

SEQ ID NO: 19328 - protein, 9 aa, synthetic construct
  source 1..9: note = Seed: LVVVGARGV (KRAS G12R)
FVVTGKRGY

SEQ ID NO: 19329 - protein, 9 aa, synthetic construct
  source 1..9: note = Seed: LVVVGARGV (KRAS G12R)
FVVTGLRGA

SEQ ID NO: 19330 - protein, 9 aa, synthetic construct
  source 1..9: note = Seed: LVVVGARGV (KRAS G12R)
FVVTGLRGF

SEQ ID NO: 19331 - protein, 9 aa, synthetic construct
  source 1..9: note = Seed: LVVVGARGV (KRAS G12R)
FVVTGLRGI

SEQ ID NO: 19332 - protein, 9 aa, synthetic construct
  source 1..9: note = Seed: LVVVGARGV (KRAS G12R)
FVVTGLRGL

SEQ ID NO: 19333 - protein, 9 aa, synthetic construct
  source 1..9: note = Seed: LVVVGARGV (KRAS G12R)
FVVTGLRGM

SEQ ID NO: 19334 - protein, 9 aa, synthetic construct
  source 1..9: note = Seed: LVVVGARGV (KRAS G12R)
FVVTGLRGN

SEQ ID NO: 19335 - protein, 9 aa, synthetic construct
  source 1..9: note = Seed: LVVVGARGV (KRAS G12R)
FVVTGLRGR

SEQ ID NO: 19336 - protein, 9 aa, synthetic construct
  source 1..9: note = Seed: LVVVGARGV (KRAS G12R)
FVVTGLRGS

SEQ ID NO: 19337 - protein, 9 aa, synthetic construct
  source 1..9: note = Seed: LVVVGARGV (KRAS G12R)
FVVTGLRGV

SEQ ID NO: 19338 - protein, 9 aa, synthetic construct
  source 1..9: note = Seed: LVVVGARGV (KRAS G12R)
FVVTGMRGA

SEQ ID NO: 19339 - protein, 9 aa, synthetic construct
  source 1..9: note = Seed: LVVVGARGV (KRAS G12R)
FVVTGMRGF

SEQ ID NO: 19340 - protein, 9 aa, synthetic construct
  source 1..9: note = Seed: LVVVGARGV (KRAS G12R)
FVVTGMRGI

SEQ ID NO: 19341 - protein, 9 aa, synthetic construct
  source 1..9: note = Seed: LVVVGARGV (KRAS G12R)
FVVTGMRGL

SEQ ID NO: 19342 - protein, 9 aa, synthetic construct
  source 1..9: note = Seed: LVVVGARGV (KRAS G12R)
FVVTGMRGM

SEQ ID NO: 19343 - protein, 9 aa, synthetic construct
  source 1..9: note = Seed: LVVVGARGV (KRAS G12R)
FVVTGMRGN

SEQ ID NO: 19344 - protein, 9 aa, synthetic construct
  source 1..9: note = Seed: LVVVGARGV (KRAS G12R)
FVVTGMRGR

SEQ ID NO: 19345 - protein, 9 aa, synthetic construct
  source 1..9: note = Seed: LVVVGARGV (KRAS G12R)
FVVTGMRGS

SEQ ID NO: 19346 - protein, 9 aa, synthetic construct
  source 1..9: note = Seed: LVVVGARGV (KRAS G12R)
FVVTGMRGV

SEQ ID NO: 19347 - protein, 9 aa, synthetic construct
  source 1..9: note = Seed: LVVVGARGV (KRAS G12R)
FVVTGNRGA

SEQ ID NO: 19348 - protein, 9 aa, synthetic construct
  source 1..9: note = Seed: LVVVGARGV (KRAS G12R)
FVVTGNRGF

SEQ ID NO: 19349 - protein, 9 aa, synthetic construct
  source 1..9: note = Seed: LVVVGARGV (KRAS G12R)
FVVTGNRGG

SEQ ID NO: 19350 - protein, 9 aa, synthetic construct
  source 1..9: note = Seed: LVVVGARGV (KRAS G12R)
FVVTGNRGI

SEQ ID NO: 19351 - protein, 9 aa, synthetic construct
  source 1..9: note = Seed: LVVVGARGV (KRAS G12R)
FVVTGNRGL

SEQ ID NO: 19352 - protein, 9 aa, synthetic construct
  source 1..9: note = Seed: LVVVGARGV (KRAS G12R)
FVVTGNRGM

SEQ ID NO: 19353 - protein, 9 aa, synthetic construct
  source 1..9: note = Seed: LVVVGARGV (KRAS G12R)
FVVTGNRGN

SEQ ID NO: 19354 - protein, 9 aa, synthetic construct
  source 1..9: note = Seed: LVVVGARGV (KRAS G12R)
FVVTGNRGS

SEQ ID NO: 19355 - protein, 9 aa, synthetic construct
  source 1..9: note = Seed: LVVVGARGV (KRAS G12R)
FVVTGNRGT

SEQ ID NO: 19356 - protein, 9 aa, synthetic construct
  source 1..9: note = Seed: LVVVGARGV (KRAS G12R)
FVVTGNRGV

SEQ ID NO: 19357 - protein, 9 aa, synthetic construct
  source 1..9: note = Seed: LVVVGARGV (KRAS G12R)
FVVTGNRGW

SEQ ID NO: 19358 - protein, 9 aa, synthetic construct
  source 1..9: note = Seed: LVVVGARGV (KRAS G12R)
FVVTGNRGY

SEQ ID NO: 19359 - protein, 9 aa, synthetic construct
  source 1..9: note = Seed: LVVVGARGV (KRAS G12R)
FVVTGPRGA

SEQ ID NO: 19360 - protein, 9 aa, synthetic construct
  source 1..9: note = Seed: LVVVGARGV (KRAS G12R)
FVVTGPRGC

SEQ ID NO: 19361 - protein, 9 aa, synthetic construct
  source 1..9: note = Seed: LVVVGARGV (KRAS G12R)
FVVTGPRGF

SEQ ID NO: 19362 - protein, 9 aa, synthetic construct
  source 1..9: note = Seed: LVVVGARGV (KRAS G12R)
FVVTGPRGG

SEQ ID NO: 19363 - protein, 9 aa, synthetic construct
  source 1..9: note = Seed: LVVVGARGV (KRAS G12R)
FVVTGPRGI

SEQ ID NO: 19364 - protein, 9 aa, synthetic construct
  source 1..9: note = Seed: LVVVGARGV (KRAS G12R)
FVVTGPRGL

SEQ ID NO: 19365 - protein, 9 aa, synthetic construct
  source 1..9: note = Seed: LVVVGARGV (KRAS G12R)
FVVTGPRGM

SEQ ID NO: 19366 - protein, 9 aa, synthetic construct
  source 1..9: note = Seed: LVVVGARGV (KRAS G12R)
FVVTGPRGN

SEQ ID NO: 19367 - protein, 9 aa, synthetic construct
  source 1..9: note = Seed: LVVVGARGV (KRAS G12R)
FVVTGPRGS

SEQ ID NO: 19368 - protein, 9 aa, synthetic construct
  source 1..9: note = Seed: LVVVGARGV (KRAS G12R)
FVVTGPRGT

SEQ ID NO: 19369 - protein, 9 aa, synthetic construct
  source 1..9: note = Seed: LVVVGARGV (KRAS G12R)
FVVTGPRGV

SEQ ID NO: 19370 - protein, 9 aa, synthetic construct
  source 1..9: note = Seed: LVVVGARGV (KRAS G12R)
FVVTGPRGW

SEQ ID NO: 19371 - protein, 9 aa, synthetic construct
  source 1..9: note = Seed: LVVVGARGV (KRAS G12R)
FVVTGPRGY

SEQ ID NO: 19372 - protein, 9 aa, synthetic construct
  source 1..9: note = Seed: LVVVGARGV (KRAS G12R)
FVVTGQRGI

SEQ ID NO: 19373 - protein, 9 aa, synthetic construct
  source 1..9: note = Seed: LVVVGARGV (KRAS G12R)
FVVTGQRGL

SEQ ID NO: 19374 - protein, 9 aa, synthetic construct
  source 1..9: note = Seed: LVVVGARGV (KRAS G12R)
FVVTGQRGV

SEQ ID NO: 19375 - protein, 9 aa, synthetic construct
  source 1..9: note = Seed: LVVVGARGV (KRAS G12R)
FVVTGRRGA

SEQ ID NO: 19376 - protein, 9 aa, synthetic construct
  source 1..9: note = Seed: LVVVGARGV (KRAS G12R)
FVVTGRRGF

SEQ ID NO: 19377 - protein, 9 aa, synthetic construct
  source 1..9: note = Seed: LVVVGARGV (KRAS G12R)
FVVTGRRGG

SEQ ID NO: 19378 - protein, 9 aa, synthetic construct
  source 1..9: note = Seed: LVVVGARGV (KRAS G12R)
FVVTGRRGH

SEQ ID NO: 19379 - protein, 9 aa, synthetic construct
  source 1..9: note = Seed: LVVVGARGV (KRAS G12R)
FVVTGRRGI

SEQ ID NO: 19380 - protein, 9 aa, synthetic construct
  source 1..9: note = Seed: LVVVGARGV (KRAS G12R)
FVVTGRRGK

SEQ ID NO: 19381 - protein, 9 aa, synthetic construct
  source 1..9: note = Seed: LVVVGARGV (KRAS G12R)
FVVTGRRGL

SEQ ID NO: 19382 - protein, 9 aa, synthetic construct
  source 1..9: note = Seed: LVVVGARGV (KRAS G12R)
FVVTGRRGM

SEQ ID NO: 19383 - protein, 9 aa, synthetic construct
  source 1..9: note = Seed: LVVVGARGV (KRAS G12R)
FVVTGRRGN

SEQ ID NO: 19384 - protein, 9 aa, synthetic construct
  source 1..9: note = Seed: LVVVGARGV (KRAS G12R)
FVVTGRRGP

SEQ ID NO: 19385 - protein, 9 aa, synthetic construct
  source 1..9: note = Seed: LVVVGARGV (KRAS G12R)
FVVTGRRGQ

SEQ ID NO: 19386 - protein, 9 aa, synthetic construct
  source 1..9: note = Seed: LVVVGARGV (KRAS G12R)
FVVTGRRGR

SEQ ID NO: 19387 - protein, 9 aa, synthetic construct
  source 1..9: note = Seed: LVVVGARGV (KRAS G12R)
FVVTGRRGS

SEQ ID NO: 19388 - protein, 9 aa, synthetic construct
  source 1..9: note = Seed: LVVVGARGV (KRAS G12R)
FVVTGRRGT

SEQ ID NO: 19389 - protein, 9 aa, synthetic construct
  source 1..9: note = Seed: LVVVGARGV (KRAS G12R)
FVVTGRRGV

SEQ ID NO: 19390 - protein, 9 aa, synthetic construct
  source 1..9: note = Seed: LVVVGARGV (KRAS G12R)
FVVTGRRGW

SEQ ID NO: 19391 - protein, 9 aa, synthetic construct
  source 1..9: note = Seed: LVVVGARGV (KRAS G12R)
FVVTGRRGY

SEQ ID NO: 19392 - protein, 9 aa, synthetic construct
  source 1..9: note = Seed: LVVVGARGV (KRAS G12R)
FVVTGSRGA

SEQ ID NO: 19393 - protein, 9 aa, synthetic construct
  source 1..9: note = Seed: LVVVGARGV (KRAS G12R)
FVVTGSRGC

SEQ ID NO: 19394 - protein, 9 aa, synthetic construct
  source 1..9: note = Seed: LVVVGARGV (KRAS G12R)
FVVTGSRGF

SEQ ID NO: 19395 - protein, 9 aa, synthetic construct
  source 1..9: note = Seed: LVVVGARGV (KRAS G12R)
FVVTGSRGG

SEQ ID NO: 19396 - protein, 9 aa, synthetic construct
  source 1..9: note = Seed: LVVVGARGV (KRAS G12R)
FVVTGSRGH

SEQ ID NO: 19397 - protein, 9 aa, synthetic construct
  source 1..9: note = Seed: LVVVGARGV (KRAS G12R)
FVVTGSRGI

SEQ ID NO: 19398 - protein, 9 aa, synthetic construct
  source 1..9: note = Seed: LVVVGARGV (KRAS G12R)
FVVTGSRGL

SEQ ID NO: 19399 - protein, 9 aa, synthetic construct
  source 1..9: note = Seed: LVVVGARGV (KRAS G12R)
FVVTGSRGM

SEQ ID NO: 19400 - protein, 9 aa, synthetic construct
  source 1..9: note = Seed: LVVVGARGV (KRAS G12R)
FVVTGSRGN

SEQ ID NO: 19401 - protein, 9 aa, synthetic construct
  source 1..9: note = Seed: LVVVGARGV (KRAS G12R)
FVVTGSRGP

SEQ ID NO: 19402 - protein, 9 aa, synthetic construct
  source 1..9: note = Seed: LVVVGARGV (KRAS G12R)
FVVTGSRGR

SEQ ID NO: 19403 - protein, 9 aa, synthetic construct
  source 1..9: note = Seed: LVVVGARGV (KRAS G12R)
FVVTGSRGS

SEQ ID NO: 19404 - protein, 9 aa, synthetic construct
  source 1..9: note = Seed: LVVVGARGV (KRAS G12R)
FVVTGSRGT

SEQ ID NO: 19405 - protein, 9 aa, synthetic construct
  source 1..9: note = Seed: LVVVGARGV (KRAS G12R)
FVVTGSRGV

SEQ ID NO: 19406 - protein, 9 aa, synthetic construct
  source 1..9: note = Seed: LVVVGARGV (KRAS G12R)
FVVTGSRGW

SEQ ID NO: 19407 - protein, 9 aa, synthetic construct
  source 1..9: note = Seed: LVVVGARGV (KRAS G12R)
FVVTGSRGY

SEQ ID NO: 19408 - protein, 9 aa, synthetic construct
  source 1..9: note = Seed: LVVVGARGV (KRAS G12R)
FVVTGTRGA

SEQ ID NO: 19409 - protein, 9 aa, synthetic construct
  source 1..9: note = Seed: LVVVGARGV (KRAS G12R)
FVVTGTRGF

SEQ ID NO: 19410 - protein, 9 aa, synthetic construct
  source 1..9: note = Seed: LVVVGARGV (KRAS G12R)
FVVTGTRGG

SEQ ID NO: 19411 - protein, 9 aa, synthetic construct
  source 1..9: note = Seed: LVVVGARGV (KRAS G12R)
FVVTGTRGI

SEQ ID NO: 19412 - protein, 9 aa, synthetic construct
  source 1..9: note = Seed: LVVVGARGV (KRAS G12R)
FVVTGTRGL

SEQ ID NO: 19413 - protein, 9 aa, synthetic construct
  source 1..9: note = Seed: LVVVGARGV (KRAS G12R)
FVVTGTRGM

SEQ ID NO: 19414 - protein, 9 aa, synthetic construct
  source 1..9: note = Seed: LVVVGARGV (KRAS G12R)
FVVTGTRGN

SEQ ID NO: 19415 - protein, 9 aa, synthetic construct
  source 1..9: note = Seed: LVVVGARGV (KRAS G12R)
FVVTGTRGR

SEQ ID NO: 19416 - protein, 9 aa, synthetic construct
  source 1..9: note = Seed: LVVVGARGV (KRAS G12R)
FVVTGTRGS

SEQ ID NO: 19417 - protein, 9 aa, synthetic construct
  source 1..9: note = Seed: LVVVGARGV (KRAS G12R)
FVVTGTRGT

SEQ ID NO: 19418 - protein, 9 aa, synthetic construct
  source 1..9: note = Seed: LVVVGARGV (KRAS G12R)
FVVTGTRGV

SEQ ID NO: 19419 - protein, 9 aa, synthetic construct
  source 1..9: note = Seed: LVVVGARGV (KRAS G12R)
FVVTGTRGW

SEQ ID NO: 19420 - protein, 9 aa, synthetic construct
  source 1..9: note = Seed: LVVVGARGV (KRAS G12R)
FVVTGTRGY

SEQ ID NO: 19421 - protein, 9 aa, synthetic construct
  source 1..9: note = Seed: LVVVGARGV (KRAS G12R)
FVVTGVRGA

SEQ ID NO: 19422 - protein, 9 aa, synthetic construct
  source 1..9: note = Seed: LVVVGARGV (KRAS G12R)
FVVTGVRGF

SEQ ID NO: 19423 - protein, 9 aa, synthetic construct
  source 1..9: note = Seed: LVVVGARGV (KRAS G12R)
FVVTGVRGG

SEQ ID NO: 19424 - protein, 9 aa, synthetic construct
  source 1..9: note = Seed: LVVVGARGV (KRAS G12R)
FVVTGVRGH

SEQ ID NO: 19425 - protein, 9 aa, synthetic construct
  source 1..9: note = Seed: LVVVGARGV (KRAS G12R)
FVVTGVRGI

SEQ ID NO: 19426 - protein, 9 aa, synthetic construct
  source 1..9: note = Seed: LVVVGARGV (KRAS G12R)
FVVTGVRGL

SEQ ID NO: 19427 - protein, 9 aa, synthetic construct
  source 1..9: note = Seed: LVVVGARGV (KRAS G12R)
FVVTGVRGM

SEQ ID NO: 19428 - protein, 9 aa, synthetic construct
  source 1..9: note = Seed: LVVVGARGV (KRAS G12R)
FVVTGVRGN

SEQ ID NO: 19429 - protein, 9 aa, synthetic construct
  source 1..9: note = Seed: LVVVGARGV (KRAS G12R)
FVVTGVRGQ

SEQ ID NO: 19430 - protein, 9 aa, synthetic construct
  source 1..9: note = Seed: LVVVGARGV (KRAS G12R)
FVVTGVRGR

SEQ ID NO: 19431 - protein, 9 aa, synthetic construct
  source 1..9: note = Seed: LVVVGARGV (KRAS G12R)
FVVTGVRGS

SEQ ID NO: 19432 - protein, 9 aa, synthetic construct
  source 1..9: note = Seed: LVVVGARGV (KRAS G12R)
FVVTGVRGT

SEQ ID NO: 19433 - protein, 9 aa, synthetic construct
  source 1..9: note = Seed: LVVVGARGV (KRAS G12R)
FVVTGVRGV

SEQ ID NO: 19434 - protein, 9 aa, synthetic construct
  source 1..9: note = Seed: LVVVGARGV (KRAS G12R)
FVVTGVRGY

SEQ ID NO: 19435 - protein, 9 aa, synthetic construct
  source 1..9: note = Seed: LVVVGARGV (KRAS G12R)
FVVTGWRGI

SEQ ID NO: 19436 - protein, 9 aa, synthetic construct
  source 1..9: note = Seed: LVVVGARGV (KRAS G12R)
FVVTGWRGL

SEQ ID NO: 19437 - protein, 9 aa, synthetic construct
  source 1..9: note = Seed: LVVVGARGV (KRAS G12R)
FVVTGWRGM

SEQ ID NO: 19438 - protein, 9 aa, synthetic construct
  source 1..9: note = Seed: LVVVGARGV (KRAS G12R)
FVVTGWRGV

SEQ ID NO: 19439 - protein, 9 aa, synthetic construct
  source 1..9: note = Seed: LVVVGARGV (KRAS G12R)
FVVTGYRGF

SEQ ID NO: 19440 - protein, 9 aa, synthetic construct
  source 1..9: note = Seed: LVVVGARGV (KRAS G12R)
FVVTGYRGI

SEQ ID NO: 19441 - protein, 9 aa, synthetic construct
  source 1..9: note = Seed: LVVVGARGV (KRAS G12R)
FVVTGYRGL

SEQ ID NO: 19442 - protein, 9 aa, synthetic construct
  source 1..9: note = Seed: LVVVGARGV (KRAS G12R)
FVVTGYRGM

SEQ ID NO: 19443 - protein, 9 aa, synthetic construct
  source 1..9: note = Seed: LVVVGARGV (KRAS G12R)
FVVTGYRGV

SEQ ID NO: 19444 - protein, 9 aa, synthetic construct
  source 1..9: note = Seed: LVVVGARGV (KRAS G12R)
FVVVGARGA

SEQ ID NO: 19445 - protein, 9 aa, synthetic construct
  source 1..9: note = Seed: LVVVGARGV (KRAS G12R)
FVVVGARGC

SEQ ID NO: 19446 - protein, 9 aa, synthetic construct
  source 1..9: note = Seed: LVVVGARGV (KRAS G12R)
FVVVGARGD

SEQ ID NO: 19447 - protein, 9 aa, synthetic construct
  source 1..9: note = Seed: LVVVGARGV (KRAS G12R)
FVVVGARGE

SEQ ID NO: 19448 - protein, 9 aa, synthetic construct
  source 1..9: note = Seed: LVVVGARGV (KRAS G12R)
FVVVGARGF

SEQ ID NO: 19449 - protein, 9 aa, synthetic construct
  source 1..9: note = Seed: LVVVGARGV (KRAS G12R)
FVVVGARGG

SEQ ID NO: 19450 - protein, 9 aa, synthetic construct
  source 1..9: note = Seed: LVVVGARGV (KRAS G12R)
FVVVGARGH

SEQ ID NO: 19451 - protein, 9 aa, synthetic construct
  source 1..9: note = Seed: LVVVGARGV (KRAS G12R)
FVVVGARGI

SEQ ID NO: 19452 - protein, 9 aa, synthetic construct
  source 1..9: note = Seed: LVVVGARGV (KRAS G12R)
FVVVGARGK

SEQ ID NO: 19453 - protein, 9 aa, synthetic construct
  source 1..9: note = Seed: LVVVGARGV (KRAS G12R)
FVVVGARGM

SEQ ID NO: 19454 - protein, 9 aa, synthetic construct
  source 1..9: note = Seed: LVVVGARGV (KRAS G12R)
FVVVGARGN

SEQ ID NO: 19455 - protein, 9 aa, synthetic construct
  source 1..9: note = Seed: LVVVGARGV (KRAS G12R)
FVVVGARGP

SEQ ID NO: 19456 - protein, 9 aa, synthetic construct
  source 1..9: note = Seed: LVVVGARGV (KRAS G12R)
FVVVGARGQ

SEQ ID NO: 19457 - protein, 9 aa, synthetic construct
  source 1..9: note = Seed: LVVVGARGV (KRAS G12R)
FVVVGARGR

SEQ ID NO: 19458 - protein, 9 aa, synthetic construct
  source 1..9: note = Seed: LVVVGARGV (KRAS G12R)
FVVVGARGS

SEQ ID NO: 19459 - protein, 9 aa, synthetic construct
  source 1..9: note = Seed: LVVVGARGV (KRAS G12R)
FVVVGARGT

SEQ ID NO: 19460 - protein, 9 aa, synthetic construct
  source 1..9: note = Seed: LVVVGARGV (KRAS G12R)
FVVVGARGW

SEQ ID NO: 19461 - protein, 9 aa, synthetic construct
  source 1..9: note = Seed: LVVVGARGV (KRAS G12R)
FVVVGARGY

SEQ ID NO: 19462 - protein, 9 aa, synthetic construct
  source 1..9: note = Seed: LVVVGARGV (KRAS G12R)
FVVVGCRGA

SEQ ID NO: 19463 - protein, 9 aa, synthetic construct
  source 1..9: note = Seed: LVVVGARGV (KRAS G12R)
FVVVGCRGI

SEQ ID NO: 19464 - protein, 9 aa, synthetic construct
  source 1..9: note = Seed: LVVVGARGV (KRAS G12R)
FVVVGCRGL

SEQ ID NO: 19465 - protein, 9 aa, synthetic construct
  source 1..9: note = Seed: LVVVGARGV (KRAS G12R)
FVVVGCRGM

SEQ ID NO: 19466 - protein, 9 aa, synthetic construct
  source 1..9: note = Seed: LVVVGARGV (KRAS G12R)
FVVVGCRGT

SEQ ID NO: 19467 - protein, 9 aa, synthetic construct
  source 1..9: note = Seed: LVVVGARGV (KRAS G12R)
FVVVGCRGV

SEQ ID NO: 19468 - protein, 9 aa, synthetic construct
  source 1..9: note = Seed: LVVVGARGV (KRAS G12R)
FVVVGDRGA

SEQ ID NO: 19469 - protein, 9 aa, synthetic construct
  source 1..9: note = Seed: LVVVGARGV (KRAS G12R)
FVVVGDRGI

SEQ ID NO: 19470 - protein, 9 aa, synthetic construct
  source 1..9: note = Seed: LVVVGARGV (KRAS G12R)
FVVVGDRGL

SEQ ID NO: 19471 - protein, 9 aa, synthetic construct
  source 1..9: note = Seed: LVVVGARGV (KRAS G12R)
FVVVGDRGV

SEQ ID NO: 19472 - protein, 9 aa, synthetic construct
  source 1..9: note = Seed: LVVVGARGV (KRAS G12R)
FVVVGERGA

SEQ ID NO: 19473 - protein, 9 aa, synthetic construct
  source 1..9: note = Seed: LVVVGARGV (KRAS G12R)
FVVVGERGI

SEQ ID NO: 19474 - protein, 9 aa, synthetic construct
  source 1..9: note = Seed: LVVVGARGV (KRAS G12R)
FVVVGERGL

SEQ ID NO: 19475 - protein, 9 aa, synthetic construct
  source 1..9: note = Seed: LVVVGARGV (KRAS G12R)
FVVVGERGV

SEQ ID NO: 19476 - protein, 9 aa, synthetic construct
  source 1..9: note = Seed: LVVVGARGV (KRAS G12R)
FVVVGFRGA

SEQ ID NO: 19477 - protein, 9 aa, synthetic construct
  source 1..9: note = Seed: LVVVGARGV (KRAS G12R)
FVVVGFRGD

SEQ ID NO: 19478 - protein, 9 aa, synthetic construct
  source 1..9: note = Seed: LVVVGARGV (KRAS G12R)
FVVVGFRGE

SEQ ID NO: 19479 - protein, 9 aa, synthetic construct
  source 1..9: note = Seed: LVVVGARGV (KRAS G12R)
FVVVGFRGF

SEQ ID NO: 19480 - protein, 9 aa, synthetic construct
  source 1..9: note = Seed: LVVVGARGV (KRAS G12R)
FVVVGFRGI

SEQ ID NO: 19481 - protein, 9 aa, synthetic construct
  source 1..9: note = Seed: LVVVGARGV (KRAS G12R)
FVVVGFRGL

SEQ ID NO: 19482 - protein, 9 aa, synthetic construct
  source 1..9: note = Seed: LVVVGARGV (KRAS G12R)
FVVVGFRGM

SEQ ID NO: 19483 - protein, 9 aa, synthetic construct
  source 1..9: note = Seed: LVVVGARGV (KRAS G12R)
FVVVGFRGN

SEQ ID NO: 19484 - protein, 9 aa, synthetic construct
  source 1..9: note = Seed: LVVVGARGV (KRAS G12R)
FVVVGFRGS

SEQ ID NO: 19485 - protein, 9 aa, synthetic construct
  source 1..9: note = Seed: LVVVGARGV (KRAS G12R)
FVVVGFRGT

SEQ ID NO: 19486 - protein, 9 aa, synthetic construct
  source 1..9: note = Seed: LVVVGARGV (KRAS G12R)
FVVVGFRGV

SEQ ID NO: 19487 - protein, 9 aa, synthetic construct
  source 1..9: note = Seed: LVVVGARGV (KRAS G12R)
FVVVGFRGY

SEQ ID NO: 19488 - protein, 9 aa, synthetic construct
  source 1..9: note = Seed: LVVVGARGV (KRAS G12R)
FVVVGGRGA

SEQ ID NO: 19489 - protein, 9 aa, synthetic construct
  source 1..9: note = Seed: LVVVGARGV (KRAS G12R)
FVVVGGRGC

SEQ ID NO: 19490 - protein, 9 aa, synthetic construct
  source 1..9: note = Seed: LVVVGARGV (KRAS G12R)
FVVVGGRGD

SEQ ID NO: 19491 - protein, 9 aa, synthetic construct
  source 1..9: note = Seed: LVVVGARGV (KRAS G12R)
FVVVGGRGE

SEQ ID NO: 19492 - protein, 9 aa, synthetic construct
  source 1..9: note = Seed: LVVVGARGV (KRAS G12R)
FVVVGGRGF

SEQ ID NO: 19493 - protein, 9 aa, synthetic construct
  source 1..9: note = Seed: LVVVGARGV (KRAS G12R)
FVVVGGRGG

SEQ ID NO: 19494 - protein, 9 aa, synthetic construct
  source 1..9: note = Seed: LVVVGARGV (KRAS G12R)
FVVVGGRGH

SEQ ID NO: 19495 - protein, 9 aa, synthetic construct
  source 1..9: note = Seed: LVVVGARGV (KRAS G12R)
FVVVGGRGI

SEQ ID NO: 19496 - protein, 9 aa, synthetic construct
  source 1..9: note = Seed: LVVVGARGV (KRAS G12R)
FVVVGGRGK

SEQ ID NO: 19497 - protein, 9 aa, synthetic construct
  source 1..9: note = Seed: LVVVGARGV (KRAS G12R)
FVVVGGRGM

SEQ ID NO: 19498 - protein, 9 aa, synthetic construct
  source 1..9: note = Seed: LVVVGARGV (KRAS G12R)
FVVVGGRGN

SEQ ID NO: 19499 - protein, 9 aa, synthetic construct
  source 1..9: note = Seed: LVVVGARGV (KRAS G12R)
FVVVGGRGP

SEQ ID NO: 19500 - protein, 9 aa, synthetic construct
  source 1..9: note = Seed: LVVVGARGV (KRAS G12R)
FVVVGGRGQ

SEQ ID NO: 19501 - protein, 9 aa, synthetic construct
  source 1..9: note = Seed: LVVVGARGV (KRAS G12R)
FVVVGGRGR

SEQ ID NO: 19502 - protein, 9 aa, synthetic construct
  source 1..9: note = Seed: LVVVGARGV (KRAS G12R)
FVVVGGRGS

SEQ ID NO: 19503 - protein, 9 aa, synthetic construct
  source 1..9: note = Seed: LVVVGARGV (KRAS G12R)
FVVVGGRGT

SEQ ID NO: 19504 - protein, 9 aa, synthetic construct
  source 1..9: note = Seed: LVVVGARGV (KRAS G12R)
FVVVGGRGW

SEQ ID NO: 19505 - protein, 9 aa, synthetic construct
  source 1..9: note = Seed: LVVVGARGV (KRAS G12R)
FVVVGGRGY

SEQ ID NO: 19506 - protein, 9 aa, synthetic construct
  source 1..9: note = Seed: LVVVGARGV (KRAS G12R)
FVVVGHRGA

SEQ ID NO: 19507 - protein, 9 aa, synthetic construct
  source 1..9: note = Seed: LVVVGARGV (KRAS G12R)
FVVVGHRGF

SEQ ID NO: 19508 - protein, 9 aa, synthetic construct
  source 1..9: note = Seed: LVVVGARGV (KRAS G12R)
FVVVGHRGG

SEQ ID NO: 19509 - protein, 9 aa, synthetic construct
  source 1..9: note = Seed: LVVVGARGV (KRAS G12R)
FVVVGHRGH

SEQ ID NO: 19510 - protein, 9 aa, synthetic construct
  source 1..9: note = Seed: LVVVGARGV (KRAS G12R)
FVVVGHRGI

SEQ ID NO: 19511 - protein, 9 aa, synthetic construct
  source 1..9: note = Seed: LVVVGARGV (KRAS G12R)
FVVVGHRGL

SEQ ID NO: 19512 - protein, 9 aa, synthetic construct
  source 1..9: note = Seed: LVVVGARGV (KRAS G12R)
FVVVGHRGM

SEQ ID NO: 19513 - protein, 9 aa, synthetic construct
  source 1..9: note = Seed: LVVVGARGV (KRAS G12R)
FVVVGHRGN

SEQ ID NO: 19514 - protein, 9 aa, synthetic construct
  source 1..9: note = Seed: LVVVGARGV (KRAS G12R)
FVVVGHRGQ

SEQ ID NO: 19515 - protein, 9 aa, synthetic construct
  source 1..9: note = Seed: LVVVGARGV (KRAS G12R)
FVVVGHRGR

SEQ ID NO: 19516 - protein, 9 aa, synthetic construct
  source 1..9: note = Seed: LVVVGARGV (KRAS G12R)
FVVVGHRGS

SEQ ID NO: 19517 - protein, 9 aa, synthetic construct
  source 1..9: note = Seed: LVVVGARGV (KRAS G12R)
FVVVGHRGT

SEQ ID NO: 19518 - protein, 9 aa, synthetic construct
  source 1..9: note = Seed: LVVVGARGV (KRAS G12R)
FVVVGHRGV

SEQ ID NO: 19519 - protein, 9 aa, synthetic construct
  source 1..9: note = Seed: LVVVGARGV (KRAS G12R)
FVVVGHRGW

SEQ ID NO: 19520 - protein, 9 aa, synthetic construct
  source 1..9: note = Seed: LVVVGARGV (KRAS G12R)
FVVVGHRGY

SEQ ID NO: 19521 - protein, 9 aa, synthetic construct
  source 1..9: note = Seed: LVVVGARGV (KRAS G12R)
FVVVGIRGA

SEQ ID NO: 19522 - protein, 9 aa, synthetic construct
  source 1..9: note = Seed: LVVVGARGV (KRAS G12R)
FVVVGIRGD

SEQ ID NO: 19523 - protein, 9 aa, synthetic construct
  source 1..9: note = Seed: LVVVGARGV (KRAS G12R)
FVVVGIRGE

SEQ ID NO: 19524 - protein, 9 aa, synthetic construct
  source 1..9: note = Seed: LVVVGARGV (KRAS G12R)
FVVVGIRGF

SEQ ID NO: 19525 - protein, 9 aa, synthetic construct
  source 1..9: note = Seed: LVVVGARGV (KRAS G12R)
FVVVGIRGG

SEQ ID NO: 19526 - protein, 9 aa, synthetic construct
  source 1..9: note = Seed: LVVVGARGV (KRAS G12R)
FVVVGIRGH

SEQ ID NO: 19527 - protein, 9 aa, synthetic construct
  source 1..9: note = Seed: LVVVGARGV (KRAS G12R)
FVVVGIRGI

SEQ ID NO: 19528 - protein, 9 aa, synthetic construct
  source 1..9: note = Seed: LVVVGARGV (KRAS G12R)
FVVVGIRGL

SEQ ID NO: 19529 - protein, 9 aa, synthetic construct
  source 1..9: note = Seed: LVVVGARGV (KRAS G12R)
FVVVGIRGM

SEQ ID NO: 19530 - protein, 9 aa, synthetic construct
  source 1..9: note = Seed: LVVVGARGV (KRAS G12R)
FVVVGIRGN

SEQ ID NO: 19531 - protein, 9 aa, synthetic construct
  source 1..9: note = Seed: LVVVGARGV (KRAS G12R)
FVVVGIRGP

SEQ ID NO: 19532 - protein, 9 aa, synthetic construct
  source 1..9: note = Seed: LVVVGARGV (KRAS G12R)
FVVVGIRGQ

SEQ ID NO: 19533 - protein, 9 aa, synthetic construct
  source 1..9: note = Seed: LVVVGARGV (KRAS G12R)
FVVVGIRGR

SEQ ID NO: 19534 - protein, 9 aa, synthetic construct
  source 1..9: note = Seed: LVVVGARGV (KRAS G12R)
FVVVGIRGS

SEQ ID NO: 19535 - protein, 9 aa, synthetic construct
  source 1..9: note = Seed: LVVVGARGV (KRAS G12R)
FVVVGIRGT

SEQ ID NO: 19536 - protein, 9 aa, synthetic construct
  source 1..9: note = Seed: LVVVGARGV (KRAS G12R)
FVVVGIRGV

SEQ ID NO: 19537 - protein, 9 aa, synthetic construct
  source 1..9: note = Seed: LVVVGARGV (KRAS G12R)
FVVVGIRGY

SEQ ID NO: 19538 - protein, 9 aa, synthetic construct
  source 1..9: note = Seed: LVVVGARGV (KRAS G12R)
FVVVGKRGA

SEQ ID NO: 19539 - protein, 9 aa, synthetic construct
  source 1..9: note = Seed: LVVVGARGV (KRAS G12R)
FVVVGKRGC

SEQ ID NO: 19540 - protein, 9 aa, synthetic construct
  source 1..9: note = Seed: LVVVGARGV (KRAS G12R)
FVVVGKRGE

SEQ ID NO: 19541 - protein, 9 aa, synthetic construct
  source 1..9: note = Seed: LVVVGARGV (KRAS G12R)
FVVVGKRGF

SEQ ID NO: 19542 - protein, 9 aa, synthetic construct
  source 1..9: note = Seed: LVVVGARGV (KRAS G12R)
FVVVGKRGG

SEQ ID NO: 19543 - protein, 9 aa, synthetic construct
  source 1..9: note = Seed: LVVVGARGV (KRAS G12R)
FVVVGKRGH

SEQ ID NO: 19544 - protein, 9 aa, synthetic construct
  source 1..9: note = Seed: LVVVGARGV (KRAS G12R)
FVVVGKRGI

SEQ ID NO: 19545 - protein, 9 aa, synthetic construct
  source 1..9: note = Seed: LVVVGARGV (KRAS G12R)
FVVVGKRGK

SEQ ID NO: 19546 - protein, 9 aa, synthetic construct
  source 1..9: note = Seed: LVVVGARGV (KRAS G12R)
FVVVGKRGL

SEQ ID NO: 19547 - protein, 9 aa, synthetic construct
  source 1..9: note = Seed: LVVVGARGV (KRAS G12R)
FVVVGKRGM

SEQ ID NO: 19548 - protein, 9 aa, synthetic construct
  source 1..9: note = Seed: LVVVGARGV (KRAS G12R)
FVVVGKRGN

SEQ ID NO: 19549 - protein, 9 aa, synthetic construct
  source 1..9: note = Seed: LVVVGARGV (KRAS G12R)
FVVVGKRGP

SEQ ID NO: 19550 - protein, 9 aa, synthetic construct
  source 1..9: note = Seed: LVVVGARGV (KRAS G12R)
FVVVGKRGQ

SEQ ID NO: 19551 - protein, 9 aa, synthetic construct
  source 1..9: note = Seed: LVVVGARGV (KRAS G12R)
FVVVGKRGR

SEQ ID NO: 19552 - protein, 9 aa, synthetic construct
  source 1..9: note = Seed: LVVVGARGV (KRAS G12R)
FVVVGKRGS

SEQ ID NO: 19553 - protein, 9 aa, synthetic construct
  source 1..9: note = Seed: LVVVGARGV (KRAS G12R)
FVVVGKRGT

SEQ ID NO: 19554 - protein, 9 aa, synthetic construct
  source 1..9: note = Seed: LVVVGARGV (KRAS G12R)
FVVVGKRGV

SEQ ID NO: 19555 - protein, 9 aa, synthetic construct
  source 1..9: note = Seed: LVVVGARGV (KRAS G12R)
FVVVGKRGW

SEQ ID NO: 19556 - protein, 9 aa, synthetic construct
  source 1..9: note = Seed: LVVVGARGV (KRAS G12R)
FVVVGKRGY

SEQ ID NO: 19557 - protein, 9 aa, synthetic construct
  source 1..9: note = Seed: LVVVGARGV (KRAS G12R)
FVVVGLRGA

SEQ ID NO: 19558 - protein, 9 aa, synthetic construct
  source 1..9: note = Seed: LVVVGARGV (KRAS G12R)
FVVVGLRGG

SEQ ID NO: 19559 - protein, 9 aa, synthetic construct
  source 1..9: note = Seed: LVVVGARGV (KRAS G12R)
FVVVGLRGI

SEQ ID NO: 19560 - protein, 9 aa, synthetic construct
  source 1..9: note = Seed: LVVVGARGV (KRAS G12R)
FVVVGLRGL

SEQ ID NO: 19561 - protein, 9 aa, synthetic construct
  source 1..9: note = Seed: LVVVGARGV (KRAS G12R)
FVVVGLRGM

SEQ ID NO: 19562 - protein, 9 aa, synthetic construct
  source 1..9: note = Seed: LVVVGARGV (KRAS G12R)
FVVVGLRGN

SEQ ID NO: 19563 - protein, 9 aa, synthetic construct
  source 1..9: note = Seed: LVVVGARGV (KRAS G12R)
FVVVGLRGQ

SEQ ID NO: 19564 - protein, 9 aa, synthetic construct
  source 1..9: note = Seed: LVVVGARGV (KRAS G12R)
FVVVGLRGR

SEQ ID NO: 19565 - protein, 9 aa, synthetic construct
  source 1..9: note = Seed: LVVVGARGV (KRAS G12R)
FVVVGLRGS

SEQ ID NO: 19566 - protein, 9 aa, synthetic construct
  source 1..9: note = Seed: LVVVGARGV (KRAS G12R)
FVVVGLRGT

SEQ ID NO: 19567 - protein, 9 aa, synthetic construct
  source 1..9: note = Seed: LVVVGARGV (KRAS G12R)
FVVVGLRGV

SEQ ID NO: 19568 - protein, 9 aa, synthetic construct
  source 1..9: note = Seed: LVVVGARGV (KRAS G12R)
FVVVGLRGY

SEQ ID NO: 19569 - protein, 9 aa, synthetic construct
  source 1..9: note = Seed: LVVVGARGV (KRAS G12R)
FVVVGMRGA

SEQ ID NO: 19570 - protein, 9 aa, synthetic construct
  source 1..9: note = Seed: LVVVGARGV (KRAS G12R)
FVVVGMRGF

SEQ ID NO: 19571 - protein, 9 aa, synthetic construct
  source 1..9: note = Seed: LVVVGARGV (KRAS G12R)
FVVVGMRGG

SEQ ID NO: 19572 - protein, 9 aa, synthetic construct
  source 1..9: note = Seed: LVVVGARGV (KRAS G12R)
FVVVGMRGH

SEQ ID NO: 19573 - protein, 9 aa, synthetic construct
  source 1..9: note = Seed: LVVVGARGV (KRAS G12R)
FVVVGMRGI

SEQ ID NO: 19574 - protein, 9 aa, synthetic construct
  source 1..9: note = Seed: LVVVGARGV (KRAS G12R)
FVVVGMRGL

SEQ ID NO: 19575 - protein, 9 aa, synthetic construct
  source 1..9: note = Seed: LVVVGARGV (KRAS G12R)
FVVVGMRGM

SEQ ID NO: 19576 - protein, 9 aa, synthetic construct
  source 1..9: note = Seed: LVVVGARGV (KRAS G12R)
FVVVGMRGN

SEQ ID NO: 19577 - protein, 9 aa, synthetic construct
  source 1..9: note = Seed: LVVVGARGV (KRAS G12R)
FVVVGMRGQ

SEQ ID NO: 19578 - protein, 9 aa, synthetic construct
  source 1..9: note = Seed: LVVVGARGV (KRAS G12R)
FVVVGMRGR

SEQ ID NO: 19579 - protein, 9 aa, synthetic construct
  source 1..9: note = Seed: LVVVGARGV (KRAS G12R)
FVVVGMRGS

SEQ ID NO: 19580 - protein, 9 aa, synthetic construct
  source 1..9: note = Seed: LVVVGARGV (KRAS G12R)
FVVVGMRGT

SEQ ID NO: 19581 - protein, 9 aa, synthetic construct
  source 1..9: note = Seed: LVVVGARGV (KRAS G12R)
FVVVGMRGV

SEQ ID NO: 19582 - protein, 9 aa, synthetic construct
  source 1..9: note = Seed: LVVVGARGV (KRAS G12R)
FVVVGMRGY

SEQ ID NO: 19583 - protein, 9 aa, synthetic construct
  source 1..9: note = Seed: LVVVGARGV (KRAS G12R)
FVVVGNRGA

SEQ ID NO: 19584 - protein, 9 aa, synthetic construct
  source 1..9: note = Seed: LVVVGARGV (KRAS G12R)
FVVVGNRGC

SEQ ID NO: 19585 - protein, 9 aa, synthetic construct
  source 1..9: note = Seed: LVVVGARGV (KRAS G12R)
FVVVGNRGD

SEQ ID NO: 19586 - protein, 9 aa, synthetic construct
  source 1..9: note = Seed: LVVVGARGV (KRAS G12R)
FVVVGNRGE

SEQ ID NO: 19587 - protein, 9 aa, synthetic construct
  source 1..9: note = Seed: LVVVGARGV (KRAS G12R)
FVVVGNRGF

SEQ ID NO: 19588 - protein, 9 aa, synthetic construct
  source 1..9: note = Seed: LVVVGARGV (KRAS G12R)
FVVVGNRGG

SEQ ID NO: 19589 - protein, 9 aa, synthetic construct
  source 1..9: note = Seed: LVVVGARGV (KRAS G12R)
FVVVGNRGH

SEQ ID NO: 19590 - protein, 9 aa, synthetic construct
  source 1..9: note = Seed: LVVVGARGV (KRAS G12R)
FVVVGNRGI

SEQ ID NO: 19591 - protein, 9 aa, synthetic construct
  source 1..9: note = Seed: LVVVGARGV (KRAS G12R)
FVVVGNRGK

SEQ ID NO: 19592 - protein, 9 aa, synthetic construct
  source 1..9: note = Seed: LVVVGARGV (KRAS G12R)
FVVVGNRGL

SEQ ID NO: 19593 - protein, 9 aa, synthetic construct
  source 1..9: note = Seed: LVVVGARGV (KRAS G12R)
FVVVGNRGM

SEQ ID NO: 19594 - protein, 9 aa, synthetic construct
  source 1..9: note = Seed: LVVVGARGV (KRAS G12R)
FVVVGNRGN

SEQ ID NO: 19595 - protein, 9 aa, synthetic construct
  source 1..9: note = Seed: LVVVGARGV (KRAS G12R)
FVVVGNRGP

SEQ ID NO: 19596 - protein, 9 aa, synthetic construct
  source 1..9: note = Seed: LVVVGARGV (KRAS G12R)
FVVVGNRGQ

SEQ ID NO: 19597 - protein, 9 aa, synthetic construct
  source 1..9: note = Seed: LVVVGARGV (KRAS G12R)
FVVVGNRGR

SEQ ID NO: 19598 - protein, 9 aa, synthetic construct
  source 1..9: note = Seed: LVVVGARGV (KRAS G12R)
FVVVGNRGS

SEQ ID NO: 19599 - protein, 9 aa, synthetic construct
  source 1..9: note = Seed: LVVVGARGV (KRAS G12R)
FVVVGNRGT

SEQ ID NO: 19600 - protein, 9 aa, synthetic construct
  source 1..9: note = Seed: LVVVGARGV (KRAS G12R)
FVVVGNRGV

SEQ ID NO: 19601 - protein, 9 aa, synthetic construct
  source 1..9: note = Seed: LVVVGARGV (KRAS G12R)
FVVVGNRGW

SEQ ID NO: 19602 - protein, 9 aa, synthetic construct
  source 1..9: note = Seed: LVVVGARGV (KRAS G12R)
FVVVGNRGY

SEQ ID NO: 19603 - protein, 9 aa, synthetic construct
  source 1..9: note = Seed: LVVVGARGV (KRAS G12R)
FVVVGPRGA

SEQ ID NO: 19604 - protein, 9 aa, synthetic construct
  source 1..9: note = Seed: LVVVGARGV (KRAS G12R)
FVVVGPRGC

SEQ ID NO: 19605 - protein, 9 aa, synthetic construct
  source 1..9: note = Seed: LVVVGARGV (KRAS G12R)
FVVVGPRGD

SEQ ID NO: 19606 - protein, 9 aa, synthetic construct
  source 1..9: note = Seed: LVVVGARGV (KRAS G12R)
FVVVGPRGE

SEQ ID NO: 19607 - protein, 9 aa, synthetic construct
  source 1..9: note = Seed: LVVVGARGV (KRAS G12R)
FVVVGPRGF

SEQ ID NO: 19608 - protein, 9 aa, synthetic construct
  source 1..9: note = Seed: LVVVGARGV (KRAS G12R)
FVVVGPRGG

SEQ ID NO: 19609 - protein, 9 aa, synthetic construct
  source 1..9: note = Seed: LVVVGARGV (KRAS G12R)
FVVVGPRGH

SEQ ID NO: 19610 - protein, 9 aa, synthetic construct
  source 1..9: note = Seed: LVVVGARGV (KRAS G12R)
FVVVGPRGI

SEQ ID NO: 19611 - protein, 9 aa, synthetic construct
  source 1..9: note = Seed: LVVVGARGV (KRAS G12R)
FVVVGPRGK

SEQ ID NO: 19612 - protein, 9 aa, synthetic construct
  source 1..9: note = Seed: LVVVGARGV (KRAS G12R)
FVVVGPRGL

SEQ ID NO: 19613 - protein, 9 aa, synthetic construct
  source 1..9: note = Seed: LVVVGARGV (KRAS G12R)
FVVVGPRGM

SEQ ID NO: 19614 - protein, 9 aa, synthetic construct
  source 1..9: note = Seed: LVVVGARGV (KRAS G12R)
FVVVGPRGN

SEQ ID NO: 19615 - protein, 9 aa, synthetic construct
  source 1..9: note = Seed: LVVVGARGV (KRAS G12R)
FVVVGPRGP

SEQ ID NO: 19616 - protein, 9 aa, synthetic construct
  source 1..9: note = Seed: LVVVGARGV (KRAS G12R)
FVVVGPRGQ

SEQ ID NO: 19617 - protein, 9 aa, synthetic construct
  source 1..9: note = Seed: LVVVGARGV (KRAS G12R)
FVVVGPRGR

SEQ ID NO: 19618 - protein, 9 aa, synthetic construct
  source 1..9: note = Seed: LVVVGARGV (KRAS G12R)
FVVVGPRGS

SEQ ID NO: 19619 - protein, 9 aa, synthetic construct
  source 1..9: note = Seed: LVVVGARGV (KRAS G12R)
FVVVGPRGT

SEQ ID NO: 19620 - protein, 9 aa, synthetic construct
  source 1..9: note = Seed: LVVVGARGV (KRAS G12R)
FVVVGPRGV

SEQ ID NO: 19621 - protein, 9 aa, synthetic construct
  source 1..9: note = Seed: LVVVGARGV (KRAS G12R)
FVVVGPRGW

SEQ ID NO: 19622 - protein, 9 aa, synthetic construct
  source 1..9: note = Seed: LVVVGARGV (KRAS G12R)
FVVVGPRGY

SEQ ID NO: 19623 - protein, 9 aa, synthetic construct
  source 1..9: note = Seed: LVVVGARGV (KRAS G12R)
FVVVGQRGA

SEQ ID NO: 19624 - protein, 9 aa, synthetic construct
  source 1..9: note = Seed: LVVVGARGV (KRAS G12R)
FVVVGQRGI

SEQ ID NO: 19625 - protein, 9 aa, synthetic construct
  source 1..9: note = Seed: LVVVGARGV (KRAS G12R)
FVVVGQRGL

SEQ ID NO: 19626 - protein, 9 aa, synthetic construct
  source 1..9: note = Seed: LVVVGARGV (KRAS G12R)
FVVVGQRGM

SEQ ID NO: 19627 - protein, 9 aa, synthetic construct
  source 1..9: note = Seed: LVVVGARGV (KRAS G12R)
FVVVGQRGR

SEQ ID NO: 19628 - protein, 9 aa, synthetic construct
  source 1..9: note = Seed: LVVVGARGV (KRAS G12R)
FVVVGQRGS

SEQ ID NO: 19629 - protein, 9 aa, synthetic construct
  source 1..9: note = Seed: LVVVGARGV (KRAS G12R)
FVVVGQRGT

SEQ ID NO: 19630 - protein, 9 aa, synthetic construct
  source 1..9: note = Seed: LVVVGARGV (KRAS G12R)
FVVVGQRGV

SEQ ID NO: 19631 - protein, 9 aa, synthetic construct
  source 1..9: note = Seed: LVVVGARGV (KRAS G12R)
FVVVGQRGY

SEQ ID NO: 19632 - protein, 9 aa, synthetic construct
  source 1..9: note = Seed: LVVVGARGV (KRAS G12R)
FVVVGRRGA

SEQ ID NO: 19633 - protein, 9 aa, synthetic construct
  source 1..9: note = Seed: LVVVGARGV (KRAS G12R)
FVVVGRRGC

SEQ ID NO: 19634 - protein, 9 aa, synthetic construct
  source 1..9: note = Seed: LVVVGARGV (KRAS G12R)
FVVVGRRGD

SEQ ID NO: 19635 - protein, 9 aa, synthetic construct
  source 1..9: note = Seed: LVVVGARGV (KRAS G12R)
FVVVGRRGE

SEQ ID NO: 19636 - protein, 9 aa, synthetic construct
  source 1..9: note = Seed: LVVVGARGV (KRAS G12R)
FVVVGRRGF

SEQ ID NO: 19637 - protein, 9 aa, synthetic construct
  source 1..9: note = Seed: LVVVGARGV (KRAS G12R)
FVVVGRRGG

SEQ ID NO: 19638 - protein, 9 aa, synthetic construct
  source 1..9: note = Seed: LVVVGARGV (KRAS G12R)
FVVVGRRGH

SEQ ID NO: 19639 - protein, 9 aa, synthetic construct
  source 1..9: note = Seed: LVVVGARGV (KRAS G12R)
FVVVGRRGI

SEQ ID NO: 19640 - protein, 9 aa, synthetic construct
  source 1..9: note = Seed: LVVVGARGV (KRAS G12R)
FVVVGRRGK

SEQ ID NO: 19641 - protein, 9 aa, synthetic construct
  source 1..9: note = Seed: LVVVGARGV (KRAS G12R)
FVVVGRRGL

SEQ ID NO: 19642 - protein, 9 aa, synthetic construct
  source 1..9: note = Seed: LVVVGARGV (KRAS G12R)
FVVVGRRGM

SEQ ID NO: 19643 - protein, 9 aa, synthetic construct
  source 1..9: note = Seed: LVVVGARGV (KRAS G12R)
FVVVGRRGN

SEQ ID NO: 19644 - protein, 9 aa, synthetic construct
  source 1..9: note = Seed: LVVVGARGV (KRAS G12R)
FVVVGRRGP

SEQ ID NO: 19645 - protein, 9 aa, synthetic construct
  source 1..9: note = Seed: LVVVGARGV (KRAS G12R)
FVVVGRRGQ

SEQ ID NO: 19646 - protein, 9 aa, synthetic construct
  source 1..9: note = Seed: LVVVGARGV (KRAS G12R)
FVVVGRRGR

SEQ ID NO: 19647 - protein, 9 aa, synthetic construct
  source 1..9: note = Seed: LVVVGARGV (KRAS G12R)
FVVVGRRGS

SEQ ID NO: 19648 - protein, 9 aa, synthetic construct
  source 1..9: note = Seed: LVVVGARGV (KRAS G12R)
FVVVGRRGT

SEQ ID NO: 19649 - protein, 9 aa, synthetic construct
  source 1..9: note = Seed: LVVVGARGV (KRAS G12R)
FVVVGRRGV

SEQ ID NO: 19650 - protein, 9 aa, synthetic construct
  source 1..9: note = Seed: LVVVGARGV (KRAS G12R)
FVVVGRRGW

SEQ ID NO: 19651 - protein, 9 aa, synthetic construct
  source 1..9: note = Seed: LVVVGARGV (KRAS G12R)
FVVVGRRGY

SEQ ID NO: 19652 - protein, 9 aa, synthetic construct
  source 1..9: note = Seed: LVVVGARGV (KRAS G12R)
FVVVGSRGA

SEQ ID NO: 19653 - protein, 9 aa, synthetic construct
  source 1..9: note = Seed: LVVVGARGV (KRAS G12R)
FVVVGSRGC

SEQ ID NO: 19654 - protein, 9 aa, synthetic construct
  source 1..9: note = Seed: LVVVGARGV (KRAS G12R)
FVVVGSRGD

SEQ ID NO: 19655 - protein, 9 aa, synthetic construct
  source 1..9: note = Seed: LVVVGARGV (KRAS G12R)
FVVVGSRGE

SEQ ID NO: 19656 - protein, 9 aa, synthetic construct
  source 1..9: note = Seed: LVVVGARGV (KRAS G12R)
FVVVGSRGF

SEQ ID NO: 19657 - protein, 9 aa, synthetic construct
  source 1..9: note = Seed: LVVVGARGV (KRAS G12R)
FVVVGSRGG

SEQ ID NO: 19658 - protein, 9 aa, synthetic construct
  source 1..9: note = Seed: LVVVGARGV (KRAS G12R)
FVVVGSRGH

SEQ ID NO: 19659 - protein, 9 aa, synthetic construct
  source 1..9: note = Seed: LVVVGARGV (KRAS G12R)
FVVVGSRGI

SEQ ID NO: 19660 - protein, 9 aa, synthetic construct
  source 1..9: note = Seed: LVVVGARGV (KRAS G12R)
FVVVGSRGK

SEQ ID NO: 19661 - protein, 9 aa, synthetic construct
  source 1..9: note = Seed: LVVVGARGV (KRAS G12R)
FVVVGSRGM

SEQ ID NO: 19662 - protein, 9 aa, synthetic construct
  source 1..9: note = Seed: LVVVGARGV (KRAS G12R)
FVVVGSRGN

SEQ ID NO: 19663 - protein, 9 aa, synthetic construct
  source 1..9: note = Seed: LVVVGARGV (KRAS G12R)
FVVVGSRGP

SEQ ID NO: 19664 - protein, 9 aa, synthetic construct
  source 1..9: note = Seed: LVVVGARGV (KRAS G12R)
FVVVGSRGQ

SEQ ID NO: 19665 - protein, 9 aa, synthetic construct
  source 1..9: note = Seed: LVVVGARGV (KRAS G12R)
FVVVGSRGR

SEQ ID NO: 19666 - protein, 9 aa, synthetic construct
  source 1..9: note = Seed: LVVVGARGV (KRAS G12R)
FVVVGSRGS

SEQ ID NO: 19667 - protein, 9 aa, synthetic construct
  source 1..9: note = Seed: LVVVGARGV (KRAS G12R)
FVVVGSRGT

SEQ ID NO: 19668 - protein, 9 aa, synthetic construct
  source 1..9: note = Seed: LVVVGARGV (KRAS G12R)
FVVVGSRGV

SEQ ID NO: 19669 - protein, 9 aa, synthetic construct
  source 1..9: note = Seed: LVVVGARGV (KRAS G12R)
FVVVGSRGW

SEQ ID NO: 19670 - protein, 9 aa, synthetic construct
  source 1..9: note = Seed: LVVVGARGV (KRAS G12R)
FVVVGSRGY

SEQ ID NO: 19671 - protein, 9 aa, synthetic construct
  source 1..9: note = Seed: LVVVGARGV (KRAS G12R)
FVVVGTRGA

SEQ ID NO: 19672 - protein, 9 aa, synthetic construct
  source 1..9: note = Seed: LVVVGARGV (KRAS G12R)
FVVVGTRGC

SEQ ID NO: 19673 - protein, 9 aa, synthetic construct
  source 1..9: note = Seed: LVVVGARGV (KRAS G12R)
FVVVGTRGD

SEQ ID NO: 19674 - protein, 9 aa, synthetic construct
  source 1..9: note = Seed: LVVVGARGV (KRAS G12R)
FVVVGTRGE

SEQ ID NO: 19675 - protein, 9 aa, synthetic construct
  source 1..9: note = Seed: LVVVGARGV (KRAS G12R)
FVVVGTRGF

SEQ ID NO: 19676 - protein, 9 aa, synthetic construct
  source 1..9: note = Seed: LVVVGARGV (KRAS G12R)
FVVVGTRGG

SEQ ID NO: 19677 - protein, 9 aa, synthetic construct
  source 1..9: note = Seed: LVVVGARGV (KRAS G12R)
FVVVGTRGH

SEQ ID NO: 19678 - protein, 9 aa, synthetic construct
  source 1..9: note = Seed: LVVVGARGV (KRAS G12R)
FVVVGTRGI

SEQ ID NO: 19679 - protein, 9 aa, synthetic construct
  source 1..9: note = Seed: LVVVGARGV (KRAS G12R)
FVVVGTRGK

SEQ ID NO: 19680 - protein, 9 aa, synthetic construct
  source 1..9: note = Seed: LVVVGARGV (KRAS G12R)
FVVVGTRGL

SEQ ID NO: 19681 - protein, 9 aa, synthetic construct
  source 1..9: note = Seed: LVVVGARGV (KRAS G12R)
FVVVGTRGM

SEQ ID NO: 19682 - protein, 9 aa, synthetic construct
  source 1..9: note = Seed: LVVVGARGV (KRAS G12R)
FVVVGTRGN

SEQ ID NO: 19683 - protein, 9 aa, synthetic construct
  source 1..9: note = Seed: LVVVGARGV (KRAS G12R)
FVVVGTRGP

SEQ ID NO: 19684 - protein, 9 aa, synthetic construct
  source 1..9: note = Seed: LVVVGARGV (KRAS G12R)
FVVVGTRGQ

SEQ ID NO: 19685 - protein, 9 aa, synthetic construct
  source 1..9: note = Seed: LVVVGARGV (KRAS G12R)
FVVVGTRGR

SEQ ID NO: 19686 - protein, 9 aa, synthetic construct
  source 1..9: note = Seed: LVVVGARGV (KRAS G12R)
FVVVGTRGS

SEQ ID NO: 19687 - protein, 9 aa, synthetic construct
  source 1..9: note = Seed: LVVVGARGV (KRAS G12R)
FVVVGTRGT

SEQ ID NO: 19688 - protein, 9 aa, synthetic construct
  source 1..9: note = Seed: LVVVGARGV (KRAS G12R)
FVVVGTRGV

SEQ ID NO: 19689 - protein, 9 aa, synthetic construct
  source 1..9: note = Seed: LVVVGARGV (KRAS G12R)
FVVVGTRGW

SEQ ID NO: 19690 - protein, 9 aa, synthetic construct
  source 1..9: note = Seed: LVVVGARGV (KRAS G12R)
FVVVGTRGY

SEQ ID NO: 19691 - protein, 9 aa, synthetic construct
  source 1..9: note = Seed: LVVVGARGV (KRAS G12R)
FVVVGVRGA

SEQ ID NO: 19692 - protein, 9 aa, synthetic construct
  source 1..9: note = Seed: LVVVGARGV (KRAS G12R)
FVVVGVRGC

SEQ ID NO: 19693 - protein, 9 aa, synthetic construct
  source 1..9: note = Seed: LVVVGARGV (KRAS G12R)
FVVVGVRGD

SEQ ID NO: 19694 - protein, 9 aa, synthetic construct
  source 1..9: note = Seed: LVVVGARGV (KRAS G12R)
FVVVGVRGE

SEQ ID NO: 19695 - protein, 9 aa, synthetic construct
  source 1..9: note = Seed: LVVVGARGV (KRAS G12R)
FVVVGVRGF

SEQ ID NO: 19696 - protein, 9 aa, synthetic construct
  source 1..9: note = Seed: LVVVGARGV (KRAS G12R)
FVVVGVRGG

SEQ ID NO: 19697 - protein, 9 aa, synthetic construct
  source 1..9: note = Seed: LVVVGARGV (KRAS G12R)
FVVVGVRGH

SEQ ID NO: 19698 - protein, 9 aa, synthetic construct
  source 1..9: note = Seed: LVVVGARGV (KRAS G12R)
FVVVGVRGI

SEQ ID NO: 19699 - protein, 9 aa, synthetic construct
  source 1..9: note = Seed: LVVVGARGV (KRAS G12R)
FVVVGVRGK

SEQ ID NO: 19700 - protein, 9 aa, synthetic construct
  source 1..9: note = Seed: LVVVGARGV (KRAS G12R)
FVVVGVRGL

SEQ ID NO: 19701 - protein, 9 aa, synthetic construct
  source 1..9: note = Seed: LVVVGARGV (KRAS G12R)
FVVVGVRGM

SEQ ID NO: 19702 - protein, 9 aa, synthetic construct
  source 1..9: note = Seed: LVVVGARGV (KRAS G12R)
FVVVGVRGN

SEQ ID NO: 19703 - protein, 9 aa, synthetic construct
  source 1..9: note = Seed: LVVVGARGV (KRAS G12R)
FVVVGVRGP

SEQ ID NO: 19704 - protein, 9 aa, synthetic construct
  source 1..9: note = Seed: LVVVGARGV (KRAS G12R)
FVVVGVRGQ

SEQ ID NO: 19705 - protein, 9 aa, synthetic construct
  source 1..9: note = Seed: LVVVGARGV (KRAS G12R)
FVVVGVRGR

SEQ ID NO: 19706 - protein, 9 aa, synthetic construct
  source 1..9: note = Seed: LVVVGARGV (KRAS G12R)
FVVVGVRGS

SEQ ID NO: 19707 - protein, 9 aa, synthetic construct
  source 1..9: note = Seed: LVVVGARGV (KRAS G12R)
FVVVGVRGT

SEQ ID NO: 19708 - protein, 9 aa, synthetic construct
  source 1..9: note = Seed: LVVVGARGV (KRAS G12R)
FVVVGVRGV

SEQ ID NO: 19709 - protein, 9 aa, synthetic construct
  source 1..9: note = Seed: LVVVGARGV (KRAS G12R)
FVVVGVRGY

SEQ ID NO: 19710 - protein, 9 aa, synthetic construct
  source 1..9: note = Seed: LVVVGARGV (KRAS G12R)
FVVVGWRGA

SEQ ID NO: 19711 - protein, 9 aa, synthetic construct
  source 1..9: note = Seed: LVVVGARGV (KRAS G12R)
FVVVGWRGI

SEQ ID NO: 19712 - protein, 9 aa, synthetic construct
  source 1..9: note = Seed: LVVVGARGV (KRAS G12R)
FVVVGWRGL

SEQ ID NO: 19713 - protein, 9 aa, synthetic construct
  source 1..9: note = Seed: LVVVGARGV (KRAS G12R)
FVVVGWRGM

SEQ ID NO: 19714 - protein, 9 aa, synthetic construct
  source 1..9: note = Seed: LVVVGARGV (KRAS G12R)
FVVVGWRGV

SEQ ID NO: 19715 - protein, 9 aa, synthetic construct
  source 1..9: note = Seed: LVVVGARGV (KRAS G12R)
FVVVGYRGA

SEQ ID NO: 19716 - protein, 9 aa, synthetic construct
  source 1..9: note = Seed: LVVVGARGV (KRAS G12R)
FVVVGYRGF

SEQ ID NO: 19717 - protein, 9 aa, synthetic construct
  source 1..9: note = Seed: LVVVGARGV (KRAS G12R)
FVVVGYRGI

SEQ ID NO: 19718 - protein, 9 aa, synthetic construct
  source 1..9: note = Seed: LVVVGARGV (KRAS G12R)
FVVVGYRGL

SEQ ID NO: 19719 - protein, 9 aa, synthetic construct
  source 1..9: note = Seed: LVVVGARGV (KRAS G12R)
FVVVGYRGM

SEQ ID NO: 19720 - protein, 9 aa, synthetic construct
  source 1..9: note = Seed: LVVVGARGV (KRAS G12R)
FVVVGYRGV

SEQ ID NO: 19721 - protein, 9 aa, synthetic construct
  source 1..9: note = Seed: LVVVGARGV (KRAS G12R)
FVVWGARGA

SEQ ID NO: 19722 - protein, 9 aa, synthetic construct
  source 1..9: note = Seed: LVVVGARGV (KRAS G12R)
FVVWGARGF

SEQ ID NO: 19723 - protein, 9 aa, synthetic construct
  source 1..9: note = Seed: LVVVGARGV (KRAS G12R)
FVVWGARGH

SEQ ID NO: 19724 - protein, 9 aa, synthetic construct
  source 1..9: note = Seed: LVVVGARGV (KRAS G12R)
FVVWGARGI

SEQ ID NO: 19725 - protein, 9 aa, synthetic construct
  source 1..9: note = Seed: LVVVGARGV (KRAS G12R)
FVVWGARGK

SEQ ID NO: 19726 - protein, 9 aa, synthetic construct
  source 1..9: note = Seed: LVVVGARGV (KRAS G12R)
FVVWGARGL

SEQ ID NO: 19727 - protein, 9 aa, synthetic construct
  source 1..9: note = Seed: LVVVGARGV (KRAS G12R)
FVVWGARGM

SEQ ID NO: 19728 - protein, 9 aa, synthetic construct
  source 1..9: note = Seed: LVVVGARGV (KRAS G12R)
FVVWGARGR

SEQ ID NO: 19729 - protein, 9 aa, synthetic construct
  source 1..9: note = Seed: LVVVGARGV (KRAS G12R)
FVVWGARGS

SEQ ID NO: 19730 - protein, 9 aa, synthetic construct
  source 1..9: note = Seed: LVVVGARGV (KRAS G12R)
FVVWGARGT

SEQ ID NO: 19731 - protein, 9 aa, synthetic construct
  source 1..9: note = Seed: LVVVGARGV (KRAS G12R)
FVVWGARGV

SEQ ID NO: 19732 - protein, 9 aa, synthetic construct
  source 1..9: note = Seed: LVVVGARGV (KRAS G12R)
FVVWGARGY

SEQ ID NO: 19733 - protein, 9 aa, synthetic construct
  source 1..9: note = Seed: LVVVGARGV (KRAS G12R)
FVVWGCRGR

SEQ ID NO: 19734 - protein, 9 aa, synthetic construct
  source 1..9: note = Seed: LVVVGARGV (KRAS G12R)
FVVWGFRGI

SEQ ID NO: 19735 - protein, 9 aa, synthetic construct
  source 1..9: note = Seed: LVVVGARGV (KRAS G12R)
FVVWGFRGL

SEQ ID NO: 19736 - protein, 9 aa, synthetic construct
  source 1..9: note = Seed: LVVVGARGV (KRAS G12R)
FVVWGFRGR

SEQ ID NO: 19737 - protein, 9 aa, synthetic construct
  source 1..9: note = Seed: LVVVGARGV (KRAS G12R)
FVVWGFRGV

SEQ ID NO: 19738 - protein, 9 aa, synthetic construct
  source 1..9: note = Seed: LVVVGARGV (KRAS G12R)
FVVWGGRGA

SEQ ID NO: 19739 - protein, 9 aa, synthetic construct
  source 1..9: note = Seed: LVVVGARGV (KRAS G12R)
FVVWGGRGI

SEQ ID NO: 19740 - protein, 9 aa, synthetic construct
  source 1..9: note = Seed: LVVVGARGV (KRAS G12R)
FVVWGGRGL

SEQ ID NO: 19741 - protein, 9 aa, synthetic construct
  source 1..9: note = Seed: LVVVGARGV (KRAS G12R)
FVVWGGRGM

SEQ ID NO: 19742 - protein, 9 aa, synthetic construct
  source 1..9: note = Seed: LVVVGARGV (KRAS G12R)
FVVWGGRGR

SEQ ID NO: 19743 - protein, 9 aa, synthetic construct
  source 1..9: note = Seed: LVVVGARGV (KRAS G12R)
FVVWGGRGV

SEQ ID NO: 19744 - protein, 9 aa, synthetic construct
  source 1..9: note = Seed: LVVVGARGV (KRAS G12R)
FVVWGHRGA

SEQ ID NO: 19745 - protein, 9 aa, synthetic construct
  source 1..9: note = Seed: LVVVGARGV (KRAS G12R)
FVVWGHRGF

SEQ ID NO: 19746 - protein, 9 aa, synthetic construct
  source 1..9: note = Seed: LVVVGARGV (KRAS G12R)
FVVWGHRGH

SEQ ID NO: 19747 - protein, 9 aa, synthetic construct
  source 1..9: note = Seed: LVVVGARGV (KRAS G12R)
FVVWGHRGI

SEQ ID NO: 19748 - protein, 9 aa, synthetic construct
  source 1..9: note = Seed: LVVVGARGV (KRAS G12R)
FVVWGHRGK

SEQ ID NO: 19749 - protein, 9 aa, synthetic construct
  source 1..9: note = Seed: LVVVGARGV (KRAS G12R)
FVVWGHRGL

SEQ ID NO: 19750 - protein, 9 aa, synthetic construct
  source 1..9: note = Seed: LVVVGARGV (KRAS G12R)
FVVWGHRGM

SEQ ID NO: 19751 - protein, 9 aa, synthetic construct
  source 1..9: note = Seed: LVVVGARGV (KRAS G12R)
FVVWGHRGR

SEQ ID NO: 19752 - protein, 9 aa, synthetic construct
  source 1..9: note = Seed: LVVVGARGV (KRAS G12R)
FVVWGHRGV

SEQ ID NO: 19753 - protein, 9 aa, synthetic construct
  source 1..9: note = Seed: LVVVGARGV (KRAS G12R)
FVVWGHRGY

SEQ ID NO: 19754 - protein, 9 aa, synthetic construct
  source 1..9: note = Seed: LVVVGARGV (KRAS G12R)
FVVWGIRGA

SEQ ID NO: 19755 - protein, 9 aa, synthetic construct
  source 1..9: note = Seed: LVVVGARGV (KRAS G12R)
FVVWGIRGF

SEQ ID NO: 19756 - protein, 9 aa, synthetic construct
  source 1..9: note = Seed: LVVVGARGV (KRAS G12R)
FVVWGIRGH

SEQ ID NO: 19757 - protein, 9 aa, synthetic construct
  source 1..9: note = Seed: LVVVGARGV (KRAS G12R)
FVVWGIRGI

SEQ ID NO: 19758 - protein, 9 aa, synthetic construct
  source 1..9: note = Seed: LVVVGARGV (KRAS G12R)
FVVWGIRGK

SEQ ID NO: 19759 - protein, 9 aa, synthetic construct
  source 1..9: note = Seed: LVVVGARGV (KRAS G12R)
FVVWGIRGL

SEQ ID NO: 19760 - protein, 9 aa, synthetic construct
  source 1..9: note = Seed: LVVVGARGV (KRAS G12R)
FVVWGIRGM

SEQ ID NO: 19761 - protein, 9 aa, synthetic construct
  source 1..9: note = Seed: LVVVGARGV (KRAS G12R)
FVVWGIRGQ

SEQ ID NO: 19762 - protein, 9 aa, synthetic construct
  source 1..9: note = Seed: LVVVGARGV (KRAS G12R)
FVVWGIRGR

SEQ ID NO: 19763 - protein, 9 aa, synthetic construct
  source 1..9: note = Seed: LVVVGARGV (KRAS G12R)
FVVWGIRGV

SEQ ID NO: 19764 - protein, 9 aa, synthetic construct
  source 1..9: note = Seed: LVVVGARGV (KRAS G12R)
FVVWGIRGY

SEQ ID NO: 19765 - protein, 9 aa, synthetic construct
  source 1..9: note = Seed: LVVVGARGV (KRAS G12R)
FVVWGKRGA

SEQ ID NO: 19766 - protein, 9 aa, synthetic construct
  source 1..9: note = Seed: LVVVGARGV (KRAS G12R)
FVVWGKRGF

SEQ ID NO: 19767 - protein, 9 aa, synthetic construct
  source 1..9: note = Seed: LVVVGARGV (KRAS G12R)
FVVWGKRGG

SEQ ID NO: 19768 - protein, 9 aa, synthetic construct
  source 1..9: note = Seed: LVVVGARGV (KRAS G12R)
FVVWGKRGH

SEQ ID NO: 19769 - protein, 9 aa, synthetic construct
  source 1..9: note = Seed: LVVVGARGV (KRAS G12R)
FVVWGKRGI

SEQ ID NO: 19770 - protein, 9 aa, synthetic construct
  source 1..9: note = Seed: LVVVGARGV (KRAS G12R)
FVVWGKRGK

SEQ ID NO: 19771 - protein, 9 aa, synthetic construct
  source 1..9: note = Seed: LVVVGARGV (KRAS G12R)
FVVWGKRGL

SEQ ID NO: 19772 - protein, 9 aa, synthetic construct
  source 1..9: note = Seed: LVVVGARGV (KRAS G12R)
FVVWGKRGM

SEQ ID NO: 19773 - protein, 9 aa, synthetic construct
  source 1..9: note = Seed: LVVVGARGV (KRAS G12R)
FVVWGKRGN

SEQ ID NO: 19774 - protein, 9 aa, synthetic construct
  source 1..9: note = Seed: LVVVGARGV (KRAS G12R)
FVVWGKRGP

SEQ ID NO: 19775 - protein, 9 aa, synthetic construct
  source 1..9: note = Seed: LVVVGARGV (KRAS G12R)
FVVWGKRGQ

SEQ ID NO: 19776 - protein, 9 aa, synthetic construct
  source 1..9: note = Seed: LVVVGARGV (KRAS G12R)
FVVWGKRGR

SEQ ID NO: 19777 - protein, 9 aa, synthetic construct
  source 1..9: note = Seed: LVVVGARGV (KRAS G12R)
FVVWGKRGS

SEQ ID NO: 19778 - protein, 9 aa, synthetic construct
  source 1..9: note = Seed: LVVVGARGV (KRAS G12R)
FVVWGKRGT

SEQ ID NO: 19779 - protein, 9 aa, synthetic construct
  source 1..9: note = Seed: LVVVGARGV (KRAS G12R)
FVVWGKRGV

SEQ ID NO: 19780 - protein, 9 aa, synthetic construct
  source 1..9: note = Seed: LVVVGARGV (KRAS G12R)
FVVWGKRGW

SEQ ID NO: 19781 - protein, 9 aa, synthetic construct
  source 1..9: note = Seed: LVVVGARGV (KRAS G12R)
FVVWGKRGY

SEQ ID NO: 19782 - protein, 9 aa, synthetic construct
  source 1..9: note = Seed: LVVVGARGV (KRAS G12R)
FVVWGLRGA

SEQ ID NO: 19783 - protein, 9 aa, synthetic construct
  source 1..9: note = Seed: LVVVGARGV (KRAS G12R)
FVVWGLRGH

SEQ ID NO: 19784 - protein, 9 aa, synthetic construct
  source 1..9: note = Seed: LVVVGARGV (KRAS G12R)
FVVWGLRGK

SEQ ID NO: 19785 - protein, 9 aa, synthetic construct
  source 1..9: note = Seed: LVVVGARGV (KRAS G12R)
FVVWGLRGL

SEQ ID NO: 19786 - protein, 9 aa, synthetic construct
  source 1..9: note = Seed: LVVVGARGV (KRAS G12R)
FVVWGLRGM

SEQ ID NO: 19787 - protein, 9 aa, synthetic construct
  source 1..9: note = Seed: LVVVGARGV (KRAS G12R)
FVVWGLRGR

SEQ ID NO: 19788 - protein, 9 aa, synthetic construct
  source 1..9: note = Seed: LVVVGARGV (KRAS G12R)
FVVWGLRGY

SEQ ID NO: 19789 - protein, 9 aa, synthetic construct
  source 1..9: note = Seed: LVVVGARGV (KRAS G12R)
FVVWGMRGA

SEQ ID NO: 19790 - protein, 9 aa, synthetic construct
  source 1..9: note = Seed: LVVVGARGV (KRAS G12R)
FVVWGMRGF

SEQ ID NO: 19791 - protein, 9 aa, synthetic construct
  source 1..9: note = Seed: LVVVGARGV (KRAS G12R)
FVVWGMRGH

SEQ ID NO: 19792 - protein, 9 aa, synthetic construct
  source 1..9: note = Seed: LVVVGARGV (KRAS G12R)
FVVWGMRGI

SEQ ID NO: 19793 - protein, 9 aa, synthetic construct
  source 1..9: note = Seed: LVVVGARGV (KRAS G12R)
FVVWGMRGK

SEQ ID NO: 19794 - protein, 9 aa, synthetic construct
  source 1..9: note = Seed: LVVVGARGV (KRAS G12R)
FVVWGMRGL

SEQ ID NO: 19795 - protein, 9 aa, synthetic construct
  source 1..9: note = Seed: LVVVGARGV (KRAS G12R)
FVVWGMRGM

SEQ ID NO: 19796 - protein, 9 aa, synthetic construct
  source 1..9: note = Seed: LVVVGARGV (KRAS G12R)
FVVWGMRGR

SEQ ID NO: 19797 - protein, 9 aa, synthetic construct
  source 1..9: note = Seed: LVVVGARGV (KRAS G12R)
FVVWGMRGV

SEQ ID NO: 19798 - protein, 9 aa, synthetic construct
  source 1..9: note = Seed: LVVVGARGV (KRAS G12R)
FVVWGMRGY

SEQ ID NO: 19799 - protein, 9 aa, synthetic construct
  source 1..9: note = Seed: LVVVGARGV (KRAS G12R)
FVVWGNRGA

SEQ ID NO: 19800 - protein, 9 aa, synthetic construct
  source 1..9: note = Seed: LVVVGARGV (KRAS G12R)
FVVWGNRGF

SEQ ID NO: 19801 - protein, 9 aa, synthetic construct
  source 1..9: note = Seed: LVVVGARGV (KRAS G12R)
FVVWGNRGI

SEQ ID NO: 19802 - protein, 9 aa, synthetic construct
  source 1..9: note = Seed: LVVVGARGV (KRAS G12R)
FVVWGNRGK

SEQ ID NO: 19803 - protein, 9 aa, synthetic construct
  source 1..9: note = Seed: LVVVGARGV (KRAS G12R)
FVVWGNRGL

SEQ ID NO: 19804 - protein, 9 aa, synthetic construct
  source 1..9: note = Seed: LVVVGARGV (KRAS G12R)
FVVWGNRGM

SEQ ID NO: 19805 - protein, 9 aa, synthetic construct
  source 1..9: note = Seed: LVVVGARGV (KRAS G12R)
FVVWGNRGR

SEQ ID NO: 19806 - protein, 9 aa, synthetic construct
  source 1..9: note = Seed: LVVVGARGV (KRAS G12R)
FVVWGNRGT

SEQ ID NO: 19807 - protein, 9 aa, synthetic construct
  source 1..9: note = Seed: LVVVGARGV (KRAS G12R)
FVVWGNRGV

SEQ ID NO: 19808 - protein, 9 aa, synthetic construct
  source 1..9: note = Seed: LVVVGARGV (KRAS G12R)
FVVWGNRGY

SEQ ID NO: 19809 - protein, 9 aa, synthetic construct
  source 1..9: note = Seed: LVVVGARGV (KRAS G12R)
FVVWGPRGA

SEQ ID NO: 19810 - protein, 9 aa, synthetic construct
  source 1..9: note = Seed: LVVVGARGV (KRAS G12R)
FVVWGPRGI

SEQ ID NO: 19811 - protein, 9 aa, synthetic construct
  source 1..9: note = Seed: LVVVGARGV (KRAS G12R)
FVVWGPRGK

SEQ ID NO: 19812 - protein, 9 aa, synthetic construct
  source 1..9: note = Seed: LVVVGARGV (KRAS G12R)
FVVWGPRGL

SEQ ID NO: 19813 - protein, 9 aa, synthetic construct
  source 1..9: note = Seed: LVVVGARGV (KRAS G12R)
FVVWGPRGM

SEQ ID NO: 19814 - protein, 9 aa, synthetic construct
  source 1..9: note = Seed: LVVVGARGV (KRAS G12R)
FVVWGPRGR

SEQ ID NO: 19815 - protein, 9 aa, synthetic construct
  source 1..9: note = Seed: LVVVGARGV (KRAS G12R)
FVVWGPRGV

SEQ ID NO: 19816 - protein, 9 aa, synthetic construct
  source 1..9: note = Seed: LVVVGARGV (KRAS G12R)
FVVWGQRGK

SEQ ID NO: 19817 - protein, 9 aa, synthetic construct
  source 1..9: note = Seed: LVVVGARGV (KRAS G12R)
FVVWGQRGL

SEQ ID NO: 19818 - protein, 9 aa, synthetic construct
  source 1..9: note = Seed: LVVVGARGV (KRAS G12R)
FVVWGQRGM

SEQ ID NO: 19819 - protein, 9 aa, synthetic construct
  source 1..9: note = Seed: LVVVGARGV (KRAS G12R)
FVVWGQRGR

SEQ ID NO: 19820 - protein, 9 aa, synthetic construct
  source 1..9: note = Seed: LVVVGARGV (KRAS G12R)
FVVWGRRGA

SEQ ID NO: 19821 - protein, 9 aa, synthetic construct
  source 1..9: note = Seed: LVVVGARGV (KRAS G12R)
FVVWGRRGC

SEQ ID NO: 19822 - protein, 9 aa, synthetic construct
  source 1..9: note = Seed: LVVVGARGV (KRAS G12R)
FVVWGRRGF

SEQ ID NO: 19823 - protein, 9 aa, synthetic construct
  source 1..9: note = Seed: LVVVGARGV (KRAS G12R)
FVVWGRRGG

SEQ ID NO: 19824 - protein, 9 aa, synthetic construct
  source 1..9: note = Seed: LVVVGARGV (KRAS G12R)
FVVWGRRGH

SEQ ID NO: 19825 - protein, 9 aa, synthetic construct
  source 1..9: note = Seed: LVVVGARGV (KRAS G12R)
FVVWGRRGI

SEQ ID NO: 19826 - protein, 9 aa, synthetic construct
  source 1..9: note = Seed: LVVVGARGV (KRAS G12R)
FVVWGRRGK

SEQ ID NO: 19827 - protein, 9 aa, synthetic construct
  source 1..9: note = Seed: LVVVGARGV (KRAS G12R)
FVVWGRRGL

SEQ ID NO: 19828 - protein, 9 aa, synthetic construct
  source 1..9: note = Seed: LVVVGARGV (KRAS G12R)
FVVWGRRGM

SEQ ID NO: 19829 - protein, 9 aa, synthetic construct
  source 1..9: note = Seed: LVVVGARGV (KRAS G12R)
FVVWGRRGN

SEQ ID NO: 19830 - protein, 9 aa, synthetic construct
  source 1..9: note = Seed: LVVVGARGV (KRAS G12R)
FVVWGRRGP

SEQ ID NO: 19831 - protein, 9 aa, synthetic construct
  source 1..9: note = Seed: LVVVGARGV (KRAS G12R)
FVVWGRRGQ

SEQ ID NO: 19832 - protein, 9 aa, synthetic construct
  source 1..9: note = Seed: LVVVGARGV (KRAS G12R)
FVVWGRRGR

SEQ ID NO: 19833 - protein, 9 aa, synthetic construct
  source 1..9: note = Seed: LVVVGARGV (KRAS G12R)
FVVWGRRGS

SEQ ID NO: 19834 - protein, 9 aa, synthetic construct
  source 1..9: note = Seed: LVVVGARGV (KRAS G12R)
FVVWGRRGT

SEQ ID NO: 19835 - protein, 9 aa, synthetic construct
  source 1..9: note = Seed: LVVVGARGV (KRAS G12R)
FVVWGRRGV

SEQ ID NO: 19836 - protein, 9 aa, synthetic construct
  source 1..9: note = Seed: LVVVGARGV (KRAS G12R)
FVVWGRRGW

SEQ ID NO: 19837 - protein, 9 aa, synthetic construct
  source 1..9: note = Seed: LVVVGARGV (KRAS G12R)
FVVWGRRGY

SEQ ID NO: 19838 - protein, 9 aa, synthetic construct
  source 1..9: note = Seed: LVVVGARGV (KRAS G12R)
FVVWGSRGA

SEQ ID NO: 19839 - protein, 9 aa, synthetic construct
  source 1..9: note = Seed: LVVVGARGV (KRAS G12R)
FVVWGSRGF

SEQ ID NO: 19840 - protein, 9 aa, synthetic construct
  source 1..9: note = Seed: LVVVGARGV (KRAS G12R)
FVVWGSRGH

SEQ ID NO: 19841 - protein, 9 aa, synthetic construct
  source 1..9: note = Seed: LVVVGARGV (KRAS G12R)
FVVWGSRGI

SEQ ID NO: 19842 - protein, 9 aa, synthetic construct
  source 1..9: note = Seed: LVVVGARGV (KRAS G12R)
FVVWGSRGK

SEQ ID NO: 19843 - protein, 9 aa, synthetic construct
  source 1..9: note = Seed: LVVVGARGV (KRAS G12R)
FVVWGSRGL

SEQ ID NO: 19844 - protein, 9 aa, synthetic construct
  source 1..9: note = Seed: LVVVGARGV (KRAS G12R)
FVVWGSRGM

SEQ ID NO: 19845 - protein, 9 aa, synthetic construct
  source 1..9: note = Seed: LVVVGARGV (KRAS G12R)
FVVWGSRGR

SEQ ID NO: 19846 - protein, 9 aa, synthetic construct
  source 1..9: note = Seed: LVVVGARGV (KRAS G12R)
FVVWGSRGS

SEQ ID NO: 19847 - protein, 9 aa, synthetic construct
  source 1..9: note = Seed: LVVVGARGV (KRAS G12R)
FVVWGSRGT

SEQ ID NO: 19848 - protein, 9 aa, synthetic construct
  source 1..9: note = Seed: LVVVGARGV (KRAS G12R)
FVVWGSRGV

SEQ ID NO: 19849 - protein, 9 aa, synthetic construct
  source 1..9: note = Seed: LVVVGARGV (KRAS G12R)
FVVWGSRGY

SEQ ID NO: 19850 - protein, 9 aa, synthetic construct
  source 1..9: note = Seed: LVVVGARGV (KRAS G12R)
FVVWGTRGA

SEQ ID NO: 19851 - protein, 9 aa, synthetic construct
  source 1..9: note = Seed: LVVVGARGV (KRAS G12R)
FVVWGTRGF

SEQ ID NO: 19852 - protein, 9 aa, synthetic construct
  source 1..9: note = Seed: LVVVGARGV (KRAS G12R)
FVVWGTRGH

SEQ ID NO: 19853 - protein, 9 aa, synthetic construct
  source 1..9: note = Seed: LVVVGARGV (KRAS G12R)
FVVWGTRGI

SEQ ID NO: 19854 - protein, 9 aa, synthetic construct
  source 1..9: note = Seed: LVVVGARGV (KRAS G12R)
FVVWGTRGK

SEQ ID NO: 19855 - protein, 9 aa, synthetic construct
  source 1..9: note = Seed: LVVVGARGV (KRAS G12R)
FVVWGTRGL

SEQ ID NO: 19856 - protein, 9 aa, synthetic construct
  source 1..9: note = Seed: LVVVGARGV (KRAS G12R)
FVVWGTRGM

SEQ ID NO: 19857 - protein, 9 aa, synthetic construct
  source 1..9: note = Seed: LVVVGARGV (KRAS G12R)
FVVWGTRGR

SEQ ID NO: 19858 - protein, 9 aa, synthetic construct
  source 1..9: note = Seed: LVVVGARGV (KRAS G12R)
FVVWGTRGV

SEQ ID NO: 19859 - protein, 9 aa, synthetic construct
  source 1..9: note = Seed: LVVVGARGV (KRAS G12R)
FVVWGTRGY

SEQ ID NO: 19860 - protein, 9 aa, synthetic construct
  source 1..9: note = Seed: LVVVGARGV (KRAS G12R)
FVVWGVRGA

SEQ ID NO: 19861 - protein, 9 aa, synthetic construct
  source 1..9: note = Seed: LVVVGARGV (KRAS G12R)
FVVWGVRGH

SEQ ID NO: 19862 - protein, 9 aa, synthetic construct
  source 1..9: note = Seed: LVVVGARGV (KRAS G12R)
FVVWGVRGI

SEQ ID NO: 19863 - protein, 9 aa, synthetic construct
  source 1..9: note = Seed: LVVVGARGV (KRAS G12R)
FVVWGVRGK

SEQ ID NO: 19864 - protein, 9 aa, synthetic construct
  source 1..9: note = Seed: LVVVGARGV (KRAS G12R)
FVVWGVRGL

SEQ ID NO: 19865 - protein, 9 aa, synthetic construct
  source 1..9: note = Seed: LVVVGARGV (KRAS G12R)
FVVWGVRGM

SEQ ID NO: 19866 - protein, 9 aa, synthetic construct
  source 1..9: note = Seed: LVVVGARGV (KRAS G12R)
FVVWGVRGR

SEQ ID NO: 19867 - protein, 9 aa, synthetic construct
  source 1..9: note = Seed: LVVVGARGV (KRAS G12R)
FVVWGVRGS

SEQ ID NO: 19868 - protein, 9 aa, synthetic construct
  source 1..9: note = Seed: LVVVGARGV (KRAS G12R)
FVVWGVRGV

SEQ ID NO: 19869 - protein, 9 aa, synthetic construct
  source 1..9: note = Seed: LVVVGARGV (KRAS G12R)
FVVWGVRGY

SEQ ID NO: 19870 - protein, 9 aa, synthetic construct
  source 1..9: note = Seed: LVVVGARGV (KRAS G12R)
FVVWGWRGR

SEQ ID NO: 19871 - protein, 9 aa, synthetic construct
  source 1..9: note = Seed: LVVVGARGV (KRAS G12R)
FVVWGYRGR

SEQ ID NO: 19872 - protein, 9 aa, synthetic construct
  source 1..9: note = Seed: LVVVGARGV (KRAS G12R)
FVVYGARGA

SEQ ID NO: 19873 - protein, 9 aa, synthetic construct
  source 1..9: note = Seed: LVVVGARGV (KRAS G12R)
FVVYGARGF

SEQ ID NO: 19874 - protein, 9 aa, synthetic construct
  source 1..9: note = Seed: LVVVGARGV (KRAS G12R)
FVVYGARGH

SEQ ID NO: 19875 - protein, 9 aa, synthetic construct
  source 1..9: note = Seed: LVVVGARGV (KRAS G12R)
FVVYGARGI

SEQ ID NO: 19876 - protein, 9 aa, synthetic construct
  source 1..9: note = Seed: LVVVGARGV (KRAS G12R)
FVVYGARGK

SEQ ID NO: 19877 - protein, 9 aa, synthetic construct
  source 1..9: note = Seed: LVVVGARGV (KRAS G12R)
FVVYGARGL

SEQ ID NO: 19878 - protein, 9 aa, synthetic construct
  source 1..9: note = Seed: LVVVGARGV (KRAS G12R)
FVVYGARGM

SEQ ID NO: 19879 - protein, 9 aa, synthetic construct
  source 1..9: note = Seed: LVVVGARGV (KRAS G12R)
FVVYGARGR

SEQ ID NO: 19880 - protein, 9 aa, synthetic construct
  source 1..9: note = Seed: LVVVGARGV (KRAS G12R)
FVVYGARGS

SEQ ID NO: 19881 - protein, 9 aa, synthetic construct
  source 1..9: note = Seed: LVVVGARGV (KRAS G12R)
FVVYGARGT

SEQ ID NO: 19882 - protein, 9 aa, synthetic construct
  source 1..9: note = Seed: LVVVGARGV (KRAS G12R)
FVVYGARGV

SEQ ID NO: 19883 - protein, 9 aa, synthetic construct
  source 1..9: note = Seed: LVVVGARGV (KRAS G12R)
FVVYGARGY

SEQ ID NO: 19884 - protein, 9 aa, synthetic construct
  source 1..9: note = Seed: LVVVGARGV (KRAS G12R)
FVVYGCRGR

SEQ ID NO: 19885 - protein, 9 aa, synthetic construct
  source 1..9: note = Seed: LVVVGARGV (KRAS G12R)
FVVYGDRGI

SEQ ID NO: 19886 - protein, 9 aa, synthetic construct
  source 1..9: note = Seed: LVVVGARGV (KRAS G12R)
FVVYGDRGL

SEQ ID NO: 19887 - protein, 9 aa, synthetic construct
  source 1..9: note = Seed: LVVVGARGV (KRAS G12R)
FVVYGDRGV

SEQ ID NO: 19888 - protein, 9 aa, synthetic construct
  source 1..9: note = Seed: LVVVGARGV (KRAS G12R)
FVVYGFRGF

SEQ ID NO: 19889 - protein, 9 aa, synthetic construct
  source 1..9: note = Seed: LVVVGARGV (KRAS G12R)
FVVYGFRGI

SEQ ID NO: 19890 - protein, 9 aa, synthetic construct
  source 1..9: note = Seed: LVVVGARGV (KRAS G12R)
FVVYGFRGL

SEQ ID NO: 19891 - protein, 9 aa, synthetic construct
  source 1..9: note = Seed: LVVVGARGV (KRAS G12R)
FVVYGFRGM

SEQ ID NO: 19892 - protein, 9 aa, synthetic construct
  source 1..9: note = Seed: LVVVGARGV (KRAS G12R)
FVVYGFRGV

SEQ ID NO: 19893 - protein, 9 aa, synthetic construct
  source 1..9: note = Seed: LVVVGARGV (KRAS G12R)
FVVYGGRGA

SEQ ID NO: 19894 - protein, 9 aa, synthetic construct
  source 1..9: note = Seed: LVVVGARGV (KRAS G12R)
FVVYGGRGF

SEQ ID NO: 19895 - protein, 9 aa, synthetic construct
  source 1..9: note = Seed: LVVVGARGV (KRAS G12R)
FVVYGGRGI

SEQ ID NO: 19896 - protein, 9 aa, synthetic construct
  source 1..9: note = Seed: LVVVGARGV (KRAS G12R)
FVVYGGRGL

SEQ ID NO: 19897 - protein, 9 aa, synthetic construct
  source 1..9: note = Seed: LVVVGARGV (KRAS G12R)
FVVYGGRGM

SEQ ID NO: 19898 - protein, 9 aa, synthetic construct
  source 1..9: note = Seed: LVVVGARGV (KRAS G12R)
FVVYGGRGR

SEQ ID NO: 19899 - protein, 9 aa, synthetic construct
  source 1..9: note = Seed: LVVVGARGV (KRAS G12R)
FVVYGGRGS

SEQ ID NO: 19900 - protein, 9 aa, synthetic construct
  source 1..9: note = Seed: LVVVGARGV (KRAS G12R)
FVVYGGRGT

SEQ ID NO: 19901 - protein, 9 aa, synthetic construct
  source 1..9: note = Seed: LVVVGARGV (KRAS G12R)
FVVYGGRGV

SEQ ID NO: 19902 - protein, 9 aa, synthetic construct
  source 1..9: note = Seed: LVVVGARGV (KRAS G12R)
FVVYGHRGA

SEQ ID NO: 19903 - protein, 9 aa, synthetic construct
  source 1..9: note = Seed: LVVVGARGV (KRAS G12R)
FVVYGHRGF

SEQ ID NO: 19904 - protein, 9 aa, synthetic construct
  source 1..9: note = Seed: LVVVGARGV (KRAS G12R)
FVVYGHRGH

SEQ ID NO: 19905 - protein, 9 aa, synthetic construct
  source 1..9: note = Seed: LVVVGARGV (KRAS G12R)
FVVYGHRGI

SEQ ID NO: 19906 - protein, 9 aa, synthetic construct
  source 1..9: note = Seed: LVVVGARGV (KRAS G12R)
FVVYGHRGK

SEQ ID NO: 19907 - protein, 9 aa, synthetic construct
  source 1..9: note = Seed: LVVVGARGV (KRAS G12R)
FVVYGHRGL

SEQ ID NO: 19908 - protein, 9 aa, synthetic construct
  source 1..9: note = Seed: LVVVGARGV (KRAS G12R)
FVVYGHRGM

SEQ ID NO: 19909 - protein, 9 aa, synthetic construct
  source 1..9: note = Seed: LVVVGARGV (KRAS G12R)
FVVYGHRGQ

SEQ ID NO: 19910 - protein, 9 aa, synthetic construct
  source 1..9: note = Seed: LVVVGARGV (KRAS G12R)
FVVYGHRGR

SEQ ID NO: 19911 - protein, 9 aa, synthetic construct
  source 1..9: note = Seed: LVVVGARGV (KRAS G12R)
FVVYGHRGV

SEQ ID NO: 19912 - protein, 9 aa, synthetic construct
  source 1..9: note = Seed: LVVVGARGV (KRAS G12R)
FVVYGHRGY

SEQ ID NO: 19913 - protein, 9 aa, synthetic construct
  source 1..9: note = Seed: LVVVGARGV (KRAS G12R)
FVVYGIRGA

SEQ ID NO: 19914 - protein, 9 aa, synthetic construct
  source 1..9: note = Seed: LVVVGARGV (KRAS G12R)
FVVYGIRGF

SEQ ID NO: 19915 - protein, 9 aa, synthetic construct
  source 1..9: note = Seed: LVVVGARGV (KRAS G12R)
FVVYGIRGH

SEQ ID NO: 19916 - protein, 9 aa, synthetic construct
  source 1..9: note = Seed: LVVVGARGV (KRAS G12R)
FVVYGIRGI

SEQ ID NO: 19917 - protein, 9 aa, synthetic construct
  source 1..9: note = Seed: LVVVGARGV (KRAS G12R)
FVVYGIRGK

SEQ ID NO: 19918 - protein, 9 aa, synthetic construct
  source 1..9: note = Seed: LVVVGARGV (KRAS G12R)
FVVYGIRGL

SEQ ID NO: 19919 - protein, 9 aa, synthetic construct
  source 1..9: note = Seed: LVVVGARGV (KRAS G12R)
FVVYGIRGM

SEQ ID NO: 19920 - protein, 9 aa, synthetic construct
  source 1..9: note = Seed: LVVVGARGV (KRAS G12R)
FVVYGIRGQ

SEQ ID NO: 19921 - protein, 9 aa, synthetic construct
  source 1..9: note = Seed: LVVVGARGV (KRAS G12R)
FVVYGIRGR

SEQ ID NO: 19922 - protein, 9 aa, synthetic construct
  source 1..9: note = Seed: LVVVGARGV (KRAS G12R)
FVVYGIRGS

SEQ ID NO: 19923 - protein, 9 aa, synthetic construct
  source 1..9: note = Seed: LVVVGARGV (KRAS G12R)
FVVYGIRGV

SEQ ID NO: 19924 - protein, 9 aa, synthetic construct
  source 1..9: note = Seed: LVVVGARGV (KRAS G12R)
FVVYGIRGY

SEQ ID NO: 19925 - protein, 9 aa, synthetic construct
  source 1..9: note = Seed: LVVVGARGV (KRAS G12R)
FVVYGKRGA

SEQ ID NO: 19926 - protein, 9 aa, synthetic construct
  source 1..9: note = Seed: LVVVGARGV (KRAS G12R)
FVVYGKRGF

SEQ ID NO: 19927 - protein, 9 aa, synthetic construct
  source 1..9: note = Seed: LVVVGARGV (KRAS G12R)
FVVYGKRGG

SEQ ID NO: 19928 - protein, 9 aa, synthetic construct
  source 1..9: note = Seed: LVVVGARGV (KRAS G12R)
FVVYGKRGH

SEQ ID NO: 19929 - protein, 9 aa, synthetic construct
  source 1..9: note = Seed: LVVVGARGV (KRAS G12R)
FVVYGKRGI

SEQ ID NO: 19930 - protein, 9 aa, synthetic construct
  source 1..9: note = Seed: LVVVGARGV (KRAS G12R)
FVVYGKRGK

SEQ ID NO: 19931 - protein, 9 aa, synthetic construct
  source 1..9: note = Seed: LVVVGARGV (KRAS G12R)
FVVYGKRGL

SEQ ID NO: 19932 - protein, 9 aa, synthetic construct
  source 1..9: note = Seed: LVVVGARGV (KRAS G12R)
FVVYGKRGM

SEQ ID NO: 19933 - protein, 9 aa, synthetic construct
  source 1..9: note = Seed: LVVVGARGV (KRAS G12R)
FVVYGKRGN

SEQ ID NO: 19934 - protein, 9 aa, synthetic construct
  source 1..9: note = Seed: LVVVGARGV (KRAS G12R)
FVVYGKRGP

SEQ ID NO: 19935 - protein, 9 aa, synthetic construct
  source 1..9: note = Seed: LVVVGARGV (KRAS G12R)
FVVYGKRGQ

SEQ ID NO: 19936 - protein, 9 aa, synthetic construct
  source 1..9: note = Seed: LVVVGARGV (KRAS G12R)
FVVYGKRGR

SEQ ID NO: 19937 - protein, 9 aa, synthetic construct
  source 1..9: note = Seed: LVVVGARGV (KRAS G12R)
FVVYGKRGS

SEQ ID NO: 19938 - protein, 9 aa, synthetic construct
  source 1..9: note = Seed: LVVVGARGV (KRAS G12R)
FVVYGKRGT

SEQ ID NO: 19939 - protein, 9 aa, synthetic construct
  source 1..9: note = Seed: LVVVGARGV (KRAS G12R)
FVVYGKRGV

SEQ ID NO: 19940 - protein, 9 aa, synthetic construct
  source 1..9: note = Seed: LVVVGARGV (KRAS G12R)
FVVYGKRGW

SEQ ID NO: 19941 - protein, 9 aa, synthetic construct
  source 1..9: note = Seed: LVVVGARGV (KRAS G12R)
FVVYGKRGY

SEQ ID NO: 19942 - protein, 9 aa, synthetic construct
  source 1..9: note = Seed: LVVVGARGV (KRAS G12R)
FVVYGLRGA

SEQ ID NO: 19943 - protein, 9 aa, synthetic construct
  source 1..9: note = Seed: LVVVGARGV (KRAS G12R)
FVVYGLRGF

SEQ ID NO: 19944 - protein, 9 aa, synthetic construct
  source 1..9: note = Seed: LVVVGARGV (KRAS G12R)
FVVYGLRGK

SEQ ID NO: 19945 - protein, 9 aa, synthetic construct
  source 1..9: note = Seed: LVVVGARGV (KRAS G12R)
FVVYGLRGM

SEQ ID NO: 19946 - protein, 9 aa, synthetic construct
  source 1..9: note = Seed: LVVVGARGV (KRAS G12R)
FVVYGLRGQ

SEQ ID NO: 19947 - protein, 9 aa, synthetic construct
  source 1..9: note = Seed: LVVVGARGV (KRAS G12R)
FVVYGLRGR

SEQ ID NO: 19948 - protein, 9 aa, synthetic construct
  source 1..9: note = Seed: LVVVGARGV (KRAS G12R)
FVVYGLRGY

SEQ ID NO: 19949 - protein, 9 aa, synthetic construct
  source 1..9: note = Seed: LVVVGARGV (KRAS G12R)
FVVYGMRGA

SEQ ID NO: 19950 - protein, 9 aa, synthetic construct
  source 1..9: note = Seed: LVVVGARGV (KRAS G12R)
FVVYGMRGF

SEQ ID NO: 19951 - protein, 9 aa, synthetic construct
  source 1..9: note = Seed: LVVVGARGV (KRAS G12R)
FVVYGMRGK

SEQ ID NO: 19952 - protein, 9 aa, synthetic construct
  source 1..9: note = Seed: LVVVGARGV (KRAS G12R)
FVVYGMRGL

SEQ ID NO: 19953 - protein, 9 aa, synthetic construct
  source 1..9: note = Seed: LVVVGARGV (KRAS G12R)
FVVYGMRGM

SEQ ID NO: 19954 - protein, 9 aa, synthetic construct
  source 1..9: note = Seed: LVVVGARGV (KRAS G12R)
FVVYGMRGR

SEQ ID NO: 19955 - protein, 9 aa, synthetic construct
  source 1..9: note = Seed: LVVVGARGV (KRAS G12R)
FVVYGMRGY

SEQ ID NO: 19956 - protein, 9 aa, synthetic construct
  source 1..9: note = Seed: LVVVGARGV (KRAS G12R)
FVVYGNRGA

SEQ ID NO: 19957 - protein, 9 aa, synthetic construct
  source 1..9: note = Seed: LVVVGARGV (KRAS G12R)
FVVYGNRGF

SEQ ID NO: 19958 - protein, 9 aa, synthetic construct
  source 1..9: note = Seed: LVVVGARGV (KRAS G12R)
FVVYGNRGG

SEQ ID NO: 19959 - protein, 9 aa, synthetic construct
  source 1..9: note = Seed: LVVVGARGV (KRAS G12R)
FVVYGNRGH

SEQ ID NO: 19960 - protein, 9 aa, synthetic construct
  source 1..9: note = Seed: LVVVGARGV (KRAS G12R)
FVVYGNRGI

SEQ ID NO: 19961 - protein, 9 aa, synthetic construct
  source 1..9: note = Seed: LVVVGARGV (KRAS G12R)
FVVYGNRGK

SEQ ID NO: 19962 - protein, 9 aa, synthetic construct
  source 1..9: note = Seed: LVVVGARGV (KRAS G12R)
FVVYGNRGL

SEQ ID NO: 19963 - protein, 9 aa, synthetic construct
  source 1..9: note = Seed: LVVVGARGV (KRAS G12R)
FVVYGNRGM

SEQ ID NO: 19964 - protein, 9 aa, synthetic construct
  source 1..9: note = Seed: LVVVGARGV (KRAS G12R)
FVVYGNRGR

SEQ ID NO: 19965 - protein, 9 aa, synthetic construct
  source 1..9: note = Seed: LVVVGARGV (KRAS G12R)
FVVYGNRGS

SEQ ID NO: 19966 - protein, 9 aa, synthetic construct
  source 1..9: note = Seed: LVVVGARGV (KRAS G12R)
FVVYGNRGT

SEQ ID NO: 19967 - protein, 9 aa, synthetic construct
  source 1..9: note = Seed: LVVVGARGV (KRAS G12R)
FVVYGNRGV

SEQ ID NO: 19968 - protein, 9 aa, synthetic construct
  source 1..9: note = Seed: LVVVGARGV (KRAS G12R)
FVVYGNRGW

SEQ ID NO: 19969 - protein, 9 aa, synthetic construct
  source 1..9: note = Seed: LVVVGARGV (KRAS G12R)
FVVYGNRGY

SEQ ID NO: 19970 - protein, 9 aa, synthetic construct
  source 1..9: note = Seed: LVVVGARGV (KRAS G12R)
FVVYGPRGA

SEQ ID NO: 19971 - protein, 9 aa, synthetic construct
  source 1..9: note = Seed: LVVVGARGV (KRAS G12R)
FVVYGPRGI

SEQ ID NO: 19972 - protein, 9 aa, synthetic construct
  source 1..9: note = Seed: LVVVGARGV (KRAS G12R)
FVVYGPRGL

SEQ ID NO: 19973 - protein, 9 aa, synthetic construct
  source 1..9: note = Seed: LVVVGARGV (KRAS G12R)
FVVYGPRGR

SEQ ID NO: 19974 - protein, 9 aa, synthetic construct
  source 1..9: note = Seed: LVVVGARGV (KRAS G12R)
FVVYGPRGV

SEQ ID NO: 19975 - protein, 9 aa, synthetic construct
  source 1..9: note = Seed: LVVVGARGV (KRAS G12R)
FVVYGQRGI

SEQ ID NO: 19976 - protein, 9 aa, synthetic construct
  source 1..9: note = Seed: LVVVGARGV (KRAS G12R)
FVVYGQRGL

SEQ ID NO: 19977 - protein, 9 aa, synthetic construct
  source 1..9: note = Seed: LVVVGARGV (KRAS G12R)
FVVYGQRGM

SEQ ID NO: 19978 - protein, 9 aa, synthetic construct
  source 1..9: note = Seed: LVVVGARGV (KRAS G12R)
FVVYGQRGR

SEQ ID NO: 19979 - protein, 9 aa, synthetic construct
  source 1..9: note = Seed: LVVVGARGV (KRAS G12R)
FVVYGRRGA

SEQ ID NO: 19980 - protein, 9 aa, synthetic construct
  source 1..9: note = Seed: LVVVGARGV (KRAS G12R)
FVVYGRRGC

SEQ ID NO: 19981 - protein, 9 aa, synthetic construct
  source 1..9: note = Seed: LVVVGARGV (KRAS G12R)
FVVYGRRGF

SEQ ID NO: 19982 - protein, 9 aa, synthetic construct
  source 1..9: note = Seed: LVVVGARGV (KRAS G12R)
FVVYGRRGG

SEQ ID NO: 19983 - protein, 9 aa, synthetic construct
  source 1..9: note = Seed: LVVVGARGV (KRAS G12R)
FVVYGRRGH

SEQ ID NO: 19984 - protein, 9 aa, synthetic construct
  source 1..9: note = Seed: LVVVGARGV (KRAS G12R)
FVVYGRRGI

SEQ ID NO: 19985 - protein, 9 aa, synthetic construct
  source 1..9: note = Seed: LVVVGARGV (KRAS G12R)
FVVYGRRGK

SEQ ID NO: 19986 - protein, 9 aa, synthetic construct
  source 1..9: note = Seed: LVVVGARGV (KRAS G12R)
FVVYGRRGL

SEQ ID NO: 19987 - protein, 9 aa, synthetic construct
  source 1..9: note = Seed: LVVVGARGV (KRAS G12R)
FVVYGRRGM

SEQ ID NO: 19988 - protein, 9 aa, synthetic construct
  source 1..9: note = Seed: LVVVGARGV (KRAS G12R)
FVVYGRRGN

SEQ ID NO: 19989 - protein, 9 aa, synthetic construct
  source 1..9: note = Seed: LVVVGARGV (KRAS G12R)
FVVYGRRGP

SEQ ID NO: 19990 - protein, 9 aa, synthetic construct
  source 1..9: note = Seed: LVVVGARGV (KRAS G12R)
FVVYGRRGQ

SEQ ID NO: 19991 - protein, 9 aa, synthetic construct
  source 1..9: note = Seed: LVVVGARGV (KRAS G12R)
FVVYGRRGR

SEQ ID NO: 19992 - protein, 9 aa, synthetic construct
  source 1..9: note = Seed: LVVVGARGV (KRAS G12R)
FVVYGRRGS

SEQ ID NO: 19993 - protein, 9 aa, synthetic construct
  source 1..9: note = Seed: LVVVGARGV (KRAS G12R)
FVVYGRRGT

SEQ ID NO: 19994 - protein, 9 aa, synthetic construct
  source 1..9: note = Seed: LVVVGARGV (KRAS G12R)
FVVYGRRGV

SEQ ID NO: 19995 - protein, 9 aa, synthetic construct
  source 1..9: note = Seed: LVVVGARGV (KRAS G12R)
FVVYGRRGW

SEQ ID NO: 19996 - protein, 9 aa, synthetic construct
  source 1..9: note = Seed: LVVVGARGV (KRAS G12R)
FVVYGRRGY

SEQ ID NO: 19997 - protein, 9 aa, synthetic construct
  source 1..9: note = Seed: LVVVGARGV (KRAS G12R)
FVVYGSRGA

SEQ ID NO: 19998 - protein, 9 aa, synthetic construct
  source 1..9: note = Seed: LVVVGARGV (KRAS G12R)
FVVYGSRGF

SEQ ID NO: 19999 - protein, 9 aa, synthetic construct
  source 1..9: note = Seed: LVVVGARGV (KRAS G12R)
FVVYGSRGG

SEQ ID NO: 20000 - protein, 9 aa, synthetic construct
  source 1..9: note = Seed: LVVVGARGV (KRAS G12R)
FVVYGSRGH

SEQ ID NO: 20001 - protein, 9 aa, synthetic construct
  source 1..9: note = Seed: LVVVGARGV (KRAS G12R)
FVVYGSRGI

SEQ ID NO: 20002 - protein, 9 aa, synthetic construct
  source 1..9: note = Seed: LVVVGARGV (KRAS G12R)
FVVYGSRGK

SEQ ID NO: 20003 - protein, 9 aa, synthetic construct
  source 1..9: note = Seed: LVVVGARGV (KRAS G12R)
FVVYGSRGL

SEQ ID NO: 20004 - protein, 9 aa, synthetic construct
  source 1..9: note = Seed: LVVVGARGV (KRAS G12R)
FVVYGSRGM

SEQ ID NO: 20005 - protein, 9 aa, synthetic construct
  source 1..9: note = Seed: LVVVGARGV (KRAS G12R)
FVVYGSRGR

SEQ ID NO: 20006 - protein, 9 aa, synthetic construct
  source 1..9: note = Seed: LVVVGARGV (KRAS G12R)
FVVYGSRGS

SEQ ID NO: 20007 - protein, 9 aa, synthetic construct
  source 1..9: note = Seed: LVVVGARGV (KRAS G12R)
FVVYGSRGT

SEQ ID NO: 20008 - protein, 9 aa, synthetic construct
  source 1..9: note = Seed: LVVVGARGV (KRAS G12R)
FVVYGSRGV

SEQ ID NO: 20009 - protein, 9 aa, synthetic construct
  source 1..9: note = Seed: LVVVGARGV (KRAS G12R)
FVVYGSRGW

SEQ ID NO: 20010 - protein, 9 aa, synthetic construct
  source 1..9: note = Seed: LVVVGARGV (KRAS G12R)
FVVYGSRGY

SEQ ID NO: 20011 - protein, 9 aa, synthetic construct
  source 1..9: note = Seed: LVVVGARGV (KRAS G12R)
FVVYGTRGA

SEQ ID NO: 20012 - protein, 9 aa, synthetic construct
  source 1..9: note = Seed: LVVVGARGV (KRAS G12R)
FVVYGTRGF

SEQ ID NO: 20013 - protein, 9 aa, synthetic construct
  source 1..9: note = Seed: LVVVGARGV (KRAS G12R)
FVVYGTRGH

SEQ ID NO: 20014 - protein, 9 aa, synthetic construct
  source 1..9: note = Seed: LVVVGARGV (KRAS G12R)
FVVYGTRGI

SEQ ID NO: 20015 - protein, 9 aa, synthetic construct
  source 1..9: note = Seed: LVVVGARGV (KRAS G12R)
FVVYGTRGK

SEQ ID NO: 20016 - protein, 9 aa, synthetic construct
  source 1..9: note = Seed: LVVVGARGV (KRAS G12R)
FVVYGTRGL

SEQ ID NO: 20017 - protein, 9 aa, synthetic construct
  source 1..9: note = Seed: LVVVGARGV (KRAS G12R)
FVVYGTRGM

SEQ ID NO: 20018 - protein, 9 aa, synthetic construct
  source 1..9: note = Seed: LVVVGARGV (KRAS G12R)
FVVYGTRGR

SEQ ID NO: 20019 - protein, 9 aa, synthetic construct
  source 1..9: note = Seed: LVVVGARGV (KRAS G12R)
FVVYGTRGS

SEQ ID NO: 20020 - protein, 9 aa, synthetic construct
  source 1..9: note = Seed: LVVVGARGV (KRAS G12R)
FVVYGTRGT

SEQ ID NO: 20021 - protein, 9 aa, synthetic construct
  source 1..9: note = Seed: LVVVGARGV (KRAS G12R)
FVVYGTRGV

SEQ ID NO: 20022 - protein, 9 aa, synthetic construct
  source 1..9: note = Seed: LVVVGARGV (KRAS G12R)
FVVYGTRGY

SEQ ID NO: 20023 - protein, 9 aa, synthetic construct
  source 1..9: note = Seed: LVVVGARGV (KRAS G12R)
FVVYGVRGA

SEQ ID NO: 20024 - protein, 9 aa, synthetic construct
  source 1..9: note = Seed: LVVVGARGV (KRAS G12R)
FVVYGVRGF

SEQ ID NO: 20025 - protein, 9 aa, synthetic construct
  source 1..9: note = Seed: LVVVGARGV (KRAS G12R)
FVVYGVRGH

SEQ ID NO: 20026 - protein, 9 aa, synthetic construct
  source 1..9: note = Seed: LVVVGARGV (KRAS G12R)
FVVYGVRGI

SEQ ID NO: 20027 - protein, 9 aa, synthetic construct
  source 1..9: note = Seed: LVVVGARGV (KRAS G12R)
FVVYGVRGK

SEQ ID NO: 20028 - protein, 9 aa, synthetic construct
  source 1..9: note = Seed: LVVVGARGV (KRAS G12R)
FVVYGVRGL

SEQ ID NO: 20029 - protein, 9 aa, synthetic construct
  source 1..9: note = Seed: LVVVGARGV (KRAS G12R)
FVVYGVRGM

SEQ ID NO: 20030 - protein, 9 aa, synthetic construct
  source 1..9: note = Seed: LVVVGARGV (KRAS G12R)
FVVYGVRGQ

SEQ ID NO: 20031 - protein, 9 aa, synthetic construct
  source 1..9: note = Seed: LVVVGARGV (KRAS G12R)
FVVYGVRGR

SEQ ID NO: 20032 - protein, 9 aa, synthetic construct
  source 1..9: note = Seed: LVVVGARGV (KRAS G12R)
FVVYGVRGV

SEQ ID NO: 20033 - protein, 9 aa, synthetic construct
  source 1..9: note = Seed: LVVVGARGV (KRAS G12R)
FVVYGVRGY

SEQ ID NO: 20034 - protein, 9 aa, synthetic construct
  source 1..9: note = Seed: LVVVGARGV (KRAS G12R)
FVVYGYRGR

SEQ ID NO: 20035 - protein, 9 aa, synthetic construct
  source 1..9: note = Seed: LVVVGARGV (KRAS G12R)
GVVLGARGL

SEQ ID NO: 20036 - protein, 9 aa, synthetic construct
  source 1..9: note = Seed: LVVVGARGV (KRAS G12R)
HVVAGARGL

SEQ ID NO: 20037 - protein, 9 aa, synthetic construct
  source 1..9: note = Seed: LVVVGARGV (KRAS G12R)
HVVIGARGI

SEQ ID NO: 20038 - protein, 9 aa, synthetic construct
  source 1..9: note = Seed: LVVVGARGV (KRAS G12R)
HVVIGARGL

SEQ ID NO: 20039 - protein, 9 aa, synthetic construct
  source 1..9: note = Seed: LVVVGARGV (KRAS G12R)
HVVIGARGV

SEQ ID NO: 20040 - protein, 9 aa, synthetic construct
  source 1..9: note = Seed: LVVVGARGV (KRAS G12R)
HVVIGSRGL

SEQ ID NO: 20041 - protein, 9 aa, synthetic construct
  source 1..9: note = Seed: LVVVGARGV (KRAS G12R)
HVVLGARGA

SEQ ID NO: 20042 - protein, 9 aa, synthetic construct
  source 1..9: note = Seed: LVVVGARGV (KRAS G12R)
HVVLGARGI

SEQ ID NO: 20043 - protein, 9 aa, synthetic construct
  source 1..9: note = Seed: LVVVGARGV (KRAS G12R)
HVVLGARGL

SEQ ID NO: 20044 - protein, 9 aa, synthetic construct
  source 1..9: note = Seed: LVVVGARGV (KRAS G12R)
HVVLGARGM

SEQ ID NO: 20045 - protein, 9 aa, synthetic construct
  source 1..9: note = Seed: LVVVGARGV (KRAS G12R)
HVVLGARGV

SEQ ID NO: 20046 - protein, 9 aa, synthetic construct
  source 1..9: note = Seed: LVVVGARGV (KRAS G12R)
HVVLGGRGA

SEQ ID NO: 20047 - protein, 9 aa, synthetic construct
  source 1..9: note = Seed: LVVVGARGV (KRAS G12R)
HVVLGGRGI

SEQ ID NO: 20048 - protein, 9 aa, synthetic construct
  source 1..9: note = Seed: LVVVGARGV (KRAS G12R)
HVVLGGRGL

SEQ ID NO: 20049 - protein, 9 aa, synthetic construct
  source 1..9: note = Seed: LVVVGARGV (KRAS G12R)
HVVLGGRGV

SEQ ID NO: 20050 - protein, 9 aa, synthetic construct
  source 1..9: note = Seed: LVVVGARGV (KRAS G12R)
HVVLGSRGA

SEQ ID NO: 20051 - protein, 9 aa, synthetic construct
  source 1..9: note = Seed: LVVVGARGV (KRAS G12R)
HVVLGSRGI

SEQ ID NO: 20052 - protein, 9 aa, synthetic construct
  source 1..9: note = Seed: LVVVGARGV (KRAS G12R)
HVVLGSRGL

SEQ ID NO: 20053 - protein, 9 aa, synthetic construct
  source 1..9: note = Seed: LVVVGARGV (KRAS G12R)
HVVLGSRGV

SEQ ID NO: 20054 - protein, 9 aa, synthetic construct
  source 1..9: note = Seed: LVVVGARGV (KRAS G12R)
HVVMGARGA

SEQ ID NO: 20055 - protein, 9 aa, synthetic construct
  source 1..9: note = Seed: LVVVGARGV (KRAS G12R)
HVVMGARGI

SEQ ID NO: 20056 - protein, 9 aa, synthetic construct
  source 1..9: note = Seed: LVVVGARGV (KRAS G12R)
HVVMGARGL

SEQ ID NO: 20057 - protein, 9 aa, synthetic construct
  source 1..9: note = Seed: LVVVGARGV (KRAS G12R)
HVVMGARGM

SEQ ID NO: 20058 - protein, 9 aa, synthetic construct
  source 1..9: note = Seed: LVVVGARGV (KRAS G12R)
HVVMGARGV

SEQ ID NO: 20059 - protein, 9 aa, synthetic construct
  source 1..9: note = Seed: LVVVGARGV (KRAS G12R)
HVVMGGRGI

SEQ ID NO: 20060 - protein, 9 aa, synthetic construct
  source 1..9: note = Seed: LVVVGARGV (KRAS G12R)
HVVMGGRGL

SEQ ID NO: 20061 - protein, 9 aa, synthetic construct
  source 1..9: note = Seed: LVVVGARGV (KRAS G12R)
HVVMGGRGV

SEQ ID NO: 20062 - protein, 9 aa, synthetic construct
  source 1..9: note = Seed: LVVVGARGV (KRAS G12R)
HVVMGRRGR

SEQ ID NO: 20063 - protein, 9 aa, synthetic construct
  source 1..9: note = Seed: LVVVGARGV (KRAS G12R)
HVVMGSRGI

SEQ ID NO: 20064 - protein, 9 aa, synthetic construct
  source 1..9: note = Seed: LVVVGARGV (KRAS G12R)
HVVMGSRGL

SEQ ID NO: 20065 - protein, 9 aa, synthetic construct
  source 1..9: note = Seed: LVVVGARGV (KRAS G12R)
HVVMGSRGV

SEQ ID NO: 20066 - protein, 9 aa, synthetic construct
  source 1..9: note = Seed: LVVVGARGV (KRAS G12R)
IVVAGARGA

SEQ ID NO: 20067 - protein, 9 aa, synthetic construct
  source 1..9: note = Seed: LVVVGARGV (KRAS G12R)
IVVAGARGC

SEQ ID NO: 20068 - protein, 9 aa, synthetic construct
  source 1..9: note = Seed: LVVVGARGV (KRAS G12R)
IVVAGARGF

SEQ ID NO: 20069 - protein, 9 aa, synthetic construct
  source 1..9: note = Seed: LVVVGARGV (KRAS G12R)
IVVAGARGG

SEQ ID NO: 20070 - protein, 9 aa, synthetic construct
  source 1..9: note = Seed: LVVVGARGV (KRAS G12R)
IVVAGARGH

SEQ ID NO: 20071 - protein, 9 aa, synthetic construct
  source 1..9: note = Seed: LVVVGARGV (KRAS G12R)
IVVAGARGI

SEQ ID NO: 20072 - protein, 9 aa, synthetic construct
  source 1..9: note = Seed: LVVVGARGV (KRAS G12R)
IVVAGARGK

SEQ ID NO: 20073 - protein, 9 aa, synthetic construct
  source 1..9: note = Seed: LVVVGARGV (KRAS G12R)
IVVAGARGL

SEQ ID NO: 20074 - protein, 9 aa, synthetic construct
  source 1..9: note = Seed: LVVVGARGV (KRAS G12R)
IVVAGARGM

SEQ ID NO: 20075 - protein, 9 aa, synthetic construct
  source 1..9: note = Seed: LVVVGARGV (KRAS G12R)
IVVAGARGN

SEQ ID NO: 20076 - protein, 9 aa, synthetic construct
  source 1..9: note = Seed: LVVVGARGV (KRAS G12R)
IVVAGARGP

SEQ ID NO: 20077 - protein, 9 aa, synthetic construct
  source 1..9: note = Seed: LVVVGARGV (KRAS G12R)
IVVAGARGQ

SEQ ID NO: 20078 - protein, 9 aa, synthetic construct
  source 1..9: note = Seed: LVVVGARGV (KRAS G12R)
IVVAGARGR

SEQ ID NO: 20079 - protein, 9 aa, synthetic construct
  source 1..9: note = Seed: LVVVGARGV (KRAS G12R)
IVVAGARGS

SEQ ID NO: 20080 - protein, 9 aa, synthetic construct
  source 1..9: note = Seed: LVVVGARGV (KRAS G12R)
IVVAGARGT

SEQ ID NO: 20081 - protein, 9 aa, synthetic construct
  source 1..9: note = Seed: LVVVGARGV (KRAS G12R)
IVVAGARGV

SEQ ID NO: 20082 - protein, 9 aa, synthetic construct
  source 1..9: note = Seed: LVVVGARGV (KRAS G12R)
IVVAGARGW

SEQ ID NO: 20083 - protein, 9 aa, synthetic construct
  source 1..9: note = Seed: LVVVGARGV (KRAS G12R)
IVVAGARGY

SEQ ID NO: 20084 - protein, 9 aa, synthetic construct
  source 1..9: note = Seed: LVVVGARGV (KRAS G12R)
IVVAGCRGA

SEQ ID NO: 20085 - protein, 9 aa, synthetic construct
  source 1..9: note = Seed: LVVVGARGV (KRAS G12R)
IVVAGCRGI

SEQ ID NO: 20086 - protein, 9 aa, synthetic construct
  source 1..9: note = Seed: LVVVGARGV (KRAS G12R)
IVVAGCRGL

SEQ ID NO: 20087 - protein, 9 aa, synthetic construct
  source 1..9: note = Seed: LVVVGARGV (KRAS G12R)
IVVAGCRGM

SEQ ID NO: 20088 - protein, 9 aa, synthetic construct
  source 1..9: note = Seed: LVVVGARGV (KRAS G12R)
IVVAGCRGV

SEQ ID NO: 20089 - protein, 9 aa, synthetic construct
  source 1..9: note = Seed: LVVVGARGV (KRAS G12R)
IVVAGFRGI

SEQ ID NO: 20090 - protein, 9 aa, synthetic construct
  source 1..9: note = Seed: LVVVGARGV (KRAS G12R)
IVVAGFRGL

SEQ ID NO: 20091 - protein, 9 aa, synthetic construct
  source 1..9: note = Seed: LVVVGARGV (KRAS G12R)
IVVAGFRGR

SEQ ID NO: 20092 - protein, 9 aa, synthetic construct
  source 1..9: note = Seed: LVVVGARGV (KRAS G12R)
IVVAGFRGV

SEQ ID NO: 20093 - protein, 9 aa, synthetic construct
  source 1..9: note = Seed: LVVVGARGV (KRAS G12R)
IVVAGGRGA

SEQ ID NO: 20094 - protein, 9 aa, synthetic construct
  source 1..9: note = Seed: LVVVGARGV (KRAS G12R)
IVVAGGRGC

SEQ ID NO: 20095 - protein, 9 aa, synthetic construct
  source 1..9: note = Seed: LVVVGARGV (KRAS G12R)
IVVAGGRGF

SEQ ID NO: 20096 - protein, 9 aa, synthetic construct
  source 1..9: note = Seed: LVVVGARGV (KRAS G12R)
IVVAGGRGG

SEQ ID NO: 20097 - protein, 9 aa, synthetic construct
  source 1..9: note = Seed: LVVVGARGV (KRAS G12R)
IVVAGGRGI

SEQ ID NO: 20098 - protein, 9 aa, synthetic construct
  source 1..9: note = Seed: LVVVGARGV (KRAS G12R)
IVVAGGRGL

SEQ ID NO: 20099 - protein, 9 aa, synthetic construct
  source 1..9: note = Seed: LVVVGARGV (KRAS G12R)
IVVAGGRGM

SEQ ID NO: 20100 - protein, 9 aa, synthetic construct
  source 1..9: note = Seed: LVVVGARGV (KRAS G12R)
IVVAGGRGN

SEQ ID NO: 20101 - protein, 9 aa, synthetic construct
  source 1..9: note = Seed: LVVVGARGV (KRAS G12R)
IVVAGGRGR

SEQ ID NO: 20102 - protein, 9 aa, synthetic construct
  source 1..9: note = Seed: LVVVGARGV (KRAS G12R)
IVVAGGRGS

SEQ ID NO: 20103 - protein, 9 aa, synthetic construct
  source 1..9: note = Seed: LVVVGARGV (KRAS G12R)
IVVAGGRGT

SEQ ID NO: 20104 - protein, 9 aa, synthetic construct
  source 1..9: note = Seed: LVVVGARGV (KRAS G12R)
IVVAGGRGV

SEQ ID NO: 20105 - protein, 9 aa, synthetic construct
  source 1..9: note = Seed: LVVVGARGV (KRAS G12R)
IVVAGGRGY

SEQ ID NO: 20106 - protein, 9 aa, synthetic construct
  source 1..9: note = Seed: LVVVGARGV (KRAS G12R)
IVVAGHRGA

SEQ ID NO: 20107 - protein, 9 aa, synthetic construct
  source 1..9: note = Seed: LVVVGARGV (KRAS G12R)
IVVAGHRGF

SEQ ID NO: 20108 - protein, 9 aa, synthetic construct
  source 1..9: note = Seed: LVVVGARGV (KRAS G12R)
IVVAGHRGG

SEQ ID NO: 20109 - protein, 9 aa, synthetic construct
  source 1..9: note = Seed: LVVVGARGV (KRAS G12R)
IVVAGHRGH

SEQ ID NO: 20110 - protein, 9 aa, synthetic construct
  source 1..9: note = Seed: LVVVGARGV (KRAS G12R)
IVVAGHRGI

SEQ ID NO: 20111 - protein, 9 aa, synthetic construct
  source 1..9: note = Seed: LVVVGARGV (KRAS G12R)
IVVAGHRGK

SEQ ID NO: 20112 - protein, 9 aa, synthetic construct
  source 1..9: note = Seed: LVVVGARGV (KRAS G12R)
IVVAGHRGL

SEQ ID NO: 20113 - protein, 9 aa, synthetic construct
  source 1..9: note = Seed: LVVVGARGV (KRAS G12R)
IVVAGHRGM

SEQ ID NO: 20114 - protein, 9 aa, synthetic construct
  source 1..9: note = Seed: LVVVGARGV (KRAS G12R)
IVVAGHRGQ

SEQ ID NO: 20115 - protein, 9 aa, synthetic construct
  source 1..9: note = Seed: LVVVGARGV (KRAS G12R)
IVVAGHRGR

SEQ ID NO: 20116 - protein, 9 aa, synthetic construct
  source 1..9: note = Seed: LVVVGARGV (KRAS G12R)
IVVAGHRGS

SEQ ID NO: 20117 - protein, 9 aa, synthetic construct
  source 1..9: note = Seed: LVVVGARGV (KRAS G12R)
IVVAGHRGT

SEQ ID NO: 20118 - protein, 9 aa, synthetic construct
  source 1..9: note = Seed: LVVVGARGV (KRAS G12R)
IVVAGHRGV

SEQ ID NO: 20119 - protein, 9 aa, synthetic construct
  source 1..9: note = Seed: LVVVGARGV (KRAS G12R)
IVVAGHRGW

SEQ ID NO: 20120 - protein, 9 aa, synthetic construct
  source 1..9: note = Seed: LVVVGARGV (KRAS G12R)
IVVAGHRGY

SEQ ID NO: 20121 - protein, 9 aa, synthetic construct
  source 1..9: note = Seed: LVVVGARGV (KRAS G12R)
IVVAGIRGA

SEQ ID NO: 20122 - protein, 9 aa, synthetic construct
  source 1..9: note = Seed: LVVVGARGV (KRAS G12R)
IVVAGIRGF

SEQ ID NO: 20123 - protein, 9 aa, synthetic construct
  source 1..9: note = Seed: LVVVGARGV (KRAS G12R)
IVVAGIRGH

SEQ ID NO: 20124 - protein, 9 aa, synthetic construct
  source 1..9: note = Seed: LVVVGARGV (KRAS G12R)
IVVAGIRGI

SEQ ID NO: 20125 - protein, 9 aa, synthetic construct
  source 1..9: note = Seed: LVVVGARGV (KRAS G12R)
IVVAGIRGK

SEQ ID NO: 20126 - protein, 9 aa, synthetic construct
  source 1..9: note = Seed: LVVVGARGV (KRAS G12R)
IVVAGIRGL

SEQ ID NO: 20127 - protein, 9 aa, synthetic construct
  source 1..9: note = Seed: LVVVGARGV (KRAS G12R)
IVVAGIRGM

SEQ ID NO: 20128 - protein, 9 aa, synthetic construct
  source 1..9: note = Seed: LVVVGARGV (KRAS G12R)
IVVAGIRGN

SEQ ID NO: 20129 - protein, 9 aa, synthetic construct
  source 1..9: note = Seed: LVVVGARGV (KRAS G12R)
IVVAGIRGQ

SEQ ID NO: 20130 - protein, 9 aa, synthetic construct
  source 1..9: note = Seed: LVVVGARGV (KRAS G12R)
IVVAGIRGR

SEQ ID NO: 20131 - protein, 9 aa, synthetic construct
  source 1..9: note = Seed: LVVVGARGV (KRAS G12R)
IVVAGIRGS

SEQ ID NO: 20132 - protein, 9 aa, synthetic construct
  source 1..9: note = Seed: LVVVGARGV (KRAS G12R)
IVVAGIRGT

SEQ ID NO: 20133 - protein, 9 aa, synthetic construct
  source 1..9: note = Seed: LVVVGARGV (KRAS G12R)
IVVAGIRGV

SEQ ID NO: 20134 - protein, 9 aa, synthetic construct
  source 1..9: note = Seed: LVVVGARGV (KRAS G12R)
IVVAGIRGY

SEQ ID NO: 20135 - protein, 9 aa, synthetic construct
  source 1..9: note = Seed: LVVVGARGV (KRAS G12R)
IVVAGKRGA

SEQ ID NO: 20136 - protein, 9 aa, synthetic construct
  source 1..9: note = Seed: LVVVGARGV (KRAS G12R)
IVVAGKRGC

SEQ ID NO: 20137 - protein, 9 aa, synthetic construct
  source 1..9: note = Seed: LVVVGARGV (KRAS G12R)
IVVAGKRGF

SEQ ID NO: 20138 - protein, 9 aa, synthetic construct
  source 1..9: note = Seed: LVVVGARGV (KRAS G12R)
IVVAGKRGG

SEQ ID NO: 20139 - protein, 9 aa, synthetic construct
  source 1..9: note = Seed: LVVVGARGV (KRAS G12R)
IVVAGKRGH

SEQ ID NO: 20140 - protein, 9 aa, synthetic construct
  source 1..9: note = Seed: LVVVGARGV (KRAS G12R)
IVVAGKRGI

SEQ ID NO: 20141 - protein, 9 aa, synthetic construct
  source 1..9: note = Seed: LVVVGARGV (KRAS G12R)
IVVAGKRGK

SEQ ID NO: 20142 - protein, 9 aa, synthetic construct
  source 1..9: note = Seed: LVVVGARGV (KRAS G12R)
IVVAGKRGL

SEQ ID NO: 20143 - protein, 9 aa, synthetic construct
  source 1..9: note = Seed: LVVVGARGV (KRAS G12R)
IVVAGKRGM

SEQ ID NO: 20144 - protein, 9 aa, synthetic construct
  source 1..9: note = Seed: LVVVGARGV (KRAS G12R)
IVVAGKRGN

SEQ ID NO: 20145 - protein, 9 aa, synthetic construct
  source 1..9: note = Seed: LVVVGARGV (KRAS G12R)
IVVAGKRGP

SEQ ID NO: 20146 - protein, 9 aa, synthetic construct
  source 1..9: note = Seed: LVVVGARGV (KRAS G12R)
IVVAGKRGQ

SEQ ID NO: 20147 - protein, 9 aa, synthetic construct
  source 1..9: note = Seed: LVVVGARGV (KRAS G12R)
IVVAGKRGR

SEQ ID NO: 20148 - protein, 9 aa, synthetic construct
  source 1..9: note = Seed: LVVVGARGV (KRAS G12R)
IVVAGKRGS

SEQ ID NO: 20149 - protein, 9 aa, synthetic construct
  source 1..9: note = Seed: LVVVGARGV (KRAS G12R)
IVVAGKRGT

SEQ ID NO: 20150 - protein, 9 aa, synthetic construct
  source 1..9: note = Seed: LVVVGARGV (KRAS G12R)
IVVAGKRGV

SEQ ID NO: 20151 - protein, 9 aa, synthetic construct
  source 1..9: note = Seed: LVVVGARGV (KRAS G12R)
IVVAGKRGW

SEQ ID NO: 20152 - protein, 9 aa, synthetic construct
  source 1..9: note = Seed: LVVVGARGV (KRAS G12R)
IVVAGKRGY

SEQ ID NO: 20153 - protein, 9 aa, synthetic construct
  source 1..9: note = Seed: LVVVGARGV (KRAS G12R)
IVVAGLRGA

SEQ ID NO: 20154 - protein, 9 aa, synthetic construct
  source 1..9: note = Seed: LVVVGARGV (KRAS G12R)
IVVAGLRGF

SEQ ID NO: 20155 - protein, 9 aa, synthetic construct
  source 1..9: note = Seed: LVVVGARGV (KRAS G12R)
IVVAGLRGI

SEQ ID NO: 20156 - protein, 9 aa, synthetic construct
  source 1..9: note = Seed: LVVVGARGV (KRAS G12R)
IVVAGLRGK

SEQ ID NO: 20157 - protein, 9 aa, synthetic construct
  source 1..9: note = Seed: LVVVGARGV (KRAS G12R)
IVVAGLRGL

SEQ ID NO: 20158 - protein, 9 aa, synthetic construct
  source 1..9: note = Seed: LVVVGARGV (KRAS G12R)
IVVAGLRGM

SEQ ID NO: 20159 - protein, 9 aa, synthetic construct
  source 1..9: note = Seed: LVVVGARGV (KRAS G12R)
IVVAGLRGQ

SEQ ID NO: 20160 - protein, 9 aa, synthetic construct
  source 1..9: note = Seed: LVVVGARGV (KRAS G12R)
IVVAGLRGR

SEQ ID NO: 20161 - protein, 9 aa, synthetic construct
  source 1..9: note = Seed: LVVVGARGV (KRAS G12R)
IVVAGLRGS

SEQ ID NO: 20162 - protein, 9 aa, synthetic construct
  source 1..9: note = Seed: LVVVGARGV (KRAS G12R)
IVVAGLRGV

SEQ ID NO: 20163 - protein, 9 aa, synthetic construct
  source 1..9: note = Seed: LVVVGARGV (KRAS G12R)
IVVAGLRGY

SEQ ID NO: 20164 - protein, 9 aa, synthetic construct
  source 1..9: note = Seed: LVVVGARGV (KRAS G12R)
IVVAGMRGA

SEQ ID NO: 20165 - protein, 9 aa, synthetic construct
  source 1..9: note = Seed: LVVVGARGV (KRAS G12R)
IVVAGMRGF

SEQ ID NO: 20166 - protein, 9 aa, synthetic construct
  source 1..9: note = Seed: LVVVGARGV (KRAS G12R)
IVVAGMRGI

SEQ ID NO: 20167 - protein, 9 aa, synthetic construct
  source 1..9: note = Seed: LVVVGARGV (KRAS G12R)
IVVAGMRGK

SEQ ID NO: 20168 - protein, 9 aa, synthetic construct
  source 1..9: note = Seed: LVVVGARGV (KRAS G12R)
IVVAGMRGL

SEQ ID NO: 20169 - protein, 9 aa, synthetic construct
  source 1..9: note = Seed: LVVVGARGV (KRAS G12R)
IVVAGMRGM

SEQ ID NO: 20170 - protein, 9 aa, synthetic construct
  source 1..9: note = Seed: LVVVGARGV (KRAS G12R)
IVVAGMRGQ

SEQ ID NO: 20171 - protein, 9 aa, synthetic construct
  source 1..9: note = Seed: LVVVGARGV (KRAS G12R)
IVVAGMRGR

SEQ ID NO: 20172 - protein, 9 aa, synthetic construct
  source 1..9: note = Seed: LVVVGARGV (KRAS G12R)
IVVAGMRGS

SEQ ID NO: 20173 - protein, 9 aa, synthetic construct
  source 1..9: note = Seed: LVVVGARGV (KRAS G12R)
IVVAGMRGT

SEQ ID NO: 20174 - protein, 9 aa, synthetic construct
  source 1..9: note = Seed: LVVVGARGV (KRAS G12R)
IVVAGMRGV

SEQ ID NO: 20175 - protein, 9 aa, synthetic construct
  source 1..9: note = Seed: LVVVGARGV (KRAS G12R)
IVVAGMRGY

SEQ ID NO: 20176 - protein, 9 aa, synthetic construct
  source 1..9: note = Seed: LVVVGARGV (KRAS G12R)
IVVAGNRGA

SEQ ID NO: 20177 - protein, 9 aa, synthetic construct
  source 1..9: note = Seed: LVVVGARGV (KRAS G12R)
IVVAGNRGF

SEQ ID NO: 20178 - protein, 9 aa, synthetic construct
  source 1..9: note = Seed: LVVVGARGV (KRAS G12R)
IVVAGNRGG

SEQ ID NO: 20179 - protein, 9 aa, synthetic construct
  source 1..9: note = Seed: LVVVGARGV (KRAS G12R)
IVVAGNRGH

SEQ ID NO: 20180 - protein, 9 aa, synthetic construct
  source 1..9: note = Seed: LVVVGARGV (KRAS G12R)
IVVAGNRGI

SEQ ID NO: 20181 - protein, 9 aa, synthetic construct
  source 1..9: note = Seed: LVVVGARGV (KRAS G12R)
IVVAGNRGK

SEQ ID NO: 20182 - protein, 9 aa, synthetic construct
  source 1..9: note = Seed: LVVVGARGV (KRAS G12R)
IVVAGNRGL

SEQ ID NO: 20183 - protein, 9 aa, synthetic construct
  source 1..9: note = Seed: LVVVGARGV (KRAS G12R)
IVVAGNRGM

SEQ ID NO: 20184 - protein, 9 aa, synthetic construct
  source 1..9: note = Seed: LVVVGARGV (KRAS G12R)
IVVAGNRGN

SEQ ID NO: 20185 - protein, 9 aa, synthetic construct
  source 1..9: note = Seed: LVVVGARGV (KRAS G12R)
IVVAGNRGR

SEQ ID NO: 20186 - protein, 9 aa, synthetic construct
  source 1..9: note = Seed: LVVVGARGV (KRAS G12R)
IVVAGNRGS

SEQ ID NO: 20187 - protein, 9 aa, synthetic construct
  source 1..9: note = Seed: LVVVGARGV (KRAS G12R)
IVVAGNRGT

SEQ ID NO: 20188 - protein, 9 aa, synthetic construct
  source 1..9: note = Seed: LVVVGARGV (KRAS G12R)
IVVAGNRGV

SEQ ID NO: 20189 - protein, 9 aa, synthetic construct
  source 1..9: note = Seed: LVVVGARGV (KRAS G12R)
IVVAGNRGY

SEQ ID NO: 20190 - protein, 9 aa, synthetic construct
  source 1..9: note = Seed: LVVVGARGV (KRAS G12R)
IVVAGPRGA

SEQ ID NO: 20191 - protein, 9 aa, synthetic construct
  source 1..9: note = Seed: LVVVGARGV (KRAS G12R)
IVVAGPRGC

SEQ ID NO: 20192 - protein, 9 aa, synthetic construct
  source 1..9: note = Seed: LVVVGARGV (KRAS G12R)
IVVAGPRGF

SEQ ID NO: 20193 - protein, 9 aa, synthetic construct
  source 1..9: note = Seed: LVVVGARGV (KRAS G12R)
IVVAGPRGI

SEQ ID NO: 20194 - protein, 9 aa, synthetic construct
  source 1..9: note = Seed: LVVVGARGV (KRAS G12R)
IVVAGPRGK

SEQ ID NO: 20195 - protein, 9 aa, synthetic construct
  source 1..9: note = Seed: LVVVGARGV (KRAS G12R)
IVVAGPRGL

SEQ ID NO: 20196 - protein, 9 aa, synthetic construct
  source 1..9: note = Seed: LVVVGARGV (KRAS G12R)
IVVAGPRGM

SEQ ID NO: 20197 - protein, 9 aa, synthetic construct
  source 1..9: note = Seed: LVVVGARGV (KRAS G12R)
IVVAGPRGN

SEQ ID NO: 20198 - protein, 9 aa, synthetic construct
  source 1..9: note = Seed: LVVVGARGV (KRAS G12R)
IVVAGPRGR

SEQ ID NO: 20199 - protein, 9 aa, synthetic construct
  source 1..9: note = Seed: LVVVGARGV (KRAS G12R)
IVVAGPRGS

SEQ ID NO: 20200 - protein, 9 aa, synthetic construct
  source 1..9: note = Seed: LVVVGARGV (KRAS G12R)
IVVAGPRGT

SEQ ID NO: 20201 - protein, 9 aa, synthetic construct
  source 1..9: note = Seed: LVVVGARGV (KRAS G12R)
IVVAGPRGV

SEQ ID NO: 20202 - protein, 9 aa, synthetic construct
  source 1..9: note = Seed: LVVVGARGV (KRAS G12R)
IVVAGPRGW

SEQ ID NO: 20203 - protein, 9 aa, synthetic construct
  source 1..9: note = Seed: LVVVGARGV (KRAS G12R)
IVVAGPRGY

SEQ ID NO: 20204 - protein, 9 aa, synthetic construct
  source 1..9: note = Seed: LVVVGARGV (KRAS G12R)
IVVAGQRGA

SEQ ID NO: 20205 - protein, 9 aa, synthetic construct
  source 1..9: note = Seed: LVVVGARGV (KRAS G12R)
IVVAGQRGF

SEQ ID NO: 20206 - protein, 9 aa, synthetic construct
  source 1..9: note = Seed: LVVVGARGV (KRAS G12R)
IVVAGQRGI

SEQ ID NO: 20207 - protein, 9 aa, synthetic construct
  source 1..9: note = Seed: LVVVGARGV (KRAS G12R)
IVVAGQRGK

SEQ ID NO: 20208 - protein, 9 aa, synthetic construct
  source 1..9: note = Seed: LVVVGARGV (KRAS G12R)
IVVAGQRGL

SEQ ID NO: 20209 - protein, 9 aa, synthetic construct
  source 1..9: note = Seed: LVVVGARGV (KRAS G12R)
IVVAGQRGM

SEQ ID NO: 20210 - protein, 9 aa, synthetic construct
  source 1..9: note = Seed: LVVVGARGV (KRAS G12R)
IVVAGQRGR

SEQ ID NO: 20211 - protein, 9 aa, synthetic construct
  source 1..9: note = Seed: LVVVGARGV (KRAS G12R)
IVVAGQRGV

SEQ ID NO: 20212 - protein, 9 aa, synthetic construct
  source 1..9: note = Seed: LVVVGARGV (KRAS G12R)
IVVAGQRGY

SEQ ID NO: 20213 - protein, 9 aa, synthetic construct
  source 1..9: note = Seed: LVVVGARGV (KRAS G12R)
IVVAGRRGA

SEQ ID NO: 20214 - protein, 9 aa, synthetic construct
  source 1..9: note = Seed: LVVVGARGV (KRAS G12R)
IVVAGRRGC

SEQ ID NO: 20215 - protein, 9 aa, synthetic construct
  source 1..9: note = Seed: LVVVGARGV (KRAS G12R)
IVVAGRRGD

SEQ ID NO: 20216 - protein, 9 aa, synthetic construct
  source 1..9: note = Seed: LVVVGARGV (KRAS G12R)
IVVAGRRGE

SEQ ID NO: 20217 - protein, 9 aa, synthetic construct
  source 1..9: note = Seed: LVVVGARGV (KRAS G12R)
IVVAGRRGF

SEQ ID NO: 20218 - protein, 9 aa, synthetic construct
  source 1..9: note = Seed: LVVVGARGV (KRAS G12R)
IVVAGRRGG

SEQ ID NO: 20219 - protein, 9 aa, synthetic construct
  source 1..9: note = Seed: LVVVGARGV (KRAS G12R)
IVVAGRRGH

SEQ ID NO: 20220 - protein, 9 aa, synthetic construct
  source 1..9: note = Seed: LVVVGARGV (KRAS G12R)
IVVAGRRGI

SEQ ID NO: 20221 - protein, 9 aa, synthetic construct
  source 1..9: note = Seed: LVVVGARGV (KRAS G12R)
IVVAGRRGK

SEQ ID NO: 20222 - protein, 9 aa, synthetic construct
  source 1..9: note = Seed: LVVVGARGV (KRAS G12R)
IVVAGRRGL

SEQ ID NO: 20223 - protein, 9 aa, synthetic construct
  source 1..9: note = Seed: LVVVGARGV (KRAS G12R)
IVVAGRRGM

SEQ ID NO: 20224 - protein, 9 aa, synthetic construct
  source 1..9: note = Seed: LVVVGARGV (KRAS G12R)
IVVAGRRGN

SEQ ID NO: 20225 - protein, 9 aa, synthetic construct
  source 1..9: note = Seed: LVVVGARGV (KRAS G12R)
IVVAGRRGP

SEQ ID NO: 20226 - protein, 9 aa, synthetic construct
  source 1..9: note = Seed: LVVVGARGV (KRAS G12R)
IVVAGRRGQ

SEQ ID NO: 20227 - protein, 9 aa, synthetic construct
  source 1..9: note = Seed: LVVVGARGV (KRAS G12R)
IVVAGRRGR

SEQ ID NO: 20228 - protein, 9 aa, synthetic construct
  source 1..9: note = Seed: LVVVGARGV (KRAS G12R)
IVVAGRRGS

SEQ ID NO: 20229 - protein, 9 aa, synthetic construct
  source 1..9: note = Seed: LVVVGARGV (KRAS G12R)
IVVAGRRGT

SEQ ID NO: 20230 - protein, 9 aa, synthetic construct
  source 1..9: note = Seed: LVVVGARGV (KRAS G12R)
IVVAGRRGV

SEQ ID NO: 20231 - protein, 9 aa, synthetic construct
  source 1..9: note = Seed: LVVVGARGV (KRAS G12R)
IVVAGRRGW

SEQ ID NO: 20232 - protein, 9 aa, synthetic construct
  source 1..9: note = Seed: LVVVGARGV (KRAS G12R)
IVVAGRRGY

SEQ ID NO: 20233 - protein, 9 aa, synthetic construct
  source 1..9: note = Seed: LVVVGARGV (KRAS G12R)
IVVAGSRGA

SEQ ID NO: 20234 - protein, 9 aa, synthetic construct
  source 1..9: note = Seed: LVVVGARGV (KRAS G12R)
IVVAGSRGC

SEQ ID NO: 20235 - protein, 9 aa, synthetic construct
  source 1..9: note = Seed: LVVVGARGV (KRAS G12R)
IVVAGSRGF

SEQ ID NO: 20236 - protein, 9 aa, synthetic construct
  source 1..9: note = Seed: LVVVGARGV (KRAS G12R)
IVVAGSRGG

SEQ ID NO: 20237 - protein, 9 aa, synthetic construct
  source 1..9: note = Seed: LVVVGARGV (KRAS G12R)
IVVAGSRGH

SEQ ID NO: 20238 - protein, 9 aa, synthetic construct
  source 1..9: note = Seed: LVVVGARGV (KRAS G12R)
IVVAGSRGI

SEQ ID NO: 20239 - protein, 9 aa, synthetic construct
  source 1..9: note = Seed: LVVVGARGV (KRAS G12R)
IVVAGSRGK

SEQ ID NO: 20240 - protein, 9 aa, synthetic construct
  source 1..9: note = Seed: LVVVGARGV (KRAS G12R)
IVVAGSRGL

SEQ ID NO: 20241 - protein, 9 aa, synthetic construct
  source 1..9: note = Seed: LVVVGARGV (KRAS G12R)
IVVAGSRGM

SEQ ID NO: 20242 - protein, 9 aa, synthetic construct
  source 1..9: note = Seed: LVVVGARGV (KRAS G12R)
IVVAGSRGN

SEQ ID NO: 20243 - protein, 9 aa, synthetic construct
  source 1..9: note = Seed: LVVVGARGV (KRAS G12R)
IVVAGSRGR

SEQ ID NO: 20244 - protein, 9 aa, synthetic construct
  source 1..9: note = Seed: LVVVGARGV (KRAS G12R)
IVVAGSRGS

SEQ ID NO: 20245 - protein, 9 aa, synthetic construct
  source 1..9: note = Seed: LVVVGARGV (KRAS G12R)
IVVAGSRGT

SEQ ID NO: 20246 - protein, 9 aa, synthetic construct
  source 1..9: note = Seed: LVVVGARGV (KRAS G12R)
IVVAGSRGV

SEQ ID NO: 20247 - protein, 9 aa, synthetic construct
  source 1..9: note = Seed: LVVVGARGV (KRAS G12R)
IVVAGSRGW

SEQ ID NO: 20248 - protein, 9 aa, synthetic construct
  source 1..9: note = Seed: LVVVGARGV (KRAS G12R)
IVVAGSRGY

SEQ ID NO: 20249 - protein, 9 aa, synthetic construct
  source 1..9: note = Seed: LVVVGARGV (KRAS G12R)
IVVAGTRGA

SEQ ID NO: 20250 - protein, 9 aa, synthetic construct
  source 1..9: note = Seed: LVVVGARGV (KRAS G12R)
IVVAGTRGF

SEQ ID NO: 20251 - protein, 9 aa, synthetic construct
  source 1..9: note = Seed: LVVVGARGV (KRAS G12R)
IVVAGTRGH

SEQ ID NO: 20252 - protein, 9 aa, synthetic construct
  source 1..9: note = Seed: LVVVGARGV (KRAS G12R)
IVVAGTRGI

SEQ ID NO: 20253 - protein, 9 aa, synthetic construct
  source 1..9: note = Seed: LVVVGARGV (KRAS G12R)
IVVAGTRGK

SEQ ID NO: 20254 - protein, 9 aa, synthetic construct
  source 1..9: note = Seed: LVVVGARGV (KRAS G12R)
IVVAGTRGL

SEQ ID NO: 20255 - protein, 9 aa, synthetic construct
  source 1..9: note = Seed: LVVVGARGV (KRAS G12R)
IVVAGTRGM

SEQ ID NO: 20256 - protein, 9 aa, synthetic construct
  source 1..9: note = Seed: LVVVGARGV (KRAS G12R)
IVVAGTRGR

SEQ ID NO: 20257 - protein, 9 aa, synthetic construct
  source 1..9: note = Seed: LVVVGARGV (KRAS G12R)
IVVAGTRGS

SEQ ID NO: 20258 - protein, 9 aa, synthetic construct
  source 1..9: note = Seed: LVVVGARGV (KRAS G12R)
IVVAGTRGT

SEQ ID NO: 20259 - protein, 9 aa, synthetic construct
  source 1..9: note = Seed: LVVVGARGV (KRAS G12R)
IVVAGTRGV

SEQ ID NO: 20260 - protein, 9 aa, synthetic construct
  source 1..9: note = Seed: LVVVGARGV (KRAS G12R)
IVVAGTRGY

SEQ ID NO: 20261 - protein, 9 aa, synthetic construct
  source 1..9: note = Seed: LVVVGARGV (KRAS G12R)
IVVAGVRGA

SEQ ID NO: 20262 - protein, 9 aa, synthetic construct
  source 1..9: note = Seed: LVVVGARGV (KRAS G12R)
IVVAGVRGC

SEQ ID NO: 20263 - protein, 9 aa, synthetic construct
  source 1..9: note = Seed: LVVVGARGV (KRAS G12R)
IVVAGVRGF

SEQ ID NO: 20264 - protein, 9 aa, synthetic construct
  source 1..9: note = Seed: LVVVGARGV (KRAS G12R)
IVVAGVRGG

SEQ ID NO: 20265 - protein, 9 aa, synthetic construct
  source 1..9: note = Seed: LVVVGARGV (KRAS G12R)
IVVAGVRGH

SEQ ID NO: 20266 - protein, 9 aa, synthetic construct
  source 1..9: note = Seed: LVVVGARGV (KRAS G12R)
IVVAGVRGI

SEQ ID NO: 20267 - protein, 9 aa, synthetic construct
  source 1..9: note = Seed: LVVVGARGV (KRAS G12R)
IVVAGVRGK

SEQ ID NO: 20268 - protein, 9 aa, synthetic construct
  source 1..9: note = Seed: LVVVGARGV (KRAS G12R)
IVVAGVRGL

SEQ ID NO: 20269 - protein, 9 aa, synthetic construct
  source 1..9: note = Seed: LVVVGARGV (KRAS G12R)
IVVAGVRGM

SEQ ID NO: 20270 - protein, 9 aa, synthetic construct
  source 1..9: note = Seed: LVVVGARGV (KRAS G12R)
IVVAGVRGN

SEQ ID NO: 20271 - protein, 9 aa, synthetic construct
  source 1..9: note = Seed: LVVVGARGV (KRAS G12R)
IVVAGVRGQ

SEQ ID NO: 20272 - protein, 9 aa, synthetic construct
  source 1..9: note = Seed: LVVVGARGV (KRAS G12R)
IVVAGVRGR

SEQ ID NO: 20273 - protein, 9 aa, synthetic construct
  source 1..9: note = Seed: LVVVGARGV (KRAS G12R)
IVVAGVRGS

SEQ ID NO: 20274 - protein, 9 aa, synthetic construct
  source 1..9: note = Seed: LVVVGARGV (KRAS G12R)
IVVAGVRGT

SEQ ID NO: 20275 - protein, 9 aa, synthetic construct
  source 1..9: note = Seed: LVVVGARGV (KRAS G12R)
IVVAGVRGV

SEQ ID NO: 20276 - protein, 9 aa, synthetic construct
  source 1..9: note = Seed: LVVVGARGV (KRAS G12R)
IVVAGVRGY

SEQ ID NO: 20277 - protein, 9 aa, synthetic construct
  source 1..9: note = Seed: LVVVGARGV (KRAS G12R)
IVVAGWRGM

SEQ ID NO: 20278 - protein, 9 aa, synthetic construct
  source 1..9: note = Seed: LVVVGARGV (KRAS G12R)
IVVAGWRGR

SEQ ID NO: 20279 - protein, 9 aa, synthetic construct
  source 1..9: note = Seed: LVVVGARGV (KRAS G12R)
IVVAGYRGK

SEQ ID NO: 20280 - protein, 9 aa, synthetic construct
  source 1..9: note = Seed: LVVVGARGV (KRAS G12R)
IVVAGYRGL

SEQ ID NO: 20281 - protein, 9 aa, synthetic construct
  source 1..9: note = Seed: LVVVGARGV (KRAS G12R)
IVVAGYRGR

SEQ ID NO: 20282 - protein, 9 aa, synthetic construct
  source 1..9: note = Seed: LVVVGARGV (KRAS G12R)
IVVAGYRGV

SEQ ID NO: 20283 - protein, 9 aa, synthetic construct
  source 1..9: note = Seed: LVVVGARGV (KRAS G12R)
IVVCGARGA

SEQ ID NO: 20284 - protein, 9 aa, synthetic construct
  source 1..9: note = Seed: LVVVGARGV (KRAS G12R)
IVVCGARGF

SEQ ID NO: 20285 - protein, 9 aa, synthetic construct
  source 1..9: note = Seed: LVVVGARGV (KRAS G12R)
IVVCGARGI

SEQ ID NO: 20286 - protein, 9 aa, synthetic construct
  source 1..9: note = Seed: LVVVGARGV (KRAS G12R)
IVVCGARGL

SEQ ID NO: 20287 - protein, 9 aa, synthetic construct
  source 1..9: note = Seed: LVVVGARGV (KRAS G12R)
IVVCGARGM

SEQ ID NO: 20288 - protein, 9 aa, synthetic construct
  source 1..9: note = Seed: LVVVGARGV (KRAS G12R)
IVVCGARGV

SEQ ID NO: 20289 - protein, 9 aa, synthetic construct
  source 1..9: note = Seed: LVVVGARGV (KRAS G12R)
IVVCGGRGI

SEQ ID NO: 20290 - protein, 9 aa, synthetic construct
  source 1..9: note = Seed: LVVVGARGV (KRAS G12R)
IVVCGGRGL

SEQ ID NO: 20291 - protein, 9 aa, synthetic construct
  source 1..9: note = Seed: LVVVGARGV (KRAS G12R)
IVVCGGRGV

SEQ ID NO: 20292 - protein, 9 aa, synthetic construct
  source 1..9: note = Seed: LVVVGARGV (KRAS G12R)
IVVCGHRGR

SEQ ID NO: 20293 - protein, 9 aa, synthetic construct
  source 1..9: note = Seed: LVVVGARGV (KRAS G12R)
IVVCGIRGR

SEQ ID NO: 20294 - protein, 9 aa, synthetic construct
  source 1..9: note = Seed: LVVVGARGV (KRAS G12R)
IVVCGKRGA

SEQ ID NO: 20295 - protein, 9 aa, synthetic construct
  source 1..9: note = Seed: LVVVGARGV (KRAS G12R)
IVVCGKRGF

SEQ ID NO: 20296 - protein, 9 aa, synthetic construct
  source 1..9: note = Seed: LVVVGARGV (KRAS G12R)
IVVCGKRGG

SEQ ID NO: 20297 - protein, 9 aa, synthetic construct
  source 1..9: note = Seed: LVVVGARGV (KRAS G12R)
IVVCGKRGH

SEQ ID NO: 20298 - protein, 9 aa, synthetic construct
  source 1..9: note = Seed: LVVVGARGV (KRAS G12R)
IVVCGKRGI

SEQ ID NO: 20299 - protein, 9 aa, synthetic construct
  source 1..9: note = Seed: LVVVGARGV (KRAS G12R)
IVVCGKRGK

SEQ ID NO: 20300 - protein, 9 aa, synthetic construct
  source 1..9: note = Seed: LVVVGARGV (KRAS G12R)
IVVCGKRGL

SEQ ID NO: 20301 - protein, 9 aa, synthetic construct
  source 1..9: note = Seed: LVVVGARGV (KRAS G12R)
IVVCGKRGM

SEQ ID NO: 20302 - protein, 9 aa, synthetic construct
  source 1..9: note = Seed: LVVVGARGV (KRAS G12R)
IVVCGKRGN

SEQ ID NO: 20303 - protein, 9 aa, synthetic construct
  source 1..9: note = Seed: LVVVGARGV (KRAS G12R)
IVVCGKRGQ

SEQ ID NO: 20304 - protein, 9 aa, synthetic construct
  source 1..9: note = Seed: LVVVGARGV (KRAS G12R)
IVVCGKRGR

SEQ ID NO: 20305 - protein, 9 aa, synthetic construct
  source 1..9: note = Seed: LVVVGARGV (KRAS G12R)
IVVCGKRGS

SEQ ID NO: 20306 - protein, 9 aa, synthetic construct
  source 1..9: note = Seed: LVVVGARGV (KRAS G12R)
IVVCGKRGT

SEQ ID NO: 20307 - protein, 9 aa, synthetic construct
  source 1..9: note = Seed: LVVVGARGV (KRAS G12R)
IVVCGKRGV

SEQ ID NO: 20308 - protein, 9 aa, synthetic construct
  source 1..9: note = Seed: LVVVGARGV (KRAS G12R)
IVVCGKRGY

SEQ ID NO: 20309 - protein, 9 aa, synthetic construct
  source 1..9: note = Seed: LVVVGARGV (KRAS G12R)
IVVCGLRGR

SEQ ID NO: 20310 - protein, 9 aa, synthetic construct
  source 1..9: note = Seed: LVVVGARGV (KRAS G12R)
IVVCGMRGR

SEQ ID NO: 20311 - protein, 9 aa, synthetic construct
  source 1..9: note = Seed: LVVVGARGV (KRAS G12R)
IVVCGNRGF

SEQ ID NO: 20312 - protein, 9 aa, synthetic construct
  source 1..9: note = Seed: LVVVGARGV (KRAS G12R)
IVVCGRRGA

SEQ ID NO: 20313 - protein, 9 aa, synthetic construct
  source 1..9: note = Seed: LVVVGARGV (KRAS G12R)
IVVCGRRGF

SEQ ID NO: 20314 - protein, 9 aa, synthetic construct
  source 1..9: note = Seed: LVVVGARGV (KRAS G12R)
IVVCGRRGG

SEQ ID NO: 20315 - protein, 9 aa, synthetic construct
  source 1..9: note = Seed: LVVVGARGV (KRAS G12R)
IVVCGRRGH

SEQ ID NO: 20316 - protein, 9 aa, synthetic construct
  source 1..9: note = Seed: LVVVGARGV (KRAS G12R)
IVVCGRRGI

SEQ ID NO: 20317 - protein, 9 aa, synthetic construct
  source 1..9: note = Seed: LVVVGARGV (KRAS G12R)
IVVCGRRGK

SEQ ID NO: 20318 - protein, 9 aa, synthetic construct
  source 1..9: note = Seed: LVVVGARGV (KRAS G12R)
IVVCGRRGL

SEQ ID NO: 20319 - protein, 9 aa, synthetic construct
  source 1..9: note = Seed: LVVVGARGV (KRAS G12R)
IVVCGRRGM

SEQ ID NO: 20320 - protein, 9 aa, synthetic construct
  source 1..9: note = Seed: LVVVGARGV (KRAS G12R)
IVVCGRRGN

SEQ ID NO: 20321 - protein, 9 aa, synthetic construct
  source 1..9: note = Seed: LVVVGARGV (KRAS G12R)
IVVCGRRGP

SEQ ID NO: 20322 - protein, 9 aa, synthetic construct
  source 1..9: note = Seed: LVVVGARGV (KRAS G12R)
IVVCGRRGQ

SEQ ID NO: 20323 - protein, 9 aa, synthetic construct
  source 1..9: note = Seed: LVVVGARGV (KRAS G12R)
IVVCGRRGR

SEQ ID NO: 20324 - protein, 9 aa, synthetic construct
  source 1..9: note = Seed: LVVVGARGV (KRAS G12R)
IVVCGRRGS

SEQ ID NO: 20325 - protein, 9 aa, synthetic construct
  source 1..9: note = Seed: LVVVGARGV (KRAS G12R)
IVVCGRRGT

SEQ ID NO: 20326 - protein, 9 aa, synthetic construct
  source 1..9: note = Seed: LVVVGARGV (KRAS G12R)
IVVCGRRGV

SEQ ID NO: 20327 - protein, 9 aa, synthetic construct
  source 1..9: note = Seed: LVVVGARGV (KRAS G12R)
IVVCGRRGW

SEQ ID NO: 20328 - protein, 9 aa, synthetic construct
  source 1..9: note = Seed: LVVVGARGV (KRAS G12R)
IVVCGRRGY

SEQ ID NO: 20329 - protein, 9 aa, synthetic construct
  source 1..9: note = Seed: LVVVGARGV (KRAS G12R)
IVVCGSRGF

SEQ ID NO: 20330 - protein, 9 aa, synthetic construct
  source 1..9: note = Seed: LVVVGARGV (KRAS G12R)
IVVCGSRGI

SEQ ID NO: 20331 - protein, 9 aa, synthetic construct
  source 1..9: note = Seed: LVVVGARGV (KRAS G12R)
IVVCGSRGL

SEQ ID NO: 20332 - protein, 9 aa, synthetic construct
  source 1..9: note = Seed: LVVVGARGV (KRAS G12R)
IVVCGSRGV

SEQ ID NO: 20333 - protein, 9 aa, synthetic construct
  source 1..9: note = Seed: LVVVGARGV (KRAS G12R)
IVVCGVRGR

SEQ ID NO: 20334 - protein, 9 aa, synthetic construct
  source 1..9: note = Seed: LVVVGARGV (KRAS G12R)
IVVDGARGA

SEQ ID NO: 20335 - protein, 9 aa, synthetic construct
  source 1..9: note = Seed: LVVVGARGV (KRAS G12R)
IVVDGARGF

SEQ ID NO: 20336 - protein, 9 aa, synthetic construct
  source 1..9: note = Seed: LVVVGARGV (KRAS G12R)
IVVDGARGI

SEQ ID NO: 20337 - protein, 9 aa, synthetic construct
  source 1..9: note = Seed: LVVVGARGV (KRAS G12R)
IVVDGARGL

SEQ ID NO: 20338 - protein, 9 aa, synthetic construct
  source 1..9: note = Seed: LVVVGARGV (KRAS G12R)
IVVDGARGM

SEQ ID NO: 20339 - protein, 9 aa, synthetic construct
  source 1..9: note = Seed: LVVVGARGV (KRAS G12R)
IVVDGARGV

SEQ ID NO: 20340 - protein, 9 aa, synthetic construct
  source 1..9: note = Seed: LVVVGARGV (KRAS G12R)
IVVDGARGY

SEQ ID NO: 20341 - protein, 9 aa, synthetic construct
  source 1..9: note = Seed: LVVVGARGV (KRAS G12R)
IVVDGGRGI

SEQ ID NO: 20342 - protein, 9 aa, synthetic construct
  source 1..9: note = Seed: LVVVGARGV (KRAS G12R)
IVVDGGRGL

SEQ ID NO: 20343 - protein, 9 aa, synthetic construct
  source 1..9: note = Seed: LVVVGARGV (KRAS G12R)
IVVDGGRGV

SEQ ID NO: 20344 - protein, 9 aa, synthetic construct
  source 1..9: note = Seed: LVVVGARGV (KRAS G12R)
IVVDGIRGF

SEQ ID NO: 20345 - protein, 9 aa, synthetic construct
  source 1..9: note = Seed: LVVVGARGV (KRAS G12R)
IVVDGIRGI

SEQ ID NO: 20346 - protein, 9 aa, synthetic construct
  source 1..9: note = Seed: LVVVGARGV (KRAS G12R)
IVVDGIRGL

SEQ ID NO: 20347 - protein, 9 aa, synthetic construct
  source 1..9: note = Seed: LVVVGARGV (KRAS G12R)
IVVDGIRGV

SEQ ID NO: 20348 - protein, 9 aa, synthetic construct
  source 1..9: note = Seed: LVVVGARGV (KRAS G12R)
IVVDGLRGI

SEQ ID NO: 20349 - protein, 9 aa, synthetic construct
  source 1..9: note = Seed: LVVVGARGV (KRAS G12R)
IVVDGLRGV

SEQ ID NO: 20350 - protein, 9 aa, synthetic construct
  source 1..9: note = Seed: LVVVGARGV (KRAS G12R)
IVVDGMRGI

SEQ ID NO: 20351 - protein, 9 aa, synthetic construct
  source 1..9: note = Seed: LVVVGARGV (KRAS G12R)
IVVDGNRGA

SEQ ID NO: 20352 - protein, 9 aa, synthetic construct
  source 1..9: note = Seed: LVVVGARGV (KRAS G12R)
IVVDGNRGF

SEQ ID NO: 20353 - protein, 9 aa, synthetic construct
  source 1..9: note = Seed: LVVVGARGV (KRAS G12R)
IVVDGNRGI

SEQ ID NO: 20354 - protein, 9 aa, synthetic construct
  source 1..9: note = Seed: LVVVGARGV (KRAS G12R)
IVVDGNRGL

SEQ ID NO: 20355 - protein, 9 aa, synthetic construct
  source 1..9: note = Seed: LVVVGARGV (KRAS G12R)
IVVDGNRGM

SEQ ID NO: 20356 - protein, 9 aa, synthetic construct
  source 1..9: note = Seed: LVVVGARGV (KRAS G12R)
IVVDGNRGV

SEQ ID NO: 20357 - protein, 9 aa, synthetic construct
  source 1..9: note = Seed: LVVVGARGV (KRAS G12R)
IVVDGNRGY

SEQ ID NO: 20358 - protein, 9 aa, synthetic construct
  source 1..9: note = Seed: LVVVGARGV (KRAS G12R)
IVVDGPRGI

SEQ ID NO: 20359 - protein, 9 aa, synthetic construct
  source 1..9: note = Seed: LVVVGARGV (KRAS G12R)
IVVDGPRGL

SEQ ID NO: 20360 - protein, 9 aa, synthetic construct
  source 1..9: note = Seed: LVVVGARGV (KRAS G12R)
IVVDGPRGV

SEQ ID NO: 20361 - protein, 9 aa, synthetic construct
  source 1..9: note = Seed: LVVVGARGV (KRAS G12R)
IVVDGSRGF

SEQ ID NO: 20362 - protein, 9 aa, synthetic construct
  source 1..9: note = Seed: LVVVGARGV (KRAS G12R)
IVVDGSRGI

SEQ ID NO: 20363 - protein, 9 aa, synthetic construct
  source 1..9: note = Seed: LVVVGARGV (KRAS G12R)
IVVDGSRGL

SEQ ID NO: 20364 - protein, 9 aa, synthetic construct
  source 1..9: note = Seed: LVVVGARGV (KRAS G12R)
IVVDGSRGM

SEQ ID NO: 20365 - protein, 9 aa, synthetic construct
  source 1..9: note = Seed: LVVVGARGV (KRAS G12R)
IVVDGSRGV

SEQ ID NO: 20366 - protein, 9 aa, synthetic construct
  source 1..9: note = Seed: LVVVGARGV (KRAS G12R)
IVVDGSRGY

SEQ ID NO: 20367 - protein, 9 aa, synthetic construct
  source 1..9: note = Seed: LVVVGARGV (KRAS G12R)
IVVDGTRGF

SEQ ID NO: 20368 - protein, 9 aa, synthetic construct
  source 1..9: note = Seed: LVVVGARGV (KRAS G12R)
IVVDGTRGI

SEQ ID NO: 20369 - protein, 9 aa, synthetic construct
  source 1..9: note = Seed: LVVVGARGV (KRAS G12R)
IVVDGTRGL

SEQ ID NO: 20370 - protein, 9 aa, synthetic construct
  source 1..9: note = Seed: LVVVGARGV (KRAS G12R)
IVVDGTRGV

SEQ ID NO: 20371 - protein, 9 aa, synthetic construct
  source 1..9: note = Seed: LVVVGARGV (KRAS G12R)
IVVDGVRGF

SEQ ID NO: 20372 - protein, 9 aa, synthetic construct
  source 1..9: note = Seed: LVVVGARGV (KRAS G12R)
IVVDGVRGI

SEQ ID NO: 20373 - protein, 9 aa, synthetic construct
  source 1..9: note = Seed: LVVVGARGV (KRAS G12R)
IVVDGVRGL

SEQ ID NO: 20374 - protein, 9 aa, synthetic construct
  source 1..9: note = Seed: LVVVGARGV (KRAS G12R)
IVVDGVRGV

SEQ ID NO: 20375 - protein, 9 aa, synthetic construct
  source 1..9: note = Seed: LVVVGARGV (KRAS G12R)
IVVEGARGA

SEQ ID NO: 20376 - protein, 9 aa, synthetic construct
  source 1..9: note = Seed: LVVVGARGV (KRAS G12R)
IVVEGARGI

SEQ ID NO: 20377 - protein, 9 aa, synthetic construct
  source 1..9: note = Seed: LVVVGARGV (KRAS G12R)
IVVEGARGL

SEQ ID NO: 20378 - protein, 9 aa, synthetic construct
  source 1..9: note = Seed: LVVVGARGV (KRAS G12R)
IVVEGARGM

SEQ ID NO: 20379 - protein, 9 aa, synthetic construct
  source 1..9: note = Seed: LVVVGARGV (KRAS G12R)
IVVEGARGS

SEQ ID NO: 20380 - protein, 9 aa, synthetic construct
  source 1..9: note = Seed: LVVVGARGV (KRAS G12R)
IVVEGARGT

SEQ ID NO: 20381 - protein, 9 aa, synthetic construct
  source 1..9: note = Seed: LVVVGARGV (KRAS G12R)
IVVEGARGV

SEQ ID NO: 20382 - protein, 9 aa, synthetic construct
  source 1..9: note = Seed: LVVVGARGV (KRAS G12R)
IVVEGFRGF

SEQ ID NO: 20383 - protein, 9 aa, synthetic construct
  source 1..9: note = Seed: LVVVGARGV (KRAS G12R)
IVVEGFRGI

SEQ ID NO: 20384 - protein, 9 aa, synthetic construct
  source 1..9: note = Seed: LVVVGARGV (KRAS G12R)
IVVEGFRGL

SEQ ID NO: 20385 - protein, 9 aa, synthetic construct
  source 1..9: note = Seed: LVVVGARGV (KRAS G12R)
IVVEGFRGV

SEQ ID NO: 20386 - protein, 9 aa, synthetic construct
  source 1..9: note = Seed: LVVVGARGV (KRAS G12R)
IVVEGGRGA

SEQ ID NO: 20387 - protein, 9 aa, synthetic construct
  source 1..9: note = Seed: LVVVGARGV (KRAS G12R)
IVVEGGRGI

SEQ ID NO: 20388 - protein, 9 aa, synthetic construct
  source 1..9: note = Seed: LVVVGARGV (KRAS G12R)
IVVEGGRGL

SEQ ID NO: 20389 - protein, 9 aa, synthetic construct
  source 1..9: note = Seed: LVVVGARGV (KRAS G12R)
IVVEGGRGM

SEQ ID NO: 20390 - protein, 9 aa, synthetic construct
  source 1..9: note = Seed: LVVVGARGV (KRAS G12R)
IVVEGGRGS

SEQ ID NO: 20391 - protein, 9 aa, synthetic construct
  source 1..9: note = Seed: LVVVGARGV (KRAS G12R)
IVVEGGRGT

SEQ ID NO: 20392 - protein, 9 aa, synthetic construct
  source 1..9: note = Seed: LVVVGARGV (KRAS G12R)
IVVEGGRGV

SEQ ID NO: 20393 - protein, 9 aa, synthetic construct
  source 1..9: note = Seed: LVVVGARGV (KRAS G12R)
IVVEGKRGA

SEQ ID NO: 20394 - protein, 9 aa, synthetic construct
  source 1..9: note = Seed: LVVVGARGV (KRAS G12R)
IVVEGKRGI

SEQ ID NO: 20395 - protein, 9 aa, synthetic construct
  source 1..9: note = Seed: LVVVGARGV (KRAS G12R)
IVVEGKRGL

SEQ ID NO: 20396 - protein, 9 aa, synthetic construct
  source 1..9: note = Seed: LVVVGARGV (KRAS G12R)
IVVEGKRGM

SEQ ID NO: 20397 - protein, 9 aa, synthetic construct
  source 1..9: note = Seed: LVVVGARGV (KRAS G12R)
IVVEGKRGR

SEQ ID NO: 20398 - protein, 9 aa, synthetic construct
  source 1..9: note = Seed: LVVVGARGV (KRAS G12R)
IVVEGKRGS

SEQ ID NO: 20399 - protein, 9 aa, synthetic construct
  source 1..9: note = Seed: LVVVGARGV (KRAS G12R)
IVVEGNRGA

SEQ ID NO: 20400 - protein, 9 aa, synthetic construct
  source 1..9: note = Seed: LVVVGARGV (KRAS G12R)
IVVEGNRGI

SEQ ID NO: 20401 - protein, 9 aa, synthetic construct
  source 1..9: note = Seed: LVVVGARGV (KRAS G12R)
IVVEGNRGL

SEQ ID NO: 20402 - protein, 9 aa, synthetic construct
  source 1..9: note = Seed: LVVVGARGV (KRAS G12R)
IVVEGNRGV

SEQ ID NO: 20403 - protein, 9 aa, synthetic construct
  source 1..9: note = Seed: LVVVGARGV (KRAS G12R)
IVVEGPRGA

SEQ ID NO: 20404 - protein, 9 aa, synthetic construct
  source 1..9: note = Seed: LVVVGARGV (KRAS G12R)
IVVEGPRGI

SEQ ID NO: 20405 - protein, 9 aa, synthetic construct
  source 1..9: note = Seed: LVVVGARGV (KRAS G12R)
IVVEGPRGL

SEQ ID NO: 20406 - protein, 9 aa, synthetic construct
  source 1..9: note = Seed: LVVVGARGV (KRAS G12R)
IVVEGPRGV

SEQ ID NO: 20407 - protein, 9 aa, synthetic construct
  source 1..9: note = Seed: LVVVGARGV (KRAS G12R)
IVVEGRRGA

SEQ ID NO: 20408 - protein, 9 aa, synthetic construct
  source 1..9: note = Seed: LVVVGARGV (KRAS G12R)
IVVEGRRGF

SEQ ID NO: 20409 - protein, 9 aa, synthetic construct
  source 1..9: note = Seed: LVVVGARGV (KRAS G12R)
IVVEGRRGG

SEQ ID NO: 20410 - protein, 9 aa, synthetic construct
  source 1..9: note = Seed: LVVVGARGV (KRAS G12R)
IVVEGRRGH

SEQ ID NO: 20411 - protein, 9 aa, synthetic construct
  source 1..9: note = Seed: LVVVGARGV (KRAS G12R)
IVVEGRRGI

SEQ ID NO: 20412 - protein, 9 aa, synthetic construct
  source 1..9: note = Seed: LVVVGARGV (KRAS G12R)
IVVEGRRGK

SEQ ID NO: 20413 - protein, 9 aa, synthetic construct
  source 1..9: note = Seed: LVVVGARGV (KRAS G12R)
IVVEGRRGL

SEQ ID NO: 20414 - protein, 9 aa, synthetic construct
  source 1..9: note = Seed: LVVVGARGV (KRAS G12R)
IVVEGRRGM

SEQ ID NO: 20415 - protein, 9 aa, synthetic construct
  source 1..9: note = Seed: LVVVGARGV (KRAS G12R)
IVVEGRRGQ

SEQ ID NO: 20416 - protein, 9 aa, synthetic construct
  source 1..9: note = Seed: LVVVGARGV (KRAS G12R)
IVVEGRRGR

SEQ ID NO: 20417 - protein, 9 aa, synthetic construct
  source 1..9: note = Seed: LVVVGARGV (KRAS G12R)
IVVEGRRGS

SEQ ID NO: 20418 - protein, 9 aa, synthetic construct
  source 1..9: note = Seed: LVVVGARGV (KRAS G12R)
IVVEGRRGT

SEQ ID NO: 20419 - protein, 9 aa, synthetic construct
  source 1..9: note = Seed: LVVVGARGV (KRAS G12R)
IVVEGRRGV

SEQ ID NO: 20420 - protein, 9 aa, synthetic construct
  source 1..9: note = Seed: LVVVGARGV (KRAS G12R)
IVVEGRRGY

SEQ ID NO: 20421 - protein, 9 aa, synthetic construct
  source 1..9: note = Seed: LVVVGARGV (KRAS G12R)
IVVEGSRGA

SEQ ID NO: 20422 - protein, 9 aa, synthetic construct
  source 1..9: note = Seed: LVVVGARGV (KRAS G12R)
IVVEGSRGI

SEQ ID NO: 20423 - protein, 9 aa, synthetic construct
  source 1..9: note = Seed: LVVVGARGV (KRAS G12R)
IVVEGSRGL

SEQ ID NO: 20424 - protein, 9 aa, synthetic construct
  source 1..9: note = Seed: LVVVGARGV (KRAS G12R)
IVVEGSRGM

SEQ ID NO: 20425 - protein, 9 aa, synthetic construct
  source 1..9: note = Seed: LVVVGARGV (KRAS G12R)
IVVEGSRGS

SEQ ID NO: 20426 - protein, 9 aa, synthetic construct
  source 1..9: note = Seed: LVVVGARGV (KRAS G12R)
IVVEGSRGT

SEQ ID NO: 20427 - protein, 9 aa, synthetic construct
  source 1..9: note = Seed: LVVVGARGV (KRAS G12R)
IVVEGSRGV

SEQ ID NO: 20428 - protein, 9 aa, synthetic construct
  source 1..9: note = Seed: LVVVGARGV (KRAS G12R)
IVVEGTRGI

SEQ ID NO: 20429 - protein, 9 aa, synthetic construct
  source 1..9: note = Seed: LVVVGARGV (KRAS G12R)
IVVEGTRGL

SEQ ID NO: 20430 - protein, 9 aa, synthetic construct
  source 1..9: note = Seed: LVVVGARGV (KRAS G12R)
IVVEGTRGV

SEQ ID NO: 20431 - protein, 9 aa, synthetic construct
  source 1..9: note = Seed: LVVVGARGV (KRAS G12R)
IVVEGVRGI

SEQ ID NO: 20432 - protein, 9 aa, synthetic construct
  source 1..9: note = Seed: LVVVGARGV (KRAS G12R)
IVVEGVRGL

SEQ ID NO: 20433 - protein, 9 aa, synthetic construct
  source 1..9: note = Seed: LVVVGARGV (KRAS G12R)
IVVEGVRGV

SEQ ID NO: 20434 - protein, 9 aa, synthetic construct
  source 1..9: note = Seed: LVVVGARGV (KRAS G12R)
IVVFGARGA

SEQ ID NO: 20435 - protein, 9 aa, synthetic construct
  source 1..9: note = Seed: LVVVGARGV (KRAS G12R)
IVVFGARGF

SEQ ID NO: 20436 - protein, 9 aa, synthetic construct
  source 1..9: note = Seed: LVVVGARGV (KRAS G12R)
IVVFGARGG

SEQ ID NO: 20437 - protein, 9 aa, synthetic construct
  source 1..9: note = Seed: LVVVGARGV (KRAS G12R)
IVVFGARGH

SEQ ID NO: 20438 - protein, 9 aa, synthetic construct
  source 1..9: note = Seed: LVVVGARGV (KRAS G12R)
IVVFGARGI

SEQ ID NO: 20439 - protein, 9 aa, synthetic construct
  source 1..9: note = Seed: LVVVGARGV (KRAS G12R)
IVVFGARGK

SEQ ID NO: 20440 - protein, 9 aa, synthetic construct
  source 1..9: note = Seed: LVVVGARGV (KRAS G12R)
IVVFGARGL

SEQ ID NO: 20441 - protein, 9 aa, synthetic construct
  source 1..9: note = Seed: LVVVGARGV (KRAS G12R)
IVVFGARGM

SEQ ID NO: 20442 - protein, 9 aa, synthetic construct
  source 1..9: note = Seed: LVVVGARGV (KRAS G12R)
IVVFGARGN

SEQ ID NO: 20443 - protein, 9 aa, synthetic construct
  source 1..9: note = Seed: LVVVGARGV (KRAS G12R)
IVVFGARGP

SEQ ID NO: 20444 - protein, 9 aa, synthetic construct
  source 1..9: note = Seed: LVVVGARGV (KRAS G12R)
IVVFGARGQ

SEQ ID NO: 20445 - protein, 9 aa, synthetic construct
  source 1..9: note = Seed: LVVVGARGV (KRAS G12R)
IVVFGARGR

SEQ ID NO: 20446 - protein, 9 aa, synthetic construct
  source 1..9: note = Seed: LVVVGARGV (KRAS G12R)
IVVFGARGS

SEQ ID NO: 20447 - protein, 9 aa, synthetic construct
  source 1..9: note = Seed: LVVVGARGV (KRAS G12R)
IVVFGARGT

SEQ ID NO: 20448 - protein, 9 aa, synthetic construct
  source 1..9: note = Seed: LVVVGARGV (KRAS G12R)
IVVFGARGV

SEQ ID NO: 20449 - protein, 9 aa, synthetic construct
  source 1..9: note = Seed: LVVVGARGV (KRAS G12R)
IVVFGARGW

SEQ ID NO: 20450 - protein, 9 aa, synthetic construct
  source 1..9: note = Seed: LVVVGARGV (KRAS G12R)
IVVFGARGY

SEQ ID NO: 20451 - protein, 9 aa, synthetic construct
  source 1..9: note = Seed: LVVVGARGV (KRAS G12R)
IVVFGCRGL

SEQ ID NO: 20452 - protein, 9 aa, synthetic construct
  source 1..9: note = Seed: LVVVGARGV (KRAS G12R)
IVVFGCRGR

SEQ ID NO: 20453 - protein, 9 aa, synthetic construct
  source 1..9: note = Seed: LVVVGARGV (KRAS G12R)
IVVFGDRGA

SEQ ID NO: 20454 - protein, 9 aa, synthetic construct
  source 1..9: note = Seed: LVVVGARGV (KRAS G12R)
IVVFGDRGF

SEQ ID NO: 20455 - protein, 9 aa, synthetic construct
  source 1..9: note = Seed: LVVVGARGV (KRAS G12R)
IVVFGDRGI

SEQ ID NO: 20456 - protein, 9 aa, synthetic construct
  source 1..9: note = Seed: LVVVGARGV (KRAS G12R)
IVVFGDRGL

SEQ ID NO: 20457 - protein, 9 aa, synthetic construct
  source 1..9: note = Seed: LVVVGARGV (KRAS G12R)
IVVFGDRGM

SEQ ID NO: 20458 - protein, 9 aa, synthetic construct
  source 1..9: note = Seed: LVVVGARGV (KRAS G12R)
IVVFGDRGT

SEQ ID NO: 20459 - protein, 9 aa, synthetic construct
  source 1..9: note = Seed: LVVVGARGV (KRAS G12R)
IVVFGDRGV

SEQ ID NO: 20460 - protein, 9 aa, synthetic construct
  source 1..9: note = Seed: LVVVGARGV (KRAS G12R)
IVVFGERGI

SEQ ID NO: 20461 - protein, 9 aa, synthetic construct
  source 1..9: note = Seed: LVVVGARGV (KRAS G12R)
IVVFGERGL

SEQ ID NO: 20462 - protein, 9 aa, synthetic construct
  source 1..9: note = Seed: LVVVGARGV (KRAS G12R)
IVVFGERGR

SEQ ID NO: 20463 - protein, 9 aa, synthetic construct
  source 1..9: note = Seed: LVVVGARGV (KRAS G12R)
IVVFGERGV

SEQ ID NO: 20464 - protein, 9 aa, synthetic construct
  source 1..9: note = Seed: LVVVGARGV (KRAS G12R)
IVVFGFRGF

SEQ ID NO: 20465 - protein, 9 aa, synthetic construct
  source 1..9: note = Seed: LVVVGARGV (KRAS G12R)
IVVFGFRGI

SEQ ID NO: 20466 - protein, 9 aa, synthetic construct
  source 1..9: note = Seed: LVVVGARGV (KRAS G12R)
IVVFGFRGK

SEQ ID NO: 20467 - protein, 9 aa, synthetic construct
  source 1..9: note = Seed: LVVVGARGV (KRAS G12R)
IVVFGFRGL

SEQ ID NO: 20468 - protein, 9 aa, synthetic construct
  source 1..9: note = Seed: LVVVGARGV (KRAS G12R)
IVVFGFRGR

SEQ ID NO: 20469 - protein, 9 aa, synthetic construct
  source 1..9: note = Seed: LVVVGARGV (KRAS G12R)
IVVFGFRGV

SEQ ID NO: 20470 - protein, 9 aa, synthetic construct
  source 1..9: note = Seed: LVVVGARGV (KRAS G12R)
IVVFGGRGA

SEQ ID NO: 20471 - protein, 9 aa, synthetic construct
  source 1..9: note = Seed: LVVVGARGV (KRAS G12R)
IVVFGGRGF

SEQ ID NO: 20472 - protein, 9 aa, synthetic construct
  source 1..9: note = Seed: LVVVGARGV (KRAS G12R)
IVVFGGRGG

SEQ ID NO: 20473 - protein, 9 aa, synthetic construct
  source 1..9: note = Seed: LVVVGARGV (KRAS G12R)
IVVFGGRGH

SEQ ID NO: 20474 - protein, 9 aa, synthetic construct
  source 1..9: note = Seed: LVVVGARGV (KRAS G12R)
IVVFGGRGI

SEQ ID NO: 20475 - protein, 9 aa, synthetic construct
  source 1..9: note = Seed: LVVVGARGV (KRAS G12R)
IVVFGGRGK

SEQ ID NO: 20476 - protein, 9 aa, synthetic construct
  source 1..9: note = Seed: LVVVGARGV (KRAS G12R)
IVVFGGRGL

SEQ ID NO: 20477 - protein, 9 aa, synthetic construct
  source 1..9: note = Seed: LVVVGARGV (KRAS G12R)
IVVFGGRGM

SEQ ID NO: 20478 - protein, 9 aa, synthetic construct
  source 1..9: note = Seed: LVVVGARGV (KRAS G12R)
IVVFGGRGN

SEQ ID NO: 20479 - protein, 9 aa, synthetic construct
  source 1..9: note = Seed: LVVVGARGV (KRAS G12R)
IVVFGGRGP

SEQ ID NO: 20480 - protein, 9 aa, synthetic construct
  source 1..9: note = Seed: LVVVGARGV (KRAS G12R)
IVVFGGRGQ

SEQ ID NO: 20481 - protein, 9 aa, synthetic construct
  source 1..9: note = Seed: LVVVGARGV (KRAS G12R)
IVVFGGRGR

SEQ ID NO: 20482 - protein, 9 aa, synthetic construct
  source 1..9: note = Seed: LVVVGARGV (KRAS G12R)
IVVFGGRGS

SEQ ID NO: 20483 - protein, 9 aa, synthetic construct
  source 1..9: note = Seed: LVVVGARGV (KRAS G12R)
IVVFGGRGT

SEQ ID NO: 20484 - protein, 9 aa, synthetic construct
  source 1..9: note = Seed: LVVVGARGV (KRAS G12R)
IVVFGGRGV

SEQ ID NO: 20485 - protein, 9 aa, synthetic construct
  source 1..9: note = Seed: LVVVGARGV (KRAS G12R)
IVVFGGRGY

SEQ ID NO: 20486 - protein, 9 aa, synthetic construct
  source 1..9: note = Seed: LVVVGARGV (KRAS G12R)
IVVFGHRGA

SEQ ID NO: 20487 - protein, 9 aa, synthetic construct
  source 1..9: note = Seed: LVVVGARGV (KRAS G12R)
IVVFGHRGF

SEQ ID NO: 20488 - protein, 9 aa, synthetic construct
  source 1..9: note = Seed: LVVVGARGV (KRAS G12R)
IVVFGHRGG

SEQ ID NO: 20489 - protein, 9 aa, synthetic construct
  source 1..9: note = Seed: LVVVGARGV (KRAS G12R)
IVVFGHRGH

SEQ ID NO: 20490 - protein, 9 aa, synthetic construct
  source 1..9: note = Seed: LVVVGARGV (KRAS G12R)
IVVFGHRGI

SEQ ID NO: 20491 - protein, 9 aa, synthetic construct
  source 1..9: note = Seed: LVVVGARGV (KRAS G12R)
IVVFGHRGK

SEQ ID NO: 20492 - protein, 9 aa, synthetic construct
  source 1..9: note = Seed: LVVVGARGV (KRAS G12R)
IVVFGHRGL

SEQ ID NO: 20493 - protein, 9 aa, synthetic construct
  source 1..9: note = Seed: LVVVGARGV (KRAS G12R)
IVVFGHRGM

SEQ ID NO: 20494 - protein, 9 aa, synthetic construct
  source 1..9: note = Seed: LVVVGARGV (KRAS G12R)
IVVFGHRGN

SEQ ID NO: 20495 - protein, 9 aa, synthetic construct
  source 1..9: note = Seed: LVVVGARGV (KRAS G12R)
IVVFGHRGP

SEQ ID NO: 20496 - protein, 9 aa, synthetic construct
  source 1..9: note = Seed: LVVVGARGV (KRAS G12R)
IVVFGHRGQ

SEQ ID NO: 20497 - protein, 9 aa, synthetic construct
  source 1..9: note = Seed: LVVVGARGV (KRAS G12R)
IVVFGHRGR

SEQ ID NO: 20498 - protein, 9 aa, synthetic construct
  source 1..9: note = Seed: LVVVGARGV (KRAS G12R)
IVVFGHRGS

SEQ ID NO: 20499 - protein, 9 aa, synthetic construct
  source 1..9: note = Seed: LVVVGARGV (KRAS G12R)
IVVFGHRGT

SEQ ID NO: 20500 - protein, 9 aa, synthetic construct
  source 1..9: note = Seed: LVVVGARGV (KRAS G12R)
IVVFGHRGV

SEQ ID NO: 20501 - protein, 9 aa, synthetic construct
  source 1..9: note = Seed: LVVVGARGV (KRAS G12R)
IVVFGHRGY

SEQ ID NO: 20502 - protein, 9 aa, synthetic construct
  source 1..9: note = Seed: LVVVGARGV (KRAS G12R)
IVVFGIRGA

SEQ ID NO: 20503 - protein, 9 aa, synthetic construct
  source 1..9: note = Seed: LVVVGARGV (KRAS G12R)
IVVFGIRGF

SEQ ID NO: 20504 - protein, 9 aa, synthetic construct
  source 1..9: note = Seed: LVVVGARGV (KRAS G12R)
IVVFGIRGG

SEQ ID NO: 20505 - protein, 9 aa, synthetic construct
  source 1..9: note = Seed: LVVVGARGV (KRAS G12R)
IVVFGIRGH

SEQ ID NO: 20506 - protein, 9 aa, synthetic construct
  source 1..9: note = Seed: LVVVGARGV (KRAS G12R)
IVVFGIRGI

SEQ ID NO: 20507 - protein, 9 aa, synthetic construct
  source 1..9: note = Seed: LVVVGARGV (KRAS G12R)
IVVFGIRGK

SEQ ID NO: 20508 - protein, 9 aa, synthetic construct
  source 1..9: note = Seed: LVVVGARGV (KRAS G12R)
IVVFGIRGL

SEQ ID NO: 20509 - protein, 9 aa, synthetic construct
  source 1..9: note = Seed: LVVVGARGV (KRAS G12R)
IVVFGIRGM

SEQ ID NO: 20510 - protein, 9 aa, synthetic construct
  source 1..9: note = Seed: LVVVGARGV (KRAS G12R)
IVVFGIRGQ

SEQ ID NO: 20511 - protein, 9 aa, synthetic construct
  source 1..9: note = Seed: LVVVGARGV (KRAS G12R)
IVVFGIRGR

SEQ ID NO: 20512 - protein, 9 aa, synthetic construct
  source 1..9: note = Seed: LVVVGARGV (KRAS G12R)
IVVFGIRGS

SEQ ID NO: 20513 - protein, 9 aa, synthetic construct
  source 1..9: note = Seed: LVVVGARGV (KRAS G12R)
IVVFGIRGT

SEQ ID NO: 20514 - protein, 9 aa, synthetic construct
  source 1..9: note = Seed: LVVVGARGV (KRAS G12R)
IVVFGIRGV

SEQ ID NO: 20515 - protein, 9 aa, synthetic construct
  source 1..9: note = Seed: LVVVGARGV (KRAS G12R)
IVVFGIRGY

SEQ ID NO: 20516 - protein, 9 aa, synthetic construct
  source 1..9: note = Seed: LVVVGARGV (KRAS G12R)
IVVFGKRGA

SEQ ID NO: 20517 - protein, 9 aa, synthetic construct
  source 1..9: note = Seed: LVVVGARGV (KRAS G12R)
IVVFGKRGC

SEQ ID NO: 20518 - protein, 9 aa, synthetic construct
  source 1..9: note = Seed: LVVVGARGV (KRAS G12R)
IVVFGKRGE

SEQ ID NO: 20519 - protein, 9 aa, synthetic construct
  source 1..9: note = Seed: LVVVGARGV (KRAS G12R)
IVVFGKRGF

SEQ ID NO: 20520 - protein, 9 aa, synthetic construct
  source 1..9: note = Seed: LVVVGARGV (KRAS G12R)
IVVFGKRGG

SEQ ID NO: 20521 - protein, 9 aa, synthetic construct
  source 1..9: note = Seed: LVVVGARGV (KRAS G12R)
IVVFGKRGH

SEQ ID NO: 20522 - protein, 9 aa, synthetic construct
  source 1..9: note = Seed: LVVVGARGV (KRAS G12R)
IVVFGKRGI

SEQ ID NO: 20523 - protein, 9 aa, synthetic construct
  source 1..9: note = Seed: LVVVGARGV (KRAS G12R)
IVVFGKRGK

SEQ ID NO: 20524 - protein, 9 aa, synthetic construct
  source 1..9: note = Seed: LVVVGARGV (KRAS G12R)
IVVFGKRGL

SEQ ID NO: 20525 - protein, 9 aa, synthetic construct
  source 1..9: note = Seed: LVVVGARGV (KRAS G12R)
IVVFGKRGM

SEQ ID NO: 20526 - protein, 9 aa, synthetic construct
  source 1..9: note = Seed: LVVVGARGV (KRAS G12R)
IVVFGKRGN

SEQ ID NO: 20527 - protein, 9 aa, synthetic construct
  source 1..9: note = Seed: LVVVGARGV (KRAS G12R)
IVVFGKRGP

SEQ ID NO: 20528 - protein, 9 aa, synthetic construct
  source 1..9: note = Seed: LVVVGARGV (KRAS G12R)
IVVFGKRGQ

SEQ ID NO: 20529 - protein, 9 aa, synthetic construct
  source 1..9: note = Seed: LVVVGARGV (KRAS G12R)
IVVFGKRGR

SEQ ID NO: 20530 - protein, 9 aa, synthetic construct
  source 1..9: note = Seed: LVVVGARGV (KRAS G12R)
IVVFGKRGS

SEQ ID NO: 20531 - protein, 9 aa, synthetic construct
  source 1..9: note = Seed: LVVVGARGV (KRAS G12R)
IVVFGKRGT

SEQ ID NO: 20532 - protein, 9 aa, synthetic construct
  source 1..9: note = Seed: LVVVGARGV (KRAS G12R)
IVVFGKRGV

SEQ ID NO: 20533 - protein, 9 aa, synthetic construct
  source 1..9: note = Seed: LVVVGARGV (KRAS G12R)
IVVFGKRGW

SEQ ID NO: 20534 - protein, 9 aa, synthetic construct
  source 1..9: note = Seed: LVVVGARGV (KRAS G12R)
IVVFGKRGY

SEQ ID NO: 20535 - protein, 9 aa, synthetic construct
  source 1..9: note = Seed: LVVVGARGV (KRAS G12R)
IVVFGLRGA

SEQ ID NO: 20536 - protein, 9 aa, synthetic construct
  source 1..9: note = Seed: LVVVGARGV (KRAS G12R)
IVVFGLRGF

SEQ ID NO: 20537 - protein, 9 aa, synthetic construct
  source 1..9: note = Seed: LVVVGARGV (KRAS G12R)
IVVFGLRGH

SEQ ID NO: 20538 - protein, 9 aa, synthetic construct
  source 1..9: note = Seed: LVVVGARGV (KRAS G12R)
IVVFGLRGI

SEQ ID NO: 20539 - protein, 9 aa, synthetic construct
  source 1..9: note = Seed: LVVVGARGV (KRAS G12R)
IVVFGLRGK

SEQ ID NO: 20540 - protein, 9 aa, synthetic construct
  source 1..9: note = Seed: LVVVGARGV (KRAS G12R)
IVVFGLRGL

SEQ ID NO: 20541 - protein, 9 aa, synthetic construct
  source 1..9: note = Seed: LVVVGARGV (KRAS G12R)
IVVFGLRGM

SEQ ID NO: 20542 - protein, 9 aa, synthetic construct
  source 1..9: note = Seed: LVVVGARGV (KRAS G12R)
IVVFGLRGQ

SEQ ID NO: 20543 - protein, 9 aa, synthetic construct
  source 1..9: note = Seed: LVVVGARGV (KRAS G12R)
IVVFGLRGR

SEQ ID NO: 20544 - protein, 9 aa, synthetic construct
  source 1..9: note = Seed: LVVVGARGV (KRAS G12R)
IVVFGLRGS

SEQ ID NO: 20545 - protein, 9 aa, synthetic construct
  source 1..9: note = Seed: LVVVGARGV (KRAS G12R)
IVVFGLRGV

SEQ ID NO: 20546 - protein, 9 aa, synthetic construct
  source 1..9: note = Seed: LVVVGARGV (KRAS G12R)
IVVFGLRGY

SEQ ID NO: 20547 - protein, 9 aa, synthetic construct
  source 1..9: note = Seed: LVVVGARGV (KRAS G12R)
IVVFGMRGA

SEQ ID NO: 20548 - protein, 9 aa, synthetic construct
  source 1..9: note = Seed: LVVVGARGV (KRAS G12R)
IVVFGMRGF

SEQ ID NO: 20549 - protein, 9 aa, synthetic construct
  source 1..9: note = Seed: LVVVGARGV (KRAS G12R)
IVVFGMRGH

SEQ ID NO: 20550 - protein, 9 aa, synthetic construct
  source 1..9: note = Seed: LVVVGARGV (KRAS G12R)
IVVFGMRGI

SEQ ID NO: 20551 - protein, 9 aa, synthetic construct
  source 1..9: note = Seed: LVVVGARGV (KRAS G12R)
IVVFGMRGK

SEQ ID NO: 20552 - protein, 9 aa, synthetic construct
  source 1..9: note = Seed: LVVVGARGV (KRAS G12R)
IVVFGMRGL

SEQ ID NO: 20553 - protein, 9 aa, synthetic construct
  source 1..9: note = Seed: LVVVGARGV (KRAS G12R)
IVVFGMRGM

SEQ ID NO: 20554 - protein, 9 aa, synthetic construct
  source 1..9: note = Seed: LVVVGARGV (KRAS G12R)
IVVFGMRGQ

SEQ ID NO: 20555 - protein, 9 aa, synthetic construct
  source 1..9: note = Seed: LVVVGARGV (KRAS G12R)
IVVFGMRGR

SEQ ID NO: 20556 - protein, 9 aa, synthetic construct
  source 1..9: note = Seed: LVVVGARGV (KRAS G12R)
IVVFGMRGS

SEQ ID NO: 20557 - protein, 9 aa, synthetic construct
  source 1..9: note = Seed: LVVVGARGV (KRAS G12R)
IVVFGMRGV

SEQ ID NO: 20558 - protein, 9 aa, synthetic construct
  source 1..9: note = Seed: LVVVGARGV (KRAS G12R)
IVVFGMRGY

SEQ ID NO: 20559 - protein, 9 aa, synthetic construct
  source 1..9: note = Seed: LVVVGARGV (KRAS G12R)
IVVFGNRGA

SEQ ID NO: 20560 - protein, 9 aa, synthetic construct
  source 1..9: note = Seed: LVVVGARGV (KRAS G12R)
IVVFGNRGC

SEQ ID NO: 20561 - protein, 9 aa, synthetic construct
  source 1..9: note = Seed: LVVVGARGV (KRAS G12R)
IVVFGNRGD

SEQ ID NO: 20562 - protein, 9 aa, synthetic construct
  source 1..9: note = Seed: LVVVGARGV (KRAS G12R)
IVVFGNRGE

SEQ ID NO: 20563 - protein, 9 aa, synthetic construct
  source 1..9: note = Seed: LVVVGARGV (KRAS G12R)
IVVFGNRGF

SEQ ID NO: 20564 - protein, 9 aa, synthetic construct
  source 1..9: note = Seed: LVVVGARGV (KRAS G12R)
IVVFGNRGG

SEQ ID NO: 20565 - protein, 9 aa, synthetic construct
  source 1..9: note = Seed: LVVVGARGV (KRAS G12R)
IVVFGNRGH

SEQ ID NO: 20566 - protein, 9 aa, synthetic construct
  source 1..9: note = Seed: LVVVGARGV (KRAS G12R)
IVVFGNRGI

SEQ ID NO: 20567 - protein, 9 aa, synthetic construct
  source 1..9: note = Seed: LVVVGARGV (KRAS G12R)
IVVFGNRGK

SEQ ID NO: 20568 - protein, 9 aa, synthetic construct
  source 1..9: note = Seed: LVVVGARGV (KRAS G12R)
IVVFGNRGL

SEQ ID NO: 20569 - protein, 9 aa, synthetic construct
  source 1..9: note = Seed: LVVVGARGV (KRAS G12R)
IVVFGNRGM

SEQ ID NO: 20570 - protein, 9 aa, synthetic construct
  source 1..9: note = Seed: LVVVGARGV (KRAS G12R)
IVVFGNRGN

SEQ ID NO: 20571 - protein, 9 aa, synthetic construct
  source 1..9: note = Seed: LVVVGARGV (KRAS G12R)
IVVFGNRGP

SEQ ID NO: 20572 - protein, 9 aa, synthetic construct
  source 1..9: note = Seed: LVVVGARGV (KRAS G12R)
IVVFGNRGQ

SEQ ID NO: 20573 - protein, 9 aa, synthetic construct
  source 1..9: note = Seed: LVVVGARGV (KRAS G12R)
IVVFGNRGR

SEQ ID NO: 20574 - protein, 9 aa, synthetic construct
  source 1..9: note = Seed: LVVVGARGV (KRAS G12R)
IVVFGNRGS

SEQ ID NO: 20575 - protein, 9 aa, synthetic construct
  source 1..9: note = Seed: LVVVGARGV (KRAS G12R)
IVVFGNRGT

SEQ ID NO: 20576 - protein, 9 aa, synthetic construct
  source 1..9: note = Seed: LVVVGARGV (KRAS G12R)
IVVFGNRGV

SEQ ID NO: 20577 - protein, 9 aa, synthetic construct
  source 1..9: note = Seed: LVVVGARGV (KRAS G12R)
IVVFGNRGW

SEQ ID NO: 20578 - protein, 9 aa, synthetic construct
  source 1..9: note = Seed: LVVVGARGV (KRAS G12R)
IVVFGNRGY

SEQ ID NO: 20579 - protein, 9 aa, synthetic construct
  source 1..9: note = Seed: LVVVGARGV (KRAS G12R)
IVVFGPRGA

SEQ ID NO: 20580 - protein, 9 aa, synthetic construct
  source 1..9: note = Seed: LVVVGARGV (KRAS G12R)
IVVFGPRGF

SEQ ID NO: 20581 - protein, 9 aa, synthetic construct
  source 1..9: note = Seed: LVVVGARGV (KRAS G12R)
IVVFGPRGH

SEQ ID NO: 20582 - protein, 9 aa, synthetic construct
  source 1..9: note = Seed: LVVVGARGV (KRAS G12R)
IVVFGPRGI

SEQ ID NO: 20583 - protein, 9 aa, synthetic construct
  source 1..9: note = Seed: LVVVGARGV (KRAS G12R)
IVVFGPRGK

SEQ ID NO: 20584 - protein, 9 aa, synthetic construct
  source 1..9: note = Seed: LVVVGARGV (KRAS G12R)
IVVFGPRGL

SEQ ID NO: 20585 - protein, 9 aa, synthetic construct
  source 1..9: note = Seed: LVVVGARGV (KRAS G12R)
IVVFGPRGM

SEQ ID NO: 20586 - protein, 9 aa, synthetic construct
  source 1..9: note = Seed: LVVVGARGV (KRAS G12R)
IVVFGPRGR

SEQ ID NO: 20587 - protein, 9 aa, synthetic construct
  source 1..9: note = Seed: LVVVGARGV (KRAS G12R)
IVVFGPRGS

SEQ ID NO: 20588 - protein, 9 aa, synthetic construct
  source 1..9: note = Seed: LVVVGARGV (KRAS G12R)
IVVFGPRGT

SEQ ID NO: 20589 - protein, 9 aa, synthetic construct
  source 1..9: note = Seed: LVVVGARGV (KRAS G12R)
IVVFGPRGV

SEQ ID NO: 20590 - protein, 9 aa, synthetic construct
  source 1..9: note = Seed: LVVVGARGV (KRAS G12R)
IVVFGPRGY

SEQ ID NO: 20591 - protein, 9 aa, synthetic construct
  source 1..9: note = Seed: LVVVGARGV (KRAS G12R)
IVVFGQRGA

SEQ ID NO: 20592 - protein, 9 aa, synthetic construct
  source 1..9: note = Seed: LVVVGARGV (KRAS G12R)
IVVFGQRGF

SEQ ID NO: 20593 - protein, 9 aa, synthetic construct
  source 1..9: note = Seed: LVVVGARGV (KRAS G12R)
IVVFGQRGH

SEQ ID NO: 20594 - protein, 9 aa, synthetic construct
  source 1..9: note = Seed: LVVVGARGV (KRAS G12R)
IVVFGQRGI

SEQ ID NO: 20595 - protein, 9 aa, synthetic construct
  source 1..9: note = Seed: LVVVGARGV (KRAS G12R)
IVVFGQRGK

SEQ ID NO: 20596 - protein, 9 aa, synthetic construct
  source 1..9: note = Seed: LVVVGARGV (KRAS G12R)
IVVFGQRGL

SEQ ID NO: 20597 - protein, 9 aa, synthetic construct
  source 1..9: note = Seed: LVVVGARGV (KRAS G12R)
IVVFGQRGM

SEQ ID NO: 20598 - protein, 9 aa, synthetic construct
  source 1..9: note = Seed: LVVVGARGV (KRAS G12R)
IVVFGQRGR

SEQ ID NO: 20599 - protein, 9 aa, synthetic construct
  source 1..9: note = Seed: LVVVGARGV (KRAS G12R)
IVVFGQRGS

SEQ ID NO: 20600 - protein, 9 aa, synthetic construct
  source 1..9: note = Seed: LVVVGARGV (KRAS G12R)
IVVFGQRGV

SEQ ID NO: 20601 - protein, 9 aa, synthetic construct
  source 1..9: note = Seed: LVVVGARGV (KRAS G12R)
IVVFGQRGY

SEQ ID NO: 20602 - protein, 9 aa, synthetic construct
  source 1..9: note = Seed: LVVVGARGV (KRAS G12R)
IVVFGRRGA

SEQ ID NO: 20603 - protein, 9 aa, synthetic construct
  source 1..9: note = Seed: LVVVGARGV (KRAS G12R)
IVVFGRRGC

SEQ ID NO: 20604 - protein, 9 aa, synthetic construct
  source 1..9: note = Seed: LVVVGARGV (KRAS G12R)
IVVFGRRGD

SEQ ID NO: 20605 - protein, 9 aa, synthetic construct
  source 1..9: note = Seed: LVVVGARGV (KRAS G12R)
IVVFGRRGE

SEQ ID NO: 20606 - protein, 9 aa, synthetic construct
  source 1..9: note = Seed: LVVVGARGV (KRAS G12R)
IVVFGRRGF

SEQ ID NO: 20607 - protein, 9 aa, synthetic construct
  source 1..9: note = Seed: LVVVGARGV (KRAS G12R)
IVVFGRRGG

SEQ ID NO: 20608 - protein, 9 aa, synthetic construct
  source 1..9: note = Seed: LVVVGARGV (KRAS G12R)
IVVFGRRGH

SEQ ID NO: 20609 - protein, 9 aa, synthetic construct
  source 1..9: note = Seed: LVVVGARGV (KRAS G12R)
IVVFGRRGI

SEQ ID NO: 20610 - protein, 9 aa, synthetic construct
  source 1..9: note = Seed: LVVVGARGV (KRAS G12R)
IVVFGRRGK

SEQ ID NO: 20611 - protein, 9 aa, synthetic construct
  source 1..9: note = Seed: LVVVGARGV (KRAS G12R)
IVVFGRRGL

SEQ ID NO: 20612 - protein, 9 aa, synthetic construct
  source 1..9: note = Seed: LVVVGARGV (KRAS G12R)
IVVFGRRGM

SEQ ID NO: 20613 - protein, 9 aa, synthetic construct
  source 1..9: note = Seed: LVVVGARGV (KRAS G12R)
IVVFGRRGN

SEQ ID NO: 20614 - protein, 9 aa, synthetic construct
  source 1..9: note = Seed: LVVVGARGV (KRAS G12R)
IVVFGRRGP

SEQ ID NO: 20615 - protein, 9 aa, synthetic construct
  source 1..9: note = Seed: LVVVGARGV (KRAS G12R)
IVVFGRRGQ

SEQ ID NO: 20616 - protein, 9 aa, synthetic construct
  source 1..9: note = Seed: LVVVGARGV (KRAS G12R)
IVVFGRRGR

SEQ ID NO: 20617 - protein, 9 aa, synthetic construct
  source 1..9: note = Seed: LVVVGARGV (KRAS G12R)
IVVFGRRGS

SEQ ID NO: 20618 - protein, 9 aa, synthetic construct
  source 1..9: note = Seed: LVVVGARGV (KRAS G12R)
IVVFGRRGT

SEQ ID NO: 20619 - protein, 9 aa, synthetic construct
  source 1..9: note = Seed: LVVVGARGV (KRAS G12R)
IVVFGRRGV

SEQ ID NO: 20620 - protein, 9 aa, synthetic construct
  source 1..9: note = Seed: LVVVGARGV (KRAS G12R)
IVVFGRRGW

SEQ ID NO: 20621 - protein, 9 aa, synthetic construct
  source 1..9: note = Seed: LVVVGARGV (KRAS G12R)
IVVFGRRGY

SEQ ID NO: 20622 - protein, 9 aa, synthetic construct
  source 1..9: note = Seed: LVVVGARGV (KRAS G12R)
IVVFGSRGA

SEQ ID NO: 20623 - protein, 9 aa, synthetic construct
  source 1..9: note = Seed: LVVVGARGV (KRAS G12R)
IVVFGSRGC

SEQ ID NO: 20624 - protein, 9 aa, synthetic construct
  source 1..9: note = Seed: LVVVGARGV (KRAS G12R)
IVVFGSRGD

SEQ ID NO: 20625 - protein, 9 aa, synthetic construct
  source 1..9: note = Seed: LVVVGARGV (KRAS G12R)
IVVFGSRGE

SEQ ID NO: 20626 - protein, 9 aa, synthetic construct
  source 1..9: note = Seed: LVVVGARGV (KRAS G12R)
IVVFGSRGF

SEQ ID NO: 20627 - protein, 9 aa, synthetic construct
  source 1..9: note = Seed: LVVVGARGV (KRAS G12R)
IVVFGSRGG

SEQ ID NO: 20628 - protein, 9 aa, synthetic construct
  source 1..9: note = Seed: LVVVGARGV (KRAS G12R)
IVVFGSRGH

SEQ ID NO: 20629 - protein, 9 aa, synthetic construct
  source 1..9: note = Seed: LVVVGARGV (KRAS G12R)
IVVFGSRGI

SEQ ID NO: 20630 - protein, 9 aa, synthetic construct
  source 1..9: note = Seed: LVVVGARGV (KRAS G12R)
IVVFGSRGK

SEQ ID NO: 20631 - protein, 9 aa, synthetic construct
  source 1..9: note = Seed: LVVVGARGV (KRAS G12R)
IVVFGSRGL

SEQ ID NO: 20632 - protein, 9 aa, synthetic construct
  source 1..9: note = Seed: LVVVGARGV (KRAS G12R)
IVVFGSRGM

SEQ ID NO: 20633 - protein, 9 aa, synthetic construct
  source 1..9: note = Seed: LVVVGARGV (KRAS G12R)
IVVFGSRGN

SEQ ID NO: 20634 - protein, 9 aa, synthetic construct
  source 1..9: note = Seed: LVVVGARGV (KRAS G12R)
IVVFGSRGP

SEQ ID NO: 20635 - protein, 9 aa, synthetic construct
  source 1..9: note = Seed: LVVVGARGV (KRAS G12R)
IVVFGSRGQ

SEQ ID NO: 20636 - protein, 9 aa, synthetic construct
  source 1..9: note = Seed: LVVVGARGV (KRAS G12R)
IVVFGSRGR

SEQ ID NO: 20637 - protein, 9 aa, synthetic construct
  source 1..9: note = Seed: LVVVGARGV (KRAS G12R)
IVVFGSRGS

SEQ ID NO: 20638 - protein, 9 aa, synthetic construct
  source 1..9: note = Seed: LVVVGARGV (KRAS G12R)
IVVFGSRGT

SEQ ID NO: 20639 - protein, 9 aa, synthetic construct
  source 1..9: note = Seed: LVVVGARGV (KRAS G12R)
IVVFGSRGV

SEQ ID NO: 20640 - protein, 9 aa, synthetic construct
  source 1..9: note = Seed: LVVVGARGV (KRAS G12R)
IVVFGSRGW

SEQ ID NO: 20641 - protein, 9 aa, synthetic construct
  source 1..9: note = Seed: LVVVGARGV (KRAS G12R)
IVVFGSRGY

SEQ ID NO: 20642 - protein, 9 aa, synthetic construct
  source 1..9: note = Seed: LVVVGARGV (KRAS G12R)
IVVFGTRGA

SEQ ID NO: 20643 - protein, 9 aa, synthetic construct
  source 1..9: note = Seed: LVVVGARGV (KRAS G12R)
IVVFGTRGF

SEQ ID NO: 20644 - protein, 9 aa, synthetic construct
  source 1..9: note = Seed: LVVVGARGV (KRAS G12R)
IVVFGTRGG

SEQ ID NO: 20645 - protein, 9 aa, synthetic construct
  source 1..9: note = Seed: LVVVGARGV (KRAS G12R)
IVVFGTRGH

SEQ ID NO: 20646 - protein, 9 aa, synthetic construct
  source 1..9: note = Seed: LVVVGARGV (KRAS G12R)
IVVFGTRGI

SEQ ID NO: 20647 - protein, 9 aa, synthetic construct
  source 1..9: note = Seed: LVVVGARGV (KRAS G12R)
IVVFGTRGK

SEQ ID NO: 20648 - protein, 9 aa, synthetic construct
  source 1..9: note = Seed: LVVVGARGV (KRAS G12R)
IVVFGTRGL

SEQ ID NO: 20649 - protein, 9 aa, synthetic construct
  source 1..9: note = Seed: LVVVGARGV (KRAS G12R)
IVVFGTRGM

SEQ ID NO: 20650 - protein, 9 aa, synthetic construct
  source 1..9: note = Seed: LVVVGARGV (KRAS G12R)
IVVFGTRGQ

SEQ ID NO: 20651 - protein, 9 aa, synthetic construct
  source 1..9: note = Seed: LVVVGARGV (KRAS G12R)
IVVFGTRGR

SEQ ID NO: 20652 - protein, 9 aa, synthetic construct
  source 1..9: note = Seed: LVVVGARGV (KRAS G12R)
IVVFGTRGS

SEQ ID NO: 20653 - protein, 9 aa, synthetic construct
  source 1..9: note = Seed: LVVVGARGV (KRAS G12R)
IVVFGTRGT

SEQ ID NO: 20654 - protein, 9 aa, synthetic construct
  source 1..9: note = Seed: LVVVGARGV (KRAS G12R)
IVVFGTRGV

SEQ ID NO: 20655 - protein, 9 aa, synthetic construct
  source 1..9: note = Seed: LVVVGARGV (KRAS G12R)
IVVFGTRGW

SEQ ID NO: 20656 - protein, 9 aa, synthetic construct
  source 1..9: note = Seed: LVVVGARGV (KRAS G12R)
IVVFGTRGY

SEQ ID NO: 20657 - protein, 9 aa, synthetic construct
  source 1..9: note = Seed: LVVVGARGV (KRAS G12R)
IVVFGVRGA

SEQ ID NO: 20658 - protein, 9 aa, synthetic construct
  source 1..9: note = Seed: LVVVGARGV (KRAS G12R)
IVVFGVRGF

SEQ ID NO: 20659 - protein, 9 aa, synthetic construct
  source 1..9: note = Seed: LVVVGARGV (KRAS G12R)
IVVFGVRGH

SEQ ID NO: 20660 - protein, 9 aa, synthetic construct
  source 1..9: note = Seed: LVVVGARGV (KRAS G12R)
IVVFGVRGI

SEQ ID NO: 20661 - protein, 9 aa, synthetic construct
  source 1..9: note = Seed: LVVVGARGV (KRAS G12R)
IVVFGVRGK

SEQ ID NO: 20662 - protein, 9 aa, synthetic construct
  source 1..9: note = Seed: LVVVGARGV (KRAS G12R)
IVVFGVRGL

SEQ ID NO: 20663 - protein, 9 aa, synthetic construct
  source 1..9: note = Seed: LVVVGARGV (KRAS G12R)
IVVFGVRGM

SEQ ID NO: 20664 - protein, 9 aa, synthetic construct
  source 1..9: note = Seed: LVVVGARGV (KRAS G12R)
IVVFGVRGQ

SEQ ID NO: 20665 - protein, 9 aa, synthetic construct
  source 1..9: note = Seed: LVVVGARGV (KRAS G12R)
IVVFGVRGR

SEQ ID NO: 20666 - protein, 9 aa, synthetic construct
  source 1..9: note = Seed: LVVVGARGV (KRAS G12R)
IVVFGVRGS

SEQ ID NO: 20667 - protein, 9 aa, synthetic construct
  source 1..9: note = Seed: LVVVGARGV (KRAS G12R)
IVVFGVRGT

SEQ ID NO: 20668 - protein, 9 aa, synthetic construct
  source 1..9: note = Seed: LVVVGARGV (KRAS G12R)
IVVFGVRGV

SEQ ID NO: 20669 - protein, 9 aa, synthetic construct
  source 1..9: note = Seed: LVVVGARGV (KRAS G12R)
IVVFGVRGY

SEQ ID NO: 20670 - protein, 9 aa, synthetic construct
  source 1..9: note = Seed: LVVVGARGV (KRAS G12R)
IVVFGWRGI

SEQ ID NO: 20671 - protein, 9 aa, synthetic construct
  source 1..9: note = Seed: LVVVGARGV (KRAS G12R)
IVVFGWRGK

SEQ ID NO: 20672 - protein, 9 aa, synthetic construct
  source 1..9: note = Seed: LVVVGARGV (KRAS G12R)
IVVFGWRGL

SEQ ID NO: 20673 - protein, 9 aa, synthetic construct
  source 1..9: note = Seed: LVVVGARGV (KRAS G12R)
IVVFGWRGR

SEQ ID NO: 20674 - protein, 9 aa, synthetic construct
  source 1..9: note = Seed: LVVVGARGV (KRAS G12R)
IVVFGWRGV

SEQ ID NO: 20675 - protein, 9 aa, synthetic construct
  source 1..9: note = Seed: LVVVGARGV (KRAS G12R)
IVVFGYRGA

SEQ ID NO: 20676 - protein, 9 aa, synthetic construct
  source 1..9: note = Seed: LVVVGARGV (KRAS G12R)
IVVFGYRGF

SEQ ID NO: 20677 - protein, 9 aa, synthetic construct
  source 1..9: note = Seed: LVVVGARGV (KRAS G12R)
IVVFGYRGH

SEQ ID NO: 20678 - protein, 9 aa, synthetic construct
  source 1..9: note = Seed: LVVVGARGV (KRAS G12R)
IVVFGYRGI

SEQ ID NO: 20679 - protein, 9 aa, synthetic construct
  source 1..9: note = Seed: LVVVGARGV (KRAS G12R)
IVVFGYRGK

SEQ ID NO: 20680 - protein, 9 aa, synthetic construct
  source 1..9: note = Seed: LVVVGARGV (KRAS G12R)
IVVFGYRGL

SEQ ID NO: 20681 - protein, 9 aa, synthetic construct
  source 1..9: note = Seed: LVVVGARGV (KRAS G12R)
IVVFGYRGM

SEQ ID NO: 20682 - protein, 9 aa, synthetic construct
  source 1..9: note = Seed: LVVVGARGV (KRAS G12R)
IVVFGYRGR

SEQ ID NO: 20683 - protein, 9 aa, synthetic construct
  source 1..9: note = Seed: LVVVGARGV (KRAS G12R)
IVVFGYRGV

SEQ ID NO: 20684 - protein, 9 aa, synthetic construct
  source 1..9: note = Seed: LVVVGARGV (KRAS G12R)
IVVFGYRGY

SEQ ID NO: 20685 - protein, 9 aa, synthetic construct
  source 1..9: note = Seed: LVVVGARGV (KRAS G12R)
IVVGGARGA

SEQ ID NO: 20686 - protein, 9 aa, synthetic construct
  source 1..9: note = Seed: LVVVGARGV (KRAS G12R)
IVVGGARGF

SEQ ID NO: 20687 - protein, 9 aa, synthetic construct
  source 1..9: note = Seed: LVVVGARGV (KRAS G12R)
IVVGGARGI

SEQ ID NO: 20688 - protein, 9 aa, synthetic construct
  source 1..9: note = Seed: LVVVGARGV (KRAS G12R)
IVVGGARGL

SEQ ID NO: 20689 - protein, 9 aa, synthetic construct
  source 1..9: note = Seed: LVVVGARGV (KRAS G12R)
IVVGGARGM

SEQ ID NO: 20690 - protein, 9 aa, synthetic construct
  source 1..9: note = Seed: LVVVGARGV (KRAS G12R)
IVVGGARGS

SEQ ID NO: 20691 - protein, 9 aa, synthetic construct
  source 1..9: note = Seed: LVVVGARGV (KRAS G12R)
IVVGGARGT

SEQ ID NO: 20692 - protein, 9 aa, synthetic construct
  source 1..9: note = Seed: LVVVGARGV (KRAS G12R)
IVVGGARGV

SEQ ID NO: 20693 - protein, 9 aa, synthetic construct
  source 1..9: note = Seed: LVVVGARGV (KRAS G12R)
IVVGGGRGI

SEQ ID NO: 20694 - protein, 9 aa, synthetic construct
  source 1..9: note = Seed: LVVVGARGV (KRAS G12R)
IVVGGGRGL

SEQ ID NO: 20695 - protein, 9 aa, synthetic construct
  source 1..9: note = Seed: LVVVGARGV (KRAS G12R)
IVVGGGRGV

SEQ ID NO: 20696 - protein, 9 aa, synthetic construct
  source 1..9: note = Seed: LVVVGARGV (KRAS G12R)
IVVGGIRGL

SEQ ID NO: 20697 - protein, 9 aa, synthetic construct
  source 1..9: note = Seed: LVVVGARGV (KRAS G12R)
IVVGGIRGV

SEQ ID NO: 20698 - protein, 9 aa, synthetic construct
  source 1..9: note = Seed: LVVVGARGV (KRAS G12R)
IVVGGKRGL

SEQ ID NO: 20699 - protein, 9 aa, synthetic construct
  source 1..9: note = Seed: LVVVGARGV (KRAS G12R)
IVVGGKRGM

SEQ ID NO: 20700 - protein, 9 aa, synthetic construct
  source 1..9: note = Seed: LVVVGARGV (KRAS G12R)
IVVGGKRGR

SEQ ID NO: 20701 - protein, 9 aa, synthetic construct
  source 1..9: note = Seed: LVVVGARGV (KRAS G12R)
IVVGGLRGL

SEQ ID NO: 20702 - protein, 9 aa, synthetic construct
  source 1..9: note = Seed: LVVVGARGV (KRAS G12R)
IVVGGLRGR

SEQ ID NO: 20703 - protein, 9 aa, synthetic construct
  source 1..9: note = Seed: LVVVGARGV (KRAS G12R)
IVVGGNRGI

SEQ ID NO: 20704 - protein, 9 aa, synthetic construct
  source 1..9: note = Seed: LVVVGARGV (KRAS G12R)
IVVGGNRGL

SEQ ID NO: 20705 - protein, 9 aa, synthetic construct
  source 1..9: note = Seed: LVVVGARGV (KRAS G12R)
IVVGGNRGV

SEQ ID NO: 20706 - protein, 9 aa, synthetic construct
  source 1..9: note = Seed: LVVVGARGV (KRAS G12R)
IVVGGPRGI

SEQ ID NO: 20707 - protein, 9 aa, synthetic construct
  source 1..9: note = Seed: LVVVGARGV (KRAS G12R)
IVVGGPRGL

SEQ ID NO: 20708 - protein, 9 aa, synthetic construct
  source 1..9: note = Seed: LVVVGARGV (KRAS G12R)
IVVGGPRGV

SEQ ID NO: 20709 - protein, 9 aa, synthetic construct
  source 1..9: note = Seed: LVVVGARGV (KRAS G12R)
IVVGGRRGA

SEQ ID NO: 20710 - protein, 9 aa, synthetic construct
  source 1..9: note = Seed: LVVVGARGV (KRAS G12R)
IVVGGRRGF

SEQ ID NO: 20711 - protein, 9 aa, synthetic construct
  source 1..9: note = Seed: LVVVGARGV (KRAS G12R)
IVVGGRRGH

SEQ ID NO: 20712 - protein, 9 aa, synthetic construct
  source 1..9: note = Seed: LVVVGARGV (KRAS G12R)
IVVGGRRGI

SEQ ID NO: 20713 - protein, 9 aa, synthetic construct
  source 1..9: note = Seed: LVVVGARGV (KRAS G12R)
IVVGGRRGK

SEQ ID NO: 20714 - protein, 9 aa, synthetic construct
  source 1..9: note = Seed: LVVVGARGV (KRAS G12R)
IVVGGRRGL

SEQ ID NO: 20715 - protein, 9 aa, synthetic construct
  source 1..9: note = Seed: LVVVGARGV (KRAS G12R)
IVVGGRRGM

SEQ ID NO: 20716 - protein, 9 aa, synthetic construct
  source 1..9: note = Seed: LVVVGARGV (KRAS G12R)
IVVGGRRGQ

SEQ ID NO: 20717 - protein, 9 aa, synthetic construct
  source 1..9: note = Seed: LVVVGARGV (KRAS G12R)
IVVGGRRGR

SEQ ID NO: 20718 - protein, 9 aa, synthetic construct
  source 1..9: note = Seed: LVVVGARGV (KRAS G12R)
IVVGGRRGS

SEQ ID NO: 20719 - protein, 9 aa, synthetic construct
  source 1..9: note = Seed: LVVVGARGV (KRAS G12R)
IVVGGRRGT

SEQ ID NO: 20720 - protein, 9 aa, synthetic construct
  source 1..9: note = Seed: LVVVGARGV (KRAS G12R)
IVVGGRRGV

SEQ ID NO: 20721 - protein, 9 aa, synthetic construct
  source 1..9: note = Seed: LVVVGARGV (KRAS G12R)
IVVGGRRGY

SEQ ID NO: 20722 - protein, 9 aa, synthetic construct
  source 1..9: note = Seed: LVVVGARGV (KRAS G12R)
IVVGGSRGA

SEQ ID NO: 20723 - protein, 9 aa, synthetic construct
  source 1..9: note = Seed: LVVVGARGV (KRAS G12R)
IVVGGSRGI

SEQ ID NO: 20724 - protein, 9 aa, synthetic construct
  source 1..9: note = Seed: LVVVGARGV (KRAS G12R)
IVVGGSRGL

SEQ ID NO: 20725 - protein, 9 aa, synthetic construct
  source 1..9: note = Seed: LVVVGARGV (KRAS G12R)
IVVGGSRGM

SEQ ID NO: 20726 - protein, 9 aa, synthetic construct
  source 1..9: note = Seed: LVVVGARGV (KRAS G12R)
IVVGGSRGV

SEQ ID NO: 20727 - protein, 9 aa, synthetic construct
  source 1..9: note = Seed: LVVVGARGV (KRAS G12R)
IVVGGTRGI

SEQ ID NO: 20728 - protein, 9 aa, synthetic construct
  source 1..9: note = Seed: LVVVGARGV (KRAS G12R)
IVVGGTRGL

SEQ ID NO: 20729 - protein, 9 aa, synthetic construct
  source 1..9: note = Seed: LVVVGARGV (KRAS G12R)
IVVGGTRGV

SEQ ID NO: 20730 - protein, 9 aa, synthetic construct
  source 1..9: note = Seed: LVVVGARGV (KRAS G12R)
IVVGGVRGA

SEQ ID NO: 20731 - protein, 9 aa, synthetic construct
  source 1..9: note = Seed: LVVVGARGV (KRAS G12R)
IVVGGVRGI

SEQ ID NO: 20732 - protein, 9 aa, synthetic construct
  source 1..9: note = Seed: LVVVGARGV (KRAS G12R)
IVVGGVRGL

SEQ ID NO: 20733 - protein, 9 aa, synthetic construct
  source 1..9: note = Seed: LVVVGARGV (KRAS G12R)
IVVGGVRGS

SEQ ID NO: 20734 - protein, 9 aa, synthetic construct
  source 1..9: note = Seed: LVVVGARGV (KRAS G12R)
IVVGGVRGV

SEQ ID NO: 20735 - protein, 9 aa, synthetic construct
  source 1..9: note = Seed: LVVVGARGV (KRAS G12R)
IVVHGARGA

SEQ ID NO: 20736 - protein, 9 aa, synthetic construct
  source 1..9: note = Seed: LVVVGARGV (KRAS G12R)
IVVHGARGF

SEQ ID NO: 20737 - protein, 9 aa, synthetic construct
  source 1..9: note = Seed: LVVVGARGV (KRAS G12R)
IVVHGARGH

SEQ ID NO: 20738 - protein, 9 aa, synthetic construct
  source 1..9: note = Seed: LVVVGARGV (KRAS G12R)
IVVHGARGI

SEQ ID NO: 20739 - protein, 9 aa, synthetic construct
  source 1..9: note = Seed: LVVVGARGV (KRAS G12R)
IVVHGARGK

SEQ ID NO: 20740 - protein, 9 aa, synthetic construct
  source 1..9: note = Seed: LVVVGARGV (KRAS G12R)
IVVHGARGL

SEQ ID NO: 20741 - protein, 9 aa, synthetic construct
  source 1..9: note = Seed: LVVVGARGV (KRAS G12R)
IVVHGARGM

SEQ ID NO: 20742 - protein, 9 aa, synthetic construct
  source 1..9: note = Seed: LVVVGARGV (KRAS G12R)
IVVHGARGR

SEQ ID NO: 20743 - protein, 9 aa, synthetic construct
  source 1..9: note = Seed: LVVVGARGV (KRAS G12R)
IVVHGARGS

SEQ ID NO: 20744 - protein, 9 aa, synthetic construct
  source 1..9: note = Seed: LVVVGARGV (KRAS G12R)
IVVHGARGV

SEQ ID NO: 20745 - protein, 9 aa, synthetic construct
  source 1..9: note = Seed: LVVVGARGV (KRAS G12R)
IVVHGARGW

SEQ ID NO: 20746 - protein, 9 aa, synthetic construct
  source 1..9: note = Seed: LVVVGARGV (KRAS G12R)
IVVHGARGY

SEQ ID NO: 20747 - protein, 9 aa, synthetic construct
  source 1..9: note = Seed: LVVVGARGV (KRAS G12R)
IVVHGCRGR

SEQ ID NO: 20748 - protein, 9 aa, synthetic construct
  source 1..9: note = Seed: LVVVGARGV (KRAS G12R)
IVVHGFRGA

SEQ ID NO: 20749 - protein, 9 aa, synthetic construct
  source 1..9: note = Seed: LVVVGARGV (KRAS G12R)
IVVHGFRGF

SEQ ID NO: 20750 - protein, 9 aa, synthetic construct
  source 1..9: note = Seed: LVVVGARGV (KRAS G12R)
IVVHGFRGI

SEQ ID NO: 20751 - protein, 9 aa, synthetic construct
  source 1..9: note = Seed: LVVVGARGV (KRAS G12R)
IVVHGFRGK

SEQ ID NO: 20752 - protein, 9 aa, synthetic construct
  source 1..9: note = Seed: LVVVGARGV (KRAS G12R)
IVVHGFRGL

SEQ ID NO: 20753 - protein, 9 aa, synthetic construct
  source 1..9: note = Seed: LVVVGARGV (KRAS G12R)
IVVHGFRGM

SEQ ID NO: 20754 - protein, 9 aa, synthetic construct
  source 1..9: note = Seed: LVVVGARGV (KRAS G12R)
IVVHGFRGR

SEQ ID NO: 20755 - protein, 9 aa, synthetic construct
  source 1..9: note = Seed: LVVVGARGV (KRAS G12R)
IVVHGFRGV

SEQ ID NO: 20756 - protein, 9 aa, synthetic construct
  source 1..9: note = Seed: LVVVGARGV (KRAS G12R)
IVVHGFRGY

SEQ ID NO: 20757 - protein, 9 aa, synthetic construct
  source 1..9: note = Seed: LVVVGARGV (KRAS G12R)
IVVHGGRGA

SEQ ID NO: 20758 - protein, 9 aa, synthetic construct
  source 1..9: note = Seed: LVVVGARGV (KRAS G12R)
IVVHGGRGF

SEQ ID NO: 20759 - protein, 9 aa, synthetic construct
  source 1..9: note = Seed: LVVVGARGV (KRAS G12R)
IVVHGGRGI

SEQ ID NO: 20760 - protein, 9 aa, synthetic construct
  source 1..9: note = Seed: LVVVGARGV (KRAS G12R)
IVVHGGRGK

SEQ ID NO: 20761 - protein, 9 aa, synthetic construct
  source 1..9: note = Seed: LVVVGARGV (KRAS G12R)
IVVHGGRGL

SEQ ID NO: 20762 - protein, 9 aa, synthetic construct
  source 1..9: note = Seed: LVVVGARGV (KRAS G12R)
IVVHGGRGM

SEQ ID NO: 20763 - protein, 9 aa, synthetic construct
  source 1..9: note = Seed: LVVVGARGV (KRAS G12R)
IVVHGGRGR

SEQ ID NO: 20764 - protein, 9 aa, synthetic construct
  source 1..9: note = Seed: LVVVGARGV (KRAS G12R)
IVVHGGRGV

SEQ ID NO: 20765 - protein, 9 aa, synthetic construct
  source 1..9: note = Seed: LVVVGARGV (KRAS G12R)
IVVHGGRGY

SEQ ID NO: 20766 - protein, 9 aa, synthetic construct
  source 1..9: note = Seed: LVVVGARGV (KRAS G12R)
IVVHGHRGA

SEQ ID NO: 20767 - protein, 9 aa, synthetic construct
  source 1..9: note = Seed: LVVVGARGV (KRAS G12R)
IVVHGHRGF

SEQ ID NO: 20768 - protein, 9 aa, synthetic construct
  source 1..9: note = Seed: LVVVGARGV (KRAS G12R)
IVVHGHRGH

SEQ ID NO: 20769 - protein, 9 aa, synthetic construct
  source 1..9: note = Seed: LVVVGARGV (KRAS G12R)
IVVHGHRGI

SEQ ID NO: 20770 - protein, 9 aa, synthetic construct
  source 1..9: note = Seed: LVVVGARGV (KRAS G12R)
IVVHGHRGK

SEQ ID NO: 20771 - protein, 9 aa, synthetic construct
  source 1..9: note = Seed: LVVVGARGV (KRAS G12R)
IVVHGHRGL

SEQ ID NO: 20772 - protein, 9 aa, synthetic construct
  source 1..9: note = Seed: LVVVGARGV (KRAS G12R)
IVVHGHRGM

SEQ ID NO: 20773 - protein, 9 aa, synthetic construct
  source 1..9: note = Seed: LVVVGARGV (KRAS G12R)
IVVHGHRGQ

SEQ ID NO: 20774 - protein, 9 aa, synthetic construct
  source 1..9: note = Seed: LVVVGARGV (KRAS G12R)
IVVHGHRGR

SEQ ID NO: 20775 - protein, 9 aa, synthetic construct
  source 1..9: note = Seed: LVVVGARGV (KRAS G12R)
IVVHGHRGS

SEQ ID NO: 20776 - protein, 9 aa, synthetic construct
  source 1..9: note = Seed: LVVVGARGV (KRAS G12R)
IVVHGHRGV

SEQ ID NO: 20777 - protein, 9 aa, synthetic construct
  source 1..9: note = Seed: LVVVGARGV (KRAS G12R)
IVVHGHRGW

SEQ ID NO: 20778 - protein, 9 aa, synthetic construct
  source 1..9: note = Seed: LVVVGARGV (KRAS G12R)
IVVHGHRGY

SEQ ID NO: 20779 - protein, 9 aa, synthetic construct
  source 1..9: note = Seed: LVVVGARGV (KRAS G12R)
IVVHGIRGA

SEQ ID NO: 20780 - protein, 9 aa, synthetic construct
  source 1..9: note = Seed: LVVVGARGV (KRAS G12R)
IVVHGIRGF

SEQ ID NO: 20781 - protein, 9 aa, synthetic construct
  source 1..9: note = Seed: LVVVGARGV (KRAS G12R)
IVVHGIRGH

SEQ ID NO: 20782 - protein, 9 aa, synthetic construct
  source 1..9: note = Seed: LVVVGARGV (KRAS G12R)
IVVHGIRGI

SEQ ID NO: 20783 - protein, 9 aa, synthetic construct
  source 1..9: note = Seed: LVVVGARGV (KRAS G12R)
IVVHGIRGK

SEQ ID NO: 20784 - protein, 9 aa, synthetic construct
  source 1..9: note = Seed: LVVVGARGV (KRAS G12R)
IVVHGIRGL

SEQ ID NO: 20785 - protein, 9 aa, synthetic construct
  source 1..9: note = Seed: LVVVGARGV (KRAS G12R)
IVVHGIRGM

SEQ ID NO: 20786 - protein, 9 aa, synthetic construct
  source 1..9: note = Seed: LVVVGARGV (KRAS G12R)
IVVHGIRGQ

SEQ ID NO: 20787 - protein, 9 aa, synthetic construct
  source 1..9: note = Seed: LVVVGARGV (KRAS G12R)
IVVHGIRGR

SEQ ID NO: 20788 - protein, 9 aa, synthetic construct
  source 1..9: note = Seed: LVVVGARGV (KRAS G12R)
IVVHGIRGS

SEQ ID NO: 20789 - protein, 9 aa, synthetic construct
  source 1..9: note = Seed: LVVVGARGV (KRAS G12R)
IVVHGIRGV

SEQ ID NO: 20790 - protein, 9 aa, synthetic construct
  source 1..9: note = Seed: LVVVGARGV (KRAS G12R)
IVVHGIRGW

SEQ ID NO: 20791 - protein, 9 aa, synthetic construct
  source 1..9: note = Seed: LVVVGARGV (KRAS G12R)
IVVHGIRGY

SEQ ID NO: 20792 - protein, 9 aa, synthetic construct
  source 1..9: note = Seed: LVVVGARGV (KRAS G12R)
IVVHGKRGA

SEQ ID NO: 20793 - protein, 9 aa, synthetic construct
  source 1..9: note = Seed: LVVVGARGV (KRAS G12R)
IVVHGKRGF

SEQ ID NO: 20794 - protein, 9 aa, synthetic construct
  source 1..9: note = Seed: LVVVGARGV (KRAS G12R)
IVVHGKRGG

SEQ ID NO: 20795 - protein, 9 aa, synthetic construct
  source 1..9: note = Seed: LVVVGARGV (KRAS G12R)
IVVHGKRGH

SEQ ID NO: 20796 - protein, 9 aa, synthetic construct
  source 1..9: note = Seed: LVVVGARGV (KRAS G12R)
IVVHGKRGI

SEQ ID NO: 20797 - protein, 9 aa, synthetic construct
  source 1..9: note = Seed: LVVVGARGV (KRAS G12R)
IVVHGKRGK

SEQ ID NO: 20798 - protein, 9 aa, synthetic construct
  source 1..9: note = Seed: LVVVGARGV (KRAS G12R)
IVVHGKRGL

SEQ ID NO: 20799 - protein, 9 aa, synthetic construct
  source 1..9: note = Seed: LVVVGARGV (KRAS G12R)
IVVHGKRGM

SEQ ID NO: 20800 - protein, 9 aa, synthetic construct
  source 1..9: note = Seed: LVVVGARGV (KRAS G12R)
IVVHGKRGN

SEQ ID NO: 20801 - protein, 9 aa, synthetic construct
  source 1..9: note = Seed: LVVVGARGV (KRAS G12R)
IVVHGKRGP

SEQ ID NO: 20802 - protein, 9 aa, synthetic construct
  source 1..9: note = Seed: LVVVGARGV (KRAS G12R)
IVVHGKRGQ

SEQ ID NO: 20803 - protein, 9 aa, synthetic construct
  source 1..9: note = Seed: LVVVGARGV (KRAS G12R)
IVVHGKRGR

SEQ ID NO: 20804 - protein, 9 aa, synthetic construct
  source 1..9: note = Seed: LVVVGARGV (KRAS G12R)
IVVHGKRGS

SEQ ID NO: 20805 - protein, 9 aa, synthetic construct
  source 1..9: note = Seed: LVVVGARGV (KRAS G12R)
IVVHGKRGT

SEQ ID NO: 20806 - protein, 9 aa, synthetic construct
  source 1..9: note = Seed: LVVVGARGV (KRAS G12R)
IVVHGKRGV

SEQ ID NO: 20807 - protein, 9 aa, synthetic construct
  source 1..9: note = Seed: LVVVGARGV (KRAS G12R)
IVVHGKRGW

SEQ ID NO: 20808 - protein, 9 aa, synthetic construct
  source 1..9: note = Seed: LVVVGARGV (KRAS G12R)
IVVHGKRGY

SEQ ID NO: 20809 - protein, 9 aa, synthetic construct
  source 1..9: note = Seed: LVVVGARGV (KRAS G12R)
IVVHGLRGA

SEQ ID NO: 20810 - protein, 9 aa, synthetic construct
  source 1..9: note = Seed: LVVVGARGV (KRAS G12R)
IVVHGLRGF

SEQ ID NO: 20811 - protein, 9 aa, synthetic construct
  source 1..9: note = Seed: LVVVGARGV (KRAS G12R)
IVVHGLRGH

SEQ ID NO: 20812 - protein, 9 aa, synthetic construct
  source 1..9: note = Seed: LVVVGARGV (KRAS G12R)
IVVHGLRGI

SEQ ID NO: 20813 - protein, 9 aa, synthetic construct
  source 1..9: note = Seed: LVVVGARGV (KRAS G12R)
IVVHGLRGK

SEQ ID NO: 20814 - protein, 9 aa, synthetic construct
  source 1..9: note = Seed: LVVVGARGV (KRAS G12R)
IVVHGLRGL

SEQ ID NO: 20815 - protein, 9 aa, synthetic construct
  source 1..9: note = Seed: LVVVGARGV (KRAS G12R)
IVVHGLRGM

SEQ ID NO: 20816 - protein, 9 aa, synthetic construct
  source 1..9: note = Seed: LVVVGARGV (KRAS G12R)
IVVHGLRGQ

SEQ ID NO: 20817 - protein, 9 aa, synthetic construct
  source 1..9: note = Seed: LVVVGARGV (KRAS G12R)
IVVHGLRGR

SEQ ID NO: 20818 - protein, 9 aa, synthetic construct
  source 1..9: note = Seed: LVVVGARGV (KRAS G12R)
IVVHGLRGS

SEQ ID NO: 20819 - protein, 9 aa, synthetic construct
  source 1..9: note = Seed: LVVVGARGV (KRAS G12R)
IVVHGLRGV

SEQ ID NO: 20820 - protein, 9 aa, synthetic construct
  source 1..9: note = Seed: LVVVGARGV (KRAS G12R)
IVVHGLRGW

SEQ ID NO: 20821 - protein, 9 aa, synthetic construct
  source 1..9: note = Seed: LVVVGARGV (KRAS G12R)
IVVHGLRGY

SEQ ID NO: 20822 - protein, 9 aa, synthetic construct
  source 1..9: note = Seed: LVVVGARGV (KRAS G12R)
IVVHGMRGA

SEQ ID NO: 20823 - protein, 9 aa, synthetic construct
  source 1..9: note = Seed: LVVVGARGV (KRAS G12R)
IVVHGMRGF

SEQ ID NO: 20824 - protein, 9 aa, synthetic construct
  source 1..9: note = Seed: LVVVGARGV (KRAS G12R)
IVVHGMRGH

SEQ ID NO: 20825 - protein, 9 aa, synthetic construct
  source 1..9: note = Seed: LVVVGARGV (KRAS G12R)
IVVHGMRGI

SEQ ID NO: 20826 - protein, 9 aa, synthetic construct
  source 1..9: note = Seed: LVVVGARGV (KRAS G12R)
IVVHGMRGK

SEQ ID NO: 20827 - protein, 9 aa, synthetic construct
  source 1..9: note = Seed: LVVVGARGV (KRAS G12R)
IVVHGMRGL

SEQ ID NO: 20828 - protein, 9 aa, synthetic construct
  source 1..9: note = Seed: LVVVGARGV (KRAS G12R)
IVVHGMRGM

SEQ ID NO: 20829 - protein, 9 aa, synthetic construct
  source 1..9: note = Seed: LVVVGARGV (KRAS G12R)
IVVHGMRGQ

SEQ ID NO: 20830 - protein, 9 aa, synthetic construct
  source 1..9: note = Seed: LVVVGARGV (KRAS G12R)
IVVHGMRGR

SEQ ID NO: 20831 - protein, 9 aa, synthetic construct
  source 1..9: note = Seed: LVVVGARGV (KRAS G12R)
IVVHGMRGS

SEQ ID NO: 20832 - protein, 9 aa, synthetic construct
  source 1..9: note = Seed: LVVVGARGV (KRAS G12R)
IVVHGMRGV

SEQ ID NO: 20833 - protein, 9 aa, synthetic construct
  source 1..9: note = Seed: LVVVGARGV (KRAS G12R)
IVVHGMRGY

SEQ ID NO: 20834 - protein, 9 aa, synthetic construct
  source 1..9: note = Seed: LVVVGARGV (KRAS G12R)
IVVHGNRGA

SEQ ID NO: 20835 - protein, 9 aa, synthetic construct
  source 1..9: note = Seed: LVVVGARGV (KRAS G12R)
IVVHGNRGF

SEQ ID NO: 20836 - protein, 9 aa, synthetic construct
  source 1..9: note = Seed: LVVVGARGV (KRAS G12R)
IVVHGNRGH

SEQ ID NO: 20837 - protein, 9 aa, synthetic construct
  source 1..9: note = Seed: LVVVGARGV (KRAS G12R)
IVVHGNRGI

SEQ ID NO: 20838 - protein, 9 aa, synthetic construct
  source 1..9: note = Seed: LVVVGARGV (KRAS G12R)
IVVHGNRGK

SEQ ID NO: 20839 - protein, 9 aa, synthetic construct
  source 1..9: note = Seed: LVVVGARGV (KRAS G12R)
IVVHGNRGL

SEQ ID NO: 20840 - protein, 9 aa, synthetic construct
  source 1..9: note = Seed: LVVVGARGV (KRAS G12R)
IVVHGNRGM

SEQ ID NO: 20841 - protein, 9 aa, synthetic construct
  source 1..9: note = Seed: LVVVGARGV (KRAS G12R)
IVVHGNRGR

SEQ ID NO: 20842 - protein, 9 aa, synthetic construct
  source 1..9: note = Seed: LVVVGARGV (KRAS G12R)
IVVHGNRGS

SEQ ID NO: 20843 - protein, 9 aa, synthetic construct
  source 1..9: note = Seed: LVVVGARGV (KRAS G12R)
IVVHGNRGV

SEQ ID NO: 20844 - protein, 9 aa, synthetic construct
  source 1..9: note = Seed: LVVVGARGV (KRAS G12R)
IVVHGNRGW

SEQ ID NO: 20845 - protein, 9 aa, synthetic construct
  source 1..9: note = Seed: LVVVGARGV (KRAS G12R)
IVVHGNRGY

SEQ ID NO: 20846 - protein, 9 aa, synthetic construct
  source 1..9: note = Seed: LVVVGARGV (KRAS G12R)
IVVHGPRGF

SEQ ID NO: 20847 - protein, 9 aa, synthetic construct
  source 1..9: note = Seed: LVVVGARGV (KRAS G12R)
IVVHGPRGI

SEQ ID NO: 20848 - protein, 9 aa, synthetic construct
  source 1..9: note = Seed: LVVVGARGV (KRAS G12R)
IVVHGPRGK

SEQ ID NO: 20849 - protein, 9 aa, synthetic construct
  source 1..9: note = Seed: LVVVGARGV (KRAS G12R)
IVVHGPRGL

SEQ ID NO: 20850 - protein, 9 aa, synthetic construct
  source 1..9: note = Seed: LVVVGARGV (KRAS G12R)
IVVHGPRGM

SEQ ID NO: 20851 - protein, 9 aa, synthetic construct
  source 1..9: note = Seed: LVVVGARGV (KRAS G12R)
IVVHGPRGR

SEQ ID NO: 20852 - protein, 9 aa, synthetic construct
  source 1..9: note = Seed: LVVVGARGV (KRAS G12R)
IVVHGPRGV

SEQ ID NO: 20853 - protein, 9 aa, synthetic construct
  source 1..9: note = Seed: LVVVGARGV (KRAS G12R)
IVVHGPRGY

SEQ ID NO: 20854 - protein, 9 aa, synthetic construct
  source 1..9: note = Seed: LVVVGARGV (KRAS G12R)
IVVHGQRGF

SEQ ID NO: 20855 - protein, 9 aa, synthetic construct
  source 1..9: note = Seed: LVVVGARGV (KRAS G12R)
IVVHGQRGI

SEQ ID NO: 20856 - protein, 9 aa, synthetic construct
  source 1..9: note = Seed: LVVVGARGV (KRAS G12R)
IVVHGQRGK

SEQ ID NO: 20857 - protein, 9 aa, synthetic construct
  source 1..9: note = Seed: LVVVGARGV (KRAS G12R)
IVVHGQRGL

SEQ ID NO: 20858 - protein, 9 aa, synthetic construct
  source 1..9: note = Seed: LVVVGARGV (KRAS G12R)
IVVHGQRGM

SEQ ID NO: 20859 - protein, 9 aa, synthetic construct
  source 1..9: note = Seed: LVVVGARGV (KRAS G12R)
IVVHGQRGR

SEQ ID NO: 20860 - protein, 9 aa, synthetic construct
  source 1..9: note = Seed: LVVVGARGV (KRAS G12R)
IVVHGQRGV

SEQ ID NO: 20861 - protein, 9 aa, synthetic construct
  source 1..9: note = Seed: LVVVGARGV (KRAS G12R)
IVVHGQRGY

SEQ ID NO: 20862 - protein, 9 aa, synthetic construct
  source 1..9: note = Seed: LVVVGARGV (KRAS G12R)
IVVHGRRGA

SEQ ID NO: 20863 - protein, 9 aa, synthetic construct
  source 1..9: note = Seed: LVVVGARGV (KRAS G12R)
IVVHGRRGC

SEQ ID NO: 20864 - protein, 9 aa, synthetic construct
  source 1..9: note = Seed: LVVVGARGV (KRAS G12R)
IVVHGRRGE

SEQ ID NO: 20865 - protein, 9 aa, synthetic construct
  source 1..9: note = Seed: LVVVGARGV (KRAS G12R)
IVVHGRRGF

SEQ ID NO: 20866 - protein, 9 aa, synthetic construct
  source 1..9: note = Seed: LVVVGARGV (KRAS G12R)
IVVHGRRGG

SEQ ID NO: 20867 - protein, 9 aa, synthetic construct
  source 1..9: note = Seed: LVVVGARGV (KRAS G12R)
IVVHGRRGH

SEQ ID NO: 20868 - protein, 9 aa, synthetic construct
  source 1..9: note = Seed: LVVVGARGV (KRAS G12R)
IVVHGRRGI

SEQ ID NO: 20869 - protein, 9 aa, synthetic construct
  source 1..9: note = Seed: LVVVGARGV (KRAS G12R)
IVVHGRRGK

SEQ ID NO: 20870 - protein, 9 aa, synthetic construct
  source 1..9: note = Seed: LVVVGARGV (KRAS G12R)
IVVHGRRGL

SEQ ID NO: 20871 - protein, 9 aa, synthetic construct
  source 1..9: note = Seed: LVVVGARGV (KRAS G12R)
IVVHGRRGM

SEQ ID NO: 20872 - protein, 9 aa, synthetic construct
  source 1..9: note = Seed: LVVVGARGV (KRAS G12R)
IVVHGRRGN

SEQ ID NO: 20873 - protein, 9 aa, synthetic construct
  source 1..9: note = Seed: LVVVGARGV (KRAS G12R)
IVVHGRRGP

SEQ ID NO: 20874 - protein, 9 aa, synthetic construct
  source 1..9: note = Seed: LVVVGARGV (KRAS G12R)
IVVHGRRGQ

SEQ ID NO: 20875 - protein, 9 aa, synthetic construct
  source 1..9: note = Seed: LVVVGARGV (KRAS G12R)
IVVHGRRGR

SEQ ID NO: 20876 - protein, 9 aa, synthetic construct
  source 1..9: note = Seed: LVVVGARGV (KRAS G12R)
IVVHGRRGS

SEQ ID NO: 20877 - protein, 9 aa, synthetic construct
  source 1..9: note = Seed: LVVVGARGV (KRAS G12R)
IVVHGRRGT

SEQ ID NO: 20878 - protein, 9 aa, synthetic construct
  source 1..9: note = Seed: LVVVGARGV (KRAS G12R)
IVVHGRRGV

SEQ ID NO: 20879 - protein, 9 aa, synthetic construct
  source 1..9: note = Seed: LVVVGARGV (KRAS G12R)
IVVHGRRGW

SEQ ID NO: 20880 - protein, 9 aa, synthetic construct
  source 1..9: note = Seed: LVVVGARGV (KRAS G12R)
IVVHGRRGY

SEQ ID NO: 20881 - protein, 9 aa, synthetic construct
  source 1..9: note = Seed: LVVVGARGV (KRAS G12R)
IVVHGSRGA

SEQ ID NO: 20882 - protein, 9 aa, synthetic construct
  source 1..9: note = Seed: LVVVGARGV (KRAS G12R)
IVVHGSRGF

SEQ ID NO: 20883 - protein, 9 aa, synthetic construct
  source 1..9: note = Seed: LVVVGARGV (KRAS G12R)
IVVHGSRGH

SEQ ID NO: 20884 - protein, 9 aa, synthetic construct
  source 1..9: note = Seed: LVVVGARGV (KRAS G12R)
IVVHGSRGI

SEQ ID NO: 20885 - protein, 9 aa, synthetic construct
  source 1..9: note = Seed: LVVVGARGV (KRAS G12R)
IVVHGSRGK

SEQ ID NO: 20886 - protein, 9 aa, synthetic construct
  source 1..9: note = Seed: LVVVGARGV (KRAS G12R)
IVVHGSRGL

SEQ ID NO: 20887 - protein, 9 aa, synthetic construct
  source 1..9: note = Seed: LVVVGARGV (KRAS G12R)
IVVHGSRGM

SEQ ID NO: 20888 - protein, 9 aa, synthetic construct
  source 1..9: note = Seed: LVVVGARGV (KRAS G12R)
IVVHGSRGR

SEQ ID NO: 20889 - protein, 9 aa, synthetic construct
  source 1..9: note = Seed: LVVVGARGV (KRAS G12R)
IVVHGSRGS

SEQ ID NO: 20890 - protein, 9 aa, synthetic construct
  source 1..9: note = Seed: LVVVGARGV (KRAS G12R)
IVVHGSRGT

SEQ ID NO: 20891 - protein, 9 aa, synthetic construct
  source 1..9: note = Seed: LVVVGARGV (KRAS G12R)
IVVHGSRGV

SEQ ID NO: 20892 - protein, 9 aa, synthetic construct
  source 1..9: note = Seed: LVVVGARGV (KRAS G12R)
IVVHGSRGW

SEQ ID NO: 20893 - protein, 9 aa, synthetic construct
  source 1..9: note = Seed: LVVVGARGV (KRAS G12R)
IVVHGSRGY

SEQ ID NO: 20894 - protein, 9 aa, synthetic construct
  source 1..9: note = Seed: LVVVGARGV (KRAS G12R)
IVVHGTRGA

SEQ ID NO: 20895 - protein, 9 aa, synthetic construct
  source 1..9: note = Seed: LVVVGARGV (KRAS G12R)
IVVHGTRGF

SEQ ID NO: 20896 - protein, 9 aa, synthetic construct
  source 1..9: note = Seed: LVVVGARGV (KRAS G12R)
IVVHGTRGH

SEQ ID NO: 20897 - protein, 9 aa, synthetic construct
  source 1..9: note = Seed: LVVVGARGV (KRAS G12R)
IVVHGTRGI

SEQ ID NO: 20898 - protein, 9 aa, synthetic construct
  source 1..9: note = Seed: LVVVGARGV (KRAS G12R)
IVVHGTRGK

SEQ ID NO: 20899 - protein, 9 aa, synthetic construct
  source 1..9: note = Seed: LVVVGARGV (KRAS G12R)
IVVHGTRGL

SEQ ID NO: 20900 - protein, 9 aa, synthetic construct
  source 1..9: note = Seed: LVVVGARGV (KRAS G12R)
IVVHGTRGM

SEQ ID NO: 20901 - protein, 9 aa, synthetic construct
  source 1..9: note = Seed: LVVVGARGV (KRAS G12R)
IVVHGTRGR

SEQ ID NO: 20902 - protein, 9 aa, synthetic construct
  source 1..9: note = Seed: LVVVGARGV (KRAS G12R)
IVVHGTRGS

SEQ ID NO: 20903 - protein, 9 aa, synthetic construct
  source 1..9: note = Seed: LVVVGARGV (KRAS G12R)
IVVHGTRGV

SEQ ID NO: 20904 - protein, 9 aa, synthetic construct
  source 1..9: note = Seed: LVVVGARGV (KRAS G12R)
IVVHGTRGW

SEQ ID NO: 20905 - protein, 9 aa, synthetic construct
  source 1..9: note = Seed: LVVVGARGV (KRAS G12R)
IVVHGTRGY

SEQ ID NO: 20906 - protein, 9 aa, synthetic construct
  source 1..9: note = Seed: LVVVGARGV (KRAS G12R)
IVVHGVRGA

SEQ ID NO: 20907 - protein, 9 aa, synthetic construct
  source 1..9: note = Seed: LVVVGARGV (KRAS G12R)
IVVHGVRGF

SEQ ID NO: 20908 - protein, 9 aa, synthetic construct
  source 1..9: note = Seed: LVVVGARGV (KRAS G12R)
IVVHGVRGH

SEQ ID NO: 20909 - protein, 9 aa, synthetic construct
  source 1..9: note = Seed: LVVVGARGV (KRAS G12R)
IVVHGVRGI

SEQ ID NO: 20910 - protein, 9 aa, synthetic construct
  source 1..9: note = Seed: LVVVGARGV (KRAS G12R)
IVVHGVRGK

SEQ ID NO: 20911 - protein, 9 aa, synthetic construct
  source 1..9: note = Seed: LVVVGARGV (KRAS G12R)
IVVHGVRGL

SEQ ID NO: 20912 - protein, 9 aa, synthetic construct
  source 1..9: note = Seed: LVVVGARGV (KRAS G12R)
IVVHGVRGM

SEQ ID NO: 20913 - protein, 9 aa, synthetic construct
  source 1..9: note = Seed: LVVVGARGV (KRAS G12R)
IVVHGVRGQ

SEQ ID NO: 20914 - protein, 9 aa, synthetic construct
  source 1..9: note = Seed: LVVVGARGV (KRAS G12R)
IVVHGVRGR

SEQ ID NO: 20915 - protein, 9 aa, synthetic construct
  source 1..9: note = Seed: LVVVGARGV (KRAS G12R)
IVVHGVRGS

SEQ ID NO: 20916 - protein, 9 aa, synthetic construct
  source 1..9: note = Seed: LVVVGARGV (KRAS G12R)
IVVHGVRGV

SEQ ID NO: 20917 - protein, 9 aa, synthetic construct
  source 1..9: note = Seed: LVVVGARGV (KRAS G12R)
IVVHGVRGW

SEQ ID NO: 20918 - protein, 9 aa, synthetic construct
  source 1..9: note = Seed: LVVVGARGV (KRAS G12R)
IVVHGVRGY

SEQ ID NO: 20919 - protein, 9 aa, synthetic construct
  source 1..9: note = Seed: LVVVGARGV (KRAS G12R)
IVVHGWRGF

SEQ ID NO: 20920 - protein, 9 aa, synthetic construct
  source 1..9: note = Seed: LVVVGARGV (KRAS G12R)
IVVHGWRGI

SEQ ID NO: 20921 - protein, 9 aa, synthetic construct
  source 1..9: note = Seed: LVVVGARGV (KRAS G12R)
IVVHGWRGK

SEQ ID NO: 20922 - protein, 9 aa, synthetic construct
  source 1..9: note = Seed: LVVVGARGV (KRAS G12R)
IVVHGWRGL

SEQ ID NO: 20923 - protein, 9 aa, synthetic construct
  source 1..9: note = Seed: LVVVGARGV (KRAS G12R)
IVVHGWRGM

SEQ ID NO: 20924 - protein, 9 aa, synthetic construct
  source 1..9: note = Seed: LVVVGARGV (KRAS G12R)
IVVHGWRGR

SEQ ID NO: 20925 - protein, 9 aa, synthetic construct
  source 1..9: note = Seed: LVVVGARGV (KRAS G12R)
IVVHGWRGV

SEQ ID NO: 20926 - protein, 9 aa, synthetic construct
  source 1..9: note = Seed: LVVVGARGV (KRAS G12R)
IVVHGWRGY

SEQ ID NO: 20927 - protein, 9 aa, synthetic construct
  source 1..9: note = Seed: LVVVGARGV (KRAS G12R)
IVVHGYRGF

SEQ ID NO: 20928 - protein, 9 aa, synthetic construct
  source 1..9: note = Seed: LVVVGARGV (KRAS G12R)
IVVHGYRGI

SEQ ID NO: 20929 - protein, 9 aa, synthetic construct
  source 1..9: note = Seed: LVVVGARGV (KRAS G12R)
IVVHGYRGK

SEQ ID NO: 20930 - protein, 9 aa, synthetic construct
  source 1..9: note = Seed: LVVVGARGV (KRAS G12R)
IVVHGYRGL

SEQ ID NO: 20931 - protein, 9 aa, synthetic construct
  source 1..9: note = Seed: LVVVGARGV (KRAS G12R)
IVVHGYRGM

SEQ ID NO: 20932 - protein, 9 aa, synthetic construct
  source 1..9: note = Seed: LVVVGARGV (KRAS G12R)
IVVHGYRGR

SEQ ID NO: 20933 - protein, 9 aa, synthetic construct
  source 1..9: note = Seed: LVVVGARGV (KRAS G12R)
IVVHGYRGY

SEQ ID NO: 20934 - protein, 9 aa, synthetic construct
  source 1..9: note = Seed: LVVVGARGV (KRAS G12R)
IVVIGARGA

SEQ ID NO: 20935 - protein, 9 aa, synthetic construct
  source 1..9: note = Seed: LVVVGARGV (KRAS G12R)
IVVIGARGC

SEQ ID NO: 20936 - protein, 9 aa, synthetic construct
  source 1..9: note = Seed: LVVVGARGV (KRAS G12R)
IVVIGARGF

SEQ ID NO: 20937 - protein, 9 aa, synthetic construct
  source 1..9: note = Seed: LVVVGARGV (KRAS G12R)
IVVIGARGG

SEQ ID NO: 20938 - protein, 9 aa, synthetic construct
  source 1..9: note = Seed: LVVVGARGV (KRAS G12R)
IVVIGARGH

SEQ ID NO: 20939 - protein, 9 aa, synthetic construct
  source 1..9: note = Seed: LVVVGARGV (KRAS G12R)
IVVIGARGI

SEQ ID NO: 20940 - protein, 9 aa, synthetic construct
  source 1..9: note = Seed: LVVVGARGV (KRAS G12R)
IVVIGARGK

SEQ ID NO: 20941 - protein, 9 aa, synthetic construct
  source 1..9: note = Seed: LVVVGARGV (KRAS G12R)
IVVIGARGL

SEQ ID NO: 20942 - protein, 9 aa, synthetic construct
  source 1..9: note = Seed: LVVVGARGV (KRAS G12R)
IVVIGARGM

SEQ ID NO: 20943 - protein, 9 aa, synthetic construct
  source 1..9: note = Seed: LVVVGARGV (KRAS G12R)
IVVIGARGN

SEQ ID NO: 20944 - protein, 9 aa, synthetic construct
  source 1..9: note = Seed: LVVVGARGV (KRAS G12R)
IVVIGARGP

SEQ ID NO: 20945 - protein, 9 aa, synthetic construct
  source 1..9: note = Seed: LVVVGARGV (KRAS G12R)
IVVIGARGQ

SEQ ID NO: 20946 - protein, 9 aa, synthetic construct
  source 1..9: note = Seed: LVVVGARGV (KRAS G12R)
IVVIGARGR

SEQ ID NO: 20947 - protein, 9 aa, synthetic construct
  source 1..9: note = Seed: LVVVGARGV (KRAS G12R)
IVVIGARGS

SEQ ID NO: 20948 - protein, 9 aa, synthetic construct
  source 1..9: note = Seed: LVVVGARGV (KRAS G12R)
IVVIGARGT

SEQ ID NO: 20949 - protein, 9 aa, synthetic construct
  source 1..9: note = Seed: LVVVGARGV (KRAS G12R)
IVVIGARGV

SEQ ID NO: 20950 - protein, 9 aa, synthetic construct
  source 1..9: note = Seed: LVVVGARGV (KRAS G12R)
IVVIGARGW

SEQ ID NO: 20951 - protein, 9 aa, synthetic construct
  source 1..9: note = Seed: LVVVGARGV (KRAS G12R)
IVVIGARGY

SEQ ID NO: 20952 - protein, 9 aa, synthetic construct
  source 1..9: note = Seed: LVVVGARGV (KRAS G12R)
IVVIGCRGM

SEQ ID NO: 20953 - protein, 9 aa, synthetic construct
  source 1..9: note = Seed: LVVVGARGV (KRAS G12R)
IVVIGCRGR

SEQ ID NO: 20954 - protein, 9 aa, synthetic construct
  source 1..9: note = Seed: LVVVGARGV (KRAS G12R)
IVVIGDRGA

SEQ ID NO: 20955 - protein, 9 aa, synthetic construct
  source 1..9: note = Seed: LVVVGARGV (KRAS G12R)
IVVIGDRGI

SEQ ID NO: 20956 - protein, 9 aa, synthetic construct
  source 1..9: note = Seed: LVVVGARGV (KRAS G12R)
IVVIGDRGL

SEQ ID NO: 20957 - protein, 9 aa, synthetic construct
  source 1..9: note = Seed: LVVVGARGV (KRAS G12R)
IVVIGDRGV

SEQ ID NO: 20958 - protein, 9 aa, synthetic construct
  source 1..9: note = Seed: LVVVGARGV (KRAS G12R)
IVVIGERGR

SEQ ID NO: 20959 - protein, 9 aa, synthetic construct
  source 1..9: note = Seed: LVVVGARGV (KRAS G12R)
IVVIGFRGI

SEQ ID NO: 20960 - protein, 9 aa, synthetic construct
  source 1..9: note = Seed: LVVVGARGV (KRAS G12R)
IVVIGFRGL

SEQ ID NO: 20961 - protein, 9 aa, synthetic construct
  source 1..9: note = Seed: LVVVGARGV (KRAS G12R)
IVVIGFRGM

SEQ ID NO: 20962 - protein, 9 aa, synthetic construct
  source 1..9: note = Seed: LVVVGARGV (KRAS G12R)
IVVIGFRGR

SEQ ID NO: 20963 - protein, 9 aa, synthetic construct
  source 1..9: note = Seed: LVVVGARGV (KRAS G12R)
IVVIGFRGV

SEQ ID NO: 20964 - protein, 9 aa, synthetic construct
  source 1..9: note = Seed: LVVVGARGV (KRAS G12R)
IVVIGFRGY

SEQ ID NO: 20965 - protein, 9 aa, synthetic construct
  source 1..9: note = Seed: LVVVGARGV (KRAS G12R)
IVVIGGRGA

SEQ ID NO: 20966 - protein, 9 aa, synthetic construct
  source 1..9: note = Seed: LVVVGARGV (KRAS G12R)
IVVIGGRGC

SEQ ID NO: 20967 - protein, 9 aa, synthetic construct
  source 1..9: note = Seed: LVVVGARGV (KRAS G12R)
IVVIGGRGF

SEQ ID NO: 20968 - protein, 9 aa, synthetic construct
  source 1..9: note = Seed: LVVVGARGV (KRAS G12R)
IVVIGGRGG

SEQ ID NO: 20969 - protein, 9 aa, synthetic construct
  source 1..9: note = Seed: LVVVGARGV (KRAS G12R)
IVVIGGRGH

SEQ ID NO: 20970 - protein, 9 aa, synthetic construct
  source 1..9: note = Seed: LVVVGARGV (KRAS G12R)
IVVIGGRGI

SEQ ID NO: 20971 - protein, 9 aa, synthetic construct
  source 1..9: note = Seed: LVVVGARGV (KRAS G12R)
IVVIGGRGK

SEQ ID NO: 20972 - protein, 9 aa, synthetic construct
  source 1..9: note = Seed: LVVVGARGV (KRAS G12R)
IVVIGGRGL

SEQ ID NO: 20973 - protein, 9 aa, synthetic construct
  source 1..9: note = Seed: LVVVGARGV (KRAS G12R)
IVVIGGRGM

SEQ ID NO: 20974 - protein, 9 aa, synthetic construct
  source 1..9: note = Seed: LVVVGARGV (KRAS G12R)
IVVIGGRGN

SEQ ID NO: 20975 - protein, 9 aa, synthetic construct
  source 1..9: note = Seed: LVVVGARGV (KRAS G12R)
IVVIGGRGP

SEQ ID NO: 20976 - protein, 9 aa, synthetic construct
  source 1..9: note = Seed: LVVVGARGV (KRAS G12R)
IVVIGGRGQ

SEQ ID NO: 20977 - protein, 9 aa, synthetic construct
  source 1..9: note = Seed: LVVVGARGV (KRAS G12R)
IVVIGGRGR

SEQ ID NO: 20978 - protein, 9 aa, synthetic construct
  source 1..9: note = Seed: LVVVGARGV (KRAS G12R)
IVVIGGRGS

SEQ ID NO: 20979 - protein, 9 aa, synthetic construct
  source 1..9: note = Seed: LVVVGARGV (KRAS G12R)
IVVIGGRGT

SEQ ID NO: 20980 - protein, 9 aa, synthetic construct
  source 1..9: note = Seed: LVVVGARGV (KRAS G12R)
IVVIGGRGV

SEQ ID NO: 20981 - protein, 9 aa, synthetic construct
  source 1..9: note = Seed: LVVVGARGV (KRAS G12R)
IVVIGGRGY

SEQ ID NO: 20982 - protein, 9 aa, synthetic construct
  source 1..9: note = Seed: LVVVGARGV (KRAS G12R)
IVVIGHRGA

SEQ ID NO: 20983 - protein, 9 aa, synthetic construct
  source 1..9: note = Seed: LVVVGARGV (KRAS G12R)
IVVIGHRGC

SEQ ID NO: 20984 - protein, 9 aa, synthetic construct
  source 1..9: note = Seed: LVVVGARGV (KRAS G12R)
IVVIGHRGF

SEQ ID NO: 20985 - protein, 9 aa, synthetic construct
  source 1..9: note = Seed: LVVVGARGV (KRAS G12R)
IVVIGHRGG

SEQ ID NO: 20986 - protein, 9 aa, synthetic construct
  source 1..9: note = Seed: LVVVGARGV (KRAS G12R)
IVVIGHRGH

SEQ ID NO: 20987 - protein, 9 aa, synthetic construct
  source 1..9: note = Seed: LVVVGARGV (KRAS G12R)
IVVIGHRGI

SEQ ID NO: 20988 - protein, 9 aa, synthetic construct
  source 1..9: note = Seed: LVVVGARGV (KRAS G12R)
IVVIGHRGK

SEQ ID NO: 20989 - protein, 9 aa, synthetic construct
  source 1..9: note = Seed: LVVVGARGV (KRAS G12R)
IVVIGHRGL

SEQ ID NO: 20990 - protein, 9 aa, synthetic construct
  source 1..9: note = Seed: LVVVGARGV (KRAS G12R)
IVVIGHRGM

SEQ ID NO: 20991 - protein, 9 aa, synthetic construct
  source 1..9: note = Seed: LVVVGARGV (KRAS G12R)
IVVIGHRGN

SEQ ID NO: 20992 - protein, 9 aa, synthetic construct
  source 1..9: note = Seed: LVVVGARGV (KRAS G12R)
IVVIGHRGP

SEQ ID NO: 20993 - protein, 9 aa, synthetic construct
  source 1..9: note = Seed: LVVVGARGV (KRAS G12R)
IVVIGHRGQ

SEQ ID NO: 20994 - protein, 9 aa, synthetic construct
  source 1..9: note = Seed: LVVVGARGV (KRAS G12R)
IVVIGHRGR

SEQ ID NO: 20995 - protein, 9 aa, synthetic construct
  source 1..9: note = Seed: LVVVGARGV (KRAS G12R)
IVVIGHRGS

SEQ ID NO: 20996 - protein, 9 aa, synthetic construct
  source 1..9: note = Seed: LVVVGARGV (KRAS G12R)
IVVIGHRGT

SEQ ID NO: 20997 - protein, 9 aa, synthetic construct
  source 1..9: note = Seed: LVVVGARGV (KRAS G12R)
IVVIGHRGV

SEQ ID NO: 20998 - protein, 9 aa, synthetic construct
  source 1..9: note = Seed: LVVVGARGV (KRAS G12R)
IVVIGHRGW

SEQ ID NO: 20999 - protein, 9 aa, synthetic construct
  source 1..9: note = Seed: LVVVGARGV (KRAS G12R)
IVVIGHRGY

SEQ ID NO: 21000 - protein, 9 aa, synthetic construct
  source 1..9: note = Seed: LVVVGARGV (KRAS G12R)
IVVIGIRGA

SEQ ID NO: 21001 - protein, 9 aa, synthetic construct
  source 1..9: note = Seed: LVVVGARGV (KRAS G12R)
IVVIGIRGF

SEQ ID NO: 21002 - protein, 9 aa, synthetic construct
  source 1..9: note = Seed: LVVVGARGV (KRAS G12R)
IVVIGIRGG

SEQ ID NO: 21003 - protein, 9 aa, synthetic construct
  source 1..9: note = Seed: LVVVGARGV (KRAS G12R)
IVVIGIRGH

SEQ ID NO: 21004 - protein, 9 aa, synthetic construct
  source 1..9: note = Seed: LVVVGARGV (KRAS G12R)
IVVIGIRGI

SEQ ID NO: 21005 - protein, 9 aa, synthetic construct
  source 1..9: note = Seed: LVVVGARGV (KRAS G12R)
IVVIGIRGK

SEQ ID NO: 21006 - protein, 9 aa, synthetic construct
  source 1..9: note = Seed: LVVVGARGV (KRAS G12R)
IVVIGIRGL

SEQ ID NO: 21007 - protein, 9 aa, synthetic construct
  source 1..9: note = Seed: LVVVGARGV (KRAS G12R)
IVVIGIRGM

SEQ ID NO: 21008 - protein, 9 aa, synthetic construct
  source 1..9: note = Seed: LVVVGARGV (KRAS G12R)
IVVIGIRGN

SEQ ID NO: 21009 - protein, 9 aa, synthetic construct
  source 1..9: note = Seed: LVVVGARGV (KRAS G12R)
IVVIGIRGQ

SEQ ID NO: 21010 - protein, 9 aa, synthetic construct
  source 1..9: note = Seed: LVVVGARGV (KRAS G12R)
IVVIGIRGR

SEQ ID NO: 21011 - protein, 9 aa, synthetic construct
  source 1..9: note = Seed: LVVVGARGV (KRAS G12R)
IVVIGIRGS

SEQ ID NO: 21012 - protein, 9 aa, synthetic construct
  source 1..9: note = Seed: LVVVGARGV (KRAS G12R)
IVVIGIRGT

SEQ ID NO: 21013 - protein, 9 aa, synthetic construct
  source 1..9: note = Seed: LVVVGARGV (KRAS G12R)
IVVIGIRGV

SEQ ID NO: 21014 - protein, 9 aa, synthetic construct
  source 1..9: note = Seed: LVVVGARGV (KRAS G12R)
IVVIGIRGY

SEQ ID NO: 21015 - protein, 9 aa, synthetic construct
  source 1..9: note = Seed: LVVVGARGV (KRAS G12R)
IVVIGKRGA

SEQ ID NO: 21016 - protein, 9 aa, synthetic construct
  source 1..9: note = Seed: LVVVGARGV (KRAS G12R)
IVVIGKRGC

SEQ ID NO: 21017 - protein, 9 aa, synthetic construct
  source 1..9: note = Seed: LVVVGARGV (KRAS G12R)
IVVIGKRGD

SEQ ID NO: 21018 - protein, 9 aa, synthetic construct
  source 1..9: note = Seed: LVVVGARGV (KRAS G12R)
IVVIGKRGE

SEQ ID NO: 21019 - protein, 9 aa, synthetic construct
  source 1..9: note = Seed: LVVVGARGV (KRAS G12R)
IVVIGKRGF

SEQ ID NO: 21020 - protein, 9 aa, synthetic construct
  source 1..9: note = Seed: LVVVGARGV (KRAS G12R)
IVVIGKRGG

SEQ ID NO: 21021 - protein, 9 aa, synthetic construct
  source 1..9: note = Seed: LVVVGARGV (KRAS G12R)
IVVIGKRGH

SEQ ID NO: 21022 - protein, 9 aa, synthetic construct
  source 1..9: note = Seed: LVVVGARGV (KRAS G12R)
IVVIGKRGI

SEQ ID NO: 21023 - protein, 9 aa, synthetic construct
  source 1..9: note = Seed: LVVVGARGV (KRAS G12R)
IVVIGKRGK

SEQ ID NO: 21024 - protein, 9 aa, synthetic construct
  source 1..9: note = Seed: LVVVGARGV (KRAS G12R)
IVVIGKRGL

SEQ ID NO: 21025 - protein, 9 aa, synthetic construct
  source 1..9: note = Seed: LVVVGARGV (KRAS G12R)
IVVIGKRGM

SEQ ID NO: 21026 - protein, 9 aa, synthetic construct
  source 1..9: note = Seed: LVVVGARGV (KRAS G12R)
IVVIGKRGN

SEQ ID NO: 21027 - protein, 9 aa, synthetic construct
  source 1..9: note = Seed: LVVVGARGV (KRAS G12R)
IVVIGKRGP

SEQ ID NO: 21028 - protein, 9 aa, synthetic construct
  source 1..9: note = Seed: LVVVGARGV (KRAS G12R)
IVVIGKRGQ

SEQ ID NO: 21029 - protein, 9 aa, synthetic construct
  source 1..9: note = Seed: LVVVGARGV (KRAS G12R)
IVVIGKRGR

SEQ ID NO: 21030 - protein, 9 aa, synthetic construct
  source 1..9: note = Seed: LVVVGARGV (KRAS G12R)
IVVIGKRGS

SEQ ID NO: 21031 - protein, 9 aa, synthetic construct
  source 1..9: note = Seed: LVVVGARGV (KRAS G12R)
IVVIGKRGT

SEQ ID NO: 21032 - protein, 9 aa, synthetic construct
  source 1..9: note = Seed: LVVVGARGV (KRAS G12R)
IVVIGKRGV

SEQ ID NO: 21033 - protein, 9 aa, synthetic construct
  source 1..9: note = Seed: LVVVGARGV (KRAS G12R)
IVVIGKRGW

SEQ ID NO: 21034 - protein, 9 aa, synthetic construct
  source 1..9: note = Seed: LVVVGARGV (KRAS G12R)
IVVIGKRGY

SEQ ID NO: 21035 - protein, 9 aa, synthetic construct
  source 1..9: note = Seed: LVVVGARGV (KRAS G12R)
IVVIGLRGA

SEQ ID NO: 21036 - protein, 9 aa, synthetic construct
  source 1..9: note = Seed: LVVVGARGV (KRAS G12R)
IVVIGLRGC

SEQ ID NO: 21037 - protein, 9 aa, synthetic construct
  source 1..9: note = Seed: LVVVGARGV (KRAS G12R)
IVVIGLRGF

SEQ ID NO: 21038 - protein, 9 aa, synthetic construct
  source 1..9: note = Seed: LVVVGARGV (KRAS G12R)
IVVIGLRGG

SEQ ID NO: 21039 - protein, 9 aa, synthetic construct
  source 1..9: note = Seed: LVVVGARGV (KRAS G12R)
IVVIGLRGH

SEQ ID NO: 21040 - protein, 9 aa, synthetic construct
  source 1..9: note = Seed: LVVVGARGV (KRAS G12R)
IVVIGLRGI

SEQ ID NO: 21041 - protein, 9 aa, synthetic construct
  source 1..9: note = Seed: LVVVGARGV (KRAS G12R)
IVVIGLRGK

SEQ ID NO: 21042 - protein, 9 aa, synthetic construct
  source 1..9: note = Seed: LVVVGARGV (KRAS G12R)
IVVIGLRGL

SEQ ID NO: 21043 - protein, 9 aa, synthetic construct
  source 1..9: note = Seed: LVVVGARGV (KRAS G12R)
IVVIGLRGM

SEQ ID NO: 21044 - protein, 9 aa, synthetic construct
  source 1..9: note = Seed: LVVVGARGV (KRAS G12R)
IVVIGLRGQ

SEQ ID NO: 21045 - protein, 9 aa, synthetic construct
  source 1..9: note = Seed: LVVVGARGV (KRAS G12R)
IVVIGLRGR

SEQ ID NO: 21046 - protein, 9 aa, synthetic construct
  source 1..9: note = Seed: LVVVGARGV (KRAS G12R)
IVVIGLRGS

SEQ ID NO: 21047 - protein, 9 aa, synthetic construct
  source 1..9: note = Seed: LVVVGARGV (KRAS G12R)
IVVIGLRGV

SEQ ID NO: 21048 - protein, 9 aa, synthetic construct
  source 1..9: note = Seed: LVVVGARGV (KRAS G12R)
IVVIGLRGY

SEQ ID NO: 21049 - protein, 9 aa, synthetic construct
  source 1..9: note = Seed: LVVVGARGV (KRAS G12R)
IVVIGMRGA

SEQ ID NO: 21050 - protein, 9 aa, synthetic construct
  source 1..9: note = Seed: LVVVGARGV (KRAS G12R)
IVVIGMRGC

SEQ ID NO: 21051 - protein, 9 aa, synthetic construct
  source 1..9: note = Seed: LVVVGARGV (KRAS G12R)
IVVIGMRGF

SEQ ID NO: 21052 - protein, 9 aa, synthetic construct
  source 1..9: note = Seed: LVVVGARGV (KRAS G12R)
IVVIGMRGG

SEQ ID NO: 21053 - protein, 9 aa, synthetic construct
  source 1..9: note = Seed: LVVVGARGV (KRAS G12R)
IVVIGMRGH

SEQ ID NO: 21054 - protein, 9 aa, synthetic construct
  source 1..9: note = Seed: LVVVGARGV (KRAS G12R)
IVVIGMRGI

SEQ ID NO: 21055 - protein, 9 aa, synthetic construct
  source 1..9: note = Seed: LVVVGARGV (KRAS G12R)
IVVIGMRGK

SEQ ID NO: 21056 - protein, 9 aa, synthetic construct
  source 1..9: note = Seed: LVVVGARGV (KRAS G12R)
IVVIGMRGL

SEQ ID NO: 21057 - protein, 9 aa, synthetic construct
  source 1..9: note = Seed: LVVVGARGV (KRAS G12R)
IVVIGMRGM

SEQ ID NO: 21058 - protein, 9 aa, synthetic construct
  source 1..9: note = Seed: LVVVGARGV (KRAS G12R)
IVVIGMRGQ

SEQ ID NO: 21059 - protein, 9 aa, synthetic construct
  source 1..9: note = Seed: LVVVGARGV (KRAS G12R)
IVVIGMRGR

SEQ ID NO: 21060 - protein, 9 aa, synthetic construct
  source 1..9: note = Seed: LVVVGARGV (KRAS G12R)
IVVIGMRGS

SEQ ID NO: 21061 - protein, 9 aa, synthetic construct
  source 1..9: note = Seed: LVVVGARGV (KRAS G12R)
IVVIGMRGV

SEQ ID NO: 21062 - protein, 9 aa, synthetic construct
  source 1..9: note = Seed: LVVVGARGV (KRAS G12R)
IVVIGMRGY

SEQ ID NO: 21063 - protein, 9 aa, synthetic construct
  source 1..9: note = Seed: LVVVGARGV (KRAS G12R)
IVVIGNRGA

SEQ ID NO: 21064 - protein, 9 aa, synthetic construct
  source 1..9: note = Seed: LVVVGARGV (KRAS G12R)
IVVIGNRGF

SEQ ID NO: 21065 - protein, 9 aa, synthetic construct
  source 1..9: note = Seed: LVVVGARGV (KRAS G12R)
IVVIGNRGG

SEQ ID NO: 21066 - protein, 9 aa, synthetic construct
  source 1..9: note = Seed: LVVVGARGV (KRAS G12R)
IVVIGNRGH

SEQ ID NO: 21067 - protein, 9 aa, synthetic construct
  source 1..9: note = Seed: LVVVGARGV (KRAS G12R)
IVVIGNRGI

SEQ ID NO: 21068 - protein, 9 aa, synthetic construct
  source 1..9: note = Seed: LVVVGARGV (KRAS G12R)
IVVIGNRGK

SEQ ID NO: 21069 - protein, 9 aa, synthetic construct
  source 1..9: note = Seed: LVVVGARGV (KRAS G12R)
IVVIGNRGL

SEQ ID NO: 21070 - protein, 9 aa, synthetic construct
  source 1..9: note = Seed: LVVVGARGV (KRAS G12R)
IVVIGNRGM

SEQ ID NO: 21071 - protein, 9 aa, synthetic construct
  source 1..9: note = Seed: LVVVGARGV (KRAS G12R)
IVVIGNRGN

SEQ ID NO: 21072 - protein, 9 aa, synthetic construct
  source 1..9: note = Seed: LVVVGARGV (KRAS G12R)
IVVIGNRGQ

SEQ ID NO: 21073 - protein, 9 aa, synthetic construct
  source 1..9: note = Seed: LVVVGARGV (KRAS G12R)
IVVIGNRGR

SEQ ID NO: 21074 - protein, 9 aa, synthetic construct
  source 1..9: note = Seed: LVVVGARGV (KRAS G12R)
IVVIGNRGS

SEQ ID NO: 21075 - protein, 9 aa, synthetic construct
  source 1..9: note = Seed: LVVVGARGV (KRAS G12R)
IVVIGNRGT

SEQ ID NO: 21076 - protein, 9 aa, synthetic construct
  source 1..9: note = Seed: LVVVGARGV (KRAS G12R)
IVVIGNRGV

SEQ ID NO: 21077 - protein, 9 aa, synthetic construct
  source 1..9: note = Seed: LVVVGARGV (KRAS G12R)
IVVIGNRGW

SEQ ID NO: 21078 - protein, 9 aa, synthetic construct
  source 1..9: note = Seed: LVVVGARGV (KRAS G12R)
IVVIGNRGY

SEQ ID NO: 21079 - protein, 9 aa, synthetic construct
  source 1..9: note = Seed: LVVVGARGV (KRAS G12R)
IVVIGPRGA

SEQ ID NO: 21080 - protein, 9 aa, synthetic construct
  source 1..9: note = Seed: LVVVGARGV (KRAS G12R)
IVVIGPRGF

SEQ ID NO: 21081 - protein, 9 aa, synthetic construct
  source 1..9: note = Seed: LVVVGARGV (KRAS G12R)
IVVIGPRGG

SEQ ID NO: 21082 - protein, 9 aa, synthetic construct
  source 1..9: note = Seed: LVVVGARGV (KRAS G12R)
IVVIGPRGH

SEQ ID NO: 21083 - protein, 9 aa, synthetic construct
  source 1..9: note = Seed: LVVVGARGV (KRAS G12R)
IVVIGPRGI

SEQ ID NO: 21084 - protein, 9 aa, synthetic construct
  source 1..9: note = Seed: LVVVGARGV (KRAS G12R)
IVVIGPRGK

SEQ ID NO: 21085 - protein, 9 aa, synthetic construct
  source 1..9: note = Seed: LVVVGARGV (KRAS G12R)
IVVIGPRGL

SEQ ID NO: 21086 - protein, 9 aa, synthetic construct
  source 1..9: note = Seed: LVVVGARGV (KRAS G12R)
IVVIGPRGM

SEQ ID NO: 21087 - protein, 9 aa, synthetic construct
  source 1..9: note = Seed: LVVVGARGV (KRAS G12R)
IVVIGPRGN

SEQ ID NO: 21088 - protein, 9 aa, synthetic construct
  source 1..9: note = Seed: LVVVGARGV (KRAS G12R)
IVVIGPRGQ

SEQ ID NO: 21089 - protein, 9 aa, synthetic construct
  source 1..9: note = Seed: LVVVGARGV (KRAS G12R)
IVVIGPRGR

SEQ ID NO: 21090 - protein, 9 aa, synthetic construct
  source 1..9: note = Seed: LVVVGARGV (KRAS G12R)
IVVIGPRGS

SEQ ID NO: 21091 - protein, 9 aa, synthetic construct
  source 1..9: note = Seed: LVVVGARGV (KRAS G12R)
IVVIGPRGT

SEQ ID NO: 21092 - protein, 9 aa, synthetic construct
  source 1..9: note = Seed: LVVVGARGV (KRAS G12R)
IVVIGPRGV

SEQ ID NO: 21093 - protein, 9 aa, synthetic construct
  source 1..9: note = Seed: LVVVGARGV (KRAS G12R)
IVVIGPRGY

SEQ ID NO: 21094 - protein, 9 aa, synthetic construct
  source 1..9: note = Seed: LVVVGARGV (KRAS G12R)
IVVIGQRGA

SEQ ID NO: 21095 - protein, 9 aa, synthetic construct
  source 1..9: note = Seed: LVVVGARGV (KRAS G12R)
IVVIGQRGF

SEQ ID NO: 21096 - protein, 9 aa, synthetic construct
  source 1..9: note = Seed: LVVVGARGV (KRAS G12R)
IVVIGQRGG

SEQ ID NO: 21097 - protein, 9 aa, synthetic construct
  source 1..9: note = Seed: LVVVGARGV (KRAS G12R)
IVVIGQRGH

SEQ ID NO: 21098 - protein, 9 aa, synthetic construct
  source 1..9: note = Seed: LVVVGARGV (KRAS G12R)
IVVIGQRGI

SEQ ID NO: 21099 - protein, 9 aa, synthetic construct
  source 1..9: note = Seed: LVVVGARGV (KRAS G12R)
IVVIGQRGK

SEQ ID NO: 21100 - protein, 9 aa, synthetic construct
  source 1..9: note = Seed: LVVVGARGV (KRAS G12R)
IVVIGQRGL

SEQ ID NO: 21101 - protein, 9 aa, synthetic construct
  source 1..9: note = Seed: LVVVGARGV (KRAS G12R)
IVVIGQRGM

SEQ ID NO: 21102 - protein, 9 aa, synthetic construct
  source 1..9: note = Seed: LVVVGARGV (KRAS G12R)
IVVIGQRGQ

SEQ ID NO: 21103 - protein, 9 aa, synthetic construct
  source 1..9: note = Seed: LVVVGARGV (KRAS G12R)
IVVIGQRGR

SEQ ID NO: 21104 - protein, 9 aa, synthetic construct
  source 1..9: note = Seed: LVVVGARGV (KRAS G12R)
IVVIGQRGS

SEQ ID NO: 21105 - protein, 9 aa, synthetic construct
  source 1..9: note = Seed: LVVVGARGV (KRAS G12R)
IVVIGQRGT

SEQ ID NO: 21106 - protein, 9 aa, synthetic construct
  source 1..9: note = Seed: LVVVGARGV (KRAS G12R)
IVVIGQRGV

SEQ ID NO: 21107 - protein, 9 aa, synthetic construct
  source 1..9: note = Seed: LVVVGARGV (KRAS G12R)
IVVIGQRGY

SEQ ID NO: 21108 - protein, 9 aa, synthetic construct
  source 1..9: note = Seed: LVVVGARGV (KRAS G12R)
IVVIGRRGA

SEQ ID NO: 21109 - protein, 9 aa, synthetic construct
  source 1..9: note = Seed: LVVVGARGV (KRAS G12R)
IVVIGRRGC

SEQ ID NO: 21110 - protein, 9 aa, synthetic construct
  source 1..9: note = Seed: LVVVGARGV (KRAS G12R)
IVVIGRRGD

SEQ ID NO: 21111 - protein, 9 aa, synthetic construct
  source 1..9: note = Seed: LVVVGARGV (KRAS G12R)
IVVIGRRGE

SEQ ID NO: 21112 - protein, 9 aa, synthetic construct
  source 1..9: note = Seed: LVVVGARGV (KRAS G12R)
IVVIGRRGF

SEQ ID NO: 21113 - protein, 9 aa, synthetic construct
  source 1..9: note = Seed: LVVVGARGV (KRAS G12R)
IVVIGRRGG

SEQ ID NO: 21114 - protein, 9 aa, synthetic construct
  source 1..9: note = Seed: LVVVGARGV (KRAS G12R)
IVVIGRRGH

SEQ ID NO: 21115 - protein, 9 aa, synthetic construct
  source 1..9: note = Seed: LVVVGARGV (KRAS G12R)
IVVIGRRGI

SEQ ID NO: 21116 - protein, 9 aa, synthetic construct
  source 1..9: note = Seed: LVVVGARGV (KRAS G12R)
IVVIGRRGK

SEQ ID NO: 21117 - protein, 9 aa, synthetic construct
  source 1..9: note = Seed: LVVVGARGV (KRAS G12R)
IVVIGRRGL

SEQ ID NO: 21118 - protein, 9 aa, synthetic construct
  source 1..9: note = Seed: LVVVGARGV (KRAS G12R)
IVVIGRRGM

SEQ ID NO: 21119 - protein, 9 aa, synthetic construct
  source 1..9: note = Seed: LVVVGARGV (KRAS G12R)
IVVIGRRGN

SEQ ID NO: 21120 - protein, 9 aa, synthetic construct
  source 1..9: note = Seed: LVVVGARGV (KRAS G12R)
IVVIGRRGP

SEQ ID NO: 21121 - protein, 9 aa, synthetic construct
  source 1..9: note = Seed: LVVVGARGV (KRAS G12R)
IVVIGRRGQ

SEQ ID NO: 21122 - protein, 9 aa, synthetic construct
  source 1..9: note = Seed: LVVVGARGV (KRAS G12R)
IVVIGRRGR

SEQ ID NO: 21123 - protein, 9 aa, synthetic construct
  source 1..9: note = Seed: LVVVGARGV (KRAS G12R)
IVVIGRRGS

SEQ ID NO: 21124 - protein, 9 aa, synthetic construct
  source 1..9: note = Seed: LVVVGARGV (KRAS G12R)
IVVIGRRGT

SEQ ID NO: 21125 - protein, 9 aa, synthetic construct
  source 1..9: note = Seed: LVVVGARGV (KRAS G12R)
IVVIGRRGV

SEQ ID NO: 21126 - protein, 9 aa, synthetic construct
  source 1..9: note = Seed: LVVVGARGV (KRAS G12R)
IVVIGRRGW

SEQ ID NO: 21127 - protein, 9 aa, synthetic construct
  source 1..9: note = Seed: LVVVGARGV (KRAS G12R)
IVVIGRRGY

SEQ ID NO: 21128 - protein, 9 aa, synthetic construct
  source 1..9: note = Seed: LVVVGARGV (KRAS G12R)
IVVIGSRGA

SEQ ID NO: 21129 - protein, 9 aa, synthetic construct
  source 1..9: note = Seed: LVVVGARGV (KRAS G12R)
IVVIGSRGC

SEQ ID NO: 21130 - protein, 9 aa, synthetic construct
  source 1..9: note = Seed: LVVVGARGV (KRAS G12R)
IVVIGSRGF

SEQ ID NO: 21131 - protein, 9 aa, synthetic construct
  source 1..9: note = Seed: LVVVGARGV (KRAS G12R)
IVVIGSRGG

SEQ ID NO: 21132 - protein, 9 aa, synthetic construct
  source 1..9: note = Seed: LVVVGARGV (KRAS G12R)
IVVIGSRGH

SEQ ID NO: 21133 - protein, 9 aa, synthetic construct
  source 1..9: note = Seed: LVVVGARGV (KRAS G12R)
IVVIGSRGI

SEQ ID NO: 21134 - protein, 9 aa, synthetic construct
  source 1..9: note = Seed: LVVVGARGV (KRAS G12R)
IVVIGSRGK

SEQ ID NO: 21135 - protein, 9 aa, synthetic construct
  source 1..9: note = Seed: LVVVGARGV (KRAS G12R)
IVVIGSRGL

SEQ ID NO: 21136 - protein, 9 aa, synthetic construct
  source 1..9: note = Seed: LVVVGARGV (KRAS G12R)
IVVIGSRGM

SEQ ID NO: 21137 - protein, 9 aa, synthetic construct
  source 1..9: note = Seed: LVVVGARGV (KRAS G12R)
IVVIGSRGN

SEQ ID NO: 21138 - protein, 9 aa, synthetic construct
  source 1..9: note = Seed: LVVVGARGV (KRAS G12R)
IVVIGSRGQ

SEQ ID NO: 21139 - protein, 9 aa, synthetic construct
  source 1..9: note = Seed: LVVVGARGV (KRAS G12R)
IVVIGSRGR

SEQ ID NO: 21140 - protein, 9 aa, synthetic construct
  source 1..9: note = Seed: LVVVGARGV (KRAS G12R)
IVVIGSRGS

SEQ ID NO: 21141 - protein, 9 aa, synthetic construct
  source 1..9: note = Seed: LVVVGARGV (KRAS G12R)
IVVIGSRGT

SEQ ID NO: 21142 - protein, 9 aa, synthetic construct
  source 1..9: note = Seed: LVVVGARGV (KRAS G12R)
IVVIGSRGV

SEQ ID NO: 21143 - protein, 9 aa, synthetic construct
  source 1..9: note = Seed: LVVVGARGV (KRAS G12R)
IVVIGSRGW

SEQ ID NO: 21144 - protein, 9 aa, synthetic construct
  source 1..9: note = Seed: LVVVGARGV (KRAS G12R)
IVVIGSRGY

SEQ ID NO: 21145 - protein, 9 aa, synthetic construct
  source 1..9: note = Seed: LVVVGARGV (KRAS G12R)
IVVIGTRGA

SEQ ID NO: 21146 - protein, 9 aa, synthetic construct
  source 1..9: note = Seed: LVVVGARGV (KRAS G12R)
IVVIGTRGF

SEQ ID NO: 21147 - protein, 9 aa, synthetic construct
  source 1..9: note = Seed: LVVVGARGV (KRAS G12R)
IVVIGTRGG

SEQ ID NO: 21148 - protein, 9 aa, synthetic construct
  source 1..9: note = Seed: LVVVGARGV (KRAS G12R)
IVVIGTRGH

SEQ ID NO: 21149 - protein, 9 aa, synthetic construct
  source 1..9: note = Seed: LVVVGARGV (KRAS G12R)
IVVIGTRGI

SEQ ID NO: 21150 - protein, 9 aa, synthetic construct
  source 1..9: note = Seed: LVVVGARGV (KRAS G12R)
IVVIGTRGK

SEQ ID NO: 21151 - protein, 9 aa, synthetic construct
  source 1..9: note = Seed: LVVVGARGV (KRAS G12R)
IVVIGTRGL

SEQ ID NO: 21152 - protein, 9 aa, synthetic construct
  source 1..9: note = Seed: LVVVGARGV (KRAS G12R)
IVVIGTRGM

SEQ ID NO: 21153 - protein, 9 aa, synthetic construct
  source 1..9: note = Seed: LVVVGARGV (KRAS G12R)
IVVIGTRGN

SEQ ID NO: 21154 - protein, 9 aa, synthetic construct
  source 1..9: note = Seed: LVVVGARGV (KRAS G12R)
IVVIGTRGQ

SEQ ID NO: 21155 - protein, 9 aa, synthetic construct
  source 1..9: note = Seed: LVVVGARGV (KRAS G12R)
IVVIGTRGR

SEQ ID NO: 21156 - protein, 9 aa, synthetic construct
  source 1..9: note = Seed: LVVVGARGV (KRAS G12R)
IVVIGTRGS

SEQ ID NO: 21157 - protein, 9 aa, synthetic construct
  source 1..9: note = Seed: LVVVGARGV (KRAS G12R)
IVVIGTRGT

SEQ ID NO: 21158 - protein, 9 aa, synthetic construct
  source 1..9: note = Seed: LVVVGARGV (KRAS G12R)
IVVIGTRGV

SEQ ID NO: 21159 - protein, 9 aa, synthetic construct
  source 1..9: note = Seed: LVVVGARGV (KRAS G12R)
IVVIGTRGW

SEQ ID NO: 21160 - protein, 9 aa, synthetic construct
  source 1..9: note = Seed: LVVVGARGV (KRAS G12R)
IVVIGTRGY

SEQ ID NO: 21161 - protein, 9 aa, synthetic construct
  source 1..9: note = Seed: LVVVGARGV (KRAS G12R)
IVVIGVRGA

SEQ ID NO: 21162 - protein, 9 aa, synthetic construct
  source 1..9: note = Seed: LVVVGARGV (KRAS G12R)
IVVIGVRGF

SEQ ID NO: 21163 - protein, 9 aa, synthetic construct
  source 1..9: note = Seed: LVVVGARGV (KRAS G12R)
IVVIGVRGG

SEQ ID NO: 21164 - protein, 9 aa, synthetic construct
  source 1..9: note = Seed: LVVVGARGV (KRAS G12R)
IVVIGVRGH

SEQ ID NO: 21165 - protein, 9 aa, synthetic construct
  source 1..9: note = Seed: LVVVGARGV (KRAS G12R)
IVVIGVRGI

SEQ ID NO: 21166 - protein, 9 aa, synthetic construct
  source 1..9: note = Seed: LVVVGARGV (KRAS G12R)
IVVIGVRGK

SEQ ID NO: 21167 - protein, 9 aa, synthetic construct
  source 1..9: note = Seed: LVVVGARGV (KRAS G12R)
IVVIGVRGL

SEQ ID NO: 21168 - protein, 9 aa, synthetic construct
  source 1..9: note = Seed: LVVVGARGV (KRAS G12R)
IVVIGVRGM

SEQ ID NO: 21169 - protein, 9 aa, synthetic construct
  source 1..9: note = Seed: LVVVGARGV (KRAS G12R)
IVVIGVRGN

SEQ ID NO: 21170 - protein, 9 aa, synthetic construct
  source 1..9: note = Seed: LVVVGARGV (KRAS G12R)
IVVIGVRGQ

SEQ ID NO: 21171 - protein, 9 aa, synthetic construct
  source 1..9: note = Seed: LVVVGARGV (KRAS G12R)
IVVIGVRGR

SEQ ID NO: 21172 - protein, 9 aa, synthetic construct
  source 1..9: note = Seed: LVVVGARGV (KRAS G12R)
IVVIGVRGS

SEQ ID NO: 21173 - protein, 9 aa, synthetic construct
  source 1..9: note = Seed: LVVVGARGV (KRAS G12R)
IVVIGVRGT

SEQ ID NO: 21174 - protein, 9 aa, synthetic construct
  source 1..9: note = Seed: LVVVGARGV (KRAS G12R)
IVVIGVRGV

SEQ ID NO: 21175 - protein, 9 aa, synthetic construct
  source 1..9: note = Seed: LVVVGARGV (KRAS G12R)
IVVIGVRGY

SEQ ID NO: 21176 - protein, 9 aa, synthetic construct
  source 1..9: note = Seed: LVVVGARGV (KRAS G12R)
IVVIGWRGK

SEQ ID NO: 21177 - protein, 9 aa, synthetic construct
  source 1..9: note = Seed: LVVVGARGV (KRAS G12R)
IVVIGWRGL

SEQ ID NO: 21178 - protein, 9 aa, synthetic construct
  source 1..9: note = Seed: LVVVGARGV (KRAS G12R)
IVVIGWRGM

SEQ ID NO: 21179 - protein, 9 aa, synthetic construct
  source 1..9: note = Seed: LVVVGARGV (KRAS G12R)
IVVIGWRGR

SEQ ID NO: 21180 - protein, 9 aa, synthetic construct
  source 1..9: note = Seed: LVVVGARGV (KRAS G12R)
IVVIGWRGY

SEQ ID NO: 21181 - protein, 9 aa, synthetic construct
  source 1..9: note = Seed: LVVVGARGV (KRAS G12R)
IVVIGYRGA

SEQ ID NO: 21182 - protein, 9 aa, synthetic construct
  source 1..9: note = Seed: LVVVGARGV (KRAS G12R)
IVVIGYRGF

SEQ ID NO: 21183 - protein, 9 aa, synthetic construct
  source 1..9: note = Seed: LVVVGARGV (KRAS G12R)
IVVIGYRGI

SEQ ID NO: 21184 - protein, 9 aa, synthetic construct
  source 1..9: note = Seed: LVVVGARGV (KRAS G12R)
IVVIGYRGL

SEQ ID NO: 21185 - protein, 9 aa, synthetic construct
  source 1..9: note = Seed: LVVVGARGV (KRAS G12R)
IVVIGYRGM

SEQ ID NO: 21186 - protein, 9 aa, synthetic construct
  source 1..9: note = Seed: LVVVGARGV (KRAS G12R)
IVVIGYRGQ

SEQ ID NO: 21187 - protein, 9 aa, synthetic construct
  source 1..9: note = Seed: LVVVGARGV (KRAS G12R)
IVVIGYRGR

SEQ ID NO: 21188 - protein, 9 aa, synthetic construct
  source 1..9: note = Seed: LVVVGARGV (KRAS G12R)
IVVIGYRGS

SEQ ID NO: 21189 - protein, 9 aa, synthetic construct
  source 1..9: note = Seed: LVVVGARGV (KRAS G12R)
IVVIGYRGV

SEQ ID NO: 21190 - protein, 9 aa, synthetic construct
  source 1..9: note = Seed: LVVVGARGV (KRAS G12R)
IVVIGYRGY

SEQ ID NO: 21191 - protein, 9 aa, synthetic construct
  source 1..9: note = Seed: LVVVGARGV (KRAS G12R)
IVVKGARGA

SEQ ID NO: 21192 - protein, 9 aa, synthetic construct
  source 1..9: note = Seed: LVVVGARGV (KRAS G12R)
IVVKGARGF

SEQ ID NO: 21193 - protein, 9 aa, synthetic construct
  source 1..9: note = Seed: LVVVGARGV (KRAS G12R)
IVVKGARGG

SEQ ID NO: 21194 - protein, 9 aa, synthetic construct
  source 1..9: note = Seed: LVVVGARGV (KRAS G12R)
IVVKGARGH

SEQ ID NO: 21195 - protein, 9 aa, synthetic construct
  source 1..9: note = Seed: LVVVGARGV (KRAS G12R)
IVVKGARGI

SEQ ID NO: 21196 - protein, 9 aa, synthetic construct
  source 1..9: note = Seed: LVVVGARGV (KRAS G12R)
IVVKGARGK

SEQ ID NO: 21197 - protein, 9 aa, synthetic construct
  source 1..9: note = Seed: LVVVGARGV (KRAS G12R)
IVVKGARGL

SEQ ID NO: 21198 - protein, 9 aa, synthetic construct
  source 1..9: note = Seed: LVVVGARGV (KRAS G12R)
IVVKGARGM

SEQ ID NO: 21199 - protein, 9 aa, synthetic construct
  source 1..9: note = Seed: LVVVGARGV (KRAS G12R)
IVVKGARGQ

SEQ ID NO: 21200 - protein, 9 aa, synthetic construct
  source 1..9: note = Seed: LVVVGARGV (KRAS G12R)
IVVKGARGR

SEQ ID NO: 21201 - protein, 9 aa, synthetic construct
  source 1..9: note = Seed: LVVVGARGV (KRAS G12R)
IVVKGARGS

SEQ ID NO: 21202 - protein, 9 aa, synthetic construct
  source 1..9: note = Seed: LVVVGARGV (KRAS G12R)
IVVKGARGV

SEQ ID NO: 21203 - protein, 9 aa, synthetic construct
  source 1..9: note = Seed: LVVVGARGV (KRAS G12R)
IVVKGARGW

SEQ ID NO: 21204 - protein, 9 aa, synthetic construct
  source 1..9: note = Seed: LVVVGARGV (KRAS G12R)
IVVKGARGY

SEQ ID NO: 21205 - protein, 9 aa, synthetic construct
  source 1..9: note = Seed: LVVVGARGV (KRAS G12R)
IVVKGCRGA

SEQ ID NO: 21206 - protein, 9 aa, synthetic construct
  source 1..9: note = Seed: LVVVGARGV (KRAS G12R)
IVVKGCRGL

SEQ ID NO: 21207 - protein, 9 aa, synthetic construct
  source 1..9: note = Seed: LVVVGARGV (KRAS G12R)
IVVKGCRGR

SEQ ID NO: 21208 - protein, 9 aa, synthetic construct
  source 1..9: note = Seed: LVVVGARGV (KRAS G12R)
IVVKGCRGY

SEQ ID NO: 21209 - protein, 9 aa, synthetic construct
  source 1..9: note = Seed: LVVVGARGV (KRAS G12R)
IVVKGFRGL

SEQ ID NO: 21210 - protein, 9 aa, synthetic construct
  source 1..9: note = Seed: LVVVGARGV (KRAS G12R)
IVVKGFRGR

SEQ ID NO: 21211 - protein, 9 aa, synthetic construct
  source 1..9: note = Seed: LVVVGARGV (KRAS G12R)
IVVKGFRGS

SEQ ID NO: 21212 - protein, 9 aa, synthetic construct
  source 1..9: note = Seed: LVVVGARGV (KRAS G12R)
IVVKGGRGF

SEQ ID NO: 21213 - protein, 9 aa, synthetic construct
  source 1..9: note = Seed: LVVVGARGV (KRAS G12R)
IVVKGGRGL

SEQ ID NO: 21214 - protein, 9 aa, synthetic construct
  source 1..9: note = Seed: LVVVGARGV (KRAS G12R)
IVVKGGRGM

SEQ ID NO: 21215 - protein, 9 aa, synthetic construct
  source 1..9: note = Seed: LVVVGARGV (KRAS G12R)
IVVKGGRGR

SEQ ID NO: 21216 - protein, 9 aa, synthetic construct
  source 1..9: note = Seed: LVVVGARGV (KRAS G12R)
IVVKGHRGA

SEQ ID NO: 21217 - protein, 9 aa, synthetic construct
  source 1..9: note = Seed: LVVVGARGV (KRAS G12R)
IVVKGHRGF

SEQ ID NO: 21218 - protein, 9 aa, synthetic construct
  source 1..9: note = Seed: LVVVGARGV (KRAS G12R)
IVVKGHRGG

SEQ ID NO: 21219 - protein, 9 aa, synthetic construct
  source 1..9: note = Seed: LVVVGARGV (KRAS G12R)
IVVKGHRGH

SEQ ID NO: 21220 - protein, 9 aa, synthetic construct
  source 1..9: note = Seed: LVVVGARGV (KRAS G12R)
IVVKGHRGI

SEQ ID NO: 21221 - protein, 9 aa, synthetic construct
  source 1..9: note = Seed: LVVVGARGV (KRAS G12R)
IVVKGHRGK

SEQ ID NO: 21222 - protein, 9 aa, synthetic construct
  source 1..9: note = Seed: LVVVGARGV (KRAS G12R)
IVVKGHRGL

SEQ ID NO: 21223 - protein, 9 aa, synthetic construct
  source 1..9: note = Seed: LVVVGARGV (KRAS G12R)
IVVKGHRGM

SEQ ID NO: 21224 - protein, 9 aa, synthetic construct
  source 1..9: note = Seed: LVVVGARGV (KRAS G12R)
IVVKGHRGN

SEQ ID NO: 21225 - protein, 9 aa, synthetic construct
  source 1..9: note = Seed: LVVVGARGV (KRAS G12R)
IVVKGHRGQ

SEQ ID NO: 21226 - protein, 9 aa, synthetic construct
  source 1..9: note = Seed: LVVVGARGV (KRAS G12R)
IVVKGHRGR

SEQ ID NO: 21227 - protein, 9 aa, synthetic construct
  source 1..9: note = Seed: LVVVGARGV (KRAS G12R)
IVVKGHRGS

SEQ ID NO: 21228 - protein, 9 aa, synthetic construct
  source 1..9: note = Seed: LVVVGARGV (KRAS G12R)
IVVKGHRGT

SEQ ID NO: 21229 - protein, 9 aa, synthetic construct
  source 1..9: note = Seed: LVVVGARGV (KRAS G12R)
IVVKGHRGV

SEQ ID NO: 21230 - protein, 9 aa, synthetic construct
  source 1..9: note = Seed: LVVVGARGV (KRAS G12R)
IVVKGHRGW

SEQ ID NO: 21231 - protein, 9 aa, synthetic construct
  source 1..9: note = Seed: LVVVGARGV (KRAS G12R)
IVVKGHRGY

SEQ ID NO: 21232 - protein, 9 aa, synthetic construct
  source 1..9: note = Seed: LVVVGARGV (KRAS G12R)
IVVKGIRGA

SEQ ID NO: 21233 - protein, 9 aa, synthetic construct
  source 1..9: note = Seed: LVVVGARGV (KRAS G12R)
IVVKGIRGF

SEQ ID NO: 21234 - protein, 9 aa, synthetic construct
  source 1..9: note = Seed: LVVVGARGV (KRAS G12R)
IVVKGIRGG

SEQ ID NO: 21235 - protein, 9 aa, synthetic construct
  source 1..9: note = Seed: LVVVGARGV (KRAS G12R)
IVVKGIRGH

SEQ ID NO: 21236 - protein, 9 aa, synthetic construct
  source 1..9: note = Seed: LVVVGARGV (KRAS G12R)
IVVKGIRGI

SEQ ID NO: 21237 - protein, 9 aa, synthetic construct
  source 1..9: note = Seed: LVVVGARGV (KRAS G12R)
IVVKGIRGK

SEQ ID NO: 21238 - protein, 9 aa, synthetic construct
  source 1..9: note = Seed: LVVVGARGV (KRAS G12R)
IVVKGIRGL

SEQ ID NO: 21239 - protein, 9 aa, synthetic construct
  source 1..9: note = Seed: LVVVGARGV (KRAS G12R)
IVVKGIRGM

SEQ ID NO: 21240 - protein, 9 aa, synthetic construct
  source 1..9: note = Seed: LVVVGARGV (KRAS G12R)
IVVKGIRGN

SEQ ID NO: 21241 - protein, 9 aa, synthetic construct
  source 1..9: note = Seed: LVVVGARGV (KRAS G12R)
IVVKGIRGQ

SEQ ID NO: 21242 - protein, 9 aa, synthetic construct
  source 1..9: note = Seed: LVVVGARGV (KRAS G12R)
IVVKGIRGR

SEQ ID NO: 21243 - protein, 9 aa, synthetic construct
  source 1..9: note = Seed: LVVVGARGV (KRAS G12R)
IVVKGIRGS

SEQ ID NO: 21244 - protein, 9 aa, synthetic construct
  source 1..9: note = Seed: LVVVGARGV (KRAS G12R)
IVVKGIRGT

SEQ ID NO: 21245 - protein, 9 aa, synthetic construct
  source 1..9: note = Seed: LVVVGARGV (KRAS G12R)
IVVKGIRGV

SEQ ID NO: 21246 - protein, 9 aa, synthetic construct
  source 1..9: note = Seed: LVVVGARGV (KRAS G12R)
IVVKGIRGW

SEQ ID NO: 21247 - protein, 9 aa, synthetic construct
  source 1..9: note = Seed: LVVVGARGV (KRAS G12R)
IVVKGIRGY

SEQ ID NO: 21248 - protein, 9 aa, synthetic construct
  source 1..9: note = Seed: LVVVGARGV (KRAS G12R)
IVVKGKRGA

SEQ ID NO: 21249 - protein, 9 aa, synthetic construct
  source 1..9: note = Seed: LVVVGARGV (KRAS G12R)
IVVKGKRGC

SEQ ID NO: 21250 - protein, 9 aa, synthetic construct
  source 1..9: note = Seed: LVVVGARGV (KRAS G12R)
IVVKGKRGF

SEQ ID NO: 21251 - protein, 9 aa, synthetic construct
  source 1..9: note = Seed: LVVVGARGV (KRAS G12R)
IVVKGKRGG

SEQ ID NO: 21252 - protein, 9 aa, synthetic construct
  source 1..9: note = Seed: LVVVGARGV (KRAS G12R)
IVVKGKRGH

SEQ ID NO: 21253 - protein, 9 aa, synthetic construct
  source 1..9: note = Seed: LVVVGARGV (KRAS G12R)
IVVKGKRGI

SEQ ID NO: 21254 - protein, 9 aa, synthetic construct
  source 1..9: note = Seed: LVVVGARGV (KRAS G12R)
IVVKGKRGK

SEQ ID NO: 21255 - protein, 9 aa, synthetic construct
  source 1..9: note = Seed: LVVVGARGV (KRAS G12R)
IVVKGKRGL

SEQ ID NO: 21256 - protein, 9 aa, synthetic construct
  source 1..9: note = Seed: LVVVGARGV (KRAS G12R)
IVVKGKRGM

SEQ ID NO: 21257 - protein, 9 aa, synthetic construct
  source 1..9: note = Seed: LVVVGARGV (KRAS G12R)
IVVKGKRGN

SEQ ID NO: 21258 - protein, 9 aa, synthetic construct
  source 1..9: note = Seed: LVVVGARGV (KRAS G12R)
IVVKGKRGP

SEQ ID NO: 21259 - protein, 9 aa, synthetic construct
  source 1..9: note = Seed: LVVVGARGV (KRAS G12R)
IVVKGKRGQ

SEQ ID NO: 21260 - protein, 9 aa, synthetic construct
  source 1..9: note = Seed: LVVVGARGV (KRAS G12R)
IVVKGKRGR

SEQ ID NO: 21261 - protein, 9 aa, synthetic construct
  source 1..9: note = Seed: LVVVGARGV (KRAS G12R)
IVVKGKRGS

SEQ ID NO: 21262 - protein, 9 aa, synthetic construct
  source 1..9: note = Seed: LVVVGARGV (KRAS G12R)
IVVKGKRGT

SEQ ID NO: 21263 - protein, 9 aa, synthetic construct
  source 1..9: note = Seed: LVVVGARGV (KRAS G12R)
IVVKGKRGV

SEQ ID NO: 21264 - protein, 9 aa, synthetic construct
  source 1..9: note = Seed: LVVVGARGV (KRAS G12R)
IVVKGKRGW

SEQ ID NO: 21265 - protein, 9 aa, synthetic construct
  source 1..9: note = Seed: LVVVGARGV (KRAS G12R)
IVVKGKRGY

SEQ ID NO: 21266 - protein, 9 aa, synthetic construct
  source 1..9: note = Seed: LVVVGARGV (KRAS G12R)
IVVKGLRGA

SEQ ID NO: 21267 - protein, 9 aa, synthetic construct
  source 1..9: note = Seed: LVVVGARGV (KRAS G12R)
IVVKGLRGF

SEQ ID NO: 21268 - protein, 9 aa, synthetic construct
  source 1..9: note = Seed: LVVVGARGV (KRAS G12R)
IVVKGLRGG

SEQ ID NO: 21269 - protein, 9 aa, synthetic construct
  source 1..9: note = Seed: LVVVGARGV (KRAS G12R)
IVVKGLRGH

SEQ ID NO: 21270 - protein, 9 aa, synthetic construct
  source 1..9: note = Seed: LVVVGARGV (KRAS G12R)
IVVKGLRGI

SEQ ID NO: 21271 - protein, 9 aa, synthetic construct
  source 1..9: note = Seed: LVVVGARGV (KRAS G12R)
IVVKGLRGK

SEQ ID NO: 21272 - protein, 9 aa, synthetic construct
  source 1..9: note = Seed: LVVVGARGV (KRAS G12R)
IVVKGLRGL

SEQ ID NO: 21273 - protein, 9 aa, synthetic construct
  source 1..9: note = Seed: LVVVGARGV (KRAS G12R)
IVVKGLRGM

SEQ ID NO: 21274 - protein, 9 aa, synthetic construct
  source 1..9: note = Seed: LVVVGARGV (KRAS G12R)
IVVKGLRGN

SEQ ID NO: 21275 - protein, 9 aa, synthetic construct
  source 1..9: note = Seed: LVVVGARGV (KRAS G12R)
IVVKGLRGQ

SEQ ID NO: 21276 - protein, 9 aa, synthetic construct
  source 1..9: note = Seed: LVVVGARGV (KRAS G12R)
IVVKGLRGR

SEQ ID NO: 21277 - protein, 9 aa, synthetic construct
  source 1..9: note = Seed: LVVVGARGV (KRAS G12R)
IVVKGLRGS

SEQ ID NO: 21278 - protein, 9 aa, synthetic construct
  source 1..9: note = Seed: LVVVGARGV (KRAS G12R)
IVVKGLRGT

SEQ ID NO: 21279 - protein, 9 aa, synthetic construct
  source 1..9: note = Seed: LVVVGARGV (KRAS G12R)
IVVKGLRGV

SEQ ID NO: 21280 - protein, 9 aa, synthetic construct
  source 1..9: note = Seed: LVVVGARGV (KRAS G12R)
IVVKGLRGW

SEQ ID NO: 21281 - protein, 9 aa, synthetic construct
  source 1..9: note = Seed: LVVVGARGV (KRAS G12R)
IVVKGLRGY

SEQ ID NO: 21282 - protein, 9 aa, synthetic construct
  source 1..9: note = Seed: LVVVGARGV (KRAS G12R)
IVVKGMRGA

SEQ ID NO: 21283 - protein, 9 aa, synthetic construct
  source 1..9: note = Seed: LVVVGARGV (KRAS G12R)
IVVKGMRGF

SEQ ID NO: 21284 - protein, 9 aa, synthetic construct
  source 1..9: note = Seed: LVVVGARGV (KRAS G12R)
IVVKGMRGG

SEQ ID NO: 21285 - protein, 9 aa, synthetic construct
  source 1..9: note = Seed: LVVVGARGV (KRAS G12R)
IVVKGMRGH

SEQ ID NO: 21286 - protein, 9 aa, synthetic construct
  source 1..9: note = Seed: LVVVGARGV (KRAS G12R)
IVVKGMRGI

SEQ ID NO: 21287 - protein, 9 aa, synthetic construct
  source 1..9: note = Seed: LVVVGARGV (KRAS G12R)
IVVKGMRGK

SEQ ID NO: 21288 - protein, 9 aa, synthetic construct
  source 1..9: note = Seed: LVVVGARGV (KRAS G12R)
IVVKGMRGL

SEQ ID NO: 21289 - protein, 9 aa, synthetic construct
  source 1..9: note = Seed: LVVVGARGV (KRAS G12R)
IVVKGMRGM

SEQ ID NO: 21290 - protein, 9 aa, synthetic construct
  source 1..9: note = Seed: LVVVGARGV (KRAS G12R)
IVVKGMRGN

SEQ ID NO: 21291 - protein, 9 aa, synthetic construct
  source 1..9: note = Seed: LVVVGARGV (KRAS G12R)
IVVKGMRGQ

SEQ ID NO: 21292 - protein, 9 aa, synthetic construct
  source 1..9: note = Seed: LVVVGARGV (KRAS G12R)
IVVKGMRGR

SEQ ID NO: 21293 - protein, 9 aa, synthetic construct
  source 1..9: note = Seed: LVVVGARGV (KRAS G12R)
IVVKGMRGS

SEQ ID NO: 21294 - protein, 9 aa, synthetic construct
  source 1..9: note = Seed: LVVVGARGV (KRAS G12R)
IVVKGMRGT

SEQ ID NO: 21295 - protein, 9 aa, synthetic construct
  source 1..9: note = Seed: LVVVGARGV (KRAS G12R)
IVVKGMRGV

SEQ ID NO: 21296 - protein, 9 aa, synthetic construct
  source 1..9: note = Seed: LVVVGARGV (KRAS G12R)
IVVKGMRGY

SEQ ID NO: 21297 - protein, 9 aa, synthetic construct
  source 1..9: note = Seed: LVVVGARGV (KRAS G12R)
IVVKGNRGA

SEQ ID NO: 21298 - protein, 9 aa, synthetic construct
  source 1..9: note = Seed: LVVVGARGV (KRAS G12R)
IVVKGNRGF

SEQ ID NO: 21299 - protein, 9 aa, synthetic construct
  source 1..9: note = Seed: LVVVGARGV (KRAS G12R)
IVVKGNRGH

SEQ ID NO: 21300 - protein, 9 aa, synthetic construct
  source 1..9: note = Seed: LVVVGARGV (KRAS G12R)
IVVKGNRGI

SEQ ID NO: 21301 - protein, 9 aa, synthetic construct
  source 1..9: note = Seed: LVVVGARGV (KRAS G12R)
IVVKGNRGK

SEQ ID NO: 21302 - protein, 9 aa, synthetic construct
  source 1..9: note = Seed: LVVVGARGV (KRAS G12R)
IVVKGNRGL

SEQ ID NO: 21303 - protein, 9 aa, synthetic construct
  source 1..9: note = Seed: LVVVGARGV (KRAS G12R)
IVVKGNRGM

SEQ ID NO: 21304 - protein, 9 aa, synthetic construct
  source 1..9: note = Seed: LVVVGARGV (KRAS G12R)
IVVKGNRGQ

SEQ ID NO: 21305 - protein, 9 aa, synthetic construct
  source 1..9: note = Seed: LVVVGARGV (KRAS G12R)
IVVKGNRGR

SEQ ID NO: 21306 - protein, 9 aa, synthetic construct
  source 1..9: note = Seed: LVVVGARGV (KRAS G12R)
IVVKGNRGS

SEQ ID NO: 21307 - protein, 9 aa, synthetic construct
  source 1..9: note = Seed: LVVVGARGV (KRAS G12R)
IVVKGNRGV

SEQ ID NO: 21308 - protein, 9 aa, synthetic construct
  source 1..9: note = Seed: LVVVGARGV (KRAS G12R)
IVVKGNRGY

SEQ ID NO: 21309 - protein, 9 aa, synthetic construct
  source 1..9: note = Seed: LVVVGARGV (KRAS G12R)
IVVKGPRGF

SEQ ID NO: 21310 - protein, 9 aa, synthetic construct
  source 1..9: note = Seed: LVVVGARGV (KRAS G12R)
IVVKGPRGI

SEQ ID NO: 21311 - protein, 9 aa, synthetic construct
  source 1..9: note = Seed: LVVVGARGV (KRAS G12R)
IVVKGPRGK

SEQ ID NO: 21312 - protein, 9 aa, synthetic construct
  source 1..9: note = Seed: LVVVGARGV (KRAS G12R)
IVVKGPRGL

SEQ ID NO: 21313 - protein, 9 aa, synthetic construct
  source 1..9: note = Seed: LVVVGARGV (KRAS G12R)
IVVKGPRGM

SEQ ID NO: 21314 - protein, 9 aa, synthetic construct
  source 1..9: note = Seed: LVVVGARGV (KRAS G12R)
IVVKGPRGR

SEQ ID NO: 21315 - protein, 9 aa, synthetic construct
  source 1..9: note = Seed: LVVVGARGV (KRAS G12R)
IVVKGPRGY

SEQ ID NO: 21316 - protein, 9 aa, synthetic construct
  source 1..9: note = Seed: LVVVGARGV (KRAS G12R)
IVVKGQRGA

SEQ ID NO: 21317 - protein, 9 aa, synthetic construct
  source 1..9: note = Seed: LVVVGARGV (KRAS G12R)
IVVKGQRGF

SEQ ID NO: 21318 - protein, 9 aa, synthetic construct
  source 1..9: note = Seed: LVVVGARGV (KRAS G12R)
IVVKGQRGH

SEQ ID NO: 21319 - protein, 9 aa, synthetic construct
  source 1..9: note = Seed: LVVVGARGV (KRAS G12R)
IVVKGQRGI

SEQ ID NO: 21320 - protein, 9 aa, synthetic construct
  source 1..9: note = Seed: LVVVGARGV (KRAS G12R)
IVVKGQRGK

SEQ ID NO: 21321 - protein, 9 aa, synthetic construct
  source 1..9: note = Seed: LVVVGARGV (KRAS G12R)
IVVKGQRGL

SEQ ID NO: 21322 - protein, 9 aa, synthetic construct
  source 1..9: note = Seed: LVVVGARGV (KRAS G12R)
IVVKGQRGM

SEQ ID NO: 21323 - protein, 9 aa, synthetic construct
  source 1..9: note = Seed: LVVVGARGV (KRAS G12R)
IVVKGQRGQ

SEQ ID NO: 21324 - protein, 9 aa, synthetic construct
  source 1..9: note = Seed: LVVVGARGV (KRAS G12R)
IVVKGQRGR

SEQ ID NO: 21325 - protein, 9 aa, synthetic construct
  source 1..9: note = Seed: LVVVGARGV (KRAS G12R)
IVVKGQRGS

SEQ ID NO: 21326 - protein, 9 aa, synthetic construct
  source 1..9: note = Seed: LVVVGARGV (KRAS G12R)
IVVKGQRGV

SEQ ID NO: 21327 - protein, 9 aa, synthetic construct
  source 1..9: note = Seed: LVVVGARGV (KRAS G12R)
IVVKGQRGY

SEQ ID NO: 21328 - protein, 9 aa, synthetic construct
  source 1..9: note = Seed: LVVVGARGV (KRAS G12R)
IVVKGRRGA

SEQ ID NO: 21329 - protein, 9 aa, synthetic construct
  source 1..9: note = Seed: LVVVGARGV (KRAS G12R)
IVVKGRRGC

SEQ ID NO: 21330 - protein, 9 aa, synthetic construct
  source 1..9: note = Seed: LVVVGARGV (KRAS G12R)
IVVKGRRGD

SEQ ID NO: 21331 - protein, 9 aa, synthetic construct
  source 1..9: note = Seed: LVVVGARGV (KRAS G12R)
IVVKGRRGE

SEQ ID NO: 21332 - protein, 9 aa, synthetic construct
  source 1..9: note = Seed: LVVVGARGV (KRAS G12R)
IVVKGRRGF

SEQ ID NO: 21333 - protein, 9 aa, synthetic construct
  source 1..9: note = Seed: LVVVGARGV (KRAS G12R)
IVVKGRRGG

SEQ ID NO: 21334 - protein, 9 aa, synthetic construct
  source 1..9: note = Seed: LVVVGARGV (KRAS G12R)
IVVKGRRGH

SEQ ID NO: 21335 - protein, 9 aa, synthetic construct
  source 1..9: note = Seed: LVVVGARGV (KRAS G12R)
IVVKGRRGI

SEQ ID NO: 21336 - protein, 9 aa, synthetic construct
  source 1..9: note = Seed: LVVVGARGV (KRAS G12R)
IVVKGRRGK

SEQ ID NO: 21337 - protein, 9 aa, synthetic construct
  source 1..9: note = Seed: LVVVGARGV (KRAS G12R)
IVVKGRRGL

SEQ ID NO: 21338 - protein, 9 aa, synthetic construct
  source 1..9: note = Seed: LVVVGARGV (KRAS G12R)
IVVKGRRGM

SEQ ID NO: 21339 - protein, 9 aa, synthetic construct
  source 1..9: note = Seed: LVVVGARGV (KRAS G12R)
IVVKGRRGN

SEQ ID NO: 21340 - protein, 9 aa, synthetic construct
  source 1..9: note = Seed: LVVVGARGV (KRAS G12R)
IVVKGRRGP

SEQ ID NO: 21341 - protein, 9 aa, synthetic construct
  source 1..9: note = Seed: LVVVGARGV (KRAS G12R)
IVVKGRRGQ

SEQ ID NO: 21342 - protein, 9 aa, synthetic construct
  source 1..9: note = Seed: LVVVGARGV (KRAS G12R)
IVVKGRRGR

SEQ ID NO: 21343 - protein, 9 aa, synthetic construct
  source 1..9: note = Seed: LVVVGARGV (KRAS G12R)
IVVKGRRGS

SEQ ID NO: 21344 - protein, 9 aa, synthetic construct
  source 1..9: note = Seed: LVVVGARGV (KRAS G12R)
IVVKGRRGT

SEQ ID NO: 21345 - protein, 9 aa, synthetic construct
  source 1..9: note = Seed: LVVVGARGV (KRAS G12R)
IVVKGRRGV

SEQ ID NO: 21346 - protein, 9 aa, synthetic construct
  source 1..9: note = Seed: LVVVGARGV (KRAS G12R)
IVVKGRRGW

SEQ ID NO: 21347 - protein, 9 aa, synthetic construct
  source 1..9: note = Seed: LVVVGARGV (KRAS G12R)
IVVKGRRGY

SEQ ID NO: 21348 - protein, 9 aa, synthetic construct
  source 1..9: note = Seed: LVVVGARGV (KRAS G12R)
IVVKGSRGA

SEQ ID NO: 21349 - protein, 9 aa, synthetic construct
  source 1..9: note = Seed: LVVVGARGV (KRAS G12R)
IVVKGSRGF

SEQ ID NO: 21350 - protein, 9 aa, synthetic construct
  source 1..9: note = Seed: LVVVGARGV (KRAS G12R)
IVVKGSRGH

SEQ ID NO: 21351 - protein, 9 aa, synthetic construct
  source 1..9: note = Seed: LVVVGARGV (KRAS G12R)
IVVKGSRGI

SEQ ID NO: 21352 - protein, 9 aa, synthetic construct
  source 1..9: note = Seed: LVVVGARGV (KRAS G12R)
IVVKGSRGK

SEQ ID NO: 21353 - protein, 9 aa, synthetic construct
  source 1..9: note = Seed: LVVVGARGV (KRAS G12R)
IVVKGSRGL

SEQ ID NO: 21354 - protein, 9 aa, synthetic construct
  source 1..9: note = Seed: LVVVGARGV (KRAS G12R)
IVVKGSRGM

SEQ ID NO: 21355 - protein, 9 aa, synthetic construct
  source 1..9: note = Seed: LVVVGARGV (KRAS G12R)
IVVKGSRGQ

SEQ ID NO: 21356 - protein, 9 aa, synthetic construct
  source 1..9: note = Seed: LVVVGARGV (KRAS G12R)
IVVKGSRGR

SEQ ID NO: 21357 - protein, 9 aa, synthetic construct
  source 1..9: note = Seed: LVVVGARGV (KRAS G12R)
IVVKGSRGS

SEQ ID NO: 21358 - protein, 9 aa, synthetic construct
  source 1..9: note = Seed: LVVVGARGV (KRAS G12R)
IVVKGSRGV

SEQ ID NO: 21359 - protein, 9 aa, synthetic construct
  source 1..9: note = Seed: LVVVGARGV (KRAS G12R)
IVVKGSRGY

SEQ ID NO: 21360 - protein, 9 aa, synthetic construct
  source 1..9: note = Seed: LVVVGARGV (KRAS G12R)
IVVKGTRGA

SEQ ID NO: 21361 - protein, 9 aa, synthetic construct
  source 1..9: note = Seed: LVVVGARGV (KRAS G12R)
IVVKGTRGF

SEQ ID NO: 21362 - protein, 9 aa, synthetic construct
  source 1..9: note = Seed: LVVVGARGV (KRAS G12R)
IVVKGTRGH

SEQ ID NO: 21363 - protein, 9 aa, synthetic construct
  source 1..9: note = Seed: LVVVGARGV (KRAS G12R)
IVVKGTRGI

SEQ ID NO: 21364 - protein, 9 aa, synthetic construct
  source 1..9: note = Seed: LVVVGARGV (KRAS G12R)
IVVKGTRGK

SEQ ID NO: 21365 - protein, 9 aa, synthetic construct
  source 1..9: note = Seed: LVVVGARGV (KRAS G12R)
IVVKGTRGL

SEQ ID NO: 21366 - protein, 9 aa, synthetic construct
  source 1..9: note = Seed: LVVVGARGV (KRAS G12R)
IVVKGTRGM

SEQ ID NO: 21367 - protein, 9 aa, synthetic construct
  source 1..9: note = Seed: LVVVGARGV (KRAS G12R)
IVVKGTRGQ

SEQ ID NO: 21368 - protein, 9 aa, synthetic construct
  source 1..9: note = Seed: LVVVGARGV (KRAS G12R)
IVVKGTRGR

SEQ ID NO: 21369 - protein, 9 aa, synthetic construct
  source 1..9: note = Seed: LVVVGARGV (KRAS G12R)
IVVKGTRGS

SEQ ID NO: 21370 - protein, 9 aa, synthetic construct
  source 1..9: note = Seed: LVVVGARGV (KRAS G12R)
IVVKGTRGV

SEQ ID NO: 21371 - protein, 9 aa, synthetic construct
  source 1..9: note = Seed: LVVVGARGV (KRAS G12R)
IVVKGTRGY

SEQ ID NO: 21372 - protein, 9 aa, synthetic construct
  source 1..9: note = Seed: LVVVGARGV (KRAS G12R)
IVVKGVRGA

SEQ ID NO: 21373 - protein, 9 aa, synthetic construct
  source 1..9: note = Seed: LVVVGARGV (KRAS G12R)
IVVKGVRGF

SEQ ID NO: 21374 - protein, 9 aa, synthetic construct
  source 1..9: note = Seed: LVVVGARGV (KRAS G12R)
IVVKGVRGG

SEQ ID NO: 21375 - protein, 9 aa, synthetic construct
  source 1..9: note = Seed: LVVVGARGV (KRAS G12R)
IVVKGVRGH

SEQ ID NO: 21376 - protein, 9 aa, synthetic construct
  source 1..9: note = Seed: LVVVGARGV (KRAS G12R)
IVVKGVRGI

SEQ ID NO: 21377 - protein, 9 aa, synthetic construct
  source 1..9: note = Seed: LVVVGARGV (KRAS G12R)
IVVKGVRGK

SEQ ID NO: 21378 - protein, 9 aa, synthetic construct
  source 1..9: note = Seed: LVVVGARGV (KRAS G12R)
IVVKGVRGL

SEQ ID NO: 21379 - protein, 9 aa, synthetic construct
  source 1..9: note = Seed: LVVVGARGV (KRAS G12R)
IVVKGVRGM

SEQ ID NO: 21380 - protein, 9 aa, synthetic construct
  source 1..9: note = Seed: LVVVGARGV (KRAS G12R)
IVVKGVRGQ

SEQ ID NO: 21381 - protein, 9 aa, synthetic construct
  source 1..9: note = Seed: LVVVGARGV (KRAS G12R)
IVVKGVRGR

SEQ ID NO: 21382 - protein, 9 aa, synthetic construct
  source 1..9: note = Seed: LVVVGARGV (KRAS G12R)
IVVKGVRGS

SEQ ID NO: 21383 - protein, 9 aa, synthetic construct
  source 1..9: note = Seed: LVVVGARGV (KRAS G12R)
IVVKGVRGT

SEQ ID NO: 21384 - protein, 9 aa, synthetic construct
  source 1..9: note = Seed: LVVVGARGV (KRAS G12R)
IVVKGVRGV

SEQ ID NO: 21385 - protein, 9 aa, synthetic construct
  source 1..9: note = Seed: LVVVGARGV (KRAS G12R)
IVVKGVRGW

SEQ ID NO: 21386 - protein, 9 aa, synthetic construct
  source 1..9: note = Seed: LVVVGARGV (KRAS G12R)
IVVKGVRGY

SEQ ID NO: 21387 - protein, 9 aa, synthetic construct
  source 1..9: note = Seed: LVVVGARGV (KRAS G12R)
IVVKGWRGR

SEQ ID NO: 21388 - protein, 9 aa, synthetic construct
  source 1..9: note = Seed: LVVVGARGV (KRAS G12R)
IVVKGWRGY

SEQ ID NO: 21389 - protein, 9 aa, synthetic construct
  source 1..9: note = Seed: LVVVGARGV (KRAS G12R)
IVVKGYRGA

SEQ ID NO: 21390 - protein, 9 aa, synthetic construct
  source 1..9: note = Seed: LVVVGARGV (KRAS G12R)
IVVKGYRGF

SEQ ID NO: 21391 - protein, 9 aa, synthetic construct
  source 1..9: note = Seed: LVVVGARGV (KRAS G12R)
IVVKGYRGQ

SEQ ID NO: 21392 - protein, 9 aa, synthetic construct
  source 1..9: note = Seed: LVVVGARGV (KRAS G12R)
IVVKGYRGR

SEQ ID NO: 21393 - protein, 9 aa, synthetic construct
  source 1..9: note = Seed: LVVVGARGV (KRAS G12R)
IVVKGYRGY

SEQ ID NO: 21394 - protein, 9 aa, synthetic construct
  source 1..9: note = Seed: LVVVGARGV (KRAS G12R)
IVVLGARGA

SEQ ID NO: 21395 - protein, 9 aa, synthetic construct
  source 1..9: note = Seed: LVVVGARGV (KRAS G12R)
IVVLGARGC

SEQ ID NO: 21396 - protein, 9 aa, synthetic construct
  source 1..9: note = Seed: LVVVGARGV (KRAS G12R)
IVVLGARGE

SEQ ID NO: 21397 - protein, 9 aa, synthetic construct
  source 1..9: note = Seed: LVVVGARGV (KRAS G12R)
IVVLGARGF

SEQ ID NO: 21398 - protein, 9 aa, synthetic construct
  source 1..9: note = Seed: LVVVGARGV (KRAS G12R)
IVVLGARGG

SEQ ID NO: 21399 - protein, 9 aa, synthetic construct
  source 1..9: note = Seed: LVVVGARGV (KRAS G12R)
IVVLGARGH

SEQ ID NO: 21400 - protein, 9 aa, synthetic construct
  source 1..9: note = Seed: LVVVGARGV (KRAS G12R)
IVVLGARGI

SEQ ID NO: 21401 - protein, 9 aa, synthetic construct
  source 1..9: note = Seed: LVVVGARGV (KRAS G12R)
IVVLGARGK

SEQ ID NO: 21402 - protein, 9 aa, synthetic construct
  source 1..9: note = Seed: LVVVGARGV (KRAS G12R)
IVVLGARGL

SEQ ID NO: 21403 - protein, 9 aa, synthetic construct
  source 1..9: note = Seed: LVVVGARGV (KRAS G12R)
IVVLGARGM

SEQ ID NO: 21404 - protein, 9 aa, synthetic construct
  source 1..9: note = Seed: LVVVGARGV (KRAS G12R)
IVVLGARGN

SEQ ID NO: 21405 - protein, 9 aa, synthetic construct
  source 1..9: note = Seed: LVVVGARGV (KRAS G12R)
IVVLGARGP

SEQ ID NO: 21406 - protein, 9 aa, synthetic construct
  source 1..9: note = Seed: LVVVGARGV (KRAS G12R)
IVVLGARGQ

SEQ ID NO: 21407 - protein, 9 aa, synthetic construct
  source 1..9: note = Seed: LVVVGARGV (KRAS G12R)
IVVLGARGR

SEQ ID NO: 21408 - protein, 9 aa, synthetic construct
  source 1..9: note = Seed: LVVVGARGV (KRAS G12R)
IVVLGARGS

SEQ ID NO: 21409 - protein, 9 aa, synthetic construct
  source 1..9: note = Seed: LVVVGARGV (KRAS G12R)
IVVLGARGT

SEQ ID NO: 21410 - protein, 9 aa, synthetic construct
  source 1..9: note = Seed: LVVVGARGV (KRAS G12R)
IVVLGARGV

SEQ ID NO: 21411 - protein, 9 aa, synthetic construct
  source 1..9: note = Seed: LVVVGARGV (KRAS G12R)
IVVLGARGW

SEQ ID NO: 21412 - protein, 9 aa, synthetic construct
  source 1..9: note = Seed: LVVVGARGV (KRAS G12R)
IVVLGARGY

SEQ ID NO: 21413 - protein, 9 aa, synthetic construct
  source 1..9: note = Seed: LVVVGARGV (KRAS G12R)
IVVLGCRGA

SEQ ID NO: 21414 - protein, 9 aa, synthetic construct
  source 1..9: note = Seed: LVVVGARGV (KRAS G12R)
IVVLGCRGH

SEQ ID NO: 21415 - protein, 9 aa, synthetic construct
  source 1..9: note = Seed: LVVVGARGV (KRAS G12R)
IVVLGCRGI

SEQ ID NO: 21416 - protein, 9 aa, synthetic construct
  source 1..9: note = Seed: LVVVGARGV (KRAS G12R)
IVVLGCRGK

SEQ ID NO: 21417 - protein, 9 aa, synthetic construct
  source 1..9: note = Seed: LVVVGARGV (KRAS G12R)
IVVLGCRGL

SEQ ID NO: 21418 - protein, 9 aa, synthetic construct
  source 1..9: note = Seed: LVVVGARGV (KRAS G12R)
IVVLGCRGM

SEQ ID NO: 21419 - protein, 9 aa, synthetic construct
  source 1..9: note = Seed: LVVVGARGV (KRAS G12R)
IVVLGCRGR

SEQ ID NO: 21420 - protein, 9 aa, synthetic construct
  source 1..9: note = Seed: LVVVGARGV (KRAS G12R)
IVVLGCRGV

SEQ ID NO: 21421 - protein, 9 aa, synthetic construct
  source 1..9: note = Seed: LVVVGARGV (KRAS G12R)
IVVLGDRGI

SEQ ID NO: 21422 - protein, 9 aa, synthetic construct
  source 1..9: note = Seed: LVVVGARGV (KRAS G12R)
IVVLGDRGL

SEQ ID NO: 21423 - protein, 9 aa, synthetic construct
  source 1..9: note = Seed: LVVVGARGV (KRAS G12R)
IVVLGDRGV

SEQ ID NO: 21424 - protein, 9 aa, synthetic construct
  source 1..9: note = Seed: LVVVGARGV (KRAS G12R)
IVVLGERGL

SEQ ID NO: 21425 - protein, 9 aa, synthetic construct
  source 1..9: note = Seed: LVVVGARGV (KRAS G12R)
IVVLGERGR

SEQ ID NO: 21426 - protein, 9 aa, synthetic construct
  source 1..9: note = Seed: LVVVGARGV (KRAS G12R)
IVVLGFRGA

SEQ ID NO: 21427 - protein, 9 aa, synthetic construct
  source 1..9: note = Seed: LVVVGARGV (KRAS G12R)
IVVLGFRGG

SEQ ID NO: 21428 - protein, 9 aa, synthetic construct
  source 1..9: note = Seed: LVVVGARGV (KRAS G12R)
IVVLGFRGK

SEQ ID NO: 21429 - protein, 9 aa, synthetic construct
  source 1..9: note = Seed: LVVVGARGV (KRAS G12R)
IVVLGFRGM

SEQ ID NO: 21430 - protein, 9 aa, synthetic construct
  source 1..9: note = Seed: LVVVGARGV (KRAS G12R)
IVVLGFRGQ

SEQ ID NO: 21431 - protein, 9 aa, synthetic construct
  source 1..9: note = Seed: LVVVGARGV (KRAS G12R)
IVVLGFRGR

SEQ ID NO: 21432 - protein, 9 aa, synthetic construct
  source 1..9: note = Seed: LVVVGARGV (KRAS G12R)
IVVLGFRGS

SEQ ID NO: 21433 - protein, 9 aa, synthetic construct
  source 1..9: note = Seed: LVVVGARGV (KRAS G12R)
IVVLGFRGY

SEQ ID NO: 21434 - protein, 9 aa, synthetic construct
  source 1..9: note = Seed: LVVVGARGV (KRAS G12R)
IVVLGGRGA

SEQ ID NO: 21435 - protein, 9 aa, synthetic construct
  source 1..9: note = Seed: LVVVGARGV (KRAS G12R)
IVVLGGRGC

SEQ ID NO: 21436 - protein, 9 aa, synthetic construct
  source 1..9: note = Seed: LVVVGARGV (KRAS G12R)
IVVLGGRGF

SEQ ID NO: 21437 - protein, 9 aa, synthetic construct
  source 1..9: note = Seed: LVVVGARGV (KRAS G12R)
IVVLGGRGG

SEQ ID NO: 21438 - protein, 9 aa, synthetic construct
  source 1..9: note = Seed: LVVVGARGV (KRAS G12R)
IVVLGGRGH

SEQ ID NO: 21439 - protein, 9 aa, synthetic construct
  source 1..9: note = Seed: LVVVGARGV (KRAS G12R)
IVVLGGRGI

SEQ ID NO: 21440 - protein, 9 aa, synthetic construct
  source 1..9: note = Seed: LVVVGARGV (KRAS G12R)
IVVLGGRGK

SEQ ID NO: 21441 - protein, 9 aa, synthetic construct
  source 1..9: note = Seed: LVVVGARGV (KRAS G12R)
IVVLGGRGL

SEQ ID NO: 21442 - protein, 9 aa, synthetic construct
  source 1..9: note = Seed: LVVVGARGV (KRAS G12R)
IVVLGGRGM

SEQ ID NO: 21443 - protein, 9 aa, synthetic construct
  source 1..9: note = Seed: LVVVGARGV (KRAS G12R)
IVVLGGRGN

SEQ ID NO: 21444 - protein, 9 aa, synthetic construct
  source 1..9: note = Seed: LVVVGARGV (KRAS G12R)
IVVLGGRGP

SEQ ID NO: 21445 - protein, 9 aa, synthetic construct
  source 1..9: note = Seed: LVVVGARGV (KRAS G12R)
IVVLGGRGQ

SEQ ID NO: 21446 - protein, 9 aa, synthetic construct
  source 1..9: note = Seed: LVVVGARGV (KRAS G12R)
IVVLGGRGR

SEQ ID NO: 21447 - protein, 9 aa, synthetic construct
  source 1..9: note = Seed: LVVVGARGV (KRAS G12R)
IVVLGGRGS

SEQ ID NO: 21448 - protein, 9 aa, synthetic construct
  source 1..9: note = Seed: LVVVGARGV (KRAS G12R)
IVVLGGRGT

SEQ ID NO: 21449 - protein, 9 aa, synthetic construct
  source 1..9: note = Seed: LVVVGARGV (KRAS G12R)
IVVLGGRGV

SEQ ID NO: 21450 - protein, 9 aa, synthetic construct
  source 1..9: note = Seed: LVVVGARGV (KRAS G12R)
IVVLGGRGW

SEQ ID NO: 21451 - protein, 9 aa, synthetic construct
  source 1..9: note = Seed: LVVVGARGV (KRAS G12R)
IVVLGGRGY

SEQ ID NO: 21452 - protein, 9 aa, synthetic construct
  source 1..9: note = Seed: LVVVGARGV (KRAS G12R)
IVVLGHRGA

SEQ ID NO: 21453 - protein, 9 aa, synthetic construct
  source 1..9: note = Seed: LVVVGARGV (KRAS G12R)
IVVLGHRGC

SEQ ID NO: 21454 - protein, 9 aa, synthetic construct
  source 1..9: note = Seed: LVVVGARGV (KRAS G12R)
IVVLGHRGE

SEQ ID NO: 21455 - protein, 9 aa, synthetic construct
  source 1..9: note = Seed: LVVVGARGV (KRAS G12R)
IVVLGHRGF

SEQ ID NO: 21456 - protein, 9 aa, synthetic construct
  source 1..9: note = Seed: LVVVGARGV (KRAS G12R)
IVVLGHRGG

SEQ ID NO: 21457 - protein, 9 aa, synthetic construct
  source 1..9: note = Seed: LVVVGARGV (KRAS G12R)
IVVLGHRGH

SEQ ID NO: 21458 - protein, 9 aa, synthetic construct
  source 1..9: note = Seed: LVVVGARGV (KRAS G12R)
IVVLGHRGI

SEQ ID NO: 21459 - protein, 9 aa, synthetic construct
  source 1..9: note = Seed: LVVVGARGV (KRAS G12R)
IVVLGHRGK

SEQ ID NO: 21460 - protein, 9 aa, synthetic construct
  source 1..9: note = Seed: LVVVGARGV (KRAS G12R)
IVVLGHRGL

SEQ ID NO: 21461 - protein, 9 aa, synthetic construct
  source 1..9: note = Seed: LVVVGARGV (KRAS G12R)
IVVLGHRGM

SEQ ID NO: 21462 - protein, 9 aa, synthetic construct
  source 1..9: note = Seed: LVVVGARGV (KRAS G12R)
IVVLGHRGN

SEQ ID NO: 21463 - protein, 9 aa, synthetic construct
  source 1..9: note = Seed: LVVVGARGV (KRAS G12R)
IVVLGHRGP

SEQ ID NO: 21464 - protein, 9 aa, synthetic construct
  source 1..9: note = Seed: LVVVGARGV (KRAS G12R)
IVVLGHRGQ

SEQ ID NO: 21465 - protein, 9 aa, synthetic construct
  source 1..9: note = Seed: LVVVGARGV (KRAS G12R)
IVVLGHRGR

SEQ ID NO: 21466 - protein, 9 aa, synthetic construct
  source 1..9: note = Seed: LVVVGARGV (KRAS G12R)
IVVLGHRGS

SEQ ID NO: 21467 - protein, 9 aa, synthetic construct
  source 1..9: note = Seed: LVVVGARGV (KRAS G12R)
IVVLGHRGT

SEQ ID NO: 21468 - protein, 9 aa, synthetic construct
  source 1..9: note = Seed: LVVVGARGV (KRAS G12R)
IVVLGHRGV

SEQ ID NO: 21469 - protein, 9 aa, synthetic construct
  source 1..9: note = Seed: LVVVGARGV (KRAS G12R)
IVVLGHRGW

SEQ ID NO: 21470 - protein, 9 aa, synthetic construct
  source 1..9: note = Seed: LVVVGARGV (KRAS G12R)
IVVLGHRGY

SEQ ID NO: 21471 - protein, 9 aa, synthetic construct
  source 1..9: note = Seed: LVVVGARGV (KRAS G12R)
IVVLGIRGA

SEQ ID NO: 21472 - protein, 9 aa, synthetic construct
  source 1..9: note = Seed: LVVVGARGV (KRAS G12R)
IVVLGIRGF

SEQ ID NO: 21473 - protein, 9 aa, synthetic construct
  source 1..9: note = Seed: LVVVGARGV (KRAS G12R)
IVVLGIRGG

SEQ ID NO: 21474 - protein, 9 aa, synthetic construct
  source 1..9: note = Seed: LVVVGARGV (KRAS G12R)
IVVLGIRGH

SEQ ID NO: 21475 - protein, 9 aa, synthetic construct
  source 1..9: note = Seed: LVVVGARGV (KRAS G12R)
IVVLGIRGI

SEQ ID NO: 21476 - protein, 9 aa, synthetic construct
  source 1..9: note = Seed: LVVVGARGV (KRAS G12R)
IVVLGIRGK

SEQ ID NO: 21477 - protein, 9 aa, synthetic construct
  source 1..9: note = Seed: LVVVGARGV (KRAS G12R)
IVVLGIRGL

SEQ ID NO: 21478 - protein, 9 aa, synthetic construct
  source 1..9: note = Seed: LVVVGARGV (KRAS G12R)
IVVLGIRGM

SEQ ID NO: 21479 - protein, 9 aa, synthetic construct
  source 1..9: note = Seed: LVVVGARGV (KRAS G12R)
IVVLGIRGN

SEQ ID NO: 21480 - protein, 9 aa, synthetic construct
  source 1..9: note = Seed: LVVVGARGV (KRAS G12R)
IVVLGIRGQ

SEQ ID NO: 21481 - protein, 9 aa, synthetic construct
  source 1..9: note = Seed: LVVVGARGV (KRAS G12R)
IVVLGIRGR

SEQ ID NO: 21482 - protein, 9 aa, synthetic construct
  source 1..9: note = Seed: LVVVGARGV (KRAS G12R)
IVVLGIRGS

SEQ ID NO: 21483 - protein, 9 aa, synthetic construct
  source 1..9: note = Seed: LVVVGARGV (KRAS G12R)
IVVLGIRGT

SEQ ID NO: 21484 - protein, 9 aa, synthetic construct
  source 1..9: note = Seed: LVVVGARGV (KRAS G12R)
IVVLGIRGV

SEQ ID NO: 21485 - protein, 9 aa, synthetic construct
  source 1..9: note = Seed: LVVVGARGV (KRAS G12R)
IVVLGIRGW

SEQ ID NO: 21486 - protein, 9 aa, synthetic construct
  source 1..9: note = Seed: LVVVGARGV (KRAS G12R)
IVVLGIRGY

SEQ ID NO: 21487 - protein, 9 aa, synthetic construct
  source 1..9: note = Seed: LVVVGARGV (KRAS G12R)
IVVLGKRGA

SEQ ID NO: 21488 - protein, 9 aa, synthetic construct
  source 1..9: note = Seed: LVVVGARGV (KRAS G12R)
IVVLGKRGC

SEQ ID NO: 21489 - protein, 9 aa, synthetic construct
  source 1..9: note = Seed: LVVVGARGV (KRAS G12R)
IVVLGKRGD

SEQ ID NO: 21490 - protein, 9 aa, synthetic construct
  source 1..9: note = Seed: LVVVGARGV (KRAS G12R)
IVVLGKRGE

SEQ ID NO: 21491 - protein, 9 aa, synthetic construct
  source 1..9: note = Seed: LVVVGARGV (KRAS G12R)
IVVLGKRGF

SEQ ID NO: 21492 - protein, 9 aa, synthetic construct
  source 1..9: note = Seed: LVVVGARGV (KRAS G12R)
IVVLGKRGG

SEQ ID NO: 21493 - protein, 9 aa, synthetic construct
  source 1..9: note = Seed: LVVVGARGV (KRAS G12R)
IVVLGKRGH

SEQ ID NO: 21494 - protein, 9 aa, synthetic construct
  source 1..9: note = Seed: LVVVGARGV (KRAS G12R)
IVVLGKRGI

SEQ ID NO: 21495 - protein, 9 aa, synthetic construct
  source 1..9: note = Seed: LVVVGARGV (KRAS G12R)
IVVLGKRGK

SEQ ID NO: 21496 - protein, 9 aa, synthetic construct
  source 1..9: note = Seed: LVVVGARGV (KRAS G12R)
IVVLGKRGL

SEQ ID NO: 21497 - protein, 9 aa, synthetic construct
  source 1..9: note = Seed: LVVVGARGV (KRAS G12R)
IVVLGKRGM

SEQ ID NO: 21498 - protein, 9 aa, synthetic construct
  source 1..9: note = Seed: LVVVGARGV (KRAS G12R)
IVVLGKRGN

SEQ ID NO: 21499 - protein, 9 aa, synthetic construct
  source 1..9: note = Seed: LVVVGARGV (KRAS G12R)
IVVLGKRGP

SEQ ID NO: 21500 - protein, 9 aa, synthetic construct
  source 1..9: note = Seed: LVVVGARGV (KRAS G12R)
IVVLGKRGQ

SEQ ID NO: 21501 - protein, 9 aa, synthetic construct
  source 1..9: note = Seed: LVVVGARGV (KRAS G12R)
IVVLGKRGR

SEQ ID NO: 21502 - protein, 9 aa, synthetic construct
  source 1..9: note = Seed: LVVVGARGV (KRAS G12R)
IVVLGKRGS

SEQ ID NO: 21503 - protein, 9 aa, synthetic construct
  source 1..9: note = Seed: LVVVGARGV (KRAS G12R)
IVVLGKRGT

SEQ ID NO: 21504 - protein, 9 aa, synthetic construct
  source 1..9: note = Seed: LVVVGARGV (KRAS G12R)
IVVLGKRGV

SEQ ID NO: 21505 - protein, 9 aa, synthetic construct
  source 1..9: note = Seed: LVVVGARGV (KRAS G12R)
IVVLGKRGW

SEQ ID NO: 21506 - protein, 9 aa, synthetic construct
  source 1..9: note = Seed: LVVVGARGV (KRAS G12R)
IVVLGKRGY

SEQ ID NO: 21507 - protein, 9 aa, synthetic construct
  source 1..9: note = Seed: LVVVGARGV (KRAS G12R)
IVVLGLRGA

SEQ ID NO: 21508 - protein, 9 aa, synthetic construct
  source 1..9: note = Seed: LVVVGARGV (KRAS G12R)
IVVLGLRGF

SEQ ID NO: 21509 - protein, 9 aa, synthetic construct
  source 1..9: note = Seed: LVVVGARGV (KRAS G12R)
IVVLGLRGG

SEQ ID NO: 21510 - protein, 9 aa, synthetic construct
  source 1..9: note = Seed: LVVVGARGV (KRAS G12R)
IVVLGLRGH

SEQ ID NO: 21511 - protein, 9 aa, synthetic construct
  source 1..9: note = Seed: LVVVGARGV (KRAS G12R)
IVVLGLRGI

SEQ ID NO: 21512 - protein, 9 aa, synthetic construct
  source 1..9: note = Seed: LVVVGARGV (KRAS G12R)
IVVLGLRGK

SEQ ID NO: 21513 - protein, 9 aa, synthetic construct
  source 1..9: note = Seed: LVVVGARGV (KRAS G12R)
IVVLGLRGL

SEQ ID NO: 21514 - protein, 9 aa, synthetic construct
  source 1..9: note = Seed: LVVVGARGV (KRAS G12R)
IVVLGLRGM

SEQ ID NO: 21515 - protein, 9 aa, synthetic construct
  source 1..9: note = Seed: LVVVGARGV (KRAS G12R)
IVVLGLRGN

SEQ ID NO: 21516 - protein, 9 aa, synthetic construct
  source 1..9: note = Seed: LVVVGARGV (KRAS G12R)
IVVLGLRGQ

SEQ ID NO: 21517 - protein, 9 aa, synthetic construct
  source 1..9: note = Seed: LVVVGARGV (KRAS G12R)
IVVLGLRGR

SEQ ID NO: 21518 - protein, 9 aa, synthetic construct
  source 1..9: note = Seed: LVVVGARGV (KRAS G12R)
IVVLGLRGS

SEQ ID NO: 21519 - protein, 9 aa, synthetic construct
  source 1..9: note = Seed: LVVVGARGV (KRAS G12R)
IVVLGLRGT

SEQ ID NO: 21520 - protein, 9 aa, synthetic construct
  source 1..9: note = Seed: LVVVGARGV (KRAS G12R)
IVVLGLRGV

SEQ ID NO: 21521 - protein, 9 aa, synthetic construct
  source 1..9: note = Seed: LVVVGARGV (KRAS G12R)
IVVLGLRGY

SEQ ID NO: 21522 - protein, 9 aa, synthetic construct
  source 1..9: note = Seed: LVVVGARGV (KRAS G12R)
IVVLGMRGA

SEQ ID NO: 21523 - protein, 9 aa, synthetic construct
  source 1..9: note = Seed: LVVVGARGV (KRAS G12R)
IVVLGMRGF

SEQ ID NO: 21524 - protein, 9 aa, synthetic construct
  source 1..9: note = Seed: LVVVGARGV (KRAS G12R)
IVVLGMRGG

SEQ ID NO: 21525 - protein, 9 aa, synthetic construct
  source 1..9: note = Seed: LVVVGARGV (KRAS G12R)
IVVLGMRGH

SEQ ID NO: 21526 - protein, 9 aa, synthetic construct
  source 1..9: note = Seed: LVVVGARGV (KRAS G12R)
IVVLGMRGI

SEQ ID NO: 21527 - protein, 9 aa, synthetic construct
  source 1..9: note = Seed: LVVVGARGV (KRAS G12R)
IVVLGMRGK

SEQ ID NO: 21528 - protein, 9 aa, synthetic construct
  source 1..9: note = Seed: LVVVGARGV (KRAS G12R)
IVVLGMRGL

SEQ ID NO: 21529 - protein, 9 aa, synthetic construct
  source 1..9: note = Seed: LVVVGARGV (KRAS G12R)
IVVLGMRGM

SEQ ID NO: 21530 - protein, 9 aa, synthetic construct
  source 1..9: note = Seed: LVVVGARGV (KRAS G12R)
IVVLGMRGN

SEQ ID NO: 21531 - protein, 9 aa, synthetic construct
  source 1..9: note = Seed: LVVVGARGV (KRAS G12R)
IVVLGMRGQ

SEQ ID NO: 21532 - protein, 9 aa, synthetic construct
  source 1..9: note = Seed: LVVVGARGV (KRAS G12R)
IVVLGMRGR

SEQ ID NO: 21533 - protein, 9 aa, synthetic construct
  source 1..9: note = Seed: LVVVGARGV (KRAS G12R)
IVVLGMRGS

SEQ ID NO: 21534 - protein, 9 aa, synthetic construct
  source 1..9: note = Seed: LVVVGARGV (KRAS G12R)
IVVLGMRGT

SEQ ID NO: 21535 - protein, 9 aa, synthetic construct
  source 1..9: note = Seed: LVVVGARGV (KRAS G12R)
IVVLGMRGV

SEQ ID NO: 21536 - protein, 9 aa, synthetic construct
  source 1..9: note = Seed: LVVVGARGV (KRAS G12R)
IVVLGMRGY

SEQ ID NO: 21537 - protein, 9 aa, synthetic construct
  source 1..9: note = Seed: LVVVGARGV (KRAS G12R)
IVVLGNRGA

SEQ ID NO: 21538 - protein, 9 aa, synthetic construct
  source 1..9: note = Seed: LVVVGARGV (KRAS G12R)
IVVLGNRGC

SEQ ID NO: 21539 - protein, 9 aa, synthetic construct
  source 1..9: note = Seed: LVVVGARGV (KRAS G12R)
IVVLGNRGF

SEQ ID NO: 21540 - protein, 9 aa, synthetic construct
  source 1..9: note = Seed: LVVVGARGV (KRAS G12R)
IVVLGNRGG

SEQ ID NO: 21541 - protein, 9 aa, synthetic construct
  source 1..9: note = Seed: LVVVGARGV (KRAS G12R)
IVVLGNRGH

SEQ ID NO: 21542 - protein, 9 aa, synthetic construct
  source 1..9: note = Seed: LVVVGARGV (KRAS G12R)
IVVLGNRGI

SEQ ID NO: 21543 - protein, 9 aa, synthetic construct
  source 1..9: note = Seed: LVVVGARGV (KRAS G12R)
IVVLGNRGK

SEQ ID NO: 21544 - protein, 9 aa, synthetic construct
  source 1..9: note = Seed: LVVVGARGV (KRAS G12R)
IVVLGNRGL

SEQ ID NO: 21545 - protein, 9 aa, synthetic construct
  source 1..9: note = Seed: LVVVGARGV (KRAS G12R)
IVVLGNRGM

SEQ ID NO: 21546 - protein, 9 aa, synthetic construct
  source 1..9: note = Seed: LVVVGARGV (KRAS G12R)
IVVLGNRGN

SEQ ID NO: 21547 - protein, 9 aa, synthetic construct
  source 1..9: note = Seed: LVVVGARGV (KRAS G12R)
IVVLGNRGP

SEQ ID NO: 21548 - protein, 9 aa, synthetic construct
  source 1..9: note = Seed: LVVVGARGV (KRAS G12R)
IVVLGNRGQ

SEQ ID NO: 21549 - protein, 9 aa, synthetic construct
  source 1..9: note = Seed: LVVVGARGV (KRAS G12R)
IVVLGNRGR

SEQ ID NO: 21550 - protein, 9 aa, synthetic construct
  source 1..9: note = Seed: LVVVGARGV (KRAS G12R)
IVVLGNRGS

SEQ ID NO: 21551 - protein, 9 aa, synthetic construct
  source 1..9: note = Seed: LVVVGARGV (KRAS G12R)
IVVLGNRGT

SEQ ID NO: 21552 - protein, 9 aa, synthetic construct
  source 1..9: note = Seed: LVVVGARGV (KRAS G12R)
IVVLGNRGV

SEQ ID NO: 21553 - protein, 9 aa, synthetic construct
  source 1..9: note = Seed: LVVVGARGV (KRAS G12R)
IVVLGNRGW

SEQ ID NO: 21554 - protein, 9 aa, synthetic construct
  source 1..9: note = Seed: LVVVGARGV (KRAS G12R)
IVVLGNRGY

SEQ ID NO: 21555 - protein, 9 aa, synthetic construct
  source 1..9: note = Seed: LVVVGARGV (KRAS G12R)
IVVLGPRGA

SEQ ID NO: 21556 - protein, 9 aa, synthetic construct
  source 1..9: note = Seed: LVVVGARGV (KRAS G12R)
IVVLGPRGC

SEQ ID NO: 21557 - protein, 9 aa, synthetic construct
  source 1..9: note = Seed: LVVVGARGV (KRAS G12R)
IVVLGPRGF

SEQ ID NO: 21558 - protein, 9 aa, synthetic construct
  source 1..9: note = Seed: LVVVGARGV (KRAS G12R)
IVVLGPRGG

SEQ ID NO: 21559 - protein, 9 aa, synthetic construct
  source 1..9: note = Seed: LVVVGARGV (KRAS G12R)
IVVLGPRGH

SEQ ID NO: 21560 - protein, 9 aa, synthetic construct
  source 1..9: note = Seed: LVVVGARGV (KRAS G12R)
IVVLGPRGI

SEQ ID NO: 21561 - protein, 9 aa, synthetic construct
  source 1..9: note = Seed: LVVVGARGV (KRAS G12R)
IVVLGPRGK

SEQ ID NO: 21562 - protein, 9 aa, synthetic construct
  source 1..9: note = Seed: LVVVGARGV (KRAS G12R)
IVVLGPRGL

SEQ ID NO: 21563 - protein, 9 aa, synthetic construct
  source 1..9: note = Seed: LVVVGARGV (KRAS G12R)
IVVLGPRGM

SEQ ID NO: 21564 - protein, 9 aa, synthetic construct
  source 1..9: note = Seed: LVVVGARGV (KRAS G12R)
IVVLGPRGN

SEQ ID NO: 21565 - protein, 9 aa, synthetic construct
  source 1..9: note = Seed: LVVVGARGV (KRAS G12R)
IVVLGPRGP

SEQ ID NO: 21566 - protein, 9 aa, synthetic construct
  source 1..9: note = Seed: LVVVGARGV (KRAS G12R)
IVVLGPRGQ

SEQ ID NO: 21567 - protein, 9 aa, synthetic construct
  source 1..9: note = Seed: LVVVGARGV (KRAS G12R)
IVVLGPRGR

SEQ ID NO: 21568 - protein, 9 aa, synthetic construct
  source 1..9: note = Seed: LVVVGARGV (KRAS G12R)
IVVLGPRGS

SEQ ID NO: 21569 - protein, 9 aa, synthetic construct
  source 1..9: note = Seed: LVVVGARGV (KRAS G12R)
IVVLGPRGT

SEQ ID NO: 21570 - protein, 9 aa, synthetic construct
  source 1..9: note = Seed: LVVVGARGV (KRAS G12R)
IVVLGPRGV

SEQ ID NO: 21571 - protein, 9 aa, synthetic construct
  source 1..9: note = Seed: LVVVGARGV (KRAS G12R)
IVVLGPRGW

SEQ ID NO: 21572 - protein, 9 aa, synthetic construct
  source 1..9: note = Seed: LVVVGARGV (KRAS G12R)
IVVLGPRGY

SEQ ID NO: 21573 - protein, 9 aa, synthetic construct
  source 1..9: note = Seed: LVVVGARGV (KRAS G12R)
IVVLGQRGA

SEQ ID NO: 21574 - protein, 9 aa, synthetic construct
  source 1..9: note = Seed: LVVVGARGV (KRAS G12R)
IVVLGQRGF

SEQ ID NO: 21575 - protein, 9 aa, synthetic construct
  source 1..9: note = Seed: LVVVGARGV (KRAS G12R)
IVVLGQRGG

SEQ ID NO: 21576 - protein, 9 aa, synthetic construct
  source 1..9: note = Seed: LVVVGARGV (KRAS G12R)
IVVLGQRGH

SEQ ID NO: 21577 - protein, 9 aa, synthetic construct
  source 1..9: note = Seed: LVVVGARGV (KRAS G12R)
IVVLGQRGI

SEQ ID NO: 21578 - protein, 9 aa, synthetic construct
  source 1..9: note = Seed: LVVVGARGV (KRAS G12R)
IVVLGQRGK

SEQ ID NO: 21579 - protein, 9 aa, synthetic construct
  source 1..9: note = Seed: LVVVGARGV (KRAS G12R)
IVVLGQRGL

SEQ ID NO: 21580 - protein, 9 aa, synthetic construct
  source 1..9: note = Seed: LVVVGARGV (KRAS G12R)
IVVLGQRGM

SEQ ID NO: 21581 - protein, 9 aa, synthetic construct
  source 1..9: note = Seed: LVVVGARGV (KRAS G12R)
IVVLGQRGN

SEQ ID NO: 21582 - protein, 9 aa, synthetic construct
  source 1..9: note = Seed: LVVVGARGV (KRAS G12R)
IVVLGQRGQ

SEQ ID NO: 21583 - protein, 9 aa, synthetic construct
  source 1..9: note = Seed: LVVVGARGV (KRAS G12R)
IVVLGQRGR

SEQ ID NO: 21584 - protein, 9 aa, synthetic construct
  source 1..9: note = Seed: LVVVGARGV (KRAS G12R)
IVVLGQRGS

SEQ ID NO: 21585 - protein, 9 aa, synthetic construct
  source 1..9: note = Seed: LVVVGARGV (KRAS G12R)
IVVLGQRGT

SEQ ID NO: 21586 - protein, 9 aa, synthetic construct
  source 1..9: note = Seed: LVVVGARGV (KRAS G12R)
IVVLGQRGV

SEQ ID NO: 21587 - protein, 9 aa, synthetic construct
  source 1..9: note = Seed: LVVVGARGV (KRAS G12R)
IVVLGQRGY

SEQ ID NO: 21588 - protein, 9 aa, synthetic construct
  source 1..9: note = Seed: LVVVGARGV (KRAS G12R)
IVVLGRRGA

SEQ ID NO: 21589 - protein, 9 aa, synthetic construct
  source 1..9: note = Seed: LVVVGARGV (KRAS G12R)
IVVLGRRGC

SEQ ID NO: 21590 - protein, 9 aa, synthetic construct
  source 1..9: note = Seed: LVVVGARGV (KRAS G12R)
IVVLGRRGD

SEQ ID NO: 21591 - protein, 9 aa, synthetic construct
  source 1..9: note = Seed: LVVVGARGV (KRAS G12R)
IVVLGRRGE

SEQ ID NO: 21592 - protein, 9 aa, synthetic construct
  source 1..9: note = Seed: LVVVGARGV (KRAS G12R)
IVVLGRRGF

SEQ ID NO: 21593 - protein, 9 aa, synthetic construct
  source 1..9: note = Seed: LVVVGARGV (KRAS G12R)
IVVLGRRGG

SEQ ID NO: 21594 - protein, 9 aa, synthetic construct
  source 1..9: note = Seed: LVVVGARGV (KRAS G12R)
IVVLGRRGH

SEQ ID NO: 21595 - protein, 9 aa, synthetic construct
  source 1..9: note = Seed: LVVVGARGV (KRAS G12R)
IVVLGRRGI

SEQ ID NO: 21596 - protein, 9 aa, synthetic construct
  source 1..9: note = Seed: LVVVGARGV (KRAS G12R)
IVVLGRRGK

SEQ ID NO: 21597 - protein, 9 aa, synthetic construct
  source 1..9: note = Seed: LVVVGARGV (KRAS G12R)
IVVLGRRGL

SEQ ID NO: 21598 - protein, 9 aa, synthetic construct
  source 1..9: note = Seed: LVVVGARGV (KRAS G12R)
IVVLGRRGM

SEQ ID NO: 21599 - protein, 9 aa, synthetic construct
  source 1..9: note = Seed: LVVVGARGV (KRAS G12R)
IVVLGRRGN

SEQ ID NO: 21600 - protein, 9 aa, synthetic construct
  source 1..9: note = Seed: LVVVGARGV (KRAS G12R)
IVVLGRRGP

SEQ ID NO: 21601 - protein, 9 aa, synthetic construct
  source 1..9: note = Seed: LVVVGARGV (KRAS G12R)
IVVLGRRGQ

SEQ ID NO: 21602 - protein, 9 aa, synthetic construct
  source 1..9: note = Seed: LVVVGARGV (KRAS G12R)
IVVLGRRGR

SEQ ID NO: 21603 - protein, 9 aa, synthetic construct
  source 1..9: note = Seed: LVVVGARGV (KRAS G12R)
IVVLGRRGS

SEQ ID NO: 21604 - protein, 9 aa, synthetic construct
  source 1..9: note = Seed: LVVVGARGV (KRAS G12R)
IVVLGRRGT

SEQ ID NO: 21605 - protein, 9 aa, synthetic construct
  source 1..9: note = Seed: LVVVGARGV (KRAS G12R)
IVVLGRRGV

SEQ ID NO: 21606 - protein, 9 aa, synthetic construct
  source 1..9: note = Seed: LVVVGARGV (KRAS G12R)
IVVLGRRGW

SEQ ID NO: 21607 - protein, 9 aa, synthetic construct
  source 1..9: note = Seed: LVVVGARGV (KRAS G12R)
IVVLGRRGY

SEQ ID NO: 21608 - protein, 9 aa, synthetic construct
  source 1..9: note = Seed: LVVVGARGV (KRAS G12R)
IVVLGSRGA

SEQ ID NO: 21609 - protein, 9 aa, synthetic construct
  source 1..9: note = Seed: LVVVGARGV (KRAS G12R)
IVVLGSRGC

SEQ ID NO: 21610 - protein, 9 aa, synthetic construct
  source 1..9: note = Seed: LVVVGARGV (KRAS G12R)
IVVLGSRGF

SEQ ID NO: 21611 - protein, 9 aa, synthetic construct
  source 1..9: note = Seed: LVVVGARGV (KRAS G12R)
IVVLGSRGG

SEQ ID NO: 21612 - protein, 9 aa, synthetic construct
  source 1..9: note = Seed: LVVVGARGV (KRAS G12R)
IVVLGSRGH

SEQ ID NO: 21613 - protein, 9 aa, synthetic construct
  source 1..9: note = Seed: LVVVGARGV (KRAS G12R)
IVVLGSRGI

SEQ ID NO: 21614 - protein, 9 aa, synthetic construct
  source 1..9: note = Seed: LVVVGARGV (KRAS G12R)
IVVLGSRGK

SEQ ID NO: 21615 - protein, 9 aa, synthetic construct
  source 1..9: note = Seed: LVVVGARGV (KRAS G12R)
IVVLGSRGL

SEQ ID NO: 21616 - protein, 9 aa, synthetic construct
  source 1..9: note = Seed: LVVVGARGV (KRAS G12R)
IVVLGSRGM

SEQ ID NO: 21617 - protein, 9 aa, synthetic construct
  source 1..9: note = Seed: LVVVGARGV (KRAS G12R)
IVVLGSRGN

SEQ ID NO: 21618 - protein, 9 aa, synthetic construct
  source 1..9: note = Seed: LVVVGARGV (KRAS G12R)
IVVLGSRGP

SEQ ID NO: 21619 - protein, 9 aa, synthetic construct
  source 1..9: note = Seed: LVVVGARGV (KRAS G12R)
IVVLGSRGQ

SEQ ID NO: 21620 - protein, 9 aa, synthetic construct
  source 1..9: note = Seed: LVVVGARGV (KRAS G12R)
IVVLGSRGR

SEQ ID NO: 21621 - protein, 9 aa, synthetic construct
  source 1..9: note = Seed: LVVVGARGV (KRAS G12R)
IVVLGSRGS

SEQ ID NO: 21622 - protein, 9 aa, synthetic construct
  source 1..9: note = Seed: LVVVGARGV (KRAS G12R)
IVVLGSRGT

SEQ ID NO: 21623 - protein, 9 aa, synthetic construct
  source 1..9: note = Seed: LVVVGARGV (KRAS G12R)
IVVLGSRGV

SEQ ID NO: 21624 - protein, 9 aa, synthetic construct
  source 1..9: note = Seed: LVVVGARGV (KRAS G12R)
IVVLGSRGW

SEQ ID NO: 21625 - protein, 9 aa, synthetic construct
  source 1..9: note = Seed: LVVVGARGV (KRAS G12R)
IVVLGSRGY

SEQ ID NO: 21626 - protein, 9 aa, synthetic construct
  source 1..9: note = Seed: LVVVGARGV (KRAS G12R)
IVVLGTRGA

SEQ ID NO: 21627 - protein, 9 aa, synthetic construct
  source 1..9: note = Seed: LVVVGARGV (KRAS G12R)
IVVLGTRGC

SEQ ID NO: 21628 - protein, 9 aa, synthetic construct
  source 1..9: note = Seed: LVVVGARGV (KRAS G12R)
IVVLGTRGF

SEQ ID NO: 21629 - protein, 9 aa, synthetic construct
  source 1..9: note = Seed: LVVVGARGV (KRAS G12R)
IVVLGTRGG

SEQ ID NO: 21630 - protein, 9 aa, synthetic construct
  source 1..9: note = Seed: LVVVGARGV (KRAS G12R)
IVVLGTRGH

SEQ ID NO: 21631 - protein, 9 aa, synthetic construct
  source 1..9: note = Seed: LVVVGARGV (KRAS G12R)
IVVLGTRGI

SEQ ID NO: 21632 - protein, 9 aa, synthetic construct
  source 1..9: note = Seed: LVVVGARGV (KRAS G12R)
IVVLGTRGK

SEQ ID NO: 21633 - protein, 9 aa, synthetic construct
  source 1..9: note = Seed: LVVVGARGV (KRAS G12R)
IVVLGTRGL

SEQ ID NO: 21634 - protein, 9 aa, synthetic construct
  source 1..9: note = Seed: LVVVGARGV (KRAS G12R)
IVVLGTRGM

SEQ ID NO: 21635 - protein, 9 aa, synthetic construct
  source 1..9: note = Seed: LVVVGARGV (KRAS G12R)
IVVLGTRGN

SEQ ID NO: 21636 - protein, 9 aa, synthetic construct
  source 1..9: note = Seed: LVVVGARGV (KRAS G12R)
IVVLGTRGP

SEQ ID NO: 21637 - protein, 9 aa, synthetic construct
  source 1..9: note = Seed: LVVVGARGV (KRAS G12R)
IVVLGTRGQ

SEQ ID NO: 21638 - protein, 9 aa, synthetic construct
  source 1..9: note = Seed: LVVVGARGV (KRAS G12R)
IVVLGTRGR

SEQ ID NO: 21639 - protein, 9 aa, synthetic construct
  source 1..9: note = Seed: LVVVGARGV (KRAS G12R)
IVVLGTRGS

SEQ ID NO: 21640 - protein, 9 aa, synthetic construct
  source 1..9: note = Seed: LVVVGARGV (KRAS G12R)
IVVLGTRGT

SEQ ID NO: 21641 - protein, 9 aa, synthetic construct
  source 1..9: note = Seed: LVVVGARGV (KRAS G12R)
IVVLGTRGV

SEQ ID NO: 21642 - protein, 9 aa, synthetic construct
  source 1..9: note = Seed: LVVVGARGV (KRAS G12R)
IVVLGTRGW

SEQ ID NO: 21643 - protein, 9 aa, synthetic construct
  source 1..9: note = Seed: LVVVGARGV (KRAS G12R)
IVVLGTRGY

SEQ ID NO: 21644 - protein, 9 aa, synthetic construct
  source 1..9: note = Seed: LVVVGARGV (KRAS G12R)
IVVLGVRGA

SEQ ID NO: 21645 - protein, 9 aa, synthetic construct
  source 1..9: note = Seed: LVVVGARGV (KRAS G12R)
IVVLGVRGC

SEQ ID NO: 21646 - protein, 9 aa, synthetic construct
  source 1..9: note = Seed: LVVVGARGV (KRAS G12R)
IVVLGVRGF

SEQ ID NO: 21647 - protein, 9 aa, synthetic construct
  source 1..9: note = Seed: LVVVGARGV (KRAS G12R)
IVVLGVRGG

SEQ ID NO: 21648 - protein, 9 aa, synthetic construct
  source 1..9: note = Seed: LVVVGARGV (KRAS G12R)
IVVLGVRGH

SEQ ID NO: 21649 - protein, 9 aa, synthetic construct
  source 1..9: note = Seed: LVVVGARGV (KRAS G12R)
IVVLGVRGI

SEQ ID NO: 21650 - protein, 9 aa, synthetic construct
  source 1..9: note = Seed: LVVVGARGV (KRAS G12R)
IVVLGVRGK

SEQ ID NO: 21651 - protein, 9 aa, synthetic construct
  source 1..9: note = Seed: LVVVGARGV (KRAS G12R)
IVVLGVRGL

SEQ ID NO: 21652 - protein, 9 aa, synthetic construct
  source 1..9: note = Seed: LVVVGARGV (KRAS G12R)
IVVLGVRGM

SEQ ID NO: 21653 - protein, 9 aa, synthetic construct
  source 1..9: note = Seed: LVVVGARGV (KRAS G12R)
IVVLGVRGN

SEQ ID NO: 21654 - protein, 9 aa, synthetic construct
  source 1..9: note = Seed: LVVVGARGV (KRAS G12R)
IVVLGVRGP

SEQ ID NO: 21655 - protein, 9 aa, synthetic construct
  source 1..9: note = Seed: LVVVGARGV (KRAS G12R)
IVVLGVRGQ

SEQ ID NO: 21656 - protein, 9 aa, synthetic construct
  source 1..9: note = Seed: LVVVGARGV (KRAS G12R)
IVVLGVRGR

SEQ ID NO: 21657 - protein, 9 aa, synthetic construct
  source 1..9: note = Seed: LVVVGARGV (KRAS G12R)
IVVLGVRGS

SEQ ID NO: 21658 - protein, 9 aa, synthetic construct
  source 1..9: note = Seed: LVVVGARGV (KRAS G12R)
IVVLGVRGT

SEQ ID NO: 21659 - protein, 9 aa, synthetic construct
  source 1..9: note = Seed: LVVVGARGV (KRAS G12R)
IVVLGVRGV

SEQ ID NO: 21660 - protein, 9 aa, synthetic construct
  source 1..9: note = Seed: LVVVGARGV (KRAS G12R)
IVVLGVRGW

SEQ ID NO: 21661 - protein, 9 aa, synthetic construct
  source 1..9: note = Seed: LVVVGARGV (KRAS G12R)
IVVLGVRGY

SEQ ID NO: 21662 - protein, 9 aa, synthetic construct
  source 1..9: note = Seed: LVVVGARGV (KRAS G12R)
IVVLGWRGA

SEQ ID NO: 21663 - protein, 9 aa, synthetic construct
  source 1..9: note = Seed: LVVVGARGV (KRAS G12R)
IVVLGWRGI

SEQ ID NO: 21664 - protein, 9 aa, synthetic construct
  source 1..9: note = Seed: LVVVGARGV (KRAS G12R)
IVVLGWRGK

SEQ ID NO: 21665 - protein, 9 aa, synthetic construct
  source 1..9: note = Seed: LVVVGARGV (KRAS G12R)
IVVLGWRGL

SEQ ID NO: 21666 - protein, 9 aa, synthetic construct
  source 1..9: note = Seed: LVVVGARGV (KRAS G12R)
IVVLGWRGM

SEQ ID NO: 21667 - protein, 9 aa, synthetic construct
  source 1..9: note = Seed: LVVVGARGV (KRAS G12R)
IVVLGWRGQ

SEQ ID NO: 21668 - protein, 9 aa, synthetic construct
  source 1..9: note = Seed: LVVVGARGV (KRAS G12R)
IVVLGWRGR

SEQ ID NO: 21669 - protein, 9 aa, synthetic construct
  source 1..9: note = Seed: LVVVGARGV (KRAS G12R)
IVVLGWRGS

SEQ ID NO: 21670 - protein, 9 aa, synthetic construct
  source 1..9: note = Seed: LVVVGARGV (KRAS G12R)
IVVLGWRGV

SEQ ID NO: 21671 - protein, 9 aa, synthetic construct
  source 1..9: note = Seed: LVVVGARGV (KRAS G12R)
IVVLGWRGY

SEQ ID NO: 21672 - protein, 9 aa, synthetic construct
  source 1..9: note = Seed: LVVVGARGV (KRAS G12R)
IVVLGYRGA

SEQ ID NO: 21673 - protein, 9 aa, synthetic construct
  source 1..9: note = Seed: LVVVGARGV (KRAS G12R)
IVVLGYRGG

SEQ ID NO: 21674 - protein, 9 aa, synthetic construct
  source 1..9: note = Seed: LVVVGARGV (KRAS G12R)
IVVLGYRGH

SEQ ID NO: 21675 - protein, 9 aa, synthetic construct
  source 1..9: note = Seed: LVVVGARGV (KRAS G12R)
IVVLGYRGI

SEQ ID NO: 21676 - protein, 9 aa, synthetic construct
  source 1..9: note = Seed: LVVVGARGV (KRAS G12R)
IVVLGYRGK

SEQ ID NO: 21677 - protein, 9 aa, synthetic construct
  source 1..9: note = Seed: LVVVGARGV (KRAS G12R)
IVVLGYRGL

SEQ ID NO: 21678 - protein, 9 aa, synthetic construct
  source 1..9: note = Seed: LVVVGARGV (KRAS G12R)
IVVLGYRGM

SEQ ID NO: 21679 - protein, 9 aa, synthetic construct
  source 1..9: note = Seed: LVVVGARGV (KRAS G12R)
IVVLGYRGQ

SEQ ID NO: 21680 - protein, 9 aa, synthetic construct
  source 1..9: note = Seed: LVVVGARGV (KRAS G12R)
IVVLGYRGR

SEQ ID NO: 21681 - protein, 9 aa, synthetic construct
  source 1..9: note = Seed: LVVVGARGV (KRAS G12R)
IVVLGYRGS

SEQ ID NO: 21682 - protein, 9 aa, synthetic construct
  source 1..9: note = Seed: LVVVGARGV (KRAS G12R)
IVVLGYRGV

SEQ ID NO: 21683 - protein, 9 aa, synthetic construct
  source 1..9: note = Seed: LVVVGARGV (KRAS G12R)
IVVLGYRGY

SEQ ID NO: 21684 - protein, 9 aa, synthetic construct
  source 1..9: note = Seed: LVVVGARGV (KRAS G12R)
IVVMGARGA

SEQ ID NO: 21685 - protein, 9 aa, synthetic construct
  source 1..9: note = Seed: LVVVGARGV (KRAS G12R)
IVVMGARGC

SEQ ID NO: 21686 - protein, 9 aa, synthetic construct
  source 1..9: note = Seed: LVVVGARGV (KRAS G12R)
IVVMGARGE

SEQ ID NO: 21687 - protein, 9 aa, synthetic construct
  source 1..9: note = Seed: LVVVGARGV (KRAS G12R)
IVVMGARGF

SEQ ID NO: 21688 - protein, 9 aa, synthetic construct
  source 1..9: note = Seed: LVVVGARGV (KRAS G12R)
IVVMGARGG

SEQ ID NO: 21689 - protein, 9 aa, synthetic construct
  source 1..9: note = Seed: LVVVGARGV (KRAS G12R)
IVVMGARGH

SEQ ID NO: 21690 - protein, 9 aa, synthetic construct
  source 1..9: note = Seed: LVVVGARGV (KRAS G12R)
IVVMGARGI

SEQ ID NO: 21691 - protein, 9 aa, synthetic construct
  source 1..9: note = Seed: LVVVGARGV (KRAS G12R)
IVVMGARGK

SEQ ID NO: 21692 - protein, 9 aa, synthetic construct
  source 1..9: note = Seed: LVVVGARGV (KRAS G12R)
IVVMGARGL

SEQ ID NO: 21693 - protein, 9 aa, synthetic construct
  source 1..9: note = Seed: LVVVGARGV (KRAS G12R)
IVVMGARGM

SEQ ID NO: 21694 - protein, 9 aa, synthetic construct
  source 1..9: note = Seed: LVVVGARGV (KRAS G12R)
IVVMGARGN

SEQ ID NO: 21695 - protein, 9 aa, synthetic construct
  source 1..9: note = Seed: LVVVGARGV (KRAS G12R)
IVVMGARGP

SEQ ID NO: 21696 - protein, 9 aa, synthetic construct
  source 1..9: note = Seed: LVVVGARGV (KRAS G12R)
IVVMGARGQ

SEQ ID NO: 21697 - protein, 9 aa, synthetic construct
  source 1..9: note = Seed: LVVVGARGV (KRAS G12R)
IVVMGARGR

SEQ ID NO: 21698 - protein, 9 aa, synthetic construct
  source 1..9: note = Seed: LVVVGARGV (KRAS G12R)
IVVMGARGS

SEQ ID NO: 21699 - protein, 9 aa, synthetic construct
  source 1..9: note = Seed: LVVVGARGV (KRAS G12R)
IVVMGARGT

SEQ ID NO: 21700 - protein, 9 aa, synthetic construct
  source 1..9: note = Seed: LVVVGARGV (KRAS G12R)
IVVMGARGV

SEQ ID NO: 21701 - protein, 9 aa, synthetic construct
  source 1..9: note = Seed: LVVVGARGV (KRAS G12R)
IVVMGARGW

SEQ ID NO: 21702 - protein, 9 aa, synthetic construct
  source 1..9: note = Seed: LVVVGARGV (KRAS G12R)
IVVMGARGY

SEQ ID NO: 21703 - protein, 9 aa, synthetic construct
  source 1..9: note = Seed: LVVVGARGV (KRAS G12R)
IVVMGCRGA

SEQ ID NO: 21704 - protein, 9 aa, synthetic construct
  source 1..9: note = Seed: LVVVGARGV (KRAS G12R)
IVVMGCRGH

SEQ ID NO: 21705 - protein, 9 aa, synthetic construct
  source 1..9: note = Seed: LVVVGARGV (KRAS G12R)
IVVMGCRGI

SEQ ID NO: 21706 - protein, 9 aa, synthetic construct
  source 1..9: note = Seed: LVVVGARGV (KRAS G12R)
IVVMGCRGK

SEQ ID NO: 21707 - protein, 9 aa, synthetic construct
  source 1..9: note = Seed: LVVVGARGV (KRAS G12R)
IVVMGCRGL

SEQ ID NO: 21708 - protein, 9 aa, synthetic construct
  source 1..9: note = Seed: LVVVGARGV (KRAS G12R)
IVVMGCRGM

SEQ ID NO: 21709 - protein, 9 aa, synthetic construct
  source 1..9: note = Seed: LVVVGARGV (KRAS G12R)
IVVMGCRGR

SEQ ID NO: 21710 - protein, 9 aa, synthetic construct
  source 1..9: note = Seed: LVVVGARGV (KRAS G12R)
IVVMGCRGV

SEQ ID NO: 21711 - protein, 9 aa, synthetic construct
  source 1..9: note = Seed: LVVVGARGV (KRAS G12R)
IVVMGDRGA

SEQ ID NO: 21712 - protein, 9 aa, synthetic construct
  source 1..9: note = Seed: LVVVGARGV (KRAS G12R)
IVVMGDRGI

SEQ ID NO: 21713 - protein, 9 aa, synthetic construct
  source 1..9: note = Seed: LVVVGARGV (KRAS G12R)
IVVMGDRGL

SEQ ID NO: 21714 - protein, 9 aa, synthetic construct
  source 1..9: note = Seed: LVVVGARGV (KRAS G12R)
IVVMGDRGV

SEQ ID NO: 21715 - protein, 9 aa, synthetic construct
  source 1..9: note = Seed: LVVVGARGV (KRAS G12R)
IVVMGERGL

SEQ ID NO: 21716 - protein, 9 aa, synthetic construct
  source 1..9: note = Seed: LVVVGARGV (KRAS G12R)
IVVMGERGR

SEQ ID NO: 21717 - protein, 9 aa, synthetic construct
  source 1..9: note = Seed: LVVVGARGV (KRAS G12R)
IVVMGERGV

SEQ ID NO: 21718 - protein, 9 aa, synthetic construct
  source 1..9: note = Seed: LVVVGARGV (KRAS G12R)
IVVMGFRGA

SEQ ID NO: 21719 - protein, 9 aa, synthetic construct
  source 1..9: note = Seed: LVVVGARGV (KRAS G12R)
IVVMGFRGG

SEQ ID NO: 21720 - protein, 9 aa, synthetic construct
  source 1..9: note = Seed: LVVVGARGV (KRAS G12R)
IVVMGFRGI

SEQ ID NO: 21721 - protein, 9 aa, synthetic construct
  source 1..9: note = Seed: LVVVGARGV (KRAS G12R)
IVVMGFRGK

SEQ ID NO: 21722 - protein, 9 aa, synthetic construct
  source 1..9: note = Seed: LVVVGARGV (KRAS G12R)
IVVMGFRGL

SEQ ID NO: 21723 - protein, 9 aa, synthetic construct
  source 1..9: note = Seed: LVVVGARGV (KRAS G12R)
IVVMGFRGM

SEQ ID NO: 21724 - protein, 9 aa, synthetic construct
  source 1..9: note = Seed: LVVVGARGV (KRAS G12R)
IVVMGFRGR

SEQ ID NO: 21725 - protein, 9 aa, synthetic construct
  source 1..9: note = Seed: LVVVGARGV (KRAS G12R)
IVVMGFRGS

SEQ ID NO: 21726 - protein, 9 aa, synthetic construct
  source 1..9: note = Seed: LVVVGARGV (KRAS G12R)
IVVMGFRGV

SEQ ID NO: 21727 - protein, 9 aa, synthetic construct
  source 1..9: note = Seed: LVVVGARGV (KRAS G12R)
IVVMGFRGY

SEQ ID NO: 21728 - protein, 9 aa, synthetic construct
  source 1..9: note = Seed: LVVVGARGV (KRAS G12R)
IVVMGGRGA

SEQ ID NO: 21729 - protein, 9 aa, synthetic construct
  source 1..9: note = Seed: LVVVGARGV (KRAS G12R)
IVVMGGRGC

SEQ ID NO: 21730 - protein, 9 aa, synthetic construct
  source 1..9: note = Seed: LVVVGARGV (KRAS G12R)
IVVMGGRGF

SEQ ID NO: 21731 - protein, 9 aa, synthetic construct
  source 1..9: note = Seed: LVVVGARGV (KRAS G12R)
IVVMGGRGG

SEQ ID NO: 21732 - protein, 9 aa, synthetic construct
  source 1..9: note = Seed: LVVVGARGV (KRAS G12R)
IVVMGGRGH

SEQ ID NO: 21733 - protein, 9 aa, synthetic construct
  source 1..9: note = Seed: LVVVGARGV (KRAS G12R)
IVVMGGRGI

SEQ ID NO: 21734 - protein, 9 aa, synthetic construct
  source 1..9: note = Seed: LVVVGARGV (KRAS G12R)
IVVMGGRGK

SEQ ID NO: 21735 - protein, 9 aa, synthetic construct
  source 1..9: note = Seed: LVVVGARGV (KRAS G12R)
IVVMGGRGL

SEQ ID NO: 21736 - protein, 9 aa, synthetic construct
  source 1..9: note = Seed: LVVVGARGV (KRAS G12R)
IVVMGGRGM

SEQ ID NO: 21737 - protein, 9 aa, synthetic construct
  source 1..9: note = Seed: LVVVGARGV (KRAS G12R)
IVVMGGRGN

SEQ ID NO: 21738 - protein, 9 aa, synthetic construct
  source 1..9: note = Seed: LVVVGARGV (KRAS G12R)
IVVMGGRGP

SEQ ID NO: 21739 - protein, 9 aa, synthetic construct
  source 1..9: note = Seed: LVVVGARGV (KRAS G12R)
IVVMGGRGQ

SEQ ID NO: 21740 - protein, 9 aa, synthetic construct
  source 1..9: note = Seed: LVVVGARGV (KRAS G12R)
IVVMGGRGR

SEQ ID NO: 21741 - protein, 9 aa, synthetic construct
  source 1..9: note = Seed: LVVVGARGV (KRAS G12R)
IVVMGGRGS

SEQ ID NO: 21742 - protein, 9 aa, synthetic construct
  source 1..9: note = Seed: LVVVGARGV (KRAS G12R)
IVVMGGRGT

SEQ ID NO: 21743 - protein, 9 aa, synthetic construct
  source 1..9: note = Seed: LVVVGARGV (KRAS G12R)
IVVMGGRGV

SEQ ID NO: 21744 - protein, 9 aa, synthetic construct
  source 1..9: note = Seed: LVVVGARGV (KRAS G12R)
IVVMGGRGW

SEQ ID NO: 21745 - protein, 9 aa, synthetic construct
  source 1..9: note = Seed: LVVVGARGV (KRAS G12R)
IVVMGGRGY

SEQ ID NO: 21746 - protein, 9 aa, synthetic construct
  source 1..9: note = Seed: LVVVGARGV (KRAS G12R)
IVVMGHRGA

SEQ ID NO: 21747 - protein, 9 aa, synthetic construct
  source 1..9: note = Seed: LVVVGARGV (KRAS G12R)
IVVMGHRGC

SEQ ID NO: 21748 - protein, 9 aa, synthetic construct
  source 1..9: note = Seed: LVVVGARGV (KRAS G12R)
IVVMGHRGE

SEQ ID NO: 21749 - protein, 9 aa, synthetic construct
  source 1..9: note = Seed: LVVVGARGV (KRAS G12R)
IVVMGHRGF

SEQ ID NO: 21750 - protein, 9 aa, synthetic construct
  source 1..9: note = Seed: LVVVGARGV (KRAS G12R)
IVVMGHRGG

SEQ ID NO: 21751 - protein, 9 aa, synthetic construct
  source 1..9: note = Seed: LVVVGARGV (KRAS G12R)
IVVMGHRGH

SEQ ID NO: 21752 - protein, 9 aa, synthetic construct
  source 1..9: note = Seed: LVVVGARGV (KRAS G12R)
IVVMGHRGI

SEQ ID NO: 21753 - protein, 9 aa, synthetic construct
  source 1..9: note = Seed: LVVVGARGV (KRAS G12R)
IVVMGHRGK

SEQ ID NO: 21754 - protein, 9 aa, synthetic construct
  source 1..9: note = Seed: LVVVGARGV (KRAS G12R)
IVVMGHRGL

SEQ ID NO: 21755 - protein, 9 aa, synthetic construct
  source 1..9: note = Seed: LVVVGARGV (KRAS G12R)
IVVMGHRGM

SEQ ID NO: 21756 - protein, 9 aa, synthetic construct
  source 1..9: note = Seed: LVVVGARGV (KRAS G12R)
IVVMGHRGN

SEQ ID NO: 21757 - protein, 9 aa, synthetic construct
  source 1..9: note = Seed: LVVVGARGV (KRAS G12R)
IVVMGHRGP

SEQ ID NO: 21758 - protein, 9 aa, synthetic construct
  source 1..9: note = Seed: LVVVGARGV (KRAS G12R)
IVVMGHRGQ

SEQ ID NO: 21759 - protein, 9 aa, synthetic construct
  source 1..9: note = Seed: LVVVGARGV (KRAS G12R)
IVVMGHRGR

SEQ ID NO: 21760 - protein, 9 aa, synthetic construct
  source 1..9: note = Seed: LVVVGARGV (KRAS G12R)
IVVMGHRGS

SEQ ID NO: 21761 - protein, 9 aa, synthetic construct
  source 1..9: note = Seed: LVVVGARGV (KRAS G12R)
IVVMGHRGT

SEQ ID NO: 21762 - protein, 9 aa, synthetic construct
  source 1..9: note = Seed: LVVVGARGV (KRAS G12R)
IVVMGHRGV

SEQ ID NO: 21763 - protein, 9 aa, synthetic construct
  source 1..9: note = Seed: LVVVGARGV (KRAS G12R)
IVVMGHRGW

SEQ ID NO: 21764 - protein, 9 aa, synthetic construct
  source 1..9: note = Seed: LVVVGARGV (KRAS G12R)
IVVMGHRGY

SEQ ID NO: 21765 - protein, 9 aa, synthetic construct
  source 1..9: note = Seed: LVVVGARGV (KRAS G12R)
IVVMGIRGA

SEQ ID NO: 21766 - protein, 9 aa, synthetic construct
  source 1..9: note = Seed: LVVVGARGV (KRAS G12R)
IVVMGIRGF

SEQ ID NO: 21767 - protein, 9 aa, synthetic construct
  source 1..9: note = Seed: LVVVGARGV (KRAS G12R)
IVVMGIRGG

SEQ ID NO: 21768 - protein, 9 aa, synthetic construct
  source 1..9: note = Seed: LVVVGARGV (KRAS G12R)
IVVMGIRGH

SEQ ID NO: 21769 - protein, 9 aa, synthetic construct
  source 1..9: note = Seed: LVVVGARGV (KRAS G12R)
IVVMGIRGI

SEQ ID NO: 21770 - protein, 9 aa, synthetic construct
  source 1..9: note = Seed: LVVVGARGV (KRAS G12R)
IVVMGIRGK

SEQ ID NO: 21771 - protein, 9 aa, synthetic construct
  source 1..9: note = Seed: LVVVGARGV (KRAS G12R)
IVVMGIRGL

SEQ ID NO: 21772 - protein, 9 aa, synthetic construct
  source 1..9: note = Seed: LVVVGARGV (KRAS G12R)
IVVMGIRGM

SEQ ID NO: 21773 - protein, 9 aa, synthetic construct
  source 1..9: note = Seed: LVVVGARGV (KRAS G12R)
IVVMGIRGN

SEQ ID NO: 21774 - protein, 9 aa, synthetic construct
  source 1..9: note = Seed: LVVVGARGV (KRAS G12R)
IVVMGIRGQ

SEQ ID NO: 21775 - protein, 9 aa, synthetic construct
  source 1..9: note = Seed: LVVVGARGV (KRAS G12R)
IVVMGIRGR

SEQ ID NO: 21776 - protein, 9 aa, synthetic construct
  source 1..9: note = Seed: LVVVGARGV (KRAS G12R)
IVVMGIRGS

SEQ ID NO: 21777 - protein, 9 aa, synthetic construct
  source 1..9: note = Seed: LVVVGARGV (KRAS G12R)
IVVMGIRGT

SEQ ID NO: 21778 - protein, 9 aa, synthetic construct
  source 1..9: note = Seed: LVVVGARGV (KRAS G12R)
IVVMGIRGV

SEQ ID NO: 21779 - protein, 9 aa, synthetic construct
  source 1..9: note = Seed: LVVVGARGV (KRAS G12R)
IVVMGIRGY

SEQ ID NO: 21780 - protein, 9 aa, synthetic construct
  source 1..9: note = Seed: LVVVGARGV (KRAS G12R)
IVVMGKRGA

SEQ ID NO: 21781 - protein, 9 aa, synthetic construct
  source 1..9: note = Seed: LVVVGARGV (KRAS G12R)
IVVMGKRGC

SEQ ID NO: 21782 - protein, 9 aa, synthetic construct
  source 1..9: note = Seed: LVVVGARGV (KRAS G12R)
IVVMGKRGD

SEQ ID NO: 21783 - protein, 9 aa, synthetic construct
  source 1..9: note = Seed: LVVVGARGV (KRAS G12R)
IVVMGKRGE

SEQ ID NO: 21784 - protein, 9 aa, synthetic construct
  source 1..9: note = Seed: LVVVGARGV (KRAS G12R)
IVVMGKRGF

SEQ ID NO: 21785 - protein, 9 aa, synthetic construct
  source 1..9: note = Seed: LVVVGARGV (KRAS G12R)
IVVMGKRGG

SEQ ID NO: 21786 - protein, 9 aa, synthetic construct
  source 1..9: note = Seed: LVVVGARGV (KRAS G12R)
IVVMGKRGH

SEQ ID NO: 21787 - protein, 9 aa, synthetic construct
  source 1..9: note = Seed: LVVVGARGV (KRAS G12R)
IVVMGKRGI

SEQ ID NO: 21788 - protein, 9 aa, synthetic construct
  source 1..9: note = Seed: LVVVGARGV (KRAS G12R)
IVVMGKRGK

SEQ ID NO: 21789 - protein, 9 aa, synthetic construct
  source 1..9: note = Seed: LVVVGARGV (KRAS G12R)
IVVMGKRGL

SEQ ID NO: 21790 - protein, 9 aa, synthetic construct
  source 1..9: note = Seed: LVVVGARGV (KRAS G12R)
IVVMGKRGM

SEQ ID NO: 21791 - protein, 9 aa, synthetic construct
  source 1..9: note = Seed: LVVVGARGV (KRAS G12R)
IVVMGKRGN

SEQ ID NO: 21792 - protein, 9 aa, synthetic construct
  source 1..9: note = Seed: LVVVGARGV (KRAS G12R)
IVVMGKRGP

SEQ ID NO: 21793 - protein, 9 aa, synthetic construct
  source 1..9: note = Seed: LVVVGARGV (KRAS G12R)
IVVMGKRGQ

SEQ ID NO: 21794 - protein, 9 aa, synthetic construct
  source 1..9: note = Seed: LVVVGARGV (KRAS G12R)
IVVMGKRGR

SEQ ID NO: 21795 - protein, 9 aa, synthetic construct
  source 1..9: note = Seed: LVVVGARGV (KRAS G12R)
IVVMGKRGS

SEQ ID NO: 21796 - protein, 9 aa, synthetic construct
  source 1..9: note = Seed: LVVVGARGV (KRAS G12R)
IVVMGKRGT

SEQ ID NO: 21797 - protein, 9 aa, synthetic construct
  source 1..9: note = Seed: LVVVGARGV (KRAS G12R)
IVVMGKRGV

SEQ ID NO: 21798 - protein, 9 aa, synthetic construct
  source 1..9: note = Seed: LVVVGARGV (KRAS G12R)
IVVMGKRGW

SEQ ID NO: 21799 - protein, 9 aa, synthetic construct
  source 1..9: note = Seed: LVVVGARGV (KRAS G12R)
IVVMGKRGY

SEQ ID NO: 21800 - protein, 9 aa, synthetic construct
  source 1..9: note = Seed: LVVVGARGV (KRAS G12R)
IVVMGLRGA

SEQ ID NO: 21801 - protein, 9 aa, synthetic construct
  source 1..9: note = Seed: LVVVGARGV (KRAS G12R)
IVVMGLRGC

SEQ ID NO: 21802 - protein, 9 aa, synthetic construct
  source 1..9: note = Seed: LVVVGARGV (KRAS G12R)
IVVMGLRGF

SEQ ID NO: 21803 - protein, 9 aa, synthetic construct
  source 1..9: note = Seed: LVVVGARGV (KRAS G12R)
IVVMGLRGG

SEQ ID NO: 21804 - protein, 9 aa, synthetic construct
  source 1..9: note = Seed: LVVVGARGV (KRAS G12R)
IVVMGLRGH

SEQ ID NO: 21805 - protein, 9 aa, synthetic construct
  source 1..9: note = Seed: LVVVGARGV (KRAS G12R)
IVVMGLRGI

SEQ ID NO: 21806 - protein, 9 aa, synthetic construct
  source 1..9: note = Seed: LVVVGARGV (KRAS G12R)
IVVMGLRGK

SEQ ID NO: 21807 - protein, 9 aa, synthetic construct
  source 1..9: note = Seed: LVVVGARGV (KRAS G12R)
IVVMGLRGL

SEQ ID NO: 21808 - protein, 9 aa, synthetic construct
  source 1..9: note = Seed: LVVVGARGV (KRAS G12R)
IVVMGLRGM

SEQ ID NO: 21809 - protein, 9 aa, synthetic construct
  source 1..9: note = Seed: LVVVGARGV (KRAS G12R)
IVVMGLRGN

SEQ ID NO: 21810 - protein, 9 aa, synthetic construct
  source 1..9: note = Seed: LVVVGARGV (KRAS G12R)
IVVMGLRGQ

SEQ ID NO: 21811 - protein, 9 aa, synthetic construct
  source 1..9: note = Seed: LVVVGARGV (KRAS G12R)
IVVMGLRGR

SEQ ID NO: 21812 - protein, 9 aa, synthetic construct
  source 1..9: note = Seed: LVVVGARGV (KRAS G12R)
IVVMGLRGS

SEQ ID NO: 21813 - protein, 9 aa, synthetic construct
  source 1..9: note = Seed: LVVVGARGV (KRAS G12R)
IVVMGLRGT

SEQ ID NO: 21814 - protein, 9 aa, synthetic construct
  source 1..9: note = Seed: LVVVGARGV (KRAS G12R)
IVVMGLRGV

SEQ ID NO: 21815 - protein, 9 aa, synthetic construct
  source 1..9: note = Seed: LVVVGARGV (KRAS G12R)
IVVMGLRGY

SEQ ID NO: 21816 - protein, 9 aa, synthetic construct
  source 1..9: note = Seed: LVVVGARGV (KRAS G12R)
IVVMGMRGA

SEQ ID NO: 21817 - protein, 9 aa, synthetic construct
  source 1..9: note = Seed: LVVVGARGV (KRAS G12R)
IVVMGMRGC

SEQ ID NO: 21818 - protein, 9 aa, synthetic construct
  source 1..9: note = Seed: LVVVGARGV (KRAS G12R)
IVVMGMRGF

SEQ ID NO: 21819 - protein, 9 aa, synthetic construct
  source 1..9: note = Seed: LVVVGARGV (KRAS G12R)
IVVMGMRGG

SEQ ID NO: 21820 - protein, 9 aa, synthetic construct
  source 1..9: note = Seed: LVVVGARGV (KRAS G12R)
IVVMGMRGH

SEQ ID NO: 21821 - protein, 9 aa, synthetic construct
  source 1..9: note = Seed: LVVVGARGV (KRAS G12R)
IVVMGMRGI

SEQ ID NO: 21822 - protein, 9 aa, synthetic construct
  source 1..9: note = Seed: LVVVGARGV (KRAS G12R)
IVVMGMRGK

SEQ ID NO: 21823 - protein, 9 aa, synthetic construct
  source 1..9: note = Seed: LVVVGARGV (KRAS G12R)
IVVMGMRGL

SEQ ID NO: 21824 - protein, 9 aa, synthetic construct
  source 1..9: note = Seed: LVVVGARGV (KRAS G12R)
IVVMGMRGM

SEQ ID NO: 21825 - protein, 9 aa, synthetic construct
  source 1..9: note = Seed: LVVVGARGV (KRAS G12R)
IVVMGMRGN

SEQ ID NO: 21826 - protein, 9 aa, synthetic construct
  source 1..9: note = Seed: LVVVGARGV (KRAS G12R)
IVVMGMRGQ

SEQ ID NO: 21827 - protein, 9 aa, synthetic construct
  source 1..9: note = Seed: LVVVGARGV (KRAS G12R)
IVVMGMRGR

SEQ ID NO: 21828 - protein, 9 aa, synthetic construct
  source 1..9: note = Seed: LVVVGARGV (KRAS G12R)
IVVMGMRGS

SEQ ID NO: 21829 - protein, 9 aa, synthetic construct
  source 1..9: note = Seed: LVVVGARGV (KRAS G12R)
IVVMGMRGT

SEQ ID NO: 21830 - protein, 9 aa, synthetic construct
  source 1..9: note = Seed: LVVVGARGV (KRAS G12R)
IVVMGMRGV

SEQ ID NO: 21831 - protein, 9 aa, synthetic construct
  source 1..9: note = Seed: LVVVGARGV (KRAS G12R)
IVVMGMRGY

SEQ ID NO: 21832 - protein, 9 aa, synthetic construct
  source 1..9: note = Seed: LVVVGARGV (KRAS G12R)
IVVMGNRGA

SEQ ID NO: 21833 - protein, 9 aa, synthetic construct
  source 1..9: note = Seed: LVVVGARGV (KRAS G12R)
IVVMGNRGC

SEQ ID NO: 21834 - protein, 9 aa, synthetic construct
  source 1..9: note = Seed: LVVVGARGV (KRAS G12R)
IVVMGNRGF

SEQ ID NO: 21835 - protein, 9 aa, synthetic construct
  source 1..9: note = Seed: LVVVGARGV (KRAS G12R)
IVVMGNRGG

SEQ ID NO: 21836 - protein, 9 aa, synthetic construct
  source 1..9: note = Seed: LVVVGARGV (KRAS G12R)
IVVMGNRGH

SEQ ID NO: 21837 - protein, 9 aa, synthetic construct
  source 1..9: note = Seed: LVVVGARGV (KRAS G12R)
IVVMGNRGI

SEQ ID NO: 21838 - protein, 9 aa, synthetic construct
  source 1..9: note = Seed: LVVVGARGV (KRAS G12R)
IVVMGNRGK

SEQ ID NO: 21839 - protein, 9 aa, synthetic construct
  source 1..9: note = Seed: LVVVGARGV (KRAS G12R)
IVVMGNRGL

SEQ ID NO: 21840 - protein, 9 aa, synthetic construct
  source 1..9: note = Seed: LVVVGARGV (KRAS G12R)
IVVMGNRGM

SEQ ID NO: 21841 - protein, 9 aa, synthetic construct
  source 1..9: note = Seed: LVVVGARGV (KRAS G12R)
IVVMGNRGN

SEQ ID NO: 21842 - protein, 9 aa, synthetic construct
  source 1..9: note = Seed: LVVVGARGV (KRAS G12R)
IVVMGNRGP

SEQ ID NO: 21843 - protein, 9 aa, synthetic construct
  source 1..9: note = Seed: LVVVGARGV (KRAS G12R)
IVVMGNRGQ

SEQ ID NO: 21844 - protein, 9 aa, synthetic construct
  source 1..9: note = Seed: LVVVGARGV (KRAS G12R)
IVVMGNRGR

SEQ ID NO: 21845 - protein, 9 aa, synthetic construct
  source 1..9: note = Seed: LVVVGARGV (KRAS G12R)
IVVMGNRGS

SEQ ID NO: 21846 - protein, 9 aa, synthetic construct
  source 1..9: note = Seed: LVVVGARGV (KRAS G12R)
IVVMGNRGT

SEQ ID NO: 21847 - protein, 9 aa, synthetic construct
  source 1..9: note = Seed: LVVVGARGV (KRAS G12R)
IVVMGNRGV

SEQ ID NO: 21848 - protein, 9 aa, synthetic construct
  source 1..9: note = Seed: LVVVGARGV (KRAS G12R)
IVVMGNRGW

SEQ ID NO: 21849 - protein, 9 aa, synthetic construct
  source 1..9: note = Seed: LVVVGARGV (KRAS G12R)
IVVMGNRGY

SEQ ID NO: 21850 - protein, 9 aa, synthetic construct
  source 1..9: note = Seed: LVVVGARGV (KRAS G12R)
IVVMGPRGA

SEQ ID NO: 21851 - protein, 9 aa, synthetic construct
  source 1..9: note = Seed: LVVVGARGV (KRAS G12R)
IVVMGPRGC

SEQ ID NO: 21852 - protein, 9 aa, synthetic construct
  source 1..9: note = Seed: LVVVGARGV (KRAS G12R)
IVVMGPRGF

SEQ ID NO: 21853 - protein, 9 aa, synthetic construct
  source 1..9: note = Seed: LVVVGARGV (KRAS G12R)
IVVMGPRGG

SEQ ID NO: 21854 - protein, 9 aa, synthetic construct
  source 1..9: note = Seed: LVVVGARGV (KRAS G12R)
IVVMGPRGH

SEQ ID NO: 21855 - protein, 9 aa, synthetic construct
  source 1..9: note = Seed: LVVVGARGV (KRAS G12R)
IVVMGPRGI

SEQ ID NO: 21856 - protein, 9 aa, synthetic construct
  source 1..9: note = Seed: LVVVGARGV (KRAS G12R)
IVVMGPRGK

SEQ ID NO: 21857 - protein, 9 aa, synthetic construct
  source 1..9: note = Seed: LVVVGARGV (KRAS G12R)
IVVMGPRGL

SEQ ID NO: 21858 - protein, 9 aa, synthetic construct
  source 1..9: note = Seed: LVVVGARGV (KRAS G12R)
IVVMGPRGM

SEQ ID NO: 21859 - protein, 9 aa, synthetic construct
  source 1..9: note = Seed: LVVVGARGV (KRAS G12R)
IVVMGPRGN

SEQ ID NO: 21860 - protein, 9 aa, synthetic construct
  source 1..9: note = Seed: LVVVGARGV (KRAS G12R)
IVVMGPRGP

SEQ ID NO: 21861 - protein, 9 aa, synthetic construct
  source 1..9: note = Seed: LVVVGARGV (KRAS G12R)
IVVMGPRGQ

SEQ ID NO: 21862 - protein, 9 aa, synthetic construct
  source 1..9: note = Seed: LVVVGARGV (KRAS G12R)
IVVMGPRGR

SEQ ID NO: 21863 - protein, 9 aa, synthetic construct
  source 1..9: note = Seed: LVVVGARGV (KRAS G12R)
IVVMGPRGS

SEQ ID NO: 21864 - protein, 9 aa, synthetic construct
  source 1..9: note = Seed: LVVVGARGV (KRAS G12R)
IVVMGPRGT

SEQ ID NO: 21865 - protein, 9 aa, synthetic construct
  source 1..9: note = Seed: LVVVGARGV (KRAS G12R)
IVVMGPRGV

SEQ ID NO: 21866 - protein, 9 aa, synthetic construct
  source 1..9: note = Seed: LVVVGARGV (KRAS G12R)
IVVMGPRGW

SEQ ID NO: 21867 - protein, 9 aa, synthetic construct
  source 1..9: note = Seed: LVVVGARGV (KRAS G12R)
IVVMGPRGY

SEQ ID NO: 21868 - protein, 9 aa, synthetic construct
  source 1..9: note = Seed: LVVVGARGV (KRAS G12R)
IVVMGQRGA

SEQ ID NO: 21869 - protein, 9 aa, synthetic construct
  source 1..9: note = Seed: LVVVGARGV (KRAS G12R)
IVVMGQRGF

SEQ ID NO: 21870 - protein, 9 aa, synthetic construct
  source 1..9: note = Seed: LVVVGARGV (KRAS G12R)
IVVMGQRGG

SEQ ID NO: 21871 - protein, 9 aa, synthetic construct
  source 1..9: note = Seed: LVVVGARGV (KRAS G12R)
IVVMGQRGH

SEQ ID NO: 21872 - protein, 9 aa, synthetic construct
  source 1..9: note = Seed: LVVVGARGV (KRAS G12R)
IVVMGQRGI

SEQ ID NO: 21873 - protein, 9 aa, synthetic construct
  source 1..9: note = Seed: LVVVGARGV (KRAS G12R)
IVVMGQRGK

SEQ ID NO: 21874 - protein, 9 aa, synthetic construct
  source 1..9: note = Seed: LVVVGARGV (KRAS G12R)
IVVMGQRGL

SEQ ID NO: 21875 - protein, 9 aa, synthetic construct
  source 1..9: note = Seed: LVVVGARGV (KRAS G12R)
IVVMGQRGM

SEQ ID NO: 21876 - protein, 9 aa, synthetic construct
  source 1..9: note = Seed: LVVVGARGV (KRAS G12R)
IVVMGQRGN

SEQ ID NO: 21877 - protein, 9 aa, synthetic construct
  source 1..9: note = Seed: LVVVGARGV (KRAS G12R)
IVVMGQRGQ

SEQ ID NO: 21878 - protein, 9 aa, synthetic construct
  source 1..9: note = Seed: LVVVGARGV (KRAS G12R)
IVVMGQRGR

SEQ ID NO: 21879 - protein, 9 aa, synthetic construct
  source 1..9: note = Seed: LVVVGARGV (KRAS G12R)
IVVMGQRGS

SEQ ID NO: 21880 - protein, 9 aa, synthetic construct
  source 1..9: note = Seed: LVVVGARGV (KRAS G12R)
IVVMGQRGT

SEQ ID NO: 21881 - protein, 9 aa, synthetic construct
  source 1..9: note = Seed: LVVVGARGV (KRAS G12R)
IVVMGQRGV

SEQ ID NO: 21882 - protein, 9 aa, synthetic construct
  source 1..9: note = Seed: LVVVGARGV (KRAS G12R)
IVVMGQRGW

SEQ ID NO: 21883 - protein, 9 aa, synthetic construct
  source 1..9: note = Seed: LVVVGARGV (KRAS G12R)
IVVMGQRGY

SEQ ID NO: 21884 - protein, 9 aa, synthetic construct
  source 1..9: note = Seed: LVVVGARGV (KRAS G12R)
IVVMGRRGA

SEQ ID NO: 21885 - protein, 9 aa, synthetic construct
  source 1..9: note = Seed: LVVVGARGV (KRAS G12R)
IVVMGRRGC

SEQ ID NO: 21886 - protein, 9 aa, synthetic construct
  source 1..9: note = Seed: LVVVGARGV (KRAS G12R)
IVVMGRRGD

SEQ ID NO: 21887 - protein, 9 aa, synthetic construct
  source 1..9: note = Seed: LVVVGARGV (KRAS G12R)
IVVMGRRGE

SEQ ID NO: 21888 - protein, 9 aa, synthetic construct
  source 1..9: note = Seed: LVVVGARGV (KRAS G12R)
IVVMGRRGF

SEQ ID NO: 21889 - protein, 9 aa, synthetic construct
  source 1..9: note = Seed: LVVVGARGV (KRAS G12R)
IVVMGRRGG

SEQ ID NO: 21890 - protein, 9 aa, synthetic construct
  source 1..9: note = Seed: LVVVGARGV (KRAS G12R)
IVVMGRRGH

SEQ ID NO: 21891 - protein, 9 aa, synthetic construct
  source 1..9: note = Seed: LVVVGARGV (KRAS G12R)
IVVMGRRGI

SEQ ID NO: 21892 - protein, 9 aa, synthetic construct
  source 1..9: note = Seed: LVVVGARGV (KRAS G12R)
IVVMGRRGK

SEQ ID NO: 21893 - protein, 9 aa, synthetic construct
  source 1..9: note = Seed: LVVVGARGV (KRAS G12R)
IVVMGRRGL

SEQ ID NO: 21894 - protein, 9 aa, synthetic construct
  source 1..9: note = Seed: LVVVGARGV (KRAS G12R)
IVVMGRRGM

SEQ ID NO: 21895 - protein, 9 aa, synthetic construct
  source 1..9: note = Seed: LVVVGARGV (KRAS G12R)
IVVMGRRGN

SEQ ID NO: 21896 - protein, 9 aa, synthetic construct
  source 1..9: note = Seed: LVVVGARGV (KRAS G12R)
IVVMGRRGP

SEQ ID NO: 21897 - protein, 9 aa, synthetic construct
  source 1..9: note = Seed: LVVVGARGV (KRAS G12R)
IVVMGRRGQ

SEQ ID NO: 21898 - protein, 9 aa, synthetic construct
  source 1..9: note = Seed: LVVVGARGV (KRAS G12R)
IVVMGRRGR

SEQ ID NO: 21899 - protein, 9 aa, synthetic construct
  source 1..9: note = Seed: LVVVGARGV (KRAS G12R)
IVVMGRRGS

SEQ ID NO: 21900 - protein, 9 aa, synthetic construct
  source 1..9: note = Seed: LVVVGARGV (KRAS G12R)
IVVMGRRGT

SEQ ID NO: 21901 - protein, 9 aa, synthetic construct
  source 1..9: note = Seed: LVVVGARGV (KRAS G12R)
IVVMGRRGV

SEQ ID NO: 21902 - protein, 9 aa, synthetic construct
  source 1..9: note = Seed: LVVVGARGV (KRAS G12R)
IVVMGRRGW

SEQ ID NO: 21903 - protein, 9 aa, synthetic construct
  source 1..9: note = Seed: LVVVGARGV (KRAS G12R)
IVVMGRRGY

SEQ ID NO: 21904 - protein, 9 aa, synthetic construct
  source 1..9: note = Seed: LVVVGARGV (KRAS G12R)
IVVMGSRGA

SEQ ID NO: 21905 - protein, 9 aa, synthetic construct
  source 1..9: note = Seed: LVVVGARGV (KRAS G12R)
IVVMGSRGC

SEQ ID NO: 21906 - protein, 9 aa, synthetic construct
  source 1..9: note = Seed: LVVVGARGV (KRAS G12R)
IVVMGSRGF

SEQ ID NO: 21907 - protein, 9 aa, synthetic construct
  source 1..9: note = Seed: LVVVGARGV (KRAS G12R)
IVVMGSRGG

SEQ ID NO: 21908 - protein, 9 aa, synthetic construct
  source 1..9: note = Seed: LVVVGARGV (KRAS G12R)
IVVMGSRGH

SEQ ID NO: 21909 - protein, 9 aa, synthetic construct
  source 1..9: note = Seed: LVVVGARGV (KRAS G12R)
IVVMGSRGI

SEQ ID NO: 21910 - protein, 9 aa, synthetic construct
  source 1..9: note = Seed: LVVVGARGV (KRAS G12R)
IVVMGSRGK

SEQ ID NO: 21911 - protein, 9 aa, synthetic construct
  source 1..9: note = Seed: LVVVGARGV (KRAS G12R)
IVVMGSRGL

SEQ ID NO: 21912 - protein, 9 aa, synthetic construct
  source 1..9: note = Seed: LVVVGARGV (KRAS G12R)
IVVMGSRGM

SEQ ID NO: 21913 - protein, 9 aa, synthetic construct
  source 1..9: note = Seed: LVVVGARGV (KRAS G12R)
IVVMGSRGN

SEQ ID NO: 21914 - protein, 9 aa, synthetic construct
  source 1..9: note = Seed: LVVVGARGV (KRAS G12R)
IVVMGSRGP

SEQ ID NO: 21915 - protein, 9 aa, synthetic construct
  source 1..9: note = Seed: LVVVGARGV (KRAS G12R)
IVVMGSRGQ

SEQ ID NO: 21916 - protein, 9 aa, synthetic construct
  source 1..9: note = Seed: LVVVGARGV (KRAS G12R)
IVVMGSRGR

SEQ ID NO: 21917 - protein, 9 aa, synthetic construct
  source 1..9: note = Seed: LVVVGARGV (KRAS G12R)
IVVMGSRGS

SEQ ID NO: 21918 - protein, 9 aa, synthetic construct
  source 1..9: note = Seed: LVVVGARGV (KRAS G12R)
IVVMGSRGT

SEQ ID NO: 21919 - protein, 9 aa, synthetic construct
  source 1..9: note = Seed: LVVVGARGV (KRAS G12R)
IVVMGSRGV

SEQ ID NO: 21920 - protein, 9 aa, synthetic construct
  source 1..9: note = Seed: LVVVGARGV (KRAS G12R)
IVVMGSRGW

SEQ ID NO: 21921 - protein, 9 aa, synthetic construct
  source 1..9: note = Seed: LVVVGARGV (KRAS G12R)
IVVMGSRGY

SEQ ID NO: 21922 - protein, 9 aa, synthetic construct
  source 1..9: note = Seed: LVVVGARGV (KRAS G12R)
IVVMGTRGA

SEQ ID NO: 21923 - protein, 9 aa, synthetic construct
  source 1..9: note = Seed: LVVVGARGV (KRAS G12R)
IVVMGTRGC

SEQ ID NO: 21924 - protein, 9 aa, synthetic construct
  source 1..9: note = Seed: LVVVGARGV (KRAS G12R)
IVVMGTRGF

SEQ ID NO: 21925 - protein, 9 aa, synthetic construct
  source 1..9: note = Seed: LVVVGARGV (KRAS G12R)
IVVMGTRGG

SEQ ID NO: 21926 - protein, 9 aa, synthetic construct
  source 1..9: note = Seed: LVVVGARGV (KRAS G12R)
IVVMGTRGH

SEQ ID NO: 21927 - protein, 9 aa, synthetic construct
  source 1..9: note = Seed: LVVVGARGV (KRAS G12R)
IVVMGTRGI

SEQ ID NO: 21928 - protein, 9 aa, synthetic construct
  source 1..9: note = Seed: LVVVGARGV (KRAS G12R)
IVVMGTRGK

SEQ ID NO: 21929 - protein, 9 aa, synthetic construct
  source 1..9: note = Seed: LVVVGARGV (KRAS G12R)
IVVMGTRGL

SEQ ID NO: 21930 - protein, 9 aa, synthetic construct
  source 1..9: note = Seed: LVVVGARGV (KRAS G12R)
IVVMGTRGM

SEQ ID NO: 21931 - protein, 9 aa, synthetic construct
  source 1..9: note = Seed: LVVVGARGV (KRAS G12R)
IVVMGTRGN

SEQ ID NO: 21932 - protein, 9 aa, synthetic construct
  source 1..9: note = Seed: LVVVGARGV (KRAS G12R)
IVVMGTRGP

SEQ ID NO: 21933 - protein, 9 aa, synthetic construct
  source 1..9: note = Seed: LVVVGARGV (KRAS G12R)
IVVMGTRGQ

SEQ ID NO: 21934 - protein, 9 aa, synthetic construct
  source 1..9: note = Seed: LVVVGARGV (KRAS G12R)
IVVMGTRGR

SEQ ID NO: 21935 - protein, 9 aa, synthetic construct
  source 1..9: note = Seed: LVVVGARGV (KRAS G12R)
IVVMGTRGS

SEQ ID NO: 21936 - protein, 9 aa, synthetic construct
  source 1..9: note = Seed: LVVVGARGV (KRAS G12R)
IVVMGTRGT

SEQ ID NO: 21937 - protein, 9 aa, synthetic construct
  source 1..9: note = Seed: LVVVGARGV (KRAS G12R)
IVVMGTRGV

SEQ ID NO: 21938 - protein, 9 aa, synthetic construct
  source 1..9: note = Seed: LVVVGARGV (KRAS G12R)
IVVMGTRGW

SEQ ID NO: 21939 - protein, 9 aa, synthetic construct
  source 1..9: note = Seed: LVVVGARGV (KRAS G12R)
IVVMGTRGY

SEQ ID NO: 21940 - protein, 9 aa, synthetic construct
  source 1..9: note = Seed: LVVVGARGV (KRAS G12R)
IVVMGVRGA

SEQ ID NO: 21941 - protein, 9 aa, synthetic construct
  source 1..9: note = Seed: LVVVGARGV (KRAS G12R)
IVVMGVRGC

SEQ ID NO: 21942 - protein, 9 aa, synthetic construct
  source 1..9: note = Seed: LVVVGARGV (KRAS G12R)
IVVMGVRGF

SEQ ID NO: 21943 - protein, 9 aa, synthetic construct
  source 1..9: note = Seed: LVVVGARGV (KRAS G12R)
IVVMGVRGG

SEQ ID NO: 21944 - protein, 9 aa, synthetic construct
  source 1..9: note = Seed: LVVVGARGV (KRAS G12R)
IVVMGVRGH

SEQ ID NO: 21945 - protein, 9 aa, synthetic construct
  source 1..9: note = Seed: LVVVGARGV (KRAS G12R)
IVVMGVRGI

SEQ ID NO: 21946 - protein, 9 aa, synthetic construct
  source 1..9: note = Seed: LVVVGARGV (KRAS G12R)
IVVMGVRGK

SEQ ID NO: 21947 - protein, 9 aa, synthetic construct
  source 1..9: note = Seed: LVVVGARGV (KRAS G12R)
IVVMGVRGL

SEQ ID NO: 21948 - protein, 9 aa, synthetic construct
  source 1..9: note = Seed: LVVVGARGV (KRAS G12R)
IVVMGVRGM

SEQ ID NO: 21949 - protein, 9 aa, synthetic construct
  source 1..9: note = Seed: LVVVGARGV (KRAS G12R)
IVVMGVRGN

SEQ ID NO: 21950 - protein, 9 aa, synthetic construct
  source 1..9: note = Seed: LVVVGARGV (KRAS G12R)
IVVMGVRGP

SEQ ID NO: 21951 - protein, 9 aa, synthetic construct
  source 1..9: note = Seed: LVVVGARGV (KRAS G12R)
IVVMGVRGQ

SEQ ID NO: 21952 - protein, 9 aa, synthetic construct
  source 1..9: note = Seed: LVVVGARGV (KRAS G12R)
IVVMGVRGR

SEQ ID NO: 21953 - protein, 9 aa, synthetic construct
  source 1..9: note = Seed: LVVVGARGV (KRAS G12R)
IVVMGVRGS

SEQ ID NO: 21954 - protein, 9 aa, synthetic construct
  source 1..9: note = Seed: LVVVGARGV (KRAS G12R)
IVVMGVRGT

SEQ ID NO: 21955 - protein, 9 aa, synthetic construct
  source 1..9: note = Seed: LVVVGARGV (KRAS G12R)
IVVMGVRGV

SEQ ID NO: 21956 - protein, 9 aa, synthetic construct
  source 1..9: note = Seed: LVVVGARGV (KRAS G12R)
IVVMGVRGW

SEQ ID NO: 21957 - protein, 9 aa, synthetic construct
  source 1..9: note = Seed: LVVVGARGV (KRAS G12R)
IVVMGVRGY

SEQ ID NO: 21958 - protein, 9 aa, synthetic construct
  source 1..9: note = Seed: LVVVGARGV (KRAS G12R)
IVVMGWRGA

SEQ ID NO: 21959 - protein, 9 aa, synthetic construct
  source 1..9: note = Seed: LVVVGARGV (KRAS G12R)
IVVMGWRGI

SEQ ID NO: 21960 - protein, 9 aa, synthetic construct
  source 1..9: note = Seed: LVVVGARGV (KRAS G12R)
IVVMGWRGK

SEQ ID NO: 21961 - protein, 9 aa, synthetic construct
  source 1..9: note = Seed: LVVVGARGV (KRAS G12R)
IVVMGWRGL

SEQ ID NO: 21962 - protein, 9 aa, synthetic construct
  source 1..9: note = Seed: LVVVGARGV (KRAS G12R)
IVVMGWRGM

SEQ ID NO: 21963 - protein, 9 aa, synthetic construct
  source 1..9: note = Seed: LVVVGARGV (KRAS G12R)
IVVMGWRGQ

SEQ ID NO: 21964 - protein, 9 aa, synthetic construct
  source 1..9: note = Seed: LVVVGARGV (KRAS G12R)
IVVMGWRGR

SEQ ID NO: 21965 - protein, 9 aa, synthetic construct
  source 1..9: note = Seed: LVVVGARGV (KRAS G12R)
IVVMGWRGS

SEQ ID NO: 21966 - protein, 9 aa, synthetic construct
  source 1..9: note = Seed: LVVVGARGV (KRAS G12R)
IVVMGWRGV

SEQ ID NO: 21967 - protein, 9 aa, synthetic construct
  source 1..9: note = Seed: LVVVGARGV (KRAS G12R)
IVVMGWRGY

SEQ ID NO: 21968 - protein, 9 aa, synthetic construct
  source 1..9: note = Seed: LVVVGARGV (KRAS G12R)
IVVMGYRGA

SEQ ID NO: 21969 - protein, 9 aa, synthetic construct
  source 1..9: note = Seed: LVVVGARGV (KRAS G12R)
IVVMGYRGF

SEQ ID NO: 21970 - protein, 9 aa, synthetic construct
  source 1..9: note = Seed: LVVVGARGV (KRAS G12R)
IVVMGYRGG

SEQ ID NO: 21971 - protein, 9 aa, synthetic construct
  source 1..9: note = Seed: LVVVGARGV (KRAS G12R)
IVVMGYRGH

SEQ ID NO: 21972 - protein, 9 aa, synthetic construct
  source 1..9: note = Seed: LVVVGARGV (KRAS G12R)
IVVMGYRGI

SEQ ID NO: 21973 - protein, 9 aa, synthetic construct
  source 1..9: note = Seed: LVVVGARGV (KRAS G12R)
IVVMGYRGK

SEQ ID NO: 21974 - protein, 9 aa, synthetic construct
  source 1..9: note = Seed: LVVVGARGV (KRAS G12R)
IVVMGYRGL

SEQ ID NO: 21975 - protein, 9 aa, synthetic construct
  source 1..9: note = Seed: LVVVGARGV (KRAS G12R)
IVVMGYRGM

SEQ ID NO: 21976 - protein, 9 aa, synthetic construct
  source 1..9: note = Seed: LVVVGARGV (KRAS G12R)
IVVMGYRGQ

SEQ ID NO: 21977 - protein, 9 aa, synthetic construct
  source 1..9: note = Seed: LVVVGARGV (KRAS G12R)
IVVMGYRGR

SEQ ID NO: 21978 - protein, 9 aa, synthetic construct
  source 1..9: note = Seed: LVVVGARGV (KRAS G12R)
IVVMGYRGS

SEQ ID NO: 21979 - protein, 9 aa, synthetic construct
  source 1..9: note = Seed: LVVVGARGV (KRAS G12R)
IVVMGYRGV

SEQ ID NO: 21980 - protein, 9 aa, synthetic construct
  source 1..9: note = Seed: LVVVGARGV (KRAS G12R)
IVVMGYRGY

SEQ ID NO: 21981 - protein, 9 aa, synthetic construct
  source 1..9: note = Seed: LVVVGARGV (KRAS G12R)
IVVNGARGA

SEQ ID NO: 21982 - protein, 9 aa, synthetic construct
  source 1..9: note = Seed: LVVVGARGV (KRAS G12R)
IVVNGARGD

SEQ ID NO: 21983 - protein, 9 aa, synthetic construct
  source 1..9: note = Seed: LVVVGARGV (KRAS G12R)
IVVNGARGE

SEQ ID NO: 21984 - protein, 9 aa, synthetic construct
  source 1..9: note = Seed: LVVVGARGV (KRAS G12R)
IVVNGARGF

SEQ ID NO: 21985 - protein, 9 aa, synthetic construct
  source 1..9: note = Seed: LVVVGARGV (KRAS G12R)
IVVNGARGH

SEQ ID NO: 21986 - protein, 9 aa, synthetic construct
  source 1..9: note = Seed: LVVVGARGV (KRAS G12R)
IVVNGARGI

SEQ ID NO: 21987 - protein, 9 aa, synthetic construct
  source 1..9: note = Seed: LVVVGARGV (KRAS G12R)
IVVNGARGL

SEQ ID NO: 21988 - protein, 9 aa, synthetic construct
  source 1..9: note = Seed: LVVVGARGV (KRAS G12R)
IVVNGARGM

SEQ ID NO: 21989 - protein, 9 aa, synthetic construct
  source 1..9: note = Seed: LVVVGARGV (KRAS G12R)
IVVNGARGN

SEQ ID NO: 21990 - protein, 9 aa, synthetic construct
  source 1..9: note = Seed: LVVVGARGV (KRAS G12R)
IVVNGARGQ

SEQ ID NO: 21991 - protein, 9 aa, synthetic construct
  source 1..9: note = Seed: LVVVGARGV (KRAS G12R)
IVVNGARGR

SEQ ID NO: 21992 - protein, 9 aa, synthetic construct
  source 1..9: note = Seed: LVVVGARGV (KRAS G12R)
IVVNGARGS

SEQ ID NO: 21993 - protein, 9 aa, synthetic construct
  source 1..9: note = Seed: LVVVGARGV (KRAS G12R)
IVVNGARGT

SEQ ID NO: 21994 - protein, 9 aa, synthetic construct
  source 1..9: note = Seed: LVVVGARGV (KRAS G12R)
IVVNGARGV

SEQ ID NO: 21995 - protein, 9 aa, synthetic construct
  source 1..9: note = Seed: LVVVGARGV (KRAS G12R)
IVVNGARGW

SEQ ID NO: 21996 - protein, 9 aa, synthetic construct
  source 1..9: note = Seed: LVVVGARGV (KRAS G12R)
IVVNGARGY

SEQ ID NO: 21997 - protein, 9 aa, synthetic construct
  source 1..9: note = Seed: LVVVGARGV (KRAS G12R)
IVVNGCRGF

SEQ ID NO: 21998 - protein, 9 aa, synthetic construct
  source 1..9: note = Seed: LVVVGARGV (KRAS G12R)
IVVNGCRGI

SEQ ID NO: 21999 - protein, 9 aa, synthetic construct
  source 1..9: note = Seed: LVVVGARGV (KRAS G12R)
IVVNGCRGL

SEQ ID NO: 22000 - protein, 9 aa, synthetic construct
  source 1..9: note = Seed: LVVVGARGV (KRAS G12R)
IVVNGCRGM

SEQ ID NO: 22001 - protein, 9 aa, synthetic construct
  source 1..9: note = Seed: LVVVGARGV (KRAS G12R)
IVVNGCRGV

SEQ ID NO: 22002 - protein, 9 aa, synthetic construct
  source 1..9: note = Seed: LVVVGARGV (KRAS G12R)
IVVNGCRGY

SEQ ID NO: 22003 - protein, 9 aa, synthetic construct
  source 1..9: note = Seed: LVVVGARGV (KRAS G12R)
IVVNGDRGF

SEQ ID NO: 22004 - protein, 9 aa, synthetic construct
  source 1..9: note = Seed: LVVVGARGV (KRAS G12R)
IVVNGDRGI

SEQ ID NO: 22005 - protein, 9 aa, synthetic construct
  source 1..9: note = Seed: LVVVGARGV (KRAS G12R)
IVVNGDRGL

SEQ ID NO: 22006 - protein, 9 aa, synthetic construct
  source 1..9: note = Seed: LVVVGARGV (KRAS G12R)
IVVNGDRGM

SEQ ID NO: 22007 - protein, 9 aa, synthetic construct
  source 1..9: note = Seed: LVVVGARGV (KRAS G12R)
IVVNGDRGV

SEQ ID NO: 22008 - protein, 9 aa, synthetic construct
  source 1..9: note = Seed: LVVVGARGV (KRAS G12R)
IVVNGDRGY

SEQ ID NO: 22009 - protein, 9 aa, synthetic construct
  source 1..9: note = Seed: LVVVGARGV (KRAS G12R)
IVVNGERGI

SEQ ID NO: 22010 - protein, 9 aa, synthetic construct
  source 1..9: note = Seed: LVVVGARGV (KRAS G12R)
IVVNGERGL

SEQ ID NO: 22011 - protein, 9 aa, synthetic construct
  source 1..9: note = Seed: LVVVGARGV (KRAS G12R)
IVVNGERGV

SEQ ID NO: 22012 - protein, 9 aa, synthetic construct
  source 1..9: note = Seed: LVVVGARGV (KRAS G12R)
IVVNGFRGA

SEQ ID NO: 22013 - protein, 9 aa, synthetic construct
  source 1..9: note = Seed: LVVVGARGV (KRAS G12R)
IVVNGFRGF

SEQ ID NO: 22014 - protein, 9 aa, synthetic construct
  source 1..9: note = Seed: LVVVGARGV (KRAS G12R)
IVVNGFRGI

SEQ ID NO: 22015 - protein, 9 aa, synthetic construct
  source 1..9: note = Seed: LVVVGARGV (KRAS G12R)
IVVNGFRGL

SEQ ID NO: 22016 - protein, 9 aa, synthetic construct
  source 1..9: note = Seed: LVVVGARGV (KRAS G12R)
IVVNGFRGM

SEQ ID NO: 22017 - protein, 9 aa, synthetic construct
  source 1..9: note = Seed: LVVVGARGV (KRAS G12R)
IVVNGFRGR

SEQ ID NO: 22018 - protein, 9 aa, synthetic construct
  source 1..9: note = Seed: LVVVGARGV (KRAS G12R)
IVVNGFRGV

SEQ ID NO: 22019 - protein, 9 aa, synthetic construct
  source 1..9: note = Seed: LVVVGARGV (KRAS G12R)
IVVNGFRGY

SEQ ID NO: 22020 - protein, 9 aa, synthetic construct
  source 1..9: note = Seed: LVVVGARGV (KRAS G12R)
IVVNGGRGA

SEQ ID NO: 22021 - protein, 9 aa, synthetic construct
  source 1..9: note = Seed: LVVVGARGV (KRAS G12R)
IVVNGGRGF

SEQ ID NO: 22022 - protein, 9 aa, synthetic construct
  source 1..9: note = Seed: LVVVGARGV (KRAS G12R)
IVVNGGRGI

SEQ ID NO: 22023 - protein, 9 aa, synthetic construct
  source 1..9: note = Seed: LVVVGARGV (KRAS G12R)
IVVNGGRGL

SEQ ID NO: 22024 - protein, 9 aa, synthetic construct
  source 1..9: note = Seed: LVVVGARGV (KRAS G12R)
IVVNGGRGM

SEQ ID NO: 22025 - protein, 9 aa, synthetic construct
  source 1..9: note = Seed: LVVVGARGV (KRAS G12R)
IVVNGGRGS

SEQ ID NO: 22026 - protein, 9 aa, synthetic construct
  source 1..9: note = Seed: LVVVGARGV (KRAS G12R)
IVVNGGRGT

SEQ ID NO: 22027 - protein, 9 aa, synthetic construct
  source 1..9: note = Seed: LVVVGARGV (KRAS G12R)
IVVNGGRGV

SEQ ID NO: 22028 - protein, 9 aa, synthetic construct
  source 1..9: note = Seed: LVVVGARGV (KRAS G12R)
IVVNGGRGW

SEQ ID NO: 22029 - protein, 9 aa, synthetic construct
  source 1..9: note = Seed: LVVVGARGV (KRAS G12R)
IVVNGGRGY

SEQ ID NO: 22030 - protein, 9 aa, synthetic construct
  source 1..9: note = Seed: LVVVGARGV (KRAS G12R)
IVVNGHRGA

SEQ ID NO: 22031 - protein, 9 aa, synthetic construct
  source 1..9: note = Seed: LVVVGARGV (KRAS G12R)
IVVNGHRGF

SEQ ID NO: 22032 - protein, 9 aa, synthetic construct
  source 1..9: note = Seed: LVVVGARGV (KRAS G12R)
IVVNGHRGI

SEQ ID NO: 22033 - protein, 9 aa, synthetic construct
  source 1..9: note = Seed: LVVVGARGV (KRAS G12R)
IVVNGHRGL

SEQ ID NO: 22034 - protein, 9 aa, synthetic construct
  source 1..9: note = Seed: LVVVGARGV (KRAS G12R)
IVVNGHRGM

SEQ ID NO: 22035 - protein, 9 aa, synthetic construct
  source 1..9: note = Seed: LVVVGARGV (KRAS G12R)
IVVNGHRGR

SEQ ID NO: 22036 - protein, 9 aa, synthetic construct
  source 1..9: note = Seed: LVVVGARGV (KRAS G12R)
IVVNGHRGV

SEQ ID NO: 22037 - protein, 9 aa, synthetic construct
  source 1..9: note = Seed: LVVVGARGV (KRAS G12R)
IVVNGHRGY

SEQ ID NO: 22038 - protein, 9 aa, synthetic construct
  source 1..9: note = Seed: LVVVGARGV (KRAS G12R)
IVVNGIRGA

SEQ ID NO: 22039 - protein, 9 aa, synthetic construct
  source 1..9: note = Seed: LVVVGARGV (KRAS G12R)
IVVNGIRGF

SEQ ID NO: 22040 - protein, 9 aa, synthetic construct
  source 1..9: note = Seed: LVVVGARGV (KRAS G12R)
IVVNGIRGH

SEQ ID NO: 22041 - protein, 9 aa, synthetic construct
  source 1..9: note = Seed: LVVVGARGV (KRAS G12R)
IVVNGIRGI

SEQ ID NO: 22042 - protein, 9 aa, synthetic construct
  source 1..9: note = Seed: LVVVGARGV (KRAS G12R)
IVVNGIRGK

SEQ ID NO: 22043 - protein, 9 aa, synthetic construct
  source 1..9: note = Seed: LVVVGARGV (KRAS G12R)
IVVNGIRGL

SEQ ID NO: 22044 - protein, 9 aa, synthetic construct
  source 1..9: note = Seed: LVVVGARGV (KRAS G12R)
IVVNGIRGM

SEQ ID NO: 22045 - protein, 9 aa, synthetic construct
  source 1..9: note = Seed: LVVVGARGV (KRAS G12R)
IVVNGIRGN

SEQ ID NO: 22046 - protein, 9 aa, synthetic construct
  source 1..9: note = Seed: LVVVGARGV (KRAS G12R)
IVVNGIRGQ

SEQ ID NO: 22047 - protein, 9 aa, synthetic construct
  source 1..9: note = Seed: LVVVGARGV (KRAS G12R)
IVVNGIRGR

SEQ ID NO: 22048 - protein, 9 aa, synthetic construct
  source 1..9: note = Seed: LVVVGARGV (KRAS G12R)
IVVNGIRGS

SEQ ID NO: 22049 - protein, 9 aa, synthetic construct
  source 1..9: note = Seed: LVVVGARGV (KRAS G12R)
IVVNGIRGT

SEQ ID NO: 22050 - protein, 9 aa, synthetic construct
  source 1..9: note = Seed: LVVVGARGV (KRAS G12R)
IVVNGIRGV

SEQ ID NO: 22051 - protein, 9 aa, synthetic construct
  source 1..9: note = Seed: LVVVGARGV (KRAS G12R)
IVVNGIRGW

SEQ ID NO: 22052 - protein, 9 aa, synthetic construct
  source 1..9: note = Seed: LVVVGARGV (KRAS G12R)
IVVNGIRGY

SEQ ID NO: 22053 - protein, 9 aa, synthetic construct
  source 1..9: note = Seed: LVVVGARGV (KRAS G12R)
IVVNGKRGA

SEQ ID NO: 22054 - protein, 9 aa, synthetic construct
  source 1..9: note = Seed: LVVVGARGV (KRAS G12R)
IVVNGKRGF

SEQ ID NO: 22055 - protein, 9 aa, synthetic construct
  source 1..9: note = Seed: LVVVGARGV (KRAS G12R)
IVVNGKRGH

SEQ ID NO: 22056 - protein, 9 aa, synthetic construct
  source 1..9: note = Seed: LVVVGARGV (KRAS G12R)
IVVNGKRGI

SEQ ID NO: 22057 - protein, 9 aa, synthetic construct
  source 1..9: note = Seed: LVVVGARGV (KRAS G12R)
IVVNGKRGK

SEQ ID NO: 22058 - protein, 9 aa, synthetic construct
  source 1..9: note = Seed: LVVVGARGV (KRAS G12R)
IVVNGKRGL

SEQ ID NO: 22059 - protein, 9 aa, synthetic construct
  source 1..9: note = Seed: LVVVGARGV (KRAS G12R)
IVVNGKRGM

SEQ ID NO: 22060 - protein, 9 aa, synthetic construct
  source 1..9: note = Seed: LVVVGARGV (KRAS G12R)
IVVNGKRGQ

SEQ ID NO: 22061 - protein, 9 aa, synthetic construct
  source 1..9: note = Seed: LVVVGARGV (KRAS G12R)
IVVNGKRGR

SEQ ID NO: 22062 - protein, 9 aa, synthetic construct
  source 1..9: note = Seed: LVVVGARGV (KRAS G12R)
IVVNGKRGS

SEQ ID NO: 22063 - protein, 9 aa, synthetic construct
  source 1..9: note = Seed: LVVVGARGV (KRAS G12R)
IVVNGKRGV

SEQ ID NO: 22064 - protein, 9 aa, synthetic construct
  source 1..9: note = Seed: LVVVGARGV (KRAS G12R)
IVVNGKRGY

SEQ ID NO: 22065 - protein, 9 aa, synthetic construct
  source 1..9: note = Seed: LVVVGARGV (KRAS G12R)
IVVNGLRGA

SEQ ID NO: 22066 - protein, 9 aa, synthetic construct
  source 1..9: note = Seed: LVVVGARGV (KRAS G12R)
IVVNGLRGF

SEQ ID NO: 22067 - protein, 9 aa, synthetic construct
  source 1..9: note = Seed: LVVVGARGV (KRAS G12R)
IVVNGLRGI

SEQ ID NO: 22068 - protein, 9 aa, synthetic construct
  source 1..9: note = Seed: LVVVGARGV (KRAS G12R)
IVVNGLRGK

SEQ ID NO: 22069 - protein, 9 aa, synthetic construct
  source 1..9: note = Seed: LVVVGARGV (KRAS G12R)
IVVNGLRGL

SEQ ID NO: 22070 - protein, 9 aa, synthetic construct
  source 1..9: note = Seed: LVVVGARGV (KRAS G12R)
IVVNGLRGM

SEQ ID NO: 22071 - protein, 9 aa, synthetic construct
  source 1..9: note = Seed: LVVVGARGV (KRAS G12R)
IVVNGLRGN

SEQ ID NO: 22072 - protein, 9 aa, synthetic construct
  source 1..9: note = Seed: LVVVGARGV (KRAS G12R)
IVVNGLRGR

SEQ ID NO: 22073 - protein, 9 aa, synthetic construct
  source 1..9: note = Seed: LVVVGARGV (KRAS G12R)
IVVNGLRGS

SEQ ID NO: 22074 - protein, 9 aa, synthetic construct
  source 1..9: note = Seed: LVVVGARGV (KRAS G12R)
IVVNGLRGT

SEQ ID NO: 22075 - protein, 9 aa, synthetic construct
  source 1..9: note = Seed: LVVVGARGV (KRAS G12R)
IVVNGLRGV

SEQ ID NO: 22076 - protein, 9 aa, synthetic construct
  source 1..9: note = Seed: LVVVGARGV (KRAS G12R)
IVVNGLRGW

SEQ ID NO: 22077 - protein, 9 aa, synthetic construct
  source 1..9: note = Seed: LVVVGARGV (KRAS G12R)
IVVNGLRGY

SEQ ID NO: 22078 - protein, 9 aa, synthetic construct
  source 1..9: note = Seed: LVVVGARGV (KRAS G12R)
IVVNGMRGA

SEQ ID NO: 22079 - protein, 9 aa, synthetic construct
  source 1..9: note = Seed: LVVVGARGV (KRAS G12R)
IVVNGMRGF

SEQ ID NO: 22080 - protein, 9 aa, synthetic construct
  source 1..9: note = Seed: LVVVGARGV (KRAS G12R)
IVVNGMRGI

SEQ ID NO: 22081 - protein, 9 aa, synthetic construct
  source 1..9: note = Seed: LVVVGARGV (KRAS G12R)
IVVNGMRGK

SEQ ID NO: 22082 - protein, 9 aa, synthetic construct
  source 1..9: note = Seed: LVVVGARGV (KRAS G12R)
IVVNGMRGL

SEQ ID NO: 22083 - protein, 9 aa, synthetic construct
  source 1..9: note = Seed: LVVVGARGV (KRAS G12R)
IVVNGMRGM

SEQ ID NO: 22084 - protein, 9 aa, synthetic construct
  source 1..9: note = Seed: LVVVGARGV (KRAS G12R)
IVVNGMRGR

SEQ ID NO: 22085 - protein, 9 aa, synthetic construct
  source 1..9: note = Seed: LVVVGARGV (KRAS G12R)
IVVNGMRGS

SEQ ID NO: 22086 - protein, 9 aa, synthetic construct
  source 1..9: note = Seed: LVVVGARGV (KRAS G12R)
IVVNGMRGT

SEQ ID NO: 22087 - protein, 9 aa, synthetic construct
  source 1..9: note = Seed: LVVVGARGV (KRAS G12R)
IVVNGMRGV

SEQ ID NO: 22088 - protein, 9 aa, synthetic construct
  source 1..9: note = Seed: LVVVGARGV (KRAS G12R)
IVVNGMRGW

SEQ ID NO: 22089 - protein, 9 aa, synthetic construct
  source 1..9: note = Seed: LVVVGARGV (KRAS G12R)
IVVNGMRGY

SEQ ID NO: 22090 - protein, 9 aa, synthetic construct
  source 1..9: note = Seed: LVVVGARGV (KRAS G12R)
IVVNGNRGA

SEQ ID NO: 22091 - protein, 9 aa, synthetic construct
  source 1..9: note = Seed: LVVVGARGV (KRAS G12R)
IVVNGNRGE

SEQ ID NO: 22092 - protein, 9 aa, synthetic construct
  source 1..9: note = Seed: LVVVGARGV (KRAS G12R)
IVVNGNRGF

SEQ ID NO: 22093 - protein, 9 aa, synthetic construct
  source 1..9: note = Seed: LVVVGARGV (KRAS G12R)
IVVNGNRGH

SEQ ID NO: 22094 - protein, 9 aa, synthetic construct
  source 1..9: note = Seed: LVVVGARGV (KRAS G12R)
IVVNGNRGI

SEQ ID NO: 22095 - protein, 9 aa, synthetic construct
  source 1..9: note = Seed: LVVVGARGV (KRAS G12R)
IVVNGNRGL

SEQ ID NO: 22096 - protein, 9 aa, synthetic construct
  source 1..9: note = Seed: LVVVGARGV (KRAS G12R)
IVVNGNRGM

SEQ ID NO: 22097 - protein, 9 aa, synthetic construct
  source 1..9: note = Seed: LVVVGARGV (KRAS G12R)
IVVNGNRGN

SEQ ID NO: 22098 - protein, 9 aa, synthetic construct
  source 1..9: note = Seed: LVVVGARGV (KRAS G12R)
IVVNGNRGQ

SEQ ID NO: 22099 - protein, 9 aa, synthetic construct
  source 1..9: note = Seed: LVVVGARGV (KRAS G12R)
IVVNGNRGR

SEQ ID NO: 22100 - protein, 9 aa, synthetic construct
  source 1..9: note = Seed: LVVVGARGV (KRAS G12R)
IVVNGNRGS

SEQ ID NO: 22101 - protein, 9 aa, synthetic construct
  source 1..9: note = Seed: LVVVGARGV (KRAS G12R)
IVVNGNRGT

SEQ ID NO: 22102 - protein, 9 aa, synthetic construct
  source 1..9: note = Seed: LVVVGARGV (KRAS G12R)
IVVNGNRGV

SEQ ID NO: 22103 - protein, 9 aa, synthetic construct
  source 1..9: note = Seed: LVVVGARGV (KRAS G12R)
IVVNGNRGW

SEQ ID NO: 22104 - protein, 9 aa, synthetic construct
  source 1..9: note = Seed: LVVVGARGV (KRAS G12R)
IVVNGNRGY

SEQ ID NO: 22105 - protein, 9 aa, synthetic construct
  source 1..9: note = Seed: LVVVGARGV (KRAS G12R)
IVVNGPRGA

SEQ ID NO: 22106 - protein, 9 aa, synthetic construct
  source 1..9: note = Seed: LVVVGARGV (KRAS G12R)
IVVNGPRGF

SEQ ID NO: 22107 - protein, 9 aa, synthetic construct
  source 1..9: note = Seed: LVVVGARGV (KRAS G12R)
IVVNGPRGI

SEQ ID NO: 22108 - protein, 9 aa, synthetic construct
  source 1..9: note = Seed: LVVVGARGV (KRAS G12R)
IVVNGPRGL

SEQ ID NO: 22109 - protein, 9 aa, synthetic construct
  source 1..9: note = Seed: LVVVGARGV (KRAS G12R)
IVVNGPRGM

SEQ ID NO: 22110 - protein, 9 aa, synthetic construct
  source 1..9: note = Seed: LVVVGARGV (KRAS G12R)
IVVNGPRGS

SEQ ID NO: 22111 - protein, 9 aa, synthetic construct
  source 1..9: note = Seed: LVVVGARGV (KRAS G12R)
IVVNGPRGT

SEQ ID NO: 22112 - protein, 9 aa, synthetic construct
  source 1..9: note = Seed: LVVVGARGV (KRAS G12R)
IVVNGPRGV

SEQ ID NO: 22113 - protein, 9 aa, synthetic construct
  source 1..9: note = Seed: LVVVGARGV (KRAS G12R)
IVVNGPRGW

SEQ ID NO: 22114 - protein, 9 aa, synthetic construct
  source 1..9: note = Seed: LVVVGARGV (KRAS G12R)
IVVNGPRGY

SEQ ID NO: 22115 - protein, 9 aa, synthetic construct
  source 1..9: note = Seed: LVVVGARGV (KRAS G12R)
IVVNGQRGF

SEQ ID NO: 22116 - protein, 9 aa, synthetic construct
  source 1..9: note = Seed: LVVVGARGV (KRAS G12R)
IVVNGQRGI

SEQ ID NO: 22117 - protein, 9 aa, synthetic construct
  source 1..9: note = Seed: LVVVGARGV (KRAS G12R)
IVVNGQRGL

SEQ ID NO: 22118 - protein, 9 aa, synthetic construct
  source 1..9: note = Seed: LVVVGARGV (KRAS G12R)
IVVNGQRGM

SEQ ID NO: 22119 - protein, 9 aa, synthetic construct
  source 1..9: note = Seed: LVVVGARGV (KRAS G12R)
IVVNGQRGV

SEQ ID NO: 22120 - protein, 9 aa, synthetic construct
  source 1..9: note = Seed: LVVVGARGV (KRAS G12R)
IVVNGRRGA

SEQ ID NO: 22121 - protein, 9 aa, synthetic construct
  source 1..9: note = Seed: LVVVGARGV (KRAS G12R)
IVVNGRRGF

SEQ ID NO: 22122 - protein, 9 aa, synthetic construct
  source 1..9: note = Seed: LVVVGARGV (KRAS G12R)
IVVNGRRGG

SEQ ID NO: 22123 - protein, 9 aa, synthetic construct
  source 1..9: note = Seed: LVVVGARGV (KRAS G12R)
IVVNGRRGH

SEQ ID NO: 22124 - protein, 9 aa, synthetic construct
  source 1..9: note = Seed: LVVVGARGV (KRAS G12R)
IVVNGRRGI

SEQ ID NO: 22125 - protein, 9 aa, synthetic construct
  source 1..9: note = Seed: LVVVGARGV (KRAS G12R)
IVVNGRRGK

SEQ ID NO: 22126 - protein, 9 aa, synthetic construct
  source 1..9: note = Seed: LVVVGARGV (KRAS G12R)
IVVNGRRGL

SEQ ID NO: 22127 - protein, 9 aa, synthetic construct
  source 1..9: note = Seed: LVVVGARGV (KRAS G12R)
IVVNGRRGM

SEQ ID NO: 22128 - protein, 9 aa, synthetic construct
  source 1..9: note = Seed: LVVVGARGV (KRAS G12R)
IVVNGRRGQ

SEQ ID NO: 22129 - protein, 9 aa, synthetic construct
  source 1..9: note = Seed: LVVVGARGV (KRAS G12R)
IVVNGRRGR

SEQ ID NO: 22130 - protein, 9 aa, synthetic construct
  source 1..9: note = Seed: LVVVGARGV (KRAS G12R)
IVVNGRRGS

SEQ ID NO: 22131 - protein, 9 aa, synthetic construct
  source 1..9: note = Seed: LVVVGARGV (KRAS G12R)
IVVNGRRGT

SEQ ID NO: 22132 - protein, 9 aa, synthetic construct
  source 1..9: note = Seed: LVVVGARGV (KRAS G12R)
IVVNGRRGV

SEQ ID NO: 22133 - protein, 9 aa, synthetic construct
  source 1..9: note = Seed: LVVVGARGV (KRAS G12R)
IVVNGRRGW

SEQ ID NO: 22134 - protein, 9 aa, synthetic construct
  source 1..9: note = Seed: LVVVGARGV (KRAS G12R)
IVVNGRRGY

SEQ ID NO: 22135 - protein, 9 aa, synthetic construct
  source 1..9: note = Seed: LVVVGARGV (KRAS G12R)
IVVNGSRGA

SEQ ID NO: 22136 - protein, 9 aa, synthetic construct
  source 1..9: note = Seed: LVVVGARGV (KRAS G12R)
IVVNGSRGF

SEQ ID NO: 22137 - protein, 9 aa, synthetic construct
  source 1..9: note = Seed: LVVVGARGV (KRAS G12R)
IVVNGSRGH

SEQ ID NO: 22138 - protein, 9 aa, synthetic construct
  source 1..9: note = Seed: LVVVGARGV (KRAS G12R)
IVVNGSRGI

SEQ ID NO: 22139 - protein, 9 aa, synthetic construct
  source 1..9: note = Seed: LVVVGARGV (KRAS G12R)
IVVNGSRGL

SEQ ID NO: 22140 - protein, 9 aa, synthetic construct
  source 1..9: note = Seed: LVVVGARGV (KRAS G12R)
IVVNGSRGM

SEQ ID NO: 22141 - protein, 9 aa, synthetic construct
  source 1..9: note = Seed: LVVVGARGV (KRAS G12R)
IVVNGSRGN

SEQ ID NO: 22142 - protein, 9 aa, synthetic construct
  source 1..9: note = Seed: LVVVGARGV (KRAS G12R)
IVVNGSRGR

SEQ ID NO: 22143 - protein, 9 aa, synthetic construct
  source 1..9: note = Seed: LVVVGARGV (KRAS G12R)
IVVNGSRGS

SEQ ID NO: 22144 - protein, 9 aa, synthetic construct
  source 1..9: note = Seed: LVVVGARGV (KRAS G12R)
IVVNGSRGT

SEQ ID NO: 22145 - protein, 9 aa, synthetic construct
  source 1..9: note = Seed: LVVVGARGV (KRAS G12R)
IVVNGSRGV

SEQ ID NO: 22146 - protein, 9 aa, synthetic construct
  source 1..9: note = Seed: LVVVGARGV (KRAS G12R)
IVVNGSRGW

SEQ ID NO: 22147 - protein, 9 aa, synthetic construct
  source 1..9: note = Seed: LVVVGARGV (KRAS G12R)
IVVNGSRGY

SEQ ID NO: 22148 - protein, 9 aa, synthetic construct
  source 1..9: note = Seed: LVVVGARGV (KRAS G12R)
IVVNGTRGA

SEQ ID NO: 22149 - protein, 9 aa, synthetic construct
  source 1..9: note = Seed: LVVVGARGV (KRAS G12R)
IVVNGTRGF

SEQ ID NO: 22150 - protein, 9 aa, synthetic construct
  source 1..9: note = Seed: LVVVGARGV (KRAS G12R)
IVVNGTRGI

SEQ ID NO: 22151 - protein, 9 aa, synthetic construct
  source 1..9: note = Seed: LVVVGARGV (KRAS G12R)
IVVNGTRGL

SEQ ID NO: 22152 - protein, 9 aa, synthetic construct
  source 1..9: note = Seed: LVVVGARGV (KRAS G12R)
IVVNGTRGM

SEQ ID NO: 22153 - protein, 9 aa, synthetic construct
  source 1..9: note = Seed: LVVVGARGV (KRAS G12R)
IVVNGTRGR

SEQ ID NO: 22154 - protein, 9 aa, synthetic construct
  source 1..9: note = Seed: LVVVGARGV (KRAS G12R)
IVVNGTRGS

SEQ ID NO: 22155 - protein, 9 aa, synthetic construct
  source 1..9: note = Seed: LVVVGARGV (KRAS G12R)
IVVNGTRGT

SEQ ID NO: 22156 - protein, 9 aa, synthetic construct
  source 1..9: note = Seed: LVVVGARGV (KRAS G12R)
IVVNGTRGV

SEQ ID NO: 22157 - protein, 9 aa, synthetic construct
  source 1..9: note = Seed: LVVVGARGV (KRAS G12R)
IVVNGTRGW

SEQ ID NO: 22158 - protein, 9 aa, synthetic construct
  source 1..9: note = Seed: LVVVGARGV (KRAS G12R)
IVVNGTRGY

SEQ ID NO: 22159 - protein, 9 aa, synthetic construct
  source 1..9: note = Seed: LVVVGARGV (KRAS G12R)
IVVNGVRGA

SEQ ID NO: 22160 - protein, 9 aa, synthetic construct
  source 1..9: note = Seed: LVVVGARGV (KRAS G12R)
IVVNGVRGF

SEQ ID NO: 22161 - protein, 9 aa, synthetic construct
  source 1..9: note = Seed: LVVVGARGV (KRAS G12R)
IVVNGVRGI

SEQ ID NO: 22162 - protein, 9 aa, synthetic construct
  source 1..9: note = Seed: LVVVGARGV (KRAS G12R)
IVVNGVRGL

SEQ ID NO: 22163 - protein, 9 aa, synthetic construct
  source 1..9: note = Seed: LVVVGARGV (KRAS G12R)
IVVNGVRGM

SEQ ID NO: 22164 - protein, 9 aa, synthetic construct
  source 1..9: note = Seed: LVVVGARGV (KRAS G12R)
IVVNGVRGN

SEQ ID NO: 22165 - protein, 9 aa, synthetic construct
  source 1..9: note = Seed: LVVVGARGV (KRAS G12R)
IVVNGVRGR

SEQ ID NO: 22166 - protein, 9 aa, synthetic construct
  source 1..9: note = Seed: LVVVGARGV (KRAS G12R)
IVVNGVRGS

SEQ ID NO: 22167 - protein, 9 aa, synthetic construct
  source 1..9: note = Seed: LVVVGARGV (KRAS G12R)
IVVNGVRGT

SEQ ID NO: 22168 - protein, 9 aa, synthetic construct
  source 1..9: note = Seed: LVVVGARGV (KRAS G12R)
IVVNGVRGV

SEQ ID NO: 22169 - protein, 9 aa, synthetic construct
  source 1..9: note = Seed: LVVVGARGV (KRAS G12R)
IVVNGVRGW

SEQ ID NO: 22170 - protein, 9 aa, synthetic construct
  source 1..9: note = Seed: LVVVGARGV (KRAS G12R)
IVVNGVRGY

SEQ ID NO: 22171 - protein, 9 aa, synthetic construct
  source 1..9: note = Seed: LVVVGARGV (KRAS G12R)
IVVNGWRGF

SEQ ID NO: 22172 - protein, 9 aa, synthetic construct
  source 1..9: note = Seed: LVVVGARGV (KRAS G12R)
IVVNGWRGI

SEQ ID NO: 22173 - protein, 9 aa, synthetic construct
  source 1..9: note = Seed: LVVVGARGV (KRAS G12R)
IVVNGWRGL

SEQ ID NO: 22174 - protein, 9 aa, synthetic construct
  source 1..9: note = Seed: LVVVGARGV (KRAS G12R)
IVVNGWRGR

SEQ ID NO: 22175 - protein, 9 aa, synthetic construct
  source 1..9: note = Seed: LVVVGARGV (KRAS G12R)
IVVNGWRGV

SEQ ID NO: 22176 - protein, 9 aa, synthetic construct
  source 1..9: note = Seed: LVVVGARGV (KRAS G12R)
IVVNGYRGF

SEQ ID NO: 22177 - protein, 9 aa, synthetic construct
  source 1..9: note = Seed: LVVVGARGV (KRAS G12R)
IVVNGYRGI

SEQ ID NO: 22178 - protein, 9 aa, synthetic construct
  source 1..9: note = Seed: LVVVGARGV (KRAS G12R)
IVVNGYRGL

SEQ ID NO: 22179 - protein, 9 aa, synthetic construct
  source 1..9: note = Seed: LVVVGARGV (KRAS G12R)
IVVNGYRGM

SEQ ID NO: 22180 - protein, 9 aa, synthetic construct
  source 1..9: note = Seed: LVVVGARGV (KRAS G12R)
IVVNGYRGR

SEQ ID NO: 22181 - protein, 9 aa, synthetic construct
  source 1..9: note = Seed: LVVVGARGV (KRAS G12R)
IVVNGYRGV

SEQ ID NO: 22182 - protein, 9 aa, synthetic construct
  source 1..9: note = Seed: LVVVGARGV (KRAS G12R)
IVVNGYRGY

SEQ ID NO: 22183 - protein, 9 aa, synthetic construct
  source 1..9: note = Seed: LVVVGARGV (KRAS G12R)
IVVQGARGA

SEQ ID NO: 22184 - protein, 9 aa, synthetic construct
  source 1..9: note = Seed: LVVVGARGV (KRAS G12R)
IVVQGARGC

SEQ ID NO: 22185 - protein, 9 aa, synthetic construct
  source 1..9: note = Seed: LVVVGARGV (KRAS G12R)
IVVQGARGF

SEQ ID NO: 22186 - protein, 9 aa, synthetic construct
  source 1..9: note = Seed: LVVVGARGV (KRAS G12R)
IVVQGARGG

SEQ ID NO: 22187 - protein, 9 aa, synthetic construct
  source 1..9: note = Seed: LVVVGARGV (KRAS G12R)
IVVQGARGI

SEQ ID NO: 22188 - protein, 9 aa, synthetic construct
  source 1..9: note = Seed: LVVVGARGV (KRAS G12R)
IVVQGARGK

SEQ ID NO: 22189 - protein, 9 aa, synthetic construct
  source 1..9: note = Seed: LVVVGARGV (KRAS G12R)
IVVQGARGL

SEQ ID NO: 22190 - protein, 9 aa, synthetic construct
  source 1..9: note = Seed: LVVVGARGV (KRAS G12R)
IVVQGARGM

SEQ ID NO: 22191 - protein, 9 aa, synthetic construct
  source 1..9: note = Seed: LVVVGARGV (KRAS G12R)
IVVQGARGN

SEQ ID NO: 22192 - protein, 9 aa, synthetic construct
  source 1..9: note = Seed: LVVVGARGV (KRAS G12R)
IVVQGARGR

SEQ ID NO: 22193 - protein, 9 aa, synthetic construct
  source 1..9: note = Seed: LVVVGARGV (KRAS G12R)
IVVQGARGS

SEQ ID NO: 22194 - protein, 9 aa, synthetic construct
  source 1..9: note = Seed: LVVVGARGV (KRAS G12R)
IVVQGARGT

SEQ ID NO: 22195 - protein, 9 aa, synthetic construct
  source 1..9: note = Seed: LVVVGARGV (KRAS G12R)
IVVQGARGV

SEQ ID NO: 22196 - protein, 9 aa, synthetic construct
  source 1..9: note = Seed: LVVVGARGV (KRAS G12R)
IVVQGARGW

SEQ ID NO: 22197 - protein, 9 aa, synthetic construct
  source 1..9: note = Seed: LVVVGARGV (KRAS G12R)
IVVQGARGY

SEQ ID NO: 22198 - protein, 9 aa, synthetic construct
  source 1..9: note = Seed: LVVVGARGV (KRAS G12R)
IVVQGFRGI

SEQ ID NO: 22199 - protein, 9 aa, synthetic construct
  source 1..9: note = Seed: LVVVGARGV (KRAS G12R)
IVVQGFRGL

SEQ ID NO: 22200 - protein, 9 aa, synthetic construct
  source 1..9: note = Seed: LVVVGARGV (KRAS G12R)
IVVQGFRGR

SEQ ID NO: 22201 - protein, 9 aa, synthetic construct
  source 1..9: note = Seed: LVVVGARGV (KRAS G12R)
IVVQGGRGA

SEQ ID NO: 22202 - protein, 9 aa, synthetic construct
  source 1..9: note = Seed: LVVVGARGV (KRAS G12R)
IVVQGGRGF

SEQ ID NO: 22203 - protein, 9 aa, synthetic construct
  source 1..9: note = Seed: LVVVGARGV (KRAS G12R)
IVVQGGRGI

SEQ ID NO: 22204 - protein, 9 aa, synthetic construct
  source 1..9: note = Seed: LVVVGARGV (KRAS G12R)
IVVQGGRGL

SEQ ID NO: 22205 - protein, 9 aa, synthetic construct
  source 1..9: note = Seed: LVVVGARGV (KRAS G12R)
IVVQGGRGM

SEQ ID NO: 22206 - protein, 9 aa, synthetic construct
  source 1..9: note = Seed: LVVVGARGV (KRAS G12R)
IVVQGGRGR

SEQ ID NO: 22207 - protein, 9 aa, synthetic construct
  source 1..9: note = Seed: LVVVGARGV (KRAS G12R)
IVVQGGRGS

SEQ ID NO: 22208 - protein, 9 aa, synthetic construct
  source 1..9: note = Seed: LVVVGARGV (KRAS G12R)
IVVQGGRGT

SEQ ID NO: 22209 - protein, 9 aa, synthetic construct
  source 1..9: note = Seed: LVVVGARGV (KRAS G12R)
IVVQGGRGV

SEQ ID NO: 22210 - protein, 9 aa, synthetic construct
  source 1..9: note = Seed: LVVVGARGV (KRAS G12R)
IVVQGGRGY

SEQ ID NO: 22211 - protein, 9 aa, synthetic construct
  source 1..9: note = Seed: LVVVGARGV (KRAS G12R)
IVVQGHRGA

SEQ ID NO: 22212 - protein, 9 aa, synthetic construct
  source 1..9: note = Seed: LVVVGARGV (KRAS G12R)
IVVQGHRGF

SEQ ID NO: 22213 - protein, 9 aa, synthetic construct
  source 1..9: note = Seed: LVVVGARGV (KRAS G12R)
IVVQGHRGH

SEQ ID NO: 22214 - protein, 9 aa, synthetic construct
  source 1..9: note = Seed: LVVVGARGV (KRAS G12R)
IVVQGHRGI

SEQ ID NO: 22215 - protein, 9 aa, synthetic construct
  source 1..9: note = Seed: LVVVGARGV (KRAS G12R)
IVVQGHRGK

SEQ ID NO: 22216 - protein, 9 aa, synthetic construct
  source 1..9: note = Seed: LVVVGARGV (KRAS G12R)
IVVQGHRGL

SEQ ID NO: 22217 - protein, 9 aa, synthetic construct
  source 1..9: note = Seed: LVVVGARGV (KRAS G12R)
IVVQGHRGM

SEQ ID NO: 22218 - protein, 9 aa, synthetic construct
  source 1..9: note = Seed: LVVVGARGV (KRAS G12R)
IVVQGHRGR

SEQ ID NO: 22219 - protein, 9 aa, synthetic construct
  source 1..9: note = Seed: LVVVGARGV (KRAS G12R)
IVVQGHRGS

SEQ ID NO: 22220 - protein, 9 aa, synthetic construct
  source 1..9: note = Seed: LVVVGARGV (KRAS G12R)
IVVQGHRGV

SEQ ID NO: 22221 - protein, 9 aa, synthetic construct
  source 1..9: note = Seed: LVVVGARGV (KRAS G12R)
IVVQGHRGY

SEQ ID NO: 22222 - protein, 9 aa, synthetic construct
  source 1..9: note = Seed: LVVVGARGV (KRAS G12R)
IVVQGIRGA

SEQ ID NO: 22223 - protein, 9 aa, synthetic construct
  source 1..9: note = Seed: LVVVGARGV (KRAS G12R)
IVVQGIRGF

SEQ ID NO: 22224 - protein, 9 aa, synthetic construct
  source 1..9: note = Seed: LVVVGARGV (KRAS G12R)
IVVQGIRGH

SEQ ID NO: 22225 - protein, 9 aa, synthetic construct
  source 1..9: note = Seed: LVVVGARGV (KRAS G12R)
IVVQGIRGI

SEQ ID NO: 22226 - protein, 9 aa, synthetic construct
  source 1..9: note = Seed: LVVVGARGV (KRAS G12R)
IVVQGIRGK

SEQ ID NO: 22227 - protein, 9 aa, synthetic construct
  source 1..9: note = Seed: LVVVGARGV (KRAS G12R)
IVVQGIRGL

SEQ ID NO: 22228 - protein, 9 aa, synthetic construct
  source 1..9: note = Seed: LVVVGARGV (KRAS G12R)
IVVQGIRGM

SEQ ID NO: 22229 - protein, 9 aa, synthetic construct
  source 1..9: note = Seed: LVVVGARGV (KRAS G12R)
IVVQGIRGR

SEQ ID NO: 22230 - protein, 9 aa, synthetic construct
  source 1..9: note = Seed: LVVVGARGV (KRAS G12R)
IVVQGIRGV

SEQ ID NO: 22231 - protein, 9 aa, synthetic construct
  source 1..9: note = Seed: LVVVGARGV (KRAS G12R)
IVVQGIRGY

SEQ ID NO: 22232 - protein, 9 aa, synthetic construct
  source 1..9: note = Seed: LVVVGARGV (KRAS G12R)
IVVQGKRGA

SEQ ID NO: 22233 - protein, 9 aa, synthetic construct
  source 1..9: note = Seed: LVVVGARGV (KRAS G12R)
IVVQGKRGF

SEQ ID NO: 22234 - protein, 9 aa, synthetic construct
  source 1..9: note = Seed: LVVVGARGV (KRAS G12R)
IVVQGKRGG

SEQ ID NO: 22235 - protein, 9 aa, synthetic construct
  source 1..9: note = Seed: LVVVGARGV (KRAS G12R)
IVVQGKRGH

SEQ ID NO: 22236 - protein, 9 aa, synthetic construct
  source 1..9: note = Seed: LVVVGARGV (KRAS G12R)
IVVQGKRGI

SEQ ID NO: 22237 - protein, 9 aa, synthetic construct
  source 1..9: note = Seed: LVVVGARGV (KRAS G12R)
IVVQGKRGK

SEQ ID NO: 22238 - protein, 9 aa, synthetic construct
  source 1..9: note = Seed: LVVVGARGV (KRAS G12R)
IVVQGKRGL

SEQ ID NO: 22239 - protein, 9 aa, synthetic construct
  source 1..9: note = Seed: LVVVGARGV (KRAS G12R)
IVVQGKRGM

SEQ ID NO: 22240 - protein, 9 aa, synthetic construct
  source 1..9: note = Seed: LVVVGARGV (KRAS G12R)
IVVQGKRGN

SEQ ID NO: 22241 - protein, 9 aa, synthetic construct
  source 1..9: note = Seed: LVVVGARGV (KRAS G12R)
IVVQGKRGQ

SEQ ID NO: 22242 - protein, 9 aa, synthetic construct
  source 1..9: note = Seed: LVVVGARGV (KRAS G12R)
IVVQGKRGR

SEQ ID NO: 22243 - protein, 9 aa, synthetic construct
  source 1..9: note = Seed: LVVVGARGV (KRAS G12R)
IVVQGKRGS

SEQ ID NO: 22244 - protein, 9 aa, synthetic construct
  source 1..9: note = Seed: LVVVGARGV (KRAS G12R)
IVVQGKRGT

SEQ ID NO: 22245 - protein, 9 aa, synthetic construct
  source 1..9: note = Seed: LVVVGARGV (KRAS G12R)
IVVQGKRGV

SEQ ID NO: 22246 - protein, 9 aa, synthetic construct
  source 1..9: note = Seed: LVVVGARGV (KRAS G12R)
IVVQGKRGW

SEQ ID NO: 22247 - protein, 9 aa, synthetic construct
  source 1..9: note = Seed: LVVVGARGV (KRAS G12R)
IVVQGKRGY

SEQ ID NO: 22248 - protein, 9 aa, synthetic construct
  source 1..9: note = Seed: LVVVGARGV (KRAS G12R)
IVVQGLRGA

SEQ ID NO: 22249 - protein, 9 aa, synthetic construct
  source 1..9: note = Seed: LVVVGARGV (KRAS G12R)
IVVQGLRGF

SEQ ID NO: 22250 - protein, 9 aa, synthetic construct
  source 1..9: note = Seed: LVVVGARGV (KRAS G12R)
IVVQGLRGI

SEQ ID NO: 22251 - protein, 9 aa, synthetic construct
  source 1..9: note = Seed: LVVVGARGV (KRAS G12R)
IVVQGLRGK

SEQ ID NO: 22252 - protein, 9 aa, synthetic construct
  source 1..9: note = Seed: LVVVGARGV (KRAS G12R)
IVVQGLRGL

SEQ ID NO: 22253 - protein, 9 aa, synthetic construct
  source 1..9: note = Seed: LVVVGARGV (KRAS G12R)
IVVQGLRGM

SEQ ID NO: 22254 - protein, 9 aa, synthetic construct
  source 1..9: note = Seed: LVVVGARGV (KRAS G12R)
IVVQGLRGR

SEQ ID NO: 22255 - protein, 9 aa, synthetic construct
  source 1..9: note = Seed: LVVVGARGV (KRAS G12R)
IVVQGLRGV

SEQ ID NO: 22256 - protein, 9 aa, synthetic construct
  source 1..9: note = Seed: LVVVGARGV (KRAS G12R)
IVVQGLRGY

SEQ ID NO: 22257 - protein, 9 aa, synthetic construct
  source 1..9: note = Seed: LVVVGARGV (KRAS G12R)
IVVQGMRGA

SEQ ID NO: 22258 - protein, 9 aa, synthetic construct
  source 1..9: note = Seed: LVVVGARGV (KRAS G12R)
IVVQGMRGF

SEQ ID NO: 22259 - protein, 9 aa, synthetic construct
  source 1..9: note = Seed: LVVVGARGV (KRAS G12R)
IVVQGMRGI

SEQ ID NO: 22260 - protein, 9 aa, synthetic construct
  source 1..9: note = Seed: LVVVGARGV (KRAS G12R)
IVVQGMRGK

SEQ ID NO: 22261 - protein, 9 aa, synthetic construct
  source 1..9: note = Seed: LVVVGARGV (KRAS G12R)
IVVQGMRGL

SEQ ID NO: 22262 - protein, 9 aa, synthetic construct
  source 1..9: note = Seed: LVVVGARGV (KRAS G12R)
IVVQGMRGM

SEQ ID NO: 22263 - protein, 9 aa, synthetic construct
  source 1..9: note = Seed: LVVVGARGV (KRAS G12R)
IVVQGMRGR

SEQ ID NO: 22264 - protein, 9 aa, synthetic construct
  source 1..9: note = Seed: LVVVGARGV (KRAS G12R)
IVVQGMRGV

SEQ ID NO: 22265 - protein, 9 aa, synthetic construct
  source 1..9: note = Seed: LVVVGARGV (KRAS G12R)
IVVQGMRGY

SEQ ID NO: 22266 - protein, 9 aa, synthetic construct
  source 1..9: note = Seed: LVVVGARGV (KRAS G12R)
IVVQGNRGA

SEQ ID NO: 22267 - protein, 9 aa, synthetic construct
  source 1..9: note = Seed: LVVVGARGV (KRAS G12R)
IVVQGNRGF

SEQ ID NO: 22268 - protein, 9 aa, synthetic construct
  source 1..9: note = Seed: LVVVGARGV (KRAS G12R)
IVVQGNRGH

SEQ ID NO: 22269 - protein, 9 aa, synthetic construct
  source 1..9: note = Seed: LVVVGARGV (KRAS G12R)
IVVQGNRGI

SEQ ID NO: 22270 - protein, 9 aa, synthetic construct
  source 1..9: note = Seed: LVVVGARGV (KRAS G12R)
IVVQGNRGL

SEQ ID NO: 22271 - protein, 9 aa, synthetic construct
  source 1..9: note = Seed: LVVVGARGV (KRAS G12R)
IVVQGNRGM

SEQ ID NO: 22272 - protein, 9 aa, synthetic construct
  source 1..9: note = Seed: LVVVGARGV (KRAS G12R)
IVVQGNRGR

SEQ ID NO: 22273 - protein, 9 aa, synthetic construct
  source 1..9: note = Seed: LVVVGARGV (KRAS G12R)
IVVQGNRGS

SEQ ID NO: 22274 - protein, 9 aa, synthetic construct
  source 1..9: note = Seed: LVVVGARGV (KRAS G12R)
IVVQGNRGT

SEQ ID NO: 22275 - protein, 9 aa, synthetic construct
  source 1..9: note = Seed: LVVVGARGV (KRAS G12R)
IVVQGNRGV

SEQ ID NO: 22276 - protein, 9 aa, synthetic construct
  source 1..9: note = Seed: LVVVGARGV (KRAS G12R)
IVVQGNRGW

SEQ ID NO: 22277 - protein, 9 aa, synthetic construct
  source 1..9: note = Seed: LVVVGARGV (KRAS G12R)
IVVQGNRGY

SEQ ID NO: 22278 - protein, 9 aa, synthetic construct
  source 1..9: note = Seed: LVVVGARGV (KRAS G12R)
IVVQGPRGA

SEQ ID NO: 22279 - protein, 9 aa, synthetic construct
  source 1..9: note = Seed: LVVVGARGV (KRAS G12R)
IVVQGPRGF

SEQ ID NO: 22280 - protein, 9 aa, synthetic construct
  source 1..9: note = Seed: LVVVGARGV (KRAS G12R)
IVVQGPRGI

SEQ ID NO: 22281 - protein, 9 aa, synthetic construct
  source 1..9: note = Seed: LVVVGARGV (KRAS G12R)
IVVQGPRGL

SEQ ID NO: 22282 - protein, 9 aa, synthetic construct
  source 1..9: note = Seed: LVVVGARGV (KRAS G12R)
IVVQGPRGM

SEQ ID NO: 22283 - protein, 9 aa, synthetic construct
  source 1..9: note = Seed: LVVVGARGV (KRAS G12R)
IVVQGPRGR

SEQ ID NO: 22284 - protein, 9 aa, synthetic construct
  source 1..9: note = Seed: LVVVGARGV (KRAS G12R)
IVVQGPRGV

SEQ ID NO: 22285 - protein, 9 aa, synthetic construct
  source 1..9: note = Seed: LVVVGARGV (KRAS G12R)
IVVQGPRGY

SEQ ID NO: 22286 - protein, 9 aa, synthetic construct
  source 1..9: note = Seed: LVVVGARGV (KRAS G12R)
IVVQGQRGF

SEQ ID NO: 22287 - protein, 9 aa, synthetic construct
  source 1..9: note = Seed: LVVVGARGV (KRAS G12R)
IVVQGQRGI

SEQ ID NO: 22288 - protein, 9 aa, synthetic construct
  source 1..9: note = Seed: LVVVGARGV (KRAS G12R)
IVVQGQRGL

SEQ ID NO: 22289 - protein, 9 aa, synthetic construct
  source 1..9: note = Seed: LVVVGARGV (KRAS G12R)
IVVQGRRGA

SEQ ID NO: 22290 - protein, 9 aa, synthetic construct
  source 1..9: note = Seed: LVVVGARGV (KRAS G12R)
IVVQGRRGC

SEQ ID NO: 22291 - protein, 9 aa, synthetic construct
  source 1..9: note = Seed: LVVVGARGV (KRAS G12R)
IVVQGRRGF

SEQ ID NO: 22292 - protein, 9 aa, synthetic construct
  source 1..9: note = Seed: LVVVGARGV (KRAS G12R)
IVVQGRRGG

SEQ ID NO: 22293 - protein, 9 aa, synthetic construct
  source 1..9: note = Seed: LVVVGARGV (KRAS G12R)
IVVQGRRGH

SEQ ID NO: 22294 - protein, 9 aa, synthetic construct
  source 1..9: note = Seed: LVVVGARGV (KRAS G12R)
IVVQGRRGI

SEQ ID NO: 22295 - protein, 9 aa, synthetic construct
  source 1..9: note = Seed: LVVVGARGV (KRAS G12R)
IVVQGRRGK

SEQ ID NO: 22296 - protein, 9 aa, synthetic construct
  source 1..9: note = Seed: LVVVGARGV (KRAS G12R)
IVVQGRRGL

SEQ ID NO: 22297 - protein, 9 aa, synthetic construct
  source 1..9: note = Seed: LVVVGARGV (KRAS G12R)
IVVQGRRGM

SEQ ID NO: 22298 - protein, 9 aa, synthetic construct
  source 1..9: note = Seed: LVVVGARGV (KRAS G12R)
IVVQGRRGN

SEQ ID NO: 22299 - protein, 9 aa, synthetic construct
  source 1..9: note = Seed: LVVVGARGV (KRAS G12R)
IVVQGRRGP

SEQ ID NO: 22300 - protein, 9 aa, synthetic construct
  source 1..9: note = Seed: LVVVGARGV (KRAS G12R)
IVVQGRRGQ

SEQ ID NO: 22301 - protein, 9 aa, synthetic construct
  source 1..9: note = Seed: LVVVGARGV (KRAS G12R)
IVVQGRRGR

SEQ ID NO: 22302 - protein, 9 aa, synthetic construct
  source 1..9: note = Seed: LVVVGARGV (KRAS G12R)
IVVQGRRGS

SEQ ID NO: 22303 - protein, 9 aa, synthetic construct
  source 1..9: note = Seed: LVVVGARGV (KRAS G12R)
IVVQGRRGT

SEQ ID NO: 22304 - protein, 9 aa, synthetic construct
  source 1..9: note = Seed: LVVVGARGV (KRAS G12R)
IVVQGRRGV

SEQ ID NO: 22305 - protein, 9 aa, synthetic construct
  source 1..9: note = Seed: LVVVGARGV (KRAS G12R)
IVVQGRRGW

SEQ ID NO: 22306 - protein, 9 aa, synthetic construct
  source 1..9: note = Seed: LVVVGARGV (KRAS G12R)
IVVQGRRGY

SEQ ID NO: 22307 - protein, 9 aa, synthetic construct
  source 1..9: note = Seed: LVVVGARGV (KRAS G12R)
IVVQGSRGA

SEQ ID NO: 22308 - protein, 9 aa, synthetic construct
  source 1..9: note = Seed: LVVVGARGV (KRAS G12R)
IVVQGSRGF

SEQ ID NO: 22309 - protein, 9 aa, synthetic construct
  source 1..9: note = Seed: LVVVGARGV (KRAS G12R)
IVVQGSRGH

SEQ ID NO: 22310 - protein, 9 aa, synthetic construct
  source 1..9: note = Seed: LVVVGARGV (KRAS G12R)
IVVQGSRGI

SEQ ID NO: 22311 - protein, 9 aa, synthetic construct
  source 1..9: note = Seed: LVVVGARGV (KRAS G12R)
IVVQGSRGK

SEQ ID NO: 22312 - protein, 9 aa, synthetic construct
  source 1..9: note = Seed: LVVVGARGV (KRAS G12R)
IVVQGSRGL

SEQ ID NO: 22313 - protein, 9 aa, synthetic construct
  source 1..9: note = Seed: LVVVGARGV (KRAS G12R)
IVVQGSRGM

SEQ ID NO: 22314 - protein, 9 aa, synthetic construct
  source 1..9: note = Seed: LVVVGARGV (KRAS G12R)
IVVQGSRGR

SEQ ID NO: 22315 - protein, 9 aa, synthetic construct
  source 1..9: note = Seed: LVVVGARGV (KRAS G12R)
IVVQGSRGS

SEQ ID NO: 22316 - protein, 9 aa, synthetic construct
  source 1..9: note = Seed: LVVVGARGV (KRAS G12R)
IVVQGSRGT

SEQ ID NO: 22317 - protein, 9 aa, synthetic construct
  source 1..9: note = Seed: LVVVGARGV (KRAS G12R)
IVVQGSRGV

SEQ ID NO: 22318 - protein, 9 aa, synthetic construct
  source 1..9: note = Seed: LVVVGARGV (KRAS G12R)
IVVQGSRGY

SEQ ID NO: 22319 - protein, 9 aa, synthetic construct
  source 1..9: note = Seed: LVVVGARGV (KRAS G12R)
IVVQGTRGA

SEQ ID NO: 22320 - protein, 9 aa, synthetic construct
  source 1..9: note = Seed: LVVVGARGV (KRAS G12R)
IVVQGTRGF

SEQ ID NO: 22321 - protein, 9 aa, synthetic construct
  source 1..9: note = Seed: LVVVGARGV (KRAS G12R)
IVVQGTRGI

SEQ ID NO: 22322 - protein, 9 aa, synthetic construct
  source 1..9: note = Seed: LVVVGARGV (KRAS G12R)
IVVQGTRGK

SEQ ID NO: 22323 - protein, 9 aa, synthetic construct
  source 1..9: note = Seed: LVVVGARGV (KRAS G12R)
IVVQGTRGL

SEQ ID NO: 22324 - protein, 9 aa, synthetic construct
  source 1..9: note = Seed: LVVVGARGV (KRAS G12R)
IVVQGTRGM

SEQ ID NO: 22325 - protein, 9 aa, synthetic construct
  source 1..9: note = Seed: LVVVGARGV (KRAS G12R)
IVVQGTRGR

SEQ ID NO: 22326 - protein, 9 aa, synthetic construct
  source 1..9: note = Seed: LVVVGARGV (KRAS G12R)
IVVQGTRGV

SEQ ID NO: 22327 - protein, 9 aa, synthetic construct
  source 1..9: note = Seed: LVVVGARGV (KRAS G12R)
IVVQGTRGY

SEQ ID NO: 22328 - protein, 9 aa, synthetic construct
  source 1..9: note = Seed: LVVVGARGV (KRAS G12R)
IVVQGVRGA

SEQ ID NO: 22329 - protein, 9 aa, synthetic construct
  source 1..9: note = Seed: LVVVGARGV (KRAS G12R)
IVVQGVRGF

SEQ ID NO: 22330 - protein, 9 aa, synthetic construct
  source 1..9: note = Seed: LVVVGARGV (KRAS G12R)
IVVQGVRGI

SEQ ID NO: 22331 - protein, 9 aa, synthetic construct
  source 1..9: note = Seed: LVVVGARGV (KRAS G12R)
IVVQGVRGK

SEQ ID NO: 22332 - protein, 9 aa, synthetic construct
  source 1..9: note = Seed: LVVVGARGV (KRAS G12R)
IVVQGVRGL

SEQ ID NO: 22333 - protein, 9 aa, synthetic construct
  source 1..9: note = Seed: LVVVGARGV (KRAS G12R)
IVVQGVRGM

SEQ ID NO: 22334 - protein, 9 aa, synthetic construct
  source 1..9: note = Seed: LVVVGARGV (KRAS G12R)
IVVQGVRGR

SEQ ID NO: 22335 - protein, 9 aa, synthetic construct
  source 1..9: note = Seed: LVVVGARGV (KRAS G12R)
IVVQGVRGV

SEQ ID NO: 22336 - protein, 9 aa, synthetic construct
  source 1..9: note = Seed: LVVVGARGV (KRAS G12R)
IVVQGVRGY

SEQ ID NO: 22337 - protein, 9 aa, synthetic construct
  source 1..9: note = Seed: LVVVGARGV (KRAS G12R)
IVVQGWRGL

SEQ ID NO: 22338 - protein, 9 aa, synthetic construct
  source 1..9: note = Seed: LVVVGARGV (KRAS G12R)
IVVQGWRGM

SEQ ID NO: 22339 - protein, 9 aa, synthetic construct
  source 1..9: note = Seed: LVVVGARGV (KRAS G12R)
IVVQGWRGR

SEQ ID NO: 22340 - protein, 9 aa, synthetic construct
  source 1..9: note = Seed: LVVVGARGV (KRAS G12R)
IVVQGYRGF

SEQ ID NO: 22341 - protein, 9 aa, synthetic construct
  source 1..9: note = Seed: LVVVGARGV (KRAS G12R)
IVVQGYRGL

SEQ ID NO: 22342 - protein, 9 aa, synthetic construct
  source 1..9: note = Seed: LVVVGARGV (KRAS G12R)
IVVQGYRGR

SEQ ID NO: 22343 - protein, 9 aa, synthetic construct
  source 1..9: note = Seed: LVVVGARGV (KRAS G12R)
IVVRGARGA

SEQ ID NO: 22344 - protein, 9 aa, synthetic construct
  source 1..9: note = Seed: LVVVGARGV (KRAS G12R)
IVVRGARGF

SEQ ID NO: 22345 - protein, 9 aa, synthetic construct
  source 1..9: note = Seed: LVVVGARGV (KRAS G12R)
IVVRGARGH

SEQ ID NO: 22346 - protein, 9 aa, synthetic construct
  source 1..9: note = Seed: LVVVGARGV (KRAS G12R)
IVVRGARGI

SEQ ID NO: 22347 - protein, 9 aa, synthetic construct
  source 1..9: note = Seed: LVVVGARGV (KRAS G12R)
IVVRGARGK

SEQ ID NO: 22348 - protein, 9 aa, synthetic construct
  source 1..9: note = Seed: LVVVGARGV (KRAS G12R)
IVVRGARGL

SEQ ID NO: 22349 - protein, 9 aa, synthetic construct
  source 1..9: note = Seed: LVVVGARGV (KRAS G12R)
IVVRGARGM

SEQ ID NO: 22350 - protein, 9 aa, synthetic construct
  source 1..9: note = Seed: LVVVGARGV (KRAS G12R)
IVVRGARGQ

SEQ ID NO: 22351 - protein, 9 aa, synthetic construct
  source 1..9: note = Seed: LVVVGARGV (KRAS G12R)
IVVRGARGR

SEQ ID NO: 22352 - protein, 9 aa, synthetic construct
  source 1..9: note = Seed: LVVVGARGV (KRAS G12R)
IVVRGARGS

SEQ ID NO: 22353 - protein, 9 aa, synthetic construct
  source 1..9: note = Seed: LVVVGARGV (KRAS G12R)
IVVRGARGT

SEQ ID NO: 22354 - protein, 9 aa, synthetic construct
  source 1..9: note = Seed: LVVVGARGV (KRAS G12R)
IVVRGARGV

SEQ ID NO: 22355 - protein, 9 aa, synthetic construct
  source 1..9: note = Seed: LVVVGARGV (KRAS G12R)
IVVRGARGW

SEQ ID NO: 22356 - protein, 9 aa, synthetic construct
  source 1..9: note = Seed: LVVVGARGV (KRAS G12R)
IVVRGARGY

SEQ ID NO: 22357 - protein, 9 aa, synthetic construct
  source 1..9: note = Seed: LVVVGARGV (KRAS G12R)
IVVRGCRGF

SEQ ID NO: 22358 - protein, 9 aa, synthetic construct
  source 1..9: note = Seed: LVVVGARGV (KRAS G12R)
IVVRGCRGI

SEQ ID NO: 22359 - protein, 9 aa, synthetic construct
  source 1..9: note = Seed: LVVVGARGV (KRAS G12R)
IVVRGCRGK

SEQ ID NO: 22360 - protein, 9 aa, synthetic construct
  source 1..9: note = Seed: LVVVGARGV (KRAS G12R)
IVVRGCRGL

SEQ ID NO: 22361 - protein, 9 aa, synthetic construct
  source 1..9: note = Seed: LVVVGARGV (KRAS G12R)
IVVRGCRGM

SEQ ID NO: 22362 - protein, 9 aa, synthetic construct
  source 1..9: note = Seed: LVVVGARGV (KRAS G12R)
IVVRGCRGQ

SEQ ID NO: 22363 - protein, 9 aa, synthetic construct
  source 1..9: note = Seed: LVVVGARGV (KRAS G12R)
IVVRGCRGR

SEQ ID NO: 22364 - protein, 9 aa, synthetic construct
  source 1..9: note = Seed: LVVVGARGV (KRAS G12R)
IVVRGCRGY

SEQ ID NO: 22365 - protein, 9 aa, synthetic construct
  source 1..9: note = Seed: LVVVGARGV (KRAS G12R)
IVVRGERGR

SEQ ID NO: 22366 - protein, 9 aa, synthetic construct
  source 1..9: note = Seed: LVVVGARGV (KRAS G12R)
IVVRGFRGF

SEQ ID NO: 22367 - protein, 9 aa, synthetic construct
  source 1..9: note = Seed: LVVVGARGV (KRAS G12R)
IVVRGFRGI

SEQ ID NO: 22368 - protein, 9 aa, synthetic construct
  source 1..9: note = Seed: LVVVGARGV (KRAS G12R)
IVVRGFRGM

SEQ ID NO: 22369 - protein, 9 aa, synthetic construct
  source 1..9: note = Seed: LVVVGARGV (KRAS G12R)
IVVRGFRGR

SEQ ID NO: 22370 - protein, 9 aa, synthetic construct
  source 1..9: note = Seed: LVVVGARGV (KRAS G12R)
IVVRGFRGV

SEQ ID NO: 22371 - protein, 9 aa, synthetic construct
  source 1..9: note = Seed: LVVVGARGV (KRAS G12R)
IVVRGFRGY

SEQ ID NO: 22372 - protein, 9 aa, synthetic construct
  source 1..9: note = Seed: LVVVGARGV (KRAS G12R)
IVVRGGRGA

SEQ ID NO: 22373 - protein, 9 aa, synthetic construct
  source 1..9: note = Seed: LVVVGARGV (KRAS G12R)
IVVRGGRGF

SEQ ID NO: 22374 - protein, 9 aa, synthetic construct
  source 1..9: note = Seed: LVVVGARGV (KRAS G12R)
IVVRGGRGH

SEQ ID NO: 22375 - protein, 9 aa, synthetic construct
  source 1..9: note = Seed: LVVVGARGV (KRAS G12R)
IVVRGGRGI

SEQ ID NO: 22376 - protein, 9 aa, synthetic construct
  source 1..9: note = Seed: LVVVGARGV (KRAS G12R)
IVVRGGRGK

SEQ ID NO: 22377 - protein, 9 aa, synthetic construct
  source 1..9: note = Seed: LVVVGARGV (KRAS G12R)
IVVRGGRGL

SEQ ID NO: 22378 - protein, 9 aa, synthetic construct
  source 1..9: note = Seed: LVVVGARGV (KRAS G12R)
IVVRGGRGM

SEQ ID NO: 22379 - protein, 9 aa, synthetic construct
  source 1..9: note = Seed: LVVVGARGV (KRAS G12R)
IVVRGGRGR

SEQ ID NO: 22380 - protein, 9 aa, synthetic construct
  source 1..9: note = Seed: LVVVGARGV (KRAS G12R)
IVVRGGRGV

SEQ ID NO: 22381 - protein, 9 aa, synthetic construct
  source 1..9: note = Seed: LVVVGARGV (KRAS G12R)
IVVRGGRGY

SEQ ID NO: 22382 - protein, 9 aa, synthetic construct
  source 1..9: note = Seed: LVVVGARGV (KRAS G12R)
IVVRGHRGA

SEQ ID NO: 22383 - protein, 9 aa, synthetic construct
  source 1..9: note = Seed: LVVVGARGV (KRAS G12R)
IVVRGHRGC

SEQ ID NO: 22384 - protein, 9 aa, synthetic construct
  source 1..9: note = Seed: LVVVGARGV (KRAS G12R)
IVVRGHRGF

SEQ ID NO: 22385 - protein, 9 aa, synthetic construct
  source 1..9: note = Seed: LVVVGARGV (KRAS G12R)
IVVRGHRGG

SEQ ID NO: 22386 - protein, 9 aa, synthetic construct
  source 1..9: note = Seed: LVVVGARGV (KRAS G12R)
IVVRGHRGH

SEQ ID NO: 22387 - protein, 9 aa, synthetic construct
  source 1..9: note = Seed: LVVVGARGV (KRAS G12R)
IVVRGHRGI

SEQ ID NO: 22388 - protein, 9 aa, synthetic construct
  source 1..9: note = Seed: LVVVGARGV (KRAS G12R)
IVVRGHRGK

SEQ ID NO: 22389 - protein, 9 aa, synthetic construct
  source 1..9: note = Seed: LVVVGARGV (KRAS G12R)
IVVRGHRGL

SEQ ID NO: 22390 - protein, 9 aa, synthetic construct
  source 1..9: note = Seed: LVVVGARGV (KRAS G12R)
IVVRGHRGM

SEQ ID NO: 22391 - protein, 9 aa, synthetic construct
  source 1..9: note = Seed: LVVVGARGV (KRAS G12R)
IVVRGHRGN

SEQ ID NO: 22392 - protein, 9 aa, synthetic construct
  source 1..9: note = Seed: LVVVGARGV (KRAS G12R)
IVVRGHRGP

SEQ ID NO: 22393 - protein, 9 aa, synthetic construct
  source 1..9: note = Seed: LVVVGARGV (KRAS G12R)
IVVRGHRGQ

SEQ ID NO: 22394 - protein, 9 aa, synthetic construct
  source 1..9: note = Seed: LVVVGARGV (KRAS G12R)
IVVRGHRGR

SEQ ID NO: 22395 - protein, 9 aa, synthetic construct
  source 1..9: note = Seed: LVVVGARGV (KRAS G12R)
IVVRGHRGS

SEQ ID NO: 22396 - protein, 9 aa, synthetic construct
  source 1..9: note = Seed: LVVVGARGV (KRAS G12R)
IVVRGHRGT

SEQ ID NO: 22397 - protein, 9 aa, synthetic construct
  source 1..9: note = Seed: LVVVGARGV (KRAS G12R)
IVVRGHRGV

SEQ ID NO: 22398 - protein, 9 aa, synthetic construct
  source 1..9: note = Seed: LVVVGARGV (KRAS G12R)
IVVRGHRGW

SEQ ID NO: 22399 - protein, 9 aa, synthetic construct
  source 1..9: note = Seed: LVVVGARGV (KRAS G12R)
IVVRGHRGY

SEQ ID NO: 22400 - protein, 9 aa, synthetic construct
  source 1..9: note = Seed: LVVVGARGV (KRAS G12R)
IVVRGIRGA

SEQ ID NO: 22401 - protein, 9 aa, synthetic construct
  source 1..9: note = Seed: LVVVGARGV (KRAS G12R)
IVVRGIRGF

SEQ ID NO: 22402 - protein, 9 aa, synthetic construct
  source 1..9: note = Seed: LVVVGARGV (KRAS G12R)
IVVRGIRGG

SEQ ID NO: 22403 - protein, 9 aa, synthetic construct
  source 1..9: note = Seed: LVVVGARGV (KRAS G12R)
IVVRGIRGH

SEQ ID NO: 22404 - protein, 9 aa, synthetic construct
  source 1..9: note = Seed: LVVVGARGV (KRAS G12R)
IVVRGIRGI

SEQ ID NO: 22405 - protein, 9 aa, synthetic construct
  source 1..9: note = Seed: LVVVGARGV (KRAS G12R)
IVVRGIRGK

SEQ ID NO: 22406 - protein, 9 aa, synthetic construct
  source 1..9: note = Seed: LVVVGARGV (KRAS G12R)
IVVRGIRGL

SEQ ID NO: 22407 - protein, 9 aa, synthetic construct
  source 1..9: note = Seed: LVVVGARGV (KRAS G12R)
IVVRGIRGM

SEQ ID NO: 22408 - protein, 9 aa, synthetic construct
  source 1..9: note = Seed: LVVVGARGV (KRAS G12R)
IVVRGIRGN

SEQ ID NO: 22409 - protein, 9 aa, synthetic construct
  source 1..9: note = Seed: LVVVGARGV (KRAS G12R)
IVVRGIRGQ

SEQ ID NO: 22410 - protein, 9 aa, synthetic construct
  source 1..9: note = Seed: LVVVGARGV (KRAS G12R)
IVVRGIRGR

SEQ ID NO: 22411 - protein, 9 aa, synthetic construct
  source 1..9: note = Seed: LVVVGARGV (KRAS G12R)
IVVRGIRGS

SEQ ID NO: 22412 - protein, 9 aa, synthetic construct
  source 1..9: note = Seed: LVVVGARGV (KRAS G12R)
IVVRGIRGT

SEQ ID NO: 22413 - protein, 9 aa, synthetic construct
  source 1..9: note = Seed: LVVVGARGV (KRAS G12R)
IVVRGIRGV

SEQ ID NO: 22414 - protein, 9 aa, synthetic construct
  source 1..9: note = Seed: LVVVGARGV (KRAS G12R)
IVVRGIRGW

SEQ ID NO: 22415 - protein, 9 aa, synthetic construct
  source 1..9: note = Seed: LVVVGARGV (KRAS G12R)
IVVRGIRGY

SEQ ID NO: 22416 - protein, 9 aa, synthetic construct
  source 1..9: note = Seed: LVVVGARGV (KRAS G12R)
IVVRGKRGA

SEQ ID NO: 22417 - protein, 9 aa, synthetic construct
  source 1..9: note = Seed: LVVVGARGV (KRAS G12R)
IVVRGKRGC

SEQ ID NO: 22418 - protein, 9 aa, synthetic construct
  source 1..9: note = Seed: LVVVGARGV (KRAS G12R)
IVVRGKRGE

SEQ ID NO: 22419 - protein, 9 aa, synthetic construct
  source 1..9: note = Seed: LVVVGARGV (KRAS G12R)
IVVRGKRGF

SEQ ID NO: 22420 - protein, 9 aa, synthetic construct
  source 1..9: note = Seed: LVVVGARGV (KRAS G12R)
IVVRGKRGG

SEQ ID NO: 22421 - protein, 9 aa, synthetic construct
  source 1..9: note = Seed: LVVVGARGV (KRAS G12R)
IVVRGKRGH

SEQ ID NO: 22422 - protein, 9 aa, synthetic construct
  source 1..9: note = Seed: LVVVGARGV (KRAS G12R)
IVVRGKRGI

SEQ ID NO: 22423 - protein, 9 aa, synthetic construct
  source 1..9: note = Seed: LVVVGARGV (KRAS G12R)
IVVRGKRGK

SEQ ID NO: 22424 - protein, 9 aa, synthetic construct
  source 1..9: note = Seed: LVVVGARGV (KRAS G12R)
IVVRGKRGL

SEQ ID NO: 22425 - protein, 9 aa, synthetic construct
  source 1..9: note = Seed: LVVVGARGV (KRAS G12R)
IVVRGKRGM

SEQ ID NO: 22426 - protein, 9 aa, synthetic construct
  source 1..9: note = Seed: LVVVGARGV (KRAS G12R)
IVVRGKRGN

SEQ ID NO: 22427 - protein, 9 aa, synthetic construct
  source 1..9: note = Seed: LVVVGARGV (KRAS G12R)
IVVRGKRGP

SEQ ID NO: 22428 - protein, 9 aa, synthetic construct
  source 1..9: note = Seed: LVVVGARGV (KRAS G12R)
IVVRGKRGQ

SEQ ID NO: 22429 - protein, 9 aa, synthetic construct
  source 1..9: note = Seed: LVVVGARGV (KRAS G12R)
IVVRGKRGR

SEQ ID NO: 22430 - protein, 9 aa, synthetic construct
  source 1..9: note = Seed: LVVVGARGV (KRAS G12R)
IVVRGKRGS

SEQ ID NO: 22431 - protein, 9 aa, synthetic construct
  source 1..9: note = Seed: LVVVGARGV (KRAS G12R)
IVVRGKRGT

SEQ ID NO: 22432 - protein, 9 aa, synthetic construct
  source 1..9: note = Seed: LVVVGARGV (KRAS G12R)
IVVRGKRGV

SEQ ID NO: 22433 - protein, 9 aa, synthetic construct
  source 1..9: note = Seed: LVVVGARGV (KRAS G12R)
IVVRGKRGW

SEQ ID NO: 22434 - protein, 9 aa, synthetic construct
  source 1..9: note = Seed: LVVVGARGV (KRAS G12R)
IVVRGKRGY

SEQ ID NO: 22435 - protein, 9 aa, synthetic construct
  source 1..9: note = Seed: LVVVGARGV (KRAS G12R)
IVVRGLRGA

SEQ ID NO: 22436 - protein, 9 aa, synthetic construct
  source 1..9: note = Seed: LVVVGARGV (KRAS G12R)
IVVRGLRGC

SEQ ID NO: 22437 - protein, 9 aa, synthetic construct
  source 1..9: note = Seed: LVVVGARGV (KRAS G12R)
IVVRGLRGE

SEQ ID NO: 22438 - protein, 9 aa, synthetic construct
  source 1..9: note = Seed: LVVVGARGV (KRAS G12R)
IVVRGLRGF

SEQ ID NO: 22439 - protein, 9 aa, synthetic construct
  source 1..9: note = Seed: LVVVGARGV (KRAS G12R)
IVVRGLRGG

SEQ ID NO: 22440 - protein, 9 aa, synthetic construct
  source 1..9: note = Seed: LVVVGARGV (KRAS G12R)
IVVRGLRGH

SEQ ID NO: 22441 - protein, 9 aa, synthetic construct
  source 1..9: note = Seed: LVVVGARGV (KRAS G12R)
IVVRGLRGI

SEQ ID NO: 22442 - protein, 9 aa, synthetic construct
  source 1..9: note = Seed: LVVVGARGV (KRAS G12R)
IVVRGLRGK

SEQ ID NO: 22443 - protein, 9 aa, synthetic construct
  source 1..9: note = Seed: LVVVGARGV (KRAS G12R)
IVVRGLRGL

SEQ ID NO: 22444 - protein, 9 aa, synthetic construct
  source 1..9: note = Seed: LVVVGARGV (KRAS G12R)
IVVRGLRGM

SEQ ID NO: 22445 - protein, 9 aa, synthetic construct
  source 1..9: note = Seed: LVVVGARGV (KRAS G12R)
IVVRGLRGQ

SEQ ID NO: 22446 - protein, 9 aa, synthetic construct
  source 1..9: note = Seed: LVVVGARGV (KRAS G12R)
IVVRGLRGR

SEQ ID NO: 22447 - protein, 9 aa, synthetic construct
  source 1..9: note = Seed: LVVVGARGV (KRAS G12R)
IVVRGLRGS

SEQ ID NO: 22448 - protein, 9 aa, synthetic construct
  source 1..9: note = Seed: LVVVGARGV (KRAS G12R)
IVVRGLRGV

SEQ ID NO: 22449 - protein, 9 aa, synthetic construct
  source 1..9: note = Seed: LVVVGARGV (KRAS G12R)
IVVRGLRGY

SEQ ID NO: 22450 - protein, 9 aa, synthetic construct
  source 1..9: note = Seed: LVVVGARGV (KRAS G12R)
IVVRGMRGA

SEQ ID NO: 22451 - protein, 9 aa, synthetic construct
  source 1..9: note = Seed: LVVVGARGV (KRAS G12R)
IVVRGMRGC

SEQ ID NO: 22452 - protein, 9 aa, synthetic construct
  source 1..9: note = Seed: LVVVGARGV (KRAS G12R)
IVVRGMRGF

SEQ ID NO: 22453 - protein, 9 aa, synthetic construct
  source 1..9: note = Seed: LVVVGARGV (KRAS G12R)
IVVRGMRGG

SEQ ID NO: 22454 - protein, 9 aa, synthetic construct
  source 1..9: note = Seed: LVVVGARGV (KRAS G12R)
IVVRGMRGH

SEQ ID NO: 22455 - protein, 9 aa, synthetic construct
  source 1..9: note = Seed: LVVVGARGV (KRAS G12R)
IVVRGMRGI

SEQ ID NO: 22456 - protein, 9 aa, synthetic construct
  source 1..9: note = Seed: LVVVGARGV (KRAS G12R)
IVVRGMRGK

SEQ ID NO: 22457 - protein, 9 aa, synthetic construct
  source 1..9: note = Seed: LVVVGARGV (KRAS G12R)
IVVRGMRGL

SEQ ID NO: 22458 - protein, 9 aa, synthetic construct
  source 1..9: note = Seed: LVVVGARGV (KRAS G12R)
IVVRGMRGM

SEQ ID NO: 22459 - protein, 9 aa, synthetic construct
  source 1..9: note = Seed: LVVVGARGV (KRAS G12R)
IVVRGMRGQ

SEQ ID NO: 22460 - protein, 9 aa, synthetic construct
  source 1..9: note = Seed: LVVVGARGV (KRAS G12R)
IVVRGMRGR

SEQ ID NO: 22461 - protein, 9 aa, synthetic construct
  source 1..9: note = Seed: LVVVGARGV (KRAS G12R)
IVVRGMRGS

SEQ ID NO: 22462 - protein, 9 aa, synthetic construct
  source 1..9: note = Seed: LVVVGARGV (KRAS G12R)
IVVRGMRGV

SEQ ID NO: 22463 - protein, 9 aa, synthetic construct
  source 1..9: note = Seed: LVVVGARGV (KRAS G12R)
IVVRGMRGW

SEQ ID NO: 22464 - protein, 9 aa, synthetic construct
  source 1..9: note = Seed: LVVVGARGV (KRAS G12R)
IVVRGMRGY

SEQ ID NO: 22465 - protein, 9 aa, synthetic construct
  source 1..9: note = Seed: LVVVGARGV (KRAS G12R)
IVVRGNRGA

SEQ ID NO: 22466 - protein, 9 aa, synthetic construct
  source 1..9: note = Seed: LVVVGARGV (KRAS G12R)
IVVRGNRGF

SEQ ID NO: 22467 - protein, 9 aa, synthetic construct
  source 1..9: note = Seed: LVVVGARGV (KRAS G12R)
IVVRGNRGH

SEQ ID NO: 22468 - protein, 9 aa, synthetic construct
  source 1..9: note = Seed: LVVVGARGV (KRAS G12R)
IVVRGNRGI

SEQ ID NO: 22469 - protein, 9 aa, synthetic construct
  source 1..9: note = Seed: LVVVGARGV (KRAS G12R)
IVVRGNRGK

SEQ ID NO: 22470 - protein, 9 aa, synthetic construct
  source 1..9: note = Seed: LVVVGARGV (KRAS G12R)
IVVRGNRGL

SEQ ID NO: 22471 - protein, 9 aa, synthetic construct
  source 1..9: note = Seed: LVVVGARGV (KRAS G12R)
IVVRGNRGM

SEQ ID NO: 22472 - protein, 9 aa, synthetic construct
  source 1..9: note = Seed: LVVVGARGV (KRAS G12R)
IVVRGNRGQ

SEQ ID NO: 22473 - protein, 9 aa, synthetic construct
  source 1..9: note = Seed: LVVVGARGV (KRAS G12R)
IVVRGNRGR

SEQ ID NO: 22474 - protein, 9 aa, synthetic construct
  source 1..9: note = Seed: LVVVGARGV (KRAS G12R)
IVVRGNRGS

SEQ ID NO: 22475 - protein, 9 aa, synthetic construct
  source 1..9: note = Seed: LVVVGARGV (KRAS G12R)
IVVRGNRGT

SEQ ID NO: 22476 - protein, 9 aa, synthetic construct
  source 1..9: note = Seed: LVVVGARGV (KRAS G12R)
IVVRGNRGV

SEQ ID NO: 22477 - protein, 9 aa, synthetic construct
  source 1..9: note = Seed: LVVVGARGV (KRAS G12R)
IVVRGNRGW

SEQ ID NO: 22478 - protein, 9 aa, synthetic construct
  source 1..9: note = Seed: LVVVGARGV (KRAS G12R)
IVVRGNRGY

SEQ ID NO: 22479 - protein, 9 aa, synthetic construct
  source 1..9: note = Seed: LVVVGARGV (KRAS G12R)
IVVRGPRGA

SEQ ID NO: 22480 - protein, 9 aa, synthetic construct
  source 1..9: note = Seed: LVVVGARGV (KRAS G12R)
IVVRGPRGF

SEQ ID NO: 22481 - protein, 9 aa, synthetic construct
  source 1..9: note = Seed: LVVVGARGV (KRAS G12R)
IVVRGPRGH

SEQ ID NO: 22482 - protein, 9 aa, synthetic construct
  source 1..9: note = Seed: LVVVGARGV (KRAS G12R)
IVVRGPRGI

SEQ ID NO: 22483 - protein, 9 aa, synthetic construct
  source 1..9: note = Seed: LVVVGARGV (KRAS G12R)
IVVRGPRGK

SEQ ID NO: 22484 - protein, 9 aa, synthetic construct
  source 1..9: note = Seed: LVVVGARGV (KRAS G12R)
IVVRGPRGL

SEQ ID NO: 22485 - protein, 9 aa, synthetic construct
  source 1..9: note = Seed: LVVVGARGV (KRAS G12R)
IVVRGPRGM

SEQ ID NO: 22486 - protein, 9 aa, synthetic construct
  source 1..9: note = Seed: LVVVGARGV (KRAS G12R)
IVVRGPRGR

SEQ ID NO: 22487 - protein, 9 aa, synthetic construct
  source 1..9: note = Seed: LVVVGARGV (KRAS G12R)
IVVRGPRGV

SEQ ID NO: 22488 - protein, 9 aa, synthetic construct
  source 1..9: note = Seed: LVVVGARGV (KRAS G12R)
IVVRGPRGY

SEQ ID NO: 22489 - protein, 9 aa, synthetic construct
  source 1..9: note = Seed: LVVVGARGV (KRAS G12R)
IVVRGQRGA

SEQ ID NO: 22490 - protein, 9 aa, synthetic construct
  source 1..9: note = Seed: LVVVGARGV (KRAS G12R)
IVVRGQRGF

SEQ ID NO: 22491 - protein, 9 aa, synthetic construct
  source 1..9: note = Seed: LVVVGARGV (KRAS G12R)
IVVRGQRGH

SEQ ID NO: 22492 - protein, 9 aa, synthetic construct
  source 1..9: note = Seed: LVVVGARGV (KRAS G12R)
IVVRGQRGI

SEQ ID NO: 22493 - protein, 9 aa, synthetic construct
  source 1..9: note = Seed: LVVVGARGV (KRAS G12R)
IVVRGQRGK

SEQ ID NO: 22494 - protein, 9 aa, synthetic construct
  source 1..9: note = Seed: LVVVGARGV (KRAS G12R)
IVVRGQRGL

SEQ ID NO: 22495 - protein, 9 aa, synthetic construct
  source 1..9: note = Seed: LVVVGARGV (KRAS G12R)
IVVRGQRGM

SEQ ID NO: 22496 - protein, 9 aa, synthetic construct
  source 1..9: note = Seed: LVVVGARGV (KRAS G12R)
IVVRGQRGR

SEQ ID NO: 22497 - protein, 9 aa, synthetic construct
  source 1..9: note = Seed: LVVVGARGV (KRAS G12R)
IVVRGQRGS

SEQ ID NO: 22498 - protein, 9 aa, synthetic construct
  source 1..9: note = Seed: LVVVGARGV (KRAS G12R)
IVVRGQRGV

SEQ ID NO: 22499 - protein, 9 aa, synthetic construct
  source 1..9: note = Seed: LVVVGARGV (KRAS G12R)
IVVRGQRGW

SEQ ID NO: 22500 - protein, 9 aa, synthetic construct
  source 1..9: note = Seed: LVVVGARGV (KRAS G12R)
IVVRGQRGY

SEQ ID NO: 22501 - protein, 9 aa, synthetic construct
  source 1..9: note = Seed: LVVVGARGV (KRAS G12R)
IVVRGRRGA

SEQ ID NO: 22502 - protein, 9 aa, synthetic construct
  source 1..9: note = Seed: LVVVGARGV (KRAS G12R)
IVVRGRRGC

SEQ ID NO: 22503 - protein, 9 aa, synthetic construct
  source 1..9: note = Seed: LVVVGARGV (KRAS G12R)
IVVRGRRGD

SEQ ID NO: 22504 - protein, 9 aa, synthetic construct
  source 1..9: note = Seed: LVVVGARGV (KRAS G12R)
IVVRGRRGE

SEQ ID NO: 22505 - protein, 9 aa, synthetic construct
  source 1..9: note = Seed: LVVVGARGV (KRAS G12R)
IVVRGRRGF

SEQ ID NO: 22506 - protein, 9 aa, synthetic construct
  source 1..9: note = Seed: LVVVGARGV (KRAS G12R)
IVVRGRRGG

SEQ ID NO: 22507 - protein, 9 aa, synthetic construct
  source 1..9: note = Seed: LVVVGARGV (KRAS G12R)
IVVRGRRGH

SEQ ID NO: 22508 - protein, 9 aa, synthetic construct
  source 1..9: note = Seed: LVVVGARGV (KRAS G12R)
IVVRGRRGI

SEQ ID NO: 22509 - protein, 9 aa, synthetic construct
  source 1..9: note = Seed: LVVVGARGV (KRAS G12R)
IVVRGRRGK

SEQ ID NO: 22510 - protein, 9 aa, synthetic construct
  source 1..9: note = Seed: LVVVGARGV (KRAS G12R)
IVVRGRRGL

SEQ ID NO: 22511 - protein, 9 aa, synthetic construct
  source 1..9: note = Seed: LVVVGARGV (KRAS G12R)
IVVRGRRGM

SEQ ID NO: 22512 - protein, 9 aa, synthetic construct
  source 1..9: note = Seed: LVVVGARGV (KRAS G12R)
IVVRGRRGN

SEQ ID NO: 22513 - protein, 9 aa, synthetic construct
  source 1..9: note = Seed: LVVVGARGV (KRAS G12R)
IVVRGRRGP

SEQ ID NO: 22514 - protein, 9 aa, synthetic construct
  source 1..9: note = Seed: LVVVGARGV (KRAS G12R)
IVVRGRRGQ

SEQ ID NO: 22515 - protein, 9 aa, synthetic construct
  source 1..9: note = Seed: LVVVGARGV (KRAS G12R)
IVVRGRRGR

SEQ ID NO: 22516 - protein, 9 aa, synthetic construct
  source 1..9: note = Seed: LVVVGARGV (KRAS G12R)
IVVRGRRGS

SEQ ID NO: 22517 - protein, 9 aa, synthetic construct
  source 1..9: note = Seed: LVVVGARGV (KRAS G12R)
IVVRGRRGT

SEQ ID NO: 22518 - protein, 9 aa, synthetic construct
  source 1..9: note = Seed: LVVVGARGV (KRAS G12R)
IVVRGRRGV

SEQ ID NO: 22519 - protein, 9 aa, synthetic construct
  source 1..9: note = Seed: LVVVGARGV (KRAS G12R)
IVVRGRRGW

SEQ ID NO: 22520 - protein, 9 aa, synthetic construct
  source 1..9: note = Seed: LVVVGARGV (KRAS G12R)
IVVRGRRGY

SEQ ID NO: 22521 - protein, 9 aa, synthetic construct
  source 1..9: note = Seed: LVVVGARGV (KRAS G12R)
IVVRGSRGA

SEQ ID NO: 22522 - protein, 9 aa, synthetic construct
  source 1..9: note = Seed: LVVVGARGV (KRAS G12R)
IVVRGSRGF

SEQ ID NO: 22523 - protein, 9 aa, synthetic construct
  source 1..9: note = Seed: LVVVGARGV (KRAS G12R)
IVVRGSRGH

SEQ ID NO: 22524 - protein, 9 aa, synthetic construct
  source 1..9: note = Seed: LVVVGARGV (KRAS G12R)
IVVRGSRGI

SEQ ID NO: 22525 - protein, 9 aa, synthetic construct
  source 1..9: note = Seed: LVVVGARGV (KRAS G12R)
IVVRGSRGK

SEQ ID NO: 22526 - protein, 9 aa, synthetic construct
  source 1..9: note = Seed: LVVVGARGV (KRAS G12R)
IVVRGSRGL

SEQ ID NO: 22527 - protein, 9 aa, synthetic construct
  source 1..9: note = Seed: LVVVGARGV (KRAS G12R)
IVVRGSRGM

SEQ ID NO: 22528 - protein, 9 aa, synthetic construct
  source 1..9: note = Seed: LVVVGARGV (KRAS G12R)
IVVRGSRGQ

SEQ ID NO: 22529 - protein, 9 aa, synthetic construct
  source 1..9: note = Seed: LVVVGARGV (KRAS G12R)
IVVRGSRGR

SEQ ID NO: 22530 - protein, 9 aa, synthetic construct
  source 1..9: note = Seed: LVVVGARGV (KRAS G12R)
IVVRGSRGS

SEQ ID NO: 22531 - protein, 9 aa, synthetic construct
  source 1..9: note = Seed: LVVVGARGV (KRAS G12R)
IVVRGSRGT

SEQ ID NO: 22532 - protein, 9 aa, synthetic construct
  source 1..9: note = Seed: LVVVGARGV (KRAS G12R)
IVVRGSRGV

SEQ ID NO: 22533 - protein, 9 aa, synthetic construct
  source 1..9: note = Seed: LVVVGARGV (KRAS G12R)
IVVRGSRGW

SEQ ID NO: 22534 - protein, 9 aa, synthetic construct
  source 1..9: note = Seed: LVVVGARGV (KRAS G12R)
IVVRGSRGY

SEQ ID NO: 22535 - protein, 9 aa, synthetic construct
  source 1..9: note = Seed: LVVVGARGV (KRAS G12R)
IVVRGTRGA

SEQ ID NO: 22536 - protein, 9 aa, synthetic construct
  source 1..9: note = Seed: LVVVGARGV (KRAS G12R)
IVVRGTRGF

SEQ ID NO: 22537 - protein, 9 aa, synthetic construct
  source 1..9: note = Seed: LVVVGARGV (KRAS G12R)
IVVRGTRGH

SEQ ID NO: 22538 - protein, 9 aa, synthetic construct
  source 1..9: note = Seed: LVVVGARGV (KRAS G12R)
IVVRGTRGI

SEQ ID NO: 22539 - protein, 9 aa, synthetic construct
  source 1..9: note = Seed: LVVVGARGV (KRAS G12R)
IVVRGTRGK

SEQ ID NO: 22540 - protein, 9 aa, synthetic construct
  source 1..9: note = Seed: LVVVGARGV (KRAS G12R)
IVVRGTRGL

SEQ ID NO: 22541 - protein, 9 aa, synthetic construct
  source 1..9: note = Seed: LVVVGARGV (KRAS G12R)
IVVRGTRGM

SEQ ID NO: 22542 - protein, 9 aa, synthetic construct
  source 1..9: note = Seed: LVVVGARGV (KRAS G12R)
IVVRGTRGQ

SEQ ID NO: 22543 - protein, 9 aa, synthetic construct
  source 1..9: note = Seed: LVVVGARGV (KRAS G12R)
IVVRGTRGR

SEQ ID NO: 22544 - protein, 9 aa, synthetic construct
  source 1..9: note = Seed: LVVVGARGV (KRAS G12R)
IVVRGTRGS

SEQ ID NO: 22545 - protein, 9 aa, synthetic construct
  source 1..9: note = Seed: LVVVGARGV (KRAS G12R)
IVVRGTRGT

SEQ ID NO: 22546 - protein, 9 aa, synthetic construct
  source 1..9: note = Seed: LVVVGARGV (KRAS G12R)
IVVRGTRGV

SEQ ID NO: 22547 - protein, 9 aa, synthetic construct
  source 1..9: note = Seed: LVVVGARGV (KRAS G12R)
IVVRGTRGW

SEQ ID NO: 22548 - protein, 9 aa, synthetic construct
  source 1..9: note = Seed: LVVVGARGV (KRAS G12R)
IVVRGTRGY

SEQ ID NO: 22549 - protein, 9 aa, synthetic construct
  source 1..9: note = Seed: LVVVGARGV (KRAS G12R)
IVVRGVRGA

SEQ ID NO: 22550 - protein, 9 aa, synthetic construct
  source 1..9: note = Seed: LVVVGARGV (KRAS G12R)
IVVRGVRGF

SEQ ID NO: 22551 - protein, 9 aa, synthetic construct
  source 1..9: note = Seed: LVVVGARGV (KRAS G12R)
IVVRGVRGG

SEQ ID NO: 22552 - protein, 9 aa, synthetic construct
  source 1..9: note = Seed: LVVVGARGV (KRAS G12R)
IVVRGVRGH

SEQ ID NO: 22553 - protein, 9 aa, synthetic construct
  source 1..9: note = Seed: LVVVGARGV (KRAS G12R)
IVVRGVRGI

SEQ ID NO: 22554 - protein, 9 aa, synthetic construct
  source 1..9: note = Seed: LVVVGARGV (KRAS G12R)
IVVRGVRGK

SEQ ID NO: 22555 - protein, 9 aa, synthetic construct
  source 1..9: note = Seed: LVVVGARGV (KRAS G12R)
IVVRGVRGL

SEQ ID NO: 22556 - protein, 9 aa, synthetic construct
  source 1..9: note = Seed: LVVVGARGV (KRAS G12R)
IVVRGVRGM

SEQ ID NO: 22557 - protein, 9 aa, synthetic construct
  source 1..9: note = Seed: LVVVGARGV (KRAS G12R)
IVVRGVRGN

SEQ ID NO: 22558 - protein, 9 aa, synthetic construct
  source 1..9: note = Seed: LVVVGARGV (KRAS G12R)
IVVRGVRGQ

SEQ ID NO: 22559 - protein, 9 aa, synthetic construct
  source 1..9: note = Seed: LVVVGARGV (KRAS G12R)
IVVRGVRGR

SEQ ID NO: 22560 - protein, 9 aa, synthetic construct
  source 1..9: note = Seed: LVVVGARGV (KRAS G12R)
IVVRGVRGS

SEQ ID NO: 22561 - protein, 9 aa, synthetic construct
  source 1..9: note = Seed: LVVVGARGV (KRAS G12R)
IVVRGVRGT

SEQ ID NO: 22562 - protein, 9 aa, synthetic construct
  source 1..9: note = Seed: LVVVGARGV (KRAS G12R)
IVVRGVRGV

SEQ ID NO: 22563 - protein, 9 aa, synthetic construct
  source 1..9: note = Seed: LVVVGARGV (KRAS G12R)
IVVRGVRGW

SEQ ID NO: 22564 - protein, 9 aa, synthetic construct
  source 1..9: note = Seed: LVVVGARGV (KRAS G12R)
IVVRGVRGY

SEQ ID NO: 22565 - protein, 9 aa, synthetic construct
  source 1..9: note = Seed: LVVVGARGV (KRAS G12R)
IVVRGWRGF

SEQ ID NO: 22566 - protein, 9 aa, synthetic construct
  source 1..9: note = Seed: LVVVGARGV (KRAS G12R)
IVVRGWRGM

SEQ ID NO: 22567 - protein, 9 aa, synthetic construct
  source 1..9: note = Seed: LVVVGARGV (KRAS G12R)
IVVRGWRGR

SEQ ID NO: 22568 - protein, 9 aa, synthetic construct
  source 1..9: note = Seed: LVVVGARGV (KRAS G12R)
IVVRGWRGV

SEQ ID NO: 22569 - protein, 9 aa, synthetic construct
  source 1..9: note = Seed: LVVVGARGV (KRAS G12R)
IVVRGWRGY

SEQ ID NO: 22570 - protein, 9 aa, synthetic construct
  source 1..9: note = Seed: LVVVGARGV (KRAS G12R)
IVVRGYRGF

SEQ ID NO: 22571 - protein, 9 aa, synthetic construct
  source 1..9: note = Seed: LVVVGARGV (KRAS G12R)
IVVRGYRGI

SEQ ID NO: 22572 - protein, 9 aa, synthetic construct
  source 1..9: note = Seed: LVVVGARGV (KRAS G12R)
IVVRGYRGL

SEQ ID NO: 22573 - protein, 9 aa, synthetic construct
  source 1..9: note = Seed: LVVVGARGV (KRAS G12R)
IVVRGYRGM

SEQ ID NO: 22574 - protein, 9 aa, synthetic construct
  source 1..9: note = Seed: LVVVGARGV (KRAS G12R)
IVVRGYRGR

SEQ ID NO: 22575 - protein, 9 aa, synthetic construct
  source 1..9: note = Seed: LVVVGARGV (KRAS G12R)
IVVRGYRGS

SEQ ID NO: 22576 - protein, 9 aa, synthetic construct
  source 1..9: note = Seed: LVVVGARGV (KRAS G12R)
IVVSGARGA

SEQ ID NO: 22577 - protein, 9 aa, synthetic construct
  source 1..9: note = Seed: LVVVGARGV (KRAS G12R)
IVVSGARGC

SEQ ID NO: 22578 - protein, 9 aa, synthetic construct
  source 1..9: note = Seed: LVVVGARGV (KRAS G12R)
IVVSGARGF

SEQ ID NO: 22579 - protein, 9 aa, synthetic construct
  source 1..9: note = Seed: LVVVGARGV (KRAS G12R)
IVVSGARGG

SEQ ID NO: 22580 - protein, 9 aa, synthetic construct
  source 1..9: note = Seed: LVVVGARGV (KRAS G12R)
IVVSGARGH

SEQ ID NO: 22581 - protein, 9 aa, synthetic construct
  source 1..9: note = Seed: LVVVGARGV (KRAS G12R)
IVVSGARGI

SEQ ID NO: 22582 - protein, 9 aa, synthetic construct
  source 1..9: note = Seed: LVVVGARGV (KRAS G12R)
IVVSGARGK

SEQ ID NO: 22583 - protein, 9 aa, synthetic construct
  source 1..9: note = Seed: LVVVGARGV (KRAS G12R)
IVVSGARGL

SEQ ID NO: 22584 - protein, 9 aa, synthetic construct
  source 1..9: note = Seed: LVVVGARGV (KRAS G12R)
IVVSGARGM

SEQ ID NO: 22585 - protein, 9 aa, synthetic construct
  source 1..9: note = Seed: LVVVGARGV (KRAS G12R)
IVVSGARGR

SEQ ID NO: 22586 - protein, 9 aa, synthetic construct
  source 1..9: note = Seed: LVVVGARGV (KRAS G12R)
IVVSGARGS

SEQ ID NO: 22587 - protein, 9 aa, synthetic construct
  source 1..9: note = Seed: LVVVGARGV (KRAS G12R)
IVVSGARGT

SEQ ID NO: 22588 - protein, 9 aa, synthetic construct
  source 1..9: note = Seed: LVVVGARGV (KRAS G12R)
IVVSGARGV

SEQ ID NO: 22589 - protein, 9 aa, synthetic construct
  source 1..9: note = Seed: LVVVGARGV (KRAS G12R)
IVVSGARGW

SEQ ID NO: 22590 - protein, 9 aa, synthetic construct
  source 1..9: note = Seed: LVVVGARGV (KRAS G12R)
IVVSGARGY

SEQ ID NO: 22591 - protein, 9 aa, synthetic construct
  source 1..9: note = Seed: LVVVGARGV (KRAS G12R)
IVVSGCRGI

SEQ ID NO: 22592 - protein, 9 aa, synthetic construct
  source 1..9: note = Seed: LVVVGARGV (KRAS G12R)
IVVSGCRGL

SEQ ID NO: 22593 - protein, 9 aa, synthetic construct
  source 1..9: note = Seed: LVVVGARGV (KRAS G12R)
IVVSGCRGV

SEQ ID NO: 22594 - protein, 9 aa, synthetic construct
  source 1..9: note = Seed: LVVVGARGV (KRAS G12R)
IVVSGFRGF

SEQ ID NO: 22595 - protein, 9 aa, synthetic construct
  source 1..9: note = Seed: LVVVGARGV (KRAS G12R)
IVVSGFRGI

SEQ ID NO: 22596 - protein, 9 aa, synthetic construct
  source 1..9: note = Seed: LVVVGARGV (KRAS G12R)
IVVSGFRGL

SEQ ID NO: 22597 - protein, 9 aa, synthetic construct
  source 1..9: note = Seed: LVVVGARGV (KRAS G12R)
IVVSGFRGM

SEQ ID NO: 22598 - protein, 9 aa, synthetic construct
  source 1..9: note = Seed: LVVVGARGV (KRAS G12R)
IVVSGFRGR

SEQ ID NO: 22599 - protein, 9 aa, synthetic construct
  source 1..9: note = Seed: LVVVGARGV (KRAS G12R)
IVVSGFRGV

SEQ ID NO: 22600 - protein, 9 aa, synthetic construct
  source 1..9: note = Seed: LVVVGARGV (KRAS G12R)
IVVSGGRGA

SEQ ID NO: 22601 - protein, 9 aa, synthetic construct
  source 1..9: note = Seed: LVVVGARGV (KRAS G12R)
IVVSGGRGF

SEQ ID NO: 22602 - protein, 9 aa, synthetic construct
  source 1..9: note = Seed: LVVVGARGV (KRAS G12R)
IVVSGGRGI

SEQ ID NO: 22603 - protein, 9 aa, synthetic construct
  source 1..9: note = Seed: LVVVGARGV (KRAS G12R)
IVVSGGRGL

SEQ ID NO: 22604 - protein, 9 aa, synthetic construct
  source 1..9: note = Seed: LVVVGARGV (KRAS G12R)
IVVSGGRGM

SEQ ID NO: 22605 - protein, 9 aa, synthetic construct
  source 1..9: note = Seed: LVVVGARGV (KRAS G12R)
IVVSGGRGR

SEQ ID NO: 22606 - protein, 9 aa, synthetic construct
  source 1..9: note = Seed: LVVVGARGV (KRAS G12R)
IVVSGGRGS

SEQ ID NO: 22607 - protein, 9 aa, synthetic construct
  source 1..9: note = Seed: LVVVGARGV (KRAS G12R)
IVVSGGRGT

SEQ ID NO: 22608 - protein, 9 aa, synthetic construct
  source 1..9: note = Seed: LVVVGARGV (KRAS G12R)
IVVSGGRGV

SEQ ID NO: 22609 - protein, 9 aa, synthetic construct
  source 1..9: note = Seed: LVVVGARGV (KRAS G12R)
IVVSGGRGY

SEQ ID NO: 22610 - protein, 9 aa, synthetic construct
  source 1..9: note = Seed: LVVVGARGV (KRAS G12R)
IVVSGHRGA

SEQ ID NO: 22611 - protein, 9 aa, synthetic construct
  source 1..9: note = Seed: LVVVGARGV (KRAS G12R)
IVVSGHRGF

SEQ ID NO: 22612 - protein, 9 aa, synthetic construct
  source 1..9: note = Seed: LVVVGARGV (KRAS G12R)
IVVSGHRGH

SEQ ID NO: 22613 - protein, 9 aa, synthetic construct
  source 1..9: note = Seed: LVVVGARGV (KRAS G12R)
IVVSGHRGI

SEQ ID NO: 22614 - protein, 9 aa, synthetic construct
  source 1..9: note = Seed: LVVVGARGV (KRAS G12R)
IVVSGHRGK

SEQ ID NO: 22615 - protein, 9 aa, synthetic construct
  source 1..9: note = Seed: LVVVGARGV (KRAS G12R)
IVVSGHRGL

SEQ ID NO: 22616 - protein, 9 aa, synthetic construct
  source 1..9: note = Seed: LVVVGARGV (KRAS G12R)
IVVSGHRGM

SEQ ID NO: 22617 - protein, 9 aa, synthetic construct
  source 1..9: note = Seed: LVVVGARGV (KRAS G12R)
IVVSGHRGQ

SEQ ID NO: 22618 - protein, 9 aa, synthetic construct
  source 1..9: note = Seed: LVVVGARGV (KRAS G12R)
IVVSGHRGR

SEQ ID NO: 22619 - protein, 9 aa, synthetic construct
  source 1..9: note = Seed: LVVVGARGV (KRAS G12R)
IVVSGHRGS

SEQ ID NO: 22620 - protein, 9 aa, synthetic construct
  source 1..9: note = Seed: LVVVGARGV (KRAS G12R)
IVVSGHRGV

SEQ ID NO: 22621 - protein, 9 aa, synthetic construct
  source 1..9: note = Seed: LVVVGARGV (KRAS G12R)
IVVSGHRGW

SEQ ID NO: 22622 - protein, 9 aa, synthetic construct
  source 1..9: note = Seed: LVVVGARGV (KRAS G12R)
IVVSGHRGY

SEQ ID NO: 22623 - protein, 9 aa, synthetic construct
  source 1..9: note = Seed: LVVVGARGV (KRAS G12R)
IVVSGIRGA

SEQ ID NO: 22624 - protein, 9 aa, synthetic construct
  source 1..9: note = Seed: LVVVGARGV (KRAS G12R)
IVVSGIRGF

SEQ ID NO: 22625 - protein, 9 aa, synthetic construct
  source 1..9: note = Seed: LVVVGARGV (KRAS G12R)
IVVSGIRGH

SEQ ID NO: 22626 - protein, 9 aa, synthetic construct
  source 1..9: note = Seed: LVVVGARGV (KRAS G12R)
IVVSGIRGI

SEQ ID NO: 22627 - protein, 9 aa, synthetic construct
  source 1..9: note = Seed: LVVVGARGV (KRAS G12R)
IVVSGIRGK

SEQ ID NO: 22628 - protein, 9 aa, synthetic construct
  source 1..9: note = Seed: LVVVGARGV (KRAS G12R)
IVVSGIRGL

SEQ ID NO: 22629 - protein, 9 aa, synthetic construct
  source 1..9: note = Seed: LVVVGARGV (KRAS G12R)
IVVSGIRGM

SEQ ID NO: 22630 - protein, 9 aa, synthetic construct
  source 1..9: note = Seed: LVVVGARGV (KRAS G12R)
IVVSGIRGR

SEQ ID NO: 22631 - protein, 9 aa, synthetic construct
  source 1..9: note = Seed: LVVVGARGV (KRAS G12R)
IVVSGIRGS

SEQ ID NO: 22632 - protein, 9 aa, synthetic construct
  source 1..9: note = Seed: LVVVGARGV (KRAS G12R)
IVVSGIRGV

SEQ ID NO: 22633 - protein, 9 aa, synthetic construct
  source 1..9: note = Seed: LVVVGARGV (KRAS G12R)
IVVSGIRGY

SEQ ID NO: 22634 - protein, 9 aa, synthetic construct
  source 1..9: note = Seed: LVVVGARGV (KRAS G12R)
IVVSGKRGA

SEQ ID NO: 22635 - protein, 9 aa, synthetic construct
  source 1..9: note = Seed: LVVVGARGV (KRAS G12R)
IVVSGKRGF

SEQ ID NO: 22636 - protein, 9 aa, synthetic construct
  source 1..9: note = Seed: LVVVGARGV (KRAS G12R)
IVVSGKRGG

SEQ ID NO: 22637 - protein, 9 aa, synthetic construct
  source 1..9: note = Seed: LVVVGARGV (KRAS G12R)
IVVSGKRGH

SEQ ID NO: 22638 - protein, 9 aa, synthetic construct
  source 1..9: note = Seed: LVVVGARGV (KRAS G12R)
IVVSGKRGI

SEQ ID NO: 22639 - protein, 9 aa, synthetic construct
  source 1..9: note = Seed: LVVVGARGV (KRAS G12R)
IVVSGKRGK

SEQ ID NO: 22640 - protein, 9 aa, synthetic construct
  source 1..9: note = Seed: LVVVGARGV (KRAS G12R)
IVVSGKRGL

SEQ ID NO: 22641 - protein, 9 aa, synthetic construct
  source 1..9: note = Seed: LVVVGARGV (KRAS G12R)
IVVSGKRGM

SEQ ID NO: 22642 - protein, 9 aa, synthetic construct
  source 1..9: note = Seed: LVVVGARGV (KRAS G12R)
IVVSGKRGN

SEQ ID NO: 22643 - protein, 9 aa, synthetic construct
  source 1..9: note = Seed: LVVVGARGV (KRAS G12R)
IVVSGKRGQ

SEQ ID NO: 22644 - protein, 9 aa, synthetic construct
  source 1..9: note = Seed: LVVVGARGV (KRAS G12R)
IVVSGKRGR

SEQ ID NO: 22645 - protein, 9 aa, synthetic construct
  source 1..9: note = Seed: LVVVGARGV (KRAS G12R)
IVVSGKRGS

SEQ ID NO: 22646 - protein, 9 aa, synthetic construct
  source 1..9: note = Seed: LVVVGARGV (KRAS G12R)
IVVSGKRGT

SEQ ID NO: 22647 - protein, 9 aa, synthetic construct
  source 1..9: note = Seed: LVVVGARGV (KRAS G12R)
IVVSGKRGV

SEQ ID NO: 22648 - protein, 9 aa, synthetic construct
  source 1..9: note = Seed: LVVVGARGV (KRAS G12R)
IVVSGKRGW

SEQ ID NO: 22649 - protein, 9 aa, synthetic construct
  source 1..9: note = Seed: LVVVGARGV (KRAS G12R)
IVVSGKRGY

SEQ ID NO: 22650 - protein, 9 aa, synthetic construct
  source 1..9: note = Seed: LVVVGARGV (KRAS G12R)
IVVSGLRGA

SEQ ID NO: 22651 - protein, 9 aa, synthetic construct
  source 1..9: note = Seed: LVVVGARGV (KRAS G12R)
IVVSGLRGF

SEQ ID NO: 22652 - protein, 9 aa, synthetic construct
  source 1..9: note = Seed: LVVVGARGV (KRAS G12R)
IVVSGLRGI

SEQ ID NO: 22653 - protein, 9 aa, synthetic construct
  source 1..9: note = Seed: LVVVGARGV (KRAS G12R)
IVVSGLRGK

SEQ ID NO: 22654 - protein, 9 aa, synthetic construct
  source 1..9: note = Seed: LVVVGARGV (KRAS G12R)
IVVSGLRGL

SEQ ID NO: 22655 - protein, 9 aa, synthetic construct
  source 1..9: note = Seed: LVVVGARGV (KRAS G12R)
IVVSGLRGM

SEQ ID NO: 22656 - protein, 9 aa, synthetic construct
  source 1..9: note = Seed: LVVVGARGV (KRAS G12R)
IVVSGLRGQ

SEQ ID NO: 22657 - protein, 9 aa, synthetic construct
  source 1..9: note = Seed: LVVVGARGV (KRAS G12R)
IVVSGLRGR

SEQ ID NO: 22658 - protein, 9 aa, synthetic construct
  source 1..9: note = Seed: LVVVGARGV (KRAS G12R)
IVVSGLRGS

SEQ ID NO: 22659 - protein, 9 aa, synthetic construct
  source 1..9: note = Seed: LVVVGARGV (KRAS G12R)
IVVSGLRGV

SEQ ID NO: 22660 - protein, 9 aa, synthetic construct
  source 1..9: note = Seed: LVVVGARGV (KRAS G12R)
IVVSGLRGY

SEQ ID NO: 22661 - protein, 9 aa, synthetic construct
  source 1..9: note = Seed: LVVVGARGV (KRAS G12R)
IVVSGMRGA

SEQ ID NO: 22662 - protein, 9 aa, synthetic construct
  source 1..9: note = Seed: LVVVGARGV (KRAS G12R)
IVVSGMRGF

SEQ ID NO: 22663 - protein, 9 aa, synthetic construct
  source 1..9: note = Seed: LVVVGARGV (KRAS G12R)
IVVSGMRGI

SEQ ID NO: 22664 - protein, 9 aa, synthetic construct
  source 1..9: note = Seed: LVVVGARGV (KRAS G12R)
IVVSGMRGK

SEQ ID NO: 22665 - protein, 9 aa, synthetic construct
  source 1..9: note = Seed: LVVVGARGV (KRAS G12R)
IVVSGMRGL

SEQ ID NO: 22666 - protein, 9 aa, synthetic construct
  source 1..9: note = Seed: LVVVGARGV (KRAS G12R)
IVVSGMRGM

SEQ ID NO: 22667 - protein, 9 aa, synthetic construct
  source 1..9: note = Seed: LVVVGARGV (KRAS G12R)
IVVSGMRGR

SEQ ID NO: 22668 - protein, 9 aa, synthetic construct
  source 1..9: note = Seed: LVVVGARGV (KRAS G12R)
IVVSGMRGV

SEQ ID NO: 22669 - protein, 9 aa, synthetic construct
  source 1..9: note = Seed: LVVVGARGV (KRAS G12R)
IVVSGMRGY

SEQ ID NO: 22670 - protein, 9 aa, synthetic construct
  source 1..9: note = Seed: LVVVGARGV (KRAS G12R)
IVVSGNRGA

SEQ ID NO: 22671 - protein, 9 aa, synthetic construct
  source 1..9: note = Seed: LVVVGARGV (KRAS G12R)
IVVSGNRGF

SEQ ID NO: 22672 - protein, 9 aa, synthetic construct
  source 1..9: note = Seed: LVVVGARGV (KRAS G12R)
IVVSGNRGH

SEQ ID NO: 22673 - protein, 9 aa, synthetic construct
  source 1..9: note = Seed: LVVVGARGV (KRAS G12R)
IVVSGNRGI

SEQ ID NO: 22674 - protein, 9 aa, synthetic construct
  source 1..9: note = Seed: LVVVGARGV (KRAS G12R)
IVVSGNRGK

SEQ ID NO: 22675 - protein, 9 aa, synthetic construct
  source 1..9: note = Seed: LVVVGARGV (KRAS G12R)
IVVSGNRGL

SEQ ID NO: 22676 - protein, 9 aa, synthetic construct
  source 1..9: note = Seed: LVVVGARGV (KRAS G12R)
IVVSGNRGM

SEQ ID NO: 22677 - protein, 9 aa, synthetic construct
  source 1..9: note = Seed: LVVVGARGV (KRAS G12R)
IVVSGNRGR

SEQ ID NO: 22678 - protein, 9 aa, synthetic construct
  source 1..9: note = Seed: LVVVGARGV (KRAS G12R)
IVVSGNRGS

SEQ ID NO: 22679 - protein, 9 aa, synthetic construct
  source 1..9: note = Seed: LVVVGARGV (KRAS G12R)
IVVSGNRGT

SEQ ID NO: 22680 - protein, 9 aa, synthetic construct
  source 1..9: note = Seed: LVVVGARGV (KRAS G12R)
IVVSGNRGV

SEQ ID NO: 22681 - protein, 9 aa, synthetic construct
  source 1..9: note = Seed: LVVVGARGV (KRAS G12R)
IVVSGNRGW

SEQ ID NO: 22682 - protein, 9 aa, synthetic construct
  source 1..9: note = Seed: LVVVGARGV (KRAS G12R)
IVVSGNRGY

SEQ ID NO: 22683 - protein, 9 aa, synthetic construct
  source 1..9: note = Seed: LVVVGARGV (KRAS G12R)
IVVSGPRGA

SEQ ID NO: 22684 - protein, 9 aa, synthetic construct
  source 1..9: note = Seed: LVVVGARGV (KRAS G12R)
IVVSGPRGF

SEQ ID NO: 22685 - protein, 9 aa, synthetic construct
  source 1..9: note = Seed: LVVVGARGV (KRAS G12R)
IVVSGPRGI

SEQ ID NO: 22686 - protein, 9 aa, synthetic construct
  source 1..9: note = Seed: LVVVGARGV (KRAS G12R)
IVVSGPRGK

SEQ ID NO: 22687 - protein, 9 aa, synthetic construct
  source 1..9: note = Seed: LVVVGARGV (KRAS G12R)
IVVSGPRGL

SEQ ID NO: 22688 - protein, 9 aa, synthetic construct
  source 1..9: note = Seed: LVVVGARGV (KRAS G12R)
IVVSGPRGM

SEQ ID NO: 22689 - protein, 9 aa, synthetic construct
  source 1..9: note = Seed: LVVVGARGV (KRAS G12R)
IVVSGPRGR

SEQ ID NO: 22690 - protein, 9 aa, synthetic construct
  source 1..9: note = Seed: LVVVGARGV (KRAS G12R)
IVVSGPRGV

SEQ ID NO: 22691 - protein, 9 aa, synthetic construct
  source 1..9: note = Seed: LVVVGARGV (KRAS G12R)
IVVSGPRGY

SEQ ID NO: 22692 - protein, 9 aa, synthetic construct
  source 1..9: note = Seed: LVVVGARGV (KRAS G12R)
IVVSGQRGF

SEQ ID NO: 22693 - protein, 9 aa, synthetic construct
  source 1..9: note = Seed: LVVVGARGV (KRAS G12R)
IVVSGQRGI

SEQ ID NO: 22694 - protein, 9 aa, synthetic construct
  source 1..9: note = Seed: LVVVGARGV (KRAS G12R)
IVVSGQRGL

SEQ ID NO: 22695 - protein, 9 aa, synthetic construct
  source 1..9: note = Seed: LVVVGARGV (KRAS G12R)
IVVSGQRGM

SEQ ID NO: 22696 - protein, 9 aa, synthetic construct
  source 1..9: note = Seed: LVVVGARGV (KRAS G12R)
IVVSGQRGR

SEQ ID NO: 22697 - protein, 9 aa, synthetic construct
  source 1..9: note = Seed: LVVVGARGV (KRAS G12R)
IVVSGQRGV

SEQ ID NO: 22698 - protein, 9 aa, synthetic construct
  source 1..9: note = Seed: LVVVGARGV (KRAS G12R)
IVVSGQRGY

SEQ ID NO: 22699 - protein, 9 aa, synthetic construct
  source 1..9: note = Seed: LVVVGARGV (KRAS G12R)
IVVSGRRGA

SEQ ID NO: 22700 - protein, 9 aa, synthetic construct
  source 1..9: note = Seed: LVVVGARGV (KRAS G12R)
IVVSGRRGC

SEQ ID NO: 22701 - protein, 9 aa, synthetic construct
  source 1..9: note = Seed: LVVVGARGV (KRAS G12R)
IVVSGRRGF

SEQ ID NO: 22702 - protein, 9 aa, synthetic construct
  source 1..9: note = Seed: LVVVGARGV (KRAS G12R)
IVVSGRRGG

SEQ ID NO: 22703 - protein, 9 aa, synthetic construct
  source 1..9: note = Seed: LVVVGARGV (KRAS G12R)
IVVSGRRGH

SEQ ID NO: 22704 - protein, 9 aa, synthetic construct
  source 1..9: note = Seed: LVVVGARGV (KRAS G12R)
IVVSGRRGI

SEQ ID NO: 22705 - protein, 9 aa, synthetic construct
  source 1..9: note = Seed: LVVVGARGV (KRAS G12R)
IVVSGRRGK

SEQ ID NO: 22706 - protein, 9 aa, synthetic construct
  source 1..9: note = Seed: LVVVGARGV (KRAS G12R)
IVVSGRRGL

SEQ ID NO: 22707 - protein, 9 aa, synthetic construct
  source 1..9: note = Seed: LVVVGARGV (KRAS G12R)
IVVSGRRGM

SEQ ID NO: 22708 - protein, 9 aa, synthetic construct
  source 1..9: note = Seed: LVVVGARGV (KRAS G12R)
IVVSGRRGN

SEQ ID NO: 22709 - protein, 9 aa, synthetic construct
  source 1..9: note = Seed: LVVVGARGV (KRAS G12R)
IVVSGRRGP

SEQ ID NO: 22710 - protein, 9 aa, synthetic construct
  source 1..9: note = Seed: LVVVGARGV (KRAS G12R)
IVVSGRRGQ

SEQ ID NO: 22711 - protein, 9 aa, synthetic construct
  source 1..9: note = Seed: LVVVGARGV (KRAS G12R)
IVVSGRRGR

SEQ ID NO: 22712 - protein, 9 aa, synthetic construct
  source 1..9: note = Seed: LVVVGARGV (KRAS G12R)
IVVSGRRGS

SEQ ID NO: 22713 - protein, 9 aa, synthetic construct
  source 1..9: note = Seed: LVVVGARGV (KRAS G12R)
IVVSGRRGT

SEQ ID NO: 22714 - protein, 9 aa, synthetic construct
  source 1..9: note = Seed: LVVVGARGV (KRAS G12R)
IVVSGRRGV

SEQ ID NO: 22715 - protein, 9 aa, synthetic construct
  source 1..9: note = Seed: LVVVGARGV (KRAS G12R)
IVVSGRRGW

SEQ ID NO: 22716 - protein, 9 aa, synthetic construct
  source 1..9: note = Seed: LVVVGARGV (KRAS G12R)
IVVSGRRGY

SEQ ID NO: 22717 - protein, 9 aa, synthetic construct
  source 1..9: note = Seed: LVVVGARGV (KRAS G12R)
IVVSGSRGA

SEQ ID NO: 22718 - protein, 9 aa, synthetic construct
  source 1..9: note = Seed: LVVVGARGV (KRAS G12R)
IVVSGSRGF

SEQ ID NO: 22719 - protein, 9 aa, synthetic construct
  source 1..9: note = Seed: LVVVGARGV (KRAS G12R)
IVVSGSRGH

SEQ ID NO: 22720 - protein, 9 aa, synthetic construct
  source 1..9: note = Seed: LVVVGARGV (KRAS G12R)
IVVSGSRGI

SEQ ID NO: 22721 - protein, 9 aa, synthetic construct
  source 1..9: note = Seed: LVVVGARGV (KRAS G12R)
IVVSGSRGK

SEQ ID NO: 22722 - protein, 9 aa, synthetic construct
  source 1..9: note = Seed: LVVVGARGV (KRAS G12R)
IVVSGSRGL

SEQ ID NO: 22723 - protein, 9 aa, synthetic construct
  source 1..9: note = Seed: LVVVGARGV (KRAS G12R)
IVVSGSRGM

SEQ ID NO: 22724 - protein, 9 aa, synthetic construct
  source 1..9: note = Seed: LVVVGARGV (KRAS G12R)
IVVSGSRGR

SEQ ID NO: 22725 - protein, 9 aa, synthetic construct
  source 1..9: note = Seed: LVVVGARGV (KRAS G12R)
IVVSGSRGS

SEQ ID NO: 22726 - protein, 9 aa, synthetic construct
  source 1..9: note = Seed: LVVVGARGV (KRAS G12R)
IVVSGSRGT

SEQ ID NO: 22727 - protein, 9 aa, synthetic construct
  source 1..9: note = Seed: LVVVGARGV (KRAS G12R)
IVVSGSRGV

SEQ ID NO: 22728 - protein, 9 aa, synthetic construct
  source 1..9: note = Seed: LVVVGARGV (KRAS G12R)
IVVSGSRGW

SEQ ID NO: 22729 - protein, 9 aa, synthetic construct
  source 1..9: note = Seed: LVVVGARGV (KRAS G12R)
IVVSGSRGY

SEQ ID NO: 22730 - protein, 9 aa, synthetic construct
  source 1..9: note = Seed: LVVVGARGV (KRAS G12R)
IVVSGTRGA

SEQ ID NO: 22731 - protein, 9 aa, synthetic construct
  source 1..9: note = Seed: LVVVGARGV (KRAS G12R)
IVVSGTRGF

SEQ ID NO: 22732 - protein, 9 aa, synthetic construct
  source 1..9: note = Seed: LVVVGARGV (KRAS G12R)
IVVSGTRGI

SEQ ID NO: 22733 - protein, 9 aa, synthetic construct
  source 1..9: note = Seed: LVVVGARGV (KRAS G12R)
IVVSGTRGK

SEQ ID NO: 22734 - protein, 9 aa, synthetic construct
  source 1..9: note = Seed: LVVVGARGV (KRAS G12R)
IVVSGTRGL

SEQ ID NO: 22735 - protein, 9 aa, synthetic construct
  source 1..9: note = Seed: LVVVGARGV (KRAS G12R)
IVVSGTRGM

SEQ ID NO: 22736 - protein, 9 aa, synthetic construct
  source 1..9: note = Seed: LVVVGARGV (KRAS G12R)
IVVSGTRGR

SEQ ID NO: 22737 - protein, 9 aa, synthetic construct
  source 1..9: note = Seed: LVVVGARGV (KRAS G12R)
IVVSGTRGV

SEQ ID NO: 22738 - protein, 9 aa, synthetic construct
  source 1..9: note = Seed: LVVVGARGV (KRAS G12R)
IVVSGTRGY

SEQ ID NO: 22739 - protein, 9 aa, synthetic construct
  source 1..9: note = Seed: LVVVGARGV (KRAS G12R)
IVVSGVRGA

SEQ ID NO: 22740 - protein, 9 aa, synthetic construct
  source 1..9: note = Seed: LVVVGARGV (KRAS G12R)
IVVSGVRGF

SEQ ID NO: 22741 - protein, 9 aa, synthetic construct
  source 1..9: note = Seed: LVVVGARGV (KRAS G12R)
IVVSGVRGH

SEQ ID NO: 22742 - protein, 9 aa, synthetic construct
  source 1..9: note = Seed: LVVVGARGV (KRAS G12R)
IVVSGVRGI

SEQ ID NO: 22743 - protein, 9 aa, synthetic construct
  source 1..9: note = Seed: LVVVGARGV (KRAS G12R)
IVVSGVRGK

SEQ ID NO: 22744 - protein, 9 aa, synthetic construct
  source 1..9: note = Seed: LVVVGARGV (KRAS G12R)
IVVSGVRGL

SEQ ID NO: 22745 - protein, 9 aa, synthetic construct
  source 1..9: note = Seed: LVVVGARGV (KRAS G12R)
IVVSGVRGM

SEQ ID NO: 22746 - protein, 9 aa, synthetic construct
  source 1..9: note = Seed: LVVVGARGV (KRAS G12R)
IVVSGVRGR

SEQ ID NO: 22747 - protein, 9 aa, synthetic construct
  source 1..9: note = Seed: LVVVGARGV (KRAS G12R)
IVVSGVRGS

SEQ ID NO: 22748 - protein, 9 aa, synthetic construct
  source 1..9: note = Seed: LVVVGARGV (KRAS G12R)
IVVSGVRGV

SEQ ID NO: 22749 - protein, 9 aa, synthetic construct
  source 1..9: note = Seed: LVVVGARGV (KRAS G12R)
IVVSGVRGY

SEQ ID NO: 22750 - protein, 9 aa, synthetic construct
  source 1..9: note = Seed: LVVVGARGV (KRAS G12R)
IVVSGWRGF

SEQ ID NO: 22751 - protein, 9 aa, synthetic construct
  source 1..9: note = Seed: LVVVGARGV (KRAS G12R)
IVVSGWRGI

SEQ ID NO: 22752 - protein, 9 aa, synthetic construct
  source 1..9: note = Seed: LVVVGARGV (KRAS G12R)
IVVSGWRGL

SEQ ID NO: 22753 - protein, 9 aa, synthetic construct
  source 1..9: note = Seed: LVVVGARGV (KRAS G12R)
IVVSGWRGM

SEQ ID NO: 22754 - protein, 9 aa, synthetic construct
  source 1..9: note = Seed: LVVVGARGV (KRAS G12R)
IVVSGWRGR

SEQ ID NO: 22755 - protein, 9 aa, synthetic construct
  source 1..9: note = Seed: LVVVGARGV (KRAS G12R)
IVVSGWRGV

SEQ ID NO: 22756 - protein, 9 aa, synthetic construct
  source 1..9: note = Seed: LVVVGARGV (KRAS G12R)
IVVSGWRGY

SEQ ID NO: 22757 - protein, 9 aa, synthetic construct
  source 1..9: note = Seed: LVVVGARGV (KRAS G12R)
IVVSGYRGL

SEQ ID NO: 22758 - protein, 9 aa, synthetic construct
  source 1..9: note = Seed: LVVVGARGV (KRAS G12R)
IVVSGYRGR

SEQ ID NO: 22759 - protein, 9 aa, synthetic construct
  source 1..9: note = Seed: LVVVGARGV (KRAS G12R)
IVVTGARGA

SEQ ID NO: 22760 - protein, 9 aa, synthetic construct
  source 1..9: note = Seed: LVVVGARGV (KRAS G12R)
IVVTGARGF

SEQ ID NO: 22761 - protein, 9 aa, synthetic construct
  source 1..9: note = Seed: LVVVGARGV (KRAS G12R)
IVVTGARGI

SEQ ID NO: 22762 - protein, 9 aa, synthetic construct
  source 1..9: note = Seed: LVVVGARGV (KRAS G12R)
IVVTGARGK

SEQ ID NO: 22763 - protein, 9 aa, synthetic construct
  source 1..9: note = Seed: LVVVGARGV (KRAS G12R)
IVVTGARGL

SEQ ID NO: 22764 - protein, 9 aa, synthetic construct
  source 1..9: note = Seed: LVVVGARGV (KRAS G12R)
IVVTGARGM

SEQ ID NO: 22765 - protein, 9 aa, synthetic construct
  source 1..9: note = Seed: LVVVGARGV (KRAS G12R)
IVVTGARGR

SEQ ID NO: 22766 - protein, 9 aa, synthetic construct
  source 1..9: note = Seed: LVVVGARGV (KRAS G12R)
IVVTGARGS

SEQ ID NO: 22767 - protein, 9 aa, synthetic construct
  source 1..9: note = Seed: LVVVGARGV (KRAS G12R)
IVVTGARGT

SEQ ID NO: 22768 - protein, 9 aa, synthetic construct
  source 1..9: note = Seed: LVVVGARGV (KRAS G12R)
IVVTGARGV

SEQ ID NO: 22769 - protein, 9 aa, synthetic construct
  source 1..9: note = Seed: LVVVGARGV (KRAS G12R)
IVVTGARGY

SEQ ID NO: 22770 - protein, 9 aa, synthetic construct
  source 1..9: note = Seed: LVVVGARGV (KRAS G12R)
IVVTGFRGF

SEQ ID NO: 22771 - protein, 9 aa, synthetic construct
  source 1..9: note = Seed: LVVVGARGV (KRAS G12R)
IVVTGFRGI

SEQ ID NO: 22772 - protein, 9 aa, synthetic construct
  source 1..9: note = Seed: LVVVGARGV (KRAS G12R)
IVVTGFRGL

SEQ ID NO: 22773 - protein, 9 aa, synthetic construct
  source 1..9: note = Seed: LVVVGARGV (KRAS G12R)
IVVTGFRGM

SEQ ID NO: 22774 - protein, 9 aa, synthetic construct
  source 1..9: note = Seed: LVVVGARGV (KRAS G12R)
IVVTGFRGR

SEQ ID NO: 22775 - protein, 9 aa, synthetic construct
  source 1..9: note = Seed: LVVVGARGV (KRAS G12R)
IVVTGFRGV

SEQ ID NO: 22776 - protein, 9 aa, synthetic construct
  source 1..9: note = Seed: LVVVGARGV (KRAS G12R)
IVVTGGRGA

SEQ ID NO: 22777 - protein, 9 aa, synthetic construct
  source 1..9: note = Seed: LVVVGARGV (KRAS G12R)
IVVTGGRGF

SEQ ID NO: 22778 - protein, 9 aa, synthetic construct
  source 1..9: note = Seed: LVVVGARGV (KRAS G12R)
IVVTGGRGI

SEQ ID NO: 22779 - protein, 9 aa, synthetic construct
  source 1..9: note = Seed: LVVVGARGV (KRAS G12R)
IVVTGGRGL

SEQ ID NO: 22780 - protein, 9 aa, synthetic construct
  source 1..9: note = Seed: LVVVGARGV (KRAS G12R)
IVVTGGRGM

SEQ ID NO: 22781 - protein, 9 aa, synthetic construct
  source 1..9: note = Seed: LVVVGARGV (KRAS G12R)
IVVTGGRGR

SEQ ID NO: 22782 - protein, 9 aa, synthetic construct
  source 1..9: note = Seed: LVVVGARGV (KRAS G12R)
IVVTGGRGT

SEQ ID NO: 22783 - protein, 9 aa, synthetic construct
  source 1..9: note = Seed: LVVVGARGV (KRAS G12R)
IVVTGGRGV

SEQ ID NO: 22784 - protein, 9 aa, synthetic construct
  source 1..9: note = Seed: LVVVGARGV (KRAS G12R)
IVVTGGRGY

SEQ ID NO: 22785 - protein, 9 aa, synthetic construct
  source 1..9: note = Seed: LVVVGARGV (KRAS G12R)
IVVTGHRGA

SEQ ID NO: 22786 - protein, 9 aa, synthetic construct
  source 1..9: note = Seed: LVVVGARGV (KRAS G12R)
IVVTGHRGF

SEQ ID NO: 22787 - protein, 9 aa, synthetic construct
  source 1..9: note = Seed: LVVVGARGV (KRAS G12R)
IVVTGHRGH

SEQ ID NO: 22788 - protein, 9 aa, synthetic construct
  source 1..9: note = Seed: LVVVGARGV (KRAS G12R)
IVVTGHRGI

SEQ ID NO: 22789 - protein, 9 aa, synthetic construct
  source 1..9: note = Seed: LVVVGARGV (KRAS G12R)
IVVTGHRGK

SEQ ID NO: 22790 - protein, 9 aa, synthetic construct
  source 1..9: note = Seed: LVVVGARGV (KRAS G12R)
IVVTGHRGL

SEQ ID NO: 22791 - protein, 9 aa, synthetic construct
  source 1..9: note = Seed: LVVVGARGV (KRAS G12R)
IVVTGHRGM

SEQ ID NO: 22792 - protein, 9 aa, synthetic construct
  source 1..9: note = Seed: LVVVGARGV (KRAS G12R)
IVVTGHRGR

SEQ ID NO: 22793 - protein, 9 aa, synthetic construct
  source 1..9: note = Seed: LVVVGARGV (KRAS G12R)
IVVTGHRGS

SEQ ID NO: 22794 - protein, 9 aa, synthetic construct
  source 1..9: note = Seed: LVVVGARGV (KRAS G12R)
IVVTGHRGV

SEQ ID NO: 22795 - protein, 9 aa, synthetic construct
  source 1..9: note = Seed: LVVVGARGV (KRAS G12R)
IVVTGHRGY

SEQ ID NO: 22796 - protein, 9 aa, synthetic construct
  source 1..9: note = Seed: LVVVGARGV (KRAS G12R)
IVVTGIRGA

SEQ ID NO: 22797 - protein, 9 aa, synthetic construct
  source 1..9: note = Seed: LVVVGARGV (KRAS G12R)
IVVTGIRGF

SEQ ID NO: 22798 - protein, 9 aa, synthetic construct
  source 1..9: note = Seed: LVVVGARGV (KRAS G12R)
IVVTGIRGI

SEQ ID NO: 22799 - protein, 9 aa, synthetic construct
  source 1..9: note = Seed: LVVVGARGV (KRAS G12R)
IVVTGIRGK

SEQ ID NO: 22800 - protein, 9 aa, synthetic construct
  source 1..9: note = Seed: LVVVGARGV (KRAS G12R)
IVVTGIRGL

SEQ ID NO: 22801 - protein, 9 aa, synthetic construct
  source 1..9: note = Seed: LVVVGARGV (KRAS G12R)
IVVTGIRGM

SEQ ID NO: 22802 - protein, 9 aa, synthetic construct
  source 1..9: note = Seed: LVVVGARGV (KRAS G12R)
IVVTGIRGR

SEQ ID NO: 22803 - protein, 9 aa, synthetic construct
  source 1..9: note = Seed: LVVVGARGV (KRAS G12R)
IVVTGIRGV

SEQ ID NO: 22804 - protein, 9 aa, synthetic construct
  source 1..9: note = Seed: LVVVGARGV (KRAS G12R)
IVVTGIRGY

SEQ ID NO: 22805 - protein, 9 aa, synthetic construct
  source 1..9: note = Seed: LVVVGARGV (KRAS G12R)
IVVTGKRGA

SEQ ID NO: 22806 - protein, 9 aa, synthetic construct
  source 1..9: note = Seed: LVVVGARGV (KRAS G12R)
IVVTGKRGF

SEQ ID NO: 22807 - protein, 9 aa, synthetic construct
  source 1..9: note = Seed: LVVVGARGV (KRAS G12R)
IVVTGKRGG

SEQ ID NO: 22808 - protein, 9 aa, synthetic construct
  source 1..9: note = Seed: LVVVGARGV (KRAS G12R)
IVVTGKRGH

SEQ ID NO: 22809 - protein, 9 aa, synthetic construct
  source 1..9: note = Seed: LVVVGARGV (KRAS G12R)
IVVTGKRGI

SEQ ID NO: 22810 - protein, 9 aa, synthetic construct
  source 1..9: note = Seed: LVVVGARGV (KRAS G12R)
IVVTGKRGK

SEQ ID NO: 22811 - protein, 9 aa, synthetic construct
  source 1..9: note = Seed: LVVVGARGV (KRAS G12R)
IVVTGKRGL

SEQ ID NO: 22812 - protein, 9 aa, synthetic construct
  source 1..9: note = Seed: LVVVGARGV (KRAS G12R)
IVVTGKRGM

SEQ ID NO: 22813 - protein, 9 aa, synthetic construct
  source 1..9: note = Seed: LVVVGARGV (KRAS G12R)
IVVTGKRGN

SEQ ID NO: 22814 - protein, 9 aa, synthetic construct
  source 1..9: note = Seed: LVVVGARGV (KRAS G12R)
IVVTGKRGQ

SEQ ID NO: 22815 - protein, 9 aa, synthetic construct
  source 1..9: note = Seed: LVVVGARGV (KRAS G12R)
IVVTGKRGR

SEQ ID NO: 22816 - protein, 9 aa, synthetic construct
  source 1..9: note = Seed: LVVVGARGV (KRAS G12R)
IVVTGKRGS

SEQ ID NO: 22817 - protein, 9 aa, synthetic construct
  source 1..9: note = Seed: LVVVGARGV (KRAS G12R)
IVVTGKRGT

SEQ ID NO: 22818 - protein, 9 aa, synthetic construct
  source 1..9: note = Seed: LVVVGARGV (KRAS G12R)
IVVTGKRGV

SEQ ID NO: 22819 - protein, 9 aa, synthetic construct
  source 1..9: note = Seed: LVVVGARGV (KRAS G12R)
IVVTGKRGW

SEQ ID NO: 22820 - protein, 9 aa, synthetic construct
  source 1..9: note = Seed: LVVVGARGV (KRAS G12R)
IVVTGKRGY

SEQ ID NO: 22821 - protein, 9 aa, synthetic construct
  source 1..9: note = Seed: LVVVGARGV (KRAS G12R)
IVVTGLRGA

SEQ ID NO: 22822 - protein, 9 aa, synthetic construct
  source 1..9: note = Seed: LVVVGARGV (KRAS G12R)
IVVTGLRGF

SEQ ID NO: 22823 - protein, 9 aa, synthetic construct
  source 1..9: note = Seed: LVVVGARGV (KRAS G12R)
IVVTGLRGI

SEQ ID NO: 22824 - protein, 9 aa, synthetic construct
  source 1..9: note = Seed: LVVVGARGV (KRAS G12R)
IVVTGLRGK

SEQ ID NO: 22825 - protein, 9 aa, synthetic construct
  source 1..9: note = Seed: LVVVGARGV (KRAS G12R)
IVVTGLRGL

SEQ ID NO: 22826 - protein, 9 aa, synthetic construct
  source 1..9: note = Seed: LVVVGARGV (KRAS G12R)
IVVTGLRGM

SEQ ID NO: 22827 - protein, 9 aa, synthetic construct
  source 1..9: note = Seed: LVVVGARGV (KRAS G12R)
IVVTGLRGR

SEQ ID NO: 22828 - protein, 9 aa, synthetic construct
  source 1..9: note = Seed: LVVVGARGV (KRAS G12R)
IVVTGLRGY

SEQ ID NO: 22829 - protein, 9 aa, synthetic construct
  source 1..9: note = Seed: LVVVGARGV (KRAS G12R)
IVVTGMRGA

SEQ ID NO: 22830 - protein, 9 aa, synthetic construct
  source 1..9: note = Seed: LVVVGARGV (KRAS G12R)
IVVTGMRGF

SEQ ID NO: 22831 - protein, 9 aa, synthetic construct
  source 1..9: note = Seed: LVVVGARGV (KRAS G12R)
IVVTGMRGI

SEQ ID NO: 22832 - protein, 9 aa, synthetic construct
  source 1..9: note = Seed: LVVVGARGV (KRAS G12R)
IVVTGMRGK

SEQ ID NO: 22833 - protein, 9 aa, synthetic construct
  source 1..9: note = Seed: LVVVGARGV (KRAS G12R)
IVVTGMRGL

SEQ ID NO: 22834 - protein, 9 aa, synthetic construct
  source 1..9: note = Seed: LVVVGARGV (KRAS G12R)
IVVTGMRGM

SEQ ID NO: 22835 - protein, 9 aa, synthetic construct
  source 1..9: note = Seed: LVVVGARGV (KRAS G12R)
IVVTGMRGR

SEQ ID NO: 22836 - protein, 9 aa, synthetic construct
  source 1..9: note = Seed: LVVVGARGV (KRAS G12R)
IVVTGMRGV

SEQ ID NO: 22837 - protein, 9 aa, synthetic construct
  source 1..9: note = Seed: LVVVGARGV (KRAS G12R)
IVVTGMRGY

SEQ ID NO: 22838 - protein, 9 aa, synthetic construct
  source 1..9: note = Seed: LVVVGARGV (KRAS G12R)
IVVTGNRGA

SEQ ID NO: 22839 - protein, 9 aa, synthetic construct
  source 1..9: note = Seed: LVVVGARGV (KRAS G12R)
IVVTGNRGF

SEQ ID NO: 22840 - protein, 9 aa, synthetic construct
  source 1..9: note = Seed: LVVVGARGV (KRAS G12R)
IVVTGNRGI

SEQ ID NO: 22841 - protein, 9 aa, synthetic construct
  source 1..9: note = Seed: LVVVGARGV (KRAS G12R)
IVVTGNRGL

SEQ ID NO: 22842 - protein, 9 aa, synthetic construct
  source 1..9: note = Seed: LVVVGARGV (KRAS G12R)
IVVTGNRGM

SEQ ID NO: 22843 - protein, 9 aa, synthetic construct
  source 1..9: note = Seed: LVVVGARGV (KRAS G12R)
IVVTGNRGR

SEQ ID NO: 22844 - protein, 9 aa, synthetic construct
  source 1..9: note = Seed: LVVVGARGV (KRAS G12R)
IVVTGNRGV

SEQ ID NO: 22845 - protein, 9 aa, synthetic construct
  source 1..9: note = Seed: LVVVGARGV (KRAS G12R)
IVVTGNRGY

SEQ ID NO: 22846 - protein, 9 aa, synthetic construct
  source 1..9: note = Seed: LVVVGARGV (KRAS G12R)
IVVTGPRGA

SEQ ID NO: 22847 - protein, 9 aa, synthetic construct
  source 1..9: note = Seed: LVVVGARGV (KRAS G12R)
IVVTGPRGI

SEQ ID NO: 22848 - protein, 9 aa, synthetic construct
  source 1..9: note = Seed: LVVVGARGV (KRAS G12R)
IVVTGPRGL

SEQ ID NO: 22849 - protein, 9 aa, synthetic construct
  source 1..9: note = Seed: LVVVGARGV (KRAS G12R)
IVVTGPRGR

SEQ ID NO: 22850 - protein, 9 aa, synthetic construct
  source 1..9: note = Seed: LVVVGARGV (KRAS G12R)
IVVTGPRGV

SEQ ID NO: 22851 - protein, 9 aa, synthetic construct
  source 1..9: note = Seed: LVVVGARGV (KRAS G12R)
IVVTGPRGY

SEQ ID NO: 22852 - protein, 9 aa, synthetic construct
  source 1..9: note = Seed: LVVVGARGV (KRAS G12R)
IVVTGRRGA

SEQ ID NO: 22853 - protein, 9 aa, synthetic construct
  source 1..9: note = Seed: LVVVGARGV (KRAS G12R)
IVVTGRRGC

SEQ ID NO: 22854 - protein, 9 aa, synthetic construct
  source 1..9: note = Seed: LVVVGARGV (KRAS G12R)
IVVTGRRGE

SEQ ID NO: 22855 - protein, 9 aa, synthetic construct
  source 1..9: note = Seed: LVVVGARGV (KRAS G12R)
IVVTGRRGF

SEQ ID NO: 22856 - protein, 9 aa, synthetic construct
  source 1..9: note = Seed: LVVVGARGV (KRAS G12R)
IVVTGRRGG

SEQ ID NO: 22857 - protein, 9 aa, synthetic construct
  source 1..9: note = Seed: LVVVGARGV (KRAS G12R)
IVVTGRRGH

SEQ ID NO: 22858 - protein, 9 aa, synthetic construct
  source 1..9: note = Seed: LVVVGARGV (KRAS G12R)
IVVTGRRGI

SEQ ID NO: 22859 - protein, 9 aa, synthetic construct
  source 1..9: note = Seed: LVVVGARGV (KRAS G12R)
IVVTGRRGK

SEQ ID NO: 22860 - protein, 9 aa, synthetic construct
  source 1..9: note = Seed: LVVVGARGV (KRAS G12R)
IVVTGRRGL

SEQ ID NO: 22861 - protein, 9 aa, synthetic construct
  source 1..9: note = Seed: LVVVGARGV (KRAS G12R)
IVVTGRRGM

SEQ ID NO: 22862 - protein, 9 aa, synthetic construct
  source 1..9: note = Seed: LVVVGARGV (KRAS G12R)
IVVTGRRGN

SEQ ID NO: 22863 - protein, 9 aa, synthetic construct
  source 1..9: note = Seed: LVVVGARGV (KRAS G12R)
IVVTGRRGP

SEQ ID NO: 22864 - protein, 9 aa, synthetic construct
  source 1..9: note = Seed: LVVVGARGV (KRAS G12R)
IVVTGRRGQ

SEQ ID NO: 22865 - protein, 9 aa, synthetic construct
  source 1..9: note = Seed: LVVVGARGV (KRAS G12R)
IVVTGRRGR

SEQ ID NO: 22866 - protein, 9 aa, synthetic construct
  source 1..9: note = Seed: LVVVGARGV (KRAS G12R)
IVVTGRRGS

SEQ ID NO: 22867 - protein, 9 aa, synthetic construct
  source 1..9: note = Seed: LVVVGARGV (KRAS G12R)
IVVTGRRGT

SEQ ID NO: 22868 - protein, 9 aa, synthetic construct
  source 1..9: note = Seed: LVVVGARGV (KRAS G12R)
IVVTGRRGV

SEQ ID NO: 22869 - protein, 9 aa, synthetic construct
  source 1..9: note = Seed: LVVVGARGV (KRAS G12R)
IVVTGRRGW

SEQ ID NO: 22870 - protein, 9 aa, synthetic construct
  source 1..9: note = Seed: LVVVGARGV (KRAS G12R)
IVVTGRRGY

SEQ ID NO: 22871 - protein, 9 aa, synthetic construct
  source 1..9: note = Seed: LVVVGARGV (KRAS G12R)
IVVTGSRGA

SEQ ID NO: 22872 - protein, 9 aa, synthetic construct
  source 1..9: note = Seed: LVVVGARGV (KRAS G12R)
IVVTGSRGF

SEQ ID NO: 22873 - protein, 9 aa, synthetic construct
  source 1..9: note = Seed: LVVVGARGV (KRAS G12R)
IVVTGSRGI

SEQ ID NO: 22874 - protein, 9 aa, synthetic construct
  source 1..9: note = Seed: LVVVGARGV (KRAS G12R)
IVVTGSRGK

SEQ ID NO: 22875 - protein, 9 aa, synthetic construct
  source 1..9: note = Seed: LVVVGARGV (KRAS G12R)
IVVTGSRGL

SEQ ID NO: 22876 - protein, 9 aa, synthetic construct
  source 1..9: note = Seed: LVVVGARGV (KRAS G12R)
IVVTGSRGM

SEQ ID NO: 22877 - protein, 9 aa, synthetic construct
  source 1..9: note = Seed: LVVVGARGV (KRAS G12R)
IVVTGSRGR

SEQ ID NO: 22878 - protein, 9 aa, synthetic construct
  source 1..9: note = Seed: LVVVGARGV (KRAS G12R)
IVVTGSRGT

SEQ ID NO: 22879 - protein, 9 aa, synthetic construct
  source 1..9: note = Seed: LVVVGARGV (KRAS G12R)
IVVTGSRGV

SEQ ID NO: 22880 - protein, 9 aa, synthetic construct
  source 1..9: note = Seed: LVVVGARGV (KRAS G12R)
IVVTGSRGY

SEQ ID NO: 22881 - protein, 9 aa, synthetic construct
  source 1..9: note = Seed: LVVVGARGV (KRAS G12R)
IVVTGTRGF

SEQ ID NO: 22882 - protein, 9 aa, synthetic construct
  source 1..9: note = Seed: LVVVGARGV (KRAS G12R)
IVVTGTRGI

SEQ ID NO: 22883 - protein, 9 aa, synthetic construct
  source 1..9: note = Seed: LVVVGARGV (KRAS G12R)
IVVTGTRGK

SEQ ID NO: 22884 - protein, 9 aa, synthetic construct
  source 1..9: note = Seed: LVVVGARGV (KRAS G12R)
IVVTGTRGL

SEQ ID NO: 22885 - protein, 9 aa, synthetic construct
  source 1..9: note = Seed: LVVVGARGV (KRAS G12R)
IVVTGTRGM

SEQ ID NO: 22886 - protein, 9 aa, synthetic construct
  source 1..9: note = Seed: LVVVGARGV (KRAS G12R)
IVVTGTRGR

SEQ ID NO: 22887 - protein, 9 aa, synthetic construct
  source 1..9: note = Seed: LVVVGARGV (KRAS G12R)
IVVTGTRGV

SEQ ID NO: 22888 - protein, 9 aa, synthetic construct
  source 1..9: note = Seed: LVVVGARGV (KRAS G12R)
IVVTGTRGY

SEQ ID NO: 22889 - protein, 9 aa, synthetic construct
  source 1..9: note = Seed: LVVVGARGV (KRAS G12R)
IVVTGVRGF

SEQ ID NO: 22890 - protein, 9 aa, synthetic construct
  source 1..9: note = Seed: LVVVGARGV (KRAS G12R)
IVVTGVRGI

SEQ ID NO: 22891 - protein, 9 aa, synthetic construct
  source 1..9: note = Seed: LVVVGARGV (KRAS G12R)
IVVTGVRGK

SEQ ID NO: 22892 - protein, 9 aa, synthetic construct
  source 1..9: note = Seed: LVVVGARGV (KRAS G12R)
IVVTGVRGL

SEQ ID NO: 22893 - protein, 9 aa, synthetic construct
  source 1..9: note = Seed: LVVVGARGV (KRAS G12R)
IVVTGVRGM

SEQ ID NO: 22894 - protein, 9 aa, synthetic construct
  source 1..9: note = Seed: LVVVGARGV (KRAS G12R)
IVVTGVRGR

SEQ ID NO: 22895 - protein, 9 aa, synthetic construct
  source 1..9: note = Seed: LVVVGARGV (KRAS G12R)
IVVTGVRGV

SEQ ID NO: 22896 - protein, 9 aa, synthetic construct
  source 1..9: note = Seed: LVVVGARGV (KRAS G12R)
IVVTGVRGY

SEQ ID NO: 22897 - protein, 9 aa, synthetic construct
  source 1..9: note = Seed: LVVVGARGV (KRAS G12R)
IVVTGWRGR

SEQ ID NO: 22898 - protein, 9 aa, synthetic construct
  source 1..9: note = Seed: LVVVGARGV (KRAS G12R)
IVVTGYRGR

SEQ ID NO: 22899 - protein, 9 aa, synthetic construct
  source 1..9: note = Seed: LVVVGARGV (KRAS G12R)
IVVVGARGA

SEQ ID NO: 22900 - protein, 9 aa, synthetic construct
  source 1..9: note = Seed: LVVVGARGV (KRAS G12R)
IVVVGARGC

SEQ ID NO: 22901 - protein, 9 aa, synthetic construct
  source 1..9: note = Seed: LVVVGARGV (KRAS G12R)
IVVVGARGF

SEQ ID NO: 22902 - protein, 9 aa, synthetic construct
  source 1..9: note = Seed: LVVVGARGV (KRAS G12R)
IVVVGARGG

SEQ ID NO: 22903 - protein, 9 aa, synthetic construct
  source 1..9: note = Seed: LVVVGARGV (KRAS G12R)
IVVVGARGH

SEQ ID NO: 22904 - protein, 9 aa, synthetic construct
  source 1..9: note = Seed: LVVVGARGV (KRAS G12R)
IVVVGARGI

SEQ ID NO: 22905 - protein, 9 aa, synthetic construct
  source 1..9: note = Seed: LVVVGARGV (KRAS G12R)
IVVVGARGK

SEQ ID NO: 22906 - protein, 9 aa, synthetic construct
  source 1..9: note = Seed: LVVVGARGV (KRAS G12R)
IVVVGARGL

SEQ ID NO: 22907 - protein, 9 aa, synthetic construct
  source 1..9: note = Seed: LVVVGARGV (KRAS G12R)
IVVVGARGM

SEQ ID NO: 22908 - protein, 9 aa, synthetic construct
  source 1..9: note = Seed: LVVVGARGV (KRAS G12R)
IVVVGARGN

SEQ ID NO: 22909 - protein, 9 aa, synthetic construct
  source 1..9: note = Seed: LVVVGARGV (KRAS G12R)
IVVVGARGQ

SEQ ID NO: 22910 - protein, 9 aa, synthetic construct
  source 1..9: note = Seed: LVVVGARGV (KRAS G12R)
IVVVGARGR

SEQ ID NO: 22911 - protein, 9 aa, synthetic construct
  source 1..9: note = Seed: LVVVGARGV (KRAS G12R)
IVVVGARGS

SEQ ID NO: 22912 - protein, 9 aa, synthetic construct
  source 1..9: note = Seed: LVVVGARGV (KRAS G12R)
IVVVGARGT

SEQ ID NO: 22913 - protein, 9 aa, synthetic construct
  source 1..9: note = Seed: LVVVGARGV (KRAS G12R)
IVVVGARGV

SEQ ID NO: 22914 - protein, 9 aa, synthetic construct
  source 1..9: note = Seed: LVVVGARGV (KRAS G12R)
IVVVGARGY

SEQ ID NO: 22915 - protein, 9 aa, synthetic construct
  source 1..9: note = Seed: LVVVGARGV (KRAS G12R)
IVVVGCRGR

SEQ ID NO: 22916 - protein, 9 aa, synthetic construct
  source 1..9: note = Seed: LVVVGARGV (KRAS G12R)
IVVVGFRGI

SEQ ID NO: 22917 - protein, 9 aa, synthetic construct
  source 1..9: note = Seed: LVVVGARGV (KRAS G12R)
IVVVGFRGL

SEQ ID NO: 22918 - protein, 9 aa, synthetic construct
  source 1..9: note = Seed: LVVVGARGV (KRAS G12R)
IVVVGFRGR

SEQ ID NO: 22919 - protein, 9 aa, synthetic construct
  source 1..9: note = Seed: LVVVGARGV (KRAS G12R)
IVVVGFRGV

SEQ ID NO: 22920 - protein, 9 aa, synthetic construct
  source 1..9: note = Seed: LVVVGARGV (KRAS G12R)
IVVVGGRGA

SEQ ID NO: 22921 - protein, 9 aa, synthetic construct
  source 1..9: note = Seed: LVVVGARGV (KRAS G12R)
IVVVGGRGF

SEQ ID NO: 22922 - protein, 9 aa, synthetic construct
  source 1..9: note = Seed: LVVVGARGV (KRAS G12R)
IVVVGGRGI

SEQ ID NO: 22923 - protein, 9 aa, synthetic construct
  source 1..9: note = Seed: LVVVGARGV (KRAS G12R)
IVVVGGRGK

SEQ ID NO: 22924 - protein, 9 aa, synthetic construct
  source 1..9: note = Seed: LVVVGARGV (KRAS G12R)
IVVVGGRGL

SEQ ID NO: 22925 - protein, 9 aa, synthetic construct
  source 1..9: note = Seed: LVVVGARGV (KRAS G12R)
IVVVGGRGM

SEQ ID NO: 22926 - protein, 9 aa, synthetic construct
  source 1..9: note = Seed: LVVVGARGV (KRAS G12R)
IVVVGGRGN

SEQ ID NO: 22927 - protein, 9 aa, synthetic construct
  source 1..9: note = Seed: LVVVGARGV (KRAS G12R)
IVVVGGRGR

SEQ ID NO: 22928 - protein, 9 aa, synthetic construct
  source 1..9: note = Seed: LVVVGARGV (KRAS G12R)
IVVVGGRGS

SEQ ID NO: 22929 - protein, 9 aa, synthetic construct
  source 1..9: note = Seed: LVVVGARGV (KRAS G12R)
IVVVGGRGT

SEQ ID NO: 22930 - protein, 9 aa, synthetic construct
  source 1..9: note = Seed: LVVVGARGV (KRAS G12R)
IVVVGGRGV

SEQ ID NO: 22931 - protein, 9 aa, synthetic construct
  source 1..9: note = Seed: LVVVGARGV (KRAS G12R)
IVVVGGRGY

SEQ ID NO: 22932 - protein, 9 aa, synthetic construct
  source 1..9: note = Seed: LVVVGARGV (KRAS G12R)
IVVVGHRGA

SEQ ID NO: 22933 - protein, 9 aa, synthetic construct
  source 1..9: note = Seed: LVVVGARGV (KRAS G12R)
IVVVGHRGF

SEQ ID NO: 22934 - protein, 9 aa, synthetic construct
  source 1..9: note = Seed: LVVVGARGV (KRAS G12R)
IVVVGHRGG

SEQ ID NO: 22935 - protein, 9 aa, synthetic construct
  source 1..9: note = Seed: LVVVGARGV (KRAS G12R)
IVVVGHRGH

SEQ ID NO: 22936 - protein, 9 aa, synthetic construct
  source 1..9: note = Seed: LVVVGARGV (KRAS G12R)
IVVVGHRGI

SEQ ID NO: 22937 - protein, 9 aa, synthetic construct
  source 1..9: note = Seed: LVVVGARGV (KRAS G12R)
IVVVGHRGK

SEQ ID NO: 22938 - protein, 9 aa, synthetic construct
  source 1..9: note = Seed: LVVVGARGV (KRAS G12R)
IVVVGHRGL

SEQ ID NO: 22939 - protein, 9 aa, synthetic construct
  source 1..9: note = Seed: LVVVGARGV (KRAS G12R)
IVVVGHRGM

SEQ ID NO: 22940 - protein, 9 aa, synthetic construct
  source 1..9: note = Seed: LVVVGARGV (KRAS G12R)
IVVVGHRGN

SEQ ID NO: 22941 - protein, 9 aa, synthetic construct
  source 1..9: note = Seed: LVVVGARGV (KRAS G12R)
IVVVGHRGP

SEQ ID NO: 22942 - protein, 9 aa, synthetic construct
  source 1..9: note = Seed: LVVVGARGV (KRAS G12R)
IVVVGHRGQ

SEQ ID NO: 22943 - protein, 9 aa, synthetic construct
  source 1..9: note = Seed: LVVVGARGV (KRAS G12R)
IVVVGHRGR

SEQ ID NO: 22944 - protein, 9 aa, synthetic construct
  source 1..9: note = Seed: LVVVGARGV (KRAS G12R)
IVVVGHRGS

SEQ ID NO: 22945 - protein, 9 aa, synthetic construct
  source 1..9: note = Seed: LVVVGARGV (KRAS G12R)
IVVVGHRGT

SEQ ID NO: 22946 - protein, 9 aa, synthetic construct
  source 1..9: note = Seed: LVVVGARGV (KRAS G12R)
IVVVGHRGV

SEQ ID NO: 22947 - protein, 9 aa, synthetic construct
  source 1..9: note = Seed: LVVVGARGV (KRAS G12R)
IVVVGHRGW

SEQ ID NO: 22948 - protein, 9 aa, synthetic construct
  source 1..9: note = Seed: LVVVGARGV (KRAS G12R)
IVVVGHRGY

SEQ ID NO: 22949 - protein, 9 aa, synthetic construct
  source 1..9: note = Seed: LVVVGARGV (KRAS G12R)
IVVVGIRGA

SEQ ID NO: 22950 - protein, 9 aa, synthetic construct
  source 1..9: note = Seed: LVVVGARGV (KRAS G12R)
IVVVGIRGF

SEQ ID NO: 22951 - protein, 9 aa, synthetic construct
  source 1..9: note = Seed: LVVVGARGV (KRAS G12R)
IVVVGIRGG

SEQ ID NO: 22952 - protein, 9 aa, synthetic construct
  source 1..9: note = Seed: LVVVGARGV (KRAS G12R)
IVVVGIRGH

SEQ ID NO: 22953 - protein, 9 aa, synthetic construct
  source 1..9: note = Seed: LVVVGARGV (KRAS G12R)
IVVVGIRGI

SEQ ID NO: 22954 - protein, 9 aa, synthetic construct
  source 1..9: note = Seed: LVVVGARGV (KRAS G12R)
IVVVGIRGK

SEQ ID NO: 22955 - protein, 9 aa, synthetic construct
  source 1..9: note = Seed: LVVVGARGV (KRAS G12R)
IVVVGIRGL

SEQ ID NO: 22956 - protein, 9 aa, synthetic construct
  source 1..9: note = Seed: LVVVGARGV (KRAS G12R)
IVVVGIRGM

SEQ ID NO: 22957 - protein, 9 aa, synthetic construct
  source 1..9: note = Seed: LVVVGARGV (KRAS G12R)
IVVVGIRGN

SEQ ID NO: 22958 - protein, 9 aa, synthetic construct
  source 1..9: note = Seed: LVVVGARGV (KRAS G12R)
IVVVGIRGQ

SEQ ID NO: 22959 - protein, 9 aa, synthetic construct
  source 1..9: note = Seed: LVVVGARGV (KRAS G12R)
IVVVGIRGR

SEQ ID NO: 22960 - protein, 9 aa, synthetic construct
  source 1..9: note = Seed: LVVVGARGV (KRAS G12R)
IVVVGIRGS

SEQ ID NO: 22961 - protein, 9 aa, synthetic construct
  source 1..9: note = Seed: LVVVGARGV (KRAS G12R)
IVVVGIRGT

SEQ ID NO: 22962 - protein, 9 aa, synthetic construct
  source 1..9: note = Seed: LVVVGARGV (KRAS G12R)
IVVVGIRGV

SEQ ID NO: 22963 - protein, 9 aa, synthetic construct
  source 1..9: note = Seed: LVVVGARGV (KRAS G12R)
IVVVGIRGY

SEQ ID NO: 22964 - protein, 9 aa, synthetic construct
  source 1..9: note = Seed: LVVVGARGV (KRAS G12R)
IVVVGKRGA

SEQ ID NO: 22965 - protein, 9 aa, synthetic construct
  source 1..9: note = Seed: LVVVGARGV (KRAS G12R)
IVVVGKRGC

SEQ ID NO: 22966 - protein, 9 aa, synthetic construct
  source 1..9: note = Seed: LVVVGARGV (KRAS G12R)
IVVVGKRGE

SEQ ID NO: 22967 - protein, 9 aa, synthetic construct
  source 1..9: note = Seed: LVVVGARGV (KRAS G12R)
IVVVGKRGF

SEQ ID NO: 22968 - protein, 9 aa, synthetic construct
  source 1..9: note = Seed: LVVVGARGV (KRAS G12R)
IVVVGKRGG

SEQ ID NO: 22969 - protein, 9 aa, synthetic construct
  source 1..9: note = Seed: LVVVGARGV (KRAS G12R)
IVVVGKRGH

SEQ ID NO: 22970 - protein, 9 aa, synthetic construct
  source 1..9: note = Seed: LVVVGARGV (KRAS G12R)
IVVVGKRGI

SEQ ID NO: 22971 - protein, 9 aa, synthetic construct
  source 1..9: note = Seed: LVVVGARGV (KRAS G12R)
IVVVGKRGK

SEQ ID NO: 22972 - protein, 9 aa, synthetic construct
  source 1..9: note = Seed: LVVVGARGV (KRAS G12R)
IVVVGKRGL

SEQ ID NO: 22973 - protein, 9 aa, synthetic construct
  source 1..9: note = Seed: LVVVGARGV (KRAS G12R)
IVVVGKRGM

SEQ ID NO: 22974 - protein, 9 aa, synthetic construct
  source 1..9: note = Seed: LVVVGARGV (KRAS G12R)
IVVVGKRGN

SEQ ID NO: 22975 - protein, 9 aa, synthetic construct
  source 1..9: note = Seed: LVVVGARGV (KRAS G12R)
IVVVGKRGP

SEQ ID NO: 22976 - protein, 9 aa, synthetic construct
  source 1..9: note = Seed: LVVVGARGV (KRAS G12R)
IVVVGKRGQ

SEQ ID NO: 22977 - protein, 9 aa, synthetic construct
  source 1..9: note = Seed: LVVVGARGV (KRAS G12R)
IVVVGKRGR

SEQ ID NO: 22978 - protein, 9 aa, synthetic construct
  source 1..9: note = Seed: LVVVGARGV (KRAS G12R)
IVVVGKRGS

SEQ ID NO: 22979 - protein, 9 aa, synthetic construct
  source 1..9: note = Seed: LVVVGARGV (KRAS G12R)
IVVVGKRGT

SEQ ID NO: 22980 - protein, 9 aa, synthetic construct
  source 1..9: note = Seed: LVVVGARGV (KRAS G12R)
IVVVGKRGV

SEQ ID NO: 22981 - protein, 9 aa, synthetic construct
  source 1..9: note = Seed: LVVVGARGV (KRAS G12R)
IVVVGKRGW

SEQ ID NO: 22982 - protein, 9 aa, synthetic construct
  source 1..9: note = Seed: LVVVGARGV (KRAS G12R)
IVVVGKRGY

SEQ ID NO: 22983 - protein, 9 aa, synthetic construct
  source 1..9: note = Seed: LVVVGARGV (KRAS G12R)
IVVVGLRGA

SEQ ID NO: 22984 - protein, 9 aa, synthetic construct
  source 1..9: note = Seed: LVVVGARGV (KRAS G12R)
IVVVGLRGF

SEQ ID NO: 22985 - protein, 9 aa, synthetic construct
  source 1..9: note = Seed: LVVVGARGV (KRAS G12R)
IVVVGLRGG

SEQ ID NO: 22986 - protein, 9 aa, synthetic construct
  source 1..9: note = Seed: LVVVGARGV (KRAS G12R)
IVVVGLRGH

SEQ ID NO: 22987 - protein, 9 aa, synthetic construct
  source 1..9: note = Seed: LVVVGARGV (KRAS G12R)
IVVVGLRGI

SEQ ID NO: 22988 - protein, 9 aa, synthetic construct
  source 1..9: note = Seed: LVVVGARGV (KRAS G12R)
IVVVGLRGK

SEQ ID NO: 22989 - protein, 9 aa, synthetic construct
  source 1..9: note = Seed: LVVVGARGV (KRAS G12R)
IVVVGLRGL

SEQ ID NO: 22990 - protein, 9 aa, synthetic construct
  source 1..9: note = Seed: LVVVGARGV (KRAS G12R)
IVVVGLRGM

SEQ ID NO: 22991 - protein, 9 aa, synthetic construct
  source 1..9: note = Seed: LVVVGARGV (KRAS G12R)
IVVVGLRGQ

SEQ ID NO: 22992 - protein, 9 aa, synthetic construct
  source 1..9: note = Seed: LVVVGARGV (KRAS G12R)
IVVVGLRGR

SEQ ID NO: 22993 - protein, 9 aa, synthetic construct
  source 1..9: note = Seed: LVVVGARGV (KRAS G12R)
IVVVGLRGS

SEQ ID NO: 22994 - protein, 9 aa, synthetic construct
  source 1..9: note = Seed: LVVVGARGV (KRAS G12R)
IVVVGLRGV

SEQ ID NO: 22995 - protein, 9 aa, synthetic construct
  source 1..9: note = Seed: LVVVGARGV (KRAS G12R)
IVVVGLRGY

SEQ ID NO: 22996 - protein, 9 aa, synthetic construct
  source 1..9: note = Seed: LVVVGARGV (KRAS G12R)
IVVVGMRGA

SEQ ID NO: 22997 - protein, 9 aa, synthetic construct
  source 1..9: note = Seed: LVVVGARGV (KRAS G12R)
IVVVGMRGF

SEQ ID NO: 22998 - protein, 9 aa, synthetic construct
  source 1..9: note = Seed: LVVVGARGV (KRAS G12R)
IVVVGMRGG

SEQ ID NO: 22999 - protein, 9 aa, synthetic construct
  source 1..9: note = Seed: LVVVGARGV (KRAS G12R)
IVVVGMRGI

SEQ ID NO: 23000 - protein, 9 aa, synthetic construct
  source 1..9: note = Seed: LVVVGARGV (KRAS G12R)
IVVVGMRGK

SEQ ID NO: 23001 - protein, 9 aa, synthetic construct
  source 1..9: note = Seed: LVVVGARGV (KRAS G12R)
IVVVGMRGL

SEQ ID NO: 23002 - protein, 9 aa, synthetic construct
  source 1..9: note = Seed: LVVVGARGV (KRAS G12R)
IVVVGMRGM

SEQ ID NO: 23003 - protein, 9 aa, synthetic construct
  source 1..9: note = Seed: LVVVGARGV (KRAS G12R)
IVVVGMRGQ

SEQ ID NO: 23004 - protein, 9 aa, synthetic construct
  source 1..9: note = Seed: LVVVGARGV (KRAS G12R)
IVVVGMRGR

SEQ ID NO: 23005 - protein, 9 aa, synthetic construct
  source 1..9: note = Seed: LVVVGARGV (KRAS G12R)
IVVVGMRGS

SEQ ID NO: 23006 - protein, 9 aa, synthetic construct
  source 1..9: note = Seed: LVVVGARGV (KRAS G12R)
IVVVGMRGV

SEQ ID NO: 23007 - protein, 9 aa, synthetic construct
  source 1..9: note = Seed: LVVVGARGV (KRAS G12R)
IVVVGMRGY

SEQ ID NO: 23008 - protein, 9 aa, synthetic construct
  source 1..9: note = Seed: LVVVGARGV (KRAS G12R)
IVVVGNRGA

SEQ ID NO: 23009 - protein, 9 aa, synthetic construct
  source 1..9: note = Seed: LVVVGARGV (KRAS G12R)
IVVVGNRGF

SEQ ID NO: 23010 - protein, 9 aa, synthetic construct
  source 1..9: note = Seed: LVVVGARGV (KRAS G12R)
IVVVGNRGH

SEQ ID NO: 23011 - protein, 9 aa, synthetic construct
  source 1..9: note = Seed: LVVVGARGV (KRAS G12R)
IVVVGNRGI

SEQ ID NO: 23012 - protein, 9 aa, synthetic construct
  source 1..9: note = Seed: LVVVGARGV (KRAS G12R)
IVVVGNRGK

SEQ ID NO: 23013 - protein, 9 aa, synthetic construct
  source 1..9: note = Seed: LVVVGARGV (KRAS G12R)
IVVVGNRGL

SEQ ID NO: 23014 - protein, 9 aa, synthetic construct
  source 1..9: note = Seed: LVVVGARGV (KRAS G12R)
IVVVGNRGM

SEQ ID NO: 23015 - protein, 9 aa, synthetic construct
  source 1..9: note = Seed: LVVVGARGV (KRAS G12R)
IVVVGNRGR

SEQ ID NO: 23016 - protein, 9 aa, synthetic construct
  source 1..9: note = Seed: LVVVGARGV (KRAS G12R)
IVVVGNRGS

SEQ ID NO: 23017 - protein, 9 aa, synthetic construct
  source 1..9: note = Seed: LVVVGARGV (KRAS G12R)
IVVVGNRGT

SEQ ID NO: 23018 - protein, 9 aa, synthetic construct
  source 1..9: note = Seed: LVVVGARGV (KRAS G12R)
IVVVGNRGV

SEQ ID NO: 23019 - protein, 9 aa, synthetic construct
  source 1..9: note = Seed: LVVVGARGV (KRAS G12R)
IVVVGNRGW

SEQ ID NO: 23020 - protein, 9 aa, synthetic construct
  source 1..9: note = Seed: LVVVGARGV (KRAS G12R)
IVVVGNRGY

SEQ ID NO: 23021 - protein, 9 aa, synthetic construct
  source 1..9: note = Seed: LVVVGARGV (KRAS G12R)
IVVVGPRGA

SEQ ID NO: 23022 - protein, 9 aa, synthetic construct
  source 1..9: note = Seed: LVVVGARGV (KRAS G12R)
IVVVGPRGF

SEQ ID NO: 23023 - protein, 9 aa, synthetic construct
  source 1..9: note = Seed: LVVVGARGV (KRAS G12R)
IVVVGPRGI

SEQ ID NO: 23024 - protein, 9 aa, synthetic construct
  source 1..9: note = Seed: LVVVGARGV (KRAS G12R)
IVVVGPRGK

SEQ ID NO: 23025 - protein, 9 aa, synthetic construct
  source 1..9: note = Seed: LVVVGARGV (KRAS G12R)
IVVVGPRGL

SEQ ID NO: 23026 - protein, 9 aa, synthetic construct
  source 1..9: note = Seed: LVVVGARGV (KRAS G12R)
IVVVGPRGM

SEQ ID NO: 23027 - protein, 9 aa, synthetic construct
  source 1..9: note = Seed: LVVVGARGV (KRAS G12R)
IVVVGPRGR

SEQ ID NO: 23028 - protein, 9 aa, synthetic construct
  source 1..9: note = Seed: LVVVGARGV (KRAS G12R)
IVVVGPRGS

SEQ ID NO: 23029 - protein, 9 aa, synthetic construct
  source 1..9: note = Seed: LVVVGARGV (KRAS G12R)
IVVVGPRGT

SEQ ID NO: 23030 - protein, 9 aa, synthetic construct
  source 1..9: note = Seed: LVVVGARGV (KRAS G12R)
IVVVGPRGV

SEQ ID NO: 23031 - protein, 9 aa, synthetic construct
  source 1..9: note = Seed: LVVVGARGV (KRAS G12R)
IVVVGPRGY

SEQ ID NO: 23032 - protein, 9 aa, synthetic construct
  source 1..9: note = Seed: LVVVGARGV (KRAS G12R)
IVVVGQRGA

SEQ ID NO: 23033 - protein, 9 aa, synthetic construct
  source 1..9: note = Seed: LVVVGARGV (KRAS G12R)
IVVVGQRGF

SEQ ID NO: 23034 - protein, 9 aa, synthetic construct
  source 1..9: note = Seed: LVVVGARGV (KRAS G12R)
IVVVGQRGH

SEQ ID NO: 23035 - protein, 9 aa, synthetic construct
  source 1..9: note = Seed: LVVVGARGV (KRAS G12R)
IVVVGQRGI

SEQ ID NO: 23036 - protein, 9 aa, synthetic construct
  source 1..9: note = Seed: LVVVGARGV (KRAS G12R)
IVVVGQRGK

SEQ ID NO: 23037 - protein, 9 aa, synthetic construct
  source 1..9: note = Seed: LVVVGARGV (KRAS G12R)
IVVVGQRGL

SEQ ID NO: 23038 - protein, 9 aa, synthetic construct
  source 1..9: note = Seed: LVVVGARGV (KRAS G12R)
IVVVGQRGM

SEQ ID NO: 23039 - protein, 9 aa, synthetic construct
  source 1..9: note = Seed: LVVVGARGV (KRAS G12R)
IVVVGQRGQ

SEQ ID NO: 23040 - protein, 9 aa, synthetic construct
  source 1..9: note = Seed: LVVVGARGV (KRAS G12R)
IVVVGQRGR

SEQ ID NO: 23041 - protein, 9 aa, synthetic construct
  source 1..9: note = Seed: LVVVGARGV (KRAS G12R)
IVVVGQRGS

SEQ ID NO: 23042 - protein, 9 aa, synthetic construct
  source 1..9: note = Seed: LVVVGARGV (KRAS G12R)
IVVVGQRGV

SEQ ID NO: 23043 - protein, 9 aa, synthetic construct
  source 1..9: note = Seed: LVVVGARGV (KRAS G12R)
IVVVGQRGY

SEQ ID NO: 23044 - protein, 9 aa, synthetic construct
  source 1..9: note = Seed: LVVVGARGV (KRAS G12R)
IVVVGRRGA

SEQ ID NO: 23045 - protein, 9 aa, synthetic construct
  source 1..9: note = Seed: LVVVGARGV (KRAS G12R)
IVVVGRRGC

SEQ ID NO: 23046 - protein, 9 aa, synthetic construct
  source 1..9: note = Seed: LVVVGARGV (KRAS G12R)
IVVVGRRGD

SEQ ID NO: 23047 - protein, 9 aa, synthetic construct
  source 1..9: note = Seed: LVVVGARGV (KRAS G12R)
IVVVGRRGE

SEQ ID NO: 23048 - protein, 9 aa, synthetic construct
  source 1..9: note = Seed: LVVVGARGV (KRAS G12R)
IVVVGRRGF

SEQ ID NO: 23049 - protein, 9 aa, synthetic construct
  source 1..9: note = Seed: LVVVGARGV (KRAS G12R)
IVVVGRRGG

SEQ ID NO: 23050 - protein, 9 aa, synthetic construct
  source 1..9: note = Seed: LVVVGARGV (KRAS G12R)
IVVVGRRGH

SEQ ID NO: 23051 - protein, 9 aa, synthetic construct
  source 1..9: note = Seed: LVVVGARGV (KRAS G12R)
IVVVGRRGI

SEQ ID NO: 23052 - protein, 9 aa, synthetic construct
  source 1..9: note = Seed: LVVVGARGV (KRAS G12R)
IVVVGRRGK

SEQ ID NO: 23053 - protein, 9 aa, synthetic construct
  source 1..9: note = Seed: LVVVGARGV (KRAS G12R)
IVVVGRRGL

SEQ ID NO: 23054 - protein, 9 aa, synthetic construct
  source 1..9: note = Seed: LVVVGARGV (KRAS G12R)
IVVVGRRGM

SEQ ID NO: 23055 - protein, 9 aa, synthetic construct
  source 1..9: note = Seed: LVVVGARGV (KRAS G12R)
IVVVGRRGN

SEQ ID NO: 23056 - protein, 9 aa, synthetic construct
  source 1..9: note = Seed: LVVVGARGV (KRAS G12R)
IVVVGRRGP

SEQ ID NO: 23057 - protein, 9 aa, synthetic construct
  source 1..9: note = Seed: LVVVGARGV (KRAS G12R)
IVVVGRRGQ

SEQ ID NO: 23058 - protein, 9 aa, synthetic construct
  source 1..9: note = Seed: LVVVGARGV (KRAS G12R)
IVVVGRRGR

SEQ ID NO: 23059 - protein, 9 aa, synthetic construct
  source 1..9: note = Seed: LVVVGARGV (KRAS G12R)
IVVVGRRGS

SEQ ID NO: 23060 - protein, 9 aa, synthetic construct
  source 1..9: note = Seed: LVVVGARGV (KRAS G12R)
IVVVGRRGT

SEQ ID NO: 23061 - protein, 9 aa, synthetic construct
  source 1..9: note = Seed: LVVVGARGV (KRAS G12R)
IVVVGRRGV

SEQ ID NO: 23062 - protein, 9 aa, synthetic construct
  source 1..9: note = Seed: LVVVGARGV (KRAS G12R)
IVVVGRRGW

SEQ ID NO: 23063 - protein, 9 aa, synthetic construct
  source 1..9: note = Seed: LVVVGARGV (KRAS G12R)
IVVVGRRGY

SEQ ID NO: 23064 - protein, 9 aa, synthetic construct
  source 1..9: note = Seed: LVVVGARGV (KRAS G12R)
IVVVGSRGA

SEQ ID NO: 23065 - protein, 9 aa, synthetic construct
  source 1..9: note = Seed: LVVVGARGV (KRAS G12R)
IVVVGSRGF

SEQ ID NO: 23066 - protein, 9 aa, synthetic construct
  source 1..9: note = Seed: LVVVGARGV (KRAS G12R)
IVVVGSRGH

SEQ ID NO: 23067 - protein, 9 aa, synthetic construct
  source 1..9: note = Seed: LVVVGARGV (KRAS G12R)
IVVVGSRGI

SEQ ID NO: 23068 - protein, 9 aa, synthetic construct
  source 1..9: note = Seed: LVVVGARGV (KRAS G12R)
IVVVGSRGK

SEQ ID NO: 23069 - protein, 9 aa, synthetic construct
  source 1..9: note = Seed: LVVVGARGV (KRAS G12R)
IVVVGSRGL

SEQ ID NO: 23070 - protein, 9 aa, synthetic construct
  source 1..9: note = Seed: LVVVGARGV (KRAS G12R)
IVVVGSRGM

SEQ ID NO: 23071 - protein, 9 aa, synthetic construct
  source 1..9: note = Seed: LVVVGARGV (KRAS G12R)
IVVVGSRGN

SEQ ID NO: 23072 - protein, 9 aa, synthetic construct
  source 1..9: note = Seed: LVVVGARGV (KRAS G12R)
IVVVGSRGQ

SEQ ID NO: 23073 - protein, 9 aa, synthetic construct
  source 1..9: note = Seed: LVVVGARGV (KRAS G12R)
IVVVGSRGR

SEQ ID NO: 23074 - protein, 9 aa, synthetic construct
  source 1..9: note = Seed: LVVVGARGV (KRAS G12R)
IVVVGSRGS

SEQ ID NO: 23075 - protein, 9 aa, synthetic construct
  source 1..9: note = Seed: LVVVGARGV (KRAS G12R)
IVVVGSRGT

SEQ ID NO: 23076 - protein, 9 aa, synthetic construct
  source 1..9: note = Seed: LVVVGARGV (KRAS G12R)
IVVVGSRGV

SEQ ID NO: 23077 - protein, 9 aa, synthetic construct
  source 1..9: note = Seed: LVVVGARGV (KRAS G12R)
IVVVGSRGY

SEQ ID NO: 23078 - protein, 9 aa, synthetic construct
  source 1..9: note = Seed: LVVVGARGV (KRAS G12R)
IVVVGTRGA

SEQ ID NO: 23079 - protein, 9 aa, synthetic construct
  source 1..9: note = Seed: LVVVGARGV (KRAS G12R)
IVVVGTRGF

SEQ ID NO: 23080 - protein, 9 aa, synthetic construct
  source 1..9: note = Seed: LVVVGARGV (KRAS G12R)
IVVVGTRGH

SEQ ID NO: 23081 - protein, 9 aa, synthetic construct
  source 1..9: note = Seed: LVVVGARGV (KRAS G12R)
IVVVGTRGI

SEQ ID NO: 23082 - protein, 9 aa, synthetic construct
  source 1..9: note = Seed: LVVVGARGV (KRAS G12R)
IVVVGTRGK

SEQ ID NO: 23083 - protein, 9 aa, synthetic construct
  source 1..9: note = Seed: LVVVGARGV (KRAS G12R)
IVVVGTRGL

SEQ ID NO: 23084 - protein, 9 aa, synthetic construct
  source 1..9: note = Seed: LVVVGARGV (KRAS G12R)
IVVVGTRGM

SEQ ID NO: 23085 - protein, 9 aa, synthetic construct
  source 1..9: note = Seed: LVVVGARGV (KRAS G12R)
IVVVGTRGQ

SEQ ID NO: 23086 - protein, 9 aa, synthetic construct
  source 1..9: note = Seed: LVVVGARGV (KRAS G12R)
IVVVGTRGR

SEQ ID NO: 23087 - protein, 9 aa, synthetic construct
  source 1..9: note = Seed: LVVVGARGV (KRAS G12R)
IVVVGTRGS

SEQ ID NO: 23088 - protein, 9 aa, synthetic construct
  source 1..9: note = Seed: LVVVGARGV (KRAS G12R)
IVVVGTRGT

SEQ ID NO: 23089 - protein, 9 aa, synthetic construct
  source 1..9: note = Seed: LVVVGARGV (KRAS G12R)
IVVVGTRGV

SEQ ID NO: 23090 - protein, 9 aa, synthetic construct
  source 1..9: note = Seed: LVVVGARGV (KRAS G12R)
IVVVGTRGY

SEQ ID NO: 23091 - protein, 9 aa, synthetic construct
  source 1..9: note = Seed: LVVVGARGV (KRAS G12R)
IVVVGVRGA

SEQ ID NO: 23092 - protein, 9 aa, synthetic construct
  source 1..9: note = Seed: LVVVGARGV (KRAS G12R)
IVVVGVRGF

SEQ ID NO: 23093 - protein, 9 aa, synthetic construct
  source 1..9: note = Seed: LVVVGARGV (KRAS G12R)
IVVVGVRGH

SEQ ID NO: 23094 - protein, 9 aa, synthetic construct
  source 1..9: note = Seed: LVVVGARGV (KRAS G12R)
IVVVGVRGI

SEQ ID NO: 23095 - protein, 9 aa, synthetic construct
  source 1..9: note = Seed: LVVVGARGV (KRAS G12R)
IVVVGVRGK

SEQ ID NO: 23096 - protein, 9 aa, synthetic construct
  source 1..9: note = Seed: LVVVGARGV (KRAS G12R)
IVVVGVRGL

SEQ ID NO: 23097 - protein, 9 aa, synthetic construct
  source 1..9: note = Seed: LVVVGARGV (KRAS G12R)
IVVVGVRGM

SEQ ID NO: 23098 - protein, 9 aa, synthetic construct
  source 1..9: note = Seed: LVVVGARGV (KRAS G12R)
IVVVGVRGQ

SEQ ID NO: 23099 - protein, 9 aa, synthetic construct
  source 1..9: note = Seed: LVVVGARGV (KRAS G12R)
IVVVGVRGR

SEQ ID NO: 23100 - protein, 9 aa, synthetic construct
  source 1..9: note = Seed: LVVVGARGV (KRAS G12R)
IVVVGVRGS

SEQ ID NO: 23101 - protein, 9 aa, synthetic construct
  source 1..9: note = Seed: LVVVGARGV (KRAS G12R)
IVVVGVRGT

SEQ ID NO: 23102 - protein, 9 aa, synthetic construct
  source 1..9: note = Seed: LVVVGARGV (KRAS G12R)
IVVVGVRGV

SEQ ID NO: 23103 - protein, 9 aa, synthetic construct
  source 1..9: note = Seed: LVVVGARGV (KRAS G12R)
IVVVGVRGY

SEQ ID NO: 23104 - protein, 9 aa, synthetic construct
  source 1..9: note = Seed: LVVVGARGV (KRAS G12R)
IVVVGWRGM

SEQ ID NO: 23105 - protein, 9 aa, synthetic construct
  source 1..9: note = Seed: LVVVGARGV (KRAS G12R)
IVVVGWRGR

SEQ ID NO: 23106 - protein, 9 aa, synthetic construct
  source 1..9: note = Seed: LVVVGARGV (KRAS G12R)
IVVVGWRGY

SEQ ID NO: 23107 - protein, 9 aa, synthetic construct
  source 1..9: note = Seed: LVVVGARGV (KRAS G12R)
IVVVGYRGA

SEQ ID NO: 23108 - protein, 9 aa, synthetic construct
  source 1..9: note = Seed: LVVVGARGV (KRAS G12R)
IVVVGYRGF

SEQ ID NO: 23109 - protein, 9 aa, synthetic construct
  source 1..9: note = Seed: LVVVGARGV (KRAS G12R)
IVVVGYRGK

SEQ ID NO: 23110 - protein, 9 aa, synthetic construct
  source 1..9: note = Seed: LVVVGARGV (KRAS G12R)
IVVVGYRGR

SEQ ID NO: 23111 - protein, 9 aa, synthetic construct
  source 1..9: note = Seed: LVVVGARGV (KRAS G12R)
IVVVGYRGY

SEQ ID NO: 23112 - protein, 9 aa, synthetic construct
  source 1..9: note = Seed: LVVVGARGV (KRAS G12R)
IVVWGARGA

SEQ ID NO: 23113 - protein, 9 aa, synthetic construct
  source 1..9: note = Seed: LVVVGARGV (KRAS G12R)
IVVWGARGF

SEQ ID NO: 23114 - protein, 9 aa, synthetic construct
  source 1..9: note = Seed: LVVVGARGV (KRAS G12R)
IVVWGARGH

SEQ ID NO: 23115 - protein, 9 aa, synthetic construct
  source 1..9: note = Seed: LVVVGARGV (KRAS G12R)
IVVWGARGI

SEQ ID NO: 23116 - protein, 9 aa, synthetic construct
  source 1..9: note = Seed: LVVVGARGV (KRAS G12R)
IVVWGARGK

SEQ ID NO: 23117 - protein, 9 aa, synthetic construct
  source 1..9: note = Seed: LVVVGARGV (KRAS G12R)
IVVWGARGL

SEQ ID NO: 23118 - protein, 9 aa, synthetic construct
  source 1..9: note = Seed: LVVVGARGV (KRAS G12R)
IVVWGARGM

SEQ ID NO: 23119 - protein, 9 aa, synthetic construct
  source 1..9: note = Seed: LVVVGARGV (KRAS G12R)
IVVWGARGR

SEQ ID NO: 23120 - protein, 9 aa, synthetic construct
  source 1..9: note = Seed: LVVVGARGV (KRAS G12R)
IVVWGARGS

SEQ ID NO: 23121 - protein, 9 aa, synthetic construct
  source 1..9: note = Seed: LVVVGARGV (KRAS G12R)
IVVWGARGT

SEQ ID NO: 23122 - protein, 9 aa, synthetic construct
  source 1..9: note = Seed: LVVVGARGV (KRAS G12R)
IVVWGARGV

SEQ ID NO: 23123 - protein, 9 aa, synthetic construct
  source 1..9: note = Seed: LVVVGARGV (KRAS G12R)
IVVWGARGY

SEQ ID NO: 23124 - protein, 9 aa, synthetic construct
  source 1..9: note = Seed: LVVVGARGV (KRAS G12R)
IVVWGCRGR

SEQ ID NO: 23125 - protein, 9 aa, synthetic construct
  source 1..9: note = Seed: LVVVGARGV (KRAS G12R)
IVVWGDRGI

SEQ ID NO: 23126 - protein, 9 aa, synthetic construct
  source 1..9: note = Seed: LVVVGARGV (KRAS G12R)
IVVWGDRGL

SEQ ID NO: 23127 - protein, 9 aa, synthetic construct
  source 1..9: note = Seed: LVVVGARGV (KRAS G12R)
IVVWGDRGV

SEQ ID NO: 23128 - protein, 9 aa, synthetic construct
  source 1..9: note = Seed: LVVVGARGV (KRAS G12R)
IVVWGFRGK

SEQ ID NO: 23129 - protein, 9 aa, synthetic construct
  source 1..9: note = Seed: LVVVGARGV (KRAS G12R)
IVVWGFRGM

SEQ ID NO: 23130 - protein, 9 aa, synthetic construct
  source 1..9: note = Seed: LVVVGARGV (KRAS G12R)
IVVWGFRGR

SEQ ID NO: 23131 - protein, 9 aa, synthetic construct
  source 1..9: note = Seed: LVVVGARGV (KRAS G12R)
IVVWGGRGA

SEQ ID NO: 23132 - protein, 9 aa, synthetic construct
  source 1..9: note = Seed: LVVVGARGV (KRAS G12R)
IVVWGGRGF

SEQ ID NO: 23133 - protein, 9 aa, synthetic construct
  source 1..9: note = Seed: LVVVGARGV (KRAS G12R)
IVVWGGRGI

SEQ ID NO: 23134 - protein, 9 aa, synthetic construct
  source 1..9: note = Seed: LVVVGARGV (KRAS G12R)
IVVWGGRGK

SEQ ID NO: 23135 - protein, 9 aa, synthetic construct
  source 1..9: note = Seed: LVVVGARGV (KRAS G12R)
IVVWGGRGL

SEQ ID NO: 23136 - protein, 9 aa, synthetic construct
  source 1..9: note = Seed: LVVVGARGV (KRAS G12R)
IVVWGGRGM

SEQ ID NO: 23137 - protein, 9 aa, synthetic construct
  source 1..9: note = Seed: LVVVGARGV (KRAS G12R)
IVVWGGRGR

SEQ ID NO: 23138 - protein, 9 aa, synthetic construct
  source 1..9: note = Seed: LVVVGARGV (KRAS G12R)
IVVWGGRGV

SEQ ID NO: 23139 - protein, 9 aa, synthetic construct
  source 1..9: note = Seed: LVVVGARGV (KRAS G12R)
IVVWGHRGA

SEQ ID NO: 23140 - protein, 9 aa, synthetic construct
  source 1..9: note = Seed: LVVVGARGV (KRAS G12R)
IVVWGHRGF

SEQ ID NO: 23141 - protein, 9 aa, synthetic construct
  source 1..9: note = Seed: LVVVGARGV (KRAS G12R)
IVVWGHRGH

SEQ ID NO: 23142 - protein, 9 aa, synthetic construct
  source 1..9: note = Seed: LVVVGARGV (KRAS G12R)
IVVWGHRGI

SEQ ID NO: 23143 - protein, 9 aa, synthetic construct
  source 1..9: note = Seed: LVVVGARGV (KRAS G12R)
IVVWGHRGK

SEQ ID NO: 23144 - protein, 9 aa, synthetic construct
  source 1..9: note = Seed: LVVVGARGV (KRAS G12R)
IVVWGHRGL

SEQ ID NO: 23145 - protein, 9 aa, synthetic construct
  source 1..9: note = Seed: LVVVGARGV (KRAS G12R)
IVVWGHRGM

SEQ ID NO: 23146 - protein, 9 aa, synthetic construct
  source 1..9: note = Seed: LVVVGARGV (KRAS G12R)
IVVWGHRGQ

SEQ ID NO: 23147 - protein, 9 aa, synthetic construct
  source 1..9: note = Seed: LVVVGARGV (KRAS G12R)
IVVWGHRGR

SEQ ID NO: 23148 - protein, 9 aa, synthetic construct
  source 1..9: note = Seed: LVVVGARGV (KRAS G12R)
IVVWGHRGS

SEQ ID NO: 23149 - protein, 9 aa, synthetic construct
  source 1..9: note = Seed: LVVVGARGV (KRAS G12R)
IVVWGHRGT

SEQ ID NO: 23150 - protein, 9 aa, synthetic construct
  source 1..9: note = Seed: LVVVGARGV (KRAS G12R)
IVVWGHRGV

SEQ ID NO: 23151 - protein, 9 aa, synthetic construct
  source 1..9: note = Seed: LVVVGARGV (KRAS G12R)
IVVWGHRGY

SEQ ID NO: 23152 - protein, 9 aa, synthetic construct
  source 1..9: note = Seed: LVVVGARGV (KRAS G12R)
IVVWGIRGA

SEQ ID NO: 23153 - protein, 9 aa, synthetic construct
  source 1..9: note = Seed: LVVVGARGV (KRAS G12R)
IVVWGIRGF

SEQ ID NO: 23154 - protein, 9 aa, synthetic construct
  source 1..9: note = Seed: LVVVGARGV (KRAS G12R)
IVVWGIRGH

SEQ ID NO: 23155 - protein, 9 aa, synthetic construct
  source 1..9: note = Seed: LVVVGARGV (KRAS G12R)
IVVWGIRGI

SEQ ID NO: 23156 - protein, 9 aa, synthetic construct
  source 1..9: note = Seed: LVVVGARGV (KRAS G12R)
IVVWGIRGK

SEQ ID NO: 23157 - protein, 9 aa, synthetic construct
  source 1..9: note = Seed: LVVVGARGV (KRAS G12R)
IVVWGIRGL

SEQ ID NO: 23158 - protein, 9 aa, synthetic construct
  source 1..9: note = Seed: LVVVGARGV (KRAS G12R)
IVVWGIRGM

SEQ ID NO: 23159 - protein, 9 aa, synthetic construct
  source 1..9: note = Seed: LVVVGARGV (KRAS G12R)
IVVWGIRGQ

SEQ ID NO: 23160 - protein, 9 aa, synthetic construct
  source 1..9: note = Seed: LVVVGARGV (KRAS G12R)
IVVWGIRGR

SEQ ID NO: 23161 - protein, 9 aa, synthetic construct
  source 1..9: note = Seed: LVVVGARGV (KRAS G12R)
IVVWGIRGS

SEQ ID NO: 23162 - protein, 9 aa, synthetic construct
  source 1..9: note = Seed: LVVVGARGV (KRAS G12R)
IVVWGIRGT

SEQ ID NO: 23163 - protein, 9 aa, synthetic construct
  source 1..9: note = Seed: LVVVGARGV (KRAS G12R)
IVVWGIRGV

SEQ ID NO: 23164 - protein, 9 aa, synthetic construct
  source 1..9: note = Seed: LVVVGARGV (KRAS G12R)
IVVWGIRGY

SEQ ID NO: 23165 - protein, 9 aa, synthetic construct
  source 1..9: note = Seed: LVVVGARGV (KRAS G12R)
IVVWGKRGA

SEQ ID NO: 23166 - protein, 9 aa, synthetic construct
  source 1..9: note = Seed: LVVVGARGV (KRAS G12R)
IVVWGKRGC

SEQ ID NO: 23167 - protein, 9 aa, synthetic construct
  source 1..9: note = Seed: LVVVGARGV (KRAS G12R)
IVVWGKRGF

SEQ ID NO: 23168 - protein, 9 aa, synthetic construct
  source 1..9: note = Seed: LVVVGARGV (KRAS G12R)
IVVWGKRGG

SEQ ID NO: 23169 - protein, 9 aa, synthetic construct
  source 1..9: note = Seed: LVVVGARGV (KRAS G12R)
IVVWGKRGH

SEQ ID NO: 23170 - protein, 9 aa, synthetic construct
  source 1..9: note = Seed: LVVVGARGV (KRAS G12R)
IVVWGKRGI

SEQ ID NO: 23171 - protein, 9 aa, synthetic construct
  source 1..9: note = Seed: LVVVGARGV (KRAS G12R)
IVVWGKRGK

SEQ ID NO: 23172 - protein, 9 aa, synthetic construct
  source 1..9: note = Seed: LVVVGARGV (KRAS G12R)
IVVWGKRGL

SEQ ID NO: 23173 - protein, 9 aa, synthetic construct
  source 1..9: note = Seed: LVVVGARGV (KRAS G12R)
IVVWGKRGM

SEQ ID NO: 23174 - protein, 9 aa, synthetic construct
  source 1..9: note = Seed: LVVVGARGV (KRAS G12R)
IVVWGKRGN

SEQ ID NO: 23175 - protein, 9 aa, synthetic construct
  source 1..9: note = Seed: LVVVGARGV (KRAS G12R)
IVVWGKRGP

SEQ ID NO: 23176 - protein, 9 aa, synthetic construct
  source 1..9: note = Seed: LVVVGARGV (KRAS G12R)
IVVWGKRGQ

SEQ ID NO: 23177 - protein, 9 aa, synthetic construct
  source 1..9: note = Seed: LVVVGARGV (KRAS G12R)
IVVWGKRGR

SEQ ID NO: 23178 - protein, 9 aa, synthetic construct
  source 1..9: note = Seed: LVVVGARGV (KRAS G12R)
IVVWGKRGS

SEQ ID NO: 23179 - protein, 9 aa, synthetic construct
  source 1..9: note = Seed: LVVVGARGV (KRAS G12R)
IVVWGKRGT

SEQ ID NO: 23180 - protein, 9 aa, synthetic construct
  source 1..9: note = Seed: LVVVGARGV (KRAS G12R)
IVVWGKRGV

SEQ ID NO: 23181 - protein, 9 aa, synthetic construct
  source 1..9: note = Seed: LVVVGARGV (KRAS G12R)
IVVWGKRGW

SEQ ID NO: 23182 - protein, 9 aa, synthetic construct
  source 1..9: note = Seed: LVVVGARGV (KRAS G12R)
IVVWGKRGY

SEQ ID NO: 23183 - protein, 9 aa, synthetic construct
  source 1..9: note = Seed: LVVVGARGV (KRAS G12R)
IVVWGLRGA

SEQ ID NO: 23184 - protein, 9 aa, synthetic construct
  source 1..9: note = Seed: LVVVGARGV (KRAS G12R)
IVVWGLRGH

SEQ ID NO: 23185 - protein, 9 aa, synthetic construct
  source 1..9: note = Seed: LVVVGARGV (KRAS G12R)
IVVWGLRGI

SEQ ID NO: 23186 - protein, 9 aa, synthetic construct
  source 1..9: note = Seed: LVVVGARGV (KRAS G12R)
IVVWGLRGK

SEQ ID NO: 23187 - protein, 9 aa, synthetic construct
  source 1..9: note = Seed: LVVVGARGV (KRAS G12R)
IVVWGLRGL

SEQ ID NO: 23188 - protein, 9 aa, synthetic construct
  source 1..9: note = Seed: LVVVGARGV (KRAS G12R)
IVVWGLRGM

SEQ ID NO: 23189 - protein, 9 aa, synthetic construct
  source 1..9: note = Seed: LVVVGARGV (KRAS G12R)
IVVWGLRGQ

SEQ ID NO: 23190 - protein, 9 aa, synthetic construct
  source 1..9: note = Seed: LVVVGARGV (KRAS G12R)
IVVWGLRGR

SEQ ID NO: 23191 - protein, 9 aa, synthetic construct
  source 1..9: note = Seed: LVVVGARGV (KRAS G12R)
IVVWGLRGV

SEQ ID NO: 23192 - protein, 9 aa, synthetic construct
  source 1..9: note = Seed: LVVVGARGV (KRAS G12R)
IVVWGLRGY

SEQ ID NO: 23193 - protein, 9 aa, synthetic construct
  source 1..9: note = Seed: LVVVGARGV (KRAS G12R)
IVVWGMRGA

SEQ ID NO: 23194 - protein, 9 aa, synthetic construct
  source 1..9: note = Seed: LVVVGARGV (KRAS G12R)
IVVWGMRGF

SEQ ID NO: 23195 - protein, 9 aa, synthetic construct
  source 1..9: note = Seed: LVVVGARGV (KRAS G12R)
IVVWGMRGH

SEQ ID NO: 23196 - protein, 9 aa, synthetic construct
  source 1..9: note = Seed: LVVVGARGV (KRAS G12R)
IVVWGMRGI

SEQ ID NO: 23197 - protein, 9 aa, synthetic construct
  source 1..9: note = Seed: LVVVGARGV (KRAS G12R)
IVVWGMRGK

SEQ ID NO: 23198 - protein, 9 aa, synthetic construct
  source 1..9: note = Seed: LVVVGARGV (KRAS G12R)
IVVWGMRGL

SEQ ID NO: 23199 - protein, 9 aa, synthetic construct
  source 1..9: note = Seed: LVVVGARGV (KRAS G12R)
IVVWGMRGM

SEQ ID NO: 23200 - protein, 9 aa, synthetic construct
  source 1..9: note = Seed: LVVVGARGV (KRAS G12R)
IVVWGMRGQ

SEQ ID NO: 23201 - protein, 9 aa, synthetic construct
  source 1..9: note = Seed: LVVVGARGV (KRAS G12R)
IVVWGMRGR

SEQ ID NO: 23202 - protein, 9 aa, synthetic construct
  source 1..9: note = Seed: LVVVGARGV (KRAS G12R)
IVVWGMRGV

SEQ ID NO: 23203 - protein, 9 aa, synthetic construct
  source 1..9: note = Seed: LVVVGARGV (KRAS G12R)
IVVWGMRGY

SEQ ID NO: 23204 - protein, 9 aa, synthetic construct
  source 1..9: note = Seed: LVVVGARGV (KRAS G12R)
IVVWGNRGA

SEQ ID NO: 23205 - protein, 9 aa, synthetic construct
  source 1..9: note = Seed: LVVVGARGV (KRAS G12R)
IVVWGNRGF

SEQ ID NO: 23206 - protein, 9 aa, synthetic construct
  source 1..9: note = Seed: LVVVGARGV (KRAS G12R)
IVVWGNRGH

SEQ ID NO: 23207 - protein, 9 aa, synthetic construct
  source 1..9: note = Seed: LVVVGARGV (KRAS G12R)
IVVWGNRGI

SEQ ID NO: 23208 - protein, 9 aa, synthetic construct
  source 1..9: note = Seed: LVVVGARGV (KRAS G12R)
IVVWGNRGK

SEQ ID NO: 23209 - protein, 9 aa, synthetic construct
  source 1..9: note = Seed: LVVVGARGV (KRAS G12R)
IVVWGNRGL

SEQ ID NO: 23210 - protein, 9 aa, synthetic construct
  source 1..9: note = Seed: LVVVGARGV (KRAS G12R)
IVVWGNRGM

SEQ ID NO: 23211 - protein, 9 aa, synthetic construct
  source 1..9: note = Seed: LVVVGARGV (KRAS G12R)
IVVWGNRGR

SEQ ID NO: 23212 - protein, 9 aa, synthetic construct
  source 1..9: note = Seed: LVVVGARGV (KRAS G12R)
IVVWGNRGS

SEQ ID NO: 23213 - protein, 9 aa, synthetic construct
  source 1..9: note = Seed: LVVVGARGV (KRAS G12R)
IVVWGNRGT

SEQ ID NO: 23214 - protein, 9 aa, synthetic construct
  source 1..9: note = Seed: LVVVGARGV (KRAS G12R)
IVVWGNRGV

SEQ ID NO: 23215 - protein, 9 aa, synthetic construct
  source 1..9: note = Seed: LVVVGARGV (KRAS G12R)
IVVWGNRGW

SEQ ID NO: 23216 - protein, 9 aa, synthetic construct
  source 1..9: note = Seed: LVVVGARGV (KRAS G12R)
IVVWGNRGY

SEQ ID NO: 23217 - protein, 9 aa, synthetic construct
  source 1..9: note = Seed: LVVVGARGV (KRAS G12R)
IVVWGPRGA

SEQ ID NO: 23218 - protein, 9 aa, synthetic construct
  source 1..9: note = Seed: LVVVGARGV (KRAS G12R)
IVVWGPRGF

SEQ ID NO: 23219 - protein, 9 aa, synthetic construct
  source 1..9: note = Seed: LVVVGARGV (KRAS G12R)
IVVWGPRGH

SEQ ID NO: 23220 - protein, 9 aa, synthetic construct
  source 1..9: note = Seed: LVVVGARGV (KRAS G12R)
IVVWGPRGI

SEQ ID NO: 23221 - protein, 9 aa, synthetic construct
  source 1..9: note = Seed: LVVVGARGV (KRAS G12R)
IVVWGPRGK

SEQ ID NO: 23222 - protein, 9 aa, synthetic construct
  source 1..9: note = Seed: LVVVGARGV (KRAS G12R)
IVVWGPRGL

SEQ ID NO: 23223 - protein, 9 aa, synthetic construct
  source 1..9: note = Seed: LVVVGARGV (KRAS G12R)
IVVWGPRGM

SEQ ID NO: 23224 - protein, 9 aa, synthetic construct
  source 1..9: note = Seed: LVVVGARGV (KRAS G12R)
IVVWGPRGR

SEQ ID NO: 23225 - protein, 9 aa, synthetic construct
  source 1..9: note = Seed: LVVVGARGV (KRAS G12R)
IVVWGPRGV

SEQ ID NO: 23226 - protein, 9 aa, synthetic construct
  source 1..9: note = Seed: LVVVGARGV (KRAS G12R)
IVVWGPRGY

SEQ ID NO: 23227 - protein, 9 aa, synthetic construct
  source 1..9: note = Seed: LVVVGARGV (KRAS G12R)
IVVWGQRGF

SEQ ID NO: 23228 - protein, 9 aa, synthetic construct
  source 1..9: note = Seed: LVVVGARGV (KRAS G12R)
IVVWGQRGH

SEQ ID NO: 23229 - protein, 9 aa, synthetic construct
  source 1..9: note = Seed: LVVVGARGV (KRAS G12R)
IVVWGQRGI

SEQ ID NO: 23230 - protein, 9 aa, synthetic construct
  source 1..9: note = Seed: LVVVGARGV (KRAS G12R)
IVVWGQRGK

SEQ ID NO: 23231 - protein, 9 aa, synthetic construct
  source 1..9: note = Seed: LVVVGARGV (KRAS G12R)
IVVWGQRGL

SEQ ID NO: 23232 - protein, 9 aa, synthetic construct
  source 1..9: note = Seed: LVVVGARGV (KRAS G12R)
IVVWGQRGM

SEQ ID NO: 23233 - protein, 9 aa, synthetic construct
  source 1..9: note = Seed: LVVVGARGV (KRAS G12R)
IVVWGQRGR

SEQ ID NO: 23234 - protein, 9 aa, synthetic construct
  source 1..9: note = Seed: LVVVGARGV (KRAS G12R)
IVVWGQRGV

SEQ ID NO: 23235 - protein, 9 aa, synthetic construct
  source 1..9: note = Seed: LVVVGARGV (KRAS G12R)
IVVWGRRGA

SEQ ID NO: 23236 - protein, 9 aa, synthetic construct
  source 1..9: note = Seed: LVVVGARGV (KRAS G12R)
IVVWGRRGC

SEQ ID NO: 23237 - protein, 9 aa, synthetic construct
  source 1..9: note = Seed: LVVVGARGV (KRAS G12R)
IVVWGRRGE

SEQ ID NO: 23238 - protein, 9 aa, synthetic construct
  source 1..9: note = Seed: LVVVGARGV (KRAS G12R)
IVVWGRRGF

SEQ ID NO: 23239 - protein, 9 aa, synthetic construct
  source 1..9: note = Seed: LVVVGARGV (KRAS G12R)
IVVWGRRGG

SEQ ID NO: 23240 - protein, 9 aa, synthetic construct
  source 1..9: note = Seed: LVVVGARGV (KRAS G12R)
IVVWGRRGH

SEQ ID NO: 23241 - protein, 9 aa, synthetic construct
  source 1..9: note = Seed: LVVVGARGV (KRAS G12R)
IVVWGRRGI

SEQ ID NO: 23242 - protein, 9 aa, synthetic construct
  source 1..9: note = Seed: LVVVGARGV (KRAS G12R)
IVVWGRRGK

SEQ ID NO: 23243 - protein, 9 aa, synthetic construct
  source 1..9: note = Seed: LVVVGARGV (KRAS G12R)
IVVWGRRGL

SEQ ID NO: 23244 - protein, 9 aa, synthetic construct
  source 1..9: note = Seed: LVVVGARGV (KRAS G12R)
IVVWGRRGM

SEQ ID NO: 23245 - protein, 9 aa, synthetic construct
  source 1..9: note = Seed: LVVVGARGV (KRAS G12R)
IVVWGRRGN

SEQ ID NO: 23246 - protein, 9 aa, synthetic construct
  source 1..9: note = Seed: LVVVGARGV (KRAS G12R)
IVVWGRRGP

SEQ ID NO: 23247 - protein, 9 aa, synthetic construct
  source 1..9: note = Seed: LVVVGARGV (KRAS G12R)
IVVWGRRGQ

SEQ ID NO: 23248 - protein, 9 aa, synthetic construct
  source 1..9: note = Seed: LVVVGARGV (KRAS G12R)
IVVWGRRGR

SEQ ID NO: 23249 - protein, 9 aa, synthetic construct
  source 1..9: note = Seed: LVVVGARGV (KRAS G12R)
IVVWGRRGS

SEQ ID NO: 23250 - protein, 9 aa, synthetic construct
  source 1..9: note = Seed: LVVVGARGV (KRAS G12R)
IVVWGRRGT

SEQ ID NO: 23251 - protein, 9 aa, synthetic construct
  source 1..9: note = Seed: LVVVGARGV (KRAS G12R)
IVVWGRRGV

SEQ ID NO: 23252 - protein, 9 aa, synthetic construct
  source 1..9: note = Seed: LVVVGARGV (KRAS G12R)
IVVWGRRGW

SEQ ID NO: 23253 - protein, 9 aa, synthetic construct
  source 1..9: note = Seed: LVVVGARGV (KRAS G12R)
IVVWGRRGY

SEQ ID NO: 23254 - protein, 9 aa, synthetic construct
  source 1..9: note = Seed: LVVVGARGV (KRAS G12R)
IVVWGSRGA

SEQ ID NO: 23255 - protein, 9 aa, synthetic construct
  source 1..9: note = Seed: LVVVGARGV (KRAS G12R)
IVVWGSRGF

SEQ ID NO: 23256 - protein, 9 aa, synthetic construct
  source 1..9: note = Seed: LVVVGARGV (KRAS G12R)
IVVWGSRGH

SEQ ID NO: 23257 - protein, 9 aa, synthetic construct
  source 1..9: note = Seed: LVVVGARGV (KRAS G12R)
IVVWGSRGI

SEQ ID NO: 23258 - protein, 9 aa, synthetic construct
  source 1..9: note = Seed: LVVVGARGV (KRAS G12R)
IVVWGSRGK

SEQ ID NO: 23259 - protein, 9 aa, synthetic construct
  source 1..9: note = Seed: LVVVGARGV (KRAS G12R)
IVVWGSRGL

SEQ ID NO: 23260 - protein, 9 aa, synthetic construct
  source 1..9: note = Seed: LVVVGARGV (KRAS G12R)
IVVWGSRGM

SEQ ID NO: 23261 - protein, 9 aa, synthetic construct
  source 1..9: note = Seed: LVVVGARGV (KRAS G12R)
IVVWGSRGR

SEQ ID NO: 23262 - protein, 9 aa, synthetic construct
  source 1..9: note = Seed: LVVVGARGV (KRAS G12R)
IVVWGSRGS

SEQ ID NO: 23263 - protein, 9 aa, synthetic construct
  source 1..9: note = Seed: LVVVGARGV (KRAS G12R)
IVVWGSRGT

SEQ ID NO: 23264 - protein, 9 aa, synthetic construct
  source 1..9: note = Seed: LVVVGARGV (KRAS G12R)
IVVWGSRGV

SEQ ID NO: 23265 - protein, 9 aa, synthetic construct
  source 1..9: note = Seed: LVVVGARGV (KRAS G12R)
IVVWGSRGW

SEQ ID NO: 23266 - protein, 9 aa, synthetic construct
  source 1..9: note = Seed: LVVVGARGV (KRAS G12R)
IVVWGSRGY

SEQ ID NO: 23267 - protein, 9 aa, synthetic construct
  source 1..9: note = Seed: LVVVGARGV (KRAS G12R)
IVVWGTRGA

SEQ ID NO: 23268 - protein, 9 aa, synthetic construct
  source 1..9: note = Seed: LVVVGARGV (KRAS G12R)
IVVWGTRGF

SEQ ID NO: 23269 - protein, 9 aa, synthetic construct
  source 1..9: note = Seed: LVVVGARGV (KRAS G12R)
IVVWGTRGH

SEQ ID NO: 23270 - protein, 9 aa, synthetic construct
  source 1..9: note = Seed: LVVVGARGV (KRAS G12R)
IVVWGTRGI

SEQ ID NO: 23271 - protein, 9 aa, synthetic construct
  source 1..9: note = Seed: LVVVGARGV (KRAS G12R)
IVVWGTRGK

SEQ ID NO: 23272 - protein, 9 aa, synthetic construct
  source 1..9: note = Seed: LVVVGARGV (KRAS G12R)
IVVWGTRGL

SEQ ID NO: 23273 - protein, 9 aa, synthetic construct
  source 1..9: note = Seed: LVVVGARGV (KRAS G12R)
IVVWGTRGM

SEQ ID NO: 23274 - protein, 9 aa, synthetic construct
  source 1..9: note = Seed: LVVVGARGV (KRAS G12R)
IVVWGTRGR

SEQ ID NO: 23275 - protein, 9 aa, synthetic construct
  source 1..9: note = Seed: LVVVGARGV (KRAS G12R)
IVVWGTRGS

SEQ ID NO: 23276 - protein, 9 aa, synthetic construct
  source 1..9: note = Seed: LVVVGARGV (KRAS G12R)
IVVWGTRGT

SEQ ID NO: 23277 - protein, 9 aa, synthetic construct
  source 1..9: note = Seed: LVVVGARGV (KRAS G12R)
IVVWGTRGV

SEQ ID NO: 23278 - protein, 9 aa, synthetic construct
  source 1..9: note = Seed: LVVVGARGV (KRAS G12R)
IVVWGTRGY

SEQ ID NO: 23279 - protein, 9 aa, synthetic construct
  source 1..9: note = Seed: LVVVGARGV (KRAS G12R)
IVVWGVRGA

SEQ ID NO: 23280 - protein, 9 aa, synthetic construct
  source 1..9: note = Seed: LVVVGARGV (KRAS G12R)
IVVWGVRGF

SEQ ID NO: 23281 - protein, 9 aa, synthetic construct
  source 1..9: note = Seed: LVVVGARGV (KRAS G12R)
IVVWGVRGH

SEQ ID NO: 23282 - protein, 9 aa, synthetic construct
  source 1..9: note = Seed: LVVVGARGV (KRAS G12R)
IVVWGVRGI

SEQ ID NO: 23283 - protein, 9 aa, synthetic construct
  source 1..9: note = Seed: LVVVGARGV (KRAS G12R)
IVVWGVRGK

SEQ ID NO: 23284 - protein, 9 aa, synthetic construct
  source 1..9: note = Seed: LVVVGARGV (KRAS G12R)
IVVWGVRGL

SEQ ID NO: 23285 - protein, 9 aa, synthetic construct
  source 1..9: note = Seed: LVVVGARGV (KRAS G12R)
IVVWGVRGM

SEQ ID NO: 23286 - protein, 9 aa, synthetic construct
  source 1..9: note = Seed: LVVVGARGV (KRAS G12R)
IVVWGVRGQ

SEQ ID NO: 23287 - protein, 9 aa, synthetic construct
  source 1..9: note = Seed: LVVVGARGV (KRAS G12R)
IVVWGVRGR

SEQ ID NO: 23288 - protein, 9 aa, synthetic construct
  source 1..9: note = Seed: LVVVGARGV (KRAS G12R)
IVVWGVRGS

SEQ ID NO: 23289 - protein, 9 aa, synthetic construct
  source 1..9: note = Seed: LVVVGARGV (KRAS G12R)
IVVWGVRGV

SEQ ID NO: 23290 - protein, 9 aa, synthetic construct
  source 1..9: note = Seed: LVVVGARGV (KRAS G12R)
IVVWGVRGY

SEQ ID NO: 23291 - protein, 9 aa, synthetic construct
  source 1..9: note = Seed: LVVVGARGV (KRAS G12R)
IVVWGWRGR

SEQ ID NO: 23292 - protein, 9 aa, synthetic construct
  source 1..9: note = Seed: LVVVGARGV (KRAS G12R)
IVVWGYRGK

SEQ ID NO: 23293 - protein, 9 aa, synthetic construct
  source 1..9: note = Seed: LVVVGARGV (KRAS G12R)
IVVWGYRGL

SEQ ID NO: 23294 - protein, 9 aa, synthetic construct
  source 1..9: note = Seed: LVVVGARGV (KRAS G12R)
IVVWGYRGR

SEQ ID NO: 23295 - protein, 9 aa, synthetic construct
  source 1..9: note = Seed: LVVVGARGV (KRAS G12R)
IVVYGARGA

SEQ ID NO: 23296 - protein, 9 aa, synthetic construct
  source 1..9: note = Seed: LVVVGARGV (KRAS G12R)
IVVYGARGF

SEQ ID NO: 23297 - protein, 9 aa, synthetic construct
  source 1..9: note = Seed: LVVVGARGV (KRAS G12R)
IVVYGARGG

SEQ ID NO: 23298 - protein, 9 aa, synthetic construct
  source 1..9: note = Seed: LVVVGARGV (KRAS G12R)
IVVYGARGH

SEQ ID NO: 23299 - protein, 9 aa, synthetic construct
  source 1..9: note = Seed: LVVVGARGV (KRAS G12R)
IVVYGARGI

SEQ ID NO: 23300 - protein, 9 aa, synthetic construct
  source 1..9: note = Seed: LVVVGARGV (KRAS G12R)
IVVYGARGK

SEQ ID NO: 23301 - protein, 9 aa, synthetic construct
  source 1..9: note = Seed: LVVVGARGV (KRAS G12R)
IVVYGARGL

SEQ ID NO: 23302 - protein, 9 aa, synthetic construct
  source 1..9: note = Seed: LVVVGARGV (KRAS G12R)
IVVYGARGM

SEQ ID NO: 23303 - protein, 9 aa, synthetic construct
  source 1..9: note = Seed: LVVVGARGV (KRAS G12R)
IVVYGARGN

SEQ ID NO: 23304 - protein, 9 aa, synthetic construct
  source 1..9: note = Seed: LVVVGARGV (KRAS G12R)
IVVYGARGP

SEQ ID NO: 23305 - protein, 9 aa, synthetic construct
  source 1..9: note = Seed: LVVVGARGV (KRAS G12R)
IVVYGARGQ

SEQ ID NO: 23306 - protein, 9 aa, synthetic construct
  source 1..9: note = Seed: LVVVGARGV (KRAS G12R)
IVVYGARGR

SEQ ID NO: 23307 - protein, 9 aa, synthetic construct
  source 1..9: note = Seed: LVVVGARGV (KRAS G12R)
IVVYGARGS

SEQ ID NO: 23308 - protein, 9 aa, synthetic construct
  source 1..9: note = Seed: LVVVGARGV (KRAS G12R)
IVVYGARGT

SEQ ID NO: 23309 - protein, 9 aa, synthetic construct
  source 1..9: note = Seed: LVVVGARGV (KRAS G12R)
IVVYGARGV

SEQ ID NO: 23310 - protein, 9 aa, synthetic construct
  source 1..9: note = Seed: LVVVGARGV (KRAS G12R)
IVVYGARGW

SEQ ID NO: 23311 - protein, 9 aa, synthetic construct
  source 1..9: note = Seed: LVVVGARGV (KRAS G12R)
IVVYGARGY

SEQ ID NO: 23312 - protein, 9 aa, synthetic construct
  source 1..9: note = Seed: LVVVGARGV (KRAS G12R)
IVVYGCRGI

SEQ ID NO: 23313 - protein, 9 aa, synthetic construct
  source 1..9: note = Seed: LVVVGARGV (KRAS G12R)
IVVYGCRGL

SEQ ID NO: 23314 - protein, 9 aa, synthetic construct
  source 1..9: note = Seed: LVVVGARGV (KRAS G12R)
IVVYGCRGR

SEQ ID NO: 23315 - protein, 9 aa, synthetic construct
  source 1..9: note = Seed: LVVVGARGV (KRAS G12R)
IVVYGCRGV

SEQ ID NO: 23316 - protein, 9 aa, synthetic construct
  source 1..9: note = Seed: LVVVGARGV (KRAS G12R)
IVVYGDRGA

SEQ ID NO: 23317 - protein, 9 aa, synthetic construct
  source 1..9: note = Seed: LVVVGARGV (KRAS G12R)
IVVYGDRGF

SEQ ID NO: 23318 - protein, 9 aa, synthetic construct
  source 1..9: note = Seed: LVVVGARGV (KRAS G12R)
IVVYGDRGI

SEQ ID NO: 23319 - protein, 9 aa, synthetic construct
  source 1..9: note = Seed: LVVVGARGV (KRAS G12R)
IVVYGDRGL

SEQ ID NO: 23320 - protein, 9 aa, synthetic construct
  source 1..9: note = Seed: LVVVGARGV (KRAS G12R)
IVVYGDRGM

SEQ ID NO: 23321 - protein, 9 aa, synthetic construct
  source 1..9: note = Seed: LVVVGARGV (KRAS G12R)
IVVYGDRGT

SEQ ID NO: 23322 - protein, 9 aa, synthetic construct
  source 1..9: note = Seed: LVVVGARGV (KRAS G12R)
IVVYGDRGV

SEQ ID NO: 23323 - protein, 9 aa, synthetic construct
  source 1..9: note = Seed: LVVVGARGV (KRAS G12R)
IVVYGERGL

SEQ ID NO: 23324 - protein, 9 aa, synthetic construct
  source 1..9: note = Seed: LVVVGARGV (KRAS G12R)
IVVYGERGV

SEQ ID NO: 23325 - protein, 9 aa, synthetic construct
  source 1..9: note = Seed: LVVVGARGV (KRAS G12R)
IVVYGFRGI

SEQ ID NO: 23326 - protein, 9 aa, synthetic construct
  source 1..9: note = Seed: LVVVGARGV (KRAS G12R)
IVVYGFRGL

SEQ ID NO: 23327 - protein, 9 aa, synthetic construct
  source 1..9: note = Seed: LVVVGARGV (KRAS G12R)
IVVYGFRGR

SEQ ID NO: 23328 - protein, 9 aa, synthetic construct
  source 1..9: note = Seed: LVVVGARGV (KRAS G12R)
IVVYGGRGA

SEQ ID NO: 23329 - protein, 9 aa, synthetic construct
  source 1..9: note = Seed: LVVVGARGV (KRAS G12R)
IVVYGGRGF

SEQ ID NO: 23330 - protein, 9 aa, synthetic construct
  source 1..9: note = Seed: LVVVGARGV (KRAS G12R)
IVVYGGRGG

SEQ ID NO: 23331 - protein, 9 aa, synthetic construct
  source 1..9: note = Seed: LVVVGARGV (KRAS G12R)
IVVYGGRGH

SEQ ID NO: 23332 - protein, 9 aa, synthetic construct
  source 1..9: note = Seed: LVVVGARGV (KRAS G12R)
IVVYGGRGI

SEQ ID NO: 23333 - protein, 9 aa, synthetic construct
  source 1..9: note = Seed: LVVVGARGV (KRAS G12R)
IVVYGGRGK

SEQ ID NO: 23334 - protein, 9 aa, synthetic construct
  source 1..9: note = Seed: LVVVGARGV (KRAS G12R)
IVVYGGRGL

SEQ ID NO: 23335 - protein, 9 aa, synthetic construct
  source 1..9: note = Seed: LVVVGARGV (KRAS G12R)
IVVYGGRGM

SEQ ID NO: 23336 - protein, 9 aa, synthetic construct
  source 1..9: note = Seed: LVVVGARGV (KRAS G12R)
IVVYGGRGN

SEQ ID NO: 23337 - protein, 9 aa, synthetic construct
  source 1..9: note = Seed: LVVVGARGV (KRAS G12R)
IVVYGGRGP

SEQ ID NO: 23338 - protein, 9 aa, synthetic construct
  source 1..9: note = Seed: LVVVGARGV (KRAS G12R)
IVVYGGRGQ

SEQ ID NO: 23339 - protein, 9 aa, synthetic construct
  source 1..9: note = Seed: LVVVGARGV (KRAS G12R)
IVVYGGRGR

SEQ ID NO: 23340 - protein, 9 aa, synthetic construct
  source 1..9: note = Seed: LVVVGARGV (KRAS G12R)
IVVYGGRGS

SEQ ID NO: 23341 - protein, 9 aa, synthetic construct
  source 1..9: note = Seed: LVVVGARGV (KRAS G12R)
IVVYGGRGT

SEQ ID NO: 23342 - protein, 9 aa, synthetic construct
  source 1..9: note = Seed: LVVVGARGV (KRAS G12R)
IVVYGGRGV

SEQ ID NO: 23343 - protein, 9 aa, synthetic construct
  source 1..9: note = Seed: LVVVGARGV (KRAS G12R)
IVVYGGRGY

SEQ ID NO: 23344 - protein, 9 aa, synthetic construct
  source 1..9: note = Seed: LVVVGARGV (KRAS G12R)
IVVYGHRGA

SEQ ID NO: 23345 - protein, 9 aa, synthetic construct
  source 1..9: note = Seed: LVVVGARGV (KRAS G12R)
IVVYGHRGF

SEQ ID NO: 23346 - protein, 9 aa, synthetic construct
  source 1..9: note = Seed: LVVVGARGV (KRAS G12R)
IVVYGHRGH

SEQ ID NO: 23347 - protein, 9 aa, synthetic construct
  source 1..9: note = Seed: LVVVGARGV (KRAS G12R)
IVVYGHRGI

SEQ ID NO: 23348 - protein, 9 aa, synthetic construct
  source 1..9: note = Seed: LVVVGARGV (KRAS G12R)
IVVYGHRGK

SEQ ID NO: 23349 - protein, 9 aa, synthetic construct
  source 1..9: note = Seed: LVVVGARGV (KRAS G12R)
IVVYGHRGL

SEQ ID NO: 23350 - protein, 9 aa, synthetic construct
  source 1..9: note = Seed: LVVVGARGV (KRAS G12R)
IVVYGHRGM

SEQ ID NO: 23351 - protein, 9 aa, synthetic construct
  source 1..9: note = Seed: LVVVGARGV (KRAS G12R)
IVVYGHRGQ

SEQ ID NO: 23352 - protein, 9 aa, synthetic construct
  source 1..9: note = Seed: LVVVGARGV (KRAS G12R)
IVVYGHRGR

SEQ ID NO: 23353 - protein, 9 aa, synthetic construct
  source 1..9: note = Seed: LVVVGARGV (KRAS G12R)
IVVYGHRGS

SEQ ID NO: 23354 - protein, 9 aa, synthetic construct
  source 1..9: note = Seed: LVVVGARGV (KRAS G12R)
IVVYGHRGT

SEQ ID NO: 23355 - protein, 9 aa, synthetic construct
  source 1..9: note = Seed: LVVVGARGV (KRAS G12R)
IVVYGHRGV

SEQ ID NO: 23356 - protein, 9 aa, synthetic construct
  source 1..9: note = Seed: LVVVGARGV (KRAS G12R)
IVVYGHRGY

SEQ ID NO: 23357 - protein, 9 aa, synthetic construct
  source 1..9: note = Seed: LVVVGARGV (KRAS G12R)
IVVYGIRGA

SEQ ID NO: 23358 - protein, 9 aa, synthetic construct
  source 1..9: note = Seed: LVVVGARGV (KRAS G12R)
IVVYGIRGF

SEQ ID NO: 23359 - protein, 9 aa, synthetic construct
  source 1..9: note = Seed: LVVVGARGV (KRAS G12R)
IVVYGIRGH

SEQ ID NO: 23360 - protein, 9 aa, synthetic construct
  source 1..9: note = Seed: LVVVGARGV (KRAS G12R)
IVVYGIRGI

SEQ ID NO: 23361 - protein, 9 aa, synthetic construct
  source 1..9: note = Seed: LVVVGARGV (KRAS G12R)
IVVYGIRGK

SEQ ID NO: 23362 - protein, 9 aa, synthetic construct
  source 1..9: note = Seed: LVVVGARGV (KRAS G12R)
IVVYGIRGL

SEQ ID NO: 23363 - protein, 9 aa, synthetic construct
  source 1..9: note = Seed: LVVVGARGV (KRAS G12R)
IVVYGIRGM

SEQ ID NO: 23364 - protein, 9 aa, synthetic construct
  source 1..9: note = Seed: LVVVGARGV (KRAS G12R)
IVVYGIRGQ

SEQ ID NO: 23365 - protein, 9 aa, synthetic construct
  source 1..9: note = Seed: LVVVGARGV (KRAS G12R)
IVVYGIRGR

SEQ ID NO: 23366 - protein, 9 aa, synthetic construct
  source 1..9: note = Seed: LVVVGARGV (KRAS G12R)
IVVYGIRGS

SEQ ID NO: 23367 - protein, 9 aa, synthetic construct
  source 1..9: note = Seed: LVVVGARGV (KRAS G12R)
IVVYGIRGT

SEQ ID NO: 23368 - protein, 9 aa, synthetic construct
  source 1..9: note = Seed: LVVVGARGV (KRAS G12R)
IVVYGIRGV

SEQ ID NO: 23369 - protein, 9 aa, synthetic construct
  source 1..9: note = Seed: LVVVGARGV (KRAS G12R)
IVVYGIRGY

SEQ ID NO: 23370 - protein, 9 aa, synthetic construct
  source 1..9: note = Seed: LVVVGARGV (KRAS G12R)
IVVYGKRGA

SEQ ID NO: 23371 - protein, 9 aa, synthetic construct
  source 1..9: note = Seed: LVVVGARGV (KRAS G12R)
IVVYGKRGC

SEQ ID NO: 23372 - protein, 9 aa, synthetic construct
  source 1..9: note = Seed: LVVVGARGV (KRAS G12R)
IVVYGKRGF

SEQ ID NO: 23373 - protein, 9 aa, synthetic construct
  source 1..9: note = Seed: LVVVGARGV (KRAS G12R)
IVVYGKRGG

SEQ ID NO: 23374 - protein, 9 aa, synthetic construct
  source 1..9: note = Seed: LVVVGARGV (KRAS G12R)
IVVYGKRGH

SEQ ID NO: 23375 - protein, 9 aa, synthetic construct
  source 1..9: note = Seed: LVVVGARGV (KRAS G12R)
IVVYGKRGI

SEQ ID NO: 23376 - protein, 9 aa, synthetic construct
  source 1..9: note = Seed: LVVVGARGV (KRAS G12R)
IVVYGKRGK

SEQ ID NO: 23377 - protein, 9 aa, synthetic construct
  source 1..9: note = Seed: LVVVGARGV (KRAS G12R)
IVVYGKRGL

SEQ ID NO: 23378 - protein, 9 aa, synthetic construct
  source 1..9: note = Seed: LVVVGARGV (KRAS G12R)
IVVYGKRGM

SEQ ID NO: 23379 - protein, 9 aa, synthetic construct
  source 1..9: note = Seed: LVVVGARGV (KRAS G12R)
IVVYGKRGN

SEQ ID NO: 23380 - protein, 9 aa, synthetic construct
  source 1..9: note = Seed: LVVVGARGV (KRAS G12R)
IVVYGKRGP

SEQ ID NO: 23381 - protein, 9 aa, synthetic construct
  source 1..9: note = Seed: LVVVGARGV (KRAS G12R)
IVVYGKRGQ

SEQ ID NO: 23382 - protein, 9 aa, synthetic construct
  source 1..9: note = Seed: LVVVGARGV (KRAS G12R)
IVVYGKRGR

SEQ ID NO: 23383 - protein, 9 aa, synthetic construct
  source 1..9: note = Seed: LVVVGARGV (KRAS G12R)
IVVYGKRGS

SEQ ID NO: 23384 - protein, 9 aa, synthetic construct
  source 1..9: note = Seed: LVVVGARGV (KRAS G12R)
IVVYGKRGT

SEQ ID NO: 23385 - protein, 9 aa, synthetic construct
  source 1..9: note = Seed: LVVVGARGV (KRAS G12R)
IVVYGKRGV

SEQ ID NO: 23386 - protein, 9 aa, synthetic construct
  source 1..9: note = Seed: LVVVGARGV (KRAS G12R)
IVVYGKRGW

SEQ ID NO: 23387 - protein, 9 aa, synthetic construct
  source 1..9: note = Seed: LVVVGARGV (KRAS G12R)
IVVYGKRGY

SEQ ID NO: 23388 - protein, 9 aa, synthetic construct
  source 1..9: note = Seed: LVVVGARGV (KRAS G12R)
IVVYGLRGA

SEQ ID NO: 23389 - protein, 9 aa, synthetic construct
  source 1..9: note = Seed: LVVVGARGV (KRAS G12R)
IVVYGLRGF

SEQ ID NO: 23390 - protein, 9 aa, synthetic construct
  source 1..9: note = Seed: LVVVGARGV (KRAS G12R)
IVVYGLRGH

SEQ ID NO: 23391 - protein, 9 aa, synthetic construct
  source 1..9: note = Seed: LVVVGARGV (KRAS G12R)
IVVYGLRGI

SEQ ID NO: 23392 - protein, 9 aa, synthetic construct
  source 1..9: note = Seed: LVVVGARGV (KRAS G12R)
IVVYGLRGK

SEQ ID NO: 23393 - protein, 9 aa, synthetic construct
  source 1..9: note = Seed: LVVVGARGV (KRAS G12R)
IVVYGLRGL

SEQ ID NO: 23394 - protein, 9 aa, synthetic construct
  source 1..9: note = Seed: LVVVGARGV (KRAS G12R)
IVVYGLRGM

SEQ ID NO: 23395 - protein, 9 aa, synthetic construct
  source 1..9: note = Seed: LVVVGARGV (KRAS G12R)
IVVYGLRGQ

SEQ ID NO: 23396 - protein, 9 aa, synthetic construct
  source 1..9: note = Seed: LVVVGARGV (KRAS G12R)
IVVYGLRGR

SEQ ID NO: 23397 - protein, 9 aa, synthetic construct
  source 1..9: note = Seed: LVVVGARGV (KRAS G12R)
IVVYGLRGS

SEQ ID NO: 23398 - protein, 9 aa, synthetic construct
  source 1..9: note = Seed: LVVVGARGV (KRAS G12R)
IVVYGLRGV

SEQ ID NO: 23399 - protein, 9 aa, synthetic construct
  source 1..9: note = Seed: LVVVGARGV (KRAS G12R)
IVVYGLRGY

SEQ ID NO: 23400 - protein, 9 aa, synthetic construct
  source 1..9: note = Seed: LVVVGARGV (KRAS G12R)
IVVYGMRGA

SEQ ID NO: 23401 - protein, 9 aa, synthetic construct
  source 1..9: note = Seed: LVVVGARGV (KRAS G12R)
IVVYGMRGF

SEQ ID NO: 23402 - protein, 9 aa, synthetic construct
  source 1..9: note = Seed: LVVVGARGV (KRAS G12R)
IVVYGMRGH

SEQ ID NO: 23403 - protein, 9 aa, synthetic construct
  source 1..9: note = Seed: LVVVGARGV (KRAS G12R)
IVVYGMRGI

SEQ ID NO: 23404 - protein, 9 aa, synthetic construct
  source 1..9: note = Seed: LVVVGARGV (KRAS G12R)
IVVYGMRGK

SEQ ID NO: 23405 - protein, 9 aa, synthetic construct
  source 1..9: note = Seed: LVVVGARGV (KRAS G12R)
IVVYGMRGL

SEQ ID NO: 23406 - protein, 9 aa, synthetic construct
  source 1..9: note = Seed: LVVVGARGV (KRAS G12R)
IVVYGMRGM

SEQ ID NO: 23407 - protein, 9 aa, synthetic construct
  source 1..9: note = Seed: LVVVGARGV (KRAS G12R)
IVVYGMRGQ

SEQ ID NO: 23408 - protein, 9 aa, synthetic construct
  source 1..9: note = Seed: LVVVGARGV (KRAS G12R)
IVVYGMRGR

SEQ ID NO: 23409 - protein, 9 aa, synthetic construct
  source 1..9: note = Seed: LVVVGARGV (KRAS G12R)
IVVYGMRGV

SEQ ID NO: 23410 - protein, 9 aa, synthetic construct
  source 1..9: note = Seed: LVVVGARGV (KRAS G12R)
IVVYGMRGY

SEQ ID NO: 23411 - protein, 9 aa, synthetic construct
  source 1..9: note = Seed: LVVVGARGV (KRAS G12R)
IVVYGNRGA

SEQ ID NO: 23412 - protein, 9 aa, synthetic construct
  source 1..9: note = Seed: LVVVGARGV (KRAS G12R)
IVVYGNRGC

SEQ ID NO: 23413 - protein, 9 aa, synthetic construct
  source 1..9: note = Seed: LVVVGARGV (KRAS G12R)
IVVYGNRGE

SEQ ID NO: 23414 - protein, 9 aa, synthetic construct
  source 1..9: note = Seed: LVVVGARGV (KRAS G12R)
IVVYGNRGF

SEQ ID NO: 23415 - protein, 9 aa, synthetic construct
  source 1..9: note = Seed: LVVVGARGV (KRAS G12R)
IVVYGNRGG

SEQ ID NO: 23416 - protein, 9 aa, synthetic construct
  source 1..9: note = Seed: LVVVGARGV (KRAS G12R)
IVVYGNRGH

SEQ ID NO: 23417 - protein, 9 aa, synthetic construct
  source 1..9: note = Seed: LVVVGARGV (KRAS G12R)
IVVYGNRGI

SEQ ID NO: 23418 - protein, 9 aa, synthetic construct
  source 1..9: note = Seed: LVVVGARGV (KRAS G12R)
IVVYGNRGK

SEQ ID NO: 23419 - protein, 9 aa, synthetic construct
  source 1..9: note = Seed: LVVVGARGV (KRAS G12R)
IVVYGNRGL

SEQ ID NO: 23420 - protein, 9 aa, synthetic construct
  source 1..9: note = Seed: LVVVGARGV (KRAS G12R)
IVVYGNRGM

SEQ ID NO: 23421 - protein, 9 aa, synthetic construct
  source 1..9: note = Seed: LVVVGARGV (KRAS G12R)
IVVYGNRGN

SEQ ID NO: 23422 - protein, 9 aa, synthetic construct
  source 1..9: note = Seed: LVVVGARGV (KRAS G12R)
IVVYGNRGP

SEQ ID NO: 23423 - protein, 9 aa, synthetic construct
  source 1..9: note = Seed: LVVVGARGV (KRAS G12R)
IVVYGNRGQ

SEQ ID NO: 23424 - protein, 9 aa, synthetic construct
  source 1..9: note = Seed: LVVVGARGV (KRAS G12R)
IVVYGNRGR

SEQ ID NO: 23425 - protein, 9 aa, synthetic construct
  source 1..9: note = Seed: LVVVGARGV (KRAS G12R)
IVVYGNRGS

SEQ ID NO: 23426 - protein, 9 aa, synthetic construct
  source 1..9: note = Seed: LVVVGARGV (KRAS G12R)
IVVYGNRGT

SEQ ID NO: 23427 - protein, 9 aa, synthetic construct
  source 1..9: note = Seed: LVVVGARGV (KRAS G12R)
IVVYGNRGV

SEQ ID NO: 23428 - protein, 9 aa, synthetic construct
  source 1..9: note = Seed: LVVVGARGV (KRAS G12R)
IVVYGNRGW

SEQ ID NO: 23429 - protein, 9 aa, synthetic construct
  source 1..9: note = Seed: LVVVGARGV (KRAS G12R)
IVVYGNRGY

SEQ ID NO: 23430 - protein, 9 aa, synthetic construct
  source 1..9: note = Seed: LVVVGARGV (KRAS G12R)
IVVYGPRGA

SEQ ID NO: 23431 - protein, 9 aa, synthetic construct
  source 1..9: note = Seed: LVVVGARGV (KRAS G12R)
IVVYGPRGF

SEQ ID NO: 23432 - protein, 9 aa, synthetic construct
  source 1..9: note = Seed: LVVVGARGV (KRAS G12R)
IVVYGPRGH

SEQ ID NO: 23433 - protein, 9 aa, synthetic construct
  source 1..9: note = Seed: LVVVGARGV (KRAS G12R)
IVVYGPRGI

SEQ ID NO: 23434 - protein, 9 aa, synthetic construct
  source 1..9: note = Seed: LVVVGARGV (KRAS G12R)
IVVYGPRGK

SEQ ID NO: 23435 - protein, 9 aa, synthetic construct
  source 1..9: note = Seed: LVVVGARGV (KRAS G12R)
IVVYGPRGL

SEQ ID NO: 23436 - protein, 9 aa, synthetic construct
  source 1..9: note = Seed: LVVVGARGV (KRAS G12R)
IVVYGPRGM

SEQ ID NO: 23437 - protein, 9 aa, synthetic construct
  source 1..9: note = Seed: LVVVGARGV (KRAS G12R)
IVVYGPRGR

SEQ ID NO: 23438 - protein, 9 aa, synthetic construct
  source 1..9: note = Seed: LVVVGARGV (KRAS G12R)
IVVYGPRGS

SEQ ID NO: 23439 - protein, 9 aa, synthetic construct
  source 1..9: note = Seed: LVVVGARGV (KRAS G12R)
IVVYGPRGT

SEQ ID NO: 23440 - protein, 9 aa, synthetic construct
  source 1..9: note = Seed: LVVVGARGV (KRAS G12R)
IVVYGPRGV

SEQ ID NO: 23441 - protein, 9 aa, synthetic construct
  source 1..9: note = Seed: LVVVGARGV (KRAS G12R)
IVVYGPRGY

SEQ ID NO: 23442 - protein, 9 aa, synthetic construct
  source 1..9: note = Seed: LVVVGARGV (KRAS G12R)
IVVYGQRGA

SEQ ID NO: 23443 - protein, 9 aa, synthetic construct
  source 1..9: note = Seed: LVVVGARGV (KRAS G12R)
IVVYGQRGF

SEQ ID NO: 23444 - protein, 9 aa, synthetic construct
  source 1..9: note = Seed: LVVVGARGV (KRAS G12R)
IVVYGQRGH

SEQ ID NO: 23445 - protein, 9 aa, synthetic construct
  source 1..9: note = Seed: LVVVGARGV (KRAS G12R)
IVVYGQRGI

SEQ ID NO: 23446 - protein, 9 aa, synthetic construct
  source 1..9: note = Seed: LVVVGARGV (KRAS G12R)
IVVYGQRGK

SEQ ID NO: 23447 - protein, 9 aa, synthetic construct
  source 1..9: note = Seed: LVVVGARGV (KRAS G12R)
IVVYGQRGL

SEQ ID NO: 23448 - protein, 9 aa, synthetic construct
  source 1..9: note = Seed: LVVVGARGV (KRAS G12R)
IVVYGQRGM

SEQ ID NO: 23449 - protein, 9 aa, synthetic construct
  source 1..9: note = Seed: LVVVGARGV (KRAS G12R)
IVVYGQRGR

SEQ ID NO: 23450 - protein, 9 aa, synthetic construct
  source 1..9: note = Seed: LVVVGARGV (KRAS G12R)
IVVYGQRGV

SEQ ID NO: 23451 - protein, 9 aa, synthetic construct
  source 1..9: note = Seed: LVVVGARGV (KRAS G12R)
IVVYGQRGY

SEQ ID NO: 23452 - protein, 9 aa, synthetic construct
  source 1..9: note = Seed: LVVVGARGV (KRAS G12R)
IVVYGRRGA

SEQ ID NO: 23453 - protein, 9 aa, synthetic construct
  source 1..9: note = Seed: LVVVGARGV (KRAS G12R)
IVVYGRRGC

SEQ ID NO: 23454 - protein, 9 aa, synthetic construct
  source 1..9: note = Seed: LVVVGARGV (KRAS G12R)
IVVYGRRGE

SEQ ID NO: 23455 - protein, 9 aa, synthetic construct
  source 1..9: note = Seed: LVVVGARGV (KRAS G12R)
IVVYGRRGF

SEQ ID NO: 23456 - protein, 9 aa, synthetic construct
  source 1..9: note = Seed: LVVVGARGV (KRAS G12R)
IVVYGRRGG

SEQ ID NO: 23457 - protein, 9 aa, synthetic construct
  source 1..9: note = Seed: LVVVGARGV (KRAS G12R)
IVVYGRRGH

SEQ ID NO: 23458 - protein, 9 aa, synthetic construct
  source 1..9: note = Seed: LVVVGARGV (KRAS G12R)
IVVYGRRGI

SEQ ID NO: 23459 - protein, 9 aa, synthetic construct
  source 1..9: note = Seed: LVVVGARGV (KRAS G12R)
IVVYGRRGK

SEQ ID NO: 23460 - protein, 9 aa, synthetic construct
  source 1..9: note = Seed: LVVVGARGV (KRAS G12R)
IVVYGRRGL

SEQ ID NO: 23461 - protein, 9 aa, synthetic construct
  source 1..9: note = Seed: LVVVGARGV (KRAS G12R)
IVVYGRRGM

SEQ ID NO: 23462 - protein, 9 aa, synthetic construct
  source 1..9: note = Seed: LVVVGARGV (KRAS G12R)
IVVYGRRGN

SEQ ID NO: 23463 - protein, 9 aa, synthetic construct
  source 1..9: note = Seed: LVVVGARGV (KRAS G12R)
IVVYGRRGP

SEQ ID NO: 23464 - protein, 9 aa, synthetic construct
  source 1..9: note = Seed: LVVVGARGV (KRAS G12R)
IVVYGRRGQ

SEQ ID NO: 23465 - protein, 9 aa, synthetic construct
  source 1..9: note = Seed: LVVVGARGV (KRAS G12R)
IVVYGRRGR

SEQ ID NO: 23466 - protein, 9 aa, synthetic construct
  source 1..9: note = Seed: LVVVGARGV (KRAS G12R)
IVVYGRRGS

SEQ ID NO: 23467 - protein, 9 aa, synthetic construct
  source 1..9: note = Seed: LVVVGARGV (KRAS G12R)
IVVYGRRGT

SEQ ID NO: 23468 - protein, 9 aa, synthetic construct
  source 1..9: note = Seed: LVVVGARGV (KRAS G12R)
IVVYGRRGV

SEQ ID NO: 23469 - protein, 9 aa, synthetic construct
  source 1..9: note = Seed: LVVVGARGV (KRAS G12R)
IVVYGRRGW

SEQ ID NO: 23470 - protein, 9 aa, synthetic construct
  source 1..9: note = Seed: LVVVGARGV (KRAS G12R)
IVVYGRRGY

SEQ ID NO: 23471 - protein, 9 aa, synthetic construct
  source 1..9: note = Seed: LVVVGARGV (KRAS G12R)
IVVYGSRGA

SEQ ID NO: 23472 - protein, 9 aa, synthetic construct
  source 1..9: note = Seed: LVVVGARGV (KRAS G12R)
IVVYGSRGC

SEQ ID NO: 23473 - protein, 9 aa, synthetic construct
  source 1..9: note = Seed: LVVVGARGV (KRAS G12R)
IVVYGSRGE

SEQ ID NO: 23474 - protein, 9 aa, synthetic construct
  source 1..9: note = Seed: LVVVGARGV (KRAS G12R)
IVVYGSRGF

SEQ ID NO: 23475 - protein, 9 aa, synthetic construct
  source 1..9: note = Seed: LVVVGARGV (KRAS G12R)
IVVYGSRGG

SEQ ID NO: 23476 - protein, 9 aa, synthetic construct
  source 1..9: note = Seed: LVVVGARGV (KRAS G12R)
IVVYGSRGH

SEQ ID NO: 23477 - protein, 9 aa, synthetic construct
  source 1..9: note = Seed: LVVVGARGV (KRAS G12R)
IVVYGSRGI

SEQ ID NO: 23478 - protein, 9 aa, synthetic construct
  source 1..9: note = Seed: LVVVGARGV (KRAS G12R)
IVVYGSRGK

SEQ ID NO: 23479 - protein, 9 aa, synthetic construct
  source 1..9: note = Seed: LVVVGARGV (KRAS G12R)
IVVYGSRGL

SEQ ID NO: 23480 - protein, 9 aa, synthetic construct
  source 1..9: note = Seed: LVVVGARGV (KRAS G12R)
IVVYGSRGM

SEQ ID NO: 23481 - protein, 9 aa, synthetic construct
  source 1..9: note = Seed: LVVVGARGV (KRAS G12R)
IVVYGSRGN

SEQ ID NO: 23482 - protein, 9 aa, synthetic construct
  source 1..9: note = Seed: LVVVGARGV (KRAS G12R)
IVVYGSRGP

SEQ ID NO: 23483 - protein, 9 aa, synthetic construct
  source 1..9: note = Seed: LVVVGARGV (KRAS G12R)
IVVYGSRGQ

SEQ ID NO: 23484 - protein, 9 aa, synthetic construct
  source 1..9: note = Seed: LVVVGARGV (KRAS G12R)
IVVYGSRGR

SEQ ID NO: 23485 - protein, 9 aa, synthetic construct
  source 1..9: note = Seed: LVVVGARGV (KRAS G12R)
IVVYGSRGS

SEQ ID NO: 23486 - protein, 9 aa, synthetic construct
  source 1..9: note = Seed: LVVVGARGV (KRAS G12R)
IVVYGSRGT

SEQ ID NO: 23487 - protein, 9 aa, synthetic construct
  source 1..9: note = Seed: LVVVGARGV (KRAS G12R)
IVVYGSRGV

SEQ ID NO: 23488 - protein, 9 aa, synthetic construct
  source 1..9: note = Seed: LVVVGARGV (KRAS G12R)
IVVYGSRGW

SEQ ID NO: 23489 - protein, 9 aa, synthetic construct
  source 1..9: note = Seed: LVVVGARGV (KRAS G12R)
IVVYGSRGY

SEQ ID NO: 23490 - protein, 9 aa, synthetic construct
  source 1..9: note = Seed: LVVVGARGV (KRAS G12R)
IVVYGTRGA

SEQ ID NO: 23491 - protein, 9 aa, synthetic construct
  source 1..9: note = Seed: LVVVGARGV (KRAS G12R)
IVVYGTRGF

SEQ ID NO: 23492 - protein, 9 aa, synthetic construct
  source 1..9: note = Seed: LVVVGARGV (KRAS G12R)
IVVYGTRGG

SEQ ID NO: 23493 - protein, 9 aa, synthetic construct
  source 1..9: note = Seed: LVVVGARGV (KRAS G12R)
IVVYGTRGH

SEQ ID NO: 23494 - protein, 9 aa, synthetic construct
  source 1..9: note = Seed: LVVVGARGV (KRAS G12R)
IVVYGTRGI

SEQ ID NO: 23495 - protein, 9 aa, synthetic construct
  source 1..9: note = Seed: LVVVGARGV (KRAS G12R)
IVVYGTRGK

SEQ ID NO: 23496 - protein, 9 aa, synthetic construct
  source 1..9: note = Seed: LVVVGARGV (KRAS G12R)
IVVYGTRGL

SEQ ID NO: 23497 - protein, 9 aa, synthetic construct
  source 1..9: note = Seed: LVVVGARGV (KRAS G12R)
IVVYGTRGM

SEQ ID NO: 23498 - protein, 9 aa, synthetic construct
  source 1..9: note = Seed: LVVVGARGV (KRAS G12R)
IVVYGTRGN

SEQ ID NO: 23499 - protein, 9 aa, synthetic construct
  source 1..9: note = Seed: LVVVGARGV (KRAS G12R)
IVVYGTRGR

SEQ ID NO: 23500 - protein, 9 aa, synthetic construct
  source 1..9: note = Seed: LVVVGARGV (KRAS G12R)
IVVYGTRGS

SEQ ID NO: 23501 - protein, 9 aa, synthetic construct
  source 1..9: note = Seed: LVVVGARGV (KRAS G12R)
IVVYGTRGT

SEQ ID NO: 23502 - protein, 9 aa, synthetic construct
  source 1..9: note = Seed: LVVVGARGV (KRAS G12R)
IVVYGTRGV

SEQ ID NO: 23503 - protein, 9 aa, synthetic construct
  source 1..9: note = Seed: LVVVGARGV (KRAS G12R)
IVVYGTRGY

SEQ ID NO: 23504 - protein, 9 aa, synthetic construct
  source 1..9: note = Seed: LVVVGARGV (KRAS G12R)
IVVYGVRGA

SEQ ID NO: 23505 - protein, 9 aa, synthetic construct
  source 1..9: note = Seed: LVVVGARGV (KRAS G12R)
IVVYGVRGF

SEQ ID NO: 23506 - protein, 9 aa, synthetic construct
  source 1..9: note = Seed: LVVVGARGV (KRAS G12R)
IVVYGVRGH

SEQ ID NO: 23507 - protein, 9 aa, synthetic construct
  source 1..9: note = Seed: LVVVGARGV (KRAS G12R)
IVVYGVRGI

SEQ ID NO: 23508 - protein, 9 aa, synthetic construct
  source 1..9: note = Seed: LVVVGARGV (KRAS G12R)
IVVYGVRGK

SEQ ID NO: 23509 - protein, 9 aa, synthetic construct
  source 1..9: note = Seed: LVVVGARGV (KRAS G12R)
IVVYGVRGL

SEQ ID NO: 23510 - protein, 9 aa, synthetic construct
  source 1..9: note = Seed: LVVVGARGV (KRAS G12R)
IVVYGVRGM

SEQ ID NO: 23511 - protein, 9 aa, synthetic construct
  source 1..9: note = Seed: LVVVGARGV (KRAS G12R)
IVVYGVRGQ

SEQ ID NO: 23512 - protein, 9 aa, synthetic construct
  source 1..9: note = Seed: LVVVGARGV (KRAS G12R)
IVVYGVRGR

SEQ ID NO: 23513 - protein, 9 aa, synthetic construct
  source 1..9: note = Seed: LVVVGARGV (KRAS G12R)
IVVYGVRGS

SEQ ID NO: 23514 - protein, 9 aa, synthetic construct
  source 1..9: note = Seed: LVVVGARGV (KRAS G12R)
IVVYGVRGT

SEQ ID NO: 23515 - protein, 9 aa, synthetic construct
  source 1..9: note = Seed: LVVVGARGV (KRAS G12R)
IVVYGVRGV

SEQ ID NO: 23516 - protein, 9 aa, synthetic construct
  source 1..9: note = Seed: LVVVGARGV (KRAS G12R)
IVVYGVRGY

SEQ ID NO: 23517 - protein, 9 aa, synthetic construct
  source 1..9: note = Seed: LVVVGARGV (KRAS G12R)
IVVYGWRGL

SEQ ID NO: 23518 - protein, 9 aa, synthetic construct
  source 1..9: note = Seed: LVVVGARGV (KRAS G12R)
IVVYGWRGR

SEQ ID NO: 23519 - protein, 9 aa, synthetic construct
  source 1..9: note = Seed: LVVVGARGV (KRAS G12R)
IVVYGYRGA

SEQ ID NO: 23520 - protein, 9 aa, synthetic construct
  source 1..9: note = Seed: LVVVGARGV (KRAS G12R)
IVVYGYRGF

SEQ ID NO: 23521 - protein, 9 aa, synthetic construct
  source 1..9: note = Seed: LVVVGARGV (KRAS G12R)
IVVYGYRGI

SEQ ID NO: 23522 - protein, 9 aa, synthetic construct
  source 1..9: note = Seed: LVVVGARGV (KRAS G12R)
IVVYGYRGL

SEQ ID NO: 23523 - protein, 9 aa, synthetic construct
  source 1..9: note = Seed: LVVVGARGV (KRAS G12R)
IVVYGYRGM

SEQ ID NO: 23524 - protein, 9 aa, synthetic construct
  source 1..9: note = Seed: LVVVGARGV (KRAS G12R)
IVVYGYRGR

SEQ ID NO: 23525 - protein, 9 aa, synthetic construct
  source 1..9: note = Seed: LVVVGARGV (KRAS G12R)
IVVYGYRGV

SEQ ID NO: 23526 - protein, 9 aa, synthetic construct
  source 1..9: note = Seed: LVVVGARGV (KRAS G12R)
IVVYGYRGY

SEQ ID NO: 23527 - protein, 9 aa, synthetic construct
  source 1..9: note = Seed: LVVVGARGV (KRAS G12R)
LVVAGARGA

SEQ ID NO: 23528 - protein, 9 aa, synthetic construct
  source 1..9: note = Seed: LVVVGARGV (KRAS G12R)
LVVAGARGC

SEQ ID NO: 23529 - protein, 9 aa, synthetic construct
  source 1..9: note = Seed: LVVVGARGV (KRAS G12R)
LVVAGARGF

SEQ ID NO: 23530 - protein, 9 aa, synthetic construct
  source 1..9: note = Seed: LVVVGARGV (KRAS G12R)
LVVAGARGG

SEQ ID NO: 23531 - protein, 9 aa, synthetic construct
  source 1..9: note = Seed: LVVVGARGV (KRAS G12R)
LVVAGARGH

SEQ ID NO: 23532 - protein, 9 aa, synthetic construct
  source 1..9: note = Seed: LVVVGARGV (KRAS G12R)
LVVAGARGI

SEQ ID NO: 23533 - protein, 9 aa, synthetic construct
  source 1..9: note = Seed: LVVVGARGV (KRAS G12R)
LVVAGARGK

SEQ ID NO: 23534 - protein, 9 aa, synthetic construct
  source 1..9: note = Seed: LVVVGARGV (KRAS G12R)
LVVAGARGL

SEQ ID NO: 23535 - protein, 9 aa, synthetic construct
  source 1..9: note = Seed: LVVVGARGV (KRAS G12R)
LVVAGARGM

SEQ ID NO: 23536 - protein, 9 aa, synthetic construct
  source 1..9: note = Seed: LVVVGARGV (KRAS G12R)
LVVAGARGN

SEQ ID NO: 23537 - protein, 9 aa, synthetic construct
  source 1..9: note = Seed: LVVVGARGV (KRAS G12R)
LVVAGARGP

SEQ ID NO: 23538 - protein, 9 aa, synthetic construct
  source 1..9: note = Seed: LVVVGARGV (KRAS G12R)
LVVAGARGQ

SEQ ID NO: 23539 - protein, 9 aa, synthetic construct
  source 1..9: note = Seed: LVVVGARGV (KRAS G12R)
LVVAGARGR

SEQ ID NO: 23540 - protein, 9 aa, synthetic construct
  source 1..9: note = Seed: LVVVGARGV (KRAS G12R)
LVVAGARGS

SEQ ID NO: 23541 - protein, 9 aa, synthetic construct
  source 1..9: note = Seed: LVVVGARGV (KRAS G12R)
LVVAGARGT

SEQ ID NO: 23542 - protein, 9 aa, synthetic construct
  source 1..9: note = Seed: LVVVGARGV (KRAS G12R)
LVVAGARGV

SEQ ID NO: 23543 - protein, 9 aa, synthetic construct
  source 1..9: note = Seed: LVVVGARGV (KRAS G12R)
LVVAGARGW

SEQ ID NO: 23544 - protein, 9 aa, synthetic construct
  source 1..9: note = Seed: LVVVGARGV (KRAS G12R)
LVVAGARGY

SEQ ID NO: 23545 - protein, 9 aa, synthetic construct
  source 1..9: note = Seed: LVVVGARGV (KRAS G12R)
LVVAGCRGA

SEQ ID NO: 23546 - protein, 9 aa, synthetic construct
  source 1..9: note = Seed: LVVVGARGV (KRAS G12R)
LVVAGCRGI

SEQ ID NO: 23547 - protein, 9 aa, synthetic construct
  source 1..9: note = Seed: LVVVGARGV (KRAS G12R)
LVVAGCRGL

SEQ ID NO: 23548 - protein, 9 aa, synthetic construct
  source 1..9: note = Seed: LVVVGARGV (KRAS G12R)
LVVAGCRGM

SEQ ID NO: 23549 - protein, 9 aa, synthetic construct
  source 1..9: note = Seed: LVVVGARGV (KRAS G12R)
LVVAGCRGV

SEQ ID NO: 23550 - protein, 9 aa, synthetic construct
  source 1..9: note = Seed: LVVVGARGV (KRAS G12R)
LVVAGFRGI

SEQ ID NO: 23551 - protein, 9 aa, synthetic construct
  source 1..9: note = Seed: LVVVGARGV (KRAS G12R)
LVVAGFRGL

SEQ ID NO: 23552 - protein, 9 aa, synthetic construct
  source 1..9: note = Seed: LVVVGARGV (KRAS G12R)
LVVAGFRGV

SEQ ID NO: 23553 - protein, 9 aa, synthetic construct
  source 1..9: note = Seed: LVVVGARGV (KRAS G12R)
LVVAGGRGA

SEQ ID NO: 23554 - protein, 9 aa, synthetic construct
  source 1..9: note = Seed: LVVVGARGV (KRAS G12R)
LVVAGGRGC

SEQ ID NO: 23555 - protein, 9 aa, synthetic construct
  source 1..9: note = Seed: LVVVGARGV (KRAS G12R)
LVVAGGRGF

SEQ ID NO: 23556 - protein, 9 aa, synthetic construct
  source 1..9: note = Seed: LVVVGARGV (KRAS G12R)
LVVAGGRGG

SEQ ID NO: 23557 - protein, 9 aa, synthetic construct
  source 1..9: note = Seed: LVVVGARGV (KRAS G12R)
LVVAGGRGI

SEQ ID NO: 23558 - protein, 9 aa, synthetic construct
  source 1..9: note = Seed: LVVVGARGV (KRAS G12R)
LVVAGGRGL

SEQ ID NO: 23559 - protein, 9 aa, synthetic construct
  source 1..9: note = Seed: LVVVGARGV (KRAS G12R)
LVVAGGRGM

SEQ ID NO: 23560 - protein, 9 aa, synthetic construct
  source 1..9: note = Seed: LVVVGARGV (KRAS G12R)
LVVAGGRGN

SEQ ID NO: 23561 - protein, 9 aa, synthetic construct
  source 1..9: note = Seed: LVVVGARGV (KRAS G12R)
LVVAGGRGR

SEQ ID NO: 23562 - protein, 9 aa, synthetic construct
  source 1..9: note = Seed: LVVVGARGV (KRAS G12R)
LVVAGGRGS

SEQ ID NO: 23563 - protein, 9 aa, synthetic construct
  source 1..9: note = Seed: LVVVGARGV (KRAS G12R)
LVVAGGRGT

SEQ ID NO: 23564 - protein, 9 aa, synthetic construct
  source 1..9: note = Seed: LVVVGARGV (KRAS G12R)
LVVAGGRGV

SEQ ID NO: 23565 - protein, 9 aa, synthetic construct
  source 1..9: note = Seed: LVVVGARGV (KRAS G12R)
LVVAGGRGY

SEQ ID NO: 23566 - protein, 9 aa, synthetic construct
  source 1..9: note = Seed: LVVVGARGV (KRAS G12R)
LVVAGHRGA

SEQ ID NO: 23567 - protein, 9 aa, synthetic construct
  source 1..9: note = Seed: LVVVGARGV (KRAS G12R)
LVVAGHRGF

SEQ ID NO: 23568 - protein, 9 aa, synthetic construct
  source 1..9: note = Seed: LVVVGARGV (KRAS G12R)
LVVAGHRGH

SEQ ID NO: 23569 - protein, 9 aa, synthetic construct
  source 1..9: note = Seed: LVVVGARGV (KRAS G12R)
LVVAGHRGI

SEQ ID NO: 23570 - protein, 9 aa, synthetic construct
  source 1..9: note = Seed: LVVVGARGV (KRAS G12R)
LVVAGHRGK

SEQ ID NO: 23571 - protein, 9 aa, synthetic construct
  source 1..9: note = Seed: LVVVGARGV (KRAS G12R)
LVVAGHRGL

SEQ ID NO: 23572 - protein, 9 aa, synthetic construct
  source 1..9: note = Seed: LVVVGARGV (KRAS G12R)
LVVAGHRGM

SEQ ID NO: 23573 - protein, 9 aa, synthetic construct
  source 1..9: note = Seed: LVVVGARGV (KRAS G12R)
LVVAGHRGQ

SEQ ID NO: 23574 - protein, 9 aa, synthetic construct
  source 1..9: note = Seed: LVVVGARGV (KRAS G12R)
LVVAGHRGR

SEQ ID NO: 23575 - protein, 9 aa, synthetic construct
  source 1..9: note = Seed: LVVVGARGV (KRAS G12R)
LVVAGHRGS

SEQ ID NO: 23576 - protein, 9 aa, synthetic construct
  source 1..9: note = Seed: LVVVGARGV (KRAS G12R)
LVVAGHRGT

SEQ ID NO: 23577 - protein, 9 aa, synthetic construct
  source 1..9: note = Seed: LVVVGARGV (KRAS G12R)
LVVAGHRGV

SEQ ID NO: 23578 - protein, 9 aa, synthetic construct
  source 1..9: note = Seed: LVVVGARGV (KRAS G12R)
LVVAGHRGY

SEQ ID NO: 23579 - protein, 9 aa, synthetic construct
  source 1..9: note = Seed: LVVVGARGV (KRAS G12R)
LVVAGIRGA

SEQ ID NO: 23580 - protein, 9 aa, synthetic construct
  source 1..9: note = Seed: LVVVGARGV (KRAS G12R)
LVVAGIRGF

SEQ ID NO: 23581 - protein, 9 aa, synthetic construct
  source 1..9: note = Seed: LVVVGARGV (KRAS G12R)
LVVAGIRGG

SEQ ID NO: 23582 - protein, 9 aa, synthetic construct
  source 1..9: note = Seed: LVVVGARGV (KRAS G12R)
LVVAGIRGI

SEQ ID NO: 23583 - protein, 9 aa, synthetic construct
  source 1..9: note = Seed: LVVVGARGV (KRAS G12R)
LVVAGIRGK

SEQ ID NO: 23584 - protein, 9 aa, synthetic construct
  source 1..9: note = Seed: LVVVGARGV (KRAS G12R)
LVVAGIRGL

SEQ ID NO: 23585 - protein, 9 aa, synthetic construct
  source 1..9: note = Seed: LVVVGARGV (KRAS G12R)
LVVAGIRGM

SEQ ID NO: 23586 - protein, 9 aa, synthetic construct
  source 1..9: note = Seed: LVVVGARGV (KRAS G12R)
LVVAGIRGN

SEQ ID NO: 23587 - protein, 9 aa, synthetic construct
  source 1..9: note = Seed: LVVVGARGV (KRAS G12R)
LVVAGIRGQ

SEQ ID NO: 23588 - protein, 9 aa, synthetic construct
  source 1..9: note = Seed: LVVVGARGV (KRAS G12R)
LVVAGIRGR

SEQ ID NO: 23589 - protein, 9 aa, synthetic construct
  source 1..9: note = Seed: LVVVGARGV (KRAS G12R)
LVVAGIRGS

SEQ ID NO: 23590 - protein, 9 aa, synthetic construct
  source 1..9: note = Seed: LVVVGARGV (KRAS G12R)
LVVAGIRGT

SEQ ID NO: 23591 - protein, 9 aa, synthetic construct
  source 1..9: note = Seed: LVVVGARGV (KRAS G12R)
LVVAGIRGV

SEQ ID NO: 23592 - protein, 9 aa, synthetic construct
  source 1..9: note = Seed: LVVVGARGV (KRAS G12R)
LVVAGIRGY

SEQ ID NO: 23593 - protein, 9 aa, synthetic construct
  source 1..9: note = Seed: LVVVGARGV (KRAS G12R)
LVVAGKRGA

SEQ ID NO: 23594 - protein, 9 aa, synthetic construct
  source 1..9: note = Seed: LVVVGARGV (KRAS G12R)
LVVAGKRGC

SEQ ID NO: 23595 - protein, 9 aa, synthetic construct
  source 1..9: note = Seed: LVVVGARGV (KRAS G12R)
LVVAGKRGF

SEQ ID NO: 23596 - protein, 9 aa, synthetic construct
  source 1..9: note = Seed: LVVVGARGV (KRAS G12R)
LVVAGKRGG

SEQ ID NO: 23597 - protein, 9 aa, synthetic construct
  source 1..9: note = Seed: LVVVGARGV (KRAS G12R)
LVVAGKRGH

SEQ ID NO: 23598 - protein, 9 aa, synthetic construct
  source 1..9: note = Seed: LVVVGARGV (KRAS G12R)
LVVAGKRGI

SEQ ID NO: 23599 - protein, 9 aa, synthetic construct
  source 1..9: note = Seed: LVVVGARGV (KRAS G12R)
LVVAGKRGK

SEQ ID NO: 23600 - protein, 9 aa, synthetic construct
  source 1..9: note = Seed: LVVVGARGV (KRAS G12R)
LVVAGKRGL

SEQ ID NO: 23601 - protein, 9 aa, synthetic construct
  source 1..9: note = Seed: LVVVGARGV (KRAS G12R)
LVVAGKRGM

SEQ ID NO: 23602 - protein, 9 aa, synthetic construct
  source 1..9: note = Seed: LVVVGARGV (KRAS G12R)
LVVAGKRGN

SEQ ID NO: 23603 - protein, 9 aa, synthetic construct
  source 1..9: note = Seed: LVVVGARGV (KRAS G12R)
LVVAGKRGP

SEQ ID NO: 23604 - protein, 9 aa, synthetic construct
  source 1..9: note = Seed: LVVVGARGV (KRAS G12R)
LVVAGKRGQ

SEQ ID NO: 23605 - protein, 9 aa, synthetic construct
  source 1..9: note = Seed: LVVVGARGV (KRAS G12R)
LVVAGKRGR

SEQ ID NO: 23606 - protein, 9 aa, synthetic construct
  source 1..9: note = Seed: LVVVGARGV (KRAS G12R)
LVVAGKRGS

SEQ ID NO: 23607 - protein, 9 aa, synthetic construct
  source 1..9: note = Seed: LVVVGARGV (KRAS G12R)
LVVAGKRGT

SEQ ID NO: 23608 - protein, 9 aa, synthetic construct
  source 1..9: note = Seed: LVVVGARGV (KRAS G12R)
LVVAGKRGV

SEQ ID NO: 23609 - protein, 9 aa, synthetic construct
  source 1..9: note = Seed: LVVVGARGV (KRAS G12R)
LVVAGKRGW

SEQ ID NO: 23610 - protein, 9 aa, synthetic construct
  source 1..9: note = Seed: LVVVGARGV (KRAS G12R)
LVVAGKRGY

SEQ ID NO: 23611 - protein, 9 aa, synthetic construct
  source 1..9: note = Seed: LVVVGARGV (KRAS G12R)
LVVAGLRGA

SEQ ID NO: 23612 - protein, 9 aa, synthetic construct
  source 1..9: note = Seed: LVVVGARGV (KRAS G12R)
LVVAGLRGF

SEQ ID NO: 23613 - protein, 9 aa, synthetic construct
  source 1..9: note = Seed: LVVVGARGV (KRAS G12R)
LVVAGLRGI

SEQ ID NO: 23614 - protein, 9 aa, synthetic construct
  source 1..9: note = Seed: LVVVGARGV (KRAS G12R)
LVVAGLRGK

SEQ ID NO: 23615 - protein, 9 aa, synthetic construct
  source 1..9: note = Seed: LVVVGARGV (KRAS G12R)
LVVAGLRGL

SEQ ID NO: 23616 - protein, 9 aa, synthetic construct
  source 1..9: note = Seed: LVVVGARGV (KRAS G12R)
LVVAGLRGM

SEQ ID NO: 23617 - protein, 9 aa, synthetic construct
  source 1..9: note = Seed: LVVVGARGV (KRAS G12R)
LVVAGLRGQ

SEQ ID NO: 23618 - protein, 9 aa, synthetic construct
  source 1..9: note = Seed: LVVVGARGV (KRAS G12R)
LVVAGLRGR

SEQ ID NO: 23619 - protein, 9 aa, synthetic construct
  source 1..9: note = Seed: LVVVGARGV (KRAS G12R)
LVVAGLRGS

SEQ ID NO: 23620 - protein, 9 aa, synthetic construct
  source 1..9: note = Seed: LVVVGARGV (KRAS G12R)
LVVAGLRGV

SEQ ID NO: 23621 - protein, 9 aa, synthetic construct
  source 1..9: note = Seed: LVVVGARGV (KRAS G12R)
LVVAGLRGY

SEQ ID NO: 23622 - protein, 9 aa, synthetic construct
  source 1..9: note = Seed: LVVVGARGV (KRAS G12R)
LVVAGMRGA

SEQ ID NO: 23623 - protein, 9 aa, synthetic construct
  source 1..9: note = Seed: LVVVGARGV (KRAS G12R)
LVVAGMRGF

SEQ ID NO: 23624 - protein, 9 aa, synthetic construct
  source 1..9: note = Seed: LVVVGARGV (KRAS G12R)
LVVAGMRGI

SEQ ID NO: 23625 - protein, 9 aa, synthetic construct
  source 1..9: note = Seed: LVVVGARGV (KRAS G12R)
LVVAGMRGL

SEQ ID NO: 23626 - protein, 9 aa, synthetic construct
  source 1..9: note = Seed: LVVVGARGV (KRAS G12R)
LVVAGMRGM

SEQ ID NO: 23627 - protein, 9 aa, synthetic construct
  source 1..9: note = Seed: LVVVGARGV (KRAS G12R)
LVVAGMRGN

SEQ ID NO: 23628 - protein, 9 aa, synthetic construct
  source 1..9: note = Seed: LVVVGARGV (KRAS G12R)
LVVAGMRGR

SEQ ID NO: 23629 - protein, 9 aa, synthetic construct
  source 1..9: note = Seed: LVVVGARGV (KRAS G12R)
LVVAGMRGS

SEQ ID NO: 23630 - protein, 9 aa, synthetic construct
  source 1..9: note = Seed: LVVVGARGV (KRAS G12R)
LVVAGMRGT

SEQ ID NO: 23631 - protein, 9 aa, synthetic construct
  source 1..9: note = Seed: LVVVGARGV (KRAS G12R)
LVVAGMRGV

SEQ ID NO: 23632 - protein, 9 aa, synthetic construct
  source 1..9: note = Seed: LVVVGARGV (KRAS G12R)
LVVAGMRGY

SEQ ID NO: 23633 - protein, 9 aa, synthetic construct
  source 1..9: note = Seed: LVVVGARGV (KRAS G12R)
LVVAGNRGA

SEQ ID NO: 23634 - protein, 9 aa, synthetic construct
  source 1..9: note = Seed: LVVVGARGV (KRAS G12R)
LVVAGNRGF

SEQ ID NO: 23635 - protein, 9 aa, synthetic construct
  source 1..9: note = Seed: LVVVGARGV (KRAS G12R)
LVVAGNRGG

SEQ ID NO: 23636 - protein, 9 aa, synthetic construct
  source 1..9: note = Seed: LVVVGARGV (KRAS G12R)
LVVAGNRGI

SEQ ID NO: 23637 - protein, 9 aa, synthetic construct
  source 1..9: note = Seed: LVVVGARGV (KRAS G12R)
LVVAGNRGK

SEQ ID NO: 23638 - protein, 9 aa, synthetic construct
  source 1..9: note = Seed: LVVVGARGV (KRAS G12R)
LVVAGNRGL

SEQ ID NO: 23639 - protein, 9 aa, synthetic construct
  source 1..9: note = Seed: LVVVGARGV (KRAS G12R)
LVVAGNRGM

SEQ ID NO: 23640 - protein, 9 aa, synthetic construct
  source 1..9: note = Seed: LVVVGARGV (KRAS G12R)
LVVAGNRGN

SEQ ID NO: 23641 - protein, 9 aa, synthetic construct
  source 1..9: note = Seed: LVVVGARGV (KRAS G12R)
LVVAGNRGR

SEQ ID NO: 23642 - protein, 9 aa, synthetic construct
  source 1..9: note = Seed: LVVVGARGV (KRAS G12R)
LVVAGNRGS

SEQ ID NO: 23643 - protein, 9 aa, synthetic construct
  source 1..9: note = Seed: LVVVGARGV (KRAS G12R)
LVVAGNRGT

SEQ ID NO: 23644 - protein, 9 aa, synthetic construct
  source 1..9: note = Seed: LVVVGARGV (KRAS G12R)
LVVAGNRGV

SEQ ID NO: 23645 - protein, 9 aa, synthetic construct
  source 1..9: note = Seed: LVVVGARGV (KRAS G12R)
LVVAGNRGY

SEQ ID NO: 23646 - protein, 9 aa, synthetic construct
  source 1..9: note = Seed: LVVVGARGV (KRAS G12R)
LVVAGPRGA

SEQ ID NO: 23647 - protein, 9 aa, synthetic construct
  source 1..9: note = Seed: LVVVGARGV (KRAS G12R)
LVVAGPRGC

SEQ ID NO: 23648 - protein, 9 aa, synthetic construct
  source 1..9: note = Seed: LVVVGARGV (KRAS G12R)
LVVAGPRGF

SEQ ID NO: 23649 - protein, 9 aa, synthetic construct
  source 1..9: note = Seed: LVVVGARGV (KRAS G12R)
LVVAGPRGG

SEQ ID NO: 23650 - protein, 9 aa, synthetic construct
  source 1..9: note = Seed: LVVVGARGV (KRAS G12R)
LVVAGPRGI

SEQ ID NO: 23651 - protein, 9 aa, synthetic construct
  source 1..9: note = Seed: LVVVGARGV (KRAS G12R)
LVVAGPRGL

SEQ ID NO: 23652 - protein, 9 aa, synthetic construct
  source 1..9: note = Seed: LVVVGARGV (KRAS G12R)
LVVAGPRGM

SEQ ID NO: 23653 - protein, 9 aa, synthetic construct
  source 1..9: note = Seed: LVVVGARGV (KRAS G12R)
LVVAGPRGN

SEQ ID NO: 23654 - protein, 9 aa, synthetic construct
  source 1..9: note = Seed: LVVVGARGV (KRAS G12R)
LVVAGPRGR

SEQ ID NO: 23655 - protein, 9 aa, synthetic construct
  source 1..9: note = Seed: LVVVGARGV (KRAS G12R)
LVVAGPRGS

SEQ ID NO: 23656 - protein, 9 aa, synthetic construct
  source 1..9: note = Seed: LVVVGARGV (KRAS G12R)
LVVAGPRGT

SEQ ID NO: 23657 - protein, 9 aa, synthetic construct
  source 1..9: note = Seed: LVVVGARGV (KRAS G12R)
LVVAGPRGV

SEQ ID NO: 23658 - protein, 9 aa, synthetic construct
  source 1..9: note = Seed: LVVVGARGV (KRAS G12R)
LVVAGPRGW

SEQ ID NO: 23659 - protein, 9 aa, synthetic construct
  source 1..9: note = Seed: LVVVGARGV (KRAS G12R)
LVVAGPRGY

SEQ ID NO: 23660 - protein, 9 aa, synthetic construct
  source 1..9: note = Seed: LVVVGARGV (KRAS G12R)
LVVAGQRGI

SEQ ID NO: 23661 - protein, 9 aa, synthetic construct
  source 1..9: note = Seed: LVVVGARGV (KRAS G12R)
LVVAGQRGK

SEQ ID NO: 23662 - protein, 9 aa, synthetic construct
  source 1..9: note = Seed: LVVVGARGV (KRAS G12R)
LVVAGQRGL

SEQ ID NO: 23663 - protein, 9 aa, synthetic construct
  source 1..9: note = Seed: LVVVGARGV (KRAS G12R)
LVVAGQRGR

SEQ ID NO: 23664 - protein, 9 aa, synthetic construct
  source 1..9: note = Seed: LVVVGARGV (KRAS G12R)
LVVAGQRGV

SEQ ID NO: 23665 - protein, 9 aa, synthetic construct
  source 1..9: note = Seed: LVVVGARGV (KRAS G12R)
LVVAGRRGA

SEQ ID NO: 23666 - protein, 9 aa, synthetic construct
  source 1..9: note = Seed: LVVVGARGV (KRAS G12R)
LVVAGRRGC

SEQ ID NO: 23667 - protein, 9 aa, synthetic construct
  source 1..9: note = Seed: LVVVGARGV (KRAS G12R)
LVVAGRRGD

SEQ ID NO: 23668 - protein, 9 aa, synthetic construct
  source 1..9: note = Seed: LVVVGARGV (KRAS G12R)
LVVAGRRGE

SEQ ID NO: 23669 - protein, 9 aa, synthetic construct
  source 1..9: note = Seed: LVVVGARGV (KRAS G12R)
LVVAGRRGF

SEQ ID NO: 23670 - protein, 9 aa, synthetic construct
  source 1..9: note = Seed: LVVVGARGV (KRAS G12R)
LVVAGRRGG

SEQ ID NO: 23671 - protein, 9 aa, synthetic construct
  source 1..9: note = Seed: LVVVGARGV (KRAS G12R)
LVVAGRRGH

SEQ ID NO: 23672 - protein, 9 aa, synthetic construct
  source 1..9: note = Seed: LVVVGARGV (KRAS G12R)
LVVAGRRGI

SEQ ID NO: 23673 - protein, 9 aa, synthetic construct
  source 1..9: note = Seed: LVVVGARGV (KRAS G12R)
LVVAGRRGK

SEQ ID NO: 23674 - protein, 9 aa, synthetic construct
  source 1..9: note = Seed: LVVVGARGV (KRAS G12R)
LVVAGRRGL

SEQ ID NO: 23675 - protein, 9 aa, synthetic construct
  source 1..9: note = Seed: LVVVGARGV (KRAS G12R)
LVVAGRRGM

SEQ ID NO: 23676 - protein, 9 aa, synthetic construct
  source 1..9: note = Seed: LVVVGARGV (KRAS G12R)
LVVAGRRGN

SEQ ID NO: 23677 - protein, 9 aa, synthetic construct
  source 1..9: note = Seed: LVVVGARGV (KRAS G12R)
LVVAGRRGP

SEQ ID NO: 23678 - protein, 9 aa, synthetic construct
  source 1..9: note = Seed: LVVVGARGV (KRAS G12R)
LVVAGRRGQ

SEQ ID NO: 23679 - protein, 9 aa, synthetic construct
  source 1..9: note = Seed: LVVVGARGV (KRAS G12R)
LVVAGRRGR

SEQ ID NO: 23680 - protein, 9 aa, synthetic construct
  source 1..9: note = Seed: LVVVGARGV (KRAS G12R)
LVVAGRRGS

SEQ ID NO: 23681 - protein, 9 aa, synthetic construct
  source 1..9: note = Seed: LVVVGARGV (KRAS G12R)
LVVAGRRGT

SEQ ID NO: 23682 - protein, 9 aa, synthetic construct
  source 1..9: note = Seed: LVVVGARGV (KRAS G12R)
LVVAGRRGV

SEQ ID NO: 23683 - protein, 9 aa, synthetic construct
  source 1..9: note = Seed: LVVVGARGV (KRAS G12R)
LVVAGRRGW

SEQ ID NO: 23684 - protein, 9 aa, synthetic construct
  source 1..9: note = Seed: LVVVGARGV (KRAS G12R)
LVVAGRRGY

SEQ ID NO: 23685 - protein, 9 aa, synthetic construct
  source 1..9: note = Seed: LVVVGARGV (KRAS G12R)
LVVAGSRGA

SEQ ID NO: 23686 - protein, 9 aa, synthetic construct
  source 1..9: note = Seed: LVVVGARGV (KRAS G12R)
LVVAGSRGC

SEQ ID NO: 23687 - protein, 9 aa, synthetic construct
  source 1..9: note = Seed: LVVVGARGV (KRAS G12R)
LVVAGSRGF

SEQ ID NO: 23688 - protein, 9 aa, synthetic construct
  source 1..9: note = Seed: LVVVGARGV (KRAS G12R)
LVVAGSRGG

SEQ ID NO: 23689 - protein, 9 aa, synthetic construct
  source 1..9: note = Seed: LVVVGARGV (KRAS G12R)
LVVAGSRGH

SEQ ID NO: 23690 - protein, 9 aa, synthetic construct
  source 1..9: note = Seed: LVVVGARGV (KRAS G12R)
LVVAGSRGI

SEQ ID NO: 23691 - protein, 9 aa, synthetic construct
  source 1..9: note = Seed: LVVVGARGV (KRAS G12R)
LVVAGSRGK

SEQ ID NO: 23692 - protein, 9 aa, synthetic construct
  source 1..9: note = Seed: LVVVGARGV (KRAS G12R)
LVVAGSRGL

SEQ ID NO: 23693 - protein, 9 aa, synthetic construct
  source 1..9: note = Seed: LVVVGARGV (KRAS G12R)
LVVAGSRGM

SEQ ID NO: 23694 - protein, 9 aa, synthetic construct
  source 1..9: note = Seed: LVVVGARGV (KRAS G12R)
LVVAGSRGN

SEQ ID NO: 23695 - protein, 9 aa, synthetic construct
  source 1..9: note = Seed: LVVVGARGV (KRAS G12R)
LVVAGSRGQ

SEQ ID NO: 23696 - protein, 9 aa, synthetic construct
  source 1..9: note = Seed: LVVVGARGV (KRAS G12R)
LVVAGSRGR

SEQ ID NO: 23697 - protein, 9 aa, synthetic construct
  source 1..9: note = Seed: LVVVGARGV (KRAS G12R)
LVVAGSRGS

SEQ ID NO: 23698 - protein, 9 aa, synthetic construct
  source 1..9: note = Seed: LVVVGARGV (KRAS G12R)
LVVAGSRGT

SEQ ID NO: 23699 - protein, 9 aa, synthetic construct
  source 1..9: note = Seed: LVVVGARGV (KRAS G12R)
LVVAGSRGV

SEQ ID NO: 23700 - protein, 9 aa, synthetic construct
  source 1..9: note = Seed: LVVVGARGV (KRAS G12R)
LVVAGSRGW

SEQ ID NO: 23701 - protein, 9 aa, synthetic construct
  source 1..9: note = Seed: LVVVGARGV (KRAS G12R)
LVVAGSRGY

SEQ ID NO: 23702 - protein, 9 aa, synthetic construct
  source 1..9: note = Seed: LVVVGARGV (KRAS G12R)
LVVAGTRGA

SEQ ID NO: 23703 - protein, 9 aa, synthetic construct
  source 1..9: note = Seed: LVVVGARGV (KRAS G12R)
LVVAGTRGF

SEQ ID NO: 23704 - protein, 9 aa, synthetic construct
  source 1..9: note = Seed: LVVVGARGV (KRAS G12R)
LVVAGTRGI

SEQ ID NO: 23705 - protein, 9 aa, synthetic construct
  source 1..9: note = Seed: LVVVGARGV (KRAS G12R)
LVVAGTRGK

SEQ ID NO: 23706 - protein, 9 aa, synthetic construct
  source 1..9: note = Seed: LVVVGARGV (KRAS G12R)
LVVAGTRGL

SEQ ID NO: 23707 - protein, 9 aa, synthetic construct
  source 1..9: note = Seed: LVVVGARGV (KRAS G12R)
LVVAGTRGM

SEQ ID NO: 23708 - protein, 9 aa, synthetic construct
  source 1..9: note = Seed: LVVVGARGV (KRAS G12R)
LVVAGTRGN

SEQ ID NO: 23709 - protein, 9 aa, synthetic construct
  source 1..9: note = Seed: LVVVGARGV (KRAS G12R)
LVVAGTRGR

SEQ ID NO: 23710 - protein, 9 aa, synthetic construct
  source 1..9: note = Seed: LVVVGARGV (KRAS G12R)
LVVAGTRGS

SEQ ID NO: 23711 - protein, 9 aa, synthetic construct
  source 1..9: note = Seed: LVVVGARGV (KRAS G12R)
LVVAGTRGT

SEQ ID NO: 23712 - protein, 9 aa, synthetic construct
  source 1..9: note = Seed: LVVVGARGV (KRAS G12R)
LVVAGTRGV

SEQ ID NO: 23713 - protein, 9 aa, synthetic construct
  source 1..9: note = Seed: LVVVGARGV (KRAS G12R)
LVVAGTRGY

SEQ ID NO: 23714 - protein, 9 aa, synthetic construct
  source 1..9: note = Seed: LVVVGARGV (KRAS G12R)
LVVAGVRGA

SEQ ID NO: 23715 - protein, 9 aa, synthetic construct
  source 1..9: note = Seed: LVVVGARGV (KRAS G12R)
LVVAGVRGC

SEQ ID NO: 23716 - protein, 9 aa, synthetic construct
  source 1..9: note = Seed: LVVVGARGV (KRAS G12R)
LVVAGVRGF

SEQ ID NO: 23717 - protein, 9 aa, synthetic construct
  source 1..9: note = Seed: LVVVGARGV (KRAS G12R)
LVVAGVRGG

SEQ ID NO: 23718 - protein, 9 aa, synthetic construct
  source 1..9: note = Seed: LVVVGARGV (KRAS G12R)
LVVAGVRGH

SEQ ID NO: 23719 - protein, 9 aa, synthetic construct
  source 1..9: note = Seed: LVVVGARGV (KRAS G12R)
LVVAGVRGI

SEQ ID NO: 23720 - protein, 9 aa, synthetic construct
  source 1..9: note = Seed: LVVVGARGV (KRAS G12R)
LVVAGVRGK

SEQ ID NO: 23721 - protein, 9 aa, synthetic construct
  source 1..9: note = Seed: LVVVGARGV (KRAS G12R)
LVVAGVRGL

SEQ ID NO: 23722 - protein, 9 aa, synthetic construct
  source 1..9: note = Seed: LVVVGARGV (KRAS G12R)
LVVAGVRGM

SEQ ID NO: 23723 - protein, 9 aa, synthetic construct
  source 1..9: note = Seed: LVVVGARGV (KRAS G12R)
LVVAGVRGN

SEQ ID NO: 23724 - protein, 9 aa, synthetic construct
  source 1..9: note = Seed: LVVVGARGV (KRAS G12R)
LVVAGVRGQ

SEQ ID NO: 23725 - protein, 9 aa, synthetic construct
  source 1..9: note = Seed: LVVVGARGV (KRAS G12R)
LVVAGVRGR

SEQ ID NO: 23726 - protein, 9 aa, synthetic construct
  source 1..9: note = Seed: LVVVGARGV (KRAS G12R)
LVVAGVRGS

SEQ ID NO: 23727 - protein, 9 aa, synthetic construct
  source 1..9: note = Seed: LVVVGARGV (KRAS G12R)
LVVAGVRGT

SEQ ID NO: 23728 - protein, 9 aa, synthetic construct
  source 1..9: note = Seed: LVVVGARGV (KRAS G12R)
LVVAGVRGV

SEQ ID NO: 23729 - protein, 9 aa, synthetic construct
  source 1..9: note = Seed: LVVVGARGV (KRAS G12R)
LVVAGVRGY

SEQ ID NO: 23730 - protein, 9 aa, synthetic construct
  source 1..9: note = Seed: LVVVGARGV (KRAS G12R)
LVVAGWRGI

SEQ ID NO: 23731 - protein, 9 aa, synthetic construct
  source 1..9: note = Seed: LVVVGARGV (KRAS G12R)
LVVAGWRGL

SEQ ID NO: 23732 - protein, 9 aa, synthetic construct
  source 1..9: note = Seed: LVVVGARGV (KRAS G12R)
LVVAGWRGR

SEQ ID NO: 23733 - protein, 9 aa, synthetic construct
  source 1..9: note = Seed: LVVVGARGV (KRAS G12R)
LVVAGWRGV

SEQ ID NO: 23734 - protein, 9 aa, synthetic construct
  source 1..9: note = Seed: LVVVGARGV (KRAS G12R)
LVVAGYRGI

SEQ ID NO: 23735 - protein, 9 aa, synthetic construct
  source 1..9: note = Seed: LVVVGARGV (KRAS G12R)
LVVAGYRGL

SEQ ID NO: 23736 - protein, 9 aa, synthetic construct
  source 1..9: note = Seed: LVVVGARGV (KRAS G12R)
LVVAGYRGR

SEQ ID NO: 23737 - protein, 9 aa, synthetic construct
  source 1..9: note = Seed: LVVVGARGV (KRAS G12R)
LVVAGYRGV

SEQ ID NO: 23738 - protein, 9 aa, synthetic construct
  source 1..9: note = Seed: LVVVGARGV (KRAS G12R)
LVVCGARGA

SEQ ID NO: 23739 - protein, 9 aa, synthetic construct
  source 1..9: note = Seed: LVVVGARGV (KRAS G12R)
LVVCGARGI

SEQ ID NO: 23740 - protein, 9 aa, synthetic construct
  source 1..9: note = Seed: LVVVGARGV (KRAS G12R)
LVVCGARGL

SEQ ID NO: 23741 - protein, 9 aa, synthetic construct
  source 1..9: note = Seed: LVVVGARGV (KRAS G12R)
LVVCGARGM

SEQ ID NO: 23742 - protein, 9 aa, synthetic construct
  source 1..9: note = Seed: LVVVGARGV (KRAS G12R)
LVVCGARGV

SEQ ID NO: 23743 - protein, 9 aa, synthetic construct
  source 1..9: note = Seed: LVVVGARGV (KRAS G12R)
LVVCGGRGI

SEQ ID NO: 23744 - protein, 9 aa, synthetic construct
  source 1..9: note = Seed: LVVVGARGV (KRAS G12R)
LVVCGGRGL

SEQ ID NO: 23745 - protein, 9 aa, synthetic construct
  source 1..9: note = Seed: LVVVGARGV (KRAS G12R)
LVVCGGRGV

SEQ ID NO: 23746 - protein, 9 aa, synthetic construct
  source 1..9: note = Seed: LVVVGARGV (KRAS G12R)
LVVCGIRGR

SEQ ID NO: 23747 - protein, 9 aa, synthetic construct
  source 1..9: note = Seed: LVVVGARGV (KRAS G12R)
LVVCGKRGA

SEQ ID NO: 23748 - protein, 9 aa, synthetic construct
  source 1..9: note = Seed: LVVVGARGV (KRAS G12R)
LVVCGKRGF

SEQ ID NO: 23749 - protein, 9 aa, synthetic construct
  source 1..9: note = Seed: LVVVGARGV (KRAS G12R)
LVVCGKRGG

SEQ ID NO: 23750 - protein, 9 aa, synthetic construct
  source 1..9: note = Seed: LVVVGARGV (KRAS G12R)
LVVCGKRGH

SEQ ID NO: 23751 - protein, 9 aa, synthetic construct
  source 1..9: note = Seed: LVVVGARGV (KRAS G12R)
LVVCGKRGI

SEQ ID NO: 23752 - protein, 9 aa, synthetic construct
  source 1..9: note = Seed: LVVVGARGV (KRAS G12R)
LVVCGKRGK

SEQ ID NO: 23753 - protein, 9 aa, synthetic construct
  source 1..9: note = Seed: LVVVGARGV (KRAS G12R)
LVVCGKRGL

SEQ ID NO: 23754 - protein, 9 aa, synthetic construct
  source 1..9: note = Seed: LVVVGARGV (KRAS G12R)
LVVCGKRGM

SEQ ID NO: 23755 - protein, 9 aa, synthetic construct
  source 1..9: note = Seed: LVVVGARGV (KRAS G12R)
LVVCGKRGQ

SEQ ID NO: 23756 - protein, 9 aa, synthetic construct
  source 1..9: note = Seed: LVVVGARGV (KRAS G12R)
LVVCGKRGR

SEQ ID NO: 23757 - protein, 9 aa, synthetic construct
  source 1..9: note = Seed: LVVVGARGV (KRAS G12R)
LVVCGKRGS

SEQ ID NO: 23758 - protein, 9 aa, synthetic construct
  source 1..9: note = Seed: LVVVGARGV (KRAS G12R)
LVVCGKRGT

SEQ ID NO: 23759 - protein, 9 aa, synthetic construct
  source 1..9: note = Seed: LVVVGARGV (KRAS G12R)
LVVCGKRGV

SEQ ID NO: 23760 - protein, 9 aa, synthetic construct
  source 1..9: note = Seed: LVVVGARGV (KRAS G12R)
LVVCGKRGY

SEQ ID NO: 23761 - protein, 9 aa, synthetic construct
  source 1..9: note = Seed: LVVVGARGV (KRAS G12R)
LVVCGMRGR

SEQ ID NO: 23762 - protein, 9 aa, synthetic construct
  source 1..9: note = Seed: LVVVGARGV (KRAS G12R)
LVVCGRRGA

SEQ ID NO: 23763 - protein, 9 aa, synthetic construct
  source 1..9: note = Seed: LVVVGARGV (KRAS G12R)
LVVCGRRGF

SEQ ID NO: 23764 - protein, 9 aa, synthetic construct
  source 1..9: note = Seed: LVVVGARGV (KRAS G12R)
LVVCGRRGG

SEQ ID NO: 23765 - protein, 9 aa, synthetic construct
  source 1..9: note = Seed: LVVVGARGV (KRAS G12R)
LVVCGRRGH

SEQ ID NO: 23766 - protein, 9 aa, synthetic construct
  source 1..9: note = Seed: LVVVGARGV (KRAS G12R)
LVVCGRRGI

SEQ ID NO: 23767 - protein, 9 aa, synthetic construct
  source 1..9: note = Seed: LVVVGARGV (KRAS G12R)
LVVCGRRGK

SEQ ID NO: 23768 - protein, 9 aa, synthetic construct
  source 1..9: note = Seed: LVVVGARGV (KRAS G12R)
LVVCGRRGL

SEQ ID NO: 23769 - protein, 9 aa, synthetic construct
  source 1..9: note = Seed: LVVVGARGV (KRAS G12R)
LVVCGRRGM

SEQ ID NO: 23770 - protein, 9 aa, synthetic construct
  source 1..9: note = Seed: LVVVGARGV (KRAS G12R)
LVVCGRRGN

SEQ ID NO: 23771 - protein, 9 aa, synthetic construct
  source 1..9: note = Seed: LVVVGARGV (KRAS G12R)
LVVCGRRGP

SEQ ID NO: 23772 - protein, 9 aa, synthetic construct
  source 1..9: note = Seed: LVVVGARGV (KRAS G12R)
LVVCGRRGQ

SEQ ID NO: 23773 - protein, 9 aa, synthetic construct
  source 1..9: note = Seed: LVVVGARGV (KRAS G12R)
LVVCGRRGR

SEQ ID NO: 23774 - protein, 9 aa, synthetic construct
  source 1..9: note = Seed: LVVVGARGV (KRAS G12R)
LVVCGRRGS

SEQ ID NO: 23775 - protein, 9 aa, synthetic construct
  source 1..9: note = Seed: LVVVGARGV (KRAS G12R)
LVVCGRRGT

SEQ ID NO: 23776 - protein, 9 aa, synthetic construct
  source 1..9: note = Seed: LVVVGARGV (KRAS G12R)
LVVCGRRGV

SEQ ID NO: 23777 - protein, 9 aa, synthetic construct
  source 1..9: note = Seed: LVVVGARGV (KRAS G12R)
LVVCGRRGW

SEQ ID NO: 23778 - protein, 9 aa, synthetic construct
  source 1..9: note = Seed: LVVVGARGV (KRAS G12R)
LVVCGRRGY

SEQ ID NO: 23779 - protein, 9 aa, synthetic construct
  source 1..9: note = Seed: LVVVGARGV (KRAS G12R)
LVVCGSRGI

SEQ ID NO: 23780 - protein, 9 aa, synthetic construct
  source 1..9: note = Seed: LVVVGARGV (KRAS G12R)
LVVCGSRGL

SEQ ID NO: 23781 - protein, 9 aa, synthetic construct
  source 1..9: note = Seed: LVVVGARGV (KRAS G12R)
LVVCGSRGV

SEQ ID NO: 23782 - protein, 9 aa, synthetic construct
  source 1..9: note = Seed: LVVVGARGV (KRAS G12R)
LVVDGARGF

SEQ ID NO: 23783 - protein, 9 aa, synthetic construct
  source 1..9: note = Seed: LVVVGARGV (KRAS G12R)
LVVDGARGI

SEQ ID NO: 23784 - protein, 9 aa, synthetic construct
  source 1..9: note = Seed: LVVVGARGV (KRAS G12R)
LVVDGARGL

SEQ ID NO: 23785 - protein, 9 aa, synthetic construct
  source 1..9: note = Seed: LVVVGARGV (KRAS G12R)
LVVDGARGM

SEQ ID NO: 23786 - protein, 9 aa, synthetic construct
  source 1..9: note = Seed: LVVVGARGV (KRAS G12R)
LVVDGARGV

SEQ ID NO: 23787 - protein, 9 aa, synthetic construct
  source 1..9: note = Seed: LVVVGARGV (KRAS G12R)
LVVDGARGY

SEQ ID NO: 23788 - protein, 9 aa, synthetic construct
  source 1..9: note = Seed: LVVVGARGV (KRAS G12R)
LVVDGGRGI

SEQ ID NO: 23789 - protein, 9 aa, synthetic construct
  source 1..9: note = Seed: LVVVGARGV (KRAS G12R)
LVVDGGRGV

SEQ ID NO: 23790 - protein, 9 aa, synthetic construct
  source 1..9: note = Seed: LVVVGARGV (KRAS G12R)
LVVDGIRGI

SEQ ID NO: 23791 - protein, 9 aa, synthetic construct
  source 1..9: note = Seed: LVVVGARGV (KRAS G12R)
LVVDGIRGL

SEQ ID NO: 23792 - protein, 9 aa, synthetic construct
  source 1..9: note = Seed: LVVVGARGV (KRAS G12R)
LVVDGIRGV

SEQ ID NO: 23793 - protein, 9 aa, synthetic construct
  source 1..9: note = Seed: LVVVGARGV (KRAS G12R)
LVVDGNRGA

SEQ ID NO: 23794 - protein, 9 aa, synthetic construct
  source 1..9: note = Seed: LVVVGARGV (KRAS G12R)
LVVDGNRGF

SEQ ID NO: 23795 - protein, 9 aa, synthetic construct
  source 1..9: note = Seed: LVVVGARGV (KRAS G12R)
LVVDGNRGI

SEQ ID NO: 23796 - protein, 9 aa, synthetic construct
  source 1..9: note = Seed: LVVVGARGV (KRAS G12R)
LVVDGNRGL

SEQ ID NO: 23797 - protein, 9 aa, synthetic construct
  source 1..9: note = Seed: LVVVGARGV (KRAS G12R)
LVVDGNRGM

SEQ ID NO: 23798 - protein, 9 aa, synthetic construct
  source 1..9: note = Seed: LVVVGARGV (KRAS G12R)
LVVDGNRGV

SEQ ID NO: 23799 - protein, 9 aa, synthetic construct
  source 1..9: note = Seed: LVVVGARGV (KRAS G12R)
LVVDGNRGY

SEQ ID NO: 23800 - protein, 9 aa, synthetic construct
  source 1..9: note = Seed: LVVVGARGV (KRAS G12R)
LVVDGPRGI

SEQ ID NO: 23801 - protein, 9 aa, synthetic construct
  source 1..9: note = Seed: LVVVGARGV (KRAS G12R)
LVVDGPRGV

SEQ ID NO: 23802 - protein, 9 aa, synthetic construct
  source 1..9: note = Seed: LVVVGARGV (KRAS G12R)
LVVDGSRGF

SEQ ID NO: 23803 - protein, 9 aa, synthetic construct
  source 1..9: note = Seed: LVVVGARGV (KRAS G12R)
LVVDGSRGI

SEQ ID NO: 23804 - protein, 9 aa, synthetic construct
  source 1..9: note = Seed: LVVVGARGV (KRAS G12R)
LVVDGSRGL

SEQ ID NO: 23805 - protein, 9 aa, synthetic construct
  source 1..9: note = Seed: LVVVGARGV (KRAS G12R)
LVVDGSRGV

SEQ ID NO: 23806 - protein, 9 aa, synthetic construct
  source 1..9: note = Seed: LVVVGARGV (KRAS G12R)
LVVDGTRGI

SEQ ID NO: 23807 - protein, 9 aa, synthetic construct
  source 1..9: note = Seed: LVVVGARGV (KRAS G12R)
LVVDGTRGL

SEQ ID NO: 23808 - protein, 9 aa, synthetic construct
  source 1..9: note = Seed: LVVVGARGV (KRAS G12R)
LVVDGTRGV

SEQ ID NO: 23809 - protein, 9 aa, synthetic construct
  source 1..9: note = Seed: LVVVGARGV (KRAS G12R)
LVVDGVRGI

SEQ ID NO: 23810 - protein, 9 aa, synthetic construct
  source 1..9: note = Seed: LVVVGARGV (KRAS G12R)
LVVDGVRGL

SEQ ID NO: 23811 - protein, 9 aa, synthetic construct
  source 1..9: note = Seed: LVVVGARGV (KRAS G12R)
LVVDGVRGV

SEQ ID NO: 23812 - protein, 9 aa, synthetic construct
  source 1..9: note = Seed: LVVVGARGV (KRAS G12R)
LVVEGARGA

SEQ ID NO: 23813 - protein, 9 aa, synthetic construct
  source 1..9: note = Seed: LVVVGARGV (KRAS G12R)
LVVEGARGI

SEQ ID NO: 23814 - protein, 9 aa, synthetic construct
  source 1..9: note = Seed: LVVVGARGV (KRAS G12R)
LVVEGARGL

SEQ ID NO: 23815 - protein, 9 aa, synthetic construct
  source 1..9: note = Seed: LVVVGARGV (KRAS G12R)
LVVEGARGM

SEQ ID NO: 23816 - protein, 9 aa, synthetic construct
  source 1..9: note = Seed: LVVVGARGV (KRAS G12R)
LVVEGARGS

SEQ ID NO: 23817 - protein, 9 aa, synthetic construct
  source 1..9: note = Seed: LVVVGARGV (KRAS G12R)
LVVEGARGT

SEQ ID NO: 23818 - protein, 9 aa, synthetic construct
  source 1..9: note = Seed: LVVVGARGV (KRAS G12R)
LVVEGARGV

SEQ ID NO: 23819 - protein, 9 aa, synthetic construct
  source 1..9: note = Seed: LVVVGARGV (KRAS G12R)
LVVEGFRGF

SEQ ID NO: 23820 - protein, 9 aa, synthetic construct
  source 1..9: note = Seed: LVVVGARGV (KRAS G12R)
LVVEGFRGI

SEQ ID NO: 23821 - protein, 9 aa, synthetic construct
  source 1..9: note = Seed: LVVVGARGV (KRAS G12R)
LVVEGFRGL

SEQ ID NO: 23822 - protein, 9 aa, synthetic construct
  source 1..9: note = Seed: LVVVGARGV (KRAS G12R)
LVVEGFRGM

SEQ ID NO: 23823 - protein, 9 aa, synthetic construct
  source 1..9: note = Seed: LVVVGARGV (KRAS G12R)
LVVEGFRGV

SEQ ID NO: 23824 - protein, 9 aa, synthetic construct
  source 1..9: note = Seed: LVVVGARGV (KRAS G12R)
LVVEGGRGA

SEQ ID NO: 23825 - protein, 9 aa, synthetic construct
  source 1..9: note = Seed: LVVVGARGV (KRAS G12R)
LVVEGGRGI

SEQ ID NO: 23826 - protein, 9 aa, synthetic construct
  source 1..9: note = Seed: LVVVGARGV (KRAS G12R)
LVVEGGRGL

SEQ ID NO: 23827 - protein, 9 aa, synthetic construct
  source 1..9: note = Seed: LVVVGARGV (KRAS G12R)
LVVEGGRGM

SEQ ID NO: 23828 - protein, 9 aa, synthetic construct
  source 1..9: note = Seed: LVVVGARGV (KRAS G12R)
LVVEGGRGS

SEQ ID NO: 23829 - protein, 9 aa, synthetic construct
  source 1..9: note = Seed: LVVVGARGV (KRAS G12R)
LVVEGGRGT

SEQ ID NO: 23830 - protein, 9 aa, synthetic construct
  source 1..9: note = Seed: LVVVGARGV (KRAS G12R)
LVVEGGRGV

SEQ ID NO: 23831 - protein, 9 aa, synthetic construct
  source 1..9: note = Seed: LVVVGARGV (KRAS G12R)
LVVEGKRGA

SEQ ID NO: 23832 - protein, 9 aa, synthetic construct
  source 1..9: note = Seed: LVVVGARGV (KRAS G12R)
LVVEGKRGR

SEQ ID NO: 23833 - protein, 9 aa, synthetic construct
  source 1..9: note = Seed: LVVVGARGV (KRAS G12R)
LVVEGKRGS

SEQ ID NO: 23834 - protein, 9 aa, synthetic construct
  source 1..9: note = Seed: LVVVGARGV (KRAS G12R)
LVVEGNRGA

SEQ ID NO: 23835 - protein, 9 aa, synthetic construct
  source 1..9: note = Seed: LVVVGARGV (KRAS G12R)
LVVEGNRGI

SEQ ID NO: 23836 - protein, 9 aa, synthetic construct
  source 1..9: note = Seed: LVVVGARGV (KRAS G12R)
LVVEGNRGL

SEQ ID NO: 23837 - protein, 9 aa, synthetic construct
  source 1..9: note = Seed: LVVVGARGV (KRAS G12R)
LVVEGNRGV

SEQ ID NO: 23838 - protein, 9 aa, synthetic construct
  source 1..9: note = Seed: LVVVGARGV (KRAS G12R)
LVVEGPRGA

SEQ ID NO: 23839 - protein, 9 aa, synthetic construct
  source 1..9: note = Seed: LVVVGARGV (KRAS G12R)
LVVEGPRGI

SEQ ID NO: 23840 - protein, 9 aa, synthetic construct
  source 1..9: note = Seed: LVVVGARGV (KRAS G12R)
LVVEGPRGL

SEQ ID NO: 23841 - protein, 9 aa, synthetic construct
  source 1..9: note = Seed: LVVVGARGV (KRAS G12R)
LVVEGPRGV

SEQ ID NO: 23842 - protein, 9 aa, synthetic construct
  source 1..9: note = Seed: LVVVGARGV (KRAS G12R)
LVVEGRRGA

SEQ ID NO: 23843 - protein, 9 aa, synthetic construct
  source 1..9: note = Seed: LVVVGARGV (KRAS G12R)
LVVEGRRGF

SEQ ID NO: 23844 - protein, 9 aa, synthetic construct
  source 1..9: note = Seed: LVVVGARGV (KRAS G12R)
LVVEGRRGH

SEQ ID NO: 23845 - protein, 9 aa, synthetic construct
  source 1..9: note = Seed: LVVVGARGV (KRAS G12R)
LVVEGRRGI

SEQ ID NO: 23846 - protein, 9 aa, synthetic construct
  source 1..9: note = Seed: LVVVGARGV (KRAS G12R)
LVVEGRRGK

SEQ ID NO: 23847 - protein, 9 aa, synthetic construct
  source 1..9: note = Seed: LVVVGARGV (KRAS G12R)
LVVEGRRGL

SEQ ID NO: 23848 - protein, 9 aa, synthetic construct
  source 1..9: note = Seed: LVVVGARGV (KRAS G12R)
LVVEGRRGM

SEQ ID NO: 23849 - protein, 9 aa, synthetic construct
  source 1..9: note = Seed: LVVVGARGV (KRAS G12R)
LVVEGRRGQ

SEQ ID NO: 23850 - protein, 9 aa, synthetic construct
  source 1..9: note = Seed: LVVVGARGV (KRAS G12R)
LVVEGRRGR

SEQ ID NO: 23851 - protein, 9 aa, synthetic construct
  source 1..9: note = Seed: LVVVGARGV (KRAS G12R)
LVVEGRRGS

SEQ ID NO: 23852 - protein, 9 aa, synthetic construct
  source 1..9: note = Seed: LVVVGARGV (KRAS G12R)
LVVEGRRGT

SEQ ID NO: 23853 - protein, 9 aa, synthetic construct
  source 1..9: note = Seed: LVVVGARGV (KRAS G12R)
LVVEGRRGV

SEQ ID NO: 23854 - protein, 9 aa, synthetic construct
  source 1..9: note = Seed: LVVVGARGV (KRAS G12R)
LVVEGRRGY

SEQ ID NO: 23855 - protein, 9 aa, synthetic construct
  source 1..9: note = Seed: LVVVGARGV (KRAS G12R)
LVVEGSRGA

SEQ ID NO: 23856 - protein, 9 aa, synthetic construct
  source 1..9: note = Seed: LVVVGARGV (KRAS G12R)
LVVEGSRGI

SEQ ID NO: 23857 - protein, 9 aa, synthetic construct
  source 1..9: note = Seed: LVVVGARGV (KRAS G12R)
LVVEGSRGL

SEQ ID NO: 23858 - protein, 9 aa, synthetic construct
  source 1..9: note = Seed: LVVVGARGV (KRAS G12R)
LVVEGSRGM

SEQ ID NO: 23859 - protein, 9 aa, synthetic construct
  source 1..9: note = Seed: LVVVGARGV (KRAS G12R)
LVVEGSRGS

SEQ ID NO: 23860 - protein, 9 aa, synthetic construct
  source 1..9: note = Seed: LVVVGARGV (KRAS G12R)
LVVEGSRGT

SEQ ID NO: 23861 - protein, 9 aa, synthetic construct
  source 1..9: note = Seed: LVVVGARGV (KRAS G12R)
LVVEGSRGV

SEQ ID NO: 23862 - protein, 9 aa, synthetic construct
  source 1..9: note = Seed: LVVVGARGV (KRAS G12R)
LVVEGTRGI

SEQ ID NO: 23863 - protein, 9 aa, synthetic construct
  source 1..9: note = Seed: LVVVGARGV (KRAS G12R)
LVVEGTRGL

SEQ ID NO: 23864 - protein, 9 aa, synthetic construct
  source 1..9: note = Seed: LVVVGARGV (KRAS G12R)
LVVEGTRGV

SEQ ID NO: 23865 - protein, 9 aa, synthetic construct
  source 1..9: note = Seed: LVVVGARGV (KRAS G12R)
LVVEGVRGL

SEQ ID NO: 23866 - protein, 9 aa, synthetic construct
  source 1..9: note = Seed: LVVVGARGV (KRAS G12R)
LVVEGVRGV

SEQ ID NO: 23867 - protein, 9 aa, synthetic construct
  source 1..9: note = Seed: LVVVGARGV (KRAS G12R)
LVVFGARGA

SEQ ID NO: 23868 - protein, 9 aa, synthetic construct
  source 1..9: note = Seed: LVVVGARGV (KRAS G12R)
LVVFGARGF

SEQ ID NO: 23869 - protein, 9 aa, synthetic construct
  source 1..9: note = Seed: LVVVGARGV (KRAS G12R)
LVVFGARGH

SEQ ID NO: 23870 - protein, 9 aa, synthetic construct
  source 1..9: note = Seed: LVVVGARGV (KRAS G12R)
LVVFGARGI

SEQ ID NO: 23871 - protein, 9 aa, synthetic construct
  source 1..9: note = Seed: LVVVGARGV (KRAS G12R)
LVVFGARGK

SEQ ID NO: 23872 - protein, 9 aa, synthetic construct
  source 1..9: note = Seed: LVVVGARGV (KRAS G12R)
LVVFGARGL

SEQ ID NO: 23873 - protein, 9 aa, synthetic construct
  source 1..9: note = Seed: LVVVGARGV (KRAS G12R)
LVVFGARGM

SEQ ID NO: 23874 - protein, 9 aa, synthetic construct
  source 1..9: note = Seed: LVVVGARGV (KRAS G12R)
LVVFGARGQ

SEQ ID NO: 23875 - protein, 9 aa, synthetic construct
  source 1..9: note = Seed: LVVVGARGV (KRAS G12R)
LVVFGARGR

SEQ ID NO: 23876 - protein, 9 aa, synthetic construct
  source 1..9: note = Seed: LVVVGARGV (KRAS G12R)
LVVFGARGS

SEQ ID NO: 23877 - protein, 9 aa, synthetic construct
  source 1..9: note = Seed: LVVVGARGV (KRAS G12R)
LVVFGARGT

SEQ ID NO: 23878 - protein, 9 aa, synthetic construct
  source 1..9: note = Seed: LVVVGARGV (KRAS G12R)
LVVFGARGV

SEQ ID NO: 23879 - protein, 9 aa, synthetic construct
  source 1..9: note = Seed: LVVVGARGV (KRAS G12R)
LVVFGARGY

SEQ ID NO: 23880 - protein, 9 aa, synthetic construct
  source 1..9: note = Seed: LVVVGARGV (KRAS G12R)
LVVFGCRGR

SEQ ID NO: 23881 - protein, 9 aa, synthetic construct
  source 1..9: note = Seed: LVVVGARGV (KRAS G12R)
LVVFGDRGA

SEQ ID NO: 23882 - protein, 9 aa, synthetic construct
  source 1..9: note = Seed: LVVVGARGV (KRAS G12R)
LVVFGDRGF

SEQ ID NO: 23883 - protein, 9 aa, synthetic construct
  source 1..9: note = Seed: LVVVGARGV (KRAS G12R)
LVVFGDRGI

SEQ ID NO: 23884 - protein, 9 aa, synthetic construct
  source 1..9: note = Seed: LVVVGARGV (KRAS G12R)
LVVFGDRGL

SEQ ID NO: 23885 - protein, 9 aa, synthetic construct
  source 1..9: note = Seed: LVVVGARGV (KRAS G12R)
LVVFGDRGM

SEQ ID NO: 23886 - protein, 9 aa, synthetic construct
  source 1..9: note = Seed: LVVVGARGV (KRAS G12R)
LVVFGDRGV

SEQ ID NO: 23887 - protein, 9 aa, synthetic construct
  source 1..9: note = Seed: LVVVGARGV (KRAS G12R)
LVVFGERGR

SEQ ID NO: 23888 - protein, 9 aa, synthetic construct
  source 1..9: note = Seed: LVVVGARGV (KRAS G12R)
LVVFGFRGI

SEQ ID NO: 23889 - protein, 9 aa, synthetic construct
  source 1..9: note = Seed: LVVVGARGV (KRAS G12R)
LVVFGFRGL

SEQ ID NO: 23890 - protein, 9 aa, synthetic construct
  source 1..9: note = Seed: LVVVGARGV (KRAS G12R)
LVVFGFRGR

SEQ ID NO: 23891 - protein, 9 aa, synthetic construct
  source 1..9: note = Seed: LVVVGARGV (KRAS G12R)
LVVFGFRGV

SEQ ID NO: 23892 - protein, 9 aa, synthetic construct
  source 1..9: note = Seed: LVVVGARGV (KRAS G12R)
LVVFGGRGA

SEQ ID NO: 23893 - protein, 9 aa, synthetic construct
  source 1..9: note = Seed: LVVVGARGV (KRAS G12R)
LVVFGGRGF

SEQ ID NO: 23894 - protein, 9 aa, synthetic construct
  source 1..9: note = Seed: LVVVGARGV (KRAS G12R)
LVVFGGRGH

SEQ ID NO: 23895 - protein, 9 aa, synthetic construct
  source 1..9: note = Seed: LVVVGARGV (KRAS G12R)
LVVFGGRGI

SEQ ID NO: 23896 - protein, 9 aa, synthetic construct
  source 1..9: note = Seed: LVVVGARGV (KRAS G12R)
LVVFGGRGK

SEQ ID NO: 23897 - protein, 9 aa, synthetic construct
  source 1..9: note = Seed: LVVVGARGV (KRAS G12R)
LVVFGGRGL

SEQ ID NO: 23898 - protein, 9 aa, synthetic construct
  source 1..9: note = Seed: LVVVGARGV (KRAS G12R)
LVVFGGRGM

SEQ ID NO: 23899 - protein, 9 aa, synthetic construct
  source 1..9: note = Seed: LVVVGARGV (KRAS G12R)
LVVFGGRGR

SEQ ID NO: 23900 - protein, 9 aa, synthetic construct
  source 1..9: note = Seed: LVVVGARGV (KRAS G12R)
LVVFGGRGS

SEQ ID NO: 23901 - protein, 9 aa, synthetic construct
  source 1..9: note = Seed: LVVVGARGV (KRAS G12R)
LVVFGGRGT

SEQ ID NO: 23902 - protein, 9 aa, synthetic construct
  source 1..9: note = Seed: LVVVGARGV (KRAS G12R)
LVVFGGRGV

SEQ ID NO: 23903 - protein, 9 aa, synthetic construct
  source 1..9: note = Seed: LVVVGARGV (KRAS G12R)
LVVFGGRGY

SEQ ID NO: 23904 - protein, 9 aa, synthetic construct
  source 1..9: note = Seed: LVVVGARGV (KRAS G12R)
LVVFGHRGA

SEQ ID NO: 23905 - protein, 9 aa, synthetic construct
  source 1..9: note = Seed: LVVVGARGV (KRAS G12R)
LVVFGHRGF

SEQ ID NO: 23906 - protein, 9 aa, synthetic construct
  source 1..9: note = Seed: LVVVGARGV (KRAS G12R)
LVVFGHRGG

SEQ ID NO: 23907 - protein, 9 aa, synthetic construct
  source 1..9: note = Seed: LVVVGARGV (KRAS G12R)
LVVFGHRGH

SEQ ID NO: 23908 - protein, 9 aa, synthetic construct
  source 1..9: note = Seed: LVVVGARGV (KRAS G12R)
LVVFGHRGI

SEQ ID NO: 23909 - protein, 9 aa, synthetic construct
  source 1..9: note = Seed: LVVVGARGV (KRAS G12R)
LVVFGHRGK

SEQ ID NO: 23910 - protein, 9 aa, synthetic construct
  source 1..9: note = Seed: LVVVGARGV (KRAS G12R)
LVVFGHRGL

SEQ ID NO: 23911 - protein, 9 aa, synthetic construct
  source 1..9: note = Seed: LVVVGARGV (KRAS G12R)
LVVFGHRGM

SEQ ID NO: 23912 - protein, 9 aa, synthetic construct
  source 1..9: note = Seed: LVVVGARGV (KRAS G12R)
LVVFGHRGN

SEQ ID NO: 23913 - protein, 9 aa, synthetic construct
  source 1..9: note = Seed: LVVVGARGV (KRAS G12R)
LVVFGHRGQ

SEQ ID NO: 23914 - protein, 9 aa, synthetic construct
  source 1..9: note = Seed: LVVVGARGV (KRAS G12R)
LVVFGHRGR

SEQ ID NO: 23915 - protein, 9 aa, synthetic construct
  source 1..9: note = Seed: LVVVGARGV (KRAS G12R)
LVVFGHRGS

SEQ ID NO: 23916 - protein, 9 aa, synthetic construct
  source 1..9: note = Seed: LVVVGARGV (KRAS G12R)
LVVFGHRGT

SEQ ID NO: 23917 - protein, 9 aa, synthetic construct
  source 1..9: note = Seed: LVVVGARGV (KRAS G12R)
LVVFGHRGV

SEQ ID NO: 23918 - protein, 9 aa, synthetic construct
  source 1..9: note = Seed: LVVVGARGV (KRAS G12R)
LVVFGHRGY

SEQ ID NO: 23919 - protein, 9 aa, synthetic construct
  source 1..9: note = Seed: LVVVGARGV (KRAS G12R)
LVVFGIRGA

SEQ ID NO: 23920 - protein, 9 aa, synthetic construct
  source 1..9: note = Seed: LVVVGARGV (KRAS G12R)
LVVFGIRGF

SEQ ID NO: 23921 - protein, 9 aa, synthetic construct
  source 1..9: note = Seed: LVVVGARGV (KRAS G12R)
LVVFGIRGH

SEQ ID NO: 23922 - protein, 9 aa, synthetic construct
  source 1..9: note = Seed: LVVVGARGV (KRAS G12R)
LVVFGIRGI

SEQ ID NO: 23923 - protein, 9 aa, synthetic construct
  source 1..9: note = Seed: LVVVGARGV (KRAS G12R)
LVVFGIRGK

SEQ ID NO: 23924 - protein, 9 aa, synthetic construct
  source 1..9: note = Seed: LVVVGARGV (KRAS G12R)
LVVFGIRGL

SEQ ID NO: 23925 - protein, 9 aa, synthetic construct
  source 1..9: note = Seed: LVVVGARGV (KRAS G12R)
LVVFGIRGM

SEQ ID NO: 23926 - protein, 9 aa, synthetic construct
  source 1..9: note = Seed: LVVVGARGV (KRAS G12R)
LVVFGIRGQ

SEQ ID NO: 23927 - protein, 9 aa, synthetic construct
  source 1..9: note = Seed: LVVVGARGV (KRAS G12R)
LVVFGIRGR

SEQ ID NO: 23928 - protein, 9 aa, synthetic construct
  source 1..9: note = Seed: LVVVGARGV (KRAS G12R)
LVVFGIRGS

SEQ ID NO: 23929 - protein, 9 aa, synthetic construct
  source 1..9: note = Seed: LVVVGARGV (KRAS G12R)
LVVFGIRGV

SEQ ID NO: 23930 - protein, 9 aa, synthetic construct
  source 1..9: note = Seed: LVVVGARGV (KRAS G12R)
LVVFGIRGY

SEQ ID NO: 23931 - protein, 9 aa, synthetic construct
  source 1..9: note = Seed: LVVVGARGV (KRAS G12R)
LVVFGKRGA

SEQ ID NO: 23932 - protein, 9 aa, synthetic construct
  source 1..9: note = Seed: LVVVGARGV (KRAS G12R)
LVVFGKRGC

SEQ ID NO: 23933 - protein, 9 aa, synthetic construct
  source 1..9: note = Seed: LVVVGARGV (KRAS G12R)
LVVFGKRGE

SEQ ID NO: 23934 - protein, 9 aa, synthetic construct
  source 1..9: note = Seed: LVVVGARGV (KRAS G12R)
LVVFGKRGF

SEQ ID NO: 23935 - protein, 9 aa, synthetic construct
  source 1..9: note = Seed: LVVVGARGV (KRAS G12R)
LVVFGKRGG

SEQ ID NO: 23936 - protein, 9 aa, synthetic construct
  source 1..9: note = Seed: LVVVGARGV (KRAS G12R)
LVVFGKRGH

SEQ ID NO: 23937 - protein, 9 aa, synthetic construct
  source 1..9: note = Seed: LVVVGARGV (KRAS G12R)
LVVFGKRGI

SEQ ID NO: 23938 - protein, 9 aa, synthetic construct
  source 1..9: note = Seed: LVVVGARGV (KRAS G12R)
LVVFGKRGK

SEQ ID NO: 23939 - protein, 9 aa, synthetic construct
  source 1..9: note = Seed: LVVVGARGV (KRAS G12R)
LVVFGKRGL

SEQ ID NO: 23940 - protein, 9 aa, synthetic construct
  source 1..9: note = Seed: LVVVGARGV (KRAS G12R)
LVVFGKRGM

SEQ ID NO: 23941 - protein, 9 aa, synthetic construct
  source 1..9: note = Seed: LVVVGARGV (KRAS G12R)
LVVFGKRGN

SEQ ID NO: 23942 - protein, 9 aa, synthetic construct
  source 1..9: note = Seed: LVVVGARGV (KRAS G12R)
LVVFGKRGP

SEQ ID NO: 23943 - protein, 9 aa, synthetic construct
  source 1..9: note = Seed: LVVVGARGV (KRAS G12R)
LVVFGKRGQ

SEQ ID NO: 23944 - protein, 9 aa, synthetic construct
  source 1..9: note = Seed: LVVVGARGV (KRAS G12R)
LVVFGKRGR

SEQ ID NO: 23945 - protein, 9 aa, synthetic construct
  source 1..9: note = Seed: LVVVGARGV (KRAS G12R)
LVVFGKRGS

SEQ ID NO: 23946 - protein, 9 aa, synthetic construct
  source 1..9: note = Seed: LVVVGARGV (KRAS G12R)
LVVFGKRGT

SEQ ID NO: 23947 - protein, 9 aa, synthetic construct
  source 1..9: note = Seed: LVVVGARGV (KRAS G12R)
LVVFGKRGV

SEQ ID NO: 23948 - protein, 9 aa, synthetic construct
  source 1..9: note = Seed: LVVVGARGV (KRAS G12R)
LVVFGKRGW

SEQ ID NO: 23949 - protein, 9 aa, synthetic construct
  source 1..9: note = Seed: LVVVGARGV (KRAS G12R)
LVVFGKRGY

SEQ ID NO: 23950 - protein, 9 aa, synthetic construct
  source 1..9: note = Seed: LVVVGARGV (KRAS G12R)
LVVFGLRGA

SEQ ID NO: 23951 - protein, 9 aa, synthetic construct
  source 1..9: note = Seed: LVVVGARGV (KRAS G12R)
LVVFGLRGF

SEQ ID NO: 23952 - protein, 9 aa, synthetic construct
  source 1..9: note = Seed: LVVVGARGV (KRAS G12R)
LVVFGLRGH

SEQ ID NO: 23953 - protein, 9 aa, synthetic construct
  source 1..9: note = Seed: LVVVGARGV (KRAS G12R)
LVVFGLRGI

SEQ ID NO: 23954 - protein, 9 aa, synthetic construct
  source 1..9: note = Seed: LVVVGARGV (KRAS G12R)
LVVFGLRGK

SEQ ID NO: 23955 - protein, 9 aa, synthetic construct
  source 1..9: note = Seed: LVVVGARGV (KRAS G12R)
LVVFGLRGL

SEQ ID NO: 23956 - protein, 9 aa, synthetic construct
  source 1..9: note = Seed: LVVVGARGV (KRAS G12R)
LVVFGLRGM

SEQ ID NO: 23957 - protein, 9 aa, synthetic construct
  source 1..9: note = Seed: LVVVGARGV (KRAS G12R)
LVVFGLRGQ

SEQ ID NO: 23958 - protein, 9 aa, synthetic construct
  source 1..9: note = Seed: LVVVGARGV (KRAS G12R)
LVVFGLRGR

SEQ ID NO: 23959 - protein, 9 aa, synthetic construct
  source 1..9: note = Seed: LVVVGARGV (KRAS G12R)
LVVFGLRGS

SEQ ID NO: 23960 - protein, 9 aa, synthetic construct
  source 1..9: note = Seed: LVVVGARGV (KRAS G12R)
LVVFGLRGV

SEQ ID NO: 23961 - protein, 9 aa, synthetic construct
  source 1..9: note = Seed: LVVVGARGV (KRAS G12R)
LVVFGLRGY

SEQ ID NO: 23962 - protein, 9 aa, synthetic construct
  source 1..9: note = Seed: LVVVGARGV (KRAS G12R)
LVVFGMRGA

SEQ ID NO: 23963 - protein, 9 aa, synthetic construct
  source 1..9: note = Seed: LVVVGARGV (KRAS G12R)
LVVFGMRGF

SEQ ID NO: 23964 - protein, 9 aa, synthetic construct
  source 1..9: note = Seed: LVVVGARGV (KRAS G12R)
LVVFGMRGH

SEQ ID NO: 23965 - protein, 9 aa, synthetic construct
  source 1..9: note = Seed: LVVVGARGV (KRAS G12R)
LVVFGMRGI

SEQ ID NO: 23966 - protein, 9 aa, synthetic construct
  source 1..9: note = Seed: LVVVGARGV (KRAS G12R)
LVVFGMRGK

SEQ ID NO: 23967 - protein, 9 aa, synthetic construct
  source 1..9: note = Seed: LVVVGARGV (KRAS G12R)
LVVFGMRGL

SEQ ID NO: 23968 - protein, 9 aa, synthetic construct
  source 1..9: note = Seed: LVVVGARGV (KRAS G12R)
LVVFGMRGM

SEQ ID NO: 23969 - protein, 9 aa, synthetic construct
  source 1..9: note = Seed: LVVVGARGV (KRAS G12R)
LVVFGMRGQ

SEQ ID NO: 23970 - protein, 9 aa, synthetic construct
  source 1..9: note = Seed: LVVVGARGV (KRAS G12R)
LVVFGMRGR

SEQ ID NO: 23971 - protein, 9 aa, synthetic construct
  source 1..9: note = Seed: LVVVGARGV (KRAS G12R)
LVVFGMRGS

SEQ ID NO: 23972 - protein, 9 aa, synthetic construct
  source 1..9: note = Seed: LVVVGARGV (KRAS G12R)
LVVFGMRGV

SEQ ID NO: 23973 - protein, 9 aa, synthetic construct
  source 1..9: note = Seed: LVVVGARGV (KRAS G12R)
LVVFGMRGY

SEQ ID NO: 23974 - protein, 9 aa, synthetic construct
  source 1..9: note = Seed: LVVVGARGV (KRAS G12R)
LVVFGNRGA

SEQ ID NO: 23975 - protein, 9 aa, synthetic construct
  source 1..9: note = Seed: LVVVGARGV (KRAS G12R)
LVVFGNRGC

SEQ ID NO: 23976 - protein, 9 aa, synthetic construct
  source 1..9: note = Seed: LVVVGARGV (KRAS G12R)
LVVFGNRGE

SEQ ID NO: 23977 - protein, 9 aa, synthetic construct
  source 1..9: note = Seed: LVVVGARGV (KRAS G12R)
LVVFGNRGF

SEQ ID NO: 23978 - protein, 9 aa, synthetic construct
  source 1..9: note = Seed: LVVVGARGV (KRAS G12R)
LVVFGNRGG

SEQ ID NO: 23979 - protein, 9 aa, synthetic construct
  source 1..9: note = Seed: LVVVGARGV (KRAS G12R)
LVVFGNRGH

SEQ ID NO: 23980 - protein, 9 aa, synthetic construct
  source 1..9: note = Seed: LVVVGARGV (KRAS G12R)
LVVFGNRGI

SEQ ID NO: 23981 - protein, 9 aa, synthetic construct
  source 1..9: note = Seed: LVVVGARGV (KRAS G12R)
LVVFGNRGK

SEQ ID NO: 23982 - protein, 9 aa, synthetic construct
  source 1..9: note = Seed: LVVVGARGV (KRAS G12R)
LVVFGNRGL

SEQ ID NO: 23983 - protein, 9 aa, synthetic construct
  source 1..9: note = Seed: LVVVGARGV (KRAS G12R)
LVVFGNRGM

SEQ ID NO: 23984 - protein, 9 aa, synthetic construct
  source 1..9: note = Seed: LVVVGARGV (KRAS G12R)
LVVFGNRGN

SEQ ID NO: 23985 - protein, 9 aa, synthetic construct
  source 1..9: note = Seed: LVVVGARGV (KRAS G12R)
LVVFGNRGP

SEQ ID NO: 23986 - protein, 9 aa, synthetic construct
  source 1..9: note = Seed: LVVVGARGV (KRAS G12R)
LVVFGNRGQ

SEQ ID NO: 23987 - protein, 9 aa, synthetic construct
  source 1..9: note = Seed: LVVVGARGV (KRAS G12R)
LVVFGNRGR

SEQ ID NO: 23988 - protein, 9 aa, synthetic construct
  source 1..9: note = Seed: LVVVGARGV (KRAS G12R)
LVVFGNRGS

SEQ ID NO: 23989 - protein, 9 aa, synthetic construct
  source 1..9: note = Seed: LVVVGARGV (KRAS G12R)
LVVFGNRGT

SEQ ID NO: 23990 - protein, 9 aa, synthetic construct
  source 1..9: note = Seed: LVVVGARGV (KRAS G12R)
LVVFGNRGV

SEQ ID NO: 23991 - protein, 9 aa, synthetic construct
  source 1..9: note = Seed: LVVVGARGV (KRAS G12R)
LVVFGNRGW

SEQ ID NO: 23992 - protein, 9 aa, synthetic construct
  source 1..9: note = Seed: LVVVGARGV (KRAS G12R)
LVVFGNRGY

SEQ ID NO: 23993 - protein, 9 aa, synthetic construct
  source 1..9: note = Seed: LVVVGARGV (KRAS G12R)
LVVFGPRGA

SEQ ID NO: 23994 - protein, 9 aa, synthetic construct
  source 1..9: note = Seed: LVVVGARGV (KRAS G12R)
LVVFGPRGF

SEQ ID NO: 23995 - protein, 9 aa, synthetic construct
  source 1..9: note = Seed: LVVVGARGV (KRAS G12R)
LVVFGPRGH

SEQ ID NO: 23996 - protein, 9 aa, synthetic construct
  source 1..9: note = Seed: LVVVGARGV (KRAS G12R)
LVVFGPRGI

SEQ ID NO: 23997 - protein, 9 aa, synthetic construct
  source 1..9: note = Seed: LVVVGARGV (KRAS G12R)
LVVFGPRGK

SEQ ID NO: 23998 - protein, 9 aa, synthetic construct
  source 1..9: note = Seed: LVVVGARGV (KRAS G12R)
LVVFGPRGL

SEQ ID NO: 23999 - protein, 9 aa, synthetic construct
  source 1..9: note = Seed: LVVVGARGV (KRAS G12R)
LVVFGPRGM

SEQ ID NO: 24000 - protein, 9 aa, synthetic construct
  source 1..9: note = Seed: LVVVGARGV (KRAS G12R)
LVVFGPRGR

SEQ ID NO: 24001 - protein, 9 aa, synthetic construct
  source 1..9: note = Seed: LVVVGARGV (KRAS G12R)
LVVFGPRGS

SEQ ID NO: 24002 - protein, 9 aa, synthetic construct
  source 1..9: note = Seed: LVVVGARGV (KRAS G12R)
LVVFGPRGV

SEQ ID NO: 24003 - protein, 9 aa, synthetic construct
  source 1..9: note = Seed: LVVVGARGV (KRAS G12R)
LVVFGPRGY

SEQ ID NO: 24004 - protein, 9 aa, synthetic construct
  source 1..9: note = Seed: LVVVGARGV (KRAS G12R)
LVVFGQRGA

SEQ ID NO: 24005 - protein, 9 aa, synthetic construct
  source 1..9: note = Seed: LVVVGARGV (KRAS G12R)
LVVFGQRGF

SEQ ID NO: 24006 - protein, 9 aa, synthetic construct
  source 1..9: note = Seed: LVVVGARGV (KRAS G12R)
LVVFGQRGH

SEQ ID NO: 24007 - protein, 9 aa, synthetic construct
  source 1..9: note = Seed: LVVVGARGV (KRAS G12R)
LVVFGQRGI

SEQ ID NO: 24008 - protein, 9 aa, synthetic construct
  source 1..9: note = Seed: LVVVGARGV (KRAS G12R)
LVVFGQRGK

SEQ ID NO: 24009 - protein, 9 aa, synthetic construct
  source 1..9: note = Seed: LVVVGARGV (KRAS G12R)
LVVFGQRGL

SEQ ID NO: 24010 - protein, 9 aa, synthetic construct
  source 1..9: note = Seed: LVVVGARGV (KRAS G12R)
LVVFGQRGM

SEQ ID NO: 24011 - protein, 9 aa, synthetic construct
  source 1..9: note = Seed: LVVVGARGV (KRAS G12R)
LVVFGQRGR

SEQ ID NO: 24012 - protein, 9 aa, synthetic construct
  source 1..9: note = Seed: LVVVGARGV (KRAS G12R)
LVVFGQRGV

SEQ ID NO: 24013 - protein, 9 aa, synthetic construct
  source 1..9: note = Seed: LVVVGARGV (KRAS G12R)
LVVFGQRGY

SEQ ID NO: 24014 - protein, 9 aa, synthetic construct
  source 1..9: note = Seed: LVVVGARGV (KRAS G12R)
LVVFGRRGA

SEQ ID NO: 24015 - protein, 9 aa, synthetic construct
  source 1..9: note = Seed: LVVVGARGV (KRAS G12R)
LVVFGRRGC

SEQ ID NO: 24016 - protein, 9 aa, synthetic construct
  source 1..9: note = Seed: LVVVGARGV (KRAS G12R)
LVVFGRRGD

SEQ ID NO: 24017 - protein, 9 aa, synthetic construct
  source 1..9: note = Seed: LVVVGARGV (KRAS G12R)
LVVFGRRGE

SEQ ID NO: 24018 - protein, 9 aa, synthetic construct
  source 1..9: note = Seed: LVVVGARGV (KRAS G12R)
LVVFGRRGF

SEQ ID NO: 24019 - protein, 9 aa, synthetic construct
  source 1..9: note = Seed: LVVVGARGV (KRAS G12R)
LVVFGRRGG

SEQ ID NO: 24020 - protein, 9 aa, synthetic construct
  source 1..9: note = Seed: LVVVGARGV (KRAS G12R)
LVVFGRRGH

SEQ ID NO: 24021 - protein, 9 aa, synthetic construct
  source 1..9: note = Seed: LVVVGARGV (KRAS G12R)
LVVFGRRGI

SEQ ID NO: 24022 - protein, 9 aa, synthetic construct
  source 1..9: note = Seed: LVVVGARGV (KRAS G12R)
LVVFGRRGK

SEQ ID NO: 24023 - protein, 9 aa, synthetic construct
  source 1..9: note = Seed: LVVVGARGV (KRAS G12R)
LVVFGRRGL

SEQ ID NO: 24024 - protein, 9 aa, synthetic construct
  source 1..9: note = Seed: LVVVGARGV (KRAS G12R)
LVVFGRRGM

SEQ ID NO: 24025 - protein, 9 aa, synthetic construct
  source 1..9: note = Seed: LVVVGARGV (KRAS G12R)
LVVFGRRGN

SEQ ID NO: 24026 - protein, 9 aa, synthetic construct
  source 1..9: note = Seed: LVVVGARGV (KRAS G12R)
LVVFGRRGP

SEQ ID NO: 24027 - protein, 9 aa, synthetic construct
  source 1..9: note = Seed: LVVVGARGV (KRAS G12R)
LVVFGRRGQ

SEQ ID NO: 24028 - protein, 9 aa, synthetic construct
  source 1..9: note = Seed: LVVVGARGV (KRAS G12R)
LVVFGRRGR

SEQ ID NO: 24029 - protein, 9 aa, synthetic construct
  source 1..9: note = Seed: LVVVGARGV (KRAS G12R)
LVVFGRRGS

SEQ ID NO: 24030 - protein, 9 aa, synthetic construct
  source 1..9: note = Seed: LVVVGARGV (KRAS G12R)
LVVFGRRGT

SEQ ID NO: 24031 - protein, 9 aa, synthetic construct
  source 1..9: note = Seed: LVVVGARGV (KRAS G12R)
LVVFGRRGV

SEQ ID NO: 24032 - protein, 9 aa, synthetic construct
  source 1..9: note = Seed: LVVVGARGV (KRAS G12R)
LVVFGRRGW

SEQ ID NO: 24033 - protein, 9 aa, synthetic construct
  source 1..9: note = Seed: LVVVGARGV (KRAS G12R)
LVVFGRRGY

SEQ ID NO: 24034 - protein, 9 aa, synthetic construct
  source 1..9: note = Seed: LVVVGARGV (KRAS G12R)
LVVFGSRGA

SEQ ID NO: 24035 - protein, 9 aa, synthetic construct
  source 1..9: note = Seed: LVVVGARGV (KRAS G12R)
LVVFGSRGC

SEQ ID NO: 24036 - protein, 9 aa, synthetic construct
  source 1..9: note = Seed: LVVVGARGV (KRAS G12R)
LVVFGSRGE

SEQ ID NO: 24037 - protein, 9 aa, synthetic construct
  source 1..9: note = Seed: LVVVGARGV (KRAS G12R)
LVVFGSRGF

SEQ ID NO: 24038 - protein, 9 aa, synthetic construct
  source 1..9: note = Seed: LVVVGARGV (KRAS G12R)
LVVFGSRGG

SEQ ID NO: 24039 - protein, 9 aa, synthetic construct
  source 1..9: note = Seed: LVVVGARGV (KRAS G12R)
LVVFGSRGH

SEQ ID NO: 24040 - protein, 9 aa, synthetic construct
  source 1..9: note = Seed: LVVVGARGV (KRAS G12R)
LVVFGSRGI

SEQ ID NO: 24041 - protein, 9 aa, synthetic construct
  source 1..9: note = Seed: LVVVGARGV (KRAS G12R)
LVVFGSRGK

SEQ ID NO: 24042 - protein, 9 aa, synthetic construct
  source 1..9: note = Seed: LVVVGARGV (KRAS G12R)
LVVFGSRGL

SEQ ID NO: 24043 - protein, 9 aa, synthetic construct
  source 1..9: note = Seed: LVVVGARGV (KRAS G12R)
LVVFGSRGM

SEQ ID NO: 24044 - protein, 9 aa, synthetic construct
  source 1..9: note = Seed: LVVVGARGV (KRAS G12R)
LVVFGSRGN

SEQ ID NO: 24045 - protein, 9 aa, synthetic construct
  source 1..9: note = Seed: LVVVGARGV (KRAS G12R)
LVVFGSRGP

SEQ ID NO: 24046 - protein, 9 aa, synthetic construct
  source 1..9: note = Seed: LVVVGARGV (KRAS G12R)
LVVFGSRGQ

SEQ ID NO: 24047 - protein, 9 aa, synthetic construct
  source 1..9: note = Seed: LVVVGARGV (KRAS G12R)
LVVFGSRGR

SEQ ID NO: 24048 - protein, 9 aa, synthetic construct
  source 1..9: note = Seed: LVVVGARGV (KRAS G12R)
LVVFGSRGS

SEQ ID NO: 24049 - protein, 9 aa, synthetic construct
  source 1..9: note = Seed: LVVVGARGV (KRAS G12R)
LVVFGSRGT

SEQ ID NO: 24050 - protein, 9 aa, synthetic construct
  source 1..9: note = Seed: LVVVGARGV (KRAS G12R)
LVVFGSRGV

SEQ ID NO: 24051 - protein, 9 aa, synthetic construct
  source 1..9: note = Seed: LVVVGARGV (KRAS G12R)
LVVFGSRGW

SEQ ID NO: 24052 - protein, 9 aa, synthetic construct
  source 1..9: note = Seed: LVVVGARGV (KRAS G12R)
LVVFGSRGY

SEQ ID NO: 24053 - protein, 9 aa, synthetic construct
  source 1..9: note = Seed: LVVVGARGV (KRAS G12R)
LVVFGTRGA

SEQ ID NO: 24054 - protein, 9 aa, synthetic construct
  source 1..9: note = Seed: LVVVGARGV (KRAS G12R)
LVVFGTRGF

SEQ ID NO: 24055 - protein, 9 aa, synthetic construct
  source 1..9: note = Seed: LVVVGARGV (KRAS G12R)
LVVFGTRGH

SEQ ID NO: 24056 - protein, 9 aa, synthetic construct
  source 1..9: note = Seed: LVVVGARGV (KRAS G12R)
LVVFGTRGI

SEQ ID NO: 24057 - protein, 9 aa, synthetic construct
  source 1..9: note = Seed: LVVVGARGV (KRAS G12R)
LVVFGTRGK

SEQ ID NO: 24058 - protein, 9 aa, synthetic construct
  source 1..9: note = Seed: LVVVGARGV (KRAS G12R)
LVVFGTRGL

SEQ ID NO: 24059 - protein, 9 aa, synthetic construct
  source 1..9: note = Seed: LVVVGARGV (KRAS G12R)
LVVFGTRGM

SEQ ID NO: 24060 - protein, 9 aa, synthetic construct
  source 1..9: note = Seed: LVVVGARGV (KRAS G12R)
LVVFGTRGQ

SEQ ID NO: 24061 - protein, 9 aa, synthetic construct
  source 1..9: note = Seed: LVVVGARGV (KRAS G12R)
LVVFGTRGR

SEQ ID NO: 24062 - protein, 9 aa, synthetic construct
  source 1..9: note = Seed: LVVVGARGV (KRAS G12R)
LVVFGTRGS

SEQ ID NO: 24063 - protein, 9 aa, synthetic construct
  source 1..9: note = Seed: LVVVGARGV (KRAS G12R)
LVVFGTRGT

SEQ ID NO: 24064 - protein, 9 aa, synthetic construct
  source 1..9: note = Seed: LVVVGARGV (KRAS G12R)
LVVFGTRGV

SEQ ID NO: 24065 - protein, 9 aa, synthetic construct
  source 1..9: note = Seed: LVVVGARGV (KRAS G12R)
LVVFGTRGY

SEQ ID NO: 24066 - protein, 9 aa, synthetic construct
  source 1..9: note = Seed: LVVVGARGV (KRAS G12R)
LVVFGVRGA

SEQ ID NO: 24067 - protein, 9 aa, synthetic construct
  source 1..9: note = Seed: LVVVGARGV (KRAS G12R)
LVVFGVRGF

SEQ ID NO: 24068 - protein, 9 aa, synthetic construct
  source 1..9: note = Seed: LVVVGARGV (KRAS G12R)
LVVFGVRGH

SEQ ID NO: 24069 - protein, 9 aa, synthetic construct
  source 1..9: note = Seed: LVVVGARGV (KRAS G12R)
LVVFGVRGI

SEQ ID NO: 24070 - protein, 9 aa, synthetic construct
  source 1..9: note = Seed: LVVVGARGV (KRAS G12R)
LVVFGVRGK

SEQ ID NO: 24071 - protein, 9 aa, synthetic construct
  source 1..9: note = Seed: LVVVGARGV (KRAS G12R)
LVVFGVRGL

SEQ ID NO: 24072 - protein, 9 aa, synthetic construct
  source 1..9: note = Seed: LVVVGARGV (KRAS G12R)
LVVFGVRGM

SEQ ID NO: 24073 - protein, 9 aa, synthetic construct
  source 1..9: note = Seed: LVVVGARGV (KRAS G12R)
LVVFGVRGQ

SEQ ID NO: 24074 - protein, 9 aa, synthetic construct
  source 1..9: note = Seed: LVVVGARGV (KRAS G12R)
LVVFGVRGR

SEQ ID NO: 24075 - protein, 9 aa, synthetic construct
  source 1..9: note = Seed: LVVVGARGV (KRAS G12R)
LVVFGVRGS

SEQ ID NO: 24076 - protein, 9 aa, synthetic construct
  source 1..9: note = Seed: LVVVGARGV (KRAS G12R)
LVVFGVRGT

SEQ ID NO: 24077 - protein, 9 aa, synthetic construct
  source 1..9: note = Seed: LVVVGARGV (KRAS G12R)
LVVFGVRGV

SEQ ID NO: 24078 - protein, 9 aa, synthetic construct
  source 1..9: note = Seed: LVVVGARGV (KRAS G12R)
LVVFGVRGY

SEQ ID NO: 24079 - protein, 9 aa, synthetic construct
  source 1..9: note = Seed: LVVVGARGV (KRAS G12R)
LVVFGWRGR

SEQ ID NO: 24080 - protein, 9 aa, synthetic construct
  source 1..9: note = Seed: LVVVGARGV (KRAS G12R)
LVVFGYRGI

SEQ ID NO: 24081 - protein, 9 aa, synthetic construct
  source 1..9: note = Seed: LVVVGARGV (KRAS G12R)
LVVFGYRGL

SEQ ID NO: 24082 - protein, 9 aa, synthetic construct
  source 1..9: note = Seed: LVVVGARGV (KRAS G12R)
LVVFGYRGR

SEQ ID NO: 24083 - protein, 9 aa, synthetic construct
  source 1..9: note = Seed: LVVVGARGV (KRAS G12R)
LVVGGARGA

SEQ ID NO: 24084 - protein, 9 aa, synthetic construct
  source 1..9: note = Seed: LVVVGARGV (KRAS G12R)
LVVGGARGF

SEQ ID NO: 24085 - protein, 9 aa, synthetic construct
  source 1..9: note = Seed: LVVVGARGV (KRAS G12R)
LVVGGARGI

SEQ ID NO: 24086 - protein, 9 aa, synthetic construct
  source 1..9: note = Seed: LVVVGARGV (KRAS G12R)
LVVGGARGL

SEQ ID NO: 24087 - protein, 9 aa, synthetic construct
  source 1..9: note = Seed: LVVVGARGV (KRAS G12R)
LVVGGARGM

SEQ ID NO: 24088 - protein, 9 aa, synthetic construct
  source 1..9: note = Seed: LVVVGARGV (KRAS G12R)
LVVGGARGS

SEQ ID NO: 24089 - protein, 9 aa, synthetic construct
  source 1..9: note = Seed: LVVVGARGV (KRAS G12R)
LVVGGARGT

SEQ ID NO: 24090 - protein, 9 aa, synthetic construct
  source 1..9: note = Seed: LVVVGARGV (KRAS G12R)
LVVGGARGV

SEQ ID NO: 24091 - protein, 9 aa, synthetic construct
  source 1..9: note = Seed: LVVVGARGV (KRAS G12R)
LVVGGGRGI

SEQ ID NO: 24092 - protein, 9 aa, synthetic construct
  source 1..9: note = Seed: LVVVGARGV (KRAS G12R)
LVVGGGRGL

SEQ ID NO: 24093 - protein, 9 aa, synthetic construct
  source 1..9: note = Seed: LVVVGARGV (KRAS G12R)
LVVGGGRGM

SEQ ID NO: 24094 - protein, 9 aa, synthetic construct
  source 1..9: note = Seed: LVVVGARGV (KRAS G12R)
LVVGGGRGV

SEQ ID NO: 24095 - protein, 9 aa, synthetic construct
  source 1..9: note = Seed: LVVVGARGV (KRAS G12R)
LVVGGIRGA

SEQ ID NO: 24096 - protein, 9 aa, synthetic construct
  source 1..9: note = Seed: LVVVGARGV (KRAS G12R)
LVVGGIRGI

SEQ ID NO: 24097 - protein, 9 aa, synthetic construct
  source 1..9: note = Seed: LVVVGARGV (KRAS G12R)
LVVGGIRGL

SEQ ID NO: 24098 - protein, 9 aa, synthetic construct
  source 1..9: note = Seed: LVVVGARGV (KRAS G12R)
LVVGGIRGV

SEQ ID NO: 24099 - protein, 9 aa, synthetic construct
  source 1..9: note = Seed: LVVVGARGV (KRAS G12R)
LVVGGKRGL

SEQ ID NO: 24100 - protein, 9 aa, synthetic construct
  source 1..9: note = Seed: LVVVGARGV (KRAS G12R)
LVVGGKRGM

SEQ ID NO: 24101 - protein, 9 aa, synthetic construct
  source 1..9: note = Seed: LVVVGARGV (KRAS G12R)
LVVGGKRGR

SEQ ID NO: 24102 - protein, 9 aa, synthetic construct
  source 1..9: note = Seed: LVVVGARGV (KRAS G12R)
LVVGGLRGI

SEQ ID NO: 24103 - protein, 9 aa, synthetic construct
  source 1..9: note = Seed: LVVVGARGV (KRAS G12R)
LVVGGLRGL

SEQ ID NO: 24104 - protein, 9 aa, synthetic construct
  source 1..9: note = Seed: LVVVGARGV (KRAS G12R)
LVVGGLRGV

SEQ ID NO: 24105 - protein, 9 aa, synthetic construct
  source 1..9: note = Seed: LVVVGARGV (KRAS G12R)
LVVGGMRGI

SEQ ID NO: 24106 - protein, 9 aa, synthetic construct
  source 1..9: note = Seed: LVVVGARGV (KRAS G12R)
LVVGGMRGL

SEQ ID NO: 24107 - protein, 9 aa, synthetic construct
  source 1..9: note = Seed: LVVVGARGV (KRAS G12R)
LVVGGMRGV

SEQ ID NO: 24108 - protein, 9 aa, synthetic construct
  source 1..9: note = Seed: LVVVGARGV (KRAS G12R)
LVVGGNRGI

SEQ ID NO: 24109 - protein, 9 aa, synthetic construct
  source 1..9: note = Seed: LVVVGARGV (KRAS G12R)
LVVGGNRGL

SEQ ID NO: 24110 - protein, 9 aa, synthetic construct
  source 1..9: note = Seed: LVVVGARGV (KRAS G12R)
LVVGGNRGV

SEQ ID NO: 24111 - protein, 9 aa, synthetic construct
  source 1..9: note = Seed: LVVVGARGV (KRAS G12R)
LVVGGPRGI

SEQ ID NO: 24112 - protein, 9 aa, synthetic construct
  source 1..9: note = Seed: LVVVGARGV (KRAS G12R)
LVVGGPRGL

SEQ ID NO: 24113 - protein, 9 aa, synthetic construct
  source 1..9: note = Seed: LVVVGARGV (KRAS G12R)
LVVGGPRGV

SEQ ID NO: 24114 - protein, 9 aa, synthetic construct
  source 1..9: note = Seed: LVVVGARGV (KRAS G12R)
LVVGGRRGA

SEQ ID NO: 24115 - protein, 9 aa, synthetic construct
  source 1..9: note = Seed: LVVVGARGV (KRAS G12R)
LVVGGRRGF

SEQ ID NO: 24116 - protein, 9 aa, synthetic construct
  source 1..9: note = Seed: LVVVGARGV (KRAS G12R)
LVVGGRRGH

SEQ ID NO: 24117 - protein, 9 aa, synthetic construct
  source 1..9: note = Seed: LVVVGARGV (KRAS G12R)
LVVGGRRGI

SEQ ID NO: 24118 - protein, 9 aa, synthetic construct
  source 1..9: note = Seed: LVVVGARGV (KRAS G12R)
LVVGGRRGK

SEQ ID NO: 24119 - protein, 9 aa, synthetic construct
  source 1..9: note = Seed: LVVVGARGV (KRAS G12R)
LVVGGRRGL

SEQ ID NO: 24120 - protein, 9 aa, synthetic construct
  source 1..9: note = Seed: LVVVGARGV (KRAS G12R)
LVVGGRRGM

SEQ ID NO: 24121 - protein, 9 aa, synthetic construct
  source 1..9: note = Seed: LVVVGARGV (KRAS G12R)
LVVGGRRGQ

SEQ ID NO: 24122 - protein, 9 aa, synthetic construct
  source 1..9: note = Seed: LVVVGARGV (KRAS G12R)
LVVGGRRGR

SEQ ID NO: 24123 - protein, 9 aa, synthetic construct
  source 1..9: note = Seed: LVVVGARGV (KRAS G12R)
LVVGGRRGS

SEQ ID NO: 24124 - protein, 9 aa, synthetic construct
  source 1..9: note = Seed: LVVVGARGV (KRAS G12R)
LVVGGRRGV

SEQ ID NO: 24125 - protein, 9 aa, synthetic construct
  source 1..9: note = Seed: LVVVGARGV (KRAS G12R)
LVVGGRRGY

SEQ ID NO: 24126 - protein, 9 aa, synthetic construct
  source 1..9: note = Seed: LVVVGARGV (KRAS G12R)
LVVGGSRGA

SEQ ID NO: 24127 - protein, 9 aa, synthetic construct
  source 1..9: note = Seed: LVVVGARGV (KRAS G12R)
LVVGGSRGI

SEQ ID NO: 24128 - protein, 9 aa, synthetic construct
  source 1..9: note = Seed: LVVVGARGV (KRAS G12R)
LVVGGSRGL

SEQ ID NO: 24129 - protein, 9 aa, synthetic construct
  source 1..9: note = Seed: LVVVGARGV (KRAS G12R)
LVVGGSRGM

SEQ ID NO: 24130 - protein, 9 aa, synthetic construct
  source 1..9: note = Seed: LVVVGARGV (KRAS G12R)
LVVGGSRGV

SEQ ID NO: 24131 - protein, 9 aa, synthetic construct
  source 1..9: note = Seed: LVVVGARGV (KRAS G12R)
LVVGGTRGI

SEQ ID NO: 24132 - protein, 9 aa, synthetic construct
  source 1..9: note = Seed: LVVVGARGV (KRAS G12R)
LVVGGTRGL

SEQ ID NO: 24133 - protein, 9 aa, synthetic construct
  source 1..9: note = Seed: LVVVGARGV (KRAS G12R)
LVVGGTRGV

SEQ ID NO: 24134 - protein, 9 aa, synthetic construct
  source 1..9: note = Seed: LVVVGARGV (KRAS G12R)
LVVGGVRGA

SEQ ID NO: 24135 - protein, 9 aa, synthetic construct
  source 1..9: note = Seed: LVVVGARGV (KRAS G12R)
LVVGGVRGI

SEQ ID NO: 24136 - protein, 9 aa, synthetic construct
  source 1..9: note = Seed: LVVVGARGV (KRAS G12R)
LVVGGVRGL

SEQ ID NO: 24137 - protein, 9 aa, synthetic construct
  source 1..9: note = Seed: LVVVGARGV (KRAS G12R)
LVVGGVRGM

SEQ ID NO: 24138 - protein, 9 aa, synthetic construct
  source 1..9: note = Seed: LVVVGARGV (KRAS G12R)
LVVGGVRGV

SEQ ID NO: 24139 - protein, 9 aa, synthetic construct
  source 1..9: note = Seed: LVVVGARGV (KRAS G12R)
LVVHGARGA

SEQ ID NO: 24140 - protein, 9 aa, synthetic construct
  source 1..9: note = Seed: LVVVGARGV (KRAS G12R)
LVVHGARGF

SEQ ID NO: 24141 - protein, 9 aa, synthetic construct
  source 1..9: note = Seed: LVVVGARGV (KRAS G12R)
LVVHGARGH

SEQ ID NO: 24142 - protein, 9 aa, synthetic construct
  source 1..9: note = Seed: LVVVGARGV (KRAS G12R)
LVVHGARGI

SEQ ID NO: 24143 - protein, 9 aa, synthetic construct
  source 1..9: note = Seed: LVVVGARGV (KRAS G12R)
LVVHGARGK

SEQ ID NO: 24144 - protein, 9 aa, synthetic construct
  source 1..9: note = Seed: LVVVGARGV (KRAS G12R)
LVVHGARGL

SEQ ID NO: 24145 - protein, 9 aa, synthetic construct
  source 1..9: note = Seed: LVVVGARGV (KRAS G12R)
LVVHGARGM

SEQ ID NO: 24146 - protein, 9 aa, synthetic construct
  source 1..9: note = Seed: LVVVGARGV (KRAS G12R)
LVVHGARGR

SEQ ID NO: 24147 - protein, 9 aa, synthetic construct
  source 1..9: note = Seed: LVVVGARGV (KRAS G12R)
LVVHGARGV

SEQ ID NO: 24148 - protein, 9 aa, synthetic construct
  source 1..9: note = Seed: LVVVGARGV (KRAS G12R)
LVVHGARGW

SEQ ID NO: 24149 - protein, 9 aa, synthetic construct
  source 1..9: note = Seed: LVVVGARGV (KRAS G12R)
LVVHGARGY

SEQ ID NO: 24150 - protein, 9 aa, synthetic construct
  source 1..9: note = Seed: LVVVGARGV (KRAS G12R)
LVVHGCRGR

SEQ ID NO: 24151 - protein, 9 aa, synthetic construct
  source 1..9: note = Seed: LVVVGARGV (KRAS G12R)
LVVHGFRGF

SEQ ID NO: 24152 - protein, 9 aa, synthetic construct
  source 1..9: note = Seed: LVVVGARGV (KRAS G12R)
LVVHGFRGI

SEQ ID NO: 24153 - protein, 9 aa, synthetic construct
  source 1..9: note = Seed: LVVVGARGV (KRAS G12R)
LVVHGFRGL

SEQ ID NO: 24154 - protein, 9 aa, synthetic construct
  source 1..9: note = Seed: LVVVGARGV (KRAS G12R)
LVVHGFRGR

SEQ ID NO: 24155 - protein, 9 aa, synthetic construct
  source 1..9: note = Seed: LVVVGARGV (KRAS G12R)
LVVHGFRGV

SEQ ID NO: 24156 - protein, 9 aa, synthetic construct
  source 1..9: note = Seed: LVVVGARGV (KRAS G12R)
LVVHGFRGY

SEQ ID NO: 24157 - protein, 9 aa, synthetic construct
  source 1..9: note = Seed: LVVVGARGV (KRAS G12R)
LVVHGGRGF

SEQ ID NO: 24158 - protein, 9 aa, synthetic construct
  source 1..9: note = Seed: LVVVGARGV (KRAS G12R)
LVVHGGRGI

SEQ ID NO: 24159 - protein, 9 aa, synthetic construct
  source 1..9: note = Seed: LVVVGARGV (KRAS G12R)
LVVHGGRGL

SEQ ID NO: 24160 - protein, 9 aa, synthetic construct
  source 1..9: note = Seed: LVVVGARGV (KRAS G12R)
LVVHGGRGM

SEQ ID NO: 24161 - protein, 9 aa, synthetic construct
  source 1..9: note = Seed: LVVVGARGV (KRAS G12R)
LVVHGGRGR

SEQ ID NO: 24162 - protein, 9 aa, synthetic construct
  source 1..9: note = Seed: LVVVGARGV (KRAS G12R)
LVVHGGRGV

SEQ ID NO: 24163 - protein, 9 aa, synthetic construct
  source 1..9: note = Seed: LVVVGARGV (KRAS G12R)
LVVHGGRGY

SEQ ID NO: 24164 - protein, 9 aa, synthetic construct
  source 1..9: note = Seed: LVVVGARGV (KRAS G12R)
LVVHGHRGA

SEQ ID NO: 24165 - protein, 9 aa, synthetic construct
  source 1..9: note = Seed: LVVVGARGV (KRAS G12R)
LVVHGHRGF

SEQ ID NO: 24166 - protein, 9 aa, synthetic construct
  source 1..9: note = Seed: LVVVGARGV (KRAS G12R)
LVVHGHRGH

SEQ ID NO: 24167 - protein, 9 aa, synthetic construct
  source 1..9: note = Seed: LVVVGARGV (KRAS G12R)
LVVHGHRGI

SEQ ID NO: 24168 - protein, 9 aa, synthetic construct
  source 1..9: note = Seed: LVVVGARGV (KRAS G12R)
LVVHGHRGK

SEQ ID NO: 24169 - protein, 9 aa, synthetic construct
  source 1..9: note = Seed: LVVVGARGV (KRAS G12R)
LVVHGHRGL

SEQ ID NO: 24170 - protein, 9 aa, synthetic construct
  source 1..9: note = Seed: LVVVGARGV (KRAS G12R)
LVVHGHRGM

SEQ ID NO: 24171 - protein, 9 aa, synthetic construct
  source 1..9: note = Seed: LVVVGARGV (KRAS G12R)
LVVHGHRGQ

SEQ ID NO: 24172 - protein, 9 aa, synthetic construct
  source 1..9: note = Seed: LVVVGARGV (KRAS G12R)
LVVHGHRGR

SEQ ID NO: 24173 - protein, 9 aa, synthetic construct
  source 1..9: note = Seed: LVVVGARGV (KRAS G12R)
LVVHGHRGS

SEQ ID NO: 24174 - protein, 9 aa, synthetic construct
  source 1..9: note = Seed: LVVVGARGV (KRAS G12R)
LVVHGHRGV

SEQ ID NO: 24175 - protein, 9 aa, synthetic construct
  source 1..9: note = Seed: LVVVGARGV (KRAS G12R)
LVVHGHRGY

SEQ ID NO: 24176 - protein, 9 aa, synthetic construct
  source 1..9: note = Seed: LVVVGARGV (KRAS G12R)
LVVHGIRGA

SEQ ID NO: 24177 - protein, 9 aa, synthetic construct
  source 1..9: note = Seed: LVVVGARGV (KRAS G12R)
LVVHGIRGF

SEQ ID NO: 24178 - protein, 9 aa, synthetic construct
  source 1..9: note = Seed: LVVVGARGV (KRAS G12R)
LVVHGIRGH

SEQ ID NO: 24179 - protein, 9 aa, synthetic construct
  source 1..9: note = Seed: LVVVGARGV (KRAS G12R)
LVVHGIRGI

SEQ ID NO: 24180 - protein, 9 aa, synthetic construct
  source 1..9: note = Seed: LVVVGARGV (KRAS G12R)
LVVHGIRGK

SEQ ID NO: 24181 - protein, 9 aa, synthetic construct
  source 1..9: note = Seed: LVVVGARGV (KRAS G12R)
LVVHGIRGL

SEQ ID NO: 24182 - protein, 9 aa, synthetic construct
  source 1..9: note = Seed: LVVVGARGV (KRAS G12R)
LVVHGIRGM

SEQ ID NO: 24183 - protein, 9 aa, synthetic construct
  source 1..9: note = Seed: LVVVGARGV (KRAS G12R)
LVVHGIRGQ

SEQ ID NO: 24184 - protein, 9 aa, synthetic construct
  source 1..9: note = Seed: LVVVGARGV (KRAS G12R)
LVVHGIRGR

SEQ ID NO: 24185 - protein, 9 aa, synthetic construct
  source 1..9: note = Seed: LVVVGARGV (KRAS G12R)
LVVHGIRGV

SEQ ID NO: 24186 - protein, 9 aa, synthetic construct
  source 1..9: note = Seed: LVVVGARGV (KRAS G12R)
LVVHGIRGW

SEQ ID NO: 24187 - protein, 9 aa, synthetic construct
  source 1..9: note = Seed: LVVVGARGV (KRAS G12R)
LVVHGIRGY

SEQ ID NO: 24188 - protein, 9 aa, synthetic construct
  source 1..9: note = Seed: LVVVGARGV (KRAS G12R)
LVVHGKRGA

SEQ ID NO: 24189 - protein, 9 aa, synthetic construct
  source 1..9: note = Seed: LVVVGARGV (KRAS G12R)
LVVHGKRGF

SEQ ID NO: 24190 - protein, 9 aa, synthetic construct
  source 1..9: note = Seed: LVVVGARGV (KRAS G12R)
LVVHGKRGG

SEQ ID NO: 24191 - protein, 9 aa, synthetic construct
  source 1..9: note = Seed: LVVVGARGV (KRAS G12R)
LVVHGKRGH

SEQ ID NO: 24192 - protein, 9 aa, synthetic construct
  source 1..9: note = Seed: LVVVGARGV (KRAS G12R)
LVVHGKRGI

SEQ ID NO: 24193 - protein, 9 aa, synthetic construct
  source 1..9: note = Seed: LVVVGARGV (KRAS G12R)
LVVHGKRGK

SEQ ID NO: 24194 - protein, 9 aa, synthetic construct
  source 1..9: note = Seed: LVVVGARGV (KRAS G12R)
LVVHGKRGL

SEQ ID NO: 24195 - protein, 9 aa, synthetic construct
  source 1..9: note = Seed: LVVVGARGV (KRAS G12R)
LVVHGKRGM

SEQ ID NO: 24196 - protein, 9 aa, synthetic construct
  source 1..9: note = Seed: LVVVGARGV (KRAS G12R)
LVVHGKRGN

SEQ ID NO: 24197 - protein, 9 aa, synthetic construct
  source 1..9: note = Seed: LVVVGARGV (KRAS G12R)
LVVHGKRGP

SEQ ID NO: 24198 - protein, 9 aa, synthetic construct
  source 1..9: note = Seed: LVVVGARGV (KRAS G12R)
LVVHGKRGQ

SEQ ID NO: 24199 - protein, 9 aa, synthetic construct
  source 1..9: note = Seed: LVVVGARGV (KRAS G12R)
LVVHGKRGR

SEQ ID NO: 24200 - protein, 9 aa, synthetic construct
  source 1..9: note = Seed: LVVVGARGV (KRAS G12R)
LVVHGKRGS

SEQ ID NO: 24201 - protein, 9 aa, synthetic construct
  source 1..9: note = Seed: LVVVGARGV (KRAS G12R)
LVVHGKRGT

SEQ ID NO: 24202 - protein, 9 aa, synthetic construct
  source 1..9: note = Seed: LVVVGARGV (KRAS G12R)
LVVHGKRGV

SEQ ID NO: 24203 - protein, 9 aa, synthetic construct
  source 1..9: note = Seed: LVVVGARGV (KRAS G12R)
LVVHGKRGW

SEQ ID NO: 24204 - protein, 9 aa, synthetic construct
  source 1..9: note = Seed: LVVVGARGV (KRAS G12R)
LVVHGKRGY

SEQ ID NO: 24205 - protein, 9 aa, synthetic construct
  source 1..9: note = Seed: LVVVGARGV (KRAS G12R)
LVVHGLRGA

SEQ ID NO: 24206 - protein, 9 aa, synthetic construct
  source 1..9: note = Seed: LVVVGARGV (KRAS G12R)
LVVHGLRGF

SEQ ID NO: 24207 - protein, 9 aa, synthetic construct
  source 1..9: note = Seed: LVVVGARGV (KRAS G12R)
LVVHGLRGH

SEQ ID NO: 24208 - protein, 9 aa, synthetic construct
  source 1..9: note = Seed: LVVVGARGV (KRAS G12R)
LVVHGLRGI

SEQ ID NO: 24209 - protein, 9 aa, synthetic construct
  source 1..9: note = Seed: LVVVGARGV (KRAS G12R)
LVVHGLRGK

SEQ ID NO: 24210 - protein, 9 aa, synthetic construct
  source 1..9: note = Seed: LVVVGARGV (KRAS G12R)
LVVHGLRGL

SEQ ID NO: 24211 - protein, 9 aa, synthetic construct
  source 1..9: note = Seed: LVVVGARGV (KRAS G12R)
LVVHGLRGM

SEQ ID NO: 24212 - protein, 9 aa, synthetic construct
  source 1..9: note = Seed: LVVVGARGV (KRAS G12R)
LVVHGLRGQ

SEQ ID NO: 24213 - protein, 9 aa, synthetic construct
  source 1..9: note = Seed: LVVVGARGV (KRAS G12R)
LVVHGLRGR

SEQ ID NO: 24214 - protein, 9 aa, synthetic construct
  source 1..9: note = Seed: LVVVGARGV (KRAS G12R)
LVVHGLRGS

SEQ ID NO: 24215 - protein, 9 aa, synthetic construct
  source 1..9: note = Seed: LVVVGARGV (KRAS G12R)
LVVHGLRGV

SEQ ID NO: 24216 - protein, 9 aa, synthetic construct
  source 1..9: note = Seed: LVVVGARGV (KRAS G12R)
LVVHGLRGW

SEQ ID NO: 24217 - protein, 9 aa, synthetic construct
  source 1..9: note = Seed: LVVVGARGV (KRAS G12R)
LVVHGLRGY

SEQ ID NO: 24218 - protein, 9 aa, synthetic construct
  source 1..9: note = Seed: LVVVGARGV (KRAS G12R)
LVVHGMRGA

SEQ ID NO: 24219 - protein, 9 aa, synthetic construct
  source 1..9: note = Seed: LVVVGARGV (KRAS G12R)
LVVHGMRGF

SEQ ID NO: 24220 - protein, 9 aa, synthetic construct
  source 1..9: note = Seed: LVVVGARGV (KRAS G12R)
LVVHGMRGH

SEQ ID NO: 24221 - protein, 9 aa, synthetic construct
  source 1..9: note = Seed: LVVVGARGV (KRAS G12R)
LVVHGMRGI

SEQ ID NO: 24222 - protein, 9 aa, synthetic construct
  source 1..9: note = Seed: LVVVGARGV (KRAS G12R)
LVVHGMRGK

SEQ ID NO: 24223 - protein, 9 aa, synthetic construct
  source 1..9: note = Seed: LVVVGARGV (KRAS G12R)
LVVHGMRGL

SEQ ID NO: 24224 - protein, 9 aa, synthetic construct
  source 1..9: note = Seed: LVVVGARGV (KRAS G12R)
LVVHGMRGM

SEQ ID NO: 24225 - protein, 9 aa, synthetic construct
  source 1..9: note = Seed: LVVVGARGV (KRAS G12R)
LVVHGMRGQ

SEQ ID NO: 24226 - protein, 9 aa, synthetic construct
  source 1..9: note = Seed: LVVVGARGV (KRAS G12R)
LVVHGMRGR

SEQ ID NO: 24227 - protein, 9 aa, synthetic construct
  source 1..9: note = Seed: LVVVGARGV (KRAS G12R)
LVVHGMRGV

SEQ ID NO: 24228 - protein, 9 aa, synthetic construct
  source 1..9: note = Seed: LVVVGARGV (KRAS G12R)
LVVHGMRGY

SEQ ID NO: 24229 - protein, 9 aa, synthetic construct
  source 1..9: note = Seed: LVVVGARGV (KRAS G12R)
LVVHGNRGA

SEQ ID NO: 24230 - protein, 9 aa, synthetic construct
  source 1..9: note = Seed: LVVVGARGV (KRAS G12R)
LVVHGNRGF

SEQ ID NO: 24231 - protein, 9 aa, synthetic construct
  source 1..9: note = Seed: LVVVGARGV (KRAS G12R)
LVVHGNRGI

SEQ ID NO: 24232 - protein, 9 aa, synthetic construct
  source 1..9: note = Seed: LVVVGARGV (KRAS G12R)
LVVHGNRGK

SEQ ID NO: 24233 - protein, 9 aa, synthetic construct
  source 1..9: note = Seed: LVVVGARGV (KRAS G12R)
LVVHGNRGL

SEQ ID NO: 24234 - protein, 9 aa, synthetic construct
  source 1..9: note = Seed: LVVVGARGV (KRAS G12R)
LVVHGNRGM

SEQ ID NO: 24235 - protein, 9 aa, synthetic construct
  source 1..9: note = Seed: LVVVGARGV (KRAS G12R)
LVVHGNRGR

SEQ ID NO: 24236 - protein, 9 aa, synthetic construct
  source 1..9: note = Seed: LVVVGARGV (KRAS G12R)
LVVHGNRGV

SEQ ID NO: 24237 - protein, 9 aa, synthetic construct
  source 1..9: note = Seed: LVVVGARGV (KRAS G12R)
LVVHGNRGY

SEQ ID NO: 24238 - protein, 9 aa, synthetic construct
  source 1..9: note = Seed: LVVVGARGV (KRAS G12R)
LVVHGPRGF

SEQ ID NO: 24239 - protein, 9 aa, synthetic construct
  source 1..9: note = Seed: LVVVGARGV (KRAS G12R)
LVVHGPRGI

SEQ ID NO: 24240 - protein, 9 aa, synthetic construct
  source 1..9: note = Seed: LVVVGARGV (KRAS G12R)
LVVHGPRGK

SEQ ID NO: 24241 - protein, 9 aa, synthetic construct
  source 1..9: note = Seed: LVVVGARGV (KRAS G12R)
LVVHGPRGL

SEQ ID NO: 24242 - protein, 9 aa, synthetic construct
  source 1..9: note = Seed: LVVVGARGV (KRAS G12R)
LVVHGPRGR

SEQ ID NO: 24243 - protein, 9 aa, synthetic construct
  source 1..9: note = Seed: LVVVGARGV (KRAS G12R)
LVVHGPRGY

SEQ ID NO: 24244 - protein, 9 aa, synthetic construct
  source 1..9: note = Seed: LVVVGARGV (KRAS G12R)
LVVHGQRGF

SEQ ID NO: 24245 - protein, 9 aa, synthetic construct
  source 1..9: note = Seed: LVVVGARGV (KRAS G12R)
LVVHGQRGI

SEQ ID NO: 24246 - protein, 9 aa, synthetic construct
  source 1..9: note = Seed: LVVVGARGV (KRAS G12R)
LVVHGQRGK

SEQ ID NO: 24247 - protein, 9 aa, synthetic construct
  source 1..9: note = Seed: LVVVGARGV (KRAS G12R)
LVVHGQRGL

SEQ ID NO: 24248 - protein, 9 aa, synthetic construct
  source 1..9: note = Seed: LVVVGARGV (KRAS G12R)
LVVHGQRGR

SEQ ID NO: 24249 - protein, 9 aa, synthetic construct
  source 1..9: note = Seed: LVVVGARGV (KRAS G12R)
LVVHGRRGA

SEQ ID NO: 24250 - protein, 9 aa, synthetic construct
  source 1..9: note = Seed: LVVVGARGV (KRAS G12R)
LVVHGRRGC

SEQ ID NO: 24251 - protein, 9 aa, synthetic construct
  source 1..9: note = Seed: LVVVGARGV (KRAS G12R)
LVVHGRRGF

SEQ ID NO: 24252 - protein, 9 aa, synthetic construct
  source 1..9: note = Seed: LVVVGARGV (KRAS G12R)
LVVHGRRGG

SEQ ID NO: 24253 - protein, 9 aa, synthetic construct
  source 1..9: note = Seed: LVVVGARGV (KRAS G12R)
LVVHGRRGH

SEQ ID NO: 24254 - protein, 9 aa, synthetic construct
  source 1..9: note = Seed: LVVVGARGV (KRAS G12R)
LVVHGRRGI

SEQ ID NO: 24255 - protein, 9 aa, synthetic construct
  source 1..9: note = Seed: LVVVGARGV (KRAS G12R)
LVVHGRRGK

SEQ ID NO: 24256 - protein, 9 aa, synthetic construct
  source 1..9: note = Seed: LVVVGARGV (KRAS G12R)
LVVHGRRGL

SEQ ID NO: 24257 - protein, 9 aa, synthetic construct
  source 1..9: note = Seed: LVVVGARGV (KRAS G12R)
LVVHGRRGM

SEQ ID NO: 24258 - protein, 9 aa, synthetic construct
  source 1..9: note = Seed: LVVVGARGV (KRAS G12R)
LVVHGRRGN

SEQ ID NO: 24259 - protein, 9 aa, synthetic construct
  source 1..9: note = Seed: LVVVGARGV (KRAS G12R)
LVVHGRRGP

SEQ ID NO: 24260 - protein, 9 aa, synthetic construct
  source 1..9: note = Seed: LVVVGARGV (KRAS G12R)
LVVHGRRGQ

SEQ ID NO: 24261 - protein, 9 aa, synthetic construct
  source 1..9: note = Seed: LVVVGARGV (KRAS G12R)
LVVHGRRGR

SEQ ID NO: 24262 - protein, 9 aa, synthetic construct
  source 1..9: note = Seed: LVVVGARGV (KRAS G12R)
LVVHGRRGS

SEQ ID NO: 24263 - protein, 9 aa, synthetic construct
  source 1..9: note = Seed: LVVVGARGV (KRAS G12R)
LVVHGRRGT

SEQ ID NO: 24264 - protein, 9 aa, synthetic construct
  source 1..9: note = Seed: LVVVGARGV (KRAS G12R)
LVVHGRRGV

SEQ ID NO: 24265 - protein, 9 aa, synthetic construct
  source 1..9: note = Seed: LVVVGARGV (KRAS G12R)
LVVHGRRGW

SEQ ID NO: 24266 - protein, 9 aa, synthetic construct
  source 1..9: note = Seed: LVVVGARGV (KRAS G12R)
LVVHGRRGY

SEQ ID NO: 24267 - protein, 9 aa, synthetic construct
  source 1..9: note = Seed: LVVVGARGV (KRAS G12R)
LVVHGSRGA

SEQ ID NO: 24268 - protein, 9 aa, synthetic construct
  source 1..9: note = Seed: LVVVGARGV (KRAS G12R)
LVVHGSRGF

SEQ ID NO: 24269 - protein, 9 aa, synthetic construct
  source 1..9: note = Seed: LVVVGARGV (KRAS G12R)
LVVHGSRGH

SEQ ID NO: 24270 - protein, 9 aa, synthetic construct
  source 1..9: note = Seed: LVVVGARGV (KRAS G12R)
LVVHGSRGI

SEQ ID NO: 24271 - protein, 9 aa, synthetic construct
  source 1..9: note = Seed: LVVVGARGV (KRAS G12R)
LVVHGSRGK

SEQ ID NO: 24272 - protein, 9 aa, synthetic construct
  source 1..9: note = Seed: LVVVGARGV (KRAS G12R)
LVVHGSRGL

SEQ ID NO: 24273 - protein, 9 aa, synthetic construct
  source 1..9: note = Seed: LVVVGARGV (KRAS G12R)
LVVHGSRGM

SEQ ID NO: 24274 - protein, 9 aa, synthetic construct
  source 1..9: note = Seed: LVVVGARGV (KRAS G12R)
LVVHGSRGR

SEQ ID NO: 24275 - protein, 9 aa, synthetic construct
  source 1..9: note = Seed: LVVVGARGV (KRAS G12R)
LVVHGSRGV

SEQ ID NO: 24276 - protein, 9 aa, synthetic construct
  source 1..9: note = Seed: LVVVGARGV (KRAS G12R)
LVVHGSRGW

SEQ ID NO: 24277 - protein, 9 aa, synthetic construct
  source 1..9: note = Seed: LVVVGARGV (KRAS G12R)
LVVHGSRGY

SEQ ID NO: 24278 - protein, 9 aa, synthetic construct
  source 1..9: note = Seed: LVVVGARGV (KRAS G12R)
LVVHGTRGA

SEQ ID NO: 24279 - protein, 9 aa, synthetic construct
  source 1..9: note = Seed: LVVVGARGV (KRAS G12R)
LVVHGTRGF

SEQ ID NO: 24280 - protein, 9 aa, synthetic construct
  source 1..9: note = Seed: LVVVGARGV (KRAS G12R)
LVVHGTRGH

SEQ ID NO: 24281 - protein, 9 aa, synthetic construct
  source 1..9: note = Seed: LVVVGARGV (KRAS G12R)
LVVHGTRGI

SEQ ID NO: 24282 - protein, 9 aa, synthetic construct
  source 1..9: note = Seed: LVVVGARGV (KRAS G12R)
LVVHGTRGK

SEQ ID NO: 24283 - protein, 9 aa, synthetic construct
  source 1..9: note = Seed: LVVVGARGV (KRAS G12R)
LVVHGTRGL

SEQ ID NO: 24284 - protein, 9 aa, synthetic construct
  source 1..9: note = Seed: LVVVGARGV (KRAS G12R)
LVVHGTRGM

SEQ ID NO: 24285 - protein, 9 aa, synthetic construct
  source 1..9: note = Seed: LVVVGARGV (KRAS G12R)
LVVHGTRGR

SEQ ID NO: 24286 - protein, 9 aa, synthetic construct
  source 1..9: note = Seed: LVVVGARGV (KRAS G12R)
LVVHGTRGV

SEQ ID NO: 24287 - protein, 9 aa, synthetic construct
  source 1..9: note = Seed: LVVVGARGV (KRAS G12R)
LVVHGTRGY

SEQ ID NO: 24288 - protein, 9 aa, synthetic construct
  source 1..9: note = Seed: LVVVGARGV (KRAS G12R)
LVVHGVRGA

SEQ ID NO: 24289 - protein, 9 aa, synthetic construct
  source 1..9: note = Seed: LVVVGARGV (KRAS G12R)
LVVHGVRGF

SEQ ID NO: 24290 - protein, 9 aa, synthetic construct
  source 1..9: note = Seed: LVVVGARGV (KRAS G12R)
LVVHGVRGH

SEQ ID NO: 24291 - protein, 9 aa, synthetic construct
  source 1..9: note = Seed: LVVVGARGV (KRAS G12R)
LVVHGVRGI

SEQ ID NO: 24292 - protein, 9 aa, synthetic construct
  source 1..9: note = Seed: LVVVGARGV (KRAS G12R)
LVVHGVRGK

SEQ ID NO: 24293 - protein, 9 aa, synthetic construct
  source 1..9: note = Seed: LVVVGARGV (KRAS G12R)
LVVHGVRGL

SEQ ID NO: 24294 - protein, 9 aa, synthetic construct
  source 1..9: note = Seed: LVVVGARGV (KRAS G12R)
LVVHGVRGM

SEQ ID NO: 24295 - protein, 9 aa, synthetic construct
  source 1..9: note = Seed: LVVVGARGV (KRAS G12R)
LVVHGVRGR

SEQ ID NO: 24296 - protein, 9 aa, synthetic construct
  source 1..9: note = Seed: LVVVGARGV (KRAS G12R)
LVVHGVRGV

SEQ ID NO: 24297 - protein, 9 aa, synthetic construct
  source 1..9: note = Seed: LVVVGARGV (KRAS G12R)
LVVHGVRGW

SEQ ID NO: 24298 - protein, 9 aa, synthetic construct
  source 1..9: note = Seed: LVVVGARGV (KRAS G12R)
LVVHGVRGY

SEQ ID NO: 24299 - protein, 9 aa, synthetic construct
  source 1..9: note = Seed: LVVVGARGV (KRAS G12R)
LVVHGWRGF

SEQ ID NO: 24300 - protein, 9 aa, synthetic construct
  source 1..9: note = Seed: LVVVGARGV (KRAS G12R)
LVVHGWRGR

SEQ ID NO: 24301 - protein, 9 aa, synthetic construct
  source 1..9: note = Seed: LVVVGARGV (KRAS G12R)
LVVHGWRGY

SEQ ID NO: 24302 - protein, 9 aa, synthetic construct
  source 1..9: note = Seed: LVVVGARGV (KRAS G12R)
LVVHGYRGR

SEQ ID NO: 24303 - protein, 9 aa, synthetic construct
  source 1..9: note = Seed: LVVVGARGV (KRAS G12R)
LVVIGARGA

SEQ ID NO: 24304 - protein, 9 aa, synthetic construct
  source 1..9: note = Seed: LVVVGARGV (KRAS G12R)
LVVIGARGC

SEQ ID NO: 24305 - protein, 9 aa, synthetic construct
  source 1..9: note = Seed: LVVVGARGV (KRAS G12R)
LVVIGARGF

SEQ ID NO: 24306 - protein, 9 aa, synthetic construct
  source 1..9: note = Seed: LVVVGARGV (KRAS G12R)
LVVIGARGG

SEQ ID NO: 24307 - protein, 9 aa, synthetic construct
  source 1..9: note = Seed: LVVVGARGV (KRAS G12R)
LVVIGARGH

SEQ ID NO: 24308 - protein, 9 aa, synthetic construct
  source 1..9: note = Seed: LVVVGARGV (KRAS G12R)
LVVIGARGI

SEQ ID NO: 24309 - protein, 9 aa, synthetic construct
  source 1..9: note = Seed: LVVVGARGV (KRAS G12R)
LVVIGARGK

SEQ ID NO: 24310 - protein, 9 aa, synthetic construct
  source 1..9: note = Seed: LVVVGARGV (KRAS G12R)
LVVIGARGL

SEQ ID NO: 24311 - protein, 9 aa, synthetic construct
  source 1..9: note = Seed: LVVVGARGV (KRAS G12R)
LVVIGARGM

SEQ ID NO: 24312 - protein, 9 aa, synthetic construct
  source 1..9: note = Seed: LVVVGARGV (KRAS G12R)
LVVIGARGN

SEQ ID NO: 24313 - protein, 9 aa, synthetic construct
  source 1..9: note = Seed: LVVVGARGV (KRAS G12R)
LVVIGARGP

SEQ ID NO: 24314 - protein, 9 aa, synthetic construct
  source 1..9: note = Seed: LVVVGARGV (KRAS G12R)
LVVIGARGQ

SEQ ID NO: 24315 - protein, 9 aa, synthetic construct
  source 1..9: note = Seed: LVVVGARGV (KRAS G12R)
LVVIGARGR

SEQ ID NO: 24316 - protein, 9 aa, synthetic construct
  source 1..9: note = Seed: LVVVGARGV (KRAS G12R)
LVVIGARGS

SEQ ID NO: 24317 - protein, 9 aa, synthetic construct
  source 1..9: note = Seed: LVVVGARGV (KRAS G12R)
LVVIGARGT

SEQ ID NO: 24318 - protein, 9 aa, synthetic construct
  source 1..9: note = Seed: LVVVGARGV (KRAS G12R)
LVVIGARGV

SEQ ID NO: 24319 - protein, 9 aa, synthetic construct
  source 1..9: note = Seed: LVVVGARGV (KRAS G12R)
LVVIGARGW

SEQ ID NO: 24320 - protein, 9 aa, synthetic construct
  source 1..9: note = Seed: LVVVGARGV (KRAS G12R)
LVVIGARGY

SEQ ID NO: 24321 - protein, 9 aa, synthetic construct
  source 1..9: note = Seed: LVVVGARGV (KRAS G12R)
LVVIGCRGR

SEQ ID NO: 24322 - protein, 9 aa, synthetic construct
  source 1..9: note = Seed: LVVVGARGV (KRAS G12R)
LVVIGERGR

SEQ ID NO: 24323 - protein, 9 aa, synthetic construct
  source 1..9: note = Seed: LVVVGARGV (KRAS G12R)
LVVIGFRGF

SEQ ID NO: 24324 - protein, 9 aa, synthetic construct
  source 1..9: note = Seed: LVVVGARGV (KRAS G12R)
LVVIGFRGI

SEQ ID NO: 24325 - protein, 9 aa, synthetic construct
  source 1..9: note = Seed: LVVVGARGV (KRAS G12R)
LVVIGFRGL

SEQ ID NO: 24326 - protein, 9 aa, synthetic construct
  source 1..9: note = Seed: LVVVGARGV (KRAS G12R)
LVVIGFRGM

SEQ ID NO: 24327 - protein, 9 aa, synthetic construct
  source 1..9: note = Seed: LVVVGARGV (KRAS G12R)
LVVIGFRGR

SEQ ID NO: 24328 - protein, 9 aa, synthetic construct
  source 1..9: note = Seed: LVVVGARGV (KRAS G12R)
LVVIGFRGV

SEQ ID NO: 24329 - protein, 9 aa, synthetic construct
  source 1..9: note = Seed: LVVVGARGV (KRAS G12R)
LVVIGFRGY

SEQ ID NO: 24330 - protein, 9 aa, synthetic construct
  source 1..9: note = Seed: LVVVGARGV (KRAS G12R)
LVVIGGRGA

SEQ ID NO: 24331 - protein, 9 aa, synthetic construct
  source 1..9: note = Seed: LVVVGARGV (KRAS G12R)
LVVIGGRGC

SEQ ID NO: 24332 - protein, 9 aa, synthetic construct
  source 1..9: note = Seed: LVVVGARGV (KRAS G12R)
LVVIGGRGF

SEQ ID NO: 24333 - protein, 9 aa, synthetic construct
  source 1..9: note = Seed: LVVVGARGV (KRAS G12R)
LVVIGGRGG

SEQ ID NO: 24334 - protein, 9 aa, synthetic construct
  source 1..9: note = Seed: LVVVGARGV (KRAS G12R)
LVVIGGRGH

SEQ ID NO: 24335 - protein, 9 aa, synthetic construct
  source 1..9: note = Seed: LVVVGARGV (KRAS G12R)
LVVIGGRGI

SEQ ID NO: 24336 - protein, 9 aa, synthetic construct
  source 1..9: note = Seed: LVVVGARGV (KRAS G12R)
LVVIGGRGK

SEQ ID NO: 24337 - protein, 9 aa, synthetic construct
  source 1..9: note = Seed: LVVVGARGV (KRAS G12R)
LVVIGGRGL

SEQ ID NO: 24338 - protein, 9 aa, synthetic construct
  source 1..9: note = Seed: LVVVGARGV (KRAS G12R)
LVVIGGRGM

SEQ ID NO: 24339 - protein, 9 aa, synthetic construct
  source 1..9: note = Seed: LVVVGARGV (KRAS G12R)
LVVIGGRGN

SEQ ID NO: 24340 - protein, 9 aa, synthetic construct
  source 1..9: note = Seed: LVVVGARGV (KRAS G12R)
LVVIGGRGP

SEQ ID NO: 24341 - protein, 9 aa, synthetic construct
  source 1..9: note = Seed: LVVVGARGV (KRAS G12R)
LVVIGGRGR

SEQ ID NO: 24342 - protein, 9 aa, synthetic construct
  source 1..9: note = Seed: LVVVGARGV (KRAS G12R)
LVVIGGRGS

SEQ ID NO: 24343 - protein, 9 aa, synthetic construct
  source 1..9: note = Seed: LVVVGARGV (KRAS G12R)
LVVIGGRGT

SEQ ID NO: 24344 - protein, 9 aa, synthetic construct
  source 1..9: note = Seed: LVVVGARGV (KRAS G12R)
LVVIGGRGV

SEQ ID NO: 24345 - protein, 9 aa, synthetic construct
  source 1..9: note = Seed: LVVVGARGV (KRAS G12R)
LVVIGGRGY

SEQ ID NO: 24346 - protein, 9 aa, synthetic construct
  source 1..9: note = Seed: LVVVGARGV (KRAS G12R)
LVVIGHRGA

SEQ ID NO: 24347 - protein, 9 aa, synthetic construct
  source 1..9: note = Seed: LVVVGARGV (KRAS G12R)
LVVIGHRGC

SEQ ID NO: 24348 - protein, 9 aa, synthetic construct
  source 1..9: note = Seed: LVVVGARGV (KRAS G12R)
LVVIGHRGF

SEQ ID NO: 24349 - protein, 9 aa, synthetic construct
  source 1..9: note = Seed: LVVVGARGV (KRAS G12R)
LVVIGHRGG

SEQ ID NO: 24350 - protein, 9 aa, synthetic construct
  source 1..9: note = Seed: LVVVGARGV (KRAS G12R)
LVVIGHRGH

SEQ ID NO: 24351 - protein, 9 aa, synthetic construct
  source 1..9: note = Seed: LVVVGARGV (KRAS G12R)
LVVIGHRGI

SEQ ID NO: 24352 - protein, 9 aa, synthetic construct
  source 1..9: note = Seed: LVVVGARGV (KRAS G12R)
LVVIGHRGK

SEQ ID NO: 24353 - protein, 9 aa, synthetic construct
  source 1..9: note = Seed: LVVVGARGV (KRAS G12R)
LVVIGHRGL

SEQ ID NO: 24354 - protein, 9 aa, synthetic construct
  source 1..9: note = Seed: LVVVGARGV (KRAS G12R)
LVVIGHRGM

SEQ ID NO: 24355 - protein, 9 aa, synthetic construct
  source 1..9: note = Seed: LVVVGARGV (KRAS G12R)
LVVIGHRGN

SEQ ID NO: 24356 - protein, 9 aa, synthetic construct
  source 1..9: note = Seed: LVVVGARGV (KRAS G12R)
LVVIGHRGP

SEQ ID NO: 24357 - protein, 9 aa, synthetic construct
  source 1..9: note = Seed: LVVVGARGV (KRAS G12R)
LVVIGHRGQ

SEQ ID NO: 24358 - protein, 9 aa, synthetic construct
  source 1..9: note = Seed: LVVVGARGV (KRAS G12R)
LVVIGHRGR

SEQ ID NO: 24359 - protein, 9 aa, synthetic construct
  source 1..9: note = Seed: LVVVGARGV (KRAS G12R)
LVVIGHRGS

SEQ ID NO: 24360 - protein, 9 aa, synthetic construct
  source 1..9: note = Seed: LVVVGARGV (KRAS G12R)
LVVIGHRGT

SEQ ID NO: 24361 - protein, 9 aa, synthetic construct
  source 1..9: note = Seed: LVVVGARGV (KRAS G12R)
LVVIGHRGV

SEQ ID NO: 24362 - protein, 9 aa, synthetic construct
  source 1..9: note = Seed: LVVVGARGV (KRAS G12R)
LVVIGHRGW

SEQ ID NO: 24363 - protein, 9 aa, synthetic construct
  source 1..9: note = Seed: LVVVGARGV (KRAS G12R)
LVVIGHRGY

SEQ ID NO: 24364 - protein, 9 aa, synthetic construct
  source 1..9: note = Seed: LVVVGARGV (KRAS G12R)
LVVIGIRGA

SEQ ID NO: 24365 - protein, 9 aa, synthetic construct
  source 1..9: note = Seed: LVVVGARGV (KRAS G12R)
LVVIGIRGF

SEQ ID NO: 24366 - protein, 9 aa, synthetic construct
  source 1..9: note = Seed: LVVVGARGV (KRAS G12R)
LVVIGIRGG

SEQ ID NO: 24367 - protein, 9 aa, synthetic construct
  source 1..9: note = Seed: LVVVGARGV (KRAS G12R)
LVVIGIRGH

SEQ ID NO: 24368 - protein, 9 aa, synthetic construct
  source 1..9: note = Seed: LVVVGARGV (KRAS G12R)
LVVIGIRGI

SEQ ID NO: 24369 - protein, 9 aa, synthetic construct
  source 1..9: note = Seed: LVVVGARGV (KRAS G12R)
LVVIGIRGK

SEQ ID NO: 24370 - protein, 9 aa, synthetic construct
  source 1..9: note = Seed: LVVVGARGV (KRAS G12R)
LVVIGIRGL

SEQ ID NO: 24371 - protein, 9 aa, synthetic construct
  source 1..9: note = Seed: LVVVGARGV (KRAS G12R)
LVVIGIRGM

SEQ ID NO: 24372 - protein, 9 aa, synthetic construct
  source 1..9: note = Seed: LVVVGARGV (KRAS G12R)
LVVIGIRGN

SEQ ID NO: 24373 - protein, 9 aa, synthetic construct
  source 1..9: note = Seed: LVVVGARGV (KRAS G12R)
LVVIGIRGQ

SEQ ID NO: 24374 - protein, 9 aa, synthetic construct
  source 1..9: note = Seed: LVVVGARGV (KRAS G12R)
LVVIGIRGR

SEQ ID NO: 24375 - protein, 9 aa, synthetic construct
  source 1..9: note = Seed: LVVVGARGV (KRAS G12R)
LVVIGIRGS

SEQ ID NO: 24376 - protein, 9 aa, synthetic construct
  source 1..9: note = Seed: LVVVGARGV (KRAS G12R)
LVVIGIRGT

SEQ ID NO: 24377 - protein, 9 aa, synthetic construct
  source 1..9: note = Seed: LVVVGARGV (KRAS G12R)
LVVIGIRGV

SEQ ID NO: 24378 - protein, 9 aa, synthetic construct
  source 1..9: note = Seed: LVVVGARGV (KRAS G12R)
LVVIGIRGY

SEQ ID NO: 24379 - protein, 9 aa, synthetic construct
  source 1..9: note = Seed: LVVVGARGV (KRAS G12R)
LVVIGKRGA

SEQ ID NO: 24380 - protein, 9 aa, synthetic construct
  source 1..9: note = Seed: LVVVGARGV (KRAS G12R)
LVVIGKRGC

SEQ ID NO: 24381 - protein, 9 aa, synthetic construct
  source 1..9: note = Seed: LVVVGARGV (KRAS G12R)
LVVIGKRGD

SEQ ID NO: 24382 - protein, 9 aa, synthetic construct
  source 1..9: note = Seed: LVVVGARGV (KRAS G12R)
LVVIGKRGE

SEQ ID NO: 24383 - protein, 9 aa, synthetic construct
  source 1..9: note = Seed: LVVVGARGV (KRAS G12R)
LVVIGKRGF

SEQ ID NO: 24384 - protein, 9 aa, synthetic construct
  source 1..9: note = Seed: LVVVGARGV (KRAS G12R)
LVVIGKRGG

SEQ ID NO: 24385 - protein, 9 aa, synthetic construct
  source 1..9: note = Seed: LVVVGARGV (KRAS G12R)
LVVIGKRGH

SEQ ID NO: 24386 - protein, 9 aa, synthetic construct
  source 1..9: note = Seed: LVVVGARGV (KRAS G12R)
LVVIGKRGI

SEQ ID NO: 24387 - protein, 9 aa, synthetic construct
  source 1..9: note = Seed: LVVVGARGV (KRAS G12R)
LVVIGKRGK

SEQ ID NO: 24388 - protein, 9 aa, synthetic construct
  source 1..9: note = Seed: LVVVGARGV (KRAS G12R)
LVVIGKRGL

SEQ ID NO: 24389 - protein, 9 aa, synthetic construct
  source 1..9: note = Seed: LVVVGARGV (KRAS G12R)
LVVIGKRGM

SEQ ID NO: 24390 - protein, 9 aa, synthetic construct
  source 1..9: note = Seed: LVVVGARGV (KRAS G12R)
LVVIGKRGN

SEQ ID NO: 24391 - protein, 9 aa, synthetic construct
  source 1..9: note = Seed: LVVVGARGV (KRAS G12R)
LVVIGKRGP

SEQ ID NO: 24392 - protein, 9 aa, synthetic construct
  source 1..9: note = Seed: LVVVGARGV (KRAS G12R)
LVVIGKRGQ

SEQ ID NO: 24393 - protein, 9 aa, synthetic construct
  source 1..9: note = Seed: LVVVGARGV (KRAS G12R)
LVVIGKRGR

SEQ ID NO: 24394 - protein, 9 aa, synthetic construct
  source 1..9: note = Seed: LVVVGARGV (KRAS G12R)
LVVIGKRGS

SEQ ID NO: 24395 - protein, 9 aa, synthetic construct
  source 1..9: note = Seed: LVVVGARGV (KRAS G12R)
LVVIGKRGT

SEQ ID NO: 24396 - protein, 9 aa, synthetic construct
  source 1..9: note = Seed: LVVVGARGV (KRAS G12R)
LVVIGKRGV

SEQ ID NO: 24397 - protein, 9 aa, synthetic construct
  source 1..9: note = Seed: LVVVGARGV (KRAS G12R)
LVVIGKRGW

SEQ ID NO: 24398 - protein, 9 aa, synthetic construct
  source 1..9: note = Seed: LVVVGARGV (KRAS G12R)
LVVIGKRGY

SEQ ID NO: 24399 - protein, 9 aa, synthetic construct
  source 1..9: note = Seed: LVVVGARGV (KRAS G12R)
LVVIGLRGA

SEQ ID NO: 24400 - protein, 9 aa, synthetic construct
  source 1..9: note = Seed: LVVVGARGV (KRAS G12R)
LVVIGLRGF

SEQ ID NO: 24401 - protein, 9 aa, synthetic construct
  source 1..9: note = Seed: LVVVGARGV (KRAS G12R)
LVVIGLRGG

SEQ ID NO: 24402 - protein, 9 aa, synthetic construct
  source 1..9: note = Seed: LVVVGARGV (KRAS G12R)
LVVIGLRGI

SEQ ID NO: 24403 - protein, 9 aa, synthetic construct
  source 1..9: note = Seed: LVVVGARGV (KRAS G12R)
LVVIGLRGK

SEQ ID NO: 24404 - protein, 9 aa, synthetic construct
  source 1..9: note = Seed: LVVVGARGV (KRAS G12R)
LVVIGLRGL

SEQ ID NO: 24405 - protein, 9 aa, synthetic construct
  source 1..9: note = Seed: LVVVGARGV (KRAS G12R)
LVVIGLRGM

SEQ ID NO: 24406 - protein, 9 aa, synthetic construct
  source 1..9: note = Seed: LVVVGARGV (KRAS G12R)
LVVIGLRGQ

SEQ ID NO: 24407 - protein, 9 aa, synthetic construct
  source 1..9: note = Seed: LVVVGARGV (KRAS G12R)
LVVIGLRGR

SEQ ID NO: 24408 - protein, 9 aa, synthetic construct
  source 1..9: note = Seed: LVVVGARGV (KRAS G12R)
LVVIGLRGS

SEQ ID NO: 24409 - protein, 9 aa, synthetic construct
  source 1..9: note = Seed: LVVVGARGV (KRAS G12R)
LVVIGLRGV

SEQ ID NO: 24410 - protein, 9 aa, synthetic construct
  source 1..9: note = Seed: LVVVGARGV (KRAS G12R)
LVVIGLRGY

SEQ ID NO: 24411 - protein, 9 aa, synthetic construct
  source 1..9: note = Seed: LVVVGARGV (KRAS G12R)
LVVIGMRGA

SEQ ID NO: 24412 - protein, 9 aa, synthetic construct
  source 1..9: note = Seed: LVVVGARGV (KRAS G12R)
LVVIGMRGC

SEQ ID NO: 24413 - protein, 9 aa, synthetic construct
  source 1..9: note = Seed: LVVVGARGV (KRAS G12R)
LVVIGMRGF

SEQ ID NO: 24414 - protein, 9 aa, synthetic construct
  source 1..9: note = Seed: LVVVGARGV (KRAS G12R)
LVVIGMRGG

SEQ ID NO: 24415 - protein, 9 aa, synthetic construct
  source 1..9: note = Seed: LVVVGARGV (KRAS G12R)
LVVIGMRGI

SEQ ID NO: 24416 - protein, 9 aa, synthetic construct
  source 1..9: note = Seed: LVVVGARGV (KRAS G12R)
LVVIGMRGK

SEQ ID NO: 24417 - protein, 9 aa, synthetic construct
  source 1..9: note = Seed: LVVVGARGV (KRAS G12R)
LVVIGMRGL

SEQ ID NO: 24418 - protein, 9 aa, synthetic construct
  source 1..9: note = Seed: LVVVGARGV (KRAS G12R)
LVVIGMRGM

SEQ ID NO: 24419 - protein, 9 aa, synthetic construct
  source 1..9: note = Seed: LVVVGARGV (KRAS G12R)
LVVIGMRGQ

SEQ ID NO: 24420 - protein, 9 aa, synthetic construct
  source 1..9: note = Seed: LVVVGARGV (KRAS G12R)
LVVIGMRGR

SEQ ID NO: 24421 - protein, 9 aa, synthetic construct
  source 1..9: note = Seed: LVVVGARGV (KRAS G12R)
LVVIGMRGS

SEQ ID NO: 24422 - protein, 9 aa, synthetic construct
  source 1..9: note = Seed: LVVVGARGV (KRAS G12R)
LVVIGMRGV

SEQ ID NO: 24423 - protein, 9 aa, synthetic construct
  source 1..9: note = Seed: LVVVGARGV (KRAS G12R)
LVVIGMRGY

SEQ ID NO: 24424 - protein, 9 aa, synthetic construct
  source 1..9: note = Seed: LVVVGARGV (KRAS G12R)
LVVIGNRGA

SEQ ID NO: 24425 - protein, 9 aa, synthetic construct
  source 1..9: note = Seed: LVVVGARGV (KRAS G12R)
LVVIGNRGF

SEQ ID NO: 24426 - protein, 9 aa, synthetic construct
  source 1..9: note = Seed: LVVVGARGV (KRAS G12R)
LVVIGNRGG

SEQ ID NO: 24427 - protein, 9 aa, synthetic construct
  source 1..9: note = Seed: LVVVGARGV (KRAS G12R)
LVVIGNRGH

SEQ ID NO: 24428 - protein, 9 aa, synthetic construct
  source 1..9: note = Seed: LVVVGARGV (KRAS G12R)
LVVIGNRGI

SEQ ID NO: 24429 - protein, 9 aa, synthetic construct
  source 1..9: note = Seed: LVVVGARGV (KRAS G12R)
LVVIGNRGK

SEQ ID NO: 24430 - protein, 9 aa, synthetic construct
  source 1..9: note = Seed: LVVVGARGV (KRAS G12R)
LVVIGNRGL

SEQ ID NO: 24431 - protein, 9 aa, synthetic construct
  source 1..9: note = Seed: LVVVGARGV (KRAS G12R)
LVVIGNRGM

SEQ ID NO: 24432 - protein, 9 aa, synthetic construct
  source 1..9: note = Seed: LVVVGARGV (KRAS G12R)
LVVIGNRGN

SEQ ID NO: 24433 - protein, 9 aa, synthetic construct
  source 1..9: note = Seed: LVVVGARGV (KRAS G12R)
LVVIGNRGQ

SEQ ID NO: 24434 - protein, 9 aa, synthetic construct
  source 1..9: note = Seed: LVVVGARGV (KRAS G12R)
LVVIGNRGR

SEQ ID NO: 24435 - protein, 9 aa, synthetic construct
  source 1..9: note = Seed: LVVVGARGV (KRAS G12R)
LVVIGNRGS

SEQ ID NO: 24436 - protein, 9 aa, synthetic construct
  source 1..9: note = Seed: LVVVGARGV (KRAS G12R)
LVVIGNRGT

SEQ ID NO: 24437 - protein, 9 aa, synthetic construct
  source 1..9: note = Seed: LVVVGARGV (KRAS G12R)
LVVIGNRGV

SEQ ID NO: 24438 - protein, 9 aa, synthetic construct
  source 1..9: note = Seed: LVVVGARGV (KRAS G12R)
LVVIGNRGW

SEQ ID NO: 24439 - protein, 9 aa, synthetic construct
  source 1..9: note = Seed: LVVVGARGV (KRAS G12R)
LVVIGNRGY

SEQ ID NO: 24440 - protein, 9 aa, synthetic construct
  source 1..9: note = Seed: LVVVGARGV (KRAS G12R)
LVVIGPRGA

SEQ ID NO: 24441 - protein, 9 aa, synthetic construct
  source 1..9: note = Seed: LVVVGARGV (KRAS G12R)
LVVIGPRGF

SEQ ID NO: 24442 - protein, 9 aa, synthetic construct
  source 1..9: note = Seed: LVVVGARGV (KRAS G12R)
LVVIGPRGG

SEQ ID NO: 24443 - protein, 9 aa, synthetic construct
  source 1..9: note = Seed: LVVVGARGV (KRAS G12R)
LVVIGPRGI

SEQ ID NO: 24444 - protein, 9 aa, synthetic construct
  source 1..9: note = Seed: LVVVGARGV (KRAS G12R)
LVVIGPRGL

SEQ ID NO: 24445 - protein, 9 aa, synthetic construct
  source 1..9: note = Seed: LVVVGARGV (KRAS G12R)
LVVIGPRGM

SEQ ID NO: 24446 - protein, 9 aa, synthetic construct
  source 1..9: note = Seed: LVVVGARGV (KRAS G12R)
LVVIGPRGN

SEQ ID NO: 24447 - protein, 9 aa, synthetic construct
  source 1..9: note = Seed: LVVVGARGV (KRAS G12R)
LVVIGPRGQ

SEQ ID NO: 24448 - protein, 9 aa, synthetic construct
  source 1..9: note = Seed: LVVVGARGV (KRAS G12R)
LVVIGPRGR

SEQ ID NO: 24449 - protein, 9 aa, synthetic construct
  source 1..9: note = Seed: LVVVGARGV (KRAS G12R)
LVVIGPRGS

SEQ ID NO: 24450 - protein, 9 aa, synthetic construct
  source 1..9: note = Seed: LVVVGARGV (KRAS G12R)
LVVIGPRGT

SEQ ID NO: 24451 - protein, 9 aa, synthetic construct
  source 1..9: note = Seed: LVVVGARGV (KRAS G12R)
LVVIGPRGV

SEQ ID NO: 24452 - protein, 9 aa, synthetic construct
  source 1..9: note = Seed: LVVVGARGV (KRAS G12R)
LVVIGPRGY

SEQ ID NO: 24453 - protein, 9 aa, synthetic construct
  source 1..9: note = Seed: LVVVGARGV (KRAS G12R)
LVVIGQRGA

SEQ ID NO: 24454 - protein, 9 aa, synthetic construct
  source 1..9: note = Seed: LVVVGARGV (KRAS G12R)
LVVIGQRGF

SEQ ID NO: 24455 - protein, 9 aa, synthetic construct
  source 1..9: note = Seed: LVVVGARGV (KRAS G12R)
LVVIGQRGH

SEQ ID NO: 24456 - protein, 9 aa, synthetic construct
  source 1..9: note = Seed: LVVVGARGV (KRAS G12R)
LVVIGQRGI

SEQ ID NO: 24457 - protein, 9 aa, synthetic construct
  source 1..9: note = Seed: LVVVGARGV (KRAS G12R)
LVVIGQRGK

SEQ ID NO: 24458 - protein, 9 aa, synthetic construct
  source 1..9: note = Seed: LVVVGARGV (KRAS G12R)
LVVIGQRGL

SEQ ID NO: 24459 - protein, 9 aa, synthetic construct
  source 1..9: note = Seed: LVVVGARGV (KRAS G12R)
LVVIGQRGM

SEQ ID NO: 24460 - protein, 9 aa, synthetic construct
  source 1..9: note = Seed: LVVVGARGV (KRAS G12R)
LVVIGQRGQ

SEQ ID NO: 24461 - protein, 9 aa, synthetic construct
  source 1..9: note = Seed: LVVVGARGV (KRAS G12R)
LVVIGQRGR

SEQ ID NO: 24462 - protein, 9 aa, synthetic construct
  source 1..9: note = Seed: LVVVGARGV (KRAS G12R)
LVVIGQRGS

SEQ ID NO: 24463 - protein, 9 aa, synthetic construct
  source 1..9: note = Seed: LVVVGARGV (KRAS G12R)
LVVIGQRGT

SEQ ID NO: 24464 - protein, 9 aa, synthetic construct
  source 1..9: note = Seed: LVVVGARGV (KRAS G12R)
LVVIGQRGV

SEQ ID NO: 24465 - protein, 9 aa, synthetic construct
  source 1..9: note = Seed: LVVVGARGV (KRAS G12R)
LVVIGQRGY

SEQ ID NO: 24466 - protein, 9 aa, synthetic construct
  source 1..9: note = Seed: LVVVGARGV (KRAS G12R)
LVVIGRRGA

SEQ ID NO: 24467 - protein, 9 aa, synthetic construct
  source 1..9: note = Seed: LVVVGARGV (KRAS G12R)
LVVIGRRGC

SEQ ID NO: 24468 - protein, 9 aa, synthetic construct
  source 1..9: note = Seed: LVVVGARGV (KRAS G12R)
LVVIGRRGD

SEQ ID NO: 24469 - protein, 9 aa, synthetic construct
  source 1..9: note = Seed: LVVVGARGV (KRAS G12R)
LVVIGRRGE

SEQ ID NO: 24470 - protein, 9 aa, synthetic construct
  source 1..9: note = Seed: LVVVGARGV (KRAS G12R)
LVVIGRRGF

SEQ ID NO: 24471 - protein, 9 aa, synthetic construct
  source 1..9: note = Seed: LVVVGARGV (KRAS G12R)
LVVIGRRGG

SEQ ID NO: 24472 - protein, 9 aa, synthetic construct
  source 1..9: note = Seed: LVVVGARGV (KRAS G12R)
LVVIGRRGH

SEQ ID NO: 24473 - protein, 9 aa, synthetic construct
  source 1..9: note = Seed: LVVVGARGV (KRAS G12R)
LVVIGRRGI

SEQ ID NO: 24474 - protein, 9 aa, synthetic construct
  source 1..9: note = Seed: LVVVGARGV (KRAS G12R)
LVVIGRRGK

SEQ ID NO: 24475 - protein, 9 aa, synthetic construct
  source 1..9: note = Seed: LVVVGARGV (KRAS G12R)
LVVIGRRGL

SEQ ID NO: 24476 - protein, 9 aa, synthetic construct
  source 1..9: note = Seed: LVVVGARGV (KRAS G12R)
LVVIGRRGM

SEQ ID NO: 24477 - protein, 9 aa, synthetic construct
  source 1..9: note = Seed: LVVVGARGV (KRAS G12R)
LVVIGRRGN

SEQ ID NO: 24478 - protein, 9 aa, synthetic construct
  source 1..9: note = Seed: LVVVGARGV (KRAS G12R)
LVVIGRRGP

SEQ ID NO: 24479 - protein, 9 aa, synthetic construct
  source 1..9: note = Seed: LVVVGARGV (KRAS G12R)
LVVIGRRGQ

SEQ ID NO: 24480 - protein, 9 aa, synthetic construct
  source 1..9: note = Seed: LVVVGARGV (KRAS G12R)
LVVIGRRGR

SEQ ID NO: 24481 - protein, 9 aa, synthetic construct
  source 1..9: note = Seed: LVVVGARGV (KRAS G12R)
LVVIGRRGS

SEQ ID NO: 24482 - protein, 9 aa, synthetic construct
  source 1..9: note = Seed: LVVVGARGV (KRAS G12R)
LVVIGRRGT

SEQ ID NO: 24483 - protein, 9 aa, synthetic construct
  source 1..9: note = Seed: LVVVGARGV (KRAS G12R)
LVVIGRRGV

SEQ ID NO: 24484 - protein, 9 aa, synthetic construct
  source 1..9: note = Seed: LVVVGARGV (KRAS G12R)
LVVIGRRGW

SEQ ID NO: 24485 - protein, 9 aa, synthetic construct
  source 1..9: note = Seed: LVVVGARGV (KRAS G12R)
LVVIGRRGY

SEQ ID NO: 24486 - protein, 9 aa, synthetic construct
  source 1..9: note = Seed: LVVVGARGV (KRAS G12R)
LVVIGSRGA

SEQ ID NO: 24487 - protein, 9 aa, synthetic construct
  source 1..9: note = Seed: LVVVGARGV (KRAS G12R)
LVVIGSRGC

SEQ ID NO: 24488 - protein, 9 aa, synthetic construct
  source 1..9: note = Seed: LVVVGARGV (KRAS G12R)
LVVIGSRGF

SEQ ID NO: 24489 - protein, 9 aa, synthetic construct
  source 1..9: note = Seed: LVVVGARGV (KRAS G12R)
LVVIGSRGG

SEQ ID NO: 24490 - protein, 9 aa, synthetic construct
  source 1..9: note = Seed: LVVVGARGV (KRAS G12R)
LVVIGSRGH

SEQ ID NO: 24491 - protein, 9 aa, synthetic construct
  source 1..9: note = Seed: LVVVGARGV (KRAS G12R)
LVVIGSRGI

SEQ ID NO: 24492 - protein, 9 aa, synthetic construct
  source 1..9: note = Seed: LVVVGARGV (KRAS G12R)
LVVIGSRGK

SEQ ID NO: 24493 - protein, 9 aa, synthetic construct
  source 1..9: note = Seed: LVVVGARGV (KRAS G12R)
LVVIGSRGL

SEQ ID NO: 24494 - protein, 9 aa, synthetic construct
  source 1..9: note = Seed: LVVVGARGV (KRAS G12R)
LVVIGSRGM

SEQ ID NO: 24495 - protein, 9 aa, synthetic construct
  source 1..9: note = Seed: LVVVGARGV (KRAS G12R)
LVVIGSRGN

SEQ ID NO: 24496 - protein, 9 aa, synthetic construct
  source 1..9: note = Seed: LVVVGARGV (KRAS G12R)
LVVIGSRGQ

SEQ ID NO: 24497 - protein, 9 aa, synthetic construct
  source 1..9: note = Seed: LVVVGARGV (KRAS G12R)
LVVIGSRGR

SEQ ID NO: 24498 - protein, 9 aa, synthetic construct
  source 1..9: note = Seed: LVVVGARGV (KRAS G12R)
LVVIGSRGS

SEQ ID NO: 24499 - protein, 9 aa, synthetic construct
  source 1..9: note = Seed: LVVVGARGV (KRAS G12R)
LVVIGSRGT

SEQ ID NO: 24500 - protein, 9 aa, synthetic construct
  source 1..9: note = Seed: LVVVGARGV (KRAS G12R)
LVVIGSRGV

SEQ ID NO: 24501 - protein, 9 aa, synthetic construct
  source 1..9: note = Seed: LVVVGARGV (KRAS G12R)
LVVIGSRGY

SEQ ID NO: 24502 - protein, 9 aa, synthetic construct
  source 1..9: note = Seed: LVVVGARGV (KRAS G12R)
LVVIGTRGA

SEQ ID NO: 24503 - protein, 9 aa, synthetic construct
  source 1..9: note = Seed: LVVVGARGV (KRAS G12R)
LVVIGTRGF

SEQ ID NO: 24504 - protein, 9 aa, synthetic construct
  source 1..9: note = Seed: LVVVGARGV (KRAS G12R)
LVVIGTRGG

SEQ ID NO: 24505 - protein, 9 aa, synthetic construct
  source 1..9: note = Seed: LVVVGARGV (KRAS G12R)
LVVIGTRGH

SEQ ID NO: 24506 - protein, 9 aa, synthetic construct
  source 1..9: note = Seed: LVVVGARGV (KRAS G12R)
LVVIGTRGI

SEQ ID NO: 24507 - protein, 9 aa, synthetic construct
  source 1..9: note = Seed: LVVVGARGV (KRAS G12R)
LVVIGTRGK

SEQ ID NO: 24508 - protein, 9 aa, synthetic construct
  source 1..9: note = Seed: LVVVGARGV (KRAS G12R)
LVVIGTRGL

SEQ ID NO: 24509 - protein, 9 aa, synthetic construct
  source 1..9: note = Seed: LVVVGARGV (KRAS G12R)
LVVIGTRGM

SEQ ID NO: 24510 - protein, 9 aa, synthetic construct
  source 1..9: note = Seed: LVVVGARGV (KRAS G12R)
LVVIGTRGN

SEQ ID NO: 24511 - protein, 9 aa, synthetic construct
  source 1..9: note = Seed: LVVVGARGV (KRAS G12R)
LVVIGTRGQ

SEQ ID NO: 24512 - protein, 9 aa, synthetic construct
  source 1..9: note = Seed: LVVVGARGV (KRAS G12R)
LVVIGTRGR

SEQ ID NO: 24513 - protein, 9 aa, synthetic construct
  source 1..9: note = Seed: LVVVGARGV (KRAS G12R)
LVVIGTRGS

SEQ ID NO: 24514 - protein, 9 aa, synthetic construct
  source 1..9: note = Seed: LVVVGARGV (KRAS G12R)
LVVIGTRGT

SEQ ID NO: 24515 - protein, 9 aa, synthetic construct
  source 1..9: note = Seed: LVVVGARGV (KRAS G12R)
LVVIGTRGV

SEQ ID NO: 24516 - protein, 9 aa, synthetic construct
  source 1..9: note = Seed: LVVVGARGV (KRAS G12R)
LVVIGTRGY

SEQ ID NO: 24517 - protein, 9 aa, synthetic construct
  source 1..9: note = Seed: LVVVGARGV (KRAS G12R)
LVVIGVRGA

SEQ ID NO: 24518 - protein, 9 aa, synthetic construct
  source 1..9: note = Seed: LVVVGARGV (KRAS G12R)
LVVIGVRGF

SEQ ID NO: 24519 - protein, 9 aa, synthetic construct
  source 1..9: note = Seed: LVVVGARGV (KRAS G12R)
LVVIGVRGG

SEQ ID NO: 24520 - protein, 9 aa, synthetic construct
  source 1..9: note = Seed: LVVVGARGV (KRAS G12R)
LVVIGVRGH

SEQ ID NO: 24521 - protein, 9 aa, synthetic construct
  source 1..9: note = Seed: LVVVGARGV (KRAS G12R)
LVVIGVRGI

SEQ ID NO: 24522 - protein, 9 aa, synthetic construct
  source 1..9: note = Seed: LVVVGARGV (KRAS G12R)
LVVIGVRGK

SEQ ID NO: 24523 - protein, 9 aa, synthetic construct
  source 1..9: note = Seed: LVVVGARGV (KRAS G12R)
LVVIGVRGL

SEQ ID NO: 24524 - protein, 9 aa, synthetic construct
  source 1..9: note = Seed: LVVVGARGV (KRAS G12R)
LVVIGVRGM

SEQ ID NO: 24525 - protein, 9 aa, synthetic construct
  source 1..9: note = Seed: LVVVGARGV (KRAS G12R)
LVVIGVRGN

SEQ ID NO: 24526 - protein, 9 aa, synthetic construct
  source 1..9: note = Seed: LVVVGARGV (KRAS G12R)
LVVIGVRGQ

SEQ ID NO: 24527 - protein, 9 aa, synthetic construct
  source 1..9: note = Seed: LVVVGARGV (KRAS G12R)
LVVIGVRGR

SEQ ID NO: 24528 - protein, 9 aa, synthetic construct
  source 1..9: note = Seed: LVVVGARGV (KRAS G12R)
LVVIGVRGS

SEQ ID NO: 24529 - protein, 9 aa, synthetic construct
  source 1..9: note = Seed: LVVVGARGV (KRAS G12R)
LVVIGVRGT

SEQ ID NO: 24530 - protein, 9 aa, synthetic construct
  source 1..9: note = Seed: LVVVGARGV (KRAS G12R)
LVVIGVRGV

SEQ ID NO: 24531 - protein, 9 aa, synthetic construct
  source 1..9: note = Seed: LVVVGARGV (KRAS G12R)
LVVIGVRGY

SEQ ID NO: 24532 - protein, 9 aa, synthetic construct
  source 1..9: note = Seed: LVVVGARGV (KRAS G12R)
LVVIGWRGR

SEQ ID NO: 24533 - protein, 9 aa, synthetic construct
  source 1..9: note = Seed: LVVVGARGV (KRAS G12R)
LVVIGWRGY

SEQ ID NO: 24534 - protein, 9 aa, synthetic construct
  source 1..9: note = Seed: LVVVGARGV (KRAS G12R)
LVVIGYRGF

SEQ ID NO: 24535 - protein, 9 aa, synthetic construct
  source 1..9: note = Seed: LVVVGARGV (KRAS G12R)
LVVIGYRGL

SEQ ID NO: 24536 - protein, 9 aa, synthetic construct
  source 1..9: note = Seed: LVVVGARGV (KRAS G12R)
LVVIGYRGM

SEQ ID NO: 24537 - protein, 9 aa, synthetic construct
  source 1..9: note = Seed: LVVVGARGV (KRAS G12R)
LVVIGYRGR

SEQ ID NO: 24538 - protein, 9 aa, synthetic construct
  source 1..9: note = Seed: LVVVGARGV (KRAS G12R)
LVVIGYRGY

SEQ ID NO: 24539 - protein, 9 aa, synthetic construct
  source 1..9: note = Seed: LVVVGARGV (KRAS G12R)
LVVKGARGA

SEQ ID NO: 24540 - protein, 9 aa, synthetic construct
  source 1..9: note = Seed: LVVVGARGV (KRAS G12R)
LVVKGARGF

SEQ ID NO: 24541 - protein, 9 aa, synthetic construct
  source 1..9: note = Seed: LVVVGARGV (KRAS G12R)
LVVKGARGH

SEQ ID NO: 24542 - protein, 9 aa, synthetic construct
  source 1..9: note = Seed: LVVVGARGV (KRAS G12R)
LVVKGARGI

SEQ ID NO: 24543 - protein, 9 aa, synthetic construct
  source 1..9: note = Seed: LVVVGARGV (KRAS G12R)
LVVKGARGK

SEQ ID NO: 24544 - protein, 9 aa, synthetic construct
  source 1..9: note = Seed: LVVVGARGV (KRAS G12R)
LVVKGARGL

SEQ ID NO: 24545 - protein, 9 aa, synthetic construct
  source 1..9: note = Seed: LVVVGARGV (KRAS G12R)
LVVKGARGM

SEQ ID NO: 24546 - protein, 9 aa, synthetic construct
  source 1..9: note = Seed: LVVVGARGV (KRAS G12R)
LVVKGARGQ

SEQ ID NO: 24547 - protein, 9 aa, synthetic construct
  source 1..9: note = Seed: LVVVGARGV (KRAS G12R)
LVVKGARGR

SEQ ID NO: 24548 - protein, 9 aa, synthetic construct
  source 1..9: note = Seed: LVVVGARGV (KRAS G12R)
LVVKGARGV

SEQ ID NO: 24549 - protein, 9 aa, synthetic construct
  source 1..9: note = Seed: LVVVGARGV (KRAS G12R)
LVVKGARGW

SEQ ID NO: 24550 - protein, 9 aa, synthetic construct
  source 1..9: note = Seed: LVVVGARGV (KRAS G12R)
LVVKGARGY

SEQ ID NO: 24551 - protein, 9 aa, synthetic construct
  source 1..9: note = Seed: LVVVGARGV (KRAS G12R)
LVVKGCRGA

SEQ ID NO: 24552 - protein, 9 aa, synthetic construct
  source 1..9: note = Seed: LVVVGARGV (KRAS G12R)
LVVKGCRGL

SEQ ID NO: 24553 - protein, 9 aa, synthetic construct
  source 1..9: note = Seed: LVVVGARGV (KRAS G12R)
LVVKGCRGR

SEQ ID NO: 24554 - protein, 9 aa, synthetic construct
  source 1..9: note = Seed: LVVVGARGV (KRAS G12R)
LVVKGCRGY

SEQ ID NO: 24555 - protein, 9 aa, synthetic construct
  source 1..9: note = Seed: LVVVGARGV (KRAS G12R)
LVVKGFRGR

SEQ ID NO: 24556 - protein, 9 aa, synthetic construct
  source 1..9: note = Seed: LVVVGARGV (KRAS G12R)
LVVKGGRGL

SEQ ID NO: 24557 - protein, 9 aa, synthetic construct
  source 1..9: note = Seed: LVVVGARGV (KRAS G12R)
LVVKGGRGR

SEQ ID NO: 24558 - protein, 9 aa, synthetic construct
  source 1..9: note = Seed: LVVVGARGV (KRAS G12R)
LVVKGHRGA

SEQ ID NO: 24559 - protein, 9 aa, synthetic construct
  source 1..9: note = Seed: LVVVGARGV (KRAS G12R)
LVVKGHRGF

SEQ ID NO: 24560 - protein, 9 aa, synthetic construct
  source 1..9: note = Seed: LVVVGARGV (KRAS G12R)
LVVKGHRGH

SEQ ID NO: 24561 - protein, 9 aa, synthetic construct
  source 1..9: note = Seed: LVVVGARGV (KRAS G12R)
LVVKGHRGI

SEQ ID NO: 24562 - protein, 9 aa, synthetic construct
  source 1..9: note = Seed: LVVVGARGV (KRAS G12R)
LVVKGHRGK

SEQ ID NO: 24563 - protein, 9 aa, synthetic construct
  source 1..9: note = Seed: LVVVGARGV (KRAS G12R)
LVVKGHRGL

SEQ ID NO: 24564 - protein, 9 aa, synthetic construct
  source 1..9: note = Seed: LVVVGARGV (KRAS G12R)
LVVKGHRGM

SEQ ID NO: 24565 - protein, 9 aa, synthetic construct
  source 1..9: note = Seed: LVVVGARGV (KRAS G12R)
LVVKGHRGQ

SEQ ID NO: 24566 - protein, 9 aa, synthetic construct
  source 1..9: note = Seed: LVVVGARGV (KRAS G12R)
LVVKGHRGR

SEQ ID NO: 24567 - protein, 9 aa, synthetic construct
  source 1..9: note = Seed: LVVVGARGV (KRAS G12R)
LVVKGHRGS

SEQ ID NO: 24568 - protein, 9 aa, synthetic construct
  source 1..9: note = Seed: LVVVGARGV (KRAS G12R)
LVVKGHRGT

SEQ ID NO: 24569 - protein, 9 aa, synthetic construct
  source 1..9: note = Seed: LVVVGARGV (KRAS G12R)
LVVKGHRGV

SEQ ID NO: 24570 - protein, 9 aa, synthetic construct
  source 1..9: note = Seed: LVVVGARGV (KRAS G12R)
LVVKGHRGW

SEQ ID NO: 24571 - protein, 9 aa, synthetic construct
  source 1..9: note = Seed: LVVVGARGV (KRAS G12R)
LVVKGHRGY

SEQ ID NO: 24572 - protein, 9 aa, synthetic construct
  source 1..9: note = Seed: LVVVGARGV (KRAS G12R)
LVVKGIRGA

SEQ ID NO: 24573 - protein, 9 aa, synthetic construct
  source 1..9: note = Seed: LVVVGARGV (KRAS G12R)
LVVKGIRGF

SEQ ID NO: 24574 - protein, 9 aa, synthetic construct
  source 1..9: note = Seed: LVVVGARGV (KRAS G12R)
LVVKGIRGH

SEQ ID NO: 24575 - protein, 9 aa, synthetic construct
  source 1..9: note = Seed: LVVVGARGV (KRAS G12R)
LVVKGIRGI

SEQ ID NO: 24576 - protein, 9 aa, synthetic construct
  source 1..9: note = Seed: LVVVGARGV (KRAS G12R)
LVVKGIRGK

SEQ ID NO: 24577 - protein, 9 aa, synthetic construct
  source 1..9: note = Seed: LVVVGARGV (KRAS G12R)
LVVKGIRGL

SEQ ID NO: 24578 - protein, 9 aa, synthetic construct
  source 1..9: note = Seed: LVVVGARGV (KRAS G12R)
LVVKGIRGM

SEQ ID NO: 24579 - protein, 9 aa, synthetic construct
  source 1..9: note = Seed: LVVVGARGV (KRAS G12R)
LVVKGIRGQ

SEQ ID NO: 24580 - protein, 9 aa, synthetic construct
  source 1..9: note = Seed: LVVVGARGV (KRAS G12R)
LVVKGIRGR

SEQ ID NO: 24581 - protein, 9 aa, synthetic construct
  source 1..9: note = Seed: LVVVGARGV (KRAS G12R)
LVVKGIRGS

SEQ ID NO: 24582 - protein, 9 aa, synthetic construct
  source 1..9: note = Seed: LVVVGARGV (KRAS G12R)
LVVKGIRGV

SEQ ID NO: 24583 - protein, 9 aa, synthetic construct
  source 1..9: note = Seed: LVVVGARGV (KRAS G12R)
LVVKGIRGW

SEQ ID NO: 24584 - protein, 9 aa, synthetic construct
  source 1..9: note = Seed: LVVVGARGV (KRAS G12R)
LVVKGIRGY

SEQ ID NO: 24585 - protein, 9 aa, synthetic construct
  source 1..9: note = Seed: LVVVGARGV (KRAS G12R)
LVVKGKRGA

SEQ ID NO: 24586 - protein, 9 aa, synthetic construct
  source 1..9: note = Seed: LVVVGARGV (KRAS G12R)
LVVKGKRGC

SEQ ID NO: 24587 - protein, 9 aa, synthetic construct
  source 1..9: note = Seed: LVVVGARGV (KRAS G12R)
LVVKGKRGF

SEQ ID NO: 24588 - protein, 9 aa, synthetic construct
  source 1..9: note = Seed: LVVVGARGV (KRAS G12R)
LVVKGKRGG

SEQ ID NO: 24589 - protein, 9 aa, synthetic construct
  source 1..9: note = Seed: LVVVGARGV (KRAS G12R)
LVVKGKRGH

SEQ ID NO: 24590 - protein, 9 aa, synthetic construct
  source 1..9: note = Seed: LVVVGARGV (KRAS G12R)
LVVKGKRGI

SEQ ID NO: 24591 - protein, 9 aa, synthetic construct
  source 1..9: note = Seed: LVVVGARGV (KRAS G12R)
LVVKGKRGK

SEQ ID NO: 24592 - protein, 9 aa, synthetic construct
  source 1..9: note = Seed: LVVVGARGV (KRAS G12R)
LVVKGKRGL

SEQ ID NO: 24593 - protein, 9 aa, synthetic construct
  source 1..9: note = Seed: LVVVGARGV (KRAS G12R)
LVVKGKRGM

SEQ ID NO: 24594 - protein, 9 aa, synthetic construct
  source 1..9: note = Seed: LVVVGARGV (KRAS G12R)
LVVKGKRGN

SEQ ID NO: 24595 - protein, 9 aa, synthetic construct
  source 1..9: note = Seed: LVVVGARGV (KRAS G12R)
LVVKGKRGP

SEQ ID NO: 24596 - protein, 9 aa, synthetic construct
  source 1..9: note = Seed: LVVVGARGV (KRAS G12R)
LVVKGKRGQ

SEQ ID NO: 24597 - protein, 9 aa, synthetic construct
  source 1..9: note = Seed: LVVVGARGV (KRAS G12R)
LVVKGKRGR

SEQ ID NO: 24598 - protein, 9 aa, synthetic construct
  source 1..9: note = Seed: LVVVGARGV (KRAS G12R)
LVVKGKRGS

SEQ ID NO: 24599 - protein, 9 aa, synthetic construct
  source 1..9: note = Seed: LVVVGARGV (KRAS G12R)
LVVKGKRGT

SEQ ID NO: 24600 - protein, 9 aa, synthetic construct
  source 1..9: note = Seed: LVVVGARGV (KRAS G12R)
LVVKGKRGV

SEQ ID NO: 24601 - protein, 9 aa, synthetic construct
  source 1..9: note = Seed: LVVVGARGV (KRAS G12R)
LVVKGKRGW

SEQ ID NO: 24602 - protein, 9 aa, synthetic construct
  source 1..9: note = Seed: LVVVGARGV (KRAS G12R)
LVVKGKRGY

SEQ ID NO: 24603 - protein, 9 aa, synthetic construct
  source 1..9: note = Seed: LVVVGARGV (KRAS G12R)
LVVKGLRGA

SEQ ID NO: 24604 - protein, 9 aa, synthetic construct
  source 1..9: note = Seed: LVVVGARGV (KRAS G12R)
LVVKGLRGF

SEQ ID NO: 24605 - protein, 9 aa, synthetic construct
  source 1..9: note = Seed: LVVVGARGV (KRAS G12R)
LVVKGLRGG

SEQ ID NO: 24606 - protein, 9 aa, synthetic construct
  source 1..9: note = Seed: LVVVGARGV (KRAS G12R)
LVVKGLRGI

SEQ ID NO: 24607 - protein, 9 aa, synthetic construct
  source 1..9: note = Seed: LVVVGARGV (KRAS G12R)
LVVKGLRGL

SEQ ID NO: 24608 - protein, 9 aa, synthetic construct
  source 1..9: note = Seed: LVVVGARGV (KRAS G12R)
LVVKGLRGM

SEQ ID NO: 24609 - protein, 9 aa, synthetic construct
  source 1..9: note = Seed: LVVVGARGV (KRAS G12R)
LVVKGLRGQ

SEQ ID NO: 24610 - protein, 9 aa, synthetic construct
  source 1..9: note = Seed: LVVVGARGV (KRAS G12R)
LVVKGLRGR

SEQ ID NO: 24611 - protein, 9 aa, synthetic construct
  source 1..9: note = Seed: LVVVGARGV (KRAS G12R)
LVVKGLRGS

SEQ ID NO: 24612 - protein, 9 aa, synthetic construct
  source 1..9: note = Seed: LVVVGARGV (KRAS G12R)
LVVKGLRGV

SEQ ID NO: 24613 - protein, 9 aa, synthetic construct
  source 1..9: note = Seed: LVVVGARGV (KRAS G12R)
LVVKGLRGY

SEQ ID NO: 24614 - protein, 9 aa, synthetic construct
  source 1..9: note = Seed: LVVVGARGV (KRAS G12R)
LVVKGMRGA

SEQ ID NO: 24615 - protein, 9 aa, synthetic construct
  source 1..9: note = Seed: LVVVGARGV (KRAS G12R)
LVVKGMRGF

SEQ ID NO: 24616 - protein, 9 aa, synthetic construct
  source 1..9: note = Seed: LVVVGARGV (KRAS G12R)
LVVKGMRGI

SEQ ID NO: 24617 - protein, 9 aa, synthetic construct
  source 1..9: note = Seed: LVVVGARGV (KRAS G12R)
LVVKGMRGL

SEQ ID NO: 24618 - protein, 9 aa, synthetic construct
  source 1..9: note = Seed: LVVVGARGV (KRAS G12R)
LVVKGMRGM

SEQ ID NO: 24619 - protein, 9 aa, synthetic construct
  source 1..9: note = Seed: LVVVGARGV (KRAS G12R)
LVVKGMRGQ

SEQ ID NO: 24620 - protein, 9 aa, synthetic construct
  source 1..9: note = Seed: LVVVGARGV (KRAS G12R)
LVVKGMRGR

SEQ ID NO: 24621 - protein, 9 aa, synthetic construct
  source 1..9: note = Seed: LVVVGARGV (KRAS G12R)
LVVKGMRGS

SEQ ID NO: 24622 - protein, 9 aa, synthetic construct
  source 1..9: note = Seed: LVVVGARGV (KRAS G12R)
LVVKGMRGV

SEQ ID NO: 24623 - protein, 9 aa, synthetic construct
  source 1..9: note = Seed: LVVVGARGV (KRAS G12R)
LVVKGMRGY

SEQ ID NO: 24624 - protein, 9 aa, synthetic construct
  source 1..9: note = Seed: LVVVGARGV (KRAS G12R)
LVVKGNRGA

SEQ ID NO: 24625 - protein, 9 aa, synthetic construct
  source 1..9: note = Seed: LVVVGARGV (KRAS G12R)
LVVKGNRGF

SEQ ID NO: 24626 - protein, 9 aa, synthetic construct
  source 1..9: note = Seed: LVVVGARGV (KRAS G12R)
LVVKGNRGH

SEQ ID NO: 24627 - protein, 9 aa, synthetic construct
  source 1..9: note = Seed: LVVVGARGV (KRAS G12R)
LVVKGNRGI

SEQ ID NO: 24628 - protein, 9 aa, synthetic construct
  source 1..9: note = Seed: LVVVGARGV (KRAS G12R)
LVVKGNRGK

SEQ ID NO: 24629 - protein, 9 aa, synthetic construct
  source 1..9: note = Seed: LVVVGARGV (KRAS G12R)
LVVKGNRGL

SEQ ID NO: 24630 - protein, 9 aa, synthetic construct
  source 1..9: note = Seed: LVVVGARGV (KRAS G12R)
LVVKGNRGM

SEQ ID NO: 24631 - protein, 9 aa, synthetic construct
  source 1..9: note = Seed: LVVVGARGV (KRAS G12R)
LVVKGNRGR

SEQ ID NO: 24632 - protein, 9 aa, synthetic construct
  source 1..9: note = Seed: LVVVGARGV (KRAS G12R)
LVVKGNRGS

SEQ ID NO: 24633 - protein, 9 aa, synthetic construct
  source 1..9: note = Seed: LVVVGARGV (KRAS G12R)
LVVKGNRGV

SEQ ID NO: 24634 - protein, 9 aa, synthetic construct
  source 1..9: note = Seed: LVVVGARGV (KRAS G12R)
LVVKGNRGY

SEQ ID NO: 24635 - protein, 9 aa, synthetic construct
  source 1..9: note = Seed: LVVVGARGV (KRAS G12R)
LVVKGPRGK

SEQ ID NO: 24636 - protein, 9 aa, synthetic construct
  source 1..9: note = Seed: LVVVGARGV (KRAS G12R)
LVVKGPRGM

SEQ ID NO: 24637 - protein, 9 aa, synthetic construct
  source 1..9: note = Seed: LVVVGARGV (KRAS G12R)
LVVKGPRGR

SEQ ID NO: 24638 - protein, 9 aa, synthetic construct
  source 1..9: note = Seed: LVVVGARGV (KRAS G12R)
LVVKGPRGY

SEQ ID NO: 24639 - protein, 9 aa, synthetic construct
  source 1..9: note = Seed: LVVVGARGV (KRAS G12R)
LVVKGQRGA

SEQ ID NO: 24640 - protein, 9 aa, synthetic construct
  source 1..9: note = Seed: LVVVGARGV (KRAS G12R)
LVVKGQRGF

SEQ ID NO: 24641 - protein, 9 aa, synthetic construct
  source 1..9: note = Seed: LVVVGARGV (KRAS G12R)
LVVKGQRGI

SEQ ID NO: 24642 - protein, 9 aa, synthetic construct
  source 1..9: note = Seed: LVVVGARGV (KRAS G12R)
LVVKGQRGK

SEQ ID NO: 24643 - protein, 9 aa, synthetic construct
  source 1..9: note = Seed: LVVVGARGV (KRAS G12R)
LVVKGQRGL

SEQ ID NO: 24644 - protein, 9 aa, synthetic construct
  source 1..9: note = Seed: LVVVGARGV (KRAS G12R)
LVVKGQRGM

SEQ ID NO: 24645 - protein, 9 aa, synthetic construct
  source 1..9: note = Seed: LVVVGARGV (KRAS G12R)
LVVKGQRGQ

SEQ ID NO: 24646 - protein, 9 aa, synthetic construct
  source 1..9: note = Seed: LVVVGARGV (KRAS G12R)
LVVKGQRGR

SEQ ID NO: 24647 - protein, 9 aa, synthetic construct
  source 1..9: note = Seed: LVVVGARGV (KRAS G12R)
LVVKGQRGS

SEQ ID NO: 24648 - protein, 9 aa, synthetic construct
  source 1..9: note = Seed: LVVVGARGV (KRAS G12R)
LVVKGQRGV

SEQ ID NO: 24649 - protein, 9 aa, synthetic construct
  source 1..9: note = Seed: LVVVGARGV (KRAS G12R)
LVVKGQRGY

SEQ ID NO: 24650 - protein, 9 aa, synthetic construct
  source 1..9: note = Seed: LVVVGARGV (KRAS G12R)
LVVKGRRGA

SEQ ID NO: 24651 - protein, 9 aa, synthetic construct
  source 1..9: note = Seed: LVVVGARGV (KRAS G12R)
LVVKGRRGC

SEQ ID NO: 24652 - protein, 9 aa, synthetic construct
  source 1..9: note = Seed: LVVVGARGV (KRAS G12R)
LVVKGRRGE

SEQ ID NO: 24653 - protein, 9 aa, synthetic construct
  source 1..9: note = Seed: LVVVGARGV (KRAS G12R)
LVVKGRRGF

SEQ ID NO: 24654 - protein, 9 aa, synthetic construct
  source 1..9: note = Seed: LVVVGARGV (KRAS G12R)
LVVKGRRGG

SEQ ID NO: 24655 - protein, 9 aa, synthetic construct
  source 1..9: note = Seed: LVVVGARGV (KRAS G12R)
LVVKGRRGH

SEQ ID NO: 24656 - protein, 9 aa, synthetic construct
  source 1..9: note = Seed: LVVVGARGV (KRAS G12R)
LVVKGRRGI

SEQ ID NO: 24657 - protein, 9 aa, synthetic construct
  source 1..9: note = Seed: LVVVGARGV (KRAS G12R)
LVVKGRRGK

SEQ ID NO: 24658 - protein, 9 aa, synthetic construct
  source 1..9: note = Seed: LVVVGARGV (KRAS G12R)
LVVKGRRGL

SEQ ID NO: 24659 - protein, 9 aa, synthetic construct
  source 1..9: note = Seed: LVVVGARGV (KRAS G12R)
LVVKGRRGM

SEQ ID NO: 24660 - protein, 9 aa, synthetic construct
  source 1..9: note = Seed: LVVVGARGV (KRAS G12R)
LVVKGRRGN

SEQ ID NO: 24661 - protein, 9 aa, synthetic construct
  source 1..9: note = Seed: LVVVGARGV (KRAS G12R)
LVVKGRRGP

SEQ ID NO: 24662 - protein, 9 aa, synthetic construct
  source 1..9: note = Seed: LVVVGARGV (KRAS G12R)
LVVKGRRGQ

SEQ ID NO: 24663 - protein, 9 aa, synthetic construct
  source 1..9: note = Seed: LVVVGARGV (KRAS G12R)
LVVKGRRGR

SEQ ID NO: 24664 - protein, 9 aa, synthetic construct
  source 1..9: note = Seed: LVVVGARGV (KRAS G12R)
LVVKGRRGS

SEQ ID NO: 24665 - protein, 9 aa, synthetic construct
  source 1..9: note = Seed: LVVVGARGV (KRAS G12R)
LVVKGRRGT

SEQ ID NO: 24666 - protein, 9 aa, synthetic construct
  source 1..9: note = Seed: LVVVGARGV (KRAS G12R)
LVVKGRRGV

SEQ ID NO: 24667 - protein, 9 aa, synthetic construct
  source 1..9: note = Seed: LVVVGARGV (KRAS G12R)
LVVKGRRGW

SEQ ID NO: 24668 - protein, 9 aa, synthetic construct
  source 1..9: note = Seed: LVVVGARGV (KRAS G12R)
LVVKGRRGY

SEQ ID NO: 24669 - protein, 9 aa, synthetic construct
  source 1..9: note = Seed: LVVVGARGV (KRAS G12R)
LVVKGSRGA

SEQ ID NO: 24670 - protein, 9 aa, synthetic construct
  source 1..9: note = Seed: LVVVGARGV (KRAS G12R)
LVVKGSRGF

SEQ ID NO: 24671 - protein, 9 aa, synthetic construct
  source 1..9: note = Seed: LVVVGARGV (KRAS G12R)
LVVKGSRGH

SEQ ID NO: 24672 - protein, 9 aa, synthetic construct
  source 1..9: note = Seed: LVVVGARGV (KRAS G12R)
LVVKGSRGI

SEQ ID NO: 24673 - protein, 9 aa, synthetic construct
  source 1..9: note = Seed: LVVVGARGV (KRAS G12R)
LVVKGSRGK

SEQ ID NO: 24674 - protein, 9 aa, synthetic construct
  source 1..9: note = Seed: LVVVGARGV (KRAS G12R)
LVVKGSRGL

SEQ ID NO: 24675 - protein, 9 aa, synthetic construct
  source 1..9: note = Seed: LVVVGARGV (KRAS G12R)
LVVKGSRGM

SEQ ID NO: 24676 - protein, 9 aa, synthetic construct
  source 1..9: note = Seed: LVVVGARGV (KRAS G12R)
LVVKGSRGQ

SEQ ID NO: 24677 - protein, 9 aa, synthetic construct
  source 1..9: note = Seed: LVVVGARGV (KRAS G12R)
LVVKGSRGR

SEQ ID NO: 24678 - protein, 9 aa, synthetic construct
  source 1..9: note = Seed: LVVVGARGV (KRAS G12R)
LVVKGSRGS

SEQ ID NO: 24679 - protein, 9 aa, synthetic construct
  source 1..9: note = Seed: LVVVGARGV (KRAS G12R)
LVVKGSRGV

SEQ ID NO: 24680 - protein, 9 aa, synthetic construct
  source 1..9: note = Seed: LVVVGARGV (KRAS G12R)
LVVKGSRGY

SEQ ID NO: 24681 - protein, 9 aa, synthetic construct
  source 1..9: note = Seed: LVVVGARGV (KRAS G12R)
LVVKGTRGA

SEQ ID NO: 24682 - protein, 9 aa, synthetic construct
  source 1..9: note = Seed: LVVVGARGV (KRAS G12R)
LVVKGTRGF

SEQ ID NO: 24683 - protein, 9 aa, synthetic construct
  source 1..9: note = Seed: LVVVGARGV (KRAS G12R)
LVVKGTRGH

SEQ ID NO: 24684 - protein, 9 aa, synthetic construct
  source 1..9: note = Seed: LVVVGARGV (KRAS G12R)
LVVKGTRGI

SEQ ID NO: 24685 - protein, 9 aa, synthetic construct
  source 1..9: note = Seed: LVVVGARGV (KRAS G12R)
LVVKGTRGK

SEQ ID NO: 24686 - protein, 9 aa, synthetic construct
  source 1..9: note = Seed: LVVVGARGV (KRAS G12R)
LVVKGTRGL

SEQ ID NO: 24687 - protein, 9 aa, synthetic construct
  source 1..9: note = Seed: LVVVGARGV (KRAS G12R)
LVVKGTRGM

SEQ ID NO: 24688 - protein, 9 aa, synthetic construct
  source 1..9: note = Seed: LVVVGARGV (KRAS G12R)
LVVKGTRGQ

SEQ ID NO: 24689 - protein, 9 aa, synthetic construct
  source 1..9: note = Seed: LVVVGARGV (KRAS G12R)
LVVKGTRGR

SEQ ID NO: 24690 - protein, 9 aa, synthetic construct
  source 1..9: note = Seed: LVVVGARGV (KRAS G12R)
LVVKGTRGS

SEQ ID NO: 24691 - protein, 9 aa, synthetic construct
  source 1..9: note = Seed: LVVVGARGV (KRAS G12R)
LVVKGTRGV

SEQ ID NO: 24692 - protein, 9 aa, synthetic construct
  source 1..9: note = Seed: LVVVGARGV (KRAS G12R)
LVVKGTRGY

SEQ ID NO: 24693 - protein, 9 aa, synthetic construct
  source 1..9: note = Seed: LVVVGARGV (KRAS G12R)
LVVKGVRGA

SEQ ID NO: 24694 - protein, 9 aa, synthetic construct
  source 1..9: note = Seed: LVVVGARGV (KRAS G12R)
LVVKGVRGF

SEQ ID NO: 24695 - protein, 9 aa, synthetic construct
  source 1..9: note = Seed: LVVVGARGV (KRAS G12R)
LVVKGVRGG

SEQ ID NO: 24696 - protein, 9 aa, synthetic construct
  source 1..9: note = Seed: LVVVGARGV (KRAS G12R)
LVVKGVRGH

SEQ ID NO: 24697 - protein, 9 aa, synthetic construct
  source 1..9: note = Seed: LVVVGARGV (KRAS G12R)
LVVKGVRGI

SEQ ID NO: 24698 - protein, 9 aa, synthetic construct
  source 1..9: note = Seed: LVVVGARGV (KRAS G12R)
LVVKGVRGK

SEQ ID NO: 24699 - protein, 9 aa, synthetic construct
  source 1..9: note = Seed: LVVVGARGV (KRAS G12R)
LVVKGVRGL

SEQ ID NO: 24700 - protein, 9 aa, synthetic construct
  source 1..9: note = Seed: LVVVGARGV (KRAS G12R)
LVVKGVRGM

SEQ ID NO: 24701 - protein, 9 aa, synthetic construct
  source 1..9: note = Seed: LVVVGARGV (KRAS G12R)
LVVKGVRGQ

SEQ ID NO: 24702 - protein, 9 aa, synthetic construct
  source 1..9: note = Seed: LVVVGARGV (KRAS G12R)
LVVKGVRGR

SEQ ID NO: 24703 - protein, 9 aa, synthetic construct
  source 1..9: note = Seed: LVVVGARGV (KRAS G12R)
LVVKGVRGS

SEQ ID NO: 24704 - protein, 9 aa, synthetic construct
  source 1..9: note = Seed: LVVVGARGV (KRAS G12R)
LVVKGVRGT

SEQ ID NO: 24705 - protein, 9 aa, synthetic construct
  source 1..9: note = Seed: LVVVGARGV (KRAS G12R)
LVVKGVRGV

SEQ ID NO: 24706 - protein, 9 aa, synthetic construct
  source 1..9: note = Seed: LVVVGARGV (KRAS G12R)
LVVKGVRGW

SEQ ID NO: 24707 - protein, 9 aa, synthetic construct
  source 1..9: note = Seed: LVVVGARGV (KRAS G12R)
LVVKGVRGY

SEQ ID NO: 24708 - protein, 9 aa, synthetic construct
  source 1..9: note = Seed: LVVVGARGV (KRAS G12R)
LVVKGWRGR

SEQ ID NO: 24709 - protein, 9 aa, synthetic construct
  source 1..9: note = Seed: LVVVGARGV (KRAS G12R)
LVVLGARGA

SEQ ID NO: 24710 - protein, 9 aa, synthetic construct
  source 1..9: note = Seed: LVVVGARGV (KRAS G12R)
LVVLGARGC

SEQ ID NO: 24711 - protein, 9 aa, synthetic construct
  source 1..9: note = Seed: LVVVGARGV (KRAS G12R)
LVVLGARGF

SEQ ID NO: 24712 - protein, 9 aa, synthetic construct
  source 1..9: note = Seed: LVVVGARGV (KRAS G12R)
LVVLGARGG

SEQ ID NO: 24713 - protein, 9 aa, synthetic construct
  source 1..9: note = Seed: LVVVGARGV (KRAS G12R)
LVVLGARGH

SEQ ID NO: 24714 - protein, 9 aa, synthetic construct
  source 1..9: note = Seed: LVVVGARGV (KRAS G12R)
LVVLGARGI

SEQ ID NO: 24715 - protein, 9 aa, synthetic construct
  source 1..9: note = Seed: LVVVGARGV (KRAS G12R)
LVVLGARGK

SEQ ID NO: 24716 - protein, 9 aa, synthetic construct
  source 1..9: note = Seed: LVVVGARGV (KRAS G12R)
LVVLGARGL

SEQ ID NO: 24717 - protein, 9 aa, synthetic construct
  source 1..9: note = Seed: LVVVGARGV (KRAS G12R)
LVVLGARGM

SEQ ID NO: 24718 - protein, 9 aa, synthetic construct
  source 1..9: note = Seed: LVVVGARGV (KRAS G12R)
LVVLGARGN

SEQ ID NO: 24719 - protein, 9 aa, synthetic construct
  source 1..9: note = Seed: LVVVGARGV (KRAS G12R)
LVVLGARGP

SEQ ID NO: 24720 - protein, 9 aa, synthetic construct
  source 1..9: note = Seed: LVVVGARGV (KRAS G12R)
LVVLGARGQ

SEQ ID NO: 24721 - protein, 9 aa, synthetic construct
  source 1..9: note = Seed: LVVVGARGV (KRAS G12R)
LVVLGARGR

SEQ ID NO: 24722 - protein, 9 aa, synthetic construct
  source 1..9: note = Seed: LVVVGARGV (KRAS G12R)
LVVLGARGS

SEQ ID NO: 24723 - protein, 9 aa, synthetic construct
  source 1..9: note = Seed: LVVVGARGV (KRAS G12R)
LVVLGARGT

SEQ ID NO: 24724 - protein, 9 aa, synthetic construct
  source 1..9: note = Seed: LVVVGARGV (KRAS G12R)
LVVLGARGV

SEQ ID NO: 24725 - protein, 9 aa, synthetic construct
  source 1..9: note = Seed: LVVVGARGV (KRAS G12R)
LVVLGARGW

SEQ ID NO: 24726 - protein, 9 aa, synthetic construct
  source 1..9: note = Seed: LVVVGARGV (KRAS G12R)
LVVLGARGY

SEQ ID NO: 24727 - protein, 9 aa, synthetic construct
  source 1..9: note = Seed: LVVVGARGV (KRAS G12R)
LVVLGCRGA

SEQ ID NO: 24728 - protein, 9 aa, synthetic construct
  source 1..9: note = Seed: LVVVGARGV (KRAS G12R)
LVVLGCRGI

SEQ ID NO: 24729 - protein, 9 aa, synthetic construct
  source 1..9: note = Seed: LVVVGARGV (KRAS G12R)
LVVLGCRGL

SEQ ID NO: 24730 - protein, 9 aa, synthetic construct
  source 1..9: note = Seed: LVVVGARGV (KRAS G12R)
LVVLGCRGM

SEQ ID NO: 24731 - protein, 9 aa, synthetic construct
  source 1..9: note = Seed: LVVVGARGV (KRAS G12R)
LVVLGCRGR

SEQ ID NO: 24732 - protein, 9 aa, synthetic construct
  source 1..9: note = Seed: LVVVGARGV (KRAS G12R)
LVVLGCRGV

SEQ ID NO: 24733 - protein, 9 aa, synthetic construct
  source 1..9: note = Seed: LVVVGARGV (KRAS G12R)
LVVLGDRGI

SEQ ID NO: 24734 - protein, 9 aa, synthetic construct
  source 1..9: note = Seed: LVVVGARGV (KRAS G12R)
LVVLGDRGL

SEQ ID NO: 24735 - protein, 9 aa, synthetic construct
  source 1..9: note = Seed: LVVVGARGV (KRAS G12R)
LVVLGDRGV

SEQ ID NO: 24736 - protein, 9 aa, synthetic construct
  source 1..9: note = Seed: LVVVGARGV (KRAS G12R)
LVVLGERGR

SEQ ID NO: 24737 - protein, 9 aa, synthetic construct
  source 1..9: note = Seed: LVVVGARGV (KRAS G12R)
LVVLGFRGI

SEQ ID NO: 24738 - protein, 9 aa, synthetic construct
  source 1..9: note = Seed: LVVVGARGV (KRAS G12R)
LVVLGFRGL

SEQ ID NO: 24739 - protein, 9 aa, synthetic construct
  source 1..9: note = Seed: LVVVGARGV (KRAS G12R)
LVVLGFRGR

SEQ ID NO: 24740 - protein, 9 aa, synthetic construct
  source 1..9: note = Seed: LVVVGARGV (KRAS G12R)
LVVLGFRGV

SEQ ID NO: 24741 - protein, 9 aa, synthetic construct
  source 1..9: note = Seed: LVVVGARGV (KRAS G12R)
LVVLGGRGA

SEQ ID NO: 24742 - protein, 9 aa, synthetic construct
  source 1..9: note = Seed: LVVVGARGV (KRAS G12R)
LVVLGGRGC

SEQ ID NO: 24743 - protein, 9 aa, synthetic construct
  source 1..9: note = Seed: LVVVGARGV (KRAS G12R)
LVVLGGRGF

SEQ ID NO: 24744 - protein, 9 aa, synthetic construct
  source 1..9: note = Seed: LVVVGARGV (KRAS G12R)
LVVLGGRGG

SEQ ID NO: 24745 - protein, 9 aa, synthetic construct
  source 1..9: note = Seed: LVVVGARGV (KRAS G12R)
LVVLGGRGH

SEQ ID NO: 24746 - protein, 9 aa, synthetic construct
  source 1..9: note = Seed: LVVVGARGV (KRAS G12R)
LVVLGGRGI

SEQ ID NO: 24747 - protein, 9 aa, synthetic construct
  source 1..9: note = Seed: LVVVGARGV (KRAS G12R)
LVVLGGRGK

SEQ ID NO: 24748 - protein, 9 aa, synthetic construct
  source 1..9: note = Seed: LVVVGARGV (KRAS G12R)
LVVLGGRGL

SEQ ID NO: 24749 - protein, 9 aa, synthetic construct
  source 1..9: note = Seed: LVVVGARGV (KRAS G12R)
LVVLGGRGM

SEQ ID NO: 24750 - protein, 9 aa, synthetic construct
  source 1..9: note = Seed: LVVVGARGV (KRAS G12R)
LVVLGGRGN

SEQ ID NO: 24751 - protein, 9 aa, synthetic construct
  source 1..9: note = Seed: LVVVGARGV (KRAS G12R)
LVVLGGRGP

SEQ ID NO: 24752 - protein, 9 aa, synthetic construct
  source 1..9: note = Seed: LVVVGARGV (KRAS G12R)
LVVLGGRGQ

SEQ ID NO: 24753 - protein, 9 aa, synthetic construct
  source 1..9: note = Seed: LVVVGARGV (KRAS G12R)
LVVLGGRGR

SEQ ID NO: 24754 - protein, 9 aa, synthetic construct
  source 1..9: note = Seed: LVVVGARGV (KRAS G12R)
LVVLGGRGS

SEQ ID NO: 24755 - protein, 9 aa, synthetic construct
  source 1..9: note = Seed: LVVVGARGV (KRAS G12R)
LVVLGGRGT

SEQ ID NO: 24756 - protein, 9 aa, synthetic construct
  source 1..9: note = Seed: LVVVGARGV (KRAS G12R)
LVVLGGRGV

SEQ ID NO: 24757 - protein, 9 aa, synthetic construct
  source 1..9: note = Seed: LVVVGARGV (KRAS G12R)
LVVLGGRGW

SEQ ID NO: 24758 - protein, 9 aa, synthetic construct
  source 1..9: note = Seed: LVVVGARGV (KRAS G12R)
LVVLGGRGY

SEQ ID NO: 24759 - protein, 9 aa, synthetic construct
  source 1..9: note = Seed: LVVVGARGV (KRAS G12R)
LVVLGHRGA

SEQ ID NO: 24760 - protein, 9 aa, synthetic construct
  source 1..9: note = Seed: LVVVGARGV (KRAS G12R)
LVVLGHRGC

SEQ ID NO: 24761 - protein, 9 aa, synthetic construct
  source 1..9: note = Seed: LVVVGARGV (KRAS G12R)
LVVLGHRGF

SEQ ID NO: 24762 - protein, 9 aa, synthetic construct
  source 1..9: note = Seed: LVVVGARGV (KRAS G12R)
LVVLGHRGG

SEQ ID NO: 24763 - protein, 9 aa, synthetic construct
  source 1..9: note = Seed: LVVVGARGV (KRAS G12R)
LVVLGHRGH

SEQ ID NO: 24764 - protein, 9 aa, synthetic construct
  source 1..9: note = Seed: LVVVGARGV (KRAS G12R)
LVVLGHRGI

SEQ ID NO: 24765 - protein, 9 aa, synthetic construct
  source 1..9: note = Seed: LVVVGARGV (KRAS G12R)
LVVLGHRGK

SEQ ID NO: 24766 - protein, 9 aa, synthetic construct
  source 1..9: note = Seed: LVVVGARGV (KRAS G12R)
LVVLGHRGL

SEQ ID NO: 24767 - protein, 9 aa, synthetic construct
  source 1..9: note = Seed: LVVVGARGV (KRAS G12R)
LVVLGHRGM

SEQ ID NO: 24768 - protein, 9 aa, synthetic construct
  source 1..9: note = Seed: LVVVGARGV (KRAS G12R)
LVVLGHRGN

SEQ ID NO: 24769 - protein, 9 aa, synthetic construct
  source 1..9: note = Seed: LVVVGARGV (KRAS G12R)
LVVLGHRGP

SEQ ID NO: 24770 - protein, 9 aa, synthetic construct
  source 1..9: note = Seed: LVVVGARGV (KRAS G12R)
LVVLGHRGQ

SEQ ID NO: 24771 - protein, 9 aa, synthetic construct
  source 1..9: note = Seed: LVVVGARGV (KRAS G12R)
LVVLGHRGR

SEQ ID NO: 24772 - protein, 9 aa, synthetic construct
  source 1..9: note = Seed: LVVVGARGV (KRAS G12R)
LVVLGHRGS

SEQ ID NO: 24773 - protein, 9 aa, synthetic construct
  source 1..9: note = Seed: LVVVGARGV (KRAS G12R)
LVVLGHRGT

SEQ ID NO: 24774 - protein, 9 aa, synthetic construct
  source 1..9: note = Seed: LVVVGARGV (KRAS G12R)
LVVLGHRGV

SEQ ID NO: 24775 - protein, 9 aa, synthetic construct
  source 1..9: note = Seed: LVVVGARGV (KRAS G12R)
LVVLGHRGW

SEQ ID NO: 24776 - protein, 9 aa, synthetic construct
  source 1..9: note = Seed: LVVVGARGV (KRAS G12R)
LVVLGHRGY

SEQ ID NO: 24777 - protein, 9 aa, synthetic construct
  source 1..9: note = Seed: LVVVGARGV (KRAS G12R)
LVVLGIRGA

SEQ ID NO: 24778 - protein, 9 aa, synthetic construct
  source 1..9: note = Seed: LVVVGARGV (KRAS G12R)
LVVLGIRGF

SEQ ID NO: 24779 - protein, 9 aa, synthetic construct
  source 1..9: note = Seed: LVVVGARGV (KRAS G12R)
LVVLGIRGG

SEQ ID NO: 24780 - protein, 9 aa, synthetic construct
  source 1..9: note = Seed: LVVVGARGV (KRAS G12R)
LVVLGIRGH

SEQ ID NO: 24781 - protein, 9 aa, synthetic construct
  source 1..9: note = Seed: LVVVGARGV (KRAS G12R)
LVVLGIRGI

SEQ ID NO: 24782 - protein, 9 aa, synthetic construct
  source 1..9: note = Seed: LVVVGARGV (KRAS G12R)
LVVLGIRGK

SEQ ID NO: 24783 - protein, 9 aa, synthetic construct
  source 1..9: note = Seed: LVVVGARGV (KRAS G12R)
LVVLGIRGL

SEQ ID NO: 24784 - protein, 9 aa, synthetic construct
  source 1..9: note = Seed: LVVVGARGV (KRAS G12R)
LVVLGIRGM

SEQ ID NO: 24785 - protein, 9 aa, synthetic construct
  source 1..9: note = Seed: LVVVGARGV (KRAS G12R)
LVVLGIRGN

SEQ ID NO: 24786 - protein, 9 aa, synthetic construct
  source 1..9: note = Seed: LVVVGARGV (KRAS G12R)
LVVLGIRGQ

SEQ ID NO: 24787 - protein, 9 aa, synthetic construct
  source 1..9: note = Seed: LVVVGARGV (KRAS G12R)
LVVLGIRGR

SEQ ID NO: 24788 - protein, 9 aa, synthetic construct
  source 1..9: note = Seed: LVVVGARGV (KRAS G12R)
LVVLGIRGS

SEQ ID NO: 24789 - protein, 9 aa, synthetic construct
  source 1..9: note = Seed: LVVVGARGV (KRAS G12R)
LVVLGIRGT

SEQ ID NO: 24790 - protein, 9 aa, synthetic construct
  source 1..9: note = Seed: LVVVGARGV (KRAS G12R)
LVVLGIRGV

SEQ ID NO: 24791 - protein, 9 aa, synthetic construct
  source 1..9: note = Seed: LVVVGARGV (KRAS G12R)
LVVLGIRGY

SEQ ID NO: 24792 - protein, 9 aa, synthetic construct
  source 1..9: note = Seed: LVVVGARGV (KRAS G12R)
LVVLGKRGA

SEQ ID NO: 24793 - protein, 9 aa, synthetic construct
  source 1..9: note = Seed: LVVVGARGV (KRAS G12R)
LVVLGKRGC

SEQ ID NO: 24794 - protein, 9 aa, synthetic construct
  source 1..9: note = Seed: LVVVGARGV (KRAS G12R)
LVVLGKRGD

SEQ ID NO: 24795 - protein, 9 aa, synthetic construct
  source 1..9: note = Seed: LVVVGARGV (KRAS G12R)
LVVLGKRGE

SEQ ID NO: 24796 - protein, 9 aa, synthetic construct
  source 1..9: note = Seed: LVVVGARGV (KRAS G12R)
LVVLGKRGF

SEQ ID NO: 24797 - protein, 9 aa, synthetic construct
  source 1..9: note = Seed: LVVVGARGV (KRAS G12R)
LVVLGKRGG

SEQ ID NO: 24798 - protein, 9 aa, synthetic construct
  source 1..9: note = Seed: LVVVGARGV (KRAS G12R)
LVVLGKRGH

SEQ ID NO: 24799 - protein, 9 aa, synthetic construct
  source 1..9: note = Seed: LVVVGARGV (KRAS G12R)
LVVLGKRGI

SEQ ID NO: 24800 - protein, 9 aa, synthetic construct
  source 1..9: note = Seed: LVVVGARGV (KRAS G12R)
LVVLGKRGK

SEQ ID NO: 24801 - protein, 9 aa, synthetic construct
  source 1..9: note = Seed: LVVVGARGV (KRAS G12R)
LVVLGKRGL

SEQ ID NO: 24802 - protein, 9 aa, synthetic construct
  source 1..9: note = Seed: LVVVGARGV (KRAS G12R)
LVVLGKRGM

SEQ ID NO: 24803 - protein, 9 aa, synthetic construct
  source 1..9: note = Seed: LVVVGARGV (KRAS G12R)
LVVLGKRGN

SEQ ID NO: 24804 - protein, 9 aa, synthetic construct
  source 1..9: note = Seed: LVVVGARGV (KRAS G12R)
LVVLGKRGP

SEQ ID NO: 24805 - protein, 9 aa, synthetic construct
  source 1..9: note = Seed: LVVVGARGV (KRAS G12R)
LVVLGKRGQ

SEQ ID NO: 24806 - protein, 9 aa, synthetic construct
  source 1..9: note = Seed: LVVVGARGV (KRAS G12R)
LVVLGKRGR

SEQ ID NO: 24807 - protein, 9 aa, synthetic construct
  source 1..9: note = Seed: LVVVGARGV (KRAS G12R)
LVVLGKRGS

SEQ ID NO: 24808 - protein, 9 aa, synthetic construct
  source 1..9: note = Seed: LVVVGARGV (KRAS G12R)
LVVLGKRGT

SEQ ID NO: 24809 - protein, 9 aa, synthetic construct
  source 1..9: note = Seed: LVVVGARGV (KRAS G12R)
LVVLGKRGV

SEQ ID NO: 24810 - protein, 9 aa, synthetic construct
  source 1..9: note = Seed: LVVVGARGV (KRAS G12R)
LVVLGKRGW

SEQ ID NO: 24811 - protein, 9 aa, synthetic construct
  source 1..9: note = Seed: LVVVGARGV (KRAS G12R)
LVVLGKRGY

SEQ ID NO: 24812 - protein, 9 aa, synthetic construct
  source 1..9: note = Seed: LVVVGARGV (KRAS G12R)
LVVLGLRGA

SEQ ID NO: 24813 - protein, 9 aa, synthetic construct
  source 1..9: note = Seed: LVVVGARGV (KRAS G12R)
LVVLGLRGF

SEQ ID NO: 24814 - protein, 9 aa, synthetic construct
  source 1..9: note = Seed: LVVVGARGV (KRAS G12R)
LVVLGLRGG

SEQ ID NO: 24815 - protein, 9 aa, synthetic construct
  source 1..9: note = Seed: LVVVGARGV (KRAS G12R)
LVVLGLRGI

SEQ ID NO: 24816 - protein, 9 aa, synthetic construct
  source 1..9: note = Seed: LVVVGARGV (KRAS G12R)
LVVLGLRGK

SEQ ID NO: 24817 - protein, 9 aa, synthetic construct
  source 1..9: note = Seed: LVVVGARGV (KRAS G12R)
LVVLGLRGL

SEQ ID NO: 24818 - protein, 9 aa, synthetic construct
  source 1..9: note = Seed: LVVVGARGV (KRAS G12R)
LVVLGLRGM

SEQ ID NO: 24819 - protein, 9 aa, synthetic construct
  source 1..9: note = Seed: LVVVGARGV (KRAS G12R)
LVVLGLRGQ

SEQ ID NO: 24820 - protein, 9 aa, synthetic construct
  source 1..9: note = Seed: LVVVGARGV (KRAS G12R)
LVVLGLRGR

SEQ ID NO: 24821 - protein, 9 aa, synthetic construct
  source 1..9: note = Seed: LVVVGARGV (KRAS G12R)
LVVLGLRGS

SEQ ID NO: 24822 - protein, 9 aa, synthetic construct
  source 1..9: note = Seed: LVVVGARGV (KRAS G12R)
LVVLGLRGT

SEQ ID NO: 24823 - protein, 9 aa, synthetic construct
  source 1..9: note = Seed: LVVVGARGV (KRAS G12R)
LVVLGLRGV

SEQ ID NO: 24824 - protein, 9 aa, synthetic construct
  source 1..9: note = Seed: LVVVGARGV (KRAS G12R)
LVVLGLRGY

SEQ ID NO: 24825 - protein, 9 aa, synthetic construct
  source 1..9: note = Seed: LVVVGARGV (KRAS G12R)
LVVLGMRGA

SEQ ID NO: 24826 - protein, 9 aa, synthetic construct
  source 1..9: note = Seed: LVVVGARGV (KRAS G12R)
LVVLGMRGF

SEQ ID NO: 24827 - protein, 9 aa, synthetic construct
  source 1..9: note = Seed: LVVVGARGV (KRAS G12R)
LVVLGMRGG

SEQ ID NO: 24828 - protein, 9 aa, synthetic construct
  source 1..9: note = Seed: LVVVGARGV (KRAS G12R)
LVVLGMRGI

SEQ ID NO: 24829 - protein, 9 aa, synthetic construct
  source 1..9: note = Seed: LVVVGARGV (KRAS G12R)
LVVLGMRGK

SEQ ID NO: 24830 - protein, 9 aa, synthetic construct
  source 1..9: note = Seed: LVVVGARGV (KRAS G12R)
LVVLGMRGL

SEQ ID NO: 24831 - protein, 9 aa, synthetic construct
  source 1..9: note = Seed: LVVVGARGV (KRAS G12R)
LVVLGMRGM

SEQ ID NO: 24832 - protein, 9 aa, synthetic construct
  source 1..9: note = Seed: LVVVGARGV (KRAS G12R)
LVVLGMRGQ

SEQ ID NO: 24833 - protein, 9 aa, synthetic construct
  source 1..9: note = Seed: LVVVGARGV (KRAS G12R)
LVVLGMRGR

SEQ ID NO: 24834 - protein, 9 aa, synthetic construct
  source 1..9: note = Seed: LVVVGARGV (KRAS G12R)
LVVLGMRGS

SEQ ID NO: 24835 - protein, 9 aa, synthetic construct
  source 1..9: note = Seed: LVVVGARGV (KRAS G12R)
LVVLGMRGT

SEQ ID NO: 24836 - protein, 9 aa, synthetic construct
  source 1..9: note = Seed: LVVVGARGV (KRAS G12R)
LVVLGMRGV

SEQ ID NO: 24837 - protein, 9 aa, synthetic construct
  source 1..9: note = Seed: LVVVGARGV (KRAS G12R)
LVVLGMRGY

SEQ ID NO: 24838 - protein, 9 aa, synthetic construct
  source 1..9: note = Seed: LVVVGARGV (KRAS G12R)
LVVLGNRGA

SEQ ID NO: 24839 - protein, 9 aa, synthetic construct
  source 1..9: note = Seed: LVVVGARGV (KRAS G12R)
LVVLGNRGC

SEQ ID NO: 24840 - protein, 9 aa, synthetic construct
  source 1..9: note = Seed: LVVVGARGV (KRAS G12R)
LVVLGNRGF

SEQ ID NO: 24841 - protein, 9 aa, synthetic construct
  source 1..9: note = Seed: LVVVGARGV (KRAS G12R)
LVVLGNRGG

SEQ ID NO: 24842 - protein, 9 aa, synthetic construct
  source 1..9: note = Seed: LVVVGARGV (KRAS G12R)
LVVLGNRGH

SEQ ID NO: 24843 - protein, 9 aa, synthetic construct
  source 1..9: note = Seed: LVVVGARGV (KRAS G12R)
LVVLGNRGI

SEQ ID NO: 24844 - protein, 9 aa, synthetic construct
  source 1..9: note = Seed: LVVVGARGV (KRAS G12R)
LVVLGNRGK

SEQ ID NO: 24845 - protein, 9 aa, synthetic construct
  source 1..9: note = Seed: LVVVGARGV (KRAS G12R)
LVVLGNRGL

SEQ ID NO: 24846 - protein, 9 aa, synthetic construct
  source 1..9: note = Seed: LVVVGARGV (KRAS G12R)
LVVLGNRGM

SEQ ID NO: 24847 - protein, 9 aa, synthetic construct
  source 1..9: note = Seed: LVVVGARGV (KRAS G12R)
LVVLGNRGN

SEQ ID NO: 24848 - protein, 9 aa, synthetic construct
  source 1..9: note = Seed: LVVVGARGV (KRAS G12R)
LVVLGNRGP

SEQ ID NO: 24849 - protein, 9 aa, synthetic construct
  source 1..9: note = Seed: LVVVGARGV (KRAS G12R)
LVVLGNRGQ

SEQ ID NO: 24850 - protein, 9 aa, synthetic construct
  source 1..9: note = Seed: LVVVGARGV (KRAS G12R)
LVVLGNRGR

SEQ ID NO: 24851 - protein, 9 aa, synthetic construct
  source 1..9: note = Seed: LVVVGARGV (KRAS G12R)
LVVLGNRGS

SEQ ID NO: 24852 - protein, 9 aa, synthetic construct
  source 1..9: note = Seed: LVVVGARGV (KRAS G12R)
LVVLGNRGT

SEQ ID NO: 24853 - protein, 9 aa, synthetic construct
  source 1..9: note = Seed: LVVVGARGV (KRAS G12R)
LVVLGNRGV

SEQ ID NO: 24854 - protein, 9 aa, synthetic construct
  source 1..9: note = Seed: LVVVGARGV (KRAS G12R)
LVVLGNRGW

SEQ ID NO: 24855 - protein, 9 aa, synthetic construct
  source 1..9: note = Seed: LVVVGARGV (KRAS G12R)
LVVLGNRGY

SEQ ID NO: 24856 - protein, 9 aa, synthetic construct
  source 1..9: note = Seed: LVVVGARGV (KRAS G12R)
LVVLGPRGA

SEQ ID NO: 24857 - protein, 9 aa, synthetic construct
  source 1..9: note = Seed: LVVVGARGV (KRAS G12R)
LVVLGPRGC

SEQ ID NO: 24858 - protein, 9 aa, synthetic construct
  source 1..9: note = Seed: LVVVGARGV (KRAS G12R)
LVVLGPRGF

SEQ ID NO: 24859 - protein, 9 aa, synthetic construct
  source 1..9: note = Seed: LVVVGARGV (KRAS G12R)
LVVLGPRGG

SEQ ID NO: 24860 - protein, 9 aa, synthetic construct
  source 1..9: note = Seed: LVVVGARGV (KRAS G12R)
LVVLGPRGH

SEQ ID NO: 24861 - protein, 9 aa, synthetic construct
  source 1..9: note = Seed: LVVVGARGV (KRAS G12R)
LVVLGPRGI

SEQ ID NO: 24862 - protein, 9 aa, synthetic construct
  source 1..9: note = Seed: LVVVGARGV (KRAS G12R)
LVVLGPRGK

SEQ ID NO: 24863 - protein, 9 aa, synthetic construct
  source 1..9: note = Seed: LVVVGARGV (KRAS G12R)
LVVLGPRGL

SEQ ID NO: 24864 - protein, 9 aa, synthetic construct
  source 1..9: note = Seed: LVVVGARGV (KRAS G12R)
LVVLGPRGM

SEQ ID NO: 24865 - protein, 9 aa, synthetic construct
  source 1..9: note = Seed: LVVVGARGV (KRAS G12R)
LVVLGPRGN

SEQ ID NO: 24866 - protein, 9 aa, synthetic construct
  source 1..9: note = Seed: LVVVGARGV (KRAS G12R)
LVVLGPRGP

SEQ ID NO: 24867 - protein, 9 aa, synthetic construct
  source 1..9: note = Seed: LVVVGARGV (KRAS G12R)
LVVLGPRGQ

SEQ ID NO: 24868 - protein, 9 aa, synthetic construct
  source 1..9: note = Seed: LVVVGARGV (KRAS G12R)
LVVLGPRGR

SEQ ID NO: 24869 - protein, 9 aa, synthetic construct
  source 1..9: note = Seed: LVVVGARGV (KRAS G12R)
LVVLGPRGS

SEQ ID NO: 24870 - protein, 9 aa, synthetic construct
  source 1..9: note = Seed: LVVVGARGV (KRAS G12R)
LVVLGPRGT

SEQ ID NO: 24871 - protein, 9 aa, synthetic construct
  source 1..9: note = Seed: LVVVGARGV (KRAS G12R)
LVVLGPRGV

SEQ ID NO: 24872 - protein, 9 aa, synthetic construct
  source 1..9: note = Seed: LVVVGARGV (KRAS G12R)
LVVLGPRGW

SEQ ID NO: 24873 - protein, 9 aa, synthetic construct
  source 1..9: note = Seed: LVVVGARGV (KRAS G12R)
LVVLGPRGY

SEQ ID NO: 24874 - protein, 9 aa, synthetic construct
  source 1..9: note = Seed: LVVVGARGV (KRAS G12R)
LVVLGQRGA

SEQ ID NO: 24875 - protein, 9 aa, synthetic construct
  source 1..9: note = Seed: LVVVGARGV (KRAS G12R)
LVVLGQRGF

SEQ ID NO: 24876 - protein, 9 aa, synthetic construct
  source 1..9: note = Seed: LVVVGARGV (KRAS G12R)
LVVLGQRGG

SEQ ID NO: 24877 - protein, 9 aa, synthetic construct
  source 1..9: note = Seed: LVVVGARGV (KRAS G12R)
LVVLGQRGH

SEQ ID NO: 24878 - protein, 9 aa, synthetic construct
  source 1..9: note = Seed: LVVVGARGV (KRAS G12R)
LVVLGQRGI

SEQ ID NO: 24879 - protein, 9 aa, synthetic construct
  source 1..9: note = Seed: LVVVGARGV (KRAS G12R)
LVVLGQRGK

SEQ ID NO: 24880 - protein, 9 aa, synthetic construct
  source 1..9: note = Seed: LVVVGARGV (KRAS G12R)
LVVLGQRGL

SEQ ID NO: 24881 - protein, 9 aa, synthetic construct
  source 1..9: note = Seed: LVVVGARGV (KRAS G12R)
LVVLGQRGM

SEQ ID NO: 24882 - protein, 9 aa, synthetic construct
  source 1..9: note = Seed: LVVVGARGV (KRAS G12R)
LVVLGQRGQ

SEQ ID NO: 24883 - protein, 9 aa, synthetic construct
  source 1..9: note = Seed: LVVVGARGV (KRAS G12R)
LVVLGQRGR

SEQ ID NO: 24884 - protein, 9 aa, synthetic construct
  source 1..9: note = Seed: LVVVGARGV (KRAS G12R)
LVVLGQRGS

SEQ ID NO: 24885 - protein, 9 aa, synthetic construct
  source 1..9: note = Seed: LVVVGARGV (KRAS G12R)
LVVLGQRGT

SEQ ID NO: 24886 - protein, 9 aa, synthetic construct
  source 1..9: note = Seed: LVVVGARGV (KRAS G12R)
LVVLGQRGV

SEQ ID NO: 24887 - protein, 9 aa, synthetic construct
  source 1..9: note = Seed: LVVVGARGV (KRAS G12R)
LVVLGQRGY

SEQ ID NO: 24888 - protein, 9 aa, synthetic construct
  source 1..9: note = Seed: LVVVGARGV (KRAS G12R)
LVVLGRRGA

SEQ ID NO: 24889 - protein, 9 aa, synthetic construct
  source 1..9: note = Seed: LVVVGARGV (KRAS G12R)
LVVLGRRGC

SEQ ID NO: 24890 - protein, 9 aa, synthetic construct
  source 1..9: note = Seed: LVVVGARGV (KRAS G12R)
LVVLGRRGD

SEQ ID NO: 24891 - protein, 9 aa, synthetic construct
  source 1..9: note = Seed: LVVVGARGV (KRAS G12R)
LVVLGRRGE

SEQ ID NO: 24892 - protein, 9 aa, synthetic construct
  source 1..9: note = Seed: LVVVGARGV (KRAS G12R)
LVVLGRRGF

SEQ ID NO: 24893 - protein, 9 aa, synthetic construct
  source 1..9: note = Seed: LVVVGARGV (KRAS G12R)
LVVLGRRGG

SEQ ID NO: 24894 - protein, 9 aa, synthetic construct
  source 1..9: note = Seed: LVVVGARGV (KRAS G12R)
LVVLGRRGH

SEQ ID NO: 24895 - protein, 9 aa, synthetic construct
  source 1..9: note = Seed: LVVVGARGV (KRAS G12R)
LVVLGRRGI

SEQ ID NO: 24896 - protein, 9 aa, synthetic construct
  source 1..9: note = Seed: LVVVGARGV (KRAS G12R)
LVVLGRRGK

SEQ ID NO: 24897 - protein, 9 aa, synthetic construct
  source 1..9: note = Seed: LVVVGARGV (KRAS G12R)
LVVLGRRGL

SEQ ID NO: 24898 - protein, 9 aa, synthetic construct
  source 1..9: note = Seed: LVVVGARGV (KRAS G12R)
LVVLGRRGM

SEQ ID NO: 24899 - protein, 9 aa, synthetic construct
  source 1..9: note = Seed: LVVVGARGV (KRAS G12R)
LVVLGRRGN

SEQ ID NO: 24900 - protein, 9 aa, synthetic construct
  source 1..9: note = Seed: LVVVGARGV (KRAS G12R)
LVVLGRRGP

SEQ ID NO: 24901 - protein, 9 aa, synthetic construct
  source 1..9: note = Seed: LVVVGARGV (KRAS G12R)
LVVLGRRGQ

SEQ ID NO: 24902 - protein, 9 aa, synthetic construct
  source 1..9: note = Seed: LVVVGARGV (KRAS G12R)
LVVLGRRGR

SEQ ID NO: 24903 - protein, 9 aa, synthetic construct
  source 1..9: note = Seed: LVVVGARGV (KRAS G12R)
LVVLGRRGS

SEQ ID NO: 24904 - protein, 9 aa, synthetic construct
  source 1..9: note = Seed: LVVVGARGV (KRAS G12R)
LVVLGRRGT

SEQ ID NO: 24905 - protein, 9 aa, synthetic construct
  source 1..9: note = Seed: LVVVGARGV (KRAS G12R)
LVVLGRRGV

SEQ ID NO: 24906 - protein, 9 aa, synthetic construct
  source 1..9: note = Seed: LVVVGARGV (KRAS G12R)
LVVLGRRGW

SEQ ID NO: 24907 - protein, 9 aa, synthetic construct
  source 1..9: note = Seed: LVVVGARGV (KRAS G12R)
LVVLGRRGY

SEQ ID NO: 24908 - protein, 9 aa, synthetic construct
  source 1..9: note = Seed: LVVVGARGV (KRAS G12R)
LVVLGSRGA

SEQ ID NO: 24909 - protein, 9 aa, synthetic construct
  source 1..9: note = Seed: LVVVGARGV (KRAS G12R)
LVVLGSRGC

SEQ ID NO: 24910 - protein, 9 aa, synthetic construct
  source 1..9: note = Seed: LVVVGARGV (KRAS G12R)
LVVLGSRGF

SEQ ID NO: 24911 - protein, 9 aa, synthetic construct
  source 1..9: note = Seed: LVVVGARGV (KRAS G12R)
LVVLGSRGG

SEQ ID NO: 24912 - protein, 9 aa, synthetic construct
  source 1..9: note = Seed: LVVVGARGV (KRAS G12R)
LVVLGSRGH

SEQ ID NO: 24913 - protein, 9 aa, synthetic construct
  source 1..9: note = Seed: LVVVGARGV (KRAS G12R)
LVVLGSRGI

SEQ ID NO: 24914 - protein, 9 aa, synthetic construct
  source 1..9: note = Seed: LVVVGARGV (KRAS G12R)
LVVLGSRGK

SEQ ID NO: 24915 - protein, 9 aa, synthetic construct
  source 1..9: note = Seed: LVVVGARGV (KRAS G12R)
LVVLGSRGL

SEQ ID NO: 24916 - protein, 9 aa, synthetic construct
  source 1..9: note = Seed: LVVVGARGV (KRAS G12R)
LVVLGSRGM

SEQ ID NO: 24917 - protein, 9 aa, synthetic construct
  source 1..9: note = Seed: LVVVGARGV (KRAS G12R)
LVVLGSRGN

SEQ ID NO: 24918 - protein, 9 aa, synthetic construct
  source 1..9: note = Seed: LVVVGARGV (KRAS G12R)
LVVLGSRGP

SEQ ID NO: 24919 - protein, 9 aa, synthetic construct
  source 1..9: note = Seed: LVVVGARGV (KRAS G12R)
LVVLGSRGQ

SEQ ID NO: 24920 - protein, 9 aa, synthetic construct
  source 1..9: note = Seed: LVVVGARGV (KRAS G12R)
LVVLGSRGR

SEQ ID NO: 24921 - protein, 9 aa, synthetic construct
  source 1..9: note = Seed: LVVVGARGV (KRAS G12R)
LVVLGSRGS

SEQ ID NO: 24922 - protein, 9 aa, synthetic construct
  source 1..9: note = Seed: LVVVGARGV (KRAS G12R)
LVVLGSRGT

SEQ ID NO: 24923 - protein, 9 aa, synthetic construct
  source 1..9: note = Seed: LVVVGARGV (KRAS G12R)
LVVLGSRGV

SEQ ID NO: 24924 - protein, 9 aa, synthetic construct
  source 1..9: note = Seed: LVVVGARGV (KRAS G12R)
LVVLGSRGW

SEQ ID NO: 24925 - protein, 9 aa, synthetic construct
  source 1..9: note = Seed: LVVVGARGV (KRAS G12R)
LVVLGSRGY

SEQ ID NO: 24926 - protein, 9 aa, synthetic construct
  source 1..9: note = Seed: LVVVGARGV (KRAS G12R)
LVVLGTRGA

SEQ ID NO: 24927 - protein, 9 aa, synthetic construct
  source 1..9: note = Seed: LVVVGARGV (KRAS G12R)
LVVLGTRGC

SEQ ID NO: 24928 - protein, 9 aa, synthetic construct
  source 1..9: note = Seed: LVVVGARGV (KRAS G12R)
LVVLGTRGF

SEQ ID NO: 24929 - protein, 9 aa, synthetic construct
  source 1..9: note = Seed: LVVVGARGV (KRAS G12R)
LVVLGTRGG

SEQ ID NO: 24930 - protein, 9 aa, synthetic construct
  source 1..9: note = Seed: LVVVGARGV (KRAS G12R)
LVVLGTRGH

SEQ ID NO: 24931 - protein, 9 aa, synthetic construct
  source 1..9: note = Seed: LVVVGARGV (KRAS G12R)
LVVLGTRGI

SEQ ID NO: 24932 - protein, 9 aa, synthetic construct
  source 1..9: note = Seed: LVVVGARGV (KRAS G12R)
LVVLGTRGK

SEQ ID NO: 24933 - protein, 9 aa, synthetic construct
  source 1..9: note = Seed: LVVVGARGV (KRAS G12R)
LVVLGTRGL

SEQ ID NO: 24934 - protein, 9 aa, synthetic construct
  source 1..9: note = Seed: LVVVGARGV (KRAS G12R)
LVVLGTRGM

SEQ ID NO: 24935 - protein, 9 aa, synthetic construct
  source 1..9: note = Seed: LVVVGARGV (KRAS G12R)
LVVLGTRGN

SEQ ID NO: 24936 - protein, 9 aa, synthetic construct
  source 1..9: note = Seed: LVVVGARGV (KRAS G12R)
LVVLGTRGP

SEQ ID NO: 24937 - protein, 9 aa, synthetic construct
  source 1..9: note = Seed: LVVVGARGV (KRAS G12R)
LVVLGTRGQ

SEQ ID NO: 24938 - protein, 9 aa, synthetic construct
  source 1..9: note = Seed: LVVVGARGV (KRAS G12R)
LVVLGTRGR

SEQ ID NO: 24939 - protein, 9 aa, synthetic construct
  source 1..9: note = Seed: LVVVGARGV (KRAS G12R)
LVVLGTRGS

SEQ ID NO: 24940 - protein, 9 aa, synthetic construct
  source 1..9: note = Seed: LVVVGARGV (KRAS G12R)
LVVLGTRGT

SEQ ID NO: 24941 - protein, 9 aa, synthetic construct
  source 1..9: note = Seed: LVVVGARGV (KRAS G12R)
LVVLGTRGV

SEQ ID NO: 24942 - protein, 9 aa, synthetic construct
  source 1..9: note = Seed: LVVVGARGV (KRAS G12R)
LVVLGTRGW

SEQ ID NO: 24943 - protein, 9 aa, synthetic construct
  source 1..9: note = Seed: LVVVGARGV (KRAS G12R)
LVVLGTRGY

SEQ ID NO: 24944 - protein, 9 aa, synthetic construct
  source 1..9: note = Seed: LVVVGARGV (KRAS G12R)
LVVLGVRGA

SEQ ID NO: 24945 - protein, 9 aa, synthetic construct
  source 1..9: note = Seed: LVVVGARGV (KRAS G12R)
LVVLGVRGC

SEQ ID NO: 24946 - protein, 9 aa, synthetic construct
  source 1..9: note = Seed: LVVVGARGV (KRAS G12R)
LVVLGVRGF

SEQ ID NO: 24947 - protein, 9 aa, synthetic construct
  source 1..9: note = Seed: LVVVGARGV (KRAS G12R)
LVVLGVRGG

SEQ ID NO: 24948 - protein, 9 aa, synthetic construct
  source 1..9: note = Seed: LVVVGARGV (KRAS G12R)
LVVLGVRGH

SEQ ID NO: 24949 - protein, 9 aa, synthetic construct
  source 1..9: note = Seed: LVVVGARGV (KRAS G12R)
LVVLGVRGI

SEQ ID NO: 24950 - protein, 9 aa, synthetic construct
  source 1..9: note = Seed: LVVVGARGV (KRAS G12R)
LVVLGVRGK

SEQ ID NO: 24951 - protein, 9 aa, synthetic construct
  source 1..9: note = Seed: LVVVGARGV (KRAS G12R)
LVVLGVRGL

SEQ ID NO: 24952 - protein, 9 aa, synthetic construct
  source 1..9: note = Seed: LVVVGARGV (KRAS G12R)
LVVLGVRGM

SEQ ID NO: 24953 - protein, 9 aa, synthetic construct
  source 1..9: note = Seed: LVVVGARGV (KRAS G12R)
LVVLGVRGN

SEQ ID NO: 24954 - protein, 9 aa, synthetic construct
  source 1..9: note = Seed: LVVVGARGV (KRAS G12R)
LVVLGVRGQ

SEQ ID NO: 24955 - protein, 9 aa, synthetic construct
  source 1..9: note = Seed: LVVVGARGV (KRAS G12R)
LVVLGVRGR

SEQ ID NO: 24956 - protein, 9 aa, synthetic construct
  source 1..9: note = Seed: LVVVGARGV (KRAS G12R)
LVVLGVRGS

SEQ ID NO: 24957 - protein, 9 aa, synthetic construct
  source 1..9: note = Seed: LVVVGARGV (KRAS G12R)
LVVLGVRGT

SEQ ID NO: 24958 - protein, 9 aa, synthetic construct
  source 1..9: note = Seed: LVVVGARGV (KRAS G12R)
LVVLGVRGV

SEQ ID NO: 24959 - protein, 9 aa, synthetic construct
  source 1..9: note = Seed: LVVVGARGV (KRAS G12R)
LVVLGVRGY

SEQ ID NO: 24960 - protein, 9 aa, synthetic construct
  source 1..9: note = Seed: LVVVGARGV (KRAS G12R)
LVVLGWRGA

SEQ ID NO: 24961 - protein, 9 aa, synthetic construct
  source 1..9: note = Seed: LVVVGARGV (KRAS G12R)
LVVLGWRGL

SEQ ID NO: 24962 - protein, 9 aa, synthetic construct
  source 1..9: note = Seed: LVVVGARGV (KRAS G12R)
LVVLGWRGR

SEQ ID NO: 24963 - protein, 9 aa, synthetic construct
  source 1..9: note = Seed: LVVVGARGV (KRAS G12R)
LVVLGWRGV

SEQ ID NO: 24964 - protein, 9 aa, synthetic construct
  source 1..9: note = Seed: LVVVGARGV (KRAS G12R)
LVVLGWRGY

SEQ ID NO: 24965 - protein, 9 aa, synthetic construct
  source 1..9: note = Seed: LVVVGARGV (KRAS G12R)
LVVLGYRGA

SEQ ID NO: 24966 - protein, 9 aa, synthetic construct
  source 1..9: note = Seed: LVVVGARGV (KRAS G12R)
LVVLGYRGL

SEQ ID NO: 24967 - protein, 9 aa, synthetic construct
  source 1..9: note = Seed: LVVVGARGV (KRAS G12R)
LVVLGYRGM

SEQ ID NO: 24968 - protein, 9 aa, synthetic construct
  source 1..9: note = Seed: LVVVGARGV (KRAS G12R)
LVVLGYRGQ

SEQ ID NO: 24969 - protein, 9 aa, synthetic construct
  source 1..9: note = Seed: LVVVGARGV (KRAS G12R)
LVVLGYRGR

SEQ ID NO: 24970 - protein, 9 aa, synthetic construct
  source 1..9: note = Seed: LVVVGARGV (KRAS G12R)
LVVLGYRGS

SEQ ID NO: 24971 - protein, 9 aa, synthetic construct
  source 1..9: note = Seed: LVVVGARGV (KRAS G12R)
LVVLGYRGY

SEQ ID NO: 24972 - protein, 9 aa, synthetic construct
  source 1..9: note = Seed: LVVVGARGV (KRAS G12R)
LVVMGARGA

SEQ ID NO: 24973 - protein, 9 aa, synthetic construct
  source 1..9: note = Seed: LVVVGARGV (KRAS G12R)
LVVMGARGC

SEQ ID NO: 24974 - protein, 9 aa, synthetic construct
  source 1..9: note = Seed: LVVVGARGV (KRAS G12R)
LVVMGARGE

SEQ ID NO: 24975 - protein, 9 aa, synthetic construct
  source 1..9: note = Seed: LVVVGARGV (KRAS G12R)
LVVMGARGF

SEQ ID NO: 24976 - protein, 9 aa, synthetic construct
  source 1..9: note = Seed: LVVVGARGV (KRAS G12R)
LVVMGARGG

SEQ ID NO: 24977 - protein, 9 aa, synthetic construct
  source 1..9: note = Seed: LVVVGARGV (KRAS G12R)
LVVMGARGH

SEQ ID NO: 24978 - protein, 9 aa, synthetic construct
  source 1..9: note = Seed: LVVVGARGV (KRAS G12R)
LVVMGARGI

SEQ ID NO: 24979 - protein, 9 aa, synthetic construct
  source 1..9: note = Seed: LVVVGARGV (KRAS G12R)
LVVMGARGK

SEQ ID NO: 24980 - protein, 9 aa, synthetic construct
  source 1..9: note = Seed: LVVVGARGV (KRAS G12R)
LVVMGARGL

SEQ ID NO: 24981 - protein, 9 aa, synthetic construct
  source 1..9: note = Seed: LVVVGARGV (KRAS G12R)
LVVMGARGM

SEQ ID NO: 24982 - protein, 9 aa, synthetic construct
  source 1..9: note = Seed: LVVVGARGV (KRAS G12R)
LVVMGARGN

SEQ ID NO: 24983 - protein, 9 aa, synthetic construct
  source 1..9: note = Seed: LVVVGARGV (KRAS G12R)
LVVMGARGP

SEQ ID NO: 24984 - protein, 9 aa, synthetic construct
  source 1..9: note = Seed: LVVVGARGV (KRAS G12R)
LVVMGARGQ

SEQ ID NO: 24985 - protein, 9 aa, synthetic construct
  source 1..9: note = Seed: LVVVGARGV (KRAS G12R)
LVVMGARGR

SEQ ID NO: 24986 - protein, 9 aa, synthetic construct
  source 1..9: note = Seed: LVVVGARGV (KRAS G12R)
LVVMGARGS

SEQ ID NO: 24987 - protein, 9 aa, synthetic construct
  source 1..9: note = Seed: LVVVGARGV (KRAS G12R)
LVVMGARGT

SEQ ID NO: 24988 - protein, 9 aa, synthetic construct
  source 1..9: note = Seed: LVVVGARGV (KRAS G12R)
LVVMGARGV

SEQ ID NO: 24989 - protein, 9 aa, synthetic construct
  source 1..9: note = Seed: LVVVGARGV (KRAS G12R)
LVVMGARGW

SEQ ID NO: 24990 - protein, 9 aa, synthetic construct
  source 1..9: note = Seed: LVVVGARGV (KRAS G12R)
LVVMGARGY

SEQ ID NO: 24991 - protein, 9 aa, synthetic construct
  source 1..9: note = Seed: LVVVGARGV (KRAS G12R)
LVVMGCRGA

SEQ ID NO: 24992 - protein, 9 aa, synthetic construct
  source 1..9: note = Seed: LVVVGARGV (KRAS G12R)
LVVMGCRGI

SEQ ID NO: 24993 - protein, 9 aa, synthetic construct
  source 1..9: note = Seed: LVVVGARGV (KRAS G12R)
LVVMGCRGK

SEQ ID NO: 24994 - protein, 9 aa, synthetic construct
  source 1..9: note = Seed: LVVVGARGV (KRAS G12R)
LVVMGCRGL

SEQ ID NO: 24995 - protein, 9 aa, synthetic construct
  source 1..9: note = Seed: LVVVGARGV (KRAS G12R)
LVVMGCRGM

SEQ ID NO: 24996 - protein, 9 aa, synthetic construct
  source 1..9: note = Seed: LVVVGARGV (KRAS G12R)
LVVMGCRGR

SEQ ID NO: 24997 - protein, 9 aa, synthetic construct
  source 1..9: note = Seed: LVVVGARGV (KRAS G12R)
LVVMGCRGV

SEQ ID NO: 24998 - protein, 9 aa, synthetic construct
  source 1..9: note = Seed: LVVVGARGV (KRAS G12R)
LVVMGDRGI

SEQ ID NO: 24999 - protein, 9 aa, synthetic construct
  source 1..9: note = Seed: LVVVGARGV (KRAS G12R)
LVVMGDRGL

SEQ ID NO: 25000 - protein, 9 aa, synthetic construct
  source 1..9: note = Seed: LVVVGARGV (KRAS G12R)
LVVMGDRGV

SEQ ID NO: 25001 - protein, 9 aa, synthetic construct
  source 1..9: note = Seed: LVVVGARGV (KRAS G12R)
LVVMGERGL

SEQ ID NO: 25002 - protein, 9 aa, synthetic construct
  source 1..9: note = Seed: LVVVGARGV (KRAS G12R)
LVVMGERGR

SEQ ID NO: 25003 - protein, 9 aa, synthetic construct
  source 1..9: note = Seed: LVVVGARGV (KRAS G12R)
LVVMGERGV

SEQ ID NO: 25004 - protein, 9 aa, synthetic construct
  source 1..9: note = Seed: LVVVGARGV (KRAS G12R)
LVVMGFRGA

SEQ ID NO: 25005 - protein, 9 aa, synthetic construct
  source 1..9: note = Seed: LVVVGARGV (KRAS G12R)
LVVMGFRGI

SEQ ID NO: 25006 - protein, 9 aa, synthetic construct
  source 1..9: note = Seed: LVVVGARGV (KRAS G12R)
LVVMGFRGL

SEQ ID NO: 25007 - protein, 9 aa, synthetic construct
  source 1..9: note = Seed: LVVVGARGV (KRAS G12R)
LVVMGFRGM

SEQ ID NO: 25008 - protein, 9 aa, synthetic construct
  source 1..9: note = Seed: LVVVGARGV (KRAS G12R)
LVVMGFRGR

SEQ ID NO: 25009 - protein, 9 aa, synthetic construct
  source 1..9: note = Seed: LVVVGARGV (KRAS G12R)
LVVMGFRGV

SEQ ID NO: 25010 - protein, 9 aa, synthetic construct
  source 1..9: note = Seed: LVVVGARGV (KRAS G12R)
LVVMGFRGY

SEQ ID NO: 25011 - protein, 9 aa, synthetic construct
  source 1..9: note = Seed: LVVVGARGV (KRAS G12R)
LVVMGGRGA

SEQ ID NO: 25012 - protein, 9 aa, synthetic construct
  source 1..9: note = Seed: LVVVGARGV (KRAS G12R)
LVVMGGRGC

SEQ ID NO: 25013 - protein, 9 aa, synthetic construct
  source 1..9: note = Seed: LVVVGARGV (KRAS G12R)
LVVMGGRGF

SEQ ID NO: 25014 - protein, 9 aa, synthetic construct
  source 1..9: note = Seed: LVVVGARGV (KRAS G12R)
LVVMGGRGG

SEQ ID NO: 25015 - protein, 9 aa, synthetic construct
  source 1..9: note = Seed: LVVVGARGV (KRAS G12R)
LVVMGGRGH

SEQ ID NO: 25016 - protein, 9 aa, synthetic construct
  source 1..9: note = Seed: LVVVGARGV (KRAS G12R)
LVVMGGRGI

SEQ ID NO: 25017 - protein, 9 aa, synthetic construct
  source 1..9: note = Seed: LVVVGARGV (KRAS G12R)
LVVMGGRGK

SEQ ID NO: 25018 - protein, 9 aa, synthetic construct
  source 1..9: note = Seed: LVVVGARGV (KRAS G12R)
LVVMGGRGL

SEQ ID NO: 25019 - protein, 9 aa, synthetic construct
  source 1..9: note = Seed: LVVVGARGV (KRAS G12R)
LVVMGGRGM

SEQ ID NO: 25020 - protein, 9 aa, synthetic construct
  source 1..9: note = Seed: LVVVGARGV (KRAS G12R)
LVVMGGRGN

SEQ ID NO: 25021 - protein, 9 aa, synthetic construct
  source 1..9: note = Seed: LVVVGARGV (KRAS G12R)
LVVMGGRGP

SEQ ID NO: 25022 - protein, 9 aa, synthetic construct
  source 1..9: note = Seed: LVVVGARGV (KRAS G12R)
LVVMGGRGQ

SEQ ID NO: 25023 - protein, 9 aa, synthetic construct
  source 1..9: note = Seed: LVVVGARGV (KRAS G12R)
LVVMGGRGR

SEQ ID NO: 25024 - protein, 9 aa, synthetic construct
  source 1..9: note = Seed: LVVVGARGV (KRAS G12R)
LVVMGGRGS

SEQ ID NO: 25025 - protein, 9 aa, synthetic construct
  source 1..9: note = Seed: LVVVGARGV (KRAS G12R)
LVVMGGRGT

SEQ ID NO: 25026 - protein, 9 aa, synthetic construct
  source 1..9: note = Seed: LVVVGARGV (KRAS G12R)
LVVMGGRGV

SEQ ID NO: 25027 - protein, 9 aa, synthetic construct
  source 1..9: note = Seed: LVVVGARGV (KRAS G12R)
LVVMGGRGW

SEQ ID NO: 25028 - protein, 9 aa, synthetic construct
  source 1..9: note = Seed: LVVVGARGV (KRAS G12R)
LVVMGGRGY

SEQ ID NO: 25029 - protein, 9 aa, synthetic construct
  source 1..9: note = Seed: LVVVGARGV (KRAS G12R)
LVVMGHRGA

SEQ ID NO: 25030 - protein, 9 aa, synthetic construct
  source 1..9: note = Seed: LVVVGARGV (KRAS G12R)
LVVMGHRGC

SEQ ID NO: 25031 - protein, 9 aa, synthetic construct
  source 1..9: note = Seed: LVVVGARGV (KRAS G12R)
LVVMGHRGE

SEQ ID NO: 25032 - protein, 9 aa, synthetic construct
  source 1..9: note = Seed: LVVVGARGV (KRAS G12R)
LVVMGHRGF

SEQ ID NO: 25033 - protein, 9 aa, synthetic construct
  source 1..9: note = Seed: LVVVGARGV (KRAS G12R)
LVVMGHRGG

SEQ ID NO: 25034 - protein, 9 aa, synthetic construct
  source 1..9: note = Seed: LVVVGARGV (KRAS G12R)
LVVMGHRGH

SEQ ID NO: 25035 - protein, 9 aa, synthetic construct
  source 1..9: note = Seed: LVVVGARGV (KRAS G12R)
LVVMGHRGI

SEQ ID NO: 25036 - protein, 9 aa, synthetic construct
  source 1..9: note = Seed: LVVVGARGV (KRAS G12R)
LVVMGHRGK

SEQ ID NO: 25037 - protein, 9 aa, synthetic construct
  source 1..9: note = Seed: LVVVGARGV (KRAS G12R)
LVVMGHRGL

SEQ ID NO: 25038 - protein, 9 aa, synthetic construct
  source 1..9: note = Seed: LVVVGARGV (KRAS G12R)
LVVMGHRGM

SEQ ID NO: 25039 - protein, 9 aa, synthetic construct
  source 1..9: note = Seed: LVVVGARGV (KRAS G12R)
LVVMGHRGN

SEQ ID NO: 25040 - protein, 9 aa, synthetic construct
  source 1..9: note = Seed: LVVVGARGV (KRAS G12R)
LVVMGHRGP

SEQ ID NO: 25041 - protein, 9 aa, synthetic construct
  source 1..9: note = Seed: LVVVGARGV (KRAS G12R)
LVVMGHRGQ

SEQ ID NO: 25042 - protein, 9 aa, synthetic construct
  source 1..9: note = Seed: LVVVGARGV (KRAS G12R)
LVVMGHRGR

SEQ ID NO: 25043 - protein, 9 aa, synthetic construct
  source 1..9: note = Seed: LVVVGARGV (KRAS G12R)
LVVMGHRGS

SEQ ID NO: 25044 - protein, 9 aa, synthetic construct
  source 1..9: note = Seed: LVVVGARGV (KRAS G12R)
LVVMGHRGT

SEQ ID NO: 25045 - protein, 9 aa, synthetic construct
  source 1..9: note = Seed: LVVVGARGV (KRAS G12R)
LVVMGHRGV

SEQ ID NO: 25046 - protein, 9 aa, synthetic construct
  source 1..9: note = Seed: LVVVGARGV (KRAS G12R)
LVVMGHRGW

SEQ ID NO: 25047 - protein, 9 aa, synthetic construct
  source 1..9: note = Seed: LVVVGARGV (KRAS G12R)
LVVMGHRGY

SEQ ID NO: 25048 - protein, 9 aa, synthetic construct
  source 1..9: note = Seed: LVVVGARGV (KRAS G12R)
LVVMGIRGA

SEQ ID NO: 25049 - protein, 9 aa, synthetic construct
  source 1..9: note = Seed: LVVVGARGV (KRAS G12R)
LVVMGIRGF

SEQ ID NO: 25050 - protein, 9 aa, synthetic construct
  source 1..9: note = Seed: LVVVGARGV (KRAS G12R)
LVVMGIRGG

SEQ ID NO: 25051 - protein, 9 aa, synthetic construct
  source 1..9: note = Seed: LVVVGARGV (KRAS G12R)
LVVMGIRGH

SEQ ID NO: 25052 - protein, 9 aa, synthetic construct
  source 1..9: note = Seed: LVVVGARGV (KRAS G12R)
LVVMGIRGI

SEQ ID NO: 25053 - protein, 9 aa, synthetic construct
  source 1..9: note = Seed: LVVVGARGV (KRAS G12R)
LVVMGIRGK

SEQ ID NO: 25054 - protein, 9 aa, synthetic construct
  source 1..9: note = Seed: LVVVGARGV (KRAS G12R)
LVVMGIRGL

SEQ ID NO: 25055 - protein, 9 aa, synthetic construct
  source 1..9: note = Seed: LVVVGARGV (KRAS G12R)
LVVMGIRGM

SEQ ID NO: 25056 - protein, 9 aa, synthetic construct
  source 1..9: note = Seed: LVVVGARGV (KRAS G12R)
LVVMGIRGN

SEQ ID NO: 25057 - protein, 9 aa, synthetic construct
  source 1..9: note = Seed: LVVVGARGV (KRAS G12R)
LVVMGIRGQ

SEQ ID NO: 25058 - protein, 9 aa, synthetic construct
  source 1..9: note = Seed: LVVVGARGV (KRAS G12R)
LVVMGIRGR

SEQ ID NO: 25059 - protein, 9 aa, synthetic construct
  source 1..9: note = Seed: LVVVGARGV (KRAS G12R)
LVVMGIRGS

SEQ ID NO: 25060 - protein, 9 aa, synthetic construct
  source 1..9: note = Seed: LVVVGARGV (KRAS G12R)
LVVMGIRGT

SEQ ID NO: 25061 - protein, 9 aa, synthetic construct
  source 1..9: note = Seed: LVVVGARGV (KRAS G12R)
LVVMGIRGV

SEQ ID NO: 25062 - protein, 9 aa, synthetic construct
  source 1..9: note = Seed: LVVVGARGV (KRAS G12R)
LVVMGIRGY

SEQ ID NO: 25063 - protein, 9 aa, synthetic construct
  source 1..9: note = Seed: LVVVGARGV (KRAS G12R)
LVVMGKRGA

SEQ ID NO: 25064 - protein, 9 aa, synthetic construct
  source 1..9: note = Seed: LVVVGARGV (KRAS G12R)
LVVMGKRGC

SEQ ID NO: 25065 - protein, 9 aa, synthetic construct
  source 1..9: note = Seed: LVVVGARGV (KRAS G12R)
LVVMGKRGD

SEQ ID NO: 25066 - protein, 9 aa, synthetic construct
  source 1..9: note = Seed: LVVVGARGV (KRAS G12R)
LVVMGKRGE

SEQ ID NO: 25067 - protein, 9 aa, synthetic construct
  source 1..9: note = Seed: LVVVGARGV (KRAS G12R)
LVVMGKRGF

SEQ ID NO: 25068 - protein, 9 aa, synthetic construct
  source 1..9: note = Seed: LVVVGARGV (KRAS G12R)
LVVMGKRGG

SEQ ID NO: 25069 - protein, 9 aa, synthetic construct
  source 1..9: note = Seed: LVVVGARGV (KRAS G12R)
LVVMGKRGH

SEQ ID NO: 25070 - protein, 9 aa, synthetic construct
  source 1..9: note = Seed: LVVVGARGV (KRAS G12R)
LVVMGKRGI

SEQ ID NO: 25071 - protein, 9 aa, synthetic construct
  source 1..9: note = Seed: LVVVGARGV (KRAS G12R)
LVVMGKRGK

SEQ ID NO: 25072 - protein, 9 aa, synthetic construct
  source 1..9: note = Seed: LVVVGARGV (KRAS G12R)
LVVMGKRGL

SEQ ID NO: 25073 - protein, 9 aa, synthetic construct
  source 1..9: note = Seed: LVVVGARGV (KRAS G12R)
LVVMGKRGM

SEQ ID NO: 25074 - protein, 9 aa, synthetic construct
  source 1..9: note = Seed: LVVVGARGV (KRAS G12R)
LVVMGKRGN

SEQ ID NO: 25075 - protein, 9 aa, synthetic construct
  source 1..9: note = Seed: LVVVGARGV (KRAS G12R)
LVVMGKRGP

SEQ ID NO: 25076 - protein, 9 aa, synthetic construct
  source 1..9: note = Seed: LVVVGARGV (KRAS G12R)
LVVMGKRGQ

SEQ ID NO: 25077 - protein, 9 aa, synthetic construct
  source 1..9: note = Seed: LVVVGARGV (KRAS G12R)
LVVMGKRGR

SEQ ID NO: 25078 - protein, 9 aa, synthetic construct
  source 1..9: note = Seed: LVVVGARGV (KRAS G12R)
LVVMGKRGS

SEQ ID NO: 25079 - protein, 9 aa, synthetic construct
  source 1..9: note = Seed: LVVVGARGV (KRAS G12R)
LVVMGKRGT

SEQ ID NO: 25080 - protein, 9 aa, synthetic construct
  source 1..9: note = Seed: LVVVGARGV (KRAS G12R)
LVVMGKRGV

SEQ ID NO: 25081 - protein, 9 aa, synthetic construct
  source 1..9: note = Seed: LVVVGARGV (KRAS G12R)
LVVMGKRGW

SEQ ID NO: 25082 - protein, 9 aa, synthetic construct
  source 1..9: note = Seed: LVVVGARGV (KRAS G12R)
LVVMGKRGY

SEQ ID NO: 25083 - protein, 9 aa, synthetic construct
  source 1..9: note = Seed: LVVVGARGV (KRAS G12R)
LVVMGLRGA

SEQ ID NO: 25084 - protein, 9 aa, synthetic construct
  source 1..9: note = Seed: LVVVGARGV (KRAS G12R)
LVVMGLRGC

SEQ ID NO: 25085 - protein, 9 aa, synthetic construct
  source 1..9: note = Seed: LVVVGARGV (KRAS G12R)
LVVMGLRGF

SEQ ID NO: 25086 - protein, 9 aa, synthetic construct
  source 1..9: note = Seed: LVVVGARGV (KRAS G12R)
LVVMGLRGG

SEQ ID NO: 25087 - protein, 9 aa, synthetic construct
  source 1..9: note = Seed: LVVVGARGV (KRAS G12R)
LVVMGLRGH

SEQ ID NO: 25088 - protein, 9 aa, synthetic construct
  source 1..9: note = Seed: LVVVGARGV (KRAS G12R)
LVVMGLRGI

SEQ ID NO: 25089 - protein, 9 aa, synthetic construct
  source 1..9: note = Seed: LVVVGARGV (KRAS G12R)
LVVMGLRGK

SEQ ID NO: 25090 - protein, 9 aa, synthetic construct
  source 1..9: note = Seed: LVVVGARGV (KRAS G12R)
LVVMGLRGL

SEQ ID NO: 25091 - protein, 9 aa, synthetic construct
  source 1..9: note = Seed: LVVVGARGV (KRAS G12R)
LVVMGLRGM

SEQ ID NO: 25092 - protein, 9 aa, synthetic construct
  source 1..9: note = Seed: LVVVGARGV (KRAS G12R)
LVVMGLRGN

SEQ ID NO: 25093 - protein, 9 aa, synthetic construct
  source 1..9: note = Seed: LVVVGARGV (KRAS G12R)
LVVMGLRGQ

SEQ ID NO: 25094 - protein, 9 aa, synthetic construct
  source 1..9: note = Seed: LVVVGARGV (KRAS G12R)
LVVMGLRGR

SEQ ID NO: 25095 - protein, 9 aa, synthetic construct
  source 1..9: note = Seed: LVVVGARGV (KRAS G12R)
LVVMGLRGS

SEQ ID NO: 25096 - protein, 9 aa, synthetic construct
  source 1..9: note = Seed: LVVVGARGV (KRAS G12R)
LVVMGLRGT

SEQ ID NO: 25097 - protein, 9 aa, synthetic construct
  source 1..9: note = Seed: LVVVGARGV (KRAS G12R)
LVVMGLRGV

SEQ ID NO: 25098 - protein, 9 aa, synthetic construct
  source 1..9: note = Seed: LVVVGARGV (KRAS G12R)
LVVMGLRGY

SEQ ID NO: 25099 - protein, 9 aa, synthetic construct
  source 1..9: note = Seed: LVVVGARGV (KRAS G12R)
LVVMGMRGA

SEQ ID NO: 25100 - protein, 9 aa, synthetic construct
  source 1..9: note = Seed: LVVVGARGV (KRAS G12R)
LVVMGMRGC

SEQ ID NO: 25101 - protein, 9 aa, synthetic construct
  source 1..9: note = Seed: LVVVGARGV (KRAS G12R)
LVVMGMRGF

SEQ ID NO: 25102 - protein, 9 aa, synthetic construct
  source 1..9: note = Seed: LVVVGARGV (KRAS G12R)
LVVMGMRGG

SEQ ID NO: 25103 - protein, 9 aa, synthetic construct
  source 1..9: note = Seed: LVVVGARGV (KRAS G12R)
LVVMGMRGI

SEQ ID NO: 25104 - protein, 9 aa, synthetic construct
  source 1..9: note = Seed: LVVVGARGV (KRAS G12R)
LVVMGMRGK

SEQ ID NO: 25105 - protein, 9 aa, synthetic construct
  source 1..9: note = Seed: LVVVGARGV (KRAS G12R)
LVVMGMRGL

SEQ ID NO: 25106 - protein, 9 aa, synthetic construct
  source 1..9: note = Seed: LVVVGARGV (KRAS G12R)
LVVMGMRGM

SEQ ID NO: 25107 - protein, 9 aa, synthetic construct
  source 1..9: note = Seed: LVVVGARGV (KRAS G12R)
LVVMGMRGQ

SEQ ID NO: 25108 - protein, 9 aa, synthetic construct
  source 1..9: note = Seed: LVVVGARGV (KRAS G12R)
LVVMGMRGR

SEQ ID NO: 25109 - protein, 9 aa, synthetic construct
  source 1..9: note = Seed: LVVVGARGV (KRAS G12R)
LVVMGMRGS

SEQ ID NO: 25110 - protein, 9 aa, synthetic construct
  source 1..9: note = Seed: LVVVGARGV (KRAS G12R)
LVVMGMRGT

SEQ ID NO: 25111 - protein, 9 aa, synthetic construct
  source 1..9: note = Seed: LVVVGARGV (KRAS G12R)
LVVMGMRGV

SEQ ID NO: 25112 - protein, 9 aa, synthetic construct
  source 1..9: note = Seed: LVVVGARGV (KRAS G12R)
LVVMGMRGY

SEQ ID NO: 25113 - protein, 9 aa, synthetic construct
  source 1..9: note = Seed: LVVVGARGV (KRAS G12R)
LVVMGNRGA

SEQ ID NO: 25114 - protein, 9 aa, synthetic construct
  source 1..9: note = Seed: LVVVGARGV (KRAS G12R)
LVVMGNRGC

SEQ ID NO: 25115 - protein, 9 aa, synthetic construct
  source 1..9: note = Seed: LVVVGARGV (KRAS G12R)
LVVMGNRGF

SEQ ID NO: 25116 - protein, 9 aa, synthetic construct
  source 1..9: note = Seed: LVVVGARGV (KRAS G12R)
LVVMGNRGG

SEQ ID NO: 25117 - protein, 9 aa, synthetic construct
  source 1..9: note = Seed: LVVVGARGV (KRAS G12R)
LVVMGNRGH

SEQ ID NO: 25118 - protein, 9 aa, synthetic construct
  source 1..9: note = Seed: LVVVGARGV (KRAS G12R)
LVVMGNRGI

SEQ ID NO: 25119 - protein, 9 aa, synthetic construct
  source 1..9: note = Seed: LVVVGARGV (KRAS G12R)
LVVMGNRGK

SEQ ID NO: 25120 - protein, 9 aa, synthetic construct
  source 1..9: note = Seed: LVVVGARGV (KRAS G12R)
LVVMGNRGL

SEQ ID NO: 25121 - protein, 9 aa, synthetic construct
  source 1..9: note = Seed: LVVVGARGV (KRAS G12R)
LVVMGNRGM

SEQ ID NO: 25122 - protein, 9 aa, synthetic construct
  source 1..9: note = Seed: LVVVGARGV (KRAS G12R)
LVVMGNRGN

SEQ ID NO: 25123 - protein, 9 aa, synthetic construct
  source 1..9: note = Seed: LVVVGARGV (KRAS G12R)
LVVMGNRGP

SEQ ID NO: 25124 - protein, 9 aa, synthetic construct
  source 1..9: note = Seed: LVVVGARGV (KRAS G12R)
LVVMGNRGQ

SEQ ID NO: 25125 - protein, 9 aa, synthetic construct
  source 1..9: note = Seed: LVVVGARGV (KRAS G12R)
LVVMGNRGR

SEQ ID NO: 25126 - protein, 9 aa, synthetic construct
  source 1..9: note = Seed: LVVVGARGV (KRAS G12R)
LVVMGNRGS

SEQ ID NO: 25127 - protein, 9 aa, synthetic construct
  source 1..9: note = Seed: LVVVGARGV (KRAS G12R)
LVVMGNRGT

SEQ ID NO: 25128 - protein, 9 aa, synthetic construct
  source 1..9: note = Seed: LVVVGARGV (KRAS G12R)
LVVMGNRGV

SEQ ID NO: 25129 - protein, 9 aa, synthetic construct
  source 1..9: note = Seed: LVVVGARGV (KRAS G12R)
LVVMGNRGW

SEQ ID NO: 25130 - protein, 9 aa, synthetic construct
  source 1..9: note = Seed: LVVVGARGV (KRAS G12R)
LVVMGNRGY

SEQ ID NO: 25131 - protein, 9 aa, synthetic construct
  source 1..9: note = Seed: LVVVGARGV (KRAS G12R)
LVVMGPRGA

SEQ ID NO: 25132 - protein, 9 aa, synthetic construct
  source 1..9: note = Seed: LVVVGARGV (KRAS G12R)
LVVMGPRGC

SEQ ID NO: 25133 - protein, 9 aa, synthetic construct
  source 1..9: note = Seed: LVVVGARGV (KRAS G12R)
LVVMGPRGF

SEQ ID NO: 25134 - protein, 9 aa, synthetic construct
  source 1..9: note = Seed: LVVVGARGV (KRAS G12R)
LVVMGPRGG

SEQ ID NO: 25135 - protein, 9 aa, synthetic construct
  source 1..9: note = Seed: LVVVGARGV (KRAS G12R)
LVVMGPRGH

SEQ ID NO: 25136 - protein, 9 aa, synthetic construct
  source 1..9: note = Seed: LVVVGARGV (KRAS G12R)
LVVMGPRGI

SEQ ID NO: 25137 - protein, 9 aa, synthetic construct
  source 1..9: note = Seed: LVVVGARGV (KRAS G12R)
LVVMGPRGK

SEQ ID NO: 25138 - protein, 9 aa, synthetic construct
  source 1..9: note = Seed: LVVVGARGV (KRAS G12R)
LVVMGPRGL

SEQ ID NO: 25139 - protein, 9 aa, synthetic construct
  source 1..9: note = Seed: LVVVGARGV (KRAS G12R)
LVVMGPRGM

SEQ ID NO: 25140 - protein, 9 aa, synthetic construct
  source 1..9: note = Seed: LVVVGARGV (KRAS G12R)
LVVMGPRGN

SEQ ID NO: 25141 - protein, 9 aa, synthetic construct
  source 1..9: note = Seed: LVVVGARGV (KRAS G12R)
LVVMGPRGP

SEQ ID NO: 25142 - protein, 9 aa, synthetic construct
  source 1..9: note = Seed: LVVVGARGV (KRAS G12R)
LVVMGPRGQ

SEQ ID NO: 25143 - protein, 9 aa, synthetic construct
  source 1..9: note = Seed: LVVVGARGV (KRAS G12R)
LVVMGPRGR

SEQ ID NO: 25144 - protein, 9 aa, synthetic construct
  source 1..9: note = Seed: LVVVGARGV (KRAS G12R)
LVVMGPRGS

SEQ ID NO: 25145 - protein, 9 aa, synthetic construct
  source 1..9: note = Seed: LVVVGARGV (KRAS G12R)
LVVMGPRGT

SEQ ID NO: 25146 - protein, 9 aa, synthetic construct
  source 1..9: note = Seed: LVVVGARGV (KRAS G12R)
LVVMGPRGV

SEQ ID NO: 25147 - protein, 9 aa, synthetic construct
  source 1..9: note = Seed: LVVVGARGV (KRAS G12R)
LVVMGPRGW

SEQ ID NO: 25148 - protein, 9 aa, synthetic construct
  source 1..9: note = Seed: LVVVGARGV (KRAS G12R)
LVVMGPRGY

SEQ ID NO: 25149 - protein, 9 aa, synthetic construct
  source 1..9: note = Seed: LVVVGARGV (KRAS G12R)
LVVMGQRGA

SEQ ID NO: 25150 - protein, 9 aa, synthetic construct
  source 1..9: note = Seed: LVVVGARGV (KRAS G12R)
LVVMGQRGF

SEQ ID NO: 25151 - protein, 9 aa, synthetic construct
  source 1..9: note = Seed: LVVVGARGV (KRAS G12R)
LVVMGQRGG

SEQ ID NO: 25152 - protein, 9 aa, synthetic construct
  source 1..9: note = Seed: LVVVGARGV (KRAS G12R)
LVVMGQRGH

SEQ ID NO: 25153 - protein, 9 aa, synthetic construct
  source 1..9: note = Seed: LVVVGARGV (KRAS G12R)
LVVMGQRGI

SEQ ID NO: 25154 - protein, 9 aa, synthetic construct
  source 1..9: note = Seed: LVVVGARGV (KRAS G12R)
LVVMGQRGK

SEQ ID NO: 25155 - protein, 9 aa, synthetic construct
  source 1..9: note = Seed: LVVVGARGV (KRAS G12R)
LVVMGQRGL

SEQ ID NO: 25156 - protein, 9 aa, synthetic construct
  source 1..9: note = Seed: LVVVGARGV (KRAS G12R)
LVVMGQRGM

SEQ ID NO: 25157 - protein, 9 aa, synthetic construct
  source 1..9: note = Seed: LVVVGARGV (KRAS G12R)
LVVMGQRGQ

SEQ ID NO: 25158 - protein, 9 aa, synthetic construct
  source 1..9: note = Seed: LVVVGARGV (KRAS G12R)
LVVMGQRGR

SEQ ID NO: 25159 - protein, 9 aa, synthetic construct
  source 1..9: note = Seed: LVVVGARGV (KRAS G12R)
LVVMGQRGS

SEQ ID NO: 25160 - protein, 9 aa, synthetic construct
  source 1..9: note = Seed: LVVVGARGV (KRAS G12R)
LVVMGQRGT

SEQ ID NO: 25161 - protein, 9 aa, synthetic construct
  source 1..9: note = Seed: LVVVGARGV (KRAS G12R)
LVVMGQRGV

SEQ ID NO: 25162 - protein, 9 aa, synthetic construct
  source 1..9: note = Seed: LVVVGARGV (KRAS G12R)
LVVMGQRGY

SEQ ID NO: 25163 - protein, 9 aa, synthetic construct
  source 1..9: note = Seed: LVVVGARGV (KRAS G12R)
LVVMGRRGA

SEQ ID NO: 25164 - protein, 9 aa, synthetic construct
  source 1..9: note = Seed: LVVVGARGV (KRAS G12R)
LVVMGRRGC

SEQ ID NO: 25165 - protein, 9 aa, synthetic construct
  source 1..9: note = Seed: LVVVGARGV (KRAS G12R)
LVVMGRRGD

SEQ ID NO: 25166 - protein, 9 aa, synthetic construct
  source 1..9: note = Seed: LVVVGARGV (KRAS G12R)
LVVMGRRGE

SEQ ID NO: 25167 - protein, 9 aa, synthetic construct
  source 1..9: note = Seed: LVVVGARGV (KRAS G12R)
LVVMGRRGF

SEQ ID NO: 25168 - protein, 9 aa, synthetic construct
  source 1..9: note = Seed: LVVVGARGV (KRAS G12R)
LVVMGRRGG

SEQ ID NO: 25169 - protein, 9 aa, synthetic construct
  source 1..9: note = Seed: LVVVGARGV (KRAS G12R)
LVVMGRRGH

SEQ ID NO: 25170 - protein, 9 aa, synthetic construct
  source 1..9: note = Seed: LVVVGARGV (KRAS G12R)
LVVMGRRGI

SEQ ID NO: 25171 - protein, 9 aa, synthetic construct
  source 1..9: note = Seed: LVVVGARGV (KRAS G12R)
LVVMGRRGK

SEQ ID NO: 25172 - protein, 9 aa, synthetic construct
  source 1..9: note = Seed: LVVVGARGV (KRAS G12R)
LVVMGRRGL

SEQ ID NO: 25173 - protein, 9 aa, synthetic construct
  source 1..9: note = Seed: LVVVGARGV (KRAS G12R)
LVVMGRRGM

SEQ ID NO: 25174 - protein, 9 aa, synthetic construct
  source 1..9: note = Seed: LVVVGARGV (KRAS G12R)
LVVMGRRGN

SEQ ID NO: 25175 - protein, 9 aa, synthetic construct
  source 1..9: note = Seed: LVVVGARGV (KRAS G12R)
LVVMGRRGP

SEQ ID NO: 25176 - protein, 9 aa, synthetic construct
  source 1..9: note = Seed: LVVVGARGV (KRAS G12R)
LVVMGRRGQ

SEQ ID NO: 25177 - protein, 9 aa, synthetic construct
  source 1..9: note = Seed: LVVVGARGV (KRAS G12R)
LVVMGRRGR

SEQ ID NO: 25178 - protein, 9 aa, synthetic construct
  source 1..9: note = Seed: LVVVGARGV (KRAS G12R)
LVVMGRRGS

SEQ ID NO: 25179 - protein, 9 aa, synthetic construct
  source 1..9: note = Seed: LVVVGARGV (KRAS G12R)
LVVMGRRGT

SEQ ID NO: 25180 - protein, 9 aa, synthetic construct
  source 1..9: note = Seed: LVVVGARGV (KRAS G12R)
LVVMGRRGV

SEQ ID NO: 25181 - protein, 9 aa, synthetic construct
  source 1..9: note = Seed: LVVVGARGV (KRAS G12R)
LVVMGRRGW

SEQ ID NO: 25182 - protein, 9 aa, synthetic construct
  source 1..9: note = Seed: LVVVGARGV (KRAS G12R)
LVVMGRRGY

SEQ ID NO: 25183 - protein, 9 aa, synthetic construct
  source 1..9: note = Seed: LVVVGARGV (KRAS G12R)
LVVMGSRGA

SEQ ID NO: 25184 - protein, 9 aa, synthetic construct
  source 1..9: note = Seed: LVVVGARGV (KRAS G12R)
LVVMGSRGC

SEQ ID NO: 25185 - protein, 9 aa, synthetic construct
  source 1..9: note = Seed: LVVVGARGV (KRAS G12R)
LVVMGSRGF

SEQ ID NO: 25186 - protein, 9 aa, synthetic construct
  source 1..9: note = Seed: LVVVGARGV (KRAS G12R)
LVVMGSRGG

SEQ ID NO: 25187 - protein, 9 aa, synthetic construct
  source 1..9: note = Seed: LVVVGARGV (KRAS G12R)
LVVMGSRGH

SEQ ID NO: 25188 - protein, 9 aa, synthetic construct
  source 1..9: note = Seed: LVVVGARGV (KRAS G12R)
LVVMGSRGI

SEQ ID NO: 25189 - protein, 9 aa, synthetic construct
  source 1..9: note = Seed: LVVVGARGV (KRAS G12R)
LVVMGSRGK

SEQ ID NO: 25190 - protein, 9 aa, synthetic construct
  source 1..9: note = Seed: LVVVGARGV (KRAS G12R)
LVVMGSRGL

SEQ ID NO: 25191 - protein, 9 aa, synthetic construct
  source 1..9: note = Seed: LVVVGARGV (KRAS G12R)
LVVMGSRGM

SEQ ID NO: 25192 - protein, 9 aa, synthetic construct
  source 1..9: note = Seed: LVVVGARGV (KRAS G12R)
LVVMGSRGN

SEQ ID NO: 25193 - protein, 9 aa, synthetic construct
  source 1..9: note = Seed: LVVVGARGV (KRAS G12R)
LVVMGSRGP

SEQ ID NO: 25194 - protein, 9 aa, synthetic construct
  source 1..9: note = Seed: LVVVGARGV (KRAS G12R)
LVVMGSRGQ

SEQ ID NO: 25195 - protein, 9 aa, synthetic construct
  source 1..9: note = Seed: LVVVGARGV (KRAS G12R)
LVVMGSRGR

SEQ ID NO: 25196 - protein, 9 aa, synthetic construct
  source 1..9: note = Seed: LVVVGARGV (KRAS G12R)
LVVMGSRGS

SEQ ID NO: 25197 - protein, 9 aa, synthetic construct
  source 1..9: note = Seed: LVVVGARGV (KRAS G12R)
LVVMGSRGT

SEQ ID NO: 25198 - protein, 9 aa, synthetic construct
  source 1..9: note = Seed: LVVVGARGV (KRAS G12R)
LVVMGSRGV

SEQ ID NO: 25199 - protein, 9 aa, synthetic construct
  source 1..9: note = Seed: LVVVGARGV (KRAS G12R)
LVVMGSRGW

SEQ ID NO: 25200 - protein, 9 aa, synthetic construct
  source 1..9: note = Seed: LVVVGARGV (KRAS G12R)
LVVMGSRGY

SEQ ID NO: 25201 - protein, 9 aa, synthetic construct
  source 1..9: note = Seed: LVVVGARGV (KRAS G12R)
LVVMGTRGA

SEQ ID NO: 25202 - protein, 9 aa, synthetic construct
  source 1..9: note = Seed: LVVVGARGV (KRAS G12R)
LVVMGTRGC

SEQ ID NO: 25203 - protein, 9 aa, synthetic construct
  source 1..9: note = Seed: LVVVGARGV (KRAS G12R)
LVVMGTRGF

SEQ ID NO: 25204 - protein, 9 aa, synthetic construct
  source 1..9: note = Seed: LVVVGARGV (KRAS G12R)
LVVMGTRGG

SEQ ID NO: 25205 - protein, 9 aa, synthetic construct
  source 1..9: note = Seed: LVVVGARGV (KRAS G12R)
LVVMGTRGH

SEQ ID NO: 25206 - protein, 9 aa, synthetic construct
  source 1..9: note = Seed: LVVVGARGV (KRAS G12R)
LVVMGTRGI

SEQ ID NO: 25207 - protein, 9 aa, synthetic construct
  source 1..9: note = Seed: LVVVGARGV (KRAS G12R)
LVVMGTRGK

SEQ ID NO: 25208 - protein, 9 aa, synthetic construct
  source 1..9: note = Seed: LVVVGARGV (KRAS G12R)
LVVMGTRGL

SEQ ID NO: 25209 - protein, 9 aa, synthetic construct
  source 1..9: note = Seed: LVVVGARGV (KRAS G12R)
LVVMGTRGM

SEQ ID NO: 25210 - protein, 9 aa, synthetic construct
  source 1..9: note = Seed: LVVVGARGV (KRAS G12R)
LVVMGTRGN

SEQ ID NO: 25211 - protein, 9 aa, synthetic construct
  source 1..9: note = Seed: LVVVGARGV (KRAS G12R)
LVVMGTRGP

SEQ ID NO: 25212 - protein, 9 aa, synthetic construct
  source 1..9: note = Seed: LVVVGARGV (KRAS G12R)
LVVMGTRGQ

SEQ ID NO: 25213 - protein, 9 aa, synthetic construct
  source 1..9: note = Seed: LVVVGARGV (KRAS G12R)
LVVMGTRGR

SEQ ID NO: 25214 - protein, 9 aa, synthetic construct
  source 1..9: note = Seed: LVVVGARGV (KRAS G12R)
LVVMGTRGS

SEQ ID NO: 25215 - protein, 9 aa, synthetic construct
  source 1..9: note = Seed: LVVVGARGV (KRAS G12R)
LVVMGTRGT

SEQ ID NO: 25216 - protein, 9 aa, synthetic construct
  source 1..9: note = Seed: LVVVGARGV (KRAS G12R)
LVVMGTRGV

SEQ ID NO: 25217 - protein, 9 aa, synthetic construct
  source 1..9: note = Seed: LVVVGARGV (KRAS G12R)
LVVMGTRGW

SEQ ID NO: 25218 - protein, 9 aa, synthetic construct
  source 1..9: note = Seed: LVVVGARGV (KRAS G12R)
LVVMGTRGY

SEQ ID NO: 25219 - protein, 9 aa, synthetic construct
  source 1..9: note = Seed: LVVVGARGV (KRAS G12R)
LVVMGVRGA

SEQ ID NO: 25220 - protein, 9 aa, synthetic construct
  source 1..9: note = Seed: LVVVGARGV (KRAS G12R)
LVVMGVRGC

SEQ ID NO: 25221 - protein, 9 aa, synthetic construct
  source 1..9: note = Seed: LVVVGARGV (KRAS G12R)
LVVMGVRGF

SEQ ID NO: 25222 - protein, 9 aa, synthetic construct
  source 1..9: note = Seed: LVVVGARGV (KRAS G12R)
LVVMGVRGG

SEQ ID NO: 25223 - protein, 9 aa, synthetic construct
  source 1..9: note = Seed: LVVVGARGV (KRAS G12R)
LVVMGVRGH

SEQ ID NO: 25224 - protein, 9 aa, synthetic construct
  source 1..9: note = Seed: LVVVGARGV (KRAS G12R)
LVVMGVRGI

SEQ ID NO: 25225 - protein, 9 aa, synthetic construct
  source 1..9: note = Seed: LVVVGARGV (KRAS G12R)
LVVMGVRGK

SEQ ID NO: 25226 - protein, 9 aa, synthetic construct
  source 1..9: note = Seed: LVVVGARGV (KRAS G12R)
LVVMGVRGL

SEQ ID NO: 25227 - protein, 9 aa, synthetic construct
  source 1..9: note = Seed: LVVVGARGV (KRAS G12R)
LVVMGVRGM

SEQ ID NO: 25228 - protein, 9 aa, synthetic construct
  source 1..9: note = Seed: LVVVGARGV (KRAS G12R)
LVVMGVRGN

SEQ ID NO: 25229 - protein, 9 aa, synthetic construct
  source 1..9: note = Seed: LVVVGARGV (KRAS G12R)
LVVMGVRGQ

SEQ ID NO: 25230 - protein, 9 aa, synthetic construct
  source 1..9: note = Seed: LVVVGARGV (KRAS G12R)
LVVMGVRGR

SEQ ID NO: 25231 - protein, 9 aa, synthetic construct
  source 1..9: note = Seed: LVVVGARGV (KRAS G12R)
LVVMGVRGS

SEQ ID NO: 25232 - protein, 9 aa, synthetic construct
  source 1..9: note = Seed: LVVVGARGV (KRAS G12R)
LVVMGVRGT

SEQ ID NO: 25233 - protein, 9 aa, synthetic construct
  source 1..9: note = Seed: LVVVGARGV (KRAS G12R)
LVVMGVRGV

SEQ ID NO: 25234 - protein, 9 aa, synthetic construct
  source 1..9: note = Seed: LVVVGARGV (KRAS G12R)
LVVMGVRGY

SEQ ID NO: 25235 - protein, 9 aa, synthetic construct
  source 1..9: note = Seed: LVVVGARGV (KRAS G12R)
LVVMGWRGA

SEQ ID NO: 25236 - protein, 9 aa, synthetic construct
  source 1..9: note = Seed: LVVVGARGV (KRAS G12R)
LVVMGWRGI

SEQ ID NO: 25237 - protein, 9 aa, synthetic construct
  source 1..9: note = Seed: LVVVGARGV (KRAS G12R)
LVVMGWRGL

SEQ ID NO: 25238 - protein, 9 aa, synthetic construct
  source 1..9: note = Seed: LVVVGARGV (KRAS G12R)
LVVMGWRGM

SEQ ID NO: 25239 - protein, 9 aa, synthetic construct
  source 1..9: note = Seed: LVVVGARGV (KRAS G12R)
LVVMGWRGR

SEQ ID NO: 25240 - protein, 9 aa, synthetic construct
  source 1..9: note = Seed: LVVVGARGV (KRAS G12R)
LVVMGWRGV

SEQ ID NO: 25241 - protein, 9 aa, synthetic construct
  source 1..9: note = Seed: LVVVGARGV (KRAS G12R)
LVVMGWRGY

SEQ ID NO: 25242 - protein, 9 aa, synthetic construct
  source 1..9: note = Seed: LVVVGARGV (KRAS G12R)
LVVMGYRGA

SEQ ID NO: 25243 - protein, 9 aa, synthetic construct
  source 1..9: note = Seed: LVVVGARGV (KRAS G12R)
LVVMGYRGF

SEQ ID NO: 25244 - protein, 9 aa, synthetic construct
  source 1..9: note = Seed: LVVVGARGV (KRAS G12R)
LVVMGYRGG

SEQ ID NO: 25245 - protein, 9 aa, synthetic construct
  source 1..9: note = Seed: LVVVGARGV (KRAS G12R)
LVVMGYRGI

SEQ ID NO: 25246 - protein, 9 aa, synthetic construct
  source 1..9: note = Seed: LVVVGARGV (KRAS G12R)
LVVMGYRGL

SEQ ID NO: 25247 - protein, 9 aa, synthetic construct
  source 1..9: note = Seed: LVVVGARGV (KRAS G12R)
LVVMGYRGM

SEQ ID NO: 25248 - protein, 9 aa, synthetic construct
  source 1..9: note = Seed: LVVVGARGV (KRAS G12R)
LVVMGYRGQ

SEQ ID NO: 25249 - protein, 9 aa, synthetic construct
  source 1..9: note = Seed: LVVVGARGV (KRAS G12R)
LVVMGYRGR

SEQ ID NO: 25250 - protein, 9 aa, synthetic construct
  source 1..9: note = Seed: LVVVGARGV (KRAS G12R)
LVVMGYRGS

SEQ ID NO: 25251 - protein, 9 aa, synthetic construct
  source 1..9: note = Seed: LVVVGARGV (KRAS G12R)
LVVMGYRGV

SEQ ID NO: 25252 - protein, 9 aa, synthetic construct
  source 1..9: note = Seed: LVVVGARGV (KRAS G12R)
LVVMGYRGY

SEQ ID NO: 25253 - protein, 9 aa, synthetic construct
  source 1..9: note = Seed: LVVVGARGV (KRAS G12R)
LVVNGARGA

SEQ ID NO: 25254 - protein, 9 aa, synthetic construct
  source 1..9: note = Seed: LVVVGARGV (KRAS G12R)
LVVNGARGF

SEQ ID NO: 25255 - protein, 9 aa, synthetic construct
  source 1..9: note = Seed: LVVVGARGV (KRAS G12R)
LVVNGARGH

SEQ ID NO: 25256 - protein, 9 aa, synthetic construct
  source 1..9: note = Seed: LVVVGARGV (KRAS G12R)
LVVNGARGI

SEQ ID NO: 25257 - protein, 9 aa, synthetic construct
  source 1..9: note = Seed: LVVVGARGV (KRAS G12R)
LVVNGARGL

SEQ ID NO: 25258 - protein, 9 aa, synthetic construct
  source 1..9: note = Seed: LVVVGARGV (KRAS G12R)
LVVNGARGM

SEQ ID NO: 25259 - protein, 9 aa, synthetic construct
  source 1..9: note = Seed: LVVVGARGV (KRAS G12R)
LVVNGARGN

SEQ ID NO: 25260 - protein, 9 aa, synthetic construct
  source 1..9: note = Seed: LVVVGARGV (KRAS G12R)
LVVNGARGR

SEQ ID NO: 25261 - protein, 9 aa, synthetic construct
  source 1..9: note = Seed: LVVVGARGV (KRAS G12R)
LVVNGARGS

SEQ ID NO: 25262 - protein, 9 aa, synthetic construct
  source 1..9: note = Seed: LVVVGARGV (KRAS G12R)
LVVNGARGT

SEQ ID NO: 25263 - protein, 9 aa, synthetic construct
  source 1..9: note = Seed: LVVVGARGV (KRAS G12R)
LVVNGARGV

SEQ ID NO: 25264 - protein, 9 aa, synthetic construct
  source 1..9: note = Seed: LVVVGARGV (KRAS G12R)
LVVNGARGW

SEQ ID NO: 25265 - protein, 9 aa, synthetic construct
  source 1..9: note = Seed: LVVVGARGV (KRAS G12R)
LVVNGARGY

SEQ ID NO: 25266 - protein, 9 aa, synthetic construct
  source 1..9: note = Seed: LVVVGARGV (KRAS G12R)
LVVNGCRGF

SEQ ID NO: 25267 - protein, 9 aa, synthetic construct
  source 1..9: note = Seed: LVVVGARGV (KRAS G12R)
LVVNGCRGI

SEQ ID NO: 25268 - protein, 9 aa, synthetic construct
  source 1..9: note = Seed: LVVVGARGV (KRAS G12R)
LVVNGCRGL

SEQ ID NO: 25269 - protein, 9 aa, synthetic construct
  source 1..9: note = Seed: LVVVGARGV (KRAS G12R)
LVVNGCRGV

SEQ ID NO: 25270 - protein, 9 aa, synthetic construct
  source 1..9: note = Seed: LVVVGARGV (KRAS G12R)
LVVNGDRGF

SEQ ID NO: 25271 - protein, 9 aa, synthetic construct
  source 1..9: note = Seed: LVVVGARGV (KRAS G12R)
LVVNGDRGI

SEQ ID NO: 25272 - protein, 9 aa, synthetic construct
  source 1..9: note = Seed: LVVVGARGV (KRAS G12R)
LVVNGDRGL

SEQ ID NO: 25273 - protein, 9 aa, synthetic construct
  source 1..9: note = Seed: LVVVGARGV (KRAS G12R)
LVVNGDRGV

SEQ ID NO: 25274 - protein, 9 aa, synthetic construct
  source 1..9: note = Seed: LVVVGARGV (KRAS G12R)
LVVNGERGI

SEQ ID NO: 25275 - protein, 9 aa, synthetic construct
  source 1..9: note = Seed: LVVVGARGV (KRAS G12R)
LVVNGERGV

SEQ ID NO: 25276 - protein, 9 aa, synthetic construct
  source 1..9: note = Seed: LVVVGARGV (KRAS G12R)
LVVNGFRGF

SEQ ID NO: 25277 - protein, 9 aa, synthetic construct
  source 1..9: note = Seed: LVVVGARGV (KRAS G12R)
LVVNGFRGI

SEQ ID NO: 25278 - protein, 9 aa, synthetic construct
  source 1..9: note = Seed: LVVVGARGV (KRAS G12R)
LVVNGFRGL

SEQ ID NO: 25279 - protein, 9 aa, synthetic construct
  source 1..9: note = Seed: LVVVGARGV (KRAS G12R)
LVVNGFRGR

SEQ ID NO: 25280 - protein, 9 aa, synthetic construct
  source 1..9: note = Seed: LVVVGARGV (KRAS G12R)
LVVNGFRGV

SEQ ID NO: 25281 - protein, 9 aa, synthetic construct
  source 1..9: note = Seed: LVVVGARGV (KRAS G12R)
LVVNGGRGA

SEQ ID NO: 25282 - protein, 9 aa, synthetic construct
  source 1..9: note = Seed: LVVVGARGV (KRAS G12R)
LVVNGGRGF

SEQ ID NO: 25283 - protein, 9 aa, synthetic construct
  source 1..9: note = Seed: LVVVGARGV (KRAS G12R)
LVVNGGRGI

SEQ ID NO: 25284 - protein, 9 aa, synthetic construct
  source 1..9: note = Seed: LVVVGARGV (KRAS G12R)
LVVNGGRGL

SEQ ID NO: 25285 - protein, 9 aa, synthetic construct
  source 1..9: note = Seed: LVVVGARGV (KRAS G12R)
LVVNGGRGM

SEQ ID NO: 25286 - protein, 9 aa, synthetic construct
  source 1..9: note = Seed: LVVVGARGV (KRAS G12R)
LVVNGGRGV

SEQ ID NO: 25287 - protein, 9 aa, synthetic construct
  source 1..9: note = Seed: LVVVGARGV (KRAS G12R)
LVVNGGRGW

SEQ ID NO: 25288 - protein, 9 aa, synthetic construct
  source 1..9: note = Seed: LVVVGARGV (KRAS G12R)
LVVNGGRGY

SEQ ID NO: 25289 - protein, 9 aa, synthetic construct
  source 1..9: note = Seed: LVVVGARGV (KRAS G12R)
LVVNGHRGF

SEQ ID NO: 25290 - protein, 9 aa, synthetic construct
  source 1..9: note = Seed: LVVVGARGV (KRAS G12R)
LVVNGHRGI

SEQ ID NO: 25291 - protein, 9 aa, synthetic construct
  source 1..9: note = Seed: LVVVGARGV (KRAS G12R)
LVVNGHRGL

SEQ ID NO: 25292 - protein, 9 aa, synthetic construct
  source 1..9: note = Seed: LVVVGARGV (KRAS G12R)
LVVNGHRGM

SEQ ID NO: 25293 - protein, 9 aa, synthetic construct
  source 1..9: note = Seed: LVVVGARGV (KRAS G12R)
LVVNGHRGR

SEQ ID NO: 25294 - protein, 9 aa, synthetic construct
  source 1..9: note = Seed: LVVVGARGV (KRAS G12R)
LVVNGHRGV

SEQ ID NO: 25295 - protein, 9 aa, synthetic construct
  source 1..9: note = Seed: LVVVGARGV (KRAS G12R)
LVVNGHRGY

SEQ ID NO: 25296 - protein, 9 aa, synthetic construct
  source 1..9: note = Seed: LVVVGARGV (KRAS G12R)
LVVNGIRGA

SEQ ID NO: 25297 - protein, 9 aa, synthetic construct
  source 1..9: note = Seed: LVVVGARGV (KRAS G12R)
LVVNGIRGF

SEQ ID NO: 25298 - protein, 9 aa, synthetic construct
  source 1..9: note = Seed: LVVVGARGV (KRAS G12R)
LVVNGIRGI

SEQ ID NO: 25299 - protein, 9 aa, synthetic construct
  source 1..9: note = Seed: LVVVGARGV (KRAS G12R)
LVVNGIRGK

SEQ ID NO: 25300 - protein, 9 aa, synthetic construct
  source 1..9: note = Seed: LVVVGARGV (KRAS G12R)
LVVNGIRGL

SEQ ID NO: 25301 - protein, 9 aa, synthetic construct
  source 1..9: note = Seed: LVVVGARGV (KRAS G12R)
LVVNGIRGM

SEQ ID NO: 25302 - protein, 9 aa, synthetic construct
  source 1..9: note = Seed: LVVVGARGV (KRAS G12R)
LVVNGIRGN

SEQ ID NO: 25303 - protein, 9 aa, synthetic construct
  source 1..9: note = Seed: LVVVGARGV (KRAS G12R)
LVVNGIRGR

SEQ ID NO: 25304 - protein, 9 aa, synthetic construct
  source 1..9: note = Seed: LVVVGARGV (KRAS G12R)
LVVNGIRGS

SEQ ID NO: 25305 - protein, 9 aa, synthetic construct
  source 1..9: note = Seed: LVVVGARGV (KRAS G12R)
LVVNGIRGT

SEQ ID NO: 25306 - protein, 9 aa, synthetic construct
  source 1..9: note = Seed: LVVVGARGV (KRAS G12R)
LVVNGIRGV

SEQ ID NO: 25307 - protein, 9 aa, synthetic construct
  source 1..9: note = Seed: LVVVGARGV (KRAS G12R)
LVVNGIRGW

SEQ ID NO: 25308 - protein, 9 aa, synthetic construct
  source 1..9: note = Seed: LVVVGARGV (KRAS G12R)
LVVNGIRGY

SEQ ID NO: 25309 - protein, 9 aa, synthetic construct
  source 1..9: note = Seed: LVVVGARGV (KRAS G12R)
LVVNGKRGA

SEQ ID NO: 25310 - protein, 9 aa, synthetic construct
  source 1..9: note = Seed: LVVVGARGV (KRAS G12R)
LVVNGKRGF

SEQ ID NO: 25311 - protein, 9 aa, synthetic construct
  source 1..9: note = Seed: LVVVGARGV (KRAS G12R)
LVVNGKRGH

SEQ ID NO: 25312 - protein, 9 aa, synthetic construct
  source 1..9: note = Seed: LVVVGARGV (KRAS G12R)
LVVNGKRGI

SEQ ID NO: 25313 - protein, 9 aa, synthetic construct
  source 1..9: note = Seed: LVVVGARGV (KRAS G12R)
LVVNGKRGK

SEQ ID NO: 25314 - protein, 9 aa, synthetic construct
  source 1..9: note = Seed: LVVVGARGV (KRAS G12R)
LVVNGKRGL

SEQ ID NO: 25315 - protein, 9 aa, synthetic construct
  source 1..9: note = Seed: LVVVGARGV (KRAS G12R)
LVVNGKRGM

SEQ ID NO: 25316 - protein, 9 aa, synthetic construct
  source 1..9: note = Seed: LVVVGARGV (KRAS G12R)
LVVNGKRGR

SEQ ID NO: 25317 - protein, 9 aa, synthetic construct
  source 1..9: note = Seed: LVVVGARGV (KRAS G12R)
LVVNGKRGS

SEQ ID NO: 25318 - protein, 9 aa, synthetic construct
  source 1..9: note = Seed: LVVVGARGV (KRAS G12R)
LVVNGKRGV

SEQ ID NO: 25319 - protein, 9 aa, synthetic construct
  source 1..9: note = Seed: LVVVGARGV (KRAS G12R)
LVVNGKRGY

SEQ ID NO: 25320 - protein, 9 aa, synthetic construct
  source 1..9: note = Seed: LVVVGARGV (KRAS G12R)
LVVNGLRGA

SEQ ID NO: 25321 - protein, 9 aa, synthetic construct
  source 1..9: note = Seed: LVVVGARGV (KRAS G12R)
LVVNGLRGF

SEQ ID NO: 25322 - protein, 9 aa, synthetic construct
  source 1..9: note = Seed: LVVVGARGV (KRAS G12R)
LVVNGLRGI

SEQ ID NO: 25323 - protein, 9 aa, synthetic construct
  source 1..9: note = Seed: LVVVGARGV (KRAS G12R)
LVVNGLRGK

SEQ ID NO: 25324 - protein, 9 aa, synthetic construct
  source 1..9: note = Seed: LVVVGARGV (KRAS G12R)
LVVNGLRGL

SEQ ID NO: 25325 - protein, 9 aa, synthetic construct
  source 1..9: note = Seed: LVVVGARGV (KRAS G12R)
LVVNGLRGM

SEQ ID NO: 25326 - protein, 9 aa, synthetic construct
  source 1..9: note = Seed: LVVVGARGV (KRAS G12R)
LVVNGLRGR

SEQ ID NO: 25327 - protein, 9 aa, synthetic construct
  source 1..9: note = Seed: LVVVGARGV (KRAS G12R)
LVVNGLRGT

SEQ ID NO: 25328 - protein, 9 aa, synthetic construct
  source 1..9: note = Seed: LVVVGARGV (KRAS G12R)
LVVNGLRGV

SEQ ID NO: 25329 - protein, 9 aa, synthetic construct
  source 1..9: note = Seed: LVVVGARGV (KRAS G12R)
LVVNGLRGY

SEQ ID NO: 25330 - protein, 9 aa, synthetic construct
  source 1..9: note = Seed: LVVVGARGV (KRAS G12R)
LVVNGMRGA

SEQ ID NO: 25331 - protein, 9 aa, synthetic construct
  source 1..9: note = Seed: LVVVGARGV (KRAS G12R)
LVVNGMRGF

SEQ ID NO: 25332 - protein, 9 aa, synthetic construct
  source 1..9: note = Seed: LVVVGARGV (KRAS G12R)
LVVNGMRGI

SEQ ID NO: 25333 - protein, 9 aa, synthetic construct
  source 1..9: note = Seed: LVVVGARGV (KRAS G12R)
LVVNGMRGK

SEQ ID NO: 25334 - protein, 9 aa, synthetic construct
  source 1..9: note = Seed: LVVVGARGV (KRAS G12R)
LVVNGMRGL

SEQ ID NO: 25335 - protein, 9 aa, synthetic construct
  source 1..9: note = Seed: LVVVGARGV (KRAS G12R)
LVVNGMRGM

SEQ ID NO: 25336 - protein, 9 aa, synthetic construct
  source 1..9: note = Seed: LVVVGARGV (KRAS G12R)
LVVNGMRGR

SEQ ID NO: 25337 - protein, 9 aa, synthetic construct
  source 1..9: note = Seed: LVVVGARGV (KRAS G12R)
LVVNGMRGV

SEQ ID NO: 25338 - protein, 9 aa, synthetic construct
  source 1..9: note = Seed: LVVVGARGV (KRAS G12R)
LVVNGMRGY

SEQ ID NO: 25339 - protein, 9 aa, synthetic construct
  source 1..9: note = Seed: LVVVGARGV (KRAS G12R)
LVVNGNRGA

SEQ ID NO: 25340 - protein, 9 aa, synthetic construct
  source 1..9: note = Seed: LVVVGARGV (KRAS G12R)
LVVNGNRGF

SEQ ID NO: 25341 - protein, 9 aa, synthetic construct
  source 1..9: note = Seed: LVVVGARGV (KRAS G12R)
LVVNGNRGI

SEQ ID NO: 25342 - protein, 9 aa, synthetic construct
  source 1..9: note = Seed: LVVVGARGV (KRAS G12R)
LVVNGNRGL

SEQ ID NO: 25343 - protein, 9 aa, synthetic construct
  source 1..9: note = Seed: LVVVGARGV (KRAS G12R)
LVVNGNRGM

SEQ ID NO: 25344 - protein, 9 aa, synthetic construct
  source 1..9: note = Seed: LVVVGARGV (KRAS G12R)
LVVNGNRGN

SEQ ID NO: 25345 - protein, 9 aa, synthetic construct
  source 1..9: note = Seed: LVVVGARGV (KRAS G12R)
LVVNGNRGR

SEQ ID NO: 25346 - protein, 9 aa, synthetic construct
  source 1..9: note = Seed: LVVVGARGV (KRAS G12R)
LVVNGNRGS

SEQ ID NO: 25347 - protein, 9 aa, synthetic construct
  source 1..9: note = Seed: LVVVGARGV (KRAS G12R)
LVVNGNRGT

SEQ ID NO: 25348 - protein, 9 aa, synthetic construct
  source 1..9: note = Seed: LVVVGARGV (KRAS G12R)
LVVNGNRGV

SEQ ID NO: 25349 - protein, 9 aa, synthetic construct
  source 1..9: note = Seed: LVVVGARGV (KRAS G12R)
LVVNGNRGW

SEQ ID NO: 25350 - protein, 9 aa, synthetic construct
  source 1..9: note = Seed: LVVVGARGV (KRAS G12R)
LVVNGNRGY

SEQ ID NO: 25351 - protein, 9 aa, synthetic construct
  source 1..9: note = Seed: LVVVGARGV (KRAS G12R)
LVVNGPRGA

SEQ ID NO: 25352 - protein, 9 aa, synthetic construct
  source 1..9: note = Seed: LVVVGARGV (KRAS G12R)
LVVNGPRGF

SEQ ID NO: 25353 - protein, 9 aa, synthetic construct
  source 1..9: note = Seed: LVVVGARGV (KRAS G12R)
LVVNGPRGI

SEQ ID NO: 25354 - protein, 9 aa, synthetic construct
  source 1..9: note = Seed: LVVVGARGV (KRAS G12R)
LVVNGPRGL

SEQ ID NO: 25355 - protein, 9 aa, synthetic construct
  source 1..9: note = Seed: LVVVGARGV (KRAS G12R)
LVVNGPRGM

SEQ ID NO: 25356 - protein, 9 aa, synthetic construct
  source 1..9: note = Seed: LVVVGARGV (KRAS G12R)
LVVNGPRGT

SEQ ID NO: 25357 - protein, 9 aa, synthetic construct
  source 1..9: note = Seed: LVVVGARGV (KRAS G12R)
LVVNGPRGV

SEQ ID NO: 25358 - protein, 9 aa, synthetic construct
  source 1..9: note = Seed: LVVVGARGV (KRAS G12R)
LVVNGPRGW

SEQ ID NO: 25359 - protein, 9 aa, synthetic construct
  source 1..9: note = Seed: LVVVGARGV (KRAS G12R)
LVVNGPRGY

SEQ ID NO: 25360 - protein, 9 aa, synthetic construct
  source 1..9: note = Seed: LVVVGARGV (KRAS G12R)
LVVNGQRGF

SEQ ID NO: 25361 - protein, 9 aa, synthetic construct
  source 1..9: note = Seed: LVVVGARGV (KRAS G12R)
LVVNGQRGI

SEQ ID NO: 25362 - protein, 9 aa, synthetic construct
  source 1..9: note = Seed: LVVVGARGV (KRAS G12R)
LVVNGQRGL

SEQ ID NO: 25363 - protein, 9 aa, synthetic construct
  source 1..9: note = Seed: LVVVGARGV (KRAS G12R)
LVVNGQRGV

SEQ ID NO: 25364 - protein, 9 aa, synthetic construct
  source 1..9: note = Seed: LVVVGARGV (KRAS G12R)
LVVNGRRGA

SEQ ID NO: 25365 - protein, 9 aa, synthetic construct
  source 1..9: note = Seed: LVVVGARGV (KRAS G12R)
LVVNGRRGF

SEQ ID NO: 25366 - protein, 9 aa, synthetic construct
  source 1..9: note = Seed: LVVVGARGV (KRAS G12R)
LVVNGRRGH

SEQ ID NO: 25367 - protein, 9 aa, synthetic construct
  source 1..9: note = Seed: LVVVGARGV (KRAS G12R)
LVVNGRRGI

SEQ ID NO: 25368 - protein, 9 aa, synthetic construct
  source 1..9: note = Seed: LVVVGARGV (KRAS G12R)
LVVNGRRGK

SEQ ID NO: 25369 - protein, 9 aa, synthetic construct
  source 1..9: note = Seed: LVVVGARGV (KRAS G12R)
LVVNGRRGL

SEQ ID NO: 25370 - protein, 9 aa, synthetic construct
  source 1..9: note = Seed: LVVVGARGV (KRAS G12R)
LVVNGRRGM

SEQ ID NO: 25371 - protein, 9 aa, synthetic construct
  source 1..9: note = Seed: LVVVGARGV (KRAS G12R)
LVVNGRRGQ

SEQ ID NO: 25372 - protein, 9 aa, synthetic construct
  source 1..9: note = Seed: LVVVGARGV (KRAS G12R)
LVVNGRRGR

SEQ ID NO: 25373 - protein, 9 aa, synthetic construct
  source 1..9: note = Seed: LVVVGARGV (KRAS G12R)
LVVNGRRGS

SEQ ID NO: 25374 - protein, 9 aa, synthetic construct
  source 1..9: note = Seed: LVVVGARGV (KRAS G12R)
LVVNGRRGT

SEQ ID NO: 25375 - protein, 9 aa, synthetic construct
  source 1..9: note = Seed: LVVVGARGV (KRAS G12R)
LVVNGRRGV

SEQ ID NO: 25376 - protein, 9 aa, synthetic construct
  source 1..9: note = Seed: LVVVGARGV (KRAS G12R)
LVVNGRRGW

SEQ ID NO: 25377 - protein, 9 aa, synthetic construct
  source 1..9: note = Seed: LVVVGARGV (KRAS G12R)
LVVNGRRGY

SEQ ID NO: 25378 - protein, 9 aa, synthetic construct
  source 1..9: note = Seed: LVVVGARGV (KRAS G12R)
LVVNGSRGA

SEQ ID NO: 25379 - protein, 9 aa, synthetic construct
  source 1..9: note = Seed: LVVVGARGV (KRAS G12R)
LVVNGSRGF

SEQ ID NO: 25380 - protein, 9 aa, synthetic construct
  source 1..9: note = Seed: LVVVGARGV (KRAS G12R)
LVVNGSRGI

SEQ ID NO: 25381 - protein, 9 aa, synthetic construct
  source 1..9: note = Seed: LVVVGARGV (KRAS G12R)
LVVNGSRGL

SEQ ID NO: 25382 - protein, 9 aa, synthetic construct
  source 1..9: note = Seed: LVVVGARGV (KRAS G12R)
LVVNGSRGM

SEQ ID NO: 25383 - protein, 9 aa, synthetic construct
  source 1..9: note = Seed: LVVVGARGV (KRAS G12R)
LVVNGSRGN

SEQ ID NO: 25384 - protein, 9 aa, synthetic construct
  source 1..9: note = Seed: LVVVGARGV (KRAS G12R)
LVVNGSRGR

SEQ ID NO: 25385 - protein, 9 aa, synthetic construct
  source 1..9: note = Seed: LVVVGARGV (KRAS G12R)
LVVNGSRGS

SEQ ID NO: 25386 - protein, 9 aa, synthetic construct
  source 1..9: note = Seed: LVVVGARGV (KRAS G12R)
LVVNGSRGT

SEQ ID NO: 25387 - protein, 9 aa, synthetic construct
  source 1..9: note = Seed: LVVVGARGV (KRAS G12R)
LVVNGSRGV

SEQ ID NO: 25388 - protein, 9 aa, synthetic construct
  source 1..9: note = Seed: LVVVGARGV (KRAS G12R)
LVVNGSRGW

SEQ ID NO: 25389 - protein, 9 aa, synthetic construct
  source 1..9: note = Seed: LVVVGARGV (KRAS G12R)
LVVNGSRGY

SEQ ID NO: 25390 - protein, 9 aa, synthetic construct
  source 1..9: note = Seed: LVVVGARGV (KRAS G12R)
LVVNGTRGA

SEQ ID NO: 25391 - protein, 9 aa, synthetic construct
  source 1..9: note = Seed: LVVVGARGV (KRAS G12R)
LVVNGTRGF

SEQ ID NO: 25392 - protein, 9 aa, synthetic construct
  source 1..9: note = Seed: LVVVGARGV (KRAS G12R)
LVVNGTRGI

SEQ ID NO: 25393 - protein, 9 aa, synthetic construct
  source 1..9: note = Seed: LVVVGARGV (KRAS G12R)
LVVNGTRGL

SEQ ID NO: 25394 - protein, 9 aa, synthetic construct
  source 1..9: note = Seed: LVVVGARGV (KRAS G12R)
LVVNGTRGM

SEQ ID NO: 25395 - protein, 9 aa, synthetic construct
  source 1..9: note = Seed: LVVVGARGV (KRAS G12R)
LVVNGTRGR

SEQ ID NO: 25396 - protein, 9 aa, synthetic construct
  source 1..9: note = Seed: LVVVGARGV (KRAS G12R)
LVVNGTRGS

SEQ ID NO: 25397 - protein, 9 aa, synthetic construct
  source 1..9: note = Seed: LVVVGARGV (KRAS G12R)
LVVNGTRGT

SEQ ID NO: 25398 - protein, 9 aa, synthetic construct
  source 1..9: note = Seed: LVVVGARGV (KRAS G12R)
LVVNGTRGV

SEQ ID NO: 25399 - protein, 9 aa, synthetic construct
  source 1..9: note = Seed: LVVVGARGV (KRAS G12R)
LVVNGTRGW

SEQ ID NO: 25400 - protein, 9 aa, synthetic construct
  source 1..9: note = Seed: LVVVGARGV (KRAS G12R)
LVVNGTRGY

SEQ ID NO: 25401 - protein, 9 aa, synthetic construct
  source 1..9: note = Seed: LVVVGARGV (KRAS G12R)
LVVNGVRGA

SEQ ID NO: 25402 - protein, 9 aa, synthetic construct
  source 1..9: note = Seed: LVVVGARGV (KRAS G12R)
LVVNGVRGF

SEQ ID NO: 25403 - protein, 9 aa, synthetic construct
  source 1..9: note = Seed: LVVVGARGV (KRAS G12R)
LVVNGVRGI

SEQ ID NO: 25404 - protein, 9 aa, synthetic construct
  source 1..9: note = Seed: LVVVGARGV (KRAS G12R)
LVVNGVRGL

SEQ ID NO: 25405 - protein, 9 aa, synthetic construct
  source 1..9: note = Seed: LVVVGARGV (KRAS G12R)
LVVNGVRGM

SEQ ID NO: 25406 - protein, 9 aa, synthetic construct
  source 1..9: note = Seed: LVVVGARGV (KRAS G12R)
LVVNGVRGN

SEQ ID NO: 25407 - protein, 9 aa, synthetic construct
  source 1..9: note = Seed: LVVVGARGV (KRAS G12R)
LVVNGVRGR

SEQ ID NO: 25408 - protein, 9 aa, synthetic construct
  source 1..9: note = Seed: LVVVGARGV (KRAS G12R)
LVVNGVRGS

SEQ ID NO: 25409 - protein, 9 aa, synthetic construct
  source 1..9: note = Seed: LVVVGARGV (KRAS G12R)
LVVNGVRGT

SEQ ID NO: 25410 - protein, 9 aa, synthetic construct
  source 1..9: note = Seed: LVVVGARGV (KRAS G12R)
LVVNGVRGV

SEQ ID NO: 25411 - protein, 9 aa, synthetic construct
  source 1..9: note = Seed: LVVVGARGV (KRAS G12R)
LVVNGVRGW

SEQ ID NO: 25412 - protein, 9 aa, synthetic construct
  source 1..9: note = Seed: LVVVGARGV (KRAS G12R)
LVVNGVRGY

SEQ ID NO: 25413 - protein, 9 aa, synthetic construct
  source 1..9: note = Seed: LVVVGARGV (KRAS G12R)
LVVNGWRGI

SEQ ID NO: 25414 - protein, 9 aa, synthetic construct
  source 1..9: note = Seed: LVVVGARGV (KRAS G12R)
LVVNGWRGR

SEQ ID NO: 25415 - protein, 9 aa, synthetic construct
  source 1..9: note = Seed: LVVVGARGV (KRAS G12R)
LVVNGYRGF

SEQ ID NO: 25416 - protein, 9 aa, synthetic construct
  source 1..9: note = Seed: LVVVGARGV (KRAS G12R)
LVVNGYRGI

SEQ ID NO: 25417 - protein, 9 aa, synthetic construct
  source 1..9: note = Seed: LVVVGARGV (KRAS G12R)
LVVNGYRGL

SEQ ID NO: 25418 - protein, 9 aa, synthetic construct
  source 1..9: note = Seed: LVVVGARGV (KRAS G12R)
LVVNGYRGV

SEQ ID NO: 25419 - protein, 9 aa, synthetic construct
  source 1..9: note = Seed: LVVVGARGV (KRAS G12R)
LVVQGARGA

SEQ ID NO: 25420 - protein, 9 aa, synthetic construct
  source 1..9: note = Seed: LVVVGARGV (KRAS G12R)
LVVQGARGC

SEQ ID NO: 25421 - protein, 9 aa, synthetic construct
  source 1..9: note = Seed: LVVVGARGV (KRAS G12R)
LVVQGARGF

SEQ ID NO: 25422 - protein, 9 aa, synthetic construct
  source 1..9: note = Seed: LVVVGARGV (KRAS G12R)
LVVQGARGG

SEQ ID NO: 25423 - protein, 9 aa, synthetic construct
  source 1..9: note = Seed: LVVVGARGV (KRAS G12R)
LVVQGARGI

SEQ ID NO: 25424 - protein, 9 aa, synthetic construct
  source 1..9: note = Seed: LVVVGARGV (KRAS G12R)
LVVQGARGK

SEQ ID NO: 25425 - protein, 9 aa, synthetic construct
  source 1..9: note = Seed: LVVVGARGV (KRAS G12R)
LVVQGARGL

SEQ ID NO: 25426 - protein, 9 aa, synthetic construct
  source 1..9: note = Seed: LVVVGARGV (KRAS G12R)
LVVQGARGM

SEQ ID NO: 25427 - protein, 9 aa, synthetic construct
  source 1..9: note = Seed: LVVVGARGV (KRAS G12R)
LVVQGARGR

SEQ ID NO: 25428 - protein, 9 aa, synthetic construct
  source 1..9: note = Seed: LVVVGARGV (KRAS G12R)
LVVQGARGS

SEQ ID NO: 25429 - protein, 9 aa, synthetic construct
  source 1..9: note = Seed: LVVVGARGV (KRAS G12R)
LVVQGARGT

SEQ ID NO: 25430 - protein, 9 aa, synthetic construct
  source 1..9: note = Seed: LVVVGARGV (KRAS G12R)
LVVQGARGV

SEQ ID NO: 25431 - protein, 9 aa, synthetic construct
  source 1..9: note = Seed: LVVVGARGV (KRAS G12R)
LVVQGARGW

SEQ ID NO: 25432 - protein, 9 aa, synthetic construct
  source 1..9: note = Seed: LVVVGARGV (KRAS G12R)
LVVQGARGY

SEQ ID NO: 25433 - protein, 9 aa, synthetic construct
  source 1..9: note = Seed: LVVVGARGV (KRAS G12R)
LVVQGFRGI

SEQ ID NO: 25434 - protein, 9 aa, synthetic construct
  source 1..9: note = Seed: LVVVGARGV (KRAS G12R)
LVVQGFRGL

SEQ ID NO: 25435 - protein, 9 aa, synthetic construct
  source 1..9: note = Seed: LVVVGARGV (KRAS G12R)
LVVQGFRGR

SEQ ID NO: 25436 - protein, 9 aa, synthetic construct
  source 1..9: note = Seed: LVVVGARGV (KRAS G12R)
LVVQGFRGV

SEQ ID NO: 25437 - protein, 9 aa, synthetic construct
  source 1..9: note = Seed: LVVVGARGV (KRAS G12R)
LVVQGGRGA

SEQ ID NO: 25438 - protein, 9 aa, synthetic construct
  source 1..9: note = Seed: LVVVGARGV (KRAS G12R)
LVVQGGRGF

SEQ ID NO: 25439 - protein, 9 aa, synthetic construct
  source 1..9: note = Seed: LVVVGARGV (KRAS G12R)
LVVQGGRGI

SEQ ID NO: 25440 - protein, 9 aa, synthetic construct
  source 1..9: note = Seed: LVVVGARGV (KRAS G12R)
LVVQGGRGL

SEQ ID NO: 25441 - protein, 9 aa, synthetic construct
  source 1..9: note = Seed: LVVVGARGV (KRAS G12R)
LVVQGGRGM

SEQ ID NO: 25442 - protein, 9 aa, synthetic construct
  source 1..9: note = Seed: LVVVGARGV (KRAS G12R)
LVVQGGRGS

SEQ ID NO: 25443 - protein, 9 aa, synthetic construct
  source 1..9: note = Seed: LVVVGARGV (KRAS G12R)
LVVQGGRGT

SEQ ID NO: 25444 - protein, 9 aa, synthetic construct
  source 1..9: note = Seed: LVVVGARGV (KRAS G12R)
LVVQGGRGV

SEQ ID NO: 25445 - protein, 9 aa, synthetic construct
  source 1..9: note = Seed: LVVVGARGV (KRAS G12R)
LVVQGHRGA

SEQ ID NO: 25446 - protein, 9 aa, synthetic construct
  source 1..9: note = Seed: LVVVGARGV (KRAS G12R)
LVVQGHRGF

SEQ ID NO: 25447 - protein, 9 aa, synthetic construct
  source 1..9: note = Seed: LVVVGARGV (KRAS G12R)
LVVQGHRGH

SEQ ID NO: 25448 - protein, 9 aa, synthetic construct
  source 1..9: note = Seed: LVVVGARGV (KRAS G12R)
LVVQGHRGI

SEQ ID NO: 25449 - protein, 9 aa, synthetic construct
  source 1..9: note = Seed: LVVVGARGV (KRAS G12R)
LVVQGHRGK

SEQ ID NO: 25450 - protein, 9 aa, synthetic construct
  source 1..9: note = Seed: LVVVGARGV (KRAS G12R)
LVVQGHRGL

SEQ ID NO: 25451 - protein, 9 aa, synthetic construct
  source 1..9: note = Seed: LVVVGARGV (KRAS G12R)
LVVQGHRGM

SEQ ID NO: 25452 - protein, 9 aa, synthetic construct
  source 1..9: note = Seed: LVVVGARGV (KRAS G12R)
LVVQGHRGR

SEQ ID NO: 25453 - protein, 9 aa, synthetic construct
  source 1..9: note = Seed: LVVVGARGV (KRAS G12R)
LVVQGHRGS

SEQ ID NO: 25454 - protein, 9 aa, synthetic construct
  source 1..9: note = Seed: LVVVGARGV (KRAS G12R)
LVVQGHRGV

SEQ ID NO: 25455 - protein, 9 aa, synthetic construct
  source 1..9: note = Seed: LVVVGARGV (KRAS G12R)
LVVQGHRGY

SEQ ID NO: 25456 - protein, 9 aa, synthetic construct
  source 1..9: note = Seed: LVVVGARGV (KRAS G12R)
LVVQGIRGA

SEQ ID NO: 25457 - protein, 9 aa, synthetic construct
  source 1..9: note = Seed: LVVVGARGV (KRAS G12R)
LVVQGIRGF

SEQ ID NO: 25458 - protein, 9 aa, synthetic construct
  source 1..9: note = Seed: LVVVGARGV (KRAS G12R)
LVVQGIRGI

SEQ ID NO: 25459 - protein, 9 aa, synthetic construct
  source 1..9: note = Seed: LVVVGARGV (KRAS G12R)
LVVQGIRGK

SEQ ID NO: 25460 - protein, 9 aa, synthetic construct
  source 1..9: note = Seed: LVVVGARGV (KRAS G12R)
LVVQGIRGL

SEQ ID NO: 25461 - protein, 9 aa, synthetic construct
  source 1..9: note = Seed: LVVVGARGV (KRAS G12R)
LVVQGIRGM

SEQ ID NO: 25462 - protein, 9 aa, synthetic construct
  source 1..9: note = Seed: LVVVGARGV (KRAS G12R)
LVVQGIRGR

SEQ ID NO: 25463 - protein, 9 aa, synthetic construct
  source 1..9: note = Seed: LVVVGARGV (KRAS G12R)
LVVQGIRGV

SEQ ID NO: 25464 - protein, 9 aa, synthetic construct
  source 1..9: note = Seed: LVVVGARGV (KRAS G12R)
LVVQGIRGY

SEQ ID NO: 25465 - protein, 9 aa, synthetic construct
  source 1..9: note = Seed: LVVVGARGV (KRAS G12R)
LVVQGKRGA

SEQ ID NO: 25466 - protein, 9 aa, synthetic construct
  source 1..9: note = Seed: LVVVGARGV (KRAS G12R)
LVVQGKRGF

SEQ ID NO: 25467 - protein, 9 aa, synthetic construct
  source 1..9: note = Seed: LVVVGARGV (KRAS G12R)
LVVQGKRGG

SEQ ID NO: 25468 - protein, 9 aa, synthetic construct
  source 1..9: note = Seed: LVVVGARGV (KRAS G12R)
LVVQGKRGH

SEQ ID NO: 25469 - protein, 9 aa, synthetic construct
  source 1..9: note = Seed: LVVVGARGV (KRAS G12R)
LVVQGKRGI

SEQ ID NO: 25470 - protein, 9 aa, synthetic construct
  source 1..9: note = Seed: LVVVGARGV (KRAS G12R)
LVVQGKRGK

SEQ ID NO: 25471 - protein, 9 aa, synthetic construct
  source 1..9: note = Seed: LVVVGARGV (KRAS G12R)
LVVQGKRGL

SEQ ID NO: 25472 - protein, 9 aa, synthetic construct
  source 1..9: note = Seed: LVVVGARGV (KRAS G12R)
LVVQGKRGM

SEQ ID NO: 25473 - protein, 9 aa, synthetic construct
  source 1..9: note = Seed: LVVVGARGV (KRAS G12R)
LVVQGKRGN

SEQ ID NO: 25474 - protein, 9 aa, synthetic construct
  source 1..9: note = Seed: LVVVGARGV (KRAS G12R)
LVVQGKRGQ

SEQ ID NO: 25475 - protein, 9 aa, synthetic construct
  source 1..9: note = Seed: LVVVGARGV (KRAS G12R)
LVVQGKRGR

SEQ ID NO: 25476 - protein, 9 aa, synthetic construct
  source 1..9: note = Seed: LVVVGARGV (KRAS G12R)
LVVQGKRGS

SEQ ID NO: 25477 - protein, 9 aa, synthetic construct
  source 1..9: note = Seed: LVVVGARGV (KRAS G12R)
LVVQGKRGT

SEQ ID NO: 25478 - protein, 9 aa, synthetic construct
  source 1..9: note = Seed: LVVVGARGV (KRAS G12R)
LVVQGKRGV

SEQ ID NO: 25479 - protein, 9 aa, synthetic construct
  source 1..9: note = Seed: LVVVGARGV (KRAS G12R)
LVVQGKRGW

SEQ ID NO: 25480 - protein, 9 aa, synthetic construct
  source 1..9: note = Seed: LVVVGARGV (KRAS G12R)
LVVQGKRGY

SEQ ID NO: 25481 - protein, 9 aa, synthetic construct
  source 1..9: note = Seed: LVVVGARGV (KRAS G12R)
LVVQGLRGA

SEQ ID NO: 25482 - protein, 9 aa, synthetic construct
  source 1..9: note = Seed: LVVVGARGV (KRAS G12R)
LVVQGLRGF

SEQ ID NO: 25483 - protein, 9 aa, synthetic construct
  source 1..9: note = Seed: LVVVGARGV (KRAS G12R)
LVVQGLRGI

SEQ ID NO: 25484 - protein, 9 aa, synthetic construct
  source 1..9: note = Seed: LVVVGARGV (KRAS G12R)
LVVQGLRGK

SEQ ID NO: 25485 - protein, 9 aa, synthetic construct
  source 1..9: note = Seed: LVVVGARGV (KRAS G12R)
LVVQGLRGL

SEQ ID NO: 25486 - protein, 9 aa, synthetic construct
  source 1..9: note = Seed: LVVVGARGV (KRAS G12R)
LVVQGLRGR

SEQ ID NO: 25487 - protein, 9 aa, synthetic construct
  source 1..9: note = Seed: LVVVGARGV (KRAS G12R)
LVVQGLRGY

SEQ ID NO: 25488 - protein, 9 aa, synthetic construct
  source 1..9: note = Seed: LVVVGARGV (KRAS G12R)
LVVQGMRGF

SEQ ID NO: 25489 - protein, 9 aa, synthetic construct
  source 1..9: note = Seed: LVVVGARGV (KRAS G12R)
LVVQGMRGI

SEQ ID NO: 25490 - protein, 9 aa, synthetic construct
  source 1..9: note = Seed: LVVVGARGV (KRAS G12R)
LVVQGMRGK

SEQ ID NO: 25491 - protein, 9 aa, synthetic construct
  source 1..9: note = Seed: LVVVGARGV (KRAS G12R)
LVVQGMRGL

SEQ ID NO: 25492 - protein, 9 aa, synthetic construct
  source 1..9: note = Seed: LVVVGARGV (KRAS G12R)
LVVQGMRGM

SEQ ID NO: 25493 - protein, 9 aa, synthetic construct
  source 1..9: note = Seed: LVVVGARGV (KRAS G12R)
LVVQGMRGR

SEQ ID NO: 25494 - protein, 9 aa, synthetic construct
  source 1..9: note = Seed: LVVVGARGV (KRAS G12R)
LVVQGMRGV

SEQ ID NO: 25495 - protein, 9 aa, synthetic construct
  source 1..9: note = Seed: LVVVGARGV (KRAS G12R)
LVVQGMRGY

SEQ ID NO: 25496 - protein, 9 aa, synthetic construct
  source 1..9: note = Seed: LVVVGARGV (KRAS G12R)
LVVQGNRGA

SEQ ID NO: 25497 - protein, 9 aa, synthetic construct
  source 1..9: note = Seed: LVVVGARGV (KRAS G12R)
LVVQGNRGF

SEQ ID NO: 25498 - protein, 9 aa, synthetic construct
  source 1..9: note = Seed: LVVVGARGV (KRAS G12R)
LVVQGNRGI

SEQ ID NO: 25499 - protein, 9 aa, synthetic construct
  source 1..9: note = Seed: LVVVGARGV (KRAS G12R)
LVVQGNRGL

SEQ ID NO: 25500 - protein, 9 aa, synthetic construct
  source 1..9: note = Seed: LVVVGARGV (KRAS G12R)
LVVQGNRGM

SEQ ID NO: 25501 - protein, 9 aa, synthetic construct
  source 1..9: note = Seed: LVVVGARGV (KRAS G12R)
LVVQGNRGR

SEQ ID NO: 25502 - protein, 9 aa, synthetic construct
  source 1..9: note = Seed: LVVVGARGV (KRAS G12R)
LVVQGNRGS

SEQ ID NO: 25503 - protein, 9 aa, synthetic construct
  source 1..9: note = Seed: LVVVGARGV (KRAS G12R)
LVVQGNRGT

SEQ ID NO: 25504 - protein, 9 aa, synthetic construct
  source 1..9: note = Seed: LVVVGARGV (KRAS G12R)
LVVQGNRGV

SEQ ID NO: 25505 - protein, 9 aa, synthetic construct
  source 1..9: note = Seed: LVVVGARGV (KRAS G12R)
LVVQGNRGY

SEQ ID NO: 25506 - protein, 9 aa, synthetic construct
  source 1..9: note = Seed: LVVVGARGV (KRAS G12R)
LVVQGPRGA

SEQ ID NO: 25507 - protein, 9 aa, synthetic construct
  source 1..9: note = Seed: LVVVGARGV (KRAS G12R)
LVVQGPRGI

SEQ ID NO: 25508 - protein, 9 aa, synthetic construct
  source 1..9: note = Seed: LVVVGARGV (KRAS G12R)
LVVQGPRGL

SEQ ID NO: 25509 - protein, 9 aa, synthetic construct
  source 1..9: note = Seed: LVVVGARGV (KRAS G12R)
LVVQGPRGM

SEQ ID NO: 25510 - protein, 9 aa, synthetic construct
  source 1..9: note = Seed: LVVVGARGV (KRAS G12R)
LVVQGPRGV

SEQ ID NO: 25511 - protein, 9 aa, synthetic construct
  source 1..9: note = Seed: LVVVGARGV (KRAS G12R)
LVVQGQRGL

SEQ ID NO: 25512 - protein, 9 aa, synthetic construct
  source 1..9: note = Seed: LVVVGARGV (KRAS G12R)
LVVQGRRGA

SEQ ID NO: 25513 - protein, 9 aa, synthetic construct
  source 1..9: note = Seed: LVVVGARGV (KRAS G12R)
LVVQGRRGC

SEQ ID NO: 25514 - protein, 9 aa, synthetic construct
  source 1..9: note = Seed: LVVVGARGV (KRAS G12R)
LVVQGRRGF

SEQ ID NO: 25515 - protein, 9 aa, synthetic construct
  source 1..9: note = Seed: LVVVGARGV (KRAS G12R)
LVVQGRRGG

SEQ ID NO: 25516 - protein, 9 aa, synthetic construct
  source 1..9: note = Seed: LVVVGARGV (KRAS G12R)
LVVQGRRGH

SEQ ID NO: 25517 - protein, 9 aa, synthetic construct
  source 1..9: note = Seed: LVVVGARGV (KRAS G12R)
LVVQGRRGI

SEQ ID NO: 25518 - protein, 9 aa, synthetic construct
  source 1..9: note = Seed: LVVVGARGV (KRAS G12R)
LVVQGRRGK

SEQ ID NO: 25519 - protein, 9 aa, synthetic construct
  source 1..9: note = Seed: LVVVGARGV (KRAS G12R)
LVVQGRRGL

SEQ ID NO: 25520 - protein, 9 aa, synthetic construct
  source 1..9: note = Seed: LVVVGARGV (KRAS G12R)
LVVQGRRGM

SEQ ID NO: 25521 - protein, 9 aa, synthetic construct
  source 1..9: note = Seed: LVVVGARGV (KRAS G12R)
LVVQGRRGN

SEQ ID NO: 25522 - protein, 9 aa, synthetic construct
  source 1..9: note = Seed: LVVVGARGV (KRAS G12R)
LVVQGRRGP

SEQ ID NO: 25523 - protein, 9 aa, synthetic construct
  source 1..9: note = Seed: LVVVGARGV (KRAS G12R)
LVVQGRRGQ

SEQ ID NO: 25524 - protein, 9 aa, synthetic construct
  source 1..9: note = Seed: LVVVGARGV (KRAS G12R)
LVVQGRRGR

SEQ ID NO: 25525 - protein, 9 aa, synthetic construct
  source 1..9: note = Seed: LVVVGARGV (KRAS G12R)
LVVQGRRGS

SEQ ID NO: 25526 - protein, 9 aa, synthetic construct
  source 1..9: note = Seed: LVVVGARGV (KRAS G12R)
LVVQGRRGT

SEQ ID NO: 25527 - protein, 9 aa, synthetic construct
  source 1..9: note = Seed: LVVVGARGV (KRAS G12R)
LVVQGRRGV

SEQ ID NO: 25528 - protein, 9 aa, synthetic construct
  source 1..9: note = Seed: LVVVGARGV (KRAS G12R)
LVVQGRRGW

SEQ ID NO: 25529 - protein, 9 aa, synthetic construct
  source 1..9: note = Seed: LVVVGARGV (KRAS G12R)
LVVQGRRGY

SEQ ID NO: 25530 - protein, 9 aa, synthetic construct
  source 1..9: note = Seed: LVVVGARGV (KRAS G12R)
LVVQGSRGA

SEQ ID NO: 25531 - protein, 9 aa, synthetic construct
  source 1..9: note = Seed: LVVVGARGV (KRAS G12R)
LVVQGSRGF

SEQ ID NO: 25532 - protein, 9 aa, synthetic construct
  source 1..9: note = Seed: LVVVGARGV (KRAS G12R)
LVVQGSRGI

SEQ ID NO: 25533 - protein, 9 aa, synthetic construct
  source 1..9: note = Seed: LVVVGARGV (KRAS G12R)
LVVQGSRGK

SEQ ID NO: 25534 - protein, 9 aa, synthetic construct
  source 1..9: note = Seed: LVVVGARGV (KRAS G12R)
LVVQGSRGL

SEQ ID NO: 25535 - protein, 9 aa, synthetic construct
  source 1..9: note = Seed: LVVVGARGV (KRAS G12R)
LVVQGSRGM

SEQ ID NO: 25536 - protein, 9 aa, synthetic construct
  source 1..9: note = Seed: LVVVGARGV (KRAS G12R)
LVVQGSRGR

SEQ ID NO: 25537 - protein, 9 aa, synthetic construct
  source 1..9: note = Seed: LVVVGARGV (KRAS G12R)
LVVQGSRGS

SEQ ID NO: 25538 - protein, 9 aa, synthetic construct
  source 1..9: note = Seed: LVVVGARGV (KRAS G12R)
LVVQGSRGT

SEQ ID NO: 25539 - protein, 9 aa, synthetic construct
  source 1..9: note = Seed: LVVVGARGV (KRAS G12R)
LVVQGSRGV

SEQ ID NO: 25540 - protein, 9 aa, synthetic construct
  source 1..9: note = Seed: LVVVGARGV (KRAS G12R)
LVVQGSRGY

SEQ ID NO: 25541 - protein, 9 aa, synthetic construct
  source 1..9: note = Seed: LVVVGARGV (KRAS G12R)
LVVQGTRGA

SEQ ID NO: 25542 - protein, 9 aa, synthetic construct
  source 1..9: note = Seed: LVVVGARGV (KRAS G12R)
LVVQGTRGF

SEQ ID NO: 25543 - protein, 9 aa, synthetic construct
  source 1..9: note = Seed: LVVVGARGV (KRAS G12R)
LVVQGTRGI

SEQ ID NO: 25544 - protein, 9 aa, synthetic construct
  source 1..9: note = Seed: LVVVGARGV (KRAS G12R)
LVVQGTRGK

SEQ ID NO: 25545 - protein, 9 aa, synthetic construct
  source 1..9: note = Seed: LVVVGARGV (KRAS G12R)
LVVQGTRGL

SEQ ID NO: 25546 - protein, 9 aa, synthetic construct
  source 1..9: note = Seed: LVVVGARGV (KRAS G12R)
LVVQGTRGM

SEQ ID NO: 25547 - protein, 9 aa, synthetic construct
  source 1..9: note = Seed: LVVVGARGV (KRAS G12R)
LVVQGTRGR

SEQ ID NO: 25548 - protein, 9 aa, synthetic construct
  source 1..9: note = Seed: LVVVGARGV (KRAS G12R)
LVVQGTRGV

SEQ ID NO: 25549 - protein, 9 aa, synthetic construct
  source 1..9: note = Seed: LVVVGARGV (KRAS G12R)
LVVQGTRGY

SEQ ID NO: 25550 - protein, 9 aa, synthetic construct
  source 1..9: note = Seed: LVVVGARGV (KRAS G12R)
LVVQGVRGA

SEQ ID NO: 25551 - protein, 9 aa, synthetic construct
  source 1..9: note = Seed: LVVVGARGV (KRAS G12R)
LVVQGVRGF

SEQ ID NO: 25552 - protein, 9 aa, synthetic construct
  source 1..9: note = Seed: LVVVGARGV (KRAS G12R)
LVVQGVRGI

SEQ ID NO: 25553 - protein, 9 aa, synthetic construct
  source 1..9: note = Seed: LVVVGARGV (KRAS G12R)
LVVQGVRGK

SEQ ID NO: 25554 - protein, 9 aa, synthetic construct
  source 1..9: note = Seed: LVVVGARGV (KRAS G12R)
LVVQGVRGL

SEQ ID NO: 25555 - protein, 9 aa, synthetic construct
  source 1..9: note = Seed: LVVVGARGV (KRAS G12R)
LVVQGVRGM

SEQ ID NO: 25556 - protein, 9 aa, synthetic construct
  source 1..9: note = Seed: LVVVGARGV (KRAS G12R)
LVVQGVRGR

SEQ ID NO: 25557 - protein, 9 aa, synthetic construct
  source 1..9: note = Seed: LVVVGARGV (KRAS G12R)
LVVQGVRGV

SEQ ID NO: 25558 - protein, 9 aa, synthetic construct
  source 1..9: note = Seed: LVVVGARGV (KRAS G12R)
LVVQGVRGY

SEQ ID NO: 25559 - protein, 9 aa, synthetic construct
  source 1..9: note = Seed: LVVVGARGV (KRAS G12R)
LVVQGWRGR

SEQ ID NO: 25560 - protein, 9 aa, synthetic construct
  source 1..9: note = Seed: LVVVGARGV (KRAS G12R)
LVVQGYRGL

SEQ ID NO: 25561 - protein, 9 aa, synthetic construct
  source 1..9: note = Seed: LVVVGARGV (KRAS G12R)
LVVRGARGA

SEQ ID NO: 25562 - protein, 9 aa, synthetic construct
  source 1..9: note = Seed: LVVVGARGV (KRAS G12R)
LVVRGARGF

SEQ ID NO: 25563 - protein, 9 aa, synthetic construct
  source 1..9: note = Seed: LVVVGARGV (KRAS G12R)
LVVRGARGH

SEQ ID NO: 25564 - protein, 9 aa, synthetic construct
  source 1..9: note = Seed: LVVVGARGV (KRAS G12R)
LVVRGARGI

SEQ ID NO: 25565 - protein, 9 aa, synthetic construct
  source 1..9: note = Seed: LVVVGARGV (KRAS G12R)
LVVRGARGK

SEQ ID NO: 25566 - protein, 9 aa, synthetic construct
  source 1..9: note = Seed: LVVVGARGV (KRAS G12R)
LVVRGARGL

SEQ ID NO: 25567 - protein, 9 aa, synthetic construct
  source 1..9: note = Seed: LVVVGARGV (KRAS G12R)
LVVRGARGM

SEQ ID NO: 25568 - protein, 9 aa, synthetic construct
  source 1..9: note = Seed: LVVVGARGV (KRAS G12R)
LVVRGARGQ

SEQ ID NO: 25569 - protein, 9 aa, synthetic construct
  source 1..9: note = Seed: LVVVGARGV (KRAS G12R)
LVVRGARGR

SEQ ID NO: 25570 - protein, 9 aa, synthetic construct
  source 1..9: note = Seed: LVVVGARGV (KRAS G12R)
LVVRGARGS

SEQ ID NO: 25571 - protein, 9 aa, synthetic construct
  source 1..9: note = Seed: LVVVGARGV (KRAS G12R)
LVVRGARGT

SEQ ID NO: 25572 - protein, 9 aa, synthetic construct
  source 1..9: note = Seed: LVVVGARGV (KRAS G12R)
LVVRGARGV

SEQ ID NO: 25573 - protein, 9 aa, synthetic construct
  source 1..9: note = Seed: LVVVGARGV (KRAS G12R)
LVVRGARGW

SEQ ID NO: 25574 - protein, 9 aa, synthetic construct
  source 1..9: note = Seed: LVVVGARGV (KRAS G12R)
LVVRGARGY

SEQ ID NO: 25575 - protein, 9 aa, synthetic construct
  source 1..9: note = Seed: LVVVGARGV (KRAS G12R)
LVVRGCRGF

SEQ ID NO: 25576 - protein, 9 aa, synthetic construct
  source 1..9: note = Seed: LVVVGARGV (KRAS G12R)
LVVRGCRGK

SEQ ID NO: 25577 - protein, 9 aa, synthetic construct
  source 1..9: note = Seed: LVVVGARGV (KRAS G12R)
LVVRGCRGR

SEQ ID NO: 25578 - protein, 9 aa, synthetic construct
  source 1..9: note = Seed: LVVVGARGV (KRAS G12R)
LVVRGCRGV

SEQ ID NO: 25579 - protein, 9 aa, synthetic construct
  source 1..9: note = Seed: LVVVGARGV (KRAS G12R)
LVVRGCRGY

SEQ ID NO: 25580 - protein, 9 aa, synthetic construct
  source 1..9: note = Seed: LVVVGARGV (KRAS G12R)
LVVRGFRGY

SEQ ID NO: 25581 - protein, 9 aa, synthetic construct
  source 1..9: note = Seed: LVVVGARGV (KRAS G12R)
LVVRGGRGI

SEQ ID NO: 25582 - protein, 9 aa, synthetic construct
  source 1..9: note = Seed: LVVVGARGV (KRAS G12R)
LVVRGGRGL

SEQ ID NO: 25583 - protein, 9 aa, synthetic construct
  source 1..9: note = Seed: LVVVGARGV (KRAS G12R)
LVVRGGRGM

SEQ ID NO: 25584 - protein, 9 aa, synthetic construct
  source 1..9: note = Seed: LVVVGARGV (KRAS G12R)
LVVRGGRGR

SEQ ID NO: 25585 - protein, 9 aa, synthetic construct
  source 1..9: note = Seed: LVVVGARGV (KRAS G12R)
LVVRGGRGY

SEQ ID NO: 25586 - protein, 9 aa, synthetic construct
  source 1..9: note = Seed: LVVVGARGV (KRAS G12R)
LVVRGHRGA

SEQ ID NO: 25587 - protein, 9 aa, synthetic construct
  source 1..9: note = Seed: LVVVGARGV (KRAS G12R)
LVVRGHRGF

SEQ ID NO: 25588 - protein, 9 aa, synthetic construct
  source 1..9: note = Seed: LVVVGARGV (KRAS G12R)
LVVRGHRGG

SEQ ID NO: 25589 - protein, 9 aa, synthetic construct
  source 1..9: note = Seed: LVVVGARGV (KRAS G12R)
LVVRGHRGH

SEQ ID NO: 25590 - protein, 9 aa, synthetic construct
  source 1..9: note = Seed: LVVVGARGV (KRAS G12R)
LVVRGHRGI

SEQ ID NO: 25591 - protein, 9 aa, synthetic construct
  source 1..9: note = Seed: LVVVGARGV (KRAS G12R)
LVVRGHRGK

SEQ ID NO: 25592 - protein, 9 aa, synthetic construct
  source 1..9: note = Seed: LVVVGARGV (KRAS G12R)
LVVRGHRGL

SEQ ID NO: 25593 - protein, 9 aa, synthetic construct
  source 1..9: note = Seed: LVVVGARGV (KRAS G12R)
LVVRGHRGM

SEQ ID NO: 25594 - protein, 9 aa, synthetic construct
  source 1..9: note = Seed: LVVVGARGV (KRAS G12R)
LVVRGHRGQ

SEQ ID NO: 25595 - protein, 9 aa, synthetic construct
  source 1..9: note = Seed: LVVVGARGV (KRAS G12R)
LVVRGHRGR

SEQ ID NO: 25596 - protein, 9 aa, synthetic construct
  source 1..9: note = Seed: LVVVGARGV (KRAS G12R)
LVVRGHRGS

SEQ ID NO: 25597 - protein, 9 aa, synthetic construct
  source 1..9: note = Seed: LVVVGARGV (KRAS G12R)
LVVRGHRGT

SEQ ID NO: 25598 - protein, 9 aa, synthetic construct
  source 1..9: note = Seed: LVVVGARGV (KRAS G12R)
LVVRGHRGV

SEQ ID NO: 25599 - protein, 9 aa, synthetic construct
  source 1..9: note = Seed: LVVVGARGV (KRAS G12R)
LVVRGHRGW

SEQ ID NO: 25600 - protein, 9 aa, synthetic construct
  source 1..9: note = Seed: LVVVGARGV (KRAS G12R)
LVVRGHRGY

SEQ ID NO: 25601 - protein, 9 aa, synthetic construct
  source 1..9: note = Seed: LVVVGARGV (KRAS G12R)
LVVRGIRGA

SEQ ID NO: 25602 - protein, 9 aa, synthetic construct
  source 1..9: note = Seed: LVVVGARGV (KRAS G12R)
LVVRGIRGF

SEQ ID NO: 25603 - protein, 9 aa, synthetic construct
  source 1..9: note = Seed: LVVVGARGV (KRAS G12R)
LVVRGIRGG

SEQ ID NO: 25604 - protein, 9 aa, synthetic construct
  source 1..9: note = Seed: LVVVGARGV (KRAS G12R)
LVVRGIRGH

SEQ ID NO: 25605 - protein, 9 aa, synthetic construct
  source 1..9: note = Seed: LVVVGARGV (KRAS G12R)
LVVRGIRGI

SEQ ID NO: 25606 - protein, 9 aa, synthetic construct
  source 1..9: note = Seed: LVVVGARGV (KRAS G12R)
LVVRGIRGK

SEQ ID NO: 25607 - protein, 9 aa, synthetic construct
  source 1..9: note = Seed: LVVVGARGV (KRAS G12R)
LVVRGIRGL

SEQ ID NO: 25608 - protein, 9 aa, synthetic construct
  source 1..9: note = Seed: LVVVGARGV (KRAS G12R)
LVVRGIRGM

SEQ ID NO: 25609 - protein, 9 aa, synthetic construct
  source 1..9: note = Seed: LVVVGARGV (KRAS G12R)
LVVRGIRGQ

SEQ ID NO: 25610 - protein, 9 aa, synthetic construct
  source 1..9: note = Seed: LVVVGARGV (KRAS G12R)
LVVRGIRGR

SEQ ID NO: 25611 - protein, 9 aa, synthetic construct
  source 1..9: note = Seed: LVVVGARGV (KRAS G12R)
LVVRGIRGS

SEQ ID NO: 25612 - protein, 9 aa, synthetic construct
  source 1..9: note = Seed: LVVVGARGV (KRAS G12R)
LVVRGIRGV

SEQ ID NO: 25613 - protein, 9 aa, synthetic construct
  source 1..9: note = Seed: LVVVGARGV (KRAS G12R)
LVVRGIRGY

SEQ ID NO: 25614 - protein, 9 aa, synthetic construct
  source 1..9: note = Seed: LVVVGARGV (KRAS G12R)
LVVRGKRGA

SEQ ID NO: 25615 - protein, 9 aa, synthetic construct
  source 1..9: note = Seed: LVVVGARGV (KRAS G12R)
LVVRGKRGC

SEQ ID NO: 25616 - protein, 9 aa, synthetic construct
  source 1..9: note = Seed: LVVVGARGV (KRAS G12R)
LVVRGKRGF

SEQ ID NO: 25617 - protein, 9 aa, synthetic construct
  source 1..9: note = Seed: LVVVGARGV (KRAS G12R)
LVVRGKRGG

SEQ ID NO: 25618 - protein, 9 aa, synthetic construct
  source 1..9: note = Seed: LVVVGARGV (KRAS G12R)
LVVRGKRGH

SEQ ID NO: 25619 - protein, 9 aa, synthetic construct
  source 1..9: note = Seed: LVVVGARGV (KRAS G12R)
LVVRGKRGI

SEQ ID NO: 25620 - protein, 9 aa, synthetic construct
  source 1..9: note = Seed: LVVVGARGV (KRAS G12R)
LVVRGKRGK

SEQ ID NO: 25621 - protein, 9 aa, synthetic construct
  source 1..9: note = Seed: LVVVGARGV (KRAS G12R)
LVVRGKRGL

SEQ ID NO: 25622 - protein, 9 aa, synthetic construct
  source 1..9: note = Seed: LVVVGARGV (KRAS G12R)
LVVRGKRGM

SEQ ID NO: 25623 - protein, 9 aa, synthetic construct
  source 1..9: note = Seed: LVVVGARGV (KRAS G12R)
LVVRGKRGN

SEQ ID NO: 25624 - protein, 9 aa, synthetic construct
  source 1..9: note = Seed: LVVVGARGV (KRAS G12R)
LVVRGKRGP

SEQ ID NO: 25625 - protein, 9 aa, synthetic construct
  source 1..9: note = Seed: LVVVGARGV (KRAS G12R)
LVVRGKRGQ

SEQ ID NO: 25626 - protein, 9 aa, synthetic construct
  source 1..9: note = Seed: LVVVGARGV (KRAS G12R)
LVVRGKRGR

SEQ ID NO: 25627 - protein, 9 aa, synthetic construct
  source 1..9: note = Seed: LVVVGARGV (KRAS G12R)
LVVRGKRGS

SEQ ID NO: 25628 - protein, 9 aa, synthetic construct
  source 1..9: note = Seed: LVVVGARGV (KRAS G12R)
LVVRGKRGT

SEQ ID NO: 25629 - protein, 9 aa, synthetic construct
  source 1..9: note = Seed: LVVVGARGV (KRAS G12R)
LVVRGKRGV

SEQ ID NO: 25630 - protein, 9 aa, synthetic construct
  source 1..9: note = Seed: LVVVGARGV (KRAS G12R)
LVVRGKRGW

SEQ ID NO: 25631 - protein, 9 aa, synthetic construct
  source 1..9: note = Seed: LVVVGARGV (KRAS G12R)
LVVRGKRGY

SEQ ID NO: 25632 - protein, 9 aa, synthetic construct
  source 1..9: note = Seed: LVVVGARGV (KRAS G12R)
LVVRGLRGA

SEQ ID NO: 25633 - protein, 9 aa, synthetic construct
  source 1..9: note = Seed: LVVVGARGV (KRAS G12R)
LVVRGLRGC

SEQ ID NO: 25634 - protein, 9 aa, synthetic construct
  source 1..9: note = Seed: LVVVGARGV (KRAS G12R)
LVVRGLRGF

SEQ ID NO: 25635 - protein, 9 aa, synthetic construct
  source 1..9: note = Seed: LVVVGARGV (KRAS G12R)
LVVRGLRGG

SEQ ID NO: 25636 - protein, 9 aa, synthetic construct
  source 1..9: note = Seed: LVVVGARGV (KRAS G12R)
LVVRGLRGH

SEQ ID NO: 25637 - protein, 9 aa, synthetic construct
  source 1..9: note = Seed: LVVVGARGV (KRAS G12R)
LVVRGLRGI

SEQ ID NO: 25638 - protein, 9 aa, synthetic construct
  source 1..9: note = Seed: LVVVGARGV (KRAS G12R)
LVVRGLRGK

SEQ ID NO: 25639 - protein, 9 aa, synthetic construct
  source 1..9: note = Seed: LVVVGARGV (KRAS G12R)
LVVRGLRGL

SEQ ID NO: 25640 - protein, 9 aa, synthetic construct
  source 1..9: note = Seed: LVVVGARGV (KRAS G12R)
LVVRGLRGM

SEQ ID NO: 25641 - protein, 9 aa, synthetic construct
  source 1..9: note = Seed: LVVVGARGV (KRAS G12R)
LVVRGLRGQ

SEQ ID NO: 25642 - protein, 9 aa, synthetic construct
  source 1..9: note = Seed: LVVVGARGV (KRAS G12R)
LVVRGLRGR

SEQ ID NO: 25643 - protein, 9 aa, synthetic construct
  source 1..9: note = Seed: LVVVGARGV (KRAS G12R)
LVVRGLRGS

SEQ ID NO: 25644 - protein, 9 aa, synthetic construct
  source 1..9: note = Seed: LVVVGARGV (KRAS G12R)
LVVRGLRGV

SEQ ID NO: 25645 - protein, 9 aa, synthetic construct
  source 1..9: note = Seed: LVVVGARGV (KRAS G12R)
LVVRGLRGY

SEQ ID NO: 25646 - protein, 9 aa, synthetic construct
  source 1..9: note = Seed: LVVVGARGV (KRAS G12R)
LVVRGMRGA

SEQ ID NO: 25647 - protein, 9 aa, synthetic construct
  source 1..9: note = Seed: LVVVGARGV (KRAS G12R)
LVVRGMRGC

SEQ ID NO: 25648 - protein, 9 aa, synthetic construct
  source 1..9: note = Seed: LVVVGARGV (KRAS G12R)
LVVRGMRGF

SEQ ID NO: 25649 - protein, 9 aa, synthetic construct
  source 1..9: note = Seed: LVVVGARGV (KRAS G12R)
LVVRGMRGG

SEQ ID NO: 25650 - protein, 9 aa, synthetic construct
  source 1..9: note = Seed: LVVVGARGV (KRAS G12R)
LVVRGMRGI

SEQ ID NO: 25651 - protein, 9 aa, synthetic construct
  source 1..9: note = Seed: LVVVGARGV (KRAS G12R)
LVVRGMRGK

SEQ ID NO: 25652 - protein, 9 aa, synthetic construct
  source 1..9: note = Seed: LVVVGARGV (KRAS G12R)
LVVRGMRGL

SEQ ID NO: 25653 - protein, 9 aa, synthetic construct
  source 1..9: note = Seed: LVVVGARGV (KRAS G12R)
LVVRGMRGM

SEQ ID NO: 25654 - protein, 9 aa, synthetic construct
  source 1..9: note = Seed: LVVVGARGV (KRAS G12R)
LVVRGMRGR

SEQ ID NO: 25655 - protein, 9 aa, synthetic construct
  source 1..9: note = Seed: LVVVGARGV (KRAS G12R)
LVVRGMRGS

SEQ ID NO: 25656 - protein, 9 aa, synthetic construct
  source 1..9: note = Seed: LVVVGARGV (KRAS G12R)
LVVRGMRGV

SEQ ID NO: 25657 - protein, 9 aa, synthetic construct
  source 1..9: note = Seed: LVVVGARGV (KRAS G12R)
LVVRGMRGY

SEQ ID NO: 25658 - protein, 9 aa, synthetic construct
  source 1..9: note = Seed: LVVVGARGV (KRAS G12R)
LVVRGNRGA

SEQ ID NO: 25659 - protein, 9 aa, synthetic construct
  source 1..9: note = Seed: LVVVGARGV (KRAS G12R)
LVVRGNRGF

SEQ ID NO: 25660 - protein, 9 aa, synthetic construct
  source 1..9: note = Seed: LVVVGARGV (KRAS G12R)
LVVRGNRGH

SEQ ID NO: 25661 - protein, 9 aa, synthetic construct
  source 1..9: note = Seed: LVVVGARGV (KRAS G12R)
LVVRGNRGI

SEQ ID NO: 25662 - protein, 9 aa, synthetic construct
  source 1..9: note = Seed: LVVVGARGV (KRAS G12R)
LVVRGNRGK

SEQ ID NO: 25663 - protein, 9 aa, synthetic construct
  source 1..9: note = Seed: LVVVGARGV (KRAS G12R)
LVVRGNRGL

SEQ ID NO: 25664 - protein, 9 aa, synthetic construct
  source 1..9: note = Seed: LVVVGARGV (KRAS G12R)
LVVRGNRGM

SEQ ID NO: 25665 - protein, 9 aa, synthetic construct
  source 1..9: note = Seed: LVVVGARGV (KRAS G12R)
LVVRGNRGQ

SEQ ID NO: 25666 - protein, 9 aa, synthetic construct
  source 1..9: note = Seed: LVVVGARGV (KRAS G12R)
LVVRGNRGR

SEQ ID NO: 25667 - protein, 9 aa, synthetic construct
  source 1..9: note = Seed: LVVVGARGV (KRAS G12R)
LVVRGNRGS

SEQ ID NO: 25668 - protein, 9 aa, synthetic construct
  source 1..9: note = Seed: LVVVGARGV (KRAS G12R)
LVVRGNRGV

SEQ ID NO: 25669 - protein, 9 aa, synthetic construct
  source 1..9: note = Seed: LVVVGARGV (KRAS G12R)
LVVRGNRGW

SEQ ID NO: 25670 - protein, 9 aa, synthetic construct
  source 1..9: note = Seed: LVVVGARGV (KRAS G12R)
LVVRGNRGY

SEQ ID NO: 25671 - protein, 9 aa, synthetic construct
  source 1..9: note = Seed: LVVVGARGV (KRAS G12R)
LVVRGPRGF

SEQ ID NO: 25672 - protein, 9 aa, synthetic construct
  source 1..9: note = Seed: LVVVGARGV (KRAS G12R)
LVVRGPRGR

SEQ ID NO: 25673 - protein, 9 aa, synthetic construct
  source 1..9: note = Seed: LVVVGARGV (KRAS G12R)
LVVRGPRGY

SEQ ID NO: 25674 - protein, 9 aa, synthetic construct
  source 1..9: note = Seed: LVVVGARGV (KRAS G12R)
LVVRGQRGA

SEQ ID NO: 25675 - protein, 9 aa, synthetic construct
  source 1..9: note = Seed: LVVVGARGV (KRAS G12R)
LVVRGQRGF

SEQ ID NO: 25676 - protein, 9 aa, synthetic construct
  source 1..9: note = Seed: LVVVGARGV (KRAS G12R)
LVVRGQRGH

SEQ ID NO: 25677 - protein, 9 aa, synthetic construct
  source 1..9: note = Seed: LVVVGARGV (KRAS G12R)
LVVRGQRGI

SEQ ID NO: 25678 - protein, 9 aa, synthetic construct
  source 1..9: note = Seed: LVVVGARGV (KRAS G12R)
LVVRGQRGK

SEQ ID NO: 25679 - protein, 9 aa, synthetic construct
  source 1..9: note = Seed: LVVVGARGV (KRAS G12R)
LVVRGQRGL

SEQ ID NO: 25680 - protein, 9 aa, synthetic construct
  source 1..9: note = Seed: LVVVGARGV (KRAS G12R)
LVVRGQRGM

SEQ ID NO: 25681 - protein, 9 aa, synthetic construct
  source 1..9: note = Seed: LVVVGARGV (KRAS G12R)
LVVRGQRGR

SEQ ID NO: 25682 - protein, 9 aa, synthetic construct
  source 1..9: note = Seed: LVVVGARGV (KRAS G12R)
LVVRGQRGS

SEQ ID NO: 25683 - protein, 9 aa, synthetic construct
  source 1..9: note = Seed: LVVVGARGV (KRAS G12R)
LVVRGQRGV

SEQ ID NO: 25684 - protein, 9 aa, synthetic construct
  source 1..9: note = Seed: LVVVGARGV (KRAS G12R)
LVVRGQRGY

SEQ ID NO: 25685 - protein, 9 aa, synthetic construct
  source 1..9: note = Seed: LVVVGARGV (KRAS G12R)
LVVRGRRGA

SEQ ID NO: 25686 - protein, 9 aa, synthetic construct
  source 1..9: note = Seed: LVVVGARGV (KRAS G12R)
LVVRGRRGC

SEQ ID NO: 25687 - protein, 9 aa, synthetic construct
  source 1..9: note = Seed: LVVVGARGV (KRAS G12R)
LVVRGRRGD

SEQ ID NO: 25688 - protein, 9 aa, synthetic construct
  source 1..9: note = Seed: LVVVGARGV (KRAS G12R)
LVVRGRRGE

SEQ ID NO: 25689 - protein, 9 aa, synthetic construct
  source 1..9: note = Seed: LVVVGARGV (KRAS G12R)
LVVRGRRGF

SEQ ID NO: 25690 - protein, 9 aa, synthetic construct
  source 1..9: note = Seed: LVVVGARGV (KRAS G12R)
LVVRGRRGG

SEQ ID NO: 25691 - protein, 9 aa, synthetic construct
  source 1..9: note = Seed: LVVVGARGV (KRAS G12R)
LVVRGRRGH

SEQ ID NO: 25692 - protein, 9 aa, synthetic construct
  source 1..9: note = Seed: LVVVGARGV (KRAS G12R)
LVVRGRRGI

SEQ ID NO: 25693 - protein, 9 aa, synthetic construct
  source 1..9: note = Seed: LVVVGARGV (KRAS G12R)
LVVRGRRGK

SEQ ID NO: 25694 - protein, 9 aa, synthetic construct
  source 1..9: note = Seed: LVVVGARGV (KRAS G12R)
LVVRGRRGL

SEQ ID NO: 25695 - protein, 9 aa, synthetic construct
  source 1..9: note = Seed: LVVVGARGV (KRAS G12R)
LVVRGRRGM

SEQ ID NO: 25696 - protein, 9 aa, synthetic construct
  source 1..9: note = Seed: LVVVGARGV (KRAS G12R)
LVVRGRRGN

SEQ ID NO: 25697 - protein, 9 aa, synthetic construct
  source 1..9: note = Seed: LVVVGARGV (KRAS G12R)
LVVRGRRGP

SEQ ID NO: 25698 - protein, 9 aa, synthetic construct
  source 1..9: note = Seed: LVVVGARGV (KRAS G12R)
LVVRGRRGQ

SEQ ID NO: 25699 - protein, 9 aa, synthetic construct
  source 1..9: note = Seed: LVVVGARGV (KRAS G12R)
LVVRGRRGR

SEQ ID NO: 25700 - protein, 9 aa, synthetic construct
  source 1..9: note = Seed: LVVVGARGV (KRAS G12R)
LVVRGRRGS

SEQ ID NO: 25701 - protein, 9 aa, synthetic construct
  source 1..9: note = Seed: LVVVGARGV (KRAS G12R)
LVVRGRRGT

SEQ ID NO: 25702 - protein, 9 aa, synthetic construct
  source 1..9: note = Seed: LVVVGARGV (KRAS G12R)
LVVRGRRGV

SEQ ID NO: 25703 - protein, 9 aa, synthetic construct
  source 1..9: note = Seed: LVVVGARGV (KRAS G12R)
LVVRGRRGW

SEQ ID NO: 25704 - protein, 9 aa, synthetic construct
  source 1..9: note = Seed: LVVVGARGV (KRAS G12R)
LVVRGRRGY

SEQ ID NO: 25705 - protein, 9 aa, synthetic construct
  source 1..9: note = Seed: LVVVGARGV (KRAS G12R)
LVVRGSRGA

SEQ ID NO: 25706 - protein, 9 aa, synthetic construct
  source 1..9: note = Seed: LVVVGARGV (KRAS G12R)
LVVRGSRGF

SEQ ID NO: 25707 - protein, 9 aa, synthetic construct
  source 1..9: note = Seed: LVVVGARGV (KRAS G12R)
LVVRGSRGH

SEQ ID NO: 25708 - protein, 9 aa, synthetic construct
  source 1..9: note = Seed: LVVVGARGV (KRAS G12R)
LVVRGSRGI

SEQ ID NO: 25709 - protein, 9 aa, synthetic construct
  source 1..9: note = Seed: LVVVGARGV (KRAS G12R)
LVVRGSRGK

SEQ ID NO: 25710 - protein, 9 aa, synthetic construct
  source 1..9: note = Seed: LVVVGARGV (KRAS G12R)
LVVRGSRGL

SEQ ID NO: 25711 - protein, 9 aa, synthetic construct
  source 1..9: note = Seed: LVVVGARGV (KRAS G12R)
LVVRGSRGM

SEQ ID NO: 25712 - protein, 9 aa, synthetic construct
  source 1..9: note = Seed: LVVVGARGV (KRAS G12R)
LVVRGSRGQ

SEQ ID NO: 25713 - protein, 9 aa, synthetic construct
  source 1..9: note = Seed: LVVVGARGV (KRAS G12R)
LVVRGSRGR

SEQ ID NO: 25714 - protein, 9 aa, synthetic construct
  source 1..9: note = Seed: LVVVGARGV (KRAS G12R)
LVVRGSRGS

SEQ ID NO: 25715 - protein, 9 aa, synthetic construct
  source 1..9: note = Seed: LVVVGARGV (KRAS G12R)
LVVRGSRGT

SEQ ID NO: 25716 - protein, 9 aa, synthetic construct
  source 1..9: note = Seed: LVVVGARGV (KRAS G12R)
LVVRGSRGV

SEQ ID NO: 25717 - protein, 9 aa, synthetic construct
  source 1..9: note = Seed: LVVVGARGV (KRAS G12R)
LVVRGSRGW

SEQ ID NO: 25718 - protein, 9 aa, synthetic construct
  source 1..9: note = Seed: LVVVGARGV (KRAS G12R)
LVVRGSRGY

SEQ ID NO: 25719 - protein, 9 aa, synthetic construct
  source 1..9: note = Seed: LVVVGARGV (KRAS G12R)
LVVRGTRGA

SEQ ID NO: 25720 - protein, 9 aa, synthetic construct
  source 1..9: note = Seed: LVVVGARGV (KRAS G12R)
LVVRGTRGF

SEQ ID NO: 25721 - protein, 9 aa, synthetic construct
  source 1..9: note = Seed: LVVVGARGV (KRAS G12R)
LVVRGTRGH

SEQ ID NO: 25722 - protein, 9 aa, synthetic construct
  source 1..9: note = Seed: LVVVGARGV (KRAS G12R)
LVVRGTRGI

SEQ ID NO: 25723 - protein, 9 aa, synthetic construct
  source 1..9: note = Seed: LVVVGARGV (KRAS G12R)
LVVRGTRGK

SEQ ID NO: 25724 - protein, 9 aa, synthetic construct
  source 1..9: note = Seed: LVVVGARGV (KRAS G12R)
LVVRGTRGL

SEQ ID NO: 25725 - protein, 9 aa, synthetic construct
  source 1..9: note = Seed: LVVVGARGV (KRAS G12R)
LVVRGTRGM

SEQ ID NO: 25726 - protein, 9 aa, synthetic construct
  source 1..9: note = Seed: LVVVGARGV (KRAS G12R)
LVVRGTRGQ

SEQ ID NO: 25727 - protein, 9 aa, synthetic construct
  source 1..9: note = Seed: LVVVGARGV (KRAS G12R)
LVVRGTRGR

SEQ ID NO: 25728 - protein, 9 aa, synthetic construct
  source 1..9: note = Seed: LVVVGARGV (KRAS G12R)
LVVRGTRGS

SEQ ID NO: 25729 - protein, 9 aa, synthetic construct
  source 1..9: note = Seed: LVVVGARGV (KRAS G12R)
LVVRGTRGT

SEQ ID NO: 25730 - protein, 9 aa, synthetic construct
  source 1..9: note = Seed: LVVVGARGV (KRAS G12R)
LVVRGTRGV

SEQ ID NO: 25731 - protein, 9 aa, synthetic construct
  source 1..9: note = Seed: LVVVGARGV (KRAS G12R)
LVVRGTRGW

SEQ ID NO: 25732 - protein, 9 aa, synthetic construct
  source 1..9: note = Seed: LVVVGARGV (KRAS G12R)
LVVRGTRGY

SEQ ID NO: 25733 - protein, 9 aa, synthetic construct
  source 1..9: note = Seed: LVVVGARGV (KRAS G12R)
LVVRGVRGA

SEQ ID NO: 25734 - protein, 9 aa, synthetic construct
  source 1..9: note = Seed: LVVVGARGV (KRAS G12R)
LVVRGVRGF

SEQ ID NO: 25735 - protein, 9 aa, synthetic construct
  source 1..9: note = Seed: LVVVGARGV (KRAS G12R)
LVVRGVRGH

SEQ ID NO: 25736 - protein, 9 aa, synthetic construct
  source 1..9: note = Seed: LVVVGARGV (KRAS G12R)
LVVRGVRGI

SEQ ID NO: 25737 - protein, 9 aa, synthetic construct
  source 1..9: note = Seed: LVVVGARGV (KRAS G12R)
LVVRGVRGK

SEQ ID NO: 25738 - protein, 9 aa, synthetic construct
  source 1..9: note = Seed: LVVVGARGV (KRAS G12R)
LVVRGVRGL

SEQ ID NO: 25739 - protein, 9 aa, synthetic construct
  source 1..9: note = Seed: LVVVGARGV (KRAS G12R)
LVVRGVRGM

SEQ ID NO: 25740 - protein, 9 aa, synthetic construct
  source 1..9: note = Seed: LVVVGARGV (KRAS G12R)
LVVRGVRGQ

SEQ ID NO: 25741 - protein, 9 aa, synthetic construct
  source 1..9: note = Seed: LVVVGARGV (KRAS G12R)
LVVRGVRGR

SEQ ID NO: 25742 - protein, 9 aa, synthetic construct
  source 1..9: note = Seed: LVVVGARGV (KRAS G12R)
LVVRGVRGS

SEQ ID NO: 25743 - protein, 9 aa, synthetic construct
  source 1..9: note = Seed: LVVVGARGV (KRAS G12R)
LVVRGVRGV

SEQ ID NO: 25744 - protein, 9 aa, synthetic construct
  source 1..9: note = Seed: LVVVGARGV (KRAS G12R)
LVVRGVRGW

SEQ ID NO: 25745 - protein, 9 aa, synthetic construct
  source 1..9: note = Seed: LVVVGARGV (KRAS G12R)
LVVRGVRGY

SEQ ID NO: 25746 - protein, 9 aa, synthetic construct
  source 1..9: note = Seed: LVVVGARGV (KRAS G12R)
LVVRGYRGR

SEQ ID NO: 25747 - protein, 9 aa, synthetic construct
  source 1..9: note = Seed: LVVVGARGV (KRAS G12R)
LVVSGARGA

SEQ ID NO: 25748 - protein, 9 aa, synthetic construct
  source 1..9: note = Seed: LVVVGARGV (KRAS G12R)
LVVSGARGC

SEQ ID NO: 25749 - protein, 9 aa, synthetic construct
  source 1..9: note = Seed: LVVVGARGV (KRAS G12R)
LVVSGARGF

SEQ ID NO: 25750 - protein, 9 aa, synthetic construct
  source 1..9: note = Seed: LVVVGARGV (KRAS G12R)
LVVSGARGG

SEQ ID NO: 25751 - protein, 9 aa, synthetic construct
  source 1..9: note = Seed: LVVVGARGV (KRAS G12R)
LVVSGARGI

SEQ ID NO: 25752 - protein, 9 aa, synthetic construct
  source 1..9: note = Seed: LVVVGARGV (KRAS G12R)
LVVSGARGK

SEQ ID NO: 25753 - protein, 9 aa, synthetic construct
  source 1..9: note = Seed: LVVVGARGV (KRAS G12R)
LVVSGARGL

SEQ ID NO: 25754 - protein, 9 aa, synthetic construct
  source 1..9: note = Seed: LVVVGARGV (KRAS G12R)
LVVSGARGM

SEQ ID NO: 25755 - protein, 9 aa, synthetic construct
  source 1..9: note = Seed: LVVVGARGV (KRAS G12R)
LVVSGARGR

SEQ ID NO: 25756 - protein, 9 aa, synthetic construct
  source 1..9: note = Seed: LVVVGARGV (KRAS G12R)
LVVSGARGS

SEQ ID NO: 25757 - protein, 9 aa, synthetic construct
  source 1..9: note = Seed: LVVVGARGV (KRAS G12R)
LVVSGARGT

SEQ ID NO: 25758 - protein, 9 aa, synthetic construct
  source 1..9: note = Seed: LVVVGARGV (KRAS G12R)
LVVSGARGV

SEQ ID NO: 25759 - protein, 9 aa, synthetic construct
  source 1..9: note = Seed: LVVVGARGV (KRAS G12R)
LVVSGARGW

SEQ ID NO: 25760 - protein, 9 aa, synthetic construct
  source 1..9: note = Seed: LVVVGARGV (KRAS G12R)
LVVSGARGY

SEQ ID NO: 25761 - protein, 9 aa, synthetic construct
  source 1..9: note = Seed: LVVVGARGV (KRAS G12R)
LVVSGCRGI

SEQ ID NO: 25762 - protein, 9 aa, synthetic construct
  source 1..9: note = Seed: LVVVGARGV (KRAS G12R)
LVVSGCRGL

SEQ ID NO: 25763 - protein, 9 aa, synthetic construct
  source 1..9: note = Seed: LVVVGARGV (KRAS G12R)
LVVSGCRGV

SEQ ID NO: 25764 - protein, 9 aa, synthetic construct
  source 1..9: note = Seed: LVVVGARGV (KRAS G12R)
LVVSGFRGF

SEQ ID NO: 25765 - protein, 9 aa, synthetic construct
  source 1..9: note = Seed: LVVVGARGV (KRAS G12R)
LVVSGFRGI

SEQ ID NO: 25766 - protein, 9 aa, synthetic construct
  source 1..9: note = Seed: LVVVGARGV (KRAS G12R)
LVVSGFRGL

SEQ ID NO: 25767 - protein, 9 aa, synthetic construct
  source 1..9: note = Seed: LVVVGARGV (KRAS G12R)
LVVSGFRGM

SEQ ID NO: 25768 - protein, 9 aa, synthetic construct
  source 1..9: note = Seed: LVVVGARGV (KRAS G12R)
LVVSGFRGV

SEQ ID NO: 25769 - protein, 9 aa, synthetic construct
  source 1..9: note = Seed: LVVVGARGV (KRAS G12R)
LVVSGGRGA

SEQ ID NO: 25770 - protein, 9 aa, synthetic construct
  source 1..9: note = Seed: LVVVGARGV (KRAS G12R)
LVVSGGRGF

SEQ ID NO: 25771 - protein, 9 aa, synthetic construct
  source 1..9: note = Seed: LVVVGARGV (KRAS G12R)
LVVSGGRGI

SEQ ID NO: 25772 - protein, 9 aa, synthetic construct
  source 1..9: note = Seed: LVVVGARGV (KRAS G12R)
LVVSGGRGL

SEQ ID NO: 25773 - protein, 9 aa, synthetic construct
  source 1..9: note = Seed: LVVVGARGV (KRAS G12R)
LVVSGGRGM

SEQ ID NO: 25774 - protein, 9 aa, synthetic construct
  source 1..9: note = Seed: LVVVGARGV (KRAS G12R)
LVVSGGRGR

SEQ ID NO: 25775 - protein, 9 aa, synthetic construct
  source 1..9: note = Seed: LVVVGARGV (KRAS G12R)
LVVSGGRGS

SEQ ID NO: 25776 - protein, 9 aa, synthetic construct
  source 1..9: note = Seed: LVVVGARGV (KRAS G12R)
LVVSGGRGT

SEQ ID NO: 25777 - protein, 9 aa, synthetic construct
  source 1..9: note = Seed: LVVVGARGV (KRAS G12R)
LVVSGGRGV

SEQ ID NO: 25778 - protein, 9 aa, synthetic construct
  source 1..9: note = Seed: LVVVGARGV (KRAS G12R)
LVVSGGRGY

SEQ ID NO: 25779 - protein, 9 aa, synthetic construct
  source 1..9: note = Seed: LVVVGARGV (KRAS G12R)
LVVSGHRGA

SEQ ID NO: 25780 - protein, 9 aa, synthetic construct
  source 1..9: note = Seed: LVVVGARGV (KRAS G12R)
LVVSGHRGF

SEQ ID NO: 25781 - protein, 9 aa, synthetic construct
  source 1..9: note = Seed: LVVVGARGV (KRAS G12R)
LVVSGHRGH

SEQ ID NO: 25782 - protein, 9 aa, synthetic construct
  source 1..9: note = Seed: LVVVGARGV (KRAS G12R)
LVVSGHRGI

SEQ ID NO: 25783 - protein, 9 aa, synthetic construct
  source 1..9: note = Seed: LVVVGARGV (KRAS G12R)
LVVSGHRGK

SEQ ID NO: 25784 - protein, 9 aa, synthetic construct
  source 1..9: note = Seed: LVVVGARGV (KRAS G12R)
LVVSGHRGL

SEQ ID NO: 25785 - protein, 9 aa, synthetic construct
  source 1..9: note = Seed: LVVVGARGV (KRAS G12R)
LVVSGHRGM

SEQ ID NO: 25786 - protein, 9 aa, synthetic construct
  source 1..9: note = Seed: LVVVGARGV (KRAS G12R)
LVVSGHRGQ

SEQ ID NO: 25787 - protein, 9 aa, synthetic construct
  source 1..9: note = Seed: LVVVGARGV (KRAS G12R)
LVVSGHRGR

SEQ ID NO: 25788 - protein, 9 aa, synthetic construct
  source 1..9: note = Seed: LVVVGARGV (KRAS G12R)
LVVSGHRGS

SEQ ID NO: 25789 - protein, 9 aa, synthetic construct
  source 1..9: note = Seed: LVVVGARGV (KRAS G12R)
LVVSGHRGV

SEQ ID NO: 25790 - protein, 9 aa, synthetic construct
  source 1..9: note = Seed: LVVVGARGV (KRAS G12R)
LVVSGHRGY

SEQ ID NO: 25791 - protein, 9 aa, synthetic construct
  source 1..9: note = Seed: LVVVGARGV (KRAS G12R)
LVVSGIRGA

SEQ ID NO: 25792 - protein, 9 aa, synthetic construct
  source 1..9: note = Seed: LVVVGARGV (KRAS G12R)
LVVSGIRGF

SEQ ID NO: 25793 - protein, 9 aa, synthetic construct
  source 1..9: note = Seed: LVVVGARGV (KRAS G12R)
LVVSGIRGI

SEQ ID NO: 25794 - protein, 9 aa, synthetic construct
  source 1..9: note = Seed: LVVVGARGV (KRAS G12R)
LVVSGIRGK

SEQ ID NO: 25795 - protein, 9 aa, synthetic construct
  source 1..9: note = Seed: LVVVGARGV (KRAS G12R)
LVVSGIRGL

SEQ ID NO: 25796 - protein, 9 aa, synthetic construct
  source 1..9: note = Seed: LVVVGARGV (KRAS G12R)
LVVSGIRGM

SEQ ID NO: 25797 - protein, 9 aa, synthetic construct
  source 1..9: note = Seed: LVVVGARGV (KRAS G12R)
LVVSGIRGR

SEQ ID NO: 25798 - protein, 9 aa, synthetic construct
  source 1..9: note = Seed: LVVVGARGV (KRAS G12R)
LVVSGIRGV

SEQ ID NO: 25799 - protein, 9 aa, synthetic construct
  source 1..9: note = Seed: LVVVGARGV (KRAS G12R)
LVVSGIRGY

SEQ ID NO: 25800 - protein, 9 aa, synthetic construct
  source 1..9: note = Seed: LVVVGARGV (KRAS G12R)
LVVSGKRGA

SEQ ID NO: 25801 - protein, 9 aa, synthetic construct
  source 1..9: note = Seed: LVVVGARGV (KRAS G12R)
LVVSGKRGF

SEQ ID NO: 25802 - protein, 9 aa, synthetic construct
  source 1..9: note = Seed: LVVVGARGV (KRAS G12R)
LVVSGKRGG

SEQ ID NO: 25803 - protein, 9 aa, synthetic construct
  source 1..9: note = Seed: LVVVGARGV (KRAS G12R)
LVVSGKRGH

SEQ ID NO: 25804 - protein, 9 aa, synthetic construct
  source 1..9: note = Seed: LVVVGARGV (KRAS G12R)
LVVSGKRGI

SEQ ID NO: 25805 - protein, 9 aa, synthetic construct
  source 1..9: note = Seed: LVVVGARGV (KRAS G12R)
LVVSGKRGK

SEQ ID NO: 25806 - protein, 9 aa, synthetic construct
  source 1..9: note = Seed: LVVVGARGV (KRAS G12R)
LVVSGKRGL

SEQ ID NO: 25807 - protein, 9 aa, synthetic construct
  source 1..9: note = Seed: LVVVGARGV (KRAS G12R)
LVVSGKRGM

SEQ ID NO: 25808 - protein, 9 aa, synthetic construct
  source 1..9: note = Seed: LVVVGARGV (KRAS G12R)
LVVSGKRGN

SEQ ID NO: 25809 - protein, 9 aa, synthetic construct
  source 1..9: note = Seed: LVVVGARGV (KRAS G12R)
LVVSGKRGQ

SEQ ID NO: 25810 - protein, 9 aa, synthetic construct
  source 1..9: note = Seed: LVVVGARGV (KRAS G12R)
LVVSGKRGR

SEQ ID NO: 25811 - protein, 9 aa, synthetic construct
  source 1..9: note = Seed: LVVVGARGV (KRAS G12R)
LVVSGKRGS

SEQ ID NO: 25812 - protein, 9 aa, synthetic construct
  source 1..9: note = Seed: LVVVGARGV (KRAS G12R)
LVVSGKRGT

SEQ ID NO: 25813 - protein, 9 aa, synthetic construct
  source 1..9: note = Seed: LVVVGARGV (KRAS G12R)
LVVSGKRGV

SEQ ID NO: 25814 - protein, 9 aa, synthetic construct
  source 1..9: note = Seed: LVVVGARGV (KRAS G12R)
LVVSGKRGW

SEQ ID NO: 25815 - protein, 9 aa, synthetic construct
  source 1..9: note = Seed: LVVVGARGV (KRAS G12R)
LVVSGKRGY

SEQ ID NO: 25816 - protein, 9 aa, synthetic construct
  source 1..9: note = Seed: LVVVGARGV (KRAS G12R)
LVVSGLRGA

SEQ ID NO: 25817 - protein, 9 aa, synthetic construct
  source 1..9: note = Seed: LVVVGARGV (KRAS G12R)
LVVSGLRGF

SEQ ID NO: 25818 - protein, 9 aa, synthetic construct
  source 1..9: note = Seed: LVVVGARGV (KRAS G12R)
LVVSGLRGI

SEQ ID NO: 25819 - protein, 9 aa, synthetic construct
  source 1..9: note = Seed: LVVVGARGV (KRAS G12R)
LVVSGLRGK

SEQ ID NO: 25820 - protein, 9 aa, synthetic construct
  source 1..9: note = Seed: LVVVGARGV (KRAS G12R)
LVVSGLRGL

SEQ ID NO: 25821 - protein, 9 aa, synthetic construct
  source 1..9: note = Seed: LVVVGARGV (KRAS G12R)
LVVSGLRGM

SEQ ID NO: 25822 - protein, 9 aa, synthetic construct
  source 1..9: note = Seed: LVVVGARGV (KRAS G12R)
LVVSGLRGR

SEQ ID NO: 25823 - protein, 9 aa, synthetic construct
  source 1..9: note = Seed: LVVVGARGV (KRAS G12R)
LVVSGLRGV

SEQ ID NO: 25824 - protein, 9 aa, synthetic construct
  source 1..9: note = Seed: LVVVGARGV (KRAS G12R)
LVVSGLRGY

SEQ ID NO: 25825 - protein, 9 aa, synthetic construct
  source 1..9: note = Seed: LVVVGARGV (KRAS G12R)
LVVSGMRGA

SEQ ID NO: 25826 - protein, 9 aa, synthetic construct
  source 1..9: note = Seed: LVVVGARGV (KRAS G12R)
LVVSGMRGF

SEQ ID NO: 25827 - protein, 9 aa, synthetic construct
  source 1..9: note = Seed: LVVVGARGV (KRAS G12R)
LVVSGMRGI

SEQ ID NO: 25828 - protein, 9 aa, synthetic construct
  source 1..9: note = Seed: LVVVGARGV (KRAS G12R)
LVVSGMRGL

SEQ ID NO: 25829 - protein, 9 aa, synthetic construct
  source 1..9: note = Seed: LVVVGARGV (KRAS G12R)
LVVSGMRGM

SEQ ID NO: 25830 - protein, 9 aa, synthetic construct
  source 1..9: note = Seed: LVVVGARGV (KRAS G12R)
LVVSGMRGR

SEQ ID NO: 25831 - protein, 9 aa, synthetic construct
  source 1..9: note = Seed: LVVVGARGV (KRAS G12R)
LVVSGMRGV

SEQ ID NO: 25832 - protein, 9 aa, synthetic construct
  source 1..9: note = Seed: LVVVGARGV (KRAS G12R)
LVVSGMRGY

SEQ ID NO: 25833 - protein, 9 aa, synthetic construct
  source 1..9: note = Seed: LVVVGARGV (KRAS G12R)
LVVSGNRGA

SEQ ID NO: 25834 - protein, 9 aa, synthetic construct
  source 1..9: note = Seed: LVVVGARGV (KRAS G12R)
LVVSGNRGF

SEQ ID NO: 25835 - protein, 9 aa, synthetic construct
  source 1..9: note = Seed: LVVVGARGV (KRAS G12R)
LVVSGNRGI

SEQ ID NO: 25836 - protein, 9 aa, synthetic construct
  source 1..9: note = Seed: LVVVGARGV (KRAS G12R)
LVVSGNRGK

SEQ ID NO: 25837 - protein, 9 aa, synthetic construct
  source 1..9: note = Seed: LVVVGARGV (KRAS G12R)
LVVSGNRGL

SEQ ID NO: 25838 - protein, 9 aa, synthetic construct
  source 1..9: note = Seed: LVVVGARGV (KRAS G12R)
LVVSGNRGM

SEQ ID NO: 25839 - protein, 9 aa, synthetic construct
  source 1..9: note = Seed: LVVVGARGV (KRAS G12R)
LVVSGNRGR

SEQ ID NO: 25840 - protein, 9 aa, synthetic construct
  source 1..9: note = Seed: LVVVGARGV (KRAS G12R)
LVVSGNRGV

SEQ ID NO: 25841 - protein, 9 aa, synthetic construct
  source 1..9: note = Seed: LVVVGARGV (KRAS G12R)
LVVSGNRGY

SEQ ID NO: 25842 - protein, 9 aa, synthetic construct
  source 1..9: note = Seed: LVVVGARGV (KRAS G12R)
LVVSGPRGA

SEQ ID NO: 25843 - protein, 9 aa, synthetic construct
  source 1..9: note = Seed: LVVVGARGV (KRAS G12R)
LVVSGPRGF

SEQ ID NO: 25844 - protein, 9 aa, synthetic construct
  source 1..9: note = Seed: LVVVGARGV (KRAS G12R)
LVVSGPRGI

SEQ ID NO: 25845 - protein, 9 aa, synthetic construct
  source 1..9: note = Seed: LVVVGARGV (KRAS G12R)
LVVSGPRGL

SEQ ID NO: 25846 - protein, 9 aa, synthetic construct
  source 1..9: note = Seed: LVVVGARGV (KRAS G12R)
LVVSGPRGM

SEQ ID NO: 25847 - protein, 9 aa, synthetic construct
  source 1..9: note = Seed: LVVVGARGV (KRAS G12R)
LVVSGPRGR

SEQ ID NO: 25848 - protein, 9 aa, synthetic construct
  source 1..9: note = Seed: LVVVGARGV (KRAS G12R)
LVVSGPRGV

SEQ ID NO: 25849 - protein, 9 aa, synthetic construct
  source 1..9: note = Seed: LVVVGARGV (KRAS G12R)
LVVSGPRGY

SEQ ID NO: 25850 - protein, 9 aa, synthetic construct
  source 1..9: note = Seed: LVVVGARGV (KRAS G12R)
LVVSGQRGR

SEQ ID NO: 25851 - protein, 9 aa, synthetic construct
  source 1..9: note = Seed: LVVVGARGV (KRAS G12R)
LVVSGRRGA

SEQ ID NO: 25852 - protein, 9 aa, synthetic construct
  source 1..9: note = Seed: LVVVGARGV (KRAS G12R)
LVVSGRRGC

SEQ ID NO: 25853 - protein, 9 aa, synthetic construct
  source 1..9: note = Seed: LVVVGARGV (KRAS G12R)
LVVSGRRGF

SEQ ID NO: 25854 - protein, 9 aa, synthetic construct
  source 1..9: note = Seed: LVVVGARGV (KRAS G12R)
LVVSGRRGG

SEQ ID NO: 25855 - protein, 9 aa, synthetic construct
  source 1..9: note = Seed: LVVVGARGV (KRAS G12R)
LVVSGRRGH

SEQ ID NO: 25856 - protein, 9 aa, synthetic construct
  source 1..9: note = Seed: LVVVGARGV (KRAS G12R)
LVVSGRRGI

SEQ ID NO: 25857 - protein, 9 aa, synthetic construct
  source 1..9: note = Seed: LVVVGARGV (KRAS G12R)
LVVSGRRGK

SEQ ID NO: 25858 - protein, 9 aa, synthetic construct
  source 1..9: note = Seed: LVVVGARGV (KRAS G12R)
LVVSGRRGL

SEQ ID NO: 25859 - protein, 9 aa, synthetic construct
  source 1..9: note = Seed: LVVVGARGV (KRAS G12R)
LVVSGRRGM

SEQ ID NO: 25860 - protein, 9 aa, synthetic construct
  source 1..9: note = Seed: LVVVGARGV (KRAS G12R)
LVVSGRRGN

SEQ ID NO: 25861 - protein, 9 aa, synthetic construct
  source 1..9: note = Seed: LVVVGARGV (KRAS G12R)
LVVSGRRGP

SEQ ID NO: 25862 - protein, 9 aa, synthetic construct
  source 1..9: note = Seed: LVVVGARGV (KRAS G12R)
LVVSGRRGQ

SEQ ID NO: 25863 - protein, 9 aa, synthetic construct
  source 1..9: note = Seed: LVVVGARGV (KRAS G12R)
LVVSGRRGR

SEQ ID NO: 25864 - protein, 9 aa, synthetic construct
  source 1..9: note = Seed: LVVVGARGV (KRAS G12R)
LVVSGRRGS

SEQ ID NO: 25865 - protein, 9 aa, synthetic construct
  source 1..9: note = Seed: LVVVGARGV (KRAS G12R)
LVVSGRRGT

SEQ ID NO: 25866 - protein, 9 aa, synthetic construct
  source 1..9: note = Seed: LVVVGARGV (KRAS G12R)
LVVSGRRGV

SEQ ID NO: 25867 - protein, 9 aa, synthetic construct
  source 1..9: note = Seed: LVVVGARGV (KRAS G12R)
LVVSGRRGW

SEQ ID NO: 25868 - protein, 9 aa, synthetic construct
  source 1..9: note = Seed: LVVVGARGV (KRAS G12R)
LVVSGRRGY

SEQ ID NO: 25869 - protein, 9 aa, synthetic construct
  source 1..9: note = Seed: LVVVGARGV (KRAS G12R)
LVVSGSRGA

SEQ ID NO: 25870 - protein, 9 aa, synthetic construct
  source 1..9: note = Seed: LVVVGARGV (KRAS G12R)
LVVSGSRGF

SEQ ID NO: 25871 - protein, 9 aa, synthetic construct
  source 1..9: note = Seed: LVVVGARGV (KRAS G12R)
LVVSGSRGI

SEQ ID NO: 25872 - protein, 9 aa, synthetic construct
  source 1..9: note = Seed: LVVVGARGV (KRAS G12R)
LVVSGSRGK

SEQ ID NO: 25873 - protein, 9 aa, synthetic construct
  source 1..9: note = Seed: LVVVGARGV (KRAS G12R)
LVVSGSRGL

SEQ ID NO: 25874 - protein, 9 aa, synthetic construct
  source 1..9: note = Seed: LVVVGARGV (KRAS G12R)
LVVSGSRGM

SEQ ID NO: 25875 - protein, 9 aa, synthetic construct
  source 1..9: note = Seed: LVVVGARGV (KRAS G12R)
LVVSGSRGR

SEQ ID NO: 25876 - protein, 9 aa, synthetic construct
  source 1..9: note = Seed: LVVVGARGV (KRAS G12R)
LVVSGSRGS

SEQ ID NO: 25877 - protein, 9 aa, synthetic construct
  source 1..9: note = Seed: LVVVGARGV (KRAS G12R)
LVVSGSRGT

SEQ ID NO: 25878 - protein, 9 aa, synthetic construct
  source 1..9: note = Seed: LVVVGARGV (KRAS G12R)
LVVSGSRGV

SEQ ID NO: 25879 - protein, 9 aa, synthetic construct
  source 1..9: note = Seed: LVVVGARGV (KRAS G12R)
LVVSGSRGY

SEQ ID NO: 25880 - protein, 9 aa, synthetic construct
  source 1..9: note = Seed: LVVVGARGV (KRAS G12R)
LVVSGTRGA

SEQ ID NO: 25881 - protein, 9 aa, synthetic construct
  source 1..9: note = Seed: LVVVGARGV (KRAS G12R)
LVVSGTRGF

SEQ ID NO: 25882 - protein, 9 aa, synthetic construct
  source 1..9: note = Seed: LVVVGARGV (KRAS G12R)
LVVSGTRGI

SEQ ID NO: 25883 - protein, 9 aa, synthetic construct
  source 1..9: note = Seed: LVVVGARGV (KRAS G12R)
LVVSGTRGK

SEQ ID NO: 25884 - protein, 9 aa, synthetic construct
  source 1..9: note = Seed: LVVVGARGV (KRAS G12R)
LVVSGTRGL

SEQ ID NO: 25885 - protein, 9 aa, synthetic construct
  source 1..9: note = Seed: LVVVGARGV (KRAS G12R)
LVVSGTRGM

SEQ ID NO: 25886 - protein, 9 aa, synthetic construct
  source 1..9: note = Seed: LVVVGARGV (KRAS G12R)
LVVSGTRGR

SEQ ID NO: 25887 - protein, 9 aa, synthetic construct
  source 1..9: note = Seed: LVVVGARGV (KRAS G12R)
LVVSGTRGV

SEQ ID NO: 25888 - protein, 9 aa, synthetic construct
  source 1..9: note = Seed: LVVVGARGV (KRAS G12R)
LVVSGTRGY

SEQ ID NO: 25889 - protein, 9 aa, synthetic construct
  source 1..9: note = Seed: LVVVGARGV (KRAS G12R)
LVVSGVRGA

SEQ ID NO: 25890 - protein, 9 aa, synthetic construct
  source 1..9: note = Seed: LVVVGARGV (KRAS G12R)
LVVSGVRGF

SEQ ID NO: 25891 - protein, 9 aa, synthetic construct
  source 1..9: note = Seed: LVVVGARGV (KRAS G12R)
LVVSGVRGI

SEQ ID NO: 25892 - protein, 9 aa, synthetic construct
  source 1..9: note = Seed: LVVVGARGV (KRAS G12R)
LVVSGVRGK

SEQ ID NO: 25893 - protein, 9 aa, synthetic construct
  source 1..9: note = Seed: LVVVGARGV (KRAS G12R)
LVVSGVRGL

SEQ ID NO: 25894 - protein, 9 aa, synthetic construct
  source 1..9: note = Seed: LVVVGARGV (KRAS G12R)
LVVSGVRGM

SEQ ID NO: 25895 - protein, 9 aa, synthetic construct
  source 1..9: note = Seed: LVVVGARGV (KRAS G12R)
LVVSGVRGR

SEQ ID NO: 25896 - protein, 9 aa, synthetic construct
  source 1..9: note = Seed: LVVVGARGV (KRAS G12R)
LVVSGVRGV

SEQ ID NO: 25897 - protein, 9 aa, synthetic construct
  source 1..9: note = Seed: LVVVGARGV (KRAS G12R)
LVVSGVRGY

SEQ ID NO: 25898 - protein, 9 aa, synthetic construct
  source 1..9: note = Seed: LVVVGARGV (KRAS G12R)
LVVSGWRGR

SEQ ID NO: 25899 - protein, 9 aa, synthetic construct
  source 1..9: note = Seed: LVVVGARGV (KRAS G12R)
LVVSGYRGR

SEQ ID NO: 25900 - protein, 9 aa, synthetic construct
  source 1..9: note = Seed: LVVVGARGV (KRAS G12R)
LVVTGARGA

SEQ ID NO: 25901 - protein, 9 aa, synthetic construct
  source 1..9: note = Seed: LVVVGARGV (KRAS G12R)
LVVTGARGF

SEQ ID NO: 25902 - protein, 9 aa, synthetic construct
  source 1..9: note = Seed: LVVVGARGV (KRAS G12R)
LVVTGARGI

SEQ ID NO: 25903 - protein, 9 aa, synthetic construct
  source 1..9: note = Seed: LVVVGARGV (KRAS G12R)
LVVTGARGK

SEQ ID NO: 25904 - protein, 9 aa, synthetic construct
  source 1..9: note = Seed: LVVVGARGV (KRAS G12R)
LVVTGARGL

SEQ ID NO: 25905 - protein, 9 aa, synthetic construct
  source 1..9: note = Seed: LVVVGARGV (KRAS G12R)
LVVTGARGM

SEQ ID NO: 25906 - protein, 9 aa, synthetic construct
  source 1..9: note = Seed: LVVVGARGV (KRAS G12R)
LVVTGARGR

SEQ ID NO: 25907 - protein, 9 aa, synthetic construct
  source 1..9: note = Seed: LVVVGARGV (KRAS G12R)
LVVTGARGS

SEQ ID NO: 25908 - protein, 9 aa, synthetic construct
  source 1..9: note = Seed: LVVVGARGV (KRAS G12R)
LVVTGARGT

SEQ ID NO: 25909 - protein, 9 aa, synthetic construct
  source 1..9: note = Seed: LVVVGARGV (KRAS G12R)
LVVTGARGV

SEQ ID NO: 25910 - protein, 9 aa, synthetic construct
  source 1..9: note = Seed: LVVVGARGV (KRAS G12R)
LVVTGARGY

SEQ ID NO: 25911 - protein, 9 aa, synthetic construct
  source 1..9: note = Seed: LVVVGARGV (KRAS G12R)
LVVTGFRGF

SEQ ID NO: 25912 - protein, 9 aa, synthetic construct
  source 1..9: note = Seed: LVVVGARGV (KRAS G12R)
LVVTGFRGI

SEQ ID NO: 25913 - protein, 9 aa, synthetic construct
  source 1..9: note = Seed: LVVVGARGV (KRAS G12R)
LVVTGFRGL

SEQ ID NO: 25914 - protein, 9 aa, synthetic construct
  source 1..9: note = Seed: LVVVGARGV (KRAS G12R)
LVVTGFRGM

SEQ ID NO: 25915 - protein, 9 aa, synthetic construct
  source 1..9: note = Seed: LVVVGARGV (KRAS G12R)
LVVTGFRGR

SEQ ID NO: 25916 - protein, 9 aa, synthetic construct
  source 1..9: note = Seed: LVVVGARGV (KRAS G12R)
LVVTGFRGV

SEQ ID NO: 25917 - protein, 9 aa, synthetic construct
  source 1..9: note = Seed: LVVVGARGV (KRAS G12R)
LVVTGGRGA

SEQ ID NO: 25918 - protein, 9 aa, synthetic construct
  source 1..9: note = Seed: LVVVGARGV (KRAS G12R)
LVVTGGRGF

SEQ ID NO: 25919 - protein, 9 aa, synthetic construct
  source 1..9: note = Seed: LVVVGARGV (KRAS G12R)
LVVTGGRGI

SEQ ID NO: 25920 - protein, 9 aa, synthetic construct
  source 1..9: note = Seed: LVVVGARGV (KRAS G12R)
LVVTGGRGL

SEQ ID NO: 25921 - protein, 9 aa, synthetic construct
  source 1..9: note = Seed: LVVVGARGV (KRAS G12R)
LVVTGGRGM

SEQ ID NO: 25922 - protein, 9 aa, synthetic construct
  source 1..9: note = Seed: LVVVGARGV (KRAS G12R)
LVVTGGRGT

SEQ ID NO: 25923 - protein, 9 aa, synthetic construct
  source 1..9: note = Seed: LVVVGARGV (KRAS G12R)
LVVTGGRGV

SEQ ID NO: 25924 - protein, 9 aa, synthetic construct
  source 1..9: note = Seed: LVVVGARGV (KRAS G12R)
LVVTGHRGA

SEQ ID NO: 25925 - protein, 9 aa, synthetic construct
  source 1..9: note = Seed: LVVVGARGV (KRAS G12R)
LVVTGHRGF

SEQ ID NO: 25926 - protein, 9 aa, synthetic construct
  source 1..9: note = Seed: LVVVGARGV (KRAS G12R)
LVVTGHRGH

SEQ ID NO: 25927 - protein, 9 aa, synthetic construct
  source 1..9: note = Seed: LVVVGARGV (KRAS G12R)
LVVTGHRGI

SEQ ID NO: 25928 - protein, 9 aa, synthetic construct
  source 1..9: note = Seed: LVVVGARGV (KRAS G12R)
LVVTGHRGK

SEQ ID NO: 25929 - protein, 9 aa, synthetic construct
  source 1..9: note = Seed: LVVVGARGV (KRAS G12R)
LVVTGHRGL

SEQ ID NO: 25930 - protein, 9 aa, synthetic construct
  source 1..9: note = Seed: LVVVGARGV (KRAS G12R)
LVVTGHRGM

SEQ ID NO: 25931 - protein, 9 aa, synthetic construct
  source 1..9: note = Seed: LVVVGARGV (KRAS G12R)
LVVTGHRGR

SEQ ID NO: 25932 - protein, 9 aa, synthetic construct
  source 1..9: note = Seed: LVVVGARGV (KRAS G12R)
LVVTGHRGS

SEQ ID NO: 25933 - protein, 9 aa, synthetic construct
  source 1..9: note = Seed: LVVVGARGV (KRAS G12R)
LVVTGHRGV

SEQ ID NO: 25934 - protein, 9 aa, synthetic construct
  source 1..9: note = Seed: LVVVGARGV (KRAS G12R)
LVVTGHRGY

SEQ ID NO: 25935 - protein, 9 aa, synthetic construct
  source 1..9: note = Seed: LVVVGARGV (KRAS G12R)
LVVTGIRGA

SEQ ID NO: 25936 - protein, 9 aa, synthetic construct
  source 1..9: note = Seed: LVVVGARGV (KRAS G12R)
LVVTGIRGF

SEQ ID NO: 25937 - protein, 9 aa, synthetic construct
  source 1..9: note = Seed: LVVVGARGV (KRAS G12R)
LVVTGIRGI

SEQ ID NO: 25938 - protein, 9 aa, synthetic construct
  source 1..9: note = Seed: LVVVGARGV (KRAS G12R)
LVVTGIRGK

SEQ ID NO: 25939 - protein, 9 aa, synthetic construct
  source 1..9: note = Seed: LVVVGARGV (KRAS G12R)
LVVTGIRGL

SEQ ID NO: 25940 - protein, 9 aa, synthetic construct
  source 1..9: note = Seed: LVVVGARGV (KRAS G12R)
LVVTGIRGM

SEQ ID NO: 25941 - protein, 9 aa, synthetic construct
  source 1..9: note = Seed: LVVVGARGV (KRAS G12R)
LVVTGIRGR

SEQ ID NO: 25942 - protein, 9 aa, synthetic construct
  source 1..9: note = Seed: LVVVGARGV (KRAS G12R)
LVVTGIRGV

SEQ ID NO: 25943 - protein, 9 aa, synthetic construct
  source 1..9: note = Seed: LVVVGARGV (KRAS G12R)
LVVTGIRGY

SEQ ID NO: 25944 - protein, 9 aa, synthetic construct
  source 1..9: note = Seed: LVVVGARGV (KRAS G12R)
LVVTGKRGA

SEQ ID NO: 25945 - protein, 9 aa, synthetic construct
  source 1..9: note = Seed: LVVVGARGV (KRAS G12R)
LVVTGKRGF

SEQ ID NO: 25946 - protein, 9 aa, synthetic construct
  source 1..9: note = Seed: LVVVGARGV (KRAS G12R)
LVVTGKRGG

SEQ ID NO: 25947 - protein, 9 aa, synthetic construct
  source 1..9: note = Seed: LVVVGARGV (KRAS G12R)
LVVTGKRGH

SEQ ID NO: 25948 - protein, 9 aa, synthetic construct
  source 1..9: note = Seed: LVVVGARGV (KRAS G12R)
LVVTGKRGI

SEQ ID NO: 25949 - protein, 9 aa, synthetic construct
  source 1..9: note = Seed: LVVVGARGV (KRAS G12R)
LVVTGKRGK

SEQ ID NO: 25950 - protein, 9 aa, synthetic construct
  source 1..9: note = Seed: LVVVGARGV (KRAS G12R)
LVVTGKRGL

SEQ ID NO: 25951 - protein, 9 aa, synthetic construct
  source 1..9: note = Seed: LVVVGARGV (KRAS G12R)
LVVTGKRGM

SEQ ID NO: 25952 - protein, 9 aa, synthetic construct
  source 1..9: note = Seed: LVVVGARGV (KRAS G12R)
LVVTGKRGN

SEQ ID NO: 25953 - protein, 9 aa, synthetic construct
  source 1..9: note = Seed: LVVVGARGV (KRAS G12R)
LVVTGKRGQ

SEQ ID NO: 25954 - protein, 9 aa, synthetic construct
  source 1..9: note = Seed: LVVVGARGV (KRAS G12R)
LVVTGKRGR

SEQ ID NO: 25955 - protein, 9 aa, synthetic construct
  source 1..9: note = Seed: LVVVGARGV (KRAS G12R)
LVVTGKRGS

SEQ ID NO: 25956 - protein, 9 aa, synthetic construct
  source 1..9: note = Seed: LVVVGARGV (KRAS G12R)
LVVTGKRGT

SEQ ID NO: 25957 - protein, 9 aa, synthetic construct
  source 1..9: note = Seed: LVVVGARGV (KRAS G12R)
LVVTGKRGV

SEQ ID NO: 25958 - protein, 9 aa, synthetic construct
  source 1..9: note = Seed: LVVVGARGV (KRAS G12R)
LVVTGKRGW

SEQ ID NO: 25959 - protein, 9 aa, synthetic construct
  source 1..9: note = Seed: LVVVGARGV (KRAS G12R)
LVVTGKRGY

SEQ ID NO: 25960 - protein, 9 aa, synthetic construct
  source 1..9: note = Seed: LVVVGARGV (KRAS G12R)
LVVTGLRGA

SEQ ID NO: 25961 - protein, 9 aa, synthetic construct
  source 1..9: note = Seed: LVVVGARGV (KRAS G12R)
LVVTGLRGK

SEQ ID NO: 25962 - protein, 9 aa, synthetic construct
  source 1..9: note = Seed: LVVVGARGV (KRAS G12R)
LVVTGLRGL

SEQ ID NO: 25963 - protein, 9 aa, synthetic construct
  source 1..9: note = Seed: LVVVGARGV (KRAS G12R)
LVVTGLRGR

SEQ ID NO: 25964 - protein, 9 aa, synthetic construct
  source 1..9: note = Seed: LVVVGARGV (KRAS G12R)
LVVTGMRGF

SEQ ID NO: 25965 - protein, 9 aa, synthetic construct
  source 1..9: note = Seed: LVVVGARGV (KRAS G12R)
LVVTGMRGI

SEQ ID NO: 25966 - protein, 9 aa, synthetic construct
  source 1..9: note = Seed: LVVVGARGV (KRAS G12R)
LVVTGMRGK

SEQ ID NO: 25967 - protein, 9 aa, synthetic construct
  source 1..9: note = Seed: LVVVGARGV (KRAS G12R)
LVVTGMRGL

SEQ ID NO: 25968 - protein, 9 aa, synthetic construct
  source 1..9: note = Seed: LVVVGARGV (KRAS G12R)
LVVTGMRGR

SEQ ID NO: 25969 - protein, 9 aa, synthetic construct
  source 1..9: note = Seed: LVVVGARGV (KRAS G12R)
LVVTGMRGV

SEQ ID NO: 25970 - protein, 9 aa, synthetic construct
  source 1..9: note = Seed: LVVVGARGV (KRAS G12R)
LVVTGNRGA

SEQ ID NO: 25971 - protein, 9 aa, synthetic construct
  source 1..9: note = Seed: LVVVGARGV (KRAS G12R)
LVVTGNRGF

SEQ ID NO: 25972 - protein, 9 aa, synthetic construct
  source 1..9: note = Seed: LVVVGARGV (KRAS G12R)
LVVTGNRGI

SEQ ID NO: 25973 - protein, 9 aa, synthetic construct
  source 1..9: note = Seed: LVVVGARGV (KRAS G12R)
LVVTGNRGL

SEQ ID NO: 25974 - protein, 9 aa, synthetic construct
  source 1..9: note = Seed: LVVVGARGV (KRAS G12R)
LVVTGNRGM

SEQ ID NO: 25975 - protein, 9 aa, synthetic construct
  source 1..9: note = Seed: LVVVGARGV (KRAS G12R)
LVVTGNRGR

SEQ ID NO: 25976 - protein, 9 aa, synthetic construct
  source 1..9: note = Seed: LVVVGARGV (KRAS G12R)
LVVTGNRGV

SEQ ID NO: 25977 - protein, 9 aa, synthetic construct
  source 1..9: note = Seed: LVVVGARGV (KRAS G12R)
LVVTGNRGY

SEQ ID NO: 25978 - protein, 9 aa, synthetic construct
  source 1..9: note = Seed: LVVVGARGV (KRAS G12R)
LVVTGPRGA

SEQ ID NO: 25979 - protein, 9 aa, synthetic construct
  source 1..9: note = Seed: LVVVGARGV (KRAS G12R)
LVVTGPRGI

SEQ ID NO: 25980 - protein, 9 aa, synthetic construct
  source 1..9: note = Seed: LVVVGARGV (KRAS G12R)
LVVTGPRGL

SEQ ID NO: 25981 - protein, 9 aa, synthetic construct
  source 1..9: note = Seed: LVVVGARGV (KRAS G12R)
LVVTGPRGM

SEQ ID NO: 25982 - protein, 9 aa, synthetic construct
  source 1..9: note = Seed: LVVVGARGV (KRAS G12R)
LVVTGPRGV

SEQ ID NO: 25983 - protein, 9 aa, synthetic construct
  source 1..9: note = Seed: LVVVGARGV (KRAS G12R)
LVVTGRRGA

SEQ ID NO: 25984 - protein, 9 aa, synthetic construct
  source 1..9: note = Seed: LVVVGARGV (KRAS G12R)
LVVTGRRGC

SEQ ID NO: 25985 - protein, 9 aa, synthetic construct
  source 1..9: note = Seed: LVVVGARGV (KRAS G12R)
LVVTGRRGF

SEQ ID NO: 25986 - protein, 9 aa, synthetic construct
  source 1..9: note = Seed: LVVVGARGV (KRAS G12R)
LVVTGRRGG

SEQ ID NO: 25987 - protein, 9 aa, synthetic construct
  source 1..9: note = Seed: LVVVGARGV (KRAS G12R)
LVVTGRRGH

SEQ ID NO: 25988 - protein, 9 aa, synthetic construct
  source 1..9: note = Seed: LVVVGARGV (KRAS G12R)
LVVTGRRGI

SEQ ID NO: 25989 - protein, 9 aa, synthetic construct
  source 1..9: note = Seed: LVVVGARGV (KRAS G12R)
LVVTGRRGK

SEQ ID NO: 25990 - protein, 9 aa, synthetic construct
  source 1..9: note = Seed: LVVVGARGV (KRAS G12R)
LVVTGRRGL

SEQ ID NO: 25991 - protein, 9 aa, synthetic construct
  source 1..9: note = Seed: LVVVGARGV (KRAS G12R)
LVVTGRRGM

SEQ ID NO: 25992 - protein, 9 aa, synthetic construct
  source 1..9: note = Seed: LVVVGARGV (KRAS G12R)
LVVTGRRGN

SEQ ID NO: 25993 - protein, 9 aa, synthetic construct
  source 1..9: note = Seed: LVVVGARGV (KRAS G12R)
LVVTGRRGP

SEQ ID NO: 25994 - protein, 9 aa, synthetic construct
  source 1..9: note = Seed: LVVVGARGV (KRAS G12R)
LVVTGRRGQ

SEQ ID NO: 25995 - protein, 9 aa, synthetic construct
  source 1..9: note = Seed: LVVVGARGV (KRAS G12R)
LVVTGRRGR

SEQ ID NO: 25996 - protein, 9 aa, synthetic construct
  source 1..9: note = Seed: LVVVGARGV (KRAS G12R)
LVVTGRRGS

SEQ ID NO: 25997 - protein, 9 aa, synthetic construct
  source 1..9: note = Seed: LVVVGARGV (KRAS G12R)
LVVTGRRGT

SEQ ID NO: 25998 - protein, 9 aa, synthetic construct
  source 1..9: note = Seed: LVVVGARGV (KRAS G12R)
LVVTGRRGV

SEQ ID NO: 25999 - protein, 9 aa, synthetic construct
  source 1..9: note = Seed: LVVVGARGV (KRAS G12R)
LVVTGRRGW

SEQ ID NO: 26000 - protein, 9 aa, synthetic construct
  source 1..9: note = Seed: LVVVGARGV (KRAS G12R)
LVVTGRRGY

SEQ ID NO: 26001 - protein, 9 aa, synthetic construct
  source 1..9: note = Seed: LVVVGARGV (KRAS G12R)
LVVTGSRGA

SEQ ID NO: 26002 - protein, 9 aa, synthetic construct
  source 1..9: note = Seed: LVVVGARGV (KRAS G12R)
LVVTGSRGF

SEQ ID NO: 26003 - protein, 9 aa, synthetic construct
  source 1..9: note = Seed: LVVVGARGV (KRAS G12R)
LVVTGSRGI

SEQ ID NO: 26004 - protein, 9 aa, synthetic construct
  source 1..9: note = Seed: LVVVGARGV (KRAS G12R)
LVVTGSRGL

SEQ ID NO: 26005 - protein, 9 aa, synthetic construct
  source 1..9: note = Seed: LVVVGARGV (KRAS G12R)
LVVTGSRGM

SEQ ID NO: 26006 - protein, 9 aa, synthetic construct
  source 1..9: note = Seed: LVVVGARGV (KRAS G12R)
LVVTGSRGR

SEQ ID NO: 26007 - protein, 9 aa, synthetic construct
  source 1..9: note = Seed: LVVVGARGV (KRAS G12R)
LVVTGSRGT

SEQ ID NO: 26008 - protein, 9 aa, synthetic construct
  source 1..9: note = Seed: LVVVGARGV (KRAS G12R)
LVVTGSRGV

SEQ ID NO: 26009 - protein, 9 aa, synthetic construct
  source 1..9: note = Seed: LVVVGARGV (KRAS G12R)
LVVTGSRGY

SEQ ID NO: 26010 - protein, 9 aa, synthetic construct
  source 1..9: note = Seed: LVVVGARGV (KRAS G12R)
LVVTGTRGF

SEQ ID NO: 26011 - protein, 9 aa, synthetic construct
  source 1..9: note = Seed: LVVVGARGV (KRAS G12R)
LVVTGTRGI

SEQ ID NO: 26012 - protein, 9 aa, synthetic construct
  source 1..9: note = Seed: LVVVGARGV (KRAS G12R)
LVVTGTRGL

SEQ ID NO: 26013 - protein, 9 aa, synthetic construct
  source 1..9: note = Seed: LVVVGARGV (KRAS G12R)
LVVTGTRGM

SEQ ID NO: 26014 - protein, 9 aa, synthetic construct
  source 1..9: note = Seed: LVVVGARGV (KRAS G12R)
LVVTGTRGR

SEQ ID NO: 26015 - protein, 9 aa, synthetic construct
  source 1..9: note = Seed: LVVVGARGV (KRAS G12R)
LVVTGTRGV

SEQ ID NO: 26016 - protein, 9 aa, synthetic construct
  source 1..9: note = Seed: LVVVGARGV (KRAS G12R)
LVVTGTRGY

SEQ ID NO: 26017 - protein, 9 aa, synthetic construct
  source 1..9: note = Seed: LVVVGARGV (KRAS G12R)
LVVTGVRGA

SEQ ID NO: 26018 - protein, 9 aa, synthetic construct
  source 1..9: note = Seed: LVVVGARGV (KRAS G12R)
LVVTGVRGF

SEQ ID NO: 26019 - protein, 9 aa, synthetic construct
  source 1..9: note = Seed: LVVVGARGV (KRAS G12R)
LVVTGVRGI

SEQ ID NO: 26020 - protein, 9 aa, synthetic construct
  source 1..9: note = Seed: LVVVGARGV (KRAS G12R)
LVVTGVRGK

SEQ ID NO: 26021 - protein, 9 aa, synthetic construct
  source 1..9: note = Seed: LVVVGARGV (KRAS G12R)
LVVTGVRGL

SEQ ID NO: 26022 - protein, 9 aa, synthetic construct
  source 1..9: note = Seed: LVVVGARGV (KRAS G12R)
LVVTGVRGR

SEQ ID NO: 26023 - protein, 9 aa, synthetic construct
  source 1..9: note = Seed: LVVVGARGV (KRAS G12R)
LVVTGVRGV

SEQ ID NO: 26024 - protein, 9 aa, synthetic construct
  source 1..9: note = Seed: LVVVGARGV (KRAS G12R)
LVVTGVRGY

SEQ ID NO: 26025 - protein, 9 aa, synthetic construct
  source 1..9: note = Seed: LVVVGARGV (KRAS G12R)
LVVTGWRGR

SEQ ID NO: 26026 - protein, 9 aa, synthetic construct
  source 1..9: note = Seed: LVVVGARGV (KRAS G12R)
LVVTGYRGR

SEQ ID NO: 26027 - protein, 9 aa, synthetic construct
  source 1..9: note = Seed: LVVVGARGV (KRAS G12R)
LVVVGARGA

SEQ ID NO: 26028 - protein, 9 aa, synthetic construct
  source 1..9: note = Seed: LVVVGARGV (KRAS G12R)
LVVVGARGC

SEQ ID NO: 26029 - protein, 9 aa, synthetic construct
  source 1..9: note = Seed: LVVVGARGV (KRAS G12R)
LVVVGARGF

SEQ ID NO: 26030 - protein, 9 aa, synthetic construct
  source 1..9: note = Seed: LVVVGARGV (KRAS G12R)
LVVVGARGG

SEQ ID NO: 26031 - protein, 9 aa, synthetic construct
  source 1..9: note = Seed: LVVVGARGV (KRAS G12R)
LVVVGARGH

SEQ ID NO: 26032 - protein, 9 aa, synthetic construct
  source 1..9: note = Seed: LVVVGARGV (KRAS G12R)
LVVVGARGI

SEQ ID NO: 26033 - protein, 9 aa, synthetic construct
  source 1..9: note = Seed: LVVVGARGV (KRAS G12R)
LVVVGARGK

SEQ ID NO: 26034 - protein, 9 aa, synthetic construct
  source 1..9: note = Seed: LVVVGARGV (KRAS G12R)
LVVVGARGL

SEQ ID NO: 26035 - protein, 9 aa, synthetic construct
  source 1..9: note = Seed: LVVVGARGV (KRAS G12R)
LVVVGARGM

SEQ ID NO: 26036 - protein, 9 aa, synthetic construct
  source 1..9: note = Seed: LVVVGARGV (KRAS G12R)
LVVVGARGN

SEQ ID NO: 26037 - protein, 9 aa, synthetic construct
  source 1..9: note = Seed: LVVVGARGV (KRAS G12R)
LVVVGARGQ

SEQ ID NO: 26038 - protein, 9 aa, synthetic construct
  source 1..9: note = Seed: LVVVGARGV (KRAS G12R)
LVVVGARGR

SEQ ID NO: 26039 - protein, 9 aa, synthetic construct
  source 1..9: note = Seed: LVVVGARGV (KRAS G12R)
LVVVGARGS

SEQ ID NO: 26040 - protein, 9 aa, synthetic construct
  source 1..9: note = Seed: LVVVGARGV (KRAS G12R)
LVVVGARGT

SEQ ID NO: 26041 - protein, 9 aa, synthetic construct
  source 1..9: note = Seed: LVVVGARGV (KRAS G12R)
LVVVGARGY

SEQ ID NO: 26042 - protein, 9 aa, synthetic construct
  source 1..9: note = Seed: LVVVGARGV (KRAS G12R)
LVVVGCRGR

SEQ ID NO: 26043 - protein, 9 aa, synthetic construct
  source 1..9: note = Seed: LVVVGARGV (KRAS G12R)
LVVVGFRGI

SEQ ID NO: 26044 - protein, 9 aa, synthetic construct
  source 1..9: note = Seed: LVVVGARGV (KRAS G12R)
LVVVGFRGL

SEQ ID NO: 26045 - protein, 9 aa, synthetic construct
  source 1..9: note = Seed: LVVVGARGV (KRAS G12R)
LVVVGFRGM

SEQ ID NO: 26046 - protein, 9 aa, synthetic construct
  source 1..9: note = Seed: LVVVGARGV (KRAS G12R)
LVVVGFRGR

SEQ ID NO: 26047 - protein, 9 aa, synthetic construct
  source 1..9: note = Seed: LVVVGARGV (KRAS G12R)
LVVVGFRGV

SEQ ID NO: 26048 - protein, 9 aa, synthetic construct
  source 1..9: note = Seed: LVVVGARGV (KRAS G12R)
LVVVGGRGA

SEQ ID NO: 26049 - protein, 9 aa, synthetic construct
  source 1..9: note = Seed: LVVVGARGV (KRAS G12R)
LVVVGGRGC

SEQ ID NO: 26050 - protein, 9 aa, synthetic construct
  source 1..9: note = Seed: LVVVGARGV (KRAS G12R)
LVVVGGRGF

SEQ ID NO: 26051 - protein, 9 aa, synthetic construct
  source 1..9: note = Seed: LVVVGARGV (KRAS G12R)
LVVVGGRGG

SEQ ID NO: 26052 - protein, 9 aa, synthetic construct
  source 1..9: note = Seed: LVVVGARGV (KRAS G12R)
LVVVGGRGI

SEQ ID NO: 26053 - protein, 9 aa, synthetic construct
  source 1..9: note = Seed: LVVVGARGV (KRAS G12R)
LVVVGGRGK

SEQ ID NO: 26054 - protein, 9 aa, synthetic construct
  source 1..9: note = Seed: LVVVGARGV (KRAS G12R)
LVVVGGRGL

SEQ ID NO: 26055 - protein, 9 aa, synthetic construct
  source 1..9: note = Seed: LVVVGARGV (KRAS G12R)
LVVVGGRGM

SEQ ID NO: 26056 - protein, 9 aa, synthetic construct
  source 1..9: note = Seed: LVVVGARGV (KRAS G12R)
LVVVGGRGN

SEQ ID NO: 26057 - protein, 9 aa, synthetic construct
  source 1..9: note = Seed: LVVVGARGV (KRAS G12R)
LVVVGGRGR

SEQ ID NO: 26058 - protein, 9 aa, synthetic construct
  source 1..9: note = Seed: LVVVGARGV (KRAS G12R)
LVVVGGRGS

SEQ ID NO: 26059 - protein, 9 aa, synthetic construct
  source 1..9: note = Seed: LVVVGARGV (KRAS G12R)
LVVVGGRGT

SEQ ID NO: 26060 - protein, 9 aa, synthetic construct
  source 1..9: note = Seed: LVVVGARGV (KRAS G12R)
LVVVGGRGV

SEQ ID NO: 26061 - protein, 9 aa, synthetic construct
  source 1..9: note = Seed: LVVVGARGV (KRAS G12R)
LVVVGGRGY

SEQ ID NO: 26062 - protein, 9 aa, synthetic construct
  source 1..9: note = Seed: LVVVGARGV (KRAS G12R)
LVVVGHRGA

SEQ ID NO: 26063 - protein, 9 aa, synthetic construct
  source 1..9: note = Seed: LVVVGARGV (KRAS G12R)
LVVVGHRGF

SEQ ID NO: 26064 - protein, 9 aa, synthetic construct
  source 1..9: note = Seed: LVVVGARGV (KRAS G12R)
LVVVGHRGG

SEQ ID NO: 26065 - protein, 9 aa, synthetic construct
  source 1..9: note = Seed: LVVVGARGV (KRAS G12R)
LVVVGHRGH

SEQ ID NO: 26066 - protein, 9 aa, synthetic construct
  source 1..9: note = Seed: LVVVGARGV (KRAS G12R)
LVVVGHRGI

SEQ ID NO: 26067 - protein, 9 aa, synthetic construct
  source 1..9: note = Seed: LVVVGARGV (KRAS G12R)
LVVVGHRGK

SEQ ID NO: 26068 - protein, 9 aa, synthetic construct
  source 1..9: note = Seed: LVVVGARGV (KRAS G12R)
LVVVGHRGL

SEQ ID NO: 26069 - protein, 9 aa, synthetic construct
  source 1..9: note = Seed: LVVVGARGV (KRAS G12R)
LVVVGHRGM

SEQ ID NO: 26070 - protein, 9 aa, synthetic construct
  source 1..9: note = Seed: LVVVGARGV (KRAS G12R)
LVVVGHRGN

SEQ ID NO: 26071 - protein, 9 aa, synthetic construct
  source 1..9: note = Seed: LVVVGARGV (KRAS G12R)
LVVVGHRGP

SEQ ID NO: 26072 - protein, 9 aa, synthetic construct
  source 1..9: note = Seed: LVVVGARGV (KRAS G12R)
LVVVGHRGQ

SEQ ID NO: 26073 - protein, 9 aa, synthetic construct
  source 1..9: note = Seed: LVVVGARGV (KRAS G12R)
LVVVGHRGR

SEQ ID NO: 26074 - protein, 9 aa, synthetic construct
  source 1..9: note = Seed: LVVVGARGV (KRAS G12R)
LVVVGHRGS

SEQ ID NO: 26075 - protein, 9 aa, synthetic construct
  source 1..9: note = Seed: LVVVGARGV (KRAS G12R)
LVVVGHRGT

SEQ ID NO: 26076 - protein, 9 aa, synthetic construct
  source 1..9: note = Seed: LVVVGARGV (KRAS G12R)
LVVVGHRGV

SEQ ID NO: 26077 - protein, 9 aa, synthetic construct
  source 1..9: note = Seed: LVVVGARGV (KRAS G12R)
LVVVGHRGW

SEQ ID NO: 26078 - protein, 9 aa, synthetic construct
  source 1..9: note = Seed: LVVVGARGV (KRAS G12R)
LVVVGHRGY

SEQ ID NO: 26079 - protein, 9 aa, synthetic construct
  source 1..9: note = Seed: LVVVGARGV (KRAS G12R)
LVVVGIRGA

SEQ ID NO: 26080 - protein, 9 aa, synthetic construct
  source 1..9: note = Seed: LVVVGARGV (KRAS G12R)
LVVVGIRGF

SEQ ID NO: 26081 - protein, 9 aa, synthetic construct
  source 1..9: note = Seed: LVVVGARGV (KRAS G12R)
LVVVGIRGG

SEQ ID NO: 26082 - protein, 9 aa, synthetic construct
  source 1..9: note = Seed: LVVVGARGV (KRAS G12R)
LVVVGIRGI

SEQ ID NO: 26083 - protein, 9 aa, synthetic construct
  source 1..9: note = Seed: LVVVGARGV (KRAS G12R)
LVVVGIRGK

SEQ ID NO: 26084 - protein, 9 aa, synthetic construct
  source 1..9: note = Seed: LVVVGARGV (KRAS G12R)
LVVVGIRGL

SEQ ID NO: 26085 - protein, 9 aa, synthetic construct
  source 1..9: note = Seed: LVVVGARGV (KRAS G12R)
LVVVGIRGM

SEQ ID NO: 26086 - protein, 9 aa, synthetic construct
  source 1..9: note = Seed: LVVVGARGV (KRAS G12R)
LVVVGIRGQ

SEQ ID NO: 26087 - protein, 9 aa, synthetic construct
  source 1..9: note = Seed: LVVVGARGV (KRAS G12R)
LVVVGIRGR

SEQ ID NO: 26088 - protein, 9 aa, synthetic construct
  source 1..9: note = Seed: LVVVGARGV (KRAS G12R)
LVVVGIRGS

SEQ ID NO: 26089 - protein, 9 aa, synthetic construct
  source 1..9: note = Seed: LVVVGARGV (KRAS G12R)
LVVVGIRGV

SEQ ID NO: 26090 - protein, 9 aa, synthetic construct
  source 1..9: note = Seed: LVVVGARGV (KRAS G12R)
LVVVGIRGY

SEQ ID NO: 26091 - protein, 9 aa, synthetic construct
  source 1..9: note = Seed: LVVVGARGV (KRAS G12R)
LVVVGKRGA

SEQ ID NO: 26092 - protein, 9 aa, synthetic construct
  source 1..9: note = Seed: LVVVGARGV (KRAS G12R)
LVVVGKRGC

SEQ ID NO: 26093 - protein, 9 aa, synthetic construct
  source 1..9: note = Seed: LVVVGARGV (KRAS G12R)
LVVVGKRGE

SEQ ID NO: 26094 - protein, 9 aa, synthetic construct
  source 1..9: note = Seed: LVVVGARGV (KRAS G12R)
LVVVGKRGF

SEQ ID NO: 26095 - protein, 9 aa, synthetic construct
  source 1..9: note = Seed: LVVVGARGV (KRAS G12R)
LVVVGKRGG

SEQ ID NO: 26096 - protein, 9 aa, synthetic construct
  source 1..9: note = Seed: LVVVGARGV (KRAS G12R)
LVVVGKRGH

SEQ ID NO: 26097 - protein, 9 aa, synthetic construct
  source 1..9: note = Seed: LVVVGARGV (KRAS G12R)
LVVVGKRGI

SEQ ID NO: 26098 - protein, 9 aa, synthetic construct
  source 1..9: note = Seed: LVVVGARGV (KRAS G12R)
LVVVGKRGK

SEQ ID NO: 26099 - protein, 9 aa, synthetic construct
  source 1..9: note = Seed: LVVVGARGV (KRAS G12R)
LVVVGKRGL

SEQ ID NO: 26100 - protein, 9 aa, synthetic construct
  source 1..9: note = Seed: LVVVGARGV (KRAS G12R)
LVVVGKRGM

SEQ ID NO: 26101 - protein, 9 aa, synthetic construct
  source 1..9: note = Seed: LVVVGARGV (KRAS G12R)
LVVVGKRGN

SEQ ID NO: 26102 - protein, 9 aa, synthetic construct
  source 1..9: note = Seed: LVVVGARGV (KRAS G12R)
LVVVGKRGP

SEQ ID NO: 26103 - protein, 9 aa, synthetic construct
  source 1..9: note = Seed: LVVVGARGV (KRAS G12R)
LVVVGKRGQ

SEQ ID NO: 26104 - protein, 9 aa, synthetic construct
  source 1..9: note = Seed: LVVVGARGV (KRAS G12R)
LVVVGKRGR

SEQ ID NO: 26105 - protein, 9 aa, synthetic construct
  source 1..9: note = Seed: LVVVGARGV (KRAS G12R)
LVVVGKRGS

SEQ ID NO: 26106 - protein, 9 aa, synthetic construct
  source 1..9: note = Seed: LVVVGARGV (KRAS G12R)
LVVVGKRGT

SEQ ID NO: 26107 - protein, 9 aa, synthetic construct
  source 1..9: note = Seed: LVVVGARGV (KRAS G12R)
LVVVGKRGV

SEQ ID NO: 26108 - protein, 9 aa, synthetic construct
  source 1..9: note = Seed: LVVVGARGV (KRAS G12R)
LVVVGKRGW

(The sequence listing continues in the following parts.)
